(19) United States
(12) Patent Application Publication
(10) Pub. No.: US 2021/0180091 A1
(43) Pub. Date: Jun. 17, 2021

(54) MATERIALS AND METHODS FOR TREATMENT OF HEMOGLOBINOPATHIES

(71) Applicant: Vertex Pharmaceuticals Incorporated, Boston, MA (US)

(72) Inventors: Tirtha Chakraborty, Cambridge, MA (US); Bibhu Prasad Mishra, Cambridge, MA (US); Chad Albert Cowan, Cambridge, MA (US); Ante Sven Lundberg, Cambridge, MA (US); Samarth Kulkarni, Cambridge, MA (US); Todd Douglass Borland, Cambridge, MA (US)

(73) Assignee: Vertex Pharmaceuticals Incorporated, Boston, MA (US)

(21) Appl. No.: 16/758,990

(22) PCT Filed: Oct. 26, 2018
(86) PCT No.: PCT/IB2018/001338

§ 371 Date: Apr. 24, 2020

Related U.S. Application Data
(60) Provisional application No. 62/583,146, filed on Nov. 8, 2017.
(60) Provisional application No. 62/577,434, filed on Oct. 26, 2017.

(51) Int. Cl. C12N 15/90; A61K 35/28; C12N 5/074; A61K 38/19; A61K 31/395; A61K 38/46; A61K 31/70; A61K 9/51; C12N 15/11

(52) U.S. Cl. CPC C12N 15/907; A61K 2035/124; C12N 5/0696; A61K 38/193; A61K 31/395; A61K 38/465; A61K 31/70; A61K 9/5123; C12N 15/11; C12N 2310/20; C12N 2800/80; C12N 2506/27; C12N 2510/00; C12N 2506/1353; A61K 35/28

(57) ABSTRACT

Provided are materials and methods for treating patients with hemoglobinopathies, either ex vivo or in vivo. Also provided are materials and methods for deleting and/or mutating a portion of a human beta globin locus on chromosome 11 and one or more of: a BCL11 A gene on chromosome 2, and a DNA sequence that encodes a transcriptional control region of the BCL11 A gene on chromosome 2, in a human cell by genome editing and thereby increasing the production of fetal hemoglobin (HbF) in the genome-edited human cells.

### CROSS-REFERENCE TO RELATED APPLICATIONS

[0001] The present application claims priority to U.S. Provisional Application No. 62/577,434, filed on Oct. 26, 2017 and U.S. Provisional Application No. 62/583,146, filed on Nov. 8, 2017, the contents of each of which are incorporated by reference herein in their entirety.

### FIELD

[0002] The present application provides materials and methods for treating patients with hemoglobinopathies, both ex vivo and in vivo. In addition, the present application provides materials and methods for deleting and/or mutating a portion of a human beta globin locus on chromosome 11 and one or more of: a BCL11A gene on chromosome 2, and a DNA sequence that encodes a transcriptional control region of the BCL11A gene on chromosome 2, in a human cell by genome editing and thereby increasing the production of fetal hemoglobin (HbF) in the genome-edited human cells.

### INCORPORATION BY REFERENCE OF SEQUENCE LISTING

[0003] This application contains a Sequence Listing which has been filed electronically in ASCII format and is hereby incorporated by reference in its entirety. Said ASCII copy, created on Oct. 25, 2018, is named C154270030WO00-SEQ-AM.txt and is 68,353,330 bytes in size.

### BACKGROUND

[0004] Hemoglobinopathies encompass a number of anemias that are associated with changes in the genetically determined structure or expression of hemoglobin. These include changes to the molecular structure of the hemoglobin chain, such as occur with sickle cell anemia, as well as changes in which synthesis of one or more chains is reduced or absent, such as occur in various thalassemias.

[0005] A potential treatment for patients diagnosed with hemoglobinopathies includes genome engineering. Genome engineering refers to the strategies and techniques for the targeted, specific modification of the genetic information of living organisms. Genome engineering is a very active field of research because of the wide range of possible applications, particularly in the areas of human health. Early genome engineering technologies developed to insert a transgene into a living cell were often limited by the random nature of the insertion of the new sequence into the genome. Random insertions into the genome can result in disrupting normal regulation of neighboring genes leading to severe unwanted effects. Furthermore, random integration technologies offer little reproducibility, as there is no guarantee that the sequence would be inserted at the same place in two different cells.

[0006] Recent genome engineering strategies, such as Zinc finger nucleases (ZFNs), Transcription Activator-Like Effector Nucleases (TALENs), Homing endonucleases (HEs) and MegaTALs, enable a specific area of the DNA to be modified, thereby increasing the precision of the correction or insertion compared to early technologies. These newer platforms offer a much larger degree of reproducibility, but still have their limitations.

[0007] Despite efforts from researchers and medical professionals worldwide who have been trying to address hemoglobinopathies, such as β-thalassemia and sickle cell disease, and despite the promise of gene therapy approaches, there still remains a critical need for developing safe and effective treatments for hemoglobinopathies.

### SUMMARY

[0008] The present disclosure presents an approach to address the genetic basis of hemoglobinopathies. By using genome engineering tools to create permanent changes to the genome that can delete and/or mutate the human beta globin locus on chromosome 11 and BCL11A gene on chromsome 2, or a DNA sequence that encodes a transcriptional control region of the BCL11A gene on chromosome 2, with as few as a single treatment, the resulting therapy may ameliorate the effects of hemoglobinopathies.

[0009] Provided herein are cellular, ex vivo and in vivo methods to create permanent changes to the genome by deleting or mutating the human beta globin locus on chromosome 11 and BCL11A gene on chromsome 2, or a DNA sequence that encodes a transcriptional control region of the BCL11A gene on chromosome 2, which can be used to treat hemoglobinopathies. Also provided herein are components, kits, and compositions for performing such methods. Also provided are cells produced by such methods.

[0010] Provided herein is a method of increasing fetal hemoglobin (HbF) in a human cell by genome editing, the method comprises the step of introducing into the human cell one or more deoxyribonucleic acid (DNA) endonuclease to effect two or more single-strand break (SSB) or double-strand break (DSB). A first SSB or DSB can be within or near a human beta globin locus on chromosome 11. A second SSB or DSB can be within or near one or more of: a BCL11A gene on chromosome 2, and a DNA sequence that encodes a transcriptional control region of the BCL11A gene on chromosome 2. The first SSB or DSB can result in one or more of: a permanent deletion or inversion within or near the human beta globin locus on chromosome 11, and a mutation within or near the human beta globin locus on chromosome 11. The second SSB or DSB can result in one or more of: a permanent deletion or inversion within or near the BCL11A gene on chromosome 2, a mutation within or near the BCL11A gene on chromosome 2, a permanent deletion or inversion within or near the DNA sequence that encodes a transcriptional control region of the BCL11A gene on chromosome 2, and a mutation within or near the DNA sequence that encodes a transcriptional control region of the BCL11A gene on chromosome 2. The two or more permanent deletion, inversion, or mutation can result in an increased expression of γ-globin and an increase of HbF in the human cell.

[0011] The permanent deletion within or near the human beta globin locus on chromosome 11 can be a hereditary persistence of fetal hemoglobin (HPFH) deletion. The HPFH deletion can be selected from the group consisting of: a HPFH-4 deletion, a HPFH-5 deletion, a HPFH-Kenya deletion, a HPFH-Black deletion, a large Corfu deletion, a small Corfu deletion, a small deletion, and combinations thereof. The HPFH deletion can be a 7.2 Kb deletion. The HPFH deletion can be a 3.5 Kb deletion. The HPFH deletion can be a 12.9 Kb deletion. The HPFH deletion can be a 22 Kb deletion. The HPFH deletion can be a 13 bp deletion.

[0012] The HPFH deletion can be located downstream of a HBG1 gene and can result in a repositioning of a BCL11A enhancing region closer to the HBG1 gene. The HPFH deletion can be located downstream of a HBG2 gene and can result in a repositioning of a BCL11A enhancing region closer to the HBG2 gene. The HPFH deletion can be located downstream of a HBG1 gene and HBG2 gene and can result in a repositioning of a BCL11A enhancing region closer to the HBG1 gene and HBG2 gene. The HPFH deletion can include all or a portion of a β-globin gene. The HPFH deletion can include all or a portion of a δ-globin gene and all or a portion of a β-globin gene. The permanent deletion within or near the human beta globin locus on chromosome 11 can be in a region of the human beta globin locus comprising a HBG1 gene and a HBG2 gene.

[0013] The permanent deletion within or near the human beta globin locus on chromosome 11 can be a 13-base pair deletion located upstream of the HBG1 gene. The permanent deletion within or near the human beta globin locus on chromosome 11 can be a 4.9 Kb deletion located upstream of the HBG1 gene. The permanent deletion within or near the human beta globin locus on chromosome 11 can be a 13-base pair deletion located upstream of the HGB1 gene and a 4.9 Kb deletion located upstream of the HBG1 gene. The 4.9 Kb deletion can include the HBG2 gene. The DNA sequence that encodes a transcriptional control region of the BCL11A gene can be located within a second intron of the BCL11A gene on chromosome 2. The DNA sequence that encodes a transcriptional control region of the BCL11A gene can be located within a +58 DNA hypersensitive site (DHS) of the BCL11A gene on chromosome 2.

[0014] The one or more DNA endonuclease can be selected from the group consisting of a zinc finger nuclease, TAL effector nuclease, meganuclease, MegaTAL, Tev-m TALEN, MegaTev, homing endonuclease, FokI, StsI, Cas1, Cas1B, Cas2, Cas3, Cas4, Cas5, Cas6, Cas7, Cas8, Cas9 (also known as Csn1 and Csx12), Cas100, Csy1, Csy2, Csy3, Cse1, Cse2, Csc1, Csc2, Csa5, Csn2, Csm2, Csm3, Csm4, Csm5, Csm6, Cmr1, Cmr3, Cmr4, Cmr5, Cmr6, Csb1, Csb2, Csb3, Csx17, Csx14, Csx10, Csx16, CsaX, Csx3, Csx1, Csx15, Csf1, Csf2, Csf3, Csf4, or Cpf1 endonuclease, a homolog thereof, a recombination of the naturally occurring molecule thereof, a codon-optimized thereof, modified versions thereof, and combinations thereof.

[0015] One or more guide ribonucleic acid (gRNA) can be introduced into the human cell. The one or more gRNA can be one or more single-molecule guide RNA (sgRNA).

[0016] The one or more gRNA can be a concatenated gRNA comprising a first gRNA and a second gRNA. The first gRNA and second gRNA can be attached via a linker. The linker can be a chemical linker or one or more nucleotides. The first gRNA can comprise a spacer sequence that is complementary to a segment of the human beta globin locus on chromosome 11, the BCL11A gene on chromosome 2, or the DNA sequence that encodes a transcriptional control region of the BCL11A gene on chromosome 2. The second gRNA can comprise a spacer sequence that is complementary to a segment of the human beta globin locus on chromosome 11, the BCL11A gene on chromosome 2, or the DNA sequence that encodes a transcriptional control region of the BCL11A gene on chromosome 2.

[0017] The one or more gRNA can be a concatenated gRNA comprising a first gRNA, a second gRNA, and a third gRNA. The first gRNA and second gRNA are attached via a first linker and the second gRNA and third gRNA are attached via a second linker. The first linker and second linker can be chemical linkers or one or more nucleotides. The first gRNA can comprise a spacer sequence that is complementary to a segment of the human beta globin locus on chromosome 11, the BCL11A gene on chromosome 2, or the DNA sequence that encodes a transcriptional control region of the BCL11A gene on chromosome 2. The second gRNA can comprise a spacer sequence that is complementary to a segment of the human beta globin locus on chromosome 11, the BCL11A gene on chromosome 2, or the DNA sequence that encodes a transcriptional control region of the BCL11A gene on chromosome 2. The third gRNA can comprise a spacer sequence that is complementary to a segment of a human beta globin locus on chromosome 11, the BCL11A gene on chromosome 2, or the DNA sequence that encodes a transcriptional control region of the BCL11A gene on chromosome 2.

[0018] The increase of fetal hemoglobin (HbF) in the genome-edited human cells can be compared to HbF levels in wild-type human cells.

[0019] Also provided herein is an ex vivo method for treating a patient (e.g., a human) with a hemoglobinopathy, the method comprises: creating a patient specific induced pluripotent stem cell (iPSC); editing within or near a human beta globin locus on chromosome 11 and one or more of: a BCL11A gene on chromosome 2 and a DNA sequence that encodes a transcriptional control region of the BCL11A gene on chromosome 2 of the iPSC; differentiating the genome-edited iPSC into a hematopoietic progenitor cell; and implanting the hematopoietic progenitor cell into the patient.

[0020] The step of creating a patient specific iPSC can comprise: isolating a somatic cell from the patient; and introducing a set of pluripotency-associated genes into the somatic cell to induce the somatic cell to become a pluripotent stem cell. The somatic cell can be a fibroblast. The set of pluripotency-associated genes can be one or more of the genes selected from the group consisting of OCT4, SOX2, KLF4, Lin28, NANOG and cMYC.

[0021] The step of editing within or near a human beta globin locus on chromosome 11, and within or near one or more of: a BCL11A gene on chromosome 2, and a DNA sequence that encodes a transcriptional control region of the BCL11A gene on chromosome 2 can comprise: introducing into the iPSC one or more DNA endonuclease to effect two or more SSB or DSB, a first SSB or DSB within or near a human beta globin locus on chromosome 11, and a second SSB or DSB within or near one or more of: a BCL11A gene on chromosome 2, and a DNA sequence that encodes a transcriptional control region of the BCL11A gene on chromosome 2. The first SSB or DSB can result in one or more of: a permanent deletion or inversion within or near the human beta globin locus on chromosome 11, and a mutation within or near the human beta globin locus on chromosome 11. The second SSB or DSB can result in one or more of: a permanent deletion or inversion within or near the BCL11A gene on chromosome 2, a mutation within or near the BCL11A gene on chromosome 2, a permanent deletion or inversion within or near the DNA sequence that encodes a transcriptional control region of the BCL11A gene on chromosome 2, and a mutation within or near the DNA sequence that encodes a transcriptional control region of the BCL11A gene on chromosome 2. The two permanent deletion, inversion, or mutation can result in an increased expression of γ-globin and an increase of HbF in the iPSC.

[0022] The step of differentiating the genome-edited iPSC into a hematopoietic progenitor cell can comprise: treatment with a combination of small molecules, delivery of master transcription factors, delivery of mRNA encoding master transcription factors, and delivery of mRNA encoding transcription factors.

[0023] The step of implanting the hematopoietic progenitor cell into the patient can comprise implanting the hematopoietic progenitor cell by transplantation, local injection, systemic infusion, and combinations thereof.

[0024] Also provided herein is an ex vivo method for treating a patient (e.g., a human) with a hemoglobinopathy, the method comprising the steps of: isolating a mesenchymal stem cell from the patient; editing within or near a human beta globin locus on chromosome 11 and one or more of: a BCL11A gene on chromosome 2, and a DNA sequence that encodes a transcriptional control region of the BCL11A gene on chromosome 2 of the mesenchymal stem cell; differentiating the genome-edited mesenchymal stem cell into a hematopoietic progenitor cell; and implanting the hematopoietic progenitor cell into the patient.

[0025] The mesenchymal stem cell can be isolated from the patient's bone marrow by performing a biopsy of the patient's bone marrow or the mesenchymal stem cell can be isolated from peripheral blood. The step of isolating a mesenchymal stem cell from the patient can comprise aspiration of bone marrow and isolation of mesenchymal cells by density gradient centrifugation.

[0026] The step of editing within or near a human beta globin locus on chromosome 11, and within or near one or more of: a BCL11A gene on chromosome 2, and a DNA sequence that encodes a transcriptional control region of the BCL11A gene on chromosome 2 can comprise: introducing into the mesenchymal stem cell one or more DNA endonuclease to effect two or more SSB or DSB, a first SSB or DSB within or near a human beta globin locus on chromosome 11, and a second SSB or DSB within or near one or more of: a BCL11A gene on chromosome 2 and a DNA sequence that encodes a transcriptional control region of the BCL11A gene on chromosome 2. The first SSB or DSB can result in one or more of: a permanent deletion or inversion within or near the human beta globin locus on chromosome 11, and a mutation within or near the human beta globin locus on chromosome 11. The second SSB or DSB can result in one or more of: a permanent deletion or inversion within or near the BCL11A gene on chromosome 2, a mutation within or near the BCL11A gene on chromosome 2, a permanent deletion or inversion within or near the DNA sequence that encodes a transcriptional control region of the BCL11A gene on chromosome 2, and a mutation within or near the DNA sequence that encodes a transcriptional control region of the BCL11A gene on chromosome 2. The two or more permanent deletion, inversion, or mutation can result in an increased expression of γ-globin and an increase of fetal hemoglobin (HbF) in the mesenchymal stem cell.

[0027] The step of differentiating the genome-edited mesenchymal stem cell into a hematopoietic progenitor cell can comprise one or more of the following: treatment with a combination of small molecules, delivery of master transcription factors, delivery of mRNA encoding master transcription factors, and delivery of mRNA encoding transcription factors.

[0028] The step of implanting the hematopoietic progenitor cell into the patient can comprise implanting the hematopoietic progenitor cell into the patient by transplantation, local injection, systemic infusion, or combinations thereof.

[0029] Also provided herein is an ex vivo method for treating a patient (e.g., a human) with a hemoglobinopathy, the method comprising the steps of: isolating a hematopoietic progenitor cell from the patient; editing within or near a human beta globin locus on chromosome 11 and one or more of: a BCL11A gene on chromosome 2 and a DNA sequence that encodes a transcriptional control region of the BCL11A gene on chromosome 2 of the hematopoietic progenitor cell; and implanting the genome-edited hematopoietic progenitor cell into the patient.

[0030] The method can further comprise treating the patient with granulocyte colony stimulating factor (GCSF) prior to the step of isolating a hematopoietic progenitor cell from the patient. The step of treating the patient with GCSF can be performed in combination with Plerixaflor.

[0031] The step of isolating a hematopoietic progenitor cell from the patient can comprise isolating CD34+ cells.

[0032] The step of editing within or near a human beta globin locus on chromosome 11, and within or near one or more of: a BCL11A gene on chromosome 2, and a DNA sequence that encodes a transcriptional control region of the BCL11A gene on chromosome 2 can comprise: introducing into the hematopoietic progenitor cell one or more DNA endonuclease to effect two or more SSB or DSB, a first SSB or DSB within or near a human beta globin locus on chromosome 11, and a second SSB or DSB within or near one or more of: a BCL11A gene on chromosome 2 and a DNA sequence that encodes a transcriptional control region of the BCL11A gene on chromosome 2. The first SSB or DSB can result in one or more of: a permanent deletion within or near the human beta globin locus on chromosome 11, and a mutation within or near the human beta globin locus on chromosome 11. The second SSB or DSB can result in one or more of: a permanent deletion within or near the BCL11A gene on chromosome 2, a mutation within or near the BCL11A gene on chromosome 2, a permanent deletion within or near the DNA sequence that encodes a transcriptional control region of the BCL11A gene on chromosome 2, and a mutation within or near the DNA sequence that encodes a transcriptional control region of the BCL11A gene on chromosome 2. The two or more permanent deletion, inversion, or mutation can result in an increased expression of γ-globin and a increase of fetal hemoglobin (HbF) in the hematopoietic progenitor cell.

[0033] The step of implanting the genome-edited hematopoietic progenitor cell into the patient can comprise implanting the genome-edited hematopoietic progenitor cell into the patient by transplantation, local injection, systemic infusion, or combinations thereof.

[0034] The hemoglobinopathy can be selected from a group consisting of sickle cell anemia and thalassemia. The hemoglobinopathy can be selected from the group consisting of sickle cell disease, sickle cell trait, hemoglobin C disease, hemoglobin C trait, hemoglobin S/C disease, hemoglobin D disease, hemoglobin E disease, a thalassemia, a condition associated with hemoglobin with increased oxygen affinity, a condition associated with hemoglobin with decreased oxygen affinity, unstable hemoglobin disease, methemoglobinemia, and combinations thereof.

[0035] Also provided herein is an in vivo method for treating a patient (e.g., a human) with a hemoglobinopathy, the method comprising the steps of: editing within or near a human beta globin locus on chromosome 11 and within or near one or more of: a BCL11A gene on chromosome 2, and a DNA sequence that encodes a transcriptional control region of the BCL11A gene on chromosome 2 in a cell of the patient. The cell can a bone marrow cell, a hematopoietic progenitor cell, or a CD34+ cell.

[0036] The step of editing within or near a human beta globin locus on chromosome 11, and within or near one or more of: a BCL11A gene on chromosome 2, and a DNA sequence that encodes a transcriptional control region of the BCL11A gene on chromosome 2 can comprise: introducing into the cell one or more DNA endonuclease to effect two or more SSB or DSB, a first SSB or DSB within or near a human beta globin locus on chromosome 11, and a second SSB or DSB within or near one or more of: a BCL11A gene on chromosome 2, and a DNA sequence that encodes a transcriptional control region of the BCL11A gene on chromosome 2. The first SSB or DSB can result in one or more of: a permanent deletion or inversion within or near the human beta globin locus on chromosome 11, and a mutation within or near the human beta globin locus on chromosome 11. The second SSB or DSB can result in one or more of: a permanent deletion or inversion within or near the BCL11A gene on chromosome 2, a mutation within or near the BCL11A gene on chromosome 2, a permanent deletion or inversion within or near the DNA sequence that encodes a transcriptional control region of the BCL11A gene on chromosome 2, and a mutation within or near the DNA sequence that encodes a transcriptional control region of the BCL11A gene on chromosome 2. The two or more permanent deletion, inversion, or mutation result in an increased expression of γ-globin and a increase of fetal hemoglobin (HbF) in the cell.

[0037] The one or more DNA endonuclease is selected from the group consisting of a zinc finger nuclease, TAL effector nuclease, meganuclease, MegaTAL, Tev-m TALEN, MegaTev, homing endonuclease, FokI, StsI, Cas1, Cas1B, Cas2, Cas3, Cas4, Cas5, Cas6, Cas7, Cas8, Cas9 (also known as Csn1 and Csx12), Cas100, Csy1, Csy2, Csy3, Cse1, Cse2, Csc1, Csc2, Csa5, Csn2, Csm2, Csm3, Csm4, Csm5, Csm6, Cmr1, Cmr3, Cmr4, Cmr5, Cmr6, Csb1, Csb2, Csb3, Csx17, Csx14, Csx10, Csx16, CsaX, Csx3, Csx1, Csx15, Csf1, Csf2, Csf3, Csf4, or Cpf1 endonuclease, a homolog thereof, a recombination of the naturally occurring molecule thereof, a codon-optimized thereof, modified versions thereof, and combinations thereof.

[0038] The method can comprise introducing into the cell one or more polynucleotide encoding the one or more DNA endonuclease. The method can comprise introducing into the cell one or more RNA encoding the one or more DNA endonuclease. The one or more polynucleotide or one or more RNA can be one or more modified polynucleotide or one or more modified RNA. The DNA endonuclease can be a protein or polypeptide.

[0039] The method can further comprise introducing into the cell one or more gRNA. The one or more gRNA can be sgRNA. The one or more gRNA or one or more sgRNA can be one or more modified gRNA, one or more modified sgRNA, or combinations thereof. The one or more DNA endonuclease can be pre-complexed with one or more gRNA, one or more sgRNA, or combinations thereof.

[0040] The method can further comprise: introducing into the cell one or more gRNA or one or more concatenated gRNA, and wherein the one or more DNA endonuclease is one or more Cas9 endonuclease that effect or create two or more pair of SSBs or DSBs, a first pair of SSB or DSB within or near a human beta globin locus on chromosome 11, and a second pair of SSB or DSB within or near one or more of: a BCL11A gene on chromosome 2 and a DNA sequence that encodes a transcriptional control region of the BCL11A gene on chromosome 2. The first pair of SSB or DSB can be a SSB or DSB at a 5′ locus within or near the human beta globin locus on chromosome 11; and a SSB or DSB at a 3′ locus within or near of the human beta globin locus on chromosome 11. The second pair of SSB or DSB can be a SSB or DSB at the 5′ locus within or near the BCL11A gene on chromosome 2, or the DNA sequence that encodes a transcriptional control region of the BCL11A gene on chromosome 2; and a SSB or DSB at the 3′ locus within or near the BCL11A gene on chromosome 2, or the DNA sequence that encodes a transcriptional control region of the BCL11A gene on chromosome 2. The SSB or DSB at the 5′ locus and the SSB or DSB at the 3′ locus can result in two or more permanent deletion of the chromosomal DNA between the 5′ locus and the 3′ locus within or near the human beta globin locus on chromosome 11, the BCL11A gene on chromosome 2, or the DNA sequence that encodes a transcriptional control region of the BCL11A gene on chromosome 2.

[0041] The SSB or DSB at the 5′ locus within or near the human beta globin locus on chromosome 11 can be proximal to a 5′ boundary of a HPFH deletion. The SSB or DSB at the 5′ locus within or near the human beta globin locus on chromosome 11 can be proximal to a 5′ boundary of a HPFH deletion selected from the group consisting of: a HPFH-4 deletion, a HPFH-5 deletion, a HPFH-Kenya deletion, a HPFH-Black deletion, a large Corfu deletion, a small deletion, and the small Corfu deletion.

[0042] The SSB or DSB at the 3′locus within or near the human beta globin locus on chromosome 11 can be proximal to a 3′ boundary of a HPFH deletion.

[0043] The SSB or DSB at the 3′ locus within or near the human beta globin locus on chromosome 11 can be proximal to a 3′ boundary of a HPFH deletion selected from the group consisting of: a HPFH-4 deletion, a HPFH-5 deletion, a HPFH-Kenya deletion, a HPFH-Black deletion, the large Corfu deletion, and a small Corfu deletion.

[0044] The SSB or DSB at the 5′ locus within or near the human beta globin locus on chromosome 11 can be proximal to a 5′ boundary of a HPFH deletion and the SSB or DSB at the 3′ locus within or near the human beta globin locus on chromosome 11 can be proximal to a 3′ boundary of the HPFH deletion.

[0045] The SSB or DSB at the 5′ locus within or near the human beta globin locus on chromosome 11 is proximal to a 5′ boundary of a HPFH deletion and the SSB or DSB at the 3′ locus within or near the human beta globin locus on chromosome 11 can be proximal to a 3′ boundary of the HPFH deletion, wherein the HPFH deletion can be selected from the group consisting of: a HPFH-4 deletion, a HPFH-5 deletion, a HPFH-Kenya deletion, a HPFH-Black deletion, a large Corfu deletion, and a small Corfu deletion.

[0046] A 3′ boundary of the deletion can be proximal to Chr11:5224779 and a 5′ boundary of the deletion can be proximal to Chr11:5237723.

[0047] A 3′ boundary of the deletion can be proximal to Chr11:5234665 and a 5′ boundary of the deletion can be proximal to Chr11:5238138.

[0048] A 3′ boundary of the deletion can be proximal to Chr11:5233055 and a 5′ boundary of the deletion can be proximal to Chr11:5240389.

[0049] A 3′ boundary of the deletion can be proximal to Chr11:5226631 and a 5′ boundary of the deletion can be proximal to Chr11:5249422.

[0050] A 3′ boundary of the deletion can be proximal to Chr11:5196709 and a 5′ boundary of the deletion can be proximal to Chr11:5239223.

[0051] A 3′ boundary of the deletion can be proximal to Chr11:5225700 and a 5′ boundary of the deletion can be proximal to Chr11:5236750.

[0052] The deletion can include all or a portion of the 8-globin upstream region. The deletion can include all or a portion of the β-globin gene.

[0053] The permanent deletion of the chromosomal DNA between the 5′ locus and the 3′ locus can be in a region of the human beta globin locus comprising a HBG1 gene and a HBG2 gene. The permanent deletion of the chromosomal DNA between the 5′ locus and the 3′ locus can be a 13-base pair deletion located upstream of the HBG1 gene. The permanent deletion of the chromosomal DNA between the 5′ locus and the 3′ locus can be a 4.9 Kb deletion located upstream of the HBG1 gene. The permanent deletion of the chromosomal DNA between the 5′ locus and the 3′ locus can be a 13-base pair deletion located upstream of the HBG1 gene and a 4.9 Kb deletion located upstream of the HBG1 gene.

[0054] The permanent deletion of the chromosomal DNA between the 5′ locus and the 3′ locus can be located within a second intron of the BCL11A gene on chromosome 2. The permanent deletion of the chromosomal DNA between the 5′ locus and the 3′ locus can be located within a +58 DNA DHS of the BCL11A gene on chromosome 2.

[0055] The one or more DNA endonuclease can be selected from the group consisting of a zinc finger nuclease, TAL effector nuclease, meganuclease, MegaTAL, Tev-m TALEN, MegaTev, homing endonuclease, FokI, StsI, Cas1, Cas1B, Cas2, Cas3, Cas4, Cas5, Cas6, Cas7, Cas8, Cas9 (also known as Csn1 and Csx12), Cas100, Csy1, Csy2, Csy3, Cse1, Cse2, Csc1, Csc2, Csa5, Csn2, Csm2, Csm3, Csm4, Csm5, Csm6, Cmr1, Cmr3, Cmr4, Cmr5, Cmr6, Csb1, Csb2, Csb3, Csx17, Csx14, Csx10, Csx16, CsaX, Csx3, Csx1, Csx15, Csf1, Csf2, Csf3, Csf4, or Cpf1 endonuclease, a homolog thereof, a recombination of the naturally occurring molecule thereof, a codon-optimized thereof, modified versions thereof, and combinations thereof.

[0056] The one or more gRNA or the one or more concatenated gRNA can comprise a spacer sequence that is complementary to either the 5′ locus of the human beta globin locus on chromosome 11, 5′ locus of the BCL11A gene on chromosome 2, 5′ locus of the DNA sequence that encodes a transcriptional control region of the BCL11A gene on chromosome 2, 3′ locus of the human beta globin locus on chromosome 11, 3′ locus of the BCL11A gene on chromosome 2, or the 3′ locus of the DNA sequence that encodes a transcriptional control region of the BCL11A gene on chromosome 2.

[0057] The one or more gRNA or the one or more concatenated gRNA can be one or more sgRNA or one or more concatenated sgRNA. The one or more gRNA or one or more concatenated gRNA can comprise one or more modified gRNA. The one or more sgRNA or one or more concatenated sgRNA can comprise one or more modified sgRNA. The one or more DNA endonuclease can be pre-complexed with one or more gRNA, one or more sgRNA, one or more concatenated gRNA, or one or more concatenated sgRNA.

[0058] The Cas9 mRNA, and gRNA or concatenated gRNA, can be either each formulated into separate lipid nanoparticles or all co-formulated into a lipid nanoparticle. The Cas9 mRNA can be formulated into a lipid nanoparticle, and the gRNA or concatenated gRNA can be delivered to the cell by an adeno-associated virus (AAV) vector. The Cas9 mRNA can be formulated into a lipid nanoparticle and the gRNA or concatenated gRNA can be delivered to the cell by electroporation.

[0059] The increase of HbF in the genome-edited human cells can be compared to HbF levels in wild-type human cells.

[0060] The hemoglobinopathy can be selected from a group consisting of sickle cell anemia and thalassemia. The hemoglobinopathy can be selected from the group consisting of sickle cell disease, sickle cell trait, hemoglobin C disease, hemoglobin C trait, hemoglobin S/C disease, hemoglobin D disease, hemoglobin E disease, a thalassemia, a condition associated with hemoglobin with increased oxygen affinity, a condition associated with hemoglobin with decreased oxygen affinity, unstable hemoglobin disease, methemoglobinemia, and combinations thereof.

[0061] Also provided herein is one or more gRNA for editing within or near a human beta globin locus on chromosome 11 and within or near one or more of: a BCL11A gene on chromosome 2, and a DNA sequence that encodes a transcriptional control region of the BCL11A gene on chromosome 2, in a cell from a patient with a hemoglobinopathy. The one or more gRNA can comprise a spacer sequence selected from a Sequence Listing disclosed herein. The one or more gRNA can be one or more sgRNA. The one or more gRNA or one or more sgRNA can be one or more modified gRNA or one or more modified sgRNA.

[0062] Also provided herein is a concatenated gRNA for editing within or near a human beta globin locus on chromosome 11 and within or near one or more of: a BCL11A gene on chromosome 2 and a DNA sequence that encodes a transcriptional control region of the BCL11A gene on chromosome 2, in a cell from a patient with a hemoglobinopathy. The concatenated gRNA can comprise one or more gRNA and the one or more gRNA comprise a spacer sequence selected from a Sequence Listing disclosed herein. The one or more gRNA of the concatenated gRNA can be one or more single-molecule guide RNA (sgRNA). The one or more gRNA or one or more sgRNA of the concatenated gRNA is one or more modified gRNA or one or more modified sgRNA.

[0063] The hemoglobinopathy can be selected from a group consisting of sickle cell anemia and thalassemia.

[0064] Also provided herein is a method of increasing fetal hemoglobin (HbF) in a human cell by genome editing. The method comprises: introducing a first guide RNA into the human cell using a first electroporation wherein the first guide RNA targets a human beta globin locus on chromosome 11; introducing a second guide RNA into the human cell using a second electroporation wherein the second guide RNA targets one or more of: a BCL11A gene on chromosome 2, and a DNA sequence that encodes a transcriptional control region of the BCL11A gene on chromosome 2; wherein two or more permanent deletion, inversion, or mutation result in an increased expression of γ-globin and an increase of fetal hemoglobin (HbF) in the human cell.

[0065] Also provided herein is a method of increasing fetal hemoglobin (HbF) in a human cell by genome editing. The method comprises: introducing a first guide RNA into the human cell using a first electroporation wherein the first guide RNA targets one or more of: a BCL11A gene on chromosome 2, and a DNA sequence that encodes a transcriptional control region of the BCL11A gene on chromosome 2; introducing a second guide RNA into the human cell using a second electroporation wherein the second guide RNA targets a human beta globin locus on chromosome 11; wherein two or more permanent deletion, inversion, or mutation result in an increased expression of γ-globin and an increase of fetal hemoglobin (HbF) in the human cell.

[0066] Also provided herein is a method of increasing fetal hemoglobin (HbF) in a human cell by genome editing. The method comprises: introducing a first guide RNA into the human cell using a first electroporation wherein the first guide RNA targets a human beta globin locus on chromosome 11; introducing a second guide RNA into the human cell using a second electroporation wherein the second guide RNA targets the human beta globin locus on chromosome 11; wherein two or more permanent deletion, inversion, or mutation result in an increased expression of γ-globin and an increase of fetal hemoglobin (HbF) in the human cell.

[0067] Also provided herein is a method of increasing fetal hemoglobin (HbF) in a human cell by genome editing. The method comprises: introducing a first guide RNA into the human cell using a first electroporation wherein the first guide RNA targets one or more of: a BCL11A gene on chromosome 2, and a DNA sequence that encodes a transcriptional control region of the BCL11A gene on chromosome 2; introducing a second guide RNA into the human cell using a second electroporation wherein the second guide RNA targets one or more of: a BCL11A gene on chromosome 2, and a DNA sequence that encodes a transcriptional control region of the BCL11A gene on chromosome 2; wherein two or more permanent deletion, inversion, or mutation result in an increased expression of γ-globin and an increase of fetal hemoglobin (HbF) in the human cell.

[0068] Also provided herein is a method of increasing fetal hemoglobin (HbF) in a human cell by genome editing. The method comprises: introducing a first guide RNA into the human cell using a first electroporation wherein the first guide RNA targets a human beta globin locus on chromosome 11; introducing one or more deoxyribonucleic acid (DNA) endonuclease into the human cell to effect one or more single-strand break (SSB) or double-strand break (DSB), a first SSB or DSB within or near the human beta globin locus on chromosome 11, wherein the first SSB or DSB results in one or more of: a permanent deletion or inversion within or near the human beta globin locus on chromosome 11, and a mutation within or near the human beta globin locus on chromosome 11; introducing a second guide RNA into the human cell using a second electroporation wherein the second guide RNA targets one or more of: a BCL11A gene on chromosome 2, and a DNA sequence that encodes a transcriptional control region of the BCL11A gene on chromosome 2; introducing one or more DNA endonuclease into the human cell to effect one or more SSB or DSB, a second SSB or DSB within or near one or more of: the BCL11A gene on chromosome 2, and the DNA sequence that encodes a transcriptional control region of the BCL11A gene on chromosome 2, wherein the second SSB or DSB results in one or more of: a permanent deletion or inversion within or near the BCL11A gene on chromosome 2, a mutation within or near the BCL11A gene on chromosome 2, a permanent deletion or inversion within or near the DNA sequence that encodes a transcriptional control region of the BCL11A gene on chromosome 2, and a mutation within or near the DNA sequence that encodes a transcriptional control region of the BCL11A gene on chromosome 2; wherein the two or more permanent deletion, inversion, or mutation results in an increased expression of γ-globin and an increase of fetal hemoglobin (HbF) in the human cell.

[0069] Also provided herein is a method of increasing fetal hemoglobin (HbF) in a human cell by genome editing. The method comprises: introducing a first guide RNA into the human cell using a first electroporation wherein the first guide RNA targets one or more of: a BCL11A gene on chromosome 2, and a DNA sequence that encodes a transcriptional control region of the BCL11A gene on chromosome 2; introducing into the human cell one or more deoxyribonucleic acid (DNA) endonuclease to effect one or more single-strand break (SSB) or double-strand break (DSB), a first SSB or DSB within or near one or more of: the BCL11A gene on chromosome 2, and the DNA sequence that encodes a transcriptional control region of the BCL11A gene on chromosome 2, wherein the first SSB or DSB results in one or more of: a permanent deletion or inversion within or near the BCL11A gene on chromosome 2, a mutation within or near the BCL11A gene on chromosome 2, a permanent deletion or inversion within or near the DNA sequence that encodes a transcriptional control region of the BCL11A gene on chromosome 2, and a mutation within or near the DNA sequence that encodes a transcriptional control region of the BCL11A gene on chromosome 2; introducing a second guide RNA into the human cell using a second electroporation wherein the second guide RNA targets a human beta globin locus on chromosome 11; introducing into the human cell one or more DNA endonuclease to effect one or more SSB or DSB, a second SSB or DSB within or near the human beta globin locus on chromosome 11, wherein the second SSB or DSB results in one or more of: a permanent deletion or inversion within or near the human beta globin locus on chromosome 11, and a mutation within or near the human beta globin locus on chromosome 11; wherein the two or more permanent deletion, inversion, or mutation results in an increased expression of γ-globin and an increase of fetal hemoglobin (HbF) in the human cell.

[0070] Also provided herein is a method of increasing fetal hemoglobin (HbF) in a human cell by genome editing. The method comprises: introducing a first guide RNA into the human cell using a first electroporation wherein the first guide RNA targets a human beta globin locus on chromosome 11; introducing one or more deoxyribonucleic acid (DNA) endonuclease into the human cell to effect one or more single-strand break (SSB) or double-strand break (DSB), a first SSB or DSB within or near the human beta globin locus on chromosome 11, wherein the first SSB or DSB results in one or more of: a permanent deletion or inversion within or near the human beta globin locus on chromosome 11, and a mutation within or near the human beta globin locus on chromosome 11; introducing a second guide RNA into the human cell using a second electroporation wherein the second guide RNA targets the human beta globin locus on chromosome 11; introducing one or more DNA endonuclease into the human cell to effect one or more SSB or DSB, a second SSB or DSB within or near the human beta globin locus on chromosome 11, wherein the second SSB or DSB results in one or more of: a permanent deletion or inversion within or near the human beta globin locus on chromosome 11, and a mutation within or near the human beta globin locus on chromosome 11; wherein the two or more permanent deletion, inversion, or mutation results in an increased expression of γ-globin and an increase of fetal hemoglobin (HbF) in the human cell.

[0071] Also provided herein is a method of increasing fetal hemoglobin (HbF) in a human cell by genome editing. The method comprises: introducing a first guide RNA into the human cell using a first electroporation wherein the first guide RNA targets one or more of: a BCL11A gene on chromosome 2, and a DNA sequence that encodes a transcriptional control region of the BCL11A gene on chromosome 2; introducing into the human cell one or more deoxyribonucleic acid (DNA) endonuclease to effect one or more single-strand break (SSB) or double-strand break (DSB), a first SSB or DSB within or near one or more of: a BCL11A gene on chromosome 2, and a DNA sequence that encodes a transcriptional control region of the BCL11A gene on chromosome 2, wherein the first SSB or DSB results in one or more of: a permanent deletion or inversion within or near the BCL11A gene on chromosome 2, a mutation within or near the BCL11A gene on chromosome 2, a permanent deletion or inversion within or near the DNA sequence that encodes a transcriptional control region of the BCL11A gene on chromosome 2, and a mutation within or near the DNA sequence that encodes a transcriptional control region of the BCL11A gene on chromosome 2; introducing a second guide RNA into the human cell using a second electroporation wherein the second guide RNA targets one or more of: a BCL11A gene on chromosome 2, and a DNA sequence that encodes a transcriptional control region of the BCL11A gene on chromosome 2; introducing into the human cell one or more DNA endonuclease to effect one or more SSB or DSB, a second SSB or DSB within or near one or more of: a BCL11A gene on chromosome 2, and a DNA sequence that encodes a transcriptional control region of the BCL11A gene on chromosome 2, wherein the second SSB or DSB results in one or more of: a permanent deletion or inversion within or near the BCL11A gene on chromosome 2, a mutation within or near the BCL11A gene on chromosome 2, a permanent deletion or inversion within or near the DNA sequence that encodes a transcriptional control region of the BCL11A gene on chromosome 2, and a mutation within or near the DNA sequence that encodes a transcriptional control region of the BCL11A gene on chromosome 2; wherein the two or more permanent deletion, inversion, or mutation results in an increased expression of γ-globin and an increase of fetal hemoglobin (HbF) in the human cell.

[0072] Also provided herein are edited cells (e.g., isolated edited cells, such as isolated edited human cells) obtained by or obtainable by any method provided herein.

[0073] It is understood that the inventions described in this specification are not limited to the examples summarized in this Summary. Various other aspects are described and exemplified herein.

### BRIEF DESCRIPTION OF THE DRAWINGS

[0074] Various aspects of materials and methods for treatment of hemoglobinopathies disclosed and described in this specification can be better understood by reference to the accompanying figures, in which:

[0075] FIGS. 1A-1B show the genomic location of CRISPR target sites for the HPFH5 deletion;

[0076] FIG. 1A shows a restriction map of the HPFH5 deletion variant (lower part) compared with wild type β-globin locus (upper part), as defined by Camaschella et al, Haematologica, 75(Suppl 5): 26-30 (1990);

[0077] FIG. 1B shows a schematic of the human β-globin locus with hollow boxes highlighting illustrative HPFH5-like 5′ and 3′ target sites for CRISPR. The 12.9 kb deletion starts 3 kb 5′ to the δ gene and ends 1.7 kb 3′ to the end of the β gene (690 bp downstream from the β polyA signal), as described by Camaschella et al., supra;

[0078] FIG. 2 is a schematic of PCR primer locations for detection of inversions and deletions of the 13 kb fragment;

[0079] FIG. 3 shows a schematic of the genomic location of HPFH Corfu 3.5 kb and 7.2 kb deletions;

[0080] FIG. 4 is a schematic of the β-globin locus showing the location of the Kenya deletion, 5′ (left box) and 3′ (right box);

[0081] FIGS. 5A-5B show the location of the HPFH-SD 13 bp deletion;

[0082] FIG. 5A shows a sequence alignment of wild type and 13 bp deletion variant of human γ-globin locus;

[0083] FIG. 5B shows a sequence alignment of HBG1 and HBG2 genes showing the conserved target region (dotted box), along with the potential ˜5 kb deletion arising from cleavage at the target site in both genes (lower panel);

[0084] FIGS. 6A-6C show other deletion and non-deletion modifications of the β-globin locus associated with HPFH;

[0085] FIG. 6A shows a schematic showing location of the HPFH-4 deletion;

[0086] FIG. 6B shows a schematic showing location of the HPFH Black deletion;

[0087] FIG. 6C shows a genomic sequence in the region of the ^{G}γ-175(T to C) mutation;

[0088] FIGS. 7A-7C show plasmids (CTx-1, CTx-2, CTx-3) comprising a codon optimized gene for S. pyogenes Cas9 endonuclease;

[0089] FIG. 7A is a plasmid (CTx-1) comprising a codon optimized gene for S. pyogenes Cas9 endonuclease. The CTx-1 plasmid also comprises a gRNA scaffold sequence, which includes a 20 bp spacer sequence from the sequences listed in the Sequence Listing;

[0090] FIG. 7B is a plasmid (CTx-2) comprising a different codon optimized gene for S. pyogenes Cas9 endonuclease. The CTx-2 plasmid also comprises a gRNA scaffold sequence, which includes a 20 bp spacer sequence from the sequences listed in the Sequence Listing;

[0091] FIG. 7C is a plasmid (CTx-3) comprising yet another different codon optimized gene for S. pyogenes Cas9 endonuclease. The CTx-3 plasmid also comprises a gRNA scaffold sequence, which includes a 20 bp spacer sequence from the sequences listed in the Sequence Listing;

[0092] FIGS. 8A-8B depict the type II CRISPR/Cas system;

[0093] FIG. 8A is a depiction of the type II CRISPR/Cas system including gRNA;

[0094] FIG. 8B is a depiction of the type II CRISPR/Cas system including sgRNA;

[0095] FIG. 9 is a table showing indel frequencies for various gRNAs that are specific for the +58 DNA hypersensitive site (DHS) of the BCL11A gene;

[0096] FIGS. 10A-10B show a depiction of gRNA combinations that can be used to delete a portion of the +58 DNA hypersensitive site (DHS) of the BCL11A gene and a table showing various gRNA combinations that can be used to delete a portion of the +58 DHS of the BCL11A gene;

[0097] FIG. 10A is a depiction of gRNA combinations that can be used to delete a portion of the +58 DHS of the BCL11A gene;

[0098] FIG. 10B is a table showing various gRNA combinations that can be used to delete a portion of the +58 DHS of the BCL11A gene and the deletion size resulting from each gRNA combination;

[0099] FIGS. 11A-11C refer to the +58 DHS gRNAs that are included in FIG. 9;

[0100] FIG. 12 shows an experimental design that includes successive electroporations using dual guide RNAs;

[0101] FIGS. 13A-13B show the viability and growth kinetics of human mobilized peripheral blood (mPB) CD34+ cells from Donor LKP06B successively electroporated with dual guide RNAs compared to human mPB CD34+ cells from Donor LKP06B electroporated with a single guide RNA;

[0102] FIG. 13A shows the viability of human mPB CD34+ cells from Donor LKP06B successively electroporated with dual guide RNA compared to human mPB CD34+ cells from Donor LKP06B electroporated with a single guide RNA;

[0103] FIG. 13B shows the growth kinetics of human mPB CD34+ cells from Donor LKP06B successively electroporated with dual guide RNA compared to human mPB CD34+ cells from Donor LKP06B electroporated with a single guide RNA;

[0104] FIGS. 14A-14B show the rate of DNA editing (% indels) at the BCL11a locus and HBG2 locus in human mPB CD34+ cells successively electroporated with dual guide RNAs compared to human mPB CD34+ cells electroporated with a single guide RNA;

[0105] FIG. 14A shows the rate of DNA editing (% indels) at the BCL11a locus and HBG2 locus in human mPB CD34+ cells from Fred Hutch Donor 304 successively electroporated with dual guide RNAs compared to human mPB CD34+ cells from Fred Hutch Donor 304 electroporated with a single guide RNA;

[0106] FIG. 14B shows the rate of DNA editing (% indels) at the BCL11a locus and HBG2 locus in human mPB CD34+ cells from Donor LKP06B successively electroporated with dual guide RNAs compared to human mPB CD34+ cells from Donor LKP06B electroporated with a single guide RNA;

[0107] FIGS. 15A-15B show the differentiation of human mPB CD34+ cells from Donor LKP06B successively electroporated with dual guide RNAs compared to human mPB CD34+ cells from Donor LKP06B electroporated with a single guide RNA. Differentiation was determined by measuring the percentage of Band3, Alpha4, GYPA, and CD71;

[0108] FIG. 15A shows the differentiation of human mPB CD34+ cells from Donor LKP06B successively electroporated with dual guide RNAs compared to human mPB CD34+ cells from Donor LKP06B electroporated with a single guide RNA. Differentiation was determined by measuring the percentage of Band3 and Alpha4;

[0109] FIG. 15B shows the differentiation of human mPB CD34+ cells from Donor LKP06B successively electroporated with dual guide RNAs compared to human mPB CD34+ cells from Donor LKP06B electroporated with a single guide RNA. Differentiation was determined by measuring the percentage of GYPA, and CD71;

[0110] FIG. 16 shows the enucleation of human mPB CD34+ cells from Donor LKP06B successively electroporated with dual guide RNAs compared to human mPB CD34+ cells from Donor LKP06B electroporated with a single guide RNA;

[0111] FIGS. 17A-17B show the γ/α globin mRNA ratio in human mPB CD34+ cells successively electroporated with dual guide RNAs compared to human mPB CD34+ cells electroporated with a single guide RNA;

[0112] FIG. 17A shows the γ/α globin mRNA ratio in human mPB CD34+ cells from Fred Hutch Donor 304 successively electroporated with dual guide RNAs compared to human mPB CD34+ cells from Fred Hutch Donor 304 electroporated with a single guide RNA;

[0113] FIG. 17B shows the γ/α globin mRNA ratio in human mPB CD34+ cells from Donor LKP06B successively electroporated with dual guide RNAs compared to human mPB CD34+ cells from Donor LKP06B electroporated with a single guide RNA;

[0114] FIGS. 18A-18B show the globin mRNA ratio in human mPB CD34+ cells successively electroporated with dual guide RNAs compared to human mPB CD34+ cells electroporated with a single guide RNA;

[0115] FIG. 18A shows the globin mRNA ratio in human mPB CD34+ cells from Fred Hutch Donor 304 successively electroporated with dual guide RNAs compared to human mPB CD34+ cells from Fred Hutch Donor 304 electroporated with a single guide RNA;

[0116] FIG. 18B shows the globin mRNA ratio in human mPB CD34+ cells from Donor LKP06B successively electroporated with dual guide RNAs compared to human mPB CD34+ cells from Donor LKP06B electroporated with a single guide RNA;

[0117] FIGS. 19A-19B show the γ/18S globin mRNA ratio in human mPB CD34+ cells successively electroporated with dual guide RNAs compared to human mPB CD34+ cells electroporated with a single guide RNA;

[0118] FIG. 19A shows the γ/18S globin mRNA ratio in human mPB CD34+ cells from Fred Hutch Donor 304 successively electroporated with dual guide RNAs compared to human mPB CD34+ cells from Fred Hutch Donor 304 electroporated with a single guide RNA;

[0119] FIG. 19B shows the γ/18S globin mRNA ratio in human mPB CD34+ cells from Donor LKP06B successively electroporated with dual guide RNAs compared to human mPB CD34+ cells from Donor LKP06B electroporated with a single guide RNA;

[0120] FIG. 20 shows the percentage of HbF expression in human mPB CD34+ cells from Donor LKP06B successively electroporated with dual guide RNAs compared to human mPB CD34+ cells from Donor LKP06B electroporated with a single guide RNA;

[0121] FIGS. 21A-21E show HbF expression in human mPB CD34+ cells successively electroporated with dual guide RNAs, human mPB CD34+ cells electroporated with a single guide RNA, and untreated human mPB CD34+ cells;

[0122] FIG. 21A shows HbF expression in untreated human mPB CD34+ cells;

[0123] FIG. 21B shows HbF expression in human mPB CD34+ cells electroporated with SPY101;

[0124] FIG. 21C shows HbF expression in human mPB CD34+ cells electroporated with SD2;

[0125] FIG. 21D shows HbF expression in human mPB CD34+ cells successively electroporated with SPY101 and then SD2;

[0126] FIG. 21E shows HbF expression in human mPB CD34+ cells electroporated with two guide RNAs (Exon 2-2 and Exon 2-3) at the same time;

[0127] FIG. 22 shows three different experimental designs (Arms 1-3) that include successive electroporations using dual guide RNAs. Each experimental design tests different timing options for the successive electroporations;

[0128] FIGS. 23A-23B show the growth kinetics and viability of human mPB CD34+ cells successively electroporated with dual guide RNAs under Arm 1 conditions compared to human mPB CD34+ cells electroporated with a single guide RNA under Arm 1 conditions;

[0129] FIG. 23A shows the growth kinetics of human mPB CD34+ cells successively electroporated with dual guide RNAs under Arm 1 conditons compared to human mPB CD34+ cells electroporated with a single guide RNA under Arm 1 conditions;

[0130] FIG. 23B shows the viability of human mPB CD34+ cells successively electroporated with dual guide RNAs under Arm 1 conditions compared to human mPB CD34+ cells electroporated with a single guide RNA under Arm 1 conditions;

[0131] FIGS. 24A-24B show the growth kinetics and viability of human mPB CD34+ cells successively electroporated with dual guide RNAs under Arm 2 conditions compared to human mPB CD34+ cells electroporated with a single guide RNA under Arm 2 conditions;

[0132] FIG. 24A shows the growth kinetics of human mPB CD34+ cells successively electroporated with dual guide RNAs under Arm 2 conditions compared to human mPB CD34+ cells electroporated with a single guide RNA under Arm 2 conditions;

[0133] FIG. 24B shows the viability of human mPB CD34+ cells successively electroporated with dual guide RNAs under Arm 2 conditions compared to human mPB CD34+ cells electroporated with a single guide RNA under Arm 2 conditions;

[0134] FIGS. 25A-25B show the growth kinetics and viability of human mPB CD34+ cells successively electroporated with dual guide RNAs under Arm 3 conditions compared to human mPB CD34+ cells electroporated with a single guide RNA under Arm 3 conditions.

[0135] FIG. 25A shows the growth kinetics of human mPB CD34+ cells successively electroporated with dual guide RNAs under Arm 3 conditions compared to human mPB CD34+ cells electroporated with a single guide RNA under Arm 3 conditions;

[0136] FIG. 25B shows the viability of human mPB CD34+ cells successively electroporated with dual guide RNAs under Arm 3 conditions compared to single guide RNA electroporated human mPB CD34+ cells electroporated with a single guide RNA under Arm 3 conditions;

[0137] FIGS. 26A-26B shows the viability and growth kinetics of human mPB CD34+ cells successively electroporated with dual guide RNAs under Arm conditions 1-3 compared to human mPB CD34+ cells electroporated with a single guide RNA under Arm conditions 1-3;

[0138] FIG. 26A shows the viability of human mPB CD34+ cells successively electroporated with dual guide RNAs under Arm conditions 1-3 compared to human mPB CD34+ cells electroporated with a single guide RNA under Arm conditions 1-3;

[0139] FIG. 26B shows the growth kinetics of human mPB CD34+ cells successively electroporated with dual guide RNAs under Arm conditions 1-3 compared to human mPB CD34+ cells electroporated with a single guide RNA under Arm conditions 1-3;

[0140] FIG. 27 shows the rate of DNA editing (% indels) at the BCL11a locus and HBG2 locus in human mPB CD34+ cells from Donor LKP06B successively electroporated with dual guide RNAs under Arm conditions 1-3 compared to human mPB CD34+ cells from Donor LKP06B electroporated with a single guide RNA under Arm conditions 1-3;

[0141] FIGS. 28A-28B show the differentiation of human mPB CD34+ cells successively electroporated with dual guide RNAs under Arm conditions 1-3 compared to human mPB CD34+ cells electroporated with a single guide RNA under Arm conditions 1-3. Differentiation was determined by measuring the percentage of Band3, Alpha4, GYPA, and CD71;

[0142] FIG. 28A shows the differentiation of human mPB CD34+ cells successively electroporated with dual guide RNAs under Arm conditions 1-3 compared to human mPB CD34+ cells electroporated with a single guide RNA under Arm conditions 1-3. Differentiation was determined by measuring the percentage of GYPA, and CD71;

[0143] FIG. 28B shows the differentiation of human mPB CD34+ cells successively electroporated with dual guide RNAs under Arm conditions 1-3 compared to human mPB CD34+ cells electroporated with a single guide RNA under Arm conditions 1-3. Differentiation was determined by measuring the percentage of Band3 and Alpha4;

[0144] FIG. 29 shows the enucleation of human mPB CD34+ cells successively electroporated with dual guide RNAs under Arm conditions 1-3 compared to human mPB CD34+ cells electroporated with a single guide RNA under Arm conditions 1-3;

[0145] FIG. 30 shows the γ/α globin mRNA ratio in human mPB CD34+ cells from Donor LKP06B successively electroporated with dual guide RNAs under Arm conditions 1-3 compared to human mPB CD34+ cells from Donor LKP06B electroporated with a single guide RNA under Arm conditions 1-3;

[0146] FIG. 31 shows the globin mRNA ratio in human mPB CD34+ cells from Donor LKP06B successively electroporated with dual guide RNAs under Arm conditions 1-3 compared to human mPB CD34+ cells from Donor LKP06B electroporated with a single guide RNA under Arm conditions 1-3;

[0147] FIG. 32 shows the γ/18S globin mRNA ratio in human mPB CD34+ cells from Donor LKP06B successively electroporated with dual guide RNAs under Arm conditions 1-3 compared to human mPB CD34+ cells from Donor LKP06B electroporated with a single guide RNA under Arm conditions 1-3;

[0148] FIGS. 33A-33B show an experimental design that includes successive electroporations using dual guide RNAs in a NSG mouse model system;

[0149] FIG. 33A shows the gene editing and transplantation schedules;

[0150] FIG. 33B shows a table of different experimental groups;

[0151] FIG. 34 shows human chimerism in peripheral blood samples of mice over a period of 16 weeks after gene editing and transplantation. Mice transplanted with cells edited using a successive electroporation method (e.g., 48/48/6 group with guides, e.g., first electroporation at hour 48, second electroporation at hour 96, transplantation at hour 102) show a reduction in % chimerism relative to the Mock EP group;

[0152] FIG. 35 shows human chimerism in bone marrow samples of mice at 16 weeks after gene editing and transplantation. Mice transplanted with cells edited using a successive electroporation method (e.g., 48/48/6 group with guides, e.g., first electroporation at hour 48, second electroporation at hour 96, transplantation at hour 102) show a reduction in % chimerism relative to the Mock EP group;

[0153] FIG. 36 shows genomic DNA analysis of bone marrow 16 weeks post transplant. Mice in the 48/48/6 group with guides, e.g., first electroporation at hour 48, second electroporation at hour 96, transplantation at hour 102, show high % indels;

[0154] FIG. 37 shows an experimental design that utilizes successive electroporations using dual guide RNAs to edit Chr2 and Chr11 in human mPB CD34+ cells from Donor LP06a and Donor LKP12;

[0155] FIG. 38 shows a table of experimental conditions that utilized successive electroporations using dual guide RNAs to edit Chr2 and Chr11 in human mPB CD34+ cells from Donor LP06a and Donor LKP12. Successive electroporation conditions provided increased HbF expression relative to single electroporation conditions;

[0156] FIG. 39 shows deletion rates (%) in experimental conditions that utilized successive electroporations using dual guide RNAs to edit Chr2 and Chr11 in human mPB CD34+ cells from Donor LP06a and Donor LKP12;

[0157] FIG. 40 shows an enucleation gating strategy of human mPB CD34+ cells from Donor LP06a and Donor LKP12 that had been successively electroporated with dual guide RNAs;

[0158] FIG. 41 shows enucleation over time for human mPB CD34+ cells from Donor LP06a and Donor LKP12 that had been edited using successive electroporations using dual guide RNAs to edit Chr2 and Chr11. The bars for each day of differentiation show, from left to right, SPY101 then HPFH5(1&D), 1450 then HPFH5(1&D), SPY101 then Kenya(K5&K17), 1450 then Kenya(K5&K17), HPFH5(T7&D) then HPFH5(1&T5), SPY101, 1450, HPFH5(T7&D), HPFH5(1&T5), HPFH5(T7,D,1,T5), Kenya(K5&K17), Exon2-2/2-3, Mock EP, and Untreated CD34 cells. There was minimal difference between cells that had been singly or doubly electroporated;

[0159] FIGS. 42A-42C show levels of globin expression in human mPB CD34+ cells from Donor LP06a and Donor LKP12 that had been edited using successive electroporations using dual guide RNAs to edit Chr2 and Chr11;

[0160] FIG. 42A shows mRNA transcript ratios for (γ globin)/(a globin);

[0161] FIG. 42B shows mRNA transcript ratios for (γ globin)/(γ globin+13 globin);

[0162] FIG. 42C shows protein levels of HbF relative to (HbF+HbA). Cells that had undergone double electroporated had a higher relative amount of HbF that cells that had undergone single electroporation;

[0163] FIG. 43 shows an experimental design that utilizes varying amounts of Cas9 endonuclease during successive electroporations using dual guide RNAs to edit Chr2 and Chr11 in human mPB CD34+ cells;

[0164] FIG. 44 show percent gene editing at Chr2 and Chr11 in human mPB CD34+ cells after successive electroporations utilizing 1450 gRNA and HPFH5 gRNA. The amount of Cas9 endonuclease during the first electroporation was varied. Levels of gene editing were consistent for experiments using 0.375-3 μg Cas9;

[0165] FIG. 45 show mRNA transcript ratios for (γ globin)/(a globin) and (γ globin)/(γ globin+13 globin) in human mPB CD34+ cells after successive electroporations utilizing 1450 gRNA and HPFH5 gRNA in human mPB CD34+ cells. The amount of Cas9 endonuclease during the first electroporation was varied. Levels of mRNA transcripts were consistent for experiments using 0.75-3 μg Cas9;

[0166] FIG. 46 show HbF percentages in human mPB CD34+ cells after successive electroporations utilizing 1450 gRNA and HPFH5 gRNA. The amount of Cas9 endonuclease during the first electroporation was varied. Levels of % HbF were consistent for experiments using 0.375-3 μg Cas9;

[0167] FIG. 47 shows an experimental design to compare single electroporation with one guide RNA, single electroporation with two guide RNAs, and successive electroporations with two guide RNAs to edit Chr2 and Chr11 in human mPB CD34+ cells;

[0168] FIG. 48 shows percent indels in human mPB CD34+ cells from Fred Hutch Donor 304 following gene editing. Cells that were successively electroporated with two guide RNAs (SPY101/SD2; SD2/SPY101) had comparable levels of percent indels relative to control experiments;

[0169] FIG. 49 shows three potential translocations, including points of fusion, that may occur when targeting Chr2 and Chr11 in cells with gRNAs specific for BCL11A and the site of SD2 targeting. Note that Fusion 3 represents a SD2-induced inversion;

[0170] FIG. 50 show nucleic acid agarose gels demonstrating that translocation events (fusions) that may occur when targeting Chr2 and Chr11 in cells are minimized when performing successive electroporation with two gRNAs (SPY101 then SD2; SD2 then SPY101) compared to simultaneous electroporation with two gRNAs (SPY101 AND SD2);

[0171] FIG. 51 shows an experimental design to compare single electroporation with one guide RNA, single electroporation with two guide RNAs, and successive electroporations with two guide RNAs to edit Chr2 and Chr11 in human mPB CD34+ cells;

[0172] FIG. 52 shows percent indels in human mPB CD34+ cells from Fred Hutch Donor 304 following gene editing. Cells that were successively electroporated with two guide RNAs (SPY101 Then SD2; SD2 Then SPY101) with a 48 hour period between electroporations had higher levels of percent indels than cells successively electroporated with a 36 hour period between electroporations;

[0173] FIGS. 53A-53C show nucleic acid agarose gels demonstrating that translocation events (fusions) that may occur when targeting Chr2 and Chr11 in cells are minimized when performing successive electroporation with two gRNAs (SPY101 then SD2; SD2 then SPY101) with a 48 hour period between electroporations compared a 36 hour period between electroporations;

[0174] FIG. 53A shows data corresponding to a translocation fusion 1 event;

[0175] FIG. 53B shows data corresponding to a translocation fusion 2 event;

[0176] FIG. 53A shows data corresponding to a translocation fusion 3 event (SD2-induced inversion);

[0177] FIG. 54 shows a ddPCR assay for determination of chromosomal translocations following gene editing with SD2 and SPY101 gRNAs;

[0178] FIG. 55 shows a table of ddPCR data demonstrating that single electroporation with two gRNAs (SPY101 And SD2) leads to increased translocation events compared to successive electroporation with two gRNAs (e.g., SPY101 Then SD2);

[0179] FIGS. 56A-56C show effects of single electroporation with one guide RNA, single electroporation with two guide RNAs, and successive electroporations with two guide RNAs to edit Chr2 and Chr11 in human mPB CD34+ cells;

[0180] FIG. 56A shows mRNA transcript ratios for (γ globin)/(18S globin);

[0181] FIG. 56B shows mRNA transcript ratios for (γ globin)/(a globin);

[0182] FIG. 56A shows mRNA transcript ratios for (γ globin)/(γ globin+13 globin).

### BRIEF DESCRIPTION OF THE SEQUENCE LISTING

[0183] SEQ ID NOs: 1-56,961 is a list of gRNA 20 bp spacer sequences, associated PAM, chromosomal and gene location of the target sequence, cut site, and strand for targeting the human beta globin locus with a S. pyogenes Cas9 endonuclease.

[0184] SEQ ID NOs: 56,962-64,104 is a list of gRNA 20 bp spacer sequences, associated PAM, chromosomal and gene location of the target sequence, cut site, and strand for targeting the human beta globin locus with a S. aureus Cas9 endonuclease.

[0185] SEQ ID NOs: 64,105-66,258 is a list of gRNA 24 bp spacer sequences, associated PAM, chromosomal and gene location of the target, cut site, and strand for targeting the human beta globin locus with a N. meningitides Cas9 endonuclease.

[0186] SEQ ID NOs: 66,259-69,152 is a list of gRNA 24 bp spacer sequences, associated PAM, chromosomal and gene location of the target, cut site, and strand for targeting the human beta globin locus with a S. thermophilus Cas9 endonuclease.

[0187] SEQ ID NOs: 69,153-70,300 is a list of gRNA 24 bp spacer sequences, associated PAM, chromosomal and gene location of the target, cut site, and strand for targeting the human beta globin locus with a T. denticola Cas9 endonuclease.

[0188] SEQ ID NOs: 70,301-156,352 is a list of gRNA 22 bp spacer sequences, associated PAM, chromosomal and gene location of the target, two cut sites, and strand for targeting the human beta globin locus with an Acidominococcus, a Lachnospiraceae, and a Franciscella Novicida Cpf1 endonuclease.

[0189] SEQ ID NOs: 156,353-185,834 is a list of gRNA 20 bp spacer sequences, associated PAM, chromosomal and gene location of the target sequence, cut site, and strand for targeting within or near a BCL11A gene or a DNA sequence that encodes a regulatory element of the BCL11A gene with a S. pyogenes Cas9 endonuclease.

[0190] SEQ ID NOs: 185,835-188,739 is a list of gRNA 20 bp spacer sequences, associated PAM, chromosomal and gene location of the target sequence, cut site, and strand for targeting within or near a BCL11A gene or a DNA sequence that encodes a regulatory element of the BCL11A gene with a S. aureus Cas9 endonuclease.

[0191] SEQ ID NOs: 188,740-189,772 is a list of gRNA 24 bp spacer sequences, associated PAM, chromosomal and gene location of the target, cut site, and strand for targeting within or near a BCL11A gene or a DNA sequence that encodes a regulatory element of the BCL11A gene with a S. thermophilus Cas9 endonuclease.

[0192] SEQ ID NOs: 189,773-190,203 is a list of gRNA 24 bp spacer sequences, associated PAM, chromosomal and gene location of the target, cut site, and strand for targeting within or near a BCL11A gene or a DNA sequence that encodes a regulatory element of the BCL11A gene with a T. denticola Cas9 endonuclease.

[0193] SEQ ID NOs: 190,204-193,083 is a list of gRNA 24 bp spacer sequences, associated PAM, chromosomal and gene location of the target, cut site, and strand for targeting within or near a BCL11A gene or a DNA sequence that encodes a regulatory element of the BCL11A gene with a N. meningitides Cas9 endonuclease.

[0194] SEQ ID NOs: 193,084-228,299 is a list of gRNA 22 bp spacer sequences, associated PAM, chromosomal and gene location of the target, two cut sites, and strand for targeting within or near a BCL11A gene or a DNA sequence that encodes a regulatory element of the BCL11A gene with an Acidominococcus, a Lachnospiraceae, and a Franciscella Novicida Cpf1 endonuclease.

[0195] SEQ ID NO: 228,300 shows a known family of homing endonuclease, as classified by its structure.

[0196] SEQ ID NO: 228,301 is a sample guide RNA (gRNA) for a S. pyogenes Cas9 endonuclease.

[0197] SEQ ID NOs: 228,302-228,304 show sample sgRNA sequences.

### DETAILED DESCRIPTION

[0198] Hemoglobinopathies

[0199] As used herein, the term “hemoglobinopathy” means any defect in the structure, function or expression of any hemoglobin of an individual, and includes defects in the primary, secondary, tertiary or quaternary structure of hemoglobin caused by any mutation, such as deletion mutations or substitution mutations in the coding regions of the β-globin gene, or mutations in, or deletions of, the promoters or enhancers of such genes that cause a reduction in the amount of hemoglobin produced as compared to a normal or standard condition. The term “hemoglobinopathy” further includes any decrease in the amount or effectiveness of hemoglobin, whether normal or abnormal, caused by external factors such as disease, chemotherapy, toxins, poisons, or the like. β-hemoglobinopathies contemplated herein include, but are not limited to, sickle cell disease (SCD, also referred to a sickle cell anemia or SCA), sickle cell trait, hemoglobin C disease, hemoglobin C trait, hemoglobin S/C disease, hemoglobin D disease, hemoglobin E disease, thalassemias, hemoglobins with increased oxygen affinity, hemoglobins with decreased oxygen affinity, unstable hemoglobin disease and methemoglobinemia.

[0200] Disorders specifically associated with the β-globin protein are referred to generally as β-hemoglobinopathies. For example, β-thalassemias result from a partial or complete defect in the expression of the β-globin gene, leading to deficient or absent hemoglobin A (HbA). HbA is the most common human hemoglobin tetramer and consists of two α-chains and two β-chains (a2132). β-thalassemias are due to mutations in the adult β-globin gene (HBB) on chromosome 11, and are inherited in an autosomal, recessive fashion. β-thalassemia or β-thal is classified into two clinically-significant types (which are a focus of symptom management, medical treatments and the present application) that are distinguished by the severity of symptoms: β-thalassemia major (or β⁰, in which mutations block production of β-globin chains, resulting in a severe condition that is also known as “Cooley's anemia”) and β-thalassemia intermedia (or β⁺, an intermediate condition in which mutations reduce but do not block production of β-globin chains). In contrast, β-thalassemia minor or β-thalassemia trait refers to the heterozygous situation in which only one of the β-globin alleles contains a mutation, so that β-globin chains can be produced via expression from the other (i.e. unmutated) chromosome 11 allele. While such individuals are carriers of a β-thalassemia mutant allele that they may pass on to their children, individuals with β-thalassemia minor are generally either asymptomatic or nearly asymptomatic themselves as a result of β-globin production from the unaffected allele.

[0201] The signs and symptoms of thalassemia major generally appear within the first 2 years of life, when children with the disease can develop life-threatening anemia. Children with thalassemia major often fail to gain sufficient weight or grow at the expected rate (failure to thrive) and may develop jaundice. Affected individuals may also have an enlarged spleen, liver, and heart, and their bones may be misshapen. Many people with thalassemia major have such severe symptoms that they need frequent blood transfusions to replenish their red blood cell supply, which is referred to as transfusion-dependent thalassemia. While transfusions have been a critical life-saver for many patients, they are expensive and are frequently associated with significant side effects. Among others, over time the administration of iron-containing hemoglobin from chronic blood transfusions tends to lead to a buildup of iron in the body, which can result in liver, heart, and endocrine problems.

[0202] Thalassemia intermedia is milder than thalassemia major. The signs and symptoms of thalassemia intermedia appear in early childhood or later in life. Although symptoms are less severe, affected individuals still have mild to moderate anemia and may also suffer from slow growth and bone abnormalities.

[0203] Sickle cell disease (SCD) is a group of disorders that affects millions of people worldwide. It is most common among people who live in or whose ancestors come from Africa; Mediterranean countries such as Greece, Turkey, and Italy; the Arabian Peninsula; India; Spanish-speaking regions in Central and South America, and parts of the Caribbean. However, SCD is also the most common inherited blood disorder in the United States. SCD includes sickle cell anemia, as well as sickle hemoglobin C disease (HbSC), sickle beta-plus-thalassemia (HbS/β⁺) and sickle beta-zero-thalassemia)(HbS/β⁰).

[0204] Sickle cell anemia (SCA), which is the most prevalent form of SCD, is among the most common severe monogenic disorders worldwide, with approximately 250,000 children born with SCD every year. The incidence of SCA is greatest in West and Central Africa, where 1-2% of babies are born with the disease, and as many as 25% of people are heterozygous carriers. The SCA point mutation is believed to have been spread through selective advantage because heterozygosity provides modest protection against death from childhood malaria. In India, where malaria is also prevalent, it is estimated that there are more than 2.5 million heterozygous carriers of SCA and approximately 150,000 homozygotes with the disease.

[0205] Despite the relative absence of malaria in North America and Europe, the fact that each has large populations with genetic origins in affected areas has meant that both regions have substantial populations of heterozygous SCA carriers, and therefore affected homozygous individuals. For example, the U.S. Centers for Disease Control (CDC) estimates that there are approximately 90,000 to 100,000 Americans with SCA; and incidence is also high in countries of Western Europe, particularly those with large immigrant populations, with an estimated 10,000 in France and 12,000 to 15,000 in the United Kingdom for example. Associated costs to healthcare systems are likewise substantial. In a five-year U.S. study conducted from 1989 through 1993, the CDC estimated that SCD resulted in more than 75,000 hospitalizations annually, and cost approximately $0.5 billion. System wide costs would be expected to be substantially greater now given the steady rise in healthcare costs over the intervening two decades.

[0206] All forms of SCD are caused by mutations in the β-globin structural gene (HBB). Sickle cell anemia (SCA) is an autosomal recessive disease caused by a single missense mutation in the sixth codon of the β-globin gene (HBB; A→T) resulting in the substitution of glutamic acid by valine (Glu→Val). The mutant protein, when incorporated into hemoglobin (Hb), results in unstable hemoglobin HbS (which is α₂β₂^{S}) in contrast to normal adult hemoglobin or HbA (which is α₂β₂^{A}). Upon de-oxygenation, HbS polymerizes to form HbSS through hydrophobic interactions between β^{S}-6 valine of one tetramer and β-85 phenylalanine and β-88 leucine of an adjacent tetramer in the erythron, which leads to rigidity and vaso-occlusion [Atweh, Semin. Hematol. 38(4):367-73 (2001)].

[0207] When HbS is the predominant form of hemoglobin, as in individuals with SCA, their red blood cells (RBCs) tend to be distorted into a sickle or crescent shape. The sickle-shaped RBCs die prematurely, which can lead to anemia. In addition, the sickle-shaped cells are less flexible than normal RBCs and tend to get stuck in small blood vessels causing vaso-occlusive events. Such vaso-occlusive events are associated with tissue ischemia leading to acute and chronic pain as well as organ damage that can affect any organ in the body, including the bones, lungs, liver, kidneys, brain, eyes, and joints. The spleen is particularly subject to infarction and the majority of individuals with SCD are functionally asplenic in early childhood, increasing their risk for certain types of bacterial infections. Occlusions of small vessels can also cause acute episodic febrile illness called “crises,” which are associated with severe pain and multiple organ dysfunction. Over the course of decades there is progressive organ disease and premature death.

[0208] Children with SCD may be diagnosed by newborn screening but otherwise do not present until later, when levels of fetal hemoglobin (HbF) decline and levels of HbS increase as a result of the hemoglobin allelic “switch” from fetal hemoglobin (encoded by HBG1 (A-gamma, also written ^{A}γ) and HBG2 (G-gamma, also written ^{G}γ)) to the adult β form encoded by HBB). The switch from HbF to the adult form of β-globin (i.e. HbA in unaffected children or HbS in those with SCA) typically begins a few months prior to birth and is complete by about the age of 6 months. The clinical effects of SCD are not manifested until HbF levels become significantly low relative to HbS, which typically occurs two to three months after birth. SCD often first presents as dactylitis or “hand-foot syndrome,” a condition associated with pain in the hands and/or feet that may be accompanied by swelling. In addition, the spleen can become engorged with blood cells resulting in a condition known as “splenic sequestration.” Hemolysis associated with SCD can result in anemia, jaundice, cholelithiasis, as well as delayed growth. Individuals with the highest rates of SCD hemolysis also tend to experience pulmonary artery hypertension, priapism, and leg ulcers.

[0209] Sickle cell anemia (homozygous HbSS) accounts for 60%-70% of sickle cell disease in the United States. The other forms of sickle cell disease result from coinheritance of HbS with other abnormal globin 13 chain variants, the most common forms being sickle-hemoglobin C disease (HbSC) and two types of sickle β-thalassemia (HbSβ+-thalassemia and HbSβ⁰-thalassemia). The β-thalassemias are divided into β+-thalassemia, in which reduced levels of normal β-globin chains are produced, and β°-thalassemia, in which there is no β-globin chain synthesis. Other globin β chain variants such as D-Punjab, O-Arab, and E also result in sickle cell disease when coinherited with HbS.

[0210] Although improvements in the management of SCD have reduced mortality in affected children followed up since neonatal screening, the mainstay of treatment for the majority of individuals with SCD remains supportive. Current treatments aim at relieving symptoms and treating complications such as: pain from vaso-occlusive crisis, infection, anemia, stroke, priapism, pulmonary hypertension or chronic organ damage. Preventative therapies include infection prophylaxis with regular penicillin, vaccination against Streptococcus pneumoniae and Haemophilus influenzae, as well as regular transfusions in children with abnormal transcranial Doppler ultrasonography to prevent strokes and iron chelation for transfusional iron overload. Stroke is also considered an indication for bone marrow transplantation in children and adolescents, who have siblings with identical human leukocyte antigen (HLA). Effective treatment of acute pain is one of the most common problems raised by the management of SCA. Thus, at the present time, definitive therapies that substantially alter the natural history of the disease (such as regular transfusion or exchange transfusion, long-term hydroxycarbamide and HSC transplants) are limited.

[0211] Fetal Hemoglobin (HbF)

[0212] Fetal hemoglobin (HbF) is a tetramer of two adult α-globin polypeptides and two fetal β-like γ-globin polypeptides. The γ-globin genes (HBG1 and HBG2) are normally expressed in the fetal liver, spleen and bone marrow. A tetramer of two γ-chains together with two α-chains constitute HbF. During gestation, the duplicated γ-globin genes constitute the predominant genes transcribed from the β-globin locus. Following birth, γ-globin becomes progressively replaced by adult β-globin, a process referred to as the “fetal switch.” This developmental switch from production of predominantly HbF (α2γ2) to production of adult hemoglobin or HbA (α2β2) begins at about 28 to 34 weeks of gestation and continues shortly after birth at which point HbA becomes predominant. The switch results primarily from decreased transcription of the γ-globin genes and increased transcription of β-globin genes. On average, the blood of a normal adult contains only about 2% of total hemoglobin in the form of HbF, though residual HbF levels have a variance of over 20 fold in healthy adults (Atweh, Semin. Hematol. 38(4):367-73 (2001)). The two types of γ-chains differ at residue 136 where glycine is found in the G-γ-product (HBG2) and alanine is found in the A-γ-product (HBG1). The HBG1 hemoglobin gene (^{A}γ or A-gamma [Homo sapiens (human)] Gene ID: 3047), was updated on 16 Apr. 2014 (www dot ncbi dot nlm dot nih dot gov/gene/3047).

[0213] Many of the forms of hemoglobinopathies are a result of the failure to produce normal β-globin protein in sufficient amounts or failure to produce normal β-globin protein entirely. Increased expression of γ-globin (i.e., HbF) will ameliorate β-globin disease severity.

[0214] The potential for addressing β-hemoglobinopathies by increasing levels of fetal hemoglobin (α2γ2; HbF) is supported by observations of the mild phenotype of individuals who have co-inherited homozygous β-thalassemia and hereditary persistence of fetal hemoglobin (HPFH), as well as by those patients with homozygous β-thalassemia who synthesize no adult hemoglobin, but in whom a reduced requirement for transfusions is observed in the presence of increased concentrations of HbF. Additional support comes from the observation that certain populations of adult patients with β chain abnormalities have higher than normal levels of HbF, and have been observed to have a milder clinical course of disease than patients with normal adult levels of HbF. For example, a group of Saudi Arabian sickle-cell anemia patients who express 20-30% HbF (as a percent of total hemoglobin) have only mild clinical manifestations of the disease [Pembrey et al., Br. J. Haematol. 40: 415-429 (1978)]. β-hemoglobinopathies, such as sickle cell anemia and the β-thalassemias, can therefore be ameliorated by increased HbF production.

[0215] B-Cell Lymphoma 11A (BCL11A)

[0216] B-cell lymphoma 11A (BCL11A) is a gene located on Chromosome 2 and ranges from 60,451,167-60,553,567 bp (GRCh38). BCL11A is a zinc finger transcription factor that represses HbF and downregulates HbF expression starting at about 6 weeks after birth. The BCL11A gene contains 4 exons, spanning 102.4 kb of genomic DNA. BCL11A also is under transcription regulation, including a binding domain in intron 2 for the master transcripton factor GATA-1. GATA-1 binding enhances BCL11A expression which, in turn, represses HbF expression. Intron 2 contains multiple DNase hypersensitive sites (DHS), including sites referred to as +55, +58, and +62 based on the distance in kilobases from the transcriptional start site. Various editing strategies are discussed below to delete, modulate, or inactivate the transcriptional control sequences of BCL11A. Naturally occurring SNPs within this region have been associated with decreased BCL11A expression and increased fetal Hb levels (Orkin et al. 2013 GWAS study). These SNPs are organized around 3 DNA Hypersensitivity sites, +55DHS, +58DHS and +62DHS. Of the 3 regions, the +58 DHS region, appears to be the key region associated with increased fetal Hb levels and also harbors a GATA1 transcriptional control region.

[0217] Human β-Globin Locus

[0218] The human β-globin locus is composed of five β-like genes and one pseudo-β gene located on a short region of chromosome 11 (approximately 45 kb), responsible for the creation of the β chains of hemoglobin. Expression of all of these genes is controlled by single locus control region (LCR), and the genes are differentially expressed throughout development. The order of the LCR and genes in the β-globin cluster, as illustrated in FIG. 1B, is as follows: 5′-[LCR]-ε (epsilon, HBE1)-Gγ (G-gamma, HBG1)-Aγ (A-gamma, HBG2)-[ψβ(psi-beta pseudogene)]-δ (delta, HBD)-β (beta, HBB)-3′.

[0219] The arrangement of the five β-like genes reflects the temporal differentiation of their expression during development, with the early-embryonic stage version HbE (encoded by the epsilon gene) being located closest to the LCR, followed by the fetal version HbF (encoded by the γ genes), the delta version, which begins shortly prior to birth and is expressed at low levels in adults as HbA-2 (constituting approximately 3% of adult hemoglobin in normal adults), and finally the beta gene, which encodes the predominant adult version HbA-1 (constituting the remaining 97% of HbA in normal adults).

[0220] Expression of the β-like genes is regulated in embryonic erythropoiesis by many transcription factors, including KLF1, which is associated with the upregulation of HbA in adult definitive erythrocytes, and KLF2, which is associated with the expression of embryonic hemoglobin. BCL11A is activated by KLF1 and is likewise known to be involved in the switch from fetal to adult hemoglobin. Down-regulation of BCL11A expression or disruption of its activity or binding to transcriptional regulatory sites has been a focus of long-terms efforts from various groups to increase levels of HbF. See, e.g., U.S. Pat. No. 8,383,604, US2014085593, US20140093913, and references cited therein.

[0221] Certain naturally-occurring genetic mutations within the human β-globin locus are associated with de-repression of γ-globin gene expression and the clinical manifestation of HPFH. Such mutations range from single base substitutions associated with various forms of non-deletional HFPF, to deletions spanning tens of kb in the case of some forms of deletional HPFH. A variety of naturally-occurring HPFHs were described in A Syllabus of Thalassemia Mutations (1997) by Titus H. J. Huisman, Marianne F. H. Carver, and Erol Baysal, published by The Sickle Cell Anemia Foundation in Augusta, Ga., USA, and references cited therein, including both deletional and non-deletional types.

[0222] A number of different forms of deletional HPFH have been reported based on studies from individuals and families found to have deletions in a region referred to herein as the “δβ-globin region” which extends from the psi-beta pseudogene through delta, beta and the region downstream of beta that is deleted in the larger HPFH alleles such as HPFH-1, as described in the art.

[0223] In some cases of HPFH, nearly all of the hemoglobin produced is HbF. However, in most cases, HbF ranges from approximately 15-30% of total hemoglobin depending on the type of HPFH as well as variation among individuals.

[0224] Deletions Disrupting or Eliminating the β-Globin Gene and Advantages of Such Deletions in Treating SCD

[0225] In certain aspects as described and illustrated herein, in addition to increasing expression of the γ-globin gene product HbF, expression of the β-globin gene product is substantially reduced or eliminated by disruption or elimination of the β-globin gene in connection with the genome editing procedure. This occurs when the genome editing uses DNA endonuclease to effect a pair of DSBs, the first at a 5′ DSB locus and the second at a 3′ DSB locus within the δβ-globin region of human chromosome 11, causing a deletion of the chromosomal DNA between the 5′ DSB locus and the 3′ DSB locus that results in increased expression of γ-globin, the deletion also removes all or a portion of the β-globin gene (HBB) causing a concomitant decrease in expression of or elimination of the β-globin gene product, thereby resulting in a combination of (i) increasing the level of HbF in the cell, and (ii) reducing or eliminating expression of the β-globin gene product from at least one HBB allele on chromosome 11.

[0226] The combined effects of increased HbF and reduced or eliminated β-globin gene expression has particular additional advantages in the context of ameliorating hemoglobinopathies such as SCD in which the product of the variant β-globin allele (i.e. HbS) is harmful to cells expressing it, causing premature cell death (as well as other negative effects associated with HbS). Thus, not only do sickled RBCs cause multiple problems for patients, as discussed above and in the art, but sickled RBCs have a substantially reduced life span relative to normal RBCs. The presence of HbS and sickled RBCs also leads to numerous other negative effects as described herein and in the art.

[0227] In the case of aspects in which the β-globin gene is effectively disrupted or eliminated as described herein, even “knocking down” (reducing) or “knocking out” (eliminating) only one of the β-globin alleles expressing HbS, e.g., by successfully editing only one of the two copies of the gene in homozygous SCD patients (who have two defective β-globin alleles, one on each copy of chromosome 11) can have a very substantial benefit. In particular, increasing levels of HbF to the range of about 20% is considered to substantially eliminate sickling. However, as a relatively continuous or incremental factor (often referred to as a “quantitative trait”) over a significant range, even lower levels HbF can have significant beneficial effects as described herein and in the art. In these aspects, therefore, even though the SCD patient has two defective β-globin alleles, the combination of increasing HbF (which is itself helpful for reducing the effects of SCD) along with reducing HbS (which is itself a driver of many of the deleterious effects in a quantitative manner), by genome editing using the method described and illustrated for these aspects can bring about a combination of effects that together ameliorate one of more symptoms of the disease.

[0228] In some cases, the genome editing procedure can effectively alter both copies of an allele. Such bi-allelic editing can in some cases be screened for or selected for, but even if not selected for it can naturally occur, albeit at lower frequency as compared to mono-allelic or single allele hits, since the same target site generally exists on each member of the pairs of chromosomes.

[0229] For technical reasons as noted above, however, aspects as described and illustrated herein in which only one of the β-globin alleles is disrupted or eliminated—in addition to increasing levels of HbF—would be expected to have significant positive effects in ameliorating one or more symptoms or conditions associated with SCD.

[0230] The ability to generate these significant “cis-type” (on the same allele) effects using the types of genome editing reflected in such aspects can be more advantageous than approaches depending on “trans-type” effects such as those involving knock out or knock down or a trans-acting factor such as a repressor. In particular, as noted above, the genome editing in aspects in which the β-globin gene is effectively disrupted or eliminated can substantially ameliorate effects of HbS by successfully editing on one of the two alleles. In the case of trans-acting repressors, such as a repressor of γ-globin gene expression, knocking down or knocking out one copy of the repressor gene may not be sufficient since expression of the repressor from the other copy of the gene can still reduce γ-globin gene expression limiting the levels of HbF that might be achieved.

[0231] Effects of Increased HbF in the Context of β-Thalassemia

[0232] As noted above, β-thalassemias result from a partial or complete defect in the expression of the β-globin gene, leading to deficient or absent hemoglobin A (HbA). Since there is no production of HbS, RBCs in β-thal patients do not exhibit the sickling and associated problems associated with SCD. However, a different sort of RBC ‘toxicity’ and premature cell death occurs as a result of the lack of HbA in the context of β-thal. In particular, the excess of unpaired alpha globin (α-globin) chains in β thalassemia interact with the red cell (RBC) membrane, causing oxidative damage to membrane skeletal components, and potentially other components. This interaction results in a rigid, mechanically unstable membrane that causes increased apoptosis (i.e. programmed cell death) and shortened RBC survival, marked by ineffective erythropoiesis and anemia.

[0233] Increasing the levels of HbF in RBCs of such patients can significantly ameliorate one or more symptoms of β-thalassemia because the beta-chains produced by increasing γ-globin gene expression can pair with the previously unpaired alpha-chains to produce HbF, which not only results in a functioning hemoglobin tetramer but concomitantly reduces the levels of unpaired α-globin chains that are a contributing cause of the β-thalassemia condition because of premature RBC cell death.

[0234] Positive Selective Advantages of Certain Genome-Edited Cells

[0235] In connection with the foregoing advantages provided in certain aspects of the invention, in particular the advantages in terms of RBC survival for sickle cell RBCs that can be mediated by genome editing that not only increases levels of HbF but reduces levels of HbS, and the advantages in terms of RBC survival for β-thal RBCs that not only increases levels of HbF but reduces levels of unpaired alpha-chains, cells that are modified by such genome editing techniques as described and illustrated herein, in some embodiments, will have selective advantages relative to the population of diseased RBCs into which they can be introduced, e.g., by gene editing a patients' own HSC's or erythroid progenitor cells ex vivo and then reintroducing such cells to the patient, where reintroduced cells must generally successfully persist or “engraft” in order for beneficial effects to be sufficient and sustained.

[0236] As a result of the foregoing selective advantages, the introduction of even modest numbers of suitable stem cells edited as described herein, in some embodiments, would be expected over time to result in improved cells representing a significantly higher fraction of the overall population of RBCs than they were initially following introduction into a patient. By way of illustration, with successfully gene edited stem cells representing as few as several percent of corresponding cells initially (i.e., compared to the population of resident cells that carry the unedited hemoglobinopathy-associated alleles), the gene edited cells could, in some embodiments, come to represent a majority of cells as a result of selective survival advantages conveyed upon them through use of gene editing techniques as described further herein. The eventual numbers reflecting such positively selected engraftment will vary depending generally on both the degree to which the resident diseased cells exhibit reduced lifespan in a given patient, and the relative survival advantage exhibited by the gene edited cells. However, as noted above, the diseased cells associated with SCD and β-thalassemia have significantly reduced lifespans (due to the presence of HbS and unpaired alpha-chains respectively), and certain aspects not only increase levels of HbF but reduce the levels of HbS (associated with SCD) or reduce the levels of unpaired alpha-chains (associated with β-thalassemia), and therefore the relative survival benefits and with them increased engraftment, are expected to be significant.

[0237] Corfu and Corfu-Like Deletions

[0238] Although the Corfu chromosomal allele first discovered in a Greek child results in a δβ-thalassemia, it shares some important characteristics with various deletional forms of HPFH, in particular increased levels of HbF, and therefore the deletion associated with Corfu is included with deletional HPFH forms as described herein.

[0239] However, Corfu is different from forms of deletional HPFH in terms of HbF levels and β-globin expression. Extremely high levels of HbF are associated with Corfu, approaching 100% of total hemoglobin in the case of the first child identified—and this was particularly surprising because Corfu heterozygotes (the child's parents in the first case) were found to have only normal very low levels of HbF (1-2% of total hemoglobin)—a situation that's been referred to by hematologists as the “Corfu Paradox.”

[0240] A putative explanation is that the Corfu chromosomal allele was found to contain a splice site mutation in IVS-I position 5 (“IVS-I-5”) of the β-globin gene and lower levels of the β-globin gene transcript. It has been reported that the high levels of HbF observed are contributed to post-transcriptionally by enhanced mRNA maturation and/or stabilization of the γ-globin transcript, which is apparently associated with the reduced levels of β-globin mRNA; see, e.g., Chakalova, L. et al., Blood 105: 2154-2160 (2005).

[0241] Since the Corfu chromosomal allele contains both the large deletion and the IVS-I-5 mutation, and reduced levels of β-globin mRNA associated with the latter are believed to independently contribute to the unusually high levels of HbF produced, the IVS-I-5 “Corfu-related β-globin mutation” could be used alone or in combination with other gene edited alterations as described herein in order to increase HbF levels for use in ameliorating hemoglobinopathies.

[0242] Target Sequence Selection

[0243] For the amelioration of hemoglobinopathies via gene editing, as described herein, it is desirable but not necessary to achieve levels of HbF at the high end of those observed in naturally-occurring cases in order to bring about relative improvements in the disease. In particular, while it had originally been assumed that relatively high levels of HbF were essential for ameliorative effects to be observed, especially with respect to certain complications, studies have shown that even small incremental increases of HbF can have beneficial effects on mortality. See, e.g., Powars et al., Blood 63(4):921-926 (1984); Platt et al., N Engl J Med 330 (23):1639-1644 (1994); and Akinsheye et al., Blood 118: 19-27 (2011).

[0244] One reason for the beneficial effects of even low levels of HbF in the context of sickle cell disease, is that even small incremental increases in HbF have been shown to have some beneficial effects, and levels of less than 9% of HbF (relative to total hemoglobin, Hb) appear to be associated with significantly decreased mortality; see, e.g., Platt et al., supra.

[0245] Higher levels of HbF are associated with additional clinical benefits and further decreases in morbidity and mortality, as observed in the case of SCD co-inherited with certain naturally-occurring HPFH alleles and/or Corfu thalassemia alleles, in which HbF levels in the 20-30% range have been associated with very substantial to nearly complete normalization of the SCD phenotype.

[0246] Genetic modifications within the δβ-globin region that are contemplated for increasing HbF expression to ameliorate a hemoglobinopathy as described herein result in at least about 5%, at least about 9%, at least about 14%, at least about 20%, at least about 25%, or above 30% HbF (relative to total Hb in a subject).

[0247] As described and illustrated further herein, exemplary genetic modifications within the δβ-globin region that are contemplated for increasing HbF expression to such levels include, but are not limited to, the following deletions, as well as variations thereof in which the size of the deletion is reduced (e.g., by shifting the 5′ boundary of the deletion specified below further toward the 3′ boundary of the deletion specified below or shifting the 3′ boundary of the deletion further toward the 5′ boundary) or increased (by shifting either boundary in the opposite direction). Deletions made by other combinations of two of the following deletion boundaries that increase HbF expression are also specifically contemplated by the disclosure.

[0248] A. Deletions in chromosome 11 within the region Chr11:5224779-5237723 based on the GRCh38/hg38 version of the human genome assembly, wherein the 3′ boundary of the deletion is proximal (as defined below) to Chr11:5224779 and the 5′ boundary of the deletion is proximal to Chr11:5237723;

[0249] B. Deletions in chromosome 11 within region Chr11:5234665-5238138 based on the GRCh38/hg38 version of the human genome assembly, wherein the 3′ boundary of the deletion is proximal to Chr11:5234665 and the 5′ boundary of the deletion is proximal to Chr11:5238138;

[0250] C. Deletions in chromosome 11 within region Chr11:5233055-5240389 based on the GRCh38/hg38 version of the human genome assembly, wherein the 3′ boundary of the deletion is proximal to Chr11:5233055 and the 5′ boundary of the deletion is proximal to Chr11:5240389;

[0251] D. Deletions in chromosome 11 within region Chr11:5226631-5249422 based on the GRCh38/hg38 version of the human genome assembly, wherein the 3′ boundary of the deletion is proximal to Chr11:5226631 and the 5′ boundary of the deletion is proximal to Chr11:5249422;

[0252] E. Deletions in chromosome 11 within region Chr11:5249959-5249971 based on the GRCh38/hg38 version of the human genome assembly wherein the 3′ boundary of the deletion is at or adjacent to (as defined below) Chr11:5249959 and the 5′ boundary of the deletion is at or adjacent to Chr11:5249971;

[0253] F. Deletions in chromosome 11 within region Chr11:5196709-5239223 based on the GRCh38/hg38 version of the human genome assembly, wherein the 3′ boundary of the deletion is proximal to Chr11:5196709 and the 5′ boundary of the deletion is proximal to Chr11:5239223;

[0254] G. Deletions in chromosome 11 within region Chr11:5225700-5236750 based on the GRCh38/hg38 version of the human genome assembly, wherein the 3′ boundary of the deletion is proximal to Chr11:5225700 and the 5′ boundary of the deletion is proximal to Chr11:5236750;

[0255] H. Deletions in chromosome 11 within region Chr11:5234655-5238138 based on the GRCh38/hg38 version of the human genome assembly, wherein the 3′ boundary of the deletion is proximal to Chr11:5234655 and the 5′ boundary of the deletion is proximal to Chr11:5238138;

[0256] I. Deletions in chromosome 11 within region Chr11:5255885-5259368 based on the GRCh37/hg19 version of the human genome assembly, wherein the 3′ boundary of the deletion is proximal to Chr11:5255885 and the 5′ boundary of the deletion is proximal to Chr11:5259368.

[0257] In another aspect, provided herein are methods of increasing the level of HbF in a human cell by genome editing using DNA endonuclease to effect a double-strand break (DSB) positioned at one or more loci within the human β-globin region of human chromosome 11, wherein at least one SSB or DSB is positioned within the γ-globin regulatory region of human chromosome 11, which is located within a region less than 2 kb, less than 1 kb, less than 0.5 kb, or less than 0.25 kb upstream of the start of one of the γ-globin genes (HBG1 or HBG2), causing deletions or insertions of chromosomal DNA at the one or more loci that results in increased expression of γ-globin, thereby increasing the level of HbF in the cell. In another type of method exemplifying this aspect, at least one SSB or DSB is positioned within the δβ-globin region of human chromosome 11.

[0258] Illustrative modifications in chromosome 11 in the γ-globin regulatory region include the creation of single base substitutions such as −175 (T to C), −202 (C to G), and −114 (C to T) in the ^{G}γ gene; and −196 (C to T), −175 (T to C), −117 (G to A) in the ^{A}γ gene.

[0259] Illustrative modifications within the δβ-globin region include deletions and insertions within or proximal to the HPFH deletion loci referred to above, and deletions within the δ-globin regulatory region of human chromosome 11 which is located within the region of less than 3 kb, less than 2 kb, less than 1 kb, less than 0.5 kb upstream of the start of the δ-globin gene (HBD), and deletions within the β-globin regulatory region of human chromosome 11, which is located within the region of less than 3 kb, less than 2 kb, and less than 1 kb, or less than 0.5 kb upstream of the start of the β-globin gene (HBB).

[0260] Given the relatively wide variations in deletions that are associated with various forms of HPFH, coupled with the fact that even low levels of HbF can provide significant levels of amelioration of hemoglobinopathy (as noted above), and the understanding from a variety of studies that there appear to be multiple loci and types of controls that can contribute to repression of HbF, it will be appreciated that numerous variations of the deletions referenced above (including without limitation larger as well as smaller deletions), would be expected to result in levels of HbF that are within the contemplated ranges, as noted above.

[0261] Such variants include deletions that are larger in the 5′ and/or 3′ direction than naturally-occurring HPFH deletions, or smaller in either direction. Accordingly, by “proximal” with respect to HPFH-like deletions, it is intended that the DSB locus associated with a desired deletion boundary (also referred to herein as an endpoint) can be within a region that is less than about 3 kb from the reference locus noted. In some aspects, the DSB locus is more proximal and within 2 kb, within 1 kb, within 0.5 kb, or within 0.1 kb. In the case of small deletions such as that identified in group E, the desired endpoint can be at or “adjacent to” the reference locus, by which it is intended that the endpoint can be within 100 bp, within 50 bp, within 25 bp, or less than about 10 bp to 5 bp from the reference locus.

[0262] A group of aspects can comprise deletions within the “δ-region” (which includes the downstream half of the intergenic sequence between the ωβ1 pseudogene and the δ gene HBD, and proximal sequences downstream sequences in the δ). The δ-proximal-region appears to include a number of elements associated with repression of γ-globin. The 7.2 kb “Large Corfu” δβ thalassemia deletion described and exemplified further herein falls within the δ-region, deleting approximately 1 kb of the δ gene and 6 kb upstream, and can be associated with a significant increase in levels of HbF. A 3.5 “Small Corfu” deletion, described further and illustrated herein, likewise has a deletion in the δ-region, and can be also associated with increased levels of HbF. The δ-region can be also deleted in all major forms of HPFH.

[0263] With respect to regions further downstream in the 3′ direction, which would be associated with larger deletions as described herein, HPFH-1 through HPFH-5 all have the δ and β genes deleted. Besides regulatory elements in the δ-region that may contribute to active repression of γ-globin, activity of the δ and β promoters can also indirectly contribute to suppression via competition for transcriptional factors required for γ-globin expression.

[0264] Many HPFH types also have even larger deletions extending further downstream, and these additional downstream regions can also be incorporated into deletions as described and illustrated herein, since they are known to be associated with substantial increases of HbF, well above the ranges of HbF known to ameliorate hemoglobinopathies as noted above.

[0265] One advantage for patients with hemoglobinopathies of replicating or mimicking aspects of deletions that are found naturally in individuals with HPFH is that such deletions are already known to be both safe and associated with the amelioration of hemoglobinopathy. However, among deletional HPFH, it is also clear that smaller deletions such as HPFH-5 are effective for generating substantial increases in HbF. Other aspects comprising smaller deletions are expected to provide substantial increases, and as noted above, even modest levels of increase of HbF have beneficial effects. It is thus expected that many variations of the deletions described and illustrated herein will be effective for ameliorating hemoglobinopathies.

[0266] Preferentially, shifts in the location of the 5′ boundary and/or the 3′ boundary relative to particular reference loci are used to facilitate or enhance particular applications of gene editing, which depend in part on the endonuclease system selected for the editing, as further described and illustrated herein. In a first aspect of such target sequence selection, many endonuclease systems have rules or criteria that guide the initial selection of potential target sites for cleavage, such as the requirement of a PAM sequence motif in a particular position adjacent to the DNA cleavage sites in the case of CRISPR Type II endonucleases.

[0267] In another aspect of target sequence selection or optimization, the frequency of “off-target” activity for a particular combination of target sequence and gene editing endonuclease (i.e. the frequency of DSBs occurring at sites other than the selected target sequence) is assessed relative to the frequency of on-target activity. In some cases, cells that have been correctly edited at the desired locus may have a selective advantage relative to other cells. Illustrative but nonlimiting examples of a selective advantage include the acquisition of attributes such as enhanced rates of replication, persistence, resistance to certain conditions, enhanced rates of successful engraftment or persistence in vivo following introduction into a patient, and other attributes associated with the maintenance or increased numbers or viability of such cells. In other cases, cells that have been correctly edited at the desired locus may be positively selected for by one or more screening methods used to identify, sort or otherwise select for cells that have been correctly edited. Both selective advantage and directed selection methods may take advantage of the phenotype associated with the correction.

[0268] Whether or not any selective advantage is applicable or any directed selection is to be applied in a particular case, target sequence selection is can also be guided by consideration of off-target frequencies in order to enhance the effectiveness of the application and/or reduce the potential for undesired alterations at sites other than the desired target. As described further and illustrated herein and in the art, the occurrence of off-target activity is influenced by a number of factors including similarities and dissimilarities between the target site and various off target sites, as well as the particular endonuclease used. In many cases, bioinformatics tools are available that assist in the prediction of off-target activity, and frequently such tools can also be used to identify the most likely sites of off-target activity, which can then be assessed in experimental settings to evaluate relative frequencies of off-target to on-target activity, thereby allowing the selection of sequences that have higher relative on-target activities. Illustrative examples of such techniques are provided herein and others are known in the art.

[0269] Another aspect of target sequence selection relates to homologous recombination events. It is well known that sequences sharing regions of homology can serve as focal points for homologous recombination events that result in deletion of intervening sequences. Such recombination events occur during the normal course of replication of chromosomes and other DNA sequences, and also at other times when DNA sequences are being synthesized, such as in the case of repairs of double-strand breaks (DSBs) which occur on a regular basis during the normal cycle but may also be enhanced by the occurrence of various events (such as UV light and other inducers of DNA breakage) or the presence of certain agents (such as various chemical inducers). Many such inducers cause DSBs to occur indiscriminately in the genome, and DSBs are regularly being induced and repaired in normal cells. During repair, the original sequence may be reconstructed with complete fidelity, however, in some cases, small insertions or deletions (referred to as “indels”) are introduced at the DSB site.

[0270] DSBs may also be specifically induced at particular locations, as in the case of the endonucleases systems described herein, which can be used to cause directed or preferential gene modification events at selected chromosomal locations. The tendency for homologous sequences to be subject to recombination in the context of DNA repair (as well as replication) can be taken advantage of in a number of circumstances, and is the basis for one application of gene editing systems such as CRISPR in which homology directed repair (HDR) is used to insert a sequence of interest, provided through use of a “donor” polynucleotide, into a desired chromosomal location.

[0271] Regions of homology between particular sequences, which can be small regions of “microhomology” that may comprise as few as ten basepairs or less, can also be used to bring about desired deletions. For example, in the case of the so-called “small deletion” exemplified herein, a single DSB is introduced at a site that exhibits microhomology with a nearby sequence. During the normal course of repair of such DSB, a result that occurs with high frequency is the deletion of the intervening sequence as a result of recombination being facilitated by the DSB and concomitant cellular repair process. In the case of this small deletion, which is in the upstream region of the γ-globin gene, the result of the deletion is to increase levels of HbF, apparently through disruption of a gene silencing sequence.

[0272] In some circumstances, however, selecting target sequences within regions of homology can also give rise to much larger deletions including gene fusions (when the deletions are in coding regions), which may or may not be desired given the particular circumstances. For example, as illustrated in FIG. 5B, the homologies that exist between the two closely-related γ-globin genes HBG1 and HBG2 can give rise to large deletions arising through homologous recombination between more distal sites of homology.

[0273] The examples provided herein further illustrate the selection of various target regions for the creation of DSBs designed to induce deletions that result in the increase of HbF levels in human cells, as well as the selection of specific target sequences within such regions that are designed to minimize off-target events relative to on-target events.

[0274] HBS1 L-MYB on Chromsome 6

[0275] Genetic studies have identified common variants within the intergenic region (HBS1 L-MYB) between GTP-binding elongation factor HBS1L and myeloblastosis oncogene MYB on chromosome 6.

[0276] Therapeutic Approach

[0277] In some aspects, the overall therapeutic approach is to introduce a permanent deletion, inversion, or mutation within or near two or more of: a human beta globin locus on chromosome 11; a BCL11A gene on chromosome 2 or a DNA sequence that encodes a transcriptional control region of the BCL11A gene on chromsome 2; and an intergenic region HBS1L-MYB on chromsome 6. For example, one therapautic approach includes introducing a permanent deletion, inversion, or mutation within or near a human beta globin locus on chromosome 11; and a BCL11A gene on chromosome 2 or a DNA sequence that encodes a transcriptional control region of the BCL11A gene on chromsome 2. A second example therapautic approach includes introducing a permanent deletion, inversion, or mutation within or near a human beta globin locus on chromosome 11; and an intergenic region HBS1 L-MYB on chromsome 6. A third example therapautic approach includes introducing a permanent deletion, inversion, or mutation within or near a BCL11A gene on chromosome 2 or a DNA sequence that encodes a transcriptional control region of the BCL11A gene on chromsome 2; and an intergenic region HBS1 L-MYB on chromsome 6. A fourth example therapautic approach includes introducing a permanent deletion, inversion, or mutation within or near a human beta globin locus on chromosome 11; a BCL11A gene on chromosome 2 or a DNA sequence that encodes a transcriptional control region of the BCL11A gene on chromsome 2; and an intergenic region HBS1 L-MYB on chromsome 6. These therapeutic approaches can lead to an increase in expression of γ-globin and thereby increase production of HbF.

[0278] Additional Therapeutic Approach

[0279] In some embodiments, permanent deletions within or near the human beta globin locus on chromsome 11 can be used to reposition a BCL11A enhancing region (located within the human beta globin locus) closer to the HBG1 and/or HBG2 genes. For example, a HPFH deletion can be located downstream of a HBG1 gene and result in a repositioning of a BCL11A enhancing region closer to the HBG1 gene. A HPFH deletion can be located downstream of a HBG2 gene and result in a repositioning of a BCL11A enhancing region closer to the HBG2 gene. A HPFH deletion can be located downstream of a HBG1 gene and HBG2 gene and result in a repositioning of a BCL11A enhancing region closer to the HBG1 gene and HBG2 gene.

[0280] Genome Editing

[0281] Genome editing generally refers to the process of modifying the nucleotide sequence of a genome, preferably in a precise or pre-determined manner. Examples of methods of genome editing described herein include methods of using site-directed nucleases to cut DNA at precise target locations in the genome, thereby creating single-strand or double-strand DNA breaks at particular locations within the genome. Such breaks can be and regularly are repaired by natural, endogenous cellular processes such as homology-directed repair (HDR) and non-homologous end-joining (NHEJ), as recently reviewed in Cox et al., Nature Medicine 21(2), 121-31 (2015). These two main DNA repair processes consist of a family of alternative pathways. NHEJ directly joins the DNA ends resulting from a double-strand break sometimes with the loss or addition of nucleotide sequence which may disrupt or enhance gene expression. HDR utilizes a homologous sequence, or donor sequence, as a template for inserting a defined DNA sequence at the break point. The homologous sequence can be in the endogenous genome, such as a sister chromatid. Alternatively, the donor can be an exogenous nucleic acid such as a plasmid, a single-strand oligonucleotide, a double-stranded oligonucleotide, a duplex oligonucleotide or a virus, that has regions of high homology with the nuclease-cleaved locus, but which can also contain additional sequence or sequence changes including deletions that can be incorporated into the cleaved target locus. A third repair mechanism can be microhomology-mediated end joining (MMEJ), also referred to as “Alternative NHEJ, in which the genetic outcome is similar to NHEJ in that small deletions and insertions can occur at the cleavage site. MMEJ can make use of homologous sequences of a few basepairs flanking the DNA break site to drive a more favored DNA end joining repair outcome, and recent reports have further elucidated the molecular mechanism of this process; see, e.g., Cho and Greenberg, Nature 518, 174-76 (2015); Kent et al., Nature Structural and Molecular Biology, Adv. Online doi:10.1038/nsmb.2961(2015); Mateos-Gomez et al., Nature 518, 254-57 (2015); Ceccaldi et al., Nature 528, 258-62 (2015). In some instances it may be possible to predict likely repair outcomes based on analysis of potential microhomologies at the site of the DNA break.

[0282] Each of these genome editing mechanisms can be used to create desired genomic alterations. A step in the genome editing process can be to create one or two DNA breaks, the latter as double-strand breaks or as two single-stranded breaks, in the target locus as near the site of intended mutation. This can be achieved via the use of site-directed polypeptides, as described and illustrated herein.

[0283] Site-directed polypeptides, such as a DNA endonuclease, can introduce double-strand breaks or single-strand breaks in nucleic acids, e.g., genomic DNA. The double-strand break can stimulate a cell's endogenous DNA-repair pathways (e.g., homology-dependent repair or non-homologous end joining or alternative non-homologous end joining (A-NHEJ) or microhomology-mediated end joining). NHEJ can repair cleaved target nucleic acid without the need for a homologous template. This can sometimes result in small deletions or insertions (indels) in the target nucleic acid at the site of cleavage, and can lead to disruption or alteration of gene expression. HDR can occur when a homologous repair template, or donor, is available. The homologous donor template can comprise sequences that can be homologous to sequences flanking the target nucleic acid cleavage site. The sister chromatid can be used by the cell as the repair template. However, for the purposes of genome editing, the repair template can be supplied as an exogenous nucleic acid, such as a plasmid, duplex oligonucleotide, single-strand oligonucleotide, double-stranded oligonucleotide, or viral nucleic acid. With exogenous donor templates, an additional nucleic acid sequence (such as a transgene) or modification (such as a single or multiple base change or a deletion) can be introduced between the flanking regions of homology so that the additional or altered nucleic acid sequence also becomes incorporated into the target locus. MMEJ can result in a genetic outcome that is similar to NHEJ in that small deletions and insertions can occur at the cleavage site. MMEJ can make use of homologous sequences of a few basepairs flanking the cleavage site to drive a favored end-joining DNA repair outcome. In some instances it may be possible to predict likely repair outcomes based on analysis of potential microhomologies in the nuclease target regions.

[0284] Thus, in some cases, homologous recombination can be used to insert an exogenous polynucleotide sequence into the target nucleic acid cleavage site. An exogenous polynucleotide sequence is termed a donor polynucleotide (or donor or donor sequence or polynucleotide donor template) herein. The donor polynucleotide, a portion of the donor polynucleotide, a copy of the donor polynucleotide, or a portion of a copy of the donor polynucleotide can be inserted into the target nucleic acid cleavage site. The donor polynucleotide can be an exogenous polynucleotide sequence, i.e., a sequence that does not naturally occur at the target nucleic acid cleavage site.

[0285] The modifications of the target DNA due to NHEJ and/or HDR can lead to, for example, mutations, deletions, alterations, integrations, gene correction, gene replacement, gene tagging, transgene insertion, nucleotide deletion, gene disruption, translocations and/or gene mutation. The processes of deleting genomic DNA and integrating non-native nucleic acid into genomic DNA are examples of genome editing.

[0286] Nucleases

[0287] Gene editing can be conducted using nucleases engineered to target specific sequences. To date there are four major types of nucleases: meganucleases and their derivatives, zinc finger nucleases (ZFNs), transcription activator like effector nucleases (TALENs), and CRISPR endonuclease (e.g., CRISPR-Cas9 nuclease) systems. The nuclease platforms vary in difficulty of design, targeting density and mode of action, particularly as the specificity of ZFNs and TALENs is through protein-DNA interactions, while RNA-DNA interactions primarily guide CRISPR endonucleases such as Cas9. Cas9 cleavage also requires an adjacent motif, the PAM, which differs between different CRISPR systems. Cas9 from Streptococcus pyogenes cleaves using a NGG PAM, CRISPR from Neisseria meningitidis can cleave at sites with PAMs including NNNNGATT, NNNNNGTTT and NNNNGCTT. A number of other Cas9 orthologs target protospacer adjacent to alternative PAMs.

[0288] In some embodiments, CRISPR endonucleases, such as Cas9, can be used in the methods of the present disclosure. However, the teachings described herein, such as therapeutic target sites, could be applied to other forms of endonucleases, such as ZFNs, TALENs, HEs, or MegaTALs, or using combinations of nulceases. However, in order to apply the teachings of the present disclosure to such endonucleases, one would need to, among other things, engineer proteins directed to the specific target sites.

[0289] Additional binding domains can be fused to the Cas9 or other CRISPR endonuclease protein to increase specificity. The target sites of these constructs would map to the identified gRNA specified site, but would require additional binding motifs, such as for a zinc finger domain. In the case of Mega-TAL, a meganuclease can be fused to a TALE DNA-binding domain. The meganuclease domain can increase specificity and provide the cleavage. Similarly, inactivated or dead Cas9 (dCas9) can be fused to a cleavage domain and require the sgRNA/Cas9 target site and adjacent binding site for the fused DNA-binding domain. This likely would require some protein engineering of the dCas9, in addition to the catalytic inactivation, to decrease binding without the additional binding site.

[0290] Zinc Finger Nucleases

[0291] Zinc finger nucleases (ZFNs) are modular proteins comprised of an engineered zinc finger DNA binding domain linked to the catalytic domain of the type II endonuclease FokI. Since FokI functions only as a dimer, a pair of ZFNs must be engineered to bind to cognate target “half-site” sequences on opposite DNA strands and with precise spacing between them to enable the catalytically active FokI dimer to form. Upon dimerization of the FokI domain, which itself has no sequence specificity per se, a DNA double-strand break is generated between the ZFN half-sites as the initiating step in genome editing.

[0292] The DNA binding domain of each ZFN can comprise 3-6 zinc fingers of the abundant Cys2-His2 architecture, with each finger primarily recognizing a triplet of nucleotides on one strand of the target DNA sequence, although cross-strand interaction with a fourth nucleotide also can be important. Alteration of the amino acids of a finger in positions that make key contacts with the DNA alters the sequence specificity of a given finger. Thus, a four-finger zinc finger protein can selectively recognize a 12 bp target sequence, where the target sequence is a composite of the triplet preferences contributed by each finger, although triplet preference can be influenced to varying degrees by neighboring fingers. An important aspect then of ZFNs is that they can be readily retargeted to almost any genomic address simply by modifying individual fingers, although considerable expertise is required to do this well. In most applications of ZFNs, proteins of 4-6 fingers can be used, recognizing 12-18 bp respectively. Hence, a pair of ZFNs will typically recognize a combined target sequence of 24-36 bp, not including the 5-7 bp spacer between half-sites. The binding sites can be separated further with larger spacers, including 15-17 bp. A target sequence of this length is likely to be unique in the human genome, assuming repetitive sequences or gene homologs are excluded during the design process. Nevertheless, the ZFN protein-DNA interactions are not absolute in their specificity and so off-target binding and cleavage events do occur, either as a heterodimer between the two ZFNs, or as a homodimer of one or the other of the ZFNs. The latter possibility has been effectively eliminated by engineering the dimerization interface of the FokI domain to create “plus” and “minus” variants, also known as obligate heterodimer variants, which can only dimerize with each other and not with themselves. Forcing the obligate heterodimer prevents formation of the homodimer. This has greatly enhanced specificity of ZFNs, as well as, of any other nuclease that adopts these FokI variants.

[0293] A variety of ZFN-based systems have been described in the art, modifications thereof are regularly reported, and numerous references describe rules and parameters that are used to guide the design of ZFNs; see, e.g., Segal et al., Proc Natl Acad Sci USA 96(6):2758-63 (1999); Dreier B et al., J Mol Biol. 303(4):489-502 (2000); Liu Q et al., J Biol Chem. 277(6):3850-6 (2002); Dreier et al., J Biol Chem 280(42):35588-97 (2005); and Dreier et al., J Biol Chem. 276(31):29466-78 (2001).

[0294] Transcription Activator-Like Effector Nucleases (TALENs)

[0295] TALENs represent another format of modular nucleases whereby, as with ZFNs, an engineered DNA binding domain is linked to the FokI nuclease domain, and a pair of TALENs operates in tandem to achieve targeted DNA cleavage. The major difference from ZFNs is the nature of the DNA binding domain and the associated target DNA sequence recognition properties. The TALEN DNA binding domain derives from TALE proteins, which were, originally described in the plant bacterial pathogen Xanthomonas sp. TALEs are comprised of tandem arrays of 33-35 amino acid repeats, with each repeat recognizing a single basepair in the target DNA sequence that is typically up to 20 bp in length, giving a total target sequence length of up to 40 bp. Nucleotide specificity of each repeat is determined by the repeat variable diresidue (RVD) which includes just two amino acids at positions 12 and 13. The bases guanine, adenine, cytosine and thymine are predominantly recognized by the four RVDs Asn-Asn, Asn-Ile, His-Asp and Asn-Gly, respectively. This constitutes a much simpler recognition code than for zinc fingers and thus represents an advantage over the latter for nuclease design. Nevertheless, as with ZFNs, the protein-DNA interactions of TALENs are not absolute in their specificity and TALENs have also benefitted from the use of the obligate heterodimer variants of the FokI domain to reduce off-target activity.

[0296] Additional variants of the FokI domain have been created that can be deactivated in their catalytic function. If one half of either a TALEN or a ZFN pair contains an inactive FokI domain then only single-strand DNA cleavage (nicking) will occur at the target site rather than a DSB. The outcome is comparable to the use of CRISPR/Cas9/Cpf1 “nickase” mutants in which one of the Cas9 cleavage domains has been deactivated. DNA nicks can be used to drive genome editing by HDR, but at lower efficiency than with a DSB. The main benefit is that off-target nicks are quickly and accurately repaired, unlike the DSB which is prone to NHEJ-mediated mis-repair.

[0297] A variety of TALEN-based systems have been described in the art, and modifications thereof are regularly reported; see, e.g., Boch, Science 326(5959):1509-12 (2009); Mak et al., Science 335(6069):716-9 (2012); and Moscou et al., Science 326(5959):1501 (2009). The use of TALENs based on the “Golden Gate” platform, or cloning scheme, has been described by multiple groups; see, e.g., Cermak et al., Nucleic Acids Res. 39(12):e82 (2011); Li et al., Nucleic Acids Res. 39(14):6315-25(2011); Weber et al., PLoS One. 6(2):e16765 (2011); Wang et al., J Genet Genomics 41(6):339-47, Epub 2014 May 17 (2014); and Cermak T et al., Methods Mol Biol. 1239:133-59 (2015).

[0298] Homing Endonucleases

[0299] Homing endonucleases (HE) are sequence-specific endonucleases that have long recognition sequences (14-44 base pairs) and cleave DNA with high specificity—often at sites unique in the genome. There are at least six known families of HEs as classified by their structure, including LAGLIDADG (SEQ ID NO 228,300), GIY-YIG, His-Cis box, H-N-H, PD-(D/E)xK, and Vsr-like that are derived from a broad range of hosts including eukarya, protists, bacteria, archaea, cyanobacteria and phage. As with ZFNs and TALENs, HEs can be used to create a DSB at a target locus as the initial step in genome editing. In addition, some natural and engineered HEs cut only a single strand of the DNA, thereby functioning as site-specific nickases. The large target sequence of HEs and the specificity that they offer have made them attractive candidates to create site-specific DSBs.

[0300] A variety of HE-based systems have been described in the art, and modifications thereof are regularly reported; see, e.g., the reviews by Steentoft et al., Glycobiology 24(8):663-80 (2014); Belfort and Bonocora, Methods Mol Biol. 1123:1-26 (2014); Hafez and Hausner, Genome 55(8):553-69 (2012); and references cited therein.

[0301] MegaTAL/Tev-mTALEN/MegaTev

[0302] As further examples of hybrid nucleases, the MegaTAL platform and Tev-mTALEN platform use a fusion of the TALE DNA binding domains to catalytically active HEs, taking advantage of both the tunable DNA binding and specificity of the TALE as well as the cleavage sequence specificity of the HE; see, e.g., Boissel et al., NAR 42: 2591-2601 (2014); Kleinstiver et al., G3 4:1155-65 (2014); and Boissel and Scharenberg, Methods Mol. Biol. 1239: 171-96 (2015).

[0303] In a further variation, the MegaTev architecture is the fusion of a meganuclease (Mega) with the nuclease domain derived from the GIY-YIG homing endonuclease I-TevI (Tev). The two active sites are positioned ˜30 bp apart on DNA substrate and generate two DSBs with non-compatible cohesive ends; see, e.g., Wolfs et al., NAR 42, 8816-29 (2014). It is anticipated that other combinations of existing nuclease-based approaches can evolve and be useful in achieving the targeted genome modifications described herein.

[0304] dCas9-FokI and Other Nucleases

[0305] Combining the structural and functional properties of the nuclease platforms described above can offer a further approach to genome editing that can potentially overcome some of the inherent deficiencies. As an example, the CRISPR genome editing system can use a single Cas9 endonuclease to create a DSB. The specificity of targeting is driven by a 20 or 24 nucleotide sequence in the guide RNA that undergoes Watson-Crick base-pairing with the target DNA (plus an additional 2 bases in the adjacent NAG or NGG PAM sequence in the case of Cas9 from S. pyogenes). Such a sequence is long enough to be unique in the human genome, however, the specificity of the RNA/DNA interaction is not absolute, with significant promiscuity sometimes tolerated particularly in the 5′ half of the target sequence, effectively reducing the number of bases that drive specificity. One solution to this has been to completely deactivate the Cas9 or Cpf-1 catalytic function—retaining only the RNA-guided DNA binding function—and instead fusing a FokI domain to the deactivated Cas9; see, e.g., Tsai et al., Nature Biotech 32: 569-76 (2014); and Guilinger et al., Nature Biotech. 32:577-82 (2014). Since FokI has to dimerize to become catalytically active, two guide RNAs are required to tether two Cas9-FokI fusions in close proximity to form the dimer and cleave DNA. This essentially doubles the number of bases in the combined target sites, thereby increasing the stringency of targeting by CRISPR-based systems.

[0306] As further example, fusion of the TALE DNA binding domain to a catalytically active HE, such as I-TevI, takes advantage of both the tunable DNA binding and specificity of the TALE as well as the cleavage sequence specificity of I-TevI, with the expectation that off-target cleavage can be further reduced.

[0307] CRISPR Endonuclease System

[0308] A CRISPR (Clustered Regularly Interspaced Short Palindromic Repeats) genomic locus can be found in the genomes of many prokaryotes (e.g., bacteria and archaea). In prokaryotes, the CRISPR locus encodes products that function as a type of immune system to help defend the prokaryotes against foreign invaders, such as virus and phage. There are three stages of CRISPR locus function: integration of new sequences into the CRISPR locus, expression of CRISPR RNA (crRNA), and silencing of foreign invader nucleic acid. Five types of CRISPR systems (e.g., Type I, Type II, Type III, Type U, and Type V) have been identified.

[0309] A CRISPR locus includes a number of short repeating sequences referred to as “repeats”. When expressed, the repeats can form secondary structures (e.g., hairpins) and/or comprise unstructured single-stranded sequences. The repeats usually occur in clusters and frequently diverge between species. The repeats are regularly interspaced with unique intervening sequences referred to as “spacers”, resulting in a repeat-spacer-repeat locus architecture. The spacers are identical to or have high homology with known foreign invader sequences. A spacer-repeat unit encodes a crisprRNA (crRNA), which is processed into a mature form of the spacer-repeat unit. A crRNA comprises a “seed” or spacer sequence that is involved in targeting a target nucleic acid (in the naturally occurring form in prokaryotes, the spacer sequence targets the foreign invader nucleic acid). A spacer sequence is located at the 5′ or 3′ end of the crRNA.

[0310] A CRISPR locus also comprises polynucleotide sequences encoding CRISPR Associated (Cas) genes. Cas genes encode endonucleases involved in the biogenesis and the interference stages of crRNA function in prokaryotes. Some Cas genes comprise homologous secondary and/or tertiary structures.

[0311] Type II CRISPR Systems

[0312] crRNA biogenesis in a Type II CRISPR system in nature requires a trans-activating CRISPR RNA (tracrRNA). The tracrRNA can be modified by endogenous RNaseIII, and then hybridizes to a crRNA repeat in the pre-crRNA array. Endogenous RNaseIII can be recruited to cleave the pre-crRNA. Cleaved crRNAs can be subjected to exoribonuclease trimming to produce the mature crRNA form (e.g., 5′ trimming). The tracrRNA can remain hybridized to the crRNA, and the tracrRNA and the crRNA associate with a site-directed polypeptide (e.g., Cas9). The crRNA of the crRNA-tracrRNA-Cas9 complex can guide the complex to a target nucleic acid to which the crRNA can hybridize. Hybridization of the crRNA to the target nucleic acid can activate Cas9 for targeted nucleic acid cleavage. The target nucleic acid in a Type II CRISPR system is referred to as a protospacer adjacent motif (PAM). In nature, the PAM is essential to facilitate binding of a site-directed polypeptide (e.g., Cas9) to the target nucleic acid. Type II systems (also referred to as Nmeni or CASS4) are further subdivided into Type II-A (CASS4) and II-B (CASS4a). Jinek et al., Science, 337(6096):816-821 (2012) showed that the CRISPR/Cas9 system is useful for RNA-programmable genome editing, and international patent application publication number WO2013/176772 provides numerous examples and applications of the CRISPR/Cas endonuclease system for site-specific gene editing.

[0313] Type V CRISPR Systems

[0314] Type V CRISPR systems have several important differences from Type II systems. For example, Cpf1 is a single RNA-guided endonuclease that, in contrast to Type II systems, lacks tracrRNA. In fact, Cpf1-associated CRISPR arrays can be processed into mature crRNAs without the requirement of an additional trans-activating tracrRNA. The Type V CRISPR array can be processed into short mature crRNAs of 42-44 nucleotides in length, with each mature crRNA beginning with 19 nucleotides of direct repeat followed by 23-25 nucleotides of spacer sequence. In contrast, mature crRNAs in Type II systems can start with 20-24 nucleotides of spacer sequence followed by about 22 nucleotides of direct repeat. Also, Cpf1 can utilize a T-rich protospacer-adjacent motif such that Cpf1-crRNA complexes efficiently cleave target DNA preceeded by a short T-rich PAM, which is in contrast to the G-rich PAM following the target DNA for Type II systems. Thus, Type V systems cleave at a point that is distant from the PAM, while Type II systems cleave at a point that is adjacent to the PAM. In addition, in contrast to Type II systems, Cpf1 cleaves DNA via a staggered DNA double-stranded break with a 4 or 5 nucleotide 5′ overhang. Type II systems cleave via a blunt double-stranded break. Similar to Type II systems, Cpf1 contains a predicted RuvC-like endonuclease domain, but lacks a second HNH endonuclease domain, which is in contrast to Type II systems.

[0315] Cas Genes/Polypeptides and Protospacer Adjacent Motifs

[0316] Exemplary CRISPR Cas polypeptides include the Cas9 polypeptides in FIG. 1 of Fonfara et al., Nucleic Acids Research, 42: 2577-2590 (2014). The CRISPR/Cas gene naming system has undergone extensive rewriting since the Cas genes were discovered. FIG. 5 of Fonfara, supra, provides PAM sequences for the Cas9 polypeptides from various species.

[0317] Site-Directed Polypeptides

[0318] A site-directed polypeptide is a nuclease used in genome editing to cleave DNA. The site-directed nuclease or polypeptide can be administered to a cell or a patient as either: one or more polypeptides, or one or more mRNAs encoding the polypeptide.

[0319] In the context of a CRISPR/Cas or CRISPR/Cpf1system, the site-directed polypeptide can bind to a guide RNA that, in turn, specifies the site in the target DNA to which the polypeptide is directed. In the CRISPR/Cas or CRISPR/Cpf1 systems disclosed herein, the site-directed polypeptide can be an endonuclease, such as a DNA endonuclease.

[0320] A site-directed polypeptide can comprise a plurality of nucleic acid-cleaving (i.e., nuclease) domains. Two or more nucleic acid-cleaving domains can be linked together via a linker. For example, the linker can comprise a flexible linker. Linkers can comprise 1, 2, 3, 4, 5, 6, 7, 8, 9, 10, 11, 12, 13, 14, 15, 16, 17, 18, 19, 20, 21, 22, 23, 24, 25, 30, 35, 40 or more amino acids in length.

[0321] Naturally-occurring wild-type Cas9 enzymes comprise two nuclease domains, a HNH nuclease domain and a RuvC domain. Herein, the “Cas9” refers to both naturally-occurring and recombinant Cas9s. Cas9 enzymes contemplated herein can comprise a HNH or HNH-like nuclease domain, and/or a RuvC or RuvC-like nuclease domain.

[0322] HNH or HNH-like domains comprise a McrA-like fold. HNH or HNH-like domains comprises two antiparallel β-strands and an α-helix. HNH or HNH-like domains comprises a metal binding site (e.g., a divalent cation binding site). HNH or HNH-like domains can cleave one strand of a target nucleic acid (e.g., the complementary strand of the crRNA targeted strand).

[0323] RuvC or RuvC-like domains comprise an RNaseH or RNaseH-like fold. RuvC/RNaseH domains are involved in a diverse set of nucleic acid-based functions including acting on both RNA and DNA. The RNaseH domain comprises 5 β-strands surrounded by a plurality of α-helices. RuvC/RNaseH or RuvC/RNaseH-like domains comprise a metal binding site (e.g., a divalent cation binding site). RuvC/RNaseH or RuvC/RNaseH-like domains can cleave one strand of a target nucleic acid (e.g., the non-complementary strand of a double-stranded target DNA).

[0324] Site-directed polypeptides can introduce double-strand breaks or single-strand breaks in nucleic acids, (e.g., genomic DNA). The double-strand break can stimulate a cell's endogenous DNA-repair pathways (e.g., homology-dependent repair (HDR) or non-homologous end joining (NHEJ) or alternative non-homologous end joining (A-NHEJ) or microhomology-mediated end joining (MMEJ)). NHEJ can repair cleaved target nucleic acid without the need for a homologous template. This can sometimes result in small deletions or insertions (indels) in the target nucleic acid at the site of cleavage and can lead to disruption or alteration of gene expression. HDR can occur when a homologous repair template, or donor, is available. The homologous donor template can comprise sequences that are homologous to sequences flanking the target nucleic acid cleavage site. The sister chromatid can be used by the cell as the repair template. However, for the purposes of genome editing, the repair template can be supplied as an exogenous nucleic acid, such as a plasmid, duplex oligonucleotide, single-strand oligonucleotide or viral nucleic acid. With exogenous donor templates, an additional nucleic acid sequence (such as a transgene) or modification (such as a single base or multiple base change or a deletion) can be introduced between the flanking regions of homology so that the additional or altered nucleic acid sequence also becomes incorporated into the target locus. MMEJ can result in a genetic outcome that is similar to NHEJ in that small deletions and insertions can occur at the cleavage site. MMEJ can make use of homologous sequences of a few basepairs flanking the cleavage site to drive a favored end-joining DNA repair outcome. In some instances it can be possible to predict likely repair outcomes based on analysis of potential microhomologies in the nuclease target regions.

[0325] Thus, in some cases, homologous recombination can be used to insert an exogenous polynucleotide sequence into the target nucleic acid cleavage site. An exogenous polynucleotide sequence is termed a donor polynucleotide (or donor or donor sequence) herein. The donor polynucleotide, a portion of the donor polynucleotide, a copy of the donor polynucleotide, or a portion of a copy of the donor polynucleotide can be inserted into the target nucleic acid cleavage site. The donor polynucleotide can be an exogenous polynucleotide sequence, i.e., a sequence that does not naturally occur at the target nucleic acid cleavage site.

[0326] The modifications of the target DNA due to NHEJ and/or HDR can lead to, for example, mutations, deletions, alterations, integrations, gene correction, gene replacement, gene tagging, transgene insertion, nucleotide deletion, gene disruption, translocations and/or gene mutation. The processes of deleting genomic DNA and integrating non-native nucleic acid into genomic DNA are examples of genome editing.

[0327] The site-directed polypeptide can comprise an amino acid sequence having at least 10%, at least 15%, at least 20%, at least 30%, at least 40%, at least 50%, at least 60%, at least 70%, at least 75%, at least 80%, at least 85%, at least 90%, at least 95%, at least 99%, or 100%, amino acid sequence identity to a wild-type exemplary site-directed polypeptide [e.g., Cas9 from S. pyogenes, US2014/0068797 Sequence ID No. 8 or Sapranauskas et al., Nucleic Acids Res, 39(21): 9275-9282 (2011)], and various other site-directed polypeptides.

[0328] The site-directed polypeptide can comprise an amino acid sequence having at least 10%, at least 15%, at least 20%, at least 30%, at least 40%, at least 50%, at least 60%, at least 70%, at least 75%, at least 80%, at least 85%, at least 90%, at least 95%, at least 99%, or 100%, amino acid sequence identity to the nuclease domain of a wild-type exemplary site-directed polypeptide (e.g., Cas9 from S. pyogenes, supra).

[0329] The site-directed polypeptide can comprise at least 70, 75, 80, 85, 90, 95, 97, 99, or 100% identity to a wild-type site-directed polypeptide (e.g., Cas9 from S. pyogenes, supra) over 10 contiguous amino acids. The site-directed polypeptide can comprise at most: 70, 75, 80, 85, 90, 95, 97, 99, or 100% identity to a wild-type site-directed polypeptide (e.g., Cas9 from S. pyogenes, supra) over 10 contiguous amino acids. The site-directed polypeptide can comprise at least: 70, 75, 80, 85, 90, 95, 97, 99, or 100% identity to a wild-type site-directed polypeptide (e.g., Cas9 from S. pyogenes, supra) over 10 contiguous amino acids in a HNH nuclease domain of the site-directed polypeptide. The site-directed polypeptide can comprise at most: 70, 75, 80, 85, 90, 95, 97, 99, or 100% identity to a wild-type site-directed polypeptide (e.g., Cas9 from S. pyogenes, supra) over 10 contiguous amino acids in a HNH nuclease domain of the site-directed polypeptide. The site-directed polypeptide can comprise at least: 70, 75, 80, 85, 90, 95, 97, 99, or 100% identity to a wild-type site-directed polypeptide (e.g., Cas9 from S. pyogenes, supra) over 10 contiguous amino acids in a RuvC nuclease domain of the site-directed polypeptide. The site-directed polypeptide can comprise at most: 70, 75, 80, 85, 90, 95, 97, 99, or 100% identity to a wild-type site-directed polypeptide (e.g., Cas9 from S. pyogenes, supra) over 10 contiguous amino acids in a RuvC nuclease domain of the site-directed polypeptide.

[0330] The site-directed polypeptide can comprise a modified form of a wild-type exemplary site-directed polypeptide. The modified form of the wild-type exemplary site-directed polypeptide can comprise a mutation that reduces the nucleic acid-cleaving activity of the site-directed polypeptide. The modified form of the wild-type exemplary site-directed polypeptide can have less than 90%, less than 80%, less than 70%, less than 60%, less than 50%, less than 40%, less than 30%, less than 20%, less than 10%, less than 5%, or less than 1% of the nucleic acid-cleaving activity of the wild-type exemplary site-directed polypeptide (e.g., Cas9 from S. pyogenes, supra). The modified form of the site-directed polypeptide can have no substantial nucleic acid-cleaving activity. When a site-directed polypeptide is a modified form that has no substantial nucleic acid-cleaving activity, it is referred to herein as “enzymatically inactive”.

[0331] The modified form of the site-directed polypeptide can comprise a mutation such that it can induce a SSB on a target nucleic acid (e.g., by cutting only one of the sugar-phosphate backbones of a double-strand target nucleic acid). The mutation can result in less than 90%, less than 80%, less than 70%, less than 60%, less than 50%, less than 40%, less than 30%, less than 20%, less than 10%, less than 5%, or less than 1% of the nucleic acid-cleaving activity in one or more of the plurality of nucleic acid-cleaving domains of the wild-type site directed polypeptide (e.g., Cas9 from S. pyogenes, supra). The mutation can result in one or more of the plurality of nucleic acid-cleaving domains retaining the ability to cleave the complementary strand of the target nucleic acid, but reducing its ability to cleave the non-complementary strand of the target nucleic acid. The mutation can result in one or more of the plurality of nucleic acid-cleaving domains retaining the ability to cleave the non-complementary strand of the target nucleic acid, but reducing its ability to cleave the complementary strand of the target nucleic acid. For example, residues in the wild-type exemplary S. pyogenes Cas9 polypeptide, such as Asp10, His840, Asn854 and Asn856 are mutated to inactivate one or more of the plurality of nucleic acid-cleaving domains (e.g., nuclease domains). The residues to be mutated can correspond to residues Asp10, His840, Asn854 and Asn856 in the wild-type exemplary S. pyogenes Cas9 polypeptide (e.g., as determined by sequence and/or structural alignment). Non-limiting examples of mutations can include D10A, H840A, N854A or N856A. One skilled in the art will recognize that mutations other than alanine substitutions can be suitable.

[0332] A D10A mutation can be combined with one or more of H840A, N854A, or N856A mutations to produce a site-directed polypeptide substantially lacking DNA cleavage activity. A H840A mutation can be combined with one or more of D10A, N854A, or N856A mutations to produce a site-directed polypeptide substantially lacking DNA cleavage activity. A N854A mutation can be combined with one or more of H840A, D10A, or N856A mutations to produce a site-directed polypeptide substantially lacking DNA cleavage activity. A N856A mutation can be combined with one or more of H840A, N854A, or D10A mutations to produce a site-directed polypeptide substantially lacking DNA cleavage activity. Site-directed polypeptides that comprise one substantially inactive nuclease domain are referred to herein as “nickases”.

[0333] Nickase variants of RNA-guided endonucleases, for example Cas9, can be used to increase the specificity of CRISPR-mediated genome editing. Wild type Cas9 is typically guided by a single guide RNA designed to hybridize with a specified ˜20 nucleotide sequence in the target sequence (such as an endogenous genomic locus). However, several mismatches can be tolerated between the guide RNA and the target locus, effectively reducing the length of required homology in the target site to, for example, as little as 13nt of homology, and thereby resulting in elevated potential for binding and double-strand nucleic acid cleavage by the CRISPR/Cas9 complex elsewhere in the target genome—also known as off-target cleavage. Because nickase variants of Cas9 each only cut one strand, in order to create a double-strand break it is necessary for a pair of nickases to bind in close proximity and on opposite strands of the target nucleic acid, thereby creating a pair of nicks, which is the equivalent of a double-strand break. This requires that two separate guide RNAs—one for each nickase—must bind in close proximity and on opposite strands of the target nucleic acid. This requirement essentially doubles the minimum length of homology needed for the double-strand break to occur, thereby reducing the likelihood that a double-strand cleavage event will occur elsewhere in the genome, where the two guide RNA sites—if they exist—are unlikely to be sufficiently close to each other to enable the double-strand break to form. As described in the art, nickases can also be used to promote HDR versus NHEJ. HDR can be used to introduce selected changes into target sites in the genome through the use of specific donor sequences that effectively mediate the desired changes. Descriptions of various CRISPR-Cas systems for use in gene editing can be found, e.g., in WO2013/176772, and in Nature Biotechnology 32,347-355 (2014), and references cited therein.

[0334] Mutations contemplated can include substitutions, additions, and deletions, or any combination thereof. The mutation converts the mutated amino acid to alanine. The mutation converts the mutated amino acid to another amino acid (e.g., glycine, serine, threonine, cysteine, valine, leucine, isoleucine, methionine, proline, phenylalanine, tyrosine, tryptophan, aspartic acid, glutamic acid, asparagines, glutamine, histidine, lysine, or arginine). The mutation converts the mutated amino acid to a non-natural amino acid (e.g., selenomethionine). The mutation converts the mutated amino acid to amino acid mimics (e.g., phosphomimics). The mutation can be a conservative mutation. For example, the mutation can convert the mutated amino acid to amino acids that resemble the size, shape, charge, polarity, conformation, and/or rotamers of the mutated amino acids (e.g., cysteine/serine mutation, lysine/asparagine mutation, histidine/phenylalanine mutation). The mutation can cause a shift in reading frame and/or the creation of a premature stop codon. Mutations can cause changes to regulatory regions of genes or loci that affect expression of one or more genes.

[0335] The site-directed polypeptide (e.g., variant, mutated, enzymatically inactive and/or conditionally enzymatically inactive site-directed polypeptide) can target nucleic acid. The site-directed polypeptide (e.g., variant, mutated, enzymatically inactive and/or conditionally enzymatically inactive endoribonuclease) can target DNA. The site-directed polypeptide (e.g., variant, mutated, enzymatically inactive and/or conditionally enzymatically inactive endoribonuclease) can target RNA.

[0336] The site-directed polypeptide can comprise one or more non-native sequences (e.g., the site-directed polypeptide is a fusion protein).

[0337] The site-directed polypeptide can comprise an amino acid sequence comprising at least 15% amino acid identity to a Cas9 from a bacterium (e.g., S. pyogenes), a nucleic acid binding domain, and two nucleic acid cleaving domains (i.e., a HNH domain and a RuvC domain).

[0338] The site-directed polypeptide can comprise an amino acid sequence comprising at least 15% amino acid identity to a Cas9 from a bacterium (e.g., S. pyogenes), and two nucleic acid cleaving domains (i.e., a HNH domain and a RuvC domain).

[0339] The site-directed polypeptide can comprise an amino acid sequence comprising at least 15% amino acid identity to a Cas9 from a bacterium (e.g., S. pyogenes), and two nucleic acid cleaving domains, wherein one or both of the nucleic acid cleaving domains comprise at least 50% amino acid identity to a nuclease domain from Cas9 from a bacterium (e.g., S. pyogenes).

[0340] The site-directed polypeptide can comprise an amino acid sequence comprising at least 15% amino acid identity to a Cas9 from a bacterium (e.g., S. pyogenes), two nucleic acid cleaving domains (i.e., a HNH domain and a RuvC domain), and non-native sequence (for example, a nuclear localization signal) or a linker linking the site-directed polypeptide to a non-native sequence.

[0341] The site-directed polypeptide can comprise an amino acid sequence comprising at least 15% amino acid identity to a Cas9 from a bacterium (e.g., S. pyogenes), two nucleic acid cleaving domains (i.e., a HNH domain and a RuvC domain), wherein the site-directed polypeptide comprises a mutation in one or both of the nucleic acid cleaving domains that reduces the cleaving activity of the nuclease domains by at least 50%.

[0342] The site-directed polypeptide can comprise an amino acid sequence comprising at least 15% amino acid identity to a Cas9 from a bacterium (e.g., S. pyogenes), and two nucleic acid cleaving domains (i.e., a HNH domain and a RuvC domain), wherein one of the nuclease domains can comprise a mutation of aspartic acid 10, and/or wherein one of the nuclease domains can comprise a mutation of histidine 840, and wherein the mutation reduces the cleaving activity of the nuclease domain(s) by at least 50%.

[0343] The one or more site-directed polypeptides, e.g. DNA endonucleases, can comprise two nickases that together effect one double-strand break at a specific locus in the genome, or four nickases that together effect or cause two double-strand breaks at specific loci in the genome. Alternatively, one site-directed polypeptide, e.g. DNA endonuclease, can effect or cause one double-strand break at a specific locus in the genome.

[0344] The site-directed polypeptide can be flanked at the N-terminus, the C-terminus, or both the N-terminus and C-terminus by one or more nuclear localization signals (NLSs). For example, a Cas9 endonuclease can be flanked by two NLSs, one NLS located at the N-terminus and the second NLS located at the C-terminus. The NLS can be any NLS known in the art, such as a SV40 NLS.

[0345] Genome-Targeting Nucleic Acid

[0346] The present disclosure provides a genome-targeting nucleic acid that can direct the activities of an associated polypeptide (e.g., a site-directed polypeptide) to a specific target sequence within a target nucleic acid. The genome-targeting nucleic acid can be an RNA. A genome-targeting RNA is referred to as a “guide RNA” or “gRNA” herein. A guide RNA can comprise at least a spacer sequence that hybridizes to a target nucleic acid sequence of interest, and a CRISPR repeat sequence. In Type II systems, the gRNA also comprises a second RNA called the tracrRNA sequence. In the Type II guide RNA (gRNA), the CRISPR repeat sequence and tracrRNA sequence hybridize to each other to form a duplex. In the Type V guide RNA (gRNA), the crRNA forms a duplex. In both systems, the duplex can bind a site-directed polypeptide, such that the guide RNA and site-direct polypeptide form a complex. The genome-targeting nucleic acid can provide target specificity to the complex by virtue of its association with the site-directed polypeptide. The genome-targeting nucleic acid thus can direct the activity of the site-directed polypeptide.

[0347] Each genome-targeting nucleic acid (guide RNA or sgRNA) is designed to include a spacer sequence complementary to its genomic target sequence.

[0348] gRNA spacer sequences for targeting the human beta globin locus with a CRISPR/Cas9 endonuclease from S. pyogenes have been identified in SEQ ID NOs: 1-56,961 of the Sequence Listing.

[0349] gRNA spacer sequences for targeting the human beta globin locus with a CRISPR/Cas9 endonuclease from S. aureus have been identified in SEQ ID NOs: 56,962-64,104 of the Sequence Listing.

[0350] gRNA spacer sequences for targeting the human beta globin locus with a CRISPR/Cas9 endonuclease from N. meningitides have been identified in SEQ ID NOs: 64,105-66,258 of the Sequence Listing.

[0351] gRNA spacer sequences for targeting the human beta globin locus with a CRISPR/Cas9 endonuclease from S. thermophilus have been identified in SEQ ID NOs: 66,259-69,152 of the Sequence Listing.

[0352] gRNA spacer sequences for targeting the human beta globin locus with a CRISPR/Cas9 endonuclease from T. denticola have been identified in SEQ ID NOs: 69,153-70,300 of the Sequence Listing.

[0353] gRNA spacer sequences for targeting the human beta globin locus with a CRISPR/Cpf1 endonuclease from Acidominococcus, Lachnospiracease, and Franciscell Novicida have been identified in SEQ ID NOs: 70,301-156,352 of the

### SEQUENCE LISTING

[0354] The genome-targeting nucleic acid can be a double-molecule guide RNA. The genome-targeting nucleic acid can be a single-molecule guide RNA.

[0355] A double-molecule guide RNA can comprise two strands of RNA. The first strand comprises in the 5′ to 3′ direction, an optional spacer extension sequence, a spacer sequence and a minimum CRISPR repeat sequence. The second strand can comprise a minimum tracrRNA sequence (complementary to the minimum CRISPR repeat sequence), a 3′ tracrRNA sequence and an optional tracrRNA extension sequence.

[0356] A single-molecule guide RNA (sgRNA) in a Type II system can comprise in the 5′ to 3′ direction, an optional spacer extension sequence, a spacer sequence, a minimum CRISPR repeat sequence, a single-molecule guide linker, a minimum tracrRNA sequence, a 3′ tracrRNA sequence and an optional tracrRNA extension sequence. The optional tracrRNA extension can comprise elements that contribute additional functionality (e.g., stability) to the guide RNA. The single-molecule guide linker can link the minimum CRISPR repeat and the minimum tracrRNA sequence to form a hairpin structure. The optional tracrRNA extension can comprise one or more hairpins.

[0357] A single-molecule guide RNA (sgRNA) in a Type V system can comprise, in the 5′ to 3′ direction, a minimum CRISPR repeat sequence and a spacer sequence.

[0358] The sgRNA can comprise a 20 nucleotide spacer sequence at the 5′ end of the sgRNA sequence. The sgRNA can comprise a less than a 20 nucleotide spacer sequence at the 5′ end of the sgRNA sequence. The sgRNA can comprise a more than 20 nucleotide spacer sequence at the 5′ end of the sgRNA sequence. The sgRNA can comprise a variable length spacer sequence with 17-30 nucleotides at the 5′ end of the sgRNA sequence (see Table 1).

[0359] The sgRNA can comprise no uracil at the 3′end of the sgRNA sequence, such as in SEQ ID NO: 228,303 of Table 1. The sgRNA can comprise one or more uracil at the 3′end of the sgRNA sequence, such as in SEQ ID NO: 228,304 in Table 1. For example, the sgRNA can comprise 1 uracil (U) at the 3′ end of the sgRNA sequence. The sgRNA can comprise 2 uracil (UU) at the 3′ end of the sgRNA sequence. The sgRNA can comprise 3 uracil (UUU) at the 3′ end of the sgRNA sequence. The sgRNA can comprise 4 uracil (UUUU) at the 3′ end of the sgRNA sequence. The sgRNA can comprise 5 uracil (UUUUU) at the 3′ end of the sgRNA sequence. The sgRNA can comprise 6 uracil (UUUUUU) at the 3′ end of the sgRNA sequence. The sgRNA can comprise 7 uracil (UUUUUUU) at the 3′ end of the sgRNA sequence. The sgRNA can comprise 8 uracil (UUUUUUUU) at the 3′ end of the sgRNA sequence.

[0360] The sgRNA can be unmodified or modified. For example, modified sgRNAs can comprise one or more 2′-O-methyl phosphorothioate nucleotides.

TABLE 1

| SEQ ID NO. | sgRNA sequence |
|---|---|
| 228, 302 | nnnnnnnnnnnnnnnnnnnnguuuuagagcuagaaauagc |
| | aaguuaaaauaaggcuaguccguuaucaacuugaaaaag |
| | uggcaccgagucggugcuuuu |
| 228, 303 | nnnnnnnnnnnnnnnnnnnnguuuuagagcuagaaauagc |
| | aaguuaaaauaaggcuaguccguuaucaacuugaaaaag |
| | uggcaccgagucggugc |
| 228, 304 | n₍₁₇₋₃₀₎guuuuagagcuagaaauagcaaguuaaaaua |
| | aggcuaguccguuaucaacuugaaaaagu ggcaccgag |
| | ucggugcu₍₁₋₈₎ |

[0361] A gRNA may be a HPFH5 gRNA, e.g., HPFH5-1, HPFH5-D, HPFH5-T5, or HPFH5-T7, or a Kenya gRNA, e.g., Kenya-K5, Kenya-K17, a 1450 gRNA, a SPY101 gRNA, or a SD2 gRNA. A gRNA may be as described in Table 2.

TABLE 2

| Name | SEQ ID NO. | gRNA sequence |
|---|---|---|
| SD2 | 228, 305 | csususGUCAAGGCUAUUGGUCAGUUUUAG |
| | | AGCUAGAAAUAGCAAGUUAAAAUAAGGCUA |
| | | GUCCGUUAUCAACUUGAAAAAGUGGCACCG |
| | | AGUCGGUGCusususU |
| SPY101 | 228, 306 | csusasACAGUUGCUUUUAUCACGUUUUAG |
| | | AGCUAGAAAUAGCAAGUUAAAAUAAGGCUA |
| | | GUCCGUUAUCAACUUGAAAAAGUGGCACCG |
| | | AGUCGGUGCusususU |
| 1450 | 228, 307 | usgscsUUGGUCGGCACUGAUAGGUUUUAG |
| | | AGCUAGAAAUAGCAAGUUAAAAUAAGGCUA |
| | | GUCCGUUAUCAACUUGAAAAAGUGGCACCG |
| | | AGUCGGUGCusususU |
| HPFH5-1 | 228, 308 | asususUUUCUUAUUCAAUACCUGUUUUAG |
| | | AGCUAGAAAUAGCAAGUUAAAAUAAGGCUA |
| | | GUCCGUUAUCAACUUGAAAAAGUGGCACCG |
| | | AGUCGGUGCusususU |
| HPFH5-D | 228, 309 | csusgsUUGGUUUCAGAGCAGGUGUUUUAG |
| | | AGCUAGAAAUAGCAAGUUAAAAUAAGGCUA |
| | | GUCCGUUAUCAACUUGAAAAAGUGGCACCG |
| | | AGUCGGUGCusususU |
| HPFH5-T5 | 228, 310 | csuscsCCCCACUCACAGUGACCGUUUUAG |
| | | AGCUAGAAAUAGCAAGUUAAAAUAAGGCUA |
| | | GUCCGUUAUCAACUUGAAAAAGUGGCACCG |
| | | AGUCGGUGCusususU |
| HPFH5-T7 | 228, 311 | asasusCUGCAGUGCUAGUCUCCGUUUUAG |
| | | AGCUAGAAAUAGCAAGUUAAAAUAAGGCUA |
| | | GUCCGUUAUCAACUUGAAAAAGUGGCACCG |
| | | AGUCGGUGCusususU |
| Kenya-K17 | 228, 312 | gsususAAGUUCAUGUCAUAGGAGUUUUAG |
| | | AGCUAGAAAUAGCAAGUUAAAAUAAGGCUA |
| | | GUCCGUUAUCAACUUGAAAAAGUGGCACCG |
| | | AGUCGGUGCusususU |
| Kenya-K5 | 228, 313 | cscsasGUGACUAGUGCUUGAAGGUUUUAG |
| | | AGCUAGAAAUAGCAAGUUAAAAUAAGGCUA |
| | | GUCCGUUAUCAACUUGAAAAAGUGGCACCG |
| | | AGUCGGUGCusususU |

a, c, g, u: 2′-0-methyl residues
s: phosphorothioate
A, C, G, U: RNA residues

[0362] In some embodiments, two or more gRNAs are provided. In some embodiments, the two or more gRNAs are two or more gRNAs provided in Table 2. In some embodiments, the two or more gRNAs comprise at least one SPY101 gRNA in combination with at least one HPFH5 gRNA. In some embodiments, the two or more gRNAs comprise a SPY101 gRNA in combination with a HPFH5-1 gRNA. In some embodiments, the two or more gRNAs comprise a SPY101 gRNA in combination with a HPFH5-D gRNA. In some embodiments, the two or more gRNAs comprise SPY101 gRNA in combination with a HPFH5-T5 gRNA. In some embodiments, the two or more gRNAs comprise a SPY101 gRNA in combination with a HPFH5-T7 gRNA. In some embodiments, the two or more gRNAs comprise at least one SPY101 gRNA in combination with at least one Kenya gRNA. In some embodiments, the two or more gRNAs comprise comprise a SPY101 gRNA in combination with a Kenya-K5 gRNA. In some embodiments, the two or more gRNAs comprise a SPY101 gRNA in combination with a Kenya-K17 gRNA. In some embodiments, the two or more gRNAs comprise a SPY101 gRNA in combination with HPFH5-1 and HPFH5-D gRNAs. In some embodiments, the two or more gRNAs comprise a SPY101 gRNA in combination with HPFH5-T7 and HPFH5-D gRNAs. In some embodiments, the two or more gRNAs comprise a SPY101 gRNA in combination with HPFH5-T5 and HPFH5-1 gRNAs. In some embodiments, the two or more gRNAs comprise a SPY101 gRNA in combination with Kenya-K5 and Kenya-K17 gRNAs. In some embodiments, the two or more gRNAs comprise a SPY101 gRNA in combination with a SD2 gRNA. In some embodiments, the two or more gRNAs comprise at least one 1450 gRNA in combination with at least one HPFH5 gRNA. In some embodiments, the two or more gRNAs comprise a 1450 gRNA in combination with a HPFH5-1 gRNA. In some embodiments, the two or more gRNAs comprise a 1450 gRNA in combination with a HPFH5-D gRNA. In some embodiments, the two or more gRNAs comprise a 1450 gRNA in combination with a HPFH5-T5 gRNA. In some embodiments, the two or more gRNAs comprise a 1450 gRNA in combination with a HPFH5-T7 gRNA. In some embodiments, the two or more gRNAs comprise at least one 1450 gRNA in combination with at least one Kenya gRNA. In some embodiments, the two or more gRNAs comprise a 1450 gRNA in combination with a Kenya-K5 gRNA. In some embodiments, the two or more gRNAs comprise a 1450 gRNA in combination with a Kenya-K17 gRNA. In some embodiments, the two or more gRNAs comprise a 1450 gRNA in combination with HPFH5-1 and HPFH5-D gRNAs. In some embodiments, the two or more gRNAs comprise a 1450 gRNA in combination with HPFH5-T7 and HPFH5-D gRNAs. In some embodiments, the two or more gRNAs comprise a 1450 gRNA in combination with HPFH5-T5 and HPFH5-1 gRNAs. In some embodiments, the two or more gRNAs comprise a 1450 gRNA in combination with Kenya-K5 and Kenya-K17 gRNAs. In some embodiments, the two or more gRNAs comprise a 1450 gRNA in combination with a SD2 gRNA. In some embodiments, the two or more gRNAs comprise at least one of a HPFH5-1, HPFH5-D, HPFH5-T5, HPFH5-T7, Kenya-K5, or Kenya-K1 gRNA in combination with at least one additional HPFH5-1, HPFH5-D, HPFH5-T5, HPFH5-T7, Kenya-K5, or Kenya-K1 gRNA. In some embodiments, the two or more gRNAs comprise a HPFH5-1 gRNA in combination with a HPFH5-1, HPFH5-D, HPFH5-T5, HPFH5-T7, Kenya-K5, or Kenya-K1 gRNA. In some embodiments, the two or more gRNAs comprise a HPFH5-D gRNA in combination with a HPFH5-1, HPFH5-D, HPFH5-T5, HPFH5-T7, Kenya-K5, or Kenya-K1 gRNA. In some embodiments, the two or more gRNAs comprise a HPFH5-T5 gRNA in combination with a HPFH5-1, HPFH5-D, HPFH5-T5, HPFH5-T7, Kenya-K5, or Kenya-K1 gRNA. In some embodiments, the two or more gRNAs comprise a HPFH5-T7 gRNA in combination with a HPFH5-1, HPFH5-D, HPFH5-T5, HPFH5-T7, Kenya-K5, or Kenya-K1 gRNA.

[0363] By way of illustration, guide RNAs used in the CRISPR/Cas/Cpf1 system, or other smaller RNAs can be readily synthesized by chemical means as illustrated below and described in the art. While chemical synthetic procedures are continually expanding, purifications of such RNAs by procedures such as high performance liquid chromatography (HPLC, which avoids the use of gels such as PAGE) tends to become more challenging as polynucleotide lengths increase significantly beyond a hundred or so nucleotides. One approach used for generating RNAs of greater length is to produce two or more molecules that are ligated together. Much longer RNAs, such as those encoding a Cas9 or Cpf1 endonuclease, are more readily generated enzymatically. Various types of RNA modifications can be introduced during or after chemical synthesis and/or enzymatic generation of RNAs, e.g., modifications that enhance stability, reduce the likelihood or degree of innate immune response, and/or enhance other attributes, as described in the art.

[0364] Concatentated gRNAs

[0365] A concatenated gRNA comprising a first gRNA and second gRNA can be used to introduce a deletion, inversion, or mutation within or near a human beta globin locus on chromosome 11 and within or near one or more of: a BCL11A gene on chromosome 2, and a DNA sequence that harbors a transcriptional control region of the BCL11A gene on chromosome 2. The first gRNA can comprise a gRNA specific for the human beta globin locus, as described in Examples 1-6 and disclosed in the Sequence Listing. The second gRNA can comprise a gRNA specific for the the BCL11A gene or a DNA sequence that encodes a transcriptional control region of the BCL11A gene, as described in Examples 14-19 or the Figures; and disclosed in the Sequence Listing.

[0366] A concatenated gRNA comprising a first gRNA, a second gRNA, and a third gRNA can be used to introduce a deletion, inversion, or mutation within or near a human beta globin locus on chromosome 11 and within or near one or more of: a BCL11A gene on chromosome 2, and a DNA sequence that encodes a transcriptional control region of the BCL11A gene on chromosome 2. The first gRNA can comprise a gRNA specific for the human beta globin locus, as described in Examples 1-6 and disclosed in the Sequence Listing. The second gRNA can comprise a gRNA specific for the human beta globin locus, as described in Examples 1-6 and disclosed in the Sequence Listing. The third gRNA can comprise a gRNA specific for the the BCL11A gene or a DNA sequence that encodes a transcriptional control region of the BCL11A gene, as described in Examples 14-19 or the Figures; and disclosed in the Sequence Listing.

[0367] A concatenated gRNA comprising a first gRNA, a second gRNA, and a third gRNA can be used to introduce a deletion, inversion, or mutation within or near a human beta globin locus on chromosome 11 and within or near one or more of: a BCL11A gene on chromosome 2, and a DNA sequence that encodes a transcriptional control region of the BCL11A gene on chromosome 2. The first gRNA can comprise a gRNA specific for the human beta globin locus, as described in Examples 1-6 and disclosed in the Sequence Listing. The second gRNA can comprise a gRNA specific for the the BCL11A gene or a DNA sequence that encodes a transcriptional control region of the BCL11A gene, as described in Examples 14-19 or the Figures; and disclosed in the Sequence Listing. The third gRNA can comprise a gRNA specific for the the BCL11A gene or a DNA sequence that encodes a transcriptional control region of the BCL11A gene, as described in Examples 14-19 or the Figures; and disclosed in the Sequence Listing.

[0368] In some embodiments, a concatenated gRNA may comprise a HPFH5 gRNA, e.g., HPFH5-1, HPFH5-D, HPFH5-T5, or HPFH5-T7, a Kenya gRNA, e.g., Kenya-K5, Kenya-K17, a 1450 gRNA, a SPY101 gRNA, or a SD2 gRNA. In some embodiments, a concatenated gRNA may comprise a gRNA as described in Table 2. In some embodiments, a concatenated gRNA may comprise at least one SPY101 gRNA in combination with at least one HPFH5 gRNA. In some embodiments, a concatenated gRNA may comprise a SPY101 gRNA in combination with a HPFH5-1 gRNA. In some embodiments, a concatenated gRNA may comprise a SPY101 gRNA in combination with a HPFH5-D gRNA. In some embodiments, a concatenated gRNA may comprise a SPY101 gRNA in combination with a HPFH5-T5 gRNA. In some embodiments, a concatenated gRNA may comprise a SPY101 gRNA in combination with a HPFH5-T7 gRNA. In some embodiments, a concatenated gRNA may comprise at least one SPY101 gRNA in combination with at least one Kenya gRNA. In some embodiments, a concatenated gRNA may comprise a SPY101 gRNA in combination with a Kenya-K5 gRNA. In some embodiments, a concatenated gRNA may comprise a SPY101 gRNA in combination with a Kenya-K17 gRNA. In some embodiments, a concatenated gRNA may comprise a SPY101 gRNA in combination with HPFH5-1 and HPFH5-D gRNAs. In some embodiments, a concatenated gRNA may comprise a SPY101 gRNA in combination with HPFH5-T7 and HPFH5-D gRNAs. In some embodiments, a concatenated gRNA may comprise a SPY101 gRNA in combination with HPFH5-T5 and HPFH5-1 gRNAs. In some embodiments, a concatenated gRNA may comprise a SPY101 gRNA in combination with Kenya-K5 and Kenya-K17 gRNAs. In some embodiments, a concatenated gRNA may comprise a SPY101 gRNA in combination with a SD2 gRNA. In some embodiments, a concatenated gRNA may comprise at least one 1450 gRNA in combination with at least one HPFH5 gRNA. In some embodiments, a concatenated gRNA may comprise a 1450 gRNA in combination with a HPFH5-1 gRNA. In some embodiments, a concatenated gRNA may comprise a 1450 gRNA in combination with a HPFH5-D gRNA. In some embodiments, a concatenated gRNA may comprise a 1450 gRNA in combination with a HPFH5-T5 gRNA. In some embodiments, a concatenated gRNA may comprise a 1450 gRNA in combination with a HPFH5-T7 gRNA. In some embodiments, a concatenated gRNA may comprise at least one 1450 gRNA in combination with at least one Kenya gRNA. In some embodiments, a concatenated gRNA may comprise a 1450 gRNA in combination with a Kenya-K5 gRNA. In some embodiments, a concatenated gRNA may comprise a 1450 gRNA in combination with a Kenya-K17 gRNA. In some embodiments, a concatenated gRNA may comprise a 1450 gRNA in combination with HPFH5-1 and HPFH5-D gRNAs. In some embodiments, a concatenated gRNA may comprise a 1450 gRNA in combination with HPFH5-T7 and HPFH5-D gRNAs. In some embodiments, a concatenated gRNA may comprise a 1450 gRNA in combination with HPFH5-T5 and HPFH5-1 gRNAs. In some embodiments, a concatenated gRNA may comprise a 1450 gRNA in combination with Kenya-K5 and Kenya-K17 gRNAs. In some embodiments, a concatenated gRNA may comprise a 1450 gRNA in combination with a SD2 gRNA. In some embodiments, a concatenated gRNA may comprise at least one of a HPFH5-1, HPFH5-D, HPFH5-T5, HPFH5-T7, Kenya-K5, or Kenya-K1 gRNA in combination with at least one additional HPFH5-1, HPFH5-D, HPFH5-T5, HPFH5-T7, Kenya-K5, or Kenya-K1 gRNA. In some embodiments, a concatenated gRNA may comprise a HPFH5-1 gRNA in combination with a HPFH5-1, HPFH5-D, HPFH5-T5, HPFH5-T7, Kenya-K5, or Kenya-K1 gRNA. In some embodiments, a concatenated gRNA may comprise a HPFH5-D gRNA in combination with a HPFH5-1, HPFH5-D, HPFH5-T5, HPFH5-T7, Kenya-K5, or Kenya-K1 gRNA. In some embodiments, a concatenated gRNA may comprise a HPFH5-T5 gRNA in combination with a HPFH5-1, HPFH5-D, HPFH5-T5, HPFH5-T7, Kenya-K5, or Kenya-K1 gRNA. In some embodiments, a concatenated gRNA may comprise a HPFH5-T7 gRNA in combination with a HPFH5-1, HPFH5-D, HPFH5-T5, HPFH5-T7, Kenya-K5, or Kenya-K1 gRNA.

[0369] Two or More Concatentated gRNAs

[0370] Two or more concatenated gRNAs can be used simultaneously to introduce a deletion, inversion, or mutation within or near a human beta globin locus on chromosome 11 and within or near one or more of: a BCL11A gene on chromosome 2, and a DNA sequence that encodes a transcriptional control region of the BCL11A gene on chromosome 2. The first concatenated gRNA comprises a first gRNA and a second gRNA. The first gRNA of the first concatenated gRNA can comprise a gRNA specific for the human beta globin locus, as described in Examples 1-6 and disclosed in the Sequence Listing. The second gRNA of the first concatenated gRNA can comprise a gRNA specific for the the BCL11A gene or a DNA sequence that encodes a transcriptional control region of the BCL11A gene, as described in Examples 14-19 or the Figures; and disclosed in the Sequence Listing. The second concatenated gRNA comprises a first gRNA and a second gRNA. The first gRNA of the second concatenated gRNA can comprise a gRNA specific for the human beta globin locus, as described in Examples 1-6 and disclosed in the Sequence Listing. The second gRNA of the second concatenated gRNA can comprise a gRNA specific for the the BCL11A gene or a DNA sequence that encodes a transcriptional control region of the BCL11A gene, as described in Examples 14-19 of the Figures; and disclosed in the Sequence Listing.

[0371] Two or more concatenated gRNAs can be used to introduce a deletion, inversion, or mutation within or near a human beta globin locus on chromosome 11 and within or near one or more of: a BCL11A gene on chromosome 2, and a DNA sequence that encodes a transcriptional control region of the BCL11A gene on chromosome 2. The first concatenated gRNA comprises a first gRNA and a second gRNA. The first gRNA of the first concatenated gRNA can comprise a gRNA specific for the human beta globin locus, as described in Examples 1-6 and disclosed in the Sequence Listing. The second gRNA of the first concatenated gRNA can comprise a gRNA specific for the human beta globin locus, as described in Examples 1-6 and disclosed in the Sequence Listing. The second concatenated gRNA comprises a first gRNA and a second gRNA. The first gRNA of the second concatenated gRNA can comprise a gRNA specific for the the BCL11A gene or a DNA sequence that encodes a transcriptional control region of the BCL11A gene, as described in Examples 14-19 or the Figures; and disclosed in the Sequence Listing. The second gRNA of the second concatenated gRNA can comprise a gRNA specific for the the BCL11A gene or a DNA sequence that encodes a transcriptional control region of the BCL11A gene, as described in Examples 14-19 of the Figures; and disclosed in the Sequence Listing.

[0372] Spacer Extension Sequence

[0373] Examples of genome-targeting nucleic acids, a spacer extension sequence can modify activity, provide stability and/or provide a location for modifications of a genome-targeting nucleic acid. A spacer extension sequence can modify on- or off-target activity or specificity. In some examples, a spacer extension sequence can be provided. The spacer extension sequence can have a length of more than 1, 5, 10, 15, 20, 25, 30, 35, 40, 45, 50, 60, 70, 80, 90, 100, 120, 140, 160, 180, 200, 220, 240, 260, 280, 300, 320, 340, 360, 380, 400, 1000, 2000, 3000, 4000, 5000, 6000, or 7000 or more nucleotides. The spacer extension sequence can have a length of less than 1, 5, 10, 15, 20, 25, 30, 35, 40, 45, 50, 60, 70, 80, 90, 100, 120, 140, 160, 180, 200, 220, 240, 260, 280, 300, 320, 340, 360, 380, 400, 1000, 2000, 3000, 4000, 5000, 6000, 7000 or more nucleotides. The spacer extension sequence can comprise less than 10 nucleotides in length. The spacer extension sequence can comprise between 10-30 nucleotides in length. The spacer extension sequence can comprise between 30-70 nucleotides in length.

[0374] The spacer extension sequence can comprise another moiety (e.g., a stability control sequence, an endoribonuclease binding sequence, a ribozyme). The moiety can decrease or increase the stability of a nucleic acid targeting nucleic acid. The moiety can be a transcriptional terminator segment (i.e., a transcription termination sequence). The moiety can function in a eukaryotic cell. The moiety can function in a prokaryotic cell. The moiety can function in both eukaryotic and prokaryotic cells.

[0375] Non-limiting examples of suitable moieties include: a 5′ cap (e.g., a 7-methylguanylate cap (m7 G)), a riboswitch sequence (e.g., to allow for regulated stability and/or regulated accessibility by proteins and protein complexes), a sequence that forms a dsRNA duplex (i.e., a hairpin), a sequence that targets the RNA to a subcellular location (e.g., nucleus, mitochondria, chloroplasts, and the like), a modification or sequence that provides for tracking (e.g., direct conjugation to a fluorescent molecule, conjugation to a moiety that facilitates fluorescent detection, a sequence that allows for fluorescent detection, etc.), and/or a modification or sequence that provides a binding site for proteins (e.g., proteins that act on DNA, including transcriptional activators, transcriptional repressors, DNA methyltransferases, DNA demethylases, histone acetyltransferases, histone deacetylases, and the like).

[0376] Spacer Sequence

[0377] The spacer sequence hybridizes to a sequence in a target nucleic acid of interest. The spacer of a genome-targeting nucleic acid can interact with a target nucleic acid in a sequence-specific manner via hybridization (i.e., base pairing). The nucleotide sequence of the spacer can vary depending on the sequence of the target nucleic acid of interest.

[0378] In a CRISPR/Cas system herein, the spacer sequence can be designed to hybridize to a target nucleic acid that is located 5′ of a PAM of the Cas9 enzyme used in the system. The spacer can perfectly match the target sequence or can have mismatches. Each Cas9 enzyme has a particular PAM sequence that it recognizes in a target DNA. For example, S. pyogenes recognizes in a target nucleic acid a PAM that comprises the sequence 5′-NRG-3′, where R comprises either A or G, where N is any nucleotide and N is immediately 3′ of the target nucleic acid sequence targeted by the spacer sequence.

[0379] The target nucleic acid sequence can comprise 20 nucleotides. The target nucleic acid can comprise less than 20 nucleotides. The target nucleic acid can comprise more than 20 nucleotides. The target nucleic acid can comprise at least: 5, 10, 15, 16, 17, 18, 19, 20, 21, 22, 23, 24, 25, 30 or more nucleotides. The target nucleic acid can comprise at most: 5, 10, 15, 16, 17, 18, 19, 20, 21, 22, 23, 24, 25, 30 or more nucleotides. The target nucleic acid sequence can comprise 20 bases immediately 5′ of the first nucleotide of the PAM. For example, in a sequence comprising 5′-NNNNNNNNNNNNNNNNNNNNNRG-3′ (SEQ ID NO 228,301), the target nucleic acid can comprise the sequence that corresponds to the Ns, wherein N is any nucleotide, and the underlined NRG sequence is the S. pyogenes PAM.

[0380] The spacer sequence that hybridizes to the target nucleic acid can have a length of at least about 6 nucleotides (nt). The spacer sequence can be at least about 6 nt, at least about 10 nt, at least about 15 nt, at least about 18 nt, at least about 19 nt, at least about 20 nt, at least about 25 nt, at least about 30 nt, at least about 35 nt or at least about 40 nt, from about 6 nt to about 80 nt, from about 6 nt to about 50 nt, from about 6 nt to about 45 nt, from about 6 nt to about 40 nt, from about 6 nt to about 35 nt, from about 6 nt to about 30 nt, from about 6 nt to about 25 nt, from about 6 nt to about 20 nt, from about 6 nt to about 19 nt, from about 10 nt to about 50 nt, from about 10 nt to about 45 nt, from about 10 nt to about 40 nt, from about 10 nt to about 35 nt, from about 10 nt to about 30 nt, from about 10 nt to about 25 nt, from about 10 nt to about 20 nt, from about 10 nt to about 19 nt, from about 19 nt to about 25 nt, from about 19 nt to about 30 nt, from about 19 nt to about 35 nt, from about 19 nt to about 40 nt, from about 19 nt to about 45 nt, from about 19 nt to about 50 nt, from about 19 nt to about 60 nt, from about 20 nt to about 25 nt, from about 20 nt to about 30 nt, from about 20 nt to about 35 nt, from about 20 nt to about 40 nt, from about 20 nt to about 45 nt, from about 20 nt to about 50 nt, or from about 20 nt to about 60 nt. In some examples, the spacer sequence can comprise 20 nucleotides. In some examples, the spacer can comprise 19 nucleotides.

[0381] In some examples, the percent complementarity between the spacer sequence and the target nucleic acid is at least about 30%, at least about 40%, at least about 50%, at least about 60%, at least about 65%, at least about 70%, at least about 75%, at least about 80%, at least about 85%, at least about 90%, at least about 95%, at least about 97%, at least about 98%, at least about 99%, or 100%. In some examples, the percent complementarity between the spacer sequence and the target nucleic acid is at most about 30%, at most about 40%, at most about 50%, at most about 60%, at most about 65%, at most about 70%, at most about 75%, at most about 80%, at most about 85%, at most about 90%, at most about 95%, at most about 97%, at most about 98%, at most about 99%, or 100%. In some examples, the percent complementarity between the spacer sequence and the target nucleic acid is 100% over the six contiguous 5′-most nucleotides of the target sequence of the complementary strand of the target nucleic acid. The percent complementarity between the spacer sequence and the target nucleic acid can be at least 60% over about 20 contiguous nucleotides. The length of the spacer sequence and the target nucleic acid can differ by 1 to 6 nucleotides, which may be thought of as a bulge or bulges.

[0382] The spacer sequence can be designed or chosen using a computer program. The computer program can use variables, such as predicted melting temperature, secondary structure formation, predicted annealing temperature, sequence identity, genomic context, chromatin accessibility, % GC, frequency of genomic occurrence (e.g., of sequences that are identical or are similar but vary in one or more spots as a result of mismatch, insertion or deletion), methylation status, presence of SNPs, and the like.

[0383] Minimum CRISPR Repeat Sequence

[0384] A minimum CRISPR repeat sequence can be a sequence with at least: about 30%, about 40%, about 50%, about 60%, about 65%, about 70%, about 75%, about 80%, about 85%, about 90%, about 95%, or 100% sequence identity to a reference CRISPR repeat sequence (e.g., crRNA from S. pyogenes).

[0385] A minimum CRISPR repeat sequence can comprise nucleotides that can hybridize to a minimum tracrRNA sequence in a cell. The minimum CRISPR repeat sequence and a minimum tracrRNA sequence can form a duplex, i.e. a base-paired double-stranded structure. Together, the minimum CRISPR repeat sequence and the minimum tracrRNA sequence can bind to the site-directed polypeptide. At least a part of the minimum CRISPR repeat sequence can hybridize to the minimum tracrRNA sequence. At least a part of the minimum CRISPR repeat sequence can comprise at least: about 30%, about 40%, about 50%, about 60%, about 65%, about 70%, about 75%, about 80%, about 85%, about 90%, about 95%, or 100% complementary to the minimum tracrRNA sequence. At least a part of the minimum CRISPR repeat sequence can comprise at most: about 30%, about 40%, about 50%, about 60%, about 65%, about 70%, about 75%, about 80%, about 85%, about 90%, about 95%, or 100% complementary to the minimum tracrRNA sequence.

[0386] The minimum CRISPR repeat sequence can have a length from about 7 nucleotides to about 100 nucleotides. For example, the length of the minimum CRISPR repeat sequence is from about 7 nucleotides (nt) to about 50 nt, from about 7 nt to about 40 nt, from about 7 nt to about 30 nt, from about 7 nt to about 25 nt, from about 7 nt to about 20 nt, from about 7 nt to about 15 nt, from about 8 nt to about 40 nt, from about 8 nt to about 30 nt, from about 8 nt to about 25 nt, from about 8 nt to about 20 nt from about 8 nt to about 15 nt, from about 15 nt to about 100 nt, from about 15 nt to about 80 nt, from about 15 nt to about 50 nt, from about 15 nt to about 40 nt, from about 15 nt to about 30 nt, or from about 15 nt to about 25 nt. In some examples, the minimum CRISPR repeat sequence can be approximately 9 nucleotides in length. The minimum CRISPR repeat sequence can be approximately 12 nucleotides in length.

[0387] The minimum CRISPR repeat sequence can be at least about 60% identical to a reference minimum CRISPR repeat sequence (e.g., wild-type crRNA from S. pyogenes) over a stretch of at least 6, 7, or 8 contiguous nucleotides. For example, the minimum CRISPR repeat sequence can be at least about 65% identical, at least about 70% identical, at least about 75% identical, at least about 80% identical, at least about 85% identical, at least about 90% identical, at least about 95% identical, at least about 98% identical, at least about 99% identical or 100% identical to a reference minimum CRISPR repeat sequence over a stretch of at least 6, 7, or 8 contiguous nucleotides.

[0388] Minimum tracrRNA Sequence

[0389] A minimum tracrRNA sequence can be a sequence with at least: about 30%, about 40%, about 50%, about 60%, about 65%, about 70%, about 75%, about 80%, about 85%, about 90%, about 95%, or 100% sequence identity to a reference tracrRNA sequence (e.g., wild type tracrRNA from S. pyogenes).

[0390] A minimum tracrRNA sequence can comprise nucleotides that hybridize to a minimum CRISPR repeat sequence in a cell. A minimum tracrRNA sequence and a minimum CRISPR repeat sequence form a duplex, i.e. a base-paired double-stranded structure. Together, the minimum tracrRNA sequence and the minimum CRISPR repeat can bind to a site-directed polypeptide. At least a part of the minimum tracrRNA sequence can hybridize to the minimum CRISPR repeat sequence. The minimum tracrRNA sequence can be at least: about 30%, about 40%, about 50%, about 60%, about 65%, about 70%, about 75%, about 80%, about 85%, about 90%, about 95%, or 100% complementary to the minimum CRISPR repeat sequence.

[0391] The minimum tracrRNA sequence can have a length from about 7 nucleotides to about 100 nucleotides. For example, the minimum tracrRNA sequence can be from about 7 nucleotides (nt) to about 50 nt, from about 7 nt to about 40 nt, from about 7 nt to about 30 nt, from about 7 nt to about 25 nt, from about 7 nt to about 20 nt, from about 7 nt to about 15 nt, from about 8 nt to about 40 nt, from about 8 nt to about 30 nt, from about 8 nt to about 25 nt, from about 8 nt to about 20 nt, from about 8 nt to about 15 nt, from about 15 nt to about 100 nt, from about 15 nt to about 80 nt, from about 15 nt to about 50 nt, from about 15 nt to about 40 nt, from about 15 nt to about 30 nt, or from about 15 nt to about 25 nt long. The minimum tracrRNA sequence can be approximately 9 nucleotides in length. The minimum tracrRNA sequence can be approximately 12 nucleotides. The minimum tracrRNA can consist of tracrRNA 23-48 nt described in Jinek et al., supra.

[0392] The minimum tracrRNA sequence can be at least about 60% identical to a reference minimum tracrRNA (e.g., wild type, tracrRNA from S. pyogenes) sequence over a stretch of at least: 6, 7, or 8 contiguous nucleotides. For example, the minimum tracrRNA sequence can be at least: about 65% identical, about 70% identical, about 75% identical, about 80% identical, about 85% identical, about 90% identical, about 95% identical, about 98% identical, about 99% identical or 100% identical to a reference minimum tracrRNA sequence over a stretch of at least: 6, 7, or 8 contiguous nucleotides.

[0393] The duplex between the minimum CRISPR RNA and the minimum tracrRNA can comprise a double helix. The duplex between the minimum CRISPR RNA and the minimum tracrRNA can comprise at least about: 1, 2, 3, 4, 5, 6, 7, 8, 9, or 10 or more nucleotides. The duplex between the minimum CRISPR RNA and the minimum tracrRNA can comprise at most about: 1, 2, 3, 4, 5, 6, 7, 8, 9, or 10 or more nucleotides.

[0394] The duplex can comprise a mismatch (i.e., the two strands of the duplex are not 100% complementary). The duplex can comprise at least about: 1, 2, 3, 4, or 5 or mismatches. The duplex can comprise at most about: 1, 2, 3, 4, or 5 or mismatches. The duplex can comprise no more than 2 mismatches.

[0395] Bulges

[0396] In some cases, there can be a “bulge” in the duplex between the minimum CRISPR RNA and the minimum tracrRNA. A bulge is an unpaired region of nucleotides within the duplex. A bulge can contribute to the binding of the duplex to the site-directed polypeptide. The bulge can comprise, on one side of the duplex, an unpaired 5′-XXXY-3′ where X is any purine and Y comprises a nucleotide that can form a wobble pair with a nucleotide on the opposite strand, and an unpaired nucleotide region on the other side of the duplex. The number of unpaired nucleotides on the two sides of the duplex can be different.

[0397] In one example, the bulge can comprise an unpaired purine (e.g., adenine) on the minimum CRISPR repeat strand of the bulge. In some examples, the bulge can comprise an unpaired 5′-AAGY-3′ of the minimum tracrRNA sequence strand of the bulge, where Y comprises a nucleotide that can form a wobble pairing with a nucleotide on the minimum CRISPR repeat strand.

[0398] A bulge on the minimum CRISPR repeat side of the duplex can comprise at least: 1, 2, 3, 4, or 5 or more unpaired nucleotides. A bulge on the minimum CRISPR repeat side of the duplex can comprise at most: 1, 2, 3, 4, or 5 or more unpaired nucleotides. A bulge on the minimum CRISPR repeat side of the duplex can comprise 1 unpaired nucleotide.

[0399] A bulge on the minimum tracrRNA sequence side of the duplex can comprise at least: 1, 2, 3, 4, 5, 6, 7, 8, 9, or 10 or more unpaired nucleotides. A bulge on the minimum tracrRNA sequence side of the duplex can comprise at most: 1, 2, 3, 4, 5, 6, 7, 8, 9, or 10 or more unpaired nucleotides. A bulge on a second side of the duplex (e.g., the minimum tracrRNA sequence side of the duplex) can comprise 4 unpaired nucleotides.

[0400] A bulge can comprise at least one wobble pairing. A bulge can comprise at most one wobble pairing. A bulge can comprise at least one purine nucleotide. A bulge can comprise at least 3 purine nucleotides. A bulge sequence can comprise at least 5 purine nucleotides. A bulge sequence can comprise at least one guanine nucleotide. A bulge sequence can comprise at least one adenine nucleotide.

[0401] Hairpins

[0402] In various examples, one or more hairpins can be located 3′ to the minimum tracrRNA in the 3′ tracrRNA sequence.

[0403] The hairpin can start at least about: 1, 2, 3, 4, 5, 6, 7, 8, 9, 10, 15, or 20 or more nucleotides 3′ from the last paired nucleotide in the minimum CRISPR repeat and minimum tracrRNA sequence duplex. The hairpin can start at most about: 1, 2, 3, 4, 5, 6, 7, 8, 9 or 10 or more nucleotides 3′ of the last paired nucleotide in the minimum CRISPR repeat and minimum tracrRNA sequence duplex.

[0404] The hairpin can comprise at least about: 1, 2, 3, 4, 5, 6, 7, 8, 9, 10, 15, or 20 or more consecutive nucleotides. The hairpin can comprise at most about: 1, 2, 3, 4, 5, 6, 7, 8, 9, 10, 15, or more consecutive nucleotides.

[0405] The hairpin can comprise a CC dinucleotide (i.e., two consecutive cytosine nucleotides).

[0406] The hairpin can comprise duplexed nucleotides (e.g., nucleotides in a hairpin, hybridized together). For example, a hairpin can comprise a CC dinucleotide that is hybridized to a GG dinucleotide in a hairpin duplex of the 3′ tracrRNA sequence.

[0407] One or more of the hairpins can interact with guide RNA-interacting regions of a site-directed polypeptide.

[0408] In some examples, there are two or more hairpins, and in other examples there are three or more hairpins.

[0409] 3′ tracrRNA Sequence

[0410] A 3′ tracrRNA sequence can comprise a sequence with at least: about 30%, about 40%, about 50%, about 60%, about 65%, about 70%, about 75%, about 80%, about 85%, about 90%, about 95%, or 100% sequence identity to a reference tracrRNA sequence (e.g., a tracrRNA from S. pyogenes).

[0411] The 3′ tracrRNA sequence can have a length from about 6 nucleotides to about 100 nucleotides. For example, the 3′ tracrRNA sequence can have a length of from about 6 nucleotides (nt) to about 50 nt, from about 6 nt to about 40 nt, from about 6 nt to about 30 nt, from about 6 nt to about 25 nt, from about 6 nt to about 20 nt, from about 6 nt to about 15 nt, from about 8 nt to about 40 nt, from about 8 nt to about 30 nt, from about 8 nt to about 25 nt, from about 8 nt to about 20 nt, from about 8 nt to about 15 nt, from about 15 nt to about 100 nt, from about 15 nt to about 80 nt, from about 15 nt to about 50 nt, from about 15 nt to about 40 nt, from about 15 nt to about 30 nt, or from about 15 nt to about 25 nt. The 3′ tracrRNA sequence can have a length of approximately 14 nucleotides.

[0412] The 3′ tracrRNA sequence can be at least about 60% identical to a reference 3′ tracrRNA sequence (e.g., wild type 3′ tracrRNA sequence from S. pyogenes) over a stretch of at least: 6, 7, or 8 contiguous nucleotides. For example, the 3′ tracrRNA sequence can be at least: about 60% identical, about 65% identical, about 70% identical, about 75% identical, about 80% identical, about 85% identical, about 90% identical, about 95% identical, about 98% identical, about 99% identical, or 100% identical, to a reference 3′ tracrRNA sequence (e.g., wild type 3′ tracrRNA sequence from S. pyogenes) over a stretch of at least 6, 7, or 8 contiguous nucleotides.

[0413] The 3′ tracrRNA sequence can comprise more than one duplexed region (e.g., hairpin, hybridized region). The 3′ tracrRNA sequence can comprise two duplexed regions.

[0414] The 3′ tracrRNA sequence can comprise a stem loop structure. The stem loop structure in the 3′ tracrRNA can comprise at least: 1, 2, 3, 4, 5, 6, 7, 8, 9, 10, 15 or 20 or more nucleotides. The stem loop structure in the 3′ tracrRNA can comprise at most: 1, 2, 3, 4, 5, 6, 7, 8, 9 or 10 or more nucleotides. The stem loop structure can comprise a functional moiety. For example, the stem loop structure can comprise an aptamer, a ribozyme, a protein-interacting hairpin, a CRISPR array, an intron, or an exon. The stem loop structure can comprise at least about: 1, 2, 3, 4, or 5 or more functional moieties. The stem loop structure can comprise at most about: 1, 2, 3, 4, or 5 or more functional moieties.

[0415] The hairpin in the 3′ tracrRNA sequence can comprise a P-domain. In some examples, the P-domain can comprise a double-stranded region in the hairpin.

[0416] tracrRNA Extension Sequence

[0417] A tracrRNA extension sequence may be provided whether the tracrRNA is in the context of single-molecule guides or double-molecule guides. The tracrRNA extension sequence can have a length from about 1 nucleotide to about 400 nucleotides. The tracrRNA extension sequence can have a length of more than: 1, 5, 10, 15, 20, 25, 30, 35, 40, 45, 50, 60, 70, 80, 90, 100, 120, 140, 160, 180, 200, 220, 240, 260, 280, 300, 320, 340, 360, 380, or 400 nucleotides. The tracrRNA extension sequence can have a length from about 20 to about 5000 or more nucleotides. The tracrRNA extension sequence can have a length of more than 1000 nucleotides. The tracrRNA extension sequence can have a length of less than 1, 5, 10, 15, 20, 25, 30, 35, 40, 45, 50, 60, 70, 80, 90, 100, 120, 140, 160, 180, 200, 220, 240, 260, 280, 300, 320, 340, 360, 380, 400 or more nucleotides. The tracrRNA extension sequence can have a length of less than 1000 nucleotides. The tracrRNA extension sequence can comprise less than 10 nucleotides in length. The tracrRNA extension sequence can be 10-30 nucleotides in length. The tracrRNA extension sequence can be 30-70 nucleotides in length.

[0418] The tracrRNA extension sequence can comprise a functional moiety (e.g., a stability control sequence, ribozyme, endoribonuclease binding sequence). In some aspects, a functional moiety comprises a transcriptional terminator segment (i.e., a transcription termination sequence). The functional moiety can have a total length from about 10 nucleotides (nt) to about 100 nucleotides, from about 10 nt to about 20 nt, from about 20 nt to about 30 nt, from about 30 nt to about 40 nt, from about 40 nt to about 50 nt, from about 50 nt to about 60 nt, from about 60 nt to about 70 nt, from about 70 nt to about 80 nt, from about 80 nt to about 90 nt, or from about 90 nt to about 100 nt, from about 15 nt to about 80 nt, from about 15 nt to about 50 nt, from about 15 nt to about 40 nt, from about 15 nt to about 30 nt, or from about 15 nt to about 25 nt. The functional moiety can function in a eukaryotic cell. The functional moiety can function in a prokaryotic cell. The functional moiety can function in both eukaryotic and prokaryotic cells.

[0419] Non-limiting examples of suitable tracrRNA extension functional moieties include: a 3′ poly-adenylated tail, a riboswitch sequence (e.g., to allow for regulated stability and/or regulated accessibility by proteins and protein complexes), a sequence that forms a dsRNA duplex (i.e., a hairpin), a sequence that targets the RNA to a subcellular location (e.g., nucleus, mitochondria, chloroplasts, and the like), a modification or sequence that provides for tracking (e.g., direct conjugation to a fluorescent molecule, conjugation to a moiety that facilitates fluorescent detection, a sequence that allows for fluorescent detection, etc.), and/or a modification or sequence that provides a binding site for proteins (e.g., proteins that act on DNA, including transcriptional activators, transcriptional repressors, DNA methyltransferases, DNA demethylases, histone acetyltransferases, histone deacetylases, and the like). The tracrRNA extension sequence can comprise a primer binding site or a molecular index (e.g., barcode sequence). The tracrRNA extension sequence can comprise one or more affinity tags.

[0420] Single-Molecule Guide Linker Sequence

[0421] The linker sequence of a single-molecule guide nucleic acid can have a length from about 3 nucleotides to about 100 nucleotides. In Jinek et al., supra, for example, a simple 4 nucleotide “tetraloop” (-GAAA-) was used, Science, 337(6096):816-821 (2012). An illustrative linker has a length from about 3 nucleotides (nt) to about 90 nt, from about 3 nt to about 80 nt, from about 3 nt to about 70 nt, from about 3 nt to about 60 nt, from about 3 nt to about 50 nt, from about 3 nt to about 40 nt, from about 3 nt to about 30 nt, from about 3 nt to about 20 nt, from about 3 nt to about 10 nt. For example, the linker can have a length from about 3 nt to about 5 nt, from about 5 nt to about 10 nt, from about 10 nt to about 15 nt, from about 15 nt to about 20 nt, from about 20 nt to about 25 nt, from about 25 nt to about 30 nt, from about 30 nt to about 35 nt, from about 35 nt to about 40 nt, from about 40 nt to about 50 nt, from about 50 nt to about 60 nt, from about 60 nt to about 70 nt, from about 70 nt to about 80 nt, from about 80 nt to about 90 nt, or from about 90 nt to about 100 nt. The linker of a single-molecule guide nucleic acid can be between 4 and 40 nucleotides. The linker can be at least about: 100, 500, 1000, 1500, 2000, 2500, 3000, 3500, 4000, 4500, 5000, 5500, 6000, 6500, or 7000 or more nucleotides. The linker can be at most about: 100, 500, 1000, 1500, 2000, 2500, 3000, 3500, 4000, 4500, 5000, 5500, 6000, 6500, or 7000 or more nucleotides.

[0422] Linkers can comprise any of a variety of sequences, although in some examples, the linker will not comprise sequences that have extensive regions of homology with other portions of the guide RNA, which might cause intramolecular binding that could interfere with other functional regions of the guide. In Jinek et al., supra, a simple 4 nucleotide sequence -GAAA- was used, Science, 337(6096):816-821 (2012), but numerous other sequences, including longer sequences can likewise be used.

[0423] The linker sequence can comprise a functional moiety. For example, the linker sequence can comprise one or more features, including an aptamer, a ribozyme, a protein-interacting hairpin, a protein binding site, a CRISPR array, an intron, or an exon. The linker sequence can comprise at least about: 1, 2, 3, 4, or 5 or more functional moieties. In some examples, the linker sequence can comprise at most about: 1, 2, 3, 4, or 5 or more functional moieties.

[0424] Complexes of a Nucleic Acid-Targeting Nucleic Acid and a Site-Directed Polypeptide

[0425] A nucleic acid-targeting nucleic acid interacts with a site-directed polypeptide (e.g., a nucleic acid-guided nuclease such as Cas9), thereby forming a complex. The nucleic acid-targeting nucleic acid guides the site-directed polypeptide to a target nucleic acid.

[0426] Target Sequence Selection

[0427] Shifts in the location of the 5′ boundary and/or the 3′ boundary relative to particular reference loci can be used to facilitate or enhance particular applications of gene editing, which depend in part on the endonuclease system selected for the editing, as further described and illustrated herein.

[0428] In a first nonlimiting example of such target sequence selection, many endonuclease systems have rules or criteria that can guide the initial selection of potential target sites for cleavage, such as the requirement of a PAM sequence motif in a particular position adjacent to the DNA cleavage sites in the case of CRISPR Type II or Type V endonucleases.

[0429] In another nonlimiting example of target sequence selection or optimization, the frequency of off-target activity for a particular combination of target sequence and gene editing endonuclease (i.e. the frequency of DSBs occurring at sites other than the selected target sequence) can be assessed relative to the frequency of on-target activity. In some cases, cells that have been correctly edited at the desired locus can have a selective advantage relative to other cells. Illustrative, but nonlimiting, examples of a selective advantage include the acquisition of attributes such as enhanced rates of replication, persistence, resistance to certain conditions, enhanced rates of successful engraftment or persistence in vivo following introduction into a patient, and other attributes associated with the maintenance or increased numbers or viability of such cells. In other cases, cells that have been correctly edited at the desired locus can be positively selected for by one or more screening methods used to identify, sort or otherwise select for cells that have been correctly edited. Both selective advantage and directed selection methods can take advantage of the phenotype associated with the correction. In some cases, cells can be edited two or more times in order to create a second modification that creates a new phenotype that is used to select or purify the intended population of cells. Such a second modification could be created by adding a second gRNA for a selectable or screenable marker. In some cases, cells can be correctly edited at the desired locus using a DNA fragment that contains the cDNA and also a selectable marker.

[0430] Whether any selective advantage is applicable or any directed selection is to be applied in a particular case, target sequence selection can also be guided by consideration of off-target frequencies in order to enhance the effectiveness of the application and/or reduce the potential for undesired alterations at sites other than the desired target. As described further and illustrated herein and in the art, the occurrence of off-target activity can be influenced by a number of factors including similarities and dissimilarities between the target site and various off-target sites, as well as the particular endonuclease used. Bioinformatics tools are available that assist in the prediction of off-target activity, and frequently such tools can also be used to identify the most likely sites of off-target activity, which can then be assessed in experimental settings to evaluate relative frequencies of off-target to on-target activity, thereby allowing the selection of sequences that have higher relative on-target activities. Illustrative examples of such techniques are provided herein, and others are known in the art.

[0431] Another aspect of target sequence selection relates to homologous recombination events. Sequences sharing regions of homology can serve as focal points for homologous recombination events that result in deletion of intervening sequences. Such recombination events occur during the normal course of replication of chromosomes and other DNA sequences, and also at other times when DNA sequences are being synthesized, such as in the case of repairs of double-strand breaks (DSBs), which occur on a regular basis during the normal cell replication cycle but can also be enhanced by the occurrence of various events (such as UV light and other inducers of DNA breakage) or the presence of certain agents (such as various chemical inducers). Many such inducers cause DSBs to occur indiscriminately in the genome, and DSBs can be regularly induced and repaired in normal cells. During repair, the original sequence can be reconstructed with complete fidelity, however, in some cases, small insertions or deletions (referred to as “indels”) are introduced at the DSB site.

[0432] DSBs can also be specifically induced at particular locations, as in the case of the endonucleases systems described herein, which can be used to cause directed or preferential gene modification events at selected chromosomal locations. The tendency for homologous sequences to be subject to recombination in the context of DNA repair (as well as replication) can be taken advantage of in a number of circumstances, and is the basis for one application of gene editing systems, such as CRISPR, in which homology directed repair is used to insert a sequence of interest, provided through use of a “donor” polynucleotide, into a desired chromosomal location.

[0433] Regions of homology between particular sequences, which can be small regions of “microhomology” that can comprise as few as ten basepairs or less, can also be used to bring about desired deletions. For example, a single DSB can be introduced at a site that exhibits microhomology with a nearby sequence. During the normal course of repair of such DSB, a result that occurs with high frequency is the deletion of the intervening sequence as a result of recombination being facilitated by the DSB and concomitant cellular repair process.

[0434] In some circumstances, however, selecting target sequences within regions of homology can also give rise to much larger deletions, including gene fusions (when the deletions are in coding regions), which may or may not be desired given the particular circumstances.

[0435] Nucleic Acid Modifications

[0436] In some cases, polynucleotides introduced into cells can comprise one or more modifications that can be used individually or in combination, for example, to enhance activity, stability or specificity, alter delivery, reduce innate immune responses in host cells, or for other enhancements, as further described herein and known in the art.

[0437] In certain examples, modified polynucleotides can be used in the CRISPR/Cas9/Cpf1 system, in which case the guide RNAs (either single-molecule guides or double-molecule guides) and/or a DNA or an RNA encoding a Cas or Cpf1 endonuclease introduced into a cell can be modified, as described and illustrated below. Such modified polynucleotides can be used in the CRISPR/Cas9/Cpf1 system to edit any one or more genomic loci.

[0438] Using the CRISPR/Cas9/Cpf1 system for purposes of nonlimiting illustrations of such uses, modifications of guide RNAs can be used to enhance the formation or stability of the CRISPR/Cas9/Cpf1 genome editing complex comprising guide RNAs, which can be single-molecule guides or double-molecule, and a Cas or Cpf1 endonuclease. Modifications of guide RNAs can also or alternatively be used to enhance the initiation, stability or kinetics of interactions between the genome editing complex with the target sequence in the genome, which can be used, for example, to enhance on-target activity. Modifications of guide RNAs can also or alternatively be used to enhance specificity, e.g., the relative rates of genome editing at the on-target site as compared to effects at other (off-target) sites.

[0439] Modifications can also or alternatively be used to increase the stability of a guide RNA, e.g., by increasing its resistance to degradation by ribonucleases (RNases) present in a cell, thereby causing its half-life in the cell to be increased. Modifications enhancing guide RNA half-life can be particularly useful in aspects in which a Cas or Cpf1 endonuclease is introduced into the cell to be edited via an RNA that needs to be translated in order to generate endonuclease, because increasing the half-life of guide RNAs introduced at the same time as the RNA encoding the endonuclease can be used to increase the time that the guide RNAs and the encoded Cas or Cpf1 endonuclease co-exist in the cell.

[0440] Modifications can also or alternatively be used to decrease the likelihood or degree to which RNAs introduced into cells elicit innate immune responses. Such responses, which have been well characterized in the context of RNA interference (RNAi), including small-interfering RNAs (siRNAs), as described below and in the art, tend to be associated with reduced half-life of the RNA and/or the elicitation of cytokines or other factors associated with immune responses.

[0441] One or more types of modifications can also be made to RNAs encoding an endonuclease that are introduced into a cell, including, without limitation, modifications that enhance the stability of the RNA (such as by increasing its degradation by RNAses present in the cell), modifications that enhance translation of the resulting product (i.e. the endonuclease), and/or modifications that decrease the likelihood or degree to which the RNAs introduced into cells elicit innate immune responses.

[0442] Combinations of modifications, such as the foregoing and others, can likewise be used. In the case of CRISPR/Cas9/Cpf1, for example, one or more types of modifications can be made to guide RNAs (including those exemplified above), and/or one or more types of modifications can be made to RNAs encoding Cas endonuclease (including those exemplified above).

[0443] By way of illustration, guide RNAs used in the CRISPR/Cas9/Cpf1 system, or other smaller RNAs can be readily synthesized by chemical means, enabling a number of modifications to be readily incorporated, as illustrated below and described in the art. While chemical synthetic procedures are continually expanding, purifications of such RNAs by procedures such as high performance liquid chromatography (H PLC, which avoids the use of gels such as PAGE) tends to become more challenging as polynucleotide lengths increase significantly beyond a hundred or so nucleotides. One approach that can be used for generating chemically-modified RNAs of greater length is to produce two or more molecules that are ligated together. Much longer RNAs, such as those encoding a Cas9 endonuclease, are more readily generated enzymatically. While fewer types of modifications are available for use in enzymatically produced RNAs, there are still modifications that can be used to, e.g., enhance stability, reduce the likelihood or degree of innate immune response, and/or enhance other attributes, as described further below and in the art; and new types of modifications are regularly being developed.

[0444] By way of illustration of various types of modifications, especially those used frequently with smaller chemically synthesized RNAs, modifications can comprise one or more nucleotides modified at the 2′ position of the sugar, in some aspects a 2′-O-alkyl, 2′-O-alkyl-O-alkyl, or 2′-fluoro-modified nucleotide. In some examples, RNA modifications can comprise 2′-fluoro, 2′-amino or 2′ O-methyl modifications on the ribose of pyrimidines, abasic residues, or an inverted base at the 3′ end of the RNA. Such modifications can be routinely incorporated into oligonucleotides and these oligonucleotides have been shown to have a higher Tm (i.e., higher target binding affinity) than 2′-deoxyoligonucleotides against a given target.

[0445] A number of nucleotide and nucleoside modifications have been shown to make the oligonucleotide into which they are incorporated more resistant to nuclease digestion than the native oligonucleotide; these modified oligos survive intact for a longer time than unmodified oligonucleotides. Specific examples of modified oligonucleotides include those comprising modified backbones, for example, phosphorothioates, phosphotriesters, methyl phosphonates, short chain alkyl or cycloalkyl intersugar linkages or short chain heteroatomic or heterocyclic intersugar linkages. Some oligonucleotides are oligonucleotides with phosphorothioate backbones and those with heteroatom backbones, particularly CH2-NH—O-CH2, CH,˜N(CH3)˜O˜CH2 (known as a methylene(methylimino) or MMI backbone), CH2-O-N(CH3)-CH2, CH2-N(CH3)-N(CH3)-CH2 and O-N(CH3)-CH2-CH2 backbones, wherein the native phosphodiester backbone is represented as O—P—O—CH); amide backbones [see De Mesmaeker et al., Ace. Chem. Res., 28:366-374 (1995)]; morpholino backbone structures (see Summerton and Weller, U.S. Pat. No. 5,034,506); peptide nucleic acid (PNA) backbone (wherein the phosphodiester backbone of the oligonucleotide is replaced with a polyamide backbone, the nucleotides being bound directly or indirectly to the aza nitrogen atoms of the polyamide backbone, see Nielsen et al., Science 1991, 254, 1497). Phosphorus-containing linkages include, but are not limited to, phosphorothioates, chiral phosphorothioates, phosphorodithioates, phosphotriesters, aminoalkylphosphotriesters, methyl and other alkyl phosphonates comprising 3′alkylene phosphonates and chiral phosphonates, phosphinates, phosphoramidates comprising 3′-amino phosphoramidate and aminoalkylphosphoramidates, thionophosphoramidates, thionoalkylphosphonates, thionoalkylphosphotriesters, and boranophosphates having normal 3′-5′ linkages, 2′-5′ linked analogs of these, and those having inverted polarity wherein the adjacent pairs of nucleoside units are linked 3′-5′ to 5′-3′ or 2′-5′ to 5′-2′; see U.S. Pat. Nos. 3,687,808; 4,469,863; 4,476,301; 5,023,243; 5,177,196; 5,188,897; 5,264,423; 5,276,019; 5,278,302; 5,286,717; 5,321,131; 5,399,676; 5,405,939; 5,453,496; 5,455,233; 5,466,677; 5,476,925; 5,519,126; 5,536,821; 5,541,306; 5,550,111; 5,563,253; 5,571,799; 5,587,361; and 5,625,050.

[0446] Morpholino-based oligomeric compounds are described in Braasch and David Corey, Biochemistry, 41(14): 4503-4510 (2002); Genesis, Volume 30, Issue 3, (2001); Heasman, Dev. Biol., 243: 209-214 (2002); Nasevicius et al., Nat. Genet., 26:216-220 (2000); Lacerra et al., Proc. Natl. Acad. Sci., 97: 9591-9596 (2000); and U.S. Pat. No. 5,034,506, issued Jul. 23, 1991.

[0447] Cyclohexenyl nucleic acid oligonucleotide mimetics are described in Wang et al., J. Am. Chem. Soc., 122: 8595-8602 (2000).

[0448] Modified oligonucleotide backbones that do not include a phosphorus atom therein have backbones that are formed by short chain alkyl or cycloalkyl internucleoside linkages, mixed heteroatom and alkyl or cycloalkyl internucleoside linkages, or one or more short chain heteroatomic or heterocyclic internucleoside linkages. These comprise those having morpholino linkages (formed in part from the sugar portion of a nucleoside); siloxane backbones; sulfide, sulfoxide and sulfone backbones; formacetyl and thioformacetyl backbones; methylene formacetyl and thioformacetyl backbones; alkene containing backbones; sulfamate backbones; methyleneimino and methylenehydrazino backbones; sulfonate and sulfonamide backbones; amide backbones; and others having mixed N, O, S, and CH2 component parts; see U.S. Pat. Nos. 5,034,506; 5,166,315; 5,185,444; 5,214,134; 5,216,141; 5,235,033; 5,264,562; 5,264,564; 5,405,938; 5,434,257; 5,466,677; 5,470,967; 5,489,677; 5,541,307; 5,561,225; 5,596,086; 5,602,240; 5,610,289; 5,602,240; 5,608,046; 5,610,289; 5,618,704; 5,623,070; 5,663,312; 5,633,360; 5,677,437; and 5,677,439.

[0449] One or more substituted sugar moieties can also be included, e.g., one of the following at the 2′ position: OH, SH, SCH3, F, OCN, OCH3 OCH3, OCH3 O(CH2)n CH3, O(CH2)n NH2, or O(CH2)n CH3, where n is from 1 to about 10; C1 to C10 lower alkyl, alkoxyalkoxy, substituted lower alkyl, alkaryl or aralkyl; Cl; Br; CN; CF3; OCF3; O-, S-, or N-alkyl; O-, S-, or N-alkenyl; SOCH3; SO2 CH3; ONO2; NO2; N3; NH2; heterocycloalkyl; heterocycloalkaryl; aminoalkylamino; polyalkylamino; substituted silyl; an RNA cleaving group; a reporter group; an intercalator; a group for improving the pharmacokinetic properties of an oligonucleotide; or a group for improving the pharmacodynamic properties of an oligonucleotide and other substituents having similar properties. In some aspects, a modification includes 2′-methoxyethoxy (2′-O-CH2CH2OCH3, also known as 2′-O-(2-methoxyethyl)) (Martin et al, HeIv. Chim. Acta, 1995, 78, 486). Other modifications include 2′-methoxy (2′-O-CH3), 2′-propoxy (2′-OCH2 CH2CH3) and 2′-fluoro (2′-F). Similar modifications can also be made at other positions on the oligonucleotide, particularly the 3′ position of the sugar on the 3′ terminal nucleotide and the 5′ position of 5′ terminal nucleotide. Oligonucleotides can also have sugar mimetics, such as cyclobutyls in place of the pentofuranosyl group.

[0450] In some examples, both a sugar and an internucleoside linkage, i.e., the backbone, of the nucleotide units can be replaced with novel groups. The base units can be maintained for hybridization with an appropriate nucleic acid target compound. One such oligomeric compound, an oligonucleotide mimetic that has been shown to have excellent hybridization properties, is referred to as a peptide nucleic acid (PNA). In PNA compounds, the sugar-backbone of an oligonucleotide can be replaced with an amide containing backbone, for example, an aminoethylglycine backbone. The nucleobases can be retained and bound directly or indirectly to aza nitrogen atoms of the amide portion of the backbone. Representative United States patents that teach the preparation of PNA compounds comprise, but are not limited to, U.S. Pat. Nos. 5,539,082; 5,714,331; and 5,719,262. Further teaching of PNA compounds can be found in Nielsen et al, Science, 254: 1497-1500 (1991).

[0451] Guide RNAs can also include, additionally or alternatively, nucleobase (often referred to in the art simply as “base”) modifications or substitutions. As used herein, “unmodified” or “natural” nucleobases include adenine (A), guanine (G), thymine (T), cytosine (C), and uracil (U). Modified nucleobases include nucleobases found only infrequently or transiently in natural nucleic acids, e.g., hypoxanthine, 6-methyladenine, 5-Me pyrimidines, particularly 5-methylcytosine (also referred to as 5-methyl-2′ deoxycytosine and often referred to in the art as 5-Me-C), 5-hydroxymethylcytosine (HMC), glycosyl HMC and gentobiosyl HMC, as well as synthetic nucleobases, e.g., 2-aminoadenine, 2-(methylamino)adenine, 2-(imidazolylalkyl)adenine, 2-(aminoalklyamino)adenine or other heterosubstituted alkyladenines, 2-thiouracil, 2-thiothymine, 5-bromouracil, 5-hydroxymethyluracil, 8-azaguanine, 7-deazaguanine, N6 (6-aminohexyl)adenine, and 2,6-diaminopurine. Kornberg, A., DNA Replication, W. H. Freeman & Co., San Francisco, pp 75-77 (1980); Gebeyehu et al., Nucl. Acids Res. 15:4513 (1997). A “universal” base known in the art, e.g., inosine, can also be included. 5-Me-C substitutions have been shown to increase nucleic acid duplex stability by 0.6-1.2° C. (Sanghvi, Y. S., in Crooke, S. T. and Lebleu, B., eds., Antisense Research and Applications, CRC Press, Boca Raton, 1993, pp. 276-278) and are aspects of base substitutions.

[0452] Modified nucleobases can comprise other synthetic and natural nucleobases, such as 5-methylcytosine (5-me-C), 5-hydroxymethyl cytosine, xanthine, hypoxanthine, 2-aminoadenine, 6-methyl and other alkyl derivatives of adenine and guanine, 2-propyl and other alkyl derivatives of adenine and guanine, 2-thiouracil, 2-thiothymine and 2-thiocytosine, 5-halouracil and cytosine, 5-propynyl uracil and cytosine, 6-azo uracil, cytosine and thymine, 5-uracil (pseudo-uracil), 4-thiouracil, 8-halo, 8-amino, 8-thiol, 8-thioalkyl, 8-hydroxyl and other 8-substituted adenines and guanines, 5-halo particularly 5-bromo, 5-trifluoromethyl and other 5-substituted uracils and cytosines, 7-methylquanine and 7-methyladenine, 8-azaguanine and 8-azaadenine, 7-deazaguanine and 7-deazaadenine, and 3-deazaguanine and 3-deazaadenine.

[0453] Further, nucleobases can comprise those disclosed in U.S. Pat. No. 3,687,808, those disclosed in ‘The Concise Encyclopedia of Polymer Science And Engineering’, pages 858-859, Kroschwitz, J. I., ed. John Wiley & Sons, 1990, those disclosed by Englisch et al., Angewandle Chemie, International Edition', 1991, 30, page 613, and those disclosed by Sanghvi, Y. S., Chapter 15, Antisense Research and Applications', pages 289-302, Crooke, S. T. and Lebleu, B. ea., CRC Press, 1993. Certain of these nucleobases are particularly useful for increasing the binding affinity of the oligomeric compounds of the invention. These include 5-substituted pyrimidines, 6-azapyrimidines and N-2, N-6 and 0-6 substituted purines, comprising 2-aminopropyladenine, 5-propynyluracil and 5-propynylcytosine. 5-methylcytosine substitutions have been shown to increase nucleic acid duplex stability by 0.6-1.2° C. (Sanghvi, Y. S., Crooke, S. T. and Lebleu, B., eds, ‘Antisense Research and Applications’, CRC Press, Boca Raton, 1993, pp. 276-278) and are aspects of base substitutions, even more particularly when combined with 2′-O-methoxyethyl sugar modifications. Modified nucleobases are described in U.S. Pat. No. 3,687,808, as well as U.S. Pat. Nos. 4,845,205; 5,130,302; 5,134,066; 5,175,273; 5,367,066; 5,432,272; 5,457,187; 5,459,255; 5,484,908; 5,502,177; 5,525,711; 5,552,540; 5,587,469; 5,596,091; 5,614,617; 5,681,941; 5,750,692; 5,763,588; 5,830,653; 6,005,096; and U.S. Patent Application Publication 2003/0158403.

[0454] Thus, the term “modified” refers to a non-natural sugar, phosphate, or base that is incorporated into a guide RNA, an endonuclease, or both a guide RNA and an endonuclease. It is not necessary for all positions in a given oligonucleotide to be uniformly modified, and in fact more than one of the aforementioned modifications can be incorporated in a single oligonucleotide, or even in a single nucleoside within an oligonucleotide.

[0455] The guide RNAs and/or mRNA (or DNA) encoding an endonuclease can be chemically linked to one or more moieties or conjugates that enhance the activity, cellular distribution, or cellular uptake of the oligonucleotide. Such moieties comprise, but are not limited to, lipid moieties such as a cholesterol moiety [Letsinger et al., Proc. Natl. Acad. Sci. USA, 86: 6553-6556 (1989)]; cholic acid [Manoharan et al., Bioorg. Med. Chem. Let., 4: 1053-1060 (1994)]; a thioether, e.g., hexyl-S-tritylthiol [Manoharan et al, Ann. N. Y. Acad. Sci., 660: 306-309 (1992) and Manoharan et al., Bioorg. Med. Chem. Let., 3: 2765-2770 (1993)]; a thiocholesterol [Oberhauser et al., Nucl. Acids Res., 20: 533-538 (1992)]; an aliphatic chain, e.g., dodecandiol or undecyl residues [Kabanov et al., FEBS Lett., 259: 327-330 (1990) and Svinarchuk et al., Biochimie, 75: 49-54 (1993)]; a phospholipid, e.g., di-hexadecyl-rac-glycerol or triethylammonium 1,2-di-O-hexadecyl-rac-glycero-3-H-phosphonate [Manoharan et al., Tetrahedron Lett., 36: 3651-3654 (1995) and Shea et al., Nucl. Acids Res., 18: 3777-3783 (1990)]; a polyamine or a polyethylene glycol chain [Mancharan et al., Nucleosides & Nucleotides, 14: 969-973 (1995)]; adamantane acetic acid [Manoharan et al., Tetrahedron Lett., 36: 3651-3654 (1995)]; a palmityl moiety [(Mishra et al., Biochim. Biophys. Acta, 1264: 229-237 (1995)]; or an octadecylamine or hexylamino-carbonyl-t oxycholesterol moiety [Crooke et al., J. Pharmacol. Exp. Ther., 277: 923-937 (1996)]. See also U.S. Pat. Nos. 4,828,979; 4,948,882; 5,218,105; 5,525,465; 5,541,313; 5,545,730; 5,552,538; 5,578,717, 5,580,731; 5,580,731; 5,591,584; 5,109,124; 5,118,802; 5,138,045; 5,414,077; 5,486,603; 5,512,439; 5,578,718; 5,608,046; 4,587,044; 4,605,735; 4,667,025; 4,762,779; 4,789,737; 4,824,941; 4,835,263; 4,876,335; 4,904,582; 4,958,013; 5,082,830; 5,112,963; 5,214,136; 5,082,830; 5,112,963; 5,214,136; 5,245,022; 5,254,469; 5,258,506; 5,262,536; 5,272,250; 5,292,873; 5,317,098; 5,371,241, 5,391,723; 5,416,203, 5,451,463; 5,510,475; 5,512,667; 5,514,785; 5,565,552; 5,567,810; 5,574,142; 5,585,481; 5,587,371; 5,595,726; 5,597,696; 5,599,923; 5,599, 928 and 5,688,941.

[0456] Sugars and other moieties can be used to target proteins and complexes comprising nucleotides, such as cationic polysomes and liposomes, to particular sites. For example, hepatic cell directed transfer can be mediated via asialoglycoprotein receptors (ASGPRs); see, e.g., Hu, et al., Protein Pept Lett. 21(10):1025-30 (2014). Other systems known in the art and regularly developed can be used to target biomolecules of use in the present case and/or complexes thereof to particular target cells of interest.

[0457] These targeting moieties or conjugates can include conjugate groups covalently bound to functional groups, such as primary or secondary hydroxyl groups. Conjugate groups of the invention include intercalators, reporter molecules, polyamines, polyamides, polyethylene glycols, polyethers, groups that enhance the pharmacodynamic properties of oligomers, and groups that enhance the pharmacokinetic properties of oligomers. Typical conjugate groups include cholesterols, lipids, phospholipids, biotin, phenazine, folate, phenanthridine, anthraquinone, acridine, fluoresceins, rhodamines, coumarins, and dyes. Groups that enhance the pharmacodynamic properties, in the context of this disclosure, include groups that improve uptake, enhance resistance to degradation, and/or strengthen sequence-specific hybridization with the target nucleic acid. Groups that enhance the pharmacokinetic properties, in the context of this invention, include groups that improve uptake, distribution, metabolism or excretion of the compounds of the present invention. Representative conjugate groups are disclosed in International Patent Application No. PCT/US92/09196, filed Oct. 23, 1992, and U.S. Pat. No. 6,287,860. Conjugate moieties include, but are not limited to, lipid moieties such as a cholesterol moiety, cholic acid, a thioether, e.g., hexyl-5-tritylthiol, a thiocholesterol, an aliphatic chain, e.g., dodecandiol or undecyl residues, a phospholipid, e.g., di-hexadecyl-rac-glycerol or triethylammonium l,2-di-O-hexadecyl-rac-glycero-3-H-phosphonate, a polyamine or a polyethylene glycol chain, or adamantane acetic acid, a palmityl moiety, or an octadecylamine or hexylamino-carbonyl-oxy cholesterol moiety. See, e.g., U.S. Pat. Nos. 4,828,979; 4,948,882; 5,218,105; 5,525,465; 5,541,313; 5,545,730; 5,552,538; 5,578,717, 5,580,731; 5,580,731; 5,591,584; 5,109,124; 5,118,802; 5,138,045; 5,414,077; 5,486,603; 5,512,439; 5,578,718; 5,608,046; 4,587,044; 4,605,735; 4,667,025; 4,762,779; 4,789,737; 4,824,941; 4,835,263; 4,876,335; 4,904,582; 4,958,013; 5,082,830; 5,112,963; 5,214,136; 5,082,830; 5,112,963; 5,214,136; 5,245,022; 5,254,469; 5,258,506; 5,262,536; 5,272,250; 5,292,873; 5,317,098; 5,371,241, 5,391,723; 5,416,203, 5,451,463; 5,510,475; 5,512,667; 5,514,785; 5,565,552; 5,567,810; 5,574,142; 5,585,481; 5,587,371; 5,595,726; 5,597,696; 5,599,923; 5,599,928 and 5,688,941.

[0458] Longer polynucleotides that are less amenable to chemical synthesis and are typically produced by enzymatic synthesis can also be modified by various means. Such modifications can include, for example, the introduction of certain nucleotide analogs, the incorporation of particular sequences or other moieties at the 5′ or 3′ ends of molecules, and other modifications. By way of illustration, the mRNA encoding Cas9 is approximately 4 kb in length and can be synthesized by in vitro transcription. Modifications to the mRNA can be applied to, e.g., increase its translation or stability (such as by increasing its resistance to degradation with a cell), or to reduce the tendency of the RNA to elicit an innate immune response that is often observed in cells following introduction of exogenous RNAs, particularly longer RNAs such as that encoding Cas9.

[0459] Numerous such modifications have been described in the art, such as polyA tails, 5′ cap analogs (e.g., Anti Reverse Cap Analog (ARCA) or m7G(5′)ppp(5′)G (mCAP)), modified 5′ or 3′ untranslated regions (UTRs), use of modified bases (such as Pseudo-UTP, 2-Thio-UTP, 5-Methylcytidine-5′-Triphosphate (5-Methyl-CTP) or N6-Methyl-ATP), or treatment with phosphatase to remove 5′ terminal phosphates. These and other modifications are known in the art, and new modifications of RNAs can be further developed.

[0460] There are numerous commercial suppliers of modified RNAs, including for example, TriLink Biotech, AxoLabs, Bio-Synthesis Inc., Dharmacon and many others. As described by TriLink, for example, 5-Methyl-CTP can be used to impart desirable characteristics, such as increased nuclease stability, increased translation or reduced interaction of innate immune receptors with in vitro transcribed RNA. 5-Methylcytidine-5′-Triphosphate (5-Methyl-CTP), N6-Methyl-ATP, as well as Pseudo-UTP and 2-Thio-UTP, have also been shown to reduce innate immune stimulation in culture and in vivo while enhancing translation, as illustrated in publications by Kormann et al. and Warren et al. referred to below.

[0461] It has been shown that chemically modified mRNA delivered in vivo can be used to achieve improved therapeutic effects; see, e.g., Kormann et al., Nature Biotechnology 29,154-157 (2011). Such modifications can be used, for example, to increase the stability of the RNA molecule and/or reduce its immunogenicity. Using chemical modifications such as Pseudo-U, N6-Methyl-A, 2-Thio-U and 5-Methyl-C, it was found that substituting just one quarter of the uridine and cytidine residues with 2-Thio-U and 5-Methyl-C respectively resulted in a significant decrease in toll-like receptor (TLR) mediated recognition of the mRNA in mice. By reducing the activation of the innate immune system, these modifications can be used to effectively increase the stability and longevity of the mRNA in vivo; see, e.g., Kormann et al., supra.

[0462] It has also been shown that repeated administration of synthetic messenger RNAs incorporating modifications designed to bypass innate anti-viral responses can reprogram differentiated human cells to pluripotency. See, e.g., Warren, et al., Cell Stem Cell, 7(5):618-30 (2010). Such modified mRNAs that act as primary reprogramming proteins can be an efficient means of reprogramming multiple human cell types. Such cells are referred to as induced pluripotency stem cells (iPSCs), and it was found that enzymatically synthesized RNA incorporating 5-Methyl-CTP, Pseudo-UTP and an Anti Reverse Cap Analog (ARCA) could be used to effectively evade the cell's antiviral response; see, e.g., Warren et al., supra.

[0463] Other modifications of polynucleotides described in the art include, for example, the use of polyA tails, the addition of 5′ cap analogs (such as m7G(5′)ppp(5′)G (mCAP)), modifications of 5′ or 3′ untranslated regions (UTRs), or treatment with phosphatase to remove 5′ terminal phosphates—and new approaches are regularly being developed.

[0464] A number of compositions and techniques applicable to the generation of modified RNAs for use herein have been developed in connection with the modification of RNA interference (RNAi), including small-interfering RNAs (siRNAs). siRNAs present particular challenges in vivo because their effects on gene silencing via mRNA interference are generally transient, which can require repeat administration. In addition, siRNAs are double-stranded RNAs (dsRNA) and mammalian cells have immune responses that have evolved to detect and neutralize dsRNA, which is often a by-product of viral infection. Thus, there are mammalian enzymes such as PKR (dsRNA-responsive kinase), and potentially retinoic acid-inducible gene I (RIG-I), that can mediate cellular responses to dsRNA, as well as Toll-like receptors (such as TLR3, TLR7 and TLR8) that can trigger the induction of cytokines in response to such molecules; see, e.g., the reviews by Angart et al., Pharmaceuticals (Basel) 6(4): 440-468 (2013); Kanasty et al., Molecular Therapy 20(3): 513-524 (2012); Burnett et al., Biotechnol J. 6(9):1130-46 (2011); Judge and MacLachlan, Hum Gene Ther 19(2):111-24 (2008); and references cited therein.

[0465] A large variety of modifications have been developed and applied to enhance RNA stability, reduce innate immune responses, and/or achieve other benefits that can be useful in connection with the introduction of polynucleotides into human cells, as described herein; see, e.g., the reviews by Whitehead K A et al., Annual Review of Chemical and Biomolecular Engineering, 2: 77-96 (2011); Gaglione and Messere, Mini Rev Med Chem, 10(7):578-95 (2010); Chernolovskaya et al, Curr Opin Mol Ther., 12(2):158-67 (2010); Deleavey et al., Curr Protoc Nucleic Acid Chem Chapter 16:Unit 16.3 (2009); Behlke, Oligonucleotides 18(4):305-19 (2008); Fucini et al., Nucleic Acid Ther 22(3): 205-210 (2012); Bremsen et al., Front Genet 3:154 (2012).

[0466] As noted above, there are a number of commercial suppliers of modified RNAs, many of which have specialized in modifications designed to improve the effectiveness of siRNAs. A variety of approaches are offered based on various findings reported in the literature. For example, Dharmacon notes that replacement of a non-bridging oxygen with sulfur (phosphorothioate, PS) has been extensively used to improve nuclease resistance of siRNAs, as reported by Kole, Nature Reviews Drug Discovery 11:125-140 (2012). Modifications of the 2′-position of the ribose have been reported to improve nuclease resistance of the internucleotide phosphate bond while increasing duplex stability (Tm), which has also been shown to provide protection from immune activation. A combination of moderate PS backbone modifications with small, well-tolerated 2′-substitutions (2′-O-Methyl, 2′-Fluoro, 2′-Hydro) have been associated with highly stable siRNAs for applications in vivo, as reported by Soutschek et al. Nature 432:173-178 (2004); and 2′-O-Methyl modifications have been reported to be effective in improving stability as reported by Volkov, Oligonucleotides 19:191-202 (2009). With respect to decreasing the induction of innate immune responses, modifying specific sequences with 2′-O-Methyl, 2′-Fluoro, 2′-Hydro have been reported to reduce TLR7/TLR8 interaction while generally preserving silencing activity; see, e.g., Judge et al., Mol. Ther. 13:494-505 (2006); and Cekaite et al., J. Mol. Biol. 365:90-108 (2007). Additional modifications, such as 2-thiouracil, pseudouracil, 5-methylcytosine, 5-methyluracil, and N6-methyladenosine have also been shown to minimize the immune effects mediated by TLR3, TLR7, and TLR8; see, e.g., Kariko, K. et al., Immunity 23:165-175 (2005).

[0467] As is also known in the art, and commercially available, a number of conjugates can be applied to polynucleotides, such as RNAs, for use herein that can enhance their delivery and/or uptake by cells, including for example, cholesterol, tocopherol and folic acid, lipids, peptides, polymers, linkers and aptamers; see, e.g., the review by Winkler, Ther. Deliv. 4:791-809 (2013), and references cited therein.

[0468] Codon-Optimization

[0469] A polynucleotide encoding a site-directed polypeptide can be codon-optimized according to methods standard in the art for expression in the cell containing the target DNA of interest. For example, if the intended target nucleic acid is in a human cell, a human codon-optimized polynucleotide encoding Cas9 is contemplated for use for producing the Cas9 polypeptide.

[0470] Complexes of a Genome-targeting Nucleic Acid and a Site-Directed Polypeptide

[0471] A genome-targeting nucleic acid interacts with a site-directed polypeptide (e.g., a nucleic acid-guided nuclease such as Cas9), thereby forming a complex. The genome-targeting nucleic acid guides the site-directed polypeptide to a target nucleic acid.

[0472] RNPs

[0473] The site-directed polypeptide and genome-targeting nucleic acid can each be administered separately to a cell or a patient. On the other hand, the site-directed polypeptide can be pre-complexed with one or more genome-targeting nucleic acids (guide RNAs, sgRNA, or crRNA together with a tracrRNA). The pre-complexed material can then be administered to a cell or a patient. Such pre-complexed material is known as a ribonucleoprotein particle (RNP). The site-directed polypeptide in the RNP can be, for example, a Cas9 endonuclease or a Cpf1 endonuclease. The site-directed polypeptide can be flanked at the N-terminus, the C-terminus, or both the N-terminus and C-terminus by one or more nuclear localization signals (NLSs). For example, a Cas9 endonuclease can be flanked by two NLSs, one NLS located at the N-terminus and the second NLS located at the C-terminus. The NLS can be any NLS known in the art, such as a SV40 NLS. The weight ratio of genome-targeting nucleic acid to site-directed polypeptide in the RNP can be 1:1. For example, the weight ratio of sgRNA to Cas9 endonuclease in the RNP can be 1:1.

[0474] Nucleic Acids Encoding System Components

[0475] The present disclosure provides a nucleic acid comprising a nucleotide sequence encoding a genome-targeting nucleic acid of the disclosure, a site-directed polypeptide of the disclosure, and/or any nucleic acid or proteinaceous molecule necessary to carry out the aspects of the methods of the disclosure.

[0476] The nucleic acid encoding a genome-targeting nucleic acid of the disclosure, a site-directed polypeptide of the disclosure, and/or any nucleic acid or proteinaceous molecule necessary to carry out the aspects of the methods of the disclosure can comprise a vector (e.g., a recombinant expression vector).

[0477] The term “vector” refers to a nucleic acid molecule capable of transporting another nucleic acid to which it has been linked. One type of vector is a “plasmid”, which refers to a circular double-stranded DNA loop into which additional nucleic acid segments can be ligated. Another type of vector is a viral vector, wherein additional nucleic acid segments can be ligated into the viral genome. Certain vectors are capable of autonomous replication in a host cell into which they are introduced (e.g., bacterial vectors having a bacterial origin of replication and episomal mammalian vectors). Other vectors (e.g., non-episomal mammalian vectors) are integrated into the genome of a host cell upon introduction into the host cell, and thereby are replicated along with the host genome.

[0478] In some examples, vectors can be capable of directing the expression of nucleic acids to which they are operatively linked. Such vectors are referred to herein as “recombinant expression vectors”, or more simply “expression vectors”, which serve equivalent functions.

[0479] The term “operably linked” means that the nucleotide sequence of interest is linked to regulatory sequence(s) in a manner that allows for expression of the nucleotide sequence. The term “regulatory sequence” is intended to include, for example, promoters, enhancers and other expression control elements (e.g., polyadenylation signals). Such regulatory sequences are well known in the art and are described, for example, in Goeddel; Gene Expression Technology: Methods in Enzymology 185, Academic Press, San Diego, Calif. (1990). Regulatory sequences include those that direct constitutive expression of a nucleotide sequence in many types of host cells and those that direct expression of the nucleotide sequence only in certain host cells (e.g., tissue-specific regulatory sequences). It will be appreciated by those skilled in the art that the design of the expression vector can depend on such factors as the choice of the target cell, the level of expression desired, and the like.

[0480] Expression vectors contemplated include, but are not limited to, viral vectors based on vaccinia virus, poliovirus, adenovirus, adeno-associated virus, SV40, herpes simplex virus, human immunodeficiency virus, a retrovirus (e.g., Murine Leukemia Virus, spleen necrosis virus, and vectors derived from retroviruses such as Rous Sarcoma Virus, Harvey Sarcoma Virus, avian leukosis virus, a lentivirus, human immunodeficiency virus, myeloproliferative sarcoma virus, and mammary tumor virus) and other recombinant vectors. Other vectors contemplated for eukaryotic target cells include, but are not limited to, the vectors pXT1, pSG5, pSVK3, pBPV, pMSG, and pSVLSV40 (Pharmacia). Additional vectors contemplated for eukaryotic target cells include, but are not limited to, the vectors pCTx-1, pCTx-2, and pCTx-3, which are described in FIGS. 7A to 7C. Other vectors can be used so long as they are compatible with the host cell.

[0481] In some examples, a vector can comprise one or more transcription and/or translation control elements. Depending on the host/vector system utilized, any of a number of suitable transcription and translation control elements, including constitutive and inducible promoters, transcription enhancer elements, transcription terminators, etc. can be used in the expression vector. The vector can be a self-inactivating vector that either inactivates the viral sequences or the components of the CRISPR machinery or other elements.

[0482] Non-limiting examples of suitable eukaryotic promoters (i.e., promoters functional in a eukaryotic cell) include those from cytomegalovirus (CMV) immediate early, herpes simplex virus (HSV) thymidine kinase, early and late SV40, long terminal repeats (LTRs) from retrovirus, human elongation factor-1 promoter (EF1), a hybrid construct comprising the cytomegalovirus (CMV) enhancer fused to the chicken beta-actin promoter (CAG), murine stem cell virus promoter (MSCV), phosphoglycerate kinase-1 locus promoter (PGK), and mouse metallothionein-I.

[0483] For expressing small RNAs, including guide RNAs used in connection with Cas endonuclease, various promoters such as RNA polymerase III promoters, including for example U6 and H1, can be advantageous. Descriptions of and parameters for enhancing the use of such promoters are known in art and additional information and approaches are regularly being described; see, e.g., Ma, H. et al., Molecular Therapy—Nucleic Acids 3, e161 (2014) doi:10.1038/mtna.2014.12.

[0484] The expression vector can also contain a ribosome binding site for translation initiation and a transcription terminator. The expression vector can also comprise appropriate sequences for amplifying expression. The expression vector can also include nucleotide sequences encoding non-native tags (e.g., histidine tag, hemagglutinin tag, green fluorescent protein, etc.) that are fused to the site-directed polypeptide, thus resulting in a fusion protein.

[0485] A promoter can be an inducible promoter (e.g., a heat shock promoter, tetracycline-regulated promoter, steroid-regulated promoter, metal-regulated promoter, estrogen receptor-regulated promoter, etc.). The promoter can be a constitutive promoter (e.g., CMV promoter, UBC promoter). In some cases, the promoter can be a spatially restricted and/or temporally restricted promoter (e.g., a tissue specific promoter, a cell type specific promoter, etc.).

[0486] The nucleic acid encoding a genome-targeting nucleic acid of the disclosure and/or a site-directed polypeptide can be packaged into or on the surface of delivery vehicles for delivery to cells. Delivery vehicles contemplated include, but are not limited to, nanospheres, liposomes, quantum dots, nanoparticles, polyethylene glycol particles, hydrogels, and micelles. As described in the art, a variety of targeting moieties can be used to enhance the preferential interaction of such vehicles with desired cell types or locations.

[0487] Introduction of the complexes, polypeptides, and nucleic acids of the disclosure into cells can occur by viral or bacteriophage infection, transfection, conjugation, protoplast fusion, lipofection, electroporation, nucleofection, calcium phosphate precipitation, polyethyleneimine (PEI)-mediated transfection, DEAE-dextran mediated transfection, liposome-mediated transfection, particle gun technology, calcium phosphate precipitation, direct micro-injection, nanoparticle-mediated nucleic acid delivery, and the like.

[0488] Delivery

[0489] Guide RNA polynucleotides (RNA or DNA) and/or endonuclease polynucleotide(s) (RNA or DNA) can be delivered by viral or non-viral delivery vehicles known in the art, such as electroporation, mechanical force, cell deformation (SQZ Biotech), and cell penetrating peptides. Alternatively, endonuclease polypeptide(s) can be delivered by viral or non-viral delivery vehicles known in the art, such as electroporation or lipid nanoparticles. In further alternative aspects, the DNA endonuclease can be delivered as one or more polypeptides, either alone or pre-complexed with one or more guide RNAs, or one or more crRNA together with a tracrRNA.

[0490] Electroporation is a delivery technique in which an electrical field is applied to one or more cells in order to increase the permeability of the cell membrane, which allows substances such as drugs, nucleic acids (genome-targeting nucleic acids), proteins (site-directed polypeptides), or RNPs, to be introduced into the cell. In general, electroporation works by passing thousands of volts across a distance of one to two millimeters of suspended cells in an electroporation cuvette (1.0-1.5 kV, 250-750V/cm). As used herein, the term “zap” or “zapping” may be used to describe an electroporation event.

[0491] Polynucleotides can be delivered by non-viral delivery vehicles including, but not limited to, nanoparticles, liposomes, ribonucleoproteins, positively charged peptides, small molecule RNA-conjugates, aptamer-RNA chimeras, and RNA-fusion protein complexes. Some exemplary non-viral delivery vehicles are described in Peer and Lieberman, Gene Therapy, 18: 1127-1133 (2011) (which focuses on non-viral delivery vehicles for siRNA that are also useful for delivery of other polynucleotides).

[0492] Polynucleotides, such as guide RNA, sgRNA, and mRNA encoding an endonuclease, can be delivered to a cell or a patient by a lipid nanoparticle (LNP).

[0493] A LNP refers to any particle having a diameter of less than 1000 nm, 500 nm, 250 nm, 200 nm, 150 nm, 100 nm, 75 nm, 50 nm, or 25 nm. Alternatively, a nanoparticle can range in size from 1-1000 nm, 1-500 nm, 1-250 nm, 25-200 nm, 25-100 nm, 35-75 nm, or 25-60 nm.

[0494] LNPs can be made from cationic, anionic, or neutral lipids. Neutral lipids, such as the fusogenic phospholipid DOPE or the membrane component cholesterol, can be included in LNPs as ‘helper lipids’ to enhance transfection activity and nanoparticle stability. Limitations of cationic lipids include low efficacy owing to poor stability and rapid clearance, as well as the generation of inflammatory or anti-inflammatory responses.

[0495] LNPs can also be comprised of hydrophobic lipids, hydrophilic lipids, or both hydrophobic and hydrophilic lipids.

[0496] Any lipid or combination of lipids that are known in the art can be used to produce a LNP. Examples of lipids used to produce LNPs are: DOTMA, DOSPA, DOTAP, DMRIE, DC-cholesterol, DOTAP-cholesterol, GAP-DMORIE-DPyPE, and GL67A-DOPE-DMPE-polyethylene glycol (PEG). Examples of cationic lipids are: 98N12-5, C12-200, DLin-KC2-DMA (KC2), DLin-MC3-DMA (MC3), CTX, MD1, and 7C1. Examples of neutral lipids are: DPSC, DPPC, POPC, DOPE, and SM. Examples of PEG-modified lipids are: PEG-DMG, PEG-CerC14, and PEG-CerC20.

[0497] The lipids can be combined in any number of molar ratios to produce a LNP. In addition, the polynucleotide(s) can be combined with lipid(s) in a wide range of molar ratios to produce a LNP.

[0498] As stated previously, the site-directed polypeptide and genome-targeting nucleic acid can each be administered separately to a cell or a patient. On the other hand, the site-directed polypeptide can be pre-complexed with one or more guide RNAs, or one or more crRNA together with a tracrRNA. The pre-complexed material can then be administered to a cell or a patient. Such pre-complexed material is known as a ribonucleoprotein particle (RNP).

[0499] RNA is capable of forming specific interactions with RNA or DNA. While this property is exploited in many biological processes, it also comes with the risk of promiscuous interactions in a nucleic acid-rich cellular environment. One solution to this problem is the formation of ribonucleoprotein particles (RNPs), in which the RNA is pre-complexed with an endonuclease. Another benefit of the RNP is protection of the RNA from degradation.

[0500] The endonuclease in the RNP can be modified or unmodified. Likewise, the gRNA, crRNA, tracrRNA, or sgRNA can be modified or unmodified. Numerous modifications are known in the art and can be used.

[0501] The endonuclease and sgRNA can be generally combined in a 1:1 molar ratio. Alternatively, the endonuclease, crRNA and tracrRNA can be generally combined in a 1:1:1 molar ratio. However, a wide range of molar ratios can be used to produce a RNP.

[0502] A recombinant adeno-associated virus (AAV) vector can be used for delivery. Techniques to produce rAAV particles, in which an AAV genome to be packaged that includes the polynucleotide to be delivered, rep and cap genes, and helper virus functions are provided to a cell are standard in the art. Production of rAAV typically requires that the following components are present within a single cell (denoted herein as a packaging cell): a rAAV genome, AAV rep and cap genes separate from (i.e., not in) the rAAV genome, and helper virus functions. The AAV rep and cap genes may be from any AAV serotype for which recombinant virus can be derived, and may be from a different AAV serotype than the rAAV genome ITRs, including, but not limited to, AAV serotypes AAV-1, AAV-2, AAV-3, AAV-4, AAV-5, AAV-6, AAV-7, AAV-8, AAV-9, AAV-10, AAV-11, AAV-12, AAV-13 and AAV rh.74. Production of pseudotyped rAAV is disclosed in, for example, international patent application publication number WO 01/83692. See Table 3.

TABLE 3

| AAV Serotype | Genbank Accession No. |
|---|---|
| AAV-1 | NC_002077.1 |
| AAV-2 | NC_001401.2 |
| AAV-3 | NC_001729.1 |
| AAV-3B | AF028705.1 |
| AAV-4 | NC_001829.1 |
| AAV-5 | NC_006152.1 |
| AAV-6 | AF028704.1 |
| AAV-7 | NC_006260.1 |
| AAV-8 | NC_006261.1 |
| AAV-9 | AX753250.1 |
| AAV-10 | AY631965.1 |
| AAV-11 | AY631966.1 |
| AAV-12 | DQ813647.1 |
| AAV-13 | EU285562.1 |

[0503] A method of generating a packaging cell involves creating a cell line that stably expresses all of the necessary components for AAV particle production. For example, a plasmid (or multiple plasmids) comprising a rAAV genome lacking AAV rep and cap genes, AAV rep and cap genes separate from the rAAV genome, and a selectable marker, such as a neomycin resistance gene, are integrated into the genome of a cell. AAV genomes have been introduced into bacterial plasmids by procedures such as GC tailing (Samulski et al., 1982, Proc. Natl. Acad. S6. USA, 79:2077-2081), addition of synthetic linkers containing restriction endonuclease cleavage sites (Laughlin et al., 1983, Gene, 23:65-73) or by direct, blunt-end ligation (Senapathy & Carter, 1984, J. Biol. Chem., 259:4661-4666). The packaging cell line can then be infected with a helper virus, such as adenovirus. The advantages of this method are that the cells are selectable and are suitable for large-scale production of rAAV. Other examples of suitable methods employ adenovirus or baculovirus, rather than plasmids, to introduce rAAV genomes and/or rep and cap genes into packaging cells.

[0504] General principles of rAAV production are reviewed in, for example, Carter, 1992, Current Opinions in Biotechnology, 1533-539; and Muzyczka, 1992, Curr. Topics in Microbial. and Immunol., 158:97-129). Various approaches are described in Ratschin et al., Mol. Cell. Biol. 4:2072 (1984); Hermonat et al., Proc. Natl. Acad. Sci. USA, 81:6466 (1984); Tratschin et al., Mol. Cell. Biol. 5:3251 (1985); McLaughlin et al., J. Virol., 62:1963 (1988); and Lebkowski et al., 1988 Mol. Cell. Biol., 7:349 (1988). Samulski et al. (1989, J. Virol., 63:03822-3828); U.S. Pat. No. 5,173,414; WO 95/13365 and corresponding U.S. Pat. No. 5,658,776; WO 95/13392; WO 96/17947; PCT/US98/18600; WO 97/09441 (PCT/US96/14423); WO 97/08298 (PCT/US96/13872); WO 97/21825 (PCT/US96/20777); WO 97/06243 (PCT/FR96/01064); WO 99/11764; Perrin et al. (1995) Vaccine 13:1244-1250; Paul et al. (1993) Human Gene Therapy 4:609-615; Clark et al. (1996) Gene Therapy 3:1124-1132; U.S. Pat. Nos. 5,786,211; 5,871,982; and 6,258,595.

[0505] AAV vector serotypes can be matched to target cell types. For example, the following exemplary cell types can be transduced by the indicated AAV serotypes among others. See Table 4.

TABLE 4

| Tissue/Cell Type | Serotype |
|---|---|
| Liver | AAV8, AAV3, AAV5, AAV9 |
| Skeletal muscle | AAV1, AAV7, AAV6, AAV8, AAV9 |
| Central nervous system | AAV5, AAV1, AAV4 |
| RPE | AAV5, AAV4 |
| Photoreceptor cells | AAV5 |
| Lung | AAV9 |
| Heart | AAV8 |
| Pancreas | AAV8 |
| Kidney | AAV2, AA8 |

[0506] In addition to adeno-associated viral vectors, other viral vectors can be used. Such viral vectors include, but are not limited to, lentivirus, alphavirus, enterovirus, pestivirus, baculovirus, herpesvirus, Epstein Barr virus, papovavirus, poxvirus, vaccinia virus, and herpes simplex virus.

[0507] In some cases, Cas9 mRNA, sgRNA targeting one or two loci within or near a human beta globin locus on chromosome 11 and within or near one or more of: a BCL11A gene on chromosome 2, and a DNA sequence that encodes a transcriptional control region of the BCL11A gene on chromosome 2 can each be separately formulated into lipid nanoparticles, or are all co-formulated into one lipid nanoparticle.

[0508] In some cases, Cas9 mRNA can be formulated in a lipid nanoparticle, while sgRNA can be delivered in an AAV vector.

[0509] Options are available to deliver the Cas9 nuclease as a DNA plasmid, as mRNA or as a protein. The guide RNA can be expressed from the same DNA, or can also be delivered as an RNA. The RNA can be chemically modified to alter or improve its half-life, or decrease the likelihood or degree of immune response. The endonuclease protein can be complexed with the gRNA prior to delivery. Viral vectors allow efficient delivery; split versions of Cas9 and smaller orthologs of Cas9 can be packaged in AAV. A range of non-viral delivery methods also exist that can deliver each of these components, or non-viral and viral methods can be employed in tandem. For example, nano-particles can be used to deliver the protein and guide RNA, while AAV can be used to deliver a donor DNA.

[0510] Guide RNA Formulation

[0511] Guide RNAs of the invention can be formulated with pharmaceutically acceptable excipients such as carriers, solvents, stabilizers, adjuvants, diluents, etc., depending upon the particular mode of administration and dosage form. Guide RNA compositions can be generally formulated to achieve a physiologically compatible pH, and range from a pH of about 3 to a pH of about 11, about pH 3 to about pH 7, depending on the formulation and route of administration. In alternative aspects, the pH can be adjusted to a range from about pH 5.0 to about pH 8. In some aspects, the compositions can comprise a therapeutically effective amount of at least one compound as described herein, together with one or more pharmaceutically acceptable excipients. Optionally, the compositions can comprise a combination of the compounds described herein, or may include a second active ingredient useful in the treatment or prevention of bacterial growth (for example and without limitation, anti-bacterial or anti-microbial agents), or may include a combination of reagents of the invention.

[0512] Suitable excipients can include, for example, carrier molecules that include large, slowly metabolized macromolecules such as proteins, polysaccharides, polylactic acids, polyglycolic acids, polymeric amino acids, amino acid copolymers, and inactive virus particles. Other exemplary excipients can include antioxidants (for example and without limitation, ascorbic acid), chelating agents (for example and without limitation, EDTA), carbohydrates (for example and without limitation, dextrin, hydroxyalkylcellulose, and hydroxyalkylmethylcellulose), stearic acid, liquids (for example and without limitation, oils, water, saline, glycerol and ethanol) wetting or emulsifying agents, pH buffering substances, and the like.

[0513] Genetically Modified Cells

[0514] The term “genetically modified cell” refers to a cell that comprises at least one genetic modification introduced by genome editing (e.g., using the CRISPR/Cas9/Cpf1 system). In some ex-vivo examples herein, the genetically modified cell can be a genetically modified progenitor cell. In some in vivo examples herein, the genetically modified cell can be a genetically modified hematopoietic progenitor cell. A genetically modified cell comprising an exogenous genome-targeting nucleic acid and/or an exogenous nucleic acid encoding a genome-targeting nucleic acid is contemplated herein.

[0515] In connection with de-repressing γ-globin expression, the phrase “increasing γ-globin levels in a cell” or “increased γ-globin expression in a cell” indicates that γ-globin in a cell or population of cells is at least 2% higher in the cell or population of cells subject to genome editing than in a comparable, control population, in which there has been no genome editing. In some aspects, the increase in γ-globin expression is at least about 2%, at least about 3%, at least about 4%, at least about 5%, at least about 6%, at least about 7%, at least about 8%, at least about 9%, at least about 10%, at least about 11%, at least about 12%, at least about 13%, at least about 14%, at least about 15%, at least about 16%, at least about 17%, at least about 18%, at least about 19%, at least about 20%, at least about 25%, at least about 30%, at least about 35%, at least about 40%, at least about 45%, at least about 50%, at least about 55%, at least about 60%, at least about 65%, at least about 70%, at least about 75%, at least about 80%, at least about 85%, at least about 90%, at least about 95%, at least about 99%, at least about 2-fold, at least about 3-fold, at least about 4-fold, at least about 5-fold, at least about 6-fold, at least about 7-fold, at least about 8-fold, at least about 9-fold, at least about 10-fold, at least about 15-fold, at least about 20-fold, at least about 25-fold, at least about 30-fold, at least about 35-fold, at least about 40-fold, at least about 45-fold, at least about 50-fold, at least about 100-fold or more than a comparable control treated population. The term “control treated population” describes a population of cells that has been treated with identical media, viral induction, nucleic acid sequences, temperature, confluency, flask size, pH, etc., with the exception of the addition of the genome editing components. Any method known in the art can be used to measure an increase in γ-globin expression, for example, Western Blot analysis of γ-globin or quantifying γ-globin mRNA.

[0516] The term “isolated cell” refers to a cell that has been removed from an organism in which it was originally found, or a descendant of such a cell. Optionally, the cell can be cultured in vitro, e.g., under defined conditions or in the presence of other cells. Optionally, the cell can be later introduced into a second organism or re-introduced into the organism from which it (or the cell from which it is descended) was isolated.

[0517] The term “isolated population” with respect to an isolated population of cells refers to a population of cells that has been removed and separated from a mixed or heterogeneous population of cells. In some cases, the isolated population can be a substantially pure population of cells, as compared to the heterogeneous population from which the cells were isolated or enriched. In some cases, the isolated population can be an isolated population of human hematopoietic progenitor cells, e.g., a substantially pure population of human hematopoietic progenitor cells as compared to a heterogeneous population of cells comprising human hematopoietic progenitor cells and cells from which the human hematopoietic progenitor cells were derived.

[0518] The term “substantially enhanced,” with respect to a particular cell population, refers to a population of cells in which the occurrence of a particular type of cell is increased relative to pre-existing or reference levels, by at least 2-fold, at least 3-, at least 4-, at least 5-, at least 6-, at least 7-, at least 8-, at least 9, at least 10-, at least 20-, at least 50-, at least 100-, at least 400-, at least 1000-, at least 5000-, at least 20000-, at least 100000- or more fold depending, e.g., on the desired levels of such cells for ameliorating a hemoglobinopathy.

[0519] The term “substantially enriched” with respect to a particular cell population, refers to a population of cells that is at least: about 10%, about 20%, about 30%, about 40%, about 50%, about 60%, about 70% or more with respect to the cells making up a total cell population.

[0520] The term “substantially pure” with respect to a particular cell population, refers to a population of cells that is at least about 75%, at least about 85%, at least about 90%, or at least about 95% pure, with respect to the cells making up a total cell population. That is, the terms “substantially pure” or “essentially purified,” with regard to a population of hematopoietic progenitor cells, refers to a population of cells that contain fewer than: about 20%, about 15%, about 10%, about 9%, about 8%, about 7%, about 6%, about 5%, about 4%, about 3%, about 2%, about 1%, or less than 1%, of cells that are not hematopoietic progenitor cells as defined by the terms herein.

[0521] Human Cells

[0522] For ameliorating hemoglobinopathies, as described and illustrated herein, the principal targets for gene editing are human cells. For example, in the ex-vivo methods, the human cells can be somatic cells, which after being modified using the techniques as described, can give rise to red blood cells (RBCs) or progenitor cells with increased levels of HbF in a patient suffering from a hemoglobinopathy such as β-thalassemia or sickle cell disease.

[0523] As described herein and in the art, even relatively modest and incremental increases in levels of HbF in a patient suffering from a hemoglobinopathy such as β-thalassemia or sickle cell disease can be beneficial for improvement of symptoms and/or survival. In some aspects, the levels of HbF achieved can tend toward those observed in patients with HPFH, which vary among patients and type of HPFH but in a substantial number of cases result in HbF comprising in the range of 10-30% of total hemoglobin (versus 1-2% in typical adults). However, studies have shown that lower levels of HbF can nevertheless have effects that are significant enough to be regarded as decreasing overall mortality expectations among groups of patients with SCD; see, e.g., Platt et al., N Engl J Med. 330(23): 1639-1644 (1994). And even modest improvements of symptoms can have beneficial effects for patients. For example, a reduction in the need for transfusions, a lessening of the incidence or severity of one or more symptoms of a hemoglobinopathy, or a reduction of side effects as a result of reduced levels or frequency of treatments or procedures can all be meaningful and beneficial for patients. Accordingly, in some aspects, the increase in HbF can be in the range of about 80%, 60%, 40% or 20% of the levels of HbF observed in patients with HPFH. Further considerations regarding levels of HbF that can be achieved are provided herein, including the detailed description and examples, as supplemented by references cited herein and/or published in the art.

[0524] By performing gene editing as described herein in progenitor cells such as erythroid progenitor cells, such as autologous progenitor cells that are derived from and therefore already completely matched with the patient in need, it can be possible to generate cells that can be safely re-introduced into the patient and effectively give rise to a population of circulating RBCs that can be effective in ameliorating one or more clinical conditions associated with the patient's disease.

[0525] While the presence of significant numbers of RBCs having elevated levels of HbF is beneficial, in some aspects more than one quarter of circulating red blood cells (RBCs) can have significantly elevated levels of HbF, in some aspects at least half of circulating RBCs can have significantly elevated levels of HbF, and in some aspects at least 80% of circulating RBCs can have significantly elevated levels of HbF in order to effectively prevent clinical erythrocyte sickling.

[0526] Progenitor cells (also referred to as stem cells herein), such as erythroid or hematopoietic progenitor cells, are capable of both proliferation and giving rise to more progenitor cells, these in turn having the ability to generate a large number of mother cells that can in turn give rise to differentiated or differentiable daughter cells. The daughter cells themselves can be induced to proliferate and produce progeny that subsequently differentiate into one or more mature cell types, while also retaining one or more cells with parental developmental potential. The term “stem cell” refers then, to a cell with the capacity or potential, under particular circumstances, to differentiate to a more specialized or differentiated phenotype, and which retains the capacity, under certain circumstances, to proliferate without substantially differentiating. In one aspect, the term progenitor or stem cell refers to a generalized mother cell whose descendants (progeny) specialize, often in different directions, by differentiation, e.g., by acquiring completely individual characters, as occurs in progressive diversification of embryonic cells and tissues. Cellular differentiation is a complex process typically occurring through many cell divisions. A differentiated cell can derive from a multipotent cell that itself is derived from a multipotent cell, and so on. While each of these multipotent cells can be considered stem cells, the range of cell types that each can give rise to may vary considerably. Some differentiated cells also have the capacity to give rise to cells of greater developmental potential. Such capacity can be natural or can be induced artificially upon treatment with various factors. In many biological instances, stem cells can also be “multipotent” because they can produce progeny of more than one distinct cell type, but this is not required for “stem-ness.”

[0527] Self-renewal can be another important aspect of the stem cell. In theory, self-renewal can occur by either of two major mechanisms. Stem cells can divide asymmetrically, with one daughter retaining the stem state and the other daughter expressing some distinct other specific function and phenotype. Alternatively, some of the stem cells in a population can divide symmetrically into two stems, thus maintaining some stem cells in the population as a whole, while other cells in the population give rise to differentiated progeny only. Generally, “progenitor cells” have a cellular phenotype that is more primitive (i.e., is at an earlier step along a developmental pathway or progression than is a fully differentiated cell). Often, progenitor cells also have significant or very high proliferative potential. Progenitor cells can give rise to multiple distinct differentiated cell types or to a single differentiated cell type, depending on the developmental pathway and on the environment in which the cells develop and differentiate.

[0528] In the context of cell ontogeny, the adjective “differentiated,” or “differentiating” is a relative term. A “differentiated cell” is a cell that has progressed further down the developmental pathway than the cell to which it is being compared.

[0529] Thus, stem cells can differentiate into lineage-restricted precursor cells (such as a hematopoietic progenitor cell), which in turn can differentiate into other types of precursor cells further down the pathway (such as an erythrocyte precursor), and then to an end-stage differentiated cell, such as an erythrocyte, which plays a characteristic role in a certain tissue type, and may or may not retain the capacity to proliferate further.

[0530] The term “hematopoietic progenitor cell” refers to cells of a stem cell lineage that give rise to all the blood cell types, including erythroid (erythrocytes or red blood cells (RBCs)), myeloid (monocytes and macrophages, neutrophils, basophils, eosinophils, megakaryocytes/platelets, and dendritic cells), and lymphoid (T-cells, B-cells, NK-cells).

[0531] A “cell of the erythroid lineage” indicates that the cell being contacted is a cell that undergoes erythropoiesis such that upon final differentiation it forms an erythrocyte or red blood cell. Such cells originate from bone marrow hematopoietic progenitor cells. Upon exposure to specific growth factors and other components of the hematopoietic microenvironment, hematopoietic progenitor cells can mature through a series of intermediate differentiation cellular types, all intermediates of the erythroid lineage, into RBCs. Thus, cells of the “erythroid lineage” comprise hematopoietic progenitor cells, rubriblasts, prorubricytes, erythroblasts, metarubricytes, reticulocytes, and erythrocytes.

[0532] The hematopoietic progenitor cell can express at least one of the following cell surface markers characteristic of hematopoietic progenitor cells: CD34+, CD59+, Thyl/CD90+, CD381o/−, and C-kit/CDI 17+. In some examples provided herein, the hematopoietic progenitors can be CD34+.

[0533] The hematopoietic progenitor cell can be a peripheral blood stem cell obtained from the patient after the patient has been treated with one or more factors such as granulocyte colony stimulating factor (optionally in combination with Plerixaflor). In illustrative aspects, CD34+ cells are enriched using CliniMACS® Cell Selection System (Miltenyi Biotec). CD34+ cells can be stimulated in serum-free medium (e.g., CellGrow SCGM media, CellGenix) with cytokines (e.g., SCF, rhTPO, rhFLT3) before genome editing. Addition of SR1 and dmPGE2 and/or other factors is contemplated to improve long-term engraftment.

[0534] The hematopoietic progenitor cells of the erythroid lineage can have a cell surface marker characteristic of the erythroid lineage: such as CD71 and Terl 19.

[0535] Hematopoietic stem cells (HSCs) can be an important target for gene therapy as they provide a prolonged source of the corrected cells. HSCs give rise to both the myeloid and lymphoid lineages of blood cells. Mature blood cells have a finite life-span and must be continuously replaced throughout life. Blood cells are continually produced by the proliferation and differentiation of a population of pluripotent HSCs that can be replenished by self-renewal. Bone marrow (BM) is the major site of hematopoiesis in humans and a good source for hematopoietic stem and progenitor cells (HSPCs). HSPCs can be found in small numbers in the peripheral blood (PB). In some indications or treatments their numbers increase. The progeny of HSCs mature through stages, generating multi-potential and lineage-committed progenitor cells. Treated cells, such as CD34+ cells, would be returned to the patient. The level of engraftment can be important, as is the ability of the cells' multilineage engraftment of gene-edited cells following CD34+ infusion in vivo.

[0536] Induced Pluripotent Stem Cells

[0537] The genetically engineered human cells described herein can be induced pluripotent stem cells (iPSCs). An advantage of using iPSCs is that the cells can be derived from the same subject to which the progenitor cells are to be administered. That is, a somatic cell can be obtained from a subject, reprogrammed to an induced pluripotent stem cell, and then re-differentiated into a hematopoietic progenitor cell to be administered to the subject (e.g., autologous cells). Because the progenitors are essentially derived from an autologous source, the risk of engraftment rejection or allergic response can be reduced compared to the use of cells from another subject or group of subjects. In some aspects, the hematopoietic progenitors are derived from non-autologous sources. In addition, the use of iPSCs negates the need for cells obtained from an embryonic source. Thus, in one aspect, the stem cells used in the disclosed methods are not embryonic stem cells.

[0538] Although differentiation is generally irreversible under physiological contexts, several methods have been recently developed to reprogram somatic cells to iPSCs. Exemplary methods are known to those of skill in the art and are described briefly herein below.

[0539] The term “reprogramming” refers to a process that alters or reverses the differentiation state of a differentiated cell (e.g., a somatic cell). Stated another way, reprogramming refers to a process of driving the differentiation of a cell backwards to a more undifferentiated or more primitive type of cell. It should be noted that placing many primary cells in culture can lead to some loss of fully differentiated characteristics. Thus, simply culturing such cells included in the term differentiated cells does not render these cells non-differentiated cells (e.g., undifferentiated cells) or pluripotent cells. The transition of a differentiated cell to pluripotency requires a reprogramming stimulus beyond the stimuli that lead to partial loss of differentiated character in culture. Reprogrammed cells also have the characteristic of the capacity of extended passaging without loss of growth potential, relative to primary cell parents, which generally have capacity for only a limited number of divisions in culture.

[0540] The cell to be reprogrammed can be either partially or terminally differentiated prior to reprogramming. Reprogramming can encompasse complete reversion of the differentiation state of a differentiated cell (e.g., a somatic cell) to a pluripotent state or a multipotent state. Reprogramming can encompasse complete or partial reversion of the differentiation state of a differentiated cell (e.g., a somatic cell) to an undifferentiated cell (e.g., an embryonic-like cell). Reprogramming can result in expression of particular genes by the cells, the expression of which further contributes to reprogramming. In certain examples described herein, reprogramming of a differentiated cell (e.g., a somatic cell) can cause the differentiated cell to assume an undifferentiated state (e.g., is an undifferentiated cell). The resulting cells are referred to as “reprogrammed cells,” or “induced pluripotent stem cells (iPSCs or iPS cells).”

[0541] Reprogramming can involve alteration, e.g., reversal, of at least some of the heritable patterns of nucleic acid modification (e.g., methylation), chromatin condensation, epigenetic changes, genomic imprinting, etc., that occur during cellular differentiation. Reprogramming is distinct from simply maintaining the existing undifferentiated state of a cell that is already pluripotent or maintaining the existing less than fully differentiated state of a cell that is already a multipotent cell (e.g., a hematopoietic stem cell). Reprogramming is also distinct from promoting the self-renewal or proliferation of cells that are already pluripotent or multipotent, although the compositions and methods described herein can also be of use for such purposes, in some examples.

[0542] Many methods are known in the art that can be used to generate pluripotent stem cells from somatic cells. Any such method that reprograms a somatic cell to the pluripotent phenotype would be appropriate for use in the methods described herein.

[0543] Reprogramming methodologies for generating pluripotent cells using defined combinations of transcription factors have been described. Mouse somatic cells can be converted to ES cell-like cells with expanded developmental potential by the direct transduction of Oct4, Sox2, Klf4, and c-Myc; see, e.g., Takahashi and Yamanaka, Cell 126(4): 663-76 (2006). iPSCs resemble ES cells as they restore the pluripotency-associated transcriptional circuitry and much of the epigenetic landscape. In addition, mouse iPSCs satisfy all the standard assays for pluripotency: specifically, in vitro differentiation into cell types of the three germ layers, teratoma formation, contribution to chimeras, germline transmission [see, e.g., Maherali and Hochedlinger, Cell Stem Cell. 3(6):595-605 (2008)], and tetraploid complementation.

[0544] Human iPSCs can be obtained using similar transduction methods, and the transcription factor trio, OCT4, SOX2, and NANOG, has been established as the core set of transcription factors that govern pluripotency; see, e.g., Budniatzky and Gepstein, Stem Cells Transl Med. 3(4):448-57 (2014); Barrett et al., Stem Cells Trans Med 3:1-6 sctm.2014-0121 (2014); Focosi et al., Blood Cancer Journal 4: e211 (2014); and references cited therein. The production of iPSCs can be achieved by the introduction of nucleic acid sequences encoding stem cell-associated genes into an adult, somatic cell, historically using viral vectors.

[0545] iPSCs can be generated or derived from terminally differentiated somatic cells, as well as from adult stem cells, or somatic stem cells. That is, a non-pluripotent progenitor cell can be rendered pluripotent or multipotent by reprogramming. In such instances, it may not be necessary to include as many reprogramming factors as required to reprogram a terminally differentiated cell. Further, reprogramming can be induced by the non-viral introduction of reprogramming factors, e.g., by introducing the proteins themselves, or by introducing nucleic acids that encode the reprogramming factors, or by introducing messenger RNAs that upon translation produce the reprogramming factors (see e.g., Warren et al., Cell Stem Cell, 7(5):618-30 (2010). Reprogramming can be achieved by introducing a combination of nucleic acids encoding stem cell-associated genes including, for example Oct-4 (also known as Oct-3/4 or Pouf51), Soxl, Sox2, Sox3, Sox 15, Sox 18, NANOG, Klfl, Klf2, Klf4, Klf5, NR5A2, c-Myc, 1-Myc, n-Myc, Rem2, Tert, and LIN28. Reprogramming using the methods and compositions described herein can further comprise introducing one or more of Oct-3/4, a member of the Sox family, a member of the Klf family, and a member of the Myc family to a somatic cell. The methods and compositions described herein can further comprise introducing one or more of each of Oct-4, Sox2, Nanog, c-MYC and Klf4 for reprogramming. As noted above, the exact method used for reprogramming is not necessarily critical to the methods and compositions described herein. However, where cells differentiated from the reprogrammed cells are to be used in, e.g., human therapy, in one aspect the reprogramming is not affected by a method that alters the genome. Thus, in such examples, reprogramming can be achieved, e.g., without the use of viral or plasmid vectors.

[0546] The efficiency of reprogramming (i.e., the number of reprogrammed cells) derived from a population of starting cells can be enhanced by the addition of various agents, e.g., small molecules, as shown by Shi et al., Cell-Stem Cell 2:525-528 (2008); Huangfu et al., Nature Biotechnology 26(7):795-797 (2008) and Marson et al., Cell-Stem Cell 3: 132-135 (2008). Thus, an agent or combination of agents that enhance the efficiency or rate of induced pluripotent stem cell production can be used in the production of patient-specific or disease-specific iPSCs. Some non-limiting examples of agents that enhance reprogramming efficiency include soluble Wnt, Wnt conditioned media, BIX-01294 (a G9a histone methyltransferase), PD0325901 (a MEK inhibitor), DNA methyltransferase inhibitors, histone deacetylase (HDAC) inhibitors, valproic acid, 5′-azacytidine, dexamethasone, suberoylanilide, hydroxamic acid (SAHA), vitamin C, and trichostatin (TSA), among others.

[0547] Other non-limiting examples of reprogramming enhancing agents include: Suberoylanilide Hydroxamic Acid (SAHA (e.g., MK0683, vorinostat) and other hydroxamic acids), BML-210, Depudecin (e.g., (−)-Depudecin), HC Toxin, Nullscript (4-(l,3-Dioxo-IH,3H-benzo[de]isoquinolin-2-yl)-N-hydroxybutanamide), Phenylbutyrate (e.g., sodium phenylbutyrate) and Valproic Acid ((VP A) and other short chain fatty acids), Scriptaid, Suramin Sodium, Trichostatin A (TSA), APHA Compound 8, Apicidin, Sodium Butyrate, pivaloyloxymethyl butyrate (Pivanex, AN-9), Trapoxin B, Chlamydocin, Depsipeptide (also known as FR901228 or FK228), benzamides (e.g., CI-994 (e.g., N-acetyl dinaline) and MS-27-275), MGCD0103, NVP-LAQ-824, CBHA (m-carboxycinnaminic acid bishydroxamic acid), JNJ16241199, Tubacin, A-161906, proxamide, oxamflatin, 3-CI-UCHA (e.g., 6-(3-chlorophenylureido)caproic hydroxamic acid), AOE (2-amino-8-oxo-9, 10-epoxydecanoic acid), CHAP31 and CHAP 50. Other reprogramming enhancing agents include, for example, dominant negative forms of the HDACs (e.g., catalytically inactive forms), siRNA inhibitors of the HDACs, and antibodies that specifically bind to the HDACs. Such inhibitors are available, e.g., from BIOMOL International, Fukasawa, Merck Biosciences, Novartis, Gloucester Pharmaceuticals, Titan Pharmaceuticals, MethylGene, and Sigma Aldrich.

[0548] To confirm the induction of pluripotent stem cells for use with the methods described herein, isolated clones can be tested for the expression of a stem cell marker. Such expression in a cell derived from a somatic cell identifies the cells as induced pluripotent stem cells. Stem cell markers can be selected from the non-limiting group including SSEA3, SSEA4, CD9, Nanog, Fbxl5, Ecatl, Esgl, Eras, Gdf3, Fgf4, Cripto, Daxl, Zpf296, Slc2a3, Rexl, Utfl, and Natl. In one case, for example, a cell that expresses Oct4 or Nanog is identified as pluripotent. Methods for detecting the expression of such markers can include, for example, RT-PCR and immunological methods that detect the presence of the encoded polypeptides, such as Western blots or flow cytometric analyses. Detection can involve not only RT-PCR, but can also include detection of protein markers. Intracellular markers may be best identified via RT-PCR, or protein detection methods such as immunocytochemistry, while cell surface markers are readily identified, e.g., by immunocytochemistry.

[0549] The pluripotent stem cell character of isolated cells can be confirmed by tests evaluating the ability of the iPSCs to differentiate into cells of each of the three germ layers. As one example, teratoma formation in nude mice can be used to evaluate the pluripotent character of the isolated clones. The cells can be introduced to nude mice and histology and/or immunohistochemistry can be performed on a tumor arising from the cells. The growth of a tumor comprising cells from all three Germ Layers, for Example, Further Indicates that the Cells are Pluripotent Stem Cells.

[0550] Creating patient specific iPSCs

[0551] One step of the ex vivo methods of the present disclosure can involve creating a patient specific iPS cell, patient specific iPS cells, or a patient specific iPS cell line. There are many established methods in the art for creating patient specific iPS cells, as described in Takahashi and Yamanaka 2006; Takahashi, Tanabe et al. 2007. For example, the creating step can comprise: a) isolating a somatic cell, such as a skin cell or fibroblast, from the patient; and b) introducing a set of pluripotency-associated genes into the somatic cell in order to induce the cell to become a pluripotent stem cell. The set of pluripotency-associated genes can be one or more of the genes selected from the group consisting of OCT4, SOX2, KLF4, Lin28, NANOG, and cMYC.

[0552] Performing a Biopsy or Aspirate of the Patient's Bone Marrow

[0553] A biopsy or aspirate is a sample of tissue or fluid taken from the body. There are many different kinds of biopsies or aspirates. Nearly all of them involve using a sharp tool to remove a small amount of tissue. If the biopsy will be on the skin or other sensitive area, numbing medicine can be applied first. A biopsy or aspirate can be performed according to any of the known methods in the art. For example, in a bone marrow aspirate, a large needle is used to enter the pelvis bone to collect bone marrow.

[0554] Isolating a Mesenchymal Stem Cell

[0555] Mesenchymal stem cells can be isolated according to any method known in the art, such as from a patient's bone marrow or peripheral blood. For example, marrow aspirate can be collected into a syringe with heparin. Cells can be washed and centrifuged on a Percoll™ density gradient. Percoll™ is composed of colloidal silica coated with polyvinylpyrrolidone (PVP). The silica particles are 15 to 30 nm in diameter and are coated with non-dialyzable polyvinylpyrrolidone (PVP). Cells, such as blood cells, liver cells, interstitial cells, macrophages, mast cells, and thymocytes, can be separated using Percoll™. The cells can be cultured in Dulbecco's modified Eagle's medium (DMEM) (low glucose) containing 10% fetal bovine serum (FBS) (Pittinger M F, Mackay A M, Beck S C et al., Science 1999; 284:143-147).

[0556] Treating a Patient with GCSF

[0557] A patient can optionally be treated with granulocyte colony stimulating factor (GCSF) in accordance with any method known in the art. The GCSF can be administered in combination with Plerixaflor (also known as Mozobil®). Plerixaflor is an immunostimulant used to mobilize hematopoietic stem cells into the blood stream.

[0558] Isolating a Hematopoietic Progenitor Cell from a Patient

[0559] A hematopoietic progenitor cell can be isolated from a patient by any method known in the art. CD34+ cells can be enriched, e.g., using CliniMACS® Cell Selection System (Miltenyi Biotec). CD34+ cells can be weakly stimulated in serum-free medium (e.g., CellGrow SCGM media, CellGenix) with cytokines (e.g., SCF, rhTPO, rhFLT3) before genome editing.

[0560] Differentiation of Genome-Edited iPSCs into Hematopoietic Progenitor Cells

[0561] Another step of the ex vivo methods of the present disclosure can comprise differentiating the genome-edited iPSCs into hematopoietic progenitor cells. The differentiating step can be performed according to any method known in the art.

[0562] Differentiation of Genome-Edited Mesenchymal Stem Cells into Hematopoietic Progenitor Cells

[0563] Another step of the ex vivo methods of the present disclosure can comprise differentiating the genome-edited mesenchymal stem cells into hematopoietic progenitor cells. The differentiating step can be performed according to any method known in the art.

[0564] Implanting Cells into Patients

[0565] Another step of the ex vivo methods of the present disclosure can comprise implanting the cells into patients. This implanting step can be accomplished using any method of implantation known in the art. For example, the genetically modified cells can be injected directly in the patient's blood or otherwise administered to the patient. The genetically modified cells may be purified ex vivo using a selected marker.

[0566] One advantage of an ex vivo cell therapy approach is the ability to conduct a comprehensive analysis of the therapeutic prior to administration. Nuclease-based therapeutics can have some level of off-target effects. Performing gene correction ex vivo allows one to characterize the corrected cell population prior to implantation. The present disclosure includes sequencing the entire genome of the corrected cells to ensure that the off-target effects, if any, can be in genomic locations associated with minimal risk to the patient. Furthermore, populations of specific cells, including clonal populations, can be isolated prior to implantation.

[0567] Another advantage of ex vivo cell therapy relates to genetic correction in iPSCs compared to other primary cell sources. iPSCs are prolific, making it easy to obtain the large number of cells that will be required for a cell-based therapy. Furthermore, iPSCs are an ideal cell type for performing clonal isolations. This allows screening for the correct genomic correction, without risking a decrease in viability. In contrast, other primary cells are viable for only a few passages and difficult to clonally expand. Thus, manipulation of iPSCs for the treatment of hemoglobinopathies can be much easier, and can shorten the amount of time needed to make the desired genetic correction.

[0568] For ex vivo therapy, transplantation requires clearance of bone-marrow niches or the donor HSCs to engraft. Current methods rely on radiation and/or chemotherapy. Due to the limitations these impose, safer conditioning regiments have been and are being developed, such as immunodepletion of bone marrow cells by antibodies or antibody toxin conjugates directed against hematpoietic cell surface markers, for example CD117, c-kit and others. Success of HSC transplantation depends upon efficient homing to bone marrow, subsequent engraftment, and bone marrow repopulation. The level of gene-edited cells engrafted is important, as is the ability of the cells' multilineage engraftment.

[0569] Hematopoietic stem cells (HSCs) are an important target for ex vivo gene therapy as they provide a prolonged source of the corrected cells. Treated CD34+ cells would be returned to the patient.

[0570] Methods can also include an in vivo based therapy. Chromosomal DNA of the cells in the patient is edited using the materials and methods described herein. The cells can be bone marrow cells, hematopoietic progenitor cells, or CD34+ cells.

[0571] Although blood cells present an attractive target for ex vivo treatment and therapy, increased efficacy in delivery may permit direct in vivo delivery to the hematopoietic stem cells (HSCs) and/or other B and T cell progenitors, such as CD34+ cells. Ideally the targeting and editing would be directed to the relevant cells. Cleavage in other cells can also be prevented by the use of promoters only active in certain cells and or developmental stages. Additional promoters are inducible, and therefore can be temporally controlled if the nuclease is delivered as a plasmid. The amount of time that delivered RNA and protein remain in the cell can also be adjusted using treatments or domains added to change the half-life. In vivo treatment would eliminate a number of treatment steps, but a lower rate of delivery can require higher rates of editing. In vivo treatment can eliminate problems and losses from ex vivo treatment and engraftment.

[0572] An advantage of in vivo gene therapy can be the ease of therapeutic production and administration. The same therapeutic approach and therapy will have the potential to be used to treat more than one patient, for example a number of patients who share the same or similar genotype or allele. In contrast, ex vivo cell therapy typically requires using a patient's own cells, which are isolated, manipulated and returned to the same patient.

[0573] Pharmaceutically Acceptable Carriers

[0574] The ex vivo methods of administering progenitor cells to a subject contemplated herein can involve the use of therapeutic compositions comprising progenitor cells.

[0575] Therapeutic compositions can contain a physiologically tolerable carrier together with the cell composition, and optionally at least one additional bioactive agent as described herein, dissolved or dispersed therein as an active ingredient. In some cases, the therapeutic composition is not substantially immunogenic when administered to a mammal or human patient for therapeutic purposes, unless so desired.

[0576] In general, the progenitor cells described herein can be administered as a suspension with a pharmaceutically acceptable carrier. One of skill in the art will recognize that a pharmaceutically acceptable carrier to be used in a cell composition will not include buffers, compounds, cryopreservation agents, preservatives, or other agents in amounts that substantially interfere with the viability of the cells to be delivered to the subject. A formulation comprising cells can include e.g., osmotic buffers that permit cell membrane integrity to be maintained, and optionally, nutrients to maintain cell viability or enhance engraftment upon administration. Such formulations and suspensions are known to those of skill in the art and/or can be adapted for use with the progenitor cells, as described herein, using routine experimentation.

[0577] A cell composition can also be emulsified or presented as a liposome composition, provided that the emulsification procedure does not adversely affect cell viability. The cells and any other active ingredient can be mixed with excipients that are pharmaceutically acceptable and compatible with the active ingredient and in amounts suitable for use in the therapeutic methods described herein.

[0578] Additional agents included in a cell composition can include pharmaceutically acceptable salts of the components therein. Pharmaceutically acceptable salts include the acid addition salts (formed with the free amino groups of the polypeptide) that are formed with inorganic acids such as, for example, hydrochloric or phosphoric acids, or such organic acids as acetic, tartaric, mandelic and the like. Salts formed with the free carboxyl groups can also be derived from inorganic bases such as, for example, sodium, potassium, ammonium, calcium or ferric hydroxides, and such organic bases as isopropylamine, trimethylamine, 2-ethylamino ethanol, histidine, procaine and the like.

[0579] Physiologically tolerable carriers are well known in the art. Exemplary liquid carriers are sterile aqueous solutions that contain no materials in addition to the active ingredients and water, or contain a buffer such as sodium phosphate at physiological pH value, physiological saline or both, such as phosphate-buffered saline. Still further, aqueous carriers can contain more than one buffer salt, as well as salts such as sodium and potassium chlorides, dextrose, polyethylene glycol and other solutes. Liquid compositions can also contain liquid phases in addition to and to the exclusion of water. Exemplary of such additional liquid phases are glycerine, vegetable oils such as cottonseed oil, and water-oil emulsions. The amount of an active compound used in the cell compositions that is effective in the treatment of a particular disorder or condition can depend on the nature of the disorder or condition, and can be determined by standard clinical techniques.

[0580] Administration and Efficacy

[0581] The terms “administering”, “introducing” and “transplanting” are used interchangeably in the context of the placement of cells, e.g., progenitor cells, into a subject, by a method or route that results in at least partial localization of the introduced cells at a desired site, such as a site of injury or repair, such that a desired effect(s) is produced. The cells e.g., progenitor cells, or their differentiated progeny can be administered by any appropriate route that results in delivery to a desired location in the subject where at least a portion of the implanted cells or components of the cells remain viable. The period of viability of the cells after administration to a subject can be as short as a few hours, e.g., twenty-four hours, to a few days, to as long as several years, or even the lifetime of the patient, i.e., long-term engraftment. For example, in some aspects described herein, an effective amount of hematopoietic progenitor cells is administered via a systemic route of administration, such as an intraperitoneal or intravenous route.

[0582] The terms “individual”, “subject,” “host” and “patient” are used interchangeably herein and refer to any subject for whom diagnosis, treatment or therapy is desired. In some aspects, the subject is a mammal. In some aspects, the subject is a human being.

[0583] When provided prophylactically, progenitor cells described herein can be administered to a subject in advance of any symptom of a hemoglobinopathy, e.g., prior to initiation of the switch from fetal γ-globin to predominantly β-globin and/or prior to the development of significant anemia or other symptom associated with the hemoglobinopathy. Accordingly, the prophylactic administration of a hematopoietic progenitor cell population serves to prevent a hemoglobinopathy, as disclosed herein.

[0584] When provided therapeutically, hematopoietic progenitor cells are provided at (or after) the onset of a symptom or indication of a hemoglobinopathy, e.g., upon the onset of disease.

[0585] The hematopoietic progenitor cell population being administered according to the methods described herein can comprise allogeneic hematopoietic progenitor cells obtained from one or more donors. “Allogeneic” refers to a hematopoietic progenitor cell or biological samples comprising hematopoietic progenitor cells obtained from one or more different donors of the same species, where the genes at one or more loci are not identical. For example, a hematopoietic progenitor cell population being administered to a subject can be derived from umbilical cord blood obtained from one more unrelated donor subjects, or from one or more non-identical siblings. In some cases, syngeneic hematopoietic progenitor cell populations can be used, such as those obtained from genetically identical animals, or from identical twins. The hematopoietic progenitor cells can be autologous cells; that is, the hematopoietic progenitor cells can be obtained or isolated from a subject and administered to the same subject, i.e., the donor and recipient are the same.

[0586] The term “effective amount” refers to the amount of a population of progenitor cells or their progeny needed to prevent or alleviate at least one or more sign or symptom of a hemoglobinopathy, and relates to a sufficient amount of a composition to provide the desired effect, e.g., to treat a subject having a hemoglobinopathy. The term “therapeutically effective amount” therefore refers to an amount of progenitor cells or a composition comprising progenitor cells that is sufficient to promote a particular effect when administered to a typical subject, such as one who has or is at risk for a hemoglobinopathy. An effective amount, as used herein, would also include an amount sufficient to prevent or delay the development of a symptom of the disease, alter the course of a symptom of the disease (for example but not limited to, slow the progression of a symptom of the disease), or reverse a symptom of the disease. It is understood that for any given case, an appropriate “effective amount” can be determined by one of ordinary skill in the art using routine experimentation.

[0587] For use in the various aspects described herein, an effective amount of progenitor cells, comprises at least 10² progenitor cells, at least 5×10² progenitor cells, at least 10³ progenitor cells, at least 5×10³ progenitor cells, at least 10⁴ progenitor cells, at least 5×10⁴ progenitor cells, at least 10⁵ progenitor cells, at least 2×10⁵ progenitor cells, at least 3×10⁵ progenitor cells, at least 4×10⁵ progenitor cells, at least 5×10⁵ progenitor cells, at least 6×10⁵ progenitor cells, at least 7×10⁵ progenitor cells, at least 8×10⁵ progenitor cells, at least 9×10⁵ progenitor cells, at least 1×10⁶ progenitor cells, at least 2×10⁶ progenitor cells, at least 3×10⁶ progenitor cells, at least 4×10⁶ progenitor cells, at least 5×10⁶ progenitor cells, at least 6×10⁶ progenitor cells, at least 7×10⁶ progenitor cells, at least 8×10⁶ progenitor cells, at least 9×10⁶ progenitor cells, or multiples thereof. The progenitor cells can be derived from one or more donors, or are can be obtained from an autologous source. In some examples described herein, the progenitor cells can be expanded in culture prior to administration to a subject in need thereof.

[0588] Modest and incremental increases in the levels of HbF expressed in cells of patients having a hemoglobinopathy can be beneficial for ameliorating one or more symptoms of the disease, for increasing long-term survival, and/or for reducing side effects associated with other treatments. In some embodiments, upon administration of such cells to human patients, the presence of RBCs that are producing increased levels of HbF is beneficial. In some aspects, effective treatment of a subject gives rise to at least about 9% HbF relative to total Hb in the treated subject. In some aspects, HbF will be at least about 14% of total Hb. In some aspects HbF will be at least about 20% to 30% of total Hb. Similarly, the introduction of even relatively limited subpopulations of cells having significantly elevated levels of HbF (referred to as “F-cells”) can be beneficial in various patients since in some situations normalized cells will have a selective advantage relative to diseased cells. However, even modest levels of circulating RBCs with elevated levels of HbF can be beneficial for ameliorating one or more aspects of hemoglobinopathy in patients. In some aspects, about 10%, about 20%, about 30%, about 40%, about 50%, about 60%, about 70%, about 80%, about 90% or more of the RBCs in patients to whom such cells are administered are producing increased levels of HbF as described herein.

[0589] “Administered” refers to the delivery of a progenitor cell composition into a subject by a method or route that results in at least partial localization of the cell composition at a desired site. A cell composition can be administered by any appropriate route that results in effective treatment in the subject, i.e. administration results in delivery to a desired location in the subject where at least a portion of the composition delivered, i.e. at least 1×10⁴ cells are delivered to the desired site for a period of time. Modes of administration include injection, infusion, instillation, or ingestion. “Injection” includes, without limitation, intravenous, intramuscular, intra-arterial, intrathecal, intraventricular, intracapsular, intraorbital, intracardiac, intradermal, intraperitoneal, transtracheal, subcutaneous, subcuticular, intraarticular, sub capsular, subarachnoid, intraspinal, intracerebro spinal, and intrasternal injection and infusion. In some examples, the route is intravenous. For the delivery of cells, administration by injection or infusion can be made.

[0590] The cells can be administered systemically. The phrases “systemic administration,” “administered systemically”, “peripheral administration” and “administered peripherally” refer to the administration of a population of progenitor cells other than directly into a target site, tissue, or organ, such that it enters, instead, the subject's circulatory system and, thus, is subject to metabolism and other like processes.

[0591] The efficacy of a treatment comprising a composition for the treatment of a hemoglobinopathy can be determined by the skilled clinician. However, a treatment is considered “effective treatment,” if any one or all of the signs or symptoms of, as but one example, levels of functional fetal hemoglobin, γ-globin expression, and functional BCL11A are altered in a beneficial manner (e.g., increased by at least 10% for HbF, increased by at least 30% for γ-globin expression, and/or decreased by at least 10% for BCL11A), or other clinically accepted symptoms or markers of disease are improved or ameliorated. Efficacy can also be measured by failure of an individual to worsen as assessed by hospitalization or need for medical interventions (e.g., reduced transfusion dependence, or progression of the disease is halted or at least slowed). Methods of measuring these indicators are known to those of skill in the art and/or described herein. Treatment includes any treatment of a disease in an individual or an animal (some non-limiting examples include a human, or a mammal) and includes: (1) inhibiting the disease, e.g., arresting, or slowing the progression of symptoms; or (2) relieving the disease, e.g., causing regression of symptoms; and (3) preventing or reducing the likelihood of the development of symptoms.

[0592] In some embodiments, the treatment according to the present invention ameliorates one or more symptoms associated with a 3-hemoglobinopathy by increasing the amount of fetal hemoglobin in the individual. Symptoms and signs typically associated with a hemoglobinopathy, include for example, anemia, tissue hypoxia, organ dysfunction, abnormal hematocrit values, ineffective erythropoiesis, abnormal reticulocyte (erythrocyte) count, abnormal iron load, the presence of ring sideroblasts, splenomegaly, hepatomegaly, impaired peripheral blood flow, dyspnea, increased hemolysis, jaundice, anemic pain crises, acute chest syndrome, splenic sequestration, priapism, stroke, hand-foot syndrome, and pain such as angina pectoris.

[0593] Kits

[0594] The present disclosure provides kits for carrying out the methods described herein. A kit can include one or more of: a genome-targeting nucleic acid, a polynucleotide encoding a genome-targeting nucleic acid, a site-directed polypeptide, a polynucleotide encoding a site-directed polypeptide, and/or any nucleic acid or proteinaceous molecule necessary to carry out the aspects of the methods described herein, or any combination thereof.

[0595] A kit can comprise: (1) a vector comprising a nucleotide sequence encoding a genome-targeting nucleic acid, (2) the site-directed polypeptide or a vector comprising a nucleotide sequence encoding the site-directed polypeptide, and (3) a reagent for reconstitution and/or dilution of the vector(s) and or polypeptide.

[0596] A kit can comprise: (1) a vector comprising (i) a nucleotide sequence encoding a genome-targeting nucleic acid, and (ii) a nucleotide sequence encoding the site-directed polypeptide; and (2) a reagent for reconstitution and/or dilution of the vector.

[0597] In any of the above kits, the kit can comprise a single-molecule guide genome-targeting nucleic acid. In any of the above kits, the kit can comprise a double-molecule genome-targeting nucleic acid. In any of the above kits, the kit can comprise two or more double-molecule guides or single-molecule guides. The kits can comprise a vector that encodes the nucleic acid targeting nucleic acid.

[0598] In any of the above kits, the kit can further comprise a polynucleotide to be inserted to effect the desired genetic modification.

[0599] Components of a kit can be in separate containers, or combined in a single container.

[0600] Any kit described above can further comprise one or more additional reagents, where such additional reagents are selected from a buffer, a buffer for introducing a polypeptide or polynucleotide into a cell, a wash buffer, a control reagent, a control vector, a control RNA polynucleotide, a reagent for in vitro production of the polypeptide from DNA, adaptors for sequencing and the like. A buffer can be a stabilization buffer, a reconstituting buffer, a diluting buffer, or the like. A kit can also comprise one or more components that can be used to facilitate or enhance the on-target binding or the cleavage of DNA by the endonuclease, or improve the specificity of targeting.

[0601] In addition to the above-mentioned components, a kit can further comprise instructions for using the components of the kit to practice the methods. The instructions for practicing the methods can be recorded on a suitable recording medium. For example, the instructions can be printed on a substrate, such as paper or plastic, etc. The instructions can be present in the kits as a package insert, in the labeling of the container of the kit or components thereof (i.e., associated with the packaging or subpackaging), etc. The instructions can be present as an electronic storage data file present on a suitable computer readable storage medium, e.g. CD-ROM, diskette, flash drive, etc. In some instances, the actual instructions are not present in the kit, but means for obtaining the instructions from a remote source (e.g. via the Internet), can be provided. An example of this case is a kit that comprises a web address where the instructions can be viewed and/or from which the instructions can be downloaded. As with the instructions, this means for obtaining the instructions can be recorded on a suitable substrate.

[0602] Electroporation

[0603] The process of electroporation generally involves the formation of pores in a cell membrane, or in a vesicle, by the application of electric field pulses across a liquid cell suspension containing cells or vesicles. During the poration process, cells are often suspended in a liquid media and then subjected to an electric field pulse. The medium can be electrolyte, non-electrolyte, or a mixture of electrolytes and non-electrolytes. The strength of the electric field applied to the suspension and the length of the pulse (the time that the electric field is applied to a cell suspension) varies according to the cell type. To create a pore in a cell's outer membrane, the electric field must be applied for such a length of time and at such a voltage as to create a set potential across the cell membrane for a period of time long enough to create a pore.

[0604] Applying a voltage across a plasma membrane that exceeds a certain threshold level forms a pore in the membrane. If the strength of the applied electrical field and/or duration of exposure to it are properly chosen, the pores formed by the electrical pulse reseal after a short period of time, during which extracellular compounds have a chance to enter into the cell. However, excessive exposure of live cells to electrical fields can cause apoptosis and/or necrosis-processes that result in cell death.

[0605] Generally, the process of electroporation is often used for the transformation of bacteria, yeast, plant protoplasts, cultured cells and other cells or vesicles as a way of introducing some substance into a cell or a vesicle, such as loading it with a molecular probe, a drug that can change the cell's function, or pieces of DNA or forms of RNA, such as mRNA, siRNA, guide RNA (gRNA) or microRNA. This procedure is also highly efficient for the introduction of chemical or biological agents that specifically intervene in molecular pathways in tissue culture cells or primary cells, especially mammalian cells. For example, electroporation is used in the process of producing knockout mice, as well as in tumor treatment, gene therapy, and cell-based therapy.

[0606] Successive Gene Editing

[0607] In some embodiments, the present disclosure utilizes multiple, successive gene editing steps. In some embodiments, successive gene editing steps involve the use of multiple, successive electroporations to introduce gene editing compositions, e.g., gRNA(s) and CRISPR endonucleases (e.g., Cas9 or Cpf1).

[0608] In some embodiments, each successive gene editing step (e.g., each electroporation step) involves use the same compositions, e.g., use the same gRNA(s) and same CRISPR endonuclease(s). In other embodiments, successive gene editing steps (e.g., successive electroporation steps) involve different compositions, e.g., use of different gRNA(s) and/or different CRISPR endonuclease(s). In some embodiments, each successive gene editing step (e.g., each electroporation step) targets the same chromosomal locus. In other embodiments, successive gene editing steps (e.g., successive electroporation steps) target different chromosomal loci. In some embodiments, successive gene editing steps (e.g., successive electroporation steps) involve targeting of a human beta globin locus on chromosome 11 and/or one or more BCL11A-related loci on chromosome 2.

[0609] In some embodiments, successive gene editing steps (e.g., successive electroporation steps) may comprise the use of a HPFH5 gRNA, e.g., HPFH5-1, HPFH5-D, HPFH5-T5, or HPFH5-T7, a Kenya gRNA, e.g., Kenya-K5, Kenya-K17, a 1450 gRNA, a SPY101 gRNA, and/or a SD2 gRNA. In some embodiments, successive gene editing steps (e.g., successive electroporation steps) may comprise the use of one or more gRNAs provided in Table 2. In some embodiments, successive gene editing steps may comprise the use of at least one SPY101 gRNA in combination with at least one HPFH5 gRNA (e.g., one editing step with SPY101 gRNA and another editing step with at least one HPFH5 gRNA). In some embodiments, successive gene editing steps may comprise the use of a SPY101 gRNA in combination with a HPFH5-1 gRNA (e.g., one editing step with SPY101 gRNA and another editing step with HPFH5-1 gRNA). In some embodiments, successive gene editing steps may comprise the use of a SPY101 gRNA in combination with a HPFH5-D gRNA (e.g., one editing step with SPY101 gRNA and another editing step with HPFH5-D gRNA). In some embodiments, successive gene editing steps may comprise the use of a SPY101 gRNA in combination with a HPFH5-T5 gRNA (e.g., one editing step with SPY101 gRNA and another editing step with HPFH5-T5 gRNA). In some embodiments, successive gene editing steps may comprise the use of a SPY101 gRNA in combination with a HPFH5-T7 gRNA (e.g., one editing step with SPY101 gRNA and another editing step with HPFH5-T7 gRNA). In some embodiments, successive gene editing steps may comprise the use of at least one SPY101 gRNA in combination with at least one Kenya gRNA (e.g., one editing step with SPY101 gRNA and another editing step with at least one Kenya gRNA). In some embodiments, successive gene editing steps may comprise the use of a SPY101 gRNA in combination with a Kenya-K5 gRNA (e.g., one editing step with SPY101 gRNA and another editing step with Kenya-K5 gRNA). In some embodiments, successive gene editing steps may comprise the use of a SPY101 gRNA in combination with a Kenya-K17 gRNA (e.g., one editing step with SPY101 gRNA and another editing step with Kenya-K17 gRNA). In some embodiments, successive gene editing steps may comprise the use of a SPY101 gRNA in combination with HPFH5-1 and HPFH5-D gRNAs (e.g., one editing step with SPY101 gRNA and another one or two editing steps with HPFH5-1 and HPFH5-D gRNAs). In some embodiments, successive gene editing steps may comprise the use of a SPY101 gRNA in combination with HPFH5-T7 and HPFH5-D gRNAs (e.g., one editing step with SPY101 gRNA and another one or two editing steps with HPFH5-T7 and HPFH5-D gRNAs). In some embodiments, successive gene editing steps may comprise the use of a SPY101 gRNA in combination with HPFH5-T5 and HPFH5-1 gRNAs (e.g., one editing step with SPY101 gRNA and another one or two editing steps with HPFH5-T5 and HPFH5-1 gRNAs). In some embodiments, successive gene editing steps may comprise the use of a SPY101 gRNA in combination with Kenya-K5 and Kenya-K17 gRNAs (e.g., one editing step with SPY101 gRNA and another one or two editing steps with Kenya-K5 and Kenya-K17 gRNAs). In some embodiments, successive gene editing steps may comprise the use of a SPY101 gRNA in combination with a SD2 gRNA (e.g., one editing step with SPY101 gRNA and another editing step with SD2 gRNA). In some embodiments, successive gene editing steps may comprise the use of at least one 1450 gRNA in combination with at least one HPFH5 gRNA (e.g., one editing step with 1450 gRNA and another editing step with at least one HPFH5 gRNA). In some embodiments, successive gene editing steps may comprise the use of a 1450 gRNA in combination with a HPFH5-1 gRNA (e.g., one editing step with 1450 gRNA and another editing step with HPFH5-1 gRNA). In some embodiments, successive gene editing steps may comprise the use of a 1450 gRNA in combination with a HPFH5-D gRNA (e.g., one editing step with 1450 gRNA and another editing step with HPFH5-D gRNA). In some embodiments, successive gene editing steps may comprise the use of a 1450 gRNA in combination with a HPFH5-T5 gRNA (e.g., one editing step with 1450 gRNA and another editing step with HPFH5-T5 gRNA). In some embodiments, successive gene editing steps may comprise the use of a 1450 gRNA in combination with a HPFH5-T7 gRNA (e.g., one editing step with 1450 gRNA and another editing step with HPFH5-T7 gRNA). In some embodiments, successive gene editing steps may comprise the use of at least one 1450 gRNA in combination with at least one Kenya gRNA (e.g., one editing step with 1450 gRNA and another editing step with at least one Kenya gRNA). In some embodiments, successive gene editing steps may comprise the use of a 1450 gRNA in combination with a Kenya-K5 gRNA (e.g., one editing step with 1450 gRNA and another editing step with Kenya-K5 gRNA). In some embodiments, successive gene editing steps may comprise the use of a 1450 gRNA in combination with a Kenya-K17 gRNA (e.g., one editing step with 1450 gRNA and another editing step with Kenya-K17 gRNA). In some embodiments, successive gene editing steps may comprise the use of a 1450 gRNA in combination with HPFH5-1 and HPFH5-D gRNAs (e.g., one editing step with 1450 gRNA and another one or two editing steps with HPFH5-1 and HPFH5-D gRNAs). In some embodiments, successive gene editing steps may comprise the use of a 1450 gRNA in combination with HPFH5-T7 and HPFH5-D gRNAs (e.g., one editing step with 1450 gRNA and another one or two editing steps with HPFH5-T7 and HPFH5-D gRNAs). In some embodiments, successive gene editing steps may comprise the use of a 1450 gRNA in combination with HPFH5-T5 and HPFH5-1 gRNAs (e.g., one editing step with 1450 gRNA and another one or two editing steps with HPFH5-T5 and HPFH5-1 gRNAs). In some embodiments, successive gene editing steps may comprise the use of a 1450 gRNA in combination with Kenya-K5 and Kenya-K17 gRNAs (e.g., one editing step with 1450 gRNA and another one or two editing steps with Kenya-K5 and Kenya-K17 gRNAs). In some embodiments, successive gene editing steps may comprise the use of a 1450 gRNA in combination with a SD2 gRNA (e.g., one editing step with 1450 gRNA and another editing step with SD2 gRNA). In some embodiments, successive gene editing steps may comprise the use of at least one of a HPFH5-1, HPFH5-D, HPFH5-T5, HPFH5-T7, Kenya-K5, or Kenya-K1 gRNA in combination with at least one additional HPFH5-1, HPFH5-D, HPFH5-T5, HPFH5-T7, Kenya-K5, or Kenya-K1 gRNA. In some embodiments, successive gene editing steps may comprise the use of a HPFH5-1 gRNA in combination with a HPFH5-1, HPFH5-D, HPFH5-T5, HPFH5-T7, Kenya-K5, or Kenya-K1 gRNA. In some embodiments, successive gene editing steps may comprise the use of a HPFH5-D gRNA in combination with a HPFH5-1, HPFH5-D, HPFH5-T5, HPFH5-T7, Kenya-K5, or Kenya-K1 gRNA. In some embodiments, successive gene editing steps may comprise the use of a HPFH5-T5 gRNA in combination with a HPFH5-1, HPFH5-D, HPFH5-T5, HPFH5-T7, Kenya-K5, or Kenya-K1 gRNA. In some embodiments, successive gene editing steps may comprise the use of a HPFH5-T7 gRNA in combination with a HPFH5-1, HPFH5-D, HPFH5-T5, HPFH5-T7, Kenya-K5, or Kenya-K1 gRNA.

[0610] In some embodiments, successive gene editing (e.g., successive electroporation) may involve 2, 3, 4, 5, 6, or more gene editing steps. In some embodiments, successive gene editing may involve 2 gene editing steps. In some embodiments, successive gene editing may involve 3 gene editing steps.

[0611] In some embodiments, successive gene editing steps may involve the use of a concatenated gRNA.

[0612] In some embodiments, successive gene editing steps (e.g., successive electroporation steps) provide improved persistence of gene editing, higher levels of gene editing, improved biological outcomes, e.g., increased levels of HbF, fewer off-target effects, and/or fewer translocations, compared to single gene editing events. In some embodiments, successive gene editing steps (e.g., successive electroporation steps) provide fewer translocations compared to single gene editing events (e.g., a single electroporation step).

[0613] In some embodiments, successive gene editing steps (e.g., successive electroporation steps) may occur 12, 18, 24, 36, 48, 72, or more hours apart from one another, e.g., a second electroporation may occur 48 hours after a first electroporation. In some embodiments, successive gene editing steps (e.g., successive electroporation steps) occur 12-72, 12-48, or 36-72 hours apart from one another. In some embodiments, successive gene editing steps (e.g., successive electroporation steps) occur 36 hours apart. In some embodiments, successive gene editing steps (e.g., successive electroporation steps) occur 48 hours apart.

[0614] In some embodiments, a first gene editing step (e.g., a first successive electroporation step) may occur within 12, 36, 48, or 72 of thawing a population of cells or obtaining a population of cells from a biological source, e.g., a human subject or human patient.

[0615] In some embodiments, a population of edited cells may be purified, e.g., using FACS, between two successive gene editing steps, e.g., between a first and second electroporation, or after completing a series of successive gene editing steps (e.g., a series of successive electroporation steps). In some embodiments, a population of cells may be allowed to differentiate and/or enucleate between two successive gene editing steps (e.g., successive electroporation steps) or after completing a series of successive gene editing steps (e.g., successive electroporation steps).

[0616] In some embodiments, successive gene editing steps (e.g., successive electroporation steps) may be performed on any cell type described herein, e.g., HSPC, mPB CD34+. In some embodiments, successive gene editing steps (e.g., successive electroporation steps) may be performed on myeloid progenitor cells.

### Definitions

[0617] The term “comprising” or “comprises” is used in reference to compositions, methods, and respective component(s) thereof, that are essential to the invention, yet open to the inclusion of unspecified elements, whether essential or not.

[0618] The term “consisting essentially of” refers to those elements required for a given aspect. The term permits the presence of additional elements that do not materially affect the basic and novel or functional characteristic(s) of that aspect of the invention.

[0619] The term “consisting of” refers to compositions, methods, and respective components thereof as described herein, which are exclusive of any element not recited in that description of the aspect.

[0620] The singular forms “a,” “an,” and “the” include plural references unless the context clearly dictates otherwise.

[0621] Any numerical range recited in this specification describes all sub-ranges of the same numerical precision (i.e., having the same number of specified digits) subsumed within the recited range. For example, a recited range of “1.0 to 10.0” describes all sub-ranges between (and including) the recited minimum value of 1.0 and the recited maximum value of 10.0, such as, for example, “2.4 to 7.6,” even if the range of “2.4 to 7.6” is not expressly recited in the text of the specification. Accordingly, the Applicant reserves the right to amend this specification, including the claims, to expressly recite any sub-range of the same numerical precision subsumed within the ranges expressly recited in this specification. All such ranges are inherently described in this specification such that amending to expressly recite any such sub-ranges will comply with written description, sufficiency of description, and added matter requirements, including the requirements under 35 U.S.C. § 112(a) and Article 123(2) EPC. Also, unless expressly specified or otherwise required by context, all numerical parameters described in this specification (such as those expressing values, ranges, amounts, percentages, and the like) may be read as if prefaced by the word “about,” even if the word “about” does not expressly appear before a number. Additionally, numerical parameters described in this specification should be construed in light of the number of reported significant digits, numerical precision, and by applying ordinary rounding techniques. It is also understood that numerical parameters described in this specification will necessarily possess the inherent variability characteristic of the underlying measurement techniques used to determine the numerical value of the parameter.

### EXAMPLES

[0622] The invention will be more fully understood by reference to the following examples, which provide illustrative non-limiting aspects of the invention.

[0623] The examples describe the use of the CRISPR/Cas system as an illustrative genome editing technique to create defined therapeutic genomic deletions or single base substitutions, collectively termed “genomic modifications” herein, in the human beta globin gene locus on chromosome 11 and BCL11A gene on chromosome 2 or a DNA sequence that encodes a transcriptional control region of the BCL11A gene on chromosome 2, that lead to an upregulation of expression of HbF. Exemplary therapeutic modifications are genetically and/or functionally similar or identical to those observed in hematopoietic cells of individuals with hemoglobinopathy such as sickle cell or β-thalassemia in which the modifications de-repress, or lead to the re-expression of, γ-globin and thus fetal hemoglobin. Introduction of the defined therapeutic modifications represents a novel therapeutic strategy for the potential amelioration of hemoglobinopathies, as described and illustrated herein.

### Example 1—CRISPR/SpCas9 Target Sites for the Human Beta Globin Locus

[0624] Regions of the human beta globin locus were scanned for target sites. Each area was scanned for a protospacer adjacent motif (PAM) having the sequence NRG. gRNA 20 bp spacer sequences corresponding to the PAM were identified, as shown in SEQ ID NOs: 1-56,961 of the Sequence Listing.

### Example 2—CRISPR/SaCas9 Target Sites for the Human Beta Globin Locus

[0625] Regions of the human beta globin locus were scanned for target sites. Each area was scanned for a protospacer adjacent motif (PAM) having the sequence NNGRRT. gRNA 20 bp spacer sequences corresponding to the PAM were identified, as shown in SEQ ID NOs: 56,962-64,104 of the Sequence Listing.

### Example 3—CRISPR/NmCas9 Target Sites for the Human Beta Globin Locus

[0626] Regions of the human beta globin locus were scanned for target sites. Each area was scanned for a protospacer adjacent motif (PAM) having the sequence NNNNGATT. gRNA 24 bp spacer sequences corresponding to the PAM were identified, as shown in SEQ ID NOs: 64,105-66,258 of the Sequence Listing.

### Example 4—CRISPR/StCas9 Target Sites for the Human Beta Globin Locus

[0627] Regions of the human beta globin locus were scanned for target sites. Each area was scanned for a protospacer adjacent motif (PAM) having the sequence NNAGAAW. gRNA 24 bp spacer sequences corresponding to the PAM were identified, as shown in SEQ ID NOs: 66,259-69,152 of the Sequence Listing.

### Example 5—CRISPR/TdCas9 Target Sites for the Human Beta Globin Locus

[0628] Regions of the human beta globin locus were scanned for target sites. Each area was scanned for a protospacer adjacent motif (PAM) having the sequence NAAAAC. gRNA 24 bp spacer sequences corresponding to the PAM were identified, as shown in SEQ ID NOs: 69,153-70,300 of the Sequence Listing.

### Example 6—CRISPR/Cpf1 Target Sites for the Human Beta Globin Locus

[0629] Regions of the human beta globin locus were scanned for target sites. Each area was scanned for a protospacer adjacent motif (PAM) having the sequence TTN. gRNA 20-24 bp spacer sequences corresponding to the PAM were identified, as shown in SEQ ID NOs: 70,301-156,352 of the Sequence Listing.

### Example 7—Creation of Deletions Proximal to Chr11:5224779-5237723

[0630] In this example, we illustrate use of the methods described herein to generate certain deletions that are proximal to the region Chr11:5224779-5237723. Deletions in this region have been observed in human patients designated as HPFH-5 (or “HPFH Sicilian”) described in Camaschella et al., Haematologica, 75(Suppl 5):26-30 (1990). The 13 kb deletion variant in the human β-globin locus observed in the human patients was associated with the clinical phenotype of hereditary persistence of fetal hemoglobin (HPFH), in which the presence of fetal hemoglobin can complement the defect in adult hemoglobin synthesis or function, and ameliorate disease, in sickle cell anemia or β-thalassemia.

[0631] In this example, we illustrate that the CRISPR/Cas system can be used to create deletions functionally resembling those associated with natural HPFH alleles such as HPFH-5. Guide RNAs were designed to eliminate the pathogenic sickle cell allele by deleting the δ and β globin genes as well as substantial portion of the γ globin gene 3′ region. FIG. 1A shows the human beta globin locus with hollow boxes highlighting the HPFH-5 5′ and 3′ target sites. The 13 kb deletion starts 3 kb 5′ to the δβ1 gene and ends 1.7 kb 3′ to the end of the β gene (690 bp downstream from the β gene polyA signal). See FIG. 1B. In addition, guide RNAs were designed to target sites throughout the 13 kb region in order to determine the therapeutic potential of smaller deletions within this locus.

### Experimental Methods

[0632] Selection of Target Sites

[0633] Regions of the β-globin gene cluster were scanned for target sites, including the 5′ and 3′ regions associated with hereditary persistence of fetal hemoglobin-5 (HPFH-5). Each area was scanned for protospacer adjacent motifs (PAMs) having the sequence NGG and/or NRG. Guide strands corresponding to the PAMs were identified.

[0634] For this illustrative example, candidate guides were screened and selected in a multi-step process that involved both theoretical binding and experimentally assessed activity. By way of illustration, candidate guides having sequences that match a particular on-target site with adjacent PAM can be assessed for their potential to cleave at off-target sites having similar sequences, using one or more of a variety of bioinformatics tools available for assessing off-target binding, as described and illustrated in more detail below, in order to assess the likelihood of effects at chromosomal positions other than those intended. Candidates predicted to have relatively lower potential for off-target activity can then be assessed experimentally to measure their on-target activity, and then off-target activities at various sites. Preferred guides have sufficiently high on-target activity to achieve desired levels of gene editing at the selected locus, and relatively lower off-target activity, to reduce the likelihood of alterations at other chromosomal loci. The ratio of on-target to off-target activity is often referred to as the “specificity” of a guide.

[0635] For initial screening of predicted off-target activities, there are a number of bioinformatics tools known and publicly available that can be used to predict the most likely off-target sites; and since binding to target sites in the CRISPR Cas9 nuclease system is driven by Watson-Crick base pairing between complementary sequences, the degree of dissimilarity (and therefore reduced potential for off-target binding) is essentially related to primary sequence differences: mismatches and bulges, i.e. bases that are changed to a non-complementary base, and insertions or deletions of bases in the potential off-target site relative to the target site. An exemplary bioinformatics tool called COSMID (CRISPR Off-target Sites with Mismatches, Insertions and Deletions) (available on the web at crispr dot bme dot gatech dot edu) compiles such similarities.

[0636] CRISPR Cloning

[0637] Plasmids expressing the Cas9 protein and guide strand RNA were assembled using a vector that expressed humanized Cas9 from S. pyogenes and the single-molecule guide RNA. Complementary oligonucleotides corresponding to the guide strand were obtained (Operon or IDT), kinased, annealed and cloned into the vector. Guide RNAs were tested in cells:

[0638] The first three spacer sequences target the 5′ boundary of the region to be deleted, and the last three target the 3′ boundary of the region to be deleted.

[0639] Cell Transfection

[0640] K-562 cells were cultured in RPMI media supplemented with 10% FBS and 2 mM fresh L-glutamine and passaged as they approached a confluency of 1×10⁵/ml. An Amaxa Nucleofector 4D was used to transfect 200,000 K-562 cells with 1 μg vector expressing HPFH5 targeting sgRNAs, and 1000 ng of plasmid expressing Cas9 following manufacturer's instructions. The genomic DNA was harvested after 3 days using QuickExtract DNA extraction solution (Epicentre, Madison, Wis.), as described.

[0641] Hek293T cells were seeded 24 hours prior to transfection in 24-well plates at a density of 80,000 cells per well and cultured in DMEM media supplemented with 10% FBS and 2 mM fresh L-glutamine. Cells were transfected with 1000 ng of plasmid expressing Cas9 and gRNA using 2 μl of Lipofectamine 2000 (Life technologies), according to manufacturer's instructions. Genomic DNA was harvested at 72 hours after transfection using QuickExtract DNA Extraction Solution (Epicenter).

[0642] On- and Off-Target Mutation Detection by Sequencing

[0643] To sequence the on-target sites and putative off-target sites, the appropriate amplification primers were identified and reactions were set up with these primers using the genomic DNA harvested using QuickExtract DNA extraction solution (Epicentre) from treated cells three days post-transfection. The amplification primers contain the gene specific portion flanked by adapters. The forward primer's 5′ end includes a modified forward (read1) primer-binding site. The reverse primer's 5′ end contains a combined modified reverse (read2) and barcode primer-binding site, in opposite orientation. The individual PCR reactions were validated by separating on agarose gels, then purified and re-amplified. The second round forward primers contain the IIlumina P5 sequence, followed by a proportion of the modified forward (read1) primer binding site. The second round reverse primers contain the IIlumina P7 sequence (at the 5′ end), followed by the 6-base barcode and the combined modified reverse (read2) and barcode primer binding site. The second round amplifications were also checked on agarose gels, then purified, and quantitated using a NanoDrop spectrophotometer. The amplification products were pooled to match concentration and then submitted to the Emory Integrated Genomic core for library prepping and sequencing on an Illumina Miseq machine.

[0644] The sequencing reads were sorted by barcode and then aligned to the reference sequences supplied by bioinformatics for each product. Insertion and deletion rates in the aligned sequencing reads were detected in the region of the putative cut sites using software previously described; see, e.g., Lin et al., Nucleic Acids Res., 42: 7473-7485 (2014). The levels of insertions and deletions detected in this window were then compared to the level seen in the same location in genomic DNA isolated from in mock transfected cells to minimize the effects of sequencing artifacts.

[0645] Mutation Detection Assays

[0646] The on- and off-target cleavage activities of Cas9 and guide RNA combinations were measured using the mutation rates resulting from the imperfect repair of double-strand breaks by NHEJ.

[0647] On-target loci were amplified using AccuPrime Taq DNA Polymerase High Fidelity (Life Technologies, Carlsbad, Calif.) following manufacturer's instructions for 40 cycles (94° C., 30 s; 52-60° C., 30 s; 68° C., 60 s) in 50 μl reactions containing 1 μl of the cell lysate, and 1 μl of each 10 μM amplification primer. T7EI mutation detection assays were performed, as per manufacturers protocol [Reyon et al., Nat. Biotechnol., 30: 460-465 (2012)], with the digestions separated on 2% agarose gels and quantified using ImageJ [Guschin et al., Methods Mol. Biol., 649: 247-256 (2010)]. The assays determine the percentage of insertions/deletions (“indels”) in the bulk population of cells.

[0648] Detecting Inversions and Deletions by End-Point PCR

[0649] All end-point PCR reactions were performed using AccuPrime Taq DNA Polymerase High Fidelity (Life Technologies) following manufacturer's instructions for 40 cycles (94° C., 30 s; 60° C., 30 s; 68° C., 45 s) in a 50 μl reaction containing 1 μl of the cell lysate, and 1 μl of each 10 μM target region amplification primer.

[0650] Deletion Quantification Using Drop Digital PCR (ddPCR)

[0651] The level of joined chromosomal ends, indicating the intended chromosomal deletions, was quantitated using the BioRad (Hercules, Calif.) drop digital PCR machine (ddPCR) QX200. The machines allow absolute quantification by breaking individual PCR reactions into 20,000 droplets that are individually tested by end-point PCR using a Cyber green-like reagent and a reader that can effectively differentiate between PCR-positive and PCR-negative droplets. Genomic DNA for ddPCR was extracted from K-562 cells using the QiaAMP DNA mini kit (Qiagen, Valencia, Calif.). PCR reactions contained 2×ddPCR EvaGreen supermix, 200 ng of genomic DNA, primers, and HindIII (1 U/reaction). Reactions were run for 40 cycles (94° C., 30 s; 55-65° C., 30 s; 72° C., 90 s).

### Example 8—Creation of Deletions Proximal to Chr11:5233055-5240389

[0652] In this example, we illustrate use of the methods described herein to generate certain deletions that are proximal to the region Chr11:5233055-5240389. Deletions in this region have been observed in human patients with a 7.2 kb deletion in the human β-globin locus on chromosome 11 that is referred to herein as the “Corfu long” deletion. In the homozygous state, such a deletion is associated with a complete absence of hemoglobin A and A2 and a high level of fetal hemoglobin and HPFH [Wainscoat et al, Ann. NY Acad Sci 445:20 (1985) and Kulozik et al, Blood 71:457 (1988)]. This deletion is depicted in FIG. 3. We further determined that known binding sites for key regulators of γ-globin—BCL11a and Gata1—are located within a 3.5 kb subregion within the 7.2 kb region (FIG. 3). It is contemplated that deletion of this smaller region alone (deletion in chromosome 11 within region Chr11:5233055-5240389) might be sufficient to confer an HPFH phenotype comparable to that seen with the larger deletion and, moreover, may be achievable at a higher efficiently of genome editing than for the larger deletion. CRISPR guide RNAs were designed to effect cleavage at each end of the 7.2 kb and 3.5 kb regions and their ability to effect deletion of the intervening fragment was validated.

[0653] Individual guide RNAs directed towards the boundaries of each of the Corfu deletions were tested for their efficiency of gene editing. Vectors encoding the guide RNAs were generated and introduced into cells as described in Example 7.

### Example 9—Creation of Deletions Proximal to Chr11:5226631-5249422

[0654] In this example, we illustrate use of the methods described herein to generate certain deletions that are proximal to the region Chr11:5226631-5249422. Deletions in this region have been observed in human patients with a large deletion in the human β-globin locus on chromosome 11 that is referred to herein as the HPFH Kenya-like variant [Huisman et al, Arch. Biochem. Biophys. 152:850 (1972) and Ojwang et al, Hemoglobin 7:115 (1983)]. The naturally-occurring variant appears to have resulted from non-homologous crossing over between amino acids 80-87 of the ^{A}γ and β-globin genes and deletion of the intervening ˜23 kb of sequence in chromosome 11 within region Chr11:5226631-5249422. The Kenya fusion protein contains amino acid residues 1-80 of the Ay chain and 87-146 of the β chain. CRISPR guide RNAs used to effect cleavage at each boundary of the ˜23 kb region (FIG. 4) were designed and validated. Vectors encoding the guide RNAs were generated and introduced into cells as described in Example 7.

### Example 10—Creation of Deletions Proximal to Chr11:5249959-5249971

[0655] In this example, we illustrate use of the methods described herein to generate certain deletions that are proximal to the region Chr11:5249959-5249971. Deletions in this region have been observed in human patients with a small deletion variant of the β-globin locus in chromosome 11 within region Chr11:5249959-5249971 that was identified and shown to be associated with HPFH [Gilman et al, Nucleic acids Research 16(22):10635 (1988)]. This deletion spans −102 to −114 of the γ-globin gene and encompasses the distal CCAAT box believed important for regulation of the γ-gene promoter (FIG. 5A). Potential PAM sites for CRISPR are circled (FIG. 5A).

[0656] One approach is to cleave this locus within the 13 bp region and allow NHEJ to mis-repair the lesion with the expectation that in some instances the exact 13 bp deletion might be recapitulated. However, the repair outcome by NHEJ alone cannot be assured and it is unlikely that the precise 13 bp deletion will occur at a clinically significant frequency—rather than additional deletions or insertions, which may themselves have the desired therapeutic consequence. Alternatively, the DSB could be repaired by HDR in the presence of a co-delivered repair template donor that specifies the precise 13 bp deletion.

[0657] A third approach to creating the 13 bp deletion could be taken that makes use of microhomology at the intended mutation site and the repair pathway of MMEJ. In the present example analysis of the sequence encompassing and adjacent to the 13 bp deletion site revealed the presence of two 8 bp repeat sequences which we predicted would likely recombine during MMEJ-mediated repair to produce the 13 bp deletion in the presence of a single double-strand break. Vectors encoding the guide RNAs were generated and introduced into cells as described in Example 7.

### Example 11—Creation of Deletions Proximal to Chr11:5196709-5239223

[0658] In this example, we illustrate use of the methods described herein to generate certain deletions that are proximal to the region Chr11:5196709-5239223. Deletions in this region have been observed in human patients with a large deletion in the human β-globin locus on chromosome 11 that is referred to as the HPFH-4 (or “HPFH Italian”) allele [Camaschella et al, Haematologia 75(5):26 (1990)] and is characterized by a 40 kb deletion (FIG. 6A) in chromosome 11 within region Chr11:5196709-5239223 that fully encompasses the shorter (13 kb) HPFH-5 allele. It is contemplated that genome editing technologies such as CRISPR can be used to create a targeted deletion of the corresponding or similar genomic region, or subset thereof, in hematopoietic cells of individuals with hemoglobinopathy such as sickle cell or β-thalassemia to de-repress, or lead to the re-expression of, γ-globin and thus fetal hemoglobin.

### Example 12—Creation of Deletions Proximal to Chr11:5225700-5236750

[0659] In this example, we illustrate use of the methods described herein to generate certain deletions that are proximal to the region Chr11:5225700-5236750. Deletions in this region have been observed in human patients with the HPFH Black allele [Anagnou et al., Blood 65:1245 (1985)], which is characterized by a large deletion (FIG. 6B) in chromosome 11 within region Chr11:5225700-5236750 that overlaps completely with theHPFH-4 and HPFH-5 deletions. It is contemplated that genome editing technologies such as CRISPR can be used to create a targeted deletion of the corresponding or similar genomic region, or subset thereof, in hematopoietic cells of individuals with hemoglobinopathy such as sickle cell or β-thalassemia to de-repress, or lead to the re-expression of, γ-globin and thus fetal hemoglobin.

### Example 13—Creation of HPFH-Associated Non-Deletion Mutations

[0660] The −175 (T to C) point mutation in the ^{G}γ or ^{A}γ gene of β-globin locus is associated with a phenotype of pancellular HPFH, i.e. across many cells with fairly uniform distribution; see, e.g., Ottolenghi et al., Blood 71:815 (1988) and Surrey et al., Blood 71:807 (1988). The HPFH phenotype is believed to be due to disruption of one or more cis-elements to which regulatory factors normally bind and repress γ-globin expression, or to enhancement of binding of regulatory factors that upregulate γ-globin expression. It is contemplated that genome editing technologies such as CRISPR can be used to create the point mutation, or other modification resulting in changes in regulatory factor binding, in hematopoietic cells of individuals with hemoglobinopathy such as sickle cell or β-thalassemia to de-repress, or lead to the re-expression of, γ-globin and thus fetal hemoglobin.

[0661] Multiple putative PAM sequences for S. pyogenes Cas9 are located adjacent to this target site (FIG. 6C). Potential PAM sites for S. pyogenes Cas9 are circled. Nucleotide T175 is shown in bold (FIG. 6C).

### Example 14—CRISPR/SpCas9 Target Sites for the Transcriptional Control Sequence of the BCL11A Gene

[0662] Regions of the 12.4 kb transcriptional control sequence of the BCL11A gene were scanned for target sites. Each area was scanned for a protospacer adjacent motif (PAM) having the sequence NRG. gRNA 20 bp spacer sequences corresponding to the PAM were identified, as shown in SEQ ID NOs: 156,353-185,834 of the Sequence Listing.

### Example 15—CRISPR/SaCas9 Target Sites for the Transcriptional Control Sequence of the BCL11A Gene

[0663] Regions of the 12.4 kb transcriptional control sequence of the BCL11A gene were scanned for target sites. Each area was scanned for a protospacer adjacent motif (PAM) having the sequence NNGRRT. gRNA 20 bp spacer sequences corresponding to the PAM were identified, as shown in SEQ ID NOs: 185,835-188,739 of the Sequence Listing.

### Example 16—CRISPR/StCas9 Target Sites for the Transcriptional Control Sequence of the BCL11A Gene

[0664] Regions of the 12.4 kb transcriptional control sequence of the BCL11A gene were scanned for target sites. Each area was scanned for a protospacer adjacent motif (PAM) having the sequence NNAGAAW. gRNA 24 bp spacer sequences corresponding to the PAM were identified, as shown in SEQ ID NOs: 188,740-189,772 of the Sequence Listing.

### Example 17—CRISPR/TdCas9 Target Sites for the Transcriptional Control Sequence of the BCL11A Gene

[0665] Regions of the 12.4 kb transcriptional control sequence of the BCL11A gene were scanned for target sites. Each area was scanned for a protospacer adjacent motif (PAM) having the sequence NAAAAC. gRNA 24 bp spacer sequences corresponding to the PAM were identified, as shown in SEQ ID NOs: 189,773-190,203 of the Sequence Listing.

### Example 18—CRISPR/NmCas9 Target Sites for the Transcriptional Control Sequence of the BCL11A Gene

[0666] Regions of the 12.4 kb transcriptional control sequence of the BCL11A gene were scanned for target sites. Each area was scanned for a protospacer adjacent motif (PAM) having the sequence NNNNGATT. gRNA 24 bp spacer sequences corresponding to the PAM were identified, as shown in SEQ ID NOs: 190,204-193,083 of the Sequence Listing.

### Example 19—CRISPR/Cpf1 Target Sites for the Transcriptional Control Sequence of the BCL11A Gene

[0667] Regions of the 12.4 kb transcriptional control sequence of the BCL11A gene were scanned for target sites. Each area was scanned for a protospacer adjacent motif (PAM) having the sequence TTN. gRNA 20-24 bp spacer sequences corresponding to the PAM were identified, as shown in SEQ ID NOs: 193,084-228,299 of the Sequence Listing.

### Example 20—Bioinformatics Analysis of the Guide Strands

[0668] Candidate guides from Examples 14-19 will be screened and selected in a multi-step process that involves both theoretical binding and experimentally assessed activity, as previously described in Example 7. By way of illustration, candidate guides having sequences that match a particular on-target site, such as a site within the transcriptional control sequence of the BCL11A gene, with adjacent PAM can be assessed for their potential to cleave at off-target sites having similar sequences, using one or more of a variety of bioinformatics tools available for assessing off-target binding, as described and illustrated in more detail below, in order to assess the likelihood of effects at chromosomal positions other than those intended. Candidates predicted to have relatively lower potential for off-target activity can then be assessed experimentally to measure their on-target activity, and then off-target activities at various sites. Preferred guides have sufficiently high on-target activity to achieve desired levels of gene editing at the selected locus, and relatively lower off-target activity to reduce the likelihood of alterations at other chromosomal loci. The ratio of on-target to off-target activity is often referred to as the “specificity” of a guide.

[0669] For initial screening of predicted off-target activities, there are a number of bioinformatics tools known and publicly available that can be used to predict the most likely off-target sites; and since binding to target sites in the CRISPR/Cas9 or CRISPR/Cpf1 nuclease system is driven by Watson-Crick base pairing between complementary sequences, the degree of dissimilarity (and therefore reduced potential for off-target binding) is essentially related to primary sequence differences: mismatches and bulges, i.e. bases that are changed to a non-complementary base, and insertions or deletions of bases in the potential off-target site relative to the target site. An exemplary bioinformatics tool called COSMID (CRISPR Off-target Sites with Mismatches, Insertions and Deletions) (available on the web at crispr.bme.gatech.edu) compiles such similarities. Other bioinformatics tools include, but are not limited to autoCOSMID and CCTop.

[0670] Bioinformatics were used to minimize off-target cleavage in order to reduce the detrimental effects of mutations and chromosomal rearrangements. Studies on CRISPR/Cas9 systems suggested the possibility of off-target activity due to non-specific hybridization of the guide strand to DNA sequences with base pair mismatches and/or bulges, particularly at positions distal from the PAM region. Therefore, it is important to have a bioinformatics tool that can identify potential off-target sites that have insertions and/or deletions between the RNA guide strand and genomic sequences, in addition to base-pair mismatches. Bioinformatics tools based upon the off-target prediction algorithm CCTop were used to search genomes for potential CRISPR off-target sites (CCTop is available on the web at crispr.cos.uni-heidelberg.de/). The output ranked lists of the potential off-target sites based on the number and location of mismatches, allowing more informed choice of target sites, and avoiding the use of sites with more likely off-target cleavage.

[0671] Additional bioinformatics pipelines were employed that weigh the estimated on- and/or off-target activity of g RNA targeting sites in a region. Other features that may be used to predict activity include information about the cell type in question, DNA accessibility, chromatin state, transcription factor binding sites, transcription factor binding data, and other CHIP-seq data. Additional factors are weighed that predict editing efficiency, such as relative positions and directions of pairs of gRNAs, local sequence features and micro-homologies.

### Example 21—Testing of Preferred Guides in Cells for On-Target Activity

[0672] The gRNAs from Examples 14-19 predicted to have the lowest off-target activity were then tested for on-target activity in K562 cells, and evaluated for indel frequency using TIDE as demonstrated in FIG. 9. The gRNA sequences shown in FIG. 9 are included in FIGS. 11A, 11B, and 11C.

[0673] TIDE is a web tool to rapidly assess genome editing by CRISPR-Cas9 of a target locus determined by a guide RNA (gRNA or sg RNA). Based on quantitative sequence trace data from two standard capillary sequencing reactions, the TIDE software quantifies the editing efficacy and identifies the predominant types of insertions and deletions (indels) in the DNA of a targeted cell pool. See Brinkman et al, Nucl. Acids Res. (2014) for a detailed explanation and examples. An alternative method is Next-generation sequencing (NGS), also known as high-throughput sequencing, which is the catch-all term used to describe a number of different modern sequencing technologies including: Illumina (Solexa) sequencing, Roche 454 sequencing, Ion torrent: Proton/PGM sequencing, and SOLiD sequencing. These recent technologies allow one to sequence DNA and RNA much more quickly and cheaply than the previously used Sanger sequencing, and as such have revolutionised the study of genomics and molecular biology.

[0674] Transfection of tissue culture cells, allows screening of different constructs and a robust means of testing activity and specificity. Tissue culture cell lines, such as K562 or HEK293T are easily transfected and result in high activity. These or other cell lines will be evaluated to determine the cell lines that match with CD34+ and provide the best surrogate. These cells will then be used for many early stage tests. For example, individual gRNAs for S. pyogenes Cas9 can be transfected into the cells using plasmids, such as, for example, CTx-1, CTx-2, or CTx-3 described in FIG. 7A-7C, which are suitable for expression in human cells. Alternatively, commercially available vectors may also be used. For the Indel Freq assessment of the BCL11A gRNAs described herein, a commercially available Cas9 expression plasmid (GeneArt, Thermo Fisher) was employed. Several days later (48 hrs for this experiment), the genomic DNA was harvested and the target site amplified by PCR. The cutting activity was measured by the rate of insertions, deletions and mutations introduced by NHEJ repair of the free DNA ends. Although this method cannot differentiate correctly repaired sequences from uncleaved DNA, the level of cutting can be gauged by the amount of mis-repair. Off-target activity can be observed by amplifying identified putative off-target sites and using similar methods to detect cleavage. Translocation can also be assayed using primers flanking cut sites, to determine if specific cutting and translocations happen. Un-guided assays have been developed allowing complementary testing of off-target cleavage including guide-seq. The gRNA or pairs of gRNA with significant activity can then be followed up in cultured cells to measure the modulation or inactivation of the +58 DNA hypersensitive site (DHS) within the transcriptional control sequence of the BCL11A gene. Off-target events can be followed again. Similarly CD34+ cells can be transfected and the level of modulation or inactivation of the +58 DNA hypersensitive site (DHS) within the transcriptional control sequence of the BCL11A gene and possible off-target events measured. These experiments allow optimization of nuclease and donor design and delivery.

### Example 22—Testing of Preferred BCL11A gRNAs in Cells for Off-Target Activity

[0675] The BCL11A gRNAs from Examples 14-19 having the best on-target activity from the TIDE and next generation sequencing studies in the above example will then be tested for off-target activity using whole genome sequencing. Candidate gRNAs will be more completely evaluated in CD34+ cells or iPSCs.

### Example 23—Testing of Preferred BCL11A gRNA Combinations in Cells

[0676] The BCL11A gRNAs from Examples 14-19 having the best on-target activity from the TIDE and next generation sequencing studies and lowest off-target activity will be tested in combinations to evaluate the size of the deletion resulting from the use of each gRNA combination. Potential gRNA combinations will be evaluated in primary human CD34 cells.

[0677] For example, gRNA combinations will be tested for efficiency of deleting all or a portion of the transcriptional control sequence of the BCL11A gene. The gRNA combinations will also be tested for efficiency of deleting all or a portion of the +58 DNA hypersensitive site (DHS) of the BCL11A gene as depicted in FIG. 10A and as demonstrated in FIG. 10B.

### Example 24—Editing Cells Using gRNAs that Target the Human Beta Globin Locus and gRNAs that Target the BCL11A Gene

[0678] Mobilized human peripheral blood CD34+ cells were cultured in serum free STEMSPAN media with erythroid expansion (100×) cytokine cocktail for two days. 100,000 cells were washed and electroporated using Cas9 mRNA with one or more gRNA specific for the human beta globin locus (gRNAs described in Examples 1-6 and disclosed in the Sequence Listing) and one or more gRNA specific for the the BCL11A gene or a DNA sequence that encodes a transcriptional control region of the BCL11A gene (gRNAs described in Examples 14-19 or the Figures; and disclosed in the Sequence Listing). Cells were allowed to recover for one day before being switched to an erythroid differentiation medium (IMDM+Glutamax supplemented with 5% human serum, 10 ug/ml insulin, 20 ug/ml SCF, 5 ug/ml IL-3, 3U/ml EPO, 1 uM dexamethasone, 1 uM β-estradiol, 330 ug/ml holo-transferrin and 2U/ml heraprin). Single erythroid progenitors were generated using flow cytometry one day later and cultured in the erythroid differentiation medium. Half of the colonies were collected 12 days post sorting for DNA and RNA analysis. The rest were collected 16 days post sorting for the analysis of hemoglobin proteins. Globin expression (HBG/HBA or HBG/(HBB+HBG)) was determined by real-time PCR and compared for each of the edited erythroid clones.

### Example 25—Editing Cells with a Concatenated gRNA

[0679] Mobilized human peripheral blood CD34+ cells were cultured in serum free STEMSPAN media with erythroid expansion (100×) cytokine cocktail for two days. 100,000 cells were washed and electroporated using Cas9 mRNA with a concatenated gRNA comprising a first gRNA and second gRNA. The first gRNA can comprise a gRNA specific for the human beta globin locus, as described in Examples 1-6 and disclosed in the Sequence Listing. The second gRNA can comprise a gRNA specific for the the BCL11A gene or a DNA sequence that encodes a transcriptional control region of the BCL11A gene, as described in Examples 14-19 or the Figures; and disclosed in the Sequence Listing. Cells were allowed to recover for one day before being switched to an erythroid differentiation medium (IMDM+Glutamax supplemented with 5% human serum, 10 ug/ml insulin, 20 ug/ml SCF, 5 ug/ml IL-3, 3U/ml EPO, 1 uM dexamethasone, 1 uM β-estradiol, 330 ug/ml holo-transferrin and 2U/ml heraprin). Single erythroid progenitors were generated using flow cytometry one day later and cultured in the erythroid differentiation medium. Half of the colonies were collected 12 days post sorting for DNA and RNA analysis. The rest were collected 16 days post sorting for the analysis of hemoglobin proteins. Globin expression (HBG/HBA or HBG/(HBB+HBG)) was determined by real-time PCR and compared for each of the edited erythroid clones.

### Example 26—Editing Cells with a Concatenated gRNA

[0680] Mobilized human peripheral blood CD34+ cells were cultured in serum free STEMSPAN media with erythroid expansion (100×) cytokine cocktail for two days. 100,000 cells were washed and electroporated using Cas9 mRNA with a concatenated gRNA comprising a first gRNA, a second gRNA, and a third gRNA. The first gRNA can comprise a gRNA specific for the human beta globin locus, as described in Examples 1-6 and disclosed in the Sequence Listing. The second gRNA can comprise a gRNA specific for the human beta globin locus, as described in Examples 1-6 and disclosed in the Sequence Listing. The third gRNA can comprise a gRNA specific for the the BCL11A gene or a DNA sequence that encodes a transcriptional control region of the BCL11A gene, as described in Examples 14-19 or the Figures; and disclosed in the Sequence Listing. Cells were allowed to recover for one day before being switched to an erythroid differentiation medium (IMDM+Glutamax supplemented with 5% human serum, 10 ug/ml insulin, 20 ug/ml SCF, 5 ug/ml IL-3, 3U/ml EPO, 1 uM dexamethasone, 1 uM β-estradiol, 330 ug/ml holo-transferrin and 2U/ml heraprin). Single erythroid progenitors were generated using flow cytometry one day later and cultured in the erythroid differentiation medium. Half of the colonies were collected 12 days post sorting for DNA and RNA analysis. The rest were collected 16 days post sorting for the analysis of hemoglobin proteins. Globin expression (HBG/HBA or HBG/(HBB+HBG)) was determined by real-time PCR and compared for each of the edited erythroid clones.

### Example 27—Editing Cells with a Concatenated gRNA

[0681] Mobilized human peripheral blood CD34+ cells were cultured in serum free STEMSPAN media with erythroid expansion (100×) cytokine cocktail for two days. 100,000 cells were washed and electroporated using Cas9 mRNA with a concatenated gRNA comprising a first gRNA, a second gRNA, and a third gRNA. The first gRNA can comprise a gRNA specific for the human beta globin locus, as described in Examples 1-6 and disclosed in the Sequence Listing. The second gRNA can comprise a gRNA specific for the the BCL11A gene or a DNA sequence that encodes a transcriptional control region of the BCL11A gene, as described in Examples 14-19 or the Figures; and disclosed in the Sequence Listing. The third gRNA can comprise a gRNA specific for the the BCL11A gene or a DNA sequence that encodes a transcriptional control region of the BCL11A gene, as described in Examples 14-19 or the Figures; and disclosed in the Sequence Listing. Cells were allowed to recover for one day before being switched to an erythroid differentiation medium (IMDM+Glutamax supplemented with 5% human serum, 10 ug/ml insulin, 20 ug/ml SCF, 5 ug/ml IL-3, 3U/ml EPO, 1 uM dexamethasone, 1 uM β-estradiol, 330 ug/ml holo-transferrin and 2U/ml heraprin). Single erythroid progenitors were generated using flow cytometry one day later and cultured in the erythroid differentiation medium. Half of the colonies were collected 12 days post sorting for DNA and RNA analysis. The rest were collected 16 days post sorting for the analysis of hemoglobin proteins. Globin expression (HBG/HBA or HBG/(HBB+HBG)) was determined by real-time PCR and compared for each of the edited erythroid clones.

### Example 28—Editing Cells with Two Concatenated gRNAs

[0682] Mobilized human peripheral blood CD34+ cells were cultured in serum free STEMSPAN media with erythroid expansion (100×) cytokine cocktail for two days. 100,000 cells were washed and electroporated using Cas9 mRNA with two concatenated gRNAs. The first concatenated gRNA comprises a first gRNA and a second gRNA. The first gRNA of the first concatenated gRNA can comprise a gRNA specific for the human beta globin locus, as described in Examples 1-6 and disclosed in the Sequence Listing. The second gRNA of the first concatenated gRNA can comprise a gRNA specific for the the BCL11A gene or a DNA sequence that encodes a transcriptional control region of the BCL11A gene, as described in Examples 14-19 or the Figures; and disclosed in the Sequence Listing. The second concatenated gRNA comprises a first gRNA and a second gRNA. The first gRNA of the second concatenated gRNA can comprise a gRNA specific for the human beta globin locus, as described in Examples 1-6 and disclosed in the Sequence Listing. The second gRNA of the second concatenated gRNA can comprise a gRNA specific for the the BCL11A gene or a DNA sequence that encodes a transcriptional control region of the BCL11A gene, as described in Examples 14-19 or the Figures; and disclosed in the Sequence Listing. Cells were allowed to recover for one day before being switched to an erythroid differentiation medium (IMDM+Glutamax supplemented with 5% human serum, 10 ug/ml insulin, 20 ug/ml SCF, 5 ug/ml IL-3, 3U/ml EPO, 1 uM dexamethasone, 1 uM β-estradiol, 330 ug/ml holo-transferrin and 2U/ml heraprin). Single erythroid progenitors were generated using flow cytometry one day later and cultured in the erythroid differentiation medium. Half of the colonies were collected 12 days post sorting for DNA and RNA analysis. The rest were collected 16 days post sorting for the analysis of hemoglobin proteins. Globin expression (HBG/HBA or HBG/(HBB+HBG)) was determined by real-time PCR and compared for each of the edited erythroid clones.

### Example 29—Editing Cells with Two Concatenated gRNAs

[0683] Mobilized human peripheral blood CD34+ cells were cultured in serum free STEMSPAN media with erythroid expansion (100×) cytokine cocktail for two days. 100,000 cells were washed and electroporated using Cas9 mRNA with two concatenated gRNAs. The first concatenated gRNA comprises a first gRNA and a second gRNA. The first gRNA of the first concatenated gRNA can comprise a gRNA specific for the human beta globin locus, as described in Examples 1-6 and disclosed in the Sequence Listing. The second gRNA of the first concatenated gRNA can comprise a gRNA specific for the human beta globin locus, as described in Examples 1-6 and disclosed in the Sequence Listing. The second concatenated gRNA comprises a first gRNA and a second gRNA. The first gRNA of the second concatenated gRNA can comprise a gRNA specific for the the BCL11A gene or a DNA sequence that encodes a transcriptional control region of the BCL11A gene, as described in Examples 14-19 or the Figures; and disclosed in the Sequence Listing. The second gRNA of the second concatenated gRNA can comprise a gRNA specific for the the BCL11A gene or a DNA sequence that encodes a transcriptional control region of the BCL11A gene, as described in Examples 14-19 or the Figures; and disclosed in the Sequence Listing. Cells were allowed to recover for one day before being switched to an erythroid differentiation medium (IMDM+Glutamax supplemented with 5% human serum, 10 ug/ml insulin, 20 ug/ml SCF, 5 ug/ml IL-3, 3U/ml EPO, 1 uM dexamethasone, 1 uM β-estradiol, 330 ug/ml holo-transferrin and 2U/ml heraprin). Single erythroid progenitors were generated using flow cytometry one day later and cultured in the erythroid differentiation medium. Half of the colonies were collected 12 days post sorting for DNA and RNA analysis. The rest were collected 16 days post sorting for the analysis of hemoglobin proteins. Globin expression (HBG/HBA or HBG/(HBB+HBG)) was determined by real-time PCR and compared for each of the edited erythroid clones.

### Example 30—Clinical Studies and Pharmacology

[0684] It is well established that an increase in HbF levels reduces HbS polymerization and thereby ameliorates the phenotype of SCA, reducing clinical complications.

[0685] In the context of the CRISPR/Cas9 technology, or by using other endonucleases for gene editing as described herein, the main objectives of primary pharmacodynamic studies in human subjects/patients will be to demonstrate successful de-repression of γ-globin and concomitant increases and beneficial effects of HbF, and to determine the safety and efficacy of such genetic modifications for the treatment of hemoglobinopathies.

[0686] Cell-based studies can include both wild-type cells, such as normal CD34+hHSCs, which do not normally express high levels of HbF, but are edited as described herein to increase their levels of HbF; as well as cells such as CD34+ cells that are derived from patients having a hemoglobinopathy such as β-thalassemia or SCD.

[0687] Total red cell HbF will be measured by cationic HPLC and the distribution of HbF in red cells will be quantified in F-cells (cells with detectable HbF levels) using FACS. Although even small incremental increases in HbF have been shown to have beneficial effects in the context of SCD, as discussed above, in some aspects at least about 9% of total Hb in a subject will be HbF, which is associated with decreased mortality in SCD; see, e.g., Platt et al., N Engl J Med. 330(23): 1639-1644 (1994). In some aspects, HbF will be at least about 14%, which is associated with additional clinical benefits, and in some aspects HbF will be at least about 20% to 30%, which is associated with substantial normalization of phenotype in the context of SCD. Similarly, the introduction of even relatively limited subpopulations of cells having significantly elevated levels of HbF (referred to as “F-cells”) can be beneficial in various patients since in some situations normalized cells will have a selective advantage relative to diseased cells. Even modest levels of circulating RBCs with elevated levels of HbF can be beneficial for ameliorating one or more aspects of hemoglobinopathy in patients. However, it is generally contemplated that at least one tenth of circulating red blood cells (RBCs) will have elevated levels of HbF, more than one quarter of circulating RBCs will have elevated levels of HbF, or at least one third of circulating RBCs will have elevated levels of HbF. In some aspects, at least about one half, and in some aspects at least about three quarters or more, of circulating RBCs will have elevated levels of HbF.

### Example 31—Biodistribution

[0688] A preliminary feasibility study (non-GLP) will be performed to demonstrate engraftment of CD34⁺ hHSCs in NOD/SCID IL2Rγ mice. A GLP biodistribution and persistence study will be performed in immune-compromised NOD/SCID IL2Rγ mice. CRISPR/Cas9-modified human CD34⁺ HSCs will be administered by i.v. injection (or other routes, e.g. intraosseous) to NOD/SCID IL2Rγ mice. Non-modified CD34+hHSCs will be used as a control.

### Example 32—In Vivo Pharmacology Study

[0689] In an illustrative example of in vivo pharmacology, gene-edited HSCs are introduced into immunodeficient mice, and results such as HSC engraftment are assessed. For example, “NSG” or NOD scid gamma (NOD.Cg-Prkdcscid 112rgtm1Wjl/SzJ), is a strain of inbred laboratory mice, among the most immunodeficient described to date; see, e.g., Shultz et al., Nat. Rev. Immunol. 7(2): 118-130 (2007). Another immune-compromised mouse model applicable for investigating hematopoietic stem cell transplantation is the NOD/MrkBomTac-Prkdc^{scid} mouse (www dot Taconic dot com/NODSC).

[0690] One illustrative approach employing an immune-compromised mouse model is to inject CRISPR/Cas9-modified CD34⁺ human HSCs into immune-compromised NOD/SCID/IL2rγ mice to demonstrate homing and engraftment capabilities.

[0691] It is also possible to consider studies in model animals, provided such models are reasonably predictive of one or more aspects of conditions in human patients. Development of animal models providing information relevant to certain aspects of various diseases continues to be the subject of regular improvements in the art, and the use of CRISPR/Cas-9 gene editing is greatly facilitating the more rapid creation of such disease-relevant animal models.

### Example 33—Use of Edited Cells for the Amelioration of β-Thalassemia

[0692] Using the methods described and illustrated herein, human cells expressing increased levels of HbF can be produced. Such cells can include, for example, human hematopoietic stem cells (human HSCs) that are capable of giving rise to cells of the erythroid lineage such as red blood cells (RBCs). Such HSCs can therefore be used to ameliorate one or more symptoms associated with β-thalassemia.

[0693] For example, when the genome editing procedure is applied to increase the levels of HbF in cells of a patient suffering from a β-thalassemia, one or more symptoms or complications of the β-thalassemia can be ameliorated, as a result of the combination of two beneficial effects. First, HbF provides a functional form of hemoglobin that can play a significant role in ameliorating the anemia and associated clinical conditions of β-thalassemia (i.e. in β-thalassemia major and β-thalassemia intermedia), in which the adult β-globin chains that would normally be expressed from the HBB gene are absent or reduced. Second, the level of unpaired α-globin chains, which is a cause of a number of other problems associated clinically β-thalassemia, are reduced because the α-globin chains can be paired with β-globin chains encoded by the γ-globin genes, expression of which is increased as described herein.

[0694] As also noted herein, β-thalassemia RBCs have selective disadvantages compared to normal RBCs in terms of survival and other factors; and treatment of cells as described herein overcomes certain disadvantages by, e.g., increasing the levels of HbF, and concomitantly decreasing the levels of unpaired α-globin chains.

[0695] In addition, other techniques can be applied to enhance the delivery, expansion and/or persistence of cells modified by genome editing as described herein. These include ablation techniques in which some resident cells are eliminated prior to the introduction of cells. Such techniques are routinely used, for example, in the context of bone marrow transplantation and other procedures in which normal or corrected cells are introduced into patients. Numerous such procedures are known in the art and routinely practiced in connection with the treatment of human patients.

[0696] One illustrative and nonlimiting example of the use of such techniques for the amelioration of β-thalassemia is as follows.

[0697] In an autologous procedure, genome editing is performed on cells derived from a patient with β-thalassemia. Since the patient's own cells are already matched, they do not therefore raise the potential issues associated with use of allogeneic cells. Correction of such cells ex vivo followed by their reintroduction into the patient presents a means of ameliorating the disease.

[0698] As one illustrative example of cells that can be used, peripheral blood stem cells (PBSCs) from a patient with β-thalassemia can be derived from the bloodstream. A process called apheresis or leukapheresis can be used to obtain the PBSCs. For 4 or 5 days before apheresis, the patient may be given a medication to increase the number of stem cells released into the bloodstream. In apheresis, blood is removed through a large vein in the arm or a central venous catheter (a flexible tube that is placed in a large vein in the neck, chest, or groin area). The blood goes through a machine that removes stem cells.

[0699] As another illustrative example of cells that can be used, hematopoietic stem cells (HSCs) can be harvested from the patient's bone marrow using well known techniques.

[0700] CD34 is an antigen associated with hematopoietic stem cells, and isolation of CD34+HSCs can likewise be accomplished by well-known and clinically-validated methods. For example, a magnetic bead separation process that has been FDA-approved for use in various transplantation contexts and that is available commercially from Miltenyi Biotec, along with preparations for the handling and maintenance of such cells, can be used.

[0701] For treating a human patient with β-thalassemia as described herein, a population of CD34+HSCs adjusted to reflect the patient's weight can be used, e.g. a population comprising about ten million CD34+HSCs per kilogram of weight. This population of cells is then modified using the genome editing methods described herein. By way of illustration, if Cas9 is the genome editing endonuclease, the protein can be introduced into the CD34+HSCs by transfection of mRNA using various known techniques; along with the introduction, potentially simultaneously in the transfection, of guide RNAs (which can be single-molecule guides or double-molecule guides) that target loci as described herein. Depending on the procedure used, a portion of the cells (e.g., half the original cells) may then be used for reintroduction into the patient. If ablation is to be used to enhance engraftment of the newly-introduced cells, the patient may be subject to, e.g., mild bone marrow conditioning prior to introduction of the genome edited HSCs. Following any conditioning, the population of genome edited HSCs can be reintroduced into the patient, e.g., by transfusion. Over time, the HSCs give rise to cells of the erythroid lineage, including red blood cells (RBCs).

[0702] In the resulting RBCs, genome editing in the case of β-thalassemia results in an increase in the level of HbF, and a concomitant decrease in unpaired α-globin chains; as a result of which one or more symptoms or complications associated with the β-thalassemia are ameliorated.

### Example 34—Use of Edited Cells for the Amelioration of Sickle Cell Anemia

[0703] Using the methods described and illustrated herein, human cells expressing increased levels of HbF can be produced. Such cells can include, for example, human hematopoietic stem cells (human HSCs) that are capable of giving rise to cells of the erythroid lineage such as red blood cells (RBCs). Such HSCs can therefore be used to ameliorate one or more symptoms associated with Sickle Cell Disease, such as Sickle Cell Anemia.

[0704] For example, when the genome editing procedure is applied to increase the levels of HbF in cells of a patient suffering from a Sickle Cell Anemia (SCA), one or more symptoms or complications of SCA can be ameliorated. In certain aspects, at least one copy of the mutant β-globin gene is knocked down or eliminated, resulting in combination of two beneficial effects. First, HbF provides a functional form of hemoglobin that can play a significant role in ameliorating the anemia and associated clinical conditions of SCA. Second, the level of sickle cell hemoglobin (HbS) expressed from the mutant β-globin is reduced or eliminated. The presence of HbS causes a number of the problems associated clinically with SCA, and even modest reductions in the presence of HbS can be used to reduce or essentially prevent sickling, as described herein and in the art.

[0705] As also noted herein, sickle cell RBCs have selective disadvantages compared to normal RBCs in terms of survival and other factors; and treatment of cells as described herein overcomes certain disadvantages by, e.g., increasing the levels of HbF, and, in aspects in which the mutant β-globin gene is knocked down or eliminated, concomitantly decreasing the levels of HbS.

[0706] In addition, other techniques can be applied to enhance the delivery, expansion and/or persistence of cells modified by genome editing as described herein. These include ablation techniques in which some resident cells are eliminated prior to the introduction of cells. Such techniques are routinely used, for example, in the context of bone marrow transplantation and other procedures in which normal or corrected cells are introduced into patients. Numerous such procedures are known in the art and routinely practiced in connection with the treatment of human patients.

[0707] One illustrative and nonlimiting example of the use of such techniques for the amelioration of SCA is as follows.

[0708] In an autologous procedure, genome editing is performed on cells derived from a patient with SCA. Since the patient's own cells are already matched, they do not therefore raise the potential issues associated with use of allogeneic cells. Correction of such cells ex vivo followed by their reintroduction into the patient presents a means of ameliorating the disease.

[0709] As one illustrative example of cells that can be used, PBSCs from a patient with SCA can be derived from the bloodstream, or HSCs can be harvested from the patient's bone marrow, each as described above in the preceding example using well-known techniques. CD34+ cells can then be derived, using procedures as described in the preceding example and well-known techniques.

[0710] For treating a human patient with SCA as described herein, a population of CD34+HSCs adjusted to reflect the patient's weight can be used, e.g. a population comprising about ten million CD34+HSCs per kilogram of weight. This population of cells is then modified using the genome editing methods described herein. By way of illustration, if Cas9 is the genome editing endonuclease, the protein can be introduced into the CD34+HSCs by transfection of mRNA using various known techniques; along with the introduction, potentially simultaneously in the transfection, of guide RNAs (which can be single-molecule guides or double-molecule guides) that target loci as described herein. Depending on the procedure used, a portion of the cells (e.g., half the original cells) may then be used for reintroduction into the patient. If ablation is to be used to enhance engraftment of the newly-introduced cells, the patient may be subject to, e.g., mild bone marrow conditioning prior to introduction of the genome edited HSCs. Following any conditioning, the population of genome edited HSCs can be reintroduced into the patient, e.g., by transfusion. Over time, the HSCs give rise to cells of the erythroid lineage, including red blood cells (RBCs).

[0711] In the resulting RBCs, genome editing in the case of SCA results in an increase in the level of HbF, and in aspects in which the mutant β-globin gene is knocked down or eliminated, concomitantly decreasing the levels of HbS; as a result of which one or more symptoms or complications associated with the β-thalassemia are ameliorated.

### Example 35—Successive Electroporations Using Dual Guide RNAs (SPY101 and SD2)

[0712] Successive electroporation is a method of electroporating cells 36-48 hours after thawing, followed by a second electroporation 36-48 hours later.

[0713] Successive electroporations using dual guide RNAs were performed using the experimental design shown in FIG. 12. Human mobilized peripheral blood (mPB) CD34+ cells were obtained from Fred Hutch Donor 304 and Donor LKP06B and either: successively electroporated with 1.5 μg SPY101 and then 1.5 μg SD2 (SPY/SD); successively electroporated with 1.5 μg SD2 and then 1.5 μg SPY101 (SD/SPY); simultaneously electroporated with 1.5 μg SPY101 and 1.5 μg SD2 (SPY&SD); individually electroporated with 3 μg SPY101 (SPY); individually electroporated with 3 μg SD2 (SD); simultaneously electroporated with 1.5 μg of a guide RNA that targets Exon 2 and 1.5 μg of a second guide RNA that targets Exon 2 (EX2); electroporated with Cas9 RNP (mock); or not electroporated (untreated).

[0714] Successive electroporations using SPY101 and then SD2 (or SD2 and then SPY101) were compared to single guide RNA electroporations (both individually using SPY101 or SD2; and simultaneously using SPY101 and SD2 at the same time) to determine the impact of successive electroporations using SPY101 and then SD2 (or SD2 and then SPY101) on the cell's health, editing rates, ability to differentiate, globin mRNA levels, and HbF protein levels.

[0715] Cell health of each of the electroporated mPBs described herein was accessed by measuring the viability and growth kinetics of the electroporated mPBs at various time points (Day-6, Day-4, Day-3, Day-2, Day-1, Day 0, Day 3, Day 5, Day 7, Day 10, Day 12, and Day 14). Day-6 cells were thawed mPB cells that were not yet electroporated. Day-4 cells were mPBs that were thawed 48-hours earlier and electroporated for the first time at this time point. Day-3 cells were mPBs that were thawed 72-hours earlier and electroporated 24 hours earlier. Day-2 cells were mPBs that were thawed 96-hours earlier and electroporated for the second time at this time point for those mPBs that received successive electroporations. Day-1 cells were mPBs that were thawed 120-hours earlier and electroporated for the second time 24-hours earlier for those mPBs that received successive electroporations. DO cells were mPBs that were thawed 144-hours earlier and electroporated for the second time 48-hours earlier for those mPBs that received successive electroporations. Each time point after DO refers to a stage of mPB differentation to erythocytes, such D3, D5, D7, D10, D12, and D14. As demonstrated in FIGS. 13A-B, cell viability and cell growth kinetics are similar between mPB CD34+ cells from Donor LKP06B successively electroporated with SPY101 and then SD2 (or SD2 and then SPY101) and mPB CD34+ cells from Donor LKP06B electroporated with a single guide RNA (regardless of whether the single guide electroporation used SPY101 or SD2; or simultaneously used SPY101 and SD2).

[0716] Editing rates of each of the electroporated samples described herein were accessed by measuring the cutting efficiencies (percent Indels) of cells from each of the electroporated mPBs. Genomic DNA was isolated at Day 3 and cutting efficiency was evaluated using TIDE analysis. As demonstrated in FIGS. 14A-B, editing rates are similar between mPB CD34+ cells from Fred Hutch Donor 304 and Donor LKP06B successively electroporated with SPY101 and then SD2 (or SD2 and then SPY101) and mPB CD34+ cells from Fred Hutch Donor 304 and Donor LKP06B electroporated with a single guide RNA (regardless of whether the single guide electroporation used SPY101 or SD2; or simultaneously used SPY101 and SD2).

[0717] Differentation of mPBs to erythrocytes for each of the electroporated mPBs described herein was accessed by measuring the expression of Band3, Alpha4, GYPA, and CD71 for each of the electroporated mPBs at various time points (Day 5, Day 7, Day 10, Day 12, and Day 14) via FACs. As demonstrated in FIGS. 15A-B, there were minimal differences in differentiation between mPB CD34+ cells from Donor LKP06B successively electroporated with SPY101 and then SD2 (or SD2 and then SPY101) and mPB CD34+ cells from Donor LKP06B electroporated with a single guide RNA (regardless of whether the single guide electroporation used SPY101 or SD2; or simultaneously used SPY101 and SD2).

[0718] Differentation of mPBs to erythrocytes for each of the electroporated mPBs described herein was also accessed by measuring the percentage of enucleation for each of the electroporated mPBs at various time points (Day 5, Day 7, Day 10, Day 12, and Day 14). As demonstrated in FIG. 16, there were minimal differences in enucleation between mPB CD34+ cells from Donor LKP06B successively electroporated with SPY101 and then SD2 (or SD2 and then SPY101) and mPB34+ cells from Donor LKP06B electroporated with a single guide RNA (regardless of whether the single guide electroporation used SPY101 or SD2; or simultaneously used SPY101 and SD2).

[0719] Globin expression (γ/α globin mRNA) was measured for each of the electroporated mPBs described herein that differentiated into erythrocytes (Day 12 differentiated cells) using quantitative real-time PCR (qRT-PCR). As demonstrated in FIGS. 17A-B, γ/α globin mRNA expression increased from 15-70% for mPB CD34+ cells successively electroporated with SPY101 and then SD2 (or SD2 and then SPY101) compared to mPB CD34+ cells electroporated with a single guide RNA (regardless of whether the single guide electroporation used SPY101 or SD2; or simultaneously used SPY101 and SD2).

[0720] Globin expression (γ(γ+β) globin mRNA) was measured for each of the electroporated mPBs described herein that differentiated into erythrocytes (Day 12 differentiated cells) using qRT-PCR. As demonstrated in FIGS. 18A-B, γ(γ+β) globin mRNA expression increased from 30-60% for mPB CD34+ cells successively electroporated with SPY101 and then SD2 (or SD2 and then SPY101) compared to mPB CD34+ cells electroporated with a single guide RNA (regardless of whether the single guide electroporation used SPY101 or SD2; or simultaneously used SPY101 and SD2).

[0721] Globin expression (γ/18S globin mRNA) was measured for each of the electroporated mPBs described herein that differentiated into erythrocytes (Day 12 differentiated cells) using qRT-PCR. As demonstrated in FIGS. 19A-B, γ/18S globin mRNA expression increased for mPB CD34+ cells successively electroporated with SPY101 and then SD2 (or SD2 and then SPY101) compared to mPB CD34+ cells electroporated with a single guide RNA (regardless of whether the single guide electroporation used SPY101 or SD2; or simultaneously used SPY101 and SD2).

[0722] HbF expression was measured for each of the electroporated mPBs described herein that differentiated into erythrocytes (Day 17 differentiated cells) using HPLC. As demonstrated in FIGS. 20 and 21A-E, HbF expression increased for mPB CD34+ cells successively electroporated with SPY101 and then SD2 (or SD2 and then SPY101) compared to mPB CD34+ cells electroporated with a single guide RNA (regardless of whether the single guide electroporation used SPY101 or SD2; or simultaneously used SPY101 and SD2).

[0723] Three different experimental designs (Arm conditions 1-3), depicted in FIG. 22, were tested to determine the optimal time points for a first electroporation and a second electroporation within a 96-hour time frame prior to differentiation and the optimal time period between the first and second electroporations. Arm 1 conditions include a first electroporation of mPB CD34+ cells at 34 hours after thawing, a second electroporation at 72-hours after thawing, and 38 hours between the first and second electroporations. Arm 2 conditions include a first electroporation of mPB CD34+ cells at 48 hours after thawing, a second electroporation at 72-hours after thawing, and 24 hours between the first and second electroporations. Arm 3 conditions include a first electroporation of mPB CD34+ cells at 34 hours after thawing, a second electroporation at 58-hours after thawing, and 24 hours between the first and second electroporations.

[0724] Successive electroporations using dual guide RNAs under Arm conditions 1-3 were performed using the experimental design shown in FIGS. 12 and 22. Human mPB CD34+ cells were obtained from Donor LKP06B and either: successively electroporated with 1.5 μg SPY101 and then 1.5 μg SD2 (SPY/SD); individually electroporated with 3 μg SPY101 (SPY); individually electroporated with 3 μg SD2 (SD); electroporated with Cas9 RNP (mock); or not electroporated (untreated).

[0725] Cell health of each of the electroporated mPBs described herein under Arm conditions 1-3 was accessed by measuring the viability and growth kinetics of the electroporated mPBs at various time points post the initial or first electroporation (Day 1, Day 2, Day 3). As demonstrated in FIGS. 23A-B, under Arm 1 conditions, there was slowed growth 1-day after the first electroporation, but the viability remained consistent. As demonstrated in FIGS. 24A-B, under the Arm 2 conditions, there was a loss of cells within 24 hours between the two electroporations, but viability remained consistent. As demonstrated in FIGS. 25A-B, under the Arm 3 conditions, there was slowed growth between the thawing of the cells and the first electroporation. There was also slowed growth between the first electroporation and second electroporation. As demonstrated in FIGS. 26A-B, there was no difference in cell viability and growth kinetics between edited mPBs and unedited mPBs throughout differentiation.

[0726] Editing rates of each of the electroporated mPBs described herein under Arm conditions 1-3 were accessed by measuring the cutting efficiencies (percent Indels) of cells from each of the electroporated mPBs. Genomic DNA was isolated at Day 3 and cutting efficiency was evaluated using TIDE analysis. As demonstrated in FIG. 27, editing rates are similar between mPB CD34+ cells from Donor LKP06B successively electroporated with SPY101 and then SD2 and mPB CD34+ cells from Donor LKP06B electroporated with a single guide RNA (a single guide electroporation used SPY101 or SD2). These results demonstrate that the timing between thaw and electroporations or in between electroporations does not impact editing rates.

[0727] Differentation of mPBs to erythrocytes for each of the electroporated mPBs described herein under Arm conditions 1-3 was accessed by measuring the expression of Band3, Alpha4, GYPA, and CD71 for each of the electroporated mPBs at various time points (Day 7, Day 12, and Day 14) via FACs. As demonstrated in FIGS. 28A-B, there were no differences in differentiation between mPB CD34+ cells from Donor LKP06B successively electroporated with SPY101 and then SD2 under Arm conditions 1-3 and mPB CD34+ cells from Donor LKP06B electroporated with a single guide RNA (an electroporation using SPY101 or SD2) under Arm conditions 1-3.

[0728] Differentation of mPBs to erythrocytes for each of the electroporated mPBs described herein under Arm conditions 1-3 was also accessed by measuring the level of enucleation for each of the electroporated mPBs at various time points (Day 7, Day 12, and Day 14). As demonstrated in FIG. 29, there were no differences in differentiation between mPB CD34+ cells from Donor LKP06B successively electroporated with SPY101 and then SD2 under Arm conditions 1-3 and mPB CD34+ cells from Donor LKP06B electroporated with a single guide RNA (an electroporation using SPY101 or SD2) under Arm conditions 1-3.

[0729] Globin expression (γ/α globin mRNA) was measured using qRT-PCR for each of the electroporated mPBs described herein that differentiated into erythrocytes (Day 12 differentiated cells). Each of the electroporated mPBs was electroporated under Arm conditions 1-3. As demonstrated in FIG. 30, the timing between the thaw and first electroporation and timing between the first and second electroporations does not impact the γ/α globin mRNA percent increase between mPB CD34+ cells successively electroporated with SPY101 and then SD2 and mPB CD34+ cells electroporated with a single guide RNA (a single guide electroporation using SPY101 or SD2).

[0730] Globin expression (γ(γ+β) globin mRNA) was measured using qRT-PCR for each of the electroporated mPBs described herein that differentiated into erythrocytes (Day 12 differentiated cells). Each of the electroporated mPBs was electroporated under Arm conditions 1-3. As demonstrated in FIG. 31, the timing between the thaw and first electroporation and timing between the first and second electroporations does not impact the γ(γ+β) globin mRNA percent increase between mPB CD34+ cells successively electroporated with SPY101 and then SD2 and mPB CD34+ cells electroporated with a single guide RNA (a single guide electroporation using SPY101 or SD2).

[0731] Globin expression (γ/18S globin mRNA) was measured using qRT-PCR for each of the electroporated mPBs described herein that differentiated into erythrocytes (Day 12 differentiated cells). Each of the electroporated mPBs was electroporated under Arm conditions 1-3. As demonstrated in FIG. 32, the timing between the thaw and first electroporation and timing between the first and second electroporations does not impact the γ/18S globin mRNA percent increase between mPB CD34+ cells successively electroporated with SPY101 and then SD2 and mPB CD34+ cells electroporated with a single guide RNA (a single guide electroporation using SPY101 or SD2).

### Example 36—Successive Electroporations Using Dual Guide RNAs (SPY101 and SD2) in a NSG Mouse Model System

[0732] Human CD34+ cells that had been edited with Cas9/gRNAs using successive electroporation were introduced into NSG mice (immunodeficient mice) in order to evaluate on-target gene editing, translocations, and human chimerism in mouse blood and bone marrow samples.

[0733] Two different experimental designs, as shown in FIGS. 33A-33B, were utilized. The first design involved a first electroporation 36 hours after thawing CD34+ cells followed by a second electroporation 72 hours after thawing (36 hours between electroporations). The second design involved a first electroporation 48 hours after thawing CD34+ cells followed by a second electroporation 96 hours after thawing (48 hours between electroporations). In both experimental designs, cells were intravenously dosed into NSG mice 96 hours after thawing of cells and following successive electroporation. The gRNAs (or mock doses) used during the first and second electroporations are provided in FIG. 33B.

[0734] Samples of peripheral blood were taken from all mice at weeks 8 and 12; mice were sacrificed at week 16. Peripheral blood samples were subsequently tested for human chimerism, as shown in FIG. 34. Mice transplanted with cells edited using a successive electroporation method (e.g., 48/48/6 group with guides, e.g., first electroporation at hour 48, second electroporation at hour 96, transplantation at hour 102) show a reduction in % chimerism relative to the Mock EP group.

[0735] Bone marrow was extracted from the mice after death at week 16 and similarly tested for human chimerism, as shown in FIG. 35. Mice transplanted with cells edited using a successive electroporation method (e.g., 48/48/6 group with guides, e.g., first electroporation at hour 48, second electroporation at hour 96, transplantation at hour 102) show a reduction in % chimerism relative to the Mock EP group. Genomic DNA of bone marrow samples were also tested for percent indels resulting from the gene editing prior to cellular administration. As shown in FIG. 36, mice in the 48/48/6 group with guides, e.g., first electroporation at hour 48, second electroporation at hour 96, showed high % indels. These data demonstrate that successive electroporation strategies provide surspingly effective persistence of genetic editing, e.g., in bone marrow tissues.

### Example 37—Successive Electroporations Using Dual Guide RNAs in Human mPB CD34+ Cells from Donor LP06a and Donor LKP12

[0736] Human mPB CD34+ cells from Donor LP06a and Donor LKP12 were successively electroporated with Cas9 endonuclease and two gRNAs to edit the human beta globin locus on chromosome 11 (HPFH5 gRNAs, e.g., HPFH5-1, HPFH5-D, HPFH5-T5, and HPFH5-T7; Kenya gRNAs, e.g., Kenya-K5, Kenya-K17) and a BCL11A locus on chromosome 2 (1450 gRNA, SPY101 gRNA).

[0737] As shown in FIG. 37, cells were subjected to a first electroporation with gRNA(s) and Cas9 3.5 days before a first genomic DNA (gDNA) harvest and a second electroporation (in selected reaction conditions) with gRNAs and Cas9 2 days before the first genomic DNA harvest. gDNA was harvested on Day 0 and Day 3. Beginning at Day 7, cells were allowed to differentiate and enucleate.

[0738] Reaction conditions included successive electroporation experiments as well as single electroporation experiments.

[0739] As shown in FIG. 38, each reaction condition was assayed for average fold growth during the differentiation stage, editing at Chr2, editing (deletion) at Chr11, and percent HbF relative to (HbF+HbA). Reaction conditions with two successive electroporations with two gRNAs provided editing at Chr2 and Chr11 at comparable levels to corresponding single electroporation reaction conditions. Notably, reaction conditions with two successive electroporations with two gRNAs provided increased HbF expression (see, e.g., 64±2% HbF for ‘SPY Then HPFH5-1&D’ reaction condition) relative to single electroporation conditions (see, e.g., 38±7% HbF for ‘SPY Alone’).

[0740] As shown in FIG. 39, a ddPCR assay was performed on Days 4 and 14 of the experiment to test for deletion rates (%) in Chr11. Most reaction conditions provided similar levels of deletion, with deletion % between about 30-40%. However, notably, successive electroporation to introduce two different gRNA sets that targeted Chr11 (see, ‘HPFH5-T7&D Then HPFH5-1&T5’) provided deletion % of about 60% at Day 4 and about 55% at Day 14.

[0741] Cells of the experiment were subjected to an enucleation gating strategy using FACS (FIG. 40). Reaction conditions using successive electroporation with two gRNAs had levels and rates of enucleation that were comparable with single electroporation reaction conditions (FIG. 41).

[0742] At Day 18 of the experiment, after differentiation was complete, cells were again tested for percent HbF relative to (HbF+HbA). As shown in FIG. 42, reaction conditions using successive electroporation with two gRNAs had higher relative levels of HbF. Note that percent HbF was determined using HPLC. Protein globin levels may routinely be measured using HPLC.

### Example 38—Successive Electroporations Using Varying Amounts of Cas9 Endonuclease

[0743] Human mPB CD34+ cells from Donor LP06a and Donor LKP12 were successively electroporated with two gRNAs and varying levels of Cas9 endonuclease to edit the human beta globin locus on chromosome 11 and a BCL11A locus on chromosome 2.

[0744] As shown in FIG. 43, cells were subjected to a first electroporation with 1450 g RNA and varying amounts of Cas9 endonuclease 3.5 days before a first genomic DNA (gDNA) harvest and a second electroporation with HPFH5 gRNAs and varying amounts of Cas9 endonuclease 2 days before the first genomic DNA harvest. gDNA was harvested on Day 0 and Day 3. Beginning at Day 7, cells were allowed to differentiate and enucleate.

[0745] As shown in FIGS. 44-46, each reaction condition was assayed for editing at Chr2, editing (deletion) at Chr11, mRNA transcript ratios for (γ globin)/(a globin), mRNA transcript ratios for (γ globin)/(γ globin+13 globin), and percent HbF relative to (HbF+HbA). Notably, levels of gene editing and percent HbF were consistent for experiments using 0.375, 0.75, 1.5, and 3 μg Cas9 endonuclease, particularly in the first electroporation step. These data suggest that relatively small amounts of endonuclease can provide useful and efficient gene editing in a successive electroporation context.

### Example 38—Comparison of Differing Electroporation Strategies in Human mPB CD34+ Cells on Gene Editing and Translocations

[0746] An experimental design, as shown in FIG. 47, to compare single electroporation with one guide RNA, single electroporation with two guide RNAs, and successive electroporations with two guide RNAs to edit a BCL11A locus on Chr2 (SPY101 gRNA) and a human beta globin locus on Chr11 (SD2 gRNA) in human mPB CD34+ cells from Fred Hutch Donor 304 was performed.

[0747] Cells were subjected to a first electroporation with gRNA(s) and Cas9 4 days before a second genomic DNA (gDNA) harvest and a second electroporation (in selected reaction conditions) with gRNA(s) and Cas9 2 days before the second genomic DNA harvest. gDNA was harvested on Day −2 and Day 0. Beginning at Day 5, cells were allowed to differentiate.

[0748] Reaction conditions included single electroporation experiments with one guide RNA (SPY101 or SD2) and Cas9, single electroporation experiments with both SPY101 and SD2 (i.e., simultaneous electroporation), and successive electroporations with both SPY101 and SD2.

[0749] Genomic DNA was tested for % indels, as shown in FIG. 48. Cells that were successively electroporated with two guide RNAs (SPY101/SD2; SD2/SPY101) had comparable levels of percent indels relative to single electroporation experiments with one or two gRNAs.

[0750] There are three potential translocation events when using these two gRNAs (SPY101 and SD2), as shown in FIG. 49. The three points of fusion (translocation event) occur at the sites cut by Cas9 when directed by the aforementioned gRNAs. The third of these fusions occurs as a result of an inversion of Chr11 induced by SD2.

[0751] In order to assess relative amounts of translocations across reaction conditions of this experimental design, genomic DNA was amplified using PCR. PCR primers specific for each of the three possible translocations were used to amplify each gDNA sample from edited cells. Notably, as shown in agrose gels of FIG. 50, it was found that successive electroporation conditions (e.g., SPY101 Then SD2) produced fewer translocation events than simultaneous electroporation conditions (e.g., SPY101 And SD2). These data suggest that successive electroporation produce fewer undesirable and/or off-target gene edits than simultaneous electroporation.

### Example 39—Comparison of Differing Electroporation Strategies in Human mPB CD34+ Cells on Gene Editing and Translocations

[0752] An experimental design, as shown in FIG. 51, to compare single electroporation with one guide RNA, single electroporation with two guide RNAs, and successive electroporations with two guide RNAs to edit a BCL11A locus on Chr2 (SPY101 gRNA) and a human beta globin locus on Chr11 (SD2 gRNA) in human mPB CD34+ cells from Fred Hutch Donor 304 was performed. This experimental design further tested the effect of altering the time between the first and second electroporations in successive electroporation conditions.

[0753] Cells were subjected to a first electroporation with gRNA/Cas9 on either Day 3 or Day 3.5 after thawing cells. In successive electroporation reaction conditions, a second electroporation with gRNA/Cas9 was performed on Day 5. Genomic DNA (gDNA) was harvested from Days 6-10.

[0754] Reaction conditions included single electroporation experiments with one guide RNA (SPY101 or SD2) and Cas9, single electroporation experiments with both SPY101 and SD2 (i.e., simultaneous electroporation), and successive electroporations with both SPY101 and SD2.

[0755] Genomic DNA was tested for % indels, as shown in FIG. 52. Cells that were successively electroporated with a 48-hour period between electroporations had slightly higher levels of percent indels relative to cells that were successively electroporated with a 36-hour period between electroporations. Cells edited with simultaneous electroporation strategies had significantly lower percent indels than all successive electroporation conditions.

[0756] As described in Example 38 and shown in FIG. 49, there are three potential translocation events when using these two gRNAs (SPY101 and SD2). In order to assess relative amounts of translocations across reaction conditions of this experimental design, genomic DNA was amplified using PCR. PCR primers specific for each of the three possible translocations were used to amplify each gDNA sample from edited cells. Notably, as shown in agrose gels of FIGS. 53A-53C, it was found that successive electroporation conditions (e.g., SPY101 Then SD2) produced fewer translocation events than simultaneous electroporation conditions (e.g., SPY101 And SD2). Further, successive electroporation conditions with a 48-hour period between electroporations had fewer translocation events than conditions with a 36-hour period.

[0757] A ddPCR assay for secondary determination of chromosomal translocations following gene editing with SD2 and SPY101 gRNAs was then designed, as shown in FIG. 54. The ‘A:E’ translocation event is assayed by the use of one primer that binds the ‘A’ region; and a second primer that binds the ‘E’ region (amplicon size of around 600 bp). The ‘D:C’ translocation event is assayed by the use of one primer that binds ‘D’ region; and a second primer that binds the ‘C’ region (amplicon size of around 2000 bp). The ‘A:D’ translocation event is assayed by the use of one primer that binds ‘A’ region; and a second primer that binds the ‘D’ region (amplicon size of around 600 bp). The ‘C:E’ translocation event is assayed by the use of one primer that binds ‘C’ region; and a second primer that binds the ‘E’ region (amplicon size of around 2000 bp).

[0758] This ddPCR assay provided secondary confirmation, as shown in FIG. 55, that simultaneous electroporation with two gRNAs (SPY101 And SD2) leads to increased translocation events compared to successive electroporation with two gRNAs (e.g., SPY101 Then SD2). Further, this assay provides secondary confirmation that successive electroporation conditions with a 48-hour period between electroporations had fewer translocation events than conditions with a 36-hour period.

### Note Regarding Illustrative Examples

[0759] While the present disclosure provides descriptions of various specific aspects for the purpose of illustrating various aspects of the present invention and/or its potential applications, it is understood that variations and modifications will occur to those skilled in the art. Accordingly, the invention or inventions described herein should be understood to be at least as broad as they are claimed, and not as more narrowly defined by particular illustrative aspects provided herein.

[0760] Any patent, publication, or other disclosure material identified herein is incorporated by reference into this specification in its entirety unless otherwise indicated, but only to the extent that the incorporated material does not conflict with existing descriptions, definitions, statements, or other disclosure material expressly set forth in this specification. As such, and to the extent necessary, the express disclosure as set forth in this specification supersedes any conflicting material incorporated by reference. Any material, or portion thereof, that is said to be incorporated by reference into this specification, but which conflicts with existing definitions, statements, or other disclosure material set forth herein, is only incorporated to the extent that no conflict arises between that incorporated material and the existing disclosure material. Applicants reserve the right to amend this specification to expressly recite any subject matter, or portion thereof, incorporated by reference herein.

What is claimed is:

1. A method of increasing fetal hemoglobin (HbF) in a human cell by genome editing, the method comprising:
introducing into the human cell one or more deoxyribonucleic acid (DNA) endonuclease to effect two or more single-strand breaks (SSB) or double-strand breaks (DSB), a first SSB or DSB within or near a human beta globin locus on chromosome 11, and a second SSB or DSB within or near one or more of: a BCL11A gene on chromosome 2, and a DNA sequence that encodes a transcriptional control region of the BCL11A gene on chromosome 2;
wherein the first SSB or DSB results in one or more of: a permanent deletion or inversion within or near the human beta globin locus on chromosome 11, and a mutation within or near the human beta globin locus on chromosome 11;
wherein the second SSB or DSB results in one or more of: a permanent deletion or inversion within or near the BCL11A gene on chromosome 2, a mutation within or near the BCL11A gene on chromosome 2, a permanent deletion or inversion within or near the DNA sequence that encodes a transcriptional control region of the BCL11A gene on chromosome 2, and a mutation within or near the DNA sequence that encodes a transcriptional control region of the BCL11A gene on chromosome 2; and
wherein the two or more permanent deletions, inversions, or mutations result in an increased expression of γ-globin and an increase of fetal hemoglobin (HbF) in the human cell.

2. The method of claim 1, wherein the permanent deletion within or near the human beta globin locus on chromosome 11 is a hereditary persistence of fetal hemoglobin (HPFH) deletion.

3. The method of claim 2, wherein the HPFH deletion is selected from the group consisting of: a HPFH-4 deletion, a HPFH-5 deletion, a HPFH-Kenya deletion, a HPFH-Black deletion, a large Corfu deletion, a small Corfu deletion, a small deletion, and combinations thereof.

4. The method of claim 2, wherein the HPFH deletion is a 7.2 Kb deletion.

5. The method of claim 2, wherein the HPFH deletion is a 3.5 Kb deletion.

6. The method of claim 2, wherein the HPFH deletion is a 12.9 Kb deletion.

7. The method of claim 2, wherein the HPFH deletion is a 22 Kb deletion.

8. The method of claim 2, wherein the HPFH deletion is a 13 bp deletion.

9. The method of claim 2, wherein the HPFH deletion is located downstream of a HBG1 gene and results in a repositioning of a BCL11A enhancing region closer to the HBG1 gene.

10. The method of claim 2, wherein the HPFH deletion is located downstream of a HBG2 gene and results in a repositioning of a BCL11A enhancing region closer to the HBG2 gene.

11. The method of claim 2, wherein the HPFH deletion is located downstream of a HBG1 gene and HBG2 gene and results in a repositioning of a BCL11A enhancing region closer to the HBG1 gene and HBG2 gene.

12. The method of any one of claims 9-11, wherein the HPFH deletion includes all or a portion of a β-globin gene.

13. The method of any one of claims 9-11, wherein the HPFH deletion includes all or a portion of a δ-globin gene and all or a portion of a β-globin gene.

14. The method of claim 1, wherein the permanent deletion within or near the human beta globin locus on chromosome 11 is in a region of the human beta globin locus comprising a HBG1 gene and a HBG2 gene.

15. The method of claim 14, wherein the permanent deletion within or near the human beta globin locus on chromosome 11 is a 13-base pair deletion located upstream of the HBG1 gene.

16. The method of claim 14, wherein the permanent deletion within or near the human beta globin locus on chromosome 11 is a 4.9 Kb deletion located upstream of the HBG1 gene.

17. The method of claim 14, wherein the permanent deletion within or near the human beta globin locus on chromosome 11 is a 13-base pair deletion located upstream of the HGB1 gene and a 4.9 Kb deletion located upstream of the HBG1 gene.

18. The method of claims 16-17, wherein the 4.9 Kb deletion includes the HBG2 gene.

19. The method of any one of claims 1-18, wherein the DNA sequence that encodes a transcriptional control region of the BCL11A gene is located within a second intron of the BCL11A gene on chromosome 2.

20. The method of any one of claims 1-19, wherein the DNA sequence that encodes a transcriptional control region of the BCL11A gene is located within a +58 DNA hypersensitive site (DHS) of the BCL11A gene on chromosome 2.

21. The method of any one of claims 1-20, wherein the one or more DNA endonuclease is selected from the group consisting of a zinc finger nuclease, TAL effector nuclease, meganuclease, MegaTAL, Tev-m TALEN, MegaTev, homing endonuclease, FokI, StsI, Cas1, Cas1B, Cas2, Cas3, Cas4, Cas5, Cas6, Cas7, Cas8, Cas9 (also known as Csn1 and Csx12), Cas100, Csy1, Csy2, Csy3, Cse1, Cse2, Csc1, Csc2, Csa5, Csn2, Csm2, Csm3, Csm4, Csm5, Csm6, Cmr1, Cmr3, Cmr4, Cmr5, Cmr6, Csb1, Csb2, Csb3, Csx17, Csx14, Csx10, Csx16, CsaX, Csx3, Csx1, Csx15, Csf1, Csf2, Csf3, Csf4, or Cpf1 endonuclease, a homolog thereof, a recombination of the naturally occurring molecule thereof, a codon-optimized thereof, modified versions thereof, and combinations thereof.

22. The method of any one of claims 1-21, further comprising introducing one or more guide ribonucleic acid (gRNA) into the human cell.

23. The method of claim 22, wherein the one or more gRNAs comprises one or more of the gRNA sequences provided in Table 2, optionally wherein the one or more gRNAs comprise the sequence of SPY101 in combination with the sequence of any one or more of HPFH5-1, HPFH5-D, HPFH5-T5, HPFH5-T7, Kenya-K5, or Kenya-K1; or optionally wherein the one or more gRNAs comprise the sequence of 1450 in combination with the sequence of any one or more of HPFH5-1, HPFH5-D, HPFH5-T5, HPFH5-T7, Kenya-K5, or Kenya-K1; or optionally wherein the one or more gRNAs comprise the sequence of SPY101 in combination with the sequence of SD2; or optionally wherein the one or more gRNAs comprise the sequence of 1450 in combination with the sequence of SD2; or optionally wherein the one or more gRNAs comprise the sequence of HPFH5-1, HPFH5-D, HPFH5-T5, HPFH5-T7, Kenya-K5, or Kenya-K1 in combination with the sequence of any one or more of HPFH5-1, HPFH5-D, HPFH5-T5, HPFH5-T7, Kenya-K5, or Kenya-K1.

24. The method of claim 22 or 23, wherein the one or more gRNA is a concatenated gRNA comprising a first gRNA and a second gRNA, wherein the first gRNA and second gRNA are attached via a linker.

25. The method of claim 24, wherein the linker is a chemical linker or one or more nucleotides.

26. The method of claim 24 or 25, wherein the first gRNA comprises a spacer sequence that is complementary to a segment of the human beta globin locus on chromosome 11, the BCL11A gene on chromosome 2, or the DNA sequence that encodes a transcriptional control region of the BCL11A gene on chromosome 2 and wherein the second gRNA comprises a spacer sequence that is complementary to a segment of the human beta globin locus on chromosome 11, the BCL11A gene on chromosome 2, or the DNA sequence that encodes a transcriptional control region of the BCL11A gene on chromosome 2.

27. The method of claim 22 or 23, wherein the one or more gRNA is a concatenated gRNA comprising a first gRNA, a second gRNA, and a third gRNA, wherein the first gRNA and second gRNA are attached via a first linker and the second gRNA and third gRNA are attached via a second linker.

28. The method of claim 27, wherein the first linker and second linker are chemical linkers or one or more nucleotides.

29. The method of claims 27-28, wherein the first gRNA comprises a spacer sequence that is complementary to a segment of the human beta globin locus on chromosome 11, the BCL11A gene on chromosome 2, or the DNA sequence that encodes a transcriptional control region of the BCL11A gene on chromosome 2, wherein the second gRNA comprises a spacer sequence that is complementary to a segment of the human beta globin locus on chromosome 11, the BCL11A gene on chromosome 2, or the DNA sequence that encodes a transcriptional control region of the BCL11A gene on chromosome 2, and wherein the third gRNA comprises a spacer sequence that is complementary to a segment of a human beta globin locus on chromosome 11, the BCL11A gene on chromosome 2, or the DNA sequence that encodes a transcriptional control region of the BCL11A gene on chromosome 2.

30. The method of claims 22-29, wherein the one or more guide ribonucleic acid (gRNA) is one or more single-molecule guide RNA (sgRNA).

31. The method of any one of claims 22-29, wherein the one or more gRNAs comprises at least two gRNAs and the at least two gRNAs are delivered to the cell by successive electroporation, optionally wherein each electroporation step occurs 12-72, 12-48, or 36-72 hours apart from one another, optionally wherein the at least two gRNAs comprise the sequence of SPY101 in combination with the sequence of any one or more of HPFH5-1, HPFH5-D, HPFH5-T5, HPFH5-T7, Kenya-K5, or Kenya-K1; or optionally wherein the at least two gRNAs comprise the sequence of 1450 in combination with the sequence of any one or more of HPFH5-1, HPFH5-D, HPFH5-T5, HPFH5-T7, Kenya-K5, or Kenya-K1; or optionally wherein the at least two gRNAs comprise the sequence of SPY101 in combination with the sequence of SD2; or optionally wherein the at least two gRNAs comprise the sequence of 1450 in combination with the sequence of SD2; or optionally wherein the at least two gRNAs comprise the sequence of HPFH5-1, HPFH5-D, HPFH5-T5, HPFH5-T7, Kenya-K5, or Kenya-K1 in combination with the sequence of any one or more of HPFH5-1, HPFH5-D, HPFH5-T5, HPFH5-T7, Kenya-K5, or Kenya-K1.

32. The method of any one of claims 1-31, wherein the increase of fetal hemoglobin (HbF) in the genome-edited human cells is compared to HbF levels in wild-type human cells.

33. An ex vivo method for treating a patient with a hemoglobinopathy, the method comprising:
creating a patient specific induced pluripotent stem cell (iPSC);
editing within or near a human beta globin locus on chromosome 11 and one or more of: a BCL11A gene on chromosome 2 and a DNA sequence that encodes a transcriptional control region of the BCL11A gene on chromosome 2 of the iPSC;
differentiating the genome-edited iPSC into a hematopoietic progenitor cell; and
implanting the hematopoietic progenitor cell into the patient.

34. The method of claim 33, wherein the creating step comprises:
isolating a somatic cell from the patient; and
introducing a set of pluripotency-associated genes into the somatic cell to induce the somatic cell to become a pluripotent stem cell.

35. The method of claim 34, wherein the somatic cell is a fibroblast.

36. The method of claim 34, wherein the set of pluripotency-associated genes is one or more of the genes selected from the group consisting of OCT4, SOX2, KLF4, Lin28, NANOG and cMYC.

37. The method of any one of claims 33-36, wherein the editing step comprises introducing into the iPSC one or more deoxyribonucleic acid (DNA) endonuclease to effect two or more single-strand breaks (SSB) or double-strand breaks (DSB), a first SSB or DSB within or near a human beta globin locus on chromosome 11, and a second SSB or DSB within or near one or more of: a BCL11A gene on chromosome 2, and a DNA sequence that encodes a transcriptional control region of the BCL11A gene on chromosome 2;
wherein the first SSB or DSB results in one or more of: a permanent deletion or inversion within or near the human beta globin locus on chromosome 11, and a mutation within or near the human beta globin locus on chromosome 11;
wherein the second SSB or DSB results in one or more of: a permanent deletion or inversion within or near the BCL11A gene on chromosome 2, a mutation within or near the BCL11A gene on chromosome 2, a permanent deletion or inversion within or near the DNA sequence that encodes a transcriptional control region of the BCL11A gene on chromosome 2, and a mutation within or near the DNA sequence that encodes a transcriptional control region of the BCL11A gene on chromosome 2; and
wherein the two permanent deletions, inversions, or mutations result in an increased expression of γ-globin and an increase of fetal hemoglobin (HbF) in the iPSC.

38. The method of any one of claims 33-37, wherein the differentiating step comprises one or more of the following to differentiate the genome-edited iPSC into a hematopoietic progenitor cell: treatment with a combination of small molecules, delivery of master transcription factors, delivery of mRNA encoding master transcription factors, and delivery of mRNA encoding transcription factors.

39. The method of any one of claims 33-38, wherein the implanting step comprises implanting the hematopoietic progenitor cell into the patient by transplantation, local injection, systemic infusion, and combinations thereof.

40. An ex vivo method for treating a patient with a hemoglobinopathy, the method comprising:
isolating a mesenchymal stem cell from the patient;
editing within or near a human beta globin locus on chromosome 11 and one or more of: a BCL11A gene on chromosome 2, and a DNA sequence that encodes a transcriptional control region of the BCL11A gene on chromosome 2 of the mesenchymal stem cell;
differentiating the genome-edited mesenchymal stem cell into a hematopoietic progenitor cell; and
implanting the hematopoietic progenitor cell into the patient.

41. The method of claim 40, wherein the mesenchymal stem cell is isolated from the patient's bone marrow or peripheral blood.

42. The method of claim 40, wherein the isolating step comprises: aspiration of bone marrow and isolation of mesenchymal cells using density gradient centrifugation media.

43. The method of any one of claims 40-42, wherein the editing step comprises introducing into the mesenchymal stem cell one or more deoxyribonucleic acid (DNA) endonuclease to effect two or more single-strand breaks (SSB) or double-strand breaks (DSB), a first SSB or DSB within or near a human beta globin locus on chromosome 11, and a second SSB or DSB within or near one or more of: a BCL11A gene on chromosome 2 and a DNA sequence that encodes a transcriptional control region of the BCL11A gene on chromosome 2;
wherein the first SSB or DSB results in one or more of: a permanent deletion or inversion within or near the human beta globin locus on chromosome 11, and a mutation within or near the human beta globin locus on chromosome 11;
wherein the second SSB or DSB results in one or more of: a permanent deletion or inversion within or near the BCL11A gene on chromosome 2, a mutation within or near the BCL11A gene on chromosome 2, a permanent deletion or inversion within or near the DNA sequence that encodes a transcriptional control region of the BCL11A gene on chromosome 2, and a mutation within or near the DNA sequence that encodes a transcriptional control region of the BCL11A gene on chromosome 2; and
wherein the two or more permanent deletions, inversions, or mutations result in an increased expression of γ-globin and an increase of fetal hemoglobin (HbF) in the mesenchymal stem cell.

44. The method of any one of claims 40-43, wherein the differentiating step comprises one or more of the following to differentiate the genome-edited mesenchymal stem cell into a hematopoietic progenitor cell: treatment with a combination of small molecules, delivery of master transcription factors, delivery of mRNA encoding master transcription factors, and delivery of mRNA encoding transcription factors.

45. The method of any one of claims 40-44, wherein the implanting step comprises implanting the hematopoietic progenitor cell into the patient by transplantation, local injection, systemic infusion, and combinations thereof.

46. An ex vivo method for treating a patient with a hemoglobinopathy, the method comprising:
isolating a hematopoietic progenitor cell from the patient;
editing within or near a human beta globin locus on chromosome 11 and one or more of: a BCL11A gene on chromosome 2 and a DNA sequence that encodes a transcriptional control region of the BCL11A gene on chromosome 2 of the hematopoietic progenitor cell; and
implanting the genome-edited hematopoietic progenitor cell into the patient.

47. The method of claim 46, wherein the method further comprises treating the patient with granulocyte colony stimulating factor (GCSF) prior to the isolating step.

48. The method of claim 47, wherein the treating step is performed in combination with Plerixaflor.

49. The method of any one of claims 46-48, wherein the isolating step comprises isolating CD34+ cells.

50. The method of any one of claims 46-49, wherein the editing step comprises introducing into the hematopoietic progenitor cell one or more deoxyribonucleic acid (DNA) endonuclease to effect two or more single-strand breaks (SSB) or double-strand breaks (DSB), a first SSB or DSB within or near a human beta globin locus on chromosome 11, and a second SSB or DSB within or near one or more of: a BCL11A gene on chromosome 2 and a DNA sequence that encodes a transcriptional control region of the BCL11A gene on chromosome 2;
wherein the first SSB or DSB results in one or more of: a permanent deletion within or near the human beta globin locus on chromosome 11, and a mutation within or near the human beta globin locus on chromosome 11;
wherein the second SSB or DSB results in one or more of: a permanent deletion within or near the BCL11A gene on chromosome 2, a mutation within or near the BCL11A gene on chromosome 2, a permanent deletion within or near the DNA sequence that encodes a transcriptional control region of the BCL11A gene on chromosome 2, and a mutation within or near the DNA sequence that encodes a transcriptional control region of the BCL11A gene on chromosome 2; and
wherein the two or more permanent deletions, inversions, or mutations result in an increased expression of γ-globin and a increase of fetal hemoglobin (HbF) in the hematopoietic progenitor cell.

51. The method of any one of claims 46-50, wherein the implanting step comprises implanting the genome-edited hematopoietic progenitor cell into the patient by transplantation, local injection, systemic infusion, and combinations thereof.

52. The method of any one of claims 33-51, wherein the hemoglobinopathy is selected from a group consisting of sickle cell anemia and thalassemia.

53. The method of any one of claims 33-52, wherein the hemoglobinopathy is selected from the group consisting of sickle cell disease, sickle cell trait, hemoglobin C disease, hemoglobin C trait, hemoglobin S/C disease, hemoglobin D disease, hemoglobin E disease, a thalassemia, a condition associated with hemoglobin with increased oxygen affinity, a condition associated with hemoglobin with decreased oxygen affinity, unstable hemoglobin disease, methemoglobinemia, and combinations thereof.

54. An in vivo method for treating a patient with a hemoglobinopathy, the method comprising:
editing within or near a human beta globin locus on chromosome 11 and within or near one or more of: a BCL11A gene on chromosome 2, and a DNA sequence that encodes a transcriptional control region of the BCL11A gene on chromosome 2 in a cell of the patient.

55. The method of claim 54, wherein the editing step comprises introducing into the cell one or more deoxyribonucleic acid (DNA) endonuclease to effect two or more single-strand breaks (SSB) or double-strand breaks (DSB), a first SSB or DSB within or near a human beta globin locus on chromosome 11, and a second SSB or DSB within or near one or more of: a BCL11A gene on chromosome 2, and a DNA sequence that encodes a transcriptional control region of the BCL11A gene on chromosome 2;
wherein the first SSB or DSB results in one or more of: a permanent deletion or inversion within or near the human beta globin locus on chromosome 11, and a mutation within or near the human beta globin locus on chromosome 11;
wherein the second SSB or DSB results in one or more of: a permanent deletion or inversion within or near the BCL11A gene on chromosome 2, a mutation within or near the BCL11A gene on chromosome 2, a permanent deletion or inversion within or near the DNA sequence that encodes a transcriptional control region of the BCL11A gene on chromosome 2, and a mutation within or near the DNA sequence that encodes a transcriptional control region of the BCL11A gene on chromosome 2; and
wherein the two or more permanent deletions, inversions, or mutations result in an increased expression of γ-globin and a increase of fetal hemoglobin (HbF) in the cell.

56. The method of claim 54 or 55, wherein the cell is a bone marrow cell, a hematopoietic progenitor cell, or a CD34+ cell.

57. The method of any one of claim 37, 43, 50, or 55, wherein the one or more DNA endonuclease is selected from the group consisting of a zinc finger nuclease, TAL effector nuclease, meganuclease, MegaTAL, Tev-m TALEN, MegaTev, homing endonuclease, FokI, StsI, Cas1, Cas1B, Cas2, Cas3, Cas4, Cas5, Cas6, Cas7, Cas8, Cas9 (also known as Csn1 and Csx12), Cas100, Csy1, Csy2, Csy3, Cse1, Cse2, Csc1, Csc2, Csa5, Csn2, Csm2, Csm3, Csm4, Csm5, Csm6, Cmr1, Cmr3, Cmr4, Cmr5, Cmr6, Csb1, Csb2, Csb3, Csx17, Csx14, Csx10, Csx16, CsaX, Csx3, Csx1, Csx15, Csf1, Csf2, Csf3, Csf4, or Cpf1 endonuclease, a homolog thereof, a recombination of the naturally occurring molecule thereof, a codon-optimized thereof, modified versions thereof, and combinations thereof.

58. The method of claim 57, wherein the method comprises introducing into the cell one or more polynucleotide encoding the one or more DNA endonuclease.

59. The method of claim 57, wherein the method comprises introducing into the cell one or more ribonucleic acid (RNA) encoding the one or more DNA endonuclease.

60. The method of claim 58 or 59, wherein the one or more polynucleotide or one or more RNA is one or more modified polynucleotide or one or more modified RNA.

61. The method of claim 57, wherein the one or more DNA endonuclease is one or more protein or polypeptide.

62. The method of any one of claims 33-61, wherein the method further comprises introducing into the cell one or more guide ribonucleic acid (gRNA).

63. The method of claim 62, wherein the one or more gRNA is one or more single-molecule guide RNA (sgRNA).

64. The method of claim 62 or 63, wherein the one or more gRNAs comprises one or more of the gRNA sequences provided in Table 2, optionally wherein the one or more gRNAs comprise the sequence of SPY101 in combination with the sequence of any one or more of HPFH5-1, HPFH5-D, HPFH5-T5, HPFH5-T7, Kenya-K5, or Kenya-K1; or optionally wherein the one or more gRNAs comprise the sequence of 1450 in combination with the sequence of any one or more of HPFH5-1, HPFH5-D, HPFH5-T5, HPFH5-T7, Kenya-K5, or Kenya-K1; or optionally wherein the one or more gRNAs comprise the sequence of SPY101 in combination with the sequence of SD2; or optionally wherein the one or more gRNAs comprise the sequence of 1450 in combination with the sequence of SD2; or optionally wherein the one or more gRNAs comprise the sequence of HPFH5-1, HPFH5-D, HPFH5-T5, HPFH5-T7, Kenya-K5, or Kenya-K1 in combination with the sequence of any one or more of HPFH5-1, HPFH5-D, HPFH5-T5, HPFH5-T7, Kenya-K5, or Kenya-K1.

65. The method of any one of claims 62 to 64, wherein the one or more gRNA or one or more sgRNA is one or more modified gRNA or one or more modified sgRNA.

66. The method of any one of claims 62 to 64, wherein the one or more DNA endonuclease is pre-complexed with one or more gRNA or one or more sgRNA.

67. The method of any one of claim 37, 43, 50, or 55, wherein the method further comprises:
introducing into the cell one or more guide ribonucleic acid (gRNA) or one or more concatenated gRNA, and wherein the one or more DNA endonuclease is one or more Cas9 endonuclease that effect or create two or more pair of single-strand breaks (SSBs) or double-strand breaks (DSBs), a first pair of SSB or DSB within or near a human beta globin locus on chromosome 11, and a second pair of SSB or DSB within or near one or more of: a BCL11A gene on chromosome 2 and a DNA sequence that encodes a transcriptional control region of the BCL11A gene on chromosome 2;
wherein the first pair of SSB or DSB is:
a SSB or DSB at a 5′ locus within or near the human beta globin locus on chromosome 11; and
a SSB or DSB at a 3′ locus within or near of the human beta globin locus on chromosome 11;
wherein the second pair of SSB or DSB is:
a SSB or DSB at the 5′ locus within or near the BCL11A gene on chromosome 2, or the DNA sequence that encodes a transcriptional control region of the BCL11A gene on chromosome 2; and
a SSB or DSB at the 3′ locus within or near the BCL11A gene on chromosome 2, or the DNA sequence that encodes a transcriptional control region of the BCL11A gene on chromosome 2;
wherein the SSB or DSB at the 5′ locus and the SSB or DSB at the 3′ locus result in two or more permanent deletion of the chromosomal DNA between the 5′ locus and the 3′ locus within or near the human beta globin locus on chromosome 11, the BCL11A gene on chromosome 2, or the DNA sequence that encodes a transcriptional control region of the BCL11A gene on chromosome 2.

68. The method of claim 67, wherein the SSB or DSB at the 5′ locus within or near the human beta globin locus on chromosome 11 is proximal to a 5′ boundary of a HPFH deletion.

69. The method of claim 67 or 68, wherein the SSB or DSB at the 5′ locus within or near the human beta globin locus on chromosome 11 is proximal to a 5′ boundary of a HPFH deletion selected from the group consisting of: a HPFH-4 deletion, a HPFH-5 deletion, a HPFH-Kenya deletion, a HPFH-Black deletion, a large Corfu deletion, a small deletion, and the small Corfu deletion.

70. The method of any one of claims 67-69, wherein the SSB or DSB at the 3′locus within or near the human beta globin locus on chromosome 11 is proximal to a 3′ boundary of a HPFH deletion.

71. The method of any one of claims 67-70, wherein the SSB or DSB at the 3′ locus within or near the human beta globin locus on chromosome 11 is proximal to a 3′ boundary of a HPFH deletion selected from the group consisting of: a HPFH-4 deletion, a HPFH-5 deletion, a HPFH-Kenya deletion, a HPFH-Black deletion, the large Corfu deletion, and a small Corfu deletion.

72. The method of any one of claims 67-71, wherein the SSB or DSB at the 5′ locus within or near the human beta globin locus on chromosome 11 is proximal to a 5′ boundary of a HPFH deletion and the SSB or DSB at the 3′ locus within or near the human beta globin locus on chromosome 11 is proximal to a 3′ boundary of the HPFH deletion.

73. The method of any one of claims 67-72, wherein the SSB or DSB at the 5′ locus within or near the human beta globin locus on chromosome 11 is proximal to a 5′ boundary of a HPFH deletion and the SSB or DSB at the 3′ locus within or near the human beta globin locus on chromosome 11 is proximal to a 3′ boundary of the HPFH deletion, wherein the HPFH deletion is selected from the group consisting of: a HPFH-4 deletion, a HPFH-5 deletion, a HPFH-Kenya deletion, a HPFH-Black deletion, a large Corfu deletion, and a small Corfu deletion.

74. The method of any one of claims 67-73, wherein a 3′ boundary of the deletion is proximal to Chr11:5224779 and a 5′ boundary of the deletion is proximal to Chr11:5237723.

75. The method of any one of claims 67-73, wherein a 3′ boundary of the deletion is proximal to Chr11:5234665 and a 5′ boundary of the deletion is proximal to Chr11:5238138.

76. The method of any one of claims 67-73, wherein a 3′ boundary of the deletion is proximal to Chr11:5233055 and a 5′ boundary of the deletion is proximal to Chr11:5240389.

77. The method of any one of claims 67-73, wherein a 3′ boundary of the deletion is proximal to Chr11:5226631 and a 5′ boundary of the deletion is proximal to Chr11:5249422.

78. The method of any one of claims 67-73, wherein a 3′ boundary of the deletion is proximal to Chr11:5196709 and a 5′ boundary of the deletion is proximal to Chr11:5239223.

79. The method of any one of claims 67-73, wherein a 3′ boundary of the deletion is proximal to Chr11:5225700 and a 5′ boundary of the deletion is proximal to Chr11:5236750.

80. The method of any one of claims 67-79, wherein the deletion includes all or a portion of the δ-globin upstream region.

81. The method of any one of claims 67-79, wherein the deletion includes all or a portion of the β-globin gene.

82. The method of claim 67, wherein the permanent deletion of the chromosomal DNA between the 5′ locus and the 3′ locus is in a region of the human beta globin locus comprising a HBG1 gene and a HBG2 gene.

83. The method of claim 82, wherein the permanent deletion of the chromosomal DNA between the 5′ locus and the 3′ locus is a 13-base pair deletion located upstream of the HBG1 gene.

84. The method of claim 82, wherein the permanent deletion of the chromosomal DNA between the 5′ locus and the 3′ locus is a 4.9 Kb deletion located upstream of the HBG1 gene.

85. The method of claim 82, wherein the permanent deletion of the chromosomal DNA between the 5′ locus and the 3′ locus is a 13-base pair deletion located upstream of the HBG1 gene and a 4.9 Kb deletion located upstream of the HBG1 gene.

86. The method of claim 67, wherein the permanent deletion of the chromosomal DNA between the 5′ locus and the 3′ locus is located within a second intron of the BCL11A gene on chromosome 2.

87. The method of claim 67, wherein the permanent deletion of the chromosomal DNA between the 5′ locus and the 3′ locus is located within a +58 DNA hypersensitive site (DHS) of the BCL11A gene on chromosome 2.

88. The method of any one of claims 67-87, wherein the one or more DNA endonuclease is selected from the group consisting of a zinc finger nuclease, TAL effector nuclease, meganuclease, MegaTAL, Tev-m TALEN, MegaTev, homing endonuclease, FokI, StsI, Cas1, Cas1B, Cas2, Cas3, Cas4, Cas5, Cas6, Cas7, Cas8, Cas9 (also known as Csn1 and Csx12), Cas100, Csy1, Csy2, Csy3, Cse1, Cse2, Csc1, Csc2, Csa5, Csn2, Csm2, Csm3, Csm4, Csm5, Csm6, Cmr1, Cmr3, Cmr4, Cmr5, Cmr6, Csb1, Csb2, Csb3, Csx17, Csx14, Csx10, Csx16, CsaX, Csx3, Csx1, Csx15, Csf1, Csf2, Csf3, Csf4, or Cpf1 endonuclease, a homolog thereof, a recombination of the naturally occurring molecule thereof, a codon-optimized thereof, modified versions thereof, and combinations thereof.

89. The method of any one of claims 67-88, wherein the one or more gRNA or the one or more concatenated gRNA comprise a spacer sequence that is complementary to either the 5′ locus of the human beta globin locus on chromosome 11, 5′ locus of the BCL11A gene on chromosome 2, 5′ locus of the DNA sequence that encodes a transcriptional control region of the BCL11A gene on chromosome 2, 3′ locus of the human beta globin locus on chromosome 11, 3′ locus of the BCL11A gene on chromosome 2, or the 3′ locus of the DNA sequence that encodes a transcriptional control region of the BCL11A gene on chromosome 2.

90. The method of claim 89, wherein the one or more gRNA or the one or more concatenated gRNA is one or more single-molecule guide RNA (sgRNA) or one or more concatenated sgRNA.

91. The method of claim 90, wherein the one or more gRNA or one or more concatenated gRNA comprises one or more modified gRNA.

92. The method of claim 90, wherein the one or more sgRNA or one or more concatenated sgRNA comprises one or more modified sgRNA.

93. The method of any one of claims 90-92, wherein the one or more DNA endonuclease is pre-complexed with one or more gRNA, one or more sgRNA, one or more concatenated gRNA, or one or more concatenated sgRNA.

94. The method of any one of claim 37, 43, 50, or 55-93 wherein the Cas9 mRNA, and gRNA or concatenated gRNA, are either each formulated into separate lipid nanoparticles or all co-formulated into a lipid nanoparticle.

95. The method of any one of claim 37, 43, 50, or 55-93, wherein the Cas9 mRNA is formulated into a lipid nanoparticle, and the gRNA or concatenated gRNA are delivered to the cell by an adeno-associated virus (AAV) vector.

96. The method of any one of claim 37, 43, 50, or 55-93 wherein the Cas9 mRNA is formulated into a lipid nanoparticle and the gRNA or concatenated gRNA is delivered to the cell by electroporation.

97. The method of any one of claim 37, 43, 50, or 55-96, wherein the one or more gRNAs is at least two gRNAs and the at least two gRNAs are delivered to the cell using successive electroporation, optionally wherein each electroporation step occurs 12-72, 12-48, or 36-72 hours apart from one another, optionally wherein the at least two gRNAs comprise the sequence of SPY101 in combination with the sequence of any one or more of HPFH5-1, HPFH5-D, HPFH5-T5, HPFH5-T7, Kenya-K5, or Kenya-K1; or optionally wherein the at least two gRNAs comprise the sequence of 1450 in combination with the sequence of any one or more of HPFH5-1, HPFH5-D, HPFH5-T5, HPFH5-T7, Kenya-K5, or Kenya-K1; or optionally wherein the at least two gRNAs comprise the sequence of SPY101 in combination with the sequence of SD2; or optionally wherein the at least two gRNAs comprise the sequence of 1450 in combination with the sequence of SD2; or optionally wherein the at least two gRNAs comprise the sequence of HPFH5-1, HPFH5-D, HPFH5-T5, HPFH5-T7, Kenya-K5, or Kenya-K1 in combination with the sequence of any one or more of HPFH5-1, HPFH5-D, HPFH5-T5, HPFH5-T7, Kenya-K5, or Kenya-K1.

98. The method of any one of claim 37, 43, 50, or 55-97, wherein the increase of fetal hemoglobin (HbF) in the genome-edited human cells is compared to HbF levels in wild-type human cells.

99. The method of any one of claims 33-97, wherein the hemoglobinopathy is selected from a group consisting of sickle cell anemia and thalassemia.

100. The method of any one of claims 33-97, wherein the hemoglobinopathy is selected from the group consisting of sickle cell disease, sickle cell trait, hemoglobin C disease, hemoglobin C trait, hemoglobin S/C disease, hemoglobin D disease, hemoglobin E disease, a thalassemia, a condition associated with hemoglobin with increased oxygen affinity, a condition associated with hemoglobin with decreased oxygen affinity, unstable hemoglobin disease, methemoglobinemia, and combinations thereof.

101. One or more guide ribonucleic acid (gRNA) for editing within or near a human beta globin locus on chromosome 11 and within or near one or more of: a BCL11A gene on chromosome 2, and a DNA sequence that encodes a transcriptional control region of the BCL11A gene on chromosome 2, in a cell from a patient with a hemoglobinopathy, the one or more gRNA comprising a spacer sequence selected from a Sequence Listing disclosed herein.

102. The one or more gRNA of claim 101, wherein the one or more gRNA is one or more single-molecule guide RNA (sgRNA).

103. The one or more gRNA of claim 101 or 102, wherein the one or more gRNAs comprises one or more of the gRNA sequences provided in Table 2, optionally wherein the one or more gRNAs comprise the sequence of SPY101 in combination with the sequence of any one or more of HPFH5-1, HPFH5-D, HPFH5-T5, HPFH5-T7, Kenya-K5, or Kenya-K1; or optionally wherein the one or more gRNAs comprise the sequence of 1450 in combination with the sequence of any one or more of HPFH5-1, HPFH5-D, HPFH5-T5, HPFH5-T7, Kenya-K5, or Kenya-K1; or optionally wherein the one or more gRNAs comprise the sequence of SPY101 in combination with the sequence of SD2; or optionally wherein the one or more gRNAs comprise the sequence of 1450 in combination with the sequence of SD2; or optionally wherein the one or more gRNAs comprise the sequence of HPFH5-1, HPFH5-D, HPFH5-T5, HPFH5-T7, Kenya-K5, or Kenya-K1 in combination with the sequence of any one or more of HPFH5-1, HPFH5-D, HPFH5-T5, HPFH5-T7, Kenya-K5, or Kenya-K1.

104. The one or more gRNA or sgRNA of any one of claims 101-103, wherein the one or more gRNA or one or more sgRNA is one or more modified gRNA or one or more modified sgRNA.

105. The one or more gRNA or sgRNA of any one of claims 101-104, wherein the hemoglobinopathy is selected from a group consisting of sickle cell anemia and thalassemia.

106. A concatenated gRNA for editing within or near a human beta globin locus on chromosome 11 and within or near one or more of: a BCL11A gene on chromosome 2 and a DNA sequence that encodes a transcriptional control region of the BCL11A gene on chromosome 2, in a cell from a patient with a hemoglobinopathy, wherein the concatenated gRNA comprises one or more gRNA and the one or more gRNA comprise a spacer sequence selected from a Sequence Listing disclosed herein.

107. The concatenated gRNA of claim 106, wherein the one or more gRNA is one or more single-molecule guide RNA (sgRNA).

108. The concatenated gRNA of claim 106 or 107, wherein the one or more gRNAs comprises one or more of the gRNA sequences provided in Table 2, optionally wherein the one or more gRNAs comprise the sequence of SPY101 in combination with the sequence of any one or more of HPFH5-1, HPFH5-D, HPFH5-T5, HPFH5-T7, Kenya-K5, or Kenya-K1; or optionally wherein the one or more gRNAs comprise the sequence of 1450 in combination with the sequence of any one or more of HPFH5-1, HPFH5-D, HPFH5-T5, HPFH5-T7, Kenya-K5, or Kenya-K1; or optionally wherein the one or more gRNAs comprise the sequence of SPY101 in combination with the sequence of SD2; or optionally wherein the one or more gRNAs comprise the sequence of 1450 in combination with the sequence of SD2; or optionally wherein the one or more gRNAs comprise the sequence of HPFH5-1, HPFH5-D, HPFH5-T5, HPFH5-T7, Kenya-K5, or Kenya-K1 in combination with the sequence of any one or more of HPFH5-1, HPFH5-D, HPFH5-T5, HPFH5-T7, Kenya-K5, or Kenya-K1.

109. The concatenated gRNA of any one of claims 106-108, wherein the one or more gRNA or one or more sgRNA is one or more modified gRNA or one or more modified sgRNA.

110. The concatenated gRNA of any one of claims 106-109, wherein the hemoglobinopathy is selected from a group consisting of sickle cell anemia and thalassemia.

111. A method of increasing fetal hemoglobin (HbF) in a human cell by genome editing, the method comprising:
introducing a first guide RNA into the human cell using a first electroporation wherein the first guide RNA targets a human beta globin locus on chromosome 11;
introducing a second guide RNA into the human cell using a second electroporation wherein the second guide RNA targets one or more of: a BCL11A gene on chromosome 2, and a DNA sequence that encodes a transcriptional control region of the BCL11A gene on chromosome 2; and
wherein two or more permanent deletions, inversions, or mutations result in an increased expression of γ-globin and an increase of fetal hemoglobin (HbF) in the human cell.

112. A method of increasing fetal hemoglobin (HbF) in a human cell by genome editing, the method comprising:
introducing a first guide RNA into the human cell using a first electroporation wherein the first guide RNA targets one or more of: a BCL11A gene on chromosome 2, and a DNA sequence that encodes a transcriptional control region of the BCL11A gene on chromosome 2;
introducing a second guide RNA into the human cell using a second electroporation wherein the second guide RNA targets a human beta globin locus on chromosome 11; and
wherein two or more permanent deletions, inversions, or mutations result in an increased expression of γ-globin and an increase of fetal hemoglobin (HbF) in the human cell.

113. A method of increasing fetal hemoglobin (HbF) in a human cell by genome editing, the method comprising:
introducing a first guide RNA into the human cell using a first electroporation wherein the first guide RNA targets a human beta globin locus on chromosome 11; and
introducing a second guide RNA into the human cell using a second electroporation wherein the second guide RNA targets the human beta globin locus on chromosome 11;
wherein two or more permanent deletions, inversions, or mutations result in an increased expression of γ-globin and an increase of fetal hemoglobin (HbF) in the human cell.

114. A method of increasing fetal hemoglobin (HbF) in a human cell by genome editing, the method comprising:
introducing a first guide RNA into the human cell using a first electroporation wherein the first guide RNA targets one or more of: a BCL11A gene on chromosome 2, and a DNA sequence that encodes a transcriptional control region of the BCL11A gene on chromosome 2; and
introducing a second guide RNA into the human cell using a second electroporation wherein the second guide RNA targets one or more of: a BCL11A gene on chromosome 2, and a DNA sequence that encodes a transcriptional control region of the BCL11A gene on chromosome 2;
wherein two or more permanent deletions, inversions, or mutations result in an increased expression of γ-globin and an increase of fetal hemoglobin (HbF) in the human cell.

115. A method of increasing fetal hemoglobin (HbF) in a human cell by genome editing, the method comprising:
introducing a first guide RNA into the human cell using a first electroporation wherein the first guide RNA targets a human beta globin locus on chromosome 11;
introducing one or more deoxyribonucleic acid (DNA) endonuclease into the human cell to effect one or more single-strand break (SSB) or double-strand break (DSB), a first SSB or DSB within or near the human beta globin locus on chromosome 11, wherein the first SSB or DSB results in one or more of: a permanent deletion or inversion within or near the human beta globin locus on chromosome 11, and a mutation within or near the human beta globin locus on chromosome 11;
introducing a second guide RNA into the human cell using a second electroporation wherein the second guide RNA targets one or more of: a BCL11A gene on chromosome 2, and a DNA sequence that encodes a transcriptional control region of the BCL11A gene on chromosome 2; and
introducing one or more DNA endonuclease into the human cell to effect one or more SSB or DSB, a second SSB or DSB within or near one or more of: the BCL11A gene on chromosome 2, and the DNA sequence that encodes a transcriptional control region of the BCL11A gene on chromosome 2, wherein the second SSB or DSB results in one or more of: a permanent deletion or inversion within or near the BCL11A gene on chromosome 2, a mutation within or near the BCL11A gene on chromosome 2, a permanent deletion or inversion within or near the DNA sequence that encodes a transcriptional control region of the BCL11A gene on chromosome 2, and a mutation within or near the DNA sequence that encodes a transcriptional control region of the BCL11A gene on chromosome 2;
wherein the two or more permanent deletion, inversion, or mutation results in an increased expression of γ-globin and an increase of fetal hemoglobin (HbF) in the human cell.

116. A method of increasing fetal hemoglobin (HbF) in a human cell by genome editing, the method comprising:
introducing a first guide RNA into the human cell using a first electroporation wherein the first guide RNA targets one or more of: a BCL11A gene on chromosome 2, and a DNA sequence that encodes a transcriptional control region of the BCL11A gene on chromosome 2;
introducing into the human cell one or more deoxyribonucleic acid (DNA) endonuclease to effect one or more single-strand break (SSB) or double-strand break (DSB), a first SSB or DSB within or near one or more of: the BCL11A gene on chromosome 2, and the DNA sequence that encodes a transcriptional control region of the BCL11A gene on chromosome 2, wherein the first SSB or DSB results in one or more of: a permanent deletion or inversion within or near the BCL11A gene on chromosome 2, a mutation within or near the BCL11A gene on chromosome 2, a permanent deletion or inversion within or near the DNA sequence that encodes a transcriptional control region of the BCL11A gene on chromosome 2, and a mutation within or near the DNA sequence that encodes a transcriptional control region of the BCL11A gene on chromosome 2;
introducing a second guide RNA into the human cell using a second electroporation wherein the second guide RNA targets a human beta globin locus on chromosome 11; and
introducing into the human cell one or more DNA endonuclease to effect one or more SSB or DSB, a second SSB or DSB within or near the human beta globin locus on chromosome 11,wherein the second SSB or DSB results in one or more of:
a permanent deletion or inversion within or near the human beta globin locus on chromosome 11, and a mutation within or near the human beta globin locus on chromosome 11;
wherein the two or more permanent deletions, inversions, or mutations result in an increased expression of γ-globin and an increase of fetal hemoglobin (HbF) in the human cell.

117. A method of increasing fetal hemoglobin (HbF) in a human cell by genome editing, the method comprising:
introducing a first guide RNA into the human cell using a first electroporation wherein the first guide RNA targets a human beta globin locus on chromosome 11;
introducing one or more deoxyribonucleic acid (DNA) endonuclease into the human cell to effect one or more single-strand break (SSB) or double-strand break (DSB), a first SSB or DSB within or near the human beta globin locus on chromosome 11, wherein the first SSB or DSB results in one or more of: a permanent deletion or inversion within or near the human beta globin locus on chromosome 11, and a mutation within or near the human beta globin locus on chromosome 11;
introducing a second guide RNA into the human cell using a second electroporation wherein the second guide RNA targets the human beta globin locus on chromosome 11; and
introducing one or more DNA endonuclease into the human cell to effect one or more SSB or DSB, a second SSB or DSB within or near the human beta globin locus on chromosome 11, wherein the second SSB or DSB results in one or more of:
a permanent deletion or inversion within or near the human beta globin locus on chromosome 11, and a mutation within or near the human beta globin locus on chromosome 11;
wherein the two or more permanent deletions, inversions, or mutations result in an increased expression of γ-globin and an increase of fetal hemoglobin (HbF) in the human cell.

118. A method of increasing fetal hemoglobin (HbF) in a human cell by genome editing, the method comprising:
introducing a first guide RNA into the human cell using a first electroporation wherein the first guide RNA targets one or more of: a BCL11A gene on chromosome 2, and a DNA sequence that encodes a transcriptional control region of the BCL11A gene on chromosome 2;
introducing into the human cell one or more deoxyribonucleic acid (DNA) endonuclease to effect one or more single-strand break (SSB) or double-strand break (DSB), a first SSB or DSB within or near one or more of: a BCL11A gene on chromosome 2, and a DNA sequence that encodes a transcriptional control region of the BCL11A gene on chromosome 2, wherein the first SSB or DSB results in one or more of: a permanent deletion or inversion within or near the BCL11A gene on chromosome 2, a mutation within or near the BCL11A gene on chromosome 2, a permanent deletion or inversion within or near the DNA sequence that encodes a transcriptional control region of the BCL11A gene on chromosome 2, and a mutation within or near the DNA sequence that encodes a transcriptional control region of the BCL11A gene on chromosome 2;
introducing a second guide RNA into the human cell using a second electroporation wherein the second guide RNA targets one or more of: a BCL11A gene on chromosome 2, and a DNA sequence that encodes a transcriptional control region of the BCL11A gene on chromosome 2; and
introducing into the human cell one or more DNA endonuclease to effect one or more SSB or DSB, a second SSB or DSB within or near one or more of: a BCL11A gene on chromosome 2, and a DNA sequence that encodes a transcriptional control region of the BCL11A gene on chromosome 2, wherein the second SSB or DSB results in one or more of: a permanent deletion or inversion within or near the BCL11A gene on chromosome 2, a mutation within or near the BCL11A gene on chromosome 2, a permanent deletion or inversion within or near the DNA sequence that encodes a transcriptional control region of the BCL11A gene on chromosome 2, and a mutation within or near the DNA sequence that encodes a transcriptional control region of the BCL11A gene on chromosome 2;
wherein the two or more permanent deletions, inversions, or mutations result in an increased expression of γ-globin and an increase of fetal hemoglobin (HbF) in the human cell.

119. An isolated edited cell comprising: (a) one or more of: a permanent deletion or inversion within or near the human beta globin locus on chromosome 11, and a mutation within or near the human beta globin locus on chromosome 11; (b) one or more of: a permanent deletion or inversion within or near the BCL11A gene on chromosome 2, a mutation within or near the BCL11A gene on chromosome 2, a permanent deletion or inversion within or near the DNA sequence that encodes a transcriptional control region of the BCL11A gene on chromosome 2, and a mutation within or near the DNA sequence that encodes a transcriptional control region of the BCL11A gene on chromosome 2; wherein the two or more permanent deletion, inversion, or mutation results in an increased expression of γ-globin and an increase of fetal hemoglobin (HbF) in the cell.

120. The isolated edited cell of claim 119, wherein the permanent deletion within or near the human beta globin locus on chromosome 11 is a hereditary persistence of fetal hemoglobin (HPFH) deletion, optionally selected from the group consisting of: a HPFH-4 deletion, a HPFH-5 deletion, a HPFH-Kenya deletion, a HPFH-Black deletion, a large Corfu deletion, a small Corfu deletion, a small deletion, and combinations thereof.

121. The isolated edited cell of claim 120, wherein the HPFH deletion is a 7.2Kb deletion, a 3.5 Kb deletion, a 12.9 Kb deletion, a 22 Kb deletion, or a 13 bp deletion.

122. The isolated edited cell of claim 120 or 121, wherein the HPFH deletion is located downstream of a HBG1 gene and results in a repositioning of a BCL11A enhancing region closer to the HBG1 gene, or wherein the wherein the HPFH deletion is located downstream of a HBG2 gene and results in a repositioning of a BCL11A enhancing region closer to the HBG2 gene, or wherein the HPFH deletion is located downstream of a HBG1 gene and HBG2 gene and results in a repositioning of a BCL11A enhancing region closer to the HBG1 gene and HBG2 gene.

123. The isolated edited cell of claim 122, wherein the HPFH deletion includes all or a portion of a β-globin gene, or wherein the HPFH deletion includes all or a portion of a δ-globin gene and all or a portion of a β-globin gene.

124. The isolated edited cell of claim 119, wherein the permanent deletion within or near the human beta globin locus on chromosome 11 is in a region of the human beta globin locus comprising a HBG1 gene and a HBG2 gene.

125. The isolated edited cell of claim 124, wherein the permanent deletion within or near the human beta globin locus on chromosome 11 is a 13-base pair deletion located upstream of the HBG1 gene, or wherein the permanent deletion within or near the human beta globin locus on chromosome 11 is a 4.9 Kb deletion located upstream of the HBG1 gene, or wherein the permanent deletion within or near the human beta globin locus on chromosome 11 is a 13-base pair deletion located upstream of the HGB1 gene and a 4.9 Kb deletion located upstream of the HBG1 gene.

126. The isolated edited cell of claim 125, wherein the 4.9 Kb deletion includes the HBG2 gene.

127. The isolated edited cell of any one of claims 119 to 126, wherein the DNA sequence that encodes a transcriptional control region of the BCL11A gene is located within a second intron of the BCL11A gene on chromosome 2.

128. The isolated edited cell of any one of claims 119 to 127, wherein the DNA sequence that encodes a transcriptional control region of the BCL11A gene is located within a +58 DNA hypersensitive site (DHS) of the BCL11A gene on chromosome 2.

129. The isolated edited cell of any one of claims 119 to 128, wherein the two or more permanent deletion, inversion, or mutation is introduced into the cell using one or more DNA endonucleases, optionally wherein the one or more DNA endonuclease is selected from the group consisting of a zinc finger nuclease, TAL effector nuclease, meganuclease, MegaTAL, Tev-m TALEN, MegaTev, homing endonuclease, FokI, StsI, Cas1, Cas1B, Cas2, Cas3, Cas4, Cas5, Cas6, Cas7, Cas8, Cas9 (also known as Csn1 and Csx12), Cas100, Csy1, Csy2, Csy3, Cse1, Cse2, Csc1, Csc2, Csa5, Csn2, Csm2, Csm3, Csm4, Csm5, Csm6, Cmr1, Cmr3, Cmr4, Cmr5, Cmr6, Csb1, Csb2, Csb3, Csx17, Csx14, Csx10, Csx16, CsaX, Csx3, Csx1, Csx15, Csf1, Csf2, Csf3, Csf4, or Cpf1 endonuclease, a homolog thereof, a recombination of the naturally occurring molecule thereof, a codon-optimized thereof, modified versions thereof, and combinations thereof.

130. The isolated edited cell of any one of claims 119 to 129, wherein the wherein the two or more permanent deletion, inversion, or mutation is introduced into the cell using the method of any one of claims 1 to 100 or 111 to 118 or any of the methods provided in the Examples.

131. The isolated edited cell of claim 130, wherein the two or more permanent deletion, inversion, or mutation is introduced using one or more gRNAs comprising one or more of the gRNA sequences provided in Table 2, optionally wherein the one or more gRNAs comprises the sequence or sequences of SPY101, SD2, 1450 or a combination thereof.

132. The isolated edited cell of any one of claim 130 or 131, wherein the one or more gRNAs is at least two gRNAs and the at least two gRNAs are delivered to the cell using successive electroporation, optionally wherein each electroporation step occurs 12-72, 12-48, or 36-72 hours apart from one another, optionally wherein the at least two gRNAs comprise the sequence of SPY101 in combination with the sequence of any one or more of HPFH5-1, HPFH5-D, HPFH5-T5, HPFH5-T7, Kenya-K5, or Kenya-K1; or optionally wherein the at least two gRNAs comprise the sequence of 1450 in combination with the sequence of any one or more of HPFH5-1, HPFH5-D, HPFH5-T5, HPFH5-T7, Kenya-K5, or Kenya-K1; or optionally wherein the at least two gRNAs comprise the sequence of SPY101 in combination with the sequence of SD2; or optionally wherein the at least two gRNAs comprise the sequence of 1450 in combination with the sequence of SD2; or optionally wherein the at least two gRNAs comprise the sequence of HPFH5-1, HPFH5-D, HPFH5-T5, HPFH5-T7, Kenya-K5, or Kenya-K1 in combination with the sequence of any one or more of HPFH5-1, HPFH5-D, HPFH5-T5, HPFH5-T7, Kenya-K5, or Kenya-K1.

133. The isolated edited cell of any one of claims 119 to 132, wherein the cell is an isolated edited human cell.

134. The isolated edited cell of any one of claims 119 to 133, wherein cell is a stem cell.

135. The isolated edited cell of any one of claims 119 to 133, wherein cell is an induced pluripotent stem cell (iPSC), a mesenchymal stem cell, or a hematopoietic progenitor cell, optionally a CD34+ cell.

136. An isolated edited cell obtained by or obtainable by the method of any one of claims 1 to 100 or 111 to 118 or any of the methods provided in the Examples.

137. A method of treating a patient with a hemoglobinopathy by administering the isolated edited cell of any one of claims 119 to 136 to the patient.

138. The method of claim 137, wherein the hemoglobinopathy is sickle cell anemia or thalassemia.

139. The method of claim 137, wherein the hemoglobinopathy is selected from the group consisting of sickle cell disease, sickle cell trait, hemoglobin C disease, hemoglobin C trait, hemoglobin S/C disease, hemoglobin D disease, hemoglobin E disease, a thalassemia, a condition associated with hemoglobin with increased oxygen affinity, a condition associated with hemoglobin with decreased oxygen affinity, unstable hemoglobin disease, methemoglobinemia, and combinations thereof.

140. The method of any one of claims 137 to 139, wherein the isolated edited cell is administered to the patient by transplantation, local injection, systemic infusion, and combinations thereof.

The application's sequence listing, which the Patent Office published only in electronic form, follows.

SEQUENCE LISTING (228304 sequences)

SEQ ID NO: 1 - DNA, 20 bp, Artificial Sequence
  Synthetic oligonucleotide; GAG chr11 5150055 5150074 5150071 +
aaaaaaatgatctatgacct

SEQ ID NO: 2 - DNA, 20 bp, Artificial Sequence
  Synthetic oligonucleotide; AGG chr11 5150056 5150075 5150072 +
aaaaaatgatctatgacctg

SEQ ID NO: 3 - DNA, 20 bp, Artificial Sequence
  Synthetic oligonucleotide; AAG chr11 5150065 5150084 5150081 +
tctatgacctgaggtttttc

SEQ ID NO: 4 - DNA, 20 bp, Artificial Sequence
  Synthetic oligonucleotide; TAG chr11 5150078 5150097 5150094 +
gtttttcaagaacaattgac

SEQ ID NO: 5 - DNA, 20 bp, Artificial Sequence
  Synthetic oligonucleotide; TAG chr11 5150106 5150125 5150122 +
aattcttatgccactaattt

SEQ ID NO: 6 - DNA, 20 bp, Artificial Sequence
  Synthetic oligonucleotide; TAG chr11 5150115 5150134 5150131 +
gccactaattttagacaata

SEQ ID NO: 7 - DNA, 20 bp, Artificial Sequence
  Synthetic oligonucleotide; TAG chr11 5150139 5150158 5150155 +
cctcctcttcactaacacaa

SEQ ID NO: 8 - DNA, 20 bp, Artificial Sequence
  Synthetic oligonucleotide; TAG chr11 5150145 5150164 5150161 +
cttcactaacacaatagccc

SEQ ID NO: 9 - DNA, 20 bp, Artificial Sequence
  Synthetic oligonucleotide; TGG chr11 5150168 5150187 5150184 +
acttatttatatttgctgtg

SEQ ID NO: 10 - DNA, 20 bp, Artificial Sequence
  Synthetic oligonucleotide; AAG chr11 5150188 5150207 5150204 +
tggtatgctgccacatgccc

SEQ ID NO: 11 - DNA, 20 bp, Artificial Sequence
  Synthetic oligonucleotide; CAG chr11 5150191 5150210 5150207 +
tatgctgccacatgcccaag

SEQ ID NO: 12 - DNA, 20 bp, Artificial Sequence
  Synthetic oligonucleotide; TAG chr11 5150240 5150259 5150256 +
acacacacacgtcttacttg

SEQ ID NO: 13 - DNA, 20 bp, Artificial Sequence
  Synthetic oligonucleotide; AAG chr11 5150248 5150267 5150264 +
acgtcttacttgtagaacac

SEQ ID NO: 14 - DNA, 20 bp, Artificial Sequence
  Synthetic oligonucleotide; TGG chr11 5150273 5150292 5150289 +
aacaaatgaatactctccaa

SEQ ID NO: 15 - DNA, 20 bp, Artificial Sequence
  Synthetic oligonucleotide; TAG chr11 5150283 5150302 5150299 +
tactctccaatggcacatta

SEQ ID NO: 16 - DNA, 20 bp, Artificial Sequence
  Synthetic oligonucleotide; TGG chr11 5150290 5150309 5150306 +
caatggcacattatagcttt

SEQ ID NO: 17 - DNA, 20 bp, Artificial Sequence
  Synthetic oligonucleotide; AAG chr11 5150297 5150316 5150313 +
acattatagcttttggaata

SEQ ID NO: 18 - DNA, 20 bp, Artificial Sequence
  Synthetic oligonucleotide; CAG chr11 5150302 5150321 5150318 +
atagcttttggaataaagtc

SEQ ID NO: 19 - DNA, 20 bp, Artificial Sequence
  Synthetic oligonucleotide; TAG chr11 5150324 5150343 5150340 +
gcaactctgcacaacattaa

SEQ ID NO: 20 - DNA, 20 bp, Artificial Sequence
  Synthetic oligonucleotide; AAG chr11 5150361 5150380 5150377 +
catattttccttgtctcccc

SEQ ID NO: 21 - DNA, 20 bp, Artificial Sequence
  Synthetic oligonucleotide; TAG chr11 5150397 5150416 5150413 +
tcataccatattgaaaaaac

SEQ ID NO: 22 - DNA, 20 bp, Artificial Sequence
  Synthetic oligonucleotide; GAG chr11 5150399 5150418 5150415 +
ataccatattgaaaaaacta

SEQ ID NO: 23 - DNA, 20 bp, Artificial Sequence
  Synthetic oligonucleotide; TAG chr11 5150422 5150441 5150438 +
ttaccttaaactacattatc

SEQ ID NO: 24 - DNA, 20 bp, Artificial Sequence
  Synthetic oligonucleotide; TGG chr11 5150449 5150468 5150465 +
aatctcctctactatctacc

SEQ ID NO: 25 - DNA, 20 bp, Artificial Sequence
  Synthetic oligonucleotide; TGG chr11 5150473 5150492 5150489 +
atgatgtgttcttacttcct

SEQ ID NO: 26 - DNA, 20 bp, Artificial Sequence
  Synthetic oligonucleotide; AAG chr11 5150496 5150515 5150512 +
ctactcatccatcattcctc

SEQ ID NO: 27 - DNA, 20 bp, Artificial Sequence
  Synthetic oligonucleotide; CAG chr11 5150502 5150521 5150518 +
atccatcattcctcaagaat

SEQ ID NO: 28 - DNA, 20 bp, Artificial Sequence
  Synthetic oligonucleotide; GAG chr11 5150504 5150523 5150520 +
ccatcattcctcaagaatca

SEQ ID NO: 29 - DNA, 20 bp, Artificial Sequence
  Synthetic oligonucleotide; AGG chr11 5150505 5150524 5150521 +
catcattcctcaagaatcag

SEQ ID NO: 30 - DNA, 20 bp, Artificial Sequence
  Synthetic oligonucleotide; TGG chr11 5150557 5150576 5150573 +
taaatgcaactcccctgctt

SEQ ID NO: 31 - DNA, 20 bp, Artificial Sequence
  Synthetic oligonucleotide; TAG chr11 5150561 5150580 5150577 +
tgcaactcccctgctttggt

SEQ ID NO: 32 - DNA, 20 bp, Artificial Sequence
  Synthetic oligonucleotide; CAG chr11 5150664 5150683 5150680 +
ttccccacctctcttccttt

SEQ ID NO: 33 - DNA, 20 bp, Artificial Sequence
  Synthetic oligonucleotide; CAG chr11 5150678 5150697 5150694 +
tcctttcagtctctcttttc

SEQ ID NO: 34 - DNA, 20 bp, Artificial Sequence
  Synthetic oligonucleotide; TAG chr11 5150688 5150707 5150704 +
ctctcttttccagaattaca

SEQ ID NO: 35 - DNA, 20 bp, Artificial Sequence
  Synthetic oligonucleotide; AGG chr11 5150689 5150708 5150705 +
tctcttttccagaattacat

SEQ ID NO: 36 - DNA, 20 bp, Artificial Sequence
  Synthetic oligonucleotide; GAG chr11 5150703 5150722 5150719 +
ttacataggtacaaactcat

SEQ ID NO: 37 - DNA, 20 bp, Artificial Sequence
  Synthetic oligonucleotide; CAG chr11 5150721 5150740 5150737 +
atgagaattattcactgtgc

SEQ ID NO: 38 - DNA, 20 bp, Artificial Sequence
  Synthetic oligonucleotide; TAG chr11 5150748 5150767 5150764 +
actattatgtcacgattctg

SEQ ID NO: 39 - DNA, 20 bp, Artificial Sequence
  Synthetic oligonucleotide; TAG chr11 5150753 5150772 5150769 +
tatgtcacgattctgtagta

SEQ ID NO: 40 - DNA, 20 bp, Artificial Sequence
  Synthetic oligonucleotide; CAG chr11 5150770 5150789 5150786 +
gtatagtatttttaatattg

SEQ ID NO: 41 - DNA, 20 bp, Artificial Sequence
  Synthetic oligonucleotide; AGG chr11 5150771 5150790 5150787 +
tatagtatttttaatattgc

SEQ ID NO: 42 - DNA, 20 bp, Artificial Sequence
  Synthetic oligonucleotide; AAG chr11 5150799 5150818 5150815 +
gataaaatgatgaattaata

SEQ ID NO: 43 - DNA, 20 bp, Artificial Sequence
  Synthetic oligonucleotide; AAG chr11 5150802 5150821 5150818 +
aaaatgatgaattaataaag

SEQ ID NO: 44 - DNA, 20 bp, Artificial Sequence
  Synthetic oligonucleotide; GAG chr11 5150813 5150832 5150829 +
ttaataaagaagtaaatttt

SEQ ID NO: 45 - DNA, 20 bp, Artificial Sequence
  Synthetic oligonucleotide; AGG chr11 5150814 5150833 5150830 +
taataaagaagtaaattttg

SEQ ID NO: 46 - DNA, 20 bp, Artificial Sequence
  Synthetic oligonucleotide; TAG chr11 5150818 5150837 5150834 +
aaagaagtaaattttgaggt

SEQ ID NO: 47 - DNA, 20 bp, Artificial Sequence
  Synthetic oligonucleotide; TGG chr11 5150863 5150882 5150879 +
gatgtgtcaaatgcaacacc

SEQ ID NO: 48 - DNA, 20 bp, Artificial Sequence
  Synthetic oligonucleotide; TAG chr11 5150922 5150941 5150938 +
tgaaaatgtatttaaatttt

SEQ ID NO: 49 - DNA, 20 bp, Artificial Sequence
  Synthetic oligonucleotide; AGG chr11 5150923 5150942 5150939 +
gaaaatgtatttaaattttt

SEQ ID NO: 50 - DNA, 20 bp, Artificial Sequence
  Synthetic oligonucleotide; AAG chr11 5150949 5150968 5150965 +
tattgtctcttgatattcat

SEQ ID NO: 51 - DNA, 20 bp, Artificial Sequence
  Synthetic oligonucleotide; AAG chr11 5150964 5150983 5150980 +
ttcataagattttctttgac

SEQ ID NO: 52 - DNA, 20 bp, Artificial Sequence
  Synthetic oligonucleotide; CAG chr11 5150971 5150990 5150987 +
gattttctttgacaagaaca

SEQ ID NO: 53 - DNA, 20 bp, Artificial Sequence
  Synthetic oligonucleotide; AAG chr11 5151005 5151024 5151021 +
ttcctttgattttttttttt

SEQ ID NO: 54 - DNA, 20 bp, Artificial Sequence
  Synthetic oligonucleotide; AGG chr11 5151006 5151025 5151022 +
tcctttgattttttttttta

SEQ ID NO: 55 - DNA, 20 bp, Artificial Sequence
  Synthetic oligonucleotide; CAG chr11 5151009 5151028 5151025 +
tttgatttttttttttaagg

SEQ ID NO: 56 - DNA, 20 bp, Artificial Sequence
  Synthetic oligonucleotide; AGG chr11 5151010 5151029 5151026 +
ttgatttttttttttaaggc

SEQ ID NO: 57 - DNA, 20 bp, Artificial Sequence
  Synthetic oligonucleotide; GGG chr11 5151011 5151030 5151027 +
tgatttttttttttaaggca

SEQ ID NO: 58 - DNA, 20 bp, Artificial Sequence
  Synthetic oligonucleotide; AAG chr11 5151020 5151039 5151036 +
tttttaaggcagggatgatc

SEQ ID NO: 59 - DNA, 20 bp, Artificial Sequence
  Synthetic oligonucleotide; GAG chr11 5151028 5151047 5151044 +
gcagggatgatcaagaaaat

SEQ ID NO: 60 - DNA, 20 bp, Artificial Sequence
  Synthetic oligonucleotide; GAG chr11 5151030 5151049 5151046 +
agggatgatcaagaaaatga

SEQ ID NO: 61 - DNA, 20 bp, Artificial Sequence
  Synthetic oligonucleotide; GAG chr11 5151052 5151071 5151068 +
gtcaacaacttgttttcatt

SEQ ID NO: 62 - DNA, 20 bp, Artificial Sequence
  Synthetic oligonucleotide; TGG chr11 5151059 5151078 5151075 +
acttgttttcattgagtccc

SEQ ID NO: 63 - DNA, 20 bp, Artificial Sequence
  Synthetic oligonucleotide; CAG chr11 5151068 5151087 5151084 +
cattgagtccctggatgttt

SEQ ID NO: 64 - DNA, 20 bp, Artificial Sequence
  Synthetic oligonucleotide; GAG chr11 5151077 5151096 5151093 +
cctggatgtttcagaacaac

SEQ ID NO: 65 - DNA, 20 bp, Artificial Sequence
  Synthetic oligonucleotide; TAG chr11 5151083 5151102 5151099 +
tgtttcagaacaacgagcct

SEQ ID NO: 66 - DNA, 20 bp, Artificial Sequence
  Synthetic oligonucleotide; AGG chr11 5151084 5151103 5151100 +
gtttcagaacaacgagcctt

SEQ ID NO: 67 - DNA, 20 bp, Artificial Sequence
  Synthetic oligonucleotide; CAG chr11 5151099 5151118 5151115 +
gccttaggtgcatttaaatt

SEQ ID NO: 68 - DNA, 20 bp, Artificial Sequence
  Synthetic oligonucleotide; AAG chr11 5151107 5151126 5151123 +
tgcatttaaattcagtgaca

SEQ ID NO: 69 - DNA, 20 bp, Artificial Sequence
  Synthetic oligonucleotide; AGG chr11 5151108 5151127 5151124 +
gcatttaaattcagtgacaa

SEQ ID NO: 70 - DNA, 20 bp, Artificial Sequence
  Synthetic oligonucleotide; TGG chr11 5151130 5151149 5151146 +
gcataatttataaatcctcc

SEQ ID NO: 71 - DNA, 20 bp, Artificial Sequence
  Synthetic oligonucleotide; GAG chr11 5151132 5151151 5151148 +
ataatttataaatcctcctg

SEQ ID NO: 72 - DNA, 20 bp, Artificial Sequence
  Synthetic oligonucleotide; TAG chr11 5151144 5151163 5151160 +
tcctcctggagaaatattct

SEQ ID NO: 73 - DNA, 20 bp, Artificial Sequence
  Synthetic oligonucleotide; AAG chr11 5151147 5151166 5151163 +
tcctggagaaatattcttag

SEQ ID NO: 74 - DNA, 20 bp, Artificial Sequence
  Synthetic oligonucleotide; CAG chr11 5151161 5151180 5151177 +
tcttagaagaataactcaac

SEQ ID NO: 75 - DNA, 20 bp, Artificial Sequence
  Synthetic oligonucleotide; AGG chr11 5151162 5151181 5151178 +
cttagaagaataactcaacc

SEQ ID NO: 76 - DNA, 20 bp, Artificial Sequence
  Synthetic oligonucleotide; GGG chr11 5151163 5151182 5151179 +
ttagaagaataactcaacca

SEQ ID NO: 77 - DNA, 20 bp, Artificial Sequence
  Synthetic oligonucleotide; GGG chr11 5151164 5151183 5151180 +
tagaagaataactcaaccag

SEQ ID NO: 78 - DNA, 20 bp, Artificial Sequence
  Synthetic oligonucleotide; AAG chr11 5151170 5151189 5151186 +
aataactcaaccaggggcta

SEQ ID NO: 79 - DNA, 20 bp, Artificial Sequence
  Synthetic oligonucleotide; AAG chr11 5151178 5151197 5151194 +
aaccaggggctaaagaataa

SEQ ID NO: 80 - DNA, 20 bp, Artificial Sequence
  Synthetic oligonucleotide; GAG chr11 5151180 5151199 5151196 +
ccaggggctaaagaataaaa

SEQ ID NO: 81 - DNA, 20 bp, Artificial Sequence
  Synthetic oligonucleotide; TAG chr11 5151235 5151254 5151251 +
ttcacacttctcactttcat

SEQ ID NO: 82 - DNA, 20 bp, Artificial Sequence
  Synthetic oligonucleotide; TAG chr11 5151243 5151262 5151259 +
tctcactttcattagtcacg

SEQ ID NO: 83 - DNA, 20 bp, Artificial Sequence
  Synthetic oligonucleotide; GAG chr11 5151271 5151290 5151287 +
acaatcccactgattgatat

SEQ ID NO: 84 - DNA, 20 bp, Artificial Sequence
  Synthetic oligonucleotide; CAG chr11 5151291 5151310 5151307 +
gagccatgatgatctaaaac

SEQ ID NO: 85 - DNA, 20 bp, Artificial Sequence
  Synthetic oligonucleotide; TGG chr11 5151303 5151322 5151319 +
tctaaaaccagctattgtgc

SEQ ID NO: 86 - DNA, 20 bp, Artificial Sequence
  Synthetic oligonucleotide; CAG chr11 5151306 5151325 5151322 +
aaaaccagctattgtgctgg

SEQ ID NO: 87 - DNA, 20 bp, Artificial Sequence
  Synthetic oligonucleotide; CAG chr11 5151321 5151340 5151337 +
gctggcagatttcacaaacc

SEQ ID NO: 88 - DNA, 20 bp, Artificial Sequence
  Synthetic oligonucleotide; TGG chr11 5151360 5151379 5151376 +
ttttttgttttgttttgata

SEQ ID NO: 89 - DNA, 20 bp, Artificial Sequence
  Synthetic oligonucleotide; AAG chr11 5151375 5151394 5151391 +
tgatatggttactactgcaa

SEQ ID NO: 90 - DNA, 20 bp, Artificial Sequence
  Synthetic oligonucleotide; AAG chr11 5151382 5151401 5151398 +
gttactactgcaaaagaaaa

SEQ ID NO: 91 - DNA, 20 bp, Artificial Sequence
  Synthetic oligonucleotide; TAG chr11 5151389 5151408 5151405 +
ctgcaaaagaaaaaagcatg

SEQ ID NO: 92 - DNA, 20 bp, Artificial Sequence
  Synthetic oligonucleotide; AGG chr11 5151390 5151409 5151406 +
tgcaaaagaaaaaagcatgt

SEQ ID NO: 93 - DNA, 20 bp, Artificial Sequence
  Synthetic oligonucleotide; AAG chr11 5151401 5151420 5151417 +
aaagcatgtaggcattaatt

SEQ ID NO: 94 - DNA, 20 bp, Artificial Sequence
  Synthetic oligonucleotide; AGG chr11 5151402 5151421 5151418 +
aagcatgtaggcattaatta

SEQ ID NO: 95 - DNA, 20 bp, Artificial Sequence
  Synthetic oligonucleotide; TGG chr11 5151405 5151424 5151421 +
catgtaggcattaattaagg

SEQ ID NO: 96 - DNA, 20 bp, Artificial Sequence
  Synthetic oligonucleotide; CAG chr11 5151418 5151437 5151434 +
attaaggtggattttatgaa

SEQ ID NO: 97 - DNA, 20 bp, Artificial Sequence
  Synthetic oligonucleotide; TGG chr11 5151452 5151471 5151468 +
cacatgaatgcgaatctgtg

SEQ ID NO: 98 - DNA, 20 bp, Artificial Sequence
  Synthetic oligonucleotide; TAG chr11 5151466 5151485 5151482 +
tctgtgtggtctttgcacca

SEQ ID NO: 99 - DNA, 20 bp, Artificial Sequence
  Synthetic oligonucleotide; AAG chr11 5151471 5151490 5151487 +
gtggtctttgcaccatagac

SEQ ID NO: 100 - DNA, 20 bp, Artificial Sequence
  Synthetic oligonucleotide; TGG chr11 5151474 5151493 5151490 +
gtctttgcaccatagacaag

SEQ ID NO: 101 - DNA, 20 bp, Artificial Sequence
  Synthetic oligonucleotide; GAG chr11 5151480 5151499 5151496 +
gcaccatagacaagtggatt

SEQ ID NO: 102 - DNA, 20 bp, Artificial Sequence
  Synthetic oligonucleotide; TGG chr11 5151486 5151505 5151502 +
tagacaagtggattgagaaa

SEQ ID NO: 103 - DNA, 20 bp, Artificial Sequence
  Synthetic oligonucleotide; GAG chr11 5151488 5151507 5151504 +
gacaagtggattgagaaatg

SEQ ID NO: 104 - DNA, 20 bp, Artificial Sequence
  Synthetic oligonucleotide; AGG chr11 5151489 5151508 5151505 +
acaagtggattgagaaatgg

SEQ ID NO: 105 - DNA, 20 bp, Artificial Sequence
  Synthetic oligonucleotide; GGG chr11 5151490 5151509 5151506 +
caagtggattgagaaatgga

SEQ ID NO: 106 - DNA, 20 bp, Artificial Sequence
  Synthetic oligonucleotide; CAG chr11 5151495 5151514 5151511 +
ggattgagaaatggagggac

SEQ ID NO: 107 - DNA, 20 bp, Artificial Sequence
  Synthetic oligonucleotide; AAG chr11 5151499 5151518 5151515 +
tgagaaatggagggaccagc

SEQ ID NO: 108 - DNA, 20 bp, Artificial Sequence
  Synthetic oligonucleotide; TAG chr11 5151509 5151528 5151525 +
agggaccagcaagtaaatgc

SEQ ID NO: 109 - DNA, 20 bp, Artificial Sequence
  Synthetic oligonucleotide; AAG chr11 5151514 5151533 5151530 +
ccagcaagtaaatgctagaa

SEQ ID NO: 110 - DNA, 20 bp, Artificial Sequence
  Synthetic oligonucleotide; GAG chr11 5151516 5151535 5151532 +
agcaagtaaatgctagaaaa

SEQ ID NO: 111 - DNA, 20 bp, Artificial Sequence
  Synthetic oligonucleotide; TGG chr11 5151523 5151542 5151539 +
aaatgctagaaaagagaata

SEQ ID NO: 112 - DNA, 20 bp, Artificial Sequence
  Synthetic oligonucleotide; AAG chr11 5151530 5151549 5151546 +
agaaaagagaatatggatat

SEQ ID NO: 113 - DNA, 20 bp, Artificial Sequence
  Synthetic oligonucleotide; AGG chr11 5151531 5151550 5151547 +
gaaaagagaatatggatata

SEQ ID NO: 114 - DNA, 20 bp, Artificial Sequence
  Synthetic oligonucleotide; GGG chr11 5151532 5151551 5151548 +
aaaagagaatatggatataa

SEQ ID NO: 115 - DNA, 20 bp, Artificial Sequence
  Synthetic oligonucleotide; GGG chr11 5151533 5151552 5151549 +
aaagagaatatggatataag

SEQ ID NO: 116 - DNA, 20 bp, Artificial Sequence
  Synthetic oligonucleotide; GAG chr11 5151535 5151554 5151551 +
agagaatatggatataaggg

SEQ ID NO: 117 - DNA, 20 bp, Artificial Sequence
  Synthetic oligonucleotide; GAG chr11 5151542 5151561 5151558 +
atggatataaggggagatgt

SEQ ID NO: 118 - DNA, 20 bp, Artificial Sequence
  Synthetic oligonucleotide; AAG chr11 5151562 5151581 5151578 +
gagacccaaacctatgtgtg

SEQ ID NO: 119 - DNA, 20 bp, Artificial Sequence
  Synthetic oligonucleotide; AAG chr11 5151565 5151584 5151581 +
acccaaacctatgtgtgaag

SEQ ID NO: 120 - DNA, 20 bp, Artificial Sequence
  Synthetic oligonucleotide; AGG chr11 5151566 5151585 5151582 +
cccaaacctatgtgtgaaga

SEQ ID NO: 121 - DNA, 20 bp, Artificial Sequence
  Synthetic oligonucleotide; GAG chr11 5151568 5151587 5151584 +
caaacctatgtgtgaagaag

SEQ ID NO: 122 - DNA, 20 bp, Artificial Sequence
  Synthetic oligonucleotide; AAG chr11 5151571 5151590 5151587 +
acctatgtgtgaagaaggag

SEQ ID NO: 123 - DNA, 20 bp, Artificial Sequence
  Synthetic oligonucleotide; AAG chr11 5151574 5151593 5151590 +
tatgtgtgaagaaggagaag

SEQ ID NO: 124 - DNA, 20 bp, Artificial Sequence
  Synthetic oligonucleotide; AGG chr11 5151575 5151594 5151591 +
atgtgtgaagaaggagaaga

SEQ ID NO: 125 - DNA, 20 bp, Artificial Sequence
  Synthetic oligonucleotide; AAG chr11 5151579 5151598 5151595 +
gtgaagaaggagaagaaggc

SEQ ID NO: 126 - DNA, 20 bp, Artificial Sequence
  Synthetic oligonucleotide; AGG chr11 5151580 5151599 5151596 +
tgaagaaggagaagaaggca

SEQ ID NO: 127 - DNA, 20 bp, Artificial Sequence
  Synthetic oligonucleotide; GAG chr11 5151582 5151601 5151598 +
aagaaggagaagaaggcaag

SEQ ID NO: 128 - DNA, 20 bp, Artificial Sequence
  Synthetic oligonucleotide; AGG chr11 5151583 5151602 5151599 +
agaaggagaagaaggcaagg

SEQ ID NO: 129 - DNA, 20 bp, Artificial Sequence
  Synthetic oligonucleotide; TAG chr11 5151586 5151605 5151602 +
aggagaagaaggcaaggagg

SEQ ID NO: 130 - DNA, 20 bp, Artificial Sequence
  Synthetic oligonucleotide; TGG chr11 5151592 5151611 5151608 +
agaaggcaaggaggtagaac

SEQ ID NO: 131 - DNA, 20 bp, Artificial Sequence
  Synthetic oligonucleotide; GAG chr11 5151594 5151613 5151610 +
aaggcaaggaggtagaactg

SEQ ID NO: 132 - DNA, 20 bp, Artificial Sequence
  Synthetic oligonucleotide; AGG chr11 5151595 5151614 5151611 +
aggcaaggaggtagaactgg

SEQ ID NO: 133 - DNA, 20 bp, Artificial Sequence
  Synthetic oligonucleotide; AAG chr11 5151598 5151617 5151614 +
caaggaggtagaactggagg

SEQ ID NO: 134 - DNA, 20 bp, Artificial Sequence
  Synthetic oligonucleotide; CAG chr11 5151604 5151623 5151620 +
ggtagaactggaggaagaca

SEQ ID NO: 135 - DNA, 20 bp, Artificial Sequence
  Synthetic oligonucleotide; GAG chr11 5151611 5151630 5151627 +
ctggaggaagacacagatgt

SEQ ID NO: 136 - DNA, 20 bp, Artificial Sequence
  Synthetic oligonucleotide; CAG chr11 5151619 5151638 5151635 +
agacacagatgtgagcaatg

SEQ ID NO: 137 - DNA, 20 bp, Artificial Sequence
  Synthetic oligonucleotide; AGG chr11 5151620 5151639 5151636 +
gacacagatgtgagcaatgc

SEQ ID NO: 138 - DNA, 20 bp, Artificial Sequence
  Synthetic oligonucleotide; TAG chr11 5151641 5151660 5151657 +
ggtattgaatgctttaaacc

SEQ ID NO: 139 - DNA, 20 bp, Artificial Sequence
  Synthetic oligonucleotide; TGG chr11 5151652 5151671 5151668 +
ctttaaacctagcctccttc

SEQ ID NO: 140 - DNA, 20 bp, Artificial Sequence
  Synthetic oligonucleotide; GGG chr11 5151653 5151672 5151669 +
tttaaacctagcctccttct

SEQ ID NO: 141 - DNA, 20 bp, Artificial Sequence
  Synthetic oligonucleotide; GGG chr11 5151654 5151673 5151670 +
ttaaacctagcctccttctg

SEQ ID NO: 142 - DNA, 20 bp, Artificial Sequence
  Synthetic oligonucleotide; TGG chr11 5151682 5151701 5151698 +
gaaaaactgtgataaatatc

SEQ ID NO: 143 - DNA, 20 bp, Artificial Sequence
  Synthetic oligonucleotide; TAG chr11 5151688 5151707 5151704 +
ctgtgataaatatctggatg

SEQ ID NO: 144 - DNA, 20 bp, Artificial Sequence
  Synthetic oligonucleotide; AGG chr11 5151689 5151708 5151705 +
tgtgataaatatctggatgt

SEQ ID NO: 145 - DNA, 20 bp, Artificial Sequence
  Synthetic oligonucleotide; GAG chr11 5151708 5151727 5151724 +
taggacaatgtgatgaatgt

SEQ ID NO: 146 - DNA, 20 bp, Artificial Sequence
  Synthetic oligonucleotide; AGG chr11 5151709 5151728 5151725 +
aggacaatgtgatgaatgtg

SEQ ID NO: 147 - DNA, 20 bp, Artificial Sequence
  Synthetic oligonucleotide; CAG chr11 5151725 5151744 5151741 +
tgtgaggtcaaatcctgcta

SEQ ID NO: 148 - DNA, 20 bp, Artificial Sequence
  Synthetic oligonucleotide; AAG chr11 5151730 5151749 5151746 +
ggtcaaatcctgctacagtg

SEQ ID NO: 149 - DNA, 20 bp, Artificial Sequence
  Synthetic oligonucleotide; AGG chr11 5151731 5151750 5151747 +
gtcaaatcctgctacagtga

SEQ ID NO: 150 - DNA, 20 bp, Artificial Sequence
  Synthetic oligonucleotide; TAG chr11 5151748 5151767 5151764 +
tgaaggccacaaacaaacca

SEQ ID NO: 151 - DNA, 20 bp, Artificial Sequence
  Synthetic oligonucleotide; TAG chr11 5151780 5151799 5151796 +
acttgaacatttgctgctgc

SEQ ID NO: 152 - DNA, 20 bp, Artificial Sequence
  Synthetic oligonucleotide; TGG chr11 5151791 5151810 5151807 +
tgctgctgctagtttcacaa

SEQ ID NO: 153 - DNA, 20 bp, Artificial Sequence
  Synthetic oligonucleotide; CAG chr11 5151805 5151824 5151821 +
tcacaatggccatatgctca

SEQ ID NO: 154 - DNA, 20 bp, Artificial Sequence
  Synthetic oligonucleotide; TAG chr11 5151808 5151827 5151824 +
caatggccatatgctcacag

SEQ ID NO: 155 - DNA, 20 bp, Artificial Sequence
  Synthetic oligonucleotide; AGG chr11 5151809 5151828 5151825 +
aatggccatatgctcacagt

SEQ ID NO: 156 - DNA, 20 bp, Artificial Sequence
  Synthetic oligonucleotide; GAG chr11 5151811 5151830 5151827 +
tggccatatgctcacagtag

SEQ ID NO: 157 - DNA, 20 bp, Artificial Sequence
  Synthetic oligonucleotide; TGG chr11 5151814 5151833 5151830 +
ccatatgctcacagtaggag

SEQ ID NO: 158 - DNA, 20 bp, Artificial Sequence
  Synthetic oligonucleotide; GGG chr11 5151815 5151834 5151831 +
catatgctcacagtaggagt

SEQ ID NO: 159 - DNA, 20 bp, Artificial Sequence
  Synthetic oligonucleotide; GAG chr11 5151817 5151836 5151833 +
tatgctcacagtaggagtgg

SEQ ID NO: 160 - DNA, 20 bp, Artificial Sequence
  Synthetic oligonucleotide; CGG chr11 5151847 5151866 5151863 +
ttgtgtgataaaattgaaac

SEQ ID NO: 161 - DNA, 20 bp, Artificial Sequence
  Synthetic oligonucleotide; CAG chr11 5151858 5151877 5151874 +
aattgaaaccggcactttat

SEQ ID NO: 162 - DNA, 20 bp, Artificial Sequence
  Synthetic oligonucleotide; TAG chr11 5151864 5151883 5151880 +
aaccggcactttatcagtac

SEQ ID NO: 163 - DNA, 20 bp, Artificial Sequence
  Synthetic oligonucleotide; AGG chr11 5151865 5151884 5151881 +
accggcactttatcagtact

SEQ ID NO: 164 - DNA, 20 bp, Artificial Sequence
  Synthetic oligonucleotide; TGG chr11 5151870 5151889 5151886 +
cactttatcagtactaggca

SEQ ID NO: 165 - DNA, 20 bp, Artificial Sequence
  Synthetic oligonucleotide; GGG chr11 5151871 5151890 5151887 +
actttatcagtactaggcat

SEQ ID NO: 166 - DNA, 20 bp, Artificial Sequence
  Synthetic oligonucleotide; GGG chr11 5151872 5151891 5151888 +
ctttatcagtactaggcatg

SEQ ID NO: 167 - DNA, 20 bp, Artificial Sequence
  Synthetic oligonucleotide; AAG chr11 5151879 5151898 5151895 +
agtactaggcatggggctac

SEQ ID NO: 168 - DNA, 20 bp, Artificial Sequence
  Synthetic oligonucleotide; TAG chr11 5151884 5151903 5151900 +
taggcatggggctacaagaa

SEQ ID NO: 169 - DNA, 20 bp, Artificial Sequence
  Synthetic oligonucleotide; CAG chr11 5151887 5151906 5151903 +
gcatggggctacaagaatag

SEQ ID NO: 170 - DNA, 20 bp, Artificial Sequence
  Synthetic oligonucleotide; GAG chr11 5151894 5151913 5151910 +
gctacaagaatagcagccct

SEQ ID NO: 171 - DNA, 20 bp, Artificial Sequence
  Synthetic oligonucleotide; TAG chr11 5151905 5151924 5151921 +
agcagccctgagtacgacca

SEQ ID NO: 172 - DNA, 20 bp, Artificial Sequence
  Synthetic oligonucleotide; AAG chr11 5151924 5151943 5151940 +
atagttcctatctgaatgac

SEQ ID NO: 173 - DNA, 20 bp, Artificial Sequence
  Synthetic oligonucleotide; TGG chr11 5151928 5151947 5151944 +
ttcctatctgaatgacaagc

SEQ ID NO: 174 - DNA, 20 bp, Artificial Sequence
  Synthetic oligonucleotide; TGG chr11 5151931 5151950 5151947 +
ctatctgaatgacaagctgg

SEQ ID NO: 175 - DNA, 20 bp, Artificial Sequence
  Synthetic oligonucleotide; GGG chr11 5151932 5151951 5151948 +
tatctgaatgacaagctggt

SEQ ID NO: 176 - DNA, 20 bp, Artificial Sequence
  Synthetic oligonucleotide; AAG chr11 5151937 5151956 5151953 +
gaatgacaagctggtgggtg

SEQ ID NO: 177 - DNA, 20 bp, Artificial Sequence
  Synthetic oligonucleotide; TGG chr11 5151944 5151963 5151960 +
aagctggtgggtgaagatgt

SEQ ID NO: 178 - DNA, 20 bp, Artificial Sequence
  Synthetic oligonucleotide; TAG chr11 5151954 5151973 5151970 +
gtgaagatgttggcatgtct

SEQ ID NO: 179 - DNA, 20 bp, Artificial Sequence
  Synthetic oligonucleotide; TGG chr11 5151957 5151976 5151973 +
aagatgttggcatgtcttag

SEQ ID NO: 180 - DNA, 20 bp, Artificial Sequence
  Synthetic oligonucleotide; CAG chr11 5151964 5151983 5151980 +
tggcatgtcttagtggataa

SEQ ID NO: 181 - DNA, 20 bp, Artificial Sequence
  Synthetic oligonucleotide; TGG chr11 5151968 5151987 5151984 +
atgtcttagtggataacaga

SEQ ID NO: 182 - DNA, 20 bp, Artificial Sequence
  Synthetic oligonucleotide; CGG chr11 5151979 5151998 5151995 +
gataacagatggccacataa

SEQ ID NO: 183 - DNA, 20 bp, Artificial Sequence
  Synthetic oligonucleotide; CAG chr11 5151984 5152003 5152000 +
cagatggccacataacggtc

SEQ ID NO: 184 - DNA, 20 bp, Artificial Sequence
  Synthetic oligonucleotide; AGG chr11 5151985 5152004 5152001 +
agatggccacataacggtcc

SEQ ID NO: 185 - DNA, 20 bp, Artificial Sequence
  Synthetic oligonucleotide; GGG chr11 5151986 5152005 5152002 +
gatggccacataacggtcca

SEQ ID NO: 186 - DNA, 20 bp, Artificial Sequence
  Synthetic oligonucleotide; TGG chr11 5151992 5152011 5152008 +
cacataacggtccagggcca

SEQ ID NO: 187 - DNA, 20 bp, Artificial Sequence
  Synthetic oligonucleotide; AAG chr11 5151999 5152018 5152015 +
cggtccagggccatggccac

SEQ ID NO: 188 - DNA, 20 bp, Artificial Sequence
  Synthetic oligonucleotide; AGG chr11 5152000 5152019 5152016 +
ggtccagggccatggccaca

SEQ ID NO: 189 - DNA, 20 bp, Artificial Sequence
  Synthetic oligonucleotide; TGG chr11 5152030 5152049 5152046 +
actctataccctgcaatgtg

SEQ ID NO: 190 - DNA, 20 bp, Artificial Sequence
  Synthetic oligonucleotide; AAG chr11 5152047 5152066 5152063 +
gtgtggatgaaccacatttg

SEQ ID NO: 191 - DNA, 20 bp, Artificial Sequence
  Synthetic oligonucleotide; AAG chr11 5152051 5152070 5152067 +
ggatgaaccacatttgaagc

SEQ ID NO: 192 - DNA, 20 bp, Artificial Sequence
  Synthetic oligonucleotide; CAG chr11 5152054 5152073 5152070 +
tgaaccacatttgaagcaag

SEQ ID NO: 193 - DNA, 20 bp, Artificial Sequence
  Synthetic oligonucleotide; AGG chr11 5152055 5152074 5152071 +
gaaccacatttgaagcaagc

SEQ ID NO: 194 - DNA, 20 bp, Artificial Sequence
  Synthetic oligonucleotide; TAG chr11 5152066 5152085 5152082 +
gaagcaagcaggaatcaaaa

SEQ ID NO: 195 - DNA, 20 bp, Artificial Sequence
  Synthetic oligonucleotide; CAG chr11 5152073 5152092 5152089 +
gcaggaatcaaaatagattt

SEQ ID NO: 196 - DNA, 20 bp, Artificial Sequence
  Synthetic oligonucleotide; AGG chr11 5152074 5152093 5152090 +
caggaatcaaaatagatttc

SEQ ID NO: 197 - DNA, 20 bp, Artificial Sequence
  Synthetic oligonucleotide; CAG chr11 5152087 5152106 5152103 +
agatttcaggcacattaaac

SEQ ID NO: 198 - DNA, 20 bp, Artificial Sequence
  Synthetic oligonucleotide; AAG chr11 5152098 5152117 5152114 +
acattaaaccagaatattcc

SEQ ID NO: 199 - DNA, 20 bp, Artificial Sequence
  Synthetic oligonucleotide; TGG chr11 5152107 5152126 5152123 +
cagaatattccaagcatctt

SEQ ID NO: 200 - DNA, 20 bp, Artificial Sequence
  Synthetic oligonucleotide; TAG chr11 5152121 5152140 5152137 +
catctttggcataatgctgc

SEQ ID NO: 201 - DNA, 20 bp, Artificial Sequence
  Synthetic oligonucleotide; AAG chr11 5152125 5152144 5152141 +
tttggcataatgctgctagc

SEQ ID NO: 202 - DNA, 20 bp, Artificial Sequence
  Synthetic oligonucleotide; TGG chr11 5152139 5152158 5152155 +
gctagcaagtgcaatgtctg

SEQ ID NO: 203 - DNA, 20 bp, Artificial Sequence
  Synthetic oligonucleotide; TAG chr11 5152146 5152165 5152162 +
agtgcaatgtctgtggctcc

SEQ ID NO: 204 - DNA, 20 bp, Artificial Sequence
  Synthetic oligonucleotide; AAG chr11 5152156 5152175 5152172 +
ctgtggctcctagcatgcct

SEQ ID NO: 205 - DNA, 20 bp, Artificial Sequence
  Synthetic oligonucleotide; AAG chr11 5152168 5152187 5152184 +
gcatgcctaagaaaatgtac

SEQ ID NO: 206 - DNA, 20 bp, Artificial Sequence
  Synthetic oligonucleotide; AGG chr11 5152169 5152188 5152185 +
catgcctaagaaaatgtaca

SEQ ID NO: 207 - DNA, 20 bp, Artificial Sequence
  Synthetic oligonucleotide; GGG chr11 5152170 5152189 5152186 +
atgcctaagaaaatgtacaa

SEQ ID NO: 208 - DNA, 20 bp, Artificial Sequence
  Synthetic oligonucleotide; TGG chr11 5152177 5152196 5152193 +
agaaaatgtacaagggctca

SEQ ID NO: 209 - DNA, 20 bp, Artificial Sequence
  Synthetic oligonucleotide; GAG chr11 5152179 5152198 5152195 +
aaaatgtacaagggctcatg

SEQ ID NO: 210 - DNA, 20 bp, Artificial Sequence
  Synthetic oligonucleotide; CAG chr11 5152190 5152209 5152206 +
gggctcatggagactgcgct

SEQ ID NO: 211 - DNA, 20 bp, Artificial Sequence
  Synthetic oligonucleotide; CAG chr11 5152206 5152225 5152222 +
cgctcagatttgatgatgct

SEQ ID NO: 212 - DNA, 20 bp, Artificial Sequence
  Synthetic oligonucleotide; AAG chr11 5152209 5152228 5152225 +
tcagatttgatgatgctcag

SEQ ID NO: 213 - DNA, 20 bp, Artificial Sequence
  Synthetic oligonucleotide; AAG chr11 5152213 5152232 5152229 +
atttgatgatgctcagaagc

SEQ ID NO: 214 - DNA, 20 bp, Artificial Sequence
  Synthetic oligonucleotide; AGG chr11 5152214 5152233 5152230 +
tttgatgatgctcagaagca

SEQ ID NO: 215 - DNA, 20 bp, Artificial Sequence
  Synthetic oligonucleotide; TAG chr11 5152229 5152248 5152245 +
aagcaaggaatttccaatca

SEQ ID NO: 216 - DNA, 20 bp, Artificial Sequence
  Synthetic oligonucleotide; GAG chr11 5152236 5152255 5152252 +
gaatttccaatcatagcaat

SEQ ID NO: 217 - DNA, 20 bp, Artificial Sequence
  Synthetic oligonucleotide; TGG chr11 5152244 5152263 5152260 +
aatcatagcaatgagataaa

SEQ ID NO: 218 - DNA, 20 bp, Artificial Sequence
  Synthetic oligonucleotide; CAG chr11 5152249 5152268 5152265 +
tagcaatgagataaatggca

SEQ ID NO: 219 - DNA, 20 bp, Artificial Sequence
  Synthetic oligonucleotide; TGG chr11 5152254 5152273 5152270 +
atgagataaatggcacagaa

SEQ ID NO: 220 - DNA, 20 bp, Artificial Sequence
  Synthetic oligonucleotide; CAG chr11 5152267 5152286 5152283 +
cacagaatggaatcccaatc

SEQ ID NO: 221 - DNA, 20 bp, Artificial Sequence
  Synthetic oligonucleotide; CAG chr11 5152277 5152296 5152293 +
aatcccaatccagcactgca

SEQ ID NO: 222 - DNA, 20 bp, Artificial Sequence
  Synthetic oligonucleotide; TAG chr11 5152284 5152303 5152300 +
atccagcactgcacagattc

SEQ ID NO: 223 - DNA, 20 bp, Artificial Sequence
  Synthetic oligonucleotide; AGG chr11 5152285 5152304 5152301 +
tccagcactgcacagattct

SEQ ID NO: 224 - DNA, 20 bp, Artificial Sequence
  Synthetic oligonucleotide; TGG chr11 5152290 5152309 5152306 +
cactgcacagattctaggcc

SEQ ID NO: 225 - DNA, 20 bp, Artificial Sequence
  Synthetic oligonucleotide; GGG chr11 5152291 5152310 5152307 +
actgcacagattctaggcct

SEQ ID NO: 226 - DNA, 20 bp, Artificial Sequence
  Synthetic oligonucleotide; TAG chr11 5152302 5152321 5152318 +
tctaggcctgggatccctac

SEQ ID NO: 227 - DNA, 20 bp, Artificial Sequence
  Synthetic oligonucleotide; CAG chr11 5152313 5152332 5152329 +
gatccctactagtgtcaaca

SEQ ID NO: 228 - DNA, 20 bp, Artificial Sequence
  Synthetic oligonucleotide; GAG chr11 5152315 5152334 5152331 +
tccctactagtgtcaacaca

SEQ ID NO: 229 - DNA, 20 bp, Artificial Sequence
  Synthetic oligonucleotide; AGG chr11 5152316 5152335 5152332 +
ccctactagtgtcaacacag

SEQ ID NO: 230 - DNA, 20 bp, Artificial Sequence
  Synthetic oligonucleotide; GGG chr11 5152317 5152336 5152333 +
cctactagtgtcaacacaga

SEQ ID NO: 231 - DNA, 20 bp, Artificial Sequence
  Synthetic oligonucleotide; TAG chr11 5152324 5152343 5152340 +
gtgtcaacacagagggcatg

SEQ ID NO: 232 - DNA, 20 bp, Artificial Sequence
  Synthetic oligonucleotide; TGG chr11 5152337 5152356 5152353 +
gggcatgtagactgtgatgt

SEQ ID NO: 233 - DNA, 20 bp, Artificial Sequence
  Synthetic oligonucleotide; TGG chr11 5152343 5152362 5152359 +
gtagactgtgatgttggaaa

SEQ ID NO: 234 - DNA, 20 bp, Artificial Sequence
  Synthetic oligonucleotide; TAG chr11 5152349 5152368 5152365 +
tgtgatgttggaaatggaca

SEQ ID NO: 235 - DNA, 20 bp, Artificial Sequence
  Synthetic oligonucleotide; TGG chr11 5152358 5152377 5152374 +
ggaaatggacatagtgtcgt

SEQ ID NO: 236 - DNA, 20 bp, Artificial Sequence
  Synthetic oligonucleotide; GGG chr11 5152359 5152378 5152375 +
gaaatggacatagtgtcgtt

SEQ ID NO: 237 - DNA, 20 bp, Artificial Sequence
  Synthetic oligonucleotide; AAG chr11 5152379 5152398 5152395 +
gggtctcctgatgcaaacaa

SEQ ID NO: 238 - DNA, 20 bp, Artificial Sequence
  Synthetic oligonucleotide; AAG chr11 5152382 5152401 5152398 +
tctcctgatgcaaacaaaag

SEQ ID NO: 239 - DNA, 20 bp, Artificial Sequence
  Synthetic oligonucleotide; CAG chr11 5152390 5152409 5152406 +
tgcaaacaaaagaagtttct

SEQ ID NO: 240 - DNA, 20 bp, Artificial Sequence
  Synthetic oligonucleotide; CAG chr11 5152394 5152413 5152410 +
aacaaaagaagtttctcagt

SEQ ID NO: 241 - DNA, 20 bp, Artificial Sequence
  Synthetic oligonucleotide; GAG chr11 5152446 5152465 5152462 +
ttctccaaactcattatatt

SEQ ID NO: 242 - DNA, 20 bp, Artificial Sequence
  Synthetic oligonucleotide; TGG chr11 5152460 5152479 5152476 +
tatattgagtctgtctgatt

SEQ ID NO: 243 - DNA, 20 bp, Artificial Sequence
  Synthetic oligonucleotide; GGG chr11 5152461 5152480 5152477 +
atattgagtctgtctgattt

SEQ ID NO: 244 - DNA, 20 bp, Artificial Sequence
  Synthetic oligonucleotide; CAG chr11 5152493 5152512 5152509 +
aaaatcatccatcttattca

SEQ ID NO: 245 - DNA, 20 bp, Artificial Sequence
  Synthetic oligonucleotide; AAG chr11 5152502 5152521 5152518 +
catcttattcacagttttga

SEQ ID NO: 246 - DNA, 20 bp, Artificial Sequence
  Synthetic oligonucleotide; AGG chr11 5152503 5152522 5152519 +
atcttattcacagttttgaa

SEQ ID NO: 247 - DNA, 20 bp, Artificial Sequence
  Synthetic oligonucleotide; AAG chr11 5152508 5152527 5152524 +
attcacagttttgaaaggaa

SEQ ID NO: 248 - DNA, 20 bp, Artificial Sequence
  Synthetic oligonucleotide; TGG chr11 5152512 5152531 5152528 +
acagttttgaaaggaaaaga

SEQ ID NO: 249 - DNA, 20 bp, Artificial Sequence
  Synthetic oligonucleotide; TGG chr11 5152520 5152539 5152536 +
gaaaggaaaagatggattca

SEQ ID NO: 250 - DNA, 20 bp, Artificial Sequence
  Synthetic oligonucleotide; GAG chr11 5152522 5152541 5152538 +
aaggaaaagatggattcatg

SEQ ID NO: 251 - DNA, 20 bp, Artificial Sequence
  Synthetic oligonucleotide; CAG chr11 5152540 5152559 5152556 +
tggagatacatcactgtttt

SEQ ID NO: 252 - DNA, 20 bp, Artificial Sequence
  Synthetic oligonucleotide; AGG chr11 5152541 5152560 5152557 +
ggagatacatcactgttttc

SEQ ID NO: 253 - DNA, 20 bp, Artificial Sequence
  Synthetic oligonucleotide; TGG chr11 5152544 5152563 5152560 +
gatacatcactgttttcagg

SEQ ID NO: 254 - DNA, 20 bp, Artificial Sequence
  Synthetic oligonucleotide; GGG chr11 5152545 5152564 5152561 +
atacatcactgttttcaggt

SEQ ID NO: 255 - DNA, 20 bp, Artificial Sequence
  Synthetic oligonucleotide; GGG chr11 5152546 5152565 5152562 +
tacatcactgttttcaggtg

SEQ ID NO: 256 - DNA, 20 bp, Artificial Sequence
  Synthetic oligonucleotide; CAG chr11 5152555 5152574 5152571 +
gttttcaggtggggcattca

SEQ ID NO: 257 - DNA, 20 bp, Artificial Sequence
  Synthetic oligonucleotide; AGG chr11 5152556 5152575 5152572 +
ttttcaggtggggcattcac

SEQ ID NO: 258 - DNA, 20 bp, Artificial Sequence
  Synthetic oligonucleotide; TAG chr11 5152572 5152591 5152588 +
tcacaggcactgtgccataa

SEQ ID NO: 259 - DNA, 20 bp, Artificial Sequence
  Synthetic oligonucleotide; AGG chr11 5152573 5152592 5152589 +
cacaggcactgtgccataat

SEQ ID NO: 260 - DNA, 20 bp, Artificial Sequence
  Synthetic oligonucleotide; TGG chr11 5152588 5152607 5152604 +
ataataggatgttatgtgca

SEQ ID NO: 261 - DNA, 20 bp, Artificial Sequence
  Synthetic oligonucleotide; TAG chr11 5152605 5152624 5152621 +
gcatggcaatccaaatacat

SEQ ID NO: 262 - DNA, 20 bp, Artificial Sequence
  Synthetic oligonucleotide; CAG chr11 5152611 5152630 5152627 +
caatccaaatacattagaac

SEQ ID NO: 263 - DNA, 20 bp, Artificial Sequence
  Synthetic oligonucleotide; TGG chr11 5152624 5152643 5152640 +
ttagaaccagcaaaatcacc

SEQ ID NO: 264 - DNA, 20 bp, Artificial Sequence
  Synthetic oligonucleotide; CAG chr11 5152628 5152647 5152644 +
aaccagcaaaatcacctgga

SEQ ID NO: 265 - DNA, 20 bp, Artificial Sequence
  Synthetic oligonucleotide; AGG chr11 5152629 5152648 5152645 +
accagcaaaatcacctggac

SEQ ID NO: 266 - DNA, 20 bp, Artificial Sequence
  Synthetic oligonucleotide; GGG chr11 5152630 5152649 5152646 +
ccagcaaaatcacctggaca

SEQ ID NO: 267 - DNA, 20 bp, Artificial Sequence
  Synthetic oligonucleotide; GGG chr11 5152631 5152650 5152647 +
cagcaaaatcacctggacag

SEQ ID NO: 268 - DNA, 20 bp, Artificial Sequence
  Synthetic oligonucleotide; TGG chr11 5152636 5152655 5152652 +
aaatcacctggacaggggat

SEQ ID NO: 269 - DNA, 20 bp, Artificial Sequence
  Synthetic oligonucleotide; TGG chr11 5152644 5152663 5152660 +
tggacaggggattggactac

SEQ ID NO: 270 - DNA, 20 bp, Artificial Sequence
  Synthetic oligonucleotide; CAG chr11 5152648 5152667 5152664 +
caggggattggactactggc

SEQ ID NO: 271 - DNA, 20 bp, Artificial Sequence
  Synthetic oligonucleotide; CAG chr11 5152666 5152685 5152682 +
gccagtctgttatttctttc

SEQ ID NO: 272 - DNA, 20 bp, Artificial Sequence
  Synthetic oligonucleotide; TGG chr11 5152674 5152693 5152690 +
gttatttctttccagacctg

SEQ ID NO: 273 - DNA, 20 bp, Artificial Sequence
  Synthetic oligonucleotide; AAG chr11 5152688 5152707 5152704 +
gacctgtggacaaaaaaaaa

SEQ ID NO: 274 - DNA, 20 bp, Artificial Sequence
  Synthetic oligonucleotide; AAG chr11 5152691 5152710 5152707 +
ctgtggacaaaaaaaaaaag

SEQ ID NO: 275 - DNA, 20 bp, Artificial Sequence
  Synthetic oligonucleotide; TGG chr11 5152705 5152724 5152721 +
aaaaagaagtttatttttat

SEQ ID NO: 276 - DNA, 20 bp, Artificial Sequence
  Synthetic oligonucleotide; TGG chr11 5152724 5152743 5152740 +
ttggacattgcattttaatt

SEQ ID NO: 277 - DNA, 20 bp, Artificial Sequence
  Synthetic oligonucleotide; CAG chr11 5152755 5152774 5152771 +
cctctccatatttcacattt

SEQ ID NO: 278 - DNA, 20 bp, Artificial Sequence
  Synthetic oligonucleotide; TAG chr11 5152767 5152786 5152783 +
tcacatttcagctattcctc

SEQ ID NO: 279 - DNA, 20 bp, Artificial Sequence
  Synthetic oligonucleotide; AAG chr11 5152795 5152814 5152811 +
aactatttccaattttcttt

SEQ ID NO: 280 - DNA, 20 bp, Artificial Sequence
  Synthetic oligonucleotide; TAG chr11 5152805 5152824 5152821 +
aattttctttaagaacattt

SEQ ID NO: 281 - DNA, 20 bp, Artificial Sequence
  Synthetic oligonucleotide; AAG chr11 5152810 5152829 5152826 +
tctttaagaacattttagac

SEQ ID NO: 282 - DNA, 20 bp, Artificial Sequence
  Synthetic oligonucleotide; CAG chr11 5152821 5152840 5152837 +
attttagacaagcaaattaa

SEQ ID NO: 283 - DNA, 20 bp, Artificial Sequence
  Synthetic oligonucleotide; CAG chr11 5152832 5152851 5152848 +
gcaaattaacagactctgac

SEQ ID NO: 284 - DNA, 20 bp, Artificial Sequence
  Synthetic oligonucleotide; TGG chr11 5152840 5152859 5152856 +
acagactctgaccagtacat

SEQ ID NO: 285 - DNA, 20 bp, Artificial Sequence
  Synthetic oligonucleotide; AAG chr11 5152848 5152867 5152864 +
tgaccagtacattggtgtaa

SEQ ID NO: 286 - DNA, 20 bp, Artificial Sequence
  Synthetic oligonucleotide; AAG chr11 5152862 5152881 5152878 +
gtgtaaaagattcccaatga

SEQ ID NO: 287 - DNA, 20 bp, Artificial Sequence
  Synthetic oligonucleotide; GAG chr11 5152864 5152883 5152880 +
gtaaaagattcccaatgaaa

SEQ ID NO: 288 - DNA, 20 bp, Artificial Sequence
  Synthetic oligonucleotide; TAG chr11 5152869 5152888 5152885 +
agattcccaatgaaagagaa

SEQ ID NO: 289 - DNA, 20 bp, Artificial Sequence
  Synthetic oligonucleotide; GAG chr11 5152871 5152890 5152887 +
attcccaatgaaagagaata

SEQ ID NO: 290 - DNA, 20 bp, Artificial Sequence
  Synthetic oligonucleotide; AGG chr11 5152872 5152891 5152888 +
ttcccaatgaaagagaatag

SEQ ID NO: 291 - DNA, 20 bp, Artificial Sequence
  Synthetic oligonucleotide; TAG chr11 5152875 5152894 5152891 +
ccaatgaaagagaatagagg

SEQ ID NO: 292 - DNA, 20 bp, Artificial Sequence
  Synthetic oligonucleotide; AAG chr11 5152893 5152912 5152909 +
ggtagaaataattgacaccc

SEQ ID NO: 293 - DNA, 20 bp, Artificial Sequence
  Synthetic oligonucleotide; CAG chr11 5152921 5152940 5152937 +
aatatatttctttttatatt

SEQ ID NO: 294 - DNA, 20 bp, Artificial Sequence
  Synthetic oligonucleotide; AAG chr11 5152933 5152952 5152949 +
tttatattcagaataatgta

SEQ ID NO: 295 - DNA, 20 bp, Artificial Sequence
  Synthetic oligonucleotide; GAG chr11 5152935 5152954 5152951 +
tatattcagaataatgtaaa

SEQ ID NO: 296 - DNA, 20 bp, Artificial Sequence
  Synthetic oligonucleotide; TAG chr11 5152945 5152964 5152961 +
ataatgtaaagagaatgctt

SEQ ID NO: 297 - DNA, 20 bp, Artificial Sequence
  Synthetic oligonucleotide; GAG chr11 5152982 5153001 5152998 +
tttatacttttgacaaatct

SEQ ID NO: 298 - DNA, 20 bp, Artificial Sequence
  Synthetic oligonucleotide; AAG chr11 5152988 5153007 5153004 +
cttttgacaaatctgagcca

SEQ ID NO: 299 - DNA, 20 bp, Artificial Sequence
  Synthetic oligonucleotide; TGG chr11 5152995 5153014 5153011 +
caaatctgagccaaagctcc

SEQ ID NO: 300 - DNA, 20 bp, Artificial Sequence
  Synthetic oligonucleotide; AAG chr11 5153018 5153037 5153034 +
ttgctttttatatttcttta

SEQ ID NO: 301 - DNA, 20 bp, Artificial Sequence
  Synthetic oligonucleotide; AAG chr11 5153024 5153043 5153040 +
tttatatttctttaaagtta

SEQ ID NO: 302 - DNA, 20 bp, Artificial Sequence
  Synthetic oligonucleotide; AGG chr11 5153025 5153044 5153041 +
ttatatttctttaaagttaa

SEQ ID NO: 303 - DNA, 20 bp, Artificial Sequence
  Synthetic oligonucleotide; GGG chr11 5153026 5153045 5153042 +
tatatttctttaaagttaaa

SEQ ID NO: 304 - DNA, 20 bp, Artificial Sequence
  Synthetic oligonucleotide; CAG chr11 5153057 5153076 5153073 +
tttttcctatatattttaaa

SEQ ID NO: 305 - DNA, 20 bp, Artificial Sequence
  Synthetic oligonucleotide; GAG chr11 5153081 5153100 5153097 +
tgaaactcttgaaatgttgt

SEQ ID NO: 306 - DNA, 20 bp, Artificial Sequence
  Synthetic oligonucleotide; TGG chr11 5153106 5153125 5153122 +
taaaattttaatacacttta

SEQ ID NO: 307 - DNA, 20 bp, Artificial Sequence
  Synthetic oligonucleotide; TAG chr11 5153115 5153134 5153131 +
aatacactttatggaatatc

SEQ ID NO: 308 - DNA, 20 bp, Artificial Sequence
  Synthetic oligonucleotide; GAG chr11 5153117 5153136 5153133 +
tacactttatggaatatcta

SEQ ID NO: 309 - DNA, 20 bp, Artificial Sequence
  Synthetic oligonucleotide; GAG chr11 5153119 5153138 5153135 +
cactttatggaatatctaga

SEQ ID NO: 310 - DNA, 20 bp, Artificial Sequence
  Synthetic oligonucleotide; AAG chr11 5153122 5153141 5153138 +
tttatggaatatctagagag

SEQ ID NO: 311 - DNA, 20 bp, Artificial Sequence
  Synthetic oligonucleotide; AGG chr11 5153123 5153142 5153139 +
ttatggaatatctagagaga

SEQ ID NO: 312 - DNA, 20 bp, Artificial Sequence
  Synthetic oligonucleotide; AAG chr11 5153133 5153152 5153149 +
tctagagagaaggaactgct

SEQ ID NO: 313 - DNA, 20 bp, Artificial Sequence
  Synthetic oligonucleotide; AGG chr11 5153134 5153153 5153150 +
ctagagagaaggaactgcta

SEQ ID NO: 314 - DNA, 20 bp, Artificial Sequence
  Synthetic oligonucleotide; GGG chr11 5153135 5153154 5153151 +
tagagagaaggaactgctaa

SEQ ID NO: 315 - DNA, 20 bp, Artificial Sequence
  Synthetic oligonucleotide; AAG chr11 5153140 5153159 5153156 +
agaaggaactgctaagggac

SEQ ID NO: 316 - DNA, 20 bp, Artificial Sequence
  Synthetic oligonucleotide; GAG chr11 5153145 5153164 5153161 +
gaactgctaagggacaagat

SEQ ID NO: 317 - DNA, 20 bp, Artificial Sequence
  Synthetic oligonucleotide; CAG chr11 5153148 5153167 5153164 +
ctgctaagggacaagatgag

SEQ ID NO: 318 - DNA, 20 bp, Artificial Sequence
  Synthetic oligonucleotide; CAG chr11 5153151 5153170 5153167 +
ctaagggacaagatgagcag

SEQ ID NO: 319 - DNA, 20 bp, Artificial Sequence
  Synthetic oligonucleotide; CGG chr11 5153163 5153182 5153179 +
atgagcagcagcaatgccta

SEQ ID NO: 320 - DNA, 20 bp, Artificial Sequence
  Synthetic oligonucleotide; AAG chr11 5153167 5153186 5153183 +
gcagcagcaatgcctacggc

SEQ ID NO: 321 - DNA, 20 bp, Artificial Sequence
  Synthetic oligonucleotide; GAG chr11 5153169 5153188 5153185 +
agcagcaatgcctacggcaa

SEQ ID NO: 322 - DNA, 20 bp, Artificial Sequence
  Synthetic oligonucleotide; CAG chr11 5153192 5153211 5153208 +
aacttgctcctgataaacca

SEQ ID NO: 323 - DNA, 20 bp, Artificial Sequence
  Synthetic oligonucleotide; TGG chr11 5153206 5153225 5153222 +
aaaccacagatactgaataa

SEQ ID NO: 324 - DNA, 20 bp, Artificial Sequence
  Synthetic oligonucleotide; GGG chr11 5153207 5153226 5153223 +
aaccacagatactgaataat

SEQ ID NO: 325 - DNA, 20 bp, Artificial Sequence
  Synthetic oligonucleotide; TAG chr11 5153223 5153242 5153239 +
taatgggcaaatgaatcatt

SEQ ID NO: 326 - DNA, 20 bp, Artificial Sequence
  Synthetic oligonucleotide; CAG chr11 5153227 5153246 5153243 +
gggcaaatgaatcatttagc

SEQ ID NO: 327 - DNA, 20 bp, Artificial Sequence
  Synthetic oligonucleotide; TAG chr11 5153232 5153251 5153248 +
aatgaatcatttagccagaa

SEQ ID NO: 328 - DNA, 20 bp, Artificial Sequence
  Synthetic oligonucleotide; GAG chr11 5153234 5153253 5153250 +
tgaatcatttagccagaata

SEQ ID NO: 329 - DNA, 20 bp, Artificial Sequence
  Synthetic oligonucleotide; CAG chr11 5153239 5153258 5153255 +
catttagccagaatagagtc

SEQ ID NO: 330 - DNA, 20 bp, Artificial Sequence
  Synthetic oligonucleotide; TGG chr11 5153247 5153266 5153263 +
cagaatagagtccagtttcc

SEQ ID NO: 331 - DNA, 20 bp, Artificial Sequence
  Synthetic oligonucleotide; CAG chr11 5153262 5153281 5153278 +
tttcctggttttaaaatgtt

SEQ ID NO: 332 - DNA, 20 bp, Artificial Sequence
  Synthetic oligonucleotide; GAG chr11 5153264 5153283 5153280 +
tcctggttttaaaatgttca

SEQ ID NO: 333 - DNA, 20 bp, Artificial Sequence
  Synthetic oligonucleotide; TAG chr11 5153274 5153293 5153290 +
aaaatgttcagagttataat

SEQ ID NO: 334 - DNA, 20 bp, Artificial Sequence
  Synthetic oligonucleotide; TAG chr11 5153284 5153303 5153300 +
gagttataattagcataata

SEQ ID NO: 335 - DNA, 20 bp, Artificial Sequence
  Synthetic oligonucleotide; AAG chr11 5153294 5153313 5153310 +
tagcataatatagcccaata

SEQ ID NO: 336 - DNA, 20 bp, Artificial Sequence
  Synthetic oligonucleotide; AGG chr11 5153295 5153314 5153311 +
agcataatatagcccaataa

SEQ ID NO: 337 - DNA, 20 bp, Artificial Sequence
  Synthetic oligonucleotide; TAG chr11 5153303 5153322 5153319 +
atagcccaataaaggctcat

SEQ ID NO: 338 - DNA, 20 bp, Artificial Sequence
  Synthetic oligonucleotide; TAG chr11 5153320 5153339 5153336 +
cattagttcttaatgaaata

SEQ ID NO: 339 - DNA, 20 bp, Artificial Sequence
  Synthetic oligonucleotide; AGG chr11 5153321 5153340 5153337 +
attagttcttaatgaaatat

SEQ ID NO: 340 - DNA, 20 bp, Artificial Sequence
  Synthetic oligonucleotide; GAG chr11 5153325 5153344 5153341 +
gttcttaatgaaatataggt

SEQ ID NO: 341 - DNA, 20 bp, Artificial Sequence
  Synthetic oligonucleotide; GAG chr11 5153346 5153365 5153362 +
agatgcttatataattttgt

SEQ ID NO: 342 - DNA, 20 bp, Artificial Sequence
  Synthetic oligonucleotide; AAG chr11 5153358 5153377 5153374 +
aattttgtgagctctgacat

SEQ ID NO: 343 - DNA, 20 bp, Artificial Sequence
  Synthetic oligonucleotide; TAG chr11 5153365 5153384 5153381 +
tgagctctgacataagaaat

SEQ ID NO: 344 - DNA, 20 bp, Artificial Sequence
  Synthetic oligonucleotide; AAG chr11 5153379 5153398 5153395 +
agaaattagtaaaaataaaa

SEQ ID NO: 345 - DNA, 20 bp, Artificial Sequence
  Synthetic oligonucleotide; AAG chr11 5153385 5153404 5153401 +
tagtaaaaataaaaaagcta

SEQ ID NO: 346 - DNA, 20 bp, Artificial Sequence
  Synthetic oligonucleotide; AGG chr11 5153386 5153405 5153402 +
agtaaaaataaaaaagctaa

SEQ ID NO: 347 - DNA, 20 bp, Artificial Sequence
  Synthetic oligonucleotide; CAG chr11 5153390 5153409 5153406 +
aaaataaaaaagctaaagga

SEQ ID NO: 348 - DNA, 20 bp, Artificial Sequence
  Synthetic oligonucleotide; TAG chr11 5153399 5153418 5153415 +
aagctaaaggacagatttct

SEQ ID NO: 349 - DNA, 20 bp, Artificial Sequence
  Synthetic oligonucleotide; AAG chr11 5153402 5153421 5153418 +
ctaaaggacagatttcttag

SEQ ID NO: 350 - DNA, 20 bp, Artificial Sequence
  Synthetic oligonucleotide; AAG chr11 5153405 5153424 5153421 +
aaggacagatttcttagaag

SEQ ID NO: 351 - DNA, 20 bp, Artificial Sequence
  Synthetic oligonucleotide; TAG chr11 5153415 5153434 5153431 +
ttcttagaagaagtcaaatg

SEQ ID NO: 352 - DNA, 20 bp, Artificial Sequence
  Synthetic oligonucleotide; TAG chr11 5153421 5153440 5153437 +
gaagaagtcaaatgtagaac

SEQ ID NO: 353 - DNA, 20 bp, Artificial Sequence
  Synthetic oligonucleotide; CAG chr11 5153425 5153444 5153441 +
aagtcaaatgtagaactaga

SEQ ID NO: 354 - DNA, 20 bp, Artificial Sequence
  Synthetic oligonucleotide; AGG chr11 5153426 5153445 5153442 +
agtcaaatgtagaactagac

SEQ ID NO: 355 - DNA, 20 bp, Artificial Sequence
  Synthetic oligonucleotide; GGG chr11 5153427 5153446 5153443 +
gtcaaatgtagaactagaca

SEQ ID NO: 356 - DNA, 20 bp, Artificial Sequence
  Synthetic oligonucleotide; AAG chr11 5153430 5153449 5153446 +
aaatgtagaactagacaggg

SEQ ID NO: 357 - DNA, 20 bp, Artificial Sequence
  Synthetic oligonucleotide; CAG chr11 5153434 5153453 5153450 +
gtagaactagacagggaaga

SEQ ID NO: 358 - DNA, 20 bp, Artificial Sequence
  Synthetic oligonucleotide; AGG chr11 5153435 5153454 5153451 +
tagaactagacagggaagac

SEQ ID NO: 359 - DNA, 20 bp, Artificial Sequence
  Synthetic oligonucleotide; TGG chr11 5153445 5153464 5153461 +
cagggaagacaggacaaact

SEQ ID NO: 360 - DNA, 20 bp, Artificial Sequence
  Synthetic oligonucleotide; GGG chr11 5153446 5153465 5153462 +
agggaagacaggacaaactt

SEQ ID NO: 361 - DNA, 20 bp, Artificial Sequence
  Synthetic oligonucleotide; GGG chr11 5153447 5153466 5153463 +
gggaagacaggacaaacttg

SEQ ID NO: 362 - DNA, 20 bp, Artificial Sequence
  Synthetic oligonucleotide; GAG chr11 5153449 5153468 5153465 +
gaagacaggacaaacttggg

SEQ ID NO: 363 - DNA, 20 bp, Artificial Sequence
  Synthetic oligonucleotide; GAG chr11 5153461 5153480 5153477 +
aacttggggagactaaaatt

SEQ ID NO: 364 - DNA, 20 bp, Artificial Sequence
  Synthetic oligonucleotide; AGG chr11 5153462 5153481 5153478 +
acttggggagactaaaattg

SEQ ID NO: 365 - DNA, 20 bp, Artificial Sequence
  Synthetic oligonucleotide; AAG chr11 5153466 5153485 5153482 +
ggggagactaaaattgagga

SEQ ID NO: 366 - DNA, 20 bp, Artificial Sequence
  Synthetic oligonucleotide; AAG chr11 5153484 5153503 5153500 +
gaaagcactatgaataacca

SEQ ID NO: 367 - DNA, 20 bp, Artificial Sequence
  Synthetic oligonucleotide; TAG chr11 5153493 5153512 5153509 +
atgaataaccaaagaaaatt

SEQ ID NO: 368 - DNA, 20 bp, Artificial Sequence
  Synthetic oligonucleotide; TGG chr11 5153538 5153557 5153554 +
attgaattttctgaaaaacc

SEQ ID NO: 369 - DNA, 20 bp, Artificial Sequence
  Synthetic oligonucleotide; GGG chr11 5153539 5153558 5153555 +
ttgaattttctgaaaaacct

SEQ ID NO: 370 - DNA, 20 bp, Artificial Sequence
  Synthetic oligonucleotide; AAG chr11 5153560 5153579 5153576 +
ggctcttatgctttatataa

SEQ ID NO: 371 - DNA, 20 bp, Artificial Sequence
  Synthetic oligonucleotide; TAG chr11 5153577 5153596 5153593 +
taaaagttctctgatcaaaa

SEQ ID NO: 372 - DNA, 20 bp, Artificial Sequence
  Synthetic oligonucleotide; CAG chr11 5153609 5153628 5153625 +
aaaaattacatattttgaat

SEQ ID NO: 373 - DNA, 20 bp, Artificial Sequence
  Synthetic oligonucleotide; AAG chr11 5153620 5153639 5153636 +
attttgaatcagtacatttt

SEQ ID NO: 374 - DNA, 20 bp, Artificial Sequence
  Synthetic oligonucleotide; TAG chr11 5153631 5153650 5153647 +
gtacattttaagctatacat

SEQ ID NO: 375 - DNA, 20 bp, Artificial Sequence
  Synthetic oligonucleotide; GAG chr11 5153633 5153652 5153649 +
acattttaagctatacatta

SEQ ID NO: 376 - DNA, 20 bp, Artificial Sequence
  Synthetic oligonucleotide; CAG chr11 5153650 5153669 5153666 +
ttagagaaatgtttgtgata

SEQ ID NO: 377 - DNA, 20 bp, Artificial Sequence
  Synthetic oligonucleotide; AAG chr11 5153657 5153676 5153673 +
aatgtttgtgatacagtgaa

SEQ ID NO: 378 - DNA, 20 bp, Artificial Sequence
  Synthetic oligonucleotide; AAG chr11 5153662 5153681 5153678 +
ttgtgatacagtgaaaagta

SEQ ID NO: 379 - DNA, 20 bp, Artificial Sequence
  Synthetic oligonucleotide; TAG chr11 5153681 5153700 5153697 +
aaagttacttcattctttcc

SEQ ID NO: 380 - DNA, 20 bp, Artificial Sequence
  Synthetic oligonucleotide; AAG chr11 5153695 5153714 5153711 +
ctttcctagacacttcaata

SEQ ID NO: 381 - DNA, 20 bp, Artificial Sequence
  Synthetic oligonucleotide; CAG chr11 5153709 5153728 5153725 +
tcaataaagttgttttatct

SEQ ID NO: 382 - DNA, 20 bp, Artificial Sequence
  Synthetic oligonucleotide; AAG chr11 5153713 5153732 5153729 +
taaagttgttttatctcagt

SEQ ID NO: 383 - DNA, 20 bp, Artificial Sequence
  Synthetic oligonucleotide; CAG chr11 5153725 5153744 5153741 +
atctcagtaagctcatgaat

SEQ ID NO: 384 - DNA, 20 bp, Artificial Sequence
  Synthetic oligonucleotide; TGG chr11 5153758 5153777 5153774 +
gcttcatgtcaccaatatgc

SEQ ID NO: 385 - DNA, 20 bp, Artificial Sequence
  Synthetic oligonucleotide; CAG chr11 5153766 5153785 5153782 +
tcaccaatatgctggaaatt

SEQ ID NO: 386 - DNA, 20 bp, Artificial Sequence
  Synthetic oligonucleotide; AGG chr11 5153767 5153786 5153783 +
caccaatatgctggaaattc

SEQ ID NO: 387 - DNA, 20 bp, Artificial Sequence
  Synthetic oligonucleotide; AAG chr11 5153770 5153789 5153786 +
caatatgctggaaattcagg

SEQ ID NO: 388 - DNA, 20 bp, Artificial Sequence
  Synthetic oligonucleotide; TAG chr11 5153773 5153792 5153789 +
tatgctggaaattcaggaag

SEQ ID NO: 389 - DNA, 20 bp, Artificial Sequence
  Synthetic oligonucleotide; AAG chr11 5153787 5153806 5153803 +
aggaagtagctgttctttga

SEQ ID NO: 390 - DNA, 20 bp, Artificial Sequence
  Synthetic oligonucleotide; AAG chr11 5153793 5153812 5153809 +
tagctgttctttgaaagaaa

SEQ ID NO: 391 - DNA, 20 bp, Artificial Sequence
  Synthetic oligonucleotide; CAG chr11 5153796 5153815 5153812 +
ctgttctttgaaagaaaaag

SEQ ID NO: 392 - DNA, 20 bp, Artificial Sequence
  Synthetic oligonucleotide; AAG chr11 5153823 5153842 5153839 +
ttttttttttttttttttga

SEQ ID NO: 393 - DNA, 20 bp, Artificial Sequence
  Synthetic oligonucleotide; AAG chr11 5153828 5153847 5153844 +
tttttttttttttgaaagaa

SEQ ID NO: 394 - DNA, 20 bp, Artificial Sequence
  Synthetic oligonucleotide; AGG chr11 5153829 5153848 5153845 +
ttttttttttttgaaagaaa

SEQ ID NO: 395 - DNA, 20 bp, Artificial Sequence
  Synthetic oligonucleotide; AAG chr11 5153832 5153851 5153848 +
tttttttttgaaagaaaagg

SEQ ID NO: 396 - DNA, 20 bp, Artificial Sequence
  Synthetic oligonucleotide; AGG chr11 5153833 5153852 5153849 +
ttttttttgaaagaaaagga

SEQ ID NO: 397 - DNA, 20 bp, Artificial Sequence
  Synthetic oligonucleotide; AAG chr11 5153837 5153856 5153853 +
ttttgaaagaaaaggaaggt

SEQ ID NO: 398 - DNA, 20 bp, Artificial Sequence
  Synthetic oligonucleotide; AAG chr11 5153844 5153863 5153860 +
agaaaaggaaggtaagtaac

SEQ ID NO: 399 - DNA, 20 bp, Artificial Sequence
  Synthetic oligonucleotide; AGG chr11 5153845 5153864 5153861 +
gaaaaggaaggtaagtaaca

SEQ ID NO: 400 - DNA, 20 bp, Artificial Sequence
  Synthetic oligonucleotide; AAG chr11 5153848 5153867 5153864 +
aaggaaggtaagtaacaagg

SEQ ID NO: 401 - DNA, 20 bp, Artificial Sequence
  Synthetic oligonucleotide; AAG chr11 5153852 5153871 5153868 +
aaggtaagtaacaaggaaga

SEQ ID NO: 402 - DNA, 20 bp, Artificial Sequence
  Synthetic oligonucleotide; GAG chr11 5153854 5153873 5153870 +
ggtaagtaacaaggaagaaa

SEQ ID NO: 403 - DNA, 20 bp, Artificial Sequence
  Synthetic oligonucleotide; AAG chr11 5153859 5153878 5153875 +
gtaacaaggaagaaagagaa

SEQ ID NO: 404 - DNA, 20 bp, Artificial Sequence
  Synthetic oligonucleotide; GAG chr11 5153861 5153880 5153877 +
aacaaggaagaaagagaaaa

SEQ ID NO: 405 - DNA, 20 bp, Artificial Sequence
  Synthetic oligonucleotide; AGG chr11 5153862 5153881 5153878 +
acaaggaagaaagagaaaag

SEQ ID NO: 406 - DNA, 20 bp, Artificial Sequence
  Synthetic oligonucleotide; TGG chr11 5153868 5153887 5153884 +
aagaaagagaaaagaggaaa

SEQ ID NO: 407 - DNA, 20 bp, Artificial Sequence
  Synthetic oligonucleotide; AAG chr11 5153875 5153894 5153891 +
agaaaagaggaaatggatac

SEQ ID NO: 408 - DNA, 20 bp, Artificial Sequence
  Synthetic oligonucleotide; AAG chr11 5153930 5153949 5153946 +
tgctgctaaacttcaaatga

SEQ ID NO: 409 - DNA, 20 bp, Artificial Sequence
  Synthetic oligonucleotide; CAG chr11 5153941 5153960 5153957 +
ttcaaatgaaagaaccaaat

SEQ ID NO: 410 - DNA, 20 bp, Artificial Sequence
  Synthetic oligonucleotide; CAG chr11 5153944 5153963 5153960 +
aaatgaaagaaccaaatcag

SEQ ID NO: 411 - DNA, 20 bp, Artificial Sequence
  Synthetic oligonucleotide; GAG chr11 5153946 5153965 5153962 +
atgaaagaaccaaatcagca

SEQ ID NO: 412 - DNA, 20 bp, Artificial Sequence
  Synthetic oligonucleotide; AGG chr11 5153947 5153966 5153963 +
tgaaagaaccaaatcagcag

SEQ ID NO: 413 - DNA, 20 bp, Artificial Sequence
  Synthetic oligonucleotide; CAG chr11 5153961 5153980 5153977 +
cagcagaggacatttcatga

SEQ ID NO: 414 - DNA, 20 bp, Artificial Sequence
  Synthetic oligonucleotide; AGG chr11 5153962 5153981 5153978 +
agcagaggacatttcatgac

SEQ ID NO: 415 - DNA, 20 bp, Artificial Sequence
  Synthetic oligonucleotide; GGG chr11 5153963 5153982 5153979 +
gcagaggacatttcatgaca

SEQ ID NO: 416 - DNA, 20 bp, Artificial Sequence
  Synthetic oligonucleotide; GAG chr11 5153965 5153984 5153981 +
agaggacatttcatgacagg

SEQ ID NO: 417 - DNA, 20 bp, Artificial Sequence
  Synthetic oligonucleotide; AGG chr11 5153966 5153985 5153982 +
gaggacatttcatgacaggg

SEQ ID NO: 418 - DNA, 20 bp, Artificial Sequence
  Synthetic oligonucleotide; CAG chr11 5153975 5153994 5153991 +
tcatgacagggaggctgtat

SEQ ID NO: 419 - DNA, 20 bp, Artificial Sequence
  Synthetic oligonucleotide; TAG chr11 5154000 5154019 5154016 +
aacatacatttaccgtaaac

SEQ ID NO: 420 - DNA, 20 bp, Artificial Sequence
  Synthetic oligonucleotide; TAG chr11 5154003 5154022 5154019 +
atacatttaccgtaaactag

SEQ ID NO: 421 - DNA, 20 bp, Artificial Sequence
  Synthetic oligonucleotide; AGG chr11 5154004 5154023 5154020 +
tacatttaccgtaaactagt

SEQ ID NO: 422 - DNA, 20 bp, Artificial Sequence
  Synthetic oligonucleotide; CAG chr11 5154030 5154049 5154046 +
attaaatactttgatttcca

SEQ ID NO: 423 - DNA, 20 bp, Artificial Sequence
  Synthetic oligonucleotide; TAG chr11 5154050 5154069 5154066 +
cagatttgatccccaatgct

SEQ ID NO: 424 - DNA, 20 bp, Artificial Sequence
  Synthetic oligonucleotide; AAG chr11 5154074 5154093 5154090 +
tttatgacactcccatccat

SEQ ID NO: 425 - DNA, 20 bp, Artificial Sequence
  Synthetic oligonucleotide; TGG chr11 5154081 5154100 5154097 +
cactcccatccataagtcac

SEQ ID NO: 426 - DNA, 20 bp, Artificial Sequence
  Synthetic oligonucleotide; TAG chr11 5154094 5154113 5154110 +
aagtcactggctttttctaa

SEQ ID NO: 427 - DNA, 20 bp, Artificial Sequence
  Synthetic oligonucleotide; AGG chr11 5154095 5154114 5154111 +
agtcactggctttttctaat

SEQ ID NO: 428 - DNA, 20 bp, Artificial Sequence
  Synthetic oligonucleotide; GGG chr11 5154096 5154115 5154112 +
gtcactggctttttctaata

SEQ ID NO: 429 - DNA, 20 bp, Artificial Sequence
  Synthetic oligonucleotide; GGG chr11 5154097 5154116 5154113 +
tcactggctttttctaatag

SEQ ID NO: 430 - DNA, 20 bp, Artificial Sequence
  Synthetic oligonucleotide; AAG chr11 5154118 5154137 5154134 +
ggcaaattttttcttctcca

SEQ ID NO: 431 - DNA, 20 bp, Artificial Sequence
  Synthetic oligonucleotide; TAG chr11 5154132 5154151 5154148 +
tctccaaagataatcacaat

SEQ ID NO: 432 - DNA, 20 bp, Artificial Sequence
  Synthetic oligonucleotide; AAG chr11 5154138 5154157 5154154 +
aagataatcacaattagaat

SEQ ID NO: 433 - DNA, 20 bp, Artificial Sequence
  Synthetic oligonucleotide; TGG chr11 5154151 5154170 5154167 +
ttagaataagaatcctttaa

SEQ ID NO: 434 - DNA, 20 bp, Artificial Sequence
  Synthetic oligonucleotide; AAG chr11 5154177 5154196 5154193 +
tcacaatgtctgacttattc

SEQ ID NO: 435 - DNA, 20 bp, Artificial Sequence
  Synthetic oligonucleotide; AAG chr11 5154184 5154203 5154200 +
gtctgacttattcaagacca

SEQ ID NO: 436 - DNA, 20 bp, Artificial Sequence
  Synthetic oligonucleotide; GAG chr11 5154186 5154205 5154202 +
ctgacttattcaagaccaaa

SEQ ID NO: 437 - DNA, 20 bp, Artificial Sequence
  Synthetic oligonucleotide; GAG chr11 5154198 5154217 5154214 +
agaccaaagagctgacatgt

SEQ ID NO: 438 - DNA, 20 bp, Artificial Sequence
  Synthetic oligonucleotide; CAG chr11 5154211 5154230 5154227 +
gacatgtgagtactacctga

SEQ ID NO: 439 - DNA, 20 bp, Artificial Sequence
  Synthetic oligonucleotide; AGG chr11 5154212 5154231 5154228 +
acatgtgagtactacctgac

SEQ ID NO: 440 - DNA, 20 bp, Artificial Sequence
  Synthetic oligonucleotide; CAG chr11 5154217 5154236 5154233 +
tgagtactacctgacaggca

SEQ ID NO: 441 - DNA, 20 bp, Artificial Sequence
  Synthetic oligonucleotide; TAG chr11 5154221 5154240 5154237 +
tactacctgacaggcacaga

SEQ ID NO: 442 - DNA, 20 bp, Artificial Sequence
  Synthetic oligonucleotide; CAG chr11 5154224 5154243 5154240 +
tacctgacaggcacagatag

SEQ ID NO: 443 - DNA, 20 bp, Artificial Sequence
  Synthetic oligonucleotide; AGG chr11 5154225 5154244 5154241 +
acctgacaggcacagatagc

SEQ ID NO: 444 - DNA, 20 bp, Artificial Sequence
  Synthetic oligonucleotide; GGG chr11 5154226 5154245 5154242 +
cctgacaggcacagatagca

SEQ ID NO: 445 - DNA, 20 bp, Artificial Sequence
  Synthetic oligonucleotide; CAG chr11 5154232 5154251 5154248 +
aggcacagatagcagggttg

SEQ ID NO: 446 - DNA, 20 bp, Artificial Sequence
  Synthetic oligonucleotide; AGG chr11 5154233 5154252 5154249 +
ggcacagatagcagggttgc

SEQ ID NO: 447 - DNA, 20 bp, Artificial Sequence
  Synthetic oligonucleotide; TGG chr11 5154236 5154255 5154252 +
acagatagcagggttgcagg

SEQ ID NO: 448 - DNA, 20 bp, Artificial Sequence
  Synthetic oligonucleotide; TGG chr11 5154239 5154258 5154255 +
gatagcagggttgcaggtgg

SEQ ID NO: 449 - DNA, 20 bp, Artificial Sequence
  Synthetic oligonucleotide; AAG chr11 5154249 5154268 5154265 +
ttgcaggtggtggtgtatgt

SEQ ID NO: 450 - DNA, 20 bp, Artificial Sequence
  Synthetic oligonucleotide; TGG chr11 5154256 5154275 5154272 +
tggtggtgtatgtaagttcc

SEQ ID NO: 451 - DNA, 20 bp, Artificial Sequence
  Synthetic oligonucleotide; TAG chr11 5154260 5154279 5154276 +
ggtgtatgtaagttcctggt

SEQ ID NO: 452 - DNA, 20 bp, Artificial Sequence
  Synthetic oligonucleotide; TGG chr11 5154264 5154283 5154280 +
tatgtaagttcctggttagt

SEQ ID NO: 453 - DNA, 20 bp, Artificial Sequence
  Synthetic oligonucleotide; TAG chr11 5154268 5154287 5154284 +
taagttcctggttagttgga

SEQ ID NO: 454 - DNA, 20 bp, Artificial Sequence
  Synthetic oligonucleotide; GAG chr11 5154270 5154289 5154286 +
agttcctggttagttggata

SEQ ID NO: 455 - DNA, 20 bp, Artificial Sequence
  Synthetic oligonucleotide; TGG chr11 5154283 5154302 5154299 +
ttggatagagtgattgttat

SEQ ID NO: 456 - DNA, 20 bp, Artificial Sequence
  Synthetic oligonucleotide; GAG chr11 5154285 5154304 5154301 +
ggatagagtgattgttattg

SEQ ID NO: 457 - DNA, 20 bp, Artificial Sequence
  Synthetic oligonucleotide; AAG chr11 5154288 5154307 5154304 +
tagagtgattgttattggag

SEQ ID NO: 458 - DNA, 20 bp, Artificial Sequence
  Synthetic oligonucleotide; TGG chr11 5154292 5154311 5154308 +
gtgattgttattggagaagc

SEQ ID NO: 459 - DNA, 20 bp, Artificial Sequence
  Synthetic oligonucleotide; TGG chr11 5154306 5154325 5154322 +
agaagctggtaattaaatta

SEQ ID NO: 460 - DNA, 20 bp, Artificial Sequence
  Synthetic oligonucleotide; GAG chr11 5154308 5154327 5154324 +
aagctggtaattaaattatg

SEQ ID NO: 461 - DNA, 20 bp, Artificial Sequence
  Synthetic oligonucleotide; GAG chr11 5154310 5154329 5154326 +
gctggtaattaaattatgga

SEQ ID NO: 462 - DNA, 20 bp, Artificial Sequence
  Synthetic oligonucleotide; AGG chr11 5154311 5154330 5154327 +
ctggtaattaaattatggag

SEQ ID NO: 463 - DNA, 20 bp, Artificial Sequence
  Synthetic oligonucleotide; TGG chr11 5154319 5154338 5154335 +
taaattatggagaggaaact

SEQ ID NO: 464 - DNA, 20 bp, Artificial Sequence
  Synthetic oligonucleotide; GAG chr11 5154328 5154347 5154344 +
gagaggaaacttggaatcgt

SEQ ID NO: 465 - DNA, 20 bp, Artificial Sequence
  Synthetic oligonucleotide; GAG chr11 5154352 5154371 5154368 +
cttactcctcaattattatt

SEQ ID NO: 466 - DNA, 20 bp, Artificial Sequence
  Synthetic oligonucleotide; GAG chr11 5154354 5154373 5154370 +
tactcctcaattattattga

SEQ ID NO: 467 - DNA, 20 bp, Artificial Sequence
  Synthetic oligonucleotide; TGG chr11 5154358 5154377 5154374 +
cctcaattattattgagagc

SEQ ID NO: 468 - DNA, 20 bp, Artificial Sequence
  Synthetic oligonucleotide; CAG chr11 5154373 5154392 5154389 +
agagctggttttgctcttac

SEQ ID NO: 469 - DNA, 20 bp, Artificial Sequence
  Synthetic oligonucleotide; AAG chr11 5154383 5154402 5154399 +
ttgctcttaccagatacctg

SEQ ID NO: 470 - DNA, 20 bp, Artificial Sequence
  Synthetic oligonucleotide; AAG chr11 5154442 5154461 5154458 +
ctcaccaatttttcttctcc

SEQ ID NO: 471 - DNA, 20 bp, Artificial Sequence
  Synthetic oligonucleotide; AGG chr11 5154443 5154462 5154459 +
tcaccaatttttcttctcca

SEQ ID NO: 472 - DNA, 20 bp, Artificial Sequence
  Synthetic oligonucleotide; CAG chr11 5154450 5154469 5154466 +
tttttcttctccaaggattc

SEQ ID NO: 473 - DNA, 20 bp, Artificial Sequence
  Synthetic oligonucleotide; AAG chr11 5154465 5154484 5154481 +
gattccagcttcattccctt

SEQ ID NO: 474 - DNA, 20 bp, Artificial Sequence
  Synthetic oligonucleotide; TGG chr11 5154471 5154490 5154487 +
agcttcattcccttaagttg

SEQ ID NO: 475 - DNA, 20 bp, Artificial Sequence
  Synthetic oligonucleotide; GGG chr11 5154472 5154491 5154488 +
gcttcattcccttaagttgt

SEQ ID NO: 476 - DNA, 20 bp, Artificial Sequence
  Synthetic oligonucleotide; TGG chr11 5154483 5154502 5154499 +
ttaagttgtgggttctgtga

SEQ ID NO: 477 - DNA, 20 bp, Artificial Sequence
  Synthetic oligonucleotide; CAG chr11 5154514 5154533 5154530 +
tctgtctgcactctgtgtaa

SEQ ID NO: 478 - DNA, 20 bp, Artificial Sequence
  Synthetic oligonucleotide; CAG chr11 5154521 5154540 5154537 +
gcactctgtgtaacagcatc

SEQ ID NO: 479 - DNA, 20 bp, Artificial Sequence
  Synthetic oligonucleotide; TGG chr11 5154549 5154568 5154565 +
gtcataaattttactctgtt

SEQ ID NO: 480 - DNA, 20 bp, Artificial Sequence
  Synthetic oligonucleotide; CAG chr11 5154555 5154574 5154571 +
aattttactctgtttggtgc

SEQ ID NO: 481 - DNA, 20 bp, Artificial Sequence
  Synthetic oligonucleotide; AGG chr11 5154556 5154575 5154572 +
attttactctgtttggtgcc

SEQ ID NO: 482 - DNA, 20 bp, Artificial Sequence
  Synthetic oligonucleotide; TGG chr11 5154582 5154601 5154598 +
tgtgccaatataatatactg

SEQ ID NO: 483 - DNA, 20 bp, Artificial Sequence
  Synthetic oligonucleotide; CAG chr11 5154593 5154612 5154609 +
aatatactgtggacattttg

SEQ ID NO: 484 - DNA, 20 bp, Artificial Sequence
  Synthetic oligonucleotide; CGG chr11 5154629 5154648 5154645 +
cttttcatttatctctaaca

SEQ ID NO: 485 - DNA, 20 bp, Artificial Sequence
  Synthetic oligonucleotide; TGG chr11 5154649 5154668 5154665 +
cggacatcttcttcttcttc

SEQ ID NO: 486 - DNA, 20 bp, Artificial Sequence
  Synthetic oligonucleotide; AAG chr11 5154652 5154671 5154668 +
acatcttcttcttcttctgg

SEQ ID NO: 487 - DNA, 20 bp, Artificial Sequence
  Synthetic oligonucleotide; CAG chr11 5154662 5154681 5154678 +
cttcttctggaagtctgtct

SEQ ID NO: 488 - DNA, 20 bp, Artificial Sequence
  Synthetic oligonucleotide; CAG chr11 5154688 5154707 5154704 +
atctttgtgtgctcatcccc

SEQ ID NO: 489 - DNA, 20 bp, Artificial Sequence
  Synthetic oligonucleotide; TAG chr11 5154700 5154719 5154716 +
tcatcccccagtaaaactca

SEQ ID NO: 490 - DNA, 20 bp, Artificial Sequence
  Synthetic oligonucleotide; GAG chr11 5154704 5154723 5154720 +
cccccagtaaaactcatagt

SEQ ID NO: 491 - DNA, 20 bp, Artificial Sequence
  Synthetic oligonucleotide; AGG chr11 5154705 5154724 5154721 +
ccccagtaaaactcatagtg

SEQ ID NO: 492 - DNA, 20 bp, Artificial Sequence
  Synthetic oligonucleotide; TAG chr11 5154712 5154731 5154728 +
aaaactcatagtgaggtctg

SEQ ID NO: 493 - DNA, 20 bp, Artificial Sequence
  Synthetic oligonucleotide; CGG chr11 5154727 5154746 5154743 +
gtctgtagcattctgaaaca

SEQ ID NO: 494 - DNA, 20 bp, Artificial Sequence
  Synthetic oligonucleotide; GGG chr11 5154728 5154747 5154744 +
tctgtagcattctgaaacac

SEQ ID NO: 495 - DNA, 20 bp, Artificial Sequence
  Synthetic oligonucleotide; GAG chr11 5154742 5154761 5154758 +
aaacacgggatgaatttatt

SEQ ID NO: 496 - DNA, 20 bp, Artificial Sequence
  Synthetic oligonucleotide; TGG chr11 5154752 5154771 5154768 +
tgaatttattgagctcaaat

SEQ ID NO: 497 - DNA, 20 bp, Artificial Sequence
  Synthetic oligonucleotide; GAG chr11 5154754 5154773 5154770 +
aatttattgagctcaaattg

SEQ ID NO: 498 - DNA, 20 bp, Artificial Sequence
  Synthetic oligonucleotide; AAG chr11 5154761 5154780 5154777 +
tgagctcaaattggagaaaa

SEQ ID NO: 499 - DNA, 20 bp, Artificial Sequence
  Synthetic oligonucleotide; TGG chr11 5154764 5154783 5154780 +
gctcaaattggagaaaaaag

SEQ ID NO: 500 - DNA, 20 bp, Artificial Sequence
  Synthetic oligonucleotide; TGG chr11 5154801 5154820 5154817 +
aatattcctttatgaatgtg

SEQ ID NO: 501 - DNA, 20 bp, Artificial Sequence
  Synthetic oligonucleotide; GAG chr11 5154803 5154822 5154819 +
tattcctttatgaatgtgtg

SEQ ID NO: 502 - DNA, 20 bp, Artificial Sequence
  Synthetic oligonucleotide; AAG chr11 5154806 5154825 5154822 +
tcctttatgaatgtgtggag

SEQ ID NO: 503 - DNA, 20 bp, Artificial Sequence
  Synthetic oligonucleotide; TAG chr11 5154809 5154828 5154825 +
tttatgaatgtgtggagaag

SEQ ID NO: 504 - DNA, 20 bp, Artificial Sequence
  Synthetic oligonucleotide; AGG chr11 5154810 5154829 5154826 +
ttatgaatgtgtggagaagt

SEQ ID NO: 505 - DNA, 20 bp, Artificial Sequence
  Synthetic oligonucleotide; GAG chr11 5154812 5154831 5154828 +
atgaatgtgtggagaagtag

SEQ ID NO: 506 - DNA, 20 bp, Artificial Sequence
  Synthetic oligonucleotide; AGG chr11 5154813 5154832 5154829 +
tgaatgtgtggagaagtagg

SEQ ID NO: 507 - DNA, 20 bp, Artificial Sequence
  Synthetic oligonucleotide; GAG chr11 5154815 5154834 5154831 +
aatgtgtggagaagtaggag

SEQ ID NO: 508 - DNA, 20 bp, Artificial Sequence
  Synthetic oligonucleotide; GAG chr11 5154822 5154841 5154838 +
ggagaagtaggaggagttat

SEQ ID NO: 509 - DNA, 20 bp, Artificial Sequence
  Synthetic oligonucleotide; GAG chr11 5154833 5154852 5154849 +
aggagttatgagcatgaaat

SEQ ID NO: 510 - DNA, 20 bp, Artificial Sequence
  Synthetic oligonucleotide; AGG chr11 5154834 5154853 5154850 +
ggagttatgagcatgaaatg

SEQ ID NO: 511 - DNA, 20 bp, Artificial Sequence
  Synthetic oligonucleotide; GGG chr11 5154835 5154854 5154851 +
gagttatgagcatgaaatga

SEQ ID NO: 512 - DNA, 20 bp, Artificial Sequence
  Synthetic oligonucleotide; TAG chr11 5154844 5154863 5154860 +
gcatgaaatgagggatttcc

SEQ ID NO: 513 - DNA, 20 bp, Artificial Sequence
  Synthetic oligonucleotide; TAG chr11 5154851 5154870 5154867 +
atgagggatttcctagttga

SEQ ID NO: 514 - DNA, 20 bp, Artificial Sequence
  Synthetic oligonucleotide; GAG chr11 5154864 5154883 5154880 +
tagttgatagccaaaaccac

SEQ ID NO: 515 - DNA, 20 bp, Artificial Sequence
  Synthetic oligonucleotide; AGG chr11 5154865 5154884 5154881 +
agttgatagccaaaaccacg

SEQ ID NO: 516 - DNA, 20 bp, Artificial Sequence
  Synthetic oligonucleotide; GGG chr11 5154866 5154885 5154882 +
gttgatagccaaaaccacga

SEQ ID NO: 517 - DNA, 20 bp, Artificial Sequence
  Synthetic oligonucleotide; CAG chr11 5154872 5154891 5154888 +
agccaaaaccacgagggacc

SEQ ID NO: 518 - DNA, 20 bp, Artificial Sequence
  Synthetic oligonucleotide; AAG chr11 5154883 5154902 5154899 +
cgagggacccagcaaatttt

SEQ ID NO: 519 - DNA, 20 bp, Artificial Sequence
  Synthetic oligonucleotide; CAG chr11 5154887 5154906 5154903 +
ggacccagcaaattttaagt

SEQ ID NO: 520 - DNA, 20 bp, Artificial Sequence
  Synthetic oligonucleotide; TGG chr11 5154896 5154915 5154912 +
aaattttaagtcagccctct

SEQ ID NO: 521 - DNA, 20 bp, Artificial Sequence
  Synthetic oligonucleotide; GGG chr11 5154897 5154916 5154913 +
aattttaagtcagccctctt

SEQ ID NO: 522 - DNA, 20 bp, Artificial Sequence
  Synthetic oligonucleotide; TGG chr11 5154905 5154924 5154921 +
gtcagccctcttgggttcac

SEQ ID NO: 523 - DNA, 20 bp, Artificial Sequence
  Synthetic oligonucleotide; CAG chr11 5154941 5154960 5154957 +
cgtaattatttctacacttg

SEQ ID NO: 524 - DNA, 20 bp, Artificial Sequence
  Synthetic oligonucleotide; CAG chr11 5154976 5154995 5154992 +
tctctttttctcttttccca

SEQ ID NO: 525 - DNA, 20 bp, Artificial Sequence
  Synthetic oligonucleotide; AGG chr11 5154977 5154996 5154993 +
ctctttttctcttttcccac

SEQ ID NO: 526 - DNA, 20 bp, Artificial Sequence
  Synthetic oligonucleotide; CAG chr11 5154987 5155006 5155003 +
cttttcccacaggctaaatg

SEQ ID NO: 527 - DNA, 20 bp, Artificial Sequence
  Synthetic oligonucleotide; AAG chr11 5155019 5155038 5155035 +
tatgcaaaaaatttttttac

SEQ ID NO: 528 - DNA, 20 bp, Artificial Sequence
  Synthetic oligonucleotide; AAG chr11 5155061 5155080 5155077 +
tttctatttgcaaaattcta

SEQ ID NO: 529 - DNA, 20 bp, Artificial Sequence
  Synthetic oligonucleotide; TGG chr11 5155116 5155135 5155132 +
tcctatttaaataaatatct

SEQ ID NO: 530 - DNA, 20 bp, Artificial Sequence
  Synthetic oligonucleotide; GAG chr11 5155132 5155151 5155148 +
atcttggtgacattttcact

SEQ ID NO: 531 - DNA, 20 bp, Artificial Sequence
  Synthetic oligonucleotide; AGG chr11 5155133 5155152 5155149 +
tcttggtgacattttcactg

SEQ ID NO: 532 - DNA, 20 bp, Artificial Sequence
  Synthetic oligonucleotide; AAG chr11 5155137 5155156 5155153 +
ggtgacattttcactgaggc

SEQ ID NO: 533 - DNA, 20 bp, Artificial Sequence
  Synthetic oligonucleotide; AGG chr11 5155138 5155157 5155154 +
gtgacattttcactgaggca

SEQ ID NO: 534 - DNA, 20 bp, Artificial Sequence
  Synthetic oligonucleotide; CAG chr11 5155157 5155176 5155173 +
aaggtttttctctttttatt

SEQ ID NO: 535 - DNA, 20 bp, Artificial Sequence
  Synthetic oligonucleotide; AAG chr11 5155162 5155181 5155178 +
ttttctctttttattcagaa

SEQ ID NO: 536 - DNA, 20 bp, Artificial Sequence
  Synthetic oligonucleotide; CAG chr11 5155210 5155229 5155226 +
ttaccacacaattacttcct

SEQ ID NO: 537 - DNA, 20 bp, Artificial Sequence
  Synthetic oligonucleotide; CAG chr11 5155220 5155239 5155236 +
attacttcctcagtcttctt

SEQ ID NO: 538 - DNA, 20 bp, Artificial Sequence
  Synthetic oligonucleotide; AAG chr11 5155250 5155269 5155266 +
cttcccattttattttattg

SEQ ID NO: 539 - DNA, 20 bp, Artificial Sequence
  Synthetic oligonucleotide; TAG chr11 5155267 5155286 5155283 +
ttgaagttttttttatcttt

SEQ ID NO: 540 - DNA, 20 bp, Artificial Sequence
  Synthetic oligonucleotide; AAG chr11 5155276 5155295 5155292 +
tttttatcttttagtaaatt

SEQ ID NO: 541 - DNA, 20 bp, Artificial Sequence
  Synthetic oligonucleotide; TAG chr11 5155290 5155309 5155306 +
taaattaagtaacattctta

SEQ ID NO: 542 - DNA, 20 bp, Artificial Sequence
  Synthetic oligonucleotide; TGG chr11 5155306 5155325 5155322 +
cttatagtgacaaattataa

SEQ ID NO: 543 - DNA, 20 bp, Artificial Sequence
  Synthetic oligonucleotide; AAG chr11 5155317 5155336 5155333 +
aaattataatggacatttct

SEQ ID NO: 544 - DNA, 20 bp, Artificial Sequence
  Synthetic oligonucleotide; AAG chr11 5155333 5155352 5155349 +
ttctaagtcctacaaatgta

SEQ ID NO: 545 - DNA, 20 bp, Artificial Sequence
  Synthetic oligonucleotide; TGG chr11 5155337 5155356 5155353 +
aagtcctacaaatgtaaagc

SEQ ID NO: 546 - DNA, 20 bp, Artificial Sequence
  Synthetic oligonucleotide; AAG chr11 5155340 5155359 5155356 +
tcctacaaatgtaaagctgg

SEQ ID NO: 547 - DNA, 20 bp, Artificial Sequence
  Synthetic oligonucleotide; AAG chr11 5155344 5155363 5155360 +
acaaatgtaaagctggaagc

SEQ ID NO: 548 - DNA, 20 bp, Artificial Sequence
  Synthetic oligonucleotide; GAG chr11 5155360 5155379 5155376 +
aagcaagttgttgaacattt

SEQ ID NO: 549 - DNA, 20 bp, Artificial Sequence
  Synthetic oligonucleotide; TGG chr11 5155368 5155387 5155384 +
tgttgaacatttgagtaaac

SEQ ID NO: 550 - DNA, 20 bp, Artificial Sequence
  Synthetic oligonucleotide; CAG chr11 5155436 5155455 5155452 +
cttctttttctttcaaaaaa

SEQ ID NO: 551 - DNA, 20 bp, Artificial Sequence
  Synthetic oligonucleotide; GAG chr11 5155461 5155480 5155477 +
attatattcctactatttat

SEQ ID NO: 552 - DNA, 20 bp, Artificial Sequence
  Synthetic oligonucleotide; GAG chr11 5155465 5155484 5155481 +
tattcctactatttatgagt

SEQ ID NO: 553 - DNA, 20 bp, Artificial Sequence
  Synthetic oligonucleotide; TAG chr11 5155502 5155521 5155518 +
aaatgaaatgaaaaaaatta

SEQ ID NO: 554 - DNA, 20 bp, Artificial Sequence
  Synthetic oligonucleotide; TAG chr11 5155522 5155541 5155538 +
tagtcttacctttaaattat

SEQ ID NO: 555 - DNA, 20 bp, Artificial Sequence
  Synthetic oligonucleotide; TGG chr11 5155530 5155549 5155546 +
cctttaaattattagtaaaa

SEQ ID NO: 556 - DNA, 20 bp, Artificial Sequence
  Synthetic oligonucleotide; GGG chr11 5155531 5155550 5155547 +
ctttaaattattagtaaaat

SEQ ID NO: 557 - DNA, 20 bp, Artificial Sequence
  Synthetic oligonucleotide; AAG chr11 5155563 5155582 5155579 +
tacaatttcatttatcacgt

SEQ ID NO: 558 - DNA, 20 bp, Artificial Sequence
  Synthetic oligonucleotide; AAG chr11 5155581 5155600 5155597 +
gtaagtatctgataaattct

SEQ ID NO: 559 - DNA, 20 bp, Artificial Sequence
  Synthetic oligonucleotide; AAG chr11 5155585 5155604 5155601 +
gtatctgataaattctaagc

SEQ ID NO: 560 - DNA, 20 bp, Artificial Sequence
  Synthetic oligonucleotide; CAG chr11 5155624 5155643 5155640 +
ctattctccttgacatttta

SEQ ID NO: 561 - DNA, 20 bp, Artificial Sequence
  Synthetic oligonucleotide; TGG chr11 5155628 5155647 5155644 +
tctccttgacattttacagc

SEQ ID NO: 562 - DNA, 20 bp, Artificial Sequence
  Synthetic oligonucleotide; TAG chr11 5155635 5155654 5155651 +
gacattttacagctggtttc

SEQ ID NO: 563 - DNA, 20 bp, Artificial Sequence
  Synthetic oligonucleotide; AGG chr11 5155636 5155655 5155652 +
acattttacagctggtttct

SEQ ID NO: 564 - DNA, 20 bp, Artificial Sequence
  Synthetic oligonucleotide; TAG chr11 5155651 5155670 5155667 +
tttctaggctttcttgaatg

SEQ ID NO: 565 - DNA, 20 bp, Artificial Sequence
  Synthetic oligonucleotide; AAG chr11 5155656 5155675 5155672 +
aggctttcttgaatgtagct

SEQ ID NO: 566 - DNA, 20 bp, Artificial Sequence
  Synthetic oligonucleotide; GAG chr11 5155658 5155677 5155674 +
gctttcttgaatgtagctaa

SEQ ID NO: 567 - DNA, 20 bp, Artificial Sequence
  Synthetic oligonucleotide; TAG chr11 5155678 5155697 5155694 +
gagacacttgatataatgtt

SEQ ID NO: 568 - DNA, 20 bp, Artificial Sequence
  Synthetic oligonucleotide; TGG chr11 5155685 5155704 5155701 +
ttgatataatgtttagacat

SEQ ID NO: 569 - DNA, 20 bp, Artificial Sequence
  Synthetic oligonucleotide; TAG chr11 5155694 5155713 5155710 +
tgtttagacattggcaaatt

SEQ ID NO: 570 - DNA, 20 bp, Artificial Sequence
  Synthetic oligonucleotide; AGG chr11 5155695 5155714 5155711 +
gtttagacattggcaaattt

SEQ ID NO: 571 - DNA, 20 bp, Artificial Sequence
  Synthetic oligonucleotide; AAG chr11 5155698 5155717 5155714 +
tagacattggcaaatttagg

SEQ ID NO: 572 - DNA, 20 bp, Artificial Sequence
  Synthetic oligonucleotide; TGG chr11 5155709 5155728 5155725 +
aaatttaggaagcatactaa

SEQ ID NO: 573 - DNA, 20 bp, Artificial Sequence
  Synthetic oligonucleotide; TGG chr11 5155712 5155731 5155728 +
tttaggaagcatactaatgg

SEQ ID NO: 574 - DNA, 20 bp, Artificial Sequence
  Synthetic oligonucleotide; GAG chr11 5155714 5155733 5155730 +
taggaagcatactaatggtg

SEQ ID NO: 575 - DNA, 20 bp, Artificial Sequence
  Synthetic oligonucleotide; TGG chr11 5155728 5155747 5155744 +
atggtggagaatatttataa

SEQ ID NO: 576 - DNA, 20 bp, Artificial Sequence
  Synthetic oligonucleotide; CAG chr11 5155736 5155755 5155752 +
gaatatttataatggatttc

SEQ ID NO: 577 - DNA, 20 bp, Artificial Sequence
  Synthetic oligonucleotide; AGG chr11 5155737 5155756 5155753 +
aatatttataatggatttcc

SEQ ID NO: 578 - DNA, 20 bp, Artificial Sequence
  Synthetic oligonucleotide; GAG chr11 5155739 5155758 5155755 +
tatttataatggatttccag

SEQ ID NO: 579 - DNA, 20 bp, Artificial Sequence
  Synthetic oligonucleotide; AAG chr11 5155745 5155764 5155761 +
taatggatttccaggagaac

SEQ ID NO: 580 - DNA, 20 bp, Artificial Sequence
  Synthetic oligonucleotide; AGG chr11 5155746 5155765 5155762 +
aatggatttccaggagaaca

SEQ ID NO: 581 - DNA, 20 bp, Artificial Sequence
  Synthetic oligonucleotide; CAG chr11 5155753 5155772 5155769 +
ttccaggagaacaaggaata

SEQ ID NO: 582 - DNA, 20 bp, Artificial Sequence
  Synthetic oligonucleotide; AAG chr11 5155761 5155780 5155777 +
gaacaaggaatacagatgaa

SEQ ID NO: 583 - DNA, 20 bp, Artificial Sequence
  Synthetic oligonucleotide; AGG chr11 5155762 5155781 5155778 +
aacaaggaatacagatgaaa

SEQ ID NO: 584 - DNA, 20 bp, Artificial Sequence
  Synthetic oligonucleotide; AAG chr11 5155766 5155785 5155782 +
aggaatacagatgaaaaggc

SEQ ID NO: 585 - DNA, 20 bp, Artificial Sequence
  Synthetic oligonucleotide; AGG chr11 5155767 5155786 5155783 +
ggaatacagatgaaaaggca

SEQ ID NO: 586 - DNA, 20 bp, Artificial Sequence
  Synthetic oligonucleotide; CAG chr11 5155788 5155807 5155804 +
ggaaccccatgtgctctttc

SEQ ID NO: 587 - DNA, 20 bp, Artificial Sequence
  Synthetic oligonucleotide; AAG chr11 5155804 5155823 5155820 +
tttccagaatttcctctgtg

SEQ ID NO: 588 - DNA, 20 bp, Artificial Sequence
  Synthetic oligonucleotide; AGG chr11 5155805 5155824 5155821 +
ttccagaatttcctctgtga

SEQ ID NO: 589 - DNA, 20 bp, Artificial Sequence
  Synthetic oligonucleotide; GAG chr11 5155807 5155826 5155823 +
ccagaatttcctctgtgaag

SEQ ID NO: 590 - DNA, 20 bp, Artificial Sequence
  Synthetic oligonucleotide; TAG chr11 5155820 5155839 5155836 +
tgtgaaggagcataaaacaa

SEQ ID NO: 591 - DNA, 20 bp, Artificial Sequence
  Synthetic oligonucleotide; CAG chr11 5155851 5155870 5155867 +
catgttgaatgaaattgatt

SEQ ID NO: 592 - DNA, 20 bp, Artificial Sequence
  Synthetic oligonucleotide; GAG chr11 5155853 5155872 5155869 +
tgttgaatgaaattgattca

SEQ ID NO: 593 - DNA, 20 bp, Artificial Sequence
  Synthetic oligonucleotide; GAG chr11 5155855 5155874 5155871 +
ttgaatgaaattgattcaga

SEQ ID NO: 594 - DNA, 20 bp, Artificial Sequence
  Synthetic oligonucleotide; TAG chr11 5155862 5155881 5155878 +
aaattgattcagagagcata

SEQ ID NO: 595 - DNA, 20 bp, Artificial Sequence
  Synthetic oligonucleotide; AGG chr11 5155863 5155882 5155879 +
aattgattcagagagcatat

SEQ ID NO: 596 - DNA, 20 bp, Artificial Sequence
  Synthetic oligonucleotide; CAG chr11 5155866 5155885 5155882 +
tgattcagagagcatatagg

SEQ ID NO: 597 - DNA, 20 bp, Artificial Sequence
  Synthetic oligonucleotide; CAG chr11 5155882 5155901 5155898 +
taggcagctaatctaatatt

SEQ ID NO: 598 - DNA, 20 bp, Artificial Sequence
  Synthetic oligonucleotide; AGG chr11 5155883 5155902 5155899 +
aggcagctaatctaatattc

SEQ ID NO: 599 - DNA, 20 bp, Artificial Sequence
  Synthetic oligonucleotide; AAG chr11 5155902 5155921 5155918 +
caggttattcttttgtcact

SEQ ID NO: 600 - DNA, 20 bp, Artificial Sequence
  Synthetic oligonucleotide; TAG chr11 5155913 5155932 5155929 +
tttgtcactaagaaacaatt

SEQ ID NO: 601 - DNA, 20 bp, Artificial Sequence
  Synthetic oligonucleotide; TAG chr11 5155918 5155937 5155934 +
cactaagaaacaatttagac

SEQ ID NO: 602 - DNA, 20 bp, Artificial Sequence
  Synthetic oligonucleotide; TGG chr11 5155930 5155949 5155946 +
atttagactagtataccatt

SEQ ID NO: 603 - DNA, 20 bp, Artificial Sequence
  Synthetic oligonucleotide; TGG chr11 5155970 5155989 5155986 +
atactgattttatttaaatt

SEQ ID NO: 604 - DNA, 20 bp, Artificial Sequence
  Synthetic oligonucleotide; GGG chr11 5155971 5155990 5155987 +
tactgattttatttaaattt

SEQ ID NO: 605 - DNA, 20 bp, Artificial Sequence
  Synthetic oligonucleotide; GGG chr11 5155972 5155991 5155988 +
actgattttatttaaatttg

SEQ ID NO: 606 - DNA, 20 bp, Artificial Sequence
  Synthetic oligonucleotide; GGG chr11 5155973 5155992 5155989 +
ctgattttatttaaatttgg

SEQ ID NO: 607 - DNA, 20 bp, Artificial Sequence
  Synthetic oligonucleotide; AAG chr11 5155983 5156002 5155999 +
ttaaatttgggggctctcca

SEQ ID NO: 608 - DNA, 20 bp, Artificial Sequence
  Synthetic oligonucleotide; TGG chr11 5155994 5156013 5156010 +
ggctctccaaagttctatct

SEQ ID NO: 609 - DNA, 20 bp, Artificial Sequence
  Synthetic oligonucleotide; GGG chr11 5155995 5156014 5156011 +
gctctccaaagttctatctt

SEQ ID NO: 610 - DNA, 20 bp, Artificial Sequence
  Synthetic oligonucleotide; TGG chr11 5156028 5156047 5156044 +
ctaaaactattcacatgtgc

SEQ ID NO: 611 - DNA, 20 bp, Artificial Sequence
  Synthetic oligonucleotide; TAG chr11 5156055 5156074 5156071 +
tccatctactccaaataatt

SEQ ID NO: 612 - DNA, 20 bp, Artificial Sequence
  Synthetic oligonucleotide; CAG chr11 5156096 5156115 5156112 +
aactcctataacaatatttc

SEQ ID NO: 613 - DNA, 20 bp, Artificial Sequence
  Synthetic oligonucleotide; CAG chr11 5156101 5156120 5156117 +
ctataacaatatttccagcc

SEQ ID NO: 614 - DNA, 20 bp, Artificial Sequence
  Synthetic oligonucleotide; AAG chr11 5156122 5156141 5156138 +
agattttctccctctgttcc

SEQ ID NO: 615 - DNA, 20 bp, Artificial Sequence
  Synthetic oligonucleotide; CAG chr11 5156129 5156148 5156145 +
ctccctctgttccaagtaca

SEQ ID NO: 616 - DNA, 20 bp, Artificial Sequence
  Synthetic oligonucleotide; AGG chr11 5156130 5156149 5156146 +
tccctctgttccaagtacac

SEQ ID NO: 617 - DNA, 20 bp, Artificial Sequence
  Synthetic oligonucleotide; CAG chr11 5156135 5156154 5156151 +
ctgttccaagtacacaggaa

SEQ ID NO: 618 - DNA, 20 bp, Artificial Sequence
  Synthetic oligonucleotide; TAG chr11 5156156 5156175 5156172 +
agcatgtactgcccaaattt

SEQ ID NO: 619 - DNA, 20 bp, Artificial Sequence
  Synthetic oligonucleotide; GAG chr11 5156192 5156211 5156208 +
tcctttgaaacattgtcaat

SEQ ID NO: 620 - DNA, 20 bp, Artificial Sequence
  Synthetic oligonucleotide; AAG chr11 5156210 5156229 5156226 +
atgagttctacacttaattc

SEQ ID NO: 621 - DNA, 20 bp, Artificial Sequence
  Synthetic oligonucleotide; AGG chr11 5156211 5156230 5156227 +
tgagttctacacttaattca

SEQ ID NO: 622 - DNA, 20 bp, Artificial Sequence
  Synthetic oligonucleotide; TGG chr11 5156244 5156263 5156260 +
ttcattgtacttgtaaatat

SEQ ID NO: 623 - DNA, 20 bp, Artificial Sequence
  Synthetic oligonucleotide; AAG chr11 5156247 5156266 5156263 +
attgtacttgtaaatattgg

SEQ ID NO: 624 - DNA, 20 bp, Artificial Sequence
  Synthetic oligonucleotide; TGG chr11 5156279 5156298 5156295 +
tatgcatcaataactatctc

SEQ ID NO: 625 - DNA, 20 bp, Artificial Sequence
  Synthetic oligonucleotide; TAG chr11 5156289 5156308 5156305 +
taactatctctggatttttt

SEQ ID NO: 626 - DNA, 20 bp, Artificial Sequence
  Synthetic oligonucleotide; TAG chr11 5156293 5156312 5156309 +
tatctctggatttttttagc

SEQ ID NO: 627 - DNA, 20 bp, Artificial Sequence
  Synthetic oligonucleotide; GAG chr11 5156324 5156343 5156340 +
attttttttttctttttttt

SEQ ID NO: 628 - DNA, 20 bp, Artificial Sequence
  Synthetic oligonucleotide; CAG chr11 5156328 5156347 5156344 +
tttttttcttttttttgaga

SEQ ID NO: 629 - DNA, 20 bp, Artificial Sequence
  Synthetic oligonucleotide; GAG chr11 5156330 5156349 5156346 +
tttttcttttttttgagaca

SEQ ID NO: 630 - DNA, 20 bp, Artificial Sequence
  Synthetic oligonucleotide; CAG chr11 5156348 5156367 5156364 +
cagagtctctctctgtcgcc

SEQ ID NO: 631 - DNA, 20 bp, Artificial Sequence
  Synthetic oligonucleotide; AGG chr11 5156349 5156368 5156365 +
agagtctctctctgtcgccc

SEQ ID NO: 632 - DNA, 20 bp, Artificial Sequence
  Synthetic oligonucleotide; TGG chr11 5156353 5156372 5156369 +
tctctctctgtcgcccaggc

SEQ ID NO: 633 - DNA, 20 bp, Artificial Sequence
  Synthetic oligonucleotide; GAG chr11 5156355 5156374 5156371 +
tctctctgtcgcccaggctg

SEQ ID NO: 634 - DNA, 20 bp, Artificial Sequence
  Synthetic oligonucleotide; CAG chr11 5156360 5156379 5156376 +
ctgtcgcccaggctggagtg

SEQ ID NO: 635 - DNA, 20 bp, Artificial Sequence
  Synthetic oligonucleotide; TGG chr11 5156363 5156382 5156379 +
tcgcccaggctggagtgcag

SEQ ID NO: 636 - DNA, 20 bp, Artificial Sequence
  Synthetic oligonucleotide; AAG chr11 5156387 5156406 5156403 +
ccctgatctctgctcactgc

SEQ ID NO: 637 - DNA, 20 bp, Artificial Sequence
  Synthetic oligonucleotide; CAG chr11 5156424 5156443 5156440 +
ttcacgccattctcccgcct

SEQ ID NO: 638 - DNA, 20 bp, Artificial Sequence
  Synthetic oligonucleotide; TAG chr11 5156433 5156452 5156449 +
ttctcccgcctcagcctcca

SEQ ID NO: 639 - DNA, 20 bp, Artificial Sequence
  Synthetic oligonucleotide; TAG chr11 5156436 5156455 5156452 +
tcccgcctcagcctccatag

SEQ ID NO: 640 - DNA, 20 bp, Artificial Sequence
  Synthetic oligonucleotide; TGG chr11 5156440 5156459 5156456 +
gcctcagcctccatagtagc

SEQ ID NO: 641 - DNA, 20 bp, Artificial Sequence
  Synthetic oligonucleotide; GGG chr11 5156441 5156460 5156457 +
cctcagcctccatagtagct

SEQ ID NO: 642 - DNA, 20 bp, Artificial Sequence
  Synthetic oligonucleotide; CAG chr11 5156448 5156467 5156464 +
ctccatagtagctgggacta

SEQ ID NO: 643 - DNA, 20 bp, Artificial Sequence
  Synthetic oligonucleotide; AGG chr11 5156449 5156468 5156465 +
tccatagtagctgggactac

SEQ ID NO: 644 - DNA, 20 bp, Artificial Sequence
  Synthetic oligonucleotide; AAG chr11 5156463 5156482 5156479 +
gactacaggcacccgccacc

SEQ ID NO: 645 - DNA, 20 bp, Artificial Sequence
  Synthetic oligonucleotide; CGG chr11 5156468 5156487 5156484 +
caggcacccgccaccaagcc

SEQ ID NO: 646 - DNA, 20 bp, Artificial Sequence
  Synthetic oligonucleotide; TAG chr11 5156490 5156509 5156506 +
gctaattttttgtatttttt

SEQ ID NO: 647 - DNA, 20 bp, Artificial Sequence
  Synthetic oligonucleotide; TAG chr11 5156493 5156512 5156509 +
aattttttgtatttttttag

SEQ ID NO: 648 - DNA, 20 bp, Artificial Sequence
  Synthetic oligonucleotide; GAG chr11 5156495 5156514 5156511 +
ttttttgtatttttttagta

SEQ ID NO: 649 - DNA, 20 bp, Artificial Sequence
  Synthetic oligonucleotide; CGG chr11 5156499 5156518 5156515 +
ttgtatttttttagtagaga

SEQ ID NO: 650 - DNA, 20 bp, Artificial Sequence
  Synthetic oligonucleotide; GGG chr11 5156500 5156519 5156516 +
tgtatttttttagtagagac

SEQ ID NO: 651 - DNA, 20 bp, Artificial Sequence
  Synthetic oligonucleotide; GGG chr11 5156501 5156520 5156517 +
gtatttttttagtagagacg

SEQ ID NO: 652 - DNA, 20 bp, Artificial Sequence
  Synthetic oligonucleotide; TAG chr11 5156515 5156534 5156531 +
gagacggggtttcactgtgt

SEQ ID NO: 653 - DNA, 20 bp, Artificial Sequence
  Synthetic oligonucleotide; CAG chr11 5156519 5156538 5156535 +
cggggtttcactgtgttagc

SEQ ID NO: 654 - DNA, 20 bp, Artificial Sequence
  Synthetic oligonucleotide; AGG chr11 5156520 5156539 5156536 +
ggggtttcactgtgttagcc

SEQ ID NO: 655 - DNA, 20 bp, Artificial Sequence
  Synthetic oligonucleotide; TGG chr11 5156524 5156543 5156540 +
tttcactgtgttagccagga

SEQ ID NO: 656 - DNA, 20 bp, Artificial Sequence
  Synthetic oligonucleotide; AAG chr11 5156570 5156589 5156586 +
ccacccgcctccgcctccca

SEQ ID NO: 657 - DNA, 20 bp, Artificial Sequence
  Synthetic oligonucleotide; TGG chr11 5156576 5156595 5156592 +
gcctccgcctcccaaagtgc

SEQ ID NO: 658 - DNA, 20 bp, Artificial Sequence
  Synthetic oligonucleotide; GGG chr11 5156577 5156596 5156593 +
cctccgcctcccaaagtgct

SEQ ID NO: 659 - DNA, 20 bp, Artificial Sequence
  Synthetic oligonucleotide; CAG chr11 5156584 5156603 5156600 +
ctcccaaagtgctgggatca

SEQ ID NO: 660 - DNA, 20 bp, Artificial Sequence
  Synthetic oligonucleotide; AGG chr11 5156585 5156604 5156601 +
tcccaaagtgctgggatcac

SEQ ID NO: 661 - DNA, 20 bp, Artificial Sequence
  Synthetic oligonucleotide; GAG chr11 5156591 5156610 5156607 +
agtgctgggatcacaggcgt

SEQ ID NO: 662 - DNA, 20 bp, Artificial Sequence
  Synthetic oligonucleotide; CGG chr11 5156604 5156623 5156620 +
caggcgtgagccactgcacc

SEQ ID NO: 663 - DNA, 20 bp, Artificial Sequence
  Synthetic oligonucleotide; AAG chr11 5156639 5156658 5156655 +
tttttaaatttatttttatt

SEQ ID NO: 664 - DNA, 20 bp, Artificial Sequence
  Synthetic oligonucleotide; AGG chr11 5156640 5156659 5156656 +
ttttaaatttatttttatta

SEQ ID NO: 665 - DNA, 20 bp, Artificial Sequence
  Synthetic oligonucleotide; GAG chr11 5156690 5156709 5156706 +
tttactttttttttttcctt

SEQ ID NO: 666 - DNA, 20 bp, Artificial Sequence
  Synthetic oligonucleotide; CGG chr11 5156694 5156713 5156710 +
ctttttttttttccttgaga

SEQ ID NO: 667 - DNA, 20 bp, Artificial Sequence
  Synthetic oligonucleotide; GAG chr11 5156696 5156715 5156712 +
ttttttttttccttgagacg

SEQ ID NO: 668 - DNA, 20 bp, Artificial Sequence
  Synthetic oligonucleotide; CAG chr11 5156714 5156733 5156730 +
cggagtctcgctccgtcatc

SEQ ID NO: 669 - DNA, 20 bp, Artificial Sequence
  Synthetic oligonucleotide; AGG chr11 5156715 5156734 5156731 +
ggagtctcgctccgtcatcc

SEQ ID NO: 670 - DNA, 20 bp, Artificial Sequence
  Synthetic oligonucleotide; TGG chr11 5156719 5156738 5156735 +
tctcgctccgtcatccaggc

SEQ ID NO: 671 - DNA, 20 bp, Artificial Sequence
  Synthetic oligonucleotide; GAG chr11 5156721 5156740 5156737 +
tcgctccgtcatccaggctg

SEQ ID NO: 672 - DNA, 20 bp, Artificial Sequence
  Synthetic oligonucleotide; CAG chr11 5156726 5156745 5156742 +
ccgtcatccaggctggagtg

SEQ ID NO: 673 - DNA, 20 bp, Artificial Sequence
  Synthetic oligonucleotide; TGG chr11 5156729 5156748 5156745 +
tcatccaggctggagtgcag

SEQ ID NO: 674 - DNA, 20 bp, Artificial Sequence
  Synthetic oligonucleotide; TAG chr11 5156732 5156751 5156748 +
tccaggctggagtgcagtgg

SEQ ID NO: 675 - DNA, 20 bp, Artificial Sequence
  Synthetic oligonucleotide; AGG chr11 5156733 5156752 5156749 +
ccaggctggagtgcagtggt

SEQ ID NO: 676 - DNA, 20 bp, Artificial Sequence
  Synthetic oligonucleotide; TGG chr11 5156740 5156759 5156756 +
ggagtgcagtggtaggatct

SEQ ID NO: 677 - DNA, 20 bp, Artificial Sequence
  Synthetic oligonucleotide; CAG chr11 5156766 5156785 5156782 +
actgcaacctccgcccccac

SEQ ID NO: 678 - DNA, 20 bp, Artificial Sequence
  Synthetic oligonucleotide; AGG chr11 5156767 5156786 5156783 +
ctgcaacctccgcccccacc

SEQ ID NO: 679 - DNA, 20 bp, Artificial Sequence
  Synthetic oligonucleotide; AAG chr11 5156773 5156792 5156789 +
cctccgcccccaccaggttc

SEQ ID NO: 680 - DNA, 20 bp, Artificial Sequence
  Synthetic oligonucleotide; AAG chr11 5156790 5156809 5156806 +
ttcaagcgattctcctgccc

SEQ ID NO: 681 - DNA, 20 bp, Artificial Sequence
  Synthetic oligonucleotide; AAG chr11 5156799 5156818 5156815 +
ttctcctgcccaagcctccc

SEQ ID NO: 682 - DNA, 20 bp, Artificial Sequence
  Synthetic oligonucleotide; TAG chr11 5156802 5156821 5156818 +
tcctgcccaagcctcccaag

SEQ ID NO: 683 - DNA, 20 bp, Artificial Sequence
  Synthetic oligonucleotide; AGG chr11 5156803 5156822 5156819 +
cctgcccaagcctcccaagt

SEQ ID NO: 684 - DNA, 20 bp, Artificial Sequence
  Synthetic oligonucleotide; TGG chr11 5156806 5156825 5156822 +
gcccaagcctcccaagtagg

SEQ ID NO: 685 - DNA, 20 bp, Artificial Sequence
  Synthetic oligonucleotide; GGG chr11 5156807 5156826 5156823 +
cccaagcctcccaagtaggt

SEQ ID NO: 686 - DNA, 20 bp, Artificial Sequence
  Synthetic oligonucleotide; CAG chr11 5156814 5156833 5156830 +
ctcccaagtaggtgggatta

SEQ ID NO: 687 - DNA, 20 bp, Artificial Sequence
  Synthetic oligonucleotide; AGG chr11 5156815 5156834 5156831 +
tcccaagtaggtgggattac

SEQ ID NO: 688 - DNA, 20 bp, Artificial Sequence
  Synthetic oligonucleotide; TGG chr11 5156834 5156853 5156850 +
caggcgcctgccaccacgcc

SEQ ID NO: 689 - DNA, 20 bp, Artificial Sequence
  Synthetic oligonucleotide; TAG chr11 5156854 5156873 5156870 +
tggctaattttttgtatttt

SEQ ID NO: 690 - DNA, 20 bp, Artificial Sequence
  Synthetic oligonucleotide; TAG chr11 5156857 5156876 5156873 +
ctaattttttgtatttttag

SEQ ID NO: 691 - DNA, 20 bp, Artificial Sequence
  Synthetic oligonucleotide; GAG chr11 5156859 5156878 5156875 +
aattttttgtatttttagta

SEQ ID NO: 692 - DNA, 20 bp, Artificial Sequence
  Synthetic oligonucleotide; CAG chr11 5156863 5156882 5156879 +
ttttgtatttttagtagaga

SEQ ID NO: 693 - DNA, 20 bp, Artificial Sequence
  Synthetic oligonucleotide; AGG chr11 5156864 5156883 5156880 +
tttgtatttttagtagagac

SEQ ID NO: 694 - DNA, 20 bp, Artificial Sequence
  Synthetic oligonucleotide; GGG chr11 5156865 5156884 5156881 +
ttgtatttttagtagagaca

SEQ ID NO: 695 - DNA, 20 bp, Artificial Sequence
  Synthetic oligonucleotide; TGG chr11 5156879 5156898 5156895 +
gagacagggtttcaccatgt

SEQ ID NO: 696 - DNA, 20 bp, Artificial Sequence
  Synthetic oligonucleotide; CAG chr11 5156883 5156902 5156899 +
cagggtttcaccatgttggt

SEQ ID NO: 697 - DNA, 20 bp, Artificial Sequence
  Synthetic oligonucleotide; AGG chr11 5156884 5156903 5156900 +
agggtttcaccatgttggtc

SEQ ID NO: 698 - DNA, 20 bp, Artificial Sequence
  Synthetic oligonucleotide; TGG chr11 5156888 5156907 5156904 +
tttcaccatgttggtcaggc

SEQ ID NO: 699 - DNA, 20 bp, Artificial Sequence
  Synthetic oligonucleotide; TGG chr11 5156894 5156913 5156910 +
catgttggtcaggctggtct

SEQ ID NO: 700 - DNA, 20 bp, Artificial Sequence
  Synthetic oligonucleotide; TGG chr11 5156924 5156943 5156940 +
acctcatgatccacctgcct

SEQ ID NO: 701 - DNA, 20 bp, Artificial Sequence
  Synthetic oligonucleotide; AAG chr11 5156934 5156953 5156950 +
ccacctgccttggcctccca

SEQ ID NO: 702 - DNA, 20 bp, Artificial Sequence
  Synthetic oligonucleotide; GAG chr11 5156941 5156960 5156957 +
ccttggcctcccaaagtgct

SEQ ID NO: 703 - DNA, 20 bp, Artificial Sequence
  Synthetic oligonucleotide; CAG chr11 5156948 5156967 5156964 +
ctcccaaagtgctgagatta

SEQ ID NO: 704 - DNA, 20 bp, Artificial Sequence
  Synthetic oligonucleotide; AGG chr11 5156949 5156968 5156965 +
tcccaaagtgctgagattac

SEQ ID NO: 705 - DNA, 20 bp, Artificial Sequence
  Synthetic oligonucleotide; TGG chr11 5156955 5156974 5156971 +
agtgctgagattacaggcat

SEQ ID NO: 706 - DNA, 20 bp, Artificial Sequence
  Synthetic oligonucleotide; CAG chr11 5156968 5156987 5156984 +
caggcattggccaccgcacc

SEQ ID NO: 707 - DNA, 20 bp, Artificial Sequence
  Synthetic oligonucleotide; GAG chr11 5156989 5157008 5157005 +
agcccatctttaccattttt

SEQ ID NO: 708 - DNA, 20 bp, Artificial Sequence
  Synthetic oligonucleotide; CGG chr11 5156996 5157015 5157012 +
ctttaccatttttgagtgta

SEQ ID NO: 709 - DNA, 20 bp, Artificial Sequence
  Synthetic oligonucleotide; CAG chr11 5157001 5157020 5157017 +
ccatttttgagtgtacggtt

SEQ ID NO: 710 - DNA, 20 bp, Artificial Sequence
  Synthetic oligonucleotide; TGG chr11 5157004 5157023 5157020 +
tttttgagtgtacggttcag

SEQ ID NO: 711 - DNA, 20 bp, Artificial Sequence
  Synthetic oligonucleotide; CAG chr11 5157104 5157123 5157120 +
tacatatgcacacatacaca

SEQ ID NO: 712 - DNA, 20 bp, Artificial Sequence
  Synthetic oligonucleotide; GAG chr11 5157106 5157125 5157122 +
catatgcacacatacacaca

SEQ ID NO: 713 - DNA, 20 bp, Artificial Sequence
  Synthetic oligonucleotide; AGG chr11 5157107 5157126 5157123 +
atatgcacacatacacacag

SEQ ID NO: 714 - DNA, 20 bp, Artificial Sequence
  Synthetic oligonucleotide; GGG chr11 5157108 5157127 5157124 +
tatgcacacatacacacaga

SEQ ID NO: 715 - DNA, 20 bp, Artificial Sequence
  Synthetic oligonucleotide; GAG chr11 5157110 5157129 5157126 +
tgcacacatacacacagagg

SEQ ID NO: 716 - DNA, 20 bp, Artificial Sequence
  Synthetic oligonucleotide; GAG chr11 5157112 5157131 5157128 +
cacacatacacacagaggga

SEQ ID NO: 717 - DNA, 20 bp, Artificial Sequence
  Synthetic oligonucleotide; GAG chr11 5157114 5157133 5157130 +
cacatacacacagagggaga

SEQ ID NO: 718 - DNA, 20 bp, Artificial Sequence
  Synthetic oligonucleotide; GAG chr11 5157116 5157135 5157132 +
catacacacagagggagaga

SEQ ID NO: 719 - DNA, 20 bp, Artificial Sequence
  Synthetic oligonucleotide; GAG chr11 5157118 5157137 5157134 +
tacacacagagggagagaga

SEQ ID NO: 720 - DNA, 20 bp, Artificial Sequence
  Synthetic oligonucleotide; GAG chr11 5157120 5157139 5157136 +
cacacagagggagagagaga

SEQ ID NO: 721 - DNA, 20 bp, Artificial Sequence
  Synthetic oligonucleotide; TGG chr11 5157123 5157142 5157139 +
acagagggagagagagagag

SEQ ID NO: 722 - DNA, 20 bp, Artificial Sequence
  Synthetic oligonucleotide; GGG chr11 5157124 5157143 5157140 +
cagagggagagagagagagt

SEQ ID NO: 723 - DNA, 20 bp, Artificial Sequence
  Synthetic oligonucleotide; GAG chr11 5157126 5157145 5157142 +
gagggagagagagagagtgg

SEQ ID NO: 724 - DNA, 20 bp, Artificial Sequence
  Synthetic oligonucleotide; AGG chr11 5157127 5157146 5157143 +
agggagagagagagagtggg

SEQ ID NO: 725 - DNA, 20 bp, Artificial Sequence
  Synthetic oligonucleotide; GGG chr11 5157128 5157147 5157144 +
gggagagagagagagtggga

SEQ ID NO: 726 - DNA, 20 bp, Artificial Sequence
  Synthetic oligonucleotide; CGG chr11 5157173 5157192 5157189 +
cctttcttccctcccgccgc

SEQ ID NO: 727 - DNA, 20 bp, Artificial Sequence
  Synthetic oligonucleotide; AAG chr11 5157204 5157223 5157220 +
aatctactctctgtcttcat

SEQ ID NO: 728 - DNA, 20 bp, Artificial Sequence
  Synthetic oligonucleotide; GAG chr11 5157230 5157249 5157246 +
cacgtttttaacttccacac

SEQ ID NO: 729 - DNA, 20 bp, Artificial Sequence
  Synthetic oligonucleotide; TAG chr11 5157234 5157253 5157250 +
tttttaacttccacacgagt

SEQ ID NO: 730 - DNA, 20 bp, Artificial Sequence
  Synthetic oligonucleotide; TGG chr11 5157264 5157283 5157280 +
gatatttttctttctgtgct

SEQ ID NO: 731 - DNA, 20 bp, Artificial Sequence
  Synthetic oligonucleotide; CAG chr11 5157293 5157312 5157309 +
tcacttaacgtaattgcttt

SEQ ID NO: 732 - DNA, 20 bp, Artificial Sequence
  Synthetic oligonucleotide; TGG chr11 5157340 5157359 5157356 +
taatatttcattctttttta

SEQ ID NO: 733 - DNA, 20 bp, Artificial Sequence
  Synthetic oligonucleotide; CAG chr11 5157426 5157445 5157442 +
ttatctgttgacgaatacat

SEQ ID NO: 734 - DNA, 20 bp, Artificial Sequence
  Synthetic oligonucleotide; TGG chr11 5157443 5157462 5157459 +
catcagttgatttcaaatct

SEQ ID NO: 735 - DNA, 20 bp, Artificial Sequence
  Synthetic oligonucleotide; TAG chr11 5157456 5157475 5157472 +
caaatcttggcgtttgtgaa

SEQ ID NO: 736 - DNA, 20 bp, Artificial Sequence
  Synthetic oligonucleotide; AAG chr11 5157469 5157488 5157485 +
ttgtgaatagtgctataata

SEQ ID NO: 737 - DNA, 20 bp, Artificial Sequence
  Synthetic oligonucleotide; TGG chr11 5157473 5157492 5157489 +
gaatagtgctataataaaga

SEQ ID NO: 738 - DNA, 20 bp, Artificial Sequence
  Synthetic oligonucleotide; GGG chr11 5157474 5157493 5157490 +
aatagtgctataataaagat

SEQ ID NO: 739 - DNA, 20 bp, Artificial Sequence
  Synthetic oligonucleotide; GAG chr11 5157476 5157495 5157492 +
tagtgctataataaagatgg

SEQ ID NO: 740 - DNA, 20 bp, Artificial Sequence
  Synthetic oligonucleotide; AAG chr11 5157515 5157534 5157531 +
acatactaatttattctttt

SEQ ID NO: 741 - DNA, 20 bp, Artificial Sequence
  Synthetic oligonucleotide; AGG chr11 5157516 5157535 5157532 +
catactaatttattctttta

SEQ ID NO: 742 - DNA, 20 bp, Artificial Sequence
  Synthetic oligonucleotide; GGG chr11 5157517 5157536 5157533 +
atactaatttattcttttaa

SEQ ID NO: 743 - DNA, 20 bp, Artificial Sequence
  Synthetic oligonucleotide; TAG chr11 5157528 5157547 5157544 +
ttcttttaagggtatatacc

SEQ ID NO: 744 - DNA, 20 bp, Artificial Sequence
  Synthetic oligonucleotide; AGG chr11 5157529 5157548 5157545 +
tcttttaagggtatatacct

SEQ ID NO: 745 - DNA, 20 bp, Artificial Sequence
  Synthetic oligonucleotide; GAG chr11 5157531 5157550 5157547 +
ttttaagggtatatacctag

SEQ ID NO: 746 - DNA, 20 bp, Artificial Sequence
  Synthetic oligonucleotide; TGG chr11 5157543 5157562 5157559 +
atacctaggagtgatattgc

SEQ ID NO: 747 - DNA, 20 bp, Artificial Sequence
  Synthetic oligonucleotide; TGG chr11 5157552 5157571 5157568 +
agtgatattgctggatcata

SEQ ID NO: 748 - DNA, 20 bp, Artificial Sequence
  Synthetic oligonucleotide; TAG chr11 5157555 5157574 5157571 +
gatattgctggatcatatgg

SEQ ID NO: 749 - DNA, 20 bp, Artificial Sequence
  Synthetic oligonucleotide; CAG chr11 5157630 5157649 5157646 +
ccaatttgtactcccaccaa

SEQ ID NO: 750 - DNA, 20 bp, Artificial Sequence
  Synthetic oligonucleotide; AAG chr11 5157636 5157655 5157652 +
tgtactcccaccaacagtgt

SEQ ID NO: 751 - DNA, 20 bp, Artificial Sequence
  Synthetic oligonucleotide; GAG chr11 5157638 5157657 5157654 +
tactcccaccaacagtgtaa

SEQ ID NO: 752 - DNA, 20 bp, Artificial Sequence
  Synthetic oligonucleotide; AGG chr11 5157639 5157658 5157655 +
actcccaccaacagtgtaag

SEQ ID NO: 753 - DNA, 20 bp, Artificial Sequence
  Synthetic oligonucleotide; GGG chr11 5157640 5157659 5157656 +
ctcccaccaacagtgtaaga

SEQ ID NO: 754 - DNA, 20 bp, Artificial Sequence
  Synthetic oligonucleotide; AAG chr11 5157666 5157685 5157682 +
ccctttgtccacatccacac

SEQ ID NO: 755 - DNA, 20 bp, Artificial Sequence
  Synthetic oligonucleotide; AAG chr11 5157697 5157716 5157713 +
atttccttttgttttgttat

SEQ ID NO: 756 - DNA, 20 bp, Artificial Sequence
  Synthetic oligonucleotide; AAG chr11 5157711 5157730 5157727 +
tgttataagctattttaact

SEQ ID NO: 757 - DNA, 20 bp, Artificial Sequence
  Synthetic oligonucleotide; AGG chr11 5157712 5157731 5157728 +
gttataagctattttaacta

SEQ ID NO: 758 - DNA, 20 bp, Artificial Sequence
  Synthetic oligonucleotide; GAG chr11 5157716 5157735 5157732 +
taagctattttaactaaggt

SEQ ID NO: 759 - DNA, 20 bp, Artificial Sequence
  Synthetic oligonucleotide; TGG chr11 5157733 5157752 5157749 +
ggtgagatgatatcacattg

SEQ ID NO: 760 - DNA, 20 bp, Artificial Sequence
  Synthetic oligonucleotide; TGG chr11 5157748 5157767 5157764 +
cattgtggttttgatttatc

SEQ ID NO: 761 - DNA, 20 bp, Artificial Sequence
  Synthetic oligonucleotide; TAG chr11 5157755 5157774 5157771 +
gttttgatttatctggtgat

SEQ ID NO: 762 - DNA, 20 bp, Artificial Sequence
  Synthetic oligonucleotide; TGG chr11 5157786 5157805 5157802 +
aacattttttcaaatacctc

SEQ ID NO: 763 - DNA, 20 bp, Artificial Sequence
  Synthetic oligonucleotide; GGG chr11 5157787 5157806 5157803 +
acattttttcaaatacctct

SEQ ID NO: 764 - DNA, 20 bp, Artificial Sequence
  Synthetic oligonucleotide; TGG chr11 5157799 5157818 5157815 +
atacctctgggccatttgta

SEQ ID NO: 765 - DNA, 20 bp, Artificial Sequence
  Synthetic oligonucleotide; GAG chr11 5157810 5157829 5157826 +
ccatttgtatggcttctttt

SEQ ID NO: 766 - DNA, 20 bp, Artificial Sequence
  Synthetic oligonucleotide; CAG chr11 5157824 5157843 5157840 +
tcttttgagaaatatctatt

SEQ ID NO: 767 - DNA, 20 bp, Artificial Sequence
  Synthetic oligonucleotide; AGG chr11 5157825 5157844 5157841 +
cttttgagaaatatctattc

SEQ ID NO: 768 - DNA, 20 bp, Artificial Sequence
  Synthetic oligonucleotide; TGG chr11 5157833 5157852 5157849 +
aaatatctattcaggtcttt

SEQ ID NO: 769 - DNA, 20 bp, Artificial Sequence
  Synthetic oligonucleotide; GAG chr11 5157867 5157886 5157883 +
ttatttatttattttctgtt

SEQ ID NO: 770 - DNA, 20 bp, Artificial Sequence
  Synthetic oligonucleotide; GAG chr11 5157876 5157895 5157892 +
tattttctgttgagttgctt

SEQ ID NO: 771 - DNA, 20 bp, Artificial Sequence
  Synthetic oligonucleotide; TGG chr11 5157893 5157912 5157909 +
cttgagtttcttgcatattc

SEQ ID NO: 772 - DNA, 20 bp, Artificial Sequence
  Synthetic oligonucleotide; TAG chr11 5157919 5157938 5157935 +
tcaattccttgtaaaatata

SEQ ID NO: 773 - DNA, 20 bp, Artificial Sequence
  Synthetic oligonucleotide; TGG chr11 5157947 5157966 5157963 +
aaatattttctcccattctt

SEQ ID NO: 774 - DNA, 20 bp, Artificial Sequence
  Synthetic oligonucleotide; GGG chr11 5157948 5157967 5157964 +
aatattttctcccattcttt

SEQ ID NO: 775 - DNA, 20 bp, Artificial Sequence
  Synthetic oligonucleotide; CAG chr11 5157984 5158003 5158000 +
ttattattttctttgctgtg

SEQ ID NO: 776 - DNA, 20 bp, Artificial Sequence
  Synthetic oligonucleotide; GAG chr11 5157986 5158005 5158002 +
attattttctttgctgtgca

SEQ ID NO: 777 - DNA, 20 bp, Artificial Sequence
  Synthetic oligonucleotide; TGG chr11 5158021 5158040 5158037 +
ccaattgtctatttttgttt

SEQ ID NO: 778 - DNA, 20 bp, Artificial Sequence
  Synthetic oligonucleotide; AAG chr11 5158039 5158058 5158055 +
tttggttatttgtgcttttg

SEQ ID NO: 779 - DNA, 20 bp, Artificial Sequence
  Synthetic oligonucleotide; TAG chr11 5158047 5158066 5158063 +
tttgtgcttttgaagtctca

SEQ ID NO: 780 - DNA, 20 bp, Artificial Sequence
  Synthetic oligonucleotide; CAG chr11 5158051 5158070 5158067 +
tgcttttgaagtctcataga

SEQ ID NO: 781 - DNA, 20 bp, Artificial Sequence
  Synthetic oligonucleotide; TGG chr11 5158079 5158098 5158095 +
gcccaaatcaatgaatgccc

SEQ ID NO: 782 - DNA, 20 bp, Artificial Sequence
  Synthetic oligonucleotide; GAG chr11 5158081 5158100 5158097 +
ccaaatcaatgaatgccctg

SEQ ID NO: 783 - DNA, 20 bp, Artificial Sequence
  Synthetic oligonucleotide; AGG chr11 5158082 5158101 5158098 +
caaatcaatgaatgccctgg

SEQ ID NO: 784 - DNA, 20 bp, Artificial Sequence
  Synthetic oligonucleotide; GGG chr11 5158083 5158102 5158099 +
aaatcaatgaatgccctgga

SEQ ID NO: 785 - DNA, 20 bp, Artificial Sequence
  Synthetic oligonucleotide; CAG chr11 5158105 5158124 5158121 +
gtttccccactgttttcttc

SEQ ID NO: 786 - DNA, 20 bp, Artificial Sequence
  Synthetic oligonucleotide; TAG chr11 5158108 5158127 5158124 +
tccccactgttttcttccag

SEQ ID NO: 787 - DNA, 20 bp, Artificial Sequence
  Synthetic oligonucleotide; CAG chr11 5158122 5158141 5158138 +
ttccagtagtttcataattt

SEQ ID NO: 788 - DNA, 20 bp, Artificial Sequence
  Synthetic oligonucleotide; AGG chr11 5158123 5158142 5158139 +
tccagtagtttcataatttc

SEQ ID NO: 789 - DNA, 20 bp, Artificial Sequence
  Synthetic oligonucleotide; TGG chr11 5158129 5158148 5158145 +
agtttcataatttcaggtat

SEQ ID NO: 790 - DNA, 20 bp, Artificial Sequence
  Synthetic oligonucleotide; AAG chr11 5158136 5158155 5158152 +
taatttcaggtattggattc

SEQ ID NO: 791 - DNA, 20 bp, Artificial Sequence
  Synthetic oligonucleotide; TAG chr11 5158171 5158190 5158187 +
cttgatttgatttttgtata

SEQ ID NO: 792 - DNA, 20 bp, Artificial Sequence
  Synthetic oligonucleotide; GAG chr11 5158175 5158194 5158191 +
atttgatttttgtatatagt

SEQ ID NO: 793 - DNA, 20 bp, Artificial Sequence
  Synthetic oligonucleotide; GAG chr11 5158177 5158196 5158193 +
ttgatttttgtatatagtga

SEQ ID NO: 794 - DNA, 20 bp, Artificial Sequence
  Synthetic oligonucleotide; TAG chr11 5158181 5158200 5158197 +
tttttgtatatagtgagaga

SEQ ID NO: 795 - DNA, 20 bp, Artificial Sequence
  Synthetic oligonucleotide; AGG chr11 5158182 5158201 5158198 +
ttttgtatatagtgagagat

SEQ ID NO: 796 - DNA, 20 bp, Artificial Sequence
  Synthetic oligonucleotide; GGG chr11 5158183 5158202 5158199 +
tttgtatatagtgagagata

SEQ ID NO: 797 - DNA, 20 bp, Artificial Sequence
  Synthetic oligonucleotide; GGG chr11 5158184 5158203 5158200 +
ttgtatatagtgagagatag

SEQ ID NO: 798 - DNA, 20 bp, Artificial Sequence
  Synthetic oligonucleotide; TGG chr11 5158209 5158228 5158225 +
cgattttactcttttgcaaa

SEQ ID NO: 799 - DNA, 20 bp, Artificial Sequence
  Synthetic oligonucleotide; CAG chr11 5158217 5158236 5158233 +
ctcttttgcaaatggatatc

SEQ ID NO: 800 - DNA, 20 bp, Artificial Sequence
  Synthetic oligonucleotide; TAG chr11 5158226 5158245 5158242 +
aaatggatatccagttttcc

SEQ ID NO: 801 - DNA, 20 bp, Artificial Sequence
  Synthetic oligonucleotide; AAG chr11 5158243 5158262 5158259 +
tcctagcactgtttcttgaa

SEQ ID NO: 802 - DNA, 20 bp, Artificial Sequence
  Synthetic oligonucleotide; GAG chr11 5158276 5158295 5158292 +
cctttttttttttttttttt

SEQ ID NO: 803 - DNA, 20 bp, Artificial Sequence
  Synthetic oligonucleotide; TGG chr11 5158280 5158299 5158296 +
ttttttttttttttttgaga

SEQ ID NO: 804 - DNA, 20 bp, Artificial Sequence
  Synthetic oligonucleotide; GAG chr11 5158282 5158301 5158298 +
ttttttttttttttgagatg

SEQ ID NO: 805 - DNA, 20 bp, Artificial Sequence
  Synthetic oligonucleotide; CAG chr11 5158298 5158317 5158314 +
gatggagtctcactgttgcc

SEQ ID NO: 806 - DNA, 20 bp, Artificial Sequence
  Synthetic oligonucleotide; AGG chr11 5158299 5158318 5158315 +
atggagtctcactgttgccc

SEQ ID NO: 807 - DNA, 20 bp, Artificial Sequence
  Synthetic oligonucleotide; TGG chr11 5158303 5158322 5158319 +
agtctcactgttgcccaggc

SEQ ID NO: 808 - DNA, 20 bp, Artificial Sequence
  Synthetic oligonucleotide; GAG chr11 5158305 5158324 5158321 +
tctcactgttgcccaggctg

SEQ ID NO: 809 - DNA, 20 bp, Artificial Sequence
  Synthetic oligonucleotide; CAG chr11 5158310 5158329 5158326 +
ctgttgcccaggctggagtg

SEQ ID NO: 810 - DNA, 20 bp, Artificial Sequence
  Synthetic oligonucleotide; TGG chr11 5158313 5158332 5158329 +
ttgcccaggctggagtgcag

SEQ ID NO: 811 - DNA, 20 bp, Artificial Sequence
  Synthetic oligonucleotide; CAG chr11 5158316 5158335 5158332 +
cccaggctggagtgcagtgg

SEQ ID NO: 812 - DNA, 20 bp, Artificial Sequence
  Synthetic oligonucleotide; TGG chr11 5158327 5158346 5158343 +
gtgcagtggcagcacaatct

SEQ ID NO: 813 - DNA, 20 bp, Artificial Sequence
  Synthetic oligonucleotide; CAG chr11 5158351 5158370 5158367 +
tcactgcaacttctgcctcc

SEQ ID NO: 814 - DNA, 20 bp, Artificial Sequence
  Synthetic oligonucleotide; AGG chr11 5158352 5158371 5158368 +
cactgcaacttctgcctccc

SEQ ID NO: 815 - DNA, 20 bp, Artificial Sequence
  Synthetic oligonucleotide; AAG chr11 5158358 5158377 5158374 +
aacttctgcctcccaggttc

SEQ ID NO: 816 - DNA, 20 bp, Artificial Sequence
  Synthetic oligonucleotide; CAG chr11 5158375 5158394 5158391 +
ttcaagcgattctcctgcct

SEQ ID NO: 817 - DNA, 20 bp, Artificial Sequence
  Synthetic oligonucleotide; GAG chr11 5158384 5158403 5158400 +
ttctcctgcctcagcctcct

SEQ ID NO: 818 - DNA, 20 bp, Artificial Sequence
  Synthetic oligonucleotide; TGG chr11 5158391 5158410 5158407 +
gcctcagcctcctgagtatc

SEQ ID NO: 819 - DNA, 20 bp, Artificial Sequence
  Synthetic oligonucleotide; GGG chr11 5158392 5158411 5158408 +
cctcagcctcctgagtatct

SEQ ID NO: 820 - DNA, 20 bp, Artificial Sequence
  Synthetic oligonucleotide; CAG chr11 5158399 5158418 5158415 +
ctcctgagtatctgggatta

SEQ ID NO: 821 - DNA, 20 bp, Artificial Sequence
  Synthetic oligonucleotide; AGG chr11 5158400 5158419 5158416 +
tcctgagtatctgggattac

SEQ ID NO: 822 - DNA, 20 bp, Artificial Sequence
  Synthetic oligonucleotide; GAG chr11 5158402 5158421 5158418 +
ctgagtatctgggattacag

SEQ ID NO: 823 - DNA, 20 bp, Artificial Sequence
  Synthetic oligonucleotide; TGG chr11 5158419 5158438 5158435 +
caggagcgccccaccatgcc

SEQ ID NO: 824 - DNA, 20 bp, Artificial Sequence
  Synthetic oligonucleotide; TAG chr11 5158438 5158457 5158454 +
ctggctaatttttgtatttt

SEQ ID NO: 825 - DNA, 20 bp, Artificial Sequence
  Synthetic oligonucleotide; TAG chr11 5158441 5158460 5158457 +
gctaatttttgtatttttag

SEQ ID NO: 826 - DNA, 20 bp, Artificial Sequence
  Synthetic oligonucleotide; GAG chr11 5158443 5158462 5158459 +
taatttttgtatttttagta

SEQ ID NO: 827 - DNA, 20 bp, Artificial Sequence
  Synthetic oligonucleotide; CGG chr11 5158447 5158466 5158463 +
ttttgtatttttagtagaga

SEQ ID NO: 828 - DNA, 20 bp, Artificial Sequence
  Synthetic oligonucleotide; GAG chr11 5158449 5158468 5158465 +
ttgtatttttagtagagacg

SEQ ID NO: 829 - DNA, 20 bp, Artificial Sequence
  Synthetic oligonucleotide; TGG chr11 5158463 5158482 5158479 +
gagacggagtgtcaccacgt

SEQ ID NO: 830 - DNA, 20 bp, Artificial Sequence
  Synthetic oligonucleotide; CAG chr11 5158467 5158486 5158483 +
cggagtgtcaccacgttggt

SEQ ID NO: 831 - DNA, 20 bp, Artificial Sequence
  Synthetic oligonucleotide; AGG chr11 5158468 5158487 5158484 +
ggagtgtcaccacgttggtc

SEQ ID NO: 832 - DNA, 20 bp, Artificial Sequence
  Synthetic oligonucleotide; TGG chr11 5158472 5158491 5158488 +
tgtcaccacgttggtcaggc

SEQ ID NO: 833 - DNA, 20 bp, Artificial Sequence
  Synthetic oligonucleotide; CAG chr11 5158508 5158527 5158524 +
acctcgtgatccccccacct

SEQ ID NO: 834 - DNA, 20 bp, Artificial Sequence
  Synthetic oligonucleotide; AAG chr11 5158518 5158537 5158534 +
ccccccacctcagcctcaca

SEQ ID NO: 835 - DNA, 20 bp, Artificial Sequence
  Synthetic oligonucleotide; TGG chr11 5158524 5158543 5158540 +
acctcagcctcacaaagtgc

SEQ ID NO: 836 - DNA, 20 bp, Artificial Sequence
  Synthetic oligonucleotide; GGG chr11 5158525 5158544 5158541 +
cctcagcctcacaaagtgct

SEQ ID NO: 837 - DNA, 20 bp, Artificial Sequence
  Synthetic oligonucleotide; CAG chr11 5158532 5158551 5158548 +
ctcacaaagtgctgggatta

SEQ ID NO: 838 - DNA, 20 bp, Artificial Sequence
  Synthetic oligonucleotide; AGG chr11 5158533 5158552 5158549 +
tcacaaagtgctgggattac

SEQ ID NO: 839 - DNA, 20 bp, Artificial Sequence
  Synthetic oligonucleotide; GAG chr11 5158539 5158558 5158555 +
agtgctgggattacaggtgt

SEQ ID NO: 840 - DNA, 20 bp, Artificial Sequence
  Synthetic oligonucleotide; TGG chr11 5158552 5158571 5158568 +
caggtgtgagccactgcacc

SEQ ID NO: 841 - DNA, 20 bp, Artificial Sequence
  Synthetic oligonucleotide; AAG chr11 5158595 5158614 5158611 +
tgttcttgatgcctttgtta

SEQ ID NO: 842 - DNA, 20 bp, Artificial Sequence
  Synthetic oligonucleotide; TGG chr11 5158604 5158623 5158620 +
tgcctttgttaaagatgact

SEQ ID NO: 843 - DNA, 20 bp, Artificial Sequence
  Synthetic oligonucleotide; AAG chr11 5158612 5158631 5158628 +
ttaaagatgacttggttgtt

SEQ ID NO: 844 - DNA, 20 bp, Artificial Sequence
  Synthetic oligonucleotide; TGG chr11 5158619 5158638 5158635 +
tgacttggttgttaagtgcc

SEQ ID NO: 845 - DNA, 20 bp, Artificial Sequence
  Synthetic oligonucleotide; TGG chr11 5158631 5158650 5158647 +
taagtgcctggatttgcatc

SEQ ID NO: 846 - DNA, 20 bp, Artificial Sequence
  Synthetic oligonucleotide; GGG chr11 5158632 5158651 5158648 +
aagtgcctggatttgcatct

SEQ ID NO: 847 - DNA, 20 bp, Artificial Sequence
  Synthetic oligonucleotide; TGG chr11 5158653 5158672 5158669 +
ggttctctatgctgttccat

SEQ ID NO: 848 - DNA, 20 bp, Artificial Sequence
  Synthetic oligonucleotide; GGG chr11 5158654 5158673 5158670 +
gttctctatgctgttccatt

SEQ ID NO: 849 - DNA, 20 bp, Artificial Sequence
  Synthetic oligonucleotide; CAG chr11 5158676 5158695 5158692 +
gctgtatgtctgtctttatg

SEQ ID NO: 850 - DNA, 20 bp, Artificial Sequence
  Synthetic oligonucleotide; TGG chr11 5158691 5158710 5158707 +
ttatgcagtactgtgctgtt

SEQ ID NO: 851 - DNA, 20 bp, Artificial Sequence
  Synthetic oligonucleotide; TAG chr11 5158700 5158719 5158716 +
actgtgctgtttggctactg

SEQ ID NO: 852 - DNA, 20 bp, Artificial Sequence
  Synthetic oligonucleotide; TAG chr11 5158708 5158727 5158724 +
gtttggctactgtagctttg

SEQ ID NO: 853 - DNA, 20 bp, Artificial Sequence
  Synthetic oligonucleotide; TAG chr11 5158711 5158730 5158727 +
tggctactgtagctttgtag

SEQ ID NO: 854 - DNA, 20 bp, Artificial Sequence
  Synthetic oligonucleotide; AAG chr11 5158720 5158739 5158736 +
tagctttgtagtagattttg

SEQ ID NO: 855 - DNA, 20 bp, Artificial Sequence
  Synthetic oligonucleotide; TAG chr11 5158728 5158747 5158744 +
tagtagattttgaagtcata

SEQ ID NO: 856 - DNA, 20 bp, Artificial Sequence
  Synthetic oligonucleotide; TAG chr11 5158736 5158755 5158752 +
tttgaagtcatatagtgtga

SEQ ID NO: 857 - DNA, 20 bp, Artificial Sequence
  Synthetic oligonucleotide; TGG chr11 5158742 5158761 5158758 +
gtcatatagtgtgatagctt

SEQ ID NO: 858 - DNA, 20 bp, Artificial Sequence
  Synthetic oligonucleotide; CAG chr11 5158761 5158780 5158777 +
ttggttttgttctttttgct

SEQ ID NO: 859 - DNA, 20 bp, Artificial Sequence
  Synthetic oligonucleotide; AGG chr11 5158762 5158781 5158778 +
tggttttgttctttttgctc

SEQ ID NO: 860 - DNA, 20 bp, Artificial Sequence
  Synthetic oligonucleotide; TAG chr11 5158772 5158791 5158788 +
ctttttgctcaggattgctt

SEQ ID NO: 861 - DNA, 20 bp, Artificial Sequence
  Synthetic oligonucleotide; TGG chr11 5158779 5158798 5158795 +
ctcaggattgctttagctat

SEQ ID NO: 862 - DNA, 20 bp, Artificial Sequence
  Synthetic oligonucleotide; GGG chr11 5158780 5158799 5158796 +
tcaggattgctttagctatt

SEQ ID NO: 863 - DNA, 20 bp, Artificial Sequence
  Synthetic oligonucleotide; GGG chr11 5158781 5158800 5158797 +
caggattgctttagctattg

SEQ ID NO: 864 - DNA, 20 bp, Artificial Sequence
  Synthetic oligonucleotide; TGG chr11 5158792 5158811 5158808 +
tagctattggggatcttttg

SEQ ID NO: 865 - DNA, 20 bp, Artificial Sequence
  Synthetic oligonucleotide; TAG chr11 5158809 5158828 5158825 +
ttgtggttccatataaatat

SEQ ID NO: 866 - DNA, 20 bp, Artificial Sequence
  Synthetic oligonucleotide; AGG chr11 5158810 5158829 5158826 +
tgtggttccatataaatatt

SEQ ID NO: 867 - DNA, 20 bp, Artificial Sequence
  Synthetic oligonucleotide; TGG chr11 5158841 5158860 5158857 +
tctatttctgtgaatgccat

SEQ ID NO: 868 - DNA, 20 bp, Artificial Sequence
  Synthetic oligonucleotide; CAG chr11 5158852 5158871 5158868 +
gaatgccattggtattttga

SEQ ID NO: 869 - DNA, 20 bp, Artificial Sequence
  Synthetic oligonucleotide; TGG chr11 5158882 5158901 5158898 +
actgaatctgtacattgctt

SEQ ID NO: 870 - DNA, 20 bp, Artificial Sequence
  Synthetic oligonucleotide; GGG chr11 5158883 5158902 5158899 +
ctgaatctgtacattgcttt

SEQ ID NO: 871 - DNA, 20 bp, Artificial Sequence
  Synthetic oligonucleotide; TAG chr11 5158886 5158905 5158902 +
aatctgtacattgctttggg

SEQ ID NO: 872 - DNA, 20 bp, Artificial Sequence
  Synthetic oligonucleotide; TAG chr11 5158915 5158934 5158931 +
cattttaatattaattcttc

SEQ ID NO: 873 - DNA, 20 bp, Artificial Sequence
  Synthetic oligonucleotide; GAG chr11 5158923 5158942 5158939 +
tattaattcttctagttcat

SEQ ID NO: 874 - DNA, 20 bp, Artificial Sequence
  Synthetic oligonucleotide; TGG chr11 5158928 5158947 5158944 +
attcttctagttcatgagca

SEQ ID NO: 875 - DNA, 20 bp, Artificial Sequence
  Synthetic oligonucleotide; CAG chr11 5158976 5158995 5158992 +
ccctcttctatttctttcac

SEQ ID NO: 876 - DNA, 20 bp, Artificial Sequence
  Synthetic oligonucleotide; GAG chr11 5158978 5158997 5158994 +
ctcttctatttctttcacca

SEQ ID NO: 877 - DNA, 20 bp, Artificial Sequence
  Synthetic oligonucleotide; TAG chr11 5158998 5159017 5159014 +
gagttttataatttttctta

SEQ ID NO: 878 - DNA, 20 bp, Artificial Sequence
  Synthetic oligonucleotide; GAG chr11 5159000 5159019 5159016 +
gttttataatttttcttata

SEQ ID NO: 879 - DNA, 20 bp, Artificial Sequence
  Synthetic oligonucleotide; TGG chr11 5159016 5159035 5159032 +
tatagagatcttttacttct

SEQ ID NO: 880 - DNA, 20 bp, Artificial Sequence
  Synthetic oligonucleotide; GGG chr11 5159017 5159036 5159033 +
atagagatcttttacttctt

SEQ ID NO: 881 - DNA, 20 bp, Artificial Sequence
  Synthetic oligonucleotide; TAG chr11 5159021 5159040 5159037 +
agatcttttacttcttgggt

SEQ ID NO: 882 - DNA, 20 bp, Artificial Sequence
  Synthetic oligonucleotide; TGG chr11 5159033 5159052 5159049 +
tcttgggttagattgactcc

SEQ ID NO: 883 - DNA, 20 bp, Artificial Sequence
  Synthetic oligonucleotide; GGG chr11 5159034 5159053 5159050 +
cttgggttagattgactcct

SEQ ID NO: 884 - DNA, 20 bp, Artificial Sequence
  Synthetic oligonucleotide; AAG chr11 5159066 5159085 5159082 +
tttttattgctattgtaaat

SEQ ID NO: 885 - DNA, 20 bp, Artificial Sequence
  Synthetic oligonucleotide; CAG chr11 5159091 5159110 5159107 +
tgttttattgattttttttg

SEQ ID NO: 886 - DNA, 20 bp, Artificial Sequence
  Synthetic oligonucleotide; TAG chr11 5159183 5159202 5159199 +
atttttttaaatcgttttaa

SEQ ID NO: 887 - DNA, 20 bp, Artificial Sequence
  Synthetic oligonucleotide; TAG chr11 5159190 5159209 5159206 +
taaatcgttttaatagtatt

SEQ ID NO: 888 - DNA, 20 bp, Artificial Sequence
  Synthetic oligonucleotide; AAG chr11 5159195 5159214 5159211 +
cgttttaatagtatttagtg

SEQ ID NO: 889 - DNA, 20 bp, Artificial Sequence
  Synthetic oligonucleotide; TAG chr11 5159202 5159221 5159218 +
atagtatttagtgaagtttt

SEQ ID NO: 890 - DNA, 20 bp, Artificial Sequence
  Synthetic oligonucleotide; AGG chr11 5159203 5159222 5159219 +
tagtatttagtgaagttttt

SEQ ID NO: 891 - DNA, 20 bp, Artificial Sequence
  Synthetic oligonucleotide; AAG chr11 5159214 5159233 5159230 +
gaagtttttaggttttttct

SEQ ID NO: 892 - DNA, 20 bp, Artificial Sequence
  Synthetic oligonucleotide; AAG chr11 5159220 5159239 5159236 +
tttaggttttttctaagtat

SEQ ID NO: 893 - DNA, 20 bp, Artificial Sequence
  Synthetic oligonucleotide; TAG chr11 5159241 5159260 5159257 +
agatcatgtcatctacaaac

SEQ ID NO: 894 - DNA, 20 bp, Artificial Sequence
  Synthetic oligonucleotide; AGG chr11 5159242 5159261 5159258 +
gatcatgtcatctacaaact

SEQ ID NO: 895 - DNA, 20 bp, Artificial Sequence
  Synthetic oligonucleotide; TGG chr11 5159271 5159290 5159287 +
taacttcttcctttccaatt

SEQ ID NO: 896 - DNA, 20 bp, Artificial Sequence
  Synthetic oligonucleotide; AAG chr11 5159309 5159328 5159325 +
cttcctgaatttctctttcc

SEQ ID NO: 897 - DNA, 20 bp, Artificial Sequence
  Synthetic oligonucleotide; TGG chr11 5159335 5159354 5159351 +
tccaatattatgttaaataa

SEQ ID NO: 898 - DNA, 20 bp, Artificial Sequence
  Synthetic oligonucleotide; AAG chr11 5159344 5159363 5159360 +
atgttaaataatggcaatga

SEQ ID NO: 899 - DNA, 20 bp, Artificial Sequence
  Synthetic oligonucleotide; GAG chr11 5159348 5159367 5159364 +
taaataatggcaatgaaagt

SEQ ID NO: 900 - DNA, 20 bp, Artificial Sequence
  Synthetic oligonucleotide; CAG chr11 5159367 5159386 5159383 +
tgagcattcttgccttattt

SEQ ID NO: 901 - DNA, 20 bp, Artificial Sequence
  Synthetic oligonucleotide; TAG chr11 5159374 5159393 5159390 +
tcttgccttatttcagtcct

SEQ ID NO: 902 - DNA, 20 bp, Artificial Sequence
  Synthetic oligonucleotide; GAG chr11 5159376 5159395 5159392 +
ttgccttatttcagtcctta

SEQ ID NO: 903 - DNA, 20 bp, Artificial Sequence
  Synthetic oligonucleotide; AGG chr11 5159377 5159396 5159393 +
tgccttatttcagtccttag

SEQ ID NO: 904 - DNA, 20 bp, Artificial Sequence
  Synthetic oligonucleotide; AAG chr11 5159381 5159400 5159397 +
ttatttcagtccttagagga

SEQ ID NO: 905 - DNA, 20 bp, Artificial Sequence
  Synthetic oligonucleotide; AGG chr11 5159382 5159401 5159398 +
tatttcagtccttagaggaa

SEQ ID NO: 906 - DNA, 20 bp, Artificial Sequence
  Synthetic oligonucleotide; CAG chr11 5159404 5159423 5159420 +
gccttcaatgtttctctgtt

SEQ ID NO: 907 - DNA, 20 bp, Artificial Sequence
  Synthetic oligonucleotide; TAG chr11 5159415 5159434 5159431 +
ttctctgttcagcataatgt

SEQ ID NO: 908 - DNA, 20 bp, Artificial Sequence
  Synthetic oligonucleotide; TGG chr11 5159422 5159441 5159438 +
ttcagcataatgttagcact

SEQ ID NO: 909 - DNA, 20 bp, Artificial Sequence
  Synthetic oligonucleotide; TGG chr11 5159436 5159455 5159452 +
agcacttggtttgtcctata

SEQ ID NO: 910 - DNA, 20 bp, Artificial Sequence
  Synthetic oligonucleotide; GAG chr11 5159452 5159471 5159468 +
tatatggtttttattatttt

SEQ ID NO: 911 - DNA, 20 bp, Artificial Sequence
  Synthetic oligonucleotide; AGG chr11 5159453 5159472 5159469 +
atatggtttttattattttg

SEQ ID NO: 912 - DNA, 20 bp, Artificial Sequence
  Synthetic oligonucleotide; GAG chr11 5159479 5159498 5159495 +
gttcctactgtacctccttt

SEQ ID NO: 913 - DNA, 20 bp, Artificial Sequence
  Synthetic oligonucleotide; AGG chr11 5159480 5159499 5159496 +
ttcctactgtacctcctttg

SEQ ID NO: 914 - DNA, 20 bp, Artificial Sequence
  Synthetic oligonucleotide; TGG chr11 5159502 5159521 5159518 +
gtgcatttgttgttgtgtcc

SEQ ID NO: 915 - DNA, 20 bp, Artificial Sequence
  Synthetic oligonucleotide; TGG chr11 5159507 5159526 5159523 +
tttgttgttgtgtcctggtc

SEQ ID NO: 916 - DNA, 20 bp, Artificial Sequence
  Synthetic oligonucleotide; TGG chr11 5159512 5159531 5159528 +
tgttgtgtcctggtctggtt

SEQ ID NO: 917 - DNA, 20 bp, Artificial Sequence
  Synthetic oligonucleotide; GGG chr11 5159513 5159532 5159529 +
gttgtgtcctggtctggttt

SEQ ID NO: 918 - DNA, 20 bp, Artificial Sequence
  Synthetic oligonucleotide; TAG chr11 5159521 5159540 5159537 +
ctggtctggtttgggtatat

SEQ ID NO: 919 - DNA, 20 bp, Artificial Sequence
  Synthetic oligonucleotide; GAG chr11 5159523 5159542 5159539 +
ggtctggtttgggtatatta

SEQ ID NO: 920 - DNA, 20 bp, Artificial Sequence
  Synthetic oligonucleotide; TAG chr11 5159540 5159559 5159556 +
ttagagtaatgcttgcctca

SEQ ID NO: 921 - DNA, 20 bp, Artificial Sequence
  Synthetic oligonucleotide; AAG chr11 5159546 5159565 5159562 +
taatgcttgcctcatagaat

SEQ ID NO: 922 - DNA, 20 bp, Artificial Sequence
  Synthetic oligonucleotide; TAG chr11 5159551 5159570 5159567 +
cttgcctcatagaataagtt

SEQ ID NO: 923 - DNA, 20 bp, Artificial Sequence
  Synthetic oligonucleotide; AAG chr11 5159554 5159573 5159570 +
gcctcatagaataagtttag

SEQ ID NO: 924 - DNA, 20 bp, Artificial Sequence
  Synthetic oligonucleotide; TAG chr11 5159557 5159576 5159573 +
tcatagaataagtttagaag

SEQ ID NO: 925 - DNA, 20 bp, Artificial Sequence
  Synthetic oligonucleotide; AGG chr11 5159558 5159577 5159574 +
catagaataagtttagaagt

SEQ ID NO: 926 - DNA, 20 bp, Artificial Sequence
  Synthetic oligonucleotide; CAG chr11 5159571 5159590 5159587 +
tagaagtaggcccttctttt

SEQ ID NO: 927 - DNA, 20 bp, Artificial Sequence
  Synthetic oligonucleotide; GAG chr11 5159595 5159614 5159611 +
ttttatttgtttgtttgttt

SEQ ID NO: 928 - DNA, 20 bp, Artificial Sequence
  Synthetic oligonucleotide; AGG chr11 5159596 5159615 5159612 +
tttatttgtttgtttgtttg

SEQ ID NO: 929 - DNA, 20 bp, Artificial Sequence
  Synthetic oligonucleotide; GAG chr11 5159604 5159623 5159620 +
tttgtttgtttgaggaattt

SEQ ID NO: 930 - DNA, 20 bp, Artificial Sequence
  Synthetic oligonucleotide; TAG chr11 5159613 5159632 5159629 +
ttgaggaatttgagtacgat

SEQ ID NO: 931 - DNA, 20 bp, Artificial Sequence
  Synthetic oligonucleotide; TAG chr11 5159619 5159638 5159635 +
aatttgagtacgattagtat

SEQ ID NO: 932 - DNA, 20 bp, Artificial Sequence
  Synthetic oligonucleotide; TGG chr11 5159638 5159657 5159654 +
ttagttctacttgaaatgtt

SEQ ID NO: 933 - DNA, 20 bp, Artificial Sequence
  Synthetic oligonucleotide; TAG chr11 5159641 5159660 5159657 +
gttctacttgaaatgtttgg

SEQ ID NO: 934 - DNA, 20 bp, Artificial Sequence
  Synthetic oligonucleotide; GAG chr11 5159650 5159669 5159666 +
gaaatgtttggtagcccatc

SEQ ID NO: 935 - DNA, 20 bp, Artificial Sequence
  Synthetic oligonucleotide; TGG chr11 5159656 5159675 5159672 +
tttggtagcccatcgagtcc

SEQ ID NO: 936 - DNA, 20 bp, Artificial Sequence
  Synthetic oligonucleotide; GGG chr11 5159657 5159676 5159673 +
ttggtagcccatcgagtcct

SEQ ID NO: 937 - DNA, 20 bp, Artificial Sequence
  Synthetic oligonucleotide; TAG chr11 5159671 5159690 5159687 +
agtcctgggcttttctttaa

SEQ ID NO: 938 - DNA, 20 bp, Artificial Sequence
  Synthetic oligonucleotide; AGG chr11 5159672 5159691 5159688 +
gtcctgggcttttctttaat

SEQ ID NO: 939 - DNA, 20 bp, Artificial Sequence
  Synthetic oligonucleotide; GAG chr11 5159722 5159741 5159738 +
ttattcattattgttctatt

SEQ ID NO: 940 - DNA, 20 bp, Artificial Sequence
  Synthetic oligonucleotide; AGG chr11 5159723 5159742 5159739 +
tattcattattgttctattg

SEQ ID NO: 941 - DNA, 20 bp, Artificial Sequence
  Synthetic oligonucleotide; CAG chr11 5159746 5159765 5159762 +
ttttctgtttctacatgctt

SEQ ID NO: 942 - DNA, 20 bp, Artificial Sequence
  Synthetic oligonucleotide; TAG chr11 5159755 5159774 5159771 +
tctacatgcttcagtcttgc

SEQ ID NO: 943 - DNA, 20 bp, Artificial Sequence
  Synthetic oligonucleotide; AGG chr11 5159756 5159775 5159772 +
ctacatgcttcagtcttgct

SEQ ID NO: 944 - DNA, 20 bp, Artificial Sequence
  Synthetic oligonucleotide; CAG chr11 5159770 5159789 5159786 +
cttgctaggctgtatgtgtc

SEQ ID NO: 945 - DNA, 20 bp, Artificial Sequence
  Synthetic oligonucleotide; AGG chr11 5159771 5159790 5159787 +
ttgctaggctgtatgtgtcc

SEQ ID NO: 946 - DNA, 20 bp, Artificial Sequence
  Synthetic oligonucleotide; TAG chr11 5159791 5159810 5159807 +
aggaatttatccatttattc

SEQ ID NO: 947 - DNA, 20 bp, Artificial Sequence
  Synthetic oligonucleotide; TGG chr11 5159808 5159827 5159824 +
ttctagattttccaatttgt

SEQ ID NO: 948 - DNA, 20 bp, Artificial Sequence
  Synthetic oligonucleotide; CAG chr11 5159815 5159834 5159831 +
ttttccaatttgttggaata

SEQ ID NO: 949 - DNA, 20 bp, Artificial Sequence
  Synthetic oligonucleotide; TAG chr11 5159828 5159847 5159844 +
tggaatacagttgttcataa

SEQ ID NO: 950 - DNA, 20 bp, Artificial Sequence
  Synthetic oligonucleotide; GAG chr11 5159839 5159858 5159855 +
tgttcataatagtatctaat

SEQ ID NO: 951 - DNA, 20 bp, Artificial Sequence
  Synthetic oligonucleotide; GAG chr11 5159855 5159874 5159871 +
taatgagtctttgtgttgct

SEQ ID NO: 952 - DNA, 20 bp, Artificial Sequence
  Synthetic oligonucleotide; AGG chr11 5159856 5159875 5159872 +
aatgagtctttgtgttgctg

SEQ ID NO: 953 - DNA, 20 bp, Artificial Sequence
  Synthetic oligonucleotide; AAG chr11 5159916 5159935 5159932 +
tatttgactcttttttctta

SEQ ID NO: 954 - DNA, 20 bp, Artificial Sequence
  Synthetic oligonucleotide; AAG chr11 5159944 5159963 5159960 +
ttgattttgtttacctttcc

SEQ ID NO: 955 - DNA, 20 bp, Artificial Sequence
  Synthetic oligonucleotide; AAG chr11 5159948 5159967 5159964 +
ttttgtttacctttccaaga

SEQ ID NO: 956 - DNA, 20 bp, Artificial Sequence
  Synthetic oligonucleotide; TGG chr11 5159985 5160004 5160001 +
taatgattttctgtattttt

SEQ ID NO: 957 - DNA, 20 bp, Artificial Sequence
  Synthetic oligonucleotide; TGG chr11 5160051 5160070 5160067 +
ccttctattaattttgcatt

SEQ ID NO: 958 - DNA, 20 bp, Artificial Sequence
  Synthetic oligonucleotide; GAG chr11 5160079 5160098 5160095 +
tcttgctttcctatttcctt

SEQ ID NO: 959 - DNA, 20 bp, Artificial Sequence
  Synthetic oligonucleotide; AGG chr11 5160080 5160099 5160096 +
cttgctttcctatttccttg

SEQ ID NO: 960 - DNA, 20 bp, Artificial Sequence
  Synthetic oligonucleotide; TGG chr11 5160092 5160111 5160108 +
tttccttgaggtacattgtt

SEQ ID NO: 961 - DNA, 20 bp, Artificial Sequence
  Synthetic oligonucleotide; TAG chr11 5160100 5160119 5160116 +
aggtacattgtttggttgct

SEQ ID NO: 962 - DNA, 20 bp, Artificial Sequence
  Synthetic oligonucleotide; AAG chr11 5160106 5160125 5160122 +
attgtttggttgcttagttg

SEQ ID NO: 963 - DNA, 20 bp, Artificial Sequence
  Synthetic oligonucleotide; TGG chr11 5160123 5160142 5160139 +
ttgaagcctttctacttttt

SEQ ID NO: 964 - DNA, 20 bp, Artificial Sequence
  Synthetic oligonucleotide; TAG chr11 5160129 5160148 5160145 +
cctttctacttttttggata

SEQ ID NO: 965 - DNA, 20 bp, Artificial Sequence
  Synthetic oligonucleotide; AGG chr11 5160130 5160149 5160146 +
ctttctacttttttggatat

SEQ ID NO: 966 - DNA, 20 bp, Artificial Sequence
  Synthetic oligonucleotide; AAG chr11 5160158 5160177 5160174 +
attgctatgaacttccctct

SEQ ID NO: 967 - DNA, 20 bp, Artificial Sequence
  Synthetic oligonucleotide; TAG chr11 5160182 5160201 5160198 +
actgcttttgccatatcctg

SEQ ID NO: 968 - DNA, 20 bp, Artificial Sequence
  Synthetic oligonucleotide; AGG chr11 5160183 5160202 5160199 +
ctgcttttgccatatcctgt

SEQ ID NO: 969 - DNA, 20 bp, Artificial Sequence
  Synthetic oligonucleotide; TGG chr11 5160189 5160208 5160205 +
ttgccatatcctgtaggttt

SEQ ID NO: 970 - DNA, 20 bp, Artificial Sequence
  Synthetic oligonucleotide; AAG chr11 5160221 5160240 5160237 +
tttccattttcacttgtttc

SEQ ID NO: 971 - DNA, 20 bp, Artificial Sequence
  Synthetic oligonucleotide; AAG chr11 5160224 5160243 5160240 +
ccattttcacttgtttcaag

SEQ ID NO: 972 - DNA, 20 bp, Artificial Sequence
  Synthetic oligonucleotide; TAG chr11 5160253 5160272 5160269 +
aatttccttcttaatttctt

SEQ ID NO: 973 - DNA, 20 bp, Artificial Sequence
  Synthetic oligonucleotide; TGG chr11 5160264 5160283 5160280 +
taatttctttagtgactcat

SEQ ID NO: 974 - DNA, 20 bp, Artificial Sequence
  Synthetic oligonucleotide; CAG chr11 5160272 5160291 5160288 +
ttagtgactcattggttatt

SEQ ID NO: 975 - DNA, 20 bp, Artificial Sequence
  Synthetic oligonucleotide; GAG chr11 5160293 5160312 5160309 +
agtttcatgcgcatccctgt

SEQ ID NO: 976 - DNA, 20 bp, Artificial Sequence
  Synthetic oligonucleotide; AGG chr11 5160294 5160313 5160310 +
gtttcatgcgcatccctgtg

SEQ ID NO: 977 - DNA, 20 bp, Artificial Sequence
  Synthetic oligonucleotide; GAG chr11 5160296 5160315 5160312 +
ttcatgcgcatccctgtgag

SEQ ID NO: 978 - DNA, 20 bp, Artificial Sequence
  Synthetic oligonucleotide; CAG chr11 5160308 5160327 5160324 +
cctgtgaggagactaccaaa

SEQ ID NO: 979 - DNA, 20 bp, Artificial Sequence
  Synthetic oligonucleotide; AGG chr11 5160309 5160328 5160325 +
ctgtgaggagactaccaaac

SEQ ID NO: 980 - DNA, 20 bp, Artificial Sequence
  Synthetic oligonucleotide; GAG chr11 5160320 5160339 5160336 +
ctaccaaacaggctttgtgt

SEQ ID NO: 981 - DNA, 20 bp, Artificial Sequence
  Synthetic oligonucleotide; AAG chr11 5160328 5160347 5160344 +
caggctttgtgtgagcaata

SEQ ID NO: 982 - DNA, 20 bp, Artificial Sequence
  Synthetic oligonucleotide; TGG chr11 5160343 5160362 5160359 +
caataaagctttttatcacc

SEQ ID NO: 983 - DNA, 20 bp, Artificial Sequence
  Synthetic oligonucleotide; GGG chr11 5160344 5160363 5160360 +
aataaagctttttatcacct

SEQ ID NO: 984 - DNA, 20 bp, Artificial Sequence
  Synthetic oligonucleotide; CAG chr11 5160349 5160368 5160365 +
agctttttatcacctgggtg

SEQ ID NO: 985 - DNA, 20 bp, Artificial Sequence
  Synthetic oligonucleotide; AGG chr11 5160350 5160369 5160366 +
gctttttatcacctgggtgc

SEQ ID NO: 986 - DNA, 20 bp, Artificial Sequence
  Synthetic oligonucleotide; CGG chr11 5160353 5160372 5160369 +
ttttatcacctgggtgcagg

SEQ ID NO: 987 - DNA, 20 bp, Artificial Sequence
  Synthetic oligonucleotide; GGG chr11 5160354 5160373 5160370 +
tttatcacctgggtgcaggc

SEQ ID NO: 988 - DNA, 20 bp, Artificial Sequence
  Synthetic oligonucleotide; GAG chr11 5160359 5160378 5160375 +
cacctgggtgcaggcgggct

SEQ ID NO: 989 - DNA, 20 bp, Artificial Sequence
  Synthetic oligonucleotide; AAG chr11 5160368 5160387 5160384 +
gcaggcgggctgagtccgaa

SEQ ID NO: 990 - DNA, 20 bp, Artificial Sequence
  Synthetic oligonucleotide; GAG chr11 5160370 5160389 5160386 +
aggcgggctgagtccgaaaa

SEQ ID NO: 991 - DNA, 20 bp, Artificial Sequence
  Synthetic oligonucleotide; GAG chr11 5160372 5160391 5160388 +
gcgggctgagtccgaaaaga

SEQ ID NO: 992 - DNA, 20 bp, Artificial Sequence
  Synthetic oligonucleotide; CAG chr11 5160376 5160395 5160392 +
gctgagtccgaaaagagagt

SEQ ID NO: 993 - DNA, 20 bp, Artificial Sequence
  Synthetic oligonucleotide; AAG chr11 5160381 5160400 5160397 +
gtccgaaaagagagtcagca

SEQ ID NO: 994 - DNA, 20 bp, Artificial Sequence
  Synthetic oligonucleotide; AGG chr11 5160382 5160401 5160398 +
tccgaaaagagagtcagcaa

SEQ ID NO: 995 - DNA, 20 bp, Artificial Sequence
  Synthetic oligonucleotide; GGG chr11 5160383 5160402 5160399 +
ccgaaaagagagtcagcaaa

SEQ ID NO: 996 - DNA, 20 bp, Artificial Sequence
  Synthetic oligonucleotide; GAG chr11 5160385 5160404 5160401 +
gaaaagagagtcagcaaagg

SEQ ID NO: 997 - DNA, 20 bp, Artificial Sequence
  Synthetic oligonucleotide; TAG chr11 5160389 5160408 5160405 +
agagagtcagcaaagggaga

SEQ ID NO: 998 - DNA, 20 bp, Artificial Sequence
  Synthetic oligonucleotide; AGG chr11 5160390 5160409 5160406 +
gagagtcagcaaagggagat

SEQ ID NO: 999 - DNA, 20 bp, Artificial Sequence
  Synthetic oligonucleotide; GAG chr11 5160392 5160411 5160408 +
gagtcagcaaagggagatag

SEQ ID NO: 1000 - DNA, 20 bp, Artificial Sequence
  Synthetic oligonucleotide; TGG chr11 5160395 5160414 5160411 +
tcagcaaagggagataggag

SEQ ID NO: 1001 - DNA, 20 bp, Artificial Sequence
  Synthetic oligonucleotide; GGG chr11 5160396 5160415 5160412 +
cagcaaagggagataggagt

SEQ ID NO: 1002 - DNA, 20 bp, Artificial Sequence
  Synthetic oligonucleotide; GGG chr11 5160397 5160416 5160413 +
agcaaagggagataggagtg

SEQ ID NO: 1003 - DNA, 20 bp, Artificial Sequence
  Synthetic oligonucleotide; AAG chr11 5160409 5160428 5160425 +
taggagtggggctgttttat

SEQ ID NO: 1004 - DNA, 20 bp, Artificial Sequence
  Synthetic oligonucleotide; TGG chr11 5160415 5160434 5160431 +
tggggctgttttataagatt

SEQ ID NO: 1005 - DNA, 20 bp, Artificial Sequence
  Synthetic oligonucleotide; GGG chr11 5160416 5160435 5160432 +
ggggctgttttataagattt

SEQ ID NO: 1006 - DNA, 20 bp, Artificial Sequence
  Synthetic oligonucleotide; TAG chr11 5160419 5160438 5160435 +
gctgttttataagatttggg

SEQ ID NO: 1007 - DNA, 20 bp, Artificial Sequence
  Synthetic oligonucleotide; AGG chr11 5160420 5160439 5160436 +
ctgttttataagatttgggt

SEQ ID NO: 1008 - DNA, 20 bp, Artificial Sequence
  Synthetic oligonucleotide; AAG chr11 5160425 5160444 5160441 +
ttataagatttgggtaggta

SEQ ID NO: 1009 - DNA, 20 bp, Artificial Sequence
  Synthetic oligonucleotide; AGG chr11 5160426 5160445 5160442 +
tataagatttgggtaggtaa

SEQ ID NO: 1010 - DNA, 20 bp, Artificial Sequence
  Synthetic oligonucleotide; CAG chr11 5160436 5160455 5160452 +
gggtaggtaaaggaaaatta

SEQ ID NO: 1011 - DNA, 20 bp, Artificial Sequence
  Synthetic oligonucleotide; AAG chr11 5160442 5160461 5160458 +
gtaaaggaaaattacagtca

SEQ ID NO: 1012 - DNA, 20 bp, Artificial Sequence
  Synthetic oligonucleotide; AGG chr11 5160443 5160462 5160459 +
taaaggaaaattacagtcaa

SEQ ID NO: 1013 - DNA, 20 bp, Artificial Sequence
  Synthetic oligonucleotide; GGG chr11 5160444 5160463 5160460 +
aaaggaaaattacagtcaaa

SEQ ID NO: 1014 - DNA, 20 bp, Artificial Sequence
  Synthetic oligonucleotide; GGG chr11 5160445 5160464 5160461 +
aaggaaaattacagtcaaag

SEQ ID NO: 1015 - DNA, 20 bp, Artificial Sequence
  Synthetic oligonucleotide; GGG chr11 5160446 5160465 5160462 +
aggaaaattacagtcaaagg

SEQ ID NO: 1016 - DNA, 20 bp, Artificial Sequence
  Synthetic oligonucleotide; GGG chr11 5160447 5160466 5160463 +
ggaaaattacagtcaaaggg

SEQ ID NO: 1017 - DNA, 20 bp, Artificial Sequence
  Synthetic oligonucleotide; TGG chr11 5160458 5160477 5160474 +
gtcaaaggggggttgttctc

SEQ ID NO: 1018 - DNA, 20 bp, Artificial Sequence
  Synthetic oligonucleotide; CGG chr11 5160461 5160480 5160477 +
aaaggggggttgttctctgg

SEQ ID NO: 1019 - DNA, 20 bp, Artificial Sequence
  Synthetic oligonucleotide; GGG chr11 5160462 5160481 5160478 +
aaggggggttgttctctggc

SEQ ID NO: 1020 - DNA, 20 bp, Artificial Sequence
  Synthetic oligonucleotide; CAG chr11 5160465 5160484 5160481 +
gggggttgttctctggcggg

SEQ ID NO: 1021 - DNA, 20 bp, Artificial Sequence
  Synthetic oligonucleotide; AGG chr11 5160466 5160485 5160482 +
ggggttgttctctggcgggc

SEQ ID NO: 1022 - DNA, 20 bp, Artificial Sequence
  Synthetic oligonucleotide; GAG chr11 5160468 5160487 5160484 +
ggttgttctctggcgggcag

SEQ ID NO: 1023 - DNA, 20 bp, Artificial Sequence
  Synthetic oligonucleotide; TGG chr11 5160471 5160490 5160487 +
tgttctctggcgggcaggag

SEQ ID NO: 1024 - DNA, 20 bp, Artificial Sequence
  Synthetic oligonucleotide; GGG chr11 5160472 5160491 5160488 +
gttctctggcgggcaggagt

SEQ ID NO: 1025 - DNA, 20 bp, Artificial Sequence
  Synthetic oligonucleotide; GGG chr11 5160473 5160492 5160489 +
ttctctggcgggcaggagtg

SEQ ID NO: 1026 - DNA, 20 bp, Artificial Sequence
  Synthetic oligonucleotide; GGG chr11 5160474 5160493 5160490 +
tctctggcgggcaggagtgg

SEQ ID NO: 1027 - DNA, 20 bp, Artificial Sequence
  Synthetic oligonucleotide; GGG chr11 5160475 5160494 5160491 +
ctctggcgggcaggagtggg

SEQ ID NO: 1028 - DNA, 20 bp, Artificial Sequence
  Synthetic oligonucleotide; AAG chr11 5160482 5160501 5160498 +
gggcaggagtggggggtcac

SEQ ID NO: 1029 - DNA, 20 bp, Artificial Sequence
  Synthetic oligonucleotide; AGG chr11 5160483 5160502 5160499 +
ggcaggagtggggggtcaca

SEQ ID NO: 1030 - DNA, 20 bp, Artificial Sequence
  Synthetic oligonucleotide; CAG chr11 5160490 5160509 5160506 +
gtggggggtcacaaggtgct

SEQ ID NO: 1031 - DNA, 20 bp, Artificial Sequence
  Synthetic oligonucleotide; TAG chr11 5160493 5160512 5160509 +
gggggtcacaaggtgctcag

SEQ ID NO: 1032 - DNA, 20 bp, Artificial Sequence
  Synthetic oligonucleotide; AGG chr11 5160494 5160513 5160510 +
ggggtcacaaggtgctcagt

SEQ ID NO: 1033 - DNA, 20 bp, Artificial Sequence
  Synthetic oligonucleotide; GGG chr11 5160495 5160514 5160511 +
gggtcacaaggtgctcagta

SEQ ID NO: 1034 - DNA, 20 bp, Artificial Sequence
  Synthetic oligonucleotide; GGG chr11 5160496 5160515 5160512 +
ggtcacaaggtgctcagtag

SEQ ID NO: 1035 - DNA, 20 bp, Artificial Sequence
  Synthetic oligonucleotide; GAG chr11 5160498 5160517 5160514 +
tcacaaggtgctcagtaggg

SEQ ID NO: 1036 - DNA, 20 bp, Artificial Sequence
  Synthetic oligonucleotide; GAG chr11 5160506 5160525 5160522 +
tgctcagtaggggagctttt

SEQ ID NO: 1037 - DNA, 20 bp, Artificial Sequence
  Synthetic oligonucleotide; CAG chr11 5160510 5160529 5160526 +
cagtaggggagcttttgagc

SEQ ID NO: 1038 - DNA, 20 bp, Artificial Sequence
  Synthetic oligonucleotide; AGG chr11 5160511 5160530 5160527 +
agtaggggagcttttgagcc

SEQ ID NO: 1039 - DNA, 20 bp, Artificial Sequence
  Synthetic oligonucleotide; GAG chr11 5160516 5160535 5160532 +
gggagcttttgagccaggat

SEQ ID NO: 1040 - DNA, 20 bp, Artificial Sequence
  Synthetic oligonucleotide; CAG chr11 5160520 5160539 5160536 +
gcttttgagccaggatgagc

SEQ ID NO: 1041 - DNA, 20 bp, Artificial Sequence
  Synthetic oligonucleotide; AGG chr11 5160521 5160540 5160537 +
cttttgagccaggatgagcc

SEQ ID NO: 1042 - DNA, 20 bp, Artificial Sequence
  Synthetic oligonucleotide; GAG chr11 5160523 5160542 5160539 +
tttgagccaggatgagccag

SEQ ID NO: 1043 - DNA, 20 bp, Artificial Sequence
  Synthetic oligonucleotide; AAG chr11 5160526 5160545 5160542 +
gagccaggatgagccaggag

SEQ ID NO: 1044 - DNA, 20 bp, Artificial Sequence
  Synthetic oligonucleotide; AGG chr11 5160527 5160546 5160543 +
agccaggatgagccaggaga

SEQ ID NO: 1045 - DNA, 20 bp, Artificial Sequence
  Synthetic oligonucleotide; AAG chr11 5160538 5160557 5160554 +
gccaggagaaggactttcac

SEQ ID NO: 1046 - DNA, 20 bp, Artificial Sequence
  Synthetic oligonucleotide; CAG chr11 5160551 5160570 5160567 +
ctttcacaagacaatgtcat

SEQ ID NO: 1047 - DNA, 20 bp, Artificial Sequence
  Synthetic oligonucleotide; AAG chr11 5160556 5160575 5160572 +
acaagacaatgtcatcagtt

SEQ ID NO: 1048 - DNA, 20 bp, Artificial Sequence
  Synthetic oligonucleotide; AGG chr11 5160557 5160576 5160573 +
caagacaatgtcatcagtta

SEQ ID NO: 1049 - DNA, 20 bp, Artificial Sequence
  Synthetic oligonucleotide; CAG chr11 5160560 5160579 5160576 +
gacaatgtcatcagttaagg

SEQ ID NO: 1050 - DNA, 20 bp, Artificial Sequence
  Synthetic oligonucleotide; AGG chr11 5160561 5160580 5160577 +
acaatgtcatcagttaaggc

SEQ ID NO: 1051 - DNA, 20 bp, Artificial Sequence
  Synthetic oligonucleotide; CAG chr11 5160566 5160585 5160582 +
gtcatcagttaaggcaggaa

SEQ ID NO: 1052 - DNA, 20 bp, Artificial Sequence
  Synthetic oligonucleotide; AGG chr11 5160567 5160586 5160583 +
tcatcagttaaggcaggaac

SEQ ID NO: 1053 - DNA, 20 bp, Artificial Sequence
  Synthetic oligonucleotide; TGG chr11 5160588 5160607 5160604 +
ggccattttcacttcttttg

SEQ ID NO: 1054 - DNA, 20 bp, Artificial Sequence
  Synthetic oligonucleotide; TGG chr11 5160591 5160610 5160607 +
cattttcacttcttttgtgg

SEQ ID NO: 1055 - DNA, 20 bp, Artificial Sequence
  Synthetic oligonucleotide; CAG chr11 5160602 5160621 5160618 +
cttttgtggtggaatgtcat

SEQ ID NO: 1056 - DNA, 20 bp, Artificial Sequence
  Synthetic oligonucleotide; AAG chr11 5160607 5160626 5160623 +
gtggtggaatgtcatcagtt

SEQ ID NO: 1057 - DNA, 20 bp, Artificial Sequence
  Synthetic oligonucleotide; AGG chr11 5160608 5160627 5160624 +
tggtggaatgtcatcagtta

SEQ ID NO: 1058 - DNA, 20 bp, Artificial Sequence
  Synthetic oligonucleotide; CAG chr11 5160611 5160630 5160627 +
tggaatgtcatcagttaagg

SEQ ID NO: 1059 - DNA, 20 bp, Artificial Sequence
  Synthetic oligonucleotide; AGG chr11 5160612 5160631 5160628 +
ggaatgtcatcagttaaggc

SEQ ID NO: 1060 - DNA, 20 bp, Artificial Sequence
  Synthetic oligonucleotide; TGG chr11 5160618 5160637 5160634 +
tcatcagttaaggcaggaac

SEQ ID NO: 1061 - DNA, 20 bp, Artificial Sequence
  Synthetic oligonucleotide; CAG chr11 5160640 5160659 5160656 +
gccatctgtatgtgtacctg

SEQ ID NO: 1062 - DNA, 20 bp, Artificial Sequence
  Synthetic oligonucleotide; AGG chr11 5160641 5160660 5160657 +
ccatctgtatgtgtacctgc

SEQ ID NO: 1063 - DNA, 20 bp, Artificial Sequence
  Synthetic oligonucleotide; CAG chr11 5160647 5160666 5160663 +
gtatgtgtacctgcaggtca

SEQ ID NO: 1064 - DNA, 20 bp, Artificial Sequence
  Synthetic oligonucleotide; AGG chr11 5160648 5160667 5160664 +
tatgtgtacctgcaggtcac

SEQ ID NO: 1065 - DNA, 20 bp, Artificial Sequence
  Synthetic oligonucleotide; GGG chr11 5160649 5160668 5160665 +
atgtgtacctgcaggtcaca

SEQ ID NO: 1066 - DNA, 20 bp, Artificial Sequence
  Synthetic oligonucleotide; GGG chr11 5160650 5160669 5160666 +
tgtgtacctgcaggtcacag

SEQ ID NO: 1067 - DNA, 20 bp, Artificial Sequence
  Synthetic oligonucleotide; TGG chr11 5160659 5160678 5160675 +
gcaggtcacaggggacatga

SEQ ID NO: 1068 - DNA, 20 bp, Artificial Sequence
  Synthetic oligonucleotide; TAG chr11 5160664 5160683 5160680 +
tcacaggggacatgatggct

SEQ ID NO: 1069 - DNA, 20 bp, Artificial Sequence
  Synthetic oligonucleotide; TGG chr11 5160669 5160688 5160685 +
ggggacatgatggcttagct

SEQ ID NO: 1070 - DNA, 20 bp, Artificial Sequence
  Synthetic oligonucleotide; GGG chr11 5160670 5160689 5160686 +
gggacatgatggcttagctt

SEQ ID NO: 1071 - DNA, 20 bp, Artificial Sequence
  Synthetic oligonucleotide; CAG chr11 5160675 5160694 5160691 +
atgatggcttagcttgggct

SEQ ID NO: 1072 - DNA, 20 bp, Artificial Sequence
  Synthetic oligonucleotide; GAG chr11 5160677 5160696 5160693 +
gatggcttagcttgggctca

SEQ ID NO: 1073 - DNA, 20 bp, Artificial Sequence
  Synthetic oligonucleotide; AGG chr11 5160678 5160697 5160694 +
atggcttagcttgggctcag

SEQ ID NO: 1074 - DNA, 20 bp, Artificial Sequence
  Synthetic oligonucleotide; AAG chr11 5160709 5160728 5160725 +
tcctgtcttcttatattaat

SEQ ID NO: 1075 - DNA, 20 bp, Artificial Sequence
  Synthetic oligonucleotide; TAG chr11 5160727 5160746 5160743 +
ataagaaaaataaaacataa

SEQ ID NO: 1076 - DNA, 20 bp, Artificial Sequence
  Synthetic oligonucleotide; AAG chr11 5160735 5160754 5160751 +
aataaaacataatagtgttg

SEQ ID NO: 1077 - DNA, 20 bp, Artificial Sequence
  Synthetic oligonucleotide; TGG chr11 5160741 5160760 5160757 +
acataatagtgttgaagtgt

SEQ ID NO: 1078 - DNA, 20 bp, Artificial Sequence
  Synthetic oligonucleotide; GGG chr11 5160742 5160761 5160758 +
cataatagtgttgaagtgtt

SEQ ID NO: 1079 - DNA, 20 bp, Artificial Sequence
  Synthetic oligonucleotide; GGG chr11 5160743 5160762 5160759 +
ataatagtgttgaagtgttg

SEQ ID NO: 1080 - DNA, 20 bp, Artificial Sequence
  Synthetic oligonucleotide; CAG chr11 5160746 5160765 5160762 +
atagtgttgaagtgttgggg

SEQ ID NO: 1081 - DNA, 20 bp, Artificial Sequence
  Synthetic oligonucleotide; TGG chr11 5160758 5160777 5160774 +
tgttggggcagcgaaaattt

SEQ ID NO: 1082 - DNA, 20 bp, Artificial Sequence
  Synthetic oligonucleotide; GGG chr11 5160759 5160778 5160775 +
gttggggcagcgaaaatttt

SEQ ID NO: 1083 - DNA, 20 bp, Artificial Sequence
  Synthetic oligonucleotide; GGG chr11 5160760 5160779 5160776 +
ttggggcagcgaaaattttg

SEQ ID NO: 1084 - DNA, 20 bp, Artificial Sequence
  Synthetic oligonucleotide; GGG chr11 5160761 5160780 5160777 +
tggggcagcgaaaattttgg

SEQ ID NO: 1085 - DNA, 20 bp, Artificial Sequence
  Synthetic oligonucleotide; TGG chr11 5160765 5160784 5160781 +
gcagcgaaaattttggggga

SEQ ID NO: 1086 - DNA, 20 bp, Artificial Sequence
  Synthetic oligonucleotide; TGG chr11 5160770 5160789 5160786 +
gaaaattttgggggatggta

SEQ ID NO: 1087 - DNA, 20 bp, Artificial Sequence
  Synthetic oligonucleotide; GAG chr11 5160772 5160791 5160788 +
aaattttgggggatggtatg

SEQ ID NO: 1088 - DNA, 20 bp, Artificial Sequence
  Synthetic oligonucleotide; GAG chr11 5160774 5160793 5160790 +
attttgggggatggtatgga

SEQ ID NO: 1089 - DNA, 20 bp, Artificial Sequence
  Synthetic oligonucleotide; TGG chr11 5160781 5160800 5160797 +
gggatggtatggagagataa

SEQ ID NO: 1090 - DNA, 20 bp, Artificial Sequence
  Synthetic oligonucleotide; GGG chr11 5160782 5160801 5160798 +
ggatggtatggagagataat

SEQ ID NO: 1091 - DNA, 20 bp, Artificial Sequence
  Synthetic oligonucleotide; CAG chr11 5160795 5160814 5160811 +
agataatgggcgatatttct

SEQ ID NO: 1092 - DNA, 20 bp, Artificial Sequence
  Synthetic oligonucleotide; AGG chr11 5160796 5160815 5160812 +
gataatgggcgatatttctc

SEQ ID NO: 1093 - DNA, 20 bp, Artificial Sequence
  Synthetic oligonucleotide; GGG chr11 5160797 5160816 5160813 +
ataatgggcgatatttctca

SEQ ID NO: 1094 - DNA, 20 bp, Artificial Sequence
  Synthetic oligonucleotide; GAG chr11 5160807 5160826 5160823 +
atatttctcagggctgcttc

SEQ ID NO: 1095 - DNA, 20 bp, Artificial Sequence
  Synthetic oligonucleotide; CGG chr11 5160810 5160829 5160826 +
tttctcagggctgcttcgag

SEQ ID NO: 1096 - DNA, 20 bp, Artificial Sequence
  Synthetic oligonucleotide; GGG chr11 5160811 5160830 5160827 +
ttctcagggctgcttcgagc

SEQ ID NO: 1097 - DNA, 20 bp, Artificial Sequence
  Synthetic oligonucleotide; TAG chr11 5160816 5160835 5160832 +
agggctgcttcgagcgggat

SEQ ID NO: 1098 - DNA, 20 bp, Artificial Sequence
  Synthetic oligonucleotide; AGG chr11 5160817 5160836 5160833 +
gggctgcttcgagcgggatt

SEQ ID NO: 1099 - DNA, 20 bp, Artificial Sequence
  Synthetic oligonucleotide; GGG chr11 5160818 5160837 5160834 +
ggctgcttcgagcgggatta

SEQ ID NO: 1100 - DNA, 20 bp, Artificial Sequence
  Synthetic oligonucleotide; GGG chr11 5160819 5160838 5160835 +
gctgcttcgagcgggattag

SEQ ID NO: 1101 - DNA, 20 bp, Artificial Sequence
  Synthetic oligonucleotide; CGG chr11 5160822 5160841 5160838 +
gcttcgagcgggattagggg

SEQ ID NO: 1102 - DNA, 20 bp, Artificial Sequence
  Synthetic oligonucleotide; TGG chr11 5160827 5160846 5160843 +
gagcgggattaggggcggcg

SEQ ID NO: 1103 - DNA, 20 bp, Artificial Sequence
  Synthetic oligonucleotide; GGG chr11 5160828 5160847 5160844 +
agcgggattaggggcggcgt

SEQ ID NO: 1104 - DNA, 20 bp, Artificial Sequence
  Synthetic oligonucleotide; TAG chr11 5160835 5160854 5160851 +
ttaggggcggcgtgggaacc

SEQ ID NO: 1105 - DNA, 20 bp, Artificial Sequence
  Synthetic oligonucleotide; GAG chr11 5160837 5160856 5160853 +
aggggcggcgtgggaaccta

SEQ ID NO: 1106 - DNA, 20 bp, Artificial Sequence
  Synthetic oligonucleotide; TGG chr11 5160840 5160859 5160856 +
ggcggcgtgggaacctagag

SEQ ID NO: 1107 - DNA, 20 bp, Artificial Sequence
  Synthetic oligonucleotide; GGG chr11 5160841 5160860 5160857 +
gcggcgtgggaacctagagt

SEQ ID NO: 1108 - DNA, 20 bp, Artificial Sequence
  Synthetic oligonucleotide; GAG chr11 5160843 5160862 5160859 +
ggcgtgggaacctagagtgg

SEQ ID NO: 1109 - DNA, 20 bp, Artificial Sequence
  Synthetic oligonucleotide; GAG chr11 5160845 5160864 5160861 +
cgtgggaacctagagtggga

SEQ ID NO: 1110 - DNA, 20 bp, Artificial Sequence
  Synthetic oligonucleotide; AAG chr11 5160851 5160870 5160867 +
aacctagagtgggagagatt

SEQ ID NO: 1111 - DNA, 20 bp, Artificial Sequence
  Synthetic oligonucleotide; AAG chr11 5160857 5160876 5160873 +
gagtgggagagattaagctg

SEQ ID NO: 1112 - DNA, 20 bp, Artificial Sequence
  Synthetic oligonucleotide; AGG chr11 5160858 5160877 5160874 +
agtgggagagattaagctga

SEQ ID NO: 1113 - DNA, 20 bp, Artificial Sequence
  Synthetic oligonucleotide; AAG chr11 5160861 5160880 5160877 +
gggagagattaagctgaagg

SEQ ID NO: 1114 - DNA, 20 bp, Artificial Sequence
  Synthetic oligonucleotide; TGG chr11 5160870 5160889 5160886 +
taagctgaaggaagattttg

SEQ ID NO: 1115 - DNA, 20 bp, Artificial Sequence
  Synthetic oligonucleotide; AAG chr11 5160874 5160893 5160890 +
ctgaaggaagattttgtggt

SEQ ID NO: 1116 - DNA, 20 bp, Artificial Sequence
  Synthetic oligonucleotide; AGG chr11 5160875 5160894 5160891 +
tgaaggaagattttgtggta

SEQ ID NO: 1117 - DNA, 20 bp, Artificial Sequence
  Synthetic oligonucleotide; GGG chr11 5160876 5160895 5160892 +
gaaggaagattttgtggtaa

SEQ ID NO: 1118 - DNA, 20 bp, Artificial Sequence
  Synthetic oligonucleotide; GGG chr11 5160877 5160896 5160893 +
aaggaagattttgtggtaag

SEQ ID NO: 1119 - DNA, 20 bp, Artificial Sequence
  Synthetic oligonucleotide; TGG chr11 5160888 5160907 5160904 +
tgtggtaaggggtgatattg

SEQ ID NO: 1120 - DNA, 20 bp, Artificial Sequence
  Synthetic oligonucleotide; GGG chr11 5160889 5160908 5160905 +
gtggtaaggggtgatattgt

SEQ ID NO: 1121 - DNA, 20 bp, Artificial Sequence
  Synthetic oligonucleotide; GGG chr11 5160890 5160909 5160906 +
tggtaaggggtgatattgtg

SEQ ID NO: 1122 - DNA, 20 bp, Artificial Sequence
  Synthetic oligonucleotide; TAG chr11 5160897 5160916 5160913 +
gggtgatattgtggggttgt

SEQ ID NO: 1123 - DNA, 20 bp, Artificial Sequence
  Synthetic oligonucleotide; AAG chr11 5160900 5160919 5160916 +
tgatattgtggggttgttag

SEQ ID NO: 1124 - DNA, 20 bp, Artificial Sequence
  Synthetic oligonucleotide; TAG chr11 5160917 5160936 5160933 +
tagaagaaacatttgtcatg

SEQ ID NO: 1125 - DNA, 20 bp, Artificial Sequence
  Synthetic oligonucleotide; TGG chr11 5160926 5160945 5160942 +
catttgtcatgtagaattat

SEQ ID NO: 1126 - DNA, 20 bp, Artificial Sequence
  Synthetic oligonucleotide; TGG chr11 5160932 5160951 5160948 +
tcatgtagaattattggtga

SEQ ID NO: 1127 - DNA, 20 bp, Artificial Sequence
  Synthetic oligonucleotide; TGG chr11 5160937 5160956 5160953 +
tagaattattggtgatggcc

SEQ ID NO: 1128 - DNA, 20 bp, Artificial Sequence
  Synthetic oligonucleotide; CGG chr11 5160943 5160962 5160959 +
tattggtgatggcctggata

SEQ ID NO: 1129 - DNA, 20 bp, Artificial Sequence
  Synthetic oligonucleotide; TGG chr11 5160953 5160972 5160969 +
ggcctggatacggttttgta

SEQ ID NO: 1130 - DNA, 20 bp, Artificial Sequence
  Synthetic oligonucleotide; TGG chr11 5160970 5160989 5160986 +
gtatggattgaaaaaccaaa

SEQ ID NO: 1131 - DNA, 20 bp, Artificial Sequence
  Synthetic oligonucleotide; AAG chr11 5160976 5160995 5160992 +
attgaaaaaccaaatggaat

SEQ ID NO: 1132 - DNA, 20 bp, Artificial Sequence
  Synthetic oligonucleotide; GAG chr11 5160978 5160997 5160994 +
tgaaaaaccaaatggaataa

SEQ ID NO: 1133 - DNA, 20 bp, Artificial Sequence
  Synthetic oligonucleotide; AAG chr11 5160981 5161000 5160997 +
aaaaccaaatggaataagag

SEQ ID NO: 1134 - DNA, 20 bp, Artificial Sequence
  Synthetic oligonucleotide; AGG chr11 5160982 5161001 5160998 +
aaaccaaatggaataagaga

SEQ ID NO: 1135 - DNA, 20 bp, Artificial Sequence
  Synthetic oligonucleotide; GAG chr11 5160984 5161003 5161000 +
accaaatggaataagagaag

SEQ ID NO: 1136 - DNA, 20 bp, Artificial Sequence
  Synthetic oligonucleotide; CAG chr11 5160992 5161011 5161008 +
gaataagagaaggagaaaaa

SEQ ID NO: 1137 - DNA, 20 bp, Artificial Sequence
  Synthetic oligonucleotide; AGG chr11 5160993 5161012 5161009 +
aataagagaaggagaaaaac

SEQ ID NO: 1138 - DNA, 20 bp, Artificial Sequence
  Synthetic oligonucleotide; AAG chr11 5161001 5161020 5161017 +
aaggagaaaaacaggtatta

SEQ ID NO: 1139 - DNA, 20 bp, Artificial Sequence
  Synthetic oligonucleotide; AGG chr11 5161002 5161021 5161018 +
aggagaaaaacaggtattaa

SEQ ID NO: 1140 - DNA, 20 bp, Artificial Sequence
  Synthetic oligonucleotide; AAG chr11 5161008 5161027 5161024 +
aaaacaggtattaaaggact

SEQ ID NO: 1141 - DNA, 20 bp, Artificial Sequence
  Synthetic oligonucleotide; AAG chr11 5161011 5161030 5161027 +
acaggtattaaaggactaag

SEQ ID NO: 1142 - DNA, 20 bp, Artificial Sequence
  Synthetic oligonucleotide; TGG chr11 5161014 5161033 5161030 +
ggtattaaaggactaagaag

SEQ ID NO: 1143 - DNA, 20 bp, Artificial Sequence
  Synthetic oligonucleotide; GGG chr11 5161015 5161034 5161031 +
gtattaaaggactaagaagt

SEQ ID NO: 1144 - DNA, 20 bp, Artificial Sequence
  Synthetic oligonucleotide; GAG chr11 5161017 5161036 5161033 +
attaaaggactaagaagtgg

SEQ ID NO: 1145 - DNA, 20 bp, Artificial Sequence
  Synthetic oligonucleotide; AGG chr11 5161018 5161037 5161034 +
ttaaaggactaagaagtggg

SEQ ID NO: 1146 - DNA, 20 bp, Artificial Sequence
  Synthetic oligonucleotide; TAG chr11 5161024 5161043 5161040 +
gactaagaagtgggaggacc

SEQ ID NO: 1147 - DNA, 20 bp, Artificial Sequence
  Synthetic oligonucleotide; AGG chr11 5161025 5161044 5161041 +
actaagaagtgggaggacct

SEQ ID NO: 1148 - DNA, 20 bp, Artificial Sequence
  Synthetic oligonucleotide; AAG chr11 5161039 5161058 5161055 +
ggacctaggacatctgatta

SEQ ID NO: 1149 - DNA, 20 bp, Artificial Sequence
  Synthetic oligonucleotide; GAG chr11 5161041 5161060 5161057 +
acctaggacatctgattaaa

SEQ ID NO: 1150 - DNA, 20 bp, Artificial Sequence
  Synthetic oligonucleotide; AAG chr11 5161049 5161068 5161065 +
catctgattaaagagtgcct

SEQ ID NO: 1151 - DNA, 20 bp, Artificial Sequence
  Synthetic oligonucleotide; AGG chr11 5161050 5161069 5161066 +
atctgattaaagagtgccta

SEQ ID NO: 1152 - DNA, 20 bp, Artificial Sequence
  Synthetic oligonucleotide; GAG chr11 5161052 5161071 5161068 +
ctgattaaagagtgcctaag

SEQ ID NO: 1153 - DNA, 20 bp, Artificial Sequence
  Synthetic oligonucleotide; TAG chr11 5161063 5161082 5161079 +
gtgcctaaggagattcaaca

SEQ ID NO: 1154 - DNA, 20 bp, Artificial Sequence
  Synthetic oligonucleotide; CAG chr11 5161072 5161091 5161088 +
gagattcaacatagtcctgc

SEQ ID NO: 1155 - DNA, 20 bp, Artificial Sequence
  Synthetic oligonucleotide; AAG chr11 5161077 5161096 5161093 +
tcaacatagtcctgccagca

SEQ ID NO: 1156 - DNA, 20 bp, Artificial Sequence
  Synthetic oligonucleotide; AAG chr11 5161096 5161115 5161112 +
aaagattatttatttacttc

SEQ ID NO: 1157 - DNA, 20 bp, Artificial Sequence
  Synthetic oligonucleotide; GAG chr11 5161098 5161117 5161114 +
agattatttatttacttcaa

SEQ ID NO: 1158 - DNA, 20 bp, Artificial Sequence
  Synthetic oligonucleotide; AAG chr11 5161103 5161122 5161119 +
atttatttacttcaagagtt

SEQ ID NO: 1159 - DNA, 20 bp, Artificial Sequence
  Synthetic oligonucleotide; GAG chr11 5161105 5161124 5161121 +
ttatttacttcaagagttaa

SEQ ID NO: 1160 - DNA, 20 bp, Artificial Sequence
  Synthetic oligonucleotide; TGG chr11 5161108 5161127 5161124 +
tttacttcaagagttaagag

SEQ ID NO: 1161 - DNA, 20 bp, Artificial Sequence
  Synthetic oligonucleotide; CAG chr11 5161111 5161130 5161127 +
acttcaagagttaagagtgg

SEQ ID NO: 1162 - DNA, 20 bp, Artificial Sequence
  Synthetic oligonucleotide; TGG chr11 5161116 5161135 5161132 +
aagagttaagagtggcagtt

SEQ ID NO: 1163 - DNA, 20 bp, Artificial Sequence
  Synthetic oligonucleotide; GGG chr11 5161117 5161136 5161133 +
agagttaagagtggcagttt

SEQ ID NO: 1164 - DNA, 20 bp, Artificial Sequence
  Synthetic oligonucleotide; GGG chr11 5161118 5161137 5161134 +
gagttaagagtggcagtttg

SEQ ID NO: 1165 - DNA, 20 bp, Artificial Sequence
  Synthetic oligonucleotide; TAG chr11 5161122 5161141 5161138 +
taagagtggcagtttgggga

SEQ ID NO: 1166 - DNA, 20 bp, Artificial Sequence
  Synthetic oligonucleotide; CAG chr11 5161128 5161147 5161144 +
tggcagtttggggatagcac

SEQ ID NO: 1167 - DNA, 20 bp, Artificial Sequence
  Synthetic oligonucleotide; AGG chr11 5161129 5161148 5161145 +
ggcagtttggggatagcacc

SEQ ID NO: 1168 - DNA, 20 bp, Artificial Sequence
  Synthetic oligonucleotide; GAG chr11 5161131 5161150 5161147 +
cagtttggggatagcaccag

SEQ ID NO: 1169 - DNA, 20 bp, Artificial Sequence
  Synthetic oligonucleotide; CAG chr11 5161138 5161157 5161154 +
gggatagcaccaggagatat

SEQ ID NO: 1170 - DNA, 20 bp, Artificial Sequence
  Synthetic oligonucleotide; TGG chr11 5161147 5161166 5161163 +
ccaggagatatcagctgtga

SEQ ID NO: 1171 - DNA, 20 bp, Artificial Sequence
  Synthetic oligonucleotide; TGG chr11 5161152 5161171 5161168 +
agatatcagctgtgatggct

SEQ ID NO: 1172 - DNA, 20 bp, Artificial Sequence
  Synthetic oligonucleotide; CAG chr11 5161160 5161179 5161176 +
gctgtgatggcttggaaaaa

SEQ ID NO: 1173 - DNA, 20 bp, Artificial Sequence
  Synthetic oligonucleotide; CGG chr11 5161170 5161189 5161186 +
cttggaaaaacagtgtaaac

SEQ ID NO: 1174 - DNA, 20 bp, Artificial Sequence
  Synthetic oligonucleotide; CAG chr11 5161173 5161192 5161189 +
ggaaaaacagtgtaaaccgg

SEQ ID NO: 1175 - DNA, 20 bp, Artificial Sequence
  Synthetic oligonucleotide; AAG chr11 5161183 5161202 5161199 +
tgtaaaccggcagtgtaaac

SEQ ID NO: 1176 - DNA, 20 bp, Artificial Sequence
  Synthetic oligonucleotide; GAG chr11 5161185 5161204 5161201 +
taaaccggcagtgtaaacaa

SEQ ID NO: 1177 - DNA, 20 bp, Artificial Sequence
  Synthetic oligonucleotide; CAG chr11 5161188 5161207 5161204 +
accggcagtgtaaacaagag

SEQ ID NO: 1178 - DNA, 20 bp, Artificial Sequence
  Synthetic oligonucleotide; AGG chr11 5161189 5161208 5161205 +
ccggcagtgtaaacaagagc

SEQ ID NO: 1179 - DNA, 20 bp, Artificial Sequence
  Synthetic oligonucleotide; GGG chr11 5161190 5161209 5161206 +
cggcagtgtaaacaagagca

SEQ ID NO: 1180 - DNA, 20 bp, Artificial Sequence
  Synthetic oligonucleotide; GAG chr11 5161200 5161219 5161216 +
aacaagagcagggcatgtat

SEQ ID NO: 1181 - DNA, 20 bp, Artificial Sequence
  Synthetic oligonucleotide; TAG chr11 5161203 5161222 5161219 +
aagagcagggcatgtatgag

SEQ ID NO: 1182 - DNA, 20 bp, Artificial Sequence
  Synthetic oligonucleotide; GAG chr11 5161208 5161227 5161224 +
cagggcatgtatgagtagtt

SEQ ID NO: 1183 - DNA, 20 bp, Artificial Sequence
  Synthetic oligonucleotide; TGG chr11 5161213 5161232 5161229 +
catgtatgagtagttgagaa

SEQ ID NO: 1184 - DNA, 20 bp, Artificial Sequence
  Synthetic oligonucleotide; TAG chr11 5161220 5161239 5161236 +
gagtagttgagaatggtgaa

SEQ ID NO: 1185 - DNA, 20 bp, Artificial Sequence
  Synthetic oligonucleotide; AGG chr11 5161221 5161240 5161237 +
agtagttgagaatggtgaat

SEQ ID NO: 1186 - DNA, 20 bp, Artificial Sequence
  Synthetic oligonucleotide; GAG chr11 5161223 5161242 5161239 +
tagttgagaatggtgaatag

SEQ ID NO: 1187 - DNA, 20 bp, Artificial Sequence
  Synthetic oligonucleotide; TAG chr11 5161232 5161251 5161248 +
atggtgaataggagtatgac

SEQ ID NO: 1188 - DNA, 20 bp, Artificial Sequence
  Synthetic oligonucleotide; CAG chr11 5161236 5161255 5161252 +
tgaataggagtatgactaga

SEQ ID NO: 1189 - DNA, 20 bp, Artificial Sequence
  Synthetic oligonucleotide; AAG chr11 5161239 5161258 5161255 +
ataggagtatgactagacag

SEQ ID NO: 1190 - DNA, 20 bp, Artificial Sequence
  Synthetic oligonucleotide; TAG chr11 5161243 5161262 5161259 +
gagtatgactagacagaaga

SEQ ID NO: 1191 - DNA, 20 bp, Artificial Sequence
  Synthetic oligonucleotide; CAG chr11 5161246 5161265 5161262 +
tatgactagacagaagatag

SEQ ID NO: 1192 - DNA, 20 bp, Artificial Sequence
  Synthetic oligonucleotide; AGG chr11 5161247 5161266 5161263 +
atgactagacagaagatagc

SEQ ID NO: 1193 - DNA, 20 bp, Artificial Sequence
  Synthetic oligonucleotide; GGG chr11 5161248 5161267 5161264 +
tgactagacagaagatagca

SEQ ID NO: 1194 - DNA, 20 bp, Artificial Sequence
  Synthetic oligonucleotide; AAG chr11 5161256 5161275 5161272 +
cagaagatagcagggatgac

SEQ ID NO: 1195 - DNA, 20 bp, Artificial Sequence
  Synthetic oligonucleotide; TGG chr11 5161265 5161284 5161281 +
gcagggatgacaagtttttt

SEQ ID NO: 1196 - DNA, 20 bp, Artificial Sequence
  Synthetic oligonucleotide; GGG chr11 5161266 5161285 5161282 +
cagggatgacaagttttttt

SEQ ID NO: 1197 - DNA, 20 bp, Artificial Sequence
  Synthetic oligonucleotide; GGG chr11 5161267 5161286 5161283 +
agggatgacaagtttttttg

SEQ ID NO: 1198 - DNA, 20 bp, Artificial Sequence
  Synthetic oligonucleotide; AAG chr11 5161278 5161297 5161294 +
gtttttttggggcacattct

SEQ ID NO: 1199 - DNA, 20 bp, Artificial Sequence
  Synthetic oligonucleotide; TGG chr11 5161282 5161301 5161298 +
ttttggggcacattctaagt

SEQ ID NO: 1200 - DNA, 20 bp, Artificial Sequence
  Synthetic oligonucleotide; TGG chr11 5161287 5161306 5161303 +
gggcacattctaagttggtc

SEQ ID NO: 1201 - DNA, 20 bp, Artificial Sequence
  Synthetic oligonucleotide; TGG chr11 5161294 5161313 5161310 +
ttctaagttggtctggtgtc

SEQ ID NO: 1202 - DNA, 20 bp, Artificial Sequence
  Synthetic oligonucleotide; TAG chr11 5161300 5161319 5161316 +
gttggtctggtgtctggaat

SEQ ID NO: 1203 - DNA, 20 bp, Artificial Sequence
  Synthetic oligonucleotide; TGG chr11 5161305 5161324 5161321 +
tctggtgtctggaattagac

SEQ ID NO: 1204 - DNA, 20 bp, Artificial Sequence
  Synthetic oligonucleotide; GGG chr11 5161306 5161325 5161322 +
ctggtgtctggaattagact

SEQ ID NO: 1205 - DNA, 20 bp, Artificial Sequence
  Synthetic oligonucleotide; GGG chr11 5161307 5161326 5161323 +
tggtgtctggaattagactg

SEQ ID NO: 1206 - DNA, 20 bp, Artificial Sequence
  Synthetic oligonucleotide; AAG chr11 5161319 5161338 5161335 +
ttagactggggcctaataaa

SEQ ID NO: 1207 - DNA, 20 bp, Artificial Sequence
  Synthetic oligonucleotide; AGG chr11 5161320 5161339 5161336 +
tagactggggcctaataaaa

SEQ ID NO: 1208 - DNA, 20 bp, Artificial Sequence
  Synthetic oligonucleotide; CAG chr11 5161333 5161352 5161349 +
aataaaaaggcaaatctata

SEQ ID NO: 1209 - DNA, 20 bp, Artificial Sequence
  Synthetic oligonucleotide; AGG chr11 5161334 5161353 5161350 +
ataaaaaggcaaatctatac

SEQ ID NO: 1210 - DNA, 20 bp, Artificial Sequence
  Synthetic oligonucleotide; GAG chr11 5161336 5161355 5161352 +
aaaaaggcaaatctatacag

SEQ ID NO: 1211 - DNA, 20 bp, Artificial Sequence
  Synthetic oligonucleotide; TGG chr11 5161345 5161364 5161361 +
aatctatacaggagctcaaa

SEQ ID NO: 1212 - DNA, 20 bp, Artificial Sequence
  Synthetic oligonucleotide; GGG chr11 5161346 5161365 5161362 +
atctatacaggagctcaaat

SEQ ID NO: 1213 - DNA, 20 bp, Artificial Sequence
  Synthetic oligonucleotide; TAG chr11 5161359 5161378 5161375 +
ctcaaatgggctgtaccctg

SEQ ID NO: 1214 - DNA, 20 bp, Artificial Sequence
  Synthetic oligonucleotide; GAG chr11 5161368 5161387 5161384 +
gctgtaccctgtagcattct

SEQ ID NO: 1215 - DNA, 20 bp, Artificial Sequence
  Synthetic oligonucleotide; AGG chr11 5161369 5161388 5161385 +
ctgtaccctgtagcattctg

SEQ ID NO: 1216 - DNA, 20 bp, Artificial Sequence
  Synthetic oligonucleotide; CAG chr11 5161373 5161392 5161389 +
accctgtagcattctgagga

SEQ ID NO: 1217 - DNA, 20 bp, Artificial Sequence
  Synthetic oligonucleotide; AGG chr11 5161374 5161393 5161390 +
ccctgtagcattctgaggac

SEQ ID NO: 1218 - DNA, 20 bp, Artificial Sequence
  Synthetic oligonucleotide; GAG chr11 5161387 5161406 5161403 +
tgaggacaggtctgacttct

SEQ ID NO: 1219 - DNA, 20 bp, Artificial Sequence
  Synthetic oligonucleotide; AAG chr11 5161391 5161410 5161407 +
gacaggtctgacttctgaga

SEQ ID NO: 1220 - DNA, 20 bp, Artificial Sequence
  Synthetic oligonucleotide; AAG chr11 5161396 5161415 5161412 +
gtctgacttctgagaaagaa

SEQ ID NO: 1221 - DNA, 20 bp, Artificial Sequence
  Synthetic oligonucleotide; TGG chr11 5161399 5161418 5161415 +
tgacttctgagaaagaaaag

SEQ ID NO: 1222 - DNA, 20 bp, Artificial Sequence
  Synthetic oligonucleotide; AAG chr11 5161405 5161424 5161421 +
ctgagaaagaaaagtggtaa

SEQ ID NO: 1223 - DNA, 20 bp, Artificial Sequence
  Synthetic oligonucleotide; CAG chr11 5161415 5161434 5161431 +
aaagtggtaaaagtattgtc

SEQ ID NO: 1224 - DNA, 20 bp, Artificial Sequence
  Synthetic oligonucleotide; AAG chr11 5161426 5161445 5161442 +
agtattgtccagtccttttt

SEQ ID NO: 1225 - DNA, 20 bp, Artificial Sequence
  Synthetic oligonucleotide; TGG chr11 5161430 5161449 5161446 +
ttgtccagtcctttttaagt

SEQ ID NO: 1226 - DNA, 20 bp, Artificial Sequence
  Synthetic oligonucleotide; TGG chr11 5161433 5161452 5161449 +
tccagtcctttttaagttgg

SEQ ID NO: 1227 - DNA, 20 bp, Artificial Sequence
  Synthetic oligonucleotide; GAG chr11 5161438 5161457 5161454 +
tcctttttaagttggtggct

SEQ ID NO: 1228 - DNA, 20 bp, Artificial Sequence
  Synthetic oligonucleotide; TGG chr11 5161443 5161462 5161459 +
tttaagttggtggctgagct

SEQ ID NO: 1229 - DNA, 20 bp, Artificial Sequence
  Synthetic oligonucleotide; GAG chr11 5161447 5161466 5161463 +
agttggtggctgagcttggt

SEQ ID NO: 1230 - DNA, 20 bp, Artificial Sequence
  Synthetic oligonucleotide; AGG chr11 5161448 5161467 5161464 +
gttggtggctgagcttggtg

SEQ ID NO: 1231 - DNA, 20 bp, Artificial Sequence
  Synthetic oligonucleotide; AAG chr11 5161462 5161481 5161478 +
ttggtgaggtgtgtttttaa

SEQ ID NO: 1232 - DNA, 20 bp, Artificial Sequence
  Synthetic oligonucleotide; TAG chr11 5161470 5161489 5161486 +
gtgtgtttttaaaagacatt

SEQ ID NO: 1233 - DNA, 20 bp, Artificial Sequence
  Synthetic oligonucleotide; AAG chr11 5161491 5161510 5161507 +
agtccgttctacttttcctg

SEQ ID NO: 1234 - DNA, 20 bp, Artificial Sequence
  Synthetic oligonucleotide; CGG chr11 5161495 5161514 5161511 +
cgttctacttttcctgaaga

SEQ ID NO: 1235 - DNA, 20 bp, Artificial Sequence
  Synthetic oligonucleotide; GAG chr11 5161497 5161516 5161513 +
ttctacttttcctgaagacg

SEQ ID NO: 1236 - DNA, 20 bp, Artificial Sequence
  Synthetic oligonucleotide; AGG chr11 5161498 5161517 5161514 +
tctacttttcctgaagacgg

SEQ ID NO: 1237 - DNA, 20 bp, Artificial Sequence
  Synthetic oligonucleotide; AAG chr11 5161506 5161525 5161522 +
tcctgaagacggaggaccgt

SEQ ID NO: 1238 - DNA, 20 bp, Artificial Sequence
  Synthetic oligonucleotide; AGG chr11 5161507 5161526 5161523 +
cctgaagacggaggaccgta

SEQ ID NO: 1239 - DNA, 20 bp, Artificial Sequence
  Synthetic oligonucleotide; GGG chr11 5161508 5161527 5161524 +
ctgaagacggaggaccgtaa

SEQ ID NO: 1240 - DNA, 20 bp, Artificial Sequence
  Synthetic oligonucleotide; AAG chr11 5161516 5161535 5161532 +
ggaggaccgtaagggatata

SEQ ID NO: 1241 - DNA, 20 bp, Artificial Sequence
  Synthetic oligonucleotide; AGG chr11 5161517 5161536 5161533 +
gaggaccgtaagggatataa

SEQ ID NO: 1242 - DNA, 20 bp, Artificial Sequence
  Synthetic oligonucleotide; AAG chr11 5161534 5161553 5161550 +
taaaggttttactgaatact

SEQ ID NO: 1243 - DNA, 20 bp, Artificial Sequence
  Synthetic oligonucleotide; GAG chr11 5161536 5161555 5161552 +
aaggttttactgaatactaa

SEQ ID NO: 1244 - DNA, 20 bp, Artificial Sequence
  Synthetic oligonucleotide; TGG chr11 5161553 5161572 5161569 +
taagagcctgaaaaactgct

SEQ ID NO: 1245 - DNA, 20 bp, Artificial Sequence
  Synthetic oligonucleotide; AAG chr11 5161571 5161590 5161587 +
cttggctgatttgactaata

SEQ ID NO: 1246 - DNA, 20 bp, Artificial Sequence
  Synthetic oligonucleotide; AGG chr11 5161572 5161591 5161588 +
ttggctgatttgactaataa

SEQ ID NO: 1247 - DNA, 20 bp, Artificial Sequence
  Synthetic oligonucleotide; TGG chr11 5161576 5161595 5161592 +
ctgatttgactaataaaggc

SEQ ID NO: 1248 - DNA, 20 bp, Artificial Sequence
  Synthetic oligonucleotide; CAG chr11 5161587 5161606 5161603 +
aataaaggctggtctgttat

SEQ ID NO: 1249 - DNA, 20 bp, Artificial Sequence
  Synthetic oligonucleotide; TAG chr11 5161596 5161615 5161612 +
tggtctgttatcagactgta

SEQ ID NO: 1250 - DNA, 20 bp, Artificial Sequence
  Synthetic oligonucleotide; GAG chr11 5161598 5161617 5161614 +
gtctgttatcagactgtata

SEQ ID NO: 1251 - DNA, 20 bp, Artificial Sequence
  Synthetic oligonucleotide; AGG chr11 5161599 5161618 5161615 +
tctgttatcagactgtatag

SEQ ID NO: 1252 - DNA, 20 bp, Artificial Sequence
  Synthetic oligonucleotide; TAG chr11 5161602 5161621 5161618 +
gttatcagactgtatagagg

SEQ ID NO: 1253 - DNA, 20 bp, Artificial Sequence
  Synthetic oligonucleotide; AGG chr11 5161603 5161622 5161619 +
ttatcagactgtatagaggt

SEQ ID NO: 1254 - DNA, 20 bp, Artificial Sequence
  Synthetic oligonucleotide; AAG chr11 5161606 5161625 5161622 +
tcagactgtatagaggtagg

SEQ ID NO: 1255 - DNA, 20 bp, Artificial Sequence
  Synthetic oligonucleotide; AGG chr11 5161607 5161626 5161623 +
cagactgtatagaggtagga

SEQ ID NO: 1256 - DNA, 20 bp, Artificial Sequence
  Synthetic oligonucleotide; GAG chr11 5161617 5161636 5161633 +
agaggtaggaaggctaaact

SEQ ID NO: 1257 - DNA, 20 bp, Artificial Sequence
  Synthetic oligonucleotide; AGG chr11 5161618 5161637 5161634 +
gaggtaggaaggctaaactg

SEQ ID NO: 1258 - DNA, 20 bp, Artificial Sequence
  Synthetic oligonucleotide; CAG chr11 5161633 5161652 5161649 +
aactgaggaattatgtctga

SEQ ID NO: 1259 - DNA, 20 bp, Artificial Sequence
  Synthetic oligonucleotide; AAG chr11 5161636 5161655 5161652 +
tgaggaattatgtctgacag

SEQ ID NO: 1260 - DNA, 20 bp, Artificial Sequence
  Synthetic oligonucleotide; AGG chr11 5161637 5161656 5161653 +
gaggaattatgtctgacaga

SEQ ID NO: 1261 - DNA, 20 bp, Artificial Sequence
  Synthetic oligonucleotide; GGG chr11 5161638 5161657 5161654 +
aggaattatgtctgacagaa

SEQ ID NO: 1262 - DNA, 20 bp, Artificial Sequence
  Synthetic oligonucleotide; AAG chr11 5161641 5161660 5161657 +
aattatgtctgacagaaggg

SEQ ID NO: 1263 - DNA, 20 bp, Artificial Sequence
  Synthetic oligonucleotide; CGG chr11 5161653 5161672 5161669 +
cagaagggaagaaatgactg

SEQ ID NO: 1264 - DNA, 20 bp, Artificial Sequence
  Synthetic oligonucleotide; TGG chr11 5161656 5161675 5161672 +
aagggaagaaatgactgcgg

SEQ ID NO: 1265 - DNA, 20 bp, Artificial Sequence
  Synthetic oligonucleotide; CAG chr11 5161665 5161684 5161681 +
aatgactgcggtggccttct

SEQ ID NO: 1266 - DNA, 20 bp, Artificial Sequence
  Synthetic oligonucleotide; TAG chr11 5161674 5161693 5161690 +
ggtggccttctcagaccctg

SEQ ID NO: 1267 - DNA, 20 bp, Artificial Sequence
  Synthetic oligonucleotide; AGG chr11 5161675 5161694 5161691 +
gtggccttctcagaccctgt

SEQ ID NO: 1268 - DNA, 20 bp, Artificial Sequence
  Synthetic oligonucleotide; AAG chr11 5161679 5161698 5161695 +
ccttctcagaccctgtagga

SEQ ID NO: 1269 - DNA, 20 bp, Artificial Sequence
  Synthetic oligonucleotide; CAG chr11 5161695 5161714 5161711 +
aggaaagacctctacttatc

SEQ ID NO: 1270 - DNA, 20 bp, Artificial Sequence
  Synthetic oligonucleotide; AAG chr11 5161701 5161720 5161717 +
gacctctacttatccagtga

SEQ ID NO: 1271 - DNA, 20 bp, Artificial Sequence
  Synthetic oligonucleotide; TAG chr11 5161712 5161731 5161728 +
atccagtgaaagtgtctacc

SEQ ID NO: 1272 - DNA, 20 bp, Artificial Sequence
  Synthetic oligonucleotide; AAG chr11 5161718 5161737 5161734 +
tgaaagtgtctacctagact

SEQ ID NO: 1273 - DNA, 20 bp, Artificial Sequence
  Synthetic oligonucleotide; GAG chr11 5161720 5161739 5161736 +
aaagtgtctacctagactaa

SEQ ID NO: 1274 - DNA, 20 bp, Artificial Sequence
  Synthetic oligonucleotide; AGG chr11 5161721 5161740 5161737 +
aagtgtctacctagactaag

SEQ ID NO: 1275 - DNA, 20 bp, Artificial Sequence
  Synthetic oligonucleotide; TAG chr11 5161729 5161748 5161745 +
acctagactaagaggtattt

SEQ ID NO: 1276 - DNA, 20 bp, Artificial Sequence
  Synthetic oligonucleotide; CAG chr11 5161742 5161761 5161758 +
ggtattttagttatctgact

SEQ ID NO: 1277 - DNA, 20 bp, Artificial Sequence
  Synthetic oligonucleotide; AGG chr11 5161743 5161762 5161759 +
gtattttagttatctgactc

SEQ ID NO: 1278 - DNA, 20 bp, Artificial Sequence
  Synthetic oligonucleotide; GGG chr11 5161744 5161763 5161760 +
tattttagttatctgactca

SEQ ID NO: 1279 - DNA, 20 bp, Artificial Sequence
  Synthetic oligonucleotide; GAG chr11 5161753 5161772 5161769 +
tatctgactcagggcatgtt

SEQ ID NO: 1280 - DNA, 20 bp, Artificial Sequence
  Synthetic oligonucleotide; CAG chr11 5161770 5161789 5161786 +
gttgagtaaatctaatttgc

SEQ ID NO: 1281 - DNA, 20 bp, Artificial Sequence
  Synthetic oligonucleotide; TGG chr11 5161776 5161795 5161792 +
taaatctaatttgccagtcc

SEQ ID NO: 1282 - DNA, 20 bp, Artificial Sequence
  Synthetic oligonucleotide; GGG chr11 5161777 5161796 5161793 +
aaatctaatttgccagtcct

SEQ ID NO: 1283 - DNA, 20 bp, Artificial Sequence
  Synthetic oligonucleotide; TGG chr11 5161780 5161799 5161796 +
tctaatttgccagtcctggg

SEQ ID NO: 1284 - DNA, 20 bp, Artificial Sequence
  Synthetic oligonucleotide; GGG chr11 5161781 5161800 5161797 +
ctaatttgccagtcctgggt

SEQ ID NO: 1285 - DNA, 20 bp, Artificial Sequence
  Synthetic oligonucleotide; GGG chr11 5161782 5161801 5161798 +
taatttgccagtcctgggtg

SEQ ID NO: 1286 - DNA, 20 bp, Artificial Sequence
  Synthetic oligonucleotide; GGG chr11 5161783 5161802 5161799 +
aatttgccagtcctgggtgg

SEQ ID NO: 1287 - DNA, 20 bp, Artificial Sequence
  Synthetic oligonucleotide; GAG chr11 5161795 5161814 5161811 +
ctgggtgggggcaaatcctc

SEQ ID NO: 1288 - DNA, 20 bp, Artificial Sequence
  Synthetic oligonucleotide; TAG chr11 5161807 5161826 5161823 +
aaatcctcgagcttgatgtg

SEQ ID NO: 1289 - DNA, 20 bp, Artificial Sequence
  Synthetic oligonucleotide; AGG chr11 5161808 5161827 5161824 +
aatcctcgagcttgatgtgt

SEQ ID NO: 1290 - DNA, 20 bp, Artificial Sequence
  Synthetic oligonucleotide; GGG chr11 5161809 5161828 5161825 +
atcctcgagcttgatgtgta

SEQ ID NO: 1291 - DNA, 20 bp, Artificial Sequence
  Synthetic oligonucleotide; AAG chr11 5161812 5161831 5161828 +
ctcgagcttgatgtgtaggg

SEQ ID NO: 1292 - DNA, 20 bp, Artificial Sequence
  Synthetic oligonucleotide; AGG chr11 5161813 5161832 5161829 +
tcgagcttgatgtgtaggga

SEQ ID NO: 1293 - DNA, 20 bp, Artificial Sequence
  Synthetic oligonucleotide; GGG chr11 5161814 5161833 5161830 +
cgagcttgatgtgtagggaa

SEQ ID NO: 1294 - DNA, 20 bp, Artificial Sequence
  Synthetic oligonucleotide; GAG chr11 5161816 5161835 5161832 +
agcttgatgtgtagggaagg

SEQ ID NO: 1295 - DNA, 20 bp, Artificial Sequence
  Synthetic oligonucleotide; AGG chr11 5161817 5161836 5161833 +
gcttgatgtgtagggaaggg

SEQ ID NO: 1296 - DNA, 20 bp, Artificial Sequence
  Synthetic oligonucleotide; GGG chr11 5161818 5161837 5161834 +
cttgatgtgtagggaaggga

SEQ ID NO: 1297 - DNA, 20 bp, Artificial Sequence
  Synthetic oligonucleotide; GGG chr11 5161819 5161838 5161835 +
ttgatgtgtagggaagggag

SEQ ID NO: 1298 - DNA, 20 bp, Artificial Sequence
  Synthetic oligonucleotide; GGG chr11 5161820 5161839 5161836 +
tgatgtgtagggaagggagg

SEQ ID NO: 1299 - DNA, 20 bp, Artificial Sequence
  Synthetic oligonucleotide; GAG chr11 5161837 5161856 5161853 +
agggggcctgaataatccct

SEQ ID NO: 1300 - DNA, 20 bp, Artificial Sequence
  Synthetic oligonucleotide; AGG chr11 5161838 5161857 5161854 +
gggggcctgaataatccctg

SEQ ID NO: 1301 - DNA, 20 bp, Artificial Sequence
  Synthetic oligonucleotide; GAG chr11 5161840 5161859 5161856 +
gggcctgaataatccctgag

SEQ ID NO: 1302 - DNA, 20 bp, Artificial Sequence
  Synthetic oligonucleotide; TAG chr11 5161843 5161862 5161859 +
cctgaataatccctgaggag

SEQ ID NO: 1303 - DNA, 20 bp, Artificial Sequence
  Synthetic oligonucleotide; CAG chr11 5161846 5161865 5161862 +
gaataatccctgaggagtag

SEQ ID NO: 1304 - DNA, 20 bp, Artificial Sequence
  Synthetic oligonucleotide; TAG chr11 5161851 5161870 5161867 +
atccctgaggagtagcagaa

SEQ ID NO: 1305 - DNA, 20 bp, Artificial Sequence
  Synthetic oligonucleotide; CAG chr11 5161854 5161873 5161870 +
cctgaggagtagcagaatag

SEQ ID NO: 1306 - DNA, 20 bp, Artificial Sequence
  Synthetic oligonucleotide; TGG chr11 5161858 5161877 5161874 +
aggagtagcagaatagcaga

SEQ ID NO: 1307 - DNA, 20 bp, Artificial Sequence
  Synthetic oligonucleotide; GAG chr11 5161867 5161886 5161883 +
agaatagcagatggaacact

SEQ ID NO: 1308 - DNA, 20 bp, Artificial Sequence
  Synthetic oligonucleotide; AAG chr11 5161870 5161889 5161886 +
atagcagatggaacactgag

SEQ ID NO: 1309 - DNA, 20 bp, Artificial Sequence
  Synthetic oligonucleotide; GAG chr11 5161883 5161902 5161899 +
cactgagaagttatttcttt

SEQ ID NO: 1310 - DNA, 20 bp, Artificial Sequence
  Synthetic oligonucleotide; AGG chr11 5161884 5161903 5161900 +
actgagaagttatttctttg

SEQ ID NO: 1311 - DNA, 20 bp, Artificial Sequence
  Synthetic oligonucleotide; TAG chr11 5161888 5161907 5161904 +
agaagttatttctttgagga

SEQ ID NO: 1312 - DNA, 20 bp, Artificial Sequence
  Synthetic oligonucleotide; TGG chr11 5161901 5161920 5161917 +
ttgaggatagatttctacga

SEQ ID NO: 1313 - DNA, 20 bp, Artificial Sequence
  Synthetic oligonucleotide; AAG chr11 5161905 5161924 5161921 +
ggatagatttctacgatgga

SEQ ID NO: 1314 - DNA, 20 bp, Artificial Sequence
  Synthetic oligonucleotide; AGG chr11 5161906 5161925 5161922 +
gatagatttctacgatggaa

SEQ ID NO: 1315 - DNA, 20 bp, Artificial Sequence
  Synthetic oligonucleotide; GAG chr11 5161913 5161932 5161929 +
ttctacgatggaaaggaaat

SEQ ID NO: 1316 - DNA, 20 bp, Artificial Sequence
  Synthetic oligonucleotide; GAG chr11 5161915 5161934 5161931 +
ctacgatggaaaggaaatga

SEQ ID NO: 1317 - DNA, 20 bp, Artificial Sequence
  Synthetic oligonucleotide; AGG chr11 5161916 5161935 5161932 +
tacgatggaaaggaaatgag

SEQ ID NO: 1318 - DNA, 20 bp, Artificial Sequence
  Synthetic oligonucleotide; AAG chr11 5161923 5161942 5161939 +
gaaaggaaatgagaggttcg

SEQ ID NO: 1319 - DNA, 20 bp, Artificial Sequence
  Synthetic oligonucleotide; GAG chr11 5161925 5161944 5161941 +
aaggaaatgagaggttcgaa

SEQ ID NO: 1320 - DNA, 20 bp, Artificial Sequence
  Synthetic oligonucleotide; AGG chr11 5161926 5161945 5161942 +
aggaaatgagaggttcgaag

SEQ ID NO: 1321 - DNA, 20 bp, Artificial Sequence
  Synthetic oligonucleotide; CAG chr11 5161929 5161948 5161945 +
aaatgagaggttcgaagagg

SEQ ID NO: 1322 - DNA, 20 bp, Artificial Sequence
  Synthetic oligonucleotide; AGG chr11 5161930 5161949 5161946 +
aatgagaggttcgaagaggc

SEQ ID NO: 1323 - DNA, 20 bp, Artificial Sequence
  Synthetic oligonucleotide; TAG chr11 5161934 5161953 5161950 +
agaggttcgaagaggcaggc

SEQ ID NO: 1324 - DNA, 20 bp, Artificial Sequence
  Synthetic oligonucleotide; TGG chr11 5161937 5161956 5161953 +
ggttcgaagaggcaggctag

SEQ ID NO: 1325 - DNA, 20 bp, Artificial Sequence
  Synthetic oligonucleotide; TAG chr11 5161949 5161968 5161965 +
caggctagtggtttgtacta

SEQ ID NO: 1326 - DNA, 20 bp, Artificial Sequence
  Synthetic oligonucleotide; TAG chr11 5161954 5161973 5161970 +
tagtggtttgtactatagca

SEQ ID NO: 1327 - DNA, 20 bp, Artificial Sequence
  Synthetic oligonucleotide; TGG chr11 5161968 5161987 5161984 +
atagcatagcctgcctttgc

SEQ ID NO: 1328 - DNA, 20 bp, Artificial Sequence
  Synthetic oligonucleotide; TGG chr11 5161975 5161994 5161991 +
agcctgcctttgctggtgtg

SEQ ID NO: 1329 - DNA, 20 bp, Artificial Sequence
  Synthetic oligonucleotide; TAG chr11 5161982 5162001 5161998 +
ctttgctggtgtgtggctat

SEQ ID NO: 1330 - DNA, 20 bp, Artificial Sequence
  Synthetic oligonucleotide; AGG chr11 5161983 5162002 5161999 +
tttgctggtgtgtggctatt

SEQ ID NO: 1331 - DNA, 20 bp, Artificial Sequence
  Synthetic oligonucleotide; TGG chr11 5161988 5162007 5162004 +
tggtgtgtggctattaggcc

SEQ ID NO: 1332 - DNA, 20 bp, Artificial Sequence
  Synthetic oligonucleotide; TGG chr11 5161991 5162010 5162007 +
tgtgtggctattaggcctgg

SEQ ID NO: 1333 - DNA, 20 bp, Artificial Sequence
  Synthetic oligonucleotide; CGG chr11 5161996 5162015 5162012 +
ggctattaggcctggtggaa

SEQ ID NO: 1334 - DNA, 20 bp, Artificial Sequence
  Synthetic oligonucleotide; AAG chr11 5162012 5162031 5162028 +
ggaacggccatcaataaatc

SEQ ID NO: 1335 - DNA, 20 bp, Artificial Sequence
  Synthetic oligonucleotide; CAG chr11 5162021 5162040 5162037 +
atcaataaatcaagtgtgat

SEQ ID NO: 1336 - DNA, 20 bp, Artificial Sequence
  Synthetic oligonucleotide; AGG chr11 5162022 5162041 5162038 +
tcaataaatcaagtgtgatc

SEQ ID NO: 1337 - DNA, 20 bp, Artificial Sequence
  Synthetic oligonucleotide; GGG chr11 5162023 5162042 5162039 +
caataaatcaagtgtgatca

SEQ ID NO: 1338 - DNA, 20 bp, Artificial Sequence
  Synthetic oligonucleotide; GAG chr11 5162027 5162046 5162043 +
aaatcaagtgtgatcagggt

SEQ ID NO: 1339 - DNA, 20 bp, Artificial Sequence
  Synthetic oligonucleotide; AGG chr11 5162028 5162047 5162044 +
aatcaagtgtgatcagggtg

SEQ ID NO: 1340 - DNA, 20 bp, Artificial Sequence
  Synthetic oligonucleotide; CAG chr11 5162033 5162052 5162049 +
agtgtgatcagggtgaggaa

SEQ ID NO: 1341 - DNA, 20 bp, Artificial Sequence
  Synthetic oligonucleotide; AGG chr11 5162034 5162053 5162050 +
gtgtgatcagggtgaggaac

SEQ ID NO: 1342 - DNA, 20 bp, Artificial Sequence
  Synthetic oligonucleotide; AAG chr11 5162038 5162057 5162054 +
gatcagggtgaggaacagga

SEQ ID NO: 1343 - DNA, 20 bp, Artificial Sequence
  Synthetic oligonucleotide; AAG chr11 5162041 5162060 5162057 +
cagggtgaggaacaggaaag

SEQ ID NO: 1344 - DNA, 20 bp, Artificial Sequence
  Synthetic oligonucleotide; AGG chr11 5162042 5162061 5162058 +
agggtgaggaacaggaaaga

SEQ ID NO: 1345 - DNA, 20 bp, Artificial Sequence
  Synthetic oligonucleotide; AAG chr11 5162046 5162065 5162062 +
tgaggaacaggaaagaagga

SEQ ID NO: 1346 - DNA, 20 bp, Artificial Sequence
  Synthetic oligonucleotide; AAG chr11 5162049 5162068 5162065 +
ggaacaggaaagaaggaaag

SEQ ID NO: 1347 - DNA, 20 bp, Artificial Sequence
  Synthetic oligonucleotide; AGG chr11 5162050 5162069 5162066 +
gaacaggaaagaaggaaaga

SEQ ID NO: 1348 - DNA, 20 bp, Artificial Sequence
  Synthetic oligonucleotide; TGG chr11 5162058 5162077 5162074 +
aagaaggaaagaaggaaata

SEQ ID NO: 1349 - DNA, 20 bp, Artificial Sequence
  Synthetic oligonucleotide; GGG chr11 5162059 5162078 5162075 +
agaaggaaagaaggaaatat

SEQ ID NO: 1350 - DNA, 20 bp, Artificial Sequence
  Synthetic oligonucleotide; GGG chr11 5162060 5162079 5162076 +
gaaggaaagaaggaaatatg

SEQ ID NO: 1351 - DNA, 20 bp, Artificial Sequence
  Synthetic oligonucleotide; TGG chr11 5162066 5162085 5162082 +
aagaaggaaatatggggaaa

SEQ ID NO: 1352 - DNA, 20 bp, Artificial Sequence
  Synthetic oligonucleotide; GGG chr11 5162067 5162086 5162083 +
agaaggaaatatggggaaat

SEQ ID NO: 1353 - DNA, 20 bp, Artificial Sequence
  Synthetic oligonucleotide; GGG chr11 5162068 5162087 5162084 +
gaaggaaatatggggaaatg

SEQ ID NO: 1354 - DNA, 20 bp, Artificial Sequence
  Synthetic oligonucleotide; CAG chr11 5162078 5162097 5162094 +
tggggaaatggggtgaatgt

SEQ ID NO: 1355 - DNA, 20 bp, Artificial Sequence
  Synthetic oligonucleotide; AGG chr11 5162079 5162098 5162095 +
ggggaaatggggtgaatgtc

SEQ ID NO: 1356 - DNA, 20 bp, Artificial Sequence
  Synthetic oligonucleotide; TGG chr11 5162082 5162101 5162098 +
gaaatggggtgaatgtcagg

SEQ ID NO: 1357 - DNA, 20 bp, Artificial Sequence
  Synthetic oligonucleotide; CAG chr11 5162087 5162106 5162103 +
ggggtgaatgtcaggtggat

SEQ ID NO: 1358 - DNA, 20 bp, Artificial Sequence
  Synthetic oligonucleotide; GAG chr11 5162089 5162108 5162105 +
ggtgaatgtcaggtggatca

SEQ ID NO: 1359 - DNA, 20 bp, Artificial Sequence
  Synthetic oligonucleotide; GAG chr11 5162091 5162110 5162107 +
tgaatgtcaggtggatcaga

SEQ ID NO: 1360 - DNA, 20 bp, Artificial Sequence
  Synthetic oligonucleotide; TGG chr11 5162103 5162122 5162119 +
ggatcagagagatacaatca

SEQ ID NO: 1361 - DNA, 20 bp, Artificial Sequence
  Synthetic oligonucleotide; GGG chr11 5162104 5162123 5162120 +
gatcagagagatacaatcat

SEQ ID NO: 1362 - DNA, 20 bp, Artificial Sequence
  Synthetic oligonucleotide; GGG chr11 5162105 5162124 5162121 +
atcagagagatacaatcatg

SEQ ID NO: 1363 - DNA, 20 bp, Artificial Sequence
  Synthetic oligonucleotide; GGG chr11 5162106 5162125 5162122 +
tcagagagatacaatcatgg

SEQ ID NO: 1364 - DNA, 20 bp, Artificial Sequence
  Synthetic oligonucleotide; CAG chr11 5162110 5162129 5162126 +
agagatacaatcatgggggt

SEQ ID NO: 1365 - DNA, 20 bp, Artificial Sequence
  Synthetic oligonucleotide; AGG chr11 5162111 5162130 5162127 +
gagatacaatcatgggggtc

SEQ ID NO: 1366 - DNA, 20 bp, Artificial Sequence
  Synthetic oligonucleotide; TGG chr11 5162116 5162135 5162132 +
acaatcatgggggtcaggtg

SEQ ID NO: 1367 - DNA, 20 bp, Artificial Sequence
  Synthetic oligonucleotide; CAG chr11 5162122 5162141 5162138 +
atgggggtcaggtgtggtat

SEQ ID NO: 1368 - DNA, 20 bp, Artificial Sequence
  Synthetic oligonucleotide; AGG chr11 5162123 5162142 5162139 +
tgggggtcaggtgtggtatc

SEQ ID NO: 1369 - DNA, 20 bp, Artificial Sequence
  Synthetic oligonucleotide; TGG chr11 5162133 5162152 5162149 +
gtgtggtatcaggaataatg

SEQ ID NO: 1370 - DNA, 20 bp, Artificial Sequence
  Synthetic oligonucleotide; GGG chr11 5162134 5162153 5162150 +
tgtggtatcaggaataatgt

SEQ ID NO: 1371 - DNA, 20 bp, Artificial Sequence
  Synthetic oligonucleotide; GAG chr11 5162136 5162155 5162152 +
tggtatcaggaataatgtgg

SEQ ID NO: 1372 - DNA, 20 bp, Artificial Sequence
  Synthetic oligonucleotide; AGG chr11 5162137 5162156 5162153 +
ggtatcaggaataatgtggg

SEQ ID NO: 1373 - DNA, 20 bp, Artificial Sequence
  Synthetic oligonucleotide; CGG chr11 5162141 5162160 5162157 +
tcaggaataatgtgggaggc

SEQ ID NO: 1374 - DNA, 20 bp, Artificial Sequence
  Synthetic oligonucleotide; AAG chr11 5162148 5162167 5162164 +
taatgtgggaggccggattg

SEQ ID NO: 1375 - DNA, 20 bp, Artificial Sequence
  Synthetic oligonucleotide; CGG chr11 5162153 5162172 5162169 +
tgggaggccggattgaagtc

SEQ ID NO: 1376 - DNA, 20 bp, Artificial Sequence
  Synthetic oligonucleotide; GGG chr11 5162154 5162173 5162170 +
gggaggccggattgaagtcc

SEQ ID NO: 1377 - DNA, 20 bp, Artificial Sequence
  Synthetic oligonucleotide; CAG chr11 5162158 5162177 5162174 +
ggccggattgaagtccgggc

SEQ ID NO: 1378 - DNA, 20 bp, Artificial Sequence
  Synthetic oligonucleotide; AGG chr11 5162159 5162178 5162175 +
gccggattgaagtccgggcc

SEQ ID NO: 1379 - DNA, 20 bp, Artificial Sequence
  Synthetic oligonucleotide; TGG chr11 5162167 5162186 5162183 +
gaagtccgggccaggaccaa

SEQ ID NO: 1380 - DNA, 20 bp, Artificial Sequence
  Synthetic oligonucleotide; TGG chr11 5162176 5162195 5162192 +
gccaggaccaatggtaattg

SEQ ID NO: 1381 - DNA, 20 bp, Artificial Sequence
  Synthetic oligonucleotide; GGG chr11 5162177 5162196 5162193 +
ccaggaccaatggtaattgt

SEQ ID NO: 1382 - DNA, 20 bp, Artificial Sequence
  Synthetic oligonucleotide; AAG chr11 5162188 5162207 5162204 +
ggtaattgtgggacttaaca

SEQ ID NO: 1383 - DNA, 20 bp, Artificial Sequence
  Synthetic oligonucleotide; GAG chr11 5162190 5162209 5162206 +
taattgtgggacttaacaaa

SEQ ID NO: 1384 - DNA, 20 bp, Artificial Sequence
  Synthetic oligonucleotide; GAG chr11 5162194 5162213 5162210 +
tgtgggacttaacaaagagt

SEQ ID NO: 1385 - DNA, 20 bp, Artificial Sequence
  Synthetic oligonucleotide; CAG chr11 5162199 5162218 5162215 +
gacttaacaaagagtgagta

SEQ ID NO: 1386 - DNA, 20 bp, Artificial Sequence
  Synthetic oligonucleotide; AAG chr11 5162205 5162224 5162221 +
acaaagagtgagtacagctg

SEQ ID NO: 1387 - DNA, 20 bp, Artificial Sequence
  Synthetic oligonucleotide; AGG chr11 5162206 5162225 5162222 +
caaagagtgagtacagctga

SEQ ID NO: 1388 - DNA, 20 bp, Artificial Sequence
  Synthetic oligonucleotide; GAG chr11 5162208 5162227 5162224 +
aagagtgagtacagctgaag

SEQ ID NO: 1389 - DNA, 20 bp, Artificial Sequence
  Synthetic oligonucleotide; CGG chr11 5162212 5162231 5162228 +
gtgagtacagctgaaggagc

SEQ ID NO: 1390 - DNA, 20 bp, Artificial Sequence
  Synthetic oligonucleotide; GGG chr11 5162213 5162232 5162229 +
tgagtacagctgaaggagcc

SEQ ID NO: 1391 - DNA, 20 bp, Artificial Sequence
  Synthetic oligonucleotide; GGG chr11 5162214 5162233 5162230 +
gagtacagctgaaggagccg

SEQ ID NO: 1392 - DNA, 20 bp, Artificial Sequence
  Synthetic oligonucleotide; CAG chr11 5162219 5162238 5162235 +
cagctgaaggagccggggat

SEQ ID NO: 1393 - DNA, 20 bp, Artificial Sequence
  Synthetic oligonucleotide; AAG chr11 5162223 5162242 5162239 +
tgaaggagccggggatcaga

SEQ ID NO: 1394 - DNA, 20 bp, Artificial Sequence
  Synthetic oligonucleotide; CAG chr11 5162235 5162254 5162251 +
ggatcagaaagtatatgcat

SEQ ID NO: 1395 - DNA, 20 bp, Artificial Sequence
  Synthetic oligonucleotide; AGG chr11 5162236 5162255 5162252 +
gatcagaaagtatatgcatc

SEQ ID NO: 1396 - DNA, 20 bp, Artificial Sequence
  Synthetic oligonucleotide; GAG chr11 5162242 5162261 5162258 +
aaagtatatgcatcaggtat

SEQ ID NO: 1397 - DNA, 20 bp, Artificial Sequence
  Synthetic oligonucleotide; AGG chr11 5162243 5162262 5162259 +
aagtatatgcatcaggtatg

SEQ ID NO: 1398 - DNA, 20 bp, Artificial Sequence
  Synthetic oligonucleotide; AAG chr11 5162246 5162265 5162262 +
tatatgcatcaggtatgagg

SEQ ID NO: 1399 - DNA, 20 bp, Artificial Sequence
  Synthetic oligonucleotide; TAG chr11 5162253 5162272 5162269 +
atcaggtatgaggaagaaaa

SEQ ID NO: 1400 - DNA, 20 bp, Artificial Sequence
  Synthetic oligonucleotide; TAG chr11 5162260 5162279 5162276 +
atgaggaagaaaatagattt

SEQ ID NO: 1401 - DNA, 20 bp, Artificial Sequence
  Synthetic oligonucleotide; AAG chr11 5162263 5162282 5162279 +
aggaagaaaatagattttag

SEQ ID NO: 1402 - DNA, 20 bp, Artificial Sequence
  Synthetic oligonucleotide; GAG chr11 5162270 5162289 5162286 +
aaatagattttagaagttat

SEQ ID NO: 1403 - DNA, 20 bp, Artificial Sequence
  Synthetic oligonucleotide; AAG chr11 5162280 5162299 5162296 +
tagaagttatgagaaatgtg

SEQ ID NO: 1404 - DNA, 20 bp, Artificial Sequence
  Synthetic oligonucleotide; GAG chr11 5162282 5162301 5162298 +
gaagttatgagaaatgtgaa

SEQ ID NO: 1405 - DNA, 20 bp, Artificial Sequence
  Synthetic oligonucleotide; GAG chr11 5162286 5162305 5162302 +
ttatgagaaatgtgaagagt

SEQ ID NO: 1406 - DNA, 20 bp, Artificial Sequence
  Synthetic oligonucleotide; AAG chr11 5162291 5162310 5162307 +
agaaatgtgaagagtgagct

SEQ ID NO: 1407 - DNA, 20 bp, Artificial Sequence
  Synthetic oligonucleotide; TAG chr11 5162296 5162315 5162312 +
tgtgaagagtgagctaagca

SEQ ID NO: 1408 - DNA, 20 bp, Artificial Sequence
  Synthetic oligonucleotide; TAG chr11 5162310 5162329 5162326 +
taagcatagtttgtgatttt

SEQ ID NO: 1409 - DNA, 20 bp, Artificial Sequence
  Synthetic oligonucleotide; AGG chr11 5162311 5162330 5162327 +
aagcatagtttgtgattttt

SEQ ID NO: 1410 - DNA, 20 bp, Artificial Sequence
  Synthetic oligonucleotide; GGG chr11 5162312 5162331 5162328 +
agcatagtttgtgattttta

SEQ ID NO: 1411 - DNA, 20 bp, Artificial Sequence
  Synthetic oligonucleotide; AAG chr11 5162322 5162341 5162338 +
gtgatttttagggcctctaa

SEQ ID NO: 1412 - DNA, 20 bp, Artificial Sequence
  Synthetic oligonucleotide; AAG chr11 5162330 5162349 5162346 +
tagggcctctaaaagtatta

SEQ ID NO: 1413 - DNA, 20 bp, Artificial Sequence
  Synthetic oligonucleotide; CAG chr11 5162333 5162352 5162349 +
ggcctctaaaagtattaaag

SEQ ID NO: 1414 - DNA, 20 bp, Artificial Sequence
  Synthetic oligonucleotide; CGG chr11 5162336 5162355 5162352 +
ctctaaaagtattaaagcag

SEQ ID NO: 1415 - DNA, 20 bp, Artificial Sequence
  Synthetic oligonucleotide; CAG chr11 5162339 5162358 5162355 +
taaaagtattaaagcagcgg

SEQ ID NO: 1416 - DNA, 20 bp, Artificial Sequence
  Synthetic oligonucleotide; CAG chr11 5162352 5162371 5162368 +
gcagcggcagccactgcatg

SEQ ID NO: 1417 - DNA, 20 bp, Artificial Sequence
  Synthetic oligonucleotide; GAG chr11 5162359 5162378 5162375 +
cagccactgcatgcagacct

SEQ ID NO: 1418 - DNA, 20 bp, Artificial Sequence
  Synthetic oligonucleotide; AGG chr11 5162360 5162379 5162376 +
agccactgcatgcagacctg

SEQ ID NO: 1419 - DNA, 20 bp, Artificial Sequence
  Synthetic oligonucleotide; GGG chr11 5162361 5162380 5162377 +
gccactgcatgcagacctga

SEQ ID NO: 1420 - DNA, 20 bp, Artificial Sequence
  Synthetic oligonucleotide; TAG chr11 5162365 5162384 5162381 +
ctgcatgcagacctgagggc

SEQ ID NO: 1421 - DNA, 20 bp, Artificial Sequence
  Synthetic oligonucleotide; AGG chr11 5162366 5162385 5162382 +
tgcatgcagacctgagggct

SEQ ID NO: 1422 - DNA, 20 bp, Artificial Sequence
  Synthetic oligonucleotide; CAG chr11 5162375 5162394 5162391 +
acctgagggctaggctaaaa

SEQ ID NO: 1423 - DNA, 20 bp, Artificial Sequence
  Synthetic oligonucleotide; AAG chr11 5162379 5162398 5162395 +
gagggctaggctaaaacagt

SEQ ID NO: 1424 - DNA, 20 bp, Artificial Sequence
  Synthetic oligonucleotide; AGG chr11 5162380 5162399 5162396 +
agggctaggctaaaacagta

SEQ ID NO: 1425 - DNA, 20 bp, Artificial Sequence
  Synthetic oligonucleotide; AAG chr11 5162385 5162404 5162401 +
taggctaaaacagtaaggtc

SEQ ID NO: 1426 - DNA, 20 bp, Artificial Sequence
  Synthetic oligonucleotide; TGG chr11 5162393 5162412 5162409 +
aacagtaaggtcaagttatt

SEQ ID NO: 1427 - DNA, 20 bp, Artificial Sequence
  Synthetic oligonucleotide; CAG chr11 5162397 5162416 5162413 +
gtaaggtcaagttatttgga

SEQ ID NO: 1428 - DNA, 20 bp, Artificial Sequence
  Synthetic oligonucleotide; AAG chr11 5162401 5162420 5162417 +
ggtcaagttatttggacaga

SEQ ID NO: 1429 - DNA, 20 bp, Artificial Sequence
  Synthetic oligonucleotide; AGG chr11 5162402 5162421 5162418 +
gtcaagttatttggacagaa

SEQ ID NO: 1430 - DNA, 20 bp, Artificial Sequence
  Synthetic oligonucleotide; CAG chr11 5162408 5162427 5162424 +
ttatttggacagaaaggcta

SEQ ID NO: 1431 - DNA, 20 bp, Artificial Sequence
  Synthetic oligonucleotide; AGG chr11 5162409 5162428 5162425 +
tatttggacagaaaggctac

SEQ ID NO: 1432 - DNA, 20 bp, Artificial Sequence
  Synthetic oligonucleotide; GGG chr11 5162410 5162429 5162426 +
atttggacagaaaggctaca

SEQ ID NO: 1433 - DNA, 20 bp, Artificial Sequence
  Synthetic oligonucleotide; CAG chr11 5162415 5162434 5162431 +
gacagaaaggctacagggtg

SEQ ID NO: 1434 - DNA, 20 bp, Artificial Sequence
  Synthetic oligonucleotide; TGG chr11 5162421 5162440 5162437 +
aaggctacagggtgcagtcc

SEQ ID NO: 1435 - DNA, 20 bp, Artificial Sequence
  Synthetic oligonucleotide; AAG chr11 5162433 5162452 5162449 +
tgcagtcctggatcttgtgt

SEQ ID NO: 1436 - DNA, 20 bp, Artificial Sequence
  Synthetic oligonucleotide; TAG chr11 5162460 5162479 5162476 +
ctgaccgcactaactatgcc

SEQ ID NO: 1437 - DNA, 20 bp, Artificial Sequence
  Synthetic oligonucleotide; AGG chr11 5162461 5162480 5162477 +
tgaccgcactaactatgcct

SEQ ID NO: 1438 - DNA, 20 bp, Artificial Sequence
  Synthetic oligonucleotide; AAG chr11 5162464 5162483 5162480 +
ccgcactaactatgcctagg

SEQ ID NO: 1439 - DNA, 20 bp, Artificial Sequence
  Synthetic oligonucleotide; AGG chr11 5162465 5162484 5162481 +
cgcactaactatgcctagga

SEQ ID NO: 1440 - DNA, 20 bp, Artificial Sequence
  Synthetic oligonucleotide; AAG chr11 5162469 5162488 5162485 +
ctaactatgcctaggaagga

SEQ ID NO: 1441 - DNA, 20 bp, Artificial Sequence
  Synthetic oligonucleotide; AGG chr11 5162470 5162489 5162486 +
taactatgcctaggaaggaa

SEQ ID NO: 1442 - DNA, 20 bp, Artificial Sequence
  Synthetic oligonucleotide; GAG chr11 5162472 5162491 5162488 +
actatgcctaggaaggaaag

SEQ ID NO: 1443 - DNA, 20 bp, Artificial Sequence
  Synthetic oligonucleotide; TAG chr11 5162486 5162505 5162502 +
ggaaaggagttgttgttttg

SEQ ID NO: 1444 - DNA, 20 bp, Artificial Sequence
  Synthetic oligonucleotide; AAG chr11 5162489 5162508 5162505 +
aaggagttgttgttttgtag

SEQ ID NO: 1445 - DNA, 20 bp, Artificial Sequence
  Synthetic oligonucleotide; AGG chr11 5162490 5162509 5162506 +
aggagttgttgttttgtaga

SEQ ID NO: 1446 - DNA, 20 bp, Artificial Sequence
  Synthetic oligonucleotide; GGG chr11 5162491 5162510 5162507 +
ggagttgttgttttgtagaa

SEQ ID NO: 1447 - DNA, 20 bp, Artificial Sequence
  Synthetic oligonucleotide; GAG chr11 5162497 5162516 5162513 +
gttgttttgtagaagggatt

SEQ ID NO: 1448 - DNA, 20 bp, Artificial Sequence
  Synthetic oligonucleotide; AGG chr11 5162498 5162517 5162514 +
ttgttttgtagaagggattg

SEQ ID NO: 1449 - DNA, 20 bp, Artificial Sequence
  Synthetic oligonucleotide; TGG chr11 5162503 5162522 5162519 +
ttgtagaagggattgaggtt

SEQ ID NO: 1450 - DNA, 20 bp, Artificial Sequence
  Synthetic oligonucleotide; GGG chr11 5162504 5162523 5162520 +
tgtagaagggattgaggttt

SEQ ID NO: 1451 - DNA, 20 bp, Artificial Sequence
  Synthetic oligonucleotide; GAG chr11 5162506 5162525 5162522 +
tagaagggattgaggtttgg

SEQ ID NO: 1452 - DNA, 20 bp, Artificial Sequence
  Synthetic oligonucleotide; CGG chr11 5162515 5162534 5162531 +
ttgaggtttgggagattaat

SEQ ID NO: 1453 - DNA, 20 bp, Artificial Sequence
  Synthetic oligonucleotide; CAG chr11 5162525 5162544 5162541 +
ggagattaatcggacacaat

SEQ ID NO: 1454 - DNA, 20 bp, Artificial Sequence
  Synthetic oligonucleotide; CAG chr11 5162528 5162547 5162544 +
gattaatcggacacaatcag

SEQ ID NO: 1455 - DNA, 20 bp, Artificial Sequence
  Synthetic oligonucleotide; AGG chr11 5162529 5162548 5162545 +
attaatcggacacaatcagc

SEQ ID NO: 1456 - DNA, 20 bp, Artificial Sequence
  Synthetic oligonucleotide; GGG chr11 5162530 5162549 5162546 +
ttaatcggacacaatcagca

SEQ ID NO: 1457 - DNA, 20 bp, Artificial Sequence
  Synthetic oligonucleotide; GAG chr11 5162532 5162551 5162548 +
aatcggacacaatcagcagg

SEQ ID NO: 1458 - DNA, 20 bp, Artificial Sequence
  Synthetic oligonucleotide; GAG chr11 5162534 5162553 5162550 +
tcggacacaatcagcaggga

SEQ ID NO: 1459 - DNA, 20 bp, Artificial Sequence
  Synthetic oligonucleotide; GAG chr11 5162552 5162571 5162568 +
gagagcacgtgtgtttttat

SEQ ID NO: 1460 - DNA, 20 bp, Artificial Sequence
  Synthetic oligonucleotide; GAG chr11 5162564 5162583 5162580 +
gtttttatgagaattatgcc

SEQ ID NO: 1461 - DNA, 20 bp, Artificial Sequence
  Synthetic oligonucleotide; TAG chr11 5162568 5162587 5162584 +
ttatgagaattatgccgaga

SEQ ID NO: 1462 - DNA, 20 bp, Artificial Sequence
  Synthetic oligonucleotide; AGG chr11 5162569 5162588 5162585 +
tatgagaattatgccgagat

SEQ ID NO: 1463 - DNA, 20 bp, Artificial Sequence
  Synthetic oligonucleotide; GAG chr11 5162580 5162599 5162596 +
tgccgagataggtaacacat

SEQ ID NO: 1464 - DNA, 20 bp, Artificial Sequence
  Synthetic oligonucleotide; AGG chr11 5162581 5162600 5162597 +
gccgagataggtaacacatg

SEQ ID NO: 1465 - DNA, 20 bp, Artificial Sequence
  Synthetic oligonucleotide; TGG chr11 5162592 5162611 5162608 +
taacacatgaggatgaaatt

SEQ ID NO: 1466 - DNA, 20 bp, Artificial Sequence
  Synthetic oligonucleotide; GGG chr11 5162593 5162612 5162609 +
aacacatgaggatgaaattt

SEQ ID NO: 1467 - DNA, 20 bp, Artificial Sequence
  Synthetic oligonucleotide; AAG chr11 5162604 5162623 5162620 +
atgaaatttgggcttgactg

SEQ ID NO: 1468 - DNA, 20 bp, Artificial Sequence
  Synthetic oligonucleotide; TGG chr11 5162610 5162629 5162626 +
tttgggcttgactgaagtaa

SEQ ID NO: 1469 - DNA, 20 bp, Artificial Sequence
  Synthetic oligonucleotide; GGG chr11 5162611 5162630 5162627 +
ttgggcttgactgaagtaat

SEQ ID NO: 1470 - DNA, 20 bp, Artificial Sequence
  Synthetic oligonucleotide; GGG chr11 5162612 5162631 5162628 +
tgggcttgactgaagtaatg

SEQ ID NO: 1471 - DNA, 20 bp, Artificial Sequence
  Synthetic oligonucleotide; AAG chr11 5162625 5162644 5162641 +
agtaatggggtctgtctgtg

SEQ ID NO: 1472 - DNA, 20 bp, Artificial Sequence
  Synthetic oligonucleotide; CAG chr11 5162633 5162652 5162649 +
ggtctgtctgtgaagccttg

SEQ ID NO: 1473 - DNA, 20 bp, Artificial Sequence
  Synthetic oligonucleotide; CAG chr11 5162636 5162655 5162652 +
ctgtctgtgaagccttgcag

SEQ ID NO: 1474 - DNA, 20 bp, Artificial Sequence
  Synthetic oligonucleotide; CAG chr11 5162641 5162660 5162657 +
tgtgaagccttgcagcagta

SEQ ID NO: 1475 - DNA, 20 bp, Artificial Sequence
  Synthetic oligonucleotide; CAG chr11 5162646 5162665 5162662 +
agccttgcagcagtacagcc

SEQ ID NO: 1476 - DNA, 20 bp, Artificial Sequence
  Synthetic oligonucleotide; AGG chr11 5162647 5162666 5162663 +
gccttgcagcagtacagccc

SEQ ID NO: 1477 - DNA, 20 bp, Artificial Sequence
  Synthetic oligonucleotide; GAG chr11 5162659 5162678 5162675 +
tacagcccaggtaatttgct

SEQ ID NO: 1478 - DNA, 20 bp, Artificial Sequence
  Synthetic oligonucleotide; TGG chr11 5162667 5162686 5162683 +
aggtaatttgctgagcctaa

SEQ ID NO: 1479 - DNA, 20 bp, Artificial Sequence
  Synthetic oligonucleotide; GGG chr11 5162668 5162687 5162684 +
ggtaatttgctgagcctaat

SEQ ID NO: 1480 - DNA, 20 bp, Artificial Sequence
  Synthetic oligonucleotide; CAG chr11 5162674 5162693 5162690 +
ttgctgagcctaatgggtgt

SEQ ID NO: 1481 - DNA, 20 bp, Artificial Sequence
  Synthetic oligonucleotide; CAG chr11 5162680 5162699 5162696 +
agcctaatgggtgtcagtgt

SEQ ID NO: 1482 - DNA, 20 bp, Artificial Sequence
  Synthetic oligonucleotide; AAG chr11 5162686 5162705 5162702 +
atgggtgtcagtgtcagtcc

SEQ ID NO: 1483 - DNA, 20 bp, Artificial Sequence
  Synthetic oligonucleotide; AAG chr11 5162692 5162711 5162708 +
gtcagtgtcagtccaagtga

SEQ ID NO: 1484 - DNA, 20 bp, Artificial Sequence
  Synthetic oligonucleotide; AAG chr11 5162697 5162716 5162713 +
tgtcagtccaagtgaaagcg

SEQ ID NO: 1485 - DNA, 20 bp, Artificial Sequence
  Synthetic oligonucleotide; GAG chr11 5162699 5162718 5162715 +
tcagtccaagtgaaagcgaa

SEQ ID NO: 1486 - DNA, 20 bp, Artificial Sequence
  Synthetic oligonucleotide; GAG chr11 5162701 5162720 5162717 +
agtccaagtgaaagcgaaga

SEQ ID NO: 1487 - DNA, 20 bp, Artificial Sequence
  Synthetic oligonucleotide; AGG chr11 5162702 5162721 5162718 +
gtccaagtgaaagcgaagag

SEQ ID NO: 1488 - DNA, 20 bp, Artificial Sequence
  Synthetic oligonucleotide; TGG chr11 5162706 5162725 5162722 +
aagtgaaagcgaagagaggc

SEQ ID NO: 1489 - DNA, 20 bp, Artificial Sequence
  Synthetic oligonucleotide; AAG chr11 5162713 5162732 5162729 +
agcgaagagaggctggaatg

SEQ ID NO: 1490 - DNA, 20 bp, Artificial Sequence
  Synthetic oligonucleotide; AGG chr11 5162714 5162733 5162730 +
gcgaagagaggctggaatga

SEQ ID NO: 1491 - DNA, 20 bp, Artificial Sequence
  Synthetic oligonucleotide; GGG chr11 5162715 5162734 5162731 +
cgaagagaggctggaatgaa

SEQ ID NO: 1492 - DNA, 20 bp, Artificial Sequence
  Synthetic oligonucleotide; AAG chr11 5162722 5162741 5162738 +
aggctggaatgaagggtgca

SEQ ID NO: 1493 - DNA, 20 bp, Artificial Sequence
  Synthetic oligonucleotide; AGG chr11 5162723 5162742 5162739 +
ggctggaatgaagggtgcaa

SEQ ID NO: 1494 - DNA, 20 bp, Artificial Sequence
  Synthetic oligonucleotide; TAG chr11 5162728 5162747 5162744 +
gaatgaagggtgcaaaggaa

SEQ ID NO: 1495 - DNA, 20 bp, Artificial Sequence
  Synthetic oligonucleotide; AAG chr11 5162733 5162752 5162749 +
aagggtgcaaaggaatagta

SEQ ID NO: 1496 - DNA, 20 bp, Artificial Sequence
  Synthetic oligonucleotide; AAG chr11 5162737 5162756 5162753 +
gtgcaaaggaatagtaaaga

SEQ ID NO: 1497 - DNA, 20 bp, Artificial Sequence
  Synthetic oligonucleotide; GAG chr11 5162747 5162766 5162763 +
atagtaaagaaagcatgttt

SEQ ID NO: 1498 - DNA, 20 bp, Artificial Sequence
  Synthetic oligonucleotide; CAG chr11 5162753 5162772 5162769 +
aagaaagcatgtttgagatc

SEQ ID NO: 1499 - DNA, 20 bp, Artificial Sequence
  Synthetic oligonucleotide; CAG chr11 5162758 5162777 5162774 +
agcatgtttgagatccagaa

SEQ ID NO: 1500 - DNA, 20 bp, Artificial Sequence
  Synthetic oligonucleotide; TGG chr11 5162766 5162785 5162782 +
tgagatccagaacagaataa

SEQ ID NO: 1501 - DNA, 20 bp, Artificial Sequence
  Synthetic oligonucleotide; GGG chr11 5162767 5162786 5162783 +
gagatccagaacagaataat

SEQ ID NO: 1502 - DNA, 20 bp, Artificial Sequence
  Synthetic oligonucleotide; TAG chr11 5162773 5162792 5162789 +
cagaacagaataatgggtta

SEQ ID NO: 1503 - DNA, 20 bp, Artificial Sequence
  Synthetic oligonucleotide; TGG chr11 5162777 5162796 5162793 +
acagaataatgggttataga

SEQ ID NO: 1504 - DNA, 20 bp, Artificial Sequence
  Synthetic oligonucleotide; GAG chr11 5162779 5162798 5162795 +
agaataatgggttatagatg

SEQ ID NO: 1505 - DNA, 20 bp, Artificial Sequence
  Synthetic oligonucleotide; AGG chr11 5162780 5162799 5162796 +
gaataatgggttatagatgg

SEQ ID NO: 1506 - DNA, 20 bp, Artificial Sequence
  Synthetic oligonucleotide; GAG chr11 5162787 5162806 5162803 +
gggttatagatggaggtatt

SEQ ID NO: 1507 - DNA, 20 bp, Artificial Sequence
  Synthetic oligonucleotide; AGG chr11 5162788 5162807 5162804 +
ggttatagatggaggtattg

SEQ ID NO: 1508 - DNA, 20 bp, Artificial Sequence
  Synthetic oligonucleotide; TAG chr11 5162792 5162811 5162808 +
atagatggaggtattgagga

SEQ ID NO: 1509 - DNA, 20 bp, Artificial Sequence
  Synthetic oligonucleotide; AGG chr11 5162793 5162812 5162809 +
tagatggaggtattgaggat

SEQ ID NO: 1510 - DNA, 20 bp, Artificial Sequence
  Synthetic oligonucleotide; GAG chr11 5162795 5162814 5162811 +
gatggaggtattgaggatag

SEQ ID NO: 1511 - DNA, 20 bp, Artificial Sequence
  Synthetic oligonucleotide; GAG chr11 5162797 5162816 5162813 +
tggaggtattgaggatagga

SEQ ID NO: 1512 - DNA, 20 bp, Artificial Sequence
  Synthetic oligonucleotide; TGG chr11 5162804 5162823 5162820 +
attgaggataggagagtata

SEQ ID NO: 1513 - DNA, 20 bp, Artificial Sequence
  Synthetic oligonucleotide; GGG chr11 5162805 5162824 5162821 +
ttgaggataggagagtatat

SEQ ID NO: 1514 - DNA, 20 bp, Artificial Sequence
  Synthetic oligonucleotide; TGG chr11 5162810 5162829 5162826 +
gataggagagtatatgggtt

SEQ ID NO: 1515 - DNA, 20 bp, Artificial Sequence
  Synthetic oligonucleotide; TGG chr11 5162818 5162837 5162834 +
agtatatgggtttggcacca

SEQ ID NO: 1516 - DNA, 20 bp, Artificial Sequence
  Synthetic oligonucleotide; GGG chr11 5162819 5162838 5162835 +
gtatatgggtttggcaccat

SEQ ID NO: 1517 - DNA, 20 bp, Artificial Sequence
  Synthetic oligonucleotide; GGG chr11 5162820 5162839 5162836 +
tatatgggtttggcaccatg

SEQ ID NO: 1518 - DNA, 20 bp, Artificial Sequence
  Synthetic oligonucleotide; TGG chr11 5162823 5162842 5162839 +
atgggtttggcaccatgggg

SEQ ID NO: 1519 - DNA, 20 bp, Artificial Sequence
  Synthetic oligonucleotide; TAG chr11 5162827 5162846 5162843 +
gtttggcaccatggggtgga

SEQ ID NO: 1520 - DNA, 20 bp, Artificial Sequence
  Synthetic oligonucleotide; AGG chr11 5162828 5162847 5162844 +
tttggcaccatggggtggat

SEQ ID NO: 1521 - DNA, 20 bp, Artificial Sequence
  Synthetic oligonucleotide; TGG chr11 5162841 5162860 5162857 +
ggtggataggcaaaacaatt

SEQ ID NO: 1522 - DNA, 20 bp, Artificial Sequence
  Synthetic oligonucleotide; AAG chr11 5162849 5162868 5162865 +
ggcaaaacaatttggttgat

SEQ ID NO: 1523 - DNA, 20 bp, Artificial Sequence
  Synthetic oligonucleotide; CAG chr11 5162855 5162874 5162871 +
acaatttggttgataagatg

SEQ ID NO: 1524 - DNA, 20 bp, Artificial Sequence
  Synthetic oligonucleotide; AAG chr11 5162875 5162894 5162891 +
cagattctgaactaacctgt

SEQ ID NO: 1525 - DNA, 20 bp, Artificial Sequence
  Synthetic oligonucleotide; AGG chr11 5162876 5162895 5162892 +
agattctgaactaacctgta

SEQ ID NO: 1526 - DNA, 20 bp, Artificial Sequence
  Synthetic oligonucleotide; TGG chr11 5162885 5162904 5162901 +
actaacctgtaaggcttgtc

SEQ ID NO: 1527 - DNA, 20 bp, Artificial Sequence
  Synthetic oligonucleotide; TAG chr11 5162891 5162910 5162907 +
ctgtaaggcttgtctggttt

SEQ ID NO: 1528 - DNA, 20 bp, Artificial Sequence
  Synthetic oligonucleotide; AGG chr11 5162892 5162911 5162908 +
tgtaaggcttgtctggtttt

SEQ ID NO: 1529 - DNA, 20 bp, Artificial Sequence
  Synthetic oligonucleotide; CAG chr11 5162896 5162915 5162912 +
aggcttgtctggttttagga

SEQ ID NO: 1530 - DNA, 20 bp, Artificial Sequence
  Synthetic oligonucleotide; AGG chr11 5162897 5162916 5162913 +
ggcttgtctggttttaggac

SEQ ID NO: 1531 - DNA, 20 bp, Artificial Sequence
  Synthetic oligonucleotide; TGG chr11 5162905 5162924 5162921 +
tggttttaggacaggtaaaa

SEQ ID NO: 1532 - DNA, 20 bp, Artificial Sequence
  Synthetic oligonucleotide; GGG chr11 5162906 5162925 5162922 +
ggttttaggacaggtaaaat

SEQ ID NO: 1533 - DNA, 20 bp, Artificial Sequence
  Synthetic oligonucleotide; GGG chr11 5162907 5162926 5162923 +
gttttaggacaggtaaaatg

SEQ ID NO: 1534 - DNA, 20 bp, Artificial Sequence
  Synthetic oligonucleotide; GGG chr11 5162908 5162927 5162924 +
ttttaggacaggtaaaatgg

SEQ ID NO: 1535 - DNA, 20 bp, Artificial Sequence
  Synthetic oligonucleotide; TGG chr11 5162913 5162932 5162929 +
ggacaggtaaaatgggggaa

SEQ ID NO: 1536 - DNA, 20 bp, Artificial Sequence
  Synthetic oligonucleotide; AAG chr11 5162917 5162936 5162933 +
aggtaaaatgggggaatggt

SEQ ID NO: 1537 - DNA, 20 bp, Artificial Sequence
  Synthetic oligonucleotide; AGG chr11 5162918 5162937 5162934 +
ggtaaaatgggggaatggta

SEQ ID NO: 1538 - DNA, 20 bp, Artificial Sequence
  Synthetic oligonucleotide; GAG chr11 5162920 5162939 5162936 +
taaaatgggggaatggtaag

SEQ ID NO: 1539 - DNA, 20 bp, Artificial Sequence
  Synthetic oligonucleotide; GAG chr11 5162922 5162941 5162938 +
aaatgggggaatggtaagga

SEQ ID NO: 1540 - DNA, 20 bp, Artificial Sequence
  Synthetic oligonucleotide; TAG chr11 5162929 5162948 5162945 +
ggaatggtaaggagagttta

SEQ ID NO: 1541 - DNA, 20 bp, Artificial Sequence
  Synthetic oligonucleotide; AGG chr11 5162930 5162949 5162946 +
gaatggtaaggagagtttat

SEQ ID NO: 1542 - DNA, 20 bp, Artificial Sequence
  Synthetic oligonucleotide; AAG chr11 5162939 5162958 5162955 +
ggagagtttataggctttaa

SEQ ID NO: 1543 - DNA, 20 bp, Artificial Sequence
  Synthetic oligonucleotide; AGG chr11 5162940 5162959 5162956 +
gagagtttataggctttaaa

SEQ ID NO: 1544 - DNA, 20 bp, Artificial Sequence
  Synthetic oligonucleotide; CAG chr11 5162954 5162973 5162970 +
tttaaaaggccatgctgtaa

SEQ ID NO: 1545 - DNA, 20 bp, Artificial Sequence
  Synthetic oligonucleotide; AGG chr11 5162955 5162974 5162971 +
ttaaaaggccatgctgtaac

SEQ ID NO: 1546 - DNA, 20 bp, Artificial Sequence
  Synthetic oligonucleotide; AAG chr11 5162959 5162978 5162975 +
aaggccatgctgtaacaggc

SEQ ID NO: 1547 - DNA, 20 bp, Artificial Sequence
  Synthetic oligonucleotide; CAG chr11 5162968 5162987 5162984 +
ctgtaacaggcaagtaataa

SEQ ID NO: 1548 - DNA, 20 bp, Artificial Sequence
  Synthetic oligonucleotide; AGG chr11 5162969 5162988 5162985 +
tgtaacaggcaagtaataac

SEQ ID NO: 1549 - DNA, 20 bp, Artificial Sequence
  Synthetic oligonucleotide; AAG chr11 5162986 5163005 5163002 +
aacaggctttaatcctttca

SEQ ID NO: 1550 - DNA, 20 bp, Artificial Sequence
  Synthetic oligonucleotide; TGG chr11 5162996 5163015 5163012 +
aatcctttcaaagcatgctg

SEQ ID NO: 1551 - DNA, 20 bp, Artificial Sequence
  Synthetic oligonucleotide; GGG chr11 5162997 5163016 5163013 +
atcctttcaaagcatgctgt

SEQ ID NO: 1552 - DNA, 20 bp, Artificial Sequence
  Synthetic oligonucleotide; TGG chr11 5163001 5163020 5163017 +
tttcaaagcatgctgtggga

SEQ ID NO: 1553 - DNA, 20 bp, Artificial Sequence
  Synthetic oligonucleotide; GGG chr11 5163002 5163021 5163018 +
ttcaaagcatgctgtgggat

SEQ ID NO: 1554 - DNA, 20 bp, Artificial Sequence
  Synthetic oligonucleotide; TGG chr11 5163009 5163028 5163025 +
catgctgtgggatgggatac

SEQ ID NO: 1555 - DNA, 20 bp, Artificial Sequence
  Synthetic oligonucleotide; GAG chr11 5163016 5163035 5163032 +
tgggatgggatactggcatt

SEQ ID NO: 1556 - DNA, 20 bp, Artificial Sequence
  Synthetic oligonucleotide; CGG chr11 5163019 5163038 5163035 +
gatgggatactggcattgag

SEQ ID NO: 1557 - DNA, 20 bp, Artificial Sequence
  Synthetic oligonucleotide; GGG chr11 5163020 5163039 5163036 +
atgggatactggcattgagc

SEQ ID NO: 1558 - DNA, 20 bp, Artificial Sequence
  Synthetic oligonucleotide; GGG chr11 5163021 5163040 5163037 +
tgggatactggcattgagcg

SEQ ID NO: 1559 - DNA, 20 bp, Artificial Sequence
  Synthetic oligonucleotide; AAG chr11 5163025 5163044 5163041 +
atactggcattgagcggggt

SEQ ID NO: 1560 - DNA, 20 bp, Artificial Sequence
  Synthetic oligonucleotide; GAG chr11 5163027 5163046 5163043 +
actggcattgagcggggtaa

SEQ ID NO: 1561 - DNA, 20 bp, Artificial Sequence
  Synthetic oligonucleotide; TAG chr11 5163034 5163053 5163050 +
ttgagcggggtaagagtgat

SEQ ID NO: 1562 - DNA, 20 bp, Artificial Sequence
  Synthetic oligonucleotide; AGG chr11 5163035 5163054 5163051 +
tgagcggggtaagagtgatt

SEQ ID NO: 1563 - DNA, 20 bp, Artificial Sequence
  Synthetic oligonucleotide; TGG chr11 5163044 5163063 5163060 +
taagagtgattaggttttaa

SEQ ID NO: 1564 - DNA, 20 bp, Artificial Sequence
  Synthetic oligonucleotide; GGG chr11 5163045 5163064 5163061 +
aagagtgattaggttttaat

SEQ ID NO: 1565 - DNA, 20 bp, Artificial Sequence
  Synthetic oligonucleotide; TGG chr11 5163049 5163068 5163065 +
gtgattaggttttaatggga

SEQ ID NO: 1566 - DNA, 20 bp, Artificial Sequence
  Synthetic oligonucleotide; AAG chr11 5163053 5163072 5163069 +
ttaggttttaatgggatggt

SEQ ID NO: 1567 - DNA, 20 bp, Artificial Sequence
  Synthetic oligonucleotide; AGG chr11 5163054 5163073 5163070 +
taggttttaatgggatggta

SEQ ID NO: 1568 - DNA, 20 bp, Artificial Sequence
  Synthetic oligonucleotide; GGG chr11 5163055 5163074 5163071 +
aggttttaatgggatggtaa

SEQ ID NO: 1569 - DNA, 20 bp, Artificial Sequence
  Synthetic oligonucleotide; GGG chr11 5163056 5163075 5163072 +
ggttttaatgggatggtaag

SEQ ID NO: 1570 - DNA, 20 bp, Artificial Sequence
  Synthetic oligonucleotide; CGG chr11 5163067 5163086 5163083 +
gatggtaaggggcgcatgat

SEQ ID NO: 1571 - DNA, 20 bp, Artificial Sequence
  Synthetic oligonucleotide; AAG chr11 5163075 5163094 5163091 +
ggggcgcatgatcggtcgcg

SEQ ID NO: 1572 - DNA, 20 bp, Artificial Sequence
  Synthetic oligonucleotide; AGG chr11 5163076 5163095 5163092 +
gggcgcatgatcggtcgcga

SEQ ID NO: 1573 - DNA, 20 bp, Artificial Sequence
  Synthetic oligonucleotide; GAG chr11 5163078 5163097 5163094 +
gcgcatgatcggtcgcgaag

SEQ ID NO: 1574 - DNA, 20 bp, Artificial Sequence
  Synthetic oligonucleotide; AGG chr11 5163079 5163098 5163095 +
cgcatgatcggtcgcgaagg

SEQ ID NO: 1575 - DNA, 20 bp, Artificial Sequence
  Synthetic oligonucleotide; AAG chr11 5163082 5163101 5163098 +
atgatcggtcgcgaaggagg

SEQ ID NO: 1576 - DNA, 20 bp, Artificial Sequence
  Synthetic oligonucleotide; TAG chr11 5163085 5163104 5163101 +
atcggtcgcgaaggaggaag

SEQ ID NO: 1577 - DNA, 20 bp, Artificial Sequence
  Synthetic oligonucleotide; GAG chr11 5163087 5163106 5163103 +
cggtcgcgaaggaggaagta

SEQ ID NO: 1578 - DNA, 20 bp, Artificial Sequence
  Synthetic oligonucleotide; AGG chr11 5163088 5163107 5163104 +
ggtcgcgaaggaggaagtag

SEQ ID NO: 1579 - DNA, 20 bp, Artificial Sequence
  Synthetic oligonucleotide; TGG chr11 5163104 5163123 5163120 +
gtagaggtgtcttatacttg

SEQ ID NO: 1580 - DNA, 20 bp, Artificial Sequence
  Synthetic oligonucleotide; AAG chr11 5163110 5163129 5163126 +
gtgtcttatacttgtggatt

SEQ ID NO: 1581 - DNA, 20 bp, Artificial Sequence
  Synthetic oligonucleotide; AGG chr11 5163111 5163130 5163127 +
tgtcttatacttgtggatta

SEQ ID NO: 1582 - DNA, 20 bp, Artificial Sequence
  Synthetic oligonucleotide; TGG chr11 5163114 5163133 5163130 +
cttatacttgtggattaagg

SEQ ID NO: 1583 - DNA, 20 bp, Artificial Sequence
  Synthetic oligonucleotide; GGG chr11 5163115 5163134 5163131 +
ttatacttgtggattaaggt

SEQ ID NO: 1584 - DNA, 20 bp, Artificial Sequence
  Synthetic oligonucleotide; GGG chr11 5163116 5163135 5163132 +
tatacttgtggattaaggtg

SEQ ID NO: 1585 - DNA, 20 bp, Artificial Sequence
  Synthetic oligonucleotide; GAG chr11 5163118 5163137 5163134 +
tacttgtggattaaggtggg

SEQ ID NO: 1586 - DNA, 20 bp, Artificial Sequence
  Synthetic oligonucleotide; AAG chr11 5163125 5163144 5163141 +
ggattaaggtggggagatac

SEQ ID NO: 1587 - DNA, 20 bp, Artificial Sequence
  Synthetic oligonucleotide; AGG chr11 5163126 5163145 5163142 +
gattaaggtggggagataca

SEQ ID NO: 1588 - DNA, 20 bp, Artificial Sequence
  Synthetic oligonucleotide; GGG chr11 5163127 5163146 5163143 +
attaaggtggggagatacaa

SEQ ID NO: 1589 - DNA, 20 bp, Artificial Sequence
  Synthetic oligonucleotide; GGG chr11 5163128 5163147 5163144 +
ttaaggtggggagatacaag

SEQ ID NO: 1590 - DNA, 20 bp, Artificial Sequence
  Synthetic oligonucleotide; GAG chr11 5163130 5163149 5163146 +
aaggtggggagatacaaggg

SEQ ID NO: 1591 - DNA, 20 bp, Artificial Sequence
  Synthetic oligonucleotide; AGG chr11 5163131 5163150 5163147 +
aggtggggagatacaagggg

SEQ ID NO: 1592 - DNA, 20 bp, Artificial Sequence
  Synthetic oligonucleotide; AAG chr11 5163139 5163158 5163155 +
agatacaaggggaggatgtg

SEQ ID NO: 1593 - DNA, 20 bp, Artificial Sequence
  Synthetic oligonucleotide; AGG chr11 5163140 5163159 5163156 +
gatacaaggggaggatgtga

SEQ ID NO: 1594 - DNA, 20 bp, Artificial Sequence
  Synthetic oligonucleotide; GAG chr11 5163142 5163161 5163158 +
tacaaggggaggatgtgaag

SEQ ID NO: 1595 - DNA, 20 bp, Artificial Sequence
  Synthetic oligonucleotide; AGG chr11 5163143 5163162 5163159 +
acaaggggaggatgtgaagg

SEQ ID NO: 1596 - DNA, 20 bp, Artificial Sequence
  Synthetic oligonucleotide; TGG chr11 5163154 5163173 5163170 +
atgtgaaggaggctttgaac

SEQ ID NO: 1597 - DNA, 20 bp, Artificial Sequence
  Synthetic oligonucleotide; GGG chr11 5163155 5163174 5163171 +
tgtgaaggaggctttgaact

SEQ ID NO: 1598 - DNA, 20 bp, Artificial Sequence
  Synthetic oligonucleotide; GGG chr11 5163156 5163175 5163172 +
gtgaaggaggctttgaactg

SEQ ID NO: 1599 - DNA, 20 bp, Artificial Sequence
  Synthetic oligonucleotide; GGG chr11 5163157 5163176 5163173 +
tgaaggaggctttgaactgg

SEQ ID NO: 1600 - DNA, 20 bp, Artificial Sequence
  Synthetic oligonucleotide; TGG chr11 5163166 5163185 5163182 +
ctttgaactgggggaaaaca

SEQ ID NO: 1601 - DNA, 20 bp, Artificial Sequence
  Synthetic oligonucleotide; GAG chr11 5163173 5163192 5163189 +
ctgggggaaaacatggcaat

SEQ ID NO: 1602 - DNA, 20 bp, Artificial Sequence
  Synthetic oligonucleotide; AGG chr11 5163174 5163193 5163190 +
tgggggaaaacatggcaatg

SEQ ID NO: 1603 - DNA, 20 bp, Artificial Sequence
  Synthetic oligonucleotide; TGG chr11 5163179 5163198 5163195 +
gaaaacatggcaatgaggta

SEQ ID NO: 1604 - DNA, 20 bp, Artificial Sequence
  Synthetic oligonucleotide; TAG chr11 5163185 5163204 5163201 +
atggcaatgaggtatggctg

SEQ ID NO: 1605 - DNA, 20 bp, Artificial Sequence
  Synthetic oligonucleotide; CAG chr11 5163190 5163209 5163206 +
aatgaggtatggctgtagcc

SEQ ID NO: 1606 - DNA, 20 bp, Artificial Sequence
  Synthetic oligonucleotide; AGG chr11 5163191 5163210 5163207 +
atgaggtatggctgtagccc

SEQ ID NO: 1607 - DNA, 20 bp, Artificial Sequence
  Synthetic oligonucleotide; TAG chr11 5163196 5163215 5163212 +
gtatggctgtagcccaggaa

SEQ ID NO: 1608 - DNA, 20 bp, Artificial Sequence
  Synthetic oligonucleotide; CAG chr11 5163200 5163219 5163216 +
ggctgtagcccaggaatagt

SEQ ID NO: 1609 - DNA, 20 bp, Artificial Sequence
  Synthetic oligonucleotide; AGG chr11 5163201 5163220 5163217 +
gctgtagcccaggaatagtc

SEQ ID NO: 1610 - DNA, 20 bp, Artificial Sequence
  Synthetic oligonucleotide; GGG chr11 5163202 5163221 5163218 +
ctgtagcccaggaatagtca

SEQ ID NO: 1611 - DNA, 20 bp, Artificial Sequence
  Synthetic oligonucleotide; AAG chr11 5163205 5163224 5163221 +
tagcccaggaatagtcaggg

SEQ ID NO: 1612 - DNA, 20 bp, Artificial Sequence
  Synthetic oligonucleotide; CAG chr11 5163208 5163227 5163224 +
cccaggaatagtcagggaag

SEQ ID NO: 1613 - DNA, 20 bp, Artificial Sequence
  Synthetic oligonucleotide; TAG chr11 5163217 5163236 5163233 +
agtcagggaagcagataatt

SEQ ID NO: 1614 - DNA, 20 bp, Artificial Sequence
  Synthetic oligonucleotide; AAG chr11 5163223 5163242 5163239 +
ggaagcagataatttagtta

SEQ ID NO: 1615 - DNA, 20 bp, Artificial Sequence
  Synthetic oligonucleotide; CGG chr11 5163231 5163250 5163247 +
ataatttagttaaagtgtct

SEQ ID NO: 1616 - DNA, 20 bp, Artificial Sequence
  Synthetic oligonucleotide; AAG chr11 5163240 5163259 5163256 +
ttaaagtgtctcggcctaat

SEQ ID NO: 1617 - DNA, 20 bp, Artificial Sequence
  Synthetic oligonucleotide; AGG chr11 5163241 5163260 5163257 +
taaagtgtctcggcctaata

SEQ ID NO: 1618 - DNA, 20 bp, Artificial Sequence
  Synthetic oligonucleotide; GGG chr11 5163242 5163261 5163258 +
aaagtgtctcggcctaataa

SEQ ID NO: 1619 - DNA, 20 bp, Artificial Sequence
  Synthetic oligonucleotide; TGG chr11 5163248 5163267 5163264 +
tctcggcctaataagggaac

SEQ ID NO: 1620 - DNA, 20 bp, Artificial Sequence
  Synthetic oligonucleotide; CAG chr11 5163251 5163270 5163267 +
cggcctaataagggaactgg

SEQ ID NO: 1621 - DNA, 20 bp, Artificial Sequence
  Synthetic oligonucleotide; AGG chr11 5163252 5163271 5163268 +
ggcctaataagggaactggc

SEQ ID NO: 1622 - DNA, 20 bp, Artificial Sequence
  Synthetic oligonucleotide; TGG chr11 5163255 5163274 5163271 +
ctaataagggaactggcagg

SEQ ID NO: 1623 - DNA, 20 bp, Artificial Sequence
  Synthetic oligonucleotide; GGG chr11 5163256 5163275 5163272 +
taataagggaactggcaggt

SEQ ID NO: 1624 - DNA, 20 bp, Artificial Sequence
  Synthetic oligonucleotide; GGG chr11 5163257 5163276 5163273 +
aataagggaactggcaggtg

SEQ ID NO: 1625 - DNA, 20 bp, Artificial Sequence
  Synthetic oligonucleotide; AAG chr11 5163269 5163288 5163285 +
ggcaggtggggataatgaaa

SEQ ID NO: 1626 - DNA, 20 bp, Artificial Sequence
  Synthetic oligonucleotide; AGG chr11 5163270 5163289 5163286 +
gcaggtggggataatgaaaa

SEQ ID NO: 1627 - DNA, 20 bp, Artificial Sequence
  Synthetic oligonucleotide; GAG chr11 5163272 5163291 5163288 +
aggtggggataatgaaaaag

SEQ ID NO: 1628 - DNA, 20 bp, Artificial Sequence
  Synthetic oligonucleotide; AAG chr11 5163282 5163301 5163298 +
aatgaaaaaggagtgcttaa

SEQ ID NO: 1629 - DNA, 20 bp, Artificial Sequence
  Synthetic oligonucleotide; GAG chr11 5163284 5163303 5163300 +
tgaaaaaggagtgcttaaaa

SEQ ID NO: 1630 - DNA, 20 bp, Artificial Sequence
  Synthetic oligonucleotide; CGG chr11 5163295 5163314 5163311 +
tgcttaaaagagtatcgtct

SEQ ID NO: 1631 - DNA, 20 bp, Artificial Sequence
  Synthetic oligonucleotide; TAG chr11 5163299 5163318 5163315 +
taaaagagtatcgtctcggt

SEQ ID NO: 1632 - DNA, 20 bp, Artificial Sequence
  Synthetic oligonucleotide; CAG chr11 5163305 5163324 5163321 +
agtatcgtctcggttagcac

SEQ ID NO: 1633 - DNA, 20 bp, Artificial Sequence
  Synthetic oligonucleotide; GAG chr11 5163307 5163326 5163323 +
tatcgtctcggttagcacca

SEQ ID NO: 1634 - DNA, 20 bp, Artificial Sequence
  Synthetic oligonucleotide; TGG chr11 5163311 5163330 5163327 +
gtctcggttagcaccagagt

SEQ ID NO: 1635 - DNA, 20 bp, Artificial Sequence
  Synthetic oligonucleotide; GGG chr11 5163312 5163331 5163328 +
tctcggttagcaccagagtt

SEQ ID NO: 1636 - DNA, 20 bp, Artificial Sequence
  Synthetic oligonucleotide; GGG chr11 5163313 5163332 5163329 +
ctcggttagcaccagagttg

SEQ ID NO: 1637 - DNA, 20 bp, Artificial Sequence
  Synthetic oligonucleotide; AAG chr11 5163322 5163341 5163338 +
caccagagttggggaatttt

SEQ ID NO: 1638 - DNA, 20 bp, Artificial Sequence
  Synthetic oligonucleotide; GAG chr11 5163324 5163343 5163340 +
ccagagttggggaattttaa

SEQ ID NO: 1639 - DNA, 20 bp, Artificial Sequence
  Synthetic oligonucleotide; AGG chr11 5163325 5163344 5163341 +
cagagttggggaattttaag

SEQ ID NO: 1640 - DNA, 20 bp, Artificial Sequence
  Synthetic oligonucleotide; TAG chr11 5163330 5163349 5163346 +
ttggggaattttaagaggtt

SEQ ID NO: 1641 - DNA, 20 bp, Artificial Sequence
  Synthetic oligonucleotide; AAG chr11 5163333 5163352 5163349 +
gggaattttaagaggtttag

SEQ ID NO: 1642 - DNA, 20 bp, Artificial Sequence
  Synthetic oligonucleotide; TGG chr11 5163338 5163357 5163354 +
ttttaagaggtttagaagcc

SEQ ID NO: 1643 - DNA, 20 bp, Artificial Sequence
  Synthetic oligonucleotide; CAG chr11 5163357 5163376 5163373 +
ctggccatcaatacctacaa

SEQ ID NO: 1644 - DNA, 20 bp, Artificial Sequence
  Synthetic oligonucleotide; TGG chr11 5163363 5163382 5163379 +
atcaatacctacaacagtta

SEQ ID NO: 1645 - DNA, 20 bp, Artificial Sequence
  Synthetic oligonucleotide; GAG chr11 5163365 5163384 5163381 +
caatacctacaacagttatg

SEQ ID NO: 1646 - DNA, 20 bp, Artificial Sequence
  Synthetic oligonucleotide; AGG chr11 5163366 5163385 5163382 +
aatacctacaacagttatgg

SEQ ID NO: 1647 - DNA, 20 bp, Artificial Sequence
  Synthetic oligonucleotide; AAG chr11 5163370 5163389 5163386 +
cctacaacagttatggaggc

SEQ ID NO: 1648 - DNA, 20 bp, Artificial Sequence
  Synthetic oligonucleotide; AGG chr11 5163371 5163390 5163387 +
ctacaacagttatggaggca

SEQ ID NO: 1649 - DNA, 20 bp, Artificial Sequence
  Synthetic oligonucleotide; GGG chr11 5163372 5163391 5163388 +
tacaacagttatggaggcaa

SEQ ID NO: 1650 - DNA, 20 bp, Artificial Sequence
  Synthetic oligonucleotide; CAG chr11 5163378 5163397 5163394 +
agttatggaggcaagggaaa

SEQ ID NO: 1651 - DNA, 20 bp, Artificial Sequence
  Synthetic oligonucleotide; AGG chr11 5163379 5163398 5163395 +
gttatggaggcaagggaaac

SEQ ID NO: 1652 - DNA, 20 bp, Artificial Sequence
  Synthetic oligonucleotide; AAG chr11 5163390 5163409 5163406 +
aagggaaacaggcctttgaa

SEQ ID NO: 1653 - DNA, 20 bp, Artificial Sequence
  Synthetic oligonucleotide; AAG chr11 5163393 5163412 5163409 +
ggaaacaggcctttgaaaag

SEQ ID NO: 1654 - DNA, 20 bp, Artificial Sequence
  Synthetic oligonucleotide; AGG chr11 5163394 5163413 5163410 +
gaaacaggcctttgaaaaga

SEQ ID NO: 1655 - DNA, 20 bp, Artificial Sequence
  Synthetic oligonucleotide; TGG chr11 5163402 5163421 5163418 +
cctttgaaaagaaggtaatg

SEQ ID NO: 1656 - DNA, 20 bp, Artificial Sequence
  Synthetic oligonucleotide; GAG chr11 5163404 5163423 5163420 +
tttgaaaagaaggtaatgtg

SEQ ID NO: 1657 - DNA, 20 bp, Artificial Sequence
  Synthetic oligonucleotide; TGG chr11 5163407 5163426 5163423 +
gaaaagaaggtaatgtggag

SEQ ID NO: 1658 - DNA, 20 bp, Artificial Sequence
  Synthetic oligonucleotide; GGG chr11 5163408 5163427 5163424 +
aaaagaaggtaatgtggagt

SEQ ID NO: 1659 - DNA, 20 bp, Artificial Sequence
  Synthetic oligonucleotide; TAG chr11 5163411 5163430 5163427 +
agaaggtaatgtggagtggg

SEQ ID NO: 1660 - DNA, 20 bp, Artificial Sequence
  Synthetic oligonucleotide; AAG chr11 5163428 5163447 5163444 +
gggtagcctccatactgatt

SEQ ID NO: 1661 - DNA, 20 bp, Artificial Sequence
  Synthetic oligonucleotide; AAG chr11 5163431 5163450 5163447 +
tagcctccatactgattaag

SEQ ID NO: 1662 - DNA, 20 bp, Artificial Sequence
  Synthetic oligonucleotide; AGG chr11 5163432 5163451 5163448 +
agcctccatactgattaaga

SEQ ID NO: 1663 - DNA, 20 bp, Artificial Sequence
  Synthetic oligonucleotide; GGG chr11 5163433 5163452 5163449 +
gcctccatactgattaagaa

SEQ ID NO: 1664 - DNA, 20 bp, Artificial Sequence
  Synthetic oligonucleotide; CAG chr11 5163438 5163457 5163454 +
catactgattaagaagggta

SEQ ID NO: 1665 - DNA, 20 bp, Artificial Sequence
  Synthetic oligonucleotide; GAG chr11 5163457 5163476 5163473 +
acagacttaccctccactgt

SEQ ID NO: 1666 - DNA, 20 bp, Artificial Sequence
  Synthetic oligonucleotide; AAG chr11 5163469 5163488 5163485 +
tccactgtgagaattaccta

SEQ ID NO: 1667 - DNA, 20 bp, Artificial Sequence
  Synthetic oligonucleotide; CGG chr11 5163474 5163493 5163490 +
tgtgagaattacctaaagct

SEQ ID NO: 1668 - DNA, 20 bp, Artificial Sequence
  Synthetic oligonucleotide; TGG chr11 5163486 5163505 5163502 +
ctaaagctcggtgtctgtga

SEQ ID NO: 1669 - DNA, 20 bp, Artificial Sequence
  Synthetic oligonucleotide; CAG chr11 5163493 5163512 5163509 +
tcggtgtctgtgatggtcta

SEQ ID NO: 1670 - DNA, 20 bp, Artificial Sequence
  Synthetic oligonucleotide; AGG chr11 5163494 5163513 5163510 +
cggtgtctgtgatggtctac

SEQ ID NO: 1671 - DNA, 20 bp, Artificial Sequence
  Synthetic oligonucleotide; GGG chr11 5163495 5163514 5163511 +
ggtgtctgtgatggtctaca

SEQ ID NO: 1672 - DNA, 20 bp, Artificial Sequence
  Synthetic oligonucleotide; GAG chr11 5163503 5163522 5163519 +
tgatggtctacagggcttcc

SEQ ID NO: 1673 - DNA, 20 bp, Artificial Sequence
  Synthetic oligonucleotide; AGG chr11 5163504 5163523 5163520 +
gatggtctacagggcttccg

SEQ ID NO: 1674 - DNA, 20 bp, Artificial Sequence
  Synthetic oligonucleotide; CAG chr11 5163511 5163530 5163527 +
tacagggcttccgaggcgat

SEQ ID NO: 1675 - DNA, 20 bp, Artificial Sequence
  Synthetic oligonucleotide; AGG chr11 5163512 5163531 5163528 +
acagggcttccgaggcgatc

SEQ ID NO: 1676 - DNA, 20 bp, Artificial Sequence
  Synthetic oligonucleotide; CAG chr11 5163515 5163534 5163531 +
gggcttccgaggcgatcagg

SEQ ID NO: 1677 - DNA, 20 bp, Artificial Sequence
  Synthetic oligonucleotide; TGG chr11 5163518 5163537 5163534 +
cttccgaggcgatcaggcag

SEQ ID NO: 1678 - DNA, 20 bp, Artificial Sequence
  Synthetic oligonucleotide; CAG chr11 5163521 5163540 5163537 +
ccgaggcgatcaggcagtgg

SEQ ID NO: 1679 - DNA, 20 bp, Artificial Sequence
  Synthetic oligonucleotide; CAG chr11 5163528 5163547 5163544 +
gatcaggcagtggcagtctt

SEQ ID NO: 1680 - DNA, 20 bp, Artificial Sequence
  Synthetic oligonucleotide; AAG chr11 5163536 5163555 5163552 +
agtggcagtcttcagctgca

SEQ ID NO: 1681 - DNA, 20 bp, Artificial Sequence
  Synthetic oligonucleotide; GAG chr11 5163541 5163560 5163557 +
cagtcttcagctgcaaagcc

SEQ ID NO: 1682 - DNA, 20 bp, Artificial Sequence
  Synthetic oligonucleotide; AAG chr11 5163544 5163563 5163560 +
tcttcagctgcaaagccgag

SEQ ID NO: 1683 - DNA, 20 bp, Artificial Sequence
  Synthetic oligonucleotide; TGG chr11 5163550 5163569 5163566 +
gctgcaaagccgagaagatc

SEQ ID NO: 1684 - DNA, 20 bp, Artificial Sequence
  Synthetic oligonucleotide; GGG chr11 5163551 5163570 5163567 +
ctgcaaagccgagaagatct

SEQ ID NO: 1685 - DNA, 20 bp, Artificial Sequence
  Synthetic oligonucleotide; AAG chr11 5163554 5163573 5163570 +
caaagccgagaagatctggg

SEQ ID NO: 1686 - DNA, 20 bp, Artificial Sequence
  Synthetic oligonucleotide; AGG chr11 5163555 5163574 5163571 +
aaagccgagaagatctggga

SEQ ID NO: 1687 - DNA, 20 bp, Artificial Sequence
  Synthetic oligonucleotide; GAG chr11 5163557 5163576 5163573 +
agccgagaagatctgggaag

SEQ ID NO: 1688 - DNA, 20 bp, Artificial Sequence
  Synthetic oligonucleotide; CAG chr11 5163561 5163580 5163577 +
gagaagatctgggaaggagt

SEQ ID NO: 1689 - DNA, 20 bp, Artificial Sequence
  Synthetic oligonucleotide; CAG chr11 5163565 5163584 5163581 +
agatctgggaaggagtcagt

SEQ ID NO: 1690 - DNA, 20 bp, Artificial Sequence
  Synthetic oligonucleotide; AGG chr11 5163566 5163585 5163582 +
gatctgggaaggagtcagtc

SEQ ID NO: 1691 - DNA, 20 bp, Artificial Sequence
  Synthetic oligonucleotide; GGG chr11 5163567 5163586 5163583 +
atctgggaaggagtcagtca

SEQ ID NO: 1692 - DNA, 20 bp, Artificial Sequence
  Synthetic oligonucleotide; GAG chr11 5163569 5163588 5163585 +
ctgggaaggagtcagtcagg

SEQ ID NO: 1693 - DNA, 20 bp, Artificial Sequence
  Synthetic oligonucleotide; TGG chr11 5163575 5163594 5163591 +
aggagtcagtcagggagcct

SEQ ID NO: 1694 - DNA, 20 bp, Artificial Sequence
  Synthetic oligonucleotide; GGG chr11 5163576 5163595 5163592 +
ggagtcagtcagggagcctt

SEQ ID NO: 1695 - DNA, 20 bp, Artificial Sequence
  Synthetic oligonucleotide; CAG chr11 5163580 5163599 5163596 +
tcagtcagggagccttgggc

SEQ ID NO: 1696 - DNA, 20 bp, Artificial Sequence
  Synthetic oligonucleotide; GAG chr11 5163582 5163601 5163598 +
agtcagggagccttgggcca

SEQ ID NO: 1697 - DNA, 20 bp, Artificial Sequence
  Synthetic oligonucleotide; CAG chr11 5163588 5163607 5163604 +
ggagccttgggccagagttc

SEQ ID NO: 1698 - DNA, 20 bp, Artificial Sequence
  Synthetic oligonucleotide; AGG chr11 5163589 5163608 5163605 +
gagccttgggccagagttcc

SEQ ID NO: 1699 - DNA, 20 bp, Artificial Sequence
  Synthetic oligonucleotide; GGG chr11 5163590 5163609 5163606 +
agccttgggccagagttcca

SEQ ID NO: 1700 - DNA, 20 bp, Artificial Sequence
  Synthetic oligonucleotide; GGG chr11 5163591 5163610 5163607 +
gccttgggccagagttccag

SEQ ID NO: 1701 - DNA, 20 bp, Artificial Sequence
  Synthetic oligonucleotide; TAG chr11 5163597 5163616 5163613 +
ggccagagttccaggggctc

SEQ ID NO: 1702 - DNA, 20 bp, Artificial Sequence
  Synthetic oligonucleotide; AGG chr11 5163598 5163617 5163614 +
gccagagttccaggggctct

SEQ ID NO: 1703 - DNA, 20 bp, Artificial Sequence
  Synthetic oligonucleotide; GAG chr11 5163600 5163619 5163616 +
cagagttccaggggctctag

SEQ ID NO: 1704 - DNA, 20 bp, Artificial Sequence
  Synthetic oligonucleotide; TGG chr11 5163603 5163622 5163619 +
agttccaggggctctaggag

SEQ ID NO: 1705 - DNA, 20 bp, Artificial Sequence
  Synthetic oligonucleotide; CAG chr11 5163610 5163629 5163626 +
ggggctctaggagtggctgc

SEQ ID NO: 1706 - DNA, 20 bp, Artificial Sequence
  Synthetic oligonucleotide; AGG chr11 5163611 5163630 5163627 +
gggctctaggagtggctgcc

SEQ ID NO: 1707 - DNA, 20 bp, Artificial Sequence
  Synthetic oligonucleotide; GAG chr11 5163615 5163634 5163631 +
tctaggagtggctgccaggt

SEQ ID NO: 1708 - DNA, 20 bp, Artificial Sequence
  Synthetic oligonucleotide; CAG chr11 5163623 5163642 5163639 +
tggctgccaggtgagttgaa

SEQ ID NO: 1709 - DNA, 20 bp, Artificial Sequence
  Synthetic oligonucleotide; TAG chr11 5163635 5163654 5163651 +
gagttgaacagtccgatttc

SEQ ID NO: 1710 - DNA, 20 bp, Artificial Sequence
  Synthetic oligonucleotide; TGG chr11 5163638 5163657 5163654 +
ttgaacagtccgatttctag

SEQ ID NO: 1711 - DNA, 20 bp, Artificial Sequence
  Synthetic oligonucleotide; GGG chr11 5163639 5163658 5163655 +
tgaacagtccgatttctagt

SEQ ID NO: 1712 - DNA, 20 bp, Artificial Sequence
  Synthetic oligonucleotide; GGG chr11 5163640 5163659 5163656 +
gaacagtccgatttctagtg

SEQ ID NO: 1713 - DNA, 20 bp, Artificial Sequence
  Synthetic oligonucleotide; CAG chr11 5163650 5163669 5163666 +
atttctagtggggtcctgca

SEQ ID NO: 1714 - DNA, 20 bp, Artificial Sequence
  Synthetic oligonucleotide; TGG chr11 5163654 5163673 5163670 +
ctagtggggtcctgcacaga

SEQ ID NO: 1715 - DNA, 20 bp, Artificial Sequence
  Synthetic oligonucleotide; GGG chr11 5163655 5163674 5163671 +
tagtggggtcctgcacagat

SEQ ID NO: 1716 - DNA, 20 bp, Artificial Sequence
  Synthetic oligonucleotide; CGG chr11 5163661 5163680 5163677 +
ggtcctgcacagatgggaca

SEQ ID NO: 1717 - DNA, 20 bp, Artificial Sequence
  Synthetic oligonucleotide; TAG chr11 5163666 5163685 5163682 +
tgcacagatgggacacggct

SEQ ID NO: 1718 - DNA, 20 bp, Artificial Sequence
  Synthetic oligonucleotide; AGG chr11 5163667 5163686 5163683 +
gcacagatgggacacggctt

SEQ ID NO: 1719 - DNA, 20 bp, Artificial Sequence
  Synthetic oligonucleotide; GAG chr11 5163669 5163688 5163685 +
acagatgggacacggcttag

SEQ ID NO: 1720 - DNA, 20 bp, Artificial Sequence
  Synthetic oligonucleotide; AGG chr11 5163670 5163689 5163686 +
cagatgggacacggcttagg

SEQ ID NO: 1721 - DNA, 20 bp, Artificial Sequence
  Synthetic oligonucleotide; TGG chr11 5163678 5163697 5163694 +
acacggcttaggaggaatcc

SEQ ID NO: 1722 - DNA, 20 bp, Artificial Sequence
  Synthetic oligonucleotide; GGG chr11 5163679 5163698 5163695 +
cacggcttaggaggaatcct

SEQ ID NO: 1723 - DNA, 20 bp, Artificial Sequence
  Synthetic oligonucleotide; CGG chr11 5163685 5163704 5163701 +
ttaggaggaatcctgggctg

SEQ ID NO: 1724 - DNA, 20 bp, Artificial Sequence
  Synthetic oligonucleotide; GGG chr11 5163686 5163705 5163702 +
taggaggaatcctgggctgc

SEQ ID NO: 1725 - DNA, 20 bp, Artificial Sequence
  Synthetic oligonucleotide; TGG chr11 5163696 5163715 5163712 +
cctgggctgcgggcattcct

SEQ ID NO: 1726 - DNA, 20 bp, Artificial Sequence
  Synthetic oligonucleotide; TGG chr11 5163701 5163720 5163717 +
gctgcgggcattccttggcc

SEQ ID NO: 1727 - DNA, 20 bp, Artificial Sequence
  Synthetic oligonucleotide; TGG chr11 5163704 5163723 5163720 +
gcgggcattccttggcctgg

SEQ ID NO: 1728 - DNA, 20 bp, Artificial Sequence
  Synthetic oligonucleotide; CAG chr11 5163708 5163727 5163724 +
gcattccttggcctggtggc

SEQ ID NO: 1729 - DNA, 20 bp, Artificial Sequence
  Synthetic oligonucleotide; TGG chr11 5163716 5163735 5163732 +
tggcctggtggccagatttc

SEQ ID NO: 1730 - DNA, 20 bp, Artificial Sequence
  Synthetic oligonucleotide; TAG chr11 5163725 5163744 5163741 +
ggccagatttctggcacttg

SEQ ID NO: 1731 - DNA, 20 bp, Artificial Sequence
  Synthetic oligonucleotide; AAG chr11 5163729 5163748 5163745 +
agatttctggcacttgtagc

SEQ ID NO: 1732 - DNA, 20 bp, Artificial Sequence
  Synthetic oligonucleotide; TGG chr11 5163736 5163755 5163752 +
tggcacttgtagcaagctcc

SEQ ID NO: 1733 - DNA, 20 bp, Artificial Sequence
  Synthetic oligonucleotide; GGG chr11 5163737 5163756 5163753 +
ggcacttgtagcaagctcct

SEQ ID NO: 1734 - DNA, 20 bp, Artificial Sequence
  Synthetic oligonucleotide; GGG chr11 5163738 5163757 5163754 +
gcacttgtagcaagctcctg

SEQ ID NO: 1735 - DNA, 20 bp, Artificial Sequence
  Synthetic oligonucleotide; GGG chr11 5163739 5163758 5163755 +
cacttgtagcaagctcctgg

SEQ ID NO: 1736 - DNA, 20 bp, Artificial Sequence
  Synthetic oligonucleotide; GAG chr11 5163741 5163760 5163757 +
cttgtagcaagctcctgggg

SEQ ID NO: 1737 - DNA, 20 bp, Artificial Sequence
  Synthetic oligonucleotide; AGG chr11 5163742 5163761 5163758 +
ttgtagcaagctcctggggg

SEQ ID NO: 1738 - DNA, 20 bp, Artificial Sequence
  Synthetic oligonucleotide; TGG chr11 5163745 5163764 5163761 +
tagcaagctcctgggggagg

SEQ ID NO: 1739 - DNA, 20 bp, Artificial Sequence
  Synthetic oligonucleotide; CGG chr11 5163751 5163770 5163767 +
gctcctgggggaggtggttc

SEQ ID NO: 1740 - DNA, 20 bp, Artificial Sequence
  Synthetic oligonucleotide; GAG chr11 5163753 5163772 5163769 +
tcctgggggaggtggttccg

SEQ ID NO: 1741 - DNA, 20 bp, Artificial Sequence
  Synthetic oligonucleotide; AGG chr11 5163754 5163773 5163770 +
cctgggggaggtggttccgg

SEQ ID NO: 1742 - DNA, 20 bp, Artificial Sequence
  Synthetic oligonucleotide; TGG chr11 5163763 5163782 5163779 +
ggtggttccggaggaacgcc

SEQ ID NO: 1743 - DNA, 20 bp, Artificial Sequence
  Synthetic oligonucleotide; CGG chr11 5163772 5163791 5163788 +
ggaggaacgcctggccactg

SEQ ID NO: 1744 - DNA, 20 bp, Artificial Sequence
  Synthetic oligonucleotide; TAG chr11 5163777 5163796 5163793 +
aacgcctggccactgcggtt

SEQ ID NO: 1745 - DNA, 20 bp, Artificial Sequence
  Synthetic oligonucleotide; AGG chr11 5163778 5163797 5163794 +
acgcctggccactgcggttt

SEQ ID NO: 1746 - DNA, 20 bp, Artificial Sequence
  Synthetic oligonucleotide; TGG chr11 5163785 5163804 5163801 +
gccactgcggtttaggcatt

SEQ ID NO: 1747 - DNA, 20 bp, Artificial Sequence
  Synthetic oligonucleotide; AAG chr11 5163788 5163807 5163804 +
actgcggtttaggcatttgg

SEQ ID NO: 1748 - DNA, 20 bp, Artificial Sequence
  Synthetic oligonucleotide; TGG chr11 5163802 5163821 5163818 +
atttggaagttcttgtgtgc

SEQ ID NO: 1749 - DNA, 20 bp, Artificial Sequence
  Synthetic oligonucleotide; GAG chr11 5163804 5163823 5163820 +
ttggaagttcttgtgtgctg

SEQ ID NO: 1750 - DNA, 20 bp, Artificial Sequence
  Synthetic oligonucleotide; TGG chr11 5163810 5163829 5163826 +
gttcttgtgtgctggagatg

SEQ ID NO: 1751 - DNA, 20 bp, Artificial Sequence
  Synthetic oligonucleotide; TGG chr11 5163814 5163833 5163830 +
ttgtgtgctggagatgtggc

SEQ ID NO: 1752 - DNA, 20 bp, Artificial Sequence
  Synthetic oligonucleotide; GGG chr11 5163815 5163834 5163831 +
tgtgtgctggagatgtggct

SEQ ID NO: 1753 - DNA, 20 bp, Artificial Sequence
  Synthetic oligonucleotide; GGG chr11 5163816 5163835 5163832 +
gtgtgctggagatgtggctg

SEQ ID NO: 1754 - DNA, 20 bp, Artificial Sequence
  Synthetic oligonucleotide; CAG chr11 5163828 5163847 5163844 +
tgtggctggggtttgtctca

SEQ ID NO: 1755 - DNA, 20 bp, Artificial Sequence
  Synthetic oligonucleotide; TGG chr11 5163831 5163850 5163847 +
ggctggggtttgtctcacag

SEQ ID NO: 1756 - DNA, 20 bp, Artificial Sequence
  Synthetic oligonucleotide; GAG chr11 5163833 5163852 5163849 +
ctggggtttgtctcacagtg

SEQ ID NO: 1757 - DNA, 20 bp, Artificial Sequence
  Synthetic oligonucleotide; AGG chr11 5163834 5163853 5163850 +
tggggtttgtctcacagtgg

SEQ ID NO: 1758 - DNA, 20 bp, Artificial Sequence
  Synthetic oligonucleotide; AAG chr11 5163838 5163857 5163854 +
gtttgtctcacagtggaggc

SEQ ID NO: 1759 - DNA, 20 bp, Artificial Sequence
  Synthetic oligonucleotide; AGG chr11 5163839 5163858 5163855 +
tttgtctcacagtggaggca

SEQ ID NO: 1760 - DNA, 20 bp, Artificial Sequence
  Synthetic oligonucleotide; TGG chr11 5163870 5163889 5163886 +
ctcaaaaatatgttgctact

SEQ ID NO: 1761 - DNA, 20 bp, Artificial Sequence
  Synthetic oligonucleotide; AAG chr11 5163902 5163921 5163918 +
ctctattattgtacaccttg

SEQ ID NO: 1762 - DNA, 20 bp, Artificial Sequence
  Synthetic oligonucleotide; AGG chr11 5163903 5163922 5163919 +
tctattattgtacaccttga

SEQ ID NO: 1763 - DNA, 20 bp, Artificial Sequence
  Synthetic oligonucleotide; GAG chr11 5163907 5163926 5163923 +
ttattgtacaccttgaaggt

SEQ ID NO: 1764 - DNA, 20 bp, Artificial Sequence
  Synthetic oligonucleotide; AGG chr11 5163908 5163927 5163924 +
tattgtacaccttgaaggtg

SEQ ID NO: 1765 - DNA, 20 bp, Artificial Sequence
  Synthetic oligonucleotide; GAG chr11 5163917 5163936 5163933 +
ccttgaaggtgaggttaatt

SEQ ID NO: 1766 - DNA, 20 bp, Artificial Sequence
  Synthetic oligonucleotide; TGG chr11 5163928 5163947 5163944 +
aggttaattgagtcctgttg

SEQ ID NO: 1767 - DNA, 20 bp, Artificial Sequence
  Synthetic oligonucleotide; GGG chr11 5163929 5163948 5163945 +
ggttaattgagtcctgttgt

SEQ ID NO: 1768 - DNA, 20 bp, Artificial Sequence
  Synthetic oligonucleotide; GGG chr11 5163930 5163949 5163946 +
gttaattgagtcctgttgtg

SEQ ID NO: 1769 - DNA, 20 bp, Artificial Sequence
  Synthetic oligonucleotide; GAG chr11 5163936 5163955 5163952 +
tgagtcctgttgtggggttt

SEQ ID NO: 1770 - DNA, 20 bp, Artificial Sequence
  Synthetic oligonucleotide; AGG chr11 5163937 5163956 5163953 +
gagtcctgttgtggggtttg

SEQ ID NO: 1771 - DNA, 20 bp, Artificial Sequence
  Synthetic oligonucleotide; CAG chr11 5163942 5163961 5163958 +
ctgttgtggggtttgaggtc

SEQ ID NO: 1772 - DNA, 20 bp, Artificial Sequence
  Synthetic oligonucleotide; TGG chr11 5163956 5163975 5163972 +
gaggtccagaatttaatttt

SEQ ID NO: 1773 - DNA, 20 bp, Artificial Sequence
  Synthetic oligonucleotide; GAG chr11 5163958 5163977 5163974 +
ggtccagaatttaatttttg

SEQ ID NO: 1774 - DNA, 20 bp, Artificial Sequence
  Synthetic oligonucleotide; CAG chr11 5163974 5163993 5163990 +
tttggagttttatttaatgt

SEQ ID NO: 1775 - DNA, 20 bp, Artificial Sequence
  Synthetic oligonucleotide; AGG chr11 5163975 5163994 5163991 +
ttggagttttatttaatgtc

SEQ ID NO: 1776 - DNA, 20 bp, Artificial Sequence
  Synthetic oligonucleotide; GAG chr11 5163977 5163996 5163993 +
ggagttttatttaatgtcag

SEQ ID NO: 1777 - DNA, 20 bp, Artificial Sequence
  Synthetic oligonucleotide; CAG chr11 5163980 5163999 5163996 +
gttttatttaatgtcaggag

SEQ ID NO: 1778 - DNA, 20 bp, Artificial Sequence
  Synthetic oligonucleotide; TGG chr11 5163985 5164004 5164001 +
atttaatgtcaggagcagat

SEQ ID NO: 1779 - DNA, 20 bp, Artificial Sequence
  Synthetic oligonucleotide; GGG chr11 5163986 5164005 5164002 +
tttaatgtcaggagcagatt

SEQ ID NO: 1780 - DNA, 20 bp, Artificial Sequence
  Synthetic oligonucleotide; GAG chr11 5164005 5164024 5164021 +
tgggtaataaaatgtatatt

SEQ ID NO: 1781 - DNA, 20 bp, Artificial Sequence
  Synthetic oligonucleotide; AAG chr11 5164012 5164031 5164028 +
taaaatgtatattgagaata

SEQ ID NO: 1782 - DNA, 20 bp, Artificial Sequence
  Synthetic oligonucleotide; TGG chr11 5164015 5164034 5164031 +
aatgtatattgagaataaag

SEQ ID NO: 1783 - DNA, 20 bp, Artificial Sequence
  Synthetic oligonucleotide; TAG chr11 5164031 5164050 5164047 +
aaagtggccttttgtccttt

SEQ ID NO: 1784 - DNA, 20 bp, Artificial Sequence
  Synthetic oligonucleotide; AGG chr11 5164032 5164051 5164048 +
aagtggccttttgtcctttt

SEQ ID NO: 1785 - DNA, 20 bp, Artificial Sequence
  Synthetic oligonucleotide; GGG chr11 5164033 5164052 5164049 +
agtggccttttgtcctttta

SEQ ID NO: 1786 - DNA, 20 bp, Artificial Sequence
  Synthetic oligonucleotide; TAG chr11 5164038 5164057 5164054 +
ccttttgtccttttagggtc

SEQ ID NO: 1787 - DNA, 20 bp, Artificial Sequence
  Synthetic oligonucleotide; AGG chr11 5164039 5164058 5164055 +
cttttgtccttttagggtct

SEQ ID NO: 1788 - DNA, 20 bp, Artificial Sequence
  Synthetic oligonucleotide; GGG chr11 5164040 5164059 5164056 +
ttttgtccttttagggtcta

SEQ ID NO: 1789 - DNA, 20 bp, Artificial Sequence
  Synthetic oligonucleotide; AAG chr11 5164048 5164067 5164064 +
ttttagggtctagggctgta

SEQ ID NO: 1790 - DNA, 20 bp, Artificial Sequence
  Synthetic oligonucleotide; CAG chr11 5164056 5164075 5164072 +
tctagggctgtaaagcgtct

SEQ ID NO: 1791 - DNA, 20 bp, Artificial Sequence
  Synthetic oligonucleotide; AGG chr11 5164057 5164076 5164073 +
ctagggctgtaaagcgtctc

SEQ ID NO: 1792 - DNA, 20 bp, Artificial Sequence
  Synthetic oligonucleotide; GGG chr11 5164058 5164077 5164074 +
tagggctgtaaagcgtctca

SEQ ID NO: 1793 - DNA, 20 bp, Artificial Sequence
  Synthetic oligonucleotide; GAG chr11 5164073 5164092 5164089 +
tctcagggttgctgccgaac

SEQ ID NO: 1794 - DNA, 20 bp, Artificial Sequence
  Synthetic oligonucleotide; TGG chr11 5164084 5164103 5164100 +
ctgccgaacgagccatgaac

SEQ ID NO: 1795 - DNA, 20 bp, Artificial Sequence
  Synthetic oligonucleotide; GGG chr11 5164085 5164104 5164101 +
tgccgaacgagccatgaact

SEQ ID NO: 1796 - DNA, 20 bp, Artificial Sequence
  Synthetic oligonucleotide; TGG chr11 5164089 5164108 5164105 +
gaacgagccatgaactgggc

SEQ ID NO: 1797 - DNA, 20 bp, Artificial Sequence
  Synthetic oligonucleotide; GGG chr11 5164090 5164109 5164106 +
aacgagccatgaactgggct

SEQ ID NO: 1798 - DNA, 20 bp, Artificial Sequence
  Synthetic oligonucleotide; AAG chr11 5164110 5164129 5164126 +
gggtttttcatatttgatga

SEQ ID NO: 1799 - DNA, 20 bp, Artificial Sequence
  Synthetic oligonucleotide; GAG chr11 5164112 5164131 5164128 +
gtttttcatatttgatgaaa

SEQ ID NO: 1800 - DNA, 20 bp, Artificial Sequence
  Synthetic oligonucleotide; CGG chr11 5164131 5164150 5164147 +
agagcctaaacgctctgatt

SEQ ID NO: 1801 - DNA, 20 bp, Artificial Sequence
  Synthetic oligonucleotide; GGG chr11 5164132 5164151 5164148 +
gagcctaaacgctctgattc

SEQ ID NO: 1802 - DNA, 20 bp, Artificial Sequence
  Synthetic oligonucleotide; GAG chr11 5164134 5164153 5164150 +
gcctaaacgctctgattcgg

SEQ ID NO: 1803 - DNA, 20 bp, Artificial Sequence
  Synthetic oligonucleotide; GAG chr11 5164136 5164155 5164152 +
ctaaacgctctgattcggga

SEQ ID NO: 1804 - DNA, 20 bp, Artificial Sequence
  Synthetic oligonucleotide; AGG chr11 5164137 5164156 5164153 +
taaacgctctgattcgggag

SEQ ID NO: 1805 - DNA, 20 bp, Artificial Sequence
  Synthetic oligonucleotide; CGG chr11 5164141 5164160 5164157 +
cgctctgattcgggagaggt

SEQ ID NO: 1806 - DNA, 20 bp, Artificial Sequence
  Synthetic oligonucleotide; AAG chr11 5164147 5164166 5164163 +
gattcgggagaggtcggata

SEQ ID NO: 1807 - DNA, 20 bp, Artificial Sequence
  Synthetic oligonucleotide; AAG chr11 5164153 5164172 5164169 +
ggagaggtcggataaagaaa

SEQ ID NO: 1808 - DNA, 20 bp, Artificial Sequence
  Synthetic oligonucleotide; AGG chr11 5164154 5164173 5164170 +
gagaggtcggataaagaaaa

SEQ ID NO: 1809 - DNA, 20 bp, Artificial Sequence
  Synthetic oligonucleotide; GAG chr11 5164156 5164175 5164172 +
gaggtcggataaagaaaaag

SEQ ID NO: 1810 - DNA, 20 bp, Artificial Sequence
  Synthetic oligonucleotide; TAG chr11 5164180 5164199 5164196 +
attaaccttgactacgcctt

SEQ ID NO: 1811 - DNA, 20 bp, Artificial Sequence
  Synthetic oligonucleotide; CAG chr11 5164186 5164205 5164202 +
cttgactacgcctttagctt

SEQ ID NO: 1812 - DNA, 20 bp, Artificial Sequence
  Synthetic oligonucleotide; TAG chr11 5164201 5164220 5164217 +
agcttcagccaccttcttaa

SEQ ID NO: 1813 - DNA, 20 bp, Artificial Sequence
  Synthetic oligonucleotide; AGG chr11 5164202 5164221 5164218 +
gcttcagccaccttcttaat

SEQ ID NO: 1814 - DNA, 20 bp, Artificial Sequence
  Synthetic oligonucleotide; TGG chr11 5164212 5164231 5164228 +
ccttcttaataggaaattgc

SEQ ID NO: 1815 - DNA, 20 bp, Artificial Sequence
  Synthetic oligonucleotide; GGG chr11 5164213 5164232 5164229 +
cttcttaataggaaattgct

SEQ ID NO: 1816 - DNA, 20 bp, Artificial Sequence
  Synthetic oligonucleotide; CAG chr11 5164216 5164235 5164232 +
cttaataggaaattgctggg

SEQ ID NO: 1817 - DNA, 20 bp, Artificial Sequence
  Synthetic oligonucleotide; AGG chr11 5164217 5164236 5164233 +
ttaataggaaattgctgggc

SEQ ID NO: 1818 - DNA, 20 bp, Artificial Sequence
  Synthetic oligonucleotide; TGG chr11 5164221 5164240 5164237 +
taggaaattgctgggcaggt

SEQ ID NO: 1819 - DNA, 20 bp, Artificial Sequence
  Synthetic oligonucleotide; GGG chr11 5164222 5164241 5164238 +
aggaaattgctgggcaggtt

SEQ ID NO: 1820 - DNA, 20 bp, Artificial Sequence
  Synthetic oligonucleotide; GGG chr11 5164223 5164242 5164239 +
ggaaattgctgggcaggttg

SEQ ID NO: 1821 - DNA, 20 bp, Artificial Sequence
  Synthetic oligonucleotide; GAG chr11 5164225 5164244 5164241 +
aaattgctgggcaggttggg

SEQ ID NO: 1822 - DNA, 20 bp, Artificial Sequence
  Synthetic oligonucleotide; AGG chr11 5164226 5164245 5164242 +
aattgctgggcaggttgggg

SEQ ID NO: 1823 - DNA, 20 bp, Artificial Sequence
  Synthetic oligonucleotide; GGG chr11 5164227 5164246 5164243 +
attgctgggcaggttgggga

SEQ ID NO: 1824 - DNA, 20 bp, Artificial Sequence
  Synthetic oligonucleotide; TAG chr11 5164231 5164250 5164247 +
ctgggcaggttggggagggc

SEQ ID NO: 1825 - DNA, 20 bp, Artificial Sequence
  Synthetic oligonucleotide; CGG chr11 5164237 5164256 5164253 +
aggttggggagggctagtca

SEQ ID NO: 1826 - DNA, 20 bp, Artificial Sequence
  Synthetic oligonucleotide; CGG chr11 5164255 5164274 5164271 +
cacggaatgaaactgtaaac

SEQ ID NO: 1827 - DNA, 20 bp, Artificial Sequence
  Synthetic oligonucleotide; CGG chr11 5164260 5164279 5164276 +
aatgaaactgtaaaccggac

SEQ ID NO: 1828 - DNA, 20 bp, Artificial Sequence
  Synthetic oligonucleotide; GGG chr11 5164261 5164280 5164277 +
atgaaactgtaaaccggacc

SEQ ID NO: 1829 - DNA, 20 bp, Artificial Sequence
  Synthetic oligonucleotide; GAG chr11 5164267 5164286 5164283 +
ctgtaaaccggaccgggtgt

SEQ ID NO: 1830 - DNA, 20 bp, Artificial Sequence
  Synthetic oligonucleotide; AGG chr11 5164268 5164287 5164284 +
tgtaaaccggaccgggtgtg

SEQ ID NO: 1831 - DNA, 20 bp, Artificial Sequence
  Synthetic oligonucleotide; GAG chr11 5164270 5164289 5164286 +
taaaccggaccgggtgtgag

SEQ ID NO: 1832 - DNA, 20 bp, Artificial Sequence
  Synthetic oligonucleotide; AGG chr11 5164271 5164290 5164287 +
aaaccggaccgggtgtgagg

SEQ ID NO: 1833 - DNA, 20 bp, Artificial Sequence
  Synthetic oligonucleotide; GGG chr11 5164272 5164291 5164288 +
aaccggaccgggtgtgagga

SEQ ID NO: 1834 - DNA, 20 bp, Artificial Sequence
  Synthetic oligonucleotide; GGG chr11 5164273 5164292 5164289 +
accggaccgggtgtgaggag

SEQ ID NO: 1835 - DNA, 20 bp, Artificial Sequence
  Synthetic oligonucleotide; GAG chr11 5164275 5164294 5164291 +
cggaccgggtgtgaggaggg

SEQ ID NO: 1836 - DNA, 20 bp, Artificial Sequence
  Synthetic oligonucleotide; AGG chr11 5164276 5164295 5164292 +
ggaccgggtgtgaggagggg

SEQ ID NO: 1837 - DNA, 20 bp, Artificial Sequence
  Synthetic oligonucleotide; AAG chr11 5164286 5164305 5164302 +
tgaggaggggaggtgataaa

SEQ ID NO: 1838 - DNA, 20 bp, Artificial Sequence
  Synthetic oligonucleotide; CAG chr11 5164293 5164312 5164309 +
gggaggtgataaaaagatta

SEQ ID NO: 1839 - DNA, 20 bp, Artificial Sequence
  Synthetic oligonucleotide; AGG chr11 5164294 5164313 5164310 +
ggaggtgataaaaagattac

SEQ ID NO: 1840 - DNA, 20 bp, Artificial Sequence
  Synthetic oligonucleotide; GGG chr11 5164295 5164314 5164311 +
gaggtgataaaaagattaca

SEQ ID NO: 1841 - DNA, 20 bp, Artificial Sequence
  Synthetic oligonucleotide; TGG chr11 5164298 5164317 5164314 +
gtgataaaaagattacaggg

SEQ ID NO: 1842 - DNA, 20 bp, Artificial Sequence
  Synthetic oligonucleotide; GAG chr11 5164300 5164319 5164316 +
gataaaaagattacagggtg

SEQ ID NO: 1843 - DNA, 20 bp, Artificial Sequence
  Synthetic oligonucleotide; AGG chr11 5164301 5164320 5164317 +
ataaaaagattacagggtgg

SEQ ID NO: 1844 - DNA, 20 bp, Artificial Sequence
  Synthetic oligonucleotide; GAG chr11 5164303 5164322 5164319 +
aaaaagattacagggtggag

SEQ ID NO: 1845 - DNA, 20 bp, Artificial Sequence
  Synthetic oligonucleotide; GAG chr11 5164308 5164327 5164324 +
gattacagggtggaggagct

SEQ ID NO: 1846 - DNA, 20 bp, Artificial Sequence
  Synthetic oligonucleotide; AGG chr11 5164309 5164328 5164325 +
attacagggtggaggagctg

SEQ ID NO: 1847 - DNA, 20 bp, Artificial Sequence
  Synthetic oligonucleotide; GAG chr11 5164314 5164333 5164330 +
agggtggaggagctgaggct

SEQ ID NO: 1848 - DNA, 20 bp, Artificial Sequence
  Synthetic oligonucleotide; AGG chr11 5164315 5164334 5164331 +
gggtggaggagctgaggctg

SEQ ID NO: 1849 - DNA, 20 bp, Artificial Sequence
  Synthetic oligonucleotide; AAG chr11 5164318 5164337 5164334 +
tggaggagctgaggctgagg

SEQ ID NO: 1850 - DNA, 20 bp, Artificial Sequence
  Synthetic oligonucleotide; TGG chr11 5164324 5164343 5164340 +
agctgaggctgaggaagatt

SEQ ID NO: 1851 - DNA, 20 bp, Artificial Sequence
  Synthetic oligonucleotide; GGG chr11 5164325 5164344 5164341 +
gctgaggctgaggaagattt

SEQ ID NO: 1852 - DNA, 20 bp, Artificial Sequence
  Synthetic oligonucleotide; TAG chr11 5164331 5164350 5164347 +
gctgaggaagatttgggacc

SEQ ID NO: 1853 - DNA, 20 bp, Artificial Sequence
  Synthetic oligonucleotide; CGG chr11 5164336 5164355 5164352 +
ggaagatttgggacctagct

SEQ ID NO: 1854 - DNA, 20 bp, Artificial Sequence
  Synthetic oligonucleotide; TGG chr11 5164341 5164360 5164357 +
atttgggacctagctcggcc

SEQ ID NO: 1855 - DNA, 20 bp, Artificial Sequence
  Synthetic oligonucleotide; AAG chr11 5164345 5164364 5164361 +
gggacctagctcggcctggc

SEQ ID NO: 1856 - DNA, 20 bp, Artificial Sequence
  Synthetic oligonucleotide; AGG chr11 5164346 5164365 5164362 +
ggacctagctcggcctggca

SEQ ID NO: 1857 - DNA, 20 bp, Artificial Sequence
  Synthetic oligonucleotide; GAG chr11 5164348 5164367 5164364 +
acctagctcggcctggcaag

SEQ ID NO: 1858 - DNA, 20 bp, Artificial Sequence
  Synthetic oligonucleotide; CAG chr11 5164351 5164370 5164367 +
tagctcggcctggcaaggag

SEQ ID NO: 1859 - DNA, 20 bp, Artificial Sequence
  Synthetic oligonucleotide; TGG chr11 5164356 5164375 5164372 +
cggcctggcaaggagcagcc

SEQ ID NO: 1860 - DNA, 20 bp, Artificial Sequence
  Synthetic oligonucleotide; GGG chr11 5164357 5164376 5164373 +
ggcctggcaaggagcagcct

SEQ ID NO: 1861 - DNA, 20 bp, Artificial Sequence
  Synthetic oligonucleotide; GGG chr11 5164358 5164377 5164374 +
gcctggcaaggagcagcctg

SEQ ID NO: 1862 - DNA, 20 bp, Artificial Sequence
  Synthetic oligonucleotide; GAG chr11 5164360 5164379 5164376 +
ctggcaaggagcagcctggg

SEQ ID NO: 1863 - DNA, 20 bp, Artificial Sequence
  Synthetic oligonucleotide; AGG chr11 5164361 5164380 5164377 +
tggcaaggagcagcctgggg

SEQ ID NO: 1864 - DNA, 20 bp, Artificial Sequence
  Synthetic oligonucleotide; GAG chr11 5164363 5164382 5164379 +
gcaaggagcagcctggggag

SEQ ID NO: 1865 - DNA, 20 bp, Artificial Sequence
  Synthetic oligonucleotide; AGG chr11 5164364 5164383 5164380 +
caaggagcagcctggggagg

SEQ ID NO: 1866 - DNA, 20 bp, Artificial Sequence
  Synthetic oligonucleotide; GGG chr11 5164365 5164384 5164381 +
aaggagcagcctggggagga

SEQ ID NO: 1867 - DNA, 20 bp, Artificial Sequence
  Synthetic oligonucleotide; GGG chr11 5164366 5164385 5164382 +
aggagcagcctggggaggag

SEQ ID NO: 1868 - DNA, 20 bp, Artificial Sequence
  Synthetic oligonucleotide; GAG chr11 5164368 5164387 5164384 +
gagcagcctggggaggaggg

SEQ ID NO: 1869 - DNA, 20 bp, Artificial Sequence
  Synthetic oligonucleotide; CAG chr11 5164375 5164394 5164391 +
ctggggaggaggggagacgt

SEQ ID NO: 1870 - DNA, 20 bp, Artificial Sequence
  Synthetic oligonucleotide; TGG chr11 5164379 5164398 5164395 +
ggaggaggggagacgtcaga

SEQ ID NO: 1871 - DNA, 20 bp, Artificial Sequence
  Synthetic oligonucleotide; GGG chr11 5164380 5164399 5164396 +
gaggaggggagacgtcagat

SEQ ID NO: 1872 - DNA, 20 bp, Artificial Sequence
  Synthetic oligonucleotide; TAG chr11 5164387 5164406 5164403 +
ggagacgtcagatgggtctg

SEQ ID NO: 1873 - DNA, 20 bp, Artificial Sequence
  Synthetic oligonucleotide; AAG chr11 5164392 5164411 5164408 +
cgtcagatgggtctgtagaa

SEQ ID NO: 1874 - DNA, 20 bp, Artificial Sequence
  Synthetic oligonucleotide; AGG chr11 5164393 5164412 5164409 +
gtcagatgggtctgtagaaa

SEQ ID NO: 1875 - DNA, 20 bp, Artificial Sequence
  Synthetic oligonucleotide; AAG chr11 5164396 5164415 5164412 +
agatgggtctgtagaaaagg

SEQ ID NO: 1876 - DNA, 20 bp, Artificial Sequence
  Synthetic oligonucleotide; TAG chr11 5164401 5164420 5164417 +
ggtctgtagaaaaggaagat

SEQ ID NO: 1877 - DNA, 20 bp, Artificial Sequence
  Synthetic oligonucleotide; AAG chr11 5164405 5164424 5164421 +
tgtagaaaaggaagattaga

SEQ ID NO: 1878 - DNA, 20 bp, Artificial Sequence
  Synthetic oligonucleotide; CAG chr11 5164411 5164430 5164427 +
aaaggaagattagaaagact

SEQ ID NO: 1879 - DNA, 20 bp, Artificial Sequence
  Synthetic oligonucleotide; TGG chr11 5164421 5164440 5164437 +
tagaaagactcagcgacgct

SEQ ID NO: 1880 - DNA, 20 bp, Artificial Sequence
  Synthetic oligonucleotide; GAG chr11 5164423 5164442 5164439 +
gaaagactcagcgacgcttg

SEQ ID NO: 1881 - DNA, 20 bp, Artificial Sequence
  Synthetic oligonucleotide; TGG chr11 5164427 5164446 5164443 +
gactcagcgacgcttggagt

SEQ ID NO: 1882 - DNA, 20 bp, Artificial Sequence
  Synthetic oligonucleotide; GGG chr11 5164428 5164447 5164444 +
actcagcgacgcttggagtt

SEQ ID NO: 1883 - DNA, 20 bp, Artificial Sequence
  Synthetic oligonucleotide; GAG chr11 5164434 5164453 5164450 +
cgacgcttggagttgggact

SEQ ID NO: 1884 - DNA, 20 bp, Artificial Sequence
  Synthetic oligonucleotide; AGG chr11 5164435 5164454 5164451 +
gacgcttggagttgggactg

SEQ ID NO: 1885 - DNA, 20 bp, Artificial Sequence
  Synthetic oligonucleotide; GGG chr11 5164436 5164455 5164452 +
acgcttggagttgggactga

SEQ ID NO: 1886 - DNA, 20 bp, Artificial Sequence
  Synthetic oligonucleotide; GGG chr11 5164437 5164456 5164453 +
cgcttggagttgggactgag

SEQ ID NO: 1887 - DNA, 20 bp, Artificial Sequence
  Synthetic oligonucleotide; CAG chr11 5164441 5164460 5164457 +
tggagttgggactgagggga

SEQ ID NO: 1888 - DNA, 20 bp, Artificial Sequence
  Synthetic oligonucleotide; AGG chr11 5164442 5164461 5164458 +
ggagttgggactgaggggac

SEQ ID NO: 1889 - DNA, 20 bp, Artificial Sequence
  Synthetic oligonucleotide; CGG chr11 5164445 5164464 5164461 +
gttgggactgaggggacagg

SEQ ID NO: 1890 - DNA, 20 bp, Artificial Sequence
  Synthetic oligonucleotide; GGG chr11 5164446 5164465 5164462 +
ttgggactgaggggacaggc

SEQ ID NO: 1891 - DNA, 20 bp, Artificial Sequence
  Synthetic oligonucleotide; GAG chr11 5164448 5164467 5164464 +
gggactgaggggacaggcgg

SEQ ID NO: 1892 - DNA, 20 bp, Artificial Sequence
  Synthetic oligonucleotide; AGG chr11 5164449 5164468 5164465 +
ggactgaggggacaggcggg

SEQ ID NO: 1893 - DNA, 20 bp, Artificial Sequence
  Synthetic oligonucleotide; GGG chr11 5164450 5164469 5164466 +
gactgaggggacaggcggga

SEQ ID NO: 1894 - DNA, 20 bp, Artificial Sequence
  Synthetic oligonucleotide; AAG chr11 5164454 5164473 5164470 +
gaggggacaggcgggaggga

SEQ ID NO: 1895 - DNA, 20 bp, Artificial Sequence
  Synthetic oligonucleotide; AAG chr11 5164457 5164476 5164473 +
gggacaggcgggagggaaag

SEQ ID NO: 1896 - DNA, 20 bp, Artificial Sequence
  Synthetic oligonucleotide; AGG chr11 5164458 5164477 5164474 +
ggacaggcgggagggaaaga

SEQ ID NO: 1897 - DNA, 20 bp, Artificial Sequence
  Synthetic oligonucleotide; AAG chr11 5164461 5164480 5164477 +
caggcgggagggaaagaagg

SEQ ID NO: 1898 - DNA, 20 bp, Artificial Sequence
  Synthetic oligonucleotide; TGG chr11 5164467 5164486 5164483 +
ggagggaaagaaggaagatt

SEQ ID NO: 1899 - DNA, 20 bp, Artificial Sequence
  Synthetic oligonucleotide; GGG chr11 5164468 5164487 5164484 +
gagggaaagaaggaagattt

SEQ ID NO: 1900 - DNA, 20 bp, Artificial Sequence
  Synthetic oligonucleotide; AAG chr11 5164473 5164492 5164489 +
aaagaaggaagatttgggac

SEQ ID NO: 1901 - DNA, 20 bp, Artificial Sequence
  Synthetic oligonucleotide; TGG chr11 5164482 5164501 5164498 +
agatttgggacaagttgcat

SEQ ID NO: 1902 - DNA, 20 bp, Artificial Sequence
  Synthetic oligonucleotide; GGG chr11 5164483 5164502 5164499 +
gatttgggacaagttgcatt

SEQ ID NO: 1903 - DNA, 20 bp, Artificial Sequence
  Synthetic oligonucleotide; AAG chr11 5164486 5164505 5164502 +
ttgggacaagttgcattggg

SEQ ID NO: 1904 - DNA, 20 bp, Artificial Sequence
  Synthetic oligonucleotide; GAG chr11 5164488 5164507 5164504 +
gggacaagttgcattgggaa

SEQ ID NO: 1905 - DNA, 20 bp, Artificial Sequence
  Synthetic oligonucleotide; TAG chr11 5164493 5164512 5164509 +
aagttgcattgggaagagac

SEQ ID NO: 1906 - DNA, 20 bp, Artificial Sequence
  Synthetic oligonucleotide; AGG chr11 5164494 5164513 5164510 +
agttgcattgggaagagact

SEQ ID NO: 1907 - DNA, 20 bp, Artificial Sequence
  Synthetic oligonucleotide; GGG chr11 5164495 5164514 5164511 +
gttgcattgggaagagacta

SEQ ID NO: 1908 - DNA, 20 bp, Artificial Sequence
  Synthetic oligonucleotide; GAG chr11 5164497 5164516 5164513 +
tgcattgggaagagactagg

SEQ ID NO: 1909 - DNA, 20 bp, Artificial Sequence
  Synthetic oligonucleotide; AGG chr11 5164498 5164517 5164514 +
gcattgggaagagactaggg

SEQ ID NO: 1910 - DNA, 20 bp, Artificial Sequence
  Synthetic oligonucleotide; GGG chr11 5164499 5164518 5164515 +
cattgggaagagactaggga

SEQ ID NO: 1911 - DNA, 20 bp, Artificial Sequence
  Synthetic oligonucleotide; AAG chr11 5164514 5164533 5164530 +
agggagggaccaatgtgtaa

SEQ ID NO: 1912 - DNA, 20 bp, Artificial Sequence
  Synthetic oligonucleotide; TGG chr11 5164523 5164542 5164539 +
ccaatgtgtaaaagaatgcc

SEQ ID NO: 1913 - DNA, 20 bp, Artificial Sequence
  Synthetic oligonucleotide; CAG chr11 5164530 5164549 5164546 +
gtaaaagaatgcctggacgt

SEQ ID NO: 1914 - DNA, 20 bp, Artificial Sequence
  Synthetic oligonucleotide; AGG chr11 5164531 5164550 5164547 +
taaaagaatgcctggacgtc

SEQ ID NO: 1915 - DNA, 20 bp, Artificial Sequence
  Synthetic oligonucleotide; CAG chr11 5164539 5164558 5164555 +
tgcctggacgtcaggcacct

SEQ ID NO: 1916 - DNA, 20 bp, Artificial Sequence
  Synthetic oligonucleotide; TAG chr11 5164573 5164592 5164589 +
gttttacgacaaaaattatt

SEQ ID NO: 1917 - DNA, 20 bp, Artificial Sequence
  Synthetic oligonucleotide; AAG chr11 5164582 5164601 5164598 +
caaaaattatttagatcttg

SEQ ID NO: 1918 - DNA, 20 bp, Artificial Sequence
  Synthetic oligonucleotide; TGG chr11 5164587 5164606 5164603 +
attatttagatcttgaagaa

SEQ ID NO: 1919 - DNA, 20 bp, Artificial Sequence
  Synthetic oligonucleotide; AAG chr11 5164599 5164618 5164615 +
ttgaagaatggaaaaattga

SEQ ID NO: 1920 - DNA, 20 bp, Artificial Sequence
  Synthetic oligonucleotide; TGG chr11 5164612 5164631 5164628 +
aaattgaaagtgccattttc

SEQ ID NO: 1921 - DNA, 20 bp, Artificial Sequence
  Synthetic oligonucleotide; TGG chr11 5164620 5164639 5164636 +
agtgccattttctggctatt

SEQ ID NO: 1922 - DNA, 20 bp, Artificial Sequence
  Synthetic oligonucleotide; GAG chr11 5164633 5164652 5164649 +
ggctatttggaaccactgtc

SEQ ID NO: 1923 - DNA, 20 bp, Artificial Sequence
  Synthetic oligonucleotide; TGG chr11 5164643 5164662 5164659 +
aaccactgtcgagtttgtat

SEQ ID NO: 1924 - DNA, 20 bp, Artificial Sequence
  Synthetic oligonucleotide; GAG chr11 5164645 5164664 5164661 +
ccactgtcgagtttgtattg

SEQ ID NO: 1925 - DNA, 20 bp, Artificial Sequence
  Synthetic oligonucleotide; AAG chr11 5164650 5164669 5164666 +
gtcgagtttgtattggagtc

SEQ ID NO: 1926 - DNA, 20 bp, Artificial Sequence
  Synthetic oligonucleotide; CGG chr11 5164653 5164672 5164669 +
gagtttgtattggagtcaag

SEQ ID NO: 1927 - DNA, 20 bp, Artificial Sequence
  Synthetic oligonucleotide; CAG chr11 5164661 5164680 5164677 +
attggagtcaagcggccttg

SEQ ID NO: 1928 - DNA, 20 bp, Artificial Sequence
  Synthetic oligonucleotide; AAG chr11 5164664 5164683 5164680 +
ggagtcaagcggccttgcag

SEQ ID NO: 1929 - DNA, 20 bp, Artificial Sequence
  Synthetic oligonucleotide; AAG chr11 5164672 5164691 5164688 +
gcggccttgcagaagaaaat

SEQ ID NO: 1930 - DNA, 20 bp, Artificial Sequence
  Synthetic oligonucleotide; AGG chr11 5164673 5164692 5164689 +
cggccttgcagaagaaaata

SEQ ID NO: 1931 - DNA, 20 bp, Artificial Sequence
  Synthetic oligonucleotide; TAG chr11 5164680 5164699 5164696 +
gcagaagaaaataaggcatt

SEQ ID NO: 1932 - DNA, 20 bp, Artificial Sequence
  Synthetic oligonucleotide; AGG chr11 5164681 5164700 5164697 +
cagaagaaaataaggcattt

SEQ ID NO: 1933 - DNA, 20 bp, Artificial Sequence
  Synthetic oligonucleotide; TAG chr11 5164687 5164706 5164703 +
aaaataaggcatttaggttt

SEQ ID NO: 1934 - DNA, 20 bp, Artificial Sequence
  Synthetic oligonucleotide; AGG chr11 5164688 5164707 5164704 +
aaataaggcatttaggtttt

SEQ ID NO: 1935 - DNA, 20 bp, Artificial Sequence
  Synthetic oligonucleotide; CAG chr11 5164692 5164711 5164708 +
aaggcatttaggttttaggt

SEQ ID NO: 1936 - DNA, 20 bp, Artificial Sequence
  Synthetic oligonucleotide; AGG chr11 5164693 5164712 5164709 +
aggcatttaggttttaggtc

SEQ ID NO: 1937 - DNA, 20 bp, Artificial Sequence
  Synthetic oligonucleotide; GAG chr11 5164699 5164718 5164715 +
ttaggttttaggtcaggtgt

SEQ ID NO: 1938 - DNA, 20 bp, Artificial Sequence
  Synthetic oligonucleotide; AAG chr11 5164705 5164724 5164721 +
tttaggtcaggtgtgagttg

SEQ ID NO: 1939 - DNA, 20 bp, Artificial Sequence
  Synthetic oligonucleotide; GAG chr11 5164707 5164726 5164723 +
taggtcaggtgtgagttgaa

SEQ ID NO: 1940 - DNA, 20 bp, Artificial Sequence
  Synthetic oligonucleotide; AGG chr11 5164708 5164727 5164724 +
aggtcaggtgtgagttgaag

SEQ ID NO: 1941 - DNA, 20 bp, Artificial Sequence
  Synthetic oligonucleotide; AAG chr11 5164715 5164734 5164731 +
gtgtgagttgaagaggtttt

SEQ ID NO: 1942 - DNA, 20 bp, Artificial Sequence
  Synthetic oligonucleotide; GAG chr11 5164723 5164742 5164739 +
tgaagaggttttaagttctt

SEQ ID NO: 1943 - DNA, 20 bp, Artificial Sequence
  Synthetic oligonucleotide; GAG chr11 5164725 5164744 5164741 +
aagaggttttaagttcttga

SEQ ID NO: 1944 - DNA, 20 bp, Artificial Sequence
  Synthetic oligonucleotide; CAG chr11 5164730 5164749 5164746 +
gttttaagttcttgagagca

SEQ ID NO: 1945 - DNA, 20 bp, Artificial Sequence
  Synthetic oligonucleotide; AGG chr11 5164731 5164750 5164747 +
ttttaagttcttgagagcac

SEQ ID NO: 1946 - DNA, 20 bp, Artificial Sequence
  Synthetic oligonucleotide; AAG chr11 5164736 5164755 5164752 +
agttcttgagagcacaggct

SEQ ID NO: 1947 - DNA, 20 bp, Artificial Sequence
  Synthetic oligonucleotide; AGG chr11 5164737 5164756 5164753 +
gttcttgagagcacaggcta

SEQ ID NO: 1948 - DNA, 20 bp, Artificial Sequence
  Synthetic oligonucleotide; GGG chr11 5164738 5164757 5164754 +
ttcttgagagcacaggctaa

SEQ ID NO: 1949 - DNA, 20 bp, Artificial Sequence
  Synthetic oligonucleotide; GAG chr11 5164740 5164759 5164756 +
cttgagagcacaggctaagg

SEQ ID NO: 1950 - DNA, 20 bp, Artificial Sequence
  Synthetic oligonucleotide; GAG chr11 5164742 5164761 5164758 +
tgagagcacaggctaaggga

SEQ ID NO: 1951 - DNA, 20 bp, Artificial Sequence
  Synthetic oligonucleotide; AGG chr11 5164743 5164762 5164759 +
gagagcacaggctaagggag

SEQ ID NO: 1952 - DNA, 20 bp, Artificial Sequence
  Synthetic oligonucleotide; GGG chr11 5164744 5164763 5164760 +
agagcacaggctaagggaga

SEQ ID NO: 1953 - DNA, 20 bp, Artificial Sequence
  Synthetic oligonucleotide; GAG chr11 5164746 5164765 5164762 +
agcacaggctaagggagagg

SEQ ID NO: 1954 - DNA, 20 bp, Artificial Sequence
  Synthetic oligonucleotide; AGG chr11 5164747 5164766 5164763 +
gcacaggctaagggagaggg

SEQ ID NO: 1955 - DNA, 20 bp, Artificial Sequence
  Synthetic oligonucleotide; TGG chr11 5164752 5164771 5164768 +
ggctaagggagagggaggaa

SEQ ID NO: 1956 - DNA, 20 bp, Artificial Sequence
  Synthetic oligonucleotide; GAG chr11 5164754 5164773 5164770 +
ctaagggagagggaggaatg

SEQ ID NO: 1957 - DNA, 20 bp, Artificial Sequence
  Synthetic oligonucleotide; AGG chr11 5164755 5164774 5164771 +
taagggagagggaggaatgg

SEQ ID NO: 1958 - DNA, 20 bp, Artificial Sequence
  Synthetic oligonucleotide; GGG chr11 5164756 5164775 5164772 +
aagggagagggaggaatgga

SEQ ID NO: 1959 - DNA, 20 bp, Artificial Sequence
  Synthetic oligonucleotide; TGG chr11 5164759 5164778 5164775 +
ggagagggaggaatggaggg

SEQ ID NO: 1960 - DNA, 20 bp, Artificial Sequence
  Synthetic oligonucleotide; AAG chr11 5164762 5164781 5164778 +
gagggaggaatggagggtgg

SEQ ID NO: 1961 - DNA, 20 bp, Artificial Sequence
  Synthetic oligonucleotide; AGG chr11 5164763 5164782 5164779 +
agggaggaatggagggtgga

SEQ ID NO: 1962 - DNA, 20 bp, Artificial Sequence
  Synthetic oligonucleotide; TAG chr11 5164773 5164792 5164789 +
ggagggtggaaggttgcccc

SEQ ID NO: 1963 - DNA, 20 bp, Artificial Sequence
  Synthetic oligonucleotide; AAG chr11 5164778 5164797 5164794 +
gtggaaggttgcccctagtg

SEQ ID NO: 1964 - DNA, 20 bp, Artificial Sequence
  Synthetic oligonucleotide; AGG chr11 5164779 5164798 5164795 +
tggaaggttgcccctagtga

SEQ ID NO: 1965 - DNA, 20 bp, Artificial Sequence
  Synthetic oligonucleotide; GAG chr11 5164781 5164800 5164797 +
gaaggttgcccctagtgaag

SEQ ID NO: 1966 - DNA, 20 bp, Artificial Sequence
  Synthetic oligonucleotide; AGG chr11 5164782 5164801 5164798 +
aaggttgcccctagtgaagg

SEQ ID NO: 1967 - DNA, 20 bp, Artificial Sequence
  Synthetic oligonucleotide; AAG chr11 5164786 5164805 5164802 +
ttgcccctagtgaaggaggc

SEQ ID NO: 1968 - DNA, 20 bp, Artificial Sequence
  Synthetic oligonucleotide; CAG chr11 5164791 5164810 5164807 +
cctagtgaaggaggcaagcc

SEQ ID NO: 1969 - DNA, 20 bp, Artificial Sequence
  Synthetic oligonucleotide; GAG chr11 5164793 5164812 5164809 +
tagtgaaggaggcaagccca

SEQ ID NO: 1970 - DNA, 20 bp, Artificial Sequence
  Synthetic oligonucleotide; AAG chr11 5164798 5164817 5164814 +
aaggaggcaagcccagagaa

SEQ ID NO: 1971 - DNA, 20 bp, Artificial Sequence
  Synthetic oligonucleotide; AAG chr11 5164802 5164821 5164818 +
aggcaagcccagagaaaaga

SEQ ID NO: 1972 - DNA, 20 bp, Artificial Sequence
  Synthetic oligonucleotide; GAG chr11 5164804 5164823 5164820 +
gcaagcccagagaaaagaaa

SEQ ID NO: 1973 - DNA, 20 bp, Artificial Sequence
  Synthetic oligonucleotide; CAG chr11 5164809 5164828 5164825 +
cccagagaaaagaaagagta

SEQ ID NO: 1974 - DNA, 20 bp, Artificial Sequence
  Synthetic oligonucleotide; CGG chr11 5164815 5164834 5164831 +
gaaaagaaagagtacagaca

SEQ ID NO: 1975 - DNA, 20 bp, Artificial Sequence
  Synthetic oligonucleotide; GAG chr11 5164817 5164836 5164833 +
aaagaaagagtacagacacg

SEQ ID NO: 1976 - DNA, 20 bp, Artificial Sequence
  Synthetic oligonucleotide; AGG chr11 5164818 5164837 5164834 +
aagaaagagtacagacacgg

SEQ ID NO: 1977 - DNA, 20 bp, Artificial Sequence
  Synthetic oligonucleotide; GGG chr11 5164819 5164838 5164835 +
agaaagagtacagacacgga

SEQ ID NO: 1978 - DNA, 20 bp, Artificial Sequence
  Synthetic oligonucleotide; AAG chr11 5164822 5164841 5164838 +
aagagtacagacacggaggg

SEQ ID NO: 1979 - DNA, 20 bp, Artificial Sequence
  Synthetic oligonucleotide; AGG chr11 5164823 5164842 5164839 +
agagtacagacacggaggga

SEQ ID NO: 1980 - DNA, 20 bp, Artificial Sequence
  Synthetic oligonucleotide; GGG chr11 5164824 5164843 5164840 +
gagtacagacacggagggaa

SEQ ID NO: 1981 - DNA, 20 bp, Artificial Sequence
  Synthetic oligonucleotide; GGG chr11 5164825 5164844 5164841 +
agtacagacacggagggaag

SEQ ID NO: 1982 - DNA, 20 bp, Artificial Sequence
  Synthetic oligonucleotide; CGG chr11 5164830 5164849 5164846 +
agacacggagggaaggggtt

SEQ ID NO: 1983 - DNA, 20 bp, Artificial Sequence
  Synthetic oligonucleotide; GGG chr11 5164831 5164850 5164847 +
gacacggagggaaggggttc

SEQ ID NO: 1984 - DNA, 20 bp, Artificial Sequence
  Synthetic oligonucleotide; GGG chr11 5164832 5164851 5164848 +
acacggagggaaggggttcg

SEQ ID NO: 1985 - DNA, 20 bp, Artificial Sequence
  Synthetic oligonucleotide; GGG chr11 5164833 5164852 5164849 +
cacggagggaaggggttcgg

SEQ ID NO: 1986 - DNA, 20 bp, Artificial Sequence
  Synthetic oligonucleotide; CAG chr11 5164847 5164866 5164863 +
gttcgggggttcttactcac

SEQ ID NO: 1987 - DNA, 20 bp, Artificial Sequence
  Synthetic oligonucleotide; TGG chr11 5164855 5164874 5164871 +
gttcttactcaccagaaaaa

SEQ ID NO: 1988 - DNA, 20 bp, Artificial Sequence
  Synthetic oligonucleotide; GGG chr11 5164856 5164875 5164872 +
ttcttactcaccagaaaaat

SEQ ID NO: 1989 - DNA, 20 bp, Artificial Sequence
  Synthetic oligonucleotide; AAG chr11 5164860 5164879 5164876 +
tactcaccagaaaaatgggc

SEQ ID NO: 1990 - DNA, 20 bp, Artificial Sequence
  Synthetic oligonucleotide; AGG chr11 5164861 5164880 5164877 +
actcaccagaaaaatgggca

SEQ ID NO: 1991 - DNA, 20 bp, Artificial Sequence
  Synthetic oligonucleotide; GGG chr11 5164862 5164881 5164878 +
ctcaccagaaaaatgggcaa

SEQ ID NO: 1992 - DNA, 20 bp, Artificial Sequence
  Synthetic oligonucleotide; GGG chr11 5164863 5164882 5164879 +
tcaccagaaaaatgggcaag

SEQ ID NO: 1993 - DNA, 20 bp, Artificial Sequence
  Synthetic oligonucleotide; TGG chr11 5164867 5164886 5164883 +
cagaaaaatgggcaaggggt

SEQ ID NO: 1994 - DNA, 20 bp, Artificial Sequence
  Synthetic oligonucleotide; GGG chr11 5164868 5164887 5164884 +
agaaaaatgggcaaggggtt

SEQ ID NO: 1995 - DNA, 20 bp, Artificial Sequence
  Synthetic oligonucleotide; GGG chr11 5164869 5164888 5164885 +
gaaaaatgggcaaggggttg

SEQ ID NO: 1996 - DNA, 20 bp, Artificial Sequence
  Synthetic oligonucleotide; CGG chr11 5164874 5164893 5164890 +
atgggcaaggggttggggca

SEQ ID NO: 1997 - DNA, 20 bp, Artificial Sequence
  Synthetic oligonucleotide; AAG chr11 5164881 5164900 5164897 +
aggggttggggcacggaaat

SEQ ID NO: 1998 - DNA, 20 bp, Artificial Sequence
  Synthetic oligonucleotide; AGG chr11 5164882 5164901 5164898 +
ggggttggggcacggaaata

SEQ ID NO: 1999 - DNA, 20 bp, Artificial Sequence
  Synthetic oligonucleotide; GGG chr11 5164883 5164902 5164899 +
gggttggggcacggaaataa

SEQ ID NO: 2000 - DNA, 20 bp, Artificial Sequence
  Synthetic oligonucleotide; GGG chr11 5164884 5164903 5164900 +
ggttggggcacggaaataag

SEQ ID NO: 2001 - DNA, 20 bp, Artificial Sequence
  Synthetic oligonucleotide; TGG chr11 5164888 5164907 5164904 +
ggggcacggaaataaggggt

SEQ ID NO: 2002 - DNA, 20 bp, Artificial Sequence
  Synthetic oligonucleotide; GGG chr11 5164889 5164908 5164905 +
gggcacggaaataaggggtt

SEQ ID NO: 2003 - DNA, 20 bp, Artificial Sequence
  Synthetic oligonucleotide; GGG chr11 5164890 5164909 5164906 +
ggcacggaaataaggggttg

SEQ ID NO: 2004 - DNA, 20 bp, Artificial Sequence
  Synthetic oligonucleotide; CAG chr11 5164895 5164914 5164911 +
ggaaataaggggttggggtg

SEQ ID NO: 2005 - DNA, 20 bp, Artificial Sequence
  Synthetic oligonucleotide; GAG chr11 5164897 5164916 5164913 +
aaataaggggttggggtgca

SEQ ID NO: 2006 - DNA, 20 bp, Artificial Sequence
  Synthetic oligonucleotide; AAG chr11 5164902 5164921 5164918 +
aggggttggggtgcagagat

SEQ ID NO: 2007 - DNA, 20 bp, Artificial Sequence
  Synthetic oligonucleotide; GAG chr11 5164904 5164923 5164920 +
gggttggggtgcagagataa

SEQ ID NO: 2008 - DNA, 20 bp, Artificial Sequence
  Synthetic oligonucleotide; AGG chr11 5164905 5164924 5164921 +
ggttggggtgcagagataag

SEQ ID NO: 2009 - DNA, 20 bp, Artificial Sequence
  Synthetic oligonucleotide; CAG chr11 5164909 5164928 5164925 +
ggggtgcagagataagaggt

SEQ ID NO: 2010 - DNA, 20 bp, Artificial Sequence
  Synthetic oligonucleotide; AGG chr11 5164910 5164929 5164926 +
gggtgcagagataagaggtc

SEQ ID NO: 2011 - DNA, 20 bp, Artificial Sequence
  Synthetic oligonucleotide; GGG chr11 5164911 5164930 5164927 +
ggtgcagagataagaggtca

SEQ ID NO: 2012 - DNA, 20 bp, Artificial Sequence
  Synthetic oligonucleotide; CAG chr11 5164916 5164935 5164932 +
agagataagaggtcagggca

SEQ ID NO: 2013 - DNA, 20 bp, Artificial Sequence
  Synthetic oligonucleotide; AAG chr11 5164923 5164942 5164939 +
agaggtcagggcacagaaat

SEQ ID NO: 2014 - DNA, 20 bp, Artificial Sequence
  Synthetic oligonucleotide; AGG chr11 5164924 5164943 5164940 +
gaggtcagggcacagaaata

SEQ ID NO: 2015 - DNA, 20 bp, Artificial Sequence
  Synthetic oligonucleotide; GGG chr11 5164925 5164944 5164941 +
aggtcagggcacagaaataa

SEQ ID NO: 2016 - DNA, 20 bp, Artificial Sequence
  Synthetic oligonucleotide; GGG chr11 5164926 5164945 5164942 +
ggtcagggcacagaaataag

SEQ ID NO: 2017 - DNA, 20 bp, Artificial Sequence
  Synthetic oligonucleotide; TGG chr11 5164930 5164949 5164946 +
agggcacagaaataaggggt

SEQ ID NO: 2018 - DNA, 20 bp, Artificial Sequence
  Synthetic oligonucleotide; GGG chr11 5164931 5164950 5164947 +
gggcacagaaataaggggtt

SEQ ID NO: 2019 - DNA, 20 bp, Artificial Sequence
  Synthetic oligonucleotide; GGG chr11 5164932 5164951 5164948 +
ggcacagaaataaggggttg

SEQ ID NO: 2020 - DNA, 20 bp, Artificial Sequence
  Synthetic oligonucleotide; CAG chr11 5164937 5164956 5164953 +
agaaataaggggttggggtg

SEQ ID NO: 2021 - DNA, 20 bp, Artificial Sequence
  Synthetic oligonucleotide; GAG chr11 5164939 5164958 5164955 +
aaataaggggttggggtgca

SEQ ID NO: 2022 - DNA, 20 bp, Artificial Sequence
  Synthetic oligonucleotide; AAG chr11 5164944 5164963 5164960 +
aggggttggggtgcagagat

SEQ ID NO: 2023 - DNA, 20 bp, Artificial Sequence
  Synthetic oligonucleotide; GAG chr11 5164946 5164965 5164962 +
gggttggggtgcagagataa

SEQ ID NO: 2024 - DNA, 20 bp, Artificial Sequence
  Synthetic oligonucleotide; AGG chr11 5164947 5164966 5164963 +
ggttggggtgcagagataag

SEQ ID NO: 2025 - DNA, 20 bp, Artificial Sequence
  Synthetic oligonucleotide; TGG chr11 5164951 5164970 5164967 +
ggggtgcagagataagaggt

SEQ ID NO: 2026 - DNA, 20 bp, Artificial Sequence
  Synthetic oligonucleotide; GGG chr11 5164952 5164971 5164968 +
gggtgcagagataagaggtt

SEQ ID NO: 2027 - DNA, 20 bp, Artificial Sequence
  Synthetic oligonucleotide; GGG chr11 5164953 5164972 5164969 +
ggtgcagagataagaggttg

SEQ ID NO: 2028 - DNA, 20 bp, Artificial Sequence
  Synthetic oligonucleotide; CAG chr11 5164958 5164977 5164974 +
agagataagaggttggggca

SEQ ID NO: 2029 - DNA, 20 bp, Artificial Sequence
  Synthetic oligonucleotide; AAG chr11 5164965 5164984 5164981 +
agaggttggggcacagaaat

SEQ ID NO: 2030 - DNA, 20 bp, Artificial Sequence
  Synthetic oligonucleotide; AGG chr11 5164966 5164985 5164982 +
gaggttggggcacagaaata

SEQ ID NO: 2031 - DNA, 20 bp, Artificial Sequence
  Synthetic oligonucleotide; GGG chr11 5164967 5164986 5164983 +
aggttggggcacagaaataa

SEQ ID NO: 2032 - DNA, 20 bp, Artificial Sequence
  Synthetic oligonucleotide; CGG chr11 5164972 5164991 5164988 +
ggggcacagaaataagggat

SEQ ID NO: 2033 - DNA, 20 bp, Artificial Sequence
  Synthetic oligonucleotide; GGG chr11 5164973 5164992 5164989 +
gggcacagaaataagggatc

SEQ ID NO: 2034 - DNA, 20 bp, Artificial Sequence
  Synthetic oligonucleotide; GGG chr11 5164974 5164993 5164990 +
ggcacagaaataagggatcg

SEQ ID NO: 2035 - DNA, 20 bp, Artificial Sequence
  Synthetic oligonucleotide; CAG chr11 5164979 5164998 5164995 +
agaaataagggatcggggtg

SEQ ID NO: 2036 - DNA, 20 bp, Artificial Sequence
  Synthetic oligonucleotide; GAG chr11 5164981 5165000 5164997 +
aaataagggatcggggtgca

SEQ ID NO: 2037 - DNA, 20 bp, Artificial Sequence
  Synthetic oligonucleotide; AAG chr11 5164986 5165005 5165002 +
agggatcggggtgcagagat

SEQ ID NO: 2038 - DNA, 20 bp, Artificial Sequence
  Synthetic oligonucleotide; GAG chr11 5164988 5165007 5165004 +
ggatcggggtgcagagataa

SEQ ID NO: 2039 - DNA, 20 bp, Artificial Sequence
  Synthetic oligonucleotide; AGG chr11 5164989 5165008 5165005 +
gatcggggtgcagagataag

SEQ ID NO: 2040 - DNA, 20 bp, Artificial Sequence
  Synthetic oligonucleotide; TGG chr11 5164993 5165012 5165009 +
ggggtgcagagataagaggt

SEQ ID NO: 2041 - DNA, 20 bp, Artificial Sequence
  Synthetic oligonucleotide; GGG chr11 5164994 5165013 5165010 +
gggtgcagagataagaggtt

SEQ ID NO: 2042 - DNA, 20 bp, Artificial Sequence
  Synthetic oligonucleotide; GGG chr11 5164995 5165014 5165011 +
ggtgcagagataagaggttg

SEQ ID NO: 2043 - DNA, 20 bp, Artificial Sequence
  Synthetic oligonucleotide; CAG chr11 5165000 5165019 5165016 +
agagataagaggttggggtg

SEQ ID NO: 2044 - DNA, 20 bp, Artificial Sequence
  Synthetic oligonucleotide; AAG chr11 5165007 5165026 5165023 +
agaggttggggtgcagaaat

SEQ ID NO: 2045 - DNA, 20 bp, Artificial Sequence
  Synthetic oligonucleotide; AGG chr11 5165008 5165027 5165024 +
gaggttggggtgcagaaata

SEQ ID NO: 2046 - DNA, 20 bp, Artificial Sequence
  Synthetic oligonucleotide; GGG chr11 5165009 5165028 5165025 +
aggttggggtgcagaaataa

SEQ ID NO: 2047 - DNA, 20 bp, Artificial Sequence
  Synthetic oligonucleotide; CAG chr11 5165014 5165033 5165030 +
ggggtgcagaaataagggat

SEQ ID NO: 2048 - DNA, 20 bp, Artificial Sequence
  Synthetic oligonucleotide; AGG chr11 5165015 5165034 5165031 +
gggtgcagaaataagggatc

SEQ ID NO: 2049 - DNA, 20 bp, Artificial Sequence
  Synthetic oligonucleotide; GGG chr11 5165016 5165035 5165032 +
ggtgcagaaataagggatca

SEQ ID NO: 2050 - DNA, 20 bp, Artificial Sequence
  Synthetic oligonucleotide; CAG chr11 5165021 5165040 5165037 +
agaaataagggatcagggtg

SEQ ID NO: 2051 - DNA, 20 bp, Artificial Sequence
  Synthetic oligonucleotide; GAG chr11 5165023 5165042 5165039 +
aaataagggatcagggtgca

SEQ ID NO: 2052 - DNA, 20 bp, Artificial Sequence
  Synthetic oligonucleotide; AAG chr11 5165028 5165047 5165044 +
agggatcagggtgcagagat

SEQ ID NO: 2053 - DNA, 20 bp, Artificial Sequence
  Synthetic oligonucleotide; GAG chr11 5165030 5165049 5165046 +
ggatcagggtgcagagataa

SEQ ID NO: 2054 - DNA, 20 bp, Artificial Sequence
  Synthetic oligonucleotide; AGG chr11 5165031 5165050 5165047 +
gatcagggtgcagagataag

SEQ ID NO: 2055 - DNA, 20 bp, Artificial Sequence
  Synthetic oligonucleotide; CGG chr11 5165035 5165054 5165051 +
agggtgcagagataagaggt

SEQ ID NO: 2056 - DNA, 20 bp, Artificial Sequence
  Synthetic oligonucleotide; GGG chr11 5165036 5165055 5165052 +
gggtgcagagataagaggtc

SEQ ID NO: 2057 - DNA, 20 bp, Artificial Sequence
  Synthetic oligonucleotide; GGG chr11 5165037 5165056 5165053 +
ggtgcagagataagaggtcg

SEQ ID NO: 2058 - DNA, 20 bp, Artificial Sequence
  Synthetic oligonucleotide; CAG chr11 5165042 5165061 5165058 +
agagataagaggtcggggtg

SEQ ID NO: 2059 - DNA, 20 bp, Artificial Sequence
  Synthetic oligonucleotide; AAG chr11 5165049 5165068 5165065 +
agaggtcggggtgcagaaat

SEQ ID NO: 2060 - DNA, 20 bp, Artificial Sequence
  Synthetic oligonucleotide; AGG chr11 5165050 5165069 5165066 +
gaggtcggggtgcagaaata

SEQ ID NO: 2061 - DNA, 20 bp, Artificial Sequence
  Synthetic oligonucleotide; GGG chr11 5165051 5165070 5165067 +
aggtcggggtgcagaaataa

SEQ ID NO: 2062 - DNA, 20 bp, Artificial Sequence
  Synthetic oligonucleotide; TGG chr11 5165056 5165075 5165072 +
ggggtgcagaaataagggat

SEQ ID NO: 2063 - DNA, 20 bp, Artificial Sequence
  Synthetic oligonucleotide; GGG chr11 5165057 5165076 5165073 +
gggtgcagaaataagggatt

SEQ ID NO: 2064 - DNA, 20 bp, Artificial Sequence
  Synthetic oligonucleotide; GGG chr11 5165058 5165077 5165074 +
ggtgcagaaataagggattg

SEQ ID NO: 2065 - DNA, 20 bp, Artificial Sequence
  Synthetic oligonucleotide; CAG chr11 5165063 5165082 5165079 +
agaaataagggattggggtg

SEQ ID NO: 2066 - DNA, 20 bp, Artificial Sequence
  Synthetic oligonucleotide; GAG chr11 5165065 5165084 5165081 +
aaataagggattggggtgca

SEQ ID NO: 2067 - DNA, 20 bp, Artificial Sequence
  Synthetic oligonucleotide; AAG chr11 5165070 5165089 5165086 +
agggattggggtgcagagat

SEQ ID NO: 2068 - DNA, 20 bp, Artificial Sequence
  Synthetic oligonucleotide; GAG chr11 5165072 5165091 5165088 +
ggattggggtgcagagataa

SEQ ID NO: 2069 - DNA, 20 bp, Artificial Sequence
  Synthetic oligonucleotide; AGG chr11 5165073 5165092 5165089 +
gattggggtgcagagataag

SEQ ID NO: 2070 - DNA, 20 bp, Artificial Sequence
  Synthetic oligonucleotide; TGG chr11 5165077 5165096 5165093 +
ggggtgcagagataagagga

SEQ ID NO: 2071 - DNA, 20 bp, Artificial Sequence
  Synthetic oligonucleotide; GGG chr11 5165078 5165097 5165094 +
gggtgcagagataagaggat

SEQ ID NO: 2072 - DNA, 20 bp, Artificial Sequence
  Synthetic oligonucleotide; GGG chr11 5165079 5165098 5165095 +
ggtgcagagataagaggatg

SEQ ID NO: 2073 - DNA, 20 bp, Artificial Sequence
  Synthetic oligonucleotide; TGG chr11 5165084 5165103 5165100 +
agagataagaggatggggcg

SEQ ID NO: 2074 - DNA, 20 bp, Artificial Sequence
  Synthetic oligonucleotide; AAG chr11 5165091 5165110 5165107 +
agaggatggggcgtggaaat

SEQ ID NO: 2075 - DNA, 20 bp, Artificial Sequence
  Synthetic oligonucleotide; AGG chr11 5165092 5165111 5165108 +
gaggatggggcgtggaaata

SEQ ID NO: 2076 - DNA, 20 bp, Artificial Sequence
  Synthetic oligonucleotide; GGG chr11 5165093 5165112 5165109 +
aggatggggcgtggaaataa

SEQ ID NO: 2077 - DNA, 20 bp, Artificial Sequence
  Synthetic oligonucleotide; TGG chr11 5165097 5165116 5165113 +
tggggcgtggaaataaggga

SEQ ID NO: 2078 - DNA, 20 bp, Artificial Sequence
  Synthetic oligonucleotide; GGG chr11 5165098 5165117 5165114 +
ggggcgtggaaataagggat

SEQ ID NO: 2079 - DNA, 20 bp, Artificial Sequence
  Synthetic oligonucleotide; GGG chr11 5165099 5165118 5165115 +
gggcgtggaaataagggatg

SEQ ID NO: 2080 - DNA, 20 bp, Artificial Sequence
  Synthetic oligonucleotide; GAG chr11 5165106 5165125 5165122 +
gaaataagggatggggtgct

SEQ ID NO: 2081 - DNA, 20 bp, Artificial Sequence
  Synthetic oligonucleotide; AAG chr11 5165111 5165130 5165127 +
aagggatggggtgctgagat

SEQ ID NO: 2082 - DNA, 20 bp, Artificial Sequence
  Synthetic oligonucleotide; GAG chr11 5165113 5165132 5165129 +
gggatggggtgctgagataa

SEQ ID NO: 2083 - DNA, 20 bp, Artificial Sequence
  Synthetic oligonucleotide; AGG chr11 5165114 5165133 5165130 +
ggatggggtgctgagataag

SEQ ID NO: 2084 - DNA, 20 bp, Artificial Sequence
  Synthetic oligonucleotide; TGG chr11 5165118 5165137 5165134 +
ggggtgctgagataagaggt

SEQ ID NO: 2085 - DNA, 20 bp, Artificial Sequence
  Synthetic oligonucleotide; GGG chr11 5165119 5165138 5165135 +
gggtgctgagataagaggtt

SEQ ID NO: 2086 - DNA, 20 bp, Artificial Sequence
  Synthetic oligonucleotide; GGG chr11 5165120 5165139 5165136 +
ggtgctgagataagaggttg

SEQ ID NO: 2087 - DNA, 20 bp, Artificial Sequence
  Synthetic oligonucleotide; CAG chr11 5165125 5165144 5165141 +
tgagataagaggttggggca

SEQ ID NO: 2088 - DNA, 20 bp, Artificial Sequence
  Synthetic oligonucleotide; AAG chr11 5165132 5165151 5165148 +
agaggttggggcacagaaat

SEQ ID NO: 2089 - DNA, 20 bp, Artificial Sequence
  Synthetic oligonucleotide; AGG chr11 5165133 5165152 5165149 +
gaggttggggcacagaaata

SEQ ID NO: 2090 - DNA, 20 bp, Artificial Sequence
  Synthetic oligonucleotide; GGG chr11 5165134 5165153 5165150 +
aggttggggcacagaaataa

SEQ ID NO: 2091 - DNA, 20 bp, Artificial Sequence
  Synthetic oligonucleotide; TGG chr11 5165139 5165158 5165155 +
ggggcacagaaataagggat

SEQ ID NO: 2092 - DNA, 20 bp, Artificial Sequence
  Synthetic oligonucleotide; GGG chr11 5165140 5165159 5165156 +
gggcacagaaataagggatt

SEQ ID NO: 2093 - DNA, 20 bp, Artificial Sequence
  Synthetic oligonucleotide; GGG chr11 5165141 5165160 5165157 +
ggcacagaaataagggattg

SEQ ID NO: 2094 - DNA, 20 bp, Artificial Sequence
  Synthetic oligonucleotide; CAG chr11 5165154 5165173 5165170 +
gggattggggttcttgcccc

SEQ ID NO: 2095 - DNA, 20 bp, Artificial Sequence
  Synthetic oligonucleotide; AAG chr11 5165159 5165178 5165175 +
tggggttcttgcccccagaa

SEQ ID NO: 2096 - DNA, 20 bp, Artificial Sequence
  Synthetic oligonucleotide; CAG chr11 5165162 5165181 5165178 +
ggttcttgcccccagaaaag

SEQ ID NO: 2097 - DNA, 20 bp, Artificial Sequence
  Synthetic oligonucleotide; AAG chr11 5165167 5165186 5165183 +
ttgcccccagaaaagcagtg

SEQ ID NO: 2098 - DNA, 20 bp, Artificial Sequence
  Synthetic oligonucleotide; AGG chr11 5165168 5165187 5165184 +
tgcccccagaaaagcagtga

SEQ ID NO: 2099 - DNA, 20 bp, Artificial Sequence
  Synthetic oligonucleotide; GGG chr11 5165169 5165188 5165185 +
gcccccagaaaagcagtgaa

SEQ ID NO: 2100 - DNA, 20 bp, Artificial Sequence
  Synthetic oligonucleotide; GGG chr11 5165170 5165189 5165186 +
cccccagaaaagcagtgaag

SEQ ID NO: 2101 - DNA, 20 bp, Artificial Sequence
  Synthetic oligonucleotide; CAG chr11 5165173 5165192 5165189 +
ccagaaaagcagtgaagggg

SEQ ID NO: 2102 - DNA, 20 bp, Artificial Sequence
  Synthetic oligonucleotide; GAG chr11 5165175 5165194 5165191 +
agaaaagcagtgaaggggca

SEQ ID NO: 2103 - DNA, 20 bp, Artificial Sequence
  Synthetic oligonucleotide; TGG chr11 5165181 5165200 5165197 +
gcagtgaaggggcagagaca

SEQ ID NO: 2104 - DNA, 20 bp, Artificial Sequence
  Synthetic oligonucleotide; GAG chr11 5165183 5165202 5165199 +
agtgaaggggcagagacatg

SEQ ID NO: 2105 - DNA, 20 bp, Artificial Sequence
  Synthetic oligonucleotide; GAG chr11 5165185 5165204 5165201 +
tgaaggggcagagacatgga

SEQ ID NO: 2106 - DNA, 20 bp, Artificial Sequence
  Synthetic oligonucleotide; AAG chr11 5165188 5165207 5165204 +
aggggcagagacatggagag

SEQ ID NO: 2107 - DNA, 20 bp, Artificial Sequence
  Synthetic oligonucleotide; AGG chr11 5165189 5165208 5165205 +
ggggcagagacatggagaga

SEQ ID NO: 2108 - DNA, 20 bp, Artificial Sequence
  Synthetic oligonucleotide; GGG chr11 5165190 5165209 5165206 +
gggcagagacatggagagaa

SEQ ID NO: 2109 - DNA, 20 bp, Artificial Sequence
  Synthetic oligonucleotide; GGG chr11 5165191 5165210 5165207 +
ggcagagacatggagagaag

SEQ ID NO: 2110 - DNA, 20 bp, Artificial Sequence
  Synthetic oligonucleotide; TGG chr11 5165195 5165214 5165211 +
gagacatggagagaaggggt

SEQ ID NO: 2111 - DNA, 20 bp, Artificial Sequence
  Synthetic oligonucleotide; GGG chr11 5165196 5165215 5165212 +
agacatggagagaaggggtt

SEQ ID NO: 2112 - DNA, 20 bp, Artificial Sequence
  Synthetic oligonucleotide; GGG chr11 5165197 5165216 5165213 +
gacatggagagaaggggttg

SEQ ID NO: 2113 - DNA, 20 bp, Artificial Sequence
  Synthetic oligonucleotide; CAG chr11 5165214 5165233 5165230 +
ttggggtacttacccccctc

SEQ ID NO: 2114 - DNA, 20 bp, Artificial Sequence
  Synthetic oligonucleotide; AAG chr11 5165219 5165238 5165235 +
gtacttacccccctccagaa

SEQ ID NO: 2115 - DNA, 20 bp, Artificial Sequence
  Synthetic oligonucleotide; TGG chr11 5165222 5165241 5165238 +
cttacccccctccagaaaag

SEQ ID NO: 2116 - DNA, 20 bp, Artificial Sequence
  Synthetic oligonucleotide; GGG chr11 5165223 5165242 5165239 +
ttacccccctccagaaaagt

SEQ ID NO: 2117 - DNA, 20 bp, Artificial Sequence
  Synthetic oligonucleotide; AAG chr11 5165236 5165255 5165252 +
gaaaagtgggatttgccgct

SEQ ID NO: 2118 - DNA, 20 bp, Artificial Sequence
  Synthetic oligonucleotide; AGG chr11 5165237 5165256 5165253 +
aaaagtgggatttgccgcta

SEQ ID NO: 2119 - DNA, 20 bp, Artificial Sequence
  Synthetic oligonucleotide; GGG chr11 5165238 5165257 5165254 +
aaagtgggatttgccgctaa

SEQ ID NO: 2120 - DNA, 20 bp, Artificial Sequence
  Synthetic oligonucleotide; AAG chr11 5165243 5165262 5165259 +
gggatttgccgctaagggtg

SEQ ID NO: 2121 - DNA, 20 bp, Artificial Sequence
  Synthetic oligonucleotide; AGG chr11 5165244 5165263 5165260 +
ggatttgccgctaagggtga

SEQ ID NO: 2122 - DNA, 20 bp, Artificial Sequence
  Synthetic oligonucleotide; AAG chr11 5165250 5165269 5165266 +
gccgctaagggtgaaggacc

SEQ ID NO: 2123 - DNA, 20 bp, Artificial Sequence
  Synthetic oligonucleotide; AGG chr11 5165251 5165270 5165267 +
ccgctaagggtgaaggacca

SEQ ID NO: 2124 - DNA, 20 bp, Artificial Sequence
  Synthetic oligonucleotide; CAG chr11 5165254 5165273 5165270 +
ctaagggtgaaggaccaagg

SEQ ID NO: 2125 - DNA, 20 bp, Artificial Sequence
  Synthetic oligonucleotide; AGG chr11 5165255 5165274 5165271 +
taagggtgaaggaccaaggc

SEQ ID NO: 2126 - DNA, 20 bp, Artificial Sequence
  Synthetic oligonucleotide; TGG chr11 5165268 5165287 5165284 +
ccaaggcaggcatccctgcg

SEQ ID NO: 2127 - DNA, 20 bp, Artificial Sequence
  Synthetic oligonucleotide; TGG chr11 5165289 5165308 5165305 +
ggtctgacacctctgaaaca

SEQ ID NO: 2128 - DNA, 20 bp, Artificial Sequence
  Synthetic oligonucleotide; CAG chr11 5165301 5165320 5165317 +
ctgaaacatggtttaataat

SEQ ID NO: 2129 - DNA, 20 bp, Artificial Sequence
  Synthetic oligonucleotide; GAG chr11 5165303 5165322 5165319 +
gaaacatggtttaataatca

SEQ ID NO: 2130 - DNA, 20 bp, Artificial Sequence
  Synthetic oligonucleotide; GAG chr11 5165305 5165324 5165321 +
aacatggtttaataatcaga

SEQ ID NO: 2131 - DNA, 20 bp, Artificial Sequence
  Synthetic oligonucleotide; AGG chr11 5165306 5165325 5165322 +
acatggtttaataatcagag

SEQ ID NO: 2132 - DNA, 20 bp, Artificial Sequence
  Synthetic oligonucleotide; AAG chr11 5165332 5165351 5165348 +
ccctgcaatgattaaacacc

SEQ ID NO: 2133 - DNA, 20 bp, Artificial Sequence
  Synthetic oligonucleotide; AGG chr11 5165333 5165352 5165349 +
cctgcaatgattaaacacca

SEQ ID NO: 2134 - DNA, 20 bp, Artificial Sequence
  Synthetic oligonucleotide; GGG chr11 5165334 5165353 5165350 +
ctgcaatgattaaacaccaa

SEQ ID NO: 2135 - DNA, 20 bp, Artificial Sequence
  Synthetic oligonucleotide; AAG chr11 5165337 5165356 5165353 +
caatgattaaacaccaaggg

SEQ ID NO: 2136 - DNA, 20 bp, Artificial Sequence
  Synthetic oligonucleotide; AGG chr11 5165338 5165357 5165354 +
aatgattaaacaccaaggga

SEQ ID NO: 2137 - DNA, 20 bp, Artificial Sequence
  Synthetic oligonucleotide; CAG chr11 5165350 5165369 5165366 +
ccaagggaaggctgccttcc

SEQ ID NO: 2138 - DNA, 20 bp, Artificial Sequence
  Synthetic oligonucleotide; TGG chr11 5165361 5165380 5165377 +
ctgccttcccagtccgtgac

SEQ ID NO: 2139 - DNA, 20 bp, Artificial Sequence
  Synthetic oligonucleotide; CGG chr11 5165367 5165386 5165383 +
tcccagtccgtgactggcac

SEQ ID NO: 2140 - DNA, 20 bp, Artificial Sequence
  Synthetic oligonucleotide; GAG chr11 5165369 5165388 5165385 +
ccagtccgtgactggcaccg

SEQ ID NO: 2141 - DNA, 20 bp, Artificial Sequence
  Synthetic oligonucleotide; TGG chr11 5165375 5165394 5165391 +
cgtgactggcaccggagttt

SEQ ID NO: 2142 - DNA, 20 bp, Artificial Sequence
  Synthetic oligonucleotide; GGG chr11 5165376 5165395 5165392 +
gtgactggcaccggagtttt

SEQ ID NO: 2143 - DNA, 20 bp, Artificial Sequence
  Synthetic oligonucleotide; CGG chr11 5165383 5165402 5165399 +
gcaccggagttttgggtcca

SEQ ID NO: 2144 - DNA, 20 bp, Artificial Sequence
  Synthetic oligonucleotide; TGG chr11 5165412 5165431 5165428 +
catgtctcctttgtctctac

SEQ ID NO: 2145 - DNA, 20 bp, Artificial Sequence
  Synthetic oligonucleotide; AAG chr11 5165422 5165441 5165438 +
ttgtctctactggaaaatga

SEQ ID NO: 2146 - DNA, 20 bp, Artificial Sequence
  Synthetic oligonucleotide; AGG chr11 5165423 5165442 5165439 +
tgtctctactggaaaatgaa

SEQ ID NO: 2147 - DNA, 20 bp, Artificial Sequence
  Synthetic oligonucleotide; AAG chr11 5165436 5165455 5165452 +
aaatgaaaggaattgaaatt

SEQ ID NO: 2148 - DNA, 20 bp, Artificial Sequence
  Synthetic oligonucleotide; GAG chr11 5165438 5165457 5165454 +
atgaaaggaattgaaattaa

SEQ ID NO: 2149 - DNA, 20 bp, Artificial Sequence
  Synthetic oligonucleotide; AAG chr11 5165441 5165460 5165457 +
aaaggaattgaaattaagag

SEQ ID NO: 2150 - DNA, 20 bp, Artificial Sequence
  Synthetic oligonucleotide; AGG chr11 5165442 5165461 5165458 +
aaggaattgaaattaagaga

SEQ ID NO: 2151 - DNA, 20 bp, Artificial Sequence
  Synthetic oligonucleotide; GGG chr11 5165443 5165462 5165459 +
aggaattgaaattaagagaa

SEQ ID NO: 2152 - DNA, 20 bp, Artificial Sequence
  Synthetic oligonucleotide; GAG chr11 5165445 5165464 5165461 +
gaattgaaattaagagaagg

SEQ ID NO: 2153 - DNA, 20 bp, Artificial Sequence
  Synthetic oligonucleotide; AAG chr11 5165454 5165473 5165470 +
ttaagagaagggagaaattg

SEQ ID NO: 2154 - DNA, 20 bp, Artificial Sequence
  Synthetic oligonucleotide; TGG chr11 5165459 5165478 5165475 +
agaagggagaaattgaagtg

SEQ ID NO: 2155 - DNA, 20 bp, Artificial Sequence
  Synthetic oligonucleotide; AAG chr11 5165466 5165485 5165482 +
agaaattgaagtgtggtgcc

SEQ ID NO: 2156 - DNA, 20 bp, Artificial Sequence
  Synthetic oligonucleotide; AAG chr11 5165474 5165493 5165490 +
aagtgtggtgccaagattga

SEQ ID NO: 2157 - DNA, 20 bp, Artificial Sequence
  Synthetic oligonucleotide; AGG chr11 5165475 5165494 5165491 +
agtgtggtgccaagattgaa

SEQ ID NO: 2158 - DNA, 20 bp, Artificial Sequence
  Synthetic oligonucleotide; GAG chr11 5165477 5165496 5165493 +
tgtggtgccaagattgaaag

SEQ ID NO: 2159 - DNA, 20 bp, Artificial Sequence
  Synthetic oligonucleotide; AAG chr11 5165481 5165500 5165497 +
gtgccaagattgaaaggaga

SEQ ID NO: 2160 - DNA, 20 bp, Artificial Sequence
  Synthetic oligonucleotide; AAG chr11 5165484 5165503 5165500 +
ccaagattgaaaggagaaag

SEQ ID NO: 2161 - DNA, 20 bp, Artificial Sequence
  Synthetic oligonucleotide; GAG chr11 5165489 5165508 5165505 +
attgaaaggagaaagaagtt

SEQ ID NO: 2162 - DNA, 20 bp, Artificial Sequence
  Synthetic oligonucleotide; AGG chr11 5165490 5165509 5165506 +
ttgaaaggagaaagaagttg

SEQ ID NO: 2163 - DNA, 20 bp, Artificial Sequence
  Synthetic oligonucleotide; GGG chr11 5165491 5165510 5165507 +
tgaaaggagaaagaagttga

SEQ ID NO: 2164 - DNA, 20 bp, Artificial Sequence
  Synthetic oligonucleotide; TAG chr11 5165495 5165514 5165511 +
aggagaaagaagttgaggga

SEQ ID NO: 2165 - DNA, 20 bp, Artificial Sequence
  Synthetic oligonucleotide; GAG chr11 5165499 5165518 5165515 +
gaaagaagttgagggatagt

SEQ ID NO: 2166 - DNA, 20 bp, Artificial Sequence
  Synthetic oligonucleotide; AGG chr11 5165500 5165519 5165516 +
aaagaagttgagggatagtg

SEQ ID NO: 2167 - DNA, 20 bp, Artificial Sequence
  Synthetic oligonucleotide; GGG chr11 5165501 5165520 5165517 +
aagaagttgagggatagtga

SEQ ID NO: 2168 - DNA, 20 bp, Artificial Sequence
  Synthetic oligonucleotide; GAG chr11 5165503 5165522 5165519 +
gaagttgagggatagtgagg

SEQ ID NO: 2169 - DNA, 20 bp, Artificial Sequence
  Synthetic oligonucleotide; AGG chr11 5165504 5165523 5165520 +
aagttgagggatagtgaggg

SEQ ID NO: 2170 - DNA, 20 bp, Artificial Sequence
  Synthetic oligonucleotide; TGG chr11 5165508 5165527 5165524 +
tgagggatagtgagggaggt

SEQ ID NO: 2171 - DNA, 20 bp, Artificial Sequence
  Synthetic oligonucleotide; GAG chr11 5165510 5165529 5165526 +
agggatagtgagggaggttg

SEQ ID NO: 2172 - DNA, 20 bp, Artificial Sequence
  Synthetic oligonucleotide; AAG chr11 5165513 5165532 5165529 +
gatagtgagggaggttggag

SEQ ID NO: 2173 - DNA, 20 bp, Artificial Sequence
  Synthetic oligonucleotide; CAG chr11 5165517 5165536 5165533 +
gtgagggaggttggagaaga

SEQ ID NO: 2174 - DNA, 20 bp, Artificial Sequence
  Synthetic oligonucleotide; AAG chr11 5165524 5165543 5165540 +
aggttggagaagacagtaaa

SEQ ID NO: 2175 - DNA, 20 bp, Artificial Sequence
  Synthetic oligonucleotide; GAG chr11 5165526 5165545 5165542 +
gttggagaagacagtaaaaa

SEQ ID NO: 2176 - DNA, 20 bp, Artificial Sequence
  Synthetic oligonucleotide; AGG chr11 5165527 5165546 5165543 +
ttggagaagacagtaaaaag

SEQ ID NO: 2177 - DNA, 20 bp, Artificial Sequence
  Synthetic oligonucleotide; CGG chr11 5165538 5165557 5165554 +
agtaaaaagaggccacttac

SEQ ID NO: 2178 - DNA, 20 bp, Artificial Sequence
  Synthetic oligonucleotide; TGG chr11 5165550 5165569 5165566 +
ccacttaccggatttgaaat

SEQ ID NO: 2179 - DNA, 20 bp, Artificial Sequence
  Synthetic oligonucleotide; TGG chr11 5165565 5165584 5165581 +
gaaattggtgaaatgtttct

SEQ ID NO: 2180 - DNA, 20 bp, Artificial Sequence
  Synthetic oligonucleotide; GGG chr11 5165566 5165585 5165582 +
aaattggtgaaatgtttctt

SEQ ID NO: 2181 - DNA, 20 bp, Artificial Sequence
  Synthetic oligonucleotide; TGG chr11 5165570 5165589 5165586 +
tggtgaaatgtttcttgggc

SEQ ID NO: 2182 - DNA, 20 bp, Artificial Sequence
  Synthetic oligonucleotide; CAG chr11 5165574 5165593 5165590 +
gaaatgtttcttgggctggt

SEQ ID NO: 2183 - DNA, 20 bp, Artificial Sequence
  Synthetic oligonucleotide; GAG chr11 5165580 5165599 5165596 +
tttcttgggctggtcagttt

SEQ ID NO: 2184 - DNA, 20 bp, Artificial Sequence
  Synthetic oligonucleotide; AGG chr11 5165581 5165600 5165597 +
ttcttgggctggtcagtttg

SEQ ID NO: 2185 - DNA, 20 bp, Artificial Sequence
  Synthetic oligonucleotide; GAG chr11 5165588 5165607 5165604 +
gctggtcagtttgaggacct

SEQ ID NO: 2186 - DNA, 20 bp, Artificial Sequence
  Synthetic oligonucleotide; AGG chr11 5165589 5165608 5165605 +
ctggtcagtttgaggacctg

SEQ ID NO: 2187 - DNA, 20 bp, Artificial Sequence
  Synthetic oligonucleotide; TAG chr11 5165595 5165614 5165611 +
agtttgaggacctgaggtcg

SEQ ID NO: 2188 - DNA, 20 bp, Artificial Sequence
  Synthetic oligonucleotide; AGG chr11 5165596 5165615 5165612 +
gtttgaggacctgaggtcgt

SEQ ID NO: 2189 - DNA, 20 bp, Artificial Sequence
  Synthetic oligonucleotide; TGG chr11 5165599 5165618 5165615 +
tgaggacctgaggtcgtagg

SEQ ID NO: 2190 - DNA, 20 bp, Artificial Sequence
  Synthetic oligonucleotide; CGG chr11 5165612 5165631 5165628 +
tcgtaggtggatctttctca

SEQ ID NO: 2191 - DNA, 20 bp, Artificial Sequence
  Synthetic oligonucleotide; GAG chr11 5165614 5165633 5165630 +
gtaggtggatctttctcacg

SEQ ID NO: 2192 - DNA, 20 bp, Artificial Sequence
  Synthetic oligonucleotide; AAG chr11 5165619 5165638 5165635 +
tggatctttctcacggagca

SEQ ID NO: 2193 - DNA, 20 bp, Artificial Sequence
  Synthetic oligonucleotide; GAG chr11 5165621 5165640 5165637 +
gatctttctcacggagcaaa

SEQ ID NO: 2194 - DNA, 20 bp, Artificial Sequence
  Synthetic oligonucleotide; CAG chr11 5165624 5165643 5165640 +
ctttctcacggagcaaagag

SEQ ID NO: 2195 - DNA, 20 bp, Artificial Sequence
  Synthetic oligonucleotide; AGG chr11 5165625 5165644 5165641 +
tttctcacggagcaaagagc

SEQ ID NO: 2196 - DNA, 20 bp, Artificial Sequence
  Synthetic oligonucleotide; GAG chr11 5165627 5165646 5165643 +
tctcacggagcaaagagcag

SEQ ID NO: 2197 - DNA, 20 bp, Artificial Sequence
  Synthetic oligonucleotide; AGG chr11 5165628 5165647 5165644 +
ctcacggagcaaagagcagg

SEQ ID NO: 2198 - DNA, 20 bp, Artificial Sequence
  Synthetic oligonucleotide; CAG chr11 5165632 5165651 5165648 +
cggagcaaagagcaggagga

SEQ ID NO: 2199 - DNA, 20 bp, Artificial Sequence
  Synthetic oligonucleotide; AGG chr11 5165633 5165652 5165649 +
ggagcaaagagcaggaggac

SEQ ID NO: 2200 - DNA, 20 bp, Artificial Sequence
  Synthetic oligonucleotide; GGG chr11 5165634 5165653 5165650 +
gagcaaagagcaggaggaca

SEQ ID NO: 2201 - DNA, 20 bp, Artificial Sequence
  Synthetic oligonucleotide; GGG chr11 5165635 5165654 5165651 +
agcaaagagcaggaggacag

SEQ ID NO: 2202 - DNA, 20 bp, Artificial Sequence
  Synthetic oligonucleotide; AAG chr11 5165649 5165668 5165665 +
ggacaggggattgatctccc

SEQ ID NO: 2203 - DNA, 20 bp, Artificial Sequence
  Synthetic oligonucleotide; AGG chr11 5165650 5165669 5165666 +
gacaggggattgatctccca

SEQ ID NO: 2204 - DNA, 20 bp, Artificial Sequence
  Synthetic oligonucleotide; GGG chr11 5165651 5165670 5165667 +
acaggggattgatctcccaa

SEQ ID NO: 2205 - DNA, 20 bp, Artificial Sequence
  Synthetic oligonucleotide; GAG chr11 5165653 5165672 5165669 +
aggggattgatctcccaagg

SEQ ID NO: 2206 - DNA, 20 bp, Artificial Sequence
  Synthetic oligonucleotide; AGG chr11 5165654 5165673 5165670 +
ggggattgatctcccaaggg

SEQ ID NO: 2207 - DNA, 20 bp, Artificial Sequence
  Synthetic oligonucleotide; GAG chr11 5165668 5165687 5165684 +
caagggaggtcccccaatct

SEQ ID NO: 2208 - DNA, 20 bp, Artificial Sequence
  Synthetic oligonucleotide; CGG chr11 5165674 5165693 5165690 +
aggtcccccaatctgagtca

SEQ ID NO: 2209 - DNA, 20 bp, Artificial Sequence
  Synthetic oligonucleotide; AAG chr11 5165703 5165722 5165719 +
atttcatgcgcgtccatatg

SEQ ID NO: 2210 - DNA, 20 bp, Artificial Sequence
  Synthetic oligonucleotide; GAG chr11 5165705 5165724 5165721 +
ttcatgcgcgtccatatgaa

SEQ ID NO: 2211 - DNA, 20 bp, Artificial Sequence
  Synthetic oligonucleotide; CAG chr11 5165717 5165736 5165733 +
catatgaagagactaccaaa

SEQ ID NO: 2212 - DNA, 20 bp, Artificial Sequence
  Synthetic oligonucleotide; AGG chr11 5165718 5165737 5165734 +
atatgaagagactaccaaac

SEQ ID NO: 2213 - DNA, 20 bp, Artificial Sequence
  Synthetic oligonucleotide; AAG chr11 5165729 5165748 5165745 +
ctaccaaacaggctttgtgt

SEQ ID NO: 2214 - DNA, 20 bp, Artificial Sequence
  Synthetic oligonucleotide; AAG chr11 5165736 5165755 5165752 +
acaggctttgtgtaagcaac

SEQ ID NO: 2215 - DNA, 20 bp, Artificial Sequence
  Synthetic oligonucleotide; AGG chr11 5165737 5165756 5165753 +
caggctttgtgtaagcaaca

SEQ ID NO: 2216 - DNA, 20 bp, Artificial Sequence
  Synthetic oligonucleotide; TGG chr11 5165754 5165773 5165770 +
acaaggctgtttatttcacc

SEQ ID NO: 2217 - DNA, 20 bp, Artificial Sequence
  Synthetic oligonucleotide; GGG chr11 5165755 5165774 5165771 +
caaggctgtttatttcacct

SEQ ID NO: 2218 - DNA, 20 bp, Artificial Sequence
  Synthetic oligonucleotide; CAG chr11 5165760 5165779 5165776 +
ctgtttatttcacctgggtg

SEQ ID NO: 2219 - DNA, 20 bp, Artificial Sequence
  Synthetic oligonucleotide; AGG chr11 5165761 5165780 5165777 +
tgtttatttcacctgggtgc

SEQ ID NO: 2220 - DNA, 20 bp, Artificial Sequence
  Synthetic oligonucleotide; CAG chr11 5165764 5165783 5165780 +
ttatttcacctgggtgcagg

SEQ ID NO: 2221 - DNA, 20 bp, Artificial Sequence
  Synthetic oligonucleotide; AGG chr11 5165765 5165784 5165781 +
tatttcacctgggtgcaggc

SEQ ID NO: 2222 - DNA, 20 bp, Artificial Sequence
  Synthetic oligonucleotide; GAG chr11 5165770 5165789 5165786 +
cacctgggtgcaggcaggct

SEQ ID NO: 2223 - DNA, 20 bp, Artificial Sequence
  Synthetic oligonucleotide; AAG chr11 5165779 5165798 5165795 +
gcaggcaggctgagtccaaa

SEQ ID NO: 2224 - DNA, 20 bp, Artificial Sequence
  Synthetic oligonucleotide; GAG chr11 5165781 5165800 5165797 +
aggcaggctgagtccaaaaa

SEQ ID NO: 2225 - DNA, 20 bp, Artificial Sequence
  Synthetic oligonucleotide; GAG chr11 5165783 5165802 5165799 +
gcaggctgagtccaaaaaga

SEQ ID NO: 2226 - DNA, 20 bp, Artificial Sequence
  Synthetic oligonucleotide; CAG chr11 5165787 5165806 5165803 +
gctgagtccaaaaagagagt

SEQ ID NO: 2227 - DNA, 20 bp, Artificial Sequence
  Synthetic oligonucleotide; AAG chr11 5165792 5165811 5165808 +
gtccaaaaagagagtcagca

SEQ ID NO: 2228 - DNA, 20 bp, Artificial Sequence
  Synthetic oligonucleotide; AGG chr11 5165793 5165812 5165809 +
tccaaaaagagagtcagcaa

SEQ ID NO: 2229 - DNA, 20 bp, Artificial Sequence
  Synthetic oligonucleotide; GGG chr11 5165794 5165813 5165810 +
ccaaaaagagagtcagcaaa

SEQ ID NO: 2230 - DNA, 20 bp, Artificial Sequence
  Synthetic oligonucleotide; GAG chr11 5165796 5165815 5165812 +
aaaaagagagtcagcaaagg

SEQ ID NO: 2231 - DNA, 20 bp, Artificial Sequence
  Synthetic oligonucleotide; TAG chr11 5165800 5165819 5165816 +
agagagtcagcaaagggaga

SEQ ID NO: 2232 - DNA, 20 bp, Artificial Sequence
  Synthetic oligonucleotide; AGG chr11 5165801 5165820 5165817 +
gagagtcagcaaagggagat

SEQ ID NO: 2233 - DNA, 20 bp, Artificial Sequence
  Synthetic oligonucleotide; GAG chr11 5165803 5165822 5165819 +
gagtcagcaaagggagatag

SEQ ID NO: 2234 - DNA, 20 bp, Artificial Sequence
  Synthetic oligonucleotide; TGG chr11 5165806 5165825 5165822 +
tcagcaaagggagataggag

SEQ ID NO: 2235 - DNA, 20 bp, Artificial Sequence
  Synthetic oligonucleotide; GGG chr11 5165807 5165826 5165823 +
cagcaaagggagataggagt

SEQ ID NO: 2236 - DNA, 20 bp, Artificial Sequence
  Synthetic oligonucleotide; GGG chr11 5165808 5165827 5165824 +
agcaaagggagataggagtg

SEQ ID NO: 2237 - DNA, 20 bp, Artificial Sequence
  Synthetic oligonucleotide; AAG chr11 5165820 5165839 5165836 +
taggagtggggctgttttat

SEQ ID NO: 2238 - DNA, 20 bp, Artificial Sequence
  Synthetic oligonucleotide; TGG chr11 5165826 5165845 5165842 +
tggggctgttttataagatt

SEQ ID NO: 2239 - DNA, 20 bp, Artificial Sequence
  Synthetic oligonucleotide; GGG chr11 5165827 5165846 5165843 +
ggggctgttttataagattt

SEQ ID NO: 2240 - DNA, 20 bp, Artificial Sequence
  Synthetic oligonucleotide; TAG chr11 5165830 5165849 5165846 +
gctgttttataagatttggg

SEQ ID NO: 2241 - DNA, 20 bp, Artificial Sequence
  Synthetic oligonucleotide; AGG chr11 5165831 5165850 5165847 +
ctgttttataagatttgggt

SEQ ID NO: 2242 - DNA, 20 bp, Artificial Sequence
  Synthetic oligonucleotide; AAG chr11 5165836 5165855 5165852 +
ttataagatttgggtaggta

SEQ ID NO: 2243 - DNA, 20 bp, Artificial Sequence
  Synthetic oligonucleotide; AGG chr11 5165837 5165856 5165853 +
tataagatttgggtaggtaa

SEQ ID NO: 2244 - DNA, 20 bp, Artificial Sequence
  Synthetic oligonucleotide; CAG chr11 5165847 5165866 5165863 +
gggtaggtaaaggaaaatta

SEQ ID NO: 2245 - DNA, 20 bp, Artificial Sequence
  Synthetic oligonucleotide; AAG chr11 5165853 5165872 5165869 +
gtaaaggaaaattacagtca

SEQ ID NO: 2246 - DNA, 20 bp, Artificial Sequence
  Synthetic oligonucleotide; AGG chr11 5165854 5165873 5165870 +
taaaggaaaattacagtcaa

SEQ ID NO: 2247 - DNA, 20 bp, Artificial Sequence
  Synthetic oligonucleotide; GGG chr11 5165855 5165874 5165871 +
aaaggaaaattacagtcaaa

SEQ ID NO: 2248 - DNA, 20 bp, Artificial Sequence
  Synthetic oligonucleotide; GGG chr11 5165856 5165875 5165872 +
aaggaaaattacagtcaaag

SEQ ID NO: 2249 - DNA, 20 bp, Artificial Sequence
  Synthetic oligonucleotide; GGG chr11 5165857 5165876 5165873 +
aggaaaattacagtcaaagg

SEQ ID NO: 2250 - DNA, 20 bp, Artificial Sequence
  Synthetic oligonucleotide; GGG chr11 5165858 5165877 5165874 +
ggaaaattacagtcaaaggg

SEQ ID NO: 2251 - DNA, 20 bp, Artificial Sequence
  Synthetic oligonucleotide; TGG chr11 5165869 5165888 5165885 +
gtcaaaggggggttgttctc

SEQ ID NO: 2252 - DNA, 20 bp, Artificial Sequence
  Synthetic oligonucleotide; CGG chr11 5165872 5165891 5165888 +
aaaggggggttgttctctgg

SEQ ID NO: 2253 - DNA, 20 bp, Artificial Sequence
  Synthetic oligonucleotide; GGG chr11 5165873 5165892 5165889 +
aaggggggttgttctctggc

SEQ ID NO: 2254 - DNA, 20 bp, Artificial Sequence
  Synthetic oligonucleotide; CAG chr11 5165876 5165895 5165892 +
gggggttgttctctggcggg

SEQ ID NO: 2255 - DNA, 20 bp, Artificial Sequence
  Synthetic oligonucleotide; AGG chr11 5165877 5165896 5165893 +
ggggttgttctctggcgggc

SEQ ID NO: 2256 - DNA, 20 bp, Artificial Sequence
  Synthetic oligonucleotide; GAG chr11 5165879 5165898 5165895 +
ggttgttctctggcgggcag

SEQ ID NO: 2257 - DNA, 20 bp, Artificial Sequence
  Synthetic oligonucleotide; TGG chr11 5165882 5165901 5165898 +
tgttctctggcgggcaggag

SEQ ID NO: 2258 - DNA, 20 bp, Artificial Sequence
  Synthetic oligonucleotide; GGG chr11 5165883 5165902 5165899 +
gttctctggcgggcaggagt

SEQ ID NO: 2259 - DNA, 20 bp, Artificial Sequence
  Synthetic oligonucleotide; GGG chr11 5165884 5165903 5165900 +
ttctctggcgggcaggagtg

SEQ ID NO: 2260 - DNA, 20 bp, Artificial Sequence
  Synthetic oligonucleotide; GGG chr11 5165885 5165904 5165901 +
tctctggcgggcaggagtgg

SEQ ID NO: 2261 - DNA, 20 bp, Artificial Sequence
  Synthetic oligonucleotide; AAG chr11 5165892 5165911 5165908 +
cgggcaggagtgggggtcac

SEQ ID NO: 2262 - DNA, 20 bp, Artificial Sequence
  Synthetic oligonucleotide; AGG chr11 5165893 5165912 5165909 +
gggcaggagtgggggtcaca

SEQ ID NO: 2263 - DNA, 20 bp, Artificial Sequence
  Synthetic oligonucleotide; CAG chr11 5165900 5165919 5165916 +
agtgggggtcacaaggtgct

SEQ ID NO: 2264 - DNA, 20 bp, Artificial Sequence
  Synthetic oligonucleotide; TAG chr11 5165903 5165922 5165919 +
gggggtcacaaggtgctcag

SEQ ID NO: 2265 - DNA, 20 bp, Artificial Sequence
  Synthetic oligonucleotide; AGG chr11 5165904 5165923 5165920 +
ggggtcacaaggtgctcagt

SEQ ID NO: 2266 - DNA, 20 bp, Artificial Sequence
  Synthetic oligonucleotide; GGG chr11 5165905 5165924 5165921 +
gggtcacaaggtgctcagta

SEQ ID NO: 2267 - DNA, 20 bp, Artificial Sequence
  Synthetic oligonucleotide; GGG chr11 5165906 5165925 5165922 +
ggtcacaaggtgctcagtag

SEQ ID NO: 2268 - DNA, 20 bp, Artificial Sequence
  Synthetic oligonucleotide; GAG chr11 5165908 5165927 5165924 +
tcacaaggtgctcagtaggg

SEQ ID NO: 2269 - DNA, 20 bp, Artificial Sequence
  Synthetic oligonucleotide; GAG chr11 5165916 5165935 5165932 +
tgctcagtaggggagctttt

SEQ ID NO: 2270 - DNA, 20 bp, Artificial Sequence
  Synthetic oligonucleotide; CAG chr11 5165920 5165939 5165936 +
cagtaggggagcttttgagc

SEQ ID NO: 2271 - DNA, 20 bp, Artificial Sequence
  Synthetic oligonucleotide; AGG chr11 5165921 5165940 5165937 +
agtaggggagcttttgagcc

SEQ ID NO: 2272 - DNA, 20 bp, Artificial Sequence
  Synthetic oligonucleotide; GAG chr11 5165926 5165945 5165942 +
gggagcttttgagccaggat

SEQ ID NO: 2273 - DNA, 20 bp, Artificial Sequence
  Synthetic oligonucleotide; CAG chr11 5165930 5165949 5165946 +
gcttttgagccaggatgagc

SEQ ID NO: 2274 - DNA, 20 bp, Artificial Sequence
  Synthetic oligonucleotide; AGG chr11 5165931 5165950 5165947 +
cttttgagccaggatgagcc

SEQ ID NO: 2275 - DNA, 20 bp, Artificial Sequence
  Synthetic oligonucleotide; GAG chr11 5165933 5165952 5165949 +
tttgagccaggatgagccag

SEQ ID NO: 2276 - DNA, 20 bp, Artificial Sequence
  Synthetic oligonucleotide; AAG chr11 5165936 5165955 5165952 +
gagccaggatgagccaggag

SEQ ID NO: 2277 - DNA, 20 bp, Artificial Sequence
  Synthetic oligonucleotide; AGG chr11 5165937 5165956 5165953 +
agccaggatgagccaggaga

SEQ ID NO: 2278 - DNA, 20 bp, Artificial Sequence
  Synthetic oligonucleotide; AAG chr11 5165948 5165967 5165964 +
gccaggagaaggaatttcac

SEQ ID NO: 2279 - DNA, 20 bp, Artificial Sequence
  Synthetic oligonucleotide; CAG chr11 5165961 5165980 5165977 +
atttcacaagacaatgtcat

SEQ ID NO: 2280 - DNA, 20 bp, Artificial Sequence
  Synthetic oligonucleotide; AAG chr11 5165966 5165985 5165982 +
acaagacaatgtcatcagtt

SEQ ID NO: 2281 - DNA, 20 bp, Artificial Sequence
  Synthetic oligonucleotide; AGG chr11 5165967 5165986 5165983 +
caagacaatgtcatcagtta

SEQ ID NO: 2282 - DNA, 20 bp, Artificial Sequence
  Synthetic oligonucleotide; CAG chr11 5165970 5165989 5165986 +
gacaatgtcatcagttaagg

SEQ ID NO: 2283 - DNA, 20 bp, Artificial Sequence
  Synthetic oligonucleotide; AGG chr11 5165971 5165990 5165987 +
acaatgtcatcagttaaggc

SEQ ID NO: 2284 - DNA, 20 bp, Artificial Sequence
  Synthetic oligonucleotide; CAG chr11 5165976 5165995 5165992 +
gtcatcagttaaggcaggaa

SEQ ID NO: 2285 - DNA, 20 bp, Artificial Sequence
  Synthetic oligonucleotide; AGG chr11 5165977 5165996 5165993 +
tcatcagttaaggcaggaac

SEQ ID NO: 2286 - DNA, 20 bp, Artificial Sequence
  Synthetic oligonucleotide; TGG chr11 5165998 5166017 5166014 +
ggccattttcacttcttttg

SEQ ID NO: 2287 - DNA, 20 bp, Artificial Sequence
  Synthetic oligonucleotide; TGG chr11 5166001 5166020 5166017 +
cattttcacttcttttgtgg

SEQ ID NO: 2288 - DNA, 20 bp, Artificial Sequence
  Synthetic oligonucleotide; CAG chr11 5166012 5166031 5166028 +
cttttgtggtggaatgtcat

SEQ ID NO: 2289 - DNA, 20 bp, Artificial Sequence
  Synthetic oligonucleotide; AAG chr11 5166017 5166036 5166033 +
gtggtggaatgtcatcagtt

SEQ ID NO: 2290 - DNA, 20 bp, Artificial Sequence
  Synthetic oligonucleotide; AGG chr11 5166018 5166037 5166034 +
tggtggaatgtcatcagtta

SEQ ID NO: 2291 - DNA, 20 bp, Artificial Sequence
  Synthetic oligonucleotide; CAG chr11 5166021 5166040 5166037 +
tggaatgtcatcagttaagg

SEQ ID NO: 2292 - DNA, 20 bp, Artificial Sequence
  Synthetic oligonucleotide; TGG chr11 5166028 5166047 5166044 +
tcatcagttaaggcagaaac

SEQ ID NO: 2293 - DNA, 20 bp, Artificial Sequence
  Synthetic oligonucleotide; CAG chr11 5166050 5166069 5166066 +
gccatctgtatgtgtatatg

SEQ ID NO: 2294 - DNA, 20 bp, Artificial Sequence
  Synthetic oligonucleotide; AGG chr11 5166051 5166070 5166067 +
ccatctgtatgtgtatatgc

SEQ ID NO: 2295 - DNA, 20 bp, Artificial Sequence
  Synthetic oligonucleotide; CAG chr11 5166057 5166076 5166073 +
gtatgtgtatatgcaggtca

SEQ ID NO: 2296 - DNA, 20 bp, Artificial Sequence
  Synthetic oligonucleotide; AGG chr11 5166058 5166077 5166074 +
tatgtgtatatgcaggtcac

SEQ ID NO: 2297 - DNA, 20 bp, Artificial Sequence
  Synthetic oligonucleotide; GGG chr11 5166059 5166078 5166075 +
atgtgtatatgcaggtcaca

SEQ ID NO: 2298 - DNA, 20 bp, Artificial Sequence
  Synthetic oligonucleotide; GGG chr11 5166060 5166079 5166076 +
tgtgtatatgcaggtcacag

SEQ ID NO: 2299 - DNA, 20 bp, Artificial Sequence
  Synthetic oligonucleotide; TGG chr11 5166069 5166088 5166085 +
gcaggtcacaggggacatga

SEQ ID NO: 2300 - DNA, 20 bp, Artificial Sequence
  Synthetic oligonucleotide; TAG chr11 5166074 5166093 5166090 +
tcacaggggacatgatggct

SEQ ID NO: 2301 - DNA, 20 bp, Artificial Sequence
  Synthetic oligonucleotide; TGG chr11 5166079 5166098 5166095 +
ggggacatgatggcttagct

SEQ ID NO: 2302 - DNA, 20 bp, Artificial Sequence
  Synthetic oligonucleotide; GGG chr11 5166080 5166099 5166096 +
gggacatgatggcttagctt

SEQ ID NO: 2303 - DNA, 20 bp, Artificial Sequence
  Synthetic oligonucleotide; CAG chr11 5166085 5166104 5166101 +
atgatggcttagcttgggct

SEQ ID NO: 2304 - DNA, 20 bp, Artificial Sequence
  Synthetic oligonucleotide; GAG chr11 5166087 5166106 5166103 +
gatggcttagcttgggctca

SEQ ID NO: 2305 - DNA, 20 bp, Artificial Sequence
  Synthetic oligonucleotide; AGG chr11 5166088 5166107 5166104 +
atggcttagcttgggctcag

SEQ ID NO: 2306 - DNA, 20 bp, Artificial Sequence
  Synthetic oligonucleotide; CAG chr11 5166100 5166119 5166116 +
gggctcagaggcctgacatt

SEQ ID NO: 2307 - DNA, 20 bp, Artificial Sequence
  Synthetic oligonucleotide; AGG chr11 5166101 5166120 5166117 +
ggctcagaggcctgacattc

SEQ ID NO: 2308 - DNA, 20 bp, Artificial Sequence
  Synthetic oligonucleotide; GAG chr11 5166103 5166122 5166119 +
ctcagaggcctgacattcag

SEQ ID NO: 2309 - DNA, 20 bp, Artificial Sequence
  Synthetic oligonucleotide; TAG chr11 5166166 5166185 5166182 +
atcttcttgttattcatttc

SEQ ID NO: 2310 - DNA, 20 bp, Artificial Sequence
  Synthetic oligonucleotide; TGG chr11 5166182 5166201 5166198 +
tttctagttttattccactg

SEQ ID NO: 2311 - DNA, 20 bp, Artificial Sequence
  Synthetic oligonucleotide; CAG chr11 5166186 5166205 5166202 +
tagttttattccactgtggt

SEQ ID NO: 2312 - DNA, 20 bp, Artificial Sequence
  Synthetic oligonucleotide; TGG chr11 5166243 5166262 5166259 +
atttgtacaaacttaccttg

SEQ ID NO: 2313 - DNA, 20 bp, Artificial Sequence
  Synthetic oligonucleotide; TGG chr11 5166255 5166274 5166271 +
ttaccttgtggcctaacata

SEQ ID NO: 2314 - DNA, 20 bp, Artificial Sequence
  Synthetic oligonucleotide; TAG chr11 5166265 5166284 5166281 +
gcctaacatatggccttatt

SEQ ID NO: 2315 - DNA, 20 bp, Artificial Sequence
  Synthetic oligonucleotide; AGG chr11 5166266 5166285 5166282 +
cctaacatatggccttattt

SEQ ID NO: 2316 - DNA, 20 bp, Artificial Sequence
  Synthetic oligonucleotide; AAG chr11 5166292 5166311 5166308 +
atgttgtacatgctgcttta

SEQ ID NO: 2317 - DNA, 20 bp, Artificial Sequence
  Synthetic oligonucleotide; CAG chr11 5166309 5166328 5166325 +
ttaaagaaatgtatcttctt

SEQ ID NO: 2318 - DNA, 20 bp, Artificial Sequence
  Synthetic oligonucleotide; CAG chr11 5166312 5166331 5166328 +
aagaaatgtatcttcttcag

SEQ ID NO: 2319 - DNA, 20 bp, Artificial Sequence
  Synthetic oligonucleotide; TGG chr11 5166316 5166335 5166332 +
aatgtatcttcttcagcagt

SEQ ID NO: 2320 - DNA, 20 bp, Artificial Sequence
  Synthetic oligonucleotide; GGG chr11 5166317 5166336 5166333 +
atgtatcttcttcagcagtt

SEQ ID NO: 2321 - DNA, 20 bp, Artificial Sequence
  Synthetic oligonucleotide; GGG chr11 5166318 5166337 5166334 +
tgtatcttcttcagcagttg

SEQ ID NO: 2322 - DNA, 20 bp, Artificial Sequence
  Synthetic oligonucleotide; GGG chr11 5166319 5166338 5166335 +
gtatcttcttcagcagttgg

SEQ ID NO: 2323 - DNA, 20 bp, Artificial Sequence
  Synthetic oligonucleotide; AAG chr11 5166324 5166343 5166340 +
ttcttcagcagttgggggac

SEQ ID NO: 2324 - DNA, 20 bp, Artificial Sequence
  Synthetic oligonucleotide; CAG chr11 5166339 5166358 5166355 +
gggacaagttctgttaatgt

SEQ ID NO: 2325 - DNA, 20 bp, Artificial Sequence
  Synthetic oligonucleotide; TGG chr11 5166343 5166362 5166359 +
caagttctgttaatgtcagt

SEQ ID NO: 2326 - DNA, 20 bp, Artificial Sequence
  Synthetic oligonucleotide; GGG chr11 5166344 5166363 5166360 +
aagttctgttaatgtcagtt

SEQ ID NO: 2327 - DNA, 20 bp, Artificial Sequence
  Synthetic oligonucleotide; TAG chr11 5166352 5166371 5166368 +
ttaatgtcagttgggtctat

SEQ ID NO: 2328 - DNA, 20 bp, Artificial Sequence
  Synthetic oligonucleotide; TAG chr11 5166358 5166377 5166374 +
tcagttgggtctattagata

SEQ ID NO: 2329 - DNA, 20 bp, Artificial Sequence
  Synthetic oligonucleotide; TGG chr11 5166361 5166380 5166377 +
gttgggtctattagatatag

SEQ ID NO: 2330 - DNA, 20 bp, Artificial Sequence
  Synthetic oligonucleotide; GGG chr11 5166362 5166381 5166378 +
ttgggtctattagatatagt

SEQ ID NO: 2331 - DNA, 20 bp, Artificial Sequence
  Synthetic oligonucleotide; TAG chr11 5166397 5166416 5166413 +
gttgttcatttgttgatttt

SEQ ID NO: 2332 - DNA, 20 bp, Artificial Sequence
  Synthetic oligonucleotide; TGG chr11 5166402 5166421 5166418 +
tcatttgttgatttttagtc

SEQ ID NO: 2333 - DNA, 20 bp, Artificial Sequence
  Synthetic oligonucleotide; GAG chr11 5166422 5166441 5166438 +
tggccgatctgttcattact

SEQ ID NO: 2334 - DNA, 20 bp, Artificial Sequence
  Synthetic oligonucleotide; AAG chr11 5166429 5166448 5166445 +
tctgttcattactgagactg

SEQ ID NO: 2335 - DNA, 20 bp, Artificial Sequence
  Synthetic oligonucleotide; AAG chr11 5166438 5166457 5166454 +
tactgagactgaagtgttta

SEQ ID NO: 2336 - DNA, 20 bp, Artificial Sequence
  Synthetic oligonucleotide; CAG chr11 5166462 5166481 5166478 +
tccctactattattgtattg

SEQ ID NO: 2337 - DNA, 20 bp, Artificial Sequence
  Synthetic oligonucleotide; TAG chr11 5166479 5166498 5166495 +
ttgcagtctgtctcgccctt

SEQ ID NO: 2338 - DNA, 20 bp, Artificial Sequence
  Synthetic oligonucleotide; AGG chr11 5166480 5166499 5166496 +
tgcagtctgtctcgcccttt

SEQ ID NO: 2339 - DNA, 20 bp, Artificial Sequence
  Synthetic oligonucleotide; TGG chr11 5166508 5166527 5166524 +
taatgttttccttatatact

SEQ ID NO: 2340 - DNA, 20 bp, Artificial Sequence
  Synthetic oligonucleotide; GGG chr11 5166509 5166528 5166525 +
aatgttttccttatatactt

SEQ ID NO: 2341 - DNA, 20 bp, Artificial Sequence
  Synthetic oligonucleotide; TGG chr11 5166523 5166542 5166539 +
atacttgggaactttgatgt

SEQ ID NO: 2342 - DNA, 20 bp, Artificial Sequence
  Synthetic oligonucleotide; CAG chr11 5166582 5166601 5166598 +
ttgacccctttattattata

SEQ ID NO: 2343 - DNA, 20 bp, Artificial Sequence
  Synthetic oligonucleotide; CAG chr11 5166607 5166626 5166623 +
accctccttatcttttctta

SEQ ID NO: 2344 - DNA, 20 bp, Artificial Sequence
  Synthetic oligonucleotide; TAG chr11 5166622 5166641 5166638 +
tcttacagtttttaaatttg

SEQ ID NO: 2345 - DNA, 20 bp, Artificial Sequence
  Synthetic oligonucleotide; AAG chr11 5166642 5166661 5166658 +
tagtctattttatctgattt

SEQ ID NO: 2346 - DNA, 20 bp, Artificial Sequence
  Synthetic oligonucleotide; TGG chr11 5166666 5166685 5166682 +
acaattactactgctctttc

SEQ ID NO: 2347 - DNA, 20 bp, Artificial Sequence
  Synthetic oligonucleotide; CAG chr11 5166673 5166692 5166689 +
ctactgctctttctggtttc

SEQ ID NO: 2348 - DNA, 20 bp, Artificial Sequence
  Synthetic oligonucleotide; TGG chr11 5166680 5166699 5166696 +
tctttctggtttccagttca

SEQ ID NO: 2349 - DNA, 20 bp, Artificial Sequence
  Synthetic oligonucleotide; TAG chr11 5166725 5166744 5166741 +
ttcatttatgtgtgccttta

SEQ ID NO: 2350 - DNA, 20 bp, Artificial Sequence
  Synthetic oligonucleotide; AGG chr11 5166726 5166745 5166742 +
tcatttatgtgtgcctttat

SEQ ID NO: 2351 - DNA, 20 bp, Artificial Sequence
  Synthetic oligonucleotide; AAG chr11 5166731 5166750 5166747 +
tatgtgtgcctttataggtg

SEQ ID NO: 2352 - DNA, 20 bp, Artificial Sequence
  Synthetic oligonucleotide; TGG chr11 5166734 5166753 5166750 +
gtgtgcctttataggtgaag

SEQ ID NO: 2353 - DNA, 20 bp, Artificial Sequence
  Synthetic oligonucleotide; GGG chr11 5166735 5166754 5166751 +
tgtgcctttataggtgaagt

SEQ ID NO: 2354 - DNA, 20 bp, Artificial Sequence
  Synthetic oligonucleotide; AAG chr11 5166745 5166764 5166761 +
taggtgaagtgggtttcttg

SEQ ID NO: 2355 - DNA, 20 bp, Artificial Sequence
  Synthetic oligonucleotide; AAG chr11 5166756 5166775 5166772 +
ggtttcttgaagatcgcata

SEQ ID NO: 2356 - DNA, 20 bp, Artificial Sequence
  Synthetic oligonucleotide; TGG chr11 5166760 5166779 5166776 +
tcttgaagatcgcataaagt

SEQ ID NO: 2357 - DNA, 20 bp, Artificial Sequence
  Synthetic oligonucleotide; TGG chr11 5166804 5166823 5166820 +
accattctattacttttaat

SEQ ID NO: 2358 - DNA, 20 bp, Artificial Sequence
  Synthetic oligonucleotide; GGG chr11 5166805 5166824 5166821 +
ccattctattacttttaatt

SEQ ID NO: 2359 - DNA, 20 bp, Artificial Sequence
  Synthetic oligonucleotide; GGG chr11 5166806 5166825 5166822 +
cattctattacttttaattg

SEQ ID NO: 2360 - DNA, 20 bp, Artificial Sequence
  Synthetic oligonucleotide; GAG chr11 5166813 5166832 5166829 +
ttacttttaattggggaact

SEQ ID NO: 2361 - DNA, 20 bp, Artificial Sequence
  Synthetic oligonucleotide; CAG chr11 5166828 5166847 5166844 +
gaactgagactatttacact

SEQ ID NO: 2362 - DNA, 20 bp, Artificial Sequence
  Synthetic oligonucleotide; TAG chr11 5166833 5166852 5166849 +
gagactatttacactcagtg

SEQ ID NO: 2363 - DNA, 20 bp, Artificial Sequence
  Synthetic oligonucleotide; AAG chr11 5166841 5166860 5166857 +
ttacactcagtgtagttact

SEQ ID NO: 2364 - DNA, 20 bp, Artificial Sequence
  Synthetic oligonucleotide; AAG chr11 5166845 5166864 5166861 +
actcagtgtagttactaagt

SEQ ID NO: 2365 - DNA, 20 bp, Artificial Sequence
  Synthetic oligonucleotide; AGG chr11 5166846 5166865 5166862 +
ctcagtgtagttactaagta

SEQ ID NO: 2366 - DNA, 20 bp, Artificial Sequence
  Synthetic oligonucleotide; TGG chr11 5166889 5166908 5166905 +
tttttttttttgcttatttt

SEQ ID NO: 2367 - DNA, 20 bp, Artificial Sequence
  Synthetic oligonucleotide; TGG chr11 5166897 5166916 5166913 +
tttgcttatttttggctgta

SEQ ID NO: 2368 - DNA, 20 bp, Artificial Sequence
  Synthetic oligonucleotide; GAG chr11 5166899 5166918 5166915 +
tgcttatttttggctgtatg

SEQ ID NO: 2369 - DNA, 20 bp, Artificial Sequence
  Synthetic oligonucleotide; TGG chr11 5166929 5166948 5166945 +
tcttccttttttttccttca

SEQ ID NO: 2370 - DNA, 20 bp, Artificial Sequence
  Synthetic oligonucleotide; TGG chr11 5166947 5166966 5166963 +
catggttatgtgattatctc

SEQ ID NO: 2371 - DNA, 20 bp, Artificial Sequence
  Synthetic oligonucleotide; TAG chr11 5166950 5166969 5166966 +
ggttatgtgattatctctgg

SEQ ID NO: 2372 - DNA, 20 bp, Artificial Sequence
  Synthetic oligonucleotide; TAG chr11 5166981 5167000 5166997 +
aatttgttactttttatttt

SEQ ID NO: 2373 - DNA, 20 bp, Artificial Sequence
  Synthetic oligonucleotide; TAG chr11 5166995 5167014 5167011 +
tatttttagtaaatctatta

SEQ ID NO: 2374 - DNA, 20 bp, Artificial Sequence
  Synthetic oligonucleotide; TGG chr11 5167010 5167029 5167026 +
tattatagatttttgtgctg

SEQ ID NO: 2375 - DNA, 20 bp, Artificial Sequence
  Synthetic oligonucleotide; TGG chr11 5167019 5167038 5167035 +
tttttgtgctgtggttacca

SEQ ID NO: 2376 - DNA, 20 bp, Artificial Sequence
  Synthetic oligonucleotide; GGG chr11 5167020 5167039 5167036 +
ttttgtgctgtggttaccat

SEQ ID NO: 2377 - DNA, 20 bp, Artificial Sequence
  Synthetic oligonucleotide; GGG chr11 5167021 5167040 5167037 +
tttgtgctgtggttaccatg

SEQ ID NO: 2378 - DNA, 20 bp, Artificial Sequence
  Synthetic oligonucleotide; AAG chr11 5167029 5167048 5167045 +
gtggttaccatggggcttac

SEQ ID NO: 2379 - DNA, 20 bp, Artificial Sequence
  Synthetic oligonucleotide; TAG chr11 5167048 5167067 5167064 +
caagaaacatcttataaata

SEQ ID NO: 2380 - DNA, 20 bp, Artificial Sequence
  Synthetic oligonucleotide; AAG chr11 5167052 5167071 5167068 +
aaacatcttataaatatagc

SEQ ID NO: 2381 - DNA, 20 bp, Artificial Sequence
  Synthetic oligonucleotide; AAG chr11 5167063 5167082 5167079 +
aaatatagcaagttatttta

SEQ ID NO: 2382 - DNA, 20 bp, Artificial Sequence
  Synthetic oligonucleotide; AGG chr11 5167064 5167083 5167080 +
aatatagcaagttattttaa

SEQ ID NO: 2383 - DNA, 20 bp, Artificial Sequence
  Synthetic oligonucleotide; TAG chr11 5167081 5167100 5167097 +
taaaggatgacgaattatct

SEQ ID NO: 2384 - DNA, 20 bp, Artificial Sequence
  Synthetic oligonucleotide; AAG chr11 5167094 5167113 5167110 +
attatcttagatcgcaaata

SEQ ID NO: 2385 - DNA, 20 bp, Artificial Sequence
  Synthetic oligonucleotide; AGG chr11 5167095 5167114 5167111 +
ttatcttagatcgcaaataa

SEQ ID NO: 2386 - DNA, 20 bp, Artificial Sequence
  Synthetic oligonucleotide; AAG chr11 5167107 5167126 5167123 +
gcaaataaaggaatataaac

SEQ ID NO: 2387 - DNA, 20 bp, Artificial Sequence
  Synthetic oligonucleotide; AGG chr11 5167108 5167127 5167124 +
caaataaaggaatataaaca

SEQ ID NO: 2388 - DNA, 20 bp, Artificial Sequence
  Synthetic oligonucleotide; GGG chr11 5167109 5167128 5167125 +
aaataaaggaatataaacaa

SEQ ID NO: 2389 - DNA, 20 bp, Artificial Sequence
  Synthetic oligonucleotide; CAG chr11 5167118 5167137 5167134 +
aatataaacaagggcaaaaa

SEQ ID NO: 2390 - DNA, 20 bp, Artificial Sequence
  Synthetic oligonucleotide; AGG chr11 5167119 5167138 5167135 +
atataaacaagggcaaaaac

SEQ ID NO: 2391 - DNA, 20 bp, Artificial Sequence
  Synthetic oligonucleotide; AAG chr11 5167209 5167228 5167225 +
ttatattacctacatcttaa

SEQ ID NO: 2392 - DNA, 20 bp, Artificial Sequence
  Synthetic oligonucleotide; AGG chr11 5167210 5167229 5167226 +
tatattacctacatcttaaa

SEQ ID NO: 2393 - DNA, 20 bp, Artificial Sequence
  Synthetic oligonucleotide; TAG chr11 5167219 5167238 5167235 +
tacatcttaaaaggttgcta

SEQ ID NO: 2394 - DNA, 20 bp, Artificial Sequence
  Synthetic oligonucleotide; AAG chr11 5167238 5167257 5167254 +
atagctattactgtttttga

SEQ ID NO: 2395 - DNA, 20 bp, Artificial Sequence
  Synthetic oligonucleotide; TGG chr11 5167251 5167270 5167267 +
tttttgaaagatttgttttt

SEQ ID NO: 2396 - DNA, 20 bp, Artificial Sequence
  Synthetic oligonucleotide; GGG chr11 5167252 5167271 5167268 +
ttttgaaagatttgtttttt

SEQ ID NO: 2397 - DNA, 20 bp, Artificial Sequence
  Synthetic oligonucleotide; TGG chr11 5167263 5167282 5167279 +
ttgttttttgggtttcatac

SEQ ID NO: 2398 - DNA, 20 bp, Artificial Sequence
  Synthetic oligonucleotide; GAG chr11 5167265 5167284 5167281 +
gttttttgggtttcatactg

SEQ ID NO: 2399 - DNA, 20 bp, Artificial Sequence
  Synthetic oligonucleotide; TGG chr11 5167275 5167294 5167291 +
tttcatactggagttctgtg

SEQ ID NO: 2400 - DNA, 20 bp, Artificial Sequence
  Synthetic oligonucleotide; CAG chr11 5167296 5167315 5167312 +
ggattgcacaccaaaaaata

SEQ ID NO: 2401 - DNA, 20 bp, Artificial Sequence
  Synthetic oligonucleotide; TGG chr11 5167302 5167321 5167318 +
cacaccaaaaaatacagtaa

SEQ ID NO: 2402 - DNA, 20 bp, Artificial Sequence
  Synthetic oligonucleotide; GGG chr11 5167303 5167322 5167319 +
acaccaaaaaatacagtaat

SEQ ID NO: 2403 - DNA, 20 bp, Artificial Sequence
  Synthetic oligonucleotide; GGG chr11 5167304 5167323 5167320 +
caccaaaaaatacagtaatg

SEQ ID NO: 2404 - DNA, 20 bp, Artificial Sequence
  Synthetic oligonucleotide; TAG chr11 5167312 5167331 5167328 +
aatacagtaatggggtattc

SEQ ID NO: 2405 - DNA, 20 bp, Artificial Sequence
  Synthetic oligonucleotide; AGG chr11 5167313 5167332 5167329 +
atacagtaatggggtattct

SEQ ID NO: 2406 - DNA, 20 bp, Artificial Sequence
  Synthetic oligonucleotide; CAG chr11 5167339 5167358 5167355 +
gtctatgtacttaattttac

SEQ ID NO: 2407 - DNA, 20 bp, Artificial Sequence
  Synthetic oligonucleotide; TGG chr11 5167342 5167361 5167358 +
tatgtacttaattttaccag

SEQ ID NO: 2408 - DNA, 20 bp, Artificial Sequence
  Synthetic oligonucleotide; GGG chr11 5167343 5167362 5167359 +
atgtacttaattttaccagt

SEQ ID NO: 2409 - DNA, 20 bp, Artificial Sequence
  Synthetic oligonucleotide; AAG chr11 5167360 5167379 5167376 +
agtgggtttcatactttgaa

SEQ ID NO: 2410 - DNA, 20 bp, Artificial Sequence
  Synthetic oligonucleotide; CAG chr11 5167395 5167414 5167411 +
tgttaatgtcttttttcttt

SEQ ID NO: 2411 - DNA, 20 bp, Artificial Sequence
  Synthetic oligonucleotide; TAG chr11 5167414 5167433 5167430 +
tcagattgcataactccctt

SEQ ID NO: 2412 - DNA, 20 bp, Artificial Sequence
  Synthetic oligonucleotide; AAG chr11 5167427 5167446 5167443 +
ctccctttagcattttttgc

SEQ ID NO: 2413 - DNA, 20 bp, Artificial Sequence
  Synthetic oligonucleotide; TGG chr11 5167431 5167450 5167447 +
ctttagcattttttgcaaga

SEQ ID NO: 2414 - DNA, 20 bp, Artificial Sequence
  Synthetic oligonucleotide; TGG chr11 5167436 5167455 5167452 +
gcattttttgcaagatggtc

SEQ ID NO: 2415 - DNA, 20 bp, Artificial Sequence
  Synthetic oligonucleotide; TGG chr11 5167442 5167461 5167458 +
tttgcaagatggtctggtgt

SEQ ID NO: 2416 - DNA, 20 bp, Artificial Sequence
  Synthetic oligonucleotide; TGG chr11 5167470 5167489 5167486 +
tctctcaacttttgtttgtc

SEQ ID NO: 2417 - DNA, 20 bp, Artificial Sequence
  Synthetic oligonucleotide; GGG chr11 5167471 5167490 5167487 +
ctctcaacttttgtttgtct

SEQ ID NO: 2418 - DNA, 20 bp, Artificial Sequence
  Synthetic oligonucleotide; AAG chr11 5167475 5167494 5167491 +
caacttttgtttgtctggga

SEQ ID NO: 2419 - DNA, 20 bp, Artificial Sequence
  Synthetic oligonucleotide; CAG chr11 5167506 5167525 5167522 +
tattgcttatatttgaataa

SEQ ID NO: 2420 - DNA, 20 bp, Artificial Sequence
  Synthetic oligonucleotide; CAG chr11 5167537 5167556 5167553 +
tataaaatattcttgaatat

SEQ ID NO: 2421 - DNA, 20 bp, Artificial Sequence
  Synthetic oligonucleotide; GAG chr11 5167555 5167574 5167571 +
atcagttttcttttatccct

SEQ ID NO: 2422 - DNA, 20 bp, Artificial Sequence
  Synthetic oligonucleotide; TGG chr11 5167587 5167606 5167603 +
aatttcattcgactctctct

SEQ ID NO: 2423 - DNA, 20 bp, Artificial Sequence
  Synthetic oligonucleotide; GAG chr11 5167607 5167626 5167623 +
tggactgtgtgatttctatt

SEQ ID NO: 2424 - DNA, 20 bp, Artificial Sequence
  Synthetic oligonucleotide; CAG chr11 5167623 5167642 5167639 +
tattgagatgtttgttgtca

SEQ ID NO: 2425 - DNA, 20 bp, Artificial Sequence
  Synthetic oligonucleotide; AGG chr11 5167624 5167643 5167640 +
attgagatgtttgttgtcac

SEQ ID NO: 2426 - DNA, 20 bp, Artificial Sequence
  Synthetic oligonucleotide; TGG chr11 5167630 5167649 5167646 +
atgtttgttgtcacaggatt

SEQ ID NO: 2427 - DNA, 20 bp, Artificial Sequence
  Synthetic oligonucleotide; GAG chr11 5167632 5167651 5167648 +
gtttgttgtcacaggatttg

SEQ ID NO: 2428 - DNA, 20 bp, Artificial Sequence
  Synthetic oligonucleotide; TAG chr11 5167674 5167693 5167690 +
tttctcatctcttctgcttt

SEQ ID NO: 2429 - DNA, 20 bp, Artificial Sequence
  Synthetic oligonucleotide; AGG chr11 5167675 5167694 5167691 +
ttctcatctcttctgctttt

SEQ ID NO: 2430 - DNA, 20 bp, Artificial Sequence
  Synthetic oligonucleotide; TGG chr11 5167707 5167726 5167723 +
ttgtccttgacctgatgtct

SEQ ID NO: 2431 - DNA, 20 bp, Artificial Sequence
  Synthetic oligonucleotide; TAG chr11 5167712 5167731 5167728 +
cttgacctgatgtcttggcg

SEQ ID NO: 2432 - DNA, 20 bp, Artificial Sequence
  Synthetic oligonucleotide; TAG chr11 5167729 5167748 5167745 +
gcgtagtactctactatatc

SEQ ID NO: 2433 - DNA, 20 bp, Artificial Sequence
  Synthetic oligonucleotide; AGG chr11 5167730 5167749 5167746 +
cgtagtactctactatatct

SEQ ID NO: 2434 - DNA, 20 bp, Artificial Sequence
  Synthetic oligonucleotide; TAG chr11 5167741 5167760 5167757 +
actatatctaggactacact

SEQ ID NO: 2435 - DNA, 20 bp, Artificial Sequence
  Synthetic oligonucleotide; TAG chr11 5167767 5167786 5167783 +
gaataatatgtaataaaaca

SEQ ID NO: 2436 - DNA, 20 bp, Artificial Sequence
  Synthetic oligonucleotide; AAG chr11 5167771 5167790 5167787 +
aatatgtaataaaacatagt

SEQ ID NO: 2437 - DNA, 20 bp, Artificial Sequence
  Synthetic oligonucleotide; AAG chr11 5167776 5167795 5167792 +
gtaataaaacatagtaagtg

SEQ ID NO: 2438 - DNA, 20 bp, Artificial Sequence
  Synthetic oligonucleotide; AAG chr11 5167781 5167800 5167797 +
aaaacatagtaagtgaagtg

SEQ ID NO: 2439 - DNA, 20 bp, Artificial Sequence
  Synthetic oligonucleotide; TGG chr11 5167788 5167807 5167804 +
agtaagtgaagtgaagttgc

SEQ ID NO: 2440 - DNA, 20 bp, Artificial Sequence
  Synthetic oligonucleotide; AAG chr11 5167797 5167816 5167813 +
agtgaagttgctggcttaaa

SEQ ID NO: 2441 - DNA, 20 bp, Artificial Sequence
  Synthetic oligonucleotide; AAG chr11 5167814 5167833 5167830 +
aaaaagtatttatttattgt

SEQ ID NO: 2442 - DNA, 20 bp, Artificial Sequence
  Synthetic oligonucleotide; AAG chr11 5167820 5167839 5167836 +
tatttatttattgtaagcat

SEQ ID NO: 2443 - DNA, 20 bp, Artificial Sequence
  Synthetic oligonucleotide; TAG chr11 5167844 5167863 5167860 +
aaatttgaccgatgtaatct

SEQ ID NO: 2444 - DNA, 20 bp, Artificial Sequence
  Synthetic oligonucleotide; TAG chr11 5167851 5167870 5167867 +
accgatgtaatcttagatga

SEQ ID NO: 2445 - DNA, 20 bp, Artificial Sequence
  Synthetic oligonucleotide; AAG chr11 5167860 5167879 5167876 +
atcttagatgatagttctaa

SEQ ID NO: 2446 - DNA, 20 bp, Artificial Sequence
  Synthetic oligonucleotide; TGG chr11 5167866 5167885 5167882 +
gatgatagttctaaaagtgt

SEQ ID NO: 2447 - DNA, 20 bp, Artificial Sequence
  Synthetic oligonucleotide; GAG chr11 5167871 5167890 5167887 +
tagttctaaaagtgttggtt

SEQ ID NO: 2448 - DNA, 20 bp, Artificial Sequence
  Synthetic oligonucleotide; AGG chr11 5167872 5167891 5167888 +
agttctaaaagtgttggttg

SEQ ID NO: 2449 - DNA, 20 bp, Artificial Sequence
  Synthetic oligonucleotide; AAG chr11 5167875 5167894 5167891 +
tctaaaagtgttggttgagg

SEQ ID NO: 2450 - DNA, 20 bp, Artificial Sequence
  Synthetic oligonucleotide; TAG chr11 5167878 5167897 5167894 +
aaaagtgttggttgaggaag

SEQ ID NO: 2451 - DNA, 20 bp, Artificial Sequence
  Synthetic oligonucleotide; AAG chr11 5167881 5167900 5167897 +
agtgttggttgaggaagtag

SEQ ID NO: 2452 - DNA, 20 bp, Artificial Sequence
  Synthetic oligonucleotide; GAG chr11 5167883 5167902 5167899 +
tgttggttgaggaagtagaa

SEQ ID NO: 2453 - DNA, 20 bp, Artificial Sequence
  Synthetic oligonucleotide; CAG chr11 5167889 5167908 5167905 +
ttgaggaagtagaagagaat

SEQ ID NO: 2454 - DNA, 20 bp, Artificial Sequence
  Synthetic oligonucleotide; AAG chr11 5167897 5167916 5167913 +
gtagaagagaatcagtacct

SEQ ID NO: 2455 - DNA, 20 bp, Artificial Sequence
  Synthetic oligonucleotide; CAG chr11 5167900 5167919 5167916 +
gaagagaatcagtacctaag

SEQ ID NO: 2456 - DNA, 20 bp, Artificial Sequence
  Synthetic oligonucleotide; TGG chr11 5167914 5167933 5167930 +
cctaagcagttaaactaatg

SEQ ID NO: 2457 - DNA, 20 bp, Artificial Sequence
  Synthetic oligonucleotide; GGG chr11 5167915 5167934 5167931 +
ctaagcagttaaactaatgt

SEQ ID NO: 2458 - DNA, 20 bp, Artificial Sequence
  Synthetic oligonucleotide; AAG chr11 5167918 5167937 5167934 +
agcagttaaactaatgtggg

SEQ ID NO: 2459 - DNA, 20 bp, Artificial Sequence
  Synthetic oligonucleotide; AGG chr11 5167919 5167938 5167935 +
gcagttaaactaatgtggga

SEQ ID NO: 2460 - DNA, 20 bp, Artificial Sequence
  Synthetic oligonucleotide; AAG chr11 5167933 5167952 5167949 +
gtgggaaggccccttttata

SEQ ID NO: 2461 - DNA, 20 bp, Artificial Sequence
  Synthetic oligonucleotide; GAG chr11 5167944 5167963 5167960 +
ccttttataaagatcctctt

SEQ ID NO: 2462 - DNA, 20 bp, Artificial Sequence
  Synthetic oligonucleotide; TAG chr11 5167982 5168001 5167998 +
tattaatatatgactataat

SEQ ID NO: 2463 - DNA, 20 bp, Artificial Sequence
  Synthetic oligonucleotide; GAG chr11 5167984 5168003 5168000 +
ttaatatatgactataatta

SEQ ID NO: 2464 - DNA, 20 bp, Artificial Sequence
  Synthetic oligonucleotide; AGG chr11 5167985 5168004 5168001 +
taatatatgactataattag

SEQ ID NO: 2465 - DNA, 20 bp, Artificial Sequence
  Synthetic oligonucleotide; CAG chr11 5167991 5168010 5168007 +
atgactataattagaggaaa

SEQ ID NO: 2466 - DNA, 20 bp, Artificial Sequence
  Synthetic oligonucleotide; GAG chr11 5167993 5168012 5168009 +
gactataattagaggaaaca

SEQ ID NO: 2467 - DNA, 20 bp, Artificial Sequence
  Synthetic oligonucleotide; AGG chr11 5167994 5168013 5168010 +
actataattagaggaaacag

SEQ ID NO: 2468 - DNA, 20 bp, Artificial Sequence
  Synthetic oligonucleotide; GAG chr11 5167998 5168017 5168014 +
taattagaggaaacagaggt

SEQ ID NO: 2469 - DNA, 20 bp, Artificial Sequence
  Synthetic oligonucleotide; AAG chr11 5168025 5168044 5168041 +
ttttgtcctcatgaatctca

SEQ ID NO: 2470 - DNA, 20 bp, Artificial Sequence
  Synthetic oligonucleotide; AGG chr11 5168026 5168045 5168042 +
tttgtcctcatgaatctcaa

SEQ ID NO: 2471 - DNA, 20 bp, Artificial Sequence
  Synthetic oligonucleotide; GAG chr11 5168028 5168047 5168044 +
tgtcctcatgaatctcaaag

SEQ ID NO: 2472 - DNA, 20 bp, Artificial Sequence
  Synthetic oligonucleotide; TGG chr11 5168035 5168054 5168051 +
atgaatctcaaaggagaaaa

SEQ ID NO: 2473 - DNA, 20 bp, Artificial Sequence
  Synthetic oligonucleotide; CAG chr11 5168042 5168061 5168058 +
tcaaaggagaaaatggttta

SEQ ID NO: 2474 - DNA, 20 bp, Artificial Sequence
  Synthetic oligonucleotide; TGG chr11 5168052 5168071 5168068 +
aaatggtttacagaattgct

SEQ ID NO: 2475 - DNA, 20 bp, Artificial Sequence
  Synthetic oligonucleotide; CAG chr11 5168062 5168081 5168078 +
cagaattgcttggtgttctt

SEQ ID NO: 2476 - DNA, 20 bp, Artificial Sequence
  Synthetic oligonucleotide; AAG chr11 5168077 5168096 5168093 +
ttcttcagattccaatttta

SEQ ID NO: 2477 - DNA, 20 bp, Artificial Sequence
  Synthetic oligonucleotide; AAG chr11 5168095 5168114 5168111 +
taaagtcaaatctgaatttt

SEQ ID NO: 2478 - DNA, 20 bp, Artificial Sequence
  Synthetic oligonucleotide; TGG chr11 5168101 5168120 5168117 +
caaatctgaattttaagtta

SEQ ID NO: 2479 - DNA, 20 bp, Artificial Sequence
  Synthetic oligonucleotide; GGG chr11 5168102 5168121 5168118 +
aaatctgaattttaagttat

SEQ ID NO: 2480 - DNA, 20 bp, Artificial Sequence
  Synthetic oligonucleotide; TGG chr11 5168118 5168137 5168134 +
ttatgggaccactgataata

SEQ ID NO: 2481 - DNA, 20 bp, Artificial Sequence
  Synthetic oligonucleotide; TGG chr11 5168121 5168140 5168137 +
tgggaccactgataatatgg

SEQ ID NO: 2482 - DNA, 20 bp, Artificial Sequence
  Synthetic oligonucleotide; GGG chr11 5168122 5168141 5168138 +
gggaccactgataatatggt

SEQ ID NO: 2483 - DNA, 20 bp, Artificial Sequence
  Synthetic oligonucleotide; AAG chr11 5168128 5168147 5168144 +
actgataatatggtgggcta

SEQ ID NO: 2484 - DNA, 20 bp, Artificial Sequence
  Synthetic oligonucleotide; CAG chr11 5168134 5168153 5168150 +
aatatggtgggctaaagaat

SEQ ID NO: 2485 - DNA, 20 bp, Artificial Sequence
  Synthetic oligonucleotide; AGG chr11 5168135 5168154 5168151 +
atatggtgggctaaagaatc

SEQ ID NO: 2486 - DNA, 20 bp, Artificial Sequence
  Synthetic oligonucleotide; TAG chr11 5168142 5168161 5168158 +
gggctaaagaatcaggtttt

SEQ ID NO: 2487 - DNA, 20 bp, Artificial Sequence
  Synthetic oligonucleotide; TGG chr11 5168146 5168165 5168162 +
taaagaatcaggtttttagt

SEQ ID NO: 2488 - DNA, 20 bp, Artificial Sequence
  Synthetic oligonucleotide; TGG chr11 5168155 5168174 5168171 +
aggtttttagttggattgtc

SEQ ID NO: 2489 - DNA, 20 bp, Artificial Sequence
  Synthetic oligonucleotide; GAG chr11 5168162 5168181 5168178 +
tagttggattgtctggtttt

SEQ ID NO: 2490 - DNA, 20 bp, Artificial Sequence
  Synthetic oligonucleotide; TGG chr11 5168197 5168216 5168213 +
cacttattaactctttgact

SEQ ID NO: 2491 - DNA, 20 bp, Artificial Sequence
  Synthetic oligonucleotide; GGG chr11 5168198 5168217 5168214 +
acttattaactctttgactt

SEQ ID NO: 2492 - DNA, 20 bp, Artificial Sequence
  Synthetic oligonucleotide; GGG chr11 5168199 5168218 5168215 +
cttattaactctttgacttg

SEQ ID NO: 2493 - DNA, 20 bp, Artificial Sequence
  Synthetic oligonucleotide; TAG chr11 5168250 5168269 5168266 +
gtttctacatttgtaacatg

SEQ ID NO: 2494 - DNA, 20 bp, Artificial Sequence
  Synthetic oligonucleotide; TGG chr11 5168286 5168305 5168302 +
ttcttcatatatttgttccg

SEQ ID NO: 2495 - DNA, 20 bp, Artificial Sequence
  Synthetic oligonucleotide; TAG chr11 5168318 5168337 5168334 +
actaatctatataaatcact

SEQ ID NO: 2496 - DNA, 20 bp, Artificial Sequence
  Synthetic oligonucleotide; TGG chr11 5168323 5168342 5168339 +
tctatataaatcacttagta

SEQ ID NO: 2497 - DNA, 20 bp, Artificial Sequence
  Synthetic oligonucleotide; TAG chr11 5168333 5168352 5168349 +
tcacttagtatggtacacta

SEQ ID NO: 2498 - DNA, 20 bp, Artificial Sequence
  Synthetic oligonucleotide; CAG chr11 5168343 5168362 5168359 +
tggtacactatagctcgtga

SEQ ID NO: 2499 - DNA, 20 bp, Artificial Sequence
  Synthetic oligonucleotide; GAG chr11 5168345 5168364 5168361 +
gtacactatagctcgtgaca

SEQ ID NO: 2500 - DNA, 20 bp, Artificial Sequence
  Synthetic oligonucleotide; GAG chr11 5168377 5168396 5168393 +
actttaatttttatgtactt

SEQ ID NO: 2501 - DNA, 20 bp, Artificial Sequence
  Synthetic oligonucleotide; TAG chr11 5168388 5168407 5168404 +
tatgtacttgagtttaaaat

SEQ ID NO: 2502 - DNA, 20 bp, Artificial Sequence
  Synthetic oligonucleotide; TAG chr11 5168395 5168414 5168411 +
ttgagtttaaaattagcatt

SEQ ID NO: 2503 - DNA, 20 bp, Artificial Sequence
  Synthetic oligonucleotide; GAG chr11 5168397 5168416 5168413 +
gagtttaaaattagcattta

SEQ ID NO: 2504 - DNA, 20 bp, Artificial Sequence
  Synthetic oligonucleotide; GAG chr11 5168399 5168418 5168415 +
gtttaaaattagcatttaga

SEQ ID NO: 2505 - DNA, 20 bp, Artificial Sequence
  Synthetic oligonucleotide; CAG chr11 5168407 5168426 5168423 +
ttagcatttagagagactgt

SEQ ID NO: 2506 - DNA, 20 bp, Artificial Sequence
  Synthetic oligonucleotide; AGG chr11 5168408 5168427 5168424 +
tagcatttagagagactgtc

SEQ ID NO: 2507 - DNA, 20 bp, Artificial Sequence
  Synthetic oligonucleotide; TAG chr11 5168444 5168463 5168460 +
gactgtgtattcacgtattg

SEQ ID NO: 2508 - DNA, 20 bp, Artificial Sequence
  Synthetic oligonucleotide; CAG chr11 5168448 5168467 5168464 +
gtgtattcacgtattgtagt

SEQ ID NO: 2509 - DNA, 20 bp, Artificial Sequence
  Synthetic oligonucleotide; TGG chr11 5168454 5168473 5168470 +
tcacgtattgtagtcagatt

SEQ ID NO: 2510 - DNA, 20 bp, Artificial Sequence
  Synthetic oligonucleotide; AAG chr11 5168462 5168481 5168478 +
tgtagtcagatttggtgaaa

SEQ ID NO: 2511 - DNA, 20 bp, Artificial Sequence
  Synthetic oligonucleotide; GAG chr11 5168495 5168514 5168511 +
ataaaatataattacttatt

SEQ ID NO: 2512 - DNA, 20 bp, Artificial Sequence
  Synthetic oligonucleotide; TAG chr11 5168508 5168527 5168524 +
acttattgagcaaattttac

SEQ ID NO: 2513 - DNA, 20 bp, Artificial Sequence
  Synthetic oligonucleotide; AGG chr11 5168509 5168528 5168525 +
cttattgagcaaattttact

SEQ ID NO: 2514 - DNA, 20 bp, Artificial Sequence
  Synthetic oligonucleotide; AAG chr11 5168555 5168574 5168571 +
caccatttcatttaatcttc

SEQ ID NO: 2515 - DNA, 20 bp, Artificial Sequence
  Synthetic oligonucleotide; AAG chr11 5168565 5168584 5168581 +
tttaatcttcaagatcataa

SEQ ID NO: 2516 - DNA, 20 bp, Artificial Sequence
  Synthetic oligonucleotide; TGG chr11 5168569 5168588 5168585 +
atcttcaagatcataaaagc

SEQ ID NO: 2517 - DNA, 20 bp, Artificial Sequence
  Synthetic oligonucleotide; CAG chr11 5168617 5168636 5168633 +
atgaataaattatattcaaa

SEQ ID NO: 2518 - DNA, 20 bp, Artificial Sequence
  Synthetic oligonucleotide; AGG chr11 5168618 5168637 5168634 +
tgaataaattatattcaaac

SEQ ID NO: 2519 - DNA, 20 bp, Artificial Sequence
  Synthetic oligonucleotide; TAG chr11 5168630 5168649 5168646 +
attcaaacaggtcatactac

SEQ ID NO: 2520 - DNA, 20 bp, Artificial Sequence
  Synthetic oligonucleotide; AAG chr11 5168634 5168653 5168650 +
aaacaggtcatactactagc

SEQ ID NO: 2521 - DNA, 20 bp, Artificial Sequence
  Synthetic oligonucleotide; TAG chr11 5168653 5168672 5168669 +
caagatcccacaattactaa

SEQ ID NO: 2522 - DNA, 20 bp, Artificial Sequence
  Synthetic oligonucleotide; AAG chr11 5168657 5168676 5168673 +
atcccacaattactaatagc

SEQ ID NO: 2523 - DNA, 20 bp, Artificial Sequence
  Synthetic oligonucleotide; TAG chr11 5168661 5168680 5168677 +
cacaattactaatagcaaga

SEQ ID NO: 2524 - DNA, 20 bp, Artificial Sequence
  Synthetic oligonucleotide; AAG chr11 5168666 5168685 5168682 +
ttactaatagcaagatagct

SEQ ID NO: 2525 - DNA, 20 bp, Artificial Sequence
  Synthetic oligonucleotide; TAG chr11 5168678 5168697 5168694 +
agatagctaagatttcaacc

SEQ ID NO: 2526 - DNA, 20 bp, Artificial Sequence
  Synthetic oligonucleotide; AGG chr11 5168679 5168698 5168695 +
gatagctaagatttcaacct

SEQ ID NO: 2527 - DNA, 20 bp, Artificial Sequence
  Synthetic oligonucleotide; TGG chr11 5168688 5168707 5168704 +
gatttcaacctaggtacatc

SEQ ID NO: 2528 - DNA, 20 bp, Artificial Sequence
  Synthetic oligonucleotide; AAG chr11 5168694 5168713 5168710 +
aacctaggtacatctggttc

SEQ ID NO: 2529 - DNA, 20 bp, Artificial Sequence
  Synthetic oligonucleotide; GAG chr11 5168713 5168732 5168729 +
caagtgtataacatcacact

SEQ ID NO: 2530 - DNA, 20 bp, Artificial Sequence
  Synthetic oligonucleotide; AGG chr11 5168714 5168733 5168730 +
aagtgtataacatcacactg

SEQ ID NO: 2531 - DNA, 20 bp, Artificial Sequence
  Synthetic oligonucleotide; TGG chr11 5168720 5168739 5168736 +
ataacatcacactgaggact

SEQ ID NO: 2532 - DNA, 20 bp, Artificial Sequence
  Synthetic oligonucleotide; TGG chr11 5168727 5168746 5168743 +
cacactgaggacttggctct

SEQ ID NO: 2533 - DNA, 20 bp, Artificial Sequence
  Synthetic oligonucleotide; GGG chr11 5168728 5168747 5168744 +
acactgaggacttggctctt

SEQ ID NO: 2534 - DNA, 20 bp, Artificial Sequence
  Synthetic oligonucleotide; AAG chr11 5168736 5168755 5168752 +
gacttggctcttgggtgtac

SEQ ID NO: 2535 - DNA, 20 bp, Artificial Sequence
  Synthetic oligonucleotide; AAG chr11 5168762 5168781 5168778 +
tccattgtgtgaacttgata

SEQ ID NO: 2536 - DNA, 20 bp, Artificial Sequence
  Synthetic oligonucleotide; TAG chr11 5168782 5168801 5168798 +
aagttacaaaaattatctct

SEQ ID NO: 2537 - DNA, 20 bp, Artificial Sequence
  Synthetic oligonucleotide; AAG chr11 5168803 5168822 5168819 +
agttttttcatgtataccat

SEQ ID NO: 2538 - DNA, 20 bp, Artificial Sequence
  Synthetic oligonucleotide; TAG chr11 5168808 5168827 5168824 +
tttcatgtataccataagaa

SEQ ID NO: 2539 - DNA, 20 bp, Artificial Sequence
  Synthetic oligonucleotide; CAG chr11 5168816 5168835 5168832 +
ataccataagaatagtaata

SEQ ID NO: 2540 - DNA, 20 bp, Artificial Sequence
  Synthetic oligonucleotide; AGG chr11 5168817 5168836 5168833 +
taccataagaatagtaatac

SEQ ID NO: 2541 - DNA, 20 bp, Artificial Sequence
  Synthetic oligonucleotide; TGG chr11 5168827 5168846 5168843 +
atagtaatacaggactgtaa

SEQ ID NO: 2542 - DNA, 20 bp, Artificial Sequence
  Synthetic oligonucleotide; GAG chr11 5168829 5168848 5168845 +
agtaatacaggactgtaatg

SEQ ID NO: 2543 - DNA, 20 bp, Artificial Sequence
  Synthetic oligonucleotide; AGG chr11 5168830 5168849 5168846 +
gtaatacaggactgtaatgg

SEQ ID NO: 2544 - DNA, 20 bp, Artificial Sequence
  Synthetic oligonucleotide; AAG chr11 5168851 5168870 5168867 +
ggttaccaataattattgtt

SEQ ID NO: 2545 - DNA, 20 bp, Artificial Sequence
  Synthetic oligonucleotide; AGG chr11 5168852 5168871 5168868 +
gttaccaataattattgtta

SEQ ID NO: 2546 - DNA, 20 bp, Artificial Sequence
  Synthetic oligonucleotide; AAG chr11 5168855 5168874 5168871 +
accaataattattgttaagg

SEQ ID NO: 2547 - DNA, 20 bp, Artificial Sequence
  Synthetic oligonucleotide; AGG chr11 5168856 5168875 5168872 +
ccaataattattgttaagga

SEQ ID NO: 2548 - DNA, 20 bp, Artificial Sequence
  Synthetic oligonucleotide; GGG chr11 5168857 5168876 5168873 +
caataattattgttaaggaa

SEQ ID NO: 2549 - DNA, 20 bp, Artificial Sequence
  Synthetic oligonucleotide; GAG chr11 5168883 5168902 5168899 +
ctaaattactctgaaatttt

SEQ ID NO: 2550 - DNA, 20 bp, Artificial Sequence
  Synthetic oligonucleotide; AAG chr11 5168942 5168961 5168958 +
cactacattgaacactttca

SEQ ID NO: 2551 - DNA, 20 bp, Artificial Sequence
  Synthetic oligonucleotide; AGG chr11 5168943 5168962 5168959 +
actacattgaacactttcaa

SEQ ID NO: 2552 - DNA, 20 bp, Artificial Sequence
  Synthetic oligonucleotide; AAG chr11 5168970 5168989 5168986 +
tcatacattaaaaatttttt

SEQ ID NO: 2553 - DNA, 20 bp, Artificial Sequence
  Synthetic oligonucleotide; GAG chr11 5168989 5169008 5169005 +
taagtccataaattaatttc

SEQ ID NO: 2554 - DNA, 20 bp, Artificial Sequence
  Synthetic oligonucleotide; AGG chr11 5168990 5169009 5169006 +
aagtccataaattaatttcg

SEQ ID NO: 2555 - DNA, 20 bp, Artificial Sequence
  Synthetic oligonucleotide; CAG chr11 5168997 5169016 5169013 +
taaattaatttcgaggaaaa

SEQ ID NO: 2556 - DNA, 20 bp, Artificial Sequence
  Synthetic oligonucleotide; TAG chr11 5169063 5169082 5169079 +
tatttgaccaaaccttctat

SEQ ID NO: 2557 - DNA, 20 bp, Artificial Sequence
  Synthetic oligonucleotide; TGG chr11 5169071 5169090 5169087 +
caaaccttctattagttact

SEQ ID NO: 2558 - DNA, 20 bp, Artificial Sequence
  Synthetic oligonucleotide; TGG chr11 5169075 5169094 5169091 +
ccttctattagttacttggt

SEQ ID NO: 2559 - DNA, 20 bp, Artificial Sequence
  Synthetic oligonucleotide; AAG chr11 5169091 5169110 5169107 +
tggttggctgataatcactc

SEQ ID NO: 2560 - DNA, 20 bp, Artificial Sequence
  Synthetic oligonucleotide; TGG chr11 5169100 5169119 5169116 +
gataatcactcaagactgtg

SEQ ID NO: 2561 - DNA, 20 bp, Artificial Sequence
  Synthetic oligonucleotide; TAG chr11 5169108 5169127 5169124 +
ctcaagactgtgtggtttaa

SEQ ID NO: 2562 - DNA, 20 bp, Artificial Sequence
  Synthetic oligonucleotide; AGG chr11 5169109 5169128 5169125 +
tcaagactgtgtggtttaat

SEQ ID NO: 2563 - DNA, 20 bp, Artificial Sequence
  Synthetic oligonucleotide; TGG chr11 5169122 5169141 5169138 +
gtttaataggatattcactg

SEQ ID NO: 2564 - DNA, 20 bp, Artificial Sequence
  Synthetic oligonucleotide; TGG chr11 5169129 5169148 5169145 +
aggatattcactgtggttca

SEQ ID NO: 2565 - DNA, 20 bp, Artificial Sequence
  Synthetic oligonucleotide; AAG chr11 5169149 5169168 5169165 +
tggaaattcaaaattatctg

SEQ ID NO: 2566 - DNA, 20 bp, Artificial Sequence
  Synthetic oligonucleotide; AAG chr11 5169160 5169179 5169176 +
aattatctgaagaaaacaaa

SEQ ID NO: 2567 - DNA, 20 bp, Artificial Sequence
  Synthetic oligonucleotide; TGG chr11 5169164 5169183 5169180 +
atctgaagaaaacaaaaagt

SEQ ID NO: 2568 - DNA, 20 bp, Artificial Sequence
  Synthetic oligonucleotide; GGG chr11 5169165 5169184 5169181 +
tctgaagaaaacaaaaagtt

SEQ ID NO: 2569 - DNA, 20 bp, Artificial Sequence
  Synthetic oligonucleotide; GAG chr11 5169185 5169204 5169201 +
gggctctgcaatccctgtct

SEQ ID NO: 2570 - DNA, 20 bp, Artificial Sequence
  Synthetic oligonucleotide; AGG chr11 5169186 5169205 5169202 +
ggctctgcaatccctgtctg

SEQ ID NO: 2571 - DNA, 20 bp, Artificial Sequence
  Synthetic oligonucleotide; GGG chr11 5169187 5169206 5169203 +
gctctgcaatccctgtctga

SEQ ID NO: 2572 - DNA, 20 bp, Artificial Sequence
  Synthetic oligonucleotide; TAG chr11 5169196 5169215 5169212 +
tccctgtctgagggattttc

SEQ ID NO: 2573 - DNA, 20 bp, Artificial Sequence
  Synthetic oligonucleotide; TGG chr11 5169207 5169226 5169223 +
gggattttctagaattcttc

SEQ ID NO: 2574 - DNA, 20 bp, Artificial Sequence
  Synthetic oligonucleotide; CAG chr11 5169232 5169251 5169248 +
ctccctacctttttgtttgt

SEQ ID NO: 2575 - DNA, 20 bp, Artificial Sequence
  Synthetic oligonucleotide; AAG chr11 5169235 5169254 5169251 +
cctacctttttgtttgtcag

SEQ ID NO: 2576 - DNA, 20 bp, Artificial Sequence
  Synthetic oligonucleotide; GAG chr11 5169251 5169270 5169267 +
tcagaagcttgtctactacc

SEQ ID NO: 2577 - DNA, 20 bp, Artificial Sequence
  Synthetic oligonucleotide; AAG chr11 5169269 5169288 5169285 +
ccgagtgattgatgtcacca

SEQ ID NO: 2578 - DNA, 20 bp, Artificial Sequence
  Synthetic oligonucleotide; CAG chr11 5169279 5169298 5169295 +
gatgtcaccaaagactattg

SEQ ID NO: 2579 - DNA, 20 bp, Artificial Sequence
  Synthetic oligonucleotide; AGG chr11 5169280 5169299 5169296 +
atgtcaccaaagactattgc

SEQ ID NO: 2580 - DNA, 20 bp, Artificial Sequence
  Synthetic oligonucleotide; GAG chr11 5169282 5169301 5169298 +
gtcaccaaagactattgcag

SEQ ID NO: 2581 - DNA, 20 bp, Artificial Sequence
  Synthetic oligonucleotide; TAG chr11 5169285 5169304 5169301 +
accaaagactattgcaggag

SEQ ID NO: 2582 - DNA, 20 bp, Artificial Sequence
  Synthetic oligonucleotide; AGG chr11 5169286 5169305 5169302 +
ccaaagactattgcaggagt

SEQ ID NO: 2583 - DNA, 20 bp, Artificial Sequence
  Synthetic oligonucleotide; TAG chr11 5169308 5169327 5169324 +
gccttgctttttctgttttt

SEQ ID NO: 2584 - DNA, 20 bp, Artificial Sequence
  Synthetic oligonucleotide; CAG chr11 5169327 5169346 5169343 +
ttagttattttcttctaaaa

SEQ ID NO: 2585 - DNA, 20 bp, Artificial Sequence
  Synthetic oligonucleotide; AAG chr11 5169337 5169356 5169353 +
tcttctaaaacagtattttc

SEQ ID NO: 2586 - DNA, 20 bp, Artificial Sequence
  Synthetic oligonucleotide; TAG chr11 5169340 5169359 5169356 +
tctaaaacagtattttcaag

SEQ ID NO: 2587 - DNA, 20 bp, Artificial Sequence
  Synthetic oligonucleotide; TGG chr11 5169346 5169365 5169362 +
acagtattttcaagtagttg

SEQ ID NO: 2588 - DNA, 20 bp, Artificial Sequence
  Synthetic oligonucleotide; TAG chr11 5169362 5169381 5169378 +
gttgtggttttttttctttc

SEQ ID NO: 2589 - DNA, 20 bp, Artificial Sequence
  Synthetic oligonucleotide; TAG chr11 5169388 5169407 5169404 +
tgaactcattaaaaataaaa

SEQ ID NO: 2590 - DNA, 20 bp, Artificial Sequence
  Synthetic oligonucleotide; AAG chr11 5169398 5169417 5169414 +
aaaaataaaatagctttcta

SEQ ID NO: 2591 - DNA, 20 bp, Artificial Sequence
  Synthetic oligonucleotide; CAG chr11 5169406 5169425 5169422 +
aatagctttctaaagccaaa

SEQ ID NO: 2592 - DNA, 20 bp, Artificial Sequence
  Synthetic oligonucleotide; CAG chr11 5169421 5169440 5169437 +
ccaaacagtttcctcctgac

SEQ ID NO: 2593 - DNA, 20 bp, Artificial Sequence
  Synthetic oligonucleotide; AAG chr11 5169428 5169447 5169444 +
gtttcctcctgaccagttaa

SEQ ID NO: 2594 - DNA, 20 bp, Artificial Sequence
  Synthetic oligonucleotide; TGG chr11 5169445 5169464 5169461 +
taaaagttatctctgcttca

SEQ ID NO: 2595 - DNA, 20 bp, Artificial Sequence
  Synthetic oligonucleotide; AAG chr11 5169461 5169480 5169477 +
ttcatggtgcatattcaatt

SEQ ID NO: 2596 - DNA, 20 bp, Artificial Sequence
  Synthetic oligonucleotide; TAG chr11 5169473 5169492 5169489 +
attcaattaagatttaacat

SEQ ID NO: 2597 - DNA, 20 bp, Artificial Sequence
  Synthetic oligonucleotide; GAG chr11 5169482 5169501 5169498 +
agatttaacattagcacact

SEQ ID NO: 2598 - DNA, 20 bp, Artificial Sequence
  Synthetic oligonucleotide; AAG chr11 5169497 5169516 5169513 +
acactgagtataattttttt

SEQ ID NO: 2599 - DNA, 20 bp, Artificial Sequence
  Synthetic oligonucleotide; CAG chr11 5169513 5169532 5169529 +
ttttaagaatctttttatta

SEQ ID NO: 2600 - DNA, 20 bp, Artificial Sequence
  Synthetic oligonucleotide; AAG chr11 5169533 5169552 5169549 +
cagaaattgtaaactacaca

SEQ ID NO: 2601 - DNA, 20 bp, Artificial Sequence
  Synthetic oligonucleotide; CAG chr11 5169540 5169559 5169556 +
tgtaaactacacaaagtaaa

SEQ ID NO: 2602 - DNA, 20 bp, Artificial Sequence
  Synthetic oligonucleotide; CAG chr11 5169561 5169580 5169577 +
agaatattataattaatttc

SEQ ID NO: 2603 - DNA, 20 bp, Artificial Sequence
  Synthetic oligonucleotide; AGG chr11 5169562 5169581 5169578 +
gaatattataattaatttcc

SEQ ID NO: 2604 - DNA, 20 bp, Artificial Sequence
  Synthetic oligonucleotide; CAG chr11 5169692 5169711 5169708 +
tttttgttattattatcatt

SEQ ID NO: 2605 - DNA, 20 bp, Artificial Sequence
  Synthetic oligonucleotide; AAG chr11 5169695 5169714 5169711 +
ttgttattattatcattcag

SEQ ID NO: 2606 - DNA, 20 bp, Artificial Sequence
  Synthetic oligonucleotide; TAG chr11 5169721 5169740 5169737 +
tgatgtaaaattgatgtacc

SEQ ID NO: 2607 - DNA, 20 bp, Artificial Sequence
  Synthetic oligonucleotide; TAG chr11 5169738 5169757 5169754 +
acctagaaatgtgcaaatct

SEQ ID NO: 2608 - DNA, 20 bp, Artificial Sequence
  Synthetic oligonucleotide; CAG chr11 5169812 5169831 5169828 +
acaaaatatttccatctccc

SEQ ID NO: 2609 - DNA, 20 bp, Artificial Sequence
  Synthetic oligonucleotide; CAG chr11 5169859 5169878 5169875 +
tcttccatctttatatccat

SEQ ID NO: 2610 - DNA, 20 bp, Artificial Sequence
  Synthetic oligonucleotide; GAG chr11 5169861 5169880 5169877 +
ttccatctttatatccatca

SEQ ID NO: 2611 - DNA, 20 bp, Artificial Sequence
  Synthetic oligonucleotide; AGG chr11 5169862 5169881 5169878 +
tccatctttatatccatcag

SEQ ID NO: 2612 - DNA, 20 bp, Artificial Sequence
  Synthetic oligonucleotide; AAG chr11 5169866 5169885 5169882 +
tctttatatccatcagaggt

SEQ ID NO: 2613 - DNA, 20 bp, Artificial Sequence
  Synthetic oligonucleotide; CAG chr11 5169869 5169888 5169885 +
ttatatccatcagaggtaag

SEQ ID NO: 2614 - DNA, 20 bp, Artificial Sequence
  Synthetic oligonucleotide; AGG chr11 5169870 5169889 5169886 +
tatatccatcagaggtaagc

SEQ ID NO: 2615 - DNA, 20 bp, Artificial Sequence
  Synthetic oligonucleotide; GGG chr11 5169871 5169890 5169887 +
atatccatcagaggtaagca

SEQ ID NO: 2616 - DNA, 20 bp, Artificial Sequence
  Synthetic oligonucleotide; TAG chr11 5169896 5169915 5169912 +
ctgattttttgacattaaat

SEQ ID NO: 2617 - DNA, 20 bp, Artificial Sequence
  Synthetic oligonucleotide; AAG chr11 5169974 5169993 5169990 +
tcctgattattttccttcac

SEQ ID NO: 2618 - DNA, 20 bp, Artificial Sequence
  Synthetic oligonucleotide; CAG chr11 5170002 5170021 5170018 +
atcactaattttaatataac

SEQ ID NO: 2619 - DNA, 20 bp, Artificial Sequence
  Synthetic oligonucleotide; AAG chr11 5170021 5170040 5170037 +
ccagaaacttaaacctcccc

SEQ ID NO: 2620 - DNA, 20 bp, Artificial Sequence
  Synthetic oligonucleotide; CAG chr11 5170042 5170061 5170058 +
agactctttctacatattcc

SEQ ID NO: 2621 - DNA, 20 bp, Artificial Sequence
  Synthetic oligonucleotide; GAG chr11 5170064 5170083 5170080 +
gaaccaaatgtcactgaatt

SEQ ID NO: 2622 - DNA, 20 bp, Artificial Sequence
  Synthetic oligonucleotide; AAG chr11 5170072 5170091 5170088 +
tgtcactgaattgagtattc

SEQ ID NO: 2623 - DNA, 20 bp, Artificial Sequence
  Synthetic oligonucleotide; AGG chr11 5170073 5170092 5170089 +
gtcactgaattgagtattca

SEQ ID NO: 2624 - DNA, 20 bp, Artificial Sequence
  Synthetic oligonucleotide; CAG chr11 5170079 5170098 5170095 +
gaattgagtattcaaggatt

SEQ ID NO: 2625 - DNA, 20 bp, Artificial Sequence
  Synthetic oligonucleotide; AAG chr11 5170088 5170107 5170104 +
attcaaggattcagcacaca

SEQ ID NO: 2626 - DNA, 20 bp, Artificial Sequence
  Synthetic oligonucleotide; CAG chr11 5170102 5170121 5170118 +
cacacaaagtgtgtcatcac

SEQ ID NO: 2627 - DNA, 20 bp, Artificial Sequence
  Synthetic oligonucleotide; AGG chr11 5170103 5170122 5170119 +
acacaaagtgtgtcatcacc

SEQ ID NO: 2628 - DNA, 20 bp, Artificial Sequence
  Synthetic oligonucleotide; AAG chr11 5170109 5170128 5170125 +
agtgtgtcatcaccaggaca

SEQ ID NO: 2629 - DNA, 20 bp, Artificial Sequence
  Synthetic oligonucleotide; CAG chr11 5170146 5170165 5170162 +
ctcctcccacaattttattt

SEQ ID NO: 2630 - DNA, 20 bp, Artificial Sequence
  Synthetic oligonucleotide; GAG chr11 5170148 5170167 5170164 +
cctcccacaattttatttca

SEQ ID NO: 2631 - DNA, 20 bp, Artificial Sequence
  Synthetic oligonucleotide; CAG chr11 5170170 5170189 5170186 +
gtaatgccatttcctattct

SEQ ID NO: 2632 - DNA, 20 bp, Artificial Sequence
  Synthetic oligonucleotide; AGG chr11 5170171 5170190 5170187 +
taatgccatttcctattctc

SEQ ID NO: 2633 - DNA, 20 bp, Artificial Sequence
  Synthetic oligonucleotide; GGG chr11 5170172 5170191 5170188 +
aatgccatttcctattctca

SEQ ID NO: 2634 - DNA, 20 bp, Artificial Sequence
  Synthetic oligonucleotide; AAG chr11 5170217 5170236 5170233 +
tcttcatctacaaaatgtta

SEQ ID NO: 2635 - DNA, 20 bp, Artificial Sequence
  Synthetic oligonucleotide; AAG chr11 5170229 5170248 5170245 +
aaatgttaaagctcattaac

SEQ ID NO: 2636 - DNA, 20 bp, Artificial Sequence
  Synthetic oligonucleotide; AAG chr11 5170239 5170258 5170255 +
gctcattaacaagcaataat

SEQ ID NO: 2637 - DNA, 20 bp, Artificial Sequence
  Synthetic oligonucleotide; TGG chr11 5170245 5170264 5170261 +
taacaagcaataataagcca

SEQ ID NO: 2638 - DNA, 20 bp, Artificial Sequence
  Synthetic oligonucleotide; AAG chr11 5170265 5170284 5170281 +
tggaatttttcatatttgca

SEQ ID NO: 2639 - DNA, 20 bp, Artificial Sequence
  Synthetic oligonucleotide; CAG chr11 5170276 5170295 5170292 +
atatttgcaaagctaatatt

SEQ ID NO: 2640 - DNA, 20 bp, Artificial Sequence
  Synthetic oligonucleotide; AGG chr11 5170277 5170296 5170293 +
tatttgcaaagctaatattc

SEQ ID NO: 2641 - DNA, 20 bp, Artificial Sequence
  Synthetic oligonucleotide; AAG chr11 5170285 5170304 5170301 +
aagctaatattcaggtaata

SEQ ID NO: 2642 - DNA, 20 bp, Artificial Sequence
  Synthetic oligonucleotide; AAG chr11 5170296 5170315 5170312 +
caggtaataaagcctgatct

SEQ ID NO: 2643 - DNA, 20 bp, Artificial Sequence
  Synthetic oligonucleotide; CAG chr11 5170311 5170330 5170327 +
gatctaagtgcctgtgctgt

SEQ ID NO: 2644 - DNA, 20 bp, Artificial Sequence
  Synthetic oligonucleotide; AGG chr11 5170312 5170331 5170328 +
atctaagtgcctgtgctgtc

SEQ ID NO: 2645 - DNA, 20 bp, Artificial Sequence
  Synthetic oligonucleotide; GGG chr11 5170313 5170332 5170329 +
tctaagtgcctgtgctgtca

SEQ ID NO: 2646 - DNA, 20 bp, Artificial Sequence
  Synthetic oligonucleotide; CAG chr11 5170322 5170341 5170338 +
ctgtgctgtcagggtatctt

SEQ ID NO: 2647 - DNA, 20 bp, Artificial Sequence
  Synthetic oligonucleotide; TAG chr11 5170332 5170351 5170348 +
agggtatcttcagtctccat

SEQ ID NO: 2648 - DNA, 20 bp, Artificial Sequence
  Synthetic oligonucleotide; TGG chr11 5170351 5170370 5170367 +
ttagaactcacccctcttcc

SEQ ID NO: 2649 - DNA, 20 bp, Artificial Sequence
  Synthetic oligonucleotide; TAG chr11 5170355 5170374 5170371 +
aactcacccctcttcctgga

SEQ ID NO: 2650 - DNA, 20 bp, Artificial Sequence
  Synthetic oligonucleotide; AAG chr11 5170361 5170380 5170377 +
cccctcttcctggatagtgt

SEQ ID NO: 2651 - DNA, 20 bp, Artificial Sequence
  Synthetic oligonucleotide; TAG chr11 5170401 5170420 5170417 +
tttctttgattttgatacta

SEQ ID NO: 2652 - DNA, 20 bp, Artificial Sequence
  Synthetic oligonucleotide; TGG chr11 5170408 5170427 5170424 +
gattttgatactatagacaa

SEQ ID NO: 2653 - DNA, 20 bp, Artificial Sequence
  Synthetic oligonucleotide; GGG chr11 5170409 5170428 5170425 +
attttgatactatagacaat

SEQ ID NO: 2654 - DNA, 20 bp, Artificial Sequence
  Synthetic oligonucleotide; GGG chr11 5170410 5170429 5170426 +
ttttgatactatagacaatg

SEQ ID NO: 2655 - DNA, 20 bp, Artificial Sequence
  Synthetic oligonucleotide; CAG chr11 5170420 5170439 5170436 +
atagacaatggggttgacca

SEQ ID NO: 2656 - DNA, 20 bp, Artificial Sequence
  Synthetic oligonucleotide; AGG chr11 5170421 5170440 5170437 +
tagacaatggggttgaccac

SEQ ID NO: 2657 - DNA, 20 bp, Artificial Sequence
  Synthetic oligonucleotide; GAG chr11 5170423 5170442 5170439 +
gacaatggggttgaccacag

SEQ ID NO: 2658 - DNA, 20 bp, Artificial Sequence
  Synthetic oligonucleotide; AGG chr11 5170424 5170443 5170440 +
acaatggggttgaccacagg

SEQ ID NO: 2659 - DNA, 20 bp, Artificial Sequence
  Synthetic oligonucleotide; AAG chr11 5170431 5170450 5170447 +
ggttgaccacaggaggaaaa

SEQ ID NO: 2660 - DNA, 20 bp, Artificial Sequence
  Synthetic oligonucleotide; GAG chr11 5170433 5170452 5170449 +
ttgaccacaggaggaaaaaa

SEQ ID NO: 2661 - DNA, 20 bp, Artificial Sequence
  Synthetic oligonucleotide; AGG chr11 5170434 5170453 5170450 +
tgaccacaggaggaaaaaag

SEQ ID NO: 2662 - DNA, 20 bp, Artificial Sequence
  Synthetic oligonucleotide; AAG chr11 5170438 5170457 5170454 +
cacaggaggaaaaaagaggt

SEQ ID NO: 2663 - DNA, 20 bp, Artificial Sequence
  Synthetic oligonucleotide; TGG chr11 5170444 5170463 5170460 +
aggaaaaaagaggtaagcat

SEQ ID NO: 2664 - DNA, 20 bp, Artificial Sequence
  Synthetic oligonucleotide; CAG chr11 5170453 5170472 5170469 +
gaggtaagcattggccgtga

SEQ ID NO: 2665 - DNA, 20 bp, Artificial Sequence
  Synthetic oligonucleotide; TGG chr11 5170458 5170477 5170474 +
aagcattggccgtgacagtc

SEQ ID NO: 2666 - DNA, 20 bp, Artificial Sequence
  Synthetic oligonucleotide; AAG chr11 5170463 5170482 5170479 +
ttggccgtgacagtctggaa

SEQ ID NO: 2667 - DNA, 20 bp, Artificial Sequence
  Synthetic oligonucleotide; TGG chr11 5170466 5170485 5170482 +
gccgtgacagtctggaaaag

SEQ ID NO: 2668 - DNA, 20 bp, Artificial Sequence
  Synthetic oligonucleotide; GAG chr11 5170468 5170487 5170484 +
cgtgacagtctggaaaagtg

SEQ ID NO: 2669 - DNA, 20 bp, Artificial Sequence
  Synthetic oligonucleotide; AGG chr11 5170469 5170488 5170485 +
gtgacagtctggaaaagtgg

SEQ ID NO: 2670 - DNA, 20 bp, Artificial Sequence
  Synthetic oligonucleotide; AAG chr11 5170485 5170504 5170501 +
gtggaggtaaatgccgtcca

SEQ ID NO: 2671 - DNA, 20 bp, Artificial Sequence
  Synthetic oligonucleotide; CGG chr11 5170488 5170507 5170504 +
gaggtaaatgccgtccaaag

SEQ ID NO: 2672 - DNA, 20 bp, Artificial Sequence
  Synthetic oligonucleotide; CAG chr11 5170496 5170515 5170512 +
tgccgtccaaagcggtgcat

SEQ ID NO: 2673 - DNA, 20 bp, Artificial Sequence
  Synthetic oligonucleotide; AGG chr11 5170497 5170516 5170513 +
gccgtccaaagcggtgcatc

SEQ ID NO: 2674 - DNA, 20 bp, Artificial Sequence
  Synthetic oligonucleotide; GGG chr11 5170498 5170517 5170514 +
ccgtccaaagcggtgcatca

SEQ ID NO: 2675 - DNA, 20 bp, Artificial Sequence
  Synthetic oligonucleotide; GAG chr11 5170500 5170519 5170516 +
gtccaaagcggtgcatcagg

SEQ ID NO: 2676 - DNA, 20 bp, Artificial Sequence
  Synthetic oligonucleotide; GAG chr11 5170502 5170521 5170518 +
ccaaagcggtgcatcaggga

SEQ ID NO: 2677 - DNA, 20 bp, Artificial Sequence
  Synthetic oligonucleotide; AGG chr11 5170503 5170522 5170519 +
caaagcggtgcatcagggag

SEQ ID NO: 2678 - DNA, 20 bp, Artificial Sequence
  Synthetic oligonucleotide; TGG chr11 5170513 5170532 5170529 +
catcagggagaggctgatca

SEQ ID NO: 2679 - DNA, 20 bp, Artificial Sequence
  Synthetic oligonucleotide; GGG chr11 5170514 5170533 5170530 +
atcagggagaggctgatcat

SEQ ID NO: 2680 - DNA, 20 bp, Artificial Sequence
  Synthetic oligonucleotide; TAG chr11 5170521 5170540 5170537 +
agaggctgatcatgggcaca

SEQ ID NO: 2681 - DNA, 20 bp, Artificial Sequence
  Synthetic oligonucleotide; AAG chr11 5170529 5170548 5170545 +
atcatgggcacatagtacac

SEQ ID NO: 2682 - DNA, 20 bp, Artificial Sequence
  Synthetic oligonucleotide; CAG chr11 5170534 5170553 5170550 +
gggcacatagtacacaagca

SEQ ID NO: 2683 - DNA, 20 bp, Artificial Sequence
  Synthetic oligonucleotide; GAG chr11 5170562 5170581 5170578 +
atgtgcgacacacatgtgtt

SEQ ID NO: 2684 - DNA, 20 bp, Artificial Sequence
  Synthetic oligonucleotide; CAG chr11 5170585 5170604 5170601 +
tgcctgccaccgccctgctc

SEQ ID NO: 2685 - DNA, 20 bp, Artificial Sequence
  Synthetic oligonucleotide; AAG chr11 5170588 5170607 5170604 +
ctgccaccgccctgctccag

SEQ ID NO: 2686 - DNA, 20 bp, Artificial Sequence
  Synthetic oligonucleotide; CAG chr11 5170598 5170617 5170614 +
cctgctccagaagctatttc

SEQ ID NO: 2687 - DNA, 20 bp, Artificial Sequence
  Synthetic oligonucleotide; AAG chr11 5170610 5170629 5170626 +
gctatttccagtactgtatg

SEQ ID NO: 2688 - DNA, 20 bp, Artificial Sequence
  Synthetic oligonucleotide; CAG chr11 5170616 5170635 5170632 +
tccagtactgtatgaagaat

SEQ ID NO: 2689 - DNA, 20 bp, Artificial Sequence
  Synthetic oligonucleotide; AAG chr11 5170624 5170643 5170640 +
tgtatgaagaatcagcacat

SEQ ID NO: 2690 - DNA, 20 bp, Artificial Sequence
  Synthetic oligonucleotide; AAG chr11 5170644 5170663 5170660 +
aagaaaccacaatgaacaat

SEQ ID NO: 2691 - DNA, 20 bp, Artificial Sequence
  Synthetic oligonucleotide; CAG chr11 5170649 5170668 5170665 +
accacaatgaacaataagtc

SEQ ID NO: 2692 - DNA, 20 bp, Artificial Sequence
  Synthetic oligonucleotide; AAG chr11 5170662 5170681 5170678 +
ataagtccagtccaaatgtg

SEQ ID NO: 2693 - DNA, 20 bp, Artificial Sequence
  Synthetic oligonucleotide; AGG chr11 5170663 5170682 5170679 +
taagtccagtccaaatgtga

SEQ ID NO: 2694 - DNA, 20 bp, Artificial Sequence
  Synthetic oligonucleotide; TAG chr11 5170676 5170695 5170692 +
aatgtgaaggtaatgacaaa

SEQ ID NO: 2695 - DNA, 20 bp, Artificial Sequence
  Synthetic oligonucleotide; GAG chr11 5170678 5170697 5170694 +
tgtgaaggtaatgacaaata

SEQ ID NO: 2696 - DNA, 20 bp, Artificial Sequence
  Synthetic oligonucleotide; CAG chr11 5170682 5170701 5170698 +
aaggtaatgacaaatagagc

SEQ ID NO: 2697 - DNA, 20 bp, Artificial Sequence
  Synthetic oligonucleotide; AGG chr11 5170683 5170702 5170699 +
aggtaatgacaaatagagcc

SEQ ID NO: 2698 - DNA, 20 bp, Artificial Sequence
  Synthetic oligonucleotide; TGG chr11 5170693 5170712 5170709 +
aaatagagccaggatgctat

SEQ ID NO: 2699 - DNA, 20 bp, Artificial Sequence
  Synthetic oligonucleotide; GGG chr11 5170694 5170713 5170710 +
aatagagccaggatgctatt

SEQ ID NO: 2700 - DNA, 20 bp, Artificial Sequence
  Synthetic oligonucleotide; CAG chr11 5170710 5170729 5170726 +
tattgggacgtgtgtctcca

SEQ ID NO: 2701 - DNA, 20 bp, Artificial Sequence
  Synthetic oligonucleotide; AGG chr11 5170711 5170730 5170727 +
attgggacgtgtgtctccac

SEQ ID NO: 2702 - DNA, 20 bp, Artificial Sequence
  Synthetic oligonucleotide; GGG chr11 5170712 5170731 5170728 +
ttgggacgtgtgtctccaca

SEQ ID NO: 2703 - DNA, 20 bp, Artificial Sequence
  Synthetic oligonucleotide; CAG chr11 5170724 5170743 5170740 +
tctccacagggcaatttgat

SEQ ID NO: 2704 - DNA, 20 bp, Artificial Sequence
  Synthetic oligonucleotide; GAG chr11 5170731 5170750 5170747 +
agggcaatttgatcagatct

SEQ ID NO: 2705 - DNA, 20 bp, Artificial Sequence
  Synthetic oligonucleotide; TGG chr11 5170734 5170753 5170750 +
gcaatttgatcagatctgag

SEQ ID NO: 2706 - DNA, 20 bp, Artificial Sequence
  Synthetic oligonucleotide; GAG chr11 5170736 5170755 5170752 +
aatttgatcagatctgagtg

SEQ ID NO: 2707 - DNA, 20 bp, Artificial Sequence
  Synthetic oligonucleotide; AGG chr11 5170737 5170756 5170753 +
atttgatcagatctgagtgg

SEQ ID NO: 2708 - DNA, 20 bp, Artificial Sequence
  Synthetic oligonucleotide; AAG chr11 5170744 5170763 5170760 +
cagatctgagtggaggcaat

SEQ ID NO: 2709 - DNA, 20 bp, Artificial Sequence
  Synthetic oligonucleotide; GAG chr11 5170746 5170765 5170762 +
gatctgagtggaggcaataa

SEQ ID NO: 2710 - DNA, 20 bp, Artificial Sequence
  Synthetic oligonucleotide; GAG chr11 5170754 5170773 5170770 +
tggaggcaataagagtgtgt

SEQ ID NO: 2711 - DNA, 20 bp, Artificial Sequence
  Synthetic oligonucleotide; AGG chr11 5170755 5170774 5170771 +
ggaggcaataagagtgtgtg

SEQ ID NO: 2712 - DNA, 20 bp, Artificial Sequence
  Synthetic oligonucleotide; GGG chr11 5170756 5170775 5170772 +
gaggcaataagagtgtgtga

SEQ ID NO: 2713 - DNA, 20 bp, Artificial Sequence
  Synthetic oligonucleotide; TGG chr11 5170764 5170783 5170780 +
aagagtgtgtgagggtattg

SEQ ID NO: 2714 - DNA, 20 bp, Artificial Sequence
  Synthetic oligonucleotide; CAG chr11 5170770 5170789 5170786 +
gtgtgagggtattgtggcca

SEQ ID NO: 2715 - DNA, 20 bp, Artificial Sequence
  Synthetic oligonucleotide; AAG chr11 5170774 5170793 5170790 +
gagggtattgtggccacaga

SEQ ID NO: 2716 - DNA, 20 bp, Artificial Sequence
  Synthetic oligonucleotide; AGG chr11 5170775 5170794 5170791 +
agggtattgtggccacagaa

SEQ ID NO: 2717 - DNA, 20 bp, Artificial Sequence
  Synthetic oligonucleotide; CAG chr11 5170778 5170797 5170794 +
gtattgtggccacagaaagg

SEQ ID NO: 2718 - DNA, 20 bp, Artificial Sequence
  Synthetic oligonucleotide; CAG chr11 5170787 5170806 5170803 +
ccacagaaaggcagacgcct

SEQ ID NO: 2719 - DNA, 20 bp, Artificial Sequence
  Synthetic oligonucleotide; AGG chr11 5170788 5170807 5170804 +
cacagaaaggcagacgcctc

SEQ ID NO: 2720 - DNA, 20 bp, Artificial Sequence
  Synthetic oligonucleotide; GAG chr11 5170790 5170809 5170806 +
cagaaaggcagacgcctcag

SEQ ID NO: 2721 - DNA, 20 bp, Artificial Sequence
  Synthetic oligonucleotide; AAG chr11 5170794 5170813 5170810 +
aaggcagacgcctcaggaga

SEQ ID NO: 2722 - DNA, 20 bp, Artificial Sequence
  Synthetic oligonucleotide; GAG chr11 5170796 5170815 5170812 +
ggcagacgcctcaggagaaa

SEQ ID NO: 2723 - DNA, 20 bp, Artificial Sequence
  Synthetic oligonucleotide; CAG chr11 5170799 5170818 5170815 +
agacgcctcaggagaaagag

SEQ ID NO: 2724 - DNA, 20 bp, Artificial Sequence
  Synthetic oligonucleotide; TGG chr11 5170802 5170821 5170818 +
cgcctcaggagaaagagcag

SEQ ID NO: 2725 - DNA, 20 bp, Artificial Sequence
  Synthetic oligonucleotide; GGG chr11 5170803 5170822 5170819 +
gcctcaggagaaagagcagt

SEQ ID NO: 2726 - DNA, 20 bp, Artificial Sequence
  Synthetic oligonucleotide; GAG chr11 5170805 5170824 5170821 +
ctcaggagaaagagcagtgg

SEQ ID NO: 2727 - DNA, 20 bp, Artificial Sequence
  Synthetic oligonucleotide; AAG chr11 5170811 5170830 5170827 +
agaaagagcagtgggagcat

SEQ ID NO: 2728 - DNA, 20 bp, Artificial Sequence
  Synthetic oligonucleotide; AAG chr11 5170827 5170846 5170843 +
gcataagcattacactgcgc

SEQ ID NO: 2729 - DNA, 20 bp, Artificial Sequence
  Synthetic oligonucleotide; AGG chr11 5170828 5170847 5170844 +
cataagcattacactgcgca

SEQ ID NO: 2730 - DNA, 20 bp, Artificial Sequence
  Synthetic oligonucleotide; TGG chr11 5170834 5170853 5170850 +
cattacactgcgcaaggcaa

SEQ ID NO: 2731 - DNA, 20 bp, Artificial Sequence
  Synthetic oligonucleotide; CGG chr11 5170837 5170856 5170853 +
tacactgcgcaaggcaatgg

SEQ ID NO: 2732 - DNA, 20 bp, Artificial Sequence
  Synthetic oligonucleotide; CAG chr11 5170849 5170868 5170865 +
ggcaatggcggcacccgtcc

SEQ ID NO: 2733 - DNA, 20 bp, Artificial Sequence
  Synthetic oligonucleotide; CAG chr11 5170857 5170876 5170873 +
cggcacccgtcccagaaatg

SEQ ID NO: 2734 - DNA, 20 bp, Artificial Sequence
  Synthetic oligonucleotide; AGG chr11 5170858 5170877 5170874 +
ggcacccgtcccagaaatgc

SEQ ID NO: 2735 - DNA, 20 bp, Artificial Sequence
  Synthetic oligonucleotide; CAG chr11 5170868 5170887 5170884 +
ccagaaatgcaggcaattgt

SEQ ID NO: 2736 - DNA, 20 bp, Artificial Sequence
  Synthetic oligonucleotide; TGG chr11 5170873 5170892 5170889 +
aatgcaggcaattgtcagaa

SEQ ID NO: 2737 - DNA, 20 bp, Artificial Sequence
  Synthetic oligonucleotide; TAG chr11 5170881 5170900 5170897 +
caattgtcagaatggttgtg

SEQ ID NO: 2738 - DNA, 20 bp, Artificial Sequence
  Synthetic oligonucleotide; CAG chr11 5170886 5170905 5170902 +
gtcagaatggttgtgtagcg

SEQ ID NO: 2739 - DNA, 20 bp, Artificial Sequence
  Synthetic oligonucleotide; TGG chr11 5170889 5170908 5170905 +
agaatggttgtgtagcgcag

SEQ ID NO: 2740 - DNA, 20 bp, Artificial Sequence
  Synthetic oligonucleotide; GGG chr11 5170890 5170909 5170906 +
gaatggttgtgtagcgcagt

SEQ ID NO: 2741 - DNA, 20 bp, Artificial Sequence
  Synthetic oligonucleotide; TAG chr11 5170896 5170915 5170912 +
ttgtgtagcgcagtgggctg

SEQ ID NO: 2742 - DNA, 20 bp, Artificial Sequence
  Synthetic oligonucleotide; TGG chr11 5170900 5170919 5170916 +
gtagcgcagtgggctgtaga

SEQ ID NO: 2743 - DNA, 20 bp, Artificial Sequence
  Synthetic oligonucleotide; AAG chr11 5170908 5170927 5170924 +
gtgggctgtagatggccaca

SEQ ID NO: 2744 - DNA, 20 bp, Artificial Sequence
  Synthetic oligonucleotide; CGG chr11 5170911 5170930 5170927 +
ggctgtagatggccacaaag

SEQ ID NO: 2745 - DNA, 20 bp, Artificial Sequence
  Synthetic oligonucleotide; CAG chr11 5170928 5170947 5170944 +
aagcggtccactgacattgc

SEQ ID NO: 2746 - DNA, 20 bp, Artificial Sequence
  Synthetic oligonucleotide; AAG chr11 5170931 5170950 5170947 +
cggtccactgacattgccag

SEQ ID NO: 2747 - DNA, 20 bp, Artificial Sequence
  Synthetic oligonucleotide; AGG chr11 5170932 5170951 5170948 +
ggtccactgacattgccaga

SEQ ID NO: 2748 - DNA, 20 bp, Artificial Sequence
  Synthetic oligonucleotide; AAG chr11 5170949 5170968 5170965 +
agaaggacacctgactccat

SEQ ID NO: 2749 - DNA, 20 bp, Artificial Sequence
  Synthetic oligonucleotide; GAG chr11 5170951 5170970 5170967 +
aaggacacctgactccataa

SEQ ID NO: 2750 - DNA, 20 bp, Artificial Sequence
  Synthetic oligonucleotide; AAG chr11 5170957 5170976 5170973 +
acctgactccataagagtga

SEQ ID NO: 2751 - DNA, 20 bp, Artificial Sequence
  Synthetic oligonucleotide; GAG chr11 5170959 5170978 5170975 +
ctgactccataagagtgaaa

SEQ ID NO: 2752 - DNA, 20 bp, Artificial Sequence
  Synthetic oligonucleotide; TAG chr11 5170966 5170985 5170982 +
cataagagtgaaagagtgca

SEQ ID NO: 2753 - DNA, 20 bp, Artificial Sequence
  Synthetic oligonucleotide; TGG chr11 5170977 5170996 5170993 +
aagagtgcatagaaaacatc

SEQ ID NO: 2754 - DNA, 20 bp, Artificial Sequence
  Synthetic oligonucleotide; GAG chr11 5170979 5170998 5170995 +
gagtgcatagaaaacatctg

SEQ ID NO: 2755 - DNA, 20 bp, Artificial Sequence
  Synthetic oligonucleotide; CAG chr11 5170982 5171001 5170998 +
tgcatagaaaacatctggag

SEQ ID NO: 2756 - DNA, 20 bp, Artificial Sequence
  Synthetic oligonucleotide; AGG chr11 5170983 5171002 5170999 +
gcatagaaaacatctggagc

SEQ ID NO: 2757 - DNA, 20 bp, Artificial Sequence
  Synthetic oligonucleotide; AAG chr11 5171016 5171035 5171032 +
aactgacatcgttaatgcca

SEQ ID NO: 2758 - DNA, 20 bp, Artificial Sequence
  Synthetic oligonucleotide; GAG chr11 5171018 5171037 5171034 +
ctgacatcgttaatgccaaa

SEQ ID NO: 2759 - DNA, 20 bp, Artificial Sequence
  Synthetic oligonucleotide; AGG chr11 5171019 5171038 5171035 +
tgacatcgttaatgccaaag

SEQ ID NO: 2760 - DNA, 20 bp, Artificial Sequence
  Synthetic oligonucleotide; CAG chr11 5171035 5171054 5171051 +
aaagaggaatatgcttaaca

SEQ ID NO: 2761 - DNA, 20 bp, Artificial Sequence
  Synthetic oligonucleotide; TGG chr11 5171038 5171057 5171054 +
gaggaatatgcttaacacag

SEQ ID NO: 2762 - DNA, 20 bp, Artificial Sequence
  Synthetic oligonucleotide; GGG chr11 5171039 5171058 5171055 +
aggaatatgcttaacacagt

SEQ ID NO: 2763 - DNA, 20 bp, Artificial Sequence
  Synthetic oligonucleotide; TGG chr11 5171044 5171063 5171060 +
tatgcttaacacagtgggca

SEQ ID NO: 2764 - DNA, 20 bp, Artificial Sequence
  Synthetic oligonucleotide; TGG chr11 5171047 5171066 5171063 +
gcttaacacagtgggcatgg

SEQ ID NO: 2765 - DNA, 20 bp, Artificial Sequence
  Synthetic oligonucleotide; AAG chr11 5171050 5171069 5171066 +
taacacagtgggcatggtgg

SEQ ID NO: 2766 - DNA, 20 bp, Artificial Sequence
  Synthetic oligonucleotide; CAG chr11 5171053 5171072 5171069 +
cacagtgggcatggtggaag

SEQ ID NO: 2767 - DNA, 20 bp, Artificial Sequence
  Synthetic oligonucleotide; GAG chr11 5171055 5171074 5171071 +
cagtgggcatggtggaagca

SEQ ID NO: 2768 - DNA, 20 bp, Artificial Sequence
  Synthetic oligonucleotide; AAG chr11 5171063 5171082 5171079 +
atggtggaagcagagacacc

SEQ ID NO: 2769 - DNA, 20 bp, Artificial Sequence
  Synthetic oligonucleotide; AAG chr11 5171073 5171092 5171089 +
cagagacaccaagttcaaca

SEQ ID NO: 2770 - DNA, 20 bp, Artificial Sequence
  Synthetic oligonucleotide; AGG chr11 5171074 5171093 5171090 +
agagacaccaagttcaacaa

SEQ ID NO: 2771 - DNA, 20 bp, Artificial Sequence
  Synthetic oligonucleotide; CGG chr11 5171078 5171097 5171094 +
acaccaagttcaacaaaggc

SEQ ID NO: 2772 - DNA, 20 bp, Artificial Sequence
  Synthetic oligonucleotide; TGG chr11 5171083 5171102 5171099 +
aagttcaacaaaggccggca

SEQ ID NO: 2773 - DNA, 20 bp, Artificial Sequence
  Synthetic oligonucleotide; CAG chr11 5171087 5171106 5171103 +
tcaacaaaggccggcatggc

SEQ ID NO: 2774 - DNA, 20 bp, Artificial Sequence
  Synthetic oligonucleotide; TAG chr11 5171094 5171113 5171110 +
aggccggcatggccagaaaa

SEQ ID NO: 2775 - DNA, 20 bp, Artificial Sequence
  Synthetic oligonucleotide; TGG chr11 5171101 5171120 5171117 +
catggccagaaaatagtaca

SEQ ID NO: 2776 - DNA, 20 bp, Artificial Sequence
  Synthetic oligonucleotide; GGG chr11 5171102 5171121 5171118 +
atggccagaaaatagtacat

SEQ ID NO: 2777 - DNA, 20 bp, Artificial Sequence
  Synthetic oligonucleotide; TGG chr11 5171106 5171125 5171122 +
ccagaaaatagtacatgggt

SEQ ID NO: 2778 - DNA, 20 bp, Artificial Sequence
  Synthetic oligonucleotide; AAG chr11 5171112 5171131 5171128 +
aatagtacatgggttggtgc

SEQ ID NO: 2779 - DNA, 20 bp, Artificial Sequence
  Synthetic oligonucleotide; AGG chr11 5171113 5171132 5171129 +
atagtacatgggttggtgca

SEQ ID NO: 2780 - DNA, 20 bp, Artificial Sequence
  Synthetic oligonucleotide; AAG chr11 5171116 5171135 5171132 +
gtacatgggttggtgcaagg

SEQ ID NO: 2781 - DNA, 20 bp, Artificial Sequence
  Synthetic oligonucleotide; GAG chr11 5171118 5171137 5171134 +
acatgggttggtgcaaggaa

SEQ ID NO: 2782 - DNA, 20 bp, Artificial Sequence
  Synthetic oligonucleotide; CGG chr11 5171127 5171146 5171143 +
ggtgcaaggaagagtcaatt

SEQ ID NO: 2783 - DNA, 20 bp, Artificial Sequence
  Synthetic oligonucleotide; AAG chr11 5171138 5171157 5171154 +
gagtcaattcggatgatgtg

SEQ ID NO: 2784 - DNA, 20 bp, Artificial Sequence
  Synthetic oligonucleotide; CGG chr11 5171156 5171175 5171172 +
tgaagaatgatgccatttcc

SEQ ID NO: 2785 - DNA, 20 bp, Artificial Sequence
  Synthetic oligonucleotide; AAG chr11 5171160 5171179 5171176 +
gaatgatgccatttcccgga

SEQ ID NO: 2786 - DNA, 20 bp, Artificial Sequence
  Synthetic oligonucleotide; TGG chr11 5171167 5171186 5171183 +
gccatttcccggaaagatga

SEQ ID NO: 2787 - DNA, 20 bp, Artificial Sequence
  Synthetic oligonucleotide; CAG chr11 5171177 5171196 5171193 +
ggaaagatgatggtgtatat

SEQ ID NO: 2788 - DNA, 20 bp, Artificial Sequence
  Synthetic oligonucleotide; AGG chr11 5171178 5171197 5171194 +
gaaagatgatggtgtatatc

SEQ ID NO: 2789 - DNA, 20 bp, Artificial Sequence
  Synthetic oligonucleotide; CAG chr11 5171181 5171200 5171197 +
agatgatggtgtatatcagg

SEQ ID NO: 2790 - DNA, 20 bp, Artificial Sequence
  Synthetic oligonucleotide; AAG chr11 5171184 5171203 5171200 +
tgatggtgtatatcaggcag

SEQ ID NO: 2791 - DNA, 20 bp, Artificial Sequence
  Synthetic oligonucleotide; AGG chr11 5171185 5171204 5171201 +
gatggtgtatatcaggcaga

SEQ ID NO: 2792 - DNA, 20 bp, Artificial Sequence
  Synthetic oligonucleotide; GGG chr11 5171186 5171205 5171202 +
atggtgtatatcaggcagaa

SEQ ID NO: 2793 - DNA, 20 bp, Artificial Sequence
  Synthetic oligonucleotide; GGG chr11 5171187 5171206 5171203 +
tggtgtatatcaggcagaag

SEQ ID NO: 2794 - DNA, 20 bp, Artificial Sequence
  Synthetic oligonucleotide; TGG chr11 5171191 5171210 5171207 +
gtatatcaggcagaagggga

SEQ ID NO: 2795 - DNA, 20 bp, Artificial Sequence
  Synthetic oligonucleotide; CAG chr11 5171217 5171236 5171233 +
tccacataatgttctgcctc

SEQ ID NO: 2796 - DNA, 20 bp, Artificial Sequence
  Synthetic oligonucleotide; CGG chr11 5171223 5171242 5171239 +
taatgttctgcctccagtcc

SEQ ID NO: 2797 - DNA, 20 bp, Artificial Sequence
  Synthetic oligonucleotide; GGG chr11 5171224 5171243 5171240 +
aatgttctgcctccagtccc

SEQ ID NO: 2798 - DNA, 20 bp, Artificial Sequence
  Synthetic oligonucleotide; GAG chr11 5171235 5171254 5171251 +
tccagtcccgggatgccaac

SEQ ID NO: 2799 - DNA, 20 bp, Artificial Sequence
  Synthetic oligonucleotide; GAG chr11 5171237 5171256 5171253 +
cagtcccgggatgccaacga

SEQ ID NO: 2800 - DNA, 20 bp, Artificial Sequence
  Synthetic oligonucleotide; TAG chr11 5171249 5171268 5171265 +
gccaacgagagtgaatgttg

SEQ ID NO: 2801 - DNA, 20 bp, Artificial Sequence
  Synthetic oligonucleotide; AGG chr11 5171250 5171269 5171266 +
ccaacgagagtgaatgttgt

SEQ ID NO: 2802 - DNA, 20 bp, Artificial Sequence
  Synthetic oligonucleotide; TGG chr11 5171264 5171283 5171280 +
tgttgtaggtgtgaatgtta

SEQ ID NO: 2803 - DNA, 20 bp, Artificial Sequence
  Synthetic oligonucleotide; TGG chr11 5171284 5171303 5171300 +
tggaacgtttgaaaacgtca

SEQ ID NO: 2804 - DNA, 20 bp, Artificial Sequence
  Synthetic oligonucleotide; AAG chr11 5171301 5171320 5171317 +
tcatggtgatacttcctctg

SEQ ID NO: 2805 - DNA, 20 bp, Artificial Sequence
  Synthetic oligonucleotide; GAG chr11 5171309 5171328 5171325 +
atacttcctctgaagatatt

SEQ ID NO: 2806 - DNA, 20 bp, Artificial Sequence
  Synthetic oligonucleotide; AAG chr11 5171312 5171331 5171328 +
cttcctctgaagatattgag

SEQ ID NO: 2807 - DNA, 20 bp, Artificial Sequence
  Synthetic oligonucleotide; TGG chr11 5171319 5171338 5171335 +
tgaagatattgagaagcaca

SEQ ID NO: 2808 - DNA, 20 bp, Artificial Sequence
  Synthetic oligonucleotide; GAG chr11 5171321 5171340 5171337 +
aagatattgagaagcacatg

SEQ ID NO: 2809 - DNA, 20 bp, Artificial Sequence
  Synthetic oligonucleotide; TGG chr11 5171326 5171345 5171342 +
attgagaagcacatggagac

SEQ ID NO: 2810 - DNA, 20 bp, Artificial Sequence
  Synthetic oligonucleotide; AAG chr11 5171336 5171355 5171352 +
acatggagactggaatatat

SEQ ID NO: 2811 - DNA, 20 bp, Artificial Sequence
  Synthetic oligonucleotide; CAG chr11 5171347 5171366 5171363 +
ggaatatataagtttctact

SEQ ID NO: 2812 - DNA, 20 bp, Artificial Sequence
  Synthetic oligonucleotide; AAG chr11 5171362 5171381 5171378 +
ctactcagttattgcacatc

SEQ ID NO: 2813 - DNA, 20 bp, Artificial Sequence
  Synthetic oligonucleotide; GAG chr11 5171369 5171388 5171385 +
gttattgcacatcaagttct

SEQ ID NO: 2814 - DNA, 20 bp, Artificial Sequence
  Synthetic oligonucleotide; CAG chr11 5171376 5171395 5171392 +
cacatcaagttctgagctaa

SEQ ID NO: 2815 - DNA, 20 bp, Artificial Sequence
  Synthetic oligonucleotide; AAG chr11 5171387 5171406 5171403 +
ctgagctaacagtcatatct

SEQ ID NO: 2816 - DNA, 20 bp, Artificial Sequence
  Synthetic oligonucleotide; CAG chr11 5171399 5171418 5171415 +
tcatatctaagacatttcct

SEQ ID NO: 2817 - DNA, 20 bp, Artificial Sequence
  Synthetic oligonucleotide; AAG chr11 5171405 5171424 5171421 +
ctaagacatttcctcagaaa

SEQ ID NO: 2818 - DNA, 20 bp, Artificial Sequence
  Synthetic oligonucleotide; AGG chr11 5171406 5171425 5171422 +
taagacatttcctcagaaaa

SEQ ID NO: 2819 - DNA, 20 bp, Artificial Sequence
  Synthetic oligonucleotide; GGG chr11 5171407 5171426 5171423 +
aagacatttcctcagaaaaa

SEQ ID NO: 2820 - DNA, 20 bp, Artificial Sequence
  Synthetic oligonucleotide; AAG chr11 5171432 5171451 5171448 +
aaaaaatttatttctgaaac

SEQ ID NO: 2821 - DNA, 20 bp, Artificial Sequence
  Synthetic oligonucleotide; AGG chr11 5171433 5171452 5171449 +
aaaaatttatttctgaaaca

SEQ ID NO: 2822 - DNA, 20 bp, Artificial Sequence
  Synthetic oligonucleotide; GGG chr11 5171434 5171453 5171450 +
aaaatttatttctgaaacaa

SEQ ID NO: 2823 - DNA, 20 bp, Artificial Sequence
  Synthetic oligonucleotide; CAG chr11 5171439 5171458 5171455 +
ttatttctgaaacaagggca

SEQ ID NO: 2824 - DNA, 20 bp, Artificial Sequence
  Synthetic oligonucleotide; AGG chr11 5171440 5171459 5171456 +
tatttctgaaacaagggcac

SEQ ID NO: 2825 - DNA, 20 bp, Artificial Sequence
  Synthetic oligonucleotide; AAG chr11 5171444 5171463 5171460 +
tctgaaacaagggcacaggt

SEQ ID NO: 2826 - DNA, 20 bp, Artificial Sequence
  Synthetic oligonucleotide; CAG chr11 5171450 5171469 5171466 +
acaagggcacaggtaagcca

SEQ ID NO: 2827 - DNA, 20 bp, Artificial Sequence
  Synthetic oligonucleotide; GAG chr11 5171454 5171473 5171470 +
gggcacaggtaagccacagt

SEQ ID NO: 2828 - DNA, 20 bp, Artificial Sequence
  Synthetic oligonucleotide; TGG chr11 5171457 5171476 5171473 +
cacaggtaagccacagtgag

SEQ ID NO: 2829 - DNA, 20 bp, Artificial Sequence
  Synthetic oligonucleotide; AAG chr11 5171460 5171479 5171476 +
aggtaagccacagtgagtgg

SEQ ID NO: 2830 - DNA, 20 bp, Artificial Sequence
  Synthetic oligonucleotide; GAG chr11 5171462 5171481 5171478 +
gtaagccacagtgagtggaa

SEQ ID NO: 2831 - DNA, 20 bp, Artificial Sequence
  Synthetic oligonucleotide; TGG chr11 5171473 5171492 5171489 +
tgagtggaagagaaacctaa

SEQ ID NO: 2832 - DNA, 20 bp, Artificial Sequence
  Synthetic oligonucleotide; GGG chr11 5171474 5171493 5171490 +
gagtggaagagaaacctaat

SEQ ID NO: 2833 - DNA, 20 bp, Artificial Sequence
  Synthetic oligonucleotide; CAG chr11 5171482 5171501 5171498 +
gagaaacctaatgggtcatg

SEQ ID NO: 2834 - DNA, 20 bp, Artificial Sequence
  Synthetic oligonucleotide; AAG chr11 5171487 5171506 5171503 +
acctaatgggtcatgcagaa

SEQ ID NO: 2835 - DNA, 20 bp, Artificial Sequence
  Synthetic oligonucleotide; TAG chr11 5171500 5171519 5171516 +
tgcagaaaagtattccaaca

SEQ ID NO: 2836 - DNA, 20 bp, Artificial Sequence
  Synthetic oligonucleotide; CAG chr11 5171512 5171531 5171528 +
ttccaacatagcctatatgc

SEQ ID NO: 2837 - DNA, 20 bp, Artificial Sequence
  Synthetic oligonucleotide; AAG chr11 5171517 5171536 5171533 +
acatagcctatatgccagat

SEQ ID NO: 2838 - DNA, 20 bp, Artificial Sequence
  Synthetic oligonucleotide; AGG chr11 5171518 5171537 5171534 +
catagcctatatgccagata

SEQ ID NO: 2839 - DNA, 20 bp, Artificial Sequence
  Synthetic oligonucleotide; TAG chr11 5171527 5171546 5171543 +
tatgccagataaggcattaa

SEQ ID NO: 2840 - DNA, 20 bp, Artificial Sequence
  Synthetic oligonucleotide; AAG chr11 5171537 5171556 5171553 +
aaggcattaatagaaatctc

SEQ ID NO: 2841 - DNA, 20 bp, Artificial Sequence
  Synthetic oligonucleotide; TGG chr11 5171541 5171560 5171557 +
cattaatagaaatctcaagt

SEQ ID NO: 2842 - DNA, 20 bp, Artificial Sequence
  Synthetic oligonucleotide; GGG chr11 5171542 5171561 5171558 +
attaatagaaatctcaagtt

SEQ ID NO: 2843 - DNA, 20 bp, Artificial Sequence
  Synthetic oligonucleotide; TGG chr11 5171552 5171571 5171568 +
atctcaagttgggtcatcta

SEQ ID NO: 2844 - DNA, 20 bp, Artificial Sequence
  Synthetic oligonucleotide; CAG chr11 5171555 5171574 5171571 +
tcaagttgggtcatctatgg

SEQ ID NO: 2845 - DNA, 20 bp, Artificial Sequence
  Synthetic oligonucleotide; CAG chr11 5171565 5171584 5171581 +
tcatctatggcagtgaaaaa

SEQ ID NO: 2846 - DNA, 20 bp, Artificial Sequence
  Synthetic oligonucleotide; AAG chr11 5171575 5171594 5171591 +
cagtgaaaaacagttaaaat

SEQ ID NO: 2847 - DNA, 20 bp, Artificial Sequence
  Synthetic oligonucleotide; TAG chr11 5171580 5171599 5171596 +
aaaaacagttaaaataagca

SEQ ID NO: 2848 - DNA, 20 bp, Artificial Sequence
  Synthetic oligonucleotide; GAG chr11 5171582 5171601 5171598 +
aaacagttaaaataagcata

SEQ ID NO: 2849 - DNA, 20 bp, Artificial Sequence
  Synthetic oligonucleotide; CAG chr11 5171589 5171608 5171605 +
taaaataagcatagagatga

SEQ ID NO: 2850 - DNA, 20 bp, Artificial Sequence
  Synthetic oligonucleotide; TGG chr11 5171599 5171618 5171615 +
atagagatgacagattcaca

SEQ ID NO: 2851 - DNA, 20 bp, Artificial Sequence
  Synthetic oligonucleotide; AAG chr11 5171614 5171633 5171630 +
tcacatggaaattatgactg

SEQ ID NO: 2852 - DNA, 20 bp, Artificial Sequence
  Synthetic oligonucleotide; TAG chr11 5171631 5171650 5171647 +
ctgaagaaactgctaacttg

SEQ ID NO: 2853 - DNA, 20 bp, Artificial Sequence
  Synthetic oligonucleotide; AAG chr11 5171642 5171661 5171658 +
gctaacttgtagtgtttata

SEQ ID NO: 2854 - DNA, 20 bp, Artificial Sequence
  Synthetic oligonucleotide; GAG chr11 5171644 5171663 5171660 +
taacttgtagtgtttataaa

SEQ ID NO: 2855 - DNA, 20 bp, Artificial Sequence
  Synthetic oligonucleotide; GAG chr11 5171646 5171665 5171662 +
acttgtagtgtttataaaga

SEQ ID NO: 2856 - DNA, 20 bp, Artificial Sequence
  Synthetic oligonucleotide; TAG chr11 5171649 5171668 5171665 +
tgtagtgtttataaagagag

SEQ ID NO: 2857 - DNA, 20 bp, Artificial Sequence
  Synthetic oligonucleotide; TAG chr11 5171657 5171676 5171673 +
ttataaagagagtagatgaa

SEQ ID NO: 2858 - DNA, 20 bp, Artificial Sequence
  Synthetic oligonucleotide; AAG chr11 5171663 5171682 5171679 +
agagagtagatgaatagcta

SEQ ID NO: 2859 - DNA, 20 bp, Artificial Sequence
  Synthetic oligonucleotide; AAG chr11 5171682 5171701 5171698 +
aaagtaatataacactaata

SEQ ID NO: 2860 - DNA, 20 bp, Artificial Sequence
  Synthetic oligonucleotide; GAG chr11 5171684 5171703 5171700 +
agtaatataacactaataaa

SEQ ID NO: 2861 - DNA, 20 bp, Artificial Sequence
  Synthetic oligonucleotide; TGG chr11 5171693 5171712 5171709 +
acactaataaagagtattga

SEQ ID NO: 2862 - DNA, 20 bp, Artificial Sequence
  Synthetic oligonucleotide; TGG chr11 5171723 5171742 5171739 +
atttaattgacgtgtaatct

SEQ ID NO: 2863 - DNA, 20 bp, Artificial Sequence
  Synthetic oligonucleotide; GGG chr11 5171724 5171743 5171740 +
tttaattgacgtgtaatctt

SEQ ID NO: 2864 - DNA, 20 bp, Artificial Sequence
  Synthetic oligonucleotide; AAG chr11 5171736 5171755 5171752 +
gtaatcttgggattatatta

SEQ ID NO: 2865 - DNA, 20 bp, Artificial Sequence
  Synthetic oligonucleotide; AAG chr11 5171753 5171772 5171769 +
ttaaagttgatttatattgc

SEQ ID NO: 2866 - DNA, 20 bp, Artificial Sequence
  Synthetic oligonucleotide; GAG chr11 5171762 5171781 5171778 +
atttatattgcaagttatct

SEQ ID NO: 2867 - DNA, 20 bp, Artificial Sequence
  Synthetic oligonucleotide; CAG chr11 5171768 5171787 5171784 +
attgcaagttatctgagacc

SEQ ID NO: 2868 - DNA, 20 bp, Artificial Sequence
  Synthetic oligonucleotide; AAG chr11 5171783 5171802 5171799 +
agacccagatatttgctata

SEQ ID NO: 2869 - DNA, 20 bp, Artificial Sequence
  Synthetic oligonucleotide; TAG chr11 5171793 5171812 5171809 +
atttgctataaagacaataa

SEQ ID NO: 2870 - DNA, 20 bp, Artificial Sequence
  Synthetic oligonucleotide; AAG chr11 5171803 5171822 5171819 +
aagacaataatagtatttta

SEQ ID NO: 2871 - DNA, 20 bp, Artificial Sequence
  Synthetic oligonucleotide; TGG chr11 5171836 5171855 5171852 +
atattgtttatcattatatg

SEQ ID NO: 2872 - DNA, 20 bp, Artificial Sequence
  Synthetic oligonucleotide; TAG chr11 5171843 5171862 5171859 +
ttatcattatatgtggaata

SEQ ID NO: 2873 - DNA, 20 bp, Artificial Sequence
  Synthetic oligonucleotide; TAG chr11 5171861 5171880 5171877 +
tatagtaaatattaaatgta

SEQ ID NO: 2874 - DNA, 20 bp, Artificial Sequence
  Synthetic oligonucleotide; AAG chr11 5171870 5171889 5171886 +
tattaaatgtatagaataaa

SEQ ID NO: 2875 - DNA, 20 bp, Artificial Sequence
  Synthetic oligonucleotide; TAG chr11 5171888 5171907 5171904 +
aaaagaacaatttaatatat

SEQ ID NO: 2876 - DNA, 20 bp, Artificial Sequence
  Synthetic oligonucleotide; AAG chr11 5171896 5171915 5171912 +
aatttaatatattagaacac

SEQ ID NO: 2877 - DNA, 20 bp, Artificial Sequence
  Synthetic oligonucleotide; AGG chr11 5171897 5171916 5171913 +
atttaatatattagaacaca

SEQ ID NO: 2878 - DNA, 20 bp, Artificial Sequence
  Synthetic oligonucleotide; TAG chr11 5171901 5171920 5171917 +
aatatattagaacacaagga

SEQ ID NO: 2879 - DNA, 20 bp, Artificial Sequence
  Synthetic oligonucleotide; TAG chr11 5171911 5171930 5171927 +
aacacaaggatagtttctcc

SEQ ID NO: 2880 - DNA, 20 bp, Artificial Sequence
  Synthetic oligonucleotide; AAG chr11 5171918 5171937 5171934 +
ggatagtttctcctagaata

SEQ ID NO: 2881 - DNA, 20 bp, Artificial Sequence
  Synthetic oligonucleotide; CAG chr11 5171948 5171967 5171964 +
catttttttctttaacttac

SEQ ID NO: 2882 - DNA, 20 bp, Artificial Sequence
  Synthetic oligonucleotide; TAG chr11 5171977 5171996 5171993 +
ctttctccacctgctatcca

SEQ ID NO: 2883 - DNA, 20 bp, Artificial Sequence
  Synthetic oligonucleotide; TAG chr11 5171982 5172001 5171998 +
tccacctgctatccatagat

SEQ ID NO: 2884 - DNA, 20 bp, Artificial Sequence
  Synthetic oligonucleotide; AAG chr11 5171987 5172006 5172003 +
ctgctatccatagattagaa

SEQ ID NO: 2885 - DNA, 20 bp, Artificial Sequence
  Synthetic oligonucleotide; CAG chr11 5172005 5172024 5172021 +
aaaagctcctctgtattttg

SEQ ID NO: 2886 - DNA, 20 bp, Artificial Sequence
  Synthetic oligonucleotide; AAG chr11 5172008 5172027 5172024 +
agctcctctgtattttgcag

SEQ ID NO: 2887 - DNA, 20 bp, Artificial Sequence
  Synthetic oligonucleotide; AGG chr11 5172009 5172028 5172025 +
gctcctctgtattttgcaga

SEQ ID NO: 2888 - DNA, 20 bp, Artificial Sequence
  Synthetic oligonucleotide; GGG chr11 5172010 5172029 5172026 +
ctcctctgtattttgcagaa

SEQ ID NO: 2889 - DNA, 20 bp, Artificial Sequence
  Synthetic oligonucleotide; CAG chr11 5172014 5172033 5172030 +
tctgtattttgcagaagggt

SEQ ID NO: 2890 - DNA, 20 bp, Artificial Sequence
  Synthetic oligonucleotide; TGG chr11 5172025 5172044 5172041 +
cagaagggtcagtcttctgc

SEQ ID NO: 2891 - DNA, 20 bp, Artificial Sequence
  Synthetic oligonucleotide; CGG chr11 5172031 5172050 5172047 +
ggtcagtcttctgctggaac

SEQ ID NO: 2892 - DNA, 20 bp, Artificial Sequence
  Synthetic oligonucleotide; GGG chr11 5172032 5172051 5172048 +
gtcagtcttctgctggaacc

SEQ ID NO: 2893 - DNA, 20 bp, Artificial Sequence
  Synthetic oligonucleotide; CAG chr11 5172036 5172055 5172052 +
gtcttctgctggaaccgggt

SEQ ID NO: 2894 - DNA, 20 bp, Artificial Sequence
  Synthetic oligonucleotide; AGG chr11 5172037 5172056 5172053 +
tcttctgctggaaccgggtc

SEQ ID NO: 2895 - DNA, 20 bp, Artificial Sequence
  Synthetic oligonucleotide; GGG chr11 5172038 5172057 5172054 +
cttctgctggaaccgggtca

SEQ ID NO: 2896 - DNA, 20 bp, Artificial Sequence
  Synthetic oligonucleotide; GAG chr11 5172040 5172059 5172056 +
tctgctggaaccgggtcagg

SEQ ID NO: 2897 - DNA, 20 bp, Artificial Sequence
  Synthetic oligonucleotide; AAG chr11 5172044 5172063 5172060 +
ctggaaccgggtcagggagc

SEQ ID NO: 2898 - DNA, 20 bp, Artificial Sequence
  Synthetic oligonucleotide; CAG chr11 5172049 5172068 5172065 +
accgggtcagggagcaagat

SEQ ID NO: 2899 - DNA, 20 bp, Artificial Sequence
  Synthetic oligonucleotide; AAG chr11 5172052 5172071 5172068 +
gggtcagggagcaagatcag

SEQ ID NO: 2900 - DNA, 20 bp, Artificial Sequence
  Synthetic oligonucleotide; CAG chr11 5172058 5172077 5172074 +
gggagcaagatcagaagcat

SEQ ID NO: 2901 - DNA, 20 bp, Artificial Sequence
  Synthetic oligonucleotide; AAG chr11 5172069 5172088 5172085 +
cagaagcatcagtatctcac

SEQ ID NO: 2902 - DNA, 20 bp, Artificial Sequence
  Synthetic oligonucleotide; TGG chr11 5172082 5172101 5172098 +
atctcacaagtcacatgtga

SEQ ID NO: 2903 - DNA, 20 bp, Artificial Sequence
  Synthetic oligonucleotide; TGG chr11 5172085 5172104 5172101 +
tcacaagtcacatgtgatgg

SEQ ID NO: 2904 - DNA, 20 bp, Artificial Sequence
  Synthetic oligonucleotide; GGG chr11 5172086 5172105 5172102 +
cacaagtcacatgtgatggt

SEQ ID NO: 2905 - DNA, 20 bp, Artificial Sequence
  Synthetic oligonucleotide; GGG chr11 5172087 5172106 5172103 +
acaagtcacatgtgatggtg

SEQ ID NO: 2906 - DNA, 20 bp, Artificial Sequence
  Synthetic oligonucleotide; TAG chr11 5172091 5172110 5172107 +
gtcacatgtgatggtggggc

SEQ ID NO: 2907 - DNA, 20 bp, Artificial Sequence
  Synthetic oligonucleotide; AGG chr11 5172092 5172111 5172108 +
tcacatgtgatggtggggct

SEQ ID NO: 2908 - DNA, 20 bp, Artificial Sequence
  Synthetic oligonucleotide; GGG chr11 5172093 5172112 5172109 +
cacatgtgatggtggggcta

SEQ ID NO: 2909 - DNA, 20 bp, Artificial Sequence
  Synthetic oligonucleotide; CAG chr11 5172098 5172117 5172114 +
gtgatggtggggctagggta

SEQ ID NO: 2910 - DNA, 20 bp, Artificial Sequence
  Synthetic oligonucleotide; AGG chr11 5172099 5172118 5172115 +
tgatggtggggctagggtac

SEQ ID NO: 2911 - DNA, 20 bp, Artificial Sequence
  Synthetic oligonucleotide; TAG chr11 5172104 5172123 5172120 +
gtggggctagggtacaggct

SEQ ID NO: 2912 - DNA, 20 bp, Artificial Sequence
  Synthetic oligonucleotide; GAG chr11 5172106 5172125 5172122 +
ggggctagggtacaggctta

SEQ ID NO: 2913 - DNA, 20 bp, Artificial Sequence
  Synthetic oligonucleotide; TGG chr11 5172118 5172137 5172134 +
caggcttagagatatttatc

SEQ ID NO: 2914 - DNA, 20 bp, Artificial Sequence
  Synthetic oligonucleotide; GGG chr11 5172119 5172138 5172135 +
aggcttagagatatttatct

SEQ ID NO: 2915 - DNA, 20 bp, Artificial Sequence
  Synthetic oligonucleotide; AAG chr11 5172125 5172144 5172141 +
agagatatttatctgggaac

SEQ ID NO: 2916 - DNA, 20 bp, Artificial Sequence
  Synthetic oligonucleotide; AAG chr11 5172141 5172160 5172157 +
gaacaagtttattaacacta

SEQ ID NO: 2917 - DNA, 20 bp, Artificial Sequence
  Synthetic oligonucleotide; CAG chr11 5172157 5172176 5172173 +
actaaagttccacttatctg

SEQ ID NO: 2918 - DNA, 20 bp, Artificial Sequence
  Synthetic oligonucleotide; CAG chr11 5172160 5172179 5172176 +
aaagttccacttatctgcag

SEQ ID NO: 2919 - DNA, 20 bp, Artificial Sequence
  Synthetic oligonucleotide; GAG chr11 5172162 5172181 5172178 +
agttccacttatctgcagca

SEQ ID NO: 2920 - DNA, 20 bp, Artificial Sequence
  Synthetic oligonucleotide; TAG chr11 5172168 5172187 5172184 +
acttatctgcagcagagcct

SEQ ID NO: 2921 - DNA, 20 bp, Artificial Sequence
  Synthetic oligonucleotide; AGG chr11 5172169 5172188 5172185 +
cttatctgcagcagagcctt

SEQ ID NO: 2922 - DNA, 20 bp, Artificial Sequence
  Synthetic oligonucleotide; TGG chr11 5172181 5172200 5172197 +
agagccttaggtattaacgt

SEQ ID NO: 2923 - DNA, 20 bp, Artificial Sequence
  Synthetic oligonucleotide; GAG chr11 5172183 5172202 5172199 +
agccttaggtattaacgttg

SEQ ID NO: 2924 - DNA, 20 bp, Artificial Sequence
  Synthetic oligonucleotide; AGG chr11 5172184 5172203 5172200 +
gccttaggtattaacgttgg

SEQ ID NO: 2925 - DNA, 20 bp, Artificial Sequence
  Synthetic oligonucleotide; CAG chr11 5172188 5172207 5172204 +
taggtattaacgttggaggc

SEQ ID NO: 2926 - DNA, 20 bp, Artificial Sequence
  Synthetic oligonucleotide; TGG chr11 5172194 5172213 5172210 +
ttaacgttggaggccagaaa

SEQ ID NO: 2927 - DNA, 20 bp, Artificial Sequence
  Synthetic oligonucleotide; CAG chr11 5172201 5172220 5172217 +
tggaggccagaaatggaatt

SEQ ID NO: 2928 - DNA, 20 bp, Artificial Sequence
  Synthetic oligonucleotide; AGG chr11 5172202 5172221 5172218 +
ggaggccagaaatggaattc

SEQ ID NO: 2929 - DNA, 20 bp, Artificial Sequence
  Synthetic oligonucleotide; TGG chr11 5172206 5172225 5172222 +
gccagaaatggaattcagga

SEQ ID NO: 2930 - DNA, 20 bp, Artificial Sequence
  Synthetic oligonucleotide; GGG chr11 5172207 5172226 5172223 +
ccagaaatggaattcaggat

SEQ ID NO: 2931 - DNA, 20 bp, Artificial Sequence
  Synthetic oligonucleotide; GGG chr11 5172208 5172227 5172224 +
cagaaatggaattcaggatg

SEQ ID NO: 2932 - DNA, 20 bp, Artificial Sequence
  Synthetic oligonucleotide; CAG chr11 5172213 5172232 5172229 +
atggaattcaggatggggct

SEQ ID NO: 2933 - DNA, 20 bp, Artificial Sequence
  Synthetic oligonucleotide; AAG chr11 5172220 5172239 5172236 +
tcaggatggggctcagaaat

SEQ ID NO: 2934 - DNA, 20 bp, Artificial Sequence
  Synthetic oligonucleotide; AAG chr11 5172232 5172251 5172248 +
tcagaaataagaatgtgacc

SEQ ID NO: 2935 - DNA, 20 bp, Artificial Sequence
  Synthetic oligonucleotide; AGG chr11 5172233 5172252 5172249 +
cagaaataagaatgtgacca

SEQ ID NO: 2936 - DNA, 20 bp, Artificial Sequence
  Synthetic oligonucleotide; TGG chr11 5172256 5172275 5172272 +
ctgaactcttcttcccgtgt

SEQ ID NO: 2937 - DNA, 20 bp, Artificial Sequence
  Synthetic oligonucleotide; GGG chr11 5172257 5172276 5172273 +
tgaactcttcttcccgtgtt

SEQ ID NO: 2938 - DNA, 20 bp, Artificial Sequence
  Synthetic oligonucleotide; CAG chr11 5172261 5172280 5172277 +
ctcttcttcccgtgttgggc

SEQ ID NO: 2939 - DNA, 20 bp, Artificial Sequence
  Synthetic oligonucleotide; AGG chr11 5172262 5172281 5172278 +
tcttcttcccgtgttgggcc

SEQ ID NO: 2940 - DNA, 20 bp, Artificial Sequence
  Synthetic oligonucleotide; GGG chr11 5172263 5172282 5172279 +
cttcttcccgtgttgggcca

SEQ ID NO: 2941 - DNA, 20 bp, Artificial Sequence
  Synthetic oligonucleotide; TAG chr11 5172274 5172293 5172290 +
gttgggccagggctcttcgt

SEQ ID NO: 2942 - DNA, 20 bp, Artificial Sequence
  Synthetic oligonucleotide; AGG chr11 5172275 5172294 5172291 +
ttgggccagggctcttcgtt

SEQ ID NO: 2943 - DNA, 20 bp, Artificial Sequence
  Synthetic oligonucleotide; CAG chr11 5172284 5172303 5172300 +
ggctcttcgttaggcataat

SEQ ID NO: 2944 - DNA, 20 bp, Artificial Sequence
  Synthetic oligonucleotide; TGG chr11 5172287 5172306 5172303 +
tcttcgttaggcataatcag

SEQ ID NO: 2945 - DNA, 20 bp, Artificial Sequence
  Synthetic oligonucleotide; GGG chr11 5172288 5172307 5172304 +
cttcgttaggcataatcagt

SEQ ID NO: 2946 - DNA, 20 bp, Artificial Sequence
  Synthetic oligonucleotide; TAG chr11 5172292 5172311 5172308 +
gttaggcataatcagtggga

SEQ ID NO: 2947 - DNA, 20 bp, Artificial Sequence
  Synthetic oligonucleotide; CAG chr11 5172333 5172352 5172349 +
aaaaatgccctgatttttac

SEQ ID NO: 2948 - DNA, 20 bp, Artificial Sequence
  Synthetic oligonucleotide; CAG chr11 5172380 5172399 5172396 +
actcctaccatgatcaattt

SEQ ID NO: 2949 - DNA, 20 bp, Artificial Sequence
  Synthetic oligonucleotide; AAG chr11 5172390 5172409 5172406 +
tgatcaatttcagactacca

SEQ ID NO: 2950 - DNA, 20 bp, Artificial Sequence
  Synthetic oligonucleotide; GAG chr11 5172392 5172411 5172408 +
atcaatttcagactaccaaa

SEQ ID NO: 2951 - DNA, 20 bp, Artificial Sequence
  Synthetic oligonucleotide; CAG chr11 5172408 5172427 5172424 +
caaagagatgctattaaatg

SEQ ID NO: 2952 - DNA, 20 bp, Artificial Sequence
  Synthetic oligonucleotide; GAG chr11 5172410 5172429 5172426 +
aagagatgctattaaatgca

SEQ ID NO: 2953 - DNA, 20 bp, Artificial Sequence
  Synthetic oligonucleotide; GAG chr11 5172415 5172434 5172431 +
atgctattaaatgcagagct

SEQ ID NO: 2954 - DNA, 20 bp, Artificial Sequence
  Synthetic oligonucleotide; GAG chr11 5172420 5172439 5172436 +
attaaatgcagagctgagat

SEQ ID NO: 2955 - DNA, 20 bp, Artificial Sequence
  Synthetic oligonucleotide; CAG chr11 5172429 5172448 5172445 +
agagctgagatgagcataat

SEQ ID NO: 2956 - DNA, 20 bp, Artificial Sequence
  Synthetic oligonucleotide; AAG chr11 5172439 5172458 5172455 +
tgagcataatcagctttcct

SEQ ID NO: 2957 - DNA, 20 bp, Artificial Sequence
  Synthetic oligonucleotide; TGG chr11 5172443 5172462 5172459 +
cataatcagctttcctaagc

SEQ ID NO: 2958 - DNA, 20 bp, Artificial Sequence
  Synthetic oligonucleotide; AAG chr11 5172449 5172468 5172465 +
cagctttcctaagctggtgc

SEQ ID NO: 2959 - DNA, 20 bp, Artificial Sequence
  Synthetic oligonucleotide; CAG chr11 5172453 5172472 5172469 +
tttcctaagctggtgcaagc

SEQ ID NO: 2960 - DNA, 20 bp, Artificial Sequence
  Synthetic oligonucleotide; TAG chr11 5172469 5172488 5172485 +
aagccagcacattataccat

SEQ ID NO: 2961 - DNA, 20 bp, Artificial Sequence
  Synthetic oligonucleotide; AGG chr11 5172470 5172489 5172486 +
agccagcacattataccatt

SEQ ID NO: 2962 - DNA, 20 bp, Artificial Sequence
  Synthetic oligonucleotide; TAG chr11 5172481 5172500 5172497 +
tataccattaggcataacta

SEQ ID NO: 2963 - DNA, 20 bp, Artificial Sequence
  Synthetic oligonucleotide; TAG chr11 5172491 5172510 5172507 +
ggcataactatagttgatcc

SEQ ID NO: 2964 - DNA, 20 bp, Artificial Sequence
  Synthetic oligonucleotide; CAG chr11 5172498 5172517 5172514 +
ctatagttgatcctagacct

SEQ ID NO: 2965 - DNA, 20 bp, Artificial Sequence
  Synthetic oligonucleotide; TAG chr11 5172510 5172529 5172526 +
ctagacctcagatacttacc

SEQ ID NO: 2966 - DNA, 20 bp, Artificial Sequence
  Synthetic oligonucleotide; AGG chr11 5172511 5172530 5172527 +
tagacctcagatacttacct

SEQ ID NO: 2967 - DNA, 20 bp, Artificial Sequence
  Synthetic oligonucleotide; TGG chr11 5172514 5172533 5172530 +
acctcagatacttacctagg

SEQ ID NO: 2968 - DNA, 20 bp, Artificial Sequence
  Synthetic oligonucleotide; GAG chr11 5172521 5172540 5172537 +
atacttacctaggtggaact

SEQ ID NO: 2969 - DNA, 20 bp, Artificial Sequence
  Synthetic oligonucleotide; GAG chr11 5172523 5172542 5172539 +
acttacctaggtggaactga

SEQ ID NO: 2970 - DNA, 20 bp, Artificial Sequence
  Synthetic oligonucleotide; TGG chr11 5172573 5172592 5172589 +
tgttactgtttactttcaac

SEQ ID NO: 2971 - DNA, 20 bp, Artificial Sequence
  Synthetic oligonucleotide; GGG chr11 5172574 5172593 5172590 +
gttactgtttactttcaact

SEQ ID NO: 2972 - DNA, 20 bp, Artificial Sequence
  Synthetic oligonucleotide; TGG chr11 5172580 5172599 5172596 +
gtttactttcaactgggctg

SEQ ID NO: 2973 - DNA, 20 bp, Artificial Sequence
  Synthetic oligonucleotide; TAG chr11 5172586 5172605 5172602 +
tttcaactgggctgtggaca

SEQ ID NO: 2974 - DNA, 20 bp, Artificial Sequence
  Synthetic oligonucleotide; TAG chr11 5172613 5172632 5172629 +
tacctccctgtatatgtgct

SEQ ID NO: 2975 - DNA, 20 bp, Artificial Sequence
  Synthetic oligonucleotide; TGG chr11 5172621 5172640 5172637 +
tgtatatgtgcttagttgac

SEQ ID NO: 2976 - DNA, 20 bp, Artificial Sequence
  Synthetic oligonucleotide; GAG chr11 5172623 5172642 5172639 +
tatatgtgcttagttgactg

SEQ ID NO: 2977 - DNA, 20 bp, Artificial Sequence
  Synthetic oligonucleotide; AGG chr11 5172624 5172643 5172640 +
atatgtgcttagttgactgg

SEQ ID NO: 2978 - DNA, 20 bp, Artificial Sequence
  Synthetic oligonucleotide; TAG chr11 5172630 5172649 5172646 +
gcttagttgactggaggaca

SEQ ID NO: 2979 - DNA, 20 bp, Artificial Sequence
  Synthetic oligonucleotide; GAG chr11 5172632 5172651 5172648 +
ttagttgactggaggacata

SEQ ID NO: 2980 - DNA, 20 bp, Artificial Sequence
  Synthetic oligonucleotide; CAG chr11 5172636 5172655 5172652 +
ttgactggaggacatagaga

SEQ ID NO: 2981 - DNA, 20 bp, Artificial Sequence
  Synthetic oligonucleotide; CAG chr11 5172646 5172665 5172662 +
gacatagagacagaatgatt

SEQ ID NO: 2982 - DNA, 20 bp, Artificial Sequence
  Synthetic oligonucleotide; AAG chr11 5172657 5172676 5172673 +
agaatgattcagtatccctc

SEQ ID NO: 2983 - DNA, 20 bp, Artificial Sequence
  Synthetic oligonucleotide; AAG chr11 5172660 5172679 5172676 +
atgattcagtatccctcaag

SEQ ID NO: 2984 - DNA, 20 bp, Artificial Sequence
  Synthetic oligonucleotide; AAG chr11 5172672 5172691 5172688 +
ccctcaagaagcaattaacc

SEQ ID NO: 2985 - DNA, 20 bp, Artificial Sequence
  Synthetic oligonucleotide; CAG chr11 5172687 5172706 5172703 +
taaccaagaataattattcc

SEQ ID NO: 2986 - DNA, 20 bp, Artificial Sequence
  Synthetic oligonucleotide; CGG chr11 5172696 5172715 5172712 +
ataattattcccagaaactt

SEQ ID NO: 2987 - DNA, 20 bp, Artificial Sequence
  Synthetic oligonucleotide; GGG chr11 5172697 5172716 5172713 +
taattattcccagaaacttc

SEQ ID NO: 2988 - DNA, 20 bp, Artificial Sequence
  Synthetic oligonucleotide; TAG chr11 5172705 5172724 5172721 +
cccagaaacttcgggtgtat

SEQ ID NO: 2989 - DNA, 20 bp, Artificial Sequence
  Synthetic oligonucleotide; GAG chr11 5172707 5172726 5172723 +
cagaaacttcgggtgtatta

SEQ ID NO: 2990 - DNA, 20 bp, Artificial Sequence
  Synthetic oligonucleotide; GAG chr11 5172709 5172728 5172725 +
gaaacttcgggtgtattaga

SEQ ID NO: 2991 - DNA, 20 bp, Artificial Sequence
  Synthetic oligonucleotide; AAG chr11 5172713 5172732 5172729 +
cttcgggtgtattagagaga

SEQ ID NO: 2992 - DNA, 20 bp, Artificial Sequence
  Synthetic oligonucleotide; AGG chr11 5172714 5172733 5172730 +
ttcgggtgtattagagagaa

SEQ ID NO: 2993 - DNA, 20 bp, Artificial Sequence
  Synthetic oligonucleotide; GGG chr11 5172715 5172734 5172731 +
tcgggtgtattagagagaaa

SEQ ID NO: 2994 - DNA, 20 bp, Artificial Sequence
  Synthetic oligonucleotide; GGG chr11 5172716 5172735 5172732 +
cgggtgtattagagagaaag

SEQ ID NO: 2995 - DNA, 20 bp, Artificial Sequence
  Synthetic oligonucleotide; GGG chr11 5172717 5172736 5172733 +
gggtgtattagagagaaagg

SEQ ID NO: 2996 - DNA, 20 bp, Artificial Sequence
  Synthetic oligonucleotide; GGG chr11 5172718 5172737 5172734 +
ggtgtattagagagaaaggg

SEQ ID NO: 2997 - DNA, 20 bp, Artificial Sequence
  Synthetic oligonucleotide; TAG chr11 5172723 5172742 5172739 +
attagagagaaaggggggaa

SEQ ID NO: 2998 - DNA, 20 bp, Artificial Sequence
  Synthetic oligonucleotide; GAG chr11 5172731 5172750 5172747 +
gaaaggggggaatagttcct

SEQ ID NO: 2999 - DNA, 20 bp, Artificial Sequence
  Synthetic oligonucleotide; AAG chr11 5172734 5172753 5172750 +
aggggggaatagttcctgag

SEQ ID NO: 3000 - DNA, 20 bp, Artificial Sequence
  Synthetic oligonucleotide; TGG chr11 5172742 5172761 5172758 +
atagttcctgagaagcatgc

SEQ ID NO: 3001 - DNA, 20 bp, Artificial Sequence
  Synthetic oligonucleotide; GAG chr11 5172744 5172763 5172760 +
agttcctgagaagcatgctg

SEQ ID NO: 3002 - DNA, 20 bp, Artificial Sequence
  Synthetic oligonucleotide; GAG chr11 5172746 5172765 5172762 +
ttcctgagaagcatgctgga

SEQ ID NO: 3003 - DNA, 20 bp, Artificial Sequence
  Synthetic oligonucleotide; GAG chr11 5172748 5172767 5172764 +
cctgagaagcatgctggaga

SEQ ID NO: 3004 - DNA, 20 bp, Artificial Sequence
  Synthetic oligonucleotide; AAG chr11 5172758 5172777 5172774 +
atgctggagagagtatacat

SEQ ID NO: 3005 - DNA, 20 bp, Artificial Sequence
  Synthetic oligonucleotide; TAG chr11 5172801 5172820 5172817 +
aaacccaaataaacataaaa

SEQ ID NO: 3006 - DNA, 20 bp, Artificial Sequence
  Synthetic oligonucleotide; AAG chr11 5172836 5172855 5172852 +
attaattataatttaaatat

SEQ ID NO: 3007 - DNA, 20 bp, Artificial Sequence
  Synthetic oligonucleotide; TGG chr11 5172843 5172862 5172859 +
ataatttaaatataagacat

SEQ ID NO: 3008 - DNA, 20 bp, Artificial Sequence
  Synthetic oligonucleotide; TAG chr11 5172924 5172943 5172940 +
tcatttacaaaacttttatg

SEQ ID NO: 3009 - DNA, 20 bp, Artificial Sequence
  Synthetic oligonucleotide; CAG chr11 5172928 5172947 5172944 +
ttacaaaacttttatgtagt

SEQ ID NO: 3010 - DNA, 20 bp, Artificial Sequence
  Synthetic oligonucleotide; AGG chr11 5172929 5172948 5172945 +
tacaaaacttttatgtagtc

SEQ ID NO: 3011 - DNA, 20 bp, Artificial Sequence
  Synthetic oligonucleotide; AAG chr11 5172972 5172991 5172988 +
attatatacttttcattctt

SEQ ID NO: 3012 - DNA, 20 bp, Artificial Sequence
  Synthetic oligonucleotide; AAG chr11 5172975 5172994 5172991 +
atatacttttcattcttaag

SEQ ID NO: 3013 - DNA, 20 bp, Artificial Sequence
  Synthetic oligonucleotide; AAG chr11 5172992 5173011 5173008 +
aagaagctattccatataca

SEQ ID NO: 3014 - DNA, 20 bp, Artificial Sequence
  Synthetic oligonucleotide; AAG chr11 5172999 5173018 5173015 +
tattccatatacaaagtaaa

SEQ ID NO: 3015 - DNA, 20 bp, Artificial Sequence
  Synthetic oligonucleotide; TGG chr11 5173002 5173021 5173018 +
tccatatacaaagtaaaaag

SEQ ID NO: 3016 - DNA, 20 bp, Artificial Sequence
  Synthetic oligonucleotide; GAG chr11 5173004 5173023 5173020 +
catatacaaagtaaaaagtg

SEQ ID NO: 3017 - DNA, 20 bp, Artificial Sequence
  Synthetic oligonucleotide; GAG chr11 5173006 5173025 5173022 +
tatacaaagtaaaaagtgga

SEQ ID NO: 3018 - DNA, 20 bp, Artificial Sequence
  Synthetic oligonucleotide; CAG chr11 5173012 5173031 5173028 +
aagtaaaaagtggagagatg

SEQ ID NO: 3019 - DNA, 20 bp, Artificial Sequence
  Synthetic oligonucleotide; GAG chr11 5173014 5173033 5173030 +
gtaaaaagtggagagatgca

SEQ ID NO: 3020 - DNA, 20 bp, Artificial Sequence
  Synthetic oligonucleotide; TGG chr11 5173018 5173037 5173034 +
aaagtggagagatgcagagt

SEQ ID NO: 3021 - DNA, 20 bp, Artificial Sequence
  Synthetic oligonucleotide; TAG chr11 5173024 5173043 5173040 +
gagagatgcagagttggatc

SEQ ID NO: 3022 - DNA, 20 bp, Artificial Sequence
  Synthetic oligonucleotide; GAG chr11 5173026 5173045 5173042 +
gagatgcagagttggatcta

SEQ ID NO: 3023 - DNA, 20 bp, Artificial Sequence
  Synthetic oligonucleotide; TAG chr11 5173030 5173049 5173046 +
tgcagagttggatctagagc

SEQ ID NO: 3024 - DNA, 20 bp, Artificial Sequence
  Synthetic oligonucleotide; GAG chr11 5173032 5173051 5173048 +
cagagttggatctagagcta

SEQ ID NO: 3025 - DNA, 20 bp, Artificial Sequence
  Synthetic oligonucleotide; CGG chr11 5173036 5173055 5173052 +
gttggatctagagctagaga

SEQ ID NO: 3026 - DNA, 20 bp, Artificial Sequence
  Synthetic oligonucleotide; CAG chr11 5173044 5173063 5173060 +
tagagctagagacggaactg

SEQ ID NO: 3027 - DNA, 20 bp, Artificial Sequence
  Synthetic oligonucleotide; TAG chr11 5173048 5173067 5173064 +
gctagagacggaactgcaga

SEQ ID NO: 3028 - DNA, 20 bp, Artificial Sequence
  Synthetic oligonucleotide; AGG chr11 5173049 5173068 5173065 +
ctagagacggaactgcagat

SEQ ID NO: 3029 - DNA, 20 bp, Artificial Sequence
  Synthetic oligonucleotide; GGG chr11 5173050 5173069 5173066 +
tagagacggaactgcagata

SEQ ID NO: 3030 - DNA, 20 bp, Artificial Sequence
  Synthetic oligonucleotide; TAG chr11 5173054 5173073 5173070 +
gacggaactgcagataggga

SEQ ID NO: 3031 - DNA, 20 bp, Artificial Sequence
  Synthetic oligonucleotide; TGG chr11 5173057 5173076 5173073 +
ggaactgcagatagggatag

SEQ ID NO: 3032 - DNA, 20 bp, Artificial Sequence
  Synthetic oligonucleotide; TAG chr11 5173062 5173081 5173078 +
tgcagatagggatagtggtg

SEQ ID NO: 3033 - DNA, 20 bp, Artificial Sequence
  Synthetic oligonucleotide; TAG chr11 5173066 5173085 5173082 +
gatagggatagtggtgtaga

SEQ ID NO: 3034 - DNA, 20 bp, Artificial Sequence
  Synthetic oligonucleotide; AAG chr11 5173074 5173093 5173090 +
tagtggtgtagatagtaata

SEQ ID NO: 3035 - DNA, 20 bp, Artificial Sequence
  Synthetic oligonucleotide; AGG chr11 5173075 5173094 5173091 +
agtggtgtagatagtaataa

SEQ ID NO: 3036 - DNA, 20 bp, Artificial Sequence
  Synthetic oligonucleotide; GGG chr11 5173076 5173095 5173092 +
gtggtgtagatagtaataaa

SEQ ID NO: 3037 - DNA, 20 bp, Artificial Sequence
  Synthetic oligonucleotide; GGG chr11 5173077 5173096 5173093 +
tggtgtagatagtaataaag

SEQ ID NO: 3038 - DNA, 20 bp, Artificial Sequence
  Synthetic oligonucleotide; GGG chr11 5173078 5173097 5173094 +
ggtgtagatagtaataaagg

SEQ ID NO: 3039 - DNA, 20 bp, Artificial Sequence
  Synthetic oligonucleotide; TAG chr11 5173082 5173101 5173098 +
tagatagtaataaaggggga

SEQ ID NO: 3040 - DNA, 20 bp, Artificial Sequence
  Synthetic oligonucleotide; GAG chr11 5173084 5173103 5173100 +
gatagtaataaagggggata

SEQ ID NO: 3041 - DNA, 20 bp, Artificial Sequence
  Synthetic oligonucleotide; CAG chr11 5173088 5173107 5173104 +
gtaataaagggggatagaga

SEQ ID NO: 3042 - DNA, 20 bp, Artificial Sequence
  Synthetic oligonucleotide; AAG chr11 5173102 5173121 5173118 +
tagagacagtaatcatgata

SEQ ID NO: 3043 - DNA, 20 bp, Artificial Sequence
  Synthetic oligonucleotide; CAG chr11 5173106 5173125 5173122 +
gacagtaatcatgataaaga

SEQ ID NO: 3044 - DNA, 20 bp, Artificial Sequence
  Synthetic oligonucleotide; AGG chr11 5173107 5173126 5173123 +
acagtaatcatgataaagac

SEQ ID NO: 3045 - DNA, 20 bp, Artificial Sequence
  Synthetic oligonucleotide; TAG chr11 5173116 5173135 5173132 +
atgataaagacaggtaataa

SEQ ID NO: 3046 - DNA, 20 bp, Artificial Sequence
  Synthetic oligonucleotide; TAG chr11 5173122 5173141 5173138 +
aagacaggtaataatagtgt

SEQ ID NO: 3047 - DNA, 20 bp, Artificial Sequence
  Synthetic oligonucleotide; GAG chr11 5173124 5173143 5173140 +
gacaggtaataatagtgtta

SEQ ID NO: 3048 - DNA, 20 bp, Artificial Sequence
  Synthetic oligonucleotide; TGG chr11 5173153 5173172 5173169 +
gattccacctgaaatttgtt

SEQ ID NO: 3049 - DNA, 20 bp, Artificial Sequence
  Synthetic oligonucleotide; GGG chr11 5173154 5173173 5173170 +
attccacctgaaatttgttt

SEQ ID NO: 3050 - DNA, 20 bp, Artificial Sequence
  Synthetic oligonucleotide; GGG chr11 5173155 5173174 5173171 +
ttccacctgaaatttgtttg

SEQ ID NO: 3051 - DNA, 20 bp, Artificial Sequence
  Synthetic oligonucleotide; GGG chr11 5173156 5173175 5173172 +
tccacctgaaatttgtttgg

SEQ ID NO: 3052 - DNA, 20 bp, Artificial Sequence
  Synthetic oligonucleotide; TGG chr11 5173162 5173181 5173178 +
tgaaatttgtttgggggact

SEQ ID NO: 3053 - DNA, 20 bp, Artificial Sequence
  Synthetic oligonucleotide; GGG chr11 5173163 5173182 5173179 +
gaaatttgtttgggggactt

SEQ ID NO: 3054 - DNA, 20 bp, Artificial Sequence
  Synthetic oligonucleotide; TAG chr11 5173170 5173189 5173186 +
gtttgggggacttgggtaat

SEQ ID NO: 3055 - DNA, 20 bp, Artificial Sequence
  Synthetic oligonucleotide; AAG chr11 5173183 5173202 5173199 +
gggtaattagaattttactt

SEQ ID NO: 3056 - DNA, 20 bp, Artificial Sequence
  Synthetic oligonucleotide; AAG chr11 5173220 5173239 5173236 +
taaacaatttttctaatacc

SEQ ID NO: 3057 - DNA, 20 bp, Artificial Sequence
  Synthetic oligonucleotide; AAG chr11 5173226 5173245 5173242 +
atttttctaataccaagtat

SEQ ID NO: 3058 - DNA, 20 bp, Artificial Sequence
  Synthetic oligonucleotide; AAG chr11 5173232 5173251 5173248 +
ctaataccaagtataagatc

SEQ ID NO: 3059 - DNA, 20 bp, Artificial Sequence
  Synthetic oligonucleotide; AGG chr11 5173233 5173252 5173249 +
taataccaagtataagatca

SEQ ID NO: 3060 - DNA, 20 bp, Artificial Sequence
  Synthetic oligonucleotide; GGG chr11 5173234 5173253 5173250 +
aataccaagtataagatcaa

SEQ ID NO: 3061 - DNA, 20 bp, Artificial Sequence
  Synthetic oligonucleotide; TGG chr11 5173238 5173257 5173254 +
ccaagtataagatcaagggt

SEQ ID NO: 3062 - DNA, 20 bp, Artificial Sequence
  Synthetic oligonucleotide; AAG chr11 5173246 5173265 5173262 +
aagatcaagggttggtctcc

SEQ ID NO: 3063 - DNA, 20 bp, Artificial Sequence
  Synthetic oligonucleotide; GAG chr11 5173255 5173274 5173271 +
ggttggtctccaagcatgat

SEQ ID NO: 3064 - DNA, 20 bp, Artificial Sequence
  Synthetic oligonucleotide; AGG chr11 5173256 5173275 5173272 +
gttggtctccaagcatgatg

SEQ ID NO: 3065 - DNA, 20 bp, Artificial Sequence
  Synthetic oligonucleotide; GGG chr11 5173257 5173276 5173273 +
ttggtctccaagcatgatga

SEQ ID NO: 3066 - DNA, 20 bp, Artificial Sequence
  Synthetic oligonucleotide; TGG chr11 5173296 5173315 5173312 +
tttatatttttatataaata

SEQ ID NO: 3067 - DNA, 20 bp, Artificial Sequence
  Synthetic oligonucleotide; TAG chr11 5173308 5173327 5173324 +
tataaatatggatctaattc

SEQ ID NO: 3068 - DNA, 20 bp, Artificial Sequence
  Synthetic oligonucleotide; TGG chr11 5173401 5173420 5173417 +
tatacaacttcatattcaat

SEQ ID NO: 3069 - DNA, 20 bp, Artificial Sequence
  Synthetic oligonucleotide; AAG chr11 5173406 5173425 5173422 +
aacttcatattcaattggtc

SEQ ID NO: 3070 - DNA, 20 bp, Artificial Sequence
  Synthetic oligonucleotide; AAG chr11 5173450 5173469 5173466 +
aactttgtattctttcaaat

SEQ ID NO: 3071 - DNA, 20 bp, Artificial Sequence
  Synthetic oligonucleotide; AGG chr11 5173451 5173470 5173467 +
actttgtattctttcaaata

SEQ ID NO: 3072 - DNA, 20 bp, Artificial Sequence
  Synthetic oligonucleotide; AAG chr11 5173459 5173478 5173475 +
ttctttcaaataaggattaa

SEQ ID NO: 3073 - DNA, 20 bp, Artificial Sequence
  Synthetic oligonucleotide; CAG chr11 5173463 5173482 5173479 +
ttcaaataaggattaaaagc

SEQ ID NO: 3074 - DNA, 20 bp, Artificial Sequence
  Synthetic oligonucleotide; AAG chr11 5173503 5173522 5173519 +
taatgacctaaattgaacta

SEQ ID NO: 3075 - DNA, 20 bp, Artificial Sequence
  Synthetic oligonucleotide; CGG chr11 5173518 5173537 5173534 +
aactaaagccataacaccct

SEQ ID NO: 3076 - DNA, 20 bp, Artificial Sequence
  Synthetic oligonucleotide; AAG chr11 5173521 5173540 5173537 +
taaagccataacaccctcgg

SEQ ID NO: 3077 - DNA, 20 bp, Artificial Sequence
  Synthetic oligonucleotide; AGG chr11 5173522 5173541 5173538 +
aaagccataacaccctcgga

SEQ ID NO: 3078 - DNA, 20 bp, Artificial Sequence
  Synthetic oligonucleotide; AAG chr11 5173525 5173544 5173541 +
gccataacaccctcggaagg

SEQ ID NO: 3079 - DNA, 20 bp, Artificial Sequence
  Synthetic oligonucleotide; TGG chr11 5173530 5173549 5173546 +
aacaccctcggaaggaagca

SEQ ID NO: 3080 - DNA, 20 bp, Artificial Sequence
  Synthetic oligonucleotide; GGG chr11 5173531 5173550 5173547 +
acaccctcggaaggaagcat

SEQ ID NO: 3081 - DNA, 20 bp, Artificial Sequence
  Synthetic oligonucleotide; TAG chr11 5173562 5173581 5173578 +
catgaactttgattttacaa

SEQ ID NO: 3082 - DNA, 20 bp, Artificial Sequence
  Synthetic oligonucleotide; TAG chr11 5173570 5173589 5173586 +
ttgattttacaatagattct

SEQ ID NO: 3083 - DNA, 20 bp, Artificial Sequence
  Synthetic oligonucleotide; AAG chr11 5173585 5173604 5173601 +
attcttagatatgacacaaa

SEQ ID NO: 3084 - DNA, 20 bp, Artificial Sequence
  Synthetic oligonucleotide; GAG chr11 5173591 5173610 5173607 +
agatatgacacaaaaagtat

SEQ ID NO: 3085 - DNA, 20 bp, Artificial Sequence
  Synthetic oligonucleotide; TGG chr11 5173617 5173636 5173633 +
caaaaaataaatacataaat

SEQ ID NO: 3086 - DNA, 20 bp, Artificial Sequence
  Synthetic oligonucleotide; AAG chr11 5173632 5173651 5173648 +
taaattggatttcatttaaa

SEQ ID NO: 3087 - DNA, 20 bp, Artificial Sequence
  Synthetic oligonucleotide; AAG chr11 5173655 5173674 5173671 +
ttcatgcaacaaacgacttt

SEQ ID NO: 3088 - DNA, 20 bp, Artificial Sequence
  Synthetic oligonucleotide; AAG chr11 5173659 5173678 5173675 +
tgcaacaaacgactttaaga

SEQ ID NO: 3089 - DNA, 20 bp, Artificial Sequence
  Synthetic oligonucleotide; AAG chr11 5173666 5173685 5173682 +
aacgactttaagaaagtaaa

SEQ ID NO: 3090 - DNA, 20 bp, Artificial Sequence
  Synthetic oligonucleotide; AAG chr11 5173678 5173697 5173694 +
aaagtaaaaagacaacctat

SEQ ID NO: 3091 - DNA, 20 bp, Artificial Sequence
  Synthetic oligonucleotide; GAG chr11 5173683 5173702 5173699 +
aaaaagacaacctataagat

SEQ ID NO: 3092 - DNA, 20 bp, Artificial Sequence
  Synthetic oligonucleotide; GAG chr11 5173685 5173704 5173701 +
aaagacaacctataagatga

SEQ ID NO: 3093 - DNA, 20 bp, Artificial Sequence
  Synthetic oligonucleotide; AAG chr11 5173715 5173734 5173731 +
ttgcaaattatgtatttcat

SEQ ID NO: 3094 - DNA, 20 bp, Artificial Sequence
  Synthetic oligonucleotide; CAG chr11 5173727 5173746 5173743 +
tatttcataagtttaatatc

SEQ ID NO: 3095 - DNA, 20 bp, Artificial Sequence
  Synthetic oligonucleotide; AAG chr11 5173741 5173760 5173757 +
aatatccagaatgtatgaaa

SEQ ID NO: 3096 - DNA, 20 bp, Artificial Sequence
  Synthetic oligonucleotide; AAG chr11 5173764 5173783 5173780 +
tcctacaactcaaaaacaaa

SEQ ID NO: 3097 - DNA, 20 bp, Artificial Sequence
  Synthetic oligonucleotide; TGG chr11 5173799 5173818 5173815 +
atttaaaaatatgcaaatga

SEQ ID NO: 3098 - DNA, 20 bp, Artificial Sequence
  Synthetic oligonucleotide; GGG chr11 5173800 5173819 5173816 +
tttaaaaatatgcaaatgat

SEQ ID NO: 3099 - DNA, 20 bp, Artificial Sequence
  Synthetic oligonucleotide; GAG chr11 5173806 5173825 5173822 +
aatatgcaaatgatgggaat

SEQ ID NO: 3100 - DNA, 20 bp, Artificial Sequence
  Synthetic oligonucleotide; TAG chr11 5173816 5173835 5173832 +
tgatgggaatgagtaatttc

SEQ ID NO: 3101 - DNA, 20 bp, Artificial Sequence
  Synthetic oligonucleotide; AAG chr11 5173820 5173839 5173836 +
gggaatgagtaatttctaga

SEQ ID NO: 3102 - DNA, 20 bp, Artificial Sequence
  Synthetic oligonucleotide; AAG chr11 5173823 5173842 5173839 +
aatgagtaatttctagaaag

SEQ ID NO: 3103 - DNA, 20 bp, Artificial Sequence
  Synthetic oligonucleotide; TGG chr11 5173842 5173861 5173858 +
gaagatatacaaatgaacat

SEQ ID NO: 3104 - DNA, 20 bp, Artificial Sequence
  Synthetic oligonucleotide; AAG chr11 5173873 5173892 5173889 +
atgcaaaccaaaaccacaat

SEQ ID NO: 3105 - DNA, 20 bp, Artificial Sequence
  Synthetic oligonucleotide; TAG chr11 5173894 5173913 5173910 +
agacactacttcaaacttac

SEQ ID NO: 3106 - DNA, 20 bp, Artificial Sequence
  Synthetic oligonucleotide; AAG chr11 5173911 5173930 5173927 +
tactagaatgtctatacttt

SEQ ID NO: 3107 - DNA, 20 bp, Artificial Sequence
  Synthetic oligonucleotide; GAG chr11 5173913 5173932 5173929 +
ctagaatgtctatactttaa

SEQ ID NO: 3108 - DNA, 20 bp, Artificial Sequence
  Synthetic oligonucleotide; AAG chr11 5173932 5173951 5173948 +
agagaaacaaaacaaatgaa

SEQ ID NO: 3109 - DNA, 20 bp, Artificial Sequence
  Synthetic oligonucleotide; AAG chr11 5173939 5173958 5173955 +
caaaacaaatgaaaagtaac

SEQ ID NO: 3110 - DNA, 20 bp, Artificial Sequence
  Synthetic oligonucleotide; AAG chr11 5173950 5173969 5173966 +
aaaagtaacaagtgttgaca

SEQ ID NO: 3111 - DNA, 20 bp, Artificial Sequence
  Synthetic oligonucleotide; AAG chr11 5173957 5173976 5173973 +
acaagtgttgacaaagatat

SEQ ID NO: 3112 - DNA, 20 bp, Artificial Sequence
  Synthetic oligonucleotide; TGG chr11 5173965 5173984 5173981 +
tgacaaagatataagaaaat

SEQ ID NO: 3113 - DNA, 20 bp, Artificial Sequence
  Synthetic oligonucleotide; AAG chr11 5173997 5174016 5174013 +
atattgctgctaaaaatgtt

SEQ ID NO: 3114 - DNA, 20 bp, Artificial Sequence
  Synthetic oligonucleotide; TGG chr11 5174000 5174019 5174016 +
ttgctgctaaaaatgttaag

SEQ ID NO: 3115 - DNA, 20 bp, Artificial Sequence
  Synthetic oligonucleotide; TAG chr11 5174014 5174033 5174030 +
gttaagtggtgcaacttctg

SEQ ID NO: 3116 - DNA, 20 bp, Artificial Sequence
  Synthetic oligonucleotide; CAG chr11 5174029 5174048 5174045 +
ttctgtagaaaatattttga

SEQ ID NO: 3117 - DNA, 20 bp, Artificial Sequence
  Synthetic oligonucleotide; TAG chr11 5174045 5174064 5174061 +
ttgacagttcttcaaaaact

SEQ ID NO: 3118 - DNA, 20 bp, Artificial Sequence
  Synthetic oligonucleotide; AGG chr11 5174046 5174065 5174062 +
tgacagttcttcaaaaactt

SEQ ID NO: 3119 - DNA, 20 bp, Artificial Sequence
  Synthetic oligonucleotide; TAG chr11 5174083 5174102 5174099 +
tgaccccaaaattcctctcc

SEQ ID NO: 3120 - DNA, 20 bp, Artificial Sequence
  Synthetic oligonucleotide; AGG chr11 5174084 5174103 5174100 +
gaccccaaaattcctctcct

SEQ ID NO: 3121 - DNA, 20 bp, Artificial Sequence
  Synthetic oligonucleotide; AAG chr11 5174108 5174127 5174124 +
atatattaaaaatatatata

SEQ ID NO: 3122 - DNA, 20 bp, Artificial Sequence
  Synthetic oligonucleotide; CAG chr11 5174118 5174137 5174134 +
aatatatataaagatttaaa

SEQ ID NO: 3123 - DNA, 20 bp, Artificial Sequence
  Synthetic oligonucleotide; AGG chr11 5174119 5174138 5174135 +
atatatataaagatttaaac

SEQ ID NO: 3124 - DNA, 20 bp, Artificial Sequence
  Synthetic oligonucleotide; TAG chr11 5174145 5174164 5174161 +
ttgtactgaaatgttcattg

SEQ ID NO: 3125 - DNA, 20 bp, Artificial Sequence
  Synthetic oligonucleotide; TAG chr11 5174160 5174179 5174176 +
cattgtagcattattcacaa

SEQ ID NO: 3126 - DNA, 20 bp, Artificial Sequence
  Synthetic oligonucleotide; AAG chr11 5174167 5174186 5174183 +
gcattattcacaatagccaa

SEQ ID NO: 3127 - DNA, 20 bp, Artificial Sequence
  Synthetic oligonucleotide; AGG chr11 5174168 5174187 5174184 +
cattattcacaatagccaaa

SEQ ID NO: 3128 - DNA, 20 bp, Artificial Sequence
  Synthetic oligonucleotide; TGG chr11 5174171 5174190 5174187 +
tattcacaatagccaaaagg

SEQ ID NO: 3129 - DNA, 20 bp, Artificial Sequence
  Synthetic oligonucleotide; CAG chr11 5174181 5174200 5174197 +
agccaaaaggtggaaacaac

SEQ ID NO: 3130 - DNA, 20 bp, Artificial Sequence
  Synthetic oligonucleotide; CAG chr11 5174196 5174215 5174212 +
acaaccagaatgtacataaa

SEQ ID NO: 3131 - DNA, 20 bp, Artificial Sequence
  Synthetic oligonucleotide; TGG chr11 5174234 5174253 5174250 +
aatgtgatatatacacacaa

SEQ ID NO: 3132 - DNA, 20 bp, Artificial Sequence
  Synthetic oligonucleotide; TAG chr11 5174246 5174265 5174262 +
acacacaatggaatattatg

SEQ ID NO: 3133 - DNA, 20 bp, Artificial Sequence
  Synthetic oligonucleotide; AAG chr11 5174257 5174276 5174273 +
aatattatgtagcaataaaa

SEQ ID NO: 3134 - DNA, 20 bp, Artificial Sequence
  Synthetic oligonucleotide; AAG chr11 5174264 5174283 5174280 +
tgtagcaataaaaaagaatg

SEQ ID NO: 3135 - DNA, 20 bp, Artificial Sequence
  Synthetic oligonucleotide; CAG chr11 5174269 5174288 5174285 +
caataaaaaagaatgaagta

SEQ ID NO: 3136 - DNA, 20 bp, Artificial Sequence
  Synthetic oligonucleotide; CAG chr11 5174275 5174294 5174291 +
aaaagaatgaagtacagatg

SEQ ID NO: 3137 - DNA, 20 bp, Artificial Sequence
  Synthetic oligonucleotide; AAG chr11 5174279 5174298 5174295 +
gaatgaagtacagatgcagt

SEQ ID NO: 3138 - DNA, 20 bp, Artificial Sequence
  Synthetic oligonucleotide; TAG chr11 5174302 5174321 5174318 +
tccttatttaatgtcatgaa

SEQ ID NO: 3139 - DNA, 20 bp, Artificial Sequence
  Synthetic oligonucleotide; AGG chr11 5174303 5174322 5174319 +
ccttatttaatgtcatgaat

SEQ ID NO: 3140 - DNA, 20 bp, Artificial Sequence
  Synthetic oligonucleotide; TGG chr11 5174310 5174329 5174326 +
taatgtcatgaataggtttt

SEQ ID NO: 3141 - DNA, 20 bp, Artificial Sequence
  Synthetic oligonucleotide; TGG chr11 5174316 5174335 5174332 +
catgaataggtttttggaaa

SEQ ID NO: 3142 - DNA, 20 bp, Artificial Sequence
  Synthetic oligonucleotide; AAG chr11 5174326 5174345 5174342 +
tttttggaaatggcaacttt

SEQ ID NO: 3143 - DNA, 20 bp, Artificial Sequence
  Synthetic oligonucleotide; CAG chr11 5174344 5174363 5174360 +
ttaagtgaaatgatgtaaaa

SEQ ID NO: 3144 - DNA, 20 bp, Artificial Sequence
  Synthetic oligonucleotide; TAG chr11 5174367 5174386 5174383 +
atcctcaaataacactgttt

SEQ ID NO: 3145 - DNA, 20 bp, Artificial Sequence
  Synthetic oligonucleotide; TAG chr11 5174380 5174399 5174396 +
actgttttagccaacactgt

SEQ ID NO: 3146 - DNA, 20 bp, Artificial Sequence
  Synthetic oligonucleotide; GAG chr11 5174385 5174404 5174401 +
tttagccaacactgttagat

SEQ ID NO: 3147 - DNA, 20 bp, Artificial Sequence
  Synthetic oligonucleotide; TGG chr11 5174396 5174415 5174412 +
ctgttagatgagaaaaaaaa

SEQ ID NO: 3148 - DNA, 20 bp, Artificial Sequence
  Synthetic oligonucleotide; TGG chr11 5174417 5174436 5174433 +
ggatatcattatatgtcact

SEQ ID NO: 3149 - DNA, 20 bp, Artificial Sequence
  Synthetic oligonucleotide; AAG chr11 5174424 5174443 5174440 +
attatatgtcacttggctta

SEQ ID NO: 3150 - DNA, 20 bp, Artificial Sequence
  Synthetic oligonucleotide; CAG chr11 5174430 5174449 5174446 +
tgtcacttggcttaaagttt

SEQ ID NO: 3151 - DNA, 20 bp, Artificial Sequence
  Synthetic oligonucleotide; AAG chr11 5174438 5174457 5174454 +
ggcttaaagtttcagtttcc

SEQ ID NO: 3152 - DNA, 20 bp, Artificial Sequence
  Synthetic oligonucleotide; TGG chr11 5174451 5174470 5174467 +
agtttccaagaatctatgaa

SEQ ID NO: 3153 - DNA, 20 bp, Artificial Sequence
  Synthetic oligonucleotide; AAG chr11 5174462 5174481 5174478 +
atctatgaatggacaacatt

SEQ ID NO: 3154 - DNA, 20 bp, Artificial Sequence
  Synthetic oligonucleotide; AAG chr11 5174467 5174486 5174483 +
tgaatggacaacattaagca

SEQ ID NO: 3155 - DNA, 20 bp, Artificial Sequence
  Synthetic oligonucleotide; TGG chr11 5174490 5174509 5174506 +
acttaccactatacatgtta

SEQ ID NO: 3156 - DNA, 20 bp, Artificial Sequence
  Synthetic oligonucleotide; TGG chr11 5174495 5174514 5174511 +
ccactatacatgttatggca

SEQ ID NO: 3157 - DNA, 20 bp, Artificial Sequence
  Synthetic oligonucleotide; TGG chr11 5174499 5174518 5174515 +
tatacatgttatggcatgga

SEQ ID NO: 3158 - DNA, 20 bp, Artificial Sequence
  Synthetic oligonucleotide; TGG chr11 5174519 5174538 5174535 +
tggactttgaaaccttatgt

SEQ ID NO: 3159 - DNA, 20 bp, Artificial Sequence
  Synthetic oligonucleotide; GGG chr11 5174520 5174539 5174536 +
ggactttgaaaccttatgtt

SEQ ID NO: 3160 - DNA, 20 bp, Artificial Sequence
  Synthetic oligonucleotide; AAG chr11 5174529 5174548 5174545 +
aaccttatgttgggtaaaat

SEQ ID NO: 3161 - DNA, 20 bp, Artificial Sequence
  Synthetic oligonucleotide; CAG chr11 5174533 5174552 5174549 +
ttatgttgggtaaaataagc

SEQ ID NO: 3162 - DNA, 20 bp, Artificial Sequence
  Synthetic oligonucleotide; TAG chr11 5174586 5174605 5174602 +
tttatatgaattatctaaaa

SEQ ID NO: 3163 - DNA, 20 bp, Artificial Sequence
  Synthetic oligonucleotide; TAG chr11 5174596 5174615 5174612 +
ttatctaaaatagactgatt

SEQ ID NO: 3164 - DNA, 20 bp, Artificial Sequence
  Synthetic oligonucleotide; GAG chr11 5174598 5174617 5174614 +
atctaaaatagactgattta

SEQ ID NO: 3165 - DNA, 20 bp, Artificial Sequence
  Synthetic oligonucleotide; TAG chr11 5174608 5174627 5174624 +
gactgatttagagaaacata

SEQ ID NO: 3166 - DNA, 20 bp, Artificial Sequence
  Synthetic oligonucleotide; TAG chr11 5174611 5174630 5174627 +
tgatttagagaaacatatag

SEQ ID NO: 3167 - DNA, 20 bp, Artificial Sequence
  Synthetic oligonucleotide; TAG chr11 5174616 5174635 5174632 +
tagagaaacatatagtagat

SEQ ID NO: 3168 - DNA, 20 bp, Artificial Sequence
  Synthetic oligonucleotide; GAG chr11 5174618 5174637 5174634 +
gagaaacatatagtagatta

SEQ ID NO: 3169 - DNA, 20 bp, Artificial Sequence
  Synthetic oligonucleotide; AGG chr11 5174619 5174638 5174635 +
agaaacatatagtagattag

SEQ ID NO: 3170 - DNA, 20 bp, Artificial Sequence
  Synthetic oligonucleotide; TGG chr11 5174628 5174647 5174644 +
tagtagattagaggttacta

SEQ ID NO: 3171 - DNA, 20 bp, Artificial Sequence
  Synthetic oligonucleotide; GGG chr11 5174629 5174648 5174645 +
agtagattagaggttactat

SEQ ID NO: 3172 - DNA, 20 bp, Artificial Sequence
  Synthetic oligonucleotide; TGG chr11 5174634 5174653 5174650 +
attagaggttactatgggac

SEQ ID NO: 3173 - DNA, 20 bp, Artificial Sequence
  Synthetic oligonucleotide; GGG chr11 5174635 5174654 5174651 +
ttagaggttactatgggact

SEQ ID NO: 3174 - DNA, 20 bp, Artificial Sequence
  Synthetic oligonucleotide; GGG chr11 5174636 5174655 5174652 +
tagaggttactatgggactg

SEQ ID NO: 3175 - DNA, 20 bp, Artificial Sequence
  Synthetic oligonucleotide; GAG chr11 5174638 5174657 5174654 +
gaggttactatgggactggg

SEQ ID NO: 3176 - DNA, 20 bp, Artificial Sequence
  Synthetic oligonucleotide; AAG chr11 5174653 5174672 5174669 +
ctggggagttactgcctaac

SEQ ID NO: 3177 - DNA, 20 bp, Artificial Sequence
  Synthetic oligonucleotide; TAG chr11 5174658 5174677 5174674 +
gagttactgcctaacaagta

SEQ ID NO: 3178 - DNA, 20 bp, Artificial Sequence
  Synthetic oligonucleotide; TGG chr11 5174671 5174690 5174687 +
acaagtatagcatttctgct

SEQ ID NO: 3179 - DNA, 20 bp, Artificial Sequence
  Synthetic oligonucleotide; AAG chr11 5174683 5174702 5174699 +
tttctgcttggatgatgaaa

SEQ ID NO: 3180 - DNA, 20 bp, Artificial Sequence
  Synthetic oligonucleotide; TGG chr11 5174689 5174708 5174705 +
cttggatgatgaaaaagttt

SEQ ID NO: 3181 - DNA, 20 bp, Artificial Sequence
  Synthetic oligonucleotide; GAG chr11 5174695 5174714 5174711 +
tgatgaaaaagttttggcat

SEQ ID NO: 3182 - DNA, 20 bp, Artificial Sequence
  Synthetic oligonucleotide; TGG chr11 5174702 5174721 5174718 +
aaagttttggcatgagatca

SEQ ID NO: 3183 - DNA, 20 bp, Artificial Sequence
  Synthetic oligonucleotide; TAG chr11 5174708 5174727 5174724 +
ttggcatgagatcatggtga

SEQ ID NO: 3184 - DNA, 20 bp, Artificial Sequence
  Synthetic oligonucleotide; CGG chr11 5174711 5174730 5174727 +
gcatgagatcatggtgatag

SEQ ID NO: 3185 - DNA, 20 bp, Artificial Sequence
  Synthetic oligonucleotide; TGG chr11 5174760 5174779 5174776 +
cacataattatacttaaaaa

SEQ ID NO: 3186 - DNA, 20 bp, Artificial Sequence
  Synthetic oligonucleotide; TGG chr11 5174769 5174788 5174785 +
atacttaaaaatggttaata

SEQ ID NO: 3187 - DNA, 20 bp, Artificial Sequence
  Synthetic oligonucleotide; GAG chr11 5174773 5174792 5174789 +
ttaaaaatggttaatatggt

SEQ ID NO: 3188 - DNA, 20 bp, Artificial Sequence
  Synthetic oligonucleotide; CGG chr11 5174795 5174814 5174811 +
gctttattatatatgatata

SEQ ID NO: 3189 - DNA, 20 bp, Artificial Sequence
  Synthetic oligonucleotide; TAG chr11 5174807 5174826 5174823 +
atgatatacggtattatatg

SEQ ID NO: 3190 - DNA, 20 bp, Artificial Sequence
  Synthetic oligonucleotide; TGG chr11 5174839 5174858 5174855 +
aaactttatcacaataaaaa

SEQ ID NO: 3191 - DNA, 20 bp, Artificial Sequence
  Synthetic oligonucleotide; AAG chr11 5174843 5174862 5174859 +
tttatcacaataaaaatgga

SEQ ID NO: 3192 - DNA, 20 bp, Artificial Sequence
  Synthetic oligonucleotide; AAG chr11 5174857 5174876 5174873 +
aatggaaagaaatttaaaac

SEQ ID NO: 3193 - DNA, 20 bp, Artificial Sequence
  Synthetic oligonucleotide; TAG chr11 5174878 5174897 5174894 +
agacaaatttttattttgat

SEQ ID NO: 3194 - DNA, 20 bp, Artificial Sequence
  Synthetic oligonucleotide; AGG chr11 5174879 5174898 5174895 +
gacaaatttttattttgatt

SEQ ID NO: 3195 - DNA, 20 bp, Artificial Sequence
  Synthetic oligonucleotide; GGG chr11 5174880 5174899 5174896 +
acaaatttttattttgatta

SEQ ID NO: 3196 - DNA, 20 bp, Artificial Sequence
  Synthetic oligonucleotide; GAG chr11 5174901 5174920 5174917 +
ggttgaattgaatttattat

SEQ ID NO: 3197 - DNA, 20 bp, Artificial Sequence
  Synthetic oligonucleotide; GAG chr11 5174912 5174931 5174928 +
atttattatgagttgtttct

SEQ ID NO: 3198 - DNA, 20 bp, Artificial Sequence
  Synthetic oligonucleotide; GAG chr11 5174914 5174933 5174930 +
ttattatgagttgtttctga

SEQ ID NO: 3199 - DNA, 20 bp, Artificial Sequence
  Synthetic oligonucleotide; TAG chr11 5174964 5174983 5174980 +
aacaattatttcatttattt

SEQ ID NO: 3200 - DNA, 20 bp, Artificial Sequence
  Synthetic oligonucleotide; AGG chr11 5174965 5174984 5174981 +
acaattatttcatttatttt

SEQ ID NO: 3201 - DNA, 20 bp, Artificial Sequence
  Synthetic oligonucleotide; CAG chr11 5174976 5174995 5174992 +
atttattttaggcacatata

SEQ ID NO: 3202 - DNA, 20 bp, Artificial Sequence
  Synthetic oligonucleotide; TGG chr11 5174993 5175012 5175009 +
atacagttctattatcattt

SEQ ID NO: 3203 - DNA, 20 bp, Artificial Sequence
  Synthetic oligonucleotide; GGG chr11 5174994 5175013 5175010 +
tacagttctattatcatttt

SEQ ID NO: 3204 - DNA, 20 bp, Artificial Sequence
  Synthetic oligonucleotide; TGG chr11 5175040 5175059 5175056 +
gtttttgttttacgtatttt

SEQ ID NO: 3205 - DNA, 20 bp, Artificial Sequence
  Synthetic oligonucleotide; GAG chr11 5175050 5175069 5175066 +
tacgtatttttggttttttt

SEQ ID NO: 3206 - DNA, 20 bp, Artificial Sequence
  Synthetic oligonucleotide; TGG chr11 5175054 5175073 5175070 +
tatttttggtttttttgaga

SEQ ID NO: 3207 - DNA, 20 bp, Artificial Sequence
  Synthetic oligonucleotide; GAG chr11 5175056 5175075 5175072 +
tttttggtttttttgagatg

SEQ ID NO: 3208 - DNA, 20 bp, Artificial Sequence
  Synthetic oligonucleotide; TGG chr11 5175069 5175088 5175085 +
tgagatggagtctctctctg

SEQ ID NO: 3209 - DNA, 20 bp, Artificial Sequence
  Synthetic oligonucleotide; CAG chr11 5175074 5175093 5175090 +
tggagtctctctctgtggtc

SEQ ID NO: 3210 - DNA, 20 bp, Artificial Sequence
  Synthetic oligonucleotide; AGG chr11 5175075 5175094 5175091 +
ggagtctctctctgtggtcc

SEQ ID NO: 3211 - DNA, 20 bp, Artificial Sequence
  Synthetic oligonucleotide; TAG chr11 5175079 5175098 5175095 +
tctctctctgtggtccaggc

SEQ ID NO: 3212 - DNA, 20 bp, Artificial Sequence
  Synthetic oligonucleotide; GAG chr11 5175081 5175100 5175097 +
tctctctgtggtccaggcta

SEQ ID NO: 3213 - DNA, 20 bp, Artificial Sequence
  Synthetic oligonucleotide; GAG chr11 5175085 5175104 5175101 +
tctgtggtccaggctagagt

SEQ ID NO: 3214 - DNA, 20 bp, Artificial Sequence
  Synthetic oligonucleotide; AGG chr11 5175086 5175105 5175102 +
ctgtggtccaggctagagtg

SEQ ID NO: 3215 - DNA, 20 bp, Artificial Sequence
  Synthetic oligonucleotide; CGG chr11 5175100 5175119 5175116 +
agagtgaggtgacgcgatct

SEQ ID NO: 3216 - DNA, 20 bp, Artificial Sequence
  Synthetic oligonucleotide; CAG chr11 5175123 5175142 5175139 +
ctcactgcaacctccgcctc

SEQ ID NO: 3217 - DNA, 20 bp, Artificial Sequence
  Synthetic oligonucleotide; CAG chr11 5175148 5175167 5175164 +
ttcaaatcattctcctgcct

SEQ ID NO: 3218 - DNA, 20 bp, Artificial Sequence
  Synthetic oligonucleotide; TAG chr11 5175160 5175179 5175176 +
tcctgcctcagcctcccatg

SEQ ID NO: 3219 - DNA, 20 bp, Artificial Sequence
  Synthetic oligonucleotide; TGG chr11 5175164 5175183 5175180 +
gcctcagcctcccatgtagc

SEQ ID NO: 3220 - DNA, 20 bp, Artificial Sequence
  Synthetic oligonucleotide; GGG chr11 5175165 5175184 5175181 +
cctcagcctcccatgtagct

SEQ ID NO: 3221 - DNA, 20 bp, Artificial Sequence
  Synthetic oligonucleotide; CAG chr11 5175172 5175191 5175188 +
ctcccatgtagctgggatta

SEQ ID NO: 3222 - DNA, 20 bp, Artificial Sequence
  Synthetic oligonucleotide; AGG chr11 5175173 5175192 5175189 +
tcccatgtagctgggattac

SEQ ID NO: 3223 - DNA, 20 bp, Artificial Sequence
  Synthetic oligonucleotide; TGG chr11 5175192 5175211 5175208 +
caggtgtgcgccaccacgtc

SEQ ID NO: 3224 - DNA, 20 bp, Artificial Sequence
  Synthetic oligonucleotide; TGG chr11 5175244 5175263 5175260 +
ttcccattctattttcctat

SEQ ID NO: 3225 - DNA, 20 bp, Artificial Sequence
  Synthetic oligonucleotide; CAG chr11 5175253 5175272 5175269 +
tattttcctattggttcttg

SEQ ID NO: 3226 - DNA, 20 bp, Artificial Sequence
  Synthetic oligonucleotide; CAG chr11 5175310 5175329 5175326 +
tatataactctttttacttt

SEQ ID NO: 3227 - DNA, 20 bp, Artificial Sequence
  Synthetic oligonucleotide; AGG chr11 5175311 5175330 5175327 +
atataactctttttactttc

SEQ ID NO: 3228 - DNA, 20 bp, Artificial Sequence
  Synthetic oligonucleotide; AAG chr11 5175347 5175366 5175363 +
aatgatcatatcatatacaa

SEQ ID NO: 3229 - DNA, 20 bp, Artificial Sequence
  Synthetic oligonucleotide; AAG chr11 5175351 5175370 5175367 +
atcatatcatatacaaaaga

SEQ ID NO: 3230 - DNA, 20 bp, Artificial Sequence
  Synthetic oligonucleotide; AAG chr11 5175364 5175383 5175380 +
caaaagaaagttaaaaaata

SEQ ID NO: 3231 - DNA, 20 bp, Artificial Sequence
  Synthetic oligonucleotide; AGG chr11 5175365 5175384 5175381 +
aaaagaaagttaaaaaataa

SEQ ID NO: 3232 - DNA, 20 bp, Artificial Sequence
  Synthetic oligonucleotide; AAG chr11 5175370 5175389 5175386 +
aaagttaaaaaataaaggca

SEQ ID NO: 3233 - DNA, 20 bp, Artificial Sequence
  Synthetic oligonucleotide; AAG chr11 5175382 5175401 5175398 +
taaaggcaaagatgtaaata

SEQ ID NO: 3234 - DNA, 20 bp, Artificial Sequence
  Synthetic oligonucleotide; CAG chr11 5175395 5175414 5175411 +
gtaaataaagaaatacaccc

SEQ ID NO: 3235 - DNA, 20 bp, Artificial Sequence
  Synthetic oligonucleotide; TGG chr11 5175407 5175426 5175423 +
atacaccccagattacaatt

SEQ ID NO: 3236 - DNA, 20 bp, Artificial Sequence
  Synthetic oligonucleotide; AAG chr11 5175458 5175477 5175474 +
ttgcttgattgatattaact

SEQ ID NO: 3237 - DNA, 20 bp, Artificial Sequence
  Synthetic oligonucleotide; CAG chr11 5175465 5175484 5175481 +
attgatattaactaagacct

SEQ ID NO: 3238 - DNA, 20 bp, Artificial Sequence
  Synthetic oligonucleotide; TAG chr11 5175479 5175498 5175495 +
agacctcagttataaaacaa

SEQ ID NO: 3239 - DNA, 20 bp, Artificial Sequence
  Synthetic oligonucleotide; TAG chr11 5175486 5175505 5175502 +
agttataaaacaatagtctg

SEQ ID NO: 3240 - DNA, 20 bp, Artificial Sequence
  Synthetic oligonucleotide; TGG chr11 5175489 5175508 5175505 +
tataaaacaatagtctgtag

SEQ ID NO: 3241 - DNA, 20 bp, Artificial Sequence
  Synthetic oligonucleotide; TGG chr11 5175495 5175514 5175511 +
acaatagtctgtagtggtac

SEQ ID NO: 3242 - DNA, 20 bp, Artificial Sequence
  Synthetic oligonucleotide; TGG chr11 5175501 5175520 5175517 +
gtctgtagtggtactggtct

SEQ ID NO: 3243 - DNA, 20 bp, Artificial Sequence
  Synthetic oligonucleotide; TAG chr11 5175548 5175567 5175564 +
ttctcaccttatcaatcact

SEQ ID NO: 3244 - DNA, 20 bp, Artificial Sequence
  Synthetic oligonucleotide; TAG chr11 5175591 5175610 5175607 +
ttgtttttgctaattctgtc

SEQ ID NO: 3245 - DNA, 20 bp, Artificial Sequence
  Synthetic oligonucleotide; CAG chr11 5175604 5175623 5175620 +
ttctgtctagaacaccatat

SEQ ID NO: 3246 - DNA, 20 bp, Artificial Sequence
  Synthetic oligonucleotide; TAG chr11 5175610 5175629 5175626 +
ctagaacaccatatcagttt

SEQ ID NO: 3247 - DNA, 20 bp, Artificial Sequence
  Synthetic oligonucleotide; AAG chr11 5175615 5175634 5175631 +
acaccatatcagttttagct

SEQ ID NO: 3248 - DNA, 20 bp, Artificial Sequence
  Synthetic oligonucleotide; TGG chr11 5175649 5175668 5175665 +
ctccctgctttaaaattgtt

SEQ ID NO: 3249 - DNA, 20 bp, Artificial Sequence
  Synthetic oligonucleotide; TGG chr11 5175666 5175685 5175682 +
gtttggtttctgcccttttt

SEQ ID NO: 3250 - DNA, 20 bp, Artificial Sequence
  Synthetic oligonucleotide; AAG chr11 5175804 5175823 5175820 +
ttccctttcccttcctgctg

SEQ ID NO: 3251 - DNA, 20 bp, Artificial Sequence
  Synthetic oligonucleotide; AGG chr11 5175805 5175824 5175821 +
tccctttcccttcctgctga

SEQ ID NO: 3252 - DNA, 20 bp, Artificial Sequence
  Synthetic oligonucleotide; TGG chr11 5175813 5175832 5175829 +
ccttcctgctgaaggattac

SEQ ID NO: 3253 - DNA, 20 bp, Artificial Sequence
  Synthetic oligonucleotide; AAG chr11 5175818 5175837 5175834 +
ctgctgaaggattactggtt

SEQ ID NO: 3254 - DNA, 20 bp, Artificial Sequence
  Synthetic oligonucleotide; AGG chr11 5175819 5175838 5175835 +
tgctgaaggattactggtta

SEQ ID NO: 3255 - DNA, 20 bp, Artificial Sequence
  Synthetic oligonucleotide; GAG chr11 5175821 5175840 5175837 +
ctgaaggattactggttaag

SEQ ID NO: 3256 - DNA, 20 bp, Artificial Sequence
  Synthetic oligonucleotide; CAG chr11 5175825 5175844 5175841 +
aggattactggttaaggaga

SEQ ID NO: 3257 - DNA, 20 bp, Artificial Sequence
  Synthetic oligonucleotide; TAG chr11 5175828 5175847 5175844 +
attactggttaaggagacag

SEQ ID NO: 3258 - DNA, 20 bp, Artificial Sequence
  Synthetic oligonucleotide; CAG chr11 5175855 5175874 5175871 +
tgaaaacttcttctcatgtc

SEQ ID NO: 3259 - DNA, 20 bp, Artificial Sequence
  Synthetic oligonucleotide; AGG chr11 5175856 5175875 5175872 +
gaaaacttcttctcatgtcc

SEQ ID NO: 3260 - DNA, 20 bp, Artificial Sequence
  Synthetic oligonucleotide; GGG chr11 5175857 5175876 5175873 +
aaaacttcttctcatgtcca

SEQ ID NO: 3261 - DNA, 20 bp, Artificial Sequence
  Synthetic oligonucleotide; TGG chr11 5175863 5175882 5175879 +
tcttctcatgtccagggcaa

SEQ ID NO: 3262 - DNA, 20 bp, Artificial Sequence
  Synthetic oligonucleotide; CAG chr11 5175868 5175887 5175884 +
tcatgtccagggcaatggct

SEQ ID NO: 3263 - DNA, 20 bp, Artificial Sequence
  Synthetic oligonucleotide; CAG chr11 5175883 5175902 5175899 +
tggctcagtaatgttaaatt

SEQ ID NO: 3264 - DNA, 20 bp, Artificial Sequence
  Synthetic oligonucleotide; CAG chr11 5175886 5175905 5175902 +
ctcagtaatgttaaattcag

SEQ ID NO: 3265 - DNA, 20 bp, Artificial Sequence
  Synthetic oligonucleotide; TAG chr11 5175894 5175913 5175910 +
tgttaaattcagcagctgca

SEQ ID NO: 3266 - DNA, 20 bp, Artificial Sequence
  Synthetic oligonucleotide; CAG chr11 5175900 5175919 5175916 +
attcagcagctgcatagcaa

SEQ ID NO: 3267 - DNA, 20 bp, Artificial Sequence
  Synthetic oligonucleotide; CAG chr11 5175921 5175940 5175937 +
agccatttcctaaatccttt

SEQ ID NO: 3268 - DNA, 20 bp, Artificial Sequence
  Synthetic oligonucleotide; GAG chr11 5175929 5175948 5175945 +
cctaaatcctttcagaatct

SEQ ID NO: 3269 - DNA, 20 bp, Artificial Sequence
  Synthetic oligonucleotide; AAG chr11 5175943 5175962 5175959 +
gaatctgagtgctcaactga

SEQ ID NO: 3270 - DNA, 20 bp, Artificial Sequence
  Synthetic oligonucleotide; TAG chr11 5175952 5175971 5175968 +
tgctcaactgaaagtttatt

SEQ ID NO: 3271 - DNA, 20 bp, Artificial Sequence
  Synthetic oligonucleotide; GAG chr11 5175954 5175973 5175970 +
ctcaactgaaagtttattta

SEQ ID NO: 3272 - DNA, 20 bp, Artificial Sequence
  Synthetic oligonucleotide; TAG chr11 5176024 5176043 5176040 +
gacatgtatatgttactgtg

SEQ ID NO: 3273 - DNA, 20 bp, Artificial Sequence
  Synthetic oligonucleotide; AAG chr11 5176069 5176088 5176085 +
atatattcatatacctattt

SEQ ID NO: 3274 - DNA, 20 bp, Artificial Sequence
  Synthetic oligonucleotide; TGG chr11 5176092 5176111 5176108 +
atatcatgttgcatgcattt

SEQ ID NO: 3275 - DNA, 20 bp, Artificial Sequence
  Synthetic oligonucleotide; TGG chr11 5176104 5176123 5176120 +
atgcattttggatgtgaaat

SEQ ID NO: 3276 - DNA, 20 bp, Artificial Sequence
  Synthetic oligonucleotide; TAG chr11 5176115 5176134 5176131 +
atgtgaaattggcattttct

SEQ ID NO: 3277 - DNA, 20 bp, Artificial Sequence
  Synthetic oligonucleotide; AAG chr11 5176136 5176155 5176152 +
agctccccactgctaaaatc

SEQ ID NO: 3278 - DNA, 20 bp, Artificial Sequence
  Synthetic oligonucleotide; CAG chr11 5176161 5176180 5176177 +
tacaaaatcttcctaccttt

SEQ ID NO: 3279 - DNA, 20 bp, Artificial Sequence
  Synthetic oligonucleotide; TGG chr11 5176230 5176249 5176246 +
ccatcatattattactttta

SEQ ID NO: 3280 - DNA, 20 bp, Artificial Sequence
  Synthetic oligonucleotide; GAG chr11 5176232 5176251 5176248 +
atcatattattacttttatg

SEQ ID NO: 3281 - DNA, 20 bp, Artificial Sequence
  Synthetic oligonucleotide; GAG chr11 5176247 5176266 5176263 +
ttatggagaaatgcaacgct

SEQ ID NO: 3282 - DNA, 20 bp, Artificial Sequence
  Synthetic oligonucleotide; TAG chr11 5176264 5176283 5176280 +
gctgagtgtaaatttcacat

SEQ ID NO: 3283 - DNA, 20 bp, Artificial Sequence
  Synthetic oligonucleotide; TAG chr11 5176285 5176304 5176301 +
agaatgtccaaaacattgtg

SEQ ID NO: 3284 - DNA, 20 bp, Artificial Sequence
  Synthetic oligonucleotide; GAG chr11 5176287 5176306 5176303 +
aatgtccaaaacattgtgta

SEQ ID NO: 3285 - DNA, 20 bp, Artificial Sequence
  Synthetic oligonucleotide; TAG chr11 5176290 5176309 5176306 +
gtccaaaacattgtgtagag

SEQ ID NO: 3286 - DNA, 20 bp, Artificial Sequence
  Synthetic oligonucleotide; AAG chr11 5176309 5176328 5176325 +
gtagaaaaaaaaactatatg

SEQ ID NO: 3287 - DNA, 20 bp, Artificial Sequence
  Synthetic oligonucleotide; CAG chr11 5176317 5176336 5176333 +
aaaaactatatgaagtttaa

SEQ ID NO: 3288 - DNA, 20 bp, Artificial Sequence
  Synthetic oligonucleotide; GAG chr11 5176327 5176346 5176343 +
tgaagtttaacagatgtact

SEQ ID NO: 3289 - DNA, 20 bp, Artificial Sequence
  Synthetic oligonucleotide; AAG chr11 5176346 5176365 5176362 +
tgagaaatgcaaatattttg

SEQ ID NO: 3290 - DNA, 20 bp, Artificial Sequence
  Synthetic oligonucleotide; TAG chr11 5176360 5176379 5176376 +
attttgaagacaattcaaaa

SEQ ID NO: 3291 - DNA, 20 bp, Artificial Sequence
  Synthetic oligonucleotide; TAG chr11 5176375 5176394 5176391 +
caaaatagcacttaaatatt

SEQ ID NO: 3292 - DNA, 20 bp, Artificial Sequence
  Synthetic oligonucleotide; TAG chr11 5176380 5176399 5176396 +
tagcacttaaatatttagtg

SEQ ID NO: 3293 - DNA, 20 bp, Artificial Sequence
  Synthetic oligonucleotide; TAG chr11 5176386 5176405 5176402 +
ttaaatatttagtgtagtac

SEQ ID NO: 3294 - DNA, 20 bp, Artificial Sequence
  Synthetic oligonucleotide; CAG chr11 5176389 5176408 5176405 +
aatatttagtgtagtactag

SEQ ID NO: 3295 - DNA, 20 bp, Artificial Sequence
  Synthetic oligonucleotide; TAG chr11 5176404 5176423 5176420 +
actagcagaaacaaattaat

SEQ ID NO: 3296 - DNA, 20 bp, Artificial Sequence
  Synthetic oligonucleotide; TAG chr11 5176413 5176432 5176429 +
aacaaattaattagattttt

SEQ ID NO: 3297 - DNA, 20 bp, Artificial Sequence
  Synthetic oligonucleotide; TGG chr11 5176446 5176465 5176462 +
gtattctcccttcccaataa

SEQ ID NO: 3298 - DNA, 20 bp, Artificial Sequence
  Synthetic oligonucleotide; TAG chr11 5176457 5176476 5176473 +
tcccaataatggaaatactg

SEQ ID NO: 3299 - DNA, 20 bp, Artificial Sequence
  Synthetic oligonucleotide; AGG chr11 5176458 5176477 5176474 +
cccaataatggaaatactgt

SEQ ID NO: 3300 - DNA, 20 bp, Artificial Sequence
  Synthetic oligonucleotide; AAG chr11 5176461 5176480 5176477 +
aataatggaaatactgtagg

SEQ ID NO: 3301 - DNA, 20 bp, Artificial Sequence
  Synthetic oligonucleotide; TGG chr11 5176488 5176507 5176504 +
tttctaactttcttattctt

SEQ ID NO: 3302 - DNA, 20 bp, Artificial Sequence
  Synthetic oligonucleotide; AAG chr11 5176565 5176584 5176581 +
tgtgtgtgtacatatatatg

SEQ ID NO: 3303 - DNA, 20 bp, Artificial Sequence
  Synthetic oligonucleotide; AGG chr11 5176566 5176585 5176582 +
gtgtgtgtacatatatatga

SEQ ID NO: 3304 - DNA, 20 bp, Artificial Sequence
  Synthetic oligonucleotide; TAG chr11 5176587 5176606 5176603 +
ggtacatccacatataaatg

SEQ ID NO: 3305 - DNA, 20 bp, Artificial Sequence
  Synthetic oligonucleotide; AAG chr11 5176597 5176616 5176613 +
catataaatgtagataaatt

SEQ ID NO: 3306 - DNA, 20 bp, Artificial Sequence
  Synthetic oligonucleotide; AAG chr11 5176619 5176638 5176635 +
gtgtgtgtatatgtaaatct

SEQ ID NO: 3307 - DNA, 20 bp, Artificial Sequence
  Synthetic oligonucleotide; CAG chr11 5176655 5176674 5176671 +
ataaatttctataaaaatca

SEQ ID NO: 3308 - DNA, 20 bp, Artificial Sequence
  Synthetic oligonucleotide; AAG chr11 5176661 5176680 5176677 +
ttctataaaaatcacagaaa

SEQ ID NO: 3309 - DNA, 20 bp, Artificial Sequence
  Synthetic oligonucleotide; AAG chr11 5176666 5176685 5176682 +
taaaaatcacagaaaaagct

SEQ ID NO: 3310 - DNA, 20 bp, Artificial Sequence
  Synthetic oligonucleotide; AAG chr11 5176672 5176691 5176688 +
tcacagaaaaagctaagcat

SEQ ID NO: 3311 - DNA, 20 bp, Artificial Sequence
  Synthetic oligonucleotide; AAG chr11 5176677 5176696 5176693 +
gaaaaagctaagcataagcc

SEQ ID NO: 3312 - DNA, 20 bp, Artificial Sequence
  Synthetic oligonucleotide; GAG chr11 5176683 5176702 5176699 +
gctaagcataagccaagcat

SEQ ID NO: 3313 - DNA, 20 bp, Artificial Sequence
  Synthetic oligonucleotide; TAG chr11 5176686 5176705 5176702 +
aagcataagccaagcatgag

SEQ ID NO: 3314 - DNA, 20 bp, Artificial Sequence
  Synthetic oligonucleotide; AAG chr11 5176694 5176713 5176710 +
gccaagcatgagtagatttc

SEQ ID NO: 3315 - DNA, 20 bp, Artificial Sequence
  Synthetic oligonucleotide; AAG chr11 5176702 5176721 5176718 +
tgagtagatttcaagtgttt

SEQ ID NO: 3316 - DNA, 20 bp, Artificial Sequence
  Synthetic oligonucleotide; TAG chr11 5176706 5176725 5176722 +
tagatttcaagtgtttaaga

SEQ ID NO: 3317 - DNA, 20 bp, Artificial Sequence
  Synthetic oligonucleotide; CAG chr11 5176714 5176733 5176730 +
aagtgtttaagatagtacct

SEQ ID NO: 3318 - DNA, 20 bp, Artificial Sequence
  Synthetic oligonucleotide; AAG chr11 5176725 5176744 5176741 +
atagtacctcagatttctca

SEQ ID NO: 3319 - DNA, 20 bp, Artificial Sequence
  Synthetic oligonucleotide; TAG chr11 5176747 5176766 5176763 +
gttttttttttgtctttctt

SEQ ID NO: 3320 - DNA, 20 bp, Artificial Sequence
  Synthetic oligonucleotide; AGG chr11 5176748 5176767 5176764 +
ttttttttttgtctttcttt

SEQ ID NO: 3321 - DNA, 20 bp, Artificial Sequence
  Synthetic oligonucleotide; AAG chr11 5176758 5176777 5176774 +
gtctttctttaggtgtaaat

SEQ ID NO: 3322 - DNA, 20 bp, Artificial Sequence
  Synthetic oligonucleotide; AGG chr11 5176759 5176778 5176775 +
tctttctttaggtgtaaata

SEQ ID NO: 3323 - DNA, 20 bp, Artificial Sequence
  Synthetic oligonucleotide; TGG chr11 5176782 5176801 5176798 +
tcattttttaaacattctca

SEQ ID NO: 3324 - DNA, 20 bp, Artificial Sequence
  Synthetic oligonucleotide; TAG chr11 5176793 5176812 5176809 +
acattctcatggcattgttc

SEQ ID NO: 3325 - DNA, 20 bp, Artificial Sequence
  Synthetic oligonucleotide; AGG chr11 5176794 5176813 5176810 +
cattctcatggcattgttct

SEQ ID NO: 3326 - DNA, 20 bp, Artificial Sequence
  Synthetic oligonucleotide; AAG chr11 5176802 5176821 5176818 +
tggcattgttctaggctttt

SEQ ID NO: 3327 - DNA, 20 bp, Artificial Sequence
  Synthetic oligonucleotide; AAG chr11 5176805 5176824 5176821 +
cattgttctaggcttttaag

SEQ ID NO: 3328 - DNA, 20 bp, Artificial Sequence
  Synthetic oligonucleotide; AGG chr11 5176806 5176825 5176822 +
attgttctaggcttttaaga

SEQ ID NO: 3329 - DNA, 20 bp, Artificial Sequence
  Synthetic oligonucleotide; GAG chr11 5176808 5176827 5176824 +
tgttctaggcttttaagaag

SEQ ID NO: 3330 - DNA, 20 bp, Artificial Sequence
  Synthetic oligonucleotide; GAG chr11 5176810 5176829 5176826 +
ttctaggcttttaagaagga

SEQ ID NO: 3331 - DNA, 20 bp, Artificial Sequence
  Synthetic oligonucleotide; AAG chr11 5176837 5176856 5176853 +
taaaaatttgtattgatgtg

SEQ ID NO: 3332 - DNA, 20 bp, Artificial Sequence
  Synthetic oligonucleotide; AGG chr11 5176838 5176857 5176854 +
aaaaatttgtattgatgtga

SEQ ID NO: 3333 - DNA, 20 bp, Artificial Sequence
  Synthetic oligonucleotide; GGG chr11 5176839 5176858 5176855 +
aaaatttgtattgatgtgaa

SEQ ID NO: 3334 - DNA, 20 bp, Artificial Sequence
  Synthetic oligonucleotide; AAG chr11 5176845 5176864 5176861 +
tgtattgatgtgaagggatt

SEQ ID NO: 3335 - DNA, 20 bp, Artificial Sequence
  Synthetic oligonucleotide; AGG chr11 5176846 5176865 5176862 +
gtattgatgtgaagggatta

SEQ ID NO: 3336 - DNA, 20 bp, Artificial Sequence
  Synthetic oligonucleotide; TAG chr11 5176851 5176870 5176867 +
gatgtgaagggattaaggta

SEQ ID NO: 3337 - DNA, 20 bp, Artificial Sequence
  Synthetic oligonucleotide; TAG chr11 5176858 5176877 5176874 +
agggattaaggtatagtctg

SEQ ID NO: 3338 - DNA, 20 bp, Artificial Sequence
  Synthetic oligonucleotide; TAG chr11 5176870 5176889 5176886 +
atagtctgtagataatatca

SEQ ID NO: 3339 - DNA, 20 bp, Artificial Sequence
  Synthetic oligonucleotide; TGG chr11 5176887 5176906 5176903 +
tcatagataattacttttgc

SEQ ID NO: 3340 - DNA, 20 bp, Artificial Sequence
  Synthetic oligonucleotide; GGG chr11 5176888 5176907 5176904 +
catagataattacttttgct

SEQ ID NO: 3341 - DNA, 20 bp, Artificial Sequence
  Synthetic oligonucleotide; AAG chr11 5176910 5176929 5176926 +
gattacattcttttttattt

SEQ ID NO: 3342 - DNA, 20 bp, Artificial Sequence
  Synthetic oligonucleotide; TGG chr11 5176918 5176937 5176934 +
tcttttttatttaagtttct

SEQ ID NO: 3343 - DNA, 20 bp, Artificial Sequence
  Synthetic oligonucleotide; TAG chr11 5176944 5176963 5176960 +
atattctccttaatcttctc

SEQ ID NO: 3344 - DNA, 20 bp, Artificial Sequence
  Synthetic oligonucleotide; CAG chr11 5176987 5177006 5177003 +
ttaaaaatttatttatcacc

SEQ ID NO: 3345 - DNA, 20 bp, Artificial Sequence
  Synthetic oligonucleotide; AGG chr11 5176988 5177007 5177004 +
taaaaatttatttatcaccc

SEQ ID NO: 3346 - DNA, 20 bp, Artificial Sequence
  Synthetic oligonucleotide; TAG chr11 5176993 5177012 5177009 +
atttatttatcacccaggta

SEQ ID NO: 3347 - DNA, 20 bp, Artificial Sequence
  Synthetic oligonucleotide; CAG chr11 5177020 5177039 5177036 +
tttcaatcattttacttctt

SEQ ID NO: 3348 - DNA, 20 bp, Artificial Sequence
  Synthetic oligonucleotide; TGG chr11 5177062 5177081 5177078 +
atgatgctccattgatgact

SEQ ID NO: 3349 - DNA, 20 bp, Artificial Sequence
  Synthetic oligonucleotide; GGG chr11 5177063 5177082 5177079 +
tgatgctccattgatgactt

SEQ ID NO: 3350 - DNA, 20 bp, Artificial Sequence
  Synthetic oligonucleotide; TAG chr11 5177082 5177101 5177098 +
tgggtctaaaatctccacta

SEQ ID NO: 3351 - DNA, 20 bp, Artificial Sequence
  Synthetic oligonucleotide; AGG chr11 5177083 5177102 5177099 +
gggtctaaaatctccactat

SEQ ID NO: 3352 - DNA, 20 bp, Artificial Sequence
  Synthetic oligonucleotide; GGG chr11 5177084 5177103 5177100 +
ggtctaaaatctccactata

SEQ ID NO: 3353 - DNA, 20 bp, Artificial Sequence
  Synthetic oligonucleotide; GGG chr11 5177085 5177104 5177101 +
gtctaaaatctccactatag

SEQ ID NO: 3354 - DNA, 20 bp, Artificial Sequence
  Synthetic oligonucleotide; GGG chr11 5177086 5177105 5177102 +
tctaaaatctccactatagg

SEQ ID NO: 3355 - DNA, 20 bp, Artificial Sequence
  Synthetic oligonucleotide; CAG chr11 5177099 5177118 5177115 +
ctatagggggaaatgtgtat

SEQ ID NO: 3356 - DNA, 20 bp, Artificial Sequence
  Synthetic oligonucleotide; CAG chr11 5177115 5177134 5177131 +
gtatcagattttacatcatc

SEQ ID NO: 3357 - DNA, 20 bp, Artificial Sequence
  Synthetic oligonucleotide; AGG chr11 5177116 5177135 5177132 +
tatcagattttacatcatcc

SEQ ID NO: 3358 - DNA, 20 bp, Artificial Sequence
  Synthetic oligonucleotide; TGG chr11 5177145 5177164 5177161 +
catatttgttaatttaatat

SEQ ID NO: 3359 - DNA, 20 bp, Artificial Sequence
  Synthetic oligonucleotide; AAG chr11 5177216 5177235 5177232 +
attatgtgtctattccatac

SEQ ID NO: 3360 - DNA, 20 bp, Artificial Sequence
  Synthetic oligonucleotide; GAG chr11 5177218 5177237 5177234 +
tatgtgtctattccatacaa

SEQ ID NO: 3361 - DNA, 20 bp, Artificial Sequence
  Synthetic oligonucleotide; GAG chr11 5177228 5177247 5177244 +
ttccatacaagagactttgt

SEQ ID NO: 3362 - DNA, 20 bp, Artificial Sequence
  Synthetic oligonucleotide; CAG chr11 5177235 5177254 5177251 +
caagagactttgtgagatgt

SEQ ID NO: 3363 - DNA, 20 bp, Artificial Sequence
  Synthetic oligonucleotide; GAG chr11 5177239 5177258 5177255 +
agactttgtgagatgtcagt

SEQ ID NO: 3364 - DNA, 20 bp, Artificial Sequence
  Synthetic oligonucleotide; TAG chr11 5177243 5177262 5177259 +
tttgtgagatgtcagtgagt

SEQ ID NO: 3365 - DNA, 20 bp, Artificial Sequence
  Synthetic oligonucleotide; TAG chr11 5177255 5177274 5177271 +
cagtgagttagaaaatattc

SEQ ID NO: 3366 - DNA, 20 bp, Artificial Sequence
  Synthetic oligonucleotide; AGG chr11 5177256 5177275 5177272 +
agtgagttagaaaatattct

SEQ ID NO: 3367 - DNA, 20 bp, Artificial Sequence
  Synthetic oligonucleotide; GGG chr11 5177257 5177276 5177273 +
gtgagttagaaaatattcta

SEQ ID NO: 3368 - DNA, 20 bp, Artificial Sequence
  Synthetic oligonucleotide; AAG chr11 5177275 5177294 5177291 +
tagggataacattttaactt

SEQ ID NO: 3369 - DNA, 20 bp, Artificial Sequence
  Synthetic oligonucleotide; CAG chr11 5177281 5177300 5177297 +
taacattttaacttaagtaa

SEQ ID NO: 3370 - DNA, 20 bp, Artificial Sequence
  Synthetic oligonucleotide; AGG chr11 5177282 5177301 5177298 +
aacattttaacttaagtaac

SEQ ID NO: 3371 - DNA, 20 bp, Artificial Sequence
  Synthetic oligonucleotide; TGG chr11 5177305 5177324 5177321 +
tgttgacaaaaataatatta

SEQ ID NO: 3372 - DNA, 20 bp, Artificial Sequence
  Synthetic oligonucleotide; TGG chr11 5177319 5177338 5177335 +
atattatggcttcatgttat

SEQ ID NO: 3373 - DNA, 20 bp, Artificial Sequence
  Synthetic oligonucleotide; AAG chr11 5177325 5177344 5177341 +
tggcttcatgttattggttc

SEQ ID NO: 3374 - DNA, 20 bp, Artificial Sequence
  Synthetic oligonucleotide; CAG chr11 5177334 5177353 5177350 +
gttattggttcaagtctctg

SEQ ID NO: 3375 - DNA, 20 bp, Artificial Sequence
  Synthetic oligonucleotide; GAG chr11 5177336 5177355 5177352 +
tattggttcaagtctctgca

SEQ ID NO: 3376 - DNA, 20 bp, Artificial Sequence
  Synthetic oligonucleotide; CAG chr11 5177341 5177360 5177357 +
gttcaagtctctgcagagta

SEQ ID NO: 3377 - DNA, 20 bp, Artificial Sequence
  Synthetic oligonucleotide; CGG chr11 5177344 5177363 5177360 +
caagtctctgcagagtacag

SEQ ID NO: 3378 - DNA, 20 bp, Artificial Sequence
  Synthetic oligonucleotide; GGG chr11 5177345 5177364 5177361 +
aagtctctgcagagtacagc

SEQ ID NO: 3379 - DNA, 20 bp, Artificial Sequence
  Synthetic oligonucleotide; GAG chr11 5177347 5177366 5177363 +
gtctctgcagagtacagcgg

SEQ ID NO: 3380 - DNA, 20 bp, Artificial Sequence
  Synthetic oligonucleotide; CAG chr11 5177362 5177381 5177378 +
agcgggagtgttgtacattt

SEQ ID NO: 3381 - DNA, 20 bp, Artificial Sequence
  Synthetic oligonucleotide; CAG chr11 5177365 5177384 5177381 +
gggagtgttgtacatttcag

SEQ ID NO: 3382 - DNA, 20 bp, Artificial Sequence
  Synthetic oligonucleotide; CAG chr11 5177373 5177392 5177389 +
tgtacatttcagcagaattt

SEQ ID NO: 3383 - DNA, 20 bp, Artificial Sequence
  Synthetic oligonucleotide; AAG chr11 5177388 5177407 5177404 +
aatttcagactgactataaa

SEQ ID NO: 3384 - DNA, 20 bp, Artificial Sequence
  Synthetic oligonucleotide; CAG chr11 5177393 5177412 5177409 +
cagactgactataaaaagcc

SEQ ID NO: 3385 - DNA, 20 bp, Artificial Sequence
  Synthetic oligonucleotide; TAG chr11 5177420 5177439 5177436 +
tgactcaaaaccccacttcc

SEQ ID NO: 3386 - DNA, 20 bp, Artificial Sequence
  Synthetic oligonucleotide; TAG chr11 5177430 5177449 5177446 +
ccccacttcctagctctacg

SEQ ID NO: 3387 - DNA, 20 bp, Artificial Sequence
  Synthetic oligonucleotide; AGG chr11 5177431 5177450 5177447 +
cccacttcctagctctacgt

SEQ ID NO: 3388 - DNA, 20 bp, Artificial Sequence
  Synthetic oligonucleotide; AAG chr11 5177436 5177455 5177452 +
ttcctagctctacgtaggaa

SEQ ID NO: 3389 - DNA, 20 bp, Artificial Sequence
  Synthetic oligonucleotide; TGG chr11 5177445 5177464 5177461 +
ctacgtaggaaaagtcaatc

SEQ ID NO: 3390 - DNA, 20 bp, Artificial Sequence
  Synthetic oligonucleotide; AAG chr11 5177499 5177518 5177515 +
gattatctttatatattttt

SEQ ID NO: 3391 - DNA, 20 bp, Artificial Sequence
  Synthetic oligonucleotide; TAG chr11 5177518 5177537 5177534 +
taagttaaaattcatgaaaa

SEQ ID NO: 3392 - DNA, 20 bp, Artificial Sequence
  Synthetic oligonucleotide; TGG chr11 5177535 5177554 5177551 +
aaatagtatttctgaaaaaa

SEQ ID NO: 3393 - DNA, 20 bp, Artificial Sequence
  Synthetic oligonucleotide; GAG chr11 5177537 5177556 5177553 +
atagtatttctgaaaaaatg

SEQ ID NO: 3394 - DNA, 20 bp, Artificial Sequence
  Synthetic oligonucleotide; AAG chr11 5177550 5177569 5177566 +
aaaaatggagaatttcatta

SEQ ID NO: 3395 - DNA, 20 bp, Artificial Sequence
  Synthetic oligonucleotide; GAG chr11 5177582 5177601 5177598 +
tttcaaaacctttgatcttt

SEQ ID NO: 3396 - DNA, 20 bp, Artificial Sequence
  Synthetic oligonucleotide; TAG chr11 5177590 5177609 5177606 +
cctttgatctttgagtgcct

SEQ ID NO: 3397 - DNA, 20 bp, Artificial Sequence
  Synthetic oligonucleotide; TGG chr11 5177603 5177622 5177619 +
agtgccttagcaaaattccg

SEQ ID NO: 3398 - DNA, 20 bp, Artificial Sequence
  Synthetic oligonucleotide; TAG chr11 5177615 5177634 5177631 +
aaattccgtggacactttga

SEQ ID NO: 3399 - DNA, 20 bp, Artificial Sequence
  Synthetic oligonucleotide; AAG chr11 5177631 5177650 5177647 +
ttgatagacaccatcatttt

SEQ ID NO: 3400 - DNA, 20 bp, Artificial Sequence
  Synthetic oligonucleotide; GAG chr11 5177641 5177660 5177657 +
ccatcattttaagtgtgttt

SEQ ID NO: 3401 - DNA, 20 bp, Artificial Sequence
  Synthetic oligonucleotide; AGG chr11 5177642 5177661 5177658 +
catcattttaagtgtgtttg

SEQ ID NO: 3402 - DNA, 20 bp, Artificial Sequence
  Synthetic oligonucleotide; TGG chr11 5177652 5177671 5177668 +
agtgtgtttgaggatttcta

SEQ ID NO: 3403 - DNA, 20 bp, Artificial Sequence
  Synthetic oligonucleotide; CAG chr11 5177680 5177699 5177696 +
atttattctattccctaaaa

SEQ ID NO: 3404 - DNA, 20 bp, Artificial Sequence
  Synthetic oligonucleotide; CAG chr11 5177698 5177717 5177714 +
aacagactttttaatcttaa

SEQ ID NO: 3405 - DNA, 20 bp, Artificial Sequence
  Synthetic oligonucleotide; TAG chr11 5177711 5177730 5177727 +
atcttaacagcatacactga

SEQ ID NO: 3406 - DNA, 20 bp, Artificial Sequence
  Synthetic oligonucleotide; AGG chr11 5177712 5177731 5177728 +
tcttaacagcatacactgat

SEQ ID NO: 3407 - DNA, 20 bp, Artificial Sequence
  Synthetic oligonucleotide; GAG chr11 5177714 5177733 5177730 +
ttaacagcatacactgatag

SEQ ID NO: 3408 - DNA, 20 bp, Artificial Sequence
  Synthetic oligonucleotide; GAG chr11 5177716 5177735 5177732 +
aacagcatacactgatagga

SEQ ID NO: 3409 - DNA, 20 bp, Artificial Sequence
  Synthetic oligonucleotide; AAG chr11 5177721 5177740 5177737 +
catacactgataggagagaa

SEQ ID NO: 3410 - DNA, 20 bp, Artificial Sequence
  Synthetic oligonucleotide; TGG chr11 5177750 5177769 5177766 +
cactcgatctttaatttgtt

SEQ ID NO: 3411 - DNA, 20 bp, Artificial Sequence
  Synthetic oligonucleotide; TGG chr11 5177771 5177790 5177787 +
ggtcttcaccccataaatga

SEQ ID NO: 3412 - DNA, 20 bp, Artificial Sequence
  Synthetic oligonucleotide; GGG chr11 5177772 5177791 5177788 +
gtcttcaccccataaatgat

SEQ ID NO: 3413 - DNA, 20 bp, Artificial Sequence
  Synthetic oligonucleotide; GGG chr11 5177773 5177792 5177789 +
tcttcaccccataaatgatg

SEQ ID NO: 3414 - DNA, 20 bp, Artificial Sequence
  Synthetic oligonucleotide; TAG chr11 5177778 5177797 5177794 +
accccataaatgatggggtt

SEQ ID NO: 3415 - DNA, 20 bp, Artificial Sequence
  Synthetic oligonucleotide; TAG chr11 5177783 5177802 5177799 +
ataaatgatggggtttagca

SEQ ID NO: 3416 - DNA, 20 bp, Artificial Sequence
  Synthetic oligonucleotide; AGG chr11 5177784 5177803 5177800 +
taaatgatggggtttagcat

SEQ ID NO: 3417 - DNA, 20 bp, Artificial Sequence
  Synthetic oligonucleotide; GGG chr11 5177785 5177804 5177801 +
aaatgatggggtttagcata

SEQ ID NO: 3418 - DNA, 20 bp, Artificial Sequence
  Synthetic oligonucleotide; GGG chr11 5177786 5177805 5177802 +
aatgatggggtttagcatag

SEQ ID NO: 3419 - DNA, 20 bp, Artificial Sequence
  Synthetic oligonucleotide; GGG chr11 5177787 5177806 5177803 +
atgatggggtttagcatagg

SEQ ID NO: 3420 - DNA, 20 bp, Artificial Sequence
  Synthetic oligonucleotide; TAG chr11 5177800 5177819 5177816 +
gcatagggggcactaacaca

SEQ ID NO: 3421 - DNA, 20 bp, Artificial Sequence
  Synthetic oligonucleotide; GAG chr11 5177802 5177821 5177818 +
atagggggcactaacacata

SEQ ID NO: 3422 - DNA, 20 bp, Artificial Sequence
  Synthetic oligonucleotide; TAG chr11 5177814 5177833 5177830 +
aacacatagagactgcccac

SEQ ID NO: 3423 - DNA, 20 bp, Artificial Sequence
  Synthetic oligonucleotide; AGG chr11 5177815 5177834 5177831 +
acacatagagactgcccact

SEQ ID NO: 3424 - DNA, 20 bp, Artificial Sequence
  Synthetic oligonucleotide; TGG chr11 5177827 5177846 5177843 +
tgcccactaggatgtgaatg

SEQ ID NO: 3425 - DNA, 20 bp, Artificial Sequence
  Synthetic oligonucleotide; GAG chr11 5177831 5177850 5177847 +
cactaggatgtgaatgtggt

SEQ ID NO: 3426 - DNA, 20 bp, Artificial Sequence
  Synthetic oligonucleotide; AGG chr11 5177832 5177851 5177848 +
actaggatgtgaatgtggtg

SEQ ID NO: 3427 - DNA, 20 bp, Artificial Sequence
  Synthetic oligonucleotide; GGG chr11 5177833 5177852 5177849 +
ctaggatgtgaatgtggtga

SEQ ID NO: 3428 - DNA, 20 bp, Artificial Sequence
  Synthetic oligonucleotide; TGG chr11 5177837 5177856 5177853 +
gatgtgaatgtggtgaggga

SEQ ID NO: 3429 - DNA, 20 bp, Artificial Sequence
  Synthetic oligonucleotide; AAG chr11 5177851 5177870 5177867 +
gagggatggttttacctcca

SEQ ID NO: 3430 - DNA, 20 bp, Artificial Sequence
  Synthetic oligonucleotide; TGG chr11 5177857 5177876 5177873 +
tggttttacctccaaagcga

SEQ ID NO: 3431 - DNA, 20 bp, Artificial Sequence
  Synthetic oligonucleotide; GGG chr11 5177858 5177877 5177874 +
ggttttacctccaaagcgat

SEQ ID NO: 3432 - DNA, 20 bp, Artificial Sequence
  Synthetic oligonucleotide; AAG chr11 5177862 5177881 5177878 +
ttacctccaaagcgatgggc

SEQ ID NO: 3433 - DNA, 20 bp, Artificial Sequence
  Synthetic oligonucleotide; AAG chr11 5177872 5177891 5177888 +
agcgatgggcaagaaatgaa

SEQ ID NO: 3434 - DNA, 20 bp, Artificial Sequence
  Synthetic oligonucleotide; TGG chr11 5177880 5177899 5177896 +
gcaagaaatgaaaagaatgc

SEQ ID NO: 3435 - DNA, 20 bp, Artificial Sequence
  Synthetic oligonucleotide; GGG chr11 5177881 5177900 5177897 +
caagaaatgaaaagaatgct

SEQ ID NO: 3436 - DNA, 20 bp, Artificial Sequence
  Synthetic oligonucleotide; GGG chr11 5177882 5177901 5177898 +
aagaaatgaaaagaatgctg

SEQ ID NO: 3437 - DNA, 20 bp, Artificial Sequence
  Synthetic oligonucleotide; TAG chr11 5177887 5177906 5177903 +
atgaaaagaatgctggggta

SEQ ID NO: 3438 - DNA, 20 bp, Artificial Sequence
  Synthetic oligonucleotide; CAG chr11 5177905 5177924 5177921 +
tatagaacataaatatgaca

SEQ ID NO: 3439 - DNA, 20 bp, Artificial Sequence
  Synthetic oligonucleotide; GAG chr11 5177912 5177931 5177928 +
cataaatatgacacagatat

SEQ ID NO: 3440 - DNA, 20 bp, Artificial Sequence
  Synthetic oligonucleotide; GAG chr11 5177914 5177933 5177930 +
taaatatgacacagatatga

SEQ ID NO: 3441 - DNA, 20 bp, Artificial Sequence
  Synthetic oligonucleotide; AAG chr11 5177928 5177947 5177944 +
atatgagagccgcacgtact

SEQ ID NO: 3442 - DNA, 20 bp, Artificial Sequence
  Synthetic oligonucleotide; AGG chr11 5177929 5177948 5177945 +
tatgagagccgcacgtacta

SEQ ID NO: 3443 - DNA, 20 bp, Artificial Sequence
  Synthetic oligonucleotide; GGG chr11 5177930 5177949 5177946 +
atgagagccgcacgtactaa

SEQ ID NO: 3444 - DNA, 20 bp, Artificial Sequence
  Synthetic oligonucleotide; TGG chr11 5177942 5177961 5177958 +
cgtactaagggccttgaacc

SEQ ID NO: 3445 - DNA, 20 bp, Artificial Sequence
  Synthetic oligonucleotide; CAG chr11 5177945 5177964 5177961 +
actaagggccttgaacctgg

SEQ ID NO: 3446 - DNA, 20 bp, Artificial Sequence
  Synthetic oligonucleotide; CAG chr11 5177950 5177969 5177966 +
gggccttgaacctggcagcc

SEQ ID NO: 3447 - DNA, 20 bp, Artificial Sequence
  Synthetic oligonucleotide; AGG chr11 5177951 5177970 5177967 +
ggccttgaacctggcagccc

SEQ ID NO: 3448 - DNA, 20 bp, Artificial Sequence
  Synthetic oligonucleotide; AAG chr11 5177954 5177973 5177970 +
cttgaacctggcagcccagg

SEQ ID NO: 3449 - DNA, 20 bp, Artificial Sequence
  Synthetic oligonucleotide; GAG chr11 5177971 5177990 5177987 +
aggaagatatctgaaacact

SEQ ID NO: 3450 - DNA, 20 bp, Artificial Sequence
  Synthetic oligonucleotide; AAG chr11 5177976 5177995 5177992 +
gatatctgaaacactgagtg

SEQ ID NO: 3451 - DNA, 20 bp, Artificial Sequence
  Synthetic oligonucleotide; AGG chr11 5177977 5177996 5177993 +
atatctgaaacactgagtga

SEQ ID NO: 3452 - DNA, 20 bp, Artificial Sequence
  Synthetic oligonucleotide; TAG chr11 5177989 5178008 5178005 +
ctgagtgaaggatcattgtg

SEQ ID NO: 3453 - DNA, 20 bp, Artificial Sequence
  Synthetic oligonucleotide; AGG chr11 5177990 5178009 5178006 +
tgagtgaaggatcattgtgt

SEQ ID NO: 3454 - DNA, 20 bp, Artificial Sequence
  Synthetic oligonucleotide; AAG chr11 5178003 5178022 5178019 +
attgtgtaggatataatgat

SEQ ID NO: 3455 - DNA, 20 bp, Artificial Sequence
  Synthetic oligonucleotide; CAG chr11 5178015 5178034 5178031 +
ataatgataagcactatatc

SEQ ID NO: 3456 - DNA, 20 bp, Artificial Sequence
  Synthetic oligonucleotide; TAG chr11 5178023 5178042 5178039 +
aagcactatatccagtcctg

SEQ ID NO: 3457 - DNA, 20 bp, Artificial Sequence
  Synthetic oligonucleotide; GAG chr11 5178025 5178044 5178041 +
gcactatatccagtcctgta

SEQ ID NO: 3458 - DNA, 20 bp, Artificial Sequence
  Synthetic oligonucleotide; GAG chr11 5178027 5178046 5178043 +
actatatccagtcctgtaga

SEQ ID NO: 3459 - DNA, 20 bp, Artificial Sequence
  Synthetic oligonucleotide; TAG chr11 5178030 5178049 5178046 +
atatccagtcctgtagagag

SEQ ID NO: 3460 - DNA, 20 bp, Artificial Sequence
  Synthetic oligonucleotide; AGG chr11 5178031 5178050 5178047 +
tatccagtcctgtagagagt

SEQ ID NO: 3461 - DNA, 20 bp, Artificial Sequence
  Synthetic oligonucleotide; GGG chr11 5178032 5178051 5178048 +
atccagtcctgtagagagta

SEQ ID NO: 3462 - DNA, 20 bp, Artificial Sequence
  Synthetic oligonucleotide; CAG chr11 5178038 5178057 5178054 +
tcctgtagagagtagggcca

SEQ ID NO: 3463 - DNA, 20 bp, Artificial Sequence
  Synthetic oligonucleotide; GAG chr11 5178042 5178061 5178058 +
gtagagagtagggccacagt

SEQ ID NO: 3464 - DNA, 20 bp, Artificial Sequence
  Synthetic oligonucleotide; AGG chr11 5178043 5178062 5178059 +
tagagagtagggccacagtg

SEQ ID NO: 3465 - DNA, 20 bp, Artificial Sequence
  Synthetic oligonucleotide; AAG chr11 5178077 5178096 5178093 +
attgacattgatattgccac

SEQ ID NO: 3466 - DNA, 20 bp, Artificial Sequence
  Synthetic oligonucleotide; TGG chr11 5178086 5178105 5178102 +
gatattgccacaagccaatc

SEQ ID NO: 3467 - DNA, 20 bp, Artificial Sequence
  Synthetic oligonucleotide; CAG chr11 5178100 5178119 5178116 +
ccaatctggcaatgtgctca

SEQ ID NO: 3468 - DNA, 20 bp, Artificial Sequence
  Synthetic oligonucleotide; TAG chr11 5178103 5178122 5178119 +
atctggcaatgtgctcacag

SEQ ID NO: 3469 - DNA, 20 bp, Artificial Sequence
  Synthetic oligonucleotide; AGG chr11 5178104 5178123 5178120 +
tctggcaatgtgctcacagt

SEQ ID NO: 3470 - DNA, 20 bp, Artificial Sequence
  Synthetic oligonucleotide; GAG chr11 5178110 5178129 5178126 +
aatgtgctcacagtaggaat

SEQ ID NO: 3471 - DNA, 20 bp, Artificial Sequence
  Synthetic oligonucleotide; AGG chr11 5178111 5178130 5178127 +
atgtgctcacagtaggaatg

SEQ ID NO: 3472 - DNA, 20 bp, Artificial Sequence
  Synthetic oligonucleotide; AAG chr11 5178138 5178157 5178154 +
atgtttctcccacaatatgt

SEQ ID NO: 3473 - DNA, 20 bp, Artificial Sequence
  Synthetic oligonucleotide; CGG chr11 5178142 5178161 5178158 +
ttctcccacaatatgtaagt

SEQ ID NO: 3474 - DNA, 20 bp, Artificial Sequence
  Synthetic oligonucleotide; CAG chr11 5178150 5178169 5178166 +
caatatgtaagtcggtatac

SEQ ID NO: 3475 - DNA, 20 bp, Artificial Sequence
  Synthetic oligonucleotide; AGG chr11 5178151 5178170 5178167 +
aatatgtaagtcggtatacc

SEQ ID NO: 3476 - DNA, 20 bp, Artificial Sequence
  Synthetic oligonucleotide; AAG chr11 5178154 5178173 5178170 +
atgtaagtcggtataccagg

SEQ ID NO: 3477 - DNA, 20 bp, Artificial Sequence
  Synthetic oligonucleotide; CGG chr11 5178162 5178181 5178178 +
cggtataccaggaagatgaa

SEQ ID NO: 3478 - DNA, 20 bp, Artificial Sequence
  Synthetic oligonucleotide; CAG chr11 5178166 5178185 5178182 +
ataccaggaagatgaacgga

SEQ ID NO: 3479 - DNA, 20 bp, Artificial Sequence
  Synthetic oligonucleotide; CAG chr11 5178169 5178188 5178185 +
ccaggaagatgaacggacag

SEQ ID NO: 3480 - DNA, 20 bp, Artificial Sequence
  Synthetic oligonucleotide; AAG chr11 5178178 5178197 5178194 +
tgaacggacagcagatgaaa

SEQ ID NO: 3481 - DNA, 20 bp, Artificial Sequence
  Synthetic oligonucleotide; CAG chr11 5178191 5178210 5178207 +
gatgaaaaagctcctgacca

SEQ ID NO: 3482 - DNA, 20 bp, Artificial Sequence
  Synthetic oligonucleotide; CGG chr11 5178215 5178234 5178231 +
tgctatgccaatcttcctga

SEQ ID NO: 3483 - DNA, 20 bp, Artificial Sequence
  Synthetic oligonucleotide; GAG chr11 5178223 5178242 5178239 +
caatcttcctgacggctgat

SEQ ID NO: 3484 - DNA, 20 bp, Artificial Sequence
  Synthetic oligonucleotide; AGG chr11 5178224 5178243 5178240 +
aatcttcctgacggctgatg

SEQ ID NO: 3485 - DNA, 20 bp, Artificial Sequence
  Synthetic oligonucleotide; TGG chr11 5178233 5178252 5178249 +
gacggctgatgaggttaaaa

SEQ ID NO: 3486 - DNA, 20 bp, Artificial Sequence
  Synthetic oligonucleotide; CAG chr11 5178243 5178262 5178259 +
gaggttaaaatggtgtatct

SEQ ID NO: 3487 - DNA, 20 bp, Artificial Sequence
  Synthetic oligonucleotide; TGG chr11 5178246 5178265 5178262 +
gttaaaatggtgtatctcag

SEQ ID NO: 3488 - DNA, 20 bp, Artificial Sequence
  Synthetic oligonucleotide; GGG chr11 5178247 5178266 5178263 +
ttaaaatggtgtatctcagt

SEQ ID NO: 3489 - DNA, 20 bp, Artificial Sequence
  Synthetic oligonucleotide; CAG chr11 5178253 5178272 5178269 +
tggtgtatctcagtgggtaa

SEQ ID NO: 3490 - DNA, 20 bp, Artificial Sequence
  Synthetic oligonucleotide; TGG chr11 5178257 5178276 5178273 +
gtatctcagtgggtaacaga

SEQ ID NO: 3491 - DNA, 20 bp, Artificial Sequence
  Synthetic oligonucleotide; TAG chr11 5178265 5178284 5178281 +
gtgggtaacagatggccaca

SEQ ID NO: 3492 - DNA, 20 bp, Artificial Sequence
  Synthetic oligonucleotide; CGG chr11 5178268 5178287 5178284 +
ggtaacagatggccacatag

SEQ ID NO: 3493 - DNA, 20 bp, Artificial Sequence
  Synthetic oligonucleotide; CAG chr11 5178285 5178304 5178301 +
tagcggtcaaatgccattgc

SEQ ID NO: 3494 - DNA, 20 bp, Artificial Sequence
  Synthetic oligonucleotide; AGG chr11 5178286 5178305 5178302 +
agcggtcaaatgccattgcc

SEQ ID NO: 3495 - DNA, 20 bp, Artificial Sequence
  Synthetic oligonucleotide; GAG chr11 5178288 5178307 5178304 +
cggtcaaatgccattgccag

SEQ ID NO: 3496 - DNA, 20 bp, Artificial Sequence
  Synthetic oligonucleotide; TAG chr11 5178293 5178312 5178309 +
aaatgccattgccaggagaa

SEQ ID NO: 3497 - DNA, 20 bp, Artificial Sequence
  Synthetic oligonucleotide; CAG chr11 5178296 5178315 5178312 +
tgccattgccaggagaatag

SEQ ID NO: 3498 - DNA, 20 bp, Artificial Sequence
  Synthetic oligonucleotide; AAG chr11 5178310 5178329 5178326 +
gaatagcagattctgccaca

SEQ ID NO: 3499 - DNA, 20 bp, Artificial Sequence
  Synthetic oligonucleotide; AAG chr11 5178325 5178344 5178341 +
ccacaaagatgaaatgtatg

SEQ ID NO: 3500 - DNA, 20 bp, Artificial Sequence
  Synthetic oligonucleotide; GAG chr11 5178335 5178354 5178351 +
gaaatgtatgaagaacatct

SEQ ID NO: 3501 - DNA, 20 bp, Artificial Sequence
  Synthetic oligonucleotide; AAG chr11 5178352 5178371 5178368 +
tctgagacacacaactacca

SEQ ID NO: 3502 - DNA, 20 bp, Artificial Sequence
  Synthetic oligonucleotide; AGG chr11 5178353 5178372 5178369 +
ctgagacacacaactaccaa

SEQ ID NO: 3503 - DNA, 20 bp, Artificial Sequence
  Synthetic oligonucleotide; TGG chr11 5178365 5178384 5178381 +
actaccaaaggatatgtcca

SEQ ID NO: 3504 - DNA, 20 bp, Artificial Sequence
  Synthetic oligonucleotide; GAG chr11 5178367 5178386 5178383 +
taccaaaggatatgtccatg

SEQ ID NO: 3505 - DNA, 20 bp, Artificial Sequence
  Synthetic oligonucleotide; TGG chr11 5178370 5178389 5178386 +
caaaggatatgtccatggag

SEQ ID NO: 3506 - DNA, 20 bp, Artificial Sequence
  Synthetic oligonucleotide; CAG chr11 5178376 5178395 5178392 +
atatgtccatggagtggaac

SEQ ID NO: 3507 - DNA, 20 bp, Artificial Sequence
  Synthetic oligonucleotide; GAG chr11 5178378 5178397 5178394 +
atgtccatggagtggaacca

SEQ ID NO: 3508 - DNA, 20 bp, Artificial Sequence
  Synthetic oligonucleotide; AGG chr11 5178379 5178398 5178395 +
tgtccatggagtggaaccag

SEQ ID NO: 3509 - DNA, 20 bp, Artificial Sequence
  Synthetic oligonucleotide; TAG chr11 5178383 5178402 5178399 +
catggagtggaaccagagga

SEQ ID NO: 3510 - DNA, 20 bp, Artificial Sequence
  Synthetic oligonucleotide; CAG chr11 5178387 5178406 5178403 +
gagtggaaccagaggatagc

SEQ ID NO: 3511 - DNA, 20 bp, Artificial Sequence
  Synthetic oligonucleotide; TAG chr11 5178395 5178414 5178411 +
ccagaggatagccagcacct

SEQ ID NO: 3512 - DNA, 20 bp, Artificial Sequence
  Synthetic oligonucleotide; AGG chr11 5178396 5178415 5178412 +
cagaggatagccagcacctt

SEQ ID NO: 3513 - DNA, 20 bp, Artificial Sequence
  Synthetic oligonucleotide; GGG chr11 5178397 5178416 5178413 +
agaggatagccagcacctta

SEQ ID NO: 3514 - DNA, 20 bp, Artificial Sequence
  Synthetic oligonucleotide; GGG chr11 5178398 5178417 5178414 +
gaggatagccagcaccttag

SEQ ID NO: 3515 - DNA, 20 bp, Artificial Sequence
  Synthetic oligonucleotide; CAG chr11 5178404 5178423 5178420 +
agccagcaccttaggggctg

SEQ ID NO: 3516 - DNA, 20 bp, Artificial Sequence
  Synthetic oligonucleotide; CAG chr11 5178407 5178426 5178423 +
cagcaccttaggggctgcag

SEQ ID NO: 3517 - DNA, 20 bp, Artificial Sequence
  Synthetic oligonucleotide; TGG chr11 5178410 5178429 5178426 +
caccttaggggctgcagcag

SEQ ID NO: 3518 - DNA, 20 bp, Artificial Sequence
  Synthetic oligonucleotide; GAG chr11 5178414 5178433 5178430 +
ttaggggctgcagcagtggc

SEQ ID NO: 3519 - DNA, 20 bp, Artificial Sequence
  Synthetic oligonucleotide; CAG chr11 5178417 5178436 5178433 +
ggggctgcagcagtggcgag

SEQ ID NO: 3520 - DNA, 20 bp, Artificial Sequence
  Synthetic oligonucleotide; AGG chr11 5178418 5178437 5178434 +
gggctgcagcagtggcgagc

SEQ ID NO: 3521 - DNA, 20 bp, Artificial Sequence
  Synthetic oligonucleotide; AAG chr11 5178421 5178440 5178437 +
ctgcagcagtggcgagcagg

SEQ ID NO: 3522 - DNA, 20 bp, Artificial Sequence
  Synthetic oligonucleotide; CGG chr11 5178425 5178444 5178441 +
agcagtggcgagcaggaagt

SEQ ID NO: 3523 - DNA, 20 bp, Artificial Sequence
  Synthetic oligonucleotide; GAG chr11 5178430 5178449 5178446 +
tggcgagcaggaagtcggct

SEQ ID NO: 3524 - DNA, 20 bp, Artificial Sequence
  Synthetic oligonucleotide; AGG chr11 5178431 5178450 5178447 +
ggcgagcaggaagtcggctg

SEQ ID NO: 3525 - DNA, 20 bp, Artificial Sequence
  Synthetic oligonucleotide; CAG chr11 5178435 5178454 5178451 +
agcaggaagtcggctgaggc

SEQ ID NO: 3526 - DNA, 20 bp, Artificial Sequence
  Synthetic oligonucleotide; TGG chr11 5178440 5178459 5178456 +
gaagtcggctgaggccagca

SEQ ID NO: 3527 - DNA, 20 bp, Artificial Sequence
  Synthetic oligonucleotide; TAG chr11 5178444 5178463 5178460 +
tcggctgaggccagcatgga

SEQ ID NO: 3528 - DNA, 20 bp, Artificial Sequence
  Synthetic oligonucleotide; AGG chr11 5178445 5178464 5178461 +
cggctgaggccagcatggat

SEQ ID NO: 3529 - DNA, 20 bp, Artificial Sequence
  Synthetic oligonucleotide; AAG chr11 5178448 5178467 5178464 +
ctgaggccagcatggatagg

SEQ ID NO: 3530 - DNA, 20 bp, Artificial Sequence
  Synthetic oligonucleotide; GAG chr11 5178450 5178469 5178466 +
gaggccagcatggataggaa

SEQ ID NO: 3531 - DNA, 20 bp, Artificial Sequence
  Synthetic oligonucleotide; TGG chr11 5178458 5178477 5178474 +
catggataggaagagataca

SEQ ID NO: 3532 - DNA, 20 bp, Artificial Sequence
  Synthetic oligonucleotide; GGG chr11 5178459 5178478 5178475 +
atggataggaagagatacat

SEQ ID NO: 3533 - DNA, 20 bp, Artificial Sequence
  Synthetic oligonucleotide; TGG chr11 5178466 5178485 5178482 +
ggaagagatacatgggctca

SEQ ID NO: 3534 - DNA, 20 bp, Artificial Sequence
  Synthetic oligonucleotide; GAG chr11 5178468 5178487 5178484 +
aagagatacatgggctcatg

SEQ ID NO: 3535 - DNA, 20 bp, Artificial Sequence
  Synthetic oligonucleotide; CAG chr11 5178479 5178498 5178495 +
gggctcatggagactgcgct

SEQ ID NO: 3536 - DNA, 20 bp, Artificial Sequence
  Synthetic oligonucleotide; CAG chr11 5178489 5178508 5178505 +
agactgcgctcagtcatgat

SEQ ID NO: 3537 - DNA, 20 bp, Artificial Sequence
  Synthetic oligonucleotide; AGG chr11 5178490 5178509 5178506 +
gactgcgctcagtcatgatc

SEQ ID NO: 3538 - DNA, 20 bp, Artificial Sequence
  Synthetic oligonucleotide; AAG chr11 5178493 5178512 5178509 +
tgcgctcagtcatgatcagg

SEQ ID NO: 3539 - DNA, 20 bp, Artificial Sequence
  Synthetic oligonucleotide; AAG chr11 5178499 5178518 5178515 +
cagtcatgatcaggaagatc

SEQ ID NO: 3540 - DNA, 20 bp, Artificial Sequence
  Synthetic oligonucleotide; AAG chr11 5178502 5178521 5178518 +
tcatgatcaggaagatcaag

SEQ ID NO: 3541 - DNA, 20 bp, Artificial Sequence
  Synthetic oligonucleotide; CAG chr11 5178518 5178537 5178534 +
caagaagatattgcctgcaa

SEQ ID NO: 3542 - DNA, 20 bp, Artificial Sequence
  Synthetic oligonucleotide; AAG chr11 5178536 5178555 5178552 +
aacagccacaatgtacataa

SEQ ID NO: 3543 - DNA, 20 bp, Artificial Sequence
  Synthetic oligonucleotide; AAG chr11 5178542 5178561 5178558 +
cacaatgtacataaaagaaa

SEQ ID NO: 3544 - DNA, 20 bp, Artificial Sequence
  Synthetic oligonucleotide; AGG chr11 5178543 5178562 5178559 +
acaatgtacataaaagaaaa

SEQ ID NO: 3545 - DNA, 20 bp, Artificial Sequence
  Synthetic oligonucleotide; GGG chr11 5178544 5178563 5178560 +
caatgtacataaaagaaaaa

SEQ ID NO: 3546 - DNA, 20 bp, Artificial Sequence
  Synthetic oligonucleotide; TGG chr11 5178548 5178567 5178564 +
gtacataaaagaaaaaggga

SEQ ID NO: 3547 - DNA, 20 bp, Artificial Sequence
  Synthetic oligonucleotide; GAG chr11 5178550 5178569 5178566 +
acataaaagaaaaagggatg

SEQ ID NO: 3548 - DNA, 20 bp, Artificial Sequence
  Synthetic oligonucleotide; CAG chr11 5178556 5178575 5178572 +
aagaaaaagggatggagatc

SEQ ID NO: 3549 - DNA, 20 bp, Artificial Sequence
  Synthetic oligonucleotide; AGG chr11 5178557 5178576 5178573 +
agaaaaagggatggagatcc

SEQ ID NO: 3550 - DNA, 20 bp, Artificial Sequence
  Synthetic oligonucleotide; AAG chr11 5178565 5178584 5178581 +
ggatggagatccaggtatgc

SEQ ID NO: 3551 - DNA, 20 bp, Artificial Sequence
  Synthetic oligonucleotide; CAG chr11 5178573 5178592 5178589 +
atccaggtatgcaagccttc

SEQ ID NO: 3552 - DNA, 20 bp, Artificial Sequence
  Synthetic oligonucleotide; TGG chr11 5178579 5178598 5178595 +
gtatgcaagccttccagccc

SEQ ID NO: 3553 - DNA, 20 bp, Artificial Sequence
  Synthetic oligonucleotide; GGG chr11 5178580 5178599 5178596 +
tatgcaagccttccagccct

SEQ ID NO: 3554 - DNA, 20 bp, Artificial Sequence
  Synthetic oligonucleotide; CAG chr11 5178591 5178610 5178607 +
tccagccctgggattcccat

SEQ ID NO: 3555 - DNA, 20 bp, Artificial Sequence
  Synthetic oligonucleotide; AGG chr11 5178592 5178611 5178608 +
ccagccctgggattcccatc

SEQ ID NO: 3556 - DNA, 20 bp, Artificial Sequence
  Synthetic oligonucleotide; TGG chr11 5178610 5178629 5178626 +
tcaggacataccacacatcc

SEQ ID NO: 3557 - DNA, 20 bp, Artificial Sequence
  Synthetic oligonucleotide; GGG chr11 5178611 5178630 5178627 +
caggacataccacacatcct

SEQ ID NO: 3558 - DNA, 20 bp, Artificial Sequence
  Synthetic oligonucleotide; TAG chr11 5178617 5178636 5178633 +
ataccacacatcctgggaat

SEQ ID NO: 3559 - DNA, 20 bp, Artificial Sequence
  Synthetic oligonucleotide; AAG chr11 5178631 5178650 5178647 +
gggaattagtgtgattgcga

SEQ ID NO: 3560 - DNA, 20 bp, Artificial Sequence
  Synthetic oligonucleotide; AAG chr11 5178635 5178654 5178651 +
attagtgtgattgcgaaaga

SEQ ID NO: 3561 - DNA, 20 bp, Artificial Sequence
  Synthetic oligonucleotide; AGG chr11 5178636 5178655 5178652 +
ttagtgtgattgcgaaagaa

SEQ ID NO: 3562 - DNA, 20 bp, Artificial Sequence
  Synthetic oligonucleotide; GAG chr11 5178638 5178657 5178654 +
agtgtgattgcgaaagaaag

SEQ ID NO: 3563 - DNA, 20 bp, Artificial Sequence
  Synthetic oligonucleotide; CAG chr11 5178650 5178669 5178666 +
aaagaaaggagccgtatgta

SEQ ID NO: 3564 - DNA, 20 bp, Artificial Sequence
  Synthetic oligonucleotide; CAG chr11 5178660 5178679 5178676 +
gccgtatgtacagtttattc

SEQ ID NO: 3565 - DNA, 20 bp, Artificial Sequence
  Synthetic oligonucleotide; AGG chr11 5178661 5178680 5178677 +
ccgtatgtacagtttattcc

SEQ ID NO: 3566 - DNA, 20 bp, Artificial Sequence
  Synthetic oligonucleotide; TAG chr11 5178666 5178685 5178682 +
tgtacagtttattccaggcc

SEQ ID NO: 3567 - DNA, 20 bp, Artificial Sequence
  Synthetic oligonucleotide; TAG chr11 5178675 5178694 5178691 +
tattccaggcctagtgccat

SEQ ID NO: 3568 - DNA, 20 bp, Artificial Sequence
  Synthetic oligonucleotide; AAG chr11 5178681 5178700 5178697 +
aggcctagtgccattagtga

SEQ ID NO: 3569 - DNA, 20 bp, Artificial Sequence
  Synthetic oligonucleotide; AAG chr11 5178690 5178709 5178706 +
gccattagtgaaagactaca

SEQ ID NO: 3570 - DNA, 20 bp, Artificial Sequence
  Synthetic oligonucleotide; GAG chr11 5178695 5178714 5178711 +
tagtgaaagactacaaagtt

SEQ ID NO: 3571 - DNA, 20 bp, Artificial Sequence
  Synthetic oligonucleotide; AGG chr11 5178696 5178715 5178712 +
agtgaaagactacaaagttg

SEQ ID NO: 3572 - DNA, 20 bp, Artificial Sequence
  Synthetic oligonucleotide; TAG chr11 5178702 5178721 5178718 +
agactacaaagttgaggatt

SEQ ID NO: 3573 - DNA, 20 bp, Artificial Sequence
  Synthetic oligonucleotide; TAG chr11 5178716 5178735 5178732 +
aggatttagaaacactacct

SEQ ID NO: 3574 - DNA, 20 bp, Artificial Sequence
  Synthetic oligonucleotide; AGG chr11 5178717 5178736 5178733 +
ggatttagaaacactacctt

SEQ ID NO: 3575 - DNA, 20 bp, Artificial Sequence
  Synthetic oligonucleotide; GAG chr11 5178726 5178745 5178742 +
aacactaccttaggctgaat

SEQ ID NO: 3576 - DNA, 20 bp, Artificial Sequence
  Synthetic oligonucleotide; AGG chr11 5178727 5178746 5178743 +
acactaccttaggctgaatg

SEQ ID NO: 3577 - DNA, 20 bp, Artificial Sequence
  Synthetic oligonucleotide; CAG chr11 5178736 5178755 5178752 +
taggctgaatgaggtctcat

SEQ ID NO: 3578 - DNA, 20 bp, Artificial Sequence
  Synthetic oligonucleotide; TGG chr11 5178768 5178787 5178784 +
ctttccaatgttttcttctc

SEQ ID NO: 3579 - DNA, 20 bp, Artificial Sequence
  Synthetic oligonucleotide; GGG chr11 5178769 5178788 5178785 +
tttccaatgttttcttctct

SEQ ID NO: 3580 - DNA, 20 bp, Artificial Sequence
  Synthetic oligonucleotide; AAG chr11 5178773 5178792 5178789 +
caatgttttcttctctggga

SEQ ID NO: 3581 - DNA, 20 bp, Artificial Sequence
  Synthetic oligonucleotide; AGG chr11 5178774 5178793 5178790 +
aatgttttcttctctgggaa

SEQ ID NO: 3582 - DNA, 20 bp, Artificial Sequence
  Synthetic oligonucleotide; GAG chr11 5178776 5178795 5178792 +
tgttttcttctctgggaaag

SEQ ID NO: 3583 - DNA, 20 bp, Artificial Sequence
  Synthetic oligonucleotide; GAG chr11 5178778 5178797 5178794 +
ttttcttctctgggaaagga

SEQ ID NO: 3584 - DNA, 20 bp, Artificial Sequence
  Synthetic oligonucleotide; TGG chr11 5178786 5178805 5178802 +
tctgggaaaggagagtaaaa

SEQ ID NO: 3585 - DNA, 20 bp, Artificial Sequence
  Synthetic oligonucleotide; GGG chr11 5178787 5178806 5178803 +
ctgggaaaggagagtaaaat

SEQ ID NO: 3586 - DNA, 20 bp, Artificial Sequence
  Synthetic oligonucleotide; TAG chr11 5178794 5178813 5178810 +
aggagagtaaaatgggttaa

SEQ ID NO: 3587 - DNA, 20 bp, Artificial Sequence
  Synthetic oligonucleotide; AAG chr11 5178808 5178827 5178824 +
ggttaatagaccgaatatat

SEQ ID NO: 3588 - DNA, 20 bp, Artificial Sequence
  Synthetic oligonucleotide; TAG chr11 5178848 5178867 5178864 +
ttttttgtaccttaaaaaat

SEQ ID NO: 3589 - DNA, 20 bp, Artificial Sequence
  Synthetic oligonucleotide; TAG chr11 5178851 5178870 5178867 +
tttgtaccttaaaaaattag

SEQ ID NO: 3590 - DNA, 20 bp, Artificial Sequence
  Synthetic oligonucleotide; AAG chr11 5178935 5178954 5178951 +
cttcacaataacctattgaa

SEQ ID NO: 3591 - DNA, 20 bp, Artificial Sequence
  Synthetic oligonucleotide; CAG chr11 5178976 5178995 5178992 +
tataaatactattatttcta

SEQ ID NO: 3592 - DNA, 20 bp, Artificial Sequence
  Synthetic oligonucleotide; CAG chr11 5178995 5179014 5179011 +
acagatgtaaaaaaaaccca

SEQ ID NO: 3593 - DNA, 20 bp, Artificial Sequence
  Synthetic oligonucleotide; CAG chr11 5179003 5179022 5179019 +
aaaaaaaacccacagacttt

SEQ ID NO: 3594 - DNA, 20 bp, Artificial Sequence
  Synthetic oligonucleotide; TAG chr11 5179016 5179035 5179032 +
agactttcagcctcttaccc

SEQ ID NO: 3595 - DNA, 20 bp, Artificial Sequence
  Synthetic oligonucleotide; AGG chr11 5179017 5179036 5179033 +
gactttcagcctcttaccct

SEQ ID NO: 3596 - DNA, 20 bp, Artificial Sequence
  Synthetic oligonucleotide; TGG chr11 5179026 5179045 5179042 +
cctcttaccctaggccctac

SEQ ID NO: 3597 - DNA, 20 bp, Artificial Sequence
  Synthetic oligonucleotide; AAG chr11 5179034 5179053 5179050 +
cctaggccctactggattta

SEQ ID NO: 3598 - DNA, 20 bp, Artificial Sequence
  Synthetic oligonucleotide; AAG chr11 5179038 5179057 5179054 +
ggccctactggatttaaagt

SEQ ID NO: 3599 - DNA, 20 bp, Artificial Sequence
  Synthetic oligonucleotide; AGG chr11 5179039 5179058 5179055 +
gccctactggatttaaagta

SEQ ID NO: 3600 - DNA, 20 bp, Artificial Sequence
  Synthetic oligonucleotide; CAG chr11 5179042 5179061 5179058 +
ctactggatttaaagtaagg

SEQ ID NO: 3601 - DNA, 20 bp, Artificial Sequence
  Synthetic oligonucleotide; AGG chr11 5179043 5179062 5179059 +
tactggatttaaagtaaggc

SEQ ID NO: 3602 - DNA, 20 bp, Artificial Sequence
  Synthetic oligonucleotide; AAG chr11 5179056 5179075 5179072 +
gtaaggcaggataaatctga

SEQ ID NO: 3603 - DNA, 20 bp, Artificial Sequence
  Synthetic oligonucleotide; AAG chr11 5179093 5179112 5179109 +
accatccaatgctgcctatc

SEQ ID NO: 3604 - DNA, 20 bp, Artificial Sequence
  Synthetic oligonucleotide; AGG chr11 5179094 5179113 5179110 +
ccatccaatgctgcctatca

SEQ ID NO: 3605 - DNA, 20 bp, Artificial Sequence
  Synthetic oligonucleotide; TAG chr11 5179103 5179122 5179119 +
gctgcctatcaaggtaaaac

SEQ ID NO: 3606 - DNA, 20 bp, Artificial Sequence
  Synthetic oligonucleotide; CAG chr11 5179116 5179135 5179132 +
gtaaaactagatataaaacg

SEQ ID NO: 3607 - DNA, 20 bp, Artificial Sequence
  Synthetic oligonucleotide; AAG chr11 5179147 5179166 5179163 +
tttttactgatcatatccct

SEQ ID NO: 3608 - DNA, 20 bp, Artificial Sequence
  Synthetic oligonucleotide; AGG chr11 5179148 5179167 5179164 +
ttttactgatcatatcccta

SEQ ID NO: 3609 - DNA, 20 bp, Artificial Sequence
  Synthetic oligonucleotide; TAG chr11 5179155 5179174 5179171 +
gatcatatccctaaggaaaa

SEQ ID NO: 3610 - DNA, 20 bp, Artificial Sequence
  Synthetic oligonucleotide; GAG chr11 5179157 5179176 5179173 +
tcatatccctaaggaaaata

SEQ ID NO: 3611 - DNA, 20 bp, Artificial Sequence
  Synthetic oligonucleotide; GAG chr11 5179159 5179178 5179175 +
atatccctaaggaaaataga

SEQ ID NO: 3612 - DNA, 20 bp, Artificial Sequence
  Synthetic oligonucleotide; TAG chr11 5179172 5179191 5179188 +
aaatagagagttatgaaatt

SEQ ID NO: 3613 - DNA, 20 bp, Artificial Sequence
  Synthetic oligonucleotide; CAG chr11 5179187 5179206 5179203 +
aaatttagttgtgctgctta

SEQ ID NO: 3614 - DNA, 20 bp, Artificial Sequence
  Synthetic oligonucleotide; TGG chr11 5179193 5179212 5179209 +
agttgtgctgcttacagaaa

SEQ ID NO: 3615 - DNA, 20 bp, Artificial Sequence
  Synthetic oligonucleotide; GGG chr11 5179194 5179213 5179210 +
gttgtgctgcttacagaaat

SEQ ID NO: 3616 - DNA, 20 bp, Artificial Sequence
  Synthetic oligonucleotide; GAG chr11 5179196 5179215 5179212 +
tgtgctgcttacagaaatgg

SEQ ID NO: 3617 - DNA, 20 bp, Artificial Sequence
  Synthetic oligonucleotide; AGG chr11 5179197 5179216 5179213 +
gtgctgcttacagaaatggg

SEQ ID NO: 3618 - DNA, 20 bp, Artificial Sequence
  Synthetic oligonucleotide; GGG chr11 5179198 5179217 5179214 +
tgctgcttacagaaatggga

SEQ ID NO: 3619 - DNA, 20 bp, Artificial Sequence
  Synthetic oligonucleotide; AAG chr11 5179205 5179224 5179221 +
tacagaaatgggagggaatt

SEQ ID NO: 3620 - DNA, 20 bp, Artificial Sequence
  Synthetic oligonucleotide; TAG chr11 5179218 5179237 5179234 +
gggaattaagtctgacaaaa

SEQ ID NO: 3621 - DNA, 20 bp, Artificial Sequence
  Synthetic oligonucleotide; AAG chr11 5179226 5179245 5179242 +
agtctgacaaaatagatttc

SEQ ID NO: 3622 - DNA, 20 bp, Artificial Sequence
  Synthetic oligonucleotide; TAG chr11 5179234 5179253 5179250 +
aaaatagatttcaagcaata

SEQ ID NO: 3623 - DNA, 20 bp, Artificial Sequence
  Synthetic oligonucleotide; TGG chr11 5179262 5179281 5179278 +
atgccttcttccacattgat

SEQ ID NO: 3624 - DNA, 20 bp, Artificial Sequence
  Synthetic oligonucleotide; AAG chr11 5179280 5179299 5179296 +
attggccttaacttattgtt

SEQ ID NO: 3625 - DNA, 20 bp, Artificial Sequence
  Synthetic oligonucleotide; TAG chr11 5179291 5179310 5179307 +
cttattgttaagccatatgc

SEQ ID NO: 3626 - DNA, 20 bp, Artificial Sequence
  Synthetic oligonucleotide; AAG chr11 5179300 5179319 5179316 +
aagccatatgctagccattg

SEQ ID NO: 3627 - DNA, 20 bp, Artificial Sequence
  Synthetic oligonucleotide; CAG chr11 5179308 5179327 5179324 +
tgctagccattgaagacata

SEQ ID NO: 3628 - DNA, 20 bp, Artificial Sequence
  Synthetic oligonucleotide; TAG chr11 5179353 5179372 5179369 +
taatctatttctcaaaaata

SEQ ID NO: 3629 - DNA, 20 bp, Artificial Sequence
  Synthetic oligonucleotide; AGG chr11 5179354 5179373 5179370 +
aatctatttctcaaaaatat

SEQ ID NO: 3630 - DNA, 20 bp, Artificial Sequence
  Synthetic oligonucleotide; TAG chr11 5179375 5179394 5179391 +
ggataaaacattataaactt

SEQ ID NO: 3631 - DNA, 20 bp, Artificial Sequence
  Synthetic oligonucleotide; TGG chr11 5179388 5179407 5179404 +
taaactttagatatttgcaa

SEQ ID NO: 3632 - DNA, 20 bp, Artificial Sequence
  Synthetic oligonucleotide; CAG chr11 5179391 5179410 5179407 +
actttagatatttgcaatgg

SEQ ID NO: 3633 - DNA, 20 bp, Artificial Sequence
  Synthetic oligonucleotide; CGG chr11 5179395 5179414 5179411 +
tagatatttgcaatggcaga

SEQ ID NO: 3634 - DNA, 20 bp, Artificial Sequence
  Synthetic oligonucleotide; GAG chr11 5179397 5179416 5179413 +
gatatttgcaatggcagacg

SEQ ID NO: 3635 - DNA, 20 bp, Artificial Sequence
  Synthetic oligonucleotide; TGG chr11 5179401 5179420 5179417 +
tttgcaatggcagacggagc

SEQ ID NO: 3636 - DNA, 20 bp, Artificial Sequence
  Synthetic oligonucleotide; GGG chr11 5179402 5179421 5179418 +
ttgcaatggcagacggagct

SEQ ID NO: 3637 - DNA, 20 bp, Artificial Sequence
  Synthetic oligonucleotide; CAG chr11 5179422 5179441 5179438 +
gggtttttaaatctatatgc

SEQ ID NO: 3638 - DNA, 20 bp, Artificial Sequence
  Synthetic oligonucleotide; TGG chr11 5179427 5179446 5179443 +
tttaaatctatatgccagcc

SEQ ID NO: 3639 - DNA, 20 bp, Artificial Sequence
  Synthetic oligonucleotide; CGG chr11 5179432 5179451 5179448 +
atctatatgccagcctggca

SEQ ID NO: 3640 - DNA, 20 bp, Artificial Sequence
  Synthetic oligonucleotide; TGG chr11 5179435 5179454 5179451 +
tatatgccagcctggcacgg

SEQ ID NO: 3641 - DNA, 20 bp, Artificial Sequence
  Synthetic oligonucleotide; CAG chr11 5179454 5179473 5179470 +
gtggctcacacctgtaatcc

SEQ ID NO: 3642 - DNA, 20 bp, Artificial Sequence
  Synthetic oligonucleotide; GAG chr11 5179463 5179482 5179479 +
acctgtaatcccagcacttt

SEQ ID NO: 3643 - DNA, 20 bp, Artificial Sequence
  Synthetic oligonucleotide; GAG chr11 5179465 5179484 5179481 +
ctgtaatcccagcactttga

SEQ ID NO: 3644 - DNA, 20 bp, Artificial Sequence
  Synthetic oligonucleotide; AGG chr11 5179466 5179485 5179482 +
tgtaatcccagcactttgag

SEQ ID NO: 3645 - DNA, 20 bp, Artificial Sequence
  Synthetic oligonucleotide; GAG chr11 5179471 5179490 5179487 +
tcccagcactttgagaggct

SEQ ID NO: 3646 - DNA, 20 bp, Artificial Sequence
  Synthetic oligonucleotide; AGG chr11 5179472 5179491 5179488 +
cccagcactttgagaggctg

SEQ ID NO: 3647 - DNA, 20 bp, Artificial Sequence
  Synthetic oligonucleotide; CGG chr11 5179475 5179494 5179491 +
agcactttgagaggctgagg

SEQ ID NO: 3648 - DNA, 20 bp, Artificial Sequence
  Synthetic oligonucleotide; GGG chr11 5179476 5179495 5179492 +
gcactttgagaggctgaggc

SEQ ID NO: 3649 - DNA, 20 bp, Artificial Sequence
  Synthetic oligonucleotide; TAG chr11 5179479 5179498 5179495 +
ctttgagaggctgaggcggg

SEQ ID NO: 3650 - DNA, 20 bp, Artificial Sequence
  Synthetic oligonucleotide; AAG chr11 5179487 5179506 5179503 +
ggctgaggcgggtagatcac

SEQ ID NO: 3651 - DNA, 20 bp, Artificial Sequence
  Synthetic oligonucleotide; AGG chr11 5179488 5179507 5179504 +
gctgaggcgggtagatcaca

SEQ ID NO: 3652 - DNA, 20 bp, Artificial Sequence
  Synthetic oligonucleotide; CAG chr11 5179492 5179511 5179508 +
aggcgggtagatcacaaggt

SEQ ID NO: 3653 - DNA, 20 bp, Artificial Sequence
  Synthetic oligonucleotide; AGG chr11 5179493 5179512 5179509 +
ggcgggtagatcacaaggtc

SEQ ID NO: 3654 - DNA, 20 bp, Artificial Sequence
  Synthetic oligonucleotide; GAG chr11 5179495 5179514 5179511 +
cgggtagatcacaaggtcag

SEQ ID NO: 3655 - DNA, 20 bp, Artificial Sequence
  Synthetic oligonucleotide; CAG chr11 5179501 5179520 5179517 +
gatcacaaggtcaggagttc

SEQ ID NO: 3656 - DNA, 20 bp, Artificial Sequence
  Synthetic oligonucleotide; CAG chr11 5179506 5179525 5179522 +
caaggtcaggagttccagac

SEQ ID NO: 3657 - DNA, 20 bp, Artificial Sequence
  Synthetic oligonucleotide; TAG chr11 5179555 5179574 5179571 +
tctactaaaaatacaaaaat

SEQ ID NO: 3658 - DNA, 20 bp, Artificial Sequence
  Synthetic oligonucleotide; TGG chr11 5179559 5179578 5179575 +
ctaaaaatacaaaaattagc

SEQ ID NO: 3659 - DNA, 20 bp, Artificial Sequence
  Synthetic oligonucleotide; GGG chr11 5179560 5179579 5179576 +
taaaaatacaaaaattagct

SEQ ID NO: 3660 - DNA, 20 bp, Artificial Sequence
  Synthetic oligonucleotide; TAG chr11 5179565 5179584 5179581 +
atacaaaaattagctgggca

SEQ ID NO: 3661 - DNA, 20 bp, Artificial Sequence
  Synthetic oligonucleotide; TGG chr11 5179568 5179587 5179584 +
caaaaattagctgggcatag

SEQ ID NO: 3662 - DNA, 20 bp, Artificial Sequence
  Synthetic oligonucleotide; CAG chr11 5179587 5179606 5179603 +
gtggtgtgcacctttaatcc

SEQ ID NO: 3663 - DNA, 20 bp, Artificial Sequence
  Synthetic oligonucleotide; AAG chr11 5179596 5179615 5179612 +
acctttaatcccagctactc

SEQ ID NO: 3664 - DNA, 20 bp, Artificial Sequence
  Synthetic oligonucleotide; GAG chr11 5179598 5179617 5179614 +
ctttaatcccagctactcaa

SEQ ID NO: 3665 - DNA, 20 bp, Artificial Sequence
  Synthetic oligonucleotide; AGG chr11 5179599 5179618 5179615 +
tttaatcccagctactcaag

SEQ ID NO: 3666 - DNA, 20 bp, Artificial Sequence
  Synthetic oligonucleotide; GAG chr11 5179604 5179623 5179620 +
tcccagctactcaagaggct

SEQ ID NO: 3667 - DNA, 20 bp, Artificial Sequence
  Synthetic oligonucleotide; AGG chr11 5179605 5179624 5179621 +
cccagctactcaagaggctg

SEQ ID NO: 3668 - DNA, 20 bp, Artificial Sequence
  Synthetic oligonucleotide; CAG chr11 5179608 5179627 5179624 +
agctactcaagaggctgagg

SEQ ID NO: 3669 - DNA, 20 bp, Artificial Sequence
  Synthetic oligonucleotide; AGG chr11 5179609 5179628 5179625 +
gctactcaagaggctgaggc

SEQ ID NO: 3670 - DNA, 20 bp, Artificial Sequence
  Synthetic oligonucleotide; GAG chr11 5179611 5179630 5179627 +
tactcaagaggctgaggcag

SEQ ID NO: 3671 - DNA, 20 bp, Artificial Sequence
  Synthetic oligonucleotide; TGG chr11 5179627 5179646 5179643 +
gcaggagaatcgcttgaacc

SEQ ID NO: 3672 - DNA, 20 bp, Artificial Sequence
  Synthetic oligonucleotide; GGG chr11 5179628 5179647 5179644 +
caggagaatcgcttgaacct

SEQ ID NO: 3673 - DNA, 20 bp, Artificial Sequence
  Synthetic oligonucleotide; GAG chr11 5179630 5179649 5179646 +
ggagaatcgcttgaacctgg

SEQ ID NO: 3674 - DNA, 20 bp, Artificial Sequence
  Synthetic oligonucleotide; AGG chr11 5179631 5179650 5179647 +
gagaatcgcttgaacctggg

SEQ ID NO: 3675 - DNA, 20 bp, Artificial Sequence
  Synthetic oligonucleotide; CAG chr11 5179634 5179653 5179650 +
aatcgcttgaacctgggagg

SEQ ID NO: 3676 - DNA, 20 bp, Artificial Sequence
  Synthetic oligonucleotide; AAG chr11 5179637 5179656 5179653 +
cgcttgaacctgggaggcag

SEQ ID NO: 3677 - DNA, 20 bp, Artificial Sequence
  Synthetic oligonucleotide; CAG chr11 5179643 5179662 5179659 +
aacctgggaggcagaagttt

SEQ ID NO: 3678 - DNA, 20 bp, Artificial Sequence
  Synthetic oligonucleotide; GAG chr11 5179647 5179666 5179663 +
tgggaggcagaagtttcagt

SEQ ID NO: 3679 - DNA, 20 bp, Artificial Sequence
  Synthetic oligonucleotide; CAG chr11 5179650 5179669 5179666 +
gaggcagaagtttcagtgag

SEQ ID NO: 3680 - DNA, 20 bp, Artificial Sequence
  Synthetic oligonucleotide; GAG chr11 5179652 5179671 5179668 +
ggcagaagtttcagtgagca

SEQ ID NO: 3681 - DNA, 20 bp, Artificial Sequence
  Synthetic oligonucleotide; CAG chr11 5179672 5179691 5179688 +
gagatcgcgcaactgcactc

SEQ ID NO: 3682 - DNA, 20 bp, Artificial Sequence
  Synthetic oligonucleotide; TAG chr11 5179677 5179696 5179693 +
cgcgcaactgcactccagcc

SEQ ID NO: 3683 - DNA, 20 bp, Artificial Sequence
  Synthetic oligonucleotide; AGG chr11 5179678 5179697 5179694 +
gcgcaactgcactccagcct

SEQ ID NO: 3684 - DNA, 20 bp, Artificial Sequence
  Synthetic oligonucleotide; CAG chr11 5179684 5179703 5179700 +
ctgcactccagcctaggtga

SEQ ID NO: 3685 - DNA, 20 bp, Artificial Sequence
  Synthetic oligonucleotide; GAG chr11 5179686 5179705 5179702 +
gcactccagcctaggtgaca

SEQ ID NO: 3686 - DNA, 20 bp, Artificial Sequence
  Synthetic oligonucleotide; GAG chr11 5179690 5179709 5179706 +
tccagcctaggtgacagagc

SEQ ID NO: 3687 - DNA, 20 bp, Artificial Sequence
  Synthetic oligonucleotide; AAG chr11 5179711 5179730 5179727 +
agactccctctcaaaaaaaa

SEQ ID NO: 3688 - DNA, 20 bp, Artificial Sequence
  Synthetic oligonucleotide; TAG chr11 5179725 5179744 5179741 +
aaaaaaaagtatatgcctca

SEQ ID NO: 3689 - DNA, 20 bp, Artificial Sequence
  Synthetic oligonucleotide; AGG chr11 5179726 5179745 5179742 +
aaaaaaagtatatgcctcat

SEQ ID NO: 3690 - DNA, 20 bp, Artificial Sequence
  Synthetic oligonucleotide; TGG chr11 5179729 5179748 5179745 +
aaaagtatatgcctcatagg

SEQ ID NO: 3691 - DNA, 20 bp, Artificial Sequence
  Synthetic oligonucleotide; AAG chr11 5179734 5179753 5179750 +
tatatgcctcataggtggta

SEQ ID NO: 3692 - DNA, 20 bp, Artificial Sequence
  Synthetic oligonucleotide; CAG chr11 5179764 5179783 5179780 +
tattttgtttctttccactt

SEQ ID NO: 3693 - DNA, 20 bp, Artificial Sequence
  Synthetic oligonucleotide; GAG chr11 5179782 5179801 5179798 +
ttcagtcactgattgaaaat

SEQ ID NO: 3694 - DNA, 20 bp, Artificial Sequence
  Synthetic oligonucleotide; AAG chr11 5179827 5179846 5179843 +
atatatgtttattatacttt

SEQ ID NO: 3695 - DNA, 20 bp, Artificial Sequence
  Synthetic oligonucleotide; TAG chr11 5179833 5179852 5179849 +
gtttattatactttaagttc

SEQ ID NO: 3696 - DNA, 20 bp, Artificial Sequence
  Synthetic oligonucleotide; AGG chr11 5179834 5179853 5179850 +
tttattatactttaagttct

SEQ ID NO: 3697 - DNA, 20 bp, Artificial Sequence
  Synthetic oligonucleotide; GGG chr11 5179835 5179854 5179851 +
ttattatactttaagttcta

SEQ ID NO: 3698 - DNA, 20 bp, Artificial Sequence
  Synthetic oligonucleotide; CAG chr11 5179855 5179874 5179871 +
gggtacatgtgcacaacatg

SEQ ID NO: 3699 - DNA, 20 bp, Artificial Sequence
  Synthetic oligonucleotide; AGG chr11 5179856 5179875 5179872 +
ggtacatgtgcacaacatgc

SEQ ID NO: 3700 - DNA, 20 bp, Artificial Sequence
  Synthetic oligonucleotide; TGG chr11 5179888 5179907 5179904 +
tatgtatacatgtgccatgt

SEQ ID NO: 3701 - DNA, 20 bp, Artificial Sequence
  Synthetic oligonucleotide; TAG chr11 5179922 5179941 5179938 +
cattaactcgtcatttacat

SEQ ID NO: 3702 - DNA, 20 bp, Artificial Sequence
  Synthetic oligonucleotide; AGG chr11 5179923 5179942 5179939 +
attaactcgtcatttacatt

SEQ ID NO: 3703 - DNA, 20 bp, Artificial Sequence
  Synthetic oligonucleotide; CGG chr11 5179953 5179972 5179969 +
cctaatgctatccctccccc

SEQ ID NO: 3704 - DNA, 20 bp, Artificial Sequence
  Synthetic oligonucleotide; CAG chr11 5179970 5179989 5179986 +
ccccggcccccaccccacaa

SEQ ID NO: 3705 - DNA, 20 bp, Artificial Sequence
  Synthetic oligonucleotide; AGG chr11 5179971 5179990 5179987 +
cccggcccccaccccacaac

SEQ ID NO: 3706 - DNA, 20 bp, Artificial Sequence
  Synthetic oligonucleotide; CGG chr11 5179977 5179996 5179993 +
ccccaccccacaacaggccc

SEQ ID NO: 3707 - DNA, 20 bp, Artificial Sequence
  Synthetic oligonucleotide; GAG chr11 5180036 5180055 5180052 +
attgttcaactcccacctat

SEQ ID NO: 3708 - DNA, 20 bp, Artificial Sequence
  Synthetic oligonucleotide; GAG chr11 5180040 5180059 5180056 +
ttcaactcccacctatgagt

SEQ ID NO: 3709 - DNA, 20 bp, Artificial Sequence
  Synthetic oligonucleotide; TGG chr11 5180049 5180068 5180065 +
cacctatgagtgagaatatg

SEQ ID NO: 3710 - DNA, 20 bp, Artificial Sequence
  Synthetic oligonucleotide; TGG chr11 5180056 5180075 5180072 +
gagtgagaatatgtggtgtt

SEQ ID NO: 3711 - DNA, 20 bp, Artificial Sequence
  Synthetic oligonucleotide; CAG chr11 5180084 5180103 5180100 +
cgtccttgcgatactttgct

SEQ ID NO: 3712 - DNA, 20 bp, Artificial Sequence
  Synthetic oligonucleotide; TGG chr11 5180092 5180111 5180108 +
cgatactttgctcagaatga

SEQ ID NO: 3713 - DNA, 20 bp, Artificial Sequence
  Synthetic oligonucleotide; CAG chr11 5180099 5180118 5180115 +
ttgctcagaatgatggtttc

SEQ ID NO: 3714 - DNA, 20 bp, Artificial Sequence
  Synthetic oligonucleotide; AAG chr11 5180121 5180140 5180137 +
gtttcatccatgtccctaca

SEQ ID NO: 3715 - DNA, 20 bp, Artificial Sequence
  Synthetic oligonucleotide; AGG chr11 5180122 5180141 5180138 +
tttcatccatgtccctacaa

SEQ ID NO: 3716 - DNA, 20 bp, Artificial Sequence
  Synthetic oligonucleotide; TGG chr11 5180146 5180165 5180162 +
catgaactcatcatttttta

SEQ ID NO: 3717 - DNA, 20 bp, Artificial Sequence
  Synthetic oligonucleotide; TAG chr11 5180154 5180173 5180170 +
catcattttttatggctgca

SEQ ID NO: 3718 - DNA, 20 bp, Artificial Sequence
  Synthetic oligonucleotide; CAG chr11 5180193 5180212 5180209 +
tgtgccacattttcttaatc

SEQ ID NO: 3719 - DNA, 20 bp, Artificial Sequence
  Synthetic oligonucleotide; TGG chr11 5180207 5180226 5180223 +
ttaatccagtctatcattgt

SEQ ID NO: 3720 - DNA, 20 bp, Artificial Sequence
  Synthetic oligonucleotide; TGG chr11 5180215 5180234 5180231 +
gtctatcattgttggacatt

SEQ ID NO: 3721 - DNA, 20 bp, Artificial Sequence
  Synthetic oligonucleotide; GGG chr11 5180216 5180235 5180232 +
tctatcattgttggacattt

SEQ ID NO: 3722 - DNA, 20 bp, Artificial Sequence
  Synthetic oligonucleotide; TGG chr11 5180220 5180239 5180236 +
tcattgttggacatttgggt

SEQ ID NO: 3723 - DNA, 20 bp, Artificial Sequence
  Synthetic oligonucleotide; AAG chr11 5180227 5180246 5180243 +
tggacatttgggttggttcc

SEQ ID NO: 3724 - DNA, 20 bp, Artificial Sequence
  Synthetic oligonucleotide; TAG chr11 5180246 5180265 5180262 +
caagtctttgctattgtgaa

SEQ ID NO: 3725 - DNA, 20 bp, Artificial Sequence
  Synthetic oligonucleotide; TAG chr11 5180283 5180302 5180299 +
tacgtgtgcatgtgtcttta

SEQ ID NO: 3726 - DNA, 20 bp, Artificial Sequence
  Synthetic oligonucleotide; CAG chr11 5180286 5180305 5180302 +
gtgtgcatgtgtctttatag

SEQ ID NO: 3727 - DNA, 20 bp, Artificial Sequence
  Synthetic oligonucleotide; TGG chr11 5180306 5180325 5180322 +
cagcatgatttacattcctt

SEQ ID NO: 3728 - DNA, 20 bp, Artificial Sequence
  Synthetic oligonucleotide; GGG chr11 5180307 5180326 5180323 +
agcatgatttacattccttt

SEQ ID NO: 3729 - DNA, 20 bp, Artificial Sequence
  Synthetic oligonucleotide; CAG chr11 5180318 5180337 5180334 +
cattcctttgggtatatacc

SEQ ID NO: 3730 - DNA, 20 bp, Artificial Sequence
  Synthetic oligonucleotide; TAG chr11 5180324 5180343 5180340 +
tttgggtatatacccagtaa

SEQ ID NO: 3731 - DNA, 20 bp, Artificial Sequence
  Synthetic oligonucleotide; AGG chr11 5180325 5180344 5180341 +
ttgggtatatacccagtaat

SEQ ID NO: 3732 - DNA, 20 bp, Artificial Sequence
  Synthetic oligonucleotide; TGG chr11 5180329 5180348 5180345 +
gtatatacccagtaatagga

SEQ ID NO: 3733 - DNA, 20 bp, Artificial Sequence
  Synthetic oligonucleotide; TGG chr11 5180333 5180352 5180349 +
atacccagtaataggatggc

SEQ ID NO: 3734 - DNA, 20 bp, Artificial Sequence
  Synthetic oligonucleotide; GGG chr11 5180334 5180353 5180350 +
tacccagtaataggatggct

SEQ ID NO: 3735 - DNA, 20 bp, Artificial Sequence
  Synthetic oligonucleotide; TGG chr11 5180342 5180361 5180358 +
aataggatggctgggtcaaa

SEQ ID NO: 3736 - DNA, 20 bp, Artificial Sequence
  Synthetic oligonucleotide; TAG chr11 5180351 5180370 5180367 +
gctgggtcaaatggtatttc

SEQ ID NO: 3737 - DNA, 20 bp, Artificial Sequence
  Synthetic oligonucleotide; TAG chr11 5180357 5180376 5180373 +
tcaaatggtatttctagttc

SEQ ID NO: 3738 - DNA, 20 bp, Artificial Sequence
  Synthetic oligonucleotide; GAG chr11 5180366 5180385 5180382 +
atttctagttctagatccct

SEQ ID NO: 3739 - DNA, 20 bp, Artificial Sequence
  Synthetic oligonucleotide; AGG chr11 5180367 5180386 5180383 +
tttctagttctagatccctg

SEQ ID NO: 3740 - DNA, 20 bp, Artificial Sequence
  Synthetic oligonucleotide; TGG chr11 5180393 5180412 5180409 +
tgccacactgacttccacaa

SEQ ID NO: 3741 - DNA, 20 bp, Artificial Sequence
  Synthetic oligonucleotide; TAG chr11 5180402 5180421 5180418 +
gacttccacaatggttgaac

SEQ ID NO: 3742 - DNA, 20 bp, Artificial Sequence
  Synthetic oligonucleotide; TAG chr11 5180409 5180428 5180425 +
acaatggttgaactagttta

SEQ ID NO: 3743 - DNA, 20 bp, Artificial Sequence
  Synthetic oligonucleotide; CAG chr11 5180421 5180440 5180437 +
ctagtttatagtcccaccaa

SEQ ID NO: 3744 - DNA, 20 bp, Artificial Sequence
  Synthetic oligonucleotide; AAG chr11 5180429 5180448 5180445 +
tagtcccaccaacagtgtaa

SEQ ID NO: 3745 - DNA, 20 bp, Artificial Sequence
  Synthetic oligonucleotide; CAG chr11 5180457 5180476 5180473 +
ctatttctccacatcctctc

SEQ ID NO: 3746 - DNA, 20 bp, Artificial Sequence
  Synthetic oligonucleotide; TGG chr11 5180466 5180485 5180482 +
cacatcctctccagcacctg

SEQ ID NO: 3747 - DNA, 20 bp, Artificial Sequence
  Synthetic oligonucleotide; TGG chr11 5180501 5180520 5180517 +
ttaatgatcaccattctaac

SEQ ID NO: 3748 - DNA, 20 bp, Artificial Sequence
  Synthetic oligonucleotide; GAG chr11 5180507 5180526 5180523 +
atcaccattctaactggtgt

SEQ ID NO: 3749 - DNA, 20 bp, Artificial Sequence
  Synthetic oligonucleotide; TGG chr11 5180524 5180543 5180540 +
tgtgagatgatatctcattg

SEQ ID NO: 3750 - DNA, 20 bp, Artificial Sequence
  Synthetic oligonucleotide; TGG chr11 5180548 5180567 5180564 +
tttgatttgcatttctctga

SEQ ID NO: 3751 - DNA, 20 bp, Artificial Sequence
  Synthetic oligonucleotide; CAG chr11 5180552 5180571 5180568 +
atttgcatttctctgatggc

SEQ ID NO: 3752 - DNA, 20 bp, Artificial Sequence
  Synthetic oligonucleotide; GAG chr11 5180562 5180581 5180578 +
ctctgatggccagtgatgat

SEQ ID NO: 3753 - DNA, 20 bp, Artificial Sequence
  Synthetic oligonucleotide; TGG chr11 5180584 5180603 5180600 +
gcattttttcatgtgttttt

SEQ ID NO: 3754 - DNA, 20 bp, Artificial Sequence
  Synthetic oligonucleotide; GAG chr11 5180607 5180626 5180623 +
ctgcataaatgtcttctttt

SEQ ID NO: 3755 - DNA, 20 bp, Artificial Sequence
  Synthetic oligonucleotide; AAG chr11 5180610 5180629 5180626 +
cataaatgtcttcttttgag

SEQ ID NO: 3756 - DNA, 20 bp, Artificial Sequence
  Synthetic oligonucleotide; CAG chr11 5180646 5180665 5180662 +
ccttcacccccttgttgatg

SEQ ID NO: 3757 - DNA, 20 bp, Artificial Sequence
  Synthetic oligonucleotide; GAG chr11 5180678 5180697 5180694 +
tttttcttgtaaatttgttt

SEQ ID NO: 3758 - DNA, 20 bp, Artificial Sequence
  Synthetic oligonucleotide; TAG chr11 5180688 5180707 5180704 +
aaatttgtttgagttcattg

SEQ ID NO: 3759 - DNA, 20 bp, Artificial Sequence
  Synthetic oligonucleotide; TGG chr11 5180695 5180714 5180711 +
tttgagttcattgtagattc

SEQ ID NO: 3760 - DNA, 20 bp, Artificial Sequence
  Synthetic oligonucleotide; TAG chr11 5180702 5180721 5180718 +
tcattgtagattctggatat

SEQ ID NO: 3761 - DNA, 20 bp, Artificial Sequence
  Synthetic oligonucleotide; CAG chr11 5180713 5180732 5180729 +
tctggatattagccctttgt

SEQ ID NO: 3762 - DNA, 20 bp, Artificial Sequence
  Synthetic oligonucleotide; GAG chr11 5180718 5180737 5180734 +
atattagccctttgtcagat

SEQ ID NO: 3763 - DNA, 20 bp, Artificial Sequence
  Synthetic oligonucleotide; TAG chr11 5180721 5180740 5180737 +
ttagccctttgtcagatgag

SEQ ID NO: 3764 - DNA, 20 bp, Artificial Sequence
  Synthetic oligonucleotide; TAG chr11 5180749 5180768 5180765 +
aaaaattttctcccattgtg

SEQ ID NO: 3765 - DNA, 20 bp, Artificial Sequence
  Synthetic oligonucleotide; AGG chr11 5180750 5180769 5180766 +
aaaattttctcccattgtgt

SEQ ID NO: 3766 - DNA, 20 bp, Artificial Sequence
  Synthetic oligonucleotide; TGG chr11 5180770 5180789 5180786 +
aggttgcctgttcactctga

SEQ ID NO: 3767 - DNA, 20 bp, Artificial Sequence
  Synthetic oligonucleotide; TAG chr11 5180773 5180792 5180789 +
ttgcctgttcactctgatgg

SEQ ID NO: 3768 - DNA, 20 bp, Artificial Sequence
  Synthetic oligonucleotide; CAG chr11 5180790 5180809 5180806 +
tggtagtttcttttgctgtg

SEQ ID NO: 3769 - DNA, 20 bp, Artificial Sequence
  Synthetic oligonucleotide; AAG chr11 5180793 5180812 5180809 +
tagtttcttttgctgtgcag

SEQ ID NO: 3770 - DNA, 20 bp, Artificial Sequence
  Synthetic oligonucleotide; TAG chr11 5180801 5180820 5180817 +
tttgctgtgcagaagctctt

SEQ ID NO: 3771 - DNA, 20 bp, Artificial Sequence
  Synthetic oligonucleotide; TAG chr11 5180810 5180829 5180826 +
cagaagctctttagtttaat

SEQ ID NO: 3772 - DNA, 20 bp, Artificial Sequence
  Synthetic oligonucleotide; TGG chr11 5180852 5180871 5180868 +
tcttttgttgccattgcttt

SEQ ID NO: 3773 - DNA, 20 bp, Artificial Sequence
  Synthetic oligonucleotide; TAG chr11 5180860 5180879 5180876 +
tgccattgcttttggtgttt

SEQ ID NO: 3774 - DNA, 20 bp, Artificial Sequence
  Synthetic oligonucleotide; AAG chr11 5180868 5180887 5180884 +
cttttggtgttttagacatg

SEQ ID NO: 3775 - DNA, 20 bp, Artificial Sequence
  Synthetic oligonucleotide; TGG chr11 5180896 5180915 5180912 +
gcccatgcctatgtcctgaa

SEQ ID NO: 3776 - DNA, 20 bp, Artificial Sequence
  Synthetic oligonucleotide; TAG chr11 5180906 5180925 5180922 +
atgtcctgaatggtattgct

SEQ ID NO: 3777 - DNA, 20 bp, Artificial Sequence
  Synthetic oligonucleotide; AGG chr11 5180907 5180926 5180923 +
tgtcctgaatggtattgctt

SEQ ID NO: 3778 - DNA, 20 bp, Artificial Sequence
  Synthetic oligonucleotide; AAG chr11 5180919 5180938 5180935 +
tattgcttaggttttcttct

SEQ ID NO: 3779 - DNA, 20 bp, Artificial Sequence
  Synthetic oligonucleotide; AGG chr11 5180920 5180939 5180936 +
attgcttaggttttcttcta

SEQ ID NO: 3780 - DNA, 20 bp, Artificial Sequence
  Synthetic oligonucleotide; TGG chr11 5180929 5180948 5180945 +
gttttcttctaaggttttta

SEQ ID NO: 3781 - DNA, 20 bp, Artificial Sequence
  Synthetic oligonucleotide; TAG chr11 5180935 5180954 5180951 +
ttctaaggtttttatggttt

SEQ ID NO: 3782 - DNA, 20 bp, Artificial Sequence
  Synthetic oligonucleotide; AGG chr11 5180936 5180955 5180952 +
tctaaggtttttatggtttt

SEQ ID NO: 3783 - DNA, 20 bp, Artificial Sequence
  Synthetic oligonucleotide; AAG chr11 5180949 5180968 5180965 +
tggttttaggtctaacatgt

SEQ ID NO: 3784 - DNA, 20 bp, Artificial Sequence
  Synthetic oligonucleotide; AAG chr11 5180983 5181002 5180999 +
tcttgaaataatttttgtat

SEQ ID NO: 3785 - DNA, 20 bp, Artificial Sequence
  Synthetic oligonucleotide; AGG chr11 5180984 5181003 5181000 +
cttgaaataatttttgtata

SEQ ID NO: 3786 - DNA, 20 bp, Artificial Sequence
  Synthetic oligonucleotide; AAG chr11 5180990 5181009 5181006 +
ataatttttgtataaggtgt

SEQ ID NO: 3787 - DNA, 20 bp, Artificial Sequence
  Synthetic oligonucleotide; AGG chr11 5180991 5181010 5181007 +
taatttttgtataaggtgta

SEQ ID NO: 3788 - DNA, 20 bp, Artificial Sequence
  Synthetic oligonucleotide; AAG chr11 5180994 5181013 5181010 +
tttttgtataaggtgtaagg

SEQ ID NO: 3789 - DNA, 20 bp, Artificial Sequence
  Synthetic oligonucleotide; AGG chr11 5180995 5181014 5181011 +
ttttgtataaggtgtaagga

SEQ ID NO: 3790 - DNA, 20 bp, Artificial Sequence
  Synthetic oligonucleotide; GGG chr11 5180996 5181015 5181012 +
tttgtataaggtgtaaggaa

SEQ ID NO: 3791 - DNA, 20 bp, Artificial Sequence
  Synthetic oligonucleotide; CAG chr11 5181002 5181021 5181018 +
taaggtgtaaggaagggatc

SEQ ID NO: 3792 - DNA, 20 bp, Artificial Sequence
  Synthetic oligonucleotide; CAG chr11 5181008 5181027 5181024 +
gtaaggaagggatccagttt

SEQ ID NO: 3793 - DNA, 20 bp, Artificial Sequence
  Synthetic oligonucleotide; TGG chr11 5181022 5181041 5181038 +
cagtttcagctttctacata

SEQ ID NO: 3794 - DNA, 20 bp, Artificial Sequence
  Synthetic oligonucleotide; TAG chr11 5181026 5181045 5181042 +
ttcagctttctacatatggc

SEQ ID NO: 3795 - DNA, 20 bp, Artificial Sequence
  Synthetic oligonucleotide; CAG chr11 5181030 5181049 5181046 +
gctttctacatatggctagc

SEQ ID NO: 3796 - DNA, 20 bp, Artificial Sequence
  Synthetic oligonucleotide; CAG chr11 5181039 5181058 5181055 +
atatggctagccagttttcc

SEQ ID NO: 3797 - DNA, 20 bp, Artificial Sequence
  Synthetic oligonucleotide; TAG chr11 5181056 5181075 5181072 +
tcccagcatcatttattaaa

SEQ ID NO: 3798 - DNA, 20 bp, Artificial Sequence
  Synthetic oligonucleotide; AGG chr11 5181057 5181076 5181073 +
cccagcatcatttattaaat

SEQ ID NO: 3799 - DNA, 20 bp, Artificial Sequence
  Synthetic oligonucleotide; GGG chr11 5181058 5181077 5181074 +
ccagcatcatttattaaata

SEQ ID NO: 3800 - DNA, 20 bp, Artificial Sequence
  Synthetic oligonucleotide; CAG chr11 5181088 5181107 5181104 +
tccccattgcttgtttttgt

SEQ ID NO: 3801 - DNA, 20 bp, Artificial Sequence
  Synthetic oligonucleotide; AGG chr11 5181089 5181108 5181105 +
ccccattgcttgtttttgtc

SEQ ID NO: 3802 - DNA, 20 bp, Artificial Sequence
  Synthetic oligonucleotide; AAG chr11 5181099 5181118 5181115 +
tgtttttgtcaggtttgtca

SEQ ID NO: 3803 - DNA, 20 bp, Artificial Sequence
  Synthetic oligonucleotide; CAG chr11 5181104 5181123 5181120 +
ttgtcaggtttgtcaaagat

SEQ ID NO: 3804 - DNA, 20 bp, Artificial Sequence
  Synthetic oligonucleotide; TAG chr11 5181108 5181127 5181124 +
caggtttgtcaaagatcaga

SEQ ID NO: 3805 - DNA, 20 bp, Artificial Sequence
  Synthetic oligonucleotide; TGG chr11 5181114 5181133 5181130 +
tgtcaaagatcagatagttg

SEQ ID NO: 3806 - DNA, 20 bp, Artificial Sequence
  Synthetic oligonucleotide; TGG chr11 5181122 5181141 5181138 +
atcagatagttgtggatgtg

SEQ ID NO: 3807 - DNA, 20 bp, Artificial Sequence
  Synthetic oligonucleotide; GAG chr11 5181135 5181154 5181151 +
ggatgtgtggtattatttct

SEQ ID NO: 3808 - DNA, 20 bp, Artificial Sequence
  Synthetic oligonucleotide; GAG chr11 5181137 5181156 5181153 +
atgtgtggtattatttctga

SEQ ID NO: 3809 - DNA, 20 bp, Artificial Sequence
  Synthetic oligonucleotide; TGG chr11 5181156 5181175 5181172 +
agagctctgttctgctccat

SEQ ID NO: 3810 - DNA, 20 bp, Artificial Sequence
  Synthetic oligonucleotide; TGG chr11 5181174 5181193 5181190 +
attggtctacatctctgttt

SEQ ID NO: 3811 - DNA, 20 bp, Artificial Sequence
  Synthetic oligonucleotide; CAG chr11 5181180 5181199 5181196 +
ctacatctctgttttggtac

SEQ ID NO: 3812 - DNA, 20 bp, Artificial Sequence
  Synthetic oligonucleotide; TGG chr11 5181196 5181215 5181212 +
gtaccagtaccatgttgttt

SEQ ID NO: 3813 - DNA, 20 bp, Artificial Sequence
  Synthetic oligonucleotide; TAG chr11 5181212 5181231 5181228 +
gttttggttactgtaccttg

SEQ ID NO: 3814 - DNA, 20 bp, Artificial Sequence
  Synthetic oligonucleotide; TAG chr11 5181217 5181236 5181233 +
ggttactgtaccttgtagta

SEQ ID NO: 3815 - DNA, 20 bp, Artificial Sequence
  Synthetic oligonucleotide; AAG chr11 5181224 5181243 5181240 +
gtaccttgtagtatagtttg

SEQ ID NO: 3816 - DNA, 20 bp, Artificial Sequence
  Synthetic oligonucleotide; CAG chr11 5181228 5181247 5181244 +
cttgtagtatagtttgaagt

SEQ ID NO: 3817 - DNA, 20 bp, Artificial Sequence
  Synthetic oligonucleotide; AGG chr11 5181229 5181248 5181245 +
ttgtagtatagtttgaagtc

SEQ ID NO: 3818 - DNA, 20 bp, Artificial Sequence
  Synthetic oligonucleotide; TAG chr11 5181232 5181251 5181248 +
tagtatagtttgaagtcagg

SEQ ID NO: 3819 - DNA, 20 bp, Artificial Sequence
  Synthetic oligonucleotide; TAG chr11 5181246 5181265 5181262 +
gtcaggtagcatgatgcctc

SEQ ID NO: 3820 - DNA, 20 bp, Artificial Sequence
  Synthetic oligonucleotide; TGG chr11 5181260 5181279 5181276 +
tgcctctagctttgttcttt

SEQ ID NO: 3821 - DNA, 20 bp, Artificial Sequence
  Synthetic oligonucleotide; TAG chr11 5181265 5181284 5181281 +
ctagctttgttcttttggct

SEQ ID NO: 3822 - DNA, 20 bp, Artificial Sequence
  Synthetic oligonucleotide; AGG chr11 5181266 5181285 5181282 +
tagctttgttcttttggctt

SEQ ID NO: 3823 - DNA, 20 bp, Artificial Sequence
  Synthetic oligonucleotide; CGG chr11 5181284 5181303 5181300 +
ttaggattgacttgtcaatg

SEQ ID NO: 3824 - DNA, 20 bp, Artificial Sequence
  Synthetic oligonucleotide; GGG chr11 5181285 5181304 5181301 +
taggattgacttgtcaatgc

SEQ ID NO: 3825 - DNA, 20 bp, Artificial Sequence
  Synthetic oligonucleotide; TGG chr11 5181296 5181315 5181312 +
tgtcaatgcgggctcttttt

SEQ ID NO: 3826 - DNA, 20 bp, Artificial Sequence
  Synthetic oligonucleotide; AAG chr11 5181315 5181334 5181331 +
ttggttccatatgaacttta

SEQ ID NO: 3827 - DNA, 20 bp, Artificial Sequence
  Synthetic oligonucleotide; TAG chr11 5181318 5181337 5181334 +
gttccatatgaactttaaag

SEQ ID NO: 3828 - DNA, 20 bp, Artificial Sequence
  Synthetic oligonucleotide; AAG chr11 5181338 5181357 5181354 +
tagttttttccaattctgtg

SEQ ID NO: 3829 - DNA, 20 bp, Artificial Sequence
  Synthetic oligonucleotide; AAG chr11 5181342 5181361 5181358 +
tttttccaattctgtgaaga

SEQ ID NO: 3830 - DNA, 20 bp, Artificial Sequence
  Synthetic oligonucleotide; TGG chr11 5181349 5181368 5181365 +
aattctgtgaagaaagtcat

SEQ ID NO: 3831 - DNA, 20 bp, Artificial Sequence
  Synthetic oligonucleotide; TAG chr11 5181352 5181371 5181368 +
tctgtgaagaaagtcattgg

SEQ ID NO: 3832 - DNA, 20 bp, Artificial Sequence
  Synthetic oligonucleotide; TGG chr11 5181360 5181379 5181376 +
gaaagtcattggtagcttga

SEQ ID NO: 3833 - DNA, 20 bp, Artificial Sequence
  Synthetic oligonucleotide; GGG chr11 5181361 5181380 5181377 +
aaagtcattggtagcttgat

SEQ ID NO: 3834 - DNA, 20 bp, Artificial Sequence
  Synthetic oligonucleotide; GGG chr11 5181362 5181381 5181378 +
aagtcattggtagcttgatg

SEQ ID NO: 3835 - DNA, 20 bp, Artificial Sequence
  Synthetic oligonucleotide; TGG chr11 5181366 5181385 5181382 +
cattggtagcttgatgggga

SEQ ID NO: 3836 - DNA, 20 bp, Artificial Sequence
  Synthetic oligonucleotide; TGG chr11 5181390 5181409 5181406 +
attgaatctataaattacct

SEQ ID NO: 3837 - DNA, 20 bp, Artificial Sequence
  Synthetic oligonucleotide; GGG chr11 5181391 5181410 5181407 +
ttgaatctataaattacctt

SEQ ID NO: 3838 - DNA, 20 bp, Artificial Sequence
  Synthetic oligonucleotide; CAG chr11 5181394 5181413 5181410 +
aatctataaattaccttggg

SEQ ID NO: 3839 - DNA, 20 bp, Artificial Sequence
  Synthetic oligonucleotide; AAG chr11 5181398 5181417 5181414 +
tataaattaccttgggcagt

SEQ ID NO: 3840 - DNA, 20 bp, Artificial Sequence
  Synthetic oligonucleotide; AGG chr11 5181399 5181418 5181415 +
ataaattaccttgggcagta

SEQ ID NO: 3841 - DNA, 20 bp, Artificial Sequence
  Synthetic oligonucleotide; GAG chr11 5181434 5181453 5181450 +
tattgattcttcctatccat

SEQ ID NO: 3842 - DNA, 20 bp, Artificial Sequence
  Synthetic oligonucleotide; TGG chr11 5181439 5181458 5181455 +
attcttcctatccatgagca

SEQ ID NO: 3843 - DNA, 20 bp, Artificial Sequence
  Synthetic oligonucleotide; GAG chr11 5181481 5181500 5181497 +
gtatcctcttttatttcgtt

SEQ ID NO: 3844 - DNA, 20 bp, Artificial Sequence
  Synthetic oligonucleotide; CAG chr11 5181484 5181503 5181500 +
tcctcttttatttcgttgag

SEQ ID NO: 3845 - DNA, 20 bp, Artificial Sequence
  Synthetic oligonucleotide; AAG chr11 5181506 5181525 5181522 +
gtgttttgttgttctccttg

SEQ ID NO: 3846 - DNA, 20 bp, Artificial Sequence
  Synthetic oligonucleotide; GAG chr11 5181508 5181527 5181524 +
gttttgttgttctccttgaa

SEQ ID NO: 3847 - DNA, 20 bp, Artificial Sequence
  Synthetic oligonucleotide; AGG chr11 5181509 5181528 5181525 +
ttttgttgttctccttgaag

SEQ ID NO: 3848 - DNA, 20 bp, Artificial Sequence
  Synthetic oligonucleotide; AAG chr11 5181529 5181548 5181545 +
aggtccttcacatcccttgt

SEQ ID NO: 3849 - DNA, 20 bp, Artificial Sequence
  Synthetic oligonucleotide; TGG chr11 5181533 5181552 5181549 +
ccttcacatcccttgtaagt

SEQ ID NO: 3850 - DNA, 20 bp, Artificial Sequence
  Synthetic oligonucleotide; TAG chr11 5181541 5181560 5181557 +
tcccttgtaagttggattcc

SEQ ID NO: 3851 - DNA, 20 bp, Artificial Sequence
  Synthetic oligonucleotide; AGG chr11 5181542 5181561 5181558 +
cccttgtaagttggattcct

SEQ ID NO: 3852 - DNA, 20 bp, Artificial Sequence
  Synthetic oligonucleotide; GAG chr11 5181560 5181579 5181576 +
ctaggtattttattctcttt

SEQ ID NO: 3853 - DNA, 20 bp, Artificial Sequence
  Synthetic oligonucleotide; AGG chr11 5181561 5181580 5181577 +
taggtattttattctctttg

SEQ ID NO: 3854 - DNA, 20 bp, Artificial Sequence
  Synthetic oligonucleotide; TGG chr11 5181574 5181593 5181590 +
ctctttgaggcaattgtgaa

SEQ ID NO: 3855 - DNA, 20 bp, Artificial Sequence
  Synthetic oligonucleotide; GGG chr11 5181575 5181594 5181591 +
tctttgaggcaattgtgaat

SEQ ID NO: 3856 - DNA, 20 bp, Artificial Sequence
  Synthetic oligonucleotide; GAG chr11 5181577 5181596 5181593 +
tttgaggcaattgtgaatgg

SEQ ID NO: 3857 - DNA, 20 bp, Artificial Sequence
  Synthetic oligonucleotide; TGG chr11 5181593 5181612 5181609 +
atgggagttcactcatgatt

SEQ ID NO: 3858 - DNA, 20 bp, Artificial Sequence
  Synthetic oligonucleotide; TGG chr11 5181615 5181634 5181631 +
gctctctgtttgtctgttat

SEQ ID NO: 3859 - DNA, 20 bp, Artificial Sequence
  Synthetic oligonucleotide; TAG chr11 5181622 5181641 5181638 +
gtttgtctgttattggtgta

SEQ ID NO: 3860 - DNA, 20 bp, Artificial Sequence
  Synthetic oligonucleotide; AGG chr11 5181623 5181642 5181639 +
tttgtctgttattggtgtat

SEQ ID NO: 3861 - DNA, 20 bp, Artificial Sequence
  Synthetic oligonucleotide; GAG chr11 5181662 5181681 5181678 +
gcacattgattttgtatgct

SEQ ID NO: 3862 - DNA, 20 bp, Artificial Sequence
  Synthetic oligonucleotide; AAG chr11 5181674 5181693 5181690 +
tgtatgctgagacttttctg

SEQ ID NO: 3863 - DNA, 20 bp, Artificial Sequence
  Synthetic oligonucleotide; CAG chr11 5181685 5181704 5181701 +
acttttctgaagttgcttat

SEQ ID NO: 3864 - DNA, 20 bp, Artificial Sequence
  Synthetic oligonucleotide; AAG chr11 5181691 5181710 5181707 +
ctgaagttgcttatcagctt

SEQ ID NO: 3865 - DNA, 20 bp, Artificial Sequence
  Synthetic oligonucleotide; AGG chr11 5181692 5181711 5181708 +
tgaagttgcttatcagctta

SEQ ID NO: 3866 - DNA, 20 bp, Artificial Sequence
  Synthetic oligonucleotide; GAG chr11 5181694 5181713 5181710 +
aagttgcttatcagcttaag

SEQ ID NO: 3867 - DNA, 20 bp, Artificial Sequence
  Synthetic oligonucleotide; TGG chr11 5181701 5181720 5181717 +
ttatcagcttaaggagattt

SEQ ID NO: 3868 - DNA, 20 bp, Artificial Sequence
  Synthetic oligonucleotide; GGG chr11 5181702 5181721 5181718 +
tatcagcttaaggagatttt

SEQ ID NO: 3869 - DNA, 20 bp, Artificial Sequence
  Synthetic oligonucleotide; GAG chr11 5181707 5181726 5181723 +
gcttaaggagattttgggct

SEQ ID NO: 3870 - DNA, 20 bp, Artificial Sequence
  Synthetic oligonucleotide; TGG chr11 5181714 5181733 5181730 +
gagattttgggctgagacga

SEQ ID NO: 3871 - DNA, 20 bp, Artificial Sequence
  Synthetic oligonucleotide; GGG chr11 5181715 5181734 5181731 +
agattttgggctgagacgat

SEQ ID NO: 3872 - DNA, 20 bp, Artificial Sequence
  Synthetic oligonucleotide; GGG chr11 5181716 5181735 5181732 +
gattttgggctgagacgatg

SEQ ID NO: 3873 - DNA, 20 bp, Artificial Sequence
  Synthetic oligonucleotide; TAG chr11 5181724 5181743 5181740 +
gctgagacgatggggttttc

SEQ ID NO: 3874 - DNA, 20 bp, Artificial Sequence
  Synthetic oligonucleotide; CAG chr11 5181751 5181770 5181767 +
acaatcacgtcatctgcaaa

SEQ ID NO: 3875 - DNA, 20 bp, Artificial Sequence
  Synthetic oligonucleotide; AGG chr11 5181752 5181771 5181768 +
caatcacgtcatctgcaaac

SEQ ID NO: 3876 - DNA, 20 bp, Artificial Sequence
  Synthetic oligonucleotide; GGG chr11 5181753 5181772 5181769 +
aatcacgtcatctgcaaaca

SEQ ID NO: 3877 - DNA, 20 bp, Artificial Sequence
  Synthetic oligonucleotide; TGG chr11 5181819 5181838 5181835 +
tttctcttgcctgattgccc

SEQ ID NO: 3878 - DNA, 20 bp, Artificial Sequence
  Synthetic oligonucleotide; CAG chr11 5181823 5181842 5181839 +
tcttgcctgattgccctggc

SEQ ID NO: 3879 - DNA, 20 bp, Artificial Sequence
  Synthetic oligonucleotide; TAG chr11 5181847 5181866 5181863 +
acttccaacactatgttgaa

SEQ ID NO: 3880 - DNA, 20 bp, Artificial Sequence
  Synthetic oligonucleotide; AGG chr11 5181848 5181867 5181864 +
cttccaacactatgttgaat

SEQ ID NO: 3881 - DNA, 20 bp, Artificial Sequence
  Synthetic oligonucleotide; GAG chr11 5181850 5181869 5181866 +
tccaacactatgttgaatag

SEQ ID NO: 3882 - DNA, 20 bp, Artificial Sequence
  Synthetic oligonucleotide; TGG chr11 5181853 5181872 5181869 +
aacactatgttgaataggag

SEQ ID NO: 3883 - DNA, 20 bp, Artificial Sequence
  Synthetic oligonucleotide; GAG chr11 5181857 5181876 5181873 +
ctatgttgaataggagtggt

SEQ ID NO: 3884 - DNA, 20 bp, Artificial Sequence
  Synthetic oligonucleotide; GAG chr11 5181859 5181878 5181875 +
atgttgaataggagtggtga

SEQ ID NO: 3885 - DNA, 20 bp, Artificial Sequence
  Synthetic oligonucleotide; GAG chr11 5181861 5181880 5181877 +
gttgaataggagtggtgaga

SEQ ID NO: 3886 - DNA, 20 bp, Artificial Sequence
  Synthetic oligonucleotide; AGG chr11 5181862 5181881 5181878 +
ttgaataggagtggtgagag

SEQ ID NO: 3887 - DNA, 20 bp, Artificial Sequence
  Synthetic oligonucleotide; GGG chr11 5181863 5181882 5181879 +
tgaataggagtggtgagaga

SEQ ID NO: 3888 - DNA, 20 bp, Artificial Sequence
  Synthetic oligonucleotide; CAG chr11 5181882 5181901 5181898 +
agggcatccctgtcttgtgc

SEQ ID NO: 3889 - DNA, 20 bp, Artificial Sequence
  Synthetic oligonucleotide; AAG chr11 5181891 5181910 5181907 +
ctgtcttgtgccagttttca

SEQ ID NO: 3890 - DNA, 20 bp, Artificial Sequence
  Synthetic oligonucleotide; AGG chr11 5181892 5181911 5181908 +
tgtcttgtgccagttttcaa

SEQ ID NO: 3891 - DNA, 20 bp, Artificial Sequence
  Synthetic oligonucleotide; GGG chr11 5181893 5181912 5181909 +
gtcttgtgccagttttcaaa

SEQ ID NO: 3892 - DNA, 20 bp, Artificial Sequence
  Synthetic oligonucleotide; CAG chr11 5181904 5181923 5181920 +
gttttcaaagggaatgcttc

SEQ ID NO: 3893 - DNA, 20 bp, Artificial Sequence
  Synthetic oligonucleotide; CAG chr11 5181919 5181938 5181935 +
gcttccagtttttgtccatt

SEQ ID NO: 3894 - DNA, 20 bp, Artificial Sequence
  Synthetic oligonucleotide; TGG chr11 5181930 5181949 5181946 +
ttgtccattcagtatgatat

SEQ ID NO: 3895 - DNA, 20 bp, Artificial Sequence
  Synthetic oligonucleotide; TGG chr11 5181936 5181955 5181952 +
attcagtatgatattggctg

SEQ ID NO: 3896 - DNA, 20 bp, Artificial Sequence
  Synthetic oligonucleotide; GGG chr11 5181937 5181956 5181953 +
ttcagtatgatattggctgt

SEQ ID NO: 3897 - DNA, 20 bp, Artificial Sequence
  Synthetic oligonucleotide; TAG chr11 5181947 5181966 5181963 +
tattggctgtgggtttgtca

SEQ ID NO: 3898 - DNA, 20 bp, Artificial Sequence
  Synthetic oligonucleotide; TAG chr11 5181951 5181970 5181967 +
ggctgtgggtttgtcataga

SEQ ID NO: 3899 - DNA, 20 bp, Artificial Sequence
  Synthetic oligonucleotide; GAG chr11 5181967 5181986 5181983 +
tagatagctcttattatttt

SEQ ID NO: 3900 - DNA, 20 bp, Artificial Sequence
  Synthetic oligonucleotide; GAG chr11 5181997 5182016 5182013 +
ccatcgatacctaatttatt

SEQ ID NO: 3901 - DNA, 20 bp, Artificial Sequence
  Synthetic oligonucleotide; GAG chr11 5181999 5182018 5182015 +
atcgatacctaatttattga

SEQ ID NO: 3902 - DNA, 20 bp, Artificial Sequence
  Synthetic oligonucleotide; TAG chr11 5182006 5182025 5182022 +
cctaatttattgagagtttt

SEQ ID NO: 3903 - DNA, 20 bp, Artificial Sequence
  Synthetic oligonucleotide; AAG chr11 5182013 5182032 5182029 +
tattgagagtttttagtatg

SEQ ID NO: 3904 - DNA, 20 bp, Artificial Sequence
  Synthetic oligonucleotide; AAG chr11 5182034 5182053 5182050 +
agcattgttgaattttgtca

SEQ ID NO: 3905 - DNA, 20 bp, Artificial Sequence
  Synthetic oligonucleotide; AGG chr11 5182035 5182054 5182051 +
gcattgttgaattttgtcaa

SEQ ID NO: 3906 - DNA, 20 bp, Artificial Sequence
  Synthetic oligonucleotide; GAG chr11 5182055 5182074 5182071 +
aggccttttctgcatctatt

SEQ ID NO: 3907 - DNA, 20 bp, Artificial Sequence
  Synthetic oligonucleotide; TGG chr11 5182067 5182086 5182083 +
catctattgagataatcatg

SEQ ID NO: 3908 - DNA, 20 bp, Artificial Sequence
  Synthetic oligonucleotide; TGG chr11 5182080 5182099 5182096 +
aatcatgtggtttgtgtctt

SEQ ID NO: 3909 - DNA, 20 bp, Artificial Sequence
  Synthetic oligonucleotide; TGG chr11 5182097 5182116 5182113 +
ctttggttctgtttatatgc

SEQ ID NO: 3910 - DNA, 20 bp, Artificial Sequence
  Synthetic oligonucleotide; CAG chr11 5182130 5182149 5182146 +
ttgatttgcatatgttgaac

SEQ ID NO: 3911 - DNA, 20 bp, Artificial Sequence
  Synthetic oligonucleotide; CAG chr11 5182143 5182162 5182159 +
gttgaaccagccctgcatcc

SEQ ID NO: 3912 - DNA, 20 bp, Artificial Sequence
  Synthetic oligonucleotide; AGG chr11 5182144 5182163 5182160 +
ttgaaccagccctgcatccc

SEQ ID NO: 3913 - DNA, 20 bp, Artificial Sequence
  Synthetic oligonucleotide; GGG chr11 5182145 5182164 5182161 +
tgaaccagccctgcatccca

SEQ ID NO: 3914 - DNA, 20 bp, Artificial Sequence
  Synthetic oligonucleotide; AAG chr11 5182151 5182170 5182167 +
agccctgcatcccagggatg

SEQ ID NO: 3915 - DNA, 20 bp, Artificial Sequence
  Synthetic oligonucleotide; TGG chr11 5182166 5182185 5182182 +
ggatgaagcccacttgatca

SEQ ID NO: 3916 - DNA, 20 bp, Artificial Sequence
  Synthetic oligonucleotide; TGG chr11 5182169 5182188 5182185 +
tgaagcccacttgatcatgg

SEQ ID NO: 3917 - DNA, 20 bp, Artificial Sequence
  Synthetic oligonucleotide; AAG chr11 5182174 5182193 5182190 +
cccacttgatcatggtggat

SEQ ID NO: 3918 - DNA, 20 bp, Artificial Sequence
  Synthetic oligonucleotide; TGG chr11 5182193 5182212 5182209 +
taagctttttgatgtgctcc

SEQ ID NO: 3919 - DNA, 20 bp, Artificial Sequence
  Synthetic oligonucleotide; TGG chr11 5182199 5182218 5182215 +
ttttgatgtgctcctggatt

SEQ ID NO: 3920 - DNA, 20 bp, Artificial Sequence
  Synthetic oligonucleotide; CAG chr11 5182207 5182226 5182223 +
tgctcctggatttggtttgc

SEQ ID NO: 3921 - DNA, 20 bp, Artificial Sequence
  Synthetic oligonucleotide; GAG chr11 5182219 5182238 5182235 +
tggtttgccagtattttact

SEQ ID NO: 3922 - DNA, 20 bp, Artificial Sequence
  Synthetic oligonucleotide; AGG chr11 5182220 5182239 5182236 +
ggtttgccagtattttactg

SEQ ID NO: 3923 - DNA, 20 bp, Artificial Sequence
  Synthetic oligonucleotide; CAG chr11 5182243 5182262 5182259 +
atttttgcatcgatgttcat

SEQ ID NO: 3924 - DNA, 20 bp, Artificial Sequence
  Synthetic oligonucleotide; AGG chr11 5182244 5182263 5182260 +
tttttgcatcgatgttcatc

SEQ ID NO: 3925 - DNA, 20 bp, Artificial Sequence
  Synthetic oligonucleotide; GGG chr11 5182245 5182264 5182261 +
ttttgcatcgatgttcatca

SEQ ID NO: 3926 - DNA, 20 bp, Artificial Sequence
  Synthetic oligonucleotide; TGG chr11 5182252 5182271 5182268 +
tcgatgttcatcagggatat

SEQ ID NO: 3927 - DNA, 20 bp, Artificial Sequence
  Synthetic oligonucleotide; TAG chr11 5182287 5182306 5182303 +
tttttttgttgtgtgtctgc

SEQ ID NO: 3928 - DNA, 20 bp, Artificial Sequence
  Synthetic oligonucleotide; AGG chr11 5182288 5182307 5182304 +
ttttttgttgtgtgtctgct

SEQ ID NO: 3929 - DNA, 20 bp, Artificial Sequence
  Synthetic oligonucleotide; TGG chr11 5182294 5182313 5182310 +
gttgtgtgtctgctaggctt

SEQ ID NO: 3930 - DNA, 20 bp, Artificial Sequence
  Synthetic oligonucleotide; AAG chr11 5182301 5182320 5182317 +
gtctgctaggctttggtatc

SEQ ID NO: 3931 - DNA, 20 bp, Artificial Sequence
  Synthetic oligonucleotide; TGG chr11 5182311 5182330 5182327 +
ctttggtatcaagatgatgc

SEQ ID NO: 3932 - DNA, 20 bp, Artificial Sequence
  Synthetic oligonucleotide; GAG chr11 5182325 5182344 5182341 +
tgatgctggcctcataaaat

SEQ ID NO: 3933 - DNA, 20 bp, Artificial Sequence
  Synthetic oligonucleotide; TAG chr11 5182329 5182348 5182345 +
gctggcctcataaaatgagt

SEQ ID NO: 3934 - DNA, 20 bp, Artificial Sequence
  Synthetic oligonucleotide; AGG chr11 5182330 5182349 5182346 +
ctggcctcataaaatgagtt

SEQ ID NO: 3935 - DNA, 20 bp, Artificial Sequence
  Synthetic oligonucleotide; GGG chr11 5182331 5182350 5182347 +
tggcctcataaaatgagtta

SEQ ID NO: 3936 - DNA, 20 bp, Artificial Sequence
  Synthetic oligonucleotide; GAG chr11 5182333 5182352 5182349 +
gcctcataaaatgagttagg

SEQ ID NO: 3937 - DNA, 20 bp, Artificial Sequence
  Synthetic oligonucleotide; AGG chr11 5182334 5182353 5182350 +
cctcataaaatgagttaggg

SEQ ID NO: 3938 - DNA, 20 bp, Artificial Sequence
  Synthetic oligonucleotide; TGG chr11 5182358 5182377 5182374 +
ttccctctttttctattgat

SEQ ID NO: 3939 - DNA, 20 bp, Artificial Sequence
  Synthetic oligonucleotide; TAG chr11 5182363 5182382 5182379 +
tctttttctattgattggaa

SEQ ID NO: 3940 - DNA, 20 bp, Artificial Sequence
  Synthetic oligonucleotide; CAG chr11 5182369 5182388 5182385 +
tctattgattggaatagttt

SEQ ID NO: 3941 - DNA, 20 bp, Artificial Sequence
  Synthetic oligonucleotide; AAG chr11 5182372 5182391 5182388 +
attgattggaatagtttcag

SEQ ID NO: 3942 - DNA, 20 bp, Artificial Sequence
  Synthetic oligonucleotide; AGG chr11 5182373 5182392 5182389 +
ttgattggaatagtttcaga

SEQ ID NO: 3943 - DNA, 20 bp, Artificial Sequence
  Synthetic oligonucleotide; TGG chr11 5182378 5182397 5182394 +
tggaatagtttcagaaggaa

SEQ ID NO: 3944 - DNA, 20 bp, Artificial Sequence
  Synthetic oligonucleotide; CAG chr11 5182384 5182403 5182400 +
agtttcagaaggaatggtac

SEQ ID NO: 3945 - DNA, 20 bp, Artificial Sequence
  Synthetic oligonucleotide; TGG chr11 5182403 5182422 5182419 +
ccagctcctccttgtacctc

SEQ ID NO: 3946 - DNA, 20 bp, Artificial Sequence
  Synthetic oligonucleotide; TAG chr11 5182406 5182425 5182422 +
gctcctccttgtacctctgg

SEQ ID NO: 3947 - DNA, 20 bp, Artificial Sequence
  Synthetic oligonucleotide; CGG chr11 5182413 5182432 5182429 +
cttgtacctctggtagaatt

SEQ ID NO: 3948 - DNA, 20 bp, Artificial Sequence
  Synthetic oligonucleotide; TGG chr11 5182429 5182448 5182445 +
aattcggctgtgaatccatc

SEQ ID NO: 3949 - DNA, 20 bp, Artificial Sequence
  Synthetic oligonucleotide; TGG chr11 5182435 5182454 5182451 +
gctgtgaatccatctggtcc

SEQ ID NO: 3950 - DNA, 20 bp, Artificial Sequence
  Synthetic oligonucleotide; TGG chr11 5182446 5182465 5182462 +
atctggtcctggactttttt

SEQ ID NO: 3951 - DNA, 20 bp, Artificial Sequence
  Synthetic oligonucleotide; TGG chr11 5182450 5182469 5182466 +
ggtcctggactttttttggt

SEQ ID NO: 3952 - DNA, 20 bp, Artificial Sequence
  Synthetic oligonucleotide; AAG chr11 5182454 5182473 5182470 +
ctggactttttttggttggt

SEQ ID NO: 3953 - DNA, 20 bp, Artificial Sequence
  Synthetic oligonucleotide; AAG chr11 5182463 5182482 5182479 +
ttttggttggtaagcttcat

SEQ ID NO: 3954 - DNA, 20 bp, Artificial Sequence
  Synthetic oligonucleotide; AAG chr11 5182468 5182487 5182484 +
gttggtaagcttcataagtg

SEQ ID NO: 3955 - DNA, 20 bp, Artificial Sequence
  Synthetic oligonucleotide; AGG chr11 5182469 5182488 5182485 +
ttggtaagcttcataagtga

SEQ ID NO: 3956 - DNA, 20 bp, Artificial Sequence
  Synthetic oligonucleotide; GAG chr11 5182471 5182490 5182487 +
ggtaagcttcataagtgaag

SEQ ID NO: 3957 - DNA, 20 bp, Artificial Sequence
  Synthetic oligonucleotide; CAG chr11 5182489 5182508 5182505 +
aggagaaataaaatacttta

SEQ ID NO: 3958 - DNA, 20 bp, Artificial Sequence
  Synthetic oligonucleotide; AAG chr11 5182494 5182513 5182510 +
aaataaaatactttacagac

SEQ ID NO: 3959 - DNA, 20 bp, Artificial Sequence
  Synthetic oligonucleotide; CAG chr11 5182519 5182538 5182535 +
attgctgattttgtcaccac

SEQ ID NO: 3960 - DNA, 20 bp, Artificial Sequence
  Synthetic oligonucleotide; AGG chr11 5182520 5182539 5182536 +
ttgctgattttgtcaccacc

SEQ ID NO: 3961 - DNA, 20 bp, Artificial Sequence
  Synthetic oligonucleotide; AAG chr11 5182533 5182552 5182549 +
caccaccaggcctgccctaa

SEQ ID NO: 3962 - DNA, 20 bp, Artificial Sequence
  Synthetic oligonucleotide; GAG chr11 5182535 5182554 5182551 +
ccaccaggcctgccctaaaa

SEQ ID NO: 3963 - DNA, 20 bp, Artificial Sequence
  Synthetic oligonucleotide; AAG chr11 5182544 5182563 5182560 +
ctgccctaaaagagctcctg

SEQ ID NO: 3964 - DNA, 20 bp, Artificial Sequence
  Synthetic oligonucleotide; AGG chr11 5182545 5182564 5182561 +
tgccctaaaagagctcctga

SEQ ID NO: 3965 - DNA, 20 bp, Artificial Sequence
  Synthetic oligonucleotide; AAG chr11 5182548 5182567 5182564 +
cctaaaagagctcctgaagg

SEQ ID NO: 3966 - DNA, 20 bp, Artificial Sequence
  Synthetic oligonucleotide; CAG chr11 5182551 5182570 5182567 +
aaaagagctcctgaaggaag

SEQ ID NO: 3967 - DNA, 20 bp, Artificial Sequence
  Synthetic oligonucleotide; TGG chr11 5182560 5182579 5182576 +
cctgaaggaagcagtaaaca

SEQ ID NO: 3968 - DNA, 20 bp, Artificial Sequence
  Synthetic oligonucleotide; AAG chr11 5182564 5182583 5182580 +
aaggaagcagtaaacatgga

SEQ ID NO: 3969 - DNA, 20 bp, Artificial Sequence
  Synthetic oligonucleotide; CAG chr11 5182574 5182593 5182590 +
taaacatggaaagaaacaac

SEQ ID NO: 3970 - DNA, 20 bp, Artificial Sequence
  Synthetic oligonucleotide; CAG chr11 5182580 5182599 5182596 +
tggaaagaaacaaccagtac

SEQ ID NO: 3971 - DNA, 20 bp, Artificial Sequence
  Synthetic oligonucleotide; AAG chr11 5182609 5182628 5182625 +
caaaaacatgccaaattgta

SEQ ID NO: 3972 - DNA, 20 bp, Artificial Sequence
  Synthetic oligonucleotide; AAG chr11 5182618 5182637 5182634 +
gccaaattgtaaagaccatc

SEQ ID NO: 3973 - DNA, 20 bp, Artificial Sequence
  Synthetic oligonucleotide; AGG chr11 5182619 5182638 5182635 +
ccaaattgtaaagaccatca

SEQ ID NO: 3974 - DNA, 20 bp, Artificial Sequence
  Synthetic oligonucleotide; TAG chr11 5182623 5182642 5182639 +
attgtaaagaccatcaaggc

SEQ ID NO: 3975 - DNA, 20 bp, Artificial Sequence
  Synthetic oligonucleotide; AGG chr11 5182624 5182643 5182640 +
ttgtaaagaccatcaaggct

SEQ ID NO: 3976 - DNA, 20 bp, Artificial Sequence
  Synthetic oligonucleotide; GGG chr11 5182625 5182644 5182641 +
tgtaaagaccatcaaggcta

SEQ ID NO: 3977 - DNA, 20 bp, Artificial Sequence
  Synthetic oligonucleotide; GAG chr11 5182627 5182646 5182643 +
taaagaccatcaaggctagg

SEQ ID NO: 3978 - DNA, 20 bp, Artificial Sequence
  Synthetic oligonucleotide; TAG chr11 5182643 5182662 5182659 +
tagggagaaactgcatcaac

SEQ ID NO: 3979 - DNA, 20 bp, Artificial Sequence
  Synthetic oligonucleotide; AAG chr11 5182647 5182666 5182663 +
gagaaactgcatcaactagc

SEQ ID NO: 3980 - DNA, 20 bp, Artificial Sequence
  Synthetic oligonucleotide; CAG chr11 5182659 5182678 5182675 +
caactagcaagcaaaataac

SEQ ID NO: 3981 - DNA, 20 bp, Artificial Sequence
  Synthetic oligonucleotide; CAG chr11 5182677 5182696 5182693 +
accagctaacatcataatga

SEQ ID NO: 3982 - DNA, 20 bp, Artificial Sequence
  Synthetic oligonucleotide; AGG chr11 5182678 5182697 5182694 +
ccagctaacatcataatgac

SEQ ID NO: 3983 - DNA, 20 bp, Artificial Sequence
  Synthetic oligonucleotide; GAG chr11 5182721 5182740 5182737 +
tattaaccttaaatgtaaat

SEQ ID NO: 3984 - DNA, 20 bp, Artificial Sequence
  Synthetic oligonucleotide; AAG chr11 5182741 5182760 5182757 +
gagctaaatgctccaattaa

SEQ ID NO: 3985 - DNA, 20 bp, Artificial Sequence
  Synthetic oligonucleotide; CAG chr11 5182747 5182766 5182763 +
aatgctccaattaaaagaca

SEQ ID NO: 3986 - DNA, 20 bp, Artificial Sequence
  Synthetic oligonucleotide; TGG chr11 5182752 5182771 5182768 +
tccaattaaaagacacagac

SEQ ID NO: 3987 - DNA, 20 bp, Artificial Sequence
  Synthetic oligonucleotide; TGG chr11 5182760 5182779 5182776 +
aaagacacagactggcaaat

SEQ ID NO: 3988 - DNA, 20 bp, Artificial Sequence
  Synthetic oligonucleotide; AAG chr11 5182766 5182785 5182782 +
acagactggcaaattggata

SEQ ID NO: 3989 - DNA, 20 bp, Artificial Sequence
  Synthetic oligonucleotide; GAG chr11 5182768 5182787 5182784 +
agactggcaaattggataaa

SEQ ID NO: 3990 - DNA, 20 bp, Artificial Sequence
  Synthetic oligonucleotide; AAG chr11 5182773 5182792 5182789 +
ggcaaattggataaagagtc

SEQ ID NO: 3991 - DNA, 20 bp, Artificial Sequence
  Synthetic oligonucleotide; CAG chr11 5182782 5182801 5182798 +
gataaagagtcaagacctat

SEQ ID NO: 3992 - DNA, 20 bp, Artificial Sequence
  Synthetic oligonucleotide; CAG chr11 5182796 5182815 5182812 +
acctatcagtgtgctgtatt

SEQ ID NO: 3993 - DNA, 20 bp, Artificial Sequence
  Synthetic oligonucleotide; AGG chr11 5182797 5182816 5182813 +
cctatcagtgtgctgtattc

SEQ ID NO: 3994 - DNA, 20 bp, Artificial Sequence
  Synthetic oligonucleotide; TGG chr11 5182814 5182833 5182830 +
ttcaggaaaccaatctcatg

SEQ ID NO: 3995 - DNA, 20 bp, Artificial Sequence
  Synthetic oligonucleotide; GAG chr11 5182816 5182835 5182832 +
caggaaaccaatctcatgtg

SEQ ID NO: 3996 - DNA, 20 bp, Artificial Sequence
  Synthetic oligonucleotide; GAG chr11 5182818 5182837 5182834 +
ggaaaccaatctcatgtgga

SEQ ID NO: 3997 - DNA, 20 bp, Artificial Sequence
  Synthetic oligonucleotide; TAG chr11 5182828 5182847 5182844 +
ctcatgtggagagacacaca

SEQ ID NO: 3998 - DNA, 20 bp, Artificial Sequence
  Synthetic oligonucleotide; AGG chr11 5182829 5182848 5182845 +
tcatgtggagagacacacat

SEQ ID NO: 3999 - DNA, 20 bp, Artificial Sequence
  Synthetic oligonucleotide; AAG chr11 5182841 5182860 5182857 +
acacacataggctcaaaata

SEQ ID NO: 4000 - DNA, 20 bp, Artificial Sequence
  Synthetic oligonucleotide; AGG chr11 5182842 5182861 5182858 +
cacacataggctcaaaataa

SEQ ID NO: 4001 - DNA, 20 bp, Artificial Sequence
  Synthetic oligonucleotide; GGG chr11 5182843 5182862 5182859 +
acacataggctcaaaataaa

SEQ ID NO: 4002 - DNA, 20 bp, Artificial Sequence
  Synthetic oligonucleotide; TGG chr11 5182847 5182866 5182863 +
ataggctcaaaataaaggga

SEQ ID NO: 4003 - DNA, 20 bp, Artificial Sequence
  Synthetic oligonucleotide; GAG chr11 5182849 5182868 5182865 +
aggctcaaaataaagggatg

SEQ ID NO: 4004 - DNA, 20 bp, Artificial Sequence
  Synthetic oligonucleotide; AGG chr11 5182850 5182869 5182866 +
ggctcaaaataaagggatgg

SEQ ID NO: 4005 - DNA, 20 bp, Artificial Sequence
  Synthetic oligonucleotide; AAG chr11 5182853 5182872 5182869 +
tcaaaataaagggatggagg

SEQ ID NO: 4006 - DNA, 20 bp, Artificial Sequence
  Synthetic oligonucleotide; AAG chr11 5182863 5182882 5182879 +
gggatggaggaagatctacc

SEQ ID NO: 4007 - DNA, 20 bp, Artificial Sequence
  Synthetic oligonucleotide; TGG chr11 5182870 5182889 5182886 +
aggaagatctaccaagcaaa

SEQ ID NO: 4008 - DNA, 20 bp, Artificial Sequence
  Synthetic oligonucleotide; AAG chr11 5182884 5182903 5182900 +
agcaaatggaaaacaaaaaa

SEQ ID NO: 4009 - DNA, 20 bp, Artificial Sequence
  Synthetic oligonucleotide; AGG chr11 5182885 5182904 5182901 +
gcaaatggaaaacaaaaaaa

SEQ ID NO: 4010 - DNA, 20 bp, Artificial Sequence
  Synthetic oligonucleotide; CAG chr11 5182888 5182907 5182904 +
aatggaaaacaaaaaaaagg

SEQ ID NO: 4011 - DNA, 20 bp, Artificial Sequence
  Synthetic oligonucleotide; AGG chr11 5182889 5182908 5182905 +
atggaaaacaaaaaaaaggc

SEQ ID NO: 4012 - DNA, 20 bp, Artificial Sequence
  Synthetic oligonucleotide; GGG chr11 5182890 5182909 5182906 +
tggaaaacaaaaaaaaggca

SEQ ID NO: 4013 - DNA, 20 bp, Artificial Sequence
  Synthetic oligonucleotide; TAG chr11 5182903 5182922 5182919 +
aaaggcagggtttgcaatct

SEQ ID NO: 4014 - DNA, 20 bp, Artificial Sequence
  Synthetic oligonucleotide; CAG chr11 5182918 5182937 5182934 +
aatcttagtctctgataaaa

SEQ ID NO: 4015 - DNA, 20 bp, Artificial Sequence
  Synthetic oligonucleotide; AAG chr11 5182935 5182954 5182951 +
aaacagactttaaaccaaca

SEQ ID NO: 4016 - DNA, 20 bp, Artificial Sequence
  Synthetic oligonucleotide; AAG chr11 5182943 5182962 5182959 +
tttaaaccaacaaagatcaa

SEQ ID NO: 4017 - DNA, 20 bp, Artificial Sequence
  Synthetic oligonucleotide; GAG chr11 5182945 5182964 5182961 +
taaaccaacaaagatcaaaa

SEQ ID NO: 4018 - DNA, 20 bp, Artificial Sequence
  Synthetic oligonucleotide; AAG chr11 5182951 5182970 5182967 +
aacaaagatcaaaagagaca

SEQ ID NO: 4019 - DNA, 20 bp, Artificial Sequence
  Synthetic oligonucleotide; AAG chr11 5182954 5182973 5182970 +
aaagatcaaaagagacaaag

SEQ ID NO: 4020 - DNA, 20 bp, Artificial Sequence
  Synthetic oligonucleotide; AGG chr11 5182955 5182974 5182971 +
aagatcaaaagagacaaaga

SEQ ID NO: 4021 - DNA, 20 bp, Artificial Sequence
  Synthetic oligonucleotide; TGG chr11 5182969 5182988 5182985 +
caaagaaggccattacatac

SEQ ID NO: 4022 - DNA, 20 bp, Artificial Sequence
  Synthetic oligonucleotide; AAG chr11 5182974 5182993 5182990 +
aaggccattacatactggta

SEQ ID NO: 4023 - DNA, 20 bp, Artificial Sequence
  Synthetic oligonucleotide; AGG chr11 5182975 5182994 5182991 +
aggccattacatactggtaa

SEQ ID NO: 4024 - DNA, 20 bp, Artificial Sequence
  Synthetic oligonucleotide; GGG chr11 5182976 5182995 5182992 +
ggccattacatactggtaaa

SEQ ID NO: 4025 - DNA, 20 bp, Artificial Sequence
  Synthetic oligonucleotide; AAG chr11 5182990 5183009 5183006 +
ggtaaagggatcaattcaac

SEQ ID NO: 4026 - DNA, 20 bp, Artificial Sequence
  Synthetic oligonucleotide; AAG chr11 5182993 5183012 5183009 +
aaagggatcaattcaacaag

SEQ ID NO: 4027 - DNA, 20 bp, Artificial Sequence
  Synthetic oligonucleotide; GAG chr11 5182995 5183014 5183011 +
agggatcaattcaacaagaa

SEQ ID NO: 4028 - DNA, 20 bp, Artificial Sequence
  Synthetic oligonucleotide; CAG chr11 5183029 5183048 5183045 +
aaatatatatgcacccaata

SEQ ID NO: 4029 - DNA, 20 bp, Artificial Sequence
  Synthetic oligonucleotide; CAG chr11 5183032 5183051 5183048 +
tatatatgcacccaatacag

SEQ ID NO: 4030 - DNA, 20 bp, Artificial Sequence
  Synthetic oligonucleotide; CAG chr11 5183039 5183058 5183055 +
gcacccaatacagcagcacc

SEQ ID NO: 4031 - DNA, 20 bp, Artificial Sequence
  Synthetic oligonucleotide; AAG chr11 5183049 5183068 5183065 +
cagcagcacccagattcata

SEQ ID NO: 4032 - DNA, 20 bp, Artificial Sequence
  Synthetic oligonucleotide; AAG chr11 5183053 5183072 5183069 +
agcacccagattcataaagc

SEQ ID NO: 4033 - DNA, 20 bp, Artificial Sequence
  Synthetic oligonucleotide; TAG chr11 5183060 5183079 5183076 +
agattcataaagcaagtcct

SEQ ID NO: 4034 - DNA, 20 bp, Artificial Sequence
  Synthetic oligonucleotide; GAG chr11 5183062 5183081 5183078 +
attcataaagcaagtcctta

SEQ ID NO: 4035 - DNA, 20 bp, Artificial Sequence
  Synthetic oligonucleotide; AAG chr11 5183072 5183091 5183088 +
caagtccttagagacctaca

SEQ ID NO: 4036 - DNA, 20 bp, Artificial Sequence
  Synthetic oligonucleotide; GAG chr11 5183074 5183093 5183090 +
agtccttagagacctacaaa

SEQ ID NO: 4037 - DNA, 20 bp, Artificial Sequence
  Synthetic oligonucleotide; TAG chr11 5183080 5183099 5183096 +
tagagacctacaaagagact

SEQ ID NO: 4038 - DNA, 20 bp, Artificial Sequence
  Synthetic oligonucleotide; TGG chr11 5183101 5183120 5183117 +
agactcccacacaataataa

SEQ ID NO: 4039 - DNA, 20 bp, Artificial Sequence
  Synthetic oligonucleotide; GGG chr11 5183102 5183121 5183118 +
gactcccacacaataataat

SEQ ID NO: 4040 - DNA, 20 bp, Artificial Sequence
  Synthetic oligonucleotide; GAG chr11 5183104 5183123 5183120 +
ctcccacacaataataatgg

SEQ ID NO: 4041 - DNA, 20 bp, Artificial Sequence
  Synthetic oligonucleotide; TAG chr11 5183131 5183150 5183147 +
taacaccccactgtcaacat

SEQ ID NO: 4042 - DNA, 20 bp, Artificial Sequence
  Synthetic oligonucleotide; CAG chr11 5183135 5183154 5183151 +
accccactgtcaacattaga

SEQ ID NO: 4043 - DNA, 20 bp, Artificial Sequence
  Synthetic oligonucleotide; GAG chr11 5183144 5183163 5183160 +
tcaacattagacagatcaac

SEQ ID NO: 4044 - DNA, 20 bp, Artificial Sequence
  Synthetic oligonucleotide; CAG chr11 5183148 5183167 5183164 +
cattagacagatcaacgaga

SEQ ID NO: 4045 - DNA, 20 bp, Artificial Sequence
  Synthetic oligonucleotide; AAG chr11 5183152 5183171 5183168 +
agacagatcaacgagacaga

SEQ ID NO: 4046 - DNA, 20 bp, Artificial Sequence
  Synthetic oligonucleotide; AAG chr11 5183160 5183179 5183176 +
caacgagacagaaagttaac

SEQ ID NO: 4047 - DNA, 20 bp, Artificial Sequence
  Synthetic oligonucleotide; AGG chr11 5183161 5183180 5183177 +
aacgagacagaaagttaaca

SEQ ID NO: 4048 - DNA, 20 bp, Artificial Sequence
  Synthetic oligonucleotide; CAG chr11 5183169 5183188 5183185 +
agaaagttaacaaggatatc

SEQ ID NO: 4049 - DNA, 20 bp, Artificial Sequence
  Synthetic oligonucleotide; AGG chr11 5183170 5183189 5183186 +
gaaagttaacaaggatatcc

SEQ ID NO: 4050 - DNA, 20 bp, Artificial Sequence
  Synthetic oligonucleotide; CAG chr11 5183182 5183201 5183198 +
ggatatccaggaattgaatt

SEQ ID NO: 4051 - DNA, 20 bp, Artificial Sequence
  Synthetic oligonucleotide; AAG chr11 5183194 5183213 5183210 +
attgaattcagctctgcacc

SEQ ID NO: 4052 - DNA, 20 bp, Artificial Sequence
  Synthetic oligonucleotide; CAG chr11 5183197 5183216 5183213 +
gaattcagctctgcaccaag

SEQ ID NO: 4053 - DNA, 20 bp, Artificial Sequence
  Synthetic oligonucleotide; TAG chr11 5183206 5183225 5183222 +
tctgcaccaagcagacctaa

SEQ ID NO: 4054 - DNA, 20 bp, Artificial Sequence
  Synthetic oligonucleotide; CAG chr11 5183216 5183235 5183232 +
gcagacctaatagacatcta

SEQ ID NO: 4055 - DNA, 20 bp, Artificial Sequence
  Synthetic oligonucleotide; TAG chr11 5183239 5183258 5183255 +
aactctccatcccaaatcaa

SEQ ID NO: 4056 - DNA, 20 bp, Artificial Sequence
  Synthetic oligonucleotide; CAG chr11 5183257 5183276 5183273 +
aatagaatatacattcttct

SEQ ID NO: 4057 - DNA, 20 bp, Artificial Sequence
  Synthetic oligonucleotide; CAG chr11 5183279 5183298 5183295 +
gcaccacaccacacctattc

SEQ ID NO: 4058 - DNA, 20 bp, Artificial Sequence
  Synthetic oligonucleotide; TAG chr11 5183291 5183310 5183307 +
acctattccagttgaccaca

SEQ ID NO: 4059 - DNA, 20 bp, Artificial Sequence
  Synthetic oligonucleotide; TGG chr11 5183295 5183314 5183311 +
attccagttgaccacatagt

SEQ ID NO: 4060 - DNA, 20 bp, Artificial Sequence
  Synthetic oligonucleotide; AAG chr11 5183298 5183317 5183314 +
ccagttgaccacatagttgg

SEQ ID NO: 4061 - DNA, 20 bp, Artificial Sequence
  Synthetic oligonucleotide; AAG chr11 5183303 5183322 5183319 +
tgaccacatagttggaagtg

SEQ ID NO: 4062 - DNA, 20 bp, Artificial Sequence
  Synthetic oligonucleotide; CAG chr11 5183313 5183332 5183329 +
gttggaagtgaagcactcct

SEQ ID NO: 4063 - DNA, 20 bp, Artificial Sequence
  Synthetic oligonucleotide; AAG chr11 5183325 5183344 5183341 +
gcactcctcagcaaacgtaa

SEQ ID NO: 4064 - DNA, 20 bp, Artificial Sequence
  Synthetic oligonucleotide; CAG chr11 5183330 5183349 5183346 +
cctcagcaaacgtaaaagaa

SEQ ID NO: 4065 - DNA, 20 bp, Artificial Sequence
  Synthetic oligonucleotide; CAG chr11 5183354 5183373 5183370 +
aacaataacaaactgtctct

SEQ ID NO: 4066 - DNA, 20 bp, Artificial Sequence
  Synthetic oligonucleotide; CAG chr11 5183361 5183380 5183377 +
acaaactgtctctcagacca

SEQ ID NO: 4067 - DNA, 20 bp, Artificial Sequence
  Synthetic oligonucleotide; TAG chr11 5183375 5183394 5183391 +
agaccacagtgcaatcaaac

SEQ ID NO: 4068 - DNA, 20 bp, Artificial Sequence
  Synthetic oligonucleotide; CAG chr11 5183382 5183401 5183398 +
agtgcaatcaaactagaact

SEQ ID NO: 4069 - DNA, 20 bp, Artificial Sequence
  Synthetic oligonucleotide; AGG chr11 5183383 5183402 5183399 +
gtgcaatcaaactagaactc

SEQ ID NO: 4070 - DNA, 20 bp, Artificial Sequence
  Synthetic oligonucleotide; AAG chr11 5183389 5183408 5183405 +
tcaaactagaactcaggatt

SEQ ID NO: 4071 - DNA, 20 bp, Artificial Sequence
  Synthetic oligonucleotide; TGG chr11 5183419 5183438 5183435 +
ctcaaaaccactcaactaca

SEQ ID NO: 4072 - DNA, 20 bp, Artificial Sequence
  Synthetic oligonucleotide; CAG chr11 5183430 5183449 5183446 +
tcaactacatggaaactgaa

SEQ ID NO: 4073 - DNA, 20 bp, Artificial Sequence
  Synthetic oligonucleotide; TGG chr11 5183452 5183471 5183468 +
gcctgctcctgaatgactac

SEQ ID NO: 4074 - DNA, 20 bp, Artificial Sequence
  Synthetic oligonucleotide; GGG chr11 5183453 5183472 5183469 +
cctgctcctgaatgactact

SEQ ID NO: 4075 - DNA, 20 bp, Artificial Sequence
  Synthetic oligonucleotide; AAG chr11 5183470 5183489 5183486 +
actgggtacataacaaaatg

SEQ ID NO: 4076 - DNA, 20 bp, Artificial Sequence
  Synthetic oligonucleotide; AGG chr11 5183471 5183490 5183487 +
ctgggtacataacaaaatga

SEQ ID NO: 4077 - DNA, 20 bp, Artificial Sequence
  Synthetic oligonucleotide; CAG chr11 5183474 5183493 5183490 +
ggtacataacaaaatgaagg

SEQ ID NO: 4078 - DNA, 20 bp, Artificial Sequence
  Synthetic oligonucleotide; AAG chr11 5183482 5183501 5183498 +
acaaaatgaaggcagaaata

SEQ ID NO: 4079 - DNA, 20 bp, Artificial Sequence
  Synthetic oligonucleotide; GAG chr11 5183503 5183522 5183519 +
agatgttctttgaaaccaac

SEQ ID NO: 4080 - DNA, 20 bp, Artificial Sequence
  Synthetic oligonucleotide; AAG chr11 5183510 5183529 5183526 +
ctttgaaaccaacgagaata

SEQ ID NO: 4081 - DNA, 20 bp, Artificial Sequence
  Synthetic oligonucleotide; CAG chr11 5183524 5183543 5183540 +
agaataaagatacaacaaaa

SEQ ID NO: 4082 - DNA, 20 bp, Artificial Sequence
  Synthetic oligonucleotide; TGG chr11 5183533 5183552 5183549 +
atacaacaaaacagaatctc

SEQ ID NO: 4083 - DNA, 20 bp, Artificial Sequence
  Synthetic oligonucleotide; GGG chr11 5183534 5183553 5183550 +
tacaacaaaacagaatctct

SEQ ID NO: 4084 - DNA, 20 bp, Artificial Sequence
  Synthetic oligonucleotide; AAG chr11 5183546 5183565 5183562 +
gaatctctgggacacattta

SEQ ID NO: 4085 - DNA, 20 bp, Artificial Sequence
  Synthetic oligonucleotide; CAG chr11 5183549 5183568 5183565 +
tctctgggacacatttaaag

SEQ ID NO: 4086 - DNA, 20 bp, Artificial Sequence
  Synthetic oligonucleotide; TAG chr11 5183556 5183575 5183572 +
gacacatttaaagcagtgtg

SEQ ID NO: 4087 - DNA, 20 bp, Artificial Sequence
  Synthetic oligonucleotide; GAG chr11 5183558 5183577 5183574 +
cacatttaaagcagtgtgta

SEQ ID NO: 4088 - DNA, 20 bp, Artificial Sequence
  Synthetic oligonucleotide; AGG chr11 5183559 5183578 5183575 +
acatttaaagcagtgtgtag

SEQ ID NO: 4089 - DNA, 20 bp, Artificial Sequence
  Synthetic oligonucleotide; GGG chr11 5183560 5183579 5183576 +
catttaaagcagtgtgtaga

SEQ ID NO: 4090 - DNA, 20 bp, Artificial Sequence
  Synthetic oligonucleotide; TAG chr11 5183570 5183589 5183586 +
agtgtgtagagggaaattta

SEQ ID NO: 4091 - DNA, 20 bp, Artificial Sequence
  Synthetic oligonucleotide; AAG chr11 5183589 5183608 5183605 +
atagcactaaatgcccacaa

SEQ ID NO: 4092 - DNA, 20 bp, Artificial Sequence
  Synthetic oligonucleotide; AAG chr11 5183593 5183612 5183609 +
cactaaatgcccacaaaaga

SEQ ID NO: 4093 - DNA, 20 bp, Artificial Sequence
  Synthetic oligonucleotide; CAG chr11 5183596 5183615 5183612 +
taaatgcccacaaaagaaag

SEQ ID NO: 4094 - DNA, 20 bp, Artificial Sequence
  Synthetic oligonucleotide; AGG chr11 5183597 5183616 5183613 +
aaatgcccacaaaagaaagc

SEQ ID NO: 4095 - DNA, 20 bp, Artificial Sequence
  Synthetic oligonucleotide; AAG chr11 5183601 5183620 5183617 +
gcccacaaaagaaagcagga

SEQ ID NO: 4096 - DNA, 20 bp, Artificial Sequence
  Synthetic oligonucleotide; AAG chr11 5183636 5183655 5183652 +
caccctaacatcacaattaa

SEQ ID NO: 4097 - DNA, 20 bp, Artificial Sequence
  Synthetic oligonucleotide; TAG chr11 5183642 5183661 5183658 +
aacatcacaattaaaagaac

SEQ ID NO: 4098 - DNA, 20 bp, Artificial Sequence
  Synthetic oligonucleotide; GAG chr11 5183644 5183663 5183660 +
catcacaattaaaagaacta

SEQ ID NO: 4099 - DNA, 20 bp, Artificial Sequence
  Synthetic oligonucleotide; AAG chr11 5183647 5183666 5183663 +
cacaattaaaagaactagag

SEQ ID NO: 4100 - DNA, 20 bp, Artificial Sequence
  Synthetic oligonucleotide; AAG chr11 5183651 5183670 5183667 +
attaaaagaactagagaagc

SEQ ID NO: 4101 - DNA, 20 bp, Artificial Sequence
  Synthetic oligonucleotide; GAG chr11 5183653 5183672 5183669 +
taaaagaactagagaagcaa

SEQ ID NO: 4102 - DNA, 20 bp, Artificial Sequence
  Synthetic oligonucleotide; AAG chr11 5183669 5183688 5183685 +
gcaagagcaaacactttcaa

SEQ ID NO: 4103 - DNA, 20 bp, Artificial Sequence
  Synthetic oligonucleotide; TAG chr11 5183673 5183692 5183689 +
gagcaaacactttcaaaagc

SEQ ID NO: 4104 - DNA, 20 bp, Artificial Sequence
  Synthetic oligonucleotide; CGG chr11 5183676 5183695 5183692 +
caaacactttcaaaagctag

SEQ ID NO: 4105 - DNA, 20 bp, Artificial Sequence
  Synthetic oligonucleotide; AAG chr11 5183679 5183698 5183695 +
acactttcaaaagctagcgg

SEQ ID NO: 4106 - DNA, 20 bp, Artificial Sequence
  Synthetic oligonucleotide; AGG chr11 5183680 5183699 5183696 +
cactttcaaaagctagcgga

SEQ ID NO: 4107 - DNA, 20 bp, Artificial Sequence
  Synthetic oligonucleotide; AAG chr11 5183684 5183703 5183700 +
ttcaaaagctagcggaaggc

SEQ ID NO: 4108 - DNA, 20 bp, Artificial Sequence
  Synthetic oligonucleotide; AAG chr11 5183691 5183710 5183707 +
gctagcggaaggcaagaaat

SEQ ID NO: 4109 - DNA, 20 bp, Artificial Sequence
  Synthetic oligonucleotide; AAG chr11 5183695 5183714 5183711 +
gcggaaggcaagaaataagt

SEQ ID NO: 4110 - DNA, 20 bp, Artificial Sequence
  Synthetic oligonucleotide; CAG chr11 5183700 5183719 5183716 +
aggcaagaaataagtaagat

SEQ ID NO: 4111 - DNA, 20 bp, Artificial Sequence
  Synthetic oligonucleotide; GAG chr11 5183702 5183721 5183718 +
gcaagaaataagtaagatca

SEQ ID NO: 4112 - DNA, 20 bp, Artificial Sequence
  Synthetic oligonucleotide; CAG chr11 5183705 5183724 5183721 +
agaaataagtaagatcagag

SEQ ID NO: 4113 - DNA, 20 bp, Artificial Sequence
  Synthetic oligonucleotide; AAG chr11 5183708 5183727 5183724 +
aataagtaagatcagagcag

SEQ ID NO: 4114 - DNA, 20 bp, Artificial Sequence
  Synthetic oligonucleotide; AAG chr11 5183713 5183732 5183729 +
gtaagatcagagcagaagtg

SEQ ID NO: 4115 - DNA, 20 bp, Artificial Sequence
  Synthetic oligonucleotide; AGG chr11 5183714 5183733 5183730 +
taagatcagagcagaagtga

SEQ ID NO: 4116 - DNA, 20 bp, Artificial Sequence
  Synthetic oligonucleotide; GAG chr11 5183716 5183735 5183732 +
agatcagagcagaagtgaag

SEQ ID NO: 4117 - DNA, 20 bp, Artificial Sequence
  Synthetic oligonucleotide; GAG chr11 5183722 5183741 5183738 +
gagcagaagtgaaggagatt

SEQ ID NO: 4118 - DNA, 20 bp, Artificial Sequence
  Synthetic oligonucleotide; CAG chr11 5183757 5183776 5183773 +
cttaaaaaaatcaatgaatc

SEQ ID NO: 4119 - DNA, 20 bp, Artificial Sequence
  Synthetic oligonucleotide; AGG chr11 5183758 5183777 5183774 +
ttaaaaaaatcaatgaatcc

SEQ ID NO: 4120 - DNA, 20 bp, Artificial Sequence
  Synthetic oligonucleotide; GAG chr11 5183760 5183779 5183776 +
aaaaaaatcaatgaatccag

SEQ ID NO: 4121 - DNA, 20 bp, Artificial Sequence
  Synthetic oligonucleotide; TGG chr11 5183764 5183783 5183780 +
aaatcaatgaatccaggagc

SEQ ID NO: 4122 - DNA, 20 bp, Artificial Sequence
  Synthetic oligonucleotide; AAG chr11 5183776 5183795 5183792 +
ccaggagctggttttttgaa

SEQ ID NO: 4123 - DNA, 20 bp, Artificial Sequence
  Synthetic oligonucleotide; TAG chr11 5183793 5183812 5183809 +
gaaaagatcaacaaaattga

SEQ ID NO: 4124 - DNA, 20 bp, Artificial Sequence
  Synthetic oligonucleotide; TAG chr11 5183801 5183820 5183817 +
caacaaaattgatagactgc

SEQ ID NO: 4125 - DNA, 20 bp, Artificial Sequence
  Synthetic oligonucleotide; AAG chr11 5183805 5183824 5183821 +
aaaattgatagactgctagc

SEQ ID NO: 4126 - DNA, 20 bp, Artificial Sequence
  Synthetic oligonucleotide; AAG chr11 5183815 5183834 5183831 +
gactgctagcaagactaata

SEQ ID NO: 4127 - DNA, 20 bp, Artificial Sequence
  Synthetic oligonucleotide; AAG chr11 5183818 5183837 5183834 +
tgctagcaagactaataaag

SEQ ID NO: 4128 - DNA, 20 bp, Artificial Sequence
  Synthetic oligonucleotide; AAG chr11 5183823 5183842 5183839 +
gcaagactaataaagaagaa

SEQ ID NO: 4129 - DNA, 20 bp, Artificial Sequence
  Synthetic oligonucleotide; GAG chr11 5183825 5183844 5183841 +
aagactaataaagaagaaaa

SEQ ID NO: 4130 - DNA, 20 bp, Artificial Sequence
  Synthetic oligonucleotide; GAG chr11 5183827 5183846 5183843 +
gactaataaagaagaaaaga

SEQ ID NO: 4131 - DNA, 20 bp, Artificial Sequence
  Synthetic oligonucleotide; AAG chr11 5183830 5183849 5183846 +
taataaagaagaaaagagag

SEQ ID NO: 4132 - DNA, 20 bp, Artificial Sequence
  Synthetic oligonucleotide; TAG chr11 5183840 5183859 5183856 +
gaaaagagagaagactcaaa

SEQ ID NO: 4133 - DNA, 20 bp, Artificial Sequence
  Synthetic oligonucleotide; AAG chr11 5183850 5183869 5183866 +
aagactcaaatagatgcaat

SEQ ID NO: 4134 - DNA, 20 bp, Artificial Sequence
  Synthetic oligonucleotide; AAG chr11 5183861 5183880 5183877 +
agatgcaataagaaatgata

SEQ ID NO: 4135 - DNA, 20 bp, Artificial Sequence
  Synthetic oligonucleotide; AGG chr11 5183862 5183881 5183878 +
gatgcaataagaaatgataa

SEQ ID NO: 4136 - DNA, 20 bp, Artificial Sequence
  Synthetic oligonucleotide; GGG chr11 5183863 5183882 5183879 +
atgcaataagaaatgataaa

SEQ ID NO: 4137 - DNA, 20 bp, Artificial Sequence
  Synthetic oligonucleotide; GGG chr11 5183864 5183883 5183880 +
tgcaataagaaatgataaag

SEQ ID NO: 4138 - DNA, 20 bp, Artificial Sequence
  Synthetic oligonucleotide; CAG chr11 5183885 5183904 5183901 +
ggatatcaccaccaatccca

SEQ ID NO: 4139 - DNA, 20 bp, Artificial Sequence
  Synthetic oligonucleotide; CAG chr11 5183904 5183923 5183920 +
acagacatacaaactaccat

SEQ ID NO: 4140 - DNA, 20 bp, Artificial Sequence
  Synthetic oligonucleotide; GAG chr11 5183906 5183925 5183922 +
agacatacaaactaccatca

SEQ ID NO: 4141 - DNA, 20 bp, Artificial Sequence
  Synthetic oligonucleotide; TAG chr11 5183939 5183958 5183955 +
acacctctacgcaaataaac

SEQ ID NO: 4142 - DNA, 20 bp, Artificial Sequence
  Synthetic oligonucleotide; TAG chr11 5183948 5183967 5183964 +
cgcaaataaactagaaaatc

SEQ ID NO: 4143 - DNA, 20 bp, Artificial Sequence
  Synthetic oligonucleotide; TAG chr11 5183951 5183970 5183967 +
aaataaactagaaaatctag

SEQ ID NO: 4144 - DNA, 20 bp, Artificial Sequence
  Synthetic oligonucleotide; TGG chr11 5183957 5183976 5183973 +
actagaaaatctagtagaaa

SEQ ID NO: 4145 - DNA, 20 bp, Artificial Sequence
  Synthetic oligonucleotide; AAG chr11 5183988 5184007 5184004 +
ctcgacacatacaccctccc

SEQ ID NO: 4146 - DNA, 20 bp, Artificial Sequence
  Synthetic oligonucleotide; CAG chr11 5183998 5184017 5184014 +
acaccctcccaagactaaac

SEQ ID NO: 4147 - DNA, 20 bp, Artificial Sequence
  Synthetic oligonucleotide; AGG chr11 5183999 5184018 5184015 +
caccctcccaagactaaacc

SEQ ID NO: 4148 - DNA, 20 bp, Artificial Sequence
  Synthetic oligonucleotide; GGG chr11 5184000 5184019 5184016 +
accctcccaagactaaacca

SEQ ID NO: 4149 - DNA, 20 bp, Artificial Sequence
  Synthetic oligonucleotide; GAG chr11 5184002 5184021 5184018 +
cctcccaagactaaaccagg

SEQ ID NO: 4150 - DNA, 20 bp, Artificial Sequence
  Synthetic oligonucleotide; TAG chr11 5184021 5184040 5184037 +
ggagaaattgaatctcttaa

SEQ ID NO: 4151 - DNA, 20 bp, Artificial Sequence
  Synthetic oligonucleotide; TAG chr11 5184032 5184051 5184048 +
atctcttaatagacaaataa

SEQ ID NO: 4152 - DNA, 20 bp, Artificial Sequence
  Synthetic oligonucleotide; AGG chr11 5184033 5184052 5184049 +
tctcttaatagacaaataat

SEQ ID NO: 4153 - DNA, 20 bp, Artificial Sequence
  Synthetic oligonucleotide; GAG chr11 5184046 5184065 5184062 +
aaataataggctctgaaatt

SEQ ID NO: 4154 - DNA, 20 bp, Artificial Sequence
  Synthetic oligonucleotide; TAG chr11 5184060 5184079 5184076 +
gaaattgagacaataattaa

SEQ ID NO: 4155 - DNA, 20 bp, Artificial Sequence
  Synthetic oligonucleotide; AAG chr11 5184081 5184100 5184097 +
agtttacacattgtatatct

SEQ ID NO: 4156 - DNA, 20 bp, Artificial Sequence
  Synthetic oligonucleotide; CAG chr11 5184092 5184111 5184108 +
tgtatatctaagtaccacca

SEQ ID NO: 4157 - DNA, 20 bp, Artificial Sequence
  Synthetic oligonucleotide; CAG chr11 5184095 5184114 5184111 +
atatctaagtaccaccacag

SEQ ID NO: 4158 - DNA, 20 bp, Artificial Sequence
  Synthetic oligonucleotide; AAG chr11 5184099 5184118 5184115 +
ctaagtaccaccacagcagc

SEQ ID NO: 4159 - DNA, 20 bp, Artificial Sequence
  Synthetic oligonucleotide; CAG chr11 5184128 5184147 5184144 +
aatgttttcacattataaaa

SEQ ID NO: 4160 - DNA, 20 bp, Artificial Sequence
  Synthetic oligonucleotide; AGG chr11 5184129 5184148 5184145 +
atgttttcacattataaaac

SEQ ID NO: 4161 - DNA, 20 bp, Artificial Sequence
  Synthetic oligonucleotide; GAG chr11 5184131 5184150 5184147 +
gttttcacattataaaacag

SEQ ID NO: 4162 - DNA, 20 bp, Artificial Sequence
  Synthetic oligonucleotide; TAG chr11 5184174 5184193 5184190 +
tacttgttattactaattac

SEQ ID NO: 4163 - DNA, 20 bp, Artificial Sequence
  Synthetic oligonucleotide; TGG chr11 5184189 5184208 5184205 +
attactagttctaaaaaatg

SEQ ID NO: 4164 - DNA, 20 bp, Artificial Sequence
  Synthetic oligonucleotide; TAG chr11 5184193 5184212 5184209 +
ctagttctaaaaaatgtgga

SEQ ID NO: 4165 - DNA, 20 bp, Artificial Sequence
  Synthetic oligonucleotide; AAG chr11 5184196 5184215 5184212 +
gttctaaaaaatgtggatag

SEQ ID NO: 4166 - DNA, 20 bp, Artificial Sequence
  Synthetic oligonucleotide; AAG chr11 5184200 5184219 5184216 +
taaaaaatgtggatagaagc

SEQ ID NO: 4167 - DNA, 20 bp, Artificial Sequence
  Synthetic oligonucleotide; GAG chr11 5184212 5184231 5184228 +
atagaagcaagtttaatatt

SEQ ID NO: 4168 - DNA, 20 bp, Artificial Sequence
  Synthetic oligonucleotide; TGG chr11 5184215 5184234 5184231 +
gaagcaagtttaatattgag

SEQ ID NO: 4169 - DNA, 20 bp, Artificial Sequence
  Synthetic oligonucleotide; AAG chr11 5184223 5184242 5184239 +
tttaatattgagtggaaaat

SEQ ID NO: 4170 - DNA, 20 bp, Artificial Sequence
  Synthetic oligonucleotide; TAG chr11 5184228 5184247 5184244 +
tattgagtggaaaataagat

SEQ ID NO: 4171 - DNA, 20 bp, Artificial Sequence
  Synthetic oligonucleotide; AGG chr11 5184229 5184248 5184245 +
attgagtggaaaataagatt

SEQ ID NO: 4172 - DNA, 20 bp, Artificial Sequence
  Synthetic oligonucleotide; GAG chr11 5184231 5184250 5184247 +
tgagtggaaaataagattag

SEQ ID NO: 4173 - DNA, 20 bp, Artificial Sequence
  Synthetic oligonucleotide; CAG chr11 5184243 5184262 5184259 +
aagattaggagatgcaacac

SEQ ID NO: 4174 - DNA, 20 bp, Artificial Sequence
  Synthetic oligonucleotide; AGG chr11 5184244 5184263 5184260 +
agattaggagatgcaacacc

SEQ ID NO: 4175 - DNA, 20 bp, Artificial Sequence
  Synthetic oligonucleotide; GGG chr11 5184245 5184264 5184261 +
gattaggagatgcaacacca

SEQ ID NO: 4176 - DNA, 20 bp, Artificial Sequence
  Synthetic oligonucleotide; TAG chr11 5184248 5184267 5184264 +
taggagatgcaacaccaggg

SEQ ID NO: 4177 - DNA, 20 bp, Artificial Sequence
  Synthetic oligonucleotide; AGG chr11 5184249 5184268 5184265 +
aggagatgcaacaccagggt

SEQ ID NO: 4178 - DNA, 20 bp, Artificial Sequence
  Synthetic oligonucleotide; CAG chr11 5184261 5184280 5184277 +
accagggtaggtgacatata

SEQ ID NO: 4179 - DNA, 20 bp, Artificial Sequence
  Synthetic oligonucleotide; GAG chr11 5184263 5184282 5184279 +
cagggtaggtgacatataca

SEQ ID NO: 4180 - DNA, 20 bp, Artificial Sequence
  Synthetic oligonucleotide; TAG chr11 5184267 5184286 5184283 +
gtaggtgacatatacagaga

SEQ ID NO: 4181 - DNA, 20 bp, Artificial Sequence
  Synthetic oligonucleotide; TAG chr11 5184272 5184291 5184288 +
tgacatatacagagatagat

SEQ ID NO: 4182 - DNA, 20 bp, Artificial Sequence
  Synthetic oligonucleotide; TAG chr11 5184276 5184295 5184292 +
atatacagagatagattaga

SEQ ID NO: 4183 - DNA, 20 bp, Artificial Sequence
  Synthetic oligonucleotide; AGG chr11 5184277 5184296 5184293 +
tatacagagatagattagat

SEQ ID NO: 4184 - DNA, 20 bp, Artificial Sequence
  Synthetic oligonucleotide; TAG chr11 5184280 5184299 5184296 +
acagagatagattagatagg

SEQ ID NO: 4185 - DNA, 20 bp, Artificial Sequence
  Synthetic oligonucleotide; TAG chr11 5184284 5184303 5184300 +
agatagattagataggtaga

SEQ ID NO: 4186 - DNA, 20 bp, Artificial Sequence
  Synthetic oligonucleotide; TAG chr11 5184288 5184307 5184304 +
agattagataggtagatagc

SEQ ID NO: 4187 - DNA, 20 bp, Artificial Sequence
  Synthetic oligonucleotide; TAG chr11 5184292 5184311 5184308 +
tagataggtagatagctagc

SEQ ID NO: 4188 - DNA, 20 bp, Artificial Sequence
  Synthetic oligonucleotide; TAG chr11 5184296 5184315 5184312 +
taggtagatagctagctagc

SEQ ID NO: 4189 - DNA, 20 bp, Artificial Sequence
  Synthetic oligonucleotide; TAG chr11 5184300 5184319 5184316 +
tagatagctagctagctagc

SEQ ID NO: 4190 - DNA, 20 bp, Artificial Sequence
  Synthetic oligonucleotide; TAG chr11 5184304 5184323 5184320 +
tagctagctagctagctagc

SEQ ID NO: 4191 - DNA, 20 bp, Artificial Sequence
  Synthetic oligonucleotide; TAG chr11 5184308 5184327 5184324 +
tagctagctagctagctagc

SEQ ID NO: 4192 - DNA, 20 bp, Artificial Sequence
  Synthetic oligonucleotide; TAG chr11 5184312 5184331 5184328 +
tagctagctagctagctagc

SEQ ID NO: 4193 - DNA, 20 bp, Artificial Sequence
  Synthetic oligonucleotide; AAG chr11 5184316 5184335 5184332 +
tagctagctagctagctaga

SEQ ID NO: 4194 - DNA, 20 bp, Artificial Sequence
  Synthetic oligonucleotide; TAG chr11 5184320 5184339 5184336 +
tagctagctagctagaaaga

SEQ ID NO: 4195 - DNA, 20 bp, Artificial Sequence
  Synthetic oligonucleotide; TAG chr11 5184324 5184343 5184340 +
tagctagctagaaagataga

SEQ ID NO: 4196 - DNA, 20 bp, Artificial Sequence
  Synthetic oligonucleotide; TAG chr11 5184328 5184347 5184344 +
tagctagaaagatagataga

SEQ ID NO: 4197 - DNA, 20 bp, Artificial Sequence
  Synthetic oligonucleotide; TAG chr11 5184332 5184351 5184348 +
tagaaagatagatagataga

SEQ ID NO: 4198 - DNA, 20 bp, Artificial Sequence
  Synthetic oligonucleotide; TAG chr11 5184336 5184355 5184352 +
aagatagatagatagataga

SEQ ID NO: 4199 - DNA, 20 bp, Artificial Sequence
  Synthetic oligonucleotide; TAG chr11 5184340 5184359 5184356 +
tagatagatagatagataga

SEQ ID NO: 4200 - DNA, 20 bp, Artificial Sequence
  Synthetic oligonucleotide; TAG chr11 5184344 5184363 5184360 +
tagatagatagatagataga

SEQ ID NO: 4201 - DNA, 20 bp, Artificial Sequence
  Synthetic oligonucleotide; TAG chr11 5184348 5184367 5184364 +
tagatagatagatagataga

SEQ ID NO: 4202 - DNA, 20 bp, Artificial Sequence
  Synthetic oligonucleotide; TAG chr11 5184352 5184371 5184368 +
tagatagatagatagataga

SEQ ID NO: 4203 - DNA, 20 bp, Artificial Sequence
  Synthetic oligonucleotide; TAG chr11 5184356 5184375 5184372 +
tagatagatagatagataga

SEQ ID NO: 4204 - DNA, 20 bp, Artificial Sequence
  Synthetic oligonucleotide; TAG chr11 5184360 5184379 5184376 +
tagatagatagatagataga

SEQ ID NO: 4205 - DNA, 20 bp, Artificial Sequence
  Synthetic oligonucleotide; TAG chr11 5184364 5184383 5184380 +
tagatagatagatagataga

SEQ ID NO: 4206 - DNA, 20 bp, Artificial Sequence
  Synthetic oligonucleotide; TGG chr11 5184372 5184391 5184388 +
tagatagatagatagatgca

SEQ ID NO: 4207 - DNA, 20 bp, Artificial Sequence
  Synthetic oligonucleotide; GGG chr11 5184373 5184392 5184389 +
agatagatagatagatgcat

SEQ ID NO: 4208 - DNA, 20 bp, Artificial Sequence
  Synthetic oligonucleotide; TAG chr11 5184384 5184403 5184400 +
tagatgcatgggtataaaca

SEQ ID NO: 4209 - DNA, 20 bp, Artificial Sequence
  Synthetic oligonucleotide; CAG chr11 5184405 5184424 5184421 +
agataataatatgtgaatga

SEQ ID NO: 4210 - DNA, 20 bp, Artificial Sequence
  Synthetic oligonucleotide; AGG chr11 5184406 5184425 5184422 +
gataataatatgtgaatgac

SEQ ID NO: 4211 - DNA, 20 bp, Artificial Sequence
  Synthetic oligonucleotide; TGG chr11 5184409 5184428 5184425 +
aataatatgtgaatgacagg

SEQ ID NO: 4212 - DNA, 20 bp, Artificial Sequence
  Synthetic oligonucleotide; AAG chr11 5184426 5184445 5184442 +
aggtggcttctatactctct

SEQ ID NO: 4213 - DNA, 20 bp, Artificial Sequence
  Synthetic oligonucleotide; AAG chr11 5184440 5184459 5184456 +
ctctctaagttccctttctc

SEQ ID NO: 4214 - DNA, 20 bp, Artificial Sequence
  Synthetic oligonucleotide; AAG chr11 5184446 5184465 5184462 +
aagttccctttctcaagtaa

SEQ ID NO: 4215 - DNA, 20 bp, Artificial Sequence
  Synthetic oligonucleotide; TGG chr11 5184450 5184469 5184466 +
tccctttctcaagtaaaagc

SEQ ID NO: 4216 - DNA, 20 bp, Artificial Sequence
  Synthetic oligonucleotide; AAG chr11 5184456 5184475 5184472 +
tctcaagtaaaagctggcta

SEQ ID NO: 4217 - DNA, 20 bp, Artificial Sequence
  Synthetic oligonucleotide; GAG chr11 5184471 5184490 5184487 +
ggctaaagttcttgtttttt

SEQ ID NO: 4218 - DNA, 20 bp, Artificial Sequence
  Synthetic oligonucleotide; AGG chr11 5184472 5184491 5184488 +
gctaaagttcttgttttttg

SEQ ID NO: 4219 - DNA, 20 bp, Artificial Sequence
  Synthetic oligonucleotide; TGG chr11 5184475 5184494 5184491 +
aaagttcttgttttttgagg

SEQ ID NO: 4220 - DNA, 20 bp, Artificial Sequence
  Synthetic oligonucleotide; CAG chr11 5184480 5184499 5184496 +
tcttgttttttgaggtggca

SEQ ID NO: 4221 - DNA, 20 bp, Artificial Sequence
  Synthetic oligonucleotide; AGG chr11 5184481 5184500 5184497 +
cttgttttttgaggtggcac

SEQ ID NO: 4222 - DNA, 20 bp, Artificial Sequence
  Synthetic oligonucleotide; GGG chr11 5184482 5184501 5184498 +
ttgttttttgaggtggcaca

SEQ ID NO: 4223 - DNA, 20 bp, Artificial Sequence
  Synthetic oligonucleotide; GGG chr11 5184483 5184502 5184499 +
tgttttttgaggtggcacag

SEQ ID NO: 4224 - DNA, 20 bp, Artificial Sequence
  Synthetic oligonucleotide; AAG chr11 5184489 5184508 5184505 +
ttgaggtggcacaggggctt

SEQ ID NO: 4225 - DNA, 20 bp, Artificial Sequence
  Synthetic oligonucleotide; CAG chr11 5184525 5184544 5184541 +
cccatctcttgattccatta

SEQ ID NO: 4226 - DNA, 20 bp, Artificial Sequence
  Synthetic oligonucleotide; TAG chr11 5184549 5184568 5184565 +
tcaatatactgatcattgta

SEQ ID NO: 4227 - DNA, 20 bp, Artificial Sequence
  Synthetic oligonucleotide; TAG chr11 5184554 5184573 5184570 +
atactgatcattgtatagca

SEQ ID NO: 4228 - DNA, 20 bp, Artificial Sequence
  Synthetic oligonucleotide; AAG chr11 5184584 5184603 5184600 +
cctttacttttgtttttgct

SEQ ID NO: 4229 - DNA, 20 bp, Artificial Sequence
  Synthetic oligonucleotide; TGG chr11 5184599 5184618 5184615 +
ttgctaagtgctaaatattc

SEQ ID NO: 4230 - DNA, 20 bp, Artificial Sequence
  Synthetic oligonucleotide; TGG chr11 5184619 5184638 5184635 +
tggtctcaaattttatatga

SEQ ID NO: 4231 - DNA, 20 bp, Artificial Sequence
  Synthetic oligonucleotide; TGG chr11 5184629 5184648 5184645 +
ttttatatgatggaaatgtt

SEQ ID NO: 4232 - DNA, 20 bp, Artificial Sequence
  Synthetic oligonucleotide; GGG chr11 5184630 5184649 5184646 +
tttatatgatggaaatgttt

SEQ ID NO: 4233 - DNA, 20 bp, Artificial Sequence
  Synthetic oligonucleotide; GAG chr11 5184644 5184663 5184660 +
atgtttgggtcccatttttt

SEQ ID NO: 4234 - DNA, 20 bp, Artificial Sequence
  Synthetic oligonucleotide; CAG chr11 5184650 5184669 5184666 +
gggtcccattttttgagtta

SEQ ID NO: 4235 - DNA, 20 bp, Artificial Sequence
  Synthetic oligonucleotide; TAG chr11 5184655 5184674 5184671 +
ccattttttgagttacagtt

SEQ ID NO: 4236 - DNA, 20 bp, Artificial Sequence
  Synthetic oligonucleotide; CAG chr11 5184675 5184694 5184691 +
tagaatttaaaatacccaca

SEQ ID NO: 4237 - DNA, 20 bp, Artificial Sequence
  Synthetic oligonucleotide; GAG chr11 5184680 5184699 5184696 +
tttaaaatacccacacagct

SEQ ID NO: 4238 - DNA, 20 bp, Artificial Sequence
  Synthetic oligonucleotide; AAG chr11 5184700 5184719 5184716 +
gagcaatttacccttgcttt

SEQ ID NO: 4239 - DNA, 20 bp, Artificial Sequence
  Synthetic oligonucleotide; TGG chr11 5184704 5184723 5184720 +
aatttacccttgctttaagt

SEQ ID NO: 4240 - DNA, 20 bp, Artificial Sequence
  Synthetic oligonucleotide; GAG chr11 5184710 5184729 5184726 +
cccttgctttaagttggaat

SEQ ID NO: 4241 - DNA, 20 bp, Artificial Sequence
  Synthetic oligonucleotide; AGG chr11 5184711 5184730 5184727 +
ccttgctttaagttggaatg

SEQ ID NO: 4242 - DNA, 20 bp, Artificial Sequence
  Synthetic oligonucleotide; AAG chr11 5184729 5184748 5184745 +
tgaggttctttaaaaatatt

SEQ ID NO: 4243 - DNA, 20 bp, Artificial Sequence
  Synthetic oligonucleotide; AAG chr11 5184742 5184761 5184758 +
aaatattaagataaaatttg

SEQ ID NO: 4244 - DNA, 20 bp, Artificial Sequence
  Synthetic oligonucleotide; TGG chr11 5184758 5184777 5184774 +
tttgaagttatttaactctg

SEQ ID NO: 4245 - DNA, 20 bp, Artificial Sequence
  Synthetic oligonucleotide; TAG chr11 5184818 5184837 5184834 +
taatatatatctcacattgt

SEQ ID NO: 4246 - DNA, 20 bp, Artificial Sequence
  Synthetic oligonucleotide; AAG chr11 5184829 5184848 5184845 +
tcacattgttagaatatttt

SEQ ID NO: 4247 - DNA, 20 bp, Artificial Sequence
  Synthetic oligonucleotide; CAG chr11 5184848 5184867 5184864 +
taagtaaactgttgatgttt

SEQ ID NO: 4248 - DNA, 20 bp, Artificial Sequence
  Synthetic oligonucleotide; GAG chr11 5184850 5184869 5184866 +
agtaaactgttgatgtttca

SEQ ID NO: 4249 - DNA, 20 bp, Artificial Sequence
  Synthetic oligonucleotide; AAG chr11 5184854 5184873 5184870 +
aactgttgatgtttcagaga

SEQ ID NO: 4250 - DNA, 20 bp, Artificial Sequence
  Synthetic oligonucleotide; AGG chr11 5184855 5184874 5184871 +
actgttgatgtttcagagaa

SEQ ID NO: 4251 - DNA, 20 bp, Artificial Sequence
  Synthetic oligonucleotide; AAG chr11 5184859 5184878 5184875 +
ttgatgtttcagagaaagga

SEQ ID NO: 4252 - DNA, 20 bp, Artificial Sequence
  Synthetic oligonucleotide; AAG chr11 5184872 5184891 5184888 +
gaaaggaaagaataattttg

SEQ ID NO: 4253 - DNA, 20 bp, Artificial Sequence
  Synthetic oligonucleotide; CAG chr11 5184886 5184905 5184902 +
attttgaagcattcctgaca

SEQ ID NO: 4254 - DNA, 20 bp, Artificial Sequence
  Synthetic oligonucleotide; TAG chr11 5184892 5184911 5184908 +
aagcattcctgacacagttc

SEQ ID NO: 4255 - DNA, 20 bp, Artificial Sequence
  Synthetic oligonucleotide; AGG chr11 5184893 5184912 5184909 +
agcattcctgacacagttct

SEQ ID NO: 4256 - DNA, 20 bp, Artificial Sequence
  Synthetic oligonucleotide; CAG chr11 5184897 5184916 5184913 +
ttcctgacacagttctaggc

SEQ ID NO: 4257 - DNA, 20 bp, Artificial Sequence
  Synthetic oligonucleotide; GAG chr11 5184899 5184918 5184915 +
cctgacacagttctaggcca

SEQ ID NO: 4258 - DNA, 20 bp, Artificial Sequence
  Synthetic oligonucleotide; GAG chr11 5184912 5184931 5184928 +
taggccagagccatgcatgt

SEQ ID NO: 4259 - DNA, 20 bp, Artificial Sequence
  Synthetic oligonucleotide; AAG chr11 5184917 5184936 5184933 +
cagagccatgcatgtgagtg

SEQ ID NO: 4260 - DNA, 20 bp, Artificial Sequence
  Synthetic oligonucleotide; TAG chr11 5184922 5184941 5184938 +
ccatgcatgtgagtgaagcg

SEQ ID NO: 4261 - DNA, 20 bp, Artificial Sequence
  Synthetic oligonucleotide; TAG chr11 5184928 5184947 5184944 +
atgtgagtgaagcgtagtta

SEQ ID NO: 4262 - DNA, 20 bp, Artificial Sequence
  Synthetic oligonucleotide; AAG chr11 5184931 5184950 5184947 +
tgagtgaagcgtagttatag

SEQ ID NO: 4263 - DNA, 20 bp, Artificial Sequence
  Synthetic oligonucleotide; GAG chr11 5184935 5184954 5184951 +
tgaagcgtagttatagaagt

SEQ ID NO: 4264 - DNA, 20 bp, Artificial Sequence
  Synthetic oligonucleotide; AGG chr11 5184936 5184955 5184952 +
gaagcgtagttatagaagtg

SEQ ID NO: 4265 - DNA, 20 bp, Artificial Sequence
  Synthetic oligonucleotide; GGG chr11 5184937 5184956 5184953 +
aagcgtagttatagaagtga

SEQ ID NO: 4266 - DNA, 20 bp, Artificial Sequence
  Synthetic oligonucleotide; CAG chr11 5184943 5184962 5184959 +
agttatagaagtgagggtta

SEQ ID NO: 4267 - DNA, 20 bp, Artificial Sequence
  Synthetic oligonucleotide; TGG chr11 5184950 5184969 5184966 +
gaagtgagggttacagtgac

SEQ ID NO: 4268 - DNA, 20 bp, Artificial Sequence
  Synthetic oligonucleotide; GGG chr11 5184951 5184970 5184967 +
aagtgagggttacagtgact

SEQ ID NO: 4269 - DNA, 20 bp, Artificial Sequence
  Synthetic oligonucleotide; GGG chr11 5184952 5184971 5184968 +
agtgagggttacagtgactg

SEQ ID NO: 4270 - DNA, 20 bp, Artificial Sequence
  Synthetic oligonucleotide; CAG chr11 5184961 5184980 5184977 +
tacagtgactggggcttcat

SEQ ID NO: 4271 - DNA, 20 bp, Artificial Sequence
  Synthetic oligonucleotide; AGG chr11 5184962 5184981 5184978 +
acagtgactggggcttcatc

SEQ ID NO: 4272 - DNA, 20 bp, Artificial Sequence
  Synthetic oligonucleotide; TAG chr11 5184969 5184988 5184985 +
ctggggcttcatcaggacat

SEQ ID NO: 4273 - DNA, 20 bp, Artificial Sequence
  Synthetic oligonucleotide; AGG chr11 5184970 5184989 5184986 +
tggggcttcatcaggacatt

SEQ ID NO: 4274 - DNA, 20 bp, Artificial Sequence
  Synthetic oligonucleotide; GGG chr11 5184971 5184990 5184987 +
ggggcttcatcaggacatta

SEQ ID NO: 4275 - DNA, 20 bp, Artificial Sequence
  Synthetic oligonucleotide; TGG chr11 5184975 5184994 5184991 +
cttcatcaggacattaggga

SEQ ID NO: 4276 - DNA, 20 bp, Artificial Sequence
  Synthetic oligonucleotide; GGG chr11 5184976 5184995 5184992 +
ttcatcaggacattagggat

SEQ ID NO: 4277 - DNA, 20 bp, Artificial Sequence
  Synthetic oligonucleotide; GAG chr11 5184978 5184997 5184994 +
catcaggacattagggatgg

SEQ ID NO: 4278 - DNA, 20 bp, Artificial Sequence
  Synthetic oligonucleotide; GAG chr11 5184980 5184999 5184996 +
tcaggacattagggatggga

SEQ ID NO: 4279 - DNA, 20 bp, Artificial Sequence
  Synthetic oligonucleotide; AAG chr11 5184983 5185002 5184999 +
ggacattagggatgggagag

SEQ ID NO: 4280 - DNA, 20 bp, Artificial Sequence
  Synthetic oligonucleotide; AAG chr11 5184991 5185010 5185007 +
gggatgggagagaagaatct

SEQ ID NO: 4281 - DNA, 20 bp, Artificial Sequence
  Synthetic oligonucleotide; CAG chr11 5185007 5185026 5185023 +
atctaagtgaaaaaaaaata

SEQ ID NO: 4282 - DNA, 20 bp, Artificial Sequence
  Synthetic oligonucleotide; AGG chr11 5185008 5185027 5185024 +
tctaagtgaaaaaaaaatac

SEQ ID NO: 4283 - DNA, 20 bp, Artificial Sequence
  Synthetic oligonucleotide; AAG chr11 5185015 5185034 5185031 +
gaaaaaaaaatacaggaatg

SEQ ID NO: 4284 - DNA, 20 bp, Artificial Sequence
  Synthetic oligonucleotide; AAG chr11 5185020 5185039 5185036 +
aaaaatacaggaatgaagat

SEQ ID NO: 4285 - DNA, 20 bp, Artificial Sequence
  Synthetic oligonucleotide; AGG chr11 5185021 5185040 5185037 +
aaaatacaggaatgaagata

SEQ ID NO: 4286 - DNA, 20 bp, Artificial Sequence
  Synthetic oligonucleotide; GGG chr11 5185022 5185041 5185038 +
aaatacaggaatgaagataa

SEQ ID NO: 4287 - DNA, 20 bp, Artificial Sequence
  Synthetic oligonucleotide; GGG chr11 5185023 5185042 5185039 +
aatacaggaatgaagataag

SEQ ID NO: 4288 - DNA, 20 bp, Artificial Sequence
  Synthetic oligonucleotide; GGG chr11 5185024 5185043 5185040 +
atacaggaatgaagataagg

SEQ ID NO: 4289 - DNA, 20 bp, Artificial Sequence
  Synthetic oligonucleotide; AAG chr11 5185028 5185047 5185044 +
aggaatgaagataaggggga

SEQ ID NO: 4290 - DNA, 20 bp, Artificial Sequence
  Synthetic oligonucleotide; CAG chr11 5185035 5185054 5185051 +
aagataagggggaaagaaaa

SEQ ID NO: 4291 - DNA, 20 bp, Artificial Sequence
  Synthetic oligonucleotide; TGG chr11 5185044 5185063 5185060 +
gggaaagaaaacagattttc

SEQ ID NO: 4292 - DNA, 20 bp, Artificial Sequence
  Synthetic oligonucleotide; TGG chr11 5185062 5185081 5185078 +
tctggcctttaaattttttc

SEQ ID NO: 4293 - DNA, 20 bp, Artificial Sequence
  Synthetic oligonucleotide; TGG chr11 5185084 5185103 5185100 +
gtgatcttttgtgataccta

SEQ ID NO: 4294 - DNA, 20 bp, Artificial Sequence
  Synthetic oligonucleotide; TAG chr11 5185152 5185171 5185168 +
atatgtgatgacccaaatta

SEQ ID NO: 4295 - DNA, 20 bp, Artificial Sequence
  Synthetic oligonucleotide; AGG chr11 5185153 5185172 5185169 +
tatgtgatgacccaaattat

SEQ ID NO: 4296 - DNA, 20 bp, Artificial Sequence
  Synthetic oligonucleotide; TGG chr11 5185158 5185177 5185174 +
gatgacccaaattataggcc

SEQ ID NO: 4297 - DNA, 20 bp, Artificial Sequence
  Synthetic oligonucleotide; GGG chr11 5185159 5185178 5185175 +
atgacccaaattataggcct

SEQ ID NO: 4298 - DNA, 20 bp, Artificial Sequence
  Synthetic oligonucleotide; TAG chr11 5185169 5185188 5185185 +
ttataggcctgggttccttg

SEQ ID NO: 4299 - DNA, 20 bp, Artificial Sequence
  Synthetic oligonucleotide; TAG chr11 5185180 5185199 5185196 +
ggttccttgtagcattattc

SEQ ID NO: 4300 - DNA, 20 bp, Artificial Sequence
  Synthetic oligonucleotide; AGG chr11 5185181 5185200 5185197 +
gttccttgtagcattattct

SEQ ID NO: 4301 - DNA, 20 bp, Artificial Sequence
  Synthetic oligonucleotide; CAG chr11 5185194 5185213 5185210 +
ttattctaggatatttctga

SEQ ID NO: 4302 - DNA, 20 bp, Artificial Sequence
  Synthetic oligonucleotide; CGG chr11 5185227 5185246 5185243 +
ctgaatcatgaatgtatcca

SEQ ID NO: 4303 - DNA, 20 bp, Artificial Sequence
  Synthetic oligonucleotide; GAG chr11 5185229 5185248 5185245 +
gaatcatgaatgtatccacg

SEQ ID NO: 4304 - DNA, 20 bp, Artificial Sequence
  Synthetic oligonucleotide; AAG chr11 5185234 5185253 5185250 +
atgaatgtatccacggagca

SEQ ID NO: 4305 - DNA, 20 bp, Artificial Sequence
  Synthetic oligonucleotide; TAG chr11 5185238 5185257 5185254 +
atgtatccacggagcaaaga

SEQ ID NO: 4306 - DNA, 20 bp, Artificial Sequence
  Synthetic oligonucleotide; TGG chr11 5185243 5185262 5185259 +
tccacggagcaaagatagtg

SEQ ID NO: 4307 - DNA, 20 bp, Artificial Sequence
  Synthetic oligonucleotide; TAG chr11 5185251 5185270 5185267 +
gcaaagatagtgtggtgtaa

SEQ ID NO: 4308 - DNA, 20 bp, Artificial Sequence
  Synthetic oligonucleotide; CAG chr11 5185257 5185276 5185273 +
atagtgtggtgtaatagaaa

SEQ ID NO: 4309 - DNA, 20 bp, Artificial Sequence
  Synthetic oligonucleotide; TAG chr11 5185262 5185281 5185278 +
gtggtgtaatagaaacagta

SEQ ID NO: 4310 - DNA, 20 bp, Artificial Sequence
  Synthetic oligonucleotide; AAG chr11 5185269 5185288 5185285 +
aatagaaacagtatagctct

SEQ ID NO: 4311 - DNA, 20 bp, Artificial Sequence
  Synthetic oligonucleotide; AGG chr11 5185270 5185289 5185286 +
atagaaacagtatagctcta

SEQ ID NO: 4312 - DNA, 20 bp, Artificial Sequence
  Synthetic oligonucleotide; TAG chr11 5185280 5185299 5185296 +
tatagctctaaggacatata

SEQ ID NO: 4313 - DNA, 20 bp, Artificial Sequence
  Synthetic oligonucleotide; TGG chr11 5185297 5185316 5185313 +
atatagttgtatttaaatac

SEQ ID NO: 4314 - DNA, 20 bp, Artificial Sequence
  Synthetic oligonucleotide; TGG chr11 5185327 5185346 5185343 +
ttattctgactctatgaccc

SEQ ID NO: 4315 - DNA, 20 bp, Artificial Sequence
  Synthetic oligonucleotide; TAG chr11 5185352 5185371 5185368 +
acgtcatttaatttaaactt

SEQ ID NO: 4316 - DNA, 20 bp, Artificial Sequence
  Synthetic oligonucleotide; AAG chr11 5185383 5185402 5185399 +
cttgtaaaatacctaacaat

SEQ ID NO: 4317 - DNA, 20 bp, Artificial Sequence
  Synthetic oligonucleotide; GAG chr11 5185402 5185421 5185418 +
taagcataaatttaaaatgt

SEQ ID NO: 4318 - DNA, 20 bp, Artificial Sequence
  Synthetic oligonucleotide; AAG chr11 5185414 5185433 5185430 +
taaaatgtgagtcttttctg

SEQ ID NO: 4319 - DNA, 20 bp, Artificial Sequence
  Synthetic oligonucleotide; CAG chr11 5185418 5185437 5185434 +
atgtgagtcttttctgaagt

SEQ ID NO: 4320 - DNA, 20 bp, Artificial Sequence
  Synthetic oligonucleotide; TAG chr11 5185426 5185445 5185442 +
cttttctgaagtcagtgtct

SEQ ID NO: 4321 - DNA, 20 bp, Artificial Sequence
  Synthetic oligonucleotide; AGG chr11 5185427 5185446 5185443 +
ttttctgaagtcagtgtctt

SEQ ID NO: 4322 - DNA, 20 bp, Artificial Sequence
  Synthetic oligonucleotide; AAG chr11 5185430 5185449 5185446 +
tctgaagtcagtgtcttagg

SEQ ID NO: 4323 - DNA, 20 bp, Artificial Sequence
  Synthetic oligonucleotide; AGG chr11 5185431 5185450 5185447 +
ctgaagtcagtgtcttagga

SEQ ID NO: 4324 - DNA, 20 bp, Artificial Sequence
  Synthetic oligonucleotide; TAG chr11 5185434 5185453 5185450 +
aagtcagtgtcttaggaagg

SEQ ID NO: 4325 - DNA, 20 bp, Artificial Sequence
  Synthetic oligonucleotide; AAG chr11 5185443 5185462 5185459 +
tcttaggaaggtagctacat

SEQ ID NO: 4326 - DNA, 20 bp, Artificial Sequence
  Synthetic oligonucleotide; TAG chr11 5185470 5185489 5185486 +
ttatatctctatcccaacaa

SEQ ID NO: 4327 - DNA, 20 bp, Artificial Sequence
  Synthetic oligonucleotide; CAG chr11 5185480 5185499 5185496 +
atcccaacaatagatgacat

SEQ ID NO: 4328 - DNA, 20 bp, Artificial Sequence
  Synthetic oligonucleotide; AGG chr11 5185481 5185500 5185497 +
tcccaacaatagatgacatc

SEQ ID NO: 4329 - DNA, 20 bp, Artificial Sequence
  Synthetic oligonucleotide; TAG chr11 5185499 5185518 5185515 +
tcaggacactaacaaaattg

SEQ ID NO: 4330 - DNA, 20 bp, Artificial Sequence
  Synthetic oligonucleotide; AAG chr11 5185507 5185526 5185523 +
ctaacaaaattgtagcaatt

SEQ ID NO: 4331 - DNA, 20 bp, Artificial Sequence
  Synthetic oligonucleotide; TGG chr11 5185528 5185547 5185544 +
agaccaaaattattgtcaac

SEQ ID NO: 4332 - DNA, 20 bp, Artificial Sequence
  Synthetic oligonucleotide; AAG chr11 5185534 5185553 5185550 +
aaattattgtcaactggaat

SEQ ID NO: 4333 - DNA, 20 bp, Artificial Sequence
  Synthetic oligonucleotide; CAG chr11 5185546 5185565 5185562 +
actggaataagtttaacttt

SEQ ID NO: 4334 - DNA, 20 bp, Artificial Sequence
  Synthetic oligonucleotide; AGG chr11 5185547 5185566 5185563 +
ctggaataagtttaactttc

SEQ ID NO: 4335 - DNA, 20 bp, Artificial Sequence
  Synthetic oligonucleotide; CAG chr11 5185554 5185573 5185570 +
aagtttaactttcaggactt

SEQ ID NO: 4336 - DNA, 20 bp, Artificial Sequence
  Synthetic oligonucleotide; AGG chr11 5185555 5185574 5185571 +
agtttaactttcaggacttc

SEQ ID NO: 4337 - DNA, 20 bp, Artificial Sequence
  Synthetic oligonucleotide; GAG chr11 5185576 5185595 5185592 +
ggcttattatccatcaaact

SEQ ID NO: 4338 - DNA, 20 bp, Artificial Sequence
  Synthetic oligonucleotide; TAG chr11 5185591 5185610 5185607 +
aaactgagattgaattgatt

SEQ ID NO: 4339 - DNA, 20 bp, Artificial Sequence
  Synthetic oligonucleotide; GAG chr11 5185593 5185612 5185609 +
actgagattgaattgattta

SEQ ID NO: 4340 - DNA, 20 bp, Artificial Sequence
  Synthetic oligonucleotide; TAG chr11 5185609 5185628 5185625 +
tttagagtatccataaatac

SEQ ID NO: 4341 - DNA, 20 bp, Artificial Sequence
  Synthetic oligonucleotide; AGG chr11 5185610 5185629 5185626 +
ttagagtatccataaatact

SEQ ID NO: 4342 - DNA, 20 bp, Artificial Sequence
  Synthetic oligonucleotide; TGG chr11 5185644 5185663 5185660 +
ttttaataaatttcttatac

SEQ ID NO: 4343 - DNA, 20 bp, Artificial Sequence
  Synthetic oligonucleotide; GGG chr11 5185645 5185664 5185661 +
tttaataaatttcttatact

SEQ ID NO: 4344 - DNA, 20 bp, Artificial Sequence
  Synthetic oligonucleotide; TGG chr11 5185652 5185671 5185668 +
aatttcttatactgggcaca

SEQ ID NO: 4345 - DNA, 20 bp, Artificial Sequence
  Synthetic oligonucleotide; TGG chr11 5185662 5185681 5185678 +
actgggcacatggtatcaat

SEQ ID NO: 4346 - DNA, 20 bp, Artificial Sequence
  Synthetic oligonucleotide; AAG chr11 5185699 5185718 5185715 +
tatctgtcatttacttttat

SEQ ID NO: 4347 - DNA, 20 bp, Artificial Sequence
  Synthetic oligonucleotide; AGG chr11 5185700 5185719 5185716 +
atctgtcatttacttttata

SEQ ID NO: 4348 - DNA, 20 bp, Artificial Sequence
  Synthetic oligonucleotide; TAG chr11 5185709 5185728 5185725 +
ttacttttataaggtgcaaa

SEQ ID NO: 4349 - DNA, 20 bp, Artificial Sequence
  Synthetic oligonucleotide; CAG chr11 5185714 5185733 5185730 +
tttataaggtgcaaatagtt

SEQ ID NO: 4350 - DNA, 20 bp, Artificial Sequence
  Synthetic oligonucleotide; TGG chr11 5185719 5185738 5185735 +
aaggtgcaaatagttcagca

SEQ ID NO: 4351 - DNA, 20 bp, Artificial Sequence
  Synthetic oligonucleotide; CAG chr11 5185725 5185744 5185741 +
caaatagttcagcatggtga

SEQ ID NO: 4352 - DNA, 20 bp, Artificial Sequence
  Synthetic oligonucleotide; TGG chr11 5185745 5185764 5185761 +
cagacacatgaattttgaaa

SEQ ID NO: 4353 - DNA, 20 bp, Artificial Sequence
  Synthetic oligonucleotide; GAG chr11 5185747 5185766 5185763 +
gacacatgaattttgaaatg

SEQ ID NO: 4354 - DNA, 20 bp, Artificial Sequence
  Synthetic oligonucleotide; CAG chr11 5185770 5185789 5185786 +
ttttatttttgccccatcac

SEQ ID NO: 4355 - DNA, 20 bp, Artificial Sequence
  Synthetic oligonucleotide; TAG chr11 5185791 5185810 5185807 +
agtataatatctttgttaca

SEQ ID NO: 4356 - DNA, 20 bp, Artificial Sequence
  Synthetic oligonucleotide; AGG chr11 5185792 5185811 5185808 +
gtataatatctttgttacat

SEQ ID NO: 4357 - DNA, 20 bp, Artificial Sequence
  Synthetic oligonucleotide; GGG chr11 5185793 5185812 5185809 +
tataatatctttgttacata

SEQ ID NO: 4358 - DNA, 20 bp, Artificial Sequence
  Synthetic oligonucleotide; AAG chr11 5185796 5185815 5185812 +
aatatctttgttacataggg

SEQ ID NO: 4359 - DNA, 20 bp, Artificial Sequence
  Synthetic oligonucleotide; GAG chr11 5185798 5185817 5185814 +
tatctttgttacatagggaa

SEQ ID NO: 4360 - DNA, 20 bp, Artificial Sequence
  Synthetic oligonucleotide; GAG chr11 5185800 5185819 5185816 +
tctttgttacatagggaaga

SEQ ID NO: 4361 - DNA, 20 bp, Artificial Sequence
  Synthetic oligonucleotide; TGG chr11 5185813 5185832 5185829 +
gggaagagagttaaaaattt

SEQ ID NO: 4362 - DNA, 20 bp, Artificial Sequence
  Synthetic oligonucleotide; GAG chr11 5185815 5185834 5185831 +
gaagagagttaaaaattttg

SEQ ID NO: 4363 - DNA, 20 bp, Artificial Sequence
  Synthetic oligonucleotide; CAG chr11 5185821 5185840 5185837 +
agttaaaaattttggagtgc

SEQ ID NO: 4364 - DNA, 20 bp, Artificial Sequence
  Synthetic oligonucleotide; TAG chr11 5185840 5185859 5185856 +
ccagcttcttaatctgtgcc

SEQ ID NO: 4365 - DNA, 20 bp, Artificial Sequence
  Synthetic oligonucleotide; GAG chr11 5185856 5185875 5185872 +
tgcctagactattacctgat

SEQ ID NO: 4366 - DNA, 20 bp, Artificial Sequence
  Synthetic oligonucleotide; TAG chr11 5185862 5185881 5185878 +
gactattacctgatgagtaa

SEQ ID NO: 4367 - DNA, 20 bp, Artificial Sequence
  Synthetic oligonucleotide; CAG chr11 5185876 5185895 5185892 +
gagtaatagtcaataaacta

SEQ ID NO: 4368 - DNA, 20 bp, Artificial Sequence
  Synthetic oligonucleotide; GAG chr11 5185928 5185947 5185944 +
tactaaaattttttattact

SEQ ID NO: 4369 - DNA, 20 bp, Artificial Sequence
  Synthetic oligonucleotide; TAG chr11 5185946 5185965 5185962 +
ctgagccttgttttaactac

SEQ ID NO: 4370 - DNA, 20 bp, Artificial Sequence
  Synthetic oligonucleotide; AAG chr11 5185996 5186015 5186012 +
acattcaaatctgcatatca

SEQ ID NO: 4371 - DNA, 20 bp, Artificial Sequence
  Synthetic oligonucleotide; GAG chr11 5186004 5186023 5186020 +
atctgcatatcaaagaaaat

SEQ ID NO: 4372 - DNA, 20 bp, Artificial Sequence
  Synthetic oligonucleotide; AAG chr11 5186026 5186045 5186042 +
gcattatttaaacatattct

SEQ ID NO: 4373 - DNA, 20 bp, Artificial Sequence
  Synthetic oligonucleotide; GAG chr11 5186028 5186047 5186044 +
attatttaaacatattctaa

SEQ ID NO: 4374 - DNA, 20 bp, Artificial Sequence
  Synthetic oligonucleotide; AAG chr11 5186071 5186090 5186087 +
gaaaatgacttacttaatac

SEQ ID NO: 4375 - DNA, 20 bp, Artificial Sequence
  Synthetic oligonucleotide; CAG chr11 5186107 5186126 5186123 +
ctacaattgcaaatcaactc

SEQ ID NO: 4376 - DNA, 20 bp, Artificial Sequence
  Synthetic oligonucleotide; AAG chr11 5186113 5186132 5186129 +
ttgcaaatcaactccagcta

SEQ ID NO: 4377 - DNA, 20 bp, Artificial Sequence
  Synthetic oligonucleotide; AAG chr11 5186118 5186137 5186134 +
aatcaactccagctaaagcc

SEQ ID NO: 4378 - DNA, 20 bp, Artificial Sequence
  Synthetic oligonucleotide; TAG chr11 5186123 5186142 5186139 +
actccagctaaagccaagtc

SEQ ID NO: 4379 - DNA, 20 bp, Artificial Sequence
  Synthetic oligonucleotide; TGG chr11 5186133 5186152 5186149 +
aagccaagtctagtattcca

SEQ ID NO: 4380 - DNA, 20 bp, Artificial Sequence
  Synthetic oligonucleotide; GGG chr11 5186134 5186153 5186150 +
agccaagtctagtattccat

SEQ ID NO: 4381 - DNA, 20 bp, Artificial Sequence
  Synthetic oligonucleotide; AAG chr11 5186146 5186165 5186162 +
tattccatgggtcaaaaatc

SEQ ID NO: 4382 - DNA, 20 bp, Artificial Sequence
  Synthetic oligonucleotide; AGG chr11 5186147 5186166 5186163 +
attccatgggtcaaaaatca

SEQ ID NO: 4383 - DNA, 20 bp, Artificial Sequence
  Synthetic oligonucleotide; TAG chr11 5186157 5186176 5186173 +
tcaaaaatcaaggaaaatgt

SEQ ID NO: 4384 - DNA, 20 bp, Artificial Sequence
  Synthetic oligonucleotide; AAG chr11 5186166 5186185 5186182 +
aaggaaaatgttagatgatt

SEQ ID NO: 4385 - DNA, 20 bp, Artificial Sequence
  Synthetic oligonucleotide; CGG chr11 5186173 5186192 5186189 +
atgttagatgattaagttat

SEQ ID NO: 4386 - DNA, 20 bp, Artificial Sequence
  Synthetic oligonucleotide; AAG chr11 5186176 5186195 5186192 +
ttagatgattaagttatcgg

SEQ ID NO: 4387 - DNA, 20 bp, Artificial Sequence
  Synthetic oligonucleotide; GAG chr11 5186182 5186201 5186198 +
gattaagttatcggaagaat

SEQ ID NO: 4388 - DNA, 20 bp, Artificial Sequence
  Synthetic oligonucleotide; CAG chr11 5186194 5186213 5186210 +
ggaagaatgagctgcttctg

SEQ ID NO: 4389 - DNA, 20 bp, Artificial Sequence
  Synthetic oligonucleotide; TGG chr11 5186217 5186236 5186233 +
tttcttgccttttttttttc

SEQ ID NO: 4390 - DNA, 20 bp, Artificial Sequence
  Synthetic oligonucleotide; AAG chr11 5186233 5186252 5186249 +
tttctggtgttattttctac

SEQ ID NO: 4391 - DNA, 20 bp, Artificial Sequence
  Synthetic oligonucleotide; GAG chr11 5186244 5186263 5186260 +
attttctacaagttttcatt

SEQ ID NO: 4392 - DNA, 20 bp, Artificial Sequence
  Synthetic oligonucleotide; CAG chr11 5186254 5186273 5186270 +
agttttcattgagcataact

SEQ ID NO: 4393 - DNA, 20 bp, Artificial Sequence
  Synthetic oligonucleotide; TAG chr11 5186276 5186295 5186292 +
gtttacttacttgcattttc

SEQ ID NO: 4394 - DNA, 20 bp, Artificial Sequence
  Synthetic oligonucleotide; AAG chr11 5186286 5186305 5186302 +
ttgcattttctagaatcctg

SEQ ID NO: 4395 - DNA, 20 bp, Artificial Sequence
  Synthetic oligonucleotide; TAG chr11 5186294 5186313 5186310 +
tctagaatcctgaagatatt

SEQ ID NO: 4396 - DNA, 20 bp, Artificial Sequence
  Synthetic oligonucleotide; CAG chr11 5186297 5186316 5186313 +
agaatcctgaagatatttag

SEQ ID NO: 4397 - DNA, 20 bp, Artificial Sequence
  Synthetic oligonucleotide; AGG chr11 5186298 5186317 5186314 +
gaatcctgaagatatttagc

SEQ ID NO: 4398 - DNA, 20 bp, Artificial Sequence
  Synthetic oligonucleotide; GAG chr11 5186303 5186322 5186319 +
ctgaagatatttagcaggtt

SEQ ID NO: 4399 - DNA, 20 bp, Artificial Sequence
  Synthetic oligonucleotide; GAG chr11 5186305 5186324 5186321 +
gaagatatttagcaggttga

SEQ ID NO: 4400 - DNA, 20 bp, Artificial Sequence
  Synthetic oligonucleotide; AGG chr11 5186306 5186325 5186322 +
aagatatttagcaggttgag

SEQ ID NO: 4401 - DNA, 20 bp, Artificial Sequence
  Synthetic oligonucleotide; GAG chr11 5186308 5186327 5186324 +
gatatttagcaggttgagag

SEQ ID NO: 4402 - DNA, 20 bp, Artificial Sequence
  Synthetic oligonucleotide; AAG chr11 5186325 5186344 5186341 +
gaggagacaaaataaatgca

SEQ ID NO: 4403 - DNA, 20 bp, Artificial Sequence
  Synthetic oligonucleotide; GAG chr11 5186327 5186346 5186343 +
ggagacaaaataaatgcaaa

SEQ ID NO: 4404 - DNA, 20 bp, Artificial Sequence
  Synthetic oligonucleotide; TAG chr11 5186332 5186351 5186348 +
caaaataaatgcaaagagat

SEQ ID NO: 4405 - DNA, 20 bp, Artificial Sequence
  Synthetic oligonucleotide; AGG chr11 5186333 5186352 5186349 +
aaaataaatgcaaagagatt

SEQ ID NO: 4406 - DNA, 20 bp, Artificial Sequence
  Synthetic oligonucleotide; TGG chr11 5186341 5186360 5186357 +
tgcaaagagattaggaaatc

SEQ ID NO: 4407 - DNA, 20 bp, Artificial Sequence
  Synthetic oligonucleotide; AAG chr11 5186364 5186383 5186380 +
aactatttatacttctttta

SEQ ID NO: 4408 - DNA, 20 bp, Artificial Sequence
  Synthetic oligonucleotide; TGG chr11 5186374 5186393 5186390 +
acttcttttaaagcatgtct

SEQ ID NO: 4409 - DNA, 20 bp, Artificial Sequence
  Synthetic oligonucleotide; GGG chr11 5186375 5186394 5186391 +
cttcttttaaagcatgtctt

SEQ ID NO: 4410 - DNA, 20 bp, Artificial Sequence
  Synthetic oligonucleotide; AAG chr11 5186381 5186400 5186397 +
ttaaagcatgtcttgggccc

SEQ ID NO: 4411 - DNA, 20 bp, Artificial Sequence
  Synthetic oligonucleotide; AGG chr11 5186382 5186401 5186398 +
taaagcatgtcttgggccca

SEQ ID NO: 4412 - DNA, 20 bp, Artificial Sequence
  Synthetic oligonucleotide; CAG chr11 5186389 5186408 5186405 +
tgtcttgggcccaaggtttt

SEQ ID NO: 4413 - DNA, 20 bp, Artificial Sequence
  Synthetic oligonucleotide; AAG chr11 5186395 5186414 5186411 +
gggcccaaggttttcagctt

SEQ ID NO: 4414 - DNA, 20 bp, Artificial Sequence
  Synthetic oligonucleotide; GAG chr11 5186397 5186416 5186413 +
gcccaaggttttcagcttaa

SEQ ID NO: 4415 - DNA, 20 bp, Artificial Sequence
  Synthetic oligonucleotide; AGG chr11 5186398 5186417 5186414 +
cccaaggttttcagcttaag

SEQ ID NO: 4416 - DNA, 20 bp, Artificial Sequence
  Synthetic oligonucleotide; TGG chr11 5186420 5186439 5186436 +
gacgaattttactcctccca

SEQ ID NO: 4417 - DNA, 20 bp, Artificial Sequence
  Synthetic oligonucleotide; AAG chr11 5186423 5186442 5186439 +
gaattttactcctcccatgg

SEQ ID NO: 4418 - DNA, 20 bp, Artificial Sequence
  Synthetic oligonucleotide; AGG chr11 5186424 5186443 5186440 +
aattttactcctcccatgga

SEQ ID NO: 4419 - DNA, 20 bp, Artificial Sequence
  Synthetic oligonucleotide; GAG chr11 5186426 5186445 5186442 +
ttttactcctcccatggaag

SEQ ID NO: 4420 - DNA, 20 bp, Artificial Sequence
  Synthetic oligonucleotide; CAG chr11 5186435 5186454 5186451 +
tcccatggaaggagatgaca

SEQ ID NO: 4421 - DNA, 20 bp, Artificial Sequence
  Synthetic oligonucleotide; GAG chr11 5186437 5186456 5186453 +
ccatggaaggagatgacaca

SEQ ID NO: 4422 - DNA, 20 bp, Artificial Sequence
  Synthetic oligonucleotide; TGG chr11 5186447 5186466 5186463 +
agatgacacagagctgcttc

SEQ ID NO: 4423 - DNA, 20 bp, Artificial Sequence
  Synthetic oligonucleotide; TAG chr11 5186454 5186473 5186470 +
acagagctgcttctggtaca

SEQ ID NO: 4424 - DNA, 20 bp, Artificial Sequence
  Synthetic oligonucleotide; CAG chr11 5186461 5186480 5186477 +
tgcttctggtacatagtcca

SEQ ID NO: 4425 - DNA, 20 bp, Artificial Sequence
  Synthetic oligonucleotide; AGG chr11 5186462 5186481 5186478 +
gcttctggtacatagtccac

SEQ ID NO: 4426 - DNA, 20 bp, Artificial Sequence
  Synthetic oligonucleotide; GGG chr11 5186463 5186482 5186479 +
cttctggtacatagtccaca

SEQ ID NO: 4427 - DNA, 20 bp, Artificial Sequence
  Synthetic oligonucleotide; GAG chr11 5186465 5186484 5186481 +
tctggtacatagtccacagg

SEQ ID NO: 4428 - DNA, 20 bp, Artificial Sequence
  Synthetic oligonucleotide; CAG chr11 5186515 5186534 5186531 +
atttgtgcattttttttctt

SEQ ID NO: 4429 - DNA, 20 bp, Artificial Sequence
  Synthetic oligonucleotide; AAG chr11 5186537 5186556 5186553 +
gccaccactctctgacacct

SEQ ID NO: 4430 - DNA, 20 bp, Artificial Sequence
  Synthetic oligonucleotide; CAG chr11 5186562 5186581 5186578 +
aatacatacatctacatgtc

SEQ ID NO: 4431 - DNA, 20 bp, Artificial Sequence
  Synthetic oligonucleotide; AGG chr11 5186563 5186582 5186579 +
atacatacatctacatgtcc

SEQ ID NO: 4432 - DNA, 20 bp, Artificial Sequence
  Synthetic oligonucleotide; GAG chr11 5186597 5186616 5186613 +
tgtcatatattgtttccaat

SEQ ID NO: 4433 - DNA, 20 bp, Artificial Sequence
  Synthetic oligonucleotide; TGG chr11 5186604 5186623 5186620 +
tattgtttccaatgagccat

SEQ ID NO: 4434 - DNA, 20 bp, Artificial Sequence
  Synthetic oligonucleotide; TAG chr11 5186613 5186632 5186629 +
caatgagccattggcaaata

SEQ ID NO: 4435 - DNA, 20 bp, Artificial Sequence
  Synthetic oligonucleotide; AGG chr11 5186614 5186633 5186630 +
aatgagccattggcaaatat

SEQ ID NO: 4436 - DNA, 20 bp, Artificial Sequence
  Synthetic oligonucleotide; AAG chr11 5186622 5186641 5186638 +
attggcaaatataggttgca

SEQ ID NO: 4437 - DNA, 20 bp, Artificial Sequence
  Synthetic oligonucleotide; AGG chr11 5186623 5186642 5186639 +
ttggcaaatataggttgcaa

SEQ ID NO: 4438 - DNA, 20 bp, Artificial Sequence
  Synthetic oligonucleotide; GAG chr11 5186625 5186644 5186641 +
ggcaaatataggttgcaaag

SEQ ID NO: 4439 - DNA, 20 bp, Artificial Sequence
  Synthetic oligonucleotide; TGG chr11 5186633 5186652 5186649 +
taggttgcaaaggagacatg

SEQ ID NO: 4440 - DNA, 20 bp, Artificial Sequence
  Synthetic oligonucleotide; GGG chr11 5186634 5186653 5186650 +
aggttgcaaaggagacatgt

SEQ ID NO: 4441 - DNA, 20 bp, Artificial Sequence
  Synthetic oligonucleotide; GAG chr11 5186636 5186655 5186652 +
gttgcaaaggagacatgtgg

SEQ ID NO: 4442 - DNA, 20 bp, Artificial Sequence
  Synthetic oligonucleotide; AAG chr11 5186639 5186658 5186655 +
gcaaaggagacatgtgggag

SEQ ID NO: 4443 - DNA, 20 bp, Artificial Sequence
  Synthetic oligonucleotide; AGG chr11 5186640 5186659 5186656 +
caaaggagacatgtgggaga

SEQ ID NO: 4444 - DNA, 20 bp, Artificial Sequence
  Synthetic oligonucleotide; TAG chr11 5186656 5186675 5186672 +
gagaaggactttacacatct

SEQ ID NO: 4445 - DNA, 20 bp, Artificial Sequence
  Synthetic oligonucleotide; TGG chr11 5186660 5186679 5186676 +
aggactttacacatcttaga

SEQ ID NO: 4446 - DNA, 20 bp, Artificial Sequence
  Synthetic oligonucleotide; AAG chr11 5186670 5186689 5186686 +
acatcttagatggcacctaa

SEQ ID NO: 4447 - DNA, 20 bp, Artificial Sequence
  Synthetic oligonucleotide; AAG chr11 5186706 5186725 5186722 +
tttatttccctttaattttt

SEQ ID NO: 4448 - DNA, 20 bp, Artificial Sequence
  Synthetic oligonucleotide; AGG chr11 5186707 5186726 5186723 +
ttatttccctttaattttta

SEQ ID NO: 4449 - DNA, 20 bp, Artificial Sequence
  Synthetic oligonucleotide; TGG chr11 5186735 5186754 5186751 +
ttgctttccctgctttttct

SEQ ID NO: 4450 - DNA, 20 bp, Artificial Sequence
  Synthetic oligonucleotide; TGG chr11 5186743 5186762 5186759 +
cctgctttttcttggtcaca

SEQ ID NO: 4451 - DNA, 20 bp, Artificial Sequence
  Synthetic oligonucleotide; TGG chr11 5186750 5186769 5186766 +
tttcttggtcacatggtaaa

SEQ ID NO: 4452 - DNA, 20 bp, Artificial Sequence
  Synthetic oligonucleotide; GGG chr11 5186751 5186770 5186767 +
ttcttggtcacatggtaaat

SEQ ID NO: 4453 - DNA, 20 bp, Artificial Sequence
  Synthetic oligonucleotide; CAG chr11 5186755 5186774 5186771 +
tggtcacatggtaaatgggt

SEQ ID NO: 4454 - DNA, 20 bp, Artificial Sequence
  Synthetic oligonucleotide; AAG chr11 5186764 5186783 5186780 +
ggtaaatgggtcagaatctg

SEQ ID NO: 4455 - DNA, 20 bp, Artificial Sequence
  Synthetic oligonucleotide; AGG chr11 5186765 5186784 5186781 +
gtaaatgggtcagaatctga

SEQ ID NO: 4456 - DNA, 20 bp, Artificial Sequence
  Synthetic oligonucleotide; GGG chr11 5186766 5186785 5186782 +
taaatgggtcagaatctgaa

SEQ ID NO: 4457 - DNA, 20 bp, Artificial Sequence
  Synthetic oligonucleotide; AAG chr11 5186771 5186790 5186787 +
gggtcagaatctgaagggcc

SEQ ID NO: 4458 - DNA, 20 bp, Artificial Sequence
  Synthetic oligonucleotide; TAG chr11 5186783 5186802 5186799 +
gaagggccaagaaattatat

SEQ ID NO: 4459 - DNA, 20 bp, Artificial Sequence
  Synthetic oligonucleotide; TAG chr11 5186792 5186811 5186808 +
agaaattatattagctactg

SEQ ID NO: 4460 - DNA, 20 bp, Artificial Sequence
  Synthetic oligonucleotide; AAG chr11 5186811 5186830 5186827 +
gtagatatcccattctcttg

SEQ ID NO: 4461 - DNA, 20 bp, Artificial Sequence
  Synthetic oligonucleotide; AGG chr11 5186812 5186831 5186828 +
tagatatcccattctcttga

SEQ ID NO: 4462 - DNA, 20 bp, Artificial Sequence
  Synthetic oligonucleotide; GAG chr11 5186825 5186844 5186841 +
ctcttgaaggatactttaat

SEQ ID NO: 4463 - DNA, 20 bp, Artificial Sequence
  Synthetic oligonucleotide; AGG chr11 5186826 5186845 5186842 +
tcttgaaggatactttaatg

SEQ ID NO: 4464 - DNA, 20 bp, Artificial Sequence
  Synthetic oligonucleotide; CAG chr11 5186833 5186852 5186849 +
ggatactttaatgaggaata

SEQ ID NO: 4465 - DNA, 20 bp, Artificial Sequence
  Synthetic oligonucleotide; AAG chr11 5186839 5186858 5186855 +
tttaatgaggaatacagatg

SEQ ID NO: 4466 - DNA, 20 bp, Artificial Sequence
  Synthetic oligonucleotide; AAG chr11 5186847 5186866 5186863 +
ggaatacagatgaagataaa

SEQ ID NO: 4467 - DNA, 20 bp, Artificial Sequence
  Synthetic oligonucleotide; TAG chr11 5186851 5186870 5186867 +
tacagatgaagataaaaaga

SEQ ID NO: 4468 - DNA, 20 bp, Artificial Sequence
  Synthetic oligonucleotide; TGG chr11 5186875 5186894 5186891 +
aacaaataccatgatattca

SEQ ID NO: 4469 - DNA, 20 bp, Artificial Sequence
  Synthetic oligonucleotide; TGG chr11 5186888 5186907 5186904 +
atattcatggaattaaaaac

SEQ ID NO: 4470 - DNA, 20 bp, Artificial Sequence
  Synthetic oligonucleotide; AAG chr11 5186903 5186922 5186919 +
aaaactggcttcacactgat

SEQ ID NO: 4471 - DNA, 20 bp, Artificial Sequence
  Synthetic oligonucleotide; CAG chr11 5186907 5186926 5186923 +
ctggcttcacactgataagc

SEQ ID NO: 4472 - DNA, 20 bp, Artificial Sequence
  Synthetic oligonucleotide; TGG chr11 5186915 5186934 5186931 +
acactgataagccagattta

SEQ ID NO: 4473 - DNA, 20 bp, Artificial Sequence
  Synthetic oligonucleotide; GAG chr11 5186917 5186936 5186933 +
actgataagccagatttatg

SEQ ID NO: 4474 - DNA, 20 bp, Artificial Sequence
  Synthetic oligonucleotide; GAG chr11 5186919 5186938 5186935 +
tgataagccagatttatgga

SEQ ID NO: 4475 - DNA, 20 bp, Artificial Sequence
  Synthetic oligonucleotide; GAG chr11 5186921 5186940 5186937 +
ataagccagatttatggaga

SEQ ID NO: 4476 - DNA, 20 bp, Artificial Sequence
  Synthetic oligonucleotide; AAG chr11 5186942 5186961 5186958 +
agatgtttccttattctctc

SEQ ID NO: 4477 - DNA, 20 bp, Artificial Sequence
  Synthetic oligonucleotide; TGG chr11 5186945 5186964 5186961 +
tgtttccttattctctcaag

SEQ ID NO: 4478 - DNA, 20 bp, Artificial Sequence
  Synthetic oligonucleotide; GAG chr11 5186947 5186966 5186963 +
tttccttattctctcaagtg

SEQ ID NO: 4479 - DNA, 20 bp, Artificial Sequence
  Synthetic oligonucleotide; AAG chr11 5186985 5187004 5187001 +
tgattttctgatatttttca

SEQ ID NO: 4480 - DNA, 20 bp, Artificial Sequence
  Synthetic oligonucleotide; TAG chr11 5186994 5187013 5187010 +
gatatttttcaaagaatccc

SEQ ID NO: 4481 - DNA, 20 bp, Artificial Sequence
  Synthetic oligonucleotide; AAG chr11 5186997 5187016 5187013 +
atttttcaaagaatccctag

SEQ ID NO: 4482 - DNA, 20 bp, Artificial Sequence
  Synthetic oligonucleotide; TAG chr11 5187013 5187032 5187029 +
ctagaagcttttttcaccta

SEQ ID NO: 4483 - DNA, 20 bp, Artificial Sequence
  Synthetic oligonucleotide; TAG chr11 5187016 5187035 5187032 +
gaagcttttttcacctatag

SEQ ID NO: 4484 - DNA, 20 bp, Artificial Sequence
  Synthetic oligonucleotide; TAG chr11 5187026 5187045 5187042 +
tcacctatagtagtaaaact

SEQ ID NO: 4485 - DNA, 20 bp, Artificial Sequence
  Synthetic oligonucleotide; TAG chr11 5187039 5187058 5187055 +
taaaacttagtaaaaaaaaa

SEQ ID NO: 4486 - DNA, 20 bp, Artificial Sequence
  Synthetic oligonucleotide; CAG chr11 5187074 5187093 5187090 +
ataaatatgatgtttgacat

SEQ ID NO: 4487 - DNA, 20 bp, Artificial Sequence
  Synthetic oligonucleotide; TGG chr11 5187088 5187107 5187104 +
tgacatcagctgaccctgac

SEQ ID NO: 4488 - DNA, 20 bp, Artificial Sequence
  Synthetic oligonucleotide; TGG chr11 5187102 5187121 5187118 +
cctgactggatgatcttgat

SEQ ID NO: 4489 - DNA, 20 bp, Artificial Sequence
  Synthetic oligonucleotide; TAG chr11 5187109 5187128 5187125 +
ggatgatcttgattggatgc

SEQ ID NO: 4490 - DNA, 20 bp, Artificial Sequence
  Synthetic oligonucleotide; AGG chr11 5187110 5187129 5187126 +
gatgatcttgattggatgct

SEQ ID NO: 4491 - DNA, 20 bp, Artificial Sequence
  Synthetic oligonucleotide; AAG chr11 5187114 5187133 5187130 +
atcttgattggatgctaggc

SEQ ID NO: 4492 - DNA, 20 bp, Artificial Sequence
  Synthetic oligonucleotide; CAG chr11 5187121 5187140 5187137 +
ttggatgctaggcaagtgcc

SEQ ID NO: 4493 - DNA, 20 bp, Artificial Sequence
  Synthetic oligonucleotide; AGG chr11 5187122 5187141 5187138 +
tggatgctaggcaagtgccc

SEQ ID NO: 4494 - DNA, 20 bp, Artificial Sequence
  Synthetic oligonucleotide; CAG chr11 5187134 5187153 5187150 +
aagtgcccaggtcctccaat

SEQ ID NO: 4495 - DNA, 20 bp, Artificial Sequence
  Synthetic oligonucleotide; TAG chr11 5187142 5187161 5187158 +
aggtcctccaatcagtcatc

SEQ ID NO: 4496 - DNA, 20 bp, Artificial Sequence
  Synthetic oligonucleotide; AGG chr11 5187143 5187162 5187159 +
ggtcctccaatcagtcatct

SEQ ID NO: 4497 - DNA, 20 bp, Artificial Sequence
  Synthetic oligonucleotide; TAG chr11 5187151 5187170 5187167 +
aatcagtcatctaggcatct

SEQ ID NO: 4498 - DNA, 20 bp, Artificial Sequence
  Synthetic oligonucleotide; TGG chr11 5187161 5187180 5187177 +
ctaggcatcttagttctcac

SEQ ID NO: 4499 - DNA, 20 bp, Artificial Sequence
  Synthetic oligonucleotide; AAG chr11 5187166 5187185 5187182 +
catcttagttctcactggct

SEQ ID NO: 4500 - DNA, 20 bp, Artificial Sequence
  Synthetic oligonucleotide; GAG chr11 5187168 5187187 5187184 +
tcttagttctcactggctaa

SEQ ID NO: 4501 - DNA, 20 bp, Artificial Sequence
  Synthetic oligonucleotide; GAG chr11 5187170 5187189 5187186 +
ttagttctcactggctaaga

SEQ ID NO: 4502 - DNA, 20 bp, Artificial Sequence
  Synthetic oligonucleotide; AGG chr11 5187171 5187190 5187187 +
tagttctcactggctaagag

SEQ ID NO: 4503 - DNA, 20 bp, Artificial Sequence
  Synthetic oligonucleotide; AAG chr11 5187190 5187209 5187206 +
gaggtcatattttattacgt

SEQ ID NO: 4504 - DNA, 20 bp, Artificial Sequence
  Synthetic oligonucleotide; GAG chr11 5187196 5187215 5187212 +
atattttattacgtaagtgt

SEQ ID NO: 4505 - DNA, 20 bp, Artificial Sequence
  Synthetic oligonucleotide; TGG chr11 5187206 5187225 5187222 +
acgtaagtgtgagtgctata

SEQ ID NO: 4506 - DNA, 20 bp, Artificial Sequence
  Synthetic oligonucleotide; TGG chr11 5187209 5187228 5187225 +
taagtgtgagtgctatatgg

SEQ ID NO: 4507 - DNA, 20 bp, Artificial Sequence
  Synthetic oligonucleotide; GGG chr11 5187210 5187229 5187226 +
aagtgtgagtgctatatggt

SEQ ID NO: 4508 - DNA, 20 bp, Artificial Sequence
  Synthetic oligonucleotide; GAG chr11 5187212 5187231 5187228 +
gtgtgagtgctatatggtgg

SEQ ID NO: 4509 - DNA, 20 bp, Artificial Sequence
  Synthetic oligonucleotide; AAG chr11 5187219 5187238 5187235 +
tgctatatggtgggagatat

SEQ ID NO: 4510 - DNA, 20 bp, Artificial Sequence
  Synthetic oligonucleotide; AAG chr11 5187240 5187259 5187256 +
agaattatcacatgcatttc

SEQ ID NO: 4511 - DNA, 20 bp, Artificial Sequence
  Synthetic oligonucleotide; AAG chr11 5187256 5187275 5187272 +
tttcaagtgctttccattca

SEQ ID NO: 4512 - DNA, 20 bp, Artificial Sequence
  Synthetic oligonucleotide; AGG chr11 5187257 5187276 5187273 +
ttcaagtgctttccattcaa

SEQ ID NO: 4513 - DNA, 20 bp, Artificial Sequence
  Synthetic oligonucleotide; TAG chr11 5187271 5187290 5187287 +
attcaaaggtcttgaaacca

SEQ ID NO: 4514 - DNA, 20 bp, Artificial Sequence
  Synthetic oligonucleotide; GAG chr11 5187275 5187294 5187291 +
aaaggtcttgaaaccatagt

SEQ ID NO: 4515 - DNA, 20 bp, Artificial Sequence
  Synthetic oligonucleotide; AGG chr11 5187276 5187295 5187292 +
aaggtcttgaaaccatagtg

SEQ ID NO: 4516 - DNA, 20 bp, Artificial Sequence
  Synthetic oligonucleotide; GGG chr11 5187277 5187296 5187293 +
aggtcttgaaaccatagtga

SEQ ID NO: 4517 - DNA, 20 bp, Artificial Sequence
  Synthetic oligonucleotide; TGG chr11 5187285 5187304 5187301 +
aaaccatagtgagggtaaat

SEQ ID NO: 4518 - DNA, 20 bp, Artificial Sequence
  Synthetic oligonucleotide; TGG chr11 5187289 5187308 5187305 +
catagtgagggtaaattgga

SEQ ID NO: 4519 - DNA, 20 bp, Artificial Sequence
  Synthetic oligonucleotide; TAG chr11 5187308 5187327 5187324 +
atggcttcaccttgcttttt

SEQ ID NO: 4520 - DNA, 20 bp, Artificial Sequence
  Synthetic oligonucleotide; AAG chr11 5187317 5187336 5187333 +
ccttgcttttttagacatta

SEQ ID NO: 4521 - DNA, 20 bp, Artificial Sequence
  Synthetic oligonucleotide; AAG chr11 5187321 5187340 5187337 +
gcttttttagacattaaaga

SEQ ID NO: 4522 - DNA, 20 bp, Artificial Sequence
  Synthetic oligonucleotide; AGG chr11 5187322 5187341 5187338 +
cttttttagacattaaagaa

SEQ ID NO: 4523 - DNA, 20 bp, Artificial Sequence
  Synthetic oligonucleotide; CAG chr11 5187326 5187345 5187342 +
tttagacattaaagaaagga

SEQ ID NO: 4524 - DNA, 20 bp, Artificial Sequence
  Synthetic oligonucleotide; TGG chr11 5187351 5187370 5187367 +
cttatcttcccacctatcct

SEQ ID NO: 4525 - DNA, 20 bp, Artificial Sequence
  Synthetic oligonucleotide; AAG chr11 5187356 5187375 5187372 +
cttcccacctatccttggaa

SEQ ID NO: 4526 - DNA, 20 bp, Artificial Sequence
  Synthetic oligonucleotide; AAG chr11 5187365 5187384 5187381 +
tatccttggaaaagaaatta

SEQ ID NO: 4527 - DNA, 20 bp, Artificial Sequence
  Synthetic oligonucleotide; AGG chr11 5187366 5187385 5187382 +
atccttggaaaagaaattaa

SEQ ID NO: 4528 - DNA, 20 bp, Artificial Sequence
  Synthetic oligonucleotide; AAG chr11 5187374 5187393 5187390 +
aaaagaaattaaaggaatca

SEQ ID NO: 4529 - DNA, 20 bp, Artificial Sequence
  Synthetic oligonucleotide; AGG chr11 5187375 5187394 5187391 +
aaagaaattaaaggaatcaa

SEQ ID NO: 4530 - DNA, 20 bp, Artificial Sequence
  Synthetic oligonucleotide; TAG chr11 5187384 5187403 5187400 +
aaaggaatcaaaggatatta

SEQ ID NO: 4531 - DNA, 20 bp, Artificial Sequence
  Synthetic oligonucleotide; AAG chr11 5187390 5187409 5187406 +
atcaaaggatattatagaaa

SEQ ID NO: 4532 - DNA, 20 bp, Artificial Sequence
  Synthetic oligonucleotide; GAG chr11 5187392 5187411 5187408 +
caaaggatattatagaaaaa

SEQ ID NO: 4533 - DNA, 20 bp, Artificial Sequence
  Synthetic oligonucleotide; TGG chr11 5187396 5187415 5187412 +
ggatattatagaaaaagaga

SEQ ID NO: 4534 - DNA, 20 bp, Artificial Sequence
  Synthetic oligonucleotide; GAG chr11 5187398 5187417 5187414 +
atattatagaaaaagagatg

SEQ ID NO: 4535 - DNA, 20 bp, Artificial Sequence
  Synthetic oligonucleotide; AAG chr11 5187402 5187421 5187418 +
tatagaaaaagagatggaga

SEQ ID NO: 4536 - DNA, 20 bp, Artificial Sequence
  Synthetic oligonucleotide; AGG chr11 5187403 5187422 5187419 +
atagaaaaagagatggagaa

SEQ ID NO: 4537 - DNA, 20 bp, Artificial Sequence
  Synthetic oligonucleotide; AAG chr11 5187408 5187427 5187424 +
aaaagagatggagaaaggac

SEQ ID NO: 4538 - DNA, 20 bp, Artificial Sequence
  Synthetic oligonucleotide; AGG chr11 5187409 5187428 5187425 +
aaagagatggagaaaggaca

SEQ ID NO: 4539 - DNA, 20 bp, Artificial Sequence
  Synthetic oligonucleotide; GAG chr11 5187411 5187430 5187427 +
agagatggagaaaggacaag

SEQ ID NO: 4540 - DNA, 20 bp, Artificial Sequence
  Synthetic oligonucleotide; TAG chr11 5187418 5187437 5187434 +
gagaaaggacaaggagaatt

SEQ ID NO: 4541 - DNA, 20 bp, Artificial Sequence
  Synthetic oligonucleotide; AGG chr11 5187419 5187438 5187435 +
agaaaggacaaggagaattt

SEQ ID NO: 4542 - DNA, 20 bp, Artificial Sequence
  Synthetic oligonucleotide; GGG chr11 5187420 5187439 5187436 +
gaaaggacaaggagaattta

SEQ ID NO: 4543 - DNA, 20 bp, Artificial Sequence
  Synthetic oligonucleotide; GGG chr11 5187421 5187440 5187437 +
aaaggacaaggagaatttag

SEQ ID NO: 4544 - DNA, 20 bp, Artificial Sequence
  Synthetic oligonucleotide; CAG chr11 5187428 5187447 5187444 +
aaggagaatttaggggacaa

SEQ ID NO: 4545 - DNA, 20 bp, Artificial Sequence
  Synthetic oligonucleotide; TAG chr11 5187459 5187478 5187475 +
gtctgcatctgactacctga

SEQ ID NO: 4546 - DNA, 20 bp, Artificial Sequence
  Synthetic oligonucleotide; CAG chr11 5187465 5187484 5187481 +
atctgactacctgatagtga

SEQ ID NO: 4547 - DNA, 20 bp, Artificial Sequence
  Synthetic oligonucleotide; AGG chr11 5187466 5187485 5187482 +
tctgactacctgatagtgac

SEQ ID NO: 4548 - DNA, 20 bp, Artificial Sequence
  Synthetic oligonucleotide; AAG chr11 5187469 5187488 5187485 +
gactacctgatagtgacagg

SEQ ID NO: 4549 - DNA, 20 bp, Artificial Sequence
  Synthetic oligonucleotide; AAG chr11 5187476 5187495 5187492 +
tgatagtgacaggaagaaca

SEQ ID NO: 4550 - DNA, 20 bp, Artificial Sequence
  Synthetic oligonucleotide; TAG chr11 5187481 5187500 5187497 +
gtgacaggaagaacaaagaa

SEQ ID NO: 4551 - DNA, 20 bp, Artificial Sequence
  Synthetic oligonucleotide; AAG chr11 5187489 5187508 5187505 +
aagaacaaagaatagaatcc

SEQ ID NO: 4552 - DNA, 20 bp, Artificial Sequence
  Synthetic oligonucleotide; GAG chr11 5187491 5187510 5187507 +
gaacaaagaatagaatccaa

SEQ ID NO: 4553 - DNA, 20 bp, Artificial Sequence
  Synthetic oligonucleotide; AGG chr11 5187492 5187511 5187508 +
aacaaagaatagaatccaag

SEQ ID NO: 4554 - DNA, 20 bp, Artificial Sequence
  Synthetic oligonucleotide; TGG chr11 5187533 5187552 5187549 +
tattataatgtttttaaatc

SEQ ID NO: 4555 - DNA, 20 bp, Artificial Sequence
  Synthetic oligonucleotide; GGG chr11 5187534 5187553 5187550 +
attataatgtttttaaatct

SEQ ID NO: 4556 - DNA, 20 bp, Artificial Sequence
  Synthetic oligonucleotide; GGG chr11 5187535 5187554 5187551 +
ttataatgtttttaaatctg

SEQ ID NO: 4557 - DNA, 20 bp, Artificial Sequence
  Synthetic oligonucleotide; AAG chr11 5187551 5187570 5187567 +
tctggggactctaaaacttg

SEQ ID NO: 4558 - DNA, 20 bp, Artificial Sequence
  Synthetic oligonucleotide; GAG chr11 5187565 5187584 5187581 +
aacttgaagaattttttttt

SEQ ID NO: 4559 - DNA, 20 bp, Artificial Sequence
  Synthetic oligonucleotide; CAG chr11 5187578 5187597 5187594 +
tttttttgagcaaatgtttt

SEQ ID NO: 4560 - DNA, 20 bp, Artificial Sequence
  Synthetic oligonucleotide; AAG chr11 5187612 5187631 5187628 +
ttctgataaatataatatgc

SEQ ID NO: 4561 - DNA, 20 bp, Artificial Sequence
  Synthetic oligonucleotide; GAG chr11 5187614 5187633 5187630 +
ctgataaatataatatgcaa

SEQ ID NO: 4562 - DNA, 20 bp, Artificial Sequence
  Synthetic oligonucleotide; AGG chr11 5187615 5187634 5187631 +
tgataaatataatatgcaag

SEQ ID NO: 4563 - DNA, 20 bp, Artificial Sequence
  Synthetic oligonucleotide; GGG chr11 5187616 5187635 5187632 +
gataaatataatatgcaaga

SEQ ID NO: 4564 - DNA, 20 bp, Artificial Sequence
  Synthetic oligonucleotide; CAG chr11 5187619 5187638 5187635 +
aaatataatatgcaagaggg

SEQ ID NO: 4565 - DNA, 20 bp, Artificial Sequence
  Synthetic oligonucleotide; CGG chr11 5187634 5187653 5187650 +
gagggcagtgatccaaacta

SEQ ID NO: 4566 - DNA, 20 bp, Artificial Sequence
  Synthetic oligonucleotide; AAG chr11 5187649 5187668 5187665 +
aactacggctgctgtgatac

SEQ ID NO: 4567 - DNA, 20 bp, Artificial Sequence
  Synthetic oligonucleotide; CAG chr11 5187681 5187700 5187697 +
actactttaaaacacacctt

SEQ ID NO: 4568 - DNA, 20 bp, Artificial Sequence
  Synthetic oligonucleotide; CAG chr11 5187696 5187715 5187712 +
accttcagcaatattctatg

SEQ ID NO: 4569 - DNA, 20 bp, Artificial Sequence
  Synthetic oligonucleotide; TAG chr11 5187708 5187727 5187724 +
attctatgcagatgaaataa

SEQ ID NO: 4570 - DNA, 20 bp, Artificial Sequence
  Synthetic oligonucleotide; TAG chr11 5187738 5187757 5187754 +
tatgtttaatttaatatgtt

SEQ ID NO: 4571 - DNA, 20 bp, Artificial Sequence
  Synthetic oligonucleotide; TAG chr11 5187749 5187768 5187765 +
taatatgtttagttttctta

SEQ ID NO: 4572 - DNA, 20 bp, Artificial Sequence
  Synthetic oligonucleotide; AAG chr11 5187752 5187771 5187768 +
tatgtttagttttcttatag

SEQ ID NO: 4573 - DNA, 20 bp, Artificial Sequence
  Synthetic oligonucleotide; CAG chr11 5187759 5187778 5187775 +
agttttcttatagaagtcta

SEQ ID NO: 4574 - DNA, 20 bp, Artificial Sequence
  Synthetic oligonucleotide; GAG chr11 5187767 5187786 5187783 +
tatagaagtctacagtcttt

SEQ ID NO: 4575 - DNA, 20 bp, Artificial Sequence
  Synthetic oligonucleotide; TAG chr11 5187780 5187799 5187796 +
agtctttgagccacatgctt

SEQ ID NO: 4576 - DNA, 20 bp, Artificial Sequence
  Synthetic oligonucleotide; AAG chr11 5187832 5187851 5187848 +
tatataatattattgacatc

SEQ ID NO: 4577 - DNA, 20 bp, Artificial Sequence
  Synthetic oligonucleotide; TGG chr11 5187847 5187866 5187863 +
acatcaagtaacaatatcat

SEQ ID NO: 4578 - DNA, 20 bp, Artificial Sequence
  Synthetic oligonucleotide; CGG chr11 5187855 5187874 5187871 +
taacaatatcattggaatct

SEQ ID NO: 4579 - DNA, 20 bp, Artificial Sequence
  Synthetic oligonucleotide; TAG chr11 5187902 5187921 5187918 +
atatgattatctaatatacc

SEQ ID NO: 4580 - DNA, 20 bp, Artificial Sequence
  Synthetic oligonucleotide; CAG chr11 5187914 5187933 5187930 +
aatatacctagatatttttg

SEQ ID NO: 4581 - DNA, 20 bp, Artificial Sequence
  Synthetic oligonucleotide; AGG chr11 5187915 5187934 5187931 +
atatacctagatatttttgc

SEQ ID NO: 4582 - DNA, 20 bp, Artificial Sequence
  Synthetic oligonucleotide; GGG chr11 5187916 5187935 5187932 +
tatacctagatatttttgca

SEQ ID NO: 4583 - DNA, 20 bp, Artificial Sequence
  Synthetic oligonucleotide; AAG chr11 5187926 5187945 5187942 +
tatttttgcagggaacatgt

SEQ ID NO: 4584 - DNA, 20 bp, Artificial Sequence
  Synthetic oligonucleotide; TAG chr11 5187936 5187955 5187952 +
gggaacatgtaagtattatg

SEQ ID NO: 4585 - DNA, 20 bp, Artificial Sequence
  Synthetic oligonucleotide; AAG chr11 5187947 5187966 5187963 +
agtattatgtagaataaata

SEQ ID NO: 4586 - DNA, 20 bp, Artificial Sequence
  Synthetic oligonucleotide; AAG chr11 5187969 5187988 5187985 +
gattataaaaattctcacat

SEQ ID NO: 4587 - DNA, 20 bp, Artificial Sequence
  Synthetic oligonucleotide; CAG chr11 5187979 5187998 5187995 +
attctcacataagttcatgt

SEQ ID NO: 4588 - DNA, 20 bp, Artificial Sequence
  Synthetic oligonucleotide; TAG chr11 5187997 5188016 5188013 +
gtcagaaattgccatcactt

SEQ ID NO: 4589 - DNA, 20 bp, Artificial Sequence
  Synthetic oligonucleotide; GAG chr11 5187999 5188018 5188015 +
cagaaattgccatcacttta

SEQ ID NO: 4590 - DNA, 20 bp, Artificial Sequence
  Synthetic oligonucleotide; CAG chr11 5188002 5188021 5188018 +
aaattgccatcactttagag

SEQ ID NO: 4591 - DNA, 20 bp, Artificial Sequence
  Synthetic oligonucleotide; AAG chr11 5188018 5188037 5188034 +
agagcagattgtgctgttaa

SEQ ID NO: 4592 - DNA, 20 bp, Artificial Sequence
  Synthetic oligonucleotide; CAG chr11 5188024 5188043 5188040 +
gattgtgctgttaaaagact

SEQ ID NO: 4593 - DNA, 20 bp, Artificial Sequence
  Synthetic oligonucleotide; TGG chr11 5188041 5188060 5188057 +
actcagtttttaaatttcta

SEQ ID NO: 4594 - DNA, 20 bp, Artificial Sequence
  Synthetic oligonucleotide; AAG chr11 5188049 5188068 5188065 +
tttaaatttctatggatttc

SEQ ID NO: 4595 - DNA, 20 bp, Artificial Sequence
  Synthetic oligonucleotide; AGG chr11 5188050 5188069 5188066 +
ttaaatttctatggatttca

SEQ ID NO: 4596 - DNA, 20 bp, Artificial Sequence
  Synthetic oligonucleotide; TGG chr11 5188056 5188075 5188072 +
ttctatggatttcaaggaaa

SEQ ID NO: 4597 - DNA, 20 bp, Artificial Sequence
  Synthetic oligonucleotide; TGG chr11 5188070 5188089 5188086 +
aggaaatggataaatgattg

SEQ ID NO: 4598 - DNA, 20 bp, Artificial Sequence
  Synthetic oligonucleotide; TAG chr11 5188088 5188107 5188104 +
tgtggccctgttaaccaaaa

SEQ ID NO: 4599 - DNA, 20 bp, Artificial Sequence
  Synthetic oligonucleotide; CAG chr11 5188091 5188110 5188107 +
ggccctgttaaccaaaatag

SEQ ID NO: 4600 - DNA, 20 bp, Artificial Sequence
  Synthetic oligonucleotide; TGG chr11 5188100 5188119 5188116 +
aaccaaaatagcagtaaaaa

SEQ ID NO: 4601 - DNA, 20 bp, Artificial Sequence
  Synthetic oligonucleotide; TGG chr11 5188106 5188125 5188122 +
aatagcagtaaaaatggctt

SEQ ID NO: 4602 - DNA, 20 bp, Artificial Sequence
  Synthetic oligonucleotide; TAG chr11 5188118 5188137 5188134 +
aatggctttggctactgatt

SEQ ID NO: 4603 - DNA, 20 bp, Artificial Sequence
  Synthetic oligonucleotide; AAG chr11 5188133 5188152 5188149 +
tgatttagtatctgtaaatt

SEQ ID NO: 4604 - DNA, 20 bp, Artificial Sequence
  Synthetic oligonucleotide; AGG chr11 5188134 5188153 5188150 +
gatttagtatctgtaaatta

SEQ ID NO: 4605 - DNA, 20 bp, Artificial Sequence
  Synthetic oligonucleotide; TGG chr11 5188141 5188160 5188157 +
tatctgtaaattaaggatgt

SEQ ID NO: 4606 - DNA, 20 bp, Artificial Sequence
  Synthetic oligonucleotide; GAG chr11 5188151 5188170 5188167 +
ttaaggatgttggattgctt

SEQ ID NO: 4607 - DNA, 20 bp, Artificial Sequence
  Synthetic oligonucleotide; TAG chr11 5188158 5188177 5188174 +
tgttggattgcttgagattt

SEQ ID NO: 4608 - DNA, 20 bp, Artificial Sequence
  Synthetic oligonucleotide; AAG chr11 5188183 5188202 5188199 +
ctaactctgcttcaatatgt

SEQ ID NO: 4609 - DNA, 20 bp, Artificial Sequence
  Synthetic oligonucleotide; GAG chr11 5188198 5188217 5188214 +
tatgtaagatacttctaatt

SEQ ID NO: 4610 - DNA, 20 bp, Artificial Sequence
  Synthetic oligonucleotide; TAG chr11 5188203 5188222 5188219 +
aagatacttctaattgagtc

SEQ ID NO: 4611 - DNA, 20 bp, Artificial Sequence
  Synthetic oligonucleotide; TAG chr11 5188218 5188237 5188234 +
gagtctagataattgttcta

SEQ ID NO: 4612 - DNA, 20 bp, Artificial Sequence
  Synthetic oligonucleotide; AGG chr11 5188219 5188238 5188235 +
agtctagataattgttctat

SEQ ID NO: 4613 - DNA, 20 bp, Artificial Sequence
  Synthetic oligonucleotide; TAG chr11 5188227 5188246 5188243 +
taattgttctataggtaaat

SEQ ID NO: 4614 - DNA, 20 bp, Artificial Sequence
  Synthetic oligonucleotide; TGG chr11 5188235 5188254 5188251 +
ctataggtaaattagtgtcc

SEQ ID NO: 4615 - DNA, 20 bp, Artificial Sequence
  Synthetic oligonucleotide; TAG chr11 5188242 5188261 5188258 +
taaattagtgtcctggatgc

SEQ ID NO: 4616 - DNA, 20 bp, Artificial Sequence
  Synthetic oligonucleotide; CAG chr11 5188250 5188269 5188266 +
tgtcctggatgctagtgctt

SEQ ID NO: 4617 - DNA, 20 bp, Artificial Sequence
  Synthetic oligonucleotide; AAG chr11 5188266 5188285 5188282 +
gcttcagccaaaaaatgaaa

SEQ ID NO: 4618 - DNA, 20 bp, Artificial Sequence
  Synthetic oligonucleotide; AAG chr11 5188283 5188302 5188299 +
aaaaagatacaattaaatga

SEQ ID NO: 4619 - DNA, 20 bp, Artificial Sequence
  Synthetic oligonucleotide; TGG chr11 5188300 5188319 5188316 +
tgaaagcctttatcttacta

SEQ ID NO: 4620 - DNA, 20 bp, Artificial Sequence
  Synthetic oligonucleotide; GGG chr11 5188301 5188320 5188317 +
gaaagcctttatcttactat

SEQ ID NO: 4621 - DNA, 20 bp, Artificial Sequence
  Synthetic oligonucleotide; GAG chr11 5188308 5188327 5188324 +
tttatcttactatgggactt

SEQ ID NO: 4622 - DNA, 20 bp, Artificial Sequence
  Synthetic oligonucleotide; TGG chr11 5188311 5188330 5188327 +
atcttactatgggacttgag

SEQ ID NO: 4623 - DNA, 20 bp, Artificial Sequence
  Synthetic oligonucleotide; GAG chr11 5188313 5188332 5188329 +
cttactatgggacttgagtg

SEQ ID NO: 4624 - DNA, 20 bp, Artificial Sequence
  Synthetic oligonucleotide; AGG chr11 5188314 5188333 5188330 +
ttactatgggacttgagtgg

SEQ ID NO: 4625 - DNA, 20 bp, Artificial Sequence
  Synthetic oligonucleotide; AAG chr11 5188323 5188342 5188339 +
gacttgagtggaggaaatcc

SEQ ID NO: 4626 - DNA, 20 bp, Artificial Sequence
  Synthetic oligonucleotide; AAG chr11 5188328 5188347 5188344 +
gagtggaggaaatccaagaa

SEQ ID NO: 4627 - DNA, 20 bp, Artificial Sequence
  Synthetic oligonucleotide; CAG chr11 5188336 5188355 5188352 +
gaaatccaagaaaagaattc

SEQ ID NO: 4628 - DNA, 20 bp, Artificial Sequence
  Synthetic oligonucleotide; AAG chr11 5188357 5188376 5188373 +
agatgatcctttcttcgaac

SEQ ID NO: 4629 - DNA, 20 bp, Artificial Sequence
  Synthetic oligonucleotide; TGG chr11 5188365 5188384 5188381 +
ctttcttcgaacaagtaatt

SEQ ID NO: 4630 - DNA, 20 bp, Artificial Sequence
  Synthetic oligonucleotide; TGG chr11 5188374 5188393 5188390 +
aacaagtaatttggcataat

SEQ ID NO: 4631 - DNA, 20 bp, Artificial Sequence
  Synthetic oligonucleotide; TGG chr11 5188382 5188401 5188398 +
atttggcataattggacacc

SEQ ID NO: 4632 - DNA, 20 bp, Artificial Sequence
  Synthetic oligonucleotide; AAG chr11 5188400 5188419 5188416 +
cctggtttcttctcatttgt

SEQ ID NO: 4633 - DNA, 20 bp, Artificial Sequence
  Synthetic oligonucleotide; TAG chr11 5188404 5188423 5188420 +
gtttcttctcatttgtaagt

SEQ ID NO: 4634 - DNA, 20 bp, Artificial Sequence
  Synthetic oligonucleotide; AAG chr11 5188409 5188428 5188425 +
ttctcatttgtaagttagta

SEQ ID NO: 4635 - DNA, 20 bp, Artificial Sequence
  Synthetic oligonucleotide; TGG chr11 5188413 5188432 5188429 +
catttgtaagttagtaaagc

SEQ ID NO: 4636 - DNA, 20 bp, Artificial Sequence
  Synthetic oligonucleotide; GGG chr11 5188414 5188433 5188430 +
atttgtaagttagtaaagct

SEQ ID NO: 4637 - DNA, 20 bp, Artificial Sequence
  Synthetic oligonucleotide; GAG chr11 5188416 5188435 5188432 +
ttgtaagttagtaaagctgg

SEQ ID NO: 4638 - DNA, 20 bp, Artificial Sequence
  Synthetic oligonucleotide; TGG chr11 5188420 5188439 5188436 +
aagttagtaaagctgggagt

SEQ ID NO: 4639 - DNA, 20 bp, Artificial Sequence
  Synthetic oligonucleotide; TAG chr11 5188426 5188445 5188442 +
gtaaagctgggagttggtgc

SEQ ID NO: 4640 - DNA, 20 bp, Artificial Sequence
  Synthetic oligonucleotide; AAG chr11 5188431 5188450 5188447 +
gctgggagttggtgctagta

SEQ ID NO: 4641 - DNA, 20 bp, Artificial Sequence
  Synthetic oligonucleotide; TGG chr11 5188435 5188454 5188451 +
ggagttggtgctagtaaagc

SEQ ID NO: 4642 - DNA, 20 bp, Artificial Sequence
  Synthetic oligonucleotide; GGG chr11 5188436 5188455 5188452 +
gagttggtgctagtaaagct

SEQ ID NO: 4643 - DNA, 20 bp, Artificial Sequence
  Synthetic oligonucleotide; GAG chr11 5188438 5188457 5188454 +
gttggtgctagtaaagctgg

SEQ ID NO: 4644 - DNA, 20 bp, Artificial Sequence
  Synthetic oligonucleotide; TGG chr11 5188442 5188461 5188458 +
gtgctagtaaagctgggagt

SEQ ID NO: 4645 - DNA, 20 bp, Artificial Sequence
  Synthetic oligonucleotide; CAG chr11 5188448 5188467 5188464 +
gtaaagctgggagttggtgc

SEQ ID NO: 4646 - DNA, 20 bp, Artificial Sequence
  Synthetic oligonucleotide; AAG chr11 5188453 5188472 5188469 +
gctgggagttggtgccagaa

SEQ ID NO: 4647 - DNA, 20 bp, Artificial Sequence
  Synthetic oligonucleotide; GAG chr11 5188455 5188474 5188471 +
tgggagttggtgccagaaaa

SEQ ID NO: 4648 - DNA, 20 bp, Artificial Sequence
  Synthetic oligonucleotide; CAG chr11 5188460 5188479 5188476 +
gttggtgccagaaaagagaa

SEQ ID NO: 4649 - DNA, 20 bp, Artificial Sequence
  Synthetic oligonucleotide; TAG chr11 5188491 5188510 5188507 +
atttatttcttccttgtttg

SEQ ID NO: 4650 - DNA, 20 bp, Artificial Sequence
  Synthetic oligonucleotide; AGG chr11 5188492 5188511 5188508 +
tttatttcttccttgtttgt

SEQ ID NO: 4651 - DNA, 20 bp, Artificial Sequence
  Synthetic oligonucleotide; TAG chr11 5188498 5188517 5188514 +
tcttccttgtttgtaggctg

SEQ ID NO: 4652 - DNA, 20 bp, Artificial Sequence
  Synthetic oligonucleotide; GAG chr11 5188500 5188519 5188516 +
ttccttgtttgtaggctgta

SEQ ID NO: 4653 - DNA, 20 bp, Artificial Sequence
  Synthetic oligonucleotide; AAG chr11 5188504 5188523 5188520 +
ttgtttgtaggctgtagagc

SEQ ID NO: 4654 - DNA, 20 bp, Artificial Sequence
  Synthetic oligonucleotide; TGG chr11 5188520 5188539 5188536 +
gagcaagcttgtccaacctg

SEQ ID NO: 4655 - DNA, 20 bp, Artificial Sequence
  Synthetic oligonucleotide; TGG chr11 5188527 5188546 5188543 +
cttgtccaacctgtggcccg

SEQ ID NO: 4656 - DNA, 20 bp, Artificial Sequence
  Synthetic oligonucleotide; GGG chr11 5188528 5188547 5188544 +
ttgtccaacctgtggcccgt

SEQ ID NO: 4657 - DNA, 20 bp, Artificial Sequence
  Synthetic oligonucleotide; AAG chr11 5188544 5188563 5188560 +
ccgtgggctgcatgcatccc

SEQ ID NO: 4658 - DNA, 20 bp, Artificial Sequence
  Synthetic oligonucleotide; TGG chr11 5188548 5188567 5188564 +
gggctgcatgcatcccaaga

SEQ ID NO: 4659 - DNA, 20 bp, Artificial Sequence
  Synthetic oligonucleotide; GAG chr11 5188590 5188609 5188606 +
caactttcttaaaacattat

SEQ ID NO: 4660 - DNA, 20 bp, Artificial Sequence
  Synthetic oligonucleotide; TGG chr11 5188599 5188618 5188615 +
taaaacattatgagatttta

SEQ ID NO: 4661 - DNA, 20 bp, Artificial Sequence
  Synthetic oligonucleotide; GGG chr11 5188600 5188619 5188616 +
aaaacattatgagattttat

SEQ ID NO: 4662 - DNA, 20 bp, Artificial Sequence
  Synthetic oligonucleotide; TGG chr11 5188628 5188647 5188644 +
ttgtgatttttttttttttt

SEQ ID NO: 4663 - DNA, 20 bp, Artificial Sequence
  Synthetic oligonucleotide; GAG chr11 5188636 5188655 5188652 +
tttttttttttttggctcat

SEQ ID NO: 4664 - DNA, 20 bp, Artificial Sequence
  Synthetic oligonucleotide; TAG chr11 5188646 5188665 5188662 +
tttggctcatgagctgtcat

SEQ ID NO: 4665 - DNA, 20 bp, Artificial Sequence
  Synthetic oligonucleotide; TAG chr11 5188652 5188671 5188668 +
tcatgagctgtcattagtgt

SEQ ID NO: 4666 - DNA, 20 bp, Artificial Sequence
  Synthetic oligonucleotide; TGG chr11 5188668 5188687 5188684 +
gtgttagtatattttatgtg

SEQ ID NO: 4667 - DNA, 20 bp, Artificial Sequence
  Synthetic oligonucleotide; CAG chr11 5188673 5188692 5188689 +
agtatattttatgtgtggcc

SEQ ID NO: 4668 - DNA, 20 bp, Artificial Sequence
  Synthetic oligonucleotide; AGG chr11 5188674 5188693 5188690 +
gtatattttatgtgtggccc

SEQ ID NO: 4669 - DNA, 20 bp, Artificial Sequence
  Synthetic oligonucleotide; GGG chr11 5188675 5188694 5188691 +
tatattttatgtgtggccca

SEQ ID NO: 4670 - DNA, 20 bp, Artificial Sequence
  Synthetic oligonucleotide; AAG chr11 5188678 5188697 5188694 +
attttatgtgtggcccaggg

SEQ ID NO: 4671 - DNA, 20 bp, Artificial Sequence
  Synthetic oligonucleotide; AAG chr11 5188685 5188704 5188701 +
gtgtggcccagggaagccaa

SEQ ID NO: 4672 - DNA, 20 bp, Artificial Sequence
  Synthetic oligonucleotide; TGG chr11 5188690 5188709 5188706 +
gcccagggaagccaaaagat

SEQ ID NO: 4673 - DNA, 20 bp, Artificial Sequence
  Synthetic oligonucleotide; TAG chr11 5188705 5188724 5188721 +
aagattggacatccctgctg

SEQ ID NO: 4674 - DNA, 20 bp, Artificial Sequence
  Synthetic oligonucleotide; GAG chr11 5188707 5188726 5188723 +
gattggacatccctgctgta

SEQ ID NO: 4675 - DNA, 20 bp, Artificial Sequence
  Synthetic oligonucleotide; CAG chr11 5188715 5188734 5188731 +
atccctgctgtagagtttct

SEQ ID NO: 4676 - DNA, 20 bp, Artificial Sequence
  Synthetic oligonucleotide; TGG chr11 5188718 5188737 5188734 +
cctgctgtagagtttctcag

SEQ ID NO: 4677 - DNA, 20 bp, Artificial Sequence
  Synthetic oligonucleotide; TGG chr11 5188722 5188741 5188738 +
ctgtagagtttctcagtggt

SEQ ID NO: 4678 - DNA, 20 bp, Artificial Sequence
  Synthetic oligonucleotide; CAG chr11 5188737 5188756 5188753 +
gtggttggaatcaatatttg

SEQ ID NO: 4679 - DNA, 20 bp, Artificial Sequence
  Synthetic oligonucleotide; GAG chr11 5188739 5188758 5188755 +
ggttggaatcaatatttgca

SEQ ID NO: 4680 - DNA, 20 bp, Artificial Sequence
  Synthetic oligonucleotide; TAG chr11 5188747 5188766 5188763 +
tcaatatttgcagagtcttg

SEQ ID NO: 4681 - DNA, 20 bp, Artificial Sequence
  Synthetic oligonucleotide; AAG chr11 5188758 5188777 5188774 +
agagtcttgtagctttttca

SEQ ID NO: 4682 - DNA, 20 bp, Artificial Sequence
  Synthetic oligonucleotide; AAG chr11 5188781 5188800 5188797 +
atttttcccctgccacattg

SEQ ID NO: 4683 - DNA, 20 bp, Artificial Sequence
  Synthetic oligonucleotide; TAG chr11 5188786 5188805 5188802 +
tcccctgccacattgaagaa

SEQ ID NO: 4684 - DNA, 20 bp, Artificial Sequence
  Synthetic oligonucleotide; GAG chr11 5188792 5188811 5188808 +
gccacattgaagaatagctt

SEQ ID NO: 4685 - DNA, 20 bp, Artificial Sequence
  Synthetic oligonucleotide; TAG chr11 5188798 5188817 5188814 +
ttgaagaatagcttgagcaa

SEQ ID NO: 4686 - DNA, 20 bp, Artificial Sequence
  Synthetic oligonucleotide; CAG chr11 5188814 5188833 5188830 +
gcaatagccactcttctttc

SEQ ID NO: 4687 - DNA, 20 bp, Artificial Sequence
  Synthetic oligonucleotide; AGG chr11 5188815 5188834 5188831 +
caatagccactcttctttcc

SEQ ID NO: 4688 - DNA, 20 bp, Artificial Sequence
  Synthetic oligonucleotide; TGG chr11 5188818 5188837 5188834 +
tagccactcttctttccagg

SEQ ID NO: 4689 - DNA, 20 bp, Artificial Sequence
  Synthetic oligonucleotide; GAG chr11 5188820 5188839 5188836 +
gccactcttctttccaggtg

SEQ ID NO: 4690 - DNA, 20 bp, Artificial Sequence
  Synthetic oligonucleotide; TAG chr11 5188837 5188856 5188853 +
gtggagtttgtgaattactt

SEQ ID NO: 4691 - DNA, 20 bp, Artificial Sequence
  Synthetic oligonucleotide; GAG chr11 5188839 5188858 5188855 +
ggagtttgtgaattacttta

SEQ ID NO: 4692 - DNA, 20 bp, Artificial Sequence
  Synthetic oligonucleotide; TGG chr11 5188854 5188873 5188870 +
ctttagagatgatctttatc

SEQ ID NO: 4693 - DNA, 20 bp, Artificial Sequence
  Synthetic oligonucleotide; GGG chr11 5188855 5188874 5188871 +
tttagagatgatctttatct

SEQ ID NO: 4694 - DNA, 20 bp, Artificial Sequence
  Synthetic oligonucleotide; AAG chr11 5188858 5188877 5188874 +
agagatgatctttatctggg

SEQ ID NO: 4695 - DNA, 20 bp, Artificial Sequence
  Synthetic oligonucleotide; TAG chr11 5188887 5188906 5188903 +
taatatattatctcttcgtt

SEQ ID NO: 4696 - DNA, 20 bp, Artificial Sequence
  Synthetic oligonucleotide; AAG chr11 5188897 5188916 5188913 +
tctcttcgtttagctaacgt

SEQ ID NO: 4697 - DNA, 20 bp, Artificial Sequence
  Synthetic oligonucleotide; AGG chr11 5188898 5188917 5188914 +
ctcttcgtttagctaacgta

SEQ ID NO: 4698 - DNA, 20 bp, Artificial Sequence
  Synthetic oligonucleotide; TAG chr11 5188905 5188924 5188921 +
tttagctaacgtaaggttat

SEQ ID NO: 4699 - DNA, 20 bp, Artificial Sequence
  Synthetic oligonucleotide; AAG chr11 5188920 5188939 5188936 +
gttattagatacttttcttt

SEQ ID NO: 4700 - DNA, 20 bp, Artificial Sequence
  Synthetic oligonucleotide; AGG chr11 5188921 5188940 5188937 +
ttattagatacttttcttta

SEQ ID NO: 4701 - DNA, 20 bp, Artificial Sequence
  Synthetic oligonucleotide; AAG chr11 5188924 5188943 5188940 +
ttagatacttttctttaagg

SEQ ID NO: 4702 - DNA, 20 bp, Artificial Sequence
  Synthetic oligonucleotide; AGG chr11 5188925 5188944 5188941 +
tagatacttttctttaagga

SEQ ID NO: 4703 - DNA, 20 bp, Artificial Sequence
  Synthetic oligonucleotide; CAG chr11 5188934 5188953 5188950 +
ttctttaaggaaggatacac

SEQ ID NO: 4704 - DNA, 20 bp, Artificial Sequence
  Synthetic oligonucleotide; AGG chr11 5188935 5188954 5188951 +
tctttaaggaaggatacacc

SEQ ID NO: 4705 - DNA, 20 bp, Artificial Sequence
  Synthetic oligonucleotide; AAG chr11 5188950 5188969 5188966 +
acaccaggacctgccttaat

SEQ ID NO: 4706 - DNA, 20 bp, Artificial Sequence
  Synthetic oligonucleotide; AGG chr11 5188951 5188970 5188967 +
caccaggacctgccttaata

SEQ ID NO: 4707 - DNA, 20 bp, Artificial Sequence
  Synthetic oligonucleotide; CAG chr11 5189003 5189022 5189019 +
atcataatatgtgtgtcgtg

SEQ ID NO: 4708 - DNA, 20 bp, Artificial Sequence
  Synthetic oligonucleotide; GAG chr11 5189005 5189024 5189021 +
cataatatgtgtgtcgtgca

SEQ ID NO: 4709 - DNA, 20 bp, Artificial Sequence
  Synthetic oligonucleotide; TAG chr11 5189019 5189038 5189035 +
cgtgcagagataaacttgta

SEQ ID NO: 4710 - DNA, 20 bp, Artificial Sequence
  Synthetic oligonucleotide; AAG chr11 5189022 5189041 5189038 +
gcagagataaacttgtatag

SEQ ID NO: 4711 - DNA, 20 bp, Artificial Sequence
  Synthetic oligonucleotide; AAG chr11 5189046 5189065 5189062 +
caatacgactgcttgtatta

SEQ ID NO: 4712 - DNA, 20 bp, Artificial Sequence
  Synthetic oligonucleotide; AAG chr11 5189054 5189073 5189070 +
ctgcttgtattaaagaaaca

SEQ ID NO: 4713 - DNA, 20 bp, Artificial Sequence
  Synthetic oligonucleotide; AAG chr11 5189126 5189145 5189142 +
gttgaattgtgtttaatcac

SEQ ID NO: 4714 - DNA, 20 bp, Artificial Sequence
  Synthetic oligonucleotide; GAG chr11 5189128 5189147 5189144 +
tgaattgtgtttaatcacaa

SEQ ID NO: 4715 - DNA, 20 bp, Artificial Sequence
  Synthetic oligonucleotide; TGG chr11 5189147 5189166 5189163 +
agagtaatgcatgcctgata

SEQ ID NO: 4716 - DNA, 20 bp, Artificial Sequence
  Synthetic oligonucleotide; TGG chr11 5189152 5189171 5189168 +
aatgcatgcctgatatggtt

SEQ ID NO: 4717 - DNA, 20 bp, Artificial Sequence
  Synthetic oligonucleotide; CAG chr11 5189183 5189202 5189199 +
ctccaccctaatctcatgtt

SEQ ID NO: 4718 - DNA, 20 bp, Artificial Sequence
  Synthetic oligonucleotide; CAG chr11 5189196 5189215 5189212 +
tcatgttcagctgtaatccc

SEQ ID NO: 4719 - DNA, 20 bp, Artificial Sequence
  Synthetic oligonucleotide; AAG chr11 5189204 5189223 5189220 +
agctgtaatccccagtgttg

SEQ ID NO: 4720 - DNA, 20 bp, Artificial Sequence
  Synthetic oligonucleotide; TGG chr11 5189208 5189227 5189224 +
gtaatccccagtgttgaaga

SEQ ID NO: 4721 - DNA, 20 bp, Artificial Sequence
  Synthetic oligonucleotide; GGG chr11 5189209 5189228 5189225 +
taatccccagtgttgaagat

SEQ ID NO: 4722 - DNA, 20 bp, Artificial Sequence
  Synthetic oligonucleotide; GGG chr11 5189210 5189229 5189226 +
aatccccagtgttgaagatg

SEQ ID NO: 4723 - DNA, 20 bp, Artificial Sequence
  Synthetic oligonucleotide; TGG chr11 5189215 5189234 5189231 +
ccagtgttgaagatggggcc

SEQ ID NO: 4724 - DNA, 20 bp, Artificial Sequence
  Synthetic oligonucleotide; TGG chr11 5189218 5189237 5189234 +
gtgttgaagatggggcctgg

SEQ ID NO: 4725 - DNA, 20 bp, Artificial Sequence
  Synthetic oligonucleotide; GGG chr11 5189219 5189238 5189235 +
tgttgaagatggggcctggt

SEQ ID NO: 4726 - DNA, 20 bp, Artificial Sequence
  Synthetic oligonucleotide; AAG chr11 5189222 5189241 5189238 +
tgaagatggggcctggtggg

SEQ ID NO: 4727 - DNA, 20 bp, Artificial Sequence
  Synthetic oligonucleotide; TGG chr11 5189229 5189248 5189245 +
ggggcctggtgggaagtgat

SEQ ID NO: 4728 - DNA, 20 bp, Artificial Sequence
  Synthetic oligonucleotide; TAG chr11 5189236 5189255 5189252 +
ggtgggaagtgattggatca

SEQ ID NO: 4729 - DNA, 20 bp, Artificial Sequence
  Synthetic oligonucleotide; AGG chr11 5189237 5189256 5189253 +
gtgggaagtgattggatcat

SEQ ID NO: 4730 - DNA, 20 bp, Artificial Sequence
  Synthetic oligonucleotide; GAG chr11 5189239 5189258 5189255 +
gggaagtgattggatcatag

SEQ ID NO: 4731 - DNA, 20 bp, Artificial Sequence
  Synthetic oligonucleotide; CAG chr11 5189242 5189261 5189258 +
aagtgattggatcataggag

SEQ ID NO: 4732 - DNA, 20 bp, Artificial Sequence
  Synthetic oligonucleotide; GAG chr11 5189244 5189263 5189260 +
gtgattggatcataggagca

SEQ ID NO: 4733 - DNA, 20 bp, Artificial Sequence
  Synthetic oligonucleotide; TAG chr11 5189257 5189276 5189273 +
aggagcagagttatcataaa

SEQ ID NO: 4734 - DNA, 20 bp, Artificial Sequence
  Synthetic oligonucleotide; CAG chr11 5189268 5189287 5189284 +
tatcataaatagcttaatat

SEQ ID NO: 4735 - DNA, 20 bp, Artificial Sequence
  Synthetic oligonucleotide; TGG chr11 5189278 5189297 5189294 +
agcttaatatcagtcccttt

SEQ ID NO: 4736 - DNA, 20 bp, Artificial Sequence
  Synthetic oligonucleotide; TAG chr11 5189287 5189306 5189303 +
tcagtcccttttggtacgta

SEQ ID NO: 4737 - DNA, 20 bp, Artificial Sequence
  Synthetic oligonucleotide; TGG chr11 5189290 5189309 5189306 +
gtcccttttggtacgtatag

SEQ ID NO: 4738 - DNA, 20 bp, Artificial Sequence
  Synthetic oligonucleotide; GGG chr11 5189291 5189310 5189307 +
tcccttttggtacgtatagt

SEQ ID NO: 4739 - DNA, 20 bp, Artificial Sequence
  Synthetic oligonucleotide; GAG chr11 5189295 5189314 5189311 +
ttttggtacgtatagtgggt

SEQ ID NO: 4740 - DNA, 20 bp, Artificial Sequence
  Synthetic oligonucleotide; GAG chr11 5189305 5189324 5189321 +
tatagtgggtgagttctcat

SEQ ID NO: 4741 - DNA, 20 bp, Artificial Sequence
  Synthetic oligonucleotide; TGG chr11 5189311 5189330 5189327 +
gggtgagttctcatgagata

SEQ ID NO: 4742 - DNA, 20 bp, Artificial Sequence
  Synthetic oligonucleotide; CAG chr11 5189348 5189367 5189364 +
cctgcctcttcttcctgctc

SEQ ID NO: 4743 - DNA, 20 bp, Artificial Sequence
  Synthetic oligonucleotide; AAG chr11 5189358 5189377 5189374 +
cttcctgctccagccatgtg

SEQ ID NO: 4744 - DNA, 20 bp, Artificial Sequence
  Synthetic oligonucleotide; AAG chr11 5189396 5189415 5189412 +
tttctctctgccatgattat

SEQ ID NO: 4745 - DNA, 20 bp, Artificial Sequence
  Synthetic oligonucleotide; TAG chr11 5189415 5189434 5189431 +
taagtttcctgaaacctccc

SEQ ID NO: 4746 - DNA, 20 bp, Artificial Sequence
  Synthetic oligonucleotide; AAG chr11 5189418 5189437 5189434 +
gtttcctgaaacctccctag

SEQ ID NO: 4747 - DNA, 20 bp, Artificial Sequence
  Synthetic oligonucleotide; GAG chr11 5189423 5189442 5189439 +
ctgaaacctccctagaagct

SEQ ID NO: 4748 - DNA, 20 bp, Artificial Sequence
  Synthetic oligonucleotide; CAG chr11 5189426 5189445 5189442 +
aaacctccctagaagctgag

SEQ ID NO: 4749 - DNA, 20 bp, Artificial Sequence
  Synthetic oligonucleotide; CAG chr11 5189449 5189468 5189465 +
acgttgccatgcttcctgta

SEQ ID NO: 4750 - DNA, 20 bp, Artificial Sequence
  Synthetic oligonucleotide; TAG chr11 5189456 5189475 5189472 +
catgcttcctgtacagcctt

SEQ ID NO: 4751 - DNA, 20 bp, Artificial Sequence
  Synthetic oligonucleotide; GAG chr11 5189465 5189484 5189481 +
tgtacagcctttagaactgt

SEQ ID NO: 4752 - DNA, 20 bp, Artificial Sequence
  Synthetic oligonucleotide; CAG chr11 5189499 5189518 5189515 +
tctgttcttcaccatttacc

SEQ ID NO: 4753 - DNA, 20 bp, Artificial Sequence
  Synthetic oligonucleotide; CAG chr11 5189505 5189524 5189521 +
cttcaccatttacccagtct

SEQ ID NO: 4754 - DNA, 20 bp, Artificial Sequence
  Synthetic oligonucleotide; AGG chr11 5189506 5189525 5189522 +
ttcaccatttacccagtctc

SEQ ID NO: 4755 - DNA, 20 bp, Artificial Sequence
  Synthetic oligonucleotide; TAG chr11 5189519 5189538 5189535 +
cagtctcaggtatttcctta

SEQ ID NO: 4756 - DNA, 20 bp, Artificial Sequence
  Synthetic oligonucleotide; AAG chr11 5189523 5189542 5189539 +
ctcaggtatttccttatagc

SEQ ID NO: 4757 - DNA, 20 bp, Artificial Sequence
  Synthetic oligonucleotide; GAG chr11 5189528 5189547 5189544 +
gtatttccttatagcaagat

SEQ ID NO: 4758 - DNA, 20 bp, Artificial Sequence
  Synthetic oligonucleotide; TGG chr11 5189533 5189552 5189549 +
tccttatagcaagatgagaa

SEQ ID NO: 4759 - DNA, 20 bp, Artificial Sequence
  Synthetic oligonucleotide; CAG chr11 5189538 5189557 5189554 +
atagcaagatgagaatggac

SEQ ID NO: 4760 - DNA, 20 bp, Artificial Sequence
  Synthetic oligonucleotide; CAG chr11 5189543 5189562 5189559 +
aagatgagaatggaccagta

SEQ ID NO: 4761 - DNA, 20 bp, Artificial Sequence
  Synthetic oligonucleotide; TGG chr11 5189551 5189570 5189567 +
aatggaccagtacagaaaat

SEQ ID NO: 4762 - DNA, 20 bp, Artificial Sequence
  Synthetic oligonucleotide; AAG chr11 5189560 5189579 5189576 +
gtacagaaaattggtaccaa

SEQ ID NO: 4763 - DNA, 20 bp, Artificial Sequence
  Synthetic oligonucleotide; TGG chr11 5189563 5189582 5189579 +
cagaaaattggtaccaaaag

SEQ ID NO: 4764 - DNA, 20 bp, Artificial Sequence
  Synthetic oligonucleotide; GGG chr11 5189564 5189583 5189580 +
agaaaattggtaccaaaagt

SEQ ID NO: 4765 - DNA, 20 bp, Artificial Sequence
  Synthetic oligonucleotide; GGG chr11 5189565 5189584 5189581 +
gaaaattggtaccaaaagtg

SEQ ID NO: 4766 - DNA, 20 bp, Artificial Sequence
  Synthetic oligonucleotide; AAG chr11 5189578 5189597 5189594 +
aaaagtggggtactgctata

SEQ ID NO: 4767 - DNA, 20 bp, Artificial Sequence
  Synthetic oligonucleotide; TGG chr11 5189594 5189613 5189610 +
tataaagatacatgaaaatg

SEQ ID NO: 4768 - DNA, 20 bp, Artificial Sequence
  Synthetic oligonucleotide; AAG chr11 5189597 5189616 5189613 +
aaagatacatgaaaatgtgg

SEQ ID NO: 4769 - DNA, 20 bp, Artificial Sequence
  Synthetic oligonucleotide; TGG chr11 5189606 5189625 5189622 +
tgaaaatgtggaagcaactt

SEQ ID NO: 4770 - DNA, 20 bp, Artificial Sequence
  Synthetic oligonucleotide; TGG chr11 5189612 5189631 5189628 +
tgtggaagcaactttggcat

SEQ ID NO: 4771 - DNA, 20 bp, Artificial Sequence
  Synthetic oligonucleotide; CAG chr11 5189619 5189638 5189635 +
gcaactttggcattggataa

SEQ ID NO: 4772 - DNA, 20 bp, Artificial Sequence
  Synthetic oligonucleotide; AGG chr11 5189620 5189639 5189636 +
caactttggcattggataac

SEQ ID NO: 4773 - DNA, 20 bp, Artificial Sequence
  Synthetic oligonucleotide; CAG chr11 5189623 5189642 5189639 +
ctttggcattggataacagg

SEQ ID NO: 4774 - DNA, 20 bp, Artificial Sequence
  Synthetic oligonucleotide; AAG chr11 5189626 5189645 5189642 +
tggcattggataacaggcag

SEQ ID NO: 4775 - DNA, 20 bp, Artificial Sequence
  Synthetic oligonucleotide; TGG chr11 5189630 5189649 5189646 +
attggataacaggcagaagt

SEQ ID NO: 4776 - DNA, 20 bp, Artificial Sequence
  Synthetic oligonucleotide; AAG chr11 5189633 5189652 5189649 +
ggataacaggcagaagttgg

SEQ ID NO: 4777 - DNA, 20 bp, Artificial Sequence
  Synthetic oligonucleotide; GAG chr11 5189635 5189654 5189651 +
ataacaggcagaagttggaa

SEQ ID NO: 4778 - DNA, 20 bp, Artificial Sequence
  Synthetic oligonucleotide; TGG chr11 5189640 5189659 5189656 +
aggcagaagttggaagagtg

SEQ ID NO: 4779 - DNA, 20 bp, Artificial Sequence
  Synthetic oligonucleotide; CGG chr11 5189644 5189663 5189660 +
agaagttggaagagtgtgga

SEQ ID NO: 4780 - DNA, 20 bp, Artificial Sequence
  Synthetic oligonucleotide; CAG chr11 5189649 5189668 5189665 +
ttggaagagtgtggacggct

SEQ ID NO: 4781 - DNA, 20 bp, Artificial Sequence
  Synthetic oligonucleotide; AAG chr11 5189652 5189671 5189668 +
gaagagtgtggacggctcag

SEQ ID NO: 4782 - DNA, 20 bp, Artificial Sequence
  Synthetic oligonucleotide; AAG chr11 5189655 5189674 5189671 +
gagtgtggacggctcagaag

SEQ ID NO: 4783 - DNA, 20 bp, Artificial Sequence
  Synthetic oligonucleotide; CAG chr11 5189659 5189678 5189675 +
gtggacggctcagaagaaga

SEQ ID NO: 4784 - DNA, 20 bp, Artificial Sequence
  Synthetic oligonucleotide; AGG chr11 5189660 5189679 5189676 +
tggacggctcagaagaagac

SEQ ID NO: 4785 - DNA, 20 bp, Artificial Sequence
  Synthetic oligonucleotide; GGG chr11 5189661 5189680 5189677 +
ggacggctcagaagaagaca

SEQ ID NO: 4786 - DNA, 20 bp, Artificial Sequence
  Synthetic oligonucleotide; GAG chr11 5189663 5189682 5189679 +
acggctcagaagaagacagg

SEQ ID NO: 4787 - DNA, 20 bp, Artificial Sequence
  Synthetic oligonucleotide; GAG chr11 5189668 5189687 5189684 +
tcagaagaagacagggagat

SEQ ID NO: 4788 - DNA, 20 bp, Artificial Sequence
  Synthetic oligonucleotide; AGG chr11 5189669 5189688 5189685 +
cagaagaagacagggagatg

SEQ ID NO: 4789 - DNA, 20 bp, Artificial Sequence
  Synthetic oligonucleotide; GGG chr11 5189670 5189689 5189686 +
agaagaagacagggagatga

SEQ ID NO: 4790 - DNA, 20 bp, Artificial Sequence
  Synthetic oligonucleotide; GAG chr11 5189672 5189691 5189688 +
aagaagacagggagatgagg

SEQ ID NO: 4791 - DNA, 20 bp, Artificial Sequence
  Synthetic oligonucleotide; TGG chr11 5189679 5189698 5189695 +
cagggagatgagggagaatt

SEQ ID NO: 4792 - DNA, 20 bp, Artificial Sequence
  Synthetic oligonucleotide; TAG chr11 5189689 5189708 5189705 +
agggagaatttggaactttc

SEQ ID NO: 4793 - DNA, 20 bp, Artificial Sequence
  Synthetic oligonucleotide; GAG chr11 5189691 5189710 5189707 +
ggagaatttggaactttcta

SEQ ID NO: 4794 - DNA, 20 bp, Artificial Sequence
  Synthetic oligonucleotide; TGG chr11 5189699 5189718 5189715 +
tggaactttctagagacttg

SEQ ID NO: 4795 - DNA, 20 bp, Artificial Sequence
  Synthetic oligonucleotide; TGG chr11 5189704 5189723 5189720 +
ctttctagagacttgtggaa

SEQ ID NO: 4796 - DNA, 20 bp, Artificial Sequence
  Synthetic oligonucleotide; TAG chr11 5189725 5189744 5189741 +
ggttgtgaccaaaattctga

SEQ ID NO: 4797 - DNA, 20 bp, Artificial Sequence
  Synthetic oligonucleotide; TGG chr11 5189733 5189752 5189749 +
ccaaaattctgatagtgata

SEQ ID NO: 4798 - DNA, 20 bp, Artificial Sequence
  Synthetic oligonucleotide; AAG chr11 5189742 5189761 5189758 +
tgatagtgatatggacaatg

SEQ ID NO: 4799 - DNA, 20 bp, Artificial Sequence
  Synthetic oligonucleotide; CAG chr11 5189747 5189766 5189763 +
gtgatatggacaatgaagtc

SEQ ID NO: 4800 - DNA, 20 bp, Artificial Sequence
  Synthetic oligonucleotide; AGG chr11 5189748 5189767 5189764 +
tgatatggacaatgaagtcc

SEQ ID NO: 4801 - DNA, 20 bp, Artificial Sequence
  Synthetic oligonucleotide; GAG chr11 5189753 5189772 5189769 +
tggacaatgaagtccaggct

SEQ ID NO: 4802 - DNA, 20 bp, Artificial Sequence
  Synthetic oligonucleotide; AGG chr11 5189754 5189773 5189770 +
ggacaatgaagtccaggctg

SEQ ID NO: 4803 - DNA, 20 bp, Artificial Sequence
  Synthetic oligonucleotide; TGG chr11 5189757 5189776 5189773 +
caatgaagtccaggctgagg

SEQ ID NO: 4804 - DNA, 20 bp, Artificial Sequence
  Synthetic oligonucleotide; CAG chr11 5189763 5189782 5189779 +
agtccaggctgaggtggtct

SEQ ID NO: 4805 - DNA, 20 bp, Artificial Sequence
  Synthetic oligonucleotide; TGG chr11 5189767 5189786 5189783 +
caggctgaggtggtctcaga

SEQ ID NO: 4806 - DNA, 20 bp, Artificial Sequence
  Synthetic oligonucleotide; TGG chr11 5189782 5189801 5189798 +
tcagatggaaatgaatttat

SEQ ID NO: 4807 - DNA, 20 bp, Artificial Sequence
  Synthetic oligonucleotide; TGG chr11 5189789 5189808 5189805 +
gaaatgaatttattggaaac

SEQ ID NO: 4808 - DNA, 20 bp, Artificial Sequence
  Synthetic oligonucleotide; GAG chr11 5189791 5189810 5189807 +
aatgaatttattggaaactg

SEQ ID NO: 4809 - DNA, 20 bp, Artificial Sequence
  Synthetic oligonucleotide; AAG chr11 5189796 5189815 5189812 +
atttattggaaactggagca

SEQ ID NO: 4810 - DNA, 20 bp, Artificial Sequence
  Synthetic oligonucleotide; AGG chr11 5189797 5189816 5189813 +
tttattggaaactggagcaa

SEQ ID NO: 4811 - DNA, 20 bp, Artificial Sequence
  Synthetic oligonucleotide; TAG chr11 5189817 5189836 5189833 +
aggtcacttttgttatacat

SEQ ID NO: 4812 - DNA, 20 bp, Artificial Sequence
  Synthetic oligonucleotide; AAG chr11 5189822 5189841 5189838 +
acttttgttatacattagca

SEQ ID NO: 4813 - DNA, 20 bp, Artificial Sequence
  Synthetic oligonucleotide; GAG chr11 5189824 5189843 5189840 +
ttttgttatacattagcaaa

SEQ ID NO: 4814 - DNA, 20 bp, Artificial Sequence
  Synthetic oligonucleotide; AGG chr11 5189825 5189844 5189841 +
tttgttatacattagcaaag

SEQ ID NO: 4815 - DNA, 20 bp, Artificial Sequence
  Synthetic oligonucleotide; TAG chr11 5189851 5189870 5189867 +
actgcactgtgcctctacct

SEQ ID NO: 4816 - DNA, 20 bp, Artificial Sequence
  Synthetic oligonucleotide; GAG chr11 5189853 5189872 5189869 +
tgcactgtgcctctacctta

SEQ ID NO: 4817 - DNA, 20 bp, Artificial Sequence
  Synthetic oligonucleotide; TGG chr11 5189862 5189881 5189878 +
cctctaccttagagaatctg

SEQ ID NO: 4818 - DNA, 20 bp, Artificial Sequence
  Synthetic oligonucleotide; AAG chr11 5189872 5189891 5189888 +
agagaatctgtggaaattcg

SEQ ID NO: 4819 - DNA, 20 bp, Artificial Sequence
  Synthetic oligonucleotide; AAG chr11 5189890 5189909 5189906 +
cgaagttgataatattattt

SEQ ID NO: 4820 - DNA, 20 bp, Artificial Sequence
  Synthetic oligonucleotide; CAG chr11 5189901 5189920 5189917 +
atattatttaagttatgtga

SEQ ID NO: 4821 - DNA, 20 bp, Artificial Sequence
  Synthetic oligonucleotide; AAG chr11 5189904 5189923 5189920 +
ttatttaagttatgtgacag

SEQ ID NO: 4822 - DNA, 20 bp, Artificial Sequence
  Synthetic oligonucleotide; AAG chr11 5189912 5189931 5189928 +
gttatgtgacagaagtttct

SEQ ID NO: 4823 - DNA, 20 bp, Artificial Sequence
  Synthetic oligonucleotide; CAG chr11 5189915 5189934 5189931 +
atgtgacagaagtttctaag

SEQ ID NO: 4824 - DNA, 20 bp, Artificial Sequence
  Synthetic oligonucleotide; AAG chr11 5189919 5189938 5189935 +
gacagaagtttctaagcagc

SEQ ID NO: 4825 - DNA, 20 bp, Artificial Sequence
  Synthetic oligonucleotide; AGG chr11 5189920 5189939 5189936 +
acagaagtttctaagcagca

SEQ ID NO: 4826 - DNA, 20 bp, Artificial Sequence
  Synthetic oligonucleotide; AAG chr11 5189928 5189947 5189944 +
ttctaagcagcaaggtgttc

SEQ ID NO: 4827 - DNA, 20 bp, Artificial Sequence
  Synthetic oligonucleotide; TGG chr11 5189939 5189958 5189955 +
aaggtgttcaagatgtgtcc

SEQ ID NO: 4828 - DNA, 20 bp, Artificial Sequence
  Synthetic oligonucleotide; GAG chr11 5189972 5189991 5189988 +
caacctatgctcatatgtgt

SEQ ID NO: 4829 - DNA, 20 bp, Artificial Sequence
  Synthetic oligonucleotide; AAG chr11 5189977 5189996 5189993 +
tatgctcatatgtgtgagca

SEQ ID NO: 4830 - DNA, 20 bp, Artificial Sequence
  Synthetic oligonucleotide; CAG chr11 5189994 5190013 5190010 +
gcaaagaaataacataaaat

SEQ ID NO: 4831 - DNA, 20 bp, Artificial Sequence
  Synthetic oligonucleotide; AAG chr11 5190010 5190029 5190026 +
aaatcagaacttatatttaa

SEQ ID NO: 4832 - DNA, 20 bp, Artificial Sequence
  Synthetic oligonucleotide; AGG chr11 5190011 5190030 5190027 +
aatcagaacttatatttaaa

SEQ ID NO: 4833 - DNA, 20 bp, Artificial Sequence
  Synthetic oligonucleotide; GGG chr11 5190012 5190031 5190028 +
atcagaacttatatttaaaa

SEQ ID NO: 4834 - DNA, 20 bp, Artificial Sequence
  Synthetic oligonucleotide; AAG chr11 5190015 5190034 5190031 +
agaacttatatttaaaaggg

SEQ ID NO: 4835 - DNA, 20 bp, Artificial Sequence
  Synthetic oligonucleotide; CAG chr11 5190018 5190037 5190034 +
acttatatttaaaagggaag

SEQ ID NO: 4836 - DNA, 20 bp, Artificial Sequence
  Synthetic oligonucleotide; GAG chr11 5190020 5190039 5190036 +
ttatatttaaaagggaagca

SEQ ID NO: 4837 - DNA, 20 bp, Artificial Sequence
  Synthetic oligonucleotide; AAG chr11 5190028 5190047 5190044 +
aaaagggaagcagagcataa

SEQ ID NO: 4838 - DNA, 20 bp, Artificial Sequence
  Synthetic oligonucleotide; TGG chr11 5190033 5190052 5190049 +
ggaagcagagcataaaagtt

SEQ ID NO: 4839 - DNA, 20 bp, Artificial Sequence
  Synthetic oligonucleotide; CGG chr11 5190049 5190068 5190065 +
agtttggaaaattatctgct

SEQ ID NO: 4840 - DNA, 20 bp, Artificial Sequence
  Synthetic oligonucleotide; TGG chr11 5190057 5190076 5190073 +
aaattatctgctcggccatg

SEQ ID NO: 4841 - DNA, 20 bp, Artificial Sequence
  Synthetic oligonucleotide; TAG chr11 5190060 5190079 5190076 +
ttatctgctcggccatgtgg

SEQ ID NO: 4842 - DNA, 20 bp, Artificial Sequence
  Synthetic oligonucleotide; CAG chr11 5190067 5190086 5190083 +
ctcggccatgtggtagaaaa

SEQ ID NO: 4843 - DNA, 20 bp, Artificial Sequence
  Synthetic oligonucleotide; AAG chr11 5190070 5190089 5190086 +
ggccatgtggtagaaaacag

SEQ ID NO: 4844 - DNA, 20 bp, Artificial Sequence
  Synthetic oligonucleotide; AAG chr11 5190083 5190102 5190099 +
aaaacagaagctcattttca

SEQ ID NO: 4845 - DNA, 20 bp, Artificial Sequence
  Synthetic oligonucleotide; AGG chr11 5190084 5190103 5190100 +
aaacagaagctcattttcaa

SEQ ID NO: 4846 - DNA, 20 bp, Artificial Sequence
  Synthetic oligonucleotide; GAG chr11 5190086 5190105 5190102 +
acagaagctcattttcaaag

SEQ ID NO: 4847 - DNA, 20 bp, Artificial Sequence
  Synthetic oligonucleotide; AAG chr11 5190095 5190114 5190111 +
cattttcaaaggagcaattc

SEQ ID NO: 4848 - DNA, 20 bp, Artificial Sequence
  Synthetic oligonucleotide; CAG chr11 5190098 5190117 5190114 +
tttcaaaggagcaattcaag

SEQ ID NO: 4849 - DNA, 20 bp, Artificial Sequence
  Synthetic oligonucleotide; AGG chr11 5190099 5190118 5190115 +
ttcaaaggagcaattcaagc

SEQ ID NO: 4850 - DNA, 20 bp, Artificial Sequence
  Synthetic oligonucleotide; TAG chr11 5190105 5190124 5190121 +
ggagcaattcaagcaggctg

SEQ ID NO: 4851 - DNA, 20 bp, Artificial Sequence
  Synthetic oligonucleotide; AAG chr11 5190123 5190142 5190139 +
tgtagaaatttgcataaatg

SEQ ID NO: 4852 - DNA, 20 bp, Artificial Sequence
  Synthetic oligonucleotide; GAG chr11 5190125 5190144 5190141 +
tagaaatttgcataaatgaa

SEQ ID NO: 4853 - DNA, 20 bp, Artificial Sequence
  Synthetic oligonucleotide; AGG chr11 5190126 5190145 5190142 +
agaaatttgcataaatgaag

SEQ ID NO: 4854 - DNA, 20 bp, Artificial Sequence
  Synthetic oligonucleotide; GAG chr11 5190128 5190147 5190144 +
aaatttgcataaatgaagag

SEQ ID NO: 4855 - DNA, 20 bp, Artificial Sequence
  Synthetic oligonucleotide; GAG chr11 5190133 5190152 5190149 +
tgcataaatgaagaggagcc

SEQ ID NO: 4856 - DNA, 20 bp, Artificial Sequence
  Synthetic oligonucleotide; TAG chr11 5190142 5190161 5190158 +
gaagaggagccgagttctaa

SEQ ID NO: 4857 - DNA, 20 bp, Artificial Sequence
  Synthetic oligonucleotide; AAG chr11 5190153 5190172 5190169 +
gagttctaatagccaaaata

SEQ ID NO: 4858 - DNA, 20 bp, Artificial Sequence
  Synthetic oligonucleotide; AGG chr11 5190154 5190173 5190170 +
agttctaatagccaaaataa

SEQ ID NO: 4859 - DNA, 20 bp, Artificial Sequence
  Synthetic oligonucleotide; GGG chr11 5190155 5190174 5190171 +
gttctaatagccaaaataaa

SEQ ID NO: 4860 - DNA, 20 bp, Artificial Sequence
  Synthetic oligonucleotide; GGG chr11 5190156 5190175 5190172 +
ttctaatagccaaaataaag

SEQ ID NO: 4861 - DNA, 20 bp, Artificial Sequence
  Synthetic oligonucleotide; GAG chr11 5190158 5190177 5190174 +
ctaatagccaaaataaaggg

SEQ ID NO: 4862 - DNA, 20 bp, Artificial Sequence
  Synthetic oligonucleotide; AAG chr11 5190170 5190189 5190186 +
ataaaggggagaatgcctca

SEQ ID NO: 4863 - DNA, 20 bp, Artificial Sequence
  Synthetic oligonucleotide; CAG chr11 5190179 5190198 5190195 +
agaatgcctcaaagacattt

SEQ ID NO: 4864 - DNA, 20 bp, Artificial Sequence
  Synthetic oligonucleotide; GAG chr11 5190181 5190200 5190197 +
aatgcctcaaagacatttca

SEQ ID NO: 4865 - DNA, 20 bp, Artificial Sequence
  Synthetic oligonucleotide; TAG chr11 5190191 5190210 5190207 +
agacatttcagagacccttg

SEQ ID NO: 4866 - DNA, 20 bp, Artificial Sequence
  Synthetic oligonucleotide; CAG chr11 5190194 5190213 5190210 +
catttcagagacccttgtag

SEQ ID NO: 4867 - DNA, 20 bp, Artificial Sequence
  Synthetic oligonucleotide; CAG chr11 5190209 5190228 5190225 +
tgtagcagcccctcacatca

SEQ ID NO: 4868 - DNA, 20 bp, Artificial Sequence
  Synthetic oligonucleotide; AGG chr11 5190210 5190229 5190226 +
gtagcagcccctcacatcac

SEQ ID NO: 4869 - DNA, 20 bp, Artificial Sequence
  Synthetic oligonucleotide; TGG chr11 5190215 5190234 5190231 +
agcccctcacatcacaggcc

SEQ ID NO: 4870 - DNA, 20 bp, Artificial Sequence
  Synthetic oligonucleotide; TGG chr11 5190218 5190237 5190234 +
ccctcacatcacaggcctgg

SEQ ID NO: 4871 - DNA, 20 bp, Artificial Sequence
  Synthetic oligonucleotide; TAG chr11 5190223 5190242 5190239 +
acatcacaggcctggtggcc

SEQ ID NO: 4872 - DNA, 20 bp, Artificial Sequence
  Synthetic oligonucleotide; AGG chr11 5190224 5190243 5190240 +
catcacaggcctggtggcct

SEQ ID NO: 4873 - DNA, 20 bp, Artificial Sequence
  Synthetic oligonucleotide; GAG chr11 5190226 5190245 5190242 +
tcacaggcctggtggcctag

SEQ ID NO: 4874 - DNA, 20 bp, Artificial Sequence
  Synthetic oligonucleotide; TGG chr11 5190244 5190263 5190260 +
aggagtactgaatgattttg

SEQ ID NO: 4875 - DNA, 20 bp, Artificial Sequence
  Synthetic oligonucleotide; GGG chr11 5190245 5190264 5190261 +
ggagtactgaatgattttgt

SEQ ID NO: 4876 - DNA, 20 bp, Artificial Sequence
  Synthetic oligonucleotide; GAG chr11 5190249 5190268 5190265 +
tactgaatgattttgtgggt

SEQ ID NO: 4877 - DNA, 20 bp, Artificial Sequence
  Synthetic oligonucleotide; CAG chr11 5190255 5190274 5190271 +
atgattttgtgggtgagatt

SEQ ID NO: 4878 - DNA, 20 bp, Artificial Sequence
  Synthetic oligonucleotide; AGG chr11 5190256 5190275 5190272 +
tgattttgtgggtgagattc

SEQ ID NO: 4879 - DNA, 20 bp, Artificial Sequence
  Synthetic oligonucleotide; GAG chr11 5190272 5190291 5190288 +
attcaggaccctgctgcctt

SEQ ID NO: 4880 - DNA, 20 bp, Artificial Sequence
  Synthetic oligonucleotide; CAG chr11 5190275 5190294 5190291 +
caggaccctgctgccttgag

SEQ ID NO: 4881 - DNA, 20 bp, Artificial Sequence
  Synthetic oligonucleotide; CAG chr11 5190281 5190300 5190297 +
cctgctgccttgagcagctt

SEQ ID NO: 4882 - DNA, 20 bp, Artificial Sequence
  Synthetic oligonucleotide; AGG chr11 5190282 5190301 5190298 +
ctgctgccttgagcagcttc

SEQ ID NO: 4883 - DNA, 20 bp, Artificial Sequence
  Synthetic oligonucleotide; TGG chr11 5190303 5190322 5190319 +
ggacactgttccttgcatcc

SEQ ID NO: 4884 - DNA, 20 bp, Artificial Sequence
  Synthetic oligonucleotide; CAG chr11 5190312 5190331 5190328 +
tccttgcatcctggctgctc

SEQ ID NO: 4885 - DNA, 20 bp, Artificial Sequence
  Synthetic oligonucleotide; CAG chr11 5190318 5190337 5190334 +
catcctggctgctccagcac

SEQ ID NO: 4886 - DNA, 20 bp, Artificial Sequence
  Synthetic oligonucleotide; TGG chr11 5190324 5190343 5190340 +
ggctgctccagcaccagctg

SEQ ID NO: 4887 - DNA, 20 bp, Artificial Sequence
  Synthetic oligonucleotide; AAG chr11 5190331 5190350 5190347 +
ccagcaccagctgtggctca

SEQ ID NO: 4888 - DNA, 20 bp, Artificial Sequence
  Synthetic oligonucleotide; AGG chr11 5190332 5190351 5190348 +
cagcaccagctgtggctcaa

SEQ ID NO: 4889 - DNA, 20 bp, Artificial Sequence
  Synthetic oligonucleotide; GGG chr11 5190333 5190352 5190349 +
agcaccagctgtggctcaaa

SEQ ID NO: 4890 - DNA, 20 bp, Artificial Sequence
  Synthetic oligonucleotide; GGG chr11 5190334 5190353 5190350 +
gcaccagctgtggctcaaag

SEQ ID NO: 4891 - DNA, 20 bp, Artificial Sequence
  Synthetic oligonucleotide; AAG chr11 5190340 5190359 5190356 +
gctgtggctcaaaggggccc

SEQ ID NO: 4892 - DNA, 20 bp, Artificial Sequence
  Synthetic oligonucleotide; CAG chr11 5190345 5190364 5190361 +
ggctcaaaggggcccaagaa

SEQ ID NO: 4893 - DNA, 20 bp, Artificial Sequence
  Synthetic oligonucleotide; AAG chr11 5190350 5190369 5190366 +
aaaggggcccaagaacagct

SEQ ID NO: 4894 - DNA, 20 bp, Artificial Sequence
  Synthetic oligonucleotide; AGG chr11 5190351 5190370 5190367 +
aaggggcccaagaacagcta

SEQ ID NO: 4895 - DNA, 20 bp, Artificial Sequence
  Synthetic oligonucleotide; CAG chr11 5190363 5190382 5190379 +
aacagctaaggccactgctt

SEQ ID NO: 4896 - DNA, 20 bp, Artificial Sequence
  Synthetic oligonucleotide; GAG chr11 5190365 5190384 5190381 +
cagctaaggccactgcttca

SEQ ID NO: 4897 - DNA, 20 bp, Artificial Sequence
  Synthetic oligonucleotide; AGG chr11 5190366 5190385 5190382 +
agctaaggccactgcttcag

SEQ ID NO: 4898 - DNA, 20 bp, Artificial Sequence
  Synthetic oligonucleotide; GGG chr11 5190367 5190386 5190383 +
gctaaggccactgcttcaga

SEQ ID NO: 4899 - DNA, 20 bp, Artificial Sequence
  Synthetic oligonucleotide; AAG chr11 5190373 5190392 5190389 +
gccactgcttcagagggtgc

SEQ ID NO: 4900 - DNA, 20 bp, Artificial Sequence
  Synthetic oligonucleotide; AAG chr11 5190380 5190399 5190396 +
cttcagagggtgcaagacat

SEQ ID NO: 4901 - DNA, 20 bp, Artificial Sequence
  Synthetic oligonucleotide; TGG chr11 5190386 5190405 5190402 +
agggtgcaagacataagcct

SEQ ID NO: 4902 - DNA, 20 bp, Artificial Sequence
  Synthetic oligonucleotide; GAG chr11 5190388 5190407 5190404 +
ggtgcaagacataagccttg

SEQ ID NO: 4903 - DNA, 20 bp, Artificial Sequence
  Synthetic oligonucleotide; AGG chr11 5190389 5190408 5190405 +
gtgcaagacataagccttgg

SEQ ID NO: 4904 - DNA, 20 bp, Artificial Sequence
  Synthetic oligonucleotide; TGG chr11 5190400 5190419 5190416 +
aagccttggaggcttccaca

SEQ ID NO: 4905 - DNA, 20 bp, Artificial Sequence
  Synthetic oligonucleotide; TGG chr11 5190412 5190431 5190428 +
cttccacatggtgataaatc

SEQ ID NO: 4906 - DNA, 20 bp, Artificial Sequence
  Synthetic oligonucleotide; GGG chr11 5190413 5190432 5190429 +
ttccacatggtgataaatct

SEQ ID NO: 4907 - DNA, 20 bp, Artificial Sequence
  Synthetic oligonucleotide; GAG chr11 5190415 5190434 5190431 +
ccacatggtgataaatctgg

SEQ ID NO: 4908 - DNA, 20 bp, Artificial Sequence
  Synthetic oligonucleotide; AAG chr11 5190424 5190443 5190440 +
gataaatctgggagtgtgca

SEQ ID NO: 4909 - DNA, 20 bp, Artificial Sequence
  Synthetic oligonucleotide; AGG chr11 5190425 5190444 5190441 +
ataaatctgggagtgtgcaa

SEQ ID NO: 4910 - DNA, 20 bp, Artificial Sequence
  Synthetic oligonucleotide; AAG chr11 5190433 5190452 5190449 +
gggagtgtgcaaaggtcaaa

SEQ ID NO: 4911 - DNA, 20 bp, Artificial Sequence
  Synthetic oligonucleotide; GAG chr11 5190438 5190457 5190454 +
tgtgcaaaggtcaaaaagtt

SEQ ID NO: 4912 - DNA, 20 bp, Artificial Sequence
  Synthetic oligonucleotide; AGG chr11 5190439 5190458 5190455 +
gtgcaaaggtcaaaaagttg

SEQ ID NO: 4913 - DNA, 20 bp, Artificial Sequence
  Synthetic oligonucleotide; AAG chr11 5190447 5190466 5190463 +
gtcaaaaagttgaggcttgt

SEQ ID NO: 4914 - DNA, 20 bp, Artificial Sequence
  Synthetic oligonucleotide; TAG chr11 5190458 5190477 5190474 +
gaggcttgtaagcctccacc

SEQ ID NO: 4915 - DNA, 20 bp, Artificial Sequence
  Synthetic oligonucleotide; CAG chr11 5190465 5190484 5190481 +
gtaagcctccacctagattt

SEQ ID NO: 4916 - DNA, 20 bp, Artificial Sequence
  Synthetic oligonucleotide; GAG chr11 5190467 5190486 5190483 +
aagcctccacctagatttca

SEQ ID NO: 4917 - DNA, 20 bp, Artificial Sequence
  Synthetic oligonucleotide; AGG chr11 5190468 5190487 5190484 +
agcctccacctagatttcag

SEQ ID NO: 4918 - DNA, 20 bp, Artificial Sequence
  Synthetic oligonucleotide; TAG chr11 5190476 5190495 5190492 +
cctagatttcagaggatgtg

SEQ ID NO: 4919 - DNA, 20 bp, Artificial Sequence
  Synthetic oligonucleotide; AAG chr11 5190481 5190500 5190497 +
atttcagaggatgtgtagaa

SEQ ID NO: 4920 - DNA, 20 bp, Artificial Sequence
  Synthetic oligonucleotide; GAG chr11 5190487 5190506 5190503 +
gaggatgtgtagaaaagcct

SEQ ID NO: 4921 - DNA, 20 bp, Artificial Sequence
  Synthetic oligonucleotide; CAG chr11 5190494 5190513 5190510 +
tgtagaaaagcctgagtgtt

SEQ ID NO: 4922 - DNA, 20 bp, Artificial Sequence
  Synthetic oligonucleotide; AGG chr11 5190495 5190514 5190511 +
gtagaaaagcctgagtgttc

SEQ ID NO: 4923 - DNA, 20 bp, Artificial Sequence
  Synthetic oligonucleotide; CAG chr11 5190498 5190517 5190514 +
gaaaagcctgagtgttcagg

SEQ ID NO: 4924 - DNA, 20 bp, Artificial Sequence
  Synthetic oligonucleotide; AAG chr11 5190501 5190520 5190517 +
aagcctgagtgttcaggcag

SEQ ID NO: 4925 - DNA, 20 bp, Artificial Sequence
  Synthetic oligonucleotide; CAG chr11 5190511 5190530 5190527 +
gttcaggcagaagcctcctg

SEQ ID NO: 4926 - DNA, 20 bp, Artificial Sequence
  Synthetic oligonucleotide; AGG chr11 5190512 5190531 5190528 +
ttcaggcagaagcctcctgc

SEQ ID NO: 4927 - DNA, 20 bp, Artificial Sequence
  Synthetic oligonucleotide; GGG chr11 5190513 5190532 5190529 +
tcaggcagaagcctcctgca

SEQ ID NO: 4928 - DNA, 20 bp, Artificial Sequence
  Synthetic oligonucleotide; GGG chr11 5190514 5190533 5190530 +
caggcagaagcctcctgcag

SEQ ID NO: 4929 - DNA, 20 bp, Artificial Sequence
  Synthetic oligonucleotide; CAG chr11 5190517 5190536 5190533 +
gcagaagcctcctgcagggg

SEQ ID NO: 4930 - DNA, 20 bp, Artificial Sequence
  Synthetic oligonucleotide; AAG chr11 5190530 5190549 5190546 +
gcaggggcagaaccctcatg

SEQ ID NO: 4931 - DNA, 20 bp, Artificial Sequence
  Synthetic oligonucleotide; TAG chr11 5190542 5190561 5190558 +
ccctcatgaagaacctctaa

SEQ ID NO: 4932 - DNA, 20 bp, Artificial Sequence
  Synthetic oligonucleotide; AGG chr11 5190543 5190562 5190559 +
cctcatgaagaacctctaat

SEQ ID NO: 4933 - DNA, 20 bp, Artificial Sequence
  Synthetic oligonucleotide; GGG chr11 5190544 5190563 5190560 +
ctcatgaagaacctctaata

SEQ ID NO: 4934 - DNA, 20 bp, Artificial Sequence
  Synthetic oligonucleotide; TGG chr11 5190552 5190571 5190568 +
gaacctctaatagggcaatg

SEQ ID NO: 4935 - DNA, 20 bp, Artificial Sequence
  Synthetic oligonucleotide; GAG chr11 5190554 5190573 5190570 +
acctctaatagggcaatgtg

SEQ ID NO: 4936 - DNA, 20 bp, Artificial Sequence
  Synthetic oligonucleotide; AGG chr11 5190555 5190574 5190571 +
cctctaatagggcaatgtgg

SEQ ID NO: 4937 - DNA, 20 bp, Artificial Sequence
  Synthetic oligonucleotide; GAG chr11 5190566 5190585 5190582 +
gcaatgtggaggaaaaatat

SEQ ID NO: 4938 - DNA, 20 bp, Artificial Sequence
  Synthetic oligonucleotide; AGG chr11 5190567 5190586 5190583 +
caatgtggaggaaaaatatg

SEQ ID NO: 4939 - DNA, 20 bp, Artificial Sequence
  Synthetic oligonucleotide; TGG chr11 5190571 5190590 5190587 +
gtggaggaaaaatatgaggt

SEQ ID NO: 4940 - DNA, 20 bp, Artificial Sequence
  Synthetic oligonucleotide; CAG chr11 5190584 5190603 5190600 +
atgaggttggaaccccctca

SEQ ID NO: 4941 - DNA, 20 bp, Artificial Sequence
  Synthetic oligonucleotide; GAG chr11 5190586 5190605 5190602 +
gaggttggaaccccctcaca

SEQ ID NO: 4942 - DNA, 20 bp, Artificial Sequence
  Synthetic oligonucleotide; TGG chr11 5190596 5190615 5190612 +
ccccctcacagagtctccac

SEQ ID NO: 4943 - DNA, 20 bp, Artificial Sequence
  Synthetic oligonucleotide; GGG chr11 5190597 5190616 5190613 +
cccctcacagagtctccact

SEQ ID NO: 4944 - DNA, 20 bp, Artificial Sequence
  Synthetic oligonucleotide; GGG chr11 5190598 5190617 5190614 +
ccctcacagagtctccactg

SEQ ID NO: 4945 - DNA, 20 bp, Artificial Sequence
  Synthetic oligonucleotide; TAG chr11 5190608 5190627 5190624 +
gtctccactggggcactgcc

SEQ ID NO: 4946 - DNA, 20 bp, Artificial Sequence
  Synthetic oligonucleotide; CAG chr11 5190611 5190630 5190627 +
tccactggggcactgcctag

SEQ ID NO: 4947 - DNA, 20 bp, Artificial Sequence
  Synthetic oligonucleotide; GAG chr11 5190613 5190632 5190629 +
cactggggcactgcctagca

SEQ ID NO: 4948 - DNA, 20 bp, Artificial Sequence
  Synthetic oligonucleotide; GAG chr11 5190620 5190639 5190636 +
gcactgcctagcagagctat

SEQ ID NO: 4949 - DNA, 20 bp, Artificial Sequence
  Synthetic oligonucleotide; AAG chr11 5190625 5190644 5190641 +
gcctagcagagctatgagaa

SEQ ID NO: 4950 - DNA, 20 bp, Artificial Sequence
  Synthetic oligonucleotide; AGG chr11 5190626 5190645 5190642 +
cctagcagagctatgagaaa

SEQ ID NO: 4951 - DNA, 20 bp, Artificial Sequence
  Synthetic oligonucleotide; GGG chr11 5190627 5190646 5190643 +
ctagcagagctatgagaaaa

SEQ ID NO: 4952 - DNA, 20 bp, Artificial Sequence
  Synthetic oligonucleotide; CAG chr11 5190641 5190660 5190657 +
agaaaagggccaccgtcctc

SEQ ID NO: 4953 - DNA, 20 bp, Artificial Sequence
  Synthetic oligonucleotide; CAG chr11 5190648 5190667 5190664 +
ggccaccgtcctccagaccc

SEQ ID NO: 4954 - DNA, 20 bp, Artificial Sequence
  Synthetic oligonucleotide; TGG chr11 5190653 5190672 5190669 +
ccgtcctccagaccccagaa

SEQ ID NO: 4955 - DNA, 20 bp, Artificial Sequence
  Synthetic oligonucleotide; TAG chr11 5190656 5190675 5190672 +
tcctccagaccccagaatgg

SEQ ID NO: 4956 - DNA, 20 bp, Artificial Sequence
  Synthetic oligonucleotide; CAG chr11 5190668 5190687 5190684 +
cagaatggtagatccactga

SEQ ID NO: 4957 - DNA, 20 bp, Artificial Sequence
  Synthetic oligonucleotide; TAG chr11 5190686 5190705 5190702 +
gacagtttgcaccgtgcacc

SEQ ID NO: 4958 - DNA, 20 bp, Artificial Sequence
  Synthetic oligonucleotide; AAG chr11 5190691 5190710 5190707 +
tttgcaccgtgcacctagaa

SEQ ID NO: 4959 - DNA, 20 bp, Artificial Sequence
  Synthetic oligonucleotide; AAG chr11 5190719 5190738 5190735 +
aacactcaatacaatctctt

SEQ ID NO: 4960 - DNA, 20 bp, Artificial Sequence
  Synthetic oligonucleotide; GAG chr11 5190721 5190740 5190737 +
cactcaatacaatctcttaa

SEQ ID NO: 4961 - DNA, 20 bp, Artificial Sequence
  Synthetic oligonucleotide; CAG chr11 5190724 5190743 5190740 +
tcaatacaatctcttaagag

SEQ ID NO: 4962 - DNA, 20 bp, Artificial Sequence
  Synthetic oligonucleotide; CAG chr11 5190727 5190746 5190743 +
atacaatctcttaagagcag

SEQ ID NO: 4963 - DNA, 20 bp, Artificial Sequence
  Synthetic oligonucleotide; CAG chr11 5190730 5190749 5190746 +
caatctcttaagagcagcag

SEQ ID NO: 4964 - DNA, 20 bp, Artificial Sequence
  Synthetic oligonucleotide; AGG chr11 5190731 5190750 5190747 +
aatctcttaagagcagcagc

SEQ ID NO: 4965 - DNA, 20 bp, Artificial Sequence
  Synthetic oligonucleotide; GGG chr11 5190732 5190751 5190748 +
atctcttaagagcagcagca

SEQ ID NO: 4966 - DNA, 20 bp, Artificial Sequence
  Synthetic oligonucleotide; GGG chr11 5190733 5190752 5190749 +
tctcttaagagcagcagcag

SEQ ID NO: 4967 - DNA, 20 bp, Artificial Sequence
  Synthetic oligonucleotide; AAG chr11 5190748 5190767 5190764 +
agcaggggctaaactgtgca

SEQ ID NO: 4968 - DNA, 20 bp, Artificial Sequence
  Synthetic oligonucleotide; TAG chr11 5190754 5190773 5190770 +
ggctaaactgtgcaaagcaa

SEQ ID NO: 4969 - DNA, 20 bp, Artificial Sequence
  Synthetic oligonucleotide; AGG chr11 5190755 5190774 5190771 +
gctaaactgtgcaaagcaat

SEQ ID NO: 4970 - DNA, 20 bp, Artificial Sequence
  Synthetic oligonucleotide; GGG chr11 5190756 5190775 5190772 +
ctaaactgtgcaaagcaata

SEQ ID NO: 4971 - DNA, 20 bp, Artificial Sequence
  Synthetic oligonucleotide; GGG chr11 5190757 5190776 5190773 +
taaactgtgcaaagcaatag

SEQ ID NO: 4972 - DNA, 20 bp, Artificial Sequence
  Synthetic oligonucleotide; TGG chr11 5190760 5190779 5190776 +
actgtgcaaagcaatagggg

SEQ ID NO: 4973 - DNA, 20 bp, Artificial Sequence
  Synthetic oligonucleotide; AAG chr11 5190771 5190790 5190787 +
caataggggtggaactgccc

SEQ ID NO: 4974 - DNA, 20 bp, Artificial Sequence
  Synthetic oligonucleotide; AGG chr11 5190772 5190791 5190788 +
aataggggtggaactgccca

SEQ ID NO: 4975 - DNA, 20 bp, Artificial Sequence
  Synthetic oligonucleotide; TGG chr11 5190778 5190797 5190794 +
ggtggaactgcccaaggcct

SEQ ID NO: 4976 - DNA, 20 bp, Artificial Sequence
  Synthetic oligonucleotide; GGG chr11 5190779 5190798 5190795 +
gtggaactgcccaaggcctt

SEQ ID NO: 4977 - DNA, 20 bp, Artificial Sequence
  Synthetic oligonucleotide; GAG chr11 5190781 5190800 5190797 +
ggaactgcccaaggccttgg

SEQ ID NO: 4978 - DNA, 20 bp, Artificial Sequence
  Synthetic oligonucleotide; CAG chr11 5190798 5190817 5190814 +
tgggagcccacctcttgcat

SEQ ID NO: 4979 - DNA, 20 bp, Artificial Sequence
  Synthetic oligonucleotide; GAG chr11 5190815 5190834 5190831 +
catcagtgtgtccctgatat

SEQ ID NO: 4980 - DNA, 20 bp, Artificial Sequence
  Synthetic oligonucleotide; TGG chr11 5190821 5190840 5190837 +
tgtgtccctgatatgagaca

SEQ ID NO: 4981 - DNA, 20 bp, Artificial Sequence
  Synthetic oligonucleotide; GGG chr11 5190822 5190841 5190838 +
gtgtccctgatatgagacat

SEQ ID NO: 4982 - DNA, 20 bp, Artificial Sequence
  Synthetic oligonucleotide; GGG chr11 5190823 5190842 5190839 +
tgtccctgatatgagacatg

SEQ ID NO: 4983 - DNA, 20 bp, Artificial Sequence
  Synthetic oligonucleotide; AAG chr11 5190829 5190848 5190845 +
tgatatgagacatggggtca

SEQ ID NO: 4984 - DNA, 20 bp, Artificial Sequence
  Synthetic oligonucleotide; AGG chr11 5190830 5190849 5190846 +
gatatgagacatggggtcaa

SEQ ID NO: 4985 - DNA, 20 bp, Artificial Sequence
  Synthetic oligonucleotide; GAG chr11 5190832 5190851 5190848 +
tatgagacatggggtcaaag

SEQ ID NO: 4986 - DNA, 20 bp, Artificial Sequence
  Synthetic oligonucleotide; TGG chr11 5190842 5190861 5190858 +
ggggtcaaaggagattattt

SEQ ID NO: 4987 - DNA, 20 bp, Artificial Sequence
  Synthetic oligonucleotide; GAG chr11 5190844 5190863 5190860 +
ggtcaaaggagattattttg

SEQ ID NO: 4988 - DNA, 20 bp, Artificial Sequence
  Synthetic oligonucleotide; AAG chr11 5190851 5190870 5190867 +
ggagattattttggagtgtt

SEQ ID NO: 4989 - DNA, 20 bp, Artificial Sequence
  Synthetic oligonucleotide; AGG chr11 5190852 5190871 5190868 +
gagattattttggagtgtta

SEQ ID NO: 4990 - DNA, 20 bp, Artificial Sequence
  Synthetic oligonucleotide; AAG chr11 5190884 5190903 5190900 +
gtccgttttaaactgctatg

SEQ ID NO: 4991 - DNA, 20 bp, Artificial Sequence
  Synthetic oligonucleotide; GAG chr11 5190895 5190914 5190911 +
actgctatgaagaaataccc

SEQ ID NO: 4992 - DNA, 20 bp, Artificial Sequence
  Synthetic oligonucleotide; TGG chr11 5190900 5190919 5190916 +
tatgaagaaatacccgagac

SEQ ID NO: 4993 - DNA, 20 bp, Artificial Sequence
  Synthetic oligonucleotide; GGG chr11 5190901 5190920 5190917 +
atgaagaaatacccgagact

SEQ ID NO: 4994 - DNA, 20 bp, Artificial Sequence
  Synthetic oligonucleotide; AAG chr11 5190913 5190932 5190929 +
ccgagactgggtaatttata

SEQ ID NO: 4995 - DNA, 20 bp, Artificial Sequence
  Synthetic oligonucleotide; AAG chr11 5190919 5190938 5190935 +
ctgggtaatttataaagaaa

SEQ ID NO: 4996 - DNA, 20 bp, Artificial Sequence
  Synthetic oligonucleotide; GAG chr11 5190921 5190940 5190937 +
gggtaatttataaagaaaaa

SEQ ID NO: 4997 - DNA, 20 bp, Artificial Sequence
  Synthetic oligonucleotide; TGG chr11 5190930 5190949 5190946 +
ataaagaaaaagagatttaa

SEQ ID NO: 4998 - DNA, 20 bp, Artificial Sequence
  Synthetic oligonucleotide; TAG chr11 5190938 5190957 5190954 +
aaagagatttaatggactca

SEQ ID NO: 4999 - DNA, 20 bp, Artificial Sequence
  Synthetic oligonucleotide; TGG chr11 5190952 5190971 5190968 +
gactcatagatccacattgc

SEQ ID NO: 5000 - DNA, 20 bp, Artificial Sequence
  Synthetic oligonucleotide; GGG chr11 5190953 5190972 5190969 +
actcatagatccacattgct

SEQ ID NO: 5001 - DNA, 20 bp, Artificial Sequence
  Synthetic oligonucleotide; GGG chr11 5190954 5190973 5190970 +
ctcatagatccacattgctg

SEQ ID NO: 5002 - DNA, 20 bp, Artificial Sequence
  Synthetic oligonucleotide; GAG chr11 5190956 5190975 5190972 +
catagatccacattgctggg

SEQ ID NO: 5003 - DNA, 20 bp, Artificial Sequence
  Synthetic oligonucleotide; AGG chr11 5190957 5190976 5190973 +
atagatccacattgctgggg

SEQ ID NO: 5004 - DNA, 20 bp, Artificial Sequence
  Synthetic oligonucleotide; TGG chr11 5190971 5190990 5190987 +
ctggggaggccttacaatca

SEQ ID NO: 5005 - DNA, 20 bp, Artificial Sequence
  Synthetic oligonucleotide; TGG chr11 5190974 5190993 5190990 +
gggaggccttacaatcatgg

SEQ ID NO: 5006 - DNA, 20 bp, Artificial Sequence
  Synthetic oligonucleotide; AAG chr11 5190977 5190996 5190993 +
aggccttacaatcatggtgg

SEQ ID NO: 5007 - DNA, 20 bp, Artificial Sequence
  Synthetic oligonucleotide; AGG chr11 5190978 5190997 5190994 +
ggccttacaatcatggtgga

SEQ ID NO: 5008 - DNA, 20 bp, Artificial Sequence
  Synthetic oligonucleotide; AAG chr11 5190983 5191002 5190999 +
tacaatcatggtggaaggtg

SEQ ID NO: 5009 - DNA, 20 bp, Artificial Sequence
  Synthetic oligonucleotide; AGG chr11 5190984 5191003 5191000 +
acaatcatggtggaaggtga

SEQ ID NO: 5010 - DNA, 20 bp, Artificial Sequence
  Synthetic oligonucleotide; GAG chr11 5190986 5191005 5191002 +
aatcatggtggaaggtgaag

SEQ ID NO: 5011 - DNA, 20 bp, Artificial Sequence
  Synthetic oligonucleotide; AGG chr11 5190987 5191006 5191003 +
atcatggtggaaggtgaagg

SEQ ID NO: 5012 - DNA, 20 bp, Artificial Sequence
  Synthetic oligonucleotide; GAG chr11 5190989 5191008 5191005 +
catggtggaaggtgaaggag

SEQ ID NO: 5013 - DNA, 20 bp, Artificial Sequence
  Synthetic oligonucleotide; AAG chr11 5190994 5191013 5191010 +
tggaaggtgaaggaggagca

SEQ ID NO: 5014 - DNA, 20 bp, Artificial Sequence
  Synthetic oligonucleotide; TGG chr11 5191009 5191028 5191025 +
gagcaaagtcacatctgaca

SEQ ID NO: 5015 - DNA, 20 bp, Artificial Sequence
  Synthetic oligonucleotide; TGG chr11 5191012 5191031 5191028 +
caaagtcacatctgacatgg

SEQ ID NO: 5016 - DNA, 20 bp, Artificial Sequence
  Synthetic oligonucleotide; CAG chr11 5191015 5191034 5191031 +
agtcacatctgacatggtgg

SEQ ID NO: 5017 - DNA, 20 bp, Artificial Sequence
  Synthetic oligonucleotide; AGG chr11 5191016 5191035 5191032 +
gtcacatctgacatggtggc

SEQ ID NO: 5018 - DNA, 20 bp, Artificial Sequence
  Synthetic oligonucleotide; AAG chr11 5191020 5191039 5191036 +
catctgacatggtggcaggc

SEQ ID NO: 5019 - DNA, 20 bp, Artificial Sequence
  Synthetic oligonucleotide; GAG chr11 5191022 5191041 5191038 +
tctgacatggtggcaggcaa

SEQ ID NO: 5020 - DNA, 20 bp, Artificial Sequence
  Synthetic oligonucleotide; GAG chr11 5191024 5191043 5191040 +
tgacatggtggcaggcaaga

SEQ ID NO: 5021 - DNA, 20 bp, Artificial Sequence
  Synthetic oligonucleotide; AAG chr11 5191034 5191053 5191050 +
gcaggcaagagagcatgtgc

SEQ ID NO: 5022 - DNA, 20 bp, Artificial Sequence
  Synthetic oligonucleotide; AGG chr11 5191035 5191054 5191051 +
caggcaagagagcatgtgca

SEQ ID NO: 5023 - DNA, 20 bp, Artificial Sequence
  Synthetic oligonucleotide; GGG chr11 5191036 5191055 5191052 +
aggcaagagagcatgtgcaa

SEQ ID NO: 5024 - DNA, 20 bp, Artificial Sequence
  Synthetic oligonucleotide; CAG chr11 5191060 5191079 5191076 +
aatgccctttataaaaccat

SEQ ID NO: 5025 - DNA, 20 bp, Artificial Sequence
  Synthetic oligonucleotide; GAG chr11 5191070 5191089 5191086 +
ataaaaccatcagatcttgt

SEQ ID NO: 5026 - DNA, 20 bp, Artificial Sequence
  Synthetic oligonucleotide; GAG chr11 5191089 5191108 5191105 +
tgagacttactcactatcat

SEQ ID NO: 5027 - DNA, 20 bp, Artificial Sequence
  Synthetic oligonucleotide; CAG chr11 5191094 5191113 5191110 +
cttactcactatcatgagaa

SEQ ID NO: 5028 - DNA, 20 bp, Artificial Sequence
  Synthetic oligonucleotide; CAG chr11 5191134 5191153 5191150 +
cccatgattcaattacatcc

SEQ ID NO: 5029 - DNA, 20 bp, Artificial Sequence
  Synthetic oligonucleotide; CAG chr11 5191153 5191172 5191169 +
ccagtgtgttccttccatga

SEQ ID NO: 5030 - DNA, 20 bp, Artificial Sequence
  Synthetic oligonucleotide; AGG chr11 5191154 5191173 5191170 +
cagtgtgttccttccatgac

SEQ ID NO: 5031 - DNA, 20 bp, Artificial Sequence
  Synthetic oligonucleotide; CAG chr11 5191157 5191176 5191173 +
tgtgttccttccatgacagg

SEQ ID NO: 5032 - DNA, 20 bp, Artificial Sequence
  Synthetic oligonucleotide; AGG chr11 5191158 5191177 5191174 +
gtgttccttccatgacaggc

SEQ ID NO: 5033 - DNA, 20 bp, Artificial Sequence
  Synthetic oligonucleotide; GGG chr11 5191159 5191178 5191175 +
tgttccttccatgacaggca

SEQ ID NO: 5034 - DNA, 20 bp, Artificial Sequence
  Synthetic oligonucleotide; TGG chr11 5191166 5191185 5191182 +
tccatgacaggcagggatta

SEQ ID NO: 5035 - DNA, 20 bp, Artificial Sequence
  Synthetic oligonucleotide; GGG chr11 5191167 5191186 5191183 +
ccatgacaggcagggattat

SEQ ID NO: 5036 - DNA, 20 bp, Artificial Sequence
  Synthetic oligonucleotide; AAG chr11 5191181 5191200 5191197 +
gattatgggacctactattc

SEQ ID NO: 5037 - DNA, 20 bp, Artificial Sequence
  Synthetic oligonucleotide; AAG chr11 5191184 5191203 5191200 +
tatgggacctactattcaag

SEQ ID NO: 5038 - DNA, 20 bp, Artificial Sequence
  Synthetic oligonucleotide; TGG chr11 5191192 5191211 5191208 +
ctactattcaagaagaaatt

SEQ ID NO: 5039 - DNA, 20 bp, Artificial Sequence
  Synthetic oligonucleotide; GGG chr11 5191193 5191212 5191209 +
tactattcaagaagaaattt

SEQ ID NO: 5040 - DNA, 20 bp, Artificial Sequence
  Synthetic oligonucleotide; TGG chr11 5191196 5191215 5191212 +
tattcaagaagaaatttggg

SEQ ID NO: 5041 - DNA, 20 bp, Artificial Sequence
  Synthetic oligonucleotide; GGG chr11 5191197 5191216 5191213 +
attcaagaagaaatttgggt

SEQ ID NO: 5042 - DNA, 20 bp, Artificial Sequence
  Synthetic oligonucleotide; AAG chr11 5191219 5191238 5191235 +
gaaaactgccaaaccatatc

SEQ ID NO: 5043 - DNA, 20 bp, Artificial Sequence
  Synthetic oligonucleotide; AGG chr11 5191220 5191239 5191236 +
aaaactgccaaaccatatca

SEQ ID NO: 5044 - DNA, 20 bp, Artificial Sequence
  Synthetic oligonucleotide; TGG chr11 5191240 5191259 5191256 +
aggtgtaatgactgccctgc

SEQ ID NO: 5045 - DNA, 20 bp, Artificial Sequence
  Synthetic oligonucleotide; GGG chr11 5191241 5191260 5191257 +
ggtgtaatgactgccctgct

SEQ ID NO: 5046 - DNA, 20 bp, Artificial Sequence
  Synthetic oligonucleotide; TGG chr11 5191257 5191276 5191273 +
tgctgggttttctactcgtg

SEQ ID NO: 5047 - DNA, 20 bp, Artificial Sequence
  Synthetic oligonucleotide; GGG chr11 5191258 5191277 5191274 +
gctgggttttctactcgtgt

SEQ ID NO: 5048 - DNA, 20 bp, Artificial Sequence
  Synthetic oligonucleotide; TAG chr11 5191266 5191285 5191282 +
ttctactcgtgtgggatctt

SEQ ID NO: 5049 - DNA, 20 bp, Artificial Sequence
  Synthetic oligonucleotide; TGG chr11 5191280 5191299 5191296 +
gatctttagcccctttcttt

SEQ ID NO: 5050 - DNA, 20 bp, Artificial Sequence
  Synthetic oligonucleotide; TGG chr11 5191298 5191317 5191314 +
tttggtgcatttctctcttt

SEQ ID NO: 5051 - DNA, 20 bp, Artificial Sequence
  Synthetic oligonucleotide; TGG chr11 5191303 5191322 5191319 +
tgcatttctctcttttggaa

SEQ ID NO: 5052 - DNA, 20 bp, Artificial Sequence
  Synthetic oligonucleotide; GGG chr11 5191304 5191323 5191320 +
gcatttctctcttttggaat

SEQ ID NO: 5053 - DNA, 20 bp, Artificial Sequence
  Synthetic oligonucleotide; CAG chr11 5191323 5191342 5191339 +
tgggaatttgtacccaatgc

SEQ ID NO: 5054 - DNA, 20 bp, Artificial Sequence
  Synthetic oligonucleotide; TGG chr11 5191342 5191361 5191358 +
ccagtacctccattatgtct

SEQ ID NO: 5055 - DNA, 20 bp, Artificial Sequence
  Synthetic oligonucleotide; AAG chr11 5191345 5191364 5191361 +
gtacctccattatgtcttgg

SEQ ID NO: 5056 - DNA, 20 bp, Artificial Sequence
  Synthetic oligonucleotide; CAG chr11 5191371 5191390 5191387 +
ctaacttgtttttgatttta

SEQ ID NO: 5057 - DNA, 20 bp, Artificial Sequence
  Synthetic oligonucleotide; AGG chr11 5191372 5191391 5191388 +
taacttgtttttgattttac

SEQ ID NO: 5058 - DNA, 20 bp, Artificial Sequence
  Synthetic oligonucleotide; TAG chr11 5191379 5191398 5191395 +
tttttgattttacaggctca

SEQ ID NO: 5059 - DNA, 20 bp, Artificial Sequence
  Synthetic oligonucleotide; AGG chr11 5191380 5191399 5191396 +
ttttgattttacaggctcat

SEQ ID NO: 5060 - DNA, 20 bp, Artificial Sequence
  Synthetic oligonucleotide; AAG chr11 5191386 5191405 5191402 +
ttttacaggctcataggttg

SEQ ID NO: 5061 - DNA, 20 bp, Artificial Sequence
  Synthetic oligonucleotide; AGG chr11 5191387 5191406 5191403 +
tttacaggctcataggttga

SEQ ID NO: 5062 - DNA, 20 bp, Artificial Sequence
  Synthetic oligonucleotide; GGG chr11 5191388 5191407 5191404 +
ttacaggctcataggttgaa

SEQ ID NO: 5063 - DNA, 20 bp, Artificial Sequence
  Synthetic oligonucleotide; TGG chr11 5191404 5191423 5191420 +
tgaagggacttgccttgtct

SEQ ID NO: 5064 - DNA, 20 bp, Artificial Sequence
  Synthetic oligonucleotide; AAG chr11 5191409 5191428 5191425 +
ggacttgccttgtcttggat

SEQ ID NO: 5065 - DNA, 20 bp, Artificial Sequence
  Synthetic oligonucleotide; TGG chr11 5191416 5191435 5191432 +
ccttgtcttggataagactt

SEQ ID NO: 5066 - DNA, 20 bp, Artificial Sequence
  Synthetic oligonucleotide; TGG chr11 5191423 5191442 5191439 +
ttggataagactttggactt

SEQ ID NO: 5067 - DNA, 20 bp, Artificial Sequence
  Synthetic oligonucleotide; GAG chr11 5191432 5191451 5191448 +
actttggactttggactttt

SEQ ID NO: 5068 - DNA, 20 bp, Artificial Sequence
  Synthetic oligonucleotide; TGG chr11 5191442 5191461 5191458 +
ttggacttttgagttaatgc

SEQ ID NO: 5069 - DNA, 20 bp, Artificial Sequence
  Synthetic oligonucleotide; GAG chr11 5191448 5191467 5191464 +
ttttgagttaatgctggaat

SEQ ID NO: 5070 - DNA, 20 bp, Artificial Sequence
  Synthetic oligonucleotide; AAG chr11 5191453 5191472 5191469 +
agttaatgctggaatgagtt

SEQ ID NO: 5071 - DNA, 20 bp, Artificial Sequence
  Synthetic oligonucleotide; TAG chr11 5191462 5191481 5191478 +
tggaatgagttaagactttg

SEQ ID NO: 5072 - DNA, 20 bp, Artificial Sequence
  Synthetic oligonucleotide; AGG chr11 5191463 5191482 5191479 +
ggaatgagttaagactttgt

SEQ ID NO: 5073 - DNA, 20 bp, Artificial Sequence
  Synthetic oligonucleotide; TGG chr11 5191471 5191490 5191487 +
ttaagactttgtaggactgt

SEQ ID NO: 5074 - DNA, 20 bp, Artificial Sequence
  Synthetic oligonucleotide; GGG chr11 5191472 5191491 5191488 +
taagactttgtaggactgtt

SEQ ID NO: 5075 - DNA, 20 bp, Artificial Sequence
  Synthetic oligonucleotide; AAG chr11 5191475 5191494 5191491 +
gactttgtaggactgttggg

SEQ ID NO: 5076 - DNA, 20 bp, Artificial Sequence
  Synthetic oligonucleotide; GAG chr11 5191500 5191519 5191516 +
atgattgtattttgtgatgt

SEQ ID NO: 5077 - DNA, 20 bp, Artificial Sequence
  Synthetic oligonucleotide; AAG chr11 5191503 5191522 5191519 +
attgtattttgtgatgtgag

SEQ ID NO: 5078 - DNA, 20 bp, Artificial Sequence
  Synthetic oligonucleotide; GAG chr11 5191511 5191530 5191527 +
ttgtgatgtgagaagaacat

SEQ ID NO: 5079 - DNA, 20 bp, Artificial Sequence
  Synthetic oligonucleotide; TGG chr11 5191517 5191536 5191533 +
tgtgagaagaacatgagatt

SEQ ID NO: 5080 - DNA, 20 bp, Artificial Sequence
  Synthetic oligonucleotide; AAG chr11 5191520 5191539 5191536 +
gagaagaacatgagatttgg

SEQ ID NO: 5081 - DNA, 20 bp, Artificial Sequence
  Synthetic oligonucleotide; AGG chr11 5191521 5191540 5191537 +
agaagaacatgagatttgga

SEQ ID NO: 5082 - DNA, 20 bp, Artificial Sequence
  Synthetic oligonucleotide; GGG chr11 5191522 5191541 5191538 +
gaagaacatgagatttggaa

SEQ ID NO: 5083 - DNA, 20 bp, Artificial Sequence
  Synthetic oligonucleotide; GGG chr11 5191523 5191542 5191539 +
aagaacatgagatttggaag

SEQ ID NO: 5084 - DNA, 20 bp, Artificial Sequence
  Synthetic oligonucleotide; CAG chr11 5191527 5191546 5191543 +
acatgagatttggaaggggc

SEQ ID NO: 5085 - DNA, 20 bp, Artificial Sequence
  Synthetic oligonucleotide; GAG chr11 5191529 5191548 5191545 +
atgagatttggaaggggcca

SEQ ID NO: 5086 - DNA, 20 bp, Artificial Sequence
  Synthetic oligonucleotide; AGG chr11 5191530 5191549 5191546 +
tgagatttggaaggggccag

SEQ ID NO: 5087 - DNA, 20 bp, Artificial Sequence
  Synthetic oligonucleotide; TGG chr11 5191533 5191552 5191549 +
gatttggaaggggccagagg

SEQ ID NO: 5088 - DNA, 20 bp, Artificial Sequence
  Synthetic oligonucleotide; AAG chr11 5191536 5191555 5191552 +
ttggaaggggccagaggtgg

SEQ ID NO: 5089 - DNA, 20 bp, Artificial Sequence
  Synthetic oligonucleotide; AGG chr11 5191537 5191556 5191553 +
tggaaggggccagaggtgga

SEQ ID NO: 5090 - DNA, 20 bp, Artificial Sequence
  Synthetic oligonucleotide; TGG chr11 5191543 5191562 5191559 +
gggccagaggtggaaggata

SEQ ID NO: 5091 - DNA, 20 bp, Artificial Sequence
  Synthetic oligonucleotide; TGG chr11 5191548 5191567 5191564 +
agaggtggaaggatatggtt

SEQ ID NO: 5092 - DNA, 20 bp, Artificial Sequence
  Synthetic oligonucleotide; CAG chr11 5191592 5191611 5191608 +
tcatgttaaattataatcac

SEQ ID NO: 5093 - DNA, 20 bp, Artificial Sequence
  Synthetic oligonucleotide; TGG chr11 5191598 5191617 5191614 +
taaattataatcaccagcgt

SEQ ID NO: 5094 - DNA, 20 bp, Artificial Sequence
  Synthetic oligonucleotide; GAG chr11 5191600 5191619 5191616 +
aattataatcaccagcgttg

SEQ ID NO: 5095 - DNA, 20 bp, Artificial Sequence
  Synthetic oligonucleotide; AGG chr11 5191601 5191620 5191617 +
attataatcaccagcgttgg

SEQ ID NO: 5096 - DNA, 20 bp, Artificial Sequence
  Synthetic oligonucleotide; TGG chr11 5191604 5191623 5191620 +
ataatcaccagcgttggagg

SEQ ID NO: 5097 - DNA, 20 bp, Artificial Sequence
  Synthetic oligonucleotide; GGG chr11 5191605 5191624 5191621 +
taatcaccagcgttggaggt

SEQ ID NO: 5098 - DNA, 20 bp, Artificial Sequence
  Synthetic oligonucleotide; GGG chr11 5191606 5191625 5191622 +
aatcaccagcgttggaggtg

SEQ ID NO: 5099 - DNA, 20 bp, Artificial Sequence
  Synthetic oligonucleotide; TGG chr11 5191614 5191633 5191630 +
gcgttggaggtggggccttg

SEQ ID NO: 5100 - DNA, 20 bp, Artificial Sequence
  Synthetic oligonucleotide; GGG chr11 5191615 5191634 5191631 +
cgttggaggtggggccttgt

SEQ ID NO: 5101 - DNA, 20 bp, Artificial Sequence
  Synthetic oligonucleotide; GAG chr11 5191617 5191636 5191633 +
ttggaggtggggccttgtgg

SEQ ID NO: 5102 - DNA, 20 bp, Artificial Sequence
  Synthetic oligonucleotide; AGG chr11 5191618 5191637 5191634 +
tggaggtggggccttgtggg

SEQ ID NO: 5103 - DNA, 20 bp, Artificial Sequence
  Synthetic oligonucleotide; TGG chr11 5191632 5191651 5191648 +
tgtgggaggtaattcaatca

SEQ ID NO: 5104 - DNA, 20 bp, Artificial Sequence
  Synthetic oligonucleotide; TGG chr11 5191635 5191654 5191651 +
gggaggtaattcaatcatgg

SEQ ID NO: 5105 - DNA, 20 bp, Artificial Sequence
  Synthetic oligonucleotide; CAG chr11 5191638 5191657 5191654 +
aggtaattcaatcatggtgg

SEQ ID NO: 5106 - DNA, 20 bp, Artificial Sequence
  Synthetic oligonucleotide; GAG chr11 5191640 5191659 5191656 +
gtaattcaatcatggtggca

SEQ ID NO: 5107 - DNA, 20 bp, Artificial Sequence
  Synthetic oligonucleotide; CAG chr11 5191650 5191669 5191666 +
catggtggcagagttctcat

SEQ ID NO: 5108 - DNA, 20 bp, Artificial Sequence
  Synthetic oligonucleotide; TAG chr11 5191658 5191677 5191674 +
cagagttctcatcagcgatt

SEQ ID NO: 5109 - DNA, 20 bp, Artificial Sequence
  Synthetic oligonucleotide; TGG chr11 5191673 5191692 5191689 +
cgatttagtaccatccccct

SEQ ID NO: 5110 - DNA, 20 bp, Artificial Sequence
  Synthetic oligonucleotide; TAG chr11 5191683 5191702 5191699 +
ccatcccccttggtactgta

SEQ ID NO: 5111 - DNA, 20 bp, Artificial Sequence
  Synthetic oligonucleotide; GAG chr11 5191687 5191706 5191703 +
cccccttggtactgtatagt

SEQ ID NO: 5112 - DNA, 20 bp, Artificial Sequence
  Synthetic oligonucleotide; AAG chr11 5191695 5191714 5191711 +
gtactgtatagtgagttctc

SEQ ID NO: 5113 - DNA, 20 bp, Artificial Sequence
  Synthetic oligonucleotide; GAG chr11 5191697 5191716 5191713 +
actgtatagtgagttctcaa

SEQ ID NO: 5114 - DNA, 20 bp, Artificial Sequence
  Synthetic oligonucleotide; AGG chr11 5191698 5191717 5191714 +
ctgtatagtgagttctcaag

SEQ ID NO: 5115 - DNA, 20 bp, Artificial Sequence
  Synthetic oligonucleotide; TGG chr11 5191702 5191721 5191718 +
atagtgagttctcaagaggc

SEQ ID NO: 5116 - DNA, 20 bp, Artificial Sequence
  Synthetic oligonucleotide; AAG chr11 5191713 5191732 5191729 +
tcaagaggctggttgtttga

SEQ ID NO: 5117 - DNA, 20 bp, Artificial Sequence
  Synthetic oligonucleotide; TAG chr11 5191720 5191739 5191736 +
gctggttgtttgaaagtgtg

SEQ ID NO: 5118 - DNA, 20 bp, Artificial Sequence
  Synthetic oligonucleotide; TGG chr11 5191750 5191769 5191766 +
taccctgcttctccctgtcc

SEQ ID NO: 5119 - DNA, 20 bp, Artificial Sequence
  Synthetic oligonucleotide; AAG chr11 5191760 5191779 5191776 +
ctccctgtcctggccatgtg

SEQ ID NO: 5120 - DNA, 20 bp, Artificial Sequence
  Synthetic oligonucleotide; AAG chr11 5191798 5191817 5191814 +
ttgtcttctgccatgattgt

SEQ ID NO: 5121 - DNA, 20 bp, Artificial Sequence
  Synthetic oligonucleotide; GAG chr11 5191807 5191826 5191823 +
gccatgattgtaagtttctt

SEQ ID NO: 5122 - DNA, 20 bp, Artificial Sequence
  Synthetic oligonucleotide; AGG chr11 5191808 5191827 5191824 +
ccatgattgtaagtttcttg

SEQ ID NO: 5123 - DNA, 20 bp, Artificial Sequence
  Synthetic oligonucleotide; TAG chr11 5191817 5191836 5191833 +
taagtttcttgaggtctccc

SEQ ID NO: 5124 - DNA, 20 bp, Artificial Sequence
  Synthetic oligonucleotide; AAG chr11 5191820 5191839 5191836 +
gtttcttgaggtctccctag

SEQ ID NO: 5125 - DNA, 20 bp, Artificial Sequence
  Synthetic oligonucleotide; GAG chr11 5191825 5191844 5191841 +
ttgaggtctccctagaagct

SEQ ID NO: 5126 - DNA, 20 bp, Artificial Sequence
  Synthetic oligonucleotide; CAG chr11 5191828 5191847 5191844 +
aggtctccctagaagctgag

SEQ ID NO: 5127 - DNA, 20 bp, Artificial Sequence
  Synthetic oligonucleotide; CAG chr11 5191851 5191870 5191867 +
atgctgccatgcttcttgta

SEQ ID NO: 5128 - DNA, 20 bp, Artificial Sequence
  Synthetic oligonucleotide; AAG chr11 5191858 5191877 5191874 +
catgcttcttgtacagcctg

SEQ ID NO: 5129 - DNA, 20 bp, Artificial Sequence
  Synthetic oligonucleotide; GAG chr11 5191867 5191886 5191883 +
tgtacagcctgaagaacttt

SEQ ID NO: 5130 - DNA, 20 bp, Artificial Sequence
  Synthetic oligonucleotide; CAG chr11 5191901 5191920 5191917 +
tctgttctttataaattacc

SEQ ID NO: 5131 - DNA, 20 bp, Artificial Sequence
  Synthetic oligonucleotide; CAG chr11 5191907 5191926 5191923 +
ctttataaattacccagtct

SEQ ID NO: 5132 - DNA, 20 bp, Artificial Sequence
  Synthetic oligonucleotide; AGG chr11 5191908 5191927 5191924 +
tttataaattacccagtctc

SEQ ID NO: 5133 - DNA, 20 bp, Artificial Sequence
  Synthetic oligonucleotide; CAG chr11 5191921 5191940 5191937 +
cagtctcaggtattttttta

SEQ ID NO: 5134 - DNA, 20 bp, Artificial Sequence
  Synthetic oligonucleotide; CAG chr11 5191924 5191943 5191940 +
tctcaggtatttttttacag

SEQ ID NO: 5135 - DNA, 20 bp, Artificial Sequence
  Synthetic oligonucleotide; AAG chr11 5192035 5192054 5192051 +
ctttgatactcaatgtgatc

SEQ ID NO: 5136 - DNA, 20 bp, Artificial Sequence
  Synthetic oligonucleotide; TGG chr11 5192041 5192060 5192057 +
tactcaatgtgatcaagatt

SEQ ID NO: 5137 - DNA, 20 bp, Artificial Sequence
  Synthetic oligonucleotide; GGG chr11 5192042 5192061 5192058 +
actcaatgtgatcaagattt

SEQ ID NO: 5138 - DNA, 20 bp, Artificial Sequence
  Synthetic oligonucleotide; GAG chr11 5192044 5192063 5192060 +
tcaatgtgatcaagatttgg

SEQ ID NO: 5139 - DNA, 20 bp, Artificial Sequence
  Synthetic oligonucleotide; AAG chr11 5192079 5192098 5192095 +
ctcctctttactcatgtcca

SEQ ID NO: 5140 - DNA, 20 bp, Artificial Sequence
  Synthetic oligonucleotide; AAG chr11 5192101 5192120 5192117 +
gtgacatgaaacctgtatct

SEQ ID NO: 5141 - DNA, 20 bp, Artificial Sequence
  Synthetic oligonucleotide; TGG chr11 5192117 5192136 5192133 +
atctaagtgtgttatctcca

SEQ ID NO: 5142 - DNA, 20 bp, Artificial Sequence
  Synthetic oligonucleotide; GGG chr11 5192118 5192137 5192134 +
tctaagtgtgttatctccat

SEQ ID NO: 5143 - DNA, 20 bp, Artificial Sequence
  Synthetic oligonucleotide; AAG chr11 5192121 5192140 5192137 +
aagtgtgttatctccatggg

SEQ ID NO: 5144 - DNA, 20 bp, Artificial Sequence
  Synthetic oligonucleotide; TAG chr11 5192210 5192229 5192226 +
atctatttcattctatgcaa

SEQ ID NO: 5145 - DNA, 20 bp, Artificial Sequence
  Synthetic oligonucleotide; AAG chr11 5192225 5192244 5192241 +
tgcaatagctgtctgaaact

SEQ ID NO: 5146 - DNA, 20 bp, Artificial Sequence
  Synthetic oligonucleotide; AAG chr11 5192231 5192250 5192247 +
agctgtctgaaactaagtca

SEQ ID NO: 5147 - DNA, 20 bp, Artificial Sequence
  Synthetic oligonucleotide; GAG chr11 5192288 5192307 5192304 +
ttgaatatctatatttgttt

SEQ ID NO: 5148 - DNA, 20 bp, Artificial Sequence
  Synthetic oligonucleotide; AGG chr11 5192289 5192308 5192305 +
tgaatatctatatttgtttg

SEQ ID NO: 5149 - DNA, 20 bp, Artificial Sequence
  Synthetic oligonucleotide; CAG chr11 5192301 5192320 5192317 +
tttgtttgaggaataataat

SEQ ID NO: 5150 - DNA, 20 bp, Artificial Sequence
  Synthetic oligonucleotide; CAG chr11 5192306 5192325 5192322 +
ttgaggaataataatcagaa

SEQ ID NO: 5151 - DNA, 20 bp, Artificial Sequence
  Synthetic oligonucleotide; AAG chr11 5192309 5192328 5192325 +
aggaataataatcagaacag

SEQ ID NO: 5152 - DNA, 20 bp, Artificial Sequence
  Synthetic oligonucleotide; AGG chr11 5192310 5192329 5192326 +
ggaataataatcagaacaga

SEQ ID NO: 5153 - DNA, 20 bp, Artificial Sequence
  Synthetic oligonucleotide; AAG chr11 5192319 5192338 5192335 +
atcagaacagaaggatatga

SEQ ID NO: 5154 - DNA, 20 bp, Artificial Sequence
  Synthetic oligonucleotide; TAG chr11 5192326 5192345 5192342 +
cagaaggatatgaaagacta

SEQ ID NO: 5155 - DNA, 20 bp, Artificial Sequence
  Synthetic oligonucleotide; AGG chr11 5192327 5192346 5192343 +
agaaggatatgaaagactat

SEQ ID NO: 5156 - DNA, 20 bp, Artificial Sequence
  Synthetic oligonucleotide; TGG chr11 5192332 5192351 5192348 +
gatatgaaagactataggaa

SEQ ID NO: 5157 - DNA, 20 bp, Artificial Sequence
  Synthetic oligonucleotide; AAG chr11 5192335 5192354 5192351 +
atgaaagactataggaatgg

SEQ ID NO: 5158 - DNA, 20 bp, Artificial Sequence
  Synthetic oligonucleotide; CAG chr11 5192346 5192365 5192362 +
taggaatggaagtttctcaa

SEQ ID NO: 5159 - DNA, 20 bp, Artificial Sequence
  Synthetic oligonucleotide; AAG chr11 5192350 5192369 5192366 +
aatggaagtttctcaacagc

SEQ ID NO: 5160 - DNA, 20 bp, Artificial Sequence
  Synthetic oligonucleotide; TAG chr11 5192359 5192378 5192375 +
ttctcaacagcaagataaaa

SEQ ID NO: 5161 - DNA, 20 bp, Artificial Sequence
  Synthetic oligonucleotide; AGG chr11 5192360 5192379 5192376 +
tctcaacagcaagataaaat

SEQ ID NO: 5162 - DNA, 20 bp, Artificial Sequence
  Synthetic oligonucleotide; TGG chr11 5192367 5192386 5192383 +
agcaagataaaataggttaa

SEQ ID NO: 5163 - DNA, 20 bp, Artificial Sequence
  Synthetic oligonucleotide; GAG chr11 5192369 5192388 5192385 +
caagataaaataggttaatg

SEQ ID NO: 5164 - DNA, 20 bp, Artificial Sequence
  Synthetic oligonucleotide; TAG chr11 5192379 5192398 5192395 +
taggttaatggagtaatatg

SEQ ID NO: 5165 - DNA, 20 bp, Artificial Sequence
  Synthetic oligonucleotide; GAG chr11 5192381 5192400 5192397 +
ggttaatggagtaatatgta

SEQ ID NO: 5166 - DNA, 20 bp, Artificial Sequence
  Synthetic oligonucleotide; AAG chr11 5192401 5192420 5192417 +
gagaatgatgactataatta

SEQ ID NO: 5167 - DNA, 20 bp, Artificial Sequence
  Synthetic oligonucleotide; AAG chr11 5192414 5192433 5192430 +
ataattaaagaaaatgaatt

SEQ ID NO: 5168 - DNA, 20 bp, Artificial Sequence
  Synthetic oligonucleotide; AAG chr11 5192430 5192449 5192446 +
aattaagcaatatacaatta

SEQ ID NO: 5169 - DNA, 20 bp, Artificial Sequence
  Synthetic oligonucleotide; CAG chr11 5192450 5192469 5192466 +
aagctctttatgtcttttca

SEQ ID NO: 5170 - DNA, 20 bp, Artificial Sequence
  Synthetic oligonucleotide; TAG chr11 5192458 5192477 5192474 +
tatgtcttttcacagcttga

SEQ ID NO: 5171 - DNA, 20 bp, Artificial Sequence
  Synthetic oligonucleotide; TGG chr11 5192497 5192516 5192513 +
ctgaataatattctatccta

SEQ ID NO: 5172 - DNA, 20 bp, Artificial Sequence
  Synthetic oligonucleotide; CAG chr11 5192508 5192527 5192524 +
tctatcctatggatgttcca

SEQ ID NO: 5173 - DNA, 20 bp, Artificial Sequence
  Synthetic oligonucleotide; TGG chr11 5192526 5192545 5192542 +
cacagtttatccattcatct

SEQ ID NO: 5174 - DNA, 20 bp, Artificial Sequence
  Synthetic oligonucleotide; TGG chr11 5192543 5192562 5192559 +
tcttggttactttcaacttt

SEQ ID NO: 5175 - DNA, 20 bp, Artificial Sequence
  Synthetic oligonucleotide; GAG chr11 5192553 5192572 5192569 +
tttcaacttttggcaattat

SEQ ID NO: 5176 - DNA, 20 bp, Artificial Sequence
  Synthetic oligonucleotide; AAG chr11 5192558 5192577 5192574 +
acttttggcaattatgagta

SEQ ID NO: 5177 - DNA, 20 bp, Artificial Sequence
  Synthetic oligonucleotide; TGG chr11 5192574 5192593 5192590 +
agtaaagttcctataaacct

SEQ ID NO: 5178 - DNA, 20 bp, Artificial Sequence
  Synthetic oligonucleotide; TAG chr11 5192578 5192597 5192594 +
aagttcctataaaccttggt

SEQ ID NO: 5179 - DNA, 20 bp, Artificial Sequence
  Synthetic oligonucleotide; TGG chr11 5192595 5192614 5192611 +
ggttagttcatgtctgtgtg

SEQ ID NO: 5180 - DNA, 20 bp, Artificial Sequence
  Synthetic oligonucleotide; TGG chr11 5192618 5192637 5192634 +
acataaatttttgactcatt

SEQ ID NO: 5181 - DNA, 20 bp, Artificial Sequence
  Synthetic oligonucleotide; GGG chr11 5192619 5192638 5192635 +
cataaatttttgactcattt

SEQ ID NO: 5182 - DNA, 20 bp, Artificial Sequence
  Synthetic oligonucleotide; TAG chr11 5192630 5192649 5192646 +
gactcatttgggtaaataca

SEQ ID NO: 5183 - DNA, 20 bp, Artificial Sequence
  Synthetic oligonucleotide; AGG chr11 5192631 5192650 5192647 +
actcatttgggtaaatacat

SEQ ID NO: 5184 - DNA, 20 bp, Artificial Sequence
  Synthetic oligonucleotide; GAG chr11 5192633 5192652 5192649 +
tcatttgggtaaatacatag

SEQ ID NO: 5185 - DNA, 20 bp, Artificial Sequence
  Synthetic oligonucleotide; TGG chr11 5192645 5192664 5192661 +
atacataggagtgtgattgt

SEQ ID NO: 5186 - DNA, 20 bp, Artificial Sequence
  Synthetic oligonucleotide; GGG chr11 5192646 5192665 5192662 +
tacataggagtgtgattgtt

SEQ ID NO: 5187 - DNA, 20 bp, Artificial Sequence
  Synthetic oligonucleotide; AAG chr11 5192658 5192677 5192674 +
tgattgttgggtcacatgaa

SEQ ID NO: 5188 - DNA, 20 bp, Artificial Sequence
  Synthetic oligonucleotide; TAG chr11 5192663 5192682 5192679 +
gttgggtcacatgaaaagac

SEQ ID NO: 5189 - DNA, 20 bp, Artificial Sequence
  Synthetic oligonucleotide; AAG chr11 5192672 5192691 5192688 +
catgaaaagactagttttgt

SEQ ID NO: 5190 - DNA, 20 bp, Artificial Sequence
  Synthetic oligonucleotide; TGG chr11 5192698 5192717 5192714 +
ctgtaaactgtcttccaatt

SEQ ID NO: 5191 - DNA, 20 bp, Artificial Sequence
  Synthetic oligonucleotide; AAG chr11 5192723 5192742 5192739 +
gcactatttctcatccctac

SEQ ID NO: 5192 - DNA, 20 bp, Artificial Sequence
  Synthetic oligonucleotide; AAG chr11 5192730 5192749 5192746 +
ttctcatccctacaagcaat

SEQ ID NO: 5193 - DNA, 20 bp, Artificial Sequence
  Synthetic oligonucleotide; GAG chr11 5192734 5192753 5192750 +
catccctacaagcaataagt

SEQ ID NO: 5194 - DNA, 20 bp, Artificial Sequence
  Synthetic oligonucleotide; GAG chr11 5192736 5192755 5192752 +
tccctacaagcaataagtga

SEQ ID NO: 5195 - DNA, 20 bp, Artificial Sequence
  Synthetic oligonucleotide; CAG chr11 5192762 5192781 5192778 +
ctgttgctccacttcgttgc

SEQ ID NO: 5196 - DNA, 20 bp, Artificial Sequence
  Synthetic oligonucleotide; TGG chr11 5192769 5192788 5192785 +
tccacttcgttgccagtgtt

SEQ ID NO: 5197 - DNA, 20 bp, Artificial Sequence
  Synthetic oligonucleotide; TGG chr11 5192772 5192791 5192788 +
acttcgttgccagtgtttgg

SEQ ID NO: 5198 - DNA, 20 bp, Artificial Sequence
  Synthetic oligonucleotide; CAG chr11 5192779 5192798 5192795 +
tgccagtgtttggtggatgt

SEQ ID NO: 5199 - DNA, 20 bp, Artificial Sequence
  Synthetic oligonucleotide; TGG chr11 5192787 5192806 5192803 +
tttggtggatgtcagtattt

SEQ ID NO: 5200 - DNA, 20 bp, Artificial Sequence
  Synthetic oligonucleotide; TGG chr11 5192794 5192813 5192810 +
gatgtcagtattttggaatt

SEQ ID NO: 5201 - DNA, 20 bp, Artificial Sequence
  Synthetic oligonucleotide; TAG chr11 5192813 5192832 5192829 +
ttggccttctaatatgtgtg

SEQ ID NO: 5202 - DNA, 20 bp, Artificial Sequence
  Synthetic oligonucleotide; TGG chr11 5192816 5192835 5192832 +
gccttctaatatgtgtgtag

SEQ ID NO: 5203 - DNA, 20 bp, Artificial Sequence
  Synthetic oligonucleotide; TGG chr11 5192820 5192839 5192836 +
tctaatatgtgtgtagtggt

SEQ ID NO: 5204 - DNA, 20 bp, Artificial Sequence
  Synthetic oligonucleotide; CAG chr11 5192843 5192862 5192859 +
tatcttcttgttttaatgtg

SEQ ID NO: 5205 - DNA, 20 bp, Artificial Sequence
  Synthetic oligonucleotide; GAG chr11 5192868 5192887 5192884 +
tcttaatgacatgtgttact

SEQ ID NO: 5206 - DNA, 20 bp, Artificial Sequence
  Synthetic oligonucleotide; TGG chr11 5192910 5192929 5192926 +
tgcaatctatatatcttctt

SEQ ID NO: 5207 - DNA, 20 bp, Artificial Sequence
  Synthetic oligonucleotide; AAG chr11 5192915 5192934 5192931 +
tctatatatcttctttggta

SEQ ID NO: 5208 - DNA, 20 bp, Artificial Sequence
  Synthetic oligonucleotide; CAG chr11 5192926 5192945 5192942 +
tctttggtaaagtgtctgtt

SEQ ID NO: 5209 - DNA, 20 bp, Artificial Sequence
  Synthetic oligonucleotide; TGG chr11 5192950 5192969 5192966 +
tcttttgcccactttgcaat

SEQ ID NO: 5210 - DNA, 20 bp, Artificial Sequence
  Synthetic oligonucleotide; TAG chr11 5192971 5192990 5192987 +
ggattgtttgttttttattg

SEQ ID NO: 5211 - DNA, 20 bp, Artificial Sequence
  Synthetic oligonucleotide; AAG chr11 5192982 5193001 5192998 +
tttttattgtagaattttaa

SEQ ID NO: 5212 - DNA, 20 bp, Artificial Sequence
  Synthetic oligonucleotide; AAG chr11 5193006 5193025 5193022 +
tctttgtataatatgtatac

SEQ ID NO: 5213 - DNA, 20 bp, Artificial Sequence
  Synthetic oligonucleotide; CAG chr11 5193017 5193036 5193033 +
tatgtatacaagtcctttat

SEQ ID NO: 5214 - DNA, 20 bp, Artificial Sequence
  Synthetic oligonucleotide; TGG chr11 5193048 5193067 5193064 +
ttttgcaaatatgttctctg

SEQ ID NO: 5215 - DNA, 20 bp, Artificial Sequence
  Synthetic oligonucleotide; TGG chr11 5193108 5193127 5193124 +
tattttattttattttgttc

SEQ ID NO: 5216 - DNA, 20 bp, Artificial Sequence
  Synthetic oligonucleotide; GGG chr11 5193109 5193128 5193125 +
attttattttattttgttct

SEQ ID NO: 5217 - DNA, 20 bp, Artificial Sequence
  Synthetic oligonucleotide; TGG chr11 5193119 5193138 5193135 +
attttgttctgggtattttg

SEQ ID NO: 5218 - DNA, 20 bp, Artificial Sequence
  Synthetic oligonucleotide; CAG chr11 5193156 5193175 5193172 +
aactgctgtgttcttttgtt

SEQ ID NO: 5219 - DNA, 20 bp, Artificial Sequence
  Synthetic oligonucleotide; TAG chr11 5193181 5193200 5193197 +
aattgtcttgtattgatctc

SEQ ID NO: 5220 - DNA, 20 bp, Artificial Sequence
  Synthetic oligonucleotide; AAG chr11 5193185 5193204 5193201 +
gtcttgtattgatctctagt

SEQ ID NO: 5221 - DNA, 20 bp, Artificial Sequence
  Synthetic oligonucleotide; CAG chr11 5193227 5193246 5193243 +
tttcactctctcctgaactc

SEQ ID NO: 5222 - DNA, 20 bp, Artificial Sequence
  Synthetic oligonucleotide; AAG chr11 5193232 5193251 5193248 +
ctctctcctgaactccagtt

SEQ ID NO: 5223 - DNA, 20 bp, Artificial Sequence
  Synthetic oligonucleotide; TGG chr11 5193239 5193258 5193255 +
ctgaactccagttaagattt

SEQ ID NO: 5224 - DNA, 20 bp, Artificial Sequence
  Synthetic oligonucleotide; GAG chr11 5193241 5193260 5193257 +
gaactccagttaagattttg

SEQ ID NO: 5225 - DNA, 20 bp, Artificial Sequence
  Synthetic oligonucleotide; TGG chr11 5193340 5193359 5193356 +
ctacttcctgtcccccttat

SEQ ID NO: 5226 - DNA, 20 bp, Artificial Sequence
  Synthetic oligonucleotide; AAG chr11 5193426 5193445 5193442 +
tactattctgttcaaatatc

SEQ ID NO: 5227 - DNA, 20 bp, Artificial Sequence
  Synthetic oligonucleotide; AGG chr11 5193427 5193446 5193443 +
actattctgttcaaatatca

SEQ ID NO: 5228 - DNA, 20 bp, Artificial Sequence
  Synthetic oligonucleotide; GAG chr11 5193439 5193458 5193455 +
aaatatcaaggatctaaaat

SEQ ID NO: 5229 - DNA, 20 bp, Artificial Sequence
  Synthetic oligonucleotide; TGG chr11 5193442 5193461 5193458 +
tatcaaggatctaaaatgag

SEQ ID NO: 5230 - DNA, 20 bp, Artificial Sequence
  Synthetic oligonucleotide; AAG chr11 5193455 5193474 5193471 +
aaatgagtggttatttaatt

SEQ ID NO: 5231 - DNA, 20 bp, Artificial Sequence
  Synthetic oligonucleotide; TAG chr11 5193486 5193505 5193502 +
ttatgcacctcttttattat

SEQ ID NO: 5232 - DNA, 20 bp, Artificial Sequence
  Synthetic oligonucleotide; AAG chr11 5193510 5193529 5193526 +
ttttattttctgccctgaat

SEQ ID NO: 5233 - DNA, 20 bp, Artificial Sequence
  Synthetic oligonucleotide; AAG chr11 5193526 5193545 5193542 +
gaataagctgtgctccaaat

SEQ ID NO: 5234 - DNA, 20 bp, Artificial Sequence
  Synthetic oligonucleotide; TAG chr11 5193551 5193570 5193567 +
ttctttattaaaattgattc

SEQ ID NO: 5235 - DNA, 20 bp, Artificial Sequence
  Synthetic oligonucleotide; AGG chr11 5193552 5193571 5193568 +
tctttattaaaattgattct

SEQ ID NO: 5236 - DNA, 20 bp, Artificial Sequence
  Synthetic oligonucleotide; TGG chr11 5193571 5193590 5193587 +
taggtatgtaatttttgtgt

SEQ ID NO: 5237 - DNA, 20 bp, Artificial Sequence
  Synthetic oligonucleotide; TGG chr11 5193574 5193593 5193590 +
gtatgtaatttttgtgttgg

SEQ ID NO: 5238 - DNA, 20 bp, Artificial Sequence
  Synthetic oligonucleotide; CGG chr11 5193620 5193639 5193636 +
tttgtccatccttctgtgtc

SEQ ID NO: 5239 - DNA, 20 bp, Artificial Sequence
  Synthetic oligonucleotide; TGG chr11 5193626 5193645 5193642 +
catccttctgtgtccggaat

SEQ ID NO: 5240 - DNA, 20 bp, Artificial Sequence
  Synthetic oligonucleotide; TGG chr11 5193629 5193648 5193645 +
ccttctgtgtccggaattgg

SEQ ID NO: 5241 - DNA, 20 bp, Artificial Sequence
  Synthetic oligonucleotide; GGG chr11 5193630 5193649 5193646 +
cttctgtgtccggaattggt

SEQ ID NO: 5242 - DNA, 20 bp, Artificial Sequence
  Synthetic oligonucleotide; TGG chr11 5193637 5193656 5193653 +
gtccggaattggtgggttct

SEQ ID NO: 5243 - DNA, 20 bp, Artificial Sequence
  Synthetic oligonucleotide; AAG chr11 5193653 5193672 5193669 +
ttcttggtctcgctgactta

SEQ ID NO: 5244 - DNA, 20 bp, Artificial Sequence
  Synthetic oligonucleotide; AAG chr11 5193660 5193679 5193676 +
tctcgctgacttaaagaatg

SEQ ID NO: 5245 - DNA, 20 bp, Artificial Sequence
  Synthetic oligonucleotide; TGG chr11 5193676 5193695 5193692 +
aatgaagccgcgaaccctcg

SEQ ID NO: 5246 - DNA, 20 bp, Artificial Sequence
  Synthetic oligonucleotide; GAG chr11 5193680 5193699 5193696 +
aagccgcgaaccctcgtggt

SEQ ID NO: 5247 - DNA, 20 bp, Artificial Sequence
  Synthetic oligonucleotide; AAG chr11 5193697 5193716 5193713 +
ggtgagtgttacaattctta

SEQ ID NO: 5248 - DNA, 20 bp, Artificial Sequence
  Synthetic oligonucleotide; TGG chr11 5193701 5193720 5193717 +
agtgttacaattcttaaaga

SEQ ID NO: 5249 - DNA, 20 bp, Artificial Sequence
  Synthetic oligonucleotide; AAG chr11 5193712 5193731 5193728 +
tcttaaagatggtgtgttca

SEQ ID NO: 5250 - DNA, 20 bp, Artificial Sequence
  Synthetic oligonucleotide; AGG chr11 5193713 5193732 5193729 +
cttaaagatggtgtgttcaa

SEQ ID NO: 5251 - DNA, 20 bp, Artificial Sequence
  Synthetic oligonucleotide; TGG chr11 5193717 5193736 5193733 +
aagatggtgtgttcaaagga

SEQ ID NO: 5252 - DNA, 20 bp, Artificial Sequence
  Synthetic oligonucleotide; AAG chr11 5193728 5193747 5193744 +
ttcaaaggatggtgtgtcca

SEQ ID NO: 5253 - DNA, 20 bp, Artificial Sequence
  Synthetic oligonucleotide; CAG chr11 5193741 5193760 5193757 +
gtgtccaaagtttgttactt

SEQ ID NO: 5254 - DNA, 20 bp, Artificial Sequence
  Synthetic oligonucleotide; CAG chr11 5193751 5193770 5193767 +
tttgttacttcagatgtgtc

SEQ ID NO: 5255 - DNA, 20 bp, Artificial Sequence
  Synthetic oligonucleotide; GAG chr11 5193753 5193772 5193769 +
tgttacttcagatgtgtcca

SEQ ID NO: 5256 - DNA, 20 bp, Artificial Sequence
  Synthetic oligonucleotide; TGG chr11 5193767 5193786 5193783 +
tgtccagagtttcttccttc

SEQ ID NO: 5257 - DNA, 20 bp, Artificial Sequence
  Synthetic oligonucleotide; CGG chr11 5193778 5193797 5193794 +
tcttccttctggtgtgttca

SEQ ID NO: 5258 - DNA, 20 bp, Artificial Sequence
  Synthetic oligonucleotide; TGG chr11 5193787 5193806 5193803 +
tggtgtgttcacggtcttgc

SEQ ID NO: 5259 - DNA, 20 bp, Artificial Sequence
  Synthetic oligonucleotide; CAG chr11 5193793 5193812 5193809 +
gttcacggtcttgctggctc

SEQ ID NO: 5260 - DNA, 20 bp, Artificial Sequence
  Synthetic oligonucleotide; AGG chr11 5193794 5193813 5193810 +
ttcacggtcttgctggctcc

SEQ ID NO: 5261 - DNA, 20 bp, Artificial Sequence
  Synthetic oligonucleotide; GAG chr11 5193796 5193815 5193812 +
cacggtcttgctggctccag

SEQ ID NO: 5262 - DNA, 20 bp, Artificial Sequence
  Synthetic oligonucleotide; AAG chr11 5193801 5193820 5193817 +
tcttgctggctccaggagtg

SEQ ID NO: 5263 - DNA, 20 bp, Artificial Sequence
  Synthetic oligonucleotide; CAG chr11 5193807 5193826 5193823 +
tggctccaggagtgaagctg

SEQ ID NO: 5264 - DNA, 20 bp, Artificial Sequence
  Synthetic oligonucleotide; CGG chr11 5193817 5193836 5193833 +
agtgaagctgcagaccccca

SEQ ID NO: 5265 - DNA, 20 bp, Artificial Sequence
  Synthetic oligonucleotide; GGG chr11 5193818 5193837 5193834 +
gtgaagctgcagacccccac

SEQ ID NO: 5266 - DNA, 20 bp, Artificial Sequence
  Synthetic oligonucleotide; GGG chr11 5193819 5193838 5193835 +
tgaagctgcagacccccacg

SEQ ID NO: 5267 - DNA, 20 bp, Artificial Sequence
  Synthetic oligonucleotide; GAG chr11 5193821 5193840 5193837 +
aagctgcagacccccacggg

SEQ ID NO: 5268 - DNA, 20 bp, Artificial Sequence
  Synthetic oligonucleotide; CAG chr11 5193829 5193848 5193845 +
gacccccacggggagtgtta

SEQ ID NO: 5269 - DNA, 20 bp, Artificial Sequence
  Synthetic oligonucleotide; AAG chr11 5193838 5193857 5193854 +
ggggagtgttacagctctta

SEQ ID NO: 5270 - DNA, 20 bp, Artificial Sequence
  Synthetic oligonucleotide; AGG chr11 5193839 5193858 5193855 +
gggagtgttacagctcttaa

SEQ ID NO: 5271 - DNA, 20 bp, Artificial Sequence
  Synthetic oligonucleotide; CGG chr11 5193842 5193861 5193858 +
agtgttacagctcttaaagg

SEQ ID NO: 5272 - DNA, 20 bp, Artificial Sequence
  Synthetic oligonucleotide; GAG chr11 5193844 5193863 5193860 +
tgttacagctcttaaaggcg

SEQ ID NO: 5273 - DNA, 20 bp, Artificial Sequence
  Synthetic oligonucleotide; TGG chr11 5193851 5193870 5193867 +
gctcttaaaggcggagcgta

SEQ ID NO: 5274 - DNA, 20 bp, Artificial Sequence
  Synthetic oligonucleotide; GAG chr11 5193853 5193872 5193869 +
tcttaaaggcggagcgtatg

SEQ ID NO: 5275 - DNA, 20 bp, Artificial Sequence
  Synthetic oligonucleotide; TGG chr11 5193875 5193894 5193891 +
gttgctcattcctcctgtct

SEQ ID NO: 5276 - DNA, 20 bp, Artificial Sequence
  Synthetic oligonucleotide; GGG chr11 5193876 5193895 5193892 +
ttgctcattcctcctgtctt

SEQ ID NO: 5277 - DNA, 20 bp, Artificial Sequence
  Synthetic oligonucleotide; TGG chr11 5193896 5193915 5193912 +
gggttgttcatcccccatgc

SEQ ID NO: 5278 - DNA, 20 bp, Artificial Sequence
  Synthetic oligonucleotide; GGG chr11 5193897 5193916 5193913 +
ggttgttcatcccccatgct

SEQ ID NO: 5279 - DNA, 20 bp, Artificial Sequence
  Synthetic oligonucleotide; TGG chr11 5193904 5193923 5193920 +
catcccccatgctgggttcg

SEQ ID NO: 5280 - DNA, 20 bp, Artificial Sequence
  Synthetic oligonucleotide; TGG chr11 5193913 5193932 5193929 +
tgctgggttcgtggtcttgc

SEQ ID NO: 5281 - DNA, 20 bp, Artificial Sequence
  Synthetic oligonucleotide; CAG chr11 5193919 5193938 5193935 +
gttcgtggtcttgctggctt

SEQ ID NO: 5282 - DNA, 20 bp, Artificial Sequence
  Synthetic oligonucleotide; AAG chr11 5193922 5193941 5193938 +
cgtggtcttgctggcttcag

SEQ ID NO: 5283 - DNA, 20 bp, Artificial Sequence
  Synthetic oligonucleotide; AAG chr11 5193927 5193946 5193943 +
tcttgctggcttcagaagtg

SEQ ID NO: 5284 - DNA, 20 bp, Artificial Sequence
  Synthetic oligonucleotide; CAG chr11 5193933 5193952 5193949 +
tggcttcagaagtgaagccg

SEQ ID NO: 5285 - DNA, 20 bp, Artificial Sequence
  Synthetic oligonucleotide; CAG chr11 5193943 5193962 5193959 +
agtgaagccgcagaccttcg

SEQ ID NO: 5286 - DNA, 20 bp, Artificial Sequence
  Synthetic oligonucleotide; GAG chr11 5193947 5193966 5193963 +
aagccgcagaccttcgcagt

SEQ ID NO: 5287 - DNA, 20 bp, Artificial Sequence
  Synthetic oligonucleotide; CAG chr11 5193955 5193974 5193971 +
gaccttcgcagtgagtgtta

SEQ ID NO: 5288 - DNA, 20 bp, Artificial Sequence
  Synthetic oligonucleotide; AAG chr11 5193964 5193983 5193980 +
agtgagtgttacagctcata

SEQ ID NO: 5289 - DNA, 20 bp, Artificial Sequence
  Synthetic oligonucleotide; AGG chr11 5193965 5193984 5193981 +
gtgagtgttacagctcataa

SEQ ID NO: 5290 - DNA, 20 bp, Artificial Sequence
  Synthetic oligonucleotide; CAG chr11 5193968 5193987 5193984 +
agtgttacagctcataaagg

SEQ ID NO: 5291 - DNA, 20 bp, Artificial Sequence
  Synthetic oligonucleotide; CGG chr11 5193973 5193992 5193989 +
tacagctcataaaggcagcg

SEQ ID NO: 5292 - DNA, 20 bp, Artificial Sequence
  Synthetic oligonucleotide; AAG chr11 5193981 5194000 5193997 +
ataaaggcagcgcggatcca

SEQ ID NO: 5293 - DNA, 20 bp, Artificial Sequence
  Synthetic oligonucleotide; GAG chr11 5193983 5194002 5193999 +
aaaggcagcgcggatccaaa

SEQ ID NO: 5294 - DNA, 20 bp, Artificial Sequence
  Synthetic oligonucleotide; GAG chr11 5193987 5194006 5194003 +
gcagcgcggatccaaagagt

SEQ ID NO: 5295 - DNA, 20 bp, Artificial Sequence
  Synthetic oligonucleotide; CAG chr11 5193990 5194009 5194006 +
gcgcggatccaaagagtgag

SEQ ID NO: 5296 - DNA, 20 bp, Artificial Sequence
  Synthetic oligonucleotide; CAG chr11 5193993 5194012 5194009 +
cggatccaaagagtgagcag

SEQ ID NO: 5297 - DNA, 20 bp, Artificial Sequence
  Synthetic oligonucleotide; AAG chr11 5193997 5194016 5194013 +
tccaaagagtgagcagcagt

SEQ ID NO: 5298 - DNA, 20 bp, Artificial Sequence
  Synthetic oligonucleotide; AAG chr11 5194010 5194029 5194026 +
cagcagtaagatttattgtg

SEQ ID NO: 5299 - DNA, 20 bp, Artificial Sequence
  Synthetic oligonucleotide; AAG chr11 5194018 5194037 5194034 +
agatttattgtgaagaataa

SEQ ID NO: 5300 - DNA, 20 bp, Artificial Sequence
  Synthetic oligonucleotide; AAG chr11 5194025 5194044 5194041 +
ttgtgaagaataaaagaaca

SEQ ID NO: 5301 - DNA, 20 bp, Artificial Sequence
  Synthetic oligonucleotide; CAG chr11 5194034 5194053 5194050 +
ataaaagaacaaagcttcca

SEQ ID NO: 5302 - DNA, 20 bp, Artificial Sequence
  Synthetic oligonucleotide; TGG chr11 5194039 5194058 5194055 +
agaacaaagcttccacagca

SEQ ID NO: 5303 - DNA, 20 bp, Artificial Sequence
  Synthetic oligonucleotide; TAG chr11 5194042 5194061 5194058 +
acaaagcttccacagcatgg

SEQ ID NO: 5304 - DNA, 20 bp, Artificial Sequence
  Synthetic oligonucleotide; AGG chr11 5194043 5194062 5194059 +
caaagcttccacagcatggt

SEQ ID NO: 5305 - DNA, 20 bp, Artificial Sequence
  Synthetic oligonucleotide; GGG chr11 5194044 5194063 5194060 +
aaagcttccacagcatggta

SEQ ID NO: 5306 - DNA, 20 bp, Artificial Sequence
  Synthetic oligonucleotide; AAG chr11 5194052 5194071 5194068 +
cacagcatggtagggaaccc

SEQ ID NO: 5307 - DNA, 20 bp, Artificial Sequence
  Synthetic oligonucleotide; CAG chr11 5194056 5194075 5194072 +
gcatggtagggaacccaagt

SEQ ID NO: 5308 - DNA, 20 bp, Artificial Sequence
  Synthetic oligonucleotide; CAG chr11 5194065 5194084 5194081 +
ggaacccaagtcagttgtca

SEQ ID NO: 5309 - DNA, 20 bp, Artificial Sequence
  Synthetic oligonucleotide; TGG chr11 5194069 5194088 5194085 +
cccaagtcagttgtcacagc

SEQ ID NO: 5310 - DNA, 20 bp, Artificial Sequence
  Synthetic oligonucleotide; CGG chr11 5194075 5194094 5194091 +
tcagttgtcacagctggctc

SEQ ID NO: 5311 - DNA, 20 bp, Artificial Sequence
  Synthetic oligonucleotide; CAG chr11 5194078 5194097 5194094 +
gttgtcacagctggctccgg

SEQ ID NO: 5312 - DNA, 20 bp, Artificial Sequence
  Synthetic oligonucleotide; TGG chr11 5194125 5194144 5194141 +
cccacccacatcctgctgat

SEQ ID NO: 5313 - DNA, 20 bp, Artificial Sequence
  Synthetic oligonucleotide; CAG chr11 5194137 5194156 5194153 +
ctgctgattggtccatttta

SEQ ID NO: 5314 - DNA, 20 bp, Artificial Sequence
  Synthetic oligonucleotide; GAG chr11 5194139 5194158 5194155 +
gctgattggtccattttaca

SEQ ID NO: 5315 - DNA, 20 bp, Artificial Sequence
  Synthetic oligonucleotide; GAG chr11 5194141 5194160 5194157 +
tgattggtccattttacaga

SEQ ID NO: 5316 - DNA, 20 bp, Artificial Sequence
  Synthetic oligonucleotide; TGG chr11 5194149 5194168 5194165 +
ccattttacagagagctgat

SEQ ID NO: 5317 - DNA, 20 bp, Artificial Sequence
  Synthetic oligonucleotide; CAG chr11 5194161 5194180 5194177 +
gagctgattggcccatttta

SEQ ID NO: 5318 - DNA, 20 bp, Artificial Sequence
  Synthetic oligonucleotide; GAG chr11 5194163 5194182 5194179 +
gctgattggcccattttaca

SEQ ID NO: 5319 - DNA, 20 bp, Artificial Sequence
  Synthetic oligonucleotide; GAG chr11 5194165 5194184 5194181 +
tgattggcccattttacaga

SEQ ID NO: 5320 - DNA, 20 bp, Artificial Sequence
  Synthetic oligonucleotide; TGG chr11 5194169 5194188 5194185 +
tggcccattttacagagagc

SEQ ID NO: 5321 - DNA, 20 bp, Artificial Sequence
  Synthetic oligonucleotide; TGG chr11 5194173 5194192 5194189 +
ccattttacagagagctggt

SEQ ID NO: 5322 - DNA, 20 bp, Artificial Sequence
  Synthetic oligonucleotide; TGG chr11 5194183 5194202 5194199 +
gagagctggttggtccgttt

SEQ ID NO: 5323 - DNA, 20 bp, Artificial Sequence
  Synthetic oligonucleotide; CAG chr11 5194186 5194205 5194202 +
agctggttggtccgttttgg

SEQ ID NO: 5324 - DNA, 20 bp, Artificial Sequence
  Synthetic oligonucleotide; GAG chr11 5194188 5194207 5194204 +
ctggttggtccgttttggca

SEQ ID NO: 5325 - DNA, 20 bp, Artificial Sequence
  Synthetic oligonucleotide; TGG chr11 5194198 5194217 5194214 +
cgttttggcagagtgctgat

SEQ ID NO: 5326 - DNA, 20 bp, Artificial Sequence
  Synthetic oligonucleotide; GAG chr11 5194217 5194236 5194233 +
ttggtgcatttacaaacctt

SEQ ID NO: 5327 - DNA, 20 bp, Artificial Sequence
  Synthetic oligonucleotide; TAG chr11 5194221 5194240 5194237 +
tgcatttacaaaccttgagc

SEQ ID NO: 5328 - DNA, 20 bp, Artificial Sequence
  Synthetic oligonucleotide; CAG chr11 5194227 5194246 5194243 +
tacaaaccttgagctagaca

SEQ ID NO: 5329 - DNA, 20 bp, Artificial Sequence
  Synthetic oligonucleotide; GAG chr11 5194229 5194248 5194245 +
caaaccttgagctagacaca

SEQ ID NO: 5330 - DNA, 20 bp, Artificial Sequence
  Synthetic oligonucleotide; TAG chr11 5194239 5194258 5194255 +
gctagacacagagtgctgat

SEQ ID NO: 5331 - DNA, 20 bp, Artificial Sequence
  Synthetic oligonucleotide; TAG chr11 5194258 5194277 5194274 +
ttagtgcatttacaatcctt

SEQ ID NO: 5332 - DNA, 20 bp, Artificial Sequence
  Synthetic oligonucleotide; TAG chr11 5194262 5194281 5194278 +
tgcatttacaatcctttagc

SEQ ID NO: 5333 - DNA, 20 bp, Artificial Sequence
  Synthetic oligonucleotide; AAG chr11 5194271 5194290 5194287 +
aatcctttagctagacacaa

SEQ ID NO: 5334 - DNA, 20 bp, Artificial Sequence
  Synthetic oligonucleotide; AAG chr11 5194280 5194299 5194296 +
gctagacacaaaagttctcc

SEQ ID NO: 5335 - DNA, 20 bp, Artificial Sequence
  Synthetic oligonucleotide; TAG chr11 5194290 5194309 5194306 +
aaagttctccaagtccccac

SEQ ID NO: 5336 - DNA, 20 bp, Artificial Sequence
  Synthetic oligonucleotide; TAG chr11 5194295 5194314 5194311 +
tctccaagtccccactagat

SEQ ID NO: 5337 - DNA, 20 bp, Artificial Sequence
  Synthetic oligonucleotide; TAG chr11 5194299 5194318 5194315 +
caagtccccactagattagc

SEQ ID NO: 5338 - DNA, 20 bp, Artificial Sequence
  Synthetic oligonucleotide; CAG chr11 5194305 5194324 5194321 +
cccactagattagctagaca

SEQ ID NO: 5339 - DNA, 20 bp, Artificial Sequence
  Synthetic oligonucleotide; GAG chr11 5194307 5194326 5194323 +
cactagattagctagacaca

SEQ ID NO: 5340 - DNA, 20 bp, Artificial Sequence
  Synthetic oligonucleotide; TGG chr11 5194317 5194336 5194333 +
gctagacacagagcactgat

SEQ ID NO: 5341 - DNA, 20 bp, Artificial Sequence
  Synthetic oligonucleotide; GAG chr11 5194336 5194355 5194352 +
ttggtgcatttacaaacctt

SEQ ID NO: 5342 - DNA, 20 bp, Artificial Sequence
  Synthetic oligonucleotide; TAG chr11 5194340 5194359 5194356 +
tgcatttacaaaccttgagt

SEQ ID NO: 5343 - DNA, 20 bp, Artificial Sequence
  Synthetic oligonucleotide; CAG chr11 5194346 5194365 5194362 +
tacaaaccttgagttagaca

SEQ ID NO: 5344 - DNA, 20 bp, Artificial Sequence
  Synthetic oligonucleotide; TGG chr11 5194358 5194377 5194374 +
gttagacacagattgctgat

SEQ ID NO: 5345 - DNA, 20 bp, Artificial Sequence
  Synthetic oligonucleotide; TAG chr11 5194377 5194396 5194393 +
ttggtgcatttacaaacctt

SEQ ID NO: 5346 - DNA, 20 bp, Artificial Sequence
  Synthetic oligonucleotide; TAG chr11 5194381 5194400 5194397 +
tgcatttacaaacctttagc

SEQ ID NO: 5347 - DNA, 20 bp, Artificial Sequence
  Synthetic oligonucleotide; AAG chr11 5194390 5194409 5194406 +
aaacctttagctagacatga

SEQ ID NO: 5348 - DNA, 20 bp, Artificial Sequence
  Synthetic oligonucleotide; CAG chr11 5194398 5194417 5194414 +
agctagacatgaaagttctc

SEQ ID NO: 5349 - DNA, 20 bp, Artificial Sequence
  Synthetic oligonucleotide; TGG chr11 5194413 5194432 5194429 +
ttctccagttccatatttca

SEQ ID NO: 5350 - DNA, 20 bp, Artificial Sequence
  Synthetic oligonucleotide; GAG chr11 5194417 5194436 5194433 +
ccagttccatatttcatggt

SEQ ID NO: 5351 - DNA, 20 bp, Artificial Sequence
  Synthetic oligonucleotide; AGG chr11 5194418 5194437 5194434 +
cagttccatatttcatggtg

SEQ ID NO: 5352 - DNA, 20 bp, Artificial Sequence
  Synthetic oligonucleotide; AAG chr11 5194425 5194444 5194441 +
atatttcatggtgaggaaca

SEQ ID NO: 5353 - DNA, 20 bp, Artificial Sequence
  Synthetic oligonucleotide; TAG chr11 5194432 5194451 5194448 +
atggtgaggaacaaagaata

SEQ ID NO: 5354 - DNA, 20 bp, Artificial Sequence
  Synthetic oligonucleotide; TGG chr11 5194435 5194454 5194451 +
gtgaggaacaaagaatatag

SEQ ID NO: 5355 - DNA, 20 bp, Artificial Sequence
  Synthetic oligonucleotide; GGG chr11 5194436 5194455 5194452 +
tgaggaacaaagaatatagt

SEQ ID NO: 5356 - DNA, 20 bp, Artificial Sequence
  Synthetic oligonucleotide; GGG chr11 5194437 5194456 5194453 +
gaggaacaaagaatatagtg

SEQ ID NO: 5357 - DNA, 20 bp, Artificial Sequence
  Synthetic oligonucleotide; TGG chr11 5194476 5194495 5194492 +
ttgttcctcaccatgaaata

SEQ ID NO: 5358 - DNA, 20 bp, Artificial Sequence
  Synthetic oligonucleotide; TGG chr11 5194482 5194501 5194498 +
ctcaccatgaaatatggaac

SEQ ID NO: 5359 - DNA, 20 bp, Artificial Sequence
  Synthetic oligonucleotide; GAG chr11 5194484 5194503 5194500 +
caccatgaaatatggaactg

SEQ ID NO: 5360 - DNA, 20 bp, Artificial Sequence
  Synthetic oligonucleotide; TAG chr11 5194499 5194518 5194515 +
aactggagaactttcatgtc

SEQ ID NO: 5361 - DNA, 20 bp, Artificial Sequence
  Synthetic oligonucleotide; AAG chr11 5194505 5194524 5194521 +
agaactttcatgtctagcta

SEQ ID NO: 5362 - DNA, 20 bp, Artificial Sequence
  Synthetic oligonucleotide; AGG chr11 5194506 5194525 5194522 +
gaactttcatgtctagctaa

SEQ ID NO: 5363 - DNA, 20 bp, Artificial Sequence
  Synthetic oligonucleotide; CGG chr11 5194529 5194548 5194545 +
tttgtaaatgcaatttattg

SEQ ID NO: 5364 - DNA, 20 bp, Artificial Sequence
  Synthetic oligonucleotide; TAG chr11 5194544 5194563 5194560 +
tattgcggcactattcacaa

SEQ ID NO: 5365 - DNA, 20 bp, Artificial Sequence
  Synthetic oligonucleotide; AAG chr11 5194549 5194568 5194565 +
cggcactattcacaatagca

SEQ ID NO: 5366 - DNA, 20 bp, Artificial Sequence
  Synthetic oligonucleotide; TGG chr11 5194555 5194574 5194571 +
tattcacaatagcaaagact

SEQ ID NO: 5367 - DNA, 20 bp, Artificial Sequence
  Synthetic oligonucleotide; TAG chr11 5194583 5194602 5194599 +
acccaaatgtccaacaatga

SEQ ID NO: 5368 - DNA, 20 bp, Artificial Sequence
  Synthetic oligonucleotide; TGG chr11 5194588 5194607 5194604 +
aatgtccaacaatgatagac

SEQ ID NO: 5369 - DNA, 20 bp, Artificial Sequence
  Synthetic oligonucleotide; AAG chr11 5194594 5194613 5194610 +
caacaatgatagactggatt

SEQ ID NO: 5370 - DNA, 20 bp, Artificial Sequence
  Synthetic oligonucleotide; TGG chr11 5194603 5194622 5194619 +
tagactggattaagaaaatg

SEQ ID NO: 5371 - DNA, 20 bp, Artificial Sequence
  Synthetic oligonucleotide; TGG chr11 5194619 5194638 5194635 +
aatgtggcacatacacacca

SEQ ID NO: 5372 - DNA, 20 bp, Artificial Sequence
  Synthetic oligonucleotide; CAG chr11 5194631 5194650 5194647 +
acacaccatggaatactatg

SEQ ID NO: 5373 - DNA, 20 bp, Artificial Sequence
  Synthetic oligonucleotide; AAG chr11 5194642 5194661 5194658 +
aatactatgcagccataaaa

SEQ ID NO: 5374 - DNA, 20 bp, Artificial Sequence
  Synthetic oligonucleotide; AGG chr11 5194643 5194662 5194659 +
atactatgcagccataaaaa

SEQ ID NO: 5375 - DNA, 20 bp, Artificial Sequence
  Synthetic oligonucleotide; GAG chr11 5194648 5194667 5194664 +
atgcagccataaaaaaggat

SEQ ID NO: 5376 - DNA, 20 bp, Artificial Sequence
  Synthetic oligonucleotide; TAG chr11 5194664 5194683 5194680 +
ggatgagttcatgtcctttg

SEQ ID NO: 5377 - DNA, 20 bp, Artificial Sequence
  Synthetic oligonucleotide; AGG chr11 5194665 5194684 5194681 +
gatgagttcatgtcctttgt

SEQ ID NO: 5378 - DNA, 20 bp, Artificial Sequence
  Synthetic oligonucleotide; GGG chr11 5194666 5194685 5194682 +
atgagttcatgtcctttgta

SEQ ID NO: 5379 - DNA, 20 bp, Artificial Sequence
  Synthetic oligonucleotide; TGG chr11 5194672 5194691 5194688 +
tcatgtcctttgtagggaca

SEQ ID NO: 5380 - DNA, 20 bp, Artificial Sequence
  Synthetic oligonucleotide; TGG chr11 5194682 5194701 5194698 +
tgtagggacatggatgaaat

SEQ ID NO: 5381 - DNA, 20 bp, Artificial Sequence
  Synthetic oligonucleotide; CAG chr11 5194698 5194717 5194714 +
aaattggaaatcatcattct

SEQ ID NO: 5382 - DNA, 20 bp, Artificial Sequence
  Synthetic oligonucleotide; AAG chr11 5194712 5194731 5194728 +
cattctcagtaaactatcgc

SEQ ID NO: 5383 - DNA, 20 bp, Artificial Sequence
  Synthetic oligonucleotide; AGG chr11 5194713 5194732 5194729 +
attctcagtaaactatcgca

SEQ ID NO: 5384 - DNA, 20 bp, Artificial Sequence
  Synthetic oligonucleotide; TAG chr11 5194748 5194767 5194764 +
acactgcatgttctcactca

SEQ ID NO: 5385 - DNA, 20 bp, Artificial Sequence
  Synthetic oligonucleotide; AGG chr11 5194749 5194768 5194765 +
cactgcatgttctcactcat

SEQ ID NO: 5386 - DNA, 20 bp, Artificial Sequence
  Synthetic oligonucleotide; TGG chr11 5194752 5194771 5194768 +
tgcatgttctcactcatagg

SEQ ID NO: 5387 - DNA, 20 bp, Artificial Sequence
  Synthetic oligonucleotide; GGG chr11 5194753 5194772 5194769 +
gcatgttctcactcataggt

SEQ ID NO: 5388 - DNA, 20 bp, Artificial Sequence
  Synthetic oligonucleotide; GAG chr11 5194767 5194786 5194783 +
ataggtgggaattgaacaat

SEQ ID NO: 5389 - DNA, 20 bp, Artificial Sequence
  Synthetic oligonucleotide; TGG chr11 5194776 5194795 5194792 +
aattgaacaatgagaacaca

SEQ ID NO: 5390 - DNA, 20 bp, Artificial Sequence
  Synthetic oligonucleotide; CAG chr11 5194782 5194801 5194798 +
acaatgagaacacatggaca

SEQ ID NO: 5391 - DNA, 20 bp, Artificial Sequence
  Synthetic oligonucleotide; AGG chr11 5194783 5194802 5194799 +
caatgagaacacatggacac

SEQ ID NO: 5392 - DNA, 20 bp, Artificial Sequence
  Synthetic oligonucleotide; AAG chr11 5194786 5194805 5194802 +
tgagaacacatggacacagg

SEQ ID NO: 5393 - DNA, 20 bp, Artificial Sequence
  Synthetic oligonucleotide; AGG chr11 5194787 5194806 5194803 +
gagaacacatggacacagga

SEQ ID NO: 5394 - DNA, 20 bp, Artificial Sequence
  Synthetic oligonucleotide; GGG chr11 5194788 5194807 5194804 +
agaacacatggacacaggaa

SEQ ID NO: 5395 - DNA, 20 bp, Artificial Sequence
  Synthetic oligonucleotide; GGG chr11 5194789 5194808 5194805 +
gaacacatggacacaggaag

SEQ ID NO: 5396 - DNA, 20 bp, Artificial Sequence
  Synthetic oligonucleotide; TGG chr11 5194804 5194823 5194820 +
ggaaggggaacatcacactc

SEQ ID NO: 5397 - DNA, 20 bp, Artificial Sequence
  Synthetic oligonucleotide; GGG chr11 5194805 5194824 5194821 +
gaaggggaacatcacactct

SEQ ID NO: 5398 - DNA, 20 bp, Artificial Sequence
  Synthetic oligonucleotide; GGG chr11 5194806 5194825 5194822 +
aaggggaacatcacactctg

SEQ ID NO: 5399 - DNA, 20 bp, Artificial Sequence
  Synthetic oligonucleotide; TGG chr11 5194816 5194835 5194832 +
tcacactctggggactgttg

SEQ ID NO: 5400 - DNA, 20 bp, Artificial Sequence
  Synthetic oligonucleotide; GGG chr11 5194817 5194836 5194833 +
cacactctggggactgttgt

SEQ ID NO: 5401 - DNA, 20 bp, Artificial Sequence
  Synthetic oligonucleotide; GGG chr11 5194818 5194837 5194834 +
acactctggggactgttgtg

SEQ ID NO: 5402 - DNA, 20 bp, Artificial Sequence
  Synthetic oligonucleotide; TGG chr11 5194821 5194840 5194837 +
ctctggggactgttgtgggg

SEQ ID NO: 5403 - DNA, 20 bp, Artificial Sequence
  Synthetic oligonucleotide; GGG chr11 5194822 5194841 5194838 +
tctggggactgttgtggggt

SEQ ID NO: 5404 - DNA, 20 bp, Artificial Sequence
  Synthetic oligonucleotide; GGG chr11 5194823 5194842 5194839 +
ctggggactgttgtggggtg

SEQ ID NO: 5405 - DNA, 20 bp, Artificial Sequence
  Synthetic oligonucleotide; GGG chr11 5194824 5194843 5194840 +
tggggactgttgtggggtgg

SEQ ID NO: 5406 - DNA, 20 bp, Artificial Sequence
  Synthetic oligonucleotide; GGG chr11 5194825 5194844 5194841 +
ggggactgttgtggggtggg

SEQ ID NO: 5407 - DNA, 20 bp, Artificial Sequence
  Synthetic oligonucleotide; GAG chr11 5194827 5194846 5194843 +
ggactgttgtggggtggggg

SEQ ID NO: 5408 - DNA, 20 bp, Artificial Sequence
  Synthetic oligonucleotide; AGG chr11 5194828 5194847 5194844 +
gactgttgtggggtgggggg

SEQ ID NO: 5409 - DNA, 20 bp, Artificial Sequence
  Synthetic oligonucleotide; GGG chr11 5194829 5194848 5194845 +
actgttgtggggtgggggga

SEQ ID NO: 5410 - DNA, 20 bp, Artificial Sequence
  Synthetic oligonucleotide; GAG chr11 5194831 5194850 5194847 +
tgttgtggggtggggggagg

SEQ ID NO: 5411 - DNA, 20 bp, Artificial Sequence
  Synthetic oligonucleotide; AGG chr11 5194832 5194851 5194848 +
gttgtggggtggggggaggg

SEQ ID NO: 5412 - DNA, 20 bp, Artificial Sequence
  Synthetic oligonucleotide; GAG chr11 5194834 5194853 5194850 +
tgtggggtggggggagggag

SEQ ID NO: 5413 - DNA, 20 bp, Artificial Sequence
  Synthetic oligonucleotide; AGG chr11 5194835 5194854 5194851 +
gtggggtggggggagggagg

SEQ ID NO: 5414 - DNA, 20 bp, Artificial Sequence
  Synthetic oligonucleotide; GGG chr11 5194836 5194855 5194852 +
tggggtggggggagggagga

SEQ ID NO: 5415 - DNA, 20 bp, Artificial Sequence
  Synthetic oligonucleotide; TAG chr11 5194840 5194859 5194856 +
gtggggggagggaggaggga

SEQ ID NO: 5416 - DNA, 20 bp, Artificial Sequence
  Synthetic oligonucleotide; TAG chr11 5194846 5194865 5194862 +
ggagggaggagggatagcat

SEQ ID NO: 5417 - DNA, 20 bp, Artificial Sequence
  Synthetic oligonucleotide; AGG chr11 5194847 5194866 5194863 +
gagggaggagggatagcatt

SEQ ID NO: 5418 - DNA, 20 bp, Artificial Sequence
  Synthetic oligonucleotide; GAG chr11 5194849 5194868 5194865 +
gggaggagggatagcattag

SEQ ID NO: 5419 - DNA, 20 bp, Artificial Sequence
  Synthetic oligonucleotide; GAG chr11 5194873 5194892 5194889 +
tatacctaatgctaaatgat

SEQ ID NO: 5420 - DNA, 20 bp, Artificial Sequence
  Synthetic oligonucleotide; TGG chr11 5194880 5194899 5194896 +
aatgctaaatgatgagttaa

SEQ ID NO: 5421 - DNA, 20 bp, Artificial Sequence
  Synthetic oligonucleotide; GGG chr11 5194881 5194900 5194897 +
atgctaaatgatgagttaat

SEQ ID NO: 5422 - DNA, 20 bp, Artificial Sequence
  Synthetic oligonucleotide; AAG chr11 5194886 5194905 5194902 +
aaatgatgagttaatgggtg

SEQ ID NO: 5423 - DNA, 20 bp, Artificial Sequence
  Synthetic oligonucleotide; CAG chr11 5194894 5194913 5194910 +
agttaatgggtgaagcacac

SEQ ID NO: 5424 - DNA, 20 bp, Artificial Sequence
  Synthetic oligonucleotide; TGG chr11 5194899 5194918 5194915 +
atgggtgaagcacaccagca

SEQ ID NO: 5425 - DNA, 20 bp, Artificial Sequence
  Synthetic oligonucleotide; AAG chr11 5194958 5194977 5194974 +
cacatgtaccctaaaactta

SEQ ID NO: 5426 - DNA, 20 bp, Artificial Sequence
  Synthetic oligonucleotide; AAG chr11 5194992 5195011 5195008 +
taaaataaaataattttaaa

SEQ ID NO: 5427 - DNA, 20 bp, Artificial Sequence
  Synthetic oligonucleotide; GAG chr11 5194994 5195013 5195010 +
aaataaaataattttaaaaa

SEQ ID NO: 5428 - DNA, 20 bp, Artificial Sequence
  Synthetic oligonucleotide; TAG chr11 5194999 5195018 5195015 +
aaataattttaaaaagagta

SEQ ID NO: 5429 - DNA, 20 bp, Artificial Sequence
  Synthetic oligonucleotide; TGG chr11 5195002 5195021 5195018 +
taattttaaaaagagtatag

SEQ ID NO: 5430 - DNA, 20 bp, Artificial Sequence
  Synthetic oligonucleotide; GGG chr11 5195003 5195022 5195019 +
aattttaaaaagagtatagt

SEQ ID NO: 5431 - DNA, 20 bp, Artificial Sequence
  Synthetic oligonucleotide; GGG chr11 5195004 5195023 5195020 +
attttaaaaagagtatagtg

SEQ ID NO: 5432 - DNA, 20 bp, Artificial Sequence
  Synthetic oligonucleotide; CGG chr11 5195020 5195039 5195036 +
agtggggatttctatgaaca

SEQ ID NO: 5433 - DNA, 20 bp, Artificial Sequence
  Synthetic oligonucleotide; TAG chr11 5195029 5195048 5195045 +
ttctatgaacacggtacaat

SEQ ID NO: 5434 - DNA, 20 bp, Artificial Sequence
  Synthetic oligonucleotide; TGG chr11 5195037 5195056 5195053 +
acacggtacaattagttatc

SEQ ID NO: 5435 - DNA, 20 bp, Artificial Sequence
  Synthetic oligonucleotide; CAG chr11 5195041 5195060 5195057 +
ggtacaattagttatctggc

SEQ ID NO: 5436 - DNA, 20 bp, Artificial Sequence
  Synthetic oligonucleotide; AAG chr11 5195052 5195071 5195068 +
ttatctggccagttactttg

SEQ ID NO: 5437 - DNA, 20 bp, Artificial Sequence
  Synthetic oligonucleotide; AGG chr11 5195053 5195072 5195069 +
tatctggccagttactttga

SEQ ID NO: 5438 - DNA, 20 bp, Artificial Sequence
  Synthetic oligonucleotide; CAG chr11 5195061 5195080 5195077 +
cagttactttgaaggctgat

SEQ ID NO: 5439 - DNA, 20 bp, Artificial Sequence
  Synthetic oligonucleotide; AAG chr11 5195065 5195084 5195081 +
tactttgaaggctgatcaga

SEQ ID NO: 5440 - DNA, 20 bp, Artificial Sequence
  Synthetic oligonucleotide; AAG chr11 5195068 5195087 5195084 +
tttgaaggctgatcagaaag

SEQ ID NO: 5441 - DNA, 20 bp, Artificial Sequence
  Synthetic oligonucleotide; TAG chr11 5195073 5195092 5195089 +
aggctgatcagaaagaagcc

SEQ ID NO: 5442 - DNA, 20 bp, Artificial Sequence
  Synthetic oligonucleotide; CAG chr11 5195082 5195101 5195098 +
agaaagaagcctagctaatc

SEQ ID NO: 5443 - DNA, 20 bp, Artificial Sequence
  Synthetic oligonucleotide; AAG chr11 5195086 5195105 5195102 +
agaagcctagctaatccagt

SEQ ID NO: 5444 - DNA, 20 bp, Artificial Sequence
  Synthetic oligonucleotide; TAG chr11 5195114 5195133 5195130 +
actcaaatgccaatatctat

SEQ ID NO: 5445 - DNA, 20 bp, Artificial Sequence
  Synthetic oligonucleotide; GAG chr11 5195128 5195147 5195144 +
atctattagtcctttctctt

SEQ ID NO: 5446 - DNA, 20 bp, Artificial Sequence
  Synthetic oligonucleotide; CAG chr11 5195132 5195151 5195148 +
attagtcctttctcttgaga

SEQ ID NO: 5447 - DNA, 20 bp, Artificial Sequence
  Synthetic oligonucleotide; TAG chr11 5195194 5195213 5195210 +
ctgtttcatatattacacct

SEQ ID NO: 5448 - DNA, 20 bp, Artificial Sequence
  Synthetic oligonucleotide; TGG chr11 5195200 5195219 5195216 +
catatattacaccttagtcc

SEQ ID NO: 5449 - DNA, 20 bp, Artificial Sequence
  Synthetic oligonucleotide; CAG chr11 5195224 5195243 5195240 +
atcctttgcactgaatttcc

SEQ ID NO: 5450 - DNA, 20 bp, Artificial Sequence
  Synthetic oligonucleotide; TGG chr11 5195231 5195250 5195247 +
gcactgaatttcccagtgtc

SEQ ID NO: 5451 - DNA, 20 bp, Artificial Sequence
  Synthetic oligonucleotide; TGG chr11 5195247 5195266 5195263 +
tgtctggatcatcattgatt

SEQ ID NO: 5452 - DNA, 20 bp, Artificial Sequence
  Synthetic oligonucleotide; CAG chr11 5195256 5195275 5195272 +
catcattgatttggttacta

SEQ ID NO: 5453 - DNA, 20 bp, Artificial Sequence
  Synthetic oligonucleotide; CAG chr11 5195275 5195294 5195291 +
acagacactaatcattttgc

SEQ ID NO: 5454 - DNA, 20 bp, Artificial Sequence
  Synthetic oligonucleotide; AAG chr11 5195283 5195302 5195299 +
taatcattttgccagaacta

SEQ ID NO: 5455 - DNA, 20 bp, Artificial Sequence
  Synthetic oligonucleotide; GAG chr11 5195285 5195304 5195301 +
atcattttgccagaactaaa

SEQ ID NO: 5456 - DNA, 20 bp, Artificial Sequence
  Synthetic oligonucleotide; GAG chr11 5195292 5195311 5195308 +
tgccagaactaaagagaaat

SEQ ID NO: 5457 - DNA, 20 bp, Artificial Sequence
  Synthetic oligonucleotide; TGG chr11 5195299 5195318 5195315 +
actaaagagaaatgagtacc

SEQ ID NO: 5458 - DNA, 20 bp, Artificial Sequence
  Synthetic oligonucleotide; TAG chr11 5195310 5195329 5195326 +
atgagtacctggctatcttt

SEQ ID NO: 5459 - DNA, 20 bp, Artificial Sequence
  Synthetic oligonucleotide; AGG chr11 5195311 5195330 5195327 +
tgagtacctggctatctttt

SEQ ID NO: 5460 - DNA, 20 bp, Artificial Sequence
  Synthetic oligonucleotide; CAG chr11 5195324 5195343 5195340 +
atcttttaggcaaccttaaa

SEQ ID NO: 5461 - DNA, 20 bp, Artificial Sequence
  Synthetic oligonucleotide; AGG chr11 5195325 5195344 5195341 +
tcttttaggcaaccttaaac

SEQ ID NO: 5462 - DNA, 20 bp, Artificial Sequence
  Synthetic oligonucleotide; TAG chr11 5195350 5195369 5195366 +
ttcaccttttctaccatttt

SEQ ID NO: 5463 - DNA, 20 bp, Artificial Sequence
  Synthetic oligonucleotide; AAG chr11 5195377 5195396 5195393 +
acccctcacgaatgctttat

SEQ ID NO: 5464 - DNA, 20 bp, Artificial Sequence
  Synthetic oligonucleotide; CAG chr11 5195397 5195416 5195413 +
aagtaatttctgtgtttttc

SEQ ID NO: 5465 - DNA, 20 bp, Artificial Sequence
  Synthetic oligonucleotide; CAG chr11 5195413 5195432 5195429 +
tttccagaaaatgctctttg

SEQ ID NO: 5466 - DNA, 20 bp, Artificial Sequence
  Synthetic oligonucleotide; TGG chr11 5195433 5195452 5195449 +
cagataacgttttttctcat

SEQ ID NO: 5467 - DNA, 20 bp, Artificial Sequence
  Synthetic oligonucleotide; TAG chr11 5195448 5195467 5195464 +
ctcattggtatccttttctg

SEQ ID NO: 5468 - DNA, 20 bp, Artificial Sequence
  Synthetic oligonucleotide; TAG chr11 5195456 5195475 5195472 +
tatccttttctgtagacata

SEQ ID NO: 5469 - DNA, 20 bp, Artificial Sequence
  Synthetic oligonucleotide; CAG chr11 5195463 5195482 5195479 +
ttctgtagacatatagattt

SEQ ID NO: 5470 - DNA, 20 bp, Artificial Sequence
  Synthetic oligonucleotide; CAG chr11 5195550 5195569 5195566 +
atattgtgctattttcttca

SEQ ID NO: 5471 - DNA, 20 bp, Artificial Sequence
  Synthetic oligonucleotide; TAG chr11 5195571 5195590 5195587 +
agtgtctctgtgtacatcta

SEQ ID NO: 5472 - DNA, 20 bp, Artificial Sequence
  Synthetic oligonucleotide; TAG chr11 5195577 5195596 5195593 +
tctgtgtacatctatagctt

SEQ ID NO: 5473 - DNA, 20 bp, Artificial Sequence
  Synthetic oligonucleotide; TGG chr11 5195580 5195599 5195596 +
gtgtacatctatagctttag

SEQ ID NO: 5474 - DNA, 20 bp, Artificial Sequence
  Synthetic oligonucleotide; TAG chr11 5195585 5195604 5195601 +
catctatagctttagtggat

SEQ ID NO: 5475 - DNA, 20 bp, Artificial Sequence
  Synthetic oligonucleotide; GAG chr11 5195587 5195606 5195603 +
tctatagctttagtggatta

SEQ ID NO: 5476 - DNA, 20 bp, Artificial Sequence
  Synthetic oligonucleotide; AAG chr11 5195591 5195610 5195607 +
tagctttagtggattagaga

SEQ ID NO: 5477 - DNA, 20 bp, Artificial Sequence
  Synthetic oligonucleotide; TAG chr11 5195594 5195613 5195610 +
ctttagtggattagagaaag

SEQ ID NO: 5478 - DNA, 20 bp, Artificial Sequence
  Synthetic oligonucleotide; CAG chr11 5195597 5195616 5195613 +
tagtggattagagaaagtag

SEQ ID NO: 5479 - DNA, 20 bp, Artificial Sequence
  Synthetic oligonucleotide; CAG chr11 5195615 5195634 5195631 +
agcagaaatgaacacatatt

SEQ ID NO: 5480 - DNA, 20 bp, Artificial Sequence
  Synthetic oligonucleotide; CAG chr11 5195623 5195642 5195639 +
tgaacacatattcagtctgc

SEQ ID NO: 5481 - DNA, 20 bp, Artificial Sequence
  Synthetic oligonucleotide; AGG chr11 5195624 5195643 5195640 +
gaacacatattcagtctgcc

SEQ ID NO: 5482 - DNA, 20 bp, Artificial Sequence
  Synthetic oligonucleotide; CAG chr11 5195682 5195701 5195698 +
taaatttatattttattatt

SEQ ID NO: 5483 - DNA, 20 bp, Artificial Sequence
  Synthetic oligonucleotide; CAG chr11 5195687 5195706 5195703 +
ttatattttattattcagta

SEQ ID NO: 5484 - DNA, 20 bp, Artificial Sequence
  Synthetic oligonucleotide; AAG chr11 5195706 5195725 5195722 +
acagaaaaatacataaataa

SEQ ID NO: 5485 - DNA, 20 bp, Artificial Sequence
  Synthetic oligonucleotide; CAG chr11 5195711 5195730 5195727 +
aaaatacataaataaaagta

SEQ ID NO: 5486 - DNA, 20 bp, Artificial Sequence
  Synthetic oligonucleotide; TAG chr11 5195735 5195754 5195751 +
ttgttaaattgacacaaaat

SEQ ID NO: 5487 - DNA, 20 bp, Artificial Sequence
  Synthetic oligonucleotide; AAG chr11 5195741 5195760 5195757 +
aattgacacaaaattagcaa

SEQ ID NO: 5488 - DNA, 20 bp, Artificial Sequence
  Synthetic oligonucleotide; CAG chr11 5195759 5195778 5195775 +
aaaagcttttaacaaacact

SEQ ID NO: 5489 - DNA, 20 bp, Artificial Sequence
  Synthetic oligonucleotide; AAG chr11 5195765 5195784 5195781 +
ttttaacaaacactcagacc

SEQ ID NO: 5490 - DNA, 20 bp, Artificial Sequence
  Synthetic oligonucleotide; AAG chr11 5195769 5195788 5195785 +
aacaaacactcagaccaaga

SEQ ID NO: 5491 - DNA, 20 bp, Artificial Sequence
  Synthetic oligonucleotide; GAG chr11 5195771 5195790 5195787 +
caaacactcagaccaagaaa

SEQ ID NO: 5492 - DNA, 20 bp, Artificial Sequence
  Synthetic oligonucleotide; CAG chr11 5195782 5195801 5195798 +
accaagaaagagaacattac

SEQ ID NO: 5493 - DNA, 20 bp, Artificial Sequence
  Synthetic oligonucleotide; AAG chr11 5195793 5195812 5195809 +
gaacattaccagcatctcaa

SEQ ID NO: 5494 - DNA, 20 bp, Artificial Sequence
  Synthetic oligonucleotide; CAG chr11 5195816 5195835 5195832 +
ctaaacaccgattgattcct

SEQ ID NO: 5495 - DNA, 20 bp, Artificial Sequence
  Synthetic oligonucleotide; TGG chr11 5195822 5195841 5195838 +
accgattgattcctcagttc

SEQ ID NO: 5496 - DNA, 20 bp, Artificial Sequence
  Synthetic oligonucleotide; AAG chr11 5195836 5195855 5195852 +
cagttctggctgcaacctga

SEQ ID NO: 5497 - DNA, 20 bp, Artificial Sequence
  Synthetic oligonucleotide; TGG chr11 5195864 5195883 5195880 +
attttctatgtgccattaca

SEQ ID NO: 5498 - DNA, 20 bp, Artificial Sequence
  Synthetic oligonucleotide; AAG chr11 5195871 5195890 5195887 +
atgtgccattacatggtgcc

SEQ ID NO: 5499 - DNA, 20 bp, Artificial Sequence
  Synthetic oligonucleotide; CAG chr11 5195878 5195897 5195894 +
attacatggtgccaagactg

SEQ ID NO: 5500 - DNA, 20 bp, Artificial Sequence
  Synthetic oligonucleotide; AGG chr11 5195879 5195898 5195895 +
ttacatggtgccaagactgc

SEQ ID NO: 5501 - DNA, 20 bp, Artificial Sequence
  Synthetic oligonucleotide; GGG chr11 5195880 5195899 5195896 +
tacatggtgccaagactgca

SEQ ID NO: 5502 - DNA, 20 bp, Artificial Sequence
  Synthetic oligonucleotide; GGG chr11 5195881 5195900 5195897 +
acatggtgccaagactgcag

SEQ ID NO: 5503 - DNA, 20 bp, Artificial Sequence
  Synthetic oligonucleotide; CAG chr11 5195884 5195903 5195900 +
tggtgccaagactgcagggg

SEQ ID NO: 5504 - DNA, 20 bp, Artificial Sequence
  Synthetic oligonucleotide; TGG chr11 5195902 5195921 5195918 +
ggcagaaaccacacttttac

SEQ ID NO: 5505 - DNA, 20 bp, Artificial Sequence
  Synthetic oligonucleotide; AAG chr11 5195907 5195926 5195923 +
aaaccacacttttactggaa

SEQ ID NO: 5506 - DNA, 20 bp, Artificial Sequence
  Synthetic oligonucleotide; TAG chr11 5195913 5195932 5195929 +
cacttttactggaaaagctt

SEQ ID NO: 5507 - DNA, 20 bp, Artificial Sequence
  Synthetic oligonucleotide; AGG chr11 5195914 5195933 5195930 +
acttttactggaaaagcttt

SEQ ID NO: 5508 - DNA, 20 bp, Artificial Sequence
  Synthetic oligonucleotide; CAG chr11 5195933 5195952 5195949 +
taggacatcgactcctactg

SEQ ID NO: 5509 - DNA, 20 bp, Artificial Sequence
  Synthetic oligonucleotide; AGG chr11 5195934 5195953 5195950 +
aggacatcgactcctactgc

SEQ ID NO: 5510 - DNA, 20 bp, Artificial Sequence
  Synthetic oligonucleotide; GGG chr11 5195935 5195954 5195951 +
ggacatcgactcctactgca

SEQ ID NO: 5511 - DNA, 20 bp, Artificial Sequence
  Synthetic oligonucleotide; GGG chr11 5195936 5195955 5195952 +
gacatcgactcctactgcag

SEQ ID NO: 5512 - DNA, 20 bp, Artificial Sequence
  Synthetic oligonucleotide; TGG chr11 5195945 5195964 5195961 +
tcctactgcaggggtgttct

SEQ ID NO: 5513 - DNA, 20 bp, Artificial Sequence
  Synthetic oligonucleotide; TAG chr11 5195949 5195968 5195965 +
actgcaggggtgttcttggc

SEQ ID NO: 5514 - DNA, 20 bp, Artificial Sequence
  Synthetic oligonucleotide; AGG chr11 5195950 5195969 5195966 +
ctgcaggggtgttcttggct

SEQ ID NO: 5515 - DNA, 20 bp, Artificial Sequence
  Synthetic oligonucleotide; TGG chr11 5195954 5195973 5195970 +
aggggtgttcttggctaggt

SEQ ID NO: 5516 - DNA, 20 bp, Artificial Sequence
  Synthetic oligonucleotide; AAG chr11 5195968 5195987 5195984 +
ctaggttggcattaattttt

SEQ ID NO: 5517 - DNA, 20 bp, Artificial Sequence
  Synthetic oligonucleotide; AAG chr11 5195978 5195997 5195994 +
attaatttttaagtttctgc

SEQ ID NO: 5518 - DNA, 20 bp, Artificial Sequence
  Synthetic oligonucleotide; GAG chr11 5195980 5195999 5195996 +
taatttttaagtttctgcaa

SEQ ID NO: 5519 - DNA, 20 bp, Artificial Sequence
  Synthetic oligonucleotide; TGG chr11 5195988 5196007 5196004 +
aagtttctgcaagagacttc

SEQ ID NO: 5520 - DNA, 20 bp, Artificial Sequence
  Synthetic oligonucleotide; GGG chr11 5195989 5196008 5196005 +
agtttctgcaagagacttct

SEQ ID NO: 5521 - DNA, 20 bp, Artificial Sequence
  Synthetic oligonucleotide; TGG chr11 5195996 5196015 5196012 +
gcaagagacttctgggaaaa

SEQ ID NO: 5522 - DNA, 20 bp, Artificial Sequence
  Synthetic oligonucleotide; TGG chr11 5196020 5196039 5196036 +
ctatttttatttccttcatc

SEQ ID NO: 5523 - DNA, 20 bp, Artificial Sequence
  Synthetic oligonucleotide; GAG chr11 5196022 5196041 5196038 +
atttttatttccttcatctg

SEQ ID NO: 5524 - DNA, 20 bp, Artificial Sequence
  Synthetic oligonucleotide; AGG chr11 5196023 5196042 5196039 +
tttttatttccttcatctgg

SEQ ID NO: 5525 - DNA, 20 bp, Artificial Sequence
  Synthetic oligonucleotide; TAG chr11 5196042 5196061 5196058 +
gaggcctctattcactactc

SEQ ID NO: 5526 - DNA, 20 bp, Artificial Sequence
  Synthetic oligonucleotide; AAG chr11 5196059 5196078 5196075 +
ctctagcaattatcttctgc

SEQ ID NO: 5527 - DNA, 20 bp, Artificial Sequence
  Synthetic oligonucleotide; TGG chr11 5196065 5196084 5196081 +
caattatcttctgcaagtaa

SEQ ID NO: 5528 - DNA, 20 bp, Artificial Sequence
  Synthetic oligonucleotide; TAG chr11 5196080 5196099 5196096 +
agtaatggtaacaaatatcc

SEQ ID NO: 5529 - DNA, 20 bp, Artificial Sequence
  Synthetic oligonucleotide; AGG chr11 5196081 5196100 5196097 +
gtaatggtaacaaatatcct

SEQ ID NO: 5530 - DNA, 20 bp, Artificial Sequence
  Synthetic oligonucleotide; GGG chr11 5196082 5196101 5196098 +
taatggtaacaaatatccta

SEQ ID NO: 5531 - DNA, 20 bp, Artificial Sequence
  Synthetic oligonucleotide; TGG chr11 5196087 5196106 5196103 +
gtaacaaatatcctagggaa

SEQ ID NO: 5532 - DNA, 20 bp, Artificial Sequence
  Synthetic oligonucleotide; GAG chr11 5196089 5196108 5196105 +
aacaaatatcctagggaatg

SEQ ID NO: 5533 - DNA, 20 bp, Artificial Sequence
  Synthetic oligonucleotide; AAG chr11 5196102 5196121 5196118 +
gggaatggagacacaacctc

SEQ ID NO: 5534 - DNA, 20 bp, Artificial Sequence
  Synthetic oligonucleotide; TAG chr11 5196105 5196124 5196121 +
aatggagacacaacctcaag

SEQ ID NO: 5535 - DNA, 20 bp, Artificial Sequence
  Synthetic oligonucleotide; AAG chr11 5196118 5196137 5196134 +
cctcaagtagaacatctctt

SEQ ID NO: 5536 - DNA, 20 bp, Artificial Sequence
  Synthetic oligonucleotide; AAG chr11 5196145 5196164 5196161 +
tttaacaatacgattttgat

SEQ ID NO: 5537 - DNA, 20 bp, Artificial Sequence
  Synthetic oligonucleotide; TAG chr11 5196150 5196169 5196166 +
caatacgattttgataagcc

SEQ ID NO: 5538 - DNA, 20 bp, Artificial Sequence
  Synthetic oligonucleotide; AGG chr11 5196151 5196170 5196167 +
aatacgattttgataagcct

SEQ ID NO: 5539 - DNA, 20 bp, Artificial Sequence
  Synthetic oligonucleotide; TAG chr11 5196158 5196177 5196174 +
ttttgataagcctaggaaaa

SEQ ID NO: 5540 - DNA, 20 bp, Artificial Sequence
  Synthetic oligonucleotide; AGG chr11 5196159 5196178 5196175 +
tttgataagcctaggaaaat

SEQ ID NO: 5541 - DNA, 20 bp, Artificial Sequence
  Synthetic oligonucleotide; GGG chr11 5196160 5196179 5196176 +
ttgataagcctaggaaaata

SEQ ID NO: 5542 - DNA, 20 bp, Artificial Sequence
  Synthetic oligonucleotide; GAG chr11 5196162 5196181 5196178 +
gataagcctaggaaaatagg

SEQ ID NO: 5543 - DNA, 20 bp, Artificial Sequence
  Synthetic oligonucleotide; AGG chr11 5196163 5196182 5196179 +
ataagcctaggaaaataggg

SEQ ID NO: 5544 - DNA, 20 bp, Artificial Sequence
  Synthetic oligonucleotide; TAG chr11 5196168 5196187 5196184 +
cctaggaaaatagggaggta

SEQ ID NO: 5545 - DNA, 20 bp, Artificial Sequence
  Synthetic oligonucleotide; TAG chr11 5196173 5196192 5196189 +
gaaaatagggaggtatagtg

SEQ ID NO: 5546 - DNA, 20 bp, Artificial Sequence
  Synthetic oligonucleotide; GAG chr11 5196175 5196194 5196191 +
aaatagggaggtatagtgta

SEQ ID NO: 5547 - DNA, 20 bp, Artificial Sequence
  Synthetic oligonucleotide; CAG chr11 5196178 5196197 5196194 +
tagggaggtatagtgtagag

SEQ ID NO: 5548 - DNA, 20 bp, Artificial Sequence
  Synthetic oligonucleotide; TGG chr11 5196184 5196203 5196200 +
ggtatagtgtagagcagtcc

SEQ ID NO: 5549 - DNA, 20 bp, Artificial Sequence
  Synthetic oligonucleotide; CAG chr11 5196195 5196214 5196211 +
gagcagtcctggccacttac

SEQ ID NO: 5550 - DNA, 20 bp, Artificial Sequence
  Synthetic oligonucleotide; TGG chr11 5196201 5196220 5196217 +
tcctggccacttaccagtac

SEQ ID NO: 5551 - DNA, 20 bp, Artificial Sequence
  Synthetic oligonucleotide; TGG chr11 5196208 5196227 5196224 +
cacttaccagtactggtccg

SEQ ID NO: 5552 - DNA, 20 bp, Artificial Sequence
  Synthetic oligonucleotide; TAG chr11 5196216 5196235 5196232 +
agtactggtccgtggcctgc

SEQ ID NO: 5553 - DNA, 20 bp, Artificial Sequence
  Synthetic oligonucleotide; AGG chr11 5196217 5196236 5196233 +
gtactggtccgtggcctgct

SEQ ID NO: 5554 - DNA, 20 bp, Artificial Sequence
  Synthetic oligonucleotide; TGG chr11 5196224 5196243 5196240 +
tccgtggcctgctaggaacc

SEQ ID NO: 5555 - DNA, 20 bp, Artificial Sequence
  Synthetic oligonucleotide; CAG chr11 5196232 5196251 5196248 +
ctgctaggaacctggtctca

SEQ ID NO: 5556 - DNA, 20 bp, Artificial Sequence
  Synthetic oligonucleotide; CAG chr11 5196235 5196254 5196251 +
ctaggaacctggtctcacag

SEQ ID NO: 5557 - DNA, 20 bp, Artificial Sequence
  Synthetic oligonucleotide; AGG chr11 5196236 5196255 5196252 +
taggaacctggtctcacagc

SEQ ID NO: 5558 - DNA, 20 bp, Artificial Sequence
  Synthetic oligonucleotide; GGG chr11 5196237 5196256 5196253 +
aggaacctggtctcacagca

SEQ ID NO: 5559 - DNA, 20 bp, Artificial Sequence
  Synthetic oligonucleotide; GGG chr11 5196238 5196257 5196254 +
ggaacctggtctcacagcag

SEQ ID NO: 5560 - DNA, 20 bp, Artificial Sequence
  Synthetic oligonucleotide; GGG chr11 5196239 5196258 5196255 +
gaacctggtctcacagcagg

SEQ ID NO: 5561 - DNA, 20 bp, Artificial Sequence
  Synthetic oligonucleotide; GAG chr11 5196244 5196263 5196260 +
tggtctcacagcagggggat

SEQ ID NO: 5562 - DNA, 20 bp, Artificial Sequence
  Synthetic oligonucleotide; AAG chr11 5196248 5196267 5196264 +
ctcacagcagggggatgagc

SEQ ID NO: 5563 - DNA, 20 bp, Artificial Sequence
  Synthetic oligonucleotide; GAG chr11 5196262 5196281 5196278 +
atgagcaagcattactgcct

SEQ ID NO: 5564 - DNA, 20 bp, Artificial Sequence
  Synthetic oligonucleotide; CGG chr11 5196283 5196302 5196299 +
agctcctcctcctgtcacat

SEQ ID NO: 5565 - DNA, 20 bp, Artificial Sequence
  Synthetic oligonucleotide; CAG chr11 5196286 5196305 5196302 +
tcctcctcctgtcacatcgg

SEQ ID NO: 5566 - DNA, 20 bp, Artificial Sequence
  Synthetic oligonucleotide; TGG chr11 5196289 5196308 5196305 +
tcctcctgtcacatcggcag

SEQ ID NO: 5567 - DNA, 20 bp, Artificial Sequence
  Synthetic oligonucleotide; CGG chr11 5196292 5196311 5196308 +
tcctgtcacatcggcagtgg

SEQ ID NO: 5568 - DNA, 20 bp, Artificial Sequence
  Synthetic oligonucleotide; TAG chr11 5196298 5196317 5196314 +
cacatcggcagtggcggcat

SEQ ID NO: 5569 - DNA, 20 bp, Artificial Sequence
  Synthetic oligonucleotide; TAG chr11 5196308 5196327 5196324 +
gtggcggcattagattctca

SEQ ID NO: 5570 - DNA, 20 bp, Artificial Sequence
  Synthetic oligonucleotide; GAG chr11 5196310 5196329 5196326 +
ggcggcattagattctcata

SEQ ID NO: 5571 - DNA, 20 bp, Artificial Sequence
  Synthetic oligonucleotide; AGG chr11 5196311 5196330 5196327 +
gcggcattagattctcatag

SEQ ID NO: 5572 - DNA, 20 bp, Artificial Sequence
  Synthetic oligonucleotide; AAG chr11 5196319 5196338 5196335 +
agattctcatagaggcatgc

SEQ ID NO: 5573 - DNA, 20 bp, Artificial Sequence
  Synthetic oligonucleotide; AGG chr11 5196320 5196339 5196336 +
gattctcatagaggcatgca

SEQ ID NO: 5574 - DNA, 20 bp, Artificial Sequence
  Synthetic oligonucleotide; GGG chr11 5196321 5196340 5196337 +
attctcatagaggcatgcaa

SEQ ID NO: 5575 - DNA, 20 bp, Artificial Sequence
  Synthetic oligonucleotide; TAG chr11 5196327 5196346 5196343 +
atagaggcatgcaagggatc

SEQ ID NO: 5576 - DNA, 20 bp, Artificial Sequence
  Synthetic oligonucleotide; AGG chr11 5196328 5196347 5196344 +
tagaggcatgcaagggatct

SEQ ID NO: 5577 - DNA, 20 bp, Artificial Sequence
  Synthetic oligonucleotide; CGG chr11 5196334 5196353 5196350 +
catgcaagggatctaggttg

SEQ ID NO: 5578 - DNA, 20 bp, Artificial Sequence
  Synthetic oligonucleotide; GAG chr11 5196345 5196364 5196361 +
tctaggttgcggcttcttat

SEQ ID NO: 5579 - DNA, 20 bp, Artificial Sequence
  Synthetic oligonucleotide; GAG chr11 5196368 5196387 5196384 +
aatctaatgcctaatgctct

SEQ ID NO: 5580 - DNA, 20 bp, Artificial Sequence
  Synthetic oligonucleotide; AGG chr11 5196369 5196388 5196385 +
atctaatgcctaatgctctg

SEQ ID NO: 5581 - DNA, 20 bp, Artificial Sequence
  Synthetic oligonucleotide; TGG chr11 5196372 5196391 5196388 +
taatgcctaatgctctgagg

SEQ ID NO: 5582 - DNA, 20 bp, Artificial Sequence
  Synthetic oligonucleotide; CAG chr11 5196377 5196396 5196393 +
cctaatgctctgaggtggaa

SEQ ID NO: 5583 - DNA, 20 bp, Artificial Sequence
  Synthetic oligonucleotide; AAG chr11 5196423 5196442 5196439 +
ctgcaccttgtcttccacaa

SEQ ID NO: 5584 - DNA, 20 bp, Artificial Sequence
  Synthetic oligonucleotide; CAG chr11 5196426 5196445 5196442 +
caccttgtcttccacaaaag

SEQ ID NO: 5585 - DNA, 20 bp, Artificial Sequence
  Synthetic oligonucleotide; TGG chr11 5196433 5196452 5196449 +
tcttccacaaaagcagtccc

SEQ ID NO: 5586 - DNA, 20 bp, Artificial Sequence
  Synthetic oligonucleotide; AAG chr11 5196450 5196469 5196466 +
ccctggtaccaaaaacattg

SEQ ID NO: 5587 - DNA, 20 bp, Artificial Sequence
  Synthetic oligonucleotide; TGG chr11 5196458 5196477 5196474 +
ccaaaaacattgaagactgc

SEQ ID NO: 5588 - DNA, 20 bp, Artificial Sequence
  Synthetic oligonucleotide; CAG chr11 5196465 5196484 5196481 +
cattgaagactgctggtgta

SEQ ID NO: 5589 - DNA, 20 bp, Artificial Sequence
  Synthetic oligonucleotide; TGG chr11 5196482 5196501 5196498 +
gtacagtgaacatctgcctg

SEQ ID NO: 5590 - DNA, 20 bp, Artificial Sequence
  Synthetic oligonucleotide; TAG chr11 5196494 5196513 5196510 +
tctgcctgtggatttattat

SEQ ID NO: 5591 - DNA, 20 bp, Artificial Sequence
  Synthetic oligonucleotide; CAG chr11 5196497 5196516 5196513 +
gcctgtggatttattattag

SEQ ID NO: 5592 - DNA, 20 bp, Artificial Sequence
  Synthetic oligonucleotide; AAG chr11 5196553 5196572 5196569 +
aatcatgtcctctcacttct

SEQ ID NO: 5593 - DNA, 20 bp, Artificial Sequence
  Synthetic oligonucleotide; TGG chr11 5196575 5196594 5196591 +
gaatcactgatttctcccac

SEQ ID NO: 5594 - DNA, 20 bp, Artificial Sequence
  Synthetic oligonucleotide; TAG chr11 5196582 5196601 5196598 +
tgatttctcccactggacct

SEQ ID NO: 5595 - DNA, 20 bp, Artificial Sequence
  Synthetic oligonucleotide; CGG chr11 5196590 5196609 5196606 +
cccactggaccttagctttt

SEQ ID NO: 5596 - DNA, 20 bp, Artificial Sequence
  Synthetic oligonucleotide; AAG chr11 5196596 5196615 5196612 +
ggaccttagcttttcggtgt

SEQ ID NO: 5597 - DNA, 20 bp, Artificial Sequence
  Synthetic oligonucleotide; GAG chr11 5196598 5196617 5196614 +
accttagcttttcggtgtaa

SEQ ID NO: 5598 - DNA, 20 bp, Artificial Sequence
  Synthetic oligonucleotide; TAG chr11 5196610 5196629 5196626 +
cggtgtaagagttaaatgaa

SEQ ID NO: 5599 - DNA, 20 bp, Artificial Sequence
  Synthetic oligonucleotide; TGG chr11 5196621 5196640 5196637 +
ttaaatgaatagcaattgaa

SEQ ID NO: 5600 - DNA, 20 bp, Artificial Sequence
  Synthetic oligonucleotide; TAG chr11 5196626 5196645 5196642 +
tgaatagcaattgaatggac

SEQ ID NO: 5601 - DNA, 20 bp, Artificial Sequence
  Synthetic oligonucleotide; CGG chr11 5196670 5196689 5196686 +
tacttttgtcaccttgttct

SEQ ID NO: 5602 - DNA, 20 bp, Artificial Sequence
  Synthetic oligonucleotide; AAG chr11 5196718 5196737 5196734 +
taataaccgtgacttcattt

SEQ ID NO: 5603 - DNA, 20 bp, Artificial Sequence
  Synthetic oligonucleotide; AGG chr11 5196719 5196738 5196735 +
aataaccgtgacttcattta

SEQ ID NO: 5604 - DNA, 20 bp, Artificial Sequence
  Synthetic oligonucleotide; CAG chr11 5196722 5196741 5196738 +
aaccgtgacttcatttaagg

SEQ ID NO: 5605 - DNA, 20 bp, Artificial Sequence
  Synthetic oligonucleotide; CAG chr11 5196725 5196744 5196741 +
cgtgacttcatttaaggcag

SEQ ID NO: 5606 - DNA, 20 bp, Artificial Sequence
  Synthetic oligonucleotide; CAG chr11 5196742 5196761 5196758 +
cagcagttacaatgatatga

SEQ ID NO: 5607 - DNA, 20 bp, Artificial Sequence
  Synthetic oligonucleotide; AAG chr11 5196764 5196783 5196780 +
gtctacctattaaaaaaaaa

SEQ ID NO: 5608 - DNA, 20 bp, Artificial Sequence
  Synthetic oligonucleotide; AGG chr11 5196765 5196784 5196781 +
tctacctattaaaaaaaaaa

SEQ ID NO: 5609 - DNA, 20 bp, Artificial Sequence
  Synthetic oligonucleotide; AAG chr11 5196771 5196790 5196787 +
tattaaaaaaaaaaaggcaa

SEQ ID NO: 5610 - DNA, 20 bp, Artificial Sequence
  Synthetic oligonucleotide; GAG chr11 5196773 5196792 5196789 +
ttaaaaaaaaaaaggcaaaa

SEQ ID NO: 5611 - DNA, 20 bp, Artificial Sequence
  Synthetic oligonucleotide; TGG chr11 5196800 5196819 5196816 +
gtgtttccctaacatcactg

SEQ ID NO: 5612 - DNA, 20 bp, Artificial Sequence
  Synthetic oligonucleotide; CAG chr11 5196822 5196841 5196838 +
gctgttttcgtaacgtttct

SEQ ID NO: 5613 - DNA, 20 bp, Artificial Sequence
  Synthetic oligonucleotide; TGG chr11 5196831 5196850 5196847 +
gtaacgtttctcagtgacgc

SEQ ID NO: 5614 - DNA, 20 bp, Artificial Sequence
  Synthetic oligonucleotide; TAG chr11 5196835 5196854 5196851 +
cgtttctcagtgacgctgga

SEQ ID NO: 5615 - DNA, 20 bp, Artificial Sequence
  Synthetic oligonucleotide; TAG chr11 5196838 5196857 5196854 +
ttctcagtgacgctggatag

SEQ ID NO: 5616 - DNA, 20 bp, Artificial Sequence
  Synthetic oligonucleotide; CAG chr11 5196846 5196865 5196862 +
gacgctggatagtagccttg

SEQ ID NO: 5617 - DNA, 20 bp, Artificial Sequence
  Synthetic oligonucleotide; AGG chr11 5196847 5196866 5196863 +
acgctggatagtagccttgc

SEQ ID NO: 5618 - DNA, 20 bp, Artificial Sequence
  Synthetic oligonucleotide; AAG chr11 5196857 5196876 5196873 +
gtagccttgcaggccttaca

SEQ ID NO: 5619 - DNA, 20 bp, Artificial Sequence
  Synthetic oligonucleotide; AGG chr11 5196858 5196877 5196874 +
tagccttgcaggccttacaa

SEQ ID NO: 5620 - DNA, 20 bp, Artificial Sequence
  Synthetic oligonucleotide; TGG chr11 5196882 5196901 5196898 +
atctgataactgcttctcac

SEQ ID NO: 5621 - DNA, 20 bp, Artificial Sequence
  Synthetic oligonucleotide; CAG chr11 5196890 5196909 5196906 +
actgcttctcactggctctg

SEQ ID NO: 5622 - DNA, 20 bp, Artificial Sequence
  Synthetic oligonucleotide; AGG chr11 5196891 5196910 5196907 +
ctgcttctcactggctctgc

SEQ ID NO: 5623 - DNA, 20 bp, Artificial Sequence
  Synthetic oligonucleotide; CAG chr11 5196909 5196928 5196925 +
gcaggctaccacatcaacaa

SEQ ID NO: 5624 - DNA, 20 bp, Artificial Sequence
  Synthetic oligonucleotide; CAG chr11 5196915 5196934 5196931 +
taccacatcaacaacagttt

SEQ ID NO: 5625 - DNA, 20 bp, Artificial Sequence
  Synthetic oligonucleotide; TGG chr11 5196936 5196955 5196952 +
agctgttgttgcctaattca

SEQ ID NO: 5626 - DNA, 20 bp, Artificial Sequence
  Synthetic oligonucleotide; AAG chr11 5196944 5196963 5196960 +
ttgcctaattcatggaaaac

SEQ ID NO: 5627 - DNA, 20 bp, Artificial Sequence
  Synthetic oligonucleotide; TAG chr11 5196953 5196972 5196969 +
tcatggaaaacaagtttcct

SEQ ID NO: 5628 - DNA, 20 bp, Artificial Sequence
  Synthetic oligonucleotide; AAG chr11 5196956 5196975 5196972 +
tggaaaacaagtttccttag

SEQ ID NO: 5629 - DNA, 20 bp, Artificial Sequence
  Synthetic oligonucleotide; TGG chr11 5196960 5196979 5196976 +
aaacaagtttccttagaagc

SEQ ID NO: 5630 - DNA, 20 bp, Artificial Sequence
  Synthetic oligonucleotide; GAG chr11 5196969 5196988 5196985 +
tccttagaagctggcttttt

SEQ ID NO: 5631 - DNA, 20 bp, Artificial Sequence
  Synthetic oligonucleotide; TGG chr11 5196977 5196996 5196993 +
agctggctttttgagatata

SEQ ID NO: 5632 - DNA, 20 bp, Artificial Sequence
  Synthetic oligonucleotide; TGG chr11 5196995 5197014 5197011 +
tatggaaaaatgtctccacc

SEQ ID NO: 5633 - DNA, 20 bp, Artificial Sequence
  Synthetic oligonucleotide; TAG chr11 5197006 5197025 5197022 +
gtctccacctggctactatg

SEQ ID NO: 5634 - DNA, 20 bp, Artificial Sequence
  Synthetic oligonucleotide; CAG chr11 5197019 5197038 5197035 +
tactatgtagcttttcaaaa

SEQ ID NO: 5635 - DNA, 20 bp, Artificial Sequence
  Synthetic oligonucleotide; CAG chr11 5197023 5197042 5197039 +
atgtagcttttcaaaacaga

SEQ ID NO: 5636 - DNA, 20 bp, Artificial Sequence
  Synthetic oligonucleotide; CAG chr11 5197066 5197085 5197082 +
tctccatctgctcttccttt

SEQ ID NO: 5637 - DNA, 20 bp, Artificial Sequence
  Synthetic oligonucleotide; AGG chr11 5197067 5197086 5197083 +
ctccatctgctcttcctttc

SEQ ID NO: 5638 - DNA, 20 bp, Artificial Sequence
  Synthetic oligonucleotide; TGG chr11 5197073 5197092 5197089 +
ctgctcttcctttcaggacc

SEQ ID NO: 5639 - DNA, 20 bp, Artificial Sequence
  Synthetic oligonucleotide; GGG chr11 5197074 5197093 5197090 +
tgctcttcctttcaggacct

SEQ ID NO: 5640 - DNA, 20 bp, Artificial Sequence
  Synthetic oligonucleotide; CAG chr11 5197107 5197126 5197123 +
tgaaattgccttttcttcct

SEQ ID NO: 5641 - DNA, 20 bp, Artificial Sequence
  Synthetic oligonucleotide; AGG chr11 5197108 5197127 5197124 +
gaaattgccttttcttcctc

SEQ ID NO: 5642 - DNA, 20 bp, Artificial Sequence
  Synthetic oligonucleotide; GAG chr11 5197110 5197129 5197126 +
aattgccttttcttcctcag

SEQ ID NO: 5643 - DNA, 20 bp, Artificial Sequence
  Synthetic oligonucleotide; GAG chr11 5197112 5197131 5197128 +
ttgccttttcttcctcagga

SEQ ID NO: 5644 - DNA, 20 bp, Artificial Sequence
  Synthetic oligonucleotide; AGG chr11 5197113 5197132 5197129 +
tgccttttcttcctcaggag

SEQ ID NO: 5645 - DNA, 20 bp, Artificial Sequence
  Synthetic oligonucleotide; TAG chr11 5197118 5197137 5197134 +
tttcttcctcaggagaggtt

SEQ ID NO: 5646 - DNA, 20 bp, Artificial Sequence
  Synthetic oligonucleotide; AAG chr11 5197131 5197150 5197147 +
agaggtttagttattttttt

SEQ ID NO: 5647 - DNA, 20 bp, Artificial Sequence
  Synthetic oligonucleotide; CAG chr11 5197144 5197163 5197160 +
tttttttaagtaattgcttc

SEQ ID NO: 5648 - DNA, 20 bp, Artificial Sequence
  Synthetic oligonucleotide; TAG chr11 5197148 5197167 5197164 +
tttaagtaattgcttccaga

SEQ ID NO: 5649 - DNA, 20 bp, Artificial Sequence
  Synthetic oligonucleotide; GAG chr11 5197150 5197169 5197166 +
taagtaattgcttccagata

SEQ ID NO: 5650 - DNA, 20 bp, Artificial Sequence
  Synthetic oligonucleotide; AGG chr11 5197151 5197170 5197167 +
aagtaattgcttccagatag

SEQ ID NO: 5651 - DNA, 20 bp, Artificial Sequence
  Synthetic oligonucleotide; AAG chr11 5197212 5197231 5197228 +
aacctgtttctttctgtata

SEQ ID NO: 5652 - DNA, 20 bp, Artificial Sequence
  Synthetic oligonucleotide; CAG chr11 5197217 5197236 5197233 +
gtttctttctgtataaagcc

SEQ ID NO: 5653 - DNA, 20 bp, Artificial Sequence
  Synthetic oligonucleotide; AAG chr11 5197230 5197249 5197246 +
taaagcccagtaatcatata

SEQ ID NO: 5654 - DNA, 20 bp, Artificial Sequence
  Synthetic oligonucleotide; TGG chr11 5197244 5197263 5197260 +
catataaagtttactttcat

SEQ ID NO: 5655 - DNA, 20 bp, Artificial Sequence
  Synthetic oligonucleotide; TGG chr11 5197282 5197301 5197298 +
tttactgattttcctccctt

SEQ ID NO: 5656 - DNA, 20 bp, Artificial Sequence
  Synthetic oligonucleotide; AAG chr11 5197295 5197314 5197311 +
ctccctttggctgaattgta

SEQ ID NO: 5657 - DNA, 20 bp, Artificial Sequence
  Synthetic oligonucleotide; AAG chr11 5197304 5197323 5197320 +
gctgaattgtaaagattctg

SEQ ID NO: 5658 - DNA, 20 bp, Artificial Sequence
  Synthetic oligonucleotide; TAG chr11 5197329 5197348 5197345 +
cttcataaatcttatcatca

SEQ ID NO: 5659 - DNA, 20 bp, Artificial Sequence
  Synthetic oligonucleotide; TAG chr11 5197342 5197361 5197358 +
atcatcatagtacaattata

SEQ ID NO: 5660 - DNA, 20 bp, Artificial Sequence
  Synthetic oligonucleotide; AAG chr11 5197354 5197373 5197370 +
caattatatagctctaaaat

SEQ ID NO: 5661 - DNA, 20 bp, Artificial Sequence
  Synthetic oligonucleotide; GAG chr11 5197368 5197387 5197384 +
taaaataagcaatgatttct

SEQ ID NO: 5662 - DNA, 20 bp, Artificial Sequence
  Synthetic oligonucleotide; AGG chr11 5197369 5197388 5197385 +
aaaataagcaatgatttctg

SEQ ID NO: 5663 - DNA, 20 bp, Artificial Sequence
  Synthetic oligonucleotide; TAG chr11 5197379 5197398 5197395 +
atgatttctgaggatactct

SEQ ID NO: 5664 - DNA, 20 bp, Artificial Sequence
  Synthetic oligonucleotide; AGG chr11 5197380 5197399 5197396 +
tgatttctgaggatactctt

SEQ ID NO: 5665 - DNA, 20 bp, Artificial Sequence
  Synthetic oligonucleotide; CGG chr11 5197407 5197426 5197423 +
ttttattaactgttttgtca

SEQ ID NO: 5666 - DNA, 20 bp, Artificial Sequence
  Synthetic oligonucleotide; TGG chr11 5197429 5197448 5197445 +
gccattatttcaaactattt

SEQ ID NO: 5667 - DNA, 20 bp, Artificial Sequence
  Synthetic oligonucleotide; TAG chr11 5197443 5197462 5197459 +
ctattttggttcacattcta

SEQ ID NO: 5668 - DNA, 20 bp, Artificial Sequence
  Synthetic oligonucleotide; AGG chr11 5197444 5197463 5197460 +
tattttggttcacattctat

SEQ ID NO: 5669 - DNA, 20 bp, Artificial Sequence
  Synthetic oligonucleotide; AAG chr11 5197459 5197478 5197475 +
tctataggttgcctaatctg

SEQ ID NO: 5670 - DNA, 20 bp, Artificial Sequence
  Synthetic oligonucleotide; TAG chr11 5197474 5197493 5197490 +
atctgaagcacaaacactca

SEQ ID NO: 5671 - DNA, 20 bp, Artificial Sequence
  Synthetic oligonucleotide; AAG chr11 5197481 5197500 5197497 +
gcacaaacactcatagtatg

SEQ ID NO: 5672 - DNA, 20 bp, Artificial Sequence
  Synthetic oligonucleotide; CAG chr11 5197488 5197507 5197504 +
cactcatagtatgaagtctt

SEQ ID NO: 5673 - DNA, 20 bp, Artificial Sequence
  Synthetic oligonucleotide; GAG chr11 5197493 5197512 5197509 +
atagtatgaagtcttcagat

SEQ ID NO: 5674 - DNA, 20 bp, Artificial Sequence
  Synthetic oligonucleotide; CAG chr11 5197540 5197559 5197556 +
taactctcaaaccaacaact

SEQ ID NO: 5675 - DNA, 20 bp, Artificial Sequence
  Synthetic oligonucleotide; CAG chr11 5197549 5197568 5197565 +
aaccaacaactcagttgtgt

SEQ ID NO: 5676 - DNA, 20 bp, Artificial Sequence
  Synthetic oligonucleotide; GAG chr11 5197605 5197624 5197621 +
tcattctgatgcttccctat

SEQ ID NO: 5677 - DNA, 20 bp, Artificial Sequence
  Synthetic oligonucleotide; TGG chr11 5197608 5197627 5197624 +
ttctgatgcttccctatgag

SEQ ID NO: 5678 - DNA, 20 bp, Artificial Sequence
  Synthetic oligonucleotide; TGG chr11 5197612 5197631 5197628 +
gatgcttccctatgagtggc

SEQ ID NO: 5679 - DNA, 20 bp, Artificial Sequence
  Synthetic oligonucleotide; TGG chr11 5197615 5197634 5197631 +
gcttccctatgagtggctgg

SEQ ID NO: 5680 - DNA, 20 bp, Artificial Sequence
  Synthetic oligonucleotide; CAG chr11 5197630 5197649 5197646 +
gctggtggaaaacatattgt

SEQ ID NO: 5681 - DNA, 20 bp, Artificial Sequence
  Synthetic oligonucleotide; AAG chr11 5197639 5197658 5197655 +
aaacatattgtcagttgttg

SEQ ID NO: 5682 - DNA, 20 bp, Artificial Sequence
  Synthetic oligonucleotide; CAG chr11 5197657 5197676 5197673 +
tgaagaattctctgcttccc

SEQ ID NO: 5683 - DNA, 20 bp, Artificial Sequence
  Synthetic oligonucleotide; CAG chr11 5197668 5197687 5197684 +
ctgcttccccagtgttgtgt

SEQ ID NO: 5684 - DNA, 20 bp, Artificial Sequence
  Synthetic oligonucleotide; CGG chr11 5197676 5197695 5197692 +
ccagtgttgtgtcagctctc

SEQ ID NO: 5685 - DNA, 20 bp, Artificial Sequence
  Synthetic oligonucleotide; TGG chr11 5197683 5197702 5197699 +
tgtgtcagctctccggcgta

SEQ ID NO: 5686 - DNA, 20 bp, Artificial Sequence
  Synthetic oligonucleotide; GGG chr11 5197684 5197703 5197700 +
gtgtcagctctccggcgtat

SEQ ID NO: 5687 - DNA, 20 bp, Artificial Sequence
  Synthetic oligonucleotide; GAG chr11 5197686 5197705 5197702 +
gtcagctctccggcgtatgg

SEQ ID NO: 5688 - DNA, 20 bp, Artificial Sequence
  Synthetic oligonucleotide; AGG chr11 5197687 5197706 5197703 +
tcagctctccggcgtatggg

SEQ ID NO: 5689 - DNA, 20 bp, Artificial Sequence
  Synthetic oligonucleotide; GGG chr11 5197688 5197707 5197704 +
cagctctccggcgtatggga

SEQ ID NO: 5690 - DNA, 20 bp, Artificial Sequence
  Synthetic oligonucleotide; TGG chr11 5197691 5197710 5197707 +
ctctccggcgtatgggaggg

SEQ ID NO: 5691 - DNA, 20 bp, Artificial Sequence
  Synthetic oligonucleotide; AAG chr11 5197711 5197730 5197727 +
tggatgcttattcactttca

SEQ ID NO: 5692 - DNA, 20 bp, Artificial Sequence
  Synthetic oligonucleotide; TAG chr11 5197717 5197736 5197733 +
cttattcactttcaaagcat

SEQ ID NO: 5693 - DNA, 20 bp, Artificial Sequence
  Synthetic oligonucleotide; AAG chr11 5197720 5197739 5197736 +
attcactttcaaagcattag

SEQ ID NO: 5694 - DNA, 20 bp, Artificial Sequence
  Synthetic oligonucleotide; AGG chr11 5197721 5197740 5197737 +
ttcactttcaaagcattaga

SEQ ID NO: 5695 - DNA, 20 bp, Artificial Sequence
  Synthetic oligonucleotide; AAG chr11 5197724 5197743 5197740 +
actttcaaagcattagaagg

SEQ ID NO: 5696 - DNA, 20 bp, Artificial Sequence
  Synthetic oligonucleotide; TGG chr11 5197733 5197752 5197749 +
gcattagaaggaagcttctt

SEQ ID NO: 5697 - DNA, 20 bp, Artificial Sequence
  Synthetic oligonucleotide; GAG chr11 5197741 5197760 5197757 +
aggaagcttctttggccatt

SEQ ID NO: 5698 - DNA, 20 bp, Artificial Sequence
  Synthetic oligonucleotide; GAG chr11 5197752 5197771 5197768 +
ttggccattgagaaatctat

SEQ ID NO: 5699 - DNA, 20 bp, Artificial Sequence
  Synthetic oligonucleotide; CAG chr11 5197773 5197792 5197789 +
agacattcacatgacctcta

SEQ ID NO: 5700 - DNA, 20 bp, Artificial Sequence
  Synthetic oligonucleotide; CAG chr11 5197779 5197798 5197795 +
tcacatgacctctacagatt

SEQ ID NO: 5701 - DNA, 20 bp, Artificial Sequence
  Synthetic oligonucleotide; CAG chr11 5197782 5197801 5197798 +
catgacctctacagattcag

SEQ ID NO: 5702 - DNA, 20 bp, Artificial Sequence
  Synthetic oligonucleotide; TGG chr11 5197810 5197829 5197826 +
ttctcttttcattataaaac

SEQ ID NO: 5703 - DNA, 20 bp, Artificial Sequence
  Synthetic oligonucleotide; GGG chr11 5197811 5197830 5197827 +
tctcttttcattataaaact

SEQ ID NO: 5704 - DNA, 20 bp, Artificial Sequence
  Synthetic oligonucleotide; GGG chr11 5197812 5197831 5197828 +
ctcttttcattataaaactg

SEQ ID NO: 5705 - DNA, 20 bp, Artificial Sequence
  Synthetic oligonucleotide; TAG chr11 5197817 5197836 5197833 +
ttcattataaaactggggca

SEQ ID NO: 5706 - DNA, 20 bp, Artificial Sequence
  Synthetic oligonucleotide; AGG chr11 5197818 5197837 5197834 +
tcattataaaactggggcat

SEQ ID NO: 5707 - DNA, 20 bp, Artificial Sequence
  Synthetic oligonucleotide; CAG chr11 5197829 5197848 5197845 +
ctggggcataggaatcttgt

SEQ ID NO: 5708 - DNA, 20 bp, Artificial Sequence
  Synthetic oligonucleotide; TGG chr11 5197834 5197853 5197850 +
gcataggaatcttgtcagat

SEQ ID NO: 5709 - DNA, 20 bp, Artificial Sequence
  Synthetic oligonucleotide; CAG chr11 5197845 5197864 5197861 +
ttgtcagattggccacattc

SEQ ID NO: 5710 - DNA, 20 bp, Artificial Sequence
  Synthetic oligonucleotide; CGG chr11 5197849 5197868 5197865 +
cagattggccacattccagt

SEQ ID NO: 5711 - DNA, 20 bp, Artificial Sequence
  Synthetic oligonucleotide; CAG chr11 5197853 5197872 5197869 +
ttggccacattccagtcggc

SEQ ID NO: 5712 - DNA, 20 bp, Artificial Sequence
  Synthetic oligonucleotide; AGG chr11 5197854 5197873 5197870 +
tggccacattccagtcggcc

SEQ ID NO: 5713 - DNA, 20 bp, Artificial Sequence
  Synthetic oligonucleotide; GAG chr11 5197856 5197875 5197872 +
gccacattccagtcggccag

SEQ ID NO: 5714 - DNA, 20 bp, Artificial Sequence
  Synthetic oligonucleotide; AGG chr11 5197857 5197876 5197873 +
ccacattccagtcggccagg

SEQ ID NO: 5715 - DNA, 20 bp, Artificial Sequence
  Synthetic oligonucleotide; GGG chr11 5197858 5197877 5197874 +
cacattccagtcggccagga

SEQ ID NO: 5716 - DNA, 20 bp, Artificial Sequence
  Synthetic oligonucleotide; CAG chr11 5197867 5197886 5197883 +
gtcggccaggagggaccatg

SEQ ID NO: 5717 - DNA, 20 bp, Artificial Sequence
  Synthetic oligonucleotide; TAG chr11 5197884 5197903 5197900 +
atgcagacatttattatcat

SEQ ID NO: 5718 - DNA, 20 bp, Artificial Sequence
  Synthetic oligonucleotide; AGG chr11 5197885 5197904 5197901 +
tgcagacatttattatcatt

SEQ ID NO: 5719 - DNA, 20 bp, Artificial Sequence
  Synthetic oligonucleotide; GGG chr11 5197886 5197905 5197902 +
gcagacatttattatcatta

SEQ ID NO: 5720 - DNA, 20 bp, Artificial Sequence
  Synthetic oligonucleotide; TGG chr11 5197893 5197912 5197909 +
tttattatcattagggaacc

SEQ ID NO: 5721 - DNA, 20 bp, Artificial Sequence
  Synthetic oligonucleotide; GAG chr11 5197895 5197914 5197911 +
tattatcattagggaacctg

SEQ ID NO: 5722 - DNA, 20 bp, Artificial Sequence
  Synthetic oligonucleotide; CAG chr11 5197898 5197917 5197914 +
tatcattagggaacctggag

SEQ ID NO: 5723 - DNA, 20 bp, Artificial Sequence
  Synthetic oligonucleotide; GAG chr11 5197961 5197980 5197977 +
ctcttttttttttttttttt

SEQ ID NO: 5724 - DNA, 20 bp, Artificial Sequence
  Synthetic oligonucleotide; CAG chr11 5197965 5197984 5197981 +
ttttttttttttttttgaga

SEQ ID NO: 5725 - DNA, 20 bp, Artificial Sequence
  Synthetic oligonucleotide; GAG chr11 5197967 5197986 5197983 +
ttttttttttttttgagaca

SEQ ID NO: 5726 - DNA, 20 bp, Artificial Sequence
  Synthetic oligonucleotide; CAG chr11 5197985 5198004 5198001 +
cagagtctctctctgtcgcc

SEQ ID NO: 5727 - DNA, 20 bp, Artificial Sequence
  Synthetic oligonucleotide; AGG chr11 5197986 5198005 5198002 +
agagtctctctctgtcgccc

SEQ ID NO: 5728 - DNA, 20 bp, Artificial Sequence
  Synthetic oligonucleotide; TGG chr11 5197990 5198009 5198006 +
tctctctctgtcgcccaggc

SEQ ID NO: 5729 - DNA, 20 bp, Artificial Sequence
  Synthetic oligonucleotide; GAG chr11 5197992 5198011 5198008 +
tctctctgtcgcccaggctg

SEQ ID NO: 5730 - DNA, 20 bp, Artificial Sequence
  Synthetic oligonucleotide; CAG chr11 5197997 5198016 5198013 +
ctgtcgcccaggctggagtg

SEQ ID NO: 5731 - DNA, 20 bp, Artificial Sequence
  Synthetic oligonucleotide; TGG chr11 5198000 5198019 5198016 +
tcgcccaggctggagtgcag

SEQ ID NO: 5732 - DNA, 20 bp, Artificial Sequence
  Synthetic oligonucleotide; AAG chr11 5198022 5198041 5198038 +
gcgtgatctcgactcactgc

SEQ ID NO: 5733 - DNA, 20 bp, Artificial Sequence
  Synthetic oligonucleotide; CGG chr11 5198035 5198054 5198051 +
tcactgcaagctccacctcc

SEQ ID NO: 5734 - DNA, 20 bp, Artificial Sequence
  Synthetic oligonucleotide; GGG chr11 5198036 5198055 5198052 +
cactgcaagctccacctccc

SEQ ID NO: 5735 - DNA, 20 bp, Artificial Sequence
  Synthetic oligonucleotide; CAG chr11 5198059 5198078 5198075 +
ttcacgccattctcctgtct

SEQ ID NO: 5736 - DNA, 20 bp, Artificial Sequence
  Synthetic oligonucleotide; GAG chr11 5198068 5198087 5198084 +
ttctcctgtctcagcctccc

SEQ ID NO: 5737 - DNA, 20 bp, Artificial Sequence
  Synthetic oligonucleotide; TGG chr11 5198075 5198094 5198091 +
gtctcagcctcccgagtacc

SEQ ID NO: 5738 - DNA, 20 bp, Artificial Sequence
  Synthetic oligonucleotide; GGG chr11 5198076 5198095 5198092 +
tctcagcctcccgagtacct

SEQ ID NO: 5739 - DNA, 20 bp, Artificial Sequence
  Synthetic oligonucleotide; CAG chr11 5198083 5198102 5198099 +
ctcccgagtacctgggacta

SEQ ID NO: 5740 - DNA, 20 bp, Artificial Sequence
  Synthetic oligonucleotide; AGG chr11 5198084 5198103 5198100 +
tcccgagtacctgggactac

SEQ ID NO: 5741 - DNA, 20 bp, Artificial Sequence
  Synthetic oligonucleotide; TGG chr11 5198103 5198122 5198119 +
caggtgcccgccaccacgcc

SEQ ID NO: 5742 - DNA, 20 bp, Artificial Sequence
  Synthetic oligonucleotide; TAG chr11 5198125 5198144 5198141 +
gatactttcttgtgtttttt

SEQ ID NO: 5743 - DNA, 20 bp, Artificial Sequence
  Synthetic oligonucleotide; TAG chr11 5198128 5198147 5198144 +
actttcttgtgtttttttag

SEQ ID NO: 5744 - DNA, 20 bp, Artificial Sequence
  Synthetic oligonucleotide; GAG chr11 5198130 5198149 5198146 +
tttcttgtgtttttttagta

SEQ ID NO: 5745 - DNA, 20 bp, Artificial Sequence
  Synthetic oligonucleotide; CGG chr11 5198134 5198153 5198150 +
ttgtgtttttttagtagaga

SEQ ID NO: 5746 - DNA, 20 bp, Artificial Sequence
  Synthetic oligonucleotide; GGG chr11 5198135 5198154 5198151 +
tgtgtttttttagtagagac

SEQ ID NO: 5747 - DNA, 20 bp, Artificial Sequence
  Synthetic oligonucleotide; GGG chr11 5198136 5198155 5198152 +
gtgtttttttagtagagacg

SEQ ID NO: 5748 - DNA, 20 bp, Artificial Sequence
  Synthetic oligonucleotide; TGG chr11 5198151 5198170 5198167 +
agacggggtttcaccattgc

SEQ ID NO: 5749 - DNA, 20 bp, Artificial Sequence
  Synthetic oligonucleotide; CAG chr11 5198155 5198174 5198171 +
ggggtttcaccattgctggc

SEQ ID NO: 5750 - DNA, 20 bp, Artificial Sequence
  Synthetic oligonucleotide; AGG chr11 5198156 5198175 5198172 +
gggtttcaccattgctggcc

SEQ ID NO: 5751 - DNA, 20 bp, Artificial Sequence
  Synthetic oligonucleotide; TGG chr11 5198160 5198179 5198176 +
ttcaccattgctggccagga

SEQ ID NO: 5752 - DNA, 20 bp, Artificial Sequence
  Synthetic oligonucleotide; CGG chr11 5198196 5198215 5198212 +
acctcatgatccgcccgcct

SEQ ID NO: 5753 - DNA, 20 bp, Artificial Sequence
  Synthetic oligonucleotide; CAG chr11 5198199 5198218 5198215 +
tcatgatccgcccgcctcgg

SEQ ID NO: 5754 - DNA, 20 bp, Artificial Sequence
  Synthetic oligonucleotide; TAG chr11 5198216 5198235 5198232 +
cggcagctactatgattata

SEQ ID NO: 5755 - DNA, 20 bp, Artificial Sequence
  Synthetic oligonucleotide; TAG chr11 5198250 5198269 5198266 +
tatattgacattttcccctc

SEQ ID NO: 5756 - DNA, 20 bp, Artificial Sequence
  Synthetic oligonucleotide; CAG chr11 5198264 5198283 5198280 +
cccctctagaacctacctca

SEQ ID NO: 5757 - DNA, 20 bp, Artificial Sequence
  Synthetic oligonucleotide; TAG chr11 5198280 5198299 5198296 +
ctcacagttttcacttctga

SEQ ID NO: 5758 - DNA, 20 bp, Artificial Sequence
  Synthetic oligonucleotide; CAG chr11 5198289 5198308 5198305 +
ttcacttctgatagctatac

SEQ ID NO: 5759 - DNA, 20 bp, Artificial Sequence
  Synthetic oligonucleotide; AAG chr11 5198292 5198311 5198308 +
acttctgatagctataccag

SEQ ID NO: 5760 - DNA, 20 bp, Artificial Sequence
  Synthetic oligonucleotide; TAG chr11 5198301 5198320 5198317 +
agctataccagaagatgcac

SEQ ID NO: 5761 - DNA, 20 bp, Artificial Sequence
  Synthetic oligonucleotide; CAG chr11 5198318 5198337 5198334 +
cactagatcctctttgacat

SEQ ID NO: 5762 - DNA, 20 bp, Artificial Sequence
  Synthetic oligonucleotide; AGG chr11 5198319 5198338 5198335 +
actagatcctctttgacatc

SEQ ID NO: 5763 - DNA, 20 bp, Artificial Sequence
  Synthetic oligonucleotide; CAG chr11 5198365 5198384 5198381 +
attaaccttatactgtaacc

SEQ ID NO: 5764 - DNA, 20 bp, Artificial Sequence
  Synthetic oligonucleotide; AAG chr11 5198368 5198387 5198384 +
aaccttatactgtaacccag

SEQ ID NO: 5765 - DNA, 20 bp, Artificial Sequence
  Synthetic oligonucleotide; TAG chr11 5198387 5198406 5198403 +
gaagacctaatttattgttc

SEQ ID NO: 5766 - DNA, 20 bp, Artificial Sequence
  Synthetic oligonucleotide; AGG chr11 5198388 5198407 5198404 +
aagacctaatttattgttct

SEQ ID NO: 5767 - DNA, 20 bp, Artificial Sequence
  Synthetic oligonucleotide; CAG chr11 5198417 5198436 5198433 +
tttacacttatctttctaac

SEQ ID NO: 5768 - DNA, 20 bp, Artificial Sequence
  Synthetic oligonucleotide; CAG chr11 5198435 5198454 5198451 +
accagatactttactctgtc

SEQ ID NO: 5769 - DNA, 20 bp, Artificial Sequence
  Synthetic oligonucleotide; GAG chr11 5198456 5198475 5198472 +
agaaacaatttcctcacttt

SEQ ID NO: 5770 - DNA, 20 bp, Artificial Sequence
  Synthetic oligonucleotide; AGG chr11 5198457 5198476 5198473 +
gaaacaatttcctcactttg

SEQ ID NO: 5771 - DNA, 20 bp, Artificial Sequence
  Synthetic oligonucleotide; AAG chr11 5198463 5198482 5198479 +
atttcctcactttgaggctt

SEQ ID NO: 5772 - DNA, 20 bp, Artificial Sequence
  Synthetic oligonucleotide; TAG chr11 5198470 5198489 5198486 +
cactttgaggcttaagctat

SEQ ID NO: 5773 - DNA, 20 bp, Artificial Sequence
  Synthetic oligonucleotide; AAG chr11 5198479 5198498 5198495 +
gcttaagctattagaaacca

SEQ ID NO: 5774 - DNA, 20 bp, Artificial Sequence
  Synthetic oligonucleotide; GAG chr11 5198503 5198522 5198519 +
ctgtatttttgtttccctct

SEQ ID NO: 5775 - DNA, 20 bp, Artificial Sequence
  Synthetic oligonucleotide; AAG chr11 5198512 5198531 5198528 +
tgtttccctctgagtcaaat

SEQ ID NO: 5776 - DNA, 20 bp, Artificial Sequence
  Synthetic oligonucleotide; TAG chr11 5198515 5198534 5198531 +
ttccctctgagtcaaataag

SEQ ID NO: 5777 - DNA, 20 bp, Artificial Sequence
  Synthetic oligonucleotide; CAG chr11 5198519 5198538 5198535 +
ctctgagtcaaataagtaga

SEQ ID NO: 5778 - DNA, 20 bp, Artificial Sequence
  Synthetic oligonucleotide; GAG chr11 5198521 5198540 5198537 +
ctgagtcaaataagtagaca

SEQ ID NO: 5779 - DNA, 20 bp, Artificial Sequence
  Synthetic oligonucleotide; AGG chr11 5198522 5198541 5198538 +
tgagtcaaataagtagacag

SEQ ID NO: 5780 - DNA, 20 bp, Artificial Sequence
  Synthetic oligonucleotide; AAG chr11 5198540 5198559 5198556 +
agaggctatgttattgaatg

SEQ ID NO: 5781 - DNA, 20 bp, Artificial Sequence
  Synthetic oligonucleotide; AAG chr11 5198547 5198566 5198563 +
atgttattgaatgaagtcca

SEQ ID NO: 5782 - DNA, 20 bp, Artificial Sequence
  Synthetic oligonucleotide; AAG chr11 5198553 5198572 5198569 +
ttgaatgaagtccaaagtga

SEQ ID NO: 5783 - DNA, 20 bp, Artificial Sequence
  Synthetic oligonucleotide; AGG chr11 5198554 5198573 5198570 +
tgaatgaagtccaaagtgaa

SEQ ID NO: 5784 - DNA, 20 bp, Artificial Sequence
  Synthetic oligonucleotide; AAG chr11 5198558 5198577 5198574 +
tgaagtccaaagtgaaagga

SEQ ID NO: 5785 - DNA, 20 bp, Artificial Sequence
  Synthetic oligonucleotide; AGG chr11 5198559 5198578 5198575 +
gaagtccaaagtgaaaggaa

SEQ ID NO: 5786 - DNA, 20 bp, Artificial Sequence
  Synthetic oligonucleotide; AAG chr11 5198562 5198581 5198578 +
gtccaaagtgaaaggaaagg

SEQ ID NO: 5787 - DNA, 20 bp, Artificial Sequence
  Synthetic oligonucleotide; AGG chr11 5198563 5198582 5198579 +
tccaaagtgaaaggaaagga

SEQ ID NO: 5788 - DNA, 20 bp, Artificial Sequence
  Synthetic oligonucleotide; CAG chr11 5198574 5198593 5198590 +
aggaaaggaaggcataatta

SEQ ID NO: 5789 - DNA, 20 bp, Artificial Sequence
  Synthetic oligonucleotide; AGG chr11 5198575 5198594 5198591 +
ggaaaggaaggcataattac

SEQ ID NO: 5790 - DNA, 20 bp, Artificial Sequence
  Synthetic oligonucleotide; AAG chr11 5198578 5198597 5198594 +
aaggaaggcataattacagg

SEQ ID NO: 5791 - DNA, 20 bp, Artificial Sequence
  Synthetic oligonucleotide; TGG chr11 5198588 5198607 5198604 +
taattacaggaagacaaatc

SEQ ID NO: 5792 - DNA, 20 bp, Artificial Sequence
  Synthetic oligonucleotide; TAG chr11 5198597 5198616 5198613 +
gaagacaaatctggttgttt

SEQ ID NO: 5793 - DNA, 20 bp, Artificial Sequence
  Synthetic oligonucleotide; TGG chr11 5198635 5198654 5198651 +
aaaaataaatatttgctttt

SEQ ID NO: 5794 - DNA, 20 bp, Artificial Sequence
  Synthetic oligonucleotide; TAG chr11 5198689 5198708 5198705 +
aattttaacacttaccttct

SEQ ID NO: 5795 - DNA, 20 bp, Artificial Sequence
  Synthetic oligonucleotide; TAG chr11 5198700 5198719 5198716 +
ttaccttcttagatacctaa

SEQ ID NO: 5796 - DNA, 20 bp, Artificial Sequence
  Synthetic oligonucleotide; TAG chr11 5198707 5198726 5198723 +
cttagatacctaatagaata

SEQ ID NO: 5797 - DNA, 20 bp, Artificial Sequence
  Synthetic oligonucleotide; AGG chr11 5198708 5198727 5198724 +
ttagatacctaatagaatat

SEQ ID NO: 5798 - DNA, 20 bp, Artificial Sequence
  Synthetic oligonucleotide; AAG chr11 5198711 5198730 5198727 +
gatacctaatagaatatagg

SEQ ID NO: 5799 - DNA, 20 bp, Artificial Sequence
  Synthetic oligonucleotide; TAG chr11 5198746 5198765 5198762 +
attttcttgttatccatgca

SEQ ID NO: 5800 - DNA, 20 bp, Artificial Sequence
  Synthetic oligonucleotide; TGG chr11 5198784 5198803 5198800 +
ccttcctttctttccttctt

SEQ ID NO: 5801 - DNA, 20 bp, Artificial Sequence
  Synthetic oligonucleotide; AAG chr11 5198788 5198807 5198804 +
cctttctttccttctttgga

SEQ ID NO: 5802 - DNA, 20 bp, Artificial Sequence
  Synthetic oligonucleotide; TAG chr11 5198797 5198816 5198813 +
ccttctttggaaagctgcac

SEQ ID NO: 5803 - DNA, 20 bp, Artificial Sequence
  Synthetic oligonucleotide; TAG chr11 5198806 5198825 5198822 +
gaaagctgcactagcttact

SEQ ID NO: 5804 - DNA, 20 bp, Artificial Sequence
  Synthetic oligonucleotide; AAG chr11 5198811 5198830 5198827 +
ctgcactagcttacttagaa

SEQ ID NO: 5805 - DNA, 20 bp, Artificial Sequence
  Synthetic oligonucleotide; CAG chr11 5198852 5198871 5198868 +
tatcttttttcttttaaact

SEQ ID NO: 5806 - DNA, 20 bp, Artificial Sequence
  Synthetic oligonucleotide; AAG chr11 5198858 5198877 5198874 +
ttttcttttaaactcagaat

SEQ ID NO: 5807 - DNA, 20 bp, Artificial Sequence
  Synthetic oligonucleotide; CGG chr11 5198862 5198881 5198878 +
cttttaaactcagaataagt

SEQ ID NO: 5808 - DNA, 20 bp, Artificial Sequence
  Synthetic oligonucleotide; TAG chr11 5198865 5198884 5198881 +
ttaaactcagaataagtcgg

SEQ ID NO: 5809 - DNA, 20 bp, Artificial Sequence
  Synthetic oligonucleotide; CGG chr11 5198868 5198887 5198884 +
aactcagaataagtcggtag

SEQ ID NO: 5810 - DNA, 20 bp, Artificial Sequence
  Synthetic oligonucleotide; CAG chr11 5198872 5198891 5198888 +
cagaataagtcggtagcgga

SEQ ID NO: 5811 - DNA, 20 bp, Artificial Sequence
  Synthetic oligonucleotide; CAG chr11 5198886 5198905 5198902 +
agcggacagtctcatctgtt

SEQ ID NO: 5812 - DNA, 20 bp, Artificial Sequence
  Synthetic oligonucleotide; AAG chr11 5198889 5198908 5198905 +
ggacagtctcatctgttcag

SEQ ID NO: 5813 - DNA, 20 bp, Artificial Sequence
  Synthetic oligonucleotide; TAG chr11 5198902 5198921 5198918 +
tgttcagaagatcccccact

SEQ ID NO: 5814 - DNA, 20 bp, Artificial Sequence
  Synthetic oligonucleotide; AAG chr11 5198911 5198930 5198927 +
gatcccccacttagatataa

SEQ ID NO: 5815 - DNA, 20 bp, Artificial Sequence
  Synthetic oligonucleotide; AAG chr11 5198917 5198936 5198933 +
ccacttagatataaaagcaa

SEQ ID NO: 5816 - DNA, 20 bp, Artificial Sequence
  Synthetic oligonucleotide; TAG chr11 5198923 5198942 5198939 +
agatataaaagcaaaagatc

SEQ ID NO: 5817 - DNA, 20 bp, Artificial Sequence
  Synthetic oligonucleotide; GAG chr11 5198925 5198944 5198941 +
atataaaagcaaaagatcta

SEQ ID NO: 5818 - DNA, 20 bp, Artificial Sequence
  Synthetic oligonucleotide; CAG chr11 5198941 5198960 5198957 +
tctagagcaaaatctgcttc

SEQ ID NO: 5819 - DNA, 20 bp, Artificial Sequence
  Synthetic oligonucleotide; TAG chr11 5198949 5198968 5198965 +
aaaatctgcttccagccttg

SEQ ID NO: 5820 - DNA, 20 bp, Artificial Sequence
  Synthetic oligonucleotide; CAG chr11 5198952 5198971 5198968 +
atctgcttccagccttgtag

SEQ ID NO: 5821 - DNA, 20 bp, Artificial Sequence
  Synthetic oligonucleotide; TGG chr11 5198955 5198974 5198971 +
tgcttccagccttgtagcag

SEQ ID NO: 5822 - DNA, 20 bp, Artificial Sequence
  Synthetic oligonucleotide; GAG chr11 5198957 5198976 5198973 +
cttccagccttgtagcagtg

SEQ ID NO: 5823 - DNA, 20 bp, Artificial Sequence
  Synthetic oligonucleotide; AAG chr11 5198983 5199002 5198999 +
acatataaaatctaaaaaat

SEQ ID NO: 5824 - DNA, 20 bp, Artificial Sequence
  Synthetic oligonucleotide; AGG chr11 5198984 5199003 5199000 +
catataaaatctaaaaaata

SEQ ID NO: 5825 - DNA, 20 bp, Artificial Sequence
  Synthetic oligonucleotide; TAG chr11 5199001 5199020 5199017 +
ataaggattctaatttaaat

SEQ ID NO: 5826 - DNA, 20 bp, Artificial Sequence
  Synthetic oligonucleotide; TGG chr11 5199007 5199026 5199023 +
attctaatttaaattagaca

SEQ ID NO: 5827 - DNA, 20 bp, Artificial Sequence
  Synthetic oligonucleotide; TAG chr11 5199010 5199029 5199026 +
ctaatttaaattagacatgg

SEQ ID NO: 5828 - DNA, 20 bp, Artificial Sequence
  Synthetic oligonucleotide; AAG chr11 5199013 5199032 5199029 +
atttaaattagacatggtag

SEQ ID NO: 5829 - DNA, 20 bp, Artificial Sequence
  Synthetic oligonucleotide; AAG chr11 5199025 5199044 5199041 +
catggtagaagttgaatcca

SEQ ID NO: 5830 - DNA, 20 bp, Artificial Sequence
  Synthetic oligonucleotide; TAG chr11 5199059 5199078 5199075 +
tgtgtcctctttatgaactg

SEQ ID NO: 5831 - DNA, 20 bp, Artificial Sequence
  Synthetic oligonucleotide; TAG chr11 5199077 5199096 5199093 +
tgtagcttccctgtccaata

SEQ ID NO: 5832 - DNA, 20 bp, Artificial Sequence
  Synthetic oligonucleotide; TGG chr11 5199080 5199099 5199096 +
agcttccctgtccaatatag

SEQ ID NO: 5833 - DNA, 20 bp, Artificial Sequence
  Synthetic oligonucleotide; AAG chr11 5199107 5199126 5199123 +
tgaactgaactgtccaatac

SEQ ID NO: 5834 - DNA, 20 bp, Artificial Sequence
  Synthetic oligonucleotide; AGG chr11 5199108 5199127 5199124 +
gaactgaactgtccaataca

SEQ ID NO: 5835 - DNA, 20 bp, Artificial Sequence
  Synthetic oligonucleotide; AAG chr11 5199141 5199160 5199157 +
tttaaatataaattaactta

SEQ ID NO: 5836 - DNA, 20 bp, Artificial Sequence
  Synthetic oligonucleotide; CAG chr11 5199162 5199181 5199178 +
agtaactgaaattgtaaatg

SEQ ID NO: 5837 - DNA, 20 bp, Artificial Sequence
  Synthetic oligonucleotide; AAG chr11 5199191 5199210 5199207 +
aattacactaccatcatttc

SEQ ID NO: 5838 - DNA, 20 bp, Artificial Sequence
  Synthetic oligonucleotide; CAG chr11 5199198 5199217 5199214 +
ctaccatcatttcaagcgca

SEQ ID NO: 5839 - DNA, 20 bp, Artificial Sequence
  Synthetic oligonucleotide; AGG chr11 5199199 5199218 5199215 +
taccatcatttcaagcgcac

SEQ ID NO: 5840 - DNA, 20 bp, Artificial Sequence
  Synthetic oligonucleotide; GAG chr11 5199201 5199220 5199217 +
ccatcatttcaagcgcacag

SEQ ID NO: 5841 - DNA, 20 bp, Artificial Sequence
  Synthetic oligonucleotide; TAG chr11 5199219 5199238 5199235 +
aggagccatatattccactt

SEQ ID NO: 5842 - DNA, 20 bp, Artificial Sequence
  Synthetic oligonucleotide; TGG chr11 5199230 5199249 5199246 +
attccactttagccatttta

SEQ ID NO: 5843 - DNA, 20 bp, Artificial Sequence
  Synthetic oligonucleotide; TAG chr11 5199240 5199259 5199256 +
agccattttatggtatttta

SEQ ID NO: 5844 - DNA, 20 bp, Artificial Sequence
  Synthetic oligonucleotide; CAG chr11 5199254 5199273 5199270 +
attttatagaacatcgccat

SEQ ID NO: 5845 - DNA, 20 bp, Artificial Sequence
  Synthetic oligonucleotide; TAG chr11 5199259 5199278 5199275 +
atagaacatcgccatcagtt

SEQ ID NO: 5846 - DNA, 20 bp, Artificial Sequence
  Synthetic oligonucleotide; AAG chr11 5199264 5199283 5199280 +
acatcgccatcagtttagaa

SEQ ID NO: 5847 - DNA, 20 bp, Artificial Sequence
  Synthetic oligonucleotide; TGG chr11 5199273 5199292 5199289 +
tcagtttagaaaagttccct

SEQ ID NO: 5848 - DNA, 20 bp, Artificial Sequence
  Synthetic oligonucleotide; TGG chr11 5199283 5199302 5199299 +
aaagttcccttggacaattc

SEQ ID NO: 5849 - DNA, 20 bp, Artificial Sequence
  Synthetic oligonucleotide; CAG chr11 5199292 5199311 5199308 +
ttggacaattctggtccata

SEQ ID NO: 5850 - DNA, 20 bp, Artificial Sequence
  Synthetic oligonucleotide; GAG chr11 5199313 5199332 5199329 +
agatatcacaacattcctgt

SEQ ID NO: 5851 - DNA, 20 bp, Artificial Sequence
  Synthetic oligonucleotide; TGG chr11 5199317 5199336 5199333 +
atcacaacattcctgtgagt

SEQ ID NO: 5852 - DNA, 20 bp, Artificial Sequence
  Synthetic oligonucleotide; TAG chr11 5199323 5199342 5199339 +
acattcctgtgagttggcta

SEQ ID NO: 5853 - DNA, 20 bp, Artificial Sequence
  Synthetic oligonucleotide; AAG chr11 5199337 5199356 5199353 +
tggctatagtctccattttg

SEQ ID NO: 5854 - DNA, 20 bp, Artificial Sequence
  Synthetic oligonucleotide; AGG chr11 5199338 5199357 5199354 +
ggctatagtctccattttga

SEQ ID NO: 5855 - DNA, 20 bp, Artificial Sequence
  Synthetic oligonucleotide; AAG chr11 5199347 5199366 5199363 +
ctccattttgaaggttaatt

SEQ ID NO: 5856 - DNA, 20 bp, Artificial Sequence
  Synthetic oligonucleotide; CAG chr11 5199357 5199376 5199373 +
aaggttaattaagtaaacct

SEQ ID NO: 5857 - DNA, 20 bp, Artificial Sequence
  Synthetic oligonucleotide; GAG chr11 5199359 5199378 5199375 +
ggttaattaagtaaacctca

SEQ ID NO: 5858 - DNA, 20 bp, Artificial Sequence
  Synthetic oligonucleotide; AAG chr11 5199367 5199386 5199383 +
aagtaaacctcagagaatga

SEQ ID NO: 5859 - DNA, 20 bp, Artificial Sequence
  Synthetic oligonucleotide; AAG chr11 5199377 5199396 5199393 +
cagagaatgaaagaaacttc

SEQ ID NO: 5860 - DNA, 20 bp, Artificial Sequence
  Synthetic oligonucleotide; TAG chr11 5199405 5199424 5199421 +
tactttgaaacttgaaaacc

SEQ ID NO: 5861 - DNA, 20 bp, Artificial Sequence
  Synthetic oligonucleotide; AGG chr11 5199406 5199425 5199422 +
actttgaaacttgaaaacct

SEQ ID NO: 5862 - DNA, 20 bp, Artificial Sequence
  Synthetic oligonucleotide; CAG chr11 5199418 5199437 5199434 +
gaaaacctaggtttttaatc

SEQ ID NO: 5863 - DNA, 20 bp, Artificial Sequence
  Synthetic oligonucleotide; CAG chr11 5199431 5199450 5199447 +
tttaatccagctttgtttta

SEQ ID NO: 5864 - DNA, 20 bp, Artificial Sequence
  Synthetic oligonucleotide; AAG chr11 5199436 5199455 5199452 +
tccagctttgttttacagca

SEQ ID NO: 5865 - DNA, 20 bp, Artificial Sequence
  Synthetic oligonucleotide; AGG chr11 5199437 5199456 5199453 +
ccagctttgttttacagcaa

SEQ ID NO: 5866 - DNA, 20 bp, Artificial Sequence
  Synthetic oligonucleotide; AAG chr11 5199450 5199469 5199466 +
acagcaaaggaaatgctcaa

SEQ ID NO: 5867 - DNA, 20 bp, Artificial Sequence
  Synthetic oligonucleotide; CAG chr11 5199460 5199479 5199476 +
aaatgctcaaaagtacattt

SEQ ID NO: 5868 - DNA, 20 bp, Artificial Sequence
  Synthetic oligonucleotide; AGG chr11 5199461 5199480 5199477 +
aatgctcaaaagtacatttc

SEQ ID NO: 5869 - DNA, 20 bp, Artificial Sequence
  Synthetic oligonucleotide; TGG chr11 5199496 5199515 5199512 +
tttttcctctttcttaaata

SEQ ID NO: 5870 - DNA, 20 bp, Artificial Sequence
  Synthetic oligonucleotide; CAG chr11 5199500 5199519 5199516 +
tcctctttcttaaatatggt

SEQ ID NO: 5871 - DNA, 20 bp, Artificial Sequence
  Synthetic oligonucleotide; TAG chr11 5199508 5199527 5199524 +
cttaaatatggtcagactga

SEQ ID NO: 5872 - DNA, 20 bp, Artificial Sequence
  Synthetic oligonucleotide; GAG chr11 5199510 5199529 5199526 +
taaatatggtcagactgata

SEQ ID NO: 5873 - DNA, 20 bp, Artificial Sequence
  Synthetic oligonucleotide; CAG chr11 5199528 5199547 5199544 +
tagagtgacctacatgtgtc

SEQ ID NO: 5874 - DNA, 20 bp, Artificial Sequence
  Synthetic oligonucleotide; AGG chr11 5199529 5199548 5199545 +
agagtgacctacatgtgtcc

SEQ ID NO: 5875 - DNA, 20 bp, Artificial Sequence
  Synthetic oligonucleotide; TGG chr11 5199541 5199560 5199557 +
atgtgtccaggctgacacaa

SEQ ID NO: 5876 - DNA, 20 bp, Artificial Sequence
  Synthetic oligonucleotide; AAG chr11 5199585 5199604 5199601 +
actatatttaaatatttttt

SEQ ID NO: 5877 - DNA, 20 bp, Artificial Sequence
  Synthetic oligonucleotide; AGG chr11 5199586 5199605 5199602 +
ctatatttaaatatttttta

SEQ ID NO: 5878 - DNA, 20 bp, Artificial Sequence
  Synthetic oligonucleotide; TGG chr11 5199599 5199618 5199615 +
ttttttaaggtcatttgtca

SEQ ID NO: 5879 - DNA, 20 bp, Artificial Sequence
  Synthetic oligonucleotide; CAG chr11 5199605 5199624 5199621 +
aaggtcatttgtcatggact

SEQ ID NO: 5880 - DNA, 20 bp, Artificial Sequence
  Synthetic oligonucleotide; GAG chr11 5199607 5199626 5199623 +
ggtcatttgtcatggactca

SEQ ID NO: 5881 - DNA, 20 bp, Artificial Sequence
  Synthetic oligonucleotide; TGG chr11 5199644 5199663 5199660 +
taataattttttctttttta

SEQ ID NO: 5882 - DNA, 20 bp, Artificial Sequence
  Synthetic oligonucleotide; TAG chr11 5199692 5199711 5199708 +
ctgcttttctttcttttttt

SEQ ID NO: 5883 - DNA, 20 bp, Artificial Sequence
  Synthetic oligonucleotide; AGG chr11 5199693 5199712 5199709 +
tgcttttctttctttttttt

SEQ ID NO: 5884 - DNA, 20 bp, Artificial Sequence
  Synthetic oligonucleotide; CAG chr11 5199727 5199746 5199743 +
aatatctctcaatatctttt

SEQ ID NO: 5885 - DNA, 20 bp, Artificial Sequence
  Synthetic oligonucleotide; GAG chr11 5199729 5199748 5199745 +
tatctctcaatatcttttca

SEQ ID NO: 5886 - DNA, 20 bp, Artificial Sequence
  Synthetic oligonucleotide; AAG chr11 5199734 5199753 5199750 +
ctcaatatcttttcagagaa

SEQ ID NO: 5887 - DNA, 20 bp, Artificial Sequence
  Synthetic oligonucleotide; GAG chr11 5199736 5199755 5199752 +
caatatcttttcagagaaaa

SEQ ID NO: 5888 - DNA, 20 bp, Artificial Sequence
  Synthetic oligonucleotide; AAG chr11 5199742 5199761 5199758 +
cttttcagagaaaagagtct

SEQ ID NO: 5889 - DNA, 20 bp, Artificial Sequence
  Synthetic oligonucleotide; TGG chr11 5199750 5199769 5199766 +
agaaaagagtctaagcattc

SEQ ID NO: 5890 - DNA, 20 bp, Artificial Sequence
  Synthetic oligonucleotide; TGG chr11 5199764 5199783 5199780 +
gcattctggtatgaatctgt

SEQ ID NO: 5891 - DNA, 20 bp, Artificial Sequence
  Synthetic oligonucleotide; GGG chr11 5199765 5199784 5199781 +
cattctggtatgaatctgtt

SEQ ID NO: 5892 - DNA, 20 bp, Artificial Sequence
  Synthetic oligonucleotide; TAG chr11 5199779 5199798 5199795 +
tctgttgggtcttgacactg

SEQ ID NO: 5893 - DNA, 20 bp, Artificial Sequence
  Synthetic oligonucleotide; TGG chr11 5199786 5199805 5199802 +
ggtcttgacactgtagatga

SEQ ID NO: 5894 - DNA, 20 bp, Artificial Sequence
  Synthetic oligonucleotide; GGG chr11 5199787 5199806 5199803 +
gtcttgacactgtagatgat

SEQ ID NO: 5895 - DNA, 20 bp, Artificial Sequence
  Synthetic oligonucleotide; AAG chr11 5199798 5199817 5199814 +
gtagatgatgggattcatta

SEQ ID NO: 5896 - DNA, 20 bp, Artificial Sequence
  Synthetic oligonucleotide; AGG chr11 5199799 5199818 5199815 +
tagatgatgggattcattaa

SEQ ID NO: 5897 - DNA, 20 bp, Artificial Sequence
  Synthetic oligonucleotide; TGG chr11 5199802 5199821 5199818 +
atgatgggattcattaaagg

SEQ ID NO: 5898 - DNA, 20 bp, Artificial Sequence
  Synthetic oligonucleotide; GGG chr11 5199803 5199822 5199819 +
tgatgggattcattaaaggt

SEQ ID NO: 5899 - DNA, 20 bp, Artificial Sequence
  Synthetic oligonucleotide; AAG chr11 5199808 5199827 5199824 +
ggattcattaaaggtgggaa

SEQ ID NO: 5900 - DNA, 20 bp, Artificial Sequence
  Synthetic oligonucleotide; AGG chr11 5199809 5199828 5199825 +
gattcattaaaggtgggaaa

SEQ ID NO: 5901 - DNA, 20 bp, Artificial Sequence
  Synthetic oligonucleotide; TAG chr11 5199815 5199834 5199831 +
ttaaaggtgggaaaaggatg

SEQ ID NO: 5902 - DNA, 20 bp, Artificial Sequence
  Synthetic oligonucleotide; GAG chr11 5199829 5199848 5199845 +
aggatgtagatgttgccaat

SEQ ID NO: 5903 - DNA, 20 bp, Artificial Sequence
  Synthetic oligonucleotide; TGG chr11 5199836 5199855 5199852 +
agatgttgccaatgagaacg

SEQ ID NO: 5904 - DNA, 20 bp, Artificial Sequence
  Synthetic oligonucleotide; GGG chr11 5199837 5199856 5199853 +
gatgttgccaatgagaacgt

SEQ ID NO: 5905 - DNA, 20 bp, Artificial Sequence
  Synthetic oligonucleotide; CGG chr11 5199843 5199862 5199859 +
gccaatgagaacgtgggcca

SEQ ID NO: 5906 - DNA, 20 bp, Artificial Sequence
  Synthetic oligonucleotide; GGG chr11 5199844 5199863 5199860 +
ccaatgagaacgtgggccac

SEQ ID NO: 5907 - DNA, 20 bp, Artificial Sequence
  Synthetic oligonucleotide; GGG chr11 5199845 5199864 5199861 +
caatgagaacgtgggccacg

SEQ ID NO: 5908 - DNA, 20 bp, Artificial Sequence
  Synthetic oligonucleotide; GGG chr11 5199846 5199865 5199862 +
aatgagaacgtgggccacgg

SEQ ID NO: 5909 - DNA, 20 bp, Artificial Sequence
  Synthetic oligonucleotide; AAG chr11 5199850 5199869 5199866 +
agaacgtgggccacggggga

SEQ ID NO: 5910 - DNA, 20 bp, Artificial Sequence
  Synthetic oligonucleotide; AGG chr11 5199851 5199870 5199867 +
gaacgtgggccacgggggaa

SEQ ID NO: 5911 - DNA, 20 bp, Artificial Sequence
  Synthetic oligonucleotide; CGG chr11 5199866 5199885 5199882 +
gggaaaggtgcttgccaaaa

SEQ ID NO: 5912 - DNA, 20 bp, Artificial Sequence
  Synthetic oligonucleotide; GAG chr11 5199880 5199899 5199896 +
ccaaaacggtgcaccattgt

SEQ ID NO: 5913 - DNA, 20 bp, Artificial Sequence
  Synthetic oligonucleotide; AGG chr11 5199881 5199900 5199897 +
caaaacggtgcaccattgtg

SEQ ID NO: 5914 - DNA, 20 bp, Artificial Sequence
  Synthetic oligonucleotide; TAG chr11 5199891 5199910 5199907 +
caccattgtgaggctaatga

SEQ ID NO: 5915 - DNA, 20 bp, Artificial Sequence
  Synthetic oligonucleotide; AGG chr11 5199892 5199911 5199908 +
accattgtgaggctaatgat

SEQ ID NO: 5916 - DNA, 20 bp, Artificial Sequence
  Synthetic oligonucleotide; GGG chr11 5199893 5199912 5199909 +
ccattgtgaggctaatgata

SEQ ID NO: 5917 - DNA, 20 bp, Artificial Sequence
  Synthetic oligonucleotide; TAG chr11 5199899 5199918 5199915 +
tgaggctaatgatagggatg

SEQ ID NO: 5918 - DNA, 20 bp, Artificial Sequence
  Synthetic oligonucleotide; AAG chr11 5199907 5199926 5199923 +
atgatagggatgtagaacac

SEQ ID NO: 5919 - DNA, 20 bp, Artificial Sequence
  Synthetic oligonucleotide; AGG chr11 5199908 5199927 5199924 +
tgatagggatgtagaacaca

SEQ ID NO: 5920 - DNA, 20 bp, Artificial Sequence
  Synthetic oligonucleotide; CAG chr11 5199912 5199931 5199928 +
agggatgtagaacacaagga

SEQ ID NO: 5921 - DNA, 20 bp, Artificial Sequence
  Synthetic oligonucleotide; CAG chr11 5199917 5199936 5199933 +
tgtagaacacaaggacagca

SEQ ID NO: 5922 - DNA, 20 bp, Artificial Sequence
  Synthetic oligonucleotide; TGG chr11 5199923 5199942 5199939 +
acacaaggacagcacagatg

SEQ ID NO: 5923 - DNA, 20 bp, Artificial Sequence
  Synthetic oligonucleotide; GGG chr11 5199924 5199943 5199940 +
cacaaggacagcacagatgt

SEQ ID NO: 5924 - DNA, 20 bp, Artificial Sequence
  Synthetic oligonucleotide; GAG chr11 5199926 5199945 5199942 +
caaggacagcacagatgtgg

SEQ ID NO: 5925 - DNA, 20 bp, Artificial Sequence
  Synthetic oligonucleotide; CAG chr11 5199932 5199951 5199948 +
cagcacagatgtgggagatg

SEQ ID NO: 5926 - DNA, 20 bp, Artificial Sequence
  Synthetic oligonucleotide; AGG chr11 5199933 5199952 5199949 +
agcacagatgtgggagatgc

SEQ ID NO: 5927 - DNA, 20 bp, Artificial Sequence
  Synthetic oligonucleotide; GAG chr11 5199963 5199982 5199979 +
taatttatgcctctcttcct

SEQ ID NO: 5928 - DNA, 20 bp, Artificial Sequence
  Synthetic oligonucleotide; GAG chr11 5199965 5199984 5199981 +
atttatgcctctcttcctga

SEQ ID NO: 5929 - DNA, 20 bp, Artificial Sequence
  Synthetic oligonucleotide; AGG chr11 5199966 5199985 5199982 +
tttatgcctctcttcctgag

SEQ ID NO: 5930 - DNA, 20 bp, Artificial Sequence
  Synthetic oligonucleotide; CAG chr11 5199976 5199995 5199992 +
tcttcctgagaggcaactgc

SEQ ID NO: 5931 - DNA, 20 bp, Artificial Sequence
  Synthetic oligonucleotide; AGG chr11 5199977 5199996 5199993 +
cttcctgagaggcaactgcc

SEQ ID NO: 5932 - DNA, 20 bp, Artificial Sequence
  Synthetic oligonucleotide; AAG chr11 5199988 5200007 5200004 +
gcaactgccaggactgactt

SEQ ID NO: 5933 - DNA, 20 bp, Artificial Sequence
  Synthetic oligonucleotide; CAG chr11 5199994 5200013 5200010 +
gccaggactgacttaagaat

SEQ ID NO: 5934 - DNA, 20 bp, Artificial Sequence
  Synthetic oligonucleotide; AGG chr11 5199995 5200014 5200011 +
ccaggactgacttaagaatc

SEQ ID NO: 5935 - DNA, 20 bp, Artificial Sequence
  Synthetic oligonucleotide; TAG chr11 5200001 5200020 5200017 +
ctgacttaagaatcaggatg

SEQ ID NO: 5936 - DNA, 20 bp, Artificial Sequence
  Synthetic oligonucleotide; AGG chr11 5200002 5200021 5200018 +
tgacttaagaatcaggatgt

SEQ ID NO: 5937 - DNA, 20 bp, Artificial Sequence
  Synthetic oligonucleotide; GAG chr11 5200004 5200023 5200020 +
acttaagaatcaggatgtag

SEQ ID NO: 5938 - DNA, 20 bp, Artificial Sequence
  Synthetic oligonucleotide; AAG chr11 5200009 5200028 5200025 +
agaatcaggatgtaggagaa

SEQ ID NO: 5939 - DNA, 20 bp, Artificial Sequence
  Synthetic oligonucleotide; AGG chr11 5200010 5200029 5200026 +
gaatcaggatgtaggagaaa

SEQ ID NO: 5940 - DNA, 20 bp, Artificial Sequence
  Synthetic oligonucleotide; GAG chr11 5200015 5200034 5200031 +
aggatgtaggagaaaaggat

SEQ ID NO: 5941 - DNA, 20 bp, Artificial Sequence
  Synthetic oligonucleotide; TAG chr11 5200020 5200039 5200036 +
gtaggagaaaaggatgagta

SEQ ID NO: 5942 - DNA, 20 bp, Artificial Sequence
  Synthetic oligonucleotide; CAG chr11 5200033 5200052 5200049 +
atgagtatagcatccaacaa

SEQ ID NO: 5943 - DNA, 20 bp, Artificial Sequence
  Synthetic oligonucleotide; CAG chr11 5200048 5200067 5200064 +
aacaacagtatgcaaataac

SEQ ID NO: 5944 - DNA, 20 bp, Artificial Sequence
  Synthetic oligonucleotide; CAG chr11 5200054 5200073 5200070 +
agtatgcaaataaccagcat

SEQ ID NO: 5945 - DNA, 20 bp, Artificial Sequence
  Synthetic oligonucleotide; AGG chr11 5200055 5200074 5200071 +
gtatgcaaataaccagcatc

SEQ ID NO: 5946 - DNA, 20 bp, Artificial Sequence
  Synthetic oligonucleotide; GGG chr11 5200056 5200075 5200072 +
tatgcaaataaccagcatca

SEQ ID NO: 5947 - DNA, 20 bp, Artificial Sequence
  Synthetic oligonucleotide; TAG chr11 5200061 5200080 5200077 +
aaataaccagcatcagggca

SEQ ID NO: 5948 - DNA, 20 bp, Artificial Sequence
  Synthetic oligonucleotide; CGG chr11 5200076 5200095 5200092 +
gggcatagtaactattgaat

SEQ ID NO: 5949 - DNA, 20 bp, Artificial Sequence
  Synthetic oligonucleotide; CAG chr11 5200088 5200107 5200104 +
tattgaatcggatgtctgaa

SEQ ID NO: 5950 - DNA, 20 bp, Artificial Sequence
  Synthetic oligonucleotide; AGG chr11 5200089 5200108 5200105 +
attgaatcggatgtctgaac

SEQ ID NO: 5951 - DNA, 20 bp, Artificial Sequence
  Synthetic oligonucleotide; AAG chr11 5200094 5200113 5200110 +
atcggatgtctgaacaggct

SEQ ID NO: 5952 - DNA, 20 bp, Artificial Sequence
  Synthetic oligonucleotide; CGG chr11 5200097 5200116 5200113 +
ggatgtctgaacaggctaag

SEQ ID NO: 5953 - DNA, 20 bp, Artificial Sequence
  Synthetic oligonucleotide; GAG chr11 5200099 5200118 5200115 +
atgtctgaacaggctaagcg

SEQ ID NO: 5954 - DNA, 20 bp, Artificial Sequence
  Synthetic oligonucleotide; AAG chr11 5200102 5200121 5200118 +
tctgaacaggctaagcggag

SEQ ID NO: 5955 - DNA, 20 bp, Artificial Sequence
  Synthetic oligonucleotide; TGG chr11 5200109 5200128 5200125 +
aggctaagcggagaagatcc

SEQ ID NO: 5956 - DNA, 20 bp, Artificial Sequence
  Synthetic oligonucleotide; CAG chr11 5200114 5200133 5200130 +
aagcggagaagatcctggtg

SEQ ID NO: 5957 - DNA, 20 bp, Artificial Sequence
  Synthetic oligonucleotide; AGG chr11 5200115 5200134 5200131 +
agcggagaagatcctggtgc

SEQ ID NO: 5958 - DNA, 20 bp, Artificial Sequence
  Synthetic oligonucleotide; CAG chr11 5200118 5200137 5200134 +
ggagaagatcctggtgcagg

SEQ ID NO: 5959 - DNA, 20 bp, Artificial Sequence
  Synthetic oligonucleotide; AAG chr11 5200122 5200141 5200138 +
aagatcctggtgcaggcaga

SEQ ID NO: 5960 - DNA, 20 bp, Artificial Sequence
  Synthetic oligonucleotide; GAG chr11 5200124 5200143 5200140 +
gatcctggtgcaggcagaaa

SEQ ID NO: 5961 - DNA, 20 bp, Artificial Sequence
  Synthetic oligonucleotide; GAG chr11 5200128 5200147 5200144 +
ctggtgcaggcagaaagagt

SEQ ID NO: 5962 - DNA, 20 bp, Artificial Sequence
  Synthetic oligonucleotide; AAG chr11 5200132 5200151 5200148 +
tgcaggcagaaagagtgaga

SEQ ID NO: 5963 - DNA, 20 bp, Artificial Sequence
  Synthetic oligonucleotide; AGG chr11 5200133 5200152 5200149 +
gcaggcagaaagagtgagaa

SEQ ID NO: 5964 - DNA, 20 bp, Artificial Sequence
  Synthetic oligonucleotide; TGG chr11 5200139 5200158 5200155 +
agaaagagtgagaaaggatg

SEQ ID NO: 5965 - DNA, 20 bp, Artificial Sequence
  Synthetic oligonucleotide; CAG chr11 5200148 5200167 5200164 +
gagaaaggatgtggaaatga

SEQ ID NO: 5966 - DNA, 20 bp, Artificial Sequence
  Synthetic oligonucleotide; CAG chr11 5200165 5200184 5200181 +
tgacagtaattaaaaaattt

SEQ ID NO: 5967 - DNA, 20 bp, Artificial Sequence
  Synthetic oligonucleotide; CAG chr11 5200169 5200188 5200185 +
agtaattaaaaaatttcaga

SEQ ID NO: 5968 - DNA, 20 bp, Artificial Sequence
  Synthetic oligonucleotide; TGG chr11 5200176 5200195 5200192 +
aaaaaatttcagacagatga

SEQ ID NO: 5969 - DNA, 20 bp, Artificial Sequence
  Synthetic oligonucleotide; GGG chr11 5200177 5200196 5200193 +
aaaaatttcagacagatgat

SEQ ID NO: 5970 - DNA, 20 bp, Artificial Sequence
  Synthetic oligonucleotide; GGG chr11 5200178 5200197 5200194 +
aaaatttcagacagatgatg

SEQ ID NO: 5971 - DNA, 20 bp, Artificial Sequence
  Synthetic oligonucleotide; GGG chr11 5200179 5200198 5200195 +
aaatttcagacagatgatgg

SEQ ID NO: 5972 - DNA, 20 bp, Artificial Sequence
  Synthetic oligonucleotide; GGG chr11 5200180 5200199 5200196 +
aatttcagacagatgatggg

SEQ ID NO: 5973 - DNA, 20 bp, Artificial Sequence
  Synthetic oligonucleotide; AAG chr11 5200190 5200209 5200206 +
agatgatggggggtgtaata

SEQ ID NO: 5974 - DNA, 20 bp, Artificial Sequence
  Synthetic oligonucleotide; TAG chr11 5200212 5200231 5200228 +
gaaaaaactcctacctatta

SEQ ID NO: 5975 - DNA, 20 bp, Artificial Sequence
  Synthetic oligonucleotide; GAG chr11 5200216 5200235 5200232 +
aaactcctacctattatagt

SEQ ID NO: 5976 - DNA, 20 bp, Artificial Sequence
  Synthetic oligonucleotide; TGG chr11 5200236 5200255 5200252 +
gagcccaattttgataattc

SEQ ID NO: 5977 - DNA, 20 bp, Artificial Sequence
  Synthetic oligonucleotide; TAG chr11 5200242 5200261 5200258 +
aattttgataattctggaat

SEQ ID NO: 5978 - DNA, 20 bp, Artificial Sequence
  Synthetic oligonucleotide; CAG chr11 5200246 5200265 5200262 +
ttgataattctggaattagt

SEQ ID NO: 5979 - DNA, 20 bp, Artificial Sequence
  Synthetic oligonucleotide; AGG chr11 5200247 5200266 5200263 +
tgataattctggaattagtc

SEQ ID NO: 5980 - DNA, 20 bp, Artificial Sequence
  Synthetic oligonucleotide; TGG chr11 5200251 5200270 5200267 +
aattctggaattagtcagga

SEQ ID NO: 5981 - DNA, 20 bp, Artificial Sequence
  Synthetic oligonucleotide; GAG chr11 5200253 5200272 5200269 +
ttctggaattagtcaggatg

SEQ ID NO: 5982 - DNA, 20 bp, Artificial Sequence
  Synthetic oligonucleotide; AGG chr11 5200254 5200273 5200270 +
tctggaattagtcaggatgg

SEQ ID NO: 5983 - DNA, 20 bp, Artificial Sequence
  Synthetic oligonucleotide; TAG chr11 5200264 5200283 5200280 +
gtcaggatggaggaataacg

SEQ ID NO: 5984 - DNA, 20 bp, Artificial Sequence
  Synthetic oligonucleotide; TGG chr11 5200267 5200286 5200283 +
aggatggaggaataacgtag

SEQ ID NO: 5985 - DNA, 20 bp, Artificial Sequence
  Synthetic oligonucleotide; CGG chr11 5200289 5200308 5200305 +
gattgcaaattgcaatgtac

SEQ ID NO: 5986 - DNA, 20 bp, Artificial Sequence
  Synthetic oligonucleotide; AAG chr11 5200295 5200314 5200311 +
aaattgcaatgtaccggtca

SEQ ID NO: 5987 - DNA, 20 bp, Artificial Sequence
  Synthetic oligonucleotide; AGG chr11 5200296 5200315 5200312 +
aattgcaatgtaccggtcaa

SEQ ID NO: 5988 - DNA, 20 bp, Artificial Sequence
  Synthetic oligonucleotide; TAG chr11 5200302 5200321 5200318 +
aatgtaccggtcaaaggcca

SEQ ID NO: 5989 - DNA, 20 bp, Artificial Sequence
  Synthetic oligonucleotide; GAG chr11 5200306 5200325 5200322 +
taccggtcaaaggccatagt

SEQ ID NO: 5990 - DNA, 20 bp, Artificial Sequence
  Synthetic oligonucleotide; AGG chr11 5200307 5200326 5200323 +
accggtcaaaggccatagtg

SEQ ID NO: 5991 - DNA, 20 bp, Artificial Sequence
  Synthetic oligonucleotide; GAG chr11 5200309 5200328 5200325 +
cggtcaaaggccatagtgag

SEQ ID NO: 5992 - DNA, 20 bp, Artificial Sequence
  Synthetic oligonucleotide; AGG chr11 5200310 5200329 5200326 +
ggtcaaaggccatagtgagg

SEQ ID NO: 5993 - DNA, 20 bp, Artificial Sequence
  Synthetic oligonucleotide; CAG chr11 5200314 5200333 5200330 +
aaaggccatagtgaggagga

SEQ ID NO: 5994 - DNA, 20 bp, Artificial Sequence
  Synthetic oligonucleotide; GAG chr11 5200316 5200335 5200332 +
aggccatagtgaggaggaca

SEQ ID NO: 5995 - DNA, 20 bp, Artificial Sequence
  Synthetic oligonucleotide; AGG chr11 5200317 5200336 5200333 +
ggccatagtgaggaggacag

SEQ ID NO: 5996 - DNA, 20 bp, Artificial Sequence
  Synthetic oligonucleotide; AAG chr11 5200328 5200347 5200344 +
ggaggacagaggactccatg

SEQ ID NO: 5997 - DNA, 20 bp, Artificial Sequence
  Synthetic oligonucleotide; AGG chr11 5200329 5200348 5200345 +
gaggacagaggactccatga

SEQ ID NO: 5998 - DNA, 20 bp, Artificial Sequence
  Synthetic oligonucleotide; CAG chr11 5200333 5200352 5200349 +
acagaggactccatgaagga

SEQ ID NO: 5999 - DNA, 20 bp, Artificial Sequence
  Synthetic oligonucleotide; TGG chr11 5200340 5200359 5200356 +
actccatgaaggacagacca

SEQ ID NO: 6000 - DNA, 20 bp, Artificial Sequence
  Synthetic oligonucleotide; TAG chr11 5200349 5200368 5200365 +
aggacagaccatggatgaaa

SEQ ID NO: 6001 - DNA, 20 bp, Artificial Sequence
  Synthetic oligonucleotide; AGG chr11 5200350 5200369 5200366 +
ggacagaccatggatgaaat

SEQ ID NO: 6002 - DNA, 20 bp, Artificial Sequence
  Synthetic oligonucleotide; TGG chr11 5200355 5200374 5200371 +
gaccatggatgaaataggac

SEQ ID NO: 6003 - DNA, 20 bp, Artificial Sequence
  Synthetic oligonucleotide; GGG chr11 5200356 5200375 5200372 +
accatggatgaaataggact

SEQ ID NO: 6004 - DNA, 20 bp, Artificial Sequence
  Synthetic oligonucleotide; CAG chr11 5200364 5200383 5200380 +
tgaaataggactgggcaatg

SEQ ID NO: 6005 - DNA, 20 bp, Artificial Sequence
  Synthetic oligonucleotide; AGG chr11 5200365 5200384 5200381 +
gaaataggactgggcaatgc

SEQ ID NO: 6006 - DNA, 20 bp, Artificial Sequence
  Synthetic oligonucleotide; AAG chr11 5200373 5200392 5200389 +
actgggcaatgcaggaatcc

SEQ ID NO: 6007 - DNA, 20 bp, Artificial Sequence
  Synthetic oligonucleotide; CAG chr11 5200399 5200418 5200415 +
atctctcgaatgatccccca

SEQ ID NO: 6008 - DNA, 20 bp, Artificial Sequence
  Synthetic oligonucleotide; AGG chr11 5200400 5200419 5200416 +
tctctcgaatgatcccccac

SEQ ID NO: 6009 - DNA, 20 bp, Artificial Sequence
  Synthetic oligonucleotide; CAG chr11 5200408 5200427 5200424 +
atgatcccccacaggatccc

SEQ ID NO: 6010 - DNA, 20 bp, Artificial Sequence
  Synthetic oligonucleotide; CAG chr11 5200422 5200441 5200438 +
gatccccagcactgtgtaca

SEQ ID NO: 6011 - DNA, 20 bp, Artificial Sequence
  Synthetic oligonucleotide; TGG chr11 5200425 5200444 5200441 +
ccccagcactgtgtacacag

SEQ ID NO: 6012 - DNA, 20 bp, Artificial Sequence
  Synthetic oligonucleotide; CAG chr11 5200429 5200448 5200445 +
agcactgtgtacacagtgga

SEQ ID NO: 6013 - DNA, 20 bp, Artificial Sequence
  Synthetic oligonucleotide; CAG chr11 5200441 5200460 5200457 +
acagtggacagccccatgca

SEQ ID NO: 6014 - DNA, 20 bp, Artificial Sequence
  Synthetic oligonucleotide; AGG chr11 5200442 5200461 5200458 +
cagtggacagccccatgcac

SEQ ID NO: 6015 - DNA, 20 bp, Artificial Sequence
  Synthetic oligonucleotide; CAG chr11 5200446 5200465 5200462 +
ggacagccccatgcacaggt

SEQ ID NO: 6016 - DNA, 20 bp, Artificial Sequence
  Synthetic oligonucleotide; GAG chr11 5200450 5200469 5200466 +
agccccatgcacaggtcagt

SEQ ID NO: 6017 - DNA, 20 bp, Artificial Sequence
  Synthetic oligonucleotide; AGG chr11 5200451 5200470 5200467 +
gccccatgcacaggtcagtg

SEQ ID NO: 6018 - DNA, 20 bp, Artificial Sequence
  Synthetic oligonucleotide; GGG chr11 5200452 5200471 5200468 +
ccccatgcacaggtcagtga

SEQ ID NO: 6019 - DNA, 20 bp, Artificial Sequence
  Synthetic oligonucleotide; CAG chr11 5200456 5200475 5200472 +
atgcacaggtcagtgagggc

SEQ ID NO: 6020 - DNA, 20 bp, Artificial Sequence
  Synthetic oligonucleotide; TGG chr11 5200461 5200480 5200477 +
caggtcagtgagggccagca

SEQ ID NO: 6021 - DNA, 20 bp, Artificial Sequence
  Synthetic oligonucleotide; CAG chr11 5200465 5200484 5200481 +
tcagtgagggccagcatgga

SEQ ID NO: 6022 - DNA, 20 bp, Artificial Sequence
  Synthetic oligonucleotide; AGG chr11 5200466 5200485 5200482 +
cagtgagggccagcatggac

SEQ ID NO: 6023 - DNA, 20 bp, Artificial Sequence
  Synthetic oligonucleotide; AAG chr11 5200469 5200488 5200485 +
tgagggccagcatggacagg

SEQ ID NO: 6024 - DNA, 20 bp, Artificial Sequence
  Synthetic oligonucleotide; TAG chr11 5200479 5200498 5200495 +
catggacaggaagtaaaaca

SEQ ID NO: 6025 - DNA, 20 bp, Artificial Sequence
  Synthetic oligonucleotide; AGG chr11 5200480 5200499 5200496 +
atggacaggaagtaaaacat

SEQ ID NO: 6026 - DNA, 20 bp, Artificial Sequence
  Synthetic oligonucleotide; TGG chr11 5200484 5200503 5200500 +
acaggaagtaaaacataggc

SEQ ID NO: 6027 - DNA, 20 bp, Artificial Sequence
  Synthetic oligonucleotide; CAG chr11 5200489 5200508 5200505 +
aagtaaaacataggctggtg

SEQ ID NO: 6028 - DNA, 20 bp, Artificial Sequence
  Synthetic oligonucleotide; AGG chr11 5200490 5200509 5200506 +
agtaaaacataggctggtgc

SEQ ID NO: 6029 - DNA, 20 bp, Artificial Sequence
  Synthetic oligonucleotide; TGG chr11 5200495 5200514 5200511 +
aacataggctggtgcaggct

SEQ ID NO: 6030 - DNA, 20 bp, Artificial Sequence
  Synthetic oligonucleotide; CAG chr11 5200500 5200519 5200516 +
aggctggtgcaggcttggct

SEQ ID NO: 6031 - DNA, 20 bp, Artificial Sequence
  Synthetic oligonucleotide; TGG chr11 5200514 5200533 5200530 +
ttggctcagtccatatcaca

SEQ ID NO: 6032 - DNA, 20 bp, Artificial Sequence
  Synthetic oligonucleotide; GAG chr11 5200516 5200535 5200532 +
ggctcagtccatatcacatg

SEQ ID NO: 6033 - DNA, 20 bp, Artificial Sequence
  Synthetic oligonucleotide; AAG chr11 5200537 5200556 5200553 +
agaaccatgcaattgcccaa

SEQ ID NO: 6034 - DNA, 20 bp, Artificial Sequence
  Synthetic oligonucleotide; TGG chr11 5200545 5200564 5200561 +
gcaattgcccaaaagcacca

SEQ ID NO: 6035 - DNA, 20 bp, Artificial Sequence
  Synthetic oligonucleotide; TAG chr11 5200550 5200569 5200566 +
tgcccaaaagcaccatggca

SEQ ID NO: 6036 - DNA, 20 bp, Artificial Sequence
  Synthetic oligonucleotide; GAG chr11 5200556 5200575 5200572 +
aaagcaccatggcatagatt

SEQ ID NO: 6037 - DNA, 20 bp, Artificial Sequence
  Synthetic oligonucleotide; AGG chr11 5200557 5200576 5200573 +
aagcaccatggcatagattg

SEQ ID NO: 6038 - DNA, 20 bp, Artificial Sequence
  Synthetic oligonucleotide; GAG chr11 5200559 5200578 5200575 +
gcaccatggcatagattgag

SEQ ID NO: 6039 - DNA, 20 bp, Artificial Sequence
  Synthetic oligonucleotide; AAG chr11 5200562 5200581 5200578 +
ccatggcatagattgaggag

SEQ ID NO: 6040 - DNA, 20 bp, Artificial Sequence
  Synthetic oligonucleotide; AGG chr11 5200563 5200582 5200579 +
catggcatagattgaggaga

SEQ ID NO: 6041 - DNA, 20 bp, Artificial Sequence
  Synthetic oligonucleotide; GGG chr11 5200564 5200583 5200580 +
atggcatagattgaggagaa

SEQ ID NO: 6042 - DNA, 20 bp, Artificial Sequence
  Synthetic oligonucleotide; GGG chr11 5200565 5200584 5200581 +
tggcatagattgaggagaag

SEQ ID NO: 6043 - DNA, 20 bp, Artificial Sequence
  Synthetic oligonucleotide; TGG chr11 5200569 5200588 5200585 +
atagattgaggagaagggga

SEQ ID NO: 6044 - DNA, 20 bp, Artificial Sequence
  Synthetic oligonucleotide; AAG chr11 5200573 5200592 5200589 +
attgaggagaaggggatgga

SEQ ID NO: 6045 - DNA, 20 bp, Artificial Sequence
  Synthetic oligonucleotide; CAG chr11 5200577 5200596 5200593 +
aggagaaggggatggaaagc

SEQ ID NO: 6046 - DNA, 20 bp, Artificial Sequence
  Synthetic oligonucleotide; AGG chr11 5200578 5200597 5200594 +
ggagaaggggatggaaagcc

SEQ ID NO: 6047 - DNA, 20 bp, Artificial Sequence
  Synthetic oligonucleotide; GGG chr11 5200579 5200598 5200595 +
gagaaggggatggaaagcca

SEQ ID NO: 6048 - DNA, 20 bp, Artificial Sequence
  Synthetic oligonucleotide; GGG chr11 5200580 5200599 5200596 +
agaaggggatggaaagccag

SEQ ID NO: 6049 - DNA, 20 bp, Artificial Sequence
  Synthetic oligonucleotide; CAG chr11 5200599 5200618 5200615 +
ggggtattgctgctccatgc

SEQ ID NO: 6050 - DNA, 20 bp, Artificial Sequence
  Synthetic oligonucleotide; CAG chr11 5200608 5200627 5200624 +
ctgctccatgccagaaaatc

SEQ ID NO: 6051 - DNA, 20 bp, Artificial Sequence
  Synthetic oligonucleotide; GAG chr11 5200612 5200631 5200628 +
tccatgccagaaaatccagt

SEQ ID NO: 6052 - DNA, 20 bp, Artificial Sequence
  Synthetic oligonucleotide; AAG chr11 5200615 5200634 5200631 +
atgccagaaaatccagtgag

SEQ ID NO: 6053 - DNA, 20 bp, Artificial Sequence
  Synthetic oligonucleotide; AAG chr11 5200619 5200638 5200635 +
cagaaaatccagtgagaaga

SEQ ID NO: 6054 - DNA, 20 bp, Artificial Sequence
  Synthetic oligonucleotide; AGG chr11 5200620 5200639 5200636 +
agaaaatccagtgagaagaa

SEQ ID NO: 6055 - DNA, 20 bp, Artificial Sequence
  Synthetic oligonucleotide; AAG chr11 5200623 5200642 5200639 +
aaatccagtgagaagaaagg

SEQ ID NO: 6056 - DNA, 20 bp, Artificial Sequence
  Synthetic oligonucleotide; TGG chr11 5200635 5200654 5200651 +
aagaaaggaagaattcgtgc

SEQ ID NO: 6057 - DNA, 20 bp, Artificial Sequence
  Synthetic oligonucleotide; TAG chr11 5200641 5200660 5200657 +
ggaagaattcgtgctggtgc

SEQ ID NO: 6058 - DNA, 20 bp, Artificial Sequence
  Synthetic oligonucleotide; AGG chr11 5200642 5200661 5200658 +
gaagaattcgtgctggtgct

SEQ ID NO: 6059 - DNA, 20 bp, Artificial Sequence
  Synthetic oligonucleotide; GGG chr11 5200643 5200662 5200659 +
aagaattcgtgctggtgcta

SEQ ID NO: 6060 - DNA, 20 bp, Artificial Sequence
  Synthetic oligonucleotide; AAG chr11 5200653 5200672 5200669 +
gctggtgctagggcttactg

SEQ ID NO: 6061 - DNA, 20 bp, Artificial Sequence
  Synthetic oligonucleotide; TGG chr11 5200665 5200684 5200681 +
gcttactgaagtaatcattc

SEQ ID NO: 6062 - DNA, 20 bp, Artificial Sequence
  Synthetic oligonucleotide; GAG chr11 5200672 5200691 5200688 +
gaagtaatcattctggaact

SEQ ID NO: 6063 - DNA, 20 bp, Artificial Sequence
  Synthetic oligonucleotide; GAG chr11 5200683 5200702 5200699 +
tctggaactgagaaacatgt

SEQ ID NO: 6064 - DNA, 20 bp, Artificial Sequence
  Synthetic oligonucleotide; GAG chr11 5200685 5200704 5200701 +
tggaactgagaaacatgtga

SEQ ID NO: 6065 - DNA, 20 bp, Artificial Sequence
  Synthetic oligonucleotide; AAG chr11 5200698 5200717 5200714 +
catgtgagagtattttttca

SEQ ID NO: 6066 - DNA, 20 bp, Artificial Sequence
  Synthetic oligonucleotide; AGG chr11 5200699 5200718 5200715 +
atgtgagagtattttttcaa

SEQ ID NO: 6067 - DNA, 20 bp, Artificial Sequence
  Synthetic oligonucleotide; AAG chr11 5200739 5200758 5200755 +
ctgaatacaatgaaatttct

SEQ ID NO: 6068 - DNA, 20 bp, Artificial Sequence
  Synthetic oligonucleotide; CAG chr11 5200780 5200799 5200796 +
acttactgacttaaaaaaaa

SEQ ID NO: 6069 - DNA, 20 bp, Artificial Sequence
  Synthetic oligonucleotide; GAG chr11 5200785 5200804 5200801 +
ctgacttaaaaaaaacagct

SEQ ID NO: 6070 - DNA, 20 bp, Artificial Sequence
  Synthetic oligonucleotide; GAG chr11 5200803 5200822 5200819 +
ctgagaaattctgtttcttt

SEQ ID NO: 6071 - DNA, 20 bp, Artificial Sequence
  Synthetic oligonucleotide; TAG chr11 5200809 5200828 5200825 +
aattctgtttctttgagaca

SEQ ID NO: 6072 - DNA, 20 bp, Artificial Sequence
  Synthetic oligonucleotide; GAG chr11 5200826 5200845 5200842 +
acatagtatccattgccttt

SEQ ID NO: 6073 - DNA, 20 bp, Artificial Sequence
  Synthetic oligonucleotide; TGG chr11 5200833 5200852 5200849 +
atccattgcctttgagaaaa

SEQ ID NO: 6074 - DNA, 20 bp, Artificial Sequence
  Synthetic oligonucleotide; AAG chr11 5200857 5200876 5200873 +
cttcttttgatgtcatttaa

SEQ ID NO: 6075 - DNA, 20 bp, Artificial Sequence
  Synthetic oligonucleotide; TGG chr11 5200879 5200898 5200895 +
gtcattattttttcactgtc

SEQ ID NO: 6076 - DNA, 20 bp, Artificial Sequence
  Synthetic oligonucleotide; TAG chr11 5200897 5200916 5200913 +
tctggatgtgaacatatcct

SEQ ID NO: 6077 - DNA, 20 bp, Artificial Sequence
  Synthetic oligonucleotide; AAG chr11 5200900 5200919 5200916 +
ggatgtgaacatatccttag

SEQ ID NO: 6078 - DNA, 20 bp, Artificial Sequence
  Synthetic oligonucleotide; AAG chr11 5200907 5200926 5200923 +
aacatatccttagaagccat

SEQ ID NO: 6079 - DNA, 20 bp, Artificial Sequence
  Synthetic oligonucleotide; AAG chr11 5200921 5200940 5200937 +
agccataagcaaaaacaaat

SEQ ID NO: 6080 - DNA, 20 bp, Artificial Sequence
  Synthetic oligonucleotide; AGG chr11 5200922 5200941 5200938 +
gccataagcaaaaacaaata

SEQ ID NO: 6081 - DNA, 20 bp, Artificial Sequence
  Synthetic oligonucleotide; AAG chr11 5200925 5200944 5200941 +
ataagcaaaaacaaataagg

SEQ ID NO: 6082 - DNA, 20 bp, Artificial Sequence
  Synthetic oligonucleotide; GAG chr11 5200927 5200946 5200943 +
aagcaaaaacaaataaggaa

SEQ ID NO: 6083 - DNA, 20 bp, Artificial Sequence
  Synthetic oligonucleotide; TAG chr11 5200932 5200951 5200948 +
aaaacaaataaggaagagat

SEQ ID NO: 6084 - DNA, 20 bp, Artificial Sequence
  Synthetic oligonucleotide; AAG chr11 5200938 5200957 5200954 +
aataaggaagagattagtaa

SEQ ID NO: 6085 - DNA, 20 bp, Artificial Sequence
  Synthetic oligonucleotide; AGG chr11 5200939 5200958 5200955 +
ataaggaagagattagtaaa

SEQ ID NO: 6086 - DNA, 20 bp, Artificial Sequence
  Synthetic oligonucleotide; GAG chr11 5200941 5200960 5200957 +
aaggaagagattagtaaaag

SEQ ID NO: 6087 - DNA, 20 bp, Artificial Sequence
  Synthetic oligonucleotide; AAG chr11 5200944 5200963 5200960 +
gaagagattagtaaaaggag

SEQ ID NO: 6088 - DNA, 20 bp, Artificial Sequence
  Synthetic oligonucleotide; AGG chr11 5200945 5200964 5200961 +
aagagattagtaaaaggaga

SEQ ID NO: 6089 - DNA, 20 bp, Artificial Sequence
  Synthetic oligonucleotide; TAG chr11 5200949 5200968 5200965 +
gattagtaaaaggagaaggc

SEQ ID NO: 6090 - DNA, 20 bp, Artificial Sequence
  Synthetic oligonucleotide; TAG chr11 5200972 5200991 5200988 +
ttttaaaaaaatacgttgct

SEQ ID NO: 6091 - DNA, 20 bp, Artificial Sequence
  Synthetic oligonucleotide; AAG chr11 5200985 5201004 5201001 +
cgttgcttagacattttccc

SEQ ID NO: 6092 - DNA, 20 bp, Artificial Sequence
  Synthetic oligonucleotide; AGG chr11 5200986 5201005 5201002 +
gttgcttagacattttccca

SEQ ID NO: 6093 - DNA, 20 bp, Artificial Sequence
  Synthetic oligonucleotide; TAG chr11 5200990 5201009 5201006 +
cttagacattttcccaagga

SEQ ID NO: 6094 - DNA, 20 bp, Artificial Sequence
  Synthetic oligonucleotide; TGG chr11 5200993 5201012 5201009 +
agacattttcccaaggatag

SEQ ID NO: 6095 - DNA, 20 bp, Artificial Sequence
  Synthetic oligonucleotide; CAG chr11 5201010 5201029 5201026 +
tagtggtaaaaattttatac

SEQ ID NO: 6096 - DNA, 20 bp, Artificial Sequence
  Synthetic oligonucleotide; AAG chr11 5201015 5201034 5201031 +
gtaaaaattttataccagta

SEQ ID NO: 6097 - DNA, 20 bp, Artificial Sequence
  Synthetic oligonucleotide; GAG chr11 5201017 5201036 5201033 +
aaaaattttataccagtaaa

SEQ ID NO: 6098 - DNA, 20 bp, Artificial Sequence
  Synthetic oligonucleotide; GAG chr11 5201022 5201041 5201038 +
ttttataccagtaaagagcc

SEQ ID NO: 6099 - DNA, 20 bp, Artificial Sequence
  Synthetic oligonucleotide; AGG chr11 5201023 5201042 5201039 +
tttataccagtaaagagccg

SEQ ID NO: 6100 - DNA, 20 bp, Artificial Sequence
  Synthetic oligonucleotide; AAG chr11 5201070 5201089 5201086 +
tccaattcattaaacattcg

SEQ ID NO: 6101 - DNA, 20 bp, Artificial Sequence
  Synthetic oligonucleotide; AAG chr11 5201075 5201094 5201091 +
ttcattaaacattcgaagtg

SEQ ID NO: 6102 - DNA, 20 bp, Artificial Sequence
  Synthetic oligonucleotide; GAG chr11 5201077 5201096 5201093 +
cattaaacattcgaagtgaa

SEQ ID NO: 6103 - DNA, 20 bp, Artificial Sequence
  Synthetic oligonucleotide; TGG chr11 5201087 5201106 5201103 +
tcgaagtgaagagtaatctt

SEQ ID NO: 6104 - DNA, 20 bp, Artificial Sequence
  Synthetic oligonucleotide; GGG chr11 5201088 5201107 5201104 +
cgaagtgaagagtaatcttt

SEQ ID NO: 6105 - DNA, 20 bp, Artificial Sequence
  Synthetic oligonucleotide; AAG chr11 5201104 5201123 5201120 +
ctttgggctttaaatatcat

SEQ ID NO: 6106 - DNA, 20 bp, Artificial Sequence
  Synthetic oligonucleotide; TAG chr11 5201116 5201135 5201132 +
aatatcataagtctattaaa

SEQ ID NO: 6107 - DNA, 20 bp, Artificial Sequence
  Synthetic oligonucleotide; AAG chr11 5201155 5201174 5201171 +
ttccattttgtgccgtctcc

SEQ ID NO: 6108 - DNA, 20 bp, Artificial Sequence
  Synthetic oligonucleotide; AAG chr11 5201187 5201206 5201203 +
tctccaaatactatttaatg

SEQ ID NO: 6109 - DNA, 20 bp, Artificial Sequence
  Synthetic oligonucleotide; CAG chr11 5201212 5201231 5201228 +
actcctgttttctccccctc

SEQ ID NO: 6110 - DNA, 20 bp, Artificial Sequence
  Synthetic oligonucleotide; TAG chr11 5201221 5201240 5201237 +
ttctccccctccagatgacg

SEQ ID NO: 6111 - DNA, 20 bp, Artificial Sequence
  Synthetic oligonucleotide; CAG chr11 5201225 5201244 5201241 +
ccccctccagatgacgtagc

SEQ ID NO: 6112 - DNA, 20 bp, Artificial Sequence
  Synthetic oligonucleotide; TGG chr11 5201246 5201265 5201262 +
agcaattactttttcttcat

SEQ ID NO: 6113 - DNA, 20 bp, Artificial Sequence
  Synthetic oligonucleotide; AAG chr11 5201253 5201272 5201269 +
actttttcttcattggtgat

SEQ ID NO: 6114 - DNA, 20 bp, Artificial Sequence
  Synthetic oligonucleotide; CAG chr11 5201256 5201275 5201272 +
ttttcttcattggtgataag

SEQ ID NO: 6115 - DNA, 20 bp, Artificial Sequence
  Synthetic oligonucleotide; CAG chr11 5201260 5201279 5201276 +
cttcattggtgataagcaga

SEQ ID NO: 6116 - DNA, 20 bp, Artificial Sequence
  Synthetic oligonucleotide; AGG chr11 5201261 5201280 5201277 +
ttcattggtgataagcagac

SEQ ID NO: 6117 - DNA, 20 bp, Artificial Sequence
  Synthetic oligonucleotide; GAG chr11 5201277 5201296 5201293 +
agacaggaatatttatgcat

SEQ ID NO: 6118 - DNA, 20 bp, Artificial Sequence
  Synthetic oligonucleotide; TGG chr11 5201284 5201303 5201300 +
aatatttatgcatgagacct

SEQ ID NO: 6119 - DNA, 20 bp, Artificial Sequence
  Synthetic oligonucleotide; GGG chr11 5201285 5201304 5201301 +
atatttatgcatgagacctt

SEQ ID NO: 6120 - DNA, 20 bp, Artificial Sequence
  Synthetic oligonucleotide; TGG chr11 5201303 5201322 5201319 +
ttgggtaaatgatttctcac

SEQ ID NO: 6121 - DNA, 20 bp, Artificial Sequence
  Synthetic oligonucleotide; GAG chr11 5201305 5201324 5201321 +
gggtaaatgatttctcactg

SEQ ID NO: 6122 - DNA, 20 bp, Artificial Sequence
  Synthetic oligonucleotide; TGG chr11 5201311 5201330 5201327 +
atgatttctcactggagctc

SEQ ID NO: 6123 - DNA, 20 bp, Artificial Sequence
  Synthetic oligonucleotide; GAG chr11 5201320 5201339 5201336 +
cactggagctctggcctctt

SEQ ID NO: 6124 - DNA, 20 bp, Artificial Sequence
  Synthetic oligonucleotide; TAG chr11 5201352 5201371 5201368 +
tcatttgtgcctttgtgatg

SEQ ID NO: 6125 - DNA, 20 bp, Artificial Sequence
  Synthetic oligonucleotide; GAG chr11 5201354 5201373 5201370 +
atttgtgcctttgtgatgta

SEQ ID NO: 6126 - DNA, 20 bp, Artificial Sequence
  Synthetic oligonucleotide; TAG chr11 5201360 5201379 5201376 +
gcctttgtgatgtagagaat

SEQ ID NO: 6127 - DNA, 20 bp, Artificial Sequence
  Synthetic oligonucleotide; AAG chr11 5201367 5201386 5201383 +
tgatgtagagaattagattg

SEQ ID NO: 6128 - DNA, 20 bp, Artificial Sequence
  Synthetic oligonucleotide; GAG chr11 5201375 5201394 5201391 +
agaattagattgaagacact

SEQ ID NO: 6129 - DNA, 20 bp, Artificial Sequence
  Synthetic oligonucleotide; TAG chr11 5201385 5201404 5201401 +
tgaagacactgagcctttga

SEQ ID NO: 6130 - DNA, 20 bp, Artificial Sequence
  Synthetic oligonucleotide; CAG chr11 5201388 5201407 5201404 +
agacactgagcctttgatag

SEQ ID NO: 6131 - DNA, 20 bp, Artificial Sequence
  Synthetic oligonucleotide; CAG chr11 5201393 5201412 5201409 +
ctgagcctttgatagcagct

SEQ ID NO: 6132 - DNA, 20 bp, Artificial Sequence
  Synthetic oligonucleotide; CAG chr11 5201419 5201438 5201435 +
ttcccattcctttatttatt

SEQ ID NO: 6133 - DNA, 20 bp, Artificial Sequence
  Synthetic oligonucleotide; GAG chr11 5201427 5201446 5201443 +
cctttatttattcagttaat

SEQ ID NO: 6134 - DNA, 20 bp, Artificial Sequence
  Synthetic oligonucleotide; TGG chr11 5201470 5201489 5201486 +
tatacatttattcaatgtat

SEQ ID NO: 6135 - DNA, 20 bp, Artificial Sequence
  Synthetic oligonucleotide; TAG chr11 5201492 5201511 5201508 +
gccaattgtgttttctttct

SEQ ID NO: 6136 - DNA, 20 bp, Artificial Sequence
  Synthetic oligonucleotide; CAG chr11 5201501 5201520 5201517 +
gttttctttcttagaacctg

SEQ ID NO: 6137 - DNA, 20 bp, Artificial Sequence
  Synthetic oligonucleotide; CAG chr11 5201509 5201528 5201525 +
tcttagaacctgcagttcta

SEQ ID NO: 6138 - DNA, 20 bp, Artificial Sequence
  Synthetic oligonucleotide; AAG chr11 5201518 5201537 5201534 +
ctgcagttctacagatcaca

SEQ ID NO: 6139 - DNA, 20 bp, Artificial Sequence
  Synthetic oligonucleotide; CAG chr11 5201522 5201541 5201538 +
agttctacagatcacaaagc

SEQ ID NO: 6140 - DNA, 20 bp, Artificial Sequence
  Synthetic oligonucleotide; AGG chr11 5201523 5201542 5201539 +
gttctacagatcacaaagcc

SEQ ID NO: 6141 - DNA, 20 bp, Artificial Sequence
  Synthetic oligonucleotide; AAG chr11 5201533 5201552 5201549 +
tcacaaagccaggctcaaac

SEQ ID NO: 6142 - DNA, 20 bp, Artificial Sequence
  Synthetic oligonucleotide; AAG chr11 5201537 5201556 5201553 +
aaagccaggctcaaacaagc

SEQ ID NO: 6143 - DNA, 20 bp, Artificial Sequence
  Synthetic oligonucleotide; AAG chr11 5201553 5201572 5201569 +
aagcaagcttataatttcaa

SEQ ID NO: 6144 - DNA, 20 bp, Artificial Sequence
  Synthetic oligonucleotide; TGG chr11 5201561 5201580 5201577 +
ttataatttcaaaagcctca

SEQ ID NO: 6145 - DNA, 20 bp, Artificial Sequence
  Synthetic oligonucleotide; TAG chr11 5201564 5201583 5201580 +
taatttcaaaagcctcatgg

SEQ ID NO: 6146 - DNA, 20 bp, Artificial Sequence
  Synthetic oligonucleotide; CAG chr11 5201567 5201586 5201583 +
tttcaaaagcctcatggtag

SEQ ID NO: 6147 - DNA, 20 bp, Artificial Sequence
  Synthetic oligonucleotide; TGG chr11 5201577 5201596 5201593 +
ctcatggtagcagaatcaat

SEQ ID NO: 6148 - DNA, 20 bp, Artificial Sequence
  Synthetic oligonucleotide; AAG chr11 5201608 5201627 5201624 +
ttacattgtttgcctgcttt

SEQ ID NO: 6149 - DNA, 20 bp, Artificial Sequence
  Synthetic oligonucleotide; CAG chr11 5201614 5201633 5201630 +
tgtttgcctgctttaagttc

SEQ ID NO: 6150 - DNA, 20 bp, Artificial Sequence
  Synthetic oligonucleotide; GAG chr11 5201621 5201640 5201637 +
ctgctttaagttccagacct

SEQ ID NO: 6151 - DNA, 20 bp, Artificial Sequence
  Synthetic oligonucleotide; AAG chr11 5201633 5201652 5201649 +
ccagacctgagaatcatcat

SEQ ID NO: 6152 - DNA, 20 bp, Artificial Sequence
  Synthetic oligonucleotide; AAG chr11 5201644 5201663 5201660 +
aatcatcataagttttttta

SEQ ID NO: 6153 - DNA, 20 bp, Artificial Sequence
  Synthetic oligonucleotide; CAG chr11 5201662 5201681 5201678 +
taaagctctaataatgtaaa

SEQ ID NO: 6154 - DNA, 20 bp, Artificial Sequence
  Synthetic oligonucleotide; AAG chr11 5201673 5201692 5201689 +
taatgtaaacagatgttcaa

SEQ ID NO: 6155 - DNA, 20 bp, Artificial Sequence
  Synthetic oligonucleotide; GAG chr11 5201697 5201716 5201713 +
ccatactttcatgtttgatt

SEQ ID NO: 6156 - DNA, 20 bp, Artificial Sequence
  Synthetic oligonucleotide; GAG chr11 5201707 5201726 5201723 +
atgtttgattgagtaacttc

SEQ ID NO: 6157 - DNA, 20 bp, Artificial Sequence
  Synthetic oligonucleotide; AAG chr11 5201716 5201735 5201732 +
tgagtaacttcgagatgtta

SEQ ID NO: 6158 - DNA, 20 bp, Artificial Sequence
  Synthetic oligonucleotide; CAG chr11 5201725 5201744 5201741 +
tcgagatgttaaagtaactt

SEQ ID NO: 6159 - DNA, 20 bp, Artificial Sequence
  Synthetic oligonucleotide; TGG chr11 5201731 5201750 5201747 +
tgttaaagtaacttcagatt

SEQ ID NO: 6160 - DNA, 20 bp, Artificial Sequence
  Synthetic oligonucleotide; GGG chr11 5201732 5201751 5201748 +
gttaaagtaacttcagattt

SEQ ID NO: 6161 - DNA, 20 bp, Artificial Sequence
  Synthetic oligonucleotide; CAG chr11 5201757 5201776 5201773 +
gccctttatgtcctactttt

SEQ ID NO: 6162 - DNA, 20 bp, Artificial Sequence
  Synthetic oligonucleotide; TAG chr11 5201771 5201790 5201787 +
acttttcagctttgtcttat

SEQ ID NO: 6163 - DNA, 20 bp, Artificial Sequence
  Synthetic oligonucleotide; CAG chr11 5201784 5201803 5201800 +
gtcttattagcctcacaaca

SEQ ID NO: 6164 - DNA, 20 bp, Artificial Sequence
  Synthetic oligonucleotide; CAG chr11 5201792 5201811 5201808 +
agcctcacaacacagttcca

SEQ ID NO: 6165 - DNA, 20 bp, Artificial Sequence
  Synthetic oligonucleotide; TAG chr11 5201837 5201856 5201853 +
tatactacactgacgtcttc

SEQ ID NO: 6166 - DNA, 20 bp, Artificial Sequence
  Synthetic oligonucleotide; CAG chr11 5201840 5201859 5201856 +
actacactgacgtcttctag

SEQ ID NO: 6167 - DNA, 20 bp, Artificial Sequence
  Synthetic oligonucleotide; CAG chr11 5201877 5201896 5201893 +
ttcttgccctgactccttct

SEQ ID NO: 6168 - DNA, 20 bp, Artificial Sequence
  Synthetic oligonucleotide; TAG chr11 5201892 5201911 5201908 +
cttctcagcattgaataact

SEQ ID NO: 6169 - DNA, 20 bp, Artificial Sequence
  Synthetic oligonucleotide; TAG chr11 5201923 5201942 5201939 +
ttttaatacttttttctcca

SEQ ID NO: 6170 - DNA, 20 bp, Artificial Sequence
  Synthetic oligonucleotide; AAG chr11 5201934 5201953 5201950 +
ttttctccatagaatgcttg

SEQ ID NO: 6171 - DNA, 20 bp, Artificial Sequence
  Synthetic oligonucleotide; CAG chr11 5201952 5201971 5201968 +
tgaagtttcttcgtttcttg

SEQ ID NO: 6172 - DNA, 20 bp, Artificial Sequence
  Synthetic oligonucleotide; GAG chr11 5201954 5201973 5201970 +
aagtttcttcgtttcttgca

SEQ ID NO: 6173 - DNA, 20 bp, Artificial Sequence
  Synthetic oligonucleotide; AGG chr11 5201955 5201974 5201971 +
agtttcttcgtttcttgcag

SEQ ID NO: 6174 - DNA, 20 bp, Artificial Sequence
  Synthetic oligonucleotide; CAG chr11 5201964 5201983 5201980 +
gtttcttgcagaggattttt

SEQ ID NO: 6175 - DNA, 20 bp, Artificial Sequence
  Synthetic oligonucleotide; AAG chr11 5202127 5202146 5202143 +
caactcaacaatcacttttc

SEQ ID NO: 6176 - DNA, 20 bp, Artificial Sequence
  Synthetic oligonucleotide; AAG chr11 5202130 5202149 5202146 +
ctcaacaatcacttttcaag

SEQ ID NO: 6177 - DNA, 20 bp, Artificial Sequence
  Synthetic oligonucleotide; AAG chr11 5202139 5202158 5202155 +
cacttttcaagaagtttctt

SEQ ID NO: 6178 - DNA, 20 bp, Artificial Sequence
  Synthetic oligonucleotide; TGG chr11 5202169 5202188 5202185 +
tatccatatatctattattt

SEQ ID NO: 6179 - DNA, 20 bp, Artificial Sequence
  Synthetic oligonucleotide; TAG chr11 5202216 5202235 5202232 +
acttataattttgtatttat

SEQ ID NO: 6180 - DNA, 20 bp, Artificial Sequence
  Synthetic oligonucleotide; CAG chr11 5202283 5202302 5202299 +
tctgttacaaactaaattct

SEQ ID NO: 6181 - DNA, 20 bp, Artificial Sequence
  Synthetic oligonucleotide; CAG chr11 5202298 5202317 5202314 +
attctcagttccttaatgtg

SEQ ID NO: 6182 - DNA, 20 bp, Artificial Sequence
  Synthetic oligonucleotide; GAG chr11 5202365 5202384 5202381 +
tctgattcctgaccactcct

SEQ ID NO: 6183 - DNA, 20 bp, Artificial Sequence
  Synthetic oligonucleotide; GAG chr11 5202367 5202386 5202383 +
tgattcctgaccactcctga

SEQ ID NO: 6184 - DNA, 20 bp, Artificial Sequence
  Synthetic oligonucleotide; TGG chr11 5202390 5202409 5202406 +
ctcaaattcatgaatacaac

SEQ ID NO: 6185 - DNA, 20 bp, Artificial Sequence
  Synthetic oligonucleotide; GAG chr11 5202412 5202431 5202428 +
gctatttaatatattcatct

SEQ ID NO: 6186 - DNA, 20 bp, Artificial Sequence
  Synthetic oligonucleotide; AAG chr11 5202431 5202450 5202447 +
tgagtgtttaatcttaaaat

SEQ ID NO: 6187 - DNA, 20 bp, Artificial Sequence
  Synthetic oligonucleotide; AAG chr11 5202447 5202466 5202463 +
aaataagaatgatgccaata

SEQ ID NO: 6188 - DNA, 20 bp, Artificial Sequence
  Synthetic oligonucleotide; AAG chr11 5202504 5202523 5202520 +
ccttttctcctaatattata

SEQ ID NO: 6189 - DNA, 20 bp, Artificial Sequence
  Synthetic oligonucleotide; AAG chr11 5202533 5202552 5202549 +
caccaataacacaattgcat

SEQ ID NO: 6190 - DNA, 20 bp, Artificial Sequence
  Synthetic oligonucleotide; AAG chr11 5202538 5202557 5202554 +
ataacacaattgcataagac

SEQ ID NO: 6191 - DNA, 20 bp, Artificial Sequence
  Synthetic oligonucleotide; GAG chr11 5202545 5202564 5202561 +
aattgcataagacaagtctt

SEQ ID NO: 6192 - DNA, 20 bp, Artificial Sequence
  Synthetic oligonucleotide; CAG chr11 5202630 5202649 5202646 +
tcaatttctaccatttctac

SEQ ID NO: 6193 - DNA, 20 bp, Artificial Sequence
  Synthetic oligonucleotide; CAG chr11 5202643 5202662 5202659 +
tttctaccagaaacacatcc

SEQ ID NO: 6194 - DNA, 20 bp, Artificial Sequence
  Synthetic oligonucleotide; TAG chr11 5202647 5202666 5202663 +
taccagaaacacatcccaga

SEQ ID NO: 6195 - DNA, 20 bp, Artificial Sequence
  Synthetic oligonucleotide; AGG chr11 5202648 5202667 5202664 +
accagaaacacatcccagat

SEQ ID NO: 6196 - DNA, 20 bp, Artificial Sequence
  Synthetic oligonucleotide; TGG chr11 5202675 5202694 5202691 +
cttttacacattgcccgtct

SEQ ID NO: 6197 - DNA, 20 bp, Artificial Sequence
  Synthetic oligonucleotide; TGG chr11 5202699 5202718 5202715 +
ttataatatcattgtttccc

SEQ ID NO: 6198 - DNA, 20 bp, Artificial Sequence
  Synthetic oligonucleotide; TAG chr11 5202747 5202766 5202763 +
taataatttaatattattac

SEQ ID NO: 6199 - DNA, 20 bp, Artificial Sequence
  Synthetic oligonucleotide; CAG chr11 5202797 5202816 5202813 +
tctaaaaaatgtattatctc

SEQ ID NO: 6200 - DNA, 20 bp, Artificial Sequence
  Synthetic oligonucleotide; AGG chr11 5202798 5202817 5202814 +
ctaaaaaatgtattatctcc

SEQ ID NO: 6201 - DNA, 20 bp, Artificial Sequence
  Synthetic oligonucleotide; GGG chr11 5202799 5202818 5202815 +
taaaaaatgtattatctcca

SEQ ID NO: 6202 - DNA, 20 bp, Artificial Sequence
  Synthetic oligonucleotide; TGG chr11 5202868 5202887 5202884 +
ttgttgaaaaaactctttga

SEQ ID NO: 6203 - DNA, 20 bp, Artificial Sequence
  Synthetic oligonucleotide; TAG chr11 5202915 5202934 5202931 +
aaaatacaaattctttatca

SEQ ID NO: 6204 - DNA, 20 bp, Artificial Sequence
  Synthetic oligonucleotide; AAG chr11 5202923 5202942 5202939 +
aattctttatcatagtcaaa

SEQ ID NO: 6205 - DNA, 20 bp, Artificial Sequence
  Synthetic oligonucleotide; TGG chr11 5202938 5202957 5202954 +
tcaaaaagccttgtataacg

SEQ ID NO: 6206 - DNA, 20 bp, Artificial Sequence
  Synthetic oligonucleotide; TAG chr11 5202967 5202986 5202983 +
tgcctcttctattacatctt

SEQ ID NO: 6207 - DNA, 20 bp, Artificial Sequence
  Synthetic oligonucleotide; TAG chr11 5202998 5203017 5203014 +
tgcctacactccttaatatt

SEQ ID NO: 6208 - DNA, 20 bp, Artificial Sequence
  Synthetic oligonucleotide; AGG chr11 5202999 5203018 5203015 +
gcctacactccttaatattt

SEQ ID NO: 6209 - DNA, 20 bp, Artificial Sequence
  Synthetic oligonucleotide; AAG chr11 5203023 5203042 5203039 +
atctttatcttcctcaaaac

SEQ ID NO: 6210 - DNA, 20 bp, Artificial Sequence
  Synthetic oligonucleotide; AAG chr11 5203028 5203047 5203044 +
tatcttcctcaaaacaagct

SEQ ID NO: 6211 - DNA, 20 bp, Artificial Sequence
  Synthetic oligonucleotide; CAG chr11 5203044 5203063 5203060 +
agctaagtacatgcatgtct

SEQ ID NO: 6212 - DNA, 20 bp, Artificial Sequence
  Synthetic oligonucleotide; AGG chr11 5203045 5203064 5203061 +
gctaagtacatgcatgtctc

SEQ ID NO: 6213 - DNA, 20 bp, Artificial Sequence
  Synthetic oligonucleotide; TGG chr11 5203059 5203078 5203075 +
tgtctcaggatctttgccca

SEQ ID NO: 6214 - DNA, 20 bp, Artificial Sequence
  Synthetic oligonucleotide; AAG chr11 5203091 5203110 5203107 +
tgctccgaattatctacccc

SEQ ID NO: 6215 - DNA, 20 bp, Artificial Sequence
  Synthetic oligonucleotide; CAG chr11 5203102 5203121 5203118 +
atctaccccaagtatttgca

SEQ ID NO: 6216 - DNA, 20 bp, Artificial Sequence
  Synthetic oligonucleotide; GAG chr11 5203129 5203148 5203145 +
tcctttcaccattaactttt

SEQ ID NO: 6217 - DNA, 20 bp, Artificial Sequence
  Synthetic oligonucleotide; CAG chr11 5203150 5203169 5203166 +
agttaaaatgattacttcct

SEQ ID NO: 6218 - DNA, 20 bp, Artificial Sequence
  Synthetic oligonucleotide; AGG chr11 5203151 5203170 5203167 +
gttaaaatgattacttcctc

SEQ ID NO: 6219 - DNA, 20 bp, Artificial Sequence
  Synthetic oligonucleotide; GGG chr11 5203152 5203171 5203168 +
ttaaaatgattacttcctca

SEQ ID NO: 6220 - DNA, 20 bp, Artificial Sequence
  Synthetic oligonucleotide; GGG chr11 5203153 5203172 5203169 +
taaaatgattacttcctcag

SEQ ID NO: 6221 - DNA, 20 bp, Artificial Sequence
  Synthetic oligonucleotide; GGG chr11 5203154 5203173 5203170 +
aaaatgattacttcctcagg

SEQ ID NO: 6222 - DNA, 20 bp, Artificial Sequence
  Synthetic oligonucleotide; TAG chr11 5203181 5203200 5203197 +
ttctaatactgctccccacc

SEQ ID NO: 6223 - DNA, 20 bp, Artificial Sequence
  Synthetic oligonucleotide; CAG chr11 5203228 5203247 5203244 +
taactaacttactctcatca

SEQ ID NO: 6224 - DNA, 20 bp, Artificial Sequence
  Synthetic oligonucleotide; TAG chr11 5203236 5203255 5203252 +
ttactctcatcacagtatac

SEQ ID NO: 6225 - DNA, 20 bp, Artificial Sequence
  Synthetic oligonucleotide; TAG chr11 5203277 5203296 5203293 +
attatacactgaatttccat

SEQ ID NO: 6226 - DNA, 20 bp, Artificial Sequence
  Synthetic oligonucleotide; TAG chr11 5203286 5203305 5203302 +
tgaatttccattagattcat

SEQ ID NO: 6227 - DNA, 20 bp, Artificial Sequence
  Synthetic oligonucleotide; GAG chr11 5203288 5203307 5203304 +
aatttccattagattcatta

SEQ ID NO: 6228 - DNA, 20 bp, Artificial Sequence
  Synthetic oligonucleotide; AGG chr11 5203289 5203308 5203305 +
atttccattagattcattag

SEQ ID NO: 6229 - DNA, 20 bp, Artificial Sequence
  Synthetic oligonucleotide; TAG chr11 5203295 5203314 5203311 +
attagattcattagaggctg

SEQ ID NO: 6230 - DNA, 20 bp, Artificial Sequence
  Synthetic oligonucleotide; AAG chr11 5203298 5203317 5203314 +
agattcattagaggctgtag

SEQ ID NO: 6231 - DNA, 20 bp, Artificial Sequence
  Synthetic oligonucleotide; TAG chr11 5203303 5203322 5203319 +
cattagaggctgtagaagat

SEQ ID NO: 6232 - DNA, 20 bp, Artificial Sequence
  Synthetic oligonucleotide; AGG chr11 5203304 5203323 5203320 +
attagaggctgtagaagatt

SEQ ID NO: 6233 - DNA, 20 bp, Artificial Sequence
  Synthetic oligonucleotide; AAG chr11 5203328 5203347 5203344 +
accatatctgttttttgctc

SEQ ID NO: 6234 - DNA, 20 bp, Artificial Sequence
  Synthetic oligonucleotide; AAG chr11 5203343 5203362 5203359 +
tgctcaagaatatgaaaaat

SEQ ID NO: 6235 - DNA, 20 bp, Artificial Sequence
  Synthetic oligonucleotide; AGG chr11 5203344 5203363 5203360 +
gctcaagaatatgaaaaata

SEQ ID NO: 6236 - DNA, 20 bp, Artificial Sequence
  Synthetic oligonucleotide; GGG chr11 5203345 5203364 5203361 +
ctcaagaatatgaaaaataa

SEQ ID NO: 6237 - DNA, 20 bp, Artificial Sequence
  Synthetic oligonucleotide; TAG chr11 5203349 5203368 5203365 +
agaatatgaaaaataagggt

SEQ ID NO: 6238 - DNA, 20 bp, Artificial Sequence
  Synthetic oligonucleotide; TAG chr11 5203354 5203373 5203370 +
atgaaaaataagggttagca

SEQ ID NO: 6239 - DNA, 20 bp, Artificial Sequence
  Synthetic oligonucleotide; TGG chr11 5203359 5203378 5203375 +
aaataagggttagcatagaa

SEQ ID NO: 6240 - DNA, 20 bp, Artificial Sequence
  Synthetic oligonucleotide; GGG chr11 5203360 5203379 5203376 +
aataagggttagcatagaat

SEQ ID NO: 6241 - DNA, 20 bp, Artificial Sequence
  Synthetic oligonucleotide; AAG chr11 5203402 5203421 5203418 +
aattaattattctatgaaat

SEQ ID NO: 6242 - DNA, 20 bp, Artificial Sequence
  Synthetic oligonucleotide; GAG chr11 5203404 5203423 5203420 +
ttaattattctatgaaataa

SEQ ID NO: 6243 - DNA, 20 bp, Artificial Sequence
  Synthetic oligonucleotide; TAG chr11 5203408 5203427 5203424 +
ttattctatgaaataagagc

SEQ ID NO: 6244 - DNA, 20 bp, Artificial Sequence
  Synthetic oligonucleotide; CAG chr11 5203418 5203437 5203434 +
aaataagagctagacaatca

SEQ ID NO: 6245 - DNA, 20 bp, Artificial Sequence
  Synthetic oligonucleotide; GAG chr11 5203420 5203439 5203436 +
ataagagctagacaatcaca

SEQ ID NO: 6246 - DNA, 20 bp, Artificial Sequence
  Synthetic oligonucleotide; AAG chr11 5203428 5203447 5203444 +
tagacaatcacagagatata

SEQ ID NO: 6247 - DNA, 20 bp, Artificial Sequence
  Synthetic oligonucleotide; AAG chr11 5203458 5203477 5203474 +
gaatgtgaacactcctatca

SEQ ID NO: 6248 - DNA, 20 bp, Artificial Sequence
  Synthetic oligonucleotide; TAG chr11 5203487 5203506 5203503 +
taaaatcatctgtgtacact

SEQ ID NO: 6249 - DNA, 20 bp, Artificial Sequence
  Synthetic oligonucleotide; TGG chr11 5203504 5203523 5203520 +
acttagtcttttctgacctt

SEQ ID NO: 6250 - DNA, 20 bp, Artificial Sequence
  Synthetic oligonucleotide; GAG chr11 5203516 5203535 5203532 +
ctgacctttggccaccaatt

SEQ ID NO: 6251 - DNA, 20 bp, Artificial Sequence
  Synthetic oligonucleotide; AAG chr11 5203531 5203550 5203547 +
caattgagtcatcatatacc

SEQ ID NO: 6252 - DNA, 20 bp, Artificial Sequence
  Synthetic oligonucleotide; TGG chr11 5203540 5203559 5203556 +
catcatataccaagtttgaa

SEQ ID NO: 6253 - DNA, 20 bp, Artificial Sequence
  Synthetic oligonucleotide; CAG chr11 5203552 5203571 5203568 +
agtttgaatggtttataaaa

SEQ ID NO: 6254 - DNA, 20 bp, Artificial Sequence
  Synthetic oligonucleotide; CAG chr11 5203564 5203583 5203580 +
ttataaaacagatgctgctc

SEQ ID NO: 6255 - DNA, 20 bp, Artificial Sequence
  Synthetic oligonucleotide; AGG chr11 5203565 5203584 5203581 +
tataaaacagatgctgctcc

SEQ ID NO: 6256 - DNA, 20 bp, Artificial Sequence
  Synthetic oligonucleotide; GGG chr11 5203566 5203585 5203582 +
ataaaacagatgctgctcca

SEQ ID NO: 6257 - DNA, 20 bp, Artificial Sequence
  Synthetic oligonucleotide; CAG chr11 5203624 5203643 5203640 +
aacatgatttctctcatttc

SEQ ID NO: 6258 - DNA, 20 bp, Artificial Sequence
  Synthetic oligonucleotide; CAG chr11 5203634 5203653 5203650 +
ctctcatttccagcctgact

SEQ ID NO: 6259 - DNA, 20 bp, Artificial Sequence
  Synthetic oligonucleotide; AAG chr11 5203647 5203666 5203663 +
cctgactcagacatatcgtc

SEQ ID NO: 6260 - DNA, 20 bp, Artificial Sequence
  Synthetic oligonucleotide; AGG chr11 5203648 5203667 5203664 +
ctgactcagacatatcgtca

SEQ ID NO: 6261 - DNA, 20 bp, Artificial Sequence
  Synthetic oligonucleotide; TGG chr11 5203654 5203673 5203670 +
cagacatatcgtcaaggatc

SEQ ID NO: 6262 - DNA, 20 bp, Artificial Sequence
  Synthetic oligonucleotide; GGG chr11 5203655 5203674 5203671 +
agacatatcgtcaaggatct

SEQ ID NO: 6263 - DNA, 20 bp, Artificial Sequence
  Synthetic oligonucleotide; AAG chr11 5203669 5203688 5203685 +
ggatctgggattgatcacaa

SEQ ID NO: 6264 - DNA, 20 bp, Artificial Sequence
  Synthetic oligonucleotide; TAG chr11 5203691 5203710 5203707 +
gatttaatattctgtgaatg

SEQ ID NO: 6265 - DNA, 20 bp, Artificial Sequence
  Synthetic oligonucleotide; AGG chr11 5203692 5203711 5203708 +
atttaatattctgtgaatgt

SEQ ID NO: 6266 - DNA, 20 bp, Artificial Sequence
  Synthetic oligonucleotide; AAG chr11 5203705 5203724 5203721 +
tgaatgtaggtatgtgttaa

SEQ ID NO: 6267 - DNA, 20 bp, Artificial Sequence
  Synthetic oligonucleotide; CAG chr11 5203718 5203737 5203734 +
gtgttaaaagtatctacttt

SEQ ID NO: 6268 - DNA, 20 bp, Artificial Sequence
  Synthetic oligonucleotide; CAG chr11 5203722 5203741 5203738 +
taaaagtatctactttcagc

SEQ ID NO: 6269 - DNA, 20 bp, Artificial Sequence
  Synthetic oligonucleotide; AGG chr11 5203723 5203742 5203739 +
aaaagtatctactttcagcc

SEQ ID NO: 6270 - DNA, 20 bp, Artificial Sequence
  Synthetic oligonucleotide; TGG chr11 5203728 5203747 5203744 +
tatctactttcagccaggct

SEQ ID NO: 6271 - DNA, 20 bp, Artificial Sequence
  Synthetic oligonucleotide; TGG chr11 5203731 5203750 5203747 +
ctactttcagccaggcttgg

SEQ ID NO: 6272 - DNA, 20 bp, Artificial Sequence
  Synthetic oligonucleotide; TAG chr11 5203750 5203769 5203766 +
gtggctcacgcctgtaatcc

SEQ ID NO: 6273 - DNA, 20 bp, Artificial Sequence
  Synthetic oligonucleotide; TGG chr11 5203758 5203777 5203774 +
cgcctgtaatcctagcactt

SEQ ID NO: 6274 - DNA, 20 bp, Artificial Sequence
  Synthetic oligonucleotide; GGG chr11 5203759 5203778 5203775 +
gcctgtaatcctagcacttt

SEQ ID NO: 6275 - DNA, 20 bp, Artificial Sequence
  Synthetic oligonucleotide; GAG chr11 5203761 5203780 5203777 +
ctgtaatcctagcactttgg

SEQ ID NO: 6276 - DNA, 20 bp, Artificial Sequence
  Synthetic oligonucleotide; AGG chr11 5203762 5203781 5203778 +
tgtaatcctagcactttggg

SEQ ID NO: 6277 - DNA, 20 bp, Artificial Sequence
  Synthetic oligonucleotide; GAG chr11 5203767 5203786 5203783 +
tcctagcactttgggaggcc

SEQ ID NO: 6278 - DNA, 20 bp, Artificial Sequence
  Synthetic oligonucleotide; AGG chr11 5203768 5203787 5203784 +
cctagcactttgggaggccg

SEQ ID NO: 6279 - DNA, 20 bp, Artificial Sequence
  Synthetic oligonucleotide; CAG chr11 5203771 5203790 5203787 +
agcactttgggaggccgagg

SEQ ID NO: 6280 - DNA, 20 bp, Artificial Sequence
  Synthetic oligonucleotide; AGG chr11 5203772 5203791 5203788 +
gcactttgggaggccgaggc

SEQ ID NO: 6281 - DNA, 20 bp, Artificial Sequence
  Synthetic oligonucleotide; TGG chr11 5203775 5203794 5203791 +
ctttgggaggccgaggcagg

SEQ ID NO: 6282 - DNA, 20 bp, Artificial Sequence
  Synthetic oligonucleotide; TGG chr11 5203780 5203799 5203796 +
ggaggccgaggcaggtggat

SEQ ID NO: 6283 - DNA, 20 bp, Artificial Sequence
  Synthetic oligonucleotide; GAG chr11 5203785 5203804 5203801 +
ccgaggcaggtggattggct

SEQ ID NO: 6284 - DNA, 20 bp, Artificial Sequence
  Synthetic oligonucleotide; CAG chr11 5203790 5203809 5203806 +
gcaggtggattggctgagct

SEQ ID NO: 6285 - DNA, 20 bp, Artificial Sequence
  Synthetic oligonucleotide; AGG chr11 5203791 5203810 5203807 +
caggtggattggctgagctc

SEQ ID NO: 6286 - DNA, 20 bp, Artificial Sequence
  Synthetic oligonucleotide; GAG chr11 5203793 5203812 5203809 +
ggtggattggctgagctcag

SEQ ID NO: 6287 - DNA, 20 bp, Artificial Sequence
  Synthetic oligonucleotide; TGG chr11 5203797 5203816 5203813 +
gattggctgagctcaggagt

SEQ ID NO: 6288 - DNA, 20 bp, Artificial Sequence
  Synthetic oligonucleotide; GAG chr11 5203799 5203818 5203815 +
ttggctgagctcaggagttg

SEQ ID NO: 6289 - DNA, 20 bp, Artificial Sequence
  Synthetic oligonucleotide; TGG chr11 5203809 5203828 5203825 +
tcaggagttggagaccaacc

SEQ ID NO: 6290 - DNA, 20 bp, Artificial Sequence
  Synthetic oligonucleotide; GGG chr11 5203810 5203829 5203826 +
caggagttggagaccaacct

SEQ ID NO: 6291 - DNA, 20 bp, Artificial Sequence
  Synthetic oligonucleotide; TGG chr11 5203818 5203837 5203834 +
ggagaccaacctgggcaaaa

SEQ ID NO: 6292 - DNA, 20 bp, Artificial Sequence
  Synthetic oligonucleotide; TAG chr11 5203855 5203874 5203871 +
tactaaaacacaaaaataat

SEQ ID NO: 6293 - DNA, 20 bp, Artificial Sequence
  Synthetic oligonucleotide; TGG chr11 5203859 5203878 5203875 +
aaaacacaaaaataattagc

SEQ ID NO: 6294 - DNA, 20 bp, Artificial Sequence
  Synthetic oligonucleotide; GGG chr11 5203860 5203879 5203876 +
aaacacaaaaataattagct

SEQ ID NO: 6295 - DNA, 20 bp, Artificial Sequence
  Synthetic oligonucleotide; TGG chr11 5203865 5203884 5203881 +
caaaaataattagctgggca

SEQ ID NO: 6296 - DNA, 20 bp, Artificial Sequence
  Synthetic oligonucleotide; CAG chr11 5203868 5203887 5203884 +
aaataattagctgggcatgg

SEQ ID NO: 6297 - DNA, 20 bp, Artificial Sequence
  Synthetic oligonucleotide; CAG chr11 5203887 5203906 5203903 +
gcagtgtgctcctgtaatcc

SEQ ID NO: 6298 - DNA, 20 bp, Artificial Sequence
  Synthetic oligonucleotide; TGG chr11 5203895 5203914 5203911 +
ctcctgtaatcccagttact

SEQ ID NO: 6299 - DNA, 20 bp, Artificial Sequence
  Synthetic oligonucleotide; GGG chr11 5203896 5203915 5203912 +
tcctgtaatcccagttactt

SEQ ID NO: 6300 - DNA, 20 bp, Artificial Sequence
  Synthetic oligonucleotide; GAG chr11 5203898 5203917 5203914 +
ctgtaatcccagttacttgg

SEQ ID NO: 6301 - DNA, 20 bp, Artificial Sequence
  Synthetic oligonucleotide; GAG chr11 5203904 5203923 5203920 +
tcccagttacttgggagact

SEQ ID NO: 6302 - DNA, 20 bp, Artificial Sequence
  Synthetic oligonucleotide; AGG chr11 5203905 5203924 5203921 +
cccagttacttgggagactg

SEQ ID NO: 6303 - DNA, 20 bp, Artificial Sequence
  Synthetic oligonucleotide; CAG chr11 5203908 5203927 5203924 +
agttacttgggagactgagg

SEQ ID NO: 6304 - DNA, 20 bp, Artificial Sequence
  Synthetic oligonucleotide; AGG chr11 5203909 5203928 5203925 +
gttacttgggagactgaggc

SEQ ID NO: 6305 - DNA, 20 bp, Artificial Sequence
  Synthetic oligonucleotide; GAG chr11 5203911 5203930 5203927 +
tacttgggagactgaggcag

SEQ ID NO: 6306 - DNA, 20 bp, Artificial Sequence
  Synthetic oligonucleotide; TGG chr11 5203927 5203946 5203943 +
gcaggagaattgcttgatcc

SEQ ID NO: 6307 - DNA, 20 bp, Artificial Sequence
  Synthetic oligonucleotide; GGG chr11 5203928 5203947 5203944 +
caggagaattgcttgatcct

SEQ ID NO: 6308 - DNA, 20 bp, Artificial Sequence
  Synthetic oligonucleotide; GAG chr11 5203930 5203949 5203946 +
ggagaattgcttgatcctgg

SEQ ID NO: 6309 - DNA, 20 bp, Artificial Sequence
  Synthetic oligonucleotide; AGG chr11 5203931 5203950 5203947 +
gagaattgcttgatcctggg

SEQ ID NO: 6310 - DNA, 20 bp, Artificial Sequence
  Synthetic oligonucleotide; TGG chr11 5203934 5203953 5203950 +
aattgcttgatcctgggagg

SEQ ID NO: 6311 - DNA, 20 bp, Artificial Sequence
  Synthetic oligonucleotide; AAG chr11 5203937 5203956 5203953 +
tgcttgatcctgggaggtgg

SEQ ID NO: 6312 - DNA, 20 bp, Artificial Sequence
  Synthetic oligonucleotide; CAG chr11 5203943 5203962 5203959 +
atcctgggaggtggaagttg

SEQ ID NO: 6313 - DNA, 20 bp, Artificial Sequence
  Synthetic oligonucleotide; GAG chr11 5203947 5203966 5203963 +
tgggaggtggaagttgcagt

SEQ ID NO: 6314 - DNA, 20 bp, Artificial Sequence
  Synthetic oligonucleotide; GAG chr11 5203952 5203971 5203968 +
ggtggaagttgcagtgagcc

SEQ ID NO: 6315 - DNA, 20 bp, Artificial Sequence
  Synthetic oligonucleotide; CAG chr11 5203972 5203991 5203988 +
gagatcgcgccattgcactc

SEQ ID NO: 6316 - DNA, 20 bp, Artificial Sequence
  Synthetic oligonucleotide; TGG chr11 5203977 5203996 5203993 +
cgcgccattgcactccagtc

SEQ ID NO: 6317 - DNA, 20 bp, Artificial Sequence
  Synthetic oligonucleotide; GGG chr11 5203978 5203997 5203994 +
gcgccattgcactccagtct

SEQ ID NO: 6318 - DNA, 20 bp, Artificial Sequence
  Synthetic oligonucleotide; CAG chr11 5203984 5204003 5204000 +
ttgcactccagtctgggcga

SEQ ID NO: 6319 - DNA, 20 bp, Artificial Sequence
  Synthetic oligonucleotide; GAG chr11 5203986 5204005 5204002 +
gcactccagtctgggcgaca

SEQ ID NO: 6320 - DNA, 20 bp, Artificial Sequence
  Synthetic oligonucleotide; AAG chr11 5203990 5204009 5204006 +
tccagtctgggcgacagagc

SEQ ID NO: 6321 - DNA, 20 bp, Artificial Sequence
  Synthetic oligonucleotide; AAG chr11 5204004 5204023 5204020 +
cagagcaagactctgtccca

SEQ ID NO: 6322 - DNA, 20 bp, Artificial Sequence
  Synthetic oligonucleotide; AGG chr11 5204005 5204024 5204021 +
agagcaagactctgtcccaa

SEQ ID NO: 6323 - DNA, 20 bp, Artificial Sequence
  Synthetic oligonucleotide; CAG chr11 5204030 5204049 5204046 +
aaaaaaaatctattttcatg

SEQ ID NO: 6324 - DNA, 20 bp, Artificial Sequence
  Synthetic oligonucleotide; AGG chr11 5204031 5204050 5204047 +
aaaaaaatctattttcatgc

SEQ ID NO: 6325 - DNA, 20 bp, Artificial Sequence
  Synthetic oligonucleotide; CAG chr11 5204040 5204059 5204056 +
tattttcatgcaggtttctt

SEQ ID NO: 6326 - DNA, 20 bp, Artificial Sequence
  Synthetic oligonucleotide; AAG chr11 5204053 5204072 5204069 +
gtttcttcagactgactaca

SEQ ID NO: 6327 - DNA, 20 bp, Artificial Sequence
  Synthetic oligonucleotide; AGG chr11 5204054 5204073 5204070 +
tttcttcagactgactacaa

SEQ ID NO: 6328 - DNA, 20 bp, Artificial Sequence
  Synthetic oligonucleotide; CAG chr11 5204060 5204079 5204076 +
cagactgactacaaaggctt

SEQ ID NO: 6329 - DNA, 20 bp, Artificial Sequence
  Synthetic oligonucleotide; TAG chr11 5204065 5204084 5204081 +
tgactacaaaggcttcagac

SEQ ID NO: 6330 - DNA, 20 bp, Artificial Sequence
  Synthetic oligonucleotide; AAG chr11 5204073 5204092 5204089 +
aaggcttcagactagctaca

SEQ ID NO: 6331 - DNA, 20 bp, Artificial Sequence
  Synthetic oligonucleotide; CAG chr11 5204096 5204115 5204112 +
cttaaaaatctactttcatt

SEQ ID NO: 6332 - DNA, 20 bp, Artificial Sequence
  Synthetic oligonucleotide; AGG chr11 5204097 5204116 5204113 +
ttaaaaatctactttcattc

SEQ ID NO: 6333 - DNA, 20 bp, Artificial Sequence
  Synthetic oligonucleotide; CAG chr11 5204106 5204125 5204122 +
tactttcattcaggcttctt

SEQ ID NO: 6334 - DNA, 20 bp, Artificial Sequence
  Synthetic oligonucleotide; TAG chr11 5204111 5204130 5204127 +
tcattcaggcttcttcagac

SEQ ID NO: 6335 - DNA, 20 bp, Artificial Sequence
  Synthetic oligonucleotide; CAG chr11 5204117 5204136 5204133 +
aggcttcttcagactagata

SEQ ID NO: 6336 - DNA, 20 bp, Artificial Sequence
  Synthetic oligonucleotide; AAG chr11 5204120 5204139 5204136 +
cttcttcagactagatacag

SEQ ID NO: 6337 - DNA, 20 bp, Artificial Sequence
  Synthetic oligonucleotide; GAG chr11 5204127 5204146 5204143 +
agactagatacagaagaaat

SEQ ID NO: 6338 - DNA, 20 bp, Artificial Sequence
  Synthetic oligonucleotide; TAG chr11 5204136 5204155 5204152 +
acagaagaaatgagaccatc

SEQ ID NO: 6339 - DNA, 20 bp, Artificial Sequence
  Synthetic oligonucleotide; TGG chr11 5204140 5204159 5204156 +
aagaaatgagaccatctaga

SEQ ID NO: 6340 - DNA, 20 bp, Artificial Sequence
  Synthetic oligonucleotide; GGG chr11 5204141 5204160 5204157 +
agaaatgagaccatctagat

SEQ ID NO: 6341 - DNA, 20 bp, Artificial Sequence
  Synthetic oligonucleotide; GGG chr11 5204142 5204161 5204158 +
gaaatgagaccatctagatg

SEQ ID NO: 6342 - DNA, 20 bp, Artificial Sequence
  Synthetic oligonucleotide; CAG chr11 5204147 5204166 5204163 +
gagaccatctagatggggaa

SEQ ID NO: 6343 - DNA, 20 bp, Artificial Sequence
  Synthetic oligonucleotide; TAG chr11 5204170 5204189 5204186 +
tattatccatgttgccacca

SEQ ID NO: 6344 - DNA, 20 bp, Artificial Sequence
  Synthetic oligonucleotide; GAG chr11 5204172 5204191 5204188 +
ttatccatgttgccaccata

SEQ ID NO: 6345 - DNA, 20 bp, Artificial Sequence
  Synthetic oligonucleotide; CAG chr11 5204180 5204199 5204196 +
gttgccaccatagagactat

SEQ ID NO: 6346 - DNA, 20 bp, Artificial Sequence
  Synthetic oligonucleotide; TGG chr11 5204188 5204207 5204204 +
catagagactatcagccttt

SEQ ID NO: 6347 - DNA, 20 bp, Artificial Sequence
  Synthetic oligonucleotide; GGG chr11 5204189 5204208 5204205 +
atagagactatcagcctttt

SEQ ID NO: 6348 - DNA, 20 bp, Artificial Sequence
  Synthetic oligonucleotide; CAG chr11 5204197 5204216 5204213 +
tatcagccttttgggattac

SEQ ID NO: 6349 - DNA, 20 bp, Artificial Sequence
  Synthetic oligonucleotide; GAG chr11 5204199 5204218 5204215 +
tcagccttttgggattacca

SEQ ID NO: 6350 - DNA, 20 bp, Artificial Sequence
  Synthetic oligonucleotide; TGG chr11 5204214 5204233 5204230 +
taccagagcaaaatacatgt

SEQ ID NO: 6351 - DNA, 20 bp, Artificial Sequence
  Synthetic oligonucleotide; GAG chr11 5204216 5204235 5204232 +
ccagagcaaaatacatgttg

SEQ ID NO: 6352 - DNA, 20 bp, Artificial Sequence
  Synthetic oligonucleotide; AGG chr11 5204217 5204236 5204233 +
cagagcaaaatacatgttgg

SEQ ID NO: 6353 - DNA, 20 bp, Artificial Sequence
  Synthetic oligonucleotide; AAG chr11 5204241 5204260 5204257 +
ttttttaaaatatgttttga

SEQ ID NO: 6354 - DNA, 20 bp, Artificial Sequence
  Synthetic oligonucleotide; AGG chr11 5204242 5204261 5204258 +
tttttaaaatatgttttgaa

SEQ ID NO: 6355 - DNA, 20 bp, Artificial Sequence
  Synthetic oligonucleotide; TAG chr11 5204245 5204264 5204261 +
ttaaaatatgttttgaaagg

SEQ ID NO: 6356 - DNA, 20 bp, Artificial Sequence
  Synthetic oligonucleotide; AGG chr11 5204246 5204265 5204262 +
taaaatatgttttgaaaggt

SEQ ID NO: 6357 - DNA, 20 bp, Artificial Sequence
  Synthetic oligonucleotide; AAG chr11 5204253 5204272 5204269 +
tgttttgaaaggtaggatga

SEQ ID NO: 6358 - DNA, 20 bp, Artificial Sequence
  Synthetic oligonucleotide; GAG chr11 5204255 5204274 5204271 +
ttttgaaaggtaggatgaaa

SEQ ID NO: 6359 - DNA, 20 bp, Artificial Sequence
  Synthetic oligonucleotide; TAG chr11 5204260 5204279 5204276 +
aaaggtaggatgaaagagca

SEQ ID NO: 6360 - DNA, 20 bp, Artificial Sequence
  Synthetic oligonucleotide; AAG chr11 5204270 5204289 5204286 +
tgaaagagcatagttttgat

SEQ ID NO: 6361 - DNA, 20 bp, Artificial Sequence
  Synthetic oligonucleotide; AGG chr11 5204271 5204290 5204287 +
gaaagagcatagttttgata

SEQ ID NO: 6362 - DNA, 20 bp, Artificial Sequence
  Synthetic oligonucleotide; AAG chr11 5204284 5204303 5204300 +
tttgataaggtaaataaatg

SEQ ID NO: 6363 - DNA, 20 bp, Artificial Sequence
  Synthetic oligonucleotide; AAG chr11 5204292 5204311 5204308 +
ggtaaataaatgaagattta

SEQ ID NO: 6364 - DNA, 20 bp, Artificial Sequence
  Synthetic oligonucleotide; AAG chr11 5204301 5204320 5204317 +
atgaagatttaaagaaaaac

SEQ ID NO: 6365 - DNA, 20 bp, Artificial Sequence
  Synthetic oligonucleotide; CAG chr11 5204314 5204333 5204330 +
gaaaaacaagatcaatatgt

SEQ ID NO: 6366 - DNA, 20 bp, Artificial Sequence
  Synthetic oligonucleotide; AGG chr11 5204315 5204334 5204331 +
aaaaacaagatcaatatgtc

SEQ ID NO: 6367 - DNA, 20 bp, Artificial Sequence
  Synthetic oligonucleotide; CAG chr11 5204323 5204342 5204339 +
gatcaatatgtcaggtgtgc

SEQ ID NO: 6368 - DNA, 20 bp, Artificial Sequence
  Synthetic oligonucleotide; AAG chr11 5204353 5204372 5204369 +
acctgtatttaaaaaacaaa

SEQ ID NO: 6369 - DNA, 20 bp, Artificial Sequence
  Synthetic oligonucleotide; CAG chr11 5204361 5204380 5204377 +
ttaaaaaacaaaaagattta

SEQ ID NO: 6370 - DNA, 20 bp, Artificial Sequence
  Synthetic oligonucleotide; AAG chr11 5204370 5204389 5204386 +
aaaaagatttacagttttcc

SEQ ID NO: 6371 - DNA, 20 bp, Artificial Sequence
  Synthetic oligonucleotide; GAG chr11 5204397 5204416 5204413 +
catgttgtgttatgctatct

SEQ ID NO: 6372 - DNA, 20 bp, Artificial Sequence
  Synthetic oligonucleotide; GAG chr11 5204399 5204418 5204415 +
tgttgtgttatgctatctga

SEQ ID NO: 6373 - DNA, 20 bp, Artificial Sequence
  Synthetic oligonucleotide; CAG chr11 5204403 5204422 5204419 +
gtgttatgctatctgagagt

SEQ ID NO: 6374 - DNA, 20 bp, Artificial Sequence
  Synthetic oligonucleotide; TGG chr11 5204410 5204429 5204426 +
gctatctgagagtcagtgta

SEQ ID NO: 6375 - DNA, 20 bp, Artificial Sequence
  Synthetic oligonucleotide; CAG chr11 5204418 5204437 5204434 +
agagtcagtgtatggtatct

SEQ ID NO: 6376 - DNA, 20 bp, Artificial Sequence
  Synthetic oligonucleotide; GAG chr11 5204424 5204443 5204440 +
agtgtatggtatctcagtct

SEQ ID NO: 6377 - DNA, 20 bp, Artificial Sequence
  Synthetic oligonucleotide; CAG chr11 5204431 5204450 5204447 +
ggtatctcagtctgagttcc

SEQ ID NO: 6378 - DNA, 20 bp, Artificial Sequence
  Synthetic oligonucleotide; CAG chr11 5204438 5204457 5204454 +
cagtctgagttcccagcaac

SEQ ID NO: 6379 - DNA, 20 bp, Artificial Sequence
  Synthetic oligonucleotide; TAG chr11 5204464 5204483 5204480 +
aatgcctataataaaataaa

SEQ ID NO: 6380 - DNA, 20 bp, Artificial Sequence
  Synthetic oligonucleotide; GAG chr11 5204466 5204485 5204482 +
tgcctataataaaataaata

SEQ ID NO: 6381 - DNA, 20 bp, Artificial Sequence
  Synthetic oligonucleotide; AAG chr11 5204469 5204488 5204485 +
ctataataaaataaatagag

SEQ ID NO: 6382 - DNA, 20 bp, Artificial Sequence
  Synthetic oligonucleotide; TAG chr11 5204477 5204496 5204493 +
aaataaatagagaagacaaa

SEQ ID NO: 6383 - DNA, 20 bp, Artificial Sequence
  Synthetic oligonucleotide; CAG chr11 5204480 5204499 5204496 +
taaatagagaagacaaatag

SEQ ID NO: 6384 - DNA, 20 bp, Artificial Sequence
  Synthetic oligonucleotide; GAG chr11 5204490 5204509 5204506 +
agacaaatagcagtgaattt

SEQ ID NO: 6385 - DNA, 20 bp, Artificial Sequence
  Synthetic oligonucleotide; TGG chr11 5204495 5204514 5204511 +
aatagcagtgaatttgagtc

SEQ ID NO: 6386 - DNA, 20 bp, Artificial Sequence
  Synthetic oligonucleotide; GAG chr11 5204497 5204516 5204513 +
tagcagtgaatttgagtctg

SEQ ID NO: 6387 - DNA, 20 bp, Artificial Sequence
  Synthetic oligonucleotide; AAG chr11 5204506 5204525 5204522 +
atttgagtctggagaaataa

SEQ ID NO: 6388 - DNA, 20 bp, Artificial Sequence
  Synthetic oligonucleotide; AGG chr11 5204507 5204526 5204523 +
tttgagtctggagaaataaa

SEQ ID NO: 6389 - DNA, 20 bp, Artificial Sequence
  Synthetic oligonucleotide; GGG chr11 5204508 5204527 5204524 +
ttgagtctggagaaataaaa

SEQ ID NO: 6390 - DNA, 20 bp, Artificial Sequence
  Synthetic oligonucleotide; GAG chr11 5204527 5204546 5204543 +
agggttttcgtatcccctct

SEQ ID NO: 6391 - DNA, 20 bp, Artificial Sequence
  Synthetic oligonucleotide; TGG chr11 5204537 5204556 5204553 +
tatcccctctgagcactgtc

SEQ ID NO: 6392 - DNA, 20 bp, Artificial Sequence
  Synthetic oligonucleotide; TGG chr11 5204550 5204569 5204566 +
cactgtctggaatgttgact

SEQ ID NO: 6393 - DNA, 20 bp, Artificial Sequence
  Synthetic oligonucleotide; AAG chr11 5204554 5204573 5204570 +
gtctggaatgttgacttgga

SEQ ID NO: 6394 - DNA, 20 bp, Artificial Sequence
  Synthetic oligonucleotide; CAG chr11 5204578 5204597 5204594 +
aaatctgtgattataataac

SEQ ID NO: 6395 - DNA, 20 bp, Artificial Sequence
  Synthetic oligonucleotide; AGG chr11 5204579 5204598 5204595 +
aatctgtgattataataacc

SEQ ID NO: 6396 - DNA, 20 bp, Artificial Sequence
  Synthetic oligonucleotide; CAG chr11 5204591 5204610 5204607 +
taataaccaggtcattcttt

SEQ ID NO: 6397 - DNA, 20 bp, Artificial Sequence
  Synthetic oligonucleotide; AGG chr11 5204592 5204611 5204608 +
aataaccaggtcattctttc

SEQ ID NO: 6398 - DNA, 20 bp, Artificial Sequence
  Synthetic oligonucleotide; GAG chr11 5204594 5204613 5204610 +
taaccaggtcattctttcag

SEQ ID NO: 6399 - DNA, 20 bp, Artificial Sequence
  Synthetic oligonucleotide; CAG chr11 5204637 5204656 5204653 +
ttaaaactgacctacatatg

SEQ ID NO: 6400 - DNA, 20 bp, Artificial Sequence
  Synthetic oligonucleotide; TGG chr11 5204648 5204667 5204664 +
ctacatatgcagaaatctct

SEQ ID NO: 6401 - DNA, 20 bp, Artificial Sequence
  Synthetic oligonucleotide; CAG chr11 5204674 5204693 5204690 +
tttttttttttctgtctttt

SEQ ID NO: 6402 - DNA, 20 bp, Artificial Sequence
  Synthetic oligonucleotide; TAG chr11 5204713 5204732 5204729 +
attacttgcttactttaaaa

SEQ ID NO: 6403 - DNA, 20 bp, Artificial Sequence
  Synthetic oligonucleotide; AGG chr11 5204714 5204733 5204730 +
ttacttgcttactttaaaat

SEQ ID NO: 6404 - DNA, 20 bp, Artificial Sequence
  Synthetic oligonucleotide; GGG chr11 5204715 5204734 5204731 +
tacttgcttactttaaaata

SEQ ID NO: 6405 - DNA, 20 bp, Artificial Sequence
  Synthetic oligonucleotide; TAG chr11 5204728 5204747 5204744 +
taaaatagggtaatgaccaa

SEQ ID NO: 6406 - DNA, 20 bp, Artificial Sequence
  Synthetic oligonucleotide; AAG chr11 5204742 5204761 5204758 +
gaccaatagtcattgttcca

SEQ ID NO: 6407 - DNA, 20 bp, Artificial Sequence
  Synthetic oligonucleotide; TAG chr11 5204748 5204767 5204764 +
tagtcattgttccaaagaca

SEQ ID NO: 6408 - DNA, 20 bp, Artificial Sequence
  Synthetic oligonucleotide; GAG chr11 5204750 5204769 5204766 +
gtcattgttccaaagacata

SEQ ID NO: 6409 - DNA, 20 bp, Artificial Sequence
  Synthetic oligonucleotide; AAG chr11 5204754 5204773 5204770 +
ttgttccaaagacatagaga

SEQ ID NO: 6410 - DNA, 20 bp, Artificial Sequence
  Synthetic oligonucleotide; AAG chr11 5204771 5204790 5204787 +
agaaagtatattgtgtttaa

SEQ ID NO: 6411 - DNA, 20 bp, Artificial Sequence
  Synthetic oligonucleotide; CAG chr11 5204775 5204794 5204791 +
agtatattgtgtttaaaaga

SEQ ID NO: 6412 - DNA, 20 bp, Artificial Sequence
  Synthetic oligonucleotide; TAG chr11 5204794 5204813 5204810 +
acagcttctttataattcta

SEQ ID NO: 6413 - DNA, 20 bp, Artificial Sequence
  Synthetic oligonucleotide; AAG chr11 5204819 5204838 5204835 +
ctaaaacattcctatttgcc

SEQ ID NO: 6414 - DNA, 20 bp, Artificial Sequence
  Synthetic oligonucleotide; AGG chr11 5204820 5204839 5204836 +
taaaacattcctatttgcca

SEQ ID NO: 6415 - DNA, 20 bp, Artificial Sequence
  Synthetic oligonucleotide; CAG chr11 5204823 5204842 5204839 +
aacattcctatttgccaagg

SEQ ID NO: 6416 - DNA, 20 bp, Artificial Sequence
  Synthetic oligonucleotide; TGG chr11 5204826 5204845 5204842 +
attcctatttgccaaggcag

SEQ ID NO: 6417 - DNA, 20 bp, Artificial Sequence
  Synthetic oligonucleotide; GAG chr11 5204828 5204847 5204844 +
tcctatttgccaaggcagtg

SEQ ID NO: 6418 - DNA, 20 bp, Artificial Sequence
  Synthetic oligonucleotide; TAG chr11 5204844 5204863 5204860 +
agtggagtttttgctgttct

SEQ ID NO: 6419 - DNA, 20 bp, Artificial Sequence
  Synthetic oligonucleotide; AAG chr11 5204861 5204880 5204877 +
tcttagaacataattactga

SEQ ID NO: 6420 - DNA, 20 bp, Artificial Sequence
  Synthetic oligonucleotide; TGG chr11 5204885 5204904 5204901 +
cacccacacatgtcctgcct

SEQ ID NO: 6421 - DNA, 20 bp, Artificial Sequence
  Synthetic oligonucleotide; AAG chr11 5204914 5204933 5204930 +
aattgtatgtccatccttta

SEQ ID NO: 6422 - DNA, 20 bp, Artificial Sequence
  Synthetic oligonucleotide; AGG chr11 5204915 5204934 5204931 +
attgtatgtccatcctttaa

SEQ ID NO: 6423 - DNA, 20 bp, Artificial Sequence
  Synthetic oligonucleotide; TGG chr11 5204930 5204949 5204946 +
tttaaaggtcattcctttaa

SEQ ID NO: 6424 - DNA, 20 bp, Artificial Sequence
  Synthetic oligonucleotide; TGG chr11 5204940 5204959 5204956 +
attcctttaatggtcttttc

SEQ ID NO: 6425 - DNA, 20 bp, Artificial Sequence
  Synthetic oligonucleotide; TAG chr11 5204950 5204969 5204966 +
tggtcttttctggacaccac

SEQ ID NO: 6426 - DNA, 20 bp, Artificial Sequence
  Synthetic oligonucleotide; AGG chr11 5204951 5204970 5204967 +
ggtcttttctggacaccact

SEQ ID NO: 6427 - DNA, 20 bp, Artificial Sequence
  Synthetic oligonucleotide; GGG chr11 5204952 5204971 5204968 +
gtcttttctggacaccacta

SEQ ID NO: 6428 - DNA, 20 bp, Artificial Sequence
  Synthetic oligonucleotide; GGG chr11 5204953 5204972 5204969 +
tcttttctggacaccactag

SEQ ID NO: 6429 - DNA, 20 bp, Artificial Sequence
  Synthetic oligonucleotide; CAG chr11 5204957 5204976 5204973 +
ttctggacaccactaggggt

SEQ ID NO: 6430 - DNA, 20 bp, Artificial Sequence
  Synthetic oligonucleotide; AAG chr11 5204960 5204979 5204976 +
tggacaccactaggggtcag

SEQ ID NO: 6431 - DNA, 20 bp, Artificial Sequence
  Synthetic oligonucleotide; TAG chr11 5204963 5204982 5204979 +
acaccactaggggtcagaag

SEQ ID NO: 6432 - DNA, 20 bp, Artificial Sequence
  Synthetic oligonucleotide; CAG chr11 5204994 5205013 5205010 +
actttcttccctccctactt

SEQ ID NO: 6433 - DNA, 20 bp, Artificial Sequence
  Synthetic oligonucleotide; AAG chr11 5205005 5205024 5205021 +
tccctacttcagtgatgcat

SEQ ID NO: 6434 - DNA, 20 bp, Artificial Sequence
  Synthetic oligonucleotide; AGG chr11 5205006 5205025 5205022 +
ccctacttcagtgatgcata

SEQ ID NO: 6435 - DNA, 20 bp, Artificial Sequence
  Synthetic oligonucleotide; CAG chr11 5205009 5205028 5205025 +
tacttcagtgatgcataagg

SEQ ID NO: 6436 - DNA, 20 bp, Artificial Sequence
  Synthetic oligonucleotide; TAG chr11 5205020 5205039 5205036 +
tgcataaggcagatctgctt

SEQ ID NO: 6437 - DNA, 20 bp, Artificial Sequence
  Synthetic oligonucleotide; AAG chr11 5205026 5205045 5205042 +
aggcagatctgctttagtgt

SEQ ID NO: 6438 - DNA, 20 bp, Artificial Sequence
  Synthetic oligonucleotide; GAG chr11 5205030 5205049 5205046 +
agatctgctttagtgtaagc

SEQ ID NO: 6439 - DNA, 20 bp, Artificial Sequence
  Synthetic oligonucleotide; AGG chr11 5205031 5205050 5205047 +
gatctgctttagtgtaagcg

SEQ ID NO: 6440 - DNA, 20 bp, Artificial Sequence
  Synthetic oligonucleotide; CAG chr11 5205035 5205054 5205051 +
tgctttagtgtaagcgaggt

SEQ ID NO: 6441 - DNA, 20 bp, Artificial Sequence
  Synthetic oligonucleotide; AGG chr11 5205036 5205055 5205052 +
gctttagtgtaagcgaggtc

SEQ ID NO: 6442 - DNA, 20 bp, Artificial Sequence
  Synthetic oligonucleotide; AAG chr11 5205044 5205063 5205060 +
gtaagcgaggtcaggccctc

SEQ ID NO: 6443 - DNA, 20 bp, Artificial Sequence
  Synthetic oligonucleotide; GAG chr11 5205046 5205065 5205062 +
aagcgaggtcaggccctcaa

SEQ ID NO: 6444 - DNA, 20 bp, Artificial Sequence
  Synthetic oligonucleotide; TGG chr11 5205052 5205071 5205068 +
ggtcaggccctcaagagtct

SEQ ID NO: 6445 - DNA, 20 bp, Artificial Sequence
  Synthetic oligonucleotide; GGG chr11 5205053 5205072 5205069 +
gtcaggccctcaagagtctt

SEQ ID NO: 6446 - DNA, 20 bp, Artificial Sequence
  Synthetic oligonucleotide; TGG chr11 5205057 5205076 5205073 +
ggccctcaagagtcttggga

SEQ ID NO: 6447 - DNA, 20 bp, Artificial Sequence
  Synthetic oligonucleotide; AAG chr11 5205063 5205082 5205079 +
caagagtcttgggatggctg

SEQ ID NO: 6448 - DNA, 20 bp, Artificial Sequence
  Synthetic oligonucleotide; GAG chr11 5205065 5205084 5205081 +
agagtcttgggatggctgaa

SEQ ID NO: 6449 - DNA, 20 bp, Artificial Sequence
  Synthetic oligonucleotide; AGG chr11 5205066 5205085 5205082 +
gagtcttgggatggctgaag

SEQ ID NO: 6450 - DNA, 20 bp, Artificial Sequence
  Synthetic oligonucleotide; AAG chr11 5205070 5205089 5205086 +
cttgggatggctgaagaggt

SEQ ID NO: 6451 - DNA, 20 bp, Artificial Sequence
  Synthetic oligonucleotide; AAG chr11 5205083 5205102 5205099 +
aagaggtaagaacattctat

SEQ ID NO: 6452 - DNA, 20 bp, Artificial Sequence
  Synthetic oligonucleotide; AAG chr11 5205095 5205114 5205111 +
cattctataagacttgtcca

SEQ ID NO: 6453 - DNA, 20 bp, Artificial Sequence
  Synthetic oligonucleotide; TAG chr11 5205127 5205146 5205143 +
tttaatgattctgaatatgc

SEQ ID NO: 6454 - DNA, 20 bp, Artificial Sequence
  Synthetic oligonucleotide; CAG chr11 5205132 5205151 5205148 +
tgattctgaatatgctagtt

SEQ ID NO: 6455 - DNA, 20 bp, Artificial Sequence
  Synthetic oligonucleotide; GAG chr11 5205134 5205153 5205150 +
attctgaatatgctagttca

SEQ ID NO: 6456 - DNA, 20 bp, Artificial Sequence
  Synthetic oligonucleotide; GAG chr11 5205136 5205155 5205152 +
tctgaatatgctagttcaga

SEQ ID NO: 6457 - DNA, 20 bp, Artificial Sequence
  Synthetic oligonucleotide; AAG chr11 5205160 5205179 5205176 +
atctatttaccacaaacctg

SEQ ID NO: 6458 - DNA, 20 bp, Artificial Sequence
  Synthetic oligonucleotide; TAG chr11 5205163 5205182 5205179 +
tatttaccacaaacctgaag

SEQ ID NO: 6459 - DNA, 20 bp, Artificial Sequence
  Synthetic oligonucleotide; AGG chr11 5205164 5205183 5205180 +
atttaccacaaacctgaagt

SEQ ID NO: 6460 - DNA, 20 bp, Artificial Sequence
  Synthetic oligonucleotide; CAG chr11 5205177 5205196 5205193 +
ctgaagtaggcttaaatttc

SEQ ID NO: 6461 - DNA, 20 bp, Artificial Sequence
  Synthetic oligonucleotide; TGG chr11 5205190 5205209 5205206 +
aaatttccagtttacctgaa

SEQ ID NO: 6462 - DNA, 20 bp, Artificial Sequence
  Synthetic oligonucleotide; TAG chr11 5205205 5205224 5205221 +
ctgaatggttatgacctaat

SEQ ID NO: 6463 - DNA, 20 bp, Artificial Sequence
  Synthetic oligonucleotide; GAG chr11 5205207 5205226 5205223 +
gaatggttatgacctaatta

SEQ ID NO: 6464 - DNA, 20 bp, Artificial Sequence
  Synthetic oligonucleotide; AGG chr11 5205208 5205227 5205224 +
aatggttatgacctaattag

SEQ ID NO: 6465 - DNA, 20 bp, Artificial Sequence
  Synthetic oligonucleotide; TAG chr11 5205231 5205250 5205247 +
aatgactttataaacatata

SEQ ID NO: 6466 - DNA, 20 bp, Artificial Sequence
  Synthetic oligonucleotide; TAG chr11 5205245 5205264 5205261 +
catatatagatacaaatata

SEQ ID NO: 6467 - DNA, 20 bp, Artificial Sequence
  Synthetic oligonucleotide; AAG chr11 5205289 5205308 5205305 +
atatttattatatattatat

SEQ ID NO: 6468 - DNA, 20 bp, Artificial Sequence
  Synthetic oligonucleotide; TAG chr11 5205304 5205323 5205320 +
tatataagcataaaatgtaa

SEQ ID NO: 6469 - DNA, 20 bp, Artificial Sequence
  Synthetic oligonucleotide; TAG chr11 5205461 5205480 5205477 +
tatgtatatacacatttatc

SEQ ID NO: 6470 - DNA, 20 bp, Artificial Sequence
  Synthetic oligonucleotide; AAG chr11 5205495 5205514 5205511 +
tatttcattatatattttat

SEQ ID NO: 6471 - DNA, 20 bp, Artificial Sequence
  Synthetic oligonucleotide; TAG chr11 5205546 5205565 5205562 +
ctaaaatattttttaaaaat

SEQ ID NO: 6472 - DNA, 20 bp, Artificial Sequence
  Synthetic oligonucleotide; TAG chr11 5205557 5205576 5205573 +
tttaaaaattagccatacct

SEQ ID NO: 6473 - DNA, 20 bp, Artificial Sequence
  Synthetic oligonucleotide; AAG chr11 5205560 5205579 5205576 +
aaaaattagccataccttag

SEQ ID NO: 6474 - DNA, 20 bp, Artificial Sequence
  Synthetic oligonucleotide; TGG chr11 5205584 5205603 5205600 +
attataaaaaatatatgaca

SEQ ID NO: 6475 - DNA, 20 bp, Artificial Sequence
  Synthetic oligonucleotide; TAG chr11 5205603 5205622 5205619 +
atggtccatctgttcaactg

SEQ ID NO: 6476 - DNA, 20 bp, Artificial Sequence
  Synthetic oligonucleotide; GAG chr11 5205620 5205639 5205636 +
ctgtagccatctaaccattt

SEQ ID NO: 6477 - DNA, 20 bp, Artificial Sequence
  Synthetic oligonucleotide; AAG chr11 5205623 5205642 5205639 +
tagccatctaaccatttgag

SEQ ID NO: 6478 - DNA, 20 bp, Artificial Sequence
  Synthetic oligonucleotide; AAG chr11 5205633 5205652 5205649 +
accatttgagaagtttttat

SEQ ID NO: 6479 - DNA, 20 bp, Artificial Sequence
  Synthetic oligonucleotide; TAG chr11 5205641 5205660 5205657 +
agaagtttttataagattta

SEQ ID NO: 6480 - DNA, 20 bp, Artificial Sequence
  Synthetic oligonucleotide; AAG chr11 5205679 5205698 5205695 +
tgacataaatcatctcatgc

SEQ ID NO: 6481 - DNA, 20 bp, Artificial Sequence
  Synthetic oligonucleotide; TAG chr11 5205683 5205702 5205699 +
ataaatcatctcatgcaaga

SEQ ID NO: 6482 - DNA, 20 bp, Artificial Sequence
  Synthetic oligonucleotide; TGG chr11 5205700 5205719 5205716 +
agatagtgtatttgttttgt

SEQ ID NO: 6483 - DNA, 20 bp, Artificial Sequence
  Synthetic oligonucleotide; CAG chr11 5205725 5205744 5205741 +
ttaatatgttcccttttctt

SEQ ID NO: 6484 - DNA, 20 bp, Artificial Sequence
  Synthetic oligonucleotide; GAG chr11 5205735 5205754 5205751 +
cccttttcttcagaaaatgt

SEQ ID NO: 6485 - DNA, 20 bp, Artificial Sequence
  Synthetic oligonucleotide; CAG chr11 5205739 5205758 5205755 +
tttcttcagaaaatgtgaga

SEQ ID NO: 6486 - DNA, 20 bp, Artificial Sequence
  Synthetic oligonucleotide; AAG chr11 5205762 5205781 5205778 +
cttaaaataaaattaactat

SEQ ID NO: 6487 - DNA, 20 bp, Artificial Sequence
  Synthetic oligonucleotide; TGG chr11 5205769 5205788 5205785 +
taaaattaactataagaaac

SEQ ID NO: 6488 - DNA, 20 bp, Artificial Sequence
  Synthetic oligonucleotide; AAG chr11 5205786 5205805 5205802 +
aactggtaaacactgaatga

SEQ ID NO: 6489 - DNA, 20 bp, Artificial Sequence
  Synthetic oligonucleotide; AAG chr11 5205789 5205808 5205805 +
tggtaaacactgaatgaaag

SEQ ID NO: 6490 - DNA, 20 bp, Artificial Sequence
  Synthetic oligonucleotide; AAG chr11 5205798 5205817 5205814 +
ctgaatgaaagaagaaaacc

SEQ ID NO: 6491 - DNA, 20 bp, Artificial Sequence
  Synthetic oligonucleotide; CAG chr11 5205801 5205820 5205817 +
aatgaaagaagaaaaccaag

SEQ ID NO: 6492 - DNA, 20 bp, Artificial Sequence
  Synthetic oligonucleotide; AAG chr11 5205806 5205825 5205822 +
aagaagaaaaccaagcagaa

SEQ ID NO: 6493 - DNA, 20 bp, Artificial Sequence
  Synthetic oligonucleotide; AAG chr11 5205812 5205831 5205828 +
aaaaccaagcagaaaagtaa

SEQ ID NO: 6494 - DNA, 20 bp, Artificial Sequence
  Synthetic oligonucleotide; AGG chr11 5205813 5205832 5205829 +
aaaccaagcagaaaagtaaa

SEQ ID NO: 6495 - DNA, 20 bp, Artificial Sequence
  Synthetic oligonucleotide; GAG chr11 5205815 5205834 5205831 +
accaagcagaaaagtaaaag

SEQ ID NO: 6496 - DNA, 20 bp, Artificial Sequence
  Synthetic oligonucleotide; AGG chr11 5205816 5205835 5205832 +
ccaagcagaaaagtaaaagg

SEQ ID NO: 6497 - DNA, 20 bp, Artificial Sequence
  Synthetic oligonucleotide; TGG chr11 5205860 5205879 5205876 +
aaaaacattttttatttgcc

SEQ ID NO: 6498 - DNA, 20 bp, Artificial Sequence
  Synthetic oligonucleotide; AAG chr11 5205871 5205890 5205887 +
ttatttgcctggcaaataat

SEQ ID NO: 6499 - DNA, 20 bp, Artificial Sequence
  Synthetic oligonucleotide; TGG chr11 5205886 5205905 5205902 +
ataataagtgcatatattaa

SEQ ID NO: 6500 - DNA, 20 bp, Artificial Sequence
  Synthetic oligonucleotide; TGG chr11 5205937 5205956 5205953 +
ataatatatataatatgtta

SEQ ID NO: 6501 - DNA, 20 bp, Artificial Sequence
  Synthetic oligonucleotide; GGG chr11 5205938 5205957 5205954 +
taatatatataatatgttat

SEQ ID NO: 6502 - DNA, 20 bp, Artificial Sequence
  Synthetic oligonucleotide; TAG chr11 5205974 5205993 5205990 +
tttgatctatatatacattg

SEQ ID NO: 6503 - DNA, 20 bp, Artificial Sequence
  Synthetic oligonucleotide; GAG chr11 5205976 5205995 5205992 +
tgatctatatatacattgta

SEQ ID NO: 6504 - DNA, 20 bp, Artificial Sequence
  Synthetic oligonucleotide; GAG chr11 5205978 5205997 5205994 +
atctatatatacattgtaga

SEQ ID NO: 6505 - DNA, 20 bp, Artificial Sequence
  Synthetic oligonucleotide; GAG chr11 5205980 5205999 5205996 +
ctatatatacattgtagaga

SEQ ID NO: 6506 - DNA, 20 bp, Artificial Sequence
  Synthetic oligonucleotide; AAG chr11 5205989 5206008 5206005 +
cattgtagagagagtctatc

SEQ ID NO: 6507 - DNA, 20 bp, Artificial Sequence
  Synthetic oligonucleotide; TAG chr11 5205997 5206016 5206013 +
agagagtctatcaagctaat

SEQ ID NO: 6508 - DNA, 20 bp, Artificial Sequence
  Synthetic oligonucleotide; TGG chr11 5206028 5206047 5206044 +
tcaccttccaactttttttg

SEQ ID NO: 6509 - DNA, 20 bp, Artificial Sequence
  Synthetic oligonucleotide; GAG chr11 5206032 5206051 5206048 +
cttccaactttttttgtggt

SEQ ID NO: 6510 - DNA, 20 bp, Artificial Sequence
  Synthetic oligonucleotide; TAG chr11 5206055 5206074 5206071 +
aacataaaatatttattttt

SEQ ID NO: 6511 - DNA, 20 bp, Artificial Sequence
  Synthetic oligonucleotide; CAG chr11 5206106 5206125 5206122 +
tattaactgtgttcactatg

SEQ ID NO: 6512 - DNA, 20 bp, Artificial Sequence
  Synthetic oligonucleotide; GAG chr11 5206112 5206131 5206128 +
ctgtgttcactatgcagtgt

SEQ ID NO: 6513 - DNA, 20 bp, Artificial Sequence
  Synthetic oligonucleotide; GAG chr11 5206114 5206133 5206130 +
gtgttcactatgcagtgtga

SEQ ID NO: 6514 - DNA, 20 bp, Artificial Sequence
  Synthetic oligonucleotide; TAG chr11 5206137 5206156 5206153 +
atcactaaaacttattcctc

SEQ ID NO: 6515 - DNA, 20 bp, Artificial Sequence
  Synthetic oligonucleotide; AAG chr11 5206148 5206167 5206164 +
ttattcctctagtctaactg

SEQ ID NO: 6516 - DNA, 20 bp, Artificial Sequence
  Synthetic oligonucleotide; CAG chr11 5206189 5206208 5206205 +
ccatccctcctctacactct

SEQ ID NO: 6517 - DNA, 20 bp, Artificial Sequence
  Synthetic oligonucleotide; CAG chr11 5206193 5206212 5206209 +
ccctcctctacactctcagt

SEQ ID NO: 6518 - DNA, 20 bp, Artificial Sequence
  Synthetic oligonucleotide; TGG chr11 5206200 5206219 5206216 +
ctacactctcagtcagccta

SEQ ID NO: 6519 - DNA, 20 bp, Artificial Sequence
  Synthetic oligonucleotide; CAG chr11 5206275 5206294 5206291 +
cttaaatatattaaaatgaa

SEQ ID NO: 6520 - DNA, 20 bp, Artificial Sequence
  Synthetic oligonucleotide; GAG chr11 5206288 5206307 5206304 +
aaatgaacagttaaatttat

SEQ ID NO: 6521 - DNA, 20 bp, Artificial Sequence
  Synthetic oligonucleotide; AGG chr11 5206289 5206308 5206305 +
aatgaacagttaaatttatg

SEQ ID NO: 6522 - DNA, 20 bp, Artificial Sequence
  Synthetic oligonucleotide; AAG chr11 5206322 5206341 5206338 +
aaaactattacacatatttt

SEQ ID NO: 6523 - DNA, 20 bp, Artificial Sequence
  Synthetic oligonucleotide; TAG chr11 5206342 5206361 5206358 +
aagttgtcctctgaaaattc

SEQ ID NO: 6524 - DNA, 20 bp, Artificial Sequence
  Synthetic oligonucleotide; AAG chr11 5206371 5206390 5206387 +
acttcaatacccttattttt

SEQ ID NO: 6525 - DNA, 20 bp, Artificial Sequence
  Synthetic oligonucleotide; AAG chr11 5206377 5206396 5206393 +
atacccttatttttaagata

SEQ ID NO: 6526 - DNA, 20 bp, Artificial Sequence
  Synthetic oligonucleotide; AGG chr11 5206378 5206397 5206394 +
tacccttatttttaagataa

SEQ ID NO: 6527 - DNA, 20 bp, Artificial Sequence
  Synthetic oligonucleotide; AAG chr11 5206389 5206408 5206405 +
ttaagataaaggaaattgta

SEQ ID NO: 6528 - DNA, 20 bp, Artificial Sequence
  Synthetic oligonucleotide; AGG chr11 5206390 5206409 5206406 +
taagataaaggaaattgtaa

SEQ ID NO: 6529 - DNA, 20 bp, Artificial Sequence
  Synthetic oligonucleotide; AAG chr11 5206399 5206418 5206415 +
ggaaattgtaaaggctttct

SEQ ID NO: 6530 - DNA, 20 bp, Artificial Sequence
  Synthetic oligonucleotide; GAG chr11 5206407 5206426 5206423 +
taaaggctttctaagaaatc

SEQ ID NO: 6531 - DNA, 20 bp, Artificial Sequence
  Synthetic oligonucleotide; TAG chr11 5206420 5206439 5206436 +
agaaatcgagtacccatacc

SEQ ID NO: 6532 - DNA, 20 bp, Artificial Sequence
  Synthetic oligonucleotide; AGG chr11 5206421 5206440 5206437 +
gaaatcgagtacccatacct

SEQ ID NO: 6533 - DNA, 20 bp, Artificial Sequence
  Synthetic oligonucleotide; TAG chr11 5206428 5206447 5206444 +
agtacccatacctaggctgc

SEQ ID NO: 6534 - DNA, 20 bp, Artificial Sequence
  Synthetic oligonucleotide; CAG chr11 5206435 5206454 5206451 +
atacctaggctgctagactc

SEQ ID NO: 6535 - DNA, 20 bp, Artificial Sequence
  Synthetic oligonucleotide; AGG chr11 5206436 5206455 5206452 +
tacctaggctgctagactcc

SEQ ID NO: 6536 - DNA, 20 bp, Artificial Sequence
  Synthetic oligonucleotide; CAG chr11 5206452 5206471 5206468 +
ctccaggtccaatttttctc

SEQ ID NO: 6537 - DNA, 20 bp, Artificial Sequence
  Synthetic oligonucleotide; AGG chr11 5206453 5206472 5206469 +
tccaggtccaatttttctcc

SEQ ID NO: 6538 - DNA, 20 bp, Artificial Sequence
  Synthetic oligonucleotide; GGG chr11 5206454 5206473 5206470 +
ccaggtccaatttttctcca

SEQ ID NO: 6539 - DNA, 20 bp, Artificial Sequence
  Synthetic oligonucleotide; GGG chr11 5206455 5206474 5206471 +
caggtccaatttttctccag

SEQ ID NO: 6540 - DNA, 20 bp, Artificial Sequence
  Synthetic oligonucleotide; GGG chr11 5206456 5206475 5206472 +
aggtccaatttttctccagg

SEQ ID NO: 6541 - DNA, 20 bp, Artificial Sequence
  Synthetic oligonucleotide; TGG chr11 5206465 5206484 5206481 +
ttttctccagggggttacta

SEQ ID NO: 6542 - DNA, 20 bp, Artificial Sequence
  Synthetic oligonucleotide; CAG chr11 5206471 5206490 5206487 +
ccagggggttactatggctt

SEQ ID NO: 6543 - DNA, 20 bp, Artificial Sequence
  Synthetic oligonucleotide; AGG chr11 5206472 5206491 5206488 +
cagggggttactatggcttc

SEQ ID NO: 6544 - DNA, 20 bp, Artificial Sequence
  Synthetic oligonucleotide; GGG chr11 5206473 5206492 5206489 +
agggggttactatggcttca

SEQ ID NO: 6545 - DNA, 20 bp, Artificial Sequence
  Synthetic oligonucleotide; AAG chr11 5206476 5206495 5206492 +
gggttactatggcttcaggg

SEQ ID NO: 6546 - DNA, 20 bp, Artificial Sequence
  Synthetic oligonucleotide; CAG chr11 5206499 5206518 5206515 +
ctatctataatcaccatctc

SEQ ID NO: 6547 - DNA, 20 bp, Artificial Sequence
  Synthetic oligonucleotide; CAG chr11 5206529 5206548 5206545 +
ctcactttctcatcaccaca

SEQ ID NO: 6548 - DNA, 20 bp, Artificial Sequence
  Synthetic oligonucleotide; TGG chr11 5206532 5206551 5206548 +
actttctcatcaccacacag

SEQ ID NO: 6549 - DNA, 20 bp, Artificial Sequence
  Synthetic oligonucleotide; AAG chr11 5206538 5206557 5206554 +
tcatcaccacacagtggaat

SEQ ID NO: 6550 - DNA, 20 bp, Artificial Sequence
  Synthetic oligonucleotide; TAG chr11 5206543 5206562 5206559 +
accacacagtggaataagaa

SEQ ID NO: 6551 - DNA, 20 bp, Artificial Sequence
  Synthetic oligonucleotide; TGG chr11 5206549 5206568 5206565 +
cagtggaataagaatagttt

SEQ ID NO: 6552 - DNA, 20 bp, Artificial Sequence
  Synthetic oligonucleotide; CAG chr11 5206552 5206571 5206568 +
tggaataagaatagttttgg

SEQ ID NO: 6553 - DNA, 20 bp, Artificial Sequence
  Synthetic oligonucleotide; AAG chr11 5206563 5206582 5206579 +
tagttttggcagcaataaaa

SEQ ID NO: 6554 - DNA, 20 bp, Artificial Sequence
  Synthetic oligonucleotide; TAG chr11 5206582 5206601 5206598 +
aaagtaatgccatatcaaat

SEQ ID NO: 6555 - DNA, 20 bp, Artificial Sequence
  Synthetic oligonucleotide; AAG chr11 5206587 5206606 5206603 +
aatgccatatcaaattagta

SEQ ID NO: 6556 - DNA, 20 bp, Artificial Sequence
  Synthetic oligonucleotide; CAG chr11 5206594 5206613 5206610 +
tatcaaattagtaaagcctt

SEQ ID NO: 6557 - DNA, 20 bp, Artificial Sequence
  Synthetic oligonucleotide; AAG chr11 5206600 5206619 5206616 +
attagtaaagccttcagaaa

SEQ ID NO: 6558 - DNA, 20 bp, Artificial Sequence
  Synthetic oligonucleotide; CAG chr11 5206616 5206635 5206632 +
gaaaaagtatgaatattaca

SEQ ID NO: 6559 - DNA, 20 bp, Artificial Sequence
  Synthetic oligonucleotide; TAG chr11 5206631 5206650 5206647 +
ttacacagttacacttatat

SEQ ID NO: 6560 - DNA, 20 bp, Artificial Sequence
  Synthetic oligonucleotide; AAG chr11 5206698 5206717 5206714 +
tgtctgattaaatgttatta

SEQ ID NO: 6561 - DNA, 20 bp, Artificial Sequence
  Synthetic oligonucleotide; CAG chr11 5206736 5206755 5206752 +
tatatactactattaatttc

SEQ ID NO: 6562 - DNA, 20 bp, Artificial Sequence
  Synthetic oligonucleotide; AAG chr11 5206755 5206774 5206771 +
ccagttctatctttctgttc

SEQ ID NO: 6563 - DNA, 20 bp, Artificial Sequence
  Synthetic oligonucleotide; AAG chr11 5206760 5206779 5206776 +
tctatctttctgttcaagaa

SEQ ID NO: 6564 - DNA, 20 bp, Artificial Sequence
  Synthetic oligonucleotide; GAG chr11 5206768 5206787 5206784 +
tctgttcaagaaaagaatgt

SEQ ID NO: 6565 - DNA, 20 bp, Artificial Sequence
  Synthetic oligonucleotide; AAG chr11 5206771 5206790 5206787 +
gttcaagaaaagaatgtgag

SEQ ID NO: 6566 - DNA, 20 bp, Artificial Sequence
  Synthetic oligonucleotide; TAG chr11 5206779 5206798 5206795 +
aaagaatgtgagaagtaaat

SEQ ID NO: 6567 - DNA, 20 bp, Artificial Sequence
  Synthetic oligonucleotide; CAG chr11 5206811 5206830 5206827 +
tttgcctacttcatccccaa

SEQ ID NO: 6568 - DNA, 20 bp, Artificial Sequence
  Synthetic oligonucleotide; GAG chr11 5206813 5206832 5206829 +
tgcctacttcatccccaaca

SEQ ID NO: 6569 - DNA, 20 bp, Artificial Sequence
  Synthetic oligonucleotide; AGG chr11 5206814 5206833 5206830 +
gcctacttcatccccaacag

SEQ ID NO: 6570 - DNA, 20 bp, Artificial Sequence
  Synthetic oligonucleotide; GAG chr11 5206816 5206835 5206832 +
ctacttcatccccaacagag

SEQ ID NO: 6571 - DNA, 20 bp, Artificial Sequence
  Synthetic oligonucleotide; TGG chr11 5206838 5206857 5206854 +
gatcatgactatatcaataa

SEQ ID NO: 6572 - DNA, 20 bp, Artificial Sequence
  Synthetic oligonucleotide; GAG chr11 5206840 5206859 5206856 +
tcatgactatatcaataatg

SEQ ID NO: 6573 - DNA, 20 bp, Artificial Sequence
  Synthetic oligonucleotide; TGG chr11 5206845 5206864 5206861 +
actatatcaataatggagcc

SEQ ID NO: 6574 - DNA, 20 bp, Artificial Sequence
  Synthetic oligonucleotide; GGG chr11 5206846 5206865 5206862 +
ctatatcaataatggagcct

SEQ ID NO: 6575 - DNA, 20 bp, Artificial Sequence
  Synthetic oligonucleotide; CAG chr11 5206851 5206870 5206867 +
tcaataatggagcctgggcc

SEQ ID NO: 6576 - DNA, 20 bp, Artificial Sequence
  Synthetic oligonucleotide; TGG chr11 5206859 5206878 5206875 +
ggagcctgggcccagacaac

SEQ ID NO: 6577 - DNA, 20 bp, Artificial Sequence
  Synthetic oligonucleotide; AAG chr11 5206864 5206883 5206880 +
ctgggcccagacaactggtt

SEQ ID NO: 6578 - DNA, 20 bp, Artificial Sequence
  Synthetic oligonucleotide; GAG chr11 5206866 5206885 5206882 +
gggcccagacaactggttaa

SEQ ID NO: 6579 - DNA, 20 bp, Artificial Sequence
  Synthetic oligonucleotide; GAG chr11 5206868 5206887 5206884 +
gcccagacaactggttaaga

SEQ ID NO: 6580 - DNA, 20 bp, Artificial Sequence
  Synthetic oligonucleotide; GAG chr11 5206870 5206889 5206886 +
ccagacaactggttaagaga

SEQ ID NO: 6581 - DNA, 20 bp, Artificial Sequence
  Synthetic oligonucleotide; AGG chr11 5206871 5206890 5206887 +
cagacaactggttaagagag

SEQ ID NO: 6582 - DNA, 20 bp, Artificial Sequence
  Synthetic oligonucleotide; CAG chr11 5206886 5206905 5206902 +
gagagaggtcattctgacct

SEQ ID NO: 6583 - DNA, 20 bp, Artificial Sequence
  Synthetic oligonucleotide; TAG chr11 5206893 5206912 5206909 +
gtcattctgacctcagaaca

SEQ ID NO: 6584 - DNA, 20 bp, Artificial Sequence
  Synthetic oligonucleotide; AGG chr11 5206894 5206913 5206910 +
tcattctgacctcagaacat

SEQ ID NO: 6585 - DNA, 20 bp, Artificial Sequence
  Synthetic oligonucleotide; GAG chr11 5206896 5206915 5206912 +
attctgacctcagaacatag

SEQ ID NO: 6586 - DNA, 20 bp, Artificial Sequence
  Synthetic oligonucleotide; GAG chr11 5206898 5206917 5206914 +
tctgacctcagaacatagga

SEQ ID NO: 6587 - DNA, 20 bp, Artificial Sequence
  Synthetic oligonucleotide; TGG chr11 5206902 5206921 5206918 +
acctcagaacataggagaga

SEQ ID NO: 6588 - DNA, 20 bp, Artificial Sequence
  Synthetic oligonucleotide; CAG chr11 5206918 5206937 5206934 +
gagatggatattgtacacca

SEQ ID NO: 6589 - DNA, 20 bp, Artificial Sequence
  Synthetic oligonucleotide; GAG chr11 5206920 5206939 5206936 +
gatggatattgtacaccaca

SEQ ID NO: 6590 - DNA, 20 bp, Artificial Sequence
  Synthetic oligonucleotide; CAG chr11 5206925 5206944 5206941 +
atattgtacaccacagagtc

SEQ ID NO: 6591 - DNA, 20 bp, Artificial Sequence
  Synthetic oligonucleotide; AGG chr11 5206926 5206945 5206942 +
tattgtacaccacagagtcc

SEQ ID NO: 6592 - DNA, 20 bp, Artificial Sequence
  Synthetic oligonucleotide; TAG chr11 5206934 5206953 5206950 +
accacagagtccaggatgac

SEQ ID NO: 6593 - DNA, 20 bp, Artificial Sequence
  Synthetic oligonucleotide; CAG chr11 5206937 5206956 5206953 +
acagagtccaggatgactag

SEQ ID NO: 6594 - DNA, 20 bp, Artificial Sequence
  Synthetic oligonucleotide; AAG chr11 5206942 5206961 5206958 +
gtccaggatgactagcagtg

SEQ ID NO: 6595 - DNA, 20 bp, Artificial Sequence
  Synthetic oligonucleotide; AGG chr11 5206943 5206962 5206959 +
tccaggatgactagcagtga

SEQ ID NO: 6596 - DNA, 20 bp, Artificial Sequence
  Synthetic oligonucleotide; TGG chr11 5206957 5206976 5206973 +
cagtgaaggattcaaatgcc

SEQ ID NO: 6597 - DNA, 20 bp, Artificial Sequence
  Synthetic oligonucleotide; CGG chr11 5206978 5206997 5206994 +
ggcgaaatctcctatacaac

SEQ ID NO: 6598 - DNA, 20 bp, Artificial Sequence
  Synthetic oligonucleotide; GAG chr11 5206980 5206999 5206996 +
cgaaatctcctatacaaccg

SEQ ID NO: 6599 - DNA, 20 bp, Artificial Sequence
  Synthetic oligonucleotide; GAG chr11 5206982 5207001 5206998 +
aaatctcctatacaaccgga

SEQ ID NO: 6600 - DNA, 20 bp, Artificial Sequence
  Synthetic oligonucleotide; AAG chr11 5206989 5207008 5207005 +
ctatacaaccggagagaccc

SEQ ID NO: 6601 - DNA, 20 bp, Artificial Sequence
  Synthetic oligonucleotide; AAG chr11 5206998 5207017 5207014 +
cggagagacccaagtcccca

SEQ ID NO: 6602 - DNA, 20 bp, Artificial Sequence
  Synthetic oligonucleotide; AAG chr11 5207003 5207022 5207019 +
agacccaagtccccaaagac

SEQ ID NO: 6603 - DNA, 20 bp, Artificial Sequence
  Synthetic oligonucleotide; AAG chr11 5207006 5207025 5207022 +
cccaagtccccaaagacaag

SEQ ID NO: 6604 - DNA, 20 bp, Artificial Sequence
  Synthetic oligonucleotide; AGG chr11 5207007 5207026 5207023 +
ccaagtccccaaagacaaga

SEQ ID NO: 6605 - DNA, 20 bp, Artificial Sequence
  Synthetic oligonucleotide; GGG chr11 5207008 5207027 5207024 +
caagtccccaaagacaagaa

SEQ ID NO: 6606 - DNA, 20 bp, Artificial Sequence
  Synthetic oligonucleotide; TGG chr11 5207020 5207039 5207036 +
gacaagaagggatgatgaaa

SEQ ID NO: 6607 - DNA, 20 bp, Artificial Sequence
  Synthetic oligonucleotide; GAG chr11 5207048 5207067 5207064 +
gcatgacatgacttgcctat

SEQ ID NO: 6608 - DNA, 20 bp, Artificial Sequence
  Synthetic oligonucleotide; AAG chr11 5207066 5207085 5207082 +
atgagccctcccattgctat

SEQ ID NO: 6609 - DNA, 20 bp, Artificial Sequence
  Synthetic oligonucleotide; AGG chr11 5207067 5207086 5207083 +
tgagccctcccattgctata

SEQ ID NO: 6610 - DNA, 20 bp, Artificial Sequence
  Synthetic oligonucleotide; TGG chr11 5207071 5207090 5207087 +
ccctcccattgctataagga

SEQ ID NO: 6611 - DNA, 20 bp, Artificial Sequence
  Synthetic oligonucleotide; GGG chr11 5207072 5207091 5207088 +
cctcccattgctataaggat

SEQ ID NO: 6612 - DNA, 20 bp, Artificial Sequence
  Synthetic oligonucleotide; GGG chr11 5207073 5207092 5207089 +
ctcccattgctataaggatg

SEQ ID NO: 6613 - DNA, 20 bp, Artificial Sequence
  Synthetic oligonucleotide; TAG chr11 5207080 5207099 5207096 +
tgctataaggatggggatct

SEQ ID NO: 6614 - DNA, 20 bp, Artificial Sequence
  Synthetic oligonucleotide; CAG chr11 5207085 5207104 5207101 +
taaggatggggatcttagca

SEQ ID NO: 6615 - DNA, 20 bp, Artificial Sequence
  Synthetic oligonucleotide; CAG chr11 5207101 5207120 5207117 +
agcacagtgccttgtgtgaa

SEQ ID NO: 6616 - DNA, 20 bp, Artificial Sequence
  Synthetic oligonucleotide; TAG chr11 5207110 5207129 5207126 +
ccttgtgtgaacagtaatgc

SEQ ID NO: 6617 - DNA, 20 bp, Artificial Sequence
  Synthetic oligonucleotide; TGG chr11 5207127 5207146 5207143 +
tgctagccttgattttacca

SEQ ID NO: 6618 - DNA, 20 bp, Artificial Sequence
  Synthetic oligonucleotide; AAG chr11 5207131 5207150 5207147 +
agccttgattttaccatggc

SEQ ID NO: 6619 - DNA, 20 bp, Artificial Sequence
  Synthetic oligonucleotide; TAG chr11 5207140 5207159 5207156 +
tttaccatggcaagtttgtt

SEQ ID NO: 6620 - DNA, 20 bp, Artificial Sequence
  Synthetic oligonucleotide; AGG chr11 5207141 5207160 5207157 +
ttaccatggcaagtttgttt

SEQ ID NO: 6621 - DNA, 20 bp, Artificial Sequence
  Synthetic oligonucleotide; GGG chr11 5207142 5207161 5207158 +
taccatggcaagtttgttta

SEQ ID NO: 6622 - DNA, 20 bp, Artificial Sequence
  Synthetic oligonucleotide; GAG chr11 5207187 5207206 5207203 +
aattccaacctcaaccaaat

SEQ ID NO: 6623 - DNA, 20 bp, Artificial Sequence
  Synthetic oligonucleotide; AGG chr11 5207188 5207207 5207204 +
attccaacctcaaccaaatg

SEQ ID NO: 6624 - DNA, 20 bp, Artificial Sequence
  Synthetic oligonucleotide; GGG chr11 5207189 5207208 5207205 +
ttccaacctcaaccaaatga

SEQ ID NO: 6625 - DNA, 20 bp, Artificial Sequence
  Synthetic oligonucleotide; TGG chr11 5207193 5207212 5207209 +
aacctcaaccaaatgaggga

SEQ ID NO: 6626 - DNA, 20 bp, Artificial Sequence
  Synthetic oligonucleotide; TGG chr11 5207197 5207216 5207213 +
tcaaccaaatgagggatggc

SEQ ID NO: 6627 - DNA, 20 bp, Artificial Sequence
  Synthetic oligonucleotide; GGG chr11 5207198 5207217 5207214 +
caaccaaatgagggatggct

SEQ ID NO: 6628 - DNA, 20 bp, Artificial Sequence
  Synthetic oligonucleotide; GGG chr11 5207199 5207218 5207215 +
aaccaaatgagggatggctg

SEQ ID NO: 6629 - DNA, 20 bp, Artificial Sequence
  Synthetic oligonucleotide; AAG chr11 5207213 5207232 5207229 +
tggctggggatgcaaccaca

SEQ ID NO: 6630 - DNA, 20 bp, Artificial Sequence
  Synthetic oligonucleotide; TAG chr11 5207227 5207246 5207243 +
accacaaagatactgtatct

SEQ ID NO: 6631 - DNA, 20 bp, Artificial Sequence
  Synthetic oligonucleotide; AGG chr11 5207228 5207247 5207244 +
ccacaaagatactgtatctt

SEQ ID NO: 6632 - DNA, 20 bp, Artificial Sequence
  Synthetic oligonucleotide; GAG chr11 5207230 5207249 5207246 +
acaaagatactgtatcttag

SEQ ID NO: 6633 - DNA, 20 bp, Artificial Sequence
  Synthetic oligonucleotide; AGG chr11 5207231 5207250 5207247 +
caaagatactgtatcttagg

SEQ ID NO: 6634 - DNA, 20 bp, Artificial Sequence
  Synthetic oligonucleotide; GGG chr11 5207232 5207251 5207248 +
aaagatactgtatcttagga

SEQ ID NO: 6635 - DNA, 20 bp, Artificial Sequence
  Synthetic oligonucleotide; GGG chr11 5207233 5207252 5207249 +
aagatactgtatcttaggag

SEQ ID NO: 6636 - DNA, 20 bp, Artificial Sequence
  Synthetic oligonucleotide; GAG chr11 5207235 5207254 5207251 +
gatactgtatcttaggaggg

SEQ ID NO: 6637 - DNA, 20 bp, Artificial Sequence
  Synthetic oligonucleotide; TAG chr11 5207251 5207270 5207267 +
aggggagtttttttttttta

SEQ ID NO: 6638 - DNA, 20 bp, Artificial Sequence
  Synthetic oligonucleotide; CAG chr11 5207262 5207281 5207278 +
ttttttttatagaaactcgt

SEQ ID NO: 6639 - DNA, 20 bp, Artificial Sequence
  Synthetic oligonucleotide; AGG chr11 5207263 5207282 5207279 +
tttttttatagaaactcgtc

SEQ ID NO: 6640 - DNA, 20 bp, Artificial Sequence
  Synthetic oligonucleotide; TAG chr11 5207276 5207295 5207292 +
actcgtcaggatattattgc

SEQ ID NO: 6641 - DNA, 20 bp, Artificial Sequence
  Synthetic oligonucleotide; AGG chr11 5207277 5207296 5207293 +
ctcgtcaggatattattgct

SEQ ID NO: 6642 - DNA, 20 bp, Artificial Sequence
  Synthetic oligonucleotide; TGG chr11 5207292 5207311 5207308 +
ttgctaggatgtgttgttac

SEQ ID NO: 6643 - DNA, 20 bp, Artificial Sequence
  Synthetic oligonucleotide; GGG chr11 5207293 5207312 5207309 +
tgctaggatgtgttgttact

SEQ ID NO: 6644 - DNA, 20 bp, Artificial Sequence
  Synthetic oligonucleotide; AAG chr11 5207300 5207319 5207316 +
atgtgttgttactgggaaaa

SEQ ID NO: 6645 - DNA, 20 bp, Artificial Sequence
  Synthetic oligonucleotide; TGG chr11 5207307 5207326 5207323 +
gttactgggaaaaaagctga

SEQ ID NO: 6646 - DNA, 20 bp, Artificial Sequence
  Synthetic oligonucleotide; AAG chr11 5207317 5207336 5207333 +
aaaaagctgatggaatacaa

SEQ ID NO: 6647 - DNA, 20 bp, Artificial Sequence
  Synthetic oligonucleotide; GAG chr11 5207319 5207338 5207335 +
aaagctgatggaatacaaaa

SEQ ID NO: 6648 - DNA, 20 bp, Artificial Sequence
  Synthetic oligonucleotide; TAG chr11 5207322 5207341 5207338 +
gctgatggaatacaaaagag

SEQ ID NO: 6649 - DNA, 20 bp, Artificial Sequence
  Synthetic oligonucleotide; CAG chr11 5207334 5207353 5207350 +
caaaagagtagacatcccca

SEQ ID NO: 6650 - DNA, 20 bp, Artificial Sequence
  Synthetic oligonucleotide; AGG chr11 5207335 5207354 5207351 +
aaaagagtagacatccccac

SEQ ID NO: 6651 - DNA, 20 bp, Artificial Sequence
  Synthetic oligonucleotide; GGG chr11 5207336 5207355 5207352 +
aaagagtagacatccccaca

SEQ ID NO: 6652 - DNA, 20 bp, Artificial Sequence
  Synthetic oligonucleotide; GAG chr11 5207346 5207365 5207362 +
catccccacagggattattt

SEQ ID NO: 6653 - DNA, 20 bp, Artificial Sequence
  Synthetic oligonucleotide; AGG chr11 5207347 5207366 5207363 +
atccccacagggattatttg

SEQ ID NO: 6654 - DNA, 20 bp, Artificial Sequence
  Synthetic oligonucleotide; CAG chr11 5207354 5207373 5207370 +
cagggattatttgaggcaat

SEQ ID NO: 6655 - DNA, 20 bp, Artificial Sequence
  Synthetic oligonucleotide; CAG chr11 5207388 5207407 5207404 +
accactttgctttctctatg

SEQ ID NO: 6656 - DNA, 20 bp, Artificial Sequence
  Synthetic oligonucleotide; AGG chr11 5207389 5207408 5207405 +
ccactttgctttctctatgc

SEQ ID NO: 6657 - DNA, 20 bp, Artificial Sequence
  Synthetic oligonucleotide; TAG chr11 5207409 5207428 5207425 +
aggtgtcatctattgtgata

SEQ ID NO: 6658 - DNA, 20 bp, Artificial Sequence
  Synthetic oligonucleotide; CAG chr11 5207415 5207434 5207431 +
catctattgtgatatagtgc

SEQ ID NO: 6659 - DNA, 20 bp, Artificial Sequence
  Synthetic oligonucleotide; AGG chr11 5207416 5207435 5207432 +
atctattgtgatatagtgcc

SEQ ID NO: 6660 - DNA, 20 bp, Artificial Sequence
  Synthetic oligonucleotide; GAG chr11 5207418 5207437 5207434 +
ctattgtgatatagtgccag

SEQ ID NO: 6661 - DNA, 20 bp, Artificial Sequence
  Synthetic oligonucleotide; AGG chr11 5207419 5207438 5207435 +
tattgtgatatagtgccagg

SEQ ID NO: 6662 - DNA, 20 bp, Artificial Sequence
  Synthetic oligonucleotide; TGG chr11 5207434 5207453 5207450 +
ccaggaggttgcctttgctg

SEQ ID NO: 6663 - DNA, 20 bp, Artificial Sequence
  Synthetic oligonucleotide; TAG chr11 5207447 5207466 5207463 +
tttgctgtggctttcgaccc

SEQ ID NO: 6664 - DNA, 20 bp, Artificial Sequence
  Synthetic oligonucleotide; TGG chr11 5207510 5207529 5207526 +
aataaaatgtccgtgtttat

SEQ ID NO: 6665 - DNA, 20 bp, Artificial Sequence
  Synthetic oligonucleotide; TAG chr11 5207535 5207554 5207551 +
attgttatattgtgaaattg

SEQ ID NO: 6666 - DNA, 20 bp, Artificial Sequence
  Synthetic oligonucleotide; TAG chr11 5207538 5207557 5207554 +
gttatattgtgaaattgtag

SEQ ID NO: 6667 - DNA, 20 bp, Artificial Sequence
  Synthetic oligonucleotide; TGG chr11 5207560 5207579 5207576 +
gatctaaaattgtaatttct

SEQ ID NO: 6668 - DNA, 20 bp, Artificial Sequence
  Synthetic oligonucleotide; TAG chr11 5207568 5207587 5207584 +
attgtaatttcttggattcc

SEQ ID NO: 6669 - DNA, 20 bp, Artificial Sequence
  Synthetic oligonucleotide; TGG chr11 5207585 5207604 5207601 +
tcctagaatttctaaatctg

SEQ ID NO: 6670 - DNA, 20 bp, Artificial Sequence
  Synthetic oligonucleotide; TAG chr11 5207593 5207612 5207609 +
tttctaaatctgtggatttt

SEQ ID NO: 6671 - DNA, 20 bp, Artificial Sequence
  Synthetic oligonucleotide; TAG chr11 5207603 5207622 5207619 +
tgtggatttttagaattctc

SEQ ID NO: 6672 - DNA, 20 bp, Artificial Sequence
  Synthetic oligonucleotide; GAG chr11 5207605 5207624 5207621 +
tggatttttagaattctcta

SEQ ID NO: 6673 - DNA, 20 bp, Artificial Sequence
  Synthetic oligonucleotide; AGG chr11 5207606 5207625 5207622 +
ggatttttagaattctctag

SEQ ID NO: 6674 - DNA, 20 bp, Artificial Sequence
  Synthetic oligonucleotide; AAG chr11 5207614 5207633 5207630 +
agaattctctagaggtgaca

SEQ ID NO: 6675 - DNA, 20 bp, Artificial Sequence
  Synthetic oligonucleotide; AGG chr11 5207615 5207634 5207631 +
gaattctctagaggtgacaa

SEQ ID NO: 6676 - DNA, 20 bp, Artificial Sequence
  Synthetic oligonucleotide; AAG chr11 5207628 5207647 5207644 +
gtgacaaaggtttattatct

SEQ ID NO: 6677 - DNA, 20 bp, Artificial Sequence
  Synthetic oligonucleotide; CGG chr11 5207635 5207654 5207651 +
aggtttattatctaagctac

SEQ ID NO: 6678 - DNA, 20 bp, Artificial Sequence
  Synthetic oligonucleotide; GAG chr11 5207637 5207656 5207653 +
gtttattatctaagctaccg

SEQ ID NO: 6679 - DNA, 20 bp, Artificial Sequence
  Synthetic oligonucleotide; TGG chr11 5207651 5207670 5207667 +
ctaccggagctatgtacttt

SEQ ID NO: 6680 - DNA, 20 bp, Artificial Sequence
  Synthetic oligonucleotide; AAG chr11 5207658 5207677 5207674 +
agctatgtacttttggatat

SEQ ID NO: 6681 - DNA, 20 bp, Artificial Sequence
  Synthetic oligonucleotide; GAG chr11 5207660 5207679 5207676 +
ctatgtacttttggatataa

SEQ ID NO: 6682 - DNA, 20 bp, Artificial Sequence
  Synthetic oligonucleotide; CAG chr11 5207690 5207709 5207706 +
atctccattgccttacaaat

SEQ ID NO: 6683 - DNA, 20 bp, Artificial Sequence
  Synthetic oligonucleotide; AGG chr11 5207691 5207710 5207707 +
tctccattgccttacaaatc

SEQ ID NO: 6684 - DNA, 20 bp, Artificial Sequence
  Synthetic oligonucleotide; GAG chr11 5207697 5207716 5207713 +
ttgccttacaaatcaggtgt

SEQ ID NO: 6685 - DNA, 20 bp, Artificial Sequence
  Synthetic oligonucleotide; CAG chr11 5207701 5207720 5207717 +
cttacaaatcaggtgtgagc

SEQ ID NO: 6686 - DNA, 20 bp, Artificial Sequence
  Synthetic oligonucleotide; AGG chr11 5207702 5207721 5207718 +
ttacaaatcaggtgtgagcc

SEQ ID NO: 6687 - DNA, 20 bp, Artificial Sequence
  Synthetic oligonucleotide; CAG chr11 5207714 5207733 5207730 +
tgtgagccaggcatgtctct

SEQ ID NO: 6688 - DNA, 20 bp, Artificial Sequence
  Synthetic oligonucleotide; TGG chr11 5207719 5207738 5207735 +
gccaggcatgtctctcagac

SEQ ID NO: 6689 - DNA, 20 bp, Artificial Sequence
  Synthetic oligonucleotide; AAG chr11 5207724 5207743 5207740 +
gcatgtctctcagactggaa

SEQ ID NO: 6690 - DNA, 20 bp, Artificial Sequence
  Synthetic oligonucleotide; AGG chr11 5207725 5207744 5207741 +
catgtctctcagactggaaa

SEQ ID NO: 6691 - DNA, 20 bp, Artificial Sequence
  Synthetic oligonucleotide; CAG chr11 5207736 5207755 5207752 +
gactggaaaaggtaactaat

SEQ ID NO: 6692 - DNA, 20 bp, Artificial Sequence
  Synthetic oligonucleotide; AAG chr11 5207739 5207758 5207755 +
tggaaaaggtaactaatcag

SEQ ID NO: 6693 - DNA, 20 bp, Artificial Sequence
  Synthetic oligonucleotide; AGG chr11 5207740 5207759 5207756 +
ggaaaaggtaactaatcaga

SEQ ID NO: 6694 - DNA, 20 bp, Artificial Sequence
  Synthetic oligonucleotide; TAG chr11 5207754 5207773 5207770 +
atcagaaggaaccattgtcc

SEQ ID NO: 6695 - DNA, 20 bp, Artificial Sequence
  Synthetic oligonucleotide; TGG chr11 5207759 5207778 5207775 +
aaggaaccattgtcctagaa

SEQ ID NO: 6696 - DNA, 20 bp, Artificial Sequence
  Synthetic oligonucleotide; GGG chr11 5207760 5207779 5207776 +
aggaaccattgtcctagaat

SEQ ID NO: 6697 - DNA, 20 bp, Artificial Sequence
  Synthetic oligonucleotide; GGG chr11 5207761 5207780 5207777 +
ggaaccattgtcctagaatg

SEQ ID NO: 6698 - DNA, 20 bp, Artificial Sequence
  Synthetic oligonucleotide; AAG chr11 5207765 5207784 5207781 +
ccattgtcctagaatggggc

SEQ ID NO: 6699 - DNA, 20 bp, Artificial Sequence
  Synthetic oligonucleotide; CAG chr11 5207779 5207798 5207795 +
tggggcaagtgtacaatacc

SEQ ID NO: 6700 - DNA, 20 bp, Artificial Sequence
  Synthetic oligonucleotide; AAG chr11 5207783 5207802 5207799 +
gcaagtgtacaatacccaga

SEQ ID NO: 6701 - DNA, 20 bp, Artificial Sequence
  Synthetic oligonucleotide; TGG chr11 5207791 5207810 5207807 +
acaatacccagaaagaccac

SEQ ID NO: 6702 - DNA, 20 bp, Artificial Sequence
  Synthetic oligonucleotide; TAG chr11 5207799 5207818 5207815 +
cagaaagaccactggtgccg

SEQ ID NO: 6703 - DNA, 20 bp, Artificial Sequence
  Synthetic oligonucleotide; TAG chr11 5207877 5207896 5207893 +
tatttattttatttatttat

SEQ ID NO: 6704 - DNA, 20 bp, Artificial Sequence
  Synthetic oligonucleotide; GAG chr11 5207879 5207898 5207895 +
tttattttatttatttatta

SEQ ID NO: 6705 - DNA, 20 bp, Artificial Sequence
  Synthetic oligonucleotide; TAG chr11 5207886 5207905 5207902 +
tatttatttattagagatca

SEQ ID NO: 6706 - DNA, 20 bp, Artificial Sequence
  Synthetic oligonucleotide; CAG chr11 5207908 5207927 5207924 +
gtgtgtgcaacacctatgtc

SEQ ID NO: 6707 - DNA, 20 bp, Artificial Sequence
  Synthetic oligonucleotide; AGG chr11 5207909 5207928 5207925 +
tgtgtgcaacacctatgtcc

SEQ ID NO: 6708 - DNA, 20 bp, Artificial Sequence
  Synthetic oligonucleotide; TGG chr11 5207917 5207936 5207933 +
acacctatgtccaggttctg

SEQ ID NO: 6709 - DNA, 20 bp, Artificial Sequence
  Synthetic oligonucleotide; CAG chr11 5207927 5207946 5207943 +
ccaggttctgtggtaaacgt

SEQ ID NO: 6710 - DNA, 20 bp, Artificial Sequence
  Synthetic oligonucleotide; TGG chr11 5207932 5207951 5207948 +
ttctgtggtaaacgtcagcg

SEQ ID NO: 6711 - DNA, 20 bp, Artificial Sequence
  Synthetic oligonucleotide; GAG chr11 5207934 5207953 5207950 +
ctgtggtaaacgtcagcgtg

SEQ ID NO: 6712 - DNA, 20 bp, Artificial Sequence
  Synthetic oligonucleotide; TAG chr11 5207941 5207960 5207957 +
aaacgtcagcgtggagaaat

SEQ ID NO: 6713 - DNA, 20 bp, Artificial Sequence
  Synthetic oligonucleotide; TAG chr11 5207944 5207963 5207960 +
cgtcagcgtggagaaattag

SEQ ID NO: 6714 - DNA, 20 bp, Artificial Sequence
  Synthetic oligonucleotide; TAG chr11 5207951 5207970 5207967 +
gtggagaaattagtagctat

SEQ ID NO: 6715 - DNA, 20 bp, Artificial Sequence
  Synthetic oligonucleotide; AAG chr11 5207962 5207981 5207978 +
agtagctattagatcataaa

SEQ ID NO: 6716 - DNA, 20 bp, Artificial Sequence
  Synthetic oligonucleotide; AGG chr11 5207963 5207982 5207979 +
gtagctattagatcataaaa

SEQ ID NO: 6717 - DNA, 20 bp, Artificial Sequence
  Synthetic oligonucleotide; GAG chr11 5207967 5207986 5207983 +
ctattagatcataaaaaggt

SEQ ID NO: 6718 - DNA, 20 bp, Artificial Sequence
  Synthetic oligonucleotide; AGG chr11 5207968 5207987 5207984 +
tattagatcataaaaaggtg

SEQ ID NO: 6719 - DNA, 20 bp, Artificial Sequence
  Synthetic oligonucleotide; GAG chr11 5207990 5208009 5208006 +
gcataatcatatttgtcttt

SEQ ID NO: 6720 - DNA, 20 bp, Artificial Sequence
  Synthetic oligonucleotide; AAG chr11 5207993 5208012 5208009 +
taatcatatttgtctttgag

SEQ ID NO: 6721 - DNA, 20 bp, Artificial Sequence
  Synthetic oligonucleotide; TGG chr11 5208003 5208022 5208019 +
tgtctttgagaagctgactg

SEQ ID NO: 6722 - DNA, 20 bp, Artificial Sequence
  Synthetic oligonucleotide; TAG chr11 5208009 5208028 5208025 +
tgagaagctgactgtggcta

SEQ ID NO: 6723 - DNA, 20 bp, Artificial Sequence
  Synthetic oligonucleotide; AGG chr11 5208010 5208029 5208026 +
gagaagctgactgtggctat

SEQ ID NO: 6724 - DNA, 20 bp, Artificial Sequence
  Synthetic oligonucleotide; AAG chr11 5208015 5208034 5208031 +
gctgactgtggctataggtg

SEQ ID NO: 6725 - DNA, 20 bp, Artificial Sequence
  Synthetic oligonucleotide; TAG chr11 5208034 5208053 5208050 +
gaagaaaaaaattataattt

SEQ ID NO: 6726 - DNA, 20 bp, Artificial Sequence
  Synthetic oligonucleotide; AAG chr11 5208073 5208092 5208089 +
accatgatcatcatgataaa

SEQ ID NO: 6727 - DNA, 20 bp, Artificial Sequence
  Synthetic oligonucleotide; TGG chr11 5208087 5208106 5208103 +
gataaaaagttaatatttac

SEQ ID NO: 6728 - DNA, 20 bp, Artificial Sequence
  Synthetic oligonucleotide; GGG chr11 5208088 5208107 5208104 +
ataaaaagttaatatttact

SEQ ID NO: 6729 - DNA, 20 bp, Artificial Sequence
  Synthetic oligonucleotide; TGG chr11 5208099 5208118 5208115 +
atatttactgggaacttatt

SEQ ID NO: 6730 - DNA, 20 bp, Artificial Sequence
  Synthetic oligonucleotide; AAG chr11 5208116 5208135 5208132 +
atttggtttgtcatttttcg

SEQ ID NO: 6731 - DNA, 20 bp, Artificial Sequence
  Synthetic oligonucleotide; AGG chr11 5208117 5208136 5208133 +
tttggtttgtcatttttcga

SEQ ID NO: 6732 - DNA, 20 bp, Artificial Sequence
  Synthetic oligonucleotide; AAG chr11 5208144 5208163 5208160 +
tatgttaatttactcactat

SEQ ID NO: 6733 - DNA, 20 bp, Artificial Sequence
  Synthetic oligonucleotide; AAG chr11 5208156 5208175 5208172 +
ctcactataagaaatttata

SEQ ID NO: 6734 - DNA, 20 bp, Artificial Sequence
  Synthetic oligonucleotide; TAG chr11 5208159 5208178 5208175 +
actataagaaatttataaag

SEQ ID NO: 6735 - DNA, 20 bp, Artificial Sequence
  Synthetic oligonucleotide; TAG chr11 5208171 5208190 5208187 +
ttataaagtagattccatta

SEQ ID NO: 6736 - DNA, 20 bp, Artificial Sequence
  Synthetic oligonucleotide; GAG chr11 5208190 5208209 5208206 +
atagctcttaatttattatt

SEQ ID NO: 6737 - DNA, 20 bp, Artificial Sequence
  Synthetic oligonucleotide; AGG chr11 5208191 5208210 5208207 +
tagctcttaatttattattg

SEQ ID NO: 6738 - DNA, 20 bp, Artificial Sequence
  Synthetic oligonucleotide; AAG chr11 5208199 5208218 5208215 +
aatttattattgaggaatgt

SEQ ID NO: 6739 - DNA, 20 bp, Artificial Sequence
  Synthetic oligonucleotide; AGG chr11 5208200 5208219 5208216 +
atttattattgaggaatgta

SEQ ID NO: 6740 - DNA, 20 bp, Artificial Sequence
  Synthetic oligonucleotide; TAG chr11 5208205 5208224 5208221 +
ttattgaggaatgtaaggca

SEQ ID NO: 6741 - DNA, 20 bp, Artificial Sequence
  Synthetic oligonucleotide; GAG chr11 5208207 5208226 5208223 +
attgaggaatgtaaggcata

SEQ ID NO: 6742 - DNA, 20 bp, Artificial Sequence
  Synthetic oligonucleotide; AAG chr11 5208210 5208229 5208226 +
gaggaatgtaaggcatagag

SEQ ID NO: 6743 - DNA, 20 bp, Artificial Sequence
  Synthetic oligonucleotide; AAG chr11 5208231 5208250 5208247 +
agtaacttatcctcaaaaca

SEQ ID NO: 6744 - DNA, 20 bp, Artificial Sequence
  Synthetic oligonucleotide; TGG chr11 5208245 5208264 5208261 +
aaaacaaagctattaactta

SEQ ID NO: 6745 - DNA, 20 bp, Artificial Sequence
  Synthetic oligonucleotide; GAG chr11 5208252 5208271 5208268 +
agctattaacttatggacct

SEQ ID NO: 6746 - DNA, 20 bp, Artificial Sequence
  Synthetic oligonucleotide; GAG chr11 5208254 5208273 5208270 +
ctattaacttatggacctga

SEQ ID NO: 6747 - DNA, 20 bp, Artificial Sequence
  Synthetic oligonucleotide; TAG chr11 5208257 5208276 5208273 +
ttaacttatggacctgagag

SEQ ID NO: 6748 - DNA, 20 bp, Artificial Sequence
  Synthetic oligonucleotide; GAG chr11 5208259 5208278 5208275 +
aacttatggacctgagagta

SEQ ID NO: 6749 - DNA, 20 bp, Artificial Sequence
  Synthetic oligonucleotide; CGG chr11 5208264 5208283 5208280 +
atggacctgagagtagagcc

SEQ ID NO: 6750 - DNA, 20 bp, Artificial Sequence
  Synthetic oligonucleotide; GGG chr11 5208265 5208284 5208281 +
tggacctgagagtagagccc

SEQ ID NO: 6751 - DNA, 20 bp, Artificial Sequence
  Synthetic oligonucleotide; CAG chr11 5208279 5208298 5208295 +
gagcccgggctgtctcatgc

SEQ ID NO: 6752 - DNA, 20 bp, Artificial Sequence
  Synthetic oligonucleotide; AAG chr11 5208302 5208321 5208318 +
aacctattatcccatgttgc

SEQ ID NO: 6753 - DNA, 20 bp, Artificial Sequence
  Synthetic oligonucleotide; TAG chr11 5208312 5208331 5208328 +
cccatgttgcaagacacaaa

SEQ ID NO: 6754 - DNA, 20 bp, Artificial Sequence
  Synthetic oligonucleotide; AGG chr11 5208313 5208332 5208329 +
ccatgttgcaagacacaaat

SEQ ID NO: 6755 - DNA, 20 bp, Artificial Sequence
  Synthetic oligonucleotide; TAG chr11 5208320 5208339 5208336 +
gcaagacacaaataggaaaa

SEQ ID NO: 6756 - DNA, 20 bp, Artificial Sequence
  Synthetic oligonucleotide; CGG chr11 5208326 5208345 5208342 +
cacaaataggaaaatagaac

SEQ ID NO: 6757 - DNA, 20 bp, Artificial Sequence
  Synthetic oligonucleotide; TAG chr11 5208330 5208349 5208346 +
aataggaaaatagaaccggt

SEQ ID NO: 6758 - DNA, 20 bp, Artificial Sequence
  Synthetic oligonucleotide; AAG chr11 5208333 5208352 5208349 +
aggaaaatagaaccggttag

SEQ ID NO: 6759 - DNA, 20 bp, Artificial Sequence
  Synthetic oligonucleotide; AAG chr11 5208342 5208361 5208358 +
gaaccggttagaagttattg

SEQ ID NO: 6760 - DNA, 20 bp, Artificial Sequence
  Synthetic oligonucleotide; AGG chr11 5208343 5208362 5208359 +
aaccggttagaagttattga

SEQ ID NO: 6761 - DNA, 20 bp, Artificial Sequence
  Synthetic oligonucleotide; GGG chr11 5208344 5208363 5208360 +
accggttagaagttattgaa

SEQ ID NO: 6762 - DNA, 20 bp, Artificial Sequence
  Synthetic oligonucleotide; TAG chr11 5208357 5208376 5208373 +
tattgaagggcatgaaataa

SEQ ID NO: 6763 - DNA, 20 bp, Artificial Sequence
  Synthetic oligonucleotide; TGG chr11 5208360 5208379 5208376 +
tgaagggcatgaaataatag

SEQ ID NO: 6764 - DNA, 20 bp, Artificial Sequence
  Synthetic oligonucleotide; GAG chr11 5208373 5208392 5208389 +
ataatagtggtttgaaattt

SEQ ID NO: 6765 - DNA, 20 bp, Artificial Sequence
  Synthetic oligonucleotide; TAG chr11 5208376 5208395 5208392 +
atagtggtttgaaatttgag

SEQ ID NO: 6766 - DNA, 20 bp, Artificial Sequence
  Synthetic oligonucleotide; GAG chr11 5208378 5208397 5208394 +
agtggtttgaaatttgagta

SEQ ID NO: 6767 - DNA, 20 bp, Artificial Sequence
  Synthetic oligonucleotide; TAG chr11 5208381 5208400 5208397 +
ggtttgaaatttgagtagag

SEQ ID NO: 6768 - DNA, 20 bp, Artificial Sequence
  Synthetic oligonucleotide; AGG chr11 5208382 5208401 5208398 +
gtttgaaatttgagtagagt

SEQ ID NO: 6769 - DNA, 20 bp, Artificial Sequence
  Synthetic oligonucleotide; AAG chr11 5208388 5208407 5208404 +
aatttgagtagagtaggacc

SEQ ID NO: 6770 - DNA, 20 bp, Artificial Sequence
  Synthetic oligonucleotide; CAG chr11 5208404 5208423 5208420 +
gaccaagaaaatgcatattt

SEQ ID NO: 6771 - DNA, 20 bp, Artificial Sequence
  Synthetic oligonucleotide; AGG chr11 5208405 5208424 5208421 +
accaagaaaatgcatatttc

SEQ ID NO: 6772 - DNA, 20 bp, Artificial Sequence
  Synthetic oligonucleotide; GGG chr11 5208406 5208425 5208422 +
ccaagaaaatgcatatttca

SEQ ID NO: 6773 - DNA, 20 bp, Artificial Sequence
  Synthetic oligonucleotide; GAG chr11 5208416 5208435 5208432 +
gcatatttcagggaatacct

SEQ ID NO: 6774 - DNA, 20 bp, Artificial Sequence
  Synthetic oligonucleotide; GAG chr11 5208418 5208437 5208434 +
atatttcagggaatacctga

SEQ ID NO: 6775 - DNA, 20 bp, Artificial Sequence
  Synthetic oligonucleotide; AGG chr11 5208419 5208438 5208435 +
tatttcagggaatacctgag

SEQ ID NO: 6776 - DNA, 20 bp, Artificial Sequence
  Synthetic oligonucleotide; AAG chr11 5208438 5208457 5208454 +
gaggaaaaaaaaaaactatg

SEQ ID NO: 6777 - DNA, 20 bp, Artificial Sequence
  Synthetic oligonucleotide; AGG chr11 5208439 5208458 5208455 +
aggaaaaaaaaaaactatga

SEQ ID NO: 6778 - DNA, 20 bp, Artificial Sequence
  Synthetic oligonucleotide; CAG chr11 5208446 5208465 5208462 +
aaaaaaactatgaaggaacg

SEQ ID NO: 6779 - DNA, 20 bp, Artificial Sequence
  Synthetic oligonucleotide; TAG chr11 5208453 5208472 5208469 +
ctatgaaggaacgcagtaat

SEQ ID NO: 6780 - DNA, 20 bp, Artificial Sequence
  Synthetic oligonucleotide; TAG chr11 5208461 5208480 5208477 +
gaacgcagtaattagctcct

SEQ ID NO: 6781 - DNA, 20 bp, Artificial Sequence
  Synthetic oligonucleotide; AAG chr11 5208468 5208487 5208484 +
gtaattagctccttagctga

SEQ ID NO: 6782 - DNA, 20 bp, Artificial Sequence
  Synthetic oligonucleotide; TGG chr11 5208481 5208500 5208497 +
tagctgaaagaatgatcttc

SEQ ID NO: 6783 - DNA, 20 bp, Artificial Sequence
  Synthetic oligonucleotide; CAG chr11 5208485 5208504 5208501 +
tgaaagaatgatcttctggt

SEQ ID NO: 6784 - DNA, 20 bp, Artificial Sequence
  Synthetic oligonucleotide; GAG chr11 5208489 5208508 5208505 +
agaatgatcttctggtcagt

SEQ ID NO: 6785 - DNA, 20 bp, Artificial Sequence
  Synthetic oligonucleotide; TGG chr11 5208495 5208514 5208511 +
atcttctggtcagtgagaac

SEQ ID NO: 6786 - DNA, 20 bp, Artificial Sequence
  Synthetic oligonucleotide; TGG chr11 5208508 5208527 5208524 +
tgagaactggtttcaaatct

SEQ ID NO: 6787 - DNA, 20 bp, Artificial Sequence
  Synthetic oligonucleotide; TAG chr11 5208524 5208543 5208540 +
atcttggttttgtcatttct

SEQ ID NO: 6788 - DNA, 20 bp, Artificial Sequence
  Synthetic oligonucleotide; AGG chr11 5208525 5208544 5208541 +
tcttggttttgtcatttctt

SEQ ID NO: 6789 - DNA, 20 bp, Artificial Sequence
  Synthetic oligonucleotide; TAG chr11 5208539 5208558 5208555 +
tttcttaggtatataatttt

SEQ ID NO: 6790 - DNA, 20 bp, Artificial Sequence
  Synthetic oligonucleotide; TAG chr11 5208551 5208570 5208567 +
ataatttttagctcaacact

SEQ ID NO: 6791 - DNA, 20 bp, Artificial Sequence
  Synthetic oligonucleotide; TGG chr11 5208578 5208597 5208594 +
acaatttttaaaaatattgt

SEQ ID NO: 6792 - DNA, 20 bp, Artificial Sequence
  Synthetic oligonucleotide; CGG chr11 5208602 5208621 5208618 +
atgatgataatatataaaaa

SEQ ID NO: 6793 - DNA, 20 bp, Artificial Sequence
  Synthetic oligonucleotide; AAG chr11 5208624 5208643 5208640 +
gctcattatctgccactcaa

SEQ ID NO: 6794 - DNA, 20 bp, Artificial Sequence
  Synthetic oligonucleotide; CAG chr11 5208631 5208650 5208647 +
atctgccactcaaaagctat

SEQ ID NO: 6795 - DNA, 20 bp, Artificial Sequence
  Synthetic oligonucleotide; TAG chr11 5208652 5208671 5208668 +
agtatttatgataataattc

SEQ ID NO: 6796 - DNA, 20 bp, Artificial Sequence
  Synthetic oligonucleotide; GAG chr11 5208659 5208678 5208675 +
atgataataattctagttgt

SEQ ID NO: 6797 - DNA, 20 bp, Artificial Sequence
  Synthetic oligonucleotide; AAG chr11 5208684 5208703 5208700 +
attgattattaaatatatat

SEQ ID NO: 6798 - DNA, 20 bp, Artificial Sequence
  Synthetic oligonucleotide; AGG chr11 5208685 5208704 5208701 +
ttgattattaaatatatata

SEQ ID NO: 6799 - DNA, 20 bp, Artificial Sequence
  Synthetic oligonucleotide; GGG chr11 5208686 5208705 5208702 +
tgattattaaatatatataa

SEQ ID NO: 6800 - DNA, 20 bp, Artificial Sequence
  Synthetic oligonucleotide; TAG chr11 5208690 5208709 5208706 +
tattaaatatatataaggga

SEQ ID NO: 6801 - DNA, 20 bp, Artificial Sequence
  Synthetic oligonucleotide; AAG chr11 5208693 5208712 5208709 +
taaatatatataagggatag

SEQ ID NO: 6802 - DNA, 20 bp, Artificial Sequence
  Synthetic oligonucleotide; GAG chr11 5208695 5208714 5208711 +
aatatatataagggatagaa

SEQ ID NO: 6803 - DNA, 20 bp, Artificial Sequence
  Synthetic oligonucleotide; GAG chr11 5208697 5208716 5208713 +
tatatataagggatagaaga

SEQ ID NO: 6804 - DNA, 20 bp, Artificial Sequence
  Synthetic oligonucleotide; TGG chr11 5208700 5208719 5208716 +
atataagggatagaagagag

SEQ ID NO: 6805 - DNA, 20 bp, Artificial Sequence
  Synthetic oligonucleotide; GAG chr11 5208702 5208721 5208718 +
ataagggatagaagagagtg

SEQ ID NO: 6806 - DNA, 20 bp, Artificial Sequence
  Synthetic oligonucleotide; GAG chr11 5208704 5208723 5208720 +
aagggatagaagagagtgga

SEQ ID NO: 6807 - DNA, 20 bp, Artificial Sequence
  Synthetic oligonucleotide; AAG chr11 5208709 5208728 5208725 +
atagaagagagtggagagta

SEQ ID NO: 6808 - DNA, 20 bp, Artificial Sequence
  Synthetic oligonucleotide; AGG chr11 5208710 5208729 5208726 +
tagaagagagtggagagtaa

SEQ ID NO: 6809 - DNA, 20 bp, Artificial Sequence
  Synthetic oligonucleotide; TGG chr11 5208739 5208758 5208755 +
tgattgacaaaattttgtct

SEQ ID NO: 6810 - DNA, 20 bp, Artificial Sequence
  Synthetic oligonucleotide; GAG chr11 5208748 5208767 5208764 +
aaattttgtcttggaaatct

SEQ ID NO: 6811 - DNA, 20 bp, Artificial Sequence
  Synthetic oligonucleotide; AAG chr11 5208764 5208783 5208780 +
atctgagtgaaccattcatc

SEQ ID NO: 6812 - DNA, 20 bp, Artificial Sequence
  Synthetic oligonucleotide; TGG chr11 5208769 5208788 5208785 +
agtgaaccattcatcaagtt

SEQ ID NO: 6813 - DNA, 20 bp, Artificial Sequence
  Synthetic oligonucleotide; AAG chr11 5208772 5208791 5208788 +
gaaccattcatcaagtttgg

SEQ ID NO: 6814 - DNA, 20 bp, Artificial Sequence
  Synthetic oligonucleotide; TAG chr11 5208778 5208797 5208794 +
ttcatcaagtttggaagcat

SEQ ID NO: 6815 - DNA, 20 bp, Artificial Sequence
  Synthetic oligonucleotide; GAG chr11 5208780 5208799 5208796 +
catcaagtttggaagcatta

SEQ ID NO: 6816 - DNA, 20 bp, Artificial Sequence
  Synthetic oligonucleotide; AGG chr11 5208781 5208800 5208797 +
atcaagtttggaagcattag

SEQ ID NO: 6817 - DNA, 20 bp, Artificial Sequence
  Synthetic oligonucleotide; AAG chr11 5208791 5208810 5208807 +
gaagcattagaggaaactga

SEQ ID NO: 6818 - DNA, 20 bp, Artificial Sequence
  Synthetic oligonucleotide; AAG chr11 5208794 5208813 5208810 +
gcattagaggaaactgaaag

SEQ ID NO: 6819 - DNA, 20 bp, Artificial Sequence
  Synthetic oligonucleotide; TGG chr11 5208797 5208816 5208813 +
ttagaggaaactgaaagaag

SEQ ID NO: 6820 - DNA, 20 bp, Artificial Sequence
  Synthetic oligonucleotide; GAG chr11 5208799 5208818 5208815 +
agaggaaactgaaagaagtg

SEQ ID NO: 6821 - DNA, 20 bp, Artificial Sequence
  Synthetic oligonucleotide; AGG chr11 5208800 5208819 5208816 +
gaggaaactgaaagaagtgg

SEQ ID NO: 6822 - DNA, 20 bp, Artificial Sequence
  Synthetic oligonucleotide; GAG chr11 5208829 5208848 5208845 +
tactatcttttcaactcgct

SEQ ID NO: 6823 - DNA, 20 bp, Artificial Sequence
  Synthetic oligonucleotide; AAG chr11 5208835 5208854 5208851 +
cttttcaactcgctgagttt

SEQ ID NO: 6824 - DNA, 20 bp, Artificial Sequence
  Synthetic oligonucleotide; GAG chr11 5208837 5208856 5208853 +
tttcaactcgctgagtttaa

SEQ ID NO: 6825 - DNA, 20 bp, Artificial Sequence
  Synthetic oligonucleotide; AGG chr11 5208838 5208857 5208854 +
ttcaactcgctgagtttaag

SEQ ID NO: 6826 - DNA, 20 bp, Artificial Sequence
  Synthetic oligonucleotide; TAG chr11 5208845 5208864 5208861 +
cgctgagtttaagaggtcca

SEQ ID NO: 6827 - DNA, 20 bp, Artificial Sequence
  Synthetic oligonucleotide; AGG chr11 5208846 5208865 5208862 +
gctgagtttaagaggtccat

SEQ ID NO: 6828 - DNA, 20 bp, Artificial Sequence
  Synthetic oligonucleotide; AAG chr11 5208855 5208874 5208871 +
aagaggtccataggtcatat

SEQ ID NO: 6829 - DNA, 20 bp, Artificial Sequence
  Synthetic oligonucleotide; TGG chr11 5208858 5208877 5208874 +
aggtccataggtcatataag

SEQ ID NO: 6830 - DNA, 20 bp, Artificial Sequence
  Synthetic oligonucleotide; GAG chr11 5208860 5208879 5208876 +
gtccataggtcatataagtg

SEQ ID NO: 6831 - DNA, 20 bp, Artificial Sequence
  Synthetic oligonucleotide; AGG chr11 5208861 5208880 5208877 +
tccataggtcatataagtgg

SEQ ID NO: 6832 - DNA, 20 bp, Artificial Sequence
  Synthetic oligonucleotide; AAG chr11 5208872 5208891 5208888 +
tataagtggaggtgacctgt

SEQ ID NO: 6833 - DNA, 20 bp, Artificial Sequence
  Synthetic oligonucleotide; CAG chr11 5208924 5208943 5208940 +
aaatgttaatgtatccctaa

SEQ ID NO: 6834 - DNA, 20 bp, Artificial Sequence
  Synthetic oligonucleotide; GAG chr11 5208926 5208945 5208942 +
atgttaatgtatccctaaca

SEQ ID NO: 6835 - DNA, 20 bp, Artificial Sequence
  Synthetic oligonucleotide; GAG chr11 5208928 5208947 5208944 +
gttaatgtatccctaacaga

SEQ ID NO: 6836 - DNA, 20 bp, Artificial Sequence
  Synthetic oligonucleotide; AAG chr11 5208936 5208955 5208952 +
atccctaacagagagcaatg

SEQ ID NO: 6837 - DNA, 20 bp, Artificial Sequence
  Synthetic oligonucleotide; TAG chr11 5208946 5208965 5208962 +
gagagcaatgaagttctttt

SEQ ID NO: 6838 - DNA, 20 bp, Artificial Sequence
  Synthetic oligonucleotide; TGG chr11 5208949 5208968 5208965 +
agcaatgaagttctttttag

SEQ ID NO: 6839 - DNA, 20 bp, Artificial Sequence
  Synthetic oligonucleotide; GAG chr11 5208951 5208970 5208967 +
caatgaagttctttttagtg

SEQ ID NO: 6840 - DNA, 20 bp, Artificial Sequence
  Synthetic oligonucleotide; TAG chr11 5208970 5208989 5208986 +
ggagtttctctttcttgaca

SEQ ID NO: 6841 - DNA, 20 bp, Artificial Sequence
  Synthetic oligonucleotide; TAG chr11 5208980 5208999 5208996 +
tttcttgacatagtaccatg

SEQ ID NO: 6842 - DNA, 20 bp, Artificial Sequence
  Synthetic oligonucleotide; AAG chr11 5208985 5209004 5209001 +
tgacatagtaccatgtagtg

SEQ ID NO: 6843 - DNA, 20 bp, Artificial Sequence
  Synthetic oligonucleotide; TGG chr11 5209001 5209020 5209017 +
agtgaagacactgctgactt

SEQ ID NO: 6844 - DNA, 20 bp, Artificial Sequence
  Synthetic oligonucleotide; AAG chr11 5209010 5209029 5209026 +
actgctgactttggaattga

SEQ ID NO: 6845 - DNA, 20 bp, Artificial Sequence
  Synthetic oligonucleotide; TAG chr11 5209018 5209037 5209034 +
ctttggaattgaaagaatct

SEQ ID NO: 6846 - DNA, 20 bp, Artificial Sequence
  Synthetic oligonucleotide; CAG chr11 5209023 5209042 5209039 +
gaattgaaagaatcttagct

SEQ ID NO: 6847 - DNA, 20 bp, Artificial Sequence
  Synthetic oligonucleotide; TAG chr11 5209034 5209053 5209050 +
atcttagctcagctacttac

SEQ ID NO: 6848 - DNA, 20 bp, Artificial Sequence
  Synthetic oligonucleotide; GAG chr11 5209039 5209058 5209055 +
agctcagctacttactagct

SEQ ID NO: 6849 - DNA, 20 bp, Artificial Sequence
  Synthetic oligonucleotide; TAG chr11 5209042 5209061 5209058 +
tcagctacttactagctgag

SEQ ID NO: 6850 - DNA, 20 bp, Artificial Sequence
  Synthetic oligonucleotide; AAG chr11 5209069 5209088 5209085 +
aacaccttaatgcccatccc

SEQ ID NO: 6851 - DNA, 20 bp, Artificial Sequence
  Synthetic oligonucleotide; CAG chr11 5209073 5209092 5209089 +
ccttaatgcccatcccaaga

SEQ ID NO: 6852 - DNA, 20 bp, Artificial Sequence
  Synthetic oligonucleotide; AAG chr11 5209085 5209104 5209101 +
tcccaagacagtgtgtgtaa

SEQ ID NO: 6853 - DNA, 20 bp, Artificial Sequence
  Synthetic oligonucleotide; CAG chr11 5209104 5209123 5209120 +
aaagacgaataacaacatct

SEQ ID NO: 6854 - DNA, 20 bp, Artificial Sequence
  Synthetic oligonucleotide; AGG chr11 5209105 5209124 5209121 +
aagacgaataacaacatctc

SEQ ID NO: 6855 - DNA, 20 bp, Artificial Sequence
  Synthetic oligonucleotide; AAG chr11 5209108 5209127 5209124 +
acgaataacaacatctcagg

SEQ ID NO: 6856 - DNA, 20 bp, Artificial Sequence
  Synthetic oligonucleotide; CAG chr11 5209113 5209132 5209129 +
taacaacatctcaggaagca

SEQ ID NO: 6857 - DNA, 20 bp, Artificial Sequence
  Synthetic oligonucleotide; AGG chr11 5209114 5209133 5209130 +
aacaacatctcaggaagcac

SEQ ID NO: 6858 - DNA, 20 bp, Artificial Sequence
  Synthetic oligonucleotide; CAG chr11 5209123 5209142 5209139 +
tcaggaagcacaggatgtac

SEQ ID NO: 6859 - DNA, 20 bp, Artificial Sequence
  Synthetic oligonucleotide; GAG chr11 5209125 5209144 5209141 +
aggaagcacaggatgtacca

SEQ ID NO: 6860 - DNA, 20 bp, Artificial Sequence
  Synthetic oligonucleotide; GAG chr11 5209127 5209146 5209143 +
gaagcacaggatgtaccaga

SEQ ID NO: 6861 - DNA, 20 bp, Artificial Sequence
  Synthetic oligonucleotide; TAG chr11 5209154 5209173 5209170 +
atcttttcatgttgctttcc

SEQ ID NO: 6862 - DNA, 20 bp, Artificial Sequence
  Synthetic oligonucleotide; AGG chr11 5209155 5209174 5209171 +
tcttttcatgttgctttcct

SEQ ID NO: 6863 - DNA, 20 bp, Artificial Sequence
  Synthetic oligonucleotide; TAG chr11 5209176 5209195 5209192 +
ggctttttatttccctcctc

SEQ ID NO: 6864 - DNA, 20 bp, Artificial Sequence
  Synthetic oligonucleotide; AGG chr11 5209177 5209196 5209193 +
gctttttatttccctcctct

SEQ ID NO: 6865 - DNA, 20 bp, Artificial Sequence
  Synthetic oligonucleotide; CAG chr11 5209224 5209243 5209240 +
attatttcttccctcttctt

SEQ ID NO: 6866 - DNA, 20 bp, Artificial Sequence
  Synthetic oligonucleotide; AGG chr11 5209225 5209244 5209241 +
ttatttcttccctcttcttc

SEQ ID NO: 6867 - DNA, 20 bp, Artificial Sequence
  Synthetic oligonucleotide; AAG chr11 5209228 5209247 5209244 +
tttcttccctcttcttcagg

SEQ ID NO: 6868 - DNA, 20 bp, Artificial Sequence
  Synthetic oligonucleotide; AAG chr11 5209233 5209252 5209249 +
tccctcttcttcaggaagtt

SEQ ID NO: 6869 - DNA, 20 bp, Artificial Sequence
  Synthetic oligonucleotide; CAG chr11 5209237 5209256 5209253 +
tcttcttcaggaagttaaga

SEQ ID NO: 6870 - DNA, 20 bp, Artificial Sequence
  Synthetic oligonucleotide; TAG chr11 5209246 5209265 5209262 +
ggaagttaagacagtctacc

SEQ ID NO: 6871 - DNA, 20 bp, Artificial Sequence
  Synthetic oligonucleotide; TAG chr11 5209252 5209271 5209268 +
taagacagtctacctagatt

SEQ ID NO: 6872 - DNA, 20 bp, Artificial Sequence
  Synthetic oligonucleotide; AAG chr11 5209255 5209274 5209271 +
gacagtctacctagatttag

SEQ ID NO: 6873 - DNA, 20 bp, Artificial Sequence
  Synthetic oligonucleotide; TAG chr11 5209270 5209289 5209286 +
tttagaagcaaatgtttata

SEQ ID NO: 6874 - DNA, 20 bp, Artificial Sequence
  Synthetic oligonucleotide; TGG chr11 5209273 5209292 5209289 +
agaagcaaatgtttatatag

SEQ ID NO: 6875 - DNA, 20 bp, Artificial Sequence
  Synthetic oligonucleotide; AAG chr11 5209285 5209304 5209301 +
ttatatagtggtgaaattta

SEQ ID NO: 6876 - DNA, 20 bp, Artificial Sequence
  Synthetic oligonucleotide; AAG chr11 5209300 5209319 5209316 +
atttaaagcctaattgacta

SEQ ID NO: 6877 - DNA, 20 bp, Artificial Sequence
  Synthetic oligonucleotide; AAG chr11 5209309 5209328 5209325 +
ctaattgactaaagccattt

SEQ ID NO: 6878 - DNA, 20 bp, Artificial Sequence
  Synthetic oligonucleotide; CAG chr11 5209324 5209343 5209340 +
catttaagaatgtaatatct

SEQ ID NO: 6879 - DNA, 20 bp, Artificial Sequence
  Synthetic oligonucleotide; TAG chr11 5209328 5209347 5209344 +
taagaatgtaatatctcagt

SEQ ID NO: 6880 - DNA, 20 bp, Artificial Sequence
  Synthetic oligonucleotide; AAG chr11 5209351 5209370 5209367 +
tatgcacttcttgaaatgca

SEQ ID NO: 6881 - DNA, 20 bp, Artificial Sequence
  Synthetic oligonucleotide; TGG chr11 5209357 5209376 5209373 +
cttcttgaaatgcaaagaaa

SEQ ID NO: 6882 - DNA, 20 bp, Artificial Sequence
  Synthetic oligonucleotide; TAG chr11 5209380 5209399 5209396 +
tctgacttttttccattgtt

SEQ ID NO: 6883 - DNA, 20 bp, Artificial Sequence
  Synthetic oligonucleotide; TAG chr11 5209393 5209412 5209409 +
cattgtttagtttctaaatt

SEQ ID NO: 6884 - DNA, 20 bp, Artificial Sequence
  Synthetic oligonucleotide; AAG chr11 5209414 5209433 5209430 +
agtttttattttaatatttt

SEQ ID NO: 6885 - DNA, 20 bp, Artificial Sequence
  Synthetic oligonucleotide; CAG chr11 5209419 5209438 5209435 +
ttattttaatattttaagta

SEQ ID NO: 6886 - DNA, 20 bp, Artificial Sequence
  Synthetic oligonucleotide; AAG chr11 5209435 5209454 5209451 +
agtacagcatgcatatataa

SEQ ID NO: 6887 - DNA, 20 bp, Artificial Sequence
  Synthetic oligonucleotide; CAG chr11 5209457 5209476 5209473 +
gtacacaaattatacatgca

SEQ ID NO: 6888 - DNA, 20 bp, Artificial Sequence
  Synthetic oligonucleotide; TGG chr11 5209473 5209492 5209489 +
tgcacagctgaattaacttt

SEQ ID NO: 6889 - DNA, 20 bp, Artificial Sequence
  Synthetic oligonucleotide; AAG chr11 5209476 5209495 5209492 +
acagctgaattaacttttgg

SEQ ID NO: 6890 - DNA, 20 bp, Artificial Sequence
  Synthetic oligonucleotide; AGG chr11 5209477 5209496 5209493 +
cagctgaattaacttttgga

SEQ ID NO: 6891 - DNA, 20 bp, Artificial Sequence
  Synthetic oligonucleotide; AAG chr11 5209505 5209524 5209521 +
acacccatgtaacaactaat

SEQ ID NO: 6892 - DNA, 20 bp, Artificial Sequence
  Synthetic oligonucleotide; TAG chr11 5209509 5209528 5209525 +
ccatgtaacaactaataaga

SEQ ID NO: 6893 - DNA, 20 bp, Artificial Sequence
  Synthetic oligonucleotide; AGG chr11 5209510 5209529 5209526 +
catgtaacaactaataagat

SEQ ID NO: 6894 - DNA, 20 bp, Artificial Sequence
  Synthetic oligonucleotide; AAG chr11 5209519 5209538 5209535 +
actaataagataggaaatta

SEQ ID NO: 6895 - DNA, 20 bp, Artificial Sequence
  Synthetic oligonucleotide; GAG chr11 5209521 5209540 5209537 +
taataagataggaaattaaa

SEQ ID NO: 6896 - DNA, 20 bp, Artificial Sequence
  Synthetic oligonucleotide; AAG chr11 5209566 5209585 5209582 +
cattccactaattgtctcca

SEQ ID NO: 6897 - DNA, 20 bp, Artificial Sequence
  Synthetic oligonucleotide; AAG chr11 5209629 5209648 5209645 +
actcatgtccctttttttaa

SEQ ID NO: 6898 - DNA, 20 bp, Artificial Sequence
  Synthetic oligonucleotide; TAG chr11 5209708 5209727 5209724 +
tttgtgaattgcattcatac

SEQ ID NO: 6899 - DNA, 20 bp, Artificial Sequence
  Synthetic oligonucleotide; TAG chr11 5209721 5209740 5209737 +
ttcatactagtgtatgactg

SEQ ID NO: 6900 - DNA, 20 bp, Artificial Sequence
  Synthetic oligonucleotide; CAG chr11 5209789 5209808 5209805 +
caatatatttattgactcca

SEQ ID NO: 6901 - DNA, 20 bp, Artificial Sequence
  Synthetic oligonucleotide; TAG chr11 5209796 5209815 5209812 +
tttattgactccacagttga

SEQ ID NO: 6902 - DNA, 20 bp, Artificial Sequence
  Synthetic oligonucleotide; GAG chr11 5209805 5209824 5209821 +
tccacagttgatagatattt

SEQ ID NO: 6903 - DNA, 20 bp, Artificial Sequence
  Synthetic oligonucleotide; TAG chr11 5209815 5209834 5209831 +
atagatatttgagtaccttc

SEQ ID NO: 6904 - DNA, 20 bp, Artificial Sequence
  Synthetic oligonucleotide; TGG chr11 5209822 5209841 5209838 +
tttgagtaccttctagcttt

SEQ ID NO: 6905 - DNA, 20 bp, Artificial Sequence
  Synthetic oligonucleotide; AAG chr11 5209848 5209867 5209864 +
taatataaattgctgctatg

SEQ ID NO: 6906 - DNA, 20 bp, Artificial Sequence
  Synthetic oligonucleotide; TAG chr11 5209889 5209908 5209905 +
atatatattctgtaaattgc

SEQ ID NO: 6907 - DNA, 20 bp, Artificial Sequence
  Synthetic oligonucleotide; AGG chr11 5209890 5209909 5209906 +
tatatattctgtaaattgct

SEQ ID NO: 6908 - DNA, 20 bp, Artificial Sequence
  Synthetic oligonucleotide; TGG chr11 5209969 5209988 5209985 +
cactataatttaatgtcatt

SEQ ID NO: 6909 - DNA, 20 bp, Artificial Sequence
  Synthetic oligonucleotide; TAG chr11 5209988 5210007 5210004 +
ttggtcaacctataatatca

SEQ ID NO: 6910 - DNA, 20 bp, Artificial Sequence
  Synthetic oligonucleotide; TAG chr11 5210004 5210023 5210020 +
atcatagatgttttctctta

SEQ ID NO: 6911 - DNA, 20 bp, Artificial Sequence
  Synthetic oligonucleotide; CAG chr11 5210007 5210026 5210023 +
atagatgttttctcttatag

SEQ ID NO: 6912 - DNA, 20 bp, Artificial Sequence
  Synthetic oligonucleotide; CAG chr11 5210022 5210041 5210038 +
tatagcagcctgcatgtgcc

SEQ ID NO: 6913 - DNA, 20 bp, Artificial Sequence
  Synthetic oligonucleotide; TAG chr11 5210056 5210075 5210072 +
atcctttgtatatttacatt

SEQ ID NO: 6914 - DNA, 20 bp, Artificial Sequence
  Synthetic oligonucleotide; TAG chr11 5210076 5210095 5210092 +
tagttctgtattattacaat

SEQ ID NO: 6915 - DNA, 20 bp, Artificial Sequence
  Synthetic oligonucleotide; TAG chr11 5210083 5210102 5210099 +
gtattattacaattagttcg

SEQ ID NO: 6916 - DNA, 20 bp, Artificial Sequence
  Synthetic oligonucleotide; TAG chr11 5210110 5210129 5210126 +
gttattattattctcatttg

SEQ ID NO: 6917 - DNA, 20 bp, Artificial Sequence
  Synthetic oligonucleotide; AAG chr11 5210116 5210135 5210132 +
attattctcatttgtagttg

SEQ ID NO: 6918 - DNA, 20 bp, Artificial Sequence
  Synthetic oligonucleotide; CAG chr11 5210130 5210149 5210146 +
tagttgaagaaattgcactc

SEQ ID NO: 6919 - DNA, 20 bp, Artificial Sequence
  Synthetic oligonucleotide; AAG chr11 5210134 5210153 5210150 +
tgaagaaattgcactccagc

SEQ ID NO: 6920 - DNA, 20 bp, Artificial Sequence
  Synthetic oligonucleotide; TGG chr11 5210150 5210169 5210166 +
cagcaagtttaaattgctcc

SEQ ID NO: 6921 - DNA, 20 bp, Artificial Sequence
  Synthetic oligonucleotide; CAG chr11 5210161 5210180 5210177 +
aattgctcctggctacatcc

SEQ ID NO: 6922 - DNA, 20 bp, Artificial Sequence
  Synthetic oligonucleotide; TAG chr11 5210206 5210225 5210222 +
actttttgcccctacttgac

SEQ ID NO: 6923 - DNA, 20 bp, Artificial Sequence
  Synthetic oligonucleotide; AGG chr11 5210207 5210226 5210223 +
ctttttgcccctacttgact

SEQ ID NO: 6924 - DNA, 20 bp, Artificial Sequence
  Synthetic oligonucleotide; AAG chr11 5210219 5210238 5210235 +
acttgactaggaattgtata

SEQ ID NO: 6925 - DNA, 20 bp, Artificial Sequence
  Synthetic oligonucleotide; GAG chr11 5210221 5210240 5210237 +
ttgactaggaattgtataaa

SEQ ID NO: 6926 - DNA, 20 bp, Artificial Sequence
  Synthetic oligonucleotide; CAG chr11 5210226 5210245 5210242 +
taggaattgtataaagagaa

SEQ ID NO: 6927 - DNA, 20 bp, Artificial Sequence
  Synthetic oligonucleotide; TAG chr11 5210238 5210257 5210254 +
aaagagaacagttattcttc

SEQ ID NO: 6928 - DNA, 20 bp, Artificial Sequence
  Synthetic oligonucleotide; TGG chr11 5210241 5210260 5210257 +
gagaacagttattcttctag

SEQ ID NO: 6929 - DNA, 20 bp, Artificial Sequence
  Synthetic oligonucleotide; GGG chr11 5210242 5210261 5210258 +
agaacagttattcttctagt

SEQ ID NO: 6930 - DNA, 20 bp, Artificial Sequence
  Synthetic oligonucleotide; AAG chr11 5210245 5210264 5210261 +
acagttattcttctagtggg

SEQ ID NO: 6931 - DNA, 20 bp, Artificial Sequence
  Synthetic oligonucleotide; AAG chr11 5210249 5210268 5210265 +
ttattcttctagtgggaagc

SEQ ID NO: 6932 - DNA, 20 bp, Artificial Sequence
  Synthetic oligonucleotide; TGG chr11 5210253 5210272 5210269 +
tcttctagtgggaagcaagc

SEQ ID NO: 6933 - DNA, 20 bp, Artificial Sequence
  Synthetic oligonucleotide; TGG chr11 5210263 5210282 5210279 +
ggaagcaagctggcctcaac

SEQ ID NO: 6934 - DNA, 20 bp, Artificial Sequence
  Synthetic oligonucleotide; CAG chr11 5210268 5210287 5210284 +
caagctggcctcaactggaa

SEQ ID NO: 6935 - DNA, 20 bp, Artificial Sequence
  Synthetic oligonucleotide; GAG chr11 5210274 5210293 5210290 +
ggcctcaactggaacagaat

SEQ ID NO: 6936 - DNA, 20 bp, Artificial Sequence
  Synthetic oligonucleotide; GAG chr11 5210276 5210295 5210292 +
cctcaactggaacagaatga

SEQ ID NO: 6937 - DNA, 20 bp, Artificial Sequence
  Synthetic oligonucleotide; AAG chr11 5210285 5210304 5210301 +
gaacagaatgagagaaatgc

SEQ ID NO: 6938 - DNA, 20 bp, Artificial Sequence
  Synthetic oligonucleotide; CAG chr11 5210304 5210323 5210320 +
caagacatctaataatccaa

SEQ ID NO: 6939 - DNA, 20 bp, Artificial Sequence
  Synthetic oligonucleotide; TGG chr11 5210345 5210364 5210361 +
gtactttttccttttcccca

SEQ ID NO: 6940 - DNA, 20 bp, Artificial Sequence
  Synthetic oligonucleotide; GAG chr11 5210347 5210366 5210363 +
actttttccttttccccatg

SEQ ID NO: 6941 - DNA, 20 bp, Artificial Sequence
  Synthetic oligonucleotide; AAG chr11 5210352 5210371 5210368 +
ttccttttccccatggagtc

SEQ ID NO: 6942 - DNA, 20 bp, Artificial Sequence
  Synthetic oligonucleotide; AGG chr11 5210353 5210372 5210369 +
tccttttccccatggagtca

SEQ ID NO: 6943 - DNA, 20 bp, Artificial Sequence
  Synthetic oligonucleotide; AAG chr11 5210373 5210392 5210389 +
aggctatctaaacttccttt

SEQ ID NO: 6944 - DNA, 20 bp, Artificial Sequence
  Synthetic oligonucleotide; AAG chr11 5210381 5210400 5210397 +
taaacttcctttaagtgcac

SEQ ID NO: 6945 - DNA, 20 bp, Artificial Sequence
  Synthetic oligonucleotide; TGG chr11 5210390 5210409 5210406 +
tttaagtgcacaagctaata

SEQ ID NO: 6946 - DNA, 20 bp, Artificial Sequence
  Synthetic oligonucleotide; TAG chr11 5210393 5210412 5210409 +
aagtgcacaagctaatatgg

SEQ ID NO: 6947 - DNA, 20 bp, Artificial Sequence
  Synthetic oligonucleotide; AGG chr11 5210394 5210413 5210410 +
agtgcacaagctaatatggt

SEQ ID NO: 6948 - DNA, 20 bp, Artificial Sequence
  Synthetic oligonucleotide; GGG chr11 5210395 5210414 5210411 +
gtgcacaagctaatatggta

SEQ ID NO: 6949 - DNA, 20 bp, Artificial Sequence
  Synthetic oligonucleotide; AAG chr11 5210405 5210424 5210421 +
taatatggtagggaaatata

SEQ ID NO: 6950 - DNA, 20 bp, Artificial Sequence
  Synthetic oligonucleotide; CAG chr11 5210423 5210442 5210439 +
taaagcctaatcctgccatc

SEQ ID NO: 6951 - DNA, 20 bp, Artificial Sequence
  Synthetic oligonucleotide; GAG chr11 5210429 5210448 5210445 +
ctaatcctgccatccagaat

SEQ ID NO: 6952 - DNA, 20 bp, Artificial Sequence
  Synthetic oligonucleotide; AAG chr11 5210433 5210452 5210449 +
tcctgccatccagaatgagc

SEQ ID NO: 6953 - DNA, 20 bp, Artificial Sequence
  Synthetic oligonucleotide; TGG chr11 5210436 5210455 5210452 +
tgccatccagaatgagcaag

SEQ ID NO: 6954 - DNA, 20 bp, Artificial Sequence
  Synthetic oligonucleotide; TGG chr11 5210440 5210459 5210456 +
atccagaatgagcaagtgga

SEQ ID NO: 6955 - DNA, 20 bp, Artificial Sequence
  Synthetic oligonucleotide; GGG chr11 5210441 5210460 5210457 +
tccagaatgagcaagtggat

SEQ ID NO: 6956 - DNA, 20 bp, Artificial Sequence
  Synthetic oligonucleotide; GGG chr11 5210442 5210461 5210458 +
ccagaatgagcaagtggatg

SEQ ID NO: 6957 - DNA, 20 bp, Artificial Sequence
  Synthetic oligonucleotide; AAG chr11 5210447 5210466 5210463 +
atgagcaagtggatggggaa

SEQ ID NO: 6958 - DNA, 20 bp, Artificial Sequence
  Synthetic oligonucleotide; AGG chr11 5210448 5210467 5210464 +
tgagcaagtggatggggaaa

SEQ ID NO: 6959 - DNA, 20 bp, Artificial Sequence
  Synthetic oligonucleotide; GGG chr11 5210449 5210468 5210465 +
gagcaagtggatggggaaaa

SEQ ID NO: 6960 - DNA, 20 bp, Artificial Sequence
  Synthetic oligonucleotide; AAG chr11 5210452 5210471 5210468 +
caagtggatggggaaaaggg

SEQ ID NO: 6961 - DNA, 20 bp, Artificial Sequence
  Synthetic oligonucleotide; AGG chr11 5210453 5210472 5210469 +
aagtggatggggaaaaggga

SEQ ID NO: 6962 - DNA, 20 bp, Artificial Sequence
  Synthetic oligonucleotide; GGG chr11 5210454 5210473 5210470 +
agtggatggggaaaagggaa

SEQ ID NO: 6963 - DNA, 20 bp, Artificial Sequence
  Synthetic oligonucleotide; AAG chr11 5210460 5210479 5210476 +
tggggaaaagggaagggaaa

SEQ ID NO: 6964 - DNA, 20 bp, Artificial Sequence
  Synthetic oligonucleotide; AGG chr11 5210461 5210480 5210477 +
ggggaaaagggaagggaaaa

SEQ ID NO: 6965 - DNA, 20 bp, Artificial Sequence
  Synthetic oligonucleotide; GAG chr11 5210463 5210482 5210479 +
ggaaaagggaagggaaaaag

SEQ ID NO: 6966 - DNA, 20 bp, Artificial Sequence
  Synthetic oligonucleotide; CAG chr11 5210466 5210485 5210482 +
aaagggaagggaaaaaggag

SEQ ID NO: 6967 - DNA, 20 bp, Artificial Sequence
  Synthetic oligonucleotide; AAG chr11 5210477 5210496 5210493 +
aaaaaggagcagaatctgcc

SEQ ID NO: 6968 - DNA, 20 bp, Artificial Sequence
  Synthetic oligonucleotide; CAG chr11 5210517 5210536 5210533 +
tgtttctcccacttgctctg

SEQ ID NO: 6969 - DNA, 20 bp, Artificial Sequence
  Synthetic oligonucleotide; AGG chr11 5210518 5210537 5210534 +
gtttctcccacttgctctgc

SEQ ID NO: 6970 - DNA, 20 bp, Artificial Sequence
  Synthetic oligonucleotide; TGG chr11 5210522 5210541 5210538 +
ctcccacttgctctgcagga

SEQ ID NO: 6971 - DNA, 20 bp, Artificial Sequence
  Synthetic oligonucleotide; TAG chr11 5210527 5210546 5210543 +
acttgctctgcaggatggct

SEQ ID NO: 6972 - DNA, 20 bp, Artificial Sequence
  Synthetic oligonucleotide; CAG chr11 5210530 5210549 5210546 +
tgctctgcaggatggcttag

SEQ ID NO: 6973 - DNA, 20 bp, Artificial Sequence
  Synthetic oligonucleotide; CAG chr11 5210537 5210556 5210553 +
caggatggcttagcagctcc

SEQ ID NO: 6974 - DNA, 20 bp, Artificial Sequence
  Synthetic oligonucleotide; CAG chr11 5210542 5210561 5210558 +
tggcttagcagctcccagct

SEQ ID NO: 6975 - DNA, 20 bp, Artificial Sequence
  Synthetic oligonucleotide; AGG chr11 5210543 5210562 5210559 +
ggcttagcagctcccagctc

SEQ ID NO: 6976 - DNA, 20 bp, Artificial Sequence
  Synthetic oligonucleotide; GGG chr11 5210544 5210563 5210560 +
gcttagcagctcccagctca

SEQ ID NO: 6977 - DNA, 20 bp, Artificial Sequence
  Synthetic oligonucleotide; CAG chr11 5210552 5210571 5210568 +
gctcccagctcagggcctat

SEQ ID NO: 6978 - DNA, 20 bp, Artificial Sequence
  Synthetic oligonucleotide; GAG chr11 5210554 5210573 5210570 +
tcccagctcagggcctatca

SEQ ID NO: 6979 - DNA, 20 bp, Artificial Sequence
  Synthetic oligonucleotide; AGG chr11 5210555 5210574 5210571 +
cccagctcagggcctatcag

SEQ ID NO: 6980 - DNA, 20 bp, Artificial Sequence
  Synthetic oligonucleotide; GAG chr11 5210560 5210579 5210576 +
ctcagggcctatcagaggct

SEQ ID NO: 6981 - DNA, 20 bp, Artificial Sequence
  Synthetic oligonucleotide; AAG chr11 5210563 5210582 5210579 +
agggcctatcagaggctgag

SEQ ID NO: 6982 - DNA, 20 bp, Artificial Sequence
  Synthetic oligonucleotide; AGG chr11 5210564 5210583 5210580 +
gggcctatcagaggctgaga

SEQ ID NO: 6983 - DNA, 20 bp, Artificial Sequence
  Synthetic oligonucleotide; CGG chr11 5210568 5210587 5210584 +
ctatcagaggctgagaaggt

SEQ ID NO: 6984 - DNA, 20 bp, Artificial Sequence
  Synthetic oligonucleotide; AAG chr11 5210602 5210621 5210618 +
attttattccttcactaaca

SEQ ID NO: 6985 - DNA, 20 bp, Artificial Sequence
  Synthetic oligonucleotide; CAG chr11 5210611 5210630 5210627 +
cttcactaacaaagcaaacc

SEQ ID NO: 6986 - DNA, 20 bp, Artificial Sequence
  Synthetic oligonucleotide; CGG chr11 5210647 5210666 5210663 +
ctctcctctatgcactctct

SEQ ID NO: 6987 - DNA, 20 bp, Artificial Sequence
  Synthetic oligonucleotide; GGG chr11 5210648 5210667 5210664 +
tctcctctatgcactctctc

SEQ ID NO: 6988 - DNA, 20 bp, Artificial Sequence
  Synthetic oligonucleotide; GGG chr11 5210649 5210668 5210665 +
ctcctctatgcactctctcg

SEQ ID NO: 6989 - DNA, 20 bp, Artificial Sequence
  Synthetic oligonucleotide; TAG chr11 5210668 5210687 5210684 +
ggggcacttcctaatctcgt

SEQ ID NO: 6990 - DNA, 20 bp, Artificial Sequence
  Synthetic oligonucleotide; TAG chr11 5210683 5210702 5210699 +
ctcgttagtaccttttgaat

SEQ ID NO: 6991 - DNA, 20 bp, Artificial Sequence
  Synthetic oligonucleotide; AAG chr11 5210691 5210710 5210707 +
taccttttgaattagttttc

SEQ ID NO: 6992 - DNA, 20 bp, Artificial Sequence
  Synthetic oligonucleotide; TAG chr11 5210695 5210714 5210711 +
ttttgaattagttttcaaga

SEQ ID NO: 6993 - DNA, 20 bp, Artificial Sequence
  Synthetic oligonucleotide; AGG chr11 5210696 5210715 5210712 +
tttgaattagttttcaagat

SEQ ID NO: 6994 - DNA, 20 bp, Artificial Sequence
  Synthetic oligonucleotide; GAG chr11 5210703 5210722 5210719 +
tagttttcaagataggactt

SEQ ID NO: 6995 - DNA, 20 bp, Artificial Sequence
  Synthetic oligonucleotide; AAG chr11 5210713 5210732 5210729 +
gataggacttgagttcctcg

SEQ ID NO: 6996 - DNA, 20 bp, Artificial Sequence
  Synthetic oligonucleotide; AGG chr11 5210714 5210733 5210730 +
ataggacttgagttcctcga

SEQ ID NO: 6997 - DNA, 20 bp, Artificial Sequence
  Synthetic oligonucleotide; TAG chr11 5210719 5210738 5210735 +
acttgagttcctcgaaggat

SEQ ID NO: 6998 - DNA, 20 bp, Artificial Sequence
  Synthetic oligonucleotide; CAG chr11 5210729 5210748 5210745 +
ctcgaaggattagaaaataa

SEQ ID NO: 6999 - DNA, 20 bp, Artificial Sequence
  Synthetic oligonucleotide; CAG chr11 5210735 5210754 5210751 +
ggattagaaaataacagtaa

SEQ ID NO: 7000 - DNA, 20 bp, Artificial Sequence
  Synthetic oligonucleotide; TGG chr11 5210749 5210768 5210765 +
cagtaacagttcatgttgtc

SEQ ID NO: 7001 - DNA, 20 bp, Artificial Sequence
  Synthetic oligonucleotide; GGG chr11 5210750 5210769 5210766 +
agtaacagttcatgttgtct

SEQ ID NO: 7002 - DNA, 20 bp, Artificial Sequence
  Synthetic oligonucleotide; AAG chr11 5210755 5210774 5210771 +
cagttcatgttgtctgggcc

SEQ ID NO: 7003 - DNA, 20 bp, Artificial Sequence
  Synthetic oligonucleotide; CAG chr11 5210760 5210779 5210776 +
catgttgtctgggccaagca

SEQ ID NO: 7004 - DNA, 20 bp, Artificial Sequence
  Synthetic oligonucleotide; TGG chr11 5210763 5210782 5210779 +
gttgtctgggccaagcacag

SEQ ID NO: 7005 - DNA, 20 bp, Artificial Sequence
  Synthetic oligonucleotide; CAG chr11 5210782 5210801 5210798 +
gtggctcacacctgtaatca

SEQ ID NO: 7006 - DNA, 20 bp, Artificial Sequence
  Synthetic oligonucleotide; GAG chr11 5210787 5210806 5210803 +
tcacacctgtaatcacagcc

SEQ ID NO: 7007 - DNA, 20 bp, Artificial Sequence
  Synthetic oligonucleotide; AGG chr11 5210788 5210807 5210804 +
cacacctgtaatcacagccg

SEQ ID NO: 7008 - DNA, 20 bp, Artificial Sequence
  Synthetic oligonucleotide; CGG chr11 5210792 5210811 5210808 +
cctgtaatcacagccgaggc

SEQ ID NO: 7009 - DNA, 20 bp, Artificial Sequence
  Synthetic oligonucleotide; GAG chr11 5210794 5210813 5210810 +
tgtaatcacagccgaggccg

SEQ ID NO: 7010 - DNA, 20 bp, Artificial Sequence
  Synthetic oligonucleotide; AGG chr11 5210795 5210814 5210811 +
gtaatcacagccgaggccgg

SEQ ID NO: 7011 - DNA, 20 bp, Artificial Sequence
  Synthetic oligonucleotide; GGG chr11 5210796 5210815 5210812 +
taatcacagccgaggccgga

SEQ ID NO: 7012 - DNA, 20 bp, Artificial Sequence
  Synthetic oligonucleotide; GAG chr11 5210798 5210817 5210814 +
atcacagccgaggccggagg

SEQ ID NO: 7013 - DNA, 20 bp, Artificial Sequence
  Synthetic oligonucleotide; GAG chr11 5210809 5210828 5210825 +
ggccggagggagaacgattt

SEQ ID NO: 7014 - DNA, 20 bp, Artificial Sequence
  Synthetic oligonucleotide; CAG chr11 5210814 5210833 5210830 +
gagggagaacgatttgagct

SEQ ID NO: 7015 - DNA, 20 bp, Artificial Sequence
  Synthetic oligonucleotide; AGG chr11 5210815 5210834 5210831 +
agggagaacgatttgagctc

SEQ ID NO: 7016 - DNA, 20 bp, Artificial Sequence
  Synthetic oligonucleotide; GAG chr11 5210817 5210836 5210833 +
ggagaacgatttgagctcag

SEQ ID NO: 7017 - DNA, 20 bp, Artificial Sequence
  Synthetic oligonucleotide; TGG chr11 5210821 5210840 5210837 +
aacgatttgagctcaggagt

SEQ ID NO: 7018 - DNA, 20 bp, Artificial Sequence
  Synthetic oligonucleotide; GAG chr11 5210823 5210842 5210839 +
cgatttgagctcaggagttg

SEQ ID NO: 7019 - DNA, 20 bp, Artificial Sequence
  Synthetic oligonucleotide; CAG chr11 5210828 5210847 5210844 +
tgagctcaggagttggagac

SEQ ID NO: 7020 - DNA, 20 bp, Artificial Sequence
  Synthetic oligonucleotide; TGG chr11 5210833 5210852 5210849 +
tcaggagttggagaccagct

SEQ ID NO: 7021 - DNA, 20 bp, Artificial Sequence
  Synthetic oligonucleotide; GGG chr11 5210834 5210853 5210850 +
caggagttggagaccagctt

SEQ ID NO: 7022 - DNA, 20 bp, Artificial Sequence
  Synthetic oligonucleotide; TGG chr11 5210842 5210861 5210858 +
ggagaccagcttgggcaaca

SEQ ID NO: 7023 - DNA, 20 bp, Artificial Sequence
  Synthetic oligonucleotide; GAG chr11 5210844 5210863 5210860 +
agaccagcttgggcaacatg

SEQ ID NO: 7024 - DNA, 20 bp, Artificial Sequence
  Synthetic oligonucleotide; AAG chr11 5210874 5210893 5210890 +
tctctacaaaaaattttaaa

SEQ ID NO: 7025 - DNA, 20 bp, Artificial Sequence
  Synthetic oligonucleotide; TAG chr11 5210877 5210896 5210893 +
ctacaaaaaattttaaaaag

SEQ ID NO: 7026 - DNA, 20 bp, Artificial Sequence
  Synthetic oligonucleotide; TGG chr11 5210887 5210906 5210903 +
ttttaaaaagtagccgaata

SEQ ID NO: 7027 - DNA, 20 bp, Artificial Sequence
  Synthetic oligonucleotide; TAG chr11 5210903 5210922 5210919 +
aatatggtgttacgtgcctg

SEQ ID NO: 7028 - DNA, 20 bp, Artificial Sequence
  Synthetic oligonucleotide; CAG chr11 5210909 5210928 5210925 +
gtgttacgtgcctgtagtcc

SEQ ID NO: 7029 - DNA, 20 bp, Artificial Sequence
  Synthetic oligonucleotide; TGG chr11 5210917 5210936 5210933 +
tgcctgtagtcccagctact

SEQ ID NO: 7030 - DNA, 20 bp, Artificial Sequence
  Synthetic oligonucleotide; GGG chr11 5210918 5210937 5210934 +
gcctgtagtcccagctactt

SEQ ID NO: 7031 - DNA, 20 bp, Artificial Sequence
  Synthetic oligonucleotide; GAG chr11 5210920 5210939 5210936 +
ctgtagtcccagctacttgg

SEQ ID NO: 7032 - DNA, 20 bp, Artificial Sequence
  Synthetic oligonucleotide; AGG chr11 5210921 5210940 5210937 +
tgtagtcccagctacttggg

SEQ ID NO: 7033 - DNA, 20 bp, Artificial Sequence
  Synthetic oligonucleotide; GAG chr11 5210926 5210945 5210942 +
tcccagctacttgggaggct

SEQ ID NO: 7034 - DNA, 20 bp, Artificial Sequence
  Synthetic oligonucleotide; AGG chr11 5210927 5210946 5210943 +
cccagctacttgggaggctg

SEQ ID NO: 7035 - DNA, 20 bp, Artificial Sequence
  Synthetic oligonucleotide; TGG chr11 5210930 5210949 5210946 +
agctacttgggaggctgagg

SEQ ID NO: 7036 - DNA, 20 bp, Artificial Sequence
  Synthetic oligonucleotide; AAG chr11 5210933 5210952 5210949 +
tacttgggaggctgaggtgg

SEQ ID NO: 7037 - DNA, 20 bp, Artificial Sequence
  Synthetic oligonucleotide; AGG chr11 5210934 5210953 5210950 +
acttgggaggctgaggtgga

SEQ ID NO: 7038 - DNA, 20 bp, Artificial Sequence
  Synthetic oligonucleotide; GAG chr11 5210944 5210963 5210960 +
ctgaggtggaaggatatctt

SEQ ID NO: 7039 - DNA, 20 bp, Artificial Sequence
  Synthetic oligonucleotide; AAG chr11 5210949 5210968 5210965 +
gtggaaggatatcttgagcc

SEQ ID NO: 7040 - DNA, 20 bp, Artificial Sequence
  Synthetic oligonucleotide; AGG chr11 5210950 5210969 5210966 +
tggaaggatatcttgagcca

SEQ ID NO: 7041 - DNA, 20 bp, Artificial Sequence
  Synthetic oligonucleotide; GAG chr11 5210952 5210971 5210968 +
gaaggatatcttgagccaag

SEQ ID NO: 7042 - DNA, 20 bp, Artificial Sequence
  Synthetic oligonucleotide; AGG chr11 5210953 5210972 5210969 +
aaggatatcttgagccaagg

SEQ ID NO: 7043 - DNA, 20 bp, Artificial Sequence
  Synthetic oligonucleotide; GGG chr11 5210954 5210973 5210970 +
aggatatcttgagccaagga

SEQ ID NO: 7044 - DNA, 20 bp, Artificial Sequence
  Synthetic oligonucleotide; GGG chr11 5210955 5210974 5210971 +
ggatatcttgagccaaggag

SEQ ID NO: 7045 - DNA, 20 bp, Artificial Sequence
  Synthetic oligonucleotide; GGG chr11 5210956 5210975 5210972 +
gatatcttgagccaaggagg

SEQ ID NO: 7046 - DNA, 20 bp, Artificial Sequence
  Synthetic oligonucleotide; GAG chr11 5210958 5210977 5210974 +
tatcttgagccaaggagggg

SEQ ID NO: 7047 - DNA, 20 bp, Artificial Sequence
  Synthetic oligonucleotide; CAG chr11 5210965 5210984 5210981 +
agccaaggagggggagattg

SEQ ID NO: 7048 - DNA, 20 bp, Artificial Sequence
  Synthetic oligonucleotide; GAG chr11 5210969 5210988 5210985 +
aaggagggggagattgcagt

SEQ ID NO: 7049 - DNA, 20 bp, Artificial Sequence
  Synthetic oligonucleotide; AAG chr11 5210974 5210993 5210990 +
gggggagattgcagtgagca

SEQ ID NO: 7050 - DNA, 20 bp, Artificial Sequence
  Synthetic oligonucleotide; TGG chr11 5210999 5211018 5211015 +
tgtaccactgcactccaacc

SEQ ID NO: 7051 - DNA, 20 bp, Artificial Sequence
  Synthetic oligonucleotide; GGG chr11 5211000 5211019 5211016 +
gtaccactgcactccaacct

SEQ ID NO: 7052 - DNA, 20 bp, Artificial Sequence
  Synthetic oligonucleotide; CAG chr11 5211008 5211027 5211024 +
gcactccaacctgggcaaca

SEQ ID NO: 7053 - DNA, 20 bp, Artificial Sequence
  Synthetic oligonucleotide; GAG chr11 5211012 5211031 5211028 +
tccaacctgggcaacacagc

SEQ ID NO: 7054 - DNA, 20 bp, Artificial Sequence
  Synthetic oligonucleotide; AAG chr11 5211035 5211054 5211051 +
accctgtcaaaaaaaaaaaa

SEQ ID NO: 7055 - DNA, 20 bp, Artificial Sequence
  Synthetic oligonucleotide; GAG chr11 5211037 5211056 5211053 +
cctgtcaaaaaaaaaaaaaa

SEQ ID NO: 7056 - DNA, 20 bp, Artificial Sequence
  Synthetic oligonucleotide; GAG chr11 5211039 5211058 5211055 +
tgtcaaaaaaaaaaaaaaga

SEQ ID NO: 7057 - DNA, 20 bp, Artificial Sequence
  Synthetic oligonucleotide; TAG chr11 5211043 5211062 5211059 +
aaaaaaaaaaaaaagagagc

SEQ ID NO: 7058 - DNA, 20 bp, Artificial Sequence
  Synthetic oligonucleotide; AAG chr11 5211047 5211066 5211063 +
aaaaaaaaaagagagctaga

SEQ ID NO: 7059 - DNA, 20 bp, Artificial Sequence
  Synthetic oligonucleotide; AAG chr11 5211051 5211070 5211067 +
aaaaaagagagctagaaaga

SEQ ID NO: 7060 - DNA, 20 bp, Artificial Sequence
  Synthetic oligonucleotide; CAG chr11 5211066 5211085 5211082 +
aaagaaagaaattaacaatt

SEQ ID NO: 7061 - DNA, 20 bp, Artificial Sequence
  Synthetic oligonucleotide; AGG chr11 5211067 5211086 5211083 +
aagaaagaaattaacaattc

SEQ ID NO: 7062 - DNA, 20 bp, Artificial Sequence
  Synthetic oligonucleotide; CAG chr11 5211074 5211093 5211090 +
aaattaacaattcaggttgt

SEQ ID NO: 7063 - DNA, 20 bp, Artificial Sequence
  Synthetic oligonucleotide; AAG chr11 5211077 5211096 5211093 +
ttaacaattcaggttgtcag

SEQ ID NO: 7064 - DNA, 20 bp, Artificial Sequence
  Synthetic oligonucleotide; TAG chr11 5211101 5211120 5211117 +
aactgaatgtctttaacaaa

SEQ ID NO: 7065 - DNA, 20 bp, Artificial Sequence
  Synthetic oligonucleotide; AGG chr11 5211102 5211121 5211118 +
actgaatgtctttaacaaat

SEQ ID NO: 7066 - DNA, 20 bp, Artificial Sequence
  Synthetic oligonucleotide; GAG chr11 5211104 5211123 5211120 +
tgaatgtctttaacaaatag

SEQ ID NO: 7067 - DNA, 20 bp, Artificial Sequence
  Synthetic oligonucleotide; TAG chr11 5211110 5211129 5211126 +
tctttaacaaataggagcca

SEQ ID NO: 7068 - DNA, 20 bp, Artificial Sequence
  Synthetic oligonucleotide; AGG chr11 5211111 5211130 5211127 +
ctttaacaaataggagccat

SEQ ID NO: 7069 - DNA, 20 bp, Artificial Sequence
  Synthetic oligonucleotide; GAG chr11 5211136 5211155 5211152 +
taaattgctcacattatttt

SEQ ID NO: 7070 - DNA, 20 bp, Artificial Sequence
  Synthetic oligonucleotide; AGG chr11 5211137 5211156 5211153 +
aaattgctcacattattttg

SEQ ID NO: 7071 - DNA, 20 bp, Artificial Sequence
  Synthetic oligonucleotide; GGG chr11 5211138 5211157 5211154 +
aattgctcacattattttga

SEQ ID NO: 7072 - DNA, 20 bp, Artificial Sequence
  Synthetic oligonucleotide; CAG chr11 5211183 5211202 5211199 +
ttttacctccaacatatata

SEQ ID NO: 7073 - DNA, 20 bp, Artificial Sequence
  Synthetic oligonucleotide; TAG chr11 5211203 5211222 5211219 +
cagtttttatatttactata

SEQ ID NO: 7074 - DNA, 20 bp, Artificial Sequence
  Synthetic oligonucleotide; AGG chr11 5211204 5211223 5211220 +
agtttttatatttactatat

SEQ ID NO: 7075 - DNA, 20 bp, Artificial Sequence
  Synthetic oligonucleotide; AAG chr11 5211244 5211263 5211260 +
ttgcataaaatcaaattaca

SEQ ID NO: 7076 - DNA, 20 bp, Artificial Sequence
  Synthetic oligonucleotide; AAG chr11 5211247 5211266 5211263 +
cataaaatcaaattacaaag

SEQ ID NO: 7077 - DNA, 20 bp, Artificial Sequence
  Synthetic oligonucleotide; AGG chr11 5211248 5211267 5211264 +
ataaaatcaaattacaaaga

SEQ ID NO: 7078 - DNA, 20 bp, Artificial Sequence
  Synthetic oligonucleotide; CAG chr11 5211252 5211271 5211268 +
aatcaaattacaaagaagga

SEQ ID NO: 7079 - DNA, 20 bp, Artificial Sequence
  Synthetic oligonucleotide; GAG chr11 5211254 5211273 5211270 +
tcaaattacaaagaaggaca

SEQ ID NO: 7080 - DNA, 20 bp, Artificial Sequence
  Synthetic oligonucleotide; TAG chr11 5211301 5211320 5211317 +
cgcataaaacaacattttgt

SEQ ID NO: 7081 - DNA, 20 bp, Artificial Sequence
  Synthetic oligonucleotide; AAG chr11 5211314 5211333 5211330 +
attttgttagacttaaaaac

SEQ ID NO: 7082 - DNA, 20 bp, Artificial Sequence
  Synthetic oligonucleotide; AAG chr11 5211334 5211353 5211350 +
aagctgattataactataaa

SEQ ID NO: 7083 - DNA, 20 bp, Artificial Sequence
  Synthetic oligonucleotide; TAG chr11 5211349 5211368 5211365 +
ataaaaagatatgtgactaa

SEQ ID NO: 7084 - DNA, 20 bp, Artificial Sequence
  Synthetic oligonucleotide; AGG chr11 5211350 5211369 5211366 +
taaaaagatatgtgactaat

SEQ ID NO: 7085 - DNA, 20 bp, Artificial Sequence
  Synthetic oligonucleotide; TGG chr11 5211353 5211372 5211369 +
aaagatatgtgactaatagg

SEQ ID NO: 7086 - DNA, 20 bp, Artificial Sequence
  Synthetic oligonucleotide; AAG chr11 5211357 5211376 5211373 +
atatgtgactaataggtgga

SEQ ID NO: 7087 - DNA, 20 bp, Artificial Sequence
  Synthetic oligonucleotide; GAG chr11 5211359 5211378 5211375 +
atgtgactaataggtggaaa

SEQ ID NO: 7088 - DNA, 20 bp, Artificial Sequence
  Synthetic oligonucleotide; AGG chr11 5211360 5211379 5211376 +
tgtgactaataggtggaaag

SEQ ID NO: 7089 - DNA, 20 bp, Artificial Sequence
  Synthetic oligonucleotide; GAG chr11 5211362 5211381 5211378 +
tgactaataggtggaaagag

SEQ ID NO: 7090 - DNA, 20 bp, Artificial Sequence
  Synthetic oligonucleotide; AAG chr11 5211366 5211385 5211382 +
taataggtggaaagaggagc

SEQ ID NO: 7091 - DNA, 20 bp, Artificial Sequence
  Synthetic oligonucleotide; AGG chr11 5211367 5211386 5211383 +
aataggtggaaagaggagca

SEQ ID NO: 7092 - DNA, 20 bp, Artificial Sequence
  Synthetic oligonucleotide; AAG chr11 5211370 5211389 5211386 +
aggtggaaagaggagcaagg

SEQ ID NO: 7093 - DNA, 20 bp, Artificial Sequence
  Synthetic oligonucleotide; TGG chr11 5211380 5211399 5211396 +
aggagcaaggaagaataaaa

SEQ ID NO: 7094 - DNA, 20 bp, Artificial Sequence
  Synthetic oligonucleotide; GGG chr11 5211381 5211400 5211397 +
ggagcaaggaagaataaaat

SEQ ID NO: 7095 - DNA, 20 bp, Artificial Sequence
  Synthetic oligonucleotide; GAG chr11 5211383 5211402 5211399 +
agcaaggaagaataaaatgg

SEQ ID NO: 7096 - DNA, 20 bp, Artificial Sequence
  Synthetic oligonucleotide; AGG chr11 5211384 5211403 5211400 +
gcaaggaagaataaaatggg

SEQ ID NO: 7097 - DNA, 20 bp, Artificial Sequence
  Synthetic oligonucleotide; AAG chr11 5211388 5211407 5211404 +
ggaagaataaaatgggagga

SEQ ID NO: 7098 - DNA, 20 bp, Artificial Sequence
  Synthetic oligonucleotide; AAG chr11 5211399 5211418 5211415 +
atgggaggaaagaactgcta

SEQ ID NO: 7099 - DNA, 20 bp, Artificial Sequence
  Synthetic oligonucleotide; TGG chr11 5211410 5211429 5211426 +
gaactgctaaagactcacga

SEQ ID NO: 7100 - DNA, 20 bp, Artificial Sequence
  Synthetic oligonucleotide; TAG chr11 5211422 5211441 5211438 +
actcacgatggtttgttaca

SEQ ID NO: 7101 - DNA, 20 bp, Artificial Sequence
  Synthetic oligonucleotide; TGG chr11 5211439 5211458 5211455 +
acatagctaaacacatgtca

SEQ ID NO: 7102 - DNA, 20 bp, Artificial Sequence
  Synthetic oligonucleotide; GGG chr11 5211440 5211459 5211456 +
catagctaaacacatgtcat

SEQ ID NO: 7103 - DNA, 20 bp, Artificial Sequence
  Synthetic oligonucleotide; CAG chr11 5211452 5211471 5211468 +
catgtcatgggtttgtcgta

SEQ ID NO: 7104 - DNA, 20 bp, Artificial Sequence
  Synthetic oligonucleotide; CAG chr11 5211469 5211488 5211485 +
gtacagattatttcatctcc

SEQ ID NO: 7105 - DNA, 20 bp, Artificial Sequence
  Synthetic oligonucleotide; TAG chr11 5211479 5211498 5211495 +
tttcatctcccagtactcaa

SEQ ID NO: 7106 - DNA, 20 bp, Artificial Sequence
  Synthetic oligonucleotide; TAG chr11 5211527 5211546 5211543 +
tcccaccctccaaactcaat

SEQ ID NO: 7107 - DNA, 20 bp, Artificial Sequence
  Synthetic oligonucleotide; AGG chr11 5211528 5211547 5211544 +
cccaccctccaaactcaatt

SEQ ID NO: 7108 - DNA, 20 bp, Artificial Sequence
  Synthetic oligonucleotide; CAG chr11 5211534 5211553 5211550 +
ctccaaactcaattaggctg

SEQ ID NO: 7109 - DNA, 20 bp, Artificial Sequence
  Synthetic oligonucleotide; TAG chr11 5211578 5211597 5211594 +
gtgcatgttttctcatcatt

SEQ ID NO: 7110 - DNA, 20 bp, Artificial Sequence
  Synthetic oligonucleotide; AAG chr11 5211592 5211611 5211608 +
atcatttagttcctacttgt

SEQ ID NO: 7111 - DNA, 20 bp, Artificial Sequence
  Synthetic oligonucleotide; TAG chr11 5211605 5211624 5211621 +
tacttgtaagtgataatatg

SEQ ID NO: 7112 - DNA, 20 bp, Artificial Sequence
  Synthetic oligonucleotide; TGG chr11 5211612 5211631 5211628 +
aagtgataatatgtagtatt

SEQ ID NO: 7113 - DNA, 20 bp, Artificial Sequence
  Synthetic oligonucleotide; TAG chr11 5211631 5211650 5211647 +
ttggttttctgttcttacat

SEQ ID NO: 7114 - DNA, 20 bp, Artificial Sequence
  Synthetic oligonucleotide; AAG chr11 5211640 5211659 5211656 +
tgttcttacattagtttgtt

SEQ ID NO: 7115 - DNA, 20 bp, Artificial Sequence
  Synthetic oligonucleotide; AGG chr11 5211641 5211660 5211657 +
gttcttacattagtttgtta

SEQ ID NO: 7116 - DNA, 20 bp, Artificial Sequence
  Synthetic oligonucleotide; TGG chr11 5211648 5211667 5211664 +
cattagtttgttaaggataa

SEQ ID NO: 7117 - DNA, 20 bp, Artificial Sequence
  Synthetic oligonucleotide; CGG chr11 5211655 5211674 5211671 +
ttgttaaggataatggtgtc

SEQ ID NO: 7118 - DNA, 20 bp, Artificial Sequence
  Synthetic oligonucleotide; AAG chr11 5211677 5211696 5211693 +
gctccatccatgttcctgca

SEQ ID NO: 7119 - DNA, 20 bp, Artificial Sequence
  Synthetic oligonucleotide; AGG chr11 5211678 5211697 5211694 +
ctccatccatgttcctgcaa

SEQ ID NO: 7120 - DNA, 20 bp, Artificial Sequence
  Synthetic oligonucleotide; TGG chr11 5211702 5211721 5211718 +
catgatctcattctttttta

SEQ ID NO: 7121 - DNA, 20 bp, Artificial Sequence
  Synthetic oligonucleotide; TAG chr11 5211710 5211729 5211726 +
cattcttttttatggccaca

SEQ ID NO: 7122 - DNA, 20 bp, Artificial Sequence
  Synthetic oligonucleotide; TGG chr11 5211720 5211739 5211736 +
tatggccacatagtattcca

SEQ ID NO: 7123 - DNA, 20 bp, Artificial Sequence
  Synthetic oligonucleotide; CGG chr11 5211745 5211764 5211761 +
tatatgtacatgttctttat

SEQ ID NO: 7124 - DNA, 20 bp, Artificial Sequence
  Synthetic oligonucleotide; TGG chr11 5211759 5211778 5211775 +
ctttatcggtataccactaa

SEQ ID NO: 7125 - DNA, 20 bp, Artificial Sequence
  Synthetic oligonucleotide; GGG chr11 5211760 5211779 5211776 +
tttatcggtataccactaat

SEQ ID NO: 7126 - DNA, 20 bp, Artificial Sequence
  Synthetic oligonucleotide; CAG chr11 5211767 5211786 5211783 +
gtataccactaatgggcctt

SEQ ID NO: 7127 - DNA, 20 bp, Artificial Sequence
  Synthetic oligonucleotide; AGG chr11 5211768 5211787 5211784 +
tataccactaatgggccttc

SEQ ID NO: 7128 - DNA, 20 bp, Artificial Sequence
  Synthetic oligonucleotide; TGG chr11 5211808 5211827 5211824 +
ctattgtgattatgctgcaa

SEQ ID NO: 7129 - DNA, 20 bp, Artificial Sequence
  Synthetic oligonucleotide; CAG chr11 5211814 5211833 5211830 +
tgattatgctgcaatggaca

SEQ ID NO: 7130 - DNA, 20 bp, Artificial Sequence
  Synthetic oligonucleotide; AGG chr11 5211815 5211834 5211831 +
gattatgctgcaatggacac

SEQ ID NO: 7131 - DNA, 20 bp, Artificial Sequence
  Synthetic oligonucleotide; TAG chr11 5211837 5211856 5211853 +
gtgtgcatgtgtctttgtga

SEQ ID NO: 7132 - DNA, 20 bp, Artificial Sequence
  Synthetic oligonucleotide; TGG chr11 5211842 5211861 5211858 +
catgtgtctttgtgatagaa

SEQ ID NO: 7133 - DNA, 20 bp, Artificial Sequence
  Synthetic oligonucleotide; TAG chr11 5211857 5211876 5211873 +
tagaatggtttattttcctt

SEQ ID NO: 7134 - DNA, 20 bp, Artificial Sequence
  Synthetic oligonucleotide; AGG chr11 5211858 5211877 5211874 +
agaatggtttattttccttt

SEQ ID NO: 7135 - DNA, 20 bp, Artificial Sequence
  Synthetic oligonucleotide; TAG chr11 5211875 5211894 5211891 +
tttaggtatatactcaataa

SEQ ID NO: 7136 - DNA, 20 bp, Artificial Sequence
  Synthetic oligonucleotide; AGG chr11 5211876 5211895 5211892 +
ttaggtatatactcaataat

SEQ ID NO: 7137 - DNA, 20 bp, Artificial Sequence
  Synthetic oligonucleotide; TGG chr11 5211884 5211903 5211900 +
atactcaataataggattgt

SEQ ID NO: 7138 - DNA, 20 bp, Artificial Sequence
  Synthetic oligonucleotide; GGG chr11 5211885 5211904 5211901 +
tactcaataataggattgtt

SEQ ID NO: 7139 - DNA, 20 bp, Artificial Sequence
  Synthetic oligonucleotide; TGG chr11 5211893 5211912 5211909 +
aataggattgttgggttaaa

SEQ ID NO: 7140 - DNA, 20 bp, Artificial Sequence
  Synthetic oligonucleotide; TAG chr11 5211908 5211927 5211924 +
ttaaatggtatttctgtttt

SEQ ID NO: 7141 - DNA, 20 bp, Artificial Sequence
  Synthetic oligonucleotide; AGG chr11 5211909 5211928 5211925 +
taaatggtatttctgttttt

SEQ ID NO: 7142 - DNA, 20 bp, Artificial Sequence
  Synthetic oligonucleotide; TAG chr11 5211916 5211935 5211932 +
tatttctgtttttaggtctt

SEQ ID NO: 7143 - DNA, 20 bp, Artificial Sequence
  Synthetic oligonucleotide; AGG chr11 5211917 5211936 5211933 +
atttctgtttttaggtcttt

SEQ ID NO: 7144 - DNA, 20 bp, Artificial Sequence
  Synthetic oligonucleotide; GGG chr11 5211918 5211937 5211934 +
tttctgtttttaggtcttta

SEQ ID NO: 7145 - DNA, 20 bp, Artificial Sequence
  Synthetic oligonucleotide; TGG chr11 5211944 5211963 5211960 +
tgccacactgctgtctacaa

SEQ ID NO: 7146 - DNA, 20 bp, Artificial Sequence
  Synthetic oligonucleotide; TGG chr11 5211972 5211991 5211988 +
ctaatttatattgccaccaa

SEQ ID NO: 7147 - DNA, 20 bp, Artificial Sequence
  Synthetic oligonucleotide; TAG chr11 5212039 5212058 5212055 +
attttttgactatttaatta

SEQ ID NO: 7148 - DNA, 20 bp, Artificial Sequence
  Synthetic oligonucleotide; AAG chr11 5212049 5212068 5212065 +
tatttaattatagatatttt

SEQ ID NO: 7149 - DNA, 20 bp, Artificial Sequence
  Synthetic oligonucleotide; GAG chr11 5212058 5212077 5212074 +
atagatattttaagtgatgt

SEQ ID NO: 7150 - DNA, 20 bp, Artificial Sequence
  Synthetic oligonucleotide; TAG chr11 5212062 5212081 5212078 +
atattttaagtgatgtgaga

SEQ ID NO: 7151 - DNA, 20 bp, Artificial Sequence
  Synthetic oligonucleotide; TGG chr11 5212075 5212094 5212091 +
tgtgagatagtatctcattt

SEQ ID NO: 7152 - DNA, 20 bp, Artificial Sequence
  Synthetic oligonucleotide; GGG chr11 5212076 5212095 5212092 +
gtgagatagtatctcatttt

SEQ ID NO: 7153 - DNA, 20 bp, Artificial Sequence
  Synthetic oligonucleotide; TGG chr11 5212085 5212104 5212101 +
tatctcattttgggtttgat

SEQ ID NO: 7154 - DNA, 20 bp, Artificial Sequence
  Synthetic oligonucleotide; CAG chr11 5212103 5212122 5212119 +
attggcatttctctaatgat

SEQ ID NO: 7155 - DNA, 20 bp, Artificial Sequence
  Synthetic oligonucleotide; GAG chr11 5212113 5212132 5212129 +
ctctaatgatcagtgacact

SEQ ID NO: 7156 - DNA, 20 bp, Artificial Sequence
  Synthetic oligonucleotide; TGG chr11 5212131 5212150 5212147 +
ctgagcttttttcatatgct

SEQ ID NO: 7157 - DNA, 20 bp, Artificial Sequence
  Synthetic oligonucleotide; TGG chr11 5212134 5212153 5212150 +
agcttttttcatatgcttgg

SEQ ID NO: 7158 - DNA, 20 bp, Artificial Sequence
  Synthetic oligonucleotide; TGG chr11 5212193 5212212 5212209 +
tgtcctttacccattttttg

SEQ ID NO: 7159 - DNA, 20 bp, Artificial Sequence
  Synthetic oligonucleotide; TAG chr11 5212216 5212235 5212232 +
cattgtttgttttgttcttg

SEQ ID NO: 7160 - DNA, 20 bp, Artificial Sequence
  Synthetic oligonucleotide; AAG chr11 5212227 5212246 5212243 +
ttgttcttgtagattcattt

SEQ ID NO: 7161 - DNA, 20 bp, Artificial Sequence
  Synthetic oligonucleotide; TAG chr11 5212237 5212256 5212253 +
agattcatttaagttcctta

SEQ ID NO: 7162 - DNA, 20 bp, Artificial Sequence
  Synthetic oligonucleotide; TAG chr11 5212251 5212270 5212267 +
tccttatagattctgaatat

SEQ ID NO: 7163 - DNA, 20 bp, Artificial Sequence
  Synthetic oligonucleotide; AGG chr11 5212252 5212271 5212268 +
ccttatagattctgaatatt

SEQ ID NO: 7164 - DNA, 20 bp, Artificial Sequence
  Synthetic oligonucleotide; TGG chr11 5212262 5212281 5212278 +
tctgaatattaggcctttgt

SEQ ID NO: 7165 - DNA, 20 bp, Artificial Sequence
  Synthetic oligonucleotide; TAG chr11 5212270 5212289 5212286 +
ttaggcctttgttggatgca

SEQ ID NO: 7166 - DNA, 20 bp, Artificial Sequence
  Synthetic oligonucleotide; TAG chr11 5212298 5212317 5212314 +
aaaaattttctcccattcta

SEQ ID NO: 7167 - DNA, 20 bp, Artificial Sequence
  Synthetic oligonucleotide; AGG chr11 5212299 5212318 5212315 +
aaaattttctcccattctat

SEQ ID NO: 7168 - DNA, 20 bp, Artificial Sequence
  Synthetic oligonucleotide; CAG chr11 5212311 5212330 5212327 +
cattctataggttgtttact

SEQ ID NO: 7169 - DNA, 20 bp, Artificial Sequence
  Synthetic oligonucleotide; TAG chr11 5212318 5212337 5212334 +
taggttgtttactcagttga

SEQ ID NO: 7170 - DNA, 20 bp, Artificial Sequence
  Synthetic oligonucleotide; CAG chr11 5212335 5212354 5212351 +
tgatagtttcttttgctgtg

SEQ ID NO: 7171 - DNA, 20 bp, Artificial Sequence
  Synthetic oligonucleotide; TAG chr11 5212353 5212372 5212369 +
tgcagaaactttattttaat

SEQ ID NO: 7172 - DNA, 20 bp, Artificial Sequence
  Synthetic oligonucleotide; TGG chr11 5212395 5212414 5212411 +
gcttttgctgcaatgactgt

SEQ ID NO: 7173 - DNA, 20 bp, Artificial Sequence
  Synthetic oligonucleotide; CGG chr11 5212434 5212453 5212450 +
tctttgcccctgcttatgtc

SEQ ID NO: 7174 - DNA, 20 bp, Artificial Sequence
  Synthetic oligonucleotide; TGG chr11 5212439 5212458 5212455 +
gcccctgcttatgtccggaa

SEQ ID NO: 7175 - DNA, 20 bp, Artificial Sequence
  Synthetic oligonucleotide; TAG chr11 5212449 5212468 5212465 +
atgtccggaatggtattgcc

SEQ ID NO: 7176 - DNA, 20 bp, Artificial Sequence
  Synthetic oligonucleotide; AGG chr11 5212450 5212469 5212466 +
tgtccggaatggtattgcct

SEQ ID NO: 7177 - DNA, 20 bp, Artificial Sequence
  Synthetic oligonucleotide; AAG chr11 5212461 5212480 5212477 +
gtattgcctaggttgctttc

SEQ ID NO: 7178 - DNA, 20 bp, Artificial Sequence
  Synthetic oligonucleotide; TAG chr11 5212472 5212491 5212488 +
gttgctttcaagcattttta

SEQ ID NO: 7179 - DNA, 20 bp, Artificial Sequence
  Synthetic oligonucleotide; TGG chr11 5212477 5212496 5212493 +
tttcaagcatttttatagtt

SEQ ID NO: 7180 - DNA, 20 bp, Artificial Sequence
  Synthetic oligonucleotide; GGG chr11 5212478 5212497 5212494 +
ttcaagcatttttatagttt

SEQ ID NO: 7181 - DNA, 20 bp, Artificial Sequence
  Synthetic oligonucleotide; AAG chr11 5212491 5212510 5212507 +
atagtttgggttttgcattt

SEQ ID NO: 7182 - DNA, 20 bp, Artificial Sequence
  Synthetic oligonucleotide; GAG chr11 5212509 5212528 5212525 +
ttaagtctctaatccatctt

SEQ ID NO: 7183 - DNA, 20 bp, Artificial Sequence
  Synthetic oligonucleotide; TAG chr11 5212531 5212550 5212547 +
gtttatttgtgtatatgata

SEQ ID NO: 7184 - DNA, 20 bp, Artificial Sequence
  Synthetic oligonucleotide; CGG chr11 5212536 5212555 5212552 +
tttgtgtatatgatatagaa

SEQ ID NO: 7185 - DNA, 20 bp, Artificial Sequence
  Synthetic oligonucleotide; GGG chr11 5212537 5212556 5212553 +
ttgtgtatatgatatagaac

SEQ ID NO: 7186 - DNA, 20 bp, Artificial Sequence
  Synthetic oligonucleotide; GGG chr11 5212538 5212557 5212554 +
tgtgtatatgatatagaacg

SEQ ID NO: 7187 - DNA, 20 bp, Artificial Sequence
  Synthetic oligonucleotide; TGG chr11 5212543 5212562 5212559 +
atatgatatagaacggggtc

SEQ ID NO: 7188 - DNA, 20 bp, Artificial Sequence
  Synthetic oligonucleotide; CGG chr11 5212563 5212582 5212579 +
tggtttcaatcttctacata

SEQ ID NO: 7189 - DNA, 20 bp, Artificial Sequence
  Synthetic oligonucleotide; TAG chr11 5212567 5212586 5212583 +
ttcaatcttctacatacggt

SEQ ID NO: 7190 - DNA, 20 bp, Artificial Sequence
  Synthetic oligonucleotide; CAG chr11 5212571 5212590 5212587 +
atcttctacatacggttagt

SEQ ID NO: 7191 - DNA, 20 bp, Artificial Sequence
  Synthetic oligonucleotide; TAG chr11 5212597 5212616 5212613 +
tcccaacaccacttgttgaa

SEQ ID NO: 7192 - DNA, 20 bp, Artificial Sequence
  Synthetic oligonucleotide; AGG chr11 5212598 5212617 5212614 +
cccaacaccacttgttgaat

SEQ ID NO: 7193 - DNA, 20 bp, Artificial Sequence
  Synthetic oligonucleotide; GGG chr11 5212599 5212618 5212615 +
ccaacaccacttgttgaata

SEQ ID NO: 7194 - DNA, 20 bp, Artificial Sequence
  Synthetic oligonucleotide; CAG chr11 5212629 5212648 5212645 +
tcctcattgcttgtttttat

SEQ ID NO: 7195 - DNA, 20 bp, Artificial Sequence
  Synthetic oligonucleotide; AAG chr11 5212640 5212659 5212656 +
tgtttttatcagctttgtca

SEQ ID NO: 7196 - DNA, 20 bp, Artificial Sequence
  Synthetic oligonucleotide; CAG chr11 5212645 5212664 5212661 +
ttatcagctttgtcaaagat

SEQ ID NO: 7197 - DNA, 20 bp, Artificial Sequence
  Synthetic oligonucleotide; TGG chr11 5212649 5212668 5212665 +
cagctttgtcaaagatcaga

SEQ ID NO: 7198 - DNA, 20 bp, Artificial Sequence
  Synthetic oligonucleotide; TAG chr11 5212655 5212674 5212671 +
tgtcaaagatcagatggttg

SEQ ID NO: 7199 - DNA, 20 bp, Artificial Sequence
  Synthetic oligonucleotide; AGG chr11 5212656 5212675 5212672 +
gtcaaagatcagatggttgt

SEQ ID NO: 7200 - DNA, 20 bp, Artificial Sequence
  Synthetic oligonucleotide; TGG chr11 5212663 5212682 5212679 +
atcagatggttgtaggcatg

SEQ ID NO: 7201 - DNA, 20 bp, Artificial Sequence
  Synthetic oligonucleotide; TGG chr11 5212675 5212694 5212691 +
taggcatgtggtcttatttc

SEQ ID NO: 7202 - DNA, 20 bp, Artificial Sequence
  Synthetic oligonucleotide; GGG chr11 5212676 5212695 5212692 +
aggcatgtggtcttatttct

SEQ ID NO: 7203 - DNA, 20 bp, Artificial Sequence
  Synthetic oligonucleotide; CAG chr11 5212720 5212739 5212736 +
tctgtgtgtcttttctgtaa

SEQ ID NO: 7204 - DNA, 20 bp, Artificial Sequence
  Synthetic oligonucleotide; TGG chr11 5212736 5212755 5212752 +
gtaacagtaccacactgttt

SEQ ID NO: 7205 - DNA, 20 bp, Artificial Sequence
  Synthetic oligonucleotide; TAG chr11 5212745 5212764 5212761 +
ccacactgttttggttactg

SEQ ID NO: 7206 - DNA, 20 bp, Artificial Sequence
  Synthetic oligonucleotide; TGG chr11 5212753 5212772 5212769 +
ttttggttactgtagccctg

SEQ ID NO: 7207 - DNA, 20 bp, Artificial Sequence
  Synthetic oligonucleotide; TGG chr11 5212758 5212777 5212774 +
gttactgtagccctgtggta

SEQ ID NO: 7208 - DNA, 20 bp, Artificial Sequence
  Synthetic oligonucleotide; AAG chr11 5212765 5212784 5212781 +
tagccctgtggtatggtttg

SEQ ID NO: 7209 - DNA, 20 bp, Artificial Sequence
  Synthetic oligonucleotide; TAG chr11 5212769 5212788 5212785 +
cctgtggtatggtttgaagt

SEQ ID NO: 7210 - DNA, 20 bp, Artificial Sequence
  Synthetic oligonucleotide; AGG chr11 5212770 5212789 5212786 +
ctgtggtatggtttgaagtt

SEQ ID NO: 7211 - DNA, 20 bp, Artificial Sequence
  Synthetic oligonucleotide; CAG chr11 5212787 5212806 5212803 +
gttaggcaatgtattatctc

SEQ ID NO: 7212 - DNA, 20 bp, Artificial Sequence
  Synthetic oligonucleotide; AAG chr11 5212826 5212845 5212842 +
tttttttttttttgtactct

SEQ ID NO: 7213 - DNA, 20 bp, Artificial Sequence
  Synthetic oligonucleotide; CGG chr11 5212834 5212853 5212850 +
tttttgtactctaagttcta

SEQ ID NO: 7214 - DNA, 20 bp, Artificial Sequence
  Synthetic oligonucleotide; CAG chr11 5212845 5212864 5212861 +
taagttctacggtacctgtg

SEQ ID NO: 7215 - DNA, 20 bp, Artificial Sequence
  Synthetic oligonucleotide; TGG chr11 5212877 5212896 5212893 +
tatgtatacgtgtgccatat

SEQ ID NO: 7216 - DNA, 20 bp, Artificial Sequence
  Synthetic oligonucleotide; TAG chr11 5212911 5212930 5212927 +
cgttaactcgtcatttacat

SEQ ID NO: 7217 - DNA, 20 bp, Artificial Sequence
  Synthetic oligonucleotide; CAG chr11 5212959 5212978 5212975 +
tctctcctaccaccccacga

SEQ ID NO: 7218 - DNA, 20 bp, Artificial Sequence
  Synthetic oligonucleotide; AGG chr11 5212960 5212979 5212976 +
ctctcctaccaccccacgac

SEQ ID NO: 7219 - DNA, 20 bp, Artificial Sequence
  Synthetic oligonucleotide; CGG chr11 5212966 5212985 5212982 +
taccaccccacgacaggccc

SEQ ID NO: 7220 - DNA, 20 bp, Artificial Sequence
  Synthetic oligonucleotide; AAG chr11 5212995 5213014 5213011 +
atgttccccaccctgtgtcc

SEQ ID NO: 7221 - DNA, 20 bp, Artificial Sequence
  Synthetic oligonucleotide; GAG chr11 5213025 5213044 5213041 +
atttttcaattcccacctgt

SEQ ID NO: 7222 - DNA, 20 bp, Artificial Sequence
  Synthetic oligonucleotide; TAG chr11 5213031 5213050 5213047 +
caattcccacctgtgagtat

SEQ ID NO: 7223 - DNA, 20 bp, Artificial Sequence
  Synthetic oligonucleotide; AGG chr11 5213032 5213051 5213048 +
aattcccacctgtgagtatt

SEQ ID NO: 7224 - DNA, 20 bp, Artificial Sequence
  Synthetic oligonucleotide; TAG chr11 5213041 5213060 5213057 +
ctgtgagtattaggatttcc

SEQ ID NO: 7225 - DNA, 20 bp, Artificial Sequence
  Synthetic oligonucleotide; AGG chr11 5213042 5213061 5213058 +
tgtgagtattaggatttcct

SEQ ID NO: 7226 - DNA, 20 bp, Artificial Sequence
  Synthetic oligonucleotide; TGG chr11 5213050 5213069 5213066 +
ttaggatttcctaggctatt

SEQ ID NO: 7227 - DNA, 20 bp, Artificial Sequence
  Synthetic oligonucleotide; AAG chr11 5213085 5213104 5213101 +
gttgttccatatgaacttta

SEQ ID NO: 7228 - DNA, 20 bp, Artificial Sequence
  Synthetic oligonucleotide; TAG chr11 5213098 5213117 5213114 +
aactttaaagtgtatttttc

SEQ ID NO: 7229 - DNA, 20 bp, Artificial Sequence
  Synthetic oligonucleotide; AAG chr11 5213108 5213127 5213124 +
tgtatttttctagttctgtg

SEQ ID NO: 7230 - DNA, 20 bp, Artificial Sequence
  Synthetic oligonucleotide; TGG chr11 5213119 5213138 5213135 +
agttctgtgaagaatgtcat

SEQ ID NO: 7231 - DNA, 20 bp, Artificial Sequence
  Synthetic oligonucleotide; TAG chr11 5213122 5213141 5213138 +
tctgtgaagaatgtcattgg

SEQ ID NO: 7232 - DNA, 20 bp, Artificial Sequence
  Synthetic oligonucleotide; TAG chr11 5213130 5213149 5213146 +
gaatgtcattggtagtttga

SEQ ID NO: 7233 - DNA, 20 bp, Artificial Sequence
  Synthetic oligonucleotide; AGG chr11 5213131 5213150 5213147 +
aatgtcattggtagtttgat

SEQ ID NO: 7234 - DNA, 20 bp, Artificial Sequence
  Synthetic oligonucleotide; TAG chr11 5213136 5213155 5213152 +
cattggtagtttgataggaa

SEQ ID NO: 7235 - DNA, 20 bp, Artificial Sequence
  Synthetic oligonucleotide; TAG chr11 5213160 5213179 5213176 +
tttgaaactgtaaattgctc

SEQ ID NO: 7236 - DNA, 20 bp, Artificial Sequence
  Synthetic oligonucleotide; AGG chr11 5213161 5213180 5213177 +
ttgaaactgtaaattgctct

SEQ ID NO: 7237 - DNA, 20 bp, Artificial Sequence
  Synthetic oligonucleotide; CAG chr11 5213164 5213183 5213180 +
aaactgtaaattgctctagg

SEQ ID NO: 7238 - DNA, 20 bp, Artificial Sequence
  Synthetic oligonucleotide; TGG chr11 5213169 5213188 5213185 +
gtaaattgctctaggcagta

SEQ ID NO: 7239 - DNA, 20 bp, Artificial Sequence
  Synthetic oligonucleotide; GAG chr11 5213204 5213223 5213220 +
tattgattctttttatccat

SEQ ID NO: 7240 - DNA, 20 bp, Artificial Sequence
  Synthetic oligonucleotide; TGG chr11 5213209 5213228 5213225 +
attctttttatccatgagca

SEQ ID NO: 7241 - DNA, 20 bp, Artificial Sequence
  Synthetic oligonucleotide; AAG chr11 5213213 5213232 5213229 +
tttttatccatgagcatgga

SEQ ID NO: 7242 - DNA, 20 bp, Artificial Sequence
  Synthetic oligonucleotide; CAG chr11 5213235 5213254 5213251 +
gtttttccatttgtttctat

SEQ ID NO: 7243 - DNA, 20 bp, Artificial Sequence
  Synthetic oligonucleotide; GAG chr11 5213251 5213270 5213267 +
ctatcagctctgatttcttt

SEQ ID NO: 7244 - DNA, 20 bp, Artificial Sequence
  Synthetic oligonucleotide; CAG chr11 5213254 5213273 5213270 +
tcagctctgatttctttgag

SEQ ID NO: 7245 - DNA, 20 bp, Artificial Sequence
  Synthetic oligonucleotide; TAG chr11 5213276 5213295 5213292 +
gtgttttgtaaatctcattg

SEQ ID NO: 7246 - DNA, 20 bp, Artificial Sequence
  Synthetic oligonucleotide; GAG chr11 5213278 5213297 5213294 +
gttttgtaaatctcattgta

SEQ ID NO: 7247 - DNA, 20 bp, Artificial Sequence
  Synthetic oligonucleotide; TGG chr11 5213295 5213314 5213311 +
gtagagatctttcaactgct

SEQ ID NO: 7248 - DNA, 20 bp, Artificial Sequence
  Synthetic oligonucleotide; TAG chr11 5213299 5213318 5213315 +
agatctttcaactgcttggt

SEQ ID NO: 7249 - DNA, 20 bp, Artificial Sequence
  Synthetic oligonucleotide; TAG chr11 5213311 5213330 5213327 +
tgcttggttagatatatcct

SEQ ID NO: 7250 - DNA, 20 bp, Artificial Sequence
  Synthetic oligonucleotide; AGG chr11 5213312 5213331 5213328 +
gcttggttagatatatcctt

SEQ ID NO: 7251 - DNA, 20 bp, Artificial Sequence
  Synthetic oligonucleotide; TGG chr11 5213331 5213350 5213347 +
taggtattttattctttttg

SEQ ID NO: 7252 - DNA, 20 bp, Artificial Sequence
  Synthetic oligonucleotide; CGG chr11 5213337 5213356 5213353 +
ttttattctttttgtggcaa

SEQ ID NO: 7253 - DNA, 20 bp, Artificial Sequence
  Synthetic oligonucleotide; TGG chr11 5213344 5213363 5213360 +
ctttttgtggcaacggtaaa

SEQ ID NO: 7254 - DNA, 20 bp, Artificial Sequence
  Synthetic oligonucleotide; GGG chr11 5213345 5213364 5213361 +
tttttgtggcaacggtaaat

SEQ ID NO: 7255 - DNA, 20 bp, Artificial Sequence
  Synthetic oligonucleotide; TGG chr11 5213363 5213382 5213379 +
atgggattgacttcctgatt

SEQ ID NO: 7256 - DNA, 20 bp, Artificial Sequence
  Synthetic oligonucleotide; TAG chr11 5213369 5213388 5213385 +
ttgacttcctgatttggctc

SEQ ID NO: 7257 - DNA, 20 bp, Artificial Sequence
  Synthetic oligonucleotide; AGG chr11 5213370 5213389 5213386 +
tgacttcctgatttggctct

SEQ ID NO: 7258 - DNA, 20 bp, Artificial Sequence
  Synthetic oligonucleotide; TGG chr11 5213375 5213394 5213391 +
tcctgatttggctctaggct

SEQ ID NO: 7259 - DNA, 20 bp, Artificial Sequence
  Synthetic oligonucleotide; TGG chr11 5213392 5213411 5213408 +
gcttggctattgttgatgta

SEQ ID NO: 7260 - DNA, 20 bp, Artificial Sequence
  Synthetic oligonucleotide; GGG chr11 5213393 5213412 5213409 +
cttggctattgttgatgtat

SEQ ID NO: 7261 - DNA, 20 bp, Artificial Sequence
  Synthetic oligonucleotide; TAG chr11 5213401 5213420 5213417 +
ttgttgatgtatgggaatgc

SEQ ID NO: 7262 - DNA, 20 bp, Artificial Sequence
  Synthetic oligonucleotide; AAG chr11 5213444 5213463 5213460 +
tatatcctgaaactttgctg

SEQ ID NO: 7263 - DNA, 20 bp, Artificial Sequence
  Synthetic oligonucleotide; CAG chr11 5213451 5213470 5213467 +
tgaaactttgctgaagttat

SEQ ID NO: 7264 - DNA, 20 bp, Artificial Sequence
  Synthetic oligonucleotide; AAG chr11 5213457 5213476 5213473 +
tttgctgaagttatcagctg

SEQ ID NO: 7265 - DNA, 20 bp, Artificial Sequence
  Synthetic oligonucleotide; AGG chr11 5213458 5213477 5213474 +
ttgctgaagttatcagctga

SEQ ID NO: 7266 - DNA, 20 bp, Artificial Sequence
  Synthetic oligonucleotide; GAG chr11 5213460 5213479 5213476 +
gctgaagttatcagctgaag

SEQ ID NO: 7267 - DNA, 20 bp, Artificial Sequence
  Synthetic oligonucleotide; TGG chr11 5213467 5213486 5213483 +
ttatcagctgaaggagcttt

SEQ ID NO: 7268 - DNA, 20 bp, Artificial Sequence
  Synthetic oligonucleotide; GGG chr11 5213468 5213487 5213484 +
tatcagctgaaggagctttt

SEQ ID NO: 7269 - DNA, 20 bp, Artificial Sequence
  Synthetic oligonucleotide; TGG chr11 5213480 5213499 5213496 +
gagcttttgggccttgacta

SEQ ID NO: 7270 - DNA, 20 bp, Artificial Sequence
  Synthetic oligonucleotide; TAG chr11 5213490 5213509 5213506 +
gccttgactatggtgttttc

SEQ ID NO: 7271 - DNA, 20 bp, Artificial Sequence
  Synthetic oligonucleotide; CAG chr11 5213496 5213515 5213512 +
actatggtgttttctagata

SEQ ID NO: 7272 - DNA, 20 bp, Artificial Sequence
  Synthetic oligonucleotide; CAG chr11 5213503 5213522 5213519 +
tgttttctagatacagaaaa

SEQ ID NO: 7273 - DNA, 20 bp, Artificial Sequence
  Synthetic oligonucleotide; AGG chr11 5213504 5213523 5213520 +
gttttctagatacagaaaac

SEQ ID NO: 7274 - DNA, 20 bp, Artificial Sequence
  Synthetic oligonucleotide; GGG chr11 5213505 5213524 5213521 +
ttttctagatacagaaaaca

SEQ ID NO: 7275 - DNA, 20 bp, Artificial Sequence
  Synthetic oligonucleotide; TGG chr11 5213534 5213553 5213550 +
tgactttctctcttcctatt

SEQ ID NO: 7276 - DNA, 20 bp, Artificial Sequence
  Synthetic oligonucleotide; TGG chr11 5213571 5213590 5213587 +
cttctcttgcctgattgctc

SEQ ID NO: 7277 - DNA, 20 bp, Artificial Sequence
  Synthetic oligonucleotide; CAG chr11 5213575 5213594 5213591 +
tcttgcctgattgctctggc

SEQ ID NO: 7278 - DNA, 20 bp, Artificial Sequence
  Synthetic oligonucleotide; AGG chr11 5213576 5213595 5213592 +
cttgcctgattgctctggcc

SEQ ID NO: 7279 - DNA, 20 bp, Artificial Sequence
  Synthetic oligonucleotide; CAG chr11 5213584 5213603 5213600 +
attgctctggccaggactgc

SEQ ID NO: 7280 - DNA, 20 bp, Artificial Sequence
  Synthetic oligonucleotide; TAG chr11 5213599 5213618 5213615 +
actgccagtactatactgaa

SEQ ID NO: 7281 - DNA, 20 bp, Artificial Sequence
  Synthetic oligonucleotide; CAG chr11 5213602 5213621 5213618 +
gccagtactatactgaatag

SEQ ID NO: 7282 - DNA, 20 bp, Artificial Sequence
  Synthetic oligonucleotide; TGG chr11 5213605 5213624 5213621 +
agtactatactgaatagcag

SEQ ID NO: 7283 - DNA, 20 bp, Artificial Sequence
  Synthetic oligonucleotide; GAG chr11 5213609 5213628 5213625 +
ctatactgaatagcagtggt

SEQ ID NO: 7284 - DNA, 20 bp, Artificial Sequence
  Synthetic oligonucleotide; GAG chr11 5213611 5213630 5213627 +
atactgaatagcagtggtga

SEQ ID NO: 7285 - DNA, 20 bp, Artificial Sequence
  Synthetic oligonucleotide; GAG chr11 5213613 5213632 5213629 +
actgaatagcagtggtgaga

SEQ ID NO: 7286 - DNA, 20 bp, Artificial Sequence
  Synthetic oligonucleotide; AGG chr11 5213614 5213633 5213630 +
ctgaatagcagtggtgagag

SEQ ID NO: 7287 - DNA, 20 bp, Artificial Sequence
  Synthetic oligonucleotide; GGG chr11 5213615 5213634 5213631 +
tgaatagcagtggtgagaga

SEQ ID NO: 7288 - DNA, 20 bp, Artificial Sequence
  Synthetic oligonucleotide; CAG chr11 5213634 5213653 5213650 +
agggcatccttgtcttgtgc

SEQ ID NO: 7289 - DNA, 20 bp, Artificial Sequence
  Synthetic oligonucleotide; AAG chr11 5213642 5213661 5213658 +
cttgtcttgtgccagttttc

SEQ ID NO: 7290 - DNA, 20 bp, Artificial Sequence
  Synthetic oligonucleotide; AAG chr11 5213645 5213664 5213661 +
gtcttgtgccagttttcaag

SEQ ID NO: 7291 - DNA, 20 bp, Artificial Sequence
  Synthetic oligonucleotide; CAG chr11 5213656 5213675 5213672 +
gttttcaagaagaatgcttc

SEQ ID NO: 7292 - DNA, 20 bp, Artificial Sequence
  Synthetic oligonucleotide; AGG chr11 5213657 5213676 5213673 +
ttttcaagaagaatgcttcc

SEQ ID NO: 7293 - DNA, 20 bp, Artificial Sequence
  Synthetic oligonucleotide; TGG chr11 5213682 5213701 5213698 +
ttgcccattctgtatgatgt

SEQ ID NO: 7294 - DNA, 20 bp, Artificial Sequence
  Synthetic oligonucleotide; TGG chr11 5213688 5213707 5213704 +
attctgtatgatgttggctg

SEQ ID NO: 7295 - DNA, 20 bp, Artificial Sequence
  Synthetic oligonucleotide; GGG chr11 5213689 5213708 5213705 +
ttctgtatgatgttggctgt

SEQ ID NO: 7296 - DNA, 20 bp, Artificial Sequence
  Synthetic oligonucleotide; TAG chr11 5213699 5213718 5213715 +
tgttggctgtgggtttgtca

SEQ ID NO: 7297 - DNA, 20 bp, Artificial Sequence
  Synthetic oligonucleotide; TGG chr11 5213703 5213722 5213719 +
ggctgtgggtttgtcataga

SEQ ID NO: 7298 - DNA, 20 bp, Artificial Sequence
  Synthetic oligonucleotide; GAG chr11 5213719 5213738 5213735 +
tagatggctcatattatttt

SEQ ID NO: 7299 - DNA, 20 bp, Artificial Sequence
  Synthetic oligonucleotide; AGG chr11 5213720 5213739 5213736 +
agatggctcatattattttg

SEQ ID NO: 7300 - DNA, 20 bp, Artificial Sequence
  Synthetic oligonucleotide; TAG chr11 5213736 5213755 5213752 +
tttgaggtcatgtccttaaa

SEQ ID NO: 7301 - DNA, 20 bp, Artificial Sequence
  Synthetic oligonucleotide; TAG chr11 5213740 5213759 5213756 +
aggtcatgtccttaaatagc

SEQ ID NO: 7302 - DNA, 20 bp, Artificial Sequence
  Synthetic oligonucleotide; GAG chr11 5213749 5213768 5213765 +
ccttaaatagctagtttgtt

SEQ ID NO: 7303 - DNA, 20 bp, Artificial Sequence
  Synthetic oligonucleotide; GAG chr11 5213751 5213770 5213767 +
ttaaatagctagtttgttga

SEQ ID NO: 7304 - DNA, 20 bp, Artificial Sequence
  Synthetic oligonucleotide; AGG chr11 5213752 5213771 5213768 +
taaatagctagtttgttgag

SEQ ID NO: 7305 - DNA, 20 bp, Artificial Sequence
  Synthetic oligonucleotide; AAG chr11 5213765 5213784 5213781 +
tgttgagaggttttaacatg

SEQ ID NO: 7306 - DNA, 20 bp, Artificial Sequence
  Synthetic oligonucleotide; AAG chr11 5213770 5213789 5213786 +
agaggttttaacatgaagtg

SEQ ID NO: 7307 - DNA, 20 bp, Artificial Sequence
  Synthetic oligonucleotide; TGG chr11 5213819 5213838 5213835 +
cacatattgaaatgatcatg

SEQ ID NO: 7308 - DNA, 20 bp, Artificial Sequence
  Synthetic oligonucleotide; TAG chr11 5213832 5213851 5213848 +
gatcatgtggtttctgtttt

SEQ ID NO: 7309 - DNA, 20 bp, Artificial Sequence
  Synthetic oligonucleotide; CAG chr11 5213895 5213914 5213911 +
gctgaaccaatcttgcttct

SEQ ID NO: 7310 - DNA, 20 bp, Artificial Sequence
  Synthetic oligonucleotide; AGG chr11 5213896 5213915 5213912 +
ctgaaccaatcttgcttctc

SEQ ID NO: 7311 - DNA, 20 bp, Artificial Sequence
  Synthetic oligonucleotide; GGG chr11 5213897 5213916 5213913 +
tgaaccaatcttgcttctca

SEQ ID NO: 7312 - DNA, 20 bp, Artificial Sequence
  Synthetic oligonucleotide; AAG chr11 5213903 5213922 5213919 +
aatcttgcttctcagggata

SEQ ID NO: 7313 - DNA, 20 bp, Artificial Sequence
  Synthetic oligonucleotide; GAG chr11 5213917 5213936 5213933 +
gggataaagcctacttgatt

SEQ ID NO: 7314 - DNA, 20 bp, Artificial Sequence
  Synthetic oligonucleotide; AGG chr11 5213918 5213937 5213934 +
ggataaagcctacttgattg

SEQ ID NO: 7315 - DNA, 20 bp, Artificial Sequence
  Synthetic oligonucleotide; TGG chr11 5213921 5213940 5213937 +
taaagcctacttgattgagg

SEQ ID NO: 7316 - DNA, 20 bp, Artificial Sequence
  Synthetic oligonucleotide; TAG chr11 5213926 5213945 5213942 +
cctacttgattgaggtggat

SEQ ID NO: 7317 - DNA, 20 bp, Artificial Sequence
  Synthetic oligonucleotide; TGG chr11 5213945 5213964 5213961 +
ttagctttgtgatgtgttgc

SEQ ID NO: 7318 - DNA, 20 bp, Artificial Sequence
  Synthetic oligonucleotide; TGG chr11 5213951 5213970 5213967 +
ttgtgatgtgttgctggatt

SEQ ID NO: 7319 - DNA, 20 bp, Artificial Sequence
  Synthetic oligonucleotide; TAG chr11 5213959 5213978 5213975 +
tgttgctggatttggcttgc

SEQ ID NO: 7320 - DNA, 20 bp, Artificial Sequence
  Synthetic oligonucleotide; AAG chr11 5213981 5214000 5213997 +
gtatttttgcatcaatgttc

SEQ ID NO: 7321 - DNA, 20 bp, Artificial Sequence
  Synthetic oligonucleotide; AGG chr11 5213982 5214001 5213998 +
tatttttgcatcaatgttca

SEQ ID NO: 7322 - DNA, 20 bp, Artificial Sequence
  Synthetic oligonucleotide; TGG chr11 5213989 5214008 5214005 +
gcatcaatgttcaaggatat

SEQ ID NO: 7323 - DNA, 20 bp, Artificial Sequence
  Synthetic oligonucleotide; AAG chr11 5213996 5214015 5214012 +
tgttcaaggatattggcctg

SEQ ID NO: 7324 - DNA, 20 bp, Artificial Sequence
  Synthetic oligonucleotide; CAG chr11 5214027 5214046 5214043 +
ttttgttgttgtgtgtctat

SEQ ID NO: 7325 - DNA, 20 bp, Artificial Sequence
  Synthetic oligonucleotide; AGG chr11 5214028 5214047 5214044 +
tttgttgttgtgtgtctatc

SEQ ID NO: 7326 - DNA, 20 bp, Artificial Sequence
  Synthetic oligonucleotide; TGG chr11 5214034 5214053 5214050 +
gttgtgtgtctatcaggttt

SEQ ID NO: 7327 - DNA, 20 bp, Artificial Sequence
  Synthetic oligonucleotide; CAG chr11 5214040 5214059 5214056 +
tgtctatcaggttttggtat

SEQ ID NO: 7328 - DNA, 20 bp, Artificial Sequence
  Synthetic oligonucleotide; AGG chr11 5214041 5214060 5214057 +
gtctatcaggttttggtatc

SEQ ID NO: 7329 - DNA, 20 bp, Artificial Sequence
  Synthetic oligonucleotide; TGG chr11 5214051 5214070 5214067 +
ttttggtatcaggatgatgc

SEQ ID NO: 7330 - DNA, 20 bp, Artificial Sequence
  Synthetic oligonucleotide; GAG chr11 5214065 5214084 5214081 +
tgatgctggcctcataaaat

SEQ ID NO: 7331 - DNA, 20 bp, Artificial Sequence
  Synthetic oligonucleotide; GAG chr11 5214070 5214089 5214086 +
ctggcctcataaaatgagct

SEQ ID NO: 7332 - DNA, 20 bp, Artificial Sequence
  Synthetic oligonucleotide; AGG chr11 5214071 5214090 5214087 +
tggcctcataaaatgagctg

SEQ ID NO: 7333 - DNA, 20 bp, Artificial Sequence
  Synthetic oligonucleotide; TGG chr11 5214098 5214117 5214114 +
atccctccccctcaattttt

SEQ ID NO: 7334 - DNA, 20 bp, Artificial Sequence
  Synthetic oligonucleotide; GAG chr11 5214100 5214119 5214116 +
ccctccccctcaattttttg

SEQ ID NO: 7335 - DNA, 20 bp, Artificial Sequence
  Synthetic oligonucleotide; TAG chr11 5214103 5214122 5214119 +
tccccctcaattttttggag

SEQ ID NO: 7336 - DNA, 20 bp, Artificial Sequence
  Synthetic oligonucleotide; CAG chr11 5214109 5214128 5214125 +
tcaattttttggagtagctt

SEQ ID NO: 7337 - DNA, 20 bp, Artificial Sequence
  Synthetic oligonucleotide; TAG chr11 5214112 5214131 5214128 +
attttttggagtagcttcag

SEQ ID NO: 7338 - DNA, 20 bp, Artificial Sequence
  Synthetic oligonucleotide; AGG chr11 5214113 5214132 5214129 +
ttttttggagtagcttcagt

SEQ ID NO: 7339 - DNA, 20 bp, Artificial Sequence
  Synthetic oligonucleotide; TAG chr11 5214146 5214165 5214162 +
actcttctttgtgcatctga

SEQ ID NO: 7340 - DNA, 20 bp, Artificial Sequence
  Synthetic oligonucleotide; TGG chr11 5214153 5214172 5214169 +
tttgtgcatctgatagaatt

SEQ ID NO: 7341 - DNA, 20 bp, Artificial Sequence
  Synthetic oligonucleotide; CAG chr11 5214173 5214192 5214189 +
tggttgtgaatcatattgtc

SEQ ID NO: 7342 - DNA, 20 bp, Artificial Sequence
  Synthetic oligonucleotide; AGG chr11 5214174 5214193 5214190 +
ggttgtgaatcatattgtcc

SEQ ID NO: 7343 - DNA, 20 bp, Artificial Sequence
  Synthetic oligonucleotide; GGG chr11 5214175 5214194 5214191 +
gttgtgaatcatattgtcca

SEQ ID NO: 7344 - DNA, 20 bp, Artificial Sequence
  Synthetic oligonucleotide; TAG chr11 5214192 5214211 5214208 +
ccagggctttttttgtttga

SEQ ID NO: 7345 - DNA, 20 bp, Artificial Sequence
  Synthetic oligonucleotide; AGG chr11 5214193 5214212 5214209 +
cagggctttttttgtttgat

SEQ ID NO: 7346 - DNA, 20 bp, Artificial Sequence
  Synthetic oligonucleotide; CAG chr11 5214218 5214237 5214234 +
atttattactgaatcatttt

SEQ ID NO: 7347 - DNA, 20 bp, Artificial Sequence
  Synthetic oligonucleotide; GAG chr11 5214220 5214239 5214236 +
ttattactgaatcattttca

SEQ ID NO: 7348 - DNA, 20 bp, Artificial Sequence
  Synthetic oligonucleotide; TGG chr11 5214230 5214249 5214246 +
atcattttcagagctcatca

SEQ ID NO: 7349 - DNA, 20 bp, Artificial Sequence
  Synthetic oligonucleotide; CAG chr11 5214240 5214259 5214256 +
gagctcatcatggatctctt

SEQ ID NO: 7350 - DNA, 20 bp, Artificial Sequence
  Synthetic oligonucleotide; AGG chr11 5214241 5214260 5214257 +
agctcatcatggatctcttc

SEQ ID NO: 7351 - DNA, 20 bp, Artificial Sequence
  Synthetic oligonucleotide; TGG chr11 5214259 5214278 5214275 +
tcaggaaattgatttcttcc

SEQ ID NO: 7352 - DNA, 20 bp, Artificial Sequence
  Synthetic oligonucleotide; CAG chr11 5214264 5214283 5214280 +
aaattgatttcttcctggtt

SEQ ID NO: 7353 - DNA, 20 bp, Artificial Sequence
  Synthetic oligonucleotide; TGG chr11 5214270 5214289 5214286 +
atttcttcctggttcagcct

SEQ ID NO: 7354 - DNA, 20 bp, Artificial Sequence
  Synthetic oligonucleotide; GGG chr11 5214271 5214290 5214287 +
tttcttcctggttcagcctt

SEQ ID NO: 7355 - DNA, 20 bp, Artificial Sequence
  Synthetic oligonucleotide; GAG chr11 5214273 5214292 5214289 +
tcttcctggttcagccttgg

SEQ ID NO: 7356 - DNA, 20 bp, Artificial Sequence
  Synthetic oligonucleotide; AGG chr11 5214274 5214293 5214290 +
cttcctggttcagccttggg

SEQ ID NO: 7357 - DNA, 20 bp, Artificial Sequence
  Synthetic oligonucleotide; CAG chr11 5214292 5214311 5214308 +
ggaggacctaaaacaatcct

SEQ ID NO: 7358 - DNA, 20 bp, Artificial Sequence
  Synthetic oligonucleotide; CAG chr11 5214328 5214347 5214344 +
aaaatcatatcaatcactct

SEQ ID NO: 7359 - DNA, 20 bp, Artificial Sequence
  Synthetic oligonucleotide; CAG chr11 5214335 5214354 5214351 +
tatcaatcactctcagacca

SEQ ID NO: 7360 - DNA, 20 bp, Artificial Sequence
  Synthetic oligonucleotide; GAG chr11 5214337 5214356 5214353 +
tcaatcactctcagaccaca

SEQ ID NO: 7361 - DNA, 20 bp, Artificial Sequence
  Synthetic oligonucleotide; AGG chr11 5214338 5214357 5214354 +
caatcactctcagaccacag

SEQ ID NO: 7362 - DNA, 20 bp, Artificial Sequence
  Synthetic oligonucleotide; TAG chr11 5214349 5214368 5214365 +
agaccacagaggaataaaaa

SEQ ID NO: 7363 - DNA, 20 bp, Artificial Sequence
  Synthetic oligonucleotide; AAG chr11 5214357 5214376 5214373 +
gaggaataaaaatagatttc

SEQ ID NO: 7364 - DNA, 20 bp, Artificial Sequence
  Synthetic oligonucleotide; TAG chr11 5214369 5214388 5214385 +
tagatttcaagactaatgaa

SEQ ID NO: 7365 - DNA, 20 bp, Artificial Sequence
  Synthetic oligonucleotide; TGG chr11 5214392 5214411 5214408 +
ctgaaaactatgcaattaca

SEQ ID NO: 7366 - DNA, 20 bp, Artificial Sequence
  Synthetic oligonucleotide; TGG chr11 5214425 5214444 5214441 +
acctgctcctgaatgaattt

SEQ ID NO: 7367 - DNA, 20 bp, Artificial Sequence
  Synthetic oligonucleotide; GGG chr11 5214426 5214445 5214442 +
cctgctcctgaatgaatttt

SEQ ID NO: 7368 - DNA, 20 bp, Artificial Sequence
  Synthetic oligonucleotide; AAG chr11 5214444 5214463 5214460 +
ttgggtaaataatgaaaact

SEQ ID NO: 7369 - DNA, 20 bp, Artificial Sequence
  Synthetic oligonucleotide; AGG chr11 5214445 5214464 5214461 +
tgggtaaataatgaaaacta

SEQ ID NO: 7370 - DNA, 20 bp, Artificial Sequence
  Synthetic oligonucleotide; TAG chr11 5214459 5214478 5214475 +
aaactaaggcaaaaataaaa

SEQ ID NO: 7371 - DNA, 20 bp, Artificial Sequence
  Synthetic oligonucleotide; GAG chr11 5214477 5214496 5214493 +
aatagttctttgaaactaat

SEQ ID NO: 7372 - DNA, 20 bp, Artificial Sequence
  Synthetic oligonucleotide; AAG chr11 5214484 5214503 5214500 +
ctttgaaactaatgagaaca

SEQ ID NO: 7373 - DNA, 20 bp, Artificial Sequence
  Synthetic oligonucleotide; CGG chr11 5214498 5214517 5214514 +
agaacaaagatacaatatac

SEQ ID NO: 7374 - DNA, 20 bp, Artificial Sequence
  Synthetic oligonucleotide; TGG chr11 5214507 5214526 5214523 +
atacaatataccggaatctc

SEQ ID NO: 7375 - DNA, 20 bp, Artificial Sequence
  Synthetic oligonucleotide; GGG chr11 5214508 5214527 5214524 +
tacaatataccggaatctct

SEQ ID NO: 7376 - DNA, 20 bp, Artificial Sequence
  Synthetic oligonucleotide; CAG chr11 5214514 5214533 5214530 +
ataccggaatctctgggaca

SEQ ID NO: 7377 - DNA, 20 bp, Artificial Sequence
  Synthetic oligonucleotide; TAG chr11 5214519 5214538 5214535 +
ggaatctctgggacacagct

SEQ ID NO: 7378 - DNA, 20 bp, Artificial Sequence
  Synthetic oligonucleotide; CAG chr11 5214523 5214542 5214539 +
tctctgggacacagcttaga

SEQ ID NO: 7379 - DNA, 20 bp, Artificial Sequence
  Synthetic oligonucleotide; AAG chr11 5214530 5214549 5214546 +
gacacagcttagacagtgtt

SEQ ID NO: 7380 - DNA, 20 bp, Artificial Sequence
  Synthetic oligonucleotide; GAG chr11 5214532 5214551 5214548 +
cacagcttagacagtgttaa

SEQ ID NO: 7381 - DNA, 20 bp, Artificial Sequence
  Synthetic oligonucleotide; GAG chr11 5214534 5214553 5214550 +
cagcttagacagtgttaaga

SEQ ID NO: 7382 - DNA, 20 bp, Artificial Sequence
  Synthetic oligonucleotide; AAG chr11 5214566 5214585 5214582 +
cactaaatgcccacatcaaa

SEQ ID NO: 7383 - DNA, 20 bp, Artificial Sequence
  Synthetic oligonucleotide; AAG chr11 5214574 5214593 5214590 +
gcccacatcaaaaagtctta

SEQ ID NO: 7384 - DNA, 20 bp, Artificial Sequence
  Synthetic oligonucleotide; AAG chr11 5214609 5214628 5214625 +
caacctaatgtcacaactaa

SEQ ID NO: 7385 - DNA, 20 bp, Artificial Sequence
  Synthetic oligonucleotide; CAG chr11 5214615 5214634 5214631 +
aatgtcacaactaaaagaac

SEQ ID NO: 7386 - DNA, 20 bp, Artificial Sequence
  Synthetic oligonucleotide; GAG chr11 5214617 5214636 5214633 +
tgtcacaactaaaagaacca

SEQ ID NO: 7387 - DNA, 20 bp, Artificial Sequence
  Synthetic oligonucleotide; AAG chr11 5214624 5214643 5214640 +
actaaaagaaccagagaacc

SEQ ID NO: 7388 - DNA, 20 bp, Artificial Sequence
  Synthetic oligonucleotide; GAG chr11 5214626 5214645 5214642 +
taaaagaaccagagaaccaa

SEQ ID NO: 7389 - DNA, 20 bp, Artificial Sequence
  Synthetic oligonucleotide; TAG chr11 5214646 5214665 5214662 +
gagcaaaccaaccctaaatc

SEQ ID NO: 7390 - DNA, 20 bp, Artificial Sequence
  Synthetic oligonucleotide; CAG chr11 5214649 5214668 5214665 +
caaaccaaccctaaatctag

SEQ ID NO: 7391 - DNA, 20 bp, Artificial Sequence
  Synthetic oligonucleotide; AAG chr11 5214652 5214671 5214668 +
accaaccctaaatctagcag

SEQ ID NO: 7392 - DNA, 20 bp, Artificial Sequence
  Synthetic oligonucleotide; AAG chr11 5214657 5214676 5214673 +
ccctaaatctagcagaagac

SEQ ID NO: 7393 - DNA, 20 bp, Artificial Sequence
  Synthetic oligonucleotide; AAG chr11 5214668 5214687 5214684 +
gcagaagacaagaaataaac

SEQ ID NO: 7394 - DNA, 20 bp, Artificial Sequence
  Synthetic oligonucleotide; AAG chr11 5214675 5214694 5214691 +
acaagaaataaacaagatca

SEQ ID NO: 7395 - DNA, 20 bp, Artificial Sequence
  Synthetic oligonucleotide; AAG chr11 5214685 5214704 5214701 +
aacaagatcaaagctaactg

SEQ ID NO: 7396 - DNA, 20 bp, Artificial Sequence
  Synthetic oligonucleotide; AGG chr11 5214686 5214705 5214702 +
acaagatcaaagctaactga

SEQ ID NO: 7397 - DNA, 20 bp, Artificial Sequence
  Synthetic oligonucleotide; AAG chr11 5214715 5214734 5214731 +
aaacacaaaataccattcaa

SEQ ID NO: 7398 - DNA, 20 bp, Artificial Sequence
  Synthetic oligonucleotide; GAG chr11 5214724 5214743 5214740 +
ataccattcaaaagattaat

SEQ ID NO: 7399 - DNA, 20 bp, Artificial Sequence
  Synthetic oligonucleotide; AAG chr11 5214730 5214749 5214746 +
ttcaaaagattaatgagtcc

SEQ ID NO: 7400 - DNA, 20 bp, Artificial Sequence
  Synthetic oligonucleotide; GAG chr11 5214732 5214751 5214748 +
caaaagattaatgagtccaa

SEQ ID NO: 7401 - DNA, 20 bp, Artificial Sequence
  Synthetic oligonucleotide; TGG chr11 5214736 5214755 5214752 +
agattaatgagtccaagagc

SEQ ID NO: 7402 - DNA, 20 bp, Artificial Sequence
  Synthetic oligonucleotide; AAG chr11 5214757 5214776 5214773 +
ggttttgtgaaaaaattaat

SEQ ID NO: 7403 - DNA, 20 bp, Artificial Sequence
  Synthetic oligonucleotide; AGG chr11 5214758 5214777 5214774 +
gttttgtgaaaaaattaata

SEQ ID NO: 7404 - DNA, 20 bp, Artificial Sequence
  Synthetic oligonucleotide; TAG chr11 5214761 5214780 5214777 +
ttgtgaaaaaattaataagg

SEQ ID NO: 7405 - DNA, 20 bp, Artificial Sequence
  Synthetic oligonucleotide; TAG chr11 5214769 5214788 5214785 +
aaattaataaggtagatcac

SEQ ID NO: 7406 - DNA, 20 bp, Artificial Sequence
  Synthetic oligonucleotide; TAG chr11 5214773 5214792 5214789 +
taataaggtagatcactagc

SEQ ID NO: 7407 - DNA, 20 bp, Artificial Sequence
  Synthetic oligonucleotide; AAG chr11 5214783 5214802 5214799 +
gatcactagctagactaata

SEQ ID NO: 7408 - DNA, 20 bp, Artificial Sequence
  Synthetic oligonucleotide; AAG chr11 5214786 5214805 5214802 +
cactagctagactaataaag

SEQ ID NO: 7409 - DNA, 20 bp, Artificial Sequence
  Synthetic oligonucleotide; AAG chr11 5214791 5214810 5214807 +
gctagactaataaagaagac

SEQ ID NO: 7410 - DNA, 20 bp, Artificial Sequence
  Synthetic oligonucleotide; GAG chr11 5214793 5214812 5214809 +
tagactaataaagaagacaa

SEQ ID NO: 7411 - DNA, 20 bp, Artificial Sequence
  Synthetic oligonucleotide; GAG chr11 5214795 5214814 5214811 +
gactaataaagaagacaaga

SEQ ID NO: 7412 - DNA, 20 bp, Artificial Sequence
  Synthetic oligonucleotide; AAG chr11 5214798 5214817 5214814 +
taataaagaagacaagagag

SEQ ID NO: 7413 - DNA, 20 bp, Artificial Sequence
  Synthetic oligonucleotide; AAG chr11 5214809 5214828 5214825 +
acaagagagaagatccaaat

SEQ ID NO: 7414 - DNA, 20 bp, Artificial Sequence
  Synthetic oligonucleotide; CAG chr11 5214814 5214833 5214830 +
agagaagatccaaataagca

SEQ ID NO: 7415 - DNA, 20 bp, Artificial Sequence
  Synthetic oligonucleotide; TAG chr11 5214818 5214837 5214834 +
aagatccaaataagcacagt

SEQ ID NO: 7416 - DNA, 20 bp, Artificial Sequence
  Synthetic oligonucleotide; AAG chr11 5214829 5214848 5214845 +
aagcacagttagaaatgaaa

SEQ ID NO: 7417 - DNA, 20 bp, Artificial Sequence
  Synthetic oligonucleotide; AGG chr11 5214830 5214849 5214846 +
agcacagttagaaatgaaaa

SEQ ID NO: 7418 - DNA, 20 bp, Artificial Sequence
  Synthetic oligonucleotide; GGG chr11 5214831 5214850 5214847 +
gcacagttagaaatgaaaaa

SEQ ID NO: 7419 - DNA, 20 bp, Artificial Sequence
  Synthetic oligonucleotide; CAG chr11 5214853 5214872 5214869 +
gaatattatcactcacccca

SEQ ID NO: 7420 - DNA, 20 bp, Artificial Sequence
  Synthetic oligonucleotide; TAG chr11 5214907 5214926 5214923 +
acatctctatgtacataaac

SEQ ID NO: 7421 - DNA, 20 bp, Artificial Sequence
  Synthetic oligonucleotide; AAG chr11 5214919 5214938 5214935 +
acataaactagaaaatctaa

SEQ ID NO: 7422 - DNA, 20 bp, Artificial Sequence
  Synthetic oligonucleotide; TGG chr11 5214925 5214944 5214941 +
actagaaaatctaaaagaaa

SEQ ID NO: 7423 - DNA, 20 bp, Artificial Sequence
  Synthetic oligonucleotide; TGG chr11 5214937 5214956 5214953 +
aaaagaaatggataacttcc

SEQ ID NO: 7424 - DNA, 20 bp, Artificial Sequence
  Synthetic oligonucleotide; TAG chr11 5214954 5214973 5214970 +
tcctggactgctcattgtct

SEQ ID NO: 7425 - DNA, 20 bp, Artificial Sequence
  Synthetic oligonucleotide; AGG chr11 5214955 5214974 5214971 +
cctggactgctcattgtctt

SEQ ID NO: 7426 - DNA, 20 bp, Artificial Sequence
  Synthetic oligonucleotide; AAG chr11 5214960 5214979 5214976 +
actgctcattgtcttaggca

SEQ ID NO: 7427 - DNA, 20 bp, Artificial Sequence
  Synthetic oligonucleotide; AAG chr11 5214963 5214982 5214979 +
gctcattgtcttaggcaaag

SEQ ID NO: 7428 - DNA, 20 bp, Artificial Sequence
  Synthetic oligonucleotide; TAG chr11 5214968 5214987 5214984 +
ttgtcttaggcaaagaagac

SEQ ID NO: 7429 - DNA, 20 bp, Artificial Sequence
  Synthetic oligonucleotide; GAG chr11 5214984 5215003 5215000 +
agactagccgtactttattt

SEQ ID NO: 7430 - DNA, 20 bp, Artificial Sequence
  Synthetic oligonucleotide; AGG chr11 5214985 5215004 5215001 +
gactagccgtactttatttg

SEQ ID NO: 7431 - DNA, 20 bp, Artificial Sequence
  Synthetic oligonucleotide; GGG chr11 5214986 5215005 5215002 +
actagccgtactttatttga

SEQ ID NO: 7432 - DNA, 20 bp, Artificial Sequence
  Synthetic oligonucleotide; GAG chr11 5214995 5215014 5215011 +
actttatttgagggctcttt

SEQ ID NO: 7433 - DNA, 20 bp, Artificial Sequence
  Synthetic oligonucleotide; TAG chr11 5214998 5215017 5215014 +
ttatttgagggctctttgag

SEQ ID NO: 7434 - DNA, 20 bp, Artificial Sequence
  Synthetic oligonucleotide; GAG chr11 5215000 5215019 5215016 +
atttgagggctctttgagta

SEQ ID NO: 7435 - DNA, 20 bp, Artificial Sequence
  Synthetic oligonucleotide; CAG chr11 5215047 5215066 5215063 +
caactctatgtccccctccc

SEQ ID NO: 7436 - DNA, 20 bp, Artificial Sequence
  Synthetic oligonucleotide; AAG chr11 5215056 5215075 5215072 +
gtccccctccccagaataca

SEQ ID NO: 7437 - DNA, 20 bp, Artificial Sequence
  Synthetic oligonucleotide; TGG chr11 5215089 5215108 5215105 +
gatgcctcctttgcttcttt

SEQ ID NO: 7438 - DNA, 20 bp, Artificial Sequence
  Synthetic oligonucleotide; TGG chr11 5215118 5215137 5215134 +
ctgtgttatatctgaatata

SEQ ID NO: 7439 - DNA, 20 bp, Artificial Sequence
  Synthetic oligonucleotide; TAG chr11 5215124 5215143 5215140 +
tatatctgaatatatggctc

SEQ ID NO: 7440 - DNA, 20 bp, Artificial Sequence
  Synthetic oligonucleotide; GAG chr11 5215126 5215145 5215142 +
tatctgaatatatggctcta

SEQ ID NO: 7441 - DNA, 20 bp, Artificial Sequence
  Synthetic oligonucleotide; AAG chr11 5215135 5215154 5215151 +
atatggctctagagaatccc

SEQ ID NO: 7442 - DNA, 20 bp, Artificial Sequence
  Synthetic oligonucleotide; TAG chr11 5215141 5215160 5215157 +
ctctagagaatcccaagaaa

SEQ ID NO: 7443 - DNA, 20 bp, Artificial Sequence
  Synthetic oligonucleotide; AAG chr11 5215147 5215166 5215163 +
agaatcccaagaaatagaaa

SEQ ID NO: 7444 - DNA, 20 bp, Artificial Sequence
  Synthetic oligonucleotide; TAG chr11 5215151 5215170 5215167 +
tcccaagaaatagaaaaagc

SEQ ID NO: 7445 - DNA, 20 bp, Artificial Sequence
  Synthetic oligonucleotide; AAG chr11 5215164 5215183 5215180 +
aaaaagctagtccaaaatcc

SEQ ID NO: 7446 - DNA, 20 bp, Artificial Sequence
  Synthetic oligonucleotide; AAG chr11 5215175 5215194 5215191 +
ccaaaatccaagctctgaat

SEQ ID NO: 7447 - DNA, 20 bp, Artificial Sequence
  Synthetic oligonucleotide; CAG chr11 5215179 5215198 5215195 +
aatccaagctctgaataaga

SEQ ID NO: 7448 - DNA, 20 bp, Artificial Sequence
  Synthetic oligonucleotide; AGG chr11 5215180 5215199 5215196 +
atccaagctctgaataagac

SEQ ID NO: 7449 - DNA, 20 bp, Artificial Sequence
  Synthetic oligonucleotide; GAG chr11 5215184 5215203 5215200 +
aagctctgaataagacaggt

SEQ ID NO: 7450 - DNA, 20 bp, Artificial Sequence
  Synthetic oligonucleotide; TGG chr11 5215192 5215211 5215208 +
aataagacaggtgagacctt

SEQ ID NO: 7451 - DNA, 20 bp, Artificial Sequence
  Synthetic oligonucleotide; AAG chr11 5215212 5215231 5215228 +
tggatgaatatcttttcaca

SEQ ID NO: 7452 - DNA, 20 bp, Artificial Sequence
  Synthetic oligonucleotide; GAG chr11 5215217 5215236 5215233 +
gaatatcttttcacaaagtt

SEQ ID NO: 7453 - DNA, 20 bp, Artificial Sequence
  Synthetic oligonucleotide; AAG chr11 5215220 5215239 5215236 +
tatcttttcacaaagttgag

SEQ ID NO: 7454 - DNA, 20 bp, Artificial Sequence
  Synthetic oligonucleotide; AAG chr11 5215228 5215247 5215244 +
cacaaagttgagaagatgtg

SEQ ID NO: 7455 - DNA, 20 bp, Artificial Sequence
  Synthetic oligonucleotide; AAG chr11 5215236 5215255 5215252 +
tgagaagatgtgaagaaccc

SEQ ID NO: 7456 - DNA, 20 bp, Artificial Sequence
  Synthetic oligonucleotide; TGG chr11 5215246 5215265 5215262 +
tgaagaacccaagaatccac

SEQ ID NO: 7457 - DNA, 20 bp, Artificial Sequence
  Synthetic oligonucleotide; GAG chr11 5215248 5215267 5215264 +
aagaacccaagaatccactg

SEQ ID NO: 7458 - DNA, 20 bp, Artificial Sequence
  Synthetic oligonucleotide; CAG chr11 5215254 5215273 5215270 +
ccaagaatccactggagaaa

SEQ ID NO: 7459 - DNA, 20 bp, Artificial Sequence
  Synthetic oligonucleotide; GAG chr11 5215261 5215280 5215277 +
tccactggagaaacagcccc

SEQ ID NO: 7460 - DNA, 20 bp, Artificial Sequence
  Synthetic oligonucleotide; AGG chr11 5215262 5215281 5215278 +
ccactggagaaacagccccg

SEQ ID NO: 7461 - DNA, 20 bp, Artificial Sequence
  Synthetic oligonucleotide; AAG chr11 5215271 5215290 5215287 +
aaacagccccgaggcactgc

SEQ ID NO: 7462 - DNA, 20 bp, Artificial Sequence
  Synthetic oligonucleotide; AGG chr11 5215272 5215291 5215288 +
aacagccccgaggcactgca

SEQ ID NO: 7463 - DNA, 20 bp, Artificial Sequence
  Synthetic oligonucleotide; GGG chr11 5215273 5215292 5215289 +
acagccccgaggcactgcaa

SEQ ID NO: 7464 - DNA, 20 bp, Artificial Sequence
  Synthetic oligonucleotide; GGG chr11 5215274 5215293 5215290 +
cagccccgaggcactgcaag

SEQ ID NO: 7465 - DNA, 20 bp, Artificial Sequence
  Synthetic oligonucleotide; CAG chr11 5215279 5215298 5215295 +
ccgaggcactgcaaggggtt

SEQ ID NO: 7466 - DNA, 20 bp, Artificial Sequence
  Synthetic oligonucleotide; TGG chr11 5215290 5215309 5215306 +
caaggggttcagacctgtgt

SEQ ID NO: 7467 - DNA, 20 bp, Artificial Sequence
  Synthetic oligonucleotide; GAG chr11 5215292 5215311 5215308 +
aggggttcagacctgtgttg

SEQ ID NO: 7468 - DNA, 20 bp, Artificial Sequence
  Synthetic oligonucleotide; CAG chr11 5215380 5215399 5215396 +
cttgtttgtttgtttttcct

SEQ ID NO: 7469 - DNA, 20 bp, Artificial Sequence
  Synthetic oligonucleotide; GAG chr11 5215382 5215401 5215398 +
tgtttgtttgtttttcctca

SEQ ID NO: 7470 - DNA, 20 bp, Artificial Sequence
  Synthetic oligonucleotide; CAG chr11 5215386 5215405 5215402 +
tgtttgtttttcctcagaga

SEQ ID NO: 7471 - DNA, 20 bp, Artificial Sequence
  Synthetic oligonucleotide; AGG chr11 5215387 5215406 5215403 +
gtttgtttttcctcagagac

SEQ ID NO: 7472 - DNA, 20 bp, Artificial Sequence
  Synthetic oligonucleotide; CAG chr11 5215394 5215413 5215410 +
tttcctcagagacaggatct

SEQ ID NO: 7473 - DNA, 20 bp, Artificial Sequence
  Synthetic oligonucleotide; AAG chr11 5215402 5215421 5215418 +
gagacaggatctcagtcacc

SEQ ID NO: 7474 - DNA, 20 bp, Artificial Sequence
  Synthetic oligonucleotide; AGG chr11 5215403 5215422 5215419 +
agacaggatctcagtcacca

SEQ ID NO: 7475 - DNA, 20 bp, Artificial Sequence
  Synthetic oligonucleotide; TAG chr11 5215407 5215426 5215423 +
aggatctcagtcaccaaggc

SEQ ID NO: 7476 - DNA, 20 bp, Artificial Sequence
  Synthetic oligonucleotide; GAG chr11 5215409 5215428 5215425 +
gatctcagtcaccaaggcta

SEQ ID NO: 7477 - DNA, 20 bp, Artificial Sequence
  Synthetic oligonucleotide; GAG chr11 5215411 5215430 5215427 +
tctcagtcaccaaggctaga

SEQ ID NO: 7478 - DNA, 20 bp, Artificial Sequence
  Synthetic oligonucleotide; CAG chr11 5215414 5215433 5215430 +
cagtcaccaaggctagagag

SEQ ID NO: 7479 - DNA, 20 bp, Artificial Sequence
  Synthetic oligonucleotide; TGG chr11 5215417 5215436 5215433 +
tcaccaaggctagagagcag

SEQ ID NO: 7480 - DNA, 20 bp, Artificial Sequence
  Synthetic oligonucleotide; TGG chr11 5215452 5215471 5215468 +
tcactgcaaccctgaaatcc

SEQ ID NO: 7481 - DNA, 20 bp, Artificial Sequence
  Synthetic oligonucleotide; GGG chr11 5215453 5215472 5215469 +
cactgcaaccctgaaatcct

SEQ ID NO: 7482 - DNA, 20 bp, Artificial Sequence
  Synthetic oligonucleotide; AAG chr11 5215459 5215478 5215475 +
aaccctgaaatcctgggctc

SEQ ID NO: 7483 - DNA, 20 bp, Artificial Sequence
  Synthetic oligonucleotide; CAG chr11 5215476 5215495 5215492 +
ctcaagtgatcctatcactt

SEQ ID NO: 7484 - DNA, 20 bp, Artificial Sequence
  Synthetic oligonucleotide; TGG chr11 5215484 5215503 5215500 +
atcctatcacttcagcctcc

SEQ ID NO: 7485 - DNA, 20 bp, Artificial Sequence
  Synthetic oligonucleotide; GGG chr11 5215485 5215504 5215501 +
tcctatcacttcagcctcct

SEQ ID NO: 7486 - DNA, 20 bp, Artificial Sequence
  Synthetic oligonucleotide; TGG chr11 5215492 5215511 5215508 +
acttcagcctcctgggttac

SEQ ID NO: 7487 - DNA, 20 bp, Artificial Sequence
  Synthetic oligonucleotide; GGG chr11 5215493 5215512 5215509 +
cttcagcctcctgggttact

SEQ ID NO: 7488 - DNA, 20 bp, Artificial Sequence
  Synthetic oligonucleotide; CAG chr11 5215500 5215519 5215516 +
ctcctgggttactgggacta

SEQ ID NO: 7489 - DNA, 20 bp, Artificial Sequence
  Synthetic oligonucleotide; AAG chr11 5215507 5215526 5215523 +
gttactgggactacagatgc

SEQ ID NO: 7490 - DNA, 20 bp, Artificial Sequence
  Synthetic oligonucleotide; CAG chr11 5215520 5215539 5215536 +
cagatgcaagccactgtgcc

SEQ ID NO: 7491 - DNA, 20 bp, Artificial Sequence
  Synthetic oligonucleotide; TGG chr11 5215525 5215544 5215541 +
gcaagccactgtgcccagct

SEQ ID NO: 7492 - DNA, 20 bp, Artificial Sequence
  Synthetic oligonucleotide; TGG chr11 5215548 5215567 5215564 +
ctctttctttttattttaat

SEQ ID NO: 7493 - DNA, 20 bp, Artificial Sequence
  Synthetic oligonucleotide; CAG chr11 5215563 5215582 5215579 +
ttaattggtcactttgtttt

SEQ ID NO: 7494 - DNA, 20 bp, Artificial Sequence
  Synthetic oligonucleotide; CAG chr11 5215611 5215630 5215627 +
tcacctctgacttgacctcc

SEQ ID NO: 7495 - DNA, 20 bp, Artificial Sequence
  Synthetic oligonucleotide; TGG chr11 5215634 5215653 5215650 +
ttgtcaaatatttgacttaa

SEQ ID NO: 7496 - DNA, 20 bp, Artificial Sequence
  Synthetic oligonucleotide; GGG chr11 5215635 5215654 5215651 +
tgtcaaatatttgacttaat

SEQ ID NO: 7497 - DNA, 20 bp, Artificial Sequence
  Synthetic oligonucleotide; GAG chr11 5215637 5215656 5215653 +
tcaaatatttgacttaatgg

SEQ ID NO: 7498 - DNA, 20 bp, Artificial Sequence
  Synthetic oligonucleotide; TAG chr11 5215649 5215668 5215665 +
cttaatgggagactttcccc

SEQ ID NO: 7499 - DNA, 20 bp, Artificial Sequence
  Synthetic oligonucleotide; CAG chr11 5215663 5215682 5215679 +
ttcccctagcttgttgattc

SEQ ID NO: 7500 - DNA, 20 bp, Artificial Sequence
  Synthetic oligonucleotide; TAG chr11 5215682 5215701 5215698 +
ccagaaattcaactttattc

SEQ ID NO: 7501 - DNA, 20 bp, Artificial Sequence
  Synthetic oligonucleotide; AGG chr11 5215683 5215702 5215699 +
cagaaattcaactttattct

SEQ ID NO: 7502 - DNA, 20 bp, Artificial Sequence
  Synthetic oligonucleotide; TGG chr11 5215688 5215707 5215704 +
attcaactttattctaggct

SEQ ID NO: 7503 - DNA, 20 bp, Artificial Sequence
  Synthetic oligonucleotide; TAG chr11 5215699 5215718 5215715 +
ttctaggcttggctcctgtt

SEQ ID NO: 7504 - DNA, 20 bp, Artificial Sequence
  Synthetic oligonucleotide; GAG chr11 5215714 5215733 5215730 +
ctgtttagtattgctgcttt

SEQ ID NO: 7505 - DNA, 20 bp, Artificial Sequence
  Synthetic oligonucleotide; TGG chr11 5215724 5215743 5215740 +
ttgctgctttgagattgttc

SEQ ID NO: 7506 - DNA, 20 bp, Artificial Sequence
  Synthetic oligonucleotide; AAG chr11 5215739 5215758 5215755 +
tgttctggttcatgaaaaac

SEQ ID NO: 7507 - DNA, 20 bp, Artificial Sequence
  Synthetic oligonucleotide; AAG chr11 5215798 5215817 5215814 +
ctaaattcttataaacaaat

SEQ ID NO: 7508 - DNA, 20 bp, Artificial Sequence
  Synthetic oligonucleotide; AAG chr11 5215801 5215820 5215817 +
aattcttataaacaaataag

SEQ ID NO: 7509 - DNA, 20 bp, Artificial Sequence
  Synthetic oligonucleotide; AGG chr11 5215802 5215821 5215818 +
attcttataaacaaataaga

SEQ ID NO: 7510 - DNA, 20 bp, Artificial Sequence
  Synthetic oligonucleotide; AAG chr11 5215805 5215824 5215821 +
cttataaacaaataagaagg

SEQ ID NO: 7511 - DNA, 20 bp, Artificial Sequence
  Synthetic oligonucleotide; CAG chr11 5215813 5215832 5215829 +
caaataagaaggaagactct

SEQ ID NO: 7512 - DNA, 20 bp, Artificial Sequence
  Synthetic oligonucleotide; TGG chr11 5215823 5215842 5215839 +
ggaagactctcagaaatata

SEQ ID NO: 7513 - DNA, 20 bp, Artificial Sequence
  Synthetic oligonucleotide; GAG chr11 5215825 5215844 5215841 +
aagactctcagaaatatatg

SEQ ID NO: 7514 - DNA, 20 bp, Artificial Sequence
  Synthetic oligonucleotide; GAG chr11 5215827 5215846 5215843 +
gactctcagaaatatatgga

SEQ ID NO: 7515 - DNA, 20 bp, Artificial Sequence
  Synthetic oligonucleotide; GAG chr11 5215833 5215852 5215849 +
cagaaatatatggagagact

SEQ ID NO: 7516 - DNA, 20 bp, Artificial Sequence
  Synthetic oligonucleotide; AGG chr11 5215834 5215853 5215850 +
agaaatatatggagagactg

SEQ ID NO: 7517 - DNA, 20 bp, Artificial Sequence
  Synthetic oligonucleotide; TAG chr11 5215838 5215857 5215854 +
atatatggagagactgaggt

SEQ ID NO: 7518 - DNA, 20 bp, Artificial Sequence
  Synthetic oligonucleotide; GAG chr11 5215840 5215859 5215856 +
atatggagagactgaggtta

SEQ ID NO: 7519 - DNA, 20 bp, Artificial Sequence
  Synthetic oligonucleotide; GAG chr11 5215845 5215864 5215861 +
gagagactgaggttagagtt

SEQ ID NO: 7520 - DNA, 20 bp, Artificial Sequence
  Synthetic oligonucleotide; AAG chr11 5215849 5215868 5215865 +
gactgaggttagagttgagc

SEQ ID NO: 7521 - DNA, 20 bp, Artificial Sequence
  Synthetic oligonucleotide; AGG chr11 5215850 5215869 5215866 +
actgaggttagagttgagca

SEQ ID NO: 7522 - DNA, 20 bp, Artificial Sequence
  Synthetic oligonucleotide; TAG chr11 5215877 5215896 5215893 +
aaattttgtcacaactaatc

SEQ ID NO: 7523 - DNA, 20 bp, Artificial Sequence
  Synthetic oligonucleotide; AAG chr11 5215883 5215902 5215899 +
tgtcacaactaatctagttg

SEQ ID NO: 7524 - DNA, 20 bp, Artificial Sequence
  Synthetic oligonucleotide; AGG chr11 5215884 5215903 5215900 +
gtcacaactaatctagttga

SEQ ID NO: 7525 - DNA, 20 bp, Artificial Sequence
  Synthetic oligonucleotide; GAG chr11 5215901 5215920 5215917 +
tgaaggaatgttaactgact

SEQ ID NO: 7526 - DNA, 20 bp, Artificial Sequence
  Synthetic oligonucleotide; AAG chr11 5215930 5215949 5215946 +
ctaaatttctgtctatttca

SEQ ID NO: 7527 - DNA, 20 bp, Artificial Sequence
  Synthetic oligonucleotide; GAG chr11 5215932 5215951 5215948 +
aaatttctgtctatttcaaa

SEQ ID NO: 7528 - DNA, 20 bp, Artificial Sequence
  Synthetic oligonucleotide; AAG chr11 5215936 5215955 5215952 +
ttctgtctatttcaaagaga

SEQ ID NO: 7529 - DNA, 20 bp, Artificial Sequence
  Synthetic oligonucleotide; TGG chr11 5215948 5215967 5215964 +
caaagagaaagacttgataa

SEQ ID NO: 7530 - DNA, 20 bp, Artificial Sequence
  Synthetic oligonucleotide; CGG chr11 5215956 5215975 5215972 +
aagacttgataatggctcta

SEQ ID NO: 7531 - DNA, 20 bp, Artificial Sequence
  Synthetic oligonucleotide; GAG chr11 5215965 5215984 5215981 +
taatggctctacggatgtgt

SEQ ID NO: 7532 - DNA, 20 bp, Artificial Sequence
  Synthetic oligonucleotide; CAG chr11 5215970 5215989 5215986 +
gctctacggatgtgtgagat

SEQ ID NO: 7533 - DNA, 20 bp, Artificial Sequence
  Synthetic oligonucleotide; TAG chr11 5215979 5215998 5215995 +
atgtgtgagatcagttttaa

SEQ ID NO: 7534 - DNA, 20 bp, Artificial Sequence
  Synthetic oligonucleotide; AGG chr11 5215980 5215999 5215996 +
tgtgtgagatcagttttaat

SEQ ID NO: 7535 - DNA, 20 bp, Artificial Sequence
  Synthetic oligonucleotide; AAG chr11 5216009 5216028 5216025 +
tttttttattattatacttc

SEQ ID NO: 7536 - DNA, 20 bp, Artificial Sequence
  Synthetic oligonucleotide; TAG chr11 5216015 5216034 5216031 +
tattattatacttcaagttt

SEQ ID NO: 7537 - DNA, 20 bp, Artificial Sequence
  Synthetic oligonucleotide; AGG chr11 5216016 5216035 5216032 +
attattatacttcaagtttt

SEQ ID NO: 7538 - DNA, 20 bp, Artificial Sequence
  Synthetic oligonucleotide; GGG chr11 5216017 5216036 5216033 +
ttattatacttcaagtttta

SEQ ID NO: 7539 - DNA, 20 bp, Artificial Sequence
  Synthetic oligonucleotide; CAG chr11 5216037 5216056 5216053 +
gggtacatgtgcacaacatg

SEQ ID NO: 7540 - DNA, 20 bp, Artificial Sequence
  Synthetic oligonucleotide; AGG chr11 5216038 5216057 5216054 +
ggtacatgtgcacaacatgc

SEQ ID NO: 7541 - DNA, 20 bp, Artificial Sequence
  Synthetic oligonucleotide; TGG chr11 5216070 5216089 5216086 +
tatgtatacatgtgccatgt

SEQ ID NO: 7542 - DNA, 20 bp, Artificial Sequence
  Synthetic oligonucleotide; TAG chr11 5216099 5216118 5216115 +
gcacccattaactcgtcatt

SEQ ID NO: 7543 - DNA, 20 bp, Artificial Sequence
  Synthetic oligonucleotide; TAG chr11 5216105 5216124 5216121 +
attaactcgtcatttagcat

SEQ ID NO: 7544 - DNA, 20 bp, Artificial Sequence
  Synthetic oligonucleotide; AGG chr11 5216106 5216125 5216122 +
ttaactcgtcatttagcatt

SEQ ID NO: 7545 - DNA, 20 bp, Artificial Sequence
  Synthetic oligonucleotide; TAG chr11 5216118 5216137 5216134 +
ttagcattaggtatatctcc

SEQ ID NO: 7546 - DNA, 20 bp, Artificial Sequence
  Synthetic oligonucleotide; CAG chr11 5216153 5216172 5216169 +
ccctgccccccaccccataa

SEQ ID NO: 7547 - DNA, 20 bp, Artificial Sequence
  Synthetic oligonucleotide; CAG chr11 5216160 5216179 5216176 +
ccccaccccataacagtccc

SEQ ID NO: 7548 - DNA, 20 bp, Artificial Sequence
  Synthetic oligonucleotide; GAG chr11 5216162 5216181 5216178 +
ccaccccataacagtcccca

SEQ ID NO: 7549 - DNA, 20 bp, Artificial Sequence
  Synthetic oligonucleotide; GAG chr11 5216219 5216238 5216235 +
attgttcaattcccacctat

SEQ ID NO: 7550 - DNA, 20 bp, Artificial Sequence
  Synthetic oligonucleotide; GAG chr11 5216223 5216242 5216239 +
ttcaattcccacctatgagt

SEQ ID NO: 7551 - DNA, 20 bp, Artificial Sequence
  Synthetic oligonucleotide; CGG chr11 5216232 5216251 5216248 +
cacctatgagtgagaacatg

SEQ ID NO: 7552 - DNA, 20 bp, Artificial Sequence
  Synthetic oligonucleotide; TGG chr11 5216239 5216258 5216255 +
gagtgagaacatgcggtgtt

SEQ ID NO: 7553 - DNA, 20 bp, Artificial Sequence
  Synthetic oligonucleotide; TAG chr11 5216258 5216277 5216274 +
ttggtttattctccttgtga

SEQ ID NO: 7554 - DNA, 20 bp, Artificial Sequence
  Synthetic oligonucleotide; GAG chr11 5216267 5216286 5216283 +
tctccttgtgatagtttgct

SEQ ID NO: 7555 - DNA, 20 bp, Artificial Sequence
  Synthetic oligonucleotide; TAG chr11 5216275 5216294 5216291 +
tgatagtttgctgagaatga

SEQ ID NO: 7556 - DNA, 20 bp, Artificial Sequence
  Synthetic oligonucleotide; CAG chr11 5216282 5216301 5216298 +
ttgctgagaatgatagtttc

SEQ ID NO: 7557 - DNA, 20 bp, Artificial Sequence
  Synthetic oligonucleotide; AAG chr11 5216304 5216323 5216320 +
gcttcatccatgtccctaca

SEQ ID NO: 7558 - DNA, 20 bp, Artificial Sequence
  Synthetic oligonucleotide; AGG chr11 5216305 5216324 5216321 +
cttcatccatgtccctacaa

SEQ ID NO: 7559 - DNA, 20 bp, Artificial Sequence
  Synthetic oligonucleotide; TGG chr11 5216329 5216348 5216345 +
catgaactcatcatttttta

SEQ ID NO: 7560 - DNA, 20 bp, Artificial Sequence
  Synthetic oligonucleotide; TAG chr11 5216337 5216356 5216353 +
catcattttttatggctgca

SEQ ID NO: 7561 - DNA, 20 bp, Artificial Sequence
  Synthetic oligonucleotide; TGG chr11 5216347 5216366 5216363 +
tatggctgcatagtattcca

SEQ ID NO: 7562 - DNA, 20 bp, Artificial Sequence
  Synthetic oligonucleotide; CAG chr11 5216376 5216395 5216392 +
tgtgccacattttcttaatc

SEQ ID NO: 7563 - DNA, 20 bp, Artificial Sequence
  Synthetic oligonucleotide; TGG chr11 5216390 5216409 5216406 +
ttaatccagtctatcgttgt

SEQ ID NO: 7564 - DNA, 20 bp, Artificial Sequence
  Synthetic oligonucleotide; TGG chr11 5216398 5216417 5216414 +
gtctatcgttgttggacatt

SEQ ID NO: 7565 - DNA, 20 bp, Artificial Sequence
  Synthetic oligonucleotide; GGG chr11 5216399 5216418 5216415 +
tctatcgttgttggacattt

SEQ ID NO: 7566 - DNA, 20 bp, Artificial Sequence
  Synthetic oligonucleotide; TGG chr11 5216403 5216422 5216419 +
tcgttgttggacatttgggt

SEQ ID NO: 7567 - DNA, 20 bp, Artificial Sequence
  Synthetic oligonucleotide; AAG chr11 5216410 5216429 5216426 +
tggacatttgggttggttcc

SEQ ID NO: 7568 - DNA, 20 bp, Artificial Sequence
  Synthetic oligonucleotide; TAG chr11 5216429 5216448 5216445 +
caagtctttgctattgtgaa

SEQ ID NO: 7569 - DNA, 20 bp, Artificial Sequence
  Synthetic oligonucleotide; TAG chr11 5216466 5216485 5216482 +
tacgtgtgcatgtgtcttta

SEQ ID NO: 7570 - DNA, 20 bp, Artificial Sequence
  Synthetic oligonucleotide; CAG chr11 5216469 5216488 5216485 +
gtgtgcatgtgtctttatag

SEQ ID NO: 7571 - DNA, 20 bp, Artificial Sequence
  Synthetic oligonucleotide; TGG chr11 5216489 5216508 5216505 +
cagcatgatttataatcctt

SEQ ID NO: 7572 - DNA, 20 bp, Artificial Sequence
  Synthetic oligonucleotide; GGG chr11 5216490 5216509 5216506 +
agcatgatttataatccttt

SEQ ID NO: 7573 - DNA, 20 bp, Artificial Sequence
  Synthetic oligonucleotide; CAG chr11 5216501 5216520 5216517 +
taatcctttgggtatgtacc

SEQ ID NO: 7574 - DNA, 20 bp, Artificial Sequence
  Synthetic oligonucleotide; TGG chr11 5216507 5216526 5216523 +
tttgggtatgtacccagtaa

SEQ ID NO: 7575 - DNA, 20 bp, Artificial Sequence
  Synthetic oligonucleotide; GGG chr11 5216508 5216527 5216524 +
ttgggtatgtacccagtaat

SEQ ID NO: 7576 - DNA, 20 bp, Artificial Sequence
  Synthetic oligonucleotide; TGG chr11 5216512 5216531 5216528 +
gtatgtacccagtaatggga

SEQ ID NO: 7577 - DNA, 20 bp, Artificial Sequence
  Synthetic oligonucleotide; TGG chr11 5216516 5216535 5216532 +
gtacccagtaatgggatggc

SEQ ID NO: 7578 - DNA, 20 bp, Artificial Sequence
  Synthetic oligonucleotide; GGG chr11 5216517 5216536 5216533 +
tacccagtaatgggatggct

SEQ ID NO: 7579 - DNA, 20 bp, Artificial Sequence
  Synthetic oligonucleotide; TGG chr11 5216525 5216544 5216541 +
aatgggatggctgggtcaaa

SEQ ID NO: 7580 - DNA, 20 bp, Artificial Sequence
  Synthetic oligonucleotide; TAG chr11 5216534 5216553 5216550 +
gctgggtcaaatggtatttc

SEQ ID NO: 7581 - DNA, 20 bp, Artificial Sequence
  Synthetic oligonucleotide; TAG chr11 5216540 5216559 5216556 +
tcaaatggtatttctagttc

SEQ ID NO: 7582 - DNA, 20 bp, Artificial Sequence
  Synthetic oligonucleotide; GAG chr11 5216549 5216568 5216565 +
atttctagttctagattcct

SEQ ID NO: 7583 - DNA, 20 bp, Artificial Sequence
  Synthetic oligonucleotide; AGG chr11 5216550 5216569 5216566 +
tttctagttctagattcctg

SEQ ID NO: 7584 - DNA, 20 bp, Artificial Sequence
  Synthetic oligonucleotide; TGG chr11 5216576 5216595 5216592 +
tgccacactgacttccgcaa

SEQ ID NO: 7585 - DNA, 20 bp, Artificial Sequence
  Synthetic oligonucleotide; TAG chr11 5216585 5216604 5216601 +
gacttccgcaatggttgaac

SEQ ID NO: 7586 - DNA, 20 bp, Artificial Sequence
  Synthetic oligonucleotide; CAG chr11 5216592 5216611 5216608 +
gcaatggttgaactagttta

SEQ ID NO: 7587 - DNA, 20 bp, Artificial Sequence
  Synthetic oligonucleotide; CAG chr11 5216604 5216623 5216620 +
ctagtttacagtcccaccaa

SEQ ID NO: 7588 - DNA, 20 bp, Artificial Sequence
  Synthetic oligonucleotide; AAG chr11 5216612 5216631 5216628 +
cagtcccaccaacagtgtaa

SEQ ID NO: 7589 - DNA, 20 bp, Artificial Sequence
  Synthetic oligonucleotide; CAG chr11 5216641 5216660 5216657 +
ctgtttctccacatcctctc

SEQ ID NO: 7590 - DNA, 20 bp, Artificial Sequence
  Synthetic oligonucleotide; TGG chr11 5216685 5216704 5216701 +
ttaatgatcgccattctaac

SEQ ID NO: 7591 - DNA, 20 bp, Artificial Sequence
  Synthetic oligonucleotide; GAG chr11 5216691 5216710 5216707 +
atcgccattctaactggtgt

SEQ ID NO: 7592 - DNA, 20 bp, Artificial Sequence
  Synthetic oligonucleotide; TGG chr11 5216695 5216714 5216711 +
ccattctaactggtgtgaga

SEQ ID NO: 7593 - DNA, 20 bp, Artificial Sequence
  Synthetic oligonucleotide; TGG chr11 5216708 5216727 5216724 +
tgtgagatggtatctcattg

SEQ ID NO: 7594 - DNA, 20 bp, Artificial Sequence
  Synthetic oligonucleotide; TGG chr11 5216732 5216751 5216748 +
tttgatttgcatttctctga

SEQ ID NO: 7595 - DNA, 20 bp, Artificial Sequence
  Synthetic oligonucleotide; TAG chr11 5216736 5216755 5216752 +
atttgcatttctctgatggc

SEQ ID NO: 7596 - DNA, 20 bp, Artificial Sequence
  Synthetic oligonucleotide; GAG chr11 5216746 5216765 5216762 +
ctctgatggctagtgatgat

SEQ ID NO: 7597 - DNA, 20 bp, Artificial Sequence
  Synthetic oligonucleotide; AAG chr11 5216794 5216813 5216810 +
cataaatgtcttcttttgcg

SEQ ID NO: 7598 - DNA, 20 bp, Artificial Sequence
  Synthetic oligonucleotide; TGG chr11 5216828 5216847 5216844 +
atcctttgcccactttttga

SEQ ID NO: 7599 - DNA, 20 bp, Artificial Sequence
  Synthetic oligonucleotide; GGG chr11 5216829 5216848 5216845 +
tcctttgcccactttttgat

SEQ ID NO: 7600 - DNA, 20 bp, Artificial Sequence
  Synthetic oligonucleotide; GGG chr11 5216830 5216849 5216846 +
cctttgcccactttttgatg

SEQ ID NO: 7601 - DNA, 20 bp, Artificial Sequence
  Synthetic oligonucleotide; GAG chr11 5216861 5216880 5216877 +
tttttcttgtaaatttgttt

SEQ ID NO: 7602 - DNA, 20 bp, Artificial Sequence
  Synthetic oligonucleotide; TAG chr11 5216871 5216890 5216887 +
aaatttgtttgagttcattg

SEQ ID NO: 7603 - DNA, 20 bp, Artificial Sequence
  Synthetic oligonucleotide; TGG chr11 5216878 5216897 5216894 +
tttgagttcattgtagattc

SEQ ID NO: 7604 - DNA, 20 bp, Artificial Sequence
  Synthetic oligonucleotide; TAG chr11 5216885 5216904 5216901 +
tcattgtagattctggatat

SEQ ID NO: 7605 - DNA, 20 bp, Artificial Sequence
  Synthetic oligonucleotide; CAG chr11 5216896 5216915 5216912 +
tctggatattagccctttgt

SEQ ID NO: 7606 - DNA, 20 bp, Artificial Sequence
  Synthetic oligonucleotide; GAG chr11 5216901 5216920 5216917 +
atattagccctttgtcagat

SEQ ID NO: 7607 - DNA, 20 bp, Artificial Sequence
  Synthetic oligonucleotide; TAG chr11 5216904 5216923 5216920 +
ttagccctttgtcagatgag

SEQ ID NO: 7608 - DNA, 20 bp, Artificial Sequence
  Synthetic oligonucleotide; TAG chr11 5216932 5216951 5216948 +
aaaaattttctcccattttg

SEQ ID NO: 7609 - DNA, 20 bp, Artificial Sequence
  Synthetic oligonucleotide; AGG chr11 5216933 5216952 5216949 +
aaaattttctcccattttgt

SEQ ID NO: 7610 - DNA, 20 bp, Artificial Sequence
  Synthetic oligonucleotide; TGG chr11 5216953 5216972 5216969 +
aggttgcctgttcactctga

SEQ ID NO: 7611 - DNA, 20 bp, Artificial Sequence
  Synthetic oligonucleotide; TAG chr11 5216956 5216975 5216972 +
ttgcctgttcactctgatgg

SEQ ID NO: 7612 - DNA, 20 bp, Artificial Sequence
  Synthetic oligonucleotide; TAG chr11 5216965 5216984 5216981 +
cactctgatggtagtttctt

SEQ ID NO: 7613 - DNA, 20 bp, Artificial Sequence
  Synthetic oligonucleotide; CAG chr11 5216973 5216992 5216989 +
tggtagtttctttagctgtg

SEQ ID NO: 7614 - DNA, 20 bp, Artificial Sequence
  Synthetic oligonucleotide; AAG chr11 5216976 5216995 5216992 +
tagtttctttagctgtgcag

SEQ ID NO: 7615 - DNA, 20 bp, Artificial Sequence
  Synthetic oligonucleotide; TAG chr11 5216984 5217003 5217000 +
ttagctgtgcagaagctctt

SEQ ID NO: 7616 - DNA, 20 bp, Artificial Sequence
  Synthetic oligonucleotide; TAG chr11 5216993 5217012 5217009 +
cagaagctctttagtttaat

SEQ ID NO: 7617 - DNA, 20 bp, Artificial Sequence
  Synthetic oligonucleotide; TGG chr11 5217035 5217054 5217051 +
tcttttgttgccattgcttt

SEQ ID NO: 7618 - DNA, 20 bp, Artificial Sequence
  Synthetic oligonucleotide; TAG chr11 5217043 5217062 5217059 +
tgccattgcttttggtgttt

SEQ ID NO: 7619 - DNA, 20 bp, Artificial Sequence
  Synthetic oligonucleotide; AAG chr11 5217051 5217070 5217067 +
cttttggtgttttagacatg

SEQ ID NO: 7620 - DNA, 20 bp, Artificial Sequence
  Synthetic oligonucleotide; TGG chr11 5217079 5217098 5217095 +
gcccatgcctatgtcctgaa

SEQ ID NO: 7621 - DNA, 20 bp, Artificial Sequence
  Synthetic oligonucleotide; TAG chr11 5217089 5217108 5217105 +
atgtcctgaatggtattgcc

SEQ ID NO: 7622 - DNA, 20 bp, Artificial Sequence
  Synthetic oligonucleotide; AGG chr11 5217090 5217109 5217106 +
tgtcctgaatggtattgcct

SEQ ID NO: 7623 - DNA, 20 bp, Artificial Sequence
  Synthetic oligonucleotide; TAG chr11 5217101 5217120 5217117 +
gtattgcctaggtttttttc

SEQ ID NO: 7624 - DNA, 20 bp, Artificial Sequence
  Synthetic oligonucleotide; AGG chr11 5217102 5217121 5217118 +
tattgcctaggtttttttct

SEQ ID NO: 7625 - DNA, 20 bp, Artificial Sequence
  Synthetic oligonucleotide; GGG chr11 5217103 5217122 5217119 +
attgcctaggtttttttcta

SEQ ID NO: 7626 - DNA, 20 bp, Artificial Sequence
  Synthetic oligonucleotide; TGG chr11 5217112 5217131 5217128 +
gtttttttctagggttttta

SEQ ID NO: 7627 - DNA, 20 bp, Artificial Sequence
  Synthetic oligonucleotide; TAG chr11 5217118 5217137 5217134 +
ttctagggtttttatggttt

SEQ ID NO: 7628 - DNA, 20 bp, Artificial Sequence
  Synthetic oligonucleotide; AGG chr11 5217119 5217138 5217135 +
tctagggtttttatggtttt

SEQ ID NO: 7629 - DNA, 20 bp, Artificial Sequence
  Synthetic oligonucleotide; AAG chr11 5217132 5217151 5217148 +
tggttttaggtctaacatgt

SEQ ID NO: 7630 - DNA, 20 bp, Artificial Sequence
  Synthetic oligonucleotide; AAG chr11 5217166 5217185 5217182 +
tcttgaattaatttttgtat

SEQ ID NO: 7631 - DNA, 20 bp, Artificial Sequence
  Synthetic oligonucleotide; AGG chr11 5217167 5217186 5217183 +
cttgaattaatttttgtata

SEQ ID NO: 7632 - DNA, 20 bp, Artificial Sequence
  Synthetic oligonucleotide; AAG chr11 5217173 5217192 5217189 +
ttaatttttgtataaggtgt

SEQ ID NO: 7633 - DNA, 20 bp, Artificial Sequence
  Synthetic oligonucleotide; AGG chr11 5217174 5217193 5217190 +
taatttttgtataaggtgta

SEQ ID NO: 7634 - DNA, 20 bp, Artificial Sequence
  Synthetic oligonucleotide; AAG chr11 5217177 5217196 5217193 +
tttttgtataaggtgtaagg

SEQ ID NO: 7635 - DNA, 20 bp, Artificial Sequence
  Synthetic oligonucleotide; AGG chr11 5217178 5217197 5217194 +
ttttgtataaggtgtaagga

SEQ ID NO: 7636 - DNA, 20 bp, Artificial Sequence
  Synthetic oligonucleotide; GGG chr11 5217179 5217198 5217195 +
tttgtataaggtgtaaggaa

SEQ ID NO: 7637 - DNA, 20 bp, Artificial Sequence
  Synthetic oligonucleotide; CAG chr11 5217185 5217204 5217201 +
taaggtgtaaggaagggatc

SEQ ID NO: 7638 - DNA, 20 bp, Artificial Sequence
  Synthetic oligonucleotide; CAG chr11 5217191 5217210 5217207 +
gtaaggaagggatccagttt

SEQ ID NO: 7639 - DNA, 20 bp, Artificial Sequence
  Synthetic oligonucleotide; TGG chr11 5217205 5217224 5217221 +
cagtttcagctttctacata

SEQ ID NO: 7640 - DNA, 20 bp, Artificial Sequence
  Synthetic oligonucleotide; TAG chr11 5217209 5217228 5217225 +
ttcagctttctacatatggc

SEQ ID NO: 7641 - DNA, 20 bp, Artificial Sequence
  Synthetic oligonucleotide; CAG chr11 5217213 5217232 5217229 +
gctttctacatatggctagc

SEQ ID NO: 7642 - DNA, 20 bp, Artificial Sequence
  Synthetic oligonucleotide; CAG chr11 5217222 5217241 5217238 +
atatggctagccagttttcc

SEQ ID NO: 7643 - DNA, 20 bp, Artificial Sequence
  Synthetic oligonucleotide; TAG chr11 5217239 5217258 5217255 +
tcccagcaccatttattaaa

SEQ ID NO: 7644 - DNA, 20 bp, Artificial Sequence
  Synthetic oligonucleotide; AGG chr11 5217240 5217259 5217256 +
cccagcaccatttattaaat

SEQ ID NO: 7645 - DNA, 20 bp, Artificial Sequence
  Synthetic oligonucleotide; GGG chr11 5217241 5217260 5217257 +
ccagcaccatttattaaata

SEQ ID NO: 7646 - DNA, 20 bp, Artificial Sequence
  Synthetic oligonucleotide; CAG chr11 5217271 5217290 5217287 +
tccccattgcttgtttctct

SEQ ID NO: 7647 - DNA, 20 bp, Artificial Sequence
  Synthetic oligonucleotide; AGG chr11 5217272 5217291 5217288 +
ccccattgcttgtttctctc

SEQ ID NO: 7648 - DNA, 20 bp, Artificial Sequence
  Synthetic oligonucleotide; AAG chr11 5217282 5217301 5217298 +
tgtttctctcaggtttgtca

SEQ ID NO: 7649 - DNA, 20 bp, Artificial Sequence
  Synthetic oligonucleotide; CAG chr11 5217287 5217306 5217303 +
ctctcaggtttgtcaaagat

SEQ ID NO: 7650 - DNA, 20 bp, Artificial Sequence
  Synthetic oligonucleotide; TAG chr11 5217291 5217310 5217307 +
caggtttgtcaaagatcaga

SEQ ID NO: 7651 - DNA, 20 bp, Artificial Sequence
  Synthetic oligonucleotide; TAG chr11 5217297 5217316 5217313 +
tgtcaaagatcagatagttg

SEQ ID NO: 7652 - DNA, 20 bp, Artificial Sequence
  Synthetic oligonucleotide; CGG chr11 5217305 5217324 5217321 +
atcagatagttgtagatatg

SEQ ID NO: 7653 - DNA, 20 bp, Artificial Sequence
  Synthetic oligonucleotide; GAG chr11 5217318 5217337 5217334 +
agatatgcggcattatttct

SEQ ID NO: 7654 - DNA, 20 bp, Artificial Sequence
  Synthetic oligonucleotide; AGG chr11 5217319 5217338 5217335 +
gatatgcggcattatttctg

SEQ ID NO: 7655 - DNA, 20 bp, Artificial Sequence
  Synthetic oligonucleotide; GGG chr11 5217320 5217339 5217336 +
atatgcggcattatttctga

SEQ ID NO: 7656 - DNA, 20 bp, Artificial Sequence
  Synthetic oligonucleotide; TGG chr11 5217339 5217358 5217355 +
agggctctgttctgttccat

SEQ ID NO: 7657 - DNA, 20 bp, Artificial Sequence
  Synthetic oligonucleotide; TAG chr11 5217344 5217363 5217360 +
tctgttctgttccattggtc

SEQ ID NO: 7658 - DNA, 20 bp, Artificial Sequence
  Synthetic oligonucleotide; TGG chr11 5217357 5217376 5217373 +
attggtctagatctctgttt

SEQ ID NO: 7659 - DNA, 20 bp, Artificial Sequence
  Synthetic oligonucleotide; CAG chr11 5217363 5217382 5217379 +
ctagatctctgttttggtac

SEQ ID NO: 7660 - DNA, 20 bp, Artificial Sequence
  Synthetic oligonucleotide; TGG chr11 5217379 5217398 5217395 +
gtaccagtaccatgctgttt

SEQ ID NO: 7661 - DNA, 20 bp, Artificial Sequence
  Synthetic oligonucleotide; TAG chr11 5217388 5217407 5217404 +
ccatgctgttttggttaccg

SEQ ID NO: 7662 - DNA, 20 bp, Artificial Sequence
  Synthetic oligonucleotide; TAG chr11 5217396 5217415 5217412 +
ttttggttaccgtagcattg

SEQ ID NO: 7663 - DNA, 20 bp, Artificial Sequence
  Synthetic oligonucleotide; TAG chr11 5217401 5217420 5217417 +
gttaccgtagcattgtagta

SEQ ID NO: 7664 - DNA, 20 bp, Artificial Sequence
  Synthetic oligonucleotide; AAG chr11 5217408 5217427 5217424 +
tagcattgtagtatagtttg

SEQ ID NO: 7665 - DNA, 20 bp, Artificial Sequence
  Synthetic oligonucleotide; CAG chr11 5217412 5217431 5217428 +
attgtagtatagtttgaagt

SEQ ID NO: 7666 - DNA, 20 bp, Artificial Sequence
  Synthetic oligonucleotide; AGG chr11 5217413 5217432 5217429 +
ttgtagtatagtttgaagtc

SEQ ID NO: 7667 - DNA, 20 bp, Artificial Sequence
  Synthetic oligonucleotide; TAG chr11 5217416 5217435 5217432 +
tagtatagtttgaagtcagg

SEQ ID NO: 7668 - DNA, 20 bp, Artificial Sequence
  Synthetic oligonucleotide; CAG chr11 5217430 5217449 5217446 +
gtcaggtagcgtgatgcctc

SEQ ID NO: 7669 - DNA, 20 bp, Artificial Sequence
  Synthetic oligonucleotide; TGG chr11 5217444 5217463 5217460 +
tgcctccagctttgttcttt

SEQ ID NO: 7670 - DNA, 20 bp, Artificial Sequence
  Synthetic oligonucleotide; TAG chr11 5217449 5217468 5217465 +
ccagctttgttcttttggct

SEQ ID NO: 7671 - DNA, 20 bp, Artificial Sequence
  Synthetic oligonucleotide; AGG chr11 5217450 5217469 5217466 +
cagctttgttcttttggctt

SEQ ID NO: 7672 - DNA, 20 bp, Artificial Sequence
  Synthetic oligonucleotide; TGG chr11 5217460 5217479 5217476 +
cttttggcttaggattgcct

SEQ ID NO: 7673 - DNA, 20 bp, Artificial Sequence
  Synthetic oligonucleotide; TGG chr11 5217468 5217487 5217484 +
ttaggattgccttggtgatg

SEQ ID NO: 7674 - DNA, 20 bp, Artificial Sequence
  Synthetic oligonucleotide; GGG chr11 5217469 5217488 5217485 +
taggattgccttggtgatgt

SEQ ID NO: 7675 - DNA, 20 bp, Artificial Sequence
  Synthetic oligonucleotide; TGG chr11 5217480 5217499 5217496 +
tggtgatgtgggctcttttt

SEQ ID NO: 7676 - DNA, 20 bp, Artificial Sequence
  Synthetic oligonucleotide; AAG chr11 5217499 5217518 5217515 +
ttggttccatatgaacttta

SEQ ID NO: 7677 - DNA, 20 bp, Artificial Sequence
  Synthetic oligonucleotide; TAG chr11 5217502 5217521 5217518 +
gttccatatgaactttaaag

SEQ ID NO: 7678 - DNA, 20 bp, Artificial Sequence
  Synthetic oligonucleotide; CAG chr11 5217512 5217531 5217528 +
aactttaaagtagttttttc

SEQ ID NO: 7679 - DNA, 20 bp, Artificial Sequence
  Synthetic oligonucleotide; AAG chr11 5217522 5217541 5217538 +
tagttttttccagttctgtg

SEQ ID NO: 7680 - DNA, 20 bp, Artificial Sequence
  Synthetic oligonucleotide; AAG chr11 5217526 5217545 5217542 +
tttttccagttctgtgaaga

SEQ ID NO: 7681 - DNA, 20 bp, Artificial Sequence
  Synthetic oligonucleotide; TGG chr11 5217533 5217552 5217549 +
agttctgtgaagaaagtcat

SEQ ID NO: 7682 - DNA, 20 bp, Artificial Sequence
  Synthetic oligonucleotide; TAG chr11 5217536 5217555 5217552 +
tctgtgaagaaagtcattgg

SEQ ID NO: 7683 - DNA, 20 bp, Artificial Sequence
  Synthetic oligonucleotide; TGG chr11 5217544 5217563 5217560 +
gaaagtcattggtagcttga

SEQ ID NO: 7684 - DNA, 20 bp, Artificial Sequence
  Synthetic oligonucleotide; GGG chr11 5217545 5217564 5217561 +
aaagtcattggtagcttgat

SEQ ID NO: 7685 - DNA, 20 bp, Artificial Sequence
  Synthetic oligonucleotide; GGG chr11 5217546 5217565 5217562 +
aagtcattggtagcttgatg

SEQ ID NO: 7686 - DNA, 20 bp, Artificial Sequence
  Synthetic oligonucleotide; TGG chr11 5217550 5217569 5217566 +
cattggtagcttgatgggga

SEQ ID NO: 7687 - DNA, 20 bp, Artificial Sequence
  Synthetic oligonucleotide; TGG chr11 5217574 5217593 5217590 +
attgaatctataaattacct

SEQ ID NO: 7688 - DNA, 20 bp, Artificial Sequence
  Synthetic oligonucleotide; GGG chr11 5217575 5217594 5217591 +
ttgaatctataaattacctt

SEQ ID NO: 7689 - DNA, 20 bp, Artificial Sequence
  Synthetic oligonucleotide; CAG chr11 5217578 5217597 5217594 +
aatctataaattaccttggg

SEQ ID NO: 7690 - DNA, 20 bp, Artificial Sequence
  Synthetic oligonucleotide; GAG chr11 5217618 5217637 5217634 +
tattgattcttcctacccat

SEQ ID NO: 7691 - DNA, 20 bp, Artificial Sequence
  Synthetic oligonucleotide; TGG chr11 5217623 5217642 5217639 +
attcttcctacccatgagca

SEQ ID NO: 7692 - DNA, 20 bp, Artificial Sequence
  Synthetic oligonucleotide; GAG chr11 5217665 5217684 5217681 +
gtatcctcttttatttcatt

SEQ ID NO: 7693 - DNA, 20 bp, Artificial Sequence
  Synthetic oligonucleotide; CAG chr11 5217668 5217687 5217684 +
tcctcttttatttcattgag

SEQ ID NO: 7694 - DNA, 20 bp, Artificial Sequence
  Synthetic oligonucleotide; TGG chr11 5217671 5217690 5217687 +
tcttttatttcattgagcag

SEQ ID NO: 7695 - DNA, 20 bp, Artificial Sequence
  Synthetic oligonucleotide; TAG chr11 5217678 5217697 5217694 +
tttcattgagcagtggtttg

SEQ ID NO: 7696 - DNA, 20 bp, Artificial Sequence
  Synthetic oligonucleotide; AAG chr11 5217690 5217709 5217706 +
gtggtttgtagttctccttg

SEQ ID NO: 7697 - DNA, 20 bp, Artificial Sequence
  Synthetic oligonucleotide; GAG chr11 5217692 5217711 5217708 +
ggtttgtagttctccttgaa

SEQ ID NO: 7698 - DNA, 20 bp, Artificial Sequence
  Synthetic oligonucleotide; AGG chr11 5217693 5217712 5217709 +
gtttgtagttctccttgaag

SEQ ID NO: 7699 - DNA, 20 bp, Artificial Sequence
  Synthetic oligonucleotide; AAG chr11 5217713 5217732 5217729 +
aggtccttcacatcccttgt

SEQ ID NO: 7700 - DNA, 20 bp, Artificial Sequence
  Synthetic oligonucleotide; TGG chr11 5217717 5217736 5217733 +
ccttcacatcccttgtaagt

SEQ ID NO: 7701 - DNA, 20 bp, Artificial Sequence
  Synthetic oligonucleotide; TAG chr11 5217725 5217744 5217741 +
tcccttgtaagttggattcc

SEQ ID NO: 7702 - DNA, 20 bp, Artificial Sequence
  Synthetic oligonucleotide; AGG chr11 5217726 5217745 5217742 +
cccttgtaagttggattcct

SEQ ID NO: 7703 - DNA, 20 bp, Artificial Sequence
  Synthetic oligonucleotide; AAG chr11 5217745 5217764 5217761 +
taggtattttattctctttg

SEQ ID NO: 7704 - DNA, 20 bp, Artificial Sequence
  Synthetic oligonucleotide; TGG chr11 5217758 5217777 5217774 +
ctctttgaagcaattgtgaa

SEQ ID NO: 7705 - DNA, 20 bp, Artificial Sequence
  Synthetic oligonucleotide; GGG chr11 5217759 5217778 5217775 +
tctttgaagcaattgtgaat

SEQ ID NO: 7706 - DNA, 20 bp, Artificial Sequence
  Synthetic oligonucleotide; GAG chr11 5217761 5217780 5217777 +
tttgaagcaattgtgaatgg

SEQ ID NO: 7707 - DNA, 20 bp, Artificial Sequence
  Synthetic oligonucleotide; TGG chr11 5217777 5217796 5217793 +
atgggagttcactcatgatt

SEQ ID NO: 7708 - DNA, 20 bp, Artificial Sequence
  Synthetic oligonucleotide; TGG chr11 5217799 5217818 5217815 +
gctctctgtttgtctgttat

SEQ ID NO: 7709 - DNA, 20 bp, Artificial Sequence
  Synthetic oligonucleotide; TAG chr11 5217806 5217825 5217822 +
gtttgtctgttattggtgca

SEQ ID NO: 7710 - DNA, 20 bp, Artificial Sequence
  Synthetic oligonucleotide; AGG chr11 5217807 5217826 5217823 +
tttgtctgttattggtgcat

SEQ ID NO: 7711 - DNA, 20 bp, Artificial Sequence
  Synthetic oligonucleotide; GAG chr11 5217846 5217865 5217862 +
gcacactgattttatatcct

SEQ ID NO: 7712 - DNA, 20 bp, Artificial Sequence
  Synthetic oligonucleotide; AAG chr11 5217858 5217877 5217874 +
tatatcctgagactttgctg

SEQ ID NO: 7713 - DNA, 20 bp, Artificial Sequence
  Synthetic oligonucleotide; CAG chr11 5217869 5217888 5217885 +
actttgctgaagttgcttat

SEQ ID NO: 7714 - DNA, 20 bp, Artificial Sequence
  Synthetic oligonucleotide; AAG chr11 5217875 5217894 5217891 +
ctgaagttgcttatcagctt

SEQ ID NO: 7715 - DNA, 20 bp, Artificial Sequence
  Synthetic oligonucleotide; AGG chr11 5217876 5217895 5217892 +
tgaagttgcttatcagctta

SEQ ID NO: 7716 - DNA, 20 bp, Artificial Sequence
  Synthetic oligonucleotide; GAG chr11 5217878 5217897 5217894 +
aagttgcttatcagcttaag

SEQ ID NO: 7717 - DNA, 20 bp, Artificial Sequence
  Synthetic oligonucleotide; TGG chr11 5217885 5217904 5217901 +
ttatcagcttaaggagattt

SEQ ID NO: 7718 - DNA, 20 bp, Artificial Sequence
  Synthetic oligonucleotide; GGG chr11 5217886 5217905 5217902 +
tatcagcttaaggagatttt

SEQ ID NO: 7719 - DNA, 20 bp, Artificial Sequence
  Synthetic oligonucleotide; GAG chr11 5217891 5217910 5217907 +
gcttaaggagattttgggct

SEQ ID NO: 7720 - DNA, 20 bp, Artificial Sequence
  Synthetic oligonucleotide; TGG chr11 5217898 5217917 5217914 +
gagattttgggctgagacaa

SEQ ID NO: 7721 - DNA, 20 bp, Artificial Sequence
  Synthetic oligonucleotide; GGG chr11 5217899 5217918 5217915 +
agattttgggctgagacaat

SEQ ID NO: 7722 - DNA, 20 bp, Artificial Sequence
  Synthetic oligonucleotide; GGG chr11 5217900 5217919 5217916 +
gattttgggctgagacaatg

SEQ ID NO: 7723 - DNA, 20 bp, Artificial Sequence
  Synthetic oligonucleotide; TAG chr11 5217908 5217927 5217924 +
gctgagacaatggggttttc

SEQ ID NO: 7724 - DNA, 20 bp, Artificial Sequence
  Synthetic oligonucleotide; CAG chr11 5217935 5217954 5217951 +
acaatcatgtcatctgcaaa

SEQ ID NO: 7725 - DNA, 20 bp, Artificial Sequence
  Synthetic oligonucleotide; AGG chr11 5217936 5217955 5217952 +
caatcatgtcatctgcaaac

SEQ ID NO: 7726 - DNA, 20 bp, Artificial Sequence
  Synthetic oligonucleotide; GGG chr11 5217937 5217956 5217953 +
aatcatgtcatctgcaaaca

SEQ ID NO: 7727 - DNA, 20 bp, Artificial Sequence
  Synthetic oligonucleotide; TGG chr11 5218003 5218022 5218019 +
cttctcctgcctgattgccc

SEQ ID NO: 7728 - DNA, 20 bp, Artificial Sequence
  Synthetic oligonucleotide; CAG chr11 5218007 5218026 5218023 +
tcctgcctgattgccctggc

SEQ ID NO: 7729 - DNA, 20 bp, Artificial Sequence
  Synthetic oligonucleotide; TAG chr11 5218031 5218050 5218047 +
acttacaacactatgttgaa

SEQ ID NO: 7730 - DNA, 20 bp, Artificial Sequence
  Synthetic oligonucleotide; AGG chr11 5218032 5218051 5218048 +
cttacaacactatgttgaat

SEQ ID NO: 7731 - DNA, 20 bp, Artificial Sequence
  Synthetic oligonucleotide; GAG chr11 5218034 5218053 5218050 +
tacaacactatgttgaatag

SEQ ID NO: 7732 - DNA, 20 bp, Artificial Sequence
  Synthetic oligonucleotide; TGG chr11 5218037 5218056 5218053 +
aacactatgttgaataggag

SEQ ID NO: 7733 - DNA, 20 bp, Artificial Sequence
  Synthetic oligonucleotide; GAG chr11 5218041 5218060 5218057 +
ctatgttgaataggagtggt

SEQ ID NO: 7734 - DNA, 20 bp, Artificial Sequence
  Synthetic oligonucleotide; GAG chr11 5218043 5218062 5218059 +
atgttgaataggagtggtga

SEQ ID NO: 7735 - DNA, 20 bp, Artificial Sequence
  Synthetic oligonucleotide; GAG chr11 5218045 5218064 5218061 +
gttgaataggagtggtgaga

SEQ ID NO: 7736 - DNA, 20 bp, Artificial Sequence
  Synthetic oligonucleotide; AGG chr11 5218046 5218065 5218062 +
ttgaataggagtggtgagag

SEQ ID NO: 7737 - DNA, 20 bp, Artificial Sequence
  Synthetic oligonucleotide; GGG chr11 5218047 5218066 5218063 +
tgaataggagtggtgagaga

SEQ ID NO: 7738 - DNA, 20 bp, Artificial Sequence
  Synthetic oligonucleotide; CAG chr11 5218066 5218085 5218082 +
agggcatccctgccttgtgc

SEQ ID NO: 7739 - DNA, 20 bp, Artificial Sequence
  Synthetic oligonucleotide; AAG chr11 5218075 5218094 5218091 +
ctgccttgtgccagttttca

SEQ ID NO: 7740 - DNA, 20 bp, Artificial Sequence
  Synthetic oligonucleotide; AGG chr11 5218076 5218095 5218092 +
tgccttgtgccagttttcaa

SEQ ID NO: 7741 - DNA, 20 bp, Artificial Sequence
  Synthetic oligonucleotide; GGG chr11 5218077 5218096 5218093 +
gccttgtgccagttttcaaa

SEQ ID NO: 7742 - DNA, 20 bp, Artificial Sequence
  Synthetic oligonucleotide; CAG chr11 5218088 5218107 5218104 +
gttttcaaagggaatgcttc

SEQ ID NO: 7743 - DNA, 20 bp, Artificial Sequence
  Synthetic oligonucleotide; CAG chr11 5218103 5218122 5218119 +
gcttccagtttttgtccact

SEQ ID NO: 7744 - DNA, 20 bp, Artificial Sequence
  Synthetic oligonucleotide; TGG chr11 5218114 5218133 5218130 +
ttgtccactcagtatgatat

SEQ ID NO: 7745 - DNA, 20 bp, Artificial Sequence
  Synthetic oligonucleotide; TGG chr11 5218120 5218139 5218136 +
actcagtatgatattggctg

SEQ ID NO: 7746 - DNA, 20 bp, Artificial Sequence
  Synthetic oligonucleotide; GGG chr11 5218121 5218140 5218137 +
ctcagtatgatattggctgt

SEQ ID NO: 7747 - DNA, 20 bp, Artificial Sequence
  Synthetic oligonucleotide; TAG chr11 5218131 5218150 5218147 +
tattggctgtgggtttgtca

SEQ ID NO: 7748 - DNA, 20 bp, Artificial Sequence
  Synthetic oligonucleotide; TAG chr11 5218135 5218154 5218151 +
ggctgtgggtttgtcataga

SEQ ID NO: 7749 - DNA, 20 bp, Artificial Sequence
  Synthetic oligonucleotide; GAG chr11 5218151 5218170 5218167 +
tagatagctcttattatttt

SEQ ID NO: 7750 - DNA, 20 bp, Artificial Sequence
  Synthetic oligonucleotide; GAG chr11 5218181 5218200 5218197 +
ccatcaatacctaatttatt

SEQ ID NO: 7751 - DNA, 20 bp, Artificial Sequence
  Synthetic oligonucleotide; GAG chr11 5218183 5218202 5218199 +
atcaatacctaatttattga

SEQ ID NO: 7752 - DNA, 20 bp, Artificial Sequence
  Synthetic oligonucleotide; TAG chr11 5218190 5218209 5218206 +
cctaatttattgagagtttt

SEQ ID NO: 7753 - DNA, 20 bp, Artificial Sequence
  Synthetic oligonucleotide; AAG chr11 5218197 5218216 5218213 +
tattgagagtttttagcatg

SEQ ID NO: 7754 - DNA, 20 bp, Artificial Sequence
  Synthetic oligonucleotide; AAG chr11 5218218 5218237 5218234 +
agcgttgttgaattttgtca

SEQ ID NO: 7755 - DNA, 20 bp, Artificial Sequence
  Synthetic oligonucleotide; AGG chr11 5218219 5218238 5218235 +
gcgttgttgaattttgtcaa

SEQ ID NO: 7756 - DNA, 20 bp, Artificial Sequence
  Synthetic oligonucleotide; GAG chr11 5218239 5218258 5218255 +
aggccttttctgcatctatt

SEQ ID NO: 7757 - DNA, 20 bp, Artificial Sequence
  Synthetic oligonucleotide; TGG chr11 5218251 5218270 5218267 +
catctattgagataatcata

SEQ ID NO: 7758 - DNA, 20 bp, Artificial Sequence
  Synthetic oligonucleotide; TGG chr11 5218264 5218283 5218280 +
aatcatatggtttgtgtctt

SEQ ID NO: 7759 - DNA, 20 bp, Artificial Sequence
  Synthetic oligonucleotide; TGG chr11 5218281 5218300 5218297 +
ctttggttctgtttatatgc

SEQ ID NO: 7760 - DNA, 20 bp, Artificial Sequence
  Synthetic oligonucleotide; CAG chr11 5218314 5218333 5218330 +
ttgattttcgtatgttgaac

SEQ ID NO: 7761 - DNA, 20 bp, Artificial Sequence
  Synthetic oligonucleotide; TGG chr11 5218324 5218343 5218340 +
tatgttgaaccagccttgca

SEQ ID NO: 7762 - DNA, 20 bp, Artificial Sequence
  Synthetic oligonucleotide; CAG chr11 5218327 5218346 5218343 +
gttgaaccagccttgcatgg

SEQ ID NO: 7763 - DNA, 20 bp, Artificial Sequence
  Synthetic oligonucleotide; AGG chr11 5218328 5218347 5218344 +
ttgaaccagccttgcatggc

SEQ ID NO: 7764 - DNA, 20 bp, Artificial Sequence
  Synthetic oligonucleotide; GGG chr11 5218329 5218348 5218345 +
tgaaccagccttgcatggca

SEQ ID NO: 7765 - DNA, 20 bp, Artificial Sequence
  Synthetic oligonucleotide; AAG chr11 5218335 5218354 5218351 +
agccttgcatggcagggatg

SEQ ID NO: 7766 - DNA, 20 bp, Artificial Sequence
  Synthetic oligonucleotide; TGG chr11 5218350 5218369 5218366 +
ggatgaagcccacttgatca

SEQ ID NO: 7767 - DNA, 20 bp, Artificial Sequence
  Synthetic oligonucleotide; TGG chr11 5218353 5218372 5218369 +
tgaagcccacttgatcatgg

SEQ ID NO: 7768 - DNA, 20 bp, Artificial Sequence
  Synthetic oligonucleotide; CAG chr11 5218358 5218377 5218374 +
cccacttgatcatggtggat

SEQ ID NO: 7769 - DNA, 20 bp, Artificial Sequence
  Synthetic oligonucleotide; CAG chr11 5218366 5218385 5218382 +
atcatggtggatcagtttgc

SEQ ID NO: 7770 - DNA, 20 bp, Artificial Sequence
  Synthetic oligonucleotide; GAG chr11 5218378 5218397 5218394 +
cagtttgccagtattttatt

SEQ ID NO: 7771 - DNA, 20 bp, Artificial Sequence
  Synthetic oligonucleotide; AGG chr11 5218379 5218398 5218395 +
agtttgccagtattttattg

SEQ ID NO: 7772 - DNA, 20 bp, Artificial Sequence
  Synthetic oligonucleotide; AAG chr11 5218403 5218422 5218419 +
tttttgcatcaatgttcatc

SEQ ID NO: 7773 - DNA, 20 bp, Artificial Sequence
  Synthetic oligonucleotide; AGG chr11 5218404 5218423 5218420 +
ttttgcatcaatgttcatca

SEQ ID NO: 7774 - DNA, 20 bp, Artificial Sequence
  Synthetic oligonucleotide; TGG chr11 5218411 5218430 5218427 +
tcaatgttcatcaaggatat

SEQ ID NO: 7775 - DNA, 20 bp, Artificial Sequence
  Synthetic oligonucleotide; CAG chr11 5218446 5218465 5218462 +
tttttttgttgtgtctctgt

SEQ ID NO: 7776 - DNA, 20 bp, Artificial Sequence
  Synthetic oligonucleotide; AGG chr11 5218447 5218466 5218463 +
ttttttgttgtgtctctgtc

SEQ ID NO: 7777 - DNA, 20 bp, Artificial Sequence
  Synthetic oligonucleotide; TGG chr11 5218453 5218472 5218469 +
gttgtgtctctgtcaggctt

SEQ ID NO: 7778 - DNA, 20 bp, Artificial Sequence
  Synthetic oligonucleotide; CAG chr11 5218459 5218478 5218475 +
tctctgtcaggctttggtat

SEQ ID NO: 7779 - DNA, 20 bp, Artificial Sequence
  Synthetic oligonucleotide; AGG chr11 5218460 5218479 5218476 +
ctctgtcaggctttggtatc

SEQ ID NO: 7780 - DNA, 20 bp, Artificial Sequence
  Synthetic oligonucleotide; TGG chr11 5218470 5218489 5218486 +
ctttggtatcaggatgatgc

SEQ ID NO: 7781 - DNA, 20 bp, Artificial Sequence
  Synthetic oligonucleotide; GAG chr11 5218484 5218503 5218500 +
tgatgctggcctcataaaat

SEQ ID NO: 7782 - DNA, 20 bp, Artificial Sequence
  Synthetic oligonucleotide; TAG chr11 5218488 5218507 5218504 +
gctggcctcataaaatgagt

SEQ ID NO: 7783 - DNA, 20 bp, Artificial Sequence
  Synthetic oligonucleotide; AGG chr11 5218489 5218508 5218505 +
ctggcctcataaaatgagtt

SEQ ID NO: 7784 - DNA, 20 bp, Artificial Sequence
  Synthetic oligonucleotide; GGG chr11 5218490 5218509 5218506 +
tggcctcataaaatgagtta

SEQ ID NO: 7785 - DNA, 20 bp, Artificial Sequence
  Synthetic oligonucleotide; GAG chr11 5218492 5218511 5218508 +
gcctcataaaatgagttagg

SEQ ID NO: 7786 - DNA, 20 bp, Artificial Sequence
  Synthetic oligonucleotide; AGG chr11 5218493 5218512 5218509 +
cctcataaaatgagttaggg

SEQ ID NO: 7787 - DNA, 20 bp, Artificial Sequence
  Synthetic oligonucleotide; TGG chr11 5218517 5218536 5218533 +
ttccctctttttctattgat

SEQ ID NO: 7788 - DNA, 20 bp, Artificial Sequence
  Synthetic oligonucleotide; TAG chr11 5218522 5218541 5218538 +
tctttttctattgattggaa

SEQ ID NO: 7789 - DNA, 20 bp, Artificial Sequence
  Synthetic oligonucleotide; CAG chr11 5218528 5218547 5218544 +
tctattgattggaatagttt

SEQ ID NO: 7790 - DNA, 20 bp, Artificial Sequence
  Synthetic oligonucleotide; AAG chr11 5218531 5218550 5218547 +
attgattggaatagtttcag

SEQ ID NO: 7791 - DNA, 20 bp, Artificial Sequence
  Synthetic oligonucleotide; AGG chr11 5218532 5218551 5218548 +
ttgattggaatagtttcaga

SEQ ID NO: 7792 - DNA, 20 bp, Artificial Sequence
  Synthetic oligonucleotide; TGG chr11 5218537 5218556 5218553 +
tggaatagtttcagaaggaa

SEQ ID NO: 7793 - DNA, 20 bp, Artificial Sequence
  Synthetic oligonucleotide; CAG chr11 5218543 5218562 5218559 +
agtttcagaaggaatggtac

SEQ ID NO: 7794 - DNA, 20 bp, Artificial Sequence
  Synthetic oligonucleotide; TGG chr11 5218562 5218581 5218578 +
ccagctcctccttgtacctc

SEQ ID NO: 7795 - DNA, 20 bp, Artificial Sequence
  Synthetic oligonucleotide; TAG chr11 5218565 5218584 5218581 +
gctcctccttgtacctctgg

SEQ ID NO: 7796 - DNA, 20 bp, Artificial Sequence
  Synthetic oligonucleotide; CGG chr11 5218572 5218591 5218588 +
cttgtacctctggtagaatt

SEQ ID NO: 7797 - DNA, 20 bp, Artificial Sequence
  Synthetic oligonucleotide; TGG chr11 5218588 5218607 5218604 +
aattcggctatgaatcctac

SEQ ID NO: 7798 - DNA, 20 bp, Artificial Sequence
  Synthetic oligonucleotide; CGG chr11 5218594 5218613 5218610 +
gctatgaatcctactggtcc

SEQ ID NO: 7799 - DNA, 20 bp, Artificial Sequence
  Synthetic oligonucleotide; TGG chr11 5218605 5218624 5218621 +
tactggtcccggactttttt

SEQ ID NO: 7800 - DNA, 20 bp, Artificial Sequence
  Synthetic oligonucleotide; AAG chr11 5218613 5218632 5218629 +
ccggactttttttggttgat

SEQ ID NO: 7801 - DNA, 20 bp, Artificial Sequence
  Synthetic oligonucleotide; CAG chr11 5218638 5218657 5218654 +
attaattattgcctcaattt

SEQ ID NO: 7802 - DNA, 20 bp, Artificial Sequence
  Synthetic oligonucleotide; GAG chr11 5218640 5218659 5218656 +
taattattgcctcaatttca

SEQ ID NO: 7803 - DNA, 20 bp, Artificial Sequence
  Synthetic oligonucleotide; TGG chr11 5218651 5218670 5218667 +
tcaatttcagagcctgttat

SEQ ID NO: 7804 - DNA, 20 bp, Artificial Sequence
  Synthetic oligonucleotide; CAG chr11 5218660 5218679 5218676 +
gagcctgttattggtctatt

SEQ ID NO: 7805 - DNA, 20 bp, Artificial Sequence
  Synthetic oligonucleotide; GAG chr11 5218662 5218681 5218678 +
gcctgttattggtctattca

SEQ ID NO: 7806 - DNA, 20 bp, Artificial Sequence
  Synthetic oligonucleotide; TGG chr11 5218679 5218698 5218695 +
tcagagatacaacttcttcc

SEQ ID NO: 7807 - DNA, 20 bp, Artificial Sequence
  Synthetic oligonucleotide; TAG chr11 5218684 5218703 5218700 +
gatacaacttcttcctggtt

SEQ ID NO: 7808 - DNA, 20 bp, Artificial Sequence
  Synthetic oligonucleotide; TGG chr11 5218690 5218709 5218706 +
acttcttcctggtttagtct

SEQ ID NO: 7809 - DNA, 20 bp, Artificial Sequence
  Synthetic oligonucleotide; CAG chr11 5218693 5218712 5218709 +
tcttcctggtttagtcttgg

SEQ ID NO: 7810 - DNA, 20 bp, Artificial Sequence
  Synthetic oligonucleotide; GAG chr11 5218695 5218714 5218711 +
ttcctggtttagtcttggca

SEQ ID NO: 7811 - DNA, 20 bp, Artificial Sequence
  Synthetic oligonucleotide; GAG chr11 5218708 5218727 5218724 +
cttggcagagtgtatgtgtc

SEQ ID NO: 7812 - DNA, 20 bp, Artificial Sequence
  Synthetic oligonucleotide; AGG chr11 5218709 5218728 5218725 +
ttggcagagtgtatgtgtcg

SEQ ID NO: 7813 - DNA, 20 bp, Artificial Sequence
  Synthetic oligonucleotide; TAG chr11 5218729 5218748 5218745 +
aggaatttatccatttcttc

SEQ ID NO: 7814 - DNA, 20 bp, Artificial Sequence
  Synthetic oligonucleotide; TAG chr11 5218738 5218757 5218754 +
tccatttcttctagattttc

SEQ ID NO: 7815 - DNA, 20 bp, Artificial Sequence
  Synthetic oligonucleotide; TAG chr11 5218751 5218770 5218767 +
gattttctagtttatttgcg

SEQ ID NO: 7816 - DNA, 20 bp, Artificial Sequence
  Synthetic oligonucleotide; GAG chr11 5218753 5218772 5218769 +
ttttctagtttatttgcgta

SEQ ID NO: 7817 - DNA, 20 bp, Artificial Sequence
  Synthetic oligonucleotide; AGG chr11 5218754 5218773 5218770 +
tttctagtttatttgcgtag

SEQ ID NO: 7818 - DNA, 20 bp, Artificial Sequence
  Synthetic oligonucleotide; TAG chr11 5218763 5218782 5218779 +
tatttgcgtagaggtgttta

SEQ ID NO: 7819 - DNA, 20 bp, Artificial Sequence
  Synthetic oligonucleotide; CGG chr11 5218776 5218795 5218792 +
gtgtttatagtattctctga

SEQ ID NO: 7820 - DNA, 20 bp, Artificial Sequence
  Synthetic oligonucleotide; TAG chr11 5218779 5218798 5218795 +
tttatagtattctctgacgg

SEQ ID NO: 7821 - DNA, 20 bp, Artificial Sequence
  Synthetic oligonucleotide; TGG chr11 5218794 5218813 5218810 +
gacggtagtttgtatttctg

SEQ ID NO: 7822 - DNA, 20 bp, Artificial Sequence
  Synthetic oligonucleotide; GGG chr11 5218795 5218814 5218811 +
acggtagtttgtatttctgt

SEQ ID NO: 7823 - DNA, 20 bp, Artificial Sequence
  Synthetic oligonucleotide; CAG chr11 5218800 5218819 5218816 +
agtttgtatttctgtgggat

SEQ ID NO: 7824 - DNA, 20 bp, Artificial Sequence
  Synthetic oligonucleotide; TGG chr11 5218803 5218822 5218819 +
ttgtatttctgtgggatcag

SEQ ID NO: 7825 - DNA, 20 bp, Artificial Sequence
  Synthetic oligonucleotide; TAG chr11 5218865 5218884 5218881 +
ttctctcttttcttctttat

SEQ ID NO: 7826 - DNA, 20 bp, Artificial Sequence
  Synthetic oligonucleotide; TAG chr11 5218874 5218893 5218890 +
ttcttctttattagtcttgc

SEQ ID NO: 7827 - DNA, 20 bp, Artificial Sequence
  Synthetic oligonucleotide; CAG chr11 5218877 5218896 5218893 +
ttctttattagtcttgctag

SEQ ID NO: 7828 - DNA, 20 bp, Artificial Sequence
  Synthetic oligonucleotide; CAG chr11 5218911 5218930 5218927 +
tgttgatcttttcaaaaaaa

SEQ ID NO: 7829 - DNA, 20 bp, Artificial Sequence
  Synthetic oligonucleotide; TGG chr11 5218918 5218937 5218934 +
cttttcaaaaaaacagcttc

SEQ ID NO: 7830 - DNA, 20 bp, Artificial Sequence
  Synthetic oligonucleotide; AAG chr11 5218938 5218957 5218954 +
tggattcattgatttttttg

SEQ ID NO: 7831 - DNA, 20 bp, Artificial Sequence
  Synthetic oligonucleotide; AGG chr11 5218939 5218958 5218955 +
ggattcattgatttttttga

SEQ ID NO: 7832 - DNA, 20 bp, Artificial Sequence
  Synthetic oligonucleotide; GGG chr11 5218940 5218959 5218956 +
gattcattgatttttttgaa

SEQ ID NO: 7833 - DNA, 20 bp, Artificial Sequence
  Synthetic oligonucleotide; TAG chr11 5218983 5219002 5218999 +
cttcacttctgctctgatct

SEQ ID NO: 7834 - DNA, 20 bp, Artificial Sequence
  Synthetic oligonucleotide; TAG chr11 5219004 5219023 5219020 +
agttatttcttgtcttctgt

SEQ ID NO: 7835 - DNA, 20 bp, Artificial Sequence
  Synthetic oligonucleotide; TAG chr11 5219035 5219054 5219051 +
tgtgtttgctcctgcttctc

SEQ ID NO: 7836 - DNA, 20 bp, Artificial Sequence
  Synthetic oligonucleotide; TAG chr11 5219055 5219074 5219071 +
tagttttttaattgtgatgt

SEQ ID NO: 7837 - DNA, 20 bp, Artificial Sequence
  Synthetic oligonucleotide; AGG chr11 5219056 5219075 5219072 +
agttttttaattgtgatgtt

SEQ ID NO: 7838 - DNA, 20 bp, Artificial Sequence
  Synthetic oligonucleotide; GGG chr11 5219057 5219076 5219073 +
gttttttaattgtgatgtta

SEQ ID NO: 7839 - DNA, 20 bp, Artificial Sequence
  Synthetic oligonucleotide; TAG chr11 5219069 5219088 5219085 +
tgatgttagggtgtcaattt

SEQ ID NO: 7840 - DNA, 20 bp, Artificial Sequence
  Synthetic oligonucleotide; TGG chr11 5219092 5219111 5219108 +
atctttcctgctttcccttg

SEQ ID NO: 7841 - DNA, 20 bp, Artificial Sequence
  Synthetic oligonucleotide; GGG chr11 5219093 5219112 5219109 +
tctttcctgctttcccttgt

SEQ ID NO: 7842 - DNA, 20 bp, Artificial Sequence
  Synthetic oligonucleotide; TAG chr11 5219100 5219119 5219116 +
tgctttcccttgtgggcatt

SEQ ID NO: 7843 - DNA, 20 bp, Artificial Sequence
  Synthetic oligonucleotide; CAG chr11 5219143 5219162 5219159 +
acactgctttgaatgtgtct

SEQ ID NO: 7844 - DNA, 20 bp, Artificial Sequence
  Synthetic oligonucleotide; GAG chr11 5219145 5219164 5219161 +
actgctttgaatgtgtctca

SEQ ID NO: 7845 - DNA, 20 bp, Artificial Sequence
  Synthetic oligonucleotide; TGG chr11 5219152 5219171 5219168 +
tgaatgtgtctcagagattc

SEQ ID NO: 7846 - DNA, 20 bp, Artificial Sequence
  Synthetic oligonucleotide; TGG chr11 5219177 5219196 5219193 +
tgttgtgtctttgttctcgt

SEQ ID NO: 7847 - DNA, 20 bp, Artificial Sequence
  Synthetic oligonucleotide; AAG chr11 5219185 5219204 5219201 +
ctttgttctcgttggtttca

SEQ ID NO: 7848 - DNA, 20 bp, Artificial Sequence
  Synthetic oligonucleotide; CAG chr11 5219224 5219243 5219240 +
ccttcattttgttatgtacc

SEQ ID NO: 7849 - DNA, 20 bp, Artificial Sequence
  Synthetic oligonucleotide; TAG chr11 5219227 5219246 5219243 +
tcattttgttatgtacccag

SEQ ID NO: 7850 - DNA, 20 bp, Artificial Sequence
  Synthetic oligonucleotide; CAG chr11 5219235 5219254 5219251 +
ttatgtacccagtagtcatt

SEQ ID NO: 7851 - DNA, 20 bp, Artificial Sequence
  Synthetic oligonucleotide; AGG chr11 5219236 5219255 5219252 +
tatgtacccagtagtcattc

SEQ ID NO: 7852 - DNA, 20 bp, Artificial Sequence
  Synthetic oligonucleotide; GAG chr11 5219238 5219257 5219254 +
tgtacccagtagtcattcag

SEQ ID NO: 7853 - DNA, 20 bp, Artificial Sequence
  Synthetic oligonucleotide; CAG chr11 5219241 5219260 5219257 +
acccagtagtcattcaggag

SEQ ID NO: 7854 - DNA, 20 bp, Artificial Sequence
  Synthetic oligonucleotide; AGG chr11 5219242 5219261 5219258 +
cccagtagtcattcaggagc

SEQ ID NO: 7855 - DNA, 20 bp, Artificial Sequence
  Synthetic oligonucleotide; CAG chr11 5219250 5219269 5219266 +
tcattcaggagcaggctgtt

SEQ ID NO: 7856 - DNA, 20 bp, Artificial Sequence
  Synthetic oligonucleotide; TAG chr11 5219261 5219280 5219277 +
caggctgttcagtttccatg

SEQ ID NO: 7857 - DNA, 20 bp, Artificial Sequence
  Synthetic oligonucleotide; GAG chr11 5219266 5219285 5219282 +
tgttcagtttccatgtagct

SEQ ID NO: 7858 - DNA, 20 bp, Artificial Sequence
  Synthetic oligonucleotide; TGG chr11 5219269 5219288 5219285 +
tcagtttccatgtagctgag

SEQ ID NO: 7859 - DNA, 20 bp, Artificial Sequence
  Synthetic oligonucleotide; GAG chr11 5219276 5219295 5219292 +
ccatgtagctgagtggtttt

SEQ ID NO: 7860 - DNA, 20 bp, Artificial Sequence
  Synthetic oligonucleotide; GAG chr11 5219280 5219299 5219296 +
gtagctgagtggttttgagt

SEQ ID NO: 7861 - DNA, 20 bp, Artificial Sequence
  Synthetic oligonucleotide; GAG chr11 5219295 5219314 5219311 +
tgagtgagtttcttaatcct

SEQ ID NO: 7862 - DNA, 20 bp, Artificial Sequence
  Synthetic oligonucleotide; TAG chr11 5219301 5219320 5219317 +
agtttcttaatcctgagttc

SEQ ID NO: 7863 - DNA, 20 bp, Artificial Sequence
  Synthetic oligonucleotide; TGG chr11 5219317 5219336 5219333 +
gttctagtttgattgcactg

SEQ ID NO: 7864 - DNA, 20 bp, Artificial Sequence
  Synthetic oligonucleotide; GAG chr11 5219323 5219342 5219339 +
gtttgattgcactgtggtct

SEQ ID NO: 7865 - DNA, 20 bp, Artificial Sequence
  Synthetic oligonucleotide; GAG chr11 5219325 5219344 5219341 +
ttgattgcactgtggtctga

SEQ ID NO: 7866 - DNA, 20 bp, Artificial Sequence
  Synthetic oligonucleotide; CAG chr11 5219329 5219348 5219345 +
ttgcactgtggtctgagaga

SEQ ID NO: 7867 - DNA, 20 bp, Artificial Sequence
  Synthetic oligonucleotide; TAG chr11 5219339 5219358 5219355 +
gtctgagagacagtttgtta

SEQ ID NO: 7868 - DNA, 20 bp, Artificial Sequence
  Synthetic oligonucleotide; GAG chr11 5219364 5219383 5219380 +
tctgttcttttacatttgct

SEQ ID NO: 7869 - DNA, 20 bp, Artificial Sequence
  Synthetic oligonucleotide; AGG chr11 5219365 5219384 5219381 +
ctgttcttttacatttgctg

SEQ ID NO: 7870 - DNA, 20 bp, Artificial Sequence
  Synthetic oligonucleotide; GAG chr11 5219367 5219386 5219383 +
gttcttttacatttgctgag

SEQ ID NO: 7871 - DNA, 20 bp, Artificial Sequence
  Synthetic oligonucleotide; GAG chr11 5219369 5219388 5219385 +
tcttttacatttgctgagga

SEQ ID NO: 7872 - DNA, 20 bp, Artificial Sequence
  Synthetic oligonucleotide; TGG chr11 5219389 5219408 5219405 +
gagctttacttccaactatg

SEQ ID NO: 7873 - DNA, 20 bp, Artificial Sequence
  Synthetic oligonucleotide; CAG chr11 5219393 5219412 5219409 +
tttacttccaactatgtggt

SEQ ID NO: 7874 - DNA, 20 bp, Artificial Sequence
  Synthetic oligonucleotide; TGG chr11 5219399 5219418 5219415 +
tccaactatgtggtcagttt

SEQ ID NO: 7875 - DNA, 20 bp, Artificial Sequence
  Synthetic oligonucleotide; TAG chr11 5219404 5219423 5219420 +
ctatgtggtcagttttggaa

SEQ ID NO: 7876 - DNA, 20 bp, Artificial Sequence
  Synthetic oligonucleotide; AGG chr11 5219405 5219424 5219421 +
tatgtggtcagttttggaat

SEQ ID NO: 7877 - DNA, 20 bp, Artificial Sequence
  Synthetic oligonucleotide; TGG chr11 5219410 5219429 5219426 +
ggtcagttttggaataggtg

SEQ ID NO: 7878 - DNA, 20 bp, Artificial Sequence
  Synthetic oligonucleotide; TGG chr11 5219415 5219434 5219431 +
gttttggaataggtgtggtg

SEQ ID NO: 7879 - DNA, 20 bp, Artificial Sequence
  Synthetic oligonucleotide; AAG chr11 5219425 5219444 5219441 +
aggtgtggtgtggtgctgaa

SEQ ID NO: 7880 - DNA, 20 bp, Artificial Sequence
  Synthetic oligonucleotide; TGG chr11 5219447 5219466 5219463 +
gaatgtatattctgttgatt

SEQ ID NO: 7881 - DNA, 20 bp, Artificial Sequence
  Synthetic oligonucleotide; GGG chr11 5219448 5219467 5219464 +
aatgtatattctgttgattt

SEQ ID NO: 7882 - DNA, 20 bp, Artificial Sequence
  Synthetic oligonucleotide; GGG chr11 5219449 5219468 5219465 +
atgtatattctgttgatttg

SEQ ID NO: 7883 - DNA, 20 bp, Artificial Sequence
  Synthetic oligonucleotide; TGG chr11 5219452 5219471 5219468 +
tatattctgttgatttgggg

SEQ ID NO: 7884 - DNA, 20 bp, Artificial Sequence
  Synthetic oligonucleotide; GAG chr11 5219454 5219473 5219470 +
tattctgttgatttggggtg

SEQ ID NO: 7885 - DNA, 20 bp, Artificial Sequence
  Synthetic oligonucleotide; GAG chr11 5219456 5219475 5219472 +
ttctgttgatttggggtgga

SEQ ID NO: 7886 - DNA, 20 bp, Artificial Sequence
  Synthetic oligonucleotide; TAG chr11 5219464 5219483 5219480 +
atttggggtggagagttctg

SEQ ID NO: 7887 - DNA, 20 bp, Artificial Sequence
  Synthetic oligonucleotide; TAG chr11 5219475 5219494 5219491 +
agagttctgtagatgtctat

SEQ ID NO: 7888 - DNA, 20 bp, Artificial Sequence
  Synthetic oligonucleotide; AGG chr11 5219476 5219495 5219492 +
gagttctgtagatgtctatt

SEQ ID NO: 7889 - DNA, 20 bp, Artificial Sequence
  Synthetic oligonucleotide; TGG chr11 5219485 5219504 5219501 +
agatgtctattaggtctgct

SEQ ID NO: 7890 - DNA, 20 bp, Artificial Sequence
  Synthetic oligonucleotide; CAG chr11 5219490 5219509 5219506 +
tctattaggtctgcttggtg

SEQ ID NO: 7891 - DNA, 20 bp, Artificial Sequence
  Synthetic oligonucleotide; GAG chr11 5219492 5219511 5219508 +
tattaggtctgcttggtgca

SEQ ID NO: 7892 - DNA, 20 bp, Artificial Sequence
  Synthetic oligonucleotide; GAG chr11 5219497 5219516 5219513 +
ggtctgcttggtgcagagct

SEQ ID NO: 7893 - DNA, 20 bp, Artificial Sequence
  Synthetic oligonucleotide; TGG chr11 5219509 5219528 5219525 +
gcagagctgagtccaattcc

SEQ ID NO: 7894 - DNA, 20 bp, Artificial Sequence
  Synthetic oligonucleotide; CAG chr11 5219556 5219575 5219572 +
gttgatctgtctaatgttga

SEQ ID NO: 7895 - DNA, 20 bp, Artificial Sequence
  Synthetic oligonucleotide; TGG chr11 5219559 5219578 5219575 +
gatctgtctaatgttgacag

SEQ ID NO: 7896 - DNA, 20 bp, Artificial Sequence
  Synthetic oligonucleotide; GGG chr11 5219560 5219579 5219576 +
atctgtctaatgttgacagt

SEQ ID NO: 7897 - DNA, 20 bp, Artificial Sequence
  Synthetic oligonucleotide; GGG chr11 5219561 5219580 5219577 +
tctgtctaatgttgacagtg

SEQ ID NO: 7898 - DNA, 20 bp, Artificial Sequence
  Synthetic oligonucleotide; AAG chr11 5219569 5219588 5219585 +
atgttgacagtggggtgtta

SEQ ID NO: 7899 - DNA, 20 bp, Artificial Sequence
  Synthetic oligonucleotide; TGG chr11 5219590 5219609 5219606 +
agtctcccattattattgtg

SEQ ID NO: 7900 - DNA, 20 bp, Artificial Sequence
  Synthetic oligonucleotide; GGG chr11 5219591 5219610 5219607 +
gtctcccattattattgtgt

SEQ ID NO: 7901 - DNA, 20 bp, Artificial Sequence
  Synthetic oligonucleotide; AAG chr11 5219599 5219618 5219615 +
ttattattgtgtgggcatct

SEQ ID NO: 7902 - DNA, 20 bp, Artificial Sequence
  Synthetic oligonucleotide; TAG chr11 5219610 5219629 5219626 +
tgggcatctaagtctctttg

SEQ ID NO: 7903 - DNA, 20 bp, Artificial Sequence
  Synthetic oligonucleotide; AGG chr11 5219611 5219630 5219627 +
gggcatctaagtctctttgt

SEQ ID NO: 7904 - DNA, 20 bp, Artificial Sequence
  Synthetic oligonucleotide; CAG chr11 5219619 5219638 5219635 +
aagtctctttgtaggtcact

SEQ ID NO: 7905 - DNA, 20 bp, Artificial Sequence
  Synthetic oligonucleotide; AGG chr11 5219620 5219639 5219636 +
agtctctttgtaggtcactc

SEQ ID NO: 7906 - DNA, 20 bp, Artificial Sequence
  Synthetic oligonucleotide; TGG chr11 5219639 5219658 5219655 +
caggacttgttttatgaatc

SEQ ID NO: 7907 - DNA, 20 bp, Artificial Sequence
  Synthetic oligonucleotide; GGG chr11 5219640 5219659 5219656 +
aggacttgttttatgaatct

SEQ ID NO: 7908 - DNA, 20 bp, Artificial Sequence
  Synthetic oligonucleotide; TGG chr11 5219654 5219673 5219670 +
gaatctgggtgctcctgtat

SEQ ID NO: 7909 - DNA, 20 bp, Artificial Sequence
  Synthetic oligonucleotide; GGG chr11 5219655 5219674 5219671 +
aatctgggtgctcctgtatt

SEQ ID NO: 7910 - DNA, 20 bp, Artificial Sequence
  Synthetic oligonucleotide; TAG chr11 5219670 5219689 5219686 +
gtattgggtgcatatatatt

SEQ ID NO: 7911 - DNA, 20 bp, Artificial Sequence
  Synthetic oligonucleotide; TAG chr11 5219675 5219694 5219691 +
gggtgcatatatatttagta

SEQ ID NO: 7912 - DNA, 20 bp, Artificial Sequence
  Synthetic oligonucleotide; TAG chr11 5219679 5219698 5219695 +
gcatatatatttagtatagt

SEQ ID NO: 7913 - DNA, 20 bp, Artificial Sequence
  Synthetic oligonucleotide; TAG chr11 5219696 5219715 5219712 +
agttagttcttcttcttgaa

SEQ ID NO: 7914 - DNA, 20 bp, Artificial Sequence
  Synthetic oligonucleotide; TGG chr11 5219719 5219738 5219735 +
atccctttgccattatgtaa

SEQ ID NO: 7915 - DNA, 20 bp, Artificial Sequence
  Synthetic oligonucleotide; TGG chr11 5219748 5219767 5219764 +
ttgtctcttttgatctttgt

SEQ ID NO: 7916 - DNA, 20 bp, Artificial Sequence
  Synthetic oligonucleotide; CAG chr11 5219768 5219787 5219784 +
tggtttaaaatctgttttat

SEQ ID NO: 7917 - DNA, 20 bp, Artificial Sequence
  Synthetic oligonucleotide; GAG chr11 5219770 5219789 5219786 +
gtttaaaatctgttttatca

SEQ ID NO: 7918 - DNA, 20 bp, Artificial Sequence
  Synthetic oligonucleotide; TAG chr11 5219775 5219794 5219791 +
aaatctgttttatcagagac

SEQ ID NO: 7919 - DNA, 20 bp, Artificial Sequence
  Synthetic oligonucleotide; AGG chr11 5219776 5219795 5219792 +
aatctgttttatcagagact

SEQ ID NO: 7920 - DNA, 20 bp, Artificial Sequence
  Synthetic oligonucleotide; TGG chr11 5219815 5219834 5219831 +
ttttttgttttccatttgct

SEQ ID NO: 7921 - DNA, 20 bp, Artificial Sequence
  Synthetic oligonucleotide; TAG chr11 5219818 5219837 5219834 +
tttgttttccatttgcttgg

SEQ ID NO: 7922 - DNA, 20 bp, Artificial Sequence
  Synthetic oligonucleotide; GAG chr11 5219844 5219863 5219860 +
ttcctccatccttttatttc

SEQ ID NO: 7923 - DNA, 20 bp, Artificial Sequence
  Synthetic oligonucleotide; GAG chr11 5219868 5219887 5219884 +
ctatgtgtgtctctgcacgt

SEQ ID NO: 7924 - DNA, 20 bp, Artificial Sequence
  Synthetic oligonucleotide; TGG chr11 5219872 5219891 5219888 +
gtgtgtctctgcacgtgaga

SEQ ID NO: 7925 - DNA, 20 bp, Artificial Sequence
  Synthetic oligonucleotide; GGG chr11 5219873 5219892 5219889 +
tgtgtctctgcacgtgagat

SEQ ID NO: 7926 - DNA, 20 bp, Artificial Sequence
  Synthetic oligonucleotide; CAG chr11 5219887 5219906 5219903 +
tgagatgggtttcctgaata

SEQ ID NO: 7927 - DNA, 20 bp, Artificial Sequence
  Synthetic oligonucleotide; CAG chr11 5219894 5219913 5219910 +
ggtttcctgaatacagaaca

SEQ ID NO: 7928 - DNA, 20 bp, Artificial Sequence
  Synthetic oligonucleotide; TGG chr11 5219898 5219917 5219914 +
tcctgaatacagaacacaga

SEQ ID NO: 7929 - DNA, 20 bp, Artificial Sequence
  Synthetic oligonucleotide; GGG chr11 5219899 5219918 5219915 +
cctgaatacagaacacagat

SEQ ID NO: 7930 - DNA, 20 bp, Artificial Sequence
  Synthetic oligonucleotide; CAG chr11 5219925 5219944 5219941 +
tgactccttatccaatttgc

SEQ ID NO: 7931 - DNA, 20 bp, Artificial Sequence
  Synthetic oligonucleotide; TGG chr11 5219943 5219962 5219959 +
gccagtctgtgtcttttaat

SEQ ID NO: 7932 - DNA, 20 bp, Artificial Sequence
  Synthetic oligonucleotide; GAG chr11 5219945 5219964 5219961 +
cagtctgtgtcttttaattg

SEQ ID NO: 7933 - DNA, 20 bp, Artificial Sequence
  Synthetic oligonucleotide; TAG chr11 5219952 5219971 5219968 +
tgtcttttaattggagcatt

SEQ ID NO: 7934 - DNA, 20 bp, Artificial Sequence
  Synthetic oligonucleotide; AAG chr11 5219968 5219987 5219984 +
catttagcctatttacattt

SEQ ID NO: 7935 - DNA, 20 bp, Artificial Sequence
  Synthetic oligonucleotide; AGG chr11 5219969 5219988 5219985 +
atttagcctatttacattta

SEQ ID NO: 7936 - DNA, 20 bp, Artificial Sequence
  Synthetic oligonucleotide; GAG chr11 5219973 5219992 5219989 +
agcctatttacatttaaggt

SEQ ID NO: 7937 - DNA, 20 bp, Artificial Sequence
  Synthetic oligonucleotide; TAG chr11 5220014 5220033 5220030 +
tgatcctgtcattatgatgt

SEQ ID NO: 7938 - DNA, 20 bp, Artificial Sequence
  Synthetic oligonucleotide; TGG chr11 5220018 5220037 5220034 +
cctgtcattatgatgttagc

SEQ ID NO: 7939 - DNA, 20 bp, Artificial Sequence
  Synthetic oligonucleotide; CAG chr11 5220039 5220058 5220055 +
ggttattttgctcgttgatg

SEQ ID NO: 7940 - DNA, 20 bp, Artificial Sequence
  Synthetic oligonucleotide; TAG chr11 5220050 5220069 5220066 +
tcgttgatgcagtttcttcc

SEQ ID NO: 7941 - DNA, 20 bp, Artificial Sequence
  Synthetic oligonucleotide; TGG chr11 5220059 5220078 5220075 +
cagtttcttcctagccttga

SEQ ID NO: 7942 - DNA, 20 bp, Artificial Sequence
  Synthetic oligonucleotide; TGG chr11 5220073 5220092 5220089 +
ccttgatggtctttacaatt

SEQ ID NO: 7943 - DNA, 20 bp, Artificial Sequence
  Synthetic oligonucleotide; CAG chr11 5220086 5220105 5220102 +
tacaatttggcatgtttttg

SEQ ID NO: 7944 - DNA, 20 bp, Artificial Sequence
  Synthetic oligonucleotide; TGG chr11 5220089 5220108 5220105 +
aatttggcatgtttttgcag

SEQ ID NO: 7945 - DNA, 20 bp, Artificial Sequence
  Synthetic oligonucleotide; TAG chr11 5220099 5220118 5220115 +
gtttttgcagtggctgatac

SEQ ID NO: 7946 - DNA, 20 bp, Artificial Sequence
  Synthetic oligonucleotide; TAG chr11 5220119 5220138 5220135 +
tagttgttcctttccatgtt

SEQ ID NO: 7947 - DNA, 20 bp, Artificial Sequence
  Synthetic oligonucleotide; CAG chr11 5220131 5220150 5220147 +
tccatgtttagtgcttcctt

SEQ ID NO: 7948 - DNA, 20 bp, Artificial Sequence
  Synthetic oligonucleotide; AGG chr11 5220132 5220151 5220148 +
ccatgtttagtgcttccttc

SEQ ID NO: 7949 - DNA, 20 bp, Artificial Sequence
  Synthetic oligonucleotide; GAG chr11 5220134 5220153 5220150 +
atgtttagtgcttccttcag

SEQ ID NO: 7950 - DNA, 20 bp, Artificial Sequence
  Synthetic oligonucleotide; TAG chr11 5220143 5220162 5220159 +
gcttccttcaggagctcttg

SEQ ID NO: 7951 - DNA, 20 bp, Artificial Sequence
  Synthetic oligonucleotide; AGG chr11 5220144 5220163 5220160 +
cttccttcaggagctcttgt

SEQ ID NO: 7952 - DNA, 20 bp, Artificial Sequence
  Synthetic oligonucleotide; GGG chr11 5220145 5220164 5220161 +
ttccttcaggagctcttgta

SEQ ID NO: 7953 - DNA, 20 bp, Artificial Sequence
  Synthetic oligonucleotide; CAG chr11 5220148 5220167 5220164 +
cttcaggagctcttgtaggg

SEQ ID NO: 7954 - DNA, 20 bp, Artificial Sequence
  Synthetic oligonucleotide; AGG chr11 5220149 5220168 5220165 +
ttcaggagctcttgtagggc

SEQ ID NO: 7955 - DNA, 20 bp, Artificial Sequence
  Synthetic oligonucleotide; TGG chr11 5220154 5220173 5220170 +
gagctcttgtagggcaggcc

SEQ ID NO: 7956 - DNA, 20 bp, Artificial Sequence
  Synthetic oligonucleotide; TGG chr11 5220157 5220176 5220173 +
ctcttgtagggcaggcctgg

SEQ ID NO: 7957 - DNA, 20 bp, Artificial Sequence
  Synthetic oligonucleotide; CAG chr11 5220173 5220192 5220189 +
ctggtggtgacaaaatctct

SEQ ID NO: 7958 - DNA, 20 bp, Artificial Sequence
  Synthetic oligonucleotide; AAG chr11 5220192 5220211 5220208 +
tcagcatttgcttgtctgta

SEQ ID NO: 7959 - DNA, 20 bp, Artificial Sequence
  Synthetic oligonucleotide; AGG chr11 5220193 5220212 5220209 +
cagcatttgcttgtctgtaa

SEQ ID NO: 7960 - DNA, 20 bp, Artificial Sequence
  Synthetic oligonucleotide; AAG chr11 5220219 5220238 5220235 +
ttatttctccttcacttatg

SEQ ID NO: 7961 - DNA, 20 bp, Artificial Sequence
  Synthetic oligonucleotide; TAG chr11 5220224 5220243 5220240 +
tctccttcacttatgaagct

SEQ ID NO: 7962 - DNA, 20 bp, Artificial Sequence
  Synthetic oligonucleotide; TGG chr11 5220229 5220248 5220245 +
ttcacttatgaagcttagtt

SEQ ID NO: 7963 - DNA, 20 bp, Artificial Sequence
  Synthetic oligonucleotide; TGG chr11 5220233 5220252 5220249 +
cttatgaagcttagtttggc

SEQ ID NO: 7964 - DNA, 20 bp, Artificial Sequence
  Synthetic oligonucleotide; TGG chr11 5220247 5220266 5220263 +
tttggctggatatgaaattc

SEQ ID NO: 7965 - DNA, 20 bp, Artificial Sequence
  Synthetic oligonucleotide; GGG chr11 5220248 5220267 5220264 +
ttggctggatatgaaattct

SEQ ID NO: 7966 - DNA, 20 bp, Artificial Sequence
  Synthetic oligonucleotide; TGG chr11 5220284 5220303 5220300 +
tctttaacaatgttgaatat

SEQ ID NO: 7967 - DNA, 20 bp, Artificial Sequence
  Synthetic oligonucleotide; TGG chr11 5220301 5220320 5220317 +
tattggcccccactttcttc

SEQ ID NO: 7968 - DNA, 20 bp, Artificial Sequence
  Synthetic oligonucleotide; TAG chr11 5220308 5220327 5220324 +
ccccactttcttctggcttg

SEQ ID NO: 7969 - DNA, 20 bp, Artificial Sequence
  Synthetic oligonucleotide; GAG chr11 5220310 5220329 5220326 +
ccactttcttctggcttgta

SEQ ID NO: 7970 - DNA, 20 bp, Artificial Sequence
  Synthetic oligonucleotide; TAG chr11 5220323 5220342 5220339 +
gcttgtagagtttctgccga

SEQ ID NO: 7971 - DNA, 20 bp, Artificial Sequence
  Synthetic oligonucleotide; CAG chr11 5220328 5220347 5220344 +
tagagtttctgccgatagat

SEQ ID NO: 7972 - DNA, 20 bp, Artificial Sequence
  Synthetic oligonucleotide; TAG chr11 5220335 5220354 5220351 +
tctgccgatagatcagctgt

SEQ ID NO: 7973 - DNA, 20 bp, Artificial Sequence
  Synthetic oligonucleotide; TGG chr11 5220343 5220362 5220359 +
tagatcagctgttagtctga

SEQ ID NO: 7974 - DNA, 20 bp, Artificial Sequence
  Synthetic oligonucleotide; GGG chr11 5220344 5220363 5220360 +
agatcagctgttagtctgat

SEQ ID NO: 7975 - DNA, 20 bp, Artificial Sequence
  Synthetic oligonucleotide; TGG chr11 5220357 5220376 5220373 +
gtctgatgggcttccctttg

SEQ ID NO: 7976 - DNA, 20 bp, Artificial Sequence
  Synthetic oligonucleotide; GGG chr11 5220358 5220377 5220374 +
tctgatgggcttccctttgt

SEQ ID NO: 7977 - DNA, 20 bp, Artificial Sequence
  Synthetic oligonucleotide; TGG chr11 5220379 5220398 5220395 +
ggtaacccgacctttctctc

SEQ ID NO: 7978 - DNA, 20 bp, Artificial Sequence
  Synthetic oligonucleotide; TGG chr11 5220415 5220434 5220431 +
tttttccttcatttcaactt

SEQ ID NO: 7979 - DNA, 20 bp, Artificial Sequence
  Synthetic oligonucleotide; CAG chr11 5220427 5220446 5220443 +
ttcaactttggtgaatctga

SEQ ID NO: 7980 - DNA, 20 bp, Artificial Sequence
  Synthetic oligonucleotide; TGG chr11 5220440 5220459 5220456 +
aatctgacagttatgtgtct

SEQ ID NO: 7981 - DNA, 20 bp, Artificial Sequence
  Synthetic oligonucleotide; GAG chr11 5220442 5220461 5220458 +
tctgacagttatgtgtcttg

SEQ ID NO: 7982 - DNA, 20 bp, Artificial Sequence
  Synthetic oligonucleotide; TAG chr11 5220456 5220475 5220472 +
gtcttggagttgcttttctc

SEQ ID NO: 7983 - DNA, 20 bp, Artificial Sequence
  Synthetic oligonucleotide; AGG chr11 5220457 5220476 5220473 +
tcttggagttgcttttctct

SEQ ID NO: 7984 - DNA, 20 bp, Artificial Sequence
  Synthetic oligonucleotide; GAG chr11 5220459 5220478 5220475 +
ttggagttgcttttctctag

SEQ ID NO: 7985 - DNA, 20 bp, Artificial Sequence
  Synthetic oligonucleotide; TGG chr11 5220470 5220489 5220486 +
tttctctaggagtatctttg

SEQ ID NO: 7986 - DNA, 20 bp, Artificial Sequence
  Synthetic oligonucleotide; TGG chr11 5220501 5220520 5220517 +
gtatttcctgaatgtgaatt

SEQ ID NO: 7987 - DNA, 20 bp, Artificial Sequence
  Synthetic oligonucleotide; GGG chr11 5220502 5220521 5220518 +
tatttcctgaatgtgaattt

SEQ ID NO: 7988 - DNA, 20 bp, Artificial Sequence
  Synthetic oligonucleotide; TAG chr11 5220515 5220534 5220531 +
tgaatttgggcttgccttgc

SEQ ID NO: 7989 - DNA, 20 bp, Artificial Sequence
  Synthetic oligonucleotide; TGG chr11 5220520 5220539 5220536 +
ttgggcttgccttgctagat

SEQ ID NO: 7990 - DNA, 20 bp, Artificial Sequence
  Synthetic oligonucleotide; GGG chr11 5220521 5220540 5220537 +
tgggcttgccttgctagatt

SEQ ID NO: 7991 - DNA, 20 bp, Artificial Sequence
  Synthetic oligonucleotide; GGG chr11 5220522 5220541 5220538 +
gggcttgccttgctagattg

SEQ ID NO: 7992 - DNA, 20 bp, Artificial Sequence
  Synthetic oligonucleotide; AAG chr11 5220525 5220544 5220541 +
cttgccttgctagattgggg

SEQ ID NO: 7993 - DNA, 20 bp, Artificial Sequence
  Synthetic oligonucleotide; TGG chr11 5220534 5220553 5220550 +
ctagattggggaagttctcc

SEQ ID NO: 7994 - DNA, 20 bp, Artificial Sequence
  Synthetic oligonucleotide; CAG chr11 5220548 5220567 5220564 +
ttctcctggataatatcctg

SEQ ID NO: 7995 - DNA, 20 bp, Artificial Sequence
  Synthetic oligonucleotide; GAG chr11 5220550 5220569 5220566 +
ctcctggataatatcctgca

SEQ ID NO: 7996 - DNA, 20 bp, Artificial Sequence
  Synthetic oligonucleotide; TGG chr11 5220565 5220584 5220581 +
ctgcagagtgttttccaact

SEQ ID NO: 7997 - DNA, 20 bp, Artificial Sequence
  Synthetic oligonucleotide; CAG chr11 5220589 5220608 5220605 +
tccattctccccatcacttt

SEQ ID NO: 7998 - DNA, 20 bp, Artificial Sequence
  Synthetic oligonucleotide; TAG chr11 5220602 5220621 5220618 +
tcactttcagctacaccaat

SEQ ID NO: 7999 - DNA, 20 bp, Artificial Sequence
  Synthetic oligonucleotide; TAG chr11 5220608 5220627 5220624 +
tcagctacaccaattagatg

SEQ ID NO: 8000 - DNA, 20 bp, Artificial Sequence
  Synthetic oligonucleotide; TGG chr11 5220614 5220633 5220630 +
acaccaattagatgtagatt

SEQ ID NO: 8001 - DNA, 20 bp, Artificial Sequence
  Synthetic oligonucleotide; TAG chr11 5220627 5220646 5220643 +
gtagatttggtcttttcaca

SEQ ID NO: 8002 - DNA, 20 bp, Artificial Sequence
  Synthetic oligonucleotide; TGG chr11 5220642 5220661 5220658 +
tcacatagtcccatatttct

SEQ ID NO: 8003 - DNA, 20 bp, Artificial Sequence
  Synthetic oligonucleotide; GAG chr11 5220644 5220663 5220660 +
acatagtcccatatttcttg

SEQ ID NO: 8004 - DNA, 20 bp, Artificial Sequence
  Synthetic oligonucleotide; AGG chr11 5220645 5220664 5220661 +
catagtcccatatttcttgg

SEQ ID NO: 8005 - DNA, 20 bp, Artificial Sequence
  Synthetic oligonucleotide; CAG chr11 5220740 5220759 5220756 +
gtcattgataccctttcttc

SEQ ID NO: 8006 - DNA, 20 bp, Artificial Sequence
  Synthetic oligonucleotide; CGG chr11 5220753 5220772 5220769 +
tttcttccagttgatctcat

SEQ ID NO: 8007 - DNA, 20 bp, Artificial Sequence
  Synthetic oligonucleotide; GAG chr11 5220761 5220780 5220777 +
agttgatctcatcggttact

SEQ ID NO: 8008 - DNA, 20 bp, Artificial Sequence
  Synthetic oligonucleotide; AGG chr11 5220762 5220781 5220778 +
gttgatctcatcggttactg

SEQ ID NO: 8009 - DNA, 20 bp, Artificial Sequence
  Synthetic oligonucleotide; TAG chr11 5220782 5220801 5220798 +
aggcttgtgtatttgtcacg

SEQ ID NO: 8010 - DNA, 20 bp, Artificial Sequence
  Synthetic oligonucleotide; TGG chr11 5220796 5220815 5220812 +
gtcacgtagttctcctgcct

SEQ ID NO: 8011 - DNA, 20 bp, Artificial Sequence
  Synthetic oligonucleotide; CAG chr11 5220803 5220822 5220819 +
agttctcctgccttggtttt

SEQ ID NO: 8012 - DNA, 20 bp, Artificial Sequence
  Synthetic oligonucleotide; CAG chr11 5220812 5220831 5220828 +
gccttggttttcagctccat

SEQ ID NO: 8013 - DNA, 20 bp, Artificial Sequence
  Synthetic oligonucleotide; AGG chr11 5220813 5220832 5220829 +
ccttggttttcagctccatc

SEQ ID NO: 8014 - DNA, 20 bp, Artificial Sequence
  Synthetic oligonucleotide; AAG chr11 5220822 5220841 5220838 +
tcagctccatcaggtccttt

SEQ ID NO: 8015 - DNA, 20 bp, Artificial Sequence
  Synthetic oligonucleotide; AGG chr11 5220823 5220842 5220839 +
cagctccatcaggtccttta

SEQ ID NO: 8016 - DNA, 20 bp, Artificial Sequence
  Synthetic oligonucleotide; TGG chr11 5220838 5220857 5220854 +
ctttaaggacttctgtgcat

SEQ ID NO: 8017 - DNA, 20 bp, Artificial Sequence
  Synthetic oligonucleotide; TAG chr11 5220847 5220866 5220863 +
cttctgtgcattggttattc

SEQ ID NO: 8018 - DNA, 20 bp, Artificial Sequence
  Synthetic oligonucleotide; AAG chr11 5220876 5220895 5220892 +
attcatctaattttttttca

SEQ ID NO: 8019 - DNA, 20 bp, Artificial Sequence
  Synthetic oligonucleotide; TAG chr11 5220917 5220936 5220933 +
tttgttcgaacttcctcctt

SEQ ID NO: 8020 - DNA, 20 bp, Artificial Sequence
  Synthetic oligonucleotide; TGG chr11 5220922 5220941 5220938 +
tcgaacttcctcctttagct

SEQ ID NO: 8021 - DNA, 20 bp, Artificial Sequence
  Synthetic oligonucleotide; GAG chr11 5220924 5220943 5220940 +
gaacttcctcctttagcttg

SEQ ID NO: 8022 - DNA, 20 bp, Artificial Sequence
  Synthetic oligonucleotide; TAG chr11 5220927 5220946 5220943 +
cttcctcctttagcttggag

SEQ ID NO: 8023 - DNA, 20 bp, Artificial Sequence
  Synthetic oligonucleotide; AAG chr11 5220942 5220961 5220958 +
tggagtagtttgatcttctg

SEQ ID NO: 8024 - DNA, 20 bp, Artificial Sequence
  Synthetic oligonucleotide; AAG chr11 5220966 5220985 5220982 +
cttcctctctcaactcgtca

SEQ ID NO: 8025 - DNA, 20 bp, Artificial Sequence
  Synthetic oligonucleotide; CAG chr11 5220981 5221000 5220997 +
cgtcaaagtcattctctgcc

SEQ ID NO: 8026 - DNA, 20 bp, Artificial Sequence
  Synthetic oligonucleotide; TGG chr11 5220998 5221017 5221014 +
gcccagctttgttccattgc

SEQ ID NO: 8027 - DNA, 20 bp, Artificial Sequence
  Synthetic oligonucleotide; GAG chr11 5221002 5221021 5221018 +
agctttgttccattgctggt

SEQ ID NO: 8028 - DNA, 20 bp, Artificial Sequence
  Synthetic oligonucleotide; AGG chr11 5221003 5221022 5221019 +
gctttgttccattgctggtg

SEQ ID NO: 8029 - DNA, 20 bp, Artificial Sequence
  Synthetic oligonucleotide; GAG chr11 5221005 5221024 5221021 +
tttgttccattgctggtgag

SEQ ID NO: 8030 - DNA, 20 bp, Artificial Sequence
  Synthetic oligonucleotide; TGG chr11 5221019 5221038 5221035 +
ggtgaggagctgcgttactt

SEQ ID NO: 8031 - DNA, 20 bp, Artificial Sequence
  Synthetic oligonucleotide; GAG chr11 5221021 5221040 5221037 +
tgaggagctgcgttactttg

SEQ ID NO: 8032 - DNA, 20 bp, Artificial Sequence
  Synthetic oligonucleotide; AGG chr11 5221022 5221041 5221038 +
gaggagctgcgttactttgg

SEQ ID NO: 8033 - DNA, 20 bp, Artificial Sequence
  Synthetic oligonucleotide; GAG chr11 5221024 5221043 5221040 +
ggagctgcgttactttggag

SEQ ID NO: 8034 - DNA, 20 bp, Artificial Sequence
  Synthetic oligonucleotide; AGG chr11 5221025 5221044 5221041 +
gagctgcgttactttggagg

SEQ ID NO: 8035 - DNA, 20 bp, Artificial Sequence
  Synthetic oligonucleotide; GAG chr11 5221027 5221046 5221043 +
gctgcgttactttggaggag

SEQ ID NO: 8036 - DNA, 20 bp, Artificial Sequence
  Synthetic oligonucleotide; GAG chr11 5221029 5221048 5221045 +
tgcgttactttggaggagga

SEQ ID NO: 8037 - DNA, 20 bp, Artificial Sequence
  Synthetic oligonucleotide; AGG chr11 5221030 5221049 5221046 +
gcgttactttggaggaggag

SEQ ID NO: 8038 - DNA, 20 bp, Artificial Sequence
  Synthetic oligonucleotide; TAG chr11 5221045 5221064 5221061 +
aggagaggcactctcatttt

SEQ ID NO: 8039 - DNA, 20 bp, Artificial Sequence
  Synthetic oligonucleotide; GAG chr11 5221047 5221066 5221063 +
gagaggcactctcattttta

SEQ ID NO: 8040 - DNA, 20 bp, Artificial Sequence
  Synthetic oligonucleotide; CAG chr11 5221054 5221073 5221070 +
actctcatttttagagtgtc

SEQ ID NO: 8041 - DNA, 20 bp, Artificial Sequence
  Synthetic oligonucleotide; TGG chr11 5221087 5221106 5221103 +
ctgctttttccccatcttta

SEQ ID NO: 8042 - DNA, 20 bp, Artificial Sequence
  Synthetic oligonucleotide; TGG chr11 5221103 5221122 5221119 +
tttatggttttatctacctt

SEQ ID NO: 8043 - DNA, 20 bp, Artificial Sequence
  Synthetic oligonucleotide; TGG chr11 5221116 5221135 5221132 +
ctacctttggtctttgatga

SEQ ID NO: 8044 - DNA, 20 bp, Artificial Sequence
  Synthetic oligonucleotide; CAG chr11 5221126 5221145 5221142 +
tctttgatgatggcgatgta

SEQ ID NO: 8045 - DNA, 20 bp, Artificial Sequence
  Synthetic oligonucleotide; TGG chr11 5221130 5221149 5221146 +
tgatgatggcgatgtacaga

SEQ ID NO: 8046 - DNA, 20 bp, Artificial Sequence
  Synthetic oligonucleotide; GGG chr11 5221131 5221150 5221147 +
gatgatggcgatgtacagat

SEQ ID NO: 8047 - DNA, 20 bp, Artificial Sequence
  Synthetic oligonucleotide; TGG chr11 5221138 5221157 5221154 +
gcgatgtacagatgggtttt

SEQ ID NO: 8048 - DNA, 20 bp, Artificial Sequence
  Synthetic oligonucleotide; TGG chr11 5221143 5221162 5221159 +
gtacagatgggtttttggtg

SEQ ID NO: 8049 - DNA, 20 bp, Artificial Sequence
  Synthetic oligonucleotide; TAG chr11 5221163 5221182 5221179 +
tggatgtcctttctgtttgt

SEQ ID NO: 8050 - DNA, 20 bp, Artificial Sequence
  Synthetic oligonucleotide; CAG chr11 5221178 5221197 5221194 +
tttgttagttttccttctaa

SEQ ID NO: 8051 - DNA, 20 bp, Artificial Sequence
  Synthetic oligonucleotide; CAG chr11 5221182 5221201 5221198 +
ttagttttccttctaacagt

SEQ ID NO: 8052 - DNA, 20 bp, Artificial Sequence
  Synthetic oligonucleotide; AGG chr11 5221183 5221202 5221199 +
tagttttccttctaacagtc

SEQ ID NO: 8053 - DNA, 20 bp, Artificial Sequence
  Synthetic oligonucleotide; CAG chr11 5221191 5221210 5221207 +
cttctaacagtcaggaccct

SEQ ID NO: 8054 - DNA, 20 bp, Artificial Sequence
  Synthetic oligonucleotide; CAG chr11 5221197 5221216 5221213 +
acagtcaggaccctcagctg

SEQ ID NO: 8055 - DNA, 20 bp, Artificial Sequence
  Synthetic oligonucleotide; AGG chr11 5221198 5221217 5221214 +
cagtcaggaccctcagctgc

SEQ ID NO: 8056 - DNA, 20 bp, Artificial Sequence
  Synthetic oligonucleotide; TGG chr11 5221206 5221225 5221222 +
accctcagctgcaggtctgt

SEQ ID NO: 8057 - DNA, 20 bp, Artificial Sequence
  Synthetic oligonucleotide; GAG chr11 5221208 5221227 5221224 +
cctcagctgcaggtctgttg

SEQ ID NO: 8058 - DNA, 20 bp, Artificial Sequence
  Synthetic oligonucleotide; TGG chr11 5221216 5221235 5221232 +
gcaggtctgttggagtttac

SEQ ID NO: 8059 - DNA, 20 bp, Artificial Sequence
  Synthetic oligonucleotide; GAG chr11 5221218 5221237 5221234 +
aggtctgttggagtttactg

SEQ ID NO: 8060 - DNA, 20 bp, Artificial Sequence
  Synthetic oligonucleotide; AGG chr11 5221219 5221238 5221235 +
ggtctgttggagtttactgg

SEQ ID NO: 8061 - DNA, 20 bp, Artificial Sequence
  Synthetic oligonucleotide; CAG chr11 5221229 5221248 5221245 +
agtttactggaggtccactc

SEQ ID NO: 8062 - DNA, 20 bp, Artificial Sequence
  Synthetic oligonucleotide; AAG chr11 5221232 5221251 5221248 +
ttactggaggtccactccag

SEQ ID NO: 8063 - DNA, 20 bp, Artificial Sequence
  Synthetic oligonucleotide; TGG chr11 5221244 5221263 5221260 +
cactccagaagctgttttcc

SEQ ID NO: 8064 - DNA, 20 bp, Artificial Sequence
  Synthetic oligonucleotide; GGG chr11 5221245 5221264 5221261 +
actccagaagctgttttcct

SEQ ID NO: 8065 - DNA, 20 bp, Artificial Sequence
  Synthetic oligonucleotide; CAG chr11 5221254 5221273 5221270 +
gctgttttcctgggtatcaa

SEQ ID NO: 8066 - DNA, 20 bp, Artificial Sequence
  Synthetic oligonucleotide; CGG chr11 5221257 5221276 5221273 +
gttttcctgggtatcaacag

SEQ ID NO: 8067 - DNA, 20 bp, Artificial Sequence
  Synthetic oligonucleotide; TGG chr11 5221260 5221279 5221276 +
ttcctgggtatcaacagcgg

SEQ ID NO: 8068 - DNA, 20 bp, Artificial Sequence
  Synthetic oligonucleotide; CAG chr11 5221266 5221285 5221282 +
ggtatcaacagcggtggctg

SEQ ID NO: 8069 - DNA, 20 bp, Artificial Sequence
  Synthetic oligonucleotide; CAG chr11 5221271 5221290 5221287 +
caacagcggtggctgcagaa

SEQ ID NO: 8070 - DNA, 20 bp, Artificial Sequence
  Synthetic oligonucleotide; TGG chr11 5221274 5221293 5221290 +
cagcggtggctgcagaacag

SEQ ID NO: 8071 - DNA, 20 bp, Artificial Sequence
  Synthetic oligonucleotide; TGG chr11 5221281 5221300 5221297 +
ggctgcagaacagtggatat

SEQ ID NO: 8072 - DNA, 20 bp, Artificial Sequence
  Synthetic oligonucleotide; TGG chr11 5221317 5221336 5221333 +
ctgctgcctgatcattcctc

SEQ ID NO: 8073 - DNA, 20 bp, Artificial Sequence
  Synthetic oligonucleotide; AAG chr11 5221320 5221339 5221336 +
ctgcctgatcattcctctgg

SEQ ID NO: 8074 - DNA, 20 bp, Artificial Sequence
  Synthetic oligonucleotide; TAG chr11 5221331 5221350 5221347 +
ttcctctggaagttttgtct

SEQ ID NO: 8075 - DNA, 20 bp, Artificial Sequence
  Synthetic oligonucleotide; GAG chr11 5221333 5221352 5221349 +
cctctggaagttttgtctta

SEQ ID NO: 8076 - DNA, 20 bp, Artificial Sequence
  Synthetic oligonucleotide; AGG chr11 5221334 5221353 5221350 +
ctctggaagttttgtcttag

SEQ ID NO: 8077 - DNA, 20 bp, Artificial Sequence
  Synthetic oligonucleotide; GAG chr11 5221336 5221355 5221352 +
ctggaagttttgtcttagag

SEQ ID NO: 8078 - DNA, 20 bp, Artificial Sequence
  Synthetic oligonucleotide; CAG chr11 5221342 5221361 5221358 +
gttttgtcttagaggagtac

SEQ ID NO: 8079 - DNA, 20 bp, Artificial Sequence
  Synthetic oligonucleotide; GAG chr11 5221351 5221370 5221367 +
tagaggagtaccagccatgt

SEQ ID NO: 8080 - DNA, 20 bp, Artificial Sequence
  Synthetic oligonucleotide; AGG chr11 5221352 5221371 5221368 +
agaggagtaccagccatgtg

SEQ ID NO: 8081 - DNA, 20 bp, Artificial Sequence
  Synthetic oligonucleotide; CAG chr11 5221358 5221377 5221374 +
gtaccagccatgtgaggtgt

SEQ ID NO: 8082 - DNA, 20 bp, Artificial Sequence
  Synthetic oligonucleotide; TGG chr11 5221372 5221391 5221388 +
aggtgtcagtctgcccctac

SEQ ID NO: 8083 - DNA, 20 bp, Artificial Sequence
  Synthetic oligonucleotide; GGG chr11 5221373 5221392 5221389 +
ggtgtcagtctgcccctact

SEQ ID NO: 8084 - DNA, 20 bp, Artificial Sequence
  Synthetic oligonucleotide; GGG chr11 5221374 5221393 5221390 +
gtgtcagtctgcccctactg

SEQ ID NO: 8085 - DNA, 20 bp, Artificial Sequence
  Synthetic oligonucleotide; GGG chr11 5221375 5221394 5221391 +
tgtcagtctgcccctactgg

SEQ ID NO: 8086 - DNA, 20 bp, Artificial Sequence
  Synthetic oligonucleotide; CAG chr11 5221386 5221405 5221402 +
ccctactgggggatgcctcc

SEQ ID NO: 8087 - DNA, 20 bp, Artificial Sequence
  Synthetic oligonucleotide; TAG chr11 5221390 5221409 5221406 +
actgggggatgcctcccagt

SEQ ID NO: 8088 - DNA, 20 bp, Artificial Sequence
  Synthetic oligonucleotide; AGG chr11 5221391 5221410 5221407 +
ctgggggatgcctcccagtt

SEQ ID NO: 8089 - DNA, 20 bp, Artificial Sequence
  Synthetic oligonucleotide; CGG chr11 5221399 5221418 5221415 +
tgcctcccagttaggctact

SEQ ID NO: 8090 - DNA, 20 bp, Artificial Sequence
  Synthetic oligonucleotide; GGG chr11 5221400 5221419 5221416 +
gcctcccagttaggctactc

SEQ ID NO: 8091 - DNA, 20 bp, Artificial Sequence
  Synthetic oligonucleotide; GGG chr11 5221401 5221420 5221417 +
cctcccagttaggctactcg

SEQ ID NO: 8092 - DNA, 20 bp, Artificial Sequence
  Synthetic oligonucleotide; GGG chr11 5221402 5221421 5221418 +
ctcccagttaggctactcgg

SEQ ID NO: 8093 - DNA, 20 bp, Artificial Sequence
  Synthetic oligonucleotide; CAG chr11 5221406 5221425 5221422 +
cagttaggctactcgggggt

SEQ ID NO: 8094 - DNA, 20 bp, Artificial Sequence
  Synthetic oligonucleotide; AGG chr11 5221407 5221426 5221423 +
agttaggctactcgggggtc

SEQ ID NO: 8095 - DNA, 20 bp, Artificial Sequence
  Synthetic oligonucleotide; GGG chr11 5221408 5221427 5221424 +
gttaggctactcgggggtca

SEQ ID NO: 8096 - DNA, 20 bp, Artificial Sequence
  Synthetic oligonucleotide; GAG chr11 5221419 5221438 5221435 +
cgggggtcagggacccactt

SEQ ID NO: 8097 - DNA, 20 bp, Artificial Sequence
  Synthetic oligonucleotide; AGG chr11 5221420 5221439 5221436 +
gggggtcagggacccacttg

SEQ ID NO: 8098 - DNA, 20 bp, Artificial Sequence
  Synthetic oligonucleotide; GAG chr11 5221422 5221441 5221438 +
gggtcagggacccacttgag

SEQ ID NO: 8099 - DNA, 20 bp, Artificial Sequence
  Synthetic oligonucleotide; AGG chr11 5221423 5221442 5221439 +
ggtcagggacccacttgagg

SEQ ID NO: 8100 - DNA, 20 bp, Artificial Sequence
  Synthetic oligonucleotide; CAG chr11 5221426 5221445 5221442 +
cagggacccacttgaggagg

SEQ ID NO: 8101 - DNA, 20 bp, Artificial Sequence
  Synthetic oligonucleotide; CAG chr11 5221441 5221460 5221457 +
ggaggcagtctgcctgttct

SEQ ID NO: 8102 - DNA, 20 bp, Artificial Sequence
  Synthetic oligonucleotide; AAG chr11 5221449 5221468 5221465 +
tctgcctgttctcagatctg

SEQ ID NO: 8103 - DNA, 20 bp, Artificial Sequence
  Synthetic oligonucleotide; TGG chr11 5221460 5221479 5221476 +
tcagatctgaagctatgtgc

SEQ ID NO: 8104 - DNA, 20 bp, Artificial Sequence
  Synthetic oligonucleotide; GGG chr11 5221461 5221480 5221477 +
cagatctgaagctatgtgct

SEQ ID NO: 8105 - DNA, 20 bp, Artificial Sequence
  Synthetic oligonucleotide; GAG chr11 5221463 5221482 5221479 +
gatctgaagctatgtgctgg

SEQ ID NO: 8106 - DNA, 20 bp, Artificial Sequence
  Synthetic oligonucleotide; AAG chr11 5221483 5221502 5221499 +
gagaaccactactctcttca

SEQ ID NO: 8107 - DNA, 20 bp, Artificial Sequence
  Synthetic oligonucleotide; CAG chr11 5221490 5221509 5221506 +
actactctcttcaaagctgt

SEQ ID NO: 8108 - DNA, 20 bp, Artificial Sequence
  Synthetic oligonucleotide; CAG chr11 5221494 5221513 5221510 +
ctctcttcaaagctgtcaga

SEQ ID NO: 8109 - DNA, 20 bp, Artificial Sequence
  Synthetic oligonucleotide; AGG chr11 5221495 5221514 5221511 +
tctcttcaaagctgtcagac

SEQ ID NO: 8110 - DNA, 20 bp, Artificial Sequence
  Synthetic oligonucleotide; GGG chr11 5221496 5221515 5221512 +
ctcttcaaagctgtcagaca

SEQ ID NO: 8111 - DNA, 20 bp, Artificial Sequence
  Synthetic oligonucleotide; AAG chr11 5221505 5221524 5221521 +
gctgtcagacagggacattt

SEQ ID NO: 8112 - DNA, 20 bp, Artificial Sequence
  Synthetic oligonucleotide; CAG chr11 5221512 5221531 5221528 +
gacagggacatttaagtctg

SEQ ID NO: 8113 - DNA, 20 bp, Artificial Sequence
  Synthetic oligonucleotide; GAG chr11 5221514 5221533 5221530 +
cagggacatttaagtctgca

SEQ ID NO: 8114 - DNA, 20 bp, Artificial Sequence
  Synthetic oligonucleotide; AGG chr11 5221515 5221534 5221531 +
agggacatttaagtctgcag

SEQ ID NO: 8115 - DNA, 20 bp, Artificial Sequence
  Synthetic oligonucleotide; TAG chr11 5221553 5221572 5221569 +
gtttgtctgtgccctgcccc

SEQ ID NO: 8116 - DNA, 20 bp, Artificial Sequence
  Synthetic oligonucleotide; GAG chr11 5221555 5221574 5221571 +
ttgtctgtgccctgccccta

SEQ ID NO: 8117 - DNA, 20 bp, Artificial Sequence
  Synthetic oligonucleotide; AGG chr11 5221556 5221575 5221572 +
tgtctgtgccctgcccctag

SEQ ID NO: 8118 - DNA, 20 bp, Artificial Sequence
  Synthetic oligonucleotide; TGG chr11 5221559 5221578 5221575 +
ctgtgccctgcccctagagg

SEQ ID NO: 8119 - DNA, 20 bp, Artificial Sequence
  Synthetic oligonucleotide; GAG chr11 5221561 5221580 5221577 +
gtgccctgcccctagaggtg

SEQ ID NO: 8120 - DNA, 20 bp, Artificial Sequence
  Synthetic oligonucleotide; CAG chr11 5221568 5221587 5221584 +
gcccctagaggtggagccta

SEQ ID NO: 8121 - DNA, 20 bp, Artificial Sequence
  Synthetic oligonucleotide; GAG chr11 5221570 5221589 5221586 +
ccctagaggtggagcctaca

SEQ ID NO: 8122 - DNA, 20 bp, Artificial Sequence
  Synthetic oligonucleotide; AGG chr11 5221571 5221590 5221587 +
cctagaggtggagcctacag

SEQ ID NO: 8123 - DNA, 20 bp, Artificial Sequence
  Synthetic oligonucleotide; CAG chr11 5221574 5221593 5221590 +
agaggtggagcctacagagg

SEQ ID NO: 8124 - DNA, 20 bp, Artificial Sequence
  Synthetic oligonucleotide; AGG chr11 5221575 5221594 5221591 +
gaggtggagcctacagaggc

SEQ ID NO: 8125 - DNA, 20 bp, Artificial Sequence
  Synthetic oligonucleotide; CAG chr11 5221578 5221597 5221594 +
gtggagcctacagaggcagg

SEQ ID NO: 8126 - DNA, 20 bp, Artificial Sequence
  Synthetic oligonucleotide; AGG chr11 5221579 5221598 5221595 +
tggagcctacagaggcaggc

SEQ ID NO: 8127 - DNA, 20 bp, Artificial Sequence
  Synthetic oligonucleotide; GAG chr11 5221589 5221608 5221605 +
agaggcaggcaggcctcctt

SEQ ID NO: 8128 - DNA, 20 bp, Artificial Sequence
  Synthetic oligonucleotide; TGG chr11 5221595 5221614 5221611 +
aggcaggcctccttgagctg

SEQ ID NO: 8129 - DNA, 20 bp, Artificial Sequence
  Synthetic oligonucleotide; TGG chr11 5221598 5221617 5221614 +
caggcctccttgagctgtgg

SEQ ID NO: 8130 - DNA, 20 bp, Artificial Sequence
  Synthetic oligonucleotide; GGG chr11 5221599 5221618 5221615 +
aggcctccttgagctgtggt

SEQ ID NO: 8131 - DNA, 20 bp, Artificial Sequence
  Synthetic oligonucleotide; CAG chr11 5221609 5221628 5221625 +
gagctgtggtgggctccacc

SEQ ID NO: 8132 - DNA, 20 bp, Artificial Sequence
  Synthetic oligonucleotide; GAG chr11 5221615 5221634 5221631 +
tggtgggctccacccagttc

SEQ ID NO: 8133 - DNA, 20 bp, Artificial Sequence
  Synthetic oligonucleotide; CAG chr11 5221622 5221641 5221638 +
ctccacccagttcgagcttc

SEQ ID NO: 8134 - DNA, 20 bp, Artificial Sequence
  Synthetic oligonucleotide; AGG chr11 5221623 5221642 5221639 +
tccacccagttcgagcttcc

SEQ ID NO: 8135 - DNA, 20 bp, Artificial Sequence
  Synthetic oligonucleotide; CGG chr11 5221626 5221645 5221642 +
acccagttcgagcttccagg

SEQ ID NO: 8136 - DNA, 20 bp, Artificial Sequence
  Synthetic oligonucleotide; AAG chr11 5221645 5221664 5221661 +
gcggctttgtttacctgctc

SEQ ID NO: 8137 - DNA, 20 bp, Artificial Sequence
  Synthetic oligonucleotide; TGG chr11 5221650 5221669 5221666 +
tttgtttacctgctcaagcc

SEQ ID NO: 8138 - DNA, 20 bp, Artificial Sequence
  Synthetic oligonucleotide; TGG chr11 5221657 5221676 5221673 +
acctgctcaagcctggacaa

SEQ ID NO: 8139 - DNA, 20 bp, Artificial Sequence
  Synthetic oligonucleotide; TGG chr11 5221660 5221679 5221676 +
tgctcaagcctggacaatgg

SEQ ID NO: 8140 - DNA, 20 bp, Artificial Sequence
  Synthetic oligonucleotide; GGG chr11 5221661 5221680 5221677 +
gctcaagcctggacaatggt

SEQ ID NO: 8141 - DNA, 20 bp, Artificial Sequence
  Synthetic oligonucleotide; CAG chr11 5221675 5221694 5221691 +
aatggtgggcacccctcccc

SEQ ID NO: 8142 - DNA, 20 bp, Artificial Sequence
  Synthetic oligonucleotide; CAG chr11 5221694 5221713 5221710 +
ccagcctcactgccaccttg

SEQ ID NO: 8143 - DNA, 20 bp, Artificial Sequence
  Synthetic oligonucleotide; CAG chr11 5221705 5221724 5221721 +
gccaccttgcagtttgacct

SEQ ID NO: 8144 - DNA, 20 bp, Artificial Sequence
  Synthetic oligonucleotide; TAG chr11 5221718 5221737 5221734 +
ttgacctcagactgctgtgc

SEQ ID NO: 8145 - DNA, 20 bp, Artificial Sequence
  Synthetic oligonucleotide; GAG chr11 5221725 5221744 5221741 +
cagactgctgtgctagcaat

SEQ ID NO: 8146 - DNA, 20 bp, Artificial Sequence
  Synthetic oligonucleotide; GAG chr11 5221729 5221748 5221745 +
ctgctgtgctagcaatgagc

SEQ ID NO: 8147 - DNA, 20 bp, Artificial Sequence
  Synthetic oligonucleotide; AGG chr11 5221730 5221749 5221746 +
tgctgtgctagcaatgagcg

SEQ ID NO: 8148 - DNA, 20 bp, Artificial Sequence
  Synthetic oligonucleotide; TGG chr11 5221738 5221757 5221754 +
tagcaatgagcgaggctcca

SEQ ID NO: 8149 - DNA, 20 bp, Artificial Sequence
  Synthetic oligonucleotide; GGG chr11 5221739 5221758 5221755 +
agcaatgagcgaggctccat

SEQ ID NO: 8150 - DNA, 20 bp, Artificial Sequence
  Synthetic oligonucleotide; TAG chr11 5221744 5221763 5221760 +
tgagcgaggctccatgggcg

SEQ ID NO: 8151 - DNA, 20 bp, Artificial Sequence
  Synthetic oligonucleotide; AGG chr11 5221745 5221764 5221761 +
gagcgaggctccatgggcgt

SEQ ID NO: 8152 - DNA, 20 bp, Artificial Sequence
  Synthetic oligonucleotide; GAG chr11 5221755 5221774 5221771 +
ccatgggcgtaggaccctct

SEQ ID NO: 8153 - DNA, 20 bp, Artificial Sequence
  Synthetic oligonucleotide; CAG chr11 5221759 5221778 5221775 +
gggcgtaggaccctctgagc

SEQ ID NO: 8154 - DNA, 20 bp, Artificial Sequence
  Synthetic oligonucleotide; AGG chr11 5221760 5221779 5221776 +
ggcgtaggaccctctgagcc

SEQ ID NO: 8155 - DNA, 20 bp, Artificial Sequence
  Synthetic oligonucleotide; TGG chr11 5221765 5221784 5221781 +
aggaccctctgagccaggca

SEQ ID NO: 8156 - DNA, 20 bp, Artificial Sequence
  Synthetic oligonucleotide; GGG chr11 5221766 5221785 5221782 +
ggaccctctgagccaggcat

SEQ ID NO: 8157 - DNA, 20 bp, Artificial Sequence
  Synthetic oligonucleotide; TGG chr11 5221780 5221799 5221796 +
aggcatgggatataatctcc

SEQ ID NO: 8158 - DNA, 20 bp, Artificial Sequence
  Synthetic oligonucleotide; AAG chr11 5221796 5221815 5221812 +
ctcctggtgtgccatttgtt

SEQ ID NO: 8159 - DNA, 20 bp, Artificial Sequence
  Synthetic oligonucleotide; TGG chr11 5221804 5221823 5221820 +
gtgccatttgttaagcttgt

SEQ ID NO: 8160 - DNA, 20 bp, Artificial Sequence
  Synthetic oligonucleotide; AAG chr11 5221807 5221826 5221823 +
ccatttgttaagcttgttgg

SEQ ID NO: 8161 - DNA, 20 bp, Artificial Sequence
  Synthetic oligonucleotide; GAG chr11 5221809 5221828 5221825 +
atttgttaagcttgttggaa

SEQ ID NO: 8162 - DNA, 20 bp, Artificial Sequence
  Synthetic oligonucleotide; CAG chr11 5221814 5221833 5221830 +
ttaagcttgttggaagagcg

SEQ ID NO: 8163 - DNA, 20 bp, Artificial Sequence
  Synthetic oligonucleotide; TAG chr11 5221820 5221839 5221836 +
ttgttggaagagcgcagtat

SEQ ID NO: 8164 - DNA, 20 bp, Artificial Sequence
  Synthetic oligonucleotide; AGG chr11 5221821 5221840 5221837 +
tgttggaagagcgcagtatt

SEQ ID NO: 8165 - DNA, 20 bp, Artificial Sequence
  Synthetic oligonucleotide; GGG chr11 5221822 5221841 5221838 +
gttggaagagcgcagtatta

SEQ ID NO: 8166 - DNA, 20 bp, Artificial Sequence
  Synthetic oligonucleotide; CGG chr11 5221825 5221844 5221841 +
ggaagagcgcagtattaggg

SEQ ID NO: 8167 - DNA, 20 bp, Artificial Sequence
  Synthetic oligonucleotide; GGG chr11 5221826 5221845 5221842 +
gaagagcgcagtattagggc

SEQ ID NO: 8168 - DNA, 20 bp, Artificial Sequence
  Synthetic oligonucleotide; GAG chr11 5221828 5221847 5221844 +
agagcgcagtattagggcgg

SEQ ID NO: 8169 - DNA, 20 bp, Artificial Sequence
  Synthetic oligonucleotide; CAG chr11 5221844 5221863 5221860 +
gcgggagtgacccgattttc

SEQ ID NO: 8170 - DNA, 20 bp, Artificial Sequence
  Synthetic oligonucleotide; AGG chr11 5221845 5221864 5221861 +
cgggagtgacccgattttcc

SEQ ID NO: 8171 - DNA, 20 bp, Artificial Sequence
  Synthetic oligonucleotide; TAG chr11 5221874 5221893 5221890 +
ctgtcacccttttctttgac

SEQ ID NO: 8172 - DNA, 20 bp, Artificial Sequence
  Synthetic oligonucleotide; AGG chr11 5221875 5221894 5221891 +
tgtcacccttttctttgact

SEQ ID NO: 8173 - DNA, 20 bp, Artificial Sequence
  Synthetic oligonucleotide; AAG chr11 5221879 5221898 5221895 +
acccttttctttgactagga

SEQ ID NO: 8174 - DNA, 20 bp, Artificial Sequence
  Synthetic oligonucleotide; AGG chr11 5221880 5221899 5221896 +
cccttttctttgactaggaa

SEQ ID NO: 8175 - DNA, 20 bp, Artificial Sequence
  Synthetic oligonucleotide; GGG chr11 5221881 5221900 5221897 +
ccttttctttgactaggaaa

SEQ ID NO: 8176 - DNA, 20 bp, Artificial Sequence
  Synthetic oligonucleotide; CGG chr11 5221908 5221927 5221924 +
ccctgaccccttgtgcttcc

SEQ ID NO: 8177 - DNA, 20 bp, Artificial Sequence
  Synthetic oligonucleotide; GGG chr11 5221909 5221928 5221925 +
cctgaccccttgtgcttccc

SEQ ID NO: 8178 - DNA, 20 bp, Artificial Sequence
  Synthetic oligonucleotide; GAG chr11 5221913 5221932 5221929 +
accccttgtgcttcccgggt

SEQ ID NO: 8179 - DNA, 20 bp, Artificial Sequence
  Synthetic oligonucleotide; AGG chr11 5221914 5221933 5221930 +
ccccttgtgcttcccgggtg

SEQ ID NO: 8180 - DNA, 20 bp, Artificial Sequence
  Synthetic oligonucleotide; TGG chr11 5221935 5221954 5221951 +
ggtgatgcctcgccctgctt

SEQ ID NO: 8181 - DNA, 20 bp, Artificial Sequence
  Synthetic oligonucleotide; CAG chr11 5221946 5221965 5221962 +
gccctgctttggctcatgca

SEQ ID NO: 8182 - DNA, 20 bp, Artificial Sequence
  Synthetic oligonucleotide; TGG chr11 5221981 5222000 5221997 +
actgtcctgcacccactgcc

SEQ ID NO: 8183 - DNA, 20 bp, Artificial Sequence
  Synthetic oligonucleotide; GAG chr11 5221995 5222014 5222011 +
actgcctggcacttccctgt

SEQ ID NO: 8184 - DNA, 20 bp, Artificial Sequence
  Synthetic oligonucleotide; TGG chr11 5222005 5222024 5222021 +
acttccctgtgagatgaacc

SEQ ID NO: 8185 - DNA, 20 bp, Artificial Sequence
  Synthetic oligonucleotide; CAG chr11 5222013 5222032 5222029 +
gtgagatgaacctggtacct

SEQ ID NO: 8186 - DNA, 20 bp, Artificial Sequence
  Synthetic oligonucleotide; TGG chr11 5222017 5222036 5222033 +
gatgaacctggtacctcagt

SEQ ID NO: 8187 - DNA, 20 bp, Artificial Sequence
  Synthetic oligonucleotide; CAG chr11 5222025 5222044 5222041 +
tggtacctcagttggaaatg

SEQ ID NO: 8188 - DNA, 20 bp, Artificial Sequence
  Synthetic oligonucleotide; TGG chr11 5222057 5222076 5222073 +
gtcttctgcgtcactcacga

SEQ ID NO: 8189 - DNA, 20 bp, Artificial Sequence
  Synthetic oligonucleotide; GGG chr11 5222058 5222077 5222074 +
tcttctgcgtcactcacgat

SEQ ID NO: 8190 - DNA, 20 bp, Artificial Sequence
  Synthetic oligonucleotide; GAG chr11 5222060 5222079 5222076 +
ttctgcgtcactcacgatgg

SEQ ID NO: 8191 - DNA, 20 bp, Artificial Sequence
  Synthetic oligonucleotide; TAG chr11 5222066 5222085 5222082 +
gtcactcacgatgggagcta

SEQ ID NO: 8192 - DNA, 20 bp, Artificial Sequence
  Synthetic oligonucleotide; TGG chr11 5222071 5222090 5222087 +
tcacgatgggagctatagac

SEQ ID NO: 8193 - DNA, 20 bp, Artificial Sequence
  Synthetic oligonucleotide; GAG chr11 5222073 5222092 5222089 +
acgatgggagctatagactg

SEQ ID NO: 8194 - DNA, 20 bp, Artificial Sequence
  Synthetic oligonucleotide; CGG chr11 5222087 5222106 5222103 +
agactggagctgttcctatt

SEQ ID NO: 8195 - DNA, 20 bp, Artificial Sequence
  Synthetic oligonucleotide; TGG chr11 5222096 5222115 5222112 +
ctgttcctattcggtcatct

SEQ ID NO: 8196 - DNA, 20 bp, Artificial Sequence
  Synthetic oligonucleotide; CGG chr11 5222144 5222163 5222160 +
tttttcttttttttttgtga

SEQ ID NO: 8197 - DNA, 20 bp, Artificial Sequence
  Synthetic oligonucleotide; GAG chr11 5222146 5222165 5222162 +
tttcttttttttttgtgacg

SEQ ID NO: 8198 - DNA, 20 bp, Artificial Sequence
  Synthetic oligonucleotide; TGG chr11 5222164 5222183 5222180 +
cggagtctcatgctgtcacc

SEQ ID NO: 8199 - DNA, 20 bp, Artificial Sequence
  Synthetic oligonucleotide; GGG chr11 5222165 5222184 5222181 +
ggagtctcatgctgtcacct

SEQ ID NO: 8200 - DNA, 20 bp, Artificial Sequence
  Synthetic oligonucleotide; TGG chr11 5222169 5222188 5222185 +
tctcatgctgtcacctgggc

SEQ ID NO: 8201 - DNA, 20 bp, Artificial Sequence
  Synthetic oligonucleotide; CAG chr11 5222176 5222195 5222192 +
ctgtcacctgggctggaatg

SEQ ID NO: 8202 - DNA, 20 bp, Artificial Sequence
  Synthetic oligonucleotide; TGG chr11 5222179 5222198 5222195 +
tcacctgggctggaatgcag

SEQ ID NO: 8203 - DNA, 20 bp, Artificial Sequence
  Synthetic oligonucleotide; TGG chr11 5222190 5222209 5222206 +
ggaatgcagtggcacaatct

SEQ ID NO: 8204 - DNA, 20 bp, Artificial Sequence
  Synthetic oligonucleotide; CAG chr11 5222214 5222233 5222230 +
tcactgcaacctctgcctcc

SEQ ID NO: 8205 - DNA, 20 bp, Artificial Sequence
  Synthetic oligonucleotide; AGG chr11 5222215 5222234 5222231 +
cactgcaacctctgcctccc

SEQ ID NO: 8206 - DNA, 20 bp, Artificial Sequence
  Synthetic oligonucleotide; AAG chr11 5222221 5222240 5222237 +
aacctctgcctcccaggatc

SEQ ID NO: 8207 - DNA, 20 bp, Artificial Sequence
  Synthetic oligonucleotide; CAG chr11 5222238 5222257 5222254 +
atcaagcgattctcctgcct

SEQ ID NO: 8208 - DNA, 20 bp, Artificial Sequence
  Synthetic oligonucleotide; TGG chr11 5222254 5222273 5222270 +
gcctcagcctcccaaattgc

SEQ ID NO: 8209 - DNA, 20 bp, Artificial Sequence
  Synthetic oligonucleotide; GGG chr11 5222255 5222274 5222271 +
cctcagcctcccaaattgct

SEQ ID NO: 8210 - DNA, 20 bp, Artificial Sequence
  Synthetic oligonucleotide; CAG chr11 5222281 5222300 5222297 +
acacatgcctgccaccacgc

SEQ ID NO: 8211 - DNA, 20 bp, Artificial Sequence
  Synthetic oligonucleotide; AGG chr11 5222282 5222301 5222298 +
cacatgcctgccaccacgcc

SEQ ID NO: 8212 - DNA, 20 bp, Artificial Sequence
  Synthetic oligonucleotide; AAG chr11 5222287 5222306 5222303 +
gcctgccaccacgccaggct

SEQ ID NO: 8213 - DNA, 20 bp, Artificial Sequence
  Synthetic oligonucleotide; TAG chr11 5222302 5222321 5222318 +
aggctaagtttttatatttt

SEQ ID NO: 8214 - DNA, 20 bp, Artificial Sequence
  Synthetic oligonucleotide; TAG chr11 5222305 5222324 5222321 +
ctaagtttttatatttttag

SEQ ID NO: 8215 - DNA, 20 bp, Artificial Sequence
  Synthetic oligonucleotide; GAG chr11 5222312 5222331 5222328 +
tttatatttttagtagcgat

SEQ ID NO: 8216 - DNA, 20 bp, Artificial Sequence
  Synthetic oligonucleotide; AGG chr11 5222313 5222332 5222329 +
ttatatttttagtagcgatg

SEQ ID NO: 8217 - DNA, 20 bp, Artificial Sequence
  Synthetic oligonucleotide; TGG chr11 5222327 5222346 5222343 +
gcgatgaggtttcactatgt

SEQ ID NO: 8218 - DNA, 20 bp, Artificial Sequence
  Synthetic oligonucleotide; CAG chr11 5222331 5222350 5222347 +
tgaggtttcactatgttggc

SEQ ID NO: 8219 - DNA, 20 bp, Artificial Sequence
  Synthetic oligonucleotide; AGG chr11 5222332 5222351 5222348 +
gaggtttcactatgttggcc

SEQ ID NO: 8220 - DNA, 20 bp, Artificial Sequence
  Synthetic oligonucleotide; TAG chr11 5222371 5222390 5222387 +
gacgtcgtgatccgcctgtc

SEQ ID NO: 8221 - DNA, 20 bp, Artificial Sequence
  Synthetic oligonucleotide; AGG chr11 5222372 5222391 5222388 +
acgtcgtgatccgcctgtct

SEQ ID NO: 8222 - DNA, 20 bp, Artificial Sequence
  Synthetic oligonucleotide; AAG chr11 5222382 5222401 5222398 +
ccgcctgtctaggcctccca

SEQ ID NO: 8223 - DNA, 20 bp, Artificial Sequence
  Synthetic oligonucleotide; CAG chr11 5222396 5222415 5222412 +
ctcccaaagtgctgcaattg

SEQ ID NO: 8224 - DNA, 20 bp, Artificial Sequence
  Synthetic oligonucleotide; AGG chr11 5222397 5222416 5222413 +
tcccaaagtgctgcaattgc

SEQ ID NO: 8225 - DNA, 20 bp, Artificial Sequence
  Synthetic oligonucleotide; GAG chr11 5222403 5222422 5222419 +
agtgctgcaattgcaggtgt

SEQ ID NO: 8226 - DNA, 20 bp, Artificial Sequence
  Synthetic oligonucleotide; CAG chr11 5222416 5222435 5222432 +
caggtgtgagccaccgctcc

SEQ ID NO: 8227 - DNA, 20 bp, Artificial Sequence
  Synthetic oligonucleotide; TAG chr11 5222421 5222440 5222437 +
gtgagccaccgctcccagcc

SEQ ID NO: 8228 - DNA, 20 bp, Artificial Sequence
  Synthetic oligonucleotide; TAG chr11 5222474 5222493 5222490 +
tgaatttatttctcccttga

SEQ ID NO: 8229 - DNA, 20 bp, Artificial Sequence
  Synthetic oligonucleotide; TGG chr11 5222486 5222505 5222502 +
tcccttgatagtttctactt

SEQ ID NO: 8230 - DNA, 20 bp, Artificial Sequence
  Synthetic oligonucleotide; GGG chr11 5222487 5222506 5222503 +
cccttgatagtttctacttt

SEQ ID NO: 8231 - DNA, 20 bp, Artificial Sequence
  Synthetic oligonucleotide; CAG chr11 5222505 5222524 5222521 +
ttgggttgataattaaataa

SEQ ID NO: 8232 - DNA, 20 bp, Artificial Sequence
  Synthetic oligonucleotide; AAG chr11 5222518 5222537 5222534 +
taaataacagtgttatctct

SEQ ID NO: 8233 - DNA, 20 bp, Artificial Sequence
  Synthetic oligonucleotide; TAG chr11 5222552 5222571 5222568 +
gtcttcccatatttttattc

SEQ ID NO: 8234 - DNA, 20 bp, Artificial Sequence
  Synthetic oligonucleotide; TGG chr11 5222604 5222623 5222620 +
cctaattgtgtaatcgattg

SEQ ID NO: 8235 - DNA, 20 bp, Artificial Sequence
  Synthetic oligonucleotide; CAG chr11 5222613 5222632 5222629 +
gtaatcgattgtggtatatg

SEQ ID NO: 8236 - DNA, 20 bp, Artificial Sequence
  Synthetic oligonucleotide; AAG chr11 5222618 5222637 5222634 +
cgattgtggtatatgcagtt

SEQ ID NO: 8237 - DNA, 20 bp, Artificial Sequence
  Synthetic oligonucleotide; AAG chr11 5222644 5222663 5222660 +
ttcactttactcttttcaaa

SEQ ID NO: 8238 - DNA, 20 bp, Artificial Sequence
  Synthetic oligonucleotide; TAG chr11 5222649 5222668 5222665 +
tttactcttttcaaaaagta

SEQ ID NO: 8239 - DNA, 20 bp, Artificial Sequence
  Synthetic oligonucleotide; AAG chr11 5222682 5222701 5222698 +
actgtttgttttttatttcc

SEQ ID NO: 8240 - DNA, 20 bp, Artificial Sequence
  Synthetic oligonucleotide; AAG chr11 5222695 5222714 5222711 +
tatttccaagctaaatttaa

SEQ ID NO: 8241 - DNA, 20 bp, Artificial Sequence
  Synthetic oligonucleotide; TAG chr11 5222729 5222748 5222745 +
tatatcacattattatattt

SEQ ID NO: 8242 - DNA, 20 bp, Artificial Sequence
  Synthetic oligonucleotide; GAG chr11 5222733 5222752 5222749 +
tcacattattatattttagt

SEQ ID NO: 8243 - DNA, 20 bp, Artificial Sequence
  Synthetic oligonucleotide; TAG chr11 5222739 5222758 5222755 +
tattatattttagtgagatt

SEQ ID NO: 8244 - DNA, 20 bp, Artificial Sequence
  Synthetic oligonucleotide; TGG chr11 5222746 5222765 5222762 +
ttttagtgagatttagtttt

SEQ ID NO: 8245 - DNA, 20 bp, Artificial Sequence
  Synthetic oligonucleotide; GAG chr11 5222782 5222801 5222798 +
ccactatcttacttacacat

SEQ ID NO: 8246 - DNA, 20 bp, Artificial Sequence
  Synthetic oligonucleotide; TGG chr11 5222785 5222804 5222801 +
ctatcttacttacacatgag

SEQ ID NO: 8247 - DNA, 20 bp, Artificial Sequence
  Synthetic oligonucleotide; TAG chr11 5222807 5222826 5222823 +
gtattaatttaacatgattt

SEQ ID NO: 8248 - DNA, 20 bp, Artificial Sequence
  Synthetic oligonucleotide; AAG chr11 5222814 5222833 5222830 +
tttaacatgattttagaatg

SEQ ID NO: 8249 - DNA, 20 bp, Artificial Sequence
  Synthetic oligonucleotide; AAG chr11 5222823 5222842 5222839 +
attttagaatgaagaaaatg

SEQ ID NO: 8250 - DNA, 20 bp, Artificial Sequence
  Synthetic oligonucleotide; TAG chr11 5222833 5222852 5222849 +
gaagaaaatgaagccatttt

SEQ ID NO: 8251 - DNA, 20 bp, Artificial Sequence
  Synthetic oligonucleotide; AAG chr11 5222845 5222864 5222861 +
gccatttttagataaaccaa

SEQ ID NO: 8252 - DNA, 20 bp, Artificial Sequence
  Synthetic oligonucleotide; CAG chr11 5222862 5222881 5222878 +
caaaagtaacaatgtatttc

SEQ ID NO: 8253 - DNA, 20 bp, Artificial Sequence
  Synthetic oligonucleotide; CAG chr11 5222865 5222884 5222881 +
aagtaacaatgtatttccag

SEQ ID NO: 8254 - DNA, 20 bp, Artificial Sequence
  Synthetic oligonucleotide; AAG chr11 5222869 5222888 5222885 +
aacaatgtatttccagcaga

SEQ ID NO: 8255 - DNA, 20 bp, Artificial Sequence
  Synthetic oligonucleotide; GAG chr11 5222871 5222890 5222887 +
caatgtatttccagcagaaa

SEQ ID NO: 8256 - DNA, 20 bp, Artificial Sequence
  Synthetic oligonucleotide; AAG chr11 5222882 5222901 5222898 +
cagcagaaagagataatatt

SEQ ID NO: 8257 - DNA, 20 bp, Artificial Sequence
  Synthetic oligonucleotide; AGG chr11 5222883 5222902 5222899 +
agcagaaagagataatatta

SEQ ID NO: 8258 - DNA, 20 bp, Artificial Sequence
  Synthetic oligonucleotide; CAG chr11 5222891 5222910 5222907 +
gagataatattaaggataat

SEQ ID NO: 8259 - DNA, 20 bp, Artificial Sequence
  Synthetic oligonucleotide; TAG chr11 5222901 5222920 5222917 +
taaggataatcagaaaaaaa

SEQ ID NO: 8260 - DNA, 20 bp, Artificial Sequence
  Synthetic oligonucleotide; TAG chr11 5222912 5222931 5222928 +
agaaaaaaatagaataaact

SEQ ID NO: 8261 - DNA, 20 bp, Artificial Sequence
  Synthetic oligonucleotide; GAG chr11 5222914 5222933 5222930 +
aaaaaaatagaataaactta

SEQ ID NO: 8262 - DNA, 20 bp, Artificial Sequence
  Synthetic oligonucleotide; GAG chr11 5222916 5222935 5222932 +
aaaaatagaataaacttaga

SEQ ID NO: 8263 - DNA, 20 bp, Artificial Sequence
  Synthetic oligonucleotide; TAG chr11 5222924 5222943 5222940 +
aataaacttagagagaatgt

SEQ ID NO: 8264 - DNA, 20 bp, Artificial Sequence
  Synthetic oligonucleotide; AAG chr11 5222932 5222951 5222948 +
tagagagaatgttagaaatg

SEQ ID NO: 8265 - DNA, 20 bp, Artificial Sequence
  Synthetic oligonucleotide; AAG chr11 5222937 5222956 5222953 +
agaatgttagaaatgaagaa

SEQ ID NO: 8266 - DNA, 20 bp, Artificial Sequence
  Synthetic oligonucleotide; AAG chr11 5222961 5222980 5222977 +
atgcaaaacattttgtacat

SEQ ID NO: 8267 - DNA, 20 bp, Artificial Sequence
  Synthetic oligonucleotide; TAG chr11 5222997 5223016 5223013 +
tcactatttaataataacac

SEQ ID NO: 8268 - DNA, 20 bp, Artificial Sequence
  Synthetic oligonucleotide; TAG chr11 5223006 5223025 5223022 +
aataataacactagaaaatc

SEQ ID NO: 8269 - DNA, 20 bp, Artificial Sequence
  Synthetic oligonucleotide; AGG chr11 5223007 5223026 5223023 +
ataataacactagaaaatct

SEQ ID NO: 8270 - DNA, 20 bp, Artificial Sequence
  Synthetic oligonucleotide; GGG chr11 5223008 5223027 5223024 +
taataacactagaaaatcta

SEQ ID NO: 8271 - DNA, 20 bp, Artificial Sequence
  Synthetic oligonucleotide; GAG chr11 5223010 5223029 5223026 +
ataacactagaaaatctagg

SEQ ID NO: 8272 - DNA, 20 bp, Artificial Sequence
  Synthetic oligonucleotide; TAG chr11 5223055 5223074 5223071 +
aatatatatatatataatta

SEQ ID NO: 8273 - DNA, 20 bp, Artificial Sequence
  Synthetic oligonucleotide; TGG chr11 5223060 5223079 5223076 +
atatatatataattatagat

SEQ ID NO: 8274 - DNA, 20 bp, Artificial Sequence
  Synthetic oligonucleotide; GGG chr11 5223061 5223080 5223077 +
tatatatataattatagatt

SEQ ID NO: 8275 - DNA, 20 bp, Artificial Sequence
  Synthetic oligonucleotide; AAG chr11 5223064 5223083 5223080 +
atatataattatagattggg

SEQ ID NO: 8276 - DNA, 20 bp, Artificial Sequence
  Synthetic oligonucleotide; AGG chr11 5223065 5223084 5223081 +
tatataattatagattggga

SEQ ID NO: 8277 - DNA, 20 bp, Artificial Sequence
  Synthetic oligonucleotide; GGG chr11 5223066 5223085 5223082 +
atataattatagattgggaa

SEQ ID NO: 8278 - DNA, 20 bp, Artificial Sequence
  Synthetic oligonucleotide; GGG chr11 5223067 5223086 5223083 +
tataattatagattgggaag

SEQ ID NO: 8279 - DNA, 20 bp, Artificial Sequence
  Synthetic oligonucleotide; AAG chr11 5223076 5223095 5223092 +
agattgggaaggggaaaatg

SEQ ID NO: 8280 - DNA, 20 bp, Artificial Sequence
  Synthetic oligonucleotide; AAG chr11 5223082 5223101 5223098 +
ggaaggggaaaatgaagata

SEQ ID NO: 8281 - DNA, 20 bp, Artificial Sequence
  Synthetic oligonucleotide; TGG chr11 5223108 5223127 5223124 +
taaaatttattgtattgttt

SEQ ID NO: 8282 - DNA, 20 bp, Artificial Sequence
  Synthetic oligonucleotide; AAG chr11 5223113 5223132 5223129 +
tttattgtattgttttggaa

SEQ ID NO: 8283 - DNA, 20 bp, Artificial Sequence
  Synthetic oligonucleotide; GAG chr11 5223115 5223134 5223131 +
tattgtattgttttggaaaa

SEQ ID NO: 8284 - DNA, 20 bp, Artificial Sequence
  Synthetic oligonucleotide; CAG chr11 5223122 5223141 5223138 +
ttgttttggaaaagagtaaa

SEQ ID NO: 8285 - DNA, 20 bp, Artificial Sequence
  Synthetic oligonucleotide; TGG chr11 5223130 5223149 5223146 +
gaaaagagtaaacagtcaaa

SEQ ID NO: 8286 - DNA, 20 bp, Artificial Sequence
  Synthetic oligonucleotide; AAG chr11 5223153 5223172 5223169 +
atatttgtatctgaaaaatc

SEQ ID NO: 8287 - DNA, 20 bp, Artificial Sequence
  Synthetic oligonucleotide; AAG chr11 5223174 5223193 5223190 +
agaatgcaattctaatcatc

SEQ ID NO: 8288 - DNA, 20 bp, Artificial Sequence
  Synthetic oligonucleotide; TAG chr11 5223195 5223214 5223211 +
agatgcatttttttattttt

SEQ ID NO: 8289 - DNA, 20 bp, Artificial Sequence
  Synthetic oligonucleotide; GAG chr11 5223249 5223268 5223265 +
tattattcttcaactttatt

SEQ ID NO: 8290 - DNA, 20 bp, Artificial Sequence
  Synthetic oligonucleotide; AGG chr11 5223250 5223269 5223266 +
attattcttcaactttattg

SEQ ID NO: 8291 - DNA, 20 bp, Artificial Sequence
  Synthetic oligonucleotide; AAG chr11 5223284 5223303 5223300 +
aataaaaattgtatatattt

SEQ ID NO: 8292 - DNA, 20 bp, Artificial Sequence
  Synthetic oligonucleotide; AGG chr11 5223285 5223304 5223301 +
ataaaaattgtatatattta

SEQ ID NO: 8293 - DNA, 20 bp, Artificial Sequence
  Synthetic oligonucleotide; AAG chr11 5223342 5223361 5223358 +
gtgaaatgattaccacaatc

SEQ ID NO: 8294 - DNA, 20 bp, Artificial Sequence
  Synthetic oligonucleotide; TAG chr11 5223371 5223390 5223387 +
aacatacccattatctcaca

SEQ ID NO: 8295 - DNA, 20 bp, Artificial Sequence
  Synthetic oligonucleotide; TGG chr11 5223388 5223407 5223404 +
acatagttacctttttcttg

SEQ ID NO: 8296 - DNA, 20 bp, Artificial Sequence
  Synthetic oligonucleotide; AAG chr11 5223402 5223421 5223418 +
ttcttgtggtaaatgctttt

SEQ ID NO: 8297 - DNA, 20 bp, Artificial Sequence
  Synthetic oligonucleotide; CGG chr11 5223414 5223433 5223430 +
atgcttttaagatctactct

SEQ ID NO: 8298 - DNA, 20 bp, Artificial Sequence
  Synthetic oligonucleotide; CAG chr11 5223418 5223437 5223434 +
ttttaagatctactctcggc

SEQ ID NO: 8299 - DNA, 20 bp, Artificial Sequence
  Synthetic oligonucleotide; AGG chr11 5223419 5223438 5223435 +
tttaagatctactctcggcc

SEQ ID NO: 8300 - DNA, 20 bp, Artificial Sequence
  Synthetic oligonucleotide; CGG chr11 5223424 5223443 5223440 +
gatctactctcggccaggcc

SEQ ID NO: 8301 - DNA, 20 bp, Artificial Sequence
  Synthetic oligonucleotide; TGG chr11 5223427 5223446 5223443 +
ctactctcggccaggcccgg

SEQ ID NO: 8302 - DNA, 20 bp, Artificial Sequence
  Synthetic oligonucleotide; CAG chr11 5223446 5223465 5223462 +
gtggctcacgcctgtaatcc

SEQ ID NO: 8303 - DNA, 20 bp, Artificial Sequence
  Synthetic oligonucleotide; TGG chr11 5223454 5223473 5223470 +
cgcctgtaatcccagccctt

SEQ ID NO: 8304 - DNA, 20 bp, Artificial Sequence
  Synthetic oligonucleotide; GGG chr11 5223455 5223474 5223471 +
gcctgtaatcccagcccttt

SEQ ID NO: 8305 - DNA, 20 bp, Artificial Sequence
  Synthetic oligonucleotide; TGG chr11 5223458 5223477 5223474 +
tgtaatcccagccctttggg

SEQ ID NO: 8306 - DNA, 20 bp, Artificial Sequence
  Synthetic oligonucleotide; GAG chr11 5223463 5223482 5223479 +
tcccagccctttgggtggcc

SEQ ID NO: 8307 - DNA, 20 bp, Artificial Sequence
  Synthetic oligonucleotide; AGG chr11 5223464 5223483 5223480 +
cccagccctttgggtggccg

SEQ ID NO: 8308 - DNA, 20 bp, Artificial Sequence
  Synthetic oligonucleotide; CAG chr11 5223467 5223486 5223483 +
agccctttgggtggccgagg

SEQ ID NO: 8309 - DNA, 20 bp, Artificial Sequence
  Synthetic oligonucleotide; AGG chr11 5223468 5223487 5223484 +
gccctttgggtggccgaggc

SEQ ID NO: 8310 - DNA, 20 bp, Artificial Sequence
  Synthetic oligonucleotide; CGG chr11 5223471 5223490 5223487 +
ctttgggtggccgaggcagg

SEQ ID NO: 8311 - DNA, 20 bp, Artificial Sequence
  Synthetic oligonucleotide; CAG chr11 5223476 5223495 5223492 +
ggtggccgaggcaggcggat

SEQ ID NO: 8312 - DNA, 20 bp, Artificial Sequence
  Synthetic oligonucleotide; TGG chr11 5223490 5223509 5223506 +
gcggatcagcctgaccaaca

SEQ ID NO: 8313 - DNA, 20 bp, Artificial Sequence
  Synthetic oligonucleotide; GAG chr11 5223492 5223511 5223508 +
ggatcagcctgaccaacatg

SEQ ID NO: 8314 - DNA, 20 bp, Artificial Sequence
  Synthetic oligonucleotide; TAG chr11 5223524 5223543 5223540 +
ctctactaaaaatacaaaat

SEQ ID NO: 8315 - DNA, 20 bp, Artificial Sequence
  Synthetic oligonucleotide; TGG chr11 5223528 5223547 5223544 +
actaaaaatacaaaattagc

SEQ ID NO: 8316 - DNA, 20 bp, Artificial Sequence
  Synthetic oligonucleotide; GGG chr11 5223529 5223548 5223545 +
ctaaaaatacaaaattagct

SEQ ID NO: 8317 - DNA, 20 bp, Artificial Sequence
  Synthetic oligonucleotide; TGG chr11 5223534 5223553 5223550 +
aatacaaaattagctgggca

SEQ ID NO: 8318 - DNA, 20 bp, Artificial Sequence
  Synthetic oligonucleotide; CAG chr11 5223556 5223575 5223572 +
gtgtcgcatgcctgtaatcc

SEQ ID NO: 8319 - DNA, 20 bp, Artificial Sequence
  Synthetic oligonucleotide; CGG chr11 5223564 5223583 5223580 +
tgcctgtaatcccagctact

SEQ ID NO: 8320 - DNA, 20 bp, Artificial Sequence
  Synthetic oligonucleotide; GGG chr11 5223565 5223584 5223581 +
gcctgtaatcccagctactc

SEQ ID NO: 8321 - DNA, 20 bp, Artificial Sequence
  Synthetic oligonucleotide; GAG chr11 5223567 5223586 5223583 +
ctgtaatcccagctactcgg

SEQ ID NO: 8322 - DNA, 20 bp, Artificial Sequence
  Synthetic oligonucleotide; AGG chr11 5223568 5223587 5223584 +
tgtaatcccagctactcggg

SEQ ID NO: 8323 - DNA, 20 bp, Artificial Sequence
  Synthetic oligonucleotide; GAG chr11 5223573 5223592 5223589 +
tcccagctactcgggaggct

SEQ ID NO: 8324 - DNA, 20 bp, Artificial Sequence
  Synthetic oligonucleotide; AGG chr11 5223574 5223593 5223590 +
cccagctactcgggaggctg

SEQ ID NO: 8325 - DNA, 20 bp, Artificial Sequence
  Synthetic oligonucleotide; CAG chr11 5223577 5223596 5223593 +
agctactcgggaggctgagg

SEQ ID NO: 8326 - DNA, 20 bp, Artificial Sequence
  Synthetic oligonucleotide; AGG chr11 5223578 5223597 5223594 +
gctactcgggaggctgaggc

SEQ ID NO: 8327 - DNA, 20 bp, Artificial Sequence
  Synthetic oligonucleotide; GAG chr11 5223580 5223599 5223596 +
tactcgggaggctgaggcag

SEQ ID NO: 8328 - DNA, 20 bp, Artificial Sequence
  Synthetic oligonucleotide; CAG chr11 5223596 5223615 5223612 +
gcaggagatttgcttgaacc

SEQ ID NO: 8329 - DNA, 20 bp, Artificial Sequence
  Synthetic oligonucleotide; AGG chr11 5223597 5223616 5223613 +
caggagatttgcttgaaccc

SEQ ID NO: 8330 - DNA, 20 bp, Artificial Sequence
  Synthetic oligonucleotide; GAG chr11 5223599 5223618 5223615 +
ggagatttgcttgaacccag

SEQ ID NO: 8331 - DNA, 20 bp, Artificial Sequence
  Synthetic oligonucleotide; AGG chr11 5223600 5223619 5223616 +
gagatttgcttgaacccagg

SEQ ID NO: 8332 - DNA, 20 bp, Artificial Sequence
  Synthetic oligonucleotide; CGG chr11 5223603 5223622 5223619 +
atttgcttgaacccaggagg

SEQ ID NO: 8333 - DNA, 20 bp, Artificial Sequence
  Synthetic oligonucleotide; GAG chr11 5223605 5223624 5223621 +
ttgcttgaacccaggaggcg

SEQ ID NO: 8334 - DNA, 20 bp, Artificial Sequence
  Synthetic oligonucleotide; AGG chr11 5223606 5223625 5223622 +
tgcttgaacccaggaggcgg

SEQ ID NO: 8335 - DNA, 20 bp, Artificial Sequence
  Synthetic oligonucleotide; CAG chr11 5223612 5223631 5223628 +
aacccaggaggcggaggttg

SEQ ID NO: 8336 - DNA, 20 bp, Artificial Sequence
  Synthetic oligonucleotide; GAG chr11 5223616 5223635 5223632 +
caggaggcggaggttgcagt

SEQ ID NO: 8337 - DNA, 20 bp, Artificial Sequence
  Synthetic oligonucleotide; AAG chr11 5223621 5223640 5223637 +
ggcggaggttgcagtgagcc

SEQ ID NO: 8338 - DNA, 20 bp, Artificial Sequence
  Synthetic oligonucleotide; CAG chr11 5223641 5223660 5223657 +
aagatcttgccattgcactc

SEQ ID NO: 8339 - DNA, 20 bp, Artificial Sequence
  Synthetic oligonucleotide; TGG chr11 5223646 5223665 5223662 +
cttgccattgcactccagcc

SEQ ID NO: 8340 - DNA, 20 bp, Artificial Sequence
  Synthetic oligonucleotide; AAG chr11 5223654 5223673 5223670 +
tgcactccagcctggacaac

SEQ ID NO: 8341 - DNA, 20 bp, Artificial Sequence
  Synthetic oligonucleotide; GAG chr11 5223656 5223675 5223672 +
cactccagcctggacaacaa

SEQ ID NO: 8342 - DNA, 20 bp, Artificial Sequence
  Synthetic oligonucleotide; CAG chr11 5223719 5223738 5223735 +
gcaaattttaaatatactta

SEQ ID NO: 8343 - DNA, 20 bp, Artificial Sequence
  Synthetic oligonucleotide; CAG chr11 5223734 5223753 5223750 +
acttacagtacaattaacta

SEQ ID NO: 8344 - DNA, 20 bp, Artificial Sequence
  Synthetic oligonucleotide; TAG chr11 5223753 5223772 5223769 +
acagtcacgatgctgtacat

SEQ ID NO: 8345 - DNA, 20 bp, Artificial Sequence
  Synthetic oligonucleotide; TAG chr11 5223761 5223780 5223777 +
gatgctgtacattagatatc

SEQ ID NO: 8346 - DNA, 20 bp, Artificial Sequence
  Synthetic oligonucleotide; GAG chr11 5223803 5223822 5223819 +
actgaaattttatacccttt

SEQ ID NO: 8347 - DNA, 20 bp, Artificial Sequence
  Synthetic oligonucleotide; TAG chr11 5223809 5223828 5223825 +
attttataccctttgagtaa

SEQ ID NO: 8348 - DNA, 20 bp, Artificial Sequence
  Synthetic oligonucleotide; TGG chr11 5223839 5223858 5223855 +
attctcccacccccaacccc

SEQ ID NO: 8349 - DNA, 20 bp, Artificial Sequence
  Synthetic oligonucleotide; GAG chr11 5223870 5223889 5223886 +
cctctactgtctgtttccat

SEQ ID NO: 8350 - DNA, 20 bp, Artificial Sequence
  Synthetic oligonucleotide; GAG chr11 5223872 5223891 5223888 +
tctactgtctgtttccatga

SEQ ID NO: 8351 - DNA, 20 bp, Artificial Sequence
  Synthetic oligonucleotide; GAG chr11 5223898 5223917 5223914 +
cttttttatgtttcacatat

SEQ ID NO: 8352 - DNA, 20 bp, Artificial Sequence
  Synthetic oligonucleotide; AAG chr11 5223902 5223921 5223918 +
tttatgtttcacatatgagc

SEQ ID NO: 8353 - DNA, 20 bp, Artificial Sequence
  Synthetic oligonucleotide; AGG chr11 5223903 5223922 5223919 +
ttatgtttcacatatgagca

SEQ ID NO: 8354 - DNA, 20 bp, Artificial Sequence
  Synthetic oligonucleotide; TAG chr11 5223911 5223930 5223927 +
cacatatgagcaaggttgtg

SEQ ID NO: 8355 - DNA, 20 bp, Artificial Sequence
  Synthetic oligonucleotide; CAG chr11 5223931 5223950 5223947 +
tagtatttgtctttttgtgt

SEQ ID NO: 8356 - DNA, 20 bp, Artificial Sequence
  Synthetic oligonucleotide; AGG chr11 5223932 5223951 5223948 +
agtatttgtctttttgtgtc

SEQ ID NO: 8357 - DNA, 20 bp, Artificial Sequence
  Synthetic oligonucleotide; TAG chr11 5223946 5223965 5223962 +
tgtgtcaggcttatttttct

SEQ ID NO: 8358 - DNA, 20 bp, Artificial Sequence
  Synthetic oligonucleotide; CAG chr11 5223961 5223980 5223977 +
tttcttagttttacatcctc

SEQ ID NO: 8359 - DNA, 20 bp, Artificial Sequence
  Synthetic oligonucleotide; AGG chr11 5223962 5223981 5223978 +
ttcttagttttacatcctcc

SEQ ID NO: 8360 - DNA, 20 bp, Artificial Sequence
  Synthetic oligonucleotide; TGG chr11 5223985 5224004 5224001 +
ttcatcaattctgccataaa

SEQ ID NO: 8361 - DNA, 20 bp, Artificial Sequence
  Synthetic oligonucleotide; CAG chr11 5223988 5224007 5224004 +
atcaattctgccataaatgg

SEQ ID NO: 8362 - DNA, 20 bp, Artificial Sequence
  Synthetic oligonucleotide; AGG chr11 5223989 5224008 5224005 +
tcaattctgccataaatggc

SEQ ID NO: 8363 - DNA, 20 bp, Artificial Sequence
  Synthetic oligonucleotide; TGG chr11 5224073 5224092 5224089 +
tctgtgtttcttatatattt

SEQ ID NO: 8364 - DNA, 20 bp, Artificial Sequence
  Synthetic oligonucleotide; AAG chr11 5224094 5224113 5224110 +
ggatattaaccaaaatattt

SEQ ID NO: 8365 - DNA, 20 bp, Artificial Sequence
  Synthetic oligonucleotide; TGG chr11 5224104 5224123 5224120 +
caaaatatttaagaaatatt

SEQ ID NO: 8366 - DNA, 20 bp, Artificial Sequence
  Synthetic oligonucleotide; TGG chr11 5224127 5224146 5224143 +
tttgcaaatatgccatttca

SEQ ID NO: 8367 - DNA, 20 bp, Artificial Sequence
  Synthetic oligonucleotide; TGG chr11 5224166 5224185 5224182 +
tcattgttttgttttttgtg

SEQ ID NO: 8368 - DNA, 20 bp, Artificial Sequence
  Synthetic oligonucleotide; TAG chr11 5224177 5224196 5224193 +
ttttttgtgtggaaattttt

SEQ ID NO: 8369 - DNA, 20 bp, Artificial Sequence
  Synthetic oligonucleotide; TAG chr11 5224187 5224206 5224203 +
ggaaattttttagtttgatg

SEQ ID NO: 8370 - DNA, 20 bp, Artificial Sequence
  Synthetic oligonucleotide; CGG chr11 5224247 5224266 5224263 +
ctcatatcaaattcaaaaaa

SEQ ID NO: 8371 - DNA, 20 bp, Artificial Sequence
  Synthetic oligonucleotide; TAG chr11 5224265 5224284 5224281 +
aacggctgcaacgtgaatat

SEQ ID NO: 8372 - DNA, 20 bp, Artificial Sequence
  Synthetic oligonucleotide; TGG chr11 5224302 5224321 5224318 +
gatttctttaaaaattttta

SEQ ID NO: 8373 - DNA, 20 bp, Artificial Sequence
  Synthetic oligonucleotide; TAG chr11 5224308 5224327 5224324 +
tttaaaaatttttatggttt

SEQ ID NO: 8374 - DNA, 20 bp, Artificial Sequence
  Synthetic oligonucleotide; AGG chr11 5224309 5224328 5224325 +
ttaaaaatttttatggtttt

SEQ ID NO: 8375 - DNA, 20 bp, Artificial Sequence
  Synthetic oligonucleotide; TAG chr11 5224315 5224334 5224331 +
atttttatggttttaggtct

SEQ ID NO: 8376 - DNA, 20 bp, Artificial Sequence
  Synthetic oligonucleotide; TGG chr11 5224355 5224374 5224371 +
ttcaaatttatttttgttta

SEQ ID NO: 8377 - DNA, 20 bp, Artificial Sequence
  Synthetic oligonucleotide; AAG chr11 5224361 5224380 5224377 +
tttatttttgtttatggtgt

SEQ ID NO: 8378 - DNA, 20 bp, Artificial Sequence
  Synthetic oligonucleotide; AAG chr11 5224366 5224385 5224382 +
ttttgtttatggtgtaagac

SEQ ID NO: 8379 - DNA, 20 bp, Artificial Sequence
  Synthetic oligonucleotide; AGG chr11 5224367 5224386 5224383 +
tttgtttatggtgtaagaca

SEQ ID NO: 8380 - DNA, 20 bp, Artificial Sequence
  Synthetic oligonucleotide; GGG chr11 5224368 5224387 5224384 +
ttgtttatggtgtaagacaa

SEQ ID NO: 8381 - DNA, 20 bp, Artificial Sequence
  Synthetic oligonucleotide; GAG chr11 5224390 5224409 5224406 +
gtctgatttcatttcatttt

SEQ ID NO: 8382 - DNA, 20 bp, Artificial Sequence
  Synthetic oligonucleotide; AGG chr11 5224391 5224410 5224407 +
tctgatttcatttcattttg

SEQ ID NO: 8383 - DNA, 20 bp, Artificial Sequence
  Synthetic oligonucleotide; GGG chr11 5224392 5224411 5224408 +
ctgatttcatttcattttga

SEQ ID NO: 8384 - DNA, 20 bp, Artificial Sequence
  Synthetic oligonucleotide; CAG chr11 5224471 5224490 5224487 +
ctgattatatgccttgattt

SEQ ID NO: 8385 - DNA, 20 bp, Artificial Sequence
  Synthetic oligonucleotide; TAG chr11 5224486 5224505 5224502 +
gatttcagaatcttgccaac

SEQ ID NO: 8386 - DNA, 20 bp, Artificial Sequence
  Synthetic oligonucleotide; CAG chr11 5224492 5224511 5224508 +
agaatcttgccaactagatt

SEQ ID NO: 8387 - DNA, 20 bp, Artificial Sequence
  Synthetic oligonucleotide; TGG chr11 5224503 5224522 5224519 +
aactagattcagaatttgac

SEQ ID NO: 8388 - DNA, 20 bp, Artificial Sequence
  Synthetic oligonucleotide; GGG chr11 5224504 5224523 5224520 +
actagattcagaatttgact

SEQ ID NO: 8389 - DNA, 20 bp, Artificial Sequence
  Synthetic oligonucleotide; GAG chr11 5224506 5224525 5224522 +
tagattcagaatttgactgg

SEQ ID NO: 8390 - DNA, 20 bp, Artificial Sequence
  Synthetic oligonucleotide; GAG chr11 5224508 5224527 5224524 +
gattcagaatttgactggga

SEQ ID NO: 8391 - DNA, 20 bp, Artificial Sequence
  Synthetic oligonucleotide; GAG chr11 5224510 5224529 5224526 +
ttcagaatttgactgggaga

SEQ ID NO: 8392 - DNA, 20 bp, Artificial Sequence
  Synthetic oligonucleotide; AGG chr11 5224511 5224530 5224527 +
tcagaatttgactgggagag

SEQ ID NO: 8393 - DNA, 20 bp, Artificial Sequence
  Synthetic oligonucleotide; AAG chr11 5224516 5224535 5224532 +
atttgactgggagagaggac

SEQ ID NO: 8394 - DNA, 20 bp, Artificial Sequence
  Synthetic oligonucleotide; AGG chr11 5224517 5224536 5224533 +
tttgactgggagagaggaca

SEQ ID NO: 8395 - DNA, 20 bp, Artificial Sequence
  Synthetic oligonucleotide; GAG chr11 5224527 5224546 5224543 +
agagaggacaaggaccactt

SEQ ID NO: 8396 - DNA, 20 bp, Artificial Sequence
  Synthetic oligonucleotide; CAG chr11 5224546 5224565 5224562 +
tgagactcatattttatttc

SEQ ID NO: 8397 - DNA, 20 bp, Artificial Sequence
  Synthetic oligonucleotide; TAG chr11 5224553 5224572 5224569 +
catattttatttccagaatc

SEQ ID NO: 8398 - DNA, 20 bp, Artificial Sequence
  Synthetic oligonucleotide; TAG chr11 5224568 5224587 5224584 +
gaatctagcatctacctacc

SEQ ID NO: 8399 - DNA, 20 bp, Artificial Sequence
  Synthetic oligonucleotide; AGG chr11 5224569 5224588 5224585 +
aatctagcatctacctacct

SEQ ID NO: 8400 - DNA, 20 bp, Artificial Sequence
  Synthetic oligonucleotide; AAG chr11 5224580 5224599 5224596 +
tacctacctaggtattgaat

SEQ ID NO: 8401 - DNA, 20 bp, Artificial Sequence
  Synthetic oligonucleotide; AAG chr11 5224590 5224609 5224606 +
ggtattgaataagaaaaatg

SEQ ID NO: 8402 - DNA, 20 bp, Artificial Sequence
  Synthetic oligonucleotide; AAG chr11 5224595 5224614 5224611 +
tgaataagaaaaatgaagtt

SEQ ID NO: 8403 - DNA, 20 bp, Artificial Sequence
  Synthetic oligonucleotide; AGG chr11 5224596 5224615 5224612 +
gaataagaaaaatgaagtta

SEQ ID NO: 8404 - DNA, 20 bp, Artificial Sequence
  Synthetic oligonucleotide; TGG chr11 5224599 5224618 5224615 +
taagaaaaatgaagttaagg

SEQ ID NO: 8405 - DNA, 20 bp, Artificial Sequence
  Synthetic oligonucleotide; TGG chr11 5224606 5224625 5224622 +
aatgaagttaaggtggttga

SEQ ID NO: 8406 - DNA, 20 bp, Artificial Sequence
  Synthetic oligonucleotide; CAG chr11 5224629 5224648 5224645 +
taacactatgctaataactg

SEQ ID NO: 8407 - DNA, 20 bp, Artificial Sequence
  Synthetic oligonucleotide; GAG chr11 5224631 5224650 5224647 +
acactatgctaataactgca

SEQ ID NO: 8408 - DNA, 20 bp, Artificial Sequence
  Synthetic oligonucleotide; CAG chr11 5224635 5224654 5224651 +
tatgctaataactgcagagc

SEQ ID NO: 8409 - DNA, 20 bp, Artificial Sequence
  Synthetic oligonucleotide; AAG chr11 5224638 5224657 5224654 +
gctaataactgcagagccag

SEQ ID NO: 8410 - DNA, 20 bp, Artificial Sequence
  Synthetic oligonucleotide; AAG chr11 5224647 5224666 5224663 +
tgcagagccagaagcaccat

SEQ ID NO: 8411 - DNA, 20 bp, Artificial Sequence
  Synthetic oligonucleotide; AGG chr11 5224648 5224667 5224664 +
gcagagccagaagcaccata

SEQ ID NO: 8412 - DNA, 20 bp, Artificial Sequence
  Synthetic oligonucleotide; GGG chr11 5224649 5224668 5224665 +
cagagccagaagcaccataa

SEQ ID NO: 8413 - DNA, 20 bp, Artificial Sequence
  Synthetic oligonucleotide; AAG chr11 5224659 5224678 5224675 +
agcaccataagggacatgat

SEQ ID NO: 8414 - DNA, 20 bp, Artificial Sequence
  Synthetic oligonucleotide; AGG chr11 5224660 5224679 5224676 +
gcaccataagggacatgata

SEQ ID NO: 8415 - DNA, 20 bp, Artificial Sequence
  Synthetic oligonucleotide; GGG chr11 5224661 5224680 5224677 +
caccataagggacatgataa

SEQ ID NO: 8416 - DNA, 20 bp, Artificial Sequence
  Synthetic oligonucleotide; GAG chr11 5224663 5224682 5224679 +
ccataagggacatgataagg

SEQ ID NO: 8417 - DNA, 20 bp, Artificial Sequence
  Synthetic oligonucleotide; CAG chr11 5224667 5224686 5224683 +
aagggacatgataagggagc

SEQ ID NO: 8418 - DNA, 20 bp, Artificial Sequence
  Synthetic oligonucleotide; CAG chr11 5224670 5224689 5224686 +
ggacatgataagggagccag

SEQ ID NO: 8419 - DNA, 20 bp, Artificial Sequence
  Synthetic oligonucleotide; GAG chr11 5224712 5224731 5224728 +
atgctaatcttaaacatcct

SEQ ID NO: 8420 - DNA, 20 bp, Artificial Sequence
  Synthetic oligonucleotide; AGG chr11 5224713 5224732 5224729 +
tgctaatcttaaacatcctg

SEQ ID NO: 8421 - DNA, 20 bp, Artificial Sequence
  Synthetic oligonucleotide; AAG chr11 5224716 5224735 5224732 +
taatcttaaacatcctgagg

SEQ ID NO: 8422 - DNA, 20 bp, Artificial Sequence
  Synthetic oligonucleotide; TGG chr11 5224721 5224740 5224737 +
ttaaacatcctgaggaagaa

SEQ ID NO: 8423 - DNA, 20 bp, Artificial Sequence
  Synthetic oligonucleotide; GGG chr11 5224722 5224741 5224738 +
taaacatcctgaggaagaat

SEQ ID NO: 8424 - DNA, 20 bp, Artificial Sequence
  Synthetic oligonucleotide; TGG chr11 5224734 5224753 5224750 +
ggaagaatgggacttccatt

SEQ ID NO: 8425 - DNA, 20 bp, Artificial Sequence
  Synthetic oligonucleotide; GGG chr11 5224735 5224754 5224751 +
gaagaatgggacttccattt

SEQ ID NO: 8426 - DNA, 20 bp, Artificial Sequence
  Synthetic oligonucleotide; GGG chr11 5224736 5224755 5224752 +
aagaatgggacttccatttg

SEQ ID NO: 8427 - DNA, 20 bp, Artificial Sequence
  Synthetic oligonucleotide; TGG chr11 5224739 5224758 5224755 +
aatgggacttccatttgggg

SEQ ID NO: 8428 - DNA, 20 bp, Artificial Sequence
  Synthetic oligonucleotide; GGG chr11 5224740 5224759 5224756 +
atgggacttccatttggggt

SEQ ID NO: 8429 - DNA, 20 bp, Artificial Sequence
  Synthetic oligonucleotide; CAG chr11 5224750 5224769 5224766 +
catttggggtgggcctatga

SEQ ID NO: 8430 - DNA, 20 bp, Artificial Sequence
  Synthetic oligonucleotide; AGG chr11 5224751 5224770 5224767 +
atttggggtgggcctatgac

SEQ ID NO: 8431 - DNA, 20 bp, Artificial Sequence
  Synthetic oligonucleotide; GGG chr11 5224752 5224771 5224768 +
tttggggtgggcctatgaca

SEQ ID NO: 8432 - DNA, 20 bp, Artificial Sequence
  Synthetic oligonucleotide; AAG chr11 5224759 5224778 5224775 +
tgggcctatgacagggtaat

SEQ ID NO: 8433 - DNA, 20 bp, Artificial Sequence
  Synthetic oligonucleotide; CAG chr11 5224763 5224782 5224779 +
cctatgacagggtaataaga

SEQ ID NO: 8434 - DNA, 20 bp, Artificial Sequence
  Synthetic oligonucleotide; TAG chr11 5224766 5224785 5224782 +
atgacagggtaataagacag

SEQ ID NO: 8435 - DNA, 20 bp, Artificial Sequence
  Synthetic oligonucleotide; AAG chr11 5224777 5224796 5224793 +
ataagacagtagtgaatatc

SEQ ID NO: 8436 - DNA, 20 bp, Artificial Sequence
  Synthetic oligonucleotide; AAG chr11 5224787 5224806 5224803 +
agtgaatatcaagctacaaa

SEQ ID NO: 8437 - DNA, 20 bp, Artificial Sequence
  Synthetic oligonucleotide; CAG chr11 5224809 5224828 5224825 +
gccgcctttcaaattcttct

SEQ ID NO: 8438 - DNA, 20 bp, Artificial Sequence
  Synthetic oligonucleotide; AAG chr11 5224829 5224848 5224845 +
cagtcctaacttttcatact

SEQ ID NO: 8439 - DNA, 20 bp, Artificial Sequence
  Synthetic oligonucleotide; CAG chr11 5224834 5224853 5224850 +
ctaacttttcatactaagcc

SEQ ID NO: 8440 - DNA, 20 bp, Artificial Sequence
  Synthetic oligonucleotide; AAG chr11 5224845 5224864 5224861 +
tactaagcccagtccttcca

SEQ ID NO: 8441 - DNA, 20 bp, Artificial Sequence
  Synthetic oligonucleotide; CAG chr11 5224848 5224867 5224864 +
taagcccagtccttccaaag

SEQ ID NO: 8442 - DNA, 20 bp, Artificial Sequence
  Synthetic oligonucleotide; AAG chr11 5224858 5224877 5224874 +
ccttccaaagcagactgtga

SEQ ID NO: 8443 - DNA, 20 bp, Artificial Sequence
  Synthetic oligonucleotide; GAG chr11 5224860 5224879 5224876 +
ttccaaagcagactgtgaaa

SEQ ID NO: 8444 - DNA, 20 bp, Artificial Sequence
  Synthetic oligonucleotide; TAG chr11 5224866 5224885 5224882 +
agcagactgtgaaagagtga

SEQ ID NO: 8445 - DNA, 20 bp, Artificial Sequence
  Synthetic oligonucleotide; CGG chr11 5224872 5224891 5224888 +
ctgtgaaagagtgatagttc

SEQ ID NO: 8446 - DNA, 20 bp, Artificial Sequence
  Synthetic oligonucleotide; GGG chr11 5224873 5224892 5224889 +
tgtgaaagagtgatagttcc

SEQ ID NO: 8447 - DNA, 20 bp, Artificial Sequence
  Synthetic oligonucleotide; GAG chr11 5224875 5224894 5224891 +
tgaaagagtgatagttccgg

SEQ ID NO: 8448 - DNA, 20 bp, Artificial Sequence
  Synthetic oligonucleotide; TAG chr11 5224880 5224899 5224896 +
gagtgatagttccgggagac

SEQ ID NO: 8449 - DNA, 20 bp, Artificial Sequence
  Synthetic oligonucleotide; CAG chr11 5224888 5224907 5224904 +
gttccgggagactagcactg

SEQ ID NO: 8450 - DNA, 20 bp, Artificial Sequence
  Synthetic oligonucleotide; CGG chr11 5224895 5224914 5224911 +
gagactagcactgcagattc

SEQ ID NO: 8451 - DNA, 20 bp, Artificial Sequence
  Synthetic oligonucleotide; GGG chr11 5224896 5224915 5224912 +
agactagcactgcagattcc

SEQ ID NO: 8452 - DNA, 20 bp, Artificial Sequence
  Synthetic oligonucleotide; GAG chr11 5224906 5224925 5224922 +
tgcagattccgggtcactgt

SEQ ID NO: 8453 - DNA, 20 bp, Artificial Sequence
  Synthetic oligonucleotide; TGG chr11 5224909 5224928 5224925 +
agattccgggtcactgtgag

SEQ ID NO: 8454 - DNA, 20 bp, Artificial Sequence
  Synthetic oligonucleotide; GGG chr11 5224910 5224929 5224926 +
gattccgggtcactgtgagt

SEQ ID NO: 8455 - DNA, 20 bp, Artificial Sequence
  Synthetic oligonucleotide; GGG chr11 5224911 5224930 5224927 +
attccgggtcactgtgagtg

SEQ ID NO: 8456 - DNA, 20 bp, Artificial Sequence
  Synthetic oligonucleotide; GGG chr11 5224912 5224931 5224928 +
ttccgggtcactgtgagtgg

SEQ ID NO: 8457 - DNA, 20 bp, Artificial Sequence
  Synthetic oligonucleotide; GAG chr11 5224914 5224933 5224930 +
ccgggtcactgtgagtgggg

SEQ ID NO: 8458 - DNA, 20 bp, Artificial Sequence
  Synthetic oligonucleotide; AGG chr11 5224915 5224934 5224931 +
cgggtcactgtgagtggggg

SEQ ID NO: 8459 - DNA, 20 bp, Artificial Sequence
  Synthetic oligonucleotide; CAG chr11 5224918 5224937 5224934 +
gtcactgtgagtgggggagg

SEQ ID NO: 8460 - DNA, 20 bp, Artificial Sequence
  Synthetic oligonucleotide; AGG chr11 5224919 5224938 5224935 +
tcactgtgagtgggggaggc

SEQ ID NO: 8461 - DNA, 20 bp, Artificial Sequence
  Synthetic oligonucleotide; GGG chr11 5224920 5224939 5224936 +
cactgtgagtgggggaggca

SEQ ID NO: 8462 - DNA, 20 bp, Artificial Sequence
  Synthetic oligonucleotide; AAG chr11 5224923 5224942 5224939 +
tgtgagtgggggaggcaggg

SEQ ID NO: 8463 - DNA, 20 bp, Artificial Sequence
  Synthetic oligonucleotide; AAG chr11 5224926 5224945 5224942 +
gagtgggggaggcagggaag

SEQ ID NO: 8464 - DNA, 20 bp, Artificial Sequence
  Synthetic oligonucleotide; AGG chr11 5224927 5224946 5224943 +
agtgggggaggcagggaaga

SEQ ID NO: 8465 - DNA, 20 bp, Artificial Sequence
  Synthetic oligonucleotide; GGG chr11 5224928 5224947 5224944 +
gtgggggaggcagggaagaa

SEQ ID NO: 8466 - DNA, 20 bp, Artificial Sequence
  Synthetic oligonucleotide; CAG chr11 5224935 5224954 5224951 +
aggcagggaagaagggctca

SEQ ID NO: 8467 - DNA, 20 bp, Artificial Sequence
  Synthetic oligonucleotide; AGG chr11 5224936 5224955 5224952 +
ggcagggaagaagggctcac

SEQ ID NO: 8468 - DNA, 20 bp, Artificial Sequence
  Synthetic oligonucleotide; CAG chr11 5224940 5224959 5224956 +
gggaagaagggctcacagga

SEQ ID NO: 8469 - DNA, 20 bp, Artificial Sequence
  Synthetic oligonucleotide; AAG chr11 5224973 5224992 5224989 +
acccctgtttttccttcttc

SEQ ID NO: 8470 - DNA, 20 bp, Artificial Sequence
  Synthetic oligonucleotide; TAG chr11 5224976 5224995 5224992 +
cctgtttttccttcttcaag

SEQ ID NO: 8471 - DNA, 20 bp, Artificial Sequence
  Synthetic oligonucleotide; AAG chr11 5224987 5225006 5225003 +
ttcttcaagtagacctctat

SEQ ID NO: 8472 - DNA, 20 bp, Artificial Sequence
  Synthetic oligonucleotide; CAG chr11 5224994 5225013 5225010 +
agtagacctctataagacaa

SEQ ID NO: 8473 - DNA, 20 bp, Artificial Sequence
  Synthetic oligonucleotide; GAG chr11 5224996 5225015 5225012 +
tagacctctataagacaaca

SEQ ID NO: 8474 - DNA, 20 bp, Artificial Sequence
  Synthetic oligonucleotide; AAG chr11 5225005 5225024 5225021 +
ataagacaacagagacaact

SEQ ID NO: 8475 - DNA, 20 bp, Artificial Sequence
  Synthetic oligonucleotide; AGG chr11 5225006 5225025 5225022 +
taagacaacagagacaacta

SEQ ID NO: 8476 - DNA, 20 bp, Artificial Sequence
  Synthetic oligonucleotide; GAG chr11 5225011 5225030 5225027 +
caacagagacaactaaggct

SEQ ID NO: 8477 - DNA, 20 bp, Artificial Sequence
  Synthetic oligonucleotide; TGG chr11 5225014 5225033 5225030 +
cagagacaactaaggctgag

SEQ ID NO: 8478 - DNA, 20 bp, Artificial Sequence
  Synthetic oligonucleotide; CAG chr11 5225018 5225037 5225034 +
gacaactaaggctgagtggc

SEQ ID NO: 8479 - DNA, 20 bp, Artificial Sequence
  Synthetic oligonucleotide; AGG chr11 5225019 5225038 5225035 +
acaactaaggctgagtggcc

SEQ ID NO: 8480 - DNA, 20 bp, Artificial Sequence
  Synthetic oligonucleotide; GAG chr11 5225023 5225042 5225039 +
ctaaggctgagtggccaggc

SEQ ID NO: 8481 - DNA, 20 bp, Artificial Sequence
  Synthetic oligonucleotide; AGG chr11 5225024 5225043 5225040 +
taaggctgagtggccaggcg

SEQ ID NO: 8482 - DNA, 20 bp, Artificial Sequence
  Synthetic oligonucleotide; GAG chr11 5225026 5225045 5225042 +
aggctgagtggccaggcgag

SEQ ID NO: 8483 - DNA, 20 bp, Artificial Sequence
  Synthetic oligonucleotide; TGG chr11 5225050 5225069 5225066 +
aaccatctcgccgtaaaaca

SEQ ID NO: 8484 - DNA, 20 bp, Artificial Sequence
  Synthetic oligonucleotide; AAG chr11 5225053 5225072 5225069 +
catctcgccgtaaaacatgg

SEQ ID NO: 8485 - DNA, 20 bp, Artificial Sequence
  Synthetic oligonucleotide; AGG chr11 5225054 5225073 5225070 +
atctcgccgtaaaacatgga

SEQ ID NO: 8486 - DNA, 20 bp, Artificial Sequence
  Synthetic oligonucleotide; CAG chr11 5225064 5225083 5225080 +
aaaacatggaaggaacactt

SEQ ID NO: 8487 - DNA, 20 bp, Artificial Sequence
  Synthetic oligonucleotide; AGG chr11 5225065 5225084 5225081 +
aaacatggaaggaacacttc

SEQ ID NO: 8488 - DNA, 20 bp, Artificial Sequence
  Synthetic oligonucleotide; GGG chr11 5225066 5225085 5225082 +
aacatggaaggaacacttca

SEQ ID NO: 8489 - DNA, 20 bp, Artificial Sequence
  Synthetic oligonucleotide; GGG chr11 5225067 5225086 5225083 +
acatggaaggaacacttcag

SEQ ID NO: 8490 - DNA, 20 bp, Artificial Sequence
  Synthetic oligonucleotide; AAG chr11 5225071 5225090 5225087 +
ggaaggaacacttcagggga

SEQ ID NO: 8491 - DNA, 20 bp, Artificial Sequence
  Synthetic oligonucleotide; AGG chr11 5225072 5225091 5225088 +
gaaggaacacttcaggggaa

SEQ ID NO: 8492 - DNA, 20 bp, Artificial Sequence
  Synthetic oligonucleotide; TGG chr11 5225075 5225094 5225091 +
ggaacacttcaggggaaagg

SEQ ID NO: 8493 - DNA, 20 bp, Artificial Sequence
  Synthetic oligonucleotide; AAG chr11 5225085 5225104 5225101 +
aggggaaaggtggtatctct

SEQ ID NO: 8494 - DNA, 20 bp, Artificial Sequence
  Synthetic oligonucleotide; AAG chr11 5225089 5225108 5225105 +
gaaaggtggtatctctaagc

SEQ ID NO: 8495 - DNA, 20 bp, Artificial Sequence
  Synthetic oligonucleotide; GAG chr11 5225091 5225110 5225107 +
aaggtggtatctctaagcaa

SEQ ID NO: 8496 - DNA, 20 bp, Artificial Sequence
  Synthetic oligonucleotide; GAG chr11 5225098 5225117 5225114 +
tatctctaagcaagagaact

SEQ ID NO: 8497 - DNA, 20 bp, Artificial Sequence
  Synthetic oligonucleotide; TGG chr11 5225101 5225120 5225117 +
ctctaagcaagagaactgag

SEQ ID NO: 8498 - DNA, 20 bp, Artificial Sequence
  Synthetic oligonucleotide; GAG chr11 5225103 5225122 5225119 +
ctaagcaagagaactgagtg

SEQ ID NO: 8499 - DNA, 20 bp, Artificial Sequence
  Synthetic oligonucleotide; AAG chr11 5225108 5225127 5225124 +
caagagaactgagtggagtc

SEQ ID NO: 8500 - DNA, 20 bp, Artificial Sequence
  Synthetic oligonucleotide; AGG chr11 5225109 5225128 5225125 +
aagagaactgagtggagtca

SEQ ID NO: 8501 - DNA, 20 bp, Artificial Sequence
  Synthetic oligonucleotide; GAG chr11 5225114 5225133 5225130 +
aactgagtggagtcaaggct

SEQ ID NO: 8502 - DNA, 20 bp, Artificial Sequence
  Synthetic oligonucleotide; GAG chr11 5225116 5225135 5225132 +
ctgagtggagtcaaggctga

SEQ ID NO: 8503 - DNA, 20 bp, Artificial Sequence
  Synthetic oligonucleotide; CAG chr11 5225122 5225141 5225138 +
ggagtcaaggctgagagatg

SEQ ID NO: 8504 - DNA, 20 bp, Artificial Sequence
  Synthetic oligonucleotide; AGG chr11 5225123 5225142 5225139 +
gagtcaaggctgagagatgc

SEQ ID NO: 8505 - DNA, 20 bp, Artificial Sequence
  Synthetic oligonucleotide; AAG chr11 5225128 5225147 5225144 +
aaggctgagagatgcaggat

SEQ ID NO: 8506 - DNA, 20 bp, Artificial Sequence
  Synthetic oligonucleotide; TGG chr11 5225135 5225154 5225151 +
agagatgcaggataagcaaa

SEQ ID NO: 8507 - DNA, 20 bp, Artificial Sequence
  Synthetic oligonucleotide; GGG chr11 5225136 5225155 5225152 +
gagatgcaggataagcaaat

SEQ ID NO: 8508 - DNA, 20 bp, Artificial Sequence
  Synthetic oligonucleotide; TAG chr11 5225139 5225158 5225155 +
atgcaggataagcaaatggg

SEQ ID NO: 8509 - DNA, 20 bp, Artificial Sequence
  Synthetic oligonucleotide; AAG chr11 5225146 5225165 5225162 +
ataagcaaatgggtagtgaa

SEQ ID NO: 8510 - DNA, 20 bp, Artificial Sequence
  Synthetic oligonucleotide; GAG chr11 5225157 5225176 5225173 +
ggtagtgaaaagacattcat

SEQ ID NO: 8511 - DNA, 20 bp, Artificial Sequence
  Synthetic oligonucleotide; AGG chr11 5225158 5225177 5225174 +
gtagtgaaaagacattcatg

SEQ ID NO: 8512 - DNA, 20 bp, Artificial Sequence
  Synthetic oligonucleotide; CAG chr11 5225162 5225181 5225178 +
tgaaaagacattcatgagga

SEQ ID NO: 8513 - DNA, 20 bp, Artificial Sequence
  Synthetic oligonucleotide; AAG chr11 5225175 5225194 5225191 +
atgaggacagctaaaacaat

SEQ ID NO: 8514 - DNA, 20 bp, Artificial Sequence
  Synthetic oligonucleotide; CAG chr11 5225190 5225209 5225206 +
acaataagtaatgtaaaata

SEQ ID NO: 8515 - DNA, 20 bp, Artificial Sequence
  Synthetic oligonucleotide; TAG chr11 5225195 5225214 5225211 +
aagtaatgtaaaatacagca

SEQ ID NO: 8516 - DNA, 20 bp, Artificial Sequence
  Synthetic oligonucleotide; AAG chr11 5225219 5225238 5225235 +
aaaactttaacctccaaatc

SEQ ID NO: 8517 - DNA, 20 bp, Artificial Sequence
  Synthetic oligonucleotide; GAG chr11 5225243 5225262 5225259 +
ctctacttgaatccttttct

SEQ ID NO: 8518 - DNA, 20 bp, Artificial Sequence
  Synthetic oligonucleotide; AGG chr11 5225244 5225263 5225260 +
tctacttgaatccttttctg

SEQ ID NO: 8519 - DNA, 20 bp, Artificial Sequence
  Synthetic oligonucleotide; GGG chr11 5225245 5225264 5225261 +
ctacttgaatccttttctga

SEQ ID NO: 8520 - DNA, 20 bp, Artificial Sequence
  Synthetic oligonucleotide; AAG chr11 5225254 5225273 5225270 +
tccttttctgagggatgaat

SEQ ID NO: 8521 - DNA, 20 bp, Artificial Sequence
  Synthetic oligonucleotide; AGG chr11 5225255 5225274 5225271 +
ccttttctgagggatgaata

SEQ ID NO: 8522 - DNA, 20 bp, Artificial Sequence
  Synthetic oligonucleotide; CAG chr11 5225267 5225286 5225283 +
gatgaataaggcatatgcat

SEQ ID NO: 8523 - DNA, 20 bp, Artificial Sequence
  Synthetic oligonucleotide; AGG chr11 5225268 5225287 5225284 +
atgaataaggcatatgcatc

SEQ ID NO: 8524 - DNA, 20 bp, Artificial Sequence
  Synthetic oligonucleotide; GGG chr11 5225269 5225288 5225285 +
tgaataaggcatatgcatca

SEQ ID NO: 8525 - DNA, 20 bp, Artificial Sequence
  Synthetic oligonucleotide; GGG chr11 5225270 5225289 5225286 +
gaataaggcatatgcatcag

SEQ ID NO: 8526 - DNA, 20 bp, Artificial Sequence
  Synthetic oligonucleotide; TAG chr11 5225290 5225309 5225306 +
gggctgttgccaatgtgcat

SEQ ID NO: 8527 - DNA, 20 bp, Artificial Sequence
  Synthetic oligonucleotide; CAG chr11 5225300 5225319 5225316 +
caatgtgcattagctgtttg

SEQ ID NO: 8528 - DNA, 20 bp, Artificial Sequence
  Synthetic oligonucleotide; TGG chr11 5225318 5225337 5225334 +
tgcagcctcaccttctttca

SEQ ID NO: 8529 - DNA, 20 bp, Artificial Sequence
  Synthetic oligonucleotide; GAG chr11 5225320 5225339 5225336 +
cagcctcaccttctttcatg

SEQ ID NO: 8530 - DNA, 20 bp, Artificial Sequence
  Synthetic oligonucleotide; AAG chr11 5225326 5225345 5225342 +
caccttctttcatggagttt

SEQ ID NO: 8531 - DNA, 20 bp, Artificial Sequence
  Synthetic oligonucleotide; TAG chr11 5225332 5225351 5225348 +
ctttcatggagtttaagata

SEQ ID NO: 8532 - DNA, 20 bp, Artificial Sequence
  Synthetic oligonucleotide; AAG chr11 5225346 5225365 5225362 +
aagatatagtgtattttccc

SEQ ID NO: 8533 - DNA, 20 bp, Artificial Sequence
  Synthetic oligonucleotide; AGG chr11 5225347 5225366 5225363 +
agatatagtgtattttccca

SEQ ID NO: 8534 - DNA, 20 bp, Artificial Sequence
  Synthetic oligonucleotide; TAG chr11 5225357 5225376 5225373 +
tattttcccaaggtttgaac

SEQ ID NO: 8535 - DNA, 20 bp, Artificial Sequence
  Synthetic oligonucleotide; TAG chr11 5225410 5225429 5225426 +
gacctcccacattccctttt

SEQ ID NO: 8536 - DNA, 20 bp, Artificial Sequence
  Synthetic oligonucleotide; CAG chr11 5225422 5225441 5225438 +
tccctttttagtaaaatatt

SEQ ID NO: 8537 - DNA, 20 bp, Artificial Sequence
  Synthetic oligonucleotide; TAG chr11 5225470 5225489 5225486 +
tgaaaataaatgttttttat

SEQ ID NO: 8538 - DNA, 20 bp, Artificial Sequence
  Synthetic oligonucleotide; AGG chr11 5225471 5225490 5225487 +
gaaaataaatgttttttatt

SEQ ID NO: 8539 - DNA, 20 bp, Artificial Sequence
  Synthetic oligonucleotide; CAG chr11 5225474 5225493 5225490 +
aataaatgttttttattagg

SEQ ID NO: 8540 - DNA, 20 bp, Artificial Sequence
  Synthetic oligonucleotide; CAG chr11 5225481 5225500 5225497 +
gttttttattaggcagaatc

SEQ ID NO: 8541 - DNA, 20 bp, Artificial Sequence
  Synthetic oligonucleotide; AAG chr11 5225490 5225509 5225506 +
taggcagaatccagatgctc

SEQ ID NO: 8542 - DNA, 20 bp, Artificial Sequence
  Synthetic oligonucleotide; AGG chr11 5225491 5225510 5225507 +
aggcagaatccagatgctca

SEQ ID NO: 8543 - DNA, 20 bp, Artificial Sequence
  Synthetic oligonucleotide; CAG chr11 5225511 5225530 5225527 +
aggcccttcataatatcccc

SEQ ID NO: 8544 - DNA, 20 bp, Artificial Sequence
  Synthetic oligonucleotide; TAG chr11 5225516 5225535 5225532 +
cttcataatatcccccagtt

SEQ ID NO: 8545 - DNA, 20 bp, Artificial Sequence
  Synthetic oligonucleotide; TAG chr11 5225519 5225538 5225535 +
cataatatcccccagtttag

SEQ ID NO: 8546 - DNA, 20 bp, Artificial Sequence
  Synthetic oligonucleotide; TGG chr11 5225523 5225542 5225539 +
atatcccccagtttagtagt

SEQ ID NO: 8547 - DNA, 20 bp, Artificial Sequence
  Synthetic oligonucleotide; TAG chr11 5225529 5225548 5225545 +
cccagtttagtagttggact

SEQ ID NO: 8548 - DNA, 20 bp, Artificial Sequence
  Synthetic oligonucleotide; AGG chr11 5225530 5225549 5225546 +
ccagtttagtagttggactt

SEQ ID NO: 8549 - DNA, 20 bp, Artificial Sequence
  Synthetic oligonucleotide; GGG chr11 5225531 5225550 5225547 +
cagtttagtagttggactta

SEQ ID NO: 8550 - DNA, 20 bp, Artificial Sequence
  Synthetic oligonucleotide; AAG chr11 5225538 5225557 5225554 +
gtagttggacttagggaaca

SEQ ID NO: 8551 - DNA, 20 bp, Artificial Sequence
  Synthetic oligonucleotide; AGG chr11 5225539 5225558 5225555 +
tagttggacttagggaacaa

SEQ ID NO: 8552 - DNA, 20 bp, Artificial Sequence
  Synthetic oligonucleotide; TAG chr11 5225551 5225570 5225567 +
gggaacaaaggaacctttaa

SEQ ID NO: 8553 - DNA, 20 bp, Artificial Sequence
  Synthetic oligonucleotide; TGG chr11 5225558 5225577 5225574 +
aaggaacctttaatagaaat

SEQ ID NO: 8554 - DNA, 20 bp, Artificial Sequence
  Synthetic oligonucleotide; CAG chr11 5225562 5225581 5225578 +
aacctttaatagaaattgga

SEQ ID NO: 8555 - DNA, 20 bp, Artificial Sequence
  Synthetic oligonucleotide; AAG chr11 5225566 5225585 5225582 +
tttaatagaaattggacagc

SEQ ID NO: 8556 - DNA, 20 bp, Artificial Sequence
  Synthetic oligonucleotide; AAG chr11 5225570 5225589 5225586 +
atagaaattggacagcaaga

SEQ ID NO: 8557 - DNA, 20 bp, Artificial Sequence
  Synthetic oligonucleotide; GAG chr11 5225574 5225593 5225590 +
aaattggacagcaagaaagc

SEQ ID NO: 8558 - DNA, 20 bp, Artificial Sequence
  Synthetic oligonucleotide; TAG chr11 5225579 5225598 5225595 +
ggacagcaagaaagcgagct

SEQ ID NO: 8559 - DNA, 20 bp, Artificial Sequence
  Synthetic oligonucleotide; TGG chr11 5225591 5225610 5225607 +
agcgagcttagtgatacttg

SEQ ID NO: 8560 - DNA, 20 bp, Artificial Sequence
  Synthetic oligonucleotide; GGG chr11 5225592 5225611 5225608 +
gcgagcttagtgatacttgt

SEQ ID NO: 8561 - DNA, 20 bp, Artificial Sequence
  Synthetic oligonucleotide; CAG chr11 5225596 5225615 5225612 +
gcttagtgatacttgtgggc

SEQ ID NO: 8562 - DNA, 20 bp, Artificial Sequence
  Synthetic oligonucleotide; AGG chr11 5225597 5225616 5225613 +
cttagtgatacttgtgggcc

SEQ ID NO: 8563 - DNA, 20 bp, Artificial Sequence
  Synthetic oligonucleotide; GGG chr11 5225598 5225617 5225614 +
ttagtgatacttgtgggcca

SEQ ID NO: 8564 - DNA, 20 bp, Artificial Sequence
  Synthetic oligonucleotide; TAG chr11 5225604 5225623 5225620 +
atacttgtgggccagggcat

SEQ ID NO: 8565 - DNA, 20 bp, Artificial Sequence
  Synthetic oligonucleotide; CAG chr11 5225613 5225632 5225629 +
ggccagggcattagccacac

SEQ ID NO: 8566 - DNA, 20 bp, Artificial Sequence
  Synthetic oligonucleotide; TAG chr11 5225630 5225649 5225646 +
caccagccaccactttctga

SEQ ID NO: 8567 - DNA, 20 bp, Artificial Sequence
  Synthetic oligonucleotide; AGG chr11 5225631 5225650 5225647 +
accagccaccactttctgat

SEQ ID NO: 8568 - DNA, 20 bp, Artificial Sequence
  Synthetic oligonucleotide; CAG chr11 5225634 5225653 5225650 +
agccaccactttctgatagg

SEQ ID NO: 8569 - DNA, 20 bp, Artificial Sequence
  Synthetic oligonucleotide; TGG chr11 5225644 5225663 5225660 +
ttctgataggcagcctgcac

SEQ ID NO: 8570 - DNA, 20 bp, Artificial Sequence
  Synthetic oligonucleotide; TGG chr11 5225647 5225666 5225663 +
tgataggcagcctgcactgg

SEQ ID NO: 8571 - DNA, 20 bp, Artificial Sequence
  Synthetic oligonucleotide; GGG chr11 5225648 5225667 5225664 +
gataggcagcctgcactggt

SEQ ID NO: 8572 - DNA, 20 bp, Artificial Sequence
  Synthetic oligonucleotide; GGG chr11 5225649 5225668 5225665 +
ataggcagcctgcactggtg

SEQ ID NO: 8573 - DNA, 20 bp, Artificial Sequence
  Synthetic oligonucleotide; AAG chr11 5225666 5225685 5225682 +
gtggggtgaattctttgcca

SEQ ID NO: 8574 - DNA, 20 bp, Artificial Sequence
  Synthetic oligonucleotide; TGG chr11 5225672 5225691 5225688 +
tgaattctttgccaaagtga

SEQ ID NO: 8575 - DNA, 20 bp, Artificial Sequence
  Synthetic oligonucleotide; GGG chr11 5225673 5225692 5225689 +
gaattctttgccaaagtgat

SEQ ID NO: 8576 - DNA, 20 bp, Artificial Sequence
  Synthetic oligonucleotide; CAG chr11 5225677 5225696 5225693 +
tctttgccaaagtgatgggc

SEQ ID NO: 8577 - DNA, 20 bp, Artificial Sequence
  Synthetic oligonucleotide; CAG chr11 5225684 5225703 5225700 +
caaagtgatgggccagcaca

SEQ ID NO: 8578 - DNA, 20 bp, Artificial Sequence
  Synthetic oligonucleotide; CAG chr11 5225689 5225708 5225705 +
tgatgggccagcacacagac

SEQ ID NO: 8579 - DNA, 20 bp, Artificial Sequence
  Synthetic oligonucleotide; CAG chr11 5225701 5225720 5225717 +
acacagaccagcacgttgcc

SEQ ID NO: 8580 - DNA, 20 bp, Artificial Sequence
  Synthetic oligonucleotide; AGG chr11 5225702 5225721 5225718 +
cacagaccagcacgttgccc

SEQ ID NO: 8581 - DNA, 20 bp, Artificial Sequence
  Synthetic oligonucleotide; GAG chr11 5225704 5225723 5225720 +
cagaccagcacgttgcccag

SEQ ID NO: 8582 - DNA, 20 bp, Artificial Sequence
  Synthetic oligonucleotide; TGG chr11 5225710 5225729 5225726 +
agcacgttgcccaggagctg

SEQ ID NO: 8583 - DNA, 20 bp, Artificial Sequence
  Synthetic oligonucleotide; GGG chr11 5225711 5225730 5225727 +
gcacgttgcccaggagctgt

SEQ ID NO: 8584 - DNA, 20 bp, Artificial Sequence
  Synthetic oligonucleotide; GAG chr11 5225713 5225732 5225729 +
acgttgcccaggagctgtgg

SEQ ID NO: 8585 - DNA, 20 bp, Artificial Sequence
  Synthetic oligonucleotide; AGG chr11 5225714 5225733 5225730 +
cgttgcccaggagctgtggg

SEQ ID NO: 8586 - DNA, 20 bp, Artificial Sequence
  Synthetic oligonucleotide; AAG chr11 5225717 5225736 5225733 +
tgcccaggagctgtgggagg

SEQ ID NO: 8587 - DNA, 20 bp, Artificial Sequence
  Synthetic oligonucleotide; AAG chr11 5225722 5225741 5225738 +
aggagctgtgggaggaagat

SEQ ID NO: 8588 - DNA, 20 bp, Artificial Sequence
  Synthetic oligonucleotide; GAG chr11 5225724 5225743 5225740 +
gagctgtgggaggaagataa

SEQ ID NO: 8589 - DNA, 20 bp, Artificial Sequence
  Synthetic oligonucleotide; AGG chr11 5225725 5225744 5225741 +
agctgtgggaggaagataag

SEQ ID NO: 8590 - DNA, 20 bp, Artificial Sequence
  Synthetic oligonucleotide; TAG chr11 5225740 5225759 5225756 +
ataagaggtatgaacatgat

SEQ ID NO: 8591 - DNA, 20 bp, Artificial Sequence
  Synthetic oligonucleotide; AAG chr11 5225746 5225765 5225762 +
ggtatgaacatgattagcaa

SEQ ID NO: 8592 - DNA, 20 bp, Artificial Sequence
  Synthetic oligonucleotide; AGG chr11 5225747 5225766 5225763 +
gtatgaacatgattagcaaa

SEQ ID NO: 8593 - DNA, 20 bp, Artificial Sequence
  Synthetic oligonucleotide; GGG chr11 5225748 5225767 5225764 +
tatgaacatgattagcaaaa

SEQ ID NO: 8594 - DNA, 20 bp, Artificial Sequence
  Synthetic oligonucleotide; TAG chr11 5225753 5225772 5225769 +
acatgattagcaaaagggcc

SEQ ID NO: 8595 - DNA, 20 bp, Artificial Sequence
  Synthetic oligonucleotide; TGG chr11 5225758 5225777 5225774 +
attagcaaaagggcctagct

SEQ ID NO: 8596 - DNA, 20 bp, Artificial Sequence
  Synthetic oligonucleotide; CAG chr11 5225764 5225783 5225780 +
aaaagggcctagcttggact

SEQ ID NO: 8597 - DNA, 20 bp, Artificial Sequence
  Synthetic oligonucleotide; CAG chr11 5225774 5225793 5225790 +
agcttggactcagaataatc

SEQ ID NO: 8598 - DNA, 20 bp, Artificial Sequence
  Synthetic oligonucleotide; AAG chr11 5225799 5225818 5225815 +
ttatcccaaccataaaataa

SEQ ID NO: 8599 - DNA, 20 bp, Artificial Sequence
  Synthetic oligonucleotide; CAG chr11 5225802 5225821 5225818 +
tcccaaccataaaataaaag

SEQ ID NO: 8600 - DNA, 20 bp, Artificial Sequence
  Synthetic oligonucleotide; TGG chr11 5225807 5225826 5225823 +
accataaaataaaagcagaa

SEQ ID NO: 8601 - DNA, 20 bp, Artificial Sequence
  Synthetic oligonucleotide; TAG chr11 5225810 5225829 5225826 +
ataaaataaaagcagaatgg

SEQ ID NO: 8602 - DNA, 20 bp, Artificial Sequence
  Synthetic oligonucleotide; TGG chr11 5225814 5225833 5225830 +
aataaaagcagaatggtagc

SEQ ID NO: 8603 - DNA, 20 bp, Artificial Sequence
  Synthetic oligonucleotide; TAG chr11 5225821 5225840 5225837 +
gcagaatggtagctggattg

SEQ ID NO: 8604 - DNA, 20 bp, Artificial Sequence
  Synthetic oligonucleotide; TAG chr11 5225831 5225850 5225847 +
agctggattgtagctgctat

SEQ ID NO: 8605 - DNA, 20 bp, Artificial Sequence
  Synthetic oligonucleotide; CAG chr11 5225854 5225873 5225870 +
caatatgaaacctcttacat

SEQ ID NO: 8606 - DNA, 20 bp, Artificial Sequence
  Synthetic oligonucleotide; CAG chr11 5225871 5225890 5225887 +
catcagttacaatttatatg

SEQ ID NO: 8607 - DNA, 20 bp, Artificial Sequence
  Synthetic oligonucleotide; CAG chr11 5225887 5225906 5225903 +
tatgcagaaatatttatatg

SEQ ID NO: 8608 - DNA, 20 bp, Artificial Sequence
  Synthetic oligonucleotide; GAG chr11 5225889 5225908 5225905 +
tgcagaaatatttatatgca

SEQ ID NO: 8609 - DNA, 20 bp, Artificial Sequence
  Synthetic oligonucleotide; CAG chr11 5225912 5225931 5225928 +
atattgctattgccttaacc

SEQ ID NO: 8610 - DNA, 20 bp, Artificial Sequence
  Synthetic oligonucleotide; TAG chr11 5225935 5225954 5225951 +
aaattatcactgttattctt

SEQ ID NO: 8611 - DNA, 20 bp, Artificial Sequence
  Synthetic oligonucleotide; TGG chr11 5225940 5225959 5225956 +
atcactgttattctttagaa

SEQ ID NO: 8612 - DNA, 20 bp, Artificial Sequence
  Synthetic oligonucleotide; AAG chr11 5225947 5225966 5225963 +
ttattctttagaatggtgca

SEQ ID NO: 8613 - DNA, 20 bp, Artificial Sequence
  Synthetic oligonucleotide; GAG chr11 5225949 5225968 5225965 +
attctttagaatggtgcaaa

SEQ ID NO: 8614 - DNA, 20 bp, Artificial Sequence
  Synthetic oligonucleotide; AGG chr11 5225950 5225969 5225966 +
ttctttagaatggtgcaaag

SEQ ID NO: 8615 - DNA, 20 bp, Artificial Sequence
  Synthetic oligonucleotide; AAG chr11 5225982 5226001 5225998 +
ttgtatcattattgccctga

SEQ ID NO: 8616 - DNA, 20 bp, Artificial Sequence
  Synthetic oligonucleotide; AAG chr11 5225986 5226005 5226002 +
atcattattgccctgaaaga

SEQ ID NO: 8617 - DNA, 20 bp, Artificial Sequence
  Synthetic oligonucleotide; GAG chr11 5225988 5226007 5226004 +
cattattgccctgaaagaaa

SEQ ID NO: 8618 - DNA, 20 bp, Artificial Sequence
  Synthetic oligonucleotide; TAG chr11 5225993 5226012 5226009 +
ttgccctgaaagaaagagat

SEQ ID NO: 8619 - DNA, 20 bp, Artificial Sequence
  Synthetic oligonucleotide; AGG chr11 5225994 5226013 5226010 +
tgccctgaaagaaagagatt

SEQ ID NO: 8620 - DNA, 20 bp, Artificial Sequence
  Synthetic oligonucleotide; GGG chr11 5225995 5226014 5226011 +
gccctgaaagaaagagatta

SEQ ID NO: 8621 - DNA, 20 bp, Artificial Sequence
  Synthetic oligonucleotide; AAG chr11 5225999 5226018 5226015 +
tgaaagaaagagattaggga

SEQ ID NO: 8622 - DNA, 20 bp, Artificial Sequence
  Synthetic oligonucleotide; TAG chr11 5226005 5226024 5226021 +
aaagagattagggaaagtat

SEQ ID NO: 8623 - DNA, 20 bp, Artificial Sequence
  Synthetic oligonucleotide; AAG chr11 5226012 5226031 5226028 +
ttagggaaagtattagaaat

SEQ ID NO: 8624 - DNA, 20 bp, Artificial Sequence
  Synthetic oligonucleotide; AAG chr11 5226025 5226044 5226041 +
tagaaataagataaacaaaa

SEQ ID NO: 8625 - DNA, 20 bp, Artificial Sequence
  Synthetic oligonucleotide; AAG chr11 5226036 5226055 5226052 +
taaacaaaaaagtatattaa

SEQ ID NO: 8626 - DNA, 20 bp, Artificial Sequence
  Synthetic oligonucleotide; AAG chr11 5226039 5226058 5226055 +
acaaaaaagtatattaaaag

SEQ ID NO: 8627 - DNA, 20 bp, Artificial Sequence
  Synthetic oligonucleotide; AAG chr11 5226043 5226062 5226059 +
aaaagtatattaaaagaaga

SEQ ID NO: 8628 - DNA, 20 bp, Artificial Sequence
  Synthetic oligonucleotide; TGG chr11 5226083 5226102 5226099 +
aatgcaaaattaccctgatt

SEQ ID NO: 8629 - DNA, 20 bp, Artificial Sequence
  Synthetic oligonucleotide; AAG chr11 5226164 5226183 5226180 +
tatgtatcaattaaaaataa

SEQ ID NO: 8630 - DNA, 20 bp, Artificial Sequence
  Synthetic oligonucleotide; AAG chr11 5226173 5226192 5226189 +
attaaaaataaaagaaaata

SEQ ID NO: 8631 - DNA, 20 bp, Artificial Sequence
  Synthetic oligonucleotide; TAG chr11 5226176 5226195 5226192 +
aaaaataaaagaaaataaag

SEQ ID NO: 8632 - DNA, 20 bp, Artificial Sequence
  Synthetic oligonucleotide; AGG chr11 5226177 5226196 5226193 +
aaaataaaagaaaataaagt

SEQ ID NO: 8633 - DNA, 20 bp, Artificial Sequence
  Synthetic oligonucleotide; GGG chr11 5226178 5226197 5226194 +
aaataaaagaaaataaagta

SEQ ID NO: 8634 - DNA, 20 bp, Artificial Sequence
  Synthetic oligonucleotide; GAG chr11 5226180 5226199 5226196 +
ataaaagaaaataaagtagg

SEQ ID NO: 8635 - DNA, 20 bp, Artificial Sequence
  Synthetic oligonucleotide; AAG chr11 5226200 5226219 5226216 +
gagattatgaatatgcaaat

SEQ ID NO: 8636 - DNA, 20 bp, Artificial Sequence
  Synthetic oligonucleotide; TAG chr11 5226220 5226239 5226236 +
aagcacacatatattccaaa

SEQ ID NO: 8637 - DNA, 20 bp, Artificial Sequence
  Synthetic oligonucleotide; TAG chr11 5226231 5226250 5226247 +
tattccaaatagtaatgtac

SEQ ID NO: 8638 - DNA, 20 bp, Artificial Sequence
  Synthetic oligonucleotide; AGG chr11 5226232 5226251 5226248 +
attccaaatagtaatgtact

SEQ ID NO: 8639 - DNA, 20 bp, Artificial Sequence
  Synthetic oligonucleotide; CAG chr11 5226235 5226254 5226251 +
ccaaatagtaatgtactagg

SEQ ID NO: 8640 - DNA, 20 bp, Artificial Sequence
  Synthetic oligonucleotide; AAG chr11 5226246 5226265 5226262 +
tgtactaggcagactgtgta

SEQ ID NO: 8641 - DNA, 20 bp, Artificial Sequence
  Synthetic oligonucleotide; AAG chr11 5226258 5226277 5226274 +
actgtgtaaagttttttttt

SEQ ID NO: 8642 - DNA, 20 bp, Artificial Sequence
  Synthetic oligonucleotide; CAG chr11 5226276 5226295 5226292 +
ttaagttacttaatgtatct

SEQ ID NO: 8643 - DNA, 20 bp, Artificial Sequence
  Synthetic oligonucleotide; GAG chr11 5226278 5226297 5226294 +
aagttacttaatgtatctca

SEQ ID NO: 8644 - DNA, 20 bp, Artificial Sequence
  Synthetic oligonucleotide; AAG chr11 5226308 5226327 5226324 +
cttttgttatacacaatgtt

SEQ ID NO: 8645 - DNA, 20 bp, Artificial Sequence
  Synthetic oligonucleotide; AGG chr11 5226309 5226328 5226325 +
ttttgttatacacaatgtta

SEQ ID NO: 8646 - DNA, 20 bp, Artificial Sequence
  Synthetic oligonucleotide; AAG chr11 5226316 5226335 5226332 +
atacacaatgttaaggcatt

SEQ ID NO: 8647 - DNA, 20 bp, Artificial Sequence
  Synthetic oligonucleotide; TAG chr11 5226324 5226343 5226340 +
tgttaaggcattaagtataa

SEQ ID NO: 8648 - DNA, 20 bp, Artificial Sequence
  Synthetic oligonucleotide; CGG chr11 5226336 5226355 5226352 +
aagtataatagtaaaaattg

SEQ ID NO: 8649 - DNA, 20 bp, Artificial Sequence
  Synthetic oligonucleotide; GAG chr11 5226338 5226357 5226354 +
gtataatagtaaaaattgcg

SEQ ID NO: 8650 - DNA, 20 bp, Artificial Sequence
  Synthetic oligonucleotide; AAG chr11 5226341 5226360 5226357 +
taatagtaaaaattgcggag

SEQ ID NO: 8651 - DNA, 20 bp, Artificial Sequence
  Synthetic oligonucleotide; AAG chr11 5226351 5226370 5226367 +
aattgcggagaagaaaaaaa

SEQ ID NO: 8652 - DNA, 20 bp, Artificial Sequence
  Synthetic oligonucleotide; AAG chr11 5226355 5226374 5226371 +
gcggagaagaaaaaaaaaga

SEQ ID NO: 8653 - DNA, 20 bp, Artificial Sequence
  Synthetic oligonucleotide; AAG chr11 5226359 5226378 5226375 +
agaagaaaaaaaaagaaagc

SEQ ID NO: 8654 - DNA, 20 bp, Artificial Sequence
  Synthetic oligonucleotide; AAG chr11 5226372 5226391 5226388 +
agaaagcaagaattaaacaa

SEQ ID NO: 8655 - DNA, 20 bp, Artificial Sequence
  Synthetic oligonucleotide; CAG chr11 5226392 5226411 5226408 +
aagaaaacaattgttatgaa

SEQ ID NO: 8656 - DNA, 20 bp, Artificial Sequence
  Synthetic oligonucleotide; AAG chr11 5226402 5226421 5226418 +
ttgttatgaacagcaaataa

SEQ ID NO: 8657 - DNA, 20 bp, Artificial Sequence
  Synthetic oligonucleotide; GAG chr11 5226421 5226440 5226437 +
aaagaaactaaaacgatcct

SEQ ID NO: 8658 - DNA, 20 bp, Artificial Sequence
  Synthetic oligonucleotide; TAG chr11 5226512 5226531 5226528 +
ctatgacatgaacttaacca

SEQ ID NO: 8659 - DNA, 20 bp, Artificial Sequence
  Synthetic oligonucleotide; AAG chr11 5226517 5226536 5226533 +
acatgaacttaaccatagaa

SEQ ID NO: 8660 - DNA, 20 bp, Artificial Sequence
  Synthetic oligonucleotide; AAG chr11 5226520 5226539 5226536 +
tgaacttaaccatagaaaag

SEQ ID NO: 8661 - DNA, 20 bp, Artificial Sequence
  Synthetic oligonucleotide; AGG chr11 5226521 5226540 5226537 +
gaacttaaccatagaaaaga

SEQ ID NO: 8662 - DNA, 20 bp, Artificial Sequence
  Synthetic oligonucleotide; GGG chr11 5226522 5226541 5226538 +
aacttaaccatagaaaagaa

SEQ ID NO: 8663 - DNA, 20 bp, Artificial Sequence
  Synthetic oligonucleotide; GGG chr11 5226523 5226542 5226539 +
acttaaccatagaaaagaag

SEQ ID NO: 8664 - DNA, 20 bp, Artificial Sequence
  Synthetic oligonucleotide; AAG chr11 5226527 5226546 5226543 +
aaccatagaaaagaagggga

SEQ ID NO: 8665 - DNA, 20 bp, Artificial Sequence
  Synthetic oligonucleotide; AAG chr11 5226538 5226557 5226554 +
agaaggggaaagaaaacatc

SEQ ID NO: 8666 - DNA, 20 bp, Artificial Sequence
  Synthetic oligonucleotide; TAG chr11 5226548 5226567 5226564 +
agaaaacatcaagcgtccca

SEQ ID NO: 8667 - DNA, 20 bp, Artificial Sequence
  Synthetic oligonucleotide; AAG chr11 5226561 5226580 5226577 +
cgtcccatagactcaccctg

SEQ ID NO: 8668 - DNA, 20 bp, Artificial Sequence
  Synthetic oligonucleotide; CAG chr11 5226568 5226587 5226584 +
tagactcaccctgaagttct

SEQ ID NO: 8669 - DNA, 20 bp, Artificial Sequence
  Synthetic oligonucleotide; AGG chr11 5226569 5226588 5226585 +
agactcaccctgaagttctc

SEQ ID NO: 8670 - DNA, 20 bp, Artificial Sequence
  Synthetic oligonucleotide; CAG chr11 5226581 5226600 5226597 +
aagttctcaggatccacgtg

SEQ ID NO: 8671 - DNA, 20 bp, Artificial Sequence
  Synthetic oligonucleotide; CAG chr11 5226591 5226610 5226607 +
gatccacgtgcagcttgtca

SEQ ID NO: 8672 - DNA, 20 bp, Artificial Sequence
  Synthetic oligonucleotide; CAG chr11 5226596 5226615 5226612 +
acgtgcagcttgtcacagtg

SEQ ID NO: 8673 - DNA, 20 bp, Artificial Sequence
  Synthetic oligonucleotide; CAG chr11 5226605 5226624 5226621 +
ttgtcacagtgcagctcact

SEQ ID NO: 8674 - DNA, 20 bp, Artificial Sequence
  Synthetic oligonucleotide; TGG chr11 5226610 5226629 5226626 +
acagtgcagctcactcagtg

SEQ ID NO: 8675 - DNA, 20 bp, Artificial Sequence
  Synthetic oligonucleotide; AAG chr11 5226615 5226634 5226631 +
gcagctcactcagtgtggca

SEQ ID NO: 8676 - DNA, 20 bp, Artificial Sequence
  Synthetic oligonucleotide; AGG chr11 5226616 5226635 5226632 +
cagctcactcagtgtggcaa

SEQ ID NO: 8677 - DNA, 20 bp, Artificial Sequence
  Synthetic oligonucleotide; GAG chr11 5226626 5226645 5226642 +
agtgtggcaaaggtgccctt

SEQ ID NO: 8678 - DNA, 20 bp, Artificial Sequence
  Synthetic oligonucleotide; AGG chr11 5226627 5226646 5226643 +
gtgtggcaaaggtgcccttg

SEQ ID NO: 8679 - DNA, 20 bp, Artificial Sequence
  Synthetic oligonucleotide; CAG chr11 5226635 5226654 5226651 +
aaggtgcccttgaggttgtc

SEQ ID NO: 8680 - DNA, 20 bp, Artificial Sequence
  Synthetic oligonucleotide; AGG chr11 5226636 5226655 5226652 +
aggtgcccttgaggttgtcc

SEQ ID NO: 8681 - DNA, 20 bp, Artificial Sequence
  Synthetic oligonucleotide; GAG chr11 5226640 5226659 5226656 +
gcccttgaggttgtccaggt

SEQ ID NO: 8682 - DNA, 20 bp, Artificial Sequence
  Synthetic oligonucleotide; CAG chr11 5226644 5226663 5226660 +
ttgaggttgtccaggtgagc

SEQ ID NO: 8683 - DNA, 20 bp, Artificial Sequence
  Synthetic oligonucleotide; AGG chr11 5226645 5226664 5226661 +
tgaggttgtccaggtgagcc

SEQ ID NO: 8684 - DNA, 20 bp, Artificial Sequence
  Synthetic oligonucleotide; AAG chr11 5226657 5226676 5226673 +
ggtgagccaggccatcacta

SEQ ID NO: 8685 - DNA, 20 bp, Artificial Sequence
  Synthetic oligonucleotide; AGG chr11 5226658 5226677 5226674 +
gtgagccaggccatcactaa

SEQ ID NO: 8686 - DNA, 20 bp, Artificial Sequence
  Synthetic oligonucleotide; GAG chr11 5226665 5226684 5226681 +
aggccatcactaaaggcacc

SEQ ID NO: 8687 - DNA, 20 bp, Artificial Sequence
  Synthetic oligonucleotide; GAG chr11 5226682 5226701 5226698 +
accgagcactttcttgccat

SEQ ID NO: 8688 - DNA, 20 bp, Artificial Sequence
  Synthetic oligonucleotide; TAG chr11 5226694 5226713 5226710 +
cttgccatgagccttcacct

SEQ ID NO: 8689 - DNA, 20 bp, Artificial Sequence
  Synthetic oligonucleotide; AGG chr11 5226695 5226714 5226711 +
ttgccatgagccttcacctt

SEQ ID NO: 8690 - DNA, 20 bp, Artificial Sequence
  Synthetic oligonucleotide; GGG chr11 5226696 5226715 5226712 +
tgccatgagccttcacctta

SEQ ID NO: 8691 - DNA, 20 bp, Artificial Sequence
  Synthetic oligonucleotide; CAG chr11 5226709 5226728 5226725 +
caccttagggttgcccataa

SEQ ID NO: 8692 - DNA, 20 bp, Artificial Sequence
  Synthetic oligonucleotide; CAG chr11 5226715 5226734 5226731 +
agggttgcccataacagcat

SEQ ID NO: 8693 - DNA, 20 bp, Artificial Sequence
  Synthetic oligonucleotide; AGG chr11 5226716 5226735 5226732 +
gggttgcccataacagcatc

SEQ ID NO: 8694 - DNA, 20 bp, Artificial Sequence
  Synthetic oligonucleotide; GAG chr11 5226718 5226737 5226734 +
gttgcccataacagcatcag

SEQ ID NO: 8695 - DNA, 20 bp, Artificial Sequence
  Synthetic oligonucleotide; TGG chr11 5226721 5226740 5226737 +
gcccataacagcatcaggag

SEQ ID NO: 8696 - DNA, 20 bp, Artificial Sequence
  Synthetic oligonucleotide; CAG chr11 5226725 5226744 5226741 +
ataacagcatcaggagtgga

SEQ ID NO: 8697 - DNA, 20 bp, Artificial Sequence
  Synthetic oligonucleotide; AAG chr11 5226735 5226754 5226751 +
caggagtggacagatcccca

SEQ ID NO: 8698 - DNA, 20 bp, Artificial Sequence
  Synthetic oligonucleotide; AGG chr11 5226736 5226755 5226752 +
aggagtggacagatccccaa

SEQ ID NO: 8699 - DNA, 20 bp, Artificial Sequence
  Synthetic oligonucleotide; AAG chr11 5226744 5226763 5226760 +
acagatccccaaaggactca

SEQ ID NO: 8700 - DNA, 20 bp, Artificial Sequence
  Synthetic oligonucleotide; TGG chr11 5226753 5226772 5226769 +
caaaggactcaaagaacctc

SEQ ID NO: 8701 - DNA, 20 bp, Artificial Sequence
  Synthetic oligonucleotide; GGG chr11 5226754 5226773 5226770 +
aaaggactcaaagaacctct

SEQ ID NO: 8702 - DNA, 20 bp, Artificial Sequence
  Synthetic oligonucleotide; AAG chr11 5226760 5226779 5226776 +
ctcaaagaacctctgggtcc

SEQ ID NO: 8703 - DNA, 20 bp, Artificial Sequence
  Synthetic oligonucleotide; AGG chr11 5226761 5226780 5226777 +
tcaaagaacctctgggtcca

SEQ ID NO: 8704 - DNA, 20 bp, Artificial Sequence
  Synthetic oligonucleotide; GGG chr11 5226762 5226781 5226778 +
caaagaacctctgggtccaa

SEQ ID NO: 8705 - DNA, 20 bp, Artificial Sequence
  Synthetic oligonucleotide; TAG chr11 5226765 5226784 5226781 +
agaacctctgggtccaaggg

SEQ ID NO: 8706 - DNA, 20 bp, Artificial Sequence
  Synthetic oligonucleotide; CAG chr11 5226773 5226792 5226789 +
tgggtccaagggtagaccac

SEQ ID NO: 8707 - DNA, 20 bp, Artificial Sequence
  Synthetic oligonucleotide; CAG chr11 5226776 5226795 5226792 +
gtccaagggtagaccaccag

SEQ ID NO: 8708 - DNA, 20 bp, Artificial Sequence
  Synthetic oligonucleotide; AAG chr11 5226782 5226801 5226798 +
gggtagaccaccagcagcct

SEQ ID NO: 8709 - DNA, 20 bp, Artificial Sequence
  Synthetic oligonucleotide; AGG chr11 5226783 5226802 5226799 +
ggtagaccaccagcagccta

SEQ ID NO: 8710 - DNA, 20 bp, Artificial Sequence
  Synthetic oligonucleotide; GGG chr11 5226784 5226803 5226800 +
gtagaccaccagcagcctaa

SEQ ID NO: 8711 - DNA, 20 bp, Artificial Sequence
  Synthetic oligonucleotide; TGG chr11 5226787 5226806 5226803 +
gaccaccagcagcctaaggg

SEQ ID NO: 8712 - DNA, 20 bp, Artificial Sequence
  Synthetic oligonucleotide; GGG chr11 5226788 5226807 5226804 +
accaccagcagcctaagggt

SEQ ID NO: 8713 - DNA, 20 bp, Artificial Sequence
  Synthetic oligonucleotide; TAG chr11 5226795 5226814 5226811 +
gcagcctaagggtgggaaaa

SEQ ID NO: 8714 - DNA, 20 bp, Artificial Sequence
  Synthetic oligonucleotide; TAG chr11 5226803 5226822 5226819 +
agggtgggaaaatagaccaa

SEQ ID NO: 8715 - DNA, 20 bp, Artificial Sequence
  Synthetic oligonucleotide; AGG chr11 5226804 5226823 5226820 +
gggtgggaaaatagaccaat

SEQ ID NO: 8716 - DNA, 20 bp, Artificial Sequence
  Synthetic oligonucleotide; CAG chr11 5226807 5226826 5226823 +
tgggaaaatagaccaatagg

SEQ ID NO: 8717 - DNA, 20 bp, Artificial Sequence
  Synthetic oligonucleotide; GAG chr11 5226809 5226828 5226825 +
ggaaaatagaccaataggca

SEQ ID NO: 8718 - DNA, 20 bp, Artificial Sequence
  Synthetic oligonucleotide; GAG chr11 5226811 5226830 5226827 +
aaaatagaccaataggcaga

SEQ ID NO: 8719 - DNA, 20 bp, Artificial Sequence
  Synthetic oligonucleotide; GAG chr11 5226813 5226832 5226829 +
aatagaccaataggcagaga

SEQ ID NO: 8720 - DNA, 20 bp, Artificial Sequence
  Synthetic oligonucleotide; CAG chr11 5226817 5226836 5226833 +
gaccaataggcagagagagt

SEQ ID NO: 8721 - DNA, 20 bp, Artificial Sequence
  Synthetic oligonucleotide; CAG chr11 5226827 5226846 5226843 +
cagagagagtcagtgcctat

SEQ ID NO: 8722 - DNA, 20 bp, Artificial Sequence
  Synthetic oligonucleotide; AAG chr11 5226836 5226855 5226852 +
tcagtgcctatcagaaaccc

SEQ ID NO: 8723 - DNA, 20 bp, Artificial Sequence
  Synthetic oligonucleotide; GAG chr11 5226838 5226857 5226854 +
agtgcctatcagaaacccaa

SEQ ID NO: 8724 - DNA, 20 bp, Artificial Sequence
  Synthetic oligonucleotide; CAG chr11 5226862 5226881 5226878 +
cttctctgtctccacatgcc

SEQ ID NO: 8725 - DNA, 20 bp, Artificial Sequence
  Synthetic oligonucleotide; TGG chr11 5226872 5226891 5226888 +
tccacatgcccagtttctat

SEQ ID NO: 8726 - DNA, 20 bp, Artificial Sequence
  Synthetic oligonucleotide; CAG chr11 5226915 5226934 5226931 +
aaccttgataccaacctgcc

SEQ ID NO: 8727 - DNA, 20 bp, Artificial Sequence
  Synthetic oligonucleotide; AGG chr11 5226916 5226935 5226932 +
accttgataccaacctgccc

SEQ ID NO: 8728 - DNA, 20 bp, Artificial Sequence
  Synthetic oligonucleotide; GGG chr11 5226917 5226936 5226933 +
ccttgataccaacctgccca

SEQ ID NO: 8729 - DNA, 20 bp, Artificial Sequence
  Synthetic oligonucleotide; CAG chr11 5226957 5226976 5226973 +
tccacgttcaccttgcccca

SEQ ID NO: 8730 - DNA, 20 bp, Artificial Sequence
  Synthetic oligonucleotide; AGG chr11 5226958 5226977 5226974 +
ccacgttcaccttgccccac

SEQ ID NO: 8731 - DNA, 20 bp, Artificial Sequence
  Synthetic oligonucleotide; GGG chr11 5226959 5226978 5226975 +
cacgttcaccttgccccaca

SEQ ID NO: 8732 - DNA, 20 bp, Artificial Sequence
  Synthetic oligonucleotide; CAG chr11 5226962 5226981 5226978 +
gttcaccttgccccacaggg

SEQ ID NO: 8733 - DNA, 20 bp, Artificial Sequence
  Synthetic oligonucleotide; CGG chr11 5226968 5226987 5226984 +
cttgccccacagggcagtaa

SEQ ID NO: 8734 - DNA, 20 bp, Artificial Sequence
  Synthetic oligonucleotide; CAG chr11 5226971 5226990 5226987 +
gccccacagggcagtaacgg

SEQ ID NO: 8735 - DNA, 20 bp, Artificial Sequence
  Synthetic oligonucleotide; CAG chr11 5226983 5227002 5226999 +
agtaacggcagacttctcct

SEQ ID NO: 8736 - DNA, 20 bp, Artificial Sequence
  Synthetic oligonucleotide; AGG chr11 5226984 5227003 5227000 +
gtaacggcagacttctcctc

SEQ ID NO: 8737 - DNA, 20 bp, Artificial Sequence
  Synthetic oligonucleotide; GAG chr11 5226986 5227005 5227002 +
aacggcagacttctcctcag

SEQ ID NO: 8738 - DNA, 20 bp, Artificial Sequence
  Synthetic oligonucleotide; CAG chr11 5226990 5227009 5227006 +
gcagacttctcctcaggagt

SEQ ID NO: 8739 - DNA, 20 bp, Artificial Sequence
  Synthetic oligonucleotide; TGG chr11 5227001 5227020 5227017 +
ctcaggagtcagatgcacca

SEQ ID NO: 8740 - DNA, 20 bp, Artificial Sequence
  Synthetic oligonucleotide; GAG chr11 5227013 5227032 5227029 +
atgcaccatggtgtctgttt

SEQ ID NO: 8741 - DNA, 20 bp, Artificial Sequence
  Synthetic oligonucleotide; AGG chr11 5227014 5227033 5227030 +
tgcaccatggtgtctgtttg

SEQ ID NO: 8742 - DNA, 20 bp, Artificial Sequence
  Synthetic oligonucleotide; TAG chr11 5227021 5227040 5227037 +
tggtgtctgtttgaggttgc

SEQ ID NO: 8743 - DNA, 20 bp, Artificial Sequence
  Synthetic oligonucleotide; CAG chr11 5227030 5227049 5227046 +
tttgaggttgctagtgaaca

SEQ ID NO: 8744 - DNA, 20 bp, Artificial Sequence
  Synthetic oligonucleotide; CAG chr11 5227039 5227058 5227055 +
gctagtgaacacagttgtgt

SEQ ID NO: 8745 - DNA, 20 bp, Artificial Sequence
  Synthetic oligonucleotide; AAG chr11 5227042 5227061 5227058 +
agtgaacacagttgtgtcag

SEQ ID NO: 8746 - DNA, 20 bp, Artificial Sequence
  Synthetic oligonucleotide; AAG chr11 5227052 5227071 5227068 +
gttgtgtcagaagcaaatgt

SEQ ID NO: 8747 - DNA, 20 bp, Artificial Sequence
  Synthetic oligonucleotide; TAG chr11 5227058 5227077 5227074 +
tcagaagcaaatgtaagcaa

SEQ ID NO: 8748 - DNA, 20 bp, Artificial Sequence
  Synthetic oligonucleotide; TGG chr11 5227062 5227081 5227078 +
aagcaaatgtaagcaataga

SEQ ID NO: 8749 - DNA, 20 bp, Artificial Sequence
  Synthetic oligonucleotide; CAG chr11 5227086 5227105 5227102 +
tctgccctgacttttatgcc

SEQ ID NO: 8750 - DNA, 20 bp, Artificial Sequence
  Synthetic oligonucleotide; TGG chr11 5227092 5227111 5227108 +
ctgacttttatgcccagccc

SEQ ID NO: 8751 - DNA, 20 bp, Artificial Sequence
  Synthetic oligonucleotide; TGG chr11 5227114 5227133 5227130 +
gctcctgccctccctgctcc

SEQ ID NO: 8752 - DNA, 20 bp, Artificial Sequence
  Synthetic oligonucleotide; GGG chr11 5227115 5227134 5227131 +
ctcctgccctccctgctcct

SEQ ID NO: 8753 - DNA, 20 bp, Artificial Sequence
  Synthetic oligonucleotide; GAG chr11 5227117 5227136 5227133 +
cctgccctccctgctcctgg

SEQ ID NO: 8754 - DNA, 20 bp, Artificial Sequence
  Synthetic oligonucleotide; TAG chr11 5227120 5227139 5227136 +
gccctccctgctcctgggag

SEQ ID NO: 8755 - DNA, 20 bp, Artificial Sequence
  Synthetic oligonucleotide; TGG chr11 5227125 5227144 5227141 +
ccctgctcctgggagtagat

SEQ ID NO: 8756 - DNA, 20 bp, Artificial Sequence
  Synthetic oligonucleotide; TAG chr11 5227135 5227154 5227151 +
gggagtagattggccaaccc

SEQ ID NO: 8757 - DNA, 20 bp, Artificial Sequence
  Synthetic oligonucleotide; AGG chr11 5227136 5227155 5227152 +
ggagtagattggccaaccct

SEQ ID NO: 8758 - DNA, 20 bp, Artificial Sequence
  Synthetic oligonucleotide; GGG chr11 5227137 5227156 5227153 +
gagtagattggccaacccta

SEQ ID NO: 8759 - DNA, 20 bp, Artificial Sequence
  Synthetic oligonucleotide; TGG chr11 5227142 5227161 5227158 +
gattggccaaccctagggtg

SEQ ID NO: 8760 - DNA, 20 bp, Artificial Sequence
  Synthetic oligonucleotide; CAG chr11 5227150 5227169 5227166 +
aaccctagggtgtggctcca

SEQ ID NO: 8761 - DNA, 20 bp, Artificial Sequence
  Synthetic oligonucleotide; AGG chr11 5227151 5227170 5227167 +
accctagggtgtggctccac

SEQ ID NO: 8762 - DNA, 20 bp, Artificial Sequence
  Synthetic oligonucleotide; GGG chr11 5227152 5227171 5227168 +
ccctagggtgtggctccaca

SEQ ID NO: 8763 - DNA, 20 bp, Artificial Sequence
  Synthetic oligonucleotide; GAG chr11 5227156 5227175 5227172 +
agggtgtggctccacagggt

SEQ ID NO: 8764 - DNA, 20 bp, Artificial Sequence
  Synthetic oligonucleotide; AGG chr11 5227157 5227176 5227173 +
gggtgtggctccacagggtg

SEQ ID NO: 8765 - DNA, 20 bp, Artificial Sequence
  Synthetic oligonucleotide; AAG chr11 5227163 5227182 5227179 +
ggctccacagggtgaggtct

SEQ ID NO: 8766 - DNA, 20 bp, Artificial Sequence
  Synthetic oligonucleotide; CAG chr11 5227172 5227191 5227188 +
gggtgaggtctaagtgatga

SEQ ID NO: 8767 - DNA, 20 bp, Artificial Sequence
  Synthetic oligonucleotide; TGG chr11 5227188 5227207 5227204 +
atgacagccgtacctgtcct

SEQ ID NO: 8768 - DNA, 20 bp, Artificial Sequence
  Synthetic oligonucleotide; TGG chr11 5227197 5227216 5227213 +
gtacctgtccttggctcttc

SEQ ID NO: 8769 - DNA, 20 bp, Artificial Sequence
  Synthetic oligonucleotide; TGG chr11 5227203 5227222 5227219 +
gtccttggctcttctggcac

SEQ ID NO: 8770 - DNA, 20 bp, Artificial Sequence
  Synthetic oligonucleotide; TAG chr11 5227208 5227227 5227224 +
tggctcttctggcactggct

SEQ ID NO: 8771 - DNA, 20 bp, Artificial Sequence
  Synthetic oligonucleotide; AGG chr11 5227209 5227228 5227225 +
ggctcttctggcactggctt

SEQ ID NO: 8772 - DNA, 20 bp, Artificial Sequence
  Synthetic oligonucleotide; GAG chr11 5227211 5227230 5227227 +
ctcttctggcactggcttag

SEQ ID NO: 8773 - DNA, 20 bp, Artificial Sequence
  Synthetic oligonucleotide; TGG chr11 5227215 5227234 5227231 +
tctggcactggcttaggagt

SEQ ID NO: 8774 - DNA, 20 bp, Artificial Sequence
  Synthetic oligonucleotide; CAG chr11 5227230 5227249 5227246 +
ggagttggacttcaaaccct

SEQ ID NO: 8775 - DNA, 20 bp, Artificial Sequence
  Synthetic oligonucleotide; AAG chr11 5227243 5227262 5227259 +
aaaccctcagccctccctct

SEQ ID NO: 8776 - DNA, 20 bp, Artificial Sequence
  Synthetic oligonucleotide; TGG chr11 5227256 5227275 5227272 +
tccctctaagatatatctct

SEQ ID NO: 8777 - DNA, 20 bp, Artificial Sequence
  Synthetic oligonucleotide; CAG chr11 5227270 5227289 5227286 +
atctcttggccccataccat

SEQ ID NO: 8778 - DNA, 20 bp, Artificial Sequence
  Synthetic oligonucleotide; AAG chr11 5227305 5227324 5227321 +
ctaaaaacatcctcctttgc

SEQ ID NO: 8779 - DNA, 20 bp, Artificial Sequence
  Synthetic oligonucleotide; TGG chr11 5227325 5227344 5227341 +
aagtgtatttacgtaatatt

SEQ ID NO: 8780 - DNA, 20 bp, Artificial Sequence
  Synthetic oligonucleotide; CAG chr11 5227333 5227352 5227349 +
ttacgtaatatttggaatca

SEQ ID NO: 8781 - DNA, 20 bp, Artificial Sequence
  Synthetic oligonucleotide; TGG chr11 5227338 5227357 5227354 +
taatatttggaatcacagct

SEQ ID NO: 8782 - DNA, 20 bp, Artificial Sequence
  Synthetic oligonucleotide; AAG chr11 5227342 5227361 5227358 +
atttggaatcacagcttggt

SEQ ID NO: 8783 - DNA, 20 bp, Artificial Sequence
  Synthetic oligonucleotide; AAG chr11 5227352 5227371 5227368 +
acagcttggtaagcatattg

SEQ ID NO: 8784 - DNA, 20 bp, Artificial Sequence
  Synthetic oligonucleotide; AAG chr11 5227386 5227405 5227402 +
aattttcttattacacaaat

SEQ ID NO: 8785 - DNA, 20 bp, Artificial Sequence
  Synthetic oligonucleotide; AAG chr11 5227389 5227408 5227405 +
tttcttattacacaaataag

SEQ ID NO: 8786 - DNA, 20 bp, Artificial Sequence
  Synthetic oligonucleotide; AAG chr11 5227404 5227423 5227420 +
ataagaagttgatgcactaa

SEQ ID NO: 8787 - DNA, 20 bp, Artificial Sequence
  Synthetic oligonucleotide; TGG chr11 5227407 5227426 5227423 +
agaagttgatgcactaaaag

SEQ ID NO: 8788 - DNA, 20 bp, Artificial Sequence
  Synthetic oligonucleotide; AAG chr11 5227410 5227429 5227426 +
agttgatgcactaaaagtgg

SEQ ID NO: 8789 - DNA, 20 bp, Artificial Sequence
  Synthetic oligonucleotide; GAG chr11 5227412 5227431 5227428 +
ttgatgcactaaaagtggaa

SEQ ID NO: 8790 - DNA, 20 bp, Artificial Sequence
  Synthetic oligonucleotide; CAG chr11 5227432 5227451 5227448 +
gagttttgtctaccataatt

SEQ ID NO: 8791 - DNA, 20 bp, Artificial Sequence
  Synthetic oligonucleotide; TGG chr11 5227438 5227457 5227454 +
tgtctaccataattcagctt

SEQ ID NO: 8792 - DNA, 20 bp, Artificial Sequence
  Synthetic oligonucleotide; GGG chr11 5227439 5227458 5227455 +
gtctaccataattcagcttt

SEQ ID NO: 8793 - DNA, 20 bp, Artificial Sequence
  Synthetic oligonucleotide; TAG chr11 5227447 5227466 5227463 +
taattcagctttgggatatg

SEQ ID NO: 8794 - DNA, 20 bp, Artificial Sequence
  Synthetic oligonucleotide; TGG chr11 5227451 5227470 5227467 +
tcagctttgggatatgtaga

SEQ ID NO: 8795 - DNA, 20 bp, Artificial Sequence
  Synthetic oligonucleotide; CAG chr11 5227471 5227490 5227487 +
tggatctcttcctgcgtctc

SEQ ID NO: 8796 - DNA, 20 bp, Artificial Sequence
  Synthetic oligonucleotide; CAG chr11 5227491 5227510 5227507 +
cagaatatgcaaaatactta

SEQ ID NO: 8797 - DNA, 20 bp, Artificial Sequence
  Synthetic oligonucleotide; AGG chr11 5227492 5227511 5227508 +
agaatatgcaaaatacttac

SEQ ID NO: 8798 - DNA, 20 bp, Artificial Sequence
  Synthetic oligonucleotide; CAG chr11 5227496 5227515 5227512 +
tatgcaaaatacttacagga

SEQ ID NO: 8799 - DNA, 20 bp, Artificial Sequence
  Synthetic oligonucleotide; TGG chr11 5227501 5227520 5227517 +
aaaatacttacaggacagaa

SEQ ID NO: 8800 - DNA, 20 bp, Artificial Sequence
  Synthetic oligonucleotide; CGG chr11 5227519 5227538 5227535 +
aatggatgaaaactctacct

SEQ ID NO: 8801 - DNA, 20 bp, Artificial Sequence
  Synthetic oligonucleotide; AAG chr11 5227526 5227545 5227542 +
gaaaactctacctcggttct

SEQ ID NO: 8802 - DNA, 20 bp, Artificial Sequence
  Synthetic oligonucleotide; TGG chr11 5227546 5227565 5227562 +
aagcatatcttctccttatt

SEQ ID NO: 8803 - DNA, 20 bp, Artificial Sequence
  Synthetic oligonucleotide; TGG chr11 5227561 5227580 5227577 +
ttatttggattaaaaccttc

SEQ ID NO: 8804 - DNA, 20 bp, Artificial Sequence
  Synthetic oligonucleotide; AAG chr11 5227565 5227584 5227581 +
ttggattaaaaccttctggt

SEQ ID NO: 8805 - DNA, 20 bp, Artificial Sequence
  Synthetic oligonucleotide; AAG chr11 5227570 5227589 5227586 +
ttaaaaccttctggtaagaa

SEQ ID NO: 8806 - DNA, 20 bp, Artificial Sequence
  Synthetic oligonucleotide; TAG chr11 5227690 5227709 5227706 +
taataaattatgtctaaaaa

SEQ ID NO: 8807 - DNA, 20 bp, Artificial Sequence
  Synthetic oligonucleotide; TAG chr11 5227723 5227742 5227739 +
aatcaatgtgctctgtgcat

SEQ ID NO: 8808 - DNA, 20 bp, Artificial Sequence
  Synthetic oligonucleotide; TAG chr11 5227734 5227753 5227750 +
tctgtgcattagttacttat

SEQ ID NO: 8809 - DNA, 20 bp, Artificial Sequence
  Synthetic oligonucleotide; AGG chr11 5227735 5227754 5227751 +
ctgtgcattagttacttatt

SEQ ID NO: 8810 - DNA, 20 bp, Artificial Sequence
  Synthetic oligonucleotide; TGG chr11 5227741 5227760 5227757 +
attagttacttattaggttt

SEQ ID NO: 8811 - DNA, 20 bp, Artificial Sequence
  Synthetic oligonucleotide; GGG chr11 5227742 5227761 5227758 +
ttagttacttattaggtttt

SEQ ID NO: 8812 - DNA, 20 bp, Artificial Sequence
  Synthetic oligonucleotide; AAG chr11 5227749 5227768 5227765 +
cttattaggttttgggaaac

SEQ ID NO: 8813 - DNA, 20 bp, Artificial Sequence
  Synthetic oligonucleotide; GAG chr11 5227751 5227770 5227767 +
tattaggttttgggaaacaa

SEQ ID NO: 8814 - DNA, 20 bp, Artificial Sequence
  Synthetic oligonucleotide; TAG chr11 5227763 5227782 5227779 +
ggaaacaagagataaaaaac

SEQ ID NO: 8815 - DNA, 20 bp, Artificial Sequence
  Synthetic oligonucleotide; GAG chr11 5227765 5227784 5227781 +
aaacaagagataaaaaacta

SEQ ID NO: 8816 - DNA, 20 bp, Artificial Sequence
  Synthetic oligonucleotide; CAG chr11 5227779 5227798 5227795 +
aaactagagacctcttaatg

SEQ ID NO: 8817 - DNA, 20 bp, Artificial Sequence
  Synthetic oligonucleotide; AAG chr11 5227803 5227822 5227819 +
caaaaatacaaataaataaa

SEQ ID NO: 8818 - DNA, 20 bp, Artificial Sequence
  Synthetic oligonucleotide; AAG chr11 5227820 5227839 5227836 +
aaaaagtcacttacaaccca

SEQ ID NO: 8819 - DNA, 20 bp, Artificial Sequence
  Synthetic oligonucleotide; TGG chr11 5227835 5227854 5227851 +
acccaaagtgtgactatcaa

SEQ ID NO: 8820 - DNA, 20 bp, Artificial Sequence
  Synthetic oligonucleotide; GGG chr11 5227836 5227855 5227852 +
cccaaagtgtgactatcaat

SEQ ID NO: 8821 - DNA, 20 bp, Artificial Sequence
  Synthetic oligonucleotide; GGG chr11 5227837 5227856 5227853 +
ccaaagtgtgactatcaatg

SEQ ID NO: 8822 - DNA, 20 bp, Artificial Sequence
  Synthetic oligonucleotide; CAG chr11 5227844 5227863 5227860 +
gtgactatcaatggggtaat

SEQ ID NO: 8823 - DNA, 20 bp, Artificial Sequence
  Synthetic oligonucleotide; TGG chr11 5227847 5227866 5227863 +
actatcaatggggtaatcag

SEQ ID NO: 8824 - DNA, 20 bp, Artificial Sequence
  Synthetic oligonucleotide; TAG chr11 5227857 5227876 5227873 +
gggtaatcagtggtgtcaaa

SEQ ID NO: 8825 - DNA, 20 bp, Artificial Sequence
  Synthetic oligonucleotide; AGG chr11 5227858 5227877 5227874 +
ggtaatcagtggtgtcaaat

SEQ ID NO: 8826 - DNA, 20 bp, Artificial Sequence
  Synthetic oligonucleotide; GAG chr11 5227860 5227879 5227876 +
taatcagtggtgtcaaatag

SEQ ID NO: 8827 - DNA, 20 bp, Artificial Sequence
  Synthetic oligonucleotide; AGG chr11 5227861 5227880 5227877 +
aatcagtggtgtcaaatagg

SEQ ID NO: 8828 - DNA, 20 bp, Artificial Sequence
  Synthetic oligonucleotide; TGG chr11 5227869 5227888 5227885 +
gtgtcaaataggaggttaac

SEQ ID NO: 8829 - DNA, 20 bp, Artificial Sequence
  Synthetic oligonucleotide; GGG chr11 5227870 5227889 5227886 +
tgtcaaataggaggttaact

SEQ ID NO: 8830 - DNA, 20 bp, Artificial Sequence
  Synthetic oligonucleotide; GGG chr11 5227871 5227890 5227887 +
gtcaaataggaggttaactg

SEQ ID NO: 8831 - DNA, 20 bp, Artificial Sequence
  Synthetic oligonucleotide; TGG chr11 5227893 5227912 5227909 +
gacatctaactgtttctgcc

SEQ ID NO: 8832 - DNA, 20 bp, Artificial Sequence
  Synthetic oligonucleotide; AAG chr11 5227906 5227925 5227922 +
ttctgcctggactaatctgc

SEQ ID NO: 8833 - DNA, 20 bp, Artificial Sequence
  Synthetic oligonucleotide; GAG chr11 5227908 5227927 5227924 +
ctgcctggactaatctgcaa

SEQ ID NO: 8834 - DNA, 20 bp, Artificial Sequence
  Synthetic oligonucleotide; TGG chr11 5227915 5227934 5227931 +
gactaatctgcaagagtgtc

SEQ ID NO: 8835 - DNA, 20 bp, Artificial Sequence
  Synthetic oligonucleotide; GGG chr11 5227916 5227935 5227932 +
actaatctgcaagagtgtct

SEQ ID NO: 8836 - DNA, 20 bp, Artificial Sequence
  Synthetic oligonucleotide; GGG chr11 5227917 5227936 5227933 +
ctaatctgcaagagtgtctg

SEQ ID NO: 8837 - DNA, 20 bp, Artificial Sequence
  Synthetic oligonucleotide; GGG chr11 5227918 5227937 5227934 +
taatctgcaagagtgtctgg

SEQ ID NO: 8838 - DNA, 20 bp, Artificial Sequence
  Synthetic oligonucleotide; AAG chr11 5227927 5227946 5227943 +
agagtgtctgggggaacaaa

SEQ ID NO: 8839 - DNA, 20 bp, Artificial Sequence
  Synthetic oligonucleotide; TAG chr11 5227941 5227960 5227957 +
aacaaaaagcctctgtgact

SEQ ID NO: 8840 - DNA, 20 bp, Artificial Sequence
  Synthetic oligonucleotide; AAG chr11 5227945 5227964 5227961 +
aaaagcctctgtgacttaga

SEQ ID NO: 8841 - DNA, 20 bp, Artificial Sequence
  Synthetic oligonucleotide; TAG chr11 5227948 5227967 5227964 +
agcctctgtgacttagaaag

SEQ ID NO: 8842 - DNA, 20 bp, Artificial Sequence
  Synthetic oligonucleotide; AGG chr11 5227949 5227968 5227965 +
gcctctgtgacttagaaagt

SEQ ID NO: 8843 - DNA, 20 bp, Artificial Sequence
  Synthetic oligonucleotide; GGG chr11 5227950 5227969 5227966 +
cctctgtgacttagaaagta

SEQ ID NO: 8844 - DNA, 20 bp, Artificial Sequence
  Synthetic oligonucleotide; GGG chr11 5227951 5227970 5227967 +
ctctgtgacttagaaagtag

SEQ ID NO: 8845 - DNA, 20 bp, Artificial Sequence
  Synthetic oligonucleotide; TAG chr11 5227954 5227973 5227970 +
tgtgacttagaaagtagggg

SEQ ID NO: 8846 - DNA, 20 bp, Artificial Sequence
  Synthetic oligonucleotide; AGG chr11 5227955 5227974 5227971 +
gtgacttagaaagtaggggt

SEQ ID NO: 8847 - DNA, 20 bp, Artificial Sequence
  Synthetic oligonucleotide; GAG chr11 5227957 5227976 5227973 +
gacttagaaagtaggggtag

SEQ ID NO: 8848 - DNA, 20 bp, Artificial Sequence
  Synthetic oligonucleotide; AGG chr11 5227958 5227977 5227974 +
acttagaaagtaggggtagg

SEQ ID NO: 8849 - DNA, 20 bp, Artificial Sequence
  Synthetic oligonucleotide; GGG chr11 5227959 5227978 5227975 +
cttagaaagtaggggtagga

SEQ ID NO: 8850 - DNA, 20 bp, Artificial Sequence
  Synthetic oligonucleotide; GGG chr11 5227960 5227979 5227976 +
ttagaaagtaggggtaggag

SEQ ID NO: 8851 - DNA, 20 bp, Artificial Sequence
  Synthetic oligonucleotide; AAG chr11 5227965 5227984 5227981 +
aagtaggggtaggaggggaa

SEQ ID NO: 8852 - DNA, 20 bp, Artificial Sequence
  Synthetic oligonucleotide; AGG chr11 5227966 5227985 5227982 +
agtaggggtaggaggggaaa

SEQ ID NO: 8853 - DNA, 20 bp, Artificial Sequence
  Synthetic oligonucleotide; TGG chr11 5227978 5227997 5227994 +
aggggaaaaggtcttctact

SEQ ID NO: 8854 - DNA, 20 bp, Artificial Sequence
  Synthetic oligonucleotide; CAG chr11 5227983 5228002 5227999 +
aaaaggtcttctacttggct

SEQ ID NO: 8855 - DNA, 20 bp, Artificial Sequence
  Synthetic oligonucleotide; TAG chr11 5228001 5228020 5228017 +
ctcagattatttttttcctc

SEQ ID NO: 8856 - DNA, 20 bp, Artificial Sequence
  Synthetic oligonucleotide; AAG chr11 5228010 5228029 5228026 +
tttttttcctctagtccact

SEQ ID NO: 8857 - DNA, 20 bp, Artificial Sequence
  Synthetic oligonucleotide; AAG chr11 5228045 5228064 5228061 +
taaaatcatttccttgattc

SEQ ID NO: 8858 - DNA, 20 bp, Artificial Sequence
  Synthetic oligonucleotide; TAG chr11 5228114 5228133 5228130 +
aatttactcttctttctcta

SEQ ID NO: 8859 - DNA, 20 bp, Artificial Sequence
  Synthetic oligonucleotide; CAG chr11 5228183 5228202 5228199 +
cttgtactaaattaactcct

SEQ ID NO: 8860 - DNA, 20 bp, Artificial Sequence
  Synthetic oligonucleotide; AGG chr11 5228184 5228203 5228200 +
ttgtactaaattaactcctc

SEQ ID NO: 8861 - DNA, 20 bp, Artificial Sequence
  Synthetic oligonucleotide; GAG chr11 5228188 5228207 5228204 +
actaaattaactcctcaggt

SEQ ID NO: 8862 - DNA, 20 bp, Artificial Sequence
  Synthetic oligonucleotide; AGG chr11 5228189 5228208 5228205 +
ctaaattaactcctcaggtg

SEQ ID NO: 8863 - DNA, 20 bp, Artificial Sequence
  Synthetic oligonucleotide; AAG chr11 5228203 5228222 5228219 +
caggtgaggaaaaacttttg

SEQ ID NO: 8864 - DNA, 20 bp, Artificial Sequence
  Synthetic oligonucleotide; CAG chr11 5228208 5228227 5228224 +
gaggaaaaacttttgaagtg

SEQ ID NO: 8865 - DNA, 20 bp, Artificial Sequence
  Synthetic oligonucleotide; GAG chr11 5228210 5228229 5228226 +
ggaaaaacttttgaagtgca

SEQ ID NO: 8866 - DNA, 20 bp, Artificial Sequence
  Synthetic oligonucleotide; AAG chr11 5228232 5228251 5228248 +
gttctgcttcctgctattaa

SEQ ID NO: 8867 - DNA, 20 bp, Artificial Sequence
  Synthetic oligonucleotide; CAG chr11 5228247 5228266 5228263 +
attaaaagatgtaattaaaa

SEQ ID NO: 8868 - DNA, 20 bp, Artificial Sequence
  Synthetic oligonucleotide; AAG chr11 5228252 5228271 5228268 +
aagatgtaattaaaacagca

SEQ ID NO: 8869 - DNA, 20 bp, Artificial Sequence
  Synthetic oligonucleotide; AGG chr11 5228253 5228272 5228269 +
agatgtaattaaaacagcaa

SEQ ID NO: 8870 - DNA, 20 bp, Artificial Sequence
  Synthetic oligonucleotide; TAG chr11 5228256 5228275 5228272 +
tgtaattaaaacagcaaagg

SEQ ID NO: 8871 - DNA, 20 bp, Artificial Sequence
  Synthetic oligonucleotide; AAG chr11 5228260 5228279 5228276 +
attaaaacagcaaaggtagc

SEQ ID NO: 8872 - DNA, 20 bp, Artificial Sequence
  Synthetic oligonucleotide; GAG chr11 5228270 5228289 5228286 +
caaaggtagcaagcatttat

SEQ ID NO: 8873 - DNA, 20 bp, Artificial Sequence
  Synthetic oligonucleotide; AGG chr11 5228271 5228290 5228287 +
aaaggtagcaagcatttatg

SEQ ID NO: 8874 - DNA, 20 bp, Artificial Sequence
  Synthetic oligonucleotide; CAG chr11 5228275 5228294 5228291 +
gtagcaagcatttatgaggt

SEQ ID NO: 8875 - DNA, 20 bp, Artificial Sequence
  Synthetic oligonucleotide; TAG chr11 5228280 5228299 5228296 +
aagcatttatgaggtcagcg

SEQ ID NO: 8876 - DNA, 20 bp, Artificial Sequence
  Synthetic oligonucleotide; AGG chr11 5228281 5228300 5228297 +
agcatttatgaggtcagcgt

SEQ ID NO: 8877 - DNA, 20 bp, Artificial Sequence
  Synthetic oligonucleotide; GGG chr11 5228282 5228301 5228298 +
gcatttatgaggtcagcgta

SEQ ID NO: 8878 - DNA, 20 bp, Artificial Sequence
  Synthetic oligonucleotide; CAG chr11 5228288 5228307 5228304 +
atgaggtcagcgtagggtct

SEQ ID NO: 8879 - DNA, 20 bp, Artificial Sequence
  Synthetic oligonucleotide; AAG chr11 5228299 5228318 5228315 +
gtagggtctcagtgttccct

SEQ ID NO: 8880 - DNA, 20 bp, Artificial Sequence
  Synthetic oligonucleotide; AGG chr11 5228300 5228319 5228316 +
tagggtctcagtgttcccta

SEQ ID NO: 8881 - DNA, 20 bp, Artificial Sequence
  Synthetic oligonucleotide; GGG chr11 5228301 5228320 5228317 +
agggtctcagtgttccctaa

SEQ ID NO: 8882 - DNA, 20 bp, Artificial Sequence
  Synthetic oligonucleotide; CAG chr11 5228310 5228329 5228326 +
gtgttccctaagggccctgt

SEQ ID NO: 8883 - DNA, 20 bp, Artificial Sequence
  Synthetic oligonucleotide; TGG chr11 5228336 5228355 5228352 +
tcctgaatcctgcccctacc

SEQ ID NO: 8884 - DNA, 20 bp, Artificial Sequence
  Synthetic oligonucleotide; CGG chr11 5228349 5228368 5228365 +
ccctacctggaaacccatgt

SEQ ID NO: 8885 - DNA, 20 bp, Artificial Sequence
  Synthetic oligonucleotide; TAG chr11 5228354 5228373 5228370 +
cctggaaacccatgtcggtt

SEQ ID NO: 8886 - DNA, 20 bp, Artificial Sequence
  Synthetic oligonucleotide; AAG chr11 5228358 5228377 5228374 +
gaaacccatgtcggtttagt

SEQ ID NO: 8887 - DNA, 20 bp, Artificial Sequence
  Synthetic oligonucleotide; AGG chr11 5228359 5228378 5228375 +
aaacccatgtcggtttagta

SEQ ID NO: 8888 - DNA, 20 bp, Artificial Sequence
  Synthetic oligonucleotide; AAG chr11 5228363 5228382 5228379 +
ccatgtcggtttagtaagga

SEQ ID NO: 8889 - DNA, 20 bp, Artificial Sequence
  Synthetic oligonucleotide; CAG chr11 5228408 5228427 5228424 +
tttctcctacttcttccttt

SEQ ID NO: 8890 - DNA, 20 bp, Artificial Sequence
  Synthetic oligonucleotide; TAG chr11 5228488 5228507 5228504 +
caataaaatgaaataaaatt

SEQ ID NO: 8891 - DNA, 20 bp, Artificial Sequence
  Synthetic oligonucleotide; AGG chr11 5228489 5228508 5228505 +
aataaaatgaaataaaattt

SEQ ID NO: 8892 - DNA, 20 bp, Artificial Sequence
  Synthetic oligonucleotide; AAG chr11 5228500 5228519 5228516 +
ataaaatttaggttaaccaa

SEQ ID NO: 8893 - DNA, 20 bp, Artificial Sequence
  Synthetic oligonucleotide; TGG chr11 5228507 5228526 5228523 +
ttaggttaaccaaaagaaac

SEQ ID NO: 8894 - DNA, 20 bp, Artificial Sequence
  Synthetic oligonucleotide; TAG chr11 5228522 5228541 5228538 +
gaaactggatcctctatttc

SEQ ID NO: 8895 - DNA, 20 bp, Artificial Sequence
  Synthetic oligonucleotide; CAG chr11 5228529 5228548 5228545 +
gatcctctatttctagttat

SEQ ID NO: 8896 - DNA, 20 bp, Artificial Sequence
  Synthetic oligonucleotide; AAG chr11 5228532 5228551 5228548 +
cctctatttctagttatcag

SEQ ID NO: 8897 - DNA, 20 bp, Artificial Sequence
  Synthetic oligonucleotide; AGG chr11 5228533 5228552 5228549 +
ctctatttctagttatcaga

SEQ ID NO: 8898 - DNA, 20 bp, Artificial Sequence
  Synthetic oligonucleotide; TAG chr11 5228604 5228623 5228620 +
ctctattattgctaaataaa

SEQ ID NO: 8899 - DNA, 20 bp, Artificial Sequence
  Synthetic oligonucleotide; GAG chr11 5228606 5228625 5228622 +
ctattattgctaaataaata

SEQ ID NO: 8900 - DNA, 20 bp, Artificial Sequence
  Synthetic oligonucleotide; CAG chr11 5228643 5228662 5228659 +
ctacctgtctcaaccctcat

SEQ ID NO: 8901 - DNA, 20 bp, Artificial Sequence
  Synthetic oligonucleotide; AGG chr11 5228644 5228663 5228660 +
tacctgtctcaaccctcatc

SEQ ID NO: 8902 - DNA, 20 bp, Artificial Sequence
  Synthetic oligonucleotide; CAG chr11 5228687 5228706 5228703 +
tctgattattctcacacacg

SEQ ID NO: 8903 - DNA, 20 bp, Artificial Sequence
  Synthetic oligonucleotide; AAG chr11 5228691 5228710 5228707 +
attattctcacacacgcaga

SEQ ID NO: 8904 - DNA, 20 bp, Artificial Sequence
  Synthetic oligonucleotide; TGG chr11 5228698 5228717 5228714 +
tcacacacgcagaaagtgtt

SEQ ID NO: 8905 - DNA, 20 bp, Artificial Sequence
  Synthetic oligonucleotide; TGG chr11 5228709 5228728 5228725 +
gaaagtgtttggttcttcta

SEQ ID NO: 8906 - DNA, 20 bp, Artificial Sequence
  Synthetic oligonucleotide; TGG chr11 5228717 5228736 5228733 +
ttggttcttctatggctatc

SEQ ID NO: 8907 - DNA, 20 bp, Artificial Sequence
  Synthetic oligonucleotide; GAG chr11 5228719 5228738 5228735 +
ggttcttctatggctatctg

SEQ ID NO: 8908 - DNA, 20 bp, Artificial Sequence
  Synthetic oligonucleotide; TAG chr11 5228724 5228743 5228740 +
ttctatggctatctggagcc

SEQ ID NO: 8909 - DNA, 20 bp, Artificial Sequence
  Synthetic oligonucleotide; AGG chr11 5228725 5228744 5228741 +
tctatggctatctggagcct

SEQ ID NO: 8910 - DNA, 20 bp, Artificial Sequence
  Synthetic oligonucleotide; TAG chr11 5228755 5228774 5228771 +
attatgcctatgtatgatta

SEQ ID NO: 8911 - DNA, 20 bp, Artificial Sequence
  Synthetic oligonucleotide; GAG chr11 5228757 5228776 5228773 +
tatgcctatgtatgattata

SEQ ID NO: 8912 - DNA, 20 bp, Artificial Sequence
  Synthetic oligonucleotide; AGG chr11 5228758 5228777 5228774 +
atgcctatgtatgattatag

SEQ ID NO: 8913 - DNA, 20 bp, Artificial Sequence
  Synthetic oligonucleotide; AAG chr11 5228762 5228781 5228778 +
ctatgtatgattatagaggt

SEQ ID NO: 8914 - DNA, 20 bp, Artificial Sequence
  Synthetic oligonucleotide; GAG chr11 5228764 5228783 5228780 +
atgtatgattatagaggtaa

SEQ ID NO: 8915 - DNA, 20 bp, Artificial Sequence
  Synthetic oligonucleotide; AGG chr11 5228765 5228784 5228781 +
tgtatgattatagaggtaag

SEQ ID NO: 8916 - DNA, 20 bp, Artificial Sequence
  Synthetic oligonucleotide; GGG chr11 5228766 5228785 5228782 +
gtatgattatagaggtaaga

SEQ ID NO: 8917 - DNA, 20 bp, Artificial Sequence
  Synthetic oligonucleotide; AAG chr11 5228778 5228797 5228794 +
aggtaagagggataaaattt

SEQ ID NO: 8918 - DNA, 20 bp, Artificial Sequence
  Synthetic oligonucleotide; AAG chr11 5228818 5228837 5228834 +
cattcctctgtaaaaaacta

SEQ ID NO: 8919 - DNA, 20 bp, Artificial Sequence
  Synthetic oligonucleotide; GAG chr11 5228825 5228844 5228841 +
ctgtaaaaaactaaagcaat

SEQ ID NO: 8920 - DNA, 20 bp, Artificial Sequence
  Synthetic oligonucleotide; AGG chr11 5228826 5228845 5228842 +
tgtaaaaaactaaagcaatg

SEQ ID NO: 8921 - DNA, 20 bp, Artificial Sequence
  Synthetic oligonucleotide; TAG chr11 5228832 5228851 5228848 +
aaactaaagcaatgaggatc

SEQ ID NO: 8922 - DNA, 20 bp, Artificial Sequence
  Synthetic oligonucleotide; AGG chr11 5228833 5228852 5228849 +
aactaaagcaatgaggatct

SEQ ID NO: 8923 - DNA, 20 bp, Artificial Sequence
  Synthetic oligonucleotide; GAG chr11 5228851 5228870 5228867 +
ctaggcacacgtgtatccct

SEQ ID NO: 8924 - DNA, 20 bp, Artificial Sequence
  Synthetic oligonucleotide; AAG chr11 5228856 5228875 5228872 +
cacacgtgtatccctgagaa

SEQ ID NO: 8925 - DNA, 20 bp, Artificial Sequence
  Synthetic oligonucleotide; TGG chr11 5228877 5228896 5228893 +
agatttcacatgttgaatcc

SEQ ID NO: 8926 - DNA, 20 bp, Artificial Sequence
  Synthetic oligonucleotide; GGG chr11 5228878 5228897 5228894 +
gatttcacatgttgaatcct

SEQ ID NO: 8927 - DNA, 20 bp, Artificial Sequence
  Synthetic oligonucleotide; AAG chr11 5228883 5228902 5228899 +
cacatgttgaatcctgggaa

SEQ ID NO: 8928 - DNA, 20 bp, Artificial Sequence
  Synthetic oligonucleotide; CAG chr11 5228919 5228938 5228935 +
attttaaatgttaaaacatg

SEQ ID NO: 8929 - DNA, 20 bp, Artificial Sequence
  Synthetic oligonucleotide; TGG chr11 5228930 5228949 5228946 +
taaaacatgcagatttgact

SEQ ID NO: 8930 - DNA, 20 bp, Artificial Sequence
  Synthetic oligonucleotide; TAG chr11 5228937 5228956 5228953 +
tgcagatttgacttggctgt

SEQ ID NO: 8931 - DNA, 20 bp, Artificial Sequence
  Synthetic oligonucleotide; TGG chr11 5228944 5228963 5228960 +
ttgacttggctgttagattt

SEQ ID NO: 8932 - DNA, 20 bp, Artificial Sequence
  Synthetic oligonucleotide; TAG chr11 5228976 5228995 5228992 +
tattaaatttaaacctgcat

SEQ ID NO: 8933 - DNA, 20 bp, Artificial Sequence
  Synthetic oligonucleotide; TAG chr11 5228987 5229006 5229003 +
aacctgcattagcattgttt

SEQ ID NO: 8934 - DNA, 20 bp, Artificial Sequence
  Synthetic oligonucleotide; TAG chr11 5228993 5229012 5229009 +
cattagcattgttttagatt

SEQ ID NO: 8935 - DNA, 20 bp, Artificial Sequence
  Synthetic oligonucleotide; CAG chr11 5228997 5229016 5229013 +
agcattgttttagatttaga

SEQ ID NO: 8936 - DNA, 20 bp, Artificial Sequence
  Synthetic oligonucleotide; AAG chr11 5229005 5229024 5229021 +
tttagatttagacagttttc

SEQ ID NO: 8937 - DNA, 20 bp, Artificial Sequence
  Synthetic oligonucleotide; AAG chr11 5229031 5229050 5229047 +
ctgtttcacatccctgatat

SEQ ID NO: 8938 - DNA, 20 bp, Artificial Sequence
  Synthetic oligonucleotide; GAG chr11 5229033 5229052 5229049 +
gtttcacatccctgatataa

SEQ ID NO: 8939 - DNA, 20 bp, Artificial Sequence
  Synthetic oligonucleotide; AGG chr11 5229034 5229053 5229050 +
tttcacatccctgatataag

SEQ ID NO: 8940 - DNA, 20 bp, Artificial Sequence
  Synthetic oligonucleotide; AAG chr11 5229054 5229073 5229070 +
aggcatgtatatgtgaaata

SEQ ID NO: 8941 - DNA, 20 bp, Artificial Sequence
  Synthetic oligonucleotide; CGG chr11 5229064 5229083 5229080 +
atgtgaaataaagtgttctg

SEQ ID NO: 8942 - DNA, 20 bp, Artificial Sequence
  Synthetic oligonucleotide; AAG chr11 5229067 5229086 5229083 +
tgaaataaagtgttctgcgg

SEQ ID NO: 8943 - DNA, 20 bp, Artificial Sequence
  Synthetic oligonucleotide; TGG chr11 5229096 5229115 5229112 +
tatgtcttttgcaaatatcc

SEQ ID NO: 8944 - DNA, 20 bp, Artificial Sequence
  Synthetic oligonucleotide; GGG chr11 5229097 5229116 5229113 +
atgtcttttgcaaatatcct

SEQ ID NO: 8945 - DNA, 20 bp, Artificial Sequence
  Synthetic oligonucleotide; AAG chr11 5229103 5229122 5229119 +
tttgcaaatatcctgggtca

SEQ ID NO: 8946 - DNA, 20 bp, Artificial Sequence
  Synthetic oligonucleotide; CAG chr11 5229114 5229133 5229130 +
cctgggtcaaagaaaatgca

SEQ ID NO: 8947 - DNA, 20 bp, Artificial Sequence
  Synthetic oligonucleotide; TAG chr11 5229136 5229155 5229152 +
gactttatgaaattataata

SEQ ID NO: 8948 - DNA, 20 bp, Artificial Sequence
  Synthetic oligonucleotide; AGG chr11 5229137 5229156 5229153 +
actttatgaaattataatat

SEQ ID NO: 8949 - DNA, 20 bp, Artificial Sequence
  Synthetic oligonucleotide; TAG chr11 5229149 5229168 5229165 +
tataatataggttatattta

SEQ ID NO: 8950 - DNA, 20 bp, Artificial Sequence
  Synthetic oligonucleotide; AAG chr11 5229160 5229179 5229176 +
ttatatttatagtattctga

SEQ ID NO: 8951 - DNA, 20 bp, Artificial Sequence
  Synthetic oligonucleotide; AAG chr11 5229176 5229195 5229192 +
ctgaaagaccaaaattgtca

SEQ ID NO: 8952 - DNA, 20 bp, Artificial Sequence
  Synthetic oligonucleotide; AAG chr11 5229180 5229199 5229196 +
aagaccaaaattgtcaaagc

SEQ ID NO: 8953 - DNA, 20 bp, Artificial Sequence
  Synthetic oligonucleotide; GAG chr11 5229182 5229201 5229198 +
gaccaaaattgtcaaagcaa

SEQ ID NO: 8954 - DNA, 20 bp, Artificial Sequence
  Synthetic oligonucleotide; TGG chr11 5229200 5229219 5229216 +
aagagctttgaaatcctgat

SEQ ID NO: 8955 - DNA, 20 bp, Artificial Sequence
  Synthetic oligonucleotide; CAG chr11 5229203 5229222 5229219 +
agctttgaaatcctgattgg

SEQ ID NO: 8956 - DNA, 20 bp, Artificial Sequence
  Synthetic oligonucleotide; AAG chr11 5229223 5229242 5229239 +
cagaaattgtcaccttctta

SEQ ID NO: 8957 - DNA, 20 bp, Artificial Sequence
  Synthetic oligonucleotide; CAG chr11 5229250 5229269 5229266 +
accctacaacttcttatgct

SEQ ID NO: 8958 - DNA, 20 bp, Artificial Sequence
  Synthetic oligonucleotide; TAG chr11 5229256 5229275 5229272 +
caacttcttatgctcagaaa

SEQ ID NO: 8959 - DNA, 20 bp, Artificial Sequence
  Synthetic oligonucleotide; TGG chr11 5229302 5229321 5229318 +
cttttttaaatgatgaacta

SEQ ID NO: 8960 - DNA, 20 bp, Artificial Sequence
  Synthetic oligonucleotide; TGG chr11 5229320 5229339 5229336 +
tatggatccttctcttgtgt

SEQ ID NO: 8961 - DNA, 20 bp, Artificial Sequence
  Synthetic oligonucleotide; CAG chr11 5229332 5229351 5229348 +
tcttgtgttggcaactgctg

SEQ ID NO: 8962 - DNA, 20 bp, Artificial Sequence
  Synthetic oligonucleotide; TGG chr11 5229347 5229366 5229363 +
tgctgcagataccatcatcc

SEQ ID NO: 8963 - DNA, 20 bp, Artificial Sequence
  Synthetic oligonucleotide; AAG chr11 5229354 5229373 5229370 +
gataccatcatcctggcttc

SEQ ID NO: 8964 - DNA, 20 bp, Artificial Sequence
  Synthetic oligonucleotide; AGG chr11 5229355 5229374 5229371 +
ataccatcatcctggcttca

SEQ ID NO: 8965 - DNA, 20 bp, Artificial Sequence
  Synthetic oligonucleotide; CAG chr11 5229358 5229377 5229374 +
ccatcatcctggcttcaagg

SEQ ID NO: 8966 - DNA, 20 bp, Artificial Sequence
  Synthetic oligonucleotide; AGG chr11 5229359 5229378 5229375 +
catcatcctggcttcaaggc

SEQ ID NO: 8967 - DNA, 20 bp, Artificial Sequence
  Synthetic oligonucleotide; GGG chr11 5229360 5229379 5229376 +
atcatcctggcttcaaggca

SEQ ID NO: 8968 - DNA, 20 bp, Artificial Sequence
  Synthetic oligonucleotide; GGG chr11 5229361 5229380 5229377 +
tcatcctggcttcaaggcag

SEQ ID NO: 8969 - DNA, 20 bp, Artificial Sequence
  Synthetic oligonucleotide; TGG chr11 5229376 5229395 5229392 +
ggcaggggttgcttttccaa

SEQ ID NO: 8970 - DNA, 20 bp, Artificial Sequence
  Synthetic oligonucleotide; TAG chr11 5229379 5229398 5229395 +
aggggttgcttttccaatgg

SEQ ID NO: 8971 - DNA, 20 bp, Artificial Sequence
  Synthetic oligonucleotide; TAG chr11 5229387 5229406 5229403 +
cttttccaatggtagttact

SEQ ID NO: 8972 - DNA, 20 bp, Artificial Sequence
  Synthetic oligonucleotide; TAG chr11 5229396 5229415 5229412 +
tggtagttacttagtgtgac

SEQ ID NO: 8973 - DNA, 20 bp, Artificial Sequence
  Synthetic oligonucleotide; GAG chr11 5229398 5229417 5229414 +
gtagttacttagtgtgacta

SEQ ID NO: 8974 - DNA, 20 bp, Artificial Sequence
  Synthetic oligonucleotide; CAG chr11 5229408 5229427 5229424 +
agtgtgactagagtgtaacg

SEQ ID NO: 8975 - DNA, 20 bp, Artificial Sequence
  Synthetic oligonucleotide; CAG chr11 5229441 5229460 5229457 +
ctattacccataataccctg

SEQ ID NO: 8976 - DNA, 20 bp, Artificial Sequence
  Synthetic oligonucleotide; AGG chr11 5229442 5229461 5229458 +
tattacccataataccctgc

SEQ ID NO: 8977 - DNA, 20 bp, Artificial Sequence
  Synthetic oligonucleotide; GGG chr11 5229443 5229462 5229459 +
attacccataataccctgca

SEQ ID NO: 8978 - DNA, 20 bp, Artificial Sequence
  Synthetic oligonucleotide; AAG chr11 5229448 5229467 5229464 +
ccataataccctgcagggac

SEQ ID NO: 8979 - DNA, 20 bp, Artificial Sequence
  Synthetic oligonucleotide; AGG chr11 5229449 5229468 5229465 +
cataataccctgcagggaca

SEQ ID NO: 8980 - DNA, 20 bp, Artificial Sequence
  Synthetic oligonucleotide; AAG chr11 5229456 5229475 5229472 +
ccctgcagggacaaggctgc

SEQ ID NO: 8981 - DNA, 20 bp, Artificial Sequence
  Synthetic oligonucleotide; AAG chr11 5229466 5229485 5229482 +
acaaggctgcaagctatact

SEQ ID NO: 8982 - DNA, 20 bp, Artificial Sequence
  Synthetic oligonucleotide; AAG chr11 5229477 5229496 5229493 +
agctatactaagaccatcaa

SEQ ID NO: 8983 - DNA, 20 bp, Artificial Sequence
  Synthetic oligonucleotide; CAG chr11 5229482 5229501 5229498 +
tactaagaccatcaaaagcc

SEQ ID NO: 8984 - DNA, 20 bp, Artificial Sequence
  Synthetic oligonucleotide; AGG chr11 5229483 5229502 5229499 +
actaagaccatcaaaagccc

SEQ ID NO: 8985 - DNA, 20 bp, Artificial Sequence
  Synthetic oligonucleotide; CAG chr11 5229491 5229510 5229507 +
catcaaaagcccaggcatac

SEQ ID NO: 8986 - DNA, 20 bp, Artificial Sequence
  Synthetic oligonucleotide; AGG chr11 5229492 5229511 5229508 +
atcaaaagcccaggcatacc

SEQ ID NO: 8987 - DNA, 20 bp, Artificial Sequence
  Synthetic oligonucleotide; AAG chr11 5229500 5229519 5229516 +
cccaggcataccaggcaaat

SEQ ID NO: 8988 - DNA, 20 bp, Artificial Sequence
  Synthetic oligonucleotide; AAG chr11 5229507 5229526 5229523 +
ataccaggcaaataagtttc

SEQ ID NO: 8989 - DNA, 20 bp, Artificial Sequence
  Synthetic oligonucleotide; AAG chr11 5229510 5229529 5229526 +
ccaggcaaataagtttcaag

SEQ ID NO: 8990 - DNA, 20 bp, Artificial Sequence
  Synthetic oligonucleotide; TAG chr11 5229520 5229539 5229536 +
aagtttcaagaagcaataaa

SEQ ID NO: 8991 - DNA, 20 bp, Artificial Sequence
  Synthetic oligonucleotide; TGG chr11 5229531 5229550 5229547 +
agcaataaatagtgcaaatt

SEQ ID NO: 8992 - DNA, 20 bp, Artificial Sequence
  Synthetic oligonucleotide; TGG chr11 5229537 5229556 5229553 +
aaatagtgcaaatttggtta

SEQ ID NO: 8993 - DNA, 20 bp, Artificial Sequence
  Synthetic oligonucleotide; CAG chr11 5229541 5229560 5229557 +
agtgcaaatttggttatggt

SEQ ID NO: 8994 - DNA, 20 bp, Artificial Sequence
  Synthetic oligonucleotide; GAG chr11 5229543 5229562 5229559 +
tgcaaatttggttatggtca

SEQ ID NO: 8995 - DNA, 20 bp, Artificial Sequence
  Synthetic oligonucleotide; CAG chr11 5229549 5229568 5229565 +
tttggttatggtcagagcct

SEQ ID NO: 8996 - DNA, 20 bp, Artificial Sequence
  Synthetic oligonucleotide; CAG chr11 5229566 5229585 5229582 +
cctcagtttcaaatctaaat

SEQ ID NO: 8997 - DNA, 20 bp, Artificial Sequence
  Synthetic oligonucleotide; AAG chr11 5229575 5229594 5229591 +
caaatctaaatcagcattca

SEQ ID NO: 8998 - DNA, 20 bp, Artificial Sequence
  Synthetic oligonucleotide; AAG chr11 5229595 5229614 5229611 +
aagttcctgaaaaactattc

SEQ ID NO: 8999 - DNA, 20 bp, Artificial Sequence
  Synthetic oligonucleotide; GAG chr11 5229621 5229640 5229637 +
actgacatcttcactattgt

SEQ ID NO: 9000 - DNA, 20 bp, Artificial Sequence
  Synthetic oligonucleotide; TGG chr11 5229643 5229662 5229659 +
gcttgcttctactctgtgaa

SEQ ID NO: 9001 - DNA, 20 bp, Artificial Sequence
  Synthetic oligonucleotide; CAG chr11 5229652 5229671 5229668 +
tactctgtgaatggatgcca

SEQ ID NO: 9002 - DNA, 20 bp, Artificial Sequence
  Synthetic oligonucleotide; CAG chr11 5229655 5229674 5229671 +
tctgtgaatggatgccacag

SEQ ID NO: 9003 - DNA, 20 bp, Artificial Sequence
  Synthetic oligonucleotide; AGG chr11 5229656 5229675 5229672 +
ctgtgaatggatgccacagc

SEQ ID NO: 9004 - DNA, 20 bp, Artificial Sequence
  Synthetic oligonucleotide; CAG chr11 5229661 5229680 5229677 +
aatggatgccacagcaggtg

SEQ ID NO: 9005 - DNA, 20 bp, Artificial Sequence
  Synthetic oligonucleotide; AGG chr11 5229662 5229681 5229678 +
atggatgccacagcaggtgc

SEQ ID NO: 9006 - DNA, 20 bp, Artificial Sequence
  Synthetic oligonucleotide; CAG chr11 5229683 5229702 5229699 +
ggtctattctacttttattc

SEQ ID NO: 9007 - DNA, 20 bp, Artificial Sequence
  Synthetic oligonucleotide; AAG chr11 5229734 5229753 5229750 +
acacacacacacacacacac

SEQ ID NO: 9008 - DNA, 20 bp, Artificial Sequence
  Synthetic oligonucleotide; AAG chr11 5229746 5229765 5229762 +
acacacacaagtcctcaaaa

SEQ ID NO: 9009 - DNA, 20 bp, Artificial Sequence
  Synthetic oligonucleotide; GAG chr11 5229748 5229767 5229764 +
acacacaagtcctcaaaaaa

SEQ ID NO: 9010 - DNA, 20 bp, Artificial Sequence
  Synthetic oligonucleotide; CAG chr11 5229752 5229771 5229768 +
acaagtcctcaaaaaagaga

SEQ ID NO: 9011 - DNA, 20 bp, Artificial Sequence
  Synthetic oligonucleotide; GAG chr11 5229756 5229775 5229772 +
gtcctcaaaaaagagacagc

SEQ ID NO: 9012 - DNA, 20 bp, Artificial Sequence
  Synthetic oligonucleotide; GAG chr11 5229758 5229777 5229774 +
cctcaaaaaagagacagcga

SEQ ID NO: 9013 - DNA, 20 bp, Artificial Sequence
  Synthetic oligonucleotide; GAG chr11 5229760 5229779 5229776 +
tcaaaaaagagacagcgaga

SEQ ID NO: 9014 - DNA, 20 bp, Artificial Sequence
  Synthetic oligonucleotide; CAG chr11 5229764 5229783 5229780 +
aaaagagacagcgagagaga

SEQ ID NO: 9015 - DNA, 20 bp, Artificial Sequence
  Synthetic oligonucleotide; GAG chr11 5229766 5229785 5229782 +
aagagacagcgagagagaca

SEQ ID NO: 9016 - DNA, 20 bp, Artificial Sequence
  Synthetic oligonucleotide; AGG chr11 5229767 5229786 5229783 +
agagacagcgagagagacag

SEQ ID NO: 9017 - DNA, 20 bp, Artificial Sequence
  Synthetic oligonucleotide; CAG chr11 5229786 5229805 5229802 +
gaggtccatttcctttactc

SEQ ID NO: 9018 - DNA, 20 bp, Artificial Sequence
  Synthetic oligonucleotide; AAG chr11 5229805 5229824 5229821 +
ccagtctattaatctttctt

SEQ ID NO: 9019 - DNA, 20 bp, Artificial Sequence
  Synthetic oligonucleotide; CAG chr11 5229824 5229843 5229840 +
taagtcctaatgttttatat

SEQ ID NO: 9020 - DNA, 20 bp, Artificial Sequence
  Synthetic oligonucleotide; TGG chr11 5229829 5229848 5229845 +
cctaatgttttatatcagaa

SEQ ID NO: 9021 - DNA, 20 bp, Artificial Sequence
  Synthetic oligonucleotide; TAG chr11 5229835 5229854 5229851 +
gttttatatcagaatggccc

SEQ ID NO: 9022 - DNA, 20 bp, Artificial Sequence
  Synthetic oligonucleotide; TGG chr11 5229840 5229859 5229856 +
atatcagaatggccctagtc

SEQ ID NO: 9023 - DNA, 20 bp, Artificial Sequence
  Synthetic oligonucleotide; GGG chr11 5229841 5229860 5229857 +
tatcagaatggccctagtct

SEQ ID NO: 9024 - DNA, 20 bp, Artificial Sequence
  Synthetic oligonucleotide; TAG chr11 5229850 5229869 5229866 +
ggccctagtctgggtatact

SEQ ID NO: 9025 - DNA, 20 bp, Artificial Sequence
  Synthetic oligonucleotide; GAG chr11 5229852 5229871 5229868 +
ccctagtctgggtatactta

SEQ ID NO: 9026 - DNA, 20 bp, Artificial Sequence
  Synthetic oligonucleotide; AGG chr11 5229853 5229872 5229869 +
cctagtctgggtatacttag

SEQ ID NO: 9027 - DNA, 20 bp, Artificial Sequence
  Synthetic oligonucleotide; TGG chr11 5229898 5229917 5229914 +
aaaatcatgacactcatcta

SEQ ID NO: 9028 - DNA, 20 bp, Artificial Sequence
  Synthetic oligonucleotide; GGG chr11 5229899 5229918 5229915 +
aaatcatgacactcatctat

SEQ ID NO: 9029 - DNA, 20 bp, Artificial Sequence
  Synthetic oligonucleotide; GAG chr11 5229901 5229920 5229917 +
atcatgacactcatctatgg

SEQ ID NO: 9030 - DNA, 20 bp, Artificial Sequence
  Synthetic oligonucleotide; TGG chr11 5229906 5229925 5229922 +
gacactcatctatgggagtg

SEQ ID NO: 9031 - DNA, 20 bp, Artificial Sequence
  Synthetic oligonucleotide; AAG chr11 5229927 5229946 5229943 +
ggttttatcatttgtttcaa

SEQ ID NO: 9032 - DNA, 20 bp, Artificial Sequence
  Synthetic oligonucleotide; CAG chr11 5229930 5229949 5229946 +
tttatcatttgtttcaaaag

SEQ ID NO: 9033 - DNA, 20 bp, Artificial Sequence
  Synthetic oligonucleotide; TAG chr11 5229941 5229960 5229957 +
tttcaaaagcagcacttgac

SEQ ID NO: 9034 - DNA, 20 bp, Artificial Sequence
  Synthetic oligonucleotide; GAG chr11 5229943 5229962 5229959 +
tcaaaagcagcacttgacta

SEQ ID NO: 9035 - DNA, 20 bp, Artificial Sequence
  Synthetic oligonucleotide; TAG chr11 5229970 5229989 5229986 +
tttatacatgctctactgtt

SEQ ID NO: 9036 - DNA, 20 bp, Artificial Sequence
  Synthetic oligonucleotide; AAG chr11 5229986 5230005 5230002 +
tgtttagtctaaaattcccc

SEQ ID NO: 9037 - DNA, 20 bp, Artificial Sequence
  Synthetic oligonucleotide; GAG chr11 5229990 5230009 5230006 +
tagtctaaaattccccaagt

SEQ ID NO: 9038 - DNA, 20 bp, Artificial Sequence
  Synthetic oligonucleotide; TAG chr11 5229999 5230018 5230015 +
attccccaagtgagacattt

SEQ ID NO: 9039 - DNA, 20 bp, Artificial Sequence
  Synthetic oligonucleotide; TAG chr11 5230022 5230041 5230038 +
caatctactgtatatgttcc

SEQ ID NO: 9040 - DNA, 20 bp, Artificial Sequence
  Synthetic oligonucleotide; AGG chr11 5230023 5230042 5230039 +
aatctactgtatatgttcct

SEQ ID NO: 9041 - DNA, 20 bp, Artificial Sequence
  Synthetic oligonucleotide; AAG chr11 5230028 5230047 5230044 +
actgtatatgttcctaggtc

SEQ ID NO: 9042 - DNA, 20 bp, Artificial Sequence
  Synthetic oligonucleotide; CAG chr11 5230033 5230052 5230049 +
atatgttcctaggtcaagca

SEQ ID NO: 9043 - DNA, 20 bp, Artificial Sequence
  Synthetic oligonucleotide; TAG chr11 5230038 5230057 5230054 +
ttcctaggtcaagcacagtc

SEQ ID NO: 9044 - DNA, 20 bp, Artificial Sequence
  Synthetic oligonucleotide; CAG chr11 5230051 5230070 5230067 +
cacagtctagctacttgcta

SEQ ID NO: 9045 - DNA, 20 bp, Artificial Sequence
  Synthetic oligonucleotide; CAG chr11 5230064 5230083 5230080 +
cttgctacagacttctctcg

SEQ ID NO: 9046 - DNA, 20 bp, Artificial Sequence
  Synthetic oligonucleotide; CAG chr11 5230080 5230099 5230096 +
ctcgcagatacacaatctct

SEQ ID NO: 9047 - DNA, 20 bp, Artificial Sequence
  Synthetic oligonucleotide; CAG chr11 5230094 5230113 5230110 +
atctctcagtaaacacaact

SEQ ID NO: 9048 - DNA, 20 bp, Artificial Sequence
  Synthetic oligonucleotide; CAG chr11 5230097 5230116 5230113 +
tctcagtaaacacaactcag

SEQ ID NO: 9049 - DNA, 20 bp, Artificial Sequence
  Synthetic oligonucleotide; CAG chr11 5230104 5230123 5230120 +
aaacacaactcagcagctct

SEQ ID NO: 9050 - DNA, 20 bp, Artificial Sequence
  Synthetic oligonucleotide; AAG chr11 5230140 5230159 5230156 +
aaatgaaataaaaatgctcc

SEQ ID NO: 9051 - DNA, 20 bp, Artificial Sequence
  Synthetic oligonucleotide; CAG chr11 5230148 5230167 5230164 +
taaaaatgctccaagaaaac

SEQ ID NO: 9052 - DNA, 20 bp, Artificial Sequence
  Synthetic oligonucleotide; TAG chr11 5230157 5230176 5230173 +
tccaagaaaaccagaaccca

SEQ ID NO: 9053 - DNA, 20 bp, Artificial Sequence
  Synthetic oligonucleotide; TAG chr11 5230183 5230202 5230199 +
caaaccgcacacacacaaaa

SEQ ID NO: 9054 - DNA, 20 bp, Artificial Sequence
  Synthetic oligonucleotide; TGG chr11 5230188 5230207 5230204 +
cgcacacacacaaaatagtt

SEQ ID NO: 9055 - DNA, 20 bp, Artificial Sequence
  Synthetic oligonucleotide; TAG chr11 5230194 5230213 5230210 +
cacacaaaatagtttggaaa

SEQ ID NO: 9056 - DNA, 20 bp, Artificial Sequence
  Synthetic oligonucleotide; AGG chr11 5230195 5230214 5230211 +
acacaaaatagtttggaaat

SEQ ID NO: 9057 - DNA, 20 bp, Artificial Sequence
  Synthetic oligonucleotide; TAG chr11 5230199 5230218 5230215 +
aaaatagtttggaaatagga

SEQ ID NO: 9058 - DNA, 20 bp, Artificial Sequence
  Synthetic oligonucleotide; TAG chr11 5230204 5230223 5230220 +
agtttggaaataggatagtt

SEQ ID NO: 9059 - DNA, 20 bp, Artificial Sequence
  Synthetic oligonucleotide; AAG chr11 5230218 5230237 5230234 +
atagtttagttcactttaaa

SEQ ID NO: 9060 - DNA, 20 bp, Artificial Sequence
  Synthetic oligonucleotide; AAG chr11 5230238 5230257 5230254 +
aagttgtatttcttaccaaa

SEQ ID NO: 9061 - DNA, 20 bp, Artificial Sequence
  Synthetic oligonucleotide; AAG chr11 5230246 5230265 5230262 +
tttcttaccaaaaagcaata

SEQ ID NO: 9062 - DNA, 20 bp, Artificial Sequence
  Synthetic oligonucleotide; TAG chr11 5230255 5230274 5230271 +
aaaaagcaataaagtcaaca

SEQ ID NO: 9063 - DNA, 20 bp, Artificial Sequence
  Synthetic oligonucleotide; CAG chr11 5230259 5230278 5230275 +
agcaataaagtcaacataga

SEQ ID NO: 9064 - DNA, 20 bp, Artificial Sequence
  Synthetic oligonucleotide; AAG chr11 5230272 5230291 5230288 +
acatagacagaactttgcta

SEQ ID NO: 9065 - DNA, 20 bp, Artificial Sequence
  Synthetic oligonucleotide; CAG chr11 5230292 5230311 5230308 +
aagtatatgcataattatta

SEQ ID NO: 9066 - DNA, 20 bp, Artificial Sequence
  Synthetic oligonucleotide; CAG chr11 5230309 5230328 5230325 +
ttacagaaaaatttatattt

SEQ ID NO: 9067 - DNA, 20 bp, Artificial Sequence
  Synthetic oligonucleotide; TGG chr11 5230343 5230362 5230359 +
ttcattaatatttcctccac

SEQ ID NO: 9068 - DNA, 20 bp, Artificial Sequence
  Synthetic oligonucleotide; GGG chr11 5230344 5230363 5230360 +
tcattaatatttcctccact

SEQ ID NO: 9069 - DNA, 20 bp, Artificial Sequence
  Synthetic oligonucleotide; CAG chr11 5230349 5230368 5230365 +
aatatttcctccactgggct

SEQ ID NO: 9070 - DNA, 20 bp, Artificial Sequence
  Synthetic oligonucleotide; CAG chr11 5230361 5230380 5230377 +
actgggctcagattttcatt

SEQ ID NO: 9071 - DNA, 20 bp, Artificial Sequence
  Synthetic oligonucleotide; TAG chr11 5230367 5230386 5230383 +
ctcagattttcattcagaat

SEQ ID NO: 9072 - DNA, 20 bp, Artificial Sequence
  Synthetic oligonucleotide; AAG chr11 5230388 5230407 5230404 +
agcttttttttaacctcatt

SEQ ID NO: 9073 - DNA, 20 bp, Artificial Sequence
  Synthetic oligonucleotide; TGG chr11 5230391 5230410 5230407 +
ttttttttaacctcattaag

SEQ ID NO: 9074 - DNA, 20 bp, Artificial Sequence
  Synthetic oligonucleotide; GGG chr11 5230392 5230411 5230408 +
tttttttaacctcattaagt

SEQ ID NO: 9075 - DNA, 20 bp, Artificial Sequence
  Synthetic oligonucleotide; TGG chr11 5230398 5230417 5230414 +
taacctcattaagtgggcca

SEQ ID NO: 9076 - DNA, 20 bp, Artificial Sequence
  Synthetic oligonucleotide; TGG chr11 5230411 5230430 5230427 +
tgggccatggtgtcaattta

SEQ ID NO: 9077 - DNA, 20 bp, Artificial Sequence
  Synthetic oligonucleotide; GAG chr11 5230413 5230432 5230429 +
ggccatggtgtcaatttatg

SEQ ID NO: 9078 - DNA, 20 bp, Artificial Sequence
  Synthetic oligonucleotide; GAG chr11 5230415 5230434 5230431 +
ccatggtgtcaatttatgga

SEQ ID NO: 9079 - DNA, 20 bp, Artificial Sequence
  Synthetic oligonucleotide; CAG chr11 5230418 5230437 5230434 +
tggtgtcaatttatggagag

SEQ ID NO: 9080 - DNA, 20 bp, Artificial Sequence
  Synthetic oligonucleotide; GAG chr11 5230420 5230439 5230436 +
gtgtcaatttatggagagca

SEQ ID NO: 9081 - DNA, 20 bp, Artificial Sequence
  Synthetic oligonucleotide; AGG chr11 5230421 5230440 5230437 +
tgtcaatttatggagagcag

SEQ ID NO: 9082 - DNA, 20 bp, Artificial Sequence
  Synthetic oligonucleotide; CAG chr11 5230426 5230445 5230442 +
atttatggagagcagaggta

SEQ ID NO: 9083 - DNA, 20 bp, Artificial Sequence
  Synthetic oligonucleotide; CAG chr11 5230433 5230452 5230449 +
gagagcagaggtacagtctt

SEQ ID NO: 9084 - DNA, 20 bp, Artificial Sequence
  Synthetic oligonucleotide; GAG chr11 5230444 5230463 5230460 +
tacagtcttcagataaattt

SEQ ID NO: 9085 - DNA, 20 bp, Artificial Sequence
  Synthetic oligonucleotide; TAG chr11 5230459 5230478 5230475 +
aatttgagattgcatctctt

SEQ ID NO: 9086 - DNA, 20 bp, Artificial Sequence
  Synthetic oligonucleotide; GAG chr11 5230461 5230480 5230477 +
tttgagattgcatctcttta

SEQ ID NO: 9087 - DNA, 20 bp, Artificial Sequence
  Synthetic oligonucleotide; AGG chr11 5230462 5230481 5230478 +
ttgagattgcatctctttag

SEQ ID NO: 9088 - DNA, 20 bp, Artificial Sequence
  Synthetic oligonucleotide; TAG chr11 5230465 5230484 5230481 +
agattgcatctctttagagg

SEQ ID NO: 9089 - DNA, 20 bp, Artificial Sequence
  Synthetic oligonucleotide; TGG chr11 5230473 5230492 5230489 +
tctctttagaggtagaatct

SEQ ID NO: 9090 - DNA, 20 bp, Artificial Sequence
  Synthetic oligonucleotide; CAG chr11 5230479 5230498 5230495 +
tagaggtagaatcttggctt

SEQ ID NO: 9091 - DNA, 20 bp, Artificial Sequence
  Synthetic oligonucleotide; TAG chr11 5230505 5230524 5230521 +
gaacaccctttacaaacatg

SEQ ID NO: 9092 - DNA, 20 bp, Artificial Sequence
  Synthetic oligonucleotide; AGG chr11 5230506 5230525 5230522 +
aacaccctttacaaacatgt

SEQ ID NO: 9093 - DNA, 20 bp, Artificial Sequence
  Synthetic oligonucleotide; CAG chr11 5230517 5230536 5230533 +
caaacatgtaggcattaatt

SEQ ID NO: 9094 - DNA, 20 bp, Artificial Sequence
  Synthetic oligonucleotide; GAG chr11 5230519 5230538 5230535 +
aacatgtaggcattaattca

SEQ ID NO: 9095 - DNA, 20 bp, Artificial Sequence
  Synthetic oligonucleotide; AGG chr11 5230520 5230539 5230536 +
acatgtaggcattaattcag

SEQ ID NO: 9096 - DNA, 20 bp, Artificial Sequence
  Synthetic oligonucleotide; AAG chr11 5230532 5230551 5230548 +
taattcagaggactgctctg

SEQ ID NO: 9097 - DNA, 20 bp, Artificial Sequence
  Synthetic oligonucleotide; AAG chr11 5230538 5230557 5230554 +
agaggactgctctgaagctc

SEQ ID NO: 9098 - DNA, 20 bp, Artificial Sequence
  Synthetic oligonucleotide; GAG chr11 5230540 5230559 5230556 +
aggactgctctgaagctcaa

SEQ ID NO: 9099 - DNA, 20 bp, Artificial Sequence
  Synthetic oligonucleotide; TGG chr11 5230544 5230563 5230560 +
ctgctctgaagctcaagaga

SEQ ID NO: 9100 - DNA, 20 bp, Artificial Sequence
  Synthetic oligonucleotide; TAG chr11 5230553 5230572 5230569 +
agctcaagagatggatgatt

SEQ ID NO: 9101 - DNA, 20 bp, Artificial Sequence
  Synthetic oligonucleotide; AGG chr11 5230554 5230573 5230570 +
gctcaagagatggatgattt

SEQ ID NO: 9102 - DNA, 20 bp, Artificial Sequence
  Synthetic oligonucleotide; GAG chr11 5230556 5230575 5230572 +
tcaagagatggatgatttag

SEQ ID NO: 9103 - DNA, 20 bp, Artificial Sequence
  Synthetic oligonucleotide; TAG chr11 5230564 5230583 5230580 +
tggatgatttaggagactat

SEQ ID NO: 9104 - DNA, 20 bp, Artificial Sequence
  Synthetic oligonucleotide; AGG chr11 5230565 5230584 5230581 +
ggatgatttaggagactatt

SEQ ID NO: 9105 - DNA, 20 bp, Artificial Sequence
  Synthetic oligonucleotide; CAG chr11 5230690 5230709 5230706 +
cacacacacaccctttcatt

SEQ ID NO: 9106 - DNA, 20 bp, Artificial Sequence
  Synthetic oligonucleotide; TAG chr11 5230705 5230724 5230721 +
tcattcagacatactgaaca

SEQ ID NO: 9107 - DNA, 20 bp, Artificial Sequence
  Synthetic oligonucleotide; AAG chr11 5230714 5230733 5230730 +
catactgaacatagtttata

SEQ ID NO: 9108 - DNA, 20 bp, Artificial Sequence
  Synthetic oligonucleotide; TAG chr11 5230725 5230744 5230741 +
tagtttataaagcaacgcca

SEQ ID NO: 9109 - DNA, 20 bp, Artificial Sequence
  Synthetic oligonucleotide; GAG chr11 5230729 5230748 5230745 +
ttataaagcaacgccatagt

SEQ ID NO: 9110 - DNA, 20 bp, Artificial Sequence
  Synthetic oligonucleotide; AAG chr11 5230734 5230753 5230750 +
aagcaacgccatagtgagaa

SEQ ID NO: 9111 - DNA, 20 bp, Artificial Sequence
  Synthetic oligonucleotide; AAG chr11 5230773 5230792 5230789 +
taaattatcaaataaaatta

SEQ ID NO: 9112 - DNA, 20 bp, Artificial Sequence
  Synthetic oligonucleotide; GAG chr11 5230785 5230804 5230801 +
taaaattaaagccaaatctt

SEQ ID NO: 9113 - DNA, 20 bp, Artificial Sequence
  Synthetic oligonucleotide; AGG chr11 5230786 5230805 5230802 +
aaaattaaagccaaatcttg

SEQ ID NO: 9114 - DNA, 20 bp, Artificial Sequence
  Synthetic oligonucleotide; TGG chr11 5230834 5230853 5230850 +
tttaactttcattttaaatt

SEQ ID NO: 9115 - DNA, 20 bp, Artificial Sequence
  Synthetic oligonucleotide; GGG chr11 5230835 5230854 5230851 +
ttaactttcattttaaattt

SEQ ID NO: 9116 - DNA, 20 bp, Artificial Sequence
  Synthetic oligonucleotide; GGG chr11 5230836 5230855 5230852 +
taactttcattttaaatttg

SEQ ID NO: 9117 - DNA, 20 bp, Artificial Sequence
  Synthetic oligonucleotide; GGG chr11 5230837 5230856 5230853 +
aactttcattttaaatttgg

SEQ ID NO: 9118 - DNA, 20 bp, Artificial Sequence
  Synthetic oligonucleotide; AAG chr11 5230849 5230868 5230865 +
aaatttgggggtacatgtac

SEQ ID NO: 9119 - DNA, 20 bp, Artificial Sequence
  Synthetic oligonucleotide; TAG chr11 5230857 5230876 5230873 +
gggtacatgtacaagttata

SEQ ID NO: 9120 - DNA, 20 bp, Artificial Sequence
  Synthetic oligonucleotide; AGG chr11 5230858 5230877 5230874 +
ggtacatgtacaagttatat

SEQ ID NO: 9121 - DNA, 20 bp, Artificial Sequence
  Synthetic oligonucleotide; TGG chr11 5230876 5230895 5230892 +
ataggtaaattgcatatcac

SEQ ID NO: 9122 - DNA, 20 bp, Artificial Sequence
  Synthetic oligonucleotide; GGG chr11 5230877 5230896 5230893 +
taggtaaattgcatatcact

SEQ ID NO: 9123 - DNA, 20 bp, Artificial Sequence
  Synthetic oligonucleotide; CAG chr11 5230890 5230909 5230906 +
tatcactgggtcttgatgta

SEQ ID NO: 9124 - DNA, 20 bp, Artificial Sequence
  Synthetic oligonucleotide; CAG chr11 5230907 5230926 5230923 +
gtacagattatttcatcact

SEQ ID NO: 9125 - DNA, 20 bp, Artificial Sequence
  Synthetic oligonucleotide; TAG chr11 5230929 5230948 5230945 +
gtgatgaacttaatacccaa

SEQ ID NO: 9126 - DNA, 20 bp, Artificial Sequence
  Synthetic oligonucleotide; AGG chr11 5230930 5230949 5230946 +
tgatgaacttaatacccaat

SEQ ID NO: 9127 - DNA, 20 bp, Artificial Sequence
  Synthetic oligonucleotide; AAG chr11 5230972 5230991 5230988 +
tcttcccaccctcaaccctc

SEQ ID NO: 9128 - DNA, 20 bp, Artificial Sequence
  Synthetic oligonucleotide; TAG chr11 5230975 5230994 5230991 +
tcccaccctcaaccctcaag

SEQ ID NO: 9129 - DNA, 20 bp, Artificial Sequence
  Synthetic oligonucleotide; AGG chr11 5230976 5230995 5230992 +
cccaccctcaaccctcaagt

SEQ ID NO: 9130 - DNA, 20 bp, Artificial Sequence
  Synthetic oligonucleotide; TGG chr11 5230981 5231000 5230997 +
cctcaaccctcaagtaggcc

SEQ ID NO: 9131 - DNA, 20 bp, Artificial Sequence
  Synthetic oligonucleotide; GGG chr11 5230982 5231001 5230998 +
ctcaaccctcaagtaggcct

SEQ ID NO: 9132 - DNA, 20 bp, Artificial Sequence
  Synthetic oligonucleotide; TAG chr11 5231026 5231045 5231042 +
tgtccatgtgtatcatcatt

SEQ ID NO: 9133 - DNA, 20 bp, Artificial Sequence
  Synthetic oligonucleotide; TAG chr11 5231041 5231060 5231057 +
tcatttagctcccacactcc

SEQ ID NO: 9134 - DNA, 20 bp, Artificial Sequence
  Synthetic oligonucleotide; AAG chr11 5231054 5231073 5231070 +
acactcctagactcttacaa

SEQ ID NO: 9135 - DNA, 20 bp, Artificial Sequence
  Synthetic oligonucleotide; AAG chr11 5231090 5231109 5231106 +
aataattttaatataacaac

SEQ ID NO: 9136 - DNA, 20 bp, Artificial Sequence
  Synthetic oligonucleotide; AGG chr11 5231091 5231110 5231107 +
ataattttaatataacaaca

SEQ ID NO: 9137 - DNA, 20 bp, Artificial Sequence
  Synthetic oligonucleotide; AAG chr11 5231098 5231117 5231114 +
taatataacaacaaggtgcc

SEQ ID NO: 9138 - DNA, 20 bp, Artificial Sequence
  Synthetic oligonucleotide; AAG chr11 5231138 5231157 5231154 +
acctcctcatcttcaatatg

SEQ ID NO: 9139 - DNA, 20 bp, Artificial Sequence
  Synthetic oligonucleotide; TAG chr11 5231142 5231161 5231158 +
cctcatcttcaatatgaaga

SEQ ID NO: 9140 - DNA, 20 bp, Artificial Sequence
  Synthetic oligonucleotide; TAG chr11 5231152 5231171 5231168 +
aatatgaagatagcaatgcc

SEQ ID NO: 9141 - DNA, 20 bp, Artificial Sequence
  Synthetic oligonucleotide; TAG chr11 5231159 5231178 5231175 +
agatagcaatgcctagcata

SEQ ID NO: 9142 - DNA, 20 bp, Artificial Sequence
  Synthetic oligonucleotide; CGG chr11 5231176 5231195 5231192 +
atatagtaattgtgtgtgct

SEQ ID NO: 9143 - DNA, 20 bp, Artificial Sequence
  Synthetic oligonucleotide; CAG chr11 5231192 5231211 5231208 +
tgctcggcacatgtcccatc

SEQ ID NO: 9144 - DNA, 20 bp, Artificial Sequence
  Synthetic oligonucleotide; AGG chr11 5231193 5231212 5231209 +
gctcggcacatgtcccatcc

SEQ ID NO: 9145 - DNA, 20 bp, Artificial Sequence
  Synthetic oligonucleotide; TGG chr11 5231216 5231235 5231232 +
tgatgttctcatgaattctc

SEQ ID NO: 9146 - DNA, 20 bp, Artificial Sequence
  Synthetic oligonucleotide; TGG chr11 5231223 5231242 5231239 +
ctcatgaattctctggtatt

SEQ ID NO: 9147 - DNA, 20 bp, Artificial Sequence
  Synthetic oligonucleotide; TAG chr11 5231231 5231250 5231247 +
ttctctggtatttggatttt

SEQ ID NO: 9148 - DNA, 20 bp, Artificial Sequence
  Synthetic oligonucleotide; AGG chr11 5231232 5231251 5231248 +
tctctggtatttggattttt

SEQ ID NO: 9149 - DNA, 20 bp, Artificial Sequence
  Synthetic oligonucleotide; GGG chr11 5231233 5231252 5231249 +
ctctggtatttggattttta

SEQ ID NO: 9150 - DNA, 20 bp, Artificial Sequence
  Synthetic oligonucleotide; TAG chr11 5231249 5231268 5231265 +
tttagggccaacatcttgcc

SEQ ID NO: 9151 - DNA, 20 bp, Artificial Sequence
  Synthetic oligonucleotide; TGG chr11 5231271 5231290 5231287 +
gactcactgactacttctaa

SEQ ID NO: 9152 - DNA, 20 bp, Artificial Sequence
  Synthetic oligonucleotide; TAG chr11 5231276 5231295 5231292 +
actgactacttctaatggtg

SEQ ID NO: 9153 - DNA, 20 bp, Artificial Sequence
  Synthetic oligonucleotide; AGG chr11 5231277 5231296 5231293 +
ctgactacttctaatggtgt

SEQ ID NO: 9154 - DNA, 20 bp, Artificial Sequence
  Synthetic oligonucleotide; TAG chr11 5231282 5231301 5231298 +
tacttctaatggtgtaggaa

SEQ ID NO: 9155 - DNA, 20 bp, Artificial Sequence
  Synthetic oligonucleotide; AAG chr11 5231285 5231304 5231301 +
ttctaatggtgtaggaatag

SEQ ID NO: 9156 - DNA, 20 bp, Artificial Sequence
  Synthetic oligonucleotide; AGG chr11 5231286 5231305 5231302 +
tctaatggtgtaggaataga

SEQ ID NO: 9157 - DNA, 20 bp, Artificial Sequence
  Synthetic oligonucleotide; TAG chr11 5231291 5231310 5231307 +
tggtgtaggaatagaaggta

SEQ ID NO: 9158 - DNA, 20 bp, Artificial Sequence
  Synthetic oligonucleotide; AAG chr11 5231295 5231314 5231311 +
gtaggaatagaaggtatagt

SEQ ID NO: 9159 - DNA, 20 bp, Artificial Sequence
  Synthetic oligonucleotide; TGG chr11 5231325 5231344 5231341 +
tgctctttttttttgacttt

SEQ ID NO: 9160 - DNA, 20 bp, Artificial Sequence
  Synthetic oligonucleotide; GAG chr11 5231327 5231346 5231343 +
ctctttttttttgacttttg

SEQ ID NO: 9161 - DNA, 20 bp, Artificial Sequence
  Synthetic oligonucleotide; AAG chr11 5231331 5231350 5231347 +
ttttttttgacttttggaga

SEQ ID NO: 9162 - DNA, 20 bp, Artificial Sequence
  Synthetic oligonucleotide; AGG chr11 5231332 5231351 5231348 +
tttttttgacttttggagaa

SEQ ID NO: 9163 - DNA, 20 bp, Artificial Sequence
  Synthetic oligonucleotide; TAG chr11 5231339 5231358 5231355 +
gacttttggagaaaggaatg

SEQ ID NO: 9164 - DNA, 20 bp, Artificial Sequence
  Synthetic oligonucleotide; AAG chr11 5231357 5231376 5231373 +
tgtagtttgttttccctatc

SEQ ID NO: 9165 - DNA, 20 bp, Artificial Sequence
  Synthetic oligonucleotide; AAG chr11 5231365 5231384 5231381 +
gttttccctatcaagatcat

SEQ ID NO: 9166 - DNA, 20 bp, Artificial Sequence
  Synthetic oligonucleotide; AGG chr11 5231366 5231385 5231382 +
ttttccctatcaagatcata

SEQ ID NO: 9167 - DNA, 20 bp, Artificial Sequence
  Synthetic oligonucleotide; AAG chr11 5231405 5231424 5231421 +
ctgtctttcgaataccacac

SEQ ID NO: 9168 - DNA, 20 bp, Artificial Sequence
  Synthetic oligonucleotide; GAG chr11 5231435 5231454 5231451 +
ttttaatatcttactcttat

SEQ ID NO: 9169 - DNA, 20 bp, Artificial Sequence
  Synthetic oligonucleotide; CAG chr11 5231452 5231471 5231468 +
tatgagaacttccctatgct

SEQ ID NO: 9170 - DNA, 20 bp, Artificial Sequence
  Synthetic oligonucleotide; AGG chr11 5231453 5231472 5231469 +
atgagaacttccctatgctc

SEQ ID NO: 9171 - DNA, 20 bp, Artificial Sequence
  Synthetic oligonucleotide; AAG chr11 5231463 5231482 5231479 +
ccctatgctcaggaatgtga

SEQ ID NO: 9172 - DNA, 20 bp, Artificial Sequence
  Synthetic oligonucleotide; GAG chr11 5231487 5231506 5231503 +
gatcttccccaaaatgccct

SEQ ID NO: 9173 - DNA, 20 bp, Artificial Sequence
  Synthetic oligonucleotide; TAG chr11 5231490 5231509 5231506 +
cttccccaaaatgccctgag

SEQ ID NO: 9174 - DNA, 20 bp, Artificial Sequence
  Synthetic oligonucleotide; CAG chr11 5231514 5231533 5231530 +
tctgcttctgatatgtaaac

SEQ ID NO: 9175 - DNA, 20 bp, Artificial Sequence
  Synthetic oligonucleotide; TGG chr11 5231517 5231536 5231533 +
gcttctgatatgtaaaccag

SEQ ID NO: 9176 - DNA, 20 bp, Artificial Sequence
  Synthetic oligonucleotide; CAG chr11 5231537 5231556 5231553 +
tggttcctaaatatcttatt

SEQ ID NO: 9177 - DNA, 20 bp, Artificial Sequence
  Synthetic oligonucleotide; AAG chr11 5231545 5231564 5231561 +
aaatatcttattcagatata

SEQ ID NO: 9178 - DNA, 20 bp, Artificial Sequence
  Synthetic oligonucleotide; GAG chr11 5231547 5231566 5231563 +
atatcttattcagatataaa

SEQ ID NO: 9179 - DNA, 20 bp, Artificial Sequence
  Synthetic oligonucleotide; CAG chr11 5231554 5231573 5231570 +
attcagatataaagagttct

SEQ ID NO: 9180 - DNA, 20 bp, Artificial Sequence
  Synthetic oligonucleotide; AAG chr11 5231579 5231598 5231595 +
cctactatgtataatgactt

SEQ ID NO: 9181 - DNA, 20 bp, Artificial Sequence
  Synthetic oligonucleotide; AGG chr11 5231580 5231599 5231596 +
ctactatgtataatgactta

SEQ ID NO: 9182 - DNA, 20 bp, Artificial Sequence
  Synthetic oligonucleotide; TGG chr11 5231591 5231610 5231607 +
aatgacttaaggaaaacaca

SEQ ID NO: 9183 - DNA, 20 bp, Artificial Sequence
  Synthetic oligonucleotide; AAG chr11 5231600 5231619 5231616 +
aggaaaacacatggatataa

SEQ ID NO: 9184 - DNA, 20 bp, Artificial Sequence
  Synthetic oligonucleotide; GAG chr11 5231602 5231621 5231618 +
gaaaacacatggatataaaa

SEQ ID NO: 9185 - DNA, 20 bp, Artificial Sequence
  Synthetic oligonucleotide; CAG chr11 5231615 5231634 5231631 +
tataaaagagcttctgctgc

SEQ ID NO: 9186 - DNA, 20 bp, Artificial Sequence
  Synthetic oligonucleotide; CAG chr11 5231643 5231662 5231659 +
tcaaaatgttgtgatcaaaa

SEQ ID NO: 9187 - DNA, 20 bp, Artificial Sequence
  Synthetic oligonucleotide; CAG chr11 5231664 5231683 5231680 +
agttaactataacacattgt

SEQ ID NO: 9188 - DNA, 20 bp, Artificial Sequence
  Synthetic oligonucleotide; TGG chr11 5231674 5231693 5231690 +
aacacattgtcagtatattc

SEQ ID NO: 9189 - DNA, 20 bp, Artificial Sequence
  Synthetic oligonucleotide; CAG chr11 5231677 5231696 5231693 +
acattgtcagtatattctgg

SEQ ID NO: 9190 - DNA, 20 bp, Artificial Sequence
  Synthetic oligonucleotide; CAG chr11 5231682 5231701 5231698 +
gtcagtatattctggcagta

SEQ ID NO: 9191 - DNA, 20 bp, Artificial Sequence
  Synthetic oligonucleotide; CAG chr11 5231686 5231705 5231702 +
gtatattctggcagtacaga

SEQ ID NO: 9192 - DNA, 20 bp, Artificial Sequence
  Synthetic oligonucleotide; GAG chr11 5231688 5231707 5231704 +
atattctggcagtacagaca

SEQ ID NO: 9193 - DNA, 20 bp, Artificial Sequence
  Synthetic oligonucleotide; AAG chr11 5231700 5231719 5231716 +
tacagacagagttactgtga

SEQ ID NO: 9194 - DNA, 20 bp, Artificial Sequence
  Synthetic oligonucleotide; AAG chr11 5231716 5231735 5231732 +
gtgaaagcactttcaaacac

SEQ ID NO: 9195 - DNA, 20 bp, Artificial Sequence
  Synthetic oligonucleotide; AGG chr11 5231717 5231736 5231733 +
tgaaagcactttcaaacaca

SEQ ID NO: 9196 - DNA, 20 bp, Artificial Sequence
  Synthetic oligonucleotide; CAG chr11 5231726 5231745 5231742 +
tttcaaacacaaggaaacaa

SEQ ID NO: 9197 - DNA, 20 bp, Artificial Sequence
  Synthetic oligonucleotide; TAG chr11 5231737 5231756 5231753 +
aggaaacaacagattctgtt

SEQ ID NO: 9198 - DNA, 20 bp, Artificial Sequence
  Synthetic oligonucleotide; AGG chr11 5231738 5231757 5231754 +
ggaaacaacagattctgttt

SEQ ID NO: 9199 - DNA, 20 bp, Artificial Sequence
  Synthetic oligonucleotide; AAG chr11 5231746 5231765 5231762 +
cagattctgtttaggtattc

SEQ ID NO: 9200 - DNA, 20 bp, Artificial Sequence
  Synthetic oligonucleotide; AAG chr11 5231750 5231769 5231766 +
ttctgtttaggtattcaagt

SEQ ID NO: 9201 - DNA, 20 bp, Artificial Sequence
  Synthetic oligonucleotide; CAG chr11 5231781 5231800 5231797 +
taatcaacatgcatataata

SEQ ID NO: 9202 - DNA, 20 bp, Artificial Sequence
  Synthetic oligonucleotide; GAG chr11 5231806 5231825 5231822 +
ttttaaaaatgtatacaact

SEQ ID NO: 9203 - DNA, 20 bp, Artificial Sequence
  Synthetic oligonucleotide; AAG chr11 5231810 5231829 5231826 +
aaaaatgtatacaactgaga

SEQ ID NO: 9204 - DNA, 20 bp, Artificial Sequence
  Synthetic oligonucleotide; TGG chr11 5231840 5231859 5231856 +
aatccttctaattttaccta

SEQ ID NO: 9205 - DNA, 20 bp, Artificial Sequence
  Synthetic oligonucleotide; TGG chr11 5231849 5231868 5231865 +
aattttacctatggcaaaaa

SEQ ID NO: 9206 - DNA, 20 bp, Artificial Sequence
  Synthetic oligonucleotide; AAG chr11 5231857 5231876 5231873 +
ctatggcaaaaatggtgctc

SEQ ID NO: 9207 - DNA, 20 bp, Artificial Sequence
  Synthetic oligonucleotide; AGG chr11 5231858 5231877 5231874 +
tatggcaaaaatggtgctca

SEQ ID NO: 9208 - DNA, 20 bp, Artificial Sequence
  Synthetic oligonucleotide; CAG chr11 5231883 5231902 5231899 +
aaaaatattactcctatgat

SEQ ID NO: 9209 - DNA, 20 bp, Artificial Sequence
  Synthetic oligonucleotide; AAG chr11 5231887 5231906 5231903 +
atattactcctatgatcaga

SEQ ID NO: 9210 - DNA, 20 bp, Artificial Sequence
  Synthetic oligonucleotide; AGG chr11 5231888 5231907 5231904 +
tattactcctatgatcagaa

SEQ ID NO: 9211 - DNA, 20 bp, Artificial Sequence
  Synthetic oligonucleotide; CGG chr11 5231902 5231921 5231918 +
tcagaaaggaaataactgtt

SEQ ID NO: 9212 - DNA, 20 bp, Artificial Sequence
  Synthetic oligonucleotide; TAG chr11 5231937 5231956 5231953 +
tgcttcctctttgtatgttg

SEQ ID NO: 9213 - DNA, 20 bp, Artificial Sequence
  Synthetic oligonucleotide; AAG chr11 5231951 5231970 5231967 +
atgttgtagcattaacaaca

SEQ ID NO: 9214 - DNA, 20 bp, Artificial Sequence
  Synthetic oligonucleotide; TGG chr11 5231967 5231986 5231983 +
aacaaagaaacactgtgcga

SEQ ID NO: 9215 - DNA, 20 bp, Artificial Sequence
  Synthetic oligonucleotide; CAG chr11 5231995 5232014 5232011 +
ttaatattgtcctctaattc

SEQ ID NO: 9216 - DNA, 20 bp, Artificial Sequence
  Synthetic oligonucleotide; AAG chr11 5231998 5232017 5232014 +
atattgtcctctaattccag

SEQ ID NO: 9217 - DNA, 20 bp, Artificial Sequence
  Synthetic oligonucleotide; AAG chr11 5232006 5232025 5232022 +
ctctaattccagaagttcta

SEQ ID NO: 9218 - DNA, 20 bp, Artificial Sequence
  Synthetic oligonucleotide; AAG chr11 5232010 5232029 5232026 +
aattccagaagttctaaagc

SEQ ID NO: 9219 - DNA, 20 bp, Artificial Sequence
  Synthetic oligonucleotide; AGG chr11 5232011 5232030 5232027 +
attccagaagttctaaagca

SEQ ID NO: 9220 - DNA, 20 bp, Artificial Sequence
  Synthetic oligonucleotide; GAG chr11 5232112 5232131 5232128 +
cccattgatgaatttaatat

SEQ ID NO: 9221 - DNA, 20 bp, Artificial Sequence
  Synthetic oligonucleotide; AGG chr11 5232113 5232132 5232129 +
ccattgatgaatttaatatg

SEQ ID NO: 9222 - DNA, 20 bp, Artificial Sequence
  Synthetic oligonucleotide; CAG chr11 5232118 5232137 5232134 +
gatgaatttaatatgaggca

SEQ ID NO: 9223 - DNA, 20 bp, Artificial Sequence
  Synthetic oligonucleotide; TAG chr11 5232121 5232140 5232137 +
gaatttaatatgaggcacag

SEQ ID NO: 9224 - DNA, 20 bp, Artificial Sequence
  Synthetic oligonucleotide; AGG chr11 5232122 5232141 5232138 +
aatttaatatgaggcacagt

SEQ ID NO: 9225 - DNA, 20 bp, Artificial Sequence
  Synthetic oligonucleotide; AAG chr11 5232130 5232149 5232146 +
atgaggcacagtaggcatgt

SEQ ID NO: 9226 - DNA, 20 bp, Artificial Sequence
  Synthetic oligonucleotide; AAG chr11 5232133 5232152 5232149 +
aggcacagtaggcatgtaag

SEQ ID NO: 9227 - DNA, 20 bp, Artificial Sequence
  Synthetic oligonucleotide; AGG chr11 5232134 5232153 5232150 +
ggcacagtaggcatgtaaga

SEQ ID NO: 9228 - DNA, 20 bp, Artificial Sequence
  Synthetic oligonucleotide; TAG chr11 5232137 5232156 5232153 +
acagtaggcatgtaagaagg

SEQ ID NO: 9229 - DNA, 20 bp, Artificial Sequence
  Synthetic oligonucleotide; GAG chr11 5232139 5232158 5232155 +
agtaggcatgtaagaaggta

SEQ ID NO: 9230 - DNA, 20 bp, Artificial Sequence
  Synthetic oligonucleotide; TAG chr11 5232144 5232163 5232160 +
gcatgtaagaaggtagagaa

SEQ ID NO: 9231 - DNA, 20 bp, Artificial Sequence
  Synthetic oligonucleotide; AGG chr11 5232145 5232164 5232161 +
catgtaagaaggtagagaat

SEQ ID NO: 9232 - DNA, 20 bp, Artificial Sequence
  Synthetic oligonucleotide; CAG chr11 5232148 5232167 5232164 +
gtaagaaggtagagaatagg

SEQ ID NO: 9233 - DNA, 20 bp, Artificial Sequence
  Synthetic oligonucleotide; AAG chr11 5232162 5232181 5232178 +
aataggcagaattgcttata

SEQ ID NO: 9234 - DNA, 20 bp, Artificial Sequence
  Synthetic oligonucleotide; CGG chr11 5232167 5232186 5232183 +
gcagaattgcttataaagca

SEQ ID NO: 9235 - DNA, 20 bp, Artificial Sequence
  Synthetic oligonucleotide; GAG chr11 5232169 5232188 5232185 +
agaattgcttataaagcacg

SEQ ID NO: 9236 - DNA, 20 bp, Artificial Sequence
  Synthetic oligonucleotide; AAG chr11 5232196 5232215 5232212 +
tgtgtgtgcatgaaataaat

SEQ ID NO: 9237 - DNA, 20 bp, Artificial Sequence
  Synthetic oligonucleotide; TGG chr11 5232221 5232240 5232237 +
aaatataaaaatataaaaaa

SEQ ID NO: 9238 - DNA, 20 bp, Artificial Sequence
  Synthetic oligonucleotide; TGG chr11 5232226 5232245 5232242 +
taaaaatataaaaaatggtg

SEQ ID NO: 9239 - DNA, 20 bp, Artificial Sequence
  Synthetic oligonucleotide; GGG chr11 5232227 5232246 5232243 +
aaaaatataaaaaatggtgt

SEQ ID NO: 9240 - DNA, 20 bp, Artificial Sequence
  Synthetic oligonucleotide; GGG chr11 5232228 5232247 5232244 +
aaaatataaaaaatggtgtg

SEQ ID NO: 9241 - DNA, 20 bp, Artificial Sequence
  Synthetic oligonucleotide; GGG chr11 5232229 5232248 5232245 +
aaatataaaaaatggtgtgg

SEQ ID NO: 9242 - DNA, 20 bp, Artificial Sequence
  Synthetic oligonucleotide; GAG chr11 5232231 5232250 5232247 +
atataaaaaatggtgtgggg

SEQ ID NO: 9243 - DNA, 20 bp, Artificial Sequence
  Synthetic oligonucleotide; AGG chr11 5232232 5232251 5232248 +
tataaaaaatggtgtggggg

SEQ ID NO: 9244 - DNA, 20 bp, Artificial Sequence
  Synthetic oligonucleotide; GGG chr11 5232233 5232252 5232249 +
ataaaaaatggtgtggggga

SEQ ID NO: 9245 - DNA, 20 bp, Artificial Sequence
  Synthetic oligonucleotide; TGG chr11 5232238 5232257 5232254 +
aaatggtgtgggggagggtt

SEQ ID NO: 9246 - DNA, 20 bp, Artificial Sequence
  Synthetic oligonucleotide; AAG chr11 5232242 5232261 5232258 +
ggtgtgggggagggtttgga

SEQ ID NO: 9247 - DNA, 20 bp, Artificial Sequence
  Synthetic oligonucleotide; TGG chr11 5232251 5232270 5232267 +
gagggtttggaaagattttt

SEQ ID NO: 9248 - DNA, 20 bp, Artificial Sequence
  Synthetic oligonucleotide; GGG chr11 5232252 5232271 5232268 +
agggtttggaaagatttttt

SEQ ID NO: 9249 - DNA, 20 bp, Artificial Sequence
  Synthetic oligonucleotide; TAG chr11 5232255 5232274 5232271 +
gtttggaaagattttttggg

SEQ ID NO: 9250 - DNA, 20 bp, Artificial Sequence
  Synthetic oligonucleotide; TAG chr11 5232260 5232279 5232276 +
gaaagattttttgggtagta

SEQ ID NO: 9251 - DNA, 20 bp, Artificial Sequence
  Synthetic oligonucleotide; GAG chr11 5232262 5232281 5232278 +
aagattttttgggtagtata

SEQ ID NO: 9252 - DNA, 20 bp, Artificial Sequence
  Synthetic oligonucleotide; AAG chr11 5232265 5232284 5232281 +
attttttgggtagtatagag

SEQ ID NO: 9253 - DNA, 20 bp, Artificial Sequence
  Synthetic oligonucleotide; TGG chr11 5232275 5232294 5232291 +
tagtatagagaagtttattg

SEQ ID NO: 9254 - DNA, 20 bp, Artificial Sequence
  Synthetic oligonucleotide; TGG chr11 5232279 5232298 5232295 +
atagagaagtttattgtggc

SEQ ID NO: 9255 - DNA, 20 bp, Artificial Sequence
  Synthetic oligonucleotide; GGG chr11 5232280 5232299 5232296 +
tagagaagtttattgtggct

SEQ ID NO: 9256 - DNA, 20 bp, Artificial Sequence
  Synthetic oligonucleotide; GGG chr11 5232281 5232300 5232297 +
agagaagtttattgtggctg

SEQ ID NO: 9257 - DNA, 20 bp, Artificial Sequence
  Synthetic oligonucleotide; AAG chr11 5232286 5232305 5232302 +
agtttattgtggctggggtc

SEQ ID NO: 9258 - DNA, 20 bp, Artificial Sequence
  Synthetic oligonucleotide; GAG chr11 5232288 5232307 5232304 +
tttattgtggctggggtcaa

SEQ ID NO: 9259 - DNA, 20 bp, Artificial Sequence
  Synthetic oligonucleotide; GAG chr11 5232290 5232309 5232306 +
tattgtggctggggtcaaga

SEQ ID NO: 9260 - DNA, 20 bp, Artificial Sequence
  Synthetic oligonucleotide; AGG chr11 5232291 5232310 5232307 +
attgtggctggggtcaagag

SEQ ID NO: 9261 - DNA, 20 bp, Artificial Sequence
  Synthetic oligonucleotide; AAG chr11 5232298 5232317 5232314 +
ctggggtcaagagaggtcac

SEQ ID NO: 9262 - DNA, 20 bp, Artificial Sequence
  Synthetic oligonucleotide; GAG chr11 5232309 5232328 5232325 +
agaggtcacaagtaatacgt

SEQ ID NO: 9263 - DNA, 20 bp, Artificial Sequence
  Synthetic oligonucleotide; TGG chr11 5232333 5232352 5232349 +
aatgaatcttgactgaaata

SEQ ID NO: 9264 - DNA, 20 bp, Artificial Sequence
  Synthetic oligonucleotide; GGG chr11 5232334 5232353 5232350 +
atgaatcttgactgaaatat

SEQ ID NO: 9265 - DNA, 20 bp, Artificial Sequence
  Synthetic oligonucleotide; AAG chr11 5232337 5232356 5232353 +
aatcttgactgaaatatggg

SEQ ID NO: 9266 - DNA, 20 bp, Artificial Sequence
  Synthetic oligonucleotide; AAG chr11 5232342 5232361 5232358 +
tgactgaaatatgggaagat

SEQ ID NO: 9267 - DNA, 20 bp, Artificial Sequence
  Synthetic oligonucleotide; GAG chr11 5232344 5232363 5232360 +
actgaaatatgggaagataa

SEQ ID NO: 9268 - DNA, 20 bp, Artificial Sequence
  Synthetic oligonucleotide; AGG chr11 5232345 5232364 5232361 +
ctgaaatatgggaagataag

SEQ ID NO: 9269 - DNA, 20 bp, Artificial Sequence
  Synthetic oligonucleotide; CAG chr11 5232358 5232377 5232374 +
agataagaggaaattcttta

SEQ ID NO: 9270 - DNA, 20 bp, Artificial Sequence
  Synthetic oligonucleotide; GAG chr11 5232360 5232379 5232376 +
ataagaggaaattctttaca

SEQ ID NO: 9271 - DNA, 20 bp, Artificial Sequence
  Synthetic oligonucleotide; TGG chr11 5232369 5232388 5232385 +
aattctttacagagatgttc

SEQ ID NO: 9272 - DNA, 20 bp, Artificial Sequence
  Synthetic oligonucleotide; GGG chr11 5232370 5232389 5232386 +
attctttacagagatgttct

SEQ ID NO: 9273 - DNA, 20 bp, Artificial Sequence
  Synthetic oligonucleotide; GGG chr11 5232371 5232390 5232387 +
ttctttacagagatgttctg

SEQ ID NO: 9274 - DNA, 20 bp, Artificial Sequence
  Synthetic oligonucleotide; AAG chr11 5232375 5232394 5232391 +
ttacagagatgttctggggc

SEQ ID NO: 9275 - DNA, 20 bp, Artificial Sequence
  Synthetic oligonucleotide; AAG chr11 5232379 5232398 5232395 +
agagatgttctggggcaagt

SEQ ID NO: 9276 - DNA, 20 bp, Artificial Sequence
  Synthetic oligonucleotide; GAG chr11 5232381 5232400 5232397 +
agatgttctggggcaagtaa

SEQ ID NO: 9277 - DNA, 20 bp, Artificial Sequence
  Synthetic oligonucleotide; AGG chr11 5232382 5232401 5232398 +
gatgttctggggcaagtaag

SEQ ID NO: 9278 - DNA, 20 bp, Artificial Sequence
  Synthetic oligonucleotide; GAG chr11 5232384 5232403 5232400 +
tgttctggggcaagtaagag

SEQ ID NO: 9279 - DNA, 20 bp, Artificial Sequence
  Synthetic oligonucleotide; AGG chr11 5232385 5232404 5232401 +
gttctggggcaagtaagagg

SEQ ID NO: 9280 - DNA, 20 bp, Artificial Sequence
  Synthetic oligonucleotide; AAG chr11 5232388 5232407 5232404 +
ctggggcaagtaagaggagg

SEQ ID NO: 9281 - DNA, 20 bp, Artificial Sequence
  Synthetic oligonucleotide; TGG chr11 5232399 5232418 5232415 +
aagaggaggaagctatttct

SEQ ID NO: 9282 - DNA, 20 bp, Artificial Sequence
  Synthetic oligonucleotide; GAG chr11 5232401 5232420 5232417 +
gaggaggaagctatttcttg

SEQ ID NO: 9283 - DNA, 20 bp, Artificial Sequence
  Synthetic oligonucleotide; CAG chr11 5232404 5232423 5232420 +
gaggaagctatttcttggag

SEQ ID NO: 9284 - DNA, 20 bp, Artificial Sequence
  Synthetic oligonucleotide; AGG chr11 5232405 5232424 5232421 +
aggaagctatttcttggagc

SEQ ID NO: 9285 - DNA, 20 bp, Artificial Sequence
  Synthetic oligonucleotide; TGG chr11 5232417 5232436 5232433 +
cttggagcaggaacacttga

SEQ ID NO: 9286 - DNA, 20 bp, Artificial Sequence
  Synthetic oligonucleotide; GGG chr11 5232418 5232437 5232434 +
ttggagcaggaacacttgat

SEQ ID NO: 9287 - DNA, 20 bp, Artificial Sequence
  Synthetic oligonucleotide; GGG chr11 5232419 5232438 5232435 +
tggagcaggaacacttgatg

SEQ ID NO: 9288 - DNA, 20 bp, Artificial Sequence
  Synthetic oligonucleotide; TAG chr11 5232424 5232443 5232440 +
caggaacacttgatggggta

SEQ ID NO: 9289 - DNA, 20 bp, Artificial Sequence
  Synthetic oligonucleotide; TGG chr11 5232432 5232451 5232448 +
cttgatggggtatagtatta

SEQ ID NO: 9290 - DNA, 20 bp, Artificial Sequence
  Synthetic oligonucleotide; GGG chr11 5232433 5232452 5232449 +
ttgatggggtatagtattat

SEQ ID NO: 9291 - DNA, 20 bp, Artificial Sequence
  Synthetic oligonucleotide; CAG chr11 5232446 5232465 5232462 +
gtattatgggctacaatgtg

SEQ ID NO: 9292 - DNA, 20 bp, Artificial Sequence
  Synthetic oligonucleotide; AGG chr11 5232447 5232466 5232463 +
tattatgggctacaatgtgc

SEQ ID NO: 9293 - DNA, 20 bp, Artificial Sequence
  Synthetic oligonucleotide; AAG chr11 5232452 5232471 5232468 +
tgggctacaatgtgcaggca

SEQ ID NO: 9294 - DNA, 20 bp, Artificial Sequence
  Synthetic oligonucleotide; AGG chr11 5232453 5232472 5232469 +
gggctacaatgtgcaggcaa

SEQ ID NO: 9295 - DNA, 20 bp, Artificial Sequence
  Synthetic oligonucleotide; AAG chr11 5232456 5232475 5232472 +
ctacaatgtgcaggcaaagg

SEQ ID NO: 9296 - DNA, 20 bp, Artificial Sequence
  Synthetic oligonucleotide; AGG chr11 5232457 5232476 5232473 +
tacaatgtgcaggcaaagga

SEQ ID NO: 9297 - DNA, 20 bp, Artificial Sequence
  Synthetic oligonucleotide; GAG chr11 5232459 5232478 5232475 +
caatgtgcaggcaaaggaag

SEQ ID NO: 9298 - DNA, 20 bp, Artificial Sequence
  Synthetic oligonucleotide; AGG chr11 5232460 5232479 5232476 +
aatgtgcaggcaaaggaagg

SEQ ID NO: 9299 - DNA, 20 bp, Artificial Sequence
  Synthetic oligonucleotide; AAG chr11 5232463 5232482 5232479 +
gtgcaggcaaaggaaggagg

SEQ ID NO: 9300 - DNA, 20 bp, Artificial Sequence
  Synthetic oligonucleotide; AAG chr11 5232467 5232486 5232483 +
aggcaaaggaaggaggaaga

SEQ ID NO: 9301 - DNA, 20 bp, Artificial Sequence
  Synthetic oligonucleotide; GAG chr11 5232488 5232507 5232504 +
agacaacataacattgtctt

SEQ ID NO: 9302 - DNA, 20 bp, Artificial Sequence
  Synthetic oligonucleotide; GAG chr11 5232511 5232530 5232527 +
taatcattatgcctttaatt

SEQ ID NO: 9303 - DNA, 20 bp, Artificial Sequence
  Synthetic oligonucleotide; CAG chr11 5232527 5232546 5232543 +
aattgagcacattattttct

SEQ ID NO: 9304 - DNA, 20 bp, Artificial Sequence
  Synthetic oligonucleotide; TGG chr11 5232537 5232556 5232553 +
attattttctcagtaattgt

SEQ ID NO: 9305 - DNA, 20 bp, Artificial Sequence
  Synthetic oligonucleotide; GAG chr11 5232539 5232558 5232555 +
tattttctcagtaattgttg

SEQ ID NO: 9306 - DNA, 20 bp, Artificial Sequence
  Synthetic oligonucleotide; TAG chr11 5232550 5232569 5232566 +
taattgttggagtttaatcg

SEQ ID NO: 9307 - DNA, 20 bp, Artificial Sequence
  Synthetic oligonucleotide; GAG chr11 5232563 5232582 5232579 +
ttaatcgtagcattaccctt

SEQ ID NO: 9308 - DNA, 20 bp, Artificial Sequence
  Synthetic oligonucleotide; AGG chr11 5232564 5232583 5232580 +
taatcgtagcattacccttg

SEQ ID NO: 9309 - DNA, 20 bp, Artificial Sequence
  Synthetic oligonucleotide; TAG chr11 5232575 5232594 5232591 +
ttacccttgaggctatgtct

SEQ ID NO: 9310 - DNA, 20 bp, Artificial Sequence
  Synthetic oligonucleotide; AGG chr11 5232576 5232595 5232592 +
tacccttgaggctatgtctt

SEQ ID NO: 9311 - DNA, 20 bp, Artificial Sequence
  Synthetic oligonucleotide; GGG chr11 5232577 5232596 5232593 +
acccttgaggctatgtctta

SEQ ID NO: 9312 - DNA, 20 bp, Artificial Sequence
  Synthetic oligonucleotide; GAG chr11 5232582 5232601 5232598 +
tgaggctatgtcttagggtt

SEQ ID NO: 9313 - DNA, 20 bp, Artificial Sequence
  Synthetic oligonucleotide; AGG chr11 5232583 5232602 5232599 +
gaggctatgtcttagggttg

SEQ ID NO: 9314 - DNA, 20 bp, Artificial Sequence
  Synthetic oligonucleotide; TAG chr11 5232593 5232612 5232609 +
cttagggttgaggtcttccc

SEQ ID NO: 9315 - DNA, 20 bp, Artificial Sequence
  Synthetic oligonucleotide; CAG chr11 5232604 5232623 5232620 +
ggtcttccctagaacctctg

SEQ ID NO: 9316 - DNA, 20 bp, Artificial Sequence
  Synthetic oligonucleotide; CAG chr11 5232610 5232629 5232626 +
ccctagaacctctgcagtgc

SEQ ID NO: 9317 - DNA, 20 bp, Artificial Sequence
  Synthetic oligonucleotide; AAG chr11 5232628 5232647 5232644 +
gccagtattatctttgtatc

SEQ ID NO: 9318 - DNA, 20 bp, Artificial Sequence
  Synthetic oligonucleotide; GAG chr11 5232630 5232649 5232646 +
cagtattatctttgtatcaa

SEQ ID NO: 9319 - DNA, 20 bp, Artificial Sequence
  Synthetic oligonucleotide; TGG chr11 5232654 5232673 5232670 +
tcttgataatttctgctctt

SEQ ID NO: 9320 - DNA, 20 bp, Artificial Sequence
  Synthetic oligonucleotide; GAG chr11 5232656 5232675 5232672 +
ttgataatttctgctctttg

SEQ ID NO: 9321 - DNA, 20 bp, Artificial Sequence
  Synthetic oligonucleotide; AGG chr11 5232657 5232676 5232673 +
tgataatttctgctctttgg

SEQ ID NO: 9322 - DNA, 20 bp, Artificial Sequence
  Synthetic oligonucleotide; TAG chr11 5232660 5232679 5232676 +
taatttctgctctttggagg

SEQ ID NO: 9323 - DNA, 20 bp, Artificial Sequence
  Synthetic oligonucleotide; AAG chr11 5232663 5232682 5232679 +
tttctgctctttggaggtag

SEQ ID NO: 9324 - DNA, 20 bp, Artificial Sequence
  Synthetic oligonucleotide; CGG chr11 5232688 5232707 5232704 +
tcacccattaatgccttgta

SEQ ID NO: 9325 - DNA, 20 bp, Artificial Sequence
  Synthetic oligonucleotide; AAG chr11 5232736 5232755 5232752 +
gtactctttgtaaaataaac

SEQ ID NO: 9326 - DNA, 20 bp, Artificial Sequence
  Synthetic oligonucleotide; TAG chr11 5232752 5232771 5232768 +
aaacaagtgctccctatctg

SEQ ID NO: 9327 - DNA, 20 bp, Artificial Sequence
  Synthetic oligonucleotide; GAG chr11 5232754 5232773 5232770 +
acaagtgctccctatctgta

SEQ ID NO: 9328 - DNA, 20 bp, Artificial Sequence
  Synthetic oligonucleotide; CAG chr11 5232760 5232779 5232776 +
gctccctatctgtagagcct

SEQ ID NO: 9329 - DNA, 20 bp, Artificial Sequence
  Synthetic oligonucleotide; AGG chr11 5232761 5232780 5232777 +
ctccctatctgtagagcctc

SEQ ID NO: 9330 - DNA, 20 bp, Artificial Sequence
  Synthetic oligonucleotide; TGG chr11 5232780 5232799 5232796 +
caggaaccttcttacacacc

SEQ ID NO: 9331 - DNA, 20 bp, Artificial Sequence
  Synthetic oligonucleotide; AAG chr11 5232798 5232817 5232814 +
cctggacaaaaaaatgaaat

SEQ ID NO: 9332 - DNA, 20 bp, Artificial Sequence
  Synthetic oligonucleotide; CAG chr11 5232811 5232830 5232827 +
atgaaataagtgaaattaat

SEQ ID NO: 9333 - DNA, 20 bp, Artificial Sequence
  Synthetic oligonucleotide; AGG chr11 5232812 5232831 5232828 +
tgaaataagtgaaattaatc

SEQ ID NO: 9334 - DNA, 20 bp, Artificial Sequence
  Synthetic oligonucleotide; AAG chr11 5232815 5232834 5232831 +
aataagtgaaattaatcagg

SEQ ID NO: 9335 - DNA, 20 bp, Artificial Sequence
  Synthetic oligonucleotide; GAG chr11 5232820 5232839 5232836 +
gtgaaattaatcaggaagtt

SEQ ID NO: 9336 - DNA, 20 bp, Artificial Sequence
  Synthetic oligonucleotide; TAG chr11 5232838 5232857 5232854 +
ttgagctgaacattctttat

SEQ ID NO: 9337 - DNA, 20 bp, Artificial Sequence
  Synthetic oligonucleotide; AGG chr11 5232839 5232858 5232855 +
tgagctgaacattctttatt

SEQ ID NO: 9338 - DNA, 20 bp, Artificial Sequence
  Synthetic oligonucleotide; CAG chr11 5232842 5232861 5232858 +
gctgaacattctttattagg

SEQ ID NO: 9339 - DNA, 20 bp, Artificial Sequence
  Synthetic oligonucleotide; AAG chr11 5232845 5232864 5232861 +
gaacattctttattaggcag

SEQ ID NO: 9340 - DNA, 20 bp, Artificial Sequence
  Synthetic oligonucleotide; AAG chr11 5232859 5232878 5232875 +
aggcagaagccatacccttg

SEQ ID NO: 9341 - DNA, 20 bp, Artificial Sequence
  Synthetic oligonucleotide; TAG chr11 5232862 5232881 5232878 +
cagaagccatacccttgaag

SEQ ID NO: 9342 - DNA, 20 bp, Artificial Sequence
  Synthetic oligonucleotide; AGG chr11 5232863 5232882 5232879 +
agaagccatacccttgaagt

SEQ ID NO: 9343 - DNA, 20 bp, Artificial Sequence
  Synthetic oligonucleotide; AAG chr11 5232878 5232897 5232894 +
gaagtaggcattgtgttccc

SEQ ID NO: 9344 - DNA, 20 bp, Artificial Sequence
  Synthetic oligonucleotide; CAG chr11 5232883 5232902 5232899 +
aggcattgtgttcccaagtt

SEQ ID NO: 9345 - DNA, 20 bp, Artificial Sequence
  Synthetic oligonucleotide; TAG chr11 5232890 5232909 5232906 +
gtgttcccaagttcagaaaa

SEQ ID NO: 9346 - DNA, 20 bp, Artificial Sequence
  Synthetic oligonucleotide; TAG chr11 5232897 5232916 5232913 +
caagttcagaaaatagaatc

SEQ ID NO: 9347 - DNA, 20 bp, Artificial Sequence
  Synthetic oligonucleotide; AGG chr11 5232898 5232917 5232914 +
aagttcagaaaatagaatct

SEQ ID NO: 9348 - DNA, 20 bp, Artificial Sequence
  Synthetic oligonucleotide; GGG chr11 5232899 5232918 5232915 +
agttcagaaaatagaatcta

SEQ ID NO: 9349 - DNA, 20 bp, Artificial Sequence
  Synthetic oligonucleotide; TAG chr11 5232905 5232924 5232921 +
gaaaatagaatctagggaaa

SEQ ID NO: 9350 - DNA, 20 bp, Artificial Sequence
  Synthetic oligonucleotide; AGG chr11 5232906 5232925 5232922 +
aaaatagaatctagggaaat

SEQ ID NO: 9351 - DNA, 20 bp, Artificial Sequence
  Synthetic oligonucleotide; GGG chr11 5232907 5232926 5232923 +
aaatagaatctagggaaata

SEQ ID NO: 9352 - DNA, 20 bp, Artificial Sequence
  Synthetic oligonucleotide; TGG chr11 5232918 5232937 5232934 +
agggaaatagggtcttctta

SEQ ID NO: 9353 - DNA, 20 bp, Artificial Sequence
  Synthetic oligonucleotide; CAG chr11 5232925 5232944 5232941 +
tagggtcttcttatggttat

SEQ ID NO: 9354 - DNA, 20 bp, Artificial Sequence
  Synthetic oligonucleotide; AGG chr11 5232926 5232945 5232942 +
agggtcttcttatggttatc

SEQ ID NO: 9355 - DNA, 20 bp, Artificial Sequence
  Synthetic oligonucleotide; CAG chr11 5232932 5232951 5232948 +
ttcttatggttatcaggaaa

SEQ ID NO: 9356 - DNA, 20 bp, Artificial Sequence
  Synthetic oligonucleotide; CAG chr11 5232937 5232956 5232953 +
atggttatcaggaaacagtc

SEQ ID NO: 9357 - DNA, 20 bp, Artificial Sequence
  Synthetic oligonucleotide; AGG chr11 5232938 5232957 5232954 +
tggttatcaggaaacagtcc

SEQ ID NO: 9358 - DNA, 20 bp, Artificial Sequence
  Synthetic oligonucleotide; TGG chr11 5232948 5232967 5232964 +
gaaacagtccaggatctcaa

SEQ ID NO: 9359 - DNA, 20 bp, Artificial Sequence
  Synthetic oligonucleotide; GAG chr11 5232958 5232977 5232974 +
aggatctcaatggtacttgt

SEQ ID NO: 9360 - DNA, 20 bp, Artificial Sequence
  Synthetic oligonucleotide; CAG chr11 5232962 5232981 5232978 +
tctcaatggtacttgtgagc

SEQ ID NO: 9361 - DNA, 20 bp, Artificial Sequence
  Synthetic oligonucleotide; AGG chr11 5232963 5232982 5232979 +
ctcaatggtacttgtgagcc

SEQ ID NO: 9362 - DNA, 20 bp, Artificial Sequence
  Synthetic oligonucleotide; GGG chr11 5232964 5232983 5232980 +
tcaatggtacttgtgagcca

SEQ ID NO: 9363 - DNA, 20 bp, Artificial Sequence
  Synthetic oligonucleotide; TAG chr11 5232970 5232989 5232986 +
gtacttgtgagccagggcat

SEQ ID NO: 9364 - DNA, 20 bp, Artificial Sequence
  Synthetic oligonucleotide; CAG chr11 5232979 5232998 5232995 +
agccagggcattagccacac

SEQ ID NO: 9365 - DNA, 20 bp, Artificial Sequence
  Synthetic oligonucleotide; TAG chr11 5232996 5233015 5233012 +
caccagccaccaccttctga

SEQ ID NO: 9366 - DNA, 20 bp, Artificial Sequence
  Synthetic oligonucleotide; AGG chr11 5232997 5233016 5233013 +
accagccaccaccttctgat

SEQ ID NO: 9367 - DNA, 20 bp, Artificial Sequence
  Synthetic oligonucleotide; CAG chr11 5233000 5233019 5233016 +
agccaccaccttctgatagg

SEQ ID NO: 9368 - DNA, 20 bp, Artificial Sequence
  Synthetic oligonucleotide; TGG chr11 5233013 5233032 5233029 +
tgataggcagcctgcatttg

SEQ ID NO: 9369 - DNA, 20 bp, Artificial Sequence
  Synthetic oligonucleotide; GGG chr11 5233014 5233033 5233030 +
gataggcagcctgcatttgt

SEQ ID NO: 9370 - DNA, 20 bp, Artificial Sequence
  Synthetic oligonucleotide; GGG chr11 5233015 5233034 5233031 +
ataggcagcctgcatttgtg

SEQ ID NO: 9371 - DNA, 20 bp, Artificial Sequence
  Synthetic oligonucleotide; AAG chr11 5233032 5233051 5233048 +
gtggggtgaattccttgcca

SEQ ID NO: 9372 - DNA, 20 bp, Artificial Sequence
  Synthetic oligonucleotide; CGG chr11 5233038 5233057 5233054 +
tgaattccttgccaaagttg

SEQ ID NO: 9373 - DNA, 20 bp, Artificial Sequence
  Synthetic oligonucleotide; GGG chr11 5233039 5233058 5233055 +
gaattccttgccaaagttgc

SEQ ID NO: 9374 - DNA, 20 bp, Artificial Sequence
  Synthetic oligonucleotide; CAG chr11 5233043 5233062 5233059 +
tccttgccaaagttgcgggc

SEQ ID NO: 9375 - DNA, 20 bp, Artificial Sequence
  Synthetic oligonucleotide; CAG chr11 5233055 5233074 5233071 +
ttgcgggccagcacacacac

SEQ ID NO: 9376 - DNA, 20 bp, Artificial Sequence
  Synthetic oligonucleotide; AAG chr11 5233068 5233087 5233084 +
cacacaccagcacattgccc

SEQ ID NO: 9377 - DNA, 20 bp, Artificial Sequence
  Synthetic oligonucleotide; GAG chr11 5233070 5233089 5233086 +
cacaccagcacattgcccaa

SEQ ID NO: 9378 - DNA, 20 bp, Artificial Sequence
  Synthetic oligonucleotide; CGG chr11 5233076 5233095 5233092 +
agcacattgcccaagagctg

SEQ ID NO: 9379 - DNA, 20 bp, Artificial Sequence
  Synthetic oligonucleotide; GAG chr11 5233078 5233097 5233094 +
cacattgcccaagagctgcg

SEQ ID NO: 9380 - DNA, 20 bp, Artificial Sequence
  Synthetic oligonucleotide; AAG chr11 5233081 5233100 5233097 +
attgcccaagagctgcggag

SEQ ID NO: 9381 - DNA, 20 bp, Artificial Sequence
  Synthetic oligonucleotide; GAG chr11 5233083 5233102 5233099 +
tgcccaagagctgcggagaa

SEQ ID NO: 9382 - DNA, 20 bp, Artificial Sequence
  Synthetic oligonucleotide; AGG chr11 5233084 5233103 5233100 +
gcccaagagctgcggagaag

SEQ ID NO: 9383 - DNA, 20 bp, Artificial Sequence
  Synthetic oligonucleotide; TAG chr11 5233087 5233106 5233103 +
caagagctgcggagaagagg

SEQ ID NO: 9384 - DNA, 20 bp, Artificial Sequence
  Synthetic oligonucleotide; AGG chr11 5233088 5233107 5233104 +
aagagctgcggagaagaggt

SEQ ID NO: 9385 - DNA, 20 bp, Artificial Sequence
  Synthetic oligonucleotide; CAG chr11 5233091 5233110 5233107 +
agctgcggagaagaggtagg

SEQ ID NO: 9386 - DNA, 20 bp, Artificial Sequence
  Synthetic oligonucleotide; TGG chr11 5233105 5233124 5233121 +
ggtaggcagatacatgcata

SEQ ID NO: 9387 - DNA, 20 bp, Artificial Sequence
  Synthetic oligonucleotide; CAG chr11 5233112 5233131 5233128 +
agatacatgcatatggttaa

SEQ ID NO: 9388 - DNA, 20 bp, Artificial Sequence
  Synthetic oligonucleotide; GAG chr11 5233114 5233133 5233130 +
atacatgcatatggttaaca

SEQ ID NO: 9389 - DNA, 20 bp, Artificial Sequence
  Synthetic oligonucleotide; AAG chr11 5233122 5233141 5233138 +
atatggttaacagagaaata

SEQ ID NO: 9390 - DNA, 20 bp, Artificial Sequence
  Synthetic oligonucleotide; TGG chr11 5233127 5233146 5233143 +
gttaacagagaaataaagac

SEQ ID NO: 9391 - DNA, 20 bp, Artificial Sequence
  Synthetic oligonucleotide; GAG chr11 5233135 5233154 5233151 +
agaaataaagactggcttct

SEQ ID NO: 9392 - DNA, 20 bp, Artificial Sequence
  Synthetic oligonucleotide; GAG chr11 5233143 5233162 5233159 +
agactggcttctgagaaact

SEQ ID NO: 9393 - DNA, 20 bp, Artificial Sequence
  Synthetic oligonucleotide; TAG chr11 5233175 5233194 5233191 +
atttttttctgcccaaatct

SEQ ID NO: 9394 - DNA, 20 bp, Artificial Sequence
  Synthetic oligonucleotide; CAG chr11 5233192 5233211 5233208 +
tcttagacaaaactgatccc

SEQ ID NO: 9395 - DNA, 20 bp, Artificial Sequence
  Synthetic oligonucleotide; AGG chr11 5233193 5233212 5233209 +
cttagacaaaactgatcccc

SEQ ID NO: 9396 - DNA, 20 bp, Artificial Sequence
  Synthetic oligonucleotide; CAG chr11 5233206 5233225 5233222 +
gatccccaggttattcccat

SEQ ID NO: 9397 - DNA, 20 bp, Artificial Sequence
  Synthetic oligonucleotide; AAG chr11 5233216 5233235 5233232 +
ttattcccatcagcataaat

SEQ ID NO: 9398 - DNA, 20 bp, Artificial Sequence
  Synthetic oligonucleotide; TAG chr11 5233281 5233300 5233297 +
acatcctctatgtacttaac

SEQ ID NO: 9399 - DNA, 20 bp, Artificial Sequence
  Synthetic oligonucleotide; TAG chr11 5233288 5233307 5233304 +
ctatgtacttaactagcatg

SEQ ID NO: 9400 - DNA, 20 bp, Artificial Sequence
  Synthetic oligonucleotide; TAG chr11 5233353 5233372 5233369 +
tatacaaattaattccaaat

SEQ ID NO: 9401 - DNA, 20 bp, Artificial Sequence
  Synthetic oligonucleotide; TAG chr11 5233377 5233396 5233393 +
tttaattttgtatgtgtata

SEQ ID NO: 9402 - DNA, 20 bp, Artificial Sequence
  Synthetic oligonucleotide; CAG chr11 5233404 5233423 5233420 +
tacaaattaattactataaa

SEQ ID NO: 9403 - DNA, 20 bp, Artificial Sequence
  Synthetic oligonucleotide; TAG chr11 5233412 5233431 5233428 +
aattactataaacagattaa

SEQ ID NO: 9404 - DNA, 20 bp, Artificial Sequence
  Synthetic oligonucleotide; CAG chr11 5233435 5233454 5233451 +
atacaaattaattgattaat

SEQ ID NO: 9405 - DNA, 20 bp, Artificial Sequence
  Synthetic oligonucleotide; TGG chr11 5233446 5233465 5233462 +
ttgattaatcagtgtgatga

SEQ ID NO: 9406 - DNA, 20 bp, Artificial Sequence
  Synthetic oligonucleotide; GGG chr11 5233447 5233466 5233463 +
tgattaatcagtgtgatgat

SEQ ID NO: 9407 - DNA, 20 bp, Artificial Sequence
  Synthetic oligonucleotide; TAG chr11 5233458 5233477 5233474 +
tgtgatgatgggctgtctcc

SEQ ID NO: 9408 - DNA, 20 bp, Artificial Sequence
  Synthetic oligonucleotide; CAG chr11 5233482 5233501 5233498 +
aacgacttctgccccacctc

SEQ ID NO: 9409 - DNA, 20 bp, Artificial Sequence
  Synthetic oligonucleotide; TAG chr11 5233495 5233514 5233511 +
ccacctccagtgtaactgcc

SEQ ID NO: 9410 - DNA, 20 bp, Artificial Sequence
  Synthetic oligonucleotide; CAG chr11 5233543 5233562 5233559 +
cctttccattccatttacta

SEQ ID NO: 9411 - DNA, 20 bp, Artificial Sequence
  Synthetic oligonucleotide; TAG chr11 5233588 5233607 5233604 +
ccttattgtaaaatgattta

SEQ ID NO: 9412 - DNA, 20 bp, Artificial Sequence
  Synthetic oligonucleotide; CAG chr11 5233600 5233619 5233616 +
atgatttatagcctctaaaa

SEQ ID NO: 9413 - DNA, 20 bp, Artificial Sequence
  Synthetic oligonucleotide; GAG chr11 5233624 5233643 5233640 +
attctatgcctctcatcttt

SEQ ID NO: 9414 - DNA, 20 bp, Artificial Sequence
  Synthetic oligonucleotide; TGG chr11 5233628 5233647 5233644 +
tatgcctctcatctttgagt

SEQ ID NO: 9415 - DNA, 20 bp, Artificial Sequence
  Synthetic oligonucleotide; GAG chr11 5233630 5233649 5233646 +
tgcctctcatctttgagttg

SEQ ID NO: 9416 - DNA, 20 bp, Artificial Sequence
  Synthetic oligonucleotide; TGG chr11 5233650 5233669 5233666 +
gagcctctcccatacccatg

SEQ ID NO: 9417 - DNA, 20 bp, Artificial Sequence
  Synthetic oligonucleotide; GAG chr11 5233652 5233671 5233668 +
gcctctcccatacccatgtg

SEQ ID NO: 9418 - DNA, 20 bp, Artificial Sequence
  Synthetic oligonucleotide; GAG chr11 5233654 5233673 5233670 +
ctctcccatacccatgtgga

SEQ ID NO: 9419 - DNA, 20 bp, Artificial Sequence
  Synthetic oligonucleotide; AAG chr11 5233661 5233680 5233677 +
atacccatgtggagagacaa

SEQ ID NO: 9420 - DNA, 20 bp, Artificial Sequence
  Synthetic oligonucleotide; AGG chr11 5233662 5233681 5233678 +
tacccatgtggagagacaaa

SEQ ID NO: 9421 - DNA, 20 bp, Artificial Sequence
  Synthetic oligonucleotide; AAG chr11 5233673 5233692 5233689 +
agagacaaaaggattattct

SEQ ID NO: 9422 - DNA, 20 bp, Artificial Sequence
  Synthetic oligonucleotide; CAG chr11 5233678 5233697 5233694 +
caaaaggattattctaagtg

SEQ ID NO: 9423 - DNA, 20 bp, Artificial Sequence
  Synthetic oligonucleotide; TAG chr11 5233684 5233703 5233700 +
gattattctaagtgcagaat

SEQ ID NO: 9424 - DNA, 20 bp, Artificial Sequence
  Synthetic oligonucleotide; CAG chr11 5233687 5233706 5233703 +
tattctaagtgcagaattag

SEQ ID NO: 9425 - DNA, 20 bp, Artificial Sequence
  Synthetic oligonucleotide; AGG chr11 5233688 5233707 5233704 +
attctaagtgcagaattagc

SEQ ID NO: 9426 - DNA, 20 bp, Artificial Sequence
  Synthetic oligonucleotide; GAG chr11 5233692 5233711 5233708 +
taagtgcagaattagcaggt

SEQ ID NO: 9427 - DNA, 20 bp, Artificial Sequence
  Synthetic oligonucleotide; GAG chr11 5233694 5233713 5233710 +
agtgcagaattagcaggtga

SEQ ID NO: 9428 - DNA, 20 bp, Artificial Sequence
  Synthetic oligonucleotide; TGG chr11 5233698 5233717 5233714 +
cagaattagcaggtgagagc

SEQ ID NO: 9429 - DNA, 20 bp, Artificial Sequence
  Synthetic oligonucleotide; GAG chr11 5233713 5233732 5233729 +
agagctggtatgcataattt

SEQ ID NO: 9430 - DNA, 20 bp, Artificial Sequence
  Synthetic oligonucleotide; TAG chr11 5233723 5233742 5233739 +
tgcataatttgagttgttgt

SEQ ID NO: 9431 - DNA, 20 bp, Artificial Sequence
  Synthetic oligonucleotide; GAG chr11 5233725 5233744 5233741 +
cataatttgagttgttgtta

SEQ ID NO: 9432 - DNA, 20 bp, Artificial Sequence
  Synthetic oligonucleotide; AAG chr11 5233728 5233747 5233744 +
aatttgagttgttgttagag

SEQ ID NO: 9433 - DNA, 20 bp, Artificial Sequence
  Synthetic oligonucleotide; AGG chr11 5233729 5233748 5233745 +
atttgagttgttgttagaga

SEQ ID NO: 9434 - DNA, 20 bp, Artificial Sequence
  Synthetic oligonucleotide; AAG chr11 5233739 5233758 5233755 +
ttgttagagaaggaaaaatg

SEQ ID NO: 9435 - DNA, 20 bp, Artificial Sequence
  Synthetic oligonucleotide; AGG chr11 5233740 5233759 5233756 +
tgttagagaaggaaaaatga

SEQ ID NO: 9436 - DNA, 20 bp, Artificial Sequence
  Synthetic oligonucleotide; GGG chr11 5233741 5233760 5233757 +
gttagagaaggaaaaatgaa

SEQ ID NO: 9437 - DNA, 20 bp, Artificial Sequence
  Synthetic oligonucleotide; GAG chr11 5233743 5233762 5233759 +
tagagaaggaaaaatgaagg

SEQ ID NO: 9438 - DNA, 20 bp, Artificial Sequence
  Synthetic oligonucleotide; AGG chr11 5233744 5233763 5233760 +
agagaaggaaaaatgaaggg

SEQ ID NO: 9439 - DNA, 20 bp, Artificial Sequence
  Synthetic oligonucleotide; GGG chr11 5233745 5233764 5233761 +
gagaaggaaaaatgaaggga

SEQ ID NO: 9440 - DNA, 20 bp, Artificial Sequence
  Synthetic oligonucleotide; GGG chr11 5233746 5233765 5233762 +
agaaggaaaaatgaagggag

SEQ ID NO: 9441 - DNA, 20 bp, Artificial Sequence
  Synthetic oligonucleotide; GGG chr11 5233747 5233766 5233763 +
gaaggaaaaatgaagggagg

SEQ ID NO: 9442 - DNA, 20 bp, Artificial Sequence
  Synthetic oligonucleotide; TGG chr11 5233751 5233770 5233767 +
gaaaaatgaagggagggggt

SEQ ID NO: 9443 - DNA, 20 bp, Artificial Sequence
  Synthetic oligonucleotide; GGG chr11 5233752 5233771 5233768 +
aaaaatgaagggagggggtt

SEQ ID NO: 9444 - DNA, 20 bp, Artificial Sequence
  Synthetic oligonucleotide; GAG chr11 5233754 5233773 5233770 +
aaatgaagggagggggttgg

SEQ ID NO: 9445 - DNA, 20 bp, Artificial Sequence
  Synthetic oligonucleotide; GAG chr11 5233756 5233775 5233772 +
atgaagggagggggttggga

SEQ ID NO: 9446 - DNA, 20 bp, Artificial Sequence
  Synthetic oligonucleotide; AAG chr11 5233760 5233779 5233776 +
agggagggggttgggagaga

SEQ ID NO: 9447 - DNA, 20 bp, Artificial Sequence
  Synthetic oligonucleotide; CAG chr11 5233764 5233783 5233780 +
agggggttgggagagaaaga

SEQ ID NO: 9448 - DNA, 20 bp, Artificial Sequence
  Synthetic oligonucleotide; AGG chr11 5233765 5233784 5233781 +
gggggttgggagagaaagac

SEQ ID NO: 9449 - DNA, 20 bp, Artificial Sequence
  Synthetic oligonucleotide; TAG chr11 5233786 5233805 5233802 +
ggatattaaataatttaaaa

SEQ ID NO: 9450 - DNA, 20 bp, Artificial Sequence
  Synthetic oligonucleotide; AAG chr11 5233790 5233809 5233806 +
attaaataatttaaaatagc

SEQ ID NO: 9451 - DNA, 20 bp, Artificial Sequence
  Synthetic oligonucleotide; GAG chr11 5233798 5233817 5233814 +
atttaaaatagcaagattgt

SEQ ID NO: 9452 - DNA, 20 bp, Artificial Sequence
  Synthetic oligonucleotide; AGG chr11 5233799 5233818 5233815 +
tttaaaatagcaagattgtg

SEQ ID NO: 9453 - DNA, 20 bp, Artificial Sequence
  Synthetic oligonucleotide; AAG chr11 5233802 5233821 5233818 +
aaaatagcaagattgtgagg

SEQ ID NO: 9454 - DNA, 20 bp, Artificial Sequence
  Synthetic oligonucleotide; AGG chr11 5233803 5233822 5233819 +
aaatagcaagattgtgagga

SEQ ID NO: 9455 - DNA, 20 bp, Artificial Sequence
  Synthetic oligonucleotide; CAG chr11 5233814 5233833 5233830 +
ttgtgaggaaggaaaaaatg

SEQ ID NO: 9456 - DNA, 20 bp, Artificial Sequence
  Synthetic oligonucleotide; TAG chr11 5233846 5233865 5233862 +
ataaaaaattaacaaaattt

SEQ ID NO: 9457 - DNA, 20 bp, Artificial Sequence
  Synthetic oligonucleotide; AAG chr11 5233849 5233868 5233865 +
aaaaattaacaaaattttag

SEQ ID NO: 9458 - DNA, 20 bp, Artificial Sequence
  Synthetic oligonucleotide; TAG chr11 5233869 5233888 5233885 +
aagcattaaatgataaaata

SEQ ID NO: 9459 - DNA, 20 bp, Artificial Sequence
  Synthetic oligonucleotide; TGG chr11 5233888 5233907 5233904 +
atagtaaaatgacaaaaatg

SEQ ID NO: 9460 - DNA, 20 bp, Artificial Sequence
  Synthetic oligonucleotide; GGG chr11 5233889 5233908 5233905 +
tagtaaaatgacaaaaatgt

SEQ ID NO: 9461 - DNA, 20 bp, Artificial Sequence
  Synthetic oligonucleotide; GAG chr11 5233891 5233910 5233907 +
gtaaaatgacaaaaatgtgg

SEQ ID NO: 9462 - DNA, 20 bp, Artificial Sequence
  Synthetic oligonucleotide; AAG chr11 5233894 5233913 5233910 +
aaatgacaaaaatgtgggag

SEQ ID NO: 9463 - DNA, 20 bp, Artificial Sequence
  Synthetic oligonucleotide; GAG chr11 5233896 5233915 5233912 +
atgacaaaaatgtgggagaa

SEQ ID NO: 9464 - DNA, 20 bp, Artificial Sequence
  Synthetic oligonucleotide; CAG chr11 5233899 5233918 5233915 +
acaaaaatgtgggagaagag

SEQ ID NO: 9465 - DNA, 20 bp, Artificial Sequence
  Synthetic oligonucleotide; AGG chr11 5233900 5233919 5233916 +
caaaaatgtgggagaagagc

SEQ ID NO: 9466 - DNA, 20 bp, Artificial Sequence
  Synthetic oligonucleotide; TAG chr11 5233903 5233922 5233919 +
aaatgtgggagaagagcagg

SEQ ID NO: 9467 - DNA, 20 bp, Artificial Sequence
  Synthetic oligonucleotide; AGG chr11 5233904 5233923 5233920 +
aatgtgggagaagagcaggt

SEQ ID NO: 9468 - DNA, 20 bp, Artificial Sequence
  Synthetic oligonucleotide; AAG chr11 5233910 5233929 5233926 +
ggagaagagcaggtaggtaa

SEQ ID NO: 9469 - DNA, 20 bp, Artificial Sequence
  Synthetic oligonucleotide; AAG chr11 5233924 5233943 5233940 +
aggtaaaagaaccaaaatgt

SEQ ID NO: 9470 - DNA, 20 bp, Artificial Sequence
  Synthetic oligonucleotide; TAG chr11 5233929 5233948 5233945 +
aaagaaccaaaatgtaagat

SEQ ID NO: 9471 - DNA, 20 bp, Artificial Sequence
  Synthetic oligonucleotide; AAG chr11 5233933 5233952 5233949 +
aaccaaaatgtaagattaga

SEQ ID NO: 9472 - DNA, 20 bp, Artificial Sequence
  Synthetic oligonucleotide; AAG chr11 5233940 5233959 5233956 +
atgtaagattagaaagtaaa

SEQ ID NO: 9473 - DNA, 20 bp, Artificial Sequence
  Synthetic oligonucleotide; GAG chr11 5233942 5233961 5233958 +
gtaagattagaaagtaaaaa

SEQ ID NO: 9474 - DNA, 20 bp, Artificial Sequence
  Synthetic oligonucleotide; AAG chr11 5233947 5233966 5233963 +
attagaaagtaaaaagagaa

SEQ ID NO: 9475 - DNA, 20 bp, Artificial Sequence
  Synthetic oligonucleotide; AAG chr11 5233952 5233971 5233968 +
aaagtaaaaagagaaaagtg

SEQ ID NO: 9476 - DNA, 20 bp, Artificial Sequence
  Synthetic oligonucleotide; TGG chr11 5233962 5233981 5233978 +
gagaaaagtgaagcatctcc

SEQ ID NO: 9477 - DNA, 20 bp, Artificial Sequence
  Synthetic oligonucleotide; AAG chr11 5233975 5233994 5233991 +
catctcctggactcaccctg

SEQ ID NO: 9478 - DNA, 20 bp, Artificial Sequence
  Synthetic oligonucleotide; CAG chr11 5233982 5234001 5233998 +
tggactcaccctgaagttct

SEQ ID NO: 9479 - DNA, 20 bp, Artificial Sequence
  Synthetic oligonucleotide; AGG chr11 5233983 5234002 5233999 +
ggactcaccctgaagttctc

SEQ ID NO: 9480 - DNA, 20 bp, Artificial Sequence
  Synthetic oligonucleotide; CAG chr11 5233995 5234014 5234011 +
aagttctcaggatccacgtg

SEQ ID NO: 9481 - DNA, 20 bp, Artificial Sequence
  Synthetic oligonucleotide; CAG chr11 5234005 5234024 5234021 +
gatccacgtgcagcttgtca

SEQ ID NO: 9482 - DNA, 20 bp, Artificial Sequence
  Synthetic oligonucleotide; CAG chr11 5234010 5234029 5234026 +
acgtgcagcttgtcacagtg

SEQ ID NO: 9483 - DNA, 20 bp, Artificial Sequence
  Synthetic oligonucleotide; CAG chr11 5234019 5234038 5234035 +
ttgtcacagtgcagctcact

SEQ ID NO: 9484 - DNA, 20 bp, Artificial Sequence
  Synthetic oligonucleotide; GAG chr11 5234024 5234043 5234040 +
acagtgcagctcactcagct

SEQ ID NO: 9485 - DNA, 20 bp, Artificial Sequence
  Synthetic oligonucleotide; AAG chr11 5234030 5234049 5234046 +
cagctcactcagctgagaaa

SEQ ID NO: 9486 - DNA, 20 bp, Artificial Sequence
  Synthetic oligonucleotide; GAG chr11 5234040 5234059 5234056 +
agctgagaaaaagtgccctt

SEQ ID NO: 9487 - DNA, 20 bp, Artificial Sequence
  Synthetic oligonucleotide; AGG chr11 5234041 5234060 5234057 +
gctgagaaaaagtgcccttg

SEQ ID NO: 9488 - DNA, 20 bp, Artificial Sequence
  Synthetic oligonucleotide; CAG chr11 5234049 5234068 5234065 +
aaagtgcccttgaggttgtc

SEQ ID NO: 9489 - DNA, 20 bp, Artificial Sequence
  Synthetic oligonucleotide; AGG chr11 5234050 5234069 5234066 +
aagtgcccttgaggttgtcc

SEQ ID NO: 9490 - DNA, 20 bp, Artificial Sequence
  Synthetic oligonucleotide; GAG chr11 5234054 5234073 5234070 +
gcccttgaggttgtccaggt

SEQ ID NO: 9491 - DNA, 20 bp, Artificial Sequence
  Synthetic oligonucleotide; CAG chr11 5234058 5234077 5234074 +
ttgaggttgtccaggtgagc

SEQ ID NO: 9492 - DNA, 20 bp, Artificial Sequence
  Synthetic oligonucleotide; AGG chr11 5234059 5234078 5234075 +
tgaggttgtccaggtgagcc

SEQ ID NO: 9493 - DNA, 20 bp, Artificial Sequence
  Synthetic oligonucleotide; AAG chr11 5234071 5234090 5234087 +
ggtgagccaggccatcacta

SEQ ID NO: 9494 - DNA, 20 bp, Artificial Sequence
  Synthetic oligonucleotide; AGG chr11 5234072 5234091 5234088 +
gtgagccaggccatcactaa

SEQ ID NO: 9495 - DNA, 20 bp, Artificial Sequence
  Synthetic oligonucleotide; TAG chr11 5234079 5234098 5234095 +
aggccatcactaaaggcacc

SEQ ID NO: 9496 - DNA, 20 bp, Artificial Sequence
  Synthetic oligonucleotide; GAG chr11 5234096 5234115 5234112 +
acctagcaccttcttgccat

SEQ ID NO: 9497 - DNA, 20 bp, Artificial Sequence
  Synthetic oligonucleotide; TAG chr11 5234108 5234127 5234124 +
cttgccatgagccttcacct

SEQ ID NO: 9498 - DNA, 20 bp, Artificial Sequence
  Synthetic oligonucleotide; AGG chr11 5234109 5234128 5234125 +
ttgccatgagccttcacctt

SEQ ID NO: 9499 - DNA, 20 bp, Artificial Sequence
  Synthetic oligonucleotide; GGG chr11 5234110 5234129 5234126 +
tgccatgagccttcacctta

SEQ ID NO: 9500 - DNA, 20 bp, Artificial Sequence
  Synthetic oligonucleotide; CAG chr11 5234123 5234142 5234139 +
caccttagggttgcccataa

SEQ ID NO: 9501 - DNA, 20 bp, Artificial Sequence
  Synthetic oligonucleotide; CAG chr11 5234129 5234148 5234145 +
agggttgcccataacagcat

SEQ ID NO: 9502 - DNA, 20 bp, Artificial Sequence
  Synthetic oligonucleotide; AGG chr11 5234130 5234149 5234146 +
gggttgcccataacagcatc

SEQ ID NO: 9503 - DNA, 20 bp, Artificial Sequence
  Synthetic oligonucleotide; GAG chr11 5234132 5234151 5234148 +
gttgcccataacagcatcag

SEQ ID NO: 9504 - DNA, 20 bp, Artificial Sequence
  Synthetic oligonucleotide; GAG chr11 5234134 5234153 5234150 +
tgcccataacagcatcagga

SEQ ID NO: 9505 - DNA, 20 bp, Artificial Sequence
  Synthetic oligonucleotide; AGG chr11 5234135 5234154 5234151 +
gcccataacagcatcaggag

SEQ ID NO: 9506 - DNA, 20 bp, Artificial Sequence
  Synthetic oligonucleotide; CAG chr11 5234139 5234158 5234155 +
ataacagcatcaggagagga

SEQ ID NO: 9507 - DNA, 20 bp, Artificial Sequence
  Synthetic oligonucleotide; AAG chr11 5234149 5234168 5234165 +
caggagaggacagatcccca

SEQ ID NO: 9508 - DNA, 20 bp, Artificial Sequence
  Synthetic oligonucleotide; AGG chr11 5234150 5234169 5234166 +
aggagaggacagatccccaa

SEQ ID NO: 9509 - DNA, 20 bp, Artificial Sequence
  Synthetic oligonucleotide; AAG chr11 5234158 5234177 5234174 +
acagatccccaaaggactca

SEQ ID NO: 9510 - DNA, 20 bp, Artificial Sequence
  Synthetic oligonucleotide; TGG chr11 5234167 5234186 5234183 +
caaaggactcaaagaacctc

SEQ ID NO: 9511 - DNA, 20 bp, Artificial Sequence
  Synthetic oligonucleotide; GGG chr11 5234168 5234187 5234184 +
aaaggactcaaagaacctct

SEQ ID NO: 9512 - DNA, 20 bp, Artificial Sequence
  Synthetic oligonucleotide; AAG chr11 5234174 5234193 5234190 +
ctcaaagaacctctgggtcc

SEQ ID NO: 9513 - DNA, 20 bp, Artificial Sequence
  Synthetic oligonucleotide; AGG chr11 5234175 5234194 5234191 +
tcaaagaacctctgggtcca

SEQ ID NO: 9514 - DNA, 20 bp, Artificial Sequence
  Synthetic oligonucleotide; GGG chr11 5234176 5234195 5234192 +
caaagaacctctgggtccaa

SEQ ID NO: 9515 - DNA, 20 bp, Artificial Sequence
  Synthetic oligonucleotide; TAG chr11 5234179 5234198 5234195 +
agaacctctgggtccaaggg

SEQ ID NO: 9516 - DNA, 20 bp, Artificial Sequence
  Synthetic oligonucleotide; CAG chr11 5234187 5234206 5234203 +
tgggtccaagggtagaccac

SEQ ID NO: 9517 - DNA, 20 bp, Artificial Sequence
  Synthetic oligonucleotide; GAG chr11 5234196 5234215 5234212 +
gggtagaccaccagtaatct

SEQ ID NO: 9518 - DNA, 20 bp, Artificial Sequence
  Synthetic oligonucleotide; AGG chr11 5234197 5234216 5234213 +
ggtagaccaccagtaatctg

SEQ ID NO: 9519 - DNA, 20 bp, Artificial Sequence
  Synthetic oligonucleotide; GGG chr11 5234198 5234217 5234214 +
gtagaccaccagtaatctga

SEQ ID NO: 9520 - DNA, 20 bp, Artificial Sequence
  Synthetic oligonucleotide; TAG chr11 5234201 5234220 5234217 +
gaccaccagtaatctgaggg

SEQ ID NO: 9521 - DNA, 20 bp, Artificial Sequence
  Synthetic oligonucleotide; AGG chr11 5234202 5234221 5234218 +
accaccagtaatctgagggt

SEQ ID NO: 9522 - DNA, 20 bp, Artificial Sequence
  Synthetic oligonucleotide; CAG chr11 5234209 5234228 5234225 +
gtaatctgagggtaggaaaa

SEQ ID NO: 9523 - DNA, 20 bp, Artificial Sequence
  Synthetic oligonucleotide; AAG chr11 5234215 5234234 5234231 +
tgagggtaggaaaacagccc

SEQ ID NO: 9524 - DNA, 20 bp, Artificial Sequence
  Synthetic oligonucleotide; AGG chr11 5234216 5234235 5234232 +
gagggtaggaaaacagccca

SEQ ID NO: 9525 - DNA, 20 bp, Artificial Sequence
  Synthetic oligonucleotide; GGG chr11 5234217 5234236 5234233 +
agggtaggaaaacagcccaa

SEQ ID NO: 9526 - DNA, 20 bp, Artificial Sequence
  Synthetic oligonucleotide; CAG chr11 5234221 5234240 5234237 +
taggaaaacagcccaaggga

SEQ ID NO: 9527 - DNA, 20 bp, Artificial Sequence
  Synthetic oligonucleotide; GAG chr11 5234223 5234242 5234239 +
ggaaaacagcccaagggaca

SEQ ID NO: 9528 - DNA, 20 bp, Artificial Sequence
  Synthetic oligonucleotide; GAG chr11 5234225 5234244 5234241 +
aaaacagcccaagggacaga

SEQ ID NO: 9529 - DNA, 20 bp, Artificial Sequence
  Synthetic oligonucleotide; CAG chr11 5234229 5234248 5234245 +
cagcccaagggacagagagt

SEQ ID NO: 9530 - DNA, 20 bp, Artificial Sequence
  Synthetic oligonucleotide; CAG chr11 5234239 5234258 5234255 +
gacagagagtcagtgcctat

SEQ ID NO: 9531 - DNA, 20 bp, Artificial Sequence
  Synthetic oligonucleotide; AAG chr11 5234248 5234267 5234264 +
tcagtgcctatcagaaaccc

SEQ ID NO: 9532 - DNA, 20 bp, Artificial Sequence
  Synthetic oligonucleotide; GAG chr11 5234250 5234269 5234266 +
agtgcctatcagaaacccaa

SEQ ID NO: 9533 - DNA, 20 bp, Artificial Sequence
  Synthetic oligonucleotide; CAG chr11 5234274 5234293 5234290 +
cttctctgtctacacatgcc

SEQ ID NO: 9534 - DNA, 20 bp, Artificial Sequence
  Synthetic oligonucleotide; GAG chr11 5234294 5234313 5234310 +
cagtttccatttgcctcctt

SEQ ID NO: 9535 - DNA, 20 bp, Artificial Sequence
  Synthetic oligonucleotide; CAG chr11 5234327 5234346 5234343 +
aaccttgataccaacctgcc

SEQ ID NO: 9536 - DNA, 20 bp, Artificial Sequence
  Synthetic oligonucleotide; AGG chr11 5234328 5234347 5234344 +
accttgataccaacctgccc

SEQ ID NO: 9537 - DNA, 20 bp, Artificial Sequence
  Synthetic oligonucleotide; GGG chr11 5234329 5234348 5234345 +
ccttgataccaacctgccca

SEQ ID NO: 9538 - DNA, 20 bp, Artificial Sequence
  Synthetic oligonucleotide; CAG chr11 5234369 5234388 5234385 +
tccacgttcactttgcccca

SEQ ID NO: 9539 - DNA, 20 bp, Artificial Sequence
  Synthetic oligonucleotide; AGG chr11 5234370 5234389 5234386 +
ccacgttcactttgccccac

SEQ ID NO: 9540 - DNA, 20 bp, Artificial Sequence
  Synthetic oligonucleotide; GGG chr11 5234371 5234390 5234387 +
cacgttcactttgccccaca

SEQ ID NO: 9541 - DNA, 20 bp, Artificial Sequence
  Synthetic oligonucleotide; CAG chr11 5234380 5234399 5234396 +
tttgccccacagggcattga

SEQ ID NO: 9542 - DNA, 20 bp, Artificial Sequence
  Synthetic oligonucleotide; CAG chr11 5234383 5234402 5234399 +
gccccacagggcattgacag

SEQ ID NO: 9543 - DNA, 20 bp, Artificial Sequence
  Synthetic oligonucleotide; CAG chr11 5234395 5234414 5234411 +
attgacagcagtcttctcct

SEQ ID NO: 9544 - DNA, 20 bp, Artificial Sequence
  Synthetic oligonucleotide; AGG chr11 5234396 5234415 5234412 +
ttgacagcagtcttctcctc

SEQ ID NO: 9545 - DNA, 20 bp, Artificial Sequence
  Synthetic oligonucleotide; GAG chr11 5234398 5234417 5234414 +
gacagcagtcttctcctcag

SEQ ID NO: 9546 - DNA, 20 bp, Artificial Sequence
  Synthetic oligonucleotide; CAG chr11 5234402 5234421 5234418 +
gcagtcttctcctcaggagt

SEQ ID NO: 9547 - DNA, 20 bp, Artificial Sequence
  Synthetic oligonucleotide; TGG chr11 5234413 5234432 5234429 +
ctcaggagtcagatgcacca

SEQ ID NO: 9548 - DNA, 20 bp, Artificial Sequence
  Synthetic oligonucleotide; GAG chr11 5234425 5234444 5234441 +
atgcaccatggtgtctgttt

SEQ ID NO: 9549 - DNA, 20 bp, Artificial Sequence
  Synthetic oligonucleotide; AGG chr11 5234426 5234445 5234442 +
tgcaccatggtgtctgtttg

SEQ ID NO: 9550 - DNA, 20 bp, Artificial Sequence
  Synthetic oligonucleotide; TAG chr11 5234433 5234452 5234449 +
tggtgtctgtttgaggttgc

SEQ ID NO: 9551 - DNA, 20 bp, Artificial Sequence
  Synthetic oligonucleotide; CAG chr11 5234451 5234470 5234467 +
gctagtgaacactgttatgt

SEQ ID NO: 9552 - DNA, 20 bp, Artificial Sequence
  Synthetic oligonucleotide; AAG chr11 5234454 5234473 5234470 +
agtgaacactgttatgtcag

SEQ ID NO: 9553 - DNA, 20 bp, Artificial Sequence
  Synthetic oligonucleotide; AAG chr11 5234458 5234477 5234474 +
aacactgttatgtcagaaga

SEQ ID NO: 9554 - DNA, 20 bp, Artificial Sequence
  Synthetic oligonucleotide; AAG chr11 5234464 5234483 5234480 +
gttatgtcagaagaaagtgt

SEQ ID NO: 9555 - DNA, 20 bp, Artificial Sequence
  Synthetic oligonucleotide; CAG chr11 5234470 5234489 5234486 +
tcagaagaaagtgtaagcaa

SEQ ID NO: 9556 - DNA, 20 bp, Artificial Sequence
  Synthetic oligonucleotide; TGG chr11 5234497 5234516 5234513 +
ctctgccctgccttttatgc

SEQ ID NO: 9557 - DNA, 20 bp, Artificial Sequence
  Synthetic oligonucleotide; CAG chr11 5234517 5234536 5234533 +
tggtcctgtcctccctgctc

SEQ ID NO: 9558 - DNA, 20 bp, Artificial Sequence
  Synthetic oligonucleotide; GAG chr11 5234521 5234540 5234537 +
cctgtcctccctgctccagt

SEQ ID NO: 9559 - DNA, 20 bp, Artificial Sequence
  Synthetic oligonucleotide; CAG chr11 5234524 5234543 5234540 +
gtcctccctgctccagtgag

SEQ ID NO: 9560 - DNA, 20 bp, Artificial Sequence
  Synthetic oligonucleotide; AGG chr11 5234525 5234544 5234541 +
tcctccctgctccagtgagc

SEQ ID NO: 9561 - DNA, 20 bp, Artificial Sequence
  Synthetic oligonucleotide; TGG chr11 5234529 5234548 5234545 +
ccctgctccagtgagcaggt

SEQ ID NO: 9562 - DNA, 20 bp, Artificial Sequence
  Synthetic oligonucleotide; AAG chr11 5234535 5234554 5234551 +
tccagtgagcaggttggttt

SEQ ID NO: 9563 - DNA, 20 bp, Artificial Sequence
  Synthetic oligonucleotide; AAG chr11 5234540 5234559 5234556 +
tgagcaggttggtttaagat

SEQ ID NO: 9564 - DNA, 20 bp, Artificial Sequence
  Synthetic oligonucleotide; CAG chr11 5234543 5234562 5234559 +
gcaggttggtttaagataag

SEQ ID NO: 9565 - DNA, 20 bp, Artificial Sequence
  Synthetic oligonucleotide; AGG chr11 5234544 5234563 5234560 +
caggttggtttaagataagc

SEQ ID NO: 9566 - DNA, 20 bp, Artificial Sequence
  Synthetic oligonucleotide; GGG chr11 5234545 5234564 5234561 +
aggttggtttaagataagca

SEQ ID NO: 9567 - DNA, 20 bp, Artificial Sequence
  Synthetic oligonucleotide; TAG chr11 5234554 5234573 5234570 +
taagataagcagggtttcat

SEQ ID NO: 9568 - DNA, 20 bp, Artificial Sequence
  Synthetic oligonucleotide; GAG chr11 5234562 5234581 5234578 +
gcagggtttcattagtttgt

SEQ ID NO: 9569 - DNA, 20 bp, Artificial Sequence
  Synthetic oligonucleotide; GAG chr11 5234609 5234628 5234625 +
ctattcccttaacttgccct

SEQ ID NO: 9570 - DNA, 20 bp, Artificial Sequence
  Synthetic oligonucleotide; TGG chr11 5234614 5234633 5234630 +
cccttaacttgccctgagat

SEQ ID NO: 9571 - DNA, 20 bp, Artificial Sequence
  Synthetic oligonucleotide; CAG chr11 5234642 5234661 5234658 +
ctgtcatgtgtgtcttgact

SEQ ID NO: 9572 - DNA, 20 bp, Artificial Sequence
  Synthetic oligonucleotide; CAG chr11 5234687 5234706 5234703 +
tctccccaccgcatctcttt

SEQ ID NO: 9573 - DNA, 20 bp, Artificial Sequence
  Synthetic oligonucleotide; CAG chr11 5234690 5234709 5234706 +
ccccaccgcatctctttcag

SEQ ID NO: 9574 - DNA, 20 bp, Artificial Sequence
  Synthetic oligonucleotide; TAG chr11 5234714 5234733 5234730 +
tgtttctaaaaatatcctcc

SEQ ID NO: 9575 - DNA, 20 bp, Artificial Sequence
  Synthetic oligonucleotide; CAG chr11 5234728 5234747 5234744 +
tcctcctagtttcatttttg

SEQ ID NO: 9576 - DNA, 20 bp, Artificial Sequence
  Synthetic oligonucleotide; AAG chr11 5234731 5234750 5234747 +
tcctagtttcatttttgcag

SEQ ID NO: 9577 - DNA, 20 bp, Artificial Sequence
  Synthetic oligonucleotide; TAG chr11 5234739 5234758 5234755 +
tcatttttgcagaagtgttt

SEQ ID NO: 9578 - DNA, 20 bp, Artificial Sequence
  Synthetic oligonucleotide; AGG chr11 5234740 5234759 5234756 +
catttttgcagaagtgtttt

SEQ ID NO: 9579 - DNA, 20 bp, Artificial Sequence
  Synthetic oligonucleotide; TAG chr11 5234749 5234768 5234765 +
agaagtgttttaggctaata

SEQ ID NO: 9580 - DNA, 20 bp, Artificial Sequence
  Synthetic oligonucleotide; TGG chr11 5234752 5234771 5234768 +
agtgttttaggctaatatag

SEQ ID NO: 9581 - DNA, 20 bp, Artificial Sequence
  Synthetic oligonucleotide; TAG chr11 5234764 5234783 5234780 +
taatatagtggaatgtatct

SEQ ID NO: 9582 - DNA, 20 bp, Artificial Sequence
  Synthetic oligonucleotide; GAG chr11 5234766 5234785 5234782 +
atatagtggaatgtatctta

SEQ ID NO: 9583 - DNA, 20 bp, Artificial Sequence
  Synthetic oligonucleotide; AAG chr11 5234800 5234819 5234816 +
tgtttctgtcactttatact

SEQ ID NO: 9584 - DNA, 20 bp, Artificial Sequence
  Synthetic oligonucleotide; AAG chr11 5234816 5234835 5234832 +
tactaagaaaacttatctaa

SEQ ID NO: 9585 - DNA, 20 bp, Artificial Sequence
  Synthetic oligonucleotide; CAG chr11 5234819 5234838 5234835 +
taagaaaacttatctaaaag

SEQ ID NO: 9586 - DNA, 20 bp, Artificial Sequence
  Synthetic oligonucleotide; AAG chr11 5234832 5234851 5234848 +
ctaaaagcagatgttttaac

SEQ ID NO: 9587 - DNA, 20 bp, Artificial Sequence
  Synthetic oligonucleotide; AAG chr11 5234848 5234867 5234864 +
taacaagttgactcaatata

SEQ ID NO: 9588 - DNA, 20 bp, Artificial Sequence
  Synthetic oligonucleotide; TAG chr11 5234865 5234884 5234881 +
ataaagttcttctttgcctc

SEQ ID NO: 9589 - DNA, 20 bp, Artificial Sequence
  Synthetic oligonucleotide; GAG chr11 5234867 5234886 5234883 +
aaagttcttctttgcctcta

SEQ ID NO: 9590 - DNA, 20 bp, Artificial Sequence
  Synthetic oligonucleotide; AAG chr11 5234882 5234901 5234898 +
ctctagagatttttgtctcc

SEQ ID NO: 9591 - DNA, 20 bp, Artificial Sequence
  Synthetic oligonucleotide; AGG chr11 5234883 5234902 5234899 +
tctagagatttttgtctcca

SEQ ID NO: 9592 - DNA, 20 bp, Artificial Sequence
  Synthetic oligonucleotide; GGG chr11 5234884 5234903 5234900 +
ctagagatttttgtctccaa

SEQ ID NO: 9593 - DNA, 20 bp, Artificial Sequence
  Synthetic oligonucleotide; GAG chr11 5234893 5234912 5234909 +
tttgtctccaagggaatttt

SEQ ID NO: 9594 - DNA, 20 bp, Artificial Sequence
  Synthetic oligonucleotide; GAG chr11 5234895 5234914 5234911 +
tgtctccaagggaattttga

SEQ ID NO: 9595 - DNA, 20 bp, Artificial Sequence
  Synthetic oligonucleotide; AGG chr11 5234896 5234915 5234912 +
gtctccaagggaattttgag

SEQ ID NO: 9596 - DNA, 20 bp, Artificial Sequence
  Synthetic oligonucleotide; TGG chr11 5234900 5234919 5234916 +
ccaagggaattttgagaggt

SEQ ID NO: 9597 - DNA, 20 bp, Artificial Sequence
  Synthetic oligonucleotide; TGG chr11 5234905 5234924 5234921 +
ggaattttgagaggttggaa

SEQ ID NO: 9598 - DNA, 20 bp, Artificial Sequence
  Synthetic oligonucleotide; CAG chr11 5234923 5234942 5234939 +
aatggacaaatctattgctg

SEQ ID NO: 9599 - DNA, 20 bp, Artificial Sequence
  Synthetic oligonucleotide; TGG chr11 5234954 5234973 5234970 +
tgcttgcttcctccttcttt

SEQ ID NO: 9600 - DNA, 20 bp, Artificial Sequence
  Synthetic oligonucleotide; AAG chr11 5235016 5235035 5235032 +
ttgaaataaatatccattaa

SEQ ID NO: 9601 - DNA, 20 bp, Artificial Sequence
  Synthetic oligonucleotide; TAG chr11 5235036 5235055 5235052 +
aagaatatttaaaaaatgaa

SEQ ID NO: 9602 - DNA, 20 bp, Artificial Sequence
  Synthetic oligonucleotide; CAG chr11 5235050 5235069 5235066 +
aatgaatagtgtttatttac

SEQ ID NO: 9603 - DNA, 20 bp, Artificial Sequence
  Synthetic oligonucleotide; TAG chr11 5235062 5235081 5235078 +
ttatttaccagttattgaaa

SEQ ID NO: 9604 - DNA, 20 bp, Artificial Sequence
  Synthetic oligonucleotide; AGG chr11 5235063 5235082 5235079 +
tatttaccagttattgaaat

SEQ ID NO: 9605 - DNA, 20 bp, Artificial Sequence
  Synthetic oligonucleotide; TGG chr11 5235069 5235088 5235085 +
ccagttattgaaataggttc

SEQ ID NO: 9606 - DNA, 20 bp, Artificial Sequence
  Synthetic oligonucleotide; AAG chr11 5235085 5235104 5235101 +
gttctggaaacatgaatttt

SEQ ID NO: 9607 - DNA, 20 bp, Artificial Sequence
  Synthetic oligonucleotide; AGG chr11 5235086 5235105 5235102 +
ttctggaaacatgaatttta

SEQ ID NO: 9608 - DNA, 20 bp, Artificial Sequence
  Synthetic oligonucleotide; CAG chr11 5235104 5235123 5235120 +
taaggttaacattttaatga

SEQ ID NO: 9609 - DNA, 20 bp, Artificial Sequence
  Synthetic oligonucleotide; TGG chr11 5235152 5235171 5235168 +
attttgaatgtttaaaatta

SEQ ID NO: 9610 - DNA, 20 bp, Artificial Sequence
  Synthetic oligonucleotide; AAG chr11 5235163 5235182 5235179 +
ttaaaattatggtatgacta

SEQ ID NO: 9611 - DNA, 20 bp, Artificial Sequence
  Synthetic oligonucleotide; AAG chr11 5235167 5235186 5235183 +
aattatggtatgactaaaga

SEQ ID NO: 9612 - DNA, 20 bp, Artificial Sequence
  Synthetic oligonucleotide; AAG chr11 5235176 5235195 5235192 +
atgactaaagaaagaatgca

SEQ ID NO: 9613 - DNA, 20 bp, Artificial Sequence
  Synthetic oligonucleotide; AAG chr11 5235183 5235202 5235199 +
aagaaagaatgcaaagtgaa

SEQ ID NO: 9614 - DNA, 20 bp, Artificial Sequence
  Synthetic oligonucleotide; TAG chr11 5235186 5235205 5235202 +
aaagaatgcaaagtgaaaag

SEQ ID NO: 9615 - DNA, 20 bp, Artificial Sequence
  Synthetic oligonucleotide; CAG chr11 5235201 5235220 5235217 +
aaaagtagatttaccatatt

SEQ ID NO: 9616 - DNA, 20 bp, Artificial Sequence
  Synthetic oligonucleotide; CAG chr11 5235205 5235224 5235221 +
gtagatttaccatattcagc

SEQ ID NO: 9617 - DNA, 20 bp, Artificial Sequence
  Synthetic oligonucleotide; AAG chr11 5235221 5235240 5235237 +
cagccagattaaatttaacg

SEQ ID NO: 9618 - DNA, 20 bp, Artificial Sequence
  Synthetic oligonucleotide; TGG chr11 5235228 5235247 5235244 +
attaaatttaacgaagttcc

SEQ ID NO: 9619 - DNA, 20 bp, Artificial Sequence
  Synthetic oligonucleotide; GGG chr11 5235229 5235248 5235245 +
ttaaatttaacgaagttcct

SEQ ID NO: 9620 - DNA, 20 bp, Artificial Sequence
  Synthetic oligonucleotide; TAG chr11 5235239 5235258 5235255 +
cgaagttcctgggaatatgc

SEQ ID NO: 9621 - DNA, 20 bp, Artificial Sequence
  Synthetic oligonucleotide; CAG chr11 5235244 5235263 5235260 +
ttcctgggaatatgctagta

SEQ ID NO: 9622 - DNA, 20 bp, Artificial Sequence
  Synthetic oligonucleotide; CAG chr11 5235257 5235276 5235273 +
gctagtacagaacattttta

SEQ ID NO: 9623 - DNA, 20 bp, Artificial Sequence
  Synthetic oligonucleotide; TGG chr11 5235281 5235300 5235297 +
tgtgttcttaaaaaaaaatg

SEQ ID NO: 9624 - DNA, 20 bp, Artificial Sequence
  Synthetic oligonucleotide; TAG chr11 5235287 5235306 5235303 +
cttaaaaaaaaatgtggaat

SEQ ID NO: 9625 - DNA, 20 bp, Artificial Sequence
  Synthetic oligonucleotide; CAG chr11 5235293 5235312 5235309 +
aaaaaatgtggaattagacc

SEQ ID NO: 9626 - DNA, 20 bp, Artificial Sequence
  Synthetic oligonucleotide; AGG chr11 5235294 5235313 5235310 +
aaaaatgtggaattagaccc

SEQ ID NO: 9627 - DNA, 20 bp, Artificial Sequence
  Synthetic oligonucleotide; AAG chr11 5235301 5235320 5235317 +
tggaattagacccaggaatg

SEQ ID NO: 9628 - DNA, 20 bp, Artificial Sequence
  Synthetic oligonucleotide; CAG chr11 5235308 5235327 5235324 +
agacccaggaatgaagatcc

SEQ ID NO: 9629 - DNA, 20 bp, Artificial Sequence
  Synthetic oligonucleotide; TAG chr11 5235311 5235330 5235327 +
cccaggaatgaagatcccag

SEQ ID NO: 9630 - DNA, 20 bp, Artificial Sequence
  Synthetic oligonucleotide; TGG chr11 5235350 5235369 5235366 +
gaattcaaataatgccacaa

SEQ ID NO: 9631 - DNA, 20 bp, Artificial Sequence
  Synthetic oligonucleotide; CAG chr11 5235353 5235372 5235369 +
ttcaaataatgccacaatgg

SEQ ID NO: 9632 - DNA, 20 bp, Artificial Sequence
  Synthetic oligonucleotide; GAG chr11 5235372 5235391 5235388 +
gcagacaaatacacacccat

SEQ ID NO: 9633 - DNA, 20 bp, Artificial Sequence
  Synthetic oligonucleotide; AAG chr11 5235384 5235403 5235400 +
acacccatgagcatatccaa

SEQ ID NO: 9634 - DNA, 20 bp, Artificial Sequence
  Synthetic oligonucleotide; AGG chr11 5235385 5235404 5235401 +
cacccatgagcatatccaaa

SEQ ID NO: 9635 - DNA, 20 bp, Artificial Sequence
  Synthetic oligonucleotide; AAG chr11 5235388 5235407 5235404 +
ccatgagcatatccaaaagg

SEQ ID NO: 9636 - DNA, 20 bp, Artificial Sequence
  Synthetic oligonucleotide; AGG chr11 5235389 5235408 5235405 +
catgagcatatccaaaagga

SEQ ID NO: 9637 - DNA, 20 bp, Artificial Sequence
  Synthetic oligonucleotide; AAG chr11 5235396 5235415 5235412 +
atatccaaaaggaaggattg

SEQ ID NO: 9638 - DNA, 20 bp, Artificial Sequence
  Synthetic oligonucleotide; AGG chr11 5235397 5235416 5235413 +
tatccaaaaggaaggattga

SEQ ID NO: 9639 - DNA, 20 bp, Artificial Sequence
  Synthetic oligonucleotide; AAG chr11 5235401 5235420 5235417 +
caaaaggaaggattgaagga

SEQ ID NO: 9640 - DNA, 20 bp, Artificial Sequence
  Synthetic oligonucleotide; GAG chr11 5235403 5235422 5235419 +
aaaggaaggattgaaggaaa

SEQ ID NO: 9641 - DNA, 20 bp, Artificial Sequence
  Synthetic oligonucleotide; AGG chr11 5235404 5235423 5235420 +
aaggaaggattgaaggaaag

SEQ ID NO: 9642 - DNA, 20 bp, Artificial Sequence
  Synthetic oligonucleotide; GAG chr11 5235406 5235425 5235422 +
ggaaggattgaaggaaagag

SEQ ID NO: 9643 - DNA, 20 bp, Artificial Sequence
  Synthetic oligonucleotide; AGG chr11 5235407 5235426 5235423 +
gaaggattgaaggaaagagg

SEQ ID NO: 9644 - DNA, 20 bp, Artificial Sequence
  Synthetic oligonucleotide; AAG chr11 5235410 5235429 5235426 +
ggattgaaggaaagaggagg

SEQ ID NO: 9645 - DNA, 20 bp, Artificial Sequence
  Synthetic oligonucleotide; TGG chr11 5235416 5235435 5235432 +
aaggaaagaggaggaagaaa

SEQ ID NO: 9646 - DNA, 20 bp, Artificial Sequence
  Synthetic oligonucleotide; GAG chr11 5235418 5235437 5235434 +
ggaaagaggaggaagaaatg

SEQ ID NO: 9647 - DNA, 20 bp, Artificial Sequence
  Synthetic oligonucleotide; AAG chr11 5235422 5235441 5235438 +
agaggaggaagaaatggaga

SEQ ID NO: 9648 - DNA, 20 bp, Artificial Sequence
  Synthetic oligonucleotide; AGG chr11 5235423 5235442 5235439 +
gaggaggaagaaatggagaa

SEQ ID NO: 9649 - DNA, 20 bp, Artificial Sequence
  Synthetic oligonucleotide; AAG chr11 5235426 5235445 5235442 +
gaggaagaaatggagaaagg

SEQ ID NO: 9650 - DNA, 20 bp, Artificial Sequence
  Synthetic oligonucleotide; AGG chr11 5235427 5235446 5235443 +
aggaagaaatggagaaagga

SEQ ID NO: 9651 - DNA, 20 bp, Artificial Sequence
  Synthetic oligonucleotide; AAG chr11 5235430 5235449 5235446 +
aagaaatggagaaaggaagg

SEQ ID NO: 9652 - DNA, 20 bp, Artificial Sequence
  Synthetic oligonucleotide; AGG chr11 5235431 5235450 5235447 +
agaaatggagaaaggaagga

SEQ ID NO: 9653 - DNA, 20 bp, Artificial Sequence
  Synthetic oligonucleotide; AAG chr11 5235434 5235453 5235450 +
aatggagaaaggaaggaagg

SEQ ID NO: 9654 - DNA, 20 bp, Artificial Sequence
  Synthetic oligonucleotide; GAG chr11 5235436 5235455 5235452 +
tggagaaaggaaggaaggaa

SEQ ID NO: 9655 - DNA, 20 bp, Artificial Sequence
  Synthetic oligonucleotide; AGG chr11 5235437 5235456 5235453 +
ggagaaaggaaggaaggaag

SEQ ID NO: 9656 - DNA, 20 bp, Artificial Sequence
  Synthetic oligonucleotide; GGG chr11 5235438 5235457 5235454 +
gagaaaggaaggaaggaaga

SEQ ID NO: 9657 - DNA, 20 bp, Artificial Sequence
  Synthetic oligonucleotide; GGG chr11 5235439 5235458 5235455 +
agaaaggaaggaaggaagag

SEQ ID NO: 9658 - DNA, 20 bp, Artificial Sequence
  Synthetic oligonucleotide; AAG chr11 5235442 5235461 5235458 +
aaggaaggaaggaagagggg

SEQ ID NO: 9659 - DNA, 20 bp, Artificial Sequence
  Synthetic oligonucleotide; GAG chr11 5235444 5235463 5235460 +
ggaaggaaggaagaggggaa

SEQ ID NO: 9660 - DNA, 20 bp, Artificial Sequence
  Synthetic oligonucleotide; GAG chr11 5235446 5235465 5235462 +
aaggaaggaagaggggaaga

SEQ ID NO: 9661 - DNA, 20 bp, Artificial Sequence
  Synthetic oligonucleotide; GAG chr11 5235448 5235467 5235464 +
ggaaggaagaggggaagaga

SEQ ID NO: 9662 - DNA, 20 bp, Artificial Sequence
  Synthetic oligonucleotide; AGG chr11 5235449 5235468 5235465 +
gaaggaagaggggaagagag

SEQ ID NO: 9663 - DNA, 20 bp, Artificial Sequence
  Synthetic oligonucleotide; TGG chr11 5235453 5235472 5235469 +
gaagaggggaagagagagga

SEQ ID NO: 9664 - DNA, 20 bp, Artificial Sequence
  Synthetic oligonucleotide; AAG chr11 5235456 5235475 5235472 +
gaggggaagagagaggatgg

SEQ ID NO: 9665 - DNA, 20 bp, Artificial Sequence
  Synthetic oligonucleotide; AGG chr11 5235457 5235476 5235473 +
aggggaagagagaggatgga

SEQ ID NO: 9666 - DNA, 20 bp, Artificial Sequence
  Synthetic oligonucleotide; GGG chr11 5235458 5235477 5235474 +
ggggaagagagaggatggaa

SEQ ID NO: 9667 - DNA, 20 bp, Artificial Sequence
  Synthetic oligonucleotide; TGG chr11 5235462 5235481 5235478 +
aagagagaggatggaaggga

SEQ ID NO: 9668 - DNA, 20 bp, Artificial Sequence
  Synthetic oligonucleotide; GAG chr11 5235464 5235483 5235480 +
gagagaggatggaagggatg

SEQ ID NO: 9669 - DNA, 20 bp, Artificial Sequence
  Synthetic oligonucleotide; AGG chr11 5235465 5235484 5235481 +
agagaggatggaagggatgg

SEQ ID NO: 9670 - DNA, 20 bp, Artificial Sequence
  Synthetic oligonucleotide; GAG chr11 5235467 5235486 5235483 +
agaggatggaagggatggag

SEQ ID NO: 9671 - DNA, 20 bp, Artificial Sequence
  Synthetic oligonucleotide; AAG chr11 5235470 5235489 5235486 +
ggatggaagggatggaggag

SEQ ID NO: 9672 - DNA, 20 bp, Artificial Sequence
  Synthetic oligonucleotide; AAG chr11 5235473 5235492 5235489 +
tggaagggatggaggagaag

SEQ ID NO: 9673 - DNA, 20 bp, Artificial Sequence
  Synthetic oligonucleotide; AGG chr11 5235474 5235493 5235490 +
ggaagggatggaggagaaga

SEQ ID NO: 9674 - DNA, 20 bp, Artificial Sequence
  Synthetic oligonucleotide; TGG chr11 5235489 5235508 5235505 +
gaagaaggaaaaataaataa

SEQ ID NO: 9675 - DNA, 20 bp, Artificial Sequence
  Synthetic oligonucleotide; GAG chr11 5235491 5235510 5235507 +
agaaggaaaaataaataatg

SEQ ID NO: 9676 - DNA, 20 bp, Artificial Sequence
  Synthetic oligonucleotide; GAG chr11 5235493 5235512 5235509 +
aaggaaaaataaataatgga

SEQ ID NO: 9677 - DNA, 20 bp, Artificial Sequence
  Synthetic oligonucleotide; AGG chr11 5235494 5235513 5235510 +
aggaaaaataaataatggag

SEQ ID NO: 9678 - DNA, 20 bp, Artificial Sequence
  Synthetic oligonucleotide; GAG chr11 5235496 5235515 5235512 +
gaaaaataaataatggagag

SEQ ID NO: 9679 - DNA, 20 bp, Artificial Sequence
  Synthetic oligonucleotide; GAG chr11 5235498 5235517 5235514 +
aaaataaataatggagagga

SEQ ID NO: 9680 - DNA, 20 bp, Artificial Sequence
  Synthetic oligonucleotide; AGG chr11 5235499 5235518 5235515 +
aaataaataatggagaggag

SEQ ID NO: 9681 - DNA, 20 bp, Artificial Sequence
  Synthetic oligonucleotide; GAG chr11 5235501 5235520 5235517 +
ataaataatggagaggagag

SEQ ID NO: 9682 - DNA, 20 bp, Artificial Sequence
  Synthetic oligonucleotide; AAG chr11 5235508 5235527 5235524 +
atggagaggagaggagaaaa

SEQ ID NO: 9683 - DNA, 20 bp, Artificial Sequence
  Synthetic oligonucleotide; AGG chr11 5235509 5235528 5235525 +
tggagaggagaggagaaaaa

SEQ ID NO: 9684 - DNA, 20 bp, Artificial Sequence
  Synthetic oligonucleotide; GAG chr11 5235511 5235530 5235527 +
gagaggagaggagaaaaaag

SEQ ID NO: 9685 - DNA, 20 bp, Artificial Sequence
  Synthetic oligonucleotide; AGG chr11 5235512 5235531 5235528 +
agaggagaggagaaaaaagg

SEQ ID NO: 9686 - DNA, 20 bp, Artificial Sequence
  Synthetic oligonucleotide; GGG chr11 5235513 5235532 5235529 +
gaggagaggagaaaaaagga

SEQ ID NO: 9687 - DNA, 20 bp, Artificial Sequence
  Synthetic oligonucleotide; GGG chr11 5235514 5235533 5235530 +
aggagaggagaaaaaaggag

SEQ ID NO: 9688 - DNA, 20 bp, Artificial Sequence
  Synthetic oligonucleotide; GAG chr11 5235516 5235535 5235532 +
gagaggagaaaaaaggaggg

SEQ ID NO: 9689 - DNA, 20 bp, Artificial Sequence
  Synthetic oligonucleotide; GAG chr11 5235518 5235537 5235534 +
gaggagaaaaaaggagggga

SEQ ID NO: 9690 - DNA, 20 bp, Artificial Sequence
  Synthetic oligonucleotide; AGG chr11 5235519 5235538 5235535 +
aggagaaaaaaggaggggag

SEQ ID NO: 9691 - DNA, 20 bp, Artificial Sequence
  Synthetic oligonucleotide; GAG chr11 5235521 5235540 5235537 +
gagaaaaaaggaggggagag

SEQ ID NO: 9692 - DNA, 20 bp, Artificial Sequence
  Synthetic oligonucleotide; GAG chr11 5235523 5235542 5235539 +
gaaaaaaggaggggagagga

SEQ ID NO: 9693 - DNA, 20 bp, Artificial Sequence
  Synthetic oligonucleotide; AGG chr11 5235524 5235543 5235540 +
aaaaaaggaggggagaggag

SEQ ID NO: 9694 - DNA, 20 bp, Artificial Sequence
  Synthetic oligonucleotide; GAG chr11 5235526 5235545 5235542 +
aaaaggaggggagaggagag

SEQ ID NO: 9695 - DNA, 20 bp, Artificial Sequence
  Synthetic oligonucleotide; AAG chr11 5235529 5235548 5235545 +
aggaggggagaggagaggag

SEQ ID NO: 9696 - DNA, 20 bp, Artificial Sequence
  Synthetic oligonucleotide; AGG chr11 5235530 5235549 5235546 +
ggaggggagaggagaggaga

SEQ ID NO: 9697 - DNA, 20 bp, Artificial Sequence
  Synthetic oligonucleotide; GGG chr11 5235531 5235550 5235547 +
gaggggagaggagaggagaa

SEQ ID NO: 9698 - DNA, 20 bp, Artificial Sequence
  Synthetic oligonucleotide; TAG chr11 5235535 5235554 5235551 +
ggagaggagaggagaaggga

SEQ ID NO: 9699 - DNA, 20 bp, Artificial Sequence
  Synthetic oligonucleotide; AGG chr11 5235536 5235555 5235552 +
gagaggagaggagaagggat

SEQ ID NO: 9700 - DNA, 20 bp, Artificial Sequence
  Synthetic oligonucleotide; GGG chr11 5235537 5235556 5235553 +
agaggagaggagaagggata

SEQ ID NO: 9701 - DNA, 20 bp, Artificial Sequence
  Synthetic oligonucleotide; AAG chr11 5235540 5235559 5235556 +
ggagaggagaagggataggg

SEQ ID NO: 9702 - DNA, 20 bp, Artificial Sequence
  Synthetic oligonucleotide; GAG chr11 5235542 5235561 5235558 +
agaggagaagggatagggaa

SEQ ID NO: 9703 - DNA, 20 bp, Artificial Sequence
  Synthetic oligonucleotide; AAG chr11 5235546 5235565 5235562 +
gagaagggatagggaagaga

SEQ ID NO: 9704 - DNA, 20 bp, Artificial Sequence
  Synthetic oligonucleotide; GAG chr11 5235548 5235567 5235564 +
gaagggatagggaagagaaa

SEQ ID NO: 9705 - DNA, 20 bp, Artificial Sequence
  Synthetic oligonucleotide; AAG chr11 5235552 5235571 5235568 +
ggatagggaagagaaagaga

SEQ ID NO: 9706 - DNA, 20 bp, Artificial Sequence
  Synthetic oligonucleotide; AGG chr11 5235553 5235572 5235569 +
gatagggaagagaaagagaa

SEQ ID NO: 9707 - DNA, 20 bp, Artificial Sequence
  Synthetic oligonucleotide; GGG chr11 5235554 5235573 5235570 +
atagggaagagaaagagaaa

SEQ ID NO: 9708 - DNA, 20 bp, Artificial Sequence
  Synthetic oligonucleotide; AAG chr11 5235557 5235576 5235573 +
gggaagagaaagagaaaggg

SEQ ID NO: 9709 - DNA, 20 bp, Artificial Sequence
  Synthetic oligonucleotide; AGG chr11 5235558 5235577 5235574 +
ggaagagaaagagaaaggga

SEQ ID NO: 9710 - DNA, 20 bp, Artificial Sequence
  Synthetic oligonucleotide; GGG chr11 5235559 5235578 5235575 +
gaagagaaagagaaagggaa

SEQ ID NO: 9711 - DNA, 20 bp, Artificial Sequence
  Synthetic oligonucleotide; AAG chr11 5235562 5235581 5235578 +
gagaaagagaaagggaaggg

SEQ ID NO: 9712 - DNA, 20 bp, Artificial Sequence
  Synthetic oligonucleotide; GAG chr11 5235564 5235583 5235580 +
gaaagagaaagggaagggaa

SEQ ID NO: 9713 - DNA, 20 bp, Artificial Sequence
  Synthetic oligonucleotide; GAG chr11 5235566 5235585 5235582 +
aagagaaagggaagggaaga

SEQ ID NO: 9714 - DNA, 20 bp, Artificial Sequence
  Synthetic oligonucleotide; AGG chr11 5235567 5235586 5235583 +
agagaaagggaagggaagag

SEQ ID NO: 9715 - DNA, 20 bp, Artificial Sequence
  Synthetic oligonucleotide; AAG chr11 5235571 5235590 5235587 +
aaagggaagggaagagagga

SEQ ID NO: 9716 - DNA, 20 bp, Artificial Sequence
  Synthetic oligonucleotide; AAG chr11 5235574 5235593 5235590 +
gggaagggaagagaggaaag

SEQ ID NO: 9717 - DNA, 20 bp, Artificial Sequence
  Synthetic oligonucleotide; GAG chr11 5235576 5235595 5235592 +
gaagggaagagaggaaagaa

SEQ ID NO: 9718 - DNA, 20 bp, Artificial Sequence
  Synthetic oligonucleotide; AAG chr11 5235579 5235598 5235595 +
gggaagagaggaaagaagag

SEQ ID NO: 9719 - DNA, 20 bp, Artificial Sequence
  Synthetic oligonucleotide; GAG chr11 5235581 5235600 5235597 +
gaagagaggaaagaagagaa

SEQ ID NO: 9720 - DNA, 20 bp, Artificial Sequence
  Synthetic oligonucleotide; AGG chr11 5235582 5235601 5235598 +
aagagaggaaagaagagaag

SEQ ID NO: 9721 - DNA, 20 bp, Artificial Sequence
  Synthetic oligonucleotide; GAG chr11 5235584 5235603 5235600 +
gagaggaaagaagagaagag

SEQ ID NO: 9722 - DNA, 20 bp, Artificial Sequence
  Synthetic oligonucleotide; GAG chr11 5235586 5235605 5235602 +
gaggaaagaagagaagagga

SEQ ID NO: 9723 - DNA, 20 bp, Artificial Sequence
  Synthetic oligonucleotide; AAG chr11 5235591 5235610 5235607 +
aagaagagaagaggagagaa

SEQ ID NO: 9724 - DNA, 20 bp, Artificial Sequence
  Synthetic oligonucleotide; AAG chr11 5235599 5235618 5235615 +
aagaggagagaaaagaaacg

SEQ ID NO: 9725 - DNA, 20 bp, Artificial Sequence
  Synthetic oligonucleotide; GAG chr11 5235601 5235620 5235617 +
gaggagagaaaagaaacgaa

SEQ ID NO: 9726 - DNA, 20 bp, Artificial Sequence
  Synthetic oligonucleotide; GAG chr11 5235603 5235622 5235619 +
ggagagaaaagaaacgaaga

SEQ ID NO: 9727 - DNA, 20 bp, Artificial Sequence
  Synthetic oligonucleotide; AGG chr11 5235604 5235623 5235620 +
gagagaaaagaaacgaagag

SEQ ID NO: 9728 - DNA, 20 bp, Artificial Sequence
  Synthetic oligonucleotide; GGG chr11 5235605 5235624 5235621 +
agagaaaagaaacgaagaga

SEQ ID NO: 9729 - DNA, 20 bp, Artificial Sequence
  Synthetic oligonucleotide; GGG chr11 5235606 5235625 5235622 +
gagaaaagaaacgaagagag

SEQ ID NO: 9730 - DNA, 20 bp, Artificial Sequence
  Synthetic oligonucleotide; AAG chr11 5235609 5235628 5235625 +
aaaagaaacgaagagagggg

SEQ ID NO: 9731 - DNA, 20 bp, Artificial Sequence
  Synthetic oligonucleotide; AGG chr11 5235610 5235629 5235626 +
aaagaaacgaagagagggga

SEQ ID NO: 9732 - DNA, 20 bp, Artificial Sequence
  Synthetic oligonucleotide; GGG chr11 5235611 5235630 5235627 +
aagaaacgaagagaggggaa

SEQ ID NO: 9733 - DNA, 20 bp, Artificial Sequence
  Synthetic oligonucleotide; AAG chr11 5235614 5235633 5235630 +
aaacgaagagaggggaaggg

SEQ ID NO: 9734 - DNA, 20 bp, Artificial Sequence
  Synthetic oligonucleotide; AGG chr11 5235615 5235634 5235631 +
aacgaagagaggggaaggga

SEQ ID NO: 9735 - DNA, 20 bp, Artificial Sequence
  Synthetic oligonucleotide; AAG chr11 5235624 5235643 5235640 +
aggggaagggaaggaaaaaa

SEQ ID NO: 9736 - DNA, 20 bp, Artificial Sequence
  Synthetic oligonucleotide; GAG chr11 5235626 5235645 5235642 +
gggaagggaaggaaaaaaaa

SEQ ID NO: 9737 - DNA, 20 bp, Artificial Sequence
  Synthetic oligonucleotide; AGG chr11 5235627 5235646 5235643 +
ggaagggaaggaaaaaaaag

SEQ ID NO: 9738 - DNA, 20 bp, Artificial Sequence
  Synthetic oligonucleotide; AAG chr11 5235634 5235653 5235650 +
aaggaaaaaaaagaggaaaa

SEQ ID NO: 9739 - DNA, 20 bp, Artificial Sequence
  Synthetic oligonucleotide; GAG chr11 5235636 5235655 5235652 +
ggaaaaaaaagaggaaaaaa

SEQ ID NO: 9740 - DNA, 20 bp, Artificial Sequence
  Synthetic oligonucleotide; AAG chr11 5235641 5235660 5235657 +
aaaaagaggaaaaaagagac

SEQ ID NO: 9741 - DNA, 20 bp, Artificial Sequence
  Synthetic oligonucleotide; GAG chr11 5235643 5235662 5235659 +
aaagaggaaaaaagagacaa

SEQ ID NO: 9742 - DNA, 20 bp, Artificial Sequence
  Synthetic oligonucleotide; AAG chr11 5235646 5235665 5235662 +
gaggaaaaaagagacaagag

SEQ ID NO: 9743 - DNA, 20 bp, Artificial Sequence
  Synthetic oligonucleotide; GAG chr11 5235648 5235667 5235664 +
ggaaaaaagagacaagagaa

SEQ ID NO: 9744 - DNA, 20 bp, Artificial Sequence
  Synthetic oligonucleotide; AAG chr11 5235653 5235672 5235669 +
aaagagacaagagaagagat

SEQ ID NO: 9745 - DNA, 20 bp, Artificial Sequence
  Synthetic oligonucleotide; CAG chr11 5235661 5235680 5235677 +
aagagaagagataagactga

SEQ ID NO: 9746 - DNA, 20 bp, Artificial Sequence
  Synthetic oligonucleotide; TGG chr11 5235673 5235692 5235689 +
aagactgacagttcaaattt

SEQ ID NO: 9747 - DNA, 20 bp, Artificial Sequence
  Synthetic oligonucleotide; TGG chr11 5235676 5235695 5235692 +
actgacagttcaaattttgg

SEQ ID NO: 9748 - DNA, 20 bp, Artificial Sequence
  Synthetic oligonucleotide; TGG chr11 5235684 5235703 5235700 +
ttcaaattttggtggtgata

SEQ ID NO: 9749 - DNA, 20 bp, Artificial Sequence
  Synthetic oligonucleotide; TAG chr11 5235692 5235711 5235708 +
ttggtggtgatatggatcaa

SEQ ID NO: 9750 - DNA, 20 bp, Artificial Sequence
  Synthetic oligonucleotide; TGG chr11 5235710 5235729 5235726 +
aatagaaactcaaactctgt

SEQ ID NO: 9751 - DNA, 20 bp, Artificial Sequence
  Synthetic oligonucleotide; TAG chr11 5235726 5235745 5235742 +
ctgttggtgacactgtacaa

SEQ ID NO: 9752 - DNA, 20 bp, Artificial Sequence
  Synthetic oligonucleotide; TGG chr11 5235740 5235759 5235756 +
gtacaatagtataacccctt

SEQ ID NO: 9753 - DNA, 20 bp, Artificial Sequence
  Synthetic oligonucleotide; TAG chr11 5235754 5235773 5235770 +
cccctttggaaaacctttaa

SEQ ID NO: 9754 - DNA, 20 bp, Artificial Sequence
  Synthetic oligonucleotide; TGG chr11 5235770 5235789 5235786 +
ttaatagtatccacaaatgc

SEQ ID NO: 9755 - DNA, 20 bp, Artificial Sequence
  Synthetic oligonucleotide; AAG chr11 5235782 5235801 5235798 +
acaaatgctggatgcttgat

SEQ ID NO: 9756 - DNA, 20 bp, Artificial Sequence
  Synthetic oligonucleotide; TAG chr11 5235794 5235813 5235810 +
tgcttgataagtctattacc

SEQ ID NO: 9757 - DNA, 20 bp, Artificial Sequence
  Synthetic oligonucleotide; TAG chr11 5235809 5235828 5235825 +
ttacctagcaattacatttt

SEQ ID NO: 9758 - DNA, 20 bp, Artificial Sequence
  Synthetic oligonucleotide; CAG chr11 5235817 5235836 5235833 +
caattacatttttagatatt

SEQ ID NO: 9759 - DNA, 20 bp, Artificial Sequence
  Synthetic oligonucleotide; AAG chr11 5235843 5235862 5235859 +
cacatgcatgtgtgtatcca

SEQ ID NO: 9760 - DNA, 20 bp, Artificial Sequence
  Synthetic oligonucleotide; TAG chr11 5235853 5235872 5235869 +
tgtgtatccaaagacatgta

SEQ ID NO: 9761 - DNA, 20 bp, Artificial Sequence
  Synthetic oligonucleotide; CAG chr11 5235868 5235887 5235884 +
atgtatagaaatgcttatga

SEQ ID NO: 9762 - DNA, 20 bp, Artificial Sequence
  Synthetic oligonucleotide; CGG chr11 5235894 5235913 5235910 +
taatcataaaaacctcaaac

SEQ ID NO: 9763 - DNA, 20 bp, Artificial Sequence
  Synthetic oligonucleotide; TAG chr11 5235897 5235916 5235913 +
tcataaaaacctcaaaccgg

SEQ ID NO: 9764 - DNA, 20 bp, Artificial Sequence
  Synthetic oligonucleotide; CAG chr11 5235919 5235938 5235935 +
gccacttaaatgcttaccaa

SEQ ID NO: 9765 - DNA, 20 bp, Artificial Sequence
  Synthetic oligonucleotide; TAG chr11 5235922 5235941 5235938 +
acttaaatgcttaccaacag

SEQ ID NO: 9766 - DNA, 20 bp, Artificial Sequence
  Synthetic oligonucleotide; CGG chr11 5235938 5235957 5235954 +
acagtagaattgataaatta

SEQ ID NO: 9767 - DNA, 20 bp, Artificial Sequence
  Synthetic oligonucleotide; TAG chr11 5235943 5235962 5235959 +
agaattgataaattacggta

SEQ ID NO: 9768 - DNA, 20 bp, Artificial Sequence
  Synthetic oligonucleotide; AAG chr11 5235949 5235968 5235965 +
gataaattacggtatagtca

SEQ ID NO: 9769 - DNA, 20 bp, Artificial Sequence
  Synthetic oligonucleotide; TAG chr11 5235954 5235973 5235970 +
attacggtatagtcaaagaa

SEQ ID NO: 9770 - DNA, 20 bp, Artificial Sequence
  Synthetic oligonucleotide; CAG chr11 5235966 5235985 5235982 +
tcaaagaatagaatattaca

SEQ ID NO: 9771 - DNA, 20 bp, Artificial Sequence
  Synthetic oligonucleotide; AAG chr11 5235976 5235995 5235992 +
gaatattacacagaaatgaa

SEQ ID NO: 9772 - DNA, 20 bp, Artificial Sequence
  Synthetic oligonucleotide; TAG chr11 5236000 5236019 5236016 +
atcaactactgcttaacacg

SEQ ID NO: 9773 - DNA, 20 bp, Artificial Sequence
  Synthetic oligonucleotide; CAG chr11 5236021 5236040 5236037 +
agcgatacaaatgcatttta

SEQ ID NO: 9774 - DNA, 20 bp, Artificial Sequence
  Synthetic oligonucleotide; TGG chr11 5236028 5236047 5236044 +
caaatgcattttacagcatt

SEQ ID NO: 9775 - DNA, 20 bp, Artificial Sequence
  Synthetic oligonucleotide; AAG chr11 5236039 5236058 5236055 +
tacagcatttggttgattaa

SEQ ID NO: 9776 - DNA, 20 bp, Artificial Sequence
  Synthetic oligonucleotide; CAG chr11 5236046 5236065 5236062 +
tttggttgattaaaagtaac

SEQ ID NO: 9777 - DNA, 20 bp, Artificial Sequence
  Synthetic oligonucleotide; GAG chr11 5236048 5236067 5236064 +
tggttgattaaaagtaacca

SEQ ID NO: 9778 - DNA, 20 bp, Artificial Sequence
  Synthetic oligonucleotide; AGG chr11 5236049 5236068 5236065 +
ggttgattaaaagtaaccag

SEQ ID NO: 9779 - DNA, 20 bp, Artificial Sequence
  Synthetic oligonucleotide; GAG chr11 5236053 5236072 5236069 +
gattaaaagtaaccagaggt

SEQ ID NO: 9780 - DNA, 20 bp, Artificial Sequence
  Synthetic oligonucleotide; TAG chr11 5236083 5236102 5236099 +
tatatgactttatttgtata

SEQ ID NO: 9781 - DNA, 20 bp, Artificial Sequence
  Synthetic oligonucleotide; AAG chr11 5236087 5236106 5236103 +
tgactttatttgtatataga

SEQ ID NO: 9782 - DNA, 20 bp, Artificial Sequence
  Synthetic oligonucleotide; TGG chr11 5236091 5236110 5236107 +
tttatttgtatatagaaaga

SEQ ID NO: 9783 - DNA, 20 bp, Artificial Sequence
  Synthetic oligonucleotide; GAG chr11 5236105 5236124 5236121 +
gaaagatggatgatgtgcct

SEQ ID NO: 9784 - DNA, 20 bp, Artificial Sequence
  Synthetic oligonucleotide; AAG chr11 5236119 5236138 5236135 +
gtgcctgagattctgatcac

SEQ ID NO: 9785 - DNA, 20 bp, Artificial Sequence
  Synthetic oligonucleotide; AGG chr11 5236120 5236139 5236136 +
tgcctgagattctgatcaca

SEQ ID NO: 9786 - DNA, 20 bp, Artificial Sequence
  Synthetic oligonucleotide; GGG chr11 5236121 5236140 5236137 +
gcctgagattctgatcacaa

SEQ ID NO: 9787 - DNA, 20 bp, Artificial Sequence
  Synthetic oligonucleotide; GGG chr11 5236122 5236141 5236138 +
cctgagattctgatcacaag

SEQ ID NO: 9788 - DNA, 20 bp, Artificial Sequence
  Synthetic oligonucleotide; TAG chr11 5236138 5236157 5236154 +
caaggggaaatgttataaaa

SEQ ID NO: 9789 - DNA, 20 bp, Artificial Sequence
  Synthetic oligonucleotide; AGG chr11 5236139 5236158 5236155 +
aaggggaaatgttataaaat

SEQ ID NO: 9790 - DNA, 20 bp, Artificial Sequence
  Synthetic oligonucleotide; GGG chr11 5236140 5236159 5236156 +
aggggaaatgttataaaata

SEQ ID NO: 9791 - DNA, 20 bp, Artificial Sequence
  Synthetic oligonucleotide; TAG chr11 5236143 5236162 5236159 +
ggaaatgttataaaataggg

SEQ ID NO: 9792 - DNA, 20 bp, Artificial Sequence
  Synthetic oligonucleotide; GAG chr11 5236145 5236164 5236161 +
aaatgttataaaatagggta

SEQ ID NO: 9793 - DNA, 20 bp, Artificial Sequence
  Synthetic oligonucleotide; GAG chr11 5236147 5236166 5236163 +
atgttataaaatagggtaga

SEQ ID NO: 9794 - DNA, 20 bp, Artificial Sequence
  Synthetic oligonucleotide; AGG chr11 5236148 5236167 5236164 +
tgttataaaatagggtagag

SEQ ID NO: 9795 - DNA, 20 bp, Artificial Sequence
  Synthetic oligonucleotide; GAG chr11 5236150 5236169 5236166 +
ttataaaatagggtagagag

SEQ ID NO: 9796 - DNA, 20 bp, Artificial Sequence
  Synthetic oligonucleotide; AAG chr11 5236180 5236199 5236196 +
tgacctttaaactttgttac

SEQ ID NO: 9797 - DNA, 20 bp, Artificial Sequence
  Synthetic oligonucleotide; TGG chr11 5236199 5236218 5236215 +
caagttatttttctgtaacc

SEQ ID NO: 9798 - DNA, 20 bp, Artificial Sequence
  Synthetic oligonucleotide; AAG chr11 5236202 5236221 5236218 +
gttatttttctgtaacctgg

SEQ ID NO: 9799 - DNA, 20 bp, Artificial Sequence
  Synthetic oligonucleotide; AAG chr11 5236212 5236231 5236228 +
tgtaacctggaagccaacga

SEQ ID NO: 9800 - DNA, 20 bp, Artificial Sequence
  Synthetic oligonucleotide; AAG chr11 5236229 5236248 5236245 +
cgaaagatattgaataattc

SEQ ID NO: 9801 - DNA, 20 bp, Artificial Sequence
  Synthetic oligonucleotide; AAG chr11 5236233 5236252 5236249 +
agatattgaataattcaaga

SEQ ID NO: 9802 - DNA, 20 bp, Artificial Sequence
  Synthetic oligonucleotide; AGG chr11 5236234 5236253 5236250 +
gatattgaataattcaagaa

SEQ ID NO: 9803 - DNA, 20 bp, Artificial Sequence
  Synthetic oligonucleotide; TGG chr11 5236237 5236256 5236253 +
attgaataattcaagaaagg

SEQ ID NO: 9804 - DNA, 20 bp, Artificial Sequence
  Synthetic oligonucleotide; TGG chr11 5236240 5236259 5236256 +
gaataattcaagaaaggtgg

SEQ ID NO: 9805 - DNA, 20 bp, Artificial Sequence
  Synthetic oligonucleotide; TGG chr11 5236245 5236264 5236261 +
attcaagaaaggtggtggca

SEQ ID NO: 9806 - DNA, 20 bp, Artificial Sequence
  Synthetic oligonucleotide; AAG chr11 5236266 5236285 5236282 +
ggtttgatttgtgtctttaa

SEQ ID NO: 9807 - DNA, 20 bp, Artificial Sequence
  Synthetic oligonucleotide; TAG chr11 5236281 5236300 5236297 +
tttaaaagattattctcact

SEQ ID NO: 9808 - DNA, 20 bp, Artificial Sequence
  Synthetic oligonucleotide; AAG chr11 5236286 5236305 5236302 +
aagattattctcacttagtg

SEQ ID NO: 9809 - DNA, 20 bp, Artificial Sequence
  Synthetic oligonucleotide; TAG chr11 5236299 5236318 5236315 +
cttagtgaagaaatgtattt

SEQ ID NO: 9810 - DNA, 20 bp, Artificial Sequence
  Synthetic oligonucleotide; AAG chr11 5236302 5236321 5236318 +
agtgaagaaatgtattttag

SEQ ID NO: 9811 - DNA, 20 bp, Artificial Sequence
  Synthetic oligonucleotide; TAG chr11 5236305 5236324 5236321 +
gaagaaatgtattttagaag

SEQ ID NO: 9812 - DNA, 20 bp, Artificial Sequence
  Synthetic oligonucleotide; GAG chr11 5236307 5236326 5236323 +
agaaatgtattttagaagta

SEQ ID NO: 9813 - DNA, 20 bp, Artificial Sequence
  Synthetic oligonucleotide; TGG chr11 5236314 5236333 5236330 +
tattttagaagtagagaaaa

SEQ ID NO: 9814 - DNA, 20 bp, Artificial Sequence
  Synthetic oligonucleotide; GGG chr11 5236315 5236334 5236331 +
attttagaagtagagaaaat

SEQ ID NO: 9815 - DNA, 20 bp, Artificial Sequence
  Synthetic oligonucleotide; GAG chr11 5236317 5236336 5236333 +
tttagaagtagagaaaatgg

SEQ ID NO: 9816 - DNA, 20 bp, Artificial Sequence
  Synthetic oligonucleotide; TAG chr11 5236325 5236344 5236341 +
tagagaaaatgggagacaaa

SEQ ID NO: 9817 - DNA, 20 bp, Artificial Sequence
  Synthetic oligonucleotide; TGG chr11 5236329 5236348 5236345 +
gaaaatgggagacaaatagc

SEQ ID NO: 9818 - DNA, 20 bp, Artificial Sequence
  Synthetic oligonucleotide; GGG chr11 5236330 5236349 5236346 +
aaaatgggagacaaatagct

SEQ ID NO: 9819 - DNA, 20 bp, Artificial Sequence
  Synthetic oligonucleotide; CAG chr11 5236342 5236361 5236358 +
aaatagctgggcttctgttg

SEQ ID NO: 9820 - DNA, 20 bp, Artificial Sequence
  Synthetic oligonucleotide; TAG chr11 5236345 5236364 5236361 +
tagctgggcttctgttgcag

SEQ ID NO: 9821 - DNA, 20 bp, Artificial Sequence
  Synthetic oligonucleotide; AGG chr11 5236346 5236365 5236362 +
agctgggcttctgttgcagt

SEQ ID NO: 9822 - DNA, 20 bp, Artificial Sequence
  Synthetic oligonucleotide; GGG chr11 5236347 5236366 5236363 +
gctgggcttctgttgcagta

SEQ ID NO: 9823 - DNA, 20 bp, Artificial Sequence
  Synthetic oligonucleotide; AAG chr11 5236350 5236369 5236366 +
gggcttctgttgcagtaggg

SEQ ID NO: 9824 - DNA, 20 bp, Artificial Sequence
  Synthetic oligonucleotide; AAG chr11 5236354 5236373 5236370 +
ttctgttgcagtagggaaga

SEQ ID NO: 9825 - DNA, 20 bp, Artificial Sequence
  Synthetic oligonucleotide; CAG chr11 5236378 5236397 5236394 +
gacaatgccatttctattat

SEQ ID NO: 9826 - DNA, 20 bp, Artificial Sequence
  Synthetic oligonucleotide; TGG chr11 5236384 5236403 5236400 +
gccatttctattatcagact

SEQ ID NO: 9827 - DNA, 20 bp, Artificial Sequence
  Synthetic oligonucleotide; CGG chr11 5236394 5236413 5236410 +
ttatcagacttggaccatga

SEQ ID NO: 9828 - DNA, 20 bp, Artificial Sequence
  Synthetic oligonucleotide; CAG chr11 5236403 5236422 5236419 +
ttggaccatgacggtgatgt

SEQ ID NO: 9829 - DNA, 20 bp, Artificial Sequence
  Synthetic oligonucleotide; AAG chr11 5236416 5236435 5236432 +
gtgatgtcagtcgtgaacac

SEQ ID NO: 9830 - DNA, 20 bp, Artificial Sequence
  Synthetic oligonucleotide; TAG chr11 5236421 5236440 5236437 +
gtcagtcgtgaacacaagaa

SEQ ID NO: 9831 - DNA, 20 bp, Artificial Sequence
  Synthetic oligonucleotide; AGG chr11 5236422 5236441 5236438 +
tcagtcgtgaacacaagaat

SEQ ID NO: 9832 - DNA, 20 bp, Artificial Sequence
  Synthetic oligonucleotide; GGG chr11 5236423 5236442 5236439 +
cagtcgtgaacacaagaata

SEQ ID NO: 9833 - DNA, 20 bp, Artificial Sequence
  Synthetic oligonucleotide; GAG chr11 5236436 5236455 5236452 +
aagaatagggccacatttgt

SEQ ID NO: 9834 - DNA, 20 bp, Artificial Sequence
  Synthetic oligonucleotide; TAG chr11 5236441 5236460 5236457 +
tagggccacatttgtgagtt

SEQ ID NO: 9835 - DNA, 20 bp, Artificial Sequence
  Synthetic oligonucleotide; TGG chr11 5236444 5236463 5236460 +
ggccacatttgtgagtttag

SEQ ID NO: 9836 - DNA, 20 bp, Artificial Sequence
  Synthetic oligonucleotide; CAG chr11 5236458 5236477 5236474 +
gtttagtggtacgataaaat

SEQ ID NO: 9837 - DNA, 20 bp, Artificial Sequence
  Synthetic oligonucleotide; CAG chr11 5236466 5236485 5236482 +
gtacgataaaatcagaaata

SEQ ID NO: 9838 - DNA, 20 bp, Artificial Sequence
  Synthetic oligonucleotide; TGG chr11 5236472 5236491 5236488 +
taaaatcagaaatacagtct

SEQ ID NO: 9839 - DNA, 20 bp, Artificial Sequence
  Synthetic oligonucleotide; AAG chr11 5236511 5236530 5236527 +
gcactcttgtaaaatgcaaa

SEQ ID NO: 9840 - DNA, 20 bp, Artificial Sequence
  Synthetic oligonucleotide; TAG chr11 5236521 5236540 5236537 +
aaaatgcaaaaagatgtact

SEQ ID NO: 9841 - DNA, 20 bp, Artificial Sequence
  Synthetic oligonucleotide; TGG chr11 5236529 5236548 5236545 +
aaaagatgtacttagatatg

SEQ ID NO: 9842 - DNA, 20 bp, Artificial Sequence
  Synthetic oligonucleotide; TGG chr11 5236535 5236554 5236551 +
tgtacttagatatgtggatc

SEQ ID NO: 9843 - DNA, 20 bp, Artificial Sequence
  Synthetic oligonucleotide; GAG chr11 5236537 5236556 5236553 +
tacttagatatgtggatctg

SEQ ID NO: 9844 - DNA, 20 bp, Artificial Sequence
  Synthetic oligonucleotide; CAG chr11 5236542 5236561 5236558 +
agatatgtggatctggagct

SEQ ID NO: 9845 - DNA, 20 bp, Artificial Sequence
  Synthetic oligonucleotide; AAG chr11 5236546 5236565 5236562 +
atgtggatctggagctcaga

SEQ ID NO: 9846 - DNA, 20 bp, Artificial Sequence
  Synthetic oligonucleotide; CAG chr11 5236557 5236576 5236573 +
gagctcagaaagaatacaac

SEQ ID NO: 9847 - DNA, 20 bp, Artificial Sequence
  Synthetic oligonucleotide; AGG chr11 5236558 5236577 5236574 +
agctcagaaagaatacaacc

SEQ ID NO: 9848 - DNA, 20 bp, Artificial Sequence
  Synthetic oligonucleotide; AAG chr11 5236563 5236582 5236579 +
agaaagaatacaaccaggtc

SEQ ID NO: 9849 - DNA, 20 bp, Artificial Sequence
  Synthetic oligonucleotide; CAG chr11 5236570 5236589 5236586 +
atacaaccaggtcaagaata

SEQ ID NO: 9850 - DNA, 20 bp, Artificial Sequence
  Synthetic oligonucleotide; TGG chr11 5236575 5236594 5236591 +
accaggtcaagaatacagaa

SEQ ID NO: 9851 - DNA, 20 bp, Artificial Sequence
  Synthetic oligonucleotide; CAG chr11 5236580 5236599 5236596 +
gtcaagaatacagaatggaa

SEQ ID NO: 9852 - DNA, 20 bp, Artificial Sequence
  Synthetic oligonucleotide; AAG chr11 5236590 5236609 5236606 +
cagaatggaacagaacatac

SEQ ID NO: 9853 - DNA, 20 bp, Artificial Sequence
  Synthetic oligonucleotide; CAG chr11 5236595 5236614 5236611 +
tggaacagaacatacaagaa

SEQ ID NO: 9854 - DNA, 20 bp, Artificial Sequence
  Synthetic oligonucleotide; CAG chr11 5236644 5236663 5236660 +
ccactacctgttaaaaatga

SEQ ID NO: 9855 - DNA, 20 bp, Artificial Sequence
  Synthetic oligonucleotide; TAG chr11 5236680 5236699 5236696 +
tcaatatctccttaaaatct

SEQ ID NO: 9856 - DNA, 20 bp, Artificial Sequence
  Synthetic oligonucleotide; GAG chr11 5236694 5236713 5236710 +
aaatcttagaatgtgtttgt

SEQ ID NO: 9857 - DNA, 20 bp, Artificial Sequence
  Synthetic oligonucleotide; AGG chr11 5236695 5236714 5236711 +
aatcttagaatgtgtttgtg

SEQ ID NO: 9858 - DNA, 20 bp, Artificial Sequence
  Synthetic oligonucleotide; GGG chr11 5236696 5236715 5236712 +
atcttagaatgtgtttgtga

SEQ ID NO: 9859 - DNA, 20 bp, Artificial Sequence
  Synthetic oligonucleotide; GAG chr11 5236698 5236717 5236714 +
cttagaatgtgtttgtgagg

SEQ ID NO: 9860 - DNA, 20 bp, Artificial Sequence
  Synthetic oligonucleotide; AGG chr11 5236699 5236718 5236715 +
ttagaatgtgtttgtgaggg

SEQ ID NO: 9861 - DNA, 20 bp, Artificial Sequence
  Synthetic oligonucleotide; AAG chr11 5236725 5236744 5236741 +
tatgtttccaattcatatat

SEQ ID NO: 9862 - DNA, 20 bp, Artificial Sequence
  Synthetic oligonucleotide; TAG chr11 5236751 5236770 5236767 +
attgattctaaaaaaaatgt

SEQ ID NO: 9863 - DNA, 20 bp, Artificial Sequence
  Synthetic oligonucleotide; AGG chr11 5236752 5236771 5236768 +
ttgattctaaaaaaaatgtt

SEQ ID NO: 9864 - DNA, 20 bp, Artificial Sequence
  Synthetic oligonucleotide; AAG chr11 5236764 5236783 5236780 +
aaaatgttaggtaaattctt

SEQ ID NO: 9865 - DNA, 20 bp, Artificial Sequence
  Synthetic oligonucleotide; AGG chr11 5236765 5236784 5236781 +
aaatgttaggtaaattctta

SEQ ID NO: 9866 - DNA, 20 bp, Artificial Sequence
  Synthetic oligonucleotide; GAG chr11 5236772 5236791 5236788 +
aggtaaattcttaaggccat

SEQ ID NO: 9867 - DNA, 20 bp, Artificial Sequence
  Synthetic oligonucleotide; AGG chr11 5236773 5236792 5236789 +
ggtaaattcttaaggccatg

SEQ ID NO: 9868 - DNA, 20 bp, Artificial Sequence
  Synthetic oligonucleotide; AAG chr11 5236807 5236826 5236823 +
atctttgtctgttaattcca

SEQ ID NO: 9869 - DNA, 20 bp, Artificial Sequence
  Synthetic oligonucleotide; TGG chr11 5236813 5236832 5236829 +
gtctgttaattccaaagact

SEQ ID NO: 9870 - DNA, 20 bp, Artificial Sequence
  Synthetic oligonucleotide; TGG chr11 5236859 5236878 5236875 +
cctgaaatgattttacacat

SEQ ID NO: 9871 - DNA, 20 bp, Artificial Sequence
  Synthetic oligonucleotide; GGG chr11 5236860 5236879 5236876 +
ctgaaatgattttacacatt

SEQ ID NO: 9872 - DNA, 20 bp, Artificial Sequence
  Synthetic oligonucleotide; GAG chr11 5236862 5236881 5236878 +
gaaatgattttacacattgg

SEQ ID NO: 9873 - DNA, 20 bp, Artificial Sequence
  Synthetic oligonucleotide; TGG chr11 5236868 5236887 5236884 +
attttacacattgggagatc

SEQ ID NO: 9874 - DNA, 20 bp, Artificial Sequence
  Synthetic oligonucleotide; TGG chr11 5236889 5236908 5236905 +
ggttacatgtttattctata

SEQ ID NO: 9875 - DNA, 20 bp, Artificial Sequence
  Synthetic oligonucleotide; GAG chr11 5236900 5236919 5236916 +
tattctatatggattgcatt

SEQ ID NO: 9876 - DNA, 20 bp, Artificial Sequence
  Synthetic oligonucleotide; GAG chr11 5236902 5236921 5236918 +
ttctatatggattgcattga

SEQ ID NO: 9877 - DNA, 20 bp, Artificial Sequence
  Synthetic oligonucleotide; AGG chr11 5236903 5236922 5236919 +
tctatatggattgcattgag

SEQ ID NO: 9878 - DNA, 20 bp, Artificial Sequence
  Synthetic oligonucleotide; CAG chr11 5236916 5236935 5236932 +
cattgagaggatttgtataa

SEQ ID NO: 9879 - DNA, 20 bp, Artificial Sequence
  Synthetic oligonucleotide; AAG chr11 5236922 5236941 5236938 +
gaggatttgtataacagaat

SEQ ID NO: 9880 - DNA, 20 bp, Artificial Sequence
  Synthetic oligonucleotide; AGG chr11 5236923 5236942 5236939 +
aggatttgtataacagaata

SEQ ID NO: 9881 - DNA, 20 bp, Artificial Sequence
  Synthetic oligonucleotide; GAG chr11 5236947 5236966 5236963 +
ctttttttcttttctcttct

SEQ ID NO: 9882 - DNA, 20 bp, Artificial Sequence
  Synthetic oligonucleotide; TGG chr11 5236951 5236970 5236967 +
ttttcttttctcttctgaga

SEQ ID NO: 9883 - DNA, 20 bp, Artificial Sequence
  Synthetic oligonucleotide; GAG chr11 5236953 5236972 5236969 +
ttcttttctcttctgagatg

SEQ ID NO: 9884 - DNA, 20 bp, Artificial Sequence
  Synthetic oligonucleotide; AAG chr11 5236973 5236992 5236989 +
gagtttcatccctattgccc

SEQ ID NO: 9885 - DNA, 20 bp, Artificial Sequence
  Synthetic oligonucleotide; TAG chr11 5236977 5236996 5236993 +
ttcatccctattgcccaagc

SEQ ID NO: 9886 - DNA, 20 bp, Artificial Sequence
  Synthetic oligonucleotide; GAG chr11 5236979 5236998 5236995 +
catccctattgcccaagcta

SEQ ID NO: 9887 - DNA, 20 bp, Artificial Sequence
  Synthetic oligonucleotide; TGG chr11 5236987 5237006 5237003 +
ttgcccaagctagagtgcaa

SEQ ID NO: 9888 - DNA, 20 bp, Artificial Sequence
  Synthetic oligonucleotide; TAG chr11 5236997 5237016 5237013 +
tagagtgcaatggtgcaatc

SEQ ID NO: 9889 - DNA, 20 bp, Artificial Sequence
  Synthetic oligonucleotide; AGG chr11 5236998 5237017 5237014 +
agagtgcaatggtgcaatct

SEQ ID NO: 9890 - DNA, 20 bp, Artificial Sequence
  Synthetic oligonucleotide; TGG chr11 5237022 5237041 5237038 +
tcaccgcaacctctgcctcc

SEQ ID NO: 9891 - DNA, 20 bp, Artificial Sequence
  Synthetic oligonucleotide; GGG chr11 5237023 5237042 5237039 +
caccgcaacctctgcctcct

SEQ ID NO: 9892 - DNA, 20 bp, Artificial Sequence
  Synthetic oligonucleotide; AAG chr11 5237029 5237048 5237045 +
aacctctgcctcctgggttc

SEQ ID NO: 9893 - DNA, 20 bp, Artificial Sequence
  Synthetic oligonucleotide; CAG chr11 5237046 5237065 5237062 +
ttcaagcaattctcctgcct

SEQ ID NO: 9894 - DNA, 20 bp, Artificial Sequence
  Synthetic oligonucleotide; TAG chr11 5237058 5237077 5237074 +
tcctgcctcagccacctgaa

SEQ ID NO: 9895 - DNA, 20 bp, Artificial Sequence
  Synthetic oligonucleotide; TGG chr11 5237062 5237081 5237078 +
gcctcagccacctgaatagc

SEQ ID NO: 9896 - DNA, 20 bp, Artificial Sequence
  Synthetic oligonucleotide; GGG chr11 5237063 5237082 5237079 +
cctcagccacctgaatagct

SEQ ID NO: 9897 - DNA, 20 bp, Artificial Sequence
  Synthetic oligonucleotide; CAG chr11 5237070 5237089 5237086 +
cacctgaatagctgggactg

SEQ ID NO: 9898 - DNA, 20 bp, Artificial Sequence
  Synthetic oligonucleotide; AGG chr11 5237071 5237090 5237087 +
acctgaatagctgggactgc

SEQ ID NO: 9899 - DNA, 20 bp, Artificial Sequence
  Synthetic oligonucleotide; CGG chr11 5237089 5237108 5237105 +
gcaggcatgcaccacacgcc

SEQ ID NO: 9900 - DNA, 20 bp, Artificial Sequence
  Synthetic oligonucleotide; TAG chr11 5237107 5237126 5237123 +
cccggctgattttgtatttt

SEQ ID NO: 9901 - DNA, 20 bp, Artificial Sequence
  Synthetic oligonucleotide; TAG chr11 5237110 5237129 5237126 +
ggctgattttgtatttttag

SEQ ID NO: 9902 - DNA, 20 bp, Artificial Sequence
  Synthetic oligonucleotide; GAG chr11 5237112 5237131 5237128 +
ctgattttgtatttttagta

SEQ ID NO: 9903 - DNA, 20 bp, Artificial Sequence
  Synthetic oligonucleotide; TGG chr11 5237116 5237135 5237132 +
ttttgtatttttagtagaga

SEQ ID NO: 9904 - DNA, 20 bp, Artificial Sequence
  Synthetic oligonucleotide; GGG chr11 5237117 5237136 5237133 +
tttgtatttttagtagagat

SEQ ID NO: 9905 - DNA, 20 bp, Artificial Sequence
  Synthetic oligonucleotide; GGG chr11 5237118 5237137 5237134 +
ttgtatttttagtagagatg

SEQ ID NO: 9906 - DNA, 20 bp, Artificial Sequence
  Synthetic oligonucleotide; TGG chr11 5237132 5237151 5237148 +
gagatggggtttcaccatgt

SEQ ID NO: 9907 - DNA, 20 bp, Artificial Sequence
  Synthetic oligonucleotide; CAG chr11 5237136 5237155 5237152 +
tggggtttcaccatgttggt

SEQ ID NO: 9908 - DNA, 20 bp, Artificial Sequence
  Synthetic oligonucleotide; AGG chr11 5237137 5237156 5237153 +
ggggtttcaccatgttggtc

SEQ ID NO: 9909 - DNA, 20 bp, Artificial Sequence
  Synthetic oligonucleotide; TGG chr11 5237141 5237160 5237157 +
tttcaccatgttggtcaggc

SEQ ID NO: 9910 - DNA, 20 bp, Artificial Sequence
  Synthetic oligonucleotide; AAG chr11 5237162 5237181 5237178 +
ggtcttgaactcctgacctc

SEQ ID NO: 9911 - DNA, 20 bp, Artificial Sequence
  Synthetic oligonucleotide; TGG chr11 5237179 5237198 5237195 +
ctcaagtgatctgcctgcct

SEQ ID NO: 9912 - DNA, 20 bp, Artificial Sequence
  Synthetic oligonucleotide; AAG chr11 5237189 5237208 5237205 +
ctgcctgccttggcctccca

SEQ ID NO: 9913 - DNA, 20 bp, Artificial Sequence
  Synthetic oligonucleotide; TGG chr11 5237195 5237214 5237211 +
gccttggcctcccaaagtgc

SEQ ID NO: 9914 - DNA, 20 bp, Artificial Sequence
  Synthetic oligonucleotide; GGG chr11 5237196 5237215 5237212 +
ccttggcctcccaaagtgct

SEQ ID NO: 9915 - DNA, 20 bp, Artificial Sequence
  Synthetic oligonucleotide; AAG chr11 5237204 5237223 5237220 +
tcccaaagtgctgggtttac

SEQ ID NO: 9916 - DNA, 20 bp, Artificial Sequence
  Synthetic oligonucleotide; GAG chr11 5237210 5237229 5237226 +
agtgctgggtttacaagcct

SEQ ID NO: 9917 - DNA, 20 bp, Artificial Sequence
  Synthetic oligonucleotide; CAG chr11 5237223 5237242 5237239 +
caagcctgagccaccgcatc

SEQ ID NO: 9918 - DNA, 20 bp, Artificial Sequence
  Synthetic oligonucleotide; CAG chr11 5237227 5237246 5237243 +
cctgagccaccgcatccagc

SEQ ID NO: 9919 - DNA, 20 bp, Artificial Sequence
  Synthetic oligonucleotide; AGG chr11 5237228 5237247 5237244 +
ctgagccaccgcatccagcc

SEQ ID NO: 9920 - DNA, 20 bp, Artificial Sequence
  Synthetic oligonucleotide; AAG chr11 5237233 5237252 5237249 +
ccaccgcatccagccaggat

SEQ ID NO: 9921 - DNA, 20 bp, Artificial Sequence
  Synthetic oligonucleotide; AGG chr11 5237234 5237253 5237250 +
caccgcatccagccaggata

SEQ ID NO: 9922 - DNA, 20 bp, Artificial Sequence
  Synthetic oligonucleotide; AAG chr11 5237242 5237261 5237258 +
ccagccaggataaggtctaa

SEQ ID NO: 9923 - DNA, 20 bp, Artificial Sequence
  Synthetic oligonucleotide; TGG chr11 5237245 5237264 5237261 +
gccaggataaggtctaaaag

SEQ ID NO: 9924 - DNA, 20 bp, Artificial Sequence
  Synthetic oligonucleotide; AAG chr11 5237249 5237268 5237265 +
ggataaggtctaaaagtgga

SEQ ID NO: 9925 - DNA, 20 bp, Artificial Sequence
  Synthetic oligonucleotide; TAG chr11 5237254 5237273 5237270 +
aggtctaaaagtggaaagaa

SEQ ID NO: 9926 - DNA, 20 bp, Artificial Sequence
  Synthetic oligonucleotide; CAG chr11 5237271 5237290 5237287 +
gaatagcatctactcttgtt

SEQ ID NO: 9927 - DNA, 20 bp, Artificial Sequence
  Synthetic oligonucleotide; AGG chr11 5237272 5237291 5237288 +
aatagcatctactcttgttc

SEQ ID NO: 9928 - DNA, 20 bp, Artificial Sequence
  Synthetic oligonucleotide; GAG chr11 5237282 5237301 5237298 +
actcttgttcaggaaacaat

SEQ ID NO: 9929 - DNA, 20 bp, Artificial Sequence
  Synthetic oligonucleotide; AGG chr11 5237283 5237302 5237299 +
ctcttgttcaggaaacaatg

SEQ ID NO: 9930 - DNA, 20 bp, Artificial Sequence
  Synthetic oligonucleotide; TGG chr11 5237293 5237312 5237309 +
ggaaacaatgaggacctgac

SEQ ID NO: 9931 - DNA, 20 bp, Artificial Sequence
  Synthetic oligonucleotide; GGG chr11 5237294 5237313 5237310 +
gaaacaatgaggacctgact

SEQ ID NO: 9932 - DNA, 20 bp, Artificial Sequence
  Synthetic oligonucleotide; CAG chr11 5237297 5237316 5237313 +
acaatgaggacctgactggg

SEQ ID NO: 9933 - DNA, 20 bp, Artificial Sequence
  Synthetic oligonucleotide; AAG chr11 5237301 5237320 5237317 +
tgaggacctgactgggcagt

SEQ ID NO: 9934 - DNA, 20 bp, Artificial Sequence
  Synthetic oligonucleotide; GAG chr11 5237303 5237322 5237319 +
aggacctgactgggcagtaa

SEQ ID NO: 9935 - DNA, 20 bp, Artificial Sequence
  Synthetic oligonucleotide; TGG chr11 5237306 5237325 5237322 +
acctgactgggcagtaagag

SEQ ID NO: 9936 - DNA, 20 bp, Artificial Sequence
  Synthetic oligonucleotide; TAG chr11 5237316 5237335 5237332 +
gcagtaagagtggtgattaa

SEQ ID NO: 9937 - DNA, 20 bp, Artificial Sequence
  Synthetic oligonucleotide; TAG chr11 5237320 5237339 5237336 +
taagagtggtgattaataga

SEQ ID NO: 9938 - DNA, 20 bp, Artificial Sequence
  Synthetic oligonucleotide; AGG chr11 5237321 5237340 5237337 +
aagagtggtgattaatagat

SEQ ID NO: 9939 - DNA, 20 bp, Artificial Sequence
  Synthetic oligonucleotide; GGG chr11 5237322 5237341 5237338 +
agagtggtgattaatagata

SEQ ID NO: 9940 - DNA, 20 bp, Artificial Sequence
  Synthetic oligonucleotide; AAG chr11 5237333 5237352 5237349 +
taatagatagggacaaattg

SEQ ID NO: 9941 - DNA, 20 bp, Artificial Sequence
  Synthetic oligonucleotide; CAG chr11 5237336 5237355 5237352 +
tagatagggacaaattgaag

SEQ ID NO: 9942 - DNA, 20 bp, Artificial Sequence
  Synthetic oligonucleotide; TAG chr11 5237354 5237373 5237370 +
agcagaatcgaactgttgat

SEQ ID NO: 9943 - DNA, 20 bp, Artificial Sequence
  Synthetic oligonucleotide; GAG chr11 5237356 5237375 5237372 +
cagaatcgaactgttgatta

SEQ ID NO: 9944 - DNA, 20 bp, Artificial Sequence
  Synthetic oligonucleotide; AGG chr11 5237357 5237376 5237373 +
agaatcgaactgttgattag

SEQ ID NO: 9945 - DNA, 20 bp, Artificial Sequence
  Synthetic oligonucleotide; TAG chr11 5237360 5237379 5237376 +
atcgaactgttgattagagg

SEQ ID NO: 9946 - DNA, 20 bp, Artificial Sequence
  Synthetic oligonucleotide; AGG chr11 5237361 5237380 5237377 +
tcgaactgttgattagaggt

SEQ ID NO: 9947 - DNA, 20 bp, Artificial Sequence
  Synthetic oligonucleotide; GGG chr11 5237362 5237381 5237378 +
cgaactgttgattagaggta

SEQ ID NO: 9948 - DNA, 20 bp, Artificial Sequence
  Synthetic oligonucleotide; TGG chr11 5237387 5237406 5237403 +
atgattttaatctgtgacct

SEQ ID NO: 9949 - DNA, 20 bp, Artificial Sequence
  Synthetic oligonucleotide; TGG chr11 5237394 5237413 5237410 +
taatctgtgaccttggtgaa

SEQ ID NO: 9950 - DNA, 20 bp, Artificial Sequence
  Synthetic oligonucleotide; GGG chr11 5237395 5237414 5237411 +
aatctgtgaccttggtgaat

SEQ ID NO: 9951 - DNA, 20 bp, Artificial Sequence
  Synthetic oligonucleotide; AAG chr11 5237399 5237418 5237415 +
tgtgaccttggtgaatgggc

SEQ ID NO: 9952 - DNA, 20 bp, Artificial Sequence
  Synthetic oligonucleotide; TAG chr11 5237402 5237421 5237418 +
gaccttggtgaatgggcaag

SEQ ID NO: 9953 - DNA, 20 bp, Artificial Sequence
  Synthetic oligonucleotide; TGG chr11 5237422 5237441 5237438 +
tagctatctaatgactaaaa

SEQ ID NO: 9954 - DNA, 20 bp, Artificial Sequence
  Synthetic oligonucleotide; TGG chr11 5237432 5237451 5237448 +
atgactaaaatggaaaacac

SEQ ID NO: 9955 - DNA, 20 bp, Artificial Sequence
  Synthetic oligonucleotide; AAG chr11 5237435 5237454 5237451 +
actaaaatggaaaacactgg

SEQ ID NO: 9956 - DNA, 20 bp, Artificial Sequence
  Synthetic oligonucleotide; GAG chr11 5237437 5237456 5237453 +
taaaatggaaaacactggaa

SEQ ID NO: 9957 - DNA, 20 bp, Artificial Sequence
  Synthetic oligonucleotide; CAG chr11 5237443 5237462 5237459 +
ggaaaacactggaagagaaa

SEQ ID NO: 9958 - DNA, 20 bp, Artificial Sequence
  Synthetic oligonucleotide; TAG chr11 5237449 5237468 5237465 +
cactggaagagaaacagttt

SEQ ID NO: 9959 - DNA, 20 bp, Artificial Sequence
  Synthetic oligonucleotide; AAG chr11 5237458 5237477 5237474 +
agaaacagttttagtataac

SEQ ID NO: 9960 - DNA, 20 bp, Artificial Sequence
  Synthetic oligonucleotide; GAG chr11 5237476 5237495 5237492 +
acaagtgaaatacccatgct

SEQ ID NO: 9961 - DNA, 20 bp, Artificial Sequence
  Synthetic oligonucleotide; GAG chr11 5237482 5237501 5237498 +
gaaatacccatgctgagtct

SEQ ID NO: 9962 - DNA, 20 bp, Artificial Sequence
  Synthetic oligonucleotide; AGG chr11 5237483 5237502 5237499 +
aaatacccatgctgagtctg

SEQ ID NO: 9963 - DNA, 20 bp, Artificial Sequence
  Synthetic oligonucleotide; TAG chr11 5237492 5237511 5237508 +
tgctgagtctgaggtgccta

SEQ ID NO: 9964 - DNA, 20 bp, Artificial Sequence
  Synthetic oligonucleotide; AGG chr11 5237493 5237512 5237509 +
gctgagtctgaggtgcctat

SEQ ID NO: 9965 - DNA, 20 bp, Artificial Sequence
  Synthetic oligonucleotide; AAG chr11 5237510 5237529 5237526 +
tataggacatctatataaat

SEQ ID NO: 9966 - DNA, 20 bp, Artificial Sequence
  Synthetic oligonucleotide; CAG chr11 5237515 5237534 5237531 +
gacatctatataaataagcc

SEQ ID NO: 9967 - DNA, 20 bp, Artificial Sequence
  Synthetic oligonucleotide; TGG chr11 5237534 5237553 5237550 +
ccagtacattgtttgatata

SEQ ID NO: 9968 - DNA, 20 bp, Artificial Sequence
  Synthetic oligonucleotide; GGG chr11 5237535 5237554 5237551 +
cagtacattgtttgatatat

SEQ ID NO: 9969 - DNA, 20 bp, Artificial Sequence
  Synthetic oligonucleotide; TGG chr11 5237540 5237559 5237556 +
cattgtttgatatatgggtt

SEQ ID NO: 9970 - DNA, 20 bp, Artificial Sequence
  Synthetic oligonucleotide; GAG chr11 5237547 5237566 5237563 +
tgatatatgggtttggcact

SEQ ID NO: 9971 - DNA, 20 bp, Artificial Sequence
  Synthetic oligonucleotide; AGG chr11 5237548 5237567 5237564 +
gatatatgggtttggcactg

SEQ ID NO: 9972 - DNA, 20 bp, Artificial Sequence
  Synthetic oligonucleotide; TGG chr11 5237552 5237571 5237568 +
tatgggtttggcactgaggt

SEQ ID NO: 9973 - DNA, 20 bp, Artificial Sequence
  Synthetic oligonucleotide; GAG chr11 5237554 5237573 5237570 +
tgggtttggcactgaggttg

SEQ ID NO: 9974 - DNA, 20 bp, Artificial Sequence
  Synthetic oligonucleotide; AGG chr11 5237555 5237574 5237571 +
gggtttggcactgaggttgg

SEQ ID NO: 9975 - DNA, 20 bp, Artificial Sequence
  Synthetic oligonucleotide; CAG chr11 5237559 5237578 5237575 +
ttggcactgaggttggaggt

SEQ ID NO: 9976 - DNA, 20 bp, Artificial Sequence
  Synthetic oligonucleotide; GAG chr11 5237561 5237580 5237577 +
ggcactgaggttggaggtca

SEQ ID NO: 9977 - DNA, 20 bp, Artificial Sequence
  Synthetic oligonucleotide; AGG chr11 5237562 5237581 5237578 +
gcactgaggttggaggtcag

SEQ ID NO: 9978 - DNA, 20 bp, Artificial Sequence
  Synthetic oligonucleotide; TAG chr11 5237566 5237585 5237582 +
tgaggttggaggtcagaggt

SEQ ID NO: 9979 - DNA, 20 bp, Artificial Sequence
  Synthetic oligonucleotide; CAG chr11 5237573 5237592 5237589 +
ggaggtcagaggttagaaat

SEQ ID NO: 9980 - DNA, 20 bp, Artificial Sequence
  Synthetic oligonucleotide; GAG chr11 5237575 5237594 5237591 +
aggtcagaggttagaaatca

SEQ ID NO: 9981 - DNA, 20 bp, Artificial Sequence
  Synthetic oligonucleotide; TGG chr11 5237579 5237598 5237595 +
cagaggttagaaatcagagt

SEQ ID NO: 9982 - DNA, 20 bp, Artificial Sequence
  Synthetic oligonucleotide; GGG chr11 5237580 5237599 5237596 +
agaggttagaaatcagagtt

SEQ ID NO: 9983 - DNA, 20 bp, Artificial Sequence
  Synthetic oligonucleotide; TGG chr11 5237586 5237605 5237602 +
tagaaatcagagttgggaat

SEQ ID NO: 9984 - DNA, 20 bp, Artificial Sequence
  Synthetic oligonucleotide; GGG chr11 5237587 5237606 5237603 +
agaaatcagagttgggaatt

SEQ ID NO: 9985 - DNA, 20 bp, Artificial Sequence
  Synthetic oligonucleotide; CAG chr11 5237596 5237615 5237612 +
agttgggaattgggattata

SEQ ID NO: 9986 - DNA, 20 bp, Artificial Sequence
  Synthetic oligonucleotide; AGG chr11 5237597 5237616 5237613 +
gttgggaattgggattatac

SEQ ID NO: 9987 - DNA, 20 bp, Artificial Sequence
  Synthetic oligonucleotide; AAG chr11 5237608 5237627 5237624 +
ggattatacaggctgtattt

SEQ ID NO: 9988 - DNA, 20 bp, Artificial Sequence
  Synthetic oligonucleotide; GAG chr11 5237610 5237629 5237626 +
attatacaggctgtatttaa

SEQ ID NO: 9989 - DNA, 20 bp, Artificial Sequence
  Synthetic oligonucleotide; TAG chr11 5237615 5237634 5237631 +
acaggctgtatttaagagtt

SEQ ID NO: 9990 - DNA, 20 bp, Artificial Sequence
  Synthetic oligonucleotide; AAG chr11 5237634 5237653 5237650 +
ttagatataactgtgaatcc

SEQ ID NO: 9991 - DNA, 20 bp, Artificial Sequence
  Synthetic oligonucleotide; GAG chr11 5237636 5237655 5237652 +
agatataactgtgaatccaa

SEQ ID NO: 9992 - DNA, 20 bp, Artificial Sequence
  Synthetic oligonucleotide; AAG chr11 5237652 5237671 5237668 +
ccaagagtgtgatgaataca

SEQ ID NO: 9993 - DNA, 20 bp, Artificial Sequence
  Synthetic oligonucleotide; AAG chr11 5237662 5237681 5237678 +
gatgaatacaaagttaaatg

SEQ ID NO: 9994 - DNA, 20 bp, Artificial Sequence
  Synthetic oligonucleotide; AGG chr11 5237663 5237682 5237679 +
atgaatacaaagttaaatga

SEQ ID NO: 9995 - DNA, 20 bp, Artificial Sequence
  Synthetic oligonucleotide; AAG chr11 5237702 5237721 5237718 +
aacatttaatgtgaaatctc

SEQ ID NO: 9996 - DNA, 20 bp, Artificial Sequence
  Synthetic oligonucleotide; AGG chr11 5237703 5237722 5237719 +
acatttaatgtgaaatctca

SEQ ID NO: 9997 - DNA, 20 bp, Artificial Sequence
  Synthetic oligonucleotide; AAG chr11 5237706 5237725 5237722 +
tttaatgtgaaatctcaagg

SEQ ID NO: 9998 - DNA, 20 bp, Artificial Sequence
  Synthetic oligonucleotide; AAG chr11 5237713 5237732 5237729 +
tgaaatctcaaggaagtatg

SEQ ID NO: 9999 - DNA, 20 bp, Artificial Sequence
  Synthetic oligonucleotide; AAG chr11 5237717 5237736 5237733 +
atctcaaggaagtatgaagt

SEQ ID NO: 10000 - DNA, 20 bp, Artificial Sequence
  Synthetic oligonucleotide; TAG chr11 5237723 5237742 5237739 +
aggaagtatgaagtaagaca

SEQ ID NO: 10001 - DNA, 20 bp, Artificial Sequence
  Synthetic oligonucleotide; TAG chr11 5237748 5237767 5237764 +
cccaaaatccccgatgattt

SEQ ID NO: 10002 - DNA, 20 bp, Artificial Sequence
  Synthetic oligonucleotide; CAG chr11 5237755 5237774 5237771 +
tccccgatgattttagaact

SEQ ID NO: 10003 - DNA, 20 bp, Artificial Sequence
  Synthetic oligonucleotide; TAG chr11 5237771 5237790 5237787 +
aactcagtatcgattttaat

SEQ ID NO: 10004 - DNA, 20 bp, Artificial Sequence
  Synthetic oligonucleotide; TGG chr11 5237787 5237806 5237803 +
taattagtgtaatgccaatg

SEQ ID NO: 10005 - DNA, 20 bp, Artificial Sequence
  Synthetic oligonucleotide; GGG chr11 5237788 5237807 5237804 +
aattagtgtaatgccaatgt

SEQ ID NO: 10006 - DNA, 20 bp, Artificial Sequence
  Synthetic oligonucleotide; TAG chr11 5237792 5237811 5237808 +
agtgtaatgccaatgtgggt

SEQ ID NO: 10007 - DNA, 20 bp, Artificial Sequence
  Synthetic oligonucleotide; TGG chr11 5237797 5237816 5237813 +
aatgccaatgtgggttagaa

SEQ ID NO: 10008 - DNA, 20 bp, Artificial Sequence
  Synthetic oligonucleotide; AAG chr11 5237800 5237819 5237816 +
gccaatgtgggttagaatgg

SEQ ID NO: 10009 - DNA, 20 bp, Artificial Sequence
  Synthetic oligonucleotide; TGG chr11 5237815 5237834 5237831 +
aatggaagtcaacttgctgt

SEQ ID NO: 10010 - DNA, 20 bp, Artificial Sequence
  Synthetic oligonucleotide; CAG chr11 5237821 5237840 5237837 +
agtcaacttgctgttggttt

SEQ ID NO: 10011 - DNA, 20 bp, Artificial Sequence
  Synthetic oligonucleotide; GAG chr11 5237823 5237842 5237839 +
tcaacttgctgttggtttca

SEQ ID NO: 10012 - DNA, 20 bp, Artificial Sequence
  Synthetic oligonucleotide; CAG chr11 5237826 5237845 5237842 +
acttgctgttggtttcagag

SEQ ID NO: 10013 - DNA, 20 bp, Artificial Sequence
  Synthetic oligonucleotide; AGG chr11 5237827 5237846 5237843 +
cttgctgttggtttcagagc

SEQ ID NO: 10014 - DNA, 20 bp, Artificial Sequence
  Synthetic oligonucleotide; TAG chr11 5237830 5237849 5237846 +
gctgttggtttcagagcagg

SEQ ID NO: 10015 - DNA, 20 bp, Artificial Sequence
  Synthetic oligonucleotide; AGG chr11 5237831 5237850 5237847 +
ctgttggtttcagagcaggt

SEQ ID NO: 10016 - DNA, 20 bp, Artificial Sequence
  Synthetic oligonucleotide; GAG chr11 5237833 5237852 5237849 +
gttggtttcagagcaggtag

SEQ ID NO: 10017 - DNA, 20 bp, Artificial Sequence
  Synthetic oligonucleotide; AAG chr11 5237838 5237857 5237854 +
tttcagagcaggtaggagat

SEQ ID NO: 10018 - DNA, 20 bp, Artificial Sequence
  Synthetic oligonucleotide; AGG chr11 5237839 5237858 5237855 +
ttcagagcaggtaggagata

SEQ ID NO: 10019 - DNA, 20 bp, Artificial Sequence
  Synthetic oligonucleotide; TAG chr11 5237845 5237864 5237861 +
gcaggtaggagataaggttc

SEQ ID NO: 10020 - DNA, 20 bp, Artificial Sequence
  Synthetic oligonucleotide; CAG chr11 5237857 5237876 5237873 +
taaggttctagattttgaca

SEQ ID NO: 10021 - DNA, 20 bp, Artificial Sequence
  Synthetic oligonucleotide; AAG chr11 5237864 5237883 5237880 +
ctagattttgacacagtgaa

SEQ ID NO: 10022 - DNA, 20 bp, Artificial Sequence
  Synthetic oligonucleotide; AAG chr11 5237877 5237896 5237893 +
cagtgaaaagctgaaacaaa

SEQ ID NO: 10023 - DNA, 20 bp, Artificial Sequence
  Synthetic oligonucleotide; AGG chr11 5237878 5237897 5237894 +
agtgaaaagctgaaacaaaa

SEQ ID NO: 10024 - DNA, 20 bp, Artificial Sequence
  Synthetic oligonucleotide; AAG chr11 5237883 5237902 5237899 +
aaagctgaaacaaaaaggaa

SEQ ID NO: 10025 - DNA, 20 bp, Artificial Sequence
  Synthetic oligonucleotide; AGG chr11 5237884 5237903 5237900 +
aagctgaaacaaaaaggaaa

SEQ ID NO: 10026 - DNA, 20 bp, Artificial Sequence
  Synthetic oligonucleotide; TAG chr11 5237887 5237906 5237903 +
ctgaaacaaaaaggaaaagg

SEQ ID NO: 10027 - DNA, 20 bp, Artificial Sequence
  Synthetic oligonucleotide; AGG chr11 5237888 5237907 5237904 +
tgaaacaaaaaggaaaaggt

SEQ ID NO: 10028 - DNA, 20 bp, Artificial Sequence
  Synthetic oligonucleotide; GGG chr11 5237889 5237908 5237905 +
gaaacaaaaaggaaaaggta

SEQ ID NO: 10029 - DNA, 20 bp, Artificial Sequence
  Synthetic oligonucleotide; AAG chr11 5237895 5237914 5237911 +
aaaaggaaaaggtagggtga

SEQ ID NO: 10030 - DNA, 20 bp, Artificial Sequence
  Synthetic oligonucleotide; TGG chr11 5237899 5237918 5237915 +
ggaaaaggtagggtgaaaga

SEQ ID NO: 10031 - DNA, 20 bp, Artificial Sequence
  Synthetic oligonucleotide; GGG chr11 5237900 5237919 5237916 +
gaaaaggtagggtgaaagat

SEQ ID NO: 10032 - DNA, 20 bp, Artificial Sequence
  Synthetic oligonucleotide; AAG chr11 5237913 5237932 5237929 +
gaaagatgggaaatgtatgt

SEQ ID NO: 10033 - DNA, 20 bp, Artificial Sequence
  Synthetic oligonucleotide; AGG chr11 5237914 5237933 5237930 +
aaagatgggaaatgtatgta

SEQ ID NO: 10034 - DNA, 20 bp, Artificial Sequence
  Synthetic oligonucleotide; GAG chr11 5237916 5237935 5237932 +
agatgggaaatgtatgtaag

SEQ ID NO: 10035 - DNA, 20 bp, Artificial Sequence
  Synthetic oligonucleotide; AGG chr11 5237917 5237936 5237933 +
gatgggaaatgtatgtaagg

SEQ ID NO: 10036 - DNA, 20 bp, Artificial Sequence
  Synthetic oligonucleotide; GAG chr11 5237922 5237941 5237938 +
gaaatgtatgtaaggaggat

SEQ ID NO: 10037 - DNA, 20 bp, Artificial Sequence
  Synthetic oligonucleotide; TGG chr11 5237930 5237949 5237946 +
tgtaaggaggatgagccaca

SEQ ID NO: 10038 - DNA, 20 bp, Artificial Sequence
  Synthetic oligonucleotide; TGG chr11 5237935 5237954 5237951 +
ggaggatgagccacatggta

SEQ ID NO: 10039 - DNA, 20 bp, Artificial Sequence
  Synthetic oligonucleotide; GGG chr11 5237936 5237955 5237952 +
gaggatgagccacatggtat

SEQ ID NO: 10040 - DNA, 20 bp, Artificial Sequence
  Synthetic oligonucleotide; GAG chr11 5237938 5237957 5237954 +
ggatgagccacatggtatgg

SEQ ID NO: 10041 - DNA, 20 bp, Artificial Sequence
  Synthetic oligonucleotide; AGG chr11 5237939 5237958 5237955 +
gatgagccacatggtatggg

SEQ ID NO: 10042 - DNA, 20 bp, Artificial Sequence
  Synthetic oligonucleotide; AAG chr11 5237948 5237967 5237964 +
catggtatgggaggtatact

SEQ ID NO: 10043 - DNA, 20 bp, Artificial Sequence
  Synthetic oligonucleotide; AGG chr11 5237949 5237968 5237965 +
atggtatgggaggtatacta

SEQ ID NO: 10044 - DNA, 20 bp, Artificial Sequence
  Synthetic oligonucleotide; TAG chr11 5237956 5237975 5237972 +
gggaggtatactaaggactc

SEQ ID NO: 10045 - DNA, 20 bp, Artificial Sequence
  Synthetic oligonucleotide; AGG chr11 5237957 5237976 5237973 +
ggaggtatactaaggactct

SEQ ID NO: 10046 - DNA, 20 bp, Artificial Sequence
  Synthetic oligonucleotide; GGG chr11 5237958 5237977 5237974 +
gaggtatactaaggactcta

SEQ ID NO: 10047 - DNA, 20 bp, Artificial Sequence
  Synthetic oligonucleotide; CAG chr11 5237962 5237981 5237978 +
tatactaaggactctagggt

SEQ ID NO: 10048 - DNA, 20 bp, Artificial Sequence
  Synthetic oligonucleotide; GAG chr11 5237964 5237983 5237980 +
tactaaggactctagggtca

SEQ ID NO: 10049 - DNA, 20 bp, Artificial Sequence
  Synthetic oligonucleotide; TGG chr11 5237972 5237991 5237988 +
actctagggtcagagaaata

SEQ ID NO: 10050 - DNA, 20 bp, Artificial Sequence
  Synthetic oligonucleotide; GGG chr11 5237973 5237992 5237989 +
ctctagggtcagagaaatat

SEQ ID NO: 10051 - DNA, 20 bp, Artificial Sequence
  Synthetic oligonucleotide; TGG chr11 5238004 5238023 5238020 +
ttctacaaaattcacattct

SEQ ID NO: 10052 - DNA, 20 bp, Artificial Sequence
  Synthetic oligonucleotide; TGG chr11 5238008 5238027 5238024 +
acaaaattcacattcttggc

SEQ ID NO: 10053 - DNA, 20 bp, Artificial Sequence
  Synthetic oligonucleotide; GGG chr11 5238009 5238028 5238025 +
caaaattcacattcttggct

SEQ ID NO: 10054 - DNA, 20 bp, Artificial Sequence
  Synthetic oligonucleotide; TGG chr11 5238014 5238033 5238030 +
ttcacattcttggctgggtg

SEQ ID NO: 10055 - DNA, 20 bp, Artificial Sequence
  Synthetic oligonucleotide; TGG chr11 5238017 5238036 5238033 +
acattcttggctgggtgtgg

SEQ ID NO: 10056 - DNA, 20 bp, Artificial Sequence
  Synthetic oligonucleotide; CAG chr11 5238036 5238055 5238052 +
gtggctcacgcctgtgatcc

SEQ ID NO: 10057 - DNA, 20 bp, Artificial Sequence
  Synthetic oligonucleotide; CAG chr11 5238045 5238064 5238061 +
gcctgtgatcccagcacttt

SEQ ID NO: 10058 - DNA, 20 bp, Artificial Sequence
  Synthetic oligonucleotide; GAG chr11 5238047 5238066 5238063 +
ctgtgatcccagcactttca

SEQ ID NO: 10059 - DNA, 20 bp, Artificial Sequence
  Synthetic oligonucleotide; AGG chr11 5238048 5238067 5238064 +
tgtgatcccagcactttcag

SEQ ID NO: 10060 - DNA, 20 bp, Artificial Sequence
  Synthetic oligonucleotide; GAG chr11 5238053 5238072 5238069 +
tcccagcactttcagaggcc

SEQ ID NO: 10061 - DNA, 20 bp, Artificial Sequence
  Synthetic oligonucleotide; AGG chr11 5238054 5238073 5238070 +
cccagcactttcagaggccg

SEQ ID NO: 10062 - DNA, 20 bp, Artificial Sequence
  Synthetic oligonucleotide; GAG chr11 5238056 5238075 5238072 +
cagcactttcagaggccgag

SEQ ID NO: 10063 - DNA, 20 bp, Artificial Sequence
  Synthetic oligonucleotide; AGG chr11 5238057 5238076 5238073 +
agcactttcagaggccgagg

SEQ ID NO: 10064 - DNA, 20 bp, Artificial Sequence
  Synthetic oligonucleotide; GGG chr11 5238058 5238077 5238074 +
gcactttcagaggccgagga

SEQ ID NO: 10065 - DNA, 20 bp, Artificial Sequence
  Synthetic oligonucleotide; TGG chr11 5238061 5238080 5238077 +
ctttcagaggccgaggaggg

SEQ ID NO: 10066 - DNA, 20 bp, Artificial Sequence
  Synthetic oligonucleotide; TAG chr11 5238076 5238095 5238092 +
gagggtggatcacctgatgt

SEQ ID NO: 10067 - DNA, 20 bp, Artificial Sequence
  Synthetic oligonucleotide; AGG chr11 5238077 5238096 5238093 +
agggtggatcacctgatgtt

SEQ ID NO: 10068 - DNA, 20 bp, Artificial Sequence
  Synthetic oligonucleotide; GAG chr11 5238079 5238098 5238095 +
ggtggatcacctgatgttag

SEQ ID NO: 10069 - DNA, 20 bp, Artificial Sequence
  Synthetic oligonucleotide; GAG chr11 5238085 5238104 5238101 +
tcacctgatgttaggagttc

SEQ ID NO: 10070 - DNA, 20 bp, Artificial Sequence
  Synthetic oligonucleotide; CAG chr11 5238090 5238109 5238106 +
tgatgttaggagttcgagat

SEQ ID NO: 10071 - DNA, 20 bp, Artificial Sequence
  Synthetic oligonucleotide; TGG chr11 5238104 5238123 5238120 +
cgagatcagcctgaccaaca

SEQ ID NO: 10072 - DNA, 20 bp, Artificial Sequence
  Synthetic oligonucleotide; TAG chr11 5238130 5238149 5238146 +
aaccccctatctactaaaaa

SEQ ID NO: 10073 - DNA, 20 bp, Artificial Sequence
  Synthetic oligonucleotide; TAG chr11 5238138 5238157 5238154 +
atctactaaaaatagaaaat

SEQ ID NO: 10074 - DNA, 20 bp, Artificial Sequence
  Synthetic oligonucleotide; CAG chr11 5238142 5238161 5238158 +
actaaaaatagaaaattagc

SEQ ID NO: 10075 - DNA, 20 bp, Artificial Sequence
  Synthetic oligonucleotide; AGG chr11 5238143 5238162 5238159 +
ctaaaaatagaaaattagcc

SEQ ID NO: 10076 - DNA, 20 bp, Artificial Sequence
  Synthetic oligonucleotide; TGG chr11 5238148 5238167 5238164 +
aatagaaaattagccaggca

SEQ ID NO: 10077 - DNA, 20 bp, Artificial Sequence
  Synthetic oligonucleotide; TGG chr11 5238151 5238170 5238167 +
agaaaattagccaggcatgg

SEQ ID NO: 10078 - DNA, 20 bp, Artificial Sequence
  Synthetic oligonucleotide; TGG chr11 5238154 5238173 5238170 +
aaattagccaggcatggtgg

SEQ ID NO: 10079 - DNA, 20 bp, Artificial Sequence
  Synthetic oligonucleotide; TAG chr11 5238167 5238186 5238183 +
atggtggtggcacatgcctg

SEQ ID NO: 10080 - DNA, 20 bp, Artificial Sequence
  Synthetic oligonucleotide; CAG chr11 5238173 5238192 5238189 +
gtggcacatgcctgtagtgc

SEQ ID NO: 10081 - DNA, 20 bp, Artificial Sequence
  Synthetic oligonucleotide; TGG chr11 5238181 5238200 5238197 +
tgcctgtagtgccagctact

SEQ ID NO: 10082 - DNA, 20 bp, Artificial Sequence
  Synthetic oligonucleotide; GGG chr11 5238182 5238201 5238198 +
gcctgtagtgccagctactt

SEQ ID NO: 10083 - DNA, 20 bp, Artificial Sequence
  Synthetic oligonucleotide; GAG chr11 5238184 5238203 5238200 +
ctgtagtgccagctacttgg

SEQ ID NO: 10084 - DNA, 20 bp, Artificial Sequence
  Synthetic oligonucleotide; AGG chr11 5238185 5238204 5238201 +
tgtagtgccagctacttggg

SEQ ID NO: 10085 - DNA, 20 bp, Artificial Sequence
  Synthetic oligonucleotide; GAG chr11 5238190 5238209 5238206 +
tgccagctacttgggaggct

SEQ ID NO: 10086 - DNA, 20 bp, Artificial Sequence
  Synthetic oligonucleotide; AGG chr11 5238191 5238210 5238207 +
gccagctacttgggaggctg

SEQ ID NO: 10087 - DNA, 20 bp, Artificial Sequence
  Synthetic oligonucleotide; CAG chr11 5238194 5238213 5238210 +
agctacttgggaggctgagg

SEQ ID NO: 10088 - DNA, 20 bp, Artificial Sequence
  Synthetic oligonucleotide; AGG chr11 5238195 5238214 5238211 +
gctacttgggaggctgaggc

SEQ ID NO: 10089 - DNA, 20 bp, Artificial Sequence
  Synthetic oligonucleotide; GAG chr11 5238197 5238216 5238213 +
tacttgggaggctgaggcag

SEQ ID NO: 10090 - DNA, 20 bp, Artificial Sequence
  Synthetic oligonucleotide; TGG chr11 5238213 5238232 5238229 +
gcaggagaatcgcttgaacc

SEQ ID NO: 10091 - DNA, 20 bp, Artificial Sequence
  Synthetic oligonucleotide; GGG chr11 5238214 5238233 5238230 +
caggagaatcgcttgaacct

SEQ ID NO: 10092 - DNA, 20 bp, Artificial Sequence
  Synthetic oligonucleotide; GAG chr11 5238216 5238235 5238232 +
ggagaatcgcttgaacctgg

SEQ ID NO: 10093 - DNA, 20 bp, Artificial Sequence
  Synthetic oligonucleotide; AGG chr11 5238217 5238236 5238233 +
gagaatcgcttgaacctggg

SEQ ID NO: 10094 - DNA, 20 bp, Artificial Sequence
  Synthetic oligonucleotide; CAG chr11 5238220 5238239 5238236 +
aatcgcttgaacctgggagg

SEQ ID NO: 10095 - DNA, 20 bp, Artificial Sequence
  Synthetic oligonucleotide; CAG chr11 5238229 5238248 5238245 +
aacctgggaggcagatgttg

SEQ ID NO: 10096 - DNA, 20 bp, Artificial Sequence
  Synthetic oligonucleotide; GAG chr11 5238233 5238252 5238249 +
tgggaggcagatgttgcagt

SEQ ID NO: 10097 - DNA, 20 bp, Artificial Sequence
  Synthetic oligonucleotide; TGG chr11 5238238 5238257 5238254 +
ggcagatgttgcagtgagcc

SEQ ID NO: 10098 - DNA, 20 bp, Artificial Sequence
  Synthetic oligonucleotide; CAG chr11 5238258 5238277 5238274 +
tggatcatgccattgcactc

SEQ ID NO: 10099 - DNA, 20 bp, Artificial Sequence
  Synthetic oligonucleotide; TGG chr11 5238263 5238282 5238279 +
catgccattgcactccagcc

SEQ ID NO: 10100 - DNA, 20 bp, Artificial Sequence
  Synthetic oligonucleotide; GGG chr11 5238264 5238283 5238280 +
atgccattgcactccagcct

SEQ ID NO: 10101 - DNA, 20 bp, Artificial Sequence
  Synthetic oligonucleotide; TAG chr11 5238273 5238292 5238289 +
cactccagcctgggcaacca

SEQ ID NO: 10102 - DNA, 20 bp, Artificial Sequence
  Synthetic oligonucleotide; CAG chr11 5238289 5238308 5238305 +
accatagcaatgctctatct

SEQ ID NO: 10103 - DNA, 20 bp, Artificial Sequence
  Synthetic oligonucleotide; AAG chr11 5238305 5238324 5238321 +
atctcagaaaaaaaaaaaaa

SEQ ID NO: 10104 - DNA, 20 bp, Artificial Sequence
  Synthetic oligonucleotide; GAG chr11 5238338 5238357 5238354 +
cctgaaaaaataaattattt

SEQ ID NO: 10105 - DNA, 20 bp, Artificial Sequence
  Synthetic oligonucleotide; CAG chr11 5238364 5238383 5238380 +
tgtacctaattcataatttt

SEQ ID NO: 10106 - DNA, 20 bp, Artificial Sequence
  Synthetic oligonucleotide; GAG chr11 5238379 5238398 5238395 +
attttcagataatgaatatt

SEQ ID NO: 10107 - DNA, 20 bp, Artificial Sequence
  Synthetic oligonucleotide; CAG chr11 5238394 5238413 5238410 +
atattgagatgatatatgca

SEQ ID NO: 10108 - DNA, 20 bp, Artificial Sequence
  Synthetic oligonucleotide; TAG chr11 5238406 5238425 5238422 +
tatatgcacagaacaatgcc

SEQ ID NO: 10109 - DNA, 20 bp, Artificial Sequence
  Synthetic oligonucleotide; GAG chr11 5238408 5238427 5238424 +
tatgcacagaacaatgccta

SEQ ID NO: 10110 - DNA, 20 bp, Artificial Sequence
  Synthetic oligonucleotide; AAG chr11 5238420 5238439 5238436 +
aatgcctagagacacattct

SEQ ID NO: 10111 - DNA, 20 bp, Artificial Sequence
  Synthetic oligonucleotide; CAG chr11 5238441 5238460 5238457 +
agtgtgacattcttaaatgc

SEQ ID NO: 10112 - DNA, 20 bp, Artificial Sequence
  Synthetic oligonucleotide; CAG chr11 5238465 5238484 5238481 +
gctctccacaattctaatct

SEQ ID NO: 10113 - DNA, 20 bp, Artificial Sequence
  Synthetic oligonucleotide; TGG chr11 5238559 5238578 5238575 +
cactgtaattattcatttac

SEQ ID NO: 10114 - DNA, 20 bp, Artificial Sequence
  Synthetic oligonucleotide; TAG chr11 5238570 5238589 5238586 +
ttcatttactggacacatcc

SEQ ID NO: 10115 - DNA, 20 bp, Artificial Sequence
  Synthetic oligonucleotide; CAG chr11 5238631 5238650 5238647 +
tttatttctcatccttccct

SEQ ID NO: 10116 - DNA, 20 bp, Artificial Sequence
  Synthetic oligonucleotide; GAG chr11 5238648 5238667 5238664 +
cctcagtgttctctgtattt

SEQ ID NO: 10117 - DNA, 20 bp, Artificial Sequence
  Synthetic oligonucleotide; AGG chr11 5238649 5238668 5238665 +
ctcagtgttctctgtatttg

SEQ ID NO: 10118 - DNA, 20 bp, Artificial Sequence
  Synthetic oligonucleotide; CAG chr11 5238665 5238684 5238681 +
tttgaggaactgacatttcc

SEQ ID NO: 10119 - DNA, 20 bp, Artificial Sequence
  Synthetic oligonucleotide; AGG chr11 5238666 5238685 5238682 +
ttgaggaactgacatttccc

SEQ ID NO: 10120 - DNA, 20 bp, Artificial Sequence
  Synthetic oligonucleotide; CAG chr11 5238683 5238702 5238699 +
cccaggtttcctcacccttt

SEQ ID NO: 10121 - DNA, 20 bp, Artificial Sequence
  Synthetic oligonucleotide; TGG chr11 5238705 5238724 5238721 +
gtcgcatgtacattctgcaa

SEQ ID NO: 10122 - DNA, 20 bp, Artificial Sequence
  Synthetic oligonucleotide; TGG chr11 5238715 5238734 5238731 +
cattctgcaatggtaaacac

SEQ ID NO: 10123 - DNA, 20 bp, Artificial Sequence
  Synthetic oligonucleotide; GAG chr11 5238720 5238739 5238736 +
tgcaatggtaaacactggct

SEQ ID NO: 10124 - DNA, 20 bp, Artificial Sequence
  Synthetic oligonucleotide; AGG chr11 5238721 5238740 5238737 +
gcaatggtaaacactggctg

SEQ ID NO: 10125 - DNA, 20 bp, Artificial Sequence
  Synthetic oligonucleotide; GGG chr11 5238722 5238741 5238738 +
caatggtaaacactggctga

SEQ ID NO: 10126 - DNA, 20 bp, Artificial Sequence
  Synthetic oligonucleotide; AAG chr11 5238726 5238745 5238742 +
ggtaaacactggctgaggga

SEQ ID NO: 10127 - DNA, 20 bp, Artificial Sequence
  Synthetic oligonucleotide; AAG chr11 5238732 5238751 5238748 +
cactggctgagggaaagcat

SEQ ID NO: 10128 - DNA, 20 bp, Artificial Sequence
  Synthetic oligonucleotide; AAG chr11 5238736 5238755 5238752 +
ggctgagggaaagcataagc

SEQ ID NO: 10129 - DNA, 20 bp, Artificial Sequence
  Synthetic oligonucleotide; TGG chr11 5238747 5238766 5238763 +
agcataagcaagattatttc

SEQ ID NO: 10130 - DNA, 20 bp, Artificial Sequence
  Synthetic oligonucleotide; CGG chr11 5238768 5238787 5238784 +
ggtctctctctctctctgaa

SEQ ID NO: 10131 - DNA, 20 bp, Artificial Sequence
  Synthetic oligonucleotide; CAG chr11 5238779 5238798 5238795 +
ctctctgaacggatctccta

SEQ ID NO: 10132 - DNA, 20 bp, Artificial Sequence
  Synthetic oligonucleotide; CAG chr11 5238782 5238801 5238798 +
tctgaacggatctcctacag

SEQ ID NO: 10133 - DNA, 20 bp, Artificial Sequence
  Synthetic oligonucleotide; CAG chr11 5238786 5238805 5238802 +
aacggatctcctacagcaga

SEQ ID NO: 10134 - DNA, 20 bp, Artificial Sequence
  Synthetic oligonucleotide; TGG chr11 5238798 5238817 5238814 +
acagcagacagtctttttta

SEQ ID NO: 10135 - DNA, 20 bp, Artificial Sequence
  Synthetic oligonucleotide; TGG chr11 5238808 5238827 5238824 +
gtcttttttatggtttttta

SEQ ID NO: 10136 - DNA, 20 bp, Artificial Sequence
  Synthetic oligonucleotide; TAG chr11 5238832 5238851 5238848 +
tgatactttgatgcccccat

SEQ ID NO: 10137 - DNA, 20 bp, Artificial Sequence
  Synthetic oligonucleotide; CAG chr11 5238836 5238855 5238852 +
actttgatgcccccattaga

SEQ ID NO: 10138 - DNA, 20 bp, Artificial Sequence
  Synthetic oligonucleotide; TGG chr11 5238842 5238861 5238858 +
atgcccccattagacagttc

SEQ ID NO: 10139 - DNA, 20 bp, Artificial Sequence
  Synthetic oligonucleotide; AAG chr11 5238853 5238872 5238869 +
agacagttctggctctctcc

SEQ ID NO: 10140 - DNA, 20 bp, Artificial Sequence
  Synthetic oligonucleotide; AGG chr11 5238854 5238873 5238870 +
gacagttctggctctctcca

SEQ ID NO: 10141 - DNA, 20 bp, Artificial Sequence
  Synthetic oligonucleotide; GAG chr11 5238856 5238875 5238872 +
cagttctggctctctccaag

SEQ ID NO: 10142 - DNA, 20 bp, Artificial Sequence
  Synthetic oligonucleotide; TAG chr11 5238866 5238885 5238882 +
tctctccaaggagcacccac

SEQ ID NO: 10143 - DNA, 20 bp, Artificial Sequence
  Synthetic oligonucleotide; CAG chr11 5238880 5238899 5238896 +
acccactagctcactgaatc

SEQ ID NO: 10144 - DNA, 20 bp, Artificial Sequence
  Synthetic oligonucleotide; TGG chr11 5238883 5238902 5238899 +
cactagctcactgaatccag

SEQ ID NO: 10145 - DNA, 20 bp, Artificial Sequence
  Synthetic oligonucleotide; TGG chr11 5238891 5238910 5238907 +
cactgaatccagtggacctc

SEQ ID NO: 10146 - DNA, 20 bp, Artificial Sequence
  Synthetic oligonucleotide; TGG chr11 5238897 5238916 5238913 +
atccagtggacctctggtta

SEQ ID NO: 10147 - DNA, 20 bp, Artificial Sequence
  Synthetic oligonucleotide; GGG chr11 5238898 5238917 5238914 +
tccagtggacctctggttat

SEQ ID NO: 10148 - DNA, 20 bp, Artificial Sequence
  Synthetic oligonucleotide; TGG chr11 5238904 5238923 5238920 +
ggacctctggttatgggctc

SEQ ID NO: 10149 - DNA, 20 bp, Artificial Sequence
  Synthetic oligonucleotide; TGG chr11 5238910 5238929 5238926 +
ctggttatgggctctggttc

SEQ ID NO: 10150 - DNA, 20 bp, Artificial Sequence
  Synthetic oligonucleotide; TGG chr11 5238917 5238936 5238933 +
tgggctctggttctggactc

SEQ ID NO: 10151 - DNA, 20 bp, Artificial Sequence
  Synthetic oligonucleotide; TGG chr11 5238920 5238939 5238936 +
gctctggttctggactctgg

SEQ ID NO: 10152 - DNA, 20 bp, Artificial Sequence
  Synthetic oligonucleotide; TAG chr11 5238950 5238969 5238966 +
attttctccttctgcccttc

SEQ ID NO: 10153 - DNA, 20 bp, Artificial Sequence
  Synthetic oligonucleotide; AGG chr11 5238951 5238970 5238967 +
ttttctccttctgcccttct

SEQ ID NO: 10154 - DNA, 20 bp, Artificial Sequence
  Synthetic oligonucleotide; TGG chr11 5238959 5238978 5238975 +
ttctgcccttctaggcctaa

SEQ ID NO: 10155 - DNA, 20 bp, Artificial Sequence
  Synthetic oligonucleotide; CGG chr11 5238962 5238981 5238978 +
tgcccttctaggcctaatgg

SEQ ID NO: 10156 - DNA, 20 bp, Artificial Sequence
  Synthetic oligonucleotide; AAG chr11 5238965 5238984 5238981 +
ccttctaggcctaatggcgg

SEQ ID NO: 10157 - DNA, 20 bp, Artificial Sequence
  Synthetic oligonucleotide; GAG chr11 5238967 5238986 5238983 +
ttctaggcctaatggcggaa

SEQ ID NO: 10158 - DNA, 20 bp, Artificial Sequence
  Synthetic oligonucleotide; AGG chr11 5238968 5238987 5238984 +
tctaggcctaatggcggaag

SEQ ID NO: 10159 - DNA, 20 bp, Artificial Sequence
  Synthetic oligonucleotide; TAG chr11 5238992 5239011 5239008 +
tttctgatgttactaacatc

SEQ ID NO: 10160 - DNA, 20 bp, Artificial Sequence
  Synthetic oligonucleotide; TAG chr11 5239024 5239043 5239040 +
ctgtcctttatttgatattt

SEQ ID NO: 10161 - DNA, 20 bp, Artificial Sequence
  Synthetic oligonucleotide; AAG chr11 5239039 5239058 5239055 +
tattttagctcttccaatac

SEQ ID NO: 10162 - DNA, 20 bp, Artificial Sequence
  Synthetic oligonucleotide; AGG chr11 5239040 5239059 5239056 +
attttagctcttccaataca

SEQ ID NO: 10163 - DNA, 20 bp, Artificial Sequence
  Synthetic oligonucleotide; AAG chr11 5239056 5239075 5239072 +
tacaaggataattaactatt

SEQ ID NO: 10164 - DNA, 20 bp, Artificial Sequence
  Synthetic oligonucleotide; GAG chr11 5239058 5239077 5239074 +
caaggataattaactattaa

SEQ ID NO: 10165 - DNA, 20 bp, Artificial Sequence
  Synthetic oligonucleotide; TAG chr11 5239074 5239093 5239090 +
ttaagagctgtatttaattc

SEQ ID NO: 10166 - DNA, 20 bp, Artificial Sequence
  Synthetic oligonucleotide; AGG chr11 5239075 5239094 5239091 +
taagagctgtatttaattct

SEQ ID NO: 10167 - DNA, 20 bp, Artificial Sequence
  Synthetic oligonucleotide; GAG chr11 5239080 5239099 5239096 +
gctgtatttaattctaggtt

SEQ ID NO: 10168 - DNA, 20 bp, Artificial Sequence
  Synthetic oligonucleotide; TGG chr11 5239093 5239112 5239109 +
ctaggttgagtaactgataa

SEQ ID NO: 10169 - DNA, 20 bp, Artificial Sequence
  Synthetic oligonucleotide; TGG chr11 5239112 5239131 5239128 +
atggtttgtcctttccttga

SEQ ID NO: 10170 - DNA, 20 bp, Artificial Sequence
  Synthetic oligonucleotide; TAG chr11 5239163 5239182 5239179 +
cttctgatactatgtcttat

SEQ ID NO: 10171 - DNA, 20 bp, Artificial Sequence
  Synthetic oligonucleotide; TAG chr11 5239224 5239243 5239240 +
cttgttgactaatcaaacta

SEQ ID NO: 10172 - DNA, 20 bp, Artificial Sequence
  Synthetic oligonucleotide; CAG chr11 5239227 5239246 5239243 +
gttgactaatcaaactatag

SEQ ID NO: 10173 - DNA, 20 bp, Artificial Sequence
  Synthetic oligonucleotide; GAG chr11 5239229 5239248 5239245 +
tgactaatcaaactatagca

SEQ ID NO: 10174 - DNA, 20 bp, Artificial Sequence
  Synthetic oligonucleotide; AGG chr11 5239230 5239249 5239246 +
gactaatcaaactatagcag

SEQ ID NO: 10175 - DNA, 20 bp, Artificial Sequence
  Synthetic oligonucleotide; CAG chr11 5239233 5239252 5239249 +
taatcaaactatagcagagg

SEQ ID NO: 10176 - DNA, 20 bp, Artificial Sequence
  Synthetic oligonucleotide; GAG chr11 5239235 5239254 5239251 +
atcaaactatagcagaggca

SEQ ID NO: 10177 - DNA, 20 bp, Artificial Sequence
  Synthetic oligonucleotide; AGG chr11 5239236 5239255 5239252 +
tcaaactatagcagaggcag

SEQ ID NO: 10178 - DNA, 20 bp, Artificial Sequence
  Synthetic oligonucleotide; AAG chr11 5239239 5239258 5239255 +
aactatagcagaggcagagg

SEQ ID NO: 10179 - DNA, 20 bp, Artificial Sequence
  Synthetic oligonucleotide; AGG chr11 5239240 5239259 5239256 +
actatagcagaggcagagga

SEQ ID NO: 10180 - DNA, 20 bp, Artificial Sequence
  Synthetic oligonucleotide; AAG chr11 5239265 5239284 5239281 +
cctcatgacctataaatact

SEQ ID NO: 10181 - DNA, 20 bp, Artificial Sequence
  Synthetic oligonucleotide; TAG chr11 5239276 5239295 5239292 +
ataaatactaagatatcaca

SEQ ID NO: 10182 - DNA, 20 bp, Artificial Sequence
  Synthetic oligonucleotide; TAG chr11 5239285 5239304 5239301 +
aagatatcacatagtcattt

SEQ ID NO: 10183 - DNA, 20 bp, Artificial Sequence
  Synthetic oligonucleotide; AAG chr11 5239293 5239312 5239309 +
acatagtcattttagaacca

SEQ ID NO: 10184 - DNA, 20 bp, Artificial Sequence
  Synthetic oligonucleotide; AGG chr11 5239294 5239313 5239310 +
catagtcattttagaaccaa

SEQ ID NO: 10185 - DNA, 20 bp, Artificial Sequence
  Synthetic oligonucleotide; CAG chr11 5239302 5239321 5239318 +
ttttagaaccaaaggttcct

SEQ ID NO: 10186 - DNA, 20 bp, Artificial Sequence
  Synthetic oligonucleotide; TAG chr11 5239307 5239326 5239323 +
gaaccaaaggttcctcagtt

SEQ ID NO: 10187 - DNA, 20 bp, Artificial Sequence
  Synthetic oligonucleotide; AGG chr11 5239308 5239327 5239324 +
aaccaaaggttcctcagttt

SEQ ID NO: 10188 - DNA, 20 bp, Artificial Sequence
  Synthetic oligonucleotide; TGG chr11 5239330 5239349 5239346 +
gtctcaaacaaacttctcta

SEQ ID NO: 10189 - DNA, 20 bp, Artificial Sequence
  Synthetic oligonucleotide; TAG chr11 5239334 5239353 5239350 +
caaacaaacttctctatgga

SEQ ID NO: 10190 - DNA, 20 bp, Artificial Sequence
  Synthetic oligonucleotide; TAG chr11 5239353 5239372 5239369 +
atagtgtaatactcataatg

SEQ ID NO: 10191 - DNA, 20 bp, Artificial Sequence
  Synthetic oligonucleotide; AAG chr11 5239358 5239377 5239374 +
gtaatactcataatgtagaa

SEQ ID NO: 10192 - DNA, 20 bp, Artificial Sequence
  Synthetic oligonucleotide; GAG chr11 5239360 5239379 5239376 +
aatactcataatgtagaaaa

SEQ ID NO: 10193 - DNA, 20 bp, Artificial Sequence
  Synthetic oligonucleotide; GAG chr11 5239362 5239381 5239378 +
tactcataatgtagaaaaga

SEQ ID NO: 10194 - DNA, 20 bp, Artificial Sequence
  Synthetic oligonucleotide; TGG chr11 5239374 5239393 5239390 +
agaaaagagagatctaattt

SEQ ID NO: 10195 - DNA, 20 bp, Artificial Sequence
  Synthetic oligonucleotide; TAG chr11 5239409 5239428 5239425 +
tttttttcatctccaaatac

SEQ ID NO: 10196 - DNA, 20 bp, Artificial Sequence
  Synthetic oligonucleotide; AGG chr11 5239410 5239429 5239426 +
ttttttcatctccaaatact

SEQ ID NO: 10197 - DNA, 20 bp, Artificial Sequence
  Synthetic oligonucleotide; GGG chr11 5239411 5239430 5239427 +
tttttcatctccaaatacta

SEQ ID NO: 10198 - DNA, 20 bp, Artificial Sequence
  Synthetic oligonucleotide; AAG chr11 5239418 5239437 5239434 +
tctccaaatactagggaaat

SEQ ID NO: 10199 - DNA, 20 bp, Artificial Sequence
  Synthetic oligonucleotide; GAG chr11 5239420 5239439 5239436 +
tccaaatactagggaaataa

SEQ ID NO: 10200 - DNA, 20 bp, Artificial Sequence
  Synthetic oligonucleotide; AAG chr11 5239428 5239447 5239444 +
ctagggaaataagagtttac

SEQ ID NO: 10201 - DNA, 20 bp, Artificial Sequence
  Synthetic oligonucleotide; AAG chr11 5239449 5239468 5239465 +
agacaatgtctctaccataa

SEQ ID NO: 10202 - DNA, 20 bp, Artificial Sequence
  Synthetic oligonucleotide; GAG chr11 5239451 5239470 5239467 +
acaatgtctctaccataaaa

SEQ ID NO: 10203 - DNA, 20 bp, Artificial Sequence
  Synthetic oligonucleotide; AGG chr11 5239452 5239471 5239468 +
caatgtctctaccataaaag

SEQ ID NO: 10204 - DNA, 20 bp, Artificial Sequence
  Synthetic oligonucleotide; TAG chr11 5239463 5239482 5239479 +
ccataaaagaggttaaaatt

SEQ ID NO: 10205 - DNA, 20 bp, Artificial Sequence
  Synthetic oligonucleotide; TGG chr11 5239466 5239485 5239482 +
taaaagaggttaaaatttag

SEQ ID NO: 10206 - DNA, 20 bp, Artificial Sequence
  Synthetic oligonucleotide; TAG chr11 5239469 5239488 5239485 +
aagaggttaaaatttagtgg

SEQ ID NO: 10207 - DNA, 20 bp, Artificial Sequence
  Synthetic oligonucleotide; AGG chr11 5239470 5239489 5239486 +
agaggttaaaatttagtggt

SEQ ID NO: 10208 - DNA, 20 bp, Artificial Sequence
  Synthetic oligonucleotide; GAG chr11 5239483 5239502 5239499 +
tagtggtaggaatatacaat

SEQ ID NO: 10209 - DNA, 20 bp, Artificial Sequence
  Synthetic oligonucleotide; CAG chr11 5239486 5239505 5239502 +
tggtaggaatatacaatgag

SEQ ID NO: 10210 - DNA, 20 bp, Artificial Sequence
  Synthetic oligonucleotide; AAG chr11 5239492 5239511 5239508 +
gaatatacaatgagcagatt

SEQ ID NO: 10211 - DNA, 20 bp, Artificial Sequence
  Synthetic oligonucleotide; TAG chr11 5239500 5239519 5239516 +
aatgagcagattaagtacat

SEQ ID NO: 10212 - DNA, 20 bp, Artificial Sequence
  Synthetic oligonucleotide; TAG chr11 5239503 5239522 5239519 +
gagcagattaagtacattag

SEQ ID NO: 10213 - DNA, 20 bp, Artificial Sequence
  Synthetic oligonucleotide; AGG chr11 5239504 5239523 5239520 +
agcagattaagtacattagt

SEQ ID NO: 10214 - DNA, 20 bp, Artificial Sequence
  Synthetic oligonucleotide; AAG chr11 5239525 5239544 5239541 +
ggaaaaacactaaatattat

SEQ ID NO: 10215 - DNA, 20 bp, Artificial Sequence
  Synthetic oligonucleotide; AAG chr11 5239529 5239548 5239545 +
aaacactaaatattataaga

SEQ ID NO: 10216 - DNA, 20 bp, Artificial Sequence
  Synthetic oligonucleotide; GAG chr11 5239531 5239550 5239547 +
acactaaatattataagaaa

SEQ ID NO: 10217 - DNA, 20 bp, Artificial Sequence
  Synthetic oligonucleotide; TAG chr11 5239544 5239563 5239560 +
taagaaagagcccataattg

SEQ ID NO: 10218 - DNA, 20 bp, Artificial Sequence
  Synthetic oligonucleotide; CAG chr11 5239547 5239566 5239563 +
gaaagagcccataattgtag

SEQ ID NO: 10219 - DNA, 20 bp, Artificial Sequence
  Synthetic oligonucleotide; GAG chr11 5239549 5239568 5239565 +
aagagcccataattgtagca

SEQ ID NO: 10220 - DNA, 20 bp, Artificial Sequence
  Synthetic oligonucleotide; TAG chr11 5239556 5239575 5239572 +
cataattgtagcagagttta

SEQ ID NO: 10221 - DNA, 20 bp, Artificial Sequence
  Synthetic oligonucleotide; CAG chr11 5239560 5239579 5239576 +
attgtagcagagtttataga

SEQ ID NO: 10222 - DNA, 20 bp, Artificial Sequence
  Synthetic oligonucleotide; AGG chr11 5239561 5239580 5239577 +
ttgtagcagagtttatagac

SEQ ID NO: 10223 - DNA, 20 bp, Artificial Sequence
  Synthetic oligonucleotide; GGG chr11 5239562 5239581 5239578 +
tgtagcagagtttatagaca

SEQ ID NO: 10224 - DNA, 20 bp, Artificial Sequence
  Synthetic oligonucleotide; AAG chr11 5239569 5239588 5239585 +
gagtttatagacagggcttt

SEQ ID NO: 10225 - DNA, 20 bp, Artificial Sequence
  Synthetic oligonucleotide; CAG chr11 5239574 5239593 5239590 +
tatagacagggctttaagcc

SEQ ID NO: 10226 - DNA, 20 bp, Artificial Sequence
  Synthetic oligonucleotide; TAG chr11 5239594 5239613 5239610 +
cagttaaaattaaaaaaaaa

SEQ ID NO: 10227 - DNA, 20 bp, Artificial Sequence
  Synthetic oligonucleotide; TAG chr11 5239602 5239621 5239618 +
attaaaaaaaaatagcttct

SEQ ID NO: 10228 - DNA, 20 bp, Artificial Sequence
  Synthetic oligonucleotide; GAG chr11 5239607 5239626 5239623 +
aaaaaaatagcttcttagtt

SEQ ID NO: 10229 - DNA, 20 bp, Artificial Sequence
  Synthetic oligonucleotide; AAG chr11 5239619 5239638 5239635 +
tcttagttgagataacatat

SEQ ID NO: 10230 - DNA, 20 bp, Artificial Sequence
  Synthetic oligonucleotide; TAG chr11 5239623 5239642 5239639 +
agttgagataacatataagt

SEQ ID NO: 10231 - DNA, 20 bp, Artificial Sequence
  Synthetic oligonucleotide; AGG chr11 5239624 5239643 5239640 +
gttgagataacatataagtt

SEQ ID NO: 10232 - DNA, 20 bp, Artificial Sequence
  Synthetic oligonucleotide; AAG chr11 5239632 5239651 5239648 +
aacatataagttaggactta

SEQ ID NO: 10233 - DNA, 20 bp, Artificial Sequence
  Synthetic oligonucleotide; GAG chr11 5239638 5239657 5239654 +
taagttaggacttaaagtat

SEQ ID NO: 10234 - DNA, 20 bp, Artificial Sequence
  Synthetic oligonucleotide; AAG chr11 5239644 5239663 5239660 +
aggacttaaagtatgagtac

SEQ ID NO: 10235 - DNA, 20 bp, Artificial Sequence
  Synthetic oligonucleotide; TAG chr11 5239648 5239667 5239664 +
cttaaagtatgagtacaaga

SEQ ID NO: 10236 - DNA, 20 bp, Artificial Sequence
  Synthetic oligonucleotide; AAG chr11 5239653 5239672 5239669 +
agtatgagtacaagatagac

SEQ ID NO: 10237 - DNA, 20 bp, Artificial Sequence
  Synthetic oligonucleotide; AGG chr11 5239654 5239673 5239670 +
gtatgagtacaagatagaca

SEQ ID NO: 10238 - DNA, 20 bp, Artificial Sequence
  Synthetic oligonucleotide; GAG chr11 5239663 5239682 5239679 +
caagatagacaaggcaaaat

SEQ ID NO: 10239 - DNA, 20 bp, Artificial Sequence
  Synthetic oligonucleotide; AGG chr11 5239664 5239683 5239680 +
aagatagacaaggcaaaatg

SEQ ID NO: 10240 - DNA, 20 bp, Artificial Sequence
  Synthetic oligonucleotide; GGG chr11 5239665 5239684 5239681 +
agatagacaaggcaaaatga

SEQ ID NO: 10241 - DNA, 20 bp, Artificial Sequence
  Synthetic oligonucleotide; AAG chr11 5239669 5239688 5239685 +
agacaaggcaaaatgaggga

SEQ ID NO: 10242 - DNA, 20 bp, Artificial Sequence
  Synthetic oligonucleotide; CAG chr11 5239680 5239699 5239696 +
aatgagggaaagacatcacc

SEQ ID NO: 10243 - DNA, 20 bp, Artificial Sequence
  Synthetic oligonucleotide; GAG chr11 5239682 5239701 5239698 +
tgagggaaagacatcaccca

SEQ ID NO: 10244 - DNA, 20 bp, Artificial Sequence
  Synthetic oligonucleotide; CAG chr11 5239693 5239712 5239709 +
catcacccagagtaaatgaa

SEQ ID NO: 10245 - DNA, 20 bp, Artificial Sequence
  Synthetic oligonucleotide; AAG chr11 5239704 5239723 5239720 +
gtaaatgaacagcatgtaca

SEQ ID NO: 10246 - DNA, 20 bp, Artificial Sequence
  Synthetic oligonucleotide; CAG chr11 5239711 5239730 5239727 +
aacagcatgtacaaagctaa

SEQ ID NO: 10247 - DNA, 20 bp, Artificial Sequence
  Synthetic oligonucleotide; GAG chr11 5239713 5239732 5239729 +
cagcatgtacaaagctaaca

SEQ ID NO: 10248 - DNA, 20 bp, Artificial Sequence
  Synthetic oligonucleotide; CAG chr11 5239723 5239742 5239739 +
aaagctaacagagtcaaatg

SEQ ID NO: 10249 - DNA, 20 bp, Artificial Sequence
  Synthetic oligonucleotide; TAG chr11 5239740 5239759 5239756 +
atgcagaaatccaaattctc

SEQ ID NO: 10250 - DNA, 20 bp, Artificial Sequence
  Synthetic oligonucleotide; TGG chr11 5239749 5239768 5239765 +
tccaaattctctagattgac

SEQ ID NO: 10251 - DNA, 20 bp, Artificial Sequence
  Synthetic oligonucleotide; GGG chr11 5239750 5239769 5239766 +
ccaaattctctagattgact

SEQ ID NO: 10252 - DNA, 20 bp, Artificial Sequence
  Synthetic oligonucleotide; GGG chr11 5239751 5239770 5239767 +
caaattctctagattgactg

SEQ ID NO: 10253 - DNA, 20 bp, Artificial Sequence
  Synthetic oligonucleotide; AAG chr11 5239773 5239792 5239789 +
gtaattttgtcaatgcactc

SEQ ID NO: 10254 - DNA, 20 bp, Artificial Sequence
  Synthetic oligonucleotide; CAG chr11 5239789 5239808 5239805 +
actcaagtatgcatctgtaa

SEQ ID NO: 10255 - DNA, 20 bp, Artificial Sequence
  Synthetic oligonucleotide; TGG chr11 5239812 5239831 5239828 +
tgtgtgttcttatgtgtgca

SEQ ID NO: 10256 - DNA, 20 bp, Artificial Sequence
  Synthetic oligonucleotide; TGG chr11 5239827 5239846 5239843 +
gtgcatggaatgtttgttca

SEQ ID NO: 10257 - DNA, 20 bp, Artificial Sequence
  Synthetic oligonucleotide; GAG chr11 5239829 5239848 5239845 +
gcatggaatgtttgttcatg

SEQ ID NO: 10258 - DNA, 20 bp, Artificial Sequence
  Synthetic oligonucleotide; AAG chr11 5239835 5239854 5239851 +
aatgtttgttcatggagcat

SEQ ID NO: 10259 - DNA, 20 bp, Artificial Sequence
  Synthetic oligonucleotide; TAG chr11 5239846 5239865 5239862 +
atggagcataagaaattgtg

SEQ ID NO: 10260 - DNA, 20 bp, Artificial Sequence
  Synthetic oligonucleotide; TAG chr11 5239854 5239873 5239870 +
taagaaattgtgtagacata

SEQ ID NO: 10261 - DNA, 20 bp, Artificial Sequence
  Synthetic oligonucleotide; CAG chr11 5239877 5239896 5239893 +
acacatctgtatgtgtatat

SEQ ID NO: 10262 - DNA, 20 bp, Artificial Sequence
  Synthetic oligonucleotide; GAG chr11 5239879 5239898 5239895 +
acatctgtatgtgtatatca

SEQ ID NO: 10263 - DNA, 20 bp, Artificial Sequence
  Synthetic oligonucleotide; AAG chr11 5239899 5239918 5239915 +
gagaatgtttacattgctac

SEQ ID NO: 10264 - DNA, 20 bp, Artificial Sequence
  Synthetic oligonucleotide; AAG chr11 5239923 5239942 5239939 +
ttttatatgactacatgcac

SEQ ID NO: 10265 - DNA, 20 bp, Artificial Sequence
  Synthetic oligonucleotide; CAG chr11 5239942 5239961 5239958 +
caagcattcatgctacatgt

SEQ ID NO: 10266 - DNA, 20 bp, Artificial Sequence
  Synthetic oligonucleotide; TGG chr11 5239947 5239966 5239963 +
attcatgctacatgtcagtt

SEQ ID NO: 10267 - DNA, 20 bp, Artificial Sequence
  Synthetic oligonucleotide; AAG chr11 5239964 5239983 5239980 +
gtttggtatatttttcctgt

SEQ ID NO: 10268 - DNA, 20 bp, Artificial Sequence
  Synthetic oligonucleotide; AAG chr11 5239992 5240011 5240008 +
tacttatgtgttttccacta

SEQ ID NO: 10269 - DNA, 20 bp, Artificial Sequence
  Synthetic oligonucleotide; AGG chr11 5239993 5240012 5240009 +
acttatgtgttttccactaa

SEQ ID NO: 10270 - DNA, 20 bp, Artificial Sequence
  Synthetic oligonucleotide; GAG chr11 5240017 5240036 5240033 +
gaatgtgaaaactcctcatc

SEQ ID NO: 10271 - DNA, 20 bp, Artificial Sequence
  Synthetic oligonucleotide; AAG chr11 5240031 5240050 5240047 +
ctcatcgagaaatgaacaat

SEQ ID NO: 10272 - DNA, 20 bp, Artificial Sequence
  Synthetic oligonucleotide; CAG chr11 5240039 5240058 5240055 +
gaaatgaacaataagtaaca

SEQ ID NO: 10273 - DNA, 20 bp, Artificial Sequence
  Synthetic oligonucleotide; AGG chr11 5240040 5240059 5240056 +
aaatgaacaataagtaacac

SEQ ID NO: 10274 - DNA, 20 bp, Artificial Sequence
  Synthetic oligonucleotide; CAG chr11 5240074 5240093 5240090 +
tcatctcttcatttaaaata

SEQ ID NO: 10275 - DNA, 20 bp, Artificial Sequence
  Synthetic oligonucleotide; GAG chr11 5240076 5240095 5240092 +
atctcttcatttaaaataca

SEQ ID NO: 10276 - DNA, 20 bp, Artificial Sequence
  Synthetic oligonucleotide; CAG chr11 5240086 5240105 5240102 +
ttaaaatacagagtgacatt

SEQ ID NO: 10277 - DNA, 20 bp, Artificial Sequence
  Synthetic oligonucleotide; AAG chr11 5240089 5240108 5240105 +
aaatacagagtgacattcag

SEQ ID NO: 10278 - DNA, 20 bp, Artificial Sequence
  Synthetic oligonucleotide; AGG chr11 5240090 5240109 5240106 +
aatacagagtgacattcaga

SEQ ID NO: 10279 - DNA, 20 bp, Artificial Sequence
  Synthetic oligonucleotide; GGG chr11 5240091 5240110 5240107 +
atacagagtgacattcagaa

SEQ ID NO: 10280 - DNA, 20 bp, Artificial Sequence
  Synthetic oligonucleotide; AAG chr11 5240095 5240114 5240111 +
agagtgacattcagaagggc

SEQ ID NO: 10281 - DNA, 20 bp, Artificial Sequence
  Synthetic oligonucleotide; AGG chr11 5240096 5240115 5240112 +
gagtgacattcagaagggca

SEQ ID NO: 10282 - DNA, 20 bp, Artificial Sequence
  Synthetic oligonucleotide; GGG chr11 5240097 5240116 5240113 +
agtgacattcagaagggcaa

SEQ ID NO: 10283 - DNA, 20 bp, Artificial Sequence
  Synthetic oligonucleotide; TAG chr11 5240101 5240120 5240117 +
acattcagaagggcaaggga

SEQ ID NO: 10284 - DNA, 20 bp, Artificial Sequence
  Synthetic oligonucleotide; AAG chr11 5240107 5240126 5240123 +
agaagggcaagggatagcac

SEQ ID NO: 10285 - DNA, 20 bp, Artificial Sequence
  Synthetic oligonucleotide; GAG chr11 5240113 5240132 5240129 +
gcaagggatagcacaagtgt

SEQ ID NO: 10286 - DNA, 20 bp, Artificial Sequence
  Synthetic oligonucleotide; AAG chr11 5240122 5240141 5240138 +
agcacaagtgtgagatttta

SEQ ID NO: 10287 - DNA, 20 bp, Artificial Sequence
  Synthetic oligonucleotide; TGG chr11 5240135 5240154 5240151 +
gattttaaagtgtgattgtt

SEQ ID NO: 10288 - DNA, 20 bp, Artificial Sequence
  Synthetic oligonucleotide; CAG chr11 5240141 5240160 5240157 +
aaagtgtgattgtttggaca

SEQ ID NO: 10289 - DNA, 20 bp, Artificial Sequence
  Synthetic oligonucleotide; AAG chr11 5240154 5240173 5240170 +
ttggacacagtaattattca

SEQ ID NO: 10290 - DNA, 20 bp, Artificial Sequence
  Synthetic oligonucleotide; AAG chr11 5240182 5240201 5240198 +
gcttaattaatgtatgctac

SEQ ID NO: 10291 - DNA, 20 bp, Artificial Sequence
  Synthetic oligonucleotide; CAG chr11 5240186 5240205 5240202 +
aattaatgtatgctacaaga

SEQ ID NO: 10292 - DNA, 20 bp, Artificial Sequence
  Synthetic oligonucleotide; CAG chr11 5240189 5240208 5240205 +
taatgtatgctacaagacag

SEQ ID NO: 10293 - DNA, 20 bp, Artificial Sequence
  Synthetic oligonucleotide; GAG chr11 5240194 5240213 5240210 +
tatgctacaagacagcagtt

SEQ ID NO: 10294 - DNA, 20 bp, Artificial Sequence
  Synthetic oligonucleotide; GAG chr11 5240211 5240230 5240227 +
gttgagtgattattgtacat

SEQ ID NO: 10295 - DNA, 20 bp, Artificial Sequence
  Synthetic oligonucleotide; TGG chr11 5240218 5240237 5240234 +
gattattgtacatgagcaac

SEQ ID NO: 10296 - DNA, 20 bp, Artificial Sequence
  Synthetic oligonucleotide; TGG chr11 5240237 5240256 5240253 +
ctggtatttattctgctttg

SEQ ID NO: 10297 - DNA, 20 bp, Artificial Sequence
  Synthetic oligonucleotide; GGG chr11 5240238 5240257 5240254 +
tggtatttattctgctttgt

SEQ ID NO: 10298 - DNA, 20 bp, Artificial Sequence
  Synthetic oligonucleotide; TAG chr11 5240245 5240264 5240261 +
tattctgctttgtgggttat

SEQ ID NO: 10299 - DNA, 20 bp, Artificial Sequence
  Synthetic oligonucleotide; TGG chr11 5240248 5240267 5240264 +
tctgctttgtgggttattag

SEQ ID NO: 10300 - DNA, 20 bp, Artificial Sequence
  Synthetic oligonucleotide; GGG chr11 5240249 5240268 5240265 +
ctgctttgtgggttattagt

SEQ ID NO: 10301 - DNA, 20 bp, Artificial Sequence
  Synthetic oligonucleotide; GGG chr11 5240250 5240269 5240266 +
tgctttgtgggttattagtg

SEQ ID NO: 10302 - DNA, 20 bp, Artificial Sequence
  Synthetic oligonucleotide; AAG chr11 5240269 5240288 5240285 +
ggggactcaaaaatatgaca

SEQ ID NO: 10303 - DNA, 20 bp, Artificial Sequence
  Synthetic oligonucleotide; AGG chr11 5240270 5240289 5240286 +
gggactcaaaaatatgacaa

SEQ ID NO: 10304 - DNA, 20 bp, Artificial Sequence
  Synthetic oligonucleotide; CAG chr11 5240278 5240297 5240294 +
aaaatatgacaaaggaattt

SEQ ID NO: 10305 - DNA, 20 bp, Artificial Sequence
  Synthetic oligonucleotide; AAG chr11 5240281 5240300 5240297 +
atatgacaaaggaatttcag

SEQ ID NO: 10306 - DNA, 20 bp, Artificial Sequence
  Synthetic oligonucleotide; TAG chr11 5240288 5240307 5240304 +
aaaggaatttcagaagctgt

SEQ ID NO: 10307 - DNA, 20 bp, Artificial Sequence
  Synthetic oligonucleotide; TGG chr11 5240292 5240311 5240308 +
gaatttcagaagctgttaga

SEQ ID NO: 10308 - DNA, 20 bp, Artificial Sequence
  Synthetic oligonucleotide; TAG chr11 5240295 5240314 5240311 +
tttcagaagctgttagatgg

SEQ ID NO: 10309 - DNA, 20 bp, Artificial Sequence
  Synthetic oligonucleotide; AAG chr11 5240324 5240343 5240340 +
ctatctatgtgctcccactc

SEQ ID NO: 10310 - DNA, 20 bp, Artificial Sequence
  Synthetic oligonucleotide; GAG chr11 5240326 5240345 5240342 +
atctatgtgctcccactcaa

SEQ ID NO: 10311 - DNA, 20 bp, Artificial Sequence
  Synthetic oligonucleotide; TGG chr11 5240332 5240351 5240348 +
gtgctcccactcaagagata

SEQ ID NO: 10312 - DNA, 20 bp, Artificial Sequence
  Synthetic oligonucleotide; GAG chr11 5240336 5240355 5240352 +
tcccactcaagagatatggt

SEQ ID NO: 10313 - DNA, 20 bp, Artificial Sequence
  Synthetic oligonucleotide; AGG chr11 5240337 5240356 5240353 +
cccactcaagagatatggtg

SEQ ID NO: 10314 - DNA, 20 bp, Artificial Sequence
  Synthetic oligonucleotide; GAG chr11 5240341 5240360 5240357 +
ctcaagagatatggtgaggt

SEQ ID NO: 10315 - DNA, 20 bp, Artificial Sequence
  Synthetic oligonucleotide; TGG chr11 5240349 5240368 5240365 +
atatggtgaggtgagctctt

SEQ ID NO: 10316 - DNA, 20 bp, Artificial Sequence
  Synthetic oligonucleotide; GGG chr11 5240350 5240369 5240366 +
tatggtgaggtgagctcttt

SEQ ID NO: 10317 - DNA, 20 bp, Artificial Sequence
  Synthetic oligonucleotide; GGG chr11 5240351 5240370 5240367 +
atggtgaggtgagctctttg

SEQ ID NO: 10318 - DNA, 20 bp, Artificial Sequence
  Synthetic oligonucleotide; TGG chr11 5240354 5240373 5240370 +
gtgaggtgagctctttgggg

SEQ ID NO: 10319 - DNA, 20 bp, Artificial Sequence
  Synthetic oligonucleotide; TAG chr11 5240362 5240381 5240378 +
agctctttggggtggacaca

SEQ ID NO: 10320 - DNA, 20 bp, Artificial Sequence
  Synthetic oligonucleotide; GAG chr11 5240364 5240383 5240380 +
ctctttggggtggacacata

SEQ ID NO: 10321 - DNA, 20 bp, Artificial Sequence
  Synthetic oligonucleotide; AGG chr11 5240365 5240384 5240381 +
tctttggggtggacacatag

SEQ ID NO: 10322 - DNA, 20 bp, Artificial Sequence
  Synthetic oligonucleotide; GAG chr11 5240377 5240396 5240393 +
acacatagaggaaatacttt

SEQ ID NO: 10323 - DNA, 20 bp, Artificial Sequence
  Synthetic oligonucleotide; AAG chr11 5240381 5240400 5240397 +
atagaggaaatactttgaga

SEQ ID NO: 10324 - DNA, 20 bp, Artificial Sequence
  Synthetic oligonucleotide; GAG chr11 5240383 5240402 5240399 +
agaggaaatactttgagaaa

SEQ ID NO: 10325 - DNA, 20 bp, Artificial Sequence
  Synthetic oligonucleotide; AGG chr11 5240384 5240403 5240400 +
gaggaaatactttgagaaag

SEQ ID NO: 10326 - DNA, 20 bp, Artificial Sequence
  Synthetic oligonucleotide; TGG chr11 5240390 5240409 5240406 +
atactttgagaaagaggttt

SEQ ID NO: 10327 - DNA, 20 bp, Artificial Sequence
  Synthetic oligonucleotide; GGG chr11 5240391 5240410 5240407 +
tactttgagaaagaggtttt

SEQ ID NO: 10328 - DNA, 20 bp, Artificial Sequence
  Synthetic oligonucleotide; TGG chr11 5240405 5240424 5240421 +
ggttttgggattaatgaaac

SEQ ID NO: 10329 - DNA, 20 bp, Artificial Sequence
  Synthetic oligonucleotide; GAG chr11 5240407 5240426 5240423 +
ttttgggattaatgaaactg

SEQ ID NO: 10330 - DNA, 20 bp, Artificial Sequence
  Synthetic oligonucleotide; AAG chr11 5240410 5240429 5240426 +
tgggattaatgaaactggag

SEQ ID NO: 10331 - DNA, 20 bp, Artificial Sequence
  Synthetic oligonucleotide; AAG chr11 5240414 5240433 5240430 +
attaatgaaactggagaaga

SEQ ID NO: 10332 - DNA, 20 bp, Artificial Sequence
  Synthetic oligonucleotide; AGG chr11 5240415 5240434 5240431 +
ttaatgaaactggagaagaa

SEQ ID NO: 10333 - DNA, 20 bp, Artificial Sequence
  Synthetic oligonucleotide; GGG chr11 5240416 5240435 5240432 +
taatgaaactggagaagaaa

SEQ ID NO: 10334 - DNA, 20 bp, Artificial Sequence
  Synthetic oligonucleotide; GAG chr11 5240447 5240466 5240463 +
cttctaaaacctctttcttt

SEQ ID NO: 10335 - DNA, 20 bp, Artificial Sequence
  Synthetic oligonucleotide; AGG chr11 5240448 5240467 5240464 +
ttctaaaacctctttctttg

SEQ ID NO: 10336 - DNA, 20 bp, Artificial Sequence
  Synthetic oligonucleotide; TAG chr11 5240454 5240473 5240470 +
aacctctttctttgaggttt

SEQ ID NO: 10337 - DNA, 20 bp, Artificial Sequence
  Synthetic oligonucleotide; AGG chr11 5240455 5240474 5240471 +
acctctttctttgaggtttt

SEQ ID NO: 10338 - DNA, 20 bp, Artificial Sequence
  Synthetic oligonucleotide; GAG chr11 5240461 5240480 5240477 +
ttctttgaggttttaggttt

SEQ ID NO: 10339 - DNA, 20 bp, Artificial Sequence
  Synthetic oligonucleotide; AGG chr11 5240462 5240481 5240478 +
tctttgaggttttaggtttg

SEQ ID NO: 10340 - DNA, 20 bp, Artificial Sequence
  Synthetic oligonucleotide; GGG chr11 5240463 5240482 5240479 +
ctttgaggttttaggtttga

SEQ ID NO: 10341 - DNA, 20 bp, Artificial Sequence
  Synthetic oligonucleotide; AAG chr11 5240481 5240500 5240497 +
gagggtgctacatacttcct

SEQ ID NO: 10342 - DNA, 20 bp, Artificial Sequence
  Synthetic oligonucleotide; AGG chr11 5240482 5240501 5240498 +
agggtgctacatacttccta

SEQ ID NO: 10343 - DNA, 20 bp, Artificial Sequence
  Synthetic oligonucleotide; GGG chr11 5240483 5240502 5240499 +
gggtgctacatacttcctaa

SEQ ID NO: 10344 - DNA, 20 bp, Artificial Sequence
  Synthetic oligonucleotide; TGG chr11 5240489 5240508 5240505 +
tacatacttcctaagggtct

SEQ ID NO: 10345 - DNA, 20 bp, Artificial Sequence
  Synthetic oligonucleotide; GGG chr11 5240490 5240509 5240506 +
acatacttcctaagggtctt

SEQ ID NO: 10346 - DNA, 20 bp, Artificial Sequence
  Synthetic oligonucleotide; CAG chr11 5240495 5240514 5240511 +
cttcctaagggtcttgggta

SEQ ID NO: 10347 - DNA, 20 bp, Artificial Sequence
  Synthetic oligonucleotide; AGG chr11 5240496 5240515 5240512 +
ttcctaagggtcttgggtac

SEQ ID NO: 10348 - DNA, 20 bp, Artificial Sequence
  Synthetic oligonucleotide; GAG chr11 5240498 5240517 5240514 +
cctaagggtcttgggtacag

SEQ ID NO: 10349 - DNA, 20 bp, Artificial Sequence
  Synthetic oligonucleotide; AAG chr11 5240505 5240524 5240521 +
gtcttgggtacaggagtttg

SEQ ID NO: 10350 - DNA, 20 bp, Artificial Sequence
  Synthetic oligonucleotide; CAG chr11 5240517 5240536 5240533 +
ggagtttgaagtgattgcca

SEQ ID NO: 10351 - DNA, 20 bp, Artificial Sequence
  Synthetic oligonucleotide; TGG chr11 5240522 5240541 5240538 +
ttgaagtgattgccacagaa

SEQ ID NO: 10352 - DNA, 20 bp, Artificial Sequence
  Synthetic oligonucleotide; CAG chr11 5240538 5240557 5240554 +
agaatggctacgttcattgc

SEQ ID NO: 10353 - DNA, 20 bp, Artificial Sequence
  Synthetic oligonucleotide; CAG chr11 5240548 5240567 5240564 +
cgttcattgccagatccaaa

SEQ ID NO: 10354 - DNA, 20 bp, Artificial Sequence
  Synthetic oligonucleotide; AGG chr11 5240549 5240568 5240565 +
gttcattgccagatccaaac

SEQ ID NO: 10355 - DNA, 20 bp, Artificial Sequence
  Synthetic oligonucleotide; GGG chr11 5240550 5240569 5240566 +
ttcattgccagatccaaaca

SEQ ID NO: 10356 - DNA, 20 bp, Artificial Sequence
  Synthetic oligonucleotide; GGG chr11 5240551 5240570 5240567 +
tcattgccagatccaaacag

SEQ ID NO: 10357 - DNA, 20 bp, Artificial Sequence
  Synthetic oligonucleotide; GGG chr11 5240552 5240571 5240568 +
cattgccagatccaaacagg

SEQ ID NO: 10358 - DNA, 20 bp, Artificial Sequence
  Synthetic oligonucleotide; TAG chr11 5240559 5240578 5240575 +
agatccaaacagggggcttg

SEQ ID NO: 10359 - DNA, 20 bp, Artificial Sequence
  Synthetic oligonucleotide; AGG chr11 5240560 5240579 5240576 +
gatccaaacagggggcttgt

SEQ ID NO: 10360 - DNA, 20 bp, Artificial Sequence
  Synthetic oligonucleotide; CAG chr11 5240603 5240622 5240619 +
aatttccttcttttcattca

SEQ ID NO: 10361 - DNA, 20 bp, Artificial Sequence
  Synthetic oligonucleotide; CAG chr11 5240607 5240626 5240623 +
tccttcttttcattcacaga

SEQ ID NO: 10362 - DNA, 20 bp, Artificial Sequence
  Synthetic oligonucleotide; AGG chr11 5240608 5240627 5240624 +
ccttcttttcattcacagac

SEQ ID NO: 10363 - DNA, 20 bp, Artificial Sequence
  Synthetic oligonucleotide; GGG chr11 5240609 5240628 5240625 +
cttcttttcattcacagaca

SEQ ID NO: 10364 - DNA, 20 bp, Artificial Sequence
  Synthetic oligonucleotide; TAG chr11 5240616 5240635 5240632 +
tcattcacagacagggattt

SEQ ID NO: 10365 - DNA, 20 bp, Artificial Sequence
  Synthetic oligonucleotide; CAG chr11 5240654 5240673 5240670 +
ctctgtttcacaatgttttc

SEQ ID NO: 10366 - DNA, 20 bp, Artificial Sequence
  Synthetic oligonucleotide; TGG chr11 5240679 5240698 5240695 +
ctgtgcaatcactgccacaa

SEQ ID NO: 10367 - DNA, 20 bp, Artificial Sequence
  Synthetic oligonucleotide; CAG chr11 5240728 5240747 5240744 +
ttcattgtttccatcaactt

SEQ ID NO: 10368 - DNA, 20 bp, Artificial Sequence
  Synthetic oligonucleotide; CAG chr11 5240759 5240778 5240775 +
ccatcacctcaatataatta

SEQ ID NO: 10369 - DNA, 20 bp, Artificial Sequence
  Synthetic oligonucleotide; AAG chr11 5240763 5240782 5240779 +
cacctcaatataattacagc

SEQ ID NO: 10370 - DNA, 20 bp, Artificial Sequence
  Synthetic oligonucleotide; AAG chr11 5240783 5240802 5240799 +
aagctcctctgactataccc

SEQ ID NO: 10371 - DNA, 20 bp, Artificial Sequence
  Synthetic oligonucleotide; TAG chr11 5240787 5240806 5240803 +
tcctctgactatacccaagt

SEQ ID NO: 10372 - DNA, 20 bp, Artificial Sequence
  Synthetic oligonucleotide; CAG chr11 5240802 5240821 5240818 +
caagttagactttgtctaat

SEQ ID NO: 10373 - DNA, 20 bp, Artificial Sequence
  Synthetic oligonucleotide; AAG chr11 5240874 5240893 5240890 +
attatgtcactctcatatgc

SEQ ID NO: 10374 - DNA, 20 bp, Artificial Sequence
  Synthetic oligonucleotide; CAG chr11 5240883 5240902 5240899 +
ctctcatatgcaagaaactt

SEQ ID NO: 10375 - DNA, 20 bp, Artificial Sequence
  Synthetic oligonucleotide; TAG chr11 5240905 5240924 5240921 +
gtgatttttgctcaaaacga

SEQ ID NO: 10376 - DNA, 20 bp, Artificial Sequence
  Synthetic oligonucleotide; TGG chr11 5240927 5240946 5240943 +
gctatttttcttacttcatc

SEQ ID NO: 10377 - DNA, 20 bp, Artificial Sequence
  Synthetic oligonucleotide; CAG chr11 5240940 5240959 5240956 +
cttcatctggtctctgcatc

SEQ ID NO: 10378 - DNA, 20 bp, Artificial Sequence
  Synthetic oligonucleotide; CAG chr11 5241029 5241048 5241045 +
acgtgctgtttcctaaatct

SEQ ID NO: 10379 - DNA, 20 bp, Artificial Sequence
  Synthetic oligonucleotide; CAG chr11 5241068 5241087 5241084 +
ttgctcacataaacaaaaat

SEQ ID NO: 10380 - DNA, 20 bp, Artificial Sequence
  Synthetic oligonucleotide; TGG chr11 5241071 5241090 5241087 +
ctcacataaacaaaaatcag

SEQ ID NO: 10381 - DNA, 20 bp, Artificial Sequence
  Synthetic oligonucleotide; TAG chr11 5241155 5241174 5241171 +
cacatgtgtgtgtatatata

SEQ ID NO: 10382 - DNA, 20 bp, Artificial Sequence
  Synthetic oligonucleotide; AAG chr11 5241159 5241178 5241175 +
tgtgtgtgtatatatataga

SEQ ID NO: 10383 - DNA, 20 bp, Artificial Sequence
  Synthetic oligonucleotide; GAG chr11 5241161 5241180 5241177 +
tgtgtgtatatatatagaaa

SEQ ID NO: 10384 - DNA, 20 bp, Artificial Sequence
  Synthetic oligonucleotide; TAG chr11 5241209 5241228 5241225 +
ataaaacttgtacatattta

SEQ ID NO: 10385 - DNA, 20 bp, Artificial Sequence
  Synthetic oligonucleotide; CAG chr11 5241215 5241234 5241231 +
cttgtacatatttatagaaa

SEQ ID NO: 10386 - DNA, 20 bp, Artificial Sequence
  Synthetic oligonucleotide; GAG chr11 5241217 5241236 5241233 +
tgtacatatttatagaaaca

SEQ ID NO: 10387 - DNA, 20 bp, Artificial Sequence
  Synthetic oligonucleotide; GAG chr11 5241219 5241238 5241235 +
tacatatttatagaaacaga

SEQ ID NO: 10388 - DNA, 20 bp, Artificial Sequence
  Synthetic oligonucleotide; AAG chr11 5241229 5241248 5241245 +
tagaaacagagagctgaaca

SEQ ID NO: 10389 - DNA, 20 bp, Artificial Sequence
  Synthetic oligonucleotide; GAG chr11 5241231 5241250 5241247 +
gaaacagagagctgaacaaa

SEQ ID NO: 10390 - DNA, 20 bp, Artificial Sequence
  Synthetic oligonucleotide; TGG chr11 5241247 5241266 5241263 +
caaagagatttattatttat

SEQ ID NO: 10391 - DNA, 20 bp, Artificial Sequence
  Synthetic oligonucleotide; GGG chr11 5241248 5241267 5241264 +
aaagagatttattatttatt

SEQ ID NO: 10392 - DNA, 20 bp, Artificial Sequence
  Synthetic oligonucleotide; TAG chr11 5241251 5241270 5241267 +
gagatttattatttattggg

SEQ ID NO: 10393 - DNA, 20 bp, Artificial Sequence
  Synthetic oligonucleotide; AAG chr11 5241261 5241280 5241277 +
atttattgggtagtgtgata

SEQ ID NO: 10394 - DNA, 20 bp, Artificial Sequence
  Synthetic oligonucleotide; CAG chr11 5241270 5241289 5241286 +
gtagtgtgataaagacttta

SEQ ID NO: 10395 - DNA, 20 bp, Artificial Sequence
  Synthetic oligonucleotide; AGG chr11 5241271 5241290 5241287 +
tagtgtgataaagactttac

SEQ ID NO: 10396 - DNA, 20 bp, Artificial Sequence
  Synthetic oligonucleotide; TAG chr11 5241286 5241305 5241302 +
tttacaggtatcaattcaat

SEQ ID NO: 10397 - DNA, 20 bp, Artificial Sequence
  Synthetic oligonucleotide; AAG chr11 5241307 5241326 5241323 +
agttcttacaaaaatccttt

SEQ ID NO: 10398 - DNA, 20 bp, Artificial Sequence
  Synthetic oligonucleotide; AGG chr11 5241308 5241327 5241324 +
gttcttacaaaaatccttta

SEQ ID NO: 10399 - DNA, 20 bp, Artificial Sequence
  Synthetic oligonucleotide; CAG chr11 5241341 5241360 5241357 +
tgataaatctatcatatgca

SEQ ID NO: 10400 - DNA, 20 bp, Artificial Sequence
  Synthetic oligonucleotide; TGG chr11 5241349 5241368 5241365 +
ctatcatatgcacagcttaa

SEQ ID NO: 10401 - DNA, 20 bp, Artificial Sequence
  Synthetic oligonucleotide; CAG chr11 5241368 5241387 5241384 +
atggaattataaatatgttt

SEQ ID NO: 10402 - DNA, 20 bp, Artificial Sequence
  Synthetic oligonucleotide; AGG chr11 5241369 5241388 5241385 +
tggaattataaatatgtttc

SEQ ID NO: 10403 - DNA, 20 bp, Artificial Sequence
  Synthetic oligonucleotide; CAG chr11 5241375 5241394 5241391 +
tataaatatgtttcaggtca

SEQ ID NO: 10404 - DNA, 20 bp, Artificial Sequence
  Synthetic oligonucleotide; GAG chr11 5241377 5241396 5241393 +
taaatatgtttcaggtcaca

SEQ ID NO: 10405 - DNA, 20 bp, Artificial Sequence
  Synthetic oligonucleotide; AGG chr11 5241378 5241397 5241394 +
aaatatgtttcaggtcacag

SEQ ID NO: 10406 - DNA, 20 bp, Artificial Sequence
  Synthetic oligonucleotide; TAG chr11 5241381 5241400 5241397 +
tatgtttcaggtcacagagg

SEQ ID NO: 10407 - DNA, 20 bp, Artificial Sequence
  Synthetic oligonucleotide; CAG chr11 5241384 5241403 5241400 +
gtttcaggtcacagaggtag

SEQ ID NO: 10408 - DNA, 20 bp, Artificial Sequence
  Synthetic oligonucleotide; AAG chr11 5241390 5241409 5241406 +
ggtcacagaggtagcagatg

SEQ ID NO: 10409 - DNA, 20 bp, Artificial Sequence
  Synthetic oligonucleotide; CAG chr11 5241395 5241414 5241411 +
cagaggtagcagatgaagta

SEQ ID NO: 10410 - DNA, 20 bp, Artificial Sequence
  Synthetic oligonucleotide; AAG chr11 5241407 5241426 5241423 +
atgaagtacagatgaaaacc

SEQ ID NO: 10411 - DNA, 20 bp, Artificial Sequence
  Synthetic oligonucleotide; CAG chr11 5241411 5241430 5241427 +
agtacagatgaaaaccaaga

SEQ ID NO: 10412 - DNA, 20 bp, Artificial Sequence
  Synthetic oligonucleotide; CAG chr11 5241415 5241434 5241431 +
cagatgaaaaccaagacagc

SEQ ID NO: 10413 - DNA, 20 bp, Artificial Sequence
  Synthetic oligonucleotide; TAG chr11 5241429 5241448 5241445 +
gacagccagttcacatgcct

SEQ ID NO: 10414 - DNA, 20 bp, Artificial Sequence
  Synthetic oligonucleotide; GAG chr11 5241431 5241450 5241447 +
cagccagttcacatgcctta

SEQ ID NO: 10415 - DNA, 20 bp, Artificial Sequence
  Synthetic oligonucleotide; AAG chr11 5241457 5241476 5241473 +
attctctattaataccattg

SEQ ID NO: 10416 - DNA, 20 bp, Artificial Sequence
  Synthetic oligonucleotide; AAG chr11 5241465 5241484 5241481 +
ttaataccattgaagacgtt

SEQ ID NO: 10417 - DNA, 20 bp, Artificial Sequence
  Synthetic oligonucleotide; GAG chr11 5241467 5241486 5241483 +
aataccattgaagacgttaa

SEQ ID NO: 10418 - DNA, 20 bp, Artificial Sequence
  Synthetic oligonucleotide; AAG chr11 5241471 5241490 5241487 +
ccattgaagacgttaagaga

SEQ ID NO: 10419 - DNA, 20 bp, Artificial Sequence
  Synthetic oligonucleotide; AAG chr11 5241477 5241496 5241493 +
aagacgttaagagaaagttc

SEQ ID NO: 10420 - DNA, 20 bp, Artificial Sequence
  Synthetic oligonucleotide; AGG chr11 5241478 5241497 5241494 +
agacgttaagagaaagttca

SEQ ID NO: 10421 - DNA, 20 bp, Artificial Sequence
  Synthetic oligonucleotide; TGG chr11 5241483 5241502 5241499 +
ttaagagaaagttcaaggtt

SEQ ID NO: 10422 - DNA, 20 bp, Artificial Sequence
  Synthetic oligonucleotide; TGG chr11 5241494 5241513 5241510 +
ttcaaggtttggcccttgat

SEQ ID NO: 10423 - DNA, 20 bp, Artificial Sequence
  Synthetic oligonucleotide; TAG chr11 5241501 5241520 5241517 +
tttggcccttgattggtctc

SEQ ID NO: 10424 - DNA, 20 bp, Artificial Sequence
  Synthetic oligonucleotide; AGG chr11 5241502 5241521 5241518 +
ttggcccttgattggtctct

SEQ ID NO: 10425 - DNA, 20 bp, Artificial Sequence
  Synthetic oligonucleotide; AAG chr11 5241505 5241524 5241521 +
gcccttgattggtctctagg

SEQ ID NO: 10426 - DNA, 20 bp, Artificial Sequence
  Synthetic oligonucleotide; AAG chr11 5241556 5241575 5241572 +
aaaaatatgttgtttaaaat

SEQ ID NO: 10427 - DNA, 20 bp, Artificial Sequence
  Synthetic oligonucleotide; TAG chr11 5241559 5241578 5241575 +
aatatgttgtttaaaataag

SEQ ID NO: 10428 - DNA, 20 bp, Artificial Sequence
  Synthetic oligonucleotide; AAG chr11 5241562 5241581 5241578 +
atgttgtttaaaataagtag

SEQ ID NO: 10429 - DNA, 20 bp, Artificial Sequence
  Synthetic oligonucleotide; CAG chr11 5241572 5241591 5241588 +
aaataagtagaagtgaactg

SEQ ID NO: 10430 - DNA, 20 bp, Artificial Sequence
  Synthetic oligonucleotide; GAG chr11 5241584 5241603 5241600 +
gtgaactgcagtcaccaaat

SEQ ID NO: 10431 - DNA, 20 bp, Artificial Sequence
  Synthetic oligonucleotide; GAG chr11 5241596 5241615 5241612 +
caccaaatgagctatatcct

SEQ ID NO: 10432 - DNA, 20 bp, Artificial Sequence
  Synthetic oligonucleotide; TAG chr11 5241613 5241632 5241629 +
cctgagtttcatacaaataa

SEQ ID NO: 10433 - DNA, 20 bp, Artificial Sequence
  Synthetic oligonucleotide; CAG chr11 5241622 5241641 5241638 +
catacaaataatagcctata

SEQ ID NO: 10434 - DNA, 20 bp, Artificial Sequence
  Synthetic oligonucleotide; GAG chr11 5241637 5241656 5241653 +
ctatacagaacttctaattt

SEQ ID NO: 10435 - DNA, 20 bp, Artificial Sequence
  Synthetic oligonucleotide; AAG chr11 5241686 5241705 5241702 +
acaatcctcttacacctcca

SEQ ID NO: 10436 - DNA, 20 bp, Artificial Sequence
  Synthetic oligonucleotide; GAG chr11 5241688 5241707 5241704 +
aatcctcttacacctccaaa

SEQ ID NO: 10437 - DNA, 20 bp, Artificial Sequence
  Synthetic oligonucleotide; TAG chr11 5241734 5241753 5241750 +
gtaaaaacattgtcttattc

SEQ ID NO: 10438 - DNA, 20 bp, Artificial Sequence
  Synthetic oligonucleotide; GAG chr11 5241736 5241755 5241752 +
aaaaacattgtcttattcta

SEQ ID NO: 10439 - DNA, 20 bp, Artificial Sequence
  Synthetic oligonucleotide; TAG chr11 5241754 5241773 5241770 +
tagagacgatttccccttcc

SEQ ID NO: 10440 - DNA, 20 bp, Artificial Sequence
  Synthetic oligonucleotide; AGG chr11 5241755 5241774 5241771 +
agagacgatttccccttcct

SEQ ID NO: 10441 - DNA, 20 bp, Artificial Sequence
  Synthetic oligonucleotide; GAG chr11 5241757 5241776 5241773 +
agacgatttccccttcctag

SEQ ID NO: 10442 - DNA, 20 bp, Artificial Sequence
  Synthetic oligonucleotide; GAG chr11 5241785 5241804 5241801 +
accccactaaatccacccac

SEQ ID NO: 10443 - DNA, 20 bp, Artificial Sequence
  Synthetic oligonucleotide; CAG chr11 5241803 5241822 5241819 +
acgagttctctcttttcttg

SEQ ID NO: 10444 - DNA, 20 bp, Artificial Sequence
  Synthetic oligonucleotide; AGG chr11 5241804 5241823 5241820 +
cgagttctctcttttcttgc

SEQ ID NO: 10445 - DNA, 20 bp, Artificial Sequence
  Synthetic oligonucleotide; AAG chr11 5241812 5241831 5241828 +
ctcttttcttgcaggattgc

SEQ ID NO: 10446 - DNA, 20 bp, Artificial Sequence
  Synthetic oligonucleotide; AAG chr11 5241816 5241835 5241832 +
tttcttgcaggattgcaaga

SEQ ID NO: 10447 - DNA, 20 bp, Artificial Sequence
  Synthetic oligonucleotide; CAG chr11 5241867 5241886 5241883 +
tccaacattctcatttccat

SEQ ID NO: 10448 - DNA, 20 bp, Artificial Sequence
  Synthetic oligonucleotide; TAG chr11 5241873 5241892 5241889 +
attctcatttccatcagaaa

SEQ ID NO: 10449 - DNA, 20 bp, Artificial Sequence
  Synthetic oligonucleotide; TGG chr11 5241886 5241905 5241902 +
tcagaaatagtgcgtccttt

SEQ ID NO: 10450 - DNA, 20 bp, Artificial Sequence
  Synthetic oligonucleotide; CAG chr11 5241895 5241914 5241911 +
gtgcgtccttttggctgaat

SEQ ID NO: 10451 - DNA, 20 bp, Artificial Sequence
  Synthetic oligonucleotide; AGG chr11 5241896 5241915 5241912 +
tgcgtccttttggctgaatc

SEQ ID NO: 10452 - DNA, 20 bp, Artificial Sequence
  Synthetic oligonucleotide; GGG chr11 5241897 5241916 5241913 +
gcgtccttttggctgaatca

SEQ ID NO: 10453 - DNA, 20 bp, Artificial Sequence
  Synthetic oligonucleotide; AAG chr11 5241909 5241928 5241925 +
ctgaatcagggtaaaatata

SEQ ID NO: 10454 - DNA, 20 bp, Artificial Sequence
  Synthetic oligonucleotide; CAG chr11 5241913 5241932 5241929 +
atcagggtaaaatataaaga

SEQ ID NO: 10455 - DNA, 20 bp, Artificial Sequence
  Synthetic oligonucleotide; AAG chr11 5241919 5241938 5241935 +
gtaaaatataaagacagaaa

SEQ ID NO: 10456 - DNA, 20 bp, Artificial Sequence
  Synthetic oligonucleotide; GAG chr11 5241921 5241940 5241937 +
aaaatataaagacagaaaaa

SEQ ID NO: 10457 - DNA, 20 bp, Artificial Sequence
  Synthetic oligonucleotide; TAG chr11 5241939 5241958 5241955 +
aagagtacaatgatatttct

SEQ ID NO: 10458 - DNA, 20 bp, Artificial Sequence
  Synthetic oligonucleotide; GAG chr11 5241941 5241960 5241957 +
gagtacaatgatatttctta

SEQ ID NO: 10459 - DNA, 20 bp, Artificial Sequence
  Synthetic oligonucleotide; GAG chr11 5241943 5241962 5241959 +
gtacaatgatatttcttaga

SEQ ID NO: 10460 - DNA, 20 bp, Artificial Sequence
  Synthetic oligonucleotide; CAG chr11 5241974 5241993 5241990 +
tttattctatttttatcatg

SEQ ID NO: 10461 - DNA, 20 bp, Artificial Sequence
  Synthetic oligonucleotide; AGG chr11 5241975 5241994 5241991 +
ttattctatttttatcatgc

SEQ ID NO: 10462 - DNA, 20 bp, Artificial Sequence
  Synthetic oligonucleotide; CAG chr11 5241986 5242005 5242002 +
ttatcatgcaggaactgaat

SEQ ID NO: 10463 - DNA, 20 bp, Artificial Sequence
  Synthetic oligonucleotide; CAG chr11 5241989 5242008 5242005 +
tcatgcaggaactgaatcag

SEQ ID NO: 10464 - DNA, 20 bp, Artificial Sequence
  Synthetic oligonucleotide; AGG chr11 5241990 5242009 5242006 +
catgcaggaactgaatcagc

SEQ ID NO: 10465 - DNA, 20 bp, Artificial Sequence
  Synthetic oligonucleotide; CAG chr11 5241993 5242012 5242009 +
gcaggaactgaatcagcagg

SEQ ID NO: 10466 - DNA, 20 bp, Artificial Sequence
  Synthetic oligonucleotide; AGG chr11 5241994 5242013 5242010 +
caggaactgaatcagcaggc

SEQ ID NO: 10467 - DNA, 20 bp, Artificial Sequence
  Synthetic oligonucleotide; AAG chr11 5242029 5242048 5242045 +
tccccaacctcccccatcta

SEQ ID NO: 10468 - DNA, 20 bp, Artificial Sequence
  Synthetic oligonucleotide; AGG chr11 5242030 5242049 5242046 +
ccccaacctcccccatctaa

SEQ ID NO: 10469 - DNA, 20 bp, Artificial Sequence
  Synthetic oligonucleotide; GAG chr11 5242032 5242051 5242048 +
ccaacctcccccatctaaag

SEQ ID NO: 10470 - DNA, 20 bp, Artificial Sequence
  Synthetic oligonucleotide; GAG chr11 5242037 5242056 5242053 +
ctcccccatctaaaggagat

SEQ ID NO: 10471 - DNA, 20 bp, Artificial Sequence
  Synthetic oligonucleotide; TGG chr11 5242044 5242063 5242060 +
atctaaaggagatgagattt

SEQ ID NO: 10472 - DNA, 20 bp, Artificial Sequence
  Synthetic oligonucleotide; GGG chr11 5242045 5242064 5242061 +
tctaaaggagatgagatttt

SEQ ID NO: 10473 - DNA, 20 bp, Artificial Sequence
  Synthetic oligonucleotide; TAG chr11 5242051 5242070 5242067 +
ggagatgagattttgggaca

SEQ ID NO: 10474 - DNA, 20 bp, Artificial Sequence
  Synthetic oligonucleotide; AGG chr11 5242052 5242071 5242068 +
gagatgagattttgggacat

SEQ ID NO: 10475 - DNA, 20 bp, Artificial Sequence
  Synthetic oligonucleotide; TAG chr11 5242063 5242082 5242079 +
ttgggacataggtacaaaca

SEQ ID NO: 10476 - DNA, 20 bp, Artificial Sequence
  Synthetic oligonucleotide; TGG chr11 5242066 5242085 5242082 +
ggacataggtacaaacatag

SEQ ID NO: 10477 - DNA, 20 bp, Artificial Sequence
  Synthetic oligonucleotide; TAG chr11 5242073 5242092 5242089 +
ggtacaaacatagtggacca

SEQ ID NO: 10478 - DNA, 20 bp, Artificial Sequence
  Synthetic oligonucleotide; AGG chr11 5242074 5242093 5242090 +
gtacaaacatagtggaccat

SEQ ID NO: 10479 - DNA, 20 bp, Artificial Sequence
  Synthetic oligonucleotide; TAG chr11 5242085 5242104 5242101 +
gtggaccataggtacaaaca

SEQ ID NO: 10480 - DNA, 20 bp, Artificial Sequence
  Synthetic oligonucleotide; TGG chr11 5242088 5242107 5242104 +
gaccataggtacaaacatag

SEQ ID NO: 10481 - DNA, 20 bp, Artificial Sequence
  Synthetic oligonucleotide; CAG chr11 5242092 5242111 5242108 +
ataggtacaaacatagtgga

SEQ ID NO: 10482 - DNA, 20 bp, Artificial Sequence
  Synthetic oligonucleotide; AGG chr11 5242093 5242112 5242109 +
taggtacaaacatagtggac

SEQ ID NO: 10483 - DNA, 20 bp, Artificial Sequence
  Synthetic oligonucleotide; GGG chr11 5242094 5242113 5242110 +
aggtacaaacatagtggaca

SEQ ID NO: 10484 - DNA, 20 bp, Artificial Sequence
  Synthetic oligonucleotide; CAG chr11 5242101 5242120 5242117 +
aacatagtggacagggaact

SEQ ID NO: 10485 - DNA, 20 bp, Artificial Sequence
  Synthetic oligonucleotide; TGG chr11 5242104 5242123 5242120 +
atagtggacagggaactcag

SEQ ID NO: 10486 - DNA, 20 bp, Artificial Sequence
  Synthetic oligonucleotide; TGG chr11 5242112 5242131 5242128 +
cagggaactcagtggtcttg

SEQ ID NO: 10487 - DNA, 20 bp, Artificial Sequence
  Synthetic oligonucleotide; GGG chr11 5242113 5242132 5242129 +
agggaactcagtggtcttgt

SEQ ID NO: 10488 - DNA, 20 bp, Artificial Sequence
  Synthetic oligonucleotide; CAG chr11 5242119 5242138 5242135 +
ctcagtggtcttgtgggcta

SEQ ID NO: 10489 - DNA, 20 bp, Artificial Sequence
  Synthetic oligonucleotide; CAG chr11 5242131 5242150 5242147 +
gtgggctacagcattaacca

SEQ ID NO: 10490 - DNA, 20 bp, Artificial Sequence
  Synthetic oligonucleotide; TAG chr11 5242141 5242160 5242157 +
gcattaaccacagcatttgt

SEQ ID NO: 10491 - DNA, 20 bp, Artificial Sequence
  Synthetic oligonucleotide; AAG chr11 5242152 5242171 5242168 +
agcatttgttagttactgcc

SEQ ID NO: 10492 - DNA, 20 bp, Artificial Sequence
  Synthetic oligonucleotide; AAG chr11 5242155 5242174 5242171 +
atttgttagttactgccaag

SEQ ID NO: 10493 - DNA, 20 bp, Artificial Sequence
  Synthetic oligonucleotide; TAG chr11 5242168 5242187 5242184 +
tgccaagaagcctgtatctg

SEQ ID NO: 10494 - DNA, 20 bp, Artificial Sequence
  Synthetic oligonucleotide; AGG chr11 5242169 5242188 5242185 +
gccaagaagcctgtatctgt

SEQ ID NO: 10495 - DNA, 20 bp, Artificial Sequence
  Synthetic oligonucleotide; GGG chr11 5242170 5242189 5242186 +
ccaagaagcctgtatctgta

SEQ ID NO: 10496 - DNA, 20 bp, Artificial Sequence
  Synthetic oligonucleotide; AAG chr11 5242187 5242206 5242203 +
gtagggtaaaatcctcgctg

SEQ ID NO: 10497 - DNA, 20 bp, Artificial Sequence
  Synthetic oligonucleotide; TGG chr11 5242190 5242209 5242206 +
gggtaaaatcctcgctgaag

SEQ ID NO: 10498 - DNA, 20 bp, Artificial Sequence
  Synthetic oligonucleotide; GGG chr11 5242191 5242210 5242207 +
ggtaaaatcctcgctgaagt

SEQ ID NO: 10499 - DNA, 20 bp, Artificial Sequence
  Synthetic oligonucleotide; AAG chr11 5242223 5242242 5242239 +
caatcaatatcacgttgcct

SEQ ID NO: 10500 - DNA, 20 bp, Artificial Sequence
  Synthetic oligonucleotide; GAG chr11 5242225 5242244 5242241 +
atcaatatcacgttgcctaa

SEQ ID NO: 10501 - DNA, 20 bp, Artificial Sequence
  Synthetic oligonucleotide; TGG chr11 5242229 5242248 5242245 +
atatcacgttgcctaagagc

SEQ ID NO: 10502 - DNA, 20 bp, Artificial Sequence
  Synthetic oligonucleotide; GGG chr11 5242230 5242249 5242246 +
tatcacgttgcctaagagct

SEQ ID NO: 10503 - DNA, 20 bp, Artificial Sequence
  Synthetic oligonucleotide; GGG chr11 5242231 5242250 5242247 +
atcacgttgcctaagagctg

SEQ ID NO: 10504 - DNA, 20 bp, Artificial Sequence
  Synthetic oligonucleotide; GAG chr11 5242233 5242252 5242249 +
cacgttgcctaagagctggg

SEQ ID NO: 10505 - DNA, 20 bp, Artificial Sequence
  Synthetic oligonucleotide; AGG chr11 5242234 5242253 5242250 +
acgttgcctaagagctgggg

SEQ ID NO: 10506 - DNA, 20 bp, Artificial Sequence
  Synthetic oligonucleotide; GGG chr11 5242235 5242254 5242251 +
cgttgcctaagagctgggga

SEQ ID NO: 10507 - DNA, 20 bp, Artificial Sequence
  Synthetic oligonucleotide; GAG chr11 5242237 5242256 5242253 +
ttgcctaagagctggggagg

SEQ ID NO: 10508 - DNA, 20 bp, Artificial Sequence
  Synthetic oligonucleotide; AAG chr11 5242242 5242261 5242258 +
taagagctggggagggagtg

SEQ ID NO: 10509 - DNA, 20 bp, Artificial Sequence
  Synthetic oligonucleotide; AAG chr11 5242251 5242270 5242267 +
gggagggagtgaagataaaa

SEQ ID NO: 10510 - DNA, 20 bp, Artificial Sequence
  Synthetic oligonucleotide; TGG chr11 5242258 5242277 5242274 +
agtgaagataaaaaagaaaa

SEQ ID NO: 10511 - DNA, 20 bp, Artificial Sequence
  Synthetic oligonucleotide; TAG chr11 5242265 5242284 5242281 +
ataaaaaagaaaatggtaca

SEQ ID NO: 10512 - DNA, 20 bp, Artificial Sequence
  Synthetic oligonucleotide; TAG chr11 5242272 5242291 5242288 +
agaaaatggtacatagtgaa

SEQ ID NO: 10513 - DNA, 20 bp, Artificial Sequence
  Synthetic oligonucleotide; AAG chr11 5242275 5242294 5242291 +
aaatggtacatagtgaatag

SEQ ID NO: 10514 - DNA, 20 bp, Artificial Sequence
  Synthetic oligonucleotide; AGG chr11 5242276 5242295 5242292 +
aatggtacatagtgaataga

SEQ ID NO: 10515 - DNA, 20 bp, Artificial Sequence
  Synthetic oligonucleotide; AAG chr11 5242283 5242302 5242299 +
catagtgaatagaaggcctc

SEQ ID NO: 10516 - DNA, 20 bp, Artificial Sequence
  Synthetic oligonucleotide; TGG chr11 5242287 5242306 5242303 +
gtgaatagaaggcctcaagc

SEQ ID NO: 10517 - DNA, 20 bp, Artificial Sequence
  Synthetic oligonucleotide; CAG chr11 5242295 5242314 5242311 +
aaggcctcaagctggacttg

SEQ ID NO: 10518 - DNA, 20 bp, Artificial Sequence
  Synthetic oligonucleotide; TAG chr11 5242302 5242321 5242318 +
caagctggacttgcagtaaa

SEQ ID NO: 10519 - DNA, 20 bp, Artificial Sequence
  Synthetic oligonucleotide; CAG chr11 5242330 5242349 5242346 +
acacttacatcctttttcac

SEQ ID NO: 10520 - DNA, 20 bp, Artificial Sequence
  Synthetic oligonucleotide; GAG chr11 5242332 5242351 5242348 +
acttacatcctttttcacca

SEQ ID NO: 10521 - DNA, 20 bp, Artificial Sequence
  Synthetic oligonucleotide; GAG chr11 5242338 5242357 5242354 +
atcctttttcaccagagttt

SEQ ID NO: 10522 - DNA, 20 bp, Artificial Sequence
  Synthetic oligonucleotide; TGG chr11 5242356 5242375 5242372 +
ttgagcaactctcaccatta

SEQ ID NO: 10523 - DNA, 20 bp, Artificial Sequence
  Synthetic oligonucleotide; GGG chr11 5242357 5242376 5242373 +
tgagcaactctcaccattat

SEQ ID NO: 10524 - DNA, 20 bp, Artificial Sequence
  Synthetic oligonucleotide; TAG chr11 5242361 5242380 5242377 +
caactctcaccattatgggc

SEQ ID NO: 10525 - DNA, 20 bp, Artificial Sequence
  Synthetic oligonucleotide; CAG chr11 5242368 5242387 5242384 +
caccattatgggctagatat

SEQ ID NO: 10526 - DNA, 20 bp, Artificial Sequence
  Synthetic oligonucleotide; TGG chr11 5242383 5242402 5242399 +
gatatcagcttcaatatgac

SEQ ID NO: 10527 - DNA, 20 bp, Artificial Sequence
  Synthetic oligonucleotide; CAG chr11 5242386 5242405 5242402 +
atcagcttcaatatgactgg

SEQ ID NO: 10528 - DNA, 20 bp, Artificial Sequence
  Synthetic oligonucleotide; TAG chr11 5242477 5242496 5242493 +
tgattgtttcattttttttt

SEQ ID NO: 10529 - DNA, 20 bp, Artificial Sequence
  Synthetic oligonucleotide; GAG chr11 5242479 5242498 5242495 +
attgtttcatttttttttta

SEQ ID NO: 10530 - DNA, 20 bp, Artificial Sequence
  Synthetic oligonucleotide; AAG chr11 5242498 5242517 5242514 +
agagacttcgtccttttaaa

SEQ ID NO: 10531 - DNA, 20 bp, Artificial Sequence
  Synthetic oligonucleotide; TAG chr11 5242501 5242520 5242517 +
gacttcgtccttttaaaaag

SEQ ID NO: 10532 - DNA, 20 bp, Artificial Sequence
  Synthetic oligonucleotide; AGG chr11 5242502 5242521 5242518 +
acttcgtccttttaaaaagt

SEQ ID NO: 10533 - DNA, 20 bp, Artificial Sequence
  Synthetic oligonucleotide; TAG chr11 5242509 5242528 5242525 +
ccttttaaaaagtaggataa

SEQ ID NO: 10534 - DNA, 20 bp, Artificial Sequence
  Synthetic oligonucleotide; AAG chr11 5242518 5242537 5242534 +
aagtaggataatagtacttc

SEQ ID NO: 10535 - DNA, 20 bp, Artificial Sequence
  Synthetic oligonucleotide; AGG chr11 5242519 5242538 5242535 +
agtaggataatagtacttca

SEQ ID NO: 10536 - DNA, 20 bp, Artificial Sequence
  Synthetic oligonucleotide; CAG chr11 5242524 5242543 5242540 +
gataatagtacttcaaggaa

SEQ ID NO: 10537 - DNA, 20 bp, Artificial Sequence
  Synthetic oligonucleotide; TGG chr11 5242530 5242549 5242546 +
agtacttcaaggaacagtaa

SEQ ID NO: 10538 - DNA, 20 bp, Artificial Sequence
  Synthetic oligonucleotide; TAG chr11 5242534 5242553 5242550 +
cttcaaggaacagtaatgga

SEQ ID NO: 10539 - DNA, 20 bp, Artificial Sequence
  Synthetic oligonucleotide; AGG chr11 5242535 5242554 5242551 +
ttcaaggaacagtaatggat

SEQ ID NO: 10540 - DNA, 20 bp, Artificial Sequence
  Synthetic oligonucleotide; AAG chr11 5242540 5242559 5242556 +
ggaacagtaatggataggat

SEQ ID NO: 10541 - DNA, 20 bp, Artificial Sequence
  Synthetic oligonucleotide; CAG chr11 5242547 5242566 5242563 +
taatggataggataagtccc

SEQ ID NO: 10542 - DNA, 20 bp, Artificial Sequence
  Synthetic oligonucleotide; AAG chr11 5242604 5242623 5242620 +
tttcccaaacactcataaca

SEQ ID NO: 10543 - DNA, 20 bp, Artificial Sequence
  Synthetic oligonucleotide; AAG chr11 5242628 5242647 5242644 +
atcctgtaccatgcgtacaa

SEQ ID NO: 10544 - DNA, 20 bp, Artificial Sequence
  Synthetic oligonucleotide; CGG chr11 5242646 5242665 5242662 +
aaaagtataccatcatcatt

SEQ ID NO: 10545 - DNA, 20 bp, Artificial Sequence
  Synthetic oligonucleotide; GAG chr11 5242648 5242667 5242664 +
aagtataccatcatcattcg

SEQ ID NO: 10546 - DNA, 20 bp, Artificial Sequence
  Synthetic oligonucleotide; AGG chr11 5242649 5242668 5242665 +
agtataccatcatcattcgg

SEQ ID NO: 10547 - DNA, 20 bp, Artificial Sequence
  Synthetic oligonucleotide; GGG chr11 5242650 5242669 5242666 +
gtataccatcatcattcgga

SEQ ID NO: 10548 - DNA, 20 bp, Artificial Sequence
  Synthetic oligonucleotide; CAG chr11 5242671 5242690 5242687 +
ggaaacaatcctctttttaa

SEQ ID NO: 10549 - DNA, 20 bp, Artificial Sequence
  Synthetic oligonucleotide; CAG chr11 5242691 5242710 5242707 +
cagcttcccactactttgtt

SEQ ID NO: 10550 - DNA, 20 bp, Artificial Sequence
  Synthetic oligonucleotide; CAG chr11 5242713 5242732 5242729 +
gttgatctttttctaacctc

SEQ ID NO: 10551 - DNA, 20 bp, Artificial Sequence
  Synthetic oligonucleotide; AGG chr11 5242714 5242733 5242730 +
ttgatctttttctaacctcc

SEQ ID NO: 10552 - DNA, 20 bp, Artificial Sequence
  Synthetic oligonucleotide; CAG chr11 5242723 5242742 5242739 +
ttctaacctccaggactatg

SEQ ID NO: 10553 - DNA, 20 bp, Artificial Sequence
  Synthetic oligonucleotide; AAG chr11 5242728 5242747 5242744 +
acctccaggactatgcagaa

SEQ ID NO: 10554 - DNA, 20 bp, Artificial Sequence
  Synthetic oligonucleotide; TAG chr11 5242747 5242766 5242763 +
aaagtgactattaattttta

SEQ ID NO: 10555 - DNA, 20 bp, Artificial Sequence
  Synthetic oligonucleotide; AAG chr11 5242766 5242785 5242782 +
atagaaaatttcgctgacca

SEQ ID NO: 10556 - DNA, 20 bp, Artificial Sequence
  Synthetic oligonucleotide; AGG chr11 5242767 5242786 5242783 +
tagaaaatttcgctgaccaa

SEQ ID NO: 10557 - DNA, 20 bp, Artificial Sequence
  Synthetic oligonucleotide; AAG chr11 5242771 5242790 5242787 +
aaatttcgctgaccaaagga

SEQ ID NO: 10558 - DNA, 20 bp, Artificial Sequence
  Synthetic oligonucleotide; CAG chr11 5242821 5242840 5242837 +
ttccctcatccaaaaacact

SEQ ID NO: 10559 - DNA, 20 bp, Artificial Sequence
  Synthetic oligonucleotide; TGG chr11 5242832 5242851 5242848 +
aaaaacactcagtttgattt

SEQ ID NO: 10560 - DNA, 20 bp, Artificial Sequence
  Synthetic oligonucleotide; CAG chr11 5242836 5242855 5242852 +
acactcagtttgattttggc

SEQ ID NO: 10561 - DNA, 20 bp, Artificial Sequence
  Synthetic oligonucleotide; AAG chr11 5242849 5242868 5242865 +
ttttggccagaattttttat

SEQ ID NO: 10562 - DNA, 20 bp, Artificial Sequence
  Synthetic oligonucleotide; CAG chr11 5242862 5242881 5242878 +
tttttataagatgtgttttt

SEQ ID NO: 10563 - DNA, 20 bp, Artificial Sequence
  Synthetic oligonucleotide; GAG chr11 5242864 5242883 5242880 +
tttataagatgtgtttttca

SEQ ID NO: 10564 - DNA, 20 bp, Artificial Sequence
  Synthetic oligonucleotide; TGG chr11 5242875 5242894 5242891 +
tgtttttcagagctatcaaa

SEQ ID NO: 10565 - DNA, 20 bp, Artificial Sequence
  Synthetic oligonucleotide; AAG chr11 5242879 5242898 5242895 +
tttcagagctatcaaatggt

SEQ ID NO: 10566 - DNA, 20 bp, Artificial Sequence
  Synthetic oligonucleotide; TGG chr11 5242882 5242901 5242898 +
cagagctatcaaatggtaag

SEQ ID NO: 10567 - DNA, 20 bp, Artificial Sequence
  Synthetic oligonucleotide; TAG chr11 5242899 5242918 5242915 +
aagtggccttccattattca

SEQ ID NO: 10568 - DNA, 20 bp, Artificial Sequence
  Synthetic oligonucleotide; TAG chr11 5242921 5242940 5242937 +
gtccttgctctaccaaattt

SEQ ID NO: 10569 - DNA, 20 bp, Artificial Sequence
  Synthetic oligonucleotide; CAG chr11 5242936 5242955 5242952 +
aattttagttatgttattta

SEQ ID NO: 10570 - DNA, 20 bp, Artificial Sequence
  Synthetic oligonucleotide; TAG chr11 5242982 5243001 5242998 +
tgctgaaatatcatatccca

SEQ ID NO: 10571 - DNA, 20 bp, Artificial Sequence
  Synthetic oligonucleotide; AAG chr11 5242999 5243018 5243015 +
ccatagctgactcataacac

SEQ ID NO: 10572 - DNA, 20 bp, Artificial Sequence
  Synthetic oligonucleotide; GAG chr11 5243001 5243020 5243017 +
atagctgactcataacacaa

SEQ ID NO: 10573 - DNA, 20 bp, Artificial Sequence
  Synthetic oligonucleotide; AAG chr11 5243005 5243024 5243021 +
ctgactcataacacaagaga

SEQ ID NO: 10574 - DNA, 20 bp, Artificial Sequence
  Synthetic oligonucleotide; AAG chr11 5243024 5243043 5243040 +
aaagccacctctgctttcaa

SEQ ID NO: 10575 - DNA, 20 bp, Artificial Sequence
  Synthetic oligonucleotide; TAG chr11 5243033 5243052 5243049 +
tctgctttcaaaagtaccca

SEQ ID NO: 10576 - DNA, 20 bp, Artificial Sequence
  Synthetic oligonucleotide; AAG chr11 5243047 5243066 5243063 +
tacccatagtgcaaatatct

SEQ ID NO: 10577 - DNA, 20 bp, Artificial Sequence
  Synthetic oligonucleotide; AGG chr11 5243048 5243067 5243064 +
acccatagtgcaaatatcta

SEQ ID NO: 10578 - DNA, 20 bp, Artificial Sequence
  Synthetic oligonucleotide; GGG chr11 5243049 5243068 5243065 +
cccatagtgcaaatatctaa

SEQ ID NO: 10579 - DNA, 20 bp, Artificial Sequence
  Synthetic oligonucleotide; AAG chr11 5243054 5243073 5243070 +
agtgcaaatatctaagggta

SEQ ID NO: 10580 - DNA, 20 bp, Artificial Sequence
  Synthetic oligonucleotide; AAG chr11 5243057 5243076 5243073 +
gcaaatatctaagggtaaag

SEQ ID NO: 10581 - DNA, 20 bp, Artificial Sequence
  Synthetic oligonucleotide; AAG chr11 5243061 5243080 5243077 +
atatctaagggtaaagaaga

SEQ ID NO: 10582 - DNA, 20 bp, Artificial Sequence
  Synthetic oligonucleotide; GAG chr11 5243067 5243086 5243083 +
aagggtaaagaagaaagcgt

SEQ ID NO: 10583 - DNA, 20 bp, Artificial Sequence
  Synthetic oligonucleotide; CAG chr11 5243086 5243105 5243102 +
tgagtgtacttactactcac

SEQ ID NO: 10584 - DNA, 20 bp, Artificial Sequence
  Synthetic oligonucleotide; AGG chr11 5243087 5243106 5243103 +
gagtgtacttactactcacc

SEQ ID NO: 10585 - DNA, 20 bp, Artificial Sequence
  Synthetic oligonucleotide; AAG chr11 5243090 5243109 5243106 +
tgtacttactactcaccagg

SEQ ID NO: 10586 - DNA, 20 bp, Artificial Sequence
  Synthetic oligonucleotide; CAG chr11 5243097 5243116 5243113 +
actactcaccaggaagttct

SEQ ID NO: 10587 - DNA, 20 bp, Artificial Sequence
  Synthetic oligonucleotide; AGG chr11 5243098 5243117 5243114 +
ctactcaccaggaagttctc

SEQ ID NO: 10588 - DNA, 20 bp, Artificial Sequence
  Synthetic oligonucleotide; GGG chr11 5243099 5243118 5243115 +
tactcaccaggaagttctca

SEQ ID NO: 10589 - DNA, 20 bp, Artificial Sequence
  Synthetic oligonucleotide; CAG chr11 5243110 5243129 5243126 +
aagttctcagggtccacgtg

SEQ ID NO: 10590 - DNA, 20 bp, Artificial Sequence
  Synthetic oligonucleotide; CAG chr11 5243120 5243139 5243136 +
ggtccacgtgcagcttgtta

SEQ ID NO: 10591 - DNA, 20 bp, Artificial Sequence
  Synthetic oligonucleotide; CAG chr11 5243125 5243144 5243141 +
acgtgcagcttgttacagtg

SEQ ID NO: 10592 - DNA, 20 bp, Artificial Sequence
  Synthetic oligonucleotide; AGG chr11 5243126 5243145 5243142 +
cgtgcagcttgttacagtgc

SEQ ID NO: 10593 - DNA, 20 bp, Artificial Sequence
  Synthetic oligonucleotide; CAG chr11 5243134 5243153 5243150 +
ttgttacagtgcaggtcact

SEQ ID NO: 10594 - DNA, 20 bp, Artificial Sequence
  Synthetic oligonucleotide; TAG chr11 5243139 5243158 5243155 +
acagtgcaggtcactcagtg

SEQ ID NO: 10595 - DNA, 20 bp, Artificial Sequence
  Synthetic oligonucleotide; AAG chr11 5243144 5243163 5243160 +
gcaggtcactcagtgtagca

SEQ ID NO: 10596 - DNA, 20 bp, Artificial Sequence
  Synthetic oligonucleotide; AGG chr11 5243145 5243164 5243161 +
caggtcactcagtgtagcaa

SEQ ID NO: 10597 - DNA, 20 bp, Artificial Sequence
  Synthetic oligonucleotide; GAG chr11 5243155 5243174 5243171 +
agtgtagcaaaggtgccttt

SEQ ID NO: 10598 - DNA, 20 bp, Artificial Sequence
  Synthetic oligonucleotide; AGG chr11 5243156 5243175 5243172 +
gtgtagcaaaggtgcctttg

SEQ ID NO: 10599 - DNA, 20 bp, Artificial Sequence
  Synthetic oligonucleotide; GAG chr11 5243167 5243186 5243183 +
gtgcctttgaggtcatccgt

SEQ ID NO: 10600 - DNA, 20 bp, Artificial Sequence
  Synthetic oligonucleotide; CAG chr11 5243175 5243194 5243191 +
gaggtcatccgtgagcataa

SEQ ID NO: 10601 - DNA, 20 bp, Artificial Sequence
  Synthetic oligonucleotide; AAG chr11 5243186 5243205 5243202 +
tgagcataacagcttttccg

SEQ ID NO: 10602 - DNA, 20 bp, Artificial Sequence
  Synthetic oligonucleotide; AGG chr11 5243187 5243206 5243203 +
gagcataacagcttttccga

SEQ ID NO: 10603 - DNA, 20 bp, Artificial Sequence
  Synthetic oligonucleotide; GAG chr11 5243189 5243208 5243205 +
gcataacagcttttccgaag

SEQ ID NO: 10604 - DNA, 20 bp, Artificial Sequence
  Synthetic oligonucleotide; CAG chr11 5243194 5243213 5243210 +
acagcttttccgaaggagat

SEQ ID NO: 10605 - DNA, 20 bp, Artificial Sequence
  Synthetic oligonucleotide; TGG chr11 5243223 5243242 5243239 +
cttgccatgtgccttgactt

SEQ ID NO: 10606 - DNA, 20 bp, Artificial Sequence
  Synthetic oligonucleotide; GGG chr11 5243224 5243243 5243240 +
ttgccatgtgccttgacttt

SEQ ID NO: 10607 - DNA, 20 bp, Artificial Sequence
  Synthetic oligonucleotide; GGG chr11 5243225 5243244 5243241 +
tgccatgtgccttgactttg

SEQ ID NO: 10608 - DNA, 20 bp, Artificial Sequence
  Synthetic oligonucleotide; CAG chr11 5243243 5243262 5243259 +
tggggttgcccattattgca

SEQ ID NO: 10609 - DNA, 20 bp, Artificial Sequence
  Synthetic oligonucleotide; CAG chr11 5243247 5243266 5243263 +
gttgcccattattgcacagt

SEQ ID NO: 10610 - DNA, 20 bp, Artificial Sequence
  Synthetic oligonucleotide; GAG chr11 5243249 5243268 5243265 +
tgcccattattgcacagtca

SEQ ID NO: 10611 - DNA, 20 bp, Artificial Sequence
  Synthetic oligonucleotide; CAG chr11 5243254 5243273 5243270 +
attattgcacagtcagagcc

SEQ ID NO: 10612 - DNA, 20 bp, Artificial Sequence
  Synthetic oligonucleotide; AAG chr11 5243273 5243292 5243289 +
ccagatatccaaaactttca

SEQ ID NO: 10613 - DNA, 20 bp, Artificial Sequence
  Synthetic oligonucleotide; TAG chr11 5243282 5243301 5243298 +
caaaactttcaaagtacctc

SEQ ID NO: 10614 - DNA, 20 bp, Artificial Sequence
  Synthetic oligonucleotide; AGG chr11 5243283 5243302 5243299 +
aaaactttcaaagtacctct

SEQ ID NO: 10615 - DNA, 20 bp, Artificial Sequence
  Synthetic oligonucleotide; TGG chr11 5243290 5243309 5243306 +
tcaaagtacctctaggtcca

SEQ ID NO: 10616 - DNA, 20 bp, Artificial Sequence
  Synthetic oligonucleotide; GGG chr11 5243291 5243310 5243307 +
caaagtacctctaggtccat

SEQ ID NO: 10617 - DNA, 20 bp, Artificial Sequence
  Synthetic oligonucleotide; TAG chr11 5243294 5243313 5243310 +
agtacctctaggtccatggg

SEQ ID NO: 10618 - DNA, 20 bp, Artificial Sequence
  Synthetic oligonucleotide; CAG chr11 5243302 5243321 5243318 +
taggtccatgggtagacaac

SEQ ID NO: 10619 - DNA, 20 bp, Artificial Sequence
  Synthetic oligonucleotide; AGG chr11 5243303 5243322 5243319 +
aggtccatgggtagacaacc

SEQ ID NO: 10620 - DNA, 20 bp, Artificial Sequence
  Synthetic oligonucleotide; GAG chr11 5243305 5243324 5243321 +
gtccatgggtagacaaccag

SEQ ID NO: 10621 - DNA, 20 bp, Artificial Sequence
  Synthetic oligonucleotide; TGG chr11 5243312 5243331 5243328 +
ggtagacaaccaggagactg

SEQ ID NO: 10622 - DNA, 20 bp, Artificial Sequence
  Synthetic oligonucleotide; GGG chr11 5243313 5243332 5243329 +
gtagacaaccaggagactgt

SEQ ID NO: 10623 - DNA, 20 bp, Artificial Sequence
  Synthetic oligonucleotide; TAG chr11 5243317 5243336 5243333 +
acaaccaggagactgtggga

SEQ ID NO: 10624 - DNA, 20 bp, Artificial Sequence
  Synthetic oligonucleotide; CAG chr11 5243329 5243348 5243345 +
ctgtgggatagtcataatca

SEQ ID NO: 10625 - DNA, 20 bp, Artificial Sequence
  Synthetic oligonucleotide; GAG chr11 5243331 5243350 5243347 +
gtgggatagtcataatcaca

SEQ ID NO: 10626 - DNA, 20 bp, Artificial Sequence
  Synthetic oligonucleotide; CAG chr11 5243334 5243353 5243350 +
ggatagtcataatcacagag

SEQ ID NO: 10627 - DNA, 20 bp, Artificial Sequence
  Synthetic oligonucleotide; AGG chr11 5243335 5243354 5243351 +
gatagtcataatcacagagc

SEQ ID NO: 10628 - DNA, 20 bp, Artificial Sequence
  Synthetic oligonucleotide; AAG chr11 5243342 5243361 5243358 +
ataatcacagagcaggtgca

SEQ ID NO: 10629 - DNA, 20 bp, Artificial Sequence
  Synthetic oligonucleotide; CAG chr11 5243346 5243365 5243362 +
tcacagagcaggtgcaaagt

SEQ ID NO: 10630 - DNA, 20 bp, Artificial Sequence
  Synthetic oligonucleotide; AAG chr11 5243356 5243375 5243372 +
ggtgcaaagtcagactatgt

SEQ ID NO: 10631 - DNA, 20 bp, Artificial Sequence
  Synthetic oligonucleotide; CGG chr11 5243363 5243382 5243379 +
agtcagactatgtaagacaa

SEQ ID NO: 10632 - DNA, 20 bp, Artificial Sequence
  Synthetic oligonucleotide; GGG chr11 5243364 5243383 5243380 +
gtcagactatgtaagacaac

SEQ ID NO: 10633 - DNA, 20 bp, Artificial Sequence
  Synthetic oligonucleotide; CAG chr11 5243380 5243399 5243396 +
caacgggctaatccctcttt

SEQ ID NO: 10634 - DNA, 20 bp, Artificial Sequence
  Synthetic oligonucleotide; CGG chr11 5243413 5243432 5243429 +
tgcctttctgcaccttgtcc

SEQ ID NO: 10635 - DNA, 20 bp, Artificial Sequence
  Synthetic oligonucleotide; CAG chr11 5243420 5243439 5243436 +
ctgcaccttgtcccggcttc

SEQ ID NO: 10636 - DNA, 20 bp, Artificial Sequence
  Synthetic oligonucleotide; CAG chr11 5243435 5243454 5243451 +
gcttccagtacctacctgcc

SEQ ID NO: 10637 - DNA, 20 bp, Artificial Sequence
  Synthetic oligonucleotide; CAG chr11 5243449 5243468 5243465 +
cctgcccagaatctcacctc

SEQ ID NO: 10638 - DNA, 20 bp, Artificial Sequence
  Synthetic oligonucleotide; CAG chr11 5243476 5243495 5243492 +
ctcaccttaaccttgcttca

SEQ ID NO: 10639 - DNA, 20 bp, Artificial Sequence
  Synthetic oligonucleotide; AGG chr11 5243477 5243496 5243493 +
tcaccttaaccttgcttcac

SEQ ID NO: 10640 - DNA, 20 bp, Artificial Sequence
  Synthetic oligonucleotide; TGG chr11 5243481 5243500 5243497 +
cttaaccttgcttcacaggc

SEQ ID NO: 10641 - DNA, 20 bp, Artificial Sequence
  Synthetic oligonucleotide; TGG chr11 5243484 5243503 5243500 +
aaccttgcttcacaggctgg

SEQ ID NO: 10642 - DNA, 20 bp, Artificial Sequence
  Synthetic oligonucleotide; CAG chr11 5243487 5243506 5243503 +
cttgcttcacaggctggtgg

SEQ ID NO: 10643 - DNA, 20 bp, Artificial Sequence
  Synthetic oligonucleotide; CAG chr11 5243490 5243509 5243506 +
gcttcacaggctggtggcag

SEQ ID NO: 10644 - DNA, 20 bp, Artificial Sequence
  Synthetic oligonucleotide; CAG chr11 5243502 5243521 5243518 +
ggtggcagcagccttcttgt

SEQ ID NO: 10645 - DNA, 20 bp, Artificial Sequence
  Synthetic oligonucleotide; CAG chr11 5243505 5243524 5243521 +
ggcagcagccttcttgtcag

SEQ ID NO: 10646 - DNA, 20 bp, Artificial Sequence
  Synthetic oligonucleotide; CAG chr11 5243520 5243539 5243536 +
gtcagcagtgaaatgcacta

SEQ ID NO: 10647 - DNA, 20 bp, Artificial Sequence
  Synthetic oligonucleotide; CAG chr11 5243526 5243545 5243542 +
agtgaaatgcactacagtgt

SEQ ID NO: 10648 - DNA, 20 bp, Artificial Sequence
  Synthetic oligonucleotide; TGG chr11 5243532 5243551 5243548 +
atgcactacagtgtcagatc

SEQ ID NO: 10649 - DNA, 20 bp, Artificial Sequence
  Synthetic oligonucleotide; GGG chr11 5243533 5243552 5243549 +
tgcactacagtgtcagatct

SEQ ID NO: 10650 - DNA, 20 bp, Artificial Sequence
  Synthetic oligonucleotide; GAG chr11 5243535 5243554 5243551 +
cactacagtgtcagatctgg

SEQ ID NO: 10651 - DNA, 20 bp, Artificial Sequence
  Synthetic oligonucleotide; TGG chr11 5243543 5243562 5243559 +
tgtcagatctgggagtttcc

SEQ ID NO: 10652 - DNA, 20 bp, Artificial Sequence
  Synthetic oligonucleotide; CAG chr11 5243552 5243571 5243568 +
tgggagtttcctggtgatca

SEQ ID NO: 10653 - DNA, 20 bp, Artificial Sequence
  Synthetic oligonucleotide; GAG chr11 5243557 5243576 5243573 +
gtttcctggtgatcacagat

SEQ ID NO: 10654 - DNA, 20 bp, Artificial Sequence
  Synthetic oligonucleotide; CAG chr11 5243561 5243580 5243577 +
cctggtgatcacagatgagc

SEQ ID NO: 10655 - DNA, 20 bp, Artificial Sequence
  Synthetic oligonucleotide; AAG chr11 5243564 5243583 5243580 +
ggtgatcacagatgagccag

SEQ ID NO: 10656 - DNA, 20 bp, Artificial Sequence
  Synthetic oligonucleotide; TGG chr11 5243592 5243611 5243608 +
ctgcattgctgcttcatgtg

SEQ ID NO: 10657 - DNA, 20 bp, Artificial Sequence
  Synthetic oligonucleotide; TGG chr11 5243613 5243632 5243629 +
ggctttttacttctcctctc

SEQ ID NO: 10658 - DNA, 20 bp, Artificial Sequence
  Synthetic oligonucleotide; CAG chr11 5243620 5243639 5243636 +
tacttctcctctctggcccc

SEQ ID NO: 10659 - DNA, 20 bp, Artificial Sequence
  Synthetic oligonucleotide; CAG chr11 5243637 5243656 5243653 +
ccccagccctttgcctctcc

SEQ ID NO: 10660 - DNA, 20 bp, Artificial Sequence
  Synthetic oligonucleotide; CAG chr11 5243658 5243677 5243674 +
agtgaaatgaatctattgac

SEQ ID NO: 10661 - DNA, 20 bp, Artificial Sequence
  Synthetic oligonucleotide; CAG chr11 5243675 5243694 5243691 +
gaccagccctttgcctccct

SEQ ID NO: 10662 - DNA, 20 bp, Artificial Sequence
  Synthetic oligonucleotide; TGG chr11 5243692 5243711 5243708 +
cctcagtaaaatgaatctat

SEQ ID NO: 10663 - DNA, 20 bp, Artificial Sequence
  Synthetic oligonucleotide; AAG chr11 5243697 5243716 5243713 +
gtaaaatgaatctattggtc

SEQ ID NO: 10664 - DNA, 20 bp, Artificial Sequence
  Synthetic oligonucleotide; AGG chr11 5243698 5243717 5243714 +
taaaatgaatctattggtca

SEQ ID NO: 10665 - DNA, 20 bp, Artificial Sequence
  Synthetic oligonucleotide; GGG chr11 5243699 5243718 5243715 +
aaaatgaatctattggtcaa

SEQ ID NO: 10666 - DNA, 20 bp, Artificial Sequence
  Synthetic oligonucleotide; TGG chr11 5243702 5243721 5243718 +
atgaatctattggtcaaggg

SEQ ID NO: 10667 - DNA, 20 bp, Artificial Sequence
  Synthetic oligonucleotide; GGG chr11 5243703 5243722 5243719 +
tgaatctattggtcaagggt

SEQ ID NO: 10668 - DNA, 20 bp, Artificial Sequence
  Synthetic oligonucleotide; CAG chr11 5243715 5243734 5243731 +
tcaagggtgggttgtgactc

SEQ ID NO: 10669 - DNA, 20 bp, Artificial Sequence
  Synthetic oligonucleotide; AGG chr11 5243716 5243735 5243732 +
caagggtgggttgtgactcc

SEQ ID NO: 10670 - DNA, 20 bp, Artificial Sequence
  Synthetic oligonucleotide; GGG chr11 5243717 5243736 5243733 +
aagggtgggttgtgactcca

SEQ ID NO: 10671 - DNA, 20 bp, Artificial Sequence
  Synthetic oligonucleotide; GGG chr11 5243718 5243737 5243734 +
agggtgggttgtgactccag

SEQ ID NO: 10672 - DNA, 20 bp, Artificial Sequence
  Synthetic oligonucleotide; TGG chr11 5243721 5243740 5243737 +
gtgggttgtgactccagggg

SEQ ID NO: 10673 - DNA, 20 bp, Artificial Sequence
  Synthetic oligonucleotide; GGG chr11 5243722 5243741 5243738 +
tgggttgtgactccaggggt

SEQ ID NO: 10674 - DNA, 20 bp, Artificial Sequence
  Synthetic oligonucleotide; GGG chr11 5243723 5243742 5243739 +
gggttgtgactccaggggtg

SEQ ID NO: 10675 - DNA, 20 bp, Artificial Sequence
  Synthetic oligonucleotide; TGG chr11 5243728 5243747 5243744 +
gtgactccaggggtggggtt

SEQ ID NO: 10676 - DNA, 20 bp, Artificial Sequence
  Synthetic oligonucleotide; GGG chr11 5243729 5243748 5243745 +
tgactccaggggtggggttt

SEQ ID NO: 10677 - DNA, 20 bp, Artificial Sequence
  Synthetic oligonucleotide; AAG chr11 5243733 5243752 5243749 +
tccaggggtggggtttgggc

SEQ ID NO: 10678 - DNA, 20 bp, Artificial Sequence
  Synthetic oligonucleotide; AGG chr11 5243734 5243753 5243750 +
ccaggggtggggtttgggca

SEQ ID NO: 10679 - DNA, 20 bp, Artificial Sequence
  Synthetic oligonucleotide; AAG chr11 5243737 5243756 5243753 +
ggggtggggtttgggcaagg

SEQ ID NO: 10680 - DNA, 20 bp, Artificial Sequence
  Synthetic oligonucleotide; AAG chr11 5243746 5243765 5243762 +
tttgggcaaggaagttttgc

SEQ ID NO: 10681 - DNA, 20 bp, Artificial Sequence
  Synthetic oligonucleotide; TGG chr11 5243750 5243769 5243766 +
ggcaaggaagttttgcaaga

SEQ ID NO: 10682 - DNA, 20 bp, Artificial Sequence
  Synthetic oligonucleotide; GAG chr11 5243759 5243778 5243775 +
gttttgcaagatggacattc

SEQ ID NO: 10683 - DNA, 20 bp, Artificial Sequence
  Synthetic oligonucleotide; TAG chr11 5243769 5243788 5243785 +
atggacattcgagtttctga

SEQ ID NO: 10684 - DNA, 20 bp, Artificial Sequence
  Synthetic oligonucleotide; CAG chr11 5243776 5243795 5243792 +
ttcgagtttctgatagaatc

SEQ ID NO: 10685 - DNA, 20 bp, Artificial Sequence
  Synthetic oligonucleotide; AGG chr11 5243777 5243796 5243793 +
tcgagtttctgatagaatcc

SEQ ID NO: 10686 - DNA, 20 bp, Artificial Sequence
  Synthetic oligonucleotide; TGG chr11 5243780 5243799 5243796 +
agtttctgatagaatccagg

SEQ ID NO: 10687 - DNA, 20 bp, Artificial Sequence
  Synthetic oligonucleotide; CAG chr11 5243789 5243808 5243805 +
tagaatccaggtggccttct

SEQ ID NO: 10688 - DNA, 20 bp, Artificial Sequence
  Synthetic oligonucleotide; AGG chr11 5243790 5243809 5243806 +
agaatccaggtggccttctc

SEQ ID NO: 10689 - DNA, 20 bp, Artificial Sequence
  Synthetic oligonucleotide; GGG chr11 5243791 5243810 5243807 +
gaatccaggtggccttctca

SEQ ID NO: 10690 - DNA, 20 bp, Artificial Sequence
  Synthetic oligonucleotide; GGG chr11 5243792 5243811 5243808 +
aatccaggtggccttctcag

SEQ ID NO: 10691 - DNA, 20 bp, Artificial Sequence
  Synthetic oligonucleotide; CAG chr11 5243807 5243826 5243823 +
ctcaggggaactttgctgtt

SEQ ID NO: 10692 - DNA, 20 bp, Artificial Sequence
  Synthetic oligonucleotide; AGG chr11 5243808 5243827 5243824 +
tcaggggaactttgctgttc

SEQ ID NO: 10693 - DNA, 20 bp, Artificial Sequence
  Synthetic oligonucleotide; CAG chr11 5243867 5243886 5243883 +
cctacactacccccaccatc

SEQ ID NO: 10694 - DNA, 20 bp, Artificial Sequence
  Synthetic oligonucleotide; CAG chr11 5243874 5243893 5243890 +
tacccccaccatccagtgtg

SEQ ID NO: 10695 - DNA, 20 bp, Artificial Sequence
  Synthetic oligonucleotide; AAG chr11 5243887 5243906 5243903 +
cagtgtgcagtttatttctc

SEQ ID NO: 10696 - DNA, 20 bp, Artificial Sequence
  Synthetic oligonucleotide; AGG chr11 5243888 5243907 5243904 +
agtgtgcagtttatttctca

SEQ ID NO: 10697 - DNA, 20 bp, Artificial Sequence
  Synthetic oligonucleotide; CAG chr11 5243898 5243917 5243914 +
ttatttctcaaggacttcgc

SEQ ID NO: 10698 - DNA, 20 bp, Artificial Sequence
  Synthetic oligonucleotide; CAG chr11 5243901 5243920 5243917 +
tttctcaaggacttcgccag

SEQ ID NO: 10699 - DNA, 20 bp, Artificial Sequence
  Synthetic oligonucleotide; TAG chr11 5243930 5243949 5243946 +
ataacctgaatgctgacaaa

SEQ ID NO: 10700 - DNA, 20 bp, Artificial Sequence
  Synthetic oligonucleotide; AGG chr11 5243931 5243950 5243947 +
taacctgaatgctgacaaat

SEQ ID NO: 10701 - DNA, 20 bp, Artificial Sequence
  Synthetic oligonucleotide; AAG chr11 5243937 5243956 5243953 +
gaatgctgacaaataggaat

SEQ ID NO: 10702 - DNA, 20 bp, Artificial Sequence
  Synthetic oligonucleotide; AAG chr11 5243951 5243970 5243967 +
aggaataagttacaactgaa

SEQ ID NO: 10703 - DNA, 20 bp, Artificial Sequence
  Synthetic oligonucleotide; AGG chr11 5243952 5243971 5243968 +
ggaataagttacaactgaaa

SEQ ID NO: 10704 - DNA, 20 bp, Artificial Sequence
  Synthetic oligonucleotide; AAG chr11 5243957 5243976 5243973 +
aagttacaactgaaaaggat

SEQ ID NO: 10705 - DNA, 20 bp, Artificial Sequence
  Synthetic oligonucleotide; TAG chr11 5243974 5243993 5243990 +
gataagaattacgaatatct

SEQ ID NO: 10706 - DNA, 20 bp, Artificial Sequence
  Synthetic oligonucleotide; TGG chr11 5243988 5244007 5244004 +
atatcttagccatcaattcc

SEQ ID NO: 10707 - DNA, 20 bp, Artificial Sequence
  Synthetic oligonucleotide; CAG chr11 5243993 5244012 5244009 +
ttagccatcaattcctggat

SEQ ID NO: 10708 - DNA, 20 bp, Artificial Sequence
  Synthetic oligonucleotide; AGG chr11 5243994 5244013 5244010 +
tagccatcaattcctggatc

SEQ ID NO: 10709 - DNA, 20 bp, Artificial Sequence
  Synthetic oligonucleotide; GAG chr11 5243996 5244015 5244012 +
gccatcaattcctggatcag

SEQ ID NO: 10710 - DNA, 20 bp, Artificial Sequence
  Synthetic oligonucleotide; CAG chr11 5244037 5244056 5244053 +
gtgttatcctgttattcatc

SEQ ID NO: 10711 - DNA, 20 bp, Artificial Sequence
  Synthetic oligonucleotide; AGG chr11 5244038 5244057 5244054 +
tgttatcctgttattcatcc

SEQ ID NO: 10712 - DNA, 20 bp, Artificial Sequence
  Synthetic oligonucleotide; TGG chr11 5244048 5244067 5244064 +
ttattcatccaggctttatg

SEQ ID NO: 10713 - DNA, 20 bp, Artificial Sequence
  Synthetic oligonucleotide; AAG chr11 5244051 5244070 5244067 +
ttcatccaggctttatgtgg

SEQ ID NO: 10714 - DNA, 20 bp, Artificial Sequence
  Synthetic oligonucleotide; AAG chr11 5244054 5244073 5244070 +
atccaggctttatgtggaag

SEQ ID NO: 10715 - DNA, 20 bp, Artificial Sequence
  Synthetic oligonucleotide; CAG chr11 5244060 5244079 5244076 +
gctttatgtggaagaagcca

SEQ ID NO: 10716 - DNA, 20 bp, Artificial Sequence
  Synthetic oligonucleotide; TGG chr11 5244070 5244089 5244086 +
gaagaagccacagcctttct

SEQ ID NO: 10717 - DNA, 20 bp, Artificial Sequence
  Synthetic oligonucleotide; GAG chr11 5244087 5244106 5244103 +
tcttggttttcaattctctt

SEQ ID NO: 10718 - DNA, 20 bp, Artificial Sequence
  Synthetic oligonucleotide; CAG chr11 5244114 5244133 5244130 +
cattgaatacacaatttcat

SEQ ID NO: 10719 - DNA, 20 bp, Artificial Sequence
  Synthetic oligonucleotide; GAG chr11 5244165 5244184 5244181 +
tttttttttttttttttttt

SEQ ID NO: 10720 - DNA, 20 bp, Artificial Sequence
  Synthetic oligonucleotide; TGG chr11 5244169 5244188 5244185 +
ttttttttttttttttgaga

SEQ ID NO: 10721 - DNA, 20 bp, Artificial Sequence
  Synthetic oligonucleotide; GAG chr11 5244171 5244190 5244187 +
ttttttttttttttgagatg

SEQ ID NO: 10722 - DNA, 20 bp, Artificial Sequence
  Synthetic oligonucleotide; CAG chr11 5244189 5244208 5244205 +
tggagtctcgctttgtcacc

SEQ ID NO: 10723 - DNA, 20 bp, Artificial Sequence
  Synthetic oligonucleotide; AGG chr11 5244190 5244209 5244206 +
ggagtctcgctttgtcaccc

SEQ ID NO: 10724 - DNA, 20 bp, Artificial Sequence
  Synthetic oligonucleotide; TGG chr11 5244194 5244213 5244210 +
tctcgctttgtcacccaggc

SEQ ID NO: 10725 - DNA, 20 bp, Artificial Sequence
  Synthetic oligonucleotide; GAG chr11 5244196 5244215 5244212 +
tcgctttgtcacccaggctg

SEQ ID NO: 10726 - DNA, 20 bp, Artificial Sequence
  Synthetic oligonucleotide; CAG chr11 5244203 5244222 5244219 +
gtcacccaggctggagtgtg

SEQ ID NO: 10727 - DNA, 20 bp, Artificial Sequence
  Synthetic oligonucleotide; TGG chr11 5244206 5244225 5244222 +
acccaggctggagtgtgcag

SEQ ID NO: 10728 - DNA, 20 bp, Artificial Sequence
  Synthetic oligonucleotide; AAG chr11 5244228 5244247 5244244 +
gcgcgatctctgctcaccgc

SEQ ID NO: 10729 - DNA, 20 bp, Artificial Sequence
  Synthetic oligonucleotide; CAG chr11 5244241 5244260 5244257 +
tcaccgcaagctctgcctcc

SEQ ID NO: 10730 - DNA, 20 bp, Artificial Sequence
  Synthetic oligonucleotide; AGG chr11 5244242 5244261 5244258 +
caccgcaagctctgcctccc

SEQ ID NO: 10731 - DNA, 20 bp, Artificial Sequence
  Synthetic oligonucleotide; CAG chr11 5244265 5244284 5244281 +
ttcacgccattctcctgcct

SEQ ID NO: 10732 - DNA, 20 bp, Artificial Sequence
  Synthetic oligonucleotide; GAG chr11 5244274 5244293 5244290 +
ttctcctgcctcagcctccc

SEQ ID NO: 10733 - DNA, 20 bp, Artificial Sequence
  Synthetic oligonucleotide; TAG chr11 5244277 5244296 5244293 +
tcctgcctcagcctcccgag

SEQ ID NO: 10734 - DNA, 20 bp, Artificial Sequence
  Synthetic oligonucleotide; TGG chr11 5244281 5244300 5244297 +
gcctcagcctcccgagtagc

SEQ ID NO: 10735 - DNA, 20 bp, Artificial Sequence
  Synthetic oligonucleotide; GGG chr11 5244282 5244301 5244298 +
cctcagcctcccgagtagct

SEQ ID NO: 10736 - DNA, 20 bp, Artificial Sequence
  Synthetic oligonucleotide; CAG chr11 5244289 5244308 5244305 +
ctcccgagtagctgggacta

SEQ ID NO: 10737 - DNA, 20 bp, Artificial Sequence
  Synthetic oligonucleotide; AGG chr11 5244290 5244309 5244306 +
tcccgagtagctgggactac

SEQ ID NO: 10738 - DNA, 20 bp, Artificial Sequence
  Synthetic oligonucleotide; TGG chr11 5244309 5244328 5244325 +
caggcacccgccactgtctc

SEQ ID NO: 10739 - DNA, 20 bp, Artificial Sequence
  Synthetic oligonucleotide; TAG chr11 5244329 5244348 5244345 +
tggctaattttttgtatttt

SEQ ID NO: 10740 - DNA, 20 bp, Artificial Sequence
  Synthetic oligonucleotide; TAG chr11 5244332 5244351 5244348 +
ctaattttttgtatttttag

SEQ ID NO: 10741 - DNA, 20 bp, Artificial Sequence
  Synthetic oligonucleotide; GAG chr11 5244334 5244353 5244350 +
aattttttgtatttttagta

SEQ ID NO: 10742 - DNA, 20 bp, Artificial Sequence
  Synthetic oligonucleotide; TGG chr11 5244338 5244357 5244354 +
ttttgtatttttagtagaga

SEQ ID NO: 10743 - DNA, 20 bp, Artificial Sequence
  Synthetic oligonucleotide; GGG chr11 5244339 5244358 5244355 +
tttgtatttttagtagagat

SEQ ID NO: 10744 - DNA, 20 bp, Artificial Sequence
  Synthetic oligonucleotide; GGG chr11 5244340 5244359 5244356 +
ttgtatttttagtagagatg

SEQ ID NO: 10745 - DNA, 20 bp, Artificial Sequence
  Synthetic oligonucleotide; TAG chr11 5244354 5244373 5244370 +
gagatggggtttcaccatgt

SEQ ID NO: 10746 - DNA, 20 bp, Artificial Sequence
  Synthetic oligonucleotide; CAG chr11 5244358 5244377 5244374 +
tggggtttcaccatgttagc

SEQ ID NO: 10747 - DNA, 20 bp, Artificial Sequence
  Synthetic oligonucleotide; AGG chr11 5244359 5244378 5244375 +
ggggtttcaccatgttagcc

SEQ ID NO: 10748 - DNA, 20 bp, Artificial Sequence
  Synthetic oligonucleotide; TGG chr11 5244363 5244382 5244379 +
tttcaccatgttagccagga

SEQ ID NO: 10749 - DNA, 20 bp, Artificial Sequence
  Synthetic oligonucleotide; CAG chr11 5244399 5244418 5244415 +
acctcgtgatccgcccacct

SEQ ID NO: 10750 - DNA, 20 bp, Artificial Sequence
  Synthetic oligonucleotide; AAG chr11 5244409 5244428 5244425 +
ccgcccacctcagcctccca

SEQ ID NO: 10751 - DNA, 20 bp, Artificial Sequence
  Synthetic oligonucleotide; TGG chr11 5244415 5244434 5244431 +
acctcagcctcccaaagtgc

SEQ ID NO: 10752 - DNA, 20 bp, Artificial Sequence
  Synthetic oligonucleotide; GGG chr11 5244416 5244435 5244432 +
cctcagcctcccaaagtgct

SEQ ID NO: 10753 - DNA, 20 bp, Artificial Sequence
  Synthetic oligonucleotide; CAG chr11 5244423 5244442 5244439 +
ctcccaaagtgctgggatta

SEQ ID NO: 10754 - DNA, 20 bp, Artificial Sequence
  Synthetic oligonucleotide; AGG chr11 5244424 5244443 5244440 +
tcccaaagtgctgggattac

SEQ ID NO: 10755 - DNA, 20 bp, Artificial Sequence
  Synthetic oligonucleotide; GAG chr11 5244430 5244449 5244446 +
agtgctgggattacaggtgt

SEQ ID NO: 10756 - DNA, 20 bp, Artificial Sequence
  Synthetic oligonucleotide; CGG chr11 5244443 5244462 5244459 +
caggtgtgagccaccgcgcc

SEQ ID NO: 10757 - DNA, 20 bp, Artificial Sequence
  Synthetic oligonucleotide; TAG chr11 5244463 5244482 5244479 +
cggccaatttcatcactttt

SEQ ID NO: 10758 - DNA, 20 bp, Artificial Sequence
  Synthetic oligonucleotide; TAG chr11 5244468 5244487 5244484 +
aatttcatcactttttagaa

SEQ ID NO: 10759 - DNA, 20 bp, Artificial Sequence
  Synthetic oligonucleotide; CAG chr11 5244488 5244507 5244504 +
tagaaataaacacctctatc

SEQ ID NO: 10760 - DNA, 20 bp, Artificial Sequence
  Synthetic oligonucleotide; TGG chr11 5244499 5244518 5244515 +
acctctatccagcatcaact

SEQ ID NO: 10761 - DNA, 20 bp, Artificial Sequence
  Synthetic oligonucleotide; AAG chr11 5244502 5244521 5244518 +
tctatccagcatcaacttgg

SEQ ID NO: 10762 - DNA, 20 bp, Artificial Sequence
  Synthetic oligonucleotide; AAG chr11 5244506 5244525 5244522 +
tccagcatcaacttggaaga

SEQ ID NO: 10763 - DNA, 20 bp, Artificial Sequence
  Synthetic oligonucleotide; CAG chr11 5244509 5244528 5244525 +
agcatcaacttggaagaaag

SEQ ID NO: 10764 - DNA, 20 bp, Artificial Sequence
  Synthetic oligonucleotide; AAG chr11 5244515 5244534 5244531 +
aacttggaagaaagcagaat

SEQ ID NO: 10765 - DNA, 20 bp, Artificial Sequence
  Synthetic oligonucleotide; TAG chr11 5244526 5244545 5244542 +
aagcagaataagaaacaaac

SEQ ID NO: 10766 - DNA, 20 bp, Artificial Sequence
  Synthetic oligonucleotide; AGG chr11 5244527 5244546 5244543 +
agcagaataagaaacaaact

SEQ ID NO: 10767 - DNA, 20 bp, Artificial Sequence
  Synthetic oligonucleotide; GGG chr11 5244528 5244547 5244544 +
gcagaataagaaacaaacta

SEQ ID NO: 10768 - DNA, 20 bp, Artificial Sequence
  Synthetic oligonucleotide; AAG chr11 5244531 5244550 5244547 +
gaataagaaacaaactaggg

SEQ ID NO: 10769 - DNA, 20 bp, Artificial Sequence
  Synthetic oligonucleotide; AAG chr11 5244535 5244554 5244551 +
aagaaacaaactagggaagt

SEQ ID NO: 10770 - DNA, 20 bp, Artificial Sequence
  Synthetic oligonucleotide; AGG chr11 5244536 5244555 5244552 +
agaaacaaactagggaagta

SEQ ID NO: 10771 - DNA, 20 bp, Artificial Sequence
  Synthetic oligonucleotide; GGG chr11 5244537 5244556 5244553 +
gaaacaaactagggaagtaa

SEQ ID NO: 10772 - DNA, 20 bp, Artificial Sequence
  Synthetic oligonucleotide; GGG chr11 5244538 5244557 5244554 +
aaacaaactagggaagtaag

SEQ ID NO: 10773 - DNA, 20 bp, Artificial Sequence
  Synthetic oligonucleotide; TGG chr11 5244546 5244565 5244562 +
tagggaagtaaggggaaaac

SEQ ID NO: 10774 - DNA, 20 bp, Artificial Sequence
  Synthetic oligonucleotide; GGG chr11 5244547 5244566 5244563 +
agggaagtaaggggaaaact

SEQ ID NO: 10775 - DNA, 20 bp, Artificial Sequence
  Synthetic oligonucleotide; TAG chr11 5244577 5244596 5244593 +
actgtgttttttaatccatt

SEQ ID NO: 10776 - DNA, 20 bp, Artificial Sequence
  Synthetic oligonucleotide; TAG chr11 5244580 5244599 5244596 +
gtgttttttaatccatttag

SEQ ID NO: 10777 - DNA, 20 bp, Artificial Sequence
  Synthetic oligonucleotide; CAG chr11 5244584 5244603 5244600 +
tttttaatccatttagtagt

SEQ ID NO: 10778 - DNA, 20 bp, Artificial Sequence
  Synthetic oligonucleotide; AAG chr11 5244603 5244622 5244619 +
tcagtgtacttatctgaaca

SEQ ID NO: 10779 - DNA, 20 bp, Artificial Sequence
  Synthetic oligonucleotide; AGG chr11 5244604 5244623 5244620 +
cagtgtacttatctgaacaa

SEQ ID NO: 10780 - DNA, 20 bp, Artificial Sequence
  Synthetic oligonucleotide; GAG chr11 5244606 5244625 5244622 +
gtgtacttatctgaacaaag

SEQ ID NO: 10781 - DNA, 20 bp, Artificial Sequence
  Synthetic oligonucleotide; TAG chr11 5244632 5244651 5244648 +
tcctctgaatcattgaacaa

SEQ ID NO: 10782 - DNA, 20 bp, Artificial Sequence
  Synthetic oligonucleotide; CAG chr11 5244670 5244689 5244686 +
acatatctacaaaattatgc

SEQ ID NO: 10783 - DNA, 20 bp, Artificial Sequence
  Synthetic oligonucleotide; TAG chr11 5244682 5244701 5244698 +
aattatgccagaacatctaa

SEQ ID NO: 10784 - DNA, 20 bp, Artificial Sequence
  Synthetic oligonucleotide; TGG chr11 5244688 5244707 5244704 +
gccagaacatctaatagtgt

SEQ ID NO: 10785 - DNA, 20 bp, Artificial Sequence
  Synthetic oligonucleotide; GGG chr11 5244689 5244708 5244705 +
ccagaacatctaatagtgtt

SEQ ID NO: 10786 - DNA, 20 bp, Artificial Sequence
  Synthetic oligonucleotide; GGG chr11 5244690 5244709 5244706 +
cagaacatctaatagtgttg

SEQ ID NO: 10787 - DNA, 20 bp, Artificial Sequence
  Synthetic oligonucleotide; GGG chr11 5244691 5244710 5244707 +
agaacatctaatagtgttgg

SEQ ID NO: 10788 - DNA, 20 bp, Artificial Sequence
  Synthetic oligonucleotide; GAG chr11 5244693 5244712 5244709 +
aacatctaatagtgttgggg

SEQ ID NO: 10789 - DNA, 20 bp, Artificial Sequence
  Synthetic oligonucleotide; AAG chr11 5244696 5244715 5244712 +
atctaatagtgttgggggag

SEQ ID NO: 10790 - DNA, 20 bp, Artificial Sequence
  Synthetic oligonucleotide; AAG chr11 5244714 5244733 5244730 +
agaagtgtgctgctctgttc

SEQ ID NO: 10791 - DNA, 20 bp, Artificial Sequence
  Synthetic oligonucleotide; AAG chr11 5244718 5244737 5244734 +
gtgtgctgctctgttcaagc

SEQ ID NO: 10792 - DNA, 20 bp, Artificial Sequence
  Synthetic oligonucleotide; GAG chr11 5244720 5244739 5244736 +
gtgctgctctgttcaagcaa

SEQ ID NO: 10793 - DNA, 20 bp, Artificial Sequence
  Synthetic oligonucleotide; AGG chr11 5244721 5244740 5244737 +
tgctgctctgttcaagcaag

SEQ ID NO: 10794 - DNA, 20 bp, Artificial Sequence
  Synthetic oligonucleotide; TAG chr11 5244725 5244744 5244741 +
gctctgttcaagcaagagga

SEQ ID NO: 10795 - DNA, 20 bp, Artificial Sequence
  Synthetic oligonucleotide; AGG chr11 5244726 5244745 5244742 +
ctctgttcaagcaagaggat

SEQ ID NO: 10796 - DNA, 20 bp, Artificial Sequence
  Synthetic oligonucleotide; GAG chr11 5244728 5244747 5244744 +
ctgttcaagcaagaggatag

SEQ ID NO: 10797 - DNA, 20 bp, Artificial Sequence
  Synthetic oligonucleotide; TGG chr11 5244737 5244756 5244753 +
caagaggataggagattccg

SEQ ID NO: 10798 - DNA, 20 bp, Artificial Sequence
  Synthetic oligonucleotide; TGG chr11 5244747 5244766 5244763 +
ggagattccgtggcccgtgc

SEQ ID NO: 10799 - DNA, 20 bp, Artificial Sequence
  Synthetic oligonucleotide; GGG chr11 5244748 5244767 5244764 +
gagattccgtggcccgtgct

SEQ ID NO: 10800 - DNA, 20 bp, Artificial Sequence
  Synthetic oligonucleotide; TAG chr11 5244754 5244773 5244770 +
ccgtggcccgtgctgggcat

SEQ ID NO: 10801 - DNA, 20 bp, Artificial Sequence
  Synthetic oligonucleotide; AGG chr11 5244755 5244774 5244771 +
cgtggcccgtgctgggcatt

SEQ ID NO: 10802 - DNA, 20 bp, Artificial Sequence
  Synthetic oligonucleotide; TGG chr11 5244769 5244788 5244785 +
ggcattaggtcatttgtgtc

SEQ ID NO: 10803 - DNA, 20 bp, Artificial Sequence
  Synthetic oligonucleotide; CAG chr11 5244774 5244793 5244790 +
taggtcatttgtgtctggca

SEQ ID NO: 10804 - DNA, 20 bp, Artificial Sequence
  Synthetic oligonucleotide; AGG chr11 5244775 5244794 5244791 +
aggtcatttgtgtctggcac

SEQ ID NO: 10805 - DNA, 20 bp, Artificial Sequence
  Synthetic oligonucleotide; TAG chr11 5244787 5244806 5244803 +
tctggcacaggcttgatcta

SEQ ID NO: 10806 - DNA, 20 bp, Artificial Sequence
  Synthetic oligonucleotide; CAG chr11 5244825 5244844 5244841 +
aacttgtctttatatctaat

SEQ ID NO: 10807 - DNA, 20 bp, Artificial Sequence
  Synthetic oligonucleotide; AGG chr11 5244826 5244845 5244842 +
acttgtctttatatctaatc

SEQ ID NO: 10808 - DNA, 20 bp, Artificial Sequence
  Synthetic oligonucleotide; AAG chr11 5244831 5244850 5244847 +
tctttatatctaatcaggca

SEQ ID NO: 10809 - DNA, 20 bp, Artificial Sequence
  Synthetic oligonucleotide; CAG chr11 5244858 5244877 5244874 +
tcttcactgacaatattcca

SEQ ID NO: 10810 - DNA, 20 bp, Artificial Sequence
  Synthetic oligonucleotide; AGG chr11 5244859 5244878 5244875 +
cttcactgacaatattccac

SEQ ID NO: 10811 - DNA, 20 bp, Artificial Sequence
  Synthetic oligonucleotide; AAG chr11 5244907 5244926 5244923 +
acgtctcatgcgtctcaaac

SEQ ID NO: 10812 - DNA, 20 bp, Artificial Sequence
  Synthetic oligonucleotide; CAG chr11 5244916 5244935 5244932 +
gcgtctcaaacaagcaattt

SEQ ID NO: 10813 - DNA, 20 bp, Artificial Sequence
  Synthetic oligonucleotide; AGG chr11 5244917 5244936 5244933 +
cgtctcaaacaagcaatttc

SEQ ID NO: 10814 - DNA, 20 bp, Artificial Sequence
  Synthetic oligonucleotide; TAG chr11 5244922 5244941 5244938 +
caaacaagcaatttcaggaa

SEQ ID NO: 10815 - DNA, 20 bp, Artificial Sequence
  Synthetic oligonucleotide; CAG chr11 5244926 5244945 5244942 +
caagcaatttcaggaataga

SEQ ID NO: 10816 - DNA, 20 bp, Artificial Sequence
  Synthetic oligonucleotide; AGG chr11 5244927 5244946 5244943 +
aagcaatttcaggaatagac

SEQ ID NO: 10817 - DNA, 20 bp, Artificial Sequence
  Synthetic oligonucleotide; GGG chr11 5244928 5244947 5244944 +
agcaatttcaggaatagaca

SEQ ID NO: 10818 - DNA, 20 bp, Artificial Sequence
  Synthetic oligonucleotide; CGG chr11 5244942 5244961 5244958 +
tagacagggcacacttccac

SEQ ID NO: 10819 - DNA, 20 bp, Artificial Sequence
  Synthetic oligonucleotide; CAG chr11 5244945 5244964 5244961 +
acagggcacacttccaccgg

SEQ ID NO: 10820 - DNA, 20 bp, Artificial Sequence
  Synthetic oligonucleotide; GAG chr11 5244947 5244966 5244963 +
agggcacacttccaccggca

SEQ ID NO: 10821 - DNA, 20 bp, Artificial Sequence
  Synthetic oligonucleotide; GAG chr11 5244949 5244968 5244965 +
ggcacacttccaccggcaga

SEQ ID NO: 10822 - DNA, 20 bp, Artificial Sequence
  Synthetic oligonucleotide; AAG chr11 5244952 5244971 5244968 +
acacttccaccggcagagag

SEQ ID NO: 10823 - DNA, 20 bp, Artificial Sequence
  Synthetic oligonucleotide; CAG chr11 5244957 5244976 5244973 +
tccaccggcagagagaagaa

SEQ ID NO: 10824 - DNA, 20 bp, Artificial Sequence
  Synthetic oligonucleotide; AAG chr11 5244976 5244995 5244992 +
acagtttattttatattctt

SEQ ID NO: 10825 - DNA, 20 bp, Artificial Sequence
  Synthetic oligonucleotide; AGG chr11 5244977 5244996 5244993 +
cagtttattttatattctta

SEQ ID NO: 10826 - DNA, 20 bp, Artificial Sequence
  Synthetic oligonucleotide; TAG chr11 5244997 5245016 5245013 +
aggcttactgtcctcatact

SEQ ID NO: 10827 - DNA, 20 bp, Artificial Sequence
  Synthetic oligonucleotide; GAG chr11 5244999 5245018 5245015 +
gcttactgtcctcatactta

SEQ ID NO: 10828 - DNA, 20 bp, Artificial Sequence
  Synthetic oligonucleotide; AGG chr11 5245000 5245019 5245016 +
cttactgtcctcatacttag

SEQ ID NO: 10829 - DNA, 20 bp, Artificial Sequence
  Synthetic oligonucleotide; CAG chr11 5245005 5245024 5245021 +
tgtcctcatacttagaggtt

SEQ ID NO: 10830 - DNA, 20 bp, Artificial Sequence
  Synthetic oligonucleotide; AGG chr11 5245006 5245025 5245022 +
gtcctcatacttagaggttc

SEQ ID NO: 10831 - DNA, 20 bp, Artificial Sequence
  Synthetic oligonucleotide; TGG chr11 5245013 5245032 5245029 +
tacttagaggttcaggatgc

SEQ ID NO: 10832 - DNA, 20 bp, Artificial Sequence
  Synthetic oligonucleotide; GAG chr11 5245032 5245051 5245048 +
ctggtttgtgtgttacccct

SEQ ID NO: 10833 - DNA, 20 bp, Artificial Sequence
  Synthetic oligonucleotide; AAG chr11 5245047 5245066 5245063 +
cccctgagataaatccttac

SEQ ID NO: 10834 - DNA, 20 bp, Artificial Sequence
  Synthetic oligonucleotide; AAG chr11 5245055 5245074 5245071 +
ataaatccttacaagaaata

SEQ ID NO: 10835 - DNA, 20 bp, Artificial Sequence
  Synthetic oligonucleotide; TAG chr11 5245060 5245079 5245076 +
tccttacaagaaataaagtt

SEQ ID NO: 10836 - DNA, 20 bp, Artificial Sequence
  Synthetic oligonucleotide; AGG chr11 5245061 5245080 5245077 +
ccttacaagaaataaagttt

SEQ ID NO: 10837 - DNA, 20 bp, Artificial Sequence
  Synthetic oligonucleotide; AAG chr11 5245086 5245105 5245102 +
atcacccccatgtgtatttc

SEQ ID NO: 10838 - DNA, 20 bp, Artificial Sequence
  Synthetic oligonucleotide; AGG chr11 5245087 5245106 5245103 +
tcacccccatgtgtatttca

SEQ ID NO: 10839 - DNA, 20 bp, Artificial Sequence
  Synthetic oligonucleotide; GAG chr11 5245089 5245108 5245105 +
acccccatgtgtatttcaag

SEQ ID NO: 10840 - DNA, 20 bp, Artificial Sequence
  Synthetic oligonucleotide; AAG chr11 5245105 5245124 5245121 +
caaggagactctaaatttca

SEQ ID NO: 10841 - DNA, 20 bp, Artificial Sequence
  Synthetic oligonucleotide; GAG chr11 5245107 5245126 5245123 +
aggagactctaaatttcaaa

SEQ ID NO: 10842 - DNA, 20 bp, Artificial Sequence
  Synthetic oligonucleotide; AAG chr11 5245127 5245146 5245143 +
gagttaaacccaatatatta

SEQ ID NO: 10843 - DNA, 20 bp, Artificial Sequence
  Synthetic oligonucleotide; TAG chr11 5245145 5245164 5245161 +
taaagctgaatttctgatat

SEQ ID NO: 10844 - DNA, 20 bp, Artificial Sequence
  Synthetic oligonucleotide; GAG chr11 5245147 5245166 5245163 +
aagctgaatttctgatatta

SEQ ID NO: 10845 - DNA, 20 bp, Artificial Sequence
  Synthetic oligonucleotide; TAG chr11 5245161 5245180 5245177 +
atattagagacacaatattt

SEQ ID NO: 10846 - DNA, 20 bp, Artificial Sequence
  Synthetic oligonucleotide; TAG chr11 5245175 5245194 5245191 +
atattttagtctacttgata

SEQ ID NO: 10847 - DNA, 20 bp, Artificial Sequence
  Synthetic oligonucleotide; GAG chr11 5245180 5245199 5245196 +
ttagtctacttgatatagtt

SEQ ID NO: 10848 - DNA, 20 bp, Artificial Sequence
  Synthetic oligonucleotide; GAG chr11 5245182 5245201 5245198 +
agtctacttgatatagttga

SEQ ID NO: 10849 - DNA, 20 bp, Artificial Sequence
  Synthetic oligonucleotide; AGG chr11 5245183 5245202 5245199 +
gtctacttgatatagttgag

SEQ ID NO: 10850 - DNA, 20 bp, Artificial Sequence
  Synthetic oligonucleotide; CAG chr11 5245186 5245205 5245202 +
tacttgatatagttgagagg

SEQ ID NO: 10851 - DNA, 20 bp, Artificial Sequence
  Synthetic oligonucleotide; TAG chr11 5245203 5245222 5245219 +
aggcagttacctgttttact

SEQ ID NO: 10852 - DNA, 20 bp, Artificial Sequence
  Synthetic oligonucleotide; AGG chr11 5245204 5245223 5245220 +
ggcagttacctgttttactt

SEQ ID NO: 10853 - DNA, 20 bp, Artificial Sequence
  Synthetic oligonucleotide; TGG chr11 5245211 5245230 5245227 +
acctgttttacttaggaaca

SEQ ID NO: 10854 - DNA, 20 bp, Artificial Sequence
  Synthetic oligonucleotide; GGG chr11 5245212 5245231 5245228 +
cctgttttacttaggaacat

SEQ ID NO: 10855 - DNA, 20 bp, Artificial Sequence
  Synthetic oligonucleotide; GGG chr11 5245213 5245232 5245229 +
ctgttttacttaggaacatg

SEQ ID NO: 10856 - DNA, 20 bp, Artificial Sequence
  Synthetic oligonucleotide; AAG chr11 5245217 5245236 5245233 +
tttacttaggaacatgggga

SEQ ID NO: 10857 - DNA, 20 bp, Artificial Sequence
  Synthetic oligonucleotide; TAG chr11 5245224 5245243 5245240 +
aggaacatggggaaagtttg

SEQ ID NO: 10858 - DNA, 20 bp, Artificial Sequence
  Synthetic oligonucleotide; CAG chr11 5245234 5245253 5245250 +
ggaaagtttgtagtgacaaa

SEQ ID NO: 10859 - DNA, 20 bp, Artificial Sequence
  Synthetic oligonucleotide; GAG chr11 5245240 5245259 5245256 +
tttgtagtgacaaacagttt

SEQ ID NO: 10860 - DNA, 20 bp, Artificial Sequence
  Synthetic oligonucleotide; AGG chr11 5245241 5245260 5245257 +
ttgtagtgacaaacagtttg

SEQ ID NO: 10861 - DNA, 20 bp, Artificial Sequence
  Synthetic oligonucleotide; AAG chr11 5245251 5245270 5245267 +
aaacagtttgaggcaaaacc

SEQ ID NO: 10862 - DNA, 20 bp, Artificial Sequence
  Synthetic oligonucleotide; AAG chr11 5245263 5245282 5245279 +
gcaaaaccaagattatcttt

SEQ ID NO: 10863 - DNA, 20 bp, Artificial Sequence
  Synthetic oligonucleotide; GAG chr11 5245265 5245284 5245281 +
aaaaccaagattatctttaa

SEQ ID NO: 10864 - DNA, 20 bp, Artificial Sequence
  Synthetic oligonucleotide; CAG chr11 5245268 5245287 5245284 +
accaagattatctttaagag

SEQ ID NO: 10865 - DNA, 20 bp, Artificial Sequence
  Synthetic oligonucleotide; GAG chr11 5245270 5245289 5245286 +
caagattatctttaagagca

SEQ ID NO: 10866 - DNA, 20 bp, Artificial Sequence
  Synthetic oligonucleotide; AAG chr11 5245285 5245304 5245301 +
gagcagagatcgatgatatg

SEQ ID NO: 10867 - DNA, 20 bp, Artificial Sequence
  Synthetic oligonucleotide; AAG chr11 5245291 5245310 5245307 +
agatcgatgatatgaagaaa

SEQ ID NO: 10868 - DNA, 20 bp, Artificial Sequence
  Synthetic oligonucleotide; AAG chr11 5245294 5245313 5245310 +
tcgatgatatgaagaaaaag

SEQ ID NO: 10869 - DNA, 20 bp, Artificial Sequence
  Synthetic oligonucleotide; TGG chr11 5245297 5245316 5245313 +
atgatatgaagaaaaagaag

SEQ ID NO: 10870 - DNA, 20 bp, Artificial Sequence
  Synthetic oligonucleotide; CAG chr11 5245316 5245335 5245332 +
gtggcaactttgactatatg

SEQ ID NO: 10871 - DNA, 20 bp, Artificial Sequence
  Synthetic oligonucleotide; AGG chr11 5245317 5245336 5245333 +
tggcaactttgactatatgc

SEQ ID NO: 10872 - DNA, 20 bp, Artificial Sequence
  Synthetic oligonucleotide; GAG chr11 5245335 5245354 5245351 +
gcaggaaacacatttatatt

SEQ ID NO: 10873 - DNA, 20 bp, Artificial Sequence
  Synthetic oligonucleotide; TGG chr11 5245341 5245360 5245357 +
aacacatttatattgagttg

SEQ ID NO: 10874 - DNA, 20 bp, Artificial Sequence
  Synthetic oligonucleotide; GGG chr11 5245342 5245361 5245358 +
acacatttatattgagttgt

SEQ ID NO: 10875 - DNA, 20 bp, Artificial Sequence
  Synthetic oligonucleotide; GGG chr11 5245343 5245362 5245359 +
cacatttatattgagttgtg

SEQ ID NO: 10876 - DNA, 20 bp, Artificial Sequence
  Synthetic oligonucleotide; TGG chr11 5245348 5245367 5245364 +
ttatattgagttgtggggac

SEQ ID NO: 10877 - DNA, 20 bp, Artificial Sequence
  Synthetic oligonucleotide; CAG chr11 5245354 5245373 5245370 +
tgagttgtggggactggcct

SEQ ID NO: 10878 - DNA, 20 bp, Artificial Sequence
  Synthetic oligonucleotide; GAG chr11 5245356 5245375 5245372 +
agttgtggggactggcctca

SEQ ID NO: 10879 - DNA, 20 bp, Artificial Sequence
  Synthetic oligonucleotide; AGG chr11 5245357 5245376 5245373 +
gttgtggggactggcctcag

SEQ ID NO: 10880 - DNA, 20 bp, Artificial Sequence
  Synthetic oligonucleotide; CAG chr11 5245366 5245385 5245382 +
actggcctcagaggaaactt

SEQ ID NO: 10881 - DNA, 20 bp, Artificial Sequence
  Synthetic oligonucleotide; AGG chr11 5245367 5245386 5245383 +
ctggcctcagaggaaacttc

SEQ ID NO: 10882 - DNA, 20 bp, Artificial Sequence
  Synthetic oligonucleotide; TGG chr11 5245383 5245402 5245399 +
cttcaggtcatgtcctttaa

SEQ ID NO: 10883 - DNA, 20 bp, Artificial Sequence
  Synthetic oligonucleotide; AAG chr11 5245405 5245424 5245421 +
gccctaaaactcattcccaa

SEQ ID NO: 10884 - DNA, 20 bp, Artificial Sequence
  Synthetic oligonucleotide; TAG chr11 5245439 5245458 5245455 +
attgccatacctcatatcct

SEQ ID NO: 10885 - DNA, 20 bp, Artificial Sequence
  Synthetic oligonucleotide; AGG chr11 5245440 5245459 5245456 +
ttgccatacctcatatcctt

SEQ ID NO: 10886 - DNA, 20 bp, Artificial Sequence
  Synthetic oligonucleotide; CAG chr11 5245468 5245487 5245484 +
acatctaaaaccctgcgtac

SEQ ID NO: 10887 - DNA, 20 bp, Artificial Sequence
  Synthetic oligonucleotide; CAG chr11 5245475 5245494 5245491 +
aaaccctgcgtaccagtgaa

SEQ ID NO: 10888 - DNA, 20 bp, Artificial Sequence
  Synthetic oligonucleotide; CAG chr11 5245495 5245514 5245511 +
cagctgccccatctttccat

SEQ ID NO: 10889 - DNA, 20 bp, Artificial Sequence
  Synthetic oligonucleotide; CAG chr11 5245503 5245522 5245519 +
ccatctttccatcagccaac

SEQ ID NO: 10890 - DNA, 20 bp, Artificial Sequence
  Synthetic oligonucleotide; AGG chr11 5245504 5245523 5245520 +
catctttccatcagccaacc

SEQ ID NO: 10891 - DNA, 20 bp, Artificial Sequence
  Synthetic oligonucleotide; CAG chr11 5245511 5245530 5245527 +
ccatcagccaaccaggaatt

SEQ ID NO: 10892 - DNA, 20 bp, Artificial Sequence
  Synthetic oligonucleotide; CAG chr11 5245514 5245533 5245530 +
tcagccaaccaggaattcag

SEQ ID NO: 10893 - DNA, 20 bp, Artificial Sequence
  Synthetic oligonucleotide; CAG chr11 5245551 5245570 5245567 +
cacttttctctcacccgctc

SEQ ID NO: 10894 - DNA, 20 bp, Artificial Sequence
  Synthetic oligonucleotide; AGG chr11 5245552 5245571 5245568 +
acttttctctcacccgctcc

SEQ ID NO: 10895 - DNA, 20 bp, Artificial Sequence
  Synthetic oligonucleotide; AAG chr11 5245557 5245576 5245573 +
tctctcacccgctccaggaa

SEQ ID NO: 10896 - DNA, 20 bp, Artificial Sequence
  Synthetic oligonucleotide; CAG chr11 5245567 5245586 5245583 +
gctccaggaaaagtgacctg

SEQ ID NO: 10897 - DNA, 20 bp, Artificial Sequence
  Synthetic oligonucleotide; TGG chr11 5245579 5245598 5245595 +
gtgacctgcagtcactttcc

SEQ ID NO: 10898 - DNA, 20 bp, Artificial Sequence
  Synthetic oligonucleotide; AAG chr11 5245582 5245601 5245598 +
acctgcagtcactttcctgg

SEQ ID NO: 10899 - DNA, 20 bp, Artificial Sequence
  Synthetic oligonucleotide; TGG chr11 5245605 5245624 5245621 +
tattgattctttcttgtttg

SEQ ID NO: 10900 - DNA, 20 bp, Artificial Sequence
  Synthetic oligonucleotide; TAG chr11 5245660 5245679 5245676 +
attgcttctactgtgatcta

SEQ ID NO: 10901 - DNA, 20 bp, Artificial Sequence
  Synthetic oligonucleotide; CAG chr11 5245682 5245701 5245698 +
gactcttatatcatcaatac

SEQ ID NO: 10902 - DNA, 20 bp, Artificial Sequence
  Synthetic oligonucleotide; AGG chr11 5245683 5245702 5245699 +
actcttatatcatcaatacc

SEQ ID NO: 10903 - DNA, 20 bp, Artificial Sequence
  Synthetic oligonucleotide; CAG chr11 5245695 5245714 5245711 +
tcaataccaggttatcattg

SEQ ID NO: 10904 - DNA, 20 bp, Artificial Sequence
  Synthetic oligonucleotide; TAG chr11 5245749 5245768 5245765 +
ttaattcaacaaatacatat

SEQ ID NO: 10905 - DNA, 20 bp, Artificial Sequence
  Synthetic oligonucleotide; AAG chr11 5245771 5245790 5245787 +
gattccatatgtcatccatg

SEQ ID NO: 10906 - DNA, 20 bp, Artificial Sequence
  Synthetic oligonucleotide; GAG chr11 5245808 5245827 5245824 +
catccatttttcttaattct

SEQ ID NO: 10907 - DNA, 20 bp, Artificial Sequence
  Synthetic oligonucleotide; TAG chr11 5245825 5245844 5245841 +
tctgagaatcttacatgaac

SEQ ID NO: 10908 - DNA, 20 bp, Artificial Sequence
  Synthetic oligonucleotide; CAG chr11 5245829 5245848 5245845 +
agaatcttacatgaactaga

SEQ ID NO: 10909 - DNA, 20 bp, Artificial Sequence
  Synthetic oligonucleotide; CAG chr11 5245833 5245852 5245849 +
tcttacatgaactagacaga

SEQ ID NO: 10910 - DNA, 20 bp, Artificial Sequence
  Synthetic oligonucleotide; TGG chr11 5245842 5245861 5245858 +
aactagacagacagattctc

SEQ ID NO: 10911 - DNA, 20 bp, Artificial Sequence
  Synthetic oligonucleotide; TGG chr11 5245849 5245868 5245865 +
cagacagattctctggctaa

SEQ ID NO: 10912 - DNA, 20 bp, Artificial Sequence
  Synthetic oligonucleotide; TAG chr11 5245863 5245882 5245879 +
ggctaatggtgccctcacta

SEQ ID NO: 10913 - DNA, 20 bp, Artificial Sequence
  Synthetic oligonucleotide; GAG chr11 5245867 5245886 5245883 +
aatggtgccctcactatagt

SEQ ID NO: 10914 - DNA, 20 bp, Artificial Sequence
  Synthetic oligonucleotide; CAG chr11 5245870 5245889 5245886 +
ggtgccctcactatagtgag

SEQ ID NO: 10915 - DNA, 20 bp, Artificial Sequence
  Synthetic oligonucleotide; GAG chr11 5245872 5245891 5245888 +
tgccctcactatagtgagca

SEQ ID NO: 10916 - DNA, 20 bp, Artificial Sequence
  Synthetic oligonucleotide; AGG chr11 5245873 5245892 5245889 +
gccctcactatagtgagcag

SEQ ID NO: 10917 - DNA, 20 bp, Artificial Sequence
  Synthetic oligonucleotide; GAG chr11 5245875 5245894 5245891 +
cctcactatagtgagcagag

SEQ ID NO: 10918 - DNA, 20 bp, Artificial Sequence
  Synthetic oligonucleotide; CAG chr11 5245880 5245899 5245896 +
ctatagtgagcagaggagac

SEQ ID NO: 10919 - DNA, 20 bp, Artificial Sequence
  Synthetic oligonucleotide; AAG chr11 5245895 5245914 5245911 +
gagaccagcatacatactaa

SEQ ID NO: 10920 - DNA, 20 bp, Artificial Sequence
  Synthetic oligonucleotide; AAG chr11 5245910 5245929 5245926 +
actaaaagaaatgaattaat

SEQ ID NO: 10921 - DNA, 20 bp, Artificial Sequence
  Synthetic oligonucleotide; GAG chr11 5245912 5245931 5245928 +
taaaagaaatgaattaataa

SEQ ID NO: 10922 - DNA, 20 bp, Artificial Sequence
  Synthetic oligonucleotide; CAG chr11 5245919 5245938 5245935 +
aatgaattaataagagattt

SEQ ID NO: 10923 - DNA, 20 bp, Artificial Sequence
  Synthetic oligonucleotide; TGG chr11 5245923 5245942 5245939 +
aattaataagagatttcaga

SEQ ID NO: 10924 - DNA, 20 bp, Artificial Sequence
  Synthetic oligonucleotide; AAG chr11 5245940 5245959 5245956 +
agatggtattatatgacttg

SEQ ID NO: 10925 - DNA, 20 bp, Artificial Sequence
  Synthetic oligonucleotide; TGG chr11 5245970 5245989 5245986 +
atattgtacctacaaccatc

SEQ ID NO: 10926 - DNA, 20 bp, Artificial Sequence
  Synthetic oligonucleotide; TAG chr11 5245978 5245997 5245994 +
cctacaaccatctggtcttt

SEQ ID NO: 10927 - DNA, 20 bp, Artificial Sequence
  Synthetic oligonucleotide; AAG chr11 5245992 5246011 5246008 +
gtcttttagaaacctgacaa

SEQ ID NO: 10928 - DNA, 20 bp, Artificial Sequence
  Synthetic oligonucleotide; AAG chr11 5245996 5246015 5246012 +
tttagaaacctgacaaaagc

SEQ ID NO: 10929 - DNA, 20 bp, Artificial Sequence
  Synthetic oligonucleotide; TGG chr11 5246002 5246021 5246018 +
aacctgacaaaagcaagcaa

SEQ ID NO: 10930 - DNA, 20 bp, Artificial Sequence
  Synthetic oligonucleotide; GGG chr11 5246003 5246022 5246019 +
acctgacaaaagcaagcaat

SEQ ID NO: 10931 - DNA, 20 bp, Artificial Sequence
  Synthetic oligonucleotide; GGG chr11 5246004 5246023 5246020 +
cctgacaaaagcaagcaatg

SEQ ID NO: 10932 - DNA, 20 bp, Artificial Sequence
  Synthetic oligonucleotide; AAG chr11 5246008 5246027 5246024 +
acaaaagcaagcaatgggga

SEQ ID NO: 10933 - DNA, 20 bp, Artificial Sequence
  Synthetic oligonucleotide; AGG chr11 5246009 5246028 5246025 +
caaaagcaagcaatggggaa

SEQ ID NO: 10934 - DNA, 20 bp, Artificial Sequence
  Synthetic oligonucleotide; TGG chr11 5246032 5246051 5246048 +
attttcaatttaataaatga

SEQ ID NO: 10935 - DNA, 20 bp, Artificial Sequence
  Synthetic oligonucleotide; GGG chr11 5246033 5246052 5246049 +
ttttcaatttaataaatgat

SEQ ID NO: 10936 - DNA, 20 bp, Artificial Sequence
  Synthetic oligonucleotide; GGG chr11 5246034 5246053 5246050 +
tttcaatttaataaatgatg

SEQ ID NO: 10937 - DNA, 20 bp, Artificial Sequence
  Synthetic oligonucleotide; GGG chr11 5246035 5246054 5246051 +
ttcaatttaataaatgatgg

SEQ ID NO: 10938 - DNA, 20 bp, Artificial Sequence
  Synthetic oligonucleotide; GAG chr11 5246037 5246056 5246053 +
caatttaataaatgatgggg

SEQ ID NO: 10939 - DNA, 20 bp, Artificial Sequence
  Synthetic oligonucleotide; TGG chr11 5246043 5246062 5246059 +
aataaatgatgggggagaac

SEQ ID NO: 10940 - DNA, 20 bp, Artificial Sequence
  Synthetic oligonucleotide; TAG chr11 5246047 5246066 5246063 +
aatgatgggggagaactggc

SEQ ID NO: 10941 - DNA, 20 bp, Artificial Sequence
  Synthetic oligonucleotide; TGG chr11 5246071 5246090 5246087 +
catatgctgaaaaatgaaac

SEQ ID NO: 10942 - DNA, 20 bp, Artificial Sequence
  Synthetic oligonucleotide; CAG chr11 5246107 5246126 5246123 +
accttatccaaaattaactc

SEQ ID NO: 10943 - DNA, 20 bp, Artificial Sequence
  Synthetic oligonucleotide; TGG chr11 5246111 5246130 5246127 +
tatccaaaattaactccaga

SEQ ID NO: 10944 - DNA, 20 bp, Artificial Sequence
  Synthetic oligonucleotide; TAG chr11 5246116 5246135 5246132 +
aaaattaactccagatggat

SEQ ID NO: 10945 - DNA, 20 bp, Artificial Sequence
  Synthetic oligonucleotide; GAG chr11 5246118 5246137 5246134 +
aattaactccagatggatta

SEQ ID NO: 10946 - DNA, 20 bp, Artificial Sequence
  Synthetic oligonucleotide; AAG chr11 5246149 5246168 5246165 +
gaaaaaccccaaactataaa

SEQ ID NO: 10947 - DNA, 20 bp, Artificial Sequence
  Synthetic oligonucleotide; TAG chr11 5246154 5246173 5246170 +
accccaaactataaaaagcc

SEQ ID NO: 10948 - DNA, 20 bp, Artificial Sequence
  Synthetic oligonucleotide; AAG chr11 5246166 5246185 5246182 +
aaaaagcctagaaaaaaatc

SEQ ID NO: 10949 - DNA, 20 bp, Artificial Sequence
  Synthetic oligonucleotide; AGG chr11 5246167 5246186 5246183 +
aaaagcctagaaaaaaatca

SEQ ID NO: 10950 - DNA, 20 bp, Artificial Sequence
  Synthetic oligonucleotide; CGG chr11 5246193 5246212 5246209 +
tactattcatgatataaaca

SEQ ID NO: 10951 - DNA, 20 bp, Artificial Sequence
  Synthetic oligonucleotide; GGG chr11 5246194 5246213 5246210 +
actattcatgatataaacac

SEQ ID NO: 10952 - DNA, 20 bp, Artificial Sequence
  Synthetic oligonucleotide; CAG chr11 5246199 5246218 5246215 +
tcatgatataaacacgggca

SEQ ID NO: 10953 - DNA, 20 bp, Artificial Sequence
  Synthetic oligonucleotide; AAG chr11 5246214 5246233 5246230 +
gggcacagatttcatgatga

SEQ ID NO: 10954 - DNA, 20 bp, Artificial Sequence
  Synthetic oligonucleotide; AAG chr11 5246223 5246242 5246239 +
tttcatgatgaaagcgtgaa

SEQ ID NO: 10955 - DNA, 20 bp, Artificial Sequence
  Synthetic oligonucleotide; CAG chr11 5246232 5246251 5246248 +
gaaagcgtgaaaagcaattg

SEQ ID NO: 10956 - DNA, 20 bp, Artificial Sequence
  Synthetic oligonucleotide; AAG chr11 5246238 5246257 5246254 +
gtgaaaagcaattgcagcaa

SEQ ID NO: 10957 - DNA, 20 bp, Artificial Sequence
  Synthetic oligonucleotide; TGG chr11 5246255 5246274 5246271 +
caaaagcaaaaattgaccaa

SEQ ID NO: 10958 - DNA, 20 bp, Artificial Sequence
  Synthetic oligonucleotide; AAG chr11 5246273 5246292 5246289 +
aatggaatctaattaaacta

SEQ ID NO: 10959 - DNA, 20 bp, Artificial Sequence
  Synthetic oligonucleotide; GAG chr11 5246275 5246294 5246291 +
tggaatctaattaaactaaa

SEQ ID NO: 10960 - DNA, 20 bp, Artificial Sequence
  Synthetic oligonucleotide; CAG chr11 5246286 5246305 5246302 +
taaactaaagagctcctgct

SEQ ID NO: 10961 - DNA, 20 bp, Artificial Sequence
  Synthetic oligonucleotide; AAG chr11 5246292 5246311 5246308 +
aaagagctcctgctcagcaa

SEQ ID NO: 10962 - DNA, 20 bp, Artificial Sequence
  Synthetic oligonucleotide; CAG chr11 5246305 5246324 5246321 +
tcagcaaaagaaactaccat

SEQ ID NO: 10963 - DNA, 20 bp, Artificial Sequence
  Synthetic oligonucleotide; GAG chr11 5246307 5246326 5246323 +
agcaaaagaaactaccatca

SEQ ID NO: 10964 - DNA, 20 bp, Artificial Sequence
  Synthetic oligonucleotide; AAG chr11 5246313 5246332 5246329 +
agaaactaccatcagagcga

SEQ ID NO: 10965 - DNA, 20 bp, Artificial Sequence
  Synthetic oligonucleotide; CAG chr11 5246324 5246343 5246340 +
tcagagcgaaagacaatcta

SEQ ID NO: 10966 - DNA, 20 bp, Artificial Sequence
  Synthetic oligonucleotide; TGG chr11 5246329 5246348 5246345 +
gcgaaagacaatctacagaa

SEQ ID NO: 10967 - DNA, 20 bp, Artificial Sequence
  Synthetic oligonucleotide; GGG chr11 5246330 5246349 5246346 +
cgaaagacaatctacagaat

SEQ ID NO: 10968 - DNA, 20 bp, Artificial Sequence
  Synthetic oligonucleotide; AAG chr11 5246336 5246355 5246352 +
acaatctacagaatgggaaa

SEQ ID NO: 10969 - DNA, 20 bp, Artificial Sequence
  Synthetic oligonucleotide; AAG chr11 5246363 5246382 5246379 +
tccaatctattcttctgaca

SEQ ID NO: 10970 - DNA, 20 bp, Artificial Sequence
  Synthetic oligonucleotide; AGG chr11 5246364 5246383 5246380 +
ccaatctattcttctgacaa

SEQ ID NO: 10971 - DNA, 20 bp, Artificial Sequence
  Synthetic oligonucleotide; CAG chr11 5246376 5246395 5246392 +
tctgacaaaggcctaatatc

SEQ ID NO: 10972 - DNA, 20 bp, Artificial Sequence
  Synthetic oligonucleotide; GAG chr11 5246378 5246397 5246394 +
tgacaaaggcctaatatcca

SEQ ID NO: 10973 - DNA, 20 bp, Artificial Sequence
  Synthetic oligonucleotide; AAG chr11 5246386 5246405 5246402 +
gcctaatatccagagtaaac

SEQ ID NO: 10974 - DNA, 20 bp, Artificial Sequence
  Synthetic oligonucleotide; AAG chr11 5246407 5246426 5246423 +
agaaacttaaacaactttac

SEQ ID NO: 10975 - DNA, 20 bp, Artificial Sequence
  Synthetic oligonucleotide; TGG chr11 5246433 5246452 5246449 +
aaaaaaacccattaaaacca

SEQ ID NO: 10976 - DNA, 20 bp, Artificial Sequence
  Synthetic oligonucleotide; AAG chr11 5246491 5246510 5246507 +
gtacgtgtacccctgaattt

SEQ ID NO: 10977 - DNA, 20 bp, Artificial Sequence
  Synthetic oligonucleotide; AGG chr11 5246492 5246511 5246508 +
tacgtgtacccctgaattta

SEQ ID NO: 10978 - DNA, 20 bp, Artificial Sequence
  Synthetic oligonucleotide; CAG chr11 5246498 5246517 5246514 +
tacccctgaatttaaggtaa

SEQ ID NO: 10979 - DNA, 20 bp, Artificial Sequence
  Synthetic oligonucleotide; AAG chr11 5246514 5246533 5246530 +
gtaacagtaaattaaattaa

SEQ ID NO: 10980 - DNA, 20 bp, Artificial Sequence
  Synthetic oligonucleotide; TGG chr11 5246527 5246546 5246543 +
aaattaaaagaaaaatgcca

SEQ ID NO: 10981 - DNA, 20 bp, Artificial Sequence
  Synthetic oligonucleotide; CAG chr11 5246536 5246555 5246552 +
gaaaaatgccatggcaatgt

SEQ ID NO: 10982 - DNA, 20 bp, Artificial Sequence
  Synthetic oligonucleotide; AAG chr11 5246540 5246559 5246556 +
aatgccatggcaatgtcaga

SEQ ID NO: 10983 - DNA, 20 bp, Artificial Sequence
  Synthetic oligonucleotide; TGG chr11 5246553 5246572 5246569 +
tgtcagaaagttaccctata

SEQ ID NO: 10984 - DNA, 20 bp, Artificial Sequence
  Synthetic oligonucleotide; AAG chr11 5246562 5246581 5246578 +
gttaccctatatggcctaaa

SEQ ID NO: 10985 - DNA, 20 bp, Artificial Sequence
  Synthetic oligonucleotide; GAG chr11 5246564 5246583 5246580 +
taccctatatggcctaaaaa

SEQ ID NO: 10986 - DNA, 20 bp, Artificial Sequence
  Synthetic oligonucleotide; AAG chr11 5246567 5246586 5246583 +
cctatatggcctaaaaagag

SEQ ID NO: 10987 - DNA, 20 bp, Artificial Sequence
  Synthetic oligonucleotide; AGG chr11 5246568 5246587 5246584 +
ctatatggcctaaaaagaga

SEQ ID NO: 10988 - DNA, 20 bp, Artificial Sequence
  Synthetic oligonucleotide; AAG chr11 5246605 5246624 5246621 +
aacttgtttaacatatcatc

SEQ ID NO: 10989 - DNA, 20 bp, Artificial Sequence
  Synthetic oligonucleotide; AAG chr11 5246620 5246639 5246636 +
tcatcaagaaataaccataa

SEQ ID NO: 10990 - DNA, 20 bp, Artificial Sequence
  Synthetic oligonucleotide; AGG chr11 5246621 5246640 5246637 +
catcaagaaataaccataaa

SEQ ID NO: 10991 - DNA, 20 bp, Artificial Sequence
  Synthetic oligonucleotide; CAG chr11 5246630 5246649 5246646 +
ataaccataaaaggaacaac

SEQ ID NO: 10992 - DNA, 20 bp, Artificial Sequence
  Synthetic oligonucleotide; CGG chr11 5246633 5246652 5246649 +
accataaaaggaacaaccag

SEQ ID NO: 10993 - DNA, 20 bp, Artificial Sequence
  Synthetic oligonucleotide; CGG chr11 5246640 5246659 5246656 +
aaggaacaaccagcggccct

SEQ ID NO: 10994 - DNA, 20 bp, Artificial Sequence
  Synthetic oligonucleotide; GGG chr11 5246641 5246660 5246657 +
aggaacaaccagcggccctc

SEQ ID NO: 10995 - DNA, 20 bp, Artificial Sequence
  Synthetic oligonucleotide; GGG chr11 5246642 5246661 5246658 +
ggaacaaccagcggccctcg

SEQ ID NO: 10996 - DNA, 20 bp, Artificial Sequence
  Synthetic oligonucleotide; CAG chr11 5246659 5246678 5246675 +
tcggggctgctctgcctatg

SEQ ID NO: 10997 - DNA, 20 bp, Artificial Sequence
  Synthetic oligonucleotide; TAG chr11 5246662 5246681 5246678 +
gggctgctctgcctatgcag

SEQ ID NO: 10998 - DNA, 20 bp, Artificial Sequence
  Synthetic oligonucleotide; AAG chr11 5246691 5246710 5246707 +
gtttatttctttactctctc

SEQ ID NO: 10999 - DNA, 20 bp, Artificial Sequence
  Synthetic oligonucleotide; AAG chr11 5246730 5246749 5246746 +
aaaaaaaacaaaaaacaaaa

SEQ ID NO: 11000 - DNA, 20 bp, Artificial Sequence
  Synthetic oligonucleotide; AAG chr11 5246734 5246753 5246750 +
aaaacaaaaaacaaaaaaga

SEQ ID NO: 11001 - DNA, 20 bp, Artificial Sequence
  Synthetic oligonucleotide; AAG chr11 5246738 5246757 5246754 +
caaaaaacaaaaaagaaaga

SEQ ID NO: 11002 - DNA, 20 bp, Artificial Sequence
  Synthetic oligonucleotide; CGG chr11 5246755 5246774 5246771 +
agaaagtgcatattctgaaa

SEQ ID NO: 11003 - DNA, 20 bp, Artificial Sequence
  Synthetic oligonucleotide; TAG chr11 5246758 5246777 5246774 +
aagtgcatattctgaaacgg

SEQ ID NO: 11004 - DNA, 20 bp, Artificial Sequence
  Synthetic oligonucleotide; AAG chr11 5246773 5246792 5246789 +
aacggtagtgactgcatttg

SEQ ID NO: 11005 - DNA, 20 bp, Artificial Sequence
  Synthetic oligonucleotide; TGG chr11 5246776 5246795 5246792 +
ggtagtgactgcatttgaag

SEQ ID NO: 11006 - DNA, 20 bp, Artificial Sequence
  Synthetic oligonucleotide; GGG chr11 5246777 5246796 5246793 +
gtagtgactgcatttgaagt

SEQ ID NO: 11007 - DNA, 20 bp, Artificial Sequence
  Synthetic oligonucleotide; TGG chr11 5246795 5246814 5246811 +
gtgggacctttatgatatga

SEQ ID NO: 11008 - DNA, 20 bp, Artificial Sequence
  Synthetic oligonucleotide; GAG chr11 5246797 5246816 5246813 +
gggacctttatgatatgatg

SEQ ID NO: 11009 - DNA, 20 bp, Artificial Sequence
  Synthetic oligonucleotide; CAG chr11 5246801 5246820 5246817 +
cctttatgatatgatggagc

SEQ ID NO: 11010 - DNA, 20 bp, Artificial Sequence
  Synthetic oligonucleotide; AGG chr11 5246802 5246821 5246818 +
ctttatgatatgatggagcc

SEQ ID NO: 11011 - DNA, 20 bp, Artificial Sequence
  Synthetic oligonucleotide; CAG chr11 5246805 5246824 5246821 +
tatgatatgatggagccagg

SEQ ID NO: 11012 - DNA, 20 bp, Artificial Sequence
  Synthetic oligonucleotide; GAG chr11 5246807 5246826 5246823 +
tgatatgatggagccaggca

SEQ ID NO: 11013 - DNA, 20 bp, Artificial Sequence
  Synthetic oligonucleotide; TGG chr11 5246814 5246833 5246830 +
atggagccaggcagagatgt

SEQ ID NO: 11014 - DNA, 20 bp, Artificial Sequence
  Synthetic oligonucleotide; GAG chr11 5246816 5246835 5246832 +
ggagccaggcagagatgttg

SEQ ID NO: 11015 - DNA, 20 bp, Artificial Sequence
  Synthetic oligonucleotide; AAG chr11 5246819 5246838 5246835 +
gccaggcagagatgttggag

SEQ ID NO: 11016 - DNA, 20 bp, Artificial Sequence
  Synthetic oligonucleotide; AAG chr11 5246829 5246848 5246845 +
gatgttggagaagttcctga

SEQ ID NO: 11017 - DNA, 20 bp, Artificial Sequence
  Synthetic oligonucleotide; AAG chr11 5246832 5246851 5246848 +
gttggagaagttcctgaaag

SEQ ID NO: 11018 - DNA, 20 bp, Artificial Sequence
  Synthetic oligonucleotide; AGG chr11 5246833 5246852 5246849 +
ttggagaagttcctgaaaga

SEQ ID NO: 11019 - DNA, 20 bp, Artificial Sequence
  Synthetic oligonucleotide; AAG chr11 5246836 5246855 5246852 +
gagaagttcctgaaagaagg

SEQ ID NO: 11020 - DNA, 20 bp, Artificial Sequence
  Synthetic oligonucleotide; AGG chr11 5246837 5246856 5246853 +
agaagttcctgaaagaagga

SEQ ID NO: 11021 - DNA, 20 bp, Artificial Sequence
  Synthetic oligonucleotide; GGG chr11 5246838 5246857 5246854 +
gaagttcctgaaagaaggaa

SEQ ID NO: 11022 - DNA, 20 bp, Artificial Sequence
  Synthetic oligonucleotide; GAG chr11 5246856 5246875 5246872 +
aagggcatgtgccaaattct

SEQ ID NO: 11023 - DNA, 20 bp, Artificial Sequence
  Synthetic oligonucleotide; AGG chr11 5246857 5246876 5246873 +
agggcatgtgccaaattctg

SEQ ID NO: 11024 - DNA, 20 bp, Artificial Sequence
  Synthetic oligonucleotide; GAG chr11 5246862 5246881 5246878 +
atgtgccaaattctgaggct

SEQ ID NO: 11025 - DNA, 20 bp, Artificial Sequence
  Synthetic oligonucleotide; AGG chr11 5246863 5246882 5246879 +
tgtgccaaattctgaggctg

SEQ ID NO: 11026 - DNA, 20 bp, Artificial Sequence
  Synthetic oligonucleotide; GAG chr11 5246865 5246884 5246881 +
tgccaaattctgaggctgag

SEQ ID NO: 11027 - DNA, 20 bp, Artificial Sequence
  Synthetic oligonucleotide; AAG chr11 5246872 5246891 5246888 +
ttctgaggctgaggagaaaa

SEQ ID NO: 11028 - DNA, 20 bp, Artificial Sequence
  Synthetic oligonucleotide; AAG chr11 5246876 5246895 5246892 +
gaggctgaggagaaaaaaga

SEQ ID NO: 11029 - DNA, 20 bp, Artificial Sequence
  Synthetic oligonucleotide; AAG chr11 5246880 5246899 5246896 +
ctgaggagaaaaaagaaaga

SEQ ID NO: 11030 - DNA, 20 bp, Artificial Sequence
  Synthetic oligonucleotide; AAG chr11 5246888 5246907 5246904 +
aaaaaagaaagaaagaaaaa

SEQ ID NO: 11031 - DNA, 20 bp, Artificial Sequence
  Synthetic oligonucleotide; AAG chr11 5246895 5246914 5246911 +
aaagaaagaaaaaaagaata

SEQ ID NO: 11032 - DNA, 20 bp, Artificial Sequence
  Synthetic oligonucleotide; AAG chr11 5246921 5246940 5246937 +
tttacatttcactgtatgta

SEQ ID NO: 11033 - DNA, 20 bp, Artificial Sequence
  Synthetic oligonucleotide; AAG chr11 5246931 5246950 5246947 +
actgtatgtaaagacattac

SEQ ID NO: 11034 - DNA, 20 bp, Artificial Sequence
  Synthetic oligonucleotide; AGG chr11 5246932 5246951 5246948 +
ctgtatgtaaagacattaca

SEQ ID NO: 11035 - DNA, 20 bp, Artificial Sequence
  Synthetic oligonucleotide; TAG chr11 5246936 5246955 5246952 +
atgtaaagacattacaaggc

SEQ ID NO: 11036 - DNA, 20 bp, Artificial Sequence
  Synthetic oligonucleotide; GAG chr11 5246938 5246957 5246954 +
gtaaagacattacaaggcta

SEQ ID NO: 11037 - DNA, 20 bp, Artificial Sequence
  Synthetic oligonucleotide; AAG chr11 5246943 5246962 5246959 +
gacattacaaggctagagta

SEQ ID NO: 11038 - DNA, 20 bp, Artificial Sequence
  Synthetic oligonucleotide; AAG chr11 5246953 5246972 5246969 +
ggctagagtaaagcatgttg

SEQ ID NO: 11039 - DNA, 20 bp, Artificial Sequence
  Synthetic oligonucleotide; TAG chr11 5246962 5246981 5246978 +
aaagcatgttgaagtaaaaa

SEQ ID NO: 11040 - DNA, 20 bp, Artificial Sequence
  Synthetic oligonucleotide; AGG chr11 5246963 5246982 5246979 +
aagcatgttgaagtaaaaat

SEQ ID NO: 11041 - DNA, 20 bp, Artificial Sequence
  Synthetic oligonucleotide; GAG chr11 5246965 5246984 5246981 +
gcatgttgaagtaaaaatag

SEQ ID NO: 11042 - DNA, 20 bp, Artificial Sequence
  Synthetic oligonucleotide; AAG chr11 5246974 5246993 5246990 +
agtaaaaataggagaaatca

SEQ ID NO: 11043 - DNA, 20 bp, Artificial Sequence
  Synthetic oligonucleotide; TAG chr11 5246978 5246997 5246994 +
aaaataggagaaatcaaagt

SEQ ID NO: 11044 - DNA, 20 bp, Artificial Sequence
  Synthetic oligonucleotide; GAG chr11 5246980 5246999 5246996 +
aataggagaaatcaaagtta

SEQ ID NO: 11045 - DNA, 20 bp, Artificial Sequence
  Synthetic oligonucleotide; GAG chr11 5246982 5247001 5246998 +
taggagaaatcaaagttaga

SEQ ID NO: 11046 - DNA, 20 bp, Artificial Sequence
  Synthetic oligonucleotide; AAG chr11 5246985 5247004 5247001 +
gagaaatcaaagttagagag

SEQ ID NO: 11047 - DNA, 20 bp, Artificial Sequence
  Synthetic oligonucleotide; AGG chr11 5246986 5247005 5247002 +
agaaatcaaagttagagaga

SEQ ID NO: 11048 - DNA, 20 bp, Artificial Sequence
  Synthetic oligonucleotide; GGG chr11 5246987 5247006 5247003 +
gaaatcaaagttagagagaa

SEQ ID NO: 11049 - DNA, 20 bp, Artificial Sequence
  Synthetic oligonucleotide; CAG chr11 5246992 5247011 5247008 +
caaagttagagagaagggcg

SEQ ID NO: 11050 - DNA, 20 bp, Artificial Sequence
  Synthetic oligonucleotide; AGG chr11 5246993 5247012 5247009 +
aaagttagagagaagggcgc

SEQ ID NO: 11051 - DNA, 20 bp, Artificial Sequence
  Synthetic oligonucleotide; TGG chr11 5247005 5247024 5247021 +
aagggcgcaggcttattatt

SEQ ID NO: 11052 - DNA, 20 bp, Artificial Sequence
  Synthetic oligonucleotide; GGG chr11 5247006 5247025 5247022 +
agggcgcaggcttattattt

SEQ ID NO: 11053 - DNA, 20 bp, Artificial Sequence
  Synthetic oligonucleotide; TAG chr11 5247014 5247033 5247030 +
ggcttattatttgggtctta

SEQ ID NO: 11054 - DNA, 20 bp, Artificial Sequence
  Synthetic oligonucleotide; GAG chr11 5247019 5247038 5247035 +
attatttgggtcttatagat

SEQ ID NO: 11055 - DNA, 20 bp, Artificial Sequence
  Synthetic oligonucleotide; GAG chr11 5247021 5247040 5247037 +
tatttgggtcttatagatga

SEQ ID NO: 11056 - DNA, 20 bp, Artificial Sequence
  Synthetic oligonucleotide; TAG chr11 5247024 5247043 5247040 +
ttgggtcttatagatgagag

SEQ ID NO: 11057 - DNA, 20 bp, Artificial Sequence
  Synthetic oligonucleotide; TAG chr11 5247027 5247046 5247043 +
ggtcttatagatgagagtag

SEQ ID NO: 11058 - DNA, 20 bp, Artificial Sequence
  Synthetic oligonucleotide; GAG chr11 5247029 5247048 5247045 +
tcttatagatgagagtagta

SEQ ID NO: 11059 - DNA, 20 bp, Artificial Sequence
  Synthetic oligonucleotide; TAG chr11 5247032 5247051 5247048 +
tatagatgagagtagtagag

SEQ ID NO: 11060 - DNA, 20 bp, Artificial Sequence
  Synthetic oligonucleotide; AGG chr11 5247033 5247052 5247049 +
atagatgagagtagtagagt

SEQ ID NO: 11061 - DNA, 20 bp, Artificial Sequence
  Synthetic oligonucleotide; TAG chr11 5247053 5247072 5247069 +
aggtattttatactgaaaca

SEQ ID NO: 11062 - DNA, 20 bp, Artificial Sequence
  Synthetic oligonucleotide; AGG chr11 5247054 5247073 5247070 +
ggtattttatactgaaacat

SEQ ID NO: 11063 - DNA, 20 bp, Artificial Sequence
  Synthetic oligonucleotide; GGG chr11 5247055 5247074 5247071 +
gtattttatactgaaacata

SEQ ID NO: 11064 - DNA, 20 bp, Artificial Sequence
  Synthetic oligonucleotide; GGG chr11 5247056 5247075 5247072 +
tattttatactgaaacatag

SEQ ID NO: 11065 - DNA, 20 bp, Artificial Sequence
  Synthetic oligonucleotide; GAG chr11 5247061 5247080 5247077 +
tatactgaaacataggggac

SEQ ID NO: 11066 - DNA, 20 bp, Artificial Sequence
  Synthetic oligonucleotide; AGG chr11 5247062 5247081 5247078 +
atactgaaacataggggacg

SEQ ID NO: 11067 - DNA, 20 bp, Artificial Sequence
  Synthetic oligonucleotide; GGG chr11 5247063 5247082 5247079 +
tactgaaacataggggacga

SEQ ID NO: 11068 - DNA, 20 bp, Artificial Sequence
  Synthetic oligonucleotide; GGG chr11 5247064 5247083 5247080 +
actgaaacataggggacgag

SEQ ID NO: 11069 - DNA, 20 bp, Artificial Sequence
  Synthetic oligonucleotide; GAG chr11 5247066 5247085 5247082 +
tgaaacataggggacgaggg

SEQ ID NO: 11070 - DNA, 20 bp, Artificial Sequence
  Synthetic oligonucleotide; GAG chr11 5247081 5247100 5247097 +
gaggggagctttgcaaacct

SEQ ID NO: 11071 - DNA, 20 bp, Artificial Sequence
  Synthetic oligonucleotide; TGG chr11 5247091 5247110 5247107 +
ttgcaaacctgagataaaca

SEQ ID NO: 11072 - DNA, 20 bp, Artificial Sequence
  Synthetic oligonucleotide; TAG chr11 5247098 5247117 5247114 +
cctgagataaacatggtctg

SEQ ID NO: 11073 - DNA, 20 bp, Artificial Sequence
  Synthetic oligonucleotide; AAG chr11 5247115 5247134 5247131 +
ctgtagtccactcaaaaccc

SEQ ID NO: 11074 - DNA, 20 bp, Artificial Sequence
  Synthetic oligonucleotide; CAG chr11 5247151 5247170 5247167 +
ccttcttcatctgccttact

SEQ ID NO: 11075 - DNA, 20 bp, Artificial Sequence
  Synthetic oligonucleotide; AAG chr11 5247157 5247176 5247173 +
tcatctgccttactcagtgc

SEQ ID NO: 11076 - DNA, 20 bp, Artificial Sequence
  Synthetic oligonucleotide; AGG chr11 5247158 5247177 5247174 +
catctgccttactcagtgca

SEQ ID NO: 11077 - DNA, 20 bp, Artificial Sequence
  Synthetic oligonucleotide; AAG chr11 5247179 5247198 5247195 +
ggtgctataacaaaatacaa

SEQ ID NO: 11078 - DNA, 20 bp, Artificial Sequence
  Synthetic oligonucleotide; TGG chr11 5247184 5247203 5247200 +
tataacaaaatacaaaagac

SEQ ID NO: 11079 - DNA, 20 bp, Artificial Sequence
  Synthetic oligonucleotide; GGG chr11 5247185 5247204 5247201 +
ataacaaaatacaaaagact

SEQ ID NO: 11080 - DNA, 20 bp, Artificial Sequence
  Synthetic oligonucleotide; TGG chr11 5247188 5247207 5247204 +
acaaaatacaaaagactggg

SEQ ID NO: 11081 - DNA, 20 bp, Artificial Sequence
  Synthetic oligonucleotide; CAG chr11 5247200 5247219 5247216 +
agactgggtggcttcaacaa

SEQ ID NO: 11082 - DNA, 20 bp, Artificial Sequence
  Synthetic oligonucleotide; GAG chr11 5247202 5247221 5247218 +
actgggtggcttcaacaaca

SEQ ID NO: 11083 - DNA, 20 bp, Artificial Sequence
  Synthetic oligonucleotide; AAG chr11 5247223 5247242 5247239 +
agttttttctcacatttctg

SEQ ID NO: 11084 - DNA, 20 bp, Artificial Sequence
  Synthetic oligonucleotide; AGG chr11 5247224 5247243 5247240 +
gttttttctcacatttctga

SEQ ID NO: 11085 - DNA, 20 bp, Artificial Sequence
  Synthetic oligonucleotide; TGG chr11 5247235 5247254 5247251 +
catttctgaaggctgactcg

SEQ ID NO: 11086 - DNA, 20 bp, Artificial Sequence
  Synthetic oligonucleotide; CAG chr11 5247239 5247258 5247255 +
tctgaaggctgactcgtggt

SEQ ID NO: 11087 - DNA, 20 bp, Artificial Sequence
  Synthetic oligonucleotide; AGG chr11 5247240 5247259 5247256 +
ctgaaggctgactcgtggtc

SEQ ID NO: 11088 - DNA, 20 bp, Artificial Sequence
  Synthetic oligonucleotide; GGG chr11 5247241 5247260 5247257 +
tgaaggctgactcgtggtca

SEQ ID NO: 11089 - DNA, 20 bp, Artificial Sequence
  Synthetic oligonucleotide; TGG chr11 5247253 5247272 5247269 +
cgtggtcagggttctcttcc

SEQ ID NO: 11090 - DNA, 20 bp, Artificial Sequence
  Synthetic oligonucleotide; CAG chr11 5247260 5247279 5247276 +
agggttctcttcctggattg

SEQ ID NO: 11091 - DNA, 20 bp, Artificial Sequence
  Synthetic oligonucleotide; TGG chr11 5247264 5247283 5247280 +
ttctcttcctggattgcaga

SEQ ID NO: 11092 - DNA, 20 bp, Artificial Sequence
  Synthetic oligonucleotide; CGG chr11 5247267 5247286 5247283 +
tcttcctggattgcagatgg

SEQ ID NO: 11093 - DNA, 20 bp, Artificial Sequence
  Synthetic oligonucleotide; CGG chr11 5247290 5247309 5247306 +
acttctcactgtgtcctcac

SEQ ID NO: 11094 - DNA, 20 bp, Artificial Sequence
  Synthetic oligonucleotide; GGG chr11 5247291 5247310 5247307 +
cttctcactgtgtcctcacc

SEQ ID NO: 11095 - DNA, 20 bp, Artificial Sequence
  Synthetic oligonucleotide; GAG chr11 5247293 5247312 5247309 +
tctcactgtgtcctcaccgg

SEQ ID NO: 11096 - DNA, 20 bp, Artificial Sequence
  Synthetic oligonucleotide; AGG chr11 5247294 5247313 5247310 +
ctcactgtgtcctcaccggg

SEQ ID NO: 11097 - DNA, 20 bp, Artificial Sequence
  Synthetic oligonucleotide; AAG chr11 5247298 5247317 5247314 +
ctgtgtcctcaccgggagga

SEQ ID NO: 11098 - DNA, 20 bp, Artificial Sequence
  Synthetic oligonucleotide; GAG chr11 5247300 5247319 5247316 +
gtgtcctcaccgggaggaaa

SEQ ID NO: 11099 - DNA, 20 bp, Artificial Sequence
  Synthetic oligonucleotide; TGG chr11 5247306 5247325 5247322 +
tcaccgggaggaaagagaaa

SEQ ID NO: 11100 - DNA, 20 bp, Artificial Sequence
  Synthetic oligonucleotide; AAG chr11 5247329 5247348 5247345 +
cttgtctctctgcttctgat

SEQ ID NO: 11101 - DNA, 20 bp, Artificial Sequence
  Synthetic oligonucleotide; AGG chr11 5247330 5247349 5247346 +
ttgtctctctgcttctgata

SEQ ID NO: 11102 - DNA, 20 bp, Artificial Sequence
  Synthetic oligonucleotide; TGG chr11 5247348 5247367 5247364 +
taaggaaaataattttatga

SEQ ID NO: 11103 - DNA, 20 bp, Artificial Sequence
  Synthetic oligonucleotide; GGG chr11 5247349 5247368 5247365 +
aaggaaaataattttatgat

SEQ ID NO: 11104 - DNA, 20 bp, Artificial Sequence
  Synthetic oligonucleotide; GGG chr11 5247350 5247369 5247366 +
aggaaaataattttatgatg

SEQ ID NO: 11105 - DNA, 20 bp, Artificial Sequence
  Synthetic oligonucleotide; GAG chr11 5247365 5247384 5247381 +
tgatggggatctgctcttat

SEQ ID NO: 11106 - DNA, 20 bp, Artificial Sequence
  Synthetic oligonucleotide; AAG chr11 5247394 5247413 5247410 +
taaacctaattacttttcaa

SEQ ID NO: 11107 - DNA, 20 bp, Artificial Sequence
  Synthetic oligonucleotide; CAG chr11 5247406 5247425 5247422 +
cttttcaaaagcctccccca

SEQ ID NO: 11108 - DNA, 20 bp, Artificial Sequence
  Synthetic oligonucleotide; AAG chr11 5247411 5247430 5247427 +
caaaagcctcccccacagat

SEQ ID NO: 11109 - DNA, 20 bp, Artificial Sequence
  Synthetic oligonucleotide; AGG chr11 5247412 5247431 5247428 +
aaaagcctcccccacagata

SEQ ID NO: 11110 - DNA, 20 bp, Artificial Sequence
  Synthetic oligonucleotide; CAG chr11 5247416 5247435 5247432 +
gcctcccccacagataaggt

SEQ ID NO: 11111 - DNA, 20 bp, Artificial Sequence
  Synthetic oligonucleotide; TGG chr11 5247420 5247439 5247436 +
cccccacagataaggtcagt

SEQ ID NO: 11112 - DNA, 20 bp, Artificial Sequence
  Synthetic oligonucleotide; GGG chr11 5247421 5247440 5247437 +
ccccacagataaggtcagtt

SEQ ID NO: 11113 - DNA, 20 bp, Artificial Sequence
  Synthetic oligonucleotide; GAG chr11 5247423 5247442 5247439 +
ccacagataaggtcagttgg

SEQ ID NO: 11114 - DNA, 20 bp, Artificial Sequence
  Synthetic oligonucleotide; TGG chr11 5247427 5247446 5247443 +
agataaggtcagttgggagt

SEQ ID NO: 11115 - DNA, 20 bp, Artificial Sequence
  Synthetic oligonucleotide; GGG chr11 5247428 5247447 5247444 +
gataaggtcagttgggagtt

SEQ ID NO: 11116 - DNA, 20 bp, Artificial Sequence
  Synthetic oligonucleotide; GGG chr11 5247429 5247448 5247445 +
ataaggtcagttgggagttg

SEQ ID NO: 11117 - DNA, 20 bp, Artificial Sequence
  Synthetic oligonucleotide; CAG chr11 5247435 5247454 5247451 +
tcagttgggagttggggatt

SEQ ID NO: 11118 - DNA, 20 bp, Artificial Sequence
  Synthetic oligonucleotide; GAG chr11 5247450 5247469 5247466 +
ggattcagcatgtgaatttt

SEQ ID NO: 11119 - DNA, 20 bp, Artificial Sequence
  Synthetic oligonucleotide; AGG chr11 5247451 5247470 5247467 +
gattcagcatgtgaattttg

SEQ ID NO: 11120 - DNA, 20 bp, Artificial Sequence
  Synthetic oligonucleotide; GAG chr11 5247453 5247472 5247469 +
ttcagcatgtgaattttgag

SEQ ID NO: 11121 - DNA, 20 bp, Artificial Sequence
  Synthetic oligonucleotide; TAG chr11 5247466 5247485 5247482 +
ttttgaggagacacaaacat

SEQ ID NO: 11122 - DNA, 20 bp, Artificial Sequence
  Synthetic oligonucleotide; AGG chr11 5247467 5247486 5247483 +
tttgaggagacacaaacatt

SEQ ID NO: 11123 - DNA, 20 bp, Artificial Sequence
  Synthetic oligonucleotide; TAG chr11 5247502 5247521 5247518 +
tcatattaaactcttactta

SEQ ID NO: 11124 - DNA, 20 bp, Artificial Sequence
  Synthetic oligonucleotide; GAG chr11 5247504 5247523 5247520 +
atattaaactcttacttata

SEQ ID NO: 11125 - DNA, 20 bp, Artificial Sequence
  Synthetic oligonucleotide; AAG chr11 5247541 5247560 5247557 +
aactatacaaaaattccatt

SEQ ID NO: 11126 - DNA, 20 bp, Artificial Sequence
  Synthetic oligonucleotide; AAG chr11 5247545 5247564 5247561 +
atacaaaaattccattaagt

SEQ ID NO: 11127 - DNA, 20 bp, Artificial Sequence
  Synthetic oligonucleotide; CAG chr11 5247596 5247615 5247612 +
cccactacattttgatctca

SEQ ID NO: 11128 - DNA, 20 bp, Artificial Sequence
  Synthetic oligonucleotide; TGG chr11 5247602 5247621 5247618 +
acattttgatctcacagtgc

SEQ ID NO: 11129 - DNA, 20 bp, Artificial Sequence
  Synthetic oligonucleotide; CAG chr11 5247614 5247633 5247630 +
cacagtgctggtctgtttct

SEQ ID NO: 11130 - DNA, 20 bp, Artificial Sequence
  Synthetic oligonucleotide; GAG chr11 5247642 5247661 5247658 +
acatgctcatgctgacttgt

SEQ ID NO: 11131 - DNA, 20 bp, Artificial Sequence
  Synthetic oligonucleotide; AAG chr11 5247671 5247690 5247687 +
ctgattcatttcttacacct

SEQ ID NO: 11132 - DNA, 20 bp, Artificial Sequence
  Synthetic oligonucleotide; CAG chr11 5247687 5247706 5247703 +
acctaagtccccacctcccc

SEQ ID NO: 11133 - DNA, 20 bp, Artificial Sequence
  Synthetic oligonucleotide; GAG chr11 5247689 5247708 5247705 +
ctaagtccccacctccccca

SEQ ID NO: 11134 - DNA, 20 bp, Artificial Sequence
  Synthetic oligonucleotide; GAG chr11 5247701 5247720 5247717 +
ctcccccagagtcttacaat

SEQ ID NO: 11135 - DNA, 20 bp, Artificial Sequence
  Synthetic oligonucleotide; AGG chr11 5247702 5247721 5247718 +
tcccccagagtcttacaatg

SEQ ID NO: 11136 - DNA, 20 bp, Artificial Sequence
  Synthetic oligonucleotide; GAG chr11 5247742 5247761 5247758 +
tgtgaccaatctgcacactt

SEQ ID NO: 11137 - DNA, 20 bp, Artificial Sequence
  Synthetic oligonucleotide; AGG chr11 5247743 5247762 5247759 +
gtgaccaatctgcacacttg

SEQ ID NO: 11138 - DNA, 20 bp, Artificial Sequence
  Synthetic oligonucleotide; GGG chr11 5247744 5247763 5247760 +
tgaccaatctgcacacttga

SEQ ID NO: 11139 - DNA, 20 bp, Artificial Sequence
  Synthetic oligonucleotide; TGG chr11 5247749 5247768 5247765 +
aatctgcacacttgagggca

SEQ ID NO: 11140 - DNA, 20 bp, Artificial Sequence
  Synthetic oligonucleotide; GGG chr11 5247750 5247769 5247766 +
atctgcacacttgagggcat

SEQ ID NO: 11141 - DNA, 20 bp, Artificial Sequence
  Synthetic oligonucleotide; TAG chr11 5247769 5247788 5247785 +
tgggattaatttcactttct

SEQ ID NO: 11142 - DNA, 20 bp, Artificial Sequence
  Synthetic oligonucleotide; AGG chr11 5247770 5247789 5247786 +
gggattaatttcactttctt

SEQ ID NO: 11143 - DNA, 20 bp, Artificial Sequence
  Synthetic oligonucleotide; AAG chr11 5247780 5247799 5247796 +
tcactttcttaggcatccac

SEQ ID NO: 11144 - DNA, 20 bp, Artificial Sequence
  Synthetic oligonucleotide; AGG chr11 5247781 5247800 5247797 +
cactttcttaggcatccaca

SEQ ID NO: 11145 - DNA, 20 bp, Artificial Sequence
  Synthetic oligonucleotide; GGG chr11 5247782 5247801 5247798 +
actttcttaggcatccacaa

SEQ ID NO: 11146 - DNA, 20 bp, Artificial Sequence
  Synthetic oligonucleotide; AAG chr11 5247792 5247811 5247808 +
gcatccacaagggctgtgaa

SEQ ID NO: 11147 - DNA, 20 bp, Artificial Sequence
  Synthetic oligonucleotide; AAG chr11 5247797 5247816 5247813 +
cacaagggctgtgaaaagct

SEQ ID NO: 11148 - DNA, 20 bp, Artificial Sequence
  Synthetic oligonucleotide; TAG chr11 5247806 5247825 5247822 +
tgtgaaaagctaagtgccat

SEQ ID NO: 11149 - DNA, 20 bp, Artificial Sequence
  Synthetic oligonucleotide; TAG chr11 5247812 5247831 5247828 +
aagctaagtgccattagaaa

SEQ ID NO: 11150 - DNA, 20 bp, Artificial Sequence
  Synthetic oligonucleotide; TAG chr11 5247832 5247851 5247848 +
tagtattcctcctaataaaa

SEQ ID NO: 11151 - DNA, 20 bp, Artificial Sequence
  Synthetic oligonucleotide; AAG chr11 5247868 5247887 5247884 +
gactaaaccttgaattccta

SEQ ID NO: 11152 - DNA, 20 bp, Artificial Sequence
  Synthetic oligonucleotide; TGG chr11 5247873 5247892 5247889 +
aaccttgaattcctaaagct

SEQ ID NO: 11153 - DNA, 20 bp, Artificial Sequence
  Synthetic oligonucleotide; AAG chr11 5247893 5247912 5247909 +
tggaacactttcccttcctt

SEQ ID NO: 11154 - DNA, 20 bp, Artificial Sequence
  Synthetic oligonucleotide; CAG chr11 5247912 5247931 5247928 +
taagaaccatccttgctact

SEQ ID NO: 11155 - DNA, 20 bp, Artificial Sequence
  Synthetic oligonucleotide; CAG chr11 5247927 5247946 5247943 +
ctactcagctgcaatcaatc

SEQ ID NO: 11156 - DNA, 20 bp, Artificial Sequence
  Synthetic oligonucleotide; CAG chr11 5247934 5247953 5247950 +
gctgcaatcaatccagcccc

SEQ ID NO: 11157 - DNA, 20 bp, Artificial Sequence
  Synthetic oligonucleotide; AGG chr11 5247935 5247954 5247951 +
ctgcaatcaatccagccccc

SEQ ID NO: 11158 - DNA, 20 bp, Artificial Sequence
  Synthetic oligonucleotide; GAG chr11 5247982 5248001 5247998 +
cttccaaaacatctgtttct

SEQ ID NO: 11159 - DNA, 20 bp, Artificial Sequence
  Synthetic oligonucleotide; AAG chr11 5247985 5248004 5248001 +
ccaaaacatctgtttctgag

SEQ ID NO: 11160 - DNA, 20 bp, Artificial Sequence
  Synthetic oligonucleotide; TAG chr11 5247998 5248017 5248014 +
ttctgagaagtcctgtccta

SEQ ID NO: 11161 - DNA, 20 bp, Artificial Sequence
  Synthetic oligonucleotide; GAG chr11 5248000 5248019 5248016 +
ctgagaagtcctgtcctata

SEQ ID NO: 11162 - DNA, 20 bp, Artificial Sequence
  Synthetic oligonucleotide; AGG chr11 5248001 5248020 5248017 +
tgagaagtcctgtcctatag

SEQ ID NO: 11163 - DNA, 20 bp, Artificial Sequence
  Synthetic oligonucleotide; CGG chr11 5248017 5248036 5248033 +
atagaggtctttcttcccac

SEQ ID NO: 11164 - DNA, 20 bp, Artificial Sequence
  Synthetic oligonucleotide; CAG chr11 5248049 5248068 5248065 +
acaccatttactcccacttg

SEQ ID NO: 11165 - DNA, 20 bp, Artificial Sequence
  Synthetic oligonucleotide; AAG chr11 5248065 5248084 5248081 +
cttgcagaactcccgtgtac

SEQ ID NO: 11166 - DNA, 20 bp, Artificial Sequence
  Synthetic oligonucleotide; GAG chr11 5248123 5248142 5248139 +
catctcatataaaaataaat

SEQ ID NO: 11167 - DNA, 20 bp, Artificial Sequence
  Synthetic oligonucleotide; AGG chr11 5248124 5248143 5248140 +
atctcatataaaaataaatg

SEQ ID NO: 11168 - DNA, 20 bp, Artificial Sequence
  Synthetic oligonucleotide; GAG chr11 5248126 5248145 5248142 +
ctcatataaaaataaatgag

SEQ ID NO: 11169 - DNA, 20 bp, Artificial Sequence
  Synthetic oligonucleotide; CAG chr11 5248152 5248171 5248168 +
gcacacaccacaaacacaaa

SEQ ID NO: 11170 - DNA, 20 bp, Artificial Sequence
  Synthetic oligonucleotide; AGG chr11 5248153 5248172 5248169 +
cacacaccacaaacacaaac

SEQ ID NO: 11171 - DNA, 20 bp, Artificial Sequence
  Synthetic oligonucleotide; CAG chr11 5248160 5248179 5248176 +
cacaaacacaaacaggcatg

SEQ ID NO: 11172 - DNA, 20 bp, Artificial Sequence
  Synthetic oligonucleotide; TGG chr11 5248201 5248220 5248217 +
ccctcaatataaaccctttg

SEQ ID NO: 11173 - DNA, 20 bp, Artificial Sequence
  Synthetic oligonucleotide; AAG chr11 5248218 5248237 5248234 +
ttgtggctcatatatttaaa

SEQ ID NO: 11174 - DNA, 20 bp, Artificial Sequence
  Synthetic oligonucleotide; AAG chr11 5248231 5248250 5248247 +
atttaaaaagatgtaaaaaa

SEQ ID NO: 11175 - DNA, 20 bp, Artificial Sequence
  Synthetic oligonucleotide; GAG chr11 5248233 5248252 5248249 +
ttaaaaagatgtaaaaaaaa

SEQ ID NO: 11176 - DNA, 20 bp, Artificial Sequence
  Synthetic oligonucleotide; AAG chr11 5248239 5248258 5248255 +
agatgtaaaaaaaagagctg

SEQ ID NO: 11177 - DNA, 20 bp, Artificial Sequence
  Synthetic oligonucleotide; CAG chr11 5248261 5248280 5248277 +
gaaaatcatgtgtgatctct

SEQ ID NO: 11178 - DNA, 20 bp, Artificial Sequence
  Synthetic oligonucleotide; CAG chr11 5248264 5248283 5248280 +
aatcatgtgtgatctctcag

SEQ ID NO: 11179 - DNA, 20 bp, Artificial Sequence
  Synthetic oligonucleotide; TAG chr11 5248269 5248288 5248285 +
tgtgtgatctctcagcagaa

SEQ ID NO: 11180 - DNA, 20 bp, Artificial Sequence
  Synthetic oligonucleotide; CAG chr11 5248293 5248312 5248309 +
tttattatttgtattgcttg

SEQ ID NO: 11181 - DNA, 20 bp, Artificial Sequence
  Synthetic oligonucleotide; AAG chr11 5248300 5248319 5248316 +
tttgtattgcttgcagaata

SEQ ID NO: 11182 - DNA, 20 bp, Artificial Sequence
  Synthetic oligonucleotide; AAG chr11 5248314 5248333 5248330 +
agaataaagcctatccttga

SEQ ID NO: 11183 - DNA, 20 bp, Artificial Sequence
  Synthetic oligonucleotide; TGG chr11 5248327 5248346 5248343 +
tccttgaaagctctgaatca

SEQ ID NO: 11184 - DNA, 20 bp, Artificial Sequence
  Synthetic oligonucleotide; GGG chr11 5248328 5248347 5248344 +
ccttgaaagctctgaatcat

SEQ ID NO: 11185 - DNA, 20 bp, Artificial Sequence
  Synthetic oligonucleotide; CAG chr11 5248331 5248350 5248347 +
tgaaagctctgaatcatggg

SEQ ID NO: 11186 - DNA, 20 bp, Artificial Sequence
  Synthetic oligonucleotide; GAG chr11 5248335 5248354 5248351 +
agctctgaatcatgggcagt

SEQ ID NO: 11187 - DNA, 20 bp, Artificial Sequence
  Synthetic oligonucleotide; CAG chr11 5248340 5248359 5248356 +
tgaatcatgggcagtgagct

SEQ ID NO: 11188 - DNA, 20 bp, Artificial Sequence
  Synthetic oligonucleotide; TGG chr11 5248343 5248362 5248359 +
atcatgggcagtgagctcag

SEQ ID NO: 11189 - DNA, 20 bp, Artificial Sequence
  Synthetic oligonucleotide; TGG chr11 5248350 5248369 5248366 +
gcagtgagctcagtggtatc

SEQ ID NO: 11190 - DNA, 20 bp, Artificial Sequence
  Synthetic oligonucleotide; GAG chr11 5248352 5248371 5248368 +
agtgagctcagtggtatctg

SEQ ID NO: 11191 - DNA, 20 bp, Artificial Sequence
  Synthetic oligonucleotide; AGG chr11 5248353 5248372 5248369 +
gtgagctcagtggtatctgg

SEQ ID NO: 11192 - DNA, 20 bp, Artificial Sequence
  Synthetic oligonucleotide; CAG chr11 5248357 5248376 5248373 +
gctcagtggtatctggagga

SEQ ID NO: 11193 - DNA, 20 bp, Artificial Sequence
  Synthetic oligonucleotide; AGG chr11 5248358 5248377 5248374 +
ctcagtggtatctggaggac

SEQ ID NO: 11194 - DNA, 20 bp, Artificial Sequence
  Synthetic oligonucleotide; GGG chr11 5248359 5248378 5248375 +
tcagtggtatctggaggaca

SEQ ID NO: 11195 - DNA, 20 bp, Artificial Sequence
  Synthetic oligonucleotide; TGG chr11 5248365 5248384 5248381 +
gtatctggaggacagggcac

SEQ ID NO: 11196 - DNA, 20 bp, Artificial Sequence
  Synthetic oligonucleotide; CAG chr11 5248374 5248393 5248390 +
ggacagggcactggccactg

SEQ ID NO: 11197 - DNA, 20 bp, Artificial Sequence
  Synthetic oligonucleotide; CAG chr11 5248391 5248410 5248407 +
ctgcagtcaccatcttctgc

SEQ ID NO: 11198 - DNA, 20 bp, Artificial Sequence
  Synthetic oligonucleotide; AGG chr11 5248392 5248411 5248408 +
tgcagtcaccatcttctgcc

SEQ ID NO: 11199 - DNA, 20 bp, Artificial Sequence
  Synthetic oligonucleotide; AAG chr11 5248395 5248414 5248411 +
agtcaccatcttctgccagg

SEQ ID NO: 11200 - DNA, 20 bp, Artificial Sequence
  Synthetic oligonucleotide; CAG chr11 5248407 5248426 5248423 +
ctgccaggaagcctgcacct

SEQ ID NO: 11201 - DNA, 20 bp, Artificial Sequence
  Synthetic oligonucleotide; AGG chr11 5248408 5248427 5248424 +
tgccaggaagcctgcacctc

SEQ ID NO: 11202 - DNA, 20 bp, Artificial Sequence
  Synthetic oligonucleotide; GGG chr11 5248409 5248428 5248425 +
gccaggaagcctgcacctca

SEQ ID NO: 11203 - DNA, 20 bp, Artificial Sequence
  Synthetic oligonucleotide; GGG chr11 5248410 5248429 5248426 +
ccaggaagcctgcacctcag

SEQ ID NO: 11204 - DNA, 20 bp, Artificial Sequence
  Synthetic oligonucleotide; TGG chr11 5248430 5248449 5248446 +
gggtgaattctttgccgaaa

SEQ ID NO: 11205 - DNA, 20 bp, Artificial Sequence
  Synthetic oligonucleotide; CGG chr11 5248443 5248462 5248459 +
gccgaaatggattgccaaaa

SEQ ID NO: 11206 - DNA, 20 bp, Artificial Sequence
  Synthetic oligonucleotide; CAG chr11 5248450 5248469 5248466 +
tggattgccaaaacggtcac

SEQ ID NO: 11207 - DNA, 20 bp, Artificial Sequence
  Synthetic oligonucleotide; CAG chr11 5248462 5248481 5248478 +
acggtcaccagcacatttcc

SEQ ID NO: 11208 - DNA, 20 bp, Artificial Sequence
  Synthetic oligonucleotide; AGG chr11 5248463 5248482 5248479 +
cggtcaccagcacatttccc

SEQ ID NO: 11209 - DNA, 20 bp, Artificial Sequence
  Synthetic oligonucleotide; GAG chr11 5248465 5248484 5248481 +
gtcaccagcacatttcccag

SEQ ID NO: 11210 - DNA, 20 bp, Artificial Sequence
  Synthetic oligonucleotide; GAG chr11 5248473 5248492 5248489 +
cacatttcccaggagctgtt

SEQ ID NO: 11211 - DNA, 20 bp, Artificial Sequence
  Synthetic oligonucleotide; AAG chr11 5248480 5248499 5248496 +
cccaggagctgttgagatga

SEQ ID NO: 11212 - DNA, 20 bp, Artificial Sequence
  Synthetic oligonucleotide; AGG chr11 5248481 5248500 5248497 +
ccaggagctgttgagatgaa

SEQ ID NO: 11213 - DNA, 20 bp, Artificial Sequence
  Synthetic oligonucleotide; GAG chr11 5248483 5248502 5248499 +
aggagctgttgagatgaaag

SEQ ID NO: 11214 - DNA, 20 bp, Artificial Sequence
  Synthetic oligonucleotide; AAG chr11 5248492 5248511 5248508 +
tgagatgaaaggagacaata

SEQ ID NO: 11215 - DNA, 20 bp, Artificial Sequence
  Synthetic oligonucleotide; TAG chr11 5248504 5248523 5248520 +
agacaataaagatgaaccca

SEQ ID NO: 11216 - DNA, 20 bp, Artificial Sequence
  Synthetic oligonucleotide; GAG chr11 5248508 5248527 5248524 +
aataaagatgaacccatagt

SEQ ID NO: 11217 - DNA, 20 bp, Artificial Sequence
  Synthetic oligonucleotide; GAG chr11 5248513 5248532 5248529 +
agatgaacccatagtgagct

SEQ ID NO: 11218 - DNA, 20 bp, Artificial Sequence
  Synthetic oligonucleotide; GAG chr11 5248515 5248534 5248531 +
atgaacccatagtgagctga

SEQ ID NO: 11219 - DNA, 20 bp, Artificial Sequence
  Synthetic oligonucleotide; CAG chr11 5248521 5248540 5248537 +
ccatagtgagctgagagctc

SEQ ID NO: 11220 - DNA, 20 bp, Artificial Sequence
  Synthetic oligonucleotide; TGG chr11 5248526 5248545 5248542 +
gtgagctgagagctccagcc

SEQ ID NO: 11221 - DNA, 20 bp, Artificial Sequence
  Synthetic oligonucleotide; CAG chr11 5248533 5248552 5248549 +
gagagctccagcctggcctc

SEQ ID NO: 11222 - DNA, 20 bp, Artificial Sequence
  Synthetic oligonucleotide; AAG chr11 5248549 5248568 5248565 +
cctccagataactacacacc

SEQ ID NO: 11223 - DNA, 20 bp, Artificial Sequence
  Synthetic oligonucleotide; CAG chr11 5248560 5248579 5248576 +
ctacacaccaagcttccacc

SEQ ID NO: 11224 - DNA, 20 bp, Artificial Sequence
  Synthetic oligonucleotide; AAG chr11 5248567 5248586 5248583 +
ccaagcttccacccagaatc

SEQ ID NO: 11225 - DNA, 20 bp, Artificial Sequence
  Synthetic oligonucleotide; AAG chr11 5248589 5248608 5248605 +
gcctatgttaacttccctca

SEQ ID NO: 11226 - DNA, 20 bp, Artificial Sequence
  Synthetic oligonucleotide; GAG chr11 5248595 5248614 5248611 +
gttaacttccctcaaagcct

SEQ ID NO: 11227 - DNA, 20 bp, Artificial Sequence
  Synthetic oligonucleotide; CAG chr11 5248619 5248638 5248635 +
ttttgccttcccattaaatg

SEQ ID NO: 11228 - DNA, 20 bp, Artificial Sequence
  Synthetic oligonucleotide; AGG chr11 5248620 5248639 5248636 +
tttgccttcccattaaatgc

SEQ ID NO: 11229 - DNA, 20 bp, Artificial Sequence
  Synthetic oligonucleotide; TAG chr11 5248623 5248642 5248639 +
gccttcccattaaatgcagg

SEQ ID NO: 11230 - DNA, 20 bp, Artificial Sequence
  Synthetic oligonucleotide; AAG chr11 5248638 5248657 5248654 +
gcaggtagttgttccccttc

SEQ ID NO: 11231 - DNA, 20 bp, Artificial Sequence
  Synthetic oligonucleotide; TAG chr11 5248644 5248663 5248660 +
agttgttccccttcaagcac

SEQ ID NO: 11232 - DNA, 20 bp, Artificial Sequence
  Synthetic oligonucleotide; TGG chr11 5248651 5248670 5248667 +
ccccttcaagcactagtcac

SEQ ID NO: 11233 - DNA, 20 bp, Artificial Sequence
  Synthetic oligonucleotide; TAG chr11 5248704 5248723 5248720 +
accatgaaccctgtatgttg

SEQ ID NO: 11234 - DNA, 20 bp, Artificial Sequence
  Synthetic oligonucleotide; AGG chr11 5248705 5248724 5248721 +
ccatgaaccctgtatgttgt

SEQ ID NO: 11235 - DNA, 20 bp, Artificial Sequence
  Synthetic oligonucleotide; AAG chr11 5248711 5248730 5248727 +
accctgtatgttgtaggctg

SEQ ID NO: 11236 - DNA, 20 bp, Artificial Sequence
  Synthetic oligonucleotide; AAG chr11 5248721 5248740 5248737 +
ttgtaggctgaagacgttaa

SEQ ID NO: 11237 - DNA, 20 bp, Artificial Sequence
  Synthetic oligonucleotide; CAG chr11 5248779 5248798 5248795 +
cgcacacacacacacacaca

SEQ ID NO: 11238 - DNA, 20 bp, Artificial Sequence
  Synthetic oligonucleotide; GAG chr11 5248781 5248800 5248797 +
cacacacacacacacacaca

SEQ ID NO: 11239 - DNA, 20 bp, Artificial Sequence
  Synthetic oligonucleotide; CAG chr11 5248804 5248823 5248820 +
ctgactttcaaaatctactc

SEQ ID NO: 11240 - DNA, 20 bp, Artificial Sequence
  Synthetic oligonucleotide; TGG chr11 5248835 5248854 5248851 +
tttcaattgttcctcacccc

SEQ ID NO: 11241 - DNA, 20 bp, Artificial Sequence
  Synthetic oligonucleotide; TGG chr11 5248856 5248875 5248872 +
ggacatactttgcccccatc

SEQ ID NO: 11242 - DNA, 20 bp, Artificial Sequence
  Synthetic oligonucleotide; AAG chr11 5248864 5248883 5248880 +
tttgcccccatctggaatta

SEQ ID NO: 11243 - DNA, 20 bp, Artificial Sequence
  Synthetic oligonucleotide; AGG chr11 5248865 5248884 5248881 +
ttgcccccatctggaattaa

SEQ ID NO: 11244 - DNA, 20 bp, Artificial Sequence
  Synthetic oligonucleotide; AAG chr11 5248872 5248891 5248888 +
catctggaattaaaggatat

SEQ ID NO: 11245 - DNA, 20 bp, Artificial Sequence
  Synthetic oligonucleotide; AAG chr11 5248884 5248903 5248900 +
aaggatataagtttgtaatg

SEQ ID NO: 11246 - DNA, 20 bp, Artificial Sequence
  Synthetic oligonucleotide; TAG chr11 5248890 5248909 5248906 +
ataagtttgtaatgaagcat

SEQ ID NO: 11247 - DNA, 20 bp, Artificial Sequence
  Synthetic oligonucleotide; CAG chr11 5248893 5248912 5248909 +
agtttgtaatgaagcattag

SEQ ID NO: 11248 - DNA, 20 bp, Artificial Sequence
  Synthetic oligonucleotide; CAG chr11 5248911 5248930 5248927 +
agcagcattttatatgtgtc

SEQ ID NO: 11249 - DNA, 20 bp, Artificial Sequence
  Synthetic oligonucleotide; TAG chr11 5248920 5248939 5248936 +
ttatatgtgtccagctgata

SEQ ID NO: 11250 - DNA, 20 bp, Artificial Sequence
  Synthetic oligonucleotide; AGG chr11 5248921 5248940 5248937 +
tatatgtgtccagctgatat

SEQ ID NO: 11251 - DNA, 20 bp, Artificial Sequence
  Synthetic oligonucleotide; TAG chr11 5248926 5248945 5248942 +
gtgtccagctgatataggaa

SEQ ID NO: 11252 - DNA, 20 bp, Artificial Sequence
  Synthetic oligonucleotide; TAG chr11 5248932 5248951 5248948 +
agctgatataggaatagcct

SEQ ID NO: 11253 - DNA, 20 bp, Artificial Sequence
  Synthetic oligonucleotide; TGG chr11 5248946 5248965 5248962 +
tagccttagcaatgtatgtt

SEQ ID NO: 11254 - DNA, 20 bp, Artificial Sequence
  Synthetic oligonucleotide; AAG chr11 5248955 5248974 5248971 +
caatgtatgtttggccacca

SEQ ID NO: 11255 - DNA, 20 bp, Artificial Sequence
  Synthetic oligonucleotide; GAG chr11 5248973 5248992 5248989 +
caaagttccccactttgact

SEQ ID NO: 11256 - DNA, 20 bp, Artificial Sequence
  Synthetic oligonucleotide; CAG chr11 5249029 5249048 5249045 +
gaccatacttgtcctgcctc

SEQ ID NO: 11257 - DNA, 20 bp, Artificial Sequence
  Synthetic oligonucleotide; TAG chr11 5249033 5249052 5249049 +
atacttgtcctgcctccaga

SEQ ID NO: 11258 - DNA, 20 bp, Artificial Sequence
  Synthetic oligonucleotide; GAG chr11 5249057 5249076 5249073 +
tgttttaaaacaacaaaaat

SEQ ID NO: 11259 - DNA, 20 bp, Artificial Sequence
  Synthetic oligonucleotide; AGG chr11 5249058 5249077 5249074 +
gttttaaaacaacaaaaatg

SEQ ID NO: 11260 - DNA, 20 bp, Artificial Sequence
  Synthetic oligonucleotide; GGG chr11 5249059 5249078 5249075 +
ttttaaaacaacaaaaatga

SEQ ID NO: 11261 - DNA, 20 bp, Artificial Sequence
  Synthetic oligonucleotide; AAG chr11 5249063 5249082 5249079 +
aaaacaacaaaaatgaggga

SEQ ID NO: 11262 - DNA, 20 bp, Artificial Sequence
  Synthetic oligonucleotide; AAG chr11 5249070 5249089 5249086 +
caaaaatgagggaaagatga

SEQ ID NO: 11263 - DNA, 20 bp, Artificial Sequence
  Synthetic oligonucleotide; TGG chr11 5249083 5249102 5249099 +
aagatgaaagttctttctac

SEQ ID NO: 11264 - DNA, 20 bp, Artificial Sequence
  Synthetic oligonucleotide; AAG chr11 5249095 5249114 5249111 +
ctttctactggaatctaata

SEQ ID NO: 11265 - DNA, 20 bp, Artificial Sequence
  Synthetic oligonucleotide; AAG chr11 5249100 5249119 5249116 +
tactggaatctaataaagaa

SEQ ID NO: 11266 - DNA, 20 bp, Artificial Sequence
  Synthetic oligonucleotide; AAG chr11 5249135 5249154 5249151 +
tttccacctctcttttctca

SEQ ID NO: 11267 - DNA, 20 bp, Artificial Sequence
  Synthetic oligonucleotide; TAG chr11 5249153 5249172 5249169 +
caaagtcaaaattgtccatc

SEQ ID NO: 11268 - DNA, 20 bp, Artificial Sequence
  Synthetic oligonucleotide; TAG chr11 5249161 5249180 5249177 +
aaattgtccatctagatttt

SEQ ID NO: 11269 - DNA, 20 bp, Artificial Sequence
  Synthetic oligonucleotide; GAG chr11 5249163 5249182 5249179 +
attgtccatctagattttta

SEQ ID NO: 11270 - DNA, 20 bp, Artificial Sequence
  Synthetic oligonucleotide; AGG chr11 5249164 5249183 5249180 +
ttgtccatctagatttttag

SEQ ID NO: 11271 - DNA, 20 bp, Artificial Sequence
  Synthetic oligonucleotide; TAG chr11 5249174 5249193 5249190 +
agatttttagaggcactcct

SEQ ID NO: 11272 - DNA, 20 bp, Artificial Sequence
  Synthetic oligonucleotide; AGG chr11 5249175 5249194 5249191 +
gatttttagaggcactcctt

SEQ ID NO: 11273 - DNA, 20 bp, Artificial Sequence
  Synthetic oligonucleotide; TGG chr11 5249195 5249214 5249211 +
aggccctaaaacattaccac

SEQ ID NO: 11274 - DNA, 20 bp, Artificial Sequence
  Synthetic oligonucleotide; GGG chr11 5249196 5249215 5249212 +
ggccctaaaacattaccact

SEQ ID NO: 11275 - DNA, 20 bp, Artificial Sequence
  Synthetic oligonucleotide; CAG chr11 5249202 5249221 5249218 +
aaaacattaccactgggtct

SEQ ID NO: 11276 - DNA, 20 bp, Artificial Sequence
  Synthetic oligonucleotide; CAG chr11 5249207 5249226 5249223 +
attaccactgggtctcagcc

SEQ ID NO: 11277 - DNA, 20 bp, Artificial Sequence
  Synthetic oligonucleotide; TAG chr11 5249211 5249230 5249227 +
ccactgggtctcagcccagt

SEQ ID NO: 11278 - DNA, 20 bp, Artificial Sequence
  Synthetic oligonucleotide; CAG chr11 5249221 5249240 5249237 +
tcagcccagttagtcctctg

SEQ ID NO: 11279 - DNA, 20 bp, Artificial Sequence
  Synthetic oligonucleotide; CAG chr11 5249242 5249261 5249258 +
agtttcttcacccccaaccc

SEQ ID NO: 11280 - DNA, 20 bp, Artificial Sequence
  Synthetic oligonucleotide; CAG chr11 5249255 5249274 5249271 +
ccaaccccagtatcttcaaa

SEQ ID NO: 11281 - DNA, 20 bp, Artificial Sequence
  Synthetic oligonucleotide; CAG chr11 5249276 5249295 5249292 +
agctcacaccctgctgtgct

SEQ ID NO: 11282 - DNA, 20 bp, Artificial Sequence
  Synthetic oligonucleotide; AAG chr11 5249297 5249316 5249313 +
agatcaatactccgttgtct

SEQ ID NO: 11283 - DNA, 20 bp, Artificial Sequence
  Synthetic oligonucleotide; GAG chr11 5249307 5249326 5249323 +
tccgttgtctaagttgcctc

SEQ ID NO: 11284 - DNA, 20 bp, Artificial Sequence
  Synthetic oligonucleotide; AAG chr11 5249314 5249333 5249330 +
tctaagttgcctcgagacta

SEQ ID NO: 11285 - DNA, 20 bp, Artificial Sequence
  Synthetic oligonucleotide; AGG chr11 5249315 5249334 5249331 +
ctaagttgcctcgagactaa

SEQ ID NO: 11286 - DNA, 20 bp, Artificial Sequence
  Synthetic oligonucleotide; CAG chr11 5249321 5249340 5249337 +
tgcctcgagactaaaggcaa

SEQ ID NO: 11287 - DNA, 20 bp, Artificial Sequence
  Synthetic oligonucleotide; AGG chr11 5249322 5249341 5249338 +
gcctcgagactaaaggcaac

SEQ ID NO: 11288 - DNA, 20 bp, Artificial Sequence
  Synthetic oligonucleotide; GGG chr11 5249323 5249342 5249339 +
cctcgagactaaaggcaaca

SEQ ID NO: 11289 - DNA, 20 bp, Artificial Sequence
  Synthetic oligonucleotide; TGG chr11 5249339 5249358 5249355 +
aacagggctgaaacatctcc

SEQ ID NO: 11290 - DNA, 20 bp, Artificial Sequence
  Synthetic oligonucleotide; AAG chr11 5249352 5249371 5249368 +
catctcctggactcaccttg

SEQ ID NO: 11291 - DNA, 20 bp, Artificial Sequence
  Synthetic oligonucleotide; CAG chr11 5249359 5249378 5249375 +
tggactcaccttgaagttct

SEQ ID NO: 11292 - DNA, 20 bp, Artificial Sequence
  Synthetic oligonucleotide; AGG chr11 5249360 5249379 5249376 +
ggactcaccttgaagttctc

SEQ ID NO: 11293 - DNA, 20 bp, Artificial Sequence
  Synthetic oligonucleotide; CAG chr11 5249372 5249391 5249388 +
aagttctcaggatccacatg

SEQ ID NO: 11294 - DNA, 20 bp, Artificial Sequence
  Synthetic oligonucleotide; CAG chr11 5249382 5249401 5249398 +
gatccacatgcagcttgtca

SEQ ID NO: 11295 - DNA, 20 bp, Artificial Sequence
  Synthetic oligonucleotide; CAG chr11 5249387 5249406 5249403 +
acatgcagcttgtcacagtg

SEQ ID NO: 11296 - DNA, 20 bp, Artificial Sequence
  Synthetic oligonucleotide; CAG chr11 5249396 5249415 5249412 +
ttgtcacagtgcagttcact

SEQ ID NO: 11297 - DNA, 20 bp, Artificial Sequence
  Synthetic oligonucleotide; TGG chr11 5249400 5249419 5249416 +
cacagtgcagttcactcagc

SEQ ID NO: 11298 - DNA, 20 bp, Artificial Sequence
  Synthetic oligonucleotide; GGG chr11 5249401 5249420 5249417 +
acagtgcagttcactcagct

SEQ ID NO: 11299 - DNA, 20 bp, Artificial Sequence
  Synthetic oligonucleotide; AAG chr11 5249406 5249425 5249422 +
gcagttcactcagctgggca

SEQ ID NO: 11300 - DNA, 20 bp, Artificial Sequence
  Synthetic oligonucleotide; AGG chr11 5249407 5249426 5249423 +
cagttcactcagctgggcaa

SEQ ID NO: 11301 - DNA, 20 bp, Artificial Sequence
  Synthetic oligonucleotide; GAG chr11 5249417 5249436 5249433 +
agctgggcaaaggtgccctt

SEQ ID NO: 11302 - DNA, 20 bp, Artificial Sequence
  Synthetic oligonucleotide; CAG chr11 5249426 5249445 5249442 +
aaggtgcccttgagatcatc

SEQ ID NO: 11303 - DNA, 20 bp, Artificial Sequence
  Synthetic oligonucleotide; AGG chr11 5249427 5249446 5249443 +
aggtgcccttgagatcatcc

SEQ ID NO: 11304 - DNA, 20 bp, Artificial Sequence
  Synthetic oligonucleotide; TGG chr11 5249437 5249456 5249453 +
gagatcatccaggtgctttg

SEQ ID NO: 11305 - DNA, 20 bp, Artificial Sequence
  Synthetic oligonucleotide; AAG chr11 5249448 5249467 5249464 +
ggtgctttgtggcatctccc

SEQ ID NO: 11306 - DNA, 20 bp, Artificial Sequence
  Synthetic oligonucleotide; AGG chr11 5249449 5249468 5249465 +
gtgctttgtggcatctccca

SEQ ID NO: 11307 - DNA, 20 bp, Artificial Sequence
  Synthetic oligonucleotide; AAG chr11 5249452 5249471 5249468 +
ctttgtggcatctcccaagg

SEQ ID NO: 11308 - DNA, 20 bp, Artificial Sequence
  Synthetic oligonucleotide; CAG chr11 5249456 5249475 5249472 +
gtggcatctcccaaggaagt

SEQ ID NO: 11309 - DNA, 20 bp, Artificial Sequence
  Synthetic oligonucleotide; TGG chr11 5249485 5249504 5249501 +
cttgccatgtgccttgactt

SEQ ID NO: 11310 - DNA, 20 bp, Artificial Sequence
  Synthetic oligonucleotide; GGG chr11 5249486 5249505 5249502 +
ttgccatgtgccttgacttt

SEQ ID NO: 11311 - DNA, 20 bp, Artificial Sequence
  Synthetic oligonucleotide; GGG chr11 5249487 5249506 5249503 +
tgccatgtgccttgactttg

SEQ ID NO: 11312 - DNA, 20 bp, Artificial Sequence
  Synthetic oligonucleotide; TGG chr11 5249500 5249519 5249516 +
gactttggggttgcccatga

SEQ ID NO: 11313 - DNA, 20 bp, Artificial Sequence
  Synthetic oligonucleotide; CAG chr11 5249503 5249522 5249519 +
tttggggttgcccatgatgg

SEQ ID NO: 11314 - DNA, 20 bp, Artificial Sequence
  Synthetic oligonucleotide; GAG chr11 5249505 5249524 5249521 +
tggggttgcccatgatggca

SEQ ID NO: 11315 - DNA, 20 bp, Artificial Sequence
  Synthetic oligonucleotide; AGG chr11 5249506 5249525 5249522 +
ggggttgcccatgatggcag

SEQ ID NO: 11316 - DNA, 20 bp, Artificial Sequence
  Synthetic oligonucleotide; CAG chr11 5249509 5249528 5249525 +
gttgcccatgatggcagagg

SEQ ID NO: 11317 - DNA, 20 bp, Artificial Sequence
  Synthetic oligonucleotide; GAG chr11 5249511 5249530 5249527 +
tgcccatgatggcagaggca

SEQ ID NO: 11318 - DNA, 20 bp, Artificial Sequence
  Synthetic oligonucleotide; AGG chr11 5249512 5249531 5249528 +
gcccatgatggcagaggcag

SEQ ID NO: 11319 - DNA, 20 bp, Artificial Sequence
  Synthetic oligonucleotide; CAG chr11 5249516 5249535 5249532 +
atgatggcagaggcagagga

SEQ ID NO: 11320 - DNA, 20 bp, Artificial Sequence
  Synthetic oligonucleotide; AGG chr11 5249517 5249536 5249533 +
tgatggcagaggcagaggac

SEQ ID NO: 11321 - DNA, 20 bp, Artificial Sequence
  Synthetic oligonucleotide; AAG chr11 5249526 5249545 5249542 +
aggcagaggacaggttgcca

SEQ ID NO: 11322 - DNA, 20 bp, Artificial Sequence
  Synthetic oligonucleotide; AAG chr11 5249535 5249554 5249551 +
acaggttgccaaagctgtca

SEQ ID NO: 11323 - DNA, 20 bp, Artificial Sequence
  Synthetic oligonucleotide; TGG chr11 5249544 5249563 5249560 +
caaagctgtcaaagaacctc

SEQ ID NO: 11324 - DNA, 20 bp, Artificial Sequence
  Synthetic oligonucleotide; GGG chr11 5249545 5249564 5249561 +
aaagctgtcaaagaacctct

SEQ ID NO: 11325 - DNA, 20 bp, Artificial Sequence
  Synthetic oligonucleotide; TGG chr11 5249552 5249571 5249568 +
tcaaagaacctctgggtcca

SEQ ID NO: 11326 - DNA, 20 bp, Artificial Sequence
  Synthetic oligonucleotide; GGG chr11 5249553 5249572 5249569 +
caaagaacctctgggtccat

SEQ ID NO: 11327 - DNA, 20 bp, Artificial Sequence
  Synthetic oligonucleotide; TAG chr11 5249556 5249575 5249572 +
agaacctctgggtccatggg

SEQ ID NO: 11328 - DNA, 20 bp, Artificial Sequence
  Synthetic oligonucleotide; CAG chr11 5249564 5249583 5249580 +
tgggtccatgggtagacaac

SEQ ID NO: 11329 - DNA, 20 bp, Artificial Sequence
  Synthetic oligonucleotide; AGG chr11 5249565 5249584 5249581 +
gggtccatgggtagacaacc

SEQ ID NO: 11330 - DNA, 20 bp, Artificial Sequence
  Synthetic oligonucleotide; GAG chr11 5249567 5249586 5249583 +
gtccatgggtagacaaccag

SEQ ID NO: 11331 - DNA, 20 bp, Artificial Sequence
  Synthetic oligonucleotide; GAG chr11 5249575 5249594 5249591 +
gtagacaaccaggagcctgt

SEQ ID NO: 11332 - DNA, 20 bp, Artificial Sequence
  Synthetic oligonucleotide; AAG chr11 5249584 5249603 5249600 +
caggagcctgtgagattgac

SEQ ID NO: 11333 - DNA, 20 bp, Artificial Sequence
  Synthetic oligonucleotide; CAG chr11 5249589 5249608 5249605 +
gcctgtgagattgacaagaa

SEQ ID NO: 11334 - DNA, 20 bp, Artificial Sequence
  Synthetic oligonucleotide; CAG chr11 5249597 5249616 5249613 +
gattgacaagaacagtttga

SEQ ID NO: 11335 - DNA, 20 bp, Artificial Sequence
  Synthetic oligonucleotide; CAG chr11 5249601 5249620 5249617 +
gacaagaacagtttgacagt

SEQ ID NO: 11336 - DNA, 20 bp, Artificial Sequence
  Synthetic oligonucleotide; AAG chr11 5249604 5249623 5249620 +
aagaacagtttgacagtcag

SEQ ID NO: 11337 - DNA, 20 bp, Artificial Sequence
  Synthetic oligonucleotide; AGG chr11 5249605 5249624 5249621 +
agaacagtttgacagtcaga

SEQ ID NO: 11338 - DNA, 20 bp, Artificial Sequence
  Synthetic oligonucleotide; GAG chr11 5249621 5249640 5249637 +
cagaaggtgccacaaatcct

SEQ ID NO: 11339 - DNA, 20 bp, Artificial Sequence
  Synthetic oligonucleotide; AAG chr11 5249624 5249643 5249640 +
aaggtgccacaaatcctgag

SEQ ID NO: 11340 - DNA, 20 bp, Artificial Sequence
  Synthetic oligonucleotide; TGG chr11 5249632 5249651 5249648 +
acaaatcctgagaagcgacc

SEQ ID NO: 11341 - DNA, 20 bp, Artificial Sequence
  Synthetic oligonucleotide; CAG chr11 5249643 5249662 5249659 +
gaagcgacctggacttttgc

SEQ ID NO: 11342 - DNA, 20 bp, Artificial Sequence
  Synthetic oligonucleotide; AGG chr11 5249644 5249663 5249660 +
aagcgacctggacttttgcc

SEQ ID NO: 11343 - DNA, 20 bp, Artificial Sequence
  Synthetic oligonucleotide; CAG chr11 5249649 5249668 5249665 +
acctggacttttgccaggca

SEQ ID NO: 11344 - DNA, 20 bp, Artificial Sequence
  Synthetic oligonucleotide; AGG chr11 5249650 5249669 5249666 +
cctggacttttgccaggcac

SEQ ID NO: 11345 - DNA, 20 bp, Artificial Sequence
  Synthetic oligonucleotide; GGG chr11 5249651 5249670 5249667 +
ctggacttttgccaggcaca

SEQ ID NO: 11346 - DNA, 20 bp, Artificial Sequence
  Synthetic oligonucleotide; TGG chr11 5249676 5249695 5249692 +
cttccttccctcccttgtcc

SEQ ID NO: 11347 - DNA, 20 bp, Artificial Sequence
  Synthetic oligonucleotide; CAG chr11 5249683 5249702 5249699 +
ccctcccttgtcctggtcac

SEQ ID NO: 11348 - DNA, 20 bp, Artificial Sequence
  Synthetic oligonucleotide; GAG chr11 5249685 5249704 5249701 +
ctcccttgtcctggtcacca

SEQ ID NO: 11349 - DNA, 20 bp, Artificial Sequence
  Synthetic oligonucleotide; CAG chr11 5249698 5249717 5249714 +
gtcaccagagcctaccttcc

SEQ ID NO: 11350 - DNA, 20 bp, Artificial Sequence
  Synthetic oligonucleotide; AGG chr11 5249699 5249718 5249715 +
tcaccagagcctaccttccc

SEQ ID NO: 11351 - DNA, 20 bp, Artificial Sequence
  Synthetic oligonucleotide; GGG chr11 5249700 5249719 5249716 +
caccagagcctaccttccca

SEQ ID NO: 11352 - DNA, 20 bp, Artificial Sequence
  Synthetic oligonucleotide; CAG chr11 5249712 5249731 5249728 +
ccttcccagggtttctcctc

SEQ ID NO: 11353 - DNA, 20 bp, Artificial Sequence
  Synthetic oligonucleotide; CAG chr11 5249740 5249759 5249756 +
tccacattcaccttgcccca

SEQ ID NO: 11354 - DNA, 20 bp, Artificial Sequence
  Synthetic oligonucleotide; AGG chr11 5249741 5249760 5249757 +
ccacattcaccttgccccac

SEQ ID NO: 11355 - DNA, 20 bp, Artificial Sequence
  Synthetic oligonucleotide; TAG chr11 5249751 5249770 5249767 +
cttgccccacaggcttgtga

SEQ ID NO: 11356 - DNA, 20 bp, Artificial Sequence
  Synthetic oligonucleotide; TAG chr11 5249754 5249773 5249770 +
gccccacaggcttgtgatag

SEQ ID NO: 11357 - DNA, 20 bp, Artificial Sequence
  Synthetic oligonucleotide; TGG chr11 5249784 5249803 5249800 +
ctcctctgtgaaatgaccca

SEQ ID NO: 11358 - DNA, 20 bp, Artificial Sequence
  Synthetic oligonucleotide; TGG chr11 5249791 5249810 5249807 +
gtgaaatgacccatggcgtc

SEQ ID NO: 11359 - DNA, 20 bp, Artificial Sequence
  Synthetic oligonucleotide; TAG chr11 5249796 5249815 5249812 +
atgacccatggcgtctggac

SEQ ID NO: 11360 - DNA, 20 bp, Artificial Sequence
  Synthetic oligonucleotide; AGG chr11 5249797 5249816 5249813 +
tgacccatggcgtctggact

SEQ ID NO: 11361 - DNA, 20 bp, Artificial Sequence
  Synthetic oligonucleotide; GAG chr11 5249799 5249818 5249815 +
acccatggcgtctggactag

SEQ ID NO: 11362 - DNA, 20 bp, Artificial Sequence
  Synthetic oligonucleotide; CAG chr11 5249816 5249835 5249832 +
taggagcttattgataacct

SEQ ID NO: 11363 - DNA, 20 bp, Artificial Sequence
  Synthetic oligonucleotide; CAG chr11 5249825 5249844 5249841 +
attgataacctcagacgttc

SEQ ID NO: 11364 - DNA, 20 bp, Artificial Sequence
  Synthetic oligonucleotide; AAG chr11 5249828 5249847 5249844 +
gataacctcagacgttccag

SEQ ID NO: 11365 - DNA, 20 bp, Artificial Sequence
  Synthetic oligonucleotide; GAG chr11 5249832 5249851 5249848 +
acctcagacgttccagaagc

SEQ ID NO: 11366 - DNA, 20 bp, Artificial Sequence
  Synthetic oligonucleotide; TGG chr11 5249839 5249858 5249855 +
acgttccagaagcgagtgtg

SEQ ID NO: 11367 - DNA, 20 bp, Artificial Sequence
  Synthetic oligonucleotide; AAG chr11 5249850 5249869 5249866 +
gcgagtgtgtggaactgctg

SEQ ID NO: 11368 - DNA, 20 bp, Artificial Sequence
  Synthetic oligonucleotide; AGG chr11 5249851 5249870 5249867 +
cgagtgtgtggaactgctga

SEQ ID NO: 11369 - DNA, 20 bp, Artificial Sequence
  Synthetic oligonucleotide; GGG chr11 5249852 5249871 5249868 +
gagtgtgtggaactgctgaa

SEQ ID NO: 11370 - DNA, 20 bp, Artificial Sequence
  Synthetic oligonucleotide; TAG chr11 5249878 5249897 5249894 +
ttccttttattcttcatccc

SEQ ID NO: 11371 - DNA, 20 bp, Artificial Sequence
  Synthetic oligonucleotide; CAG chr11 5249882 5249901 5249898 +
ttttattcttcatccctagc

SEQ ID NO: 11372 - DNA, 20 bp, Artificial Sequence
  Synthetic oligonucleotide; CGG chr11 5249889 5249908 5249905 +
cttcatccctagccagccgc

SEQ ID NO: 11373 - DNA, 20 bp, Artificial Sequence
  Synthetic oligonucleotide; TGG chr11 5249896 5249915 5249912 +
cctagccagccgccggcccc

SEQ ID NO: 11374 - DNA, 20 bp, Artificial Sequence
  Synthetic oligonucleotide; TGG chr11 5249905 5249924 5249921 +
ccgccggcccctggcctcac

SEQ ID NO: 11375 - DNA, 20 bp, Artificial Sequence
  Synthetic oligonucleotide; AAG chr11 5249915 5249934 5249931 +
ctggcctcactggatactct

SEQ ID NO: 11376 - DNA, 20 bp, Artificial Sequence
  Synthetic oligonucleotide; TGG chr11 5249923 5249942 5249939 +
actggatactctaagactat

SEQ ID NO: 11377 - DNA, 20 bp, Artificial Sequence
  Synthetic oligonucleotide; AAG chr11 5249928 5249947 5249944 +
atactctaagactattggtc

SEQ ID NO: 11378 - DNA, 20 bp, Artificial Sequence
  Synthetic oligonucleotide; AAG chr11 5249942 5249961 5249958 +
ttggtcaagtttgccttgtc

SEQ ID NO: 11379 - DNA, 20 bp, Artificial Sequence
  Synthetic oligonucleotide; AGG chr11 5249943 5249962 5249959 +
tggtcaagtttgccttgtca

SEQ ID NO: 11380 - DNA, 20 bp, Artificial Sequence
  Synthetic oligonucleotide; TGG chr11 5249950 5249969 5249966 +
gtttgccttgtcaaggctat

SEQ ID NO: 11381 - DNA, 20 bp, Artificial Sequence
  Synthetic oligonucleotide; AAG chr11 5249955 5249974 5249971 +
ccttgtcaaggctattggtc

SEQ ID NO: 11382 - DNA, 20 bp, Artificial Sequence
  Synthetic oligonucleotide; AGG chr11 5249956 5249975 5249972 +
cttgtcaaggctattggtca

SEQ ID NO: 11383 - DNA, 20 bp, Artificial Sequence
  Synthetic oligonucleotide; AAG chr11 5249960 5249979 5249976 +
tcaaggctattggtcaaggc

SEQ ID NO: 11384 - DNA, 20 bp, Artificial Sequence
  Synthetic oligonucleotide; AGG chr11 5249961 5249980 5249977 +
caaggctattggtcaaggca

SEQ ID NO: 11385 - DNA, 20 bp, Artificial Sequence
  Synthetic oligonucleotide; TGG chr11 5249965 5249984 5249981 +
gctattggtcaaggcaaggc

SEQ ID NO: 11386 - DNA, 20 bp, Artificial Sequence
  Synthetic oligonucleotide; TGG chr11 5249976 5249995 5249992 +
aggcaaggctggccaaccca

SEQ ID NO: 11387 - DNA, 20 bp, Artificial Sequence
  Synthetic oligonucleotide; GGG chr11 5249977 5249996 5249993 +
ggcaaggctggccaacccat

SEQ ID NO: 11388 - DNA, 20 bp, Artificial Sequence
  Synthetic oligonucleotide; TGG chr11 5249980 5249999 5249996 +
aaggctggccaacccatggg

SEQ ID NO: 11389 - DNA, 20 bp, Artificial Sequence
  Synthetic oligonucleotide; GAG chr11 5249982 5250001 5249998 +
ggctggccaacccatgggtg

SEQ ID NO: 11390 - DNA, 20 bp, Artificial Sequence
  Synthetic oligonucleotide; TAG chr11 5249987 5250006 5250003 +
gccaacccatgggtggagtt

SEQ ID NO: 11391 - DNA, 20 bp, Artificial Sequence
  Synthetic oligonucleotide; CAG chr11 5249991 5250010 5250007 +
acccatgggtggagtttagc

SEQ ID NO: 11392 - DNA, 20 bp, Artificial Sequence
  Synthetic oligonucleotide; AGG chr11 5249992 5250011 5250008 +
cccatgggtggagtttagcc

SEQ ID NO: 11393 - DNA, 20 bp, Artificial Sequence
  Synthetic oligonucleotide; GGG chr11 5249993 5250012 5250009 +
ccatgggtggagtttagcca

SEQ ID NO: 11394 - DNA, 20 bp, Artificial Sequence
  Synthetic oligonucleotide; CAG chr11 5250003 5250022 5250019 +
agtttagccagggaccgttt

SEQ ID NO: 11395 - DNA, 20 bp, Artificial Sequence
  Synthetic oligonucleotide; CAG chr11 5250007 5250026 5250023 +
tagccagggaccgtttcaga

SEQ ID NO: 11396 - DNA, 20 bp, Artificial Sequence
  Synthetic oligonucleotide; GAG chr11 5250021 5250040 5250037 +
ttcagacagatatttgcatt

SEQ ID NO: 11397 - DNA, 20 bp, Artificial Sequence
  Synthetic oligonucleotide; TAG chr11 5250025 5250044 5250041 +
gacagatatttgcattgaga

SEQ ID NO: 11398 - DNA, 20 bp, Artificial Sequence
  Synthetic oligonucleotide; TGG chr11 5250030 5250049 5250046 +
atatttgcattgagatagtg

SEQ ID NO: 11399 - DNA, 20 bp, Artificial Sequence
  Synthetic oligonucleotide; GGG chr11 5250031 5250050 5250047 +
tatttgcattgagatagtgt

SEQ ID NO: 11400 - DNA, 20 bp, Artificial Sequence
  Synthetic oligonucleotide; GGG chr11 5250032 5250051 5250048 +
atttgcattgagatagtgtg

SEQ ID NO: 11401 - DNA, 20 bp, Artificial Sequence
  Synthetic oligonucleotide; AAG chr11 5250035 5250054 5250051 +
tgcattgagatagtgtgggg

SEQ ID NO: 11402 - DNA, 20 bp, Artificial Sequence
  Synthetic oligonucleotide; AGG chr11 5250036 5250055 5250052 +
gcattgagatagtgtgggga

SEQ ID NO: 11403 - DNA, 20 bp, Artificial Sequence
  Synthetic oligonucleotide; GGG chr11 5250037 5250056 5250053 +
cattgagatagtgtggggaa

SEQ ID NO: 11404 - DNA, 20 bp, Artificial Sequence
  Synthetic oligonucleotide; GGG chr11 5250038 5250057 5250054 +
attgagatagtgtggggaag

SEQ ID NO: 11405 - DNA, 20 bp, Artificial Sequence
  Synthetic oligonucleotide; AAG chr11 5250046 5250065 5250062 +
agtgtggggaaggggccccc

SEQ ID NO: 11406 - DNA, 20 bp, Artificial Sequence
  Synthetic oligonucleotide; GAG chr11 5250048 5250067 5250064 +
tgtggggaaggggcccccaa

SEQ ID NO: 11407 - DNA, 20 bp, Artificial Sequence
  Synthetic oligonucleotide; AGG chr11 5250049 5250068 5250065 +
gtggggaaggggcccccaag

SEQ ID NO: 11408 - DNA, 20 bp, Artificial Sequence
  Synthetic oligonucleotide; TAG chr11 5250071 5250090 5250087 +
gatactgctaatttttttta

SEQ ID NO: 11409 - DNA, 20 bp, Artificial Sequence
  Synthetic oligonucleotide; CAG chr11 5250093 5250112 5250109 +
gcctttgccttgttccgatt

SEQ ID NO: 11410 - DNA, 20 bp, Artificial Sequence
  Synthetic oligonucleotide; CAG chr11 5250102 5250121 5250118 +
ttgttccgattcagtcattc

SEQ ID NO: 11411 - DNA, 20 bp, Artificial Sequence
  Synthetic oligonucleotide; TAG chr11 5250130 5250149 5250146 +
ctctaatttattcttccctt

SEQ ID NO: 11412 - DNA, 20 bp, Artificial Sequence
  Synthetic oligonucleotide; TAG chr11 5250134 5250153 5250150 +
aatttattcttccctttagc

SEQ ID NO: 11413 - DNA, 20 bp, Artificial Sequence
  Synthetic oligonucleotide; TAG chr11 5250153 5250172 5250169 +
ctagtttccttctcccatca

SEQ ID NO: 11414 - DNA, 20 bp, Artificial Sequence
  Synthetic oligonucleotide; GAG chr11 5250155 5250174 5250171 +
agtttccttctcccatcata

SEQ ID NO: 11415 - DNA, 20 bp, Artificial Sequence
  Synthetic oligonucleotide; AGG chr11 5250156 5250175 5250172 +
gtttccttctcccatcatag

SEQ ID NO: 11416 - DNA, 20 bp, Artificial Sequence
  Synthetic oligonucleotide; CAG chr11 5250163 5250182 5250179 +
tctcccatcatagaggatac

SEQ ID NO: 11417 - DNA, 20 bp, Artificial Sequence
  Synthetic oligonucleotide; AGG chr11 5250164 5250183 5250180 +
ctcccatcatagaggatacc

SEQ ID NO: 11418 - DNA, 20 bp, Artificial Sequence
  Synthetic oligonucleotide; CAG chr11 5250178 5250197 5250194 +
gataccaggacttcttttgt

SEQ ID NO: 11419 - DNA, 20 bp, Artificial Sequence
  Synthetic oligonucleotide; TAG chr11 5250203 5250222 5250219 +
gttttttaccttcttgtctc

SEQ ID NO: 11420 - DNA, 20 bp, Artificial Sequence
  Synthetic oligonucleotide; CAG chr11 5250209 5250228 5250225 +
taccttcttgtctctagctc

SEQ ID NO: 11421 - DNA, 20 bp, Artificial Sequence
  Synthetic oligonucleotide; GAG chr11 5250213 5250232 5250229 +
ttcttgtctctagctccagt

SEQ ID NO: 11422 - DNA, 20 bp, Artificial Sequence
  Synthetic oligonucleotide; AGG chr11 5250214 5250233 5250230 +
tcttgtctctagctccagtg

SEQ ID NO: 11423 - DNA, 20 bp, Artificial Sequence
  Synthetic oligonucleotide; TAG chr11 5250221 5250240 5250237 +
tctagctccagtgaggcctg

SEQ ID NO: 11424 - DNA, 20 bp, Artificial Sequence
  Synthetic oligonucleotide; AAG chr11 5250228 5250247 5250244 +
ccagtgaggcctgtagttta

SEQ ID NO: 11425 - DNA, 20 bp, Artificial Sequence
  Synthetic oligonucleotide; AAG chr11 5250234 5250253 5250250 +
aggcctgtagtttaaagcta

SEQ ID NO: 11426 - DNA, 20 bp, Artificial Sequence
  Synthetic oligonucleotide; AAG chr11 5250255 5250274 5250271 +
agcatgtaccaatttttgaa

SEQ ID NO: 11427 - DNA, 20 bp, Artificial Sequence
  Synthetic oligonucleotide; CAG chr11 5250260 5250279 5250276 +
gtaccaatttttgaaaagtt

SEQ ID NO: 11428 - DNA, 20 bp, Artificial Sequence
  Synthetic oligonucleotide; AGG chr11 5250261 5250280 5250277 +
taccaatttttgaaaagttc

SEQ ID NO: 11429 - DNA, 20 bp, Artificial Sequence
  Synthetic oligonucleotide; GGG chr11 5250262 5250281 5250278 +
accaatttttgaaaagttca

SEQ ID NO: 11430 - DNA, 20 bp, Artificial Sequence
  Synthetic oligonucleotide; TAG chr11 5250281 5250300 5250297 +
agggattgtgaaatgtgttt

SEQ ID NO: 11431 - DNA, 20 bp, Artificial Sequence
  Synthetic oligonucleotide; AGG chr11 5250282 5250301 5250298 +
gggattgtgaaatgtgtttt

SEQ ID NO: 11432 - DNA, 20 bp, Artificial Sequence
  Synthetic oligonucleotide; TAG chr11 5250287 5250306 5250303 +
tgtgaaatgtgttttaggca

SEQ ID NO: 11433 - DNA, 20 bp, Artificial Sequence
  Synthetic oligonucleotide; AGG chr11 5250288 5250307 5250304 +
gtgaaatgtgttttaggcat

SEQ ID NO: 11434 - DNA, 20 bp, Artificial Sequence
  Synthetic oligonucleotide; CAG chr11 5250293 5250312 5250309 +
atgtgttttaggcataggtc

SEQ ID NO: 11435 - DNA, 20 bp, Artificial Sequence
  Synthetic oligonucleotide; AGG chr11 5250294 5250313 5250310 +
tgtgttttaggcataggtcc

SEQ ID NO: 11436 - DNA, 20 bp, Artificial Sequence
  Synthetic oligonucleotide; CGG chr11 5250305 5250324 5250321 +
cataggtccaggatttttga

SEQ ID NO: 11437 - DNA, 20 bp, Artificial Sequence
  Synthetic oligonucleotide; GGG chr11 5250306 5250325 5250322 +
ataggtccaggatttttgac

SEQ ID NO: 11438 - DNA, 20 bp, Artificial Sequence
  Synthetic oligonucleotide; TAG chr11 5250317 5250336 5250333 +
atttttgacgggacaaatct

SEQ ID NO: 11439 - DNA, 20 bp, Artificial Sequence
  Synthetic oligonucleotide; CAG chr11 5250327 5250346 5250343 +
ggacaaatcttagtctcttt

SEQ ID NO: 11440 - DNA, 20 bp, Artificial Sequence
  Synthetic oligonucleotide; TAG chr11 5250331 5250350 5250347 +
aaatcttagtctctttcagt

SEQ ID NO: 11441 - DNA, 20 bp, Artificial Sequence
  Synthetic oligonucleotide; CAG chr11 5250334 5250353 5250350 +
tcttagtctctttcagttag

SEQ ID NO: 11442 - DNA, 20 bp, Artificial Sequence
  Synthetic oligonucleotide; TGG chr11 5250337 5250356 5250353 +
tagtctctttcagttagcag

SEQ ID NO: 11443 - DNA, 20 bp, Artificial Sequence
  Synthetic oligonucleotide; AAG chr11 5250345 5250364 5250361 +
ttcagttagcagtggtttct

SEQ ID NO: 11444 - DNA, 20 bp, Artificial Sequence
  Synthetic oligonucleotide; AGG chr11 5250346 5250365 5250362 +
tcagttagcagtggtttcta

SEQ ID NO: 11445 - DNA, 20 bp, Artificial Sequence
  Synthetic oligonucleotide; AAG chr11 5250352 5250371 5250368 +
agcagtggtttctaaggaaa

SEQ ID NO: 11446 - DNA, 20 bp, Artificial Sequence
  Synthetic oligonucleotide; TAG chr11 5250416 5250435 5250432 +
attatctcttaatttctcaa

SEQ ID NO: 11447 - DNA, 20 bp, Artificial Sequence
  Synthetic oligonucleotide; CAG chr11 5250421 5250440 5250437 +
ctcttaatttctcaatagtg

SEQ ID NO: 11448 - DNA, 20 bp, Artificial Sequence
  Synthetic oligonucleotide; AAG chr11 5250441 5250460 5250457 +
cagtgaaaacaatttctata

SEQ ID NO: 11449 - DNA, 20 bp, Artificial Sequence
  Synthetic oligonucleotide; CAG chr11 5250447 5250466 5250463 +
aaacaatttctataaagcca

SEQ ID NO: 11450 - DNA, 20 bp, Artificial Sequence
  Synthetic oligonucleotide; CAG chr11 5250453 5250472 5250469 +
tttctataaagccacagttt

SEQ ID NO: 11451 - DNA, 20 bp, Artificial Sequence
  Synthetic oligonucleotide; CAG chr11 5250458 5250477 5250474 +
ataaagccacagtttcagcg

SEQ ID NO: 11452 - DNA, 20 bp, Artificial Sequence
  Synthetic oligonucleotide; TAG chr11 5250464 5250483 5250480 +
ccacagtttcagcgcagtaa

SEQ ID NO: 11453 - DNA, 20 bp, Artificial Sequence
  Synthetic oligonucleotide; TAG chr11 5250469 5250488 5250485 +
gtttcagcgcagtaatagat

SEQ ID NO: 11454 - DNA, 20 bp, Artificial Sequence
  Synthetic oligonucleotide; AAG chr11 5250485 5250504 5250501 +
agattagtgttacataatat

SEQ ID NO: 11455 - DNA, 20 bp, Artificial Sequence
  Synthetic oligonucleotide; TAG chr11 5250554 5250573 5250570 +
aaatcatgactgtttcatct

SEQ ID NO: 11456 - DNA, 20 bp, Artificial Sequence
  Synthetic oligonucleotide; CAG chr11 5250578 5250597 5250594 +
aaaatatttgattccatatt

SEQ ID NO: 11457 - DNA, 20 bp, Artificial Sequence
  Synthetic oligonucleotide; AGG chr11 5250579 5250598 5250595 +
aaatatttgattccatattc

SEQ ID NO: 11458 - DNA, 20 bp, Artificial Sequence
  Synthetic oligonucleotide; CAG chr11 5250597 5250616 5250613 +
tcaggtatgtatgtatacac

SEQ ID NO: 11459 - DNA, 20 bp, Artificial Sequence
  Synthetic oligonucleotide; TGG chr11 5250618 5250637 5250634 +
agatgatgtgtatttaccac

SEQ ID NO: 11460 - DNA, 20 bp, Artificial Sequence
  Synthetic oligonucleotide; AAG chr11 5250623 5250642 5250639 +
atgtgtatttaccactggat

SEQ ID NO: 11461 - DNA, 20 bp, Artificial Sequence
  Synthetic oligonucleotide; TGG chr11 5250635 5250654 5250651 +
cactggataagtgtgtgtgc

SEQ ID NO: 11462 - DNA, 20 bp, Artificial Sequence
  Synthetic oligonucleotide; CAG chr11 5250647 5250666 5250663 +
gtgtgtgctggctgatgacc

SEQ ID NO: 11463 - DNA, 20 bp, Artificial Sequence
  Synthetic oligonucleotide; AGG chr11 5250648 5250667 5250664 +
tgtgtgctggctgatgaccc

SEQ ID NO: 11464 - DNA, 20 bp, Artificial Sequence
  Synthetic oligonucleotide; GGG chr11 5250649 5250668 5250665 +
gtgtgctggctgatgaccca

SEQ ID NO: 11465 - DNA, 20 bp, Artificial Sequence
  Synthetic oligonucleotide; TGG chr11 5250655 5250674 5250671 +
tggctgatgacccagggttt

SEQ ID NO: 11466 - DNA, 20 bp, Artificial Sequence
  Synthetic oligonucleotide; TAG chr11 5250660 5250679 5250676 +
gatgacccagggttttggcg

SEQ ID NO: 11467 - DNA, 20 bp, Artificial Sequence
  Synthetic oligonucleotide; CAG chr11 5250675 5250694 5250691 +
tggcgtagctcttctatgct

SEQ ID NO: 11468 - DNA, 20 bp, Artificial Sequence
  Synthetic oligonucleotide; AAG chr11 5250680 5250699 5250696 +
tagctcttctatgctcagta

SEQ ID NO: 11469 - DNA, 20 bp, Artificial Sequence
  Synthetic oligonucleotide; TGG chr11 5250687 5250706 5250703 +
tctatgctcagtaaagatga

SEQ ID NO: 11470 - DNA, 20 bp, Artificial Sequence
  Synthetic oligonucleotide; TAG chr11 5250690 5250709 5250706 +
atgctcagtaaagatgatgg

SEQ ID NO: 11471 - DNA, 20 bp, Artificial Sequence
  Synthetic oligonucleotide; TGG chr11 5250702 5250721 5250718 +
gatgatggtagaatgttctt

SEQ ID NO: 11472 - DNA, 20 bp, Artificial Sequence
  Synthetic oligonucleotide; CAG chr11 5250705 5250724 5250721 +
gatggtagaatgttctttgg

SEQ ID NO: 11473 - DNA, 20 bp, Artificial Sequence
  Synthetic oligonucleotide; AGG chr11 5250706 5250725 5250722 +
atggtagaatgttctttggc

SEQ ID NO: 11474 - DNA, 20 bp, Artificial Sequence
  Synthetic oligonucleotide; TGG chr11 5250714 5250733 5250730 +
atgttctttggcaggtactg

SEQ ID NO: 11475 - DNA, 20 bp, Artificial Sequence
  Synthetic oligonucleotide; TAG chr11 5250719 5250738 5250735 +
ctttggcaggtactgtggat

SEQ ID NO: 11476 - DNA, 20 bp, Artificial Sequence
  Synthetic oligonucleotide; TAG chr11 5250745 5250764 5250761 +
taattatcttgtataaatgc

SEQ ID NO: 11477 - DNA, 20 bp, Artificial Sequence
  Synthetic oligonucleotide; AGG chr11 5250746 5250765 5250762 +
aattatcttgtataaatgct

SEQ ID NO: 11478 - DNA, 20 bp, Artificial Sequence
  Synthetic oligonucleotide; CAG chr11 5250758 5250777 5250774 +
taaatgctaggttcacttct

SEQ ID NO: 11479 - DNA, 20 bp, Artificial Sequence
  Synthetic oligonucleotide; AGG chr11 5250759 5250778 5250775 +
aaatgctaggttcacttctc

SEQ ID NO: 11480 - DNA, 20 bp, Artificial Sequence
  Synthetic oligonucleotide; GGG chr11 5250760 5250779 5250776 +
aatgctaggttcacttctca

SEQ ID NO: 11481 - DNA, 20 bp, Artificial Sequence
  Synthetic oligonucleotide; AAG chr11 5250774 5250793 5250790 +
ttctcagggaatcttactct

SEQ ID NO: 11482 - DNA, 20 bp, Artificial Sequence
  Synthetic oligonucleotide; AAG chr11 5250781 5250800 5250797 +
ggaatcttactctaagacat

SEQ ID NO: 11483 - DNA, 20 bp, Artificial Sequence
  Synthetic oligonucleotide; TGG chr11 5250797 5250816 5250813 +
acataagatgtgcgtgtaca

SEQ ID NO: 11484 - DNA, 20 bp, Artificial Sequence
  Synthetic oligonucleotide; AAG chr11 5250812 5250831 5250828 +
gtacatggaaaacaactcta

SEQ ID NO: 11485 - DNA, 20 bp, Artificial Sequence
  Synthetic oligonucleotide; GAG chr11 5250814 5250833 5250830 +
acatggaaaacaactctaaa

SEQ ID NO: 11486 - DNA, 20 bp, Artificial Sequence
  Synthetic oligonucleotide; AGG chr11 5250815 5250834 5250831 +
catggaaaacaactctaaag

SEQ ID NO: 11487 - DNA, 20 bp, Artificial Sequence
  Synthetic oligonucleotide; AAG chr11 5250819 5250838 5250835 +
gaaaacaactctaaagaggc

SEQ ID NO: 11488 - DNA, 20 bp, Artificial Sequence
  Synthetic oligonucleotide; AGG chr11 5250820 5250839 5250836 +
aaaacaactctaaagaggca

SEQ ID NO: 11489 - DNA, 20 bp, Artificial Sequence
  Synthetic oligonucleotide; GGG chr11 5250821 5250840 5250837 +
aaacaactctaaagaggcaa

SEQ ID NO: 11490 - DNA, 20 bp, Artificial Sequence
  Synthetic oligonucleotide; TAG chr11 5250841 5250860 5250857 +
gggttgtttttattgactaa

SEQ ID NO: 11491 - DNA, 20 bp, Artificial Sequence
  Synthetic oligonucleotide; TAG chr11 5250870 5250889 5250886 +
cactattataactcgaatat

SEQ ID NO: 11492 - DNA, 20 bp, Artificial Sequence
  Synthetic oligonucleotide; TAG chr11 5250880 5250899 5250896 +
actcgaatattagtgtactt

SEQ ID NO: 11493 - DNA, 20 bp, Artificial Sequence
  Synthetic oligonucleotide; CAG chr11 5250884 5250903 5250900 +
gaatattagtgtactttaga

SEQ ID NO: 11494 - DNA, 20 bp, Artificial Sequence
  Synthetic oligonucleotide; CAG chr11 5250901 5250920 5250917 +
agacagctttatttctaaca

SEQ ID NO: 11495 - DNA, 20 bp, Artificial Sequence
  Synthetic oligonucleotide; TGG chr11 5250921 5250940 5250937 +
cagtgctgtttctgacatat

SEQ ID NO: 11496 - DNA, 20 bp, Artificial Sequence
  Synthetic oligonucleotide; CAG chr11 5250932 5250951 5250948 +
ctgacatattggaccattaa

SEQ ID NO: 11497 - DNA, 20 bp, Artificial Sequence
  Synthetic oligonucleotide; AGG chr11 5250933 5250952 5250949 +
tgacatattggaccattaac

SEQ ID NO: 11498 - DNA, 20 bp, Artificial Sequence
  Synthetic oligonucleotide; GGG chr11 5250934 5250953 5250950 +
gacatattggaccattaaca

SEQ ID NO: 11499 - DNA, 20 bp, Artificial Sequence
  Synthetic oligonucleotide; TAG chr11 5250937 5250956 5250953 +
atattggaccattaacaggg

SEQ ID NO: 11500 - DNA, 20 bp, Artificial Sequence
  Synthetic oligonucleotide; AGG chr11 5250938 5250957 5250954 +
tattggaccattaacagggt

SEQ ID NO: 11501 - DNA, 20 bp, Artificial Sequence
  Synthetic oligonucleotide; AAG chr11 5250941 5250960 5250957 +
tggaccattaacagggtagg

SEQ ID NO: 11502 - DNA, 20 bp, Artificial Sequence
  Synthetic oligonucleotide; TGG chr11 5250950 5250969 5250966 +
aacagggtaggaagtattta

SEQ ID NO: 11503 - DNA, 20 bp, Artificial Sequence
  Synthetic oligonucleotide; TGG chr11 5250953 5250972 5250969 +
agggtaggaagtatttatgg

SEQ ID NO: 11504 - DNA, 20 bp, Artificial Sequence
  Synthetic oligonucleotide; TGG chr11 5250961 5250980 5250977 +
aagtatttatggtggttttt

SEQ ID NO: 11505 - DNA, 20 bp, Artificial Sequence
  Synthetic oligonucleotide; TGG chr11 5250978 5250997 5250994 +
ttttggttctgttttgcttt

SEQ ID NO: 11506 - DNA, 20 bp, Artificial Sequence
  Synthetic oligonucleotide; TAG chr11 5250982 5251001 5250998 +
ggttctgttttgcttttggt

SEQ ID NO: 11507 - DNA, 20 bp, Artificial Sequence
  Synthetic oligonucleotide; AAG chr11 5251006 5251025 5251022 +
ttgtttttgtttttctctga

SEQ ID NO: 11508 - DNA, 20 bp, Artificial Sequence
  Synthetic oligonucleotide; TAG chr11 5251032 5251051 5251048 +
tccatgatctctaaccttgc

SEQ ID NO: 11509 - DNA, 20 bp, Artificial Sequence
  Synthetic oligonucleotide; CAG chr11 5251045 5251064 5251061 +
accttgctagattataatgc

SEQ ID NO: 11510 - DNA, 20 bp, Artificial Sequence
  Synthetic oligonucleotide; AAG chr11 5251048 5251067 5251064 +
ttgctagattataatgccag

SEQ ID NO: 11511 - DNA, 20 bp, Artificial Sequence
  Synthetic oligonucleotide; TGG chr11 5251054 5251073 5251070 +
gattataatgccagaagctc

SEQ ID NO: 11512 - DNA, 20 bp, Artificial Sequence
  Synthetic oligonucleotide; TGG chr11 5251062 5251081 5251078 +
tgccagaagctctggaattc

SEQ ID NO: 11513 - DNA, 20 bp, Artificial Sequence
  Synthetic oligonucleotide; CGG chr11 5251070 5251089 5251086 +
gctctggaattctggcttat

SEQ ID NO: 11514 - DNA, 20 bp, Artificial Sequence
  Synthetic oligonucleotide; GAG chr11 5251072 5251091 5251088 +
tctggaattctggcttatcg

SEQ ID NO: 11515 - DNA, 20 bp, Artificial Sequence
  Synthetic oligonucleotide; AGG chr11 5251073 5251092 5251089 +
ctggaattctggcttatcgg

SEQ ID NO: 11516 - DNA, 20 bp, Artificial Sequence
  Synthetic oligonucleotide; AAG chr11 5251077 5251096 5251093 +
aattctggcttatcggaggc

SEQ ID NO: 11517 - DNA, 20 bp, Artificial Sequence
  Synthetic oligonucleotide; TAG chr11 5251094 5251113 5251110 +
ggcaagctgtatcttcaaat

SEQ ID NO: 11518 - DNA, 20 bp, Artificial Sequence
  Synthetic oligonucleotide; AAG chr11 5251107 5251126 5251123 +
ttcaaattagtttatcccct

SEQ ID NO: 11519 - DNA, 20 bp, Artificial Sequence
  Synthetic oligonucleotide; CAG chr11 5251114 5251133 5251130 +
tagtttatcccctaagctat

SEQ ID NO: 11520 - DNA, 20 bp, Artificial Sequence
  Synthetic oligonucleotide; AGG chr11 5251115 5251134 5251131 +
agtttatcccctaagctatc

SEQ ID NO: 11521 - DNA, 20 bp, Artificial Sequence
  Synthetic oligonucleotide; TGG chr11 5251140 5251159 5251156 +
gattgaaattattataatat

SEQ ID NO: 11522 - DNA, 20 bp, Artificial Sequence
  Synthetic oligonucleotide; AAG chr11 5251175 5251194 5251191 +
atccttcatgatcctgtgta

SEQ ID NO: 11523 - DNA, 20 bp, Artificial Sequence
  Synthetic oligonucleotide; CAG chr11 5251198 5251217 5251214 +
cttatatctgctcattgata

SEQ ID NO: 11524 - DNA, 20 bp, Artificial Sequence
  Synthetic oligonucleotide; TGG chr11 5251202 5251221 5251218 +
tatctgctcattgatacaga

SEQ ID NO: 11525 - DNA, 20 bp, Artificial Sequence
  Synthetic oligonucleotide; AAG chr11 5251209 5251228 5251225 +
tcattgatacagatggctaa

SEQ ID NO: 11526 - DNA, 20 bp, Artificial Sequence
  Synthetic oligonucleotide; AGG chr11 5251210 5251229 5251226 +
cattgatacagatggctaaa

SEQ ID NO: 11527 - DNA, 20 bp, Artificial Sequence
  Synthetic oligonucleotide; CAG chr11 5251214 5251233 5251230 +
gatacagatggctaaaaggc

SEQ ID NO: 11528 - DNA, 20 bp, Artificial Sequence
  Synthetic oligonucleotide; AAG chr11 5251218 5251237 5251234 +
cagatggctaaaaggccaga

SEQ ID NO: 11529 - DNA, 20 bp, Artificial Sequence
  Synthetic oligonucleotide; AAG chr11 5251242 5251261 5251258 +
cacacatttacccatgtaac

SEQ ID NO: 11530 - DNA, 20 bp, Artificial Sequence
  Synthetic oligonucleotide; AAG chr11 5251300 5251319 5251316 +
atgaaatgaaataaaattaa

SEQ ID NO: 11531 - DNA, 20 bp, Artificial Sequence
  Synthetic oligonucleotide; AGG chr11 5251301 5251320 5251317 +
tgaaatgaaataaaattaaa

SEQ ID NO: 11532 - DNA, 20 bp, Artificial Sequence
  Synthetic oligonucleotide; TGG chr11 5251316 5251335 5251332 +
ttaaaaggaaaaaaatgcca

SEQ ID NO: 11533 - DNA, 20 bp, Artificial Sequence
  Synthetic oligonucleotide; CAG chr11 5251325 5251344 5251341 +
aaaaaatgccatggcaacat

SEQ ID NO: 11534 - DNA, 20 bp, Artificial Sequence
  Synthetic oligonucleotide; AGG chr11 5251326 5251345 5251342 +
aaaaatgccatggcaacatc

SEQ ID NO: 11535 - DNA, 20 bp, Artificial Sequence
  Synthetic oligonucleotide; AAG chr11 5251329 5251348 5251345 +
aatgccatggcaacatcagg

SEQ ID NO: 11536 - DNA, 20 bp, Artificial Sequence
  Synthetic oligonucleotide; TGG chr11 5251342 5251361 5251358 +
catcaggaagttatctttta

SEQ ID NO: 11537 - DNA, 20 bp, Artificial Sequence
  Synthetic oligonucleotide; TGG chr11 5251353 5251372 5251369 +
tatcttttatggtctaaaaa

SEQ ID NO: 11538 - DNA, 20 bp, Artificial Sequence
  Synthetic oligonucleotide; GGG chr11 5251354 5251373 5251370 +
atcttttatggtctaaaaat

SEQ ID NO: 11539 - DNA, 20 bp, Artificial Sequence
  Synthetic oligonucleotide; CAG chr11 5251357 5251376 5251373 +
ttttatggtctaaaaatggg

SEQ ID NO: 11540 - DNA, 20 bp, Artificial Sequence
  Synthetic oligonucleotide; TAG chr11 5251382 5251401 5251398 +
taaataatctaccccttgtt

SEQ ID NO: 11541 - DNA, 20 bp, Artificial Sequence
  Synthetic oligonucleotide; CGG chr11 5251413 5251432 5251429 +
tgaaaaataacaataaaaat

SEQ ID NO: 11542 - DNA, 20 bp, Artificial Sequence
  Synthetic oligonucleotide; CAG chr11 5251420 5251439 5251436 +
taacaataaaaatcggcaac

SEQ ID NO: 11543 - DNA, 20 bp, Artificial Sequence
  Synthetic oligonucleotide; TAG chr11 5251423 5251442 5251439 +
caataaaaatcggcaaccag

SEQ ID NO: 11544 - DNA, 20 bp, Artificial Sequence
  Synthetic oligonucleotide; AAG chr11 5251449 5251468 5251465 +
ttgcgtctactctgcctatg

SEQ ID NO: 11545 - DNA, 20 bp, Artificial Sequence
  Synthetic oligonucleotide; TAG chr11 5251452 5251471 5251468 +
cgtctactctgcctatgaag

SEQ ID NO: 11546 - DNA, 20 bp, Artificial Sequence
  Synthetic oligonucleotide; AAG chr11 5251506 5251525 5251522 +
cttgttttactaaaaaaaaa

SEQ ID NO: 11547 - DNA, 20 bp, Artificial Sequence
  Synthetic oligonucleotide; AGG chr11 5251507 5251526 5251523 +
ttgttttactaaaaaaaaaa

SEQ ID NO: 11548 - DNA, 20 bp, Artificial Sequence
  Synthetic oligonucleotide; AAG chr11 5251513 5251532 5251529 +
tactaaaaaaaaaaaggaca

SEQ ID NO: 11549 - DNA, 20 bp, Artificial Sequence
  Synthetic oligonucleotide; AAG chr11 5251517 5251536 5251533 +
aaaaaaaaaaaggacaaaga

SEQ ID NO: 11550 - DNA, 20 bp, Artificial Sequence
  Synthetic oligonucleotide; AAG chr11 5251521 5251540 5251537 +
aaaaaaaggacaaagaaaga

SEQ ID NO: 11551 - DNA, 20 bp, Artificial Sequence
  Synthetic oligonucleotide; TGG chr11 5251538 5251557 5251554 +
agaaagtgcgaattgtgaaa

SEQ ID NO: 11552 - DNA, 20 bp, Artificial Sequence
  Synthetic oligonucleotide; TAG chr11 5251541 5251560 5251557 +
aagtgcgaattgtgaaatgg

SEQ ID NO: 11553 - DNA, 20 bp, Artificial Sequence
  Synthetic oligonucleotide; GAG chr11 5251545 5251564 5251561 +
gcgaattgtgaaatggtagt

SEQ ID NO: 11554 - DNA, 20 bp, Artificial Sequence
  Synthetic oligonucleotide; TGG chr11 5251551 5251570 5251567 +
tgtgaaatggtagtgagtga

SEQ ID NO: 11555 - DNA, 20 bp, Artificial Sequence
  Synthetic oligonucleotide; AAG chr11 5251560 5251579 5251576 +
gtagtgagtgatggcatttg

SEQ ID NO: 11556 - DNA, 20 bp, Artificial Sequence
  Synthetic oligonucleotide; TGG chr11 5251563 5251582 5251579 +
gtgagtgatggcatttgaag

SEQ ID NO: 11557 - DNA, 20 bp, Artificial Sequence
  Synthetic oligonucleotide; GGG chr11 5251564 5251583 5251580 +
tgagtgatggcatttgaagt

SEQ ID NO: 11558 - DNA, 20 bp, Artificial Sequence
  Synthetic oligonucleotide; TGG chr11 5251582 5251601 5251598 +
gtgggtcctttatgatttga

SEQ ID NO: 11559 - DNA, 20 bp, Artificial Sequence
  Synthetic oligonucleotide; GAG chr11 5251584 5251603 5251600 +
gggtcctttatgatttgatg

SEQ ID NO: 11560 - DNA, 20 bp, Artificial Sequence
  Synthetic oligonucleotide; CAG chr11 5251588 5251607 5251604 +
cctttatgatttgatggagc

SEQ ID NO: 11561 - DNA, 20 bp, Artificial Sequence
  Synthetic oligonucleotide; AGG chr11 5251589 5251608 5251605 +
ctttatgatttgatggagcc

SEQ ID NO: 11562 - DNA, 20 bp, Artificial Sequence
  Synthetic oligonucleotide; CAG chr11 5251592 5251611 5251608 +
tatgatttgatggagccagg

SEQ ID NO: 11563 - DNA, 20 bp, Artificial Sequence
  Synthetic oligonucleotide; AAG chr11 5251595 5251614 5251611 +
gatttgatggagccaggcag

SEQ ID NO: 11564 - DNA, 20 bp, Artificial Sequence
  Synthetic oligonucleotide; TGG chr11 5251603 5251622 5251619 +
ggagccaggcagaagacgtt

SEQ ID NO: 11565 - DNA, 20 bp, Artificial Sequence
  Synthetic oligonucleotide; GAG chr11 5251605 5251624 5251621 +
agccaggcagaagacgtttg

SEQ ID NO: 11566 - DNA, 20 bp, Artificial Sequence
  Synthetic oligonucleotide; AAG chr11 5251609 5251628 5251625 +
aggcagaagacgtttggaga

SEQ ID NO: 11567 - DNA, 20 bp, Artificial Sequence
  Synthetic oligonucleotide; AAG chr11 5251612 5251631 5251628 +
cagaagacgtttggagaaag

SEQ ID NO: 11568 - DNA, 20 bp, Artificial Sequence
  Synthetic oligonucleotide; AAG chr11 5251622 5251641 5251638 +
ttggagaaagaagttcctga

SEQ ID NO: 11569 - DNA, 20 bp, Artificial Sequence
  Synthetic oligonucleotide; TAG chr11 5251625 5251644 5251641 +
gagaaagaagttcctgaaag

SEQ ID NO: 11570 - DNA, 20 bp, Artificial Sequence
  Synthetic oligonucleotide; AGG chr11 5251626 5251645 5251642 +
agaaagaagttcctgaaagt

SEQ ID NO: 11571 - DNA, 20 bp, Artificial Sequence
  Synthetic oligonucleotide; AAG chr11 5251629 5251648 5251645 +
aagaagttcctgaaagtagg

SEQ ID NO: 11572 - DNA, 20 bp, Artificial Sequence
  Synthetic oligonucleotide; AGG chr11 5251630 5251649 5251646 +
agaagttcctgaaagtagga

SEQ ID NO: 11573 - DNA, 20 bp, Artificial Sequence
  Synthetic oligonucleotide; GGG chr11 5251631 5251650 5251647 +
gaagttcctgaaagtaggaa

SEQ ID NO: 11574 - DNA, 20 bp, Artificial Sequence
  Synthetic oligonucleotide; TGG chr11 5251638 5251657 5251654 +
ctgaaagtaggaagggcatg

SEQ ID NO: 11575 - DNA, 20 bp, Artificial Sequence
  Synthetic oligonucleotide; GAG chr11 5251649 5251668 5251665 +
aagggcatgtggaaaactct

SEQ ID NO: 11576 - DNA, 20 bp, Artificial Sequence
  Synthetic oligonucleotide; AGG chr11 5251650 5251669 5251666 +
agggcatgtggaaaactctg

SEQ ID NO: 11577 - DNA, 20 bp, Artificial Sequence
  Synthetic oligonucleotide; GAG chr11 5251655 5251674 5251671 +
atgtggaaaactctgaggct

SEQ ID NO: 11578 - DNA, 20 bp, Artificial Sequence
  Synthetic oligonucleotide; AGG chr11 5251656 5251675 5251672 +
tgtggaaaactctgaggctg

SEQ ID NO: 11579 - DNA, 20 bp, Artificial Sequence
  Synthetic oligonucleotide; AAG chr11 5251665 5251684 5251681 +
ctctgaggctgaggaaaaaa

SEQ ID NO: 11580 - DNA, 20 bp, Artificial Sequence
  Synthetic oligonucleotide; AAG chr11 5251669 5251688 5251685 +
gaggctgaggaaaaaaaaga

SEQ ID NO: 11581 - DNA, 20 bp, Artificial Sequence
  Synthetic oligonucleotide; AAG chr11 5251673 5251692 5251689 +
ctgaggaaaaaaaagaaaga

SEQ ID NO: 11582 - DNA, 20 bp, Artificial Sequence
  Synthetic oligonucleotide; AAG chr11 5251683 5251702 5251699 +
aaaagaaagaaagaaatata

SEQ ID NO: 11583 - DNA, 20 bp, Artificial Sequence
  Synthetic oligonucleotide; AAG chr11 5251687 5251706 5251703 +
gaaagaaagaaatataaaga

SEQ ID NO: 11584 - DNA, 20 bp, Artificial Sequence
  Synthetic oligonucleotide; AAG chr11 5251723 5251742 5251739 +
actgtatataaacacattac

SEQ ID NO: 11585 - DNA, 20 bp, Artificial Sequence
  Synthetic oligonucleotide; AAG chr11 5251730 5251749 5251746 +
ataaacacattacaagccta

SEQ ID NO: 11586 - DNA, 20 bp, Artificial Sequence
  Synthetic oligonucleotide; AAG chr11 5251740 5251759 5251756 +
tacaagcctaaagtacgttg

SEQ ID NO: 11587 - DNA, 20 bp, Artificial Sequence
  Synthetic oligonucleotide; TAG chr11 5251749 5251768 5251765 +
aaagtacgttgaagaaaaaa

SEQ ID NO: 11588 - DNA, 20 bp, Artificial Sequence
  Synthetic oligonucleotide; AAG chr11 5251758 5251777 5251774 +
tgaagaaaaaatagaattca

SEQ ID NO: 11589 - DNA, 20 bp, Artificial Sequence
  Synthetic oligonucleotide; TAG chr11 5251762 5251781 5251778 +
gaaaaaatagaattcaaagt

SEQ ID NO: 11590 - DNA, 20 bp, Artificial Sequence
  Synthetic oligonucleotide; CAG chr11 5251766 5251785 5251782 +
aaatagaattcaaagttaga

SEQ ID NO: 11591 - DNA, 20 bp, Artificial Sequence
  Synthetic oligonucleotide; AAG chr11 5251769 5251788 5251785 +
tagaattcaaagttagacag

SEQ ID NO: 11592 - DNA, 20 bp, Artificial Sequence
  Synthetic oligonucleotide; AGG chr11 5251770 5251789 5251786 +
agaattcaaagttagacaga

SEQ ID NO: 11593 - DNA, 20 bp, Artificial Sequence
  Synthetic oligonucleotide; GGG chr11 5251771 5251790 5251787 +
gaattcaaagttagacagaa

SEQ ID NO: 11594 - DNA, 20 bp, Artificial Sequence
  Synthetic oligonucleotide; CAG chr11 5251776 5251795 5251792 +
caaagttagacagaagggct

SEQ ID NO: 11595 - DNA, 20 bp, Artificial Sequence
  Synthetic oligonucleotide; AGG chr11 5251777 5251796 5251793 +
aaagttagacagaagggctc

SEQ ID NO: 11596 - DNA, 20 bp, Artificial Sequence
  Synthetic oligonucleotide; CAG chr11 5251798 5251817 5251814 +
ggcttactatttgcatctta

SEQ ID NO: 11597 - DNA, 20 bp, Artificial Sequence
  Synthetic oligonucleotide; GAG chr11 5251803 5251822 5251819 +
actatttgcatcttacagat

SEQ ID NO: 11598 - DNA, 20 bp, Artificial Sequence
  Synthetic oligonucleotide; GAG chr11 5251805 5251824 5251821 +
tatttgcatcttacagatga

SEQ ID NO: 11599 - DNA, 20 bp, Artificial Sequence
  Synthetic oligonucleotide; TAG chr11 5251808 5251827 5251824 +
ttgcatcttacagatgagag

SEQ ID NO: 11600 - DNA, 20 bp, Artificial Sequence
  Synthetic oligonucleotide; TAG chr11 5251811 5251830 5251827 +
catcttacagatgagagtag

SEQ ID NO: 11601 - DNA, 20 bp, Artificial Sequence
  Synthetic oligonucleotide; GAG chr11 5251813 5251832 5251829 +
tcttacagatgagagtagta

SEQ ID NO: 11602 - DNA, 20 bp, Artificial Sequence
  Synthetic oligonucleotide; TGG chr11 5251817 5251836 5251833 +
acagatgagagtagtagagt

SEQ ID NO: 11603 - DNA, 20 bp, Artificial Sequence
  Synthetic oligonucleotide; CAG chr11 5251837 5251856 5251853 +
tggtattttattctgaaaca

SEQ ID NO: 11604 - DNA, 20 bp, Artificial Sequence
  Synthetic oligonucleotide; GAG chr11 5251839 5251858 5251855 +
gtattttattctgaaacaca

SEQ ID NO: 11605 - DNA, 20 bp, Artificial Sequence
  Synthetic oligonucleotide; AGG chr11 5251840 5251859 5251856 +
tattttattctgaaacacag

SEQ ID NO: 11606 - DNA, 20 bp, Artificial Sequence
  Synthetic oligonucleotide; AAG chr11 5251845 5251864 5251861 +
tattctgaaacacagaggac

SEQ ID NO: 11607 - DNA, 20 bp, Artificial Sequence
  Synthetic oligonucleotide; TGG chr11 5251848 5251867 5251864 +
tctgaaacacagaggacaag

SEQ ID NO: 11608 - DNA, 20 bp, Artificial Sequence
  Synthetic oligonucleotide; GAG chr11 5251850 5251869 5251866 +
tgaaacacagaggacaagtg

SEQ ID NO: 11609 - DNA, 20 bp, Artificial Sequence
  Synthetic oligonucleotide; GAG chr11 5251865 5251884 5251881 +
aagtggagatttgtaaacct

SEQ ID NO: 11610 - DNA, 20 bp, Artificial Sequence
  Synthetic oligonucleotide; TGG chr11 5251875 5251894 5251891 +
ttgtaaacctgagataaaca

SEQ ID NO: 11611 - DNA, 20 bp, Artificial Sequence
  Synthetic oligonucleotide; AAG chr11 5251899 5251918 5251915 +
ttctaatccactgaacaccg

SEQ ID NO: 11612 - DNA, 20 bp, Artificial Sequence
  Synthetic oligonucleotide; TAG chr11 5251935 5251954 5251951 +
ctttcttcatctgccttact

SEQ ID NO: 11613 - DNA, 20 bp, Artificial Sequence
  Synthetic oligonucleotide; AAG chr11 5251941 5251960 5251957 +
tcatctgccttacttagtgc

SEQ ID NO: 11614 - DNA, 20 bp, Artificial Sequence
  Synthetic oligonucleotide; AGG chr11 5251942 5251961 5251958 +
catctgccttacttagtgca

SEQ ID NO: 11615 - DNA, 20 bp, Artificial Sequence
  Synthetic oligonucleotide; TAG chr11 5251958 5251977 5251974 +
tgcaaggtgctataacaaaa

SEQ ID NO: 11616 - DNA, 20 bp, Artificial Sequence
  Synthetic oligonucleotide; TAG chr11 5251963 5251982 5251979 +
ggtgctataacaaaatagca

SEQ ID NO: 11617 - DNA, 20 bp, Artificial Sequence
  Synthetic oligonucleotide; TGG chr11 5251968 5251987 5251984 +
tataacaaaatagcatagac

SEQ ID NO: 11618 - DNA, 20 bp, Artificial Sequence
  Synthetic oligonucleotide; GGG chr11 5251969 5251988 5251985 +
ataacaaaatagcatagact

SEQ ID NO: 11619 - DNA, 20 bp, Artificial Sequence
  Synthetic oligonucleotide; CAG chr11 5251984 5252003 5252000 +
agactgggtgacttcaacaa

SEQ ID NO: 11620 - DNA, 20 bp, Artificial Sequence
  Synthetic oligonucleotide; AGG chr11 5251985 5252004 5252001 +
gactgggtgacttcaacaac

SEQ ID NO: 11621 - DNA, 20 bp, Artificial Sequence
  Synthetic oligonucleotide; TGG chr11 5252008 5252027 5252024 +
attttttctcacttttctgc

SEQ ID NO: 11622 - DNA, 20 bp, Artificial Sequence
  Synthetic oligonucleotide; TGG chr11 5252015 5252034 5252031 +
ctcacttttctgctggttcc

SEQ ID NO: 11623 - DNA, 20 bp, Artificial Sequence
  Synthetic oligonucleotide; CAG chr11 5252019 5252038 5252035 +
cttttctgctggttcctggt

SEQ ID NO: 11624 - DNA, 20 bp, Artificial Sequence
  Synthetic oligonucleotide; AGG chr11 5252020 5252039 5252036 +
ttttctgctggttcctggtc

SEQ ID NO: 11625 - DNA, 20 bp, Artificial Sequence
  Synthetic oligonucleotide; GGG chr11 5252021 5252040 5252037 +
tttctgctggttcctggtca

SEQ ID NO: 11626 - DNA, 20 bp, Artificial Sequence
  Synthetic oligonucleotide; TGG chr11 5252033 5252052 5252049 +
cctggtcagggctctcttcc

SEQ ID NO: 11627 - DNA, 20 bp, Artificial Sequence
  Synthetic oligonucleotide; GGG chr11 5252034 5252053 5252050 +
ctggtcagggctctcttcct

SEQ ID NO: 11628 - DNA, 20 bp, Artificial Sequence
  Synthetic oligonucleotide; CAG chr11 5252040 5252059 5252056 +
agggctctcttcctgggttg

SEQ ID NO: 11629 - DNA, 20 bp, Artificial Sequence
  Synthetic oligonucleotide; AGG chr11 5252041 5252060 5252057 +
gggctctcttcctgggttgc

SEQ ID NO: 11630 - DNA, 20 bp, Artificial Sequence
  Synthetic oligonucleotide; TGG chr11 5252044 5252063 5252060 +
ctctcttcctgggttgcagg

SEQ ID NO: 11631 - DNA, 20 bp, Artificial Sequence
  Synthetic oligonucleotide; CAG chr11 5252070 5252089 5252086 +
acttcccactgtgtcctcac

SEQ ID NO: 11632 - DNA, 20 bp, Artificial Sequence
  Synthetic oligonucleotide; AAG chr11 5252073 5252092 5252089 +
tcccactgtgtcctcaccag

SEQ ID NO: 11633 - DNA, 20 bp, Artificial Sequence
  Synthetic oligonucleotide; AGG chr11 5252074 5252093 5252090 +
cccactgtgtcctcaccaga

SEQ ID NO: 11634 - DNA, 20 bp, Artificial Sequence
  Synthetic oligonucleotide; AAG chr11 5252077 5252096 5252093 +
actgtgtcctcaccagaagg

SEQ ID NO: 11635 - DNA, 20 bp, Artificial Sequence
  Synthetic oligonucleotide; GAG chr11 5252079 5252098 5252095 +
tgtgtcctcaccagaaggaa

SEQ ID NO: 11636 - DNA, 20 bp, Artificial Sequence
  Synthetic oligonucleotide; TGG chr11 5252085 5252104 5252101 +
ctcaccagaaggaagagaaa

SEQ ID NO: 11637 - DNA, 20 bp, Artificial Sequence
  Synthetic oligonucleotide; GAG chr11 5252108 5252127 5252124 +
ctaatctctctgcttctgat

SEQ ID NO: 11638 - DNA, 20 bp, Artificial Sequence
  Synthetic oligonucleotide; AGG chr11 5252109 5252128 5252125 +
taatctctctgcttctgatg

SEQ ID NO: 11639 - DNA, 20 bp, Artificial Sequence
  Synthetic oligonucleotide; TGG chr11 5252127 5252146 5252143 +
tgaggaaaataattctatga

SEQ ID NO: 11640 - DNA, 20 bp, Artificial Sequence
  Synthetic oligonucleotide; GGG chr11 5252128 5252147 5252144 +
gaggaaaataattctatgat

SEQ ID NO: 11641 - DNA, 20 bp, Artificial Sequence
  Synthetic oligonucleotide; GGG chr11 5252129 5252148 5252145 +
aggaaaataattctatgatg

SEQ ID NO: 11642 - DNA, 20 bp, Artificial Sequence
  Synthetic oligonucleotide; GAG chr11 5252144 5252163 5252160 +
tgatggggatctgctctcat

SEQ ID NO: 11643 - DNA, 20 bp, Artificial Sequence
  Synthetic oligonucleotide; AAG chr11 5252173 5252192 5252189 +
taaacctgattacttttcca

SEQ ID NO: 11644 - DNA, 20 bp, Artificial Sequence
  Synthetic oligonucleotide; TGG chr11 5252189 5252208 5252205 +
tccaaagcctcccccacaaa

SEQ ID NO: 11645 - DNA, 20 bp, Artificial Sequence
  Synthetic oligonucleotide; GAG chr11 5252191 5252210 5252207 +
caaagcctcccccacaaatg

SEQ ID NO: 11646 - DNA, 20 bp, Artificial Sequence
  Synthetic oligonucleotide; TGG chr11 5252199 5252218 5252215 +
cccccacaaatggagccaat

SEQ ID NO: 11647 - DNA, 20 bp, Artificial Sequence
  Synthetic oligonucleotide; GGG chr11 5252200 5252219 5252216 +
ccccacaaatggagccaatt

SEQ ID NO: 11648 - DNA, 20 bp, Artificial Sequence
  Synthetic oligonucleotide; GAG chr11 5252202 5252221 5252218 +
ccacaaatggagccaattgg

SEQ ID NO: 11649 - DNA, 20 bp, Artificial Sequence
  Synthetic oligonucleotide; TGG chr11 5252206 5252225 5252222 +
aaatggagccaattgggagt

SEQ ID NO: 11650 - DNA, 20 bp, Artificial Sequence
  Synthetic oligonucleotide; GGG chr11 5252207 5252226 5252223 +
aatggagccaattgggagtt

SEQ ID NO: 11651 - DNA, 20 bp, Artificial Sequence
  Synthetic oligonucleotide; GGG chr11 5252208 5252227 5252224 +
atggagccaattgggagttg

SEQ ID NO: 11652 - DNA, 20 bp, Artificial Sequence
  Synthetic oligonucleotide; CAG chr11 5252214 5252233 5252230 +
ccaattgggagttggggatt

SEQ ID NO: 11653 - DNA, 20 bp, Artificial Sequence
  Synthetic oligonucleotide; TGG chr11 5252230 5252249 5252246 +
gattcagcatgtgaattttc

SEQ ID NO: 11654 - DNA, 20 bp, Artificial Sequence
  Synthetic oligonucleotide; GAG chr11 5252232 5252251 5252248 +
ttcagcatgtgaattttctg

SEQ ID NO: 11655 - DNA, 20 bp, Artificial Sequence
  Synthetic oligonucleotide; AAG chr11 5252239 5252258 5252255 +
tgtgaattttctggagacac

SEQ ID NO: 11656 - DNA, 20 bp, Artificial Sequence
  Synthetic oligonucleotide; AAG chr11 5252246 5252265 5252262 +
tttctggagacacaagcgtt

SEQ ID NO: 11657 - DNA, 20 bp, Artificial Sequence
  Synthetic oligonucleotide; AAG chr11 5252313 5252332 5252329 +
gcattaactttcaattatat

SEQ ID NO: 11658 - DNA, 20 bp, Artificial Sequence
  Synthetic oligonucleotide; CAG chr11 5252321 5252340 5252337 +
tttcaattatataagaactc

SEQ ID NO: 11659 - DNA, 20 bp, Artificial Sequence
  Synthetic oligonucleotide; GAG chr11 5252399 5252418 5252415 +
gaccgtgctgttctgctgct

SEQ ID NO: 11660 - DNA, 20 bp, Artificial Sequence
  Synthetic oligonucleotide; GAG chr11 5252427 5252446 5252443 +
acacgctgatgctgacttgt

SEQ ID NO: 11661 - DNA, 20 bp, Artificial Sequence
  Synthetic oligonucleotide; TGG chr11 5252437 5252456 5252453 +
gctgacttgtgagcttctgc

SEQ ID NO: 11662 - DNA, 20 bp, Artificial Sequence
  Synthetic oligonucleotide; AAG chr11 5252456 5252475 5252472 +
ctggctcatttccttcacct

SEQ ID NO: 11663 - DNA, 20 bp, Artificial Sequence
  Synthetic oligonucleotide; TAG chr11 5252471 5252490 5252487 +
cacctaagtccccacctccc

SEQ ID NO: 11664 - DNA, 20 bp, Artificial Sequence
  Synthetic oligonucleotide; AAG chr11 5252474 5252493 5252490 +
ctaagtccccacctccctag

SEQ ID NO: 11665 - DNA, 20 bp, Artificial Sequence
  Synthetic oligonucleotide; GAG chr11 5252485 5252504 5252501 +
cctccctagaagcttacaat

SEQ ID NO: 11666 - DNA, 20 bp, Artificial Sequence
  Synthetic oligonucleotide; AGG chr11 5252486 5252505 5252502 +
ctccctagaagcttacaatg

SEQ ID NO: 11667 - DNA, 20 bp, Artificial Sequence
  Synthetic oligonucleotide; CAG chr11 5252512 5252531 5252528 +
cctccttgaaatgctgtgac

SEQ ID NO: 11668 - DNA, 20 bp, Artificial Sequence
  Synthetic oligonucleotide; TAG chr11 5252519 5252538 5252535 +
gaaatgctgtgaccagtctg

SEQ ID NO: 11669 - DNA, 20 bp, Artificial Sequence
  Synthetic oligonucleotide; AAG chr11 5252526 5252545 5252542 +
tgtgaccagtctgtagactt

SEQ ID NO: 11670 - DNA, 20 bp, Artificial Sequence
  Synthetic oligonucleotide; AGG chr11 5252527 5252546 5252543 +
gtgaccagtctgtagactta

SEQ ID NO: 11671 - DNA, 20 bp, Artificial Sequence
  Synthetic oligonucleotide; GGG chr11 5252528 5252547 5252544 +
tgaccagtctgtagacttaa

SEQ ID NO: 11672 - DNA, 20 bp, Artificial Sequence
  Synthetic oligonucleotide; TGG chr11 5252533 5252552 5252549 +
agtctgtagacttaagggta

SEQ ID NO: 11673 - DNA, 20 bp, Artificial Sequence
  Synthetic oligonucleotide; GGG chr11 5252534 5252553 5252550 +
gtctgtagacttaagggtat

SEQ ID NO: 11674 - DNA, 20 bp, Artificial Sequence
  Synthetic oligonucleotide; TAG chr11 5252553 5252572 5252569 +
tgggattaatttcacctctt

SEQ ID NO: 11675 - DNA, 20 bp, Artificial Sequence
  Synthetic oligonucleotide; AGG chr11 5252554 5252573 5252570 +
gggattaatttcacctcttt

SEQ ID NO: 11676 - DNA, 20 bp, Artificial Sequence
  Synthetic oligonucleotide; AAG chr11 5252580 5252599 5252596 +
gcgtcaacacttaaaatgaa

SEQ ID NO: 11677 - DNA, 20 bp, Artificial Sequence
  Synthetic oligonucleotide; TAG chr11 5252588 5252607 5252604 +
acttaaaatgaaaagttcct

SEQ ID NO: 11678 - DNA, 20 bp, Artificial Sequence
  Synthetic oligonucleotide; AAG chr11 5252593 5252612 5252609 +
aaatgaaaagttccttagta

SEQ ID NO: 11679 - DNA, 20 bp, Artificial Sequence
  Synthetic oligonucleotide; AAG chr11 5252597 5252616 5252613 +
gaaaagttccttagtaaagt

SEQ ID NO: 11680 - DNA, 20 bp, Artificial Sequence
  Synthetic oligonucleotide; AGG chr11 5252598 5252617 5252614 +
aaaagttccttagtaaagta

SEQ ID NO: 11681 - DNA, 20 bp, Artificial Sequence
  Synthetic oligonucleotide; TAG chr11 5252613 5252632 5252629 +
aagtaaggatcacttcattg

SEQ ID NO: 11682 - DNA, 20 bp, Artificial Sequence
  Synthetic oligonucleotide; TGG chr11 5252622 5252641 5252638 +
tcacttcattgtagttaccg

SEQ ID NO: 11683 - DNA, 20 bp, Artificial Sequence
  Synthetic oligonucleotide; AAG chr11 5252626 5252645 5252642 +
ttcattgtagttaccgtgga

SEQ ID NO: 11684 - DNA, 20 bp, Artificial Sequence
  Synthetic oligonucleotide; TAG chr11 5252674 5252693 5252690 +
ctaacacctcaacctccctg

SEQ ID NO: 11685 - DNA, 20 bp, Artificial Sequence
  Synthetic oligonucleotide; GAG chr11 5252676 5252695 5252692 +
aacacctcaacctccctgta

SEQ ID NO: 11686 - DNA, 20 bp, Artificial Sequence
  Synthetic oligonucleotide; AAG chr11 5252685 5252704 5252701 +
acctccctgtagagcctcac

SEQ ID NO: 11687 - DNA, 20 bp, Artificial Sequence
  Synthetic oligonucleotide; AGG chr11 5252686 5252705 5252702 +
cctccctgtagagcctcaca

SEQ ID NO: 11688 - DNA, 20 bp, Artificial Sequence
  Synthetic oligonucleotide; GGG chr11 5252687 5252706 5252703 +
ctccctgtagagcctcacaa

SEQ ID NO: 11689 - DNA, 20 bp, Artificial Sequence
  Synthetic oligonucleotide; GAG chr11 5252692 5252711 5252708 +
tgtagagcctcacaagggct

SEQ ID NO: 11690 - DNA, 20 bp, Artificial Sequence
  Synthetic oligonucleotide; AAG chr11 5252697 5252716 5252713 +
agcctcacaagggctgagaa

SEQ ID NO: 11691 - DNA, 20 bp, Artificial Sequence
  Synthetic oligonucleotide; CAG chr11 5252701 5252720 5252717 +
tcacaagggctgagaaaagc

SEQ ID NO: 11692 - DNA, 20 bp, Artificial Sequence
  Synthetic oligonucleotide; TGG chr11 5252711 5252730 5252727 +
tgagaaaagccagatgccgt

SEQ ID NO: 11693 - DNA, 20 bp, Artificial Sequence
  Synthetic oligonucleotide; TAG chr11 5252717 5252736 5252733 +
aagccagatgccgttggaaa

SEQ ID NO: 11694 - DNA, 20 bp, Artificial Sequence
  Synthetic oligonucleotide; TAG chr11 5252737 5252756 5252753 +
tagtattgcccctaataaaa

SEQ ID NO: 11695 - DNA, 20 bp, Artificial Sequence
  Synthetic oligonucleotide; TGG chr11 5252742 5252761 5252758 +
ttgcccctaataaaatagaa

SEQ ID NO: 11696 - DNA, 20 bp, Artificial Sequence
  Synthetic oligonucleotide; AAG chr11 5252773 5252792 5252789 +
gcctaaaccttgacttccta

SEQ ID NO: 11697 - DNA, 20 bp, Artificial Sequence
  Synthetic oligonucleotide; TGG chr11 5252778 5252797 5252794 +
aaccttgacttcctaaagct

SEQ ID NO: 11698 - DNA, 20 bp, Artificial Sequence
  Synthetic oligonucleotide; GAG chr11 5252798 5252817 5252814 +
tggaacactttttcttcgtt

SEQ ID NO: 11699 - DNA, 20 bp, Artificial Sequence
  Synthetic oligonucleotide; CAG chr11 5252828 5252847 5252844 +
ctcgctgctgtgctgcaatc

SEQ ID NO: 11700 - DNA, 20 bp, Artificial Sequence
  Synthetic oligonucleotide; AGG chr11 5252829 5252848 5252845 +
tcgctgctgtgctgcaatcc

SEQ ID NO: 11701 - DNA, 20 bp, Artificial Sequence
  Synthetic oligonucleotide; GGG chr11 5252830 5252849 5252846 +
cgctgctgtgctgcaatcca

SEQ ID NO: 11702 - DNA, 20 bp, Artificial Sequence
  Synthetic oligonucleotide; AAG chr11 5252833 5252852 5252849 +
tgctgtgctgcaatccaggg

SEQ ID NO: 11703 - DNA, 20 bp, Artificial Sequence
  Synthetic oligonucleotide; AGG chr11 5252834 5252853 5252850 +
gctgtgctgcaatccaggga

SEQ ID NO: 11704 - DNA, 20 bp, Artificial Sequence
  Synthetic oligonucleotide; GGG chr11 5252835 5252854 5252851 +
ctgtgctgcaatccagggaa

SEQ ID NO: 11705 - DNA, 20 bp, Artificial Sequence
  Synthetic oligonucleotide; GGG chr11 5252836 5252855 5252852 +
tgtgctgcaatccagggaag

SEQ ID NO: 11706 - DNA, 20 bp, Artificial Sequence
  Synthetic oligonucleotide; GGG chr11 5252837 5252856 5252853 +
gtgctgcaatccagggaagg

SEQ ID NO: 11707 - DNA, 20 bp, Artificial Sequence
  Synthetic oligonucleotide; CAG chr11 5252842 5252861 5252858 +
gcaatccagggaagggggtt

SEQ ID NO: 11708 - DNA, 20 bp, Artificial Sequence
  Synthetic oligonucleotide; GAG chr11 5252892 5252911 5252908 +
cttccaaaacatctgtttct

SEQ ID NO: 11709 - DNA, 20 bp, Artificial Sequence
  Synthetic oligonucleotide; AGG chr11 5252893 5252912 5252909 +
ttccaaaacatctgtttctg

SEQ ID NO: 11710 - DNA, 20 bp, Artificial Sequence
  Synthetic oligonucleotide; GAG chr11 5252895 5252914 5252911 +
ccaaaacatctgtttctgag

SEQ ID NO: 11711 - DNA, 20 bp, Artificial Sequence
  Synthetic oligonucleotide; TAG chr11 5252908 5252927 5252924 +
ttctgaggagtcctgtccta

SEQ ID NO: 11712 - DNA, 20 bp, Artificial Sequence
  Synthetic oligonucleotide; GAG chr11 5252910 5252929 5252926 +
ctgaggagtcctgtcctata

SEQ ID NO: 11713 - DNA, 20 bp, Artificial Sequence
  Synthetic oligonucleotide; AGG chr11 5252911 5252930 5252927 +
tgaggagtcctgtcctatag

SEQ ID NO: 11714 - DNA, 20 bp, Artificial Sequence
  Synthetic oligonucleotide; CAG chr11 5252927 5252946 5252943 +
atagaggtctttcttccaac

SEQ ID NO: 11715 - DNA, 20 bp, Artificial Sequence
  Synthetic oligonucleotide; CAG chr11 5252959 5252978 5252975 +
gcaccttttactcccacttg

SEQ ID NO: 11716 - DNA, 20 bp, Artificial Sequence
  Synthetic oligonucleotide; AAG chr11 5252975 5252994 5252991 +
cttgcagaactcccatgtac

SEQ ID NO: 11717 - DNA, 20 bp, Artificial Sequence
  Synthetic oligonucleotide; TAG chr11 5252991 5253010 5253007 +
gtacaagtttctttattgcc

SEQ ID NO: 11718 - DNA, 20 bp, Artificial Sequence
  Synthetic oligonucleotide; AAG chr11 5253038 5253057 5253054 +
cacatctaacgtaaacaaaa

SEQ ID NO: 11719 - DNA, 20 bp, Artificial Sequence
  Synthetic oligonucleotide; TGG chr11 5253043 5253062 5253059 +
ctaacgtaaacaaaaaagtg

SEQ ID NO: 11720 - DNA, 20 bp, Artificial Sequence
  Synthetic oligonucleotide; GAG chr11 5253045 5253064 5253061 +
aacgtaaacaaaaaagtgtg

SEQ ID NO: 11721 - DNA, 20 bp, Artificial Sequence
  Synthetic oligonucleotide; TAG chr11 5253071 5253090 5253087 +
gcacatgacacaaacacaca

SEQ ID NO: 11722 - DNA, 20 bp, Artificial Sequence
  Synthetic oligonucleotide; TGG chr11 5253121 5253140 5253137 +
cctcaacataaaaccctttg

SEQ ID NO: 11723 - DNA, 20 bp, Artificial Sequence
  Synthetic oligonucleotide; AAG chr11 5253138 5253157 5253154 +
ttgtggctcatatatttaaa

SEQ ID NO: 11724 - DNA, 20 bp, Artificial Sequence
  Synthetic oligonucleotide; AAG chr11 5253150 5253169 5253166 +
tatttaaaaagacataaaaa

SEQ ID NO: 11725 - DNA, 20 bp, Artificial Sequence
  Synthetic oligonucleotide; AAG chr11 5253158 5253177 5253174 +
aagacataaaaaaagaactg

SEQ ID NO: 11726 - DNA, 20 bp, Artificial Sequence
  Synthetic oligonucleotide; TAG chr11 5253180 5253199 5253196 +
gacaaccatgtgtgatctct

SEQ ID NO: 11727 - DNA, 20 bp, Artificial Sequence
  Synthetic oligonucleotide; CAG chr11 5253183 5253202 5253199 +
aaccatgtgtgatctcttag

SEQ ID NO: 11728 - DNA, 20 bp, Artificial Sequence
  Synthetic oligonucleotide; TAG chr11 5253188 5253207 5253204 +
tgtgtgatctcttagcagaa

SEQ ID NO: 11729 - DNA, 20 bp, Artificial Sequence
  Synthetic oligonucleotide; CAG chr11 5253211 5253230 5253227 +
atttattatttgattgcttg

SEQ ID NO: 11730 - DNA, 20 bp, Artificial Sequence
  Synthetic oligonucleotide; AAG chr11 5253218 5253237 5253234 +
atttgattgcttgcagaata

SEQ ID NO: 11731 - DNA, 20 bp, Artificial Sequence
  Synthetic oligonucleotide; AAG chr11 5253232 5253251 5253248 +
agaataaagcctatccttga

SEQ ID NO: 11732 - DNA, 20 bp, Artificial Sequence
  Synthetic oligonucleotide; TGG chr11 5253245 5253264 5253261 +
tccttgaaagctctgcatca

SEQ ID NO: 11733 - DNA, 20 bp, Artificial Sequence
  Synthetic oligonucleotide; GGG chr11 5253246 5253265 5253262 +
ccttgaaagctctgcatcat

SEQ ID NO: 11734 - DNA, 20 bp, Artificial Sequence
  Synthetic oligonucleotide; CAG chr11 5253249 5253268 5253265 +
tgaaagctctgcatcatggg

SEQ ID NO: 11735 - DNA, 20 bp, Artificial Sequence
  Synthetic oligonucleotide; GAG chr11 5253253 5253272 5253269 +
agctctgcatcatgggcagt

SEQ ID NO: 11736 - DNA, 20 bp, Artificial Sequence
  Synthetic oligonucleotide; CAG chr11 5253258 5253277 5253274 +
tgcatcatgggcagtgagct

SEQ ID NO: 11737 - DNA, 20 bp, Artificial Sequence
  Synthetic oligonucleotide; TGG chr11 5253261 5253280 5253277 +
atcatgggcagtgagctcag

SEQ ID NO: 11738 - DNA, 20 bp, Artificial Sequence
  Synthetic oligonucleotide; TGG chr11 5253268 5253287 5253284 +
gcagtgagctcagtggtatc

SEQ ID NO: 11739 - DNA, 20 bp, Artificial Sequence
  Synthetic oligonucleotide; GAG chr11 5253270 5253289 5253286 +
agtgagctcagtggtatctg

SEQ ID NO: 11740 - DNA, 20 bp, Artificial Sequence
  Synthetic oligonucleotide; AGG chr11 5253271 5253290 5253287 +
gtgagctcagtggtatctgg

SEQ ID NO: 11741 - DNA, 20 bp, Artificial Sequence
  Synthetic oligonucleotide; CAG chr11 5253275 5253294 5253291 +
gctcagtggtatctggagga

SEQ ID NO: 11742 - DNA, 20 bp, Artificial Sequence
  Synthetic oligonucleotide; AGG chr11 5253276 5253295 5253292 +
ctcagtggtatctggaggac

SEQ ID NO: 11743 - DNA, 20 bp, Artificial Sequence
  Synthetic oligonucleotide; GGG chr11 5253277 5253296 5253293 +
tcagtggtatctggaggaca

SEQ ID NO: 11744 - DNA, 20 bp, Artificial Sequence
  Synthetic oligonucleotide; TGG chr11 5253283 5253302 5253299 +
gtatctggaggacagggcac

SEQ ID NO: 11745 - DNA, 20 bp, Artificial Sequence
  Synthetic oligonucleotide; CAG chr11 5253292 5253311 5253308 +
ggacagggcactggccactc

SEQ ID NO: 11746 - DNA, 20 bp, Artificial Sequence
  Synthetic oligonucleotide; CAG chr11 5253309 5253328 5253325 +
ctccagtcaccatcttctgc

SEQ ID NO: 11747 - DNA, 20 bp, Artificial Sequence
  Synthetic oligonucleotide; AGG chr11 5253310 5253329 5253326 +
tccagtcaccatcttctgcc

SEQ ID NO: 11748 - DNA, 20 bp, Artificial Sequence
  Synthetic oligonucleotide; AAG chr11 5253313 5253332 5253329 +
agtcaccatcttctgccagg

SEQ ID NO: 11749 - DNA, 20 bp, Artificial Sequence
  Synthetic oligonucleotide; CAG chr11 5253325 5253344 5253341 +
ctgccaggaagcctgcacct

SEQ ID NO: 11750 - DNA, 20 bp, Artificial Sequence
  Synthetic oligonucleotide; AGG chr11 5253326 5253345 5253342 +
tgccaggaagcctgcacctc

SEQ ID NO: 11751 - DNA, 20 bp, Artificial Sequence
  Synthetic oligonucleotide; GGG chr11 5253327 5253346 5253343 +
gccaggaagcctgcacctca

SEQ ID NO: 11752 - DNA, 20 bp, Artificial Sequence
  Synthetic oligonucleotide; GGG chr11 5253328 5253347 5253344 +
ccaggaagcctgcacctcag

SEQ ID NO: 11753 - DNA, 20 bp, Artificial Sequence
  Synthetic oligonucleotide; TGG chr11 5253348 5253367 5253364 +
gggtgaattctttgccgaaa

SEQ ID NO: 11754 - DNA, 20 bp, Artificial Sequence
  Synthetic oligonucleotide; CGG chr11 5253361 5253380 5253377 +
gccgaaatggattgccaaaa

SEQ ID NO: 11755 - DNA, 20 bp, Artificial Sequence
  Synthetic oligonucleotide; CAG chr11 5253368 5253387 5253384 +
tggattgccaaaacggtcac

SEQ ID NO: 11756 - DNA, 20 bp, Artificial Sequence
  Synthetic oligonucleotide; CAG chr11 5253380 5253399 5253396 +
acggtcaccagcacatttcc

SEQ ID NO: 11757 - DNA, 20 bp, Artificial Sequence
  Synthetic oligonucleotide; AGG chr11 5253381 5253400 5253397 +
cggtcaccagcacatttccc

SEQ ID NO: 11758 - DNA, 20 bp, Artificial Sequence
  Synthetic oligonucleotide; GAG chr11 5253383 5253402 5253399 +
gtcaccagcacatttcccag

SEQ ID NO: 11759 - DNA, 20 bp, Artificial Sequence
  Synthetic oligonucleotide; GAG chr11 5253391 5253410 5253407 +
cacatttcccaggagctgtt

SEQ ID NO: 11760 - DNA, 20 bp, Artificial Sequence
  Synthetic oligonucleotide; AAG chr11 5253398 5253417 5253414 +
cccaggagctgttgagatga

SEQ ID NO: 11761 - DNA, 20 bp, Artificial Sequence
  Synthetic oligonucleotide; AGG chr11 5253399 5253418 5253415 +
ccaggagctgttgagatgaa

SEQ ID NO: 11762 - DNA, 20 bp, Artificial Sequence
  Synthetic oligonucleotide; GAG chr11 5253401 5253420 5253417 +
aggagctgttgagatgaaag

SEQ ID NO: 11763 - DNA, 20 bp, Artificial Sequence
  Synthetic oligonucleotide; AAG chr11 5253410 5253429 5253426 +
tgagatgaaaggagacaata

SEQ ID NO: 11764 - DNA, 20 bp, Artificial Sequence
  Synthetic oligonucleotide; TAG chr11 5253422 5253441 5253438 +
agacaataaagatgaaccca

SEQ ID NO: 11765 - DNA, 20 bp, Artificial Sequence
  Synthetic oligonucleotide; GAG chr11 5253426 5253445 5253442 +
aataaagatgaacccatagt

SEQ ID NO: 11766 - DNA, 20 bp, Artificial Sequence
  Synthetic oligonucleotide; GAG chr11 5253431 5253450 5253447 +
agatgaacccatagtgagct

SEQ ID NO: 11767 - DNA, 20 bp, Artificial Sequence
  Synthetic oligonucleotide; GAG chr11 5253433 5253452 5253449 +
atgaacccatagtgagctga

SEQ ID NO: 11768 - DNA, 20 bp, Artificial Sequence
  Synthetic oligonucleotide; CAG chr11 5253439 5253458 5253455 +
ccatagtgagctgagagctc

SEQ ID NO: 11769 - DNA, 20 bp, Artificial Sequence
  Synthetic oligonucleotide; TGG chr11 5253444 5253463 5253460 +
gtgagctgagagctccagcc

SEQ ID NO: 11770 - DNA, 20 bp, Artificial Sequence
  Synthetic oligonucleotide; CAG chr11 5253451 5253470 5253467 +
gagagctccagcctggcctc

SEQ ID NO: 11771 - DNA, 20 bp, Artificial Sequence
  Synthetic oligonucleotide; AAG chr11 5253467 5253486 5253483 +
cctccagataactacacacc

SEQ ID NO: 11772 - DNA, 20 bp, Artificial Sequence
  Synthetic oligonucleotide; CAG chr11 5253478 5253497 5253494 +
ctacacaccaagcttccacc

SEQ ID NO: 11773 - DNA, 20 bp, Artificial Sequence
  Synthetic oligonucleotide; AAG chr11 5253485 5253504 5253501 +
ccaagcttccacccagaatc

SEQ ID NO: 11774 - DNA, 20 bp, Artificial Sequence
  Synthetic oligonucleotide; AAG chr11 5253507 5253526 5253523 +
gcctatgttaacttccctca

SEQ ID NO: 11775 - DNA, 20 bp, Artificial Sequence
  Synthetic oligonucleotide; GAG chr11 5253513 5253532 5253529 +
gttaacttccctcaaagcct

SEQ ID NO: 11776 - DNA, 20 bp, Artificial Sequence
  Synthetic oligonucleotide; CAG chr11 5253537 5253556 5253553 +
ttttgctttcccattaaatg

SEQ ID NO: 11777 - DNA, 20 bp, Artificial Sequence
  Synthetic oligonucleotide; AGG chr11 5253538 5253557 5253554 +
tttgctttcccattaaatgc

SEQ ID NO: 11778 - DNA, 20 bp, Artificial Sequence
  Synthetic oligonucleotide; TAG chr11 5253541 5253560 5253557 +
gctttcccattaaatgcagg

SEQ ID NO: 11779 - DNA, 20 bp, Artificial Sequence
  Synthetic oligonucleotide; CAG chr11 5253556 5253575 5253572 +
gcaggtagttgttcttcttg

SEQ ID NO: 11780 - DNA, 20 bp, Artificial Sequence
  Synthetic oligonucleotide; TAG chr11 5253562 5253581 5253578 +
agttgttcttcttgcagcac

SEQ ID NO: 11781 - DNA, 20 bp, Artificial Sequence
  Synthetic oligonucleotide; TGG chr11 5253569 5253588 5253585 +
cttcttgcagcactagtcac

SEQ ID NO: 11782 - DNA, 20 bp, Artificial Sequence
  Synthetic oligonucleotide; TAG chr11 5253622 5253641 5253638 +
accatgaaccctgtatgctg

SEQ ID NO: 11783 - DNA, 20 bp, Artificial Sequence
  Synthetic oligonucleotide; AGG chr11 5253623 5253642 5253639 +
ccatgaaccctgtatgctgt

SEQ ID NO: 11784 - DNA, 20 bp, Artificial Sequence
  Synthetic oligonucleotide; AAG chr11 5253639 5253658 5253655 +
ctgtaggctgaaaacgttaa

SEQ ID NO: 11785 - DNA, 20 bp, Artificial Sequence
  Synthetic oligonucleotide; CAG chr11 5253699 5253718 5253715 +
cacacacacacacacacaca

SEQ ID NO: 11786 - DNA, 20 bp, Artificial Sequence
  Synthetic oligonucleotide; GAG chr11 5253701 5253720 5253717 +
cacacacacacacacacaca

SEQ ID NO: 11787 - DNA, 20 bp, Artificial Sequence
  Synthetic oligonucleotide; CAG chr11 5253724 5253743 5253740 +
ctgactttcaaaatctactc

SEQ ID NO: 11788 - DNA, 20 bp, Artificial Sequence
  Synthetic oligonucleotide; TGG chr11 5253755 5253774 5253771 +
tttcaattgttcctcacccc

SEQ ID NO: 11789 - DNA, 20 bp, Artificial Sequence
  Synthetic oligonucleotide; TGG chr11 5253776 5253795 5253792 +
ggacatactttgcccccatc

SEQ ID NO: 11790 - DNA, 20 bp, Artificial Sequence
  Synthetic oligonucleotide; AAG chr11 5253784 5253803 5253800 +
tttgcccccatctggaatta

SEQ ID NO: 11791 - DNA, 20 bp, Artificial Sequence
  Synthetic oligonucleotide; AGG chr11 5253785 5253804 5253801 +
ttgcccccatctggaattaa

SEQ ID NO: 11792 - DNA, 20 bp, Artificial Sequence
  Synthetic oligonucleotide; AAG chr11 5253792 5253811 5253808 +
catctggaattaaaggatat

SEQ ID NO: 11793 - DNA, 20 bp, Artificial Sequence
  Synthetic oligonucleotide; AAG chr11 5253804 5253823 5253820 +
aaggatataagtttgtaatg

SEQ ID NO: 11794 - DNA, 20 bp, Artificial Sequence
  Synthetic oligonucleotide; TAG chr11 5253810 5253829 5253826 +
ataagtttgtaatgaagcat

SEQ ID NO: 11795 - DNA, 20 bp, Artificial Sequence
  Synthetic oligonucleotide; CAG chr11 5253813 5253832 5253829 +
agtttgtaatgaagcattag

SEQ ID NO: 11796 - DNA, 20 bp, Artificial Sequence
  Synthetic oligonucleotide; CAG chr11 5253831 5253850 5253847 +
agcagcattttatatgtgtc

SEQ ID NO: 11797 - DNA, 20 bp, Artificial Sequence
  Synthetic oligonucleotide; TAG chr11 5253840 5253859 5253856 +
ttatatgtgtccagctgata

SEQ ID NO: 11798 - DNA, 20 bp, Artificial Sequence
  Synthetic oligonucleotide; AGG chr11 5253841 5253860 5253857 +
tatatgtgtccagctgatat

SEQ ID NO: 11799 - DNA, 20 bp, Artificial Sequence
  Synthetic oligonucleotide; TAG chr11 5253846 5253865 5253862 +
gtgtccagctgatataggaa

SEQ ID NO: 11800 - DNA, 20 bp, Artificial Sequence
  Synthetic oligonucleotide; TAG chr11 5253852 5253871 5253868 +
agctgatataggaatagcct

SEQ ID NO: 11801 - DNA, 20 bp, Artificial Sequence
  Synthetic oligonucleotide; TGG chr11 5253866 5253885 5253882 +
tagccttagcaatgtatgtt

SEQ ID NO: 11802 - DNA, 20 bp, Artificial Sequence
  Synthetic oligonucleotide; AAG chr11 5253875 5253894 5253891 +
caatgtatgtttggccacca

SEQ ID NO: 11803 - DNA, 20 bp, Artificial Sequence
  Synthetic oligonucleotide; GAG chr11 5253893 5253912 5253909 +
caaagttccccactttgact

SEQ ID NO: 11804 - DNA, 20 bp, Artificial Sequence
  Synthetic oligonucleotide; CAG chr11 5253949 5253968 5253965 +
gaccatacttgtcctgcctc

SEQ ID NO: 11805 - DNA, 20 bp, Artificial Sequence
  Synthetic oligonucleotide; TAG chr11 5253953 5253972 5253969 +
atacttgtcctgcctccaga

SEQ ID NO: 11806 - DNA, 20 bp, Artificial Sequence
  Synthetic oligonucleotide; TAG chr11 5253980 5253999 5253996 +
tttaaaacgaataacaaaaa

SEQ ID NO: 11807 - DNA, 20 bp, Artificial Sequence
  Synthetic oligonucleotide; AGG chr11 5253981 5254000 5253997 +
ttaaaacgaataacaaaaat

SEQ ID NO: 11808 - DNA, 20 bp, Artificial Sequence
  Synthetic oligonucleotide; GGG chr11 5253982 5254001 5253998 +
taaaacgaataacaaaaata

SEQ ID NO: 11809 - DNA, 20 bp, Artificial Sequence
  Synthetic oligonucleotide; GGG chr11 5253983 5254002 5253999 +
aaaacgaataacaaaaatag

SEQ ID NO: 11810 - DNA, 20 bp, Artificial Sequence
  Synthetic oligonucleotide; AAG chr11 5253987 5254006 5254003 +
cgaataacaaaaatagggga

SEQ ID NO: 11811 - DNA, 20 bp, Artificial Sequence
  Synthetic oligonucleotide; AGG chr11 5253988 5254007 5254004 +
gaataacaaaaataggggaa

SEQ ID NO: 11812 - DNA, 20 bp, Artificial Sequence
  Synthetic oligonucleotide; AAG chr11 5253994 5254013 5254010 +
caaaaataggggaaaggtga

SEQ ID NO: 11813 - DNA, 20 bp, Artificial Sequence
  Synthetic oligonucleotide; AAG chr11 5254019 5254038 5254035 +
ctttctaccgaaatctaata

SEQ ID NO: 11814 - DNA, 20 bp, Artificial Sequence
  Synthetic oligonucleotide; AAG chr11 5254024 5254043 5254040 +
taccgaaatctaataaagaa

SEQ ID NO: 11815 - DNA, 20 bp, Artificial Sequence
  Synthetic oligonucleotide; AAG chr11 5254059 5254078 5254075 +
tttccacctctcttttctca

SEQ ID NO: 11816 - DNA, 20 bp, Artificial Sequence
  Synthetic oligonucleotide; AAG chr11 5254065 5254084 5254081 +
cctctcttttctcaaagtca

SEQ ID NO: 11817 - DNA, 20 bp, Artificial Sequence
  Synthetic oligonucleotide; TAG chr11 5254077 5254096 5254093 +
caaagtcaaagttgtccatc

SEQ ID NO: 11818 - DNA, 20 bp, Artificial Sequence
  Synthetic oligonucleotide; CAG chr11 5254085 5254104 5254101 +
aagttgtccatctagatttt

SEQ ID NO: 11819 - DNA, 20 bp, Artificial Sequence
  Synthetic oligonucleotide; GAG chr11 5254087 5254106 5254103 +
gttgtccatctagattttca

SEQ ID NO: 11820 - DNA, 20 bp, Artificial Sequence
  Synthetic oligonucleotide; AGG chr11 5254088 5254107 5254104 +
ttgtccatctagattttcag

SEQ ID NO: 11821 - DNA, 20 bp, Artificial Sequence
  Synthetic oligonucleotide; TAG chr11 5254098 5254117 5254114 +
agattttcagaggcactcct

SEQ ID NO: 11822 - DNA, 20 bp, Artificial Sequence
  Synthetic oligonucleotide; AGG chr11 5254099 5254118 5254115 +
gattttcagaggcactcctt

SEQ ID NO: 11823 - DNA, 20 bp, Artificial Sequence
  Synthetic oligonucleotide; TGG chr11 5254119 5254138 5254135 +
aggccctaaaacattgccac

SEQ ID NO: 11824 - DNA, 20 bp, Artificial Sequence
  Synthetic oligonucleotide; GGG chr11 5254120 5254139 5254136 +
ggccctaaaacattgccact

SEQ ID NO: 11825 - DNA, 20 bp, Artificial Sequence
  Synthetic oligonucleotide; CAG chr11 5254126 5254145 5254142 +
aaaacattgccactgggtct

SEQ ID NO: 11826 - DNA, 20 bp, Artificial Sequence
  Synthetic oligonucleotide; CAG chr11 5254131 5254150 5254147 +
attgccactgggtctcagcc

SEQ ID NO: 11827 - DNA, 20 bp, Artificial Sequence
  Synthetic oligonucleotide; TAG chr11 5254135 5254154 5254151 +
ccactgggtctcagcccagt

SEQ ID NO: 11828 - DNA, 20 bp, Artificial Sequence
  Synthetic oligonucleotide; CAG chr11 5254145 5254164 5254161 +
tcagcccagttagtcctctg

SEQ ID NO: 11829 - DNA, 20 bp, Artificial Sequence
  Synthetic oligonucleotide; CAG chr11 5254166 5254185 5254182 +
agtttcttcactcccaaccc

SEQ ID NO: 11830 - DNA, 20 bp, Artificial Sequence
  Synthetic oligonucleotide; CAG chr11 5254179 5254198 5254195 +
ccaaccccagtatcttcaaa

SEQ ID NO: 11831 - DNA, 20 bp, Artificial Sequence
  Synthetic oligonucleotide; CAG chr11 5254200 5254219 5254216 +
agctcacaccctgctgtgct

SEQ ID NO: 11832 - DNA, 20 bp, Artificial Sequence
  Synthetic oligonucleotide; CAG chr11 5254212 5254231 5254228 +
gctgtgctcagatcaatact

SEQ ID NO: 11833 - DNA, 20 bp, Artificial Sequence
  Synthetic oligonucleotide; AAG chr11 5254221 5254240 5254237 +
agatcaatactcagttgtct

SEQ ID NO: 11834 - DNA, 20 bp, Artificial Sequence
  Synthetic oligonucleotide; GAG chr11 5254231 5254250 5254247 +
tcagttgtctaagttgcctc

SEQ ID NO: 11835 - DNA, 20 bp, Artificial Sequence
  Synthetic oligonucleotide; AAG chr11 5254238 5254257 5254254 +
tctaagttgcctcgagacta

SEQ ID NO: 11836 - DNA, 20 bp, Artificial Sequence
  Synthetic oligonucleotide; AGG chr11 5254239 5254258 5254255 +
ctaagttgcctcgagactaa

SEQ ID NO: 11837 - DNA, 20 bp, Artificial Sequence
  Synthetic oligonucleotide; CAG chr11 5254245 5254264 5254261 +
tgcctcgagactaaaggcaa

SEQ ID NO: 11838 - DNA, 20 bp, Artificial Sequence
  Synthetic oligonucleotide; TGG chr11 5254263 5254282 5254279 +
aacagtgctgaaacatctcc

SEQ ID NO: 11839 - DNA, 20 bp, Artificial Sequence
  Synthetic oligonucleotide; AAG chr11 5254276 5254295 5254292 +
catctcctggactcaccttg

SEQ ID NO: 11840 - DNA, 20 bp, Artificial Sequence
  Synthetic oligonucleotide; CAG chr11 5254283 5254302 5254299 +
tggactcaccttgaagttct

SEQ ID NO: 11841 - DNA, 20 bp, Artificial Sequence
  Synthetic oligonucleotide; AGG chr11 5254284 5254303 5254300 +
ggactcaccttgaagttctc

SEQ ID NO: 11842 - DNA, 20 bp, Artificial Sequence
  Synthetic oligonucleotide; CAG chr11 5254296 5254315 5254312 +
aagttctcaggatccacatg

SEQ ID NO: 11843 - DNA, 20 bp, Artificial Sequence
  Synthetic oligonucleotide; CAG chr11 5254306 5254325 5254322 +
gatccacatgcagcttgtca

SEQ ID NO: 11844 - DNA, 20 bp, Artificial Sequence
  Synthetic oligonucleotide; CAG chr11 5254311 5254330 5254327 +
acatgcagcttgtcacagtg

SEQ ID NO: 11845 - DNA, 20 bp, Artificial Sequence
  Synthetic oligonucleotide; CAG chr11 5254320 5254339 5254336 +
ttgtcacagtgcagttcact

SEQ ID NO: 11846 - DNA, 20 bp, Artificial Sequence
  Synthetic oligonucleotide; TGG chr11 5254324 5254343 5254340 +
cacagtgcagttcactcagc

SEQ ID NO: 11847 - DNA, 20 bp, Artificial Sequence
  Synthetic oligonucleotide; GGG chr11 5254325 5254344 5254341 +
acagtgcagttcactcagct

SEQ ID NO: 11848 - DNA, 20 bp, Artificial Sequence
  Synthetic oligonucleotide; AAG chr11 5254330 5254349 5254346 +
gcagttcactcagctgggca

SEQ ID NO: 11849 - DNA, 20 bp, Artificial Sequence
  Synthetic oligonucleotide; AGG chr11 5254331 5254350 5254347 +
cagttcactcagctgggcaa

SEQ ID NO: 11850 - DNA, 20 bp, Artificial Sequence
  Synthetic oligonucleotide; GAG chr11 5254341 5254360 5254357 +
agctgggcaaaggtgccctt

SEQ ID NO: 11851 - DNA, 20 bp, Artificial Sequence
  Synthetic oligonucleotide; CAG chr11 5254350 5254369 5254366 +
aaggtgcccttgagatcatc

SEQ ID NO: 11852 - DNA, 20 bp, Artificial Sequence
  Synthetic oligonucleotide; AGG chr11 5254351 5254370 5254367 +
aggtgcccttgagatcatcc

SEQ ID NO: 11853 - DNA, 20 bp, Artificial Sequence
  Synthetic oligonucleotide; TGG chr11 5254361 5254380 5254377 +
gagatcatccaggtgcttta

SEQ ID NO: 11854 - DNA, 20 bp, Artificial Sequence
  Synthetic oligonucleotide; AAG chr11 5254372 5254391 5254388 +
ggtgctttatggcatctccc

SEQ ID NO: 11855 - DNA, 20 bp, Artificial Sequence
  Synthetic oligonucleotide; AGG chr11 5254373 5254392 5254389 +
gtgctttatggcatctccca

SEQ ID NO: 11856 - DNA, 20 bp, Artificial Sequence
  Synthetic oligonucleotide; AAG chr11 5254376 5254395 5254392 +
ctttatggcatctcccaagg

SEQ ID NO: 11857 - DNA, 20 bp, Artificial Sequence
  Synthetic oligonucleotide; CAG chr11 5254380 5254399 5254396 +
atggcatctcccaaggaagt

SEQ ID NO: 11858 - DNA, 20 bp, Artificial Sequence
  Synthetic oligonucleotide; TGG chr11 5254409 5254428 5254425 +
cttgccatgtgccttgactt

SEQ ID NO: 11859 - DNA, 20 bp, Artificial Sequence
  Synthetic oligonucleotide; GGG chr11 5254410 5254429 5254426 +
ttgccatgtgccttgacttt

SEQ ID NO: 11860 - DNA, 20 bp, Artificial Sequence
  Synthetic oligonucleotide; GGG chr11 5254411 5254430 5254427 +
tgccatgtgccttgactttg

SEQ ID NO: 11861 - DNA, 20 bp, Artificial Sequence
  Synthetic oligonucleotide; TGG chr11 5254424 5254443 5254440 +
gactttggggttgcccatga

SEQ ID NO: 11862 - DNA, 20 bp, Artificial Sequence
  Synthetic oligonucleotide; CAG chr11 5254427 5254446 5254443 +
tttggggttgcccatgatgg

SEQ ID NO: 11863 - DNA, 20 bp, Artificial Sequence
  Synthetic oligonucleotide; GAG chr11 5254429 5254448 5254445 +
tggggttgcccatgatggca

SEQ ID NO: 11864 - DNA, 20 bp, Artificial Sequence
  Synthetic oligonucleotide; AGG chr11 5254430 5254449 5254446 +
ggggttgcccatgatggcag

SEQ ID NO: 11865 - DNA, 20 bp, Artificial Sequence
  Synthetic oligonucleotide; CAG chr11 5254433 5254452 5254449 +
gttgcccatgatggcagagg

SEQ ID NO: 11866 - DNA, 20 bp, Artificial Sequence
  Synthetic oligonucleotide; GAG chr11 5254435 5254454 5254451 +
tgcccatgatggcagaggca

SEQ ID NO: 11867 - DNA, 20 bp, Artificial Sequence
  Synthetic oligonucleotide; AGG chr11 5254436 5254455 5254452 +
gcccatgatggcagaggcag

SEQ ID NO: 11868 - DNA, 20 bp, Artificial Sequence
  Synthetic oligonucleotide; CAG chr11 5254440 5254459 5254456 +
atgatggcagaggcagagga

SEQ ID NO: 11869 - DNA, 20 bp, Artificial Sequence
  Synthetic oligonucleotide; AGG chr11 5254441 5254460 5254457 +
tgatggcagaggcagaggac

SEQ ID NO: 11870 - DNA, 20 bp, Artificial Sequence
  Synthetic oligonucleotide; AAG chr11 5254450 5254469 5254466 +
aggcagaggacaggttgcca

SEQ ID NO: 11871 - DNA, 20 bp, Artificial Sequence
  Synthetic oligonucleotide; AAG chr11 5254459 5254478 5254475 +
acaggttgccaaagctgtca

SEQ ID NO: 11872 - DNA, 20 bp, Artificial Sequence
  Synthetic oligonucleotide; TGG chr11 5254468 5254487 5254484 +
caaagctgtcaaagaacctc

SEQ ID NO: 11873 - DNA, 20 bp, Artificial Sequence
  Synthetic oligonucleotide; GGG chr11 5254469 5254488 5254485 +
aaagctgtcaaagaacctct

SEQ ID NO: 11874 - DNA, 20 bp, Artificial Sequence
  Synthetic oligonucleotide; TGG chr11 5254476 5254495 5254492 +
tcaaagaacctctgggtcca

SEQ ID NO: 11875 - DNA, 20 bp, Artificial Sequence
  Synthetic oligonucleotide; GGG chr11 5254477 5254496 5254493 +
caaagaacctctgggtccat

SEQ ID NO: 11876 - DNA, 20 bp, Artificial Sequence
  Synthetic oligonucleotide; TAG chr11 5254480 5254499 5254496 +
agaacctctgggtccatggg

SEQ ID NO: 11877 - DNA, 20 bp, Artificial Sequence
  Synthetic oligonucleotide; CAG chr11 5254488 5254507 5254504 +
tgggtccatgggtagacaac

SEQ ID NO: 11878 - DNA, 20 bp, Artificial Sequence
  Synthetic oligonucleotide; AGG chr11 5254489 5254508 5254505 +
gggtccatgggtagacaacc

SEQ ID NO: 11879 - DNA, 20 bp, Artificial Sequence
  Synthetic oligonucleotide; GAG chr11 5254491 5254510 5254507 +
gtccatgggtagacaaccag

SEQ ID NO: 11880 - DNA, 20 bp, Artificial Sequence
  Synthetic oligonucleotide; GAG chr11 5254499 5254518 5254515 +
gtagacaaccaggagcctgt

SEQ ID NO: 11881 - DNA, 20 bp, Artificial Sequence
  Synthetic oligonucleotide; AAG chr11 5254508 5254527 5254524 +
caggagcctgtgagattgac

SEQ ID NO: 11882 - DNA, 20 bp, Artificial Sequence
  Synthetic oligonucleotide; CAG chr11 5254513 5254532 5254529 +
gcctgtgagattgacaagaa

SEQ ID NO: 11883 - DNA, 20 bp, Artificial Sequence
  Synthetic oligonucleotide; CAG chr11 5254521 5254540 5254537 +
gattgacaagaacagtttga

SEQ ID NO: 11884 - DNA, 20 bp, Artificial Sequence
  Synthetic oligonucleotide; CAG chr11 5254525 5254544 5254541 +
gacaagaacagtttgacagt

SEQ ID NO: 11885 - DNA, 20 bp, Artificial Sequence
  Synthetic oligonucleotide; AAG chr11 5254528 5254547 5254544 +
aagaacagtttgacagtcag

SEQ ID NO: 11886 - DNA, 20 bp, Artificial Sequence
  Synthetic oligonucleotide; AGG chr11 5254529 5254548 5254545 +
agaacagtttgacagtcaga

SEQ ID NO: 11887 - DNA, 20 bp, Artificial Sequence
  Synthetic oligonucleotide; GAG chr11 5254545 5254564 5254561 +
cagaaggtgccacaaatcct

SEQ ID NO: 11888 - DNA, 20 bp, Artificial Sequence
  Synthetic oligonucleotide; AAG chr11 5254548 5254567 5254564 +
aaggtgccacaaatcctgag

SEQ ID NO: 11889 - DNA, 20 bp, Artificial Sequence
  Synthetic oligonucleotide; TGG chr11 5254556 5254575 5254572 +
acaaatcctgagaagcgacc

SEQ ID NO: 11890 - DNA, 20 bp, Artificial Sequence
  Synthetic oligonucleotide; CAG chr11 5254567 5254586 5254583 +
gaagcgacctggacttttgc

SEQ ID NO: 11891 - DNA, 20 bp, Artificial Sequence
  Synthetic oligonucleotide; AGG chr11 5254568 5254587 5254584 +
aagcgacctggacttttgcc

SEQ ID NO: 11892 - DNA, 20 bp, Artificial Sequence
  Synthetic oligonucleotide; CAG chr11 5254573 5254592 5254589 +
acctggacttttgccaggca

SEQ ID NO: 11893 - DNA, 20 bp, Artificial Sequence
  Synthetic oligonucleotide; AGG chr11 5254574 5254593 5254590 +
cctggacttttgccaggcac

SEQ ID NO: 11894 - DNA, 20 bp, Artificial Sequence
  Synthetic oligonucleotide; GGG chr11 5254575 5254594 5254591 +
ctggacttttgccaggcaca

SEQ ID NO: 11895 - DNA, 20 bp, Artificial Sequence
  Synthetic oligonucleotide; TGG chr11 5254600 5254619 5254616 +
cttccttccctcccttgtcc

SEQ ID NO: 11896 - DNA, 20 bp, Artificial Sequence
  Synthetic oligonucleotide; CAG chr11 5254607 5254626 5254623 +
ccctcccttgtcctggtcac

SEQ ID NO: 11897 - DNA, 20 bp, Artificial Sequence
  Synthetic oligonucleotide; GAG chr11 5254609 5254628 5254625 +
ctcccttgtcctggtcacca

SEQ ID NO: 11898 - DNA, 20 bp, Artificial Sequence
  Synthetic oligonucleotide; CAG chr11 5254622 5254641 5254638 +
gtcaccagagcctaccttcc

SEQ ID NO: 11899 - DNA, 20 bp, Artificial Sequence
  Synthetic oligonucleotide; AGG chr11 5254623 5254642 5254639 +
tcaccagagcctaccttccc

SEQ ID NO: 11900 - DNA, 20 bp, Artificial Sequence
  Synthetic oligonucleotide; GGG chr11 5254624 5254643 5254640 +
caccagagcctaccttccca

SEQ ID NO: 11901 - DNA, 20 bp, Artificial Sequence
  Synthetic oligonucleotide; CAG chr11 5254636 5254655 5254652 +
ccttcccagggtttctcctc

SEQ ID NO: 11902 - DNA, 20 bp, Artificial Sequence
  Synthetic oligonucleotide; CAG chr11 5254664 5254683 5254680 +
tccacattcaccttgcccca

SEQ ID NO: 11903 - DNA, 20 bp, Artificial Sequence
  Synthetic oligonucleotide; AGG chr11 5254665 5254684 5254681 +
ccacattcaccttgccccac

SEQ ID NO: 11904 - DNA, 20 bp, Artificial Sequence
  Synthetic oligonucleotide; TAG chr11 5254675 5254694 5254691 +
cttgccccacaggcttgtga

SEQ ID NO: 11905 - DNA, 20 bp, Artificial Sequence
  Synthetic oligonucleotide; TAG chr11 5254678 5254697 5254694 +
gccccacaggcttgtgatag

SEQ ID NO: 11906 - DNA, 20 bp, Artificial Sequence
  Synthetic oligonucleotide; TGG chr11 5254708 5254727 5254724 +
ctcctctgtgaaatgaccca

SEQ ID NO: 11907 - DNA, 20 bp, Artificial Sequence
  Synthetic oligonucleotide; TGG chr11 5254715 5254734 5254731 +
gtgaaatgacccatggcgtc

SEQ ID NO: 11908 - DNA, 20 bp, Artificial Sequence
  Synthetic oligonucleotide; TAG chr11 5254720 5254739 5254736 +
atgacccatggcgtctggac

SEQ ID NO: 11909 - DNA, 20 bp, Artificial Sequence
  Synthetic oligonucleotide; AGG chr11 5254721 5254740 5254737 +
tgacccatggcgtctggact

SEQ ID NO: 11910 - DNA, 20 bp, Artificial Sequence
  Synthetic oligonucleotide; GAG chr11 5254723 5254742 5254739 +
acccatggcgtctggactag

SEQ ID NO: 11911 - DNA, 20 bp, Artificial Sequence
  Synthetic oligonucleotide; CAG chr11 5254740 5254759 5254756 +
taggagcttattgataacct

SEQ ID NO: 11912 - DNA, 20 bp, Artificial Sequence
  Synthetic oligonucleotide; CAG chr11 5254749 5254768 5254765 +
attgataacctcagacgttc

SEQ ID NO: 11913 - DNA, 20 bp, Artificial Sequence
  Synthetic oligonucleotide; AAG chr11 5254752 5254771 5254768 +
gataacctcagacgttccag

SEQ ID NO: 11914 - DNA, 20 bp, Artificial Sequence
  Synthetic oligonucleotide; GAG chr11 5254756 5254775 5254772 +
acctcagacgttccagaagc

SEQ ID NO: 11915 - DNA, 20 bp, Artificial Sequence
  Synthetic oligonucleotide; TGG chr11 5254763 5254782 5254779 +
acgttccagaagcgagtgtg

SEQ ID NO: 11916 - DNA, 20 bp, Artificial Sequence
  Synthetic oligonucleotide; AAG chr11 5254774 5254793 5254790 +
gcgagtgtgtggaactgctg

SEQ ID NO: 11917 - DNA, 20 bp, Artificial Sequence
  Synthetic oligonucleotide; AGG chr11 5254775 5254794 5254791 +
cgagtgtgtggaactgctga

SEQ ID NO: 11918 - DNA, 20 bp, Artificial Sequence
  Synthetic oligonucleotide; GGG chr11 5254776 5254795 5254792 +
gagtgtgtggaactgctgaa

SEQ ID NO: 11919 - DNA, 20 bp, Artificial Sequence
  Synthetic oligonucleotide; TAG chr11 5254802 5254821 5254818 +
ttccttttattcttcatccc

SEQ ID NO: 11920 - DNA, 20 bp, Artificial Sequence
  Synthetic oligonucleotide; CAG chr11 5254806 5254825 5254822 +
ttttattcttcatccctagc

SEQ ID NO: 11921 - DNA, 20 bp, Artificial Sequence
  Synthetic oligonucleotide; CGG chr11 5254813 5254832 5254829 +
cttcatccctagccagccgc

SEQ ID NO: 11922 - DNA, 20 bp, Artificial Sequence
  Synthetic oligonucleotide; TGG chr11 5254820 5254839 5254836 +
cctagccagccgccggcccc

SEQ ID NO: 11923 - DNA, 20 bp, Artificial Sequence
  Synthetic oligonucleotide; TGG chr11 5254829 5254848 5254845 +
ccgccggcccctggcctcac

SEQ ID NO: 11924 - DNA, 20 bp, Artificial Sequence
  Synthetic oligonucleotide; AAG chr11 5254839 5254858 5254855 +
ctggcctcactggatactct

SEQ ID NO: 11925 - DNA, 20 bp, Artificial Sequence
  Synthetic oligonucleotide; TGG chr11 5254847 5254866 5254863 +
actggatactctaagactat

SEQ ID NO: 11926 - DNA, 20 bp, Artificial Sequence
  Synthetic oligonucleotide; AAG chr11 5254852 5254871 5254868 +
atactctaagactattggtc

SEQ ID NO: 11927 - DNA, 20 bp, Artificial Sequence
  Synthetic oligonucleotide; AAG chr11 5254866 5254885 5254882 +
ttggtcaagtttgccttgtc

SEQ ID NO: 11928 - DNA, 20 bp, Artificial Sequence
  Synthetic oligonucleotide; AGG chr11 5254867 5254886 5254883 +
tggtcaagtttgccttgtca

SEQ ID NO: 11929 - DNA, 20 bp, Artificial Sequence
  Synthetic oligonucleotide; TGG chr11 5254874 5254893 5254890 +
gtttgccttgtcaaggctat

SEQ ID NO: 11930 - DNA, 20 bp, Artificial Sequence
  Synthetic oligonucleotide; AAG chr11 5254879 5254898 5254895 +
ccttgtcaaggctattggtc

SEQ ID NO: 11931 - DNA, 20 bp, Artificial Sequence
  Synthetic oligonucleotide; AGG chr11 5254880 5254899 5254896 +
cttgtcaaggctattggtca

SEQ ID NO: 11932 - DNA, 20 bp, Artificial Sequence
  Synthetic oligonucleotide; AAG chr11 5254884 5254903 5254900 +
tcaaggctattggtcaaggc

SEQ ID NO: 11933 - DNA, 20 bp, Artificial Sequence
  Synthetic oligonucleotide; AGG chr11 5254885 5254904 5254901 +
caaggctattggtcaaggca

SEQ ID NO: 11934 - DNA, 20 bp, Artificial Sequence
  Synthetic oligonucleotide; TGG chr11 5254889 5254908 5254905 +
gctattggtcaaggcaaggc

SEQ ID NO: 11935 - DNA, 20 bp, Artificial Sequence
  Synthetic oligonucleotide; TGG chr11 5254900 5254919 5254916 +
aggcaaggctggccaaccca

SEQ ID NO: 11936 - DNA, 20 bp, Artificial Sequence
  Synthetic oligonucleotide; GGG chr11 5254901 5254920 5254917 +
ggcaaggctggccaacccat

SEQ ID NO: 11937 - DNA, 20 bp, Artificial Sequence
  Synthetic oligonucleotide; TGG chr11 5254904 5254923 5254920 +
aaggctggccaacccatggg

SEQ ID NO: 11938 - DNA, 20 bp, Artificial Sequence
  Synthetic oligonucleotide; GAG chr11 5254906 5254925 5254922 +
ggctggccaacccatgggtg

SEQ ID NO: 11939 - DNA, 20 bp, Artificial Sequence
  Synthetic oligonucleotide; TAG chr11 5254911 5254930 5254927 +
gccaacccatgggtggagtt

SEQ ID NO: 11940 - DNA, 20 bp, Artificial Sequence
  Synthetic oligonucleotide; CAG chr11 5254915 5254934 5254931 +
acccatgggtggagtttagc

SEQ ID NO: 11941 - DNA, 20 bp, Artificial Sequence
  Synthetic oligonucleotide; AGG chr11 5254916 5254935 5254932 +
cccatgggtggagtttagcc

SEQ ID NO: 11942 - DNA, 20 bp, Artificial Sequence
  Synthetic oligonucleotide; GGG chr11 5254917 5254936 5254933 +
ccatgggtggagtttagcca

SEQ ID NO: 11943 - DNA, 20 bp, Artificial Sequence
  Synthetic oligonucleotide; CAG chr11 5254927 5254946 5254943 +
agtttagccagggaccgttt

SEQ ID NO: 11944 - DNA, 20 bp, Artificial Sequence
  Synthetic oligonucleotide; CAG chr11 5254931 5254950 5254947 +
tagccagggaccgtttcaga

SEQ ID NO: 11945 - DNA, 20 bp, Artificial Sequence
  Synthetic oligonucleotide; GAG chr11 5254945 5254964 5254961 +
ttcagacagatatttgcatt

SEQ ID NO: 11946 - DNA, 20 bp, Artificial Sequence
  Synthetic oligonucleotide; TAG chr11 5254949 5254968 5254965 +
gacagatatttgcattgaga

SEQ ID NO: 11947 - DNA, 20 bp, Artificial Sequence
  Synthetic oligonucleotide; TGG chr11 5254954 5254973 5254970 +
atatttgcattgagatagtg

SEQ ID NO: 11948 - DNA, 20 bp, Artificial Sequence
  Synthetic oligonucleotide; GGG chr11 5254955 5254974 5254971 +
tatttgcattgagatagtgt

SEQ ID NO: 11949 - DNA, 20 bp, Artificial Sequence
  Synthetic oligonucleotide; GGG chr11 5254956 5254975 5254972 +
atttgcattgagatagtgtg

SEQ ID NO: 11950 - DNA, 20 bp, Artificial Sequence
  Synthetic oligonucleotide; AAG chr11 5254959 5254978 5254975 +
tgcattgagatagtgtgggg

SEQ ID NO: 11951 - DNA, 20 bp, Artificial Sequence
  Synthetic oligonucleotide; AGG chr11 5254960 5254979 5254976 +
gcattgagatagtgtgggga

SEQ ID NO: 11952 - DNA, 20 bp, Artificial Sequence
  Synthetic oligonucleotide; GGG chr11 5254961 5254980 5254977 +
cattgagatagtgtggggaa

SEQ ID NO: 11953 - DNA, 20 bp, Artificial Sequence
  Synthetic oligonucleotide; GGG chr11 5254962 5254981 5254978 +
attgagatagtgtggggaag

SEQ ID NO: 11954 - DNA, 20 bp, Artificial Sequence
  Synthetic oligonucleotide; AAG chr11 5254970 5254989 5254986 +
agtgtggggaaggggccccc

SEQ ID NO: 11955 - DNA, 20 bp, Artificial Sequence
  Synthetic oligonucleotide; GAG chr11 5254972 5254991 5254988 +
tgtggggaaggggcccccaa

SEQ ID NO: 11956 - DNA, 20 bp, Artificial Sequence
  Synthetic oligonucleotide; AGG chr11 5254973 5254992 5254989 +
gtggggaaggggcccccaag

SEQ ID NO: 11957 - DNA, 20 bp, Artificial Sequence
  Synthetic oligonucleotide; TAG chr11 5254999 5255018 5255015 +
ctgctgcttaatttttttta

SEQ ID NO: 11958 - DNA, 20 bp, Artificial Sequence
  Synthetic oligonucleotide; CAG chr11 5255021 5255040 5255037 +
gcctttgccttgttccgatt

SEQ ID NO: 11959 - DNA, 20 bp, Artificial Sequence
  Synthetic oligonucleotide; TAG chr11 5255058 5255077 5255074 +
ctctaatttattcttccctt

SEQ ID NO: 11960 - DNA, 20 bp, Artificial Sequence
  Synthetic oligonucleotide; TAG chr11 5255062 5255081 5255078 +
aatttattcttccctttagc

SEQ ID NO: 11961 - DNA, 20 bp, Artificial Sequence
  Synthetic oligonucleotide; TAG chr11 5255081 5255100 5255097 +
ctagttttcttctcccacca

SEQ ID NO: 11962 - DNA, 20 bp, Artificial Sequence
  Synthetic oligonucleotide; AAG chr11 5255084 5255103 5255100 +
gttttcttctcccaccatag

SEQ ID NO: 11963 - DNA, 20 bp, Artificial Sequence
  Synthetic oligonucleotide; CAG chr11 5255091 5255110 5255107 +
tctcccaccatagaagatac

SEQ ID NO: 11964 - DNA, 20 bp, Artificial Sequence
  Synthetic oligonucleotide; AGG chr11 5255092 5255111 5255108 +
ctcccaccatagaagatacc

SEQ ID NO: 11965 - DNA, 20 bp, Artificial Sequence
  Synthetic oligonucleotide; CAG chr11 5255106 5255125 5255122 +
gataccaggacttcttttgt

SEQ ID NO: 11966 - DNA, 20 bp, Artificial Sequence
  Synthetic oligonucleotide; TAG chr11 5255131 5255150 5255147 +
gtttttcaccttcttgtctg

SEQ ID NO: 11967 - DNA, 20 bp, Artificial Sequence
  Synthetic oligonucleotide; CAG chr11 5255137 5255156 5255153 +
caccttcttgtctgtagctc

SEQ ID NO: 11968 - DNA, 20 bp, Artificial Sequence
  Synthetic oligonucleotide; GAG chr11 5255141 5255160 5255157 +
ttcttgtctgtagctccagt

SEQ ID NO: 11969 - DNA, 20 bp, Artificial Sequence
  Synthetic oligonucleotide; AGG chr11 5255142 5255161 5255158 +
tcttgtctgtagctccagtg

SEQ ID NO: 11970 - DNA, 20 bp, Artificial Sequence
  Synthetic oligonucleotide; TAG chr11 5255149 5255168 5255165 +
tgtagctccagtgaggcctg

SEQ ID NO: 11971 - DNA, 20 bp, Artificial Sequence
  Synthetic oligonucleotide; AAG chr11 5255156 5255175 5255172 +
ccagtgaggcctgtagttta

SEQ ID NO: 11972 - DNA, 20 bp, Artificial Sequence
  Synthetic oligonucleotide; AAG chr11 5255162 5255181 5255178 +
aggcctgtagtttaaagtta

SEQ ID NO: 11973 - DNA, 20 bp, Artificial Sequence
  Synthetic oligonucleotide; AAG chr11 5255183 5255202 5255199 +
agcatgtaccaatttttgaa

SEQ ID NO: 11974 - DNA, 20 bp, Artificial Sequence
  Synthetic oligonucleotide; CAG chr11 5255188 5255207 5255204 +
gtaccaatttttgaaaagtt

SEQ ID NO: 11975 - DNA, 20 bp, Artificial Sequence
  Synthetic oligonucleotide; AGG chr11 5255189 5255208 5255205 +
taccaatttttgaaaagttc

SEQ ID NO: 11976 - DNA, 20 bp, Artificial Sequence
  Synthetic oligonucleotide; GGG chr11 5255190 5255209 5255206 +
accaatttttgaaaagttca

SEQ ID NO: 11977 - DNA, 20 bp, Artificial Sequence
  Synthetic oligonucleotide; TAG chr11 5255209 5255228 5255225 +
agggattgtgaaatgtgttt

SEQ ID NO: 11978 - DNA, 20 bp, Artificial Sequence
  Synthetic oligonucleotide; AGG chr11 5255210 5255229 5255226 +
gggattgtgaaatgtgtttt

SEQ ID NO: 11979 - DNA, 20 bp, Artificial Sequence
  Synthetic oligonucleotide; TAG chr11 5255215 5255234 5255231 +
tgtgaaatgtgttttaggca

SEQ ID NO: 11980 - DNA, 20 bp, Artificial Sequence
  Synthetic oligonucleotide; AGG chr11 5255216 5255235 5255232 +
gtgaaatgtgttttaggcat

SEQ ID NO: 11981 - DNA, 20 bp, Artificial Sequence
  Synthetic oligonucleotide; CAG chr11 5255221 5255240 5255237 +
atgtgttttaggcataggtc

SEQ ID NO: 11982 - DNA, 20 bp, Artificial Sequence
  Synthetic oligonucleotide; AGG chr11 5255222 5255241 5255238 +
tgtgttttaggcataggtcc

SEQ ID NO: 11983 - DNA, 20 bp, Artificial Sequence
  Synthetic oligonucleotide; TGG chr11 5255233 5255252 5255249 +
cataggtccaggatttttga

SEQ ID NO: 11984 - DNA, 20 bp, Artificial Sequence
  Synthetic oligonucleotide; GGG chr11 5255234 5255253 5255250 +
ataggtccaggatttttgat

SEQ ID NO: 11985 - DNA, 20 bp, Artificial Sequence
  Synthetic oligonucleotide; TAG chr11 5255245 5255264 5255261 +
atttttgatgggacacgtct

SEQ ID NO: 11986 - DNA, 20 bp, Artificial Sequence
  Synthetic oligonucleotide; TAG chr11 5255255 5255274 5255271 +
ggacacgtcttagtctcatt

SEQ ID NO: 11987 - DNA, 20 bp, Artificial Sequence
  Synthetic oligonucleotide; AAG chr11 5255259 5255278 5255275 +
acgtcttagtctcatttagt

SEQ ID NO: 11988 - DNA, 20 bp, Artificial Sequence
  Synthetic oligonucleotide; TGG chr11 5255265 5255284 5255281 +
tagtctcatttagtaagcat

SEQ ID NO: 11989 - DNA, 20 bp, Artificial Sequence
  Synthetic oligonucleotide; AAG chr11 5255277 5255296 5255293 +
gtaagcattggtttccaaat

SEQ ID NO: 11990 - DNA, 20 bp, Artificial Sequence
  Synthetic oligonucleotide; AAG chr11 5255280 5255299 5255296 +
agcattggtttccaaataag

SEQ ID NO: 11991 - DNA, 20 bp, Artificial Sequence
  Synthetic oligonucleotide; TGG chr11 5255313 5255332 5255329 +
atctttgaatatactctctg

SEQ ID NO: 11992 - DNA, 20 bp, Artificial Sequence
  Synthetic oligonucleotide; TAG chr11 5255319 5255338 5255335 +
gaatatactctctgtggttt

SEQ ID NO: 11993 - DNA, 20 bp, Artificial Sequence
  Synthetic oligonucleotide; AGG chr11 5255320 5255339 5255336 +
aatatactctctgtggtttt

SEQ ID NO: 11994 - DNA, 20 bp, Artificial Sequence
  Synthetic oligonucleotide; AAG chr11 5255335 5255354 5255351 +
gttttaggccattatctctt

SEQ ID NO: 11995 - DNA, 20 bp, Artificial Sequence
  Synthetic oligonucleotide; TAG chr11 5255345 5255364 5255361 +
attatctcttaagttctcat

SEQ ID NO: 11996 - DNA, 20 bp, Artificial Sequence
  Synthetic oligonucleotide; TAG chr11 5255350 5255369 5255366 +
ctcttaagttctcattagtg

SEQ ID NO: 11997 - DNA, 20 bp, Artificial Sequence
  Synthetic oligonucleotide; AAG chr11 5255367 5255386 5255383 +
gtgtagtgaaaaatcctata

SEQ ID NO: 11998 - DNA, 20 bp, Artificial Sequence
  Synthetic oligonucleotide; CAG chr11 5255373 5255392 5255389 +
tgaaaaatcctataaagcaa

SEQ ID NO: 11999 - DNA, 20 bp, Artificial Sequence
  Synthetic oligonucleotide; CAG chr11 5255379 5255398 5255395 +
atcctataaagcaacagttt

SEQ ID NO: 12000 - DNA, 20 bp, Artificial Sequence
  Synthetic oligonucleotide; CAG chr11 5255384 5255403 5255400 +
ataaagcaacagtttcagtg

SEQ ID NO: 12001 - DNA, 20 bp, Artificial Sequence
  Synthetic oligonucleotide; AGG chr11 5255385 5255404 5255401 +
taaagcaacagtttcagtgc

SEQ ID NO: 12002 - DNA, 20 bp, Artificial Sequence
  Synthetic oligonucleotide; TAG chr11 5255390 5255409 5255406 +
caacagtttcagtgcaggaa

SEQ ID NO: 12003 - DNA, 20 bp, Artificial Sequence
  Synthetic oligonucleotide; AAG chr11 5255416 5255435 5255432 +
aatgttatgtaatataatat

SEQ ID NO: 12004 - DNA, 20 bp, Artificial Sequence
  Synthetic oligonucleotide; CAG chr11 5255485 5255504 5255501 +
aaatcacgcctgtttcatct

SEQ ID NO: 12005 - DNA, 20 bp, Artificial Sequence
  Synthetic oligonucleotide; AAG chr11 5255491 5255510 5255507 +
cgcctgtttcatctcagcaa

SEQ ID NO: 12006 - DNA, 20 bp, Artificial Sequence
  Synthetic oligonucleotide; CAG chr11 5255509 5255528 5255525 +
aaaagtattttttttatatt

SEQ ID NO: 12007 - DNA, 20 bp, Artificial Sequence
  Synthetic oligonucleotide; AGG chr11 5255510 5255529 5255526 +
aaagtattttttttatattc

SEQ ID NO: 12008 - DNA, 20 bp, Artificial Sequence
  Synthetic oligonucleotide; TAG chr11 5255521 5255540 5255537 +
tttatattcaggtatgtatg

SEQ ID NO: 12009 - DNA, 20 bp, Artificial Sequence
  Synthetic oligonucleotide; AGG chr11 5255522 5255541 5255538 +
ttatattcaggtatgtatgt

SEQ ID NO: 12010 - DNA, 20 bp, Artificial Sequence
  Synthetic oligonucleotide; TGG chr11 5255549 5255568 5255565 +
cgatgatgtgtatttatcac

SEQ ID NO: 12011 - DNA, 20 bp, Artificial Sequence
  Synthetic oligonucleotide; AAG chr11 5255554 5255573 5255570 +
atgtgtatttatcactggat

SEQ ID NO: 12012 - DNA, 20 bp, Artificial Sequence
  Synthetic oligonucleotide; TGG chr11 5255566 5255585 5255582 +
cactggataagtgtatgtgc

SEQ ID NO: 12013 - DNA, 20 bp, Artificial Sequence
  Synthetic oligonucleotide; CAG chr11 5255578 5255597 5255594 +
gtatgtgctggctgatgacc

SEQ ID NO: 12014 - DNA, 20 bp, Artificial Sequence
  Synthetic oligonucleotide; AGG chr11 5255579 5255598 5255595 +
tatgtgctggctgatgaccc

SEQ ID NO: 12015 - DNA, 20 bp, Artificial Sequence
  Synthetic oligonucleotide; GGG chr11 5255580 5255599 5255596 +
atgtgctggctgatgaccca

SEQ ID NO: 12016 - DNA, 20 bp, Artificial Sequence
  Synthetic oligonucleotide; TGG chr11 5255586 5255605 5255602 +
tggctgatgacccagggttt

SEQ ID NO: 12017 - DNA, 20 bp, Artificial Sequence
  Synthetic oligonucleotide; TAG chr11 5255591 5255610 5255607 +
gatgacccagggttttggtg

SEQ ID NO: 12018 - DNA, 20 bp, Artificial Sequence
  Synthetic oligonucleotide; CGG chr11 5255606 5255625 5255622 +
tggtgtagctcttctatgct

SEQ ID NO: 12019 - DNA, 20 bp, Artificial Sequence
  Synthetic oligonucleotide; AAG chr11 5255611 5255630 5255627 +
tagctcttctatgctcggta

SEQ ID NO: 12020 - DNA, 20 bp, Artificial Sequence
  Synthetic oligonucleotide; TGG chr11 5255618 5255637 5255634 +
tctatgctcggtaaagatga

SEQ ID NO: 12021 - DNA, 20 bp, Artificial Sequence
  Synthetic oligonucleotide; TAG chr11 5255621 5255640 5255637 +
atgctcggtaaagatgatgg

SEQ ID NO: 12022 - DNA, 20 bp, Artificial Sequence
  Synthetic oligonucleotide; CAG chr11 5255636 5255655 5255652 +
gatggtagaatgctctttac

SEQ ID NO: 12023 - DNA, 20 bp, Artificial Sequence
  Synthetic oligonucleotide; TGG chr11 5255645 5255664 5255661 +
atgctctttaccagatacta

SEQ ID NO: 12024 - DNA, 20 bp, Artificial Sequence
  Synthetic oligonucleotide; TAG chr11 5255650 5255669 5255666 +
ctttaccagatactatggat

SEQ ID NO: 12025 - DNA, 20 bp, Artificial Sequence
  Synthetic oligonucleotide; TAG chr11 5255676 5255695 5255692 +
taattatcttgtataaatgc

SEQ ID NO: 12026 - DNA, 20 bp, Artificial Sequence
  Synthetic oligonucleotide; AGG chr11 5255677 5255696 5255693 +
aattatcttgtataaatgct

SEQ ID NO: 12027 - DNA, 20 bp, Artificial Sequence
  Synthetic oligonucleotide; TAG chr11 5255689 5255708 5255705 +
taaatgctaggttcacttct

SEQ ID NO: 12028 - DNA, 20 bp, Artificial Sequence
  Synthetic oligonucleotide; AGG chr11 5255690 5255709 5255706 +
aaatgctaggttcacttctt

SEQ ID NO: 12029 - DNA, 20 bp, Artificial Sequence
  Synthetic oligonucleotide; GGG chr11 5255691 5255710 5255707 +
aatgctaggttcacttctta

SEQ ID NO: 12030 - DNA, 20 bp, Artificial Sequence
  Synthetic oligonucleotide; AAG chr11 5255705 5255724 5255721 +
ttcttagggaatcttattct

SEQ ID NO: 12031 - DNA, 20 bp, Artificial Sequence
  Synthetic oligonucleotide; AAG chr11 5255712 5255731 5255728 +
ggaatcttattctaagacat

SEQ ID NO: 12032 - DNA, 20 bp, Artificial Sequence
  Synthetic oligonucleotide; TGG chr11 5255728 5255747 5255744 +
acataagacatgtatttgca

SEQ ID NO: 12033 - DNA, 20 bp, Artificial Sequence
  Synthetic oligonucleotide; AAG chr11 5255743 5255762 5255759 +
ttgcatggaaaacaactctt

SEQ ID NO: 12034 - DNA, 20 bp, Artificial Sequence
  Synthetic oligonucleotide; GAG chr11 5255745 5255764 5255761 +
gcatggaaaacaactcttaa

SEQ ID NO: 12035 - DNA, 20 bp, Artificial Sequence
  Synthetic oligonucleotide; AGG chr11 5255746 5255765 5255762 +
catggaaaacaactcttaag

SEQ ID NO: 12036 - DNA, 20 bp, Artificial Sequence
  Synthetic oligonucleotide; CAG chr11 5255749 5255768 5255765 +
ggaaaacaactcttaagagg

SEQ ID NO: 12037 - DNA, 20 bp, Artificial Sequence
  Synthetic oligonucleotide; AGG chr11 5255750 5255769 5255766 +
gaaaacaactcttaagaggc

SEQ ID NO: 12038 - DNA, 20 bp, Artificial Sequence
  Synthetic oligonucleotide; GGG chr11 5255751 5255770 5255767 +
aaaacaactcttaagaggca

SEQ ID NO: 12039 - DNA, 20 bp, Artificial Sequence
  Synthetic oligonucleotide; TAG chr11 5255771 5255790 5255787 +
gggactgttttattgactaa

SEQ ID NO: 12040 - DNA, 20 bp, Artificial Sequence
  Synthetic oligonucleotide; CAG chr11 5255788 5255807 5255804 +
taatagtccacacactgtga

SEQ ID NO: 12041 - DNA, 20 bp, Artificial Sequence
  Synthetic oligonucleotide; TGG chr11 5255792 5255811 5255808 +
agtccacacactgtgacagc

SEQ ID NO: 12042 - DNA, 20 bp, Artificial Sequence
  Synthetic oligonucleotide; GGG chr11 5255793 5255812 5255809 +
gtccacacactgtgacagct

SEQ ID NO: 12043 - DNA, 20 bp, Artificial Sequence
  Synthetic oligonucleotide; TAG chr11 5255805 5255824 5255821 +
tgacagctgggatgtcactg

SEQ ID NO: 12044 - DNA, 20 bp, Artificial Sequence
  Synthetic oligonucleotide; TAG chr11 5255810 5255829 5255826 +
gctgggatgtcactgtagtt

SEQ ID NO: 12045 - DNA, 20 bp, Artificial Sequence
  Synthetic oligonucleotide; CAG chr11 5255831 5255850 5255847 +
agacatctttatctgtaact

SEQ ID NO: 12046 - DNA, 20 bp, Artificial Sequence
  Synthetic oligonucleotide; TGG chr11 5255851 5255870 5255867 +
cagtgctgtttctgacatat

SEQ ID NO: 12047 - DNA, 20 bp, Artificial Sequence
  Synthetic oligonucleotide; TGG chr11 5255864 5255883 5255880 +
gacatattggccacttaaca

SEQ ID NO: 12048 - DNA, 20 bp, Artificial Sequence
  Synthetic oligonucleotide; CAG chr11 5255867 5255886 5255883 +
atattggccacttaacatgg

SEQ ID NO: 12049 - DNA, 20 bp, Artificial Sequence
  Synthetic oligonucleotide; AGG chr11 5255868 5255887 5255884 +
tattggccacttaacatggc

SEQ ID NO: 12050 - DNA, 20 bp, Artificial Sequence
  Synthetic oligonucleotide; AAG chr11 5255871 5255890 5255887 +
tggccacttaacatggcagg

SEQ ID NO: 12051 - DNA, 20 bp, Artificial Sequence
  Synthetic oligonucleotide; TGG chr11 5255906 5255925 5255922 +
ttttttctttattttttctt

SEQ ID NO: 12052 - DNA, 20 bp, Artificial Sequence
  Synthetic oligonucleotide; GGG chr11 5255907 5255926 5255923 +
tttttctttattttttcttt

SEQ ID NO: 12053 - DNA, 20 bp, Artificial Sequence
  Synthetic oligonucleotide; TGG chr11 5255922 5255941 5255938 +
tctttgggatttttattttt

SEQ ID NO: 12054 - DNA, 20 bp, Artificial Sequence
  Synthetic oligonucleotide; TAG chr11 5255925 5255944 5255941 +
ttgggatttttattttttgg

SEQ ID NO: 12055 - DNA, 20 bp, Artificial Sequence
  Synthetic oligonucleotide; AGG chr11 5255926 5255945 5255942 +
tgggatttttattttttggt

SEQ ID NO: 12056 - DNA, 20 bp, Artificial Sequence
  Synthetic oligonucleotide; TGG chr11 5255931 5255950 5255947 +
tttttattttttggtaggtt

SEQ ID NO: 12057 - DNA, 20 bp, Artificial Sequence
  Synthetic oligonucleotide; TGG chr11 5255973 5255992 5255989 +
ctgaactcgatccatgacct

SEQ ID NO: 12058 - DNA, 20 bp, Artificial Sequence
  Synthetic oligonucleotide; TAG chr11 5255976 5255995 5255992 +
aactcgatccatgaccttgg

SEQ ID NO: 12059 - DNA, 20 bp, Artificial Sequence
  Synthetic oligonucleotide; CAG chr11 5255989 5256008 5256005 +
accttggtagattatgacgt

SEQ ID NO: 12060 - DNA, 20 bp, Artificial Sequence
  Synthetic oligonucleotide; TGG chr11 5255998 5256017 5256014 +
gattatgacgtcagaaactc

SEQ ID NO: 12061 - DNA, 20 bp, Artificial Sequence
  Synthetic oligonucleotide; TGG chr11 5256006 5256025 5256022 +
cgtcagaaactctggaaatc

SEQ ID NO: 12062 - DNA, 20 bp, Artificial Sequence
  Synthetic oligonucleotide; TGG chr11 5256014 5256033 5256030 +
actctggaaatctggcttat

SEQ ID NO: 12063 - DNA, 20 bp, Artificial Sequence
  Synthetic oligonucleotide; GAG chr11 5256016 5256035 5256032 +
tctggaaatctggcttattg

SEQ ID NO: 12064 - DNA, 20 bp, Artificial Sequence
  Synthetic oligonucleotide; AGG chr11 5256017 5256036 5256033 +
ctggaaatctggcttattgg

SEQ ID NO: 12065 - DNA, 20 bp, Artificial Sequence
  Synthetic oligonucleotide; GAG chr11 5256019 5256038 5256035 +
ggaaatctggcttattggag

SEQ ID NO: 12066 - DNA, 20 bp, Artificial Sequence
  Synthetic oligonucleotide; GAG chr11 5256021 5256040 5256037 +
aaatctggcttattggagga

SEQ ID NO: 12067 - DNA, 20 bp, Artificial Sequence
  Synthetic oligonucleotide; CAG chr11 5256045 5256064 5256061 +
tctaccttcccctaacctat

SEQ ID NO: 12068 - DNA, 20 bp, Artificial Sequence
  Synthetic oligonucleotide; AGG chr11 5256046 5256065 5256062 +
ctaccttcccctaacctatc

SEQ ID NO: 12069 - DNA, 20 bp, Artificial Sequence
  Synthetic oligonucleotide; TAG chr11 5256053 5256072 5256069 +
cccctaacctatcaggttga

SEQ ID NO: 12070 - DNA, 20 bp, Artificial Sequence
  Synthetic oligonucleotide; AGG chr11 5256054 5256073 5256070 +
ccctaacctatcaggttgat

SEQ ID NO: 12071 - DNA, 20 bp, Artificial Sequence
  Synthetic oligonucleotide; TGG chr11 5256071 5256090 5256087 +
gataggaattataataatat

SEQ ID NO: 12072 - DNA, 20 bp, Artificial Sequence
  Synthetic oligonucleotide; TGG chr11 5256074 5256093 5256090 +
aggaattataataatattgg

SEQ ID NO: 12073 - DNA, 20 bp, Artificial Sequence
  Synthetic oligonucleotide; CAG chr11 5256085 5256104 5256101 +
taatattggtggaatccttt

SEQ ID NO: 12074 - DNA, 20 bp, Artificial Sequence
  Synthetic oligonucleotide; AAG chr11 5256105 5256124 5256121 +
cagacttcataatcctgtgt

SEQ ID NO: 12075 - DNA, 20 bp, Artificial Sequence
  Synthetic oligonucleotide; AGG chr11 5256106 5256125 5256122 +
agacttcataatcctgtgta

SEQ ID NO: 12076 - DNA, 20 bp, Artificial Sequence
  Synthetic oligonucleotide; AAG chr11 5256123 5256142 5256139 +
gtaaggcttatatctgctca

SEQ ID NO: 12077 - DNA, 20 bp, Artificial Sequence
  Synthetic oligonucleotide; TAG chr11 5256129 5256148 5256145 +
cttatatctgctcaaagtgt

SEQ ID NO: 12078 - DNA, 20 bp, Artificial Sequence
  Synthetic oligonucleotide; AGG chr11 5256130 5256149 5256146 +
ttatatctgctcaaagtgtt

SEQ ID NO: 12079 - DNA, 20 bp, Artificial Sequence
  Synthetic oligonucleotide; CGG chr11 5256133 5256152 5256149 +
tatctgctcaaagtgttagg

SEQ ID NO: 12080 - DNA, 20 bp, Artificial Sequence
  Synthetic oligonucleotide; AAG chr11 5256140 5256159 5256156 +
tcaaagtgttaggcggctaa

SEQ ID NO: 12081 - DNA, 20 bp, Artificial Sequence
  Synthetic oligonucleotide; CAG chr11 5256145 5256164 5256161 +
gtgttaggcggctaaaagac

SEQ ID NO: 12082 - DNA, 20 bp, Artificial Sequence
  Synthetic oligonucleotide; AAG chr11 5256149 5256168 5256165 +
taggcggctaaaagaccaga

SEQ ID NO: 12083 - DNA, 20 bp, Artificial Sequence
  Synthetic oligonucleotide; AAG chr11 5256174 5256193 5256190 +
acatgttgacctgcgcaaca

SEQ ID NO: 12084 - DNA, 20 bp, Artificial Sequence
  Synthetic oligonucleotide; TGG chr11 5256200 5256219 5256216 +
cacatattgcacttgttctt

SEQ ID NO: 12085 - DNA, 20 bp, Artificial Sequence
  Synthetic oligonucleotide; AAG chr11 5256203 5256222 5256219 +
atattgcacttgttctttgg

SEQ ID NO: 12086 - DNA, 20 bp, Artificial Sequence
  Synthetic oligonucleotide; AAG chr11 5256215 5256234 5256231 +
ttctttggaagttaaaataa

SEQ ID NO: 12087 - DNA, 20 bp, Artificial Sequence
  Synthetic oligonucleotide; AAG chr11 5256224 5256243 5256240 +
agttaaaataaaagttgaat

SEQ ID NO: 12088 - DNA, 20 bp, Artificial Sequence
  Synthetic oligonucleotide; AAG chr11 5256228 5256247 5256244 +
aaaataaaagttgaataaga

SEQ ID NO: 12089 - DNA, 20 bp, Artificial Sequence
  Synthetic oligonucleotide; AGG chr11 5256229 5256248 5256245 +
aaataaaagttgaataagaa

SEQ ID NO: 12090 - DNA, 20 bp, Artificial Sequence
  Synthetic oligonucleotide; AAG chr11 5256233 5256252 5256249 +
aaaagttgaataagaaagga

SEQ ID NO: 12091 - DNA, 20 bp, Artificial Sequence
  Synthetic oligonucleotide; AAG chr11 5256239 5256258 5256255 +
tgaataagaaaggaaagaaa

SEQ ID NO: 12092 - DNA, 20 bp, Artificial Sequence
  Synthetic oligonucleotide; CAG chr11 5256256 5256275 5256272 +
aaaaagatttgtcaacttat

SEQ ID NO: 12093 - DNA, 20 bp, Artificial Sequence
  Synthetic oligonucleotide; CAG chr11 5256266 5256285 5256282 +
gtcaacttatcagtatcttc

SEQ ID NO: 12094 - DNA, 20 bp, Artificial Sequence
  Synthetic oligonucleotide; AAG chr11 5256285 5256304 5256301 +
ccagttactcacataataat

SEQ ID NO: 12095 - DNA, 20 bp, Artificial Sequence
  Synthetic oligonucleotide; AAG chr11 5256304 5256323 5256320 +
taagtgacttctctcaatct

SEQ ID NO: 12096 - DNA, 20 bp, Artificial Sequence
  Synthetic oligonucleotide; AGG chr11 5256305 5256324 5256321 +
aagtgacttctctcaatcta

SEQ ID NO: 12097 - DNA, 20 bp, Artificial Sequence
  Synthetic oligonucleotide; TGG chr11 5256309 5256328 5256325 +
gacttctctcaatctaagga

SEQ ID NO: 12098 - DNA, 20 bp, Artificial Sequence
  Synthetic oligonucleotide; GGG chr11 5256310 5256329 5256326 +
acttctctcaatctaaggat

SEQ ID NO: 12099 - DNA, 20 bp, Artificial Sequence
  Synthetic oligonucleotide; GAG chr11 5256314 5256333 5256330 +
ctctcaatctaaggatgggt

SEQ ID NO: 12100 - DNA, 20 bp, Artificial Sequence
  Synthetic oligonucleotide; AAG chr11 5256318 5256337 5256334 +
caatctaaggatgggtgaga

SEQ ID NO: 12101 - DNA, 20 bp, Artificial Sequence
  Synthetic oligonucleotide; TGG chr11 5256329 5256348 5256345 +
tgggtgagaaagatttttat

SEQ ID NO: 12102 - DNA, 20 bp, Artificial Sequence
  Synthetic oligonucleotide; TGG chr11 5256337 5256356 5256353 +
aaagatttttattggtatgc

SEQ ID NO: 12103 - DNA, 20 bp, Artificial Sequence
  Synthetic oligonucleotide; CAG chr11 5256342 5256361 5256358 +
tttttattggtatgctggta

SEQ ID NO: 12104 - DNA, 20 bp, Artificial Sequence
  Synthetic oligonucleotide; TAG chr11 5256349 5256368 5256365 +
tggtatgctggtacagatta

SEQ ID NO: 12105 - DNA, 20 bp, Artificial Sequence
  Synthetic oligonucleotide; GAG chr11 5256351 5256370 5256367 +
gtatgctggtacagattata

SEQ ID NO: 12106 - DNA, 20 bp, Artificial Sequence
  Synthetic oligonucleotide; GAG chr11 5256357 5256376 5256373 +
tggtacagattatagagact

SEQ ID NO: 12107 - DNA, 20 bp, Artificial Sequence
  Synthetic oligonucleotide; AGG chr11 5256358 5256377 5256374 +
ggtacagattatagagactg

SEQ ID NO: 12108 - DNA, 20 bp, Artificial Sequence
  Synthetic oligonucleotide; TAG chr11 5256372 5256391 5256388 +
agactgaggtgaacccaaat

SEQ ID NO: 12109 - DNA, 20 bp, Artificial Sequence
  Synthetic oligonucleotide; AGG chr11 5256373 5256392 5256389 +
gactgaggtgaacccaaatt

SEQ ID NO: 12110 - DNA, 20 bp, Artificial Sequence
  Synthetic oligonucleotide; GGG chr11 5256374 5256393 5256390 +
actgaggtgaacccaaatta

SEQ ID NO: 12111 - DNA, 20 bp, Artificial Sequence
  Synthetic oligonucleotide; AAG chr11 5256384 5256403 5256400 +
acccaaattagggtctcttt

SEQ ID NO: 12112 - DNA, 20 bp, Artificial Sequence
  Synthetic oligonucleotide; TAG chr11 5256388 5256407 5256404 +
aaattagggtctctttaaga

SEQ ID NO: 12113 - DNA, 20 bp, Artificial Sequence
  Synthetic oligonucleotide; AGG chr11 5256389 5256408 5256405 +
aattagggtctctttaagat

SEQ ID NO: 12114 - DNA, 20 bp, Artificial Sequence
  Synthetic oligonucleotide; GGG chr11 5256390 5256409 5256406 +
attagggtctctttaagata

SEQ ID NO: 12115 - DNA, 20 bp, Artificial Sequence
  Synthetic oligonucleotide; GGG chr11 5256391 5256410 5256407 +
ttagggtctctttaagatag

SEQ ID NO: 12116 - DNA, 20 bp, Artificial Sequence
  Synthetic oligonucleotide; GAG chr11 5256400 5256419 5256416 +
ctttaagataggggatctgt

SEQ ID NO: 12117 - DNA, 20 bp, Artificial Sequence
  Synthetic oligonucleotide; TGG chr11 5256404 5256423 5256420 +
aagataggggatctgtgaga

SEQ ID NO: 12118 - DNA, 20 bp, Artificial Sequence
  Synthetic oligonucleotide; GGG chr11 5256405 5256424 5256421 +
agataggggatctgtgagat

SEQ ID NO: 12119 - DNA, 20 bp, Artificial Sequence
  Synthetic oligonucleotide; TAG chr11 5256414 5256433 5256430 +
atctgtgagatgggtgtgta

SEQ ID NO: 12120 - DNA, 20 bp, Artificial Sequence
  Synthetic oligonucleotide; TGG chr11 5256422 5256441 5256438 +
gatgggtgtgtatagatctt

SEQ ID NO: 12121 - DNA, 20 bp, Artificial Sequence
  Synthetic oligonucleotide; GAG chr11 5256433 5256452 5256449 +
atagatctttggccatatct

SEQ ID NO: 12122 - DNA, 20 bp, Artificial Sequence
  Synthetic oligonucleotide; GAG chr11 5256435 5256454 5256451 +
agatctttggccatatctga

SEQ ID NO: 12123 - DNA, 20 bp, Artificial Sequence
  Synthetic oligonucleotide; TGG chr11 5256440 5256459 5256456 +
tttggccatatctgagagtc

SEQ ID NO: 12124 - DNA, 20 bp, Artificial Sequence
  Synthetic oligonucleotide; TGG chr11 5256444 5256463 5256460 +
gccatatctgagagtctggt

SEQ ID NO: 12125 - DNA, 20 bp, Artificial Sequence
  Synthetic oligonucleotide; GGG chr11 5256445 5256464 5256461 +
ccatatctgagagtctggtt

SEQ ID NO: 12126 - DNA, 20 bp, Artificial Sequence
  Synthetic oligonucleotide; TAG chr11 5256457 5256476 5256473 +
gtctggttgggttccatttg

SEQ ID NO: 12127 - DNA, 20 bp, Artificial Sequence
  Synthetic oligonucleotide; GAG chr11 5256459 5256478 5256475 +
ctggttgggttccatttgta

SEQ ID NO: 12128 - DNA, 20 bp, Artificial Sequence
  Synthetic oligonucleotide; AAG chr11 5256472 5256491 5256488 +
atttgtagagcctgaccttt

SEQ ID NO: 12129 - DNA, 20 bp, Artificial Sequence
  Synthetic oligonucleotide; CAG chr11 5256482 5256501 5256498 +
cctgacctttaagaatgtgt

SEQ ID NO: 12130 - DNA, 20 bp, Artificial Sequence
  Synthetic oligonucleotide; GAG chr11 5256484 5256503 5256500 +
tgacctttaagaatgtgtca

SEQ ID NO: 12131 - DNA, 20 bp, Artificial Sequence
  Synthetic oligonucleotide; TGG chr11 5256489 5256508 5256505 +
tttaagaatgtgtcagagac

SEQ ID NO: 12132 - DNA, 20 bp, Artificial Sequence
  Synthetic oligonucleotide; AAG chr11 5256497 5256516 5256513 +
tgtgtcagagactggtgtct

SEQ ID NO: 12133 - DNA, 20 bp, Artificial Sequence
  Synthetic oligonucleotide; AAG chr11 5256506 5256525 5256522 +
gactggtgtctaagcccgct

SEQ ID NO: 12134 - DNA, 20 bp, Artificial Sequence
  Synthetic oligonucleotide; AGG chr11 5256507 5256526 5256523 +
actggtgtctaagcccgcta

SEQ ID NO: 12135 - DNA, 20 bp, Artificial Sequence
  Synthetic oligonucleotide; AAG chr11 5256517 5256536 5256533 +
aagcccgctaaggcctaaac

SEQ ID NO: 12136 - DNA, 20 bp, Artificial Sequence
  Synthetic oligonucleotide; GAG chr11 5256551 5256570 5256567 +
aatctctctttttttttttt

SEQ ID NO: 12137 - DNA, 20 bp, Artificial Sequence
  Synthetic oligonucleotide; CAG chr11 5256555 5256574 5256571 +
tctcttttttttttttgaga

SEQ ID NO: 12138 - DNA, 20 bp, Artificial Sequence
  Synthetic oligonucleotide; GAG chr11 5256557 5256576 5256573 +
tcttttttttttttgagaca

SEQ ID NO: 12139 - DNA, 20 bp, Artificial Sequence
  Synthetic oligonucleotide; CAG chr11 5256575 5256594 5256591 +
cagagtcttgttctgtcacc

SEQ ID NO: 12140 - DNA, 20 bp, Artificial Sequence
  Synthetic oligonucleotide; AGG chr11 5256576 5256595 5256592 +
agagtcttgttctgtcaccc

SEQ ID NO: 12141 - DNA, 20 bp, Artificial Sequence
  Synthetic oligonucleotide; TGG chr11 5256580 5256599 5256596 +
tcttgttctgtcacccaggc

SEQ ID NO: 12142 - DNA, 20 bp, Artificial Sequence
  Synthetic oligonucleotide; GAG chr11 5256582 5256601 5256598 +
ttgttctgtcacccaggctg

SEQ ID NO: 12143 - DNA, 20 bp, Artificial Sequence
  Synthetic oligonucleotide; CAG chr11 5256587 5256606 5256603 +
ctgtcacccaggctggagtg

SEQ ID NO: 12144 - DNA, 20 bp, Artificial Sequence
  Synthetic oligonucleotide; TGG chr11 5256590 5256609 5256606 +
tcacccaggctggagtgcag

SEQ ID NO: 12145 - DNA, 20 bp, Artificial Sequence
  Synthetic oligonucleotide; CGG chr11 5256601 5256620 5256617 +
ggagtgcagtggtatgatct

SEQ ID NO: 12146 - DNA, 20 bp, Artificial Sequence
  Synthetic oligonucleotide; CAG chr11 5256625 5256644 5256641 +
tcactgcaactcctgccttc

SEQ ID NO: 12147 - DNA, 20 bp, Artificial Sequence
  Synthetic oligonucleotide; AGG chr11 5256626 5256645 5256642 +
cactgcaactcctgccttcc

SEQ ID NO: 12148 - DNA, 20 bp, Artificial Sequence
  Synthetic oligonucleotide; AAG chr11 5256632 5256651 5256648 +
aactcctgccttccaggttc

SEQ ID NO: 12149 - DNA, 20 bp, Artificial Sequence
  Synthetic oligonucleotide; CAG chr11 5256649 5256668 5256665 +
ttcaagcaattctccttcct

SEQ ID NO: 12150 - DNA, 20 bp, Artificial Sequence
  Synthetic oligonucleotide; AAG chr11 5256658 5256677 5256674 +
ttctccttcctcagcctccc

SEQ ID NO: 12151 - DNA, 20 bp, Artificial Sequence
  Synthetic oligonucleotide; TAG chr11 5256661 5256680 5256677 +
tccttcctcagcctcccaag

SEQ ID NO: 12152 - DNA, 20 bp, Artificial Sequence
  Synthetic oligonucleotide; TGG chr11 5256665 5256684 5256681 +
tcctcagcctcccaagtagc

SEQ ID NO: 12153 - DNA, 20 bp, Artificial Sequence
  Synthetic oligonucleotide; GGG chr11 5256666 5256685 5256682 +
cctcagcctcccaagtagct

SEQ ID NO: 12154 - DNA, 20 bp, Artificial Sequence
  Synthetic oligonucleotide; CAG chr11 5256673 5256692 5256689 +
ctcccaagtagctgggatta

SEQ ID NO: 12155 - DNA, 20 bp, Artificial Sequence
  Synthetic oligonucleotide; AGG chr11 5256674 5256693 5256690 +
tcccaagtagctgggattac

SEQ ID NO: 12156 - DNA, 20 bp, Artificial Sequence
  Synthetic oligonucleotide; TAG chr11 5256714 5256733 5256730 +
gtctaatttttgtatttttg

SEQ ID NO: 12157 - DNA, 20 bp, Artificial Sequence
  Synthetic oligonucleotide; GAG chr11 5256716 5256735 5256732 +
ctaatttttgtatttttgta

SEQ ID NO: 12158 - DNA, 20 bp, Artificial Sequence
  Synthetic oligonucleotide; TGG chr11 5256720 5256739 5256736 +
tttttgtatttttgtagaga

SEQ ID NO: 12159 - DNA, 20 bp, Artificial Sequence
  Synthetic oligonucleotide; GGG chr11 5256721 5256740 5256737 +
ttttgtatttttgtagagat

SEQ ID NO: 12160 - DNA, 20 bp, Artificial Sequence
  Synthetic oligonucleotide; TGG chr11 5256736 5256755 5256752 +
gagatgggatttcaccatgt

SEQ ID NO: 12161 - DNA, 20 bp, Artificial Sequence
  Synthetic oligonucleotide; CAG chr11 5256740 5256759 5256756 +
tgggatttcaccatgttggc

SEQ ID NO: 12162 - DNA, 20 bp, Artificial Sequence
  Synthetic oligonucleotide; AGG chr11 5256741 5256760 5256757 +
gggatttcaccatgttggcc

SEQ ID NO: 12163 - DNA, 20 bp, Artificial Sequence
  Synthetic oligonucleotide; TGG chr11 5256745 5256764 5256761 +
tttcaccatgttggccaggt

SEQ ID NO: 12164 - DNA, 20 bp, Artificial Sequence
  Synthetic oligonucleotide; CAG chr11 5256765 5256784 5256781 +
tggtcttgaactcttgacct

SEQ ID NO: 12165 - DNA, 20 bp, Artificial Sequence
  Synthetic oligonucleotide; AGG chr11 5256766 5256785 5256782 +
ggtcttgaactcttgacctc

SEQ ID NO: 12166 - DNA, 20 bp, Artificial Sequence
  Synthetic oligonucleotide; TGG chr11 5256783 5256802 5256799 +
ctcaggtgatctgcctgcct

SEQ ID NO: 12167 - DNA, 20 bp, Artificial Sequence
  Synthetic oligonucleotide; TGG chr11 5256799 5256818 5256815 +
gccttggcctcccaaaattc

SEQ ID NO: 12168 - DNA, 20 bp, Artificial Sequence
  Synthetic oligonucleotide; GGG chr11 5256800 5256819 5256816 +
ccttggcctcccaaaattct

SEQ ID NO: 12169 - DNA, 20 bp, Artificial Sequence
  Synthetic oligonucleotide; CAG chr11 5256807 5256826 5256823 +
ctcccaaaattctgggatta

SEQ ID NO: 12170 - DNA, 20 bp, Artificial Sequence
  Synthetic oligonucleotide; AGG chr11 5256808 5256827 5256824 +
tcccaaaattctgggattac

SEQ ID NO: 12171 - DNA, 20 bp, Artificial Sequence
  Synthetic oligonucleotide; GAG chr11 5256814 5256833 5256830 +
aattctgggattacaggcgt

SEQ ID NO: 12172 - DNA, 20 bp, Artificial Sequence
  Synthetic oligonucleotide; CAG chr11 5256827 5256846 5256843 +
caggcgtgagccaccactcc

SEQ ID NO: 12173 - DNA, 20 bp, Artificial Sequence
  Synthetic oligonucleotide; AAG chr11 5256839 5256858 5256855 +
accactcccagcctctaaac

SEQ ID NO: 12174 - DNA, 20 bp, Artificial Sequence
  Synthetic oligonucleotide; CAG chr11 5256863 5256882 5256879 +
gaatcttaattgctcctcct

SEQ ID NO: 12175 - DNA, 20 bp, Artificial Sequence
  Synthetic oligonucleotide; AAG chr11 5256869 5256888 5256885 +
taattgctcctcctcagact

SEQ ID NO: 12176 - DNA, 20 bp, Artificial Sequence
  Synthetic oligonucleotide; AGG chr11 5256870 5256889 5256886 +
aattgctcctcctcagacta

SEQ ID NO: 12177 - DNA, 20 bp, Artificial Sequence
  Synthetic oligonucleotide; TAG chr11 5256879 5256898 5256895 +
tcctcagactaaggaatatc

SEQ ID NO: 12178 - DNA, 20 bp, Artificial Sequence
  Synthetic oligonucleotide; AGG chr11 5256880 5256899 5256896 +
cctcagactaaggaatatct

SEQ ID NO: 12179 - DNA, 20 bp, Artificial Sequence
  Synthetic oligonucleotide; AAG chr11 5256926 5256945 5256942 +
tccccatttatccaaaaacc

SEQ ID NO: 12180 - DNA, 20 bp, Artificial Sequence
  Synthetic oligonucleotide; AGG chr11 5256927 5256946 5256943 +
ccccatttatccaaaaacca

SEQ ID NO: 12181 - DNA, 20 bp, Artificial Sequence
  Synthetic oligonucleotide; CAG chr11 5256930 5256949 5256946 +
catttatccaaaaaccaagg

SEQ ID NO: 12182 - DNA, 20 bp, Artificial Sequence
  Synthetic oligonucleotide; AAG chr11 5256941 5256960 5256957 +
aaaccaaggcagtgttctaa

SEQ ID NO: 12183 - DNA, 20 bp, Artificial Sequence
  Synthetic oligonucleotide; GAG chr11 5256978 5256997 5256994 +
ttatttcctcttatgctttt

SEQ ID NO: 12184 - DNA, 20 bp, Artificial Sequence
  Synthetic oligonucleotide; AGG chr11 5256979 5256998 5256995 +
tatttcctcttatgcttttg

SEQ ID NO: 12185 - DNA, 20 bp, Artificial Sequence
  Synthetic oligonucleotide; AAG chr11 5256993 5257012 5257009 +
cttttgaggcaatatctttt

SEQ ID NO: 12186 - DNA, 20 bp, Artificial Sequence
  Synthetic oligonucleotide; GAG chr11 5256995 5257014 5257011 +
tttgaggcaatatcttttaa

SEQ ID NO: 12187 - DNA, 20 bp, Artificial Sequence
  Synthetic oligonucleotide; AAG chr11 5257103 5257122 5257119 +
ataaaactgtttctttacac

SEQ ID NO: 12188 - DNA, 20 bp, Artificial Sequence
  Synthetic oligonucleotide; AAG chr11 5257113 5257132 5257129 +
ttctttacacaagcaatttc

SEQ ID NO: 12189 - DNA, 20 bp, Artificial Sequence
  Synthetic oligonucleotide; AAG chr11 5257123 5257142 5257139 +
aagcaatttcaagtgttttc

SEQ ID NO: 12190 - DNA, 20 bp, Artificial Sequence
  Synthetic oligonucleotide; CAG chr11 5257158 5257177 5257174 +
tgtattttcaaacatttgtt

SEQ ID NO: 12191 - DNA, 20 bp, Artificial Sequence
  Synthetic oligonucleotide; AAG chr11 5257194 5257213 5257210 +
aataaatgtcataattttta

SEQ ID NO: 12192 - DNA, 20 bp, Artificial Sequence
  Synthetic oligonucleotide; TAG chr11 5257197 5257216 5257213 +
aaatgtcataatttttaaag

SEQ ID NO: 12193 - DNA, 20 bp, Artificial Sequence
  Synthetic oligonucleotide; TGG chr11 5257200 5257219 5257216 +
tgtcataatttttaaagtag

SEQ ID NO: 12194 - DNA, 20 bp, Artificial Sequence
  Synthetic oligonucleotide; GGG chr11 5257201 5257220 5257217 +
gtcataatttttaaagtagt

SEQ ID NO: 12195 - DNA, 20 bp, Artificial Sequence
  Synthetic oligonucleotide; AAG chr11 5257209 5257228 5257225 +
ttttaaagtagtgggcattt

SEQ ID NO: 12196 - DNA, 20 bp, Artificial Sequence
  Synthetic oligonucleotide; AAG chr11 5257218 5257237 5257234 +
agtgggcatttaagttaaat

SEQ ID NO: 12197 - DNA, 20 bp, Artificial Sequence
  Synthetic oligonucleotide; CAG chr11 5257222 5257241 5257238 +
ggcatttaagttaaataagt

SEQ ID NO: 12198 - DNA, 20 bp, Artificial Sequence
  Synthetic oligonucleotide; GAG chr11 5257224 5257243 5257240 +
catttaagttaaataagtca

SEQ ID NO: 12199 - DNA, 20 bp, Artificial Sequence
  Synthetic oligonucleotide; AAG chr11 5257244 5257263 5257260 +
gagaataaaactttcctctg

SEQ ID NO: 12200 - DNA, 20 bp, Artificial Sequence
  Synthetic oligonucleotide; TAG chr11 5257256 5257275 5257272 +
ttcctctgaagattataatc

SEQ ID NO: 12201 - DNA, 20 bp, Artificial Sequence
  Synthetic oligonucleotide; AGG chr11 5257257 5257276 5257273 +
tcctctgaagattataatct

SEQ ID NO: 12202 - DNA, 20 bp, Artificial Sequence
  Synthetic oligonucleotide; TAG chr11 5257260 5257279 5257276 +
tctgaagattataatctagg

SEQ ID NO: 12203 - DNA, 20 bp, Artificial Sequence
  Synthetic oligonucleotide; AAG chr11 5257285 5257304 5257301 +
catacataaaattaataatt

SEQ ID NO: 12204 - DNA, 20 bp, Artificial Sequence
  Synthetic oligonucleotide; CAG chr11 5257307 5257326 5257323 +
gttaaacaacaaaataattt

SEQ ID NO: 12205 - DNA, 20 bp, Artificial Sequence
  Synthetic oligonucleotide; AAG chr11 5257322 5257341 5257338 +
aatttcagatattattaact

SEQ ID NO: 12206 - DNA, 20 bp, Artificial Sequence
  Synthetic oligonucleotide; AAG chr11 5257334 5257353 5257350 +
tattaactaagaatgaaatt

SEQ ID NO: 12207 - DNA, 20 bp, Artificial Sequence
  Synthetic oligonucleotide; AGG chr11 5257335 5257354 5257351 +
attaactaagaatgaaatta

SEQ ID NO: 12208 - DNA, 20 bp, Artificial Sequence
  Synthetic oligonucleotide; GAG chr11 5257337 5257356 5257353 +
taactaagaatgaaattaag

SEQ ID NO: 12209 - DNA, 20 bp, Artificial Sequence
  Synthetic oligonucleotide; AAG chr11 5257341 5257360 5257357 +
taagaatgaaattaaggaga

SEQ ID NO: 12210 - DNA, 20 bp, Artificial Sequence
  Synthetic oligonucleotide; CAG chr11 5257352 5257371 5257368 +
ttaaggagaaagtattcgaa

SEQ ID NO: 12211 - DNA, 20 bp, Artificial Sequence
  Synthetic oligonucleotide; GAG chr11 5257354 5257373 5257370 +
aaggagaaagtattcgaaca

SEQ ID NO: 12212 - DNA, 20 bp, Artificial Sequence
  Synthetic oligonucleotide; AGG chr11 5257355 5257374 5257371 +
aggagaaagtattcgaacag

SEQ ID NO: 12213 - DNA, 20 bp, Artificial Sequence
  Synthetic oligonucleotide; CAG chr11 5257366 5257385 5257382 +
ttcgaacagaggcaaaatga

SEQ ID NO: 12214 - DNA, 20 bp, Artificial Sequence
  Synthetic oligonucleotide; AAG chr11 5257369 5257388 5257385 +
gaacagaggcaaaatgacag

SEQ ID NO: 12215 - DNA, 20 bp, Artificial Sequence
  Synthetic oligonucleotide; AGG chr11 5257370 5257389 5257386 +
aacagaggcaaaatgacaga

SEQ ID NO: 12216 - DNA, 20 bp, Artificial Sequence
  Synthetic oligonucleotide; TGG chr11 5257382 5257401 5257398 +
atgacagaaggaatctgcca

SEQ ID NO: 12217 - DNA, 20 bp, Artificial Sequence
  Synthetic oligonucleotide; GGG chr11 5257383 5257402 5257399 +
tgacagaaggaatctgccat

SEQ ID NO: 12218 - DNA, 20 bp, Artificial Sequence
  Synthetic oligonucleotide; AAG chr11 5257386 5257405 5257402 +
cagaaggaatctgccatggg

SEQ ID NO: 12219 - DNA, 20 bp, Artificial Sequence
  Synthetic oligonucleotide; AGG chr11 5257387 5257406 5257403 +
agaaggaatctgccatggga

SEQ ID NO: 12220 - DNA, 20 bp, Artificial Sequence
  Synthetic oligonucleotide; AAG chr11 5257402 5257421 5257418 +
tgggaaggcattgccaaata

SEQ ID NO: 12221 - DNA, 20 bp, Artificial Sequence
  Synthetic oligonucleotide; TAG chr11 5257407 5257426 5257423 +
aggcattgccaaataaagtt

SEQ ID NO: 12222 - DNA, 20 bp, Artificial Sequence
  Synthetic oligonucleotide; AAG chr11 5257410 5257429 5257426 +
cattgccaaataaagtttag

SEQ ID NO: 12223 - DNA, 20 bp, Artificial Sequence
  Synthetic oligonucleotide; TAG chr11 5257419 5257438 5257435 +
ataaagtttagaagctgaaa

SEQ ID NO: 12224 - DNA, 20 bp, Artificial Sequence
  Synthetic oligonucleotide; AAG chr11 5257430 5257449 5257446 +
aagctgaaatagtaaattca

SEQ ID NO: 12225 - DNA, 20 bp, Artificial Sequence
  Synthetic oligonucleotide; AAG chr11 5257438 5257457 5257454 +
atagtaaattcaaagctctg

SEQ ID NO: 12226 - DNA, 20 bp, Artificial Sequence
  Synthetic oligonucleotide; CAG chr11 5257441 5257460 5257457 +
gtaaattcaaagctctgaag

SEQ ID NO: 12227 - DNA, 20 bp, Artificial Sequence
  Synthetic oligonucleotide; AAG chr11 5257444 5257463 5257460 +
aattcaaagctctgaagcag

SEQ ID NO: 12228 - DNA, 20 bp, Artificial Sequence
  Synthetic oligonucleotide; CAG chr11 5257467 5257486 5257483 +
aaaacaaactcctgctgtgc

SEQ ID NO: 12229 - DNA, 20 bp, Artificial Sequence
  Synthetic oligonucleotide; GAG chr11 5257469 5257488 5257485 +
aacaaactcctgctgtgcca

SEQ ID NO: 12230 - DNA, 20 bp, Artificial Sequence
  Synthetic oligonucleotide; GAG chr11 5257471 5257490 5257487 +
caaactcctgctgtgccaga

SEQ ID NO: 12231 - DNA, 20 bp, Artificial Sequence
  Synthetic oligonucleotide; TAG chr11 5257475 5257494 5257491 +
ctcctgctgtgccagagagt

SEQ ID NO: 12232 - DNA, 20 bp, Artificial Sequence
  Synthetic oligonucleotide; AAG chr11 5257481 5257500 5257497 +
ctgtgccagagagttagata

SEQ ID NO: 12233 - DNA, 20 bp, Artificial Sequence
  Synthetic oligonucleotide; CAG chr11 5257487 5257506 5257503 +
cagagagttagataaagaac

SEQ ID NO: 12234 - DNA, 20 bp, Artificial Sequence
  Synthetic oligonucleotide; AAG chr11 5257505 5257524 5257521 +
accagtgccgttgatatgta

SEQ ID NO: 12235 - DNA, 20 bp, Artificial Sequence
  Synthetic oligonucleotide; TGG chr11 5257508 5257527 5257524 +
agtgccgttgatatgtaaag

SEQ ID NO: 12236 - DNA, 20 bp, Artificial Sequence
  Synthetic oligonucleotide; GAG chr11 5257510 5257529 5257526 +
tgccgttgatatgtaaagtg

SEQ ID NO: 12237 - DNA, 20 bp, Artificial Sequence
  Synthetic oligonucleotide; TAG chr11 5257515 5257534 5257531 +
ttgatatgtaaagtggagaa

SEQ ID NO: 12238 - DNA, 20 bp, Artificial Sequence
  Synthetic oligonucleotide; CAG chr11 5257518 5257537 5257534 +
atatgtaaagtggagaatag

SEQ ID NO: 12239 - DNA, 20 bp, Artificial Sequence
  Synthetic oligonucleotide; AGG chr11 5257519 5257538 5257535 +
tatgtaaagtggagaatagc

SEQ ID NO: 12240 - DNA, 20 bp, Artificial Sequence
  Synthetic oligonucleotide; TGG chr11 5257522 5257541 5257538 +
gtaaagtggagaatagcagg

SEQ ID NO: 12241 - DNA, 20 bp, Artificial Sequence
  Synthetic oligonucleotide; CAG chr11 5257533 5257552 5257549 +
aatagcaggtggtattgttt

SEQ ID NO: 12242 - DNA, 20 bp, Artificial Sequence
  Synthetic oligonucleotide; AGG chr11 5257534 5257553 5257550 +
atagcaggtggtattgtttc

SEQ ID NO: 12243 - DNA, 20 bp, Artificial Sequence
  Synthetic oligonucleotide; GGG chr11 5257535 5257554 5257551 +
tagcaggtggtattgtttca

SEQ ID NO: 12244 - DNA, 20 bp, Artificial Sequence
  Synthetic oligonucleotide; AAG chr11 5257538 5257557 5257554 +
caggtggtattgtttcaggg

SEQ ID NO: 12245 - DNA, 20 bp, Artificial Sequence
  Synthetic oligonucleotide; AAG chr11 5257550 5257569 5257566 +
tttcagggaagcataaacct

SEQ ID NO: 12246 - DNA, 20 bp, Artificial Sequence
  Synthetic oligonucleotide; AGG chr11 5257551 5257570 5257567 +
ttcagggaagcataaaccta

SEQ ID NO: 12247 - DNA, 20 bp, Artificial Sequence
  Synthetic oligonucleotide; CAG chr11 5257569 5257588 5257585 +
taaggacataaacttgtcct

SEQ ID NO: 12248 - DNA, 20 bp, Artificial Sequence
  Synthetic oligonucleotide; TGG chr11 5257572 5257591 5257588 +
ggacataaacttgtcctcag

SEQ ID NO: 12249 - DNA, 20 bp, Artificial Sequence
  Synthetic oligonucleotide; TAG chr11 5257575 5257594 5257591 +
cataaacttgtcctcagtgg

SEQ ID NO: 12250 - DNA, 20 bp, Artificial Sequence
  Synthetic oligonucleotide; AGG chr11 5257576 5257595 5257592 +
ataaacttgtcctcagtggt

SEQ ID NO: 12251 - DNA, 20 bp, Artificial Sequence
  Synthetic oligonucleotide; GGG chr11 5257577 5257596 5257593 +
taaacttgtcctcagtggta

SEQ ID NO: 12252 - DNA, 20 bp, Artificial Sequence
  Synthetic oligonucleotide; GAG chr11 5257579 5257598 5257595 +
aacttgtcctcagtggtagg

SEQ ID NO: 12253 - DNA, 20 bp, Artificial Sequence
  Synthetic oligonucleotide; GAG chr11 5257583 5257602 5257599 +
tgtcctcagtggtagggagt

SEQ ID NO: 12254 - DNA, 20 bp, Artificial Sequence
  Synthetic oligonucleotide; AAG chr11 5257586 5257605 5257602 +
cctcagtggtagggagtgag

SEQ ID NO: 12255 - DNA, 20 bp, Artificial Sequence
  Synthetic oligonucleotide; TAG chr11 5257595 5257614 5257611 +
tagggagtgagaagccatta

SEQ ID NO: 12256 - DNA, 20 bp, Artificial Sequence
  Synthetic oligonucleotide; TGG chr11 5257609 5257628 5257625 +
ccattatagaattttaactc

SEQ ID NO: 12257 - DNA, 20 bp, Artificial Sequence
  Synthetic oligonucleotide; AAG chr11 5257628 5257647 5257644 +
ctggtaatgacataatctct

SEQ ID NO: 12258 - DNA, 20 bp, Artificial Sequence
  Synthetic oligonucleotide; TGG chr11 5257644 5257663 5257660 +
ctctaagcaacctgtactat

SEQ ID NO: 12259 - DNA, 20 bp, Artificial Sequence
  Synthetic oligonucleotide; TGG chr11 5257648 5257667 5257664 +
aagcaacctgtactattggc

SEQ ID NO: 12260 - DNA, 20 bp, Artificial Sequence
  Synthetic oligonucleotide; AAG chr11 5257662 5257681 5257678 +
attggctggattactattct

SEQ ID NO: 12261 - DNA, 20 bp, Artificial Sequence
  Synthetic oligonucleotide; AAG chr11 5257698 5257717 5257714 +
tcacaactgttttgcttaaa

SEQ ID NO: 12262 - DNA, 20 bp, Artificial Sequence
  Synthetic oligonucleotide; TGG chr11 5257714 5257733 5257730 +
taaaaagcccttattgcctg

SEQ ID NO: 12263 - DNA, 20 bp, Artificial Sequence
  Synthetic oligonucleotide; TAG chr11 5257725 5257744 5257741 +
tattgcctgtggacaattat

SEQ ID NO: 12264 - DNA, 20 bp, Artificial Sequence
  Synthetic oligonucleotide; CAG chr11 5257760 5257779 5257776 +
ctattaaaaatcttgtcatg

SEQ ID NO: 12265 - DNA, 20 bp, Artificial Sequence
  Synthetic oligonucleotide; AAG chr11 5257808 5257827 5257824 +
ttatgaatttgctttcaatt

SEQ ID NO: 12266 - DNA, 20 bp, Artificial Sequence
  Synthetic oligonucleotide; TGG chr11 5257822 5257841 5257838 +
tcaattaagttatcttgaat

SEQ ID NO: 12267 - DNA, 20 bp, Artificial Sequence
  Synthetic oligonucleotide; TAG chr11 5257838 5257857 5257854 +
gaattggcaatatctaaatc

SEQ ID NO: 12268 - DNA, 20 bp, Artificial Sequence
  Synthetic oligonucleotide; TAG chr11 5257844 5257863 5257860 +
gcaatatctaaatctagata

SEQ ID NO: 12269 - DNA, 20 bp, Artificial Sequence
  Synthetic oligonucleotide; AAG chr11 5257853 5257872 5257869 +
aaatctagatatagctccct

SEQ ID NO: 12270 - DNA, 20 bp, Artificial Sequence
  Synthetic oligonucleotide; AGG chr11 5257854 5257873 5257870 +
aatctagatatagctcccta

SEQ ID NO: 12271 - DNA, 20 bp, Artificial Sequence
  Synthetic oligonucleotide; GGG chr11 5257855 5257874 5257871 +
atctagatatagctccctaa

SEQ ID NO: 12272 - DNA, 20 bp, Artificial Sequence
  Synthetic oligonucleotide; GGG chr11 5257856 5257875 5257872 +
tctagatatagctccctaag

SEQ ID NO: 12273 - DNA, 20 bp, Artificial Sequence
  Synthetic oligonucleotide; AAG chr11 5257861 5257880 5257877 +
atatagctccctaaggggta

SEQ ID NO: 12274 - DNA, 20 bp, Artificial Sequence
  Synthetic oligonucleotide; GAG chr11 5257863 5257882 5257879 +
atagctccctaaggggtaaa

SEQ ID NO: 12275 - DNA, 20 bp, Artificial Sequence
  Synthetic oligonucleotide; AAG chr11 5257916 5257935 5257932 +
tccttgattccttgatatca

SEQ ID NO: 12276 - DNA, 20 bp, Artificial Sequence
  Synthetic oligonucleotide; AGG chr11 5257917 5257936 5257933 +
ccttgattccttgatatcaa

SEQ ID NO: 12277 - DNA, 20 bp, Artificial Sequence
  Synthetic oligonucleotide; GGG chr11 5257918 5257937 5257934 +
cttgattccttgatatcaaa

SEQ ID NO: 12278 - DNA, 20 bp, Artificial Sequence
  Synthetic oligonucleotide; CAG chr11 5257921 5257940 5257937 +
gattccttgatatcaaaggg

SEQ ID NO: 12279 - DNA, 20 bp, Artificial Sequence
  Synthetic oligonucleotide; TAG chr11 5257926 5257945 5257942 +
cttgatatcaaagggcagta

SEQ ID NO: 12280 - DNA, 20 bp, Artificial Sequence
  Synthetic oligonucleotide; TGG chr11 5257932 5257951 5257948 +
atcaaagggcagtatagttt

SEQ ID NO: 12281 - DNA, 20 bp, Artificial Sequence
  Synthetic oligonucleotide; GGG chr11 5257933 5257952 5257949 +
tcaaagggcagtatagtttt

SEQ ID NO: 12282 - DNA, 20 bp, Artificial Sequence
  Synthetic oligonucleotide; GGG chr11 5257934 5257953 5257950 +
caaagggcagtatagttttg

SEQ ID NO: 12283 - DNA, 20 bp, Artificial Sequence
  Synthetic oligonucleotide; GGG chr11 5257935 5257954 5257951 +
aaagggcagtatagttttgg

SEQ ID NO: 12284 - DNA, 20 bp, Artificial Sequence
  Synthetic oligonucleotide; GAG chr11 5257937 5257956 5257953 +
agggcagtatagttttgggg

SEQ ID NO: 12285 - DNA, 20 bp, Artificial Sequence
  Synthetic oligonucleotide; AAG chr11 5257940 5257959 5257956 +
gcagtatagttttgggggag

SEQ ID NO: 12286 - DNA, 20 bp, Artificial Sequence
  Synthetic oligonucleotide; AAG chr11 5257946 5257965 5257962 +
tagttttgggggagaagaaa

SEQ ID NO: 12287 - DNA, 20 bp, Artificial Sequence
  Synthetic oligonucleotide; GAG chr11 5257948 5257967 5257964 +
gttttgggggagaagaaaaa

SEQ ID NO: 12288 - DNA, 20 bp, Artificial Sequence
  Synthetic oligonucleotide; GAG chr11 5257950 5257969 5257966 +
tttgggggagaagaaaaaga

SEQ ID NO: 12289 - DNA, 20 bp, Artificial Sequence
  Synthetic oligonucleotide; GAG chr11 5257952 5257971 5257968 +
tgggggagaagaaaaagaga

SEQ ID NO: 12290 - DNA, 20 bp, Artificial Sequence
  Synthetic oligonucleotide; GAG chr11 5257954 5257973 5257970 +
ggggagaagaaaaagagaga

SEQ ID NO: 12291 - DNA, 20 bp, Artificial Sequence
  Synthetic oligonucleotide; GAG chr11 5257956 5257975 5257972 +
ggagaagaaaaagagagaga

SEQ ID NO: 12292 - DNA, 20 bp, Artificial Sequence
  Synthetic oligonucleotide; AAG chr11 5257964 5257983 5257980 +
aaaagagagagagagaaaaa

SEQ ID NO: 12293 - DNA, 20 bp, Artificial Sequence
  Synthetic oligonucleotide; TAG chr11 5257997 5258016 5258013 +
aatgcatattaccgacaaat

SEQ ID NO: 12294 - DNA, 20 bp, Artificial Sequence
  Synthetic oligonucleotide; GAG chr11 5257999 5258018 5258015 +
tgcatattaccgacaaatta

SEQ ID NO: 12295 - DNA, 20 bp, Artificial Sequence
  Synthetic oligonucleotide; AGG chr11 5258000 5258019 5258016 +
gcatattaccgacaaattag

SEQ ID NO: 12296 - DNA, 20 bp, Artificial Sequence
  Synthetic oligonucleotide; GGG chr11 5258001 5258020 5258017 +
catattaccgacaaattaga

SEQ ID NO: 12297 - DNA, 20 bp, Artificial Sequence
  Synthetic oligonucleotide; TGG chr11 5258007 5258026 5258023 +
accgacaaattagagggtga

SEQ ID NO: 12298 - DNA, 20 bp, Artificial Sequence
  Synthetic oligonucleotide; CAG chr11 5258010 5258029 5258026 +
gacaaattagagggtgatgg

SEQ ID NO: 12299 - DNA, 20 bp, Artificial Sequence
  Synthetic oligonucleotide; TGG chr11 5258014 5258033 5258030 +
aattagagggtgatggcaga

SEQ ID NO: 12300 - DNA, 20 bp, Artificial Sequence
  Synthetic oligonucleotide; GGG chr11 5258015 5258034 5258031 +
attagagggtgatggcagat

SEQ ID NO: 12301 - DNA, 20 bp, Artificial Sequence
  Synthetic oligonucleotide; GAG chr11 5258017 5258036 5258033 +
tagagggtgatggcagatgg

SEQ ID NO: 12302 - DNA, 20 bp, Artificial Sequence
  Synthetic oligonucleotide; AGG chr11 5258018 5258037 5258034 +
agagggtgatggcagatggg

SEQ ID NO: 12303 - DNA, 20 bp, Artificial Sequence
  Synthetic oligonucleotide; CAG chr11 5258021 5258040 5258037 +
gggtgatggcagatgggagg

SEQ ID NO: 12304 - DNA, 20 bp, Artificial Sequence
  Synthetic oligonucleotide; CAG chr11 5258024 5258043 5258040 +
tgatggcagatgggaggcag

SEQ ID NO: 12305 - DNA, 20 bp, Artificial Sequence
  Synthetic oligonucleotide; AAG chr11 5258027 5258046 5258043 +
tggcagatgggaggcagcag

SEQ ID NO: 12306 - DNA, 20 bp, Artificial Sequence
  Synthetic oligonucleotide; CAG chr11 5258037 5258056 5258053 +
gaggcagcagaagtacattg

SEQ ID NO: 12307 - DNA, 20 bp, Artificial Sequence
  Synthetic oligonucleotide; CGG chr11 5258048 5258067 5258064 +
agtacattgcagctcccact

SEQ ID NO: 12308 - DNA, 20 bp, Artificial Sequence
  Synthetic oligonucleotide; CAG chr11 5258056 5258075 5258072 +
gcagctcccactcggatgca

SEQ ID NO: 12309 - DNA, 20 bp, Artificial Sequence
  Synthetic oligonucleotide; GAG chr11 5258058 5258077 5258074 +
agctcccactcggatgcaca

SEQ ID NO: 12310 - DNA, 20 bp, Artificial Sequence
  Synthetic oligonucleotide; CAG chr11 5258061 5258080 5258077 +
tcccactcggatgcacagag

SEQ ID NO: 12311 - DNA, 20 bp, Artificial Sequence
  Synthetic oligonucleotide; AAG chr11 5258070 5258089 5258086 +
gatgcacagagcagcatgtg

SEQ ID NO: 12312 - DNA, 20 bp, Artificial Sequence
  Synthetic oligonucleotide; CAG chr11 5258081 5258100 5258097 +
cagcatgtgaagtctcccat

SEQ ID NO: 12313 - DNA, 20 bp, Artificial Sequence
  Synthetic oligonucleotide; AGG chr11 5258082 5258101 5258098 +
agcatgtgaagtctcccatc

SEQ ID NO: 12314 - DNA, 20 bp, Artificial Sequence
  Synthetic oligonucleotide; CAG chr11 5258096 5258115 5258112 +
cccatcaggaattttttttg

SEQ ID NO: 12315 - DNA, 20 bp, Artificial Sequence
  Synthetic oligonucleotide; CAG chr11 5258108 5258127 5258124 +
tttttttgcagaaccacctg

SEQ ID NO: 12316 - DNA, 20 bp, Artificial Sequence
  Synthetic oligonucleotide; AAG chr11 5258120 5258139 5258136 +
accacctgcagaaataaatc

SEQ ID NO: 12317 - DNA, 20 bp, Artificial Sequence
  Synthetic oligonucleotide; AAG chr11 5258124 5258143 5258140 +
cctgcagaaataaatcaaga

SEQ ID NO: 12318 - DNA, 20 bp, Artificial Sequence
  Synthetic oligonucleotide; GAG chr11 5258129 5258148 5258145 +
agaaataaatcaagaaagct

SEQ ID NO: 12319 - DNA, 20 bp, Artificial Sequence
  Synthetic oligonucleotide; GAG chr11 5258131 5258150 5258147 +
aaataaatcaagaaagctga

SEQ ID NO: 12320 - DNA, 20 bp, Artificial Sequence
  Synthetic oligonucleotide; AAG chr11 5258152 5258171 5258168 +
agaacgcacacaccctctga

SEQ ID NO: 12321 - DNA, 20 bp, Artificial Sequence
  Synthetic oligonucleotide; AAG chr11 5258155 5258174 5258171 +
acgcacacaccctctgaaag

SEQ ID NO: 12322 - DNA, 20 bp, Artificial Sequence
  Synthetic oligonucleotide; CAG chr11 5258158 5258177 5258174 +
cacacaccctctgaaagaag

SEQ ID NO: 12323 - DNA, 20 bp, Artificial Sequence
  Synthetic oligonucleotide; CAG chr11 5258171 5258190 5258187 +
aaagaagcagattgctcctg

SEQ ID NO: 12324 - DNA, 20 bp, Artificial Sequence
  Synthetic oligonucleotide; AGG chr11 5258172 5258191 5258188 +
aagaagcagattgctcctgc

SEQ ID NO: 12325 - DNA, 20 bp, Artificial Sequence
  Synthetic oligonucleotide; CGG chr11 5258178 5258197 5258194 +
cagattgctcctgcaggacc

SEQ ID NO: 12326 - DNA, 20 bp, Artificial Sequence
  Synthetic oligonucleotide; GGG chr11 5258179 5258198 5258195 +
agattgctcctgcaggaccc

SEQ ID NO: 12327 - DNA, 20 bp, Artificial Sequence
  Synthetic oligonucleotide; GAG chr11 5258200 5258219 5258216 +
ggaaacaccccaaatattgt

SEQ ID NO: 12328 - DNA, 20 bp, Artificial Sequence
  Synthetic oligonucleotide; TGG chr11 5258214 5258233 5258230 +
tattgtgagtgcccaaactg

SEQ ID NO: 12329 - DNA, 20 bp, Artificial Sequence
  Synthetic oligonucleotide; AAG chr11 5258217 5258236 5258233 +
tgtgagtgcccaaactgtgg

SEQ ID NO: 12330 - DNA, 20 bp, Artificial Sequence
  Synthetic oligonucleotide; TGG chr11 5258220 5258239 5258236 +
gagtgcccaaactgtggaag

SEQ ID NO: 12331 - DNA, 20 bp, Artificial Sequence
  Synthetic oligonucleotide; AAG chr11 5258225 5258244 5258241 +
cccaaactgtggaagtggaa

SEQ ID NO: 12332 - DNA, 20 bp, Artificial Sequence
  Synthetic oligonucleotide; AGG chr11 5258226 5258245 5258242 +
ccaaactgtggaagtggaaa

SEQ ID NO: 12333 - DNA, 20 bp, Artificial Sequence
  Synthetic oligonucleotide; GGG chr11 5258227 5258246 5258243 +
caaactgtggaagtggaaaa

SEQ ID NO: 12334 - DNA, 20 bp, Artificial Sequence
  Synthetic oligonucleotide; GGG chr11 5258228 5258247 5258244 +
aaactgtggaagtggaaaag

SEQ ID NO: 12335 - DNA, 20 bp, Artificial Sequence
  Synthetic oligonucleotide; GGG chr11 5258229 5258248 5258245 +
aactgtggaagtggaaaagg

SEQ ID NO: 12336 - DNA, 20 bp, Artificial Sequence
  Synthetic oligonucleotide; TGG chr11 5258261 5258280 5258277 +
ccccaaacacacatcctcac

SEQ ID NO: 12337 - DNA, 20 bp, Artificial Sequence
  Synthetic oligonucleotide; GGG chr11 5258262 5258281 5258278 +
cccaaacacacatcctcact

SEQ ID NO: 12338 - DNA, 20 bp, Artificial Sequence
  Synthetic oligonucleotide; GGG chr11 5258263 5258282 5258279 +
ccaaacacacatcctcactg

SEQ ID NO: 12339 - DNA, 20 bp, Artificial Sequence
  Synthetic oligonucleotide; AAG chr11 5258272 5258291 5258288 +
catcctcactggggaacctg

SEQ ID NO: 12340 - DNA, 20 bp, Artificial Sequence
  Synthetic oligonucleotide; TAG chr11 5258278 5258297 5258294 +
cactggggaacctgaagatc

SEQ ID NO: 12341 - DNA, 20 bp, Artificial Sequence
  Synthetic oligonucleotide; CAG chr11 5258285 5258304 5258301 +
gaacctgaagatctagacca

SEQ ID NO: 12342 - DNA, 20 bp, Artificial Sequence
  Synthetic oligonucleotide; AGG chr11 5258286 5258305 5258302 +
aacctgaagatctagaccac

SEQ ID NO: 12343 - DNA, 20 bp, Artificial Sequence
  Synthetic oligonucleotide; GAG chr11 5258288 5258307 5258304 +
cctgaagatctagaccacag

SEQ ID NO: 12344 - DNA, 20 bp, Artificial Sequence
  Synthetic oligonucleotide; AAG chr11 5258291 5258310 5258307 +
gaagatctagaccacaggag

SEQ ID NO: 12345 - DNA, 20 bp, Artificial Sequence
  Synthetic oligonucleotide; TGG chr11 5258308 5258327 5258324 +
gagaagattctgaccttacc

SEQ ID NO: 12346 - DNA, 20 bp, Artificial Sequence
  Synthetic oligonucleotide; GAG chr11 5258310 5258329 5258326 +
gaagattctgaccttacctg

SEQ ID NO: 12347 - DNA, 20 bp, Artificial Sequence
  Synthetic oligonucleotide; GAG chr11 5258315 5258334 5258331 +
ttctgaccttacctggagct

SEQ ID NO: 12348 - DNA, 20 bp, Artificial Sequence
  Synthetic oligonucleotide; TAG chr11 5258324 5258343 5258340 +
tacctggagctgagtcaatt

SEQ ID NO: 12349 - DNA, 20 bp, Artificial Sequence
  Synthetic oligonucleotide; GAG chr11 5258326 5258345 5258342 +
cctggagctgagtcaattta

SEQ ID NO: 12350 - DNA, 20 bp, Artificial Sequence
  Synthetic oligonucleotide; AGG chr11 5258327 5258346 5258343 +
ctggagctgagtcaatttag

SEQ ID NO: 12351 - DNA, 20 bp, Artificial Sequence
  Synthetic oligonucleotide; GGG chr11 5258328 5258347 5258344 +
tggagctgagtcaatttaga

SEQ ID NO: 12352 - DNA, 20 bp, Artificial Sequence
  Synthetic oligonucleotide; AAG chr11 5258333 5258352 5258349 +
ctgagtcaatttagagggcc

SEQ ID NO: 12353 - DNA, 20 bp, Artificial Sequence
  Synthetic oligonucleotide; CAG chr11 5258343 5258362 5258359 +
ttagagggccaagcaaaata

SEQ ID NO: 12354 - DNA, 20 bp, Artificial Sequence
  Synthetic oligonucleotide; AGG chr11 5258344 5258363 5258360 +
tagagggccaagcaaaatac

SEQ ID NO: 12355 - DNA, 20 bp, Artificial Sequence
  Synthetic oligonucleotide; GGG chr11 5258345 5258364 5258361 +
agagggccaagcaaaataca

SEQ ID NO: 12356 - DNA, 20 bp, Artificial Sequence
  Synthetic oligonucleotide; GGG chr11 5258346 5258365 5258362 +
gagggccaagcaaaatacag

SEQ ID NO: 12357 - DNA, 20 bp, Artificial Sequence
  Synthetic oligonucleotide; TAG chr11 5258349 5258368 5258365 +
ggccaagcaaaatacagggg

SEQ ID NO: 12358 - DNA, 20 bp, Artificial Sequence
  Synthetic oligonucleotide; GAG chr11 5258351 5258370 5258367 +
ccaagcaaaatacaggggta

SEQ ID NO: 12359 - DNA, 20 bp, Artificial Sequence
  Synthetic oligonucleotide; AGG chr11 5258352 5258371 5258368 +
caagcaaaatacaggggtag

SEQ ID NO: 12360 - DNA, 20 bp, Artificial Sequence
  Synthetic oligonucleotide; AAG chr11 5258355 5258374 5258371 +
gcaaaatacaggggtagagg

SEQ ID NO: 12361 - DNA, 20 bp, Artificial Sequence
  Synthetic oligonucleotide; CAG chr11 5258358 5258377 5258374 +
aaatacaggggtagaggaag

SEQ ID NO: 12362 - DNA, 20 bp, Artificial Sequence
  Synthetic oligonucleotide; CGG chr11 5258361 5258380 5258377 +
tacaggggtagaggaagcag

SEQ ID NO: 12363 - DNA, 20 bp, Artificial Sequence
  Synthetic oligonucleotide; GGG chr11 5258362 5258381 5258378 +
acaggggtagaggaagcagc

SEQ ID NO: 12364 - DNA, 20 bp, Artificial Sequence
  Synthetic oligonucleotide; AAG chr11 5258367 5258386 5258383 +
ggtagaggaagcagcgggaa

SEQ ID NO: 12365 - DNA, 20 bp, Artificial Sequence
  Synthetic oligonucleotide; TGG chr11 5258375 5258394 5258391 +
aagcagcgggaaaagccctg

SEQ ID NO: 12366 - DNA, 20 bp, Artificial Sequence
  Synthetic oligonucleotide; GGG chr11 5258376 5258395 5258392 +
agcagcgggaaaagccctgt

SEQ ID NO: 12367 - DNA, 20 bp, Artificial Sequence
  Synthetic oligonucleotide; TGG chr11 5258384 5258403 5258400 +
gaaaagccctgtgggctctc

SEQ ID NO: 12368 - DNA, 20 bp, Artificial Sequence
  Synthetic oligonucleotide; GGG chr11 5258385 5258404 5258401 +
aaaagccctgtgggctctct

SEQ ID NO: 12369 - DNA, 20 bp, Artificial Sequence
  Synthetic oligonucleotide; TAG chr11 5258393 5258412 5258409 +
tgtgggctctctgggtcccc

SEQ ID NO: 12370 - DNA, 20 bp, Artificial Sequence
  Synthetic oligonucleotide; AGG chr11 5258394 5258413 5258410 +
gtgggctctctgggtcccct

SEQ ID NO: 12371 - DNA, 20 bp, Artificial Sequence
  Synthetic oligonucleotide; AAG chr11 5258397 5258416 5258413 +
ggctctctgggtcccctagg

SEQ ID NO: 12372 - DNA, 20 bp, Artificial Sequence
  Synthetic oligonucleotide; CAG chr11 5258419 5258438 5258435 +
gccatttctgccttgcctca

SEQ ID NO: 12373 - DNA, 20 bp, Artificial Sequence
  Synthetic oligonucleotide; AGG chr11 5258420 5258439 5258436 +
ccatttctgccttgcctcac

SEQ ID NO: 12374 - DNA, 20 bp, Artificial Sequence
  Synthetic oligonucleotide; GGG chr11 5258421 5258440 5258437 +
catttctgccttgcctcaca

SEQ ID NO: 12375 - DNA, 20 bp, Artificial Sequence
  Synthetic oligonucleotide; GGG chr11 5258422 5258441 5258438 +
atttctgccttgcctcacag

SEQ ID NO: 12376 - DNA, 20 bp, Artificial Sequence
  Synthetic oligonucleotide; TGG chr11 5258430 5258449 5258446 +
cttgcctcacaggggtcatt

SEQ ID NO: 12377 - DNA, 20 bp, Artificial Sequence
  Synthetic oligonucleotide; GGG chr11 5258431 5258450 5258447 +
ttgcctcacaggggtcattt

SEQ ID NO: 12378 - DNA, 20 bp, Artificial Sequence
  Synthetic oligonucleotide; GAG chr11 5258433 5258452 5258449 +
gcctcacaggggtcatttgg

SEQ ID NO: 12379 - DNA, 20 bp, Artificial Sequence
  Synthetic oligonucleotide; AGG chr11 5258434 5258453 5258450 +
cctcacaggggtcatttggg

SEQ ID NO: 12380 - DNA, 20 bp, Artificial Sequence
  Synthetic oligonucleotide; GGG chr11 5258435 5258454 5258451 +
ctcacaggggtcatttggga

SEQ ID NO: 12381 - DNA, 20 bp, Artificial Sequence
  Synthetic oligonucleotide; CAG chr11 5258442 5258461 5258458 +
gggtcatttgggagggctgc

SEQ ID NO: 12382 - DNA, 20 bp, Artificial Sequence
  Synthetic oligonucleotide; GAG chr11 5258444 5258463 5258460 +
gtcatttgggagggctgcca

SEQ ID NO: 12383 - DNA, 20 bp, Artificial Sequence
  Synthetic oligonucleotide; AGG chr11 5258445 5258464 5258461 +
tcatttgggagggctgccag

SEQ ID NO: 12384 - DNA, 20 bp, Artificial Sequence
  Synthetic oligonucleotide; TGG chr11 5258451 5258470 5258467 +
gggagggctgccagaggaac

SEQ ID NO: 12385 - DNA, 20 bp, Artificial Sequence
  Synthetic oligonucleotide; GGG chr11 5258452 5258471 5258468 +
ggagggctgccagaggaact

SEQ ID NO: 12386 - DNA, 20 bp, Artificial Sequence
  Synthetic oligonucleotide; AAG chr11 5258457 5258476 5258473 +
gctgccagaggaactgggaa

SEQ ID NO: 12387 - DNA, 20 bp, Artificial Sequence
  Synthetic oligonucleotide; CAG chr11 5258464 5258483 5258480 +
gaggaactgggaaaagatga

SEQ ID NO: 12388 - DNA, 20 bp, Artificial Sequence
  Synthetic oligonucleotide; AGG chr11 5258465 5258484 5258481 +
aggaactgggaaaagatgac

SEQ ID NO: 12389 - DNA, 20 bp, Artificial Sequence
  Synthetic oligonucleotide; AAG chr11 5258471 5258490 5258487 +
tgggaaaagatgacaggaaa

SEQ ID NO: 12390 - DNA, 20 bp, Artificial Sequence
  Synthetic oligonucleotide; TGG chr11 5258486 5258505 5258502 +
ggaaaaagaaaatctccacc

SEQ ID NO: 12391 - DNA, 20 bp, Artificial Sequence
  Synthetic oligonucleotide; CAG chr11 5258490 5258509 5258506 +
aaagaaaatctccacctggc

SEQ ID NO: 12392 - DNA, 20 bp, Artificial Sequence
  Synthetic oligonucleotide; TAG chr11 5258496 5258515 5258512 +
aatctccacctggccagatc

SEQ ID NO: 12393 - DNA, 20 bp, Artificial Sequence
  Synthetic oligonucleotide; AGG chr11 5258497 5258516 5258513 +
atctccacctggccagatct

SEQ ID NO: 12394 - DNA, 20 bp, Artificial Sequence
  Synthetic oligonucleotide; GGG chr11 5258498 5258517 5258514 +
tctccacctggccagatcta

SEQ ID NO: 12395 - DNA, 20 bp, Artificial Sequence
  Synthetic oligonucleotide; GGG chr11 5258499 5258518 5258515 +
ctccacctggccagatctag

SEQ ID NO: 12396 - DNA, 20 bp, Artificial Sequence
  Synthetic oligonucleotide; TGG chr11 5258503 5258522 5258519 +
acctggccagatctaggggc

SEQ ID NO: 12397 - DNA, 20 bp, Artificial Sequence
  Synthetic oligonucleotide; GGG chr11 5258504 5258523 5258520 +
cctggccagatctaggggct

SEQ ID NO: 12398 - DNA, 20 bp, Artificial Sequence
  Synthetic oligonucleotide; CAG chr11 5258507 5258526 5258523 +
ggccagatctaggggctggg

SEQ ID NO: 12399 - DNA, 20 bp, Artificial Sequence
  Synthetic oligonucleotide; TGG chr11 5258510 5258529 5258526 +
cagatctaggggctgggcag

SEQ ID NO: 12400 - DNA, 20 bp, Artificial Sequence
  Synthetic oligonucleotide; GGG chr11 5258511 5258530 5258527 +
agatctaggggctgggcagt

SEQ ID NO: 12401 - DNA, 20 bp, Artificial Sequence
  Synthetic oligonucleotide; GGG chr11 5258512 5258531 5258528 +
gatctaggggctgggcagtg

SEQ ID NO: 12402 - DNA, 20 bp, Artificial Sequence
  Synthetic oligonucleotide; GGG chr11 5258513 5258532 5258529 +
atctaggggctgggcagtgg

SEQ ID NO: 12403 - DNA, 20 bp, Artificial Sequence
  Synthetic oligonucleotide; GGG chr11 5258514 5258533 5258530 +
tctaggggctgggcagtggg

SEQ ID NO: 12404 - DNA, 20 bp, Artificial Sequence
  Synthetic oligonucleotide; GGG chr11 5258515 5258534 5258531 +
ctaggggctgggcagtgggg

SEQ ID NO: 12405 - DNA, 20 bp, Artificial Sequence
  Synthetic oligonucleotide; TGG chr11 5258519 5258538 5258535 +
gggctgggcagtgggggggt

SEQ ID NO: 12406 - DNA, 20 bp, Artificial Sequence
  Synthetic oligonucleotide; TGG chr11 5258522 5258541 5258538 +
ctgggcagtgggggggttgg

SEQ ID NO: 12407 - DNA, 20 bp, Artificial Sequence
  Synthetic oligonucleotide; GGG chr11 5258523 5258542 5258539 +
tgggcagtgggggggttggt

SEQ ID NO: 12408 - DNA, 20 bp, Artificial Sequence
  Synthetic oligonucleotide; GGG chr11 5258524 5258543 5258540 +
gggcagtgggggggttggtg

SEQ ID NO: 12409 - DNA, 20 bp, Artificial Sequence
  Synthetic oligonucleotide; GGG chr11 5258525 5258544 5258541 +
ggcagtgggggggttggtgg

SEQ ID NO: 12410 - DNA, 20 bp, Artificial Sequence
  Synthetic oligonucleotide; GGG chr11 5258526 5258545 5258542 +
gcagtgggggggttggtggg

SEQ ID NO: 12411 - DNA, 20 bp, Artificial Sequence
  Synthetic oligonucleotide; TGG chr11 5258538 5258557 5258554 +
ttggtggggggacatgaatt

SEQ ID NO: 12412 - DNA, 20 bp, Artificial Sequence
  Synthetic oligonucleotide; CAG chr11 5258545 5258564 5258561 +
ggggacatgaatttggtgtg

SEQ ID NO: 12413 - DNA, 20 bp, Artificial Sequence
  Synthetic oligonucleotide; TGG chr11 5258555 5258574 5258571 +
atttggtgtgcagactccac

SEQ ID NO: 12414 - DNA, 20 bp, Artificial Sequence
  Synthetic oligonucleotide; CAG chr11 5258558 5258577 5258574 +
tggtgtgcagactccactgg

SEQ ID NO: 12415 - DNA, 20 bp, Artificial Sequence
  Synthetic oligonucleotide; AGG chr11 5258559 5258578 5258575 +
ggtgtgcagactccactggc

SEQ ID NO: 12416 - DNA, 20 bp, Artificial Sequence
  Synthetic oligonucleotide; GGG chr11 5258560 5258579 5258576 +
gtgtgcagactccactggca

SEQ ID NO: 12417 - DNA, 20 bp, Artificial Sequence
  Synthetic oligonucleotide; AAG chr11 5258563 5258582 5258579 +
tgcagactccactggcaggg

SEQ ID NO: 12418 - DNA, 20 bp, Artificial Sequence
  Synthetic oligonucleotide; TAG chr11 5258566 5258585 5258582 +
agactccactggcagggaag

SEQ ID NO: 12419 - DNA, 20 bp, Artificial Sequence
  Synthetic oligonucleotide; AGG chr11 5258567 5258586 5258583 +
gactccactggcagggaagt

SEQ ID NO: 12420 - DNA, 20 bp, Artificial Sequence
  Synthetic oligonucleotide; CAG chr11 5258571 5258590 5258587 +
ccactggcagggaagtagga

SEQ ID NO: 12421 - DNA, 20 bp, Artificial Sequence
  Synthetic oligonucleotide; TGG chr11 5258581 5258600 5258597 +
ggaagtaggacagccctact

SEQ ID NO: 12422 - DNA, 20 bp, Artificial Sequence
  Synthetic oligonucleotide; CAG chr11 5258589 5258608 5258605 +
gacagccctacttggtttcg

SEQ ID NO: 12423 - DNA, 20 bp, Artificial Sequence
  Synthetic oligonucleotide; TGG chr11 5258593 5258612 5258609 +
gccctacttggtttcgcagc

SEQ ID NO: 12424 - DNA, 20 bp, Artificial Sequence
  Synthetic oligonucleotide; TAG chr11 5258596 5258615 5258612 +
ctacttggtttcgcagctgg

SEQ ID NO: 12425 - DNA, 20 bp, Artificial Sequence
  Synthetic oligonucleotide; TGG chr11 5258601 5258620 5258617 +
tggtttcgcagctggtagcc

SEQ ID NO: 12426 - DNA, 20 bp, Artificial Sequence
  Synthetic oligonucleotide; GGG chr11 5258602 5258621 5258618 +
ggtttcgcagctggtagcct

SEQ ID NO: 12427 - DNA, 20 bp, Artificial Sequence
  Synthetic oligonucleotide; GGG chr11 5258603 5258622 5258619 +
gtttcgcagctggtagcctg

SEQ ID NO: 12428 - DNA, 20 bp, Artificial Sequence
  Synthetic oligonucleotide; AAG chr11 5258607 5258626 5258623 +
cgcagctggtagcctggggc

SEQ ID NO: 12429 - DNA, 20 bp, Artificial Sequence
  Synthetic oligonucleotide; CAG chr11 5258614 5258633 5258630 +
ggtagcctggggcaagttct

SEQ ID NO: 12430 - DNA, 20 bp, Artificial Sequence
  Synthetic oligonucleotide; TGG chr11 5258635 5258654 5258651 +
agccttgctcactgactgca

SEQ ID NO: 12431 - DNA, 20 bp, Artificial Sequence
  Synthetic oligonucleotide; CAG chr11 5258641 5258660 5258657 +
gctcactgactgcatggaaa

SEQ ID NO: 12432 - DNA, 20 bp, Artificial Sequence
  Synthetic oligonucleotide; CGG chr11 5258647 5258666 5258663 +
tgactgcatggaaacagatt

SEQ ID NO: 12433 - DNA, 20 bp, Artificial Sequence
  Synthetic oligonucleotide; CGG chr11 5258658 5258677 5258674 +
aaacagattcggtgctgttg

SEQ ID NO: 12434 - DNA, 20 bp, Artificial Sequence
  Synthetic oligonucleotide; GGG chr11 5258659 5258678 5258675 +
aacagattcggtgctgttgc

SEQ ID NO: 12435 - DNA, 20 bp, Artificial Sequence
  Synthetic oligonucleotide; GGG chr11 5258660 5258679 5258676 +
acagattcggtgctgttgcg

SEQ ID NO: 12436 - DNA, 20 bp, Artificial Sequence
  Synthetic oligonucleotide; GGG chr11 5258661 5258680 5258677 +
cagattcggtgctgttgcgg

SEQ ID NO: 12437 - DNA, 20 bp, Artificial Sequence
  Synthetic oligonucleotide; GAG chr11 5258663 5258682 5258679 +
gattcggtgctgttgcgggg

SEQ ID NO: 12438 - DNA, 20 bp, Artificial Sequence
  Synthetic oligonucleotide; AGG chr11 5258664 5258683 5258680 +
attcggtgctgttgcggggg

SEQ ID NO: 12439 - DNA, 20 bp, Artificial Sequence
  Synthetic oligonucleotide; GGG chr11 5258665 5258684 5258681 +
ttcggtgctgttgcggggga

SEQ ID NO: 12440 - DNA, 20 bp, Artificial Sequence
  Synthetic oligonucleotide; TGG chr11 5258675 5258694 5258691 +
ttgcgggggagggtgcacgc

SEQ ID NO: 12441 - DNA, 20 bp, Artificial Sequence
  Synthetic oligonucleotide; AAG chr11 5258678 5258697 5258694 +
cgggggagggtgcacgctgg

SEQ ID NO: 12442 - DNA, 20 bp, Artificial Sequence
  Synthetic oligonucleotide; GAG chr11 5258682 5258701 5258698 +
ggagggtgcacgctggaagt

SEQ ID NO: 12443 - DNA, 20 bp, Artificial Sequence
  Synthetic oligonucleotide; GAG chr11 5258696 5258715 5258712 +
ggaagtgagaccaacctttt

SEQ ID NO: 12444 - DNA, 20 bp, Artificial Sequence
  Synthetic oligonucleotide; TGG chr11 5258704 5258723 5258720 +
gaccaaccttttgagttgca

SEQ ID NO: 12445 - DNA, 20 bp, Artificial Sequence
  Synthetic oligonucleotide; GGG chr11 5258705 5258724 5258721 +
accaaccttttgagttgcat

SEQ ID NO: 12446 - DNA, 20 bp, Artificial Sequence
  Synthetic oligonucleotide; GAG chr11 5258707 5258726 5258723 +
caaccttttgagttgcatgg

SEQ ID NO: 12447 - DNA, 20 bp, Artificial Sequence
  Synthetic oligonucleotide; TGG chr11 5258711 5258730 5258727 +
cttttgagttgcatgggagc

SEQ ID NO: 12448 - DNA, 20 bp, Artificial Sequence
  Synthetic oligonucleotide; GGG chr11 5258712 5258731 5258728 +
ttttgagttgcatgggagct

SEQ ID NO: 12449 - DNA, 20 bp, Artificial Sequence
  Synthetic oligonucleotide; AAG chr11 5258716 5258735 5258732 +
gagttgcatgggagctgggc

SEQ ID NO: 12450 - DNA, 20 bp, Artificial Sequence
  Synthetic oligonucleotide; CAG chr11 5258767 5258786 5258783 +
tcctgatgacctgcatgaca

SEQ ID NO: 12451 - DNA, 20 bp, Artificial Sequence
  Synthetic oligonucleotide; CAG chr11 5258770 5258789 5258786 +
tgatgacctgcatgacacag

SEQ ID NO: 12452 - DNA, 20 bp, Artificial Sequence
  Synthetic oligonucleotide; GAG chr11 5258772 5258791 5258788 +
atgacctgcatgacacagca

SEQ ID NO: 12453 - DNA, 20 bp, Artificial Sequence
  Synthetic oligonucleotide; AGG chr11 5258773 5258792 5258789 +
tgacctgcatgacacagcag

SEQ ID NO: 12454 - DNA, 20 bp, Artificial Sequence
  Synthetic oligonucleotide; CAG chr11 5258776 5258795 5258792 +
cctgcatgacacagcagagg

SEQ ID NO: 12455 - DNA, 20 bp, Artificial Sequence
  Synthetic oligonucleotide; TAG chr11 5258791 5258810 5258807 +
agaggcagccataattgtcc

SEQ ID NO: 12456 - DNA, 20 bp, Artificial Sequence
  Synthetic oligonucleotide; AGG chr11 5258792 5258811 5258808 +
gaggcagccataattgtcct

SEQ ID NO: 12457 - DNA, 20 bp, Artificial Sequence
  Synthetic oligonucleotide; TGG chr11 5258813 5258832 5258829 +
ggaacataaatccattgacc

SEQ ID NO: 12458 - DNA, 20 bp, Artificial Sequence
  Synthetic oligonucleotide; CAG chr11 5258838 5258857 5258854 +
actacacccccatcctccca

SEQ ID NO: 12459 - DNA, 20 bp, Artificial Sequence
  Synthetic oligonucleotide; TAG chr11 5258841 5258860 5258857 +
acacccccatcctcccacag

SEQ ID NO: 12460 - DNA, 20 bp, Artificial Sequence
  Synthetic oligonucleotide; CAG chr11 5258847 5258866 5258863 +
ccatcctcccacagtagcca

SEQ ID NO: 12461 - DNA, 20 bp, Artificial Sequence
  Synthetic oligonucleotide; AAG chr11 5258851 5258870 5258867 +
cctcccacagtagccacaga

SEQ ID NO: 12462 - DNA, 20 bp, Artificial Sequence
  Synthetic oligonucleotide; AAG chr11 5258862 5258881 5258878 +
agccacagaaagacctgccc

SEQ ID NO: 12463 - DNA, 20 bp, Artificial Sequence
  Synthetic oligonucleotide; AGG chr11 5258863 5258882 5258879 +
gccacagaaagacctgccca

SEQ ID NO: 12464 - DNA, 20 bp, Artificial Sequence
  Synthetic oligonucleotide; GAG chr11 5258865 5258884 5258881 +
cacagaaagacctgcccaag

SEQ ID NO: 12465 - DNA, 20 bp, Artificial Sequence
  Synthetic oligonucleotide; GAG chr11 5258873 5258892 5258889 +
gacctgcccaaggagactct

SEQ ID NO: 12466 - DNA, 20 bp, Artificial Sequence
  Synthetic oligonucleotide; CAG chr11 5258878 5258897 5258894 +
gcccaaggagactctgagct

SEQ ID NO: 12467 - DNA, 20 bp, Artificial Sequence
  Synthetic oligonucleotide; TAG chr11 5258888 5258907 5258904 +
actctgagctcagacacgac

SEQ ID NO: 12468 - DNA, 20 bp, Artificial Sequence
  Synthetic oligonucleotide; TGG chr11 5258907 5258926 5258923 +
ctagtcctgcccccacctga

SEQ ID NO: 12469 - DNA, 20 bp, Artificial Sequence
  Synthetic oligonucleotide; TGG chr11 5258927 5258946 5258943 +
tggtccttccttactcaccc

SEQ ID NO: 12470 - DNA, 20 bp, Artificial Sequence
  Synthetic oligonucleotide; TAG chr11 5258930 5258949 5258946 +
tccttccttactcaccctgg

SEQ ID NO: 12471 - DNA, 20 bp, Artificial Sequence
  Synthetic oligonucleotide; AAG chr11 5258936 5258955 5258952 +
cttactcaccctggtagctg

SEQ ID NO: 12472 - DNA, 20 bp, Artificial Sequence
  Synthetic oligonucleotide; AAG chr11 5258942 5258961 5258958 +
caccctggtagctgaagaca

SEQ ID NO: 12473 - DNA, 20 bp, Artificial Sequence
  Synthetic oligonucleotide; AGG chr11 5258943 5258962 5258959 +
accctggtagctgaagacaa

SEQ ID NO: 12474 - DNA, 20 bp, Artificial Sequence
  Synthetic oligonucleotide; GGG chr11 5258944 5258963 5258960 +
ccctggtagctgaagacaaa

SEQ ID NO: 12475 - DNA, 20 bp, Artificial Sequence
  Synthetic oligonucleotide; TGG chr11 5258957 5258976 5258973 +
agacaaagggcatatattct

SEQ ID NO: 12476 - DNA, 20 bp, Artificial Sequence
  Synthetic oligonucleotide; GGG chr11 5258958 5258977 5258974 +
gacaaagggcatatattctt

SEQ ID NO: 12477 - DNA, 20 bp, Artificial Sequence
  Synthetic oligonucleotide; GAG chr11 5258960 5258979 5258976 +
caaagggcatatattcttgg

SEQ ID NO: 12478 - DNA, 20 bp, Artificial Sequence
  Synthetic oligonucleotide; TAG chr11 5258966 5258985 5258982 +
gcatatattcttgggagttc

SEQ ID NO: 12479 - DNA, 20 bp, Artificial Sequence
  Synthetic oligonucleotide; AGG chr11 5258967 5258986 5258983 +
catatattcttgggagttct

SEQ ID NO: 12480 - DNA, 20 bp, Artificial Sequence
  Synthetic oligonucleotide; GGG chr11 5258968 5258987 5258984 +
atatattcttgggagttcta

SEQ ID NO: 12481 - DNA, 20 bp, Artificial Sequence
  Synthetic oligonucleotide; CAG chr11 5258976 5258995 5258992 +
ttgggagttctagggtgccc

SEQ ID NO: 12482 - DNA, 20 bp, Artificial Sequence
  Synthetic oligonucleotide; CAG chr11 5258985 5259004 5259001 +
ctagggtgccccagcccccc

SEQ ID NO: 12483 - DNA, 20 bp, Artificial Sequence
  Synthetic oligonucleotide; TAG chr11 5259022 5259041 5259038 +
ctgcctctgctgatgctttc

SEQ ID NO: 12484 - DNA, 20 bp, Artificial Sequence
  Synthetic oligonucleotide; AAG chr11 5259026 5259045 5259042 +
ctctgctgatgctttctaga

SEQ ID NO: 12485 - DNA, 20 bp, Artificial Sequence
  Synthetic oligonucleotide; TGG chr11 5259039 5259058 5259055 +
ttctagaaagtgccacctcc

SEQ ID NO: 12486 - DNA, 20 bp, Artificial Sequence
  Synthetic oligonucleotide; CAG chr11 5259042 5259061 5259058 +
tagaaagtgccacctcctgg

SEQ ID NO: 12487 - DNA, 20 bp, Artificial Sequence
  Synthetic oligonucleotide; AGG chr11 5259043 5259062 5259059 +
agaaagtgccacctcctggc

SEQ ID NO: 12488 - DNA, 20 bp, Artificial Sequence
  Synthetic oligonucleotide; GAG chr11 5259045 5259064 5259061 +
aaagtgccacctcctggcag

SEQ ID NO: 12489 - DNA, 20 bp, Artificial Sequence
  Synthetic oligonucleotide; AGG chr11 5259046 5259065 5259062 +
aagtgccacctcctggcagg

SEQ ID NO: 12490 - DNA, 20 bp, Artificial Sequence
  Synthetic oligonucleotide; CAG chr11 5259054 5259073 5259070 +
cctcctggcaggaggccaac

SEQ ID NO: 12491 - DNA, 20 bp, Artificial Sequence
  Synthetic oligonucleotide; TAG chr11 5259065 5259084 5259081 +
gaggccaaccagcacaaaaa

SEQ ID NO: 12492 - DNA, 20 bp, Artificial Sequence
  Synthetic oligonucleotide; AAG chr11 5259084 5259103 5259100 +
atagtgcattgaacaaccaa

SEQ ID NO: 12493 - DNA, 20 bp, Artificial Sequence
  Synthetic oligonucleotide; AAG chr11 5259088 5259107 5259104 +
tgcattgaacaaccaaaagt

SEQ ID NO: 12494 - DNA, 20 bp, Artificial Sequence
  Synthetic oligonucleotide; AGG chr11 5259089 5259108 5259105 +
gcattgaacaaccaaaagta

SEQ ID NO: 12495 - DNA, 20 bp, Artificial Sequence
  Synthetic oligonucleotide; CAG chr11 5259099 5259118 5259115 +
accaaaagtaaggaccctca

SEQ ID NO: 12496 - DNA, 20 bp, Artificial Sequence
  Synthetic oligonucleotide; GAG chr11 5259101 5259120 5259117 +
caaaagtaaggaccctcaca

SEQ ID NO: 12497 - DNA, 20 bp, Artificial Sequence
  Synthetic oligonucleotide; TGG chr11 5259130 5259149 5259146 +
tcatcctctgccacctccat

SEQ ID NO: 12498 - DNA, 20 bp, Artificial Sequence
  Synthetic oligonucleotide; GAG chr11 5259132 5259151 5259148 +
atcctctgccacctccattg

SEQ ID NO: 12499 - DNA, 20 bp, Artificial Sequence
  Synthetic oligonucleotide; CAG chr11 5259135 5259154 5259151 +
ctctgccacctccattggag

SEQ ID NO: 12500 - DNA, 20 bp, Artificial Sequence
  Synthetic oligonucleotide; AGG chr11 5259136 5259155 5259152 +
tctgccacctccattggagc

SEQ ID NO: 12501 - DNA, 20 bp, Artificial Sequence
  Synthetic oligonucleotide; TGG chr11 5259139 5259158 5259155 +
gccacctccattggagcagg

SEQ ID NO: 12502 - DNA, 20 bp, Artificial Sequence
  Synthetic oligonucleotide; TGG chr11 5259151 5259170 5259167 +
ggagcaggtggttgtatcta

SEQ ID NO: 12503 - DNA, 20 bp, Artificial Sequence
  Synthetic oligonucleotide; GAG chr11 5259156 5259175 5259172 +
aggtggttgtatctatggct

SEQ ID NO: 12504 - DNA, 20 bp, Artificial Sequence
  Synthetic oligonucleotide; GAG chr11 5259158 5259177 5259174 +
gtggttgtatctatggctga

SEQ ID NO: 12505 - DNA, 20 bp, Artificial Sequence
  Synthetic oligonucleotide; CAG chr11 5259166 5259185 5259182 +
atctatggctgagagaccca

SEQ ID NO: 12506 - DNA, 20 bp, Artificial Sequence
  Synthetic oligonucleotide; TGG chr11 5259170 5259189 5259186 +
atggctgagagacccacaga

SEQ ID NO: 12507 - DNA, 20 bp, Artificial Sequence
  Synthetic oligonucleotide; AAG chr11 5259183 5259202 5259199 +
ccacagatggttcacgtcac

SEQ ID NO: 12508 - DNA, 20 bp, Artificial Sequence
  Synthetic oligonucleotide; CAG chr11 5259194 5259213 5259210 +
tcacgtcacaagactctgtg

SEQ ID NO: 12509 - DNA, 20 bp, Artificial Sequence
  Synthetic oligonucleotide; CAG chr11 5259205 5259224 5259221 +
gactctgtgcagacaaaccc

SEQ ID NO: 12510 - DNA, 20 bp, Artificial Sequence
  Synthetic oligonucleotide; CAG chr11 5259211 5259230 5259227 +
gtgcagacaaaccccagtac

SEQ ID NO: 12511 - DNA, 20 bp, Artificial Sequence
  Synthetic oligonucleotide; TGG chr11 5259216 5259235 5259232 +
gacaaaccccagtaccagcc

SEQ ID NO: 12512 - DNA, 20 bp, Artificial Sequence
  Synthetic oligonucleotide; GAG chr11 5259218 5259237 5259234 +
caaaccccagtaccagcctg

SEQ ID NO: 12513 - DNA, 20 bp, Artificial Sequence
  Synthetic oligonucleotide; TGG chr11 5259223 5259242 5259239 +
cccagtaccagcctggagtc

SEQ ID NO: 12514 - DNA, 20 bp, Artificial Sequence
  Synthetic oligonucleotide; TAG chr11 5259226 5259245 5259242 +
agtaccagcctggagtctgg

SEQ ID NO: 12515 - DNA, 20 bp, Artificial Sequence
  Synthetic oligonucleotide; TGG chr11 5259235 5259254 5259251 +
ctggagtctggtagacctga

SEQ ID NO: 12516 - DNA, 20 bp, Artificial Sequence
  Synthetic oligonucleotide; GGG chr11 5259236 5259255 5259252 +
tggagtctggtagacctgat

SEQ ID NO: 12517 - DNA, 20 bp, Artificial Sequence
  Synthetic oligonucleotide; TGG chr11 5259239 5259258 5259255 +
agtctggtagacctgatggg

SEQ ID NO: 12518 - DNA, 20 bp, Artificial Sequence
  Synthetic oligonucleotide; TAG chr11 5259243 5259262 5259259 +
tggtagacctgatgggtggc

SEQ ID NO: 12519 - DNA, 20 bp, Artificial Sequence
  Synthetic oligonucleotide; CAG chr11 5259249 5259268 5259265 +
acctgatgggtggctagatc

SEQ ID NO: 12520 - DNA, 20 bp, Artificial Sequence
  Synthetic oligonucleotide; AAG chr11 5259252 5259271 5259268 +
tgatgggtggctagatccag

SEQ ID NO: 12521 - DNA, 20 bp, Artificial Sequence
  Synthetic oligonucleotide; GAG chr11 5259254 5259273 5259270 +
atgggtggctagatccagaa

SEQ ID NO: 12522 - DNA, 20 bp, Artificial Sequence
  Synthetic oligonucleotide; GAG chr11 5259256 5259275 5259272 +
gggtggctagatccagaaga

SEQ ID NO: 12523 - DNA, 20 bp, Artificial Sequence
  Synthetic oligonucleotide; CAG chr11 5259272 5259291 5259288 +
aagagagataacaatcacta

SEQ ID NO: 12524 - DNA, 20 bp, Artificial Sequence
  Synthetic oligonucleotide; CGG chr11 5259277 5259296 5259293 +
agataacaatcactacagtt

SEQ ID NO: 12525 - DNA, 20 bp, Artificial Sequence
  Synthetic oligonucleotide; CAG chr11 5259284 5259303 5259300 +
aatcactacagttcggctct

SEQ ID NO: 12526 - DNA, 20 bp, Artificial Sequence
  Synthetic oligonucleotide; AGG chr11 5259285 5259304 5259301 +
atcactacagttcggctctc

SEQ ID NO: 12527 - DNA, 20 bp, Artificial Sequence
  Synthetic oligonucleotide; AAG chr11 5259288 5259307 5259304 +
actacagttcggctctcagg

SEQ ID NO: 12528 - DNA, 20 bp, Artificial Sequence
  Synthetic oligonucleotide; TAG chr11 5259300 5259319 5259316 +
ctctcaggaagccccacgcc

SEQ ID NO: 12529 - DNA, 20 bp, Artificial Sequence
  Synthetic oligonucleotide; AGG chr11 5259301 5259320 5259317 +
tctcaggaagccccacgcct

SEQ ID NO: 12530 - DNA, 20 bp, Artificial Sequence
  Synthetic oligonucleotide; AAG chr11 5259306 5259325 5259322 +
ggaagccccacgcctaggaa

SEQ ID NO: 12531 - DNA, 20 bp, Artificial Sequence
  Synthetic oligonucleotide; AGG chr11 5259307 5259326 5259323 +
gaagccccacgcctaggaaa

SEQ ID NO: 12532 - DNA, 20 bp, Artificial Sequence
  Synthetic oligonucleotide; GGG chr11 5259308 5259327 5259324 +
aagccccacgcctaggaaaa

SEQ ID NO: 12533 - DNA, 20 bp, Artificial Sequence
  Synthetic oligonucleotide; GGG chr11 5259309 5259328 5259325 +
agccccacgcctaggaaaag

SEQ ID NO: 12534 - DNA, 20 bp, Artificial Sequence
  Synthetic oligonucleotide; GGG chr11 5259310 5259329 5259326 +
gccccacgcctaggaaaagg

SEQ ID NO: 12535 - DNA, 20 bp, Artificial Sequence
  Synthetic oligonucleotide; AAG chr11 5259326 5259345 5259342 +
aagggggactgtgctacatc

SEQ ID NO: 12536 - DNA, 20 bp, Artificial Sequence
  Synthetic oligonucleotide; AGG chr11 5259327 5259346 5259343 +
agggggactgtgctacatca

SEQ ID NO: 12537 - DNA, 20 bp, Artificial Sequence
  Synthetic oligonucleotide; GGG chr11 5259328 5259347 5259344 +
gggggactgtgctacatcaa

SEQ ID NO: 12538 - DNA, 20 bp, Artificial Sequence
  Synthetic oligonucleotide; TGG chr11 5259340 5259359 5259356 +
tacatcaagggaacacctca

SEQ ID NO: 12539 - DNA, 20 bp, Artificial Sequence
  Synthetic oligonucleotide; GGG chr11 5259341 5259360 5259357 +
acatcaagggaacacctcat

SEQ ID NO: 12540 - DNA, 20 bp, Artificial Sequence
  Synthetic oligonucleotide; AAG chr11 5259348 5259367 5259364 +
gggaacacctcatgggacaa

SEQ ID NO: 12541 - DNA, 20 bp, Artificial Sequence
  Synthetic oligonucleotide; CAG chr11 5259354 5259373 5259370 +
acctcatgggacaaaagtct

SEQ ID NO: 12542 - DNA, 20 bp, Artificial Sequence
  Synthetic oligonucleotide; GAG chr11 5259361 5259380 5259377 +
gggacaaaagtctcagcctt

SEQ ID NO: 12543 - DNA, 20 bp, Artificial Sequence
  Synthetic oligonucleotide; AGG chr11 5259362 5259381 5259378 +
ggacaaaagtctcagccttg

SEQ ID NO: 12544 - DNA, 20 bp, Artificial Sequence
  Synthetic oligonucleotide; TAG chr11 5259367 5259386 5259383 +
aaagtctcagccttgaggcc

SEQ ID NO: 12545 - DNA, 20 bp, Artificial Sequence
  Synthetic oligonucleotide; CAG chr11 5259383 5259402 5259399 +
ggcctagactttccctctga

SEQ ID NO: 12546 - DNA, 20 bp, Artificial Sequence
  Synthetic oligonucleotide; GAG chr11 5259385 5259404 5259401 +
cctagactttccctctgaca

SEQ ID NO: 12547 - DNA, 20 bp, Artificial Sequence
  Synthetic oligonucleotide; AAG chr11 5259395 5259414 5259411 +
ccctctgacagagcctaccc

SEQ ID NO: 12548 - DNA, 20 bp, Artificial Sequence
  Synthetic oligonucleotide; GAG chr11 5259399 5259418 5259415 +
ctgacagagcctacccaagt

SEQ ID NO: 12549 - DNA, 20 bp, Artificial Sequence
  Synthetic oligonucleotide; AAG chr11 5259402 5259421 5259418 +
acagagcctacccaagtgag

SEQ ID NO: 12550 - DNA, 20 bp, Artificial Sequence
  Synthetic oligonucleotide; AGG chr11 5259403 5259422 5259419 +
cagagcctacccaagtgaga

SEQ ID NO: 12551 - DNA, 20 bp, Artificial Sequence
  Synthetic oligonucleotide; CAG chr11 5259409 5259428 5259425 +
ctacccaagtgagaaggaac

SEQ ID NO: 12552 - DNA, 20 bp, Artificial Sequence
  Synthetic oligonucleotide; TGG chr11 5259423 5259442 5259439 +
aggaaccagaaaactaactc

SEQ ID NO: 12553 - DNA, 20 bp, Artificial Sequence
  Synthetic oligonucleotide; AAG chr11 5259439 5259458 5259455 +
actctggtaatatgaaaaac

SEQ ID NO: 12554 - DNA, 20 bp, Artificial Sequence
  Synthetic oligonucleotide; AGG chr11 5259440 5259459 5259456 +
ctctggtaatatgaaaaaca

SEQ ID NO: 12555 - DNA, 20 bp, Artificial Sequence
  Synthetic oligonucleotide; TAG chr11 5259471 5259490 5259487 +
caccccccaaaaaatcatac

SEQ ID NO: 12556 - DNA, 20 bp, Artificial Sequence
  Synthetic oligonucleotide; CAG chr11 5259479 5259498 5259495 +
aaaaaatcatactagctcac

SEQ ID NO: 12557 - DNA, 20 bp, Artificial Sequence
  Synthetic oligonucleotide; AAG chr11 5259497 5259516 5259513 +
accagcaatgcatccaaacc

SEQ ID NO: 12558 - DNA, 20 bp, Artificial Sequence
  Synthetic oligonucleotide; AAG chr11 5259500 5259519 5259516 +
agcaatgcatccaaaccaag

SEQ ID NO: 12559 - DNA, 20 bp, Artificial Sequence
  Synthetic oligonucleotide; CAG chr11 5259531 5259550 5259547 +
gatttacctgaaaaataatt

SEQ ID NO: 12560 - DNA, 20 bp, Artificial Sequence
  Synthetic oligonucleotide; AAG chr11 5259534 5259553 5259550 +
ttacctgaaaaataattcag

SEQ ID NO: 12561 - DNA, 20 bp, Artificial Sequence
  Synthetic oligonucleotide; AGG chr11 5259535 5259554 5259551 +
tacctgaaaaataattcaga

SEQ ID NO: 12562 - DNA, 20 bp, Artificial Sequence
  Synthetic oligonucleotide; CAG chr11 5259539 5259558 5259555 +
tgaaaaataattcagaaggt

SEQ ID NO: 12563 - DNA, 20 bp, Artificial Sequence
  Synthetic oligonucleotide; AAG chr11 5259547 5259566 5259563 +
aattcagaaggtcagttatt

SEQ ID NO: 12564 - DNA, 20 bp, Artificial Sequence
  Synthetic oligonucleotide; AAG chr11 5259556 5259575 5259572 +
ggtcagttattaagctaatc

SEQ ID NO: 12565 - DNA, 20 bp, Artificial Sequence
  Synthetic oligonucleotide; AGG chr11 5259557 5259576 5259573 +
gtcagttattaagctaatca

SEQ ID NO: 12566 - DNA, 20 bp, Artificial Sequence
  Synthetic oligonucleotide; GAG chr11 5259559 5259578 5259575 +
cagttattaagctaatcaag

SEQ ID NO: 12567 - DNA, 20 bp, Artificial Sequence
  Synthetic oligonucleotide; AGG chr11 5259560 5259579 5259576 +
agttattaagctaatcaagg

SEQ ID NO: 12568 - DNA, 20 bp, Artificial Sequence
  Synthetic oligonucleotide; GAG chr11 5259568 5259587 5259584 +
agctaatcaaggaggcatcc

SEQ ID NO: 12569 - DNA, 20 bp, Artificial Sequence
  Synthetic oligonucleotide; AGG chr11 5259569 5259588 5259585 +
gctaatcaaggaggcatccg

SEQ ID NO: 12570 - DNA, 20 bp, Artificial Sequence
  Synthetic oligonucleotide; AAG chr11 5259572 5259591 5259588 +
aatcaaggaggcatccgagg

SEQ ID NO: 12571 - DNA, 20 bp, Artificial Sequence
  Synthetic oligonucleotide; AGG chr11 5259573 5259592 5259589 +
atcaaggaggcatccgagga

SEQ ID NO: 12572 - DNA, 20 bp, Artificial Sequence
  Synthetic oligonucleotide; AAG chr11 5259578 5259597 5259594 +
ggaggcatccgaggaaggtg

SEQ ID NO: 12573 - DNA, 20 bp, Artificial Sequence
  Synthetic oligonucleotide; AAG chr11 5259612 5259631 5259628 +
aaaaaccaaaaatatgatac

SEQ ID NO: 12574 - DNA, 20 bp, Artificial Sequence
  Synthetic oligonucleotide; GAG chr11 5259619 5259638 5259635 +
aaaaatatgatacaagaaat

SEQ ID NO: 12575 - DNA, 20 bp, Artificial Sequence
  Synthetic oligonucleotide; AGG chr11 5259620 5259639 5259636 +
aaaatatgatacaagaaatg

SEQ ID NO: 12576 - DNA, 20 bp, Artificial Sequence
  Synthetic oligonucleotide; GGG chr11 5259621 5259640 5259637 +
aaatatgatacaagaaatga

SEQ ID NO: 12577 - DNA, 20 bp, Artificial Sequence
  Synthetic oligonucleotide; GGG chr11 5259622 5259641 5259638 +
aatatgatacaagaaatgag

SEQ ID NO: 12578 - DNA, 20 bp, Artificial Sequence
  Synthetic oligonucleotide; GAG chr11 5259624 5259643 5259640 +
tatgatacaagaaatgaggg

SEQ ID NO: 12579 - DNA, 20 bp, Artificial Sequence
  Synthetic oligonucleotide; CAG chr11 5259634 5259653 5259650 +
gaaatgaggggagaaatctt

SEQ ID NO: 12580 - DNA, 20 bp, Artificial Sequence
  Synthetic oligonucleotide; AAG chr11 5259640 5259659 5259656 +
aggggagaaatcttcagtta

SEQ ID NO: 12581 - DNA, 20 bp, Artificial Sequence
  Synthetic oligonucleotide; GAG chr11 5259642 5259661 5259658 +
gggagaaatcttcagttaaa

SEQ ID NO: 12582 - DNA, 20 bp, Artificial Sequence
  Synthetic oligonucleotide; TAG chr11 5259646 5259665 5259662 +
gaaatcttcagttaaagaga

SEQ ID NO: 12583 - DNA, 20 bp, Artificial Sequence
  Synthetic oligonucleotide; CAG chr11 5259674 5259693 5259690 +
ataaaaaacattcaaaactt

SEQ ID NO: 12584 - DNA, 20 bp, Artificial Sequence
  Synthetic oligonucleotide; AGG chr11 5259675 5259694 5259691 +
taaaaaacattcaaaacttc

SEQ ID NO: 12585 - DNA, 20 bp, Artificial Sequence
  Synthetic oligonucleotide; TGG chr11 5259684 5259703 5259700 +
ttcaaaacttcaggaaacaa

SEQ ID NO: 12586 - DNA, 20 bp, Artificial Sequence
  Synthetic oligonucleotide; TGG chr11 5259692 5259711 5259708 +
ttcaggaaacaatggatgaa

SEQ ID NO: 12587 - DNA, 20 bp, Artificial Sequence
  Synthetic oligonucleotide; TAG chr11 5259704 5259723 5259720 +
tggatgaatggatgcactta

SEQ ID NO: 12588 - DNA, 20 bp, Artificial Sequence
  Synthetic oligonucleotide; TAG chr11 5259722 5259741 5259738 +
tatagaaatgcaaaatgctc

SEQ ID NO: 12589 - DNA, 20 bp, Artificial Sequence
  Synthetic oligonucleotide; AAG chr11 5259726 5259745 5259742 +
gaaatgcaaaatgctctaga

SEQ ID NO: 12590 - DNA, 20 bp, Artificial Sequence
  Synthetic oligonucleotide; CAG chr11 5259732 5259751 5259748 +
caaaatgctctagaaagtct

SEQ ID NO: 12591 - DNA, 20 bp, Artificial Sequence
  Synthetic oligonucleotide; TAG chr11 5259738 5259757 5259754 +
gctctagaaagtctcagcaa

SEQ ID NO: 12592 - DNA, 20 bp, Artificial Sequence
  Synthetic oligonucleotide; AAG chr11 5259746 5259765 5259762 +
aagtctcagcaatagaatcc

SEQ ID NO: 12593 - DNA, 20 bp, Artificial Sequence
  Synthetic oligonucleotide; CAG chr11 5259749 5259768 5259765 +
tctcagcaatagaatccaag

SEQ ID NO: 12594 - DNA, 20 bp, Artificial Sequence
  Synthetic oligonucleotide; AAG chr11 5259752 5259771 5259768 +
cagcaatagaatccaagcag

SEQ ID NO: 12595 - DNA, 20 bp, Artificial Sequence
  Synthetic oligonucleotide; CAG chr11 5259760 5259779 5259776 +
gaatccaagcagaagaaatt

SEQ ID NO: 12596 - DNA, 20 bp, Artificial Sequence
  Synthetic oligonucleotide; GAG chr11 5259762 5259781 5259778 +
atccaagcagaagaaattca

SEQ ID NO: 12597 - DNA, 20 bp, Artificial Sequence
  Synthetic oligonucleotide; AAG chr11 5259769 5259788 5259785 +
cagaagaaattcagagcttg

SEQ ID NO: 12598 - DNA, 20 bp, Artificial Sequence
  Synthetic oligonucleotide; AAG chr11 5259775 5259794 5259791 +
aaattcagagcttgaagaca

SEQ ID NO: 12599 - DNA, 20 bp, Artificial Sequence
  Synthetic oligonucleotide; AAG chr11 5259802 5259821 5259818 +
tgaattaacccaatccaaca

SEQ ID NO: 12600 - DNA, 20 bp, Artificial Sequence
  Synthetic oligonucleotide; AAG chr11 5259808 5259827 5259824 +
aacccaatccaacaaagaca

SEQ ID NO: 12601 - DNA, 20 bp, Artificial Sequence
  Synthetic oligonucleotide; AAG chr11 5259815 5259834 5259831 +
tccaacaaagacaaagaaaa

SEQ ID NO: 12602 - DNA, 20 bp, Artificial Sequence
  Synthetic oligonucleotide; AAG chr11 5259821 5259840 5259837 +
aaagacaaagaaaaaagaat

SEQ ID NO: 12603 - DNA, 20 bp, Artificial Sequence
  Synthetic oligonucleotide; AAG chr11 5259836 5259855 5259852 +
agaataagaaaatatgaaca

SEQ ID NO: 12604 - DNA, 20 bp, Artificial Sequence
  Synthetic oligonucleotide; AAG chr11 5259844 5259863 5259860 +
aaaatatgaacaaagcctcc

SEQ ID NO: 12605 - DNA, 20 bp, Artificial Sequence
  Synthetic oligonucleotide; TGG chr11 5259852 5259871 5259868 +
aacaaagcctccaagaaatc

SEQ ID NO: 12606 - DNA, 20 bp, Artificial Sequence
  Synthetic oligonucleotide; GGG chr11 5259853 5259872 5259869 +
acaaagcctccaagaaatct

SEQ ID NO: 12607 - DNA, 20 bp, Artificial Sequence
  Synthetic oligonucleotide; AAG chr11 5259878 5259897 5259894 +
tatgttaaacaatcaaacct

SEQ ID NO: 12608 - DNA, 20 bp, Artificial Sequence
  Synthetic oligonucleotide; CAG chr11 5259887 5259906 5259903 +
caatcaaacctaagaataat

SEQ ID NO: 12609 - DNA, 20 bp, Artificial Sequence
  Synthetic oligonucleotide; GAG chr11 5259897 5259916 5259913 +
taagaataatcagcattcct

SEQ ID NO: 12610 - DNA, 20 bp, Artificial Sequence
  Synthetic oligonucleotide; AAG chr11 5259901 5259920 5259917 +
aataatcagcattcctgaga

SEQ ID NO: 12611 - DNA, 20 bp, Artificial Sequence
  Synthetic oligonucleotide; AAG chr11 5259904 5259923 5259920 +
aatcagcattcctgagaaag

SEQ ID NO: 12612 - DNA, 20 bp, Artificial Sequence
  Synthetic oligonucleotide; GAG chr11 5259906 5259925 5259922 +
tcagcattcctgagaaagaa

SEQ ID NO: 12613 - DNA, 20 bp, Artificial Sequence
  Synthetic oligonucleotide; AAG chr11 5259917 5259936 5259933 +
gagaaagaagagaaatctaa

SEQ ID NO: 12614 - DNA, 20 bp, Artificial Sequence
  Synthetic oligonucleotide; TGG chr11 5259922 5259941 5259938 +
agaagagaaatctaaaagtt

SEQ ID NO: 12615 - DNA, 20 bp, Artificial Sequence
  Synthetic oligonucleotide; CAG chr11 5259935 5259954 5259951 +
aaaagtttggaaaacttatc

SEQ ID NO: 12616 - DNA, 20 bp, Artificial Sequence
  Synthetic oligonucleotide; AGG chr11 5259936 5259955 5259952 +
aaagtttggaaaacttatcc

SEQ ID NO: 12617 - DNA, 20 bp, Artificial Sequence
  Synthetic oligonucleotide; GGG chr11 5259937 5259956 5259953 +
aagtttggaaaacttatcca

SEQ ID NO: 12618 - DNA, 20 bp, Artificial Sequence
  Synthetic oligonucleotide; AAG chr11 5259948 5259967 5259964 +
acttatccagggaaataatc

SEQ ID NO: 12619 - DNA, 20 bp, Artificial Sequence
  Synthetic oligonucleotide; AGG chr11 5259949 5259968 5259965 +
cttatccagggaaataatca

SEQ ID NO: 12620 - DNA, 20 bp, Artificial Sequence
  Synthetic oligonucleotide; TAG chr11 5259971 5259990 5259987 +
gaaaacttcccccaccttgc

SEQ ID NO: 12621 - DNA, 20 bp, Artificial Sequence
  Synthetic oligonucleotide; GAG chr11 5259973 5259992 5259989 +
aaacttcccccaccttgcta

SEQ ID NO: 12622 - DNA, 20 bp, Artificial Sequence
  Synthetic oligonucleotide; TAG chr11 5259979 5259998 5259995 +
cccccaccttgctagagacc

SEQ ID NO: 12623 - DNA, 20 bp, Artificial Sequence
  Synthetic oligonucleotide; AAG chr11 5259994 5260013 5260010 +
agacctagatatccaaatac

SEQ ID NO: 12624 - DNA, 20 bp, Artificial Sequence
  Synthetic oligonucleotide; AAG chr11 5259997 5260016 5260013 +
cctagatatccaaatacaag

SEQ ID NO: 12625 - DNA, 20 bp, Artificial Sequence
  Synthetic oligonucleotide; TGG chr11 5260013 5260032 5260029 +
caagaagctcaataaacacc

SEQ ID NO: 12626 - DNA, 20 bp, Artificial Sequence
  Synthetic oligonucleotide; GGG chr11 5260014 5260033 5260030 +
aagaagctcaataaacacct

SEQ ID NO: 12627 - DNA, 20 bp, Artificial Sequence
  Synthetic oligonucleotide; TAG chr11 5260043 5260062 5260059 +
attgcaaaaatatcattgcc

SEQ ID NO: 12628 - DNA, 20 bp, Artificial Sequence
  Synthetic oligonucleotide; AGG chr11 5260044 5260063 5260060 +
ttgcaaaaatatcattgcct

SEQ ID NO: 12629 - DNA, 20 bp, Artificial Sequence
  Synthetic oligonucleotide; CAG chr11 5260058 5260077 5260074 +
ttgcctaggtacattgtcat

SEQ ID NO: 12630 - DNA, 20 bp, Artificial Sequence
  Synthetic oligonucleotide; GAG chr11 5260060 5260079 5260076 +
gcctaggtacattgtcatca

SEQ ID NO: 12631 - DNA, 20 bp, Artificial Sequence
  Synthetic oligonucleotide; AAG chr11 5260069 5260088 5260085 +
cattgtcatcagagtatcca

SEQ ID NO: 12632 - DNA, 20 bp, Artificial Sequence
  Synthetic oligonucleotide; AAG chr11 5260079 5260098 5260095 +
agagtatccaaagttatcta

SEQ ID NO: 12633 - DNA, 20 bp, Artificial Sequence
  Synthetic oligonucleotide; AAG chr11 5260085 5260104 5260101 +
tccaaagttatctaaagaca

SEQ ID NO: 12634 - DNA, 20 bp, Artificial Sequence
  Synthetic oligonucleotide; GAG chr11 5260087 5260106 5260103 +
caaagttatctaaagacaaa

SEQ ID NO: 12635 - DNA, 20 bp, Artificial Sequence
  Synthetic oligonucleotide; AAG chr11 5260096 5260115 5260112 +
ctaaagacaaagagaatctt

SEQ ID NO: 12636 - DNA, 20 bp, Artificial Sequence
  Synthetic oligonucleotide; GAG chr11 5260098 5260117 5260114 +
aaagacaaagagaatcttaa

SEQ ID NO: 12637 - DNA, 20 bp, Artificial Sequence
  Synthetic oligonucleotide; GAG chr11 5260105 5260124 5260121 +
aagagaatcttaagagctgt

SEQ ID NO: 12638 - DNA, 20 bp, Artificial Sequence
  Synthetic oligonucleotide; AGG chr11 5260106 5260125 5260122 +
agagaatcttaagagctgtg

SEQ ID NO: 12639 - DNA, 20 bp, Artificial Sequence
  Synthetic oligonucleotide; CAG chr11 5260118 5260137 5260134 +
gagctgtgaggtgaaactac

SEQ ID NO: 12640 - DNA, 20 bp, Artificial Sequence
  Synthetic oligonucleotide; AGG chr11 5260119 5260138 5260135 +
agctgtgaggtgaaactacc

SEQ ID NO: 12641 - DNA, 20 bp, Artificial Sequence
  Synthetic oligonucleotide; AAG chr11 5260132 5260151 5260148 +
aactaccaggtaacctatga

SEQ ID NO: 12642 - DNA, 20 bp, Artificial Sequence
  Synthetic oligonucleotide; CAG chr11 5260144 5260163 5260160 +
acctatgaaagaaaacctat

SEQ ID NO: 12643 - DNA, 20 bp, Artificial Sequence
  Synthetic oligonucleotide; CAG chr11 5260152 5260171 5260168 +
aagaaaacctatcagattaa

SEQ ID NO: 12644 - DNA, 20 bp, Artificial Sequence
  Synthetic oligonucleotide; CAG chr11 5260155 5260174 5260171 +
aaaacctatcagattaacag

SEQ ID NO: 12645 - DNA, 20 bp, Artificial Sequence
  Synthetic oligonucleotide; CAG chr11 5260164 5260183 5260180 +
cagattaacagcagatttct

SEQ ID NO: 12646 - DNA, 20 bp, Artificial Sequence
  Synthetic oligonucleotide; CAG chr11 5260167 5260186 5260183 +
attaacagcagatttctcag

SEQ ID NO: 12647 - DNA, 20 bp, Artificial Sequence
  Synthetic oligonucleotide; AAG chr11 5260179 5260198 5260195 +
tttctcagcagaaaccgtaa

SEQ ID NO: 12648 - DNA, 20 bp, Artificial Sequence
  Synthetic oligonucleotide; TAG chr11 5260183 5260202 5260199 +
tcagcagaaaccgtaaaagc

SEQ ID NO: 12649 - DNA, 20 bp, Artificial Sequence
  Synthetic oligonucleotide; AAG chr11 5260186 5260205 5260202 +
gcagaaaccgtaaaagctag

SEQ ID NO: 12650 - DNA, 20 bp, Artificial Sequence
  Synthetic oligonucleotide; TGG chr11 5260195 5260214 5260211 +
gtaaaagctagaagtgaata

SEQ ID NO: 12651 - DNA, 20 bp, Artificial Sequence
  Synthetic oligonucleotide; CAG chr11 5260207 5260226 5260223 +
agtgaatatggccctatctt

SEQ ID NO: 12652 - DNA, 20 bp, Artificial Sequence
  Synthetic oligonucleotide; CAG chr11 5260232 5260251 5260248 +
ttcttaaacaaaacaattat

SEQ ID NO: 12653 - DNA, 20 bp, Artificial Sequence
  Synthetic oligonucleotide; AAG chr11 5260237 5260256 5260253 +
aaacaaaacaattatcagcc

SEQ ID NO: 12654 - DNA, 20 bp, Artificial Sequence
  Synthetic oligonucleotide; CAG chr11 5260251 5260270 5260267 +
tcagccaagaattttatatc

SEQ ID NO: 12655 - DNA, 20 bp, Artificial Sequence
  Synthetic oligonucleotide; AAG chr11 5260261 5260280 5260277 +
attttatatccagtgaaact

SEQ ID NO: 12656 - DNA, 20 bp, Artificial Sequence
  Synthetic oligonucleotide; AAG chr11 5260275 5260294 5260291 +
gaaactaagcttcacaaatg

SEQ ID NO: 12657 - DNA, 20 bp, Artificial Sequence
  Synthetic oligonucleotide; CAG chr11 5260286 5260305 5260302 +
tcacaaatgaagaaaataca

SEQ ID NO: 12658 - DNA, 20 bp, Artificial Sequence
  Synthetic oligonucleotide; CAG chr11 5260296 5260315 5260312 +
agaaaatacacagtgttttt

SEQ ID NO: 12659 - DNA, 20 bp, Artificial Sequence
  Synthetic oligonucleotide; GAG chr11 5260312 5260331 5260328 +
ttttcagaaaaacaaatgct

SEQ ID NO: 12660 - DNA, 20 bp, Artificial Sequence
  Synthetic oligonucleotide; GAG chr11 5260314 5260333 5260330 +
ttcagaaaaacaaatgctga

SEQ ID NO: 12661 - DNA, 20 bp, Artificial Sequence
  Synthetic oligonucleotide; CGG chr11 5260321 5260340 5260337 +
aaacaaatgctgagagaatt

SEQ ID NO: 12662 - DNA, 20 bp, Artificial Sequence
  Synthetic oligonucleotide; AAG chr11 5260331 5260350 5260347 +
tgagagaattcggcactacc

SEQ ID NO: 12663 - DNA, 20 bp, Artificial Sequence
  Synthetic oligonucleotide; AAG chr11 5260344 5260363 5260360 +
cactaccaagccaacactac

SEQ ID NO: 12664 - DNA, 20 bp, Artificial Sequence
  Synthetic oligonucleotide; AAG chr11 5260356 5260375 5260372 +
aacactacaagaactgataa

SEQ ID NO: 12665 - DNA, 20 bp, Artificial Sequence
  Synthetic oligonucleotide; AGG chr11 5260357 5260376 5260373 +
acactacaagaactgataaa

SEQ ID NO: 12666 - DNA, 20 bp, Artificial Sequence
  Synthetic oligonucleotide; GAG chr11 5260359 5260378 5260375 +
actacaagaactgataaaag

SEQ ID NO: 12667 - DNA, 20 bp, Artificial Sequence
  Synthetic oligonucleotide; TGG chr11 5260384 5260403 5260400 +
ctaaatcttgaaataaaccc

SEQ ID NO: 12668 - DNA, 20 bp, Artificial Sequence
  Synthetic oligonucleotide; AAG chr11 5260387 5260406 5260403 +
aatcttgaaataaaccctgg

SEQ ID NO: 12669 - DNA, 20 bp, Artificial Sequence
  Synthetic oligonucleotide; CAG chr11 5260400 5260419 5260416 +
accctggaagcacatcaaaa

SEQ ID NO: 12670 - DNA, 20 bp, Artificial Sequence
  Synthetic oligonucleotide; AAG chr11 5260413 5260432 5260429 +
atcaaaacagaacctcttta

SEQ ID NO: 12671 - DNA, 20 bp, Artificial Sequence
  Synthetic oligonucleotide; TAG chr11 5260427 5260446 5260443 +
tctttaaagcataaatccca

SEQ ID NO: 12672 - DNA, 20 bp, Artificial Sequence
  Synthetic oligonucleotide; AGG chr11 5260428 5260447 5260444 +
ctttaaagcataaatcccat

SEQ ID NO: 12673 - DNA, 20 bp, Artificial Sequence
  Synthetic oligonucleotide; CAG chr11 5260449 5260468 5260465 +
ggacatatacaacaaaaata

SEQ ID NO: 12674 - DNA, 20 bp, Artificial Sequence
  Synthetic oligonucleotide; AAG chr11 5260457 5260476 5260473 +
acaacaaaaatacagataaa

SEQ ID NO: 12675 - DNA, 20 bp, Artificial Sequence
  Synthetic oligonucleotide; CAG chr11 5260465 5260484 5260481 +
aatacagataaaaagataca

SEQ ID NO: 12676 - DNA, 20 bp, Artificial Sequence
  Synthetic oligonucleotide; AGG chr11 5260466 5260485 5260482 +
atacagataaaaagatacac

SEQ ID NO: 12677 - DNA, 20 bp, Artificial Sequence
  Synthetic oligonucleotide; AAG chr11 5260483 5260502 5260499 +
cacaggcaacaaataccacg

SEQ ID NO: 12678 - DNA, 20 bp, Artificial Sequence
  Synthetic oligonucleotide; TGG chr11 5260488 5260507 5260504 +
gcaacaaataccacgaagaa

SEQ ID NO: 12679 - DNA, 20 bp, Artificial Sequence
  Synthetic oligonucleotide; TAG chr11 5260493 5260512 5260509 +
aaataccacgaagaatggaa

SEQ ID NO: 12680 - DNA, 20 bp, Artificial Sequence
  Synthetic oligonucleotide; TGG chr11 5260530 5260549 5260546 +
atactgatgttgaatgtaaa

SEQ ID NO: 12681 - DNA, 20 bp, Artificial Sequence
  Synthetic oligonucleotide; AAG chr11 5260551 5260570 5260567 +
ggactaaatgctccacttaa

SEQ ID NO: 12682 - DNA, 20 bp, Artificial Sequence
  Synthetic oligonucleotide; CAG chr11 5260557 5260576 5260573 +
aatgctccacttaaaagata

SEQ ID NO: 12683 - DNA, 20 bp, Artificial Sequence
  Synthetic oligonucleotide; CAG chr11 5260565 5260584 5260581 +
acttaaaagatacagaattg

SEQ ID NO: 12684 - DNA, 20 bp, Artificial Sequence
  Synthetic oligonucleotide; AAG chr11 5260575 5260594 5260591 +
tacagaattgcagaatgaat

SEQ ID NO: 12685 - DNA, 20 bp, Artificial Sequence
  Synthetic oligonucleotide; CAG chr11 5260589 5260608 5260605 +
atgaataagaattcaccaac

SEQ ID NO: 12686 - DNA, 20 bp, Artificial Sequence
  Synthetic oligonucleotide; CAG chr11 5260606 5260625 5260622 +
aaccagttatctgccgcctt

SEQ ID NO: 12687 - DNA, 20 bp, Artificial Sequence
  Synthetic oligonucleotide; AGG chr11 5260607 5260626 5260623 +
accagttatctgccgccttc

SEQ ID NO: 12688 - DNA, 20 bp, Artificial Sequence
  Synthetic oligonucleotide; GAG chr11 5260609 5260628 5260625 +
cagttatctgccgccttcag

SEQ ID NO: 12689 - DNA, 20 bp, Artificial Sequence
  Synthetic oligonucleotide; AAG chr11 5260627 5260646 5260643 +
aggagactcacctaacacat

SEQ ID NO: 12690 - DNA, 20 bp, Artificial Sequence
  Synthetic oligonucleotide; AGG chr11 5260628 5260647 5260644 +
ggagactcacctaacacata

SEQ ID NO: 12691 - DNA, 20 bp, Artificial Sequence
  Synthetic oligonucleotide; AAG chr11 5260645 5260664 5260661 +
ataaggactcacataaactt

SEQ ID NO: 12692 - DNA, 20 bp, Artificial Sequence
  Synthetic oligonucleotide; AGG chr11 5260646 5260665 5260662 +
taaggactcacataaactta

SEQ ID NO: 12693 - DNA, 20 bp, Artificial Sequence
  Synthetic oligonucleotide; AAG chr11 5260651 5260670 5260667 +
actcacataaacttaaggta

SEQ ID NO: 12694 - DNA, 20 bp, Artificial Sequence
  Synthetic oligonucleotide; AGG chr11 5260652 5260671 5260668 +
ctcacataaacttaaggtaa

SEQ ID NO: 12695 - DNA, 20 bp, Artificial Sequence
  Synthetic oligonucleotide; GGG chr11 5260653 5260672 5260669 +
tcacataaacttaaggtaaa

SEQ ID NO: 12696 - DNA, 20 bp, Artificial Sequence
  Synthetic oligonucleotide; GGG chr11 5260654 5260673 5260670 +
cacataaacttaaggtaaag

SEQ ID NO: 12697 - DNA, 20 bp, Artificial Sequence
  Synthetic oligonucleotide; TGG chr11 5260657 5260676 5260673 +
ataaacttaaggtaaagggg

SEQ ID NO: 12698 - DNA, 20 bp, Artificial Sequence
  Synthetic oligonucleotide; TGG chr11 5260680 5260699 5260696 +
aaaatgacattccacacaaa

SEQ ID NO: 12699 - DNA, 20 bp, Artificial Sequence
  Synthetic oligonucleotide; AAG chr11 5260690 5260709 5260706 +
tccacacaaatggacaccaa

SEQ ID NO: 12700 - DNA, 20 bp, Artificial Sequence
  Synthetic oligonucleotide; GAG chr11 5260694 5260713 5260710 +
cacaaatggacaccaaaagc

SEQ ID NO: 12701 - DNA, 20 bp, Artificial Sequence
  Synthetic oligonucleotide; AAG chr11 5260700 5260719 5260716 +
tggacaccaaaagcgagcca

SEQ ID NO: 12702 - DNA, 20 bp, Artificial Sequence
  Synthetic oligonucleotide; CAG chr11 5260703 5260722 5260719 +
acaccaaaagcgagccaaag

SEQ ID NO: 12703 - DNA, 20 bp, Artificial Sequence
  Synthetic oligonucleotide; CAG chr11 5260718 5260737 5260734 +
caaagcagctattcttatgt

SEQ ID NO: 12704 - DNA, 20 bp, Artificial Sequence
  Synthetic oligonucleotide; AAG chr11 5260736 5260755 5260752 +
gtcagacaaaacaaacttta

SEQ ID NO: 12705 - DNA, 20 bp, Artificial Sequence
  Synthetic oligonucleotide; CAG chr11 5260742 5260761 5260758 +
caaaacaaactttaaagaaa

SEQ ID NO: 12706 - DNA, 20 bp, Artificial Sequence
  Synthetic oligonucleotide; CAG chr11 5260745 5260764 5260761 +
aacaaactttaaagaaacag

SEQ ID NO: 12707 - DNA, 20 bp, Artificial Sequence
  Synthetic oligonucleotide; AAG chr11 5260754 5260773 5260770 +
taaagaaacagcagttaaaa

SEQ ID NO: 12708 - DNA, 20 bp, Artificial Sequence
  Synthetic oligonucleotide; AAG chr11 5260760 5260779 5260776 +
aacagcagttaaaaaagaca

SEQ ID NO: 12709 - DNA, 20 bp, Artificial Sequence
  Synthetic oligonucleotide; GAG chr11 5260762 5260781 5260778 +
cagcagttaaaaaagacaaa

SEQ ID NO: 12710 - DNA, 20 bp, Artificial Sequence
  Synthetic oligonucleotide; AGG chr11 5260763 5260782 5260779 +
agcagttaaaaaagacaaag

SEQ ID NO: 12711 - DNA, 20 bp, Artificial Sequence
  Synthetic oligonucleotide; GGG chr11 5260764 5260783 5260780 +
gcagttaaaaaagacaaaga

SEQ ID NO: 12712 - DNA, 20 bp, Artificial Sequence
  Synthetic oligonucleotide; AAG chr11 5260784 5260803 5260800 +
gggacatcatataatgataa

SEQ ID NO: 12713 - DNA, 20 bp, Artificial Sequence
  Synthetic oligonucleotide; TGG chr11 5260798 5260817 5260814 +
tgataaaagcccttgtccaa

SEQ ID NO: 12714 - DNA, 20 bp, Artificial Sequence
  Synthetic oligonucleotide; GGG chr11 5260799 5260818 5260815 +
gataaaagcccttgtccaat

SEQ ID NO: 12715 - DNA, 20 bp, Artificial Sequence
  Synthetic oligonucleotide; GAG chr11 5260801 5260820 5260817 +
taaaagcccttgtccaatgg

SEQ ID NO: 12716 - DNA, 20 bp, Artificial Sequence
  Synthetic oligonucleotide; TGG chr11 5260839 5260858 5260855 +
aatatatatgcatctaatac

SEQ ID NO: 12717 - DNA, 20 bp, Artificial Sequence
  Synthetic oligonucleotide; GAG chr11 5260841 5260860 5260857 +
tatatatgcatctaatactg

SEQ ID NO: 12718 - DNA, 20 bp, Artificial Sequence
  Synthetic oligonucleotide; TAG chr11 5260871 5260890 5260887 +
atttataaaacaattactac

SEQ ID NO: 12719 - DNA, 20 bp, Artificial Sequence
  Synthetic oligonucleotide; TAG chr11 5260876 5260895 5260892 +
taaaacaattactactagac

SEQ ID NO: 12720 - DNA, 20 bp, Artificial Sequence
  Synthetic oligonucleotide; CAG chr11 5260880 5260899 5260896 +
acaattactactagactaga

SEQ ID NO: 12721 - DNA, 20 bp, Artificial Sequence
  Synthetic oligonucleotide; TAG chr11 5260894 5260913 5260910 +
actagacagcaacataataa

SEQ ID NO: 12722 - DNA, 20 bp, Artificial Sequence
  Synthetic oligonucleotide; TGG chr11 5260897 5260916 5260913 +
agacagcaacataataatag

SEQ ID NO: 12723 - DNA, 20 bp, Artificial Sequence
  Synthetic oligonucleotide; GGG chr11 5260898 5260917 5260914 +
gacagcaacataataatagt

SEQ ID NO: 12724 - DNA, 20 bp, Artificial Sequence
  Synthetic oligonucleotide; GGG chr11 5260899 5260918 5260915 +
acagcaacataataatagtg

SEQ ID NO: 12725 - DNA, 20 bp, Artificial Sequence
  Synthetic oligonucleotide; GGG chr11 5260900 5260919 5260916 +
cagcaacataataatagtgg

SEQ ID NO: 12726 - DNA, 20 bp, Artificial Sequence
  Synthetic oligonucleotide; TAG chr11 5260927 5260946 5260943 +
caatactccactgactgcac

SEQ ID NO: 12727 - DNA, 20 bp, Artificial Sequence
  Synthetic oligonucleotide; AGG chr11 5260928 5260947 5260944 +
aatactccactgactgcact

SEQ ID NO: 12728 - DNA, 20 bp, Artificial Sequence
  Synthetic oligonucleotide; CAG chr11 5260931 5260950 5260947 +
actccactgactgcactagg

SEQ ID NO: 12729 - DNA, 20 bp, Artificial Sequence
  Synthetic oligonucleotide; AGG chr11 5260932 5260951 5260948 +
ctccactgactgcactaggc

SEQ ID NO: 12730 - DNA, 20 bp, Artificial Sequence
  Synthetic oligonucleotide; AAG chr11 5260940 5260959 5260956 +
actgcactaggcaggtcatc

SEQ ID NO: 12731 - DNA, 20 bp, Artificial Sequence
  Synthetic oligonucleotide; CAG chr11 5260944 5260963 5260960 +
cactaggcaggtcatcaaga

SEQ ID NO: 12732 - DNA, 20 bp, Artificial Sequence
  Synthetic oligonucleotide; AAG chr11 5260953 5260972 5260969 +
ggtcatcaagacagtctaca

SEQ ID NO: 12733 - DNA, 20 bp, Artificial Sequence
  Synthetic oligonucleotide; TGG chr11 5260962 5260981 5260978 +
gacagtctacaaagaaacaa

SEQ ID NO: 12734 - DNA, 20 bp, Artificial Sequence
  Synthetic oligonucleotide; AAG chr11 5260970 5260989 5260986 +
acaaagaaacaatggattta

SEQ ID NO: 12735 - DNA, 20 bp, Artificial Sequence
  Synthetic oligonucleotide; TGG chr11 5260979 5260998 5260995 +
caatggatttaaagaacaaa

SEQ ID NO: 12736 - DNA, 20 bp, Artificial Sequence
  Synthetic oligonucleotide; CAG chr11 5260988 5261007 5261004 +
taaagaacaaatggacttaa

SEQ ID NO: 12737 - DNA, 20 bp, Artificial Sequence
  Synthetic oligonucleotide; CAG chr11 5260998 5261017 5261014 +
atggacttaacagatattta

SEQ ID NO: 12738 - DNA, 20 bp, Artificial Sequence
  Synthetic oligonucleotide; AGG chr11 5260999 5261018 5261015 +
tggacttaacagatatttac

SEQ ID NO: 12739 - DNA, 20 bp, Artificial Sequence
  Synthetic oligonucleotide; CAG chr11 5261021 5261040 5261037 +
gacattctacccaacaactg

SEQ ID NO: 12740 - DNA, 20 bp, Artificial Sequence
  Synthetic oligonucleotide; CAG chr11 5261042 5261061 5261058 +
agaatacacattctattcat

SEQ ID NO: 12741 - DNA, 20 bp, Artificial Sequence
  Synthetic oligonucleotide; TGG chr11 5261049 5261068 5261065 +
acattctattcatcagcaca

SEQ ID NO: 12742 - DNA, 20 bp, Artificial Sequence
  Synthetic oligonucleotide; AAG chr11 5261062 5261081 5261078 +
cagcacatggaactttctcc

SEQ ID NO: 12743 - DNA, 20 bp, Artificial Sequence
  Synthetic oligonucleotide; TAG chr11 5261066 5261085 5261082 +
acatggaactttctccaaga

SEQ ID NO: 12744 - DNA, 20 bp, Artificial Sequence
  Synthetic oligonucleotide; AGG chr11 5261067 5261086 5261083 +
catggaactttctccaagat

SEQ ID NO: 12745 - DNA, 20 bp, Artificial Sequence
  Synthetic oligonucleotide; AAG chr11 5261091 5261110 5261107 +
catatgatatgccacaaaac

SEQ ID NO: 12746 - DNA, 20 bp, Artificial Sequence
  Synthetic oligonucleotide; AAG chr11 5261127 5261146 5261143 +
ttaaaaattgaaattatatc

SEQ ID NO: 12747 - DNA, 20 bp, Artificial Sequence
  Synthetic oligonucleotide; CAG chr11 5261138 5261157 5261154 +
aattatatcaagcactctct

SEQ ID NO: 12748 - DNA, 20 bp, Artificial Sequence
  Synthetic oligonucleotide; CAG chr11 5261145 5261164 5261161 +
tcaagcactctctcagacca

SEQ ID NO: 12749 - DNA, 20 bp, Artificial Sequence
  Synthetic oligonucleotide; TAG chr11 5261148 5261167 5261164 +
agcactctctcagaccacag

SEQ ID NO: 12750 - DNA, 20 bp, Artificial Sequence
  Synthetic oligonucleotide; TGG chr11 5261159 5261178 5261175 +
agaccacagtagaataaaat

SEQ ID NO: 12751 - DNA, 20 bp, Artificial Sequence
  Synthetic oligonucleotide; AAG chr11 5261175 5261194 5261191 +
aaattggaaatcaactacaa

SEQ ID NO: 12752 - DNA, 20 bp, Artificial Sequence
  Synthetic oligonucleotide; AGG chr11 5261176 5261195 5261192 +
aattggaaatcaactacaaa

SEQ ID NO: 12753 - DNA, 20 bp, Artificial Sequence
  Synthetic oligonucleotide; CAG chr11 5261201 5261220 5261217 +
ccttcaaaaccatgcaaata

SEQ ID NO: 12754 - DNA, 20 bp, Artificial Sequence
  Synthetic oligonucleotide; AGG chr11 5261202 5261221 5261218 +
cttcaaaaccatgcaaatac

SEQ ID NO: 12755 - DNA, 20 bp, Artificial Sequence
  Synthetic oligonucleotide; GGG chr11 5261203 5261222 5261219 +
ttcaaaaccatgcaaataca

SEQ ID NO: 12756 - DNA, 20 bp, Artificial Sequence
  Synthetic oligonucleotide; TGG chr11 5261236 5261255 5261252 +
acctgctcctgaatgatcat

SEQ ID NO: 12757 - DNA, 20 bp, Artificial Sequence
  Synthetic oligonucleotide; GGG chr11 5261237 5261256 5261253 +
cctgctcctgaatgatcatt

SEQ ID NO: 12758 - DNA, 20 bp, Artificial Sequence
  Synthetic oligonucleotide; AAG chr11 5261254 5261273 5261270 +
attgggtcaacaatgaaatc

SEQ ID NO: 12759 - DNA, 20 bp, Artificial Sequence
  Synthetic oligonucleotide; TGG chr11 5261258 5261277 5261274 +
ggtcaacaatgaaatcaaga

SEQ ID NO: 12760 - DNA, 20 bp, Artificial Sequence
  Synthetic oligonucleotide; CGG chr11 5261289 5261308 5261305 +
aaatcatttgctttgaaaac

SEQ ID NO: 12761 - DNA, 20 bp, Artificial Sequence
  Synthetic oligonucleotide; AAG chr11 5261295 5261314 5261311 +
tttgctttgaaaaccggcac

SEQ ID NO: 12762 - DNA, 20 bp, Artificial Sequence
  Synthetic oligonucleotide; AAG chr11 5261300 5261319 5261316 +
tttgaaaaccggcacaagac

SEQ ID NO: 12763 - DNA, 20 bp, Artificial Sequence
  Synthetic oligonucleotide; AGG chr11 5261301 5261320 5261317 +
ttgaaaaccggcacaagaca

SEQ ID NO: 12764 - DNA, 20 bp, Artificial Sequence
  Synthetic oligonucleotide; TAG chr11 5261331 5261350 5261347 +
ctcgccactcttactcaaca

SEQ ID NO: 12765 - DNA, 20 bp, Artificial Sequence
  Synthetic oligonucleotide; TGG chr11 5261337 5261356 5261353 +
actcttactcaacatagtat

SEQ ID NO: 12766 - DNA, 20 bp, Artificial Sequence
  Synthetic oligonucleotide; AAG chr11 5261340 5261359 5261356 +
cttactcaacatagtattgg

SEQ ID NO: 12767 - DNA, 20 bp, Artificial Sequence
  Synthetic oligonucleotide; CAG chr11 5261350 5261369 5261366 +
atagtattggaagttctcgc

SEQ ID NO: 12768 - DNA, 20 bp, Artificial Sequence
  Synthetic oligonucleotide; AGG chr11 5261351 5261370 5261367 +
tagtattggaagttctcgcc

SEQ ID NO: 12769 - DNA, 20 bp, Artificial Sequence
  Synthetic oligonucleotide; CAG chr11 5261359 5261378 5261375 +
gaagttctcgccaggacaat

SEQ ID NO: 12770 - DNA, 20 bp, Artificial Sequence
  Synthetic oligonucleotide; AGG chr11 5261360 5261379 5261376 +
aagttctcgccaggacaatc

SEQ ID NO: 12771 - DNA, 20 bp, Artificial Sequence
  Synthetic oligonucleotide; AAG chr11 5261364 5261383 5261380 +
tctcgccaggacaatcaggc

SEQ ID NO: 12772 - DNA, 20 bp, Artificial Sequence
  Synthetic oligonucleotide; GAG chr11 5261366 5261385 5261382 +
tcgccaggacaatcaggcaa

SEQ ID NO: 12773 - DNA, 20 bp, Artificial Sequence
  Synthetic oligonucleotide; AAG chr11 5261370 5261389 5261386 +
caggacaatcaggcaagaga

SEQ ID NO: 12774 - DNA, 20 bp, Artificial Sequence
  Synthetic oligonucleotide; AAG chr11 5261378 5261397 5261394 +
tcaggcaagagaaagaaata

SEQ ID NO: 12775 - DNA, 20 bp, Artificial Sequence
  Synthetic oligonucleotide; TAG chr11 5261391 5261410 5261407 +
agaaataaagcatattcaaa

SEQ ID NO: 12776 - DNA, 20 bp, Artificial Sequence
  Synthetic oligonucleotide; AGG chr11 5261392 5261411 5261408 +
gaaataaagcatattcaaat

SEQ ID NO: 12777 - DNA, 20 bp, Artificial Sequence
  Synthetic oligonucleotide; AAG chr11 5261395 5261414 5261411 +
ataaagcatattcaaatagg

SEQ ID NO: 12778 - DNA, 20 bp, Artificial Sequence
  Synthetic oligonucleotide; GAG chr11 5261397 5261416 5261413 +
aaagcatattcaaataggaa

SEQ ID NO: 12779 - DNA, 20 bp, Artificial Sequence
  Synthetic oligonucleotide; GAG chr11 5261399 5261418 5261415 +
agcatattcaaataggaaga

SEQ ID NO: 12780 - DNA, 20 bp, Artificial Sequence
  Synthetic oligonucleotide; AGG chr11 5261400 5261419 5261416 +
gcatattcaaataggaagag

SEQ ID NO: 12781 - DNA, 20 bp, Artificial Sequence
  Synthetic oligonucleotide; AAG chr11 5261403 5261422 5261419 +
tattcaaataggaagagagg

SEQ ID NO: 12782 - DNA, 20 bp, Artificial Sequence
  Synthetic oligonucleotide; CAG chr11 5261424 5261443 5261440 +
agtcaaattgtctctgtttg

SEQ ID NO: 12783 - DNA, 20 bp, Artificial Sequence
  Synthetic oligonucleotide; TAG chr11 5261445 5261464 5261461 +
agatgacatgattgtatatt

SEQ ID NO: 12784 - DNA, 20 bp, Artificial Sequence
  Synthetic oligonucleotide; AAG chr11 5261448 5261467 5261464 +
tgacatgattgtatatttag

SEQ ID NO: 12785 - DNA, 20 bp, Artificial Sequence
  Synthetic oligonucleotide; CAG chr11 5261463 5261482 5261479 +
tttagaagaccctgtcatct

SEQ ID NO: 12786 - DNA, 20 bp, Artificial Sequence
  Synthetic oligonucleotide; AAG chr11 5261477 5261496 5261493 +
tcatctcagcccaaaatctt

SEQ ID NO: 12787 - DNA, 20 bp, Artificial Sequence
  Synthetic oligonucleotide; CAG chr11 5261488 5261507 5261504 +
caaaatcttaagctgataaa

SEQ ID NO: 12788 - DNA, 20 bp, Artificial Sequence
  Synthetic oligonucleotide; CAG chr11 5261494 5261513 5261510 +
cttaagctgataaacagctt

SEQ ID NO: 12789 - DNA, 20 bp, Artificial Sequence
  Synthetic oligonucleotide; AAG chr11 5261499 5261518 5261515 +
gctgataaacagcttcagca

SEQ ID NO: 12790 - DNA, 20 bp, Artificial Sequence
  Synthetic oligonucleotide; AAG chr11 5261506 5261525 5261522 +
aacagcttcagcaaagtctc

SEQ ID NO: 12791 - DNA, 20 bp, Artificial Sequence
  Synthetic oligonucleotide; CAG chr11 5261518 5261537 5261534 +
aaagtctcaagatacaaaat

SEQ ID NO: 12792 - DNA, 20 bp, Artificial Sequence
  Synthetic oligonucleotide; CAG chr11 5261525 5261544 5261541 +
caagatacaaaatcagtgtg

SEQ ID NO: 12793 - DNA, 20 bp, Artificial Sequence
  Synthetic oligonucleotide; AAG chr11 5261535 5261554 5261551 +
aatcagtgtgcagaaatcac

SEQ ID NO: 12794 - DNA, 20 bp, Artificial Sequence
  Synthetic oligonucleotide; TAG chr11 5261557 5261576 5261573 +
gcgttcctatacaccaataa

SEQ ID NO: 12795 - DNA, 20 bp, Artificial Sequence
  Synthetic oligonucleotide; AAG chr11 5261562 5261581 5261578 +
cctatacaccaataatagac

SEQ ID NO: 12796 - DNA, 20 bp, Artificial Sequence
  Synthetic oligonucleotide; CAG chr11 5261565 5261584 5261581 +
atacaccaataatagacaag

SEQ ID NO: 12797 - DNA, 20 bp, Artificial Sequence
  Synthetic oligonucleotide; GAG chr11 5261567 5261586 5261583 +
acaccaataatagacaagca

SEQ ID NO: 12798 - DNA, 20 bp, Artificial Sequence
  Synthetic oligonucleotide; GAG chr11 5261569 5261588 5261585 +
accaataatagacaagcaga

SEQ ID NO: 12799 - DNA, 20 bp, Artificial Sequence
  Synthetic oligonucleotide; TGG chr11 5261580 5261599 5261596 +
acaagcagagagccaaatca

SEQ ID NO: 12800 - DNA, 20 bp, Artificial Sequence
  Synthetic oligonucleotide; GGG chr11 5261581 5261600 5261597 +
caagcagagagccaaatcat

SEQ ID NO: 12801 - DNA, 20 bp, Artificial Sequence
  Synthetic oligonucleotide; AAG chr11 5261609 5261628 5261625 +
tcccattcacaattgctgca

SEQ ID NO: 12802 - DNA, 20 bp, Artificial Sequence
  Synthetic oligonucleotide; GAG chr11 5261611 5261630 5261627 +
ccattcacaattgctgcaaa

SEQ ID NO: 12803 - DNA, 20 bp, Artificial Sequence
  Synthetic oligonucleotide; TAG chr11 5261630 5261649 5261646 +
agagaataaaataaaatacc

SEQ ID NO: 12804 - DNA, 20 bp, Artificial Sequence
  Synthetic oligonucleotide; AAG chr11 5261646 5261665 5261662 +
tacctagaaatacaacttct

SEQ ID NO: 12805 - DNA, 20 bp, Artificial Sequence
  Synthetic oligonucleotide; AGG chr11 5261647 5261666 5261663 +
acctagaaatacaacttcta

SEQ ID NO: 12806 - DNA, 20 bp, Artificial Sequence
  Synthetic oligonucleotide; GGG chr11 5261648 5261667 5261664 +
cctagaaatacaacttctaa

SEQ ID NO: 12807 - DNA, 20 bp, Artificial Sequence
  Synthetic oligonucleotide; AAG chr11 5261656 5261675 5261672 +
tacaacttctaagggatgtg

SEQ ID NO: 12808 - DNA, 20 bp, Artificial Sequence
  Synthetic oligonucleotide; AAG chr11 5261668 5261687 5261684 +
gggatgtgaagaacctcttc

SEQ ID NO: 12809 - DNA, 20 bp, Artificial Sequence
  Synthetic oligonucleotide; AGG chr11 5261669 5261688 5261685 +
ggatgtgaagaacctcttca

SEQ ID NO: 12810 - DNA, 20 bp, Artificial Sequence
  Synthetic oligonucleotide; GAG chr11 5261671 5261690 5261687 +
atgtgaagaacctcttcaag

SEQ ID NO: 12811 - DNA, 20 bp, Artificial Sequence
  Synthetic oligonucleotide; GAG chr11 5261673 5261692 5261689 +
gtgaagaacctcttcaagga

SEQ ID NO: 12812 - DNA, 20 bp, Artificial Sequence
  Synthetic oligonucleotide; AAG chr11 5261696 5261715 5261712 +
ctacaaaccactcactgctc

SEQ ID NO: 12813 - DNA, 20 bp, Artificial Sequence
  Synthetic oligonucleotide; AGG chr11 5261697 5261716 5261713 +
tacaaaccactcactgctca

SEQ ID NO: 12814 - DNA, 20 bp, Artificial Sequence
  Synthetic oligonucleotide; AAG chr11 5261704 5261723 5261720 +
cactcactgctcaaggaaat

SEQ ID NO: 12815 - DNA, 20 bp, Artificial Sequence
  Synthetic oligonucleotide; GAG chr11 5261706 5261725 5261722 +
ctcactgctcaaggaaataa

SEQ ID NO: 12816 - DNA, 20 bp, Artificial Sequence
  Synthetic oligonucleotide; GAG chr11 5261708 5261727 5261724 +
cactgctcaaggaaataaga

SEQ ID NO: 12817 - DNA, 20 bp, Artificial Sequence
  Synthetic oligonucleotide; AGG chr11 5261709 5261728 5261725 +
actgctcaaggaaataagag

SEQ ID NO: 12818 - DNA, 20 bp, Artificial Sequence
  Synthetic oligonucleotide; TGG chr11 5261723 5261742 5261739 +
taagagaggacacaaacaaa

SEQ ID NO: 12819 - DNA, 20 bp, Artificial Sequence
  Synthetic oligonucleotide; TAG chr11 5261744 5261763 5261760 +
ggaaaaacattccatgctca

SEQ ID NO: 12820 - DNA, 20 bp, Artificial Sequence
  Synthetic oligonucleotide; TAG chr11 5261748 5261767 5261764 +
aaacattccatgctcataga

SEQ ID NO: 12821 - DNA, 20 bp, Artificial Sequence
  Synthetic oligonucleotide; AAG chr11 5261752 5261771 5261768 +
attccatgctcatagataga

SEQ ID NO: 12822 - DNA, 20 bp, Artificial Sequence
  Synthetic oligonucleotide; TGG chr11 5261772 5261791 5261788 +
aagaatcaatatctttaaaa

SEQ ID NO: 12823 - DNA, 20 bp, Artificial Sequence
  Synthetic oligonucleotide; AAG chr11 5261787 5261806 5261803 +
taaaatggccatactgccca

SEQ ID NO: 12824 - DNA, 20 bp, Artificial Sequence
  Synthetic oligonucleotide; TAG chr11 5261797 5261816 5261813 +
atactgcccaaagtaattta

SEQ ID NO: 12825 - DNA, 20 bp, Artificial Sequence
  Synthetic oligonucleotide; AAG chr11 5261819 5261838 5261835 +
gattcaatgctatccccatc

SEQ ID NO: 12826 - DNA, 20 bp, Artificial Sequence
  Synthetic oligonucleotide; AAG chr11 5261841 5261860 5261857 +
gctaccactgacttttttca

SEQ ID NO: 12827 - DNA, 20 bp, Artificial Sequence
  Synthetic oligonucleotide; TAG chr11 5261847 5261866 5261863 +
actgacttttttcaaagaat

SEQ ID NO: 12828 - DNA, 20 bp, Artificial Sequence
  Synthetic oligonucleotide; TGG chr11 5261873 5261892 5261889 +
aaactactttaaatgtcata

SEQ ID NO: 12829 - DNA, 20 bp, Artificial Sequence
  Synthetic oligonucleotide; AAG chr11 5261884 5261903 5261900 +
aatgtcatatggaatcaaaa

SEQ ID NO: 12830 - DNA, 20 bp, Artificial Sequence
  Synthetic oligonucleotide; GAG chr11 5261886 5261905 5261902 +
tgtcatatggaatcaaaaaa

SEQ ID NO: 12831 - DNA, 20 bp, Artificial Sequence
  Synthetic oligonucleotide; TAG chr11 5261895 5261914 5261911 +
gaatcaaaaaagagcccata

SEQ ID NO: 12832 - DNA, 20 bp, Artificial Sequence
  Synthetic oligonucleotide; AAG chr11 5261900 5261919 5261916 +
aaaaaagagcccatatagcc

SEQ ID NO: 12833 - DNA, 20 bp, Artificial Sequence
  Synthetic oligonucleotide; AAG chr11 5261918 5261937 5261934 +
ccaagacaatcctaaacaaa

SEQ ID NO: 12834 - DNA, 20 bp, Artificial Sequence
  Synthetic oligonucleotide; AAG chr11 5261925 5261944 5261941 +
aatcctaaacaaaaagaaca

SEQ ID NO: 12835 - DNA, 20 bp, Artificial Sequence
  Synthetic oligonucleotide; TGG chr11 5261929 5261948 5261945 +
ctaaacaaaaagaacaaagc

SEQ ID NO: 12836 - DNA, 20 bp, Artificial Sequence
  Synthetic oligonucleotide; GAG chr11 5261931 5261950 5261947 +
aaacaaaaagaacaaagctg

SEQ ID NO: 12837 - DNA, 20 bp, Artificial Sequence
  Synthetic oligonucleotide; AGG chr11 5261932 5261951 5261948 +
aacaaaaagaacaaagctgg

SEQ ID NO: 12838 - DNA, 20 bp, Artificial Sequence
  Synthetic oligonucleotide; AAG chr11 5261966 5261985 5261982 +
ctgacttcaaactatactac

SEQ ID NO: 12839 - DNA, 20 bp, Artificial Sequence
  Synthetic oligonucleotide; AGG chr11 5261967 5261986 5261983 +
tgacttcaaactatactaca

SEQ ID NO: 12840 - DNA, 20 bp, Artificial Sequence
  Synthetic oligonucleotide; CAG chr11 5261973 5261992 5261989 +
caaactatactacaaggcta

SEQ ID NO: 12841 - DNA, 20 bp, Artificial Sequence
  Synthetic oligonucleotide; CAG chr11 5261985 5262004 5262001 +
caaggctacagtaacaaaaa

SEQ ID NO: 12842 - DNA, 20 bp, Artificial Sequence
  Synthetic oligonucleotide; TGG chr11 5261990 5262009 5262006 +
ctacagtaacaaaaacagca

SEQ ID NO: 12843 - DNA, 20 bp, Artificial Sequence
  Synthetic oligonucleotide; TGG chr11 5261996 5262015 5262012 +
taacaaaaacagcatggtac

SEQ ID NO: 12844 - DNA, 20 bp, Artificial Sequence
  Synthetic oligonucleotide; CAG chr11 5262007 5262026 5262023 +
gcatggtactggtaccaaaa

SEQ ID NO: 12845 - DNA, 20 bp, Artificial Sequence
  Synthetic oligonucleotide; TAG chr11 5262015 5262034 5262031 +
ctggtaccaaaacagatata

SEQ ID NO: 12846 - DNA, 20 bp, Artificial Sequence
  Synthetic oligonucleotide; CAG chr11 5262020 5262039 5262036 +
accaaaacagatatatagac

SEQ ID NO: 12847 - DNA, 20 bp, Artificial Sequence
  Synthetic oligonucleotide; TGG chr11 5262023 5262042 5262039 +
aaaacagatatatagaccag

SEQ ID NO: 12848 - DNA, 20 bp, Artificial Sequence
  Synthetic oligonucleotide; CAG chr11 5262028 5262047 5262044 +
agatatatagaccagtggaa

SEQ ID NO: 12849 - DNA, 20 bp, Artificial Sequence
  Synthetic oligonucleotide; CAG chr11 5262033 5262052 5262049 +
tatagaccagtggaacagaa

SEQ ID NO: 12850 - DNA, 20 bp, Artificial Sequence
  Synthetic oligonucleotide; AAG chr11 5262036 5262055 5262052 +
agaccagtggaacagaacag

SEQ ID NO: 12851 - DNA, 20 bp, Artificial Sequence
  Synthetic oligonucleotide; CAG chr11 5262042 5262061 5262058 +
gtggaacagaacagaagcct

SEQ ID NO: 12852 - DNA, 20 bp, Artificial Sequence
  Synthetic oligonucleotide; AAG chr11 5262094 5262113 5262110 +
atctttgacaaacatcacaa

SEQ ID NO: 12853 - DNA, 20 bp, Artificial Sequence
  Synthetic oligonucleotide; TGG chr11 5262100 5262119 5262116 +
gacaaacatcacaaaagcaa

SEQ ID NO: 12854 - DNA, 20 bp, Artificial Sequence
  Synthetic oligonucleotide; GAG chr11 5262102 5262121 5262118 +
caaacatcacaaaagcaatg

SEQ ID NO: 12855 - DNA, 20 bp, Artificial Sequence
  Synthetic oligonucleotide; AAG chr11 5262106 5262125 5262122 +
catcacaaaagcaatggaga

SEQ ID NO: 12856 - DNA, 20 bp, Artificial Sequence
  Synthetic oligonucleotide; TGG chr11 5262127 5262146 5262143 +
agaattccctatttaataaa

SEQ ID NO: 12857 - DNA, 20 bp, Artificial Sequence
  Synthetic oligonucleotide; TGG chr11 5262133 5262152 5262149 +
ccctatttaataaatggtgc

SEQ ID NO: 12858 - DNA, 20 bp, Artificial Sequence
  Synthetic oligonucleotide; TGG chr11 5262142 5262161 5262158 +
ataaatggtgctggaaaaac

SEQ ID NO: 12859 - DNA, 20 bp, Artificial Sequence
  Synthetic oligonucleotide; TAG chr11 5262146 5262165 5262162 +
atggtgctggaaaaactggc

SEQ ID NO: 12860 - DNA, 20 bp, Artificial Sequence
  Synthetic oligonucleotide; AAG chr11 5262207 5262226 5262223 +
ccttatacaaaaattaactc

SEQ ID NO: 12861 - DNA, 20 bp, Artificial Sequence
  Synthetic oligonucleotide; AGG chr11 5262208 5262227 5262224 +
cttatacaaaaattaactca

SEQ ID NO: 12862 - DNA, 20 bp, Artificial Sequence
  Synthetic oligonucleotide; TGG chr11 5262211 5262230 5262227 +
atacaaaaattaactcaagg

SEQ ID NO: 12863 - DNA, 20 bp, Artificial Sequence
  Synthetic oligonucleotide; AAG chr11 5262218 5262237 5262234 +
aattaactcaaggtggatta

SEQ ID NO: 12864 - DNA, 20 bp, Artificial Sequence
  Synthetic oligonucleotide; TAG chr11 5262254 5262273 5262270 +
acctaaaaccataaaaatcc

SEQ ID NO: 12865 - DNA, 20 bp, Artificial Sequence
  Synthetic oligonucleotide; AAG chr11 5262257 5262276 5262273 +
taaaaccataaaaatcctag

SEQ ID NO: 12866 - DNA, 20 bp, Artificial Sequence
  Synthetic oligonucleotide; TAG chr11 5262266 5262285 5262282 +
aaaaatcctagaagataacc

SEQ ID NO: 12867 - DNA, 20 bp, Artificial Sequence
  Synthetic oligonucleotide; AGG chr11 5262267 5262286 5262283 +
aaaatcctagaagataacct

SEQ ID NO: 12868 - DNA, 20 bp, Artificial Sequence
  Synthetic oligonucleotide; CAG chr11 5262280 5262299 5262296 +
ataacctaggcaataccatt

SEQ ID NO: 12869 - DNA, 20 bp, Artificial Sequence
  Synthetic oligonucleotide; AGG chr11 5262281 5262300 5262297 +
taacctaggcaataccattc

SEQ ID NO: 12870 - DNA, 20 bp, Artificial Sequence
  Synthetic oligonucleotide; TAG chr11 5262287 5262306 5262303 +
aggcaataccattcaggaca

SEQ ID NO: 12871 - DNA, 20 bp, Artificial Sequence
  Synthetic oligonucleotide; AGG chr11 5262288 5262307 5262304 +
ggcaataccattcaggacat

SEQ ID NO: 12872 - DNA, 20 bp, Artificial Sequence
  Synthetic oligonucleotide; TGG chr11 5262293 5262312 5262309 +
taccattcaggacataggca

SEQ ID NO: 12873 - DNA, 20 bp, Artificial Sequence
  Synthetic oligonucleotide; GGG chr11 5262294 5262313 5262310 +
accattcaggacataggcat

SEQ ID NO: 12874 - DNA, 20 bp, Artificial Sequence
  Synthetic oligonucleotide; AAG chr11 5262322 5262341 5262338 +
attcacgactaaaacatcaa

SEQ ID NO: 12875 - DNA, 20 bp, Artificial Sequence
  Synthetic oligonucleotide; AAG chr11 5262336 5262355 5262352 +
catcaaaagcaatgacaaca

SEQ ID NO: 12876 - DNA, 20 bp, Artificial Sequence
  Synthetic oligonucleotide; AGG chr11 5262337 5262356 5262353 +
atcaaaagcaatgacaacaa

SEQ ID NO: 12877 - DNA, 20 bp, Artificial Sequence
  Synthetic oligonucleotide; TGG chr11 5262354 5262373 5262370 +
caaaggccaaaattgacata

SEQ ID NO: 12878 - DNA, 20 bp, Artificial Sequence
  Synthetic oligonucleotide; GGG chr11 5262355 5262374 5262371 +
aaaggccaaaattgacatat

SEQ ID NO: 12879 - DNA, 20 bp, Artificial Sequence
  Synthetic oligonucleotide; AAG chr11 5262372 5262391 5262388 +
tatgggatctaattaaacta

SEQ ID NO: 12880 - DNA, 20 bp, Artificial Sequence
  Synthetic oligonucleotide; GAG chr11 5262374 5262393 5262390 +
tgggatctaattaaactaaa

SEQ ID NO: 12881 - DNA, 20 bp, Artificial Sequence
  Synthetic oligonucleotide; CAG chr11 5262385 5262404 5262401 +
taaactaaagagcttctgca

SEQ ID NO: 12882 - DNA, 20 bp, Artificial Sequence
  Synthetic oligonucleotide; AAG chr11 5262391 5262410 5262407 +
aaagagcttctgcacagcaa

SEQ ID NO: 12883 - DNA, 20 bp, Artificial Sequence
  Synthetic oligonucleotide; CAG chr11 5262402 5262421 5262418 +
gcacagcaaaagactatcat

SEQ ID NO: 12884 - DNA, 20 bp, Artificial Sequence
  Synthetic oligonucleotide; GAG chr11 5262404 5262423 5262420 +
acagcaaaagactatcatca

SEQ ID NO: 12885 - DNA, 20 bp, Artificial Sequence
  Synthetic oligonucleotide; CAG chr11 5262411 5262430 5262427 +
aagactatcatcagagtgaa

SEQ ID NO: 12886 - DNA, 20 bp, Artificial Sequence
  Synthetic oligonucleotide; AGG chr11 5262412 5262431 5262428 +
agactatcatcagagtgaac

SEQ ID NO: 12887 - DNA, 20 bp, Artificial Sequence
  Synthetic oligonucleotide; CAG chr11 5262422 5262441 5262438 +
cagagtgaacaggcaaccta

SEQ ID NO: 12888 - DNA, 20 bp, Artificial Sequence
  Synthetic oligonucleotide; TGG chr11 5262427 5262446 5262443 +
tgaacaggcaacctacagaa

SEQ ID NO: 12889 - DNA, 20 bp, Artificial Sequence
  Synthetic oligonucleotide; GGG chr11 5262428 5262447 5262444 +
gaacaggcaacctacagaat

SEQ ID NO: 12890 - DNA, 20 bp, Artificial Sequence
  Synthetic oligonucleotide; GAG chr11 5262430 5262449 5262446 +
acaggcaacctacagaatgg

SEQ ID NO: 12891 - DNA, 20 bp, Artificial Sequence
  Synthetic oligonucleotide; AAG chr11 5262461 5262480 5262477 +
tgcaatctatccatctgaca

SEQ ID NO: 12892 - DNA, 20 bp, Artificial Sequence
  Synthetic oligonucleotide; AGG chr11 5262462 5262481 5262478 +
gcaatctatccatctgacaa

SEQ ID NO: 12893 - DNA, 20 bp, Artificial Sequence
  Synthetic oligonucleotide; GGG chr11 5262463 5262482 5262479 +
caatctatccatctgacaaa

SEQ ID NO: 12894 - DNA, 20 bp, Artificial Sequence
  Synthetic oligonucleotide; AAG chr11 5262485 5262504 5262501 +
gctaacatccaaaatctaca

SEQ ID NO: 12895 - DNA, 20 bp, Artificial Sequence
  Synthetic oligonucleotide; AAG chr11 5262505 5262524 5262521 +
aagaacttcaacaaatttac

SEQ ID NO: 12896 - DNA, 20 bp, Artificial Sequence
  Synthetic oligonucleotide; AAG chr11 5262532 5262551 5262548 +
aacctaacgaccccatcaaa

SEQ ID NO: 12897 - DNA, 20 bp, Artificial Sequence
  Synthetic oligonucleotide; TGG chr11 5262535 5262554 5262551 +
ctaacgaccccatcaaaaag

SEQ ID NO: 12898 - DNA, 20 bp, Artificial Sequence
  Synthetic oligonucleotide; AAG chr11 5262541 5262560 5262557 +
accccatcaaaaagtggaca

SEQ ID NO: 12899 - DNA, 20 bp, Artificial Sequence
  Synthetic oligonucleotide; AGG chr11 5262542 5262561 5262558 +
ccccatcaaaaagtggacaa

SEQ ID NO: 12900 - DNA, 20 bp, Artificial Sequence
  Synthetic oligonucleotide; CAG chr11 5262552 5262571 5262568 +
aagtggacaaaggatatgaa

SEQ ID NO: 12901 - DNA, 20 bp, Artificial Sequence
  Synthetic oligonucleotide; AAG chr11 5262566 5262585 5262582 +
tatgaacagatgcttctcta

SEQ ID NO: 12902 - DNA, 20 bp, Artificial Sequence
  Synthetic oligonucleotide; AAG chr11 5262569 5262588 5262585 +
gaacagatgcttctctaaag

SEQ ID NO: 12903 - DNA, 20 bp, Artificial Sequence
  Synthetic oligonucleotide; TGG chr11 5262581 5262600 5262597 +
ctctaaagaagtcatttatg

SEQ ID NO: 12904 - DNA, 20 bp, Artificial Sequence
  Synthetic oligonucleotide; AAG chr11 5262586 5262605 5262602 +
aagaagtcatttatgtggcc

SEQ ID NO: 12905 - DNA, 20 bp, Artificial Sequence
  Synthetic oligonucleotide; AAG chr11 5262600 5262619 5262616 +
gtggccaagaaacacatgaa

SEQ ID NO: 12906 - DNA, 20 bp, Artificial Sequence
  Synthetic oligonucleotide; AAG chr11 5262603 5262622 5262619 +
gccaagaaacacatgaaaag

SEQ ID NO: 12907 - DNA, 20 bp, Artificial Sequence
  Synthetic oligonucleotide; TGG chr11 5262617 5262636 5262633 +
gaaaagaagctcatcatcac

SEQ ID NO: 12908 - DNA, 20 bp, Artificial Sequence
  Synthetic oligonucleotide; TAG chr11 5262624 5262643 5262640 +
agctcatcatcactggtcat

SEQ ID NO: 12909 - DNA, 20 bp, Artificial Sequence
  Synthetic oligonucleotide; GAG chr11 5262626 5262645 5262642 +
ctcatcatcactggtcatta

SEQ ID NO: 12910 - DNA, 20 bp, Artificial Sequence
  Synthetic oligonucleotide; GAG chr11 5262651 5262670 5262667 +
atgcaaatcaaaaccacaat

SEQ ID NO: 12911 - DNA, 20 bp, Artificial Sequence
  Synthetic oligonucleotide; CAG chr11 5262668 5262687 5262684 +
aatgagataccatctcatgc

SEQ ID NO: 12912 - DNA, 20 bp, Artificial Sequence
  Synthetic oligonucleotide; TAG chr11 5262672 5262691 5262688 +
agataccatctcatgccagt

SEQ ID NO: 12913 - DNA, 20 bp, Artificial Sequence
  Synthetic oligonucleotide; TGG chr11 5262677 5262696 5262693 +
ccatctcatgccagttagaa

SEQ ID NO: 12914 - DNA, 20 bp, Artificial Sequence
  Synthetic oligonucleotide; AAG chr11 5262691 5262710 5262707 +
ttagaatggcaattattaaa

SEQ ID NO: 12915 - DNA, 20 bp, Artificial Sequence
  Synthetic oligonucleotide; CAG chr11 5262695 5262714 5262711 +
aatggcaattattaaaaagt

SEQ ID NO: 12916 - DNA, 20 bp, Artificial Sequence
  Synthetic oligonucleotide; AGG chr11 5262696 5262715 5262712 +
atggcaattattaaaaagtc

SEQ ID NO: 12917 - DNA, 20 bp, Artificial Sequence
  Synthetic oligonucleotide; AAG chr11 5262705 5262724 5262721 +
attaaaaagtcaggaaacaa

SEQ ID NO: 12918 - DNA, 20 bp, Artificial Sequence
  Synthetic oligonucleotide; AGG chr11 5262706 5262725 5262722 +
ttaaaaagtcaggaaacaaa

SEQ ID NO: 12919 - DNA, 20 bp, Artificial Sequence
  Synthetic oligonucleotide; TGG chr11 5262712 5262731 5262728 +
agtcaggaaacaaaaggtgc

SEQ ID NO: 12920 - DNA, 20 bp, Artificial Sequence
  Synthetic oligonucleotide; GAG chr11 5262714 5262733 5262730 +
tcaggaaacaaaaggtgctg

SEQ ID NO: 12921 - DNA, 20 bp, Artificial Sequence
  Synthetic oligonucleotide; GAG chr11 5262716 5262735 5262732 +
aggaaacaaaaggtgctgga

SEQ ID NO: 12922 - DNA, 20 bp, Artificial Sequence
  Synthetic oligonucleotide; AGG chr11 5262717 5262736 5262733 +
ggaaacaaaaggtgctggag

SEQ ID NO: 12923 - DNA, 20 bp, Artificial Sequence
  Synthetic oligonucleotide; TGG chr11 5262723 5262742 5262739 +
aaaaggtgctggagaggatg

SEQ ID NO: 12924 - DNA, 20 bp, Artificial Sequence
  Synthetic oligonucleotide; AAG chr11 5262726 5262745 5262742 +
aggtgctggagaggatgtgg

SEQ ID NO: 12925 - DNA, 20 bp, Artificial Sequence
  Synthetic oligonucleotide; TAG chr11 5262731 5262750 5262747 +
ctggagaggatgtggaagaa

SEQ ID NO: 12926 - DNA, 20 bp, Artificial Sequence
  Synthetic oligonucleotide; AGG chr11 5262732 5262751 5262748 +
tggagaggatgtggaagaat

SEQ ID NO: 12927 - DNA, 20 bp, Artificial Sequence
  Synthetic oligonucleotide; TGG chr11 5262754 5262773 5262770 +
gaaaaattttacactgttga

SEQ ID NO: 12928 - DNA, 20 bp, Artificial Sequence
  Synthetic oligonucleotide; GGG chr11 5262755 5262774 5262771 +
aaaaattttacactgttgat

SEQ ID NO: 12929 - DNA, 20 bp, Artificial Sequence
  Synthetic oligonucleotide; TAG chr11 5262767 5262786 5262783 +
ctgttgatgggtgtgtaaat

SEQ ID NO: 12930 - DNA, 20 bp, Artificial Sequence
  Synthetic oligonucleotide; TGG chr11 5262781 5262800 5262797 +
gtaaattagttcaaccattg

SEQ ID NO: 12931 - DNA, 20 bp, Artificial Sequence
  Synthetic oligonucleotide; AAG chr11 5262784 5262803 5262800 +
aattagttcaaccattgtgg

SEQ ID NO: 12932 - DNA, 20 bp, Artificial Sequence
  Synthetic oligonucleotide; CAG chr11 5262788 5262807 5262804 +
agttcaaccattgtggaaga

SEQ ID NO: 12933 - DNA, 20 bp, Artificial Sequence
  Synthetic oligonucleotide; TGG chr11 5262793 5262812 5262809 +
aaccattgtggaagacagtg

SEQ ID NO: 12934 - DNA, 20 bp, Artificial Sequence
  Synthetic oligonucleotide; AAG chr11 5262805 5262824 5262821 +
agacagtgtggcgattcctc

SEQ ID NO: 12935 - DNA, 20 bp, Artificial Sequence
  Synthetic oligonucleotide; AGG chr11 5262806 5262825 5262822 +
gacagtgtggcgattcctca

SEQ ID NO: 12936 - DNA, 20 bp, Artificial Sequence
  Synthetic oligonucleotide; TAG chr11 5262812 5262831 5262828 +
gtggcgattcctcaaggatc

SEQ ID NO: 12937 - DNA, 20 bp, Artificial Sequence
  Synthetic oligonucleotide; CAG chr11 5262818 5262837 5262834 +
attcctcaaggatctagaac

SEQ ID NO: 12938 - DNA, 20 bp, Artificial Sequence
  Synthetic oligonucleotide; CAG chr11 5262836 5262855 5262852 +
accagaaatactgtttgacc

SEQ ID NO: 12939 - DNA, 20 bp, Artificial Sequence
  Synthetic oligonucleotide; TGG chr11 5262851 5262870 5262867 +
tgacccagcaatcccattac

SEQ ID NO: 12940 - DNA, 20 bp, Artificial Sequence
  Synthetic oligonucleotide; GGG chr11 5262852 5262871 5262868 +
gacccagcaatcccattact

SEQ ID NO: 12941 - DNA, 20 bp, Artificial Sequence
  Synthetic oligonucleotide; AAG chr11 5262865 5262884 5262881 +
cattactgggtatataccca

SEQ ID NO: 12942 - DNA, 20 bp, Artificial Sequence
  Synthetic oligonucleotide; TAG chr11 5262871 5262890 5262887 +
tgggtatatacccaaagaat

SEQ ID NO: 12943 - DNA, 20 bp, Artificial Sequence
  Synthetic oligonucleotide; AAG chr11 5262890 5262909 5262906 +
ttagaaatcattctactata

SEQ ID NO: 12944 - DNA, 20 bp, Artificial Sequence
  Synthetic oligonucleotide; TGG chr11 5262917 5262936 5262933 +
gtgcacacgtatgtttattg

SEQ ID NO: 12945 - DNA, 20 bp, Artificial Sequence
  Synthetic oligonucleotide; TAG chr11 5262932 5262951 5262948 +
tattgtggcactattcacaa

SEQ ID NO: 12946 - DNA, 20 bp, Artificial Sequence
  Synthetic oligonucleotide; AAG chr11 5262937 5262956 5262953 +
tggcactattcacaatagca

SEQ ID NO: 12947 - DNA, 20 bp, Artificial Sequence
  Synthetic oligonucleotide; TGG chr11 5262943 5262962 5262959 +
tattcacaatagcaaagact

SEQ ID NO: 12948 - DNA, 20 bp, Artificial Sequence
  Synthetic oligonucleotide; TGG chr11 5262958 5262977 5262974 +
agacttggaaccaacccaaa

SEQ ID NO: 12949 - DNA, 20 bp, Artificial Sequence
  Synthetic oligonucleotide; CAG chr11 5262965 5262984 5262981 +
gaaccaacccaaatggccat

SEQ ID NO: 12950 - DNA, 20 bp, Artificial Sequence
  Synthetic oligonucleotide; TGG chr11 5262976 5262995 5262992 +
aatggccatcagcgatataa

SEQ ID NO: 12951 - DNA, 20 bp, Artificial Sequence
  Synthetic oligonucleotide; AAG chr11 5262982 5263001 5262998 +
catcagcgatataatggata

SEQ ID NO: 12952 - DNA, 20 bp, Artificial Sequence
  Synthetic oligonucleotide; TGG chr11 5262991 5263010 5263007 +
tataatggataaagaaaatg

SEQ ID NO: 12953 - DNA, 20 bp, Artificial Sequence
  Synthetic oligonucleotide; TGG chr11 5263007 5263026 5263023 +
aatgtggcacatatacacca

SEQ ID NO: 12954 - DNA, 20 bp, Artificial Sequence
  Synthetic oligonucleotide; CAG chr11 5263019 5263038 5263035 +
atacaccatggaatactatg

SEQ ID NO: 12955 - DNA, 20 bp, Artificial Sequence
  Synthetic oligonucleotide; GAG chr11 5263035 5263054 5263051 +
tatgcagccataaaaatgat

SEQ ID NO: 12956 - DNA, 20 bp, Artificial Sequence
  Synthetic oligonucleotide; CAG chr11 5263050 5263069 5263066 +
atgatgagttcatgtctttg

SEQ ID NO: 12957 - DNA, 20 bp, Artificial Sequence
  Synthetic oligonucleotide; AGG chr11 5263051 5263070 5263067 +
tgatgagttcatgtctttgc

SEQ ID NO: 12958 - DNA, 20 bp, Artificial Sequence
  Synthetic oligonucleotide; GGG chr11 5263052 5263071 5263068 +
gatgagttcatgtctttgca

SEQ ID NO: 12959 - DNA, 20 bp, Artificial Sequence
  Synthetic oligonucleotide; TGG chr11 5263058 5263077 5263074 +
ttcatgtctttgcagggaca

SEQ ID NO: 12960 - DNA, 20 bp, Artificial Sequence
  Synthetic oligonucleotide; AAG chr11 5263064 5263083 5263080 +
tctttgcagggacatggatg

SEQ ID NO: 12961 - DNA, 20 bp, Artificial Sequence
  Synthetic oligonucleotide; AGG chr11 5263065 5263084 5263081 +
ctttgcagggacatggatga

SEQ ID NO: 12962 - DNA, 20 bp, Artificial Sequence
  Synthetic oligonucleotide; TGG chr11 5263068 5263087 5263084 +
tgcagggacatggatgaagg

SEQ ID NO: 12963 - DNA, 20 bp, Artificial Sequence
  Synthetic oligonucleotide; GAG chr11 5263084 5263103 5263100 +
aaggtggaaaccatcattct

SEQ ID NO: 12964 - DNA, 20 bp, Artificial Sequence
  Synthetic oligonucleotide; CAG chr11 5263097 5263116 5263113 +
tcattctgagcaaactaaca

SEQ ID NO: 12965 - DNA, 20 bp, Artificial Sequence
  Synthetic oligonucleotide; AGG chr11 5263098 5263117 5263114 +
cattctgagcaaactaacac

SEQ ID NO: 12966 - DNA, 20 bp, Artificial Sequence
  Synthetic oligonucleotide; CAG chr11 5263103 5263122 5263119 +
tgagcaaactaacacaggaa

SEQ ID NO: 12967 - DNA, 20 bp, Artificial Sequence
  Synthetic oligonucleotide; GAG chr11 5263105 5263124 5263121 +
agcaaactaacacaggaaca

SEQ ID NO: 12968 - DNA, 20 bp, Artificial Sequence
  Synthetic oligonucleotide; AAG chr11 5263136 5263155 5263152 +
caccacacgttctcactcat

SEQ ID NO: 12969 - DNA, 20 bp, Artificial Sequence
  Synthetic oligonucleotide; TGG chr11 5263139 5263158 5263155 +
cacacgttctcactcataag

SEQ ID NO: 12970 - DNA, 20 bp, Artificial Sequence
  Synthetic oligonucleotide; GGG chr11 5263140 5263159 5263156 +
acacgttctcactcataagt

SEQ ID NO: 12971 - DNA, 20 bp, Artificial Sequence
  Synthetic oligonucleotide; GAG chr11 5263142 5263161 5263158 +
acgttctcactcataagtgg

SEQ ID NO: 12972 - DNA, 20 bp, Artificial Sequence
  Synthetic oligonucleotide; GAG chr11 5263154 5263173 5263170 +
ataagtgggagttgaacaat

SEQ ID NO: 12973 - DNA, 20 bp, Artificial Sequence
  Synthetic oligonucleotide; TGG chr11 5263163 5263182 5263179 +
agttgaacaatgagaacaca

SEQ ID NO: 12974 - DNA, 20 bp, Artificial Sequence
  Synthetic oligonucleotide; CAG chr11 5263169 5263188 5263185 +
acaatgagaacacatggaca

SEQ ID NO: 12975 - DNA, 20 bp, Artificial Sequence
  Synthetic oligonucleotide; AGG chr11 5263170 5263189 5263186 +
caatgagaacacatggacac

SEQ ID NO: 12976 - DNA, 20 bp, Artificial Sequence
  Synthetic oligonucleotide; GGG chr11 5263171 5263190 5263187 +
aatgagaacacatggacaca

SEQ ID NO: 12977 - DNA, 20 bp, Artificial Sequence
  Synthetic oligonucleotide; GAG chr11 5263173 5263192 5263189 +
tgagaacacatggacacagg

SEQ ID NO: 12978 - DNA, 20 bp, Artificial Sequence
  Synthetic oligonucleotide; AGG chr11 5263174 5263193 5263190 +
gagaacacatggacacaggg

SEQ ID NO: 12979 - DNA, 20 bp, Artificial Sequence
  Synthetic oligonucleotide; GGG chr11 5263175 5263194 5263191 +
agaacacatggacacaggga

SEQ ID NO: 12980 - DNA, 20 bp, Artificial Sequence
  Synthetic oligonucleotide; GGG chr11 5263176 5263195 5263192 +
gaacacatggacacagggag

SEQ ID NO: 12981 - DNA, 20 bp, Artificial Sequence
  Synthetic oligonucleotide; CAG chr11 5263191 5263210 5263207 +
gggaggggaacatcacacac

SEQ ID NO: 12982 - DNA, 20 bp, Artificial Sequence
  Synthetic oligonucleotide; AGG chr11 5263192 5263211 5263208 +
ggaggggaacatcacacacc

SEQ ID NO: 12983 - DNA, 20 bp, Artificial Sequence
  Synthetic oligonucleotide; GGG chr11 5263193 5263212 5263209 +
gaggggaacatcacacacca

SEQ ID NO: 12984 - DNA, 20 bp, Artificial Sequence
  Synthetic oligonucleotide; CGG chr11 5263201 5263220 5263217 +
catcacacaccagggcctgt

SEQ ID NO: 12985 - DNA, 20 bp, Artificial Sequence
  Synthetic oligonucleotide; GGG chr11 5263202 5263221 5263218 +
atcacacaccagggcctgtc

SEQ ID NO: 12986 - DNA, 20 bp, Artificial Sequence
  Synthetic oligonucleotide; GGG chr11 5263203 5263222 5263219 +
tcacacaccagggcctgtcg

SEQ ID NO: 12987 - DNA, 20 bp, Artificial Sequence
  Synthetic oligonucleotide; GGG chr11 5263204 5263223 5263220 +
cacacaccagggcctgtcgg

SEQ ID NO: 12988 - DNA, 20 bp, Artificial Sequence
  Synthetic oligonucleotide; GGG chr11 5263205 5263224 5263221 +
acacaccagggcctgtcggg

SEQ ID NO: 12989 - DNA, 20 bp, Artificial Sequence
  Synthetic oligonucleotide; GAG chr11 5263209 5263228 5263225 +
accagggcctgtcggggggt

SEQ ID NO: 12990 - DNA, 20 bp, Artificial Sequence
  Synthetic oligonucleotide; AGG chr11 5263210 5263229 5263226 +
ccagggcctgtcggggggtg

SEQ ID NO: 12991 - DNA, 20 bp, Artificial Sequence
  Synthetic oligonucleotide; GGG chr11 5263211 5263230 5263227 +
cagggcctgtcggggggtga

SEQ ID NO: 12992 - DNA, 20 bp, Artificial Sequence
  Synthetic oligonucleotide; GGG chr11 5263212 5263231 5263228 +
agggcctgtcggggggtgag

SEQ ID NO: 12993 - DNA, 20 bp, Artificial Sequence
  Synthetic oligonucleotide; GGG chr11 5263213 5263232 5263229 +
gggcctgtcggggggtgagg

SEQ ID NO: 12994 - DNA, 20 bp, Artificial Sequence
  Synthetic oligonucleotide; TAG chr11 5263217 5263236 5263233 +
ctgtcggggggtgagggggt

SEQ ID NO: 12995 - DNA, 20 bp, Artificial Sequence
  Synthetic oligonucleotide; AGG chr11 5263218 5263237 5263234 +
tgtcggggggtgagggggtt

SEQ ID NO: 12996 - DNA, 20 bp, Artificial Sequence
  Synthetic oligonucleotide; GAG chr11 5263220 5263239 5263236 +
tcggggggtgagggggttag

SEQ ID NO: 12997 - DNA, 20 bp, Artificial Sequence
  Synthetic oligonucleotide; GAG chr11 5263222 5263241 5263238 +
ggggggtgagggggttagga

SEQ ID NO: 12998 - DNA, 20 bp, Artificial Sequence
  Synthetic oligonucleotide; AGG chr11 5263223 5263242 5263239 +
gggggtgagggggttaggag

SEQ ID NO: 12999 - DNA, 20 bp, Artificial Sequence
  Synthetic oligonucleotide; GGG chr11 5263224 5263243 5263240 +
ggggtgagggggttaggaga

SEQ ID NO: 13000 - DNA, 20 bp, Artificial Sequence
  Synthetic oligonucleotide; AAG chr11 5263237 5263256 5263253 +
taggagagggataacattaa

SEQ ID NO: 13001 - DNA, 20 bp, Artificial Sequence
  Synthetic oligonucleotide; TAG chr11 5263252 5263271 5263268 +
attaaaagaaatacctaatg

SEQ ID NO: 13002 - DNA, 20 bp, Artificial Sequence
  Synthetic oligonucleotide; CAG chr11 5263259 5263278 5263275 +
gaaatacctaatgtagatga

SEQ ID NO: 13003 - DNA, 20 bp, Artificial Sequence
  Synthetic oligonucleotide; AGG chr11 5263260 5263279 5263276 +
aaatacctaatgtagatgac

SEQ ID NO: 13004 - DNA, 20 bp, Artificial Sequence
  Synthetic oligonucleotide; TGG chr11 5263267 5263286 5263283 +
taatgtagatgacaggttga

SEQ ID NO: 13005 - DNA, 20 bp, Artificial Sequence
  Synthetic oligonucleotide; GGG chr11 5263268 5263287 5263284 +
aatgtagatgacaggttgat

SEQ ID NO: 13006 - DNA, 20 bp, Artificial Sequence
  Synthetic oligonucleotide; CAG chr11 5263273 5263292 5263289 +
agatgacaggttgatgggtg

SEQ ID NO: 13007 - DNA, 20 bp, Artificial Sequence
  Synthetic oligonucleotide; TGG chr11 5263286 5263305 5263302 +
atgggtgcagcaaaccacca

SEQ ID NO: 13008 - DNA, 20 bp, Artificial Sequence
  Synthetic oligonucleotide; CAG chr11 5263336 5263355 5263352 +
cacattctgcacatgtatcc

SEQ ID NO: 13009 - DNA, 20 bp, Artificial Sequence
  Synthetic oligonucleotide; AAG chr11 5263345 5263364 5263361 +
cacatgtatcccagaactta

SEQ ID NO: 13010 - DNA, 20 bp, Artificial Sequence
  Synthetic oligonucleotide; AAG chr11 5263354 5263373 5263370 +
cccagaacttaaagtataat

SEQ ID NO: 13011 - DNA, 20 bp, Artificial Sequence
  Synthetic oligonucleotide; TAG chr11 5263387 5263406 5263403 +
ttacttgaactgaccgacaa

SEQ ID NO: 13012 - DNA, 20 bp, Artificial Sequence
  Synthetic oligonucleotide; TAG chr11 5263412 5263431 5263428 +
acacaacctatcaaaacctc

SEQ ID NO: 13013 - DNA, 20 bp, Artificial Sequence
  Synthetic oligonucleotide; AGG chr11 5263413 5263432 5263429 +
cacaacctatcaaaacctct

SEQ ID NO: 13014 - DNA, 20 bp, Artificial Sequence
  Synthetic oligonucleotide; CAG chr11 5263419 5263438 5263435 +
ctatcaaaacctctaggata

SEQ ID NO: 13015 - DNA, 20 bp, Artificial Sequence
  Synthetic oligonucleotide; AAG chr11 5263424 5263443 5263440 +
aaaacctctaggatacagca

SEQ ID NO: 13016 - DNA, 20 bp, Artificial Sequence
  Synthetic oligonucleotide; TGG chr11 5263428 5263447 5263444 +
cctctaggatacagcaaaga

SEQ ID NO: 13017 - DNA, 20 bp, Artificial Sequence
  Synthetic oligonucleotide; AAG chr11 5263437 5263456 5263453 +
tacagcaaagatggtgctaa

SEQ ID NO: 13018 - DNA, 20 bp, Artificial Sequence
  Synthetic oligonucleotide; AGG chr11 5263438 5263457 5263454 +
acagcaaagatggtgctaaa

SEQ ID NO: 13019 - DNA, 20 bp, Artificial Sequence
  Synthetic oligonucleotide; AAG chr11 5263442 5263461 5263458 +
caaagatggtgctaaaagga

SEQ ID NO: 13020 - DNA, 20 bp, Artificial Sequence
  Synthetic oligonucleotide; CAG chr11 5263449 5263468 5263465 +
ggtgctaaaaggaaagttca

SEQ ID NO: 13021 - DNA, 20 bp, Artificial Sequence
  Synthetic oligonucleotide; AAG chr11 5263470 5263489 5263486 +
agccctaaatgtcgatgtca

SEQ ID NO: 13022 - DNA, 20 bp, Artificial Sequence
  Synthetic oligonucleotide; GAG chr11 5263472 5263491 5263488 +
ccctaaatgtcgatgtcaaa

SEQ ID NO: 13023 - DNA, 20 bp, Artificial Sequence
  Synthetic oligonucleotide; AAG chr11 5263480 5263499 5263496 +
gtcgatgtcaaagagtctga

SEQ ID NO: 13024 - DNA, 20 bp, Artificial Sequence
  Synthetic oligonucleotide; GAG chr11 5263482 5263501 5263498 +
cgatgtcaaagagtctgaaa

SEQ ID NO: 13025 - DNA, 20 bp, Artificial Sequence
  Synthetic oligonucleotide; AGG chr11 5263483 5263502 5263499 +
gatgtcaaagagtctgaaag

SEQ ID NO: 13026 - DNA, 20 bp, Artificial Sequence
  Synthetic oligonucleotide; CAG chr11 5263487 5263506 5263503 +
tcaaagagtctgaaagagga

SEQ ID NO: 13027 - DNA, 20 bp, Artificial Sequence
  Synthetic oligonucleotide; CAG chr11 5263491 5263510 5263507 +
agagtctgaaagaggacaga

SEQ ID NO: 13028 - DNA, 20 bp, Artificial Sequence
  Synthetic oligonucleotide; AAG chr11 5263501 5263520 5263517 +
agaggacagacagacaatat

SEQ ID NO: 13029 - DNA, 20 bp, Artificial Sequence
  Synthetic oligonucleotide; AGG chr11 5263502 5263521 5263518 +
gaggacagacagacaatata

SEQ ID NO: 13030 - DNA, 20 bp, Artificial Sequence
  Synthetic oligonucleotide; AAG chr11 5263514 5263533 5263530 +
acaatataaggtcacaccac

SEQ ID NO: 13031 - DNA, 20 bp, Artificial Sequence
  Synthetic oligonucleotide; TAG chr11 5263521 5263540 5263537 +
aaggtcacaccacaagaaac

SEQ ID NO: 13032 - DNA, 20 bp, Artificial Sequence
  Synthetic oligonucleotide; GAG chr11 5263523 5263542 5263539 +
ggtcacaccacaagaaacta

SEQ ID NO: 13033 - DNA, 20 bp, Artificial Sequence
  Synthetic oligonucleotide; CAG chr11 5263539 5263558 5263555 +
actagagaaacaaaaacaaa

SEQ ID NO: 13034 - DNA, 20 bp, Artificial Sequence
  Synthetic oligonucleotide; CAG chr11 5263552 5263571 5263568 +
aaacaaacagaaccaaaacc

SEQ ID NO: 13035 - DNA, 20 bp, Artificial Sequence
  Synthetic oligonucleotide; AAG chr11 5263558 5263577 5263574 +
acagaaccaaaacccagcaa

SEQ ID NO: 13036 - DNA, 20 bp, Artificial Sequence
  Synthetic oligonucleotide; AAG chr11 5263562 5263581 5263578 +
aaccaaaacccagcaaaaga

SEQ ID NO: 13037 - DNA, 20 bp, Artificial Sequence
  Synthetic oligonucleotide; AGG chr11 5263563 5263582 5263579 +
accaaaacccagcaaaagaa

SEQ ID NO: 13038 - DNA, 20 bp, Artificial Sequence
  Synthetic oligonucleotide; GGG chr11 5263564 5263583 5263580 +
ccaaaacccagcaaaagaaa

SEQ ID NO: 13039 - DNA, 20 bp, Artificial Sequence
  Synthetic oligonucleotide; AAG chr11 5263574 5263593 5263590 +
gcaaaagaaagggaataact

SEQ ID NO: 13040 - DNA, 20 bp, Artificial Sequence
  Synthetic oligonucleotide; AAG chr11 5263579 5263598 5263595 +
agaaagggaataactaagat

SEQ ID NO: 13041 - DNA, 20 bp, Artificial Sequence
  Synthetic oligonucleotide; GAG chr11 5263581 5263600 5263597 +
aaagggaataactaagataa

SEQ ID NO: 13042 - DNA, 20 bp, Artificial Sequence
  Synthetic oligonucleotide; AGG chr11 5263582 5263601 5263598 +
aagggaataactaagataag

SEQ ID NO: 13043 - DNA, 20 bp, Artificial Sequence
  Synthetic oligonucleotide; GAG chr11 5263584 5263603 5263600 +
gggaataactaagataagag

SEQ ID NO: 13044 - DNA, 20 bp, Artificial Sequence
  Synthetic oligonucleotide; AAG chr11 5263624 5263643 5263640 +
acaactgcaaaaaaatacaa

SEQ ID NO: 13045 - DNA, 20 bp, Artificial Sequence
  Synthetic oligonucleotide; AAG chr11 5263641 5263660 5263657 +
caaaagctaaatgaaataaa

SEQ ID NO: 13046 - DNA, 20 bp, Artificial Sequence
  Synthetic oligonucleotide; TGG chr11 5263645 5263664 5263661 +
agctaaatgaaataaaaagc

SEQ ID NO: 13047 - DNA, 20 bp, Artificial Sequence
  Synthetic oligonucleotide; AAG chr11 5263657 5263676 5263673 +
taaaaagctggttctttgaa

SEQ ID NO: 13048 - DNA, 20 bp, Artificial Sequence
  Synthetic oligonucleotide; TAG chr11 5263674 5263693 5263690 +
gaaaagataaataaaactga

SEQ ID NO: 13049 - DNA, 20 bp, Artificial Sequence
  Synthetic oligonucleotide; TAG chr11 5263682 5263701 5263698 +
aaataaaactgatagaccat

SEQ ID NO: 13050 - DNA, 20 bp, Artificial Sequence
  Synthetic oligonucleotide; AAG chr11 5263686 5263705 5263702 +
aaaactgatagaccattagc

SEQ ID NO: 13051 - DNA, 20 bp, Artificial Sequence
  Synthetic oligonucleotide; AAG chr11 5263696 5263715 5263712 +
gaccattagcaagattaacc

SEQ ID NO: 13052 - DNA, 20 bp, Artificial Sequence
  Synthetic oligonucleotide; AAG chr11 5263701 5263720 5263717 +
ttagcaagattaaccaagaa

SEQ ID NO: 13053 - DNA, 20 bp, Artificial Sequence
  Synthetic oligonucleotide; GAG chr11 5263703 5263722 5263719 +
agcaagattaaccaagaaaa

SEQ ID NO: 13054 - DNA, 20 bp, Artificial Sequence
  Synthetic oligonucleotide; AGG chr11 5263704 5263723 5263720 +
gcaagattaaccaagaaaag

SEQ ID NO: 13055 - DNA, 20 bp, Artificial Sequence
  Synthetic oligonucleotide; GAG chr11 5263706 5263725 5263722 +
aagattaaccaagaaaagag

SEQ ID NO: 13056 - DNA, 20 bp, Artificial Sequence
  Synthetic oligonucleotide; GAG chr11 5263708 5263727 5263724 +
gattaaccaagaaaagagga

SEQ ID NO: 13057 - DNA, 20 bp, Artificial Sequence
  Synthetic oligonucleotide; AAG chr11 5263711 5263730 5263727 +
taaccaagaaaagaggagag

SEQ ID NO: 13058 - DNA, 20 bp, Artificial Sequence
  Synthetic oligonucleotide; TAG chr11 5263730 5263749 5263746 +
gaagtgcaaataaactcaat

SEQ ID NO: 13059 - DNA, 20 bp, Artificial Sequence
  Synthetic oligonucleotide; CAG chr11 5263741 5263760 5263757 +
aaactcaattagaaacaaaa

SEQ ID NO: 13060 - DNA, 20 bp, Artificial Sequence
  Synthetic oligonucleotide; AGG chr11 5263742 5263761 5263758 +
aactcaattagaaacaaaac

SEQ ID NO: 13061 - DNA, 20 bp, Artificial Sequence
  Synthetic oligonucleotide; GAG chr11 5263744 5263763 5263760 +
ctcaattagaaacaaaacag

SEQ ID NO: 13062 - DNA, 20 bp, Artificial Sequence
  Synthetic oligonucleotide; CAG chr11 5263765 5263784 5263781 +
agatactattactgatacca

SEQ ID NO: 13063 - DNA, 20 bp, Artificial Sequence
  Synthetic oligonucleotide; AAG chr11 5263776 5263795 5263792 +
ctgataccacagaaatacaa

SEQ ID NO: 13064 - DNA, 20 bp, Artificial Sequence
  Synthetic oligonucleotide; AAG chr11 5263786 5263805 5263802 +
agaaatacaaaagattattc

SEQ ID NO: 13065 - DNA, 20 bp, Artificial Sequence
  Synthetic oligonucleotide; AGG chr11 5263787 5263806 5263803 +
gaaatacaaaagattattca

SEQ ID NO: 13066 - DNA, 20 bp, Artificial Sequence
  Synthetic oligonucleotide; TAG chr11 5263819 5263838 5263835 +
acacctttacatgcataaac

SEQ ID NO: 13067 - DNA, 20 bp, Artificial Sequence
  Synthetic oligonucleotide; AAG chr11 5263830 5263849 5263846 +
tgcataaactagaaaaccta

SEQ ID NO: 13068 - DNA, 20 bp, Artificial Sequence
  Synthetic oligonucleotide; AGG chr11 5263831 5263850 5263847 +
gcataaactagaaaacctaa

SEQ ID NO: 13069 - DNA, 20 bp, Artificial Sequence
  Synthetic oligonucleotide; GAG chr11 5263833 5263852 5263849 +
ataaactagaaaacctaaag

SEQ ID NO: 13070 - DNA, 20 bp, Artificial Sequence
  Synthetic oligonucleotide; TGG chr11 5263849 5263868 5263865 +
aaaggagacgttcgaattcc

SEQ ID NO: 13071 - DNA, 20 bp, Artificial Sequence
  Synthetic oligonucleotide; AAG chr11 5263853 5263872 5263869 +
gagacgttcgaattcctgga

SEQ ID NO: 13072 - DNA, 20 bp, Artificial Sequence
  Synthetic oligonucleotide; CAG chr11 5263859 5263878 5263875 +
ttcgaattcctggaaagata

SEQ ID NO: 13073 - DNA, 20 bp, Artificial Sequence
  Synthetic oligonucleotide; AGG chr11 5263860 5263879 5263876 +
tcgaattcctggaaagatac

SEQ ID NO: 13074 - DNA, 20 bp, Artificial Sequence
  Synthetic oligonucleotide; GGG chr11 5263861 5263880 5263877 +
cgaattcctggaaagataca

SEQ ID NO: 13075 - DNA, 20 bp, Artificial Sequence
  Synthetic oligonucleotide; TAG chr11 5263867 5263886 5263883 +
cctggaaagatacagggctc

SEQ ID NO: 13076 - DNA, 20 bp, Artificial Sequence
  Synthetic oligonucleotide; AAG chr11 5263873 5263892 5263889 +
aagatacagggctctagctt

SEQ ID NO: 13077 - DNA, 20 bp, Artificial Sequence
  Synthetic oligonucleotide; CAG chr11 5263877 5263896 5263893 +
tacagggctctagcttaagt

SEQ ID NO: 13078 - DNA, 20 bp, Artificial Sequence
  Synthetic oligonucleotide; AGG chr11 5263878 5263897 5263894 +
acagggctctagcttaagtc

SEQ ID NO: 13079 - DNA, 20 bp, Artificial Sequence
  Synthetic oligonucleotide; AAG chr11 5263881 5263900 5263897 +
gggctctagcttaagtcagg

SEQ ID NO: 13080 - DNA, 20 bp, Artificial Sequence
  Synthetic oligonucleotide; TAG chr11 5263887 5263906 5263903 +
tagcttaagtcaggaagaat

SEQ ID NO: 13081 - DNA, 20 bp, Artificial Sequence
  Synthetic oligonucleotide; CAG chr11 5263900 5263919 5263916 +
gaagaattagataccctgaa

SEQ ID NO: 13082 - DNA, 20 bp, Artificial Sequence
  Synthetic oligonucleotide; CAG chr11 5263905 5263924 5263921 +
attagataccctgaacagac

SEQ ID NO: 13083 - DNA, 20 bp, Artificial Sequence
  Synthetic oligonucleotide; AAG chr11 5263912 5263931 5263928 +
accctgaacagaccagtaat

SEQ ID NO: 13084 - DNA, 20 bp, Artificial Sequence
  Synthetic oligonucleotide; CAG chr11 5263915 5263934 5263931 +
ctgaacagaccagtaataag

SEQ ID NO: 13085 - DNA, 20 bp, Artificial Sequence
  Synthetic oligonucleotide; AAG chr11 5263919 5263938 5263935 +
acagaccagtaataagcagc

SEQ ID NO: 13086 - DNA, 20 bp, Artificial Sequence
  Synthetic oligonucleotide; AAG chr11 5263957 5263976 5263973 +
aaaatttaccaacaacaaaa

SEQ ID NO: 13087 - DNA, 20 bp, Artificial Sequence
  Synthetic oligonucleotide; CAG chr11 5263962 5263981 5263978 +
ttaccaacaacaaaaaagtc

SEQ ID NO: 13088 - DNA, 20 bp, Artificial Sequence
  Synthetic oligonucleotide; AGG chr11 5263963 5263982 5263979 +
taccaacaacaaaaaagtcc

SEQ ID NO: 13089 - DNA, 20 bp, Artificial Sequence
  Synthetic oligonucleotide; CAG chr11 5263968 5263987 5263984 +
acaacaaaaaagtccaggac

SEQ ID NO: 13090 - DNA, 20 bp, Artificial Sequence
  Synthetic oligonucleotide; TAG chr11 5263972 5263991 5263988 +
caaaaaagtccaggaccaga

SEQ ID NO: 13091 - DNA, 20 bp, Artificial Sequence
  Synthetic oligonucleotide; CAG chr11 5263980 5263999 5263996 +
tccaggaccagatagattca

SEQ ID NO: 13092 - DNA, 20 bp, Artificial Sequence
  Synthetic oligonucleotide; CAG chr11 5263994 5264013 5264010 +
gattcacagctgaattctac

SEQ ID NO: 13093 - DNA, 20 bp, Artificial Sequence
  Synthetic oligonucleotide; AAG chr11 5264004 5264023 5264020 +
tgaattctaccagacattca

SEQ ID NO: 13094 - DNA, 20 bp, Artificial Sequence
  Synthetic oligonucleotide; AAG chr11 5264007 5264026 5264023 +
attctaccagacattcaaag

SEQ ID NO: 13095 - DNA, 20 bp, Artificial Sequence
  Synthetic oligonucleotide; CAG chr11 5264031 5264050 5264047 +
attgataccaatcctattga

SEQ ID NO: 13096 - DNA, 20 bp, Artificial Sequence
  Synthetic oligonucleotide; AAG chr11 5264042 5264061 5264058 +
tcctattgacagtattctac

SEQ ID NO: 13097 - DNA, 20 bp, Artificial Sequence
  Synthetic oligonucleotide; TAG chr11 5264046 5264065 5264062 +
attgacagtattctacaaga

SEQ ID NO: 13098 - DNA, 20 bp, Artificial Sequence
  Synthetic oligonucleotide; GAG chr11 5264048 5264067 5264064 +
tgacagtattctacaagata

SEQ ID NO: 13099 - DNA, 20 bp, Artificial Sequence
  Synthetic oligonucleotide; AAG chr11 5264052 5264071 5264068 +
agtattctacaagatagaga

SEQ ID NO: 13100 - DNA, 20 bp, Artificial Sequence
  Synthetic oligonucleotide; GAG chr11 5264054 5264073 5264070 +
tattctacaagatagagaaa

SEQ ID NO: 13101 - DNA, 20 bp, Artificial Sequence
  Synthetic oligonucleotide; GAG chr11 5264056 5264075 5264072 +
ttctacaagatagagaaaga

SEQ ID NO: 13102 - DNA, 20 bp, Artificial Sequence
  Synthetic oligonucleotide; AAG chr11 5264082 5264101 5264098 +
cctccctaaatcattctatg

SEQ ID NO: 13103 - DNA, 20 bp, Artificial Sequence
  Synthetic oligonucleotide; CAG chr11 5264086 5264105 5264102 +
cctaaatcattctatgaagc

SEQ ID NO: 13104 - DNA, 20 bp, Artificial Sequence
  Synthetic oligonucleotide; TGG chr11 5264109 5264128 5264125 +
tatcaccttaataccaaaac

SEQ ID NO: 13105 - DNA, 20 bp, Artificial Sequence
  Synthetic oligonucleotide; GGG chr11 5264110 5264129 5264126 +
atcaccttaataccaaaact

SEQ ID NO: 13106 - DNA, 20 bp, Artificial Sequence
  Synthetic oligonucleotide; AAG chr11 5264114 5264133 5264130 +
ccttaataccaaaactggga

SEQ ID NO: 13107 - DNA, 20 bp, Artificial Sequence
  Synthetic oligonucleotide; CAG chr11 5264143 5264162 5264159 +
accaaaaaaaaaaaacacta

SEQ ID NO: 13108 - DNA, 20 bp, Artificial Sequence
  Synthetic oligonucleotide; TAG chr11 5264166 5264185 5264182 +
atcaatatccctgatgaaca

SEQ ID NO: 13109 - DNA, 20 bp, Artificial Sequence
  Synthetic oligonucleotide; TAG chr11 5264193 5264212 5264209 +
caacatccttgacaaaatac

SEQ ID NO: 13110 - DNA, 20 bp, Artificial Sequence
  Synthetic oligonucleotide; TAG chr11 5264200 5264219 5264216 +
cttgacaaaatactagctaa

SEQ ID NO: 13111 - DNA, 20 bp, Artificial Sequence
  Synthetic oligonucleotide; CAG chr11 5264210 5264229 5264226 +
tactagctaatagcatccga

SEQ ID NO: 13112 - DNA, 20 bp, Artificial Sequence
  Synthetic oligonucleotide; AAG chr11 5264232 5264251 5264248 +
gcatatcaaaacccatgatc

SEQ ID NO: 13113 - DNA, 20 bp, Artificial Sequence
  Synthetic oligonucleotide; TGG chr11 5264235 5264254 5264251 +
tatcaaaacccatgatcaag

SEQ ID NO: 13114 - DNA, 20 bp, Artificial Sequence
  Synthetic oligonucleotide; GGG chr11 5264236 5264255 5264252 +
atcaaaacccatgatcaagt

SEQ ID NO: 13115 - DNA, 20 bp, Artificial Sequence
  Synthetic oligonucleotide; GAG chr11 5264247 5264266 5264263 +
tgatcaagtgggtttcatgc

SEQ ID NO: 13116 - DNA, 20 bp, Artificial Sequence
  Synthetic oligonucleotide; AGG chr11 5264248 5264267 5264264 +
gatcaagtgggtttcatgcg

SEQ ID NO: 13117 - DNA, 20 bp, Artificial Sequence
  Synthetic oligonucleotide; GGG chr11 5264249 5264268 5264265 +
atcaagtgggtttcatgcga

SEQ ID NO: 13118 - DNA, 20 bp, Artificial Sequence
  Synthetic oligonucleotide; CGG chr11 5264257 5264276 5264273 +
ggtttcatgcgagggatgca

SEQ ID NO: 13119 - DNA, 20 bp, Artificial Sequence
  Synthetic oligonucleotide; TGG chr11 5264261 5264280 5264277 +
tcatgcgagggatgcacgga

SEQ ID NO: 13120 - DNA, 20 bp, Artificial Sequence
  Synthetic oligonucleotide; AAG chr11 5264276 5264295 5264292 +
acggatggtttaacatacgc

SEQ ID NO: 13121 - DNA, 20 bp, Artificial Sequence
  Synthetic oligonucleotide; AAG chr11 5264284 5264303 5264300 +
tttaacatacgcaagtcaat

SEQ ID NO: 13122 - DNA, 20 bp, Artificial Sequence
  Synthetic oligonucleotide; AAG chr11 5264303 5264322 5264319 +
taagtgtgatacacaacata

SEQ ID NO: 13123 - DNA, 20 bp, Artificial Sequence
  Synthetic oligonucleotide; GAG chr11 5264305 5264324 5264321 +
agtgtgatacacaacataaa

SEQ ID NO: 13124 - DNA, 20 bp, Artificial Sequence
  Synthetic oligonucleotide; TGG chr11 5264311 5264330 5264327 +
atacacaacataaagagaat

SEQ ID NO: 13125 - DNA, 20 bp, Artificial Sequence
  Synthetic oligonucleotide; TAG chr11 5264340 5264359 5264356 +
aaatcatgtgattatctcaa

SEQ ID NO: 13126 - DNA, 20 bp, Artificial Sequence
  Synthetic oligonucleotide; CAG chr11 5264346 5264365 5264362 +
tgtgattatctcaatagcca

SEQ ID NO: 13127 - DNA, 20 bp, Artificial Sequence
  Synthetic oligonucleotide; CAG chr11 5264393 5264412 5264409 +
atcactttatgactaaaact

SEQ ID NO: 13128 - DNA, 20 bp, Artificial Sequence
  Synthetic oligonucleotide; CGG chr11 5264402 5264421 5264418 +
tgactaaaactcagcaaaat

SEQ ID NO: 13129 - DNA, 20 bp, Artificial Sequence
  Synthetic oligonucleotide; AAG chr11 5264411 5264430 5264427 +
ctcagcaaaatcggtttaca

SEQ ID NO: 13130 - DNA, 20 bp, Artificial Sequence
  Synthetic oligonucleotide; AGG chr11 5264412 5264431 5264428 +
tcagcaaaatcggtttacaa

SEQ ID NO: 13131 - DNA, 20 bp, Artificial Sequence
  Synthetic oligonucleotide; AAG chr11 5264434 5264453 5264450 +
gacatacctcaatgtaataa

SEQ ID NO: 13132 - DNA, 20 bp, Artificial Sequence
  Synthetic oligonucleotide; CAG chr11 5264438 5264457 5264454 +
tacctcaatgtaataaaagc

SEQ ID NO: 13133 - DNA, 20 bp, Artificial Sequence
  Synthetic oligonucleotide; TGG chr11 5264444 5264463 5264460 +
aatgtaataaaagccagcta

SEQ ID NO: 13134 - DNA, 20 bp, Artificial Sequence
  Synthetic oligonucleotide; CAG chr11 5264455 5264474 5264471 +
agccagctatggtaaacaca

SEQ ID NO: 13135 - DNA, 20 bp, Artificial Sequence
  Synthetic oligonucleotide; TGG chr11 5264474 5264493 5264490 +
acagccaacattatattgaa

SEQ ID NO: 13136 - DNA, 20 bp, Artificial Sequence
  Synthetic oligonucleotide; GGG chr11 5264475 5264494 5264491 +
cagccaacattatattgaat

SEQ ID NO: 13137 - DNA, 20 bp, Artificial Sequence
  Synthetic oligonucleotide; AAG chr11 5264481 5264500 5264497 +
acattatattgaatgggaaa

SEQ ID NO: 13138 - DNA, 20 bp, Artificial Sequence
  Synthetic oligonucleotide; AAG chr11 5264488 5264507 5264504 +
attgaatgggaaaaagttaa

SEQ ID NO: 13139 - DNA, 20 bp, Artificial Sequence
  Synthetic oligonucleotide; TGG chr11 5264507 5264526 5264523 +
aaagcattctgtctgaaaac

SEQ ID NO: 13140 - DNA, 20 bp, Artificial Sequence
  Synthetic oligonucleotide; GAG chr11 5264513 5264532 5264529 +
ttctgtctgaaaactggaat

SEQ ID NO: 13141 - DNA, 20 bp, Artificial Sequence
  Synthetic oligonucleotide; AAG chr11 5264518 5264537 5264534 +
tctgaaaactggaatgagac

SEQ ID NO: 13142 - DNA, 20 bp, Artificial Sequence
  Synthetic oligonucleotide; AGG chr11 5264519 5264538 5264535 +
ctgaaaactggaatgagaca

SEQ ID NO: 13143 - DNA, 20 bp, Artificial Sequence
  Synthetic oligonucleotide; TGG chr11 5264557 5264576 5264573 +
acttctctttaacatattac

SEQ ID NO: 13144 - DNA, 20 bp, Artificial Sequence
  Synthetic oligonucleotide; AAG chr11 5264560 5264579 5264576 +
tctctttaacatattactgg

SEQ ID NO: 13145 - DNA, 20 bp, Artificial Sequence
  Synthetic oligonucleotide; TAG chr11 5264566 5264585 5264582 +
taacatattactggaagtcc

SEQ ID NO: 13146 - DNA, 20 bp, Artificial Sequence
  Synthetic oligonucleotide; AAG chr11 5264570 5264589 5264586 +
atattactggaagtcctagc

SEQ ID NO: 13147 - DNA, 20 bp, Artificial Sequence
  Synthetic oligonucleotide; GAG chr11 5264572 5264591 5264588 +
attactggaagtcctagcaa

SEQ ID NO: 13148 - DNA, 20 bp, Artificial Sequence
  Synthetic oligonucleotide; CAG chr11 5264579 5264598 5264595 +
gaagtcctagcaagagcaat

SEQ ID NO: 13149 - DNA, 20 bp, Artificial Sequence
  Synthetic oligonucleotide; AAG chr11 5264584 5264603 5264600 +
cctagcaagagcaatcagac

SEQ ID NO: 13150 - DNA, 20 bp, Artificial Sequence
  Synthetic oligonucleotide; GAG chr11 5264586 5264605 5264602 +
tagcaagagcaatcagacaa

SEQ ID NO: 13151 - DNA, 20 bp, Artificial Sequence
  Synthetic oligonucleotide; AAG chr11 5264593 5264612 5264609 +
agcaatcagacaagagaaac

SEQ ID NO: 13152 - DNA, 20 bp, Artificial Sequence
  Synthetic oligonucleotide; AAG chr11 5264598 5264617 5264614 +
tcagacaagagaaacaagta

SEQ ID NO: 13153 - DNA, 20 bp, Artificial Sequence
  Synthetic oligonucleotide; AAG chr11 5264617 5264636 5264633 +
aaagcacatccaaattgtta

SEQ ID NO: 13154 - DNA, 20 bp, Artificial Sequence
  Synthetic oligonucleotide; GAG chr11 5264619 5264638 5264635 +
agcacatccaaattgttaaa

SEQ ID NO: 13155 - DNA, 20 bp, Artificial Sequence
  Synthetic oligonucleotide; AAG chr11 5264623 5264642 5264639 +
catccaaattgttaaagaga

SEQ ID NO: 13156 - DNA, 20 bp, Artificial Sequence
  Synthetic oligonucleotide; TAG chr11 5264665 5264684 5264681 +
tgatgatatgattgtgtatg

SEQ ID NO: 13157 - DNA, 20 bp, Artificial Sequence
  Synthetic oligonucleotide; AAG chr11 5264677 5264696 5264693 +
tgtgtatgtagaaaactcta

SEQ ID NO: 13158 - DNA, 20 bp, Artificial Sequence
  Synthetic oligonucleotide; TAG chr11 5264697 5264716 5264713 +
aagactcctccaaaaccccc

SEQ ID NO: 13159 - DNA, 20 bp, Artificial Sequence
  Synthetic oligonucleotide; CAG chr11 5264716 5264735 5264732 +
ctagaactgataaaataatt

SEQ ID NO: 13160 - DNA, 20 bp, Artificial Sequence
  Synthetic oligonucleotide; AAG chr11 5264721 5264740 5264737 +
actgataaaataattcagca

SEQ ID NO: 13161 - DNA, 20 bp, Artificial Sequence
  Synthetic oligonucleotide; TGG chr11 5264728 5264747 5264744 +
aaataattcagcaaagtttc

SEQ ID NO: 13162 - DNA, 20 bp, Artificial Sequence
  Synthetic oligonucleotide; GAG chr11 5264754 5264773 5264770 +
caaaattaacgtacaccaat

SEQ ID NO: 13163 - DNA, 20 bp, Artificial Sequence
  Synthetic oligonucleotide; CAG chr11 5264773 5264792 5264789 +
tgagttgctttcttacatac

SEQ ID NO: 13164 - DNA, 20 bp, Artificial Sequence
  Synthetic oligonucleotide; AAG chr11 5264784 5264803 5264800 +
cttacataccagcaatgacc

SEQ ID NO: 13165 - DNA, 20 bp, Artificial Sequence
  Synthetic oligonucleotide; GAG chr11 5264789 5264808 5264805 +
ataccagcaatgaccaagct

SEQ ID NO: 13166 - DNA, 20 bp, Artificial Sequence
  Synthetic oligonucleotide; AAG chr11 5264801 5264820 5264817 +
accaagctgagaataaaatc

SEQ ID NO: 13167 - DNA, 20 bp, Artificial Sequence
  Synthetic oligonucleotide; TAG chr11 5264823 5264842 5264839 +
gaactcaaccccttttacaa

SEQ ID NO: 13168 - DNA, 20 bp, Artificial Sequence
  Synthetic oligonucleotide; TAG chr11 5264859 5264878 5264875 +
aacaaaacaaaacaaaaact

SEQ ID NO: 13169 - DNA, 20 bp, Artificial Sequence
  Synthetic oligonucleotide; AGG chr11 5264860 5264879 5264876 +
acaaaacaaaacaaaaactt

SEQ ID NO: 13170 - DNA, 20 bp, Artificial Sequence
  Synthetic oligonucleotide; AAG chr11 5264878 5264897 5264894 +
ttaggaatatatacctaacc

SEQ ID NO: 13171 - DNA, 20 bp, Artificial Sequence
  Synthetic oligonucleotide; AGG chr11 5264879 5264898 5264895 +
taggaatatatacctaacca

SEQ ID NO: 13172 - DNA, 20 bp, Artificial Sequence
  Synthetic oligonucleotide; GAG chr11 5264881 5264900 5264897 +
ggaatatatacctaaccaag

SEQ ID NO: 13173 - DNA, 20 bp, Artificial Sequence
  Synthetic oligonucleotide; AGG chr11 5264882 5264901 5264898 +
gaatatatacctaaccaagg

SEQ ID NO: 13174 - DNA, 20 bp, Artificial Sequence
  Synthetic oligonucleotide; AAG chr11 5264888 5264907 5264904 +
atacctaaccaaggaggtga

SEQ ID NO: 13175 - DNA, 20 bp, Artificial Sequence
  Synthetic oligonucleotide; AAG chr11 5264899 5264918 5264915 +
aggaggtgaaagacatctac

SEQ ID NO: 13176 - DNA, 20 bp, Artificial Sequence
  Synthetic oligonucleotide; AGG chr11 5264900 5264919 5264916 +
ggaggtgaaagacatctaca

SEQ ID NO: 13177 - DNA, 20 bp, Artificial Sequence
  Synthetic oligonucleotide; CGG chr11 5264917 5264936 5264933 +
acaaggaaaactacaaaaca

SEQ ID NO: 13178 - DNA, 20 bp, Artificial Sequence
  Synthetic oligonucleotide; AAG chr11 5264924 5264943 5264940 +
aaactacaaaacacggctga

SEQ ID NO: 13179 - DNA, 20 bp, Artificial Sequence
  Synthetic oligonucleotide; AAG chr11 5264936 5264955 5264952 +
acggctgaaagtaatcatat

SEQ ID NO: 13180 - DNA, 20 bp, Artificial Sequence
  Synthetic oligonucleotide; TGG chr11 5264950 5264969 5264966 +
tcatataagacacaaacaaa

SEQ ID NO: 13181 - DNA, 20 bp, Artificial Sequence
  Synthetic oligonucleotide; TAG chr11 5264971 5264990 5264987 +
ggaaacacatgccattctca

SEQ ID NO: 13182 - DNA, 20 bp, Artificial Sequence
  Synthetic oligonucleotide; TGG chr11 5264975 5264994 5264991 +
acacatgccattctcataga

SEQ ID NO: 13183 - DNA, 20 bp, Artificial Sequence
  Synthetic oligonucleotide; GGG chr11 5264976 5264995 5264992 +
cacatgccattctcatagat

SEQ ID NO: 13184 - DNA, 20 bp, Artificial Sequence
  Synthetic oligonucleotide; TAG chr11 5264979 5264998 5264995 +
atgccattctcatagatggg

SEQ ID NO: 13185 - DNA, 20 bp, Artificial Sequence
  Synthetic oligonucleotide; TGG chr11 5264999 5265018 5265015 +
tagaatcaatattgtgaaaa

SEQ ID NO: 13186 - DNA, 20 bp, Artificial Sequence
  Synthetic oligonucleotide; CAG chr11 5265011 5265030 5265027 +
tgtgaaaatggccataatgc

SEQ ID NO: 13187 - DNA, 20 bp, Artificial Sequence
  Synthetic oligonucleotide; AAG chr11 5265014 5265033 5265030 +
gaaaatggccataatgccag

SEQ ID NO: 13188 - DNA, 20 bp, Artificial Sequence
  Synthetic oligonucleotide; TAG chr11 5265059 5265078 5265075 +
tcccatcaaaataccaccat

SEQ ID NO: 13189 - DNA, 20 bp, Artificial Sequence
  Synthetic oligonucleotide; CAG chr11 5265068 5265087 5265084 +
aataccaccattagtcttca

SEQ ID NO: 13190 - DNA, 20 bp, Artificial Sequence
  Synthetic oligonucleotide; TAG chr11 5265074 5265093 5265090 +
accattagtcttcacagaac

SEQ ID NO: 13191 - DNA, 20 bp, Artificial Sequence
  Synthetic oligonucleotide; TGG chr11 5265100 5265119 5265116 +
aaacaatcctaaaattctta

SEQ ID NO: 13192 - DNA, 20 bp, Artificial Sequence
  Synthetic oligonucleotide; AAG chr11 5265111 5265130 5265127 +
aaattcttatggaaccaaaa

SEQ ID NO: 13193 - DNA, 20 bp, Artificial Sequence
  Synthetic oligonucleotide; GAG chr11 5265113 5265132 5265129 +
attcttatggaaccaaaaaa

SEQ ID NO: 13194 - DNA, 20 bp, Artificial Sequence
  Synthetic oligonucleotide; AAG chr11 5265126 5265145 5265142 +
caaaaaagagcccaataaac

SEQ ID NO: 13195 - DNA, 20 bp, Artificial Sequence
  Synthetic oligonucleotide; AAG chr11 5265130 5265149 5265146 +
aaagagcccaataaacaagc

SEQ ID NO: 13196 - DNA, 20 bp, Artificial Sequence
  Synthetic oligonucleotide; AAG chr11 5265142 5265161 5265158 +
aaacaagcaagtctaaaaaa

SEQ ID NO: 13197 - DNA, 20 bp, Artificial Sequence
  Synthetic oligonucleotide; AAG chr11 5265155 5265174 5265171 +
taaaaaaaagaacaaatctg

SEQ ID NO: 13198 - DNA, 20 bp, Artificial Sequence
  Synthetic oligonucleotide; AGG chr11 5265156 5265175 5265172 +
aaaaaaaagaacaaatctga

SEQ ID NO: 13199 - DNA, 20 bp, Artificial Sequence
  Synthetic oligonucleotide; AAG chr11 5265190 5265209 5265206 +
ctcatttcaaactatacaat

SEQ ID NO: 13200 - DNA, 20 bp, Artificial Sequence
  Synthetic oligonucleotide; AGG chr11 5265191 5265210 5265207 +
tcatttcaaactatacaata

SEQ ID NO: 13201 - DNA, 20 bp, Artificial Sequence
  Synthetic oligonucleotide; TAG chr11 5265197 5265216 5265213 +
caaactatacaataaggcca

SEQ ID NO: 13202 - DNA, 20 bp, Artificial Sequence
  Synthetic oligonucleotide; CAG chr11 5265209 5265228 5265225 +
taaggccatagtcaccaaaa

SEQ ID NO: 13203 - DNA, 20 bp, Artificial Sequence
  Synthetic oligonucleotide; TGG chr11 5265220 5265239 5265236 +
tcaccaaaacagcatgatgc

SEQ ID NO: 13204 - DNA, 20 bp, Artificial Sequence
  Synthetic oligonucleotide; TAG chr11 5265231 5265250 5265247 +
gcatgatgctggtgtacaaa

SEQ ID NO: 13205 - DNA, 20 bp, Artificial Sequence
  Synthetic oligonucleotide; AGG chr11 5265232 5265251 5265248 +
catgatgctggtgtacaaat

SEQ ID NO: 13206 - DNA, 20 bp, Artificial Sequence
  Synthetic oligonucleotide; TGG chr11 5265247 5265266 5265263 +
caaataggcacatcgaccaa

SEQ ID NO: 13207 - DNA, 20 bp, Artificial Sequence
  Synthetic oligonucleotide; CAG chr11 5265252 5265271 5265268 +
aggcacatcgaccaatggaa

SEQ ID NO: 13208 - DNA, 20 bp, Artificial Sequence
  Synthetic oligonucleotide; TAG chr11 5265257 5265276 5265273 +
catcgaccaatggaacagaa

SEQ ID NO: 13209 - DNA, 20 bp, Artificial Sequence
  Synthetic oligonucleotide; GAG chr11 5265259 5265278 5265275 +
tcgaccaatggaacagaata

SEQ ID NO: 13210 - DNA, 20 bp, Artificial Sequence
  Synthetic oligonucleotide; CAG chr11 5265266 5265285 5265282 +
atggaacagaatagagaacc

SEQ ID NO: 13211 - DNA, 20 bp, Artificial Sequence
  Synthetic oligonucleotide; AAG chr11 5265308 5265327 5265324 +
catccaactgatctttgaca

SEQ ID NO: 13212 - DNA, 20 bp, Artificial Sequence
  Synthetic oligonucleotide; AAG chr11 5265325 5265344 5265341 +
acaaagcaaacaaaaacata

SEQ ID NO: 13213 - DNA, 20 bp, Artificial Sequence
  Synthetic oligonucleotide; TGG chr11 5265328 5265347 5265344 +
aagcaaacaaaaacataaag

SEQ ID NO: 13214 - DNA, 20 bp, Artificial Sequence
  Synthetic oligonucleotide; GGG chr11 5265329 5265348 5265345 +
agcaaacaaaaacataaagt

SEQ ID NO: 13215 - DNA, 20 bp, Artificial Sequence
  Synthetic oligonucleotide; GGG chr11 5265330 5265349 5265346 +
gcaaacaaaaacataaagtg

SEQ ID NO: 13216 - DNA, 20 bp, Artificial Sequence
  Synthetic oligonucleotide; AAG chr11 5265334 5265353 5265350 +
acaaaaacataaagtgggga

SEQ ID NO: 13217 - DNA, 20 bp, Artificial Sequence
  Synthetic oligonucleotide; AGG chr11 5265335 5265354 5265351 +
caaaaacataaagtggggaa

SEQ ID NO: 13218 - DNA, 20 bp, Artificial Sequence
  Synthetic oligonucleotide; GGG chr11 5265336 5265355 5265352 +
aaaaacataaagtggggaaa

SEQ ID NO: 13219 - DNA, 20 bp, Artificial Sequence
  Synthetic oligonucleotide; TGG chr11 5265355 5265374 5265371 +
agggcaccctattcaacaaa

SEQ ID NO: 13220 - DNA, 20 bp, Artificial Sequence
  Synthetic oligonucleotide; CGG chr11 5265360 5265379 5265376 +
accctattcaacaaatggtg

SEQ ID NO: 13221 - DNA, 20 bp, Artificial Sequence
  Synthetic oligonucleotide; GGG chr11 5265361 5265380 5265377 +
ccctattcaacaaatggtgc

SEQ ID NO: 13222 - DNA, 20 bp, Artificial Sequence
  Synthetic oligonucleotide; GGG chr11 5265362 5265381 5265378 +
cctattcaacaaatggtgcg

SEQ ID NO: 13223 - DNA, 20 bp, Artificial Sequence
  Synthetic oligonucleotide; TAG chr11 5265366 5265385 5265382 +
ttcaacaaatggtgcgggga

SEQ ID NO: 13224 - DNA, 20 bp, Artificial Sequence
  Synthetic oligonucleotide; TGG chr11 5265370 5265389 5265386 +
acaaatggtgcggggatagc

SEQ ID NO: 13225 - DNA, 20 bp, Artificial Sequence
  Synthetic oligonucleotide; AAG chr11 5265374 5265393 5265390 +
atggtgcggggatagctggc

SEQ ID NO: 13226 - DNA, 20 bp, Artificial Sequence
  Synthetic oligonucleotide; TAG chr11 5265384 5265403 5265400 +
gatagctggcaagctacatg

SEQ ID NO: 13227 - DNA, 20 bp, Artificial Sequence
  Synthetic oligonucleotide; AGG chr11 5265385 5265404 5265401 +
atagctggcaagctacatgt

SEQ ID NO: 13228 - DNA, 20 bp, Artificial Sequence
  Synthetic oligonucleotide; GAG chr11 5265387 5265406 5265403 +
agctggcaagctacatgtag

SEQ ID NO: 13229 - DNA, 20 bp, Artificial Sequence
  Synthetic oligonucleotide; TGG chr11 5265398 5265417 5265414 +
tacatgtaggagaatgaaac

SEQ ID NO: 13230 - DNA, 20 bp, Artificial Sequence
  Synthetic oligonucleotide; AAG chr11 5265435 5265454 5265451 +
ccttatacaaaaatcaactc

SEQ ID NO: 13231 - DNA, 20 bp, Artificial Sequence
  Synthetic oligonucleotide; TGG chr11 5265439 5265458 5265455 +
atacaaaaatcaactcaaga

SEQ ID NO: 13232 - DNA, 20 bp, Artificial Sequence
  Synthetic oligonucleotide; AAG chr11 5265445 5265464 5265461 +
aaatcaactcaagatggatc

SEQ ID NO: 13233 - DNA, 20 bp, Artificial Sequence
  Synthetic oligonucleotide; AGG chr11 5265446 5265465 5265462 +
aatcaactcaagatggatca

SEQ ID NO: 13234 - DNA, 20 bp, Artificial Sequence
  Synthetic oligonucleotide; AAG chr11 5265459 5265478 5265475 +
tggatcaaggacttaaatct

SEQ ID NO: 13235 - DNA, 20 bp, Artificial Sequence
  Synthetic oligonucleotide; TAG chr11 5265482 5265501 5265498 +
ccctgaaactgtaacaattc

SEQ ID NO: 13236 - DNA, 20 bp, Artificial Sequence
  Synthetic oligonucleotide; CGG chr11 5265495 5265514 5265511 +
acaattctagaaaataacat

SEQ ID NO: 13237 - DNA, 20 bp, Artificial Sequence
  Synthetic oligonucleotide; TGG chr11 5265516 5265535 5265532 +
ggaaaaacccttctacacat

SEQ ID NO: 13238 - DNA, 20 bp, Artificial Sequence
  Synthetic oligonucleotide; TAG chr11 5265521 5265540 5265537 +
aacccttctacacattggct

SEQ ID NO: 13239 - DNA, 20 bp, Artificial Sequence
  Synthetic oligonucleotide; AGG chr11 5265522 5265541 5265538 +
acccttctacacattggctt

SEQ ID NO: 13240 - DNA, 20 bp, Artificial Sequence
  Synthetic oligonucleotide; AAG chr11 5265526 5265545 5265542 +
ttctacacattggcttagga

SEQ ID NO: 13241 - DNA, 20 bp, Artificial Sequence
  Synthetic oligonucleotide; AGG chr11 5265527 5265546 5265543 +
tctacacattggcttaggaa

SEQ ID NO: 13242 - DNA, 20 bp, Artificial Sequence
  Synthetic oligonucleotide; AAG chr11 5265541 5265560 5265557 +
taggaaaggatttcatgacc

SEQ ID NO: 13243 - DNA, 20 bp, Artificial Sequence
  Synthetic oligonucleotide; AAG chr11 5265570 5265589 5265586 +
aatgcaaatacataaaaaca

SEQ ID NO: 13244 - DNA, 20 bp, Artificial Sequence
  Synthetic oligonucleotide; TGG chr11 5265581 5265600 5265597 +
ataaaaacaaagaaaatatc

SEQ ID NO: 13245 - DNA, 20 bp, Artificial Sequence
  Synthetic oligonucleotide; GGG chr11 5265582 5265601 5265598 +
taaaaacaaagaaaatatct

SEQ ID NO: 13246 - DNA, 20 bp, Artificial Sequence
  Synthetic oligonucleotide; AAG chr11 5265599 5265618 5265615 +
tctgggactaaattaaacta

SEQ ID NO: 13247 - DNA, 20 bp, Artificial Sequence
  Synthetic oligonucleotide; GAG chr11 5265601 5265620 5265617 +
tgggactaaattaaactaaa

SEQ ID NO: 13248 - DNA, 20 bp, Artificial Sequence
  Synthetic oligonucleotide; TGG chr11 5265612 5265631 5265628 +
taaactaaagagcttttgca

SEQ ID NO: 13249 - DNA, 20 bp, Artificial Sequence
  Synthetic oligonucleotide; AAG chr11 5265618 5265637 5265634 +
aaagagcttttgcatggcaa

SEQ ID NO: 13250 - DNA, 20 bp, Artificial Sequence
  Synthetic oligonucleotide; AGG chr11 5265619 5265638 5265635 +
aagagcttttgcatggcaaa

SEQ ID NO: 13251 - DNA, 20 bp, Artificial Sequence
  Synthetic oligonucleotide; AAG chr11 5265622 5265641 5265638 +
agcttttgcatggcaaaagg

SEQ ID NO: 13252 - DNA, 20 bp, Artificial Sequence
  Synthetic oligonucleotide; GAG chr11 5265624 5265643 5265640 +
cttttgcatggcaaaaggaa

SEQ ID NO: 13253 - DNA, 20 bp, Artificial Sequence
  Synthetic oligonucleotide; CAG chr11 5265631 5265650 5265647 +
atggcaaaaggaagagtctg

SEQ ID NO: 13254 - DNA, 20 bp, Artificial Sequence
  Synthetic oligonucleotide; CAG chr11 5265640 5265659 5265656 +
ggaagagtctgcagaataaa

SEQ ID NO: 13255 - DNA, 20 bp, Artificial Sequence
  Synthetic oligonucleotide; CAG chr11 5265651 5265670 5265667 +
cagaataaacagacaaccca

SEQ ID NO: 13256 - DNA, 20 bp, Artificial Sequence
  Synthetic oligonucleotide; GAG chr11 5265653 5265672 5265669 +
gaataaacagacaacccaca

SEQ ID NO: 13257 - DNA, 20 bp, Artificial Sequence
  Synthetic oligonucleotide; TGG chr11 5265656 5265675 5265672 +
taaacagacaacccacagag

SEQ ID NO: 13258 - DNA, 20 bp, Artificial Sequence
  Synthetic oligonucleotide; GGG chr11 5265657 5265676 5265673 +
aaacagacaacccacagagt

SEQ ID NO: 13259 - DNA, 20 bp, Artificial Sequence
  Synthetic oligonucleotide; GAG chr11 5265659 5265678 5265675 +
acagacaacccacagagtgg

SEQ ID NO: 13260 - DNA, 20 bp, Artificial Sequence
  Synthetic oligonucleotide; AAG chr11 5265691 5265710 5265707 +
acaatctatacatctgacaa

SEQ ID NO: 13261 - DNA, 20 bp, Artificial Sequence
  Synthetic oligonucleotide; CAG chr11 5265703 5265722 5265719 +
tctgacaaaagaataatatc

SEQ ID NO: 13262 - DNA, 20 bp, Artificial Sequence
  Synthetic oligonucleotide; AGG chr11 5265704 5265723 5265720 +
ctgacaaaagaataatatcc

SEQ ID NO: 13263 - DNA, 20 bp, Artificial Sequence
  Synthetic oligonucleotide; TAG chr11 5265725 5265744 5265741 +
ggctctaaaatgaacacaaa

SEQ ID NO: 13264 - DNA, 20 bp, Artificial Sequence
  Synthetic oligonucleotide; AAG chr11 5265734 5265753 5265750 +
atgaacacaaatagattatc

SEQ ID NO: 13265 - DNA, 20 bp, Artificial Sequence
  Synthetic oligonucleotide; AAG chr11 5265761 5265780 5265777 +
taacaaacaatcccaataaa

SEQ ID NO: 13266 - DNA, 20 bp, Artificial Sequence
  Synthetic oligonucleotide; TAG chr11 5265764 5265783 5265780 +
caaacaatcccaataaaaag

SEQ ID NO: 13267 - DNA, 20 bp, Artificial Sequence
  Synthetic oligonucleotide; AGG chr11 5265765 5265784 5265781 +
aaacaatcccaataaaaagt

SEQ ID NO: 13268 - DNA, 20 bp, Artificial Sequence
  Synthetic oligonucleotide; AAG chr11 5265770 5265789 5265786 +
atcccaataaaaagtaggct

SEQ ID NO: 13269 - DNA, 20 bp, Artificial Sequence
  Synthetic oligonucleotide; AGG chr11 5265771 5265790 5265787 +
tcccaataaaaagtaggcta

SEQ ID NO: 13270 - DNA, 20 bp, Artificial Sequence
  Synthetic oligonucleotide; CAG chr11 5265781 5265800 5265797 +
aagtaggctaaggacatgaa

SEQ ID NO: 13271 - DNA, 20 bp, Artificial Sequence
  Synthetic oligonucleotide; CAG chr11 5265792 5265811 5265808 +
ggacatgaacagacaattct

SEQ ID NO: 13272 - DNA, 20 bp, Artificial Sequence
  Synthetic oligonucleotide; AAG chr11 5265798 5265817 5265814 +
gaacagacaattctcagaaa

SEQ ID NO: 13273 - DNA, 20 bp, Artificial Sequence
  Synthetic oligonucleotide; CAG chr11 5265853 5265872 5265869 +
ttctcaacatcactaatgat

SEQ ID NO: 13274 - DNA, 20 bp, Artificial Sequence
  Synthetic oligonucleotide; AGG chr11 5265854 5265873 5265870 +
tctcaacatcactaatgatc

SEQ ID NO: 13275 - DNA, 20 bp, Artificial Sequence
  Synthetic oligonucleotide; GGG chr11 5265855 5265874 5265871 +
ctcaacatcactaatgatca

SEQ ID NO: 13276 - DNA, 20 bp, Artificial Sequence
  Synthetic oligonucleotide; GAG chr11 5265880 5265899 5265896 +
atgcaaatcaaaactacaat

SEQ ID NO: 13277 - DNA, 20 bp, Artificial Sequence
  Synthetic oligonucleotide; TAG chr11 5265897 5265916 5265913 +
aatgagatatctacttactc

SEQ ID NO: 13278 - DNA, 20 bp, Artificial Sequence
  Synthetic oligonucleotide; CGG chr11 5265906 5265925 5265922 +
tctacttactctagttaaaa

SEQ ID NO: 13279 - DNA, 20 bp, Artificial Sequence
  Synthetic oligonucleotide; AAG chr11 5265921 5265940 5265937 +
taaaacggctattaacaaaa

SEQ ID NO: 13280 - DNA, 20 bp, Artificial Sequence
  Synthetic oligonucleotide; CAG chr11 5265935 5265954 5265951 +
acaaaaaagacaaaaaataa

SEQ ID NO: 13281 - DNA, 20 bp, Artificial Sequence
  Synthetic oligonucleotide; GAG chr11 5265946 5265965 5265962 +
aaaaaataacagatccttgt

SEQ ID NO: 13282 - DNA, 20 bp, Artificial Sequence
  Synthetic oligonucleotide; AGG chr11 5265947 5265966 5265963 +
aaaaataacagatccttgtg

SEQ ID NO: 13283 - DNA, 20 bp, Artificial Sequence
  Synthetic oligonucleotide; TGG chr11 5265953 5265972 5265969 +
aacagatccttgtgaggata

SEQ ID NO: 13284 - DNA, 20 bp, Artificial Sequence
  Synthetic oligonucleotide; GAG chr11 5265955 5265974 5265971 +
cagatccttgtgaggatatg

SEQ ID NO: 13285 - DNA, 20 bp, Artificial Sequence
  Synthetic oligonucleotide; AAG chr11 5265960 5265979 5265976 +
ccttgtgaggatatggagaa

SEQ ID NO: 13286 - DNA, 20 bp, Artificial Sequence
  Synthetic oligonucleotide; AGG chr11 5265961 5265980 5265977 +
cttgtgaggatatggagaaa

SEQ ID NO: 13287 - DNA, 20 bp, Artificial Sequence
  Synthetic oligonucleotide; GGG chr11 5265962 5265981 5265978 +
ttgtgaggatatggagaaaa

SEQ ID NO: 13288 - DNA, 20 bp, Artificial Sequence
  Synthetic oligonucleotide; TGG chr11 5265985 5266004 5266001 +
aactctttcttacacactgt

SEQ ID NO: 13289 - DNA, 20 bp, Artificial Sequence
  Synthetic oligonucleotide; TGG chr11 5265988 5266007 5266004 +
tctttcttacacactgttgg

SEQ ID NO: 13290 - DNA, 20 bp, Artificial Sequence
  Synthetic oligonucleotide; GGG chr11 5265989 5266008 5266005 +
ctttcttacacactgttggt

SEQ ID NO: 13291 - DNA, 20 bp, Artificial Sequence
  Synthetic oligonucleotide; TAG chr11 5266001 5266020 5266017 +
ctgttggtgggaatgtaaaa

SEQ ID NO: 13292 - DNA, 20 bp, Artificial Sequence
  Synthetic oligonucleotide; TGG chr11 5266015 5266034 5266031 +
gtaaaatagtacaaccatta

SEQ ID NO: 13293 - DNA, 20 bp, Artificial Sequence
  Synthetic oligonucleotide; CAG chr11 5266022 5266041 5266038 +
agtacaaccattatggaaaa

SEQ ID NO: 13294 - DNA, 20 bp, Artificial Sequence
  Synthetic oligonucleotide; AAG chr11 5266029 5266048 5266045 +
ccattatggaaaacagtatg

SEQ ID NO: 13295 - DNA, 20 bp, Artificial Sequence
  Synthetic oligonucleotide; CAG chr11 5266038 5266057 5266054 +
aaaacagtatgaagatttct

SEQ ID NO: 13296 - DNA, 20 bp, Artificial Sequence
  Synthetic oligonucleotide; CAG chr11 5266052 5266071 5266068 +
atttctcagtaaactaaaaa

SEQ ID NO: 13297 - DNA, 20 bp, Artificial Sequence
  Synthetic oligonucleotide; CAG chr11 5266070 5266089 5266086 +
aacagaactatcatacaatc

SEQ ID NO: 13298 - DNA, 20 bp, Artificial Sequence
  Synthetic oligonucleotide; TAG chr11 5266082 5266101 5266098 +
atacaatccagcaatctcac

SEQ ID NO: 13299 - DNA, 20 bp, Artificial Sequence
  Synthetic oligonucleotide; TGG chr11 5266085 5266104 5266101 +
caatccagcaatctcactag

SEQ ID NO: 13300 - DNA, 20 bp, Artificial Sequence
  Synthetic oligonucleotide; AAG chr11 5266100 5266119 5266116 +
actagtggttatttatccaa

SEQ ID NO: 13301 - DNA, 20 bp, Artificial Sequence
  Synthetic oligonucleotide; AAG chr11 5266104 5266123 5266120 +
gtggttatttatccaaaaga

SEQ ID NO: 13302 - DNA, 20 bp, Artificial Sequence
  Synthetic oligonucleotide; AGG chr11 5266105 5266124 5266121 +
tggttatttatccaaaagaa

SEQ ID NO: 13303 - DNA, 20 bp, Artificial Sequence
  Synthetic oligonucleotide; CAG chr11 5266112 5266131 5266128 +
ttatccaaaagaaaggaaat

SEQ ID NO: 13304 - DNA, 20 bp, Artificial Sequence
  Synthetic oligonucleotide; TGG chr11 5266124 5266143 5266140 +
aaggaaatcagtatatccaa

SEQ ID NO: 13305 - DNA, 20 bp, Artificial Sequence
  Synthetic oligonucleotide; AAG chr11 5266150 5266169 5266166 +
cattacactcatgtttattg

SEQ ID NO: 13306 - DNA, 20 bp, Artificial Sequence
  Synthetic oligonucleotide; TAG chr11 5266165 5266184 5266181 +
tattgaagcactattcacaa

SEQ ID NO: 13307 - DNA, 20 bp, Artificial Sequence
  Synthetic oligonucleotide; AAG chr11 5266170 5266189 5266186 +
aagcactattcacaatagtt

SEQ ID NO: 13308 - DNA, 20 bp, Artificial Sequence
  Synthetic oligonucleotide; AGG chr11 5266171 5266190 5266187 +
agcactattcacaatagtta

SEQ ID NO: 13309 - DNA, 20 bp, Artificial Sequence
  Synthetic oligonucleotide; TGG chr11 5266176 5266195 5266192 +
tattcacaatagttaaggtt

SEQ ID NO: 13310 - DNA, 20 bp, Artificial Sequence
  Synthetic oligonucleotide; GGG chr11 5266177 5266196 5266193 +
attcacaatagttaaggttt

SEQ ID NO: 13311 - DNA, 20 bp, Artificial Sequence
  Synthetic oligonucleotide; AAG chr11 5266188 5266207 5266204 +
ttaaggtttgggatcaacct

SEQ ID NO: 13312 - DNA, 20 bp, Artificial Sequence
  Synthetic oligonucleotide; CAG chr11 5266201 5266220 5266217 +
tcaacctaagtgtctatcaa

SEQ ID NO: 13313 - DNA, 20 bp, Artificial Sequence
  Synthetic oligonucleotide; CGG chr11 5266209 5266228 5266225 +
agtgtctatcaacagatgaa

SEQ ID NO: 13314 - DNA, 20 bp, Artificial Sequence
  Synthetic oligonucleotide; CAG chr11 5266234 5266253 5266250 +
taaaaaattgtatttttgca

SEQ ID NO: 13315 - DNA, 20 bp, Artificial Sequence
  Synthetic oligonucleotide; AAG chr11 5266255 5266274 5266271 +
agtactattttgccatgaaa

SEQ ID NO: 13316 - DNA, 20 bp, Artificial Sequence
  Synthetic oligonucleotide; TAG chr11 5266277 5266296 5266293 +
gaatgaaatcttgtcatttg

SEQ ID NO: 13317 - DNA, 20 bp, Artificial Sequence
  Synthetic oligonucleotide; TGG chr11 5266285 5266304 5266301 +
tcttgtcatttgtagcaaca

SEQ ID NO: 13318 - DNA, 20 bp, Artificial Sequence
  Synthetic oligonucleotide; TGG chr11 5266289 5266308 5266305 +
gtcatttgtagcaacatgga

SEQ ID NO: 13319 - DNA, 20 bp, Artificial Sequence
  Synthetic oligonucleotide; CAG chr11 5266295 5266314 5266311 +
tgtagcaacatggatggaac

SEQ ID NO: 13320 - DNA, 20 bp, Artificial Sequence
  Synthetic oligonucleotide; GAG chr11 5266297 5266316 5266313 +
tagcaacatggatggaacca

SEQ ID NO: 13321 - DNA, 20 bp, Artificial Sequence
  Synthetic oligonucleotide; AGG chr11 5266298 5266317 5266314 +
agcaacatggatggaaccag

SEQ ID NO: 13322 - DNA, 20 bp, Artificial Sequence
  Synthetic oligonucleotide; AAG chr11 5266317 5266336 5266333 +
gaggtcattatgttaattga

SEQ ID NO: 13323 - DNA, 20 bp, Artificial Sequence
  Synthetic oligonucleotide; AAG chr11 5266325 5266344 5266341 +
tatgttaattgaaagccctg

SEQ ID NO: 13324 - DNA, 20 bp, Artificial Sequence
  Synthetic oligonucleotide; CAG chr11 5266328 5266347 5266344 +
gttaattgaaagccctgaag

SEQ ID NO: 13325 - DNA, 20 bp, Artificial Sequence
  Synthetic oligonucleotide; TGG chr11 5266347 5266366 5266363 +
gcagaacaaaaacaaactct

SEQ ID NO: 13326 - DNA, 20 bp, Artificial Sequence
  Synthetic oligonucleotide; AAG chr11 5266357 5266376 5266373 +
aacaaactcttggtatgcca

SEQ ID NO: 13327 - DNA, 20 bp, Artificial Sequence
  Synthetic oligonucleotide; GAG chr11 5266359 5266378 5266375 +
caaactcttggtatgccaaa

SEQ ID NO: 13328 - DNA, 20 bp, Artificial Sequence
  Synthetic oligonucleotide; TAG chr11 5266363 5266382 5266379 +
ctcttggtatgccaaagaga

SEQ ID NO: 13329 - DNA, 20 bp, Artificial Sequence
  Synthetic oligonucleotide; AAG chr11 5266376 5266395 5266392 +
aaagagatagataataaaat

SEQ ID NO: 13330 - DNA, 20 bp, Artificial Sequence
  Synthetic oligonucleotide; CAG chr11 5266380 5266399 5266396 +
agatagataataaaataagc

SEQ ID NO: 13331 - DNA, 20 bp, Artificial Sequence
  Synthetic oligonucleotide; CAG chr11 5266386 5266405 5266402 +
ataataaaataagccagata

SEQ ID NO: 13332 - DNA, 20 bp, Artificial Sequence
  Synthetic oligonucleotide; AAG chr11 5266390 5266409 5266406 +
taaaataagccagatacaga

SEQ ID NO: 13333 - DNA, 20 bp, Artificial Sequence
  Synthetic oligonucleotide; TGG chr11 5266421 5266440 5266437 +
cacatgtttttattcatctg

SEQ ID NO: 13334 - DNA, 20 bp, Artificial Sequence
  Synthetic oligonucleotide; GGG chr11 5266422 5266441 5266438 +
acatgtttttattcatctgt

SEQ ID NO: 13335 - DNA, 20 bp, Artificial Sequence
  Synthetic oligonucleotide; GAG chr11 5266424 5266443 5266440 +
atgtttttattcatctgtgg

SEQ ID NO: 13336 - DNA, 20 bp, Artificial Sequence
  Synthetic oligonucleotide; AAG chr11 5266433 5266452 5266449 +
ttcatctgtgggagctaaaa

SEQ ID NO: 13337 - DNA, 20 bp, Artificial Sequence
  Synthetic oligonucleotide; TGG chr11 5266436 5266455 5266452 +
atctgtgggagctaaaaaag

SEQ ID NO: 13338 - DNA, 20 bp, Artificial Sequence
  Synthetic oligonucleotide; GGG chr11 5266437 5266456 5266453 +
tctgtgggagctaaaaaagt

SEQ ID NO: 13339 - DNA, 20 bp, Artificial Sequence
  Synthetic oligonucleotide; TGG chr11 5266445 5266464 5266461 +
agctaaaaaagtgggtctca

SEQ ID NO: 13340 - DNA, 20 bp, Artificial Sequence
  Synthetic oligonucleotide; TGG chr11 5266448 5266467 5266464 +
taaaaaagtgggtctcatgg

SEQ ID NO: 13341 - DNA, 20 bp, Artificial Sequence
  Synthetic oligonucleotide; TAG chr11 5266451 5266470 5266467 +
aaaagtgggtctcatggtgg

SEQ ID NO: 13342 - DNA, 20 bp, Artificial Sequence
  Synthetic oligonucleotide; GAG chr11 5266453 5266472 5266469 +
aagtgggtctcatggtggta

SEQ ID NO: 13343 - DNA, 20 bp, Artificial Sequence
  Synthetic oligonucleotide; GAG chr11 5266455 5266474 5266471 +
gtgggtctcatggtggtaga

SEQ ID NO: 13344 - DNA, 20 bp, Artificial Sequence
  Synthetic oligonucleotide; TAG chr11 5266458 5266477 5266474 +
ggtctcatggtggtagagag

SEQ ID NO: 13345 - DNA, 20 bp, Artificial Sequence
  Synthetic oligonucleotide; TAG chr11 5266466 5266485 5266482 +
ggtggtagagagtagaatga

SEQ ID NO: 13346 - DNA, 20 bp, Artificial Sequence
  Synthetic oligonucleotide; CAG chr11 5266473 5266492 5266489 +
gagagtagaatgatagttat

SEQ ID NO: 13347 - DNA, 20 bp, Artificial Sequence
  Synthetic oligonucleotide; GAG chr11 5266475 5266494 5266491 +
gagtagaatgatagttatca

SEQ ID NO: 13348 - DNA, 20 bp, Artificial Sequence
  Synthetic oligonucleotide; AGG chr11 5266476 5266495 5266492 +
agtagaatgatagttatcag

SEQ ID NO: 13349 - DNA, 20 bp, Artificial Sequence
  Synthetic oligonucleotide; TGG chr11 5266480 5266499 5266496 +
gaatgatagttatcagaggc

SEQ ID NO: 13350 - DNA, 20 bp, Artificial Sequence
  Synthetic oligonucleotide; AAG chr11 5266486 5266505 5266502 +
tagttatcagaggctggaaa

SEQ ID NO: 13351 - DNA, 20 bp, Artificial Sequence
  Synthetic oligonucleotide; GAG chr11 5266492 5266511 5266508 +
tcagaggctggaaaaagtgt

SEQ ID NO: 13352 - DNA, 20 bp, Artificial Sequence
  Synthetic oligonucleotide; TGG chr11 5266501 5266520 5266517 +
ggaaaaagtgtgagtgtgta

SEQ ID NO: 13353 - DNA, 20 bp, Artificial Sequence
  Synthetic oligonucleotide; GGG chr11 5266502 5266521 5266518 +
gaaaaagtgtgagtgtgtat

SEQ ID NO: 13354 - DNA, 20 bp, Artificial Sequence
  Synthetic oligonucleotide; GAG chr11 5266504 5266523 5266520 +
aaaagtgtgagtgtgtatgg

SEQ ID NO: 13355 - DNA, 20 bp, Artificial Sequence
  Synthetic oligonucleotide; AGG chr11 5266505 5266524 5266521 +
aaagtgtgagtgtgtatggg

SEQ ID NO: 13356 - DNA, 20 bp, Artificial Sequence
  Synthetic oligonucleotide; GGG chr11 5266506 5266525 5266522 +
aagtgtgagtgtgtatggga

SEQ ID NO: 13357 - DNA, 20 bp, Artificial Sequence
  Synthetic oligonucleotide; GGG chr11 5266507 5266526 5266523 +
agtgtgagtgtgtatgggag

SEQ ID NO: 13358 - DNA, 20 bp, Artificial Sequence
  Synthetic oligonucleotide; AAG chr11 5266514 5266533 5266530 +
gtgtgtatgggaggggattt

SEQ ID NO: 13359 - DNA, 20 bp, Artificial Sequence
  Synthetic oligonucleotide; GAG chr11 5266516 5266535 5266532 +
gtgtatgggaggggatttaa

SEQ ID NO: 13360 - DNA, 20 bp, Artificial Sequence
  Synthetic oligonucleotide; TGG chr11 5266523 5266542 5266539 +
ggaggggatttaagagatgt

SEQ ID NO: 13361 - DNA, 20 bp, Artificial Sequence
  Synthetic oligonucleotide; TAG chr11 5266530 5266549 5266546 +
atttaagagatgttggttaa

SEQ ID NO: 13362 - DNA, 20 bp, Artificial Sequence
  Synthetic oligonucleotide; AGG chr11 5266531 5266550 5266547 +
tttaagagatgttggttaat

SEQ ID NO: 13363 - DNA, 20 bp, Artificial Sequence
  Synthetic oligonucleotide; CAG chr11 5266542 5266561 5266558 +
ttggttaataggtacaaaca

SEQ ID NO: 13364 - DNA, 20 bp, Artificial Sequence
  Synthetic oligonucleotide; TGG chr11 5266546 5266565 5266562 +
ttaataggtacaaacacagt

SEQ ID NO: 13365 - DNA, 20 bp, Artificial Sequence
  Synthetic oligonucleotide; TAG chr11 5266550 5266569 5266566 +
taggtacaaacacagttgga

SEQ ID NO: 13366 - DNA, 20 bp, Artificial Sequence
  Synthetic oligonucleotide; AAG chr11 5266553 5266572 5266569 +
gtacaaacacagttggatag

SEQ ID NO: 13367 - DNA, 20 bp, Artificial Sequence
  Synthetic oligonucleotide; AGG chr11 5266554 5266573 5266570 +
tacaaacacagttggataga

SEQ ID NO: 13368 - DNA, 20 bp, Artificial Sequence
  Synthetic oligonucleotide; AAG chr11 5266560 5266579 5266576 +
cacagttggatagaaggatt

SEQ ID NO: 13369 - DNA, 20 bp, Artificial Sequence
  Synthetic oligonucleotide; GAG chr11 5266581 5266600 5266597 +
agccataatgtttgatattt

SEQ ID NO: 13370 - DNA, 20 bp, Artificial Sequence
  Synthetic oligonucleotide; TAG chr11 5266584 5266603 5266600 +
cataatgtttgatatttgag

SEQ ID NO: 13371 - DNA, 20 bp, Artificial Sequence
  Synthetic oligonucleotide; AGG chr11 5266585 5266604 5266601 +
ataatgtttgatatttgagt

SEQ ID NO: 13372 - DNA, 20 bp, Artificial Sequence
  Synthetic oligonucleotide; GGG chr11 5266586 5266605 5266602 +
taatgtttgatatttgagta

SEQ ID NO: 13373 - DNA, 20 bp, Artificial Sequence
  Synthetic oligonucleotide; TAG chr11 5266595 5266614 5266611 +
atatttgagtagggtgacta

SEQ ID NO: 13374 - DNA, 20 bp, Artificial Sequence
  Synthetic oligonucleotide; TGG chr11 5266627 5266646 5266643 +
atttattatatatttcaaaa

SEQ ID NO: 13375 - DNA, 20 bp, Artificial Sequence
  Synthetic oligonucleotide; TAG chr11 5266631 5266650 5266647 +
attatatatttcaaaatggc

SEQ ID NO: 13376 - DNA, 20 bp, Artificial Sequence
  Synthetic oligonucleotide; GAG chr11 5266638 5266657 5266654 +
atttcaaaatggctagaaat

SEQ ID NO: 13377 - DNA, 20 bp, Artificial Sequence
  Synthetic oligonucleotide; AGG chr11 5266639 5266658 5266655 +
tttcaaaatggctagaaatg

SEQ ID NO: 13378 - DNA, 20 bp, Artificial Sequence
  Synthetic oligonucleotide; TAG chr11 5266663 5266682 5266679 +
tttgaaattttctcaataca

SEQ ID NO: 13379 - DNA, 20 bp, Artificial Sequence
  Synthetic oligonucleotide; AAG chr11 5266682 5266701 5266698 +
atagaaatgataaatgctca

SEQ ID NO: 13380 - DNA, 20 bp, Artificial Sequence
  Synthetic oligonucleotide; TGG chr11 5266688 5266707 5266704 +
atgataaatgctcaaagcaa

SEQ ID NO: 13381 - DNA, 20 bp, Artificial Sequence
  Synthetic oligonucleotide; TAG chr11 5266705 5266724 5266721 +
caatggatatcctaaatatc

SEQ ID NO: 13382 - DNA, 20 bp, Artificial Sequence
  Synthetic oligonucleotide; TAG chr11 5266727 5266746 5266743 +
gacttaatcatcacatgttc

SEQ ID NO: 13383 - DNA, 20 bp, Artificial Sequence
  Synthetic oligonucleotide; AGG chr11 5266728 5266747 5266744 +
acttaatcatcacatgttct

SEQ ID NO: 13384 - DNA, 20 bp, Artificial Sequence
  Synthetic oligonucleotide; AAG chr11 5266736 5266755 5266752 +
atcacatgttctaggcatgt

SEQ ID NO: 13385 - DNA, 20 bp, Artificial Sequence
  Synthetic oligonucleotide; TAG chr11 5266811 5266830 5266827 +
gctcccatttgttgactgac

SEQ ID NO: 13386 - DNA, 20 bp, Artificial Sequence
  Synthetic oligonucleotide; AGG chr11 5266812 5266831 5266828 +
ctcccatttgttgactgact

SEQ ID NO: 13387 - DNA, 20 bp, Artificial Sequence
  Synthetic oligonucleotide; TAG chr11 5266825 5266844 5266841 +
actgactaggtgaaaatatt

SEQ ID NO: 13388 - DNA, 20 bp, Artificial Sequence
  Synthetic oligonucleotide; TGG chr11 5266859 5266878 5266875 +
atccctgtttactctgttta

SEQ ID NO: 13389 - DNA, 20 bp, Artificial Sequence
  Synthetic oligonucleotide; GGG chr11 5266860 5266879 5266876 +
tccctgtttactctgtttat

SEQ ID NO: 13390 - DNA, 20 bp, Artificial Sequence
  Synthetic oligonucleotide; AAG chr11 5266871 5266890 5266887 +
tctgtttatgggcatattga

SEQ ID NO: 13391 - DNA, 20 bp, Artificial Sequence
  Synthetic oligonucleotide; AGG chr11 5266872 5266891 5266888 +
ctgtttatgggcatattgaa

SEQ ID NO: 13392 - DNA, 20 bp, Artificial Sequence
  Synthetic oligonucleotide; AAG chr11 5266879 5266898 5266895 +
tgggcatattgaaaggttat

SEQ ID NO: 13393 - DNA, 20 bp, Artificial Sequence
  Synthetic oligonucleotide; AGG chr11 5266880 5266899 5266896 +
gggcatattgaaaggttata

SEQ ID NO: 13394 - DNA, 20 bp, Artificial Sequence
  Synthetic oligonucleotide; CAG chr11 5266885 5266904 5266901 +
tattgaaaggttataaggct

SEQ ID NO: 13395 - DNA, 20 bp, Artificial Sequence
  Synthetic oligonucleotide; GAG chr11 5266887 5266906 5266903 +
ttgaaaggttataaggctca

SEQ ID NO: 13396 - DNA, 20 bp, Artificial Sequence
  Synthetic oligonucleotide; GAG chr11 5266889 5266908 5266905 +
gaaaggttataaggctcaga

SEQ ID NO: 13397 - DNA, 20 bp, Artificial Sequence
  Synthetic oligonucleotide; CAG chr11 5266894 5266913 5266910 +
gttataaggctcagagagac

SEQ ID NO: 13398 - DNA, 20 bp, Artificial Sequence
  Synthetic oligonucleotide; TAG chr11 5266906 5266925 5266922 +
agagagaccagtattgttga

SEQ ID NO: 13399 - DNA, 20 bp, Artificial Sequence
  Synthetic oligonucleotide; TGG chr11 5266948 5266967 5266964 +
tttgtctctctcccatattc

SEQ ID NO: 13400 - DNA, 20 bp, Artificial Sequence
  Synthetic oligonucleotide; CAG chr11 5266958 5266977 5266974 +
tcccatattctggatatata

SEQ ID NO: 13401 - DNA, 20 bp, Artificial Sequence
  Synthetic oligonucleotide; AAG chr11 5266971 5266990 5266987 +
atatatacagccaaattcaa

SEQ ID NO: 13402 - DNA, 20 bp, Artificial Sequence
  Synthetic oligonucleotide; CAG chr11 5266981 5267000 5266997 +
ccaaattcaaaagtaattca

SEQ ID NO: 13403 - DNA, 20 bp, Artificial Sequence
  Synthetic oligonucleotide; AGG chr11 5266982 5267001 5266998 +
caaattcaaaagtaattcac

SEQ ID NO: 13404 - DNA, 20 bp, Artificial Sequence
  Synthetic oligonucleotide; AAG chr11 5266988 5267007 5267004 +
caaaagtaattcacaggaaa

SEQ ID NO: 13405 - DNA, 20 bp, Artificial Sequence
  Synthetic oligonucleotide; GAG chr11 5267003 5267022 5267019 +
ggaaaaagtctgatcaatgt

SEQ ID NO: 13406 - DNA, 20 bp, Artificial Sequence
  Synthetic oligonucleotide; GAG chr11 5267005 5267024 5267021 +
aaaaagtctgatcaatgtga

SEQ ID NO: 13407 - DNA, 20 bp, Artificial Sequence
  Synthetic oligonucleotide; AAG chr11 5267027 5267046 5267043 +
gcactataaaattactaata

SEQ ID NO: 13408 - DNA, 20 bp, Artificial Sequence
  Synthetic oligonucleotide; TGG chr11 5267047 5267066 5267063 +
aagttatatttgccaaaata

SEQ ID NO: 13409 - DNA, 20 bp, Artificial Sequence
  Synthetic oligonucleotide; TGG chr11 5267060 5267079 5267076 +
caaaatatggcactctaact

SEQ ID NO: 13410 - DNA, 20 bp, Artificial Sequence
  Synthetic oligonucleotide; AAG chr11 5267071 5267090 5267087 +
actctaacttggaaaatgca

SEQ ID NO: 13411 - DNA, 20 bp, Artificial Sequence
  Synthetic oligonucleotide; AGG chr11 5267072 5267091 5267088 +
ctctaacttggaaaatgcaa

SEQ ID NO: 13412 - DNA, 20 bp, Artificial Sequence
  Synthetic oligonucleotide; AAG chr11 5267088 5267107 5267104 +
gcaaaggttccttgatatga

SEQ ID NO: 13413 - DNA, 20 bp, Artificial Sequence
  Synthetic oligonucleotide; AAG chr11 5267095 5267114 5267111 +
ttccttgatatgaaagacac

SEQ ID NO: 13414 - DNA, 20 bp, Artificial Sequence
  Synthetic oligonucleotide; AAG chr11 5267103 5267122 5267119 +
tatgaaagacacaagacctg

SEQ ID NO: 13415 - DNA, 20 bp, Artificial Sequence
  Synthetic oligonucleotide; AGG chr11 5267104 5267123 5267120 +
atgaaagacacaagacctga

SEQ ID NO: 13416 - DNA, 20 bp, Artificial Sequence
  Synthetic oligonucleotide; TAG chr11 5267127 5267146 5267143 +
tcaaaactccctgaccaatc

SEQ ID NO: 13417 - DNA, 20 bp, Artificial Sequence
  Synthetic oligonucleotide; AAG chr11 5267141 5267160 5267157 +
ccaatctagcacttcctaaa

SEQ ID NO: 13418 - DNA, 20 bp, Artificial Sequence
  Synthetic oligonucleotide; GAG chr11 5267178 5267197 5267194 +
tccctctacccttcacacat

SEQ ID NO: 13419 - DNA, 20 bp, Artificial Sequence
  Synthetic oligonucleotide; GAG chr11 5267180 5267199 5267196 +
cctctacccttcacacatga

SEQ ID NO: 13420 - DNA, 20 bp, Artificial Sequence
  Synthetic oligonucleotide; CAG chr11 5267187 5267206 5267203 +
ccttcacacatgagagtcac

SEQ ID NO: 13421 - DNA, 20 bp, Artificial Sequence
  Synthetic oligonucleotide; AGG chr11 5267188 5267207 5267204 +
cttcacacatgagagtcacc

SEQ ID NO: 13422 - DNA, 20 bp, Artificial Sequence
  Synthetic oligonucleotide; CAG chr11 5267192 5267211 5267208 +
acacatgagagtcaccaggt

SEQ ID NO: 13423 - DNA, 20 bp, Artificial Sequence
  Synthetic oligonucleotide; TGG chr11 5267199 5267218 5267215 +
agagtcaccaggtcagtgca

SEQ ID NO: 13424 - DNA, 20 bp, Artificial Sequence
  Synthetic oligonucleotide; CAG chr11 5267222 5267241 5267238 +
tttcctcctgttatcttcac

SEQ ID NO: 13425 - DNA, 20 bp, Artificial Sequence
  Synthetic oligonucleotide; TGG chr11 5267227 5267246 5267243 +
tcctgttatcttcaccagtc

SEQ ID NO: 13426 - DNA, 20 bp, Artificial Sequence
  Synthetic oligonucleotide; GGG chr11 5267228 5267247 5267244 +
cctgttatcttcaccagtct

SEQ ID NO: 13427 - DNA, 20 bp, Artificial Sequence
  Synthetic oligonucleotide; GAG chr11 5267230 5267249 5267246 +
tgttatcttcaccagtctgg

SEQ ID NO: 13428 - DNA, 20 bp, Artificial Sequence
  Synthetic oligonucleotide; CAG chr11 5267237 5267256 5267253 +
ttcaccagtctgggagcttt

SEQ ID NO: 13429 - DNA, 20 bp, Artificial Sequence
  Synthetic oligonucleotide; CAG chr11 5267275 5267294 5267291 +
ttcttccttctcatctccca

SEQ ID NO: 13430 - DNA, 20 bp, Artificial Sequence
  Synthetic oligonucleotide; CAG chr11 5267279 5267298 5267295 +
tccttctcatctcccacagt

SEQ ID NO: 13431 - DNA, 20 bp, Artificial Sequence
  Synthetic oligonucleotide; CAG chr11 5267332 5267351 5267348 +
tgtccatccttcaaattcca

SEQ ID NO: 13432 - DNA, 20 bp, Artificial Sequence
  Synthetic oligonucleotide; TGG chr11 5267350 5267369 5267366 +
cacagactcactgctcctct

SEQ ID NO: 13433 - DNA, 20 bp, Artificial Sequence
  Synthetic oligonucleotide; GGG chr11 5267351 5267370 5267367 +
acagactcactgctcctctt

SEQ ID NO: 13434 - DNA, 20 bp, Artificial Sequence
  Synthetic oligonucleotide; AAG chr11 5267434 5267453 5267450 +
tgaatccattttgtgcacat

SEQ ID NO: 13435 - DNA, 20 bp, Artificial Sequence
  Synthetic oligonucleotide; CAG chr11 5267437 5267456 5267453 +
atccattttgtgcacataag

SEQ ID NO: 13436 - DNA, 20 bp, Artificial Sequence
  Synthetic oligonucleotide; GAG chr11 5267468 5267487 5267484 +
ttcccaaaatcttatttcct

SEQ ID NO: 13437 - DNA, 20 bp, Artificial Sequence
  Synthetic oligonucleotide; TAG chr11 5267498 5267517 5267514 +
acatcctaatgcttatcgtt

SEQ ID NO: 13438 - DNA, 20 bp, Artificial Sequence
  Synthetic oligonucleotide; TAG chr11 5267509 5267528 5267525 +
cttatcgtttagtattgcaa

SEQ ID NO: 13439 - DNA, 20 bp, Artificial Sequence
  Synthetic oligonucleotide; TAG chr11 5267514 5267533 5267530 +
cgtttagtattgcaatagca

SEQ ID NO: 13440 - DNA, 20 bp, Artificial Sequence
  Synthetic oligonucleotide; AAG chr11 5267520 5267539 5267536 +
gtattgcaatagcatagtaa

SEQ ID NO: 13441 - DNA, 20 bp, Artificial Sequence
  Synthetic oligonucleotide; TAG chr11 5267535 5267554 5267551 +
agtaaaagcttgtatttttg

SEQ ID NO: 13442 - DNA, 20 bp, Artificial Sequence
  Synthetic oligonucleotide; CAG chr11 5267539 5267558 5267555 +
aaagcttgtatttttgtagc

SEQ ID NO: 13443 - DNA, 20 bp, Artificial Sequence
  Synthetic oligonucleotide; AGG chr11 5267540 5267559 5267556 +
aagcttgtatttttgtagcc

SEQ ID NO: 13444 - DNA, 20 bp, Artificial Sequence
  Synthetic oligonucleotide; TGG chr11 5267555 5267574 5267571 +
tagccaggccctgtactatc

SEQ ID NO: 13445 - DNA, 20 bp, Artificial Sequence
  Synthetic oligonucleotide; TAG chr11 5267565 5267584 5267581 +
ctgtactatctggtctttcc

SEQ ID NO: 13446 - DNA, 20 bp, Artificial Sequence
  Synthetic oligonucleotide; CAG chr11 5267602 5267621 5267618 +
cttactctcccttctacttc

SEQ ID NO: 13447 - DNA, 20 bp, Artificial Sequence
  Synthetic oligonucleotide; GAG chr11 5267604 5267623 5267620 +
tactctcccttctacttcca

SEQ ID NO: 13448 - DNA, 20 bp, Artificial Sequence
  Synthetic oligonucleotide; GAG chr11 5267606 5267625 5267622 +
ctctcccttctacttccaga

SEQ ID NO: 13449 - DNA, 20 bp, Artificial Sequence
  Synthetic oligonucleotide; CAG chr11 5267610 5267629 5267626 +
cccttctacttccagagagc

SEQ ID NO: 13450 - DNA, 20 bp, Artificial Sequence
  Synthetic oligonucleotide; AAG chr11 5267621 5267640 5267637 +
ccagagagccagtttcatgc

SEQ ID NO: 13451 - DNA, 20 bp, Artificial Sequence
  Synthetic oligonucleotide; AAG chr11 5267629 5267648 5267645 +
ccagtttcatgcaagtcacg

SEQ ID NO: 13452 - DNA, 20 bp, Artificial Sequence
  Synthetic oligonucleotide; TAG chr11 5267635 5267654 5267651 +
tcatgcaagtcacgaagccc

SEQ ID NO: 13453 - DNA, 20 bp, Artificial Sequence
  Synthetic oligonucleotide; TGG chr11 5267643 5267662 5267659 +
gtcacgaagccctagcttgc

SEQ ID NO: 13454 - DNA, 20 bp, Artificial Sequence
  Synthetic oligonucleotide; TAG chr11 5267649 5267668 5267665 +
aagccctagcttgctggttt

SEQ ID NO: 13455 - DNA, 20 bp, Artificial Sequence
  Synthetic oligonucleotide; AAG chr11 5267657 5267676 5267673 +
gcttgctggttttagaattt

SEQ ID NO: 13456 - DNA, 20 bp, Artificial Sequence
  Synthetic oligonucleotide; TAG chr11 5267667 5267686 5267683 +
tttagaatttaagcctttat

SEQ ID NO: 13457 - DNA, 20 bp, Artificial Sequence
  Synthetic oligonucleotide; CGG chr11 5267684 5267703 5267700 +
tattagtattctatctccca

SEQ ID NO: 13458 - DNA, 20 bp, Artificial Sequence
  Synthetic oligonucleotide; AAG chr11 5267688 5267707 5267704 +
agtattctatctcccacgga

SEQ ID NO: 13459 - DNA, 20 bp, Artificial Sequence
  Synthetic oligonucleotide; CAG chr11 5267723 5267742 5267739 +
tctccaaaaactttcccact

SEQ ID NO: 13460 - DNA, 20 bp, Artificial Sequence
  Synthetic oligonucleotide; AGG chr11 5267724 5267743 5267740 +
ctccaaaaactttcccactc

SEQ ID NO: 13461 - DNA, 20 bp, Artificial Sequence
  Synthetic oligonucleotide; TAG chr11 5267747 5267766 5267763 +
tcctaactctaactttattt

SEQ ID NO: 13462 - DNA, 20 bp, Artificial Sequence
  Synthetic oligonucleotide; CAG chr11 5267767 5267786 5267783 +
tagtgcatgttacattctat

SEQ ID NO: 13463 - DNA, 20 bp, Artificial Sequence
  Synthetic oligonucleotide; AAG chr11 5267770 5267789 5267786 +
tgcatgttacattctatcag

SEQ ID NO: 13464 - DNA, 20 bp, Artificial Sequence
  Synthetic oligonucleotide; TAG chr11 5267799 5267818 5267815 +
cacaatgatatcatgtgtct

SEQ ID NO: 13465 - DNA, 20 bp, Artificial Sequence
  Synthetic oligonucleotide; CAG chr11 5267805 5267824 5267821 +
gatatcatgtgtcttagctt

SEQ ID NO: 13466 - DNA, 20 bp, Artificial Sequence
  Synthetic oligonucleotide; TGG chr11 5267824 5267843 5267840 +
tcagctaacccatgaaataa

SEQ ID NO: 13467 - DNA, 20 bp, Artificial Sequence
  Synthetic oligonucleotide; TGG chr11 5267836 5267855 5267852 +
tgaaataatggaatccttca

SEQ ID NO: 13468 - DNA, 20 bp, Artificial Sequence
  Synthetic oligonucleotide; AAG chr11 5267840 5267859 5267856 +
ataatggaatccttcatgga

SEQ ID NO: 13469 - DNA, 20 bp, Artificial Sequence
  Synthetic oligonucleotide; GAG chr11 5267842 5267861 5267858 +
aatggaatccttcatggaaa

SEQ ID NO: 13470 - DNA, 20 bp, Artificial Sequence
  Synthetic oligonucleotide; CAG chr11 5267845 5267864 5267861 +
ggaatccttcatggaaagag

SEQ ID NO: 13471 - DNA, 20 bp, Artificial Sequence
  Synthetic oligonucleotide; AGG chr11 5267846 5267865 5267862 +
gaatccttcatggaaagagc

SEQ ID NO: 13472 - DNA, 20 bp, Artificial Sequence
  Synthetic oligonucleotide; AAG chr11 5267904 5267923 5267920 +
aatttcataaaacatgtgac

SEQ ID NO: 13473 - DNA, 20 bp, Artificial Sequence
  Synthetic oligonucleotide; TAG chr11 5267908 5267927 5267924 +
tcataaaacatgtgacaagc

SEQ ID NO: 13474 - DNA, 20 bp, Artificial Sequence
  Synthetic oligonucleotide; AAG chr11 5267929 5267948 5267945 +
agctacttcaaaatgtaaat

SEQ ID NO: 13475 - DNA, 20 bp, Artificial Sequence
  Synthetic oligonucleotide; GAG chr11 5267931 5267950 5267947 +
ctacttcaaaatgtaaataa

SEQ ID NO: 13476 - DNA, 20 bp, Artificial Sequence
  Synthetic oligonucleotide; TAG chr11 5267944 5267963 5267960 +
taaataagagtaaattaaaa

SEQ ID NO: 13477 - DNA, 20 bp, Artificial Sequence
  Synthetic oligonucleotide; TAG chr11 5267953 5267972 5267969 +
gtaaattaaaatagtaattc

SEQ ID NO: 13478 - DNA, 20 bp, Artificial Sequence
  Synthetic oligonucleotide; TGG chr11 5267965 5267984 5267981 +
agtaattctagcctatatct

SEQ ID NO: 13479 - DNA, 20 bp, Artificial Sequence
  Synthetic oligonucleotide; AAG chr11 5267977 5267996 5267993 +
ctatatcttggatatctatg

SEQ ID NO: 13480 - DNA, 20 bp, Artificial Sequence
  Synthetic oligonucleotide; AAG chr11 5268012 5268031 5268028 +
ttgtttttgtttttaatgaa

SEQ ID NO: 13481 - DNA, 20 bp, Artificial Sequence
  Synthetic oligonucleotide; CAG chr11 5268041 5268060 5268057 +
gtaccacaaatctgctttct

SEQ ID NO: 13482 - DNA, 20 bp, Artificial Sequence
  Synthetic oligonucleotide; AGG chr11 5268042 5268061 5268058 +
taccacaaatctgctttctc

SEQ ID NO: 13483 - DNA, 20 bp, Artificial Sequence
  Synthetic oligonucleotide; CAG chr11 5268054 5268073 5268070 +
gctttctcaggtaccactaa

SEQ ID NO: 13484 - DNA, 20 bp, Artificial Sequence
  Synthetic oligonucleotide; CGG chr11 5268070 5268089 5268086 +
ctaacagctccttctttccc

SEQ ID NO: 13485 - DNA, 20 bp, Artificial Sequence
  Synthetic oligonucleotide; CAG chr11 5268075 5268094 5268091 +
agctccttctttccccggtg

SEQ ID NO: 13486 - DNA, 20 bp, Artificial Sequence
  Synthetic oligonucleotide; TAG chr11 5268089 5268108 5268105 +
ccggtgcagtaaaaactgcc

SEQ ID NO: 13487 - DNA, 20 bp, Artificial Sequence
  Synthetic oligonucleotide; AGG chr11 5268090 5268109 5268106 +
cggtgcagtaaaaactgcct

SEQ ID NO: 13488 - DNA, 20 bp, Artificial Sequence
  Synthetic oligonucleotide; GAG chr11 5268092 5268111 5268108 +
gtgcagtaaaaactgcctag

SEQ ID NO: 13489 - DNA, 20 bp, Artificial Sequence
  Synthetic oligonucleotide; AAG chr11 5268133 5268152 5268149 +
accattttcccaccccgata

SEQ ID NO: 13490 - DNA, 20 bp, Artificial Sequence
  Synthetic oligonucleotide; TGG chr11 5268162 5268181 5268178 +
ctccatcatatcatcctcct

SEQ ID NO: 13491 - DNA, 20 bp, Artificial Sequence
  Synthetic oligonucleotide; TGG chr11 5268170 5268189 5268186 +
tatcatcctccttggaatcc

SEQ ID NO: 13492 - DNA, 20 bp, Artificial Sequence
  Synthetic oligonucleotide; AAG chr11 5268204 5268223 5268220 +
aacatccacattaattttac

SEQ ID NO: 13493 - DNA, 20 bp, Artificial Sequence
  Synthetic oligonucleotide; AAG chr11 5268223 5268242 5268239 +
caagcccccatacatttctt

SEQ ID NO: 13494 - DNA, 20 bp, Artificial Sequence
  Synthetic oligonucleotide; AGG chr11 5268224 5268243 5268240 +
aagcccccatacatttctta

SEQ ID NO: 13495 - DNA, 20 bp, Artificial Sequence
  Synthetic oligonucleotide; AAG chr11 5268227 5268246 5268243 +
cccccatacatttcttaagg

SEQ ID NO: 13496 - DNA, 20 bp, Artificial Sequence
  Synthetic oligonucleotide; TGG chr11 5268234 5268253 5268250 +
acatttcttaaggaagctct

SEQ ID NO: 13497 - DNA, 20 bp, Artificial Sequence
  Synthetic oligonucleotide; CAG chr11 5268263 5268282 5268279 +
ctatgtttctctccatccct

SEQ ID NO: 13498 - DNA, 20 bp, Artificial Sequence
  Synthetic oligonucleotide; AAG chr11 5268293 5268312 5268309 +
acactttttccttttaacac

SEQ ID NO: 13499 - DNA, 20 bp, Artificial Sequence
  Synthetic oligonucleotide; GAG chr11 5268295 5268314 5268311 +
actttttccttttaacacaa

SEQ ID NO: 13500 - DNA, 20 bp, Artificial Sequence
  Synthetic oligonucleotide; AAG chr11 5268301 5268320 5268317 +
tccttttaacacaagagtaa

SEQ ID NO: 13501 - DNA, 20 bp, Artificial Sequence
  Synthetic oligonucleotide; TGG chr11 5268305 5268324 5268321 +
tttaacacaagagtaaaaga

SEQ ID NO: 13502 - DNA, 20 bp, Artificial Sequence
  Synthetic oligonucleotide; GAG chr11 5268307 5268326 5268323 +
taacacaagagtaaaagatg

SEQ ID NO: 13503 - DNA, 20 bp, Artificial Sequence
  Synthetic oligonucleotide; AAG chr11 5268310 5268329 5268326 +
cacaagagtaaaagatggag

SEQ ID NO: 13504 - DNA, 20 bp, Artificial Sequence
  Synthetic oligonucleotide; AAG chr11 5268338 5268357 5268354 +
attgcaatttttgattactg

SEQ ID NO: 13505 - DNA, 20 bp, Artificial Sequence
  Synthetic oligonucleotide; CAG chr11 5268359 5268378 5268375 +
agaaaatgtactttattaaa

SEQ ID NO: 13506 - DNA, 20 bp, Artificial Sequence
  Synthetic oligonucleotide; AAG chr11 5268362 5268381 5268378 +
aaatgtactttattaaacag

SEQ ID NO: 13507 - DNA, 20 bp, Artificial Sequence
  Synthetic oligonucleotide; AGG chr11 5268363 5268382 5268379 +
aatgtactttattaaacaga

SEQ ID NO: 13508 - DNA, 20 bp, Artificial Sequence
  Synthetic oligonucleotide; AAG chr11 5268375 5268394 5268391 +
taaacagaaggctttctctc

SEQ ID NO: 13509 - DNA, 20 bp, Artificial Sequence
  Synthetic oligonucleotide; AGG chr11 5268376 5268395 5268392 +
aaacagaaggctttctctca

SEQ ID NO: 13510 - DNA, 20 bp, Artificial Sequence
  Synthetic oligonucleotide; AAG chr11 5268381 5268400 5268397 +
gaaggctttctctcaaggcc

SEQ ID NO: 13511 - DNA, 20 bp, Artificial Sequence
  Synthetic oligonucleotide; CAG chr11 5268386 5268405 5268402 +
ctttctctcaaggccaagcc

SEQ ID NO: 13512 - DNA, 20 bp, Artificial Sequence
  Synthetic oligonucleotide; CAG chr11 5268399 5268418 5268415 +
ccaagcccagtccccatgtg

SEQ ID NO: 13513 - DNA, 20 bp, Artificial Sequence
  Synthetic oligonucleotide; AAG chr11 5268402 5268421 5268418 +
agcccagtccccatgtgcag

SEQ ID NO: 13514 - DNA, 20 bp, Artificial Sequence
  Synthetic oligonucleotide; AGG chr11 5268403 5268422 5268419 +
gcccagtccccatgtgcaga

SEQ ID NO: 13515 - DNA, 20 bp, Artificial Sequence
  Synthetic oligonucleotide; GAG chr11 5268405 5268424 5268421 +
ccagtccccatgtgcagaag

SEQ ID NO: 13516 - DNA, 20 bp, Artificial Sequence
  Synthetic oligonucleotide; AGG chr11 5268406 5268425 5268422 +
cagtccccatgtgcagaagg

SEQ ID NO: 13517 - DNA, 20 bp, Artificial Sequence
  Synthetic oligonucleotide; GGG chr11 5268407 5268426 5268423 +
agtccccatgtgcagaagga

SEQ ID NO: 13518 - DNA, 20 bp, Artificial Sequence
  Synthetic oligonucleotide; CAG chr11 5268413 5268432 5268429 +
catgtgcagaaggagggtgt

SEQ ID NO: 13519 - DNA, 20 bp, Artificial Sequence
  Synthetic oligonucleotide; AGG chr11 5268414 5268433 5268430 +
atgtgcagaaggagggtgtc

SEQ ID NO: 13520 - DNA, 20 bp, Artificial Sequence
  Synthetic oligonucleotide; GGG chr11 5268415 5268434 5268431 +
tgtgcagaaggagggtgtca

SEQ ID NO: 13521 - DNA, 20 bp, Artificial Sequence
  Synthetic oligonucleotide; CAG chr11 5268421 5268440 5268437 +
gaaggagggtgtcagggtca

SEQ ID NO: 13522 - DNA, 20 bp, Artificial Sequence
  Synthetic oligonucleotide; AGG chr11 5268422 5268441 5268438 +
aaggagggtgtcagggtcac

SEQ ID NO: 13523 - DNA, 20 bp, Artificial Sequence
  Synthetic oligonucleotide; TGG chr11 5268438 5268457 5268454 +
tcacaggaacacctgcaaac

SEQ ID NO: 13524 - DNA, 20 bp, Artificial Sequence
  Synthetic oligonucleotide; AAG chr11 5268441 5268460 5268457 +
caggaacacctgcaaactgg

SEQ ID NO: 13525 - DNA, 20 bp, Artificial Sequence
  Synthetic oligonucleotide; GAG chr11 5268443 5268462 5268459 +
ggaacacctgcaaactggaa

SEQ ID NO: 13526 - DNA, 20 bp, Artificial Sequence
  Synthetic oligonucleotide; CAG chr11 5268450 5268469 5268466 +
ctgcaaactggaagagaact

SEQ ID NO: 13527 - DNA, 20 bp, Artificial Sequence
  Synthetic oligonucleotide; TGG chr11 5268453 5268472 5268469 +
caaactggaagagaactcag

SEQ ID NO: 13528 - DNA, 20 bp, Artificial Sequence
  Synthetic oligonucleotide; TGG chr11 5268462 5268481 5268478 +
agagaactcagtggtactta

SEQ ID NO: 13529 - DNA, 20 bp, Artificial Sequence
  Synthetic oligonucleotide; GGG chr11 5268463 5268482 5268479 +
gagaactcagtggtacttat

SEQ ID NO: 13530 - DNA, 20 bp, Artificial Sequence
  Synthetic oligonucleotide; CAG chr11 5268467 5268486 5268483 +
actcagtggtacttatgggc

SEQ ID NO: 13531 - DNA, 20 bp, Artificial Sequence
  Synthetic oligonucleotide; AGG chr11 5268468 5268487 5268484 +
ctcagtggtacttatgggcc

SEQ ID NO: 13532 - DNA, 20 bp, Artificial Sequence
  Synthetic oligonucleotide; GGG chr11 5268469 5268488 5268485 +
tcagtggtacttatgggcca

SEQ ID NO: 13533 - DNA, 20 bp, Artificial Sequence
  Synthetic oligonucleotide; TGG chr11 5268475 5268494 5268491 +
gtacttatgggccagggcaa

SEQ ID NO: 13534 - DNA, 20 bp, Artificial Sequence
  Synthetic oligonucleotide; CAG chr11 5268481 5268500 5268497 +
atgggccagggcaatggcga

SEQ ID NO: 13535 - DNA, 20 bp, Artificial Sequence
  Synthetic oligonucleotide; CAG chr11 5268484 5268503 5268500 +
ggccagggcaatggcgacag

SEQ ID NO: 13536 - DNA, 20 bp, Artificial Sequence
  Synthetic oligonucleotide; CAG chr11 5268491 5268510 5268507 +
gcaatggcgacagcagacac

SEQ ID NO: 13537 - DNA, 20 bp, Artificial Sequence
  Synthetic oligonucleotide; CAG chr11 5268501 5268520 5268517 +
cagcagacaccagcttctgc

SEQ ID NO: 13538 - DNA, 20 bp, Artificial Sequence
  Synthetic oligonucleotide; AGG chr11 5268502 5268521 5268518 +
agcagacaccagcttctgcc

SEQ ID NO: 13539 - DNA, 20 bp, Artificial Sequence
  Synthetic oligonucleotide; CAG chr11 5268505 5268524 5268521 +
agacaccagcttctgccagg

SEQ ID NO: 13540 - DNA, 20 bp, Artificial Sequence
  Synthetic oligonucleotide; CAG chr11 5268517 5268536 5268533 +
ctgccaggcagcctgcactt

SEQ ID NO: 13541 - DNA, 20 bp, Artificial Sequence
  Synthetic oligonucleotide; AGG chr11 5268518 5268537 5268534 +
tgccaggcagcctgcacttc

SEQ ID NO: 13542 - DNA, 20 bp, Artificial Sequence
  Synthetic oligonucleotide; GGG chr11 5268519 5268538 5268535 +
gccaggcagcctgcacttca

SEQ ID NO: 13543 - DNA, 20 bp, Artificial Sequence
  Synthetic oligonucleotide; GGG chr11 5268520 5268539 5268536 +
ccaggcagcctgcacttcag

SEQ ID NO: 13544 - DNA, 20 bp, Artificial Sequence
  Synthetic oligonucleotide; AAG chr11 5268537 5268556 5268553 +
caggggtgaactccttgcca

SEQ ID NO: 13545 - DNA, 20 bp, Artificial Sequence
  Synthetic oligonucleotide; GAG chr11 5268541 5268560 5268557 +
ggtgaactccttgccaaagt

SEQ ID NO: 13546 - DNA, 20 bp, Artificial Sequence
  Synthetic oligonucleotide; TAG chr11 5268544 5268563 5268560 +
gaactccttgccaaagtgag

SEQ ID NO: 13547 - DNA, 20 bp, Artificial Sequence
  Synthetic oligonucleotide; CAG chr11 5268548 5268567 5268564 +
tccttgccaaagtgagtagc

SEQ ID NO: 13548 - DNA, 20 bp, Artificial Sequence
  Synthetic oligonucleotide; CAG chr11 5268572 5268591 5268588 +
ataatcaccatcacgttacc

SEQ ID NO: 13549 - DNA, 20 bp, Artificial Sequence
  Synthetic oligonucleotide; AGG chr11 5268573 5268592 5268589 +
taatcaccatcacgttaccc

SEQ ID NO: 13550 - DNA, 20 bp, Artificial Sequence
  Synthetic oligonucleotide; GAG chr11 5268575 5268594 5268591 +
atcaccatcacgttacccag

SEQ ID NO: 13551 - DNA, 20 bp, Artificial Sequence
  Synthetic oligonucleotide; TAG chr11 5268582 5268601 5268598 +
tcacgttacccaggagctgt

SEQ ID NO: 13552 - DNA, 20 bp, Artificial Sequence
  Synthetic oligonucleotide; AGG chr11 5268583 5268602 5268599 +
cacgttacccaggagctgtt

SEQ ID NO: 13553 - DNA, 20 bp, Artificial Sequence
  Synthetic oligonucleotide; AAG chr11 5268589 5268608 5268605 +
acccaggagctgttaggcaa

SEQ ID NO: 13554 - DNA, 20 bp, Artificial Sequence
  Synthetic oligonucleotide; CAG chr11 5268605 5268624 5268621 +
gcaaaagacaaaataacaca

SEQ ID NO: 13555 - DNA, 20 bp, Artificial Sequence
  Synthetic oligonucleotide; AGG chr11 5268606 5268625 5268622 +
caaaagacaaaataacacac

SEQ ID NO: 13556 - DNA, 20 bp, Artificial Sequence
  Synthetic oligonucleotide; GAG chr11 5268615 5268634 5268631 +
aaataacacacaggcatgtt

SEQ ID NO: 13557 - DNA, 20 bp, Artificial Sequence
  Synthetic oligonucleotide; TAG chr11 5268618 5268637 5268634 +
taacacacaggcatgttgag

SEQ ID NO: 13558 - DNA, 20 bp, Artificial Sequence
  Synthetic oligonucleotide; AAG chr11 5268621 5268640 5268637 +
cacacaggcatgttgagtag

SEQ ID NO: 13559 - DNA, 20 bp, Artificial Sequence
  Synthetic oligonucleotide; CGG chr11 5268668 5268687 5268684 +
aacaaacaaacaaacaaaaa

SEQ ID NO: 13560 - DNA, 20 bp, Artificial Sequence
  Synthetic oligonucleotide; TAG chr11 5268688 5268707 5268704 +
cggctttatacctacattcc

SEQ ID NO: 13561 - DNA, 20 bp, Artificial Sequence
  Synthetic oligonucleotide; AAG chr11 5268715 5268734 5268731 +
ccctgacctcaaactgttcc

SEQ ID NO: 13562 - DNA, 20 bp, Artificial Sequence
  Synthetic oligonucleotide; AGG chr11 5268716 5268735 5268732 +
cctgacctcaaactgttcca

SEQ ID NO: 13563 - DNA, 20 bp, Artificial Sequence
  Synthetic oligonucleotide; CAG chr11 5268740 5268759 5268756 +
ttgtgcccacccaaaaaatt

SEQ ID NO: 13564 - DNA, 20 bp, Artificial Sequence
  Synthetic oligonucleotide; GAG chr11 5268745 5268764 5268761 +
cccacccaaaaaattcagat

SEQ ID NO: 13565 - DNA, 20 bp, Artificial Sequence
  Synthetic oligonucleotide; TAG chr11 5268750 5268769 5268766 +
ccaaaaaattcagatgagct

SEQ ID NO: 13566 - DNA, 20 bp, Artificial Sequence
  Synthetic oligonucleotide; AGG chr11 5268751 5268770 5268767 +
caaaaaattcagatgagctt

SEQ ID NO: 13567 - DNA, 20 bp, Artificial Sequence
  Synthetic oligonucleotide; GAG chr11 5268770 5268789 5268786 +
taggttcaattttattctat

SEQ ID NO: 13568 - DNA, 20 bp, Artificial Sequence
  Synthetic oligonucleotide; CAG chr11 5268826 5268845 5268842 +
cacccccttccccattttac

SEQ ID NO: 13569 - DNA, 20 bp, Artificial Sequence
  Synthetic oligonucleotide; TGG chr11 5268835 5268854 5268851 +
ccccattttaccagtattat

SEQ ID NO: 13570 - DNA, 20 bp, Artificial Sequence
  Synthetic oligonucleotide; GGG chr11 5268836 5268855 5268852 +
cccattttaccagtattatt

SEQ ID NO: 13571 - DNA, 20 bp, Artificial Sequence
  Synthetic oligonucleotide; AAG chr11 5268863 5268882 5268879 +
ctctctccctgtttttcttt

SEQ ID NO: 13572 - DNA, 20 bp, Artificial Sequence
  Synthetic oligonucleotide; TAG chr11 5268889 5268908 5268905 +
ttgtctaatttttgtaaatg

SEQ ID NO: 13573 - DNA, 20 bp, Artificial Sequence
  Synthetic oligonucleotide; GAG chr11 5268897 5268916 5268913 +
tttttgtaaatgtagaatgt

SEQ ID NO: 13574 - DNA, 20 bp, Artificial Sequence
  Synthetic oligonucleotide; AAG chr11 5268906 5268925 5268922 +
atgtagaatgtgagtgctgc

SEQ ID NO: 13575 - DNA, 20 bp, Artificial Sequence
  Synthetic oligonucleotide; GAG chr11 5268908 5268927 5268924 +
gtagaatgtgagtgctgcaa

SEQ ID NO: 13576 - DNA, 20 bp, Artificial Sequence
  Synthetic oligonucleotide; CAG chr11 5268915 5268934 5268931 +
gtgagtgctgcaagagttct

SEQ ID NO: 13577 - DNA, 20 bp, Artificial Sequence
  Synthetic oligonucleotide; CGG chr11 5268918 5268937 5268934 +
agtgctgcaagagttctcag

SEQ ID NO: 13578 - DNA, 20 bp, Artificial Sequence
  Synthetic oligonucleotide; GGG chr11 5268919 5268938 5268935 +
gtgctgcaagagttctcagc

SEQ ID NO: 13579 - DNA, 20 bp, Artificial Sequence
  Synthetic oligonucleotide; GAG chr11 5268921 5268940 5268937 +
gctgcaagagttctcagcgg

SEQ ID NO: 13580 - DNA, 20 bp, Artificial Sequence
  Synthetic oligonucleotide; CGG chr11 5268944 5268963 5268960 +
tttaaaatccccaacaaatt

SEQ ID NO: 13581 - DNA, 20 bp, Artificial Sequence
  Synthetic oligonucleotide; AAG chr11 5268951 5268970 5268967 +
tccccaacaaattcggaaac

SEQ ID NO: 13582 - DNA, 20 bp, Artificial Sequence
  Synthetic oligonucleotide; TGG chr11 5268962 5268981 5268978 +
ttcggaaacaagccttcact

SEQ ID NO: 13583 - DNA, 20 bp, Artificial Sequence
  Synthetic oligonucleotide; TGG chr11 5268977 5268996 5268993 +
tcacttggtcacaatactga

SEQ ID NO: 13584 - DNA, 20 bp, Artificial Sequence
  Synthetic oligonucleotide; GGG chr11 5268978 5268997 5268994 +
cacttggtcacaatactgat

SEQ ID NO: 13585 - DNA, 20 bp, Artificial Sequence
  Synthetic oligonucleotide; TAG chr11 5268996 5269015 5269012 +
atgggaaatttaacatattt

SEQ ID NO: 13586 - DNA, 20 bp, Artificial Sequence
  Synthetic oligonucleotide; GAG chr11 5269021 5269040 5269037 +
aatgtgtcttatttttcttt

SEQ ID NO: 13587 - DNA, 20 bp, Artificial Sequence
  Synthetic oligonucleotide; AAG chr11 5269089 5269108 5269105 +
tatcatgacccacataaaat

SEQ ID NO: 13588 - DNA, 20 bp, Artificial Sequence
  Synthetic oligonucleotide; AGG chr11 5269090 5269109 5269106 +
atcatgacccacataaaata

SEQ ID NO: 13589 - DNA, 20 bp, Artificial Sequence
  Synthetic oligonucleotide; TGG chr11 5269112 5269131 5269128 +
gcatttctatttccttgaaa

SEQ ID NO: 13590 - DNA, 20 bp, Artificial Sequence
  Synthetic oligonucleotide; AAG chr11 5269130 5269149 5269146 +
aatggactttcatctaccaa

SEQ ID NO: 13591 - DNA, 20 bp, Artificial Sequence
  Synthetic oligonucleotide; AAG chr11 5269155 5269174 5269171 +
aaatttcattcttctttcac

SEQ ID NO: 13592 - DNA, 20 bp, Artificial Sequence
  Synthetic oligonucleotide; TGG chr11 5269183 5269202 5269199 +
aattctataatacaattctc

SEQ ID NO: 13593 - DNA, 20 bp, Artificial Sequence
  Synthetic oligonucleotide; GGG chr11 5269184 5269203 5269200 +
attctataatacaattctct

SEQ ID NO: 13594 - DNA, 20 bp, Artificial Sequence
  Synthetic oligonucleotide; AAG chr11 5269198 5269217 5269214 +
ttctctgggataaacacatc

SEQ ID NO: 13595 - DNA, 20 bp, Artificial Sequence
  Synthetic oligonucleotide; TGG chr11 5269204 5269223 5269220 +
gggataaacacatcaagttc

SEQ ID NO: 13596 - DNA, 20 bp, Artificial Sequence
  Synthetic oligonucleotide; AAG chr11 5269208 5269227 5269224 +
taaacacatcaagttctggc

SEQ ID NO: 13597 - DNA, 20 bp, Artificial Sequence
  Synthetic oligonucleotide; AAG chr11 5269221 5269240 5269237 +
ttctggcaagatttcctgaa

SEQ ID NO: 13598 - DNA, 20 bp, Artificial Sequence
  Synthetic oligonucleotide; AAG chr11 5269226 5269245 5269242 +
gcaagatttcctgaaaagtt

SEQ ID NO: 13599 - DNA, 20 bp, Artificial Sequence
  Synthetic oligonucleotide; CAG chr11 5269235 5269254 5269251 +
cctgaaaagttaagccaatt

SEQ ID NO: 13600 - DNA, 20 bp, Artificial Sequence
  Synthetic oligonucleotide; AGG chr11 5269236 5269255 5269252 +
ctgaaaagttaagccaattc

SEQ ID NO: 13601 - DNA, 20 bp, Artificial Sequence
  Synthetic oligonucleotide; TAG chr11 5269243 5269262 5269259 +
gttaagccaattcaggctgt

SEQ ID NO: 13602 - DNA, 20 bp, Artificial Sequence
  Synthetic oligonucleotide; TAG chr11 5269246 5269265 5269262 +
aagccaattcaggctgttag

SEQ ID NO: 13603 - DNA, 20 bp, Artificial Sequence
  Synthetic oligonucleotide; TAG chr11 5269263 5269282 5269279 +
tagtagtcctttactgtcac

SEQ ID NO: 13604 - DNA, 20 bp, Artificial Sequence
  Synthetic oligonucleotide; AAG chr11 5269279 5269298 5269295 +
tcactagttctgaatcatgt

SEQ ID NO: 13605 - DNA, 20 bp, Artificial Sequence
  Synthetic oligonucleotide; TGG chr11 5269285 5269304 5269301 +
gttctgaatcatgtaagttt

SEQ ID NO: 13606 - DNA, 20 bp, Artificial Sequence
  Synthetic oligonucleotide; TAG chr11 5269298 5269317 5269314 +
taagttttggttatgctcac

SEQ ID NO: 13607 - DNA, 20 bp, Artificial Sequence
  Synthetic oligonucleotide; AAG chr11 5269301 5269320 5269317 +
gttttggttatgctcactag

SEQ ID NO: 13608 - DNA, 20 bp, Artificial Sequence
  Synthetic oligonucleotide; AAG chr11 5269321 5269340 5269337 +
aagtctgctgttctaacatc

SEQ ID NO: 13609 - DNA, 20 bp, Artificial Sequence
  Synthetic oligonucleotide; GAG chr11 5269341 5269360 5269357 +
aagctcgacccatgatttct

SEQ ID NO: 13610 - DNA, 20 bp, Artificial Sequence
  Synthetic oligonucleotide; TGG chr11 5269352 5269371 5269368 +
atgatttctgagatctttgt

SEQ ID NO: 13611 - DNA, 20 bp, Artificial Sequence
  Synthetic oligonucleotide; AAG chr11 5269365 5269384 5269381 +
tctttgttggtctttccaat

SEQ ID NO: 13612 - DNA, 20 bp, Artificial Sequence
  Synthetic oligonucleotide; GAG chr11 5269373 5269392 5269389 +
ggtctttccaataagattat

SEQ ID NO: 13613 - DNA, 20 bp, Artificial Sequence
  Synthetic oligonucleotide; AAG chr11 5269398 5269417 5269414 +
tcaattaatgtcaaaatata

SEQ ID NO: 13614 - DNA, 20 bp, Artificial Sequence
  Synthetic oligonucleotide; CAG chr11 5269418 5269437 5269434 +
aagccaaaaaatcacatcac

SEQ ID NO: 13615 - DNA, 20 bp, Artificial Sequence
  Synthetic oligonucleotide; AAG chr11 5269438 5269457 5269454 +
cagcacctgaactcaccttg

SEQ ID NO: 13616 - DNA, 20 bp, Artificial Sequence
  Synthetic oligonucleotide; CAG chr11 5269445 5269464 5269461 +
tgaactcaccttgaagttct

SEQ ID NO: 13617 - DNA, 20 bp, Artificial Sequence
  Synthetic oligonucleotide; AGG chr11 5269446 5269465 5269462 +
gaactcaccttgaagttctc

SEQ ID NO: 13618 - DNA, 20 bp, Artificial Sequence
  Synthetic oligonucleotide; CAG chr11 5269458 5269477 5269474 +
aagttctcaggatccacatg

SEQ ID NO: 13619 - DNA, 20 bp, Artificial Sequence
  Synthetic oligonucleotide; CAG chr11 5269468 5269487 5269484 +
gatccacatgcagcttgtca

SEQ ID NO: 13620 - DNA, 20 bp, Artificial Sequence
  Synthetic oligonucleotide; CAG chr11 5269473 5269492 5269489 +
acatgcagcttgtcacagtg

SEQ ID NO: 13621 - DNA, 20 bp, Artificial Sequence
  Synthetic oligonucleotide; CAG chr11 5269482 5269501 5269498 +
ttgtcacagtgcagctcact

SEQ ID NO: 13622 - DNA, 20 bp, Artificial Sequence
  Synthetic oligonucleotide; TAG chr11 5269487 5269506 5269503 +
acagtgcagctcactcagct

SEQ ID NO: 13623 - DNA, 20 bp, Artificial Sequence
  Synthetic oligonucleotide; AAG chr11 5269492 5269511 5269508 +
gcagctcactcagcttagca

SEQ ID NO: 13624 - DNA, 20 bp, Artificial Sequence
  Synthetic oligonucleotide; AGG chr11 5269493 5269512 5269509 +
cagctcactcagcttagcaa

SEQ ID NO: 13625 - DNA, 20 bp, Artificial Sequence
  Synthetic oligonucleotide; CGG chr11 5269496 5269515 5269512 +
ctcactcagcttagcaaagg

SEQ ID NO: 13626 - DNA, 20 bp, Artificial Sequence
  Synthetic oligonucleotide; GGG chr11 5269497 5269516 5269513 +
tcactcagcttagcaaaggc

SEQ ID NO: 13627 - DNA, 20 bp, Artificial Sequence
  Synthetic oligonucleotide; GAG chr11 5269503 5269522 5269519 +
agcttagcaaaggcgggctt

SEQ ID NO: 13628 - DNA, 20 bp, Artificial Sequence
  Synthetic oligonucleotide; AGG chr11 5269504 5269523 5269520 +
gcttagcaaaggcgggcttg

SEQ ID NO: 13629 - DNA, 20 bp, Artificial Sequence
  Synthetic oligonucleotide; TAG chr11 5269523 5269542 5269539 +
gaggttgtccatgtttttaa

SEQ ID NO: 13630 - DNA, 20 bp, Artificial Sequence
  Synthetic oligonucleotide; AAG chr11 5269534 5269553 5269550 +
tgtttttaatagcatctcca

SEQ ID NO: 13631 - DNA, 20 bp, Artificial Sequence
  Synthetic oligonucleotide; AGG chr11 5269535 5269554 5269551 +
gtttttaatagcatctccaa

SEQ ID NO: 13632 - DNA, 20 bp, Artificial Sequence
  Synthetic oligonucleotide; AAG chr11 5269538 5269557 5269554 +
tttaatagcatctccaaagg

SEQ ID NO: 13633 - DNA, 20 bp, Artificial Sequence
  Synthetic oligonucleotide; CAG chr11 5269542 5269561 5269558 +
atagcatctccaaaggaagt

SEQ ID NO: 13634 - DNA, 20 bp, Artificial Sequence
  Synthetic oligonucleotide; TGG chr11 5269558 5269577 5269574 +
aagtcagcaccttcttgcca

SEQ ID NO: 13635 - DNA, 20 bp, Artificial Sequence
  Synthetic oligonucleotide; GGG chr11 5269559 5269578 5269575 +
agtcagcaccttcttgccat

SEQ ID NO: 13636 - DNA, 20 bp, Artificial Sequence
  Synthetic oligonucleotide; TGG chr11 5269571 5269590 5269587 +
cttgccatgggccttgacct

SEQ ID NO: 13637 - DNA, 20 bp, Artificial Sequence
  Synthetic oligonucleotide; GGG chr11 5269572 5269591 5269588 +
ttgccatgggccttgacctt

SEQ ID NO: 13638 - DNA, 20 bp, Artificial Sequence
  Synthetic oligonucleotide; GGG chr11 5269573 5269592 5269589 +
tgccatgggccttgaccttg

SEQ ID NO: 13639 - DNA, 20 bp, Artificial Sequence
  Synthetic oligonucleotide; CAG chr11 5269581 5269600 5269597 +
gccttgaccttggggttgcc

SEQ ID NO: 13640 - DNA, 20 bp, Artificial Sequence
  Synthetic oligonucleotide; AGG chr11 5269582 5269601 5269598 +
ccttgaccttggggttgccc

SEQ ID NO: 13641 - DNA, 20 bp, Artificial Sequence
  Synthetic oligonucleotide; TGG chr11 5269586 5269605 5269602 +
gaccttggggttgcccagga

SEQ ID NO: 13642 - DNA, 20 bp, Artificial Sequence
  Synthetic oligonucleotide; CAG chr11 5269589 5269608 5269605 +
cttggggttgcccaggatgg

SEQ ID NO: 13643 - DNA, 20 bp, Artificial Sequence
  Synthetic oligonucleotide; GAG chr11 5269591 5269610 5269607 +
tggggttgcccaggatggca

SEQ ID NO: 13644 - DNA, 20 bp, Artificial Sequence
  Synthetic oligonucleotide; AGG chr11 5269592 5269611 5269608 +
ggggttgcccaggatggcag

SEQ ID NO: 13645 - DNA, 20 bp, Artificial Sequence
  Synthetic oligonucleotide; GGG chr11 5269593 5269612 5269609 +
gggttgcccaggatggcaga

SEQ ID NO: 13646 - DNA, 20 bp, Artificial Sequence
  Synthetic oligonucleotide; GAG chr11 5269595 5269614 5269611 +
gttgcccaggatggcagagg

SEQ ID NO: 13647 - DNA, 20 bp, Artificial Sequence
  Synthetic oligonucleotide; CAG chr11 5269602 5269621 5269618 +
aggatggcagagggagacga

SEQ ID NO: 13648 - DNA, 20 bp, Artificial Sequence
  Synthetic oligonucleotide; AGG chr11 5269603 5269622 5269619 +
ggatggcagagggagacgac

SEQ ID NO: 13649 - DNA, 20 bp, Artificial Sequence
  Synthetic oligonucleotide; AAG chr11 5269612 5269631 5269628 +
agggagacgacaggtttcca

SEQ ID NO: 13650 - DNA, 20 bp, Artificial Sequence
  Synthetic oligonucleotide; TGG chr11 5269630 5269649 5269646 +
caaagctgtcaaaaaatctc

SEQ ID NO: 13651 - DNA, 20 bp, Artificial Sequence
  Synthetic oligonucleotide; GGG chr11 5269631 5269650 5269647 +
aaagctgtcaaaaaatctct

SEQ ID NO: 13652 - DNA, 20 bp, Artificial Sequence
  Synthetic oligonucleotide; CAG chr11 5269636 5269655 5269652 +
tgtcaaaaaatctctgggtc

SEQ ID NO: 13653 - DNA, 20 bp, Artificial Sequence
  Synthetic oligonucleotide; AGG chr11 5269637 5269656 5269653 +
gtcaaaaaatctctgggtcc

SEQ ID NO: 13654 - DNA, 20 bp, Artificial Sequence
  Synthetic oligonucleotide; GGG chr11 5269638 5269657 5269654 +
tcaaaaaatctctgggtcca

SEQ ID NO: 13655 - DNA, 20 bp, Artificial Sequence
  Synthetic oligonucleotide; GGG chr11 5269639 5269658 5269655 +
caaaaaatctctgggtccag

SEQ ID NO: 13656 - DNA, 20 bp, Artificial Sequence
  Synthetic oligonucleotide; GAG chr11 5269650 5269669 5269666 +
tgggtccaggggtaaacaac

SEQ ID NO: 13657 - DNA, 20 bp, Artificial Sequence
  Synthetic oligonucleotide; AGG chr11 5269651 5269670 5269667 +
gggtccaggggtaaacaacg

SEQ ID NO: 13658 - DNA, 20 bp, Artificial Sequence
  Synthetic oligonucleotide; GAG chr11 5269653 5269672 5269669 +
gtccaggggtaaacaacgag

SEQ ID NO: 13659 - DNA, 20 bp, Artificial Sequence
  Synthetic oligonucleotide; CAG chr11 5269676 5269695 5269692 +
tctatgaaatgacaccatat

SEQ ID NO: 13660 - DNA, 20 bp, Artificial Sequence
  Synthetic oligonucleotide; TAG chr11 5269688 5269707 5269704 +
caccatatcagatacaaaat

SEQ ID NO: 13661 - DNA, 20 bp, Artificial Sequence
  Synthetic oligonucleotide; GAG chr11 5269690 5269709 5269706 +
ccatatcagatacaaaatta

SEQ ID NO: 13662 - DNA, 20 bp, Artificial Sequence
  Synthetic oligonucleotide; GAG chr11 5269707 5269726 5269723 +
ttagagatgcaaaaaatctt

SEQ ID NO: 13663 - DNA, 20 bp, Artificial Sequence
  Synthetic oligonucleotide; AGG chr11 5269708 5269727 5269724 +
tagagatgcaaaaaatcttg

SEQ ID NO: 13664 - DNA, 20 bp, Artificial Sequence
  Synthetic oligonucleotide; TAG chr11 5269730 5269749 5269746 +
gactttcccaatcaacttgc

SEQ ID NO: 13665 - DNA, 20 bp, Artificial Sequence
  Synthetic oligonucleotide; AGG chr11 5269731 5269750 5269747 +
actttcccaatcaacttgct

SEQ ID NO: 13666 - DNA, 20 bp, Artificial Sequence
  Synthetic oligonucleotide; GGG chr11 5269732 5269751 5269748 +
ctttcccaatcaacttgcta

SEQ ID NO: 13667 - DNA, 20 bp, Artificial Sequence
  Synthetic oligonucleotide; GAG chr11 5269763 5269782 5269779 +
acccttcattcccatgcatt

SEQ ID NO: 13668 - DNA, 20 bp, Artificial Sequence
  Synthetic oligonucleotide; AAG chr11 5269785 5269804 5269801 +
gaaccaatgcttacctgccc

SEQ ID NO: 13669 - DNA, 20 bp, Artificial Sequence
  Synthetic oligonucleotide; AGG chr11 5269786 5269805 5269802 +
aaccaatgcttacctgccca

SEQ ID NO: 13670 - DNA, 20 bp, Artificial Sequence
  Synthetic oligonucleotide; CAG chr11 5269798 5269817 5269814 +
cctgcccaaggcttcacctc

SEQ ID NO: 13671 - DNA, 20 bp, Artificial Sequence
  Synthetic oligonucleotide; CAG chr11 5269826 5269845 5269842 +
tccacattcatcttgctcca

SEQ ID NO: 13672 - DNA, 20 bp, Artificial Sequence
  Synthetic oligonucleotide; AGG chr11 5269827 5269846 5269843 +
ccacattcatcttgctccac

SEQ ID NO: 13673 - DNA, 20 bp, Artificial Sequence
  Synthetic oligonucleotide; TAG chr11 5269831 5269850 5269847 +
attcatcttgctccacaggc

SEQ ID NO: 13674 - DNA, 20 bp, Artificial Sequence
  Synthetic oligonucleotide; CGG chr11 5269837 5269856 5269853 +
cttgctccacaggctagtga

SEQ ID NO: 13675 - DNA, 20 bp, Artificial Sequence
  Synthetic oligonucleotide; CAG chr11 5269840 5269859 5269856 +
gctccacaggctagtgacgg

SEQ ID NO: 13676 - DNA, 20 bp, Artificial Sequence
  Synthetic oligonucleotide; CAG chr11 5269852 5269871 5269868 +
agtgacggcagccttctcct

SEQ ID NO: 13677 - DNA, 20 bp, Artificial Sequence
  Synthetic oligonucleotide; CAG chr11 5269855 5269874 5269871 +
gacggcagccttctcctcag

SEQ ID NO: 13678 - DNA, 20 bp, Artificial Sequence
  Synthetic oligonucleotide; CAG chr11 5269876 5269895 5269892 +
agtaaaatgcaccatgatgc

SEQ ID NO: 13679 - DNA, 20 bp, Artificial Sequence
  Synthetic oligonucleotide; AGG chr11 5269877 5269896 5269893 +
gtaaaatgcaccatgatgcc

SEQ ID NO: 13680 - DNA, 20 bp, Artificial Sequence
  Synthetic oligonucleotide; GAG chr11 5269883 5269902 5269899 +
tgcaccatgatgccaggcct

SEQ ID NO: 13681 - DNA, 20 bp, Artificial Sequence
  Synthetic oligonucleotide; GAG chr11 5269885 5269904 5269901 +
caccatgatgccaggcctga

SEQ ID NO: 13682 - DNA, 20 bp, Artificial Sequence
  Synthetic oligonucleotide; TAG chr11 5269893 5269912 5269909 +
tgccaggcctgagagcttgc

SEQ ID NO: 13683 - DNA, 20 bp, Artificial Sequence
  Synthetic oligonucleotide; CAG chr11 5269902 5269921 5269918 +
tgagagcttgctagtgattg

SEQ ID NO: 13684 - DNA, 20 bp, Artificial Sequence
  Synthetic oligonucleotide; CGG chr11 5269911 5269930 5269927 +
gctagtgattgcagctgtgt

SEQ ID NO: 13685 - DNA, 20 bp, Artificial Sequence
  Synthetic oligonucleotide; AAG chr11 5269914 5269933 5269930 +
agtgattgcagctgtgtcgg

SEQ ID NO: 13686 - DNA, 20 bp, Artificial Sequence
  Synthetic oligonucleotide; CAG chr11 5269917 5269936 5269933 +
gattgcagctgtgtcggaag

SEQ ID NO: 13687 - DNA, 20 bp, Artificial Sequence
  Synthetic oligonucleotide; TGG chr11 5269943 5269962 5269959 +
tgtgctgctgcctctctgtc

SEQ ID NO: 13688 - DNA, 20 bp, Artificial Sequence
  Synthetic oligonucleotide; AAG chr11 5269966 5269985 5269982 +
ccttttattctttactgccg

SEQ ID NO: 13689 - DNA, 20 bp, Artificial Sequence
  Synthetic oligonucleotide; TGG chr11 5269972 5269991 5269988 +
attctttactgccgaagttc

SEQ ID NO: 13690 - DNA, 20 bp, Artificial Sequence
  Synthetic oligonucleotide; TGG chr11 5269989 5270008 5270005 +
ttctggccccctgttctcca

SEQ ID NO: 13691 - DNA, 20 bp, Artificial Sequence
  Synthetic oligonucleotide; AAG chr11 5269999 5270018 5270015 +
ctgttctccatggtacttaa

SEQ ID NO: 13692 - DNA, 20 bp, Artificial Sequence
  Synthetic oligonucleotide; TGG chr11 5270006 5270025 5270022 +
ccatggtacttaaaagtcat

SEQ ID NO: 13693 - DNA, 20 bp, Artificial Sequence
  Synthetic oligonucleotide; AAG chr11 5270011 5270030 5270027 +
gtacttaaaagtcattggtc

SEQ ID NO: 13694 - DNA, 20 bp, Artificial Sequence
  Synthetic oligonucleotide; AGG chr11 5270012 5270031 5270028 +
tacttaaaagtcattggtca

SEQ ID NO: 13695 - DNA, 20 bp, Artificial Sequence
  Synthetic oligonucleotide; CAG chr11 5270030 5270049 5270046 +
caaggctgacctgtgtccct

SEQ ID NO: 13696 - DNA, 20 bp, Artificial Sequence
  Synthetic oligonucleotide; AGG chr11 5270031 5270050 5270047 +
aaggctgacctgtgtccctc

SEQ ID NO: 13697 - DNA, 20 bp, Artificial Sequence
  Synthetic oligonucleotide; GGG chr11 5270032 5270051 5270048 +
aggctgacctgtgtccctca

SEQ ID NO: 13698 - DNA, 20 bp, Artificial Sequence
  Synthetic oligonucleotide; GGG chr11 5270033 5270052 5270049 +
ggctgacctgtgtccctcag

SEQ ID NO: 13699 - DNA, 20 bp, Artificial Sequence
  Synthetic oligonucleotide; TGG chr11 5270036 5270055 5270052 +
tgacctgtgtccctcagggg

SEQ ID NO: 13700 - DNA, 20 bp, Artificial Sequence
  Synthetic oligonucleotide; GAG chr11 5270038 5270057 5270054 +
acctgtgtccctcaggggtg

SEQ ID NO: 13701 - DNA, 20 bp, Artificial Sequence
  Synthetic oligonucleotide; CAG chr11 5270042 5270061 5270058 +
gtgtccctcaggggtggagt

SEQ ID NO: 13702 - DNA, 20 bp, Artificial Sequence
  Synthetic oligonucleotide; AGG chr11 5270043 5270062 5270059 +
tgtccctcaggggtggagtc

SEQ ID NO: 13703 - DNA, 20 bp, Artificial Sequence
  Synthetic oligonucleotide; CGG chr11 5270048 5270067 5270064 +
ctcaggggtggagtcaggtc

SEQ ID NO: 13704 - DNA, 20 bp, Artificial Sequence
  Synthetic oligonucleotide; GAG chr11 5270050 5270069 5270066 +
caggggtggagtcaggtccg

SEQ ID NO: 13705 - DNA, 20 bp, Artificial Sequence
  Synthetic oligonucleotide; GAG chr11 5270052 5270071 5270068 +
ggggtggagtcaggtccgga

SEQ ID NO: 13706 - DNA, 20 bp, Artificial Sequence
  Synthetic oligonucleotide; AGG chr11 5270053 5270072 5270069 +
gggtggagtcaggtccggag

SEQ ID NO: 13707 - DNA, 20 bp, Artificial Sequence
  Synthetic oligonucleotide; GGG chr11 5270054 5270073 5270070 +
ggtggagtcaggtccggaga

SEQ ID NO: 13708 - DNA, 20 bp, Artificial Sequence
  Synthetic oligonucleotide; CAG chr11 5270058 5270077 5270074 +
gagtcaggtccggagagggt

SEQ ID NO: 13709 - DNA, 20 bp, Artificial Sequence
  Synthetic oligonucleotide; CAG chr11 5270061 5270080 5270077 +
tcaggtccggagagggtcag

SEQ ID NO: 13710 - DNA, 20 bp, Artificial Sequence
  Synthetic oligonucleotide; TGG chr11 5270067 5270086 5270083 +
ccggagagggtcagcagtga

SEQ ID NO: 13711 - DNA, 20 bp, Artificial Sequence
  Synthetic oligonucleotide; TGG chr11 5270071 5270090 5270087 +
agagggtcagcagtgatgga

SEQ ID NO: 13712 - DNA, 20 bp, Artificial Sequence
  Synthetic oligonucleotide; AAG chr11 5270079 5270098 5270095 +
agcagtgatggatggacact

SEQ ID NO: 13713 - DNA, 20 bp, Artificial Sequence
  Synthetic oligonucleotide; TGG chr11 5270099 5270118 5270115 +
aagtttgtgataatgtgtgc

SEQ ID NO: 13714 - DNA, 20 bp, Artificial Sequence
  Synthetic oligonucleotide; GAG chr11 5270107 5270126 5270123 +
gataatgtgtgctggatcct

SEQ ID NO: 13715 - DNA, 20 bp, Artificial Sequence
  Synthetic oligonucleotide; AGG chr11 5270108 5270127 5270124 +
ataatgtgtgctggatcctg

SEQ ID NO: 13716 - DNA, 20 bp, Artificial Sequence
  Synthetic oligonucleotide; TGG chr11 5270122 5270141 5270138 +
atcctgaggctcttttttgt

SEQ ID NO: 13717 - DNA, 20 bp, Artificial Sequence
  Synthetic oligonucleotide; AAG chr11 5270223 5270242 5270239 +
ctctcccattctccttttcc

SEQ ID NO: 13718 - DNA, 20 bp, Artificial Sequence
  Synthetic oligonucleotide; AAG chr11 5270227 5270246 5270243 +
cccattctccttttccaaga

SEQ ID NO: 13719 - DNA, 20 bp, Artificial Sequence
  Synthetic oligonucleotide; AAG chr11 5270239 5270258 5270255 +
ttccaagaaagcctcatata

SEQ ID NO: 13720 - DNA, 20 bp, Artificial Sequence
  Synthetic oligonucleotide; AGG chr11 5270240 5270259 5270256 +
tccaagaaagcctcatataa

SEQ ID NO: 13721 - DNA, 20 bp, Artificial Sequence
  Synthetic oligonucleotide; GAG chr11 5270242 5270261 5270258 +
caagaaagcctcatataaag

SEQ ID NO: 13722 - DNA, 20 bp, Artificial Sequence
  Synthetic oligonucleotide; TAG chr11 5270257 5270276 5270273 +
taaaggagcaaatctcaaaa

SEQ ID NO: 13723 - DNA, 20 bp, Artificial Sequence
  Synthetic oligonucleotide; AGG chr11 5270258 5270277 5270274 +
aaaggagcaaatctcaaaat

SEQ ID NO: 13724 - DNA, 20 bp, Artificial Sequence
  Synthetic oligonucleotide; AAG chr11 5270266 5270285 5270282 +
aaatctcaaaataggaaaaa

SEQ ID NO: 13725 - DNA, 20 bp, Artificial Sequence
  Synthetic oligonucleotide; CAG chr11 5270272 5270291 5270288 +
caaaataggaaaaaaagttt

SEQ ID NO: 13726 - DNA, 20 bp, Artificial Sequence
  Synthetic oligonucleotide; AAG chr11 5270278 5270297 5270294 +
aggaaaaaaagtttcagcca

SEQ ID NO: 13727 - DNA, 20 bp, Artificial Sequence
  Synthetic oligonucleotide; AAG chr11 5270301 5270320 5270317 +
cgcatttaacatttgcctta

SEQ ID NO: 13728 - DNA, 20 bp, Artificial Sequence
  Synthetic oligonucleotide; AGG chr11 5270302 5270321 5270318 +
gcatttaacatttgccttaa

SEQ ID NO: 13729 - DNA, 20 bp, Artificial Sequence
  Synthetic oligonucleotide; TGG chr11 5270305 5270324 5270321 +
tttaacatttgccttaaagg

SEQ ID NO: 13730 - DNA, 20 bp, Artificial Sequence
  Synthetic oligonucleotide; CAG chr11 5270311 5270330 5270327 +
atttgccttaaaggtggtga

SEQ ID NO: 13731 - DNA, 20 bp, Artificial Sequence
  Synthetic oligonucleotide; CAG chr11 5270323 5270342 5270339 +
ggtggtgacagtgacaaaaa

SEQ ID NO: 13732 - DNA, 20 bp, Artificial Sequence
  Synthetic oligonucleotide; AGG chr11 5270324 5270343 5270340 +
gtggtgacagtgacaaaaac

SEQ ID NO: 13733 - DNA, 20 bp, Artificial Sequence
  Synthetic oligonucleotide; GGG chr11 5270325 5270344 5270341 +
tggtgacagtgacaaaaaca

SEQ ID NO: 13734 - DNA, 20 bp, Artificial Sequence
  Synthetic oligonucleotide; AAG chr11 5270330 5270349 5270346 +
acagtgacaaaaacagggcc

SEQ ID NO: 13735 - DNA, 20 bp, Artificial Sequence
  Synthetic oligonucleotide; AGG chr11 5270331 5270350 5270347 +
cagtgacaaaaacagggcca

SEQ ID NO: 13736 - DNA, 20 bp, Artificial Sequence
  Synthetic oligonucleotide; AAG chr11 5270336 5270355 5270352 +
acaaaaacagggccaaggaa

SEQ ID NO: 13737 - DNA, 20 bp, Artificial Sequence
  Synthetic oligonucleotide; AAG chr11 5270345 5270364 5270361 +
gggccaaggaaaagaaaata

SEQ ID NO: 13738 - DNA, 20 bp, Artificial Sequence
  Synthetic oligonucleotide; CAG chr11 5270357 5270376 5270373 +
agaaaataaagctgttaaaa

SEQ ID NO: 13739 - DNA, 20 bp, Artificial Sequence
  Synthetic oligonucleotide; CAG chr11 5270369 5270388 5270385 +
tgttaaaacagaatctcacc

SEQ ID NO: 13740 - DNA, 20 bp, Artificial Sequence
  Synthetic oligonucleotide; TAG chr11 5270375 5270394 5270391 +
aacagaatctcacccagttc

SEQ ID NO: 13741 - DNA, 20 bp, Artificial Sequence
  Synthetic oligonucleotide; AAG chr11 5270385 5270404 5270401 +
cacccagttctagctctctt

SEQ ID NO: 13742 - DNA, 20 bp, Artificial Sequence
  Synthetic oligonucleotide; AGG chr11 5270386 5270405 5270402 +
acccagttctagctctctta

SEQ ID NO: 13743 - DNA, 20 bp, Artificial Sequence
  Synthetic oligonucleotide; GAG chr11 5270388 5270407 5270404 +
ccagttctagctctcttaag

SEQ ID NO: 13744 - DNA, 20 bp, Artificial Sequence
  Synthetic oligonucleotide; TAG chr11 5270418 5270437 5270434 +
taaacaaaacttctgtacct

SEQ ID NO: 13745 - DNA, 20 bp, Artificial Sequence
  Synthetic oligonucleotide; TAG chr11 5270427 5270446 5270443 +
cttctgtaccttagtttctc

SEQ ID NO: 13746 - DNA, 20 bp, Artificial Sequence
  Synthetic oligonucleotide; AGG chr11 5270428 5270447 5270444 +
ttctgtaccttagtttctct

SEQ ID NO: 13747 - DNA, 20 bp, Artificial Sequence
  Synthetic oligonucleotide; GGG chr11 5270429 5270448 5270445 +
tctgtaccttagtttctcta

SEQ ID NO: 13748 - DNA, 20 bp, Artificial Sequence
  Synthetic oligonucleotide; GAG chr11 5270431 5270450 5270447 +
tgtaccttagtttctctagg

SEQ ID NO: 13749 - DNA, 20 bp, Artificial Sequence
  Synthetic oligonucleotide; TAG chr11 5270448 5270467 5270464 +
agggagacaaaaaccgtaca

SEQ ID NO: 13750 - DNA, 20 bp, Artificial Sequence
  Synthetic oligonucleotide; TAG chr11 5270458 5270477 5270474 +
aaaccgtacatagttccttc

SEQ ID NO: 13751 - DNA, 20 bp, Artificial Sequence
  Synthetic oligonucleotide; CAG chr11 5270469 5270488 5270485 +
agttccttctagaaactgaa

SEQ ID NO: 13752 - DNA, 20 bp, Artificial Sequence
  Synthetic oligonucleotide; TAG chr11 5270474 5270493 5270490 +
cttctagaaactgaacagaa

SEQ ID NO: 13753 - DNA, 20 bp, Artificial Sequence
  Synthetic oligonucleotide; AAG chr11 5270478 5270497 5270494 +
tagaaactgaacagaatagc

SEQ ID NO: 13754 - DNA, 20 bp, Artificial Sequence
  Synthetic oligonucleotide; TAG chr11 5270481 5270500 5270497 +
aaactgaacagaatagcaag

SEQ ID NO: 13755 - DNA, 20 bp, Artificial Sequence
  Synthetic oligonucleotide; CAG chr11 5270488 5270507 5270504 +
acagaatagcaagtagtcca

SEQ ID NO: 13756 - DNA, 20 bp, Artificial Sequence
  Synthetic oligonucleotide; TGG chr11 5270491 5270510 5270507 +
gaatagcaagtagtccacag

SEQ ID NO: 13757 - DNA, 20 bp, Artificial Sequence
  Synthetic oligonucleotide; GGG chr11 5270492 5270511 5270508 +
aatagcaagtagtccacagt

SEQ ID NO: 13758 - DNA, 20 bp, Artificial Sequence
  Synthetic oligonucleotide; AAG chr11 5270499 5270518 5270515 +
agtagtccacagtgggacta

SEQ ID NO: 13759 - DNA, 20 bp, Artificial Sequence
  Synthetic oligonucleotide; AAG chr11 5270513 5270532 5270529 +
ggactaaagccttaatccca

SEQ ID NO: 13760 - DNA, 20 bp, Artificial Sequence
  Synthetic oligonucleotide; CAG chr11 5270518 5270537 5270534 +
aaagccttaatcccaaagta

SEQ ID NO: 13761 - DNA, 20 bp, Artificial Sequence
  Synthetic oligonucleotide; TGG chr11 5270526 5270545 5270542 +
aatcccaaagtacagtacct

SEQ ID NO: 13762 - DNA, 20 bp, Artificial Sequence
  Synthetic oligonucleotide; GGG chr11 5270527 5270546 5270543 +
atcccaaagtacagtacctt

SEQ ID NO: 13763 - DNA, 20 bp, Artificial Sequence
  Synthetic oligonucleotide; GGG chr11 5270528 5270547 5270544 +
tcccaaagtacagtaccttg

SEQ ID NO: 13764 - DNA, 20 bp, Artificial Sequence
  Synthetic oligonucleotide; TAG chr11 5270539 5270558 5270555 +
agtaccttggggtgattccc

SEQ ID NO: 13765 - DNA, 20 bp, Artificial Sequence
  Synthetic oligonucleotide; GAG chr11 5270541 5270560 5270557 +
taccttggggtgattcccta

SEQ ID NO: 13766 - DNA, 20 bp, Artificial Sequence
  Synthetic oligonucleotide; GAG chr11 5270543 5270562 5270559 +
ccttggggtgattccctaga

SEQ ID NO: 13767 - DNA, 20 bp, Artificial Sequence
  Synthetic oligonucleotide; AGG chr11 5270544 5270563 5270560 +
cttggggtgattccctagag

SEQ ID NO: 13768 - DNA, 20 bp, Artificial Sequence
  Synthetic oligonucleotide; CAG chr11 5270548 5270567 5270564 +
gggtgattccctagagagga

SEQ ID NO: 13769 - DNA, 20 bp, Artificial Sequence
  Synthetic oligonucleotide; CAG chr11 5270552 5270571 5270568 +
gattccctagagaggacaga

SEQ ID NO: 13770 - DNA, 20 bp, Artificial Sequence
  Synthetic oligonucleotide; AAG chr11 5270557 5270576 5270573 +
cctagagaggacagacagaa

SEQ ID NO: 13771 - DNA, 20 bp, Artificial Sequence
  Synthetic oligonucleotide; CAG chr11 5270568 5270587 5270584 +
cagacagaaaagattacatc

SEQ ID NO: 13772 - DNA, 20 bp, Artificial Sequence
  Synthetic oligonucleotide; CAG chr11 5270577 5270596 5270593 +
aagattacatccagtgcttc

SEQ ID NO: 13773 - DNA, 20 bp, Artificial Sequence
  Synthetic oligonucleotide; GAG chr11 5270579 5270598 5270595 +
gattacatccagtgcttcca

SEQ ID NO: 13774 - DNA, 20 bp, Artificial Sequence
  Synthetic oligonucleotide; CAG chr11 5270613 5270632 5270629 +
ttttcatttctctatgacca

SEQ ID NO: 13775 - DNA, 20 bp, Artificial Sequence
  Synthetic oligonucleotide; AGG chr11 5270614 5270633 5270630 +
tttcatttctctatgaccac

SEQ ID NO: 13776 - DNA, 20 bp, Artificial Sequence
  Synthetic oligonucleotide; GGG chr11 5270615 5270634 5270631 +
ttcatttctctatgaccaca

SEQ ID NO: 13777 - DNA, 20 bp, Artificial Sequence
  Synthetic oligonucleotide; GGG chr11 5270616 5270635 5270632 +
tcatttctctatgaccacag

SEQ ID NO: 13778 - DNA, 20 bp, Artificial Sequence
  Synthetic oligonucleotide; TGG chr11 5270623 5270642 5270639 +
tctatgaccacaggggacat

SEQ ID NO: 13779 - DNA, 20 bp, Artificial Sequence
  Synthetic oligonucleotide; GAG chr11 5270635 5270654 5270651 +
ggggacattggctactttgt

SEQ ID NO: 13780 - DNA, 20 bp, Artificial Sequence
  Synthetic oligonucleotide; TGG chr11 5270645 5270664 5270661 +
gctactttgtgagtattgcc

SEQ ID NO: 13781 - DNA, 20 bp, Artificial Sequence
  Synthetic oligonucleotide; GGG chr11 5270646 5270665 5270662 +
ctactttgtgagtattgcct

SEQ ID NO: 13782 - DNA, 20 bp, Artificial Sequence
  Synthetic oligonucleotide; GGG chr11 5270647 5270666 5270663 +
tactttgtgagtattgcctg

SEQ ID NO: 13783 - DNA, 20 bp, Artificial Sequence
  Synthetic oligonucleotide; TGG chr11 5270692 5270711 5270708 +
gtcctgcttatacttctcac

SEQ ID NO: 13784 - DNA, 20 bp, Artificial Sequence
  Synthetic oligonucleotide; GGG chr11 5270693 5270712 5270709 +
tcctgcttatacttctcact

SEQ ID NO: 13785 - DNA, 20 bp, Artificial Sequence
  Synthetic oligonucleotide; AAG chr11 5270696 5270715 5270712 +
tgcttatacttctcactggg

SEQ ID NO: 13786 - DNA, 20 bp, Artificial Sequence
  Synthetic oligonucleotide; AGG chr11 5270697 5270716 5270713 +
gcttatacttctcactggga

SEQ ID NO: 13787 - DNA, 20 bp, Artificial Sequence
  Synthetic oligonucleotide; GGG chr11 5270698 5270717 5270714 +
cttatacttctcactgggaa

SEQ ID NO: 13788 - DNA, 20 bp, Artificial Sequence
  Synthetic oligonucleotide; GAG chr11 5270700 5270719 5270716 +
tatacttctcactgggaagg

SEQ ID NO: 13789 - DNA, 20 bp, Artificial Sequence
  Synthetic oligonucleotide; GAG chr11 5270705 5270724 5270721 +
ttctcactgggaagggagct

SEQ ID NO: 13790 - DNA, 20 bp, Artificial Sequence
  Synthetic oligonucleotide; AAG chr11 5270708 5270727 5270724 +
tcactgggaagggagctgag

SEQ ID NO: 13791 - DNA, 20 bp, Artificial Sequence
  Synthetic oligonucleotide; AAG chr11 5270733 5270752 5270749 +
taaaatcctaaaattattta

SEQ ID NO: 13792 - DNA, 20 bp, Artificial Sequence
  Synthetic oligonucleotide; CAG chr11 5270737 5270756 5270753 +
atcctaaaattatttaaagc

SEQ ID NO: 13793 - DNA, 20 bp, Artificial Sequence
  Synthetic oligonucleotide; CAG chr11 5270754 5270773 5270770 +
agccagaatttgtcatcaaa

SEQ ID NO: 13794 - DNA, 20 bp, Artificial Sequence
  Synthetic oligonucleotide; GAG chr11 5270756 5270775 5270772 +
ccagaatttgtcatcaaaca

SEQ ID NO: 13795 - DNA, 20 bp, Artificial Sequence
  Synthetic oligonucleotide; AAG chr11 5270763 5270782 5270779 +
ttgtcatcaaacagagaaaa

SEQ ID NO: 13796 - DNA, 20 bp, Artificial Sequence
  Synthetic oligonucleotide; CAG chr11 5270783 5270802 5270799 +
aagtgaatcgatatattaat

SEQ ID NO: 13797 - DNA, 20 bp, Artificial Sequence
  Synthetic oligonucleotide; AGG chr11 5270784 5270803 5270800 +
agtgaatcgatatattaatc

SEQ ID NO: 13798 - DNA, 20 bp, Artificial Sequence
  Synthetic oligonucleotide; TAG chr11 5270788 5270807 5270804 +
aatcgatatattaatcaggc

SEQ ID NO: 13799 - DNA, 20 bp, Artificial Sequence
  Synthetic oligonucleotide; AGG chr11 5270789 5270808 5270805 +
atcgatatattaatcaggct

SEQ ID NO: 13800 - DNA, 20 bp, Artificial Sequence
  Synthetic oligonucleotide; GAG chr11 5270791 5270810 5270807 +
cgatatattaatcaggctag

SEQ ID NO: 13801 - DNA, 20 bp, Artificial Sequence
  Synthetic oligonucleotide; CAG chr11 5270795 5270814 5270811 +
atattaatcaggctaggagt

SEQ ID NO: 13802 - DNA, 20 bp, Artificial Sequence
  Synthetic oligonucleotide; AGG chr11 5270796 5270815 5270812 +
tattaatcaggctaggagtc

SEQ ID NO: 13803 - DNA, 20 bp, Artificial Sequence
  Synthetic oligonucleotide; GGG chr11 5270797 5270816 5270813 +
attaatcaggctaggagtca

SEQ ID NO: 13804 - DNA, 20 bp, Artificial Sequence
  Synthetic oligonucleotide; TAG chr11 5270813 5270832 5270829 +
gtcagggtatattattcctc

SEQ ID NO: 13805 - DNA, 20 bp, Artificial Sequence
  Synthetic oligonucleotide; TAG chr11 5270858 5270877 5270874 +
tccccattttgatgacttgc

SEQ ID NO: 13806 - DNA, 20 bp, Artificial Sequence
  Synthetic oligonucleotide; TGG chr11 5270870 5270889 5270886 +
tgacttgctagctctttact

SEQ ID NO: 13807 - DNA, 20 bp, Artificial Sequence
  Synthetic oligonucleotide; TAG chr11 5270873 5270892 5270889 +
cttgctagctctttacttgg

SEQ ID NO: 13808 - DNA, 20 bp, Artificial Sequence
  Synthetic oligonucleotide; GAG chr11 5270875 5270894 5270891 +
tgctagctctttacttggta

SEQ ID NO: 13809 - DNA, 20 bp, Artificial Sequence
  Synthetic oligonucleotide; TGG chr11 5270885 5270904 5270901 +
ttacttggtagagctgaaac

SEQ ID NO: 13810 - DNA, 20 bp, Artificial Sequence
  Synthetic oligonucleotide; AAG chr11 5270888 5270907 5270904 +
cttggtagagctgaaactgg

SEQ ID NO: 13811 - DNA, 20 bp, Artificial Sequence
  Synthetic oligonucleotide; TGG chr11 5270892 5270911 5270908 +
gtagagctgaaactggaagt

SEQ ID NO: 13812 - DNA, 20 bp, Artificial Sequence
  Synthetic oligonucleotide; GGG chr11 5270893 5270912 5270909 +
tagagctgaaactggaagtt

SEQ ID NO: 13813 - DNA, 20 bp, Artificial Sequence
  Synthetic oligonucleotide; CAG chr11 5270901 5270920 5270917 +
aaactggaagttgggattta

SEQ ID NO: 13814 - DNA, 20 bp, Artificial Sequence
  Synthetic oligonucleotide; AAG chr11 5270930 5270949 5270946 +
caattcgatccatgtgcctg

SEQ ID NO: 13815 - DNA, 20 bp, Artificial Sequence
  Synthetic oligonucleotide; TAG chr11 5270997 5271016 5271013 +
ttgtcattatcctcatattt

SEQ ID NO: 13816 - DNA, 20 bp, Artificial Sequence
  Synthetic oligonucleotide; AAG chr11 5271004 5271023 5271020 +
tatcctcatattttagaatc

SEQ ID NO: 13817 - DNA, 20 bp, Artificial Sequence
  Synthetic oligonucleotide; AGG chr11 5271005 5271024 5271021 +
atcctcatattttagaatca

SEQ ID NO: 13818 - DNA, 20 bp, Artificial Sequence
  Synthetic oligonucleotide; CAG chr11 5271018 5271037 5271034 +
agaatcaaggaataaattca

SEQ ID NO: 13819 - DNA, 20 bp, Artificial Sequence
  Synthetic oligonucleotide; CAG chr11 5271044 5271063 5271060 +
ttatttaactatcaatgtga

SEQ ID NO: 13820 - DNA, 20 bp, Artificial Sequence
  Synthetic oligonucleotide; AAG chr11 5271047 5271066 5271063 +
tttaactatcaatgtgacag

SEQ ID NO: 13821 - DNA, 20 bp, Artificial Sequence
  Synthetic oligonucleotide; TGG chr11 5271057 5271076 5271073 +
aatgtgacagaagtaatgat

SEQ ID NO: 13822 - DNA, 20 bp, Artificial Sequence
  Synthetic oligonucleotide; GGG chr11 5271058 5271077 5271074 +
atgtgacagaagtaatgatt

SEQ ID NO: 13823 - DNA, 20 bp, Artificial Sequence
  Synthetic oligonucleotide; GGG chr11 5271059 5271078 5271075 +
tgtgacagaagtaatgattg

SEQ ID NO: 13824 - DNA, 20 bp, Artificial Sequence
  Synthetic oligonucleotide; GGG chr11 5271060 5271079 5271076 +
gtgacagaagtaatgattgg

SEQ ID NO: 13825 - DNA, 20 bp, Artificial Sequence
  Synthetic oligonucleotide; TAG chr11 5271068 5271087 5271084 +
agtaatgattgggggaataa

SEQ ID NO: 13826 - DNA, 20 bp, Artificial Sequence
  Synthetic oligonucleotide; AAG chr11 5271071 5271090 5271087 +
aatgattgggggaataatag

SEQ ID NO: 13827 - DNA, 20 bp, Artificial Sequence
  Synthetic oligonucleotide; CAG chr11 5271074 5271093 5271090 +
gattgggggaataatagaag

SEQ ID NO: 13828 - DNA, 20 bp, Artificial Sequence
  Synthetic oligonucleotide; GAG chr11 5271076 5271095 5271092 +
ttgggggaataatagaagca

SEQ ID NO: 13829 - DNA, 20 bp, Artificial Sequence
  Synthetic oligonucleotide; CAG chr11 5271091 5271110 5271107 +
aagcagagttccacaaattc

SEQ ID NO: 13830 - DNA, 20 bp, Artificial Sequence
  Synthetic oligonucleotide; AAG chr11 5271111 5271130 5271127 +
cagcattgttaattctataa

SEQ ID NO: 13831 - DNA, 20 bp, Artificial Sequence
  Synthetic oligonucleotide; CAG chr11 5271143 5271162 5271159 +
tcaccataatctcattgccc

SEQ ID NO: 13832 - DNA, 20 bp, Artificial Sequence
  Synthetic oligonucleotide; CAG chr11 5271148 5271167 5271164 +
ataatctcattgccccagcc

SEQ ID NO: 13833 - DNA, 20 bp, Artificial Sequence
  Synthetic oligonucleotide; TGG chr11 5271161 5271180 5271177 +
cccagcccagttcctccttc

SEQ ID NO: 13834 - DNA, 20 bp, Artificial Sequence
  Synthetic oligonucleotide; GAG chr11 5271232 5271251 5271248 +
tttctttttttttttttttt

SEQ ID NO: 13835 - DNA, 20 bp, Artificial Sequence
  Synthetic oligonucleotide; CGG chr11 5271236 5271255 5271252 +
ttttttttttttttttgaga

SEQ ID NO: 13836 - DNA, 20 bp, Artificial Sequence
  Synthetic oligonucleotide; GAG chr11 5271238 5271257 5271254 +
ttttttttttttttgagacg

SEQ ID NO: 13837 - DNA, 20 bp, Artificial Sequence
  Synthetic oligonucleotide; CAG chr11 5271255 5271274 5271271 +
acggagtctcactctgttgc

SEQ ID NO: 13838 - DNA, 20 bp, Artificial Sequence
  Synthetic oligonucleotide; TGG chr11 5271260 5271279 5271276 +
gtctcactctgttgccagac

SEQ ID NO: 13839 - DNA, 20 bp, Artificial Sequence
  Synthetic oligonucleotide; GAG chr11 5271262 5271281 5271278 +
ctcactctgttgccagactg

SEQ ID NO: 13840 - DNA, 20 bp, Artificial Sequence
  Synthetic oligonucleotide; TGG chr11 5271270 5271289 5271286 +
gttgccagactggagtgcaa

SEQ ID NO: 13841 - DNA, 20 bp, Artificial Sequence
  Synthetic oligonucleotide; CAG chr11 5271281 5271300 5271297 +
ggagtgcaatggcactatct

SEQ ID NO: 13842 - DNA, 20 bp, Artificial Sequence
  Synthetic oligonucleotide; TGG chr11 5271305 5271324 5271321 +
tcactgcaaccttcgcctcc

SEQ ID NO: 13843 - DNA, 20 bp, Artificial Sequence
  Synthetic oligonucleotide; GGG chr11 5271306 5271325 5271322 +
cactgcaaccttcgcctcct

SEQ ID NO: 13844 - DNA, 20 bp, Artificial Sequence
  Synthetic oligonucleotide; CAG chr11 5271329 5271348 5271345 +
ttcaaacgattctcctgcct

SEQ ID NO: 13845 - DNA, 20 bp, Artificial Sequence
  Synthetic oligonucleotide; GAG chr11 5271338 5271357 5271354 +
ttctcctgcctcagcctccc

SEQ ID NO: 13846 - DNA, 20 bp, Artificial Sequence
  Synthetic oligonucleotide; CAG chr11 5271341 5271360 5271357 +
tcctgcctcagcctcccgag

SEQ ID NO: 13847 - DNA, 20 bp, Artificial Sequence
  Synthetic oligonucleotide; TGG chr11 5271345 5271364 5271361 +
gcctcagcctcccgagcagc

SEQ ID NO: 13848 - DNA, 20 bp, Artificial Sequence
  Synthetic oligonucleotide; GGG chr11 5271346 5271365 5271362 +
cctcagcctcccgagcagct

SEQ ID NO: 13849 - DNA, 20 bp, Artificial Sequence
  Synthetic oligonucleotide; CAG chr11 5271353 5271372 5271369 +
ctcccgagcagctgggacta

SEQ ID NO: 13850 - DNA, 20 bp, Artificial Sequence
  Synthetic oligonucleotide; AGG chr11 5271354 5271373 5271370 +
tcccgagcagctgggactac

SEQ ID NO: 13851 - DNA, 20 bp, Artificial Sequence
  Synthetic oligonucleotide; CAG chr11 5271373 5271392 5271389 +
caggcgcatgccaccatgcc

SEQ ID NO: 13852 - DNA, 20 bp, Artificial Sequence
  Synthetic oligonucleotide; TAG chr11 5271392 5271411 5271408 +
ccagctaatttttttatttt

SEQ ID NO: 13853 - DNA, 20 bp, Artificial Sequence
  Synthetic oligonucleotide; TAG chr11 5271395 5271414 5271411 +
gctaatttttttatttttag

SEQ ID NO: 13854 - DNA, 20 bp, Artificial Sequence
  Synthetic oligonucleotide; GAG chr11 5271397 5271416 5271413 +
taatttttttatttttagta

SEQ ID NO: 13855 - DNA, 20 bp, Artificial Sequence
  Synthetic oligonucleotide; CGG chr11 5271401 5271420 5271417 +
ttttttatttttagtagaga

SEQ ID NO: 13856 - DNA, 20 bp, Artificial Sequence
  Synthetic oligonucleotide; GGG chr11 5271402 5271421 5271418 +
tttttatttttagtagagac

SEQ ID NO: 13857 - DNA, 20 bp, Artificial Sequence
  Synthetic oligonucleotide; CAG chr11 5271421 5271440 5271437 +
cgggatttcaccatgtttgc

SEQ ID NO: 13858 - DNA, 20 bp, Artificial Sequence
  Synthetic oligonucleotide; AGG chr11 5271422 5271441 5271438 +
gggatttcaccatgtttgcc

SEQ ID NO: 13859 - DNA, 20 bp, Artificial Sequence
  Synthetic oligonucleotide; TGG chr11 5271426 5271445 5271442 +
tttcaccatgtttgccagga

SEQ ID NO: 13860 - DNA, 20 bp, Artificial Sequence
  Synthetic oligonucleotide; TGG chr11 5271503 5271522 5271519 +
tctaccatttctttctccta

SEQ ID NO: 13861 - DNA, 20 bp, Artificial Sequence
  Synthetic oligonucleotide; CAG chr11 5271521 5271540 5271537 +
tatggctccccttgccccac

SEQ ID NO: 13862 - DNA, 20 bp, Artificial Sequence
  Synthetic oligonucleotide; TAG chr11 5271527 5271546 5271543 +
tccccttgccccaccagatc

SEQ ID NO: 13863 - DNA, 20 bp, Artificial Sequence
  Synthetic oligonucleotide; AGG chr11 5271528 5271547 5271544 +
ccccttgccccaccagatct

SEQ ID NO: 13864 - DNA, 20 bp, Artificial Sequence
  Synthetic oligonucleotide; CAG chr11 5271561 5271580 5271577 +
cctacaatttcctgtatgtt

SEQ ID NO: 13865 - DNA, 20 bp, Artificial Sequence
  Synthetic oligonucleotide; AGG chr11 5271562 5271581 5271578 +
ctacaatttcctgtatgttc

SEQ ID NO: 13866 - DNA, 20 bp, Artificial Sequence
  Synthetic oligonucleotide; TAG chr11 5271568 5271587 5271584 +
tttcctgtatgttcaggccc

SEQ ID NO: 13867 - DNA, 20 bp, Artificial Sequence
  Synthetic oligonucleotide; GAG chr11 5271570 5271589 5271586 +
tcctgtatgttcaggcccta

SEQ ID NO: 13868 - DNA, 20 bp, Artificial Sequence
  Synthetic oligonucleotide; AGG chr11 5271571 5271590 5271587 +
cctgtatgttcaggccctag

SEQ ID NO: 13869 - DNA, 20 bp, Artificial Sequence
  Synthetic oligonucleotide; TAG chr11 5271592 5271611 5271608 +
ggttcttcgtctttttcact

SEQ ID NO: 13870 - DNA, 20 bp, Artificial Sequence
  Synthetic oligonucleotide; CAG chr11 5271595 5271614 5271611 +
tcttcgtctttttcacttag

SEQ ID NO: 13871 - DNA, 20 bp, Artificial Sequence
  Synthetic oligonucleotide; TGG chr11 5271600 5271619 5271616 +
gtctttttcacttagcagta

SEQ ID NO: 13872 - DNA, 20 bp, Artificial Sequence
  Synthetic oligonucleotide; AAG chr11 5271615 5271634 5271631 +
cagtatggctcctgtctccc

SEQ ID NO: 13873 - DNA, 20 bp, Artificial Sequence
  Synthetic oligonucleotide; AAG chr11 5271620 5271639 5271636 +
tggctcctgtctcccaagtc

SEQ ID NO: 13874 - DNA, 20 bp, Artificial Sequence
  Synthetic oligonucleotide; TGG chr11 5271629 5271648 5271645 +
tctcccaagtcaagtgcctt

SEQ ID NO: 13875 - DNA, 20 bp, Artificial Sequence
  Synthetic oligonucleotide; GGG chr11 5271630 5271649 5271646 +
ctcccaagtcaagtgccttt

SEQ ID NO: 13876 - DNA, 20 bp, Artificial Sequence
  Synthetic oligonucleotide; GGG chr11 5271631 5271650 5271647 +
tcccaagtcaagtgcctttg

SEQ ID NO: 13877 - DNA, 20 bp, Artificial Sequence
  Synthetic oligonucleotide; AAG chr11 5271646 5271665 5271662 +
ctttggggattccatattcc

SEQ ID NO: 13878 - DNA, 20 bp, Artificial Sequence
  Synthetic oligonucleotide; AAG chr11 5271655 5271674 5271671 +
ttccatattccaagtttact

SEQ ID NO: 13879 - DNA, 20 bp, Artificial Sequence
  Synthetic oligonucleotide; GAG chr11 5271657 5271676 5271673 +
ccatattccaagtttactaa

SEQ ID NO: 13880 - DNA, 20 bp, Artificial Sequence
  Synthetic oligonucleotide; TGG chr11 5271745 5271764 5271761 +
aaaaaaaaaaaaaacacttg

SEQ ID NO: 13881 - DNA, 20 bp, Artificial Sequence
  Synthetic oligonucleotide; AAG chr11 5271749 5271768 5271765 +
aaaaaaaaaacacttgtggc

SEQ ID NO: 13882 - DNA, 20 bp, Artificial Sequence
  Synthetic oligonucleotide; AAG chr11 5271753 5271772 5271769 +
aaaaaacacttgtggcaagt

SEQ ID NO: 13883 - DNA, 20 bp, Artificial Sequence
  Synthetic oligonucleotide; CAG chr11 5271786 5271805 5271802 +
ttgcttttctcccatgattc

SEQ ID NO: 13884 - DNA, 20 bp, Artificial Sequence
  Synthetic oligonucleotide; AAG chr11 5271789 5271808 5271805 +
cttttctcccatgattccag

SEQ ID NO: 13885 - DNA, 20 bp, Artificial Sequence
  Synthetic oligonucleotide; CAG chr11 5271832 5271851 5271848 +
tgcccaaattgttattattc

SEQ ID NO: 13886 - DNA, 20 bp, Artificial Sequence
  Synthetic oligonucleotide; AGG chr11 5271833 5271852 5271849 +
gcccaaattgttattattcc

SEQ ID NO: 13887 - DNA, 20 bp, Artificial Sequence
  Synthetic oligonucleotide; TAG chr11 5271863 5271882 5271879 +
atttctactccattttcttt

SEQ ID NO: 13888 - DNA, 20 bp, Artificial Sequence
  Synthetic oligonucleotide; TGG chr11 5271877 5271896 5271893 +
ttcttttagctattaaccaa

SEQ ID NO: 13889 - DNA, 20 bp, Artificial Sequence
  Synthetic oligonucleotide; GAG chr11 5271889 5271908 5271905 +
ttaaccaatggtatctttct

SEQ ID NO: 13890 - DNA, 20 bp, Artificial Sequence
  Synthetic oligonucleotide; TGG chr11 5271908 5271927 5271924 +
tgagcatatattctaaccat

SEQ ID NO: 13891 - DNA, 20 bp, Artificial Sequence
  Synthetic oligonucleotide; CAG chr11 5271917 5271936 5271933 +
attctaaccattggctaaca

SEQ ID NO: 13892 - DNA, 20 bp, Artificial Sequence
  Synthetic oligonucleotide; CAG chr11 5271927 5271946 5271943 +
ttggctaacacagacaaaac

SEQ ID NO: 13893 - DNA, 20 bp, Artificial Sequence
  Synthetic oligonucleotide; AGG chr11 5271928 5271947 5271944 +
tggctaacacagacaaaacc

SEQ ID NO: 13894 - DNA, 20 bp, Artificial Sequence
  Synthetic oligonucleotide; CAG chr11 5271955 5271974 5271971 +
cctaaactttttttgtgtca

SEQ ID NO: 13895 - DNA, 20 bp, Artificial Sequence
  Synthetic oligonucleotide; AGG chr11 5271956 5271975 5271972 +
ctaaactttttttgtgtcac

SEQ ID NO: 13896 - DNA, 20 bp, Artificial Sequence
  Synthetic oligonucleotide; CAG chr11 5271960 5271979 5271976 +
actttttttgtgtcacaggc

SEQ ID NO: 13897 - DNA, 20 bp, Artificial Sequence
  Synthetic oligonucleotide; TGG chr11 5271965 5271984 5271981 +
ttttgtgtcacaggccagtt

SEQ ID NO: 13898 - DNA, 20 bp, Artificial Sequence
  Synthetic oligonucleotide; CAG chr11 5271968 5271987 5271984 +
tgtgtcacaggccagtttgg

SEQ ID NO: 13899 - DNA, 20 bp, Artificial Sequence
  Synthetic oligonucleotide; AAG chr11 5271976 5271995 5271992 +
aggccagtttggcagactgt

SEQ ID NO: 13900 - DNA, 20 bp, Artificial Sequence
  Synthetic oligonucleotide; TAG chr11 5272019 5272038 5272035 +
attgcatcaaataatataca

SEQ ID NO: 13901 - DNA, 20 bp, Artificial Sequence
  Synthetic oligonucleotide; AGG chr11 5272020 5272039 5272036 +
ttgcatcaaataatatacat

SEQ ID NO: 13902 - DNA, 20 bp, Artificial Sequence
  Synthetic oligonucleotide; GAG chr11 5272022 5272041 5272038 +
gcatcaaataatatacatag

SEQ ID NO: 13903 - DNA, 20 bp, Artificial Sequence
  Synthetic oligonucleotide; AAG chr11 5272029 5272048 5272045 +
ataatatacataggagtgct

SEQ ID NO: 13904 - DNA, 20 bp, Artificial Sequence
  Synthetic oligonucleotide; CAG chr11 5272057 5272076 5272073 +
ttacactgaaatatcattat

SEQ ID NO: 13905 - DNA, 20 bp, Artificial Sequence
  Synthetic oligonucleotide; TGG chr11 5272079 5272098 5272095 +
gacatcaaacattacatttg

SEQ ID NO: 13906 - DNA, 20 bp, Artificial Sequence
  Synthetic oligonucleotide; TAG chr11 5272084 5272103 5272100 +
caaacattacatttgtggta

SEQ ID NO: 13907 - DNA, 20 bp, Artificial Sequence
  Synthetic oligonucleotide; AAG chr11 5272113 5272132 5272129 +
ttatatttgcttctttatga

SEQ ID NO: 13908 - DNA, 20 bp, Artificial Sequence
  Synthetic oligonucleotide; TAG chr11 5272119 5272138 5272135 +
ttgcttctttatgaaagcat

SEQ ID NO: 13909 - DNA, 20 bp, Artificial Sequence
  Synthetic oligonucleotide; TAG chr11 5272125 5272144 5272141 +
ctttatgaaagcattagatc

SEQ ID NO: 13910 - DNA, 20 bp, Artificial Sequence
  Synthetic oligonucleotide; AGG chr11 5272126 5272145 5272142 +
tttatgaaagcattagatct

SEQ ID NO: 13911 - DNA, 20 bp, Artificial Sequence
  Synthetic oligonucleotide; TGG chr11 5272131 5272150 5272147 +
gaaagcattagatctaggat

SEQ ID NO: 13912 - DNA, 20 bp, Artificial Sequence
  Synthetic oligonucleotide; GGG chr11 5272132 5272151 5272148 +
aaagcattagatctaggatt

SEQ ID NO: 13913 - DNA, 20 bp, Artificial Sequence
  Synthetic oligonucleotide; CAG chr11 5272139 5272158 5272155 +
tagatctaggattgggtcta

SEQ ID NO: 13914 - DNA, 20 bp, Artificial Sequence
  Synthetic oligonucleotide; AAG chr11 5272149 5272168 5272165 +
attgggtctacagctacctt

SEQ ID NO: 13915 - DNA, 20 bp, Artificial Sequence
  Synthetic oligonucleotide; AAG chr11 5272156 5272175 5272172 +
ctacagctaccttaagatcc

SEQ ID NO: 13916 - DNA, 20 bp, Artificial Sequence
  Synthetic oligonucleotide; TAG chr11 5272159 5272178 5272175 +
cagctaccttaagatccaag

SEQ ID NO: 13917 - DNA, 20 bp, Artificial Sequence
  Synthetic oligonucleotide; CAG chr11 5272167 5272186 5272183 +
ttaagatccaagtagtgatg

SEQ ID NO: 13918 - DNA, 20 bp, Artificial Sequence
  Synthetic oligonucleotide; TGG chr11 5272197 5272216 5272213 +
tgaattaaaaatatctgcaa

SEQ ID NO: 13919 - DNA, 20 bp, Artificial Sequence
  Synthetic oligonucleotide; GGG chr11 5272198 5272217 5272214 +
gaattaaaaatatctgcaat

SEQ ID NO: 13920 - DNA, 20 bp, Artificial Sequence
  Synthetic oligonucleotide; CAG chr11 5272202 5272221 5272218 +
taaaaatatctgcaatgggc

SEQ ID NO: 13921 - DNA, 20 bp, Artificial Sequence
  Synthetic oligonucleotide; AGG chr11 5272203 5272222 5272219 +
aaaaatatctgcaatgggcc

SEQ ID NO: 13922 - DNA, 20 bp, Artificial Sequence
  Synthetic oligonucleotide; TGG chr11 5272208 5272227 5272224 +
tatctgcaatgggccaggcg

SEQ ID NO: 13923 - DNA, 20 bp, Artificial Sequence
  Synthetic oligonucleotide; TGG chr11 5272211 5272230 5272227 +
ctgcaatgggccaggcgtgg

SEQ ID NO: 13924 - DNA, 20 bp, Artificial Sequence
  Synthetic oligonucleotide; CAG chr11 5272230 5272249 5272246 +
gtggctcacacctataatcc

SEQ ID NO: 13925 - DNA, 20 bp, Artificial Sequence
  Synthetic oligonucleotide; CAG chr11 5272238 5272257 5272254 +
cacctataatcccagcactt

SEQ ID NO: 13926 - DNA, 20 bp, Artificial Sequence
  Synthetic oligonucleotide; AGG chr11 5272239 5272258 5272255 +
acctataatcccagcacttc

SEQ ID NO: 13927 - DNA, 20 bp, Artificial Sequence
  Synthetic oligonucleotide; GAG chr11 5272241 5272260 5272257 +
ctataatcccagcacttcag

SEQ ID NO: 13928 - DNA, 20 bp, Artificial Sequence
  Synthetic oligonucleotide; AGG chr11 5272242 5272261 5272258 +
tataatcccagcacttcagg

SEQ ID NO: 13929 - DNA, 20 bp, Artificial Sequence
  Synthetic oligonucleotide; AAG chr11 5272247 5272266 5272263 +
tcccagcacttcaggaggcc

SEQ ID NO: 13930 - DNA, 20 bp, Artificial Sequence
  Synthetic oligonucleotide; AGG chr11 5272248 5272267 5272264 +
cccagcacttcaggaggcca

SEQ ID NO: 13931 - DNA, 20 bp, Artificial Sequence
  Synthetic oligonucleotide; CGG chr11 5272251 5272270 5272267 +
agcacttcaggaggccaagg

SEQ ID NO: 13932 - DNA, 20 bp, Artificial Sequence
  Synthetic oligonucleotide; GGG chr11 5272252 5272271 5272268 +
gcacttcaggaggccaaggc

SEQ ID NO: 13933 - DNA, 20 bp, Artificial Sequence
  Synthetic oligonucleotide; CAG chr11 5272255 5272274 5272271 +
cttcaggaggccaaggcggg

SEQ ID NO: 13934 - DNA, 20 bp, Artificial Sequence
  Synthetic oligonucleotide; GAG chr11 5272265 5272284 5272281 +
ccaaggcgggcagatcatct

SEQ ID NO: 13935 - DNA, 20 bp, Artificial Sequence
  Synthetic oligonucleotide; AGG chr11 5272266 5272285 5272282 +
caaggcgggcagatcatctg

SEQ ID NO: 13936 - DNA, 20 bp, Artificial Sequence
  Synthetic oligonucleotide; CAG chr11 5272270 5272289 5272286 +
gcgggcagatcatctgaggt

SEQ ID NO: 13937 - DNA, 20 bp, Artificial Sequence
  Synthetic oligonucleotide; AGG chr11 5272271 5272290 5272287 +
cgggcagatcatctgaggtc

SEQ ID NO: 13938 - DNA, 20 bp, Artificial Sequence
  Synthetic oligonucleotide; GAG chr11 5272273 5272292 5272289 +
ggcagatcatctgaggtcag

SEQ ID NO: 13939 - DNA, 20 bp, Artificial Sequence
  Synthetic oligonucleotide; AAG chr11 5272279 5272298 5272295 +
tcatctgaggtcaggagttc

SEQ ID NO: 13940 - DNA, 20 bp, Artificial Sequence
  Synthetic oligonucleotide; CAG chr11 5272284 5272303 5272300 +
tgaggtcaggagttcaagac

SEQ ID NO: 13941 - DNA, 20 bp, Artificial Sequence
  Synthetic oligonucleotide; TGG chr11 5272289 5272308 5272305 +
tcaggagttcaagaccagcc

SEQ ID NO: 13942 - DNA, 20 bp, Artificial Sequence
  Synthetic oligonucleotide; TGG chr11 5272298 5272317 5272314 +
caagaccagcctggccaaca

SEQ ID NO: 13943 - DNA, 20 bp, Artificial Sequence
  Synthetic oligonucleotide; TAG chr11 5272333 5272352 5272349 +
tctactaaaaatacaaaaat

SEQ ID NO: 13944 - DNA, 20 bp, Artificial Sequence
  Synthetic oligonucleotide; TGG chr11 5272338 5272357 5272354 +
taaaaatacaaaaattagac

SEQ ID NO: 13945 - DNA, 20 bp, Artificial Sequence
  Synthetic oligonucleotide; TGG chr11 5272343 5272362 5272359 +
atacaaaaattagactggca

SEQ ID NO: 13946 - DNA, 20 bp, Artificial Sequence
  Synthetic oligonucleotide; TGG chr11 5272346 5272365 5272362 +
caaaaattagactggcatgg

SEQ ID NO: 13947 - DNA, 20 bp, Artificial Sequence
  Synthetic oligonucleotide; CAG chr11 5272349 5272368 5272365 +
aaattagactggcatggtgg

SEQ ID NO: 13948 - DNA, 20 bp, Artificial Sequence
  Synthetic oligonucleotide; AGG chr11 5272350 5272369 5272366 +
aattagactggcatggtggc

SEQ ID NO: 13949 - DNA, 20 bp, Artificial Sequence
  Synthetic oligonucleotide; CAG chr11 5272366 5272385 5272382 +
tggcaggtgcctgtaatccc

SEQ ID NO: 13950 - DNA, 20 bp, Artificial Sequence
  Synthetic oligonucleotide; CAG chr11 5272374 5272393 5272390 +
gcctgtaatccccagctact

SEQ ID NO: 13951 - DNA, 20 bp, Artificial Sequence
  Synthetic oligonucleotide; AGG chr11 5272375 5272394 5272391 +
cctgtaatccccagctactc

SEQ ID NO: 13952 - DNA, 20 bp, Artificial Sequence
  Synthetic oligonucleotide; GAG chr11 5272377 5272396 5272393 +
tgtaatccccagctactcag

SEQ ID NO: 13953 - DNA, 20 bp, Artificial Sequence
  Synthetic oligonucleotide; AGG chr11 5272378 5272397 5272394 +
gtaatccccagctactcagg

SEQ ID NO: 13954 - DNA, 20 bp, Artificial Sequence
  Synthetic oligonucleotide; AAG chr11 5272383 5272402 5272399 +
ccccagctactcaggaggcc

SEQ ID NO: 13955 - DNA, 20 bp, Artificial Sequence
  Synthetic oligonucleotide; AGG chr11 5272384 5272403 5272400 +
cccagctactcaggaggcca

SEQ ID NO: 13956 - DNA, 20 bp, Artificial Sequence
  Synthetic oligonucleotide; CAG chr11 5272387 5272406 5272403 +
agctactcaggaggccaagg

SEQ ID NO: 13957 - DNA, 20 bp, Artificial Sequence
  Synthetic oligonucleotide; AGG chr11 5272388 5272407 5272404 +
gctactcaggaggccaaggc

SEQ ID NO: 13958 - DNA, 20 bp, Artificial Sequence
  Synthetic oligonucleotide; GAG chr11 5272390 5272409 5272406 +
tactcaggaggccaaggcag

SEQ ID NO: 13959 - DNA, 20 bp, Artificial Sequence
  Synthetic oligonucleotide; CAG chr11 5272406 5272425 5272422 +
gcaggagaattgcttgaatg

SEQ ID NO: 13960 - DNA, 20 bp, Artificial Sequence
  Synthetic oligonucleotide; AGG chr11 5272407 5272426 5272423 +
caggagaattgcttgaatgc

SEQ ID NO: 13961 - DNA, 20 bp, Artificial Sequence
  Synthetic oligonucleotide; AAG chr11 5272410 5272429 5272426 +
gagaattgcttgaatgcagg

SEQ ID NO: 13962 - DNA, 20 bp, Artificial Sequence
  Synthetic oligonucleotide; AGG chr11 5272411 5272430 5272427 +
agaattgcttgaatgcagga

SEQ ID NO: 13963 - DNA, 20 bp, Artificial Sequence
  Synthetic oligonucleotide; GGG chr11 5272412 5272431 5272428 +
gaattgcttgaatgcaggaa

SEQ ID NO: 13964 - DNA, 20 bp, Artificial Sequence
  Synthetic oligonucleotide; GGG chr11 5272413 5272432 5272429 +
aattgcttgaatgcaggaag

SEQ ID NO: 13965 - DNA, 20 bp, Artificial Sequence
  Synthetic oligonucleotide; GAG chr11 5272415 5272434 5272431 +
ttgcttgaatgcaggaaggg

SEQ ID NO: 13966 - DNA, 20 bp, Artificial Sequence
  Synthetic oligonucleotide; AGG chr11 5272416 5272435 5272432 +
tgcttgaatgcaggaagggg

SEQ ID NO: 13967 - DNA, 20 bp, Artificial Sequence
  Synthetic oligonucleotide; CAG chr11 5272422 5272441 5272438 +
aatgcaggaaggggaggttg

SEQ ID NO: 13968 - DNA, 20 bp, Artificial Sequence
  Synthetic oligonucleotide; GAG chr11 5272426 5272445 5272442 +
caggaaggggaggttgcagt

SEQ ID NO: 13969 - DNA, 20 bp, Artificial Sequence
  Synthetic oligonucleotide; CAG chr11 5272451 5272470 5272467 +
gaaatcatgccactgcactc

SEQ ID NO: 13970 - DNA, 20 bp, Artificial Sequence
  Synthetic oligonucleotide; TGG chr11 5272456 5272475 5272472 +
catgccactgcactccagcc

SEQ ID NO: 13971 - DNA, 20 bp, Artificial Sequence
  Synthetic oligonucleotide; GGG chr11 5272457 5272476 5272473 +
atgccactgcactccagcct

SEQ ID NO: 13972 - DNA, 20 bp, Artificial Sequence
  Synthetic oligonucleotide; AAG chr11 5272464 5272483 5272480 +
tgcactccagcctgggcaat

SEQ ID NO: 13973 - DNA, 20 bp, Artificial Sequence
  Synthetic oligonucleotide; GAG chr11 5272466 5272485 5272482 +
cactccagcctgggcaataa

SEQ ID NO: 13974 - DNA, 20 bp, Artificial Sequence
  Synthetic oligonucleotide; AAG chr11 5272502 5272521 5272518 +
caaacaaaaacaaaaacaaa

SEQ ID NO: 13975 - DNA, 20 bp, Artificial Sequence
  Synthetic oligonucleotide; TGG chr11 5272519 5272538 5272535 +
aaaaagatctgcaataccta

SEQ ID NO: 13976 - DNA, 20 bp, Artificial Sequence
  Synthetic oligonucleotide; TAG chr11 5272524 5272543 5272540 +
gatctgcaatacctatggtg

SEQ ID NO: 13977 - DNA, 20 bp, Artificial Sequence
  Synthetic oligonucleotide; TGG chr11 5272541 5272560 5272557 +
gtgtagtatgaaaatatctg

SEQ ID NO: 13978 - DNA, 20 bp, Artificial Sequence
  Synthetic oligonucleotide; TAG chr11 5272565 5272584 5272581 +
ttctctttataactatgcaa

SEQ ID NO: 13979 - DNA, 20 bp, Artificial Sequence
  Synthetic oligonucleotide; AGG chr11 5272566 5272585 5272582 +
tctctttataactatgcaat

SEQ ID NO: 13980 - DNA, 20 bp, Artificial Sequence
  Synthetic oligonucleotide; TAG chr11 5272586 5272605 5272602 +
aggtactgatgatgtcattc

SEQ ID NO: 13981 - DNA, 20 bp, Artificial Sequence
  Synthetic oligonucleotide; AAG chr11 5272606 5272625 5272622 +
tagtttgtcctttgcattca

SEQ ID NO: 13982 - DNA, 20 bp, Artificial Sequence
  Synthetic oligonucleotide; TAG chr11 5272609 5272628 5272625 +
tttgtcctttgcattcaaag

SEQ ID NO: 13983 - DNA, 20 bp, Artificial Sequence
  Synthetic oligonucleotide; AAG chr11 5272612 5272631 5272628 +
gtcctttgcattcaaagtag

SEQ ID NO: 13984 - DNA, 20 bp, Artificial Sequence
  Synthetic oligonucleotide; CAG chr11 5272629 5272648 5272645 +
tagaagaaaatgctaaattt

SEQ ID NO: 13985 - DNA, 20 bp, Artificial Sequence
  Synthetic oligonucleotide; AAG chr11 5272640 5272659 5272656 +
gctaaatttcagttacatgt

SEQ ID NO: 13986 - DNA, 20 bp, Artificial Sequence
  Synthetic oligonucleotide; CAG chr11 5272651 5272670 5272667 +
gttacatgtaagtaaaaata

SEQ ID NO: 13987 - DNA, 20 bp, Artificial Sequence
  Synthetic oligonucleotide; CAG chr11 5272676 5272695 5272692 +
tttttttctataaacttcac

SEQ ID NO: 13988 - DNA, 20 bp, Artificial Sequence
  Synthetic oligonucleotide; TAG chr11 5272684 5272703 5272700 +
tataaacttcaccagccccc

SEQ ID NO: 13989 - DNA, 20 bp, Artificial Sequence
  Synthetic oligonucleotide; TGG chr11 5272694 5272713 5272710 +
accagccccctagtgttctg

SEQ ID NO: 13990 - DNA, 20 bp, Artificial Sequence
  Synthetic oligonucleotide; CAG chr11 5272701 5272720 5272717 +
ccctagtgttctgtggaccc

SEQ ID NO: 13991 - DNA, 20 bp, Artificial Sequence
  Synthetic oligonucleotide; AAG chr11 5272707 5272726 5272723 +
tgttctgtggaccccagatt

SEQ ID NO: 13992 - DNA, 20 bp, Artificial Sequence
  Synthetic oligonucleotide; TGG chr11 5272716 5272735 5272732 +
gaccccagattaagacttcc

SEQ ID NO: 13993 - DNA, 20 bp, Artificial Sequence
  Synthetic oligonucleotide; GGG chr11 5272717 5272736 5272733 +
accccagattaagacttcct

SEQ ID NO: 13994 - DNA, 20 bp, Artificial Sequence
  Synthetic oligonucleotide; TAG chr11 5272730 5272749 5272746 +
acttcctgggacaaaatata

SEQ ID NO: 13995 - DNA, 20 bp, Artificial Sequence
  Synthetic oligonucleotide; TAG chr11 5272735 5272754 5272751 +
ctgggacaaaatatatagcc

SEQ ID NO: 13996 - DNA, 20 bp, Artificial Sequence
  Synthetic oligonucleotide; AGG chr11 5272736 5272755 5272752 +
tgggacaaaatatatagcct

SEQ ID NO: 13997 - DNA, 20 bp, Artificial Sequence
  Synthetic oligonucleotide; AAG chr11 5272739 5272758 5272755 +
gacaaaatatatagcctagg

SEQ ID NO: 13998 - DNA, 20 bp, Artificial Sequence
  Synthetic oligonucleotide; AAG chr11 5272744 5272763 5272760 +
aatatatagcctaggaagac

SEQ ID NO: 13999 - DNA, 20 bp, Artificial Sequence
  Synthetic oligonucleotide; TAG chr11 5272751 5272770 5272767 +
agcctaggaagacaagatcc

SEQ ID NO: 14000 - DNA, 20 bp, Artificial Sequence
  Synthetic oligonucleotide; AGG chr11 5272752 5272771 5272768 +
gcctaggaagacaagatcct

SEQ ID NO: 14001 - DNA, 20 bp, Artificial Sequence
  Synthetic oligonucleotide; TGG chr11 5272757 5272776 5272773 +
ggaagacaagatcctaggtt

SEQ ID NO: 14002 - DNA, 20 bp, Artificial Sequence
  Synthetic oligonucleotide; AAG chr11 5272761 5272780 5272777 +
gacaagatcctaggtttgga

SEQ ID NO: 14003 - DNA, 20 bp, Artificial Sequence
  Synthetic oligonucleotide; AAG chr11 5272788 5272807 5272804 +
tatttgatccactgaaataa

SEQ ID NO: 14004 - DNA, 20 bp, Artificial Sequence
  Synthetic oligonucleotide; TAG chr11 5272800 5272819 5272816 +
tgaaataaaagaacaatgac

SEQ ID NO: 14005 - DNA, 20 bp, Artificial Sequence
  Synthetic oligonucleotide; AAG chr11 5272808 5272827 5272824 +
aagaacaatgactagacaaa

SEQ ID NO: 14006 - DNA, 20 bp, Artificial Sequence
  Synthetic oligonucleotide; CAG chr11 5272811 5272830 5272827 +
aacaatgactagacaaaaag

SEQ ID NO: 14007 - DNA, 20 bp, Artificial Sequence
  Synthetic oligonucleotide; CAG chr11 5272816 5272835 5272832 +
tgactagacaaaaagcagct

SEQ ID NO: 14008 - DNA, 20 bp, Artificial Sequence
  Synthetic oligonucleotide; TAG chr11 5272826 5272845 5272842 +
aaaagcagctcagctgcttg

SEQ ID NO: 14009 - DNA, 20 bp, Artificial Sequence
  Synthetic oligonucleotide; AAG chr11 5272837 5272856 5272853 +
agctgcttgtagcttgaacc

SEQ ID NO: 14010 - DNA, 20 bp, Artificial Sequence
  Synthetic oligonucleotide; GAG chr11 5272842 5272861 5272858 +
cttgtagcttgaaccaagct

SEQ ID NO: 14011 - DNA, 20 bp, Artificial Sequence
  Synthetic oligonucleotide; TGG chr11 5272847 5272866 5272863 +
agcttgaaccaagctgagct

SEQ ID NO: 14012 - DNA, 20 bp, Artificial Sequence
  Synthetic oligonucleotide; CAG chr11 5272855 5272874 5272871 +
ccaagctgagcttggctact

SEQ ID NO: 14013 - DNA, 20 bp, Artificial Sequence
  Synthetic oligonucleotide; GAG chr11 5272857 5272876 5272873 +
aagctgagcttggctactca

SEQ ID NO: 14014 - DNA, 20 bp, Artificial Sequence
  Synthetic oligonucleotide; AAG chr11 5272860 5272879 5272876 +
ctgagcttggctactcagag

SEQ ID NO: 14015 - DNA, 20 bp, Artificial Sequence
  Synthetic oligonucleotide; CAG chr11 5272865 5272884 5272881 +
cttggctactcagagaagaa

SEQ ID NO: 14016 - DNA, 20 bp, Artificial Sequence
  Synthetic oligonucleotide; GAG chr11 5272873 5272892 5272889 +
ctcagagaagaacagtcgtt

SEQ ID NO: 14017 - DNA, 20 bp, Artificial Sequence
  Synthetic oligonucleotide; AAG chr11 5272901 5272920 5272917 +
ataattttttttaaccaatt

SEQ ID NO: 14018 - DNA, 20 bp, Artificial Sequence
  Synthetic oligonucleotide; CAG chr11 5272907 5272926 5272923 +
ttttttaaccaattaagata

SEQ ID NO: 14019 - DNA, 20 bp, Artificial Sequence
  Synthetic oligonucleotide; TGG chr11 5272913 5272932 5272929 +
aaccaattaagatacagctc

SEQ ID NO: 14020 - DNA, 20 bp, Artificial Sequence
  Synthetic oligonucleotide; GGG chr11 5272914 5272933 5272930 +
accaattaagatacagctct

SEQ ID NO: 14021 - DNA, 20 bp, Artificial Sequence
  Synthetic oligonucleotide; CAG chr11 5272921 5272940 5272937 +
aagatacagctctgggtttt

SEQ ID NO: 14022 - DNA, 20 bp, Artificial Sequence
  Synthetic oligonucleotide; AGG chr11 5272922 5272941 5272938 +
agatacagctctgggttttc

SEQ ID NO: 14023 - DNA, 20 bp, Artificial Sequence
  Synthetic oligonucleotide; GGG chr11 5272923 5272942 5272939 +
gatacagctctgggttttca

SEQ ID NO: 14024 - DNA, 20 bp, Artificial Sequence
  Synthetic oligonucleotide; GGG chr11 5272924 5272943 5272940 +
atacagctctgggttttcag

SEQ ID NO: 14025 - DNA, 20 bp, Artificial Sequence
  Synthetic oligonucleotide; GGG chr11 5272925 5272944 5272941 +
tacagctctgggttttcagg

SEQ ID NO: 14026 - DNA, 20 bp, Artificial Sequence
  Synthetic oligonucleotide; CAG chr11 5272937 5272956 5272953 +
ttttcagggggaatttgcta

SEQ ID NO: 14027 - DNA, 20 bp, Artificial Sequence
  Synthetic oligonucleotide; CAG chr11 5272945 5272964 5272961 +
gggaatttgctacagatcca

SEQ ID NO: 14028 - DNA, 20 bp, Artificial Sequence
  Synthetic oligonucleotide; AAG chr11 5272952 5272971 5272968 +
tgctacagatccacagtatg

SEQ ID NO: 14029 - DNA, 20 bp, Artificial Sequence
  Synthetic oligonucleotide; AGG chr11 5272953 5272972 5272969 +
gctacagatccacagtatga

SEQ ID NO: 14030 - DNA, 20 bp, Artificial Sequence
  Synthetic oligonucleotide; CAG chr11 5272956 5272975 5272972 +
acagatccacagtatgaagg

SEQ ID NO: 14031 - DNA, 20 bp, Artificial Sequence
  Synthetic oligonucleotide; TGG chr11 5272959 5272978 5272975 +
gatccacagtatgaaggcag

SEQ ID NO: 14032 - DNA, 20 bp, Artificial Sequence
  Synthetic oligonucleotide; CAG chr11 5272970 5272989 5272986 +
tgaaggcagtggcccttcct

SEQ ID NO: 14033 - DNA, 20 bp, Artificial Sequence
  Synthetic oligonucleotide; GAG chr11 5272984 5273003 5273000 +
cttcctcagaacttgaatgt

SEQ ID NO: 14034 - DNA, 20 bp, Artificial Sequence
  Synthetic oligonucleotide; AGG chr11 5272985 5273004 5273001 +
ttcctcagaacttgaatgtg

SEQ ID NO: 14035 - DNA, 20 bp, Artificial Sequence
  Synthetic oligonucleotide; GGG chr11 5272986 5273005 5273002 +
tcctcagaacttgaatgtga

SEQ ID NO: 14036 - DNA, 20 bp, Artificial Sequence
  Synthetic oligonucleotide; CAG chr11 5272990 5273009 5273006 +
cagaacttgaatgtgagggt

SEQ ID NO: 14037 - DNA, 20 bp, Artificial Sequence
  Synthetic oligonucleotide; AAG chr11 5273002 5273021 5273018 +
gtgagggtcagacattgcca

SEQ ID NO: 14038 - DNA, 20 bp, Artificial Sequence
  Synthetic oligonucleotide; AAG chr11 5273008 5273027 5273024 +
gtcagacattgccaaagtcc

SEQ ID NO: 14039 - DNA, 20 bp, Artificial Sequence
  Synthetic oligonucleotide; AGG chr11 5273009 5273028 5273025 +
tcagacattgccaaagtcca

SEQ ID NO: 14040 - DNA, 20 bp, Artificial Sequence
  Synthetic oligonucleotide; AAG chr11 5273015 5273034 5273031 +
attgccaaagtccaaggaat

SEQ ID NO: 14041 - DNA, 20 bp, Artificial Sequence
  Synthetic oligonucleotide; AGG chr11 5273016 5273035 5273032 +
ttgccaaagtccaaggaata

SEQ ID NO: 14042 - DNA, 20 bp, Artificial Sequence
  Synthetic oligonucleotide; CAG chr11 5273021 5273040 5273037 +
aaagtccaaggaataaggac

SEQ ID NO: 14043 - DNA, 20 bp, Artificial Sequence
  Synthetic oligonucleotide; AGG chr11 5273022 5273041 5273038 +
aagtccaaggaataaggacc

SEQ ID NO: 14044 - DNA, 20 bp, Artificial Sequence
  Synthetic oligonucleotide; AAG chr11 5273031 5273050 5273047 +
gaataaggaccaggtatctc

SEQ ID NO: 14045 - DNA, 20 bp, Artificial Sequence
  Synthetic oligonucleotide; AGG chr11 5273032 5273051 5273048 +
aataaggaccaggtatctca

SEQ ID NO: 14046 - DNA, 20 bp, Artificial Sequence
  Synthetic oligonucleotide; AAG chr11 5273037 5273056 5273053 +
ggaccaggtatctcaaggcc

SEQ ID NO: 14047 - DNA, 20 bp, Artificial Sequence
  Synthetic oligonucleotide; GAG chr11 5273039 5273058 5273055 +
accaggtatctcaaggccaa

SEQ ID NO: 14048 - DNA, 20 bp, Artificial Sequence
  Synthetic oligonucleotide; TGG chr11 5273044 5273063 5273060 +
gtatctcaaggccaagagtt

SEQ ID NO: 14049 - DNA, 20 bp, Artificial Sequence
  Synthetic oligonucleotide; GAG chr11 5273046 5273065 5273062 +
atctcaaggccaagagtttg

SEQ ID NO: 14050 - DNA, 20 bp, Artificial Sequence
  Synthetic oligonucleotide; CAG chr11 5273051 5273070 5273067 +
aaggccaagagtttggagaa

SEQ ID NO: 14051 - DNA, 20 bp, Artificial Sequence
  Synthetic oligonucleotide; AGG chr11 5273052 5273071 5273068 +
aggccaagagtttggagaac

SEQ ID NO: 14052 - DNA, 20 bp, Artificial Sequence
  Synthetic oligonucleotide; AAG chr11 5273069 5273088 5273085 +
aacaggtttctccctaaaac

SEQ ID NO: 14053 - DNA, 20 bp, Artificial Sequence
  Synthetic oligonucleotide; TGG chr11 5273077 5273096 5273093 +
tctccctaaaacaagcccta

SEQ ID NO: 14054 - DNA, 20 bp, Artificial Sequence
  Synthetic oligonucleotide; GGG chr11 5273078 5273097 5273094 +
ctccctaaaacaagccctat

SEQ ID NO: 14055 - DNA, 20 bp, Artificial Sequence
  Synthetic oligonucleotide; CAG chr11 5273103 5273122 5273119 +
atcccatcattcttcccatt

SEQ ID NO: 14056 - DNA, 20 bp, Artificial Sequence
  Synthetic oligonucleotide; GAG chr11 5273105 5273124 5273121 +
cccatcattcttcccattca

SEQ ID NO: 14057 - DNA, 20 bp, Artificial Sequence
  Synthetic oligonucleotide; TGG chr11 5273110 5273129 5273126 +
cattcttcccattcagagta

SEQ ID NO: 14058 - DNA, 20 bp, Artificial Sequence
  Synthetic oligonucleotide; CAG chr11 5273117 5273136 5273133 +
cccattcagagtatggacac

SEQ ID NO: 14059 - DNA, 20 bp, Artificial Sequence
  Synthetic oligonucleotide; TAG chr11 5273128 5273147 5273144 +
tatggacaccagtcttctct

SEQ ID NO: 14060 - DNA, 20 bp, Artificial Sequence
  Synthetic oligonucleotide; CAG chr11 5273134 5273153 5273150 +
caccagtcttctcttagatt

SEQ ID NO: 14061 - DNA, 20 bp, Artificial Sequence
  Synthetic oligonucleotide; GAG chr11 5273136 5273155 5273152 +
ccagtcttctcttagattca

SEQ ID NO: 14062 - DNA, 20 bp, Artificial Sequence
  Synthetic oligonucleotide; TGG chr11 5273141 5273160 5273157 +
cttctcttagattcagagta

SEQ ID NO: 14063 - DNA, 20 bp, Artificial Sequence
  Synthetic oligonucleotide; GGG chr11 5273142 5273161 5273158 +
ttctcttagattcagagtat

SEQ ID NO: 14064 - DNA, 20 bp, Artificial Sequence
  Synthetic oligonucleotide; GGG chr11 5273143 5273162 5273159 +
tctcttagattcagagtatg

SEQ ID NO: 14065 - DNA, 20 bp, Artificial Sequence
  Synthetic oligonucleotide; CGG chr11 5273166 5273185 5273182 +
ttgatcctctcctgctccct

SEQ ID NO: 14066 - DNA, 20 bp, Artificial Sequence
  Synthetic oligonucleotide; GAG chr11 5273168 5273187 5273184 +
gatcctctcctgctccctcg

SEQ ID NO: 14067 - DNA, 20 bp, Artificial Sequence
  Synthetic oligonucleotide; CAG chr11 5273172 5273191 5273188 +
ctctcctgctccctcggagc

SEQ ID NO: 14068 - DNA, 20 bp, Artificial Sequence
  Synthetic oligonucleotide; CAG chr11 5273178 5273197 5273194 +
tgctccctcggagccagttg

SEQ ID NO: 14069 - DNA, 20 bp, Artificial Sequence
  Synthetic oligonucleotide; GAG chr11 5273180 5273199 5273196 +
ctccctcggagccagttgca

SEQ ID NO: 14070 - DNA, 20 bp, Artificial Sequence
  Synthetic oligonucleotide; TGG chr11 5273212 5273231 5273228 +
tcttctctccttactgccta

SEQ ID NO: 14071 - DNA, 20 bp, Artificial Sequence
  Synthetic oligonucleotide; CAG chr11 5273218 5273237 5273234 +
ctccttactgcctatggttc

SEQ ID NO: 14072 - DNA, 20 bp, Artificial Sequence
  Synthetic oligonucleotide; TGG chr11 5273224 5273243 5273240 +
actgcctatggttccagacc

SEQ ID NO: 14073 - DNA, 20 bp, Artificial Sequence
  Synthetic oligonucleotide; CAG chr11 5273235 5273254 5273251 +
ttccagacctggcttgcatc

SEQ ID NO: 14074 - DNA, 20 bp, Artificial Sequence
  Synthetic oligonucleotide; AGG chr11 5273236 5273255 5273252 +
tccagacctggcttgcatcc

SEQ ID NO: 14075 - DNA, 20 bp, Artificial Sequence
  Synthetic oligonucleotide; GGG chr11 5273237 5273256 5273253 +
ccagacctggcttgcatcca

SEQ ID NO: 14076 - DNA, 20 bp, Artificial Sequence
  Synthetic oligonucleotide; TGG chr11 5273265 5273284 5273281 +
acccattccatgtttcctta

SEQ ID NO: 14077 - DNA, 20 bp, Artificial Sequence
  Synthetic oligonucleotide; AAG chr11 5273271 5273290 5273287 +
tccatgtttccttatggcta

SEQ ID NO: 14078 - DNA, 20 bp, Artificial Sequence
  Synthetic oligonucleotide; AGG chr11 5273272 5273291 5273288 +
ccatgtttccttatggctaa

SEQ ID NO: 14079 - DNA, 20 bp, Artificial Sequence
  Synthetic oligonucleotide; TGG chr11 5273275 5273294 5273291 +
tgtttccttatggctaaagg

SEQ ID NO: 14080 - DNA, 20 bp, Artificial Sequence
  Synthetic oligonucleotide; TAG chr11 5273278 5273297 5273294 +
ttccttatggctaaaggtgg

SEQ ID NO: 14081 - DNA, 20 bp, Artificial Sequence
  Synthetic oligonucleotide; AGG chr11 5273279 5273298 5273295 +
tccttatggctaaaggtggt

SEQ ID NO: 14082 - DNA, 20 bp, Artificial Sequence
  Synthetic oligonucleotide; GGG chr11 5273280 5273299 5273296 +
ccttatggctaaaggtggta

SEQ ID NO: 14083 - DNA, 20 bp, Artificial Sequence
  Synthetic oligonucleotide; GAG chr11 5273282 5273301 5273298 +
ttatggctaaaggtggtagg

SEQ ID NO: 14084 - DNA, 20 bp, Artificial Sequence
  Synthetic oligonucleotide; AGG chr11 5273283 5273302 5273299 +
tatggctaaaggtggtaggg

SEQ ID NO: 14085 - DNA, 20 bp, Artificial Sequence
  Synthetic oligonucleotide; GAG chr11 5273285 5273304 5273301 +
tggctaaaggtggtagggag

SEQ ID NO: 14086 - DNA, 20 bp, Artificial Sequence
  Synthetic oligonucleotide; AAG chr11 5273292 5273311 5273308 +
aggtggtagggaggagcttc

SEQ ID NO: 14087 - DNA, 20 bp, Artificial Sequence
  Synthetic oligonucleotide; AAG chr11 5273296 5273315 5273312 +
ggtagggaggagcttcaaga

SEQ ID NO: 14088 - DNA, 20 bp, Artificial Sequence
  Synthetic oligonucleotide; AGG chr11 5273297 5273316 5273313 +
gtagggaggagcttcaagaa

SEQ ID NO: 14089 - DNA, 20 bp, Artificial Sequence
  Synthetic oligonucleotide; TAG chr11 5273303 5273322 5273319 +
aggagcttcaagaaaggtta

SEQ ID NO: 14090 - DNA, 20 bp, Artificial Sequence
  Synthetic oligonucleotide; AAG chr11 5273312 5273331 5273328 +
aagaaaggttatagcattga

SEQ ID NO: 14091 - DNA, 20 bp, Artificial Sequence
  Synthetic oligonucleotide; AGG chr11 5273313 5273332 5273329 +
agaaaggttatagcattgaa

SEQ ID NO: 14092 - DNA, 20 bp, Artificial Sequence
  Synthetic oligonucleotide; CAG chr11 5273318 5273337 5273334 +
ggttatagcattgaaaggcc

SEQ ID NO: 14093 - DNA, 20 bp, Artificial Sequence
  Synthetic oligonucleotide; AGG chr11 5273319 5273338 5273335 +
gttatagcattgaaaggccc

SEQ ID NO: 14094 - DNA, 20 bp, Artificial Sequence
  Synthetic oligonucleotide; CAG chr11 5273331 5273350 5273347 +
aaaggcccaggtttgtgtct

SEQ ID NO: 14095 - DNA, 20 bp, Artificial Sequence
  Synthetic oligonucleotide; AAG chr11 5273338 5273357 5273354 +
caggtttgtgtctcagtaac

SEQ ID NO: 14096 - DNA, 20 bp, Artificial Sequence
  Synthetic oligonucleotide; AGG chr11 5273339 5273358 5273355 +
aggtttgtgtctcagtaaca

SEQ ID NO: 14097 - DNA, 20 bp, Artificial Sequence
  Synthetic oligonucleotide; CAG chr11 5273358 5273377 5273374 +
aaggcttataaatcctgact

SEQ ID NO: 14098 - DNA, 20 bp, Artificial Sequence
  Synthetic oligonucleotide; AAG chr11 5273361 5273380 5273377 +
gcttataaatcctgactcag

SEQ ID NO: 14099 - DNA, 20 bp, Artificial Sequence
  Synthetic oligonucleotide; CAG chr11 5273365 5273384 5273381 +
ataaatcctgactcagaagt

SEQ ID NO: 14100 - DNA, 20 bp, Artificial Sequence
  Synthetic oligonucleotide; AGG chr11 5273366 5273385 5273382 +
taaatcctgactcagaagtc

SEQ ID NO: 14101 - DNA, 20 bp, Artificial Sequence
  Synthetic oligonucleotide; TAG chr11 5273369 5273388 5273385 +
atcctgactcagaagtcagg

SEQ ID NO: 14102 - DNA, 20 bp, Artificial Sequence
  Synthetic oligonucleotide; AGG chr11 5273370 5273389 5273386 +
tcctgactcagaagtcaggt

SEQ ID NO: 14103 - DNA, 20 bp, Artificial Sequence
  Synthetic oligonucleotide; CGG chr11 5273376 5273395 5273392 +
ctcagaagtcaggtaggctg

SEQ ID NO: 14104 - DNA, 20 bp, Artificial Sequence
  Synthetic oligonucleotide; GGG chr11 5273377 5273396 5273393 +
tcagaagtcaggtaggctgc

SEQ ID NO: 14105 - DNA, 20 bp, Artificial Sequence
  Synthetic oligonucleotide; CAG chr11 5273380 5273399 5273396 +
gaagtcaggtaggctgcggg

SEQ ID NO: 14106 - DNA, 20 bp, Artificial Sequence
  Synthetic oligonucleotide; TGG chr11 5273407 5273426 5273423 +
attattgcttcgatgcttgt

SEQ ID NO: 14107 - DNA, 20 bp, Artificial Sequence
  Synthetic oligonucleotide; AAG chr11 5273413 5273432 5273429 +
gcttcgatgcttgttggttc

SEQ ID NO: 14108 - DNA, 20 bp, Artificial Sequence
  Synthetic oligonucleotide; AAG chr11 5273442 5273461 5273458 +
tgcttcacctgctcattttt

SEQ ID NO: 14109 - DNA, 20 bp, Artificial Sequence
  Synthetic oligonucleotide; GAG chr11 5273466 5273485 5273482 +
attttatttgtttatcatat

SEQ ID NO: 14110 - DNA, 20 bp, Artificial Sequence
  Synthetic oligonucleotide; TGG chr11 5273482 5273501 5273498 +
atatgagataccatgaaaaa

SEQ ID NO: 14111 - DNA, 20 bp, Artificial Sequence
  Synthetic oligonucleotide; AAG chr11 5273511 5273530 5273527 +
gcttttctttcctatattaa

SEQ ID NO: 14112 - DNA, 20 bp, Artificial Sequence
  Synthetic oligonucleotide; AAG chr11 5273518 5273537 5273534 +
tttcctatattaaaagccca

SEQ ID NO: 14113 - DNA, 20 bp, Artificial Sequence
  Synthetic oligonucleotide; CAG chr11 5273523 5273542 5273539 +
tatattaaaagcccaaagtt

SEQ ID NO: 14114 - DNA, 20 bp, Artificial Sequence
  Synthetic oligonucleotide; GAG chr11 5273525 5273544 5273541 +
tattaaaagcccaaagttca

SEQ ID NO: 14115 - DNA, 20 bp, Artificial Sequence
  Synthetic oligonucleotide; GAG chr11 5273527 5273546 5273543 +
ttaaaagcccaaagttcaga

SEQ ID NO: 14116 - DNA, 20 bp, Artificial Sequence
  Synthetic oligonucleotide; AAG chr11 5273532 5273551 5273548 +
agcccaaagttcagagagat

SEQ ID NO: 14117 - DNA, 20 bp, Artificial Sequence
  Synthetic oligonucleotide; TGG chr11 5273540 5273559 5273556 +
gttcagagagataagtgtta

SEQ ID NO: 14118 - DNA, 20 bp, Artificial Sequence
  Synthetic oligonucleotide; CAG chr11 5273548 5273567 5273564 +
agataagtgttatggccatc

SEQ ID NO: 14119 - DNA, 20 bp, Artificial Sequence
  Synthetic oligonucleotide; AGG chr11 5273549 5273568 5273565 +
gataagtgttatggccatcc

SEQ ID NO: 14120 - DNA, 20 bp, Artificial Sequence
  Synthetic oligonucleotide; TAG chr11 5273553 5273572 5273569 +
agtgttatggccatccagga

SEQ ID NO: 14121 - DNA, 20 bp, Artificial Sequence
  Synthetic oligonucleotide; CAG chr11 5273558 5273577 5273574 +
tatggccatccaggatagat

SEQ ID NO: 14122 - DNA, 20 bp, Artificial Sequence
  Synthetic oligonucleotide; AAG chr11 5273562 5273581 5273578 +
gccatccaggatagatcaga

SEQ ID NO: 14123 - DNA, 20 bp, Artificial Sequence
  Synthetic oligonucleotide; TAG chr11 5273567 5273586 5273583 +
ccaggatagatcagaaagat

SEQ ID NO: 14124 - DNA, 20 bp, Artificial Sequence
  Synthetic oligonucleotide; CAG chr11 5273571 5273590 5273587 +
gatagatcagaaagattaga

SEQ ID NO: 14125 - DNA, 20 bp, Artificial Sequence
  Synthetic oligonucleotide; CAG chr11 5273575 5273594 5273591 +
gatcagaaagattagacagt

SEQ ID NO: 14126 - DNA, 20 bp, Artificial Sequence
  Synthetic oligonucleotide; AAG chr11 5273581 5273600 5273597 +
aaagattagacagtcagaaa

SEQ ID NO: 14127 - DNA, 20 bp, Artificial Sequence
  Synthetic oligonucleotide; CAG chr11 5273588 5273607 5273604 +
agacagtcagaaaaagtaat

SEQ ID NO: 14128 - DNA, 20 bp, Artificial Sequence
  Synthetic oligonucleotide; AAG chr11 5273592 5273611 5273608 +
agtcagaaaaagtaatcagt

SEQ ID NO: 14129 - DNA, 20 bp, Artificial Sequence
  Synthetic oligonucleotide; TAG chr11 5273626 5273645 5273642 +
attgtctatataattaaaat

SEQ ID NO: 14130 - DNA, 20 bp, Artificial Sequence
  Synthetic oligonucleotide; AAG chr11 5273653 5273672 5273669 +
ataaaatctatgtatgtctt

SEQ ID NO: 14131 - DNA, 20 bp, Artificial Sequence
  Synthetic oligonucleotide; AAG chr11 5273662 5273681 5273678 +
atgtatgtcttaagacattt

SEQ ID NO: 14132 - DNA, 20 bp, Artificial Sequence
  Synthetic oligonucleotide; AAG chr11 5273669 5273688 5273685 +
tcttaagacatttaagtata

SEQ ID NO: 14133 - DNA, 20 bp, Artificial Sequence
  Synthetic oligonucleotide; AGG chr11 5273670 5273689 5273686 +
cttaagacatttaagtataa

SEQ ID NO: 14134 - DNA, 20 bp, Artificial Sequence
  Synthetic oligonucleotide; TAG chr11 5273678 5273697 5273694 +
atttaagtataaaggacttt

SEQ ID NO: 14135 - DNA, 20 bp, Artificial Sequence
  Synthetic oligonucleotide; AAG chr11 5273682 5273701 5273698 +
aagtataaaggacttttaga

SEQ ID NO: 14136 - DNA, 20 bp, Artificial Sequence
  Synthetic oligonucleotide; AAG chr11 5273703 5273722 5273719 +
agaaacacccaaattcgatg

SEQ ID NO: 14137 - DNA, 20 bp, Artificial Sequence
  Synthetic oligonucleotide; TGG chr11 5273723 5273742 5273739 +
aagattaattcctgcctgtt

SEQ ID NO: 14138 - DNA, 20 bp, Artificial Sequence
  Synthetic oligonucleotide; GGG chr11 5273724 5273743 5273740 +
agattaattcctgcctgttt

SEQ ID NO: 14139 - DNA, 20 bp, Artificial Sequence
  Synthetic oligonucleotide; TAG chr11 5273734 5273753 5273750 +
ctgcctgtttgggtttgctt

SEQ ID NO: 14140 - DNA, 20 bp, Artificial Sequence
  Synthetic oligonucleotide; AAG chr11 5273752 5273771 5273768 +
tttagcatttgtaatttctt

SEQ ID NO: 14141 - DNA, 20 bp, Artificial Sequence
  Synthetic oligonucleotide; CAG chr11 5273762 5273781 5273778 +
gtaatttcttaagttctatg

SEQ ID NO: 14142 - DNA, 20 bp, Artificial Sequence
  Synthetic oligonucleotide; AGG chr11 5273763 5273782 5273779 +
taatttcttaagttctatgc

SEQ ID NO: 14143 - DNA, 20 bp, Artificial Sequence
  Synthetic oligonucleotide; AAG chr11 5273780 5273799 5273796 +
tgcaggattctaaaaactgt

SEQ ID NO: 14144 - DNA, 20 bp, Artificial Sequence
  Synthetic oligonucleotide; AAG chr11 5273798 5273817 5273814 +
gtaagatgcctaatttaaac

SEQ ID NO: 14145 - DNA, 20 bp, Artificial Sequence
  Synthetic oligonucleotide; AGG chr11 5273799 5273818 5273815 +
taagatgcctaatttaaaca

SEQ ID NO: 14146 - DNA, 20 bp, Artificial Sequence
  Synthetic oligonucleotide; TGG chr11 5273830 5273849 5273846 +
aatattttcttaaatctttc

SEQ ID NO: 14147 - DNA, 20 bp, Artificial Sequence
  Synthetic oligonucleotide; AAG chr11 5273859 5273878 5273875 +
tatgacatatgtttaacctg

SEQ ID NO: 14148 - DNA, 20 bp, Artificial Sequence
  Synthetic oligonucleotide; GAG chr11 5273861 5273880 5273877 +
tgacatatgtttaacctgaa

SEQ ID NO: 14149 - DNA, 20 bp, Artificial Sequence
  Synthetic oligonucleotide; TAG chr11 5273883 5273902 5273899 +
gtcaaatattgtactgttct

SEQ ID NO: 14150 - DNA, 20 bp, Artificial Sequence
  Synthetic oligonucleotide; TAG chr11 5273893 5273912 5273909 +
gtactgttcttagatgctat

SEQ ID NO: 14151 - DNA, 20 bp, Artificial Sequence
  Synthetic oligonucleotide; TAG chr11 5273915 5273934 5273931 +
gtatgaaaaattatataaat

SEQ ID NO: 14152 - DNA, 20 bp, Artificial Sequence
  Synthetic oligonucleotide; AAG chr11 5273927 5273946 5273943 +
atataaattagattcttgtt

SEQ ID NO: 14153 - DNA, 20 bp, Artificial Sequence
  Synthetic oligonucleotide; AAG chr11 5273932 5273951 5273948 +
aattagattcttgttaagta

SEQ ID NO: 14154 - DNA, 20 bp, Artificial Sequence
  Synthetic oligonucleotide; TAG chr11 5273935 5273954 5273951 +
tagattcttgttaagtaaag

SEQ ID NO: 14155 - DNA, 20 bp, Artificial Sequence
  Synthetic oligonucleotide; AGG chr11 5273936 5273955 5273952 +
agattcttgttaagtaaagt

SEQ ID NO: 14156 - DNA, 20 bp, Artificial Sequence
  Synthetic oligonucleotide; TGG chr11 5273965 5273984 5273981 +
acttcactgaatgtttttca

SEQ ID NO: 14157 - DNA, 20 bp, Artificial Sequence
  Synthetic oligonucleotide; AAG chr11 5273976 5273995 5273992 +
tgtttttcatggtattatct

SEQ ID NO: 14158 - DNA, 20 bp, Artificial Sequence
  Synthetic oligonucleotide; TAG chr11 5274041 5274060 5274057 +
ctttatttttatttttaaaa

SEQ ID NO: 14159 - DNA, 20 bp, Artificial Sequence
  Synthetic oligonucleotide; AGG chr11 5274042 5274061 5274058 +
tttatttttatttttaaaat

SEQ ID NO: 14160 - DNA, 20 bp, Artificial Sequence
  Synthetic oligonucleotide; AAG chr11 5274057 5274076 5274073 +
aaaataggaaaaatataaac

SEQ ID NO: 14161 - DNA, 20 bp, Artificial Sequence
  Synthetic oligonucleotide; AGG chr11 5274058 5274077 5274074 +
aaataggaaaaatataaaca

SEQ ID NO: 14162 - DNA, 20 bp, Artificial Sequence
  Synthetic oligonucleotide; TAG chr11 5274076 5274095 5274092 +
caaggcttgtaaaccactga

SEQ ID NO: 14163 - DNA, 20 bp, Artificial Sequence
  Synthetic oligonucleotide; AGG chr11 5274077 5274096 5274093 +
aaggcttgtaaaccactgat

SEQ ID NO: 14164 - DNA, 20 bp, Artificial Sequence
  Synthetic oligonucleotide; AAG chr11 5274082 5274101 5274098 +
ttgtaaaccactgataggaa

SEQ ID NO: 14165 - DNA, 20 bp, Artificial Sequence
  Synthetic oligonucleotide; GAG chr11 5274084 5274103 5274100 +
gtaaaccactgataggaaaa

SEQ ID NO: 14166 - DNA, 20 bp, Artificial Sequence
  Synthetic oligonucleotide; TAG chr11 5274092 5274111 5274108 +
ctgataggaaaagagctgct

SEQ ID NO: 14167 - DNA, 20 bp, Artificial Sequence
  Synthetic oligonucleotide; AGG chr11 5274093 5274112 5274109 +
tgataggaaaagagctgctt

SEQ ID NO: 14168 - DNA, 20 bp, Artificial Sequence
  Synthetic oligonucleotide; TAG chr11 5274105 5274124 5274121 +
agctgcttaggattctaaat

SEQ ID NO: 14169 - DNA, 20 bp, Artificial Sequence
  Synthetic oligonucleotide; CAG chr11 5274109 5274128 5274125 +
gcttaggattctaaattagc

SEQ ID NO: 14170 - DNA, 20 bp, Artificial Sequence
  Synthetic oligonucleotide; CAG chr11 5274157 5274176 5274173 +
tgtatctaaatctatattct

SEQ ID NO: 14171 - DNA, 20 bp, Artificial Sequence
  Synthetic oligonucleotide; TAG chr11 5274168 5274187 5274184 +
ctatattctcagaacaaaaa

SEQ ID NO: 14172 - DNA, 20 bp, Artificial Sequence
  Synthetic oligonucleotide; AAG chr11 5274175 5274194 5274191 +
ctcagaacaaaaatagatgt

SEQ ID NO: 14173 - DNA, 20 bp, Artificial Sequence
  Synthetic oligonucleotide; TAG chr11 5274191 5274210 5274207 +
atgtaagcaaatgattctac

SEQ ID NO: 14174 - DNA, 20 bp, Artificial Sequence
  Synthetic oligonucleotide; TAG chr11 5274203 5274222 5274219 +
gattctactagattttgtgt

SEQ ID NO: 14175 - DNA, 20 bp, Artificial Sequence
  Synthetic oligonucleotide; CAG chr11 5274219 5274238 5274235 +
gtgttagattttgcattatc

SEQ ID NO: 14176 - DNA, 20 bp, Artificial Sequence
  Synthetic oligonucleotide; AGG chr11 5274220 5274239 5274236 +
tgttagattttgcattatcc

SEQ ID NO: 14177 - DNA, 20 bp, Artificial Sequence
  Synthetic oligonucleotide; TGG chr11 5274230 5274249 5274246 +
tgcattatccaggaatgact

SEQ ID NO: 14178 - DNA, 20 bp, Artificial Sequence
  Synthetic oligonucleotide; AAG chr11 5274240 5274259 5274256 +
aggaatgacttggatatcac

SEQ ID NO: 14179 - DNA, 20 bp, Artificial Sequence
  Synthetic oligonucleotide; TGG chr11 5274255 5274274 5274271 +
atcacaagtcataaattctg

SEQ ID NO: 14180 - DNA, 20 bp, Artificial Sequence
  Synthetic oligonucleotide; CAG chr11 5274266 5274285 5274282 +
taaattctgtggctgccttg

SEQ ID NO: 14181 - DNA, 20 bp, Artificial Sequence
  Synthetic oligonucleotide; AGG chr11 5274267 5274286 5274283 +
aaattctgtggctgccttgc

SEQ ID NO: 14182 - DNA, 20 bp, Artificial Sequence
  Synthetic oligonucleotide; AAG chr11 5274270 5274289 5274286 +
ttctgtggctgccttgcagg

SEQ ID NO: 14183 - DNA, 20 bp, Artificial Sequence
  Synthetic oligonucleotide; TGG chr11 5274277 5274296 5274293 +
gctgccttgcaggaagcctg

SEQ ID NO: 14184 - DNA, 20 bp, Artificial Sequence
  Synthetic oligonucleotide; TAG chr11 5274288 5274307 5274304 +
ggaagcctgtggctattttc

SEQ ID NO: 14185 - DNA, 20 bp, Artificial Sequence
  Synthetic oligonucleotide; AAG chr11 5274301 5274320 5274317 +
tattttctagtgtaattgta

SEQ ID NO: 14186 - DNA, 20 bp, Artificial Sequence
  Synthetic oligonucleotide; GAG chr11 5274307 5274326 5274323 +
ctagtgtaattgtaaagaat

SEQ ID NO: 14187 - DNA, 20 bp, Artificial Sequence
  Synthetic oligonucleotide; GAG chr11 5274309 5274328 5274325 +
agtgtaattgtaaagaatga

SEQ ID NO: 14188 - DNA, 20 bp, Artificial Sequence
  Synthetic oligonucleotide; TAG chr11 5274314 5274333 5274330 +
aattgtaaagaatgagagaa

SEQ ID NO: 14189 - DNA, 20 bp, Artificial Sequence
  Synthetic oligonucleotide; AAG chr11 5274325 5274344 5274341 +
atgagagaatagaccataac

SEQ ID NO: 14190 - DNA, 20 bp, Artificial Sequence
  Synthetic oligonucleotide; AAG chr11 5274367 5274386 5274383 +
ttgttttcaacttttatttt

SEQ ID NO: 14191 - DNA, 20 bp, Artificial Sequence
  Synthetic oligonucleotide; CAG chr11 5274372 5274391 5274388 +
ttcaacttttattttaagtt

SEQ ID NO: 14192 - DNA, 20 bp, Artificial Sequence
  Synthetic oligonucleotide; AGG chr11 5274373 5274392 5274389 +
tcaacttttattttaagttc

SEQ ID NO: 14193 - DNA, 20 bp, Artificial Sequence
  Synthetic oligonucleotide; GGG chr11 5274374 5274393 5274390 +
caacttttattttaagttca

SEQ ID NO: 14194 - DNA, 20 bp, Artificial Sequence
  Synthetic oligonucleotide; GGG chr11 5274375 5274394 5274391 +
aacttttattttaagttcag

SEQ ID NO: 14195 - DNA, 20 bp, Artificial Sequence
  Synthetic oligonucleotide; CAG chr11 5274386 5274405 5274402 +
taagttcaggggtacatgta

SEQ ID NO: 14196 - DNA, 20 bp, Artificial Sequence
  Synthetic oligonucleotide; AGG chr11 5274387 5274406 5274403 +
aagttcaggggtacatgtac

SEQ ID NO: 14197 - DNA, 20 bp, Artificial Sequence
  Synthetic oligonucleotide; CAG chr11 5274395 5274414 5274411 +
gggtacatgtacaggatgtg

SEQ ID NO: 14198 - DNA, 20 bp, Artificial Sequence
  Synthetic oligonucleotide; AGG chr11 5274396 5274415 5274412 +
ggtacatgtacaggatgtgc

SEQ ID NO: 14199 - DNA, 20 bp, Artificial Sequence
  Synthetic oligonucleotide; TAG chr11 5274408 5274427 5274424 +
ggatgtgcaggtttgttaca

SEQ ID NO: 14200 - DNA, 20 bp, Artificial Sequence
  Synthetic oligonucleotide; AAG chr11 5274424 5274443 5274440 +
tacatagataaatgaatgtc

SEQ ID NO: 14201 - DNA, 20 bp, Artificial Sequence
  Synthetic oligonucleotide; AGG chr11 5274425 5274444 5274441 +
acatagataaatgaatgtca

SEQ ID NO: 14202 - DNA, 20 bp, Artificial Sequence
  Synthetic oligonucleotide; GGG chr11 5274426 5274445 5274442 +
catagataaatgaatgtcaa

SEQ ID NO: 14203 - DNA, 20 bp, Artificial Sequence
  Synthetic oligonucleotide; GGG chr11 5274427 5274446 5274443 +
atagataaatgaatgtcaag

SEQ ID NO: 14204 - DNA, 20 bp, Artificial Sequence
  Synthetic oligonucleotide; GGG chr11 5274428 5274447 5274444 +
tagataaatgaatgtcaagg

SEQ ID NO: 14205 - DNA, 20 bp, Artificial Sequence
  Synthetic oligonucleotide; TAG chr11 5274440 5274459 5274456 +
tgtcaagggggtttgttgta

SEQ ID NO: 14206 - DNA, 20 bp, Artificial Sequence
  Synthetic oligonucleotide; CAG chr11 5274457 5274476 5274473 +
gtatagatgatctcatcact

SEQ ID NO: 14207 - DNA, 20 bp, Artificial Sequence
  Synthetic oligonucleotide; AGG chr11 5274458 5274477 5274474 +
tatagatgatctcatcactc

SEQ ID NO: 14208 - DNA, 20 bp, Artificial Sequence
  Synthetic oligonucleotide; TAG chr11 5274470 5274489 5274486 +
catcactcaggtattacgct

SEQ ID NO: 14209 - DNA, 20 bp, Artificial Sequence
  Synthetic oligonucleotide; TAG chr11 5274480 5274499 5274496 +
gtattacgcttagcatccat

SEQ ID NO: 14210 - DNA, 20 bp, Artificial Sequence
  Synthetic oligonucleotide; TAG chr11 5274527 5274546 5274543 +
tctcaccctccaccctctga

SEQ ID NO: 14211 - DNA, 20 bp, Artificial Sequence
  Synthetic oligonucleotide; AGG chr11 5274528 5274547 5274544 +
ctcaccctccaccctctgat

SEQ ID NO: 14212 - DNA, 20 bp, Artificial Sequence
  Synthetic oligonucleotide; CAG chr11 5274534 5274553 5274550 +
ctccaccctctgataggccc

SEQ ID NO: 14213 - DNA, 20 bp, Artificial Sequence
  Synthetic oligonucleotide; GAG chr11 5274557 5274576 5274573 +
tatgcgttgtttccctctat

SEQ ID NO: 14214 - DNA, 20 bp, Artificial Sequence
  Synthetic oligonucleotide; TAG chr11 5274579 5274598 5274595 +
gtccatgtgttctcatcatt

SEQ ID NO: 14215 - DNA, 20 bp, Artificial Sequence
  Synthetic oligonucleotide; TAG chr11 5274601 5274620 5274617 +
gcttctaactgttgctttcg

SEQ ID NO: 14216 - DNA, 20 bp, Artificial Sequence
  Synthetic oligonucleotide; AAG chr11 5274628 5274647 5274644 +
cctctgcctcatctctcacg

SEQ ID NO: 14217 - DNA, 20 bp, Artificial Sequence
  Synthetic oligonucleotide; CAG chr11 5274635 5274654 5274651 +
ctcatctctcacgaagtttg

SEQ ID NO: 14218 - DNA, 20 bp, Artificial Sequence
  Synthetic oligonucleotide; AGG chr11 5274636 5274655 5274652 +
tcatctctcacgaagtttgc

SEQ ID NO: 14219 - DNA, 20 bp, Artificial Sequence
  Synthetic oligonucleotide; GAG chr11 5274640 5274659 5274656 +
ctctcacgaagtttgcaggt

SEQ ID NO: 14220 - DNA, 20 bp, Artificial Sequence
  Synthetic oligonucleotide; GAG chr11 5274646 5274665 5274662 +
cgaagtttgcaggtgagttt

SEQ ID NO: 14221 - DNA, 20 bp, Artificial Sequence
  Synthetic oligonucleotide; CAG chr11 5274650 5274669 5274666 +
gtttgcaggtgagtttgagc

SEQ ID NO: 14222 - DNA, 20 bp, Artificial Sequence
  Synthetic oligonucleotide; AGG chr11 5274651 5274670 5274667 +
tttgcaggtgagtttgagcc

SEQ ID NO: 14223 - DNA, 20 bp, Artificial Sequence
  Synthetic oligonucleotide; GGG chr11 5274652 5274671 5274668 +
ttgcaggtgagtttgagcca

SEQ ID NO: 14224 - DNA, 20 bp, Artificial Sequence
  Synthetic oligonucleotide; GAG chr11 5274657 5274676 5274673 +
ggtgagtttgagccagggct

SEQ ID NO: 14225 - DNA, 20 bp, Artificial Sequence
  Synthetic oligonucleotide; AGG chr11 5274658 5274677 5274674 +
gtgagtttgagccagggctg

SEQ ID NO: 14226 - DNA, 20 bp, Artificial Sequence
  Synthetic oligonucleotide; AAG chr11 5274670 5274689 5274686 +
cagggctgaggctcattctc

SEQ ID NO: 14227 - DNA, 20 bp, Artificial Sequence
  Synthetic oligonucleotide; GAG chr11 5274672 5274691 5274688 +
gggctgaggctcattctcaa

SEQ ID NO: 14228 - DNA, 20 bp, Artificial Sequence
  Synthetic oligonucleotide; TGG chr11 5274688 5274707 5274704 +
tcaagagtaatctctctctc

SEQ ID NO: 14229 - DNA, 20 bp, Artificial Sequence
  Synthetic oligonucleotide; TGG chr11 5274696 5274715 5274712 +
aatctctctctctggcaact

SEQ ID NO: 14230 - DNA, 20 bp, Artificial Sequence
  Synthetic oligonucleotide; GAG chr11 5274698 5274717 5274714 +
tctctctctctggcaacttg

SEQ ID NO: 14231 - DNA, 20 bp, Artificial Sequence
  Synthetic oligonucleotide; CAG chr11 5274703 5274722 5274719 +
ctctctggcaacttggagca

SEQ ID NO: 14232 - DNA, 20 bp, Artificial Sequence
  Synthetic oligonucleotide; CGG chr11 5274729 5274748 5274745 +
tcctattgtgtgactgacct

SEQ ID NO: 14233 - DNA, 20 bp, Artificial Sequence
  Synthetic oligonucleotide; GGG chr11 5274730 5274749 5274746 +
cctattgtgtgactgacctc

SEQ ID NO: 14234 - DNA, 20 bp, Artificial Sequence
  Synthetic oligonucleotide; GAG chr11 5274732 5274751 5274748 +
tattgtgtgactgacctcgg

SEQ ID NO: 14235 - DNA, 20 bp, Artificial Sequence
  Synthetic oligonucleotide; AAG chr11 5274747 5274766 5274763 +
ctcgggagccactgtgccta

SEQ ID NO: 14236 - DNA, 20 bp, Artificial Sequence
  Synthetic oligonucleotide; CAG chr11 5274756 5274775 5274772 +
cactgtgcctaaagtacaac

SEQ ID NO: 14237 - DNA, 20 bp, Artificial Sequence
  Synthetic oligonucleotide; GAG chr11 5274758 5274777 5274774 +
ctgtgcctaaagtacaacca

SEQ ID NO: 14238 - DNA, 20 bp, Artificial Sequence
  Synthetic oligonucleotide; AAG chr11 5274780 5274799 5274796 +
gttacttgtgaatgttaatt

SEQ ID NO: 14239 - DNA, 20 bp, Artificial Sequence
  Synthetic oligonucleotide; CAG chr11 5274783 5274802 5274799 +
acttgtgaatgttaattaag

SEQ ID NO: 14240 - DNA, 20 bp, Artificial Sequence
  Synthetic oligonucleotide; AGG chr11 5274784 5274803 5274800 +
cttgtgaatgttaattaagc

SEQ ID NO: 14241 - DNA, 20 bp, Artificial Sequence
  Synthetic oligonucleotide; GAG chr11 5274786 5274805 5274802 +
tgtgaatgttaattaagcag

SEQ ID NO: 14242 - DNA, 20 bp, Artificial Sequence
  Synthetic oligonucleotide; AGG chr11 5274787 5274806 5274803 +
gtgaatgttaattaagcagg

SEQ ID NO: 14243 - DNA, 20 bp, Artificial Sequence
  Synthetic oligonucleotide; GGG chr11 5274788 5274807 5274804 +
tgaatgttaattaagcagga

SEQ ID NO: 14244 - DNA, 20 bp, Artificial Sequence
  Synthetic oligonucleotide; TGG chr11 5274799 5274818 5274815 +
taagcaggagggatctttaa

SEQ ID NO: 14245 - DNA, 20 bp, Artificial Sequence
  Synthetic oligonucleotide; GGG chr11 5274800 5274819 5274816 +
aagcaggagggatctttaat

SEQ ID NO: 14246 - DNA, 20 bp, Artificial Sequence
  Synthetic oligonucleotide; AAG chr11 5274806 5274825 5274822 +
gagggatctttaatgggaaa

SEQ ID NO: 14247 - DNA, 20 bp, Artificial Sequence
  Synthetic oligonucleotide; AGG chr11 5274807 5274826 5274823 +
agggatctttaatgggaaaa

SEQ ID NO: 14248 - DNA, 20 bp, Artificial Sequence
  Synthetic oligonucleotide; GAG chr11 5274809 5274828 5274825 +
ggatctttaatgggaaaaag

SEQ ID NO: 14249 - DNA, 20 bp, Artificial Sequence
  Synthetic oligonucleotide; TAG chr11 5274812 5274831 5274828 +
tctttaatgggaaaaaggag

SEQ ID NO: 14250 - DNA, 20 bp, Artificial Sequence
  Synthetic oligonucleotide; AAG chr11 5274816 5274835 5274832 +
taatgggaaaaaggagtaga

SEQ ID NO: 14251 - DNA, 20 bp, Artificial Sequence
  Synthetic oligonucleotide; CAG chr11 5274820 5274839 5274836 +
gggaaaaaggagtagaaagc

SEQ ID NO: 14252 - DNA, 20 bp, Artificial Sequence
  Synthetic oligonucleotide; CAG chr11 5274826 5274845 5274842 +
aaggagtagaaagccagaat

SEQ ID NO: 14253 - DNA, 20 bp, Artificial Sequence
  Synthetic oligonucleotide; CAG chr11 5274830 5274849 5274846 +
agtagaaagccagaatcagc

SEQ ID NO: 14254 - DNA, 20 bp, Artificial Sequence
  Synthetic oligonucleotide; TGG chr11 5274856 5274875 5274872 +
tgccacactttcctacatga

SEQ ID NO: 14255 - DNA, 20 bp, Artificial Sequence
  Synthetic oligonucleotide; GGG chr11 5274857 5274876 5274873 +
gccacactttcctacatgat

SEQ ID NO: 14256 - DNA, 20 bp, Artificial Sequence
  Synthetic oligonucleotide; AAG chr11 5274865 5274884 5274881 +
ttcctacatgatgggcactg

SEQ ID NO: 14257 - DNA, 20 bp, Artificial Sequence
  Synthetic oligonucleotide; AGG chr11 5274866 5274885 5274882 +
tcctacatgatgggcactga

SEQ ID NO: 14258 - DNA, 20 bp, Artificial Sequence
  Synthetic oligonucleotide; GAG chr11 5274878 5274897 5274894 +
ggcactgaaggttaaaactt

SEQ ID NO: 14259 - DNA, 20 bp, Artificial Sequence
  Synthetic oligonucleotide; TAG chr11 5274891 5274910 5274907 +
aaaacttgagtctgtcaact

SEQ ID NO: 14260 - DNA, 20 bp, Artificial Sequence
  Synthetic oligonucleotide; TAG chr11 5274928 5274947 5274944 +
tcccattttccgctgaaata

SEQ ID NO: 14261 - DNA, 20 bp, Artificial Sequence
  Synthetic oligonucleotide; TGG chr11 5274942 5274961 5274958 +
gaaatatagctttactttcc

SEQ ID NO: 14262 - DNA, 20 bp, Artificial Sequence
  Synthetic oligonucleotide; TGG chr11 5274959 5274978 5274975 +
tcctggtttctttgaccttt

SEQ ID NO: 14263 - DNA, 20 bp, Artificial Sequence
  Synthetic oligonucleotide; GGG chr11 5274960 5274979 5274976 +
cctggtttctttgacctttt

SEQ ID NO: 14264 - DNA, 20 bp, Artificial Sequence
  Synthetic oligonucleotide; GAG chr11 5274968 5274987 5274984 +
ctttgaccttttgggacctt

SEQ ID NO: 14265 - DNA, 20 bp, Artificial Sequence
  Synthetic oligonucleotide; AAG chr11 5274972 5274991 5274988 +
gaccttttgggaccttgagt

SEQ ID NO: 14266 - DNA, 20 bp, Artificial Sequence
  Synthetic oligonucleotide; AAG chr11 5274977 5274996 5274993 +
tttgggaccttgagtaagta

SEQ ID NO: 14267 - DNA, 20 bp, Artificial Sequence
  Synthetic oligonucleotide; AAG chr11 5275012 5275031 5275028 +
attttcatgattaaaattct

SEQ ID NO: 14268 - DNA, 20 bp, Artificial Sequence
  Synthetic oligonucleotide; TGG chr11 5275022 5275041 5275038 +
ttaaaattctaagaaattct

SEQ ID NO: 14269 - DNA, 20 bp, Artificial Sequence
  Synthetic oligonucleotide; GGG chr11 5275023 5275042 5275039 +
taaaattctaagaaattctt

SEQ ID NO: 14270 - DNA, 20 bp, Artificial Sequence
  Synthetic oligonucleotide; AAG chr11 5275067 5275086 5275083 +
gcctaatgtatttatgaact

SEQ ID NO: 14271 - DNA, 20 bp, Artificial Sequence
  Synthetic oligonucleotide; TAG chr11 5275074 5275093 5275090 +
gtatttatgaactaagaaca

SEQ ID NO: 14272 - DNA, 20 bp, Artificial Sequence
  Synthetic oligonucleotide; AAG chr11 5275095 5275114 5275111 +
agaaataaaacaatactctg

SEQ ID NO: 14273 - DNA, 20 bp, Artificial Sequence
  Synthetic oligonucleotide; TAG chr11 5275098 5275117 5275114 +
aataaaacaatactctgaag

SEQ ID NO: 14274 - DNA, 20 bp, Artificial Sequence
  Synthetic oligonucleotide; CAG chr11 5275103 5275122 5275119 +
aacaatactctgaagtagtt

SEQ ID NO: 14275 - DNA, 20 bp, Artificial Sequence
  Synthetic oligonucleotide; AAG chr11 5275127 5275146 5275143 +
atgtgctttcaatttatata

SEQ ID NO: 14276 - DNA, 20 bp, Artificial Sequence
  Synthetic oligonucleotide; GAG chr11 5275129 5275148 5275145 +
gtgctttcaatttatataaa

SEQ ID NO: 14277 - DNA, 20 bp, Artificial Sequence
  Synthetic oligonucleotide; GAG chr11 5275143 5275162 5275159 +
tataaagagttaattcaaat

SEQ ID NO: 14278 - DNA, 20 bp, Artificial Sequence
  Synthetic oligonucleotide; AAG chr11 5275154 5275173 5275170 +
aattcaaatgagactatttt

SEQ ID NO: 14279 - DNA, 20 bp, Artificial Sequence
  Synthetic oligonucleotide; CAG chr11 5275159 5275178 5275175 +
aaatgagactattttaagtg

SEQ ID NO: 14280 - DNA, 20 bp, Artificial Sequence
  Synthetic oligonucleotide; AGG chr11 5275160 5275179 5275176 +
aatgagactattttaagtgc

SEQ ID NO: 14281 - DNA, 20 bp, Artificial Sequence
  Synthetic oligonucleotide; GGG chr11 5275161 5275180 5275177 +
atgagactattttaagtgca

SEQ ID NO: 14282 - DNA, 20 bp, Artificial Sequence
  Synthetic oligonucleotide; TAG chr11 5275180 5275199 5275196 +
agggctttgaatcttatgtc

SEQ ID NO: 14283 - DNA, 20 bp, Artificial Sequence
  Synthetic oligonucleotide; AAG chr11 5275212 5275231 5275228 +
aaaacctctgattatatgct

SEQ ID NO: 14284 - DNA, 20 bp, Artificial Sequence
  Synthetic oligonucleotide; TAG chr11 5275225 5275244 5275241 +
atatgctaagattccacctc

SEQ ID NO: 14285 - DNA, 20 bp, Artificial Sequence
  Synthetic oligonucleotide; TAG chr11 5275231 5275250 5275247 +
taagattccacctctagtgc

SEQ ID NO: 14286 - DNA, 20 bp, Artificial Sequence
  Synthetic oligonucleotide; GAG chr11 5275238 5275257 5275254 +
ccacctctagtgctagaact

SEQ ID NO: 14287 - DNA, 20 bp, Artificial Sequence
  Synthetic oligonucleotide; AAG chr11 5275241 5275260 5275257 +
cctctagtgctagaactgag

SEQ ID NO: 14288 - DNA, 20 bp, Artificial Sequence
  Synthetic oligonucleotide; TGG chr11 5275253 5275272 5275269 +
gaactgagaagtccttgact

SEQ ID NO: 14289 - DNA, 20 bp, Artificial Sequence
  Synthetic oligonucleotide; CAG chr11 5275281 5275300 5275297 +
ttttttaaattctgaaacaa

SEQ ID NO: 14290 - DNA, 20 bp, Artificial Sequence
  Synthetic oligonucleotide; AAG chr11 5275291 5275310 5275307 +
tctgaaacaacagcaacata

SEQ ID NO: 14291 - DNA, 20 bp, Artificial Sequence
  Synthetic oligonucleotide; AAG chr11 5275296 5275315 5275312 +
aacaacagcaacataaagct

SEQ ID NO: 14292 - DNA, 20 bp, Artificial Sequence
  Synthetic oligonucleotide; AGG chr11 5275297 5275316 5275313 +
acaacagcaacataaagcta

SEQ ID NO: 14293 - DNA, 20 bp, Artificial Sequence
  Synthetic oligonucleotide; CAG chr11 5275328 5275347 5275344 +
ttgcctatgcatgctatctt

SEQ ID NO: 14294 - DNA, 20 bp, Artificial Sequence
  Synthetic oligonucleotide; TAG chr11 5275344 5275363 5275360 +
tcttcagtactttgattatt

SEQ ID NO: 14295 - DNA, 20 bp, Artificial Sequence
  Synthetic oligonucleotide; TAG chr11 5275363 5275382 5275379 +
ttagtattgaaactataaca

SEQ ID NO: 14296 - DNA, 20 bp, Artificial Sequence
  Synthetic oligonucleotide; TGG chr11 5275398 5275417 5275414 +
ataaaaaatgtgtatttctc

SEQ ID NO: 14297 - DNA, 20 bp, Artificial Sequence
  Synthetic oligonucleotide; GAG chr11 5275400 5275419 5275416 +
aaaaaatgtgtatttctctg

SEQ ID NO: 14298 - DNA, 20 bp, Artificial Sequence
  Synthetic oligonucleotide; AAG chr11 5275403 5275422 5275419 +
aaatgtgtatttctctggag

SEQ ID NO: 14299 - DNA, 20 bp, Artificial Sequence
  Synthetic oligonucleotide; AGG chr11 5275404 5275423 5275420 +
aatgtgtatttctctggaga

SEQ ID NO: 14300 - DNA, 20 bp, Artificial Sequence
  Synthetic oligonucleotide; GAG chr11 5275415 5275434 5275431 +
ctctggagaaggttaaaact

SEQ ID NO: 14301 - DNA, 20 bp, Artificial Sequence
  Synthetic oligonucleotide; AGG chr11 5275416 5275435 5275432 +
tctggagaaggttaaaactg

SEQ ID NO: 14302 - DNA, 20 bp, Artificial Sequence
  Synthetic oligonucleotide; TGG chr11 5275421 5275440 5275437 +
agaaggttaaaactgaggat

SEQ ID NO: 14303 - DNA, 20 bp, Artificial Sequence
  Synthetic oligonucleotide; AAG chr11 5275425 5275444 5275441 +
ggttaaaactgaggattggc

SEQ ID NO: 14304 - DNA, 20 bp, Artificial Sequence
  Synthetic oligonucleotide; GAG chr11 5275429 5275448 5275445 +
aaaactgaggattggcaagt

SEQ ID NO: 14305 - DNA, 20 bp, Artificial Sequence
  Synthetic oligonucleotide; AAG chr11 5275433 5275452 5275449 +
ctgaggattggcaagtgagc

SEQ ID NO: 14306 - DNA, 20 bp, Artificial Sequence
  Synthetic oligonucleotide; AGG chr11 5275434 5275453 5275450 +
tgaggattggcaagtgagca

SEQ ID NO: 14307 - DNA, 20 bp, Artificial Sequence
  Synthetic oligonucleotide; TGG chr11 5275443 5275462 5275459 +
gcaagtgagcaaggcttaaa

SEQ ID NO: 14308 - DNA, 20 bp, Artificial Sequence
  Synthetic oligonucleotide; AAG chr11 5275446 5275465 5275462 +
agtgagcaaggcttaaatgg

SEQ ID NO: 14309 - DNA, 20 bp, Artificial Sequence
  Synthetic oligonucleotide; AAG chr11 5275449 5275468 5275465 +
gagcaaggcttaaatggaag

SEQ ID NO: 14310 - DNA, 20 bp, Artificial Sequence
  Synthetic oligonucleotide; CAG chr11 5275464 5275483 5275480 +
ggaagaagcaatgatctcgt

SEQ ID NO: 14311 - DNA, 20 bp, Artificial Sequence
  Synthetic oligonucleotide; GAG chr11 5275482 5275501 5275498 +
gtcagaccaccttcattaac

SEQ ID NO: 14312 - DNA, 20 bp, Artificial Sequence
  Synthetic oligonucleotide; GAG chr11 5275497 5275516 5275513 +
ttaacgagatcatccatcat

SEQ ID NO: 14313 - DNA, 20 bp, Artificial Sequence
  Synthetic oligonucleotide; AGG chr11 5275498 5275517 5275514 +
taacgagatcatccatcatg

SEQ ID NO: 14314 - DNA, 20 bp, Artificial Sequence
  Synthetic oligonucleotide; TGG chr11 5275506 5275525 5275522 +
tcatccatcatgaggaaata

SEQ ID NO: 14315 - DNA, 20 bp, Artificial Sequence
  Synthetic oligonucleotide; CAG chr11 5275514 5275533 5275530 +
catgaggaaatatggaaaac

SEQ ID NO: 14316 - DNA, 20 bp, Artificial Sequence
  Synthetic oligonucleotide; AGG chr11 5275515 5275534 5275531 +
atgaggaaatatggaaaacc

SEQ ID NO: 14317 - DNA, 20 bp, Artificial Sequence
  Synthetic oligonucleotide; AAG chr11 5275539 5275558 5275555 +
cccctctgttttgtgtcact

SEQ ID NO: 14318 - DNA, 20 bp, Artificial Sequence
  Synthetic oligonucleotide; AGG chr11 5275540 5275559 5275556 +
ccctctgttttgtgtcacta

SEQ ID NO: 14319 - DNA, 20 bp, Artificial Sequence
  Synthetic oligonucleotide; GGG chr11 5275541 5275560 5275557 +
cctctgttttgtgtcactaa

SEQ ID NO: 14320 - DNA, 20 bp, Artificial Sequence
  Synthetic oligonucleotide; GAG chr11 5275545 5275564 5275561 +
tgttttgtgtcactaagggt

SEQ ID NO: 14321 - DNA, 20 bp, Artificial Sequence
  Synthetic oligonucleotide; AGG chr11 5275546 5275565 5275562 +
gttttgtgtcactaagggtg

SEQ ID NO: 14322 - DNA, 20 bp, Artificial Sequence
  Synthetic oligonucleotide; CGG chr11 5275573 5275592 5275589 +
tgaatgatttttccctcccc

SEQ ID NO: 14323 - DNA, 20 bp, Artificial Sequence
  Synthetic oligonucleotide; GGG chr11 5275574 5275593 5275590 +
gaatgatttttccctccccc

SEQ ID NO: 14324 - DNA, 20 bp, Artificial Sequence
  Synthetic oligonucleotide; TAG chr11 5275584 5275603 5275600 +
tccctcccccgggcttcttt

SEQ ID NO: 14325 - DNA, 20 bp, Artificial Sequence
  Synthetic oligonucleotide; TAG chr11 5275600 5275619 5275616 +
cttttagccatcaataattc

SEQ ID NO: 14326 - DNA, 20 bp, Artificial Sequence
  Synthetic oligonucleotide; CAG chr11 5275608 5275627 5275624 +
catcaataattctagcccca

SEQ ID NO: 14327 - DNA, 20 bp, Artificial Sequence
  Synthetic oligonucleotide; AGG chr11 5275609 5275628 5275625 +
atcaataattctagccccac

SEQ ID NO: 14328 - DNA, 20 bp, Artificial Sequence
  Synthetic oligonucleotide; GAG chr11 5275611 5275630 5275627 +
caataattctagccccacag

SEQ ID NO: 14329 - DNA, 20 bp, Artificial Sequence
  Synthetic oligonucleotide; AAG chr11 5275624 5275643 5275640 +
cccacaggagtttgttctga

SEQ ID NO: 14330 - DNA, 20 bp, Artificial Sequence
  Synthetic oligonucleotide; AAG chr11 5275644 5275663 5275660 +
aagtaaacttccacaaccgc

SEQ ID NO: 14331 - DNA, 20 bp, Artificial Sequence
  Synthetic oligonucleotide; GAG chr11 5275653 5275672 5275669 +
tccacaaccgcaagcttatt

SEQ ID NO: 14332 - DNA, 20 bp, Artificial Sequence
  Synthetic oligonucleotide; AGG chr11 5275654 5275673 5275670 +
ccacaaccgcaagcttattg

SEQ ID NO: 14333 - DNA, 20 bp, Artificial Sequence
  Synthetic oligonucleotide; AAG chr11 5275659 5275678 5275675 +
accgcaagcttattgaggct

SEQ ID NO: 14334 - DNA, 20 bp, Artificial Sequence
  Synthetic oligonucleotide; AGG chr11 5275660 5275679 5275676 +
ccgcaagcttattgaggcta

SEQ ID NO: 14335 - DNA, 20 bp, Artificial Sequence
  Synthetic oligonucleotide; AAG chr11 5275671 5275690 5275687 +
ttgaggctaaggcatctgtg

SEQ ID NO: 14336 - DNA, 20 bp, Artificial Sequence
  Synthetic oligonucleotide; AGG chr11 5275672 5275691 5275688 +
tgaggctaaggcatctgtga

SEQ ID NO: 14337 - DNA, 20 bp, Artificial Sequence
  Synthetic oligonucleotide; AAG chr11 5275676 5275695 5275692 +
gctaaggcatctgtgaagga

SEQ ID NO: 14338 - DNA, 20 bp, Artificial Sequence
  Synthetic oligonucleotide; TAG chr11 5275707 5275726 5275723 +
cctctaaaccactatgctgc

SEQ ID NO: 14339 - DNA, 20 bp, Artificial Sequence
  Synthetic oligonucleotide; GAG chr11 5275709 5275728 5275725 +
tctaaaccactatgctgcta

SEQ ID NO: 14340 - DNA, 20 bp, Artificial Sequence
  Synthetic oligonucleotide; AAG chr11 5275728 5275747 5275744 +
agagcctcttttctgtactc

SEQ ID NO: 14341 - DNA, 20 bp, Artificial Sequence
  Synthetic oligonucleotide; CAG chr11 5275738 5275757 5275754 +
ttctgtactcaagcctcatt

SEQ ID NO: 14342 - DNA, 20 bp, Artificial Sequence
  Synthetic oligonucleotide; TAG chr11 5275745 5275764 5275761 +
ctcaagcctcattcagacac

SEQ ID NO: 14343 - DNA, 20 bp, Artificial Sequence
  Synthetic oligonucleotide; CAG chr11 5275754 5275773 5275770 +
cattcagacactagtgtcac

SEQ ID NO: 14344 - DNA, 20 bp, Artificial Sequence
  Synthetic oligonucleotide; TGG chr11 5275793 5275812 5275809 +
ttgtattttcttcttcttgc

SEQ ID NO: 14345 - DNA, 20 bp, Artificial Sequence
  Synthetic oligonucleotide; TAG chr11 5275798 5275817 5275814 +
ttttcttcttcttgctggtt

SEQ ID NO: 14346 - DNA, 20 bp, Artificial Sequence
  Synthetic oligonucleotide; TGG chr11 5275811 5275830 5275827 +
gctggtttagtcatgttttc

SEQ ID NO: 14347 - DNA, 20 bp, Artificial Sequence
  Synthetic oligonucleotide; GGG chr11 5275812 5275831 5275828 +
ctggtttagtcatgttttct

SEQ ID NO: 14348 - DNA, 20 bp, Artificial Sequence
  Synthetic oligonucleotide; GAG chr11 5275814 5275833 5275830 +
ggtttagtcatgttttctgg

SEQ ID NO: 14349 - DNA, 20 bp, Artificial Sequence
  Synthetic oligonucleotide; TAG chr11 5275819 5275838 5275835 +
agtcatgttttctgggagct

SEQ ID NO: 14350 - DNA, 20 bp, Artificial Sequence
  Synthetic oligonucleotide; AGG chr11 5275820 5275839 5275836 +
gtcatgttttctgggagctt

SEQ ID NO: 14351 - DNA, 20 bp, Artificial Sequence
  Synthetic oligonucleotide; GGG chr11 5275821 5275840 5275837 +
tcatgttttctgggagctta

SEQ ID NO: 14352 - DNA, 20 bp, Artificial Sequence
  Synthetic oligonucleotide; GGG chr11 5275822 5275841 5275838 +
catgttttctgggagcttag

SEQ ID NO: 14353 - DNA, 20 bp, Artificial Sequence
  Synthetic oligonucleotide; CAG chr11 5275856 5275875 5275872 +
ttgttttgttttctaatcaa

SEQ ID NO: 14354 - DNA, 20 bp, Artificial Sequence
  Synthetic oligonucleotide; GAG chr11 5275858 5275877 5275874 +
gttttgttttctaatcaaca

SEQ ID NO: 14355 - DNA, 20 bp, Artificial Sequence
  Synthetic oligonucleotide; TGG chr11 5275862 5275881 5275878 +
tgttttctaatcaacagaga

SEQ ID NO: 14356 - DNA, 20 bp, Artificial Sequence
  Synthetic oligonucleotide; GGG chr11 5275863 5275882 5275879 +
gttttctaatcaacagagat

SEQ ID NO: 14357 - DNA, 20 bp, Artificial Sequence
  Synthetic oligonucleotide; TAG chr11 5275887 5275906 5275903 +
aaacccattatttttttctt

SEQ ID NO: 14358 - DNA, 20 bp, Artificial Sequence
  Synthetic oligonucleotide; TGG chr11 5275893 5275912 5275909 +
attatttttttctttagact

SEQ ID NO: 14359 - DNA, 20 bp, Artificial Sequence
  Synthetic oligonucleotide; GGG chr11 5275894 5275913 5275910 +
ttatttttttctttagactt

SEQ ID NO: 14360 - DNA, 20 bp, Artificial Sequence
  Synthetic oligonucleotide; TGG chr11 5275898 5275917 5275914 +
ttttttctttagacttggga

SEQ ID NO: 14361 - DNA, 20 bp, Artificial Sequence
  Synthetic oligonucleotide; TAG chr11 5275904 5275923 5275920 +
ctttagacttgggatggtga

SEQ ID NO: 14362 - DNA, 20 bp, Artificial Sequence
  Synthetic oligonucleotide; TGG chr11 5275908 5275927 5275924 +
agacttgggatggtgatagc

SEQ ID NO: 14363 - DNA, 20 bp, Artificial Sequence
  Synthetic oligonucleotide; GGG chr11 5275909 5275928 5275925 +
gacttgggatggtgatagct

SEQ ID NO: 14364 - DNA, 20 bp, Artificial Sequence
  Synthetic oligonucleotide; CAG chr11 5275912 5275931 5275928 +
ttgggatggtgatagctggg

SEQ ID NO: 14365 - DNA, 20 bp, Artificial Sequence
  Synthetic oligonucleotide; CAG chr11 5275918 5275937 5275934 +
tggtgatagctgggcagcgt

SEQ ID NO: 14366 - DNA, 20 bp, Artificial Sequence
  Synthetic oligonucleotide; TGG chr11 5275931 5275950 5275947 +
gcagcgtcagaaactgtgtg

SEQ ID NO: 14367 - DNA, 20 bp, Artificial Sequence
  Synthetic oligonucleotide; TAG chr11 5275937 5275956 5275953 +
tcagaaactgtgtgtggata

SEQ ID NO: 14368 - DNA, 20 bp, Artificial Sequence
  Synthetic oligonucleotide; AAG chr11 5275942 5275961 5275958 +
aactgtgtgtggatatagat

SEQ ID NO: 14369 - DNA, 20 bp, Artificial Sequence
  Synthetic oligonucleotide; GAG chr11 5275944 5275963 5275960 +
ctgtgtgtggatatagataa

SEQ ID NO: 14370 - DNA, 20 bp, Artificial Sequence
  Synthetic oligonucleotide; CAG chr11 5275949 5275968 5275965 +
tgtggatatagataagagct

SEQ ID NO: 14371 - DNA, 20 bp, Artificial Sequence
  Synthetic oligonucleotide; AGG chr11 5275950 5275969 5275966 +
gtggatatagataagagctc

SEQ ID NO: 14372 - DNA, 20 bp, Artificial Sequence
  Synthetic oligonucleotide; GAG chr11 5275961 5275980 5275977 +
taagagctcaggactatgct

SEQ ID NO: 14373 - DNA, 20 bp, Artificial Sequence
  Synthetic oligonucleotide; GAG chr11 5275971 5275990 5275987 +
ggactatgctgagctgtgat

SEQ ID NO: 14374 - DNA, 20 bp, Artificial Sequence
  Synthetic oligonucleotide; AGG chr11 5275972 5275991 5275988 +
gactatgctgagctgtgatg

SEQ ID NO: 14375 - DNA, 20 bp, Artificial Sequence
  Synthetic oligonucleotide; GGG chr11 5275973 5275992 5275989 +
actatgctgagctgtgatga

SEQ ID NO: 14376 - DNA, 20 bp, Artificial Sequence
  Synthetic oligonucleotide; GAG chr11 5275975 5275994 5275991 +
tatgctgagctgtgatgagg

SEQ ID NO: 14377 - DNA, 20 bp, Artificial Sequence
  Synthetic oligonucleotide; AGG chr11 5275976 5275995 5275992 +
atgctgagctgtgatgaggg

SEQ ID NO: 14378 - DNA, 20 bp, Artificial Sequence
  Synthetic oligonucleotide; GGG chr11 5275977 5275996 5275993 +
tgctgagctgtgatgaggga

SEQ ID NO: 14379 - DNA, 20 bp, Artificial Sequence
  Synthetic oligonucleotide; GGG chr11 5275978 5275997 5275994 +
gctgagctgtgatgagggag

SEQ ID NO: 14380 - DNA, 20 bp, Artificial Sequence
  Synthetic oligonucleotide; TAG chr11 5275983 5276002 5275999 +
gctgtgatgagggaggggcc

SEQ ID NO: 14381 - DNA, 20 bp, Artificial Sequence
  Synthetic oligonucleotide; AAG chr11 5275989 5276008 5276005 +
atgagggaggggcctagcta

SEQ ID NO: 14382 - DNA, 20 bp, Artificial Sequence
  Synthetic oligonucleotide; AGG chr11 5275990 5276009 5276006 +
tgagggaggggcctagctaa

SEQ ID NO: 14383 - DNA, 20 bp, Artificial Sequence
  Synthetic oligonucleotide; CAG chr11 5275993 5276012 5276009 +
gggaggggcctagctaaagg

SEQ ID NO: 14384 - DNA, 20 bp, Artificial Sequence
  Synthetic oligonucleotide; GAG chr11 5275997 5276016 5276013 +
ggggcctagctaaaggcagt

SEQ ID NO: 14385 - DNA, 20 bp, Artificial Sequence
  Synthetic oligonucleotide; GAG chr11 5275999 5276018 5276015 +
ggcctagctaaaggcagtga

SEQ ID NO: 14386 - DNA, 20 bp, Artificial Sequence
  Synthetic oligonucleotide; CAG chr11 5276003 5276022 5276019 +
tagctaaaggcagtgagagt

SEQ ID NO: 14387 - DNA, 20 bp, Artificial Sequence
  Synthetic oligonucleotide; CAG chr11 5276028 5276047 5276044 +
tgctcctgctattgccttct

SEQ ID NO: 14388 - DNA, 20 bp, Artificial Sequence
  Synthetic oligonucleotide; TGG chr11 5276041 5276060 5276057 +
gccttctcagtccccacgct

SEQ ID NO: 14389 - DNA, 20 bp, Artificial Sequence
  Synthetic oligonucleotide; AAG chr11 5276053 5276072 5276069 +
cccacgcttggtttctacac

SEQ ID NO: 14390 - DNA, 20 bp, Artificial Sequence
  Synthetic oligonucleotide; TAG chr11 5276056 5276075 5276072 +
acgcttggtttctacacaag

SEQ ID NO: 14391 - DNA, 20 bp, Artificial Sequence
  Synthetic oligonucleotide; TAG chr11 5276064 5276083 5276080 +
tttctacacaagtagataca

SEQ ID NO: 14392 - DNA, 20 bp, Artificial Sequence
  Synthetic oligonucleotide; AAG chr11 5276069 5276088 5276085 +
acacaagtagatacatagaa

SEQ ID NO: 14393 - DNA, 20 bp, Artificial Sequence
  Synthetic oligonucleotide; AGG chr11 5276070 5276089 5276086 +
cacaagtagatacatagaaa

SEQ ID NO: 14394 - DNA, 20 bp, Artificial Sequence
  Synthetic oligonucleotide; TAG chr11 5276076 5276095 5276092 +
tagatacatagaaaaggcta

SEQ ID NO: 14395 - DNA, 20 bp, Artificial Sequence
  Synthetic oligonucleotide; AGG chr11 5276077 5276096 5276093 +
agatacatagaaaaggctat

SEQ ID NO: 14396 - DNA, 20 bp, Artificial Sequence
  Synthetic oligonucleotide; TAG chr11 5276081 5276100 5276097 +
acatagaaaaggctataggt

SEQ ID NO: 14397 - DNA, 20 bp, Artificial Sequence
  Synthetic oligonucleotide; GAG chr11 5276089 5276108 5276105 +
aaggctataggttagtgttt

SEQ ID NO: 14398 - DNA, 20 bp, Artificial Sequence
  Synthetic oligonucleotide; GAG chr11 5276091 5276110 5276107 +
ggctataggttagtgtttga

SEQ ID NO: 14399 - DNA, 20 bp, Artificial Sequence
  Synthetic oligonucleotide; TAG chr11 5276105 5276124 5276121 +
gtttgagagtcctgcatgat

SEQ ID NO: 14400 - DNA, 20 bp, Artificial Sequence
  Synthetic oligonucleotide; CAG chr11 5276113 5276132 5276129 +
gtcctgcatgattagttgct

SEQ ID NO: 14401 - DNA, 20 bp, Artificial Sequence
  Synthetic oligonucleotide; GAG chr11 5276235 5276254 5276251 +
tgtgattatcatcaaaacgt

SEQ ID NO: 14402 - DNA, 20 bp, Artificial Sequence
  Synthetic oligonucleotide; AGG chr11 5276236 5276255 5276252 +
gtgattatcatcaaaacgtg

SEQ ID NO: 14403 - DNA, 20 bp, Artificial Sequence
  Synthetic oligonucleotide; GGG chr11 5276237 5276256 5276253 +
tgattatcatcaaaacgtga

SEQ ID NO: 14404 - DNA, 20 bp, Artificial Sequence
  Synthetic oligonucleotide; AAG chr11 5276243 5276262 5276259 +
tcatcaaaacgtgagggcta

SEQ ID NO: 14405 - DNA, 20 bp, Artificial Sequence
  Synthetic oligonucleotide; CAG chr11 5276250 5276269 5276266 +
aacgtgagggctaaagtgac

SEQ ID NO: 14406 - DNA, 20 bp, Artificial Sequence
  Synthetic oligonucleotide; AAG chr11 5276262 5276281 5276278 +
aaagtgaccagataacttgc

SEQ ID NO: 14407 - DNA, 20 bp, Artificial Sequence
  Synthetic oligonucleotide; TAG chr11 5276268 5276287 5276284 +
accagataacttgcaagtcc

SEQ ID NO: 14408 - DNA, 20 bp, Artificial Sequence
  Synthetic oligonucleotide; AGG chr11 5276269 5276288 5276285 +
ccagataacttgcaagtcct

SEQ ID NO: 14409 - DNA, 20 bp, Artificial Sequence
  Synthetic oligonucleotide; CAG chr11 5276276 5276295 5276292 +
acttgcaagtcctaggatac

SEQ ID NO: 14410 - DNA, 20 bp, Artificial Sequence
  Synthetic oligonucleotide; AGG chr11 5276277 5276296 5276293 +
cttgcaagtcctaggatacc

SEQ ID NO: 14411 - DNA, 20 bp, Artificial Sequence
  Synthetic oligonucleotide; GAG chr11 5276309 5276328 5276325 +
tacattccaaaaatttaact

SEQ ID NO: 14412 - DNA, 20 bp, Artificial Sequence
  Synthetic oligonucleotide; CAG chr11 5276344 5276363 5276360 +
aaaaaaaaacaaaaaaaaac

SEQ ID NO: 14413 - DNA, 20 bp, Artificial Sequence
  Synthetic oligonucleotide; TGG chr11 5276354 5276373 5276370 +
aaaaaaaaaccagtgatcca

SEQ ID NO: 14414 - DNA, 20 bp, Artificial Sequence
  Synthetic oligonucleotide; CAG chr11 5276360 5276379 5276376 +
aaaccagtgatccatggaca

SEQ ID NO: 14415 - DNA, 20 bp, Artificial Sequence
  Synthetic oligonucleotide; AGG chr11 5276361 5276380 5276377 +
aaccagtgatccatggacac

SEQ ID NO: 14416 - DNA, 20 bp, Artificial Sequence
  Synthetic oligonucleotide; GGG chr11 5276362 5276381 5276378 +
accagtgatccatggacaca

SEQ ID NO: 14417 - DNA, 20 bp, Artificial Sequence
  Synthetic oligonucleotide; GAG chr11 5276364 5276383 5276380 +
cagtgatccatggacacagg

SEQ ID NO: 14418 - DNA, 20 bp, Artificial Sequence
  Synthetic oligonucleotide; AGG chr11 5276365 5276384 5276381 +
agtgatccatggacacaggg

SEQ ID NO: 14419 - DNA, 20 bp, Artificial Sequence
  Synthetic oligonucleotide; GGG chr11 5276366 5276385 5276382 +
gtgatccatggacacaggga

SEQ ID NO: 14420 - DNA, 20 bp, Artificial Sequence
  Synthetic oligonucleotide; GGG chr11 5276367 5276386 5276383 +
tgatccatggacacagggag

SEQ ID NO: 14421 - DNA, 20 bp, Artificial Sequence
  Synthetic oligonucleotide; TGG chr11 5276382 5276401 5276398 +
gggaggggaacatcacacac

SEQ ID NO: 14422 - DNA, 20 bp, Artificial Sequence
  Synthetic oligonucleotide; GGG chr11 5276383 5276402 5276399 +
ggaggggaacatcacacact

SEQ ID NO: 14423 - DNA, 20 bp, Artificial Sequence
  Synthetic oligonucleotide; GGG chr11 5276384 5276403 5276400 +
gaggggaacatcacacactg

SEQ ID NO: 14424 - DNA, 20 bp, Artificial Sequence
  Synthetic oligonucleotide; TGG chr11 5276392 5276411 5276408 +
catcacacactggggcctgt

SEQ ID NO: 14425 - DNA, 20 bp, Artificial Sequence
  Synthetic oligonucleotide; GGG chr11 5276393 5276412 5276409 +
atcacacactggggcctgtt

SEQ ID NO: 14426 - DNA, 20 bp, Artificial Sequence
  Synthetic oligonucleotide; GGG chr11 5276394 5276413 5276410 +
tcacacactggggcctgttg

SEQ ID NO: 14427 - DNA, 20 bp, Artificial Sequence
  Synthetic oligonucleotide; GGG chr11 5276395 5276414 5276411 +
cacacactggggcctgttgg

SEQ ID NO: 14428 - DNA, 20 bp, Artificial Sequence
  Synthetic oligonucleotide; TGG chr11 5276398 5276417 5276414 +
acactggggcctgttggggg

SEQ ID NO: 14429 - DNA, 20 bp, Artificial Sequence
  Synthetic oligonucleotide; GGG chr11 5276399 5276418 5276415 +
cactggggcctgttgggggt

SEQ ID NO: 14430 - DNA, 20 bp, Artificial Sequence
  Synthetic oligonucleotide; GGG chr11 5276400 5276419 5276416 +
actggggcctgttgggggtg

SEQ ID NO: 14431 - DNA, 20 bp, Artificial Sequence
  Synthetic oligonucleotide; GGG chr11 5276401 5276420 5276417 +
ctggggcctgttgggggtgg

SEQ ID NO: 14432 - DNA, 20 bp, Artificial Sequence
  Synthetic oligonucleotide; GGG chr11 5276402 5276421 5276418 +
tggggcctgttgggggtggg

SEQ ID NO: 14433 - DNA, 20 bp, Artificial Sequence
  Synthetic oligonucleotide; TAG chr11 5276406 5276425 5276422 +
gcctgttgggggtggggggc

SEQ ID NO: 14434 - DNA, 20 bp, Artificial Sequence
  Synthetic oligonucleotide; AGG chr11 5276407 5276426 5276423 +
cctgttgggggtggggggct

SEQ ID NO: 14435 - DNA, 20 bp, Artificial Sequence
  Synthetic oligonucleotide; GGG chr11 5276408 5276427 5276424 +
ctgttgggggtggggggcta

SEQ ID NO: 14436 - DNA, 20 bp, Artificial Sequence
  Synthetic oligonucleotide; GGG chr11 5276409 5276428 5276425 +
tgttgggggtggggggctag

SEQ ID NO: 14437 - DNA, 20 bp, Artificial Sequence
  Synthetic oligonucleotide; AAG chr11 5276412 5276431 5276428 +
tgggggtggggggctagggg

SEQ ID NO: 14438 - DNA, 20 bp, Artificial Sequence
  Synthetic oligonucleotide; AGG chr11 5276413 5276432 5276429 +
gggggtggggggctagggga

SEQ ID NO: 14439 - DNA, 20 bp, Artificial Sequence
  Synthetic oligonucleotide; TAG chr11 5276417 5276436 5276433 +
gtggggggctaggggaagga

SEQ ID NO: 14440 - DNA, 20 bp, Artificial Sequence
  Synthetic oligonucleotide; TAG chr11 5276423 5276442 5276439 +
ggctaggggaaggatagcat

SEQ ID NO: 14441 - DNA, 20 bp, Artificial Sequence
  Synthetic oligonucleotide; AGG chr11 5276424 5276443 5276440 +
gctaggggaaggatagcatt

SEQ ID NO: 14442 - DNA, 20 bp, Artificial Sequence
  Synthetic oligonucleotide; GAG chr11 5276426 5276445 5276442 +
taggggaaggatagcattag

SEQ ID NO: 14443 - DNA, 20 bp, Artificial Sequence
  Synthetic oligonucleotide; TAG chr11 5276441 5276460 5276457 +
attaggagaaatacctaatg

SEQ ID NO: 14444 - DNA, 20 bp, Artificial Sequence
  Synthetic oligonucleotide; CGG chr11 5276448 5276467 5276464 +
gaaatacctaatgtagatga

SEQ ID NO: 14445 - DNA, 20 bp, Artificial Sequence
  Synthetic oligonucleotide; GGG chr11 5276449 5276468 5276465 +
aaatacctaatgtagatgac

SEQ ID NO: 14446 - DNA, 20 bp, Artificial Sequence
  Synthetic oligonucleotide; TGG chr11 5276456 5276475 5276472 +
taatgtagatgacgggttga

SEQ ID NO: 14447 - DNA, 20 bp, Artificial Sequence
  Synthetic oligonucleotide; GGG chr11 5276457 5276476 5276473 +
aatgtagatgacgggttgat

SEQ ID NO: 14448 - DNA, 20 bp, Artificial Sequence
  Synthetic oligonucleotide; CAG chr11 5276462 5276481 5276478 +
agatgacgggttgatgggtg

SEQ ID NO: 14449 - DNA, 20 bp, Artificial Sequence
  Synthetic oligonucleotide; TGG chr11 5276475 5276494 5276491 +
atgggtgcagcaaaccacca

SEQ ID NO: 14450 - DNA, 20 bp, Artificial Sequence
  Synthetic oligonucleotide; CAG chr11 5276489 5276508 5276505 +
ccaccatggcacatgtaccc

SEQ ID NO: 14451 - DNA, 20 bp, Artificial Sequence
  Synthetic oligonucleotide; AAG chr11 5276498 5276517 5276514 +
cacatgtaccccagaactta

SEQ ID NO: 14452 - DNA, 20 bp, Artificial Sequence
  Synthetic oligonucleotide; CAG chr11 5276514 5276533 5276530 +
cttaaagcatattaaaaaaa

SEQ ID NO: 14453 - DNA, 20 bp, Artificial Sequence
  Synthetic oligonucleotide; AAG chr11 5276526 5276545 5276542 +
taaaaaaacagtgatcataa

SEQ ID NO: 14454 - DNA, 20 bp, Artificial Sequence
  Synthetic oligonucleotide; AAG chr11 5276529 5276548 5276545 +
aaaaacagtgatcataaaag

SEQ ID NO: 14455 - DNA, 20 bp, Artificial Sequence
  Synthetic oligonucleotide; AAG chr11 5276547 5276566 5276563 +
agaagctcaaatttaactat

SEQ ID NO: 14456 - DNA, 20 bp, Artificial Sequence
  Synthetic oligonucleotide; GAG chr11 5276549 5276568 5276565 +
aagctcaaatttaactataa

SEQ ID NO: 14457 - DNA, 20 bp, Artificial Sequence
  Synthetic oligonucleotide; CGG chr11 5276553 5276572 5276569 +
tcaaatttaactataagaga

SEQ ID NO: 14458 - DNA, 20 bp, Artificial Sequence
  Synthetic oligonucleotide; TGG chr11 5276558 5276577 5276574 +
tttaactataagagacggaa

SEQ ID NO: 14459 - DNA, 20 bp, Artificial Sequence
  Synthetic oligonucleotide; CAG chr11 5276588 5276607 5276604 +
aattcttaactataatctta

SEQ ID NO: 14460 - DNA, 20 bp, Artificial Sequence
  Synthetic oligonucleotide; TAG chr11 5276606 5276625 5276622 +
tacagaatattctcattgaa

SEQ ID NO: 14461 - DNA, 20 bp, Artificial Sequence
  Synthetic oligonucleotide; AAG chr11 5276609 5276628 5276625 +
agaatattctcattgaatag

SEQ ID NO: 14462 - DNA, 20 bp, Artificial Sequence
  Synthetic oligonucleotide; TAG chr11 5276624 5276643 5276640 +
aatagaagtatgcttatcat

SEQ ID NO: 14463 - DNA, 20 bp, Artificial Sequence
  Synthetic oligonucleotide; GAG chr11 5276626 5276645 5276642 +
tagaagtatgcttatcatta

SEQ ID NO: 14464 - DNA, 20 bp, Artificial Sequence
  Synthetic oligonucleotide; TGG chr11 5276632 5276651 5276648 +
tatgcttatcattagagatt

SEQ ID NO: 14465 - DNA, 20 bp, Artificial Sequence
  Synthetic oligonucleotide; CAG chr11 5276636 5276655 5276652 +
cttatcattagagatttgga

SEQ ID NO: 14466 - DNA, 20 bp, Artificial Sequence
  Synthetic oligonucleotide; CAG chr11 5276640 5276659 5276656 +
tcattagagatttggacagc

SEQ ID NO: 14467 - DNA, 20 bp, Artificial Sequence
  Synthetic oligonucleotide; AGG chr11 5276641 5276660 5276657 +
cattagagatttggacagcc

SEQ ID NO: 14468 - DNA, 20 bp, Artificial Sequence
  Synthetic oligonucleotide; AAG chr11 5276645 5276664 5276661 +
agagatttggacagccagga

SEQ ID NO: 14469 - DNA, 20 bp, Artificial Sequence
  Synthetic oligonucleotide; CAG chr11 5276650 5276669 5276666 +
tttggacagccaggaaagca

SEQ ID NO: 14470 - DNA, 20 bp, Artificial Sequence
  Synthetic oligonucleotide; AAG chr11 5276663 5276682 5276679 +
gaaagcacagaaaaaaaaaa

SEQ ID NO: 14471 - DNA, 20 bp, Artificial Sequence
  Synthetic oligonucleotide; AGG chr11 5276664 5276683 5276680 +
aaagcacagaaaaaaaaaaa

SEQ ID NO: 14472 - DNA, 20 bp, Artificial Sequence
  Synthetic oligonucleotide; GAG chr11 5276666 5276685 5276682 +
agcacagaaaaaaaaaaaag

SEQ ID NO: 14473 - DNA, 20 bp, Artificial Sequence
  Synthetic oligonucleotide; TAG chr11 5276682 5276701 5276698 +
aaaggagctctgttgcctta

SEQ ID NO: 14474 - DNA, 20 bp, Artificial Sequence
  Synthetic oligonucleotide; TAG chr11 5276687 5276706 5276703 +
agctctgttgccttatagcc

SEQ ID NO: 14475 - DNA, 20 bp, Artificial Sequence
  Synthetic oligonucleotide; GAG chr11 5276689 5276708 5276705 +
ctctgttgccttatagccta

SEQ ID NO: 14476 - DNA, 20 bp, Artificial Sequence
  Synthetic oligonucleotide; AGG chr11 5276690 5276709 5276706 +
tctgttgccttatagcctag

SEQ ID NO: 14477 - DNA, 20 bp, Artificial Sequence
  Synthetic oligonucleotide; CAG chr11 5276722 5276741 5276738 +
cctcacataacactgatgtc

SEQ ID NO: 14478 - DNA, 20 bp, Artificial Sequence
  Synthetic oligonucleotide; AGG chr11 5276723 5276742 5276739 +
ctcacataacactgatgtcc

SEQ ID NO: 14479 - DNA, 20 bp, Artificial Sequence
  Synthetic oligonucleotide; AAG chr11 5276728 5276747 5276744 +
ataacactgatgtccaggcc

SEQ ID NO: 14480 - DNA, 20 bp, Artificial Sequence
  Synthetic oligonucleotide; AGG chr11 5276729 5276748 5276745 +
taacactgatgtccaggcca

SEQ ID NO: 14481 - DNA, 20 bp, Artificial Sequence
  Synthetic oligonucleotide; AAG chr11 5276746 5276765 5276762 +
ccaaggccatccttcccatg

SEQ ID NO: 14482 - DNA, 20 bp, Artificial Sequence
  Synthetic oligonucleotide; TGG chr11 5276750 5276769 5276766 +
ggccatccttcccatgaaga

SEQ ID NO: 14483 - DNA, 20 bp, Artificial Sequence
  Synthetic oligonucleotide; AAG chr11 5276759 5276778 5276775 +
tcccatgaagatggatgaat

SEQ ID NO: 14484 - DNA, 20 bp, Artificial Sequence
  Synthetic oligonucleotide; TAG chr11 5276795 5276814 5276811 +
ctatgaaataatgtttactt

SEQ ID NO: 14485 - DNA, 20 bp, Artificial Sequence
  Synthetic oligonucleotide; TGG chr11 5276798 5276817 5276814 +
tgaaataatgtttactttag

SEQ ID NO: 14486 - DNA, 20 bp, Artificial Sequence
  Synthetic oligonucleotide; TAG chr11 5276811 5276830 5276827 +
actttagtggcatattgcat

SEQ ID NO: 14487 - DNA, 20 bp, Artificial Sequence
  Synthetic oligonucleotide; AGG chr11 5276812 5276831 5276828 +
ctttagtggcatattgcatt

SEQ ID NO: 14488 - DNA, 20 bp, Artificial Sequence
  Synthetic oligonucleotide; TGG chr11 5276825 5276844 5276841 +
ttgcattaggctacctgcct

SEQ ID NO: 14489 - DNA, 20 bp, Artificial Sequence
  Synthetic oligonucleotide; CAG chr11 5276830 5276849 5276846 +
ttaggctacctgccttggca

SEQ ID NO: 14490 - DNA, 20 bp, Artificial Sequence
  Synthetic oligonucleotide; GAG chr11 5276886 5276905 5276902 +
ttaattgcttacataaacat

SEQ ID NO: 14491 - DNA, 20 bp, Artificial Sequence
  Synthetic oligonucleotide; TAG chr11 5276894 5276913 5276910 +
ttacataaacatgagtgctc

SEQ ID NO: 14492 - DNA, 20 bp, Artificial Sequence
  Synthetic oligonucleotide; CAG chr11 5276907 5276926 5276923 +
agtgctctagttataaattc

SEQ ID NO: 14493 - DNA, 20 bp, Artificial Sequence
  Synthetic oligonucleotide; TGG chr11 5276924 5276943 5276940 +
ttccagtgtaaaaaacaccc

SEQ ID NO: 14494 - DNA, 20 bp, Artificial Sequence
  Synthetic oligonucleotide; GAG chr11 5276945 5276964 5276961 +
ggtttcgatattcatctttt

SEQ ID NO: 14495 - DNA, 20 bp, Artificial Sequence
  Synthetic oligonucleotide; TGG chr11 5276958 5276977 5276974 +
atcttttgagccttttattt

SEQ ID NO: 14496 - DNA, 20 bp, Artificial Sequence
  Synthetic oligonucleotide; CAG chr11 5276962 5276981 5276978 +
tttgagccttttattttggt

SEQ ID NO: 14497 - DNA, 20 bp, Artificial Sequence
  Synthetic oligonucleotide; AAG chr11 5276968 5276987 5276984 +
ccttttattttggtcagaac

SEQ ID NO: 14498 - DNA, 20 bp, Artificial Sequence
  Synthetic oligonucleotide; AAG chr11 5276976 5276995 5276992 +
tttggtcagaacaagttttc

SEQ ID NO: 14499 - DNA, 20 bp, Artificial Sequence
  Synthetic oligonucleotide; GAG chr11 5276978 5276997 5276994 +
tggtcagaacaagttttcaa

SEQ ID NO: 14500 - DNA, 20 bp, Artificial Sequence
  Synthetic oligonucleotide; CAG chr11 5276988 5277007 5277004 +
aagttttcaagagcaaatct

SEQ ID NO: 14501 - DNA, 20 bp, Artificial Sequence
  Synthetic oligonucleotide; GAG chr11 5277005 5277024 5277021 +
tctcagcctacaaaacaaat

SEQ ID NO: 14502 - DNA, 20 bp, Artificial Sequence
  Synthetic oligonucleotide; TAG chr11 5277016 5277035 5277032 +
aaaacaaatgagtccaattc

SEQ ID NO: 14503 - DNA, 20 bp, Artificial Sequence
  Synthetic oligonucleotide; CAG chr11 5277023 5277042 5277039 +
atgagtccaattctagaact

SEQ ID NO: 14504 - DNA, 20 bp, Artificial Sequence
  Synthetic oligonucleotide; AAG chr11 5277036 5277055 5277052 +
tagaactcagtaatcccatc

SEQ ID NO: 14505 - DNA, 20 bp, Artificial Sequence
  Synthetic oligonucleotide; AGG chr11 5277037 5277056 5277053 +
agaactcagtaatcccatca

SEQ ID NO: 14506 - DNA, 20 bp, Artificial Sequence
  Synthetic oligonucleotide; CGG chr11 5277049 5277068 5277065 +
tcccatcaaggctctgcctg

SEQ ID NO: 14507 - DNA, 20 bp, Artificial Sequence
  Synthetic oligonucleotide; GAG chr11 5277051 5277070 5277067 +
ccatcaaggctctgcctgcg

SEQ ID NO: 14508 - DNA, 20 bp, Artificial Sequence
  Synthetic oligonucleotide; AGG chr11 5277052 5277071 5277068 +
catcaaggctctgcctgcgg

SEQ ID NO: 14509 - DNA, 20 bp, Artificial Sequence
  Synthetic oligonucleotide; GGG chr11 5277053 5277072 5277069 +
atcaaggctctgcctgcgga

SEQ ID NO: 14510 - DNA, 20 bp, Artificial Sequence
  Synthetic oligonucleotide; TAG chr11 5277061 5277080 5277077 +
tctgcctgcggagggctaac

SEQ ID NO: 14511 - DNA, 20 bp, Artificial Sequence
  Synthetic oligonucleotide; CAG chr11 5277071 5277090 5277087 +
gagggctaactagctctatg

SEQ ID NO: 14512 - DNA, 20 bp, Artificial Sequence
  Synthetic oligonucleotide; AGG chr11 5277072 5277091 5277088 +
agggctaactagctctatgc

SEQ ID NO: 14513 - DNA, 20 bp, Artificial Sequence
  Synthetic oligonucleotide; TAG chr11 5277077 5277096 5277093 +
taactagctctatgcaggct

SEQ ID NO: 14514 - DNA, 20 bp, Artificial Sequence
  Synthetic oligonucleotide; CAG chr11 5277086 5277105 5277102 +
ctatgcaggcttagcacttc

SEQ ID NO: 14515 - DNA, 20 bp, Artificial Sequence
  Synthetic oligonucleotide; TAG chr11 5277119 5277138 5277135 +
ctgatttctttgtgtgtgca

SEQ ID NO: 14516 - DNA, 20 bp, Artificial Sequence
  Synthetic oligonucleotide; CAG chr11 5277122 5277141 5277138 +
atttctttgtgtgtgcatag

SEQ ID NO: 14517 - DNA, 20 bp, Artificial Sequence
  Synthetic oligonucleotide; TGG chr11 5277125 5277144 5277141 +
tctttgtgtgtgcatagcag

SEQ ID NO: 14518 - DNA, 20 bp, Artificial Sequence
  Synthetic oligonucleotide; CAG chr11 5277134 5277153 5277150 +
gtgcatagcagtggatgtgt

SEQ ID NO: 14519 - DNA, 20 bp, Artificial Sequence
  Synthetic oligonucleotide; TAG chr11 5277155 5277174 5277171 +
agcatacatccttttaatta

SEQ ID NO: 14520 - DNA, 20 bp, Artificial Sequence
  Synthetic oligonucleotide; AAG chr11 5277209 5277228 5277225 +
ttcaaaattgtaaaattgct

SEQ ID NO: 14521 - DNA, 20 bp, Artificial Sequence
  Synthetic oligonucleotide; CAG chr11 5277216 5277235 5277232 +
ttgtaaaattgctaagaata

SEQ ID NO: 14522 - DNA, 20 bp, Artificial Sequence
  Synthetic oligonucleotide; CAG chr11 5277227 5277246 5277243 +
ctaagaatacagcacaaaaa

SEQ ID NO: 14523 - DNA, 20 bp, Artificial Sequence
  Synthetic oligonucleotide; TAG chr11 5277232 5277251 5277248 +
aatacagcacaaaaacagaa

SEQ ID NO: 14524 - DNA, 20 bp, Artificial Sequence
  Synthetic oligonucleotide; GAG chr11 5277234 5277253 5277250 +
tacagcacaaaaacagaata

SEQ ID NO: 14525 - DNA, 20 bp, Artificial Sequence
  Synthetic oligonucleotide; AGG chr11 5277235 5277254 5277251 +
acagcacaaaaacagaatag

SEQ ID NO: 14526 - DNA, 20 bp, Artificial Sequence
  Synthetic oligonucleotide; AAG chr11 5277242 5277261 5277258 +
aaaaacagaatagaggaata

SEQ ID NO: 14527 - DNA, 20 bp, Artificial Sequence
  Synthetic oligonucleotide; TGG chr11 5277257 5277276 5277273 +
gaataaagttcctgttttca

SEQ ID NO: 14528 - DNA, 20 bp, Artificial Sequence
  Synthetic oligonucleotide; TAG chr11 5277266 5277285 5277282 +
tcctgttttcatggacttga

SEQ ID NO: 14529 - DNA, 20 bp, Artificial Sequence
  Synthetic oligonucleotide; TGG chr11 5277269 5277288 5277285 +
tgttttcatggacttgatag

SEQ ID NO: 14530 - DNA, 20 bp, Artificial Sequence
  Synthetic oligonucleotide; AAG chr11 5277273 5277292 5277289 +
ttcatggacttgatagtgga

SEQ ID NO: 14531 - DNA, 20 bp, Artificial Sequence
  Synthetic oligonucleotide; GAG chr11 5277275 5277294 5277291 +
catggacttgatagtggaaa

SEQ ID NO: 14532 - DNA, 20 bp, Artificial Sequence
  Synthetic oligonucleotide; AAG chr11 5277291 5277310 5277307 +
gaaagagcttgacattaaat

SEQ ID NO: 14533 - DNA, 20 bp, Artificial Sequence
  Synthetic oligonucleotide; GAG chr11 5277319 5277338 5277335 +
gaaacatgttatataccaat

SEQ ID NO: 14534 - DNA, 20 bp, Artificial Sequence
  Synthetic oligonucleotide; TAG chr11 5277324 5277343 5277340 +
atgttatataccaatgagat

SEQ ID NO: 14535 - DNA, 20 bp, Artificial Sequence
  Synthetic oligonucleotide; AGG chr11 5277325 5277344 5277341 +
tgttatataccaatgagatt

SEQ ID NO: 14536 - DNA, 20 bp, Artificial Sequence
  Synthetic oligonucleotide; TGG chr11 5277333 5277352 5277349 +
accaatgagattaggtgcta

SEQ ID NO: 14537 - DNA, 20 bp, Artificial Sequence
  Synthetic oligonucleotide; GAG chr11 5277335 5277354 5277351 +
caatgagattaggtgctatg

SEQ ID NO: 14538 - DNA, 20 bp, Artificial Sequence
  Synthetic oligonucleotide; AAG chr11 5277358 5277377 5277374 +
aaaaaaaaaaaactgaaatg

SEQ ID NO: 14539 - DNA, 20 bp, Artificial Sequence
  Synthetic oligonucleotide; AGG chr11 5277359 5277378 5277375 +
aaaaaaaaaaactgaaatga

SEQ ID NO: 14540 - DNA, 20 bp, Artificial Sequence
  Synthetic oligonucleotide; CAG chr11 5277363 5277382 5277379 +
aaaaaaactgaaatgaaggc

SEQ ID NO: 14541 - DNA, 20 bp, Artificial Sequence
  Synthetic oligonucleotide; GAG chr11 5277365 5277384 5277381 +
aaaaactgaaatgaaggcca

SEQ ID NO: 14542 - DNA, 20 bp, Artificial Sequence
  Synthetic oligonucleotide; TAG chr11 5277374 5277393 5277390 +
aatgaaggccagagtgtgat

SEQ ID NO: 14543 - DNA, 20 bp, Artificial Sequence
  Synthetic oligonucleotide; AGG chr11 5277375 5277394 5277391 +
atgaaggccagagtgtgatt

SEQ ID NO: 14544 - DNA, 20 bp, Artificial Sequence
  Synthetic oligonucleotide; CAG chr11 5277379 5277398 5277395 +
aggccagagtgtgattagga

SEQ ID NO: 14545 - DNA, 20 bp, Artificial Sequence
  Synthetic oligonucleotide; AGG chr11 5277380 5277399 5277396 +
ggccagagtgtgattaggac

SEQ ID NO: 14546 - DNA, 20 bp, Artificial Sequence
  Synthetic oligonucleotide; GGG chr11 5277381 5277400 5277397 +
gccagagtgtgattaggaca

SEQ ID NO: 14547 - DNA, 20 bp, Artificial Sequence
  Synthetic oligonucleotide; AAG chr11 5277387 5277406 5277403 +
gtgtgattaggacagggtga

SEQ ID NO: 14548 - DNA, 20 bp, Artificial Sequence
  Synthetic oligonucleotide; AGG chr11 5277388 5277407 5277404 +
tgtgattaggacagggtgaa

SEQ ID NO: 14549 - DNA, 20 bp, Artificial Sequence
  Synthetic oligonucleotide; GGG chr11 5277389 5277408 5277405 +
gtgattaggacagggtgaaa

SEQ ID NO: 14550 - DNA, 20 bp, Artificial Sequence
  Synthetic oligonucleotide; AAG chr11 5277404 5277423 5277420 +
tgaaagggtatcgctacttt

SEQ ID NO: 14551 - DNA, 20 bp, Artificial Sequence
  Synthetic oligonucleotide; TAG chr11 5277407 5277426 5277423 +
aagggtatcgctactttaag

SEQ ID NO: 14552 - DNA, 20 bp, Artificial Sequence
  Synthetic oligonucleotide; TGG chr11 5277412 5277431 5277428 +
tatcgctactttaagtagta

SEQ ID NO: 14553 - DNA, 20 bp, Artificial Sequence
  Synthetic oligonucleotide; CAG chr11 5277415 5277434 5277431 +
cgctactttaagtagtatgg

SEQ ID NO: 14554 - DNA, 20 bp, Artificial Sequence
  Synthetic oligonucleotide; AGG chr11 5277416 5277435 5277432 +
gctactttaagtagtatggc

SEQ ID NO: 14555 - DNA, 20 bp, Artificial Sequence
  Synthetic oligonucleotide; AAG chr11 5277420 5277439 5277436 +
ctttaagtagtatggcagga

SEQ ID NO: 14556 - DNA, 20 bp, Artificial Sequence
  Synthetic oligonucleotide; AAG chr11 5277434 5277453 5277450 +
gcaggaaagtcctcactata

SEQ ID NO: 14557 - DNA, 20 bp, Artificial Sequence
  Synthetic oligonucleotide; GAG chr11 5277446 5277465 5277462 +
tcactataaagttaacacct

SEQ ID NO: 14558 - DNA, 20 bp, Artificial Sequence
  Synthetic oligonucleotide; GAG chr11 5277448 5277467 5277464 +
actataaagttaacacctga

SEQ ID NO: 14559 - DNA, 20 bp, Artificial Sequence
  Synthetic oligonucleotide; GAG chr11 5277450 5277469 5277466 +
tataaagttaacacctgaga

SEQ ID NO: 14560 - DNA, 20 bp, Artificial Sequence
  Synthetic oligonucleotide; TAG chr11 5277459 5277478 5277475 +
aacacctgagagagtaccca

SEQ ID NO: 14561 - DNA, 20 bp, Artificial Sequence
  Synthetic oligonucleotide; GAG chr11 5277467 5277486 5277483 +
agagagtacccatagatgat

SEQ ID NO: 14562 - DNA, 20 bp, Artificial Sequence
  Synthetic oligonucleotide; AGG chr11 5277468 5277487 5277484 +
gagagtacccatagatgatg

SEQ ID NO: 14563 - DNA, 20 bp, Artificial Sequence
  Synthetic oligonucleotide; TAG chr11 5277503 5277522 5277519 +
tgaaactatgattaaatatt

SEQ ID NO: 14564 - DNA, 20 bp, Artificial Sequence
  Synthetic oligonucleotide; AGG chr11 5277504 5277523 5277520 +
gaaactatgattaaatattt

SEQ ID NO: 14565 - DNA, 20 bp, Artificial Sequence
  Synthetic oligonucleotide; GGG chr11 5277505 5277524 5277521 +
aaactatgattaaatattta

SEQ ID NO: 14566 - DNA, 20 bp, Artificial Sequence
  Synthetic oligonucleotide; TAG chr11 5277510 5277529 5277526 +
atgattaaatatttagggca

SEQ ID NO: 14567 - DNA, 20 bp, Artificial Sequence
  Synthetic oligonucleotide; AGG chr11 5277511 5277530 5277527 +
tgattaaatatttagggcat

SEQ ID NO: 14568 - DNA, 20 bp, Artificial Sequence
  Synthetic oligonucleotide; GGG chr11 5277512 5277531 5277528 +
gattaaatatttagggcata

SEQ ID NO: 14569 - DNA, 20 bp, Artificial Sequence
  Synthetic oligonucleotide; TGG chr11 5277517 5277536 5277533 +
aatatttagggcatagggaa

SEQ ID NO: 14570 - DNA, 20 bp, Artificial Sequence
  Synthetic oligonucleotide; AAG chr11 5277537 5277556 5277553 +
tggcaaatgtaaatacccta

SEQ ID NO: 14571 - DNA, 20 bp, Artificial Sequence
  Synthetic oligonucleotide; AAG chr11 5277544 5277563 5277560 +
tgtaaataccctaaagatgt

SEQ ID NO: 14572 - DNA, 20 bp, Artificial Sequence
  Synthetic oligonucleotide; TAG chr11 5277552 5277571 5277568 +
ccctaaagatgtaagatgct

SEQ ID NO: 14573 - DNA, 20 bp, Artificial Sequence
  Synthetic oligonucleotide; AAG chr11 5277562 5277581 5277578 +
gtaagatgcttagaattttc

SEQ ID NO: 14574 - DNA, 20 bp, Artificial Sequence
  Synthetic oligonucleotide; AGG chr11 5277563 5277582 5277579 +
taagatgcttagaattttca

SEQ ID NO: 14575 - DNA, 20 bp, Artificial Sequence
  Synthetic oligonucleotide; AAG chr11 5277575 5277594 5277591 +
aattttcaaggaatatcaat

SEQ ID NO: 14576 - DNA, 20 bp, Artificial Sequence
  Synthetic oligonucleotide; AGG chr11 5277576 5277595 5277592 +
attttcaaggaatatcaata

SEQ ID NO: 14577 - DNA, 20 bp, Artificial Sequence
  Synthetic oligonucleotide; TAG chr11 5277585 5277604 5277601 +
gaatatcaataaggccaatg

SEQ ID NO: 14578 - DNA, 20 bp, Artificial Sequence
  Synthetic oligonucleotide; AGG chr11 5277586 5277605 5277602 +
aatatcaataaggccaatgt

SEQ ID NO: 14579 - DNA, 20 bp, Artificial Sequence
  Synthetic oligonucleotide; GAG chr11 5277591 5277610 5277607 +
caataaggccaatgtaggat

SEQ ID NO: 14580 - DNA, 20 bp, Artificial Sequence
  Synthetic oligonucleotide; CGG chr11 5277597 5277616 5277613 +
ggccaatgtaggatgagatt

SEQ ID NO: 14581 - DNA, 20 bp, Artificial Sequence
  Synthetic oligonucleotide; AAG chr11 5277602 5277621 5277618 +
atgtaggatgagattcggtg

SEQ ID NO: 14582 - DNA, 20 bp, Artificial Sequence
  Synthetic oligonucleotide; AGG chr11 5277603 5277622 5277619 +
tgtaggatgagattcggtga

SEQ ID NO: 14583 - DNA, 20 bp, Artificial Sequence
  Synthetic oligonucleotide; GGG chr11 5277604 5277623 5277620 +
gtaggatgagattcggtgaa

SEQ ID NO: 14584 - DNA, 20 bp, Artificial Sequence
  Synthetic oligonucleotide; GGG chr11 5277605 5277624 5277621 +
taggatgagattcggtgaag

SEQ ID NO: 14585 - DNA, 20 bp, Artificial Sequence
  Synthetic oligonucleotide; GAG chr11 5277607 5277626 5277623 +
ggatgagattcggtgaaggg

SEQ ID NO: 14586 - DNA, 20 bp, Artificial Sequence
  Synthetic oligonucleotide; AAG chr11 5277615 5277634 5277631 +
ttcggtgaaggggagaataa

SEQ ID NO: 14587 - DNA, 20 bp, Artificial Sequence
  Synthetic oligonucleotide; GAG chr11 5277620 5277639 5277636 +
tgaaggggagaataaaagat

SEQ ID NO: 14588 - DNA, 20 bp, Artificial Sequence
  Synthetic oligonucleotide; TAG chr11 5277627 5277646 5277643 +
gagaataaaagatgagatca

SEQ ID NO: 14589 - DNA, 20 bp, Artificial Sequence
  Synthetic oligonucleotide; AAG chr11 5277630 5277649 5277646 +
aataaaagatgagatcatag

SEQ ID NO: 14590 - DNA, 20 bp, Artificial Sequence
  Synthetic oligonucleotide; TGG chr11 5277650 5277669 5277666 +
aagtcctaaattataaaatt

SEQ ID NO: 14591 - DNA, 20 bp, Artificial Sequence
  Synthetic oligonucleotide; GGG chr11 5277651 5277670 5277667 +
agtcctaaattataaaattt

SEQ ID NO: 14592 - DNA, 20 bp, Artificial Sequence
  Synthetic oligonucleotide; TAG chr11 5277675 5277694 5277691 +
cactaataatacctacatca

SEQ ID NO: 14593 - DNA, 20 bp, Artificial Sequence
  Synthetic oligonucleotide; GAG chr11 5277677 5277696 5277693 +
ctaataatacctacatcata

SEQ ID NO: 14594 - DNA, 20 bp, Artificial Sequence
  Synthetic oligonucleotide; AAG chr11 5277684 5277703 5277700 +
tacctacatcatagagttgt

SEQ ID NO: 14595 - DNA, 20 bp, Artificial Sequence
  Synthetic oligonucleotide; GAG chr11 5277735 5277754 5277751 +
atatatatatttatttatat

SEQ ID NO: 14596 - DNA, 20 bp, Artificial Sequence
  Synthetic oligonucleotide; GAG chr11 5277737 5277756 5277753 +
atatatatttatttatatga

SEQ ID NO: 14597 - DNA, 20 bp, Artificial Sequence
  Synthetic oligonucleotide; TAG chr11 5277790 5277809 5277806 +
atatgcatgaacaactattg

SEQ ID NO: 14598 - DNA, 20 bp, Artificial Sequence
  Synthetic oligonucleotide; GAG chr11 5277792 5277811 5277808 +
atgcatgaacaactattgta

SEQ ID NO: 14599 - DNA, 20 bp, Artificial Sequence
  Synthetic oligonucleotide; AAG chr11 5277801 5277820 5277817 +
caactattgtagagaattgt

SEQ ID NO: 14600 - DNA, 20 bp, Artificial Sequence
  Synthetic oligonucleotide; AGG chr11 5277802 5277821 5277818 +
aactattgtagagaattgta

SEQ ID NO: 14601 - DNA, 20 bp, Artificial Sequence
  Synthetic oligonucleotide; TGG chr11 5277808 5277827 5277824 +
tgtagagaattgtaaggatt

SEQ ID NO: 14602 - DNA, 20 bp, Artificial Sequence
  Synthetic oligonucleotide; TAG chr11 5277828 5277847 5277844 +
tggttttattataaatgata

SEQ ID NO: 14603 - DNA, 20 bp, Artificial Sequence
  Synthetic oligonucleotide; AGG chr11 5277829 5277848 5277845 +
ggttttattataaatgatat

SEQ ID NO: 14604 - DNA, 20 bp, Artificial Sequence
  Synthetic oligonucleotide; CAG chr11 5277839 5277858 5277855 +
taaatgatataggaaactat

SEQ ID NO: 14605 - DNA, 20 bp, Artificial Sequence
  Synthetic oligonucleotide; AAG chr11 5277842 5277861 5277858 +
atgatataggaaactatcag

SEQ ID NO: 14606 - DNA, 20 bp, Artificial Sequence
  Synthetic oligonucleotide; AAG chr11 5277855 5277874 5277871 +
ctatcagaagactttgaaca

SEQ ID NO: 14607 - DNA, 20 bp, Artificial Sequence
  Synthetic oligonucleotide; GAG chr11 5277857 5277876 5277873 +
atcagaagactttgaacaaa

SEQ ID NO: 14608 - DNA, 20 bp, Artificial Sequence
  Synthetic oligonucleotide; AGG chr11 5277858 5277877 5277874 +
tcagaagactttgaacaaag

SEQ ID NO: 14609 - DNA, 20 bp, Artificial Sequence
  Synthetic oligonucleotide; AAG chr11 5277887 5277906 5277903 +
tatatgacttacattttgaa

SEQ ID NO: 14610 - DNA, 20 bp, Artificial Sequence
  Synthetic oligonucleotide; TGG chr11 5277897 5277916 5277913 +
acattttgaaaagactaatt

SEQ ID NO: 14611 - DNA, 20 bp, Artificial Sequence
  Synthetic oligonucleotide; TAG chr11 5277901 5277920 5277917 +
tttgaaaagactaatttgga

SEQ ID NO: 14612 - DNA, 20 bp, Artificial Sequence
  Synthetic oligonucleotide; TGG chr11 5277909 5277928 5277925 +
gactaatttggatagtatat

SEQ ID NO: 14613 - DNA, 20 bp, Artificial Sequence
  Synthetic oligonucleotide; GGG chr11 5277910 5277929 5277926 +
actaatttggatagtatatt

SEQ ID NO: 14614 - DNA, 20 bp, Artificial Sequence
  Synthetic oligonucleotide; AAG chr11 5277913 5277932 5277929 +
aatttggatagtatattggg

SEQ ID NO: 14615 - DNA, 20 bp, Artificial Sequence
  Synthetic oligonucleotide; TAG chr11 5277922 5277941 5277938 +
agtatattgggaagaaattg

SEQ ID NO: 14616 - DNA, 20 bp, Artificial Sequence
  Synthetic oligonucleotide; TGG chr11 5277925 5277944 5277941 +
atattgggaagaaattgtag

SEQ ID NO: 14617 - DNA, 20 bp, Artificial Sequence
  Synthetic oligonucleotide; GGG chr11 5277926 5277945 5277942 +
tattgggaagaaattgtagt

SEQ ID NO: 14618 - DNA, 20 bp, Artificial Sequence
  Synthetic oligonucleotide; GGG chr11 5277927 5277946 5277943 +
attgggaagaaattgtagtg

SEQ ID NO: 14619 - DNA, 20 bp, Artificial Sequence
  Synthetic oligonucleotide; CAG chr11 5277930 5277949 5277946 +
gggaagaaattgtagtgggg

SEQ ID NO: 14620 - DNA, 20 bp, Artificial Sequence
  Synthetic oligonucleotide; TGG chr11 5277933 5277952 5277949 +
aagaaattgtagtggggcag

SEQ ID NO: 14621 - DNA, 20 bp, Artificial Sequence
  Synthetic oligonucleotide; TAG chr11 5277936 5277955 5277952 +
aaattgtagtggggcagtgg

SEQ ID NO: 14622 - DNA, 20 bp, Artificial Sequence
  Synthetic oligonucleotide; AAG chr11 5277939 5277958 5277955 +
ttgtagtggggcagtggtag

SEQ ID NO: 14623 - DNA, 20 bp, Artificial Sequence
  Synthetic oligonucleotide; CAG chr11 5277942 5277961 5277958 +
tagtggggcagtggtagaag

SEQ ID NO: 14624 - DNA, 20 bp, Artificial Sequence
  Synthetic oligonucleotide; AGG chr11 5277943 5277962 5277959 +
agtggggcagtggtagaagc

SEQ ID NO: 14625 - DNA, 20 bp, Artificial Sequence
  Synthetic oligonucleotide; AAG chr11 5277946 5277965 5277962 +
ggggcagtggtagaagcagg

SEQ ID NO: 14626 - DNA, 20 bp, Artificial Sequence
  Synthetic oligonucleotide; GAG chr11 5277957 5277976 5277973 +
agaagcaggaagattgttat

SEQ ID NO: 14627 - DNA, 20 bp, Artificial Sequence
  Synthetic oligonucleotide; CAG chr11 5277964 5277983 5277980 +
ggaagattgttatgagtcaa

SEQ ID NO: 14628 - DNA, 20 bp, Artificial Sequence
  Synthetic oligonucleotide; TAG chr11 5277975 5277994 5277991 +
atgagtcaacagctataatt

SEQ ID NO: 14629 - DNA, 20 bp, Artificial Sequence
  Synthetic oligonucleotide; AGG chr11 5277976 5277995 5277992 +
tgagtcaacagctataattt

SEQ ID NO: 14630 - DNA, 20 bp, Artificial Sequence
  Synthetic oligonucleotide; TGG chr11 5277979 5277998 5277995 +
gtcaacagctataatttagg

SEQ ID NO: 14631 - DNA, 20 bp, Artificial Sequence
  Synthetic oligonucleotide; TGG chr11 5277982 5278001 5277998 +
aacagctataatttaggtgg

SEQ ID NO: 14632 - DNA, 20 bp, Artificial Sequence
  Synthetic oligonucleotide; CAG chr11 5277988 5278007 5278004 +
tataatttaggtggtggtga

SEQ ID NO: 14633 - DNA, 20 bp, Artificial Sequence
  Synthetic oligonucleotide; TAG chr11 5277996 5278015 5278012 +
aggtggtggtgacagtgact

SEQ ID NO: 14634 - DNA, 20 bp, Artificial Sequence
  Synthetic oligonucleotide; CAG chr11 5278001 5278020 5278017 +
gtggtgacagtgacttagac

SEQ ID NO: 14635 - DNA, 20 bp, Artificial Sequence
  Synthetic oligonucleotide; GAG chr11 5278003 5278022 5278019 +
ggtgacagtgacttagacca

SEQ ID NO: 14636 - DNA, 20 bp, Artificial Sequence
  Synthetic oligonucleotide; TGG chr11 5278006 5278025 5278022 +
gacagtgacttagaccagag

SEQ ID NO: 14637 - DNA, 20 bp, Artificial Sequence
  Synthetic oligonucleotide; TAG chr11 5278009 5278028 5278025 +
agtgacttagaccagagtgg

SEQ ID NO: 14638 - DNA, 20 bp, Artificial Sequence
  Synthetic oligonucleotide; TGG chr11 5278015 5278034 5278031 +
ttagaccagagtggtagcat

SEQ ID NO: 14639 - DNA, 20 bp, Artificial Sequence
  Synthetic oligonucleotide; GAG chr11 5278017 5278036 5278033 +
agaccagagtggtagcattg

SEQ ID NO: 14640 - DNA, 20 bp, Artificial Sequence
  Synthetic oligonucleotide; AGG chr11 5278018 5278037 5278034 +
gaccagagtggtagcattgg

SEQ ID NO: 14641 - DNA, 20 bp, Artificial Sequence
  Synthetic oligonucleotide; AAG chr11 5278023 5278042 5278039 +
gagtggtagcattggaggtg

SEQ ID NO: 14642 - DNA, 20 bp, Artificial Sequence
  Synthetic oligonucleotide; AGG chr11 5278024 5278043 5278040 +
agtggtagcattggaggtga

SEQ ID NO: 14643 - DNA, 20 bp, Artificial Sequence
  Synthetic oligonucleotide; AAG chr11 5278028 5278047 5278044 +
gtagcattggaggtgaaggc

SEQ ID NO: 14644 - DNA, 20 bp, Artificial Sequence
  Synthetic oligonucleotide; AGG chr11 5278029 5278048 5278045 +
tagcattggaggtgaaggca

SEQ ID NO: 14645 - DNA, 20 bp, Artificial Sequence
  Synthetic oligonucleotide; GGG chr11 5278030 5278049 5278046 +
agcattggaggtgaaggcaa

SEQ ID NO: 14646 - DNA, 20 bp, Artificial Sequence
  Synthetic oligonucleotide; GGG chr11 5278031 5278050 5278047 +
gcattggaggtgaaggcaag

SEQ ID NO: 14647 - DNA, 20 bp, Artificial Sequence
  Synthetic oligonucleotide; CAG chr11 5278035 5278054 5278051 +
tggaggtgaaggcaaggggt

SEQ ID NO: 14648 - DNA, 20 bp, Artificial Sequence
  Synthetic oligonucleotide; CAG chr11 5278069 5278088 5278085 +
atcctttcacgaaaaaccaa

SEQ ID NO: 14649 - DNA, 20 bp, Artificial Sequence
  Synthetic oligonucleotide; AGG chr11 5278070 5278089 5278086 +
tcctttcacgaaaaaccaac

SEQ ID NO: 14650 - DNA, 20 bp, Artificial Sequence
  Synthetic oligonucleotide; CAG chr11 5278082 5278101 5278098 +
aaaccaacaggattttctga

SEQ ID NO: 14651 - DNA, 20 bp, Artificial Sequence
  Synthetic oligonucleotide; GAG chr11 5278084 5278103 5278100 +
accaacaggattttctgaca

SEQ ID NO: 14652 - DNA, 20 bp, Artificial Sequence
  Synthetic oligonucleotide; TGG chr11 5278091 5278110 5278107 +
ggattttctgacagagaata

SEQ ID NO: 14653 - DNA, 20 bp, Artificial Sequence
  Synthetic oligonucleotide; TGG chr11 5278097 5278116 5278113 +
tctgacagagaatatggaat

SEQ ID NO: 14654 - DNA, 20 bp, Artificial Sequence
  Synthetic oligonucleotide; TAG chr11 5278130 5278149 5278146 +
tgttgcactcatgcacactc

SEQ ID NO: 14655 - DNA, 20 bp, Artificial Sequence
  Synthetic oligonucleotide; TGG chr11 5278147 5278166 5278163 +
ctctagtgcatgctaatttc

SEQ ID NO: 14656 - DNA, 20 bp, Artificial Sequence
  Synthetic oligonucleotide; GAG chr11 5278154 5278173 5278170 +
gcatgctaatttctggctgt

SEQ ID NO: 14657 - DNA, 20 bp, Artificial Sequence
  Synthetic oligonucleotide; CAG chr11 5278164 5278183 5278180 +
ttctggctgtgagtatatgt

SEQ ID NO: 14658 - DNA, 20 bp, Artificial Sequence
  Synthetic oligonucleotide; GAG chr11 5278166 5278185 5278182 +
ctggctgtgagtatatgtca

SEQ ID NO: 14659 - DNA, 20 bp, Artificial Sequence
  Synthetic oligonucleotide; AAG chr11 5278170 5278189 5278186 +
ctgtgagtatatgtcagagt

SEQ ID NO: 14660 - DNA, 20 bp, Artificial Sequence
  Synthetic oligonucleotide; AGG chr11 5278171 5278190 5278187 +
tgtgagtatatgtcagagta

SEQ ID NO: 14661 - DNA, 20 bp, Artificial Sequence
  Synthetic oligonucleotide; AAG chr11 5278180 5278199 5278196 +
atgtcagagtaaggattttg

SEQ ID NO: 14662 - DNA, 20 bp, Artificial Sequence
  Synthetic oligonucleotide; TAG chr11 5278184 5278203 5278200 +
cagagtaaggattttgaagc

SEQ ID NO: 14663 - DNA, 20 bp, Artificial Sequence
  Synthetic oligonucleotide; AGG chr11 5278185 5278204 5278201 +
agagtaaggattttgaagct

SEQ ID NO: 14664 - DNA, 20 bp, Artificial Sequence
  Synthetic oligonucleotide; AAG chr11 5278190 5278209 5278206 +
aaggattttgaagctaggca

SEQ ID NO: 14665 - DNA, 20 bp, Artificial Sequence
  Synthetic oligonucleotide; GAG chr11 5278194 5278213 5278210 +
attttgaagctaggcaaagt

SEQ ID NO: 14666 - DNA, 20 bp, Artificial Sequence
  Synthetic oligonucleotide; TGG chr11 5278201 5278220 5278217 +
agctaggcaaagtgagtctt

SEQ ID NO: 14667 - DNA, 20 bp, Artificial Sequence
  Synthetic oligonucleotide; GGG chr11 5278202 5278221 5278218 +
gctaggcaaagtgagtcttt

SEQ ID NO: 14668 - DNA, 20 bp, Artificial Sequence
  Synthetic oligonucleotide; AAG chr11 5278217 5278236 5278233 +
tctttgggttgaattttgtc

SEQ ID NO: 14669 - DNA, 20 bp, Artificial Sequence
  Synthetic oligonucleotide; AGG chr11 5278218 5278237 5278234 +
ctttgggttgaattttgtca

SEQ ID NO: 14670 - DNA, 20 bp, Artificial Sequence
  Synthetic oligonucleotide; CAG chr11 5278234 5278253 5278250 +
gtcaaggtgtttgttcatca

SEQ ID NO: 14671 - DNA, 20 bp, Artificial Sequence
  Synthetic oligonucleotide; CAG chr11 5278246 5278265 5278262 +
gttcatcacagtctctacct

SEQ ID NO: 14672 - DNA, 20 bp, Artificial Sequence
  Synthetic oligonucleotide; TGG chr11 5278252 5278271 5278268 +
cacagtctctacctcagaat

SEQ ID NO: 14673 - DNA, 20 bp, Artificial Sequence
  Synthetic oligonucleotide; TGG chr11 5278264 5278283 5278280 +
ctcagaattggctttaaaat

SEQ ID NO: 14674 - DNA, 20 bp, Artificial Sequence
  Synthetic oligonucleotide; AAG chr11 5278268 5278287 5278284 +
gaattggctttaaaattgga

SEQ ID NO: 14675 - DNA, 20 bp, Artificial Sequence
  Synthetic oligonucleotide; TGG chr11 5278272 5278291 5278288 +
tggctttaaaattggaaagc

SEQ ID NO: 14676 - DNA, 20 bp, Artificial Sequence
  Synthetic oligonucleotide; GGG chr11 5278273 5278292 5278289 +
ggctttaaaattggaaagct

SEQ ID NO: 14677 - DNA, 20 bp, Artificial Sequence
  Synthetic oligonucleotide; TGG chr11 5278276 5278295 5278292 +
tttaaaattggaaagctggg

SEQ ID NO: 14678 - DNA, 20 bp, Artificial Sequence
  Synthetic oligonucleotide; GGG chr11 5278277 5278296 5278293 +
ttaaaattggaaagctgggt

SEQ ID NO: 14679 - DNA, 20 bp, Artificial Sequence
  Synthetic oligonucleotide; TGG chr11 5278280 5278299 5278296 +
aaattggaaagctgggtggg

SEQ ID NO: 14680 - DNA, 20 bp, Artificial Sequence
  Synthetic oligonucleotide; TGG chr11 5278286 5278305 5278302 +
gaaagctgggtgggtggata

SEQ ID NO: 14681 - DNA, 20 bp, Artificial Sequence
  Synthetic oligonucleotide; GAG chr11 5278293 5278312 5278309 +
gggtgggtggatatggaaat

SEQ ID NO: 14682 - DNA, 20 bp, Artificial Sequence
  Synthetic oligonucleotide; TGG chr11 5278306 5278325 5278322 +
tggaaatgagaaaccatctc

SEQ ID NO: 14683 - DNA, 20 bp, Artificial Sequence
  Synthetic oligonucleotide; GAG chr11 5278308 5278327 5278324 +
gaaatgagaaaccatctctg

SEQ ID NO: 14684 - DNA, 20 bp, Artificial Sequence
  Synthetic oligonucleotide; TAG chr11 5278332 5278351 5278348 +
ttgtctacacatcatacctt

SEQ ID NO: 14685 - DNA, 20 bp, Artificial Sequence
  Synthetic oligonucleotide; AAG chr11 5278338 5278357 5278354 +
acacatcatacctttagcca

SEQ ID NO: 14686 - DNA, 20 bp, Artificial Sequence
  Synthetic oligonucleotide; AAG chr11 5278348 5278367 5278364 +
cctttagccaaagtgacatc

SEQ ID NO: 14687 - DNA, 20 bp, Artificial Sequence
  Synthetic oligonucleotide; TGG chr11 5278358 5278377 5278374 +
aagtgacatcaagtatttct

SEQ ID NO: 14688 - DNA, 20 bp, Artificial Sequence
  Synthetic oligonucleotide; CAG chr11 5278369 5278388 5278385 +
agtatttcttggatgctgac

SEQ ID NO: 14689 - DNA, 20 bp, Artificial Sequence
  Synthetic oligonucleotide; GAG chr11 5278371 5278390 5278387 +
tatttcttggatgctgacca

SEQ ID NO: 14690 - DNA, 20 bp, Artificial Sequence
  Synthetic oligonucleotide; AGG chr11 5278372 5278391 5278388 +
atttcttggatgctgaccag

SEQ ID NO: 14691 - DNA, 20 bp, Artificial Sequence
  Synthetic oligonucleotide; GAG chr11 5278380 5278399 5278396 +
gatgctgaccagaggcttct

SEQ ID NO: 14692 - DNA, 20 bp, Artificial Sequence
  Synthetic oligonucleotide; CAG chr11 5278384 5278403 5278400 +
ctgaccagaggcttctgagc

SEQ ID NO: 14693 - DNA, 20 bp, Artificial Sequence
  Synthetic oligonucleotide; AGG chr11 5278385 5278404 5278401 +
tgaccagaggcttctgagcc

SEQ ID NO: 14694 - DNA, 20 bp, Artificial Sequence
  Synthetic oligonucleotide; TAG chr11 5278394 5278413 5278410 +
gcttctgagccaggcccctc

SEQ ID NO: 14695 - DNA, 20 bp, Artificial Sequence
  Synthetic oligonucleotide; AAG chr11 5278400 5278419 5278416 +
gagccaggcccctctagctg

SEQ ID NO: 14696 - DNA, 20 bp, Artificial Sequence
  Synthetic oligonucleotide; AGG chr11 5278401 5278420 5278417 +
agccaggcccctctagctga

SEQ ID NO: 14697 - DNA, 20 bp, Artificial Sequence
  Synthetic oligonucleotide; AAG chr11 5278404 5278423 5278420 +
caggcccctctagctgaagg

SEQ ID NO: 14698 - DNA, 20 bp, Artificial Sequence
  Synthetic oligonucleotide; CAG chr11 5278411 5278430 5278427 +
ctctagctgaaggaagttca

SEQ ID NO: 14699 - DNA, 20 bp, Artificial Sequence
  Synthetic oligonucleotide; AAG chr11 5278421 5278440 5278437 +
aggaagttcacagtttcttt

SEQ ID NO: 14700 - DNA, 20 bp, Artificial Sequence
  Synthetic oligonucleotide; AGG chr11 5278422 5278441 5278438 +
ggaagttcacagtttcttta

SEQ ID NO: 14701 - DNA, 20 bp, Artificial Sequence
  Synthetic oligonucleotide; GAG chr11 5278424 5278443 5278440 +
aagttcacagtttctttaag

SEQ ID NO: 14702 - DNA, 20 bp, Artificial Sequence
  Synthetic oligonucleotide; AGG chr11 5278425 5278444 5278441 +
agttcacagtttctttaagg

SEQ ID NO: 14703 - DNA, 20 bp, Artificial Sequence
  Synthetic oligonucleotide; GGG chr11 5278426 5278445 5278442 +
gttcacagtttctttaagga

SEQ ID NO: 14704 - DNA, 20 bp, Artificial Sequence
  Synthetic oligonucleotide; TGG chr11 5278433 5278452 5278449 +
gtttctttaaggagggaaaa

SEQ ID NO: 14705 - DNA, 20 bp, Artificial Sequence
  Synthetic oligonucleotide; TAG chr11 5278436 5278455 5278452 +
tctttaaggagggaaaatgg

SEQ ID NO: 14706 - DNA, 20 bp, Artificial Sequence
  Synthetic oligonucleotide; AAG chr11 5278441 5278460 5278457 +
aaggagggaaaatggtagat

SEQ ID NO: 14707 - DNA, 20 bp, Artificial Sequence
  Synthetic oligonucleotide; CAG chr11 5278445 5278464 5278461 +
agggaaaatggtagataagt

SEQ ID NO: 14708 - DNA, 20 bp, Artificial Sequence
  Synthetic oligonucleotide; GAG chr11 5278447 5278466 5278463 +
ggaaaatggtagataagtca

SEQ ID NO: 14709 - DNA, 20 bp, Artificial Sequence
  Synthetic oligonucleotide; CAG chr11 5278456 5278475 5278472 +
tagataagtcagagaacaat

SEQ ID NO: 14710 - DNA, 20 bp, Artificial Sequence
  Synthetic oligonucleotide; CAG chr11 5278460 5278479 5278476 +
taagtcagagaacaatcaga

SEQ ID NO: 14711 - DNA, 20 bp, Artificial Sequence
  Synthetic oligonucleotide; CGG chr11 5278472 5278491 5278488 +
caatcagacagaattctgtt

SEQ ID NO: 14712 - DNA, 20 bp, Artificial Sequence
  Synthetic oligonucleotide; CAG chr11 5278476 5278495 5278492 +
cagacagaattctgttcggt

SEQ ID NO: 14713 - DNA, 20 bp, Artificial Sequence
  Synthetic oligonucleotide; AGG chr11 5278477 5278496 5278493 +
agacagaattctgttcggtc

SEQ ID NO: 14714 - DNA, 20 bp, Artificial Sequence
  Synthetic oligonucleotide; GGG chr11 5278478 5278497 5278494 +
gacagaattctgttcggtca

SEQ ID NO: 14715 - DNA, 20 bp, Artificial Sequence
  Synthetic oligonucleotide; TGG chr11 5278488 5278507 5278504 +
tgttcggtcagggaatttga

SEQ ID NO: 14716 - DNA, 20 bp, Artificial Sequence
  Synthetic oligonucleotide; GGG chr11 5278489 5278508 5278505 +
gttcggtcagggaatttgat

SEQ ID NO: 14717 - DNA, 20 bp, Artificial Sequence
  Synthetic oligonucleotide; TAG chr11 5278531 5278550 5278547 +
tgtttgttttcgtttttctt

SEQ ID NO: 14718 - DNA, 20 bp, Artificial Sequence
  Synthetic oligonucleotide; CAG chr11 5278535 5278554 5278551 +
tgttttcgtttttctttaga

SEQ ID NO: 14719 - DNA, 20 bp, Artificial Sequence
  Synthetic oligonucleotide; GAG chr11 5278537 5278556 5278553 +
ttttcgtttttctttagaca

SEQ ID NO: 14720 - DNA, 20 bp, Artificial Sequence
  Synthetic oligonucleotide; TGG chr11 5278548 5278567 5278564 +
ctttagacagagtctcgctc

SEQ ID NO: 14721 - DNA, 20 bp, Artificial Sequence
  Synthetic oligonucleotide; GAG chr11 5278550 5278569 5278566 +
ttagacagagtctcgctctg

SEQ ID NO: 14722 - DNA, 20 bp, Artificial Sequence
  Synthetic oligonucleotide; AGG chr11 5278551 5278570 5278567 +
tagacagagtctcgctctgg

SEQ ID NO: 14723 - DNA, 20 bp, Artificial Sequence
  Synthetic oligonucleotide; TGG chr11 5278555 5278574 5278571 +
cagagtctcgctctggaggc

SEQ ID NO: 14724 - DNA, 20 bp, Artificial Sequence
  Synthetic oligonucleotide; GAG chr11 5278557 5278576 5278573 +
gagtctcgctctggaggctg

SEQ ID NO: 14725 - DNA, 20 bp, Artificial Sequence
  Synthetic oligonucleotide; TGG chr11 5278565 5278584 5278581 +
ctctggaggctggagtgcaa

SEQ ID NO: 14726 - DNA, 20 bp, Artificial Sequence
  Synthetic oligonucleotide; CAG chr11 5278581 5278600 5278597 +
gcaatggcatgatctctgct

SEQ ID NO: 14727 - DNA, 20 bp, Artificial Sequence
  Synthetic oligonucleotide; CGG chr11 5278601 5278620 5278617 +
cagtgcaaactccacctccc

SEQ ID NO: 14728 - DNA, 20 bp, Artificial Sequence
  Synthetic oligonucleotide; AAG chr11 5278607 5278626 5278623 +
aaactccacctccccggttc

SEQ ID NO: 14729 - DNA, 20 bp, Artificial Sequence
  Synthetic oligonucleotide; CAG chr11 5278624 5278643 5278640 +
ttcaagcgattctcctgcct

SEQ ID NO: 14730 - DNA, 20 bp, Artificial Sequence
  Synthetic oligonucleotide; AAG chr11 5278633 5278652 5278649 +
ttctcctgcctcagcctccc

SEQ ID NO: 14731 - DNA, 20 bp, Artificial Sequence
  Synthetic oligonucleotide; TAG chr11 5278636 5278655 5278652 +
tcctgcctcagcctcccaag

SEQ ID NO: 14732 - DNA, 20 bp, Artificial Sequence
  Synthetic oligonucleotide; TGG chr11 5278640 5278659 5278656 +
gcctcagcctcccaagtagt

SEQ ID NO: 14733 - DNA, 20 bp, Artificial Sequence
  Synthetic oligonucleotide; CAG chr11 5278647 5278666 5278663 +
cctcccaagtagttggatta

SEQ ID NO: 14734 - DNA, 20 bp, Artificial Sequence
  Synthetic oligonucleotide; AGG chr11 5278648 5278667 5278664 +
ctcccaagtagttggattac

SEQ ID NO: 14735 - DNA, 20 bp, Artificial Sequence
  Synthetic oligonucleotide; CAG chr11 5278667 5278686 5278683 +
caggctcccgtcaccacgtc

SEQ ID NO: 14736 - DNA, 20 bp, Artificial Sequence
  Synthetic oligonucleotide; AAG chr11 5278687 5278706 5278703 +
cagctaatttttatattttt

SEQ ID NO: 14737 - DNA, 20 bp, Artificial Sequence
  Synthetic oligonucleotide; CAG chr11 5278690 5278709 5278706 +
ctaatttttatatttttaag

SEQ ID NO: 14738 - DNA, 20 bp, Artificial Sequence
  Synthetic oligonucleotide; GAG chr11 5278692 5278711 5278708 +
aatttttatatttttaagca

SEQ ID NO: 14739 - DNA, 20 bp, Artificial Sequence
  Synthetic oligonucleotide; CAG chr11 5278697 5278716 5278713 +
ttatatttttaagcagagac

SEQ ID NO: 14740 - DNA, 20 bp, Artificial Sequence
  Synthetic oligonucleotide; AGG chr11 5278698 5278717 5278714 +
tatatttttaagcagagacc

SEQ ID NO: 14741 - DNA, 20 bp, Artificial Sequence
  Synthetic oligonucleotide; TGG chr11 5278712 5278731 5278728 +
gagaccaggtttcactatgt

SEQ ID NO: 14742 - DNA, 20 bp, Artificial Sequence
  Synthetic oligonucleotide; TGG chr11 5278716 5278735 5278732 +
ccaggtttcactatgttggc

SEQ ID NO: 14743 - DNA, 20 bp, Artificial Sequence
  Synthetic oligonucleotide; GGG chr11 5278717 5278736 5278733 +
caggtttcactatgttggct

SEQ ID NO: 14744 - DNA, 20 bp, Artificial Sequence
  Synthetic oligonucleotide; TGG chr11 5278721 5278740 5278737 +
tttcactatgttggctgggc

SEQ ID NO: 14745 - DNA, 20 bp, Artificial Sequence
  Synthetic oligonucleotide; AAG chr11 5278742 5278761 5278758 +
ggtgtccaactcctgacctc

SEQ ID NO: 14746 - DNA, 20 bp, Artificial Sequence
  Synthetic oligonucleotide; TGG chr11 5278759 5278778 5278775 +
ctcaagtgatctgcccacct

SEQ ID NO: 14747 - DNA, 20 bp, Artificial Sequence
  Synthetic oligonucleotide; CAG chr11 5278783 5278802 5278799 +
gtcccaaactgctgtgatta

SEQ ID NO: 14748 - DNA, 20 bp, Artificial Sequence
  Synthetic oligonucleotide; AGG chr11 5278784 5278803 5278800 +
tcccaaactgctgtgattac

SEQ ID NO: 14749 - DNA, 20 bp, Artificial Sequence
  Synthetic oligonucleotide; GAG chr11 5278786 5278805 5278802 +
ccaaactgctgtgattacag

SEQ ID NO: 14750 - DNA, 20 bp, Artificial Sequence
  Synthetic oligonucleotide; GAG chr11 5278790 5278809 5278806 +
actgctgtgattacaggagt

SEQ ID NO: 14751 - DNA, 20 bp, Artificial Sequence
  Synthetic oligonucleotide; AAG chr11 5278805 5278824 5278821 +
ggagtgagccaccgcacctc

SEQ ID NO: 14752 - DNA, 20 bp, Artificial Sequence
  Synthetic oligonucleotide; AGG chr11 5278806 5278825 5278822 +
gagtgagccaccgcacctca

SEQ ID NO: 14753 - DNA, 20 bp, Artificial Sequence
  Synthetic oligonucleotide; TAG chr11 5278820 5278839 5278836 +
acctcaaggaatttgatgtt

SEQ ID NO: 14754 - DNA, 20 bp, Artificial Sequence
  Synthetic oligonucleotide; AGG chr11 5278821 5278840 5278837 +
cctcaaggaatttgatgttt

SEQ ID NO: 14755 - DNA, 20 bp, Artificial Sequence
  Synthetic oligonucleotide; TAG chr11 5278839 5278858 5278855 +
ttaggctgtgacctctgcac

SEQ ID NO: 14756 - DNA, 20 bp, Artificial Sequence
  Synthetic oligonucleotide; AGG chr11 5278840 5278859 5278856 +
taggctgtgacctctgcact

SEQ ID NO: 14757 - DNA, 20 bp, Artificial Sequence
  Synthetic oligonucleotide; TGG chr11 5278845 5278864 5278861 +
tgtgacctctgcactaggaa

SEQ ID NO: 14758 - DNA, 20 bp, Artificial Sequence
  Synthetic oligonucleotide; AAG chr11 5278848 5278867 5278864 +
gacctctgcactaggaatgg

SEQ ID NO: 14759 - DNA, 20 bp, Artificial Sequence
  Synthetic oligonucleotide; AGG chr11 5278849 5278868 5278865 +
acctctgcactaggaatgga

SEQ ID NO: 14760 - DNA, 20 bp, Artificial Sequence
  Synthetic oligonucleotide; TAG chr11 5278853 5278872 5278869 +
ctgcactaggaatggaaggt

SEQ ID NO: 14761 - DNA, 20 bp, Artificial Sequence
  Synthetic oligonucleotide; AAG chr11 5278883 5278902 5278899 +
caccccacccttcgtcctgc

SEQ ID NO: 14762 - DNA, 20 bp, Artificial Sequence
  Synthetic oligonucleotide; CAG chr11 5278901 5278920 5278917 +
gcaagtacccaatcacactg

SEQ ID NO: 14763 - DNA, 20 bp, Artificial Sequence
  Synthetic oligonucleotide; GAG chr11 5278903 5278922 5278919 +
aagtacccaatcacactgca

SEQ ID NO: 14764 - DNA, 20 bp, Artificial Sequence
  Synthetic oligonucleotide; TAG chr11 5278922 5278941 5278938 +
agagccacacctgccttcct

SEQ ID NO: 14765 - DNA, 20 bp, Artificial Sequence
  Synthetic oligonucleotide; GAG chr11 5278924 5278943 5278940 +
agccacacctgccttcctta

SEQ ID NO: 14766 - DNA, 20 bp, Artificial Sequence
  Synthetic oligonucleotide; AGG chr11 5278925 5278944 5278941 +
gccacacctgccttccttag

SEQ ID NO: 14767 - DNA, 20 bp, Artificial Sequence
  Synthetic oligonucleotide; GAG chr11 5278946 5278965 5278962 +
ggcgtgcctccatccctgat

SEQ ID NO: 14768 - DNA, 20 bp, Artificial Sequence
  Synthetic oligonucleotide; TAG chr11 5278964 5278983 5278980 +
atgagtttttcctccatgtg

SEQ ID NO: 14769 - DNA, 20 bp, Artificial Sequence
  Synthetic oligonucleotide; AAG chr11 5278975 5278994 5278991 +
ctccatgtgtagaattgaat

SEQ ID NO: 14770 - DNA, 20 bp, Artificial Sequence
  Synthetic oligonucleotide; AAG chr11 5278978 5278997 5278994 +
catgtgtagaattgaataag

SEQ ID NO: 14771 - DNA, 20 bp, Artificial Sequence
  Synthetic oligonucleotide; AGG chr11 5278979 5278998 5278995 +
atgtgtagaattgaataaga

SEQ ID NO: 14772 - DNA, 20 bp, Artificial Sequence
  Synthetic oligonucleotide; TAG chr11 5278983 5279002 5278999 +
gtagaattgaataagaagga

SEQ ID NO: 14773 - DNA, 20 bp, Artificial Sequence
  Synthetic oligonucleotide; AAG chr11 5278999 5279018 5279015 +
aggatagaattcaatttaac

SEQ ID NO: 14774 - DNA, 20 bp, Artificial Sequence
  Synthetic oligonucleotide; GAG chr11 5279006 5279025 5279022 +
aattcaatttaacaagcttt

SEQ ID NO: 14775 - DNA, 20 bp, Artificial Sequence
  Synthetic oligonucleotide; TAG chr11 5279018 5279037 5279034 +
caagctttgagtacttccta

SEQ ID NO: 14776 - DNA, 20 bp, Artificial Sequence
  Synthetic oligonucleotide; TAG chr11 5279023 5279042 5279039 +
tttgagtacttcctatagcc

SEQ ID NO: 14777 - DNA, 20 bp, Artificial Sequence
  Synthetic oligonucleotide; AGG chr11 5279024 5279043 5279040 +
ttgagtacttcctatagcct

SEQ ID NO: 14778 - DNA, 20 bp, Artificial Sequence
  Synthetic oligonucleotide; TAG chr11 5279047 5279066 5279063 +
cattgtgctgacaactatgt

SEQ ID NO: 14779 - DNA, 20 bp, Artificial Sequence
  Synthetic oligonucleotide; GAG chr11 5279049 5279068 5279065 +
ttgtgctgacaactatgtta

SEQ ID NO: 14780 - DNA, 20 bp, Artificial Sequence
  Synthetic oligonucleotide; GAG chr11 5279051 5279070 5279067 +
gtgctgacaactatgttaga

SEQ ID NO: 14781 - DNA, 20 bp, Artificial Sequence
  Synthetic oligonucleotide; GAG chr11 5279053 5279072 5279069 +
gctgacaactatgttagaga

SEQ ID NO: 14782 - DNA, 20 bp, Artificial Sequence
  Synthetic oligonucleotide; TAG chr11 5279059 5279078 5279075 +
aactatgttagagagagaaa

SEQ ID NO: 14783 - DNA, 20 bp, Artificial Sequence
  Synthetic oligonucleotide; AAG chr11 5279064 5279083 5279080 +
tgttagagagagaaatagac

SEQ ID NO: 14784 - DNA, 20 bp, Artificial Sequence
  Synthetic oligonucleotide; CAG chr11 5279082 5279101 5279098 +
acaagctataaacttttcct

SEQ ID NO: 14785 - DNA, 20 bp, Artificial Sequence
  Synthetic oligonucleotide; AGG chr11 5279083 5279102 5279099 +
caagctataaacttttcctc

SEQ ID NO: 14786 - DNA, 20 bp, Artificial Sequence
  Synthetic oligonucleotide; TAG chr11 5279103 5279122 5279119 +
aggaccatctacataatttc

SEQ ID NO: 14787 - DNA, 20 bp, Artificial Sequence
  Synthetic oligonucleotide; AGG chr11 5279104 5279123 5279120 +
ggaccatctacataatttct

SEQ ID NO: 14788 - DNA, 20 bp, Artificial Sequence
  Synthetic oligonucleotide; TAG chr11 5279129 5279148 5279145 +
caatataaaatgaaaatgaa

SEQ ID NO: 14789 - DNA, 20 bp, Artificial Sequence
  Synthetic oligonucleotide; AAG chr11 5279149 5279168 5279165 +
tagcccctttgtcaaaaatt

SEQ ID NO: 14790 - DNA, 20 bp, Artificial Sequence
  Synthetic oligonucleotide; AGG chr11 5279150 5279169 5279166 +
agcccctttgtcaaaaatta

SEQ ID NO: 14791 - DNA, 20 bp, Artificial Sequence
  Synthetic oligonucleotide; CAG chr11 5279162 5279181 5279178 +
aaaaattaaggatttcatgt

SEQ ID NO: 14792 - DNA, 20 bp, Artificial Sequence
  Synthetic oligonucleotide; AGG chr11 5279163 5279182 5279179 +
aaaattaaggatttcatgtc

SEQ ID NO: 14793 - DNA, 20 bp, Artificial Sequence
  Synthetic oligonucleotide; CAG chr11 5279168 5279187 5279184 +
taaggatttcatgtcaggaa

SEQ ID NO: 14794 - DNA, 20 bp, Artificial Sequence
  Synthetic oligonucleotide; AAG chr11 5279172 5279191 5279188 +
gatttcatgtcaggaacagc

SEQ ID NO: 14795 - DNA, 20 bp, Artificial Sequence
  Synthetic oligonucleotide; AGG chr11 5279173 5279192 5279189 +
atttcatgtcaggaacagca

SEQ ID NO: 14796 - DNA, 20 bp, Artificial Sequence
  Synthetic oligonucleotide; AAG chr11 5279186 5279205 5279202 +
aacagcaaggatgttaaacc

SEQ ID NO: 14797 - DNA, 20 bp, Artificial Sequence
  Synthetic oligonucleotide; TGG chr11 5279191 5279210 5279207 +
caaggatgttaaaccaagca

SEQ ID NO: 14798 - DNA, 20 bp, Artificial Sequence
  Synthetic oligonucleotide; GGG chr11 5279192 5279211 5279208 +
aaggatgttaaaccaagcat

SEQ ID NO: 14799 - DNA, 20 bp, Artificial Sequence
  Synthetic oligonucleotide; GGG chr11 5279193 5279212 5279209 +
aggatgttaaaccaagcatg

SEQ ID NO: 14800 - DNA, 20 bp, Artificial Sequence
  Synthetic oligonucleotide; AAG chr11 5279201 5279220 5279217 +
aaaccaagcatggggccatc

SEQ ID NO: 14801 - DNA, 20 bp, Artificial Sequence
  Synthetic oligonucleotide; AAG chr11 5279235 5279254 5279251 +
attcatgatacgaaaaaata

SEQ ID NO: 14802 - DNA, 20 bp, Artificial Sequence
  Synthetic oligonucleotide; GAG chr11 5279237 5279256 5279253 +
tcatgatacgaaaaaataaa

SEQ ID NO: 14803 - DNA, 20 bp, Artificial Sequence
  Synthetic oligonucleotide; TAG chr11 5279245 5279264 5279261 +
cgaaaaaataaagagtattc

SEQ ID NO: 14804 - DNA, 20 bp, Artificial Sequence
  Synthetic oligonucleotide; TAG chr11 5279253 5279272 5279269 +
taaagagtattctagttatt

SEQ ID NO: 14805 - DNA, 20 bp, Artificial Sequence
  Synthetic oligonucleotide; AAG chr11 5279267 5279286 5279283 +
gttatttagccacatatttc

SEQ ID NO: 14806 - DNA, 20 bp, Artificial Sequence
  Synthetic oligonucleotide; TAG chr11 5279272 5279291 5279288 +
ttagccacatatttcaagtt

SEQ ID NO: 14807 - DNA, 20 bp, Artificial Sequence
  Synthetic oligonucleotide; TAG chr11 5279320 5279339 5279336 +
cactcaacctaaaacaatgc

SEQ ID NO: 14808 - DNA, 20 bp, Artificial Sequence
  Synthetic oligonucleotide; TAG chr11 5279329 5279348 5279345 +
taaaacaatgctagtctttc

SEQ ID NO: 14809 - DNA, 20 bp, Artificial Sequence
  Synthetic oligonucleotide; TGG chr11 5279341 5279360 5279357 +
agtctttctagacccatcca

SEQ ID NO: 14810 - DNA, 20 bp, Artificial Sequence
  Synthetic oligonucleotide; TGG chr11 5279389 5279408 5279405 +
taattaatttgtgatttaaa

SEQ ID NO: 14811 - DNA, 20 bp, Artificial Sequence
  Synthetic oligonucleotide; CAG chr11 5279401 5279420 5279417 +
gatttaaatggctcatattc

SEQ ID NO: 14812 - DNA, 20 bp, Artificial Sequence
  Synthetic oligonucleotide; CAG chr11 5279413 5279432 5279429 +
tcatattccagcctgtgcca

SEQ ID NO: 14813 - DNA, 20 bp, Artificial Sequence
  Synthetic oligonucleotide; CAG chr11 5279469 5279488 5279485 +
ttatctgtataaatactctt

SEQ ID NO: 14814 - DNA, 20 bp, Artificial Sequence
  Synthetic oligonucleotide; AGG chr11 5279470 5279489 5279486 +
tatctgtataaatactcttc

SEQ ID NO: 14815 - DNA, 20 bp, Artificial Sequence
  Synthetic oligonucleotide; TAG chr11 5279505 5279524 5279521 +
cttaatgtttgtgtttatgt

SEQ ID NO: 14816 - DNA, 20 bp, Artificial Sequence
  Synthetic oligonucleotide; TAG chr11 5279520 5279539 5279536 +
tatgttagatatgcatcatg

SEQ ID NO: 14817 - DNA, 20 bp, Artificial Sequence
  Synthetic oligonucleotide; AAG chr11 5279563 5279582 5279579 +
aaacatacacttgaaccaaa

SEQ ID NO: 14818 - DNA, 20 bp, Artificial Sequence
  Synthetic oligonucleotide; AGG chr11 5279564 5279583 5279580 +
aacatacacttgaaccaaaa

SEQ ID NO: 14819 - DNA, 20 bp, Artificial Sequence
  Synthetic oligonucleotide; AAG chr11 5279567 5279586 5279583 +
atacacttgaaccaaaaagg

SEQ ID NO: 14820 - DNA, 20 bp, Artificial Sequence
  Synthetic oligonucleotide; TAG chr11 5279578 5279597 5279594 +
ccaaaaaggaagtttttaca

SEQ ID NO: 14821 - DNA, 20 bp, Artificial Sequence
  Synthetic oligonucleotide; TAG chr11 5279608 5279627 5279624 +
aaatcttctctctgtgctct

SEQ ID NO: 14822 - DNA, 20 bp, Artificial Sequence
  Synthetic oligonucleotide; AAG chr11 5279618 5279637 5279634 +
tctgtgctcttagcgaaacc

SEQ ID NO: 14823 - DNA, 20 bp, Artificial Sequence
  Synthetic oligonucleotide; TAG chr11 5279621 5279640 5279637 +
gtgctcttagcgaaaccaag

SEQ ID NO: 14824 - DNA, 20 bp, Artificial Sequence
  Synthetic oligonucleotide; AGG chr11 5279622 5279641 5279638 +
tgctcttagcgaaaccaagt

SEQ ID NO: 14825 - DNA, 20 bp, Artificial Sequence
  Synthetic oligonucleotide; AAG chr11 5279630 5279649 5279646 +
gcgaaaccaagtaggctgac

SEQ ID NO: 14826 - DNA, 20 bp, Artificial Sequence
  Synthetic oligonucleotide; CAG chr11 5279647 5279666 5279663 +
gacaagacatcattcattca

SEQ ID NO: 14827 - DNA, 20 bp, Artificial Sequence
  Synthetic oligonucleotide; GAG chr11 5279657 5279676 5279673 +
cattcattcacagcgaaacc

SEQ ID NO: 14828 - DNA, 20 bp, Artificial Sequence
  Synthetic oligonucleotide; TAG chr11 5279660 5279679 5279676 +
tcattcacagcgaaaccgag

SEQ ID NO: 14829 - DNA, 20 bp, Artificial Sequence
  Synthetic oligonucleotide; AAG chr11 5279669 5279688 5279685 +
gcgaaaccgagtagactgac

SEQ ID NO: 14830 - DNA, 20 bp, Artificial Sequence
  Synthetic oligonucleotide; GAG chr11 5279671 5279690 5279687 +
gaaaccgagtagactgacaa

SEQ ID NO: 14831 - DNA, 20 bp, Artificial Sequence
  Synthetic oligonucleotide; AGG chr11 5279672 5279691 5279688 +
aaaccgagtagactgacaag

SEQ ID NO: 14832 - DNA, 20 bp, Artificial Sequence
  Synthetic oligonucleotide; CAG chr11 5279703 5279722 5279719 +
tcacaaatgaatacaaaaaa

SEQ ID NO: 14833 - DNA, 20 bp, Artificial Sequence
  Synthetic oligonucleotide; AAG chr11 5279710 5279729 5279726 +
tgaatacaaaaaacagtgtc

SEQ ID NO: 14834 - DNA, 20 bp, Artificial Sequence
  Synthetic oligonucleotide; GAG chr11 5279720 5279739 5279736 +
aaacagtgtcaagtatacgt

SEQ ID NO: 14835 - DNA, 20 bp, Artificial Sequence
  Synthetic oligonucleotide; AGG chr11 5279721 5279740 5279737 +
aacagtgtcaagtatacgtg

SEQ ID NO: 14836 - DNA, 20 bp, Artificial Sequence
  Synthetic oligonucleotide; TGG chr11 5279732 5279751 5279748 +
gtatacgtgaggtcctgtaa

SEQ ID NO: 14837 - DNA, 20 bp, Artificial Sequence
  Synthetic oligonucleotide; GGG chr11 5279733 5279752 5279749 +
tatacgtgaggtcctgtaat

SEQ ID NO: 14838 - DNA, 20 bp, Artificial Sequence
  Synthetic oligonucleotide; TGG chr11 5279739 5279758 5279755 +
tgaggtcctgtaatgggtcc

SEQ ID NO: 14839 - DNA, 20 bp, Artificial Sequence
  Synthetic oligonucleotide; GGG chr11 5279740 5279759 5279756 +
gaggtcctgtaatgggtcct

SEQ ID NO: 14840 - DNA, 20 bp, Artificial Sequence
  Synthetic oligonucleotide; CAG chr11 5279758 5279777 5279774 +
ctgggcctgcaaaaccctca

SEQ ID NO: 14841 - DNA, 20 bp, Artificial Sequence
  Synthetic oligonucleotide; AAG chr11 5279772 5279791 5279788 +
ccctcacagctgctaacctc

SEQ ID NO: 14842 - DNA, 20 bp, Artificial Sequence
  Synthetic oligonucleotide; AAG chr11 5279775 5279794 5279791 +
tcacagctgctaacctcaag

SEQ ID NO: 14843 - DNA, 20 bp, Artificial Sequence
  Synthetic oligonucleotide; CAG chr11 5279780 5279799 5279796 +
gctgctaacctcaagaagct

SEQ ID NO: 14844 - DNA, 20 bp, Artificial Sequence
  Synthetic oligonucleotide; TGG chr11 5279783 5279802 5279799 +
gctaacctcaagaagctcag

SEQ ID NO: 14845 - DNA, 20 bp, Artificial Sequence
  Synthetic oligonucleotide; GAG chr11 5279785 5279804 5279801 +
taacctcaagaagctcagtg

SEQ ID NO: 14846 - DNA, 20 bp, Artificial Sequence
  Synthetic oligonucleotide; TAG chr11 5279868 5279887 5279884 +
taaatttgttcctttttgta

SEQ ID NO: 14847 - DNA, 20 bp, Artificial Sequence
  Synthetic oligonucleotide; AAG chr11 5279877 5279896 5279893 +
tcctttttgtatagttcctt

SEQ ID NO: 14848 - DNA, 20 bp, Artificial Sequence
  Synthetic oligonucleotide; CAG chr11 5279923 5279942 5279939 +
tttgccactgtgaactccta

SEQ ID NO: 14849 - DNA, 20 bp, Artificial Sequence
  Synthetic oligonucleotide; AAG chr11 5279926 5279945 5279942 +
gccactgtgaactcctacag

SEQ ID NO: 14850 - DNA, 20 bp, Artificial Sequence
  Synthetic oligonucleotide; CAG chr11 5279930 5279949 5279946 +
ctgtgaactcctacagaagc

SEQ ID NO: 14851 - DNA, 20 bp, Artificial Sequence
  Synthetic oligonucleotide; AAG chr11 5279938 5279957 5279954 +
tcctacagaagccagcttca

SEQ ID NO: 14852 - DNA, 20 bp, Artificial Sequence
  Synthetic oligonucleotide; TGG chr11 5279950 5279969 5279966 +
cagcttcaaagccattcttc

SEQ ID NO: 14853 - DNA, 20 bp, Artificial Sequence
  Synthetic oligonucleotide; AAG chr11 5279953 5279972 5279969 +
cttcaaagccattcttctgg

SEQ ID NO: 14854 - DNA, 20 bp, Artificial Sequence
  Synthetic oligonucleotide; AAG chr11 5279994 5280013 5280010 +
cctcctgttttttctcccac

SEQ ID NO: 14855 - DNA, 20 bp, Artificial Sequence
  Synthetic oligonucleotide; TAG chr11 5280033 5280052 5280049 +
cattgtttttcatcctcttg

SEQ ID NO: 14856 - DNA, 20 bp, Artificial Sequence
  Synthetic oligonucleotide; CAG chr11 5280043 5280062 5280059 +
catcctcttgtagtccttca

SEQ ID NO: 14857 - DNA, 20 bp, Artificial Sequence
  Synthetic oligonucleotide; CAG chr11 5280055 5280074 5280071 +
gtccttcacagttacccaca

SEQ ID NO: 14858 - DNA, 20 bp, Artificial Sequence
  Synthetic oligonucleotide; AGG chr11 5280056 5280075 5280072 +
tccttcacagttacccacac

SEQ ID NO: 14859 - DNA, 20 bp, Artificial Sequence
  Synthetic oligonucleotide; TAG chr11 5280069 5280088 5280085 +
cccacacaggtgaacccttt

SEQ ID NO: 14860 - DNA, 20 bp, Artificial Sequence
  Synthetic oligonucleotide; TGG chr11 5280078 5280097 5280094 +
gtgaacccttttagctctcc

SEQ ID NO: 14861 - DNA, 20 bp, Artificial Sequence
  Synthetic oligonucleotide; GAG chr11 5280080 5280099 5280096 +
gaacccttttagctctcctg

SEQ ID NO: 14862 - DNA, 20 bp, Artificial Sequence
  Synthetic oligonucleotide; AGG chr11 5280081 5280100 5280097 +
aacccttttagctctcctgg

SEQ ID NO: 14863 - DNA, 20 bp, Artificial Sequence
  Synthetic oligonucleotide; CAG chr11 5280100 5280119 5280116 +
gaggaatgtttctttcctct

SEQ ID NO: 14864 - DNA, 20 bp, Artificial Sequence
  Synthetic oligonucleotide; AGG chr11 5280101 5280120 5280117 +
aggaatgtttctttcctctc

SEQ ID NO: 14865 - DNA, 20 bp, Artificial Sequence
  Synthetic oligonucleotide; CAG chr11 5280106 5280125 5280122 +
tgtttctttcctctcaggat

SEQ ID NO: 14866 - DNA, 20 bp, Artificial Sequence
  Synthetic oligonucleotide; GAG chr11 5280108 5280127 5280124 +
tttctttcctctcaggatca

SEQ ID NO: 14867 - DNA, 20 bp, Artificial Sequence
  Synthetic oligonucleotide; AAG chr11 5280135 5280154 5280151 +
ctacatcttcctaatgcacc

SEQ ID NO: 14868 - DNA, 20 bp, Artificial Sequence
  Synthetic oligonucleotide; TGG chr11 5280140 5280159 5280156 +
tcttcctaatgcaccaagac

SEQ ID NO: 14869 - DNA, 20 bp, Artificial Sequence
  Synthetic oligonucleotide; GAG chr11 5280146 5280165 5280162 +
taatgcaccaagactggcct

SEQ ID NO: 14870 - DNA, 20 bp, Artificial Sequence
  Synthetic oligonucleotide; AAG chr11 5280159 5280178 5280175 +
ctggcctgagatgtatcctt

SEQ ID NO: 14871 - DNA, 20 bp, Artificial Sequence
  Synthetic oligonucleotide; GAG chr11 5280164 5280183 5280180 +
ctgagatgtatccttaagat

SEQ ID NO: 14872 - DNA, 20 bp, Artificial Sequence
  Synthetic oligonucleotide; GAG chr11 5280166 5280185 5280182 +
gagatgtatccttaagatga

SEQ ID NO: 14873 - DNA, 20 bp, Artificial Sequence
  Synthetic oligonucleotide; CAG chr11 5280174 5280193 5280190 +
tccttaagatgagagcttcc

SEQ ID NO: 14874 - DNA, 20 bp, Artificial Sequence
  Synthetic oligonucleotide; TAG chr11 5280177 5280196 5280193 +
ttaagatgagagcttcccag

SEQ ID NO: 14875 - DNA, 20 bp, Artificial Sequence
  Synthetic oligonucleotide; AAG chr11 5280186 5280205 5280202 +
gagcttcccagtagcacccc

SEQ ID NO: 14876 - DNA, 20 bp, Artificial Sequence
  Synthetic oligonucleotide; CAG chr11 5280190 5280209 5280206 +
ttcccagtagcaccccaagt

SEQ ID NO: 14877 - DNA, 20 bp, Artificial Sequence
  Synthetic oligonucleotide; GAG chr11 5280209 5280228 5280225 +
tcagatctgaccccgtatgt

SEQ ID NO: 14878 - DNA, 20 bp, Artificial Sequence
  Synthetic oligonucleotide; CAG chr11 5280226 5280245 5280242 +
tgtgagcatgtgtcctctaa

SEQ ID NO: 14879 - DNA, 20 bp, Artificial Sequence
  Synthetic oligonucleotide; CAG chr11 5280231 5280250 5280247 +
gcatgtgtcctctaacagca

SEQ ID NO: 14880 - DNA, 20 bp, Artificial Sequence
  Synthetic oligonucleotide; AGG chr11 5280232 5280251 5280248 +
catgtgtcctctaacagcac

SEQ ID NO: 14881 - DNA, 20 bp, Artificial Sequence
  Synthetic oligonucleotide; TAG chr11 5280247 5280266 5280263 +
agcacaggccttttgccacc

SEQ ID NO: 14882 - DNA, 20 bp, Artificial Sequence
  Synthetic oligonucleotide; CAG chr11 5280255 5280274 5280271 +
ccttttgccacctagctgtc

SEQ ID NO: 14883 - DNA, 20 bp, Artificial Sequence
  Synthetic oligonucleotide; AGG chr11 5280256 5280275 5280272 +
cttttgccacctagctgtcc

SEQ ID NO: 14884 - DNA, 20 bp, Artificial Sequence
  Synthetic oligonucleotide; GGG chr11 5280257 5280276 5280273 +
ttttgccacctagctgtcca

SEQ ID NO: 14885 - DNA, 20 bp, Artificial Sequence
  Synthetic oligonucleotide; GGG chr11 5280258 5280277 5280274 +
tttgccacctagctgtccag

SEQ ID NO: 14886 - DNA, 20 bp, Artificial Sequence
  Synthetic oligonucleotide; TGG chr11 5280271 5280290 5280287 +
tgtccaggggtgccttaaaa

SEQ ID NO: 14887 - DNA, 20 bp, Artificial Sequence
  Synthetic oligonucleotide; AAG chr11 5280279 5280298 5280295 +
ggtgccttaaaatggcaaac

SEQ ID NO: 14888 - DNA, 20 bp, Artificial Sequence
  Synthetic oligonucleotide; AGG chr11 5280280 5280299 5280296 +
gtgccttaaaatggcaaaca

SEQ ID NO: 14889 - DNA, 20 bp, Artificial Sequence
  Synthetic oligonucleotide; TAG chr11 5280350 5280369 5280366 +
ttcatattaatacatgtgta

SEQ ID NO: 14890 - DNA, 20 bp, Artificial Sequence
  Synthetic oligonucleotide; AAG chr11 5280383 5280402 5280399 +
tctatacacatgtattaata

SEQ ID NO: 14891 - DNA, 20 bp, Artificial Sequence
  Synthetic oligonucleotide; TAG chr11 5280403 5280422 5280419 +
aagcctgattctgccgcttc

SEQ ID NO: 14892 - DNA, 20 bp, Artificial Sequence
  Synthetic oligonucleotide; AGG chr11 5280404 5280423 5280420 +
agcctgattctgccgcttct

SEQ ID NO: 14893 - DNA, 20 bp, Artificial Sequence
  Synthetic oligonucleotide; TAG chr11 5280409 5280428 5280425 +
gattctgccgcttctaggta

SEQ ID NO: 14894 - DNA, 20 bp, Artificial Sequence
  Synthetic oligonucleotide; GAG chr11 5280411 5280430 5280427 +
ttctgccgcttctaggtata

SEQ ID NO: 14895 - DNA, 20 bp, Artificial Sequence
  Synthetic oligonucleotide; AGG chr11 5280412 5280431 5280428 +
tctgccgcttctaggtatag

SEQ ID NO: 14896 - DNA, 20 bp, Artificial Sequence
  Synthetic oligonucleotide; AAG chr11 5280423 5280442 5280439 +
taggtatagaggccacctgc

SEQ ID NO: 14897 - DNA, 20 bp, Artificial Sequence
  Synthetic oligonucleotide; TGG chr11 5280460 5280479 5280476 +
cacaataactaatcattcta

SEQ ID NO: 14898 - DNA, 20 bp, Artificial Sequence
  Synthetic oligonucleotide; CAG chr11 5280530 5280549 5280546 +
tgtatatatatatatatatt

SEQ ID NO: 14899 - DNA, 20 bp, Artificial Sequence
  Synthetic oligonucleotide; AGG chr11 5280531 5280550 5280547 +
gtatatatatatatatattc

SEQ ID NO: 14900 - DNA, 20 bp, Artificial Sequence
  Synthetic oligonucleotide; TAG chr11 5280547 5280566 5280563 +
attcaggaaataatatattc

SEQ ID NO: 14901 - DNA, 20 bp, Artificial Sequence
  Synthetic oligonucleotide; CAG chr11 5280569 5280588 5280585 +
gaatatgtcacattctgtct

SEQ ID NO: 14902 - DNA, 20 bp, Artificial Sequence
  Synthetic oligonucleotide; AGG chr11 5280570 5280589 5280586 +
aatatgtcacattctgtctc

SEQ ID NO: 14903 - DNA, 20 bp, Artificial Sequence
  Synthetic oligonucleotide; GAG chr11 5280599 5280618 5280615 +
ttttctttatgatgccgttt

SEQ ID NO: 14904 - DNA, 20 bp, Artificial Sequence
  Synthetic oligonucleotide; AGG chr11 5280600 5280619 5280616 +
tttctttatgatgccgtttg

SEQ ID NO: 14905 - DNA, 20 bp, Artificial Sequence
  Synthetic oligonucleotide; TGG chr11 5280603 5280622 5280619 +
ctttatgatgccgtttgagg

SEQ ID NO: 14906 - DNA, 20 bp, Artificial Sequence
  Synthetic oligonucleotide; GAG chr11 5280605 5280624 5280621 +
ttatgatgccgtttgaggtg

SEQ ID NO: 14907 - DNA, 20 bp, Artificial Sequence
  Synthetic oligonucleotide; TAG chr11 5280611 5280630 5280627 +
tgccgtttgaggtggagttt

SEQ ID NO: 14908 - DNA, 20 bp, Artificial Sequence
  Synthetic oligonucleotide; CAG chr11 5280615 5280634 5280631 +
gtttgaggtggagttttagt

SEQ ID NO: 14909 - DNA, 20 bp, Artificial Sequence
  Synthetic oligonucleotide; AGG chr11 5280616 5280635 5280632 +
tttgaggtggagttttagtc

SEQ ID NO: 14910 - DNA, 20 bp, Artificial Sequence
  Synthetic oligonucleotide; TGG chr11 5280619 5280638 5280635 +
gaggtggagttttagtcagg

SEQ ID NO: 14911 - DNA, 20 bp, Artificial Sequence
  Synthetic oligonucleotide; CAG chr11 5280623 5280642 5280639 +
tggagttttagtcaggtggt

SEQ ID NO: 14912 - DNA, 20 bp, Artificial Sequence
  Synthetic oligonucleotide; AAG chr11 5280655 5280674 5280671 +
ttttttgccatctgccctgt

SEQ ID NO: 14913 - DNA, 20 bp, Artificial Sequence
  Synthetic oligonucleotide; TGG chr11 5280666 5280685 5280682 +
ctgccctgtaagcatcctgc

SEQ ID NO: 14914 - DNA, 20 bp, Artificial Sequence
  Synthetic oligonucleotide; GGG chr11 5280667 5280686 5280683 +
tgccctgtaagcatcctgct

SEQ ID NO: 14915 - DNA, 20 bp, Artificial Sequence
  Synthetic oligonucleotide; GGG chr11 5280668 5280687 5280684 +
gccctgtaagcatcctgctg

SEQ ID NO: 14916 - DNA, 20 bp, Artificial Sequence
  Synthetic oligonucleotide; CAG chr11 5280674 5280693 5280690 +
taagcatcctgctggggacc

SEQ ID NO: 14917 - DNA, 20 bp, Artificial Sequence
  Synthetic oligonucleotide; TAG chr11 5280678 5280697 5280694 +
catcctgctggggacccaga

SEQ ID NO: 14918 - DNA, 20 bp, Artificial Sequence
  Synthetic oligonucleotide; AGG chr11 5280679 5280698 5280695 +
atcctgctggggacccagat

SEQ ID NO: 14919 - DNA, 20 bp, Artificial Sequence
  Synthetic oligonucleotide; GAG chr11 5280681 5280700 5280697 +
cctgctggggacccagatag

SEQ ID NO: 14920 - DNA, 20 bp, Artificial Sequence
  Synthetic oligonucleotide; TAG chr11 5280693 5280712 5280709 +
ccagataggagtcatcactc

SEQ ID NO: 14921 - DNA, 20 bp, Artificial Sequence
  Synthetic oligonucleotide; AGG chr11 5280694 5280713 5280710 +
cagataggagtcatcactct

SEQ ID NO: 14922 - DNA, 20 bp, Artificial Sequence
  Synthetic oligonucleotide; GAG chr11 5280699 5280718 5280715 +
aggagtcatcactctaggct

SEQ ID NO: 14923 - DNA, 20 bp, Artificial Sequence
  Synthetic oligonucleotide; TGG chr11 5280708 5280727 5280724 +
cactctaggctgagaacatc

SEQ ID NO: 14924 - DNA, 20 bp, Artificial Sequence
  Synthetic oligonucleotide; GGG chr11 5280709 5280728 5280725 +
actctaggctgagaacatct

SEQ ID NO: 14925 - DNA, 20 bp, Artificial Sequence
  Synthetic oligonucleotide; AAG chr11 5280722 5280741 5280738 +
aacatctgggcacacaccct

SEQ ID NO: 14926 - DNA, 20 bp, Artificial Sequence
  Synthetic oligonucleotide; CAG chr11 5280728 5280747 5280744 +
tgggcacacaccctaagcct

SEQ ID NO: 14927 - DNA, 20 bp, Artificial Sequence
  Synthetic oligonucleotide; CAG chr11 5280748 5280767 5280764 +
cagcatgactcatcatgact

SEQ ID NO: 14928 - DNA, 20 bp, Artificial Sequence
  Synthetic oligonucleotide; GAG chr11 5280764 5280783 5280780 +
gactcagcattgctgtgctt

SEQ ID NO: 14929 - DNA, 20 bp, Artificial Sequence
  Synthetic oligonucleotide; CAG chr11 5280768 5280787 5280784 +
cagcattgctgtgcttgagc

SEQ ID NO: 14930 - DNA, 20 bp, Artificial Sequence
  Synthetic oligonucleotide; AAG chr11 5280771 5280790 5280787 +
cattgctgtgcttgagccag

SEQ ID NO: 14931 - DNA, 20 bp, Artificial Sequence
  Synthetic oligonucleotide; AGG chr11 5280772 5280791 5280788 +
attgctgtgcttgagccaga

SEQ ID NO: 14932 - DNA, 20 bp, Artificial Sequence
  Synthetic oligonucleotide; TAG chr11 5280781 5280800 5280797 +
cttgagccagaaggtttgct

SEQ ID NO: 14933 - DNA, 20 bp, Artificial Sequence
  Synthetic oligonucleotide; AAG chr11 5280784 5280803 5280800 +
gagccagaaggtttgcttag

SEQ ID NO: 14934 - DNA, 20 bp, Artificial Sequence
  Synthetic oligonucleotide; AGG chr11 5280785 5280804 5280801 +
agccagaaggtttgcttaga

SEQ ID NO: 14935 - DNA, 20 bp, Artificial Sequence
  Synthetic oligonucleotide; CAG chr11 5280793 5280812 5280809 +
ggtttgcttagaaggttaca

SEQ ID NO: 14936 - DNA, 20 bp, Artificial Sequence
  Synthetic oligonucleotide; CAG chr11 5280799 5280818 5280815 +
cttagaaggttacacagaac

SEQ ID NO: 14937 - DNA, 20 bp, Artificial Sequence
  Synthetic oligonucleotide; AAG chr11 5280802 5280821 5280818 +
agaaggttacacagaaccag

SEQ ID NO: 14938 - DNA, 20 bp, Artificial Sequence
  Synthetic oligonucleotide; AGG chr11 5280803 5280822 5280819 +
gaaggttacacagaaccaga

SEQ ID NO: 14939 - DNA, 20 bp, Artificial Sequence
  Synthetic oligonucleotide; CGG chr11 5280806 5280825 5280822 +
ggttacacagaaccagaagg

SEQ ID NO: 14940 - DNA, 20 bp, Artificial Sequence
  Synthetic oligonucleotide; GGG chr11 5280807 5280826 5280823 +
gttacacagaaccagaaggc

SEQ ID NO: 14941 - DNA, 20 bp, Artificial Sequence
  Synthetic oligonucleotide; GGG chr11 5280808 5280827 5280824 +
ttacacagaaccagaaggcg

SEQ ID NO: 14942 - DNA, 20 bp, Artificial Sequence
  Synthetic oligonucleotide; GGG chr11 5280809 5280828 5280825 +
tacacagaaccagaaggcgg

SEQ ID NO: 14943 - DNA, 20 bp, Artificial Sequence
  Synthetic oligonucleotide; TGG chr11 5280812 5280831 5280828 +
acagaaccagaaggcggggg

SEQ ID NO: 14944 - DNA, 20 bp, Artificial Sequence
  Synthetic oligonucleotide; GGG chr11 5280813 5280832 5280829 +
cagaaccagaaggcgggggt

SEQ ID NO: 14945 - DNA, 20 bp, Artificial Sequence
  Synthetic oligonucleotide; GGG chr11 5280814 5280833 5280830 +
agaaccagaaggcgggggtg

SEQ ID NO: 14946 - DNA, 20 bp, Artificial Sequence
  Synthetic oligonucleotide; CAG chr11 5280829 5280848 5280845 +
gggtggggcactgaccccga

SEQ ID NO: 14947 - DNA, 20 bp, Artificial Sequence
  Synthetic oligonucleotide; AGG chr11 5280830 5280849 5280846 +
ggtggggcactgaccccgac

SEQ ID NO: 14948 - DNA, 20 bp, Artificial Sequence
  Synthetic oligonucleotide; GGG chr11 5280831 5280850 5280847 +
gtggggcactgaccccgaca

SEQ ID NO: 14949 - DNA, 20 bp, Artificial Sequence
  Synthetic oligonucleotide; GGG chr11 5280832 5280851 5280848 +
tggggcactgaccccgacag

SEQ ID NO: 14950 - DNA, 20 bp, Artificial Sequence
  Synthetic oligonucleotide; TGG chr11 5280837 5280856 5280853 +
cactgaccccgacaggggcc

SEQ ID NO: 14951 - DNA, 20 bp, Artificial Sequence
  Synthetic oligonucleotide; CAG chr11 5280841 5280860 5280857 +
gaccccgacaggggcctggc

SEQ ID NO: 14952 - DNA, 20 bp, Artificial Sequence
  Synthetic oligonucleotide; TGG chr11 5280857 5280876 5280873 +
tggccagaactgctcatgct

SEQ ID NO: 14953 - DNA, 20 bp, Artificial Sequence
  Synthetic oligonucleotide; TGG chr11 5280864 5280883 5280880 +
aactgctcatgcttggacta

SEQ ID NO: 14954 - DNA, 20 bp, Artificial Sequence
  Synthetic oligonucleotide; GGG chr11 5280865 5280884 5280881 +
actgctcatgcttggactat

SEQ ID NO: 14955 - DNA, 20 bp, Artificial Sequence
  Synthetic oligonucleotide; GAG chr11 5280867 5280886 5280883 +
tgctcatgcttggactatgg

SEQ ID NO: 14956 - DNA, 20 bp, Artificial Sequence
  Synthetic oligonucleotide; AGG chr11 5280868 5280887 5280884 +
gctcatgcttggactatggg

SEQ ID NO: 14957 - DNA, 20 bp, Artificial Sequence
  Synthetic oligonucleotide; TGG chr11 5280878 5280897 5280894 +
ggactatgggaggtcactaa

SEQ ID NO: 14958 - DNA, 20 bp, Artificial Sequence
  Synthetic oligonucleotide; GAG chr11 5280880 5280899 5280896 +
actatgggaggtcactaatg

SEQ ID NO: 14959 - DNA, 20 bp, Artificial Sequence
  Synthetic oligonucleotide; CAG chr11 5280888 5280907 5280904 +
aggtcactaatggagacaca

SEQ ID NO: 14960 - DNA, 20 bp, Artificial Sequence
  Synthetic oligonucleotide; CAG chr11 5280899 5280918 5280915 +
ggagacacacagaaatgtaa

SEQ ID NO: 14961 - DNA, 20 bp, Artificial Sequence
  Synthetic oligonucleotide; AGG chr11 5280900 5280919 5280916 +
gagacacacagaaatgtaac

SEQ ID NO: 14962 - DNA, 20 bp, Artificial Sequence
  Synthetic oligonucleotide; AAG chr11 5280907 5280926 5280923 +
acagaaatgtaacaggaact

SEQ ID NO: 14963 - DNA, 20 bp, Artificial Sequence
  Synthetic oligonucleotide; AGG chr11 5280908 5280927 5280924 +
cagaaatgtaacaggaacta

SEQ ID NO: 14964 - DNA, 20 bp, Artificial Sequence
  Synthetic oligonucleotide; AAG chr11 5280919 5280938 5280935 +
caggaactaaggaaaaactg

SEQ ID NO: 14965 - DNA, 20 bp, Artificial Sequence
  Synthetic oligonucleotide; CAG chr11 5280932 5280951 5280948 +
aaaactgaagcttatttaat

SEQ ID NO: 14966 - DNA, 20 bp, Artificial Sequence
  Synthetic oligonucleotide; GAG chr11 5280934 5280953 5280950 +
aactgaagcttatttaatca

SEQ ID NO: 14967 - DNA, 20 bp, Artificial Sequence
  Synthetic oligonucleotide; GAG chr11 5280939 5280958 5280955 +
aagcttatttaatcagagat

SEQ ID NO: 14968 - DNA, 20 bp, Artificial Sequence
  Synthetic oligonucleotide; AGG chr11 5280940 5280959 5280956 +
agcttatttaatcagagatg

SEQ ID NO: 14969 - DNA, 20 bp, Artificial Sequence
  Synthetic oligonucleotide; TGG chr11 5280947 5280966 5280963 +
ttaatcagagatgaggatgc

SEQ ID NO: 14970 - DNA, 20 bp, Artificial Sequence
  Synthetic oligonucleotide; AAG chr11 5280950 5280969 5280966 +
atcagagatgaggatgctgg

SEQ ID NO: 14971 - DNA, 20 bp, Artificial Sequence
  Synthetic oligonucleotide; AGG chr11 5280951 5280970 5280967 +
tcagagatgaggatgctgga

SEQ ID NO: 14972 - DNA, 20 bp, Artificial Sequence
  Synthetic oligonucleotide; GGG chr11 5280952 5280971 5280968 +
cagagatgaggatgctggaa

SEQ ID NO: 14973 - DNA, 20 bp, Artificial Sequence
  Synthetic oligonucleotide; TAG chr11 5280956 5280975 5280972 +
gatgaggatgctggaaggga

SEQ ID NO: 14974 - DNA, 20 bp, Artificial Sequence
  Synthetic oligonucleotide; GAG chr11 5280958 5280977 5280974 +
tgaggatgctggaagggata

SEQ ID NO: 14975 - DNA, 20 bp, Artificial Sequence
  Synthetic oligonucleotide; AGG chr11 5280959 5280978 5280975 +
gaggatgctggaagggatag

SEQ ID NO: 14976 - DNA, 20 bp, Artificial Sequence
  Synthetic oligonucleotide; GGG chr11 5280960 5280979 5280976 +
aggatgctggaagggataga

SEQ ID NO: 14977 - DNA, 20 bp, Artificial Sequence
  Synthetic oligonucleotide; GAG chr11 5280962 5280981 5280978 +
gatgctggaagggatagagg

SEQ ID NO: 14978 - DNA, 20 bp, Artificial Sequence
  Synthetic oligonucleotide; GAG chr11 5280967 5280986 5280983 +
tggaagggatagagggagct

SEQ ID NO: 14979 - DNA, 20 bp, Artificial Sequence
  Synthetic oligonucleotide; AAG chr11 5280978 5280997 5280994 +
gagggagctgagcttgtaaa

SEQ ID NO: 14980 - DNA, 20 bp, Artificial Sequence
  Synthetic oligonucleotide; TAG chr11 5280983 5281002 5280999 +
agctgagcttgtaaaaagta

SEQ ID NO: 14981 - DNA, 20 bp, Artificial Sequence
  Synthetic oligonucleotide; CAG chr11 5280994 5281013 5281010 +
taaaaagtatagtaatcatt

SEQ ID NO: 14982 - DNA, 20 bp, Artificial Sequence
  Synthetic oligonucleotide; TGG chr11 5281001 5281020 5281017 +
tatagtaatcattcagcaaa

SEQ ID NO: 14983 - DNA, 20 bp, Artificial Sequence
  Synthetic oligonucleotide; AAG chr11 5281009 5281028 5281025 +
tcattcagcaaatggttttg

SEQ ID NO: 14984 - DNA, 20 bp, Artificial Sequence
  Synthetic oligonucleotide; TGG chr11 5281019 5281038 5281035 +
aatggttttgaagcacctgc

SEQ ID NO: 14985 - DNA, 20 bp, Artificial Sequence
  Synthetic oligonucleotide; CAG chr11 5281039 5281058 5281055 +
tggatgctaaacactatttt

SEQ ID NO: 14986 - DNA, 20 bp, Artificial Sequence
  Synthetic oligonucleotide; AAG chr11 5281058 5281077 5281074 +
tcagtgcttgaatcataaat

SEQ ID NO: 14987 - DNA, 20 bp, Artificial Sequence
  Synthetic oligonucleotide; AAG chr11 5281087 5281106 5281103 +
acatgtatcttattccccac

SEQ ID NO: 14988 - DNA, 20 bp, Artificial Sequence
  Synthetic oligonucleotide; GAG chr11 5281089 5281108 5281105 +
atgtatcttattccccacaa

SEQ ID NO: 14989 - DNA, 20 bp, Artificial Sequence
  Synthetic oligonucleotide; AAG chr11 5281095 5281114 5281111 +
cttattccccacaagagtcc

SEQ ID NO: 14990 - DNA, 20 bp, Artificial Sequence
  Synthetic oligonucleotide; CAG chr11 5281108 5281127 5281124 +
agagtccaagtaaaaaataa

SEQ ID NO: 14991 - DNA, 20 bp, Artificial Sequence
  Synthetic oligonucleotide; CAG chr11 5281135 5281154 5281151 +
ttataatgtgctctgtcccc

SEQ ID NO: 14992 - DNA, 20 bp, Artificial Sequence
  Synthetic oligonucleotide; AGG chr11 5281136 5281155 5281152 +
tataatgtgctctgtccccc

SEQ ID NO: 14993 - DNA, 20 bp, Artificial Sequence
  Synthetic oligonucleotide; TGG chr11 5281140 5281159 5281156 +
atgtgctctgtcccccaggc

SEQ ID NO: 14994 - DNA, 20 bp, Artificial Sequence
  Synthetic oligonucleotide; GAG chr11 5281142 5281161 5281158 +
gtgctctgtcccccaggctg

SEQ ID NO: 14995 - DNA, 20 bp, Artificial Sequence
  Synthetic oligonucleotide; CAG chr11 5281147 5281166 5281163 +
ctgtcccccaggctggagtg

SEQ ID NO: 14996 - DNA, 20 bp, Artificial Sequence
  Synthetic oligonucleotide; TGG chr11 5281150 5281169 5281166 +
tcccccaggctggagtgcag

SEQ ID NO: 14997 - DNA, 20 bp, Artificial Sequence
  Synthetic oligonucleotide; CAG chr11 5281161 5281180 5281177 +
ggagtgcagtggcacgatct

SEQ ID NO: 14998 - DNA, 20 bp, Artificial Sequence
  Synthetic oligonucleotide; CGG chr11 5281185 5281204 5281201 +
tcactgcaacctccgcctcc

SEQ ID NO: 14999 - DNA, 20 bp, Artificial Sequence
  Synthetic oligonucleotide; GGG chr11 5281186 5281205 5281202 +
cactgcaacctccgcctccc

SEQ ID NO: 15000 - DNA, 20 bp, Artificial Sequence
  Synthetic oligonucleotide; AAG chr11 5281192 5281211 5281208 +
aacctccgcctcccgggttc

SEQ ID NO: 15001 - DNA, 20 bp, Artificial Sequence
  Synthetic oligonucleotide; CAG chr11 5281209 5281228 5281225 +
ttcaagcaattctcctgcct

SEQ ID NO: 15002 - DNA, 20 bp, Artificial Sequence
  Synthetic oligonucleotide; TAG chr11 5281221 5281240 5281237 +
tcctgcctcagccaccctaa

SEQ ID NO: 15003 - DNA, 20 bp, Artificial Sequence
  Synthetic oligonucleotide; TGG chr11 5281225 5281244 5281241 +
gcctcagccaccctaatagc

SEQ ID NO: 15004 - DNA, 20 bp, Artificial Sequence
  Synthetic oligonucleotide; GGG chr11 5281226 5281245 5281242 +
cctcagccaccctaatagct

SEQ ID NO: 15005 - DNA, 20 bp, Artificial Sequence
  Synthetic oligonucleotide; CAG chr11 5281233 5281252 5281249 +
caccctaatagctgggatta

SEQ ID NO: 15006 - DNA, 20 bp, Artificial Sequence
  Synthetic oligonucleotide; AGG chr11 5281234 5281253 5281250 +
accctaatagctgggattac

SEQ ID NO: 15007 - DNA, 20 bp, Artificial Sequence
  Synthetic oligonucleotide; CAG chr11 5281252 5281271 5281268 +
acaggtgcacaccaccatgc

SEQ ID NO: 15008 - DNA, 20 bp, Artificial Sequence
  Synthetic oligonucleotide; AGG chr11 5281253 5281272 5281269 +
caggtgcacaccaccatgcc

SEQ ID NO: 15009 - DNA, 20 bp, Artificial Sequence
  Synthetic oligonucleotide; TAG chr11 5281275 5281294 5281291 +
gctaatttttgtactttttg

SEQ ID NO: 15010 - DNA, 20 bp, Artificial Sequence
  Synthetic oligonucleotide; GAG chr11 5281277 5281296 5281293 +
taatttttgtactttttgta

SEQ ID NO: 15011 - DNA, 20 bp, Artificial Sequence
  Synthetic oligonucleotide; AGG chr11 5281278 5281297 5281294 +
aatttttgtactttttgtag

SEQ ID NO: 15012 - DNA, 20 bp, Artificial Sequence
  Synthetic oligonucleotide; CAG chr11 5281281 5281300 5281297 +
ttttgtactttttgtagagg

SEQ ID NO: 15013 - DNA, 20 bp, Artificial Sequence
  Synthetic oligonucleotide; AGG chr11 5281282 5281301 5281298 +
tttgtactttttgtagaggc

SEQ ID NO: 15014 - DNA, 20 bp, Artificial Sequence
  Synthetic oligonucleotide; GGG chr11 5281283 5281302 5281299 +
ttgtactttttgtagaggca

SEQ ID NO: 15015 - DNA, 20 bp, Artificial Sequence
  Synthetic oligonucleotide; AAG chr11 5281302 5281321 5281318 +
agggtatcaccatgttgtcc

SEQ ID NO: 15016 - DNA, 20 bp, Artificial Sequence
  Synthetic oligonucleotide; TGG chr11 5281306 5281325 5281322 +
tatcaccatgttgtccaaga

SEQ ID NO: 15017 - DNA, 20 bp, Artificial Sequence
  Synthetic oligonucleotide; GAG chr11 5281321 5281340 5281337 +
caagatggtcttgaactcct

SEQ ID NO: 15018 - DNA, 20 bp, Artificial Sequence
  Synthetic oligonucleotide; AAG chr11 5281328 5281347 5281344 +
gtcttgaactcctgagctcc

SEQ ID NO: 15019 - DNA, 20 bp, Artificial Sequence
  Synthetic oligonucleotide; CAG chr11 5281331 5281350 5281347 +
ttgaactcctgagctccaag

SEQ ID NO: 15020 - DNA, 20 bp, Artificial Sequence
  Synthetic oligonucleotide; CAG chr11 5281345 5281364 5281361 +
tccaagcagtccacccacct

SEQ ID NO: 15021 - DNA, 20 bp, Artificial Sequence
  Synthetic oligonucleotide; AAG chr11 5281355 5281374 5281371 +
ccacccacctcagcctccca

SEQ ID NO: 15022 - DNA, 20 bp, Artificial Sequence
  Synthetic oligonucleotide; TGG chr11 5281361 5281380 5281377 +
acctcagcctcccaaagtgc

SEQ ID NO: 15023 - DNA, 20 bp, Artificial Sequence
  Synthetic oligonucleotide; GGG chr11 5281362 5281381 5281378 +
cctcagcctcccaaagtgct

SEQ ID NO: 15024 - DNA, 20 bp, Artificial Sequence
  Synthetic oligonucleotide; CAG chr11 5281369 5281388 5281385 +
ctcccaaagtgctgggatta

SEQ ID NO: 15025 - DNA, 20 bp, Artificial Sequence
  Synthetic oligonucleotide; AGG chr11 5281370 5281389 5281386 +
tcccaaagtgctgggattac

SEQ ID NO: 15026 - DNA, 20 bp, Artificial Sequence
  Synthetic oligonucleotide; GAG chr11 5281376 5281395 5281392 +
agtgctgggattacaggtgt

SEQ ID NO: 15027 - DNA, 20 bp, Artificial Sequence
  Synthetic oligonucleotide; CAG chr11 5281389 5281408 5281405 +
caggtgtgagacaccatgcc

SEQ ID NO: 15028 - DNA, 20 bp, Artificial Sequence
  Synthetic oligonucleotide; TAG chr11 5281407 5281426 5281423 +
cccagattttccatatttaa

SEQ ID NO: 15029 - DNA, 20 bp, Artificial Sequence
  Synthetic oligonucleotide; GAG chr11 5281409 5281428 5281425 +
cagattttccatatttaata

SEQ ID NO: 15030 - DNA, 20 bp, Artificial Sequence
  Synthetic oligonucleotide; AGG chr11 5281410 5281429 5281426 +
agattttccatatttaatag

SEQ ID NO: 15031 - DNA, 20 bp, Artificial Sequence
  Synthetic oligonucleotide; TGG chr11 5281419 5281438 5281435 +
atatttaatagaggtattta

SEQ ID NO: 15032 - DNA, 20 bp, Artificial Sequence
  Synthetic oligonucleotide; GGG chr11 5281420 5281439 5281436 +
tatttaatagaggtatttat

SEQ ID NO: 15033 - DNA, 20 bp, Artificial Sequence
  Synthetic oligonucleotide; TGG chr11 5281424 5281443 5281440 +
taatagaggtatttatggga

SEQ ID NO: 15034 - DNA, 20 bp, Artificial Sequence
  Synthetic oligonucleotide; GGG chr11 5281425 5281444 5281441 +
aatagaggtatttatgggat

SEQ ID NO: 15035 - DNA, 20 bp, Artificial Sequence
  Synthetic oligonucleotide; GGG chr11 5281426 5281445 5281442 +
atagaggtatttatgggatg

SEQ ID NO: 15036 - DNA, 20 bp, Artificial Sequence
  Synthetic oligonucleotide; GGG chr11 5281427 5281446 5281443 +
tagaggtatttatgggatgg

SEQ ID NO: 15037 - DNA, 20 bp, Artificial Sequence
  Synthetic oligonucleotide; AAG chr11 5281432 5281451 5281448 +
gtatttatgggatgggggaa

SEQ ID NO: 15038 - DNA, 20 bp, Artificial Sequence
  Synthetic oligonucleotide; TGG chr11 5281451 5281470 5281467 +
aaagaatgtttctctcactg

SEQ ID NO: 15039 - DNA, 20 bp, Artificial Sequence
  Synthetic oligonucleotide; TAG chr11 5281461 5281480 5281477 +
tctctcactgtggattattt

SEQ ID NO: 15040 - DNA, 20 bp, Artificial Sequence
  Synthetic oligonucleotide; GAG chr11 5281463 5281482 5281479 +
tctcactgtggattatttta

SEQ ID NO: 15041 - DNA, 20 bp, Artificial Sequence
  Synthetic oligonucleotide; GAG chr11 5281465 5281484 5281481 +
tcactgtggattattttaga

SEQ ID NO: 15042 - DNA, 20 bp, Artificial Sequence
  Synthetic oligonucleotide; TGG chr11 5281468 5281487 5281484 +
ctgtggattattttagagag

SEQ ID NO: 15043 - DNA, 20 bp, Artificial Sequence
  Synthetic oligonucleotide; GAG chr11 5281470 5281489 5281486 +
gtggattattttagagagtg

SEQ ID NO: 15044 - DNA, 20 bp, Artificial Sequence
  Synthetic oligonucleotide; TGG chr11 5281475 5281494 5281491 +
ttattttagagagtggagaa

SEQ ID NO: 15045 - DNA, 20 bp, Artificial Sequence
  Synthetic oligonucleotide; AAG chr11 5281480 5281499 5281496 +
ttagagagtggagaatggtc

SEQ ID NO: 15046 - DNA, 20 bp, Artificial Sequence
  Synthetic oligonucleotide; AAG chr11 5281498 5281517 5281514 +
tcaagatttttttaaaaatt

SEQ ID NO: 15047 - DNA, 20 bp, Artificial Sequence
  Synthetic oligonucleotide; AAG chr11 5281508 5281527 5281524 +
tttaaaaattaagaaaacat

SEQ ID NO: 15048 - DNA, 20 bp, Artificial Sequence
  Synthetic oligonucleotide; TGG chr11 5281512 5281531 5281528 +
aaaattaagaaaacataagt

SEQ ID NO: 15049 - DNA, 20 bp, Artificial Sequence
  Synthetic oligonucleotide; GAG chr11 5281520 5281539 5281536 +
gaaaacataagttggacctt

SEQ ID NO: 15050 - DNA, 20 bp, Artificial Sequence
  Synthetic oligonucleotide; TGG chr11 5281545 5281564 5281561 +
atgaaaatttatttttttgt

SEQ ID NO: 15051 - DNA, 20 bp, Artificial Sequence
  Synthetic oligonucleotide; GAG chr11 5281547 5281566 5281563 +
gaaaatttatttttttgttg

SEQ ID NO: 15052 - DNA, 20 bp, Artificial Sequence
  Synthetic oligonucleotide; AGG chr11 5281548 5281567 5281564 +
aaaatttatttttttgttgg

SEQ ID NO: 15053 - DNA, 20 bp, Artificial Sequence
  Synthetic oligonucleotide; CAG chr11 5281573 5281592 5281589 +
acccattctctatctcccat

SEQ ID NO: 15054 - DNA, 20 bp, Artificial Sequence
  Synthetic oligonucleotide; AGG chr11 5281574 5281593 5281590 +
cccattctctatctcccatc

SEQ ID NO: 15055 - DNA, 20 bp, Artificial Sequence
  Synthetic oligonucleotide; GGG chr11 5281575 5281594 5281591 +
ccattctctatctcccatca

SEQ ID NO: 15056 - DNA, 20 bp, Artificial Sequence
  Synthetic oligonucleotide; AAG chr11 5281579 5281598 5281595 +
tctctatctcccatcagggc

SEQ ID NO: 15057 - DNA, 20 bp, Artificial Sequence
  Synthetic oligonucleotide; AAG chr11 5281586 5281605 5281602 +
ctcccatcagggcaagctgt

SEQ ID NO: 15058 - DNA, 20 bp, Artificial Sequence
  Synthetic oligonucleotide; AGG chr11 5281587 5281606 5281603 +
tcccatcagggcaagctgta

SEQ ID NO: 15059 - DNA, 20 bp, Artificial Sequence
  Synthetic oligonucleotide; TGG chr11 5281593 5281612 5281609 +
cagggcaagctgtaaggaac

SEQ ID NO: 15060 - DNA, 20 bp, Artificial Sequence
  Synthetic oligonucleotide; AAG chr11 5281598 5281617 5281614 +
caagctgtaaggaactggct

SEQ ID NO: 15061 - DNA, 20 bp, Artificial Sequence
  Synthetic oligonucleotide; CAG chr11 5281604 5281623 5281620 +
gtaaggaactggctaagaca

SEQ ID NO: 15062 - DNA, 20 bp, Artificial Sequence
  Synthetic oligonucleotide; GAG chr11 5281608 5281627 5281624 +
ggaactggctaagacacagt

SEQ ID NO: 15063 - DNA, 20 bp, Artificial Sequence
  Synthetic oligonucleotide; CAG chr11 5281612 5281631 5281628 +
ctggctaagacacagtgaga

SEQ ID NO: 15064 - DNA, 20 bp, Artificial Sequence
  Synthetic oligonucleotide; GAG chr11 5281614 5281633 5281630 +
ggctaagacacagtgagaca

SEQ ID NO: 15065 - DNA, 20 bp, Artificial Sequence
  Synthetic oligonucleotide; TAG chr11 5281622 5281641 5281638 +
cacagtgagacagagtgact

SEQ ID NO: 15066 - DNA, 20 bp, Artificial Sequence
  Synthetic oligonucleotide; TAG chr11 5281628 5281647 5281644 +
gagacagagtgacttagtct

SEQ ID NO: 15067 - DNA, 20 bp, Artificial Sequence
  Synthetic oligonucleotide; GAG chr11 5281630 5281649 5281646 +
gacagagtgacttagtctta

SEQ ID NO: 15068 - DNA, 20 bp, Artificial Sequence
  Synthetic oligonucleotide; AGG chr11 5281631 5281650 5281647 +
acagagtgacttagtcttag

SEQ ID NO: 15069 - DNA, 20 bp, Artificial Sequence
  Synthetic oligonucleotide; TGG chr11 5281640 5281659 5281656 +
cttagtcttagaggccccac

SEQ ID NO: 15070 - DNA, 20 bp, Artificial Sequence
  Synthetic oligonucleotide; CAG chr11 5281647 5281666 5281663 +
ttagaggccccactggtacc

SEQ ID NO: 15071 - DNA, 20 bp, Artificial Sequence
  Synthetic oligonucleotide; GAG chr11 5281652 5281671 5281668 +
ggccccactggtacccagat

SEQ ID NO: 15072 - DNA, 20 bp, Artificial Sequence
  Synthetic oligonucleotide; AAG chr11 5281655 5281674 5281671 +
cccactggtacccagatgag

SEQ ID NO: 15073 - DNA, 20 bp, Artificial Sequence
  Synthetic oligonucleotide; AGG chr11 5281656 5281675 5281672 +
ccactggtacccagatgaga

SEQ ID NO: 15074 - DNA, 20 bp, Artificial Sequence
  Synthetic oligonucleotide; CAG chr11 5281677 5281696 5281693 +
ggcaccttcatcactcatca

SEQ ID NO: 15075 - DNA, 20 bp, Artificial Sequence
  Synthetic oligonucleotide; CAG chr11 5281681 5281700 5281697 +
ccttcatcactcatcacagt

SEQ ID NO: 15076 - DNA, 20 bp, Artificial Sequence
  Synthetic oligonucleotide; CAG chr11 5281713 5281732 5281729 +
tctcctctctcctttctcat

SEQ ID NO: 15077 - DNA, 20 bp, Artificial Sequence
  Synthetic oligonucleotide; AAG chr11 5281725 5281744 5281741 +
tttctcatcagaaatttcat

SEQ ID NO: 15078 - DNA, 20 bp, Artificial Sequence
  Synthetic oligonucleotide; TAG chr11 5281733 5281752 5281749 +
cagaaatttcataagtctac

SEQ ID NO: 15079 - DNA, 20 bp, Artificial Sequence
  Synthetic oligonucleotide; AGG chr11 5281734 5281753 5281750 +
agaaatttcataagtctact

SEQ ID NO: 15080 - DNA, 20 bp, Artificial Sequence
  Synthetic oligonucleotide; GGG chr11 5281735 5281754 5281751 +
gaaatttcataagtctacta

SEQ ID NO: 15081 - DNA, 20 bp, Artificial Sequence
  Synthetic oligonucleotide; CAG chr11 5281739 5281758 5281755 +
tttcataagtctactagggt

SEQ ID NO: 15082 - DNA, 20 bp, Artificial Sequence
  Synthetic oligonucleotide; AGG chr11 5281740 5281759 5281756 +
ttcataagtctactagggtc

SEQ ID NO: 15083 - DNA, 20 bp, Artificial Sequence
  Synthetic oligonucleotide; CAG chr11 5281743 5281762 5281759 +
ataagtctactagggtcagg

SEQ ID NO: 15084 - DNA, 20 bp, Artificial Sequence
  Synthetic oligonucleotide; AAG chr11 5281753 5281772 5281769 +
tagggtcaggcagatcacat

SEQ ID NO: 15085 - DNA, 20 bp, Artificial Sequence
  Synthetic oligonucleotide; AAG chr11 5281758 5281777 5281774 +
tcaggcagatcacataagaa

SEQ ID NO: 15086 - DNA, 20 bp, Artificial Sequence
  Synthetic oligonucleotide; GAG chr11 5281760 5281779 5281776 +
aggcagatcacataagaaaa

SEQ ID NO: 15087 - DNA, 20 bp, Artificial Sequence
  Synthetic oligonucleotide; AGG chr11 5281761 5281780 5281777 +
ggcagatcacataagaaaag

SEQ ID NO: 15088 - DNA, 20 bp, Artificial Sequence
  Synthetic oligonucleotide; CAG chr11 5281768 5281787 5281784 +
cacataagaaaagaggatgc

SEQ ID NO: 15089 - DNA, 20 bp, Artificial Sequence
  Synthetic oligonucleotide; AAG chr11 5281773 5281792 5281789 +
aagaaaagaggatgccagtt

SEQ ID NO: 15090 - DNA, 20 bp, Artificial Sequence
  Synthetic oligonucleotide; AGG chr11 5281774 5281793 5281790 +
agaaaagaggatgccagtta

SEQ ID NO: 15091 - DNA, 20 bp, Artificial Sequence
  Synthetic oligonucleotide; CAG chr11 5281781 5281800 5281797 +
aggatgccagttaaggtctg

SEQ ID NO: 15092 - DNA, 20 bp, Artificial Sequence
  Synthetic oligonucleotide; GAG chr11 5281785 5281804 5281801 +
tgccagttaaggtctgcagt

SEQ ID NO: 15093 - DNA, 20 bp, Artificial Sequence
  Synthetic oligonucleotide; GAG chr11 5281791 5281810 5281807 +
ttaaggtctgcagtgagtat

SEQ ID NO: 15094 - DNA, 20 bp, Artificial Sequence
  Synthetic oligonucleotide; AAG chr11 5281811 5281830 5281827 +
gagcccatccctgatgaatt

SEQ ID NO: 15095 - DNA, 20 bp, Artificial Sequence
  Synthetic oligonucleotide; AGG chr11 5281812 5281831 5281828 +
agcccatccctgatgaatta

SEQ ID NO: 15096 - DNA, 20 bp, Artificial Sequence
  Synthetic oligonucleotide; TAG chr11 5281827 5281846 5281843 +
aattaaggcaatcaacactt

SEQ ID NO: 15097 - DNA, 20 bp, Artificial Sequence
  Synthetic oligonucleotide; AGG chr11 5281828 5281847 5281844 +
attaaggcaatcaacacttt

SEQ ID NO: 15098 - DNA, 20 bp, Artificial Sequence
  Synthetic oligonucleotide; CAG chr11 5281831 5281850 5281847 +
aaggcaatcaacactttagg

SEQ ID NO: 15099 - DNA, 20 bp, Artificial Sequence
  Synthetic oligonucleotide; GAG chr11 5281846 5281865 5281862 +
ttaggcagccatgttgccat

SEQ ID NO: 15100 - DNA, 20 bp, Artificial Sequence
  Synthetic oligonucleotide; GAG chr11 5281848 5281867 5281864 +
aggcagccatgttgccatga

SEQ ID NO: 15101 - DNA, 20 bp, Artificial Sequence
  Synthetic oligonucleotide; TAG chr11 5281853 5281872 5281869 +
gccatgttgccatgagagat

SEQ ID NO: 15102 - DNA, 20 bp, Artificial Sequence
  Synthetic oligonucleotide; AGG chr11 5281854 5281873 5281870 +
ccatgttgccatgagagatt

SEQ ID NO: 15103 - DNA, 20 bp, Artificial Sequence
  Synthetic oligonucleotide; GAG chr11 5281856 5281875 5281872 +
atgttgccatgagagattag

SEQ ID NO: 15104 - DNA, 20 bp, Artificial Sequence
  Synthetic oligonucleotide; AGG chr11 5281857 5281876 5281873 +
tgttgccatgagagattagg

SEQ ID NO: 15105 - DNA, 20 bp, Artificial Sequence
  Synthetic oligonucleotide; GGG chr11 5281858 5281877 5281874 +
gttgccatgagagattagga

SEQ ID NO: 15106 - DNA, 20 bp, Artificial Sequence
  Synthetic oligonucleotide; GGG chr11 5281859 5281878 5281875 +
ttgccatgagagattaggag

SEQ ID NO: 15107 - DNA, 20 bp, Artificial Sequence
  Synthetic oligonucleotide; GAG chr11 5281868 5281887 5281884 +
gagattaggaggggccaaat

SEQ ID NO: 15108 - DNA, 20 bp, Artificial Sequence
  Synthetic oligonucleotide; CAG chr11 5281873 5281892 5281889 +
taggaggggccaaatgagcc

SEQ ID NO: 15109 - DNA, 20 bp, Artificial Sequence
  Synthetic oligonucleotide; TAG chr11 5281893 5281912 5281909 +
cagaaataccacctacttct

SEQ ID NO: 15110 - DNA, 20 bp, Artificial Sequence
  Synthetic oligonucleotide; GAG chr11 5281904 5281923 5281920 +
cctacttcttagatgatctt

SEQ ID NO: 15111 - DNA, 20 bp, Artificial Sequence
  Synthetic oligonucleotide; AAG chr11 5281908 5281927 5281924 +
cttcttagatgatcttgagc

SEQ ID NO: 15112 - DNA, 20 bp, Artificial Sequence
  Synthetic oligonucleotide; AAG chr11 5281926 5281945 5281942 +
gcaagttgcttaacttcttg

SEQ ID NO: 15113 - DNA, 20 bp, Artificial Sequence
  Synthetic oligonucleotide; TAG chr11 5281940 5281959 5281956 +
ttcttgaagtctctgaaata

SEQ ID NO: 15114 - DNA, 20 bp, Artificial Sequence
  Synthetic oligonucleotide; AGG chr11 5281941 5281960 5281957 +
tcttgaagtctctgaaatat

SEQ ID NO: 15115 - DNA, 20 bp, Artificial Sequence
  Synthetic oligonucleotide; TAG chr11 5281958 5281977 5281974 +
tataggatgataatatgtat

SEQ ID NO: 15116 - DNA, 20 bp, Artificial Sequence
  Synthetic oligonucleotide; TAG chr11 5281965 5281984 5281981 +
tgataatatgtattagctaa

SEQ ID NO: 15117 - DNA, 20 bp, Artificial Sequence
  Synthetic oligonucleotide; GAG chr11 5281974 5281993 5281990 +
gtattagctaatagaattat

SEQ ID NO: 15118 - DNA, 20 bp, Artificial Sequence
  Synthetic oligonucleotide; AGG chr11 5281975 5281994 5281991 +
tattagctaatagaattatg

SEQ ID NO: 15119 - DNA, 20 bp, Artificial Sequence
  Synthetic oligonucleotide; GAG chr11 5281980 5281999 5281996 +
gctaatagaattatgaggat

SEQ ID NO: 15120 - DNA, 20 bp, Artificial Sequence
  Synthetic oligonucleotide; TAG chr11 5281985 5282004 5282001 +
tagaattatgaggatgagat

SEQ ID NO: 15121 - DNA, 20 bp, Artificial Sequence
  Synthetic oligonucleotide; AAG chr11 5281999 5282018 5282015 +
tgagattagtttattgtgta

SEQ ID NO: 15122 - DNA, 20 bp, Artificial Sequence
  Synthetic oligonucleotide; TAG chr11 5282005 5282024 5282021 +
tagtttattgtgtaaagaac

SEQ ID NO: 15123 - DNA, 20 bp, Artificial Sequence
  Synthetic oligonucleotide; AGG chr11 5282006 5282025 5282022 +
agtttattgtgtaaagaact

SEQ ID NO: 15124 - DNA, 20 bp, Artificial Sequence
  Synthetic oligonucleotide; GGG chr11 5282007 5282026 5282023 +
gtttattgtgtaaagaacta

SEQ ID NO: 15125 - DNA, 20 bp, Artificial Sequence
  Synthetic oligonucleotide; CAG chr11 5282013 5282032 5282029 +
tgtgtaaagaactagggaca

SEQ ID NO: 15126 - DNA, 20 bp, Artificial Sequence
  Synthetic oligonucleotide; CAG chr11 5282024 5282043 5282040 +
ctagggacacagtatatatt

SEQ ID NO: 15127 - DNA, 20 bp, Artificial Sequence
  Synthetic oligonucleotide; AAG chr11 5282028 5282047 5282044 +
ggacacagtatatattcagt

SEQ ID NO: 15128 - DNA, 20 bp, Artificial Sequence
  Synthetic oligonucleotide; CAG chr11 5282043 5282062 5282059 +
tcagtaagtgttttctgtta

SEQ ID NO: 15129 - DNA, 20 bp, Artificial Sequence
  Synthetic oligonucleotide; CAG chr11 5282077 5282096 5282093 +
atatatacatgcaactatta

SEQ ID NO: 15130 - DNA, 20 bp, Artificial Sequence
  Synthetic oligonucleotide; AAG chr11 5282095 5282114 5282111 +
tacagttgcatgctacctta

SEQ ID NO: 15131 - DNA, 20 bp, Artificial Sequence
  Synthetic oligonucleotide; TGG chr11 5282104 5282123 5282120 +
atgctaccttaaagaataat

SEQ ID NO: 15132 - DNA, 20 bp, Artificial Sequence
  Synthetic oligonucleotide; GAG chr11 5282106 5282125 5282122 +
gctaccttaaagaataattg

SEQ ID NO: 15133 - DNA, 20 bp, Artificial Sequence
  Synthetic oligonucleotide; AGG chr11 5282107 5282126 5282123 +
ctaccttaaagaataattgg

SEQ ID NO: 15134 - DNA, 20 bp, Artificial Sequence
  Synthetic oligonucleotide; CAG chr11 5282112 5282131 5282128 +
ttaaagaataattggaggta

SEQ ID NO: 15135 - DNA, 20 bp, Artificial Sequence
  Synthetic oligonucleotide; CGG chr11 5282120 5282139 5282136 +
taattggaggtacagttatt

SEQ ID NO: 15136 - DNA, 20 bp, Artificial Sequence
  Synthetic oligonucleotide; GAG chr11 5282122 5282141 5282138 +
attggaggtacagttattcg

SEQ ID NO: 15137 - DNA, 20 bp, Artificial Sequence
  Synthetic oligonucleotide; AGG chr11 5282123 5282142 5282139 +
ttggaggtacagttattcgg

SEQ ID NO: 15138 - DNA, 20 bp, Artificial Sequence
  Synthetic oligonucleotide; TGG chr11 5282146 5282165 5282162 +
tatttcttgactgttaatgt

SEQ ID NO: 15139 - DNA, 20 bp, Artificial Sequence
  Synthetic oligonucleotide; CAG chr11 5282149 5282168 5282165 +
ttcttgactgttaatgttgg

SEQ ID NO: 15140 - DNA, 20 bp, Artificial Sequence
  Synthetic oligonucleotide; CAG chr11 5282152 5282171 5282168 +
ttgactgttaatgttggcag

SEQ ID NO: 15141 - DNA, 20 bp, Artificial Sequence
  Synthetic oligonucleotide; CAG chr11 5282158 5282177 5282174 +
gttaatgttggcagcagatt

SEQ ID NO: 15142 - DNA, 20 bp, Artificial Sequence
  Synthetic oligonucleotide; CAG chr11 5282180 5282199 5282196 +
gcttattttacaacactatt

SEQ ID NO: 15143 - DNA, 20 bp, Artificial Sequence
  Synthetic oligonucleotide; TAG chr11 5282202 5282221 5282218 +
gacctctcacaataattccc

SEQ ID NO: 15144 - DNA, 20 bp, Artificial Sequence
  Synthetic oligonucleotide; AGG chr11 5282203 5282222 5282219 +
acctctcacaataattccct

SEQ ID NO: 15145 - DNA, 20 bp, Artificial Sequence
  Synthetic oligonucleotide; GAG chr11 5282205 5282224 5282221 +
ctctcacaataattccctag

SEQ ID NO: 15146 - DNA, 20 bp, Artificial Sequence
  Synthetic oligonucleotide; TAG chr11 5282213 5282232 5282229 +
ataattccctaggagatatt

SEQ ID NO: 15147 - DNA, 20 bp, Artificial Sequence
  Synthetic oligonucleotide; AAG chr11 5282221 5282240 5282237 +
ctaggagatatttagacaac

SEQ ID NO: 15148 - DNA, 20 bp, Artificial Sequence
  Synthetic oligonucleotide; AAG chr11 5282304 5282323 5282320 +
tttgctctctgttcctgtga

SEQ ID NO: 15149 - DNA, 20 bp, Artificial Sequence
  Synthetic oligonucleotide; TAG chr11 5282319 5282338 5282335 +
tgtgaaagtacccttctact

SEQ ID NO: 15150 - DNA, 20 bp, Artificial Sequence
  Synthetic oligonucleotide; CAG chr11 5282334 5282353 5282350 +
ctacttagcctacttttgac

SEQ ID NO: 15151 - DNA, 20 bp, Artificial Sequence
  Synthetic oligonucleotide; TGG chr11 5282349 5282368 5282365 +
ttgaccagtgtgcatgtcac

SEQ ID NO: 15152 - DNA, 20 bp, Artificial Sequence
  Synthetic oligonucleotide; GGG chr11 5282350 5282369 5282366 +
tgaccagtgtgcatgtcact

SEQ ID NO: 15153 - DNA, 20 bp, Artificial Sequence
  Synthetic oligonucleotide; AAG chr11 5282359 5282378 5282375 +
tgcatgtcactgggcaatac

SEQ ID NO: 15154 - DNA, 20 bp, Artificial Sequence
  Synthetic oligonucleotide; GAG chr11 5282368 5282387 5282384 +
ctgggcaatacaagacctct

SEQ ID NO: 15155 - DNA, 20 bp, Artificial Sequence
  Synthetic oligonucleotide; TGG chr11 5282374 5282393 5282390 +
aatacaagacctctgagctt

SEQ ID NO: 15156 - DNA, 20 bp, Artificial Sequence
  Synthetic oligonucleotide; TAG chr11 5282379 5282398 5282395 +
aagacctctgagctttggct

SEQ ID NO: 15157 - DNA, 20 bp, Artificial Sequence
  Synthetic oligonucleotide; AAG chr11 5282382 5282401 5282398 +
acctctgagctttggcttag

SEQ ID NO: 15158 - DNA, 20 bp, Artificial Sequence
  Synthetic oligonucleotide; AGG chr11 5282383 5282402 5282399 +
cctctgagctttggcttaga

SEQ ID NO: 15159 - DNA, 20 bp, Artificial Sequence
  Synthetic oligonucleotide; TGG chr11 5282397 5282416 5282413 +
cttagaaggaaatacaataa

SEQ ID NO: 15160 - DNA, 20 bp, Artificial Sequence
  Synthetic oligonucleotide; GAG chr11 5282409 5282428 5282425 +
tacaataatggctaattttt

SEQ ID NO: 15161 - DNA, 20 bp, Artificial Sequence
  Synthetic oligonucleotide; AAG chr11 5282413 5282432 5282429 +
ataatggctaatttttgaga

SEQ ID NO: 15162 - DNA, 20 bp, Artificial Sequence
  Synthetic oligonucleotide; GAG chr11 5282415 5282434 5282431 +
aatggctaatttttgagaaa

SEQ ID NO: 15163 - DNA, 20 bp, Artificial Sequence
  Synthetic oligonucleotide; AGG chr11 5282416 5282435 5282432 +
atggctaatttttgagaaag

SEQ ID NO: 15164 - DNA, 20 bp, Artificial Sequence
  Synthetic oligonucleotide; TAG chr11 5282424 5282443 5282440 +
tttttgagaaagaggaactc

SEQ ID NO: 15165 - DNA, 20 bp, Artificial Sequence
  Synthetic oligonucleotide; CAG chr11 5282432 5282451 5282448 +
aaagaggaactctagcccat

SEQ ID NO: 15166 - DNA, 20 bp, Artificial Sequence
  Synthetic oligonucleotide; AGG chr11 5282433 5282452 5282449 +
aagaggaactctagcccatc

SEQ ID NO: 15167 - DNA, 20 bp, Artificial Sequence
  Synthetic oligonucleotide; GGG chr11 5282434 5282453 5282450 +
agaggaactctagcccatca

SEQ ID NO: 15168 - DNA, 20 bp, Artificial Sequence
  Synthetic oligonucleotide; AAG chr11 5282437 5282456 5282453 +
ggaactctagcccatcaggg

SEQ ID NO: 15169 - DNA, 20 bp, Artificial Sequence
  Synthetic oligonucleotide; TAG chr11 5282443 5282462 5282459 +
ctagcccatcagggaagaca

SEQ ID NO: 15170 - DNA, 20 bp, Artificial Sequence
  Synthetic oligonucleotide; AGG chr11 5282444 5282463 5282460 +
tagcccatcagggaagacat

SEQ ID NO: 15171 - DNA, 20 bp, Artificial Sequence
  Synthetic oligonucleotide; GGG chr11 5282445 5282464 5282461 +
agcccatcagggaagacata

SEQ ID NO: 15172 - DNA, 20 bp, Artificial Sequence
  Synthetic oligonucleotide; GAG chr11 5282447 5282466 5282463 +
cccatcagggaagacatagg

SEQ ID NO: 15173 - DNA, 20 bp, Artificial Sequence
  Synthetic oligonucleotide; TAG chr11 5282455 5282474 5282471 +
ggaagacatagggagttctg

SEQ ID NO: 15174 - DNA, 20 bp, Artificial Sequence
  Synthetic oligonucleotide; AGG chr11 5282456 5282475 5282472 +
gaagacatagggagttctgt

SEQ ID NO: 15175 - DNA, 20 bp, Artificial Sequence
  Synthetic oligonucleotide; GAG chr11 5282462 5282481 5282478 +
atagggagttctgtaggaat

SEQ ID NO: 15176 - DNA, 20 bp, Artificial Sequence
  Synthetic oligonucleotide; CAG chr11 5282482 5282501 5282498 +
gagttcttccattcttttta

SEQ ID NO: 15177 - DNA, 20 bp, Artificial Sequence
  Synthetic oligonucleotide; GAG chr11 5282487 5282506 5282503 +
cttccattctttttacagat

SEQ ID NO: 15178 - DNA, 20 bp, Artificial Sequence
  Synthetic oligonucleotide; AAG chr11 5282491 5282510 5282507 +
cattctttttacagatgaga

SEQ ID NO: 15179 - DNA, 20 bp, Artificial Sequence
  Synthetic oligonucleotide; AAG chr11 5282502 5282521 5282518 +
cagatgagaaagacaatgtg

SEQ ID NO: 15180 - DNA, 20 bp, Artificial Sequence
  Synthetic oligonucleotide; AAG chr11 5282520 5282539 5282536 +
tgaagccccaaatgatttta

SEQ ID NO: 15181 - DNA, 20 bp, Artificial Sequence
  Synthetic oligonucleotide; TAG chr11 5282523 5282542 5282539 +
agccccaaatgattttaaag

SEQ ID NO: 15182 - DNA, 20 bp, Artificial Sequence
  Synthetic oligonucleotide; TAG chr11 5282527 5282546 5282543 +
ccaaatgattttaaagtagt

SEQ ID NO: 15183 - DNA, 20 bp, Artificial Sequence
  Synthetic oligonucleotide; TGG chr11 5282534 5282553 5282550 +
attttaaagtagttagcata

SEQ ID NO: 15184 - DNA, 20 bp, Artificial Sequence
  Synthetic oligonucleotide; GAG chr11 5282536 5282555 5282552 +
tttaaagtagttagcatatg

SEQ ID NO: 15185 - DNA, 20 bp, Artificial Sequence
  Synthetic oligonucleotide; TGG chr11 5282542 5282561 5282558 +
gtagttagcatatggagaaa

SEQ ID NO: 15186 - DNA, 20 bp, Artificial Sequence
  Synthetic oligonucleotide; TGG chr11 5282552 5282571 5282568 +
tatggagaaatggcttgcat

SEQ ID NO: 15187 - DNA, 20 bp, Artificial Sequence
  Synthetic oligonucleotide; TGG chr11 5282562 5282581 5282578 +
tggcttgcattggtaaaatt

SEQ ID NO: 15188 - DNA, 20 bp, Artificial Sequence
  Synthetic oligonucleotide; GGG chr11 5282563 5282582 5282579 +
ggcttgcattggtaaaattt

SEQ ID NO: 15189 - DNA, 20 bp, Artificial Sequence
  Synthetic oligonucleotide; GGG chr11 5282564 5282583 5282580 +
gcttgcattggtaaaatttg

SEQ ID NO: 15190 - DNA, 20 bp, Artificial Sequence
  Synthetic oligonucleotide; CAG chr11 5282579 5282598 5282595 +
atttggggaaactttgttgt

SEQ ID NO: 15191 - DNA, 20 bp, Artificial Sequence
  Synthetic oligonucleotide; CGG chr11 5282585 5282604 5282601 +
ggaaactttgttgtcagacc

SEQ ID NO: 15192 - DNA, 20 bp, Artificial Sequence
  Synthetic oligonucleotide; AAG chr11 5282590 5282609 5282606 +
ctttgttgtcagacccggca

SEQ ID NO: 15193 - DNA, 20 bp, Artificial Sequence
  Synthetic oligonucleotide; AGG chr11 5282591 5282610 5282607 +
tttgttgtcagacccggcaa

SEQ ID NO: 15194 - DNA, 20 bp, Artificial Sequence
  Synthetic oligonucleotide; GGG chr11 5282592 5282611 5282608 +
ttgttgtcagacccggcaaa

SEQ ID NO: 15195 - DNA, 20 bp, Artificial Sequence
  Synthetic oligonucleotide; GAG chr11 5282594 5282613 5282610 +
gttgtcagacccggcaaagg

SEQ ID NO: 15196 - DNA, 20 bp, Artificial Sequence
  Synthetic oligonucleotide; CAG chr11 5282600 5282619 5282616 +
agacccggcaaagggagatg

SEQ ID NO: 15197 - DNA, 20 bp, Artificial Sequence
  Synthetic oligonucleotide; GAG chr11 5282602 5282621 5282618 +
acccggcaaagggagatgca

SEQ ID NO: 15198 - DNA, 20 bp, Artificial Sequence
  Synthetic oligonucleotide; CAG chr11 5282611 5282630 5282627 +
agggagatgcagagaatctg

SEQ ID NO: 15199 - DNA, 20 bp, Artificial Sequence
  Synthetic oligonucleotide; CAG chr11 5282642 5282661 5282658 +
catttcttgtgtacctatca

SEQ ID NO: 15200 - DNA, 20 bp, Artificial Sequence
  Synthetic oligonucleotide; CAG chr11 5282650 5282669 5282666 +
gtgtacctatcacagcacca

SEQ ID NO: 15201 - DNA, 20 bp, Artificial Sequence
  Synthetic oligonucleotide; TAG chr11 5282662 5282681 5282678 +
cagcaccacagcactattcc

SEQ ID NO: 15202 - DNA, 20 bp, Artificial Sequence
  Synthetic oligonucleotide; TAG chr11 5282667 5282686 5282683 +
ccacagcactattcctagca

SEQ ID NO: 15203 - DNA, 20 bp, Artificial Sequence
  Synthetic oligonucleotide; TAG chr11 5282672 5282691 5282688 +
gcactattcctagcatagtt

SEQ ID NO: 15204 - DNA, 20 bp, Artificial Sequence
  Synthetic oligonucleotide; AGG chr11 5282673 5282692 5282689 +
cactattcctagcatagttt

SEQ ID NO: 15205 - DNA, 20 bp, Artificial Sequence
  Synthetic oligonucleotide; GGG chr11 5282674 5282693 5282690 +
actattcctagcatagttta

SEQ ID NO: 15206 - DNA, 20 bp, Artificial Sequence
  Synthetic oligonucleotide; CAG chr11 5282681 5282700 5282697 +
ctagcatagtttagggccct

SEQ ID NO: 15207 - DNA, 20 bp, Artificial Sequence
  Synthetic oligonucleotide; TAG chr11 5282694 5282713 5282710 +
gggccctcagttcttgacgc

SEQ ID NO: 15208 - DNA, 20 bp, Artificial Sequence
  Synthetic oligonucleotide; TAG chr11 5282698 5282717 5282714 +
cctcagttcttgacgctagt

SEQ ID NO: 15209 - DNA, 20 bp, Artificial Sequence
  Synthetic oligonucleotide; TAG chr11 5282721 5282740 5282737 +
aatttcacacaaacttaaac

SEQ ID NO: 15210 - DNA, 20 bp, Artificial Sequence
  Synthetic oligonucleotide; GAG chr11 5282744 5282763 5282760 +
acaaacatatgtatgtttct

SEQ ID NO: 15211 - DNA, 20 bp, Artificial Sequence
  Synthetic oligonucleotide; AGG chr11 5282745 5282764 5282761 +
caaacatatgtatgtttctg

SEQ ID NO: 15212 - DNA, 20 bp, Artificial Sequence
  Synthetic oligonucleotide; GAG chr11 5282752 5282771 5282768 +
atgtatgtttctgaggcact

SEQ ID NO: 15213 - DNA, 20 bp, Artificial Sequence
  Synthetic oligonucleotide; AGG chr11 5282753 5282772 5282769 +
tgtatgtttctgaggcactg

SEQ ID NO: 15214 - DNA, 20 bp, Artificial Sequence
  Synthetic oligonucleotide; CAG chr11 5282762 5282781 5282778 +
ctgaggcactgaggtcactg

SEQ ID NO: 15215 - DNA, 20 bp, Artificial Sequence
  Synthetic oligonucleotide; AGG chr11 5282763 5282782 5282779 +
tgaggcactgaggtcactgc

SEQ ID NO: 15216 - DNA, 20 bp, Artificial Sequence
  Synthetic oligonucleotide; AAG chr11 5282769 5282788 5282785 +
actgaggtcactgcaggatg

SEQ ID NO: 15217 - DNA, 20 bp, Artificial Sequence
  Synthetic oligonucleotide; CGG chr11 5282773 5282792 5282789 +
aggtcactgcaggatgaaga

SEQ ID NO: 15218 - DNA, 20 bp, Artificial Sequence
  Synthetic oligonucleotide; GAG chr11 5282775 5282794 5282791 +
gtcactgcaggatgaagacg

SEQ ID NO: 15219 - DNA, 20 bp, Artificial Sequence
  Synthetic oligonucleotide; TGG chr11 5282782 5282801 5282798 +
caggatgaagacggagccaa

SEQ ID NO: 15220 - DNA, 20 bp, Artificial Sequence
  Synthetic oligonucleotide; GGG chr11 5282783 5282802 5282799 +
aggatgaagacggagccaat

SEQ ID NO: 15221 - DNA, 20 bp, Artificial Sequence
  Synthetic oligonucleotide; TAG chr11 5282787 5282806 5282803 +
tgaagacggagccaatgggt

SEQ ID NO: 15222 - DNA, 20 bp, Artificial Sequence
  Synthetic oligonucleotide; CAG chr11 5282792 5282811 5282808 +
acggagccaatgggttagac

SEQ ID NO: 15223 - DNA, 20 bp, Artificial Sequence
  Synthetic oligonucleotide; AAG chr11 5282795 5282814 5282811 +
gagccaatgggttagaccag

SEQ ID NO: 15224 - DNA, 20 bp, Artificial Sequence
  Synthetic oligonucleotide; GAG chr11 5282797 5282816 5282813 +
gccaatgggttagaccagaa

SEQ ID NO: 15225 - DNA, 20 bp, Artificial Sequence
  Synthetic oligonucleotide; AAG chr11 5282839 5282858 5282855 +
ataaacactccctttaacca

SEQ ID NO: 15226 - DNA, 20 bp, Artificial Sequence
  Synthetic oligonucleotide; CAG chr11 5282845 5282864 5282861 +
actccctttaaccaaagttg

SEQ ID NO: 15227 - DNA, 20 bp, Artificial Sequence
  Synthetic oligonucleotide; AAG chr11 5282855 5282874 5282871 +
accaaagttgcagcttgacc

SEQ ID NO: 15228 - DNA, 20 bp, Artificial Sequence
  Synthetic oligonucleotide; AGG chr11 5282856 5282875 5282872 +
ccaaagttgcagcttgacca

SEQ ID NO: 15229 - DNA, 20 bp, Artificial Sequence
  Synthetic oligonucleotide; GGG chr11 5282857 5282876 5282873 +
caaagttgcagcttgaccaa

SEQ ID NO: 15230 - DNA, 20 bp, Artificial Sequence
  Synthetic oligonucleotide; GGG chr11 5282858 5282877 5282874 +
aaagttgcagcttgaccaag

SEQ ID NO: 15231 - DNA, 20 bp, Artificial Sequence
  Synthetic oligonucleotide; AAG chr11 5282864 5282883 5282880 +
gcagcttgaccaaggggtca

SEQ ID NO: 15232 - DNA, 20 bp, Artificial Sequence
  Synthetic oligonucleotide; AGG chr11 5282865 5282884 5282881 +
cagcttgaccaaggggtcaa

SEQ ID NO: 15233 - DNA, 20 bp, Artificial Sequence
  Synthetic oligonucleotide; GGG chr11 5282866 5282885 5282882 +
agcttgaccaaggggtcaaa

SEQ ID NO: 15234 - DNA, 20 bp, Artificial Sequence
  Synthetic oligonucleotide; TGG chr11 5282874 5282893 5282890 +
caaggggtcaaagggtaatt

SEQ ID NO: 15235 - DNA, 20 bp, Artificial Sequence
  Synthetic oligonucleotide; GGG chr11 5282875 5282894 5282891 +
aaggggtcaaagggtaattt

SEQ ID NO: 15236 - DNA, 20 bp, Artificial Sequence
  Synthetic oligonucleotide; CAG chr11 5282878 5282897 5282894 +
gggtcaaagggtaatttggg

SEQ ID NO: 15237 - DNA, 20 bp, Artificial Sequence
  Synthetic oligonucleotide; AGG chr11 5282879 5282898 5282895 +
ggtcaaagggtaatttgggc

SEQ ID NO: 15238 - DNA, 20 bp, Artificial Sequence
  Synthetic oligonucleotide; TGG chr11 5282884 5282903 5282900 +
aagggtaatttgggcaggca

SEQ ID NO: 15239 - DNA, 20 bp, Artificial Sequence
  Synthetic oligonucleotide; GGG chr11 5282885 5282904 5282901 +
agggtaatttgggcaggcat

SEQ ID NO: 15240 - DNA, 20 bp, Artificial Sequence
  Synthetic oligonucleotide; CAG chr11 5282892 5282911 5282908 +
tttgggcaggcatgggcctt

SEQ ID NO: 15241 - DNA, 20 bp, Artificial Sequence
  Synthetic oligonucleotide; AAG chr11 5282902 5282921 5282918 +
catgggccttcagttttctc

SEQ ID NO: 15242 - DNA, 20 bp, Artificial Sequence
  Synthetic oligonucleotide; AAG chr11 5282945 5282964 5282961 +
tatgacaatctctgtaaccc

SEQ ID NO: 15243 - DNA, 20 bp, Artificial Sequence
  Synthetic oligonucleotide; GAG chr11 5282947 5282966 5282963 +
tgacaatctctgtaacccaa

SEQ ID NO: 15244 - DNA, 20 bp, Artificial Sequence
  Synthetic oligonucleotide; AAG chr11 5282967 5282986 5282983 +
gagaaaatctctttattctg

SEQ ID NO: 15245 - DNA, 20 bp, Artificial Sequence
  Synthetic oligonucleotide; AAG chr11 5283016 5283035 5283032 +
ttctccctcaaactttcctg

SEQ ID NO: 15246 - DNA, 20 bp, Artificial Sequence
  Synthetic oligonucleotide; TGG chr11 5283030 5283049 5283046 +
ttcctgaagaaatgcaatta

SEQ ID NO: 15247 - DNA, 20 bp, Artificial Sequence
  Synthetic oligonucleotide; GAG chr11 5283035 5283054 5283051 +
gaagaaatgcaattatggtt

SEQ ID NO: 15248 - DNA, 20 bp, Artificial Sequence
  Synthetic oligonucleotide; AGG chr11 5283036 5283055 5283052 +
aagaaatgcaattatggttg

SEQ ID NO: 15249 - DNA, 20 bp, Artificial Sequence
  Synthetic oligonucleotide; AAG chr11 5283039 5283058 5283055 +
aaatgcaattatggttgagg

SEQ ID NO: 15250 - DNA, 20 bp, Artificial Sequence
  Synthetic oligonucleotide; TGG chr11 5283044 5283063 5283060 +
caattatggttgaggaagta

SEQ ID NO: 15251 - DNA, 20 bp, Artificial Sequence
  Synthetic oligonucleotide; TGG chr11 5283057 5283076 5283073 +
ggaagtatggtctgcaactg

SEQ ID NO: 15252 - DNA, 20 bp, Artificial Sequence
  Synthetic oligonucleotide; TGG chr11 5283062 5283081 5283078 +
tatggtctgcaactgtggct

SEQ ID NO: 15253 - DNA, 20 bp, Artificial Sequence
  Synthetic oligonucleotide; AAG chr11 5283084 5283103 5283100 +
gaccacaacttccaatcgac

SEQ ID NO: 15254 - DNA, 20 bp, Artificial Sequence
  Synthetic oligonucleotide; AAG chr11 5283087 5283106 5283103 +
cacaacttccaatcgacaag

SEQ ID NO: 15255 - DNA, 20 bp, Artificial Sequence
  Synthetic oligonucleotide; AAG chr11 5283093 5283112 5283109 +
ttccaatcgacaagaagtaa

SEQ ID NO: 15256 - DNA, 20 bp, Artificial Sequence
  Synthetic oligonucleotide; AAG chr11 5283097 5283116 5283113 +
aatcgacaagaagtaaaagt

SEQ ID NO: 15257 - DNA, 20 bp, Artificial Sequence
  Synthetic oligonucleotide; AAG chr11 5283100 5283119 5283116 +
cgacaagaagtaaaagtaag

SEQ ID NO: 15258 - DNA, 20 bp, Artificial Sequence
  Synthetic oligonucleotide; AAG chr11 5283104 5283123 5283120 +
aagaagtaaaagtaagaagc

SEQ ID NO: 15259 - DNA, 20 bp, Artificial Sequence
  Synthetic oligonucleotide; AGG chr11 5283105 5283124 5283121 +
agaagtaaaagtaagaagca

SEQ ID NO: 15260 - DNA, 20 bp, Artificial Sequence
  Synthetic oligonucleotide; GGG chr11 5283106 5283125 5283122 +
gaagtaaaagtaagaagcaa

SEQ ID NO: 15261 - DNA, 20 bp, Artificial Sequence
  Synthetic oligonucleotide; CAG chr11 5283112 5283131 5283128 +
aaagtaagaagcaagggcca

SEQ ID NO: 15262 - DNA, 20 bp, Artificial Sequence
  Synthetic oligonucleotide; AGG chr11 5283113 5283132 5283129 +
aagtaagaagcaagggccac

SEQ ID NO: 15263 - DNA, 20 bp, Artificial Sequence
  Synthetic oligonucleotide; GGG chr11 5283114 5283133 5283130 +
agtaagaagcaagggccaca

SEQ ID NO: 15264 - DNA, 20 bp, Artificial Sequence
  Synthetic oligonucleotide; CAG chr11 5283117 5283136 5283133 +
aagaagcaagggccacaggg

SEQ ID NO: 15265 - DNA, 20 bp, Artificial Sequence
  Synthetic oligonucleotide; AGG chr11 5283118 5283137 5283134 +
agaagcaagggccacagggc

SEQ ID NO: 15266 - DNA, 20 bp, Artificial Sequence
  Synthetic oligonucleotide; GAG chr11 5283157 5283176 5283173 +
ttctcgcatccacaatatct

SEQ ID NO: 15267 - DNA, 20 bp, Artificial Sequence
  Synthetic oligonucleotide; TGG chr11 5283174 5283193 5283190 +
tctgagtttgtgttttgctg

SEQ ID NO: 15268 - DNA, 20 bp, Artificial Sequence
  Synthetic oligonucleotide; CAG chr11 5283192 5283211 5283208 +
tgtggaaaaaacactgtctt

SEQ ID NO: 15269 - DNA, 20 bp, Artificial Sequence
  Synthetic oligonucleotide; GAG chr11 5283194 5283213 5283210 +
tggaaaaaacactgtcttca

SEQ ID NO: 15270 - DNA, 20 bp, Artificial Sequence
  Synthetic oligonucleotide; AGG chr11 5283195 5283214 5283211 +
ggaaaaaacactgtcttcag

SEQ ID NO: 15271 - DNA, 20 bp, Artificial Sequence
  Synthetic oligonucleotide; TAG chr11 5283198 5283217 5283214 +
aaaaacactgtcttcagagg

SEQ ID NO: 15272 - DNA, 20 bp, Artificial Sequence
  Synthetic oligonucleotide; CAG chr11 5283201 5283220 5283217 +
aacactgtcttcagaggtag

SEQ ID NO: 15273 - DNA, 20 bp, Artificial Sequence
  Synthetic oligonucleotide; TGG chr11 5283207 5283226 5283223 +
gtcttcagaggtagcagaac

SEQ ID NO: 15274 - DNA, 20 bp, Artificial Sequence
  Synthetic oligonucleotide; GGG chr11 5283208 5283227 5283224 +
tcttcagaggtagcagaact

SEQ ID NO: 15275 - DNA, 20 bp, Artificial Sequence
  Synthetic oligonucleotide; TAG chr11 5283220 5283239 5283236 +
gcagaactgggtctacatcc

SEQ ID NO: 15276 - DNA, 20 bp, Artificial Sequence
  Synthetic oligonucleotide; TGG chr11 5283233 5283252 5283249 +
tacatcctagccttactact

SEQ ID NO: 15277 - DNA, 20 bp, Artificial Sequence
  Synthetic oligonucleotide; TGG chr11 5283236 5283255 5283252 +
atcctagccttactacttgg

SEQ ID NO: 15278 - DNA, 20 bp, Artificial Sequence
  Synthetic oligonucleotide; AAG chr11 5283245 5283264 5283261 +
ttactacttggtggttctgt

SEQ ID NO: 15279 - DNA, 20 bp, Artificial Sequence
  Synthetic oligonucleotide; TGG chr11 5283250 5283269 5283266 +
acttggtggttctgtaagct

SEQ ID NO: 15280 - DNA, 20 bp, Artificial Sequence
  Synthetic oligonucleotide; GAG chr11 5283280 5283299 5283296 +
atttcatgtctttgattttc

SEQ ID NO: 15281 - DNA, 20 bp, Artificial Sequence
  Synthetic oligonucleotide; CAG chr11 5283287 5283306 5283303 +
gtctttgattttcgagtccc

SEQ ID NO: 15282 - DNA, 20 bp, Artificial Sequence
  Synthetic oligonucleotide; AAG chr11 5283295 5283314 5283311 +
ttttcgagtccccagttaat

SEQ ID NO: 15283 - DNA, 20 bp, Artificial Sequence
  Synthetic oligonucleotide; GAG chr11 5283297 5283316 5283313 +
ttcgagtccccagttaataa

SEQ ID NO: 15284 - DNA, 20 bp, Artificial Sequence
  Synthetic oligonucleotide; TAG chr11 5283311 5283330 5283327 +
taataagagctcatgtaatg

SEQ ID NO: 15285 - DNA, 20 bp, Artificial Sequence
  Synthetic oligonucleotide; CAG chr11 5283315 5283334 5283331 +
aagagctcatgtaatgtaga

SEQ ID NO: 15286 - DNA, 20 bp, Artificial Sequence
  Synthetic oligonucleotide; TAG chr11 5283318 5283337 5283334 +
agctcatgtaatgtagacag

SEQ ID NO: 15287 - DNA, 20 bp, Artificial Sequence
  Synthetic oligonucleotide; AGG chr11 5283319 5283338 5283335 +
gctcatgtaatgtagacagt

SEQ ID NO: 15288 - DNA, 20 bp, Artificial Sequence
  Synthetic oligonucleotide; GAG chr11 5283321 5283340 5283337 +
tcatgtaatgtagacagtag

SEQ ID NO: 15289 - DNA, 20 bp, Artificial Sequence
  Synthetic oligonucleotide; GAG chr11 5283323 5283342 5283339 +
atgtaatgtagacagtagga

SEQ ID NO: 15290 - DNA, 20 bp, Artificial Sequence
  Synthetic oligonucleotide; CAG chr11 5283328 5283347 5283344 +
atgtagacagtaggagagct

SEQ ID NO: 15291 - DNA, 20 bp, Artificial Sequence
  Synthetic oligonucleotide; TAG chr11 5283366 5283385 5283382 +
attactaattgtctacttat

SEQ ID NO: 15292 - DNA, 20 bp, Artificial Sequence
  Synthetic oligonucleotide; AAG chr11 5283383 5283402 5283399 +
tattagcttgtgctttcaat

SEQ ID NO: 15293 - DNA, 20 bp, Artificial Sequence
  Synthetic oligonucleotide; AAG chr11 5283400 5283419 5283416 +
aataagttgatctacactac

SEQ ID NO: 15294 - DNA, 20 bp, Artificial Sequence
  Synthetic oligonucleotide; TGG chr11 5283408 5283427 5283424 +
gatctacactacaagtacat

SEQ ID NO: 15295 - DNA, 20 bp, Artificial Sequence
  Synthetic oligonucleotide; GGG chr11 5283409 5283428 5283425 +
atctacactacaagtacatt

SEQ ID NO: 15296 - DNA, 20 bp, Artificial Sequence
  Synthetic oligonucleotide; GAG chr11 5283428 5283447 5283444 +
tgggctcctcatcaataaat

SEQ ID NO: 15297 - DNA, 20 bp, Artificial Sequence
  Synthetic oligonucleotide; AGG chr11 5283429 5283448 5283445 +
gggctcctcatcaataaatg

SEQ ID NO: 15298 - DNA, 20 bp, Artificial Sequence
  Synthetic oligonucleotide; GAG chr11 5283447 5283466 5283463 +
tgaggtaataatctacttct

SEQ ID NO: 15299 - DNA, 20 bp, Artificial Sequence
  Synthetic oligonucleotide; TGG chr11 5283453 5283472 5283469 +
aataatctacttctgagtat

SEQ ID NO: 15300 - DNA, 20 bp, Artificial Sequence
  Synthetic oligonucleotide; GAG chr11 5283459 5283478 5283475 +
ctacttctgagtattggtgt

SEQ ID NO: 15301 - DNA, 20 bp, Artificial Sequence
  Synthetic oligonucleotide; AAG chr11 5283469 5283488 5283485 +
gtattggtgtgagtaaaact

SEQ ID NO: 15302 - DNA, 20 bp, Artificial Sequence
  Synthetic oligonucleotide; GAG chr11 5283506 5283525 5283522 +
aaacttcttttttttttttt

SEQ ID NO: 15303 - DNA, 20 bp, Artificial Sequence
  Synthetic oligonucleotide; TGG chr11 5283510 5283529 5283526 +
ttctttttttttttttgaga

SEQ ID NO: 15304 - DNA, 20 bp, Artificial Sequence
  Synthetic oligonucleotide; GAG chr11 5283512 5283531 5283528 +
ctttttttttttttgagatg

SEQ ID NO: 15305 - DNA, 20 bp, Artificial Sequence
  Synthetic oligonucleotide; TAG chr11 5283530 5283549 5283546 +
tggagtctcactctgtcgcc

SEQ ID NO: 15306 - DNA, 20 bp, Artificial Sequence
  Synthetic oligonucleotide; AGG chr11 5283531 5283550 5283547 +
ggagtctcactctgtcgcct

SEQ ID NO: 15307 - DNA, 20 bp, Artificial Sequence
  Synthetic oligonucleotide; TGG chr11 5283535 5283554 5283551 +
tctcactctgtcgcctaggc

SEQ ID NO: 15308 - DNA, 20 bp, Artificial Sequence
  Synthetic oligonucleotide; GAG chr11 5283537 5283556 5283553 +
tcactctgtcgcctaggctg

SEQ ID NO: 15309 - DNA, 20 bp, Artificial Sequence
  Synthetic oligonucleotide; CAG chr11 5283542 5283561 5283558 +
ctgtcgcctaggctggagtg

SEQ ID NO: 15310 - DNA, 20 bp, Artificial Sequence
  Synthetic oligonucleotide; TGG chr11 5283545 5283564 5283561 +
tcgcctaggctggagtgcag

SEQ ID NO: 15311 - DNA, 20 bp, Artificial Sequence
  Synthetic oligonucleotide; TAG chr11 5283556 5283575 5283572 +
ggagtgcagtggtgcaatct

SEQ ID NO: 15312 - DNA, 20 bp, Artificial Sequence
  Synthetic oligonucleotide; TGG chr11 5283580 5283599 5283596 +
tcactgcaacctccacctcc

SEQ ID NO: 15313 - DNA, 20 bp, Artificial Sequence
  Synthetic oligonucleotide; GGG chr11 5283581 5283600 5283597 +
cactgcaacctccacctcct

SEQ ID NO: 15314 - DNA, 20 bp, Artificial Sequence
  Synthetic oligonucleotide; AAG chr11 5283587 5283606 5283603 +
aacctccacctcctgggttc

SEQ ID NO: 15315 - DNA, 20 bp, Artificial Sequence
  Synthetic oligonucleotide; CAG chr11 5283604 5283623 5283620 +
ttcaagtgattctcctgcct

SEQ ID NO: 15316 - DNA, 20 bp, Artificial Sequence
  Synthetic oligonucleotide; GAG chr11 5283613 5283632 5283629 +
ttctcctgcctcagcctcct

SEQ ID NO: 15317 - DNA, 20 bp, Artificial Sequence
  Synthetic oligonucleotide; TAG chr11 5283616 5283635 5283632 +
tcctgcctcagcctcctgag

SEQ ID NO: 15318 - DNA, 20 bp, Artificial Sequence
  Synthetic oligonucleotide; TGG chr11 5283620 5283639 5283636 +
gcctcagcctcctgagtagc

SEQ ID NO: 15319 - DNA, 20 bp, Artificial Sequence
  Synthetic oligonucleotide; GGG chr11 5283621 5283640 5283637 +
cctcagcctcctgagtagct

SEQ ID NO: 15320 - DNA, 20 bp, Artificial Sequence
  Synthetic oligonucleotide; TAG chr11 5283628 5283647 5283644 +
ctcctgagtagctgggatta

SEQ ID NO: 15321 - DNA, 20 bp, Artificial Sequence
  Synthetic oligonucleotide; TGG chr11 5283648 5283667 5283664 +
tagacgcgtgccaccacacc

SEQ ID NO: 15322 - DNA, 20 bp, Artificial Sequence
  Synthetic oligonucleotide; TAG chr11 5283669 5283688 5283685 +
ggctgattttttgtattttt

SEQ ID NO: 15323 - DNA, 20 bp, Artificial Sequence
  Synthetic oligonucleotide; TAG chr11 5283672 5283691 5283688 +
tgattttttgtattttttag

SEQ ID NO: 15324 - DNA, 20 bp, Artificial Sequence
  Synthetic oligonucleotide; GAG chr11 5283674 5283693 5283690 +
attttttgtattttttagta

SEQ ID NO: 15325 - DNA, 20 bp, Artificial Sequence
  Synthetic oligonucleotide; AAG chr11 5283677 5283696 5283693 +
ttttgtattttttagtagag

SEQ ID NO: 15326 - DNA, 20 bp, Artificial Sequence
  Synthetic oligonucleotide; AGG chr11 5283678 5283697 5283694 +
tttgtattttttagtagaga

SEQ ID NO: 15327 - DNA, 20 bp, Artificial Sequence
  Synthetic oligonucleotide; GGG chr11 5283679 5283698 5283695 +
ttgtattttttagtagagaa

SEQ ID NO: 15328 - DNA, 20 bp, Artificial Sequence
  Synthetic oligonucleotide; GGG chr11 5283680 5283699 5283696 +
tgtattttttagtagagaag

SEQ ID NO: 15329 - DNA, 20 bp, Artificial Sequence
  Synthetic oligonucleotide; TGG chr11 5283694 5283713 5283710 +
gagaaggggtttcaccatgt

SEQ ID NO: 15330 - DNA, 20 bp, Artificial Sequence
  Synthetic oligonucleotide; CAG chr11 5283698 5283717 5283714 +
aggggtttcaccatgttggc

SEQ ID NO: 15331 - DNA, 20 bp, Artificial Sequence
  Synthetic oligonucleotide; AGG chr11 5283699 5283718 5283715 +
ggggtttcaccatgttggcc

SEQ ID NO: 15332 - DNA, 20 bp, Artificial Sequence
  Synthetic oligonucleotide; TGG chr11 5283703 5283722 5283719 +
tttcaccatgttggccaggc

SEQ ID NO: 15333 - DNA, 20 bp, Artificial Sequence
  Synthetic oligonucleotide; TGG chr11 5283708 5283727 5283724 +
ccatgttggccaggctggtc

SEQ ID NO: 15334 - DNA, 20 bp, Artificial Sequence
  Synthetic oligonucleotide; CAG chr11 5283723 5283742 5283739 +
tggtctggaactcctgacct

SEQ ID NO: 15335 - DNA, 20 bp, Artificial Sequence
  Synthetic oligonucleotide; AGG chr11 5283724 5283743 5283740 +
ggtctggaactcctgacctc

SEQ ID NO: 15336 - DNA, 20 bp, Artificial Sequence
  Synthetic oligonucleotide; TGG chr11 5283741 5283760 5283757 +
ctcaggtgatccaattgcct

SEQ ID NO: 15337 - DNA, 20 bp, Artificial Sequence
  Synthetic oligonucleotide; AAG chr11 5283751 5283770 5283767 +
ccaattgccttggcctccca

SEQ ID NO: 15338 - DNA, 20 bp, Artificial Sequence
  Synthetic oligonucleotide; TGG chr11 5283757 5283776 5283773 +
gccttggcctcccaaagtgc

SEQ ID NO: 15339 - DNA, 20 bp, Artificial Sequence
  Synthetic oligonucleotide; GGG chr11 5283758 5283777 5283774 +
ccttggcctcccaaagtgct

SEQ ID NO: 15340 - DNA, 20 bp, Artificial Sequence
  Synthetic oligonucleotide; CAG chr11 5283765 5283784 5283781 +
ctcccaaagtgctgggatta

SEQ ID NO: 15341 - DNA, 20 bp, Artificial Sequence
  Synthetic oligonucleotide; AGG chr11 5283766 5283785 5283782 +
tcccaaagtgctgggattac

SEQ ID NO: 15342 - DNA, 20 bp, Artificial Sequence
  Synthetic oligonucleotide; GAG chr11 5283786 5283805 5283802 +
aggcatgtaatcccatatat

SEQ ID NO: 15343 - DNA, 20 bp, Artificial Sequence
  Synthetic oligonucleotide; CGG chr11 5283799 5283818 5283815 +
catatatgagccaccgtgcc

SEQ ID NO: 15344 - DNA, 20 bp, Artificial Sequence
  Synthetic oligonucleotide; TAG chr11 5283830 5283849 5283846 +
gataaacttaaatttgattc

SEQ ID NO: 15345 - DNA, 20 bp, Artificial Sequence
  Synthetic oligonucleotide; AAG chr11 5283841 5283860 5283857 +
atttgattctagcatatact

SEQ ID NO: 15346 - DNA, 20 bp, Artificial Sequence
  Synthetic oligonucleotide; AAG chr11 5283849 5283868 5283865 +
ctagcatatactaagtactc

SEQ ID NO: 15347 - DNA, 20 bp, Artificial Sequence
  Synthetic oligonucleotide; GAG chr11 5283851 5283870 5283867 +
agcatatactaagtactcaa

SEQ ID NO: 15348 - DNA, 20 bp, Artificial Sequence
  Synthetic oligonucleotide; AGG chr11 5283852 5283871 5283868 +
gcatatactaagtactcaag

SEQ ID NO: 15349 - DNA, 20 bp, Artificial Sequence
  Synthetic oligonucleotide; TAG chr11 5283868 5283887 5283884 +
caagaggtgttacttatcat

SEQ ID NO: 15350 - DNA, 20 bp, Artificial Sequence
  Synthetic oligonucleotide; TAG chr11 5283880 5283899 5283896 +
cttatcattagtattaatta

SEQ ID NO: 15351 - DNA, 20 bp, Artificial Sequence
  Synthetic oligonucleotide; CAG chr11 5283906 5283925 5283922 +
gttcaataatacatatctca

SEQ ID NO: 15352 - DNA, 20 bp, Artificial Sequence
  Synthetic oligonucleotide; GAG chr11 5283925 5283944 5283941 +
acagaattaccatatgtaat

SEQ ID NO: 15353 - DNA, 20 bp, Artificial Sequence
  Synthetic oligonucleotide; TGG chr11 5283947 5283966 5283963 +
gattattaaatatcataaaa

SEQ ID NO: 15354 - DNA, 20 bp, Artificial Sequence
  Synthetic oligonucleotide; TAG chr11 5283961 5283980 5283977 +
ataaaatggcacctgacata

SEQ ID NO: 15355 - DNA, 20 bp, Artificial Sequence
  Synthetic oligonucleotide; AAG chr11 5283965 5283984 5283981 +
aatggcacctgacatataga

SEQ ID NO: 15356 - DNA, 20 bp, Artificial Sequence
  Synthetic oligonucleotide; CAG chr11 5283972 5283991 5283988 +
cctgacatatagaaagattt

SEQ ID NO: 15357 - DNA, 20 bp, Artificial Sequence
  Synthetic oligonucleotide; AAG chr11 5283976 5283995 5283992 +
acatatagaaagatttcagt

SEQ ID NO: 15358 - DNA, 20 bp, Artificial Sequence
  Synthetic oligonucleotide; CAG chr11 5284010 5284029 5284026 +
acttctctttcatttacctc

SEQ ID NO: 15359 - DNA, 20 bp, Artificial Sequence
  Synthetic oligonucleotide; TGG chr11 5284047 5284066 5284063 +
atttcctcgtgtctctcatg

SEQ ID NO: 15360 - DNA, 20 bp, Artificial Sequence
  Synthetic oligonucleotide; TAG chr11 5284054 5284073 5284070 +
cgtgtctctcatgtggtttc

SEQ ID NO: 15361 - DNA, 20 bp, Artificial Sequence
  Synthetic oligonucleotide; CAG chr11 5284093 5284112 5284109 +
tttccctctcaactcctgtg

SEQ ID NO: 15362 - DNA, 20 bp, Artificial Sequence
  Synthetic oligonucleotide; CAG chr11 5284118 5284137 5284134 +
tcctaaaaatttctcatgtt

SEQ ID NO: 15363 - DNA, 20 bp, Artificial Sequence
  Synthetic oligonucleotide; TGG chr11 5284126 5284145 5284142 +
atttctcatgttcagaacct

SEQ ID NO: 15364 - DNA, 20 bp, Artificial Sequence
  Synthetic oligonucleotide; GGG chr11 5284127 5284146 5284143 +
tttctcatgttcagaacctt

SEQ ID NO: 15365 - DNA, 20 bp, Artificial Sequence
  Synthetic oligonucleotide; CAG chr11 5284142 5284161 5284158 +
accttgggcttccatgtttc

SEQ ID NO: 15366 - DNA, 20 bp, Artificial Sequence
  Synthetic oligonucleotide; AAG chr11 5284147 5284166 5284163 +
gggcttccatgtttccagtg

SEQ ID NO: 15367 - DNA, 20 bp, Artificial Sequence
  Synthetic oligonucleotide; CAG chr11 5284151 5284170 5284167 +
ttccatgtttccagtgaagt

SEQ ID NO: 15368 - DNA, 20 bp, Artificial Sequence
  Synthetic oligonucleotide; TAG chr11 5284161 5284180 5284177 +
ccagtgaagtcagatttttt

SEQ ID NO: 15369 - DNA, 20 bp, Artificial Sequence
  Synthetic oligonucleotide; TGG chr11 5284165 5284184 5284181 +
tgaagtcagatttttttaga

SEQ ID NO: 15370 - DNA, 20 bp, Artificial Sequence
  Synthetic oligonucleotide; AAG chr11 5284170 5284189 5284186 +
tcagatttttttagatggca

SEQ ID NO: 15371 - DNA, 20 bp, Artificial Sequence
  Synthetic oligonucleotide; TAG chr11 5284180 5284199 5284196 +
ttagatggcaaagttgctgt

SEQ ID NO: 15372 - DNA, 20 bp, Artificial Sequence
  Synthetic oligonucleotide; TAG chr11 5284205 5284224 5284221 +
aatttcatctgtgccctgct

SEQ ID NO: 15373 - DNA, 20 bp, Artificial Sequence
  Synthetic oligonucleotide; AGG chr11 5284206 5284225 5284222 +
atttcatctgtgccctgctt

SEQ ID NO: 15374 - DNA, 20 bp, Artificial Sequence
  Synthetic oligonucleotide; GAG chr11 5284208 5284227 5284224 +
ttcatctgtgccctgcttag

SEQ ID NO: 15375 - DNA, 20 bp, Artificial Sequence
  Synthetic oligonucleotide; AAG chr11 5284226 5284245 5284242 +
aggagcttaatctttaatga

SEQ ID NO: 15376 - DNA, 20 bp, Artificial Sequence
  Synthetic oligonucleotide; AAG chr11 5284231 5284250 5284247 +
cttaatctttaatgaaagct

SEQ ID NO: 15377 - DNA, 20 bp, Artificial Sequence
  Synthetic oligonucleotide; AAG chr11 5284247 5284266 5284263 +
agctaagctttcattaaaaa

SEQ ID NO: 15378 - DNA, 20 bp, Artificial Sequence
  Synthetic oligonucleotide; CAG chr11 5284256 5284275 5284272 +
ttcattaaaaaaagtctaac

SEQ ID NO: 15379 - DNA, 20 bp, Artificial Sequence
  Synthetic oligonucleotide; CAG chr11 5284278 5284297 5284294 +
gctgcattcgactttgactg

SEQ ID NO: 15380 - DNA, 20 bp, Artificial Sequence
  Synthetic oligonucleotide; CAG chr11 5284281 5284300 5284297 +
gcattcgactttgactgcag

SEQ ID NO: 15381 - DNA, 20 bp, Artificial Sequence
  Synthetic oligonucleotide; TGG chr11 5284285 5284304 5284301 +
tcgactttgactgcagcagc

SEQ ID NO: 15382 - DNA, 20 bp, Artificial Sequence
  Synthetic oligonucleotide; TAG chr11 5284289 5284308 5284305 +
ctttgactgcagcagctggt

SEQ ID NO: 15383 - DNA, 20 bp, Artificial Sequence
  Synthetic oligonucleotide; AAG chr11 5284292 5284311 5284308 +
tgactgcagcagctggttag

SEQ ID NO: 15384 - DNA, 20 bp, Artificial Sequence
  Synthetic oligonucleotide; AGG chr11 5284293 5284312 5284309 +
gactgcagcagctggttaga

SEQ ID NO: 15385 - DNA, 20 bp, Artificial Sequence
  Synthetic oligonucleotide; TGG chr11 5284302 5284321 5284318 +
agctggttagaaggttctac

SEQ ID NO: 15386 - DNA, 20 bp, Artificial Sequence
  Synthetic oligonucleotide; GAG chr11 5284304 5284323 5284320 +
ctggttagaaggttctactg

SEQ ID NO: 15387 - DNA, 20 bp, Artificial Sequence
  Synthetic oligonucleotide; AGG chr11 5284305 5284324 5284321 +
tggttagaaggttctactgg

SEQ ID NO: 15388 - DNA, 20 bp, Artificial Sequence
  Synthetic oligonucleotide; GAG chr11 5284307 5284326 5284323 +
gttagaaggttctactggag

SEQ ID NO: 15389 - DNA, 20 bp, Artificial Sequence
  Synthetic oligonucleotide; AGG chr11 5284308 5284327 5284324 +
ttagaaggttctactggagg

SEQ ID NO: 15390 - DNA, 20 bp, Artificial Sequence
  Synthetic oligonucleotide; GGG chr11 5284309 5284328 5284325 +
tagaaggttctactggagga

SEQ ID NO: 15391 - DNA, 20 bp, Artificial Sequence
  Synthetic oligonucleotide; CAG chr11 5284315 5284334 5284331 +
gttctactggaggagggtcc

SEQ ID NO: 15392 - DNA, 20 bp, Artificial Sequence
  Synthetic oligonucleotide; CAG chr11 5284337 5284356 5284353 +
gcccattgctaaattaacat

SEQ ID NO: 15393 - DNA, 20 bp, Artificial Sequence
  Synthetic oligonucleotide; AGG chr11 5284338 5284357 5284354 +
cccattgctaaattaacatc

SEQ ID NO: 15394 - DNA, 20 bp, Artificial Sequence
  Synthetic oligonucleotide; GAG chr11 5284345 5284364 5284361 +
ctaaattaacatcaggctct

SEQ ID NO: 15395 - DNA, 20 bp, Artificial Sequence
  Synthetic oligonucleotide; TGG chr11 5284350 5284369 5284366 +
ttaacatcaggctctgagac

SEQ ID NO: 15396 - DNA, 20 bp, Artificial Sequence
  Synthetic oligonucleotide; CAG chr11 5284353 5284372 5284369 +
acatcaggctctgagactgg

SEQ ID NO: 15397 - DNA, 20 bp, Artificial Sequence
  Synthetic oligonucleotide; CAG chr11 5284367 5284386 5284383 +
gactggcagtatatctctaa

SEQ ID NO: 15398 - DNA, 20 bp, Artificial Sequence
  Synthetic oligonucleotide; TGG chr11 5284370 5284389 5284386 +
tggcagtatatctctaacag

SEQ ID NO: 15399 - DNA, 20 bp, Artificial Sequence
  Synthetic oligonucleotide; TGG chr11 5284387 5284406 5284403 +
cagtggttgatgctatcttc

SEQ ID NO: 15400 - DNA, 20 bp, Artificial Sequence
  Synthetic oligonucleotide; GAG chr11 5284407 5284426 5284423 +
tggaacttgcctgctacatt

SEQ ID NO: 15401 - DNA, 20 bp, Artificial Sequence
  Synthetic oligonucleotide; TAG chr11 5284426 5284445 5284442 +
tgagaccactgacccataca

SEQ ID NO: 15402 - DNA, 20 bp, Artificial Sequence
  Synthetic oligonucleotide; AGG chr11 5284427 5284446 5284443 +
gagaccactgacccatacat

SEQ ID NO: 15403 - DNA, 20 bp, Artificial Sequence
  Synthetic oligonucleotide; AAG chr11 5284430 5284449 5284446 +
accactgacccatacatagg

SEQ ID NO: 15404 - DNA, 20 bp, Artificial Sequence
  Synthetic oligonucleotide; TAG chr11 5284437 5284456 5284453 +
acccatacataggaagccca

SEQ ID NO: 15405 - DNA, 20 bp, Artificial Sequence
  Synthetic oligonucleotide; TAG chr11 5284456 5284475 5284472 +
atagctctgtcctgaactgt

SEQ ID NO: 15406 - DNA, 20 bp, Artificial Sequence
  Synthetic oligonucleotide; AGG chr11 5284457 5284476 5284473 +
tagctctgtcctgaactgtt

SEQ ID NO: 15407 - DNA, 20 bp, Artificial Sequence
  Synthetic oligonucleotide; TGG chr11 5284464 5284483 5284480 +
gtcctgaactgttaggccac

SEQ ID NO: 15408 - DNA, 20 bp, Artificial Sequence
  Synthetic oligonucleotide; CAG chr11 5284469 5284488 5284485 +
gaactgttaggccactggtc

SEQ ID NO: 15409 - DNA, 20 bp, Artificial Sequence
  Synthetic oligonucleotide; GAG chr11 5284471 5284490 5284487 +
actgttaggccactggtcca

SEQ ID NO: 15410 - DNA, 20 bp, Artificial Sequence
  Synthetic oligonucleotide; GAG chr11 5284473 5284492 5284489 +
tgttaggccactggtccaga

SEQ ID NO: 15411 - DNA, 20 bp, Artificial Sequence
  Synthetic oligonucleotide; GAG chr11 5284510 5284529 5284526 +
gatcctcataataaccctat

SEQ ID NO: 15412 - DNA, 20 bp, Artificial Sequence
  Synthetic oligonucleotide; TAG chr11 5284514 5284533 5284530 +
ctcataataaccctatgaga

SEQ ID NO: 15413 - DNA, 20 bp, Artificial Sequence
  Synthetic oligonucleotide; TAG chr11 5284540 5284559 5284556 +
caattattactcttacttta

SEQ ID NO: 15414 - DNA, 20 bp, Artificial Sequence
  Synthetic oligonucleotide; TAG chr11 5284561 5284580 5284577 +
agatgatgatcctgaaaaca

SEQ ID NO: 15415 - DNA, 20 bp, Artificial Sequence
  Synthetic oligonucleotide; AGG chr11 5284562 5284581 5284578 +
gatgatgatcctgaaaacat

SEQ ID NO: 15416 - DNA, 20 bp, Artificial Sequence
  Synthetic oligonucleotide; GAG chr11 5284564 5284583 5284580 +
tgatgatcctgaaaacatag

SEQ ID NO: 15417 - DNA, 20 bp, Artificial Sequence
  Synthetic oligonucleotide; AAG chr11 5284569 5284588 5284585 +
atcctgaaaacataggagtc

SEQ ID NO: 15418 - DNA, 20 bp, Artificial Sequence
  Synthetic oligonucleotide; AGG chr11 5284570 5284589 5284586 +
tcctgaaaacataggagtca

SEQ ID NO: 15419 - DNA, 20 bp, Artificial Sequence
  Synthetic oligonucleotide; TAG chr11 5284583 5284602 5284599 +
ggagtcaaggcacttgcccc

SEQ ID NO: 15420 - DNA, 20 bp, Artificial Sequence
  Synthetic oligonucleotide; TGG chr11 5284587 5284606 5284603 +
tcaaggcacttgcccctagc

SEQ ID NO: 15421 - DNA, 20 bp, Artificial Sequence
  Synthetic oligonucleotide; GGG chr11 5284588 5284607 5284604 +
caaggcacttgcccctagct

SEQ ID NO: 15422 - DNA, 20 bp, Artificial Sequence
  Synthetic oligonucleotide; GGG chr11 5284589 5284608 5284605 +
aaggcacttgcccctagctg

SEQ ID NO: 15423 - DNA, 20 bp, Artificial Sequence
  Synthetic oligonucleotide; GGG chr11 5284590 5284609 5284606 +
aggcacttgcccctagctgg

SEQ ID NO: 15424 - DNA, 20 bp, Artificial Sequence
  Synthetic oligonucleotide; TAG chr11 5284595 5284614 5284611 +
cttgcccctagctgggggta

SEQ ID NO: 15425 - DNA, 20 bp, Artificial Sequence
  Synthetic oligonucleotide; AGG chr11 5284596 5284615 5284612 +
ttgcccctagctgggggtat

SEQ ID NO: 15426 - DNA, 20 bp, Artificial Sequence
  Synthetic oligonucleotide; GGG chr11 5284597 5284616 5284613 +
tgcccctagctgggggtata

SEQ ID NO: 15427 - DNA, 20 bp, Artificial Sequence
  Synthetic oligonucleotide; GGG chr11 5284598 5284617 5284614 +
gcccctagctgggggtatag

SEQ ID NO: 15428 - DNA, 20 bp, Artificial Sequence
  Synthetic oligonucleotide; GAG chr11 5284600 5284619 5284616 +
ccctagctgggggtataggg

SEQ ID NO: 15429 - DNA, 20 bp, Artificial Sequence
  Synthetic oligonucleotide; CAG chr11 5284603 5284622 5284619 +
tagctgggggtataggggag

SEQ ID NO: 15430 - DNA, 20 bp, Artificial Sequence
  Synthetic oligonucleotide; TAG chr11 5284613 5284632 5284629 +
tataggggagcagtcccatg

SEQ ID NO: 15431 - DNA, 20 bp, Artificial Sequence
  Synthetic oligonucleotide; TAG chr11 5284616 5284635 5284632 +
aggggagcagtcccatgtag

SEQ ID NO: 15432 - DNA, 20 bp, Artificial Sequence
  Synthetic oligonucleotide; TAG chr11 5284619 5284638 5284635 +
ggagcagtcccatgtagtag

SEQ ID NO: 15433 - DNA, 20 bp, Artificial Sequence
  Synthetic oligonucleotide; TGG chr11 5284681 5284700 5284697 +
ccatgtctgccctctactca

SEQ ID NO: 15434 - DNA, 20 bp, Artificial Sequence
  Synthetic oligonucleotide; TGG chr11 5284695 5284714 5284711 +
tactcatggtctatctctcc

SEQ ID NO: 15435 - DNA, 20 bp, Artificial Sequence
  Synthetic oligonucleotide; TGG chr11 5284702 5284721 5284718 +
ggtctatctctcctggctcc

SEQ ID NO: 15436 - DNA, 20 bp, Artificial Sequence
  Synthetic oligonucleotide; GGG chr11 5284703 5284722 5284719 +
gtctatctctcctggctcct

SEQ ID NO: 15437 - DNA, 20 bp, Artificial Sequence
  Synthetic oligonucleotide; GAG chr11 5284705 5284724 5284721 +
ctatctctcctggctcctgg

SEQ ID NO: 15438 - DNA, 20 bp, Artificial Sequence
  Synthetic oligonucleotide; TGG chr11 5284711 5284730 5284727 +
ctcctggctcctgggagtca

SEQ ID NO: 15439 - DNA, 20 bp, Artificial Sequence
  Synthetic oligonucleotide; CAG chr11 5284722 5284741 5284738 +
tgggagtcatggactccacc

SEQ ID NO: 15440 - DNA, 20 bp, Artificial Sequence
  Synthetic oligonucleotide; GAG chr11 5284754 5284773 5284770 +
cctgacctaaccacctatct

SEQ ID NO: 15441 - DNA, 20 bp, Artificial Sequence
  Synthetic oligonucleotide; CAG chr11 5284762 5284781 5284778 +
aaccacctatctgagcctgc

SEQ ID NO: 15442 - DNA, 20 bp, Artificial Sequence
  Synthetic oligonucleotide; TGG chr11 5284778 5284797 5284794 +
ctgccagcctataacccatc

SEQ ID NO: 15443 - DNA, 20 bp, Artificial Sequence
  Synthetic oligonucleotide; GGG chr11 5284779 5284798 5284795 +
tgccagcctataacccatct

SEQ ID NO: 15444 - DNA, 20 bp, Artificial Sequence
  Synthetic oligonucleotide; TAG chr11 5284788 5284807 5284804 +
ataacccatctgggccctga

SEQ ID NO: 15445 - DNA, 20 bp, Artificial Sequence
  Synthetic oligonucleotide; TGG chr11 5284792 5284811 5284808 +
cccatctgggccctgatagc

SEQ ID NO: 15446 - DNA, 20 bp, Artificial Sequence
  Synthetic oligonucleotide; TGG chr11 5284795 5284814 5284811 +
atctgggccctgatagctgg

SEQ ID NO: 15447 - DNA, 20 bp, Artificial Sequence
  Synthetic oligonucleotide; CAG chr11 5284799 5284818 5284815 +
gggccctgatagctggtggc

SEQ ID NO: 15448 - DNA, 20 bp, Artificial Sequence
  Synthetic oligonucleotide; TGG chr11 5284825 5284844 5284841 +
tgaccccaccccaccctccc

SEQ ID NO: 15449 - DNA, 20 bp, Artificial Sequence
  Synthetic oligonucleotide; TAG chr11 5284837 5284856 5284853 +
accctccctggaacctctga

SEQ ID NO: 15450 - DNA, 20 bp, Artificial Sequence
  Synthetic oligonucleotide; TGG chr11 5284847 5284866 5284863 +
gaacctctgatagacacatc

SEQ ID NO: 15451 - DNA, 20 bp, Artificial Sequence
  Synthetic oligonucleotide; CAG chr11 5284855 5284874 5284871 +
gatagacacatctggcacac

SEQ ID NO: 15452 - DNA, 20 bp, Artificial Sequence
  Synthetic oligonucleotide; AAG chr11 5284864 5284883 5284880 +
atctggcacaccagctcgca

SEQ ID NO: 15453 - DNA, 20 bp, Artificial Sequence
  Synthetic oligonucleotide; GAG chr11 5284874 5284893 5284890 +
ccagctcgcaaagtcaccgt

SEQ ID NO: 15454 - DNA, 20 bp, Artificial Sequence
  Synthetic oligonucleotide; AGG chr11 5284875 5284894 5284891 +
cagctcgcaaagtcaccgtg

SEQ ID NO: 15455 - DNA, 20 bp, Artificial Sequence
  Synthetic oligonucleotide; GGG chr11 5284876 5284895 5284892 +
agctcgcaaagtcaccgtga

SEQ ID NO: 15456 - DNA, 20 bp, Artificial Sequence
  Synthetic oligonucleotide; GAG chr11 5284892 5284911 5284908 +
gtgagggtcttgtgtttgct

SEQ ID NO: 15457 - DNA, 20 bp, Artificial Sequence
  Synthetic oligonucleotide; AAG chr11 5284914 5284933 5284930 +
gtcaaaattccttgaaatcc

SEQ ID NO: 15458 - DNA, 20 bp, Artificial Sequence
  Synthetic oligonucleotide; TAG chr11 5284921 5284940 5284937 +
ttccttgaaatccaagtcct

SEQ ID NO: 15459 - DNA, 20 bp, Artificial Sequence
  Synthetic oligonucleotide; GAG chr11 5284923 5284942 5284939 +
ccttgaaatccaagtcctta

SEQ ID NO: 15460 - DNA, 20 bp, Artificial Sequence
  Synthetic oligonucleotide; CAG chr11 5284945 5284964 5284961 +
gactcctgctcccaaattta

SEQ ID NO: 15461 - DNA, 20 bp, Artificial Sequence
  Synthetic oligonucleotide; TAG chr11 5284951 5284970 5284967 +
tgctcccaaatttacagtca

SEQ ID NO: 15462 - DNA, 20 bp, Artificial Sequence
  Synthetic oligonucleotide; TGG chr11 5284963 5284982 5284979 +
tacagtcatagacttcttca

SEQ ID NO: 15463 - DNA, 20 bp, Artificial Sequence
  Synthetic oligonucleotide; CAG chr11 5284982 5285001 5284998 +
atggctgtctcctttatcca

SEQ ID NO: 15464 - DNA, 20 bp, Artificial Sequence
  Synthetic oligonucleotide; CAG chr11 5285030 5285049 5285046 +
atccatctgatcctcctcat

SEQ ID NO: 15465 - DNA, 20 bp, Artificial Sequence
  Synthetic oligonucleotide; CAG chr11 5285035 5285054 5285051 +
tctgatcctcctcatcagtg

SEQ ID NO: 15466 - DNA, 20 bp, Artificial Sequence
  Synthetic oligonucleotide; CAG chr11 5285040 5285059 5285056 +
tcctcctcatcagtgcagca

SEQ ID NO: 15467 - DNA, 20 bp, Artificial Sequence
  Synthetic oligonucleotide; AGG chr11 5285041 5285060 5285057 +
cctcctcatcagtgcagcac

SEQ ID NO: 15468 - DNA, 20 bp, Artificial Sequence
  Synthetic oligonucleotide; GGG chr11 5285042 5285061 5285058 +
ctcctcatcagtgcagcaca

SEQ ID NO: 15469 - DNA, 20 bp, Artificial Sequence
  Synthetic oligonucleotide; GAG chr11 5285050 5285069 5285066 +
cagtgcagcacagggcccat

SEQ ID NO: 15470 - DNA, 20 bp, Artificial Sequence
  Synthetic oligonucleotide; CAG chr11 5285053 5285072 5285069 +
tgcagcacagggcccatgag

SEQ ID NO: 15471 - DNA, 20 bp, Artificial Sequence
  Synthetic oligonucleotide; TAG chr11 5285056 5285075 5285072 +
agcacagggcccatgagcag

SEQ ID NO: 15472 - DNA, 20 bp, Artificial Sequence
  Synthetic oligonucleotide; CAG chr11 5285062 5285081 5285078 +
gggcccatgagcagtagctg

SEQ ID NO: 15473 - DNA, 20 bp, Artificial Sequence
  Synthetic oligonucleotide; GAG chr11 5285064 5285083 5285080 +
gcccatgagcagtagctgca

SEQ ID NO: 15474 - DNA, 20 bp, Artificial Sequence
  Synthetic oligonucleotide; TAG chr11 5285074 5285093 5285090 +
agtagctgcagagtctcaca

SEQ ID NO: 15475 - DNA, 20 bp, Artificial Sequence
  Synthetic oligonucleotide; AGG chr11 5285075 5285094 5285091 +
gtagctgcagagtctcacat

SEQ ID NO: 15476 - DNA, 20 bp, Artificial Sequence
  Synthetic oligonucleotide; TGG chr11 5285080 5285099 5285096 +
tgcagagtctcacataggtc

SEQ ID NO: 15477 - DNA, 20 bp, Artificial Sequence
  Synthetic oligonucleotide; TAG chr11 5285107 5285126 5285123 +
gcctctgacatgtccgacct

SEQ ID NO: 15478 - DNA, 20 bp, Artificial Sequence
  Synthetic oligonucleotide; AGG chr11 5285108 5285127 5285124 +
cctctgacatgtccgacctt

SEQ ID NO: 15479 - DNA, 20 bp, Artificial Sequence
  Synthetic oligonucleotide; GAG chr11 5285129 5285148 5285145 +
ggcaaatgcttgactcttct

SEQ ID NO: 15480 - DNA, 20 bp, Artificial Sequence
  Synthetic oligonucleotide; CAG chr11 5285134 5285153 5285150 +
atgcttgactcttctgagct

SEQ ID NO: 15481 - DNA, 20 bp, Artificial Sequence
  Synthetic oligonucleotide; TGG chr11 5285145 5285164 5285161 +
ttctgagctcagtcttgtca

SEQ ID NO: 15482 - DNA, 20 bp, Artificial Sequence
  Synthetic oligonucleotide; AAG chr11 5285155 5285174 5285171 +
agtcttgtcatggcaaaata

SEQ ID NO: 15483 - DNA, 20 bp, Artificial Sequence
  Synthetic oligonucleotide; TAG chr11 5285165 5285184 5285181 +
tggcaaaataaagataataa

SEQ ID NO: 15484 - DNA, 20 bp, Artificial Sequence
  Synthetic oligonucleotide; TGG chr11 5285178 5285197 5285194 +
ataataatagtgttttttta

SEQ ID NO: 15485 - DNA, 20 bp, Artificial Sequence
  Synthetic oligonucleotide; GAG chr11 5285180 5285199 5285196 +
aataatagtgtttttttatg

SEQ ID NO: 15486 - DNA, 20 bp, Artificial Sequence
  Synthetic oligonucleotide; TAG chr11 5285184 5285203 5285200 +
atagtgtttttttatggagt

SEQ ID NO: 15487 - DNA, 20 bp, Artificial Sequence
  Synthetic oligonucleotide; GAG chr11 5285190 5285209 5285206 +
tttttttatggagttagcgt

SEQ ID NO: 15488 - DNA, 20 bp, Artificial Sequence
  Synthetic oligonucleotide; AGG chr11 5285191 5285210 5285207 +
ttttttatggagttagcgtg

SEQ ID NO: 15489 - DNA, 20 bp, Artificial Sequence
  Synthetic oligonucleotide; TGG chr11 5285195 5285214 5285211 +
ttatggagttagcgtgagga

SEQ ID NO: 15490 - DNA, 20 bp, Artificial Sequence
  Synthetic oligonucleotide; TAG chr11 5285205 5285224 5285221 +
agcgtgaggatggaaaacaa

SEQ ID NO: 15491 - DNA, 20 bp, Artificial Sequence
  Synthetic oligonucleotide; TAG chr11 5285218 5285237 5285234 +
aaaacaatagcaaaattgat

SEQ ID NO: 15492 - DNA, 20 bp, Artificial Sequence
  Synthetic oligonucleotide; AAG chr11 5285228 5285247 5285244 +
caaaattgattagactataa

SEQ ID NO: 15493 - DNA, 20 bp, Artificial Sequence
  Synthetic oligonucleotide; AGG chr11 5285229 5285248 5285245 +
aaaattgattagactataaa

SEQ ID NO: 15494 - DNA, 20 bp, Artificial Sequence
  Synthetic oligonucleotide; TAG chr11 5285242 5285261 5285258 +
ctataaaaggtctcaacaaa

SEQ ID NO: 15495 - DNA, 20 bp, Artificial Sequence
  Synthetic oligonucleotide; TAG chr11 5285245 5285264 5285261 +
taaaaggtctcaacaaatag

SEQ ID NO: 15496 - DNA, 20 bp, Artificial Sequence
  Synthetic oligonucleotide; TAG chr11 5285248 5285267 5285264 +
aaggtctcaacaaatagtag

SEQ ID NO: 15497 - DNA, 20 bp, Artificial Sequence
  Synthetic oligonucleotide; AAG chr11 5285332 5285351 5285348 +
aattttcccttacctataat

SEQ ID NO: 15498 - DNA, 20 bp, Artificial Sequence
  Synthetic oligonucleotide; GAG chr11 5285334 5285353 5285350 +
ttttcccttacctataataa

SEQ ID NO: 15499 - DNA, 20 bp, Artificial Sequence
  Synthetic oligonucleotide; TAG chr11 5285363 5285382 5285379 +
ctcttattatattcttctta

SEQ ID NO: 15500 - DNA, 20 bp, Artificial Sequence
  Synthetic oligonucleotide; TGG chr11 5285372 5285391 5285388 +
tattcttcttatagtgattc

SEQ ID NO: 15501 - DNA, 20 bp, Artificial Sequence
  Synthetic oligonucleotide; AAG chr11 5285381 5285400 5285397 +
tatagtgattctggatatta

SEQ ID NO: 15502 - DNA, 20 bp, Artificial Sequence
  Synthetic oligonucleotide; TGG chr11 5285384 5285403 5285400 +
agtgattctggatattaaag

SEQ ID NO: 15503 - DNA, 20 bp, Artificial Sequence
  Synthetic oligonucleotide; GGG chr11 5285385 5285404 5285401 +
gtgattctggatattaaagt

SEQ ID NO: 15504 - DNA, 20 bp, Artificial Sequence
  Synthetic oligonucleotide; GAG chr11 5285391 5285410 5285407 +
ctggatattaaagtgggaat

SEQ ID NO: 15505 - DNA, 20 bp, Artificial Sequence
  Synthetic oligonucleotide; AGG chr11 5285392 5285411 5285408 +
tggatattaaagtgggaatg

SEQ ID NO: 15506 - DNA, 20 bp, Artificial Sequence
  Synthetic oligonucleotide; GGG chr11 5285393 5285412 5285409 +
ggatattaaagtgggaatga

SEQ ID NO: 15507 - DNA, 20 bp, Artificial Sequence
  Synthetic oligonucleotide; GGG chr11 5285394 5285413 5285410 +
gatattaaagtgggaatgag

SEQ ID NO: 15508 - DNA, 20 bp, Artificial Sequence
  Synthetic oligonucleotide; CAG chr11 5285397 5285416 5285413 +
attaaagtgggaatgagggg

SEQ ID NO: 15509 - DNA, 20 bp, Artificial Sequence
  Synthetic oligonucleotide; AGG chr11 5285398 5285417 5285414 +
ttaaagtgggaatgaggggc

SEQ ID NO: 15510 - DNA, 20 bp, Artificial Sequence
  Synthetic oligonucleotide; AAG chr11 5285410 5285429 5285426 +
tgaggggcaggccactaacg

SEQ ID NO: 15511 - DNA, 20 bp, Artificial Sequence
  Synthetic oligonucleotide; AAG chr11 5285413 5285432 5285429 +
ggggcaggccactaacgaag

SEQ ID NO: 15512 - DNA, 20 bp, Artificial Sequence
  Synthetic oligonucleotide; AAG chr11 5285426 5285445 5285442 +
aacgaagaagatgtttctca

SEQ ID NO: 15513 - DNA, 20 bp, Artificial Sequence
  Synthetic oligonucleotide; AAG chr11 5285429 5285448 5285445 +
gaagaagatgtttctcaaag

SEQ ID NO: 15514 - DNA, 20 bp, Artificial Sequence
  Synthetic oligonucleotide; TAG chr11 5285446 5285465 5285462 +
aagaagccattctccccaca

SEQ ID NO: 15515 - DNA, 20 bp, Artificial Sequence
  Synthetic oligonucleotide; CAG chr11 5285456 5285475 5285472 +
tctccccacatagatcatct

SEQ ID NO: 15516 - DNA, 20 bp, Artificial Sequence
  Synthetic oligonucleotide; CAG chr11 5285459 5285478 5285475 +
ccccacatagatcatctcag

SEQ ID NO: 15517 - DNA, 20 bp, Artificial Sequence
  Synthetic oligonucleotide; AGG chr11 5285460 5285479 5285476 +
cccacatagatcatctcagc

SEQ ID NO: 15518 - DNA, 20 bp, Artificial Sequence
  Synthetic oligonucleotide; GGG chr11 5285461 5285480 5285477 +
ccacatagatcatctcagca

SEQ ID NO: 15519 - DNA, 20 bp, Artificial Sequence
  Synthetic oligonucleotide; CAG chr11 5285466 5285485 5285482 +
tagatcatctcagcagggtt

SEQ ID NO: 15520 - DNA, 20 bp, Artificial Sequence
  Synthetic oligonucleotide; AGG chr11 5285467 5285486 5285483 +
agatcatctcagcagggttc

SEQ ID NO: 15521 - DNA, 20 bp, Artificial Sequence
  Synthetic oligonucleotide; AAG chr11 5285470 5285489 5285486 +
tcatctcagcagggttcagg

SEQ ID NO: 15522 - DNA, 20 bp, Artificial Sequence
  Synthetic oligonucleotide; AAG chr11 5285476 5285495 5285492 +
cagcagggttcaggaagata

SEQ ID NO: 15523 - DNA, 20 bp, Artificial Sequence
  Synthetic oligonucleotide; AGG chr11 5285477 5285496 5285493 +
agcagggttcaggaagataa

SEQ ID NO: 15524 - DNA, 20 bp, Artificial Sequence
  Synthetic oligonucleotide; GAG chr11 5285479 5285498 5285495 +
cagggttcaggaagataaag

SEQ ID NO: 15525 - DNA, 20 bp, Artificial Sequence
  Synthetic oligonucleotide; AGG chr11 5285480 5285499 5285496 +
agggttcaggaagataaagg

SEQ ID NO: 15526 - DNA, 20 bp, Artificial Sequence
  Synthetic oligonucleotide; AAG chr11 5285486 5285505 5285502 +
caggaagataaaggaggatc

SEQ ID NO: 15527 - DNA, 20 bp, Artificial Sequence
  Synthetic oligonucleotide; AGG chr11 5285487 5285506 5285503 +
aggaagataaaggaggatca

SEQ ID NO: 15528 - DNA, 20 bp, Artificial Sequence
  Synthetic oligonucleotide; AAG chr11 5285493 5285512 5285509 +
ataaaggaggatcaaggtcg

SEQ ID NO: 15529 - DNA, 20 bp, Artificial Sequence
  Synthetic oligonucleotide; AGG chr11 5285494 5285513 5285510 +
taaaggaggatcaaggtcga

SEQ ID NO: 15530 - DNA, 20 bp, Artificial Sequence
  Synthetic oligonucleotide; TAG chr11 5285497 5285516 5285513 +
aggaggatcaaggtcgaagg

SEQ ID NO: 15531 - DNA, 20 bp, Artificial Sequence
  Synthetic oligonucleotide; AGG chr11 5285498 5285517 5285514 +
ggaggatcaaggtcgaaggt

SEQ ID NO: 15532 - DNA, 20 bp, Artificial Sequence
  Synthetic oligonucleotide; AAG chr11 5285505 5285524 5285521 +
caaggtcgaaggtaggaact

SEQ ID NO: 15533 - DNA, 20 bp, Artificial Sequence
  Synthetic oligonucleotide; AGG chr11 5285506 5285525 5285522 +
aaggtcgaaggtaggaacta

SEQ ID NO: 15534 - DNA, 20 bp, Artificial Sequence
  Synthetic oligonucleotide; AAG chr11 5285509 5285528 5285525 +
gtcgaaggtaggaactaagg

SEQ ID NO: 15535 - DNA, 20 bp, Artificial Sequence
  Synthetic oligonucleotide; TGG chr11 5285517 5285536 5285533 +
taggaactaaggaagaacac

SEQ ID NO: 15536 - DNA, 20 bp, Artificial Sequence
  Synthetic oligonucleotide; GGG chr11 5285518 5285537 5285534 +
aggaactaaggaagaacact

SEQ ID NO: 15537 - DNA, 20 bp, Artificial Sequence
  Synthetic oligonucleotide; AAG chr11 5285522 5285541 5285538 +
actaaggaagaacactgggc

SEQ ID NO: 15538 - DNA, 20 bp, Artificial Sequence
  Synthetic oligonucleotide; TGG chr11 5285525 5285544 5285541 +
aaggaagaacactgggcaag

SEQ ID NO: 15539 - DNA, 20 bp, Artificial Sequence
  Synthetic oligonucleotide; CAG chr11 5285531 5285550 5285547 +
gaacactgggcaagtggatc

SEQ ID NO: 15540 - DNA, 20 bp, Artificial Sequence
  Synthetic oligonucleotide; AGG chr11 5285532 5285551 5285548 +
aacactgggcaagtggatcc

SEQ ID NO: 15541 - DNA, 20 bp, Artificial Sequence
  Synthetic oligonucleotide; AAG chr11 5285549 5285568 5285565 +
tccaggttgtccaacgctga

SEQ ID NO: 15542 - DNA, 20 bp, Artificial Sequence
  Synthetic oligonucleotide; TAG chr11 5285552 5285571 5285568 +
aggttgtccaacgctgaaag

SEQ ID NO: 15543 - DNA, 20 bp, Artificial Sequence
  Synthetic oligonucleotide; AGG chr11 5285553 5285572 5285569 +
ggttgtccaacgctgaaagt

SEQ ID NO: 15544 - DNA, 20 bp, Artificial Sequence
  Synthetic oligonucleotide; AAG chr11 5285561 5285580 5285577 +
aacgctgaaagtaggaatct

SEQ ID NO: 15545 - DNA, 20 bp, Artificial Sequence
  Synthetic oligonucleotide; TAG chr11 5285567 5285586 5285583 +
gaaagtaggaatctaagcac

SEQ ID NO: 15546 - DNA, 20 bp, Artificial Sequence
  Synthetic oligonucleotide; TGG chr11 5285574 5285593 5285590 +
ggaatctaagcactagtctc

SEQ ID NO: 15547 - DNA, 20 bp, Artificial Sequence
  Synthetic oligonucleotide; TAG chr11 5285581 5285600 5285597 +
aagcactagtctctggatgc

SEQ ID NO: 15548 - DNA, 20 bp, Artificial Sequence
  Synthetic oligonucleotide; AGG chr11 5285582 5285601 5285598 +
agcactagtctctggatgct

SEQ ID NO: 15549 - DNA, 20 bp, Artificial Sequence
  Synthetic oligonucleotide; GAG chr11 5285584 5285603 5285600 +
cactagtctctggatgctag

SEQ ID NO: 15550 - DNA, 20 bp, Artificial Sequence
  Synthetic oligonucleotide; AGG chr11 5285585 5285604 5285601 +
actagtctctggatgctagg

SEQ ID NO: 15551 - DNA, 20 bp, Artificial Sequence
  Synthetic oligonucleotide; GGG chr11 5285586 5285605 5285602 +
ctagtctctggatgctagga

SEQ ID NO: 15552 - DNA, 20 bp, Artificial Sequence
  Synthetic oligonucleotide; TGG chr11 5285597 5285616 5285613 +
atgctaggagggcctctgca

SEQ ID NO: 15553 - DNA, 20 bp, Artificial Sequence
  Synthetic oligonucleotide; GGG chr11 5285598 5285617 5285614 +
tgctaggagggcctctgcat

SEQ ID NO: 15554 - DNA, 20 bp, Artificial Sequence
  Synthetic oligonucleotide; TAG chr11 5285614 5285633 5285630 +
gcatgggtaactctttcaac

SEQ ID NO: 15555 - DNA, 20 bp, Artificial Sequence
  Synthetic oligonucleotide; CAG chr11 5285618 5285637 5285634 +
gggtaactctttcaactagc

SEQ ID NO: 15556 - DNA, 20 bp, Artificial Sequence
  Synthetic oligonucleotide; AGG chr11 5285619 5285638 5285635 +
ggtaactctttcaactagcc

SEQ ID NO: 15557 - DNA, 20 bp, Artificial Sequence
  Synthetic oligonucleotide; GGG chr11 5285620 5285639 5285636 +
gtaactctttcaactagcca

SEQ ID NO: 15558 - DNA, 20 bp, Artificial Sequence
  Synthetic oligonucleotide; GGG chr11 5285621 5285640 5285637 +
taactctttcaactagccag

SEQ ID NO: 15559 - DNA, 20 bp, Artificial Sequence
  Synthetic oligonucleotide; TGG chr11 5285625 5285644 5285641 +
tctttcaactagccaggggc

SEQ ID NO: 15560 - DNA, 20 bp, Artificial Sequence
  Synthetic oligonucleotide; TGG chr11 5285632 5285651 5285648 +
actagccaggggctggactg

SEQ ID NO: 15561 - DNA, 20 bp, Artificial Sequence
  Synthetic oligonucleotide; GAG chr11 5285634 5285653 5285650 +
tagccaggggctggactgtg

SEQ ID NO: 15562 - DNA, 20 bp, Artificial Sequence
  Synthetic oligonucleotide; CAG chr11 5285647 5285666 5285663 +
gactgtggagaaaccatttc

SEQ ID NO: 15563 - DNA, 20 bp, Artificial Sequence
  Synthetic oligonucleotide; TAG chr11 5285651 5285670 5285667 +
gtggagaaaccatttccaga

SEQ ID NO: 15564 - DNA, 20 bp, Artificial Sequence
  Synthetic oligonucleotide; AAG chr11 5285654 5285673 5285670 +
gagaaaccatttccagatag

SEQ ID NO: 15565 - DNA, 20 bp, Artificial Sequence
  Synthetic oligonucleotide; GAG chr11 5285658 5285677 5285674 +
aaccatttccagatagaagt

SEQ ID NO: 15566 - DNA, 20 bp, Artificial Sequence
  Synthetic oligonucleotide; AGG chr11 5285659 5285678 5285675 +
accatttccagatagaagtg

SEQ ID NO: 15567 - DNA, 20 bp, Artificial Sequence
  Synthetic oligonucleotide; GAG chr11 5285661 5285680 5285677 +
catttccagatagaagtgag

SEQ ID NO: 15568 - DNA, 20 bp, Artificial Sequence
  Synthetic oligonucleotide; CAG chr11 5285668 5285687 5285684 +
agatagaagtgaggagattc

SEQ ID NO: 15569 - DNA, 20 bp, Artificial Sequence
  Synthetic oligonucleotide; CAG chr11 5285671 5285690 5285687 +
tagaagtgaggagattccag

SEQ ID NO: 15570 - DNA, 20 bp, Artificial Sequence
  Synthetic oligonucleotide; AGG chr11 5285672 5285691 5285688 +
agaagtgaggagattccagc

SEQ ID NO: 15571 - DNA, 20 bp, Artificial Sequence
  Synthetic oligonucleotide; AAG chr11 5285683 5285702 5285699 +
gattccagcaggaaacactt

SEQ ID NO: 15572 - DNA, 20 bp, Artificial Sequence
  Synthetic oligonucleotide; GAG chr11 5285685 5285704 5285701 +
ttccagcaggaaacacttaa

SEQ ID NO: 15573 - DNA, 20 bp, Artificial Sequence
  Synthetic oligonucleotide; GAG chr11 5285687 5285706 5285703 +
ccagcaggaaacacttaaga

SEQ ID NO: 15574 - DNA, 20 bp, Artificial Sequence
  Synthetic oligonucleotide; AGG chr11 5285688 5285707 5285704 +
cagcaggaaacacttaagag

SEQ ID NO: 15575 - DNA, 20 bp, Artificial Sequence
  Synthetic oligonucleotide; TGG chr11 5285696 5285715 5285712 +
aacacttaagagaggatccc

SEQ ID NO: 15576 - DNA, 20 bp, Artificial Sequence
  Synthetic oligonucleotide; AAG chr11 5285699 5285718 5285715 +
acttaagagaggatccctgg

SEQ ID NO: 15577 - DNA, 20 bp, Artificial Sequence
  Synthetic oligonucleotide; CGG chr11 5285704 5285723 5285720 +
agagaggatccctggaagtt

SEQ ID NO: 15578 - DNA, 20 bp, Artificial Sequence
  Synthetic oligonucleotide; GGG chr11 5285705 5285724 5285721 +
gagaggatccctggaagttc

SEQ ID NO: 15579 - DNA, 20 bp, Artificial Sequence
  Synthetic oligonucleotide; GGG chr11 5285706 5285725 5285722 +
agaggatccctggaagttcg

SEQ ID NO: 15580 - DNA, 20 bp, Artificial Sequence
  Synthetic oligonucleotide; CAG chr11 5285709 5285728 5285725 +
ggatccctggaagttcgggg

SEQ ID NO: 15581 - DNA, 20 bp, Artificial Sequence
  Synthetic oligonucleotide; AGG chr11 5285710 5285729 5285726 +
gatccctggaagttcggggc

SEQ ID NO: 15582 - DNA, 20 bp, Artificial Sequence
  Synthetic oligonucleotide; GAG chr11 5285712 5285731 5285728 +
tccctggaagttcggggcag

SEQ ID NO: 15583 - DNA, 20 bp, Artificial Sequence
  Synthetic oligonucleotide; AGG chr11 5285713 5285732 5285729 +
ccctggaagttcggggcagg

SEQ ID NO: 15584 - DNA, 20 bp, Artificial Sequence
  Synthetic oligonucleotide; AAG chr11 5285730 5285749 5285746 +
aggaggctccctgtcacatg

SEQ ID NO: 15585 - DNA, 20 bp, Artificial Sequence
  Synthetic oligonucleotide; AGG chr11 5285731 5285750 5285747 +
ggaggctccctgtcacatga

SEQ ID NO: 15586 - DNA, 20 bp, Artificial Sequence
  Synthetic oligonucleotide; CAG chr11 5285743 5285762 5285759 +
tcacatgaaggaaacctgct

SEQ ID NO: 15587 - DNA, 20 bp, Artificial Sequence
  Synthetic oligonucleotide; TAG chr11 5285748 5285767 5285764 +
tgaaggaaacctgctcagcg

SEQ ID NO: 15588 - DNA, 20 bp, Artificial Sequence
  Synthetic oligonucleotide; AGG chr11 5285749 5285768 5285765 +
gaaggaaacctgctcagcgt

SEQ ID NO: 15589 - DNA, 20 bp, Artificial Sequence
  Synthetic oligonucleotide; TAG chr11 5285755 5285774 5285771 +
aacctgctcagcgtaggctc

SEQ ID NO: 15590 - DNA, 20 bp, Artificial Sequence
  Synthetic oligonucleotide; AGG chr11 5285756 5285775 5285772 +
acctgctcagcgtaggctct

SEQ ID NO: 15591 - DNA, 20 bp, Artificial Sequence
  Synthetic oligonucleotide; TGG chr11 5285780 5285799 5285796 +
tcttccctactcttatccaa

SEQ ID NO: 15592 - DNA, 20 bp, Artificial Sequence
  Synthetic oligonucleotide; GGG chr11 5285781 5285800 5285797 +
cttccctactcttatccaat

SEQ ID NO: 15593 - DNA, 20 bp, Artificial Sequence
  Synthetic oligonucleotide; GGG chr11 5285782 5285801 5285798 +
ttccctactcttatccaatg

SEQ ID NO: 15594 - DNA, 20 bp, Artificial Sequence
  Synthetic oligonucleotide; AAG chr11 5285796 5285815 5285812 +
ccaatggggcttctgatttt

SEQ ID NO: 15595 - DNA, 20 bp, Artificial Sequence
  Synthetic oligonucleotide; CAG chr11 5285800 5285819 5285816 +
tggggcttctgattttaagc

SEQ ID NO: 15596 - DNA, 20 bp, Artificial Sequence
  Synthetic oligonucleotide; AAG chr11 5285811 5285830 5285827 +
attttaagccagtcttcaca

SEQ ID NO: 15597 - DNA, 20 bp, Artificial Sequence
  Synthetic oligonucleotide; CAG chr11 5285817 5285836 5285833 +
agccagtcttcacaaagccc

SEQ ID NO: 15598 - DNA, 20 bp, Artificial Sequence
  Synthetic oligonucleotide; TGG chr11 5285832 5285851 5285848 +
agccccagatttctacatgc

SEQ ID NO: 15599 - DNA, 20 bp, Artificial Sequence
  Synthetic oligonucleotide; GAG chr11 5285834 5285853 5285850 +
ccccagatttctacatgctg

SEQ ID NO: 15600 - DNA, 20 bp, Artificial Sequence
  Synthetic oligonucleotide; TGG chr11 5285844 5285863 5285860 +
ctacatgctggagccctgaa

SEQ ID NO: 15601 - DNA, 20 bp, Artificial Sequence
  Synthetic oligonucleotide; GGG chr11 5285845 5285864 5285861 +
tacatgctggagccctgaat

SEQ ID NO: 15602 - DNA, 20 bp, Artificial Sequence
  Synthetic oligonucleotide; CAG chr11 5285848 5285867 5285864 +
atgctggagccctgaatggg

SEQ ID NO: 15603 - DNA, 20 bp, Artificial Sequence
  Synthetic oligonucleotide; AGG chr11 5285849 5285868 5285865 +
tgctggagccctgaatgggc

SEQ ID NO: 15604 - DNA, 20 bp, Artificial Sequence
  Synthetic oligonucleotide; AAG chr11 5285852 5285871 5285868 +
tggagccctgaatgggcagg

SEQ ID NO: 15605 - DNA, 20 bp, Artificial Sequence
  Synthetic oligonucleotide; CGG chr11 5285860 5285879 5285876 +
tgaatgggcaggaagcattg

SEQ ID NO: 15606 - DNA, 20 bp, Artificial Sequence
  Synthetic oligonucleotide; CAG chr11 5285876 5285895 5285892 +
attgcggtttccatttcatt

SEQ ID NO: 15607 - DNA, 20 bp, Artificial Sequence
  Synthetic oligonucleotide; GAG chr11 5285878 5285897 5285894 +
tgcggtttccatttcattca

SEQ ID NO: 15608 - DNA, 20 bp, Artificial Sequence
  Synthetic oligonucleotide; TAG chr11 5285904 5285923 5285920 +
tttcataccctgcttcccca

SEQ ID NO: 15609 - DNA, 20 bp, Artificial Sequence
  Synthetic oligonucleotide; AAG chr11 5285948 5285967 5285964 +
ataatctgattcatgcaacc

SEQ ID NO: 15610 - DNA, 20 bp, Artificial Sequence
  Synthetic oligonucleotide; GAG chr11 5285957 5285976 5285973 +
ttcatgcaaccaagaattat

SEQ ID NO: 15611 - DNA, 20 bp, Artificial Sequence
  Synthetic oligonucleotide; GAG chr11 5285959 5285978 5285975 +
catgcaaccaagaattatga

SEQ ID NO: 15612 - DNA, 20 bp, Artificial Sequence
  Synthetic oligonucleotide; GAG chr11 5285961 5285980 5285977 +
tgcaaccaagaattatgaga

SEQ ID NO: 15613 - DNA, 20 bp, Artificial Sequence
  Synthetic oligonucleotide; CAG chr11 5285968 5285987 5285984 +
aagaattatgagagagcctt

SEQ ID NO: 15614 - DNA, 20 bp, Artificial Sequence
  Synthetic oligonucleotide; TAG chr11 5285978 5285997 5285994 +
agagagccttcagtcatgcc

SEQ ID NO: 15615 - DNA, 20 bp, Artificial Sequence
  Synthetic oligonucleotide; AGG chr11 5285979 5285998 5285995 +
gagagccttcagtcatgcct

SEQ ID NO: 15616 - DNA, 20 bp, Artificial Sequence
  Synthetic oligonucleotide; TGG chr11 5286007 5286026 5286023 +
atttattgttgtgcatatga

SEQ ID NO: 15617 - DNA, 20 bp, Artificial Sequence
  Synthetic oligonucleotide; GGG chr11 5286008 5286027 5286024 +
tttattgttgtgcatatgat

SEQ ID NO: 15618 - DNA, 20 bp, Artificial Sequence
  Synthetic oligonucleotide; GGG chr11 5286009 5286028 5286025 +
ttattgttgtgcatatgatg

SEQ ID NO: 15619 - DNA, 20 bp, Artificial Sequence
  Synthetic oligonucleotide; TAG chr11 5286012 5286031 5286028 +
ttgttgtgcatatgatgggg

SEQ ID NO: 15620 - DNA, 20 bp, Artificial Sequence
  Synthetic oligonucleotide; CAG chr11 5286015 5286034 5286031 +
ttgtgcatatgatggggtag

SEQ ID NO: 15621 - DNA, 20 bp, Artificial Sequence
  Synthetic oligonucleotide; AAG chr11 5286020 5286039 5286036 +
catatgatggggtagcagac

SEQ ID NO: 15622 - DNA, 20 bp, Artificial Sequence
  Synthetic oligonucleotide; CAG chr11 5286033 5286052 5286049 +
agcagacaagaaaacgttaa

SEQ ID NO: 15623 - DNA, 20 bp, Artificial Sequence
  Synthetic oligonucleotide; TAG chr11 5286038 5286057 5286054 +
acaagaaaacgttaacagca

SEQ ID NO: 15624 - DNA, 20 bp, Artificial Sequence
  Synthetic oligonucleotide; CAG chr11 5286048 5286067 5286064 +
gttaacagcatagactttct

SEQ ID NO: 15625 - DNA, 20 bp, Artificial Sequence
  Synthetic oligonucleotide; GAG chr11 5286050 5286069 5286066 +
taacagcatagactttctca

SEQ ID NO: 15626 - DNA, 20 bp, Artificial Sequence
  Synthetic oligonucleotide; GAG chr11 5286059 5286078 5286075 +
agactttctcagagctatat

SEQ ID NO: 15627 - DNA, 20 bp, Artificial Sequence
  Synthetic oligonucleotide; TGG chr11 5286064 5286083 5286080 +
ttctcagagctatatgagtt

SEQ ID NO: 15628 - DNA, 20 bp, Artificial Sequence
  Synthetic oligonucleotide; GGG chr11 5286065 5286084 5286081 +
tctcagagctatatgagttt

SEQ ID NO: 15629 - DNA, 20 bp, Artificial Sequence
  Synthetic oligonucleotide; AAG chr11 5286076 5286095 5286092 +
tatgagtttgggaattaatc

SEQ ID NO: 15630 - DNA, 20 bp, Artificial Sequence
  Synthetic oligonucleotide; CAG chr11 5286081 5286100 5286097 +
gtttgggaattaatcaagac

SEQ ID NO: 15631 - DNA, 20 bp, Artificial Sequence
  Synthetic oligonucleotide; CAG chr11 5286093 5286112 5286109 +
atcaagaccagccttttgct

SEQ ID NO: 15632 - DNA, 20 bp, Artificial Sequence
  Synthetic oligonucleotide; AGG chr11 5286094 5286113 5286110 +
tcaagaccagccttttgctc

SEQ ID NO: 15633 - DNA, 20 bp, Artificial Sequence
  Synthetic oligonucleotide; GGG chr11 5286095 5286114 5286111 +
caagaccagccttttgctca

SEQ ID NO: 15634 - DNA, 20 bp, Artificial Sequence
  Synthetic oligonucleotide; TAG chr11 5286098 5286117 5286114 +
gaccagccttttgctcaggg

SEQ ID NO: 15635 - DNA, 20 bp, Artificial Sequence
  Synthetic oligonucleotide; TAG chr11 5286111 5286130 5286127 +
ctcagggtagaaatccccta

SEQ ID NO: 15636 - DNA, 20 bp, Artificial Sequence
  Synthetic oligonucleotide; AGG chr11 5286112 5286131 5286128 +
tcagggtagaaatcccctat

SEQ ID NO: 15637 - DNA, 20 bp, Artificial Sequence
  Synthetic oligonucleotide; GGG chr11 5286113 5286132 5286129 +
cagggtagaaatcccctata

SEQ ID NO: 15638 - DNA, 20 bp, Artificial Sequence
  Synthetic oligonucleotide; TGG chr11 5286129 5286148 5286145 +
tatagggatttattcaatga

SEQ ID NO: 15639 - DNA, 20 bp, Artificial Sequence
  Synthetic oligonucleotide; GGG chr11 5286130 5286149 5286146 +
atagggatttattcaatgat

SEQ ID NO: 15640 - DNA, 20 bp, Artificial Sequence
  Synthetic oligonucleotide; AAG chr11 5286137 5286156 5286153 +
tttattcaatgatgggttaa

SEQ ID NO: 15641 - DNA, 20 bp, Artificial Sequence
  Synthetic oligonucleotide; TGG chr11 5286149 5286168 5286165 +
tgggttaaaagctttctata

SEQ ID NO: 15642 - DNA, 20 bp, Artificial Sequence
  Synthetic oligonucleotide; GAG chr11 5286153 5286172 5286169 +
ttaaaagctttctatatggt

SEQ ID NO: 15643 - DNA, 20 bp, Artificial Sequence
  Synthetic oligonucleotide; AGG chr11 5286154 5286173 5286170 +
taaaagctttctatatggtg

SEQ ID NO: 15644 - DNA, 20 bp, Artificial Sequence
  Synthetic oligonucleotide; GAG chr11 5286156 5286175 5286172 +
aaagctttctatatggtgag

SEQ ID NO: 15645 - DNA, 20 bp, Artificial Sequence
  Synthetic oligonucleotide; CAG chr11 5286163 5286182 5286179 +
tctatatggtgaggagctca

SEQ ID NO: 15646 - DNA, 20 bp, Artificial Sequence
  Synthetic oligonucleotide; AAG chr11 5286173 5286192 5286189 +
gaggagctcacagattttcc

SEQ ID NO: 15647 - DNA, 20 bp, Artificial Sequence
  Synthetic oligonucleotide; TAG chr11 5286189 5286208 5286205 +
ttccaagcccttgcttttgc

SEQ ID NO: 15648 - DNA, 20 bp, Artificial Sequence
  Synthetic oligonucleotide; CAG chr11 5286193 5286212 5286209 +
aagcccttgcttttgctaga

SEQ ID NO: 15649 - DNA, 20 bp, Artificial Sequence
  Synthetic oligonucleotide; CAG chr11 5286222 5286241 5286238 +
gtttatgaaattcttacaca

SEQ ID NO: 15650 - DNA, 20 bp, Artificial Sequence
  Synthetic oligonucleotide; AAG chr11 5286225 5286244 5286241 +
tatgaaattcttacacacag

SEQ ID NO: 15651 - DNA, 20 bp, Artificial Sequence
  Synthetic oligonucleotide; TGG chr11 5286241 5286260 5286257 +
acagaagaatcttctaatcc

SEQ ID NO: 15652 - DNA, 20 bp, Artificial Sequence
  Synthetic oligonucleotide; GGG chr11 5286242 5286261 5286258 +
cagaagaatcttctaatcct

SEQ ID NO: 15653 - DNA, 20 bp, Artificial Sequence
  Synthetic oligonucleotide; CAG chr11 5286273 5286292 5286289 +
tataacttgattccctattc

SEQ ID NO: 15654 - DNA, 20 bp, Artificial Sequence
  Synthetic oligonucleotide; AAG chr11 5286276 5286295 5286292 +
aacttgattccctattccag

SEQ ID NO: 15655 - DNA, 20 bp, Artificial Sequence
  Synthetic oligonucleotide; AAG chr11 5286298 5286317 5286314 +
gataatattcccatattctg

SEQ ID NO: 15656 - DNA, 20 bp, Artificial Sequence
  Synthetic oligonucleotide; TAG chr11 5286323 5286342 5286339 +
ttcatgcatttgttaaataa

SEQ ID NO: 15657 - DNA, 20 bp, Artificial Sequence
  Synthetic oligonucleotide; AGG chr11 5286324 5286343 5286340 +
tcatgcatttgttaaataat

SEQ ID NO: 15658 - DNA, 20 bp, Artificial Sequence
  Synthetic oligonucleotide; TAG chr11 5286329 5286348 5286345 +
catttgttaaataataggca

SEQ ID NO: 15659 - DNA, 20 bp, Artificial Sequence
  Synthetic oligonucleotide; AAG chr11 5286336 5286355 5286352 +
taaataataggcatagtgac

SEQ ID NO: 15660 - DNA, 20 bp, Artificial Sequence
  Synthetic oligonucleotide; CAG chr11 5286342 5286361 5286358 +
ataggcatagtgacaagtgc

SEQ ID NO: 15661 - DNA, 20 bp, Artificial Sequence
  Synthetic oligonucleotide; CAG chr11 5286353 5286372 5286369 +
gacaagtgccagaactctaa

SEQ ID NO: 15662 - DNA, 20 bp, Artificial Sequence
  Synthetic oligonucleotide; CAG chr11 5286361 5286380 5286377 +
ccagaactctaacagtcaac

SEQ ID NO: 15663 - DNA, 20 bp, Artificial Sequence
  Synthetic oligonucleotide; GAG chr11 5286363 5286382 5286379 +
agaactctaacagtcaacca

SEQ ID NO: 15664 - DNA, 20 bp, Artificial Sequence
  Synthetic oligonucleotide; GAG chr11 5286365 5286384 5286381 +
aactctaacagtcaaccaga

SEQ ID NO: 15665 - DNA, 20 bp, Artificial Sequence
  Synthetic oligonucleotide; CAG chr11 5286371 5286390 5286387 +
aacagtcaaccagagagcca

SEQ ID NO: 15666 - DNA, 20 bp, Artificial Sequence
  Synthetic oligonucleotide; AAG chr11 5286388 5286407 5286404 +
ccacagttttcaacttcaca

SEQ ID NO: 15667 - DNA, 20 bp, Artificial Sequence
  Synthetic oligonucleotide; AAG chr11 5286406 5286425 5286422 +
caaagttaaccatctaactg

SEQ ID NO: 15668 - DNA, 20 bp, Artificial Sequence
  Synthetic oligonucleotide; CAG chr11 5286410 5286429 5286426 +
gttaaccatctaactgaaga

SEQ ID NO: 15669 - DNA, 20 bp, Artificial Sequence
  Synthetic oligonucleotide; CAG chr11 5286413 5286432 5286429 +
aaccatctaactgaagacag

SEQ ID NO: 15670 - DNA, 20 bp, Artificial Sequence
  Synthetic oligonucleotide; TGG chr11 5286444 5286463 5286460 +
accaccaccccttctccaca

SEQ ID NO: 15671 - DNA, 20 bp, Artificial Sequence
  Synthetic oligonucleotide; TAG chr11 5286449 5286468 5286465 +
caccccttctccacatggtg

SEQ ID NO: 15672 - DNA, 20 bp, Artificial Sequence
  Synthetic oligonucleotide; CAG chr11 5286465 5286484 5286481 +
ggtgtagtctttcctgatgt

SEQ ID NO: 15673 - DNA, 20 bp, Artificial Sequence
  Synthetic oligonucleotide; AGG chr11 5286466 5286485 5286482 +
gtgtagtctttcctgatgtc

SEQ ID NO: 15674 - DNA, 20 bp, Artificial Sequence
  Synthetic oligonucleotide; GGG chr11 5286467 5286486 5286483 +
tgtagtctttcctgatgtca

SEQ ID NO: 15675 - DNA, 20 bp, Artificial Sequence
  Synthetic oligonucleotide; TAG chr11 5286474 5286493 5286490 +
tttcctgatgtcagggatgt

SEQ ID NO: 15676 - DNA, 20 bp, Artificial Sequence
  Synthetic oligonucleotide; AGG chr11 5286475 5286494 5286491 +
ttcctgatgtcagggatgtt

SEQ ID NO: 15677 - DNA, 20 bp, Artificial Sequence
  Synthetic oligonucleotide; CAG chr11 5286480 5286499 5286496 +
gatgtcagggatgttaggct

SEQ ID NO: 15678 - DNA, 20 bp, Artificial Sequence
  Synthetic oligonucleotide; AGG chr11 5286481 5286500 5286497 +
atgtcagggatgttaggctc

SEQ ID NO: 15679 - DNA, 20 bp, Artificial Sequence
  Synthetic oligonucleotide; TAG chr11 5286485 5286504 5286501 +
cagggatgttaggctcaggt

SEQ ID NO: 15680 - DNA, 20 bp, Artificial Sequence
  Synthetic oligonucleotide; AGG chr11 5286486 5286505 5286502 +
agggatgttaggctcaggtt

SEQ ID NO: 15681 - DNA, 20 bp, Artificial Sequence
  Synthetic oligonucleotide; AAG chr11 5286490 5286509 5286506 +
atgttaggctcaggttagga

SEQ ID NO: 15682 - DNA, 20 bp, Artificial Sequence
  Synthetic oligonucleotide; CAG chr11 5286494 5286513 5286510 +
taggctcaggttaggaaagt

SEQ ID NO: 15683 - DNA, 20 bp, Artificial Sequence
  Synthetic oligonucleotide; CAG chr11 5286507 5286526 5286523 +
ggaaagtcagactatcatcc

SEQ ID NO: 15684 - DNA, 20 bp, Artificial Sequence
  Synthetic oligonucleotide; GAG chr11 5286509 5286528 5286525 +
aaagtcagactatcatccca

SEQ ID NO: 15685 - DNA, 20 bp, Artificial Sequence
  Synthetic oligonucleotide; CAG chr11 5286512 5286531 5286528 +
gtcagactatcatcccagag

SEQ ID NO: 15686 - DNA, 20 bp, Artificial Sequence
  Synthetic oligonucleotide; AGG chr11 5286513 5286532 5286529 +
tcagactatcatcccagagc

SEQ ID NO: 15687 - DNA, 20 bp, Artificial Sequence
  Synthetic oligonucleotide; CAG chr11 5286519 5286538 5286535 +
tatcatcccagagcaggaca

SEQ ID NO: 15688 - DNA, 20 bp, Artificial Sequence
  Synthetic oligonucleotide; AAG chr11 5286529 5286548 5286545 +
gagcaggacacagacgaata

SEQ ID NO: 15689 - DNA, 20 bp, Artificial Sequence
  Synthetic oligonucleotide; TAG chr11 5286542 5286561 5286558 +
acgaataaagtgtaattttt

SEQ ID NO: 15690 - DNA, 20 bp, Artificial Sequence
  Synthetic oligonucleotide; TAG chr11 5286550 5286569 5286566 +
agtgtaattttttagtcact

SEQ ID NO: 15691 - DNA, 20 bp, Artificial Sequence
  Synthetic oligonucleotide; AGG chr11 5286551 5286570 5286567 +
gtgtaattttttagtcactt

SEQ ID NO: 15692 - DNA, 20 bp, Artificial Sequence
  Synthetic oligonucleotide; CAG chr11 5286559 5286578 5286575 +
ttttagtcacttaggaaaaa

SEQ ID NO: 15693 - DNA, 20 bp, Artificial Sequence
  Synthetic oligonucleotide; TGG chr11 5286562 5286581 5286578 +
tagtcacttaggaaaaacag

SEQ ID NO: 15694 - DNA, 20 bp, Artificial Sequence
  Synthetic oligonucleotide; AAG chr11 5286571 5286590 5286587 +
aggaaaaacagtggaatgca

SEQ ID NO: 15695 - DNA, 20 bp, Artificial Sequence
  Synthetic oligonucleotide; GAG chr11 5286573 5286592 5286589 +
gaaaaacagtggaatgcaaa

SEQ ID NO: 15696 - DNA, 20 bp, Artificial Sequence
  Synthetic oligonucleotide; TGG chr11 5286594 5286613 5286610 +
agtaaaaaatgctttctgaa

SEQ ID NO: 15697 - DNA, 20 bp, Artificial Sequence
  Synthetic oligonucleotide; TGG chr11 5286603 5286622 5286619 +
tgctttctgaatggataact

SEQ ID NO: 15698 - DNA, 20 bp, Artificial Sequence
  Synthetic oligonucleotide; TGG chr11 5286608 5286627 5286624 +
tctgaatggataacttggcc

SEQ ID NO: 15699 - DNA, 20 bp, Artificial Sequence
  Synthetic oligonucleotide; GGG chr11 5286609 5286628 5286625 +
ctgaatggataacttggcct

SEQ ID NO: 15700 - DNA, 20 bp, Artificial Sequence
  Synthetic oligonucleotide; GAG chr11 5286611 5286630 5286627 +
gaatggataacttggcctgg

SEQ ID NO: 15701 - DNA, 20 bp, Artificial Sequence
  Synthetic oligonucleotide; AGG chr11 5286612 5286631 5286628 +
aatggataacttggcctggg

SEQ ID NO: 15702 - DNA, 20 bp, Artificial Sequence
  Synthetic oligonucleotide; TGG chr11 5286619 5286638 5286635 +
aacttggcctgggaggcctt

SEQ ID NO: 15703 - DNA, 20 bp, Artificial Sequence
  Synthetic oligonucleotide; AAG chr11 5286622 5286641 5286638 +
ttggcctgggaggcctttgg

SEQ ID NO: 15704 - DNA, 20 bp, Artificial Sequence
  Synthetic oligonucleotide; CAG chr11 5286625 5286644 5286641 +
gcctgggaggcctttggaag

SEQ ID NO: 15705 - DNA, 20 bp, Artificial Sequence
  Synthetic oligonucleotide; GAG chr11 5286627 5286646 5286643 +
ctgggaggcctttggaagca

SEQ ID NO: 15706 - DNA, 20 bp, Artificial Sequence
  Synthetic oligonucleotide; TGG chr11 5286632 5286651 5286648 +
aggcctttggaagcagagac

SEQ ID NO: 15707 - DNA, 20 bp, Artificial Sequence
  Synthetic oligonucleotide; GAG chr11 5286634 5286653 5286650 +
gcctttggaagcagagactg

SEQ ID NO: 15708 - DNA, 20 bp, Artificial Sequence
  Synthetic oligonucleotide; CAG chr11 5286663 5286682 5286679 +
tttaaacatctttgtatccc

SEQ ID NO: 15709 - DNA, 20 bp, Artificial Sequence
  Synthetic oligonucleotide; CAG chr11 5286670 5286689 5286686 +
atctttgtatccccagcatc

SEQ ID NO: 15710 - DNA, 20 bp, Artificial Sequence
  Synthetic oligonucleotide; CAG chr11 5286677 5286696 5286693 +
tatccccagcatccagcata

SEQ ID NO: 15711 - DNA, 20 bp, Artificial Sequence
  Synthetic oligonucleotide; AAG chr11 5286686 5286705 5286702 +
catccagcatacagactgcc

SEQ ID NO: 15712 - DNA, 20 bp, Artificial Sequence
  Synthetic oligonucleotide; AAG chr11 5286689 5286708 5286705 +
ccagcatacagactgccaag

SEQ ID NO: 15713 - DNA, 20 bp, Artificial Sequence
  Synthetic oligonucleotide; TGG chr11 5286713 5286732 5286729 +
acatgtcaataaatatttat

SEQ ID NO: 15714 - DNA, 20 bp, Artificial Sequence
  Synthetic oligonucleotide; TAG chr11 5286717 5286736 5286733 +
gtcaataaatatttattgga

SEQ ID NO: 15715 - DNA, 20 bp, Artificial Sequence
  Synthetic oligonucleotide; GAG chr11 5286721 5286740 5286737 +
ataaatatttattggatagt

SEQ ID NO: 15716 - DNA, 20 bp, Artificial Sequence
  Synthetic oligonucleotide; AAG chr11 5286726 5286745 5286742 +
tatttattggatagtgagca

SEQ ID NO: 15717 - DNA, 20 bp, Artificial Sequence
  Synthetic oligonucleotide; TAG chr11 5286736 5286755 5286752 +
atagtgagcaaagacataat

SEQ ID NO: 15718 - DNA, 20 bp, Artificial Sequence
  Synthetic oligonucleotide; AGG chr11 5286737 5286756 5286753 +
tagtgagcaaagacataatt

SEQ ID NO: 15719 - DNA, 20 bp, Artificial Sequence
  Synthetic oligonucleotide; TAG chr11 5286765 5286784 5286781 +
atctcaattctactatttgc

SEQ ID NO: 15720 - DNA, 20 bp, Artificial Sequence
  Synthetic oligonucleotide; TAG chr11 5286768 5286787 5286784 +
tcaattctactatttgctag

SEQ ID NO: 15721 - DNA, 20 bp, Artificial Sequence
  Synthetic oligonucleotide; GAG chr11 5286788 5286807 5286804 +
tagtttatgtttgtgtgtgt

SEQ ID NO: 15722 - DNA, 20 bp, Artificial Sequence
  Synthetic oligonucleotide; GAG chr11 5286790 5286809 5286806 +
gtttatgtttgtgtgtgtga

SEQ ID NO: 15723 - DNA, 20 bp, Artificial Sequence
  Synthetic oligonucleotide; GAG chr11 5286802 5286821 5286818 +
gtgtgtgagagtgtatgctt

SEQ ID NO: 15724 - DNA, 20 bp, Artificial Sequence
  Synthetic oligonucleotide; AAG chr11 5286806 5286825 5286822 +
gtgagagtgtatgcttgagc

SEQ ID NO: 15725 - DNA, 20 bp, Artificial Sequence
  Synthetic oligonucleotide; GAG chr11 5286811 5286830 5286827 +
agtgtatgcttgagcaagtt

SEQ ID NO: 15726 - DNA, 20 bp, Artificial Sequence
  Synthetic oligonucleotide; GAG chr11 5286813 5286832 5286829 +
tgtatgcttgagcaagttga

SEQ ID NO: 15727 - DNA, 20 bp, Artificial Sequence
  Synthetic oligonucleotide; AGG chr11 5286814 5286833 5286830 +
gtatgcttgagcaagttgag

SEQ ID NO: 15728 - DNA, 20 bp, Artificial Sequence
  Synthetic oligonucleotide; TAG chr11 5286817 5286836 5286833 +
tgcttgagcaagttgagagg

SEQ ID NO: 15729 - DNA, 20 bp, Artificial Sequence
  Synthetic oligonucleotide; TAG chr11 5286832 5286851 5286848 +
agaggtagtttttttaactg

SEQ ID NO: 15730 - DNA, 20 bp, Artificial Sequence
  Synthetic oligonucleotide; TGG chr11 5286840 5286859 5286856 +
tttttttaactgtagtaaaa

SEQ ID NO: 15731 - DNA, 20 bp, Artificial Sequence
  Synthetic oligonucleotide; GGG chr11 5286841 5286860 5286857 +
ttttttaactgtagtaaaat

SEQ ID NO: 15732 - DNA, 20 bp, Artificial Sequence
  Synthetic oligonucleotide; GGG chr11 5286842 5286861 5286858 +
tttttaactgtagtaaaatg

SEQ ID NO: 15733 - DNA, 20 bp, Artificial Sequence
  Synthetic oligonucleotide; TAG chr11 5286852 5286871 5286868 +
tagtaaaatggggataataa

SEQ ID NO: 15734 - DNA, 20 bp, Artificial Sequence
  Synthetic oligonucleotide; AAG chr11 5286866 5286885 5286882 +
taataatagtatctacctga

SEQ ID NO: 15735 - DNA, 20 bp, Artificial Sequence
  Synthetic oligonucleotide; AAG chr11 5286874 5286893 5286890 +
gtatctacctgaaagaatcc

SEQ ID NO: 15736 - DNA, 20 bp, Artificial Sequence
  Synthetic oligonucleotide; GAG chr11 5286876 5286895 5286892 +
atctacctgaaagaatccaa

SEQ ID NO: 15737 - DNA, 20 bp, Artificial Sequence
  Synthetic oligonucleotide; AAG chr11 5286902 5286921 5286918 +
taaatatgattaattatgca

SEQ ID NO: 15738 - DNA, 20 bp, Artificial Sequence
  Synthetic oligonucleotide; CAG chr11 5286914 5286933 5286930 +
attatgcaaagcactaatta

SEQ ID NO: 15739 - DNA, 20 bp, Artificial Sequence
  Synthetic oligonucleotide; TAG chr11 5286924 5286943 5286940 +
gcactaattacagtctctga

SEQ ID NO: 15740 - DNA, 20 bp, Artificial Sequence
  Synthetic oligonucleotide; CAG chr11 5286941 5286960 5286957 +
tgatagccttcaataaatgt

SEQ ID NO: 15741 - DNA, 20 bp, Artificial Sequence
  Synthetic oligonucleotide; CAG chr11 5286959 5286978 5286975 +
gtcagttatttttattatta

SEQ ID NO: 15742 - DNA, 20 bp, Artificial Sequence
  Synthetic oligonucleotide; AAG chr11 5286965 5286984 5286981 +
tatttttattattacagtta

SEQ ID NO: 15743 - DNA, 20 bp, Artificial Sequence
  Synthetic oligonucleotide; TGG chr11 5286973 5286992 5286989 +
ttattacagttaaagatgaa

SEQ ID NO: 15744 - DNA, 20 bp, Artificial Sequence
  Synthetic oligonucleotide; GGG chr11 5286974 5286993 5286990 +
tattacagttaaagatgaat

SEQ ID NO: 15745 - DNA, 20 bp, Artificial Sequence
  Synthetic oligonucleotide; AAG chr11 5286981 5287000 5286997 +
gttaaagatgaatgggcata

SEQ ID NO: 15746 - DNA, 20 bp, Artificial Sequence
  Synthetic oligonucleotide; CAG chr11 5286986 5287005 5287002 +
agatgaatgggcataaagta

SEQ ID NO: 15747 - DNA, 20 bp, Artificial Sequence
  Synthetic oligonucleotide; TAG chr11 5286994 5287013 5287010 +
gggcataaagtacagaacac

SEQ ID NO: 15748 - DNA, 20 bp, Artificial Sequence
  Synthetic oligonucleotide; CAG chr11 5287007 5287026 5287023 +
agaacactagttttcacctg

SEQ ID NO: 15749 - DNA, 20 bp, Artificial Sequence
  Synthetic oligonucleotide; AAG chr11 5287011 5287030 5287027 +
cactagttttcacctgcagc

SEQ ID NO: 15750 - DNA, 20 bp, Artificial Sequence
  Synthetic oligonucleotide; CAG chr11 5287022 5287041 5287038 +
acctgcagcaagaatgattg

SEQ ID NO: 15751 - DNA, 20 bp, Artificial Sequence
  Synthetic oligonucleotide; TAG chr11 5287040 5287059 5287056 +
tgcagttaaacaaaaaatac

SEQ ID NO: 15752 - DNA, 20 bp, Artificial Sequence
  Synthetic oligonucleotide; TAG chr11 5287053 5287072 5287069 +
aaaatactagcaaacatttc

SEQ ID NO: 15753 - DNA, 20 bp, Artificial Sequence
  Synthetic oligonucleotide; GAG chr11 5287055 5287074 5287071 +
aatactagcaaacatttcta

SEQ ID NO: 15754 - DNA, 20 bp, Artificial Sequence
  Synthetic oligonucleotide; TAG chr11 5287058 5287077 5287074 +
actagcaaacatttctagag

SEQ ID NO: 15755 - DNA, 20 bp, Artificial Sequence
  Synthetic oligonucleotide; TAG chr11 5287062 5287081 5287078 +
gcaaacatttctagagtagt

SEQ ID NO: 15756 - DNA, 20 bp, Artificial Sequence
  Synthetic oligonucleotide; AAG chr11 5287072 5287091 5287088 +
ctagagtagttagcatttat

SEQ ID NO: 15757 - DNA, 20 bp, Artificial Sequence
  Synthetic oligonucleotide; CGG chr11 5287111 5287130 5287127 +
tttgcatgtattaactcact

SEQ ID NO: 15758 - DNA, 20 bp, Artificial Sequence
  Synthetic oligonucleotide; GGG chr11 5287112 5287131 5287128 +
ttgcatgtattaactcactc

SEQ ID NO: 15759 - DNA, 20 bp, Artificial Sequence
  Synthetic oligonucleotide; CAG chr11 5287118 5287137 5287134 +
gtattaactcactcgggctg

SEQ ID NO: 15760 - DNA, 20 bp, Artificial Sequence
  Synthetic oligonucleotide; GAG chr11 5287132 5287151 5287148 +
gggctgcagaacaatcttat

SEQ ID NO: 15761 - DNA, 20 bp, Artificial Sequence
  Synthetic oligonucleotide; CAG chr11 5287169 5287188 5287185 +
tgtaatcatgcttataatcc

SEQ ID NO: 15762 - DNA, 20 bp, Artificial Sequence
  Synthetic oligonucleotide; TGG chr11 5287177 5287196 5287193 +
tgcttataatcccagcactt

SEQ ID NO: 15763 - DNA, 20 bp, Artificial Sequence
  Synthetic oligonucleotide; AAG chr11 5287180 5287199 5287196 +
ttataatcccagcactttgg

SEQ ID NO: 15764 - DNA, 20 bp, Artificial Sequence
  Synthetic oligonucleotide; AGG chr11 5287181 5287200 5287197 +
tataatcccagcactttgga

SEQ ID NO: 15765 - DNA, 20 bp, Artificial Sequence
  Synthetic oligonucleotide; GAG chr11 5287186 5287205 5287202 +
tcccagcactttggaaggct

SEQ ID NO: 15766 - DNA, 20 bp, Artificial Sequence
  Synthetic oligonucleotide; AGG chr11 5287187 5287206 5287203 +
cccagcactttggaaggctg

SEQ ID NO: 15767 - DNA, 20 bp, Artificial Sequence
  Synthetic oligonucleotide; TGG chr11 5287190 5287209 5287206 +
agcactttggaaggctgagg

SEQ ID NO: 15768 - DNA, 20 bp, Artificial Sequence
  Synthetic oligonucleotide; GGG chr11 5287191 5287210 5287207 +
gcactttggaaggctgaggt

SEQ ID NO: 15769 - DNA, 20 bp, Artificial Sequence
  Synthetic oligonucleotide; CAG chr11 5287194 5287213 5287210 +
ctttggaaggctgaggtggg

SEQ ID NO: 15770 - DNA, 20 bp, Artificial Sequence
  Synthetic oligonucleotide; GAG chr11 5287204 5287223 5287220 +
ctgaggtgggcagattgctt

SEQ ID NO: 15771 - DNA, 20 bp, Artificial Sequence
  Synthetic oligonucleotide; CGG chr11 5287210 5287229 5287226 +
tgggcagattgcttgagctc

SEQ ID NO: 15772 - DNA, 20 bp, Artificial Sequence
  Synthetic oligonucleotide; GAG chr11 5287212 5287231 5287228 +
ggcagattgcttgagctccg

SEQ ID NO: 15773 - DNA, 20 bp, Artificial Sequence
  Synthetic oligonucleotide; GAG chr11 5287218 5287237 5287234 +
ttgcttgagctccggagtct

SEQ ID NO: 15774 - DNA, 20 bp, Artificial Sequence
  Synthetic oligonucleotide; TAG chr11 5287272 5287291 5287288 +
ctaccaaaaatacaaaaaat

SEQ ID NO: 15775 - DNA, 20 bp, Artificial Sequence
  Synthetic oligonucleotide; GAG chr11 5287276 5287295 5287292 +
caaaaatacaaaaaattagc

SEQ ID NO: 15776 - DNA, 20 bp, Artificial Sequence
  Synthetic oligonucleotide; AGG chr11 5287277 5287296 5287293 +
aaaaatacaaaaaattagcg

SEQ ID NO: 15777 - DNA, 20 bp, Artificial Sequence
  Synthetic oligonucleotide; TGG chr11 5287282 5287301 5287298 +
tacaaaaaattagcgaggta

SEQ ID NO: 15778 - DNA, 20 bp, Artificial Sequence
  Synthetic oligonucleotide; TGG chr11 5287285 5287304 5287301 +
aaaaaattagcgaggtatgg

SEQ ID NO: 15779 - DNA, 20 bp, Artificial Sequence
  Synthetic oligonucleotide; TGG chr11 5287298 5287317 5287314 +
ggtatggtggtgtgtacctg

SEQ ID NO: 15780 - DNA, 20 bp, Artificial Sequence
  Synthetic oligonucleotide; CAG chr11 5287304 5287323 5287320 +
gtggtgtgtacctgtggttc

SEQ ID NO: 15781 - DNA, 20 bp, Artificial Sequence
  Synthetic oligonucleotide; CAG chr11 5287312 5287331 5287328 +
tacctgtggttccagctact

SEQ ID NO: 15782 - DNA, 20 bp, Artificial Sequence
  Synthetic oligonucleotide; AGG chr11 5287313 5287332 5287329 +
acctgtggttccagctactc

SEQ ID NO: 15783 - DNA, 20 bp, Artificial Sequence
  Synthetic oligonucleotide; GAG chr11 5287321 5287340 5287337 +
ttccagctactcaggatgtt

SEQ ID NO: 15784 - DNA, 20 bp, Artificial Sequence
  Synthetic oligonucleotide; AGG chr11 5287322 5287341 5287338 +
tccagctactcaggatgttg

SEQ ID NO: 15785 - DNA, 20 bp, Artificial Sequence
  Synthetic oligonucleotide; TGG chr11 5287325 5287344 5287341 +
agctactcaggatgttgagg

SEQ ID NO: 15786 - DNA, 20 bp, Artificial Sequence
  Synthetic oligonucleotide; GGG chr11 5287326 5287345 5287342 +
gctactcaggatgttgaggt

SEQ ID NO: 15787 - DNA, 20 bp, Artificial Sequence
  Synthetic oligonucleotide; GAG chr11 5287328 5287347 5287344 +
tactcaggatgttgaggtgg

SEQ ID NO: 15788 - DNA, 20 bp, Artificial Sequence
  Synthetic oligonucleotide; AGG chr11 5287329 5287348 5287345 +
actcaggatgttgaggtggg

SEQ ID NO: 15789 - DNA, 20 bp, Artificial Sequence
  Synthetic oligonucleotide; GAG chr11 5287339 5287358 5287355 +
ttgaggtgggaggaccgctt

SEQ ID NO: 15790 - DNA, 20 bp, Artificial Sequence
  Synthetic oligonucleotide; TGG chr11 5287344 5287363 5287360 +
gtgggaggaccgcttgagcc

SEQ ID NO: 15791 - DNA, 20 bp, Artificial Sequence
  Synthetic oligonucleotide; GGG chr11 5287345 5287364 5287361 +
tgggaggaccgcttgagcct

SEQ ID NO: 15792 - DNA, 20 bp, Artificial Sequence
  Synthetic oligonucleotide; AAG chr11 5287348 5287367 5287364 +
gaggaccgcttgagcctggg

SEQ ID NO: 15793 - DNA, 20 bp, Artificial Sequence
  Synthetic oligonucleotide; AAG chr11 5287354 5287373 5287370 +
cgcttgagcctgggaagtgc

SEQ ID NO: 15794 - DNA, 20 bp, Artificial Sequence
  Synthetic oligonucleotide; CAG chr11 5287360 5287379 5287376 +
agcctgggaagtgcaagttg

SEQ ID NO: 15795 - DNA, 20 bp, Artificial Sequence
  Synthetic oligonucleotide; GAG chr11 5287364 5287383 5287380 +
tgggaagtgcaagttgcagt

SEQ ID NO: 15796 - DNA, 20 bp, Artificial Sequence
  Synthetic oligonucleotide; GAG chr11 5287369 5287388 5287385 +
agtgcaagttgcagtgagcc

SEQ ID NO: 15797 - DNA, 20 bp, Artificial Sequence
  Synthetic oligonucleotide; TGG chr11 5287394 5287413 5287410 +
tttgccactacactcccatt

SEQ ID NO: 15798 - DNA, 20 bp, Artificial Sequence
  Synthetic oligonucleotide; GGG chr11 5287395 5287414 5287411 +
ttgccactacactcccattt

SEQ ID NO: 15799 - DNA, 20 bp, Artificial Sequence
  Synthetic oligonucleotide; CAG chr11 5287401 5287420 5287417 +
ctacactcccatttgggtga

SEQ ID NO: 15800 - DNA, 20 bp, Artificial Sequence
  Synthetic oligonucleotide; GAG chr11 5287403 5287422 5287419 +
acactcccatttgggtgaca

SEQ ID NO: 15801 - DNA, 20 bp, Artificial Sequence
  Synthetic oligonucleotide; GAG chr11 5287407 5287426 5287423 +
tcccatttgggtgacagagt

SEQ ID NO: 15802 - DNA, 20 bp, Artificial Sequence
  Synthetic oligonucleotide; CAG chr11 5287453 5287472 5287469 +
ttaaaaaaccctccatttta

SEQ ID NO: 15803 - DNA, 20 bp, Artificial Sequence
  Synthetic oligonucleotide; AAG chr11 5287459 5287478 5287475 +
aaccctccattttacagatg

SEQ ID NO: 15804 - DNA, 20 bp, Artificial Sequence
  Synthetic oligonucleotide; GAG chr11 5287467 5287486 5287483 +
attttacagatgaagaaact

SEQ ID NO: 15805 - DNA, 20 bp, Artificial Sequence
  Synthetic oligonucleotide; AAG chr11 5287483 5287502 5287499 +
aactgagtcatacaactact

SEQ ID NO: 15806 - DNA, 20 bp, Artificial Sequence
  Synthetic oligonucleotide; GAG chr11 5287485 5287504 5287501 +
ctgagtcatacaactactaa

SEQ ID NO: 15807 - DNA, 20 bp, Artificial Sequence
  Synthetic oligonucleotide; GAG chr11 5287493 5287512 5287509 +
tacaactactaagagaaact

SEQ ID NO: 15808 - DNA, 20 bp, Artificial Sequence
  Synthetic oligonucleotide; CAG chr11 5287508 5287527 5287524 +
aaactgagtcactaatcact

SEQ ID NO: 15809 - DNA, 20 bp, Artificial Sequence
  Synthetic oligonucleotide; AGG chr11 5287509 5287528 5287525 +
aactgagtcactaatcactc

SEQ ID NO: 15810 - DNA, 20 bp, Artificial Sequence
  Synthetic oligonucleotide; TGG chr11 5287512 5287531 5287528 +
tgagtcactaatcactcagg

SEQ ID NO: 15811 - DNA, 20 bp, Artificial Sequence
  Synthetic oligonucleotide; TGG chr11 5287517 5287536 5287533 +
cactaatcactcaggtggtc

SEQ ID NO: 15812 - DNA, 20 bp, Artificial Sequence
  Synthetic oligonucleotide; CAG chr11 5287523 5287542 5287539 +
tcactcaggtggtctggctc

SEQ ID NO: 15813 - DNA, 20 bp, Artificial Sequence
  Synthetic oligonucleotide; AAG chr11 5287560 5287579 5287576 +
atctctgctctatactgccc

SEQ ID NO: 15814 - DNA, 20 bp, Artificial Sequence
  Synthetic oligonucleotide; AAG chr11 5287572 5287591 5287588 +
tactgcccaagacttttata

SEQ ID NO: 15815 - DNA, 20 bp, Artificial Sequence
  Synthetic oligonucleotide; AAG chr11 5287577 5287596 5287593 +
cccaagacttttataaagtc

SEQ ID NO: 15816 - DNA, 20 bp, Artificial Sequence
  Synthetic oligonucleotide; AGG chr11 5287578 5287597 5287594 +
ccaagacttttataaagtca

SEQ ID NO: 15817 - DNA, 20 bp, Artificial Sequence
  Synthetic oligonucleotide; GGG chr11 5287579 5287598 5287595 +
caagacttttataaagtcaa

SEQ ID NO: 15818 - DNA, 20 bp, Artificial Sequence
  Synthetic oligonucleotide; GAG chr11 5287584 5287603 5287600 +
cttttataaagtcaagggtt

SEQ ID NO: 15819 - DNA, 20 bp, Artificial Sequence
  Synthetic oligonucleotide; GAG chr11 5287597 5287616 5287613 +
aagggttgagtcactgaaat

SEQ ID NO: 15820 - DNA, 20 bp, Artificial Sequence
  Synthetic oligonucleotide; TGG chr11 5287604 5287623 5287620 +
gagtcactgaaatgagttat

SEQ ID NO: 15821 - DNA, 20 bp, Artificial Sequence
  Synthetic oligonucleotide; GGG chr11 5287605 5287624 5287621 +
agtcactgaaatgagttatt

SEQ ID NO: 15822 - DNA, 20 bp, Artificial Sequence
  Synthetic oligonucleotide; TGG chr11 5287609 5287628 5287625 +
actgaaatgagttattggga

SEQ ID NO: 15823 - DNA, 20 bp, Artificial Sequence
  Synthetic oligonucleotide; TGG chr11 5287617 5287636 5287633 +
gagttattgggatggctgtg

SEQ ID NO: 15824 - DNA, 20 bp, Artificial Sequence
  Synthetic oligonucleotide; GGG chr11 5287618 5287637 5287634 +
agttattgggatggctgtgt

SEQ ID NO: 15825 - DNA, 20 bp, Artificial Sequence
  Synthetic oligonucleotide; AAG chr11 5287621 5287640 5287637 +
tattgggatggctgtgtggg

SEQ ID NO: 15826 - DNA, 20 bp, Artificial Sequence
  Synthetic oligonucleotide; AGG chr11 5287622 5287641 5287638 +
attgggatggctgtgtggga

SEQ ID NO: 15827 - DNA, 20 bp, Artificial Sequence
  Synthetic oligonucleotide; GGG chr11 5287623 5287642 5287639 +
ttgggatggctgtgtgggaa

SEQ ID NO: 15828 - DNA, 20 bp, Artificial Sequence
  Synthetic oligonucleotide; AAG chr11 5287630 5287649 5287646 +
ggctgtgtgggaagggtgct

SEQ ID NO: 15829 - DNA, 20 bp, Artificial Sequence
  Synthetic oligonucleotide; AAG chr11 5287643 5287662 5287659 +
gggtgctaagttctttccta

SEQ ID NO: 15830 - DNA, 20 bp, Artificial Sequence
  Synthetic oligonucleotide; AGG chr11 5287644 5287663 5287660 +
ggtgctaagttctttcctaa

SEQ ID NO: 15831 - DNA, 20 bp, Artificial Sequence
  Synthetic oligonucleotide; GAG chr11 5287652 5287671 5287668 +
gttctttcctaaaggtatgt

SEQ ID NO: 15832 - DNA, 20 bp, Artificial Sequence
  Synthetic oligonucleotide; AAG chr11 5287661 5287680 5287677 +
taaaggtatgtgagaataca

SEQ ID NO: 15833 - DNA, 20 bp, Artificial Sequence
  Synthetic oligonucleotide; AGG chr11 5287662 5287681 5287678 +
aaaggtatgtgagaatacaa

SEQ ID NO: 15834 - DNA, 20 bp, Artificial Sequence
  Synthetic oligonucleotide; AAG chr11 5287666 5287685 5287682 +
gtatgtgagaatacaaagga

SEQ ID NO: 15835 - DNA, 20 bp, Artificial Sequence
  Synthetic oligonucleotide; AAG chr11 5287669 5287688 5287685 +
tgtgagaatacaaaggaaag

SEQ ID NO: 15836 - DNA, 20 bp, Artificial Sequence
  Synthetic oligonucleotide; TAG chr11 5287697 5287716 5287713 +
tcctttttacacacgtgaac

SEQ ID NO: 15837 - DNA, 20 bp, Artificial Sequence
  Synthetic oligonucleotide; CAG chr11 5287719 5287738 5287735 +
gtgcatgcaaatctgacact

SEQ ID NO: 15838 - DNA, 20 bp, Artificial Sequence
  Synthetic oligonucleotide; TGG chr11 5287722 5287741 5287738 +
catgcaaatctgacactcag

SEQ ID NO: 15839 - DNA, 20 bp, Artificial Sequence
  Synthetic oligonucleotide; GGG chr11 5287723 5287742 5287739 +
atgcaaatctgacactcagt

SEQ ID NO: 15840 - DNA, 20 bp, Artificial Sequence
  Synthetic oligonucleotide; TGG chr11 5287728 5287747 5287744 +
aatctgacactcagtgggcc

SEQ ID NO: 15841 - DNA, 20 bp, Artificial Sequence
  Synthetic oligonucleotide; GGG chr11 5287729 5287748 5287745 +
atctgacactcagtgggcct

SEQ ID NO: 15842 - DNA, 20 bp, Artificial Sequence
  Synthetic oligonucleotide; AAG chr11 5287734 5287753 5287750 +
acactcagtgggcctgggtg

SEQ ID NO: 15843 - DNA, 20 bp, Artificial Sequence
  Synthetic oligonucleotide; AGG chr11 5287735 5287754 5287751 +
cactcagtgggcctgggtga

SEQ ID NO: 15844 - DNA, 20 bp, Artificial Sequence
  Synthetic oligonucleotide; GAG chr11 5287739 5287758 5287755 +
cagtgggcctgggtgaaggt

SEQ ID NO: 15845 - DNA, 20 bp, Artificial Sequence
  Synthetic oligonucleotide; GAG chr11 5287758 5287777 5287774 +
tgagaattttattgctgaat

SEQ ID NO: 15846 - DNA, 20 bp, Artificial Sequence
  Synthetic oligonucleotide; GAG chr11 5287760 5287779 5287776 +
agaattttattgctgaatga

SEQ ID NO: 15847 - DNA, 20 bp, Artificial Sequence
  Synthetic oligonucleotide; TGG chr11 5287767 5287786 5287783 +
tattgctgaatgagagcctc

SEQ ID NO: 15848 - DNA, 20 bp, Artificial Sequence
  Synthetic oligonucleotide; GGG chr11 5287768 5287787 5287784 +
attgctgaatgagagcctct

SEQ ID NO: 15849 - DNA, 20 bp, Artificial Sequence
  Synthetic oligonucleotide; GGG chr11 5287769 5287788 5287785 +
ttgctgaatgagagcctctg

SEQ ID NO: 15850 - DNA, 20 bp, Artificial Sequence
  Synthetic oligonucleotide; CAG chr11 5287781 5287800 5287797 +
agcctctggggacatcttgc

SEQ ID NO: 15851 - DNA, 20 bp, Artificial Sequence
  Synthetic oligonucleotide; GAG chr11 5287789 5287808 5287805 +
gggacatcttgccagtcaat

SEQ ID NO: 15852 - DNA, 20 bp, Artificial Sequence
  Synthetic oligonucleotide; CAG chr11 5287795 5287814 5287811 +
tcttgccagtcaatgagtct

SEQ ID NO: 15853 - DNA, 20 bp, Artificial Sequence
  Synthetic oligonucleotide; AGG chr11 5287796 5287815 5287812 +
cttgccagtcaatgagtctc

SEQ ID NO: 15854 - DNA, 20 bp, Artificial Sequence
  Synthetic oligonucleotide; CAG chr11 5287813 5287832 5287829 +
ctcaggttcaatttccttct

SEQ ID NO: 15855 - DNA, 20 bp, Artificial Sequence
  Synthetic oligonucleotide; TGG chr11 5287819 5287838 5287835 +
ttcaatttccttctcagtct

SEQ ID NO: 15856 - DNA, 20 bp, Artificial Sequence
  Synthetic oligonucleotide; GAG chr11 5287821 5287840 5287837 +
caatttccttctcagtcttg

SEQ ID NO: 15857 - DNA, 20 bp, Artificial Sequence
  Synthetic oligonucleotide; CAG chr11 5287827 5287846 5287843 +
ccttctcagtcttggagtaa

SEQ ID NO: 15858 - DNA, 20 bp, Artificial Sequence
  Synthetic oligonucleotide; AAG chr11 5287830 5287849 5287846 +
tctcagtcttggagtaacag

SEQ ID NO: 15859 - DNA, 20 bp, Artificial Sequence
  Synthetic oligonucleotide; CGG chr11 5287850 5287869 5287866 +
aagctcatgcatttaataaa

SEQ ID NO: 15860 - DNA, 20 bp, Artificial Sequence
  Synthetic oligonucleotide; GAG chr11 5287870 5287889 5287886 +
cggaaattttgtattgaaat

SEQ ID NO: 15861 - DNA, 20 bp, Artificial Sequence
  Synthetic oligonucleotide; GAG chr11 5287872 5287891 5287888 +
gaaattttgtattgaaatga

SEQ ID NO: 15862 - DNA, 20 bp, Artificial Sequence
  Synthetic oligonucleotide; TGG chr11 5287879 5287898 5287895 +
tgtattgaaatgagagccat

SEQ ID NO: 15863 - DNA, 20 bp, Artificial Sequence
  Synthetic oligonucleotide; CAG chr11 5287895 5287914 5287911 +
ccattggaaatcatttactc

SEQ ID NO: 15864 - DNA, 20 bp, Artificial Sequence
  Synthetic oligonucleotide; AAG chr11 5287913 5287932 5287929 +
tccagactcctacttataaa

SEQ ID NO: 15865 - DNA, 20 bp, Artificial Sequence
  Synthetic oligonucleotide; GAG chr11 5287915 5287934 5287931 +
cagactcctacttataaaaa

SEQ ID NO: 15866 - DNA, 20 bp, Artificial Sequence
  Synthetic oligonucleotide; GAG chr11 5287923 5287942 5287939 +
tacttataaaaagagaaact

SEQ ID NO: 15867 - DNA, 20 bp, Artificial Sequence
  Synthetic oligonucleotide; AGG chr11 5287924 5287943 5287940 +
acttataaaaagagaaactg

SEQ ID NO: 15868 - DNA, 20 bp, Artificial Sequence
  Synthetic oligonucleotide; CAG chr11 5287929 5287948 5287945 +
taaaaagagaaactgaggct

SEQ ID NO: 15869 - DNA, 20 bp, Artificial Sequence
  Synthetic oligonucleotide; GAG chr11 5287931 5287950 5287947 +
aaaagagaaactgaggctca

SEQ ID NO: 15870 - DNA, 20 bp, Artificial Sequence
  Synthetic oligonucleotide; AAG chr11 5287934 5287953 5287950 +
agagaaactgaggctcagag

SEQ ID NO: 15871 - DNA, 20 bp, Artificial Sequence
  Synthetic oligonucleotide; AGG chr11 5287935 5287954 5287951 +
gagaaactgaggctcagaga

SEQ ID NO: 15872 - DNA, 20 bp, Artificial Sequence
  Synthetic oligonucleotide; GGG chr11 5287936 5287955 5287952 +
agaaactgaggctcagagaa

SEQ ID NO: 15873 - DNA, 20 bp, Artificial Sequence
  Synthetic oligonucleotide; TGG chr11 5287939 5287958 5287955 +
aactgaggctcagagaaggg

SEQ ID NO: 15874 - DNA, 20 bp, Artificial Sequence
  Synthetic oligonucleotide; GGG chr11 5287940 5287959 5287956 +
actgaggctcagagaagggt

SEQ ID NO: 15875 - DNA, 20 bp, Artificial Sequence
  Synthetic oligonucleotide; GGG chr11 5287941 5287960 5287957 +
ctgaggctcagagaagggtg

SEQ ID NO: 15876 - DNA, 20 bp, Artificial Sequence
  Synthetic oligonucleotide; CAG chr11 5287951 5287970 5287967 +
gagaagggtggggactttct

SEQ ID NO: 15877 - DNA, 20 bp, Artificial Sequence
  Synthetic oligonucleotide; TGG chr11 5287961 5287980 5287977 +
gggactttctcagtatgaca

SEQ ID NO: 15878 - DNA, 20 bp, Artificial Sequence
  Synthetic oligonucleotide; CAG chr11 5287971 5287990 5287987 +
cagtatgacatggaaatgat

SEQ ID NO: 15879 - DNA, 20 bp, Artificial Sequence
  Synthetic oligonucleotide; AGG chr11 5287972 5287991 5287988 +
agtatgacatggaaatgatc

SEQ ID NO: 15880 - DNA, 20 bp, Artificial Sequence
  Synthetic oligonucleotide; TGG chr11 5287977 5287996 5287993 +
gacatggaaatgatcaggct

SEQ ID NO: 15881 - DNA, 20 bp, Artificial Sequence
  Synthetic oligonucleotide; AAG chr11 5287985 5288004 5288001 +
aatgatcaggcttggattca

SEQ ID NO: 15882 - DNA, 20 bp, Artificial Sequence
  Synthetic oligonucleotide; TAG chr11 5288004 5288023 5288020 +
aaagctcctgactttctgtc

SEQ ID NO: 15883 - DNA, 20 bp, Artificial Sequence
  Synthetic oligonucleotide; CAG chr11 5288015 5288034 5288031 +
ctttctgtctagtgtatgtg

SEQ ID NO: 15884 - DNA, 20 bp, Artificial Sequence
  Synthetic oligonucleotide; GAG chr11 5288019 5288038 5288035 +
ctgtctagtgtatgtgcagt

SEQ ID NO: 15885 - DNA, 20 bp, Artificial Sequence
  Synthetic oligonucleotide; AAG chr11 5288041 5288060 5288057 +
gccccttttcctctaactga

SEQ ID NO: 15886 - DNA, 20 bp, Artificial Sequence
  Synthetic oligonucleotide; AAG chr11 5288044 5288063 5288060 +
ccttttcctctaactgaaag

SEQ ID NO: 15887 - DNA, 20 bp, Artificial Sequence
  Synthetic oligonucleotide; AGG chr11 5288045 5288064 5288061 +
cttttcctctaactgaaaga

SEQ ID NO: 15888 - DNA, 20 bp, Artificial Sequence
  Synthetic oligonucleotide; TGG chr11 5288057 5288076 5288073 +
ctgaaagaaggaaaaaaaaa

SEQ ID NO: 15889 - DNA, 20 bp, Artificial Sequence
  Synthetic oligonucleotide; TAG chr11 5288078 5288097 5288094 +
ggaacccaaaatattctaca

SEQ ID NO: 15890 - DNA, 20 bp, Artificial Sequence
  Synthetic oligonucleotide; CAG chr11 5288092 5288111 5288108 +
tctacatagtttccatgtca

SEQ ID NO: 15891 - DNA, 20 bp, Artificial Sequence
  Synthetic oligonucleotide; CAG chr11 5288096 5288115 5288112 +
catagtttccatgtcacagc

SEQ ID NO: 15892 - DNA, 20 bp, Artificial Sequence
  Synthetic oligonucleotide; AGG chr11 5288097 5288116 5288113 +
atagtttccatgtcacagcc

SEQ ID NO: 15893 - DNA, 20 bp, Artificial Sequence
  Synthetic oligonucleotide; GGG chr11 5288098 5288117 5288114 +
tagtttccatgtcacagcca

SEQ ID NO: 15894 - DNA, 20 bp, Artificial Sequence
  Synthetic oligonucleotide; TGG chr11 5288102 5288121 5288118 +
ttccatgtcacagccagggc

SEQ ID NO: 15895 - DNA, 20 bp, Artificial Sequence
  Synthetic oligonucleotide; GGG chr11 5288103 5288122 5288119 +
tccatgtcacagccagggct

SEQ ID NO: 15896 - DNA, 20 bp, Artificial Sequence
  Synthetic oligonucleotide; CAG chr11 5288106 5288125 5288122 +
atgtcacagccagggctggg

SEQ ID NO: 15897 - DNA, 20 bp, Artificial Sequence
  Synthetic oligonucleotide; AAG chr11 5288157 5288176 5288173 +
tatcatttaaatgcataaat

SEQ ID NO: 15898 - DNA, 20 bp, Artificial Sequence
  Synthetic oligonucleotide; CGG chr11 5288171 5288190 5288187 +
ataaataagcaaaccctgct

SEQ ID NO: 15899 - DNA, 20 bp, Artificial Sequence
  Synthetic oligonucleotide; GGG chr11 5288172 5288191 5288188 +
taaataagcaaaccctgctc

SEQ ID NO: 15900 - DNA, 20 bp, Artificial Sequence
  Synthetic oligonucleotide; TGG chr11 5288177 5288196 5288193 +
aagcaaaccctgctcgggaa

SEQ ID NO: 15901 - DNA, 20 bp, Artificial Sequence
  Synthetic oligonucleotide; GGG chr11 5288178 5288197 5288194 +
agcaaaccctgctcgggaat

SEQ ID NO: 15902 - DNA, 20 bp, Artificial Sequence
  Synthetic oligonucleotide; GAG chr11 5288180 5288199 5288196 +
caaaccctgctcgggaatgg

SEQ ID NO: 15903 - DNA, 20 bp, Artificial Sequence
  Synthetic oligonucleotide; AGG chr11 5288181 5288200 5288197 +
aaaccctgctcgggaatggg

SEQ ID NO: 15904 - DNA, 20 bp, Artificial Sequence
  Synthetic oligonucleotide; GGG chr11 5288182 5288201 5288198 +
aaccctgctcgggaatggga

SEQ ID NO: 15905 - DNA, 20 bp, Artificial Sequence
  Synthetic oligonucleotide; GAG chr11 5288184 5288203 5288200 +
ccctgctcgggaatgggagg

SEQ ID NO: 15906 - DNA, 20 bp, Artificial Sequence
  Synthetic oligonucleotide; GAG chr11 5288186 5288205 5288202 +
ctgctcgggaatgggaggga

SEQ ID NO: 15907 - DNA, 20 bp, Artificial Sequence
  Synthetic oligonucleotide; TGG chr11 5288193 5288212 5288209 +
ggaatgggagggagagtctc

SEQ ID NO: 15908 - DNA, 20 bp, Artificial Sequence
  Synthetic oligonucleotide; GAG chr11 5288195 5288214 5288211 +
aatgggagggagagtctctg

SEQ ID NO: 15909 - DNA, 20 bp, Artificial Sequence
  Synthetic oligonucleotide; CGG chr11 5288210 5288229 5288226 +
ctctggagtccaccccttct

SEQ ID NO: 15910 - DNA, 20 bp, Artificial Sequence
  Synthetic oligonucleotide; TGG chr11 5288216 5288235 5288232 +
agtccaccccttctcggccc

SEQ ID NO: 15911 - DNA, 20 bp, Artificial Sequence
  Synthetic oligonucleotide; CAG chr11 5288224 5288243 5288240 +
ccttctcggccctggctctg

SEQ ID NO: 15912 - DNA, 20 bp, Artificial Sequence
  Synthetic oligonucleotide; TAG chr11 5288228 5288247 5288244 +
ctcggccctggctctgcaga

SEQ ID NO: 15913 - DNA, 20 bp, Artificial Sequence
  Synthetic oligonucleotide; AAG chr11 5288239 5288258 5288255 +
ctctgcagatagtgctatca

SEQ ID NO: 15914 - DNA, 20 bp, Artificial Sequence
  Synthetic oligonucleotide; CAG chr11 5288248 5288267 5288264 +
tagtgctatcaaagccctga

SEQ ID NO: 15915 - DNA, 20 bp, Artificial Sequence
  Synthetic oligonucleotide; GAG chr11 5288250 5288269 5288266 +
gtgctatcaaagccctgaca

SEQ ID NO: 15916 - DNA, 20 bp, Artificial Sequence
  Synthetic oligonucleotide; TGG chr11 5288266 5288285 5288282 +
gacagagccctgcccattgc

SEQ ID NO: 15917 - DNA, 20 bp, Artificial Sequence
  Synthetic oligonucleotide; GGG chr11 5288267 5288286 5288283 +
acagagccctgcccattgct

SEQ ID NO: 15918 - DNA, 20 bp, Artificial Sequence
  Synthetic oligonucleotide; TGG chr11 5288273 5288292 5288289 +
ccctgcccattgctgggcct

SEQ ID NO: 15919 - DNA, 20 bp, Artificial Sequence
  Synthetic oligonucleotide; GAG chr11 5288275 5288294 5288291 +
ctgcccattgctgggccttg

SEQ ID NO: 15920 - DNA, 20 bp, Artificial Sequence
  Synthetic oligonucleotide; GAG chr11 5288279 5288298 5288295 +
ccattgctgggccttggagt

SEQ ID NO: 15921 - DNA, 20 bp, Artificial Sequence
  Synthetic oligonucleotide; CAG chr11 5288283 5288302 5288299 +
tgctgggccttggagtgagt

SEQ ID NO: 15922 - DNA, 20 bp, Artificial Sequence
  Synthetic oligonucleotide; TAG chr11 5288288 5288307 5288304 +
ggccttggagtgagtcagcc

SEQ ID NO: 15923 - DNA, 20 bp, Artificial Sequence
  Synthetic oligonucleotide; TAG chr11 5288291 5288310 5288307 +
cttggagtgagtcagcctag

SEQ ID NO: 15924 - DNA, 20 bp, Artificial Sequence
  Synthetic oligonucleotide; GAG chr11 5288293 5288312 5288309 +
tggagtgagtcagcctagta

SEQ ID NO: 15925 - DNA, 20 bp, Artificial Sequence
  Synthetic oligonucleotide; GAG chr11 5288295 5288314 5288311 +
gagtgagtcagcctagtaga

SEQ ID NO: 15926 - DNA, 20 bp, Artificial Sequence
  Synthetic oligonucleotide; AGG chr11 5288296 5288315 5288312 +
agtgagtcagcctagtagag

SEQ ID NO: 15927 - DNA, 20 bp, Artificial Sequence
  Synthetic oligonucleotide; CAG chr11 5288299 5288318 5288315 +
gagtcagcctagtagagagg

SEQ ID NO: 15928 - DNA, 20 bp, Artificial Sequence
  Synthetic oligonucleotide; AGG chr11 5288300 5288319 5288316 +
agtcagcctagtagagaggc

SEQ ID NO: 15929 - DNA, 20 bp, Artificial Sequence
  Synthetic oligonucleotide; GGG chr11 5288301 5288320 5288317 +
gtcagcctagtagagaggca

SEQ ID NO: 15930 - DNA, 20 bp, Artificial Sequence
  Synthetic oligonucleotide; AAG chr11 5288305 5288324 5288321 +
gcctagtagagaggcagggc

SEQ ID NO: 15931 - DNA, 20 bp, Artificial Sequence
  Synthetic oligonucleotide; TAG chr11 5288316 5288335 5288332 +
aggcagggcaagccatctca

SEQ ID NO: 15932 - DNA, 20 bp, Artificial Sequence
  Synthetic oligonucleotide; GAG chr11 5288324 5288343 5288340 +
caagccatctcatagctgct

SEQ ID NO: 15933 - DNA, 20 bp, Artificial Sequence
  Synthetic oligonucleotide; TGG chr11 5288327 5288346 5288343 +
gccatctcatagctgctgag

SEQ ID NO: 15934 - DNA, 20 bp, Artificial Sequence
  Synthetic oligonucleotide; GGG chr11 5288328 5288347 5288344 +
ccatctcatagctgctgagt

SEQ ID NO: 15935 - DNA, 20 bp, Artificial Sequence
  Synthetic oligonucleotide; GAG chr11 5288330 5288349 5288346 +
atctcatagctgctgagtgg

SEQ ID NO: 15936 - DNA, 20 bp, Artificial Sequence
  Synthetic oligonucleotide; GAG chr11 5288332 5288351 5288348 +
ctcatagctgctgagtggga

SEQ ID NO: 15937 - DNA, 20 bp, Artificial Sequence
  Synthetic oligonucleotide; GAG chr11 5288334 5288353 5288350 +
catagctgctgagtgggaga

SEQ ID NO: 15938 - DNA, 20 bp, Artificial Sequence
  Synthetic oligonucleotide; AAG chr11 5288339 5288358 5288355 +
ctgctgagtgggagagagaa

SEQ ID NO: 15939 - DNA, 20 bp, Artificial Sequence
  Synthetic oligonucleotide; AGG chr11 5288340 5288359 5288356 +
tgctgagtgggagagagaaa

SEQ ID NO: 15940 - DNA, 20 bp, Artificial Sequence
  Synthetic oligonucleotide; GGG chr11 5288341 5288360 5288357 +
gctgagtgggagagagaaaa

SEQ ID NO: 15941 - DNA, 20 bp, Artificial Sequence
  Synthetic oligonucleotide; CAG chr11 5288361 5288380 5288377 +
gggctcattgtctataaact

SEQ ID NO: 15942 - DNA, 20 bp, Artificial Sequence
  Synthetic oligonucleotide; AGG chr11 5288362 5288381 5288378 +
ggctcattgtctataaactc

SEQ ID NO: 15943 - DNA, 20 bp, Artificial Sequence
  Synthetic oligonucleotide; TGG chr11 5288368 5288387 5288384 +
ttgtctataaactcaggtca

SEQ ID NO: 15944 - DNA, 20 bp, Artificial Sequence
  Synthetic oligonucleotide; AAG chr11 5288390 5288409 5288406 +
gctattcttattctcacact

SEQ ID NO: 15945 - DNA, 20 bp, Artificial Sequence
  Synthetic oligonucleotide; AAG chr11 5288396 5288415 5288412 +
cttattctcacactaagaaa

SEQ ID NO: 15946 - DNA, 20 bp, Artificial Sequence
  Synthetic oligonucleotide; GAG chr11 5288402 5288421 5288418 +
ctcacactaagaaaaagaat

SEQ ID NO: 15947 - DNA, 20 bp, Artificial Sequence
  Synthetic oligonucleotide; TGG chr11 5288440 5288459 5288456 +
ctgcgtcccctcttgtgtac

SEQ ID NO: 15948 - DNA, 20 bp, Artificial Sequence
  Synthetic oligonucleotide; GGG chr11 5288441 5288460 5288457 +
tgcgtcccctcttgtgtact

SEQ ID NO: 15949 - DNA, 20 bp, Artificial Sequence
  Synthetic oligonucleotide; GGG chr11 5288442 5288461 5288458 +
gcgtcccctcttgtgtactg

SEQ ID NO: 15950 - DNA, 20 bp, Artificial Sequence
  Synthetic oligonucleotide; AAG chr11 5288450 5288469 5288466 +
tcttgtgtactggggtcccc

SEQ ID NO: 15951 - DNA, 20 bp, Artificial Sequence
  Synthetic oligonucleotide; GAG chr11 5288452 5288471 5288468 +
ttgtgtactggggtccccaa

SEQ ID NO: 15952 - DNA, 20 bp, Artificial Sequence
  Synthetic oligonucleotide; AAG chr11 5288463 5288482 5288479 +
ggtccccaagagctctctaa

SEQ ID NO: 15953 - DNA, 20 bp, Artificial Sequence
  Synthetic oligonucleotide; TGG chr11 5288469 5288488 5288485 +
caagagctctctaaaagtga

SEQ ID NO: 15954 - DNA, 20 bp, Artificial Sequence
  Synthetic oligonucleotide; AAG chr11 5288474 5288493 5288490 +
gctctctaaaagtgatggca

SEQ ID NO: 15955 - DNA, 20 bp, Artificial Sequence
  Synthetic oligonucleotide; TAG chr11 5288486 5288505 5288502 +
tgatggcaaagtcattgcgc

SEQ ID NO: 15956 - DNA, 20 bp, Artificial Sequence
  Synthetic oligonucleotide; CAG chr11 5288532 5288551 5288548 +
ctgcatttgtctccacacac

SEQ ID NO: 15957 - DNA, 20 bp, Artificial Sequence
  Synthetic oligonucleotide; TGG chr11 5288538 5288557 5288554 +
ttgtctccacacaccagtca

SEQ ID NO: 15958 - DNA, 20 bp, Artificial Sequence
  Synthetic oligonucleotide; CAG chr11 5288557 5288576 5288573 +
atggacaataaccctcctcc

SEQ ID NO: 15959 - DNA, 20 bp, Artificial Sequence
  Synthetic oligonucleotide; AGG chr11 5288558 5288577 5288574 +
tggacaataaccctcctccc

SEQ ID NO: 15960 - DNA, 20 bp, Artificial Sequence
  Synthetic oligonucleotide; AAG chr11 5288589 5288608 5288605 +
cttgtctttgtataatactc

SEQ ID NO: 15961 - DNA, 20 bp, Artificial Sequence
  Synthetic oligonucleotide; CGG chr11 5288598 5288617 5288614 +
gtataatactcaagtaattt

SEQ ID NO: 15962 - DNA, 20 bp, Artificial Sequence
  Synthetic oligonucleotide; TGG chr11 5288643 5288662 5288659 +
ttctgttattcctgtttcaa

SEQ ID NO: 15963 - DNA, 20 bp, Artificial Sequence
  Synthetic oligonucleotide; TAG chr11 5288648 5288667 5288664 +
ttattcctgtttcaatggct

SEQ ID NO: 15964 - DNA, 20 bp, Artificial Sequence
  Synthetic oligonucleotide; TAG chr11 5288651 5288670 5288667 +
ttcctgtttcaatggcttag

SEQ ID NO: 15965 - DNA, 20 bp, Artificial Sequence
  Synthetic oligonucleotide; AAG chr11 5288657 5288676 5288673 +
tttcaatggcttagtagaaa

SEQ ID NO: 15966 - DNA, 20 bp, Artificial Sequence
  Synthetic oligonucleotide; TAG chr11 5288689 5288708 5288705 +
gttttcccataaattgacaa

SEQ ID NO: 15967 - DNA, 20 bp, Artificial Sequence
  Synthetic oligonucleotide; TGG chr11 5288715 5288734 5288731 +
atttcacatcaatgtctata

SEQ ID NO: 15968 - DNA, 20 bp, Artificial Sequence
  Synthetic oligonucleotide; GGG chr11 5288716 5288735 5288732 +
tttcacatcaatgtctatat

SEQ ID NO: 15969 - DNA, 20 bp, Artificial Sequence
  Synthetic oligonucleotide; AAG chr11 5288776 5288795 5288792 +
ctttatattgttactactct

SEQ ID NO: 15970 - DNA, 20 bp, Artificial Sequence
  Synthetic oligonucleotide; AAG chr11 5288780 5288799 5288796 +
atattgttactactctaaga

SEQ ID NO: 15971 - DNA, 20 bp, Artificial Sequence
  Synthetic oligonucleotide; TGG chr11 5288791 5288810 5288807 +
actctaagaaagttacaaca

SEQ ID NO: 15972 - DNA, 20 bp, Artificial Sequence
  Synthetic oligonucleotide; AAG chr11 5288801 5288820 5288817 +
agttacaacatggtgaatac

SEQ ID NO: 15973 - DNA, 20 bp, Artificial Sequence
  Synthetic oligonucleotide; GAG chr11 5288803 5288822 5288819 +
ttacaacatggtgaatacaa

SEQ ID NO: 15974 - DNA, 20 bp, Artificial Sequence
  Synthetic oligonucleotide; AAG chr11 5288807 5288826 5288823 +
aacatggtgaatacaagaga

SEQ ID NO: 15975 - DNA, 20 bp, Artificial Sequence
  Synthetic oligonucleotide; AAG chr11 5288817 5288836 5288833 +
atacaagagaaagctattac

SEQ ID NO: 15976 - DNA, 20 bp, Artificial Sequence
  Synthetic oligonucleotide; CAG chr11 5288822 5288841 5288838 +
agagaaagctattacaagtc

SEQ ID NO: 15977 - DNA, 20 bp, Artificial Sequence
  Synthetic oligonucleotide; AAG chr11 5288832 5288851 5288848 +
attacaagtccagaaaataa

SEQ ID NO: 15978 - DNA, 20 bp, Artificial Sequence
  Synthetic oligonucleotide; GAG chr11 5288845 5288864 5288861 +
aaaataaaagttatcatctt

SEQ ID NO: 15979 - DNA, 20 bp, Artificial Sequence
  Synthetic oligonucleotide; AGG chr11 5288846 5288865 5288862 +
aaataaaagttatcatcttg

SEQ ID NO: 15980 - DNA, 20 bp, Artificial Sequence
  Synthetic oligonucleotide; CAG chr11 5288852 5288871 5288868 +
aagttatcatcttgaggcct

SEQ ID NO: 15981 - DNA, 20 bp, Artificial Sequence
  Synthetic oligonucleotide; TAG chr11 5288860 5288879 5288876 +
atcttgaggcctcagctttc

SEQ ID NO: 15982 - DNA, 20 bp, Artificial Sequence
  Synthetic oligonucleotide; AGG chr11 5288861 5288880 5288877 +
tcttgaggcctcagctttct

SEQ ID NO: 15983 - DNA, 20 bp, Artificial Sequence
  Synthetic oligonucleotide; CAG chr11 5288904 5288923 5288920 +
attaatctaacaattatgaa

SEQ ID NO: 15984 - DNA, 20 bp, Artificial Sequence
  Synthetic oligonucleotide; GAG chr11 5288911 5288930 5288927 +
taacaattatgaacagcaat

SEQ ID NO: 15985 - DNA, 20 bp, Artificial Sequence
  Synthetic oligonucleotide; AAG chr11 5288926 5288945 5288942 +
gcaatgagataatgtgtaca

SEQ ID NO: 15986 - DNA, 20 bp, Artificial Sequence
  Synthetic oligonucleotide; CAG chr11 5288933 5288952 5288949 +
gataatgtgtacaaagtacc

SEQ ID NO: 15987 - DNA, 20 bp, Artificial Sequence
  Synthetic oligonucleotide; TGG chr11 5288943 5288962 5288959 +
acaaagtacccagacctatg

SEQ ID NO: 15988 - DNA, 20 bp, Artificial Sequence
  Synthetic oligonucleotide; TAG chr11 5288946 5288965 5288962 +
aagtacccagacctatgtgg

SEQ ID NO: 15989 - DNA, 20 bp, Artificial Sequence
  Synthetic oligonucleotide; GAG chr11 5288948 5288967 5288964 +
gtacccagacctatgtggta

SEQ ID NO: 15990 - DNA, 20 bp, Artificial Sequence
  Synthetic oligonucleotide; AAG chr11 5288955 5288974 5288971 +
gacctatgtggtagagcatc

SEQ ID NO: 15991 - DNA, 20 bp, Artificial Sequence
  Synthetic oligonucleotide; AGG chr11 5288956 5288975 5288972 +
acctatgtggtagagcatca

SEQ ID NO: 15992 - DNA, 20 bp, Artificial Sequence
  Synthetic oligonucleotide; AAG chr11 5288959 5288978 5288975 +
tatgtggtagagcatcaagg

SEQ ID NO: 15993 - DNA, 20 bp, Artificial Sequence
  Synthetic oligonucleotide; CGG chr11 5288969 5288988 5288985 +
agcatcaaggaagcgcattg

SEQ ID NO: 15994 - DNA, 20 bp, Artificial Sequence
  Synthetic oligonucleotide; GAG chr11 5288971 5288990 5288987 +
catcaaggaagcgcattgcg

SEQ ID NO: 15995 - DNA, 20 bp, Artificial Sequence
  Synthetic oligonucleotide; CAG chr11 5288974 5288993 5288990 +
caaggaagcgcattgcggag

SEQ ID NO: 15996 - DNA, 20 bp, Artificial Sequence
  Synthetic oligonucleotide; GAG chr11 5289011 5289030 5289027 +
gtttttgtattctgtttcgt

SEQ ID NO: 15997 - DNA, 20 bp, Artificial Sequence
  Synthetic oligonucleotide; AGG chr11 5289012 5289031 5289028 +
tttttgtattctgtttcgtg

SEQ ID NO: 15998 - DNA, 20 bp, Artificial Sequence
  Synthetic oligonucleotide; AAG chr11 5289016 5289035 5289032 +
tgtattctgtttcgtgaggc

SEQ ID NO: 15999 - DNA, 20 bp, Artificial Sequence
  Synthetic oligonucleotide; AGG chr11 5289017 5289036 5289033 +
gtattctgtttcgtgaggca

SEQ ID NO: 16000 - DNA, 20 bp, Artificial Sequence
  Synthetic oligonucleotide; CAG chr11 5289035 5289054 5289051 +
caaggtttcactctgctgtc

SEQ ID NO: 16001 - DNA, 20 bp, Artificial Sequence
  Synthetic oligonucleotide; AGG chr11 5289036 5289055 5289052 +
aaggtttcactctgctgtcc

SEQ ID NO: 16002 - DNA, 20 bp, Artificial Sequence
  Synthetic oligonucleotide; TGG chr11 5289040 5289059 5289056 +
tttcactctgctgtccaggc

SEQ ID NO: 16003 - DNA, 20 bp, Artificial Sequence
  Synthetic oligonucleotide; GAG chr11 5289042 5289061 5289058 +
tcactctgctgtccaggctg

SEQ ID NO: 16004 - DNA, 20 bp, Artificial Sequence
  Synthetic oligonucleotide; CAG chr11 5289047 5289066 5289063 +
ctgctgtccaggctggagtg

SEQ ID NO: 16005 - DNA, 20 bp, Artificial Sequence
  Synthetic oligonucleotide; TGG chr11 5289050 5289069 5289066 +
ctgtccaggctggagtgcag

SEQ ID NO: 16006 - DNA, 20 bp, Artificial Sequence
  Synthetic oligonucleotide; AAG chr11 5289054 5289073 5289070 +
ccaggctggagtgcagtggc

SEQ ID NO: 16007 - DNA, 20 bp, Artificial Sequence
  Synthetic oligonucleotide; CAG chr11 5289071 5289090 5289087 +
ggcaagatcatgtctcactg

SEQ ID NO: 16008 - DNA, 20 bp, Artificial Sequence
  Synthetic oligonucleotide; GAG chr11 5289086 5289105 5289102 +
cactgcagccttgacctcct

SEQ ID NO: 16009 - DNA, 20 bp, Artificial Sequence
  Synthetic oligonucleotide; AAG chr11 5289092 5289111 5289108 +
agccttgacctcctgagctc

SEQ ID NO: 16010 - DNA, 20 bp, Artificial Sequence
  Synthetic oligonucleotide; AGG chr11 5289093 5289112 5289109 +
gccttgacctcctgagctca

SEQ ID NO: 16011 - DNA, 20 bp, Artificial Sequence
  Synthetic oligonucleotide; GGG chr11 5289094 5289113 5289110 +
ccttgacctcctgagctcaa

SEQ ID NO: 16012 - DNA, 20 bp, Artificial Sequence
  Synthetic oligonucleotide; CGG chr11 5289109 5289128 5289125 +
ctcaagggatcctcccattt

SEQ ID NO: 16013 - DNA, 20 bp, Artificial Sequence
  Synthetic oligonucleotide; GAG chr11 5289118 5289137 5289134 +
tcctcccatttcggcctcct

SEQ ID NO: 16014 - DNA, 20 bp, Artificial Sequence
  Synthetic oligonucleotide; TAG chr11 5289121 5289140 5289137 +
tcccatttcggcctcctgag

SEQ ID NO: 16015 - DNA, 20 bp, Artificial Sequence
  Synthetic oligonucleotide; TGG chr11 5289125 5289144 5289141 +
atttcggcctcctgagtagc

SEQ ID NO: 16016 - DNA, 20 bp, Artificial Sequence
  Synthetic oligonucleotide; GGG chr11 5289126 5289145 5289142 +
tttcggcctcctgagtagct

SEQ ID NO: 16017 - DNA, 20 bp, Artificial Sequence
  Synthetic oligonucleotide; CAG chr11 5289133 5289152 5289149 +
ctcctgagtagctgggacta

SEQ ID NO: 16018 - DNA, 20 bp, Artificial Sequence
  Synthetic oligonucleotide; AGG chr11 5289134 5289153 5289150 +
tcctgagtagctgggactac

SEQ ID NO: 16019 - DNA, 20 bp, Artificial Sequence
  Synthetic oligonucleotide; TGG chr11 5289152 5289171 5289168 +
acaggtgtacatcacatgcc

SEQ ID NO: 16020 - DNA, 20 bp, Artificial Sequence
  Synthetic oligonucleotide; AAG chr11 5289175 5289194 5289191 +
ctaatttttttttttttttt

SEQ ID NO: 16021 - DNA, 20 bp, Artificial Sequence
  Synthetic oligonucleotide; TAG chr11 5289178 5289197 5289194 +
attttttttttttttttaag

SEQ ID NO: 16022 - DNA, 20 bp, Artificial Sequence
  Synthetic oligonucleotide; GAG chr11 5289180 5289199 5289196 +
tttttttttttttttaagta

SEQ ID NO: 16023 - DNA, 20 bp, Artificial Sequence
  Synthetic oligonucleotide; GAG chr11 5289185 5289204 5289201 +
ttttttttttaagtagagac

SEQ ID NO: 16024 - DNA, 20 bp, Artificial Sequence
  Synthetic oligonucleotide; AGG chr11 5289186 5289205 5289202 +
tttttttttaagtagagacg

SEQ ID NO: 16025 - DNA, 20 bp, Artificial Sequence
  Synthetic oligonucleotide; CAG chr11 5289204 5289223 5289220 +
cgaggtcttgctatgttgtc

SEQ ID NO: 16026 - DNA, 20 bp, Artificial Sequence
  Synthetic oligonucleotide; AGG chr11 5289205 5289224 5289221 +
gaggtcttgctatgttgtcc

SEQ ID NO: 16027 - DNA, 20 bp, Artificial Sequence
  Synthetic oligonucleotide; GAG chr11 5289224 5289243 5289240 +
caggataatatcaaactctt

SEQ ID NO: 16028 - DNA, 20 bp, Artificial Sequence
  Synthetic oligonucleotide; AAG chr11 5289230 5289249 5289246 +
aatatcaaactcttgagctc

SEQ ID NO: 16029 - DNA, 20 bp, Artificial Sequence
  Synthetic oligonucleotide; CAG chr11 5289233 5289252 5289249 +
atcaaactcttgagctcaag

SEQ ID NO: 16030 - DNA, 20 bp, Artificial Sequence
  Synthetic oligonucleotide; AAG chr11 5289256 5289275 5289272 +
tcctcccacttctacctctc

SEQ ID NO: 16031 - DNA, 20 bp, Artificial Sequence
  Synthetic oligonucleotide; TGG chr11 5289262 5289281 5289278 +
cacttctacctctcaagtgc

SEQ ID NO: 16032 - DNA, 20 bp, Artificial Sequence
  Synthetic oligonucleotide; CAG chr11 5289270 5289289 5289286 +
cctctcaagtgctggaatta

SEQ ID NO: 16033 - DNA, 20 bp, Artificial Sequence
  Synthetic oligonucleotide; GAG chr11 5289277 5289296 5289293 +
agtgctggaattacagacat

SEQ ID NO: 16034 - DNA, 20 bp, Artificial Sequence
  Synthetic oligonucleotide; TGG chr11 5289290 5289309 5289306 +
cagacatgagccaccactcc

SEQ ID NO: 16035 - DNA, 20 bp, Artificial Sequence
  Synthetic oligonucleotide; CAG chr11 5289297 5289316 5289313 +
gagccaccactcctggcttg

SEQ ID NO: 16036 - DNA, 20 bp, Artificial Sequence
  Synthetic oligonucleotide; GAG chr11 5289332 5289351 5289348 +
actaattcctgacactactt

SEQ ID NO: 16037 - DNA, 20 bp, Artificial Sequence
  Synthetic oligonucleotide; AGG chr11 5289333 5289352 5289349 +
ctaattcctgacactacttg

SEQ ID NO: 16038 - DNA, 20 bp, Artificial Sequence
  Synthetic oligonucleotide; GGG chr11 5289334 5289353 5289350 +
taattcctgacactacttga

SEQ ID NO: 16039 - DNA, 20 bp, Artificial Sequence
  Synthetic oligonucleotide; TAG chr11 5289341 5289360 5289357 +
tgacactacttgagggatac

SEQ ID NO: 16040 - DNA, 20 bp, Artificial Sequence
  Synthetic oligonucleotide; CAG chr11 5289345 5289364 5289361 +
actacttgagggatactaga

SEQ ID NO: 16041 - DNA, 20 bp, Artificial Sequence
  Synthetic oligonucleotide; TAG chr11 5289348 5289367 5289364 +
acttgagggatactagacag

SEQ ID NO: 16042 - DNA, 20 bp, Artificial Sequence
  Synthetic oligonucleotide; TGG chr11 5289375 5289394 5289391 +
cacatctttaatataccaaa

SEQ ID NO: 16043 - DNA, 20 bp, Artificial Sequence
  Synthetic oligonucleotide; GGG chr11 5289376 5289395 5289392 +
acatctttaatataccaaat

SEQ ID NO: 16044 - DNA, 20 bp, Artificial Sequence
  Synthetic oligonucleotide; TAG chr11 5289385 5289404 5289401 +
atataccaaatgggtgactg

SEQ ID NO: 16045 - DNA, 20 bp, Artificial Sequence
  Synthetic oligonucleotide; AGG chr11 5289386 5289405 5289402 +
tataccaaatgggtgactgt

SEQ ID NO: 16046 - DNA, 20 bp, Artificial Sequence
  Synthetic oligonucleotide; GGG chr11 5289387 5289406 5289403 +
ataccaaatgggtgactgta

SEQ ID NO: 16047 - DNA, 20 bp, Artificial Sequence
  Synthetic oligonucleotide; GAG chr11 5289392 5289411 5289408 +
aaatgggtgactgtagggtt

SEQ ID NO: 16048 - DNA, 20 bp, Artificial Sequence
  Synthetic oligonucleotide; GAG chr11 5289394 5289413 5289410 +
atgggtgactgtagggttga

SEQ ID NO: 16049 - DNA, 20 bp, Artificial Sequence
  Synthetic oligonucleotide; AGG chr11 5289395 5289414 5289411 +
tgggtgactgtagggttgag

SEQ ID NO: 16050 - DNA, 20 bp, Artificial Sequence
  Synthetic oligonucleotide; GGG chr11 5289396 5289415 5289412 +
gggtgactgtagggttgaga

SEQ ID NO: 16051 - DNA, 20 bp, Artificial Sequence
  Synthetic oligonucleotide; GAG chr11 5289398 5289417 5289414 +
gtgactgtagggttgagagg

SEQ ID NO: 16052 - DNA, 20 bp, Artificial Sequence
  Synthetic oligonucleotide; TAG chr11 5289403 5289422 5289419 +
tgtagggttgagagggagat

SEQ ID NO: 16053 - DNA, 20 bp, Artificial Sequence
  Synthetic oligonucleotide; AAG chr11 5289428 5289447 5289444 +
ttcaatgttttatgaccaaa

SEQ ID NO: 16054 - DNA, 20 bp, Artificial Sequence
  Synthetic oligonucleotide; AGG chr11 5289429 5289448 5289445 +
tcaatgttttatgaccaaaa

SEQ ID NO: 16055 - DNA, 20 bp, Artificial Sequence
  Synthetic oligonucleotide; CAG chr11 5289439 5289458 5289455 +
atgaccaaaaaggcttaaat

SEQ ID NO: 16056 - DNA, 20 bp, Artificial Sequence
  Synthetic oligonucleotide; AGG chr11 5289440 5289459 5289456 +
tgaccaaaaaggcttaaatc

SEQ ID NO: 16057 - DNA, 20 bp, Artificial Sequence
  Synthetic oligonucleotide; AAG chr11 5289446 5289465 5289462 +
aaaaggcttaaatcaggcac

SEQ ID NO: 16058 - DNA, 20 bp, Artificial Sequence
  Synthetic oligonucleotide; TAG chr11 5289451 5289470 5289467 +
gcttaaatcaggcacaagct

SEQ ID NO: 16059 - DNA, 20 bp, Artificial Sequence
  Synthetic oligonucleotide; AGG chr11 5289452 5289471 5289468 +
cttaaatcaggcacaagctt

SEQ ID NO: 16060 - DNA, 20 bp, Artificial Sequence
  Synthetic oligonucleotide; GAG chr11 5289468 5289487 5289484 +
gcttaggtcttttcaactgt

SEQ ID NO: 16061 - DNA, 20 bp, Artificial Sequence
  Synthetic oligonucleotide; AGG chr11 5289469 5289488 5289485 +
cttaggtcttttcaactgtg

SEQ ID NO: 16062 - DNA, 20 bp, Artificial Sequence
  Synthetic oligonucleotide; CGG chr11 5289474 5289493 5289490 +
gtcttttcaactgtgaggac

SEQ ID NO: 16063 - DNA, 20 bp, Artificial Sequence
  Synthetic oligonucleotide; AAG chr11 5289482 5289501 5289498 +
aactgtgaggaccggactga

SEQ ID NO: 16064 - DNA, 20 bp, Artificial Sequence
  Synthetic oligonucleotide; CAG chr11 5289489 5289508 5289505 +
aggaccggactgaaagtgtg

SEQ ID NO: 16065 - DNA, 20 bp, Artificial Sequence
  Synthetic oligonucleotide; AAG chr11 5289495 5289514 5289511 +
ggactgaaagtgtgcagttc

SEQ ID NO: 16066 - DNA, 20 bp, Artificial Sequence
  Synthetic oligonucleotide; AGG chr11 5289496 5289515 5289512 +
gactgaaagtgtgcagttca

SEQ ID NO: 16067 - DNA, 20 bp, Artificial Sequence
  Synthetic oligonucleotide; TAG chr11 5289504 5289523 5289520 +
gtgtgcagttcaaggccctg

SEQ ID NO: 16068 - DNA, 20 bp, Artificial Sequence
  Synthetic oligonucleotide; CAG chr11 5289525 5289544 5289541 +
agttgctgtttaactgttcc

SEQ ID NO: 16069 - DNA, 20 bp, Artificial Sequence
  Synthetic oligonucleotide; AGG chr11 5289526 5289545 5289542 +
gttgctgtttaactgttccc

SEQ ID NO: 16070 - DNA, 20 bp, Artificial Sequence
  Synthetic oligonucleotide; TGG chr11 5289529 5289548 5289545 +
gctgtttaactgttcccagg

SEQ ID NO: 16071 - DNA, 20 bp, Artificial Sequence
  Synthetic oligonucleotide; AAG chr11 5289532 5289551 5289548 +
gtttaactgttcccaggtgg

SEQ ID NO: 16072 - DNA, 20 bp, Artificial Sequence
  Synthetic oligonucleotide; AAG chr11 5289543 5289562 5289559 +
cccaggtggaagtctcttca

SEQ ID NO: 16073 - DNA, 20 bp, Artificial Sequence
  Synthetic oligonucleotide; TGG chr11 5289552 5289571 5289568 +
aagtctcttcaaagaaccac

SEQ ID NO: 16074 - DNA, 20 bp, Artificial Sequence
  Synthetic oligonucleotide; AAG chr11 5289561 5289580 5289577 +
caaagaaccactggtgcaaa

SEQ ID NO: 16075 - DNA, 20 bp, Artificial Sequence
  Synthetic oligonucleotide; AGG chr11 5289562 5289581 5289578 +
aaagaaccactggtgcaaaa

SEQ ID NO: 16076 - DNA, 20 bp, Artificial Sequence
  Synthetic oligonucleotide; GGG chr11 5289563 5289582 5289579 +
aagaaccactggtgcaaaaa

SEQ ID NO: 16077 - DNA, 20 bp, Artificial Sequence
  Synthetic oligonucleotide; TGG chr11 5289573 5289592 5289589 +
ggtgcaaaaagggaactacc

SEQ ID NO: 16078 - DNA, 20 bp, Artificial Sequence
  Synthetic oligonucleotide; GGG chr11 5289574 5289593 5289590 +
gtgcaaaaagggaactacct

SEQ ID NO: 16079 - DNA, 20 bp, Artificial Sequence
  Synthetic oligonucleotide; GGG chr11 5289575 5289594 5289591 +
tgcaaaaagggaactacctg

SEQ ID NO: 16080 - DNA, 20 bp, Artificial Sequence
  Synthetic oligonucleotide; CAG chr11 5289592 5289611 5289608 +
ctggggataaatatttcctc

SEQ ID NO: 16081 - DNA, 20 bp, Artificial Sequence
  Synthetic oligonucleotide; AAG chr11 5289596 5289615 5289612 +
ggataaatatttcctccaga

SEQ ID NO: 16082 - DNA, 20 bp, Artificial Sequence
  Synthetic oligonucleotide; AGG chr11 5289597 5289616 5289613 +
gataaatatttcctccagaa

SEQ ID NO: 16083 - DNA, 20 bp, Artificial Sequence
  Synthetic oligonucleotide; GGG chr11 5289598 5289617 5289614 +
ataaatatttcctccagaaa

SEQ ID NO: 16084 - DNA, 20 bp, Artificial Sequence
  Synthetic oligonucleotide; GGG chr11 5289599 5289618 5289615 +
taaatatttcctccagaaag

SEQ ID NO: 16085 - DNA, 20 bp, Artificial Sequence
  Synthetic oligonucleotide; GGG chr11 5289600 5289619 5289616 +
aaatatttcctccagaaagg

SEQ ID NO: 16086 - DNA, 20 bp, Artificial Sequence
  Synthetic oligonucleotide; AAG chr11 5289604 5289623 5289620 +
atttcctccagaaaggggga

SEQ ID NO: 16087 - DNA, 20 bp, Artificial Sequence
  Synthetic oligonucleotide; AAG chr11 5289610 5289629 5289626 +
tccagaaagggggaaagtgc

SEQ ID NO: 16088 - DNA, 20 bp, Artificial Sequence
  Synthetic oligonucleotide; AAG chr11 5289625 5289644 5289641 +
agtgcaagctcccctaccaa

SEQ ID NO: 16089 - DNA, 20 bp, Artificial Sequence
  Synthetic oligonucleotide; CAG chr11 5289631 5289650 5289647 +
agctcccctaccaaaagcac

SEQ ID NO: 16090 - DNA, 20 bp, Artificial Sequence
  Synthetic oligonucleotide; AGG chr11 5289632 5289651 5289648 +
gctcccctaccaaaagcacc

SEQ ID NO: 16091 - DNA, 20 bp, Artificial Sequence
  Synthetic oligonucleotide; AAG chr11 5289636 5289655 5289652 +
ccctaccaaaagcaccaggc

SEQ ID NO: 16092 - DNA, 20 bp, Artificial Sequence
  Synthetic oligonucleotide; AAG chr11 5289658 5289677 5289674 +
gtccttgtctattttccctg

SEQ ID NO: 16093 - DNA, 20 bp, Artificial Sequence
  Synthetic oligonucleotide; AAG chr11 5289667 5289686 5289683 +
tattttccctgaagttctca

SEQ ID NO: 16094 - DNA, 20 bp, Artificial Sequence
  Synthetic oligonucleotide; GAG chr11 5289674 5289693 5289690 +
cctgaagttctcaaagaaat

SEQ ID NO: 16095 - DNA, 20 bp, Artificial Sequence
  Synthetic oligonucleotide; AAG chr11 5289693 5289712 5289709 +
tgagacccttgtttaccttt

SEQ ID NO: 16096 - DNA, 20 bp, Artificial Sequence
  Synthetic oligonucleotide; TAG chr11 5289698 5289717 5289714 +
cccttgtttacctttaagat

SEQ ID NO: 16097 - DNA, 20 bp, Artificial Sequence
  Synthetic oligonucleotide; GAG chr11 5289700 5289719 5289716 +
cttgtttacctttaagatta

SEQ ID NO: 16098 - DNA, 20 bp, Artificial Sequence
  Synthetic oligonucleotide; AAG chr11 5289703 5289722 5289719 +
gtttacctttaagattagag

SEQ ID NO: 16099 - DNA, 20 bp, Artificial Sequence
  Synthetic oligonucleotide; AGG chr11 5289704 5289723 5289720 +
tttacctttaagattagaga

SEQ ID NO: 16100 - DNA, 20 bp, Artificial Sequence
  Synthetic oligonucleotide; AAG chr11 5289713 5289732 5289729 +
aagattagagaaggcttgaa

SEQ ID NO: 16101 - DNA, 20 bp, Artificial Sequence
  Synthetic oligonucleotide; GAG chr11 5289719 5289738 5289735 +
agagaaggcttgaaaagttt

SEQ ID NO: 16102 - DNA, 20 bp, Artificial Sequence
  Synthetic oligonucleotide; TGG chr11 5289731 5289750 5289747 +
aaaagtttgagctgtgcctt

SEQ ID NO: 16103 - DNA, 20 bp, Artificial Sequence
  Synthetic oligonucleotide; GAG chr11 5289733 5289752 5289749 +
aagtttgagctgtgcctttg

SEQ ID NO: 16104 - DNA, 20 bp, Artificial Sequence
  Synthetic oligonucleotide; AGG chr11 5289734 5289753 5289750 +
agtttgagctgtgcctttgg

SEQ ID NO: 16105 - DNA, 20 bp, Artificial Sequence
  Synthetic oligonucleotide; AAG chr11 5289764 5289783 5289780 +
acttttctcctttgttgacc

SEQ ID NO: 16106 - DNA, 20 bp, Artificial Sequence
  Synthetic oligonucleotide; CAG chr11 5289769 5289788 5289785 +
tctcctttgttgaccaagtt

SEQ ID NO: 16107 - DNA, 20 bp, Artificial Sequence
  Synthetic oligonucleotide; AAG chr11 5289789 5289808 5289805 +
cagctctcctgtatgcttcc

SEQ ID NO: 16108 - DNA, 20 bp, Artificial Sequence
  Synthetic oligonucleotide; AGG chr11 5289790 5289809 5289806 +
agctctcctgtatgcttcca

SEQ ID NO: 16109 - DNA, 20 bp, Artificial Sequence
  Synthetic oligonucleotide; AAG chr11 5289804 5289823 5289820 +
cttccaaggtctgttgcatc

SEQ ID NO: 16110 - DNA, 20 bp, Artificial Sequence
  Synthetic oligonucleotide; GAG chr11 5289806 5289825 5289822 +
tccaaggtctgttgcatcaa

SEQ ID NO: 16111 - DNA, 20 bp, Artificial Sequence
  Synthetic oligonucleotide; GAG chr11 5289810 5289829 5289826 +
aggtctgttgcatcaagagt

SEQ ID NO: 16112 - DNA, 20 bp, Artificial Sequence
  Synthetic oligonucleotide; AAG chr11 5289818 5289837 5289834 +
tgcatcaagagtgagaattg

SEQ ID NO: 16113 - DNA, 20 bp, Artificial Sequence
  Synthetic oligonucleotide; AGG chr11 5289819 5289838 5289835 +
gcatcaagagtgagaattga

SEQ ID NO: 16114 - DNA, 20 bp, Artificial Sequence
  Synthetic oligonucleotide; TAG chr11 5289825 5289844 5289841 +
agagtgagaattgaaggtct

SEQ ID NO: 16115 - DNA, 20 bp, Artificial Sequence
  Synthetic oligonucleotide; AAG chr11 5289828 5289847 5289844 +
gtgagaattgaaggtcttag

SEQ ID NO: 16116 - DNA, 20 bp, Artificial Sequence
  Synthetic oligonucleotide; TGG chr11 5289832 5289851 5289848 +
gaattgaaggtcttagaagc

SEQ ID NO: 16117 - DNA, 20 bp, Artificial Sequence
  Synthetic oligonucleotide; GGG chr11 5289833 5289852 5289849 +
aattgaaggtcttagaagct

SEQ ID NO: 16118 - DNA, 20 bp, Artificial Sequence
  Synthetic oligonucleotide; CAG chr11 5289840 5289859 5289856 +
ggtcttagaagctgggatct

SEQ ID NO: 16119 - DNA, 20 bp, Artificial Sequence
  Synthetic oligonucleotide; TAG chr11 5289846 5289865 5289862 +
agaagctgggatctcagatg

SEQ ID NO: 16120 - DNA, 20 bp, Artificial Sequence
  Synthetic oligonucleotide; AGG chr11 5289847 5289866 5289863 +
gaagctgggatctcagatgt

SEQ ID NO: 16121 - DNA, 20 bp, Artificial Sequence
  Synthetic oligonucleotide; GGG chr11 5289848 5289867 5289864 +
aagctgggatctcagatgta

SEQ ID NO: 16122 - DNA, 20 bp, Artificial Sequence
  Synthetic oligonucleotide; AAG chr11 5289853 5289872 5289869 +
gggatctcagatgtagggaa

SEQ ID NO: 16123 - DNA, 20 bp, Artificial Sequence
  Synthetic oligonucleotide; GAG chr11 5289855 5289874 5289871 +
gatctcagatgtagggaaaa

SEQ ID NO: 16124 - DNA, 20 bp, Artificial Sequence
  Synthetic oligonucleotide; AGG chr11 5289856 5289875 5289872 +
atctcagatgtagggaaaag

SEQ ID NO: 16125 - DNA, 20 bp, Artificial Sequence
  Synthetic oligonucleotide; GAG chr11 5289858 5289877 5289874 +
ctcagatgtagggaaaagag

SEQ ID NO: 16126 - DNA, 20 bp, Artificial Sequence
  Synthetic oligonucleotide; AAG chr11 5289882 5289901 5289898 +
tttcctgttcactcactgtt

SEQ ID NO: 16127 - DNA, 20 bp, Artificial Sequence
  Synthetic oligonucleotide; TGG chr11 5289888 5289907 5289904 +
gttcactcactgttaagata

SEQ ID NO: 16128 - DNA, 20 bp, Artificial Sequence
  Synthetic oligonucleotide; TAG chr11 5289907 5289926 5289923 +
atggctgaaattttttgatc

SEQ ID NO: 16129 - DNA, 20 bp, Artificial Sequence
  Synthetic oligonucleotide; AAG chr11 5289919 5289938 5289935 +
ttttgatctagtcatctaca

SEQ ID NO: 16130 - DNA, 20 bp, Artificial Sequence
  Synthetic oligonucleotide; GAG chr11 5289925 5289944 5289941 +
tctagtcatctacaaagcat

SEQ ID NO: 16131 - DNA, 20 bp, Artificial Sequence
  Synthetic oligonucleotide; TGG chr11 5289931 5289950 5289947 +
catctacaaagcatgagttg

SEQ ID NO: 16132 - DNA, 20 bp, Artificial Sequence
  Synthetic oligonucleotide; GGG chr11 5289932 5289951 5289948 +
atctacaaagcatgagttgt

SEQ ID NO: 16133 - DNA, 20 bp, Artificial Sequence
  Synthetic oligonucleotide; CAG chr11 5289936 5289955 5289952 +
acaaagcatgagttgtgggt

SEQ ID NO: 16134 - DNA, 20 bp, Artificial Sequence
  Synthetic oligonucleotide; CAG chr11 5289975 5289994 5289991 +
cttttgacttcctttgacat

SEQ ID NO: 16135 - DNA, 20 bp, Artificial Sequence
  Synthetic oligonucleotide; TAG chr11 5289987 5290006 5290003 +
tttgacatcagaatataacc

SEQ ID NO: 16136 - DNA, 20 bp, Artificial Sequence
  Synthetic oligonucleotide; AGG chr11 5289988 5290007 5290004 +
ttgacatcagaatataacct

SEQ ID NO: 16137 - DNA, 20 bp, Artificial Sequence
  Synthetic oligonucleotide; AAG chr11 5290003 5290022 5290019 +
aacctaggaattgattactt

SEQ ID NO: 16138 - DNA, 20 bp, Artificial Sequence
  Synthetic oligonucleotide; AAG chr11 5290008 5290027 5290024 +
aggaattgattacttaagtg

SEQ ID NO: 16139 - DNA, 20 bp, Artificial Sequence
  Synthetic oligonucleotide; AGG chr11 5290009 5290028 5290025 +
ggaattgattacttaagtga

SEQ ID NO: 16140 - DNA, 20 bp, Artificial Sequence
  Synthetic oligonucleotide; AAG chr11 5290013 5290032 5290029 +
ttgattacttaagtgaaggc

SEQ ID NO: 16141 - DNA, 20 bp, Artificial Sequence
  Synthetic oligonucleotide; AGG chr11 5290014 5290033 5290030 +
tgattacttaagtgaaggca

SEQ ID NO: 16142 - DNA, 20 bp, Artificial Sequence
  Synthetic oligonucleotide; TGG chr11 5290022 5290041 5290038 +
taagtgaaggcaaggtactt

SEQ ID NO: 16143 - DNA, 20 bp, Artificial Sequence
  Synthetic oligonucleotide; TGG chr11 5290027 5290046 5290043 +
gaaggcaaggtactttggtc

SEQ ID NO: 16144 - DNA, 20 bp, Artificial Sequence
  Synthetic oligonucleotide; CAG chr11 5290031 5290050 5290047 +
gcaaggtactttggtctgga

SEQ ID NO: 16145 - DNA, 20 bp, Artificial Sequence
  Synthetic oligonucleotide; AGG chr11 5290032 5290051 5290048 +
caaggtactttggtctggac

SEQ ID NO: 16146 - DNA, 20 bp, Artificial Sequence
  Synthetic oligonucleotide; AAG chr11 5290047 5290066 5290063 +
tggacaggaacattttgaac

SEQ ID NO: 16147 - DNA, 20 bp, Artificial Sequence
  Synthetic oligonucleotide; AGG chr11 5290048 5290067 5290064 +
ggacaggaacattttgaaca

SEQ ID NO: 16148 - DNA, 20 bp, Artificial Sequence
  Synthetic oligonucleotide; TAG chr11 5290051 5290070 5290067 +
caggaacattttgaacaagg

SEQ ID NO: 16149 - DNA, 20 bp, Artificial Sequence
  Synthetic oligonucleotide; AGG chr11 5290052 5290071 5290068 +
aggaacattttgaacaaggt

SEQ ID NO: 16150 - DNA, 20 bp, Artificial Sequence
  Synthetic oligonucleotide; GGG chr11 5290053 5290072 5290069 +
ggaacattttgaacaaggta

SEQ ID NO: 16151 - DNA, 20 bp, Artificial Sequence
  Synthetic oligonucleotide; GAG chr11 5290055 5290074 5290071 +
aacattttgaacaaggtagg

SEQ ID NO: 16152 - DNA, 20 bp, Artificial Sequence
  Synthetic oligonucleotide; CAG chr11 5290059 5290078 5290075 +
ttttgaacaaggtagggaga

SEQ ID NO: 16153 - DNA, 20 bp, Artificial Sequence
  Synthetic oligonucleotide; AAG chr11 5290067 5290086 5290083 +
aaggtagggagacagctatg

SEQ ID NO: 16154 - DNA, 20 bp, Artificial Sequence
  Synthetic oligonucleotide; AGG chr11 5290068 5290087 5290084 +
aggtagggagacagctatga

SEQ ID NO: 16155 - DNA, 20 bp, Artificial Sequence
  Synthetic oligonucleotide; AAG chr11 5290072 5290091 5290088 +
agggagacagctatgaaggc

SEQ ID NO: 16156 - DNA, 20 bp, Artificial Sequence
  Synthetic oligonucleotide; AAG chr11 5290151 5290170 5290167 +
tatttatacatttaaacaaa

SEQ ID NO: 16157 - DNA, 20 bp, Artificial Sequence
  Synthetic oligonucleotide; TAG chr11 5290156 5290175 5290172 +
atacatttaaacaaaaagta

SEQ ID NO: 16158 - DNA, 20 bp, Artificial Sequence
  Synthetic oligonucleotide; GAG chr11 5290158 5290177 5290174 +
acatttaaacaaaaagtata

SEQ ID NO: 16159 - DNA, 20 bp, Artificial Sequence
  Synthetic oligonucleotide; TAG chr11 5290163 5290182 5290179 +
taaacaaaaagtatagagcg

SEQ ID NO: 16160 - DNA, 20 bp, Artificial Sequence
  Synthetic oligonucleotide; AAG chr11 5290176 5290195 5290192 +
tagagcgtagtataatttgt

SEQ ID NO: 16161 - DNA, 20 bp, Artificial Sequence
  Synthetic oligonucleotide; CAG chr11 5290183 5290202 5290199 +
tagtataatttgtaagtgct

SEQ ID NO: 16162 - DNA, 20 bp, Artificial Sequence
  Synthetic oligonucleotide; AGG chr11 5290184 5290203 5290200 +
agtataatttgtaagtgctc

SEQ ID NO: 16163 - DNA, 20 bp, Artificial Sequence
  Synthetic oligonucleotide; GGG chr11 5290185 5290204 5290201 +
gtataatttgtaagtgctca

SEQ ID NO: 16164 - DNA, 20 bp, Artificial Sequence
  Synthetic oligonucleotide; TGG chr11 5290199 5290218 5290215 +
tgctcagggctgtgtgtgta

SEQ ID NO: 16165 - DNA, 20 bp, Artificial Sequence
  Synthetic oligonucleotide; AAG chr11 5290221 5290240 5290237 +
gattgtttgaaatgaaacta

SEQ ID NO: 16166 - DNA, 20 bp, Artificial Sequence
  Synthetic oligonucleotide; TGG chr11 5290224 5290243 5290240 +
tgtttgaaatgaaactaaag

SEQ ID NO: 16167 - DNA, 20 bp, Artificial Sequence
  Synthetic oligonucleotide; GGG chr11 5290225 5290244 5290241 +
gtttgaaatgaaactaaagt

SEQ ID NO: 16168 - DNA, 20 bp, Artificial Sequence
  Synthetic oligonucleotide; GAG chr11 5290227 5290246 5290243 +
ttgaaatgaaactaaagtgg

SEQ ID NO: 16169 - DNA, 20 bp, Artificial Sequence
  Synthetic oligonucleotide; TGG chr11 5290257 5290276 5290273 +
ctactgcccccttaaccctg

SEQ ID NO: 16170 - DNA, 20 bp, Artificial Sequence
  Synthetic oligonucleotide; AAG chr11 5290277 5290296 5290293 +
tggtccctacactaccctgc

SEQ ID NO: 16171 - DNA, 20 bp, Artificial Sequence
  Synthetic oligonucleotide; TAG chr11 5290285 5290304 5290301 +
acactaccctgcaagactct

SEQ ID NO: 16172 - DNA, 20 bp, Artificial Sequence
  Synthetic oligonucleotide; TAG chr11 5290293 5290312 5290309 +
ctgcaagactcttagctgct

SEQ ID NO: 16173 - DNA, 20 bp, Artificial Sequence
  Synthetic oligonucleotide; GAG chr11 5290305 5290324 5290321 +
tagctgcttagcttaattgt

SEQ ID NO: 16174 - DNA, 20 bp, Artificial Sequence
  Synthetic oligonucleotide; AGG chr11 5290306 5290325 5290322 +
agctgcttagcttaattgtg

SEQ ID NO: 16175 - DNA, 20 bp, Artificial Sequence
  Synthetic oligonucleotide; TGG chr11 5290315 5290334 5290331 +
gcttaattgtgaggctgatt

SEQ ID NO: 16176 - DNA, 20 bp, Artificial Sequence
  Synthetic oligonucleotide; GGG chr11 5290316 5290335 5290332 +
cttaattgtgaggctgattt

SEQ ID NO: 16177 - DNA, 20 bp, Artificial Sequence
  Synthetic oligonucleotide; GGG chr11 5290317 5290336 5290333 +
ttaattgtgaggctgatttg

SEQ ID NO: 16178 - DNA, 20 bp, Artificial Sequence
  Synthetic oligonucleotide; TAG chr11 5290322 5290341 5290338 +
tgtgaggctgatttggggca

SEQ ID NO: 16179 - DNA, 20 bp, Artificial Sequence
  Synthetic oligonucleotide; GAG chr11 5290366 5290385 5290382 +
caacatcctcataataactt

SEQ ID NO: 16180 - DNA, 20 bp, Artificial Sequence
  Synthetic oligonucleotide; TAG chr11 5290392 5290411 5290408 +
aattttataaaatatcacaa

SEQ ID NO: 16181 - DNA, 20 bp, Artificial Sequence
  Synthetic oligonucleotide; AGG chr11 5290393 5290412 5290409 +
attttataaaatatcacaat

SEQ ID NO: 16182 - DNA, 20 bp, Artificial Sequence
  Synthetic oligonucleotide; GGG chr11 5290394 5290413 5290410 +
ttttataaaatatcacaata

SEQ ID NO: 16183 - DNA, 20 bp, Artificial Sequence
  Synthetic oligonucleotide; CAG chr11 5290404 5290423 5290420 +
tatcacaatagggtcatgtt

SEQ ID NO: 16184 - DNA, 20 bp, Artificial Sequence
  Synthetic oligonucleotide; TAG chr11 5290407 5290426 5290423 +
cacaatagggtcatgttcag

SEQ ID NO: 16185 - DNA, 20 bp, Artificial Sequence
  Synthetic oligonucleotide; AGG chr11 5290408 5290427 5290424 +
acaatagggtcatgttcagt

SEQ ID NO: 16186 - DNA, 20 bp, Artificial Sequence
  Synthetic oligonucleotide; GGG chr11 5290409 5290428 5290425 +
caatagggtcatgttcagta

SEQ ID NO: 16187 - DNA, 20 bp, Artificial Sequence
  Synthetic oligonucleotide; TAG chr11 5290425 5290444 5290441 +
agtagggtgatatataaaat

SEQ ID NO: 16188 - DNA, 20 bp, Artificial Sequence
  Synthetic oligonucleotide; AAG chr11 5290430 5290449 5290446 +
ggtgatatataaaattagac

SEQ ID NO: 16189 - DNA, 20 bp, Artificial Sequence
  Synthetic oligonucleotide; TAG chr11 5290436 5290455 5290452 +
atataaaattagacaagcca

SEQ ID NO: 16190 - DNA, 20 bp, Artificial Sequence
  Synthetic oligonucleotide; GAG chr11 5290442 5290461 5290458 +
aattagacaagccatagttt

SEQ ID NO: 16191 - DNA, 20 bp, Artificial Sequence
  Synthetic oligonucleotide; AAG chr11 5290473 5290492 5290489 +
tttgaataaatatatgacaa

SEQ ID NO: 16192 - DNA, 20 bp, Artificial Sequence
  Synthetic oligonucleotide; AGG chr11 5290474 5290493 5290490 +
ttgaataaatatatgacaaa

SEQ ID NO: 16193 - DNA, 20 bp, Artificial Sequence
  Synthetic oligonucleotide; GAG chr11 5290495 5290514 5290511 +
ggcaatttaattatctttat

SEQ ID NO: 16194 - DNA, 20 bp, Artificial Sequence
  Synthetic oligonucleotide; TGG chr11 5290500 5290519 5290516 +
tttaattatctttatgagtt

SEQ ID NO: 16195 - DNA, 20 bp, Artificial Sequence
  Synthetic oligonucleotide; GAG chr11 5290502 5290521 5290518 +
taattatctttatgagtttg

SEQ ID NO: 16196 - DNA, 20 bp, Artificial Sequence
  Synthetic oligonucleotide; AGG chr11 5290503 5290522 5290519 +
aattatctttatgagtttgg

SEQ ID NO: 16197 - DNA, 20 bp, Artificial Sequence
  Synthetic oligonucleotide; CAG chr11 5290510 5290529 5290526 +
tttatgagtttggaggtatc

SEQ ID NO: 16198 - DNA, 20 bp, Artificial Sequence
  Synthetic oligonucleotide; TAG chr11 5290522 5290541 5290538 +
gaggtatccagtatgaaatt

SEQ ID NO: 16199 - DNA, 20 bp, Artificial Sequence
  Synthetic oligonucleotide; TAG chr11 5290540 5290559 5290556 +
tttagataatacctgccttc

SEQ ID NO: 16200 - DNA, 20 bp, Artificial Sequence
  Synthetic oligonucleotide; TAG chr11 5290552 5290571 5290568 +
ctgccttctagtgttgaaat

SEQ ID NO: 16201 - DNA, 20 bp, Artificial Sequence
  Synthetic oligonucleotide; TAG chr11 5290589 5290608 5290605 +
atgcatcaatgaacttatta

SEQ ID NO: 16202 - DNA, 20 bp, Artificial Sequence
  Synthetic oligonucleotide; TAG chr11 5290596 5290615 5290612 +
aatgaacttattatagttcc

SEQ ID NO: 16203 - DNA, 20 bp, Artificial Sequence
  Synthetic oligonucleotide; AAG chr11 5290603 5290622 5290619 +
ttattatagttcctagcaca

SEQ ID NO: 16204 - DNA, 20 bp, Artificial Sequence
  Synthetic oligonucleotide; AAG chr11 5290607 5290626 5290623 +
tatagttcctagcacaaagt

SEQ ID NO: 16205 - DNA, 20 bp, Artificial Sequence
  Synthetic oligonucleotide; TAG chr11 5290656 5290675 5290672 +
atgtatttatctgttattaa

SEQ ID NO: 16206 - DNA, 20 bp, Artificial Sequence
  Synthetic oligonucleotide; AGG chr11 5290657 5290676 5290673 +
tgtatttatctgttattaat

SEQ ID NO: 16207 - DNA, 20 bp, Artificial Sequence
  Synthetic oligonucleotide; TGG chr11 5290667 5290686 5290683 +
tgttattaataggaatctta

SEQ ID NO: 16208 - DNA, 20 bp, Artificial Sequence
  Synthetic oligonucleotide; GGG chr11 5290668 5290687 5290684 +
gttattaataggaatcttat

SEQ ID NO: 16209 - DNA, 20 bp, Artificial Sequence
  Synthetic oligonucleotide; AAG chr11 5290704 5290723 5290720 +
aatccttattaataactatg

SEQ ID NO: 16210 - DNA, 20 bp, Artificial Sequence
  Synthetic oligonucleotide; CAG chr11 5290707 5290726 5290723 +
ccttattaataactatgaag

SEQ ID NO: 16211 - DNA, 20 bp, Artificial Sequence
  Synthetic oligonucleotide; AGG chr11 5290708 5290727 5290724 +
cttattaataactatgaagc

SEQ ID NO: 16212 - DNA, 20 bp, Artificial Sequence
  Synthetic oligonucleotide; GAG chr11 5290720 5290739 5290736 +
tatgaagcaggtatttattt

SEQ ID NO: 16213 - DNA, 20 bp, Artificial Sequence
  Synthetic oligonucleotide; AAG chr11 5290729 5290748 5290745 +
ggtatttatttgagttttcc

SEQ ID NO: 16214 - DNA, 20 bp, Artificial Sequence
  Synthetic oligonucleotide; GAG chr11 5290733 5290752 5290749 +
tttatttgagttttccaagt

SEQ ID NO: 16215 - DNA, 20 bp, Artificial Sequence
  Synthetic oligonucleotide; AAG chr11 5290738 5290757 5290754 +
ttgagttttccaagtgagtt

SEQ ID NO: 16216 - DNA, 20 bp, Artificial Sequence
  Synthetic oligonucleotide; TAG chr11 5290743 5290762 5290759 +
ttttccaagtgagttaagta

SEQ ID NO: 16217 - DNA, 20 bp, Artificial Sequence
  Synthetic oligonucleotide; AAG chr11 5290758 5290777 5290774 +
aagtatagcttgtaatactt

SEQ ID NO: 16218 - DNA, 20 bp, Artificial Sequence
  Synthetic oligonucleotide; AGG chr11 5290759 5290778 5290775 +
agtatagcttgtaatactta

SEQ ID NO: 16219 - DNA, 20 bp, Artificial Sequence
  Synthetic oligonucleotide; CAG chr11 5290771 5290790 5290787 +
aatacttaaggaaatatcca

SEQ ID NO: 16220 - DNA, 20 bp, Artificial Sequence
  Synthetic oligonucleotide; AGG chr11 5290772 5290791 5290788 +
atacttaaggaaatatccac

SEQ ID NO: 16221 - DNA, 20 bp, Artificial Sequence
  Synthetic oligonucleotide; TAG chr11 5290780 5290799 5290796 +
ggaaatatccacaggttaca

SEQ ID NO: 16222 - DNA, 20 bp, Artificial Sequence
  Synthetic oligonucleotide; TAG chr11 5290784 5290803 5290800 +
atatccacaggttacatagc

SEQ ID NO: 16223 - DNA, 20 bp, Artificial Sequence
  Synthetic oligonucleotide; GAG chr11 5290796 5290815 5290812 +
tacatagctagtatataact

SEQ ID NO: 16224 - DNA, 20 bp, Artificial Sequence
  Synthetic oligonucleotide; CAG chr11 5290837 5290856 5290853 +
tataaaacattctaacaata

SEQ ID NO: 16225 - DNA, 20 bp, Artificial Sequence
  Synthetic oligonucleotide; AAG chr11 5290863 5290882 5290879 +
tatataaactaaaaaactga

SEQ ID NO: 16226 - DNA, 20 bp, Artificial Sequence
  Synthetic oligonucleotide; AGG chr11 5290864 5290883 5290880 +
atataaactaaaaaactgaa

SEQ ID NO: 16227 - DNA, 20 bp, Artificial Sequence
  Synthetic oligonucleotide; GGG chr11 5290865 5290884 5290881 +
tataaactaaaaaactgaaa

SEQ ID NO: 16228 - DNA, 20 bp, Artificial Sequence
  Synthetic oligonucleotide; TAG chr11 5290906 5290925 5290922 +
ctcaatatcacttcttcact

SEQ ID NO: 16229 - DNA, 20 bp, Artificial Sequence
  Synthetic oligonucleotide; CAG chr11 5290916 5290935 5290932 +
cttcttcacttagaaaaaac

SEQ ID NO: 16230 - DNA, 20 bp, Artificial Sequence
  Synthetic oligonucleotide; TAG chr11 5290922 5290941 5290938 +
cacttagaaaaaaccagcct

SEQ ID NO: 16231 - DNA, 20 bp, Artificial Sequence
  Synthetic oligonucleotide; GAG chr11 5290959 5290978 5290975 +
tcctttcaaaatatacttct

SEQ ID NO: 16232 - DNA, 20 bp, Artificial Sequence
  Synthetic oligonucleotide; GAG chr11 5290966 5290985 5290982 +
aaaatatacttctgagaaat

SEQ ID NO: 16233 - DNA, 20 bp, Artificial Sequence
  Synthetic oligonucleotide; GAG chr11 5290968 5290987 5290984 +
aatatacttctgagaaatga

SEQ ID NO: 16234 - DNA, 20 bp, Artificial Sequence
  Synthetic oligonucleotide; GAG chr11 5290970 5290989 5290986 +
tatacttctgagaaatgaga

SEQ ID NO: 16235 - DNA, 20 bp, Artificial Sequence
  Synthetic oligonucleotide; GAG chr11 5290972 5290991 5290988 +
tacttctgagaaatgagaga

SEQ ID NO: 16236 - DNA, 20 bp, Artificial Sequence
  Synthetic oligonucleotide; TGG chr11 5290978 5290997 5290994 +
tgagaaatgagagagagaaa

SEQ ID NO: 16237 - DNA, 20 bp, Artificial Sequence
  Synthetic oligonucleotide; GGG chr11 5290979 5290998 5290995 +
gagaaatgagagagagaaat

SEQ ID NO: 16238 - DNA, 20 bp, Artificial Sequence
  Synthetic oligonucleotide; GGG chr11 5290980 5290999 5290996 +
agaaatgagagagagaaatg

SEQ ID NO: 16239 - DNA, 20 bp, Artificial Sequence
  Synthetic oligonucleotide; GAG chr11 5290982 5291001 5290998 +
aaatgagagagagaaatggg

SEQ ID NO: 16240 - DNA, 20 bp, Artificial Sequence
  Synthetic oligonucleotide; AGG chr11 5290983 5291002 5290999 +
aatgagagagagaaatgggg

SEQ ID NO: 16241 - DNA, 20 bp, Artificial Sequence
  Synthetic oligonucleotide; GGG chr11 5290984 5291003 5291000 +
atgagagagagaaatgggga

SEQ ID NO: 16242 - DNA, 20 bp, Artificial Sequence
  Synthetic oligonucleotide; TAG chr11 5290987 5291006 5291003 +
agagagagaaatggggaggg

SEQ ID NO: 16243 - DNA, 20 bp, Artificial Sequence
  Synthetic oligonucleotide; AAG chr11 5290990 5291009 5291006 +
gagagaaatggggagggtag

SEQ ID NO: 16244 - DNA, 20 bp, Artificial Sequence
  Synthetic oligonucleotide; AGG chr11 5290991 5291010 5291007 +
agagaaatggggagggtaga

SEQ ID NO: 16245 - DNA, 20 bp, Artificial Sequence
  Synthetic oligonucleotide; AAG chr11 5290994 5291013 5291010 +
gaaatggggagggtagaagg

SEQ ID NO: 16246 - DNA, 20 bp, Artificial Sequence
  Synthetic oligonucleotide; AGG chr11 5290995 5291014 5291011 +
aaatggggagggtagaagga

SEQ ID NO: 16247 - DNA, 20 bp, Artificial Sequence
  Synthetic oligonucleotide; AAG chr11 5290998 5291017 5291014 +
tggggagggtagaaggaagg

SEQ ID NO: 16248 - DNA, 20 bp, Artificial Sequence
  Synthetic oligonucleotide; TAG chr11 5291002 5291021 5291018 +
gagggtagaaggaaggaaga

SEQ ID NO: 16249 - DNA, 20 bp, Artificial Sequence
  Synthetic oligonucleotide; AGG chr11 5291003 5291022 5291019 +
agggtagaaggaaggaagat

SEQ ID NO: 16250 - DNA, 20 bp, Artificial Sequence
  Synthetic oligonucleotide; GGG chr11 5291004 5291023 5291020 +
gggtagaaggaaggaagata

SEQ ID NO: 16251 - DNA, 20 bp, Artificial Sequence
  Synthetic oligonucleotide; AAG chr11 5291008 5291027 5291024 +
agaaggaaggaagatagggt

SEQ ID NO: 16252 - DNA, 20 bp, Artificial Sequence
  Synthetic oligonucleotide; GAG chr11 5291010 5291029 5291026 +
aaggaaggaagatagggtaa

SEQ ID NO: 16253 - DNA, 20 bp, Artificial Sequence
  Synthetic oligonucleotide; CAG chr11 5291014 5291033 5291030 +
aaggaagatagggtaagaga

SEQ ID NO: 16254 - DNA, 20 bp, Artificial Sequence
  Synthetic oligonucleotide; AGG chr11 5291015 5291034 5291031 +
aggaagatagggtaagagac

SEQ ID NO: 16255 - DNA, 20 bp, Artificial Sequence
  Synthetic oligonucleotide; GGG chr11 5291016 5291035 5291032 +
ggaagatagggtaagagaca

SEQ ID NO: 16256 - DNA, 20 bp, Artificial Sequence
  Synthetic oligonucleotide; AAG chr11 5291019 5291038 5291035 +
agatagggtaagagacaggg

SEQ ID NO: 16257 - DNA, 20 bp, Artificial Sequence
  Synthetic oligonucleotide; AGG chr11 5291020 5291039 5291036 +
gatagggtaagagacaggga

SEQ ID NO: 16258 - DNA, 20 bp, Artificial Sequence
  Synthetic oligonucleotide; GAG chr11 5291022 5291041 5291038 +
tagggtaagagacagggaag

SEQ ID NO: 16259 - DNA, 20 bp, Artificial Sequence
  Synthetic oligonucleotide; AGG chr11 5291023 5291042 5291039 +
agggtaagagacagggaagg

SEQ ID NO: 16260 - DNA, 20 bp, Artificial Sequence
  Synthetic oligonucleotide; TGG chr11 5291028 5291047 5291044 +
aagagacagggaaggaggtg

SEQ ID NO: 16261 - DNA, 20 bp, Artificial Sequence
  Synthetic oligonucleotide; GGG chr11 5291029 5291048 5291045 +
agagacagggaaggaggtgt

SEQ ID NO: 16262 - DNA, 20 bp, Artificial Sequence
  Synthetic oligonucleotide; GGG chr11 5291030 5291049 5291046 +
gagacagggaaggaggtgtg

SEQ ID NO: 16263 - DNA, 20 bp, Artificial Sequence
  Synthetic oligonucleotide; AAG chr11 5291034 5291053 5291050 +
cagggaaggaggtgtgggga

SEQ ID NO: 16264 - DNA, 20 bp, Artificial Sequence
  Synthetic oligonucleotide; AAG chr11 5291068 5291087 5291084 +
ttcttttctctgtctcttga

SEQ ID NO: 16265 - DNA, 20 bp, Artificial Sequence
  Synthetic oligonucleotide; GAG chr11 5291070 5291089 5291086 +
cttttctctgtctcttgaaa

SEQ ID NO: 16266 - DNA, 20 bp, Artificial Sequence
  Synthetic oligonucleotide; AAG chr11 5291095 5291114 5291111 +
ctttccattacattgaatca

SEQ ID NO: 16267 - DNA, 20 bp, Artificial Sequence
  Synthetic oligonucleotide; AGG chr11 5291096 5291115 5291112 +
tttccattacattgaatcaa

SEQ ID NO: 16268 - DNA, 20 bp, Artificial Sequence
  Synthetic oligonucleotide; TGG chr11 5291114 5291133 5291130 +
aaaggtaatgttgccatttc

SEQ ID NO: 16269 - DNA, 20 bp, Artificial Sequence
  Synthetic oligonucleotide; AAG chr11 5291129 5291148 5291145 +
atttctggactcttgaaata

SEQ ID NO: 16270 - DNA, 20 bp, Artificial Sequence
  Synthetic oligonucleotide; AAG chr11 5291133 5291152 5291149 +
ctggactcttgaaataaaga

SEQ ID NO: 16271 - DNA, 20 bp, Artificial Sequence
  Synthetic oligonucleotide; AAG chr11 5291159 5291178 5291175 +
gatgtatgaaataattttga

SEQ ID NO: 16272 - DNA, 20 bp, Artificial Sequence
  Synthetic oligonucleotide; TGG chr11 5291166 5291185 5291182 +
gaaataattttgaaagtcta

SEQ ID NO: 16273 - DNA, 20 bp, Artificial Sequence
  Synthetic oligonucleotide; AAG chr11 5291183 5291202 5291199 +
ctatggcattttcaaaatgc

SEQ ID NO: 16274 - DNA, 20 bp, Artificial Sequence
  Synthetic oligonucleotide; AGG chr11 5291184 5291203 5291200 +
tatggcattttcaaaatgca

SEQ ID NO: 16275 - DNA, 20 bp, Artificial Sequence
  Synthetic oligonucleotide; TAG chr11 5291202 5291221 5291218 +
caaggtgatgtcttactaac

SEQ ID NO: 16276 - DNA, 20 bp, Artificial Sequence
  Synthetic oligonucleotide; TAG chr11 5291220 5291239 5291236 +
actagcctttgctttattat

SEQ ID NO: 16277 - DNA, 20 bp, Artificial Sequence
  Synthetic oligonucleotide; TGG chr11 5291226 5291245 5291242 +
ctttgctttattattagaaa

SEQ ID NO: 16278 - DNA, 20 bp, Artificial Sequence
  Synthetic oligonucleotide; GGG chr11 5291227 5291246 5291243 +
tttgctttattattagaaat

SEQ ID NO: 16279 - DNA, 20 bp, Artificial Sequence
  Synthetic oligonucleotide; GGG chr11 5291228 5291247 5291244 +
ttgctttattattagaaatg

SEQ ID NO: 16280 - DNA, 20 bp, Artificial Sequence
  Synthetic oligonucleotide; AAG chr11 5291231 5291250 5291247 +
ctttattattagaaatgggg

SEQ ID NO: 16281 - DNA, 20 bp, Artificial Sequence
  Synthetic oligonucleotide; GAG chr11 5291235 5291254 5291251 +
attattagaaatggggaagt

SEQ ID NO: 16282 - DNA, 20 bp, Artificial Sequence
  Synthetic oligonucleotide; TAG chr11 5291240 5291259 5291256 +
tagaaatggggaagtgagta

SEQ ID NO: 16283 - DNA, 20 bp, Artificial Sequence
  Synthetic oligonucleotide; CAG chr11 5291252 5291271 5291268 +
agtgagtatagacattttat

SEQ ID NO: 16284 - DNA, 20 bp, Artificial Sequence
  Synthetic oligonucleotide; AGG chr11 5291253 5291272 5291269 +
gtgagtatagacattttatc

SEQ ID NO: 16285 - DNA, 20 bp, Artificial Sequence
  Synthetic oligonucleotide; GAG chr11 5291255 5291274 5291271 +
gagtatagacattttatcag

SEQ ID NO: 16286 - DNA, 20 bp, Artificial Sequence
  Synthetic oligonucleotide; TAG chr11 5291264 5291283 5291280 +
cattttatcaggagatatat

SEQ ID NO: 16287 - DNA, 20 bp, Artificial Sequence
  Synthetic oligonucleotide; AGG chr11 5291265 5291284 5291281 +
attttatcaggagatatatt

SEQ ID NO: 16288 - DNA, 20 bp, Artificial Sequence
  Synthetic oligonucleotide; AAG chr11 5291271 5291290 5291287 +
tcaggagatatattaggaaa

SEQ ID NO: 16289 - DNA, 20 bp, Artificial Sequence
  Synthetic oligonucleotide; AGG chr11 5291272 5291291 5291288 +
caggagatatattaggaaaa

SEQ ID NO: 16290 - DNA, 20 bp, Artificial Sequence
  Synthetic oligonucleotide; GGG chr11 5291273 5291292 5291289 +
aggagatatattaggaaaaa

SEQ ID NO: 16291 - DNA, 20 bp, Artificial Sequence
  Synthetic oligonucleotide; TGG chr11 5291280 5291299 5291296 +
atattaggaaaaagggaaac

SEQ ID NO: 16292 - DNA, 20 bp, Artificial Sequence
  Synthetic oligonucleotide; GAG chr11 5291282 5291301 5291298 +
attaggaaaaagggaaactg

SEQ ID NO: 16293 - DNA, 20 bp, Artificial Sequence
  Synthetic oligonucleotide; TGG chr11 5291289 5291308 5291305 +
aaaagggaaactggagaaac

SEQ ID NO: 16294 - DNA, 20 bp, Artificial Sequence
  Synthetic oligonucleotide; GGG chr11 5291290 5291309 5291306 +
aaagggaaactggagaaact

SEQ ID NO: 16295 - DNA, 20 bp, Artificial Sequence
  Synthetic oligonucleotide; GAG chr11 5291292 5291311 5291308 +
agggaaactggagaaactgg

SEQ ID NO: 16296 - DNA, 20 bp, Artificial Sequence
  Synthetic oligonucleotide; AGG chr11 5291293 5291312 5291309 +
gggaaactggagaaactggg

SEQ ID NO: 16297 - DNA, 20 bp, Artificial Sequence
  Synthetic oligonucleotide; GAG chr11 5291295 5291314 5291311 +
gaaactggagaaactgggag

SEQ ID NO: 16298 - DNA, 20 bp, Artificial Sequence
  Synthetic oligonucleotide; CAG chr11 5291302 5291321 5291318 +
gagaaactgggaggagtatc

SEQ ID NO: 16299 - DNA, 20 bp, Artificial Sequence
  Synthetic oligonucleotide; AAG chr11 5291320 5291339 5291336 +
tccagatgtcctgtccctgt

SEQ ID NO: 16300 - DNA, 20 bp, Artificial Sequence
  Synthetic oligonucleotide; AGG chr11 5291321 5291340 5291337 +
ccagatgtcctgtccctgta

SEQ ID NO: 16301 - DNA, 20 bp, Artificial Sequence
  Synthetic oligonucleotide; TGG chr11 5291324 5291343 5291340 +
gatgtcctgtccctgtaagg

SEQ ID NO: 16302 - DNA, 20 bp, Artificial Sequence
  Synthetic oligonucleotide; GGG chr11 5291325 5291344 5291341 +
atgtcctgtccctgtaaggt

SEQ ID NO: 16303 - DNA, 20 bp, Artificial Sequence
  Synthetic oligonucleotide; GGG chr11 5291326 5291345 5291342 +
tgtcctgtccctgtaaggtg

SEQ ID NO: 16304 - DNA, 20 bp, Artificial Sequence
  Synthetic oligonucleotide; GGG chr11 5291327 5291346 5291343 +
gtcctgtccctgtaaggtgg

SEQ ID NO: 16305 - DNA, 20 bp, Artificial Sequence
  Synthetic oligonucleotide; AAG chr11 5291347 5291366 5291363 +
gggcacccaccttcaatcaa

SEQ ID NO: 16306 - DNA, 20 bp, Artificial Sequence
  Synthetic oligonucleotide; AGG chr11 5291348 5291367 5291364 +
ggcacccaccttcaatcaaa

SEQ ID NO: 16307 - DNA, 20 bp, Artificial Sequence
  Synthetic oligonucleotide; GGG chr11 5291349 5291368 5291365 +
gcacccaccttcaatcaaaa

SEQ ID NO: 16308 - DNA, 20 bp, Artificial Sequence
  Synthetic oligonucleotide; TGG chr11 5291373 5291392 5291389 +
tccttaacaacttccttgct

SEQ ID NO: 16309 - DNA, 20 bp, Artificial Sequence
  Synthetic oligonucleotide; GGG chr11 5291374 5291393 5291390 +
ccttaacaacttccttgctt

SEQ ID NO: 16310 - DNA, 20 bp, Artificial Sequence
  Synthetic oligonucleotide; GGG chr11 5291375 5291394 5291391 +
cttaacaacttccttgcttg

SEQ ID NO: 16311 - DNA, 20 bp, Artificial Sequence
  Synthetic oligonucleotide; TGG chr11 5291389 5291408 5291405 +
tgcttggggctccaccatct

SEQ ID NO: 16312 - DNA, 20 bp, Artificial Sequence
  Synthetic oligonucleotide; TAG chr11 5291397 5291416 5291413 +
gctccaccatcttggaccat

SEQ ID NO: 16313 - DNA, 20 bp, Artificial Sequence
  Synthetic oligonucleotide; CAG chr11 5291405 5291424 5291421 +
atcttggaccattagctcca

SEQ ID NO: 16314 - DNA, 20 bp, Artificial Sequence
  Synthetic oligonucleotide; AGG chr11 5291406 5291425 5291422 +
tcttggaccattagctccac

SEQ ID NO: 16315 - DNA, 20 bp, Artificial Sequence
  Synthetic oligonucleotide; TAG chr11 5291423 5291442 5291439 +
cacaggtatcttcttccctc

SEQ ID NO: 16316 - DNA, 20 bp, Artificial Sequence
  Synthetic oligonucleotide; TGG chr11 5291426 5291445 5291442 +
aggtatcttcttccctctag

SEQ ID NO: 16317 - DNA, 20 bp, Artificial Sequence
  Synthetic oligonucleotide; CAG chr11 5291435 5291454 5291451 +
cttccctctagtggtcataa

SEQ ID NO: 16318 - DNA, 20 bp, Artificial Sequence
  Synthetic oligonucleotide; CAG chr11 5291438 5291457 5291454 +
ccctctagtggtcataacag

SEQ ID NO: 16319 - DNA, 20 bp, Artificial Sequence
  Synthetic oligonucleotide; CAG chr11 5291444 5291463 5291460 +
agtggtcataacagcagctt

SEQ ID NO: 16320 - DNA, 20 bp, Artificial Sequence
  Synthetic oligonucleotide; AAG chr11 5291458 5291477 5291474 +
cagcttcagctacctctcta

SEQ ID NO: 16321 - DNA, 20 bp, Artificial Sequence
  Synthetic oligonucleotide; GAG chr11 5291460 5291479 5291476 +
gcttcagctacctctctaaa

SEQ ID NO: 16322 - DNA, 20 bp, Artificial Sequence
  Synthetic oligonucleotide; CAG chr11 5291469 5291488 5291485 +
acctctctaaagagtcctgc

SEQ ID NO: 16323 - DNA, 20 bp, Artificial Sequence
  Synthetic oligonucleotide; TAG chr11 5291475 5291494 5291491 +
ctaaagagtcctgccagata

SEQ ID NO: 16324 - DNA, 20 bp, Artificial Sequence
  Synthetic oligonucleotide; AGG chr11 5291476 5291495 5291492 +
taaagagtcctgccagatat

SEQ ID NO: 16325 - DNA, 20 bp, Artificial Sequence
  Synthetic oligonucleotide; CAG chr11 5291480 5291499 5291496 +
gagtcctgccagatataggt

SEQ ID NO: 16326 - DNA, 20 bp, Artificial Sequence
  Synthetic oligonucleotide; AGG chr11 5291481 5291500 5291497 +
agtcctgccagatataggtc

SEQ ID NO: 16327 - DNA, 20 bp, Artificial Sequence
  Synthetic oligonucleotide; AAG chr11 5291504 5291523 5291520 +
aaatataatccactaataaa

SEQ ID NO: 16328 - DNA, 20 bp, Artificial Sequence
  Synthetic oligonucleotide; GAG chr11 5291506 5291525 5291522 +
atataatccactaataaaaa

SEQ ID NO: 16329 - DNA, 20 bp, Artificial Sequence
  Synthetic oligonucleotide; TAG chr11 5291523 5291542 5291539 +
aaagagaaacattttgactg

SEQ ID NO: 16330 - DNA, 20 bp, Artificial Sequence
  Synthetic oligonucleotide; CAG chr11 5291576 5291595 5291592 +
taacattctcactctttcat

SEQ ID NO: 16331 - DNA, 20 bp, Artificial Sequence
  Synthetic oligonucleotide; CAG chr11 5291587 5291606 5291603 +
ctctttcatcagtaatcact

SEQ ID NO: 16332 - DNA, 20 bp, Artificial Sequence
  Synthetic oligonucleotide; AGG chr11 5291588 5291607 5291604 +
tctttcatcagtaatcactc

SEQ ID NO: 16333 - DNA, 20 bp, Artificial Sequence
  Synthetic oligonucleotide; CAG chr11 5291606 5291625 5291622 +
tcaggttattctgtgaccaa

SEQ ID NO: 16334 - DNA, 20 bp, Artificial Sequence
  Synthetic oligonucleotide; TGG chr11 5291613 5291632 5291629 +
attctgtgaccaacagactg

SEQ ID NO: 16335 - DNA, 20 bp, Artificial Sequence
  Synthetic oligonucleotide; GGG chr11 5291614 5291633 5291630 +
ttctgtgaccaacagactgt

SEQ ID NO: 16336 - DNA, 20 bp, Artificial Sequence
  Synthetic oligonucleotide; CAG chr11 5291623 5291642 5291639 +
caacagactgtgggaaaaat

SEQ ID NO: 16337 - DNA, 20 bp, Artificial Sequence
  Synthetic oligonucleotide; GAG chr11 5291625 5291644 5291641 +
acagactgtgggaaaaatca

SEQ ID NO: 16338 - DNA, 20 bp, Artificial Sequence
  Synthetic oligonucleotide; AAG chr11 5291628 5291647 5291644 +
gactgtgggaaaaatcagag

SEQ ID NO: 16339 - DNA, 20 bp, Artificial Sequence
  Synthetic oligonucleotide; AGG chr11 5291629 5291648 5291645 +
actgtgggaaaaatcagaga

SEQ ID NO: 16340 - DNA, 20 bp, Artificial Sequence
  Synthetic oligonucleotide; GAG chr11 5291631 5291650 5291647 +
tgtgggaaaaatcagagaag

SEQ ID NO: 16341 - DNA, 20 bp, Artificial Sequence
  Synthetic oligonucleotide; AGG chr11 5291632 5291651 5291648 +
gtgggaaaaatcagagaagg

SEQ ID NO: 16342 - DNA, 20 bp, Artificial Sequence
  Synthetic oligonucleotide; TAG chr11 5291650 5291669 5291666 +
ggaggcatcctcatgcttac

SEQ ID NO: 16343 - DNA, 20 bp, Artificial Sequence
  Synthetic oligonucleotide; TAG chr11 5291671 5291690 5291687 +
agcctaaactgaaattgcta

SEQ ID NO: 16344 - DNA, 20 bp, Artificial Sequence
  Synthetic oligonucleotide; CAG chr11 5291674 5291693 5291690 +
ctaaactgaaattgctatag

SEQ ID NO: 16345 - DNA, 20 bp, Artificial Sequence
  Synthetic oligonucleotide; GAG chr11 5291676 5291695 5291692 +
aaactgaaattgctatagca

SEQ ID NO: 16346 - DNA, 20 bp, Artificial Sequence
  Synthetic oligonucleotide; CAG chr11 5291684 5291703 5291700 +
attgctatagcagagtgaac

SEQ ID NO: 16347 - DNA, 20 bp, Artificial Sequence
  Synthetic oligonucleotide; AAG chr11 5291687 5291706 5291703 +
gctatagcagagtgaaccag

SEQ ID NO: 16348 - DNA, 20 bp, Artificial Sequence
  Synthetic oligonucleotide; AGG chr11 5291688 5291707 5291704 +
ctatagcagagtgaaccaga

SEQ ID NO: 16349 - DNA, 20 bp, Artificial Sequence
  Synthetic oligonucleotide; CAG chr11 5291695 5291714 5291711 +
agagtgaaccagaaggttta

SEQ ID NO: 16350 - DNA, 20 bp, Artificial Sequence
  Synthetic oligonucleotide; AAG chr11 5291710 5291729 5291726 +
gtttacagatattttccaca

SEQ ID NO: 16351 - DNA, 20 bp, Artificial Sequence
  Synthetic oligonucleotide; GAG chr11 5291712 5291731 5291728 +
ttacagatattttccacaaa

SEQ ID NO: 16352 - DNA, 20 bp, Artificial Sequence
  Synthetic oligonucleotide; AAG chr11 5291718 5291737 5291734 +
atattttccacaaagagtaa

SEQ ID NO: 16353 - DNA, 20 bp, Artificial Sequence
  Synthetic oligonucleotide; AGG chr11 5291719 5291738 5291735 +
tattttccacaaagagtaaa

SEQ ID NO: 16354 - DNA, 20 bp, Artificial Sequence
  Synthetic oligonucleotide; AAG chr11 5291726 5291745 5291742 +
cacaaagagtaaaaggattg

SEQ ID NO: 16355 - DNA, 20 bp, Artificial Sequence
  Synthetic oligonucleotide; CAG chr11 5291736 5291755 5291752 +
aaaaggattgaagccttctc

SEQ ID NO: 16356 - DNA, 20 bp, Artificial Sequence
  Synthetic oligonucleotide; TAG chr11 5291748 5291767 5291764 +
gccttctccagatcaatgca

SEQ ID NO: 16357 - DNA, 20 bp, Artificial Sequence
  Synthetic oligonucleotide; AGG chr11 5291749 5291768 5291765 +
ccttctccagatcaatgcat

SEQ ID NO: 16358 - DNA, 20 bp, Artificial Sequence
  Synthetic oligonucleotide; TGG chr11 5291761 5291780 5291777 +
caatgcataggaaataataa

SEQ ID NO: 16359 - DNA, 20 bp, Artificial Sequence
  Synthetic oligonucleotide; TAG chr11 5291795 5291814 5291811 +
catattatgacgaacaacat

SEQ ID NO: 16360 - DNA, 20 bp, Artificial Sequence
  Synthetic oligonucleotide; AGG chr11 5291796 5291815 5291812 +
atattatgacgaacaacatt

SEQ ID NO: 16361 - DNA, 20 bp, Artificial Sequence
  Synthetic oligonucleotide; AAG chr11 5291801 5291820 5291817 +
atgacgaacaacattaggat

SEQ ID NO: 16362 - DNA, 20 bp, Artificial Sequence
  Synthetic oligonucleotide; CAG chr11 5291823 5291842 5291839 +
gtccatatcaatttttaatc

SEQ ID NO: 16363 - DNA, 20 bp, Artificial Sequence
  Synthetic oligonucleotide; AAG chr11 5291830 5291849 5291846 +
tcaatttttaatccagtcat

SEQ ID NO: 16364 - DNA, 20 bp, Artificial Sequence
  Synthetic oligonucleotide; CAG chr11 5291835 5291854 5291851 +
ttttaatccagtcataagca

SEQ ID NO: 16365 - DNA, 20 bp, Artificial Sequence
  Synthetic oligonucleotide; AAG chr11 5291846 5291865 5291862 +
tcataagcacagactacgtg

SEQ ID NO: 16366 - DNA, 20 bp, Artificial Sequence
  Synthetic oligonucleotide; AAG chr11 5291856 5291875 5291872 +
agactacgtgaagcacgtcc

SEQ ID NO: 16367 - DNA, 20 bp, Artificial Sequence
  Synthetic oligonucleotide; AAG chr11 5291861 5291880 5291877 +
acgtgaagcacgtccaagtg

SEQ ID NO: 16368 - DNA, 20 bp, Artificial Sequence
  Synthetic oligonucleotide; AGG chr11 5291862 5291881 5291878 +
cgtgaagcacgtccaagtga

SEQ ID NO: 16369 - DNA, 20 bp, Artificial Sequence
  Synthetic oligonucleotide; CAG chr11 5291865 5291884 5291881 +
gaagcacgtccaagtgaagg

SEQ ID NO: 16370 - DNA, 20 bp, Artificial Sequence
  Synthetic oligonucleotide; AGG chr11 5291866 5291885 5291882 +
aagcacgtccaagtgaaggc

SEQ ID NO: 16371 - DNA, 20 bp, Artificial Sequence
  Synthetic oligonucleotide; GAG chr11 5291868 5291887 5291884 +
gcacgtccaagtgaaggcag

SEQ ID NO: 16372 - DNA, 20 bp, Artificial Sequence
  Synthetic oligonucleotide; GAG chr11 5291875 5291894 5291891 +
caagtgaaggcaggagaaat

SEQ ID NO: 16373 - DNA, 20 bp, Artificial Sequence
  Synthetic oligonucleotide; GAG chr11 5291877 5291896 5291893 +
agtgaaggcaggagaaatga

SEQ ID NO: 16374 - DNA, 20 bp, Artificial Sequence
  Synthetic oligonucleotide; AGG chr11 5291878 5291897 5291894 +
gtgaaggcaggagaaatgag

SEQ ID NO: 16375 - DNA, 20 bp, Artificial Sequence
  Synthetic oligonucleotide; GAG chr11 5291880 5291899 5291896 +
gaaggcaggagaaatgagag

SEQ ID NO: 16376 - DNA, 20 bp, Artificial Sequence
  Synthetic oligonucleotide; AAG chr11 5291884 5291903 5291900 +
gcaggagaaatgagaggagc

SEQ ID NO: 16377 - DNA, 20 bp, Artificial Sequence
  Synthetic oligonucleotide; AAG chr11 5291888 5291907 5291904 +
gagaaatgagaggagcaaga

SEQ ID NO: 16378 - DNA, 20 bp, Artificial Sequence
  Synthetic oligonucleotide; GAG chr11 5291890 5291909 5291906 +
gaaatgagaggagcaagaaa

SEQ ID NO: 16379 - DNA, 20 bp, Artificial Sequence
  Synthetic oligonucleotide; AGG chr11 5291891 5291910 5291907 +
aaatgagaggagcaagaaag

SEQ ID NO: 16380 - DNA, 20 bp, Artificial Sequence
  Synthetic oligonucleotide; GAG chr11 5291893 5291912 5291909 +
atgagaggagcaagaaagag

SEQ ID NO: 16381 - DNA, 20 bp, Artificial Sequence
  Synthetic oligonucleotide; AAG chr11 5291906 5291925 5291922 +
gaaagaggagccatttgatc

SEQ ID NO: 16382 - DNA, 20 bp, Artificial Sequence
  Synthetic oligonucleotide; TAG chr11 5291911 5291930 5291927 +
aggagccatttgatcaagaa

SEQ ID NO: 16383 - DNA, 20 bp, Artificial Sequence
  Synthetic oligonucleotide; CAG chr11 5291914 5291933 5291930 +
agccatttgatcaagaatag

SEQ ID NO: 16384 - DNA, 20 bp, Artificial Sequence
  Synthetic oligonucleotide; AAG chr11 5291920 5291939 5291936 +
ttgatcaagaatagcagaaa

SEQ ID NO: 16385 - DNA, 20 bp, Artificial Sequence
  Synthetic oligonucleotide; AGG chr11 5291921 5291940 5291937 +
tgatcaagaatagcagaaaa

SEQ ID NO: 16386 - DNA, 20 bp, Artificial Sequence
  Synthetic oligonucleotide; AAG chr11 5291925 5291944 5291941 +
caagaatagcagaaaaagga

SEQ ID NO: 16387 - DNA, 20 bp, Artificial Sequence
  Synthetic oligonucleotide; AGG chr11 5291926 5291945 5291942 +
aagaatagcagaaaaaggaa

SEQ ID NO: 16388 - DNA, 20 bp, Artificial Sequence
  Synthetic oligonucleotide; AAG chr11 5291930 5291949 5291946 +
atagcagaaaaaggaaaggc

SEQ ID NO: 16389 - DNA, 20 bp, Artificial Sequence
  Synthetic oligonucleotide; CAG chr11 5291961 5291980 5291977 +
acaaatgattgtcatgccaa

SEQ ID NO: 16390 - DNA, 20 bp, Artificial Sequence
  Synthetic oligonucleotide; CAG chr11 5291966 5291985 5291982 +
tgattgtcatgccaacagta

SEQ ID NO: 16391 - DNA, 20 bp, Artificial Sequence
  Synthetic oligonucleotide; AAG chr11 5291984 5292003 5292000 +
tacagataactctgctaata

SEQ ID NO: 16392 - DNA, 20 bp, Artificial Sequence
  Synthetic oligonucleotide; AGG chr11 5291985 5292004 5292001 +
acagataactctgctaataa

SEQ ID NO: 16393 - DNA, 20 bp, Artificial Sequence
  Synthetic oligonucleotide; TAG chr11 5291988 5292007 5292004 +
gataactctgctaataaagg

SEQ ID NO: 16394 - DNA, 20 bp, Artificial Sequence
  Synthetic oligonucleotide; GAG chr11 5291990 5292009 5292006 +
taactctgctaataaaggta

SEQ ID NO: 16395 - DNA, 20 bp, Artificial Sequence
  Synthetic oligonucleotide; AGG chr11 5291991 5292010 5292007 +
aactctgctaataaaggtag

SEQ ID NO: 16396 - DNA, 20 bp, Artificial Sequence
  Synthetic oligonucleotide; CAG chr11 5292001 5292020 5292017 +
ataaaggtagaggcataata

SEQ ID NO: 16397 - DNA, 20 bp, Artificial Sequence
  Synthetic oligonucleotide; AGG chr11 5292002 5292021 5292018 +
taaaggtagaggcataatac

SEQ ID NO: 16398 - DNA, 20 bp, Artificial Sequence
  Synthetic oligonucleotide; TAG chr11 5292005 5292024 5292021 +
aggtagaggcataatacagg

SEQ ID NO: 16399 - DNA, 20 bp, Artificial Sequence
  Synthetic oligonucleotide; TAG chr11 5292008 5292027 5292024 +
tagaggcataatacaggtag

SEQ ID NO: 16400 - DNA, 20 bp, Artificial Sequence
  Synthetic oligonucleotide; CAG chr11 5292011 5292030 5292027 +
aggcataatacaggtagtag

SEQ ID NO: 16401 - DNA, 20 bp, Artificial Sequence
  Synthetic oligonucleotide; TAG chr11 5292023 5292042 5292039 +
ggtagtagcagatatctaca

SEQ ID NO: 16402 - DNA, 20 bp, Artificial Sequence
  Synthetic oligonucleotide; TAG chr11 5292026 5292045 5292042 +
agtagcagatatctacatag

SEQ ID NO: 16403 - DNA, 20 bp, Artificial Sequence
  Synthetic oligonucleotide; AAG chr11 5292032 5292051 5292048 +
agatatctacatagtagtta

SEQ ID NO: 16404 - DNA, 20 bp, Artificial Sequence
  Synthetic oligonucleotide; AGG chr11 5292033 5292052 5292049 +
gatatctacatagtagttaa

SEQ ID NO: 16405 - DNA, 20 bp, Artificial Sequence
  Synthetic oligonucleotide; TGG chr11 5292039 5292058 5292055 +
tacatagtagttaaaggaca

SEQ ID NO: 16406 - DNA, 20 bp, Artificial Sequence
  Synthetic oligonucleotide; CAG chr11 5292046 5292065 5292062 +
tagttaaaggacatggccat

SEQ ID NO: 16407 - DNA, 20 bp, Artificial Sequence
  Synthetic oligonucleotide; CAG chr11 5292051 5292070 5292067 +
aaaggacatggccatcagta

SEQ ID NO: 16408 - DNA, 20 bp, Artificial Sequence
  Synthetic oligonucleotide; AAG chr11 5292054 5292073 5292070 +
ggacatggccatcagtacag

SEQ ID NO: 16409 - DNA, 20 bp, Artificial Sequence
  Synthetic oligonucleotide; AAG chr11 5292065 5292084 5292081 +
tcagtacagaagattccata

SEQ ID NO: 16410 - DNA, 20 bp, Artificial Sequence
  Synthetic oligonucleotide; AGG chr11 5292066 5292085 5292082 +
cagtacagaagattccataa

SEQ ID NO: 16411 - DNA, 20 bp, Artificial Sequence
  Synthetic oligonucleotide; GAG chr11 5292068 5292087 5292084 +
gtacagaagattccataaag

SEQ ID NO: 16412 - DNA, 20 bp, Artificial Sequence
  Synthetic oligonucleotide; AAG chr11 5292077 5292096 5292093 +
attccataaaggagaaccta

SEQ ID NO: 16413 - DNA, 20 bp, Artificial Sequence
  Synthetic oligonucleotide; GAG chr11 5292079 5292098 5292095 +
tccataaaggagaacctaaa

SEQ ID NO: 16414 - DNA, 20 bp, Artificial Sequence
  Synthetic oligonucleotide; AGG chr11 5292080 5292099 5292096 +
ccataaaggagaacctaaag

SEQ ID NO: 16415 - DNA, 20 bp, Artificial Sequence
  Synthetic oligonucleotide; AAG chr11 5292083 5292102 5292099 +
taaaggagaacctaaagagg

SEQ ID NO: 16416 - DNA, 20 bp, Artificial Sequence
  Synthetic oligonucleotide; CAG chr11 5292096 5292115 5292112 +
aaagaggaagaataatttgt

SEQ ID NO: 16417 - DNA, 20 bp, Artificial Sequence
  Synthetic oligonucleotide; AAG chr11 5292099 5292118 5292115 +
gaggaagaataatttgtcag

SEQ ID NO: 16418 - DNA, 20 bp, Artificial Sequence
  Synthetic oligonucleotide; AAG chr11 5292107 5292126 5292123 +
ataatttgtcagaagcttaa

SEQ ID NO: 16419 - DNA, 20 bp, Artificial Sequence
  Synthetic oligonucleotide; GAG chr11 5292119 5292138 5292135 +
aagcttaaaagctgaactct

SEQ ID NO: 16420 - DNA, 20 bp, Artificial Sequence
  Synthetic oligonucleotide; AGG chr11 5292120 5292139 5292136 +
agcttaaaagctgaactctg

SEQ ID NO: 16421 - DNA, 20 bp, Artificial Sequence
  Synthetic oligonucleotide; TGG chr11 5292150 5292169 5292166 +
ctacaatatccttttgactg

SEQ ID NO: 16422 - DNA, 20 bp, Artificial Sequence
  Synthetic oligonucleotide; AAG chr11 5292154 5292173 5292170 +
aatatccttttgactgtgga

SEQ ID NO: 16423 - DNA, 20 bp, Artificial Sequence
  Synthetic oligonucleotide; AGG chr11 5292155 5292174 5292171 +
atatccttttgactgtggaa

SEQ ID NO: 16424 - DNA, 20 bp, Artificial Sequence
  Synthetic oligonucleotide; GGG chr11 5292156 5292175 5292172 +
tatccttttgactgtggaaa

SEQ ID NO: 16425 - DNA, 20 bp, Artificial Sequence
  Synthetic oligonucleotide; TGG chr11 5292159 5292178 5292175 +
ccttttgactgtggaaaggg

SEQ ID NO: 16426 - DNA, 20 bp, Artificial Sequence
  Synthetic oligonucleotide; AAG chr11 5292165 5292184 5292181 +
gactgtggaaagggtggtga

SEQ ID NO: 16427 - DNA, 20 bp, Artificial Sequence
  Synthetic oligonucleotide; AGG chr11 5292166 5292185 5292182 +
actgtggaaagggtggtgaa

SEQ ID NO: 16428 - DNA, 20 bp, Artificial Sequence
  Synthetic oligonucleotide; AAG chr11 5292170 5292189 5292186 +
tggaaagggtggtgaaagga

SEQ ID NO: 16429 - DNA, 20 bp, Artificial Sequence
  Synthetic oligonucleotide; AAG chr11 5292176 5292195 5292192 +
gggtggtgaaaggaaagttc

SEQ ID NO: 16430 - DNA, 20 bp, Artificial Sequence
  Synthetic oligonucleotide; AGG chr11 5292177 5292196 5292193 +
ggtggtgaaaggaaagttca

SEQ ID NO: 16431 - DNA, 20 bp, Artificial Sequence
  Synthetic oligonucleotide; GAG chr11 5292186 5292205 5292202 +
aggaaagttcaaggacattt

SEQ ID NO: 16432 - DNA, 20 bp, Artificial Sequence
  Synthetic oligonucleotide; TAG chr11 5292195 5292214 5292211 +
caaggacatttgagccaaca

SEQ ID NO: 16433 - DNA, 20 bp, Artificial Sequence
  Synthetic oligonucleotide; GAG chr11 5292197 5292216 5292213 +
aggacatttgagccaacata

SEQ ID NO: 16434 - DNA, 20 bp, Artificial Sequence
  Synthetic oligonucleotide; GAG chr11 5292199 5292218 5292215 +
gacatttgagccaacataga

SEQ ID NO: 16435 - DNA, 20 bp, Artificial Sequence
  Synthetic oligonucleotide; AGG chr11 5292200 5292219 5292216 +
acatttgagccaacatagag

SEQ ID NO: 16436 - DNA, 20 bp, Artificial Sequence
  Synthetic oligonucleotide; TGG chr11 5292208 5292227 5292224 +
gccaacatagagaggaacat

SEQ ID NO: 16437 - DNA, 20 bp, Artificial Sequence
  Synthetic oligonucleotide; TGG chr11 5292213 5292232 5292229 +
catagagaggaacattggct

SEQ ID NO: 16438 - DNA, 20 bp, Artificial Sequence
  Synthetic oligonucleotide; GAG chr11 5292217 5292236 5292233 +
gagaggaacattggcttggt

SEQ ID NO: 16439 - DNA, 20 bp, Artificial Sequence
  Synthetic oligonucleotide; AGG chr11 5292218 5292237 5292234 +
agaggaacattggcttggtg

SEQ ID NO: 16440 - DNA, 20 bp, Artificial Sequence
  Synthetic oligonucleotide; GGG chr11 5292219 5292238 5292235 +
gaggaacattggcttggtga

SEQ ID NO: 16441 - DNA, 20 bp, Artificial Sequence
  Synthetic oligonucleotide; CAG chr11 5292242 5292261 5292258 +
atatctgtcctgatgttgtc

SEQ ID NO: 16442 - DNA, 20 bp, Artificial Sequence
  Synthetic oligonucleotide; AGG chr11 5292243 5292262 5292259 +
tatctgtcctgatgttgtcc

SEQ ID NO: 16443 - DNA, 20 bp, Artificial Sequence
  Synthetic oligonucleotide; TGG chr11 5292247 5292266 5292263 +
tgtcctgatgttgtccagga

SEQ ID NO: 16444 - DNA, 20 bp, Artificial Sequence
  Synthetic oligonucleotide; TAG chr11 5292273 5292292 5292289 +
tgatacccatataaataacg

SEQ ID NO: 16445 - DNA, 20 bp, Artificial Sequence
  Synthetic oligonucleotide; GAG chr11 5292275 5292294 5292291 +
atacccatataaataacgta

SEQ ID NO: 16446 - DNA, 20 bp, Artificial Sequence
  Synthetic oligonucleotide; CAG chr11 5292282 5292301 5292298 +
tataaataacgtagagaaaa

SEQ ID NO: 16447 - DNA, 20 bp, Artificial Sequence
  Synthetic oligonucleotide; AGG chr11 5292283 5292302 5292299 +
ataaataacgtagagaaaac

SEQ ID NO: 16448 - DNA, 20 bp, Artificial Sequence
  Synthetic oligonucleotide; GAG chr11 5292285 5292304 5292301 +
aaataacgtagagaaaacag

SEQ ID NO: 16449 - DNA, 20 bp, Artificial Sequence
  Synthetic oligonucleotide; AGG chr11 5292286 5292305 5292302 +
aataacgtagagaaaacagg

SEQ ID NO: 16450 - DNA, 20 bp, Artificial Sequence
  Synthetic oligonucleotide; GGG chr11 5292287 5292306 5292303 +
ataacgtagagaaaacagga

SEQ ID NO: 16451 - DNA, 20 bp, Artificial Sequence
  Synthetic oligonucleotide; GGG chr11 5292288 5292307 5292304 +
taacgtagagaaaacaggag

SEQ ID NO: 16452 - DNA, 20 bp, Artificial Sequence
  Synthetic oligonucleotide; TAG chr11 5292292 5292311 5292308 +
gtagagaaaacaggagggga

SEQ ID NO: 16453 - DNA, 20 bp, Artificial Sequence
  Synthetic oligonucleotide; GAG chr11 5292294 5292313 5292310 +
agagaaaacaggaggggata

SEQ ID NO: 16454 - DNA, 20 bp, Artificial Sequence
  Synthetic oligonucleotide; TAG chr11 5292300 5292319 5292316 +
aacaggaggggatagagatc

SEQ ID NO: 16455 - DNA, 20 bp, Artificial Sequence
  Synthetic oligonucleotide; AAG chr11 5292306 5292325 5292322 +
aggggatagagatctagaca

SEQ ID NO: 16456 - DNA, 20 bp, Artificial Sequence
  Synthetic oligonucleotide; GAG chr11 5292308 5292327 5292324 +
gggatagagatctagacaaa

SEQ ID NO: 16457 - DNA, 20 bp, Artificial Sequence
  Synthetic oligonucleotide; AGG chr11 5292309 5292328 5292325 +
ggatagagatctagacaaag

SEQ ID NO: 16458 - DNA, 20 bp, Artificial Sequence
  Synthetic oligonucleotide; AAG chr11 5292317 5292336 5292333 +
atctagacaaagaggcatca

SEQ ID NO: 16459 - DNA, 20 bp, Artificial Sequence
  Synthetic oligonucleotide; TAG chr11 5292321 5292340 5292337 +
agacaaagaggcatcaaaga

SEQ ID NO: 16460 - DNA, 20 bp, Artificial Sequence
  Synthetic oligonucleotide; AGG chr11 5292322 5292341 5292338 +
gacaaagaggcatcaaagat

SEQ ID NO: 16461 - DNA, 20 bp, Artificial Sequence
  Synthetic oligonucleotide; GGG chr11 5292323 5292342 5292339 +
acaaagaggcatcaaagata

SEQ ID NO: 16462 - DNA, 20 bp, Artificial Sequence
  Synthetic oligonucleotide; AAG chr11 5292334 5292353 5292350 +
tcaaagatagggatgtttgt

SEQ ID NO: 16463 - DNA, 20 bp, Artificial Sequence
  Synthetic oligonucleotide; AGG chr11 5292335 5292354 5292351 +
caaagatagggatgtttgta

SEQ ID NO: 16464 - DNA, 20 bp, Artificial Sequence
  Synthetic oligonucleotide; TAG chr11 5292344 5292363 5292360 +
ggatgtttgtaaggatgaaa

SEQ ID NO: 16465 - DNA, 20 bp, Artificial Sequence
  Synthetic oligonucleotide; TAG chr11 5292361 5292380 5292377 +
aaatagaacgttttttgcgt

SEQ ID NO: 16466 - DNA, 20 bp, Artificial Sequence
  Synthetic oligonucleotide; GAG chr11 5292371 5292390 5292387 +
ttttttgcgttagtcaccgt

SEQ ID NO: 16467 - DNA, 20 bp, Artificial Sequence
  Synthetic oligonucleotide; AGG chr11 5292372 5292391 5292388 +
tttttgcgttagtcaccgtg

SEQ ID NO: 16468 - DNA, 20 bp, Artificial Sequence
  Synthetic oligonucleotide; CGG chr11 5292380 5292399 5292396 +
ttagtcaccgtgaggatgac

SEQ ID NO: 16469 - DNA, 20 bp, Artificial Sequence
  Synthetic oligonucleotide; AAG chr11 5292385 5292404 5292401 +
caccgtgaggatgaccggta

SEQ ID NO: 16470 - DNA, 20 bp, Artificial Sequence
  Synthetic oligonucleotide; AGG chr11 5292386 5292405 5292402 +
accgtgaggatgaccggtaa

SEQ ID NO: 16471 - DNA, 20 bp, Artificial Sequence
  Synthetic oligonucleotide; CAG chr11 5292394 5292413 5292410 +
gatgaccggtaaaggcaatg

SEQ ID NO: 16472 - DNA, 20 bp, Artificial Sequence
  Synthetic oligonucleotide; GAG chr11 5292396 5292415 5292412 +
tgaccggtaaaggcaatgca

SEQ ID NO: 16473 - DNA, 20 bp, Artificial Sequence
  Synthetic oligonucleotide; AGG chr11 5292397 5292416 5292413 +
gaccggtaaaggcaatgcag

SEQ ID NO: 16474 - DNA, 20 bp, Artificial Sequence
  Synthetic oligonucleotide; TGG chr11 5292464 5292483 5292480 +
ataataattgtgtgtattca

SEQ ID NO: 16475 - DNA, 20 bp, Artificial Sequence
  Synthetic oligonucleotide; GGG chr11 5292465 5292484 5292481 +
taataattgtgtgtattcat

SEQ ID NO: 16476 - DNA, 20 bp, Artificial Sequence
  Synthetic oligonucleotide; GGG chr11 5292466 5292485 5292482 +
aataattgtgtgtattcatg

SEQ ID NO: 16477 - DNA, 20 bp, Artificial Sequence
  Synthetic oligonucleotide; TGG chr11 5292484 5292503 5292500 +
tggggtacaacatgatgctt

SEQ ID NO: 16478 - DNA, 20 bp, Artificial Sequence
  Synthetic oligonucleotide; TGG chr11 5292507 5292526 5292523 +
tgtacgtgtacaatattaaa

SEQ ID NO: 16479 - DNA, 20 bp, Artificial Sequence
  Synthetic oligonucleotide; AAG chr11 5292516 5292535 5292532 +
acaatattaaatggttaaat

SEQ ID NO: 16480 - DNA, 20 bp, Artificial Sequence
  Synthetic oligonucleotide; AGG chr11 5292517 5292536 5292533 +
caatattaaatggttaaata

SEQ ID NO: 16481 - DNA, 20 bp, Artificial Sequence
  Synthetic oligonucleotide; TGG chr11 5292559 5292578 5292575 +
cttcacatacttattttttg

SEQ ID NO: 16482 - DNA, 20 bp, Artificial Sequence
  Synthetic oligonucleotide; TGG chr11 5292600 5292619 5292616 +
acactcttcattcaaaaatc

SEQ ID NO: 16483 - DNA, 20 bp, Artificial Sequence
  Synthetic oligonucleotide; TAG chr11 5292607 5292626 5292623 +
tcattcaaaaatctggaaca

SEQ ID NO: 16484 - DNA, 20 bp, Artificial Sequence
  Synthetic oligonucleotide; CAG chr11 5292628 5292647 5292644 +
agttaaaatgtcatatgtgt

SEQ ID NO: 16485 - DNA, 20 bp, Artificial Sequence
  Synthetic oligonucleotide; AGG chr11 5292629 5292648 5292645 +
gttaaaatgtcatatgtgtc

SEQ ID NO: 16486 - DNA, 20 bp, Artificial Sequence
  Synthetic oligonucleotide; CAG chr11 5292635 5292654 5292651 +
atgtcatatgtgtcaggatg

SEQ ID NO: 16487 - DNA, 20 bp, Artificial Sequence
  Synthetic oligonucleotide; TAG chr11 5292641 5292660 5292657 +
tatgtgtcaggatgcagtaa

SEQ ID NO: 16488 - DNA, 20 bp, Artificial Sequence
  Synthetic oligonucleotide; TAG chr11 5292647 5292666 5292663 +
tcaggatgcagtaatagatt

SEQ ID NO: 16489 - DNA, 20 bp, Artificial Sequence
  Synthetic oligonucleotide; GAG chr11 5292694 5292713 5292710 +
atcatgaataatgatcaatc

SEQ ID NO: 16490 - DNA, 20 bp, Artificial Sequence
  Synthetic oligonucleotide; AGG chr11 5292695 5292714 5292711 +
tcatgaataatgatcaatcg

SEQ ID NO: 16491 - DNA, 20 bp, Artificial Sequence
  Synthetic oligonucleotide; GAG chr11 5292713 5292732 5292729 +
cgaggaaaacctatgaaaat

SEQ ID NO: 16492 - DNA, 20 bp, Artificial Sequence
  Synthetic oligonucleotide; TGG chr11 5292723 5292742 5292739 +
ctatgaaaatgagaaaattt

SEQ ID NO: 16493 - DNA, 20 bp, Artificial Sequence
  Synthetic oligonucleotide; GAG chr11 5292725 5292744 5292741 +
atgaaaatgagaaaattttg

SEQ ID NO: 16494 - DNA, 20 bp, Artificial Sequence
  Synthetic oligonucleotide; TGG chr11 5292756 5292775 5292772 +
aaaaatatcttgatcacttt

SEQ ID NO: 16495 - DNA, 20 bp, Artificial Sequence
  Synthetic oligonucleotide; GAG chr11 5292758 5292777 5292774 +
aaatatcttgatcacttttg

SEQ ID NO: 16496 - DNA, 20 bp, Artificial Sequence
  Synthetic oligonucleotide; AGG chr11 5292759 5292778 5292775 +
aatatcttgatcacttttgg

SEQ ID NO: 16497 - DNA, 20 bp, Artificial Sequence
  Synthetic oligonucleotide; CAG chr11 5292763 5292782 5292779 +
tcttgatcacttttggaggt

SEQ ID NO: 16498 - DNA, 20 bp, Artificial Sequence
  Synthetic oligonucleotide; AGG chr11 5292764 5292783 5292780 +
cttgatcacttttggaggtc

SEQ ID NO: 16499 - DNA, 20 bp, Artificial Sequence
  Synthetic oligonucleotide; CAG chr11 5292771 5292790 5292787 +
acttttggaggtcaggaatt

SEQ ID NO: 16500 - DNA, 20 bp, Artificial Sequence
  Synthetic oligonucleotide; CGG chr11 5292786 5292805 5292802 +
gaattcagattcatttttct

SEQ ID NO: 16501 - DNA, 20 bp, Artificial Sequence
  Synthetic oligonucleotide; AAG chr11 5292795 5292814 5292811 +
ttcatttttctcggcctgta

SEQ ID NO: 16502 - DNA, 20 bp, Artificial Sequence
  Synthetic oligonucleotide; TAG chr11 5292815 5292834 5292831 +
aagaacttgaaattgcatta

SEQ ID NO: 16503 - DNA, 20 bp, Artificial Sequence
  Synthetic oligonucleotide; CAG chr11 5292818 5292837 5292834 +
aacttgaaattgcattatag

SEQ ID NO: 16504 - DNA, 20 bp, Artificial Sequence
  Synthetic oligonucleotide; TAG chr11 5292825 5292844 5292841 +
aattgcattatagcagaatg

SEQ ID NO: 16505 - DNA, 20 bp, Artificial Sequence
  Synthetic oligonucleotide; AGG chr11 5292826 5292845 5292842 +
attgcattatagcagaatgt

SEQ ID NO: 16506 - DNA, 20 bp, Artificial Sequence
  Synthetic oligonucleotide; GAG chr11 5292833 5292852 5292849 +
tatagcagaatgtaggcctt

SEQ ID NO: 16507 - DNA, 20 bp, Artificial Sequence
  Synthetic oligonucleotide; TGG chr11 5292836 5292855 5292852 +
agcagaatgtaggccttgag

SEQ ID NO: 16508 - DNA, 20 bp, Artificial Sequence
  Synthetic oligonucleotide; TGG chr11 5292846 5292865 5292862 +
aggccttgagtggattgatg

SEQ ID NO: 16509 - DNA, 20 bp, Artificial Sequence
  Synthetic oligonucleotide; AAG chr11 5292849 5292868 5292865 +
ccttgagtggattgatgtgg

SEQ ID NO: 16510 - DNA, 20 bp, Artificial Sequence
  Synthetic oligonucleotide; AAG chr11 5292858 5292877 5292874 +
gattgatgtggaagcaaaac

SEQ ID NO: 16511 - DNA, 20 bp, Artificial Sequence
  Synthetic oligonucleotide; AAG chr11 5292870 5292889 5292886 +
agcaaaacaagccacaaata

SEQ ID NO: 16512 - DNA, 20 bp, Artificial Sequence
  Synthetic oligonucleotide; AAG chr11 5292916 5292935 5292932 +
tgacttgtgccattaatttt

SEQ ID NO: 16513 - DNA, 20 bp, Artificial Sequence
  Synthetic oligonucleotide; CAG chr11 5292919 5292938 5292935 +
cttgtgccattaattttaag

SEQ ID NO: 16514 - DNA, 20 bp, Artificial Sequence
  Synthetic oligonucleotide; TGG chr11 5292936 5292955 5292952 +
aagcagtttcatatgaaacg

SEQ ID NO: 16515 - DNA, 20 bp, Artificial Sequence
  Synthetic oligonucleotide; GGG chr11 5292937 5292956 5292953 +
agcagtttcatatgaaacgt

SEQ ID NO: 16516 - DNA, 20 bp, Artificial Sequence
  Synthetic oligonucleotide; CAG chr11 5292959 5292978 5292975 +
gtttctttattgctacgtca

SEQ ID NO: 16517 - DNA, 20 bp, Artificial Sequence
  Synthetic oligonucleotide; CAG chr11 5292963 5292982 5292979 +
ctttattgctacgtcacagt

SEQ ID NO: 16518 - DNA, 20 bp, Artificial Sequence
  Synthetic oligonucleotide; TGG chr11 5292973 5292992 5292989 +
acgtcacagtcagatgttca

SEQ ID NO: 16519 - DNA, 20 bp, Artificial Sequence
  Synthetic oligonucleotide; GAG chr11 5292980 5292999 5292996 +
agtcagatgttcatggtcct

SEQ ID NO: 16520 - DNA, 20 bp, Artificial Sequence
  Synthetic oligonucleotide; AAG chr11 5292994 5293013 5293010 +
ggtcctgagtgctctcctcc

SEQ ID NO: 16521 - DNA, 20 bp, Artificial Sequence
  Synthetic oligonucleotide; CAG chr11 5292997 5293016 5293013 +
cctgagtgctctcctccaag

SEQ ID NO: 16522 - DNA, 20 bp, Artificial Sequence
  Synthetic oligonucleotide; TGG chr11 5293000 5293019 5293016 +
gagtgctctcctccaagcag

SEQ ID NO: 16523 - DNA, 20 bp, Artificial Sequence
  Synthetic oligonucleotide; GGG chr11 5293001 5293020 5293017 +
agtgctctcctccaagcagt

SEQ ID NO: 16524 - DNA, 20 bp, Artificial Sequence
  Synthetic oligonucleotide; CAG chr11 5293005 5293024 5293021 +
ctctcctccaagcagtgggc

SEQ ID NO: 16525 - DNA, 20 bp, Artificial Sequence
  Synthetic oligonucleotide; AGG chr11 5293006 5293025 5293022 +
tctcctccaagcagtgggcc

SEQ ID NO: 16526 - DNA, 20 bp, Artificial Sequence
  Synthetic oligonucleotide; GAG chr11 5293008 5293027 5293024 +
tcctccaagcagtgggccag

SEQ ID NO: 16527 - DNA, 20 bp, Artificial Sequence
  Synthetic oligonucleotide; CAG chr11 5293013 5293032 5293029 +
caagcagtgggccaggagtc

SEQ ID NO: 16528 - DNA, 20 bp, Artificial Sequence
  Synthetic oligonucleotide; AGG chr11 5293014 5293033 5293030 +
aagcagtgggccaggagtcc

SEQ ID NO: 16529 - DNA, 20 bp, Artificial Sequence
  Synthetic oligonucleotide; CAG chr11 5293045 5293064 5293061 +
tgtgattgactttatcattt

SEQ ID NO: 16530 - DNA, 20 bp, Artificial Sequence
  Synthetic oligonucleotide; TAG chr11 5293069 5293088 5293085 +
atcttttactttctgccaca

SEQ ID NO: 16531 - DNA, 20 bp, Artificial Sequence
  Synthetic oligonucleotide; GAG chr11 5293071 5293090 5293087 +
cttttactttctgccacata

SEQ ID NO: 16532 - DNA, 20 bp, Artificial Sequence
  Synthetic oligonucleotide; AGG chr11 5293072 5293091 5293088 +
ttttactttctgccacatag

SEQ ID NO: 16533 - DNA, 20 bp, Artificial Sequence
  Synthetic oligonucleotide; AAG chr11 5293075 5293094 5293091 +
tactttctgccacatagagg

SEQ ID NO: 16534 - DNA, 20 bp, Artificial Sequence
  Synthetic oligonucleotide; AGG chr11 5293076 5293095 5293092 +
actttctgccacatagagga

SEQ ID NO: 16535 - DNA, 20 bp, Artificial Sequence
  Synthetic oligonucleotide; GGG chr11 5293077 5293096 5293093 +
ctttctgccacatagaggaa

SEQ ID NO: 16536 - DNA, 20 bp, Artificial Sequence
  Synthetic oligonucleotide; AAG chr11 5293081 5293100 5293097 +
ctgccacatagaggaaggga

SEQ ID NO: 16537 - DNA, 20 bp, Artificial Sequence
  Synthetic oligonucleotide; GAG chr11 5293083 5293102 5293099 +
gccacatagaggaagggaaa

SEQ ID NO: 16538 - DNA, 20 bp, Artificial Sequence
  Synthetic oligonucleotide; TAG chr11 5293091 5293110 5293107 +
gaggaagggaaagagaatga

SEQ ID NO: 16539 - DNA, 20 bp, Artificial Sequence
  Synthetic oligonucleotide; AAG chr11 5293094 5293113 5293110 +
gaagggaaagagaatgatag

SEQ ID NO: 16540 - DNA, 20 bp, Artificial Sequence
  Synthetic oligonucleotide; AGG chr11 5293095 5293114 5293111 +
aagggaaagagaatgataga

SEQ ID NO: 16541 - DNA, 20 bp, Artificial Sequence
  Synthetic oligonucleotide; GGG chr11 5293096 5293115 5293112 +
agggaaagagaatgatagaa

SEQ ID NO: 16542 - DNA, 20 bp, Artificial Sequence
  Synthetic oligonucleotide; TAG chr11 5293109 5293128 5293125 +
gatagaagggcactctgcct

SEQ ID NO: 16543 - DNA, 20 bp, Artificial Sequence
  Synthetic oligonucleotide; AGG chr11 5293110 5293129 5293126 +
atagaagggcactctgcctt

SEQ ID NO: 16544 - DNA, 20 bp, Artificial Sequence
  Synthetic oligonucleotide; GGG chr11 5293111 5293130 5293127 +
tagaagggcactctgcctta

SEQ ID NO: 16545 - DNA, 20 bp, Artificial Sequence
  Synthetic oligonucleotide; GAG chr11 5293113 5293132 5293129 +
gaagggcactctgccttagg

SEQ ID NO: 16546 - DNA, 20 bp, Artificial Sequence
  Synthetic oligonucleotide; TAG chr11 5293143 5293162 5293159 +
ttattatctccacattattt

SEQ ID NO: 16547 - DNA, 20 bp, Artificial Sequence
  Synthetic oligonucleotide; CAG chr11 5293153 5293172 5293169 +
cacattattttagtcacaac

SEQ ID NO: 16548 - DNA, 20 bp, Artificial Sequence
  Synthetic oligonucleotide; TGG chr11 5293161 5293180 5293177 +
tttagtcacaaccagtcaca

SEQ ID NO: 16549 - DNA, 20 bp, Artificial Sequence
  Synthetic oligonucleotide; AAG chr11 5293166 5293185 5293182 +
tcacaaccagtcacatggcc

SEQ ID NO: 16550 - DNA, 20 bp, Artificial Sequence
  Synthetic oligonucleotide; AAG chr11 5293177 5293196 5293193 +
cacatggccaagttaattgc

SEQ ID NO: 16551 - DNA, 20 bp, Artificial Sequence
  Synthetic oligonucleotide; AGG chr11 5293178 5293197 5293194 +
acatggccaagttaattgca

SEQ ID NO: 16552 - DNA, 20 bp, Artificial Sequence
  Synthetic oligonucleotide; GGG chr11 5293179 5293198 5293195 +
catggccaagttaattgcaa

SEQ ID NO: 16553 - DNA, 20 bp, Artificial Sequence
  Synthetic oligonucleotide; TGG chr11 5293186 5293205 5293202 +
aagttaattgcaagggctgt

SEQ ID NO: 16554 - DNA, 20 bp, Artificial Sequence
  Synthetic oligonucleotide; GAG chr11 5293197 5293216 5293213 +
aagggctgttggaaattgtt

SEQ ID NO: 16555 - DNA, 20 bp, Artificial Sequence
  Synthetic oligonucleotide; AAG chr11 5293200 5293219 5293216 +
ggctgttggaaattgttgag

SEQ ID NO: 16556 - DNA, 20 bp, Artificial Sequence
  Synthetic oligonucleotide; TAG chr11 5293213 5293232 5293229 +
tgttgagaagtatattgatt

SEQ ID NO: 16557 - DNA, 20 bp, Artificial Sequence
  Synthetic oligonucleotide; CGG chr11 5293246 5293265 5293262 +
tgtttctgacatactgtgtc

SEQ ID NO: 16558 - DNA, 20 bp, Artificial Sequence
  Synthetic oligonucleotide; TGG chr11 5293252 5293271 5293268 +
tgacatactgtgtccggaat

SEQ ID NO: 16559 - DNA, 20 bp, Artificial Sequence
  Synthetic oligonucleotide; TGG chr11 5293255 5293274 5293271 +
catactgtgtccggaattgg

SEQ ID NO: 16560 - DNA, 20 bp, Artificial Sequence
  Synthetic oligonucleotide; GGG chr11 5293256 5293275 5293272 +
atactgtgtccggaattggt

SEQ ID NO: 16561 - DNA, 20 bp, Artificial Sequence
  Synthetic oligonucleotide; TGG chr11 5293263 5293282 5293279 +
gtccggaattggtgggttct

SEQ ID NO: 16562 - DNA, 20 bp, Artificial Sequence
  Synthetic oligonucleotide; AAG chr11 5293279 5293298 5293295 +
ttcttggtttcactgacttc

SEQ ID NO: 16563 - DNA, 20 bp, Artificial Sequence
  Synthetic oligonucleotide; AAG chr11 5293286 5293305 5293302 +
tttcactgacttcaagaatg

SEQ ID NO: 16564 - DNA, 20 bp, Artificial Sequence
  Synthetic oligonucleotide; CGG chr11 5293290 5293309 5293306 +
actgacttcaagaatgaagc

SEQ ID NO: 16565 - DNA, 20 bp, Artificial Sequence
  Synthetic oligonucleotide; GGG chr11 5293291 5293310 5293307 +
ctgacttcaagaatgaagcc

SEQ ID NO: 16566 - DNA, 20 bp, Artificial Sequence
  Synthetic oligonucleotide; GGG chr11 5293292 5293311 5293308 +
tgacttcaagaatgaagccg

SEQ ID NO: 16567 - DNA, 20 bp, Artificial Sequence
  Synthetic oligonucleotide; TGG chr11 5293302 5293321 5293318 +
aatgaagccggggaccctcg

SEQ ID NO: 16568 - DNA, 20 bp, Artificial Sequence
  Synthetic oligonucleotide; GAG chr11 5293306 5293325 5293322 +
aagccggggaccctcgtggt

SEQ ID NO: 16569 - DNA, 20 bp, Artificial Sequence
  Synthetic oligonucleotide; CAG chr11 5293314 5293333 5293330 +
gaccctcgtggtgagtgtta

SEQ ID NO: 16570 - DNA, 20 bp, Artificial Sequence
  Synthetic oligonucleotide; AAG chr11 5293323 5293342 5293339 +
ggtgagtgttacagttctta

SEQ ID NO: 16571 - DNA, 20 bp, Artificial Sequence
  Synthetic oligonucleotide; AGG chr11 5293324 5293343 5293340 +
gtgagtgttacagttcttaa

SEQ ID NO: 16572 - DNA, 20 bp, Artificial Sequence
  Synthetic oligonucleotide; TGG chr11 5293336 5293355 5293352 +
gttcttaaaggctgcgtgtg

SEQ ID NO: 16573 - DNA, 20 bp, Artificial Sequence
  Synthetic oligonucleotide; GAG chr11 5293338 5293357 5293354 +
tcttaaaggctgcgtgtgtg

SEQ ID NO: 16574 - DNA, 20 bp, Artificial Sequence
  Synthetic oligonucleotide; TGG chr11 5293359 5293378 5293375 +
agtttgttcgttctgatgtt

SEQ ID NO: 16575 - DNA, 20 bp, Artificial Sequence
  Synthetic oligonucleotide; CGG chr11 5293369 5293388 5293385 +
ttctgatgtttggatgtgtt

SEQ ID NO: 16576 - DNA, 20 bp, Artificial Sequence
  Synthetic oligonucleotide; GAG chr11 5293371 5293390 5293387 +
ctgatgtttggatgtgttcg

SEQ ID NO: 16577 - DNA, 20 bp, Artificial Sequence
  Synthetic oligonucleotide; TGG chr11 5293388 5293407 5293404 +
tcggagtttcttccttctga

SEQ ID NO: 16578 - DNA, 20 bp, Artificial Sequence
  Synthetic oligonucleotide; GGG chr11 5293389 5293408 5293405 +
cggagtttcttccttctgat

SEQ ID NO: 16579 - DNA, 20 bp, Artificial Sequence
  Synthetic oligonucleotide; TGG chr11 5293396 5293415 5293412 +
tcttccttctgatgggttcg

SEQ ID NO: 16580 - DNA, 20 bp, Artificial Sequence
  Synthetic oligonucleotide; TGG chr11 5293405 5293424 5293421 +
tgatgggttcgtggtctcgc

SEQ ID NO: 16581 - DNA, 20 bp, Artificial Sequence
  Synthetic oligonucleotide; CAG chr11 5293410 5293429 5293426 +
ggttcgtggtctcgctggct

SEQ ID NO: 16582 - DNA, 20 bp, Artificial Sequence
  Synthetic oligonucleotide; AGG chr11 5293411 5293430 5293427 +
gttcgtggtctcgctggctc

SEQ ID NO: 16583 - DNA, 20 bp, Artificial Sequence
  Synthetic oligonucleotide; GAG chr11 5293413 5293432 5293429 +
tcgtggtctcgctggctcag

SEQ ID NO: 16584 - DNA, 20 bp, Artificial Sequence
  Synthetic oligonucleotide; AAG chr11 5293418 5293437 5293434 +
gtctcgctggctcaggagtg

SEQ ID NO: 16585 - DNA, 20 bp, Artificial Sequence
  Synthetic oligonucleotide; CAG chr11 5293424 5293443 5293440 +
ctggctcaggagtgaagctg

SEQ ID NO: 16586 - DNA, 20 bp, Artificial Sequence
  Synthetic oligonucleotide; CAG chr11 5293434 5293453 5293450 +
agtgaagctgcagaccttca

SEQ ID NO: 16587 - DNA, 20 bp, Artificial Sequence
  Synthetic oligonucleotide; CAG chr11 5293446 5293465 5293462 +
gaccttcacagtgaacgttc

SEQ ID NO: 16588 - DNA, 20 bp, Artificial Sequence
  Synthetic oligonucleotide; AAG chr11 5293454 5293473 5293470 +
cagtgaacgttccagctctt

SEQ ID NO: 16589 - DNA, 20 bp, Artificial Sequence
  Synthetic oligonucleotide; AGG chr11 5293455 5293474 5293471 +
agtgaacgttccagctctta

SEQ ID NO: 16590 - DNA, 20 bp, Artificial Sequence
  Synthetic oligonucleotide; CGG chr11 5293458 5293477 5293474 +
gaacgttccagctcttaagg

SEQ ID NO: 16591 - DNA, 20 bp, Artificial Sequence
  Synthetic oligonucleotide; TGG chr11 5293467 5293486 5293483 +
agctcttaaggcggcgcctc

SEQ ID NO: 16592 - DNA, 20 bp, Artificial Sequence
  Synthetic oligonucleotide; GAG chr11 5293469 5293488 5293485 +
ctcttaaggcggcgcctctg

SEQ ID NO: 16593 - DNA, 20 bp, Artificial Sequence
  Synthetic oligonucleotide; CGG chr11 5293486 5293505 5293502 +
ctggagttgttcgttcctcc

SEQ ID NO: 16594 - DNA, 20 bp, Artificial Sequence
  Synthetic oligonucleotide; TGG chr11 5293489 5293508 5293505 +
gagttgttcgttcctcccgg

SEQ ID NO: 16595 - DNA, 20 bp, Artificial Sequence
  Synthetic oligonucleotide; GGG chr11 5293490 5293509 5293506 +
agttgttcgttcctcccggt

SEQ ID NO: 16596 - DNA, 20 bp, Artificial Sequence
  Synthetic oligonucleotide; TGG chr11 5293497 5293516 5293513 +
cgttcctcccggtgggttcg

SEQ ID NO: 16597 - DNA, 20 bp, Artificial Sequence
  Synthetic oligonucleotide; TGG chr11 5293506 5293525 5293522 +
cggtgggttcgtggtctcgc

SEQ ID NO: 16598 - DNA, 20 bp, Artificial Sequence
  Synthetic oligonucleotide; AAG chr11 5293513 5293532 5293529 +
ttcgtggtctcgctggcttc

SEQ ID NO: 16599 - DNA, 20 bp, Artificial Sequence
  Synthetic oligonucleotide; GAG chr11 5293515 5293534 5293531 +
cgtggtctcgctggcttcaa

SEQ ID NO: 16600 - DNA, 20 bp, Artificial Sequence
  Synthetic oligonucleotide; AAG chr11 5293520 5293539 5293536 +
tctcgctggcttcaagagtg

SEQ ID NO: 16601 - DNA, 20 bp, Artificial Sequence
  Synthetic oligonucleotide; CAG chr11 5293526 5293545 5293542 +
tggcttcaagagtgaagctg

SEQ ID NO: 16602 - DNA, 20 bp, Artificial Sequence
  Synthetic oligonucleotide; CGG chr11 5293536 5293555 5293552 +
agtgaagctgcagaccttcg

SEQ ID NO: 16603 - DNA, 20 bp, Artificial Sequence
  Synthetic oligonucleotide; GAG chr11 5293540 5293559 5293556 +
aagctgcagaccttcgcggt

SEQ ID NO: 16604 - DNA, 20 bp, Artificial Sequence
  Synthetic oligonucleotide; CAG chr11 5293548 5293567 5293564 +
gaccttcgcggtgagcgtta

SEQ ID NO: 16605 - DNA, 20 bp, Artificial Sequence
  Synthetic oligonucleotide; AAG chr11 5293557 5293576 5293573 +
ggtgagcgttacagctcata

SEQ ID NO: 16606 - DNA, 20 bp, Artificial Sequence
  Synthetic oligonucleotide; AGG chr11 5293558 5293577 5293574 +
gtgagcgttacagctcataa

SEQ ID NO: 16607 - DNA, 20 bp, Artificial Sequence
  Synthetic oligonucleotide; CAG chr11 5293561 5293580 5293577 +
agcgttacagctcataaagg

SEQ ID NO: 16608 - DNA, 20 bp, Artificial Sequence
  Synthetic oligonucleotide; TAG chr11 5293566 5293585 5293582 +
tacagctcataaaggcagtg

SEQ ID NO: 16609 - DNA, 20 bp, Artificial Sequence
  Synthetic oligonucleotide; CAG chr11 5293576 5293595 5293592 +
aaaggcagtgtagacccaaa

SEQ ID NO: 16610 - DNA, 20 bp, Artificial Sequence
  Synthetic oligonucleotide; GAG chr11 5293580 5293599 5293596 +
gcagtgtagacccaaacagt

SEQ ID NO: 16611 - DNA, 20 bp, Artificial Sequence
  Synthetic oligonucleotide; CAG chr11 5293583 5293602 5293599 +
gtgtagacccaaacagtgag

SEQ ID NO: 16612 - DNA, 20 bp, Artificial Sequence
  Synthetic oligonucleotide; CAG chr11 5293586 5293605 5293602 +
tagacccaaacagtgagcag

SEQ ID NO: 16613 - DNA, 20 bp, Artificial Sequence
  Synthetic oligonucleotide; AAG chr11 5293590 5293609 5293606 +
cccaaacagtgagcagcagc

SEQ ID NO: 16614 - DNA, 20 bp, Artificial Sequence
  Synthetic oligonucleotide; AAG chr11 5293603 5293622 5293619 +
cagcagcaagatttattgca

SEQ ID NO: 16615 - DNA, 20 bp, Artificial Sequence
  Synthetic oligonucleotide; GAG chr11 5293605 5293624 5293621 +
gcagcaagatttattgcaaa

SEQ ID NO: 16616 - DNA, 20 bp, Artificial Sequence
  Synthetic oligonucleotide; AAG chr11 5293611 5293630 5293627 +
agatttattgcaaagagcga

SEQ ID NO: 16617 - DNA, 20 bp, Artificial Sequence
  Synthetic oligonucleotide; AAG chr11 5293618 5293637 5293634 +
ttgcaaagagcgaaagaaca

SEQ ID NO: 16618 - DNA, 20 bp, Artificial Sequence
  Synthetic oligonucleotide; CAG chr11 5293627 5293646 5293643 +
gcgaaagaacaaagcttcca

SEQ ID NO: 16619 - DNA, 20 bp, Artificial Sequence
  Synthetic oligonucleotide; TGG chr11 5293632 5293651 5293648 +
agaacaaagcttccacagtg

SEQ ID NO: 16620 - DNA, 20 bp, Artificial Sequence
  Synthetic oligonucleotide; AAG chr11 5293635 5293654 5293651 +
acaaagcttccacagtgtgg

SEQ ID NO: 16621 - DNA, 20 bp, Artificial Sequence
  Synthetic oligonucleotide; AGG chr11 5293636 5293655 5293652 +
caaagcttccacagtgtgga

SEQ ID NO: 16622 - DNA, 20 bp, Artificial Sequence
  Synthetic oligonucleotide; GGG chr11 5293637 5293656 5293653 +
aaagcttccacagtgtggaa

SEQ ID NO: 16623 - DNA, 20 bp, Artificial Sequence
  Synthetic oligonucleotide; GGG chr11 5293638 5293657 5293654 +
aagcttccacagtgtggaag

SEQ ID NO: 16624 - DNA, 20 bp, Artificial Sequence
  Synthetic oligonucleotide; GAG chr11 5293645 5293664 5293661 +
cacagtgtggaaggggaccc

SEQ ID NO: 16625 - DNA, 20 bp, Artificial Sequence
  Synthetic oligonucleotide; CGG chr11 5293648 5293667 5293664 +
agtgtggaaggggacccgag

SEQ ID NO: 16626 - DNA, 20 bp, Artificial Sequence
  Synthetic oligonucleotide; GGG chr11 5293649 5293668 5293665 +
gtgtggaaggggacccgagc

SEQ ID NO: 16627 - DNA, 20 bp, Artificial Sequence
  Synthetic oligonucleotide; TGG chr11 5293662 5293681 5293678 +
cccgagcgggttgccactgc

SEQ ID NO: 16628 - DNA, 20 bp, Artificial Sequence
  Synthetic oligonucleotide; CGG chr11 5293667 5293686 5293683 +
gcgggttgccactgctggct

SEQ ID NO: 16629 - DNA, 20 bp, Artificial Sequence
  Synthetic oligonucleotide; GGG chr11 5293668 5293687 5293684 +
cgggttgccactgctggctc

SEQ ID NO: 16630 - DNA, 20 bp, Artificial Sequence
  Synthetic oligonucleotide; CAG chr11 5293671 5293690 5293687 +
gttgccactgctggctcggg

SEQ ID NO: 16631 - DNA, 20 bp, Artificial Sequence
  Synthetic oligonucleotide; TGG chr11 5293694 5293713 5293710 +
cctgcttttattctcttatc

SEQ ID NO: 16632 - DNA, 20 bp, Artificial Sequence
  Synthetic oligonucleotide; TGG chr11 5293718 5293737 5293734 +
cccacccacatcctgctgat

SEQ ID NO: 16633 - DNA, 20 bp, Artificial Sequence
  Synthetic oligonucleotide; TAG chr11 5293721 5293740 5293737 +
acccacatcctgctgattgg

SEQ ID NO: 16634 - DNA, 20 bp, Artificial Sequence
  Synthetic oligonucleotide; GAG chr11 5293723 5293742 5293739 +
ccacatcctgctgattggta

SEQ ID NO: 16635 - DNA, 20 bp, Artificial Sequence
  Synthetic oligonucleotide; CAG chr11 5293728 5293747 5293744 +
tcctgctgattggtagagcc

SEQ ID NO: 16636 - DNA, 20 bp, Artificial Sequence
  Synthetic oligonucleotide; TGG chr11 5293731 5293750 5293747 +
tgctgattggtagagcccag

SEQ ID NO: 16637 - DNA, 20 bp, Artificial Sequence
  Synthetic oligonucleotide; CAG chr11 5293744 5293763 5293760 +
agcccagtggtctgttttga

SEQ ID NO: 16638 - DNA, 20 bp, Artificial Sequence
  Synthetic oligonucleotide; AGG chr11 5293745 5293764 5293761 +
gcccagtggtctgttttgac

SEQ ID NO: 16639 - DNA, 20 bp, Artificial Sequence
  Synthetic oligonucleotide; GGG chr11 5293746 5293765 5293762 +
cccagtggtctgttttgaca

SEQ ID NO: 16640 - DNA, 20 bp, Artificial Sequence
  Synthetic oligonucleotide; TGG chr11 5293756 5293775 5293772 +
tgttttgacagggcactgat

SEQ ID NO: 16641 - DNA, 20 bp, Artificial Sequence
  Synthetic oligonucleotide; GAG chr11 5293775 5293794 5293791 +
ttggtgcatttacaatccat

SEQ ID NO: 16642 - DNA, 20 bp, Artificial Sequence
  Synthetic oligonucleotide; TAG chr11 5293779 5293798 5293795 +
tgcatttacaatccatgagc

SEQ ID NO: 16643 - DNA, 20 bp, Artificial Sequence
  Synthetic oligonucleotide; AAG chr11 5293787 5293806 5293803 +
caatccatgagctagacaca

SEQ ID NO: 16644 - DNA, 20 bp, Artificial Sequence
  Synthetic oligonucleotide; AGG chr11 5293788 5293807 5293804 +
aatccatgagctagacacaa

SEQ ID NO: 16645 - DNA, 20 bp, Artificial Sequence
  Synthetic oligonucleotide; CAG chr11 5293807 5293826 5293823 +
aaggttctccacgtccccac

SEQ ID NO: 16646 - DNA, 20 bp, Artificial Sequence
  Synthetic oligonucleotide; TAG chr11 5293812 5293831 5293828 +
tctccacgtccccaccagat

SEQ ID NO: 16647 - DNA, 20 bp, Artificial Sequence
  Synthetic oligonucleotide; TAG chr11 5293816 5293835 5293832 +
cacgtccccaccagattagc

SEQ ID NO: 16648 - DNA, 20 bp, Artificial Sequence
  Synthetic oligonucleotide; CAG chr11 5293822 5293841 5293838 +
cccaccagattagctagata

SEQ ID NO: 16649 - DNA, 20 bp, Artificial Sequence
  Synthetic oligonucleotide; GAG chr11 5293824 5293843 5293840 +
caccagattagctagataca

SEQ ID NO: 16650 - DNA, 20 bp, Artificial Sequence
  Synthetic oligonucleotide; AAG chr11 5293837 5293856 5293853 +
agatacagagtgtccacaca

SEQ ID NO: 16651 - DNA, 20 bp, Artificial Sequence
  Synthetic oligonucleotide; AGG chr11 5293838 5293857 5293854 +
gatacagagtgtccacacaa

SEQ ID NO: 16652 - DNA, 20 bp, Artificial Sequence
  Synthetic oligonucleotide; AAG chr11 5293847 5293866 5293863 +
tgtccacacaaaggttctcc

SEQ ID NO: 16653 - DNA, 20 bp, Artificial Sequence
  Synthetic oligonucleotide; CAG chr11 5293857 5293876 5293873 +
aaggttctccaagtccccac

SEQ ID NO: 16654 - DNA, 20 bp, Artificial Sequence
  Synthetic oligonucleotide; GAG chr11 5293859 5293878 5293875 +
ggttctccaagtccccacca

SEQ ID NO: 16655 - DNA, 20 bp, Artificial Sequence
  Synthetic oligonucleotide; TAG chr11 5293862 5293881 5293878 +
tctccaagtccccaccagag

SEQ ID NO: 16656 - DNA, 20 bp, Artificial Sequence
  Synthetic oligonucleotide; TAG chr11 5293866 5293885 5293882 +
caagtccccaccagagtagc

SEQ ID NO: 16657 - DNA, 20 bp, Artificial Sequence
  Synthetic oligonucleotide; CAG chr11 5293872 5293891 5293888 +
cccaccagagtagctagata

SEQ ID NO: 16658 - DNA, 20 bp, Artificial Sequence
  Synthetic oligonucleotide; GAG chr11 5293874 5293893 5293890 +
caccagagtagctagataca

SEQ ID NO: 16659 - DNA, 20 bp, Artificial Sequence
  Synthetic oligonucleotide; TGG chr11 5293884 5293903 5293900 +
gctagatacagagtgttgat

SEQ ID NO: 16660 - DNA, 20 bp, Artificial Sequence
  Synthetic oligonucleotide; GAG chr11 5293903 5293922 5293919 +
ttggtgcattcacaaaccct

SEQ ID NO: 16661 - DNA, 20 bp, Artificial Sequence
  Synthetic oligonucleotide; TAG chr11 5293907 5293926 5293923 +
tgcattcacaaaccctgagc

SEQ ID NO: 16662 - DNA, 20 bp, Artificial Sequence
  Synthetic oligonucleotide; CAG chr11 5293913 5293932 5293929 +
cacaaaccctgagctagaca

SEQ ID NO: 16663 - DNA, 20 bp, Artificial Sequence
  Synthetic oligonucleotide; AGG chr11 5293914 5293933 5293930 +
acaaaccctgagctagacac

SEQ ID NO: 16664 - DNA, 20 bp, Artificial Sequence
  Synthetic oligonucleotide; GGG chr11 5293915 5293934 5293931 +
caaaccctgagctagacaca

SEQ ID NO: 16665 - DNA, 20 bp, Artificial Sequence
  Synthetic oligonucleotide; TGG chr11 5293925 5293944 5293941 +
gctagacacagggtgctgat

SEQ ID NO: 16666 - DNA, 20 bp, Artificial Sequence
  Synthetic oligonucleotide; GAG chr11 5293944 5293963 5293960 +
ttggtgtgtttacaaacctt

SEQ ID NO: 16667 - DNA, 20 bp, Artificial Sequence
  Synthetic oligonucleotide; TAG chr11 5293948 5293967 5293964 +
tgtgtttacaaaccttgagc

SEQ ID NO: 16668 - DNA, 20 bp, Artificial Sequence
  Synthetic oligonucleotide; CAG chr11 5293954 5293973 5293970 +
tacaaaccttgagctagata

SEQ ID NO: 16669 - DNA, 20 bp, Artificial Sequence
  Synthetic oligonucleotide; GAG chr11 5293963 5293982 5293979 +
tgagctagatacagactgcc

SEQ ID NO: 16670 - DNA, 20 bp, Artificial Sequence
  Synthetic oligonucleotide; TGG chr11 5293966 5293985 5293982 +
gctagatacagactgccgag

SEQ ID NO: 16671 - DNA, 20 bp, Artificial Sequence
  Synthetic oligonucleotide; GAG chr11 5293985 5294004 5294001 +
gtggtgtatttacaatccct

SEQ ID NO: 16672 - DNA, 20 bp, Artificial Sequence
  Synthetic oligonucleotide; TAG chr11 5293989 5294008 5294005 +
tgtatttacaatccctgagc

SEQ ID NO: 16673 - DNA, 20 bp, Artificial Sequence
  Synthetic oligonucleotide; AAG chr11 5293997 5294016 5294013 +
caatccctgagctagacata

SEQ ID NO: 16674 - DNA, 20 bp, Artificial Sequence
  Synthetic oligonucleotide; AGG chr11 5293998 5294017 5294014 +
aatccctgagctagacataa

SEQ ID NO: 16675 - DNA, 20 bp, Artificial Sequence
  Synthetic oligonucleotide; CAG chr11 5294017 5294036 5294033 +
aaggttctccacgtccccac

SEQ ID NO: 16676 - DNA, 20 bp, Artificial Sequence
  Synthetic oligonucleotide; GAG chr11 5294019 5294038 5294035 +
ggttctccacgtccccacca

SEQ ID NO: 16677 - DNA, 20 bp, Artificial Sequence
  Synthetic oligonucleotide; TAG chr11 5294022 5294041 5294038 +
tctccacgtccccaccagag

SEQ ID NO: 16678 - DNA, 20 bp, Artificial Sequence
  Synthetic oligonucleotide; TAG chr11 5294026 5294045 5294042 +
cacgtccccaccagagtagc

SEQ ID NO: 16679 - DNA, 20 bp, Artificial Sequence
  Synthetic oligonucleotide; CAG chr11 5294032 5294051 5294048 +
cccaccagagtagctagata

SEQ ID NO: 16680 - DNA, 20 bp, Artificial Sequence
  Synthetic oligonucleotide; GAG chr11 5294034 5294053 5294050 +
caccagagtagctagataca

SEQ ID NO: 16681 - DNA, 20 bp, Artificial Sequence
  Synthetic oligonucleotide; TGG chr11 5294044 5294063 5294060 +
gctagatacagagtgttgat

SEQ ID NO: 16682 - DNA, 20 bp, Artificial Sequence
  Synthetic oligonucleotide; GAG chr11 5294063 5294082 5294079 +
ttggtgcattcacaaaccct

SEQ ID NO: 16683 - DNA, 20 bp, Artificial Sequence
  Synthetic oligonucleotide; TAG chr11 5294067 5294086 5294083 +
tgcattcacaaaccctgagc

SEQ ID NO: 16684 - DNA, 20 bp, Artificial Sequence
  Synthetic oligonucleotide; CAG chr11 5294073 5294092 5294089 +
cacaaaccctgagctagaca

SEQ ID NO: 16685 - DNA, 20 bp, Artificial Sequence
  Synthetic oligonucleotide; AGG chr11 5294074 5294093 5294090 +
acaaaccctgagctagacac

SEQ ID NO: 16686 - DNA, 20 bp, Artificial Sequence
  Synthetic oligonucleotide; GGG chr11 5294075 5294094 5294091 +
caaaccctgagctagacaca

SEQ ID NO: 16687 - DNA, 20 bp, Artificial Sequence
  Synthetic oligonucleotide; TGG chr11 5294085 5294104 5294101 +
gctagacacagggtgctgat

SEQ ID NO: 16688 - DNA, 20 bp, Artificial Sequence
  Synthetic oligonucleotide; GAG chr11 5294104 5294123 5294120 +
ttggtgtgtttacaaacctt

SEQ ID NO: 16689 - DNA, 20 bp, Artificial Sequence
  Synthetic oligonucleotide; TAG chr11 5294108 5294127 5294124 +
tgtgtttacaaaccttgagc

SEQ ID NO: 16690 - DNA, 20 bp, Artificial Sequence
  Synthetic oligonucleotide; CAG chr11 5294114 5294133 5294130 +
tacaaaccttgagctagata

SEQ ID NO: 16691 - DNA, 20 bp, Artificial Sequence
  Synthetic oligonucleotide; TGG chr11 5294126 5294145 5294142 +
gctagatacagactgccgat

SEQ ID NO: 16692 - DNA, 20 bp, Artificial Sequence
  Synthetic oligonucleotide; GAG chr11 5294145 5294164 5294161 +
ttggtgtatttacaatccct

SEQ ID NO: 16693 - DNA, 20 bp, Artificial Sequence
  Synthetic oligonucleotide; TAG chr11 5294149 5294168 5294165 +
tgtatttacaatccctgagc

SEQ ID NO: 16694 - DNA, 20 bp, Artificial Sequence
  Synthetic oligonucleotide; AAG chr11 5294157 5294176 5294173 +
caatccctgagctagacata

SEQ ID NO: 16695 - DNA, 20 bp, Artificial Sequence
  Synthetic oligonucleotide; AGG chr11 5294158 5294177 5294174 +
aatccctgagctagacataa

SEQ ID NO: 16696 - DNA, 20 bp, Artificial Sequence
  Synthetic oligonucleotide; AAG chr11 5294167 5294186 5294183 +
gctagacataaaggttctcc

SEQ ID NO: 16697 - DNA, 20 bp, Artificial Sequence
  Synthetic oligonucleotide; AGG chr11 5294168 5294187 5294184 +
ctagacataaaggttctcca

SEQ ID NO: 16698 - DNA, 20 bp, Artificial Sequence
  Synthetic oligonucleotide; CAG chr11 5294177 5294196 5294193 +
aaggttctccaaggccccac

SEQ ID NO: 16699 - DNA, 20 bp, Artificial Sequence
  Synthetic oligonucleotide; GAG chr11 5294179 5294198 5294195 +
ggttctccaaggccccacca

SEQ ID NO: 16700 - DNA, 20 bp, Artificial Sequence
  Synthetic oligonucleotide; TAG chr11 5294182 5294201 5294198 +
tctccaaggccccaccagag

SEQ ID NO: 16701 - DNA, 20 bp, Artificial Sequence
  Synthetic oligonucleotide; TAG chr11 5294186 5294205 5294202 +
caaggccccaccagagtagc

SEQ ID NO: 16702 - DNA, 20 bp, Artificial Sequence
  Synthetic oligonucleotide; TAG chr11 5294190 5294209 5294206 +
gccccaccagagtagctaga

SEQ ID NO: 16703 - DNA, 20 bp, Artificial Sequence
  Synthetic oligonucleotide; GAG chr11 5294192 5294211 5294208 +
cccaccagagtagctagata

SEQ ID NO: 16704 - DNA, 20 bp, Artificial Sequence
  Synthetic oligonucleotide; TGG chr11 5294202 5294221 5294218 +
tagctagatagagtgttgat

SEQ ID NO: 16705 - DNA, 20 bp, Artificial Sequence
  Synthetic oligonucleotide; GAG chr11 5294221 5294240 5294237 +
ttggtgcattcacaaaccct

SEQ ID NO: 16706 - DNA, 20 bp, Artificial Sequence
  Synthetic oligonucleotide; TAG chr11 5294225 5294244 5294241 +
tgcattcacaaaccctgagc

SEQ ID NO: 16707 - DNA, 20 bp, Artificial Sequence
  Synthetic oligonucleotide; CAG chr11 5294231 5294250 5294247 +
cacaaaccctgagctagaca

SEQ ID NO: 16708 - DNA, 20 bp, Artificial Sequence
  Synthetic oligonucleotide; AGG chr11 5294232 5294251 5294248 +
acaaaccctgagctagacac

SEQ ID NO: 16709 - DNA, 20 bp, Artificial Sequence
  Synthetic oligonucleotide; GGG chr11 5294233 5294252 5294249 +
caaaccctgagctagacaca

SEQ ID NO: 16710 - DNA, 20 bp, Artificial Sequence
  Synthetic oligonucleotide; TGG chr11 5294243 5294262 5294259 +
gctagacacagggtgctgat

SEQ ID NO: 16711 - DNA, 20 bp, Artificial Sequence
  Synthetic oligonucleotide; GAG chr11 5294262 5294281 5294278 +
ttggtgtgtttacaaacctt

SEQ ID NO: 16712 - DNA, 20 bp, Artificial Sequence
  Synthetic oligonucleotide; TAG chr11 5294266 5294285 5294282 +
tgtgtttacaaaccttgagc

SEQ ID NO: 16713 - DNA, 20 bp, Artificial Sequence
  Synthetic oligonucleotide; CAG chr11 5294272 5294291 5294288 +
tacaaaccttgagctagata

SEQ ID NO: 16714 - DNA, 20 bp, Artificial Sequence
  Synthetic oligonucleotide; GAG chr11 5294274 5294293 5294290 +
caaaccttgagctagataca

SEQ ID NO: 16715 - DNA, 20 bp, Artificial Sequence
  Synthetic oligonucleotide; TGG chr11 5294284 5294303 5294300 +
gctagatacagagtgccaat

SEQ ID NO: 16716 - DNA, 20 bp, Artificial Sequence
  Synthetic oligonucleotide; TAG chr11 5294307 5294326 5294323 +
tgtatttacaatcccttatc

SEQ ID NO: 16717 - DNA, 20 bp, Artificial Sequence
  Synthetic oligonucleotide; AAG chr11 5294314 5294333 5294330 +
acaatcccttatctagacat

SEQ ID NO: 16718 - DNA, 20 bp, Artificial Sequence
  Synthetic oligonucleotide; AGG chr11 5294315 5294334 5294331 +
caatcccttatctagacata

SEQ ID NO: 16719 - DNA, 20 bp, Artificial Sequence
  Synthetic oligonucleotide; GGG chr11 5294316 5294335 5294332 +
aatcccttatctagacataa

SEQ ID NO: 16720 - DNA, 20 bp, Artificial Sequence
  Synthetic oligonucleotide; CAG chr11 5294332 5294351 5294348 +
ataagggttcttcgcatccc

SEQ ID NO: 16721 - DNA, 20 bp, Artificial Sequence
  Synthetic oligonucleotide; CAG chr11 5294341 5294360 5294357 +
cttcgcatccccagcaaact

SEQ ID NO: 16722 - DNA, 20 bp, Artificial Sequence
  Synthetic oligonucleotide; AGG chr11 5294342 5294361 5294358 +
ttcgcatccccagcaaactc

SEQ ID NO: 16723 - DNA, 20 bp, Artificial Sequence
  Synthetic oligonucleotide; GAG chr11 5294344 5294363 5294360 +
cgcatccccagcaaactcag

SEQ ID NO: 16724 - DNA, 20 bp, Artificial Sequence
  Synthetic oligonucleotide; TAG chr11 5294349 5294368 5294365 +
ccccagcaaactcaggagcc

SEQ ID NO: 16725 - DNA, 20 bp, Artificial Sequence
  Synthetic oligonucleotide; CGG chr11 5294353 5294372 5294369 +
agcaaactcaggagcctagc

SEQ ID NO: 16726 - DNA, 20 bp, Artificial Sequence
  Synthetic oligonucleotide; CAG chr11 5294363 5294382 5294379 +
ggagcctagccggcttcacc

SEQ ID NO: 16727 - DNA, 20 bp, Artificial Sequence
  Synthetic oligonucleotide; TGG chr11 5294366 5294385 5294382 +
gcctagccggcttcacccag

SEQ ID NO: 16728 - DNA, 20 bp, Artificial Sequence
  Synthetic oligonucleotide; TGG chr11 5294379 5294398 5294395 +
cacccagtggatcccgcacc

SEQ ID NO: 16729 - DNA, 20 bp, Artificial Sequence
  Synthetic oligonucleotide; GGG chr11 5294380 5294399 5294396 +
acccagtggatcccgcacct

SEQ ID NO: 16730 - DNA, 20 bp, Artificial Sequence
  Synthetic oligonucleotide; CAG chr11 5294386 5294405 5294402 +
tggatcccgcacctgggctg

SEQ ID NO: 16731 - DNA, 20 bp, Artificial Sequence
  Synthetic oligonucleotide; AGG chr11 5294387 5294406 5294403 +
ggatcccgcacctgggctgc

SEQ ID NO: 16732 - DNA, 20 bp, Artificial Sequence
  Synthetic oligonucleotide; GGG chr11 5294388 5294407 5294404 +
gatcccgcacctgggctgca

SEQ ID NO: 16733 - DNA, 20 bp, Artificial Sequence
  Synthetic oligonucleotide; GGG chr11 5294389 5294408 5294405 +
atcccgcacctgggctgcag

SEQ ID NO: 16734 - DNA, 20 bp, Artificial Sequence
  Synthetic oligonucleotide; GGG chr11 5294390 5294409 5294406 +
tcccgcacctgggctgcagg

SEQ ID NO: 16735 - DNA, 20 bp, Artificial Sequence
  Synthetic oligonucleotide; GAG chr11 5294392 5294411 5294408 +
ccgcacctgggctgcagggg

SEQ ID NO: 16736 - DNA, 20 bp, Artificial Sequence
  Synthetic oligonucleotide; CAG chr11 5294403 5294422 5294419 +
ctgcagggggagctgcctgc

SEQ ID NO: 16737 - DNA, 20 bp, Artificial Sequence
  Synthetic oligonucleotide; CAG chr11 5294431 5294450 5294447 +
tgccgtgcgcccgcactctt

SEQ ID NO: 16738 - DNA, 20 bp, Artificial Sequence
  Synthetic oligonucleotide; TGG chr11 5294438 5294457 5294454 +
cgcccgcactcttcagccct

SEQ ID NO: 16739 - DNA, 20 bp, Artificial Sequence
  Synthetic oligonucleotide; GGG chr11 5294439 5294458 5294455 +
gcccgcactcttcagccctt

SEQ ID NO: 16740 - DNA, 20 bp, Artificial Sequence
  Synthetic oligonucleotide; TGG chr11 5294442 5294461 5294458 +
cgcactcttcagcccttggg

SEQ ID NO: 16741 - DNA, 20 bp, Artificial Sequence
  Synthetic oligonucleotide; TGG chr11 5294449 5294468 5294465 +
ttcagcccttgggtggtcga

SEQ ID NO: 16742 - DNA, 20 bp, Artificial Sequence
  Synthetic oligonucleotide; GGG chr11 5294450 5294469 5294466 +
tcagcccttgggtggtcgat

SEQ ID NO: 16743 - DNA, 20 bp, Artificial Sequence
  Synthetic oligonucleotide; TGG chr11 5294455 5294474 5294471 +
ccttgggtggtcgatgggac

SEQ ID NO: 16744 - DNA, 20 bp, Artificial Sequence
  Synthetic oligonucleotide; GGG chr11 5294456 5294475 5294472 +
cttgggtggtcgatgggact

SEQ ID NO: 16745 - DNA, 20 bp, Artificial Sequence
  Synthetic oligonucleotide; TGG chr11 5294464 5294483 5294480 +
gtcgatgggactgggtgccc

SEQ ID NO: 16746 - DNA, 20 bp, Artificial Sequence
  Synthetic oligonucleotide; GAG chr11 5294466 5294485 5294482 +
cgatgggactgggtgccctg

SEQ ID NO: 16747 - DNA, 20 bp, Artificial Sequence
  Synthetic oligonucleotide; CAG chr11 5294469 5294488 5294485 +
tgggactgggtgccctggag

SEQ ID NO: 16748 - DNA, 20 bp, Artificial Sequence
  Synthetic oligonucleotide; AGG chr11 5294470 5294489 5294486 +
gggactgggtgccctggagc

SEQ ID NO: 16749 - DNA, 20 bp, Artificial Sequence
  Synthetic oligonucleotide; GGG chr11 5294471 5294490 5294487 +
ggactgggtgccctggagca

SEQ ID NO: 16750 - DNA, 20 bp, Artificial Sequence
  Synthetic oligonucleotide; GGG chr11 5294472 5294491 5294488 +
gactgggtgccctggagcag

SEQ ID NO: 16751 - DNA, 20 bp, Artificial Sequence
  Synthetic oligonucleotide; GGG chr11 5294473 5294492 5294489 +
actgggtgccctggagcagg

SEQ ID NO: 16752 - DNA, 20 bp, Artificial Sequence
  Synthetic oligonucleotide; CGG chr11 5294476 5294495 5294492 +
gggtgccctggagcaggggg

SEQ ID NO: 16753 - DNA, 20 bp, Artificial Sequence
  Synthetic oligonucleotide; CGG chr11 5294486 5294505 5294502 +
gagcagggggcggcgctcgt

SEQ ID NO: 16754 - DNA, 20 bp, Artificial Sequence
  Synthetic oligonucleotide; GAG chr11 5294490 5294509 5294506 +
agggggcggcgctcgtcggc

SEQ ID NO: 16755 - DNA, 20 bp, Artificial Sequence
  Synthetic oligonucleotide; AGG chr11 5294491 5294510 5294507 +
gggggcggcgctcgtcggcg

SEQ ID NO: 16756 - DNA, 20 bp, Artificial Sequence
  Synthetic oligonucleotide; CGG chr11 5294496 5294515 5294512 +
cggcgctcgtcggcgaggct

SEQ ID NO: 16757 - DNA, 20 bp, Artificial Sequence
  Synthetic oligonucleotide; GGG chr11 5294497 5294516 5294513 +
ggcgctcgtcggcgaggctc

SEQ ID NO: 16758 - DNA, 20 bp, Artificial Sequence
  Synthetic oligonucleotide; CAG chr11 5294505 5294524 5294521 +
tcggcgaggctcgggccgca

SEQ ID NO: 16759 - DNA, 20 bp, Artificial Sequence
  Synthetic oligonucleotide; AGG chr11 5294506 5294525 5294522 +
cggcgaggctcgggccgcac

SEQ ID NO: 16760 - DNA, 20 bp, Artificial Sequence
  Synthetic oligonucleotide; GAG chr11 5294508 5294527 5294524 +
gcgaggctcgggccgcacag

SEQ ID NO: 16761 - DNA, 20 bp, Artificial Sequence
  Synthetic oligonucleotide; AAG chr11 5294517 5294536 5294533 +
gggccgcacaggagcccatg

SEQ ID NO: 16762 - DNA, 20 bp, Artificial Sequence
  Synthetic oligonucleotide; AGG chr11 5294518 5294537 5294534 +
ggccgcacaggagcccatga

SEQ ID NO: 16763 - DNA, 20 bp, Artificial Sequence
  Synthetic oligonucleotide; TGG chr11 5294521 5294540 5294537 +
cgcacaggagcccatgaagg

SEQ ID NO: 16764 - DNA, 20 bp, Artificial Sequence
  Synthetic oligonucleotide; GGG chr11 5294522 5294541 5294538 +
gcacaggagcccatgaaggt

SEQ ID NO: 16765 - DNA, 20 bp, Artificial Sequence
  Synthetic oligonucleotide; GGG chr11 5294523 5294542 5294539 +
cacaggagcccatgaaggtg

SEQ ID NO: 16766 - DNA, 20 bp, Artificial Sequence
  Synthetic oligonucleotide; GAG chr11 5294525 5294544 5294541 +
caggagcccatgaaggtggg

SEQ ID NO: 16767 - DNA, 20 bp, Artificial Sequence
  Synthetic oligonucleotide; AGG chr11 5294526 5294545 5294542 +
aggagcccatgaaggtgggg

SEQ ID NO: 16768 - DNA, 20 bp, Artificial Sequence
  Synthetic oligonucleotide; CAG chr11 5294531 5294550 5294547 +
cccatgaaggtggggaggct

SEQ ID NO: 16769 - DNA, 20 bp, Artificial Sequence
  Synthetic oligonucleotide; AGG chr11 5294532 5294551 5294548 +
ccatgaaggtggggaggctc

SEQ ID NO: 16770 - DNA, 20 bp, Artificial Sequence
  Synthetic oligonucleotide; TGG chr11 5294537 5294556 5294553 +
aaggtggggaggctcaggca

SEQ ID NO: 16771 - DNA, 20 bp, Artificial Sequence
  Synthetic oligonucleotide; CAG chr11 5294547 5294566 5294563 +
ggctcaggcatggcgcgctg

SEQ ID NO: 16772 - DNA, 20 bp, Artificial Sequence
  Synthetic oligonucleotide; AGG chr11 5294548 5294567 5294564 +
gctcaggcatggcgcgctgc

SEQ ID NO: 16773 - DNA, 20 bp, Artificial Sequence
  Synthetic oligonucleotide; GAG chr11 5294555 5294574 5294571 +
catggcgcgctgcaggtccc

SEQ ID NO: 16774 - DNA, 20 bp, Artificial Sequence
  Synthetic oligonucleotide; CAG chr11 5294568 5294587 5294584 +
aggtcccgagccctgccccg

SEQ ID NO: 16775 - DNA, 20 bp, Artificial Sequence
  Synthetic oligonucleotide; AGG chr11 5294569 5294588 5294585 +
ggtcccgagccctgccccgc

SEQ ID NO: 16776 - DNA, 20 bp, Artificial Sequence
  Synthetic oligonucleotide; AAG chr11 5294572 5294591 5294588 +
cccgagccctgccccgcagg

SEQ ID NO: 16777 - DNA, 20 bp, Artificial Sequence
  Synthetic oligonucleotide; AGG chr11 5294573 5294592 5294589 +
ccgagccctgccccgcagga

SEQ ID NO: 16778 - DNA, 20 bp, Artificial Sequence
  Synthetic oligonucleotide; CAG chr11 5294576 5294595 5294592 +
agccctgccccgcaggaagg

SEQ ID NO: 16779 - DNA, 20 bp, Artificial Sequence
  Synthetic oligonucleotide; AAG chr11 5294581 5294600 5294597 +
tgccccgcaggaaggcagct

SEQ ID NO: 16780 - DNA, 20 bp, Artificial Sequence
  Synthetic oligonucleotide; AGG chr11 5294582 5294601 5294598 +
gccccgcaggaaggcagcta

SEQ ID NO: 16781 - DNA, 20 bp, Artificial Sequence
  Synthetic oligonucleotide; CGG chr11 5294587 5294606 5294603 +
gcaggaaggcagctaaggcc

SEQ ID NO: 16782 - DNA, 20 bp, Artificial Sequence
  Synthetic oligonucleotide; GAG chr11 5294591 5294610 5294607 +
gaaggcagctaaggcccggc

SEQ ID NO: 16783 - DNA, 20 bp, Artificial Sequence
  Synthetic oligonucleotide; AGG chr11 5294592 5294611 5294608 +
aaggcagctaaggcccggcg

SEQ ID NO: 16784 - DNA, 20 bp, Artificial Sequence
  Synthetic oligonucleotide; GAG chr11 5294599 5294618 5294615 +
ctaaggcccggcgaggaatt

SEQ ID NO: 16785 - DNA, 20 bp, Artificial Sequence
  Synthetic oligonucleotide; CAG chr11 5294604 5294623 5294620 +
gcccggcgaggaattgagca

SEQ ID NO: 16786 - DNA, 20 bp, Artificial Sequence
  Synthetic oligonucleotide; CAG chr11 5294607 5294626 5294623 +
cggcgaggaattgagcacag

SEQ ID NO: 16787 - DNA, 20 bp, Artificial Sequence
  Synthetic oligonucleotide; TGG chr11 5294614 5294633 5294630 +
gaattgagcacagcagctgc

SEQ ID NO: 16788 - DNA, 20 bp, Artificial Sequence
  Synthetic oligonucleotide; CAG chr11 5294619 5294638 5294635 +
gagcacagcagctgctggcc

SEQ ID NO: 16789 - DNA, 20 bp, Artificial Sequence
  Synthetic oligonucleotide; AGG chr11 5294620 5294639 5294636 +
agcacagcagctgctggccc

SEQ ID NO: 16790 - DNA, 20 bp, Artificial Sequence
  Synthetic oligonucleotide; AAG chr11 5294627 5294646 5294643 +
cagctgctggcccaggtgct

SEQ ID NO: 16791 - DNA, 20 bp, Artificial Sequence
  Synthetic oligonucleotide; CGG chr11 5294644 5294663 5294660 +
gctaagcccctcactgcccg

SEQ ID NO: 16792 - DNA, 20 bp, Artificial Sequence
  Synthetic oligonucleotide; CGG chr11 5294648 5294667 5294664 +
agcccctcactgcccgcggc

SEQ ID NO: 16793 - DNA, 20 bp, Artificial Sequence
  Synthetic oligonucleotide; TGG chr11 5294651 5294670 5294667 +
ccctcactgcccgcggccgg

SEQ ID NO: 16794 - DNA, 20 bp, Artificial Sequence
  Synthetic oligonucleotide; GGG chr11 5294652 5294671 5294668 +
cctcactgcccgcggccggt

SEQ ID NO: 16795 - DNA, 20 bp, Artificial Sequence
  Synthetic oligonucleotide; GGG chr11 5294653 5294672 5294669 +
ctcactgcccgcggccggtg

SEQ ID NO: 16796 - DNA, 20 bp, Artificial Sequence
  Synthetic oligonucleotide; CGG chr11 5294657 5294676 5294673 +
ctgcccgcggccggtggggc

SEQ ID NO: 16797 - DNA, 20 bp, Artificial Sequence
  Synthetic oligonucleotide; TGG chr11 5294661 5294680 5294677 +
ccgcggccggtggggccggc

SEQ ID NO: 16798 - DNA, 20 bp, Artificial Sequence
  Synthetic oligonucleotide; CGG chr11 5294664 5294683 5294680 +
cggccggtggggccggctgg

SEQ ID NO: 16799 - DNA, 20 bp, Artificial Sequence
  Synthetic oligonucleotide; GAG chr11 5294671 5294690 5294687 +
tggggccggctggcggctcc

SEQ ID NO: 16800 - DNA, 20 bp, Artificial Sequence
  Synthetic oligonucleotide; CGG chr11 5294676 5294695 5294692 +
ccggctggcggctccgagtg

SEQ ID NO: 16801 - DNA, 20 bp, Artificial Sequence
  Synthetic oligonucleotide; GGG chr11 5294677 5294696 5294693 +
cggctggcggctccgagtgc

SEQ ID NO: 16802 - DNA, 20 bp, Artificial Sequence
  Synthetic oligonucleotide; GGG chr11 5294678 5294697 5294694 +
ggctggcggctccgagtgcg

SEQ ID NO: 16803 - DNA, 20 bp, Artificial Sequence
  Synthetic oligonucleotide; CGG chr11 5294685 5294704 5294701 +
ggctccgagtgcggggtcct

SEQ ID NO: 16804 - DNA, 20 bp, Artificial Sequence
  Synthetic oligonucleotide; GAG chr11 5294687 5294706 5294703 +
ctccgagtgcggggtcctcg

SEQ ID NO: 16805 - DNA, 20 bp, Artificial Sequence
  Synthetic oligonucleotide; CGG chr11 5294702 5294721 5294718 +
cctcggagcccatgcccacc

SEQ ID NO: 16806 - DNA, 20 bp, Artificial Sequence
  Synthetic oligonucleotide; AAG chr11 5294714 5294733 5294730 +
tgcccacccggaactccctc

SEQ ID NO: 16807 - DNA, 20 bp, Artificial Sequence
  Synthetic oligonucleotide; CGG chr11 5294719 5294738 5294735 +
acccggaactccctcaagca

SEQ ID NO: 16808 - DNA, 20 bp, Artificial Sequence
  Synthetic oligonucleotide; CAG chr11 5294726 5294745 5294742 +
actccctcaagcacggcgca

SEQ ID NO: 16809 - DNA, 20 bp, Artificial Sequence
  Synthetic oligonucleotide; CGG chr11 5294731 5294750 5294747 +
ctcaagcacggcgcacagcc

SEQ ID NO: 16810 - DNA, 20 bp, Artificial Sequence
  Synthetic oligonucleotide; TGG chr11 5294765 5294784 5294781 +
gtctgtccctccacacctcc

SEQ ID NO: 16811 - DNA, 20 bp, Artificial Sequence
  Synthetic oligonucleotide; AAG chr11 5294769 5294788 5294785 +
gtccctccacacctcctggc

SEQ ID NO: 16812 - DNA, 20 bp, Artificial Sequence
  Synthetic oligonucleotide; GAG chr11 5294774 5294793 5294790 +
tccacacctcctggcaagct

SEQ ID NO: 16813 - DNA, 20 bp, Artificial Sequence
  Synthetic oligonucleotide; AGG chr11 5294775 5294794 5294791 +
ccacacctcctggcaagctg

SEQ ID NO: 16814 - DNA, 20 bp, Artificial Sequence
  Synthetic oligonucleotide; GGG chr11 5294776 5294795 5294792 +
cacacctcctggcaagctga

SEQ ID NO: 16815 - DNA, 20 bp, Artificial Sequence
  Synthetic oligonucleotide; GAG chr11 5294778 5294797 5294794 +
cacctcctggcaagctgagg

SEQ ID NO: 16816 - DNA, 20 bp, Artificial Sequence
  Synthetic oligonucleotide; CGG chr11 5294782 5294801 5294798 +
tcctggcaagctgagggagc

SEQ ID NO: 16817 - DNA, 20 bp, Artificial Sequence
  Synthetic oligonucleotide; TGG chr11 5294788 5294807 5294804 +
caagctgagggagccggctc

SEQ ID NO: 16818 - DNA, 20 bp, Artificial Sequence
  Synthetic oligonucleotide; TGG chr11 5294794 5294813 5294810 +
gagggagccggctctggcct

SEQ ID NO: 16819 - DNA, 20 bp, Artificial Sequence
  Synthetic oligonucleotide; CAG chr11 5294798 5294817 5294814 +
gagccggctctggccttggc

SEQ ID NO: 16820 - DNA, 20 bp, Artificial Sequence
  Synthetic oligonucleotide; CAG chr11 5294803 5294822 5294819 +
ggctctggccttggccagcc

SEQ ID NO: 16821 - DNA, 20 bp, Artificial Sequence
  Synthetic oligonucleotide; AAG chr11 5294808 5294827 5294824 +
tggccttggccagcccagaa

SEQ ID NO: 16822 - DNA, 20 bp, Artificial Sequence
  Synthetic oligonucleotide; AGG chr11 5294809 5294828 5294825 +
ggccttggccagcccagaaa

SEQ ID NO: 16823 - DNA, 20 bp, Artificial Sequence
  Synthetic oligonucleotide; GGG chr11 5294810 5294829 5294826 +
gccttggccagcccagaaaa

SEQ ID NO: 16824 - DNA, 20 bp, Artificial Sequence
  Synthetic oligonucleotide; CAG chr11 5294819 5294838 5294835 +
agcccagaaaagggctccca

SEQ ID NO: 16825 - DNA, 20 bp, Artificial Sequence
  Synthetic oligonucleotide; CAG chr11 5294824 5294843 5294840 +
agaaaagggctcccacagtg

SEQ ID NO: 16826 - DNA, 20 bp, Artificial Sequence
  Synthetic oligonucleotide; CGG chr11 5294827 5294846 5294843 +
aaagggctcccacagtgcag

SEQ ID NO: 16827 - DNA, 20 bp, Artificial Sequence
  Synthetic oligonucleotide; CGG chr11 5294831 5294850 5294847 +
ggctcccacagtgcagcggc

SEQ ID NO: 16828 - DNA, 20 bp, Artificial Sequence
  Synthetic oligonucleotide; AAG chr11 5294837 5294856 5294853 +
cacagtgcagcggccggctg

SEQ ID NO: 16829 - DNA, 20 bp, Artificial Sequence
  Synthetic oligonucleotide; AGG chr11 5294838 5294857 5294854 +
acagtgcagcggccggctga

SEQ ID NO: 16830 - DNA, 20 bp, Artificial Sequence
  Synthetic oligonucleotide; GGG chr11 5294839 5294858 5294855 +
cagtgcagcggccggctgaa

SEQ ID NO: 16831 - DNA, 20 bp, Artificial Sequence
  Synthetic oligonucleotide; AAG chr11 5294848 5294867 5294864 +
ggccggctgaagggctcctc

SEQ ID NO: 16832 - DNA, 20 bp, Artificial Sequence
  Synthetic oligonucleotide; TGG chr11 5294862 5294881 5294878 +
ctcctcaagtgccaccaatg

SEQ ID NO: 16833 - DNA, 20 bp, Artificial Sequence
  Synthetic oligonucleotide; GGG chr11 5294863 5294882 5294879 +
tcctcaagtgccaccaatgt

SEQ ID NO: 16834 - DNA, 20 bp, Artificial Sequence
  Synthetic oligonucleotide; GAG chr11 5294865 5294884 5294881 +
ctcaagtgccaccaatgtgg

SEQ ID NO: 16835 - DNA, 20 bp, Artificial Sequence
  Synthetic oligonucleotide; CAG chr11 5294870 5294889 5294886 +
gtgccaccaatgtgggagcc

SEQ ID NO: 16836 - DNA, 20 bp, Artificial Sequence
  Synthetic oligonucleotide; AGG chr11 5294871 5294890 5294887 +
tgccaccaatgtgggagccc

SEQ ID NO: 16837 - DNA, 20 bp, Artificial Sequence
  Synthetic oligonucleotide; CAG chr11 5294874 5294893 5294890 +
caccaatgtgggagcccagg

SEQ ID NO: 16838 - DNA, 20 bp, Artificial Sequence
  Synthetic oligonucleotide; GAG chr11 5294876 5294895 5294892 +
ccaatgtgggagcccaggca

SEQ ID NO: 16839 - DNA, 20 bp, Artificial Sequence
  Synthetic oligonucleotide; AGG chr11 5294877 5294896 5294893 +
caatgtgggagcccaggcag

SEQ ID NO: 16840 - DNA, 20 bp, Artificial Sequence
  Synthetic oligonucleotide; GAG chr11 5294879 5294898 5294895 +
atgtgggagcccaggcagag

SEQ ID NO: 16841 - DNA, 20 bp, Artificial Sequence
  Synthetic oligonucleotide; AGG chr11 5294880 5294899 5294896 +
tgtgggagcccaggcagagg

SEQ ID NO: 16842 - DNA, 20 bp, Artificial Sequence
  Synthetic oligonucleotide; AAG chr11 5294887 5294906 5294903 +
gcccaggcagaggaggcgcc

SEQ ID NO: 16843 - DNA, 20 bp, Artificial Sequence
  Synthetic oligonucleotide; GAG chr11 5294889 5294908 5294905 +
ccaggcagaggaggcgccaa

SEQ ID NO: 16844 - DNA, 20 bp, Artificial Sequence
  Synthetic oligonucleotide; GAG chr11 5294893 5294912 5294909 +
gcagaggaggcgccaagagc

SEQ ID NO: 16845 - DNA, 20 bp, Artificial Sequence
  Synthetic oligonucleotide; GAG chr11 5294897 5294916 5294913 +
aggaggcgccaagagcgagc

SEQ ID NO: 16846 - DNA, 20 bp, Artificial Sequence
  Synthetic oligonucleotide; AGG chr11 5294898 5294917 5294914 +
ggaggcgccaagagcgagcg

SEQ ID NO: 16847 - DNA, 20 bp, Artificial Sequence
  Synthetic oligonucleotide; GGG chr11 5294899 5294918 5294915 +
gaggcgccaagagcgagcga

SEQ ID NO: 16848 - DNA, 20 bp, Artificial Sequence
  Synthetic oligonucleotide; GAG chr11 5294906 5294925 5294922 +
caagagcgagcgagggctgt

SEQ ID NO: 16849 - DNA, 20 bp, Artificial Sequence
  Synthetic oligonucleotide; AGG chr11 5294907 5294926 5294923 +
aagagcgagcgagggctgtg

SEQ ID NO: 16850 - DNA, 20 bp, Artificial Sequence
  Synthetic oligonucleotide; CAG chr11 5294915 5294934 5294931 +
gcgagggctgtgaggactgc

SEQ ID NO: 16851 - DNA, 20 bp, Artificial Sequence
  Synthetic oligonucleotide; TAG chr11 5294946 5294965 5294962 +
cacctctcaatactaatcac

SEQ ID NO: 16852 - DNA, 20 bp, Artificial Sequence
  Synthetic oligonucleotide; TAG chr11 5294953 5294972 5294969 +
caatactaatcactagtaat

SEQ ID NO: 16853 - DNA, 20 bp, Artificial Sequence
  Synthetic oligonucleotide; CAG chr11 5294988 5295007 5295004 +
ccctgtgcttccaaaaataa

SEQ ID NO: 16854 - DNA, 20 bp, Artificial Sequence
  Synthetic oligonucleotide; AGG chr11 5294989 5295008 5295005 +
cctgtgcttccaaaaataac

SEQ ID NO: 16855 - DNA, 20 bp, Artificial Sequence
  Synthetic oligonucleotide; AAG chr11 5295010 5295029 5295026 +
ggaatattattgtaaaatca

SEQ ID NO: 16856 - DNA, 20 bp, Artificial Sequence
  Synthetic oligonucleotide; AGG chr11 5295011 5295030 5295027 +
gaatattattgtaaaatcaa

SEQ ID NO: 16857 - DNA, 20 bp, Artificial Sequence
  Synthetic oligonucleotide; AAG chr11 5295043 5295062 5295059 +
ccatatgttttattatgttt

SEQ ID NO: 16858 - DNA, 20 bp, Artificial Sequence
  Synthetic oligonucleotide; CAG chr11 5295046 5295065 5295062 +
tatgttttattatgtttaag

SEQ ID NO: 16859 - DNA, 20 bp, Artificial Sequence
  Synthetic oligonucleotide; AAG chr11 5295056 5295075 5295072 +
tatgtttaagcagtaaaaat

SEQ ID NO: 16860 - DNA, 20 bp, Artificial Sequence
  Synthetic oligonucleotide; TGG chr11 5295062 5295081 5295078 +
taagcagtaaaaataagacc

SEQ ID NO: 16861 - DNA, 20 bp, Artificial Sequence
  Synthetic oligonucleotide; GAG chr11 5295064 5295083 5295080 +
agcagtaaaaataagacctg

SEQ ID NO: 16862 - DNA, 20 bp, Artificial Sequence
  Synthetic oligonucleotide; AAG chr11 5295073 5295092 5295089 +
aataagacctggagtgcaaa

SEQ ID NO: 16863 - DNA, 20 bp, Artificial Sequence
  Synthetic oligonucleotide; TGG chr11 5295100 5295119 5295116 +
ccaaatgctgtaatacttca

SEQ ID NO: 16864 - DNA, 20 bp, Artificial Sequence
  Synthetic oligonucleotide; AAG chr11 5295108 5295127 5295124 +
tgtaatacttcatggaatct

SEQ ID NO: 16865 - DNA, 20 bp, Artificial Sequence
  Synthetic oligonucleotide; CAG chr11 5295139 5295158 5295155 +
ccccaaattatgtcttattt

SEQ ID NO: 16866 - DNA, 20 bp, Artificial Sequence
  Synthetic oligonucleotide; GAG chr11 5295141 5295160 5295157 +
ccaaattatgtcttatttca

SEQ ID NO: 16867 - DNA, 20 bp, Artificial Sequence
  Synthetic oligonucleotide; TAG chr11 5295153 5295172 5295169 +
ttatttcagagcaaataact

SEQ ID NO: 16868 - DNA, 20 bp, Artificial Sequence
  Synthetic oligonucleotide; AGG chr11 5295154 5295173 5295170 +
tatttcagagcaaataactt

SEQ ID NO: 16869 - DNA, 20 bp, Artificial Sequence
  Synthetic oligonucleotide; CAG chr11 5295200 5295219 5295216 +
attattattgtataatgatt

SEQ ID NO: 16870 - DNA, 20 bp, Artificial Sequence
  Synthetic oligonucleotide; GAG chr11 5295202 5295221 5295218 +
tattattgtataatgattca

SEQ ID NO: 16871 - DNA, 20 bp, Artificial Sequence
  Synthetic oligonucleotide; TAG chr11 5295214 5295233 5295230 +
atgattcagagcatgtattc

SEQ ID NO: 16872 - DNA, 20 bp, Artificial Sequence
  Synthetic oligonucleotide; GAG chr11 5295216 5295235 5295232 +
gattcagagcatgtattcta

SEQ ID NO: 16873 - DNA, 20 bp, Artificial Sequence
  Synthetic oligonucleotide; GAG chr11 5295230 5295249 5295246 +
attctagagccaaatatcat

SEQ ID NO: 16874 - DNA, 20 bp, Artificial Sequence
  Synthetic oligonucleotide; CAG chr11 5295251 5295270 5295267 +
agttgaattatgccctctgt

SEQ ID NO: 16875 - DNA, 20 bp, Artificial Sequence
  Synthetic oligonucleotide; TAG chr11 5295255 5295274 5295271 +
gaattatgccctctgtcagt

SEQ ID NO: 16876 - DNA, 20 bp, Artificial Sequence
  Synthetic oligonucleotide; TAG chr11 5295258 5295277 5295274 +
ttatgccctctgtcagttag

SEQ ID NO: 16877 - DNA, 20 bp, Artificial Sequence
  Synthetic oligonucleotide; TGG chr11 5295272 5295291 5295288 +
agttagtagccacttcatct

SEQ ID NO: 16878 - DNA, 20 bp, Artificial Sequence
  Synthetic oligonucleotide; TAG chr11 5295285 5295304 5295301 +
ttcatcttggaatattactt

SEQ ID NO: 16879 - DNA, 20 bp, Artificial Sequence
  Synthetic oligonucleotide; AGG chr11 5295286 5295305 5295302 +
tcatcttggaatattacttt

SEQ ID NO: 16880 - DNA, 20 bp, Artificial Sequence
  Synthetic oligonucleotide; GGG chr11 5295287 5295306 5295303 +
catcttggaatattacttta

SEQ ID NO: 16881 - DNA, 20 bp, Artificial Sequence
  Synthetic oligonucleotide; CAG chr11 5295300 5295319 5295316 +
tactttagggccctgtgcct

SEQ ID NO: 16882 - DNA, 20 bp, Artificial Sequence
  Synthetic oligonucleotide; AAG chr11 5295316 5295335 5295332 +
gcctcagtttcctcctctta

SEQ ID NO: 16883 - DNA, 20 bp, Artificial Sequence
  Synthetic oligonucleotide; AGG chr11 5295317 5295336 5295333 +
cctcagtttcctcctcttaa

SEQ ID NO: 16884 - DNA, 20 bp, Artificial Sequence
  Synthetic oligonucleotide; GGG chr11 5295318 5295337 5295334 +
ctcagtttcctcctcttaaa

SEQ ID NO: 16885 - DNA, 20 bp, Artificial Sequence
  Synthetic oligonucleotide; TAG chr11 5295329 5295348 5295345 +
cctcttaaagggtattacaa

SEQ ID NO: 16886 - DNA, 20 bp, Artificial Sequence
  Synthetic oligonucleotide; GAG chr11 5295337 5295356 5295353 +
agggtattacaatagtactt

SEQ ID NO: 16887 - DNA, 20 bp, Artificial Sequence
  Synthetic oligonucleotide; AGG chr11 5295338 5295357 5295354 +
gggtattacaatagtacttg

SEQ ID NO: 16888 - DNA, 20 bp, Artificial Sequence
  Synthetic oligonucleotide; CAG chr11 5295343 5295362 5295359 +
ttacaatagtacttgaggca

SEQ ID NO: 16889 - DNA, 20 bp, Artificial Sequence
  Synthetic oligonucleotide; GAG chr11 5295345 5295364 5295361 +
acaatagtacttgaggcaca

SEQ ID NO: 16890 - DNA, 20 bp, Artificial Sequence
  Synthetic oligonucleotide; CAG chr11 5295381 5295400 5295397 +
taaatgaaataatatatcaa

SEQ ID NO: 16891 - DNA, 20 bp, Artificial Sequence
  Synthetic oligonucleotide; TAG chr11 5295395 5295414 5295411 +
tatcaacagtgtcttgtgta

SEQ ID NO: 16892 - DNA, 20 bp, Artificial Sequence
  Synthetic oligonucleotide; AAG chr11 5295401 5295420 5295417 +
cagtgtcttgtgtatagtat

SEQ ID NO: 16893 - DNA, 20 bp, Artificial Sequence
  Synthetic oligonucleotide; TAG chr11 5295465 5295484 5295481 +
ctattacttttatactatcc

SEQ ID NO: 16894 - DNA, 20 bp, Artificial Sequence
  Synthetic oligonucleotide; TAG chr11 5295472 5295491 5295488 +
ttttatactatcctagtgtg

SEQ ID NO: 16895 - DNA, 20 bp, Artificial Sequence
  Synthetic oligonucleotide; GAG chr11 5295478 5295497 5295494 +
actatcctagtgtgtagatt

SEQ ID NO: 16896 - DNA, 20 bp, Artificial Sequence
  Synthetic oligonucleotide; AGG chr11 5295479 5295498 5295495 +
ctatcctagtgtgtagattg

SEQ ID NO: 16897 - DNA, 20 bp, Artificial Sequence
  Synthetic oligonucleotide; TAG chr11 5295485 5295504 5295501 +
tagtgtgtagattgaggatg

SEQ ID NO: 16898 - DNA, 20 bp, Artificial Sequence
  Synthetic oligonucleotide; AGG chr11 5295486 5295505 5295502 +
agtgtgtagattgaggatgt

SEQ ID NO: 16899 - DNA, 20 bp, Artificial Sequence
  Synthetic oligonucleotide; GGG chr11 5295487 5295506 5295503 +
gtgtgtagattgaggatgta

SEQ ID NO: 16900 - DNA, 20 bp, Artificial Sequence
  Synthetic oligonucleotide; GGG chr11 5295488 5295507 5295504 +
tgtgtagattgaggatgtag

SEQ ID NO: 16901 - DNA, 20 bp, Artificial Sequence
  Synthetic oligonucleotide; TAG chr11 5295493 5295512 5295509 +
agattgaggatgtaggggct

SEQ ID NO: 16902 - DNA, 20 bp, Artificial Sequence
  Synthetic oligonucleotide; GAG chr11 5295495 5295514 5295511 +
attgaggatgtaggggctta

SEQ ID NO: 16903 - DNA, 20 bp, Artificial Sequence
  Synthetic oligonucleotide; AAG chr11 5295500 5295519 5295516 +
ggatgtaggggcttagagca

SEQ ID NO: 16904 - DNA, 20 bp, Artificial Sequence
  Synthetic oligonucleotide; AAG chr11 5295508 5295527 5295524 +
gggcttagagcaaagacatg

SEQ ID NO: 16905 - DNA, 20 bp, Artificial Sequence
  Synthetic oligonucleotide; AGG chr11 5295509 5295528 5295525 +
ggcttagagcaaagacatga

SEQ ID NO: 16906 - DNA, 20 bp, Artificial Sequence
  Synthetic oligonucleotide; TGG chr11 5295519 5295538 5295535 +
aaagacatgaaggtcacata

SEQ ID NO: 16907 - DNA, 20 bp, Artificial Sequence
  Synthetic oligonucleotide; GGG chr11 5295520 5295539 5295536 +
aagacatgaaggtcacatat

SEQ ID NO: 16908 - DNA, 20 bp, Artificial Sequence
  Synthetic oligonucleotide; TAG chr11 5295523 5295542 5295539 +
acatgaaggtcacatatggg

SEQ ID NO: 16909 - DNA, 20 bp, Artificial Sequence
  Synthetic oligonucleotide; TGG chr11 5295529 5295548 5295545 +
aggtcacatatgggtagaca

SEQ ID NO: 16910 - DNA, 20 bp, Artificial Sequence
  Synthetic oligonucleotide; GGG chr11 5295530 5295549 5295546 +
ggtcacatatgggtagacat

SEQ ID NO: 16911 - DNA, 20 bp, Artificial Sequence
  Synthetic oligonucleotide; TAG chr11 5295539 5295558 5295555 +
tgggtagacatgggaataaa

SEQ ID NO: 16912 - DNA, 20 bp, Artificial Sequence
  Synthetic oligonucleotide; GAG chr11 5295544 5295563 5295560 +
agacatgggaataaatagat

SEQ ID NO: 16913 - DNA, 20 bp, Artificial Sequence
  Synthetic oligonucleotide; AAG chr11 5295558 5295577 5295574 +
atagatgagatgacattgtc

SEQ ID NO: 16914 - DNA, 20 bp, Artificial Sequence
  Synthetic oligonucleotide; AGG chr11 5295559 5295578 5295575 +
tagatgagatgacattgtca

SEQ ID NO: 16915 - DNA, 20 bp, Artificial Sequence
  Synthetic oligonucleotide; GAG chr11 5295569 5295588 5295585 +
gacattgtcaaggattacac

SEQ ID NO: 16916 - DNA, 20 bp, Artificial Sequence
  Synthetic oligonucleotide; AAG chr11 5295584 5295603 5295600 +
tacacgagtctttctctgca

SEQ ID NO: 16917 - DNA, 20 bp, Artificial Sequence
  Synthetic oligonucleotide; GAG chr11 5295588 5295607 5295604 +
cgagtctttctctgcaaagc

SEQ ID NO: 16918 - DNA, 20 bp, Artificial Sequence
  Synthetic oligonucleotide; AGG chr11 5295589 5295608 5295605 +
gagtctttctctgcaaagcg

SEQ ID NO: 16919 - DNA, 20 bp, Artificial Sequence
  Synthetic oligonucleotide; GGG chr11 5295590 5295609 5295606 +
agtctttctctgcaaagcga

SEQ ID NO: 16920 - DNA, 20 bp, Artificial Sequence
  Synthetic oligonucleotide; AAG chr11 5295593 5295612 5295609 +
ctttctctgcaaagcgaggg

SEQ ID NO: 16921 - DNA, 20 bp, Artificial Sequence
  Synthetic oligonucleotide; AGG chr11 5295594 5295613 5295610 +
tttctctgcaaagcgaggga

SEQ ID NO: 16922 - DNA, 20 bp, Artificial Sequence
  Synthetic oligonucleotide; TAG chr11 5295598 5295617 5295614 +
tctgcaaagcgagggaaggt

SEQ ID NO: 16923 - DNA, 20 bp, Artificial Sequence
  Synthetic oligonucleotide; CAG chr11 5295608 5295627 5295624 +
gagggaaggttagtctcttt

SEQ ID NO: 16924 - DNA, 20 bp, Artificial Sequence
  Synthetic oligonucleotide; GAG chr11 5295610 5295629 5295626 +
gggaaggttagtctctttca

SEQ ID NO: 16925 - DNA, 20 bp, Artificial Sequence
  Synthetic oligonucleotide; TGG chr11 5295620 5295639 5295636 +
gtctctttcagagaacatca

SEQ ID NO: 16926 - DNA, 20 bp, Artificial Sequence
  Synthetic oligonucleotide; CAG chr11 5295623 5295642 5295639 +
tctttcagagaacatcatgg

SEQ ID NO: 16927 - DNA, 20 bp, Artificial Sequence
  Synthetic oligonucleotide; AAG chr11 5295638 5295657 5295654 +
catggcagaaacattttttc

SEQ ID NO: 16928 - DNA, 20 bp, Artificial Sequence
  Synthetic oligonucleotide; GAG chr11 5295640 5295659 5295656 +
tggcagaaacattttttcaa

SEQ ID NO: 16929 - DNA, 20 bp, Artificial Sequence
  Synthetic oligonucleotide; TAG chr11 5295666 5295685 5295682 +
ccatgcattttacgtccatg

SEQ ID NO: 16930 - DNA, 20 bp, Artificial Sequence
  Synthetic oligonucleotide; AAG chr11 5295683 5295702 5295699 +
atgtagttgcaaacaatgcc

SEQ ID NO: 16931 - DNA, 20 bp, Artificial Sequence
  Synthetic oligonucleotide; TAG chr11 5295686 5295705 5295702 +
tagttgcaaacaatgccaag

SEQ ID NO: 16932 - DNA, 20 bp, Artificial Sequence
  Synthetic oligonucleotide; CAG chr11 5295699 5295718 5295715 +
tgccaagtagaactccaatc

SEQ ID NO: 16933 - DNA, 20 bp, Artificial Sequence
  Synthetic oligonucleotide; GAG chr11 5295701 5295720 5295717 +
ccaagtagaactccaatcca

SEQ ID NO: 16934 - DNA, 20 bp, Artificial Sequence
  Synthetic oligonucleotide; AAG chr11 5295706 5295725 5295722 +
tagaactccaatccagagct

SEQ ID NO: 16935 - DNA, 20 bp, Artificial Sequence
  Synthetic oligonucleotide; TGG chr11 5295709 5295728 5295725 +
aactccaatccagagctaag

SEQ ID NO: 16936 - DNA, 20 bp, Artificial Sequence
  Synthetic oligonucleotide; GGG chr11 5295710 5295729 5295726 +
actccaatccagagctaagt

SEQ ID NO: 16937 - DNA, 20 bp, Artificial Sequence
  Synthetic oligonucleotide; GGG chr11 5295711 5295730 5295727 +
ctccaatccagagctaagtg

SEQ ID NO: 16938 - DNA, 20 bp, Artificial Sequence
  Synthetic oligonucleotide; TGG chr11 5295717 5295736 5295733 +
tccagagctaagtggggctg

SEQ ID NO: 16939 - DNA, 20 bp, Artificial Sequence
  Synthetic oligonucleotide; GGG chr11 5295718 5295737 5295734 +
ccagagctaagtggggctgt

SEQ ID NO: 16940 - DNA, 20 bp, Artificial Sequence
  Synthetic oligonucleotide; TGG chr11 5295738 5295757 5295754 +
gggaactatgtaccaattga

SEQ ID NO: 16941 - DNA, 20 bp, Artificial Sequence
  Synthetic oligonucleotide; CAG chr11 5295759 5295778 5295775 +
ggacatgctgctttttgact

SEQ ID NO: 16942 - DNA, 20 bp, Artificial Sequence
  Synthetic oligonucleotide; GAG chr11 5295761 5295780 5295777 +
acatgctgctttttgactca

SEQ ID NO: 16943 - DNA, 20 bp, Artificial Sequence
  Synthetic oligonucleotide; AGG chr11 5295762 5295781 5295778 +
catgctgctttttgactcag

SEQ ID NO: 16944 - DNA, 20 bp, Artificial Sequence
  Synthetic oligonucleotide; TGG chr11 5295765 5295784 5295781 +
gctgctttttgactcagagg

SEQ ID NO: 16945 - DNA, 20 bp, Artificial Sequence
  Synthetic oligonucleotide; AAG chr11 5295770 5295789 5295786 +
tttttgactcagaggtggat

SEQ ID NO: 16946 - DNA, 20 bp, Artificial Sequence
  Synthetic oligonucleotide; GAG chr11 5295772 5295791 5295788 +
tttgactcagaggtggataa

SEQ ID NO: 16947 - DNA, 20 bp, Artificial Sequence
  Synthetic oligonucleotide; TAG chr11 5295793 5295812 5295809 +
agacaaaactcttttcttct

SEQ ID NO: 16948 - DNA, 20 bp, Artificial Sequence
  Synthetic oligonucleotide; AAG chr11 5295806 5295825 5295822 +
ttcttcttagatgtactaaa

SEQ ID NO: 16949 - DNA, 20 bp, Artificial Sequence
  Synthetic oligonucleotide; TAG chr11 5295809 5295828 5295825 +
ttcttagatgtactaaaaag

SEQ ID NO: 16950 - DNA, 20 bp, Artificial Sequence
  Synthetic oligonucleotide; TAG chr11 5295813 5295832 5295829 +
tagatgtactaaaaagtagt

SEQ ID NO: 16951 - DNA, 20 bp, Artificial Sequence
  Synthetic oligonucleotide; TGG chr11 5295818 5295837 5295834 +
gtactaaaaagtagttagtc

SEQ ID NO: 16952 - DNA, 20 bp, Artificial Sequence
  Synthetic oligonucleotide; AAG chr11 5295821 5295840 5295837 +
ctaaaaagtagttagtctgg

SEQ ID NO: 16953 - DNA, 20 bp, Artificial Sequence
  Synthetic oligonucleotide; TAG chr11 5295828 5295847 5295844 +
gtagttagtctggaagtatt

SEQ ID NO: 16954 - DNA, 20 bp, Artificial Sequence
  Synthetic oligonucleotide; AAG chr11 5295831 5295850 5295847 +
gttagtctggaagtatttag

SEQ ID NO: 16955 - DNA, 20 bp, Artificial Sequence
  Synthetic oligonucleotide; AGG chr11 5295832 5295851 5295848 +
ttagtctggaagtatttaga

SEQ ID NO: 16956 - DNA, 20 bp, Artificial Sequence
  Synthetic oligonucleotide; TGG chr11 5295838 5295857 5295854 +
tggaagtatttagaaggctt

SEQ ID NO: 16957 - DNA, 20 bp, Artificial Sequence
  Synthetic oligonucleotide; GAG chr11 5295840 5295859 5295856 +
gaagtatttagaaggctttg

SEQ ID NO: 16958 - DNA, 20 bp, Artificial Sequence
  Synthetic oligonucleotide; GAG chr11 5295842 5295861 5295858 +
agtatttagaaggctttgga

SEQ ID NO: 16959 - DNA, 20 bp, Artificial Sequence
  Synthetic oligonucleotide; AGG chr11 5295843 5295862 5295859 +
gtatttagaaggctttggag

SEQ ID NO: 16960 - DNA, 20 bp, Artificial Sequence
  Synthetic oligonucleotide; CAG chr11 5295859 5295878 5295875 +
ggagaggaatgtgattttat

SEQ ID NO: 16961 - DNA, 20 bp, Artificial Sequence
  Synthetic oligonucleotide; AGG chr11 5295860 5295879 5295876 +
gagaggaatgtgattttatc

SEQ ID NO: 16962 - DNA, 20 bp, Artificial Sequence
  Synthetic oligonucleotide; TAG chr11 5295874 5295893 5295890 +
tttatcaggtaaatcaaaaa

SEQ ID NO: 16963 - DNA, 20 bp, Artificial Sequence
  Synthetic oligonucleotide; GAG chr11 5295876 5295895 5295892 +
tatcaggtaaatcaaaaata

SEQ ID NO: 16964 - DNA, 20 bp, Artificial Sequence
  Synthetic oligonucleotide; AGG chr11 5295877 5295896 5295893 +
atcaggtaaatcaaaaatag

SEQ ID NO: 16965 - DNA, 20 bp, Artificial Sequence
  Synthetic oligonucleotide; AAG chr11 5295890 5295909 5295906 +
aaaatagaggctatttctga

SEQ ID NO: 16966 - DNA, 20 bp, Artificial Sequence
  Synthetic oligonucleotide; AAG chr11 5295893 5295912 5295909 +
atagaggctatttctgaaag

SEQ ID NO: 16967 - DNA, 20 bp, Artificial Sequence
  Synthetic oligonucleotide; TAG chr11 5295900 5295919 5295916 +
ctatttctgaaagaagcaac

SEQ ID NO: 16968 - DNA, 20 bp, Artificial Sequence
  Synthetic oligonucleotide; AAG chr11 5295907 5295926 5295923 +
tgaaagaagcaactagaacc

SEQ ID NO: 16969 - DNA, 20 bp, Artificial Sequence
  Synthetic oligonucleotide; CAG chr11 5295917 5295936 5295933 +
aactagaaccaagttacaca

SEQ ID NO: 16970 - DNA, 20 bp, Artificial Sequence
  Synthetic oligonucleotide; TAG chr11 5295951 5295970 5295967 +
aatgtacatatatttttgac

SEQ ID NO: 16971 - DNA, 20 bp, Artificial Sequence
  Synthetic oligonucleotide; GAG chr11 5295953 5295972 5295969 +
tgtacatatatttttgacta

SEQ ID NO: 16972 - DNA, 20 bp, Artificial Sequence
  Synthetic oligonucleotide; TAG chr11 5295956 5295975 5295972 +
acatatatttttgactagag

SEQ ID NO: 16973 - DNA, 20 bp, Artificial Sequence
  Synthetic oligonucleotide; CAG chr11 5295986 5296005 5296002 +
aaatttgtataaaatatttg

SEQ ID NO: 16974 - DNA, 20 bp, Artificial Sequence
  Synthetic oligonucleotide; AGG chr11 5295987 5296006 5296003 +
aatttgtataaaatatttgc

SEQ ID NO: 16975 - DNA, 20 bp, Artificial Sequence
  Synthetic oligonucleotide; AAG chr11 5295991 5296010 5296007 +
tgtataaaatatttgcaggt

SEQ ID NO: 16976 - DNA, 20 bp, Artificial Sequence
  Synthetic oligonucleotide; TAG chr11 5295995 5296014 5296011 +
taaaatatttgcaggtaagt

SEQ ID NO: 16977 - DNA, 20 bp, Artificial Sequence
  Synthetic oligonucleotide; AGG chr11 5295996 5296015 5296012 +
aaaatatttgcaggtaagtt

SEQ ID NO: 16978 - DNA, 20 bp, Artificial Sequence
  Synthetic oligonucleotide; GAG chr11 5296012 5296031 5296028 +
agttaggtaatgcaacattt

SEQ ID NO: 16979 - DNA, 20 bp, Artificial Sequence
  Synthetic oligonucleotide; AAG chr11 5296020 5296039 5296036 +
aatgcaacatttgagactct

SEQ ID NO: 16980 - DNA, 20 bp, Artificial Sequence
  Synthetic oligonucleotide; TGG chr11 5296027 5296046 5296043 +
catttgagactctaagtttg

SEQ ID NO: 16981 - DNA, 20 bp, Artificial Sequence
  Synthetic oligonucleotide; GGG chr11 5296028 5296047 5296044 +
atttgagactctaagtttgt

SEQ ID NO: 16982 - DNA, 20 bp, Artificial Sequence
  Synthetic oligonucleotide; TAG chr11 5296036 5296055 5296052 +
ctctaagtttgtgggaaact

SEQ ID NO: 16983 - DNA, 20 bp, Artificial Sequence
  Synthetic oligonucleotide; CAG chr11 5296047 5296066 5296063 +
tgggaaacttagaactgttt

SEQ ID NO: 16984 - DNA, 20 bp, Artificial Sequence
  Synthetic oligonucleotide; CAG chr11 5296097 5296116 5296113 +
aatgctatgaaatgattttg

SEQ ID NO: 16985 - DNA, 20 bp, Artificial Sequence
  Synthetic oligonucleotide; GAG chr11 5296108 5296127 5296124 +
atgattttgcagatttttct

SEQ ID NO: 16986 - DNA, 20 bp, Artificial Sequence
  Synthetic oligonucleotide; TAG chr11 5296118 5296137 5296134 +
agatttttctgagatgttta

SEQ ID NO: 16987 - DNA, 20 bp, Artificial Sequence
  Synthetic oligonucleotide; AAG chr11 5296125 5296144 5296141 +
tctgagatgtttatagtgat

SEQ ID NO: 16988 - DNA, 20 bp, Artificial Sequence
  Synthetic oligonucleotide; GAG chr11 5296129 5296148 5296145 +
agatgtttatagtgataagt

SEQ ID NO: 16989 - DNA, 20 bp, Artificial Sequence
  Synthetic oligonucleotide; TAG chr11 5296143 5296162 5296159 +
ataagtgagaatatatgaca

SEQ ID NO: 16990 - DNA, 20 bp, Artificial Sequence
  Synthetic oligonucleotide; CAG chr11 5296224 5296243 5296240 +
tatctctttgtaacttacca

SEQ ID NO: 16991 - DNA, 20 bp, Artificial Sequence
  Synthetic oligonucleotide; CAG chr11 5296227 5296246 5296243 +
ctctttgtaacttaccacag

SEQ ID NO: 16992 - DNA, 20 bp, Artificial Sequence
  Synthetic oligonucleotide; AAG chr11 5296249 5296268 5296265 +
gatttgtattattttatgtg

SEQ ID NO: 16993 - DNA, 20 bp, Artificial Sequence
  Synthetic oligonucleotide; CAG chr11 5296257 5296276 5296273 +
ttattttatgtgaagaaact

SEQ ID NO: 16994 - DNA, 20 bp, Artificial Sequence
  Synthetic oligonucleotide; TGG chr11 5296264 5296283 5296280 +
atgtgaagaaactcagaata

SEQ ID NO: 16995 - DNA, 20 bp, Artificial Sequence
  Synthetic oligonucleotide; GAG chr11 5296266 5296285 5296282 +
gtgaagaaactcagaatatg

SEQ ID NO: 16996 - DNA, 20 bp, Artificial Sequence
  Synthetic oligonucleotide; AAG chr11 5296298 5296317 5296314 +
tctcaaattatcacttttat

SEQ ID NO: 16997 - DNA, 20 bp, Artificial Sequence
  Synthetic oligonucleotide; AGG chr11 5296299 5296318 5296315 +
ctcaaattatcacttttata

SEQ ID NO: 16998 - DNA, 20 bp, Artificial Sequence
  Synthetic oligonucleotide; CAG chr11 5296339 5296358 5296355 +
cttattttctttatgtaaac

SEQ ID NO: 16999 - DNA, 20 bp, Artificial Sequence
  Synthetic oligonucleotide; AAG chr11 5296368 5296387 5296384 +
atctcttctcattttctatc

SEQ ID NO: 17000 - DNA, 20 bp, Artificial Sequence
  Synthetic oligonucleotide; AGG chr11 5296369 5296388 5296385 +
tctcttctcattttctatca

SEQ ID NO: 17001 - DNA, 20 bp, Artificial Sequence
  Synthetic oligonucleotide; TAG chr11 5296377 5296396 5296393 +
cattttctatcaaggattaa

SEQ ID NO: 17002 - DNA, 20 bp, Artificial Sequence
  Synthetic oligonucleotide; CAG chr11 5296427 5296446 5296443 +
tctccaactttttgtatcta

SEQ ID NO: 17003 - DNA, 20 bp, Artificial Sequence
  Synthetic oligonucleotide; AGG chr11 5296428 5296447 5296444 +
ctccaactttttgtatctac

SEQ ID NO: 17004 - DNA, 20 bp, Artificial Sequence
  Synthetic oligonucleotide; AAG chr11 5296454 5296473 5296470 +
ctaccttcatttatatttta

SEQ ID NO: 17005 - DNA, 20 bp, Artificial Sequence
  Synthetic oligonucleotide; TAG chr11 5296457 5296476 5296473 +
ccttcatttatattttaaag

SEQ ID NO: 17006 - DNA, 20 bp, Artificial Sequence
  Synthetic oligonucleotide; AGG chr11 5296458 5296477 5296474 +
cttcatttatattttaaagt

SEQ ID NO: 17007 - DNA, 20 bp, Artificial Sequence
  Synthetic oligonucleotide; GAG chr11 5296462 5296481 5296478 +
atttatattttaaagtaggt

SEQ ID NO: 17008 - DNA, 20 bp, Artificial Sequence
  Synthetic oligonucleotide; AAG chr11 5296485 5296504 5296501 +
caaatgcattttaacactcc

SEQ ID NO: 17009 - DNA, 20 bp, Artificial Sequence
  Synthetic oligonucleotide; TAG chr11 5296489 5296508 5296505 +
tgcattttaacactccaaga

SEQ ID NO: 17010 - DNA, 20 bp, Artificial Sequence
  Synthetic oligonucleotide; TAG chr11 5296495 5296514 5296511 +
ttaacactccaagatagatt

SEQ ID NO: 17011 - DNA, 20 bp, Artificial Sequence
  Synthetic oligonucleotide; CAG chr11 5296513 5296532 5296529 +
tttagattaaaacatctaac

SEQ ID NO: 17012 - DNA, 20 bp, Artificial Sequence
  Synthetic oligonucleotide; AGG chr11 5296514 5296533 5296530 +
ttagattaaaacatctaacc

SEQ ID NO: 17013 - DNA, 20 bp, Artificial Sequence
  Synthetic oligonucleotide; GAG chr11 5296577 5296596 5296593 +
ttccgttattgtaacatgat

SEQ ID NO: 17014 - DNA, 20 bp, Artificial Sequence
  Synthetic oligonucleotide; AGG chr11 5296578 5296597 5296594 +
tccgttattgtaacatgatg

SEQ ID NO: 17015 - DNA, 20 bp, Artificial Sequence
  Synthetic oligonucleotide; GAG chr11 5296580 5296599 5296596 +
cgttattgtaacatgatgag

SEQ ID NO: 17016 - DNA, 20 bp, Artificial Sequence
  Synthetic oligonucleotide; TGG chr11 5296586 5296605 5296602 +
tgtaacatgatgaggagaca

SEQ ID NO: 17017 - DNA, 20 bp, Artificial Sequence
  Synthetic oligonucleotide; AAG chr11 5296590 5296609 5296606 +
acatgatgaggagacatgga

SEQ ID NO: 17018 - DNA, 20 bp, Artificial Sequence
  Synthetic oligonucleotide; AAG chr11 5296618 5296637 5296634 +
ttctgctaatttctccttta

SEQ ID NO: 17019 - DNA, 20 bp, Artificial Sequence
  Synthetic oligonucleotide; TAG chr11 5296632 5296651 5296648 +
cctttaaagtcacttcacat

SEQ ID NO: 17020 - DNA, 20 bp, Artificial Sequence
  Synthetic oligonucleotide; GAG chr11 5296650 5296669 5296666 +
attagttatctcttacatat

SEQ ID NO: 17021 - DNA, 20 bp, Artificial Sequence
  Synthetic oligonucleotide; TGG chr11 5296657 5296676 5296673 +
atctcttacatatgagtccc

SEQ ID NO: 17022 - DNA, 20 bp, Artificial Sequence
  Synthetic oligonucleotide; CAG chr11 5296660 5296679 5296676 +
tcttacatatgagtccctgg

SEQ ID NO: 17023 - DNA, 20 bp, Artificial Sequence
  Synthetic oligonucleotide; CAG chr11 5296666 5296685 5296682 +
atatgagtccctggcagtgt

SEQ ID NO: 17024 - DNA, 20 bp, Artificial Sequence
  Synthetic oligonucleotide; AAG chr11 5296694 5296713 5296710 +
cattccttttcatgacccta

SEQ ID NO: 17025 - DNA, 20 bp, Artificial Sequence
  Synthetic oligonucleotide; TAG chr11 5296726 5296745 5296742 +
aaatatactgcatttttcta

SEQ ID NO: 17026 - DNA, 20 bp, Artificial Sequence
  Synthetic oligonucleotide; TGG chr11 5296752 5296771 5296768 +
atttcaacctacacaaatta

SEQ ID NO: 17027 - DNA, 20 bp, Artificial Sequence
  Synthetic oligonucleotide; GGG chr11 5296753 5296772 5296769 +
tttcaacctacacaaattat

SEQ ID NO: 17028 - DNA, 20 bp, Artificial Sequence
  Synthetic oligonucleotide; TAG chr11 5296778 5296797 5296794 +
tgcatgcctttatccctaat

SEQ ID NO: 17029 - DNA, 20 bp, Artificial Sequence
  Synthetic oligonucleotide; AGG chr11 5296779 5296798 5296795 +
gcatgcctttatccctaatt

SEQ ID NO: 17030 - DNA, 20 bp, Artificial Sequence
  Synthetic oligonucleotide; CAG chr11 5296787 5296806 5296803 +
ttatccctaattaggctaca

SEQ ID NO: 17031 - DNA, 20 bp, Artificial Sequence
  Synthetic oligonucleotide; TAG chr11 5296800 5296819 5296816 +
ggctacacagctgtttaaat

SEQ ID NO: 17032 - DNA, 20 bp, Artificial Sequence
  Synthetic oligonucleotide; AGG chr11 5296801 5296820 5296817 +
gctacacagctgtttaaatt

SEQ ID NO: 17033 - DNA, 20 bp, Artificial Sequence
  Synthetic oligonucleotide; CAG chr11 5296809 5296828 5296825 +
gctgtttaaattaggaatta

SEQ ID NO: 17034 - DNA, 20 bp, Artificial Sequence
  Synthetic oligonucleotide; CAG chr11 5296819 5296838 5296835 +
ttaggaattacagatttcgc

SEQ ID NO: 17035 - DNA, 20 bp, Artificial Sequence
  Synthetic oligonucleotide; CAG chr11 5296840 5296859 5296856 +
agataattgtatatctgata

SEQ ID NO: 17036 - DNA, 20 bp, Artificial Sequence
  Synthetic oligonucleotide; TAG chr11 5296845 5296864 5296861 +
attgtatatctgatacagat

SEQ ID NO: 17037 - DNA, 20 bp, Artificial Sequence
  Synthetic oligonucleotide; AGG chr11 5296846 5296865 5296862 +
ttgtatatctgatacagatt

SEQ ID NO: 17038 - DNA, 20 bp, Artificial Sequence
  Synthetic oligonucleotide; TGG chr11 5296863 5296882 5296879 +
attaggcatttaataaattt

SEQ ID NO: 17039 - DNA, 20 bp, Artificial Sequence
  Synthetic oligonucleotide; TAG chr11 5296870 5296889 5296886 +
atttaataaattttggtgaa

SEQ ID NO: 17040 - DNA, 20 bp, Artificial Sequence
  Synthetic oligonucleotide; AGG chr11 5296871 5296890 5296887 +
tttaataaattttggtgaat

SEQ ID NO: 17041 - DNA, 20 bp, Artificial Sequence
  Synthetic oligonucleotide; CAG chr11 5296904 5296923 5296920 +
attgttcctcaaacatttgt

SEQ ID NO: 17042 - DNA, 20 bp, Artificial Sequence
  Synthetic oligonucleotide; GAG chr11 5296932 5296951 5296948 +
cactatgatacctacttatt

SEQ ID NO: 17043 - DNA, 20 bp, Artificial Sequence
  Synthetic oligonucleotide; AAG chr11 5296939 5296958 5296955 +
atacctacttattgagaatc

SEQ ID NO: 17044 - DNA, 20 bp, Artificial Sequence
  Synthetic oligonucleotide; TAG chr11 5296946 5296965 5296962 +
cttattgagaatcaagtaaa

SEQ ID NO: 17045 - DNA, 20 bp, Artificial Sequence
  Synthetic oligonucleotide; GAG chr11 5296948 5296967 5296964 +
tattgagaatcaagtaaata

SEQ ID NO: 17046 - DNA, 20 bp, Artificial Sequence
  Synthetic oligonucleotide; CAG chr11 5296956 5296975 5296972 +
atcaagtaaatagagatatt

SEQ ID NO: 17047 - DNA, 20 bp, Artificial Sequence
  Synthetic oligonucleotide; CAG chr11 5296967 5296986 5296983 +
agagatattcagacacatta

SEQ ID NO: 17048 - DNA, 20 bp, Artificial Sequence
  Synthetic oligonucleotide; GAG chr11 5296969 5296988 5296985 +
agatattcagacacattaca

SEQ ID NO: 17049 - DNA, 20 bp, Artificial Sequence
  Synthetic oligonucleotide; AAG chr11 5296972 5296991 5296988 +
tattcagacacattacagag

SEQ ID NO: 17050 - DNA, 20 bp, Artificial Sequence
  Synthetic oligonucleotide; AAG chr11 5296993 5297012 5297009 +
agtatatacttacaaactca

SEQ ID NO: 17051 - DNA, 20 bp, Artificial Sequence
  Synthetic oligonucleotide; TAG chr11 5297009 5297028 5297025 +
ctcaaagtatttgacacccc

SEQ ID NO: 17052 - DNA, 20 bp, Artificial Sequence
  Synthetic oligonucleotide; AGG chr11 5297010 5297029 5297026 +
tcaaagtatttgacacccct

SEQ ID NO: 17053 - DNA, 20 bp, Artificial Sequence
  Synthetic oligonucleotide; CAG chr11 5297036 5297055 5297052 +
atgaaacacttttgaatata

SEQ ID NO: 17054 - DNA, 20 bp, Artificial Sequence
  Synthetic oligonucleotide; CAG chr11 5297083 5297102 5297099 +
ataaacattgccaatgcatg

SEQ ID NO: 17055 - DNA, 20 bp, Artificial Sequence
  Synthetic oligonucleotide; AAG chr11 5297087 5297106 5297103 +
acattgccaatgcatgcaga

SEQ ID NO: 17056 - DNA, 20 bp, Artificial Sequence
  Synthetic oligonucleotide; AAG chr11 5297090 5297109 5297106 +
ttgccaatgcatgcagaaag

SEQ ID NO: 17057 - DNA, 20 bp, Artificial Sequence
  Synthetic oligonucleotide; TGG chr11 5297100 5297119 5297116 +
atgcagaaagaagcttaatg

SEQ ID NO: 17058 - DNA, 20 bp, Artificial Sequence
  Synthetic oligonucleotide; TAG chr11 5297127 5297146 5297143 +
tacatatactttcatgaaca

SEQ ID NO: 17059 - DNA, 20 bp, Artificial Sequence
  Synthetic oligonucleotide; TAG chr11 5297157 5297176 5297173 +
aacatcctttccctttctgt

SEQ ID NO: 17060 - DNA, 20 bp, Artificial Sequence
  Synthetic oligonucleotide; GAG chr11 5297159 5297178 5297175 +
catcctttccctttctgtta

SEQ ID NO: 17061 - DNA, 20 bp, Artificial Sequence
  Synthetic oligonucleotide; TGG chr11 5297184 5297203 5297200 +
acctgccttcatccatccct

SEQ ID NO: 17062 - DNA, 20 bp, Artificial Sequence
  Synthetic oligonucleotide; GAG chr11 5297199 5297218 5297215 +
tcccttggatatgatacctt

SEQ ID NO: 17063 - DNA, 20 bp, Artificial Sequence
  Synthetic oligonucleotide; CAG chr11 5297226 5297245 5297242 +
ccccacacccaaatcttcaa

SEQ ID NO: 17064 - DNA, 20 bp, Artificial Sequence
  Synthetic oligonucleotide; CAG chr11 5297230 5297249 5297246 +
acacccaaatcttcaacaga

SEQ ID NO: 17065 - DNA, 20 bp, Artificial Sequence
  Synthetic oligonucleotide; AAG chr11 5297240 5297259 5297256 +
cttcaacagacagaaatgta

SEQ ID NO: 17066 - DNA, 20 bp, Artificial Sequence
  Synthetic oligonucleotide; TAG chr11 5297260 5297279 5297276 +
aagtcccgtttaatgtgtga

SEQ ID NO: 17067 - DNA, 20 bp, Artificial Sequence
  Synthetic oligonucleotide; CAG chr11 5297283 5297302 5297299 +
atgaactaaatattctatct

SEQ ID NO: 17068 - DNA, 20 bp, Artificial Sequence
  Synthetic oligonucleotide; CAG chr11 5297297 5297316 5297313 +
ctatctcagtattcatctga

SEQ ID NO: 17069 - DNA, 20 bp, Artificial Sequence
  Synthetic oligonucleotide; TAG chr11 5297302 5297321 5297318 +
tcagtattcatctgacagca

SEQ ID NO: 17070 - DNA, 20 bp, Artificial Sequence
  Synthetic oligonucleotide; AGG chr11 5297303 5297322 5297319 +
cagtattcatctgacagcat

SEQ ID NO: 17071 - DNA, 20 bp, Artificial Sequence
  Synthetic oligonucleotide; AAG chr11 5297306 5297325 5297322 +
tattcatctgacagcatagg

SEQ ID NO: 17072 - DNA, 20 bp, Artificial Sequence
  Synthetic oligonucleotide; AGG chr11 5297307 5297326 5297323 +
attcatctgacagcatagga

SEQ ID NO: 17073 - DNA, 20 bp, Artificial Sequence
  Synthetic oligonucleotide; GAG chr11 5297309 5297328 5297325 +
tcatctgacagcataggaag

SEQ ID NO: 17074 - DNA, 20 bp, Artificial Sequence
  Synthetic oligonucleotide; GAG chr11 5297311 5297330 5297327 +
atctgacagcataggaagga

SEQ ID NO: 17075 - DNA, 20 bp, Artificial Sequence
  Synthetic oligonucleotide; TGG chr11 5297354 5297373 5297370 +
taccacatattgtgtttcta

SEQ ID NO: 17076 - DNA, 20 bp, Artificial Sequence
  Synthetic oligonucleotide; CAG chr11 5297363 5297382 5297379 +
ttgtgtttctatggccgaat

SEQ ID NO: 17077 - DNA, 20 bp, Artificial Sequence
  Synthetic oligonucleotide; TAG chr11 5297368 5297387 5297384 +
tttctatggccgaatcagct

SEQ ID NO: 17078 - DNA, 20 bp, Artificial Sequence
  Synthetic oligonucleotide; AGG chr11 5297369 5297388 5297385 +
ttctatggccgaatcagctt

SEQ ID NO: 17079 - DNA, 20 bp, Artificial Sequence
  Synthetic oligonucleotide; TGG chr11 5297384 5297403 5297400 +
agcttaggttctacattgtg

SEQ ID NO: 17080 - DNA, 20 bp, Artificial Sequence
  Synthetic oligonucleotide; TGG chr11 5297390 5297409 5297406 +
ggttctacattgtgtggttt

SEQ ID NO: 17081 - DNA, 20 bp, Artificial Sequence
  Synthetic oligonucleotide; AAG chr11 5297413 5297432 5297429 +
ataaattacttaacctacct

SEQ ID NO: 17082 - DNA, 20 bp, Artificial Sequence
  Synthetic oligonucleotide; AAG chr11 5297417 5297436 5297433 +
attacttaacctacctaagt

SEQ ID NO: 17083 - DNA, 20 bp, Artificial Sequence
  Synthetic oligonucleotide; AGG chr11 5297418 5297437 5297434 +
ttacttaacctacctaagta

SEQ ID NO: 17084 - DNA, 20 bp, Artificial Sequence
  Synthetic oligonucleotide; CAG chr11 5297432 5297451 5297448 +
taagtaaggcacctacgtgt

SEQ ID NO: 17085 - DNA, 20 bp, Artificial Sequence
  Synthetic oligonucleotide; TAG chr11 5297447 5297466 5297463 +
cgtgtcagtctcttcatgtg

SEQ ID NO: 17086 - DNA, 20 bp, Artificial Sequence
  Synthetic oligonucleotide; CAG chr11 5297451 5297470 5297467 +
tcagtctcttcatgtgtagt

SEQ ID NO: 17087 - DNA, 20 bp, Artificial Sequence
  Synthetic oligonucleotide; AGG chr11 5297452 5297471 5297468 +
cagtctcttcatgtgtagtc

SEQ ID NO: 17088 - DNA, 20 bp, Artificial Sequence
  Synthetic oligonucleotide; AAG chr11 5297467 5297486 5297483 +
tagtcaggaattataatgaa

SEQ ID NO: 17089 - DNA, 20 bp, Artificial Sequence
  Synthetic oligonucleotide; AAG chr11 5297477 5297496 5297493 +
ttataatgaaaagtaactcg

SEQ ID NO: 17090 - DNA, 20 bp, Artificial Sequence
  Synthetic oligonucleotide; CAG chr11 5297495 5297514 5297511 +
cgaagtatttttgtgataat

SEQ ID NO: 17091 - DNA, 20 bp, Artificial Sequence
  Synthetic oligonucleotide; TAG chr11 5297499 5297518 5297515 +
gtatttttgtgataatcagt

SEQ ID NO: 17092 - DNA, 20 bp, Artificial Sequence
  Synthetic oligonucleotide; AAG chr11 5297521 5297540 5297537 +
gataaaaatgtgaacctctt

SEQ ID NO: 17093 - DNA, 20 bp, Artificial Sequence
  Synthetic oligonucleotide; TAG chr11 5297528 5297547 5297544 +
atgtgaacctcttaagacac

SEQ ID NO: 17094 - DNA, 20 bp, Artificial Sequence
  Synthetic oligonucleotide; GAG chr11 5297588 5297607 5297604 +
attatatactgaactcatgt

SEQ ID NO: 17095 - DNA, 20 bp, Artificial Sequence
  Synthetic oligonucleotide; AGG chr11 5297589 5297608 5297605 +
ttatatactgaactcatgtg

SEQ ID NO: 17096 - DNA, 20 bp, Artificial Sequence
  Synthetic oligonucleotide; CAG chr11 5297595 5297614 5297611 +
actgaactcatgtgaggatc

SEQ ID NO: 17097 - DNA, 20 bp, Artificial Sequence
  Synthetic oligonucleotide; TAG chr11 5297608 5297627 5297624 +
gaggatccagtttctatatc

SEQ ID NO: 17098 - DNA, 20 bp, Artificial Sequence
  Synthetic oligonucleotide; AGG chr11 5297609 5297628 5297625 +
aggatccagtttctatatct

SEQ ID NO: 17099 - DNA, 20 bp, Artificial Sequence
  Synthetic oligonucleotide; TAG chr11 5297627 5297646 5297643 +
ctaggcttttcaaactacct

SEQ ID NO: 17100 - DNA, 20 bp, Artificial Sequence
  Synthetic oligonucleotide; GAG chr11 5297629 5297648 5297645 +
aggcttttcaaactacctta

SEQ ID NO: 17101 - DNA, 20 bp, Artificial Sequence
  Synthetic oligonucleotide; TAG chr11 5297654 5297673 5297670 +
atacttgtatatcttccttg

SEQ ID NO: 17102 - DNA, 20 bp, Artificial Sequence
  Synthetic oligonucleotide; AGG chr11 5297655 5297674 5297671 +
tacttgtatatcttccttgt

SEQ ID NO: 17103 - DNA, 20 bp, Artificial Sequence
  Synthetic oligonucleotide; TAG chr11 5297660 5297679 5297676 +
gtatatcttccttgtaggta

SEQ ID NO: 17104 - DNA, 20 bp, Artificial Sequence
  Synthetic oligonucleotide; GAG chr11 5297662 5297681 5297678 +
atatcttccttgtaggtata

SEQ ID NO: 17105 - DNA, 20 bp, Artificial Sequence
  Synthetic oligonucleotide; CAG chr11 5297679 5297698 5297695 +
atagagtaaaatactaactt

SEQ ID NO: 17106 - DNA, 20 bp, Artificial Sequence
  Synthetic oligonucleotide; AGG chr11 5297680 5297699 5297696 +
tagagtaaaatactaacttc

SEQ ID NO: 17107 - DNA, 20 bp, Artificial Sequence
  Synthetic oligonucleotide; TAG chr11 5297685 5297704 5297701 +
taaaatactaacttcaggtt

SEQ ID NO: 17108 - DNA, 20 bp, Artificial Sequence
  Synthetic oligonucleotide; AAG chr11 5297722 5297741 5297738 +
catattataatttacattgc

SEQ ID NO: 17109 - DNA, 20 bp, Artificial Sequence
  Synthetic oligonucleotide; TGG chr11 5297745 5297764 5297761 +
ttttattttctgttccttat

SEQ ID NO: 17110 - DNA, 20 bp, Artificial Sequence
  Synthetic oligonucleotide; TGG chr11 5297758 5297777 5297774 +
tccttattggtcaatacttt

SEQ ID NO: 17111 - DNA, 20 bp, Artificial Sequence
  Synthetic oligonucleotide; CAG chr11 5297764 5297783 5297780 +
ttggtcaatacttttggatc

SEQ ID NO: 17112 - DNA, 20 bp, Artificial Sequence
  Synthetic oligonucleotide; TGG chr11 5297778 5297797 5297794 +
tggatccagctgttcaactg

SEQ ID NO: 17113 - DNA, 20 bp, Artificial Sequence
  Synthetic oligonucleotide; AAG chr11 5297801 5297820 5297817 +
taacacttgataataatgcc

SEQ ID NO: 17114 - DNA, 20 bp, Artificial Sequence
  Synthetic oligonucleotide; GAG chr11 5297803 5297822 5297819 +
acacttgataataatgccaa

SEQ ID NO: 17115 - DNA, 20 bp, Artificial Sequence
  Synthetic oligonucleotide; AGG chr11 5297804 5297823 5297820 +
cacttgataataatgccaag

SEQ ID NO: 17116 - DNA, 20 bp, Artificial Sequence
  Synthetic oligonucleotide; TGG chr11 5297808 5297827 5297824 +
tgataataatgccaagaggc

SEQ ID NO: 17117 - DNA, 20 bp, Artificial Sequence
  Synthetic oligonucleotide; GGG chr11 5297809 5297828 5297825 +
gataataatgccaagaggct

SEQ ID NO: 17118 - DNA, 20 bp, Artificial Sequence
  Synthetic oligonucleotide; GGG chr11 5297810 5297829 5297826 +
ataataatgccaagaggctg

SEQ ID NO: 17119 - DNA, 20 bp, Artificial Sequence
  Synthetic oligonucleotide; GAG chr11 5297814 5297833 5297830 +
taatgccaagaggctggggt

SEQ ID NO: 17120 - DNA, 20 bp, Artificial Sequence
  Synthetic oligonucleotide; AAG chr11 5297821 5297840 5297837 +
aagaggctggggtgagctat

SEQ ID NO: 17121 - DNA, 20 bp, Artificial Sequence
  Synthetic oligonucleotide; GAG chr11 5297823 5297842 5297839 +
gaggctggggtgagctataa

SEQ ID NO: 17122 - DNA, 20 bp, Artificial Sequence
  Synthetic oligonucleotide; AGG chr11 5297824 5297843 5297840 +
aggctggggtgagctataag

SEQ ID NO: 17123 - DNA, 20 bp, Artificial Sequence
  Synthetic oligonucleotide; GAG chr11 5297826 5297845 5297842 +
gctggggtgagctataagag

SEQ ID NO: 17124 - DNA, 20 bp, Artificial Sequence
  Synthetic oligonucleotide; AAG chr11 5297831 5297850 5297847 +
ggtgagctataagaggagtc

SEQ ID NO: 17125 - DNA, 20 bp, Artificial Sequence
  Synthetic oligonucleotide; AGG chr11 5297832 5297851 5297848 +
gtgagctataagaggagtca

SEQ ID NO: 17126 - DNA, 20 bp, Artificial Sequence
  Synthetic oligonucleotide; CAG chr11 5297840 5297859 5297856 +
taagaggagtcaaggctaat

SEQ ID NO: 17127 - DNA, 20 bp, Artificial Sequence
  Synthetic oligonucleotide; CAG chr11 5297845 5297864 5297861 +
ggagtcaaggctaatcagta

SEQ ID NO: 17128 - DNA, 20 bp, Artificial Sequence
  Synthetic oligonucleotide; AAG chr11 5297849 5297868 5297865 +
tcaaggctaatcagtacagc

SEQ ID NO: 17129 - DNA, 20 bp, Artificial Sequence
  Synthetic oligonucleotide; GAG chr11 5297851 5297870 5297867 +
aaggctaatcagtacagcaa

SEQ ID NO: 17130 - DNA, 20 bp, Artificial Sequence
  Synthetic oligonucleotide; AGG chr11 5297852 5297871 5297868 +
aggctaatcagtacagcaag

SEQ ID NO: 17131 - DNA, 20 bp, Artificial Sequence
  Synthetic oligonucleotide; AAG chr11 5297862 5297881 5297878 +
gtacagcaagaggaatgaat

SEQ ID NO: 17132 - DNA, 20 bp, Artificial Sequence
  Synthetic oligonucleotide; AAG chr11 5297865 5297884 5297881 +
cagcaagaggaatgaataag

SEQ ID NO: 17133 - DNA, 20 bp, Artificial Sequence
  Synthetic oligonucleotide; TAG chr11 5297869 5297888 5297885 +
aagaggaatgaataagaagc

SEQ ID NO: 17134 - DNA, 20 bp, Artificial Sequence
  Synthetic oligonucleotide; AAG chr11 5297875 5297894 5297891 +
aatgaataagaagctagata

SEQ ID NO: 17135 - DNA, 20 bp, Artificial Sequence
  Synthetic oligonucleotide; AGG chr11 5297876 5297895 5297892 +
atgaataagaagctagataa

SEQ ID NO: 17136 - DNA, 20 bp, Artificial Sequence
  Synthetic oligonucleotide; GGG chr11 5297877 5297896 5297893 +
tgaataagaagctagataaa

SEQ ID NO: 17137 - DNA, 20 bp, Artificial Sequence
  Synthetic oligonucleotide; CGG chr11 5297882 5297901 5297898 +
aagaagctagataaagggaa

SEQ ID NO: 17138 - DNA, 20 bp, Artificial Sequence
  Synthetic oligonucleotide; TGG chr11 5297887 5297906 5297903 +
gctagataaagggaacggcg

SEQ ID NO: 17139 - DNA, 20 bp, Artificial Sequence
  Synthetic oligonucleotide; GGG chr11 5297888 5297907 5297904 +
ctagataaagggaacggcgt

SEQ ID NO: 17140 - DNA, 20 bp, Artificial Sequence
  Synthetic oligonucleotide; GAG chr11 5297890 5297909 5297906 +
agataaagggaacggcgtgg

SEQ ID NO: 17141 - DNA, 20 bp, Artificial Sequence
  Synthetic oligonucleotide; AGG chr11 5297891 5297910 5297907 +
gataaagggaacggcgtggg

SEQ ID NO: 17142 - DNA, 20 bp, Artificial Sequence
  Synthetic oligonucleotide; GGG chr11 5297892 5297911 5297908 +
ataaagggaacggcgtggga

SEQ ID NO: 17143 - DNA, 20 bp, Artificial Sequence
  Synthetic oligonucleotide; GAG chr11 5297903 5297922 5297919 +
ggcgtgggagggtgtttcct

SEQ ID NO: 17144 - DNA, 20 bp, Artificial Sequence
  Synthetic oligonucleotide; AGG chr11 5297904 5297923 5297920 +
gcgtgggagggtgtttcctg

SEQ ID NO: 17145 - DNA, 20 bp, Artificial Sequence
  Synthetic oligonucleotide; GGG chr11 5297905 5297924 5297921 +
cgtgggagggtgtttcctga

SEQ ID NO: 17146 - DNA, 20 bp, Artificial Sequence
  Synthetic oligonucleotide; GAG chr11 5297917 5297936 5297933 +
tttcctgagggaatattcat

SEQ ID NO: 17147 - DNA, 20 bp, Artificial Sequence
  Synthetic oligonucleotide; CAG chr11 5297925 5297944 5297941 +
gggaatattcatgagacaaa

SEQ ID NO: 17148 - DNA, 20 bp, Artificial Sequence
  Synthetic oligonucleotide; GAG chr11 5297927 5297946 5297943 +
gaatattcatgagacaaaca

SEQ ID NO: 17149 - DNA, 20 bp, Artificial Sequence
  Synthetic oligonucleotide; AAG chr11 5297934 5297953 5297950 +
catgagacaaacagagaata

SEQ ID NO: 17150 - DNA, 20 bp, Artificial Sequence
  Synthetic oligonucleotide; AAG chr11 5297942 5297961 5297958 +
aaacagagaataaagaaatg

SEQ ID NO: 17151 - DNA, 20 bp, Artificial Sequence
  Synthetic oligonucleotide; AGG chr11 5297943 5297962 5297959 +
aacagagaataaagaaatga

SEQ ID NO: 17152 - DNA, 20 bp, Artificial Sequence
  Synthetic oligonucleotide; GGG chr11 5297944 5297963 5297960 +
acagagaataaagaaatgaa

SEQ ID NO: 17153 - DNA, 20 bp, Artificial Sequence
  Synthetic oligonucleotide; TAG chr11 5297962 5297981 5297978 +
aagggaatgtaaatataata

SEQ ID NO: 17154 - DNA, 20 bp, Artificial Sequence
  Synthetic oligonucleotide; AGG chr11 5297963 5297982 5297979 +
agggaatgtaaatataatat

SEQ ID NO: 17155 - DNA, 20 bp, Artificial Sequence
  Synthetic oligonucleotide; AAG chr11 5297979 5297998 5297995 +
atataggcatgttaatatac

SEQ ID NO: 17156 - DNA, 20 bp, Artificial Sequence
  Synthetic oligonucleotide; TAG chr11 5297989 5298008 5298005 +
gttaatatacaagtgatttc

SEQ ID NO: 17157 - DNA, 20 bp, Artificial Sequence
  Synthetic oligonucleotide; AAG chr11 5297993 5298012 5298009 +
atatacaagtgatttctaga

SEQ ID NO: 17158 - DNA, 20 bp, Artificial Sequence
  Synthetic oligonucleotide; AAG chr11 5298005 5298024 5298021 +
tttctagaaagtgcatgaat

SEQ ID NO: 17159 - DNA, 20 bp, Artificial Sequence
  Synthetic oligonucleotide; CAG chr11 5298009 5298028 5298025 +
tagaaagtgcatgaataaga

SEQ ID NO: 17160 - DNA, 20 bp, Artificial Sequence
  Synthetic oligonucleotide; TAG chr11 5298013 5298032 5298029 +
aagtgcatgaataagacagc

SEQ ID NO: 17161 - DNA, 20 bp, Artificial Sequence
  Synthetic oligonucleotide; AAG chr11 5298017 5298036 5298033 +
gcatgaataagacagctaga

SEQ ID NO: 17162 - DNA, 20 bp, Artificial Sequence
  Synthetic oligonucleotide; TAG chr11 5298021 5298040 5298037 +
gaataagacagctagaaaga

SEQ ID NO: 17163 - DNA, 20 bp, Artificial Sequence
  Synthetic oligonucleotide; AAG chr11 5298025 5298044 5298041 +
aagacagctagaaagataga

SEQ ID NO: 17164 - DNA, 20 bp, Artificial Sequence
  Synthetic oligonucleotide; TGG chr11 5298031 5298050 5298047 +
gctagaaagatagaaagacc

SEQ ID NO: 17165 - DNA, 20 bp, Artificial Sequence
  Synthetic oligonucleotide; CAG chr11 5298056 5298075 5298072 +
cttaaaatgtgaatgtgaaa

SEQ ID NO: 17166 - DNA, 20 bp, Artificial Sequence
  Synthetic oligonucleotide; TGG chr11 5298062 5298081 5298078 +
atgtgaatgtgaaacagttc

SEQ ID NO: 17167 - DNA, 20 bp, Artificial Sequence
  Synthetic oligonucleotide; GAG chr11 5298067 5298086 5298083 +
aatgtgaaacagttctggct

SEQ ID NO: 17168 - DNA, 20 bp, Artificial Sequence
  Synthetic oligonucleotide; GAG chr11 5298069 5298088 5298085 +
tgtgaaacagttctggctga

SEQ ID NO: 17169 - DNA, 20 bp, Artificial Sequence
  Synthetic oligonucleotide; CAG chr11 5298080 5298099 5298096 +
tctggctgagagaaatatct

SEQ ID NO: 17170 - DNA, 20 bp, Artificial Sequence
  Synthetic oligonucleotide; AGG chr11 5298081 5298100 5298097 +
ctggctgagagaaatatctc

SEQ ID NO: 17171 - DNA, 20 bp, Artificial Sequence
  Synthetic oligonucleotide; TGG chr11 5298086 5298105 5298102 +
tgagagaaatatctcaggaa

SEQ ID NO: 17172 - DNA, 20 bp, Artificial Sequence
  Synthetic oligonucleotide; CAG chr11 5298097 5298116 5298113 +
tctcaggaatggccatgttc

SEQ ID NO: 17173 - DNA, 20 bp, Artificial Sequence
  Synthetic oligonucleotide; AGG chr11 5298098 5298117 5298114 +
ctcaggaatggccatgttcc

SEQ ID NO: 17174 - DNA, 20 bp, Artificial Sequence
  Synthetic oligonucleotide; CAG chr11 5298104 5298123 5298120 +
aatggccatgttccaggctt

SEQ ID NO: 17175 - DNA, 20 bp, Artificial Sequence
  Synthetic oligonucleotide; AGG chr11 5298105 5298124 5298121 +
atggccatgttccaggcttc

SEQ ID NO: 17176 - DNA, 20 bp, Artificial Sequence
  Synthetic oligonucleotide; GGG chr11 5298106 5298125 5298122 +
tggccatgttccaggcttca

SEQ ID NO: 17177 - DNA, 20 bp, Artificial Sequence
  Synthetic oligonucleotide; TAG chr11 5298109 5298128 5298125 +
ccatgttccaggcttcaggg

SEQ ID NO: 17178 - DNA, 20 bp, Artificial Sequence
  Synthetic oligonucleotide; AGG chr11 5298110 5298129 5298126 +
catgttccaggcttcagggt

SEQ ID NO: 17179 - DNA, 20 bp, Artificial Sequence
  Synthetic oligonucleotide; CAG chr11 5298121 5298140 5298137 +
cttcagggtaggacccatgc

SEQ ID NO: 17180 - DNA, 20 bp, Artificial Sequence
  Synthetic oligonucleotide; AGG chr11 5298122 5298141 5298138 +
ttcagggtaggacccatgcc

SEQ ID NO: 17181 - DNA, 20 bp, Artificial Sequence
  Synthetic oligonucleotide; GGG chr11 5298123 5298142 5298139 +
tcagggtaggacccatgcca

SEQ ID NO: 17182 - DNA, 20 bp, Artificial Sequence
  Synthetic oligonucleotide; TAG chr11 5298174 5298193 5298190 +
ctgcctcctgtccctatcat

SEQ ID NO: 17183 - DNA, 20 bp, Artificial Sequence
  Synthetic oligonucleotide; AGG chr11 5298175 5298194 5298191 +
tgcctcctgtccctatcatt

SEQ ID NO: 17184 - DNA, 20 bp, Artificial Sequence
  Synthetic oligonucleotide; GAG chr11 5298177 5298196 5298193 +
cctcctgtccctatcattag

SEQ ID NO: 17185 - DNA, 20 bp, Artificial Sequence
  Synthetic oligonucleotide; AGG chr11 5298178 5298197 5298194 +
ctcctgtccctatcattagg

SEQ ID NO: 17186 - DNA, 20 bp, Artificial Sequence
  Synthetic oligonucleotide; CAG chr11 5298182 5298201 5298198 +
tgtccctatcattaggaggc

SEQ ID NO: 17187 - DNA, 20 bp, Artificial Sequence
  Synthetic oligonucleotide; AGG chr11 5298183 5298202 5298199 +
gtccctatcattaggaggcc

SEQ ID NO: 17188 - DNA, 20 bp, Artificial Sequence
  Synthetic oligonucleotide; GGG chr11 5298184 5298203 5298200 +
tccctatcattaggaggcca

SEQ ID NO: 17189 - DNA, 20 bp, Artificial Sequence
  Synthetic oligonucleotide; TGG chr11 5298187 5298206 5298203 +
ctatcattaggaggccaggg

SEQ ID NO: 17190 - DNA, 20 bp, Artificial Sequence
  Synthetic oligonucleotide; GGG chr11 5298188 5298207 5298204 +
tatcattaggaggccagggt

SEQ ID NO: 17191 - DNA, 20 bp, Artificial Sequence
  Synthetic oligonucleotide; GAG chr11 5298190 5298209 5298206 +
tcattaggaggccagggtgg

SEQ ID NO: 17192 - DNA, 20 bp, Artificial Sequence
  Synthetic oligonucleotide; AGG chr11 5298191 5298210 5298207 +
cattaggaggccagggtggg

SEQ ID NO: 17193 - DNA, 20 bp, Artificial Sequence
  Synthetic oligonucleotide; GAG chr11 5298201 5298220 5298217 +
ccagggtgggaggattgctt

SEQ ID NO: 17194 - DNA, 20 bp, Artificial Sequence
  Synthetic oligonucleotide; AGG chr11 5298202 5298221 5298218 +
cagggtgggaggattgcttg

SEQ ID NO: 17195 - DNA, 20 bp, Artificial Sequence
  Synthetic oligonucleotide; TAG chr11 5298206 5298225 5298222 +
gtgggaggattgcttgaggt

SEQ ID NO: 17196 - DNA, 20 bp, Artificial Sequence
  Synthetic oligonucleotide; AGG chr11 5298207 5298226 5298223 +
tgggaggattgcttgaggtt

SEQ ID NO: 17197 - DNA, 20 bp, Artificial Sequence
  Synthetic oligonucleotide; TGG chr11 5298213 5298232 5298229 +
gattgcttgaggttaggaat

SEQ ID NO: 17198 - DNA, 20 bp, Artificial Sequence
  Synthetic oligonucleotide; GAG chr11 5298215 5298234 5298231 +
ttgcttgaggttaggaattg

SEQ ID NO: 17199 - DNA, 20 bp, Artificial Sequence
  Synthetic oligonucleotide; GAG chr11 5298217 5298236 5298233 +
gcttgaggttaggaattgga

SEQ ID NO: 17200 - DNA, 20 bp, Artificial Sequence
  Synthetic oligonucleotide; CAG chr11 5298220 5298239 5298236 +
tgaggttaggaattggagag

SEQ ID NO: 17201 - DNA, 20 bp, Artificial Sequence
  Synthetic oligonucleotide; CGG chr11 5298226 5298245 5298242 +
taggaattggagagcagcct

SEQ ID NO: 17202 - DNA, 20 bp, Artificial Sequence
  Synthetic oligonucleotide; TAG chr11 5298269 5298288 5298285 +
tttacaaaaaataaaaacat

SEQ ID NO: 17203 - DNA, 20 bp, Artificial Sequence
  Synthetic oligonucleotide; TAG chr11 5298273 5298292 5298289 +
caaaaaataaaaacattagc

SEQ ID NO: 17204 - DNA, 20 bp, Artificial Sequence
  Synthetic oligonucleotide; AGG chr11 5298274 5298293 5298290 +
aaaaaataaaaacattagct

SEQ ID NO: 17205 - DNA, 20 bp, Artificial Sequence
  Synthetic oligonucleotide; CAG chr11 5298279 5298298 5298295 +
ataaaaacattagctaggtg

SEQ ID NO: 17206 - DNA, 20 bp, Artificial Sequence
  Synthetic oligonucleotide; TGG chr11 5298282 5298301 5298298 +
aaaacattagctaggtgcag

SEQ ID NO: 17207 - DNA, 20 bp, Artificial Sequence
  Synthetic oligonucleotide; TAG chr11 5298295 5298314 5298311 +
ggtgcagtggcataaacctg

SEQ ID NO: 17208 - DNA, 20 bp, Artificial Sequence
  Synthetic oligonucleotide; TAG chr11 5298301 5298320 5298317 +
gtggcataaacctgtagtcc

SEQ ID NO: 17209 - DNA, 20 bp, Artificial Sequence
  Synthetic oligonucleotide; AGG chr11 5298302 5298321 5298318 +
tggcataaacctgtagtcct

SEQ ID NO: 17210 - DNA, 20 bp, Artificial Sequence
  Synthetic oligonucleotide; AAG chr11 5298313 5298332 5298329 +
tgtagtcctaggtactcaaa

SEQ ID NO: 17211 - DNA, 20 bp, Artificial Sequence
  Synthetic oligonucleotide; GAG chr11 5298318 5298337 5298334 +
tcctaggtactcaaaaagct

SEQ ID NO: 17212 - DNA, 20 bp, Artificial Sequence
  Synthetic oligonucleotide; AGG chr11 5298319 5298338 5298335 +
cctaggtactcaaaaagctg

SEQ ID NO: 17213 - DNA, 20 bp, Artificial Sequence
  Synthetic oligonucleotide; AAG chr11 5298322 5298341 5298338 +
aggtactcaaaaagctgagg

SEQ ID NO: 17214 - DNA, 20 bp, Artificial Sequence
  Synthetic oligonucleotide; AAG chr11 5298325 5298344 5298341 +
tactcaaaaagctgaggaag

SEQ ID NO: 17215 - DNA, 20 bp, Artificial Sequence
  Synthetic oligonucleotide; AGG chr11 5298326 5298345 5298342 +
actcaaaaagctgaggaaga

SEQ ID NO: 17216 - DNA, 20 bp, Artificial Sequence
  Synthetic oligonucleotide; GAG chr11 5298336 5298355 5298352 +
ctgaggaagaaggattgctt

SEQ ID NO: 17217 - DNA, 20 bp, Artificial Sequence
  Synthetic oligonucleotide; CAG chr11 5298341 5298360 5298357 +
gaagaaggattgcttgagcc

SEQ ID NO: 17218 - DNA, 20 bp, Artificial Sequence
  Synthetic oligonucleotide; AGG chr11 5298342 5298361 5298358 +
aagaaggattgcttgagccc

SEQ ID NO: 17219 - DNA, 20 bp, Artificial Sequence
  Synthetic oligonucleotide; AAG chr11 5298350 5298369 5298366 +
ttgcttgagcccaggatttc

SEQ ID NO: 17220 - DNA, 20 bp, Artificial Sequence
  Synthetic oligonucleotide; AGG chr11 5298351 5298370 5298367 +
tgcttgagcccaggatttca

SEQ ID NO: 17221 - DNA, 20 bp, Artificial Sequence
  Synthetic oligonucleotide; CAG chr11 5298357 5298376 5298373 +
agcccaggatttcaaggctg

SEQ ID NO: 17222 - DNA, 20 bp, Artificial Sequence
  Synthetic oligonucleotide; GAG chr11 5298361 5298380 5298377 +
caggatttcaaggctgcagt

SEQ ID NO: 17223 - DNA, 20 bp, Artificial Sequence
  Synthetic oligonucleotide; TGG chr11 5298370 5298389 5298386 +
aaggctgcagtgagctgtga

SEQ ID NO: 17224 - DNA, 20 bp, Artificial Sequence
  Synthetic oligonucleotide; CAG chr11 5298386 5298405 5298402 +
gtgatggcaccactgcactc

SEQ ID NO: 17225 - DNA, 20 bp, Artificial Sequence
  Synthetic oligonucleotide; TGG chr11 5298391 5298410 5298407 +
ggcaccactgcactccagcc

SEQ ID NO: 17226 - DNA, 20 bp, Artificial Sequence
  Synthetic oligonucleotide; GGG chr11 5298392 5298411 5298408 +
gcaccactgcactccagcct

SEQ ID NO: 17227 - DNA, 20 bp, Artificial Sequence
  Synthetic oligonucleotide; CAG chr11 5298398 5298417 5298414 +
ctgcactccagcctgggcaa

SEQ ID NO: 17228 - DNA, 20 bp, Artificial Sequence
  Synthetic oligonucleotide; GAG chr11 5298400 5298419 5298416 +
gcactccagcctgggcaaca

SEQ ID NO: 17229 - DNA, 20 bp, Artificial Sequence
  Synthetic oligonucleotide; AAG chr11 5298404 5298423 5298420 +
tccagcctgggcaacagagc

SEQ ID NO: 17230 - DNA, 20 bp, Artificial Sequence
  Synthetic oligonucleotide; AAG chr11 5298444 5298463 5298460 +
aaataaataaataaataaat

SEQ ID NO: 17231 - DNA, 20 bp, Artificial Sequence
  Synthetic oligonucleotide; TAG chr11 5298450 5298469 5298466 +
ataaataaataaataagctt

SEQ ID NO: 17232 - DNA, 20 bp, Artificial Sequence
  Synthetic oligonucleotide; CAG chr11 5298459 5298478 5298475 +
taaataagctttagccacac

SEQ ID NO: 17233 - DNA, 20 bp, Artificial Sequence
  Synthetic oligonucleotide; AAG chr11 5298464 5298483 5298480 +
aagctttagccacaccagac

SEQ ID NO: 17234 - DNA, 20 bp, Artificial Sequence
  Synthetic oligonucleotide; AAG chr11 5298485 5298504 5298501 +
agtaacattgtgtattttta

SEQ ID NO: 17235 - DNA, 20 bp, Artificial Sequence
  Synthetic oligonucleotide; AGG chr11 5298486 5298505 5298502 +
gtaacattgtgtatttttaa

SEQ ID NO: 17236 - DNA, 20 bp, Artificial Sequence
  Synthetic oligonucleotide; TGG chr11 5298505 5298524 5298521 +
aaggactgcattaataaatt

SEQ ID NO: 17237 - DNA, 20 bp, Artificial Sequence
  Synthetic oligonucleotide; GGG chr11 5298506 5298525 5298522 +
aggactgcattaataaattt

SEQ ID NO: 17238 - DNA, 20 bp, Artificial Sequence
  Synthetic oligonucleotide; GGG chr11 5298507 5298526 5298523 +
ggactgcattaataaatttg

SEQ ID NO: 17239 - DNA, 20 bp, Artificial Sequence
  Synthetic oligonucleotide; GGG chr11 5298508 5298527 5298524 +
gactgcattaataaatttgg

SEQ ID NO: 17240 - DNA, 20 bp, Artificial Sequence
  Synthetic oligonucleotide; CAG chr11 5298515 5298534 5298531 +
ttaataaatttgggggttta

SEQ ID NO: 17241 - DNA, 20 bp, Artificial Sequence
  Synthetic oligonucleotide; TGG chr11 5298520 5298539 5298536 +
aaatttgggggtttacagaa

SEQ ID NO: 17242 - DNA, 20 bp, Artificial Sequence
  Synthetic oligonucleotide; CAG chr11 5298523 5298542 5298539 +
tttgggggtttacagaatgg

SEQ ID NO: 17243 - DNA, 20 bp, Artificial Sequence
  Synthetic oligonucleotide; AGG chr11 5298524 5298543 5298540 +
ttgggggtttacagaatggc

SEQ ID NO: 17244 - DNA, 20 bp, Artificial Sequence
  Synthetic oligonucleotide; TAG chr11 5298527 5298546 5298543 +
ggggtttacagaatggcagg

SEQ ID NO: 17245 - DNA, 20 bp, Artificial Sequence
  Synthetic oligonucleotide; TGG chr11 5298537 5298556 5298553 +
gaatggcaggtagttatcct

SEQ ID NO: 17246 - DNA, 20 bp, Artificial Sequence
  Synthetic oligonucleotide; GGG chr11 5298538 5298557 5298554 +
aatggcaggtagttatcctt

SEQ ID NO: 17247 - DNA, 20 bp, Artificial Sequence
  Synthetic oligonucleotide; AAG chr11 5298541 5298560 5298557 +
ggcaggtagttatccttggg

SEQ ID NO: 17248 - DNA, 20 bp, Artificial Sequence
  Synthetic oligonucleotide; TGG chr11 5298556 5298575 5298572 +
ttgggaagacaatatgctga

SEQ ID NO: 17249 - DNA, 20 bp, Artificial Sequence
  Synthetic oligonucleotide; GGG chr11 5298557 5298576 5298573 +
tgggaagacaatatgctgat

SEQ ID NO: 17250 - DNA, 20 bp, Artificial Sequence
  Synthetic oligonucleotide; GGG chr11 5298558 5298577 5298574 +
gggaagacaatatgctgatg

SEQ ID NO: 17251 - DNA, 20 bp, Artificial Sequence
  Synthetic oligonucleotide; CAG chr11 5298590 5298609 5298606 +
tactgccctgactaaactca

SEQ ID NO: 17252 - DNA, 20 bp, Artificial Sequence
  Synthetic oligonucleotide; CAG chr11 5298598 5298617 5298614 +
tgactaaactcacagtatga

SEQ ID NO: 17253 - DNA, 20 bp, Artificial Sequence
  Synthetic oligonucleotide; GAG chr11 5298600 5298619 5298616 +
actaaactcacagtatgaca

SEQ ID NO: 17254 - DNA, 20 bp, Artificial Sequence
  Synthetic oligonucleotide; CAG chr11 5298631 5298650 5298647 +
gtgctgacttgataattcct

SEQ ID NO: 17255 - DNA, 20 bp, Artificial Sequence
  Synthetic oligonucleotide; GAG chr11 5298633 5298652 5298649 +
gctgacttgataattcctca

SEQ ID NO: 17256 - DNA, 20 bp, Artificial Sequence
  Synthetic oligonucleotide; CAG chr11 5298636 5298655 5298652 +
gacttgataattcctcagag

SEQ ID NO: 17257 - DNA, 20 bp, Artificial Sequence
  Synthetic oligonucleotide; AAG chr11 5298645 5298664 5298661 +
attcctcagagcagatctct

SEQ ID NO: 17258 - DNA, 20 bp, Artificial Sequence
  Synthetic oligonucleotide; GAG chr11 5298647 5298666 5298663 +
tcctcagagcagatctctaa

SEQ ID NO: 17259 - DNA, 20 bp, Artificial Sequence
  Synthetic oligonucleotide; GAG chr11 5298649 5298668 5298665 +
ctcagagcagatctctaaga

SEQ ID NO: 17260 - DNA, 20 bp, Artificial Sequence
  Synthetic oligonucleotide; TAG chr11 5298656 5298675 5298672 +
cagatctctaagagagctta

SEQ ID NO: 17261 - DNA, 20 bp, Artificial Sequence
  Synthetic oligonucleotide; AAG chr11 5298677 5298696 5298693 +
agacacaacgcctgcttcac

SEQ ID NO: 17262 - DNA, 20 bp, Artificial Sequence
  Synthetic oligonucleotide; AGG chr11 5298678 5298697 5298694 +
gacacaacgcctgcttcaca

SEQ ID NO: 17263 - DNA, 20 bp, Artificial Sequence
  Synthetic oligonucleotide; AAG chr11 5298686 5298705 5298702 +
gcctgcttcacaaggttctc

SEQ ID NO: 17264 - DNA, 20 bp, Artificial Sequence
  Synthetic oligonucleotide; TGG chr11 5298691 5298710 5298707 +
cttcacaaggttctcaagta

SEQ ID NO: 17265 - DNA, 20 bp, Artificial Sequence
  Synthetic oligonucleotide; CAG chr11 5298703 5298722 5298719 +
ctcaagtatggcaaacttgt

SEQ ID NO: 17266 - DNA, 20 bp, Artificial Sequence
  Synthetic oligonucleotide; CAG chr11 5298707 5298726 5298723 +
agtatggcaaacttgtcagt

SEQ ID NO: 17267 - DNA, 20 bp, Artificial Sequence
  Synthetic oligonucleotide; AGG chr11 5298708 5298727 5298724 +
gtatggcaaacttgtcagtc

SEQ ID NO: 17268 - DNA, 20 bp, Artificial Sequence
  Synthetic oligonucleotide; GGG chr11 5298709 5298728 5298725 +
tatggcaaacttgtcagtca

SEQ ID NO: 17269 - DNA, 20 bp, Artificial Sequence
  Synthetic oligonucleotide; GAG chr11 5298713 5298732 5298729 +
gcaaacttgtcagtcagggt

SEQ ID NO: 17270 - DNA, 20 bp, Artificial Sequence
  Synthetic oligonucleotide; GAG chr11 5298719 5298738 5298735 +
ttgtcagtcagggtgagact

SEQ ID NO: 17271 - DNA, 20 bp, Artificial Sequence
  Synthetic oligonucleotide; AGG chr11 5298720 5298739 5298736 +
tgtcagtcagggtgagactg

SEQ ID NO: 17272 - DNA, 20 bp, Artificial Sequence
  Synthetic oligonucleotide; GAG chr11 5298725 5298744 5298741 +
gtcagggtgagactgaggat

SEQ ID NO: 17273 - DNA, 20 bp, Artificial Sequence
  Synthetic oligonucleotide; AGG chr11 5298726 5298745 5298742 +
tcagggtgagactgaggatg

SEQ ID NO: 17274 - DNA, 20 bp, Artificial Sequence
  Synthetic oligonucleotide; AAG chr11 5298732 5298751 5298748 +
tgagactgaggatgaggtct

SEQ ID NO: 17275 - DNA, 20 bp, Artificial Sequence
  Synthetic oligonucleotide; GAG chr11 5298734 5298753 5298750 +
agactgaggatgaggtctaa

SEQ ID NO: 17276 - DNA, 20 bp, Artificial Sequence
  Synthetic oligonucleotide; TGG chr11 5298744 5298763 5298760 +
tgaggtctaagagacttgtc

SEQ ID NO: 17277 - DNA, 20 bp, Artificial Sequence
  Synthetic oligonucleotide; AAG chr11 5298747 5298766 5298763 +
ggtctaagagacttgtctgg

SEQ ID NO: 17278 - DNA, 20 bp, Artificial Sequence
  Synthetic oligonucleotide; AAG chr11 5298764 5298783 5298780 +
tggaagctgcacttgtttga

SEQ ID NO: 17279 - DNA, 20 bp, Artificial Sequence
  Synthetic oligonucleotide; AGG chr11 5298765 5298784 5298781 +
ggaagctgcacttgtttgaa

SEQ ID NO: 17280 - DNA, 20 bp, Artificial Sequence
  Synthetic oligonucleotide; CAG chr11 5298783 5298802 5298799 +
aaaggacactgattttactt

SEQ ID NO: 17281 - DNA, 20 bp, Artificial Sequence
  Synthetic oligonucleotide; TGG chr11 5298786 5298805 5298802 +
ggacactgattttacttcag

SEQ ID NO: 17282 - DNA, 20 bp, Artificial Sequence
  Synthetic oligonucleotide; TGG chr11 5298814 5298833 5298830 +
taaatgtccttatatatcac

SEQ ID NO: 17283 - DNA, 20 bp, Artificial Sequence
  Synthetic oligonucleotide; CAG chr11 5298819 5298838 5298835 +
gtccttatatatcactggat

SEQ ID NO: 17284 - DNA, 20 bp, Artificial Sequence
  Synthetic oligonucleotide; CAG chr11 5298822 5298841 5298838 +
cttatatatcactggatcag

SEQ ID NO: 17285 - DNA, 20 bp, Artificial Sequence
  Synthetic oligonucleotide; AGG chr11 5298823 5298842 5298839 +
ttatatatcactggatcagc

SEQ ID NO: 17286 - DNA, 20 bp, Artificial Sequence
  Synthetic oligonucleotide; TGG chr11 5298826 5298845 5298842 +
tatatcactggatcagcagg

SEQ ID NO: 17287 - DNA, 20 bp, Artificial Sequence
  Synthetic oligonucleotide; AAG chr11 5298848 5298867 5298864 +
gatgctgacttaataattga

SEQ ID NO: 17288 - DNA, 20 bp, Artificial Sequence
  Synthetic oligonucleotide; AGG chr11 5298849 5298868 5298865 +
atgctgacttaataattgaa

SEQ ID NO: 17289 - DNA, 20 bp, Artificial Sequence
  Synthetic oligonucleotide; AAG chr11 5298863 5298882 5298879 +
attgaaaggattttcaaact

SEQ ID NO: 17290 - DNA, 20 bp, Artificial Sequence
  Synthetic oligonucleotide; AAG chr11 5298866 5298885 5298882 +
gaaaggattttcaaactaag

SEQ ID NO: 17291 - DNA, 20 bp, Artificial Sequence
  Synthetic oligonucleotide; TAG chr11 5298886 5298905 5298902 +
aagttgtaaaatataatata

SEQ ID NO: 17292 - DNA, 20 bp, Artificial Sequence
  Synthetic oligonucleotide; AGG chr11 5298887 5298906 5298903 +
agttgtaaaatataatatat

SEQ ID NO: 17293 - DNA, 20 bp, Artificial Sequence
  Synthetic oligonucleotide; AAG chr11 5298935 5298954 5298951 +
gcataaatatacatttactt

SEQ ID NO: 17294 - DNA, 20 bp, Artificial Sequence
  Synthetic oligonucleotide; GAG chr11 5298943 5298962 5298959 +
atacatttacttaagaaaat

SEQ ID NO: 17295 - DNA, 20 bp, Artificial Sequence
  Synthetic oligonucleotide; CAG chr11 5298992 5299011 5299008 +
ttgatttttgactattgata

SEQ ID NO: 17296 - DNA, 20 bp, Artificial Sequence
  Synthetic oligonucleotide; AGG chr11 5298993 5299012 5299009 +
tgatttttgactattgatac

SEQ ID NO: 17297 - DNA, 20 bp, Artificial Sequence
  Synthetic oligonucleotide; AAG chr11 5299003 5299022 5299019 +
ctattgatacaggctgttta

SEQ ID NO: 17298 - DNA, 20 bp, Artificial Sequence
  Synthetic oligonucleotide; TAG chr11 5299011 5299030 5299027 +
acaggctgtttaaagatcaa

SEQ ID NO: 17299 - DNA, 20 bp, Artificial Sequence
  Synthetic oligonucleotide; AGG chr11 5299012 5299031 5299028 +
caggctgtttaaagatcaat

SEQ ID NO: 17300 - DNA, 20 bp, Artificial Sequence
  Synthetic oligonucleotide; GAG chr11 5299052 5299071 5299068 +
gtcatcccttgctaacatat

SEQ ID NO: 17301 - DNA, 20 bp, Artificial Sequence
  Synthetic oligonucleotide; GAG chr11 5299062 5299081 5299078 +
gctaacatatgagtaaactt

SEQ ID NO: 17302 - DNA, 20 bp, Artificial Sequence
  Synthetic oligonucleotide; TAG chr11 5299103 5299122 5299119 +
cacttcttcttatttataat

SEQ ID NO: 17303 - DNA, 20 bp, Artificial Sequence
  Synthetic oligonucleotide; TAG chr11 5299120 5299139 5299136 +
aattagatacctctgtttct

SEQ ID NO: 17304 - DNA, 20 bp, Artificial Sequence
  Synthetic oligonucleotide; CAG chr11 5299146 5299165 5299162 +
tcgctatcataccttatttt

SEQ ID NO: 17305 - DNA, 20 bp, Artificial Sequence
  Synthetic oligonucleotide; AAG chr11 5299161 5299180 5299177 +
attttcagcacatcgcccct

SEQ ID NO: 17306 - DNA, 20 bp, Artificial Sequence
  Synthetic oligonucleotide; TAG chr11 5299191 5299210 5299207 +
tacacatttacacattgttg

SEQ ID NO: 17307 - DNA, 20 bp, Artificial Sequence
  Synthetic oligonucleotide; AGG chr11 5299192 5299211 5299208 +
acacatttacacattgttgt

SEQ ID NO: 17308 - DNA, 20 bp, Artificial Sequence
  Synthetic oligonucleotide; AAG chr11 5299214 5299233 5299230 +
gctgtcttcttataacaatc

SEQ ID NO: 17309 - DNA, 20 bp, Artificial Sequence
  Synthetic oligonucleotide; CAG chr11 5299221 5299240 5299237 +
tcttataacaatcaagaaaa

SEQ ID NO: 17310 - DNA, 20 bp, Artificial Sequence
  Synthetic oligonucleotide; CAG chr11 5299318 5299337 5299334 +
cgctatgttttttactctta

SEQ ID NO: 17311 - DNA, 20 bp, Artificial Sequence
  Synthetic oligonucleotide; CAG chr11 5299330 5299349 5299346 +
tactcttacagacatccttt

SEQ ID NO: 17312 - DNA, 20 bp, Artificial Sequence
  Synthetic oligonucleotide; TGG chr11 5299333 5299352 5299349 +
tcttacagacatcctttcag

SEQ ID NO: 17313 - DNA, 20 bp, Artificial Sequence
  Synthetic oligonucleotide; TAG chr11 5299340 5299359 5299356 +
gacatcctttcagtggtcaa

SEQ ID NO: 17314 - DNA, 20 bp, Artificial Sequence
  Synthetic oligonucleotide; GAG chr11 5299342 5299361 5299358 +
catcctttcagtggtcaata

SEQ ID NO: 17315 - DNA, 20 bp, Artificial Sequence
  Synthetic oligonucleotide; CAG chr11 5299348 5299367 5299364 +
ttcagtggtcaatagagatg

SEQ ID NO: 17316 - DNA, 20 bp, Artificial Sequence
  Synthetic oligonucleotide; TAG chr11 5299363 5299382 5299379 +
agatgcagctttcctaaatg

SEQ ID NO: 17317 - DNA, 20 bp, Artificial Sequence
  Synthetic oligonucleotide; TAG chr11 5299375 5299394 5299391 +
cctaaatgtagtttgtatgt

SEQ ID NO: 17318 - DNA, 20 bp, Artificial Sequence
  Synthetic oligonucleotide; TAG chr11 5299392 5299411 5299408 +
tgttagcacaatgtgcattt

SEQ ID NO: 17319 - DNA, 20 bp, Artificial Sequence
  Synthetic oligonucleotide; AAG chr11 5299406 5299425 5299422 +
gcattttagaccaaacaaca

SEQ ID NO: 17320 - DNA, 20 bp, Artificial Sequence
  Synthetic oligonucleotide; AGG chr11 5299407 5299426 5299423 +
cattttagaccaaacaacaa

SEQ ID NO: 17321 - DNA, 20 bp, Artificial Sequence
  Synthetic oligonucleotide; CAG chr11 5299414 5299433 5299430 +
gaccaaacaacaaaggcaac

SEQ ID NO: 17322 - DNA, 20 bp, Artificial Sequence
  Synthetic oligonucleotide; TAG chr11 5299434 5299453 5299450 +
cagaaaacgacgtttctaaa

SEQ ID NO: 17323 - DNA, 20 bp, Artificial Sequence
  Synthetic oligonucleotide; TGG chr11 5299459 5299478 5299475 +
taaactctgtatgccaactt

SEQ ID NO: 17324 - DNA, 20 bp, Artificial Sequence
  Synthetic oligonucleotide; CAG chr11 5299486 5299505 5299502 +
acaaataaataaattttaca

SEQ ID NO: 17325 - DNA, 20 bp, Artificial Sequence
  Synthetic oligonucleotide; GAG chr11 5299488 5299507 5299504 +
aaataaataaattttacaca

SEQ ID NO: 17326 - DNA, 20 bp, Artificial Sequence
  Synthetic oligonucleotide; AAG chr11 5299539 5299558 5299555 +
ccccccacgtcctactttca

SEQ ID NO: 17327 - DNA, 20 bp, Artificial Sequence
  Synthetic oligonucleotide; CAG chr11 5299579 5299598 5299595 +
cgcacaataactgaatcctt

SEQ ID NO: 17328 - DNA, 20 bp, Artificial Sequence
  Synthetic oligonucleotide; AGG chr11 5299580 5299599 5299596 +
gcacaataactgaatccttc

SEQ ID NO: 17329 - DNA, 20 bp, Artificial Sequence
  Synthetic oligonucleotide; GAG chr11 5299582 5299601 5299598 +
acaataactgaatccttcag

SEQ ID NO: 17330 - DNA, 20 bp, Artificial Sequence
  Synthetic oligonucleotide; TAG chr11 5299585 5299604 5299601 +
ataactgaatccttcaggag

SEQ ID NO: 17331 - DNA, 20 bp, Artificial Sequence
  Synthetic oligonucleotide; TAG chr11 5299596 5299615 5299612 +
cttcaggagtagtcatttat

SEQ ID NO: 17332 - DNA, 20 bp, Artificial Sequence
  Synthetic oligonucleotide; TGG chr11 5299622 5299641 5299638 +
ttatttttcctgcatccaaa

SEQ ID NO: 17333 - DNA, 20 bp, Artificial Sequence
  Synthetic oligonucleotide; GGG chr11 5299623 5299642 5299639 +
tatttttcctgcatccaaat

SEQ ID NO: 17334 - DNA, 20 bp, Artificial Sequence
  Synthetic oligonucleotide; TGG chr11 5299636 5299655 5299652 +
tccaaatgggccttctaatt

SEQ ID NO: 17335 - DNA, 20 bp, Artificial Sequence
  Synthetic oligonucleotide; GAG chr11 5299638 5299657 5299654 +
caaatgggccttctaatttg

SEQ ID NO: 17336 - DNA, 20 bp, Artificial Sequence
  Synthetic oligonucleotide; TAG chr11 5299656 5299675 5299672 +
tggagaaatactgcattatt

SEQ ID NO: 17337 - DNA, 20 bp, Artificial Sequence
  Synthetic oligonucleotide; TAG chr11 5299662 5299681 5299678 +
aatactgcattatttagctt

SEQ ID NO: 17338 - DNA, 20 bp, Artificial Sequence
  Synthetic oligonucleotide; CAG chr11 5299669 5299688 5299685 +
cattatttagctttagtttt

SEQ ID NO: 17339 - DNA, 20 bp, Artificial Sequence
  Synthetic oligonucleotide; AAG chr11 5299673 5299692 5299689 +
atttagctttagttttcagt

SEQ ID NO: 17340 - DNA, 20 bp, Artificial Sequence
  Synthetic oligonucleotide; TGG chr11 5299695 5299714 5299711 +
gtattttcttatcaaatctc

SEQ ID NO: 17341 - DNA, 20 bp, Artificial Sequence
  Synthetic oligonucleotide; CAG chr11 5299706 5299725 5299722 +
tcaaatctctggaatatttt

SEQ ID NO: 17342 - DNA, 20 bp, Artificial Sequence
  Synthetic oligonucleotide; GAG chr11 5299708 5299727 5299724 +
aaatctctggaatattttca

SEQ ID NO: 17343 - DNA, 20 bp, Artificial Sequence
  Synthetic oligonucleotide; CAG chr11 5299722 5299741 5299738 +
ttttcagagtgctcactgtc

SEQ ID NO: 17344 - DNA, 20 bp, Artificial Sequence
  Synthetic oligonucleotide; AAG chr11 5299742 5299761 5299758 +
cagatgtaaaataaatatga

SEQ ID NO: 17345 - DNA, 20 bp, Artificial Sequence
  Synthetic oligonucleotide; AAG chr11 5299752 5299771 5299768 +
ataaatatgaaagatttctt

SEQ ID NO: 17346 - DNA, 20 bp, Artificial Sequence
  Synthetic oligonucleotide; AAG chr11 5299757 5299776 5299773 +
tatgaaagatttcttaagtg

SEQ ID NO: 17347 - DNA, 20 bp, Artificial Sequence
  Synthetic oligonucleotide; CAG chr11 5299760 5299779 5299776 +
gaaagatttcttaagtgaag

SEQ ID NO: 17348 - DNA, 20 bp, Artificial Sequence
  Synthetic oligonucleotide; GAG chr11 5299762 5299781 5299778 +
aagatttcttaagtgaagca

SEQ ID NO: 17349 - DNA, 20 bp, Artificial Sequence
  Synthetic oligonucleotide; GAG chr11 5299764 5299783 5299780 +
gatttcttaagtgaagcaga

SEQ ID NO: 17350 - DNA, 20 bp, Artificial Sequence
  Synthetic oligonucleotide; TAG chr11 5299771 5299790 5299787 +
taagtgaagcagagagaatt

SEQ ID NO: 17351 - DNA, 20 bp, Artificial Sequence
  Synthetic oligonucleotide; TGG chr11 5299776 5299795 5299792 +
gaagcagagagaatttagaa

SEQ ID NO: 17352 - DNA, 20 bp, Artificial Sequence
  Synthetic oligonucleotide; TGG chr11 5299792 5299811 5299808 +
agaatggaataattatatac

SEQ ID NO: 17353 - DNA, 20 bp, Artificial Sequence
  Synthetic oligonucleotide; GGG chr11 5299793 5299812 5299809 +
gaatggaataattatatact

SEQ ID NO: 17354 - DNA, 20 bp, Artificial Sequence
  Synthetic oligonucleotide; TGG chr11 5299805 5299824 5299821 +
tatatactgggttctgaaca

SEQ ID NO: 17355 - DNA, 20 bp, Artificial Sequence
  Synthetic oligonucleotide; CAG chr11 5299817 5299836 5299833 +
tctgaacatggactttcaat

SEQ ID NO: 17356 - DNA, 20 bp, Artificial Sequence
  Synthetic oligonucleotide; AAG chr11 5299822 5299841 5299838 +
acatggactttcaatcagaa

SEQ ID NO: 17357 - DNA, 20 bp, Artificial Sequence
  Synthetic oligonucleotide; TAG chr11 5299832 5299851 5299848 +
tcaatcagaaaagaaaatat

SEQ ID NO: 17358 - DNA, 20 bp, Artificial Sequence
  Synthetic oligonucleotide; AAG chr11 5299835 5299854 5299851 +
atcagaaaagaaaatattag

SEQ ID NO: 17359 - DNA, 20 bp, Artificial Sequence
  Synthetic oligonucleotide; AAG chr11 5299839 5299858 5299855 +
gaaaagaaaatattagaagc

SEQ ID NO: 17360 - DNA, 20 bp, Artificial Sequence
  Synthetic oligonucleotide; GAG chr11 5299848 5299867 5299864 +
atattagaagcaagctcaac

SEQ ID NO: 17361 - DNA, 20 bp, Artificial Sequence
  Synthetic oligonucleotide; TGG chr11 5299862 5299881 5299878 +
ctcaacgagaacttaaaaat

SEQ ID NO: 17362 - DNA, 20 bp, Artificial Sequence
  Synthetic oligonucleotide; AAG chr11 5299865 5299884 5299881 +
aacgagaacttaaaaattgg

SEQ ID NO: 17363 - DNA, 20 bp, Artificial Sequence
  Synthetic oligonucleotide; CAG chr11 5299871 5299890 5299887 +
aacttaaaaattggaagaaa

SEQ ID NO: 17364 - DNA, 20 bp, Artificial Sequence
  Synthetic oligonucleotide; CAG chr11 5299874 5299893 5299890 +
ttaaaaattggaagaaacag

SEQ ID NO: 17365 - DNA, 20 bp, Artificial Sequence
  Synthetic oligonucleotide; CAG chr11 5299881 5299900 5299897 +
ttggaagaaacagcagtctt

SEQ ID NO: 17366 - DNA, 20 bp, Artificial Sequence
  Synthetic oligonucleotide; GAG chr11 5299883 5299902 5299899 +
ggaagaaacagcagtcttca

SEQ ID NO: 17367 - DNA, 20 bp, Artificial Sequence
  Synthetic oligonucleotide; GAG chr11 5299885 5299904 5299901 +
aagaaacagcagtcttcaga

SEQ ID NO: 17368 - DNA, 20 bp, Artificial Sequence
  Synthetic oligonucleotide; AGG chr11 5299886 5299905 5299902 +
agaaacagcagtcttcagag

SEQ ID NO: 17369 - DNA, 20 bp, Artificial Sequence
  Synthetic oligonucleotide; GAG chr11 5299905 5299924 5299921 +
gaggaatgaatgcaactttt

SEQ ID NO: 17370 - DNA, 20 bp, Artificial Sequence
  Synthetic oligonucleotide; TAG chr11 5299910 5299929 5299926 +
atgaatgcaacttttgagat

SEQ ID NO: 17371 - DNA, 20 bp, Artificial Sequence
  Synthetic oligonucleotide; AAG chr11 5299921 5299940 5299937 +
ttttgagattagtttcctat

SEQ ID NO: 17372 - DNA, 20 bp, Artificial Sequence
  Synthetic oligonucleotide; AGG chr11 5299922 5299941 5299938 +
tttgagattagtttcctata

SEQ ID NO: 17373 - DNA, 20 bp, Artificial Sequence
  Synthetic oligonucleotide; GAG chr11 5299924 5299943 5299940 +
tgagattagtttcctataag

SEQ ID NO: 17374 - DNA, 20 bp, Artificial Sequence
  Synthetic oligonucleotide; CAG chr11 5299929 5299948 5299945 +
ttagtttcctataaggagat

SEQ ID NO: 17375 - DNA, 20 bp, Artificial Sequence
  Synthetic oligonucleotide; TAG chr11 5299942 5299961 5299958 +
aggagatcagctgcaaatac

SEQ ID NO: 17376 - DNA, 20 bp, Artificial Sequence
  Synthetic oligonucleotide; CAG chr11 5299947 5299966 5299963 +
atcagctgcaaatactagcg

SEQ ID NO: 17377 - DNA, 20 bp, Artificial Sequence
  Synthetic oligonucleotide; TAG chr11 5299953 5299972 5299969 +
tgcaaatactagcgcagaac

SEQ ID NO: 17378 - DNA, 20 bp, Artificial Sequence
  Synthetic oligonucleotide; CAG chr11 5299956 5299975 5299972 +
aaatactagcgcagaactag

SEQ ID NO: 17379 - DNA, 20 bp, Artificial Sequence
  Synthetic oligonucleotide; TAG chr11 5299959 5299978 5299975 +
tactagcgcagaactagcag

SEQ ID NO: 17380 - DNA, 20 bp, Artificial Sequence
  Synthetic oligonucleotide; AAG chr11 5299965 5299984 5299981 +
cgcagaactagcagtagatg

SEQ ID NO: 17381 - DNA, 20 bp, Artificial Sequence
  Synthetic oligonucleotide; TAG chr11 5299993 5300012 5300009 +
gtcatcccctgttacactaa

SEQ ID NO: 17382 - DNA, 20 bp, Artificial Sequence
  Synthetic oligonucleotide; AAG chr11 5299997 5300016 5300013 +
tcccctgttacactaatagc

SEQ ID NO: 17383 - DNA, 20 bp, Artificial Sequence
  Synthetic oligonucleotide; TGG chr11 5300000 5300019 5300016 +
cctgttacactaatagcaag

SEQ ID NO: 17384 - DNA, 20 bp, Artificial Sequence
  Synthetic oligonucleotide; TAG chr11 5300003 5300022 5300019 +
gttacactaatagcaagtgg

SEQ ID NO: 17385 - DNA, 20 bp, Artificial Sequence
  Synthetic oligonucleotide; CGG chr11 5300010 5300029 5300026 +
taatagcaagtggtagactg

SEQ ID NO: 17386 - DNA, 20 bp, Artificial Sequence
  Synthetic oligonucleotide; CAG chr11 5300015 5300034 5300031 +
gcaagtggtagactgcggtt

SEQ ID NO: 17387 - DNA, 20 bp, Artificial Sequence
  Synthetic oligonucleotide; CAG chr11 5300028 5300047 5300044 +
tgcggttcagacccaatgaa

SEQ ID NO: 17388 - DNA, 20 bp, Artificial Sequence
  Synthetic oligonucleotide; AAG chr11 5300035 5300054 5300051 +
cagacccaatgaacagcata

SEQ ID NO: 17389 - DNA, 20 bp, Artificial Sequence
  Synthetic oligonucleotide; AAG chr11 5300054 5300073 5300070 +
aaagacttacaaacactttg

SEQ ID NO: 17390 - DNA, 20 bp, Artificial Sequence
  Synthetic oligonucleotide; AAG chr11 5300057 5300076 5300073 +
gacttacaaacactttgaag

SEQ ID NO: 17391 - DNA, 20 bp, Artificial Sequence
  Synthetic oligonucleotide; AAG chr11 5300064 5300083 5300080 +
aaacactttgaagaagattg

SEQ ID NO: 17392 - DNA, 20 bp, Artificial Sequence
  Synthetic oligonucleotide; AGG chr11 5300065 5300084 5300081 +
aacactttgaagaagattga

SEQ ID NO: 17393 - DNA, 20 bp, Artificial Sequence
  Synthetic oligonucleotide; AAG chr11 5300068 5300087 5300084 +
actttgaagaagattgaagg

SEQ ID NO: 17394 - DNA, 20 bp, Artificial Sequence
  Synthetic oligonucleotide; CAG chr11 5300083 5300102 5300099 +
gaaggaagaaactattccat

SEQ ID NO: 17395 - DNA, 20 bp, Artificial Sequence
  Synthetic oligonucleotide; AAG chr11 5300120 5300139 5300136 +
aatataacattacctttgcc

SEQ ID NO: 17396 - DNA, 20 bp, Artificial Sequence
  Synthetic oligonucleotide; AAG chr11 5300154 5300173 5300170 +
attatcaaaactatttcatg

SEQ ID NO: 17397 - DNA, 20 bp, Artificial Sequence
  Synthetic oligonucleotide; AAG chr11 5300162 5300181 5300178 +
aactatttcatgaagtgaaa

SEQ ID NO: 17398 - DNA, 20 bp, Artificial Sequence
  Synthetic oligonucleotide; GAG chr11 5300169 5300188 5300185 +
tcatgaagtgaaaaagtctc

SEQ ID NO: 17399 - DNA, 20 bp, Artificial Sequence
  Synthetic oligonucleotide; GAG chr11 5300183 5300202 5300199 +
agtctcgagattttttatgt

SEQ ID NO: 17400 - DNA, 20 bp, Artificial Sequence
  Synthetic oligonucleotide; AAG chr11 5300186 5300205 5300202 +
ctcgagattttttatgtgag

SEQ ID NO: 17401 - DNA, 20 bp, Artificial Sequence
  Synthetic oligonucleotide; AAG chr11 5300190 5300209 5300206 +
agattttttatgtgagaagc

SEQ ID NO: 17402 - DNA, 20 bp, Artificial Sequence
  Synthetic oligonucleotide; GAG chr11 5300192 5300211 5300208 +
attttttatgtgagaagcaa

SEQ ID NO: 17403 - DNA, 20 bp, Artificial Sequence
  Synthetic oligonucleotide; AGG chr11 5300193 5300212 5300209 +
ttttttatgtgagaagcaag

SEQ ID NO: 17404 - DNA, 20 bp, Artificial Sequence
  Synthetic oligonucleotide; GGG chr11 5300194 5300213 5300210 +
tttttatgtgagaagcaaga

SEQ ID NO: 17405 - DNA, 20 bp, Artificial Sequence
  Synthetic oligonucleotide; GGG chr11 5300195 5300214 5300211 +
ttttatgtgagaagcaagag

SEQ ID NO: 17406 - DNA, 20 bp, Artificial Sequence
  Synthetic oligonucleotide; TAG chr11 5300201 5300220 5300217 +
gtgagaagcaagaggggaaa

SEQ ID NO: 17407 - DNA, 20 bp, Artificial Sequence
  Synthetic oligonucleotide; TGG chr11 5300207 5300226 5300223 +
agcaagaggggaaatagaaa

SEQ ID NO: 17408 - DNA, 20 bp, Artificial Sequence
  Synthetic oligonucleotide; GGG chr11 5300208 5300227 5300224 +
gcaagaggggaaatagaaat

SEQ ID NO: 17409 - DNA, 20 bp, Artificial Sequence
  Synthetic oligonucleotide; TGG chr11 5300211 5300230 5300227 +
agaggggaaatagaaatggg

SEQ ID NO: 17410 - DNA, 20 bp, Artificial Sequence
  Synthetic oligonucleotide; TAG chr11 5300229 5300248 5300245 +
ggtggtgatatctaaattta

SEQ ID NO: 17411 - DNA, 20 bp, Artificial Sequence
  Synthetic oligonucleotide; TGG chr11 5300233 5300252 5300249 +
gtgatatctaaatttatagt

SEQ ID NO: 17412 - DNA, 20 bp, Artificial Sequence
  Synthetic oligonucleotide; CAG chr11 5300246 5300265 5300262 +
ttatagttggttattttttt

SEQ ID NO: 17413 - DNA, 20 bp, Artificial Sequence
  Synthetic oligonucleotide; AAG chr11 5300249 5300268 5300265 +
tagttggttatttttttcag

SEQ ID NO: 17414 - DNA, 20 bp, Artificial Sequence
  Synthetic oligonucleotide; CAG chr11 5300260 5300279 5300276 +
ttttttcagaagaaaaatgt

SEQ ID NO: 17415 - DNA, 20 bp, Artificial Sequence
  Synthetic oligonucleotide; AGG chr11 5300261 5300280 5300277 +
tttttcagaagaaaaatgtc

SEQ ID NO: 17416 - DNA, 20 bp, Artificial Sequence
  Synthetic oligonucleotide; GAG chr11 5300263 5300282 5300279 +
tttcagaagaaaaatgtcag

SEQ ID NO: 17417 - DNA, 20 bp, Artificial Sequence
  Synthetic oligonucleotide; TAG chr11 5300272 5300291 5300288 +
aaaaatgtcaggagacaaaa

SEQ ID NO: 17418 - DNA, 20 bp, Artificial Sequence
  Synthetic oligonucleotide; AAG chr11 5300276 5300295 5300292 +
atgtcaggagacaaaataga

SEQ ID NO: 17419 - DNA, 20 bp, Artificial Sequence
  Synthetic oligonucleotide; TGG chr11 5300280 5300299 5300296 +
caggagacaaaatagaaagc

SEQ ID NO: 17420 - DNA, 20 bp, Artificial Sequence
  Synthetic oligonucleotide; AAG chr11 5300284 5300303 5300300 +
agacaaaatagaaagctgga

SEQ ID NO: 17421 - DNA, 20 bp, Artificial Sequence
  Synthetic oligonucleotide; AAG chr11 5300287 5300306 5300303 +
caaaatagaaagctggaaag

SEQ ID NO: 17422 - DNA, 20 bp, Artificial Sequence
  Synthetic oligonucleotide; AAG chr11 5300293 5300312 5300309 +
agaaagctggaaagaagaaa

SEQ ID NO: 17423 - DNA, 20 bp, Artificial Sequence
  Synthetic oligonucleotide; AAG chr11 5300300 5300319 5300316 +
tggaaagaagaaaaagtatt

SEQ ID NO: 17424 - DNA, 20 bp, Artificial Sequence
  Synthetic oligonucleotide; TAG chr11 5300304 5300323 5300320 +
aagaagaaaaagtattaagt

SEQ ID NO: 17425 - DNA, 20 bp, Artificial Sequence
  Synthetic oligonucleotide; CAG chr11 5300310 5300329 5300326 +
aaaaagtattaagttagttt

SEQ ID NO: 17426 - DNA, 20 bp, Artificial Sequence
  Synthetic oligonucleotide; CAG chr11 5300313 5300332 5300329 +
aagtattaagttagtttcag

SEQ ID NO: 17427 - DNA, 20 bp, Artificial Sequence
  Synthetic oligonucleotide; TGG chr11 5300320 5300339 5300336 +
aagttagtttcagcagacaa

SEQ ID NO: 17428 - DNA, 20 bp, Artificial Sequence
  Synthetic oligonucleotide; GGG chr11 5300321 5300340 5300337 +
agttagtttcagcagacaat

SEQ ID NO: 17429 - DNA, 20 bp, Artificial Sequence
  Synthetic oligonucleotide; AAG chr11 5300324 5300343 5300340 +
tagtttcagcagacaatggg

SEQ ID NO: 17430 - DNA, 20 bp, Artificial Sequence
  Synthetic oligonucleotide; AAG chr11 5300327 5300346 5300343 +
tttcagcagacaatgggaag

SEQ ID NO: 17431 - DNA, 20 bp, Artificial Sequence
  Synthetic oligonucleotide; AGG chr11 5300328 5300347 5300344 +
ttcagcagacaatgggaaga

SEQ ID NO: 17432 - DNA, 20 bp, Artificial Sequence
  Synthetic oligonucleotide; CGG chr11 5300335 5300354 5300351 +
gacaatgggaagaaggaaaa

SEQ ID NO: 17433 - DNA, 20 bp, Artificial Sequence
  Synthetic oligonucleotide; GGG chr11 5300336 5300355 5300352 +
acaatgggaagaaggaaaac

SEQ ID NO: 17434 - DNA, 20 bp, Artificial Sequence
  Synthetic oligonucleotide; GGG chr11 5300337 5300356 5300353 +
caatgggaagaaggaaaacg

SEQ ID NO: 17435 - DNA, 20 bp, Artificial Sequence
  Synthetic oligonucleotide; TGG chr11 5300341 5300360 5300357 +
gggaagaaggaaaacggggc

SEQ ID NO: 17436 - DNA, 20 bp, Artificial Sequence
  Synthetic oligonucleotide; GGG chr11 5300342 5300361 5300358 +
ggaagaaggaaaacggggct

SEQ ID NO: 17437 - DNA, 20 bp, Artificial Sequence
  Synthetic oligonucleotide; TGG chr11 5300350 5300369 5300366 +
gaaaacggggctgggatatc

SEQ ID NO: 17438 - DNA, 20 bp, Artificial Sequence
  Synthetic oligonucleotide; GAG chr11 5300360 5300379 5300376 +
ctgggatatctggcttccac

SEQ ID NO: 17439 - DNA, 20 bp, Artificial Sequence
  Synthetic oligonucleotide; AAG chr11 5300368 5300387 5300384 +
tctggcttccacgagatgat

SEQ ID NO: 17440 - DNA, 20 bp, Artificial Sequence
  Synthetic oligonucleotide; TAG chr11 5300390 5300409 5300406 +
gaaatgtgtttgctgctatt

SEQ ID NO: 17441 - DNA, 20 bp, Artificial Sequence
  Synthetic oligonucleotide; TAG chr11 5300397 5300416 5300413 +
gtttgctgctatttagctgt

SEQ ID NO: 17442 - DNA, 20 bp, Artificial Sequence
  Synthetic oligonucleotide; TAG chr11 5300418 5300437 5300434 +
agtctgtatcacacgccttt

SEQ ID NO: 17443 - DNA, 20 bp, Artificial Sequence
  Synthetic oligonucleotide; TAG chr11 5300421 5300440 5300437 +
ctgtatcacacgccttttag

SEQ ID NO: 17444 - DNA, 20 bp, Artificial Sequence
  Synthetic oligonucleotide; CAG chr11 5300434 5300453 5300450 +
cttttagtagtaaaatatgc

SEQ ID NO: 17445 - DNA, 20 bp, Artificial Sequence
  Synthetic oligonucleotide; AAG chr11 5300443 5300462 5300459 +
gtaaaatatgccagtctact

SEQ ID NO: 17446 - DNA, 20 bp, Artificial Sequence
  Synthetic oligonucleotide; AGG chr11 5300444 5300463 5300460 +
taaaatatgccagtctacta

SEQ ID NO: 17447 - DNA, 20 bp, Artificial Sequence
  Synthetic oligonucleotide; GGG chr11 5300445 5300464 5300461 +
aaaatatgccagtctactaa

SEQ ID NO: 17448 - DNA, 20 bp, Artificial Sequence
  Synthetic oligonucleotide; GAG chr11 5300462 5300481 5300478 +
taagggaaattacatttcat

SEQ ID NO: 17449 - DNA, 20 bp, Artificial Sequence
  Synthetic oligonucleotide; AAG chr11 5300466 5300485 5300482 +
ggaaattacatttcatgagt

SEQ ID NO: 17450 - DNA, 20 bp, Artificial Sequence
  Synthetic oligonucleotide; AAG chr11 5300476 5300495 5300492 +
tttcatgagtaagcttccta

SEQ ID NO: 17451 - DNA, 20 bp, Artificial Sequence
  Synthetic oligonucleotide; TAG chr11 5300482 5300501 5300498 +
gagtaagcttcctaaagttc

SEQ ID NO: 17452 - DNA, 20 bp, Artificial Sequence
  Synthetic oligonucleotide; TAG chr11 5300497 5300516 5300513 +
agttctagatatttgctgtt

SEQ ID NO: 17453 - DNA, 20 bp, Artificial Sequence
  Synthetic oligonucleotide; AAG chr11 5300508 5300527 5300524 +
tttgctgtttagcctcacac

SEQ ID NO: 17454 - DNA, 20 bp, Artificial Sequence
  Synthetic oligonucleotide; AAG chr11 5300525 5300544 5300541 +
cacaagtttgcttactaatc

SEQ ID NO: 17455 - DNA, 20 bp, Artificial Sequence
  Synthetic oligonucleotide; AAG chr11 5300529 5300548 5300545 +
agtttgcttactaatcaagc

SEQ ID NO: 17456 - DNA, 20 bp, Artificial Sequence
  Synthetic oligonucleotide; CAG chr11 5300540 5300559 5300556 +
taatcaagcaagatcctttt

SEQ ID NO: 17457 - DNA, 20 bp, Artificial Sequence
  Synthetic oligonucleotide; GAG chr11 5300542 5300561 5300558 +
atcaagcaagatccttttca

SEQ ID NO: 17458 - DNA, 20 bp, Artificial Sequence
  Synthetic oligonucleotide; TAG chr11 5300549 5300568 5300565 +
aagatccttttcagagtaac

SEQ ID NO: 17459 - DNA, 20 bp, Artificial Sequence
  Synthetic oligonucleotide; AAG chr11 5300557 5300576 5300573 +
tttcagagtaactagtttca

SEQ ID NO: 17460 - DNA, 20 bp, Artificial Sequence
  Synthetic oligonucleotide; TGG chr11 5300562 5300581 5300578 +
gagtaactagtttcaaagta

SEQ ID NO: 17461 - DNA, 20 bp, Artificial Sequence
  Synthetic oligonucleotide; GAG chr11 5300564 5300583 5300580 +
gtaactagtttcaaagtatg

SEQ ID NO: 17462 - DNA, 20 bp, Artificial Sequence
  Synthetic oligonucleotide; AAG chr11 5300606 5300625 5300622 +
ttattcaaattcacctttat

SEQ ID NO: 17463 - DNA, 20 bp, Artificial Sequence
  Synthetic oligonucleotide; TAG chr11 5300645 5300664 5300661 +
tccaactgcacatttttctt

SEQ ID NO: 17464 - DNA, 20 bp, Artificial Sequence
  Synthetic oligonucleotide; AAG chr11 5300666 5300685 5300682 +
agatgaactgtatttgaccc

SEQ ID NO: 17465 - DNA, 20 bp, Artificial Sequence
  Synthetic oligonucleotide; TAG chr11 5300675 5300694 5300691 +
gtatttgacccaagctgctt

SEQ ID NO: 17466 - DNA, 20 bp, Artificial Sequence
  Synthetic oligonucleotide; TAG chr11 5300707 5300726 5300723 +
cttgactatttctgaaatca

SEQ ID NO: 17467 - DNA, 20 bp, Artificial Sequence
  Synthetic oligonucleotide; TGG chr11 5300722 5300741 5300738 +
aatcatagttactcttcttt

SEQ ID NO: 17468 - DNA, 20 bp, Artificial Sequence
  Synthetic oligonucleotide; CAG chr11 5300763 5300782 5300779 +
cttcctgtattctttttctt

SEQ ID NO: 17469 - DNA, 20 bp, Artificial Sequence
  Synthetic oligonucleotide; TGG chr11 5300772 5300791 5300788 +
ttctttttcttcagcatcac

SEQ ID NO: 17470 - DNA, 20 bp, Artificial Sequence
  Synthetic oligonucleotide; TAG chr11 5300789 5300808 5300805 +
cactggcattccctctttat

SEQ ID NO: 17471 - DNA, 20 bp, Artificial Sequence
  Synthetic oligonucleotide; AGG chr11 5300790 5300809 5300806 +
actggcattccctctttatt

SEQ ID NO: 17472 - DNA, 20 bp, Artificial Sequence
  Synthetic oligonucleotide; CAG chr11 5300860 5300879 5300876 +
taaaaatttctcgctcacat

SEQ ID NO: 17473 - DNA, 20 bp, Artificial Sequence
  Synthetic oligonucleotide; GAG chr11 5300899 5300918 5300915 +
ttaaaattgaatctaactct

SEQ ID NO: 17474 - DNA, 20 bp, Artificial Sequence
  Synthetic oligonucleotide; AGG chr11 5300900 5300919 5300916 +
taaaattgaatctaactctg

SEQ ID NO: 17475 - DNA, 20 bp, Artificial Sequence
  Synthetic oligonucleotide; AAG chr11 5300909 5300928 5300925 +
atctaactctgaggaaaaaa

SEQ ID NO: 17476 - DNA, 20 bp, Artificial Sequence
  Synthetic oligonucleotide; TGG chr11 5300914 5300933 5300930 +
actctgaggaaaaaaaagtg

SEQ ID NO: 17477 - DNA, 20 bp, Artificial Sequence
  Synthetic oligonucleotide; CAG chr11 5300926 5300945 5300942 +
aaaaagtgtggatataaaac

SEQ ID NO: 17478 - DNA, 20 bp, Artificial Sequence
  Synthetic oligonucleotide; AGG chr11 5300927 5300946 5300943 +
aaaagtgtggatataaaacc

SEQ ID NO: 17479 - DNA, 20 bp, Artificial Sequence
  Synthetic oligonucleotide; GGG chr11 5300928 5300947 5300944 +
aaagtgtggatataaaacca

SEQ ID NO: 17480 - DNA, 20 bp, Artificial Sequence
  Synthetic oligonucleotide; CAG chr11 5300939 5300958 5300955 +
ataaaaccagggttcctttt

SEQ ID NO: 17481 - DNA, 20 bp, Artificial Sequence
  Synthetic oligonucleotide; TGG chr11 5300945 5300964 5300961 +
ccagggttccttttcagtaa

SEQ ID NO: 17482 - DNA, 20 bp, Artificial Sequence
  Synthetic oligonucleotide; GGG chr11 5300946 5300965 5300962 +
cagggttccttttcagtaat

SEQ ID NO: 17483 - DNA, 20 bp, Artificial Sequence
  Synthetic oligonucleotide; GAG chr11 5300948 5300967 5300964 +
gggttccttttcagtaatgg

SEQ ID NO: 17484 - DNA, 20 bp, Artificial Sequence
  Synthetic oligonucleotide; GAG chr11 5300950 5300969 5300966 +
gttccttttcagtaatggga

SEQ ID NO: 17485 - DNA, 20 bp, Artificial Sequence
  Synthetic oligonucleotide; AGG chr11 5300951 5300970 5300967 +
ttccttttcagtaatgggag

SEQ ID NO: 17486 - DNA, 20 bp, Artificial Sequence
  Synthetic oligonucleotide; CAG chr11 5300956 5300975 5300972 +
tttcagtaatgggagaggcc

SEQ ID NO: 17487 - DNA, 20 bp, Artificial Sequence
  Synthetic oligonucleotide; TAG chr11 5300965 5300984 5300981 +
tgggagaggcccagaaatcc

SEQ ID NO: 17488 - DNA, 20 bp, Artificial Sequence
  Synthetic oligonucleotide; GAG chr11 5300967 5300986 5300983 +
ggagaggcccagaaatccta

SEQ ID NO: 17489 - DNA, 20 bp, Artificial Sequence
  Synthetic oligonucleotide; GAG chr11 5300975 5300994 5300991 +
ccagaaatcctagagatctt

SEQ ID NO: 17490 - DNA, 20 bp, Artificial Sequence
  Synthetic oligonucleotide; AAG chr11 5300988 5301007 5301004 +
agatcttgagattctgaaat

SEQ ID NO: 17491 - DNA, 20 bp, Artificial Sequence
  Synthetic oligonucleotide; AGG chr11 5300989 5301008 5301005 +
gatcttgagattctgaaata

SEQ ID NO: 17492 - DNA, 20 bp, Artificial Sequence
  Synthetic oligonucleotide; GGG chr11 5300990 5301009 5301006 +
atcttgagattctgaaataa

SEQ ID NO: 17493 - DNA, 20 bp, Artificial Sequence
  Synthetic oligonucleotide; AAG chr11 5300996 5301015 5301012 +
agattctgaaataagggctc

SEQ ID NO: 17494 - DNA, 20 bp, Artificial Sequence
  Synthetic oligonucleotide; CAG chr11 5301011 5301030 5301027 +
ggctcaagccctactctgcc

SEQ ID NO: 17495 - DNA, 20 bp, Artificial Sequence
  Synthetic oligonucleotide; TAG chr11 5301018 5301037 5301034 +
gccctactctgcccagaaaa

SEQ ID NO: 17496 - DNA, 20 bp, Artificial Sequence
  Synthetic oligonucleotide; AGG chr11 5301019 5301038 5301035 +
ccctactctgcccagaaaat

SEQ ID NO: 17497 - DNA, 20 bp, Artificial Sequence
  Synthetic oligonucleotide; TGG chr11 5301047 5301066 5301063 +
aatgcttctttgaatctgct

SEQ ID NO: 17498 - DNA, 20 bp, Artificial Sequence
  Synthetic oligonucleotide; TAG chr11 5301068 5301087 5301084 +
ggtcttgatgctataaatga

SEQ ID NO: 17499 - DNA, 20 bp, Artificial Sequence
  Synthetic oligonucleotide; AGG chr11 5301069 5301088 5301085 +
gtcttgatgctataaatgat

SEQ ID NO: 17500 - DNA, 20 bp, Artificial Sequence
  Synthetic oligonucleotide; TGG chr11 5301081 5301100 5301097 +
taaatgataggattcacgaa

SEQ ID NO: 17501 - DNA, 20 bp, Artificial Sequence
  Synthetic oligonucleotide; GAG chr11 5301083 5301102 5301099 +
aatgataggattcacgaatg

SEQ ID NO: 17502 - DNA, 20 bp, Artificial Sequence
  Synthetic oligonucleotide; AGG chr11 5301084 5301103 5301100 +
atgataggattcacgaatgg

SEQ ID NO: 17503 - DNA, 20 bp, Artificial Sequence
  Synthetic oligonucleotide; AAG chr11 5301088 5301107 5301104 +
taggattcacgaatggagga

SEQ ID NO: 17504 - DNA, 20 bp, Artificial Sequence
  Synthetic oligonucleotide; GAG chr11 5301090 5301109 5301106 +
ggattcacgaatggaggaaa

SEQ ID NO: 17505 - DNA, 20 bp, Artificial Sequence
  Synthetic oligonucleotide; TGG chr11 5301097 5301116 5301113 +
cgaatggaggaaagagaaaa

SEQ ID NO: 17506 - DNA, 20 bp, Artificial Sequence
  Synthetic oligonucleotide; TAG chr11 5301103 5301122 5301119 +
gaggaaagagaaaatggaca

SEQ ID NO: 17507 - DNA, 20 bp, Artificial Sequence
  Synthetic oligonucleotide; TGG chr11 5301110 5301129 5301126 +
gagaaaatggacatagctca

SEQ ID NO: 17508 - DNA, 20 bp, Artificial Sequence
  Synthetic oligonucleotide; TGG chr11 5301116 5301135 5301132 +
atggacatagctcatggtaa

SEQ ID NO: 17509 - DNA, 20 bp, Artificial Sequence
  Synthetic oligonucleotide; GGG chr11 5301117 5301136 5301133 +
tggacatagctcatggtaat

SEQ ID NO: 17510 - DNA, 20 bp, Artificial Sequence
  Synthetic oligonucleotide; GGG chr11 5301118 5301137 5301134 +
ggacatagctcatggtaatg

SEQ ID NO: 17511 - DNA, 20 bp, Artificial Sequence
  Synthetic oligonucleotide; GAG chr11 5301128 5301147 5301144 +
catggtaatggggaccacat

SEQ ID NO: 17512 - DNA, 20 bp, Artificial Sequence
  Synthetic oligonucleotide; AGG chr11 5301129 5301148 5301145 +
atggtaatggggaccacatg

SEQ ID NO: 17513 - DNA, 20 bp, Artificial Sequence
  Synthetic oligonucleotide; CAG chr11 5301162 5301181 5301178 +
ccaaacctgtgaatgaatga

SEQ ID NO: 17514 - DNA, 20 bp, Artificial Sequence
  Synthetic oligonucleotide; CAG chr11 5301173 5301192 5301189 +
aatgaatgacagtcccatca

SEQ ID NO: 17515 - DNA, 20 bp, Artificial Sequence
  Synthetic oligonucleotide; TAG chr11 5301189 5301208 5301205 +
atcacagtgatgtgaaatac

SEQ ID NO: 17516 - DNA, 20 bp, Artificial Sequence
  Synthetic oligonucleotide; AGG chr11 5301190 5301209 5301206 +
tcacagtgatgtgaaatact

SEQ ID NO: 17517 - DNA, 20 bp, Artificial Sequence
  Synthetic oligonucleotide; CAG chr11 5301196 5301215 5301212 +
tgatgtgaaatactaggaca

SEQ ID NO: 17518 - DNA, 20 bp, Artificial Sequence
  Synthetic oligonucleotide; TGG chr11 5301205 5301224 5301221 +
atactaggacacagctaata

SEQ ID NO: 17519 - DNA, 20 bp, Artificial Sequence
  Synthetic oligonucleotide; GGG chr11 5301206 5301225 5301222 +
tactaggacacagctaatat

SEQ ID NO: 17520 - DNA, 20 bp, Artificial Sequence
  Synthetic oligonucleotide; GAG chr11 5301208 5301227 5301224 +
ctaggacacagctaatatgg

SEQ ID NO: 17521 - DNA, 20 bp, Artificial Sequence
  Synthetic oligonucleotide; AAG chr11 5301215 5301234 5301231 +
acagctaatatgggagacac

SEQ ID NO: 17522 - DNA, 20 bp, Artificial Sequence
  Synthetic oligonucleotide; GAG chr11 5301222 5301241 5301238 +
atatgggagacacaagtgtt

SEQ ID NO: 17523 - DNA, 20 bp, Artificial Sequence
  Synthetic oligonucleotide; GAG chr11 5301224 5301243 5301240 +
atgggagacacaagtgttga

SEQ ID NO: 17524 - DNA, 20 bp, Artificial Sequence
  Synthetic oligonucleotide; TAG chr11 5301230 5301249 5301246 +
gacacaagtgttgagagatt

SEQ ID NO: 17525 - DNA, 20 bp, Artificial Sequence
  Synthetic oligonucleotide; CAG chr11 5301245 5301264 5301261 +
agatttagcttcctcttgtc

SEQ ID NO: 17526 - DNA, 20 bp, Artificial Sequence
  Synthetic oligonucleotide; GAG chr11 5301270 5301289 5301286 +
gcaatgcccatcactgtctt

SEQ ID NO: 17527 - DNA, 20 bp, Artificial Sequence
  Synthetic oligonucleotide; AGG chr11 5301271 5301290 5301287 +
caatgcccatcactgtcttg

SEQ ID NO: 17528 - DNA, 20 bp, Artificial Sequence
  Synthetic oligonucleotide; TAG chr11 5301276 5301295 5301292 +
cccatcactgtcttgaggat

SEQ ID NO: 17529 - DNA, 20 bp, Artificial Sequence
  Synthetic oligonucleotide; AAG chr11 5301284 5301303 5301300 +
tgtcttgaggattagtatat

SEQ ID NO: 17530 - DNA, 20 bp, Artificial Sequence
  Synthetic oligonucleotide; AAG chr11 5301289 5301308 5301305 +
tgaggattagtatataagaa

SEQ ID NO: 17531 - DNA, 20 bp, Artificial Sequence
  Synthetic oligonucleotide; TAG chr11 5301300 5301319 5301316 +
atataagaaaagatgatgat

SEQ ID NO: 17532 - DNA, 20 bp, Artificial Sequence
  Synthetic oligonucleotide; GAG chr11 5301302 5301321 5301318 +
ataagaaaagatgatgatta

SEQ ID NO: 17533 - DNA, 20 bp, Artificial Sequence
  Synthetic oligonucleotide; AAG chr11 5301313 5301332 5301329 +
tgatgattagagcatctaaa

SEQ ID NO: 17534 - DNA, 20 bp, Artificial Sequence
  Synthetic oligonucleotide; CAG chr11 5301317 5301336 5301333 +
gattagagcatctaaaaaga

SEQ ID NO: 17535 - DNA, 20 bp, Artificial Sequence
  Synthetic oligonucleotide; AAG chr11 5301323 5301342 5301339 +
agcatctaaaaagacagtca

SEQ ID NO: 17536 - DNA, 20 bp, Artificial Sequence
  Synthetic oligonucleotide; AAG chr11 5301326 5301345 5301342 +
atctaaaaagacagtcaaag

SEQ ID NO: 17537 - DNA, 20 bp, Artificial Sequence
  Synthetic oligonucleotide; TGG chr11 5301339 5301358 5301355 +
gtcaaagaagtctgaataat

SEQ ID NO: 17538 - DNA, 20 bp, Artificial Sequence
  Synthetic oligonucleotide; CAG chr11 5301365 5301384 5301381 +
tatgtgattaaacgtgatat

SEQ ID NO: 17539 - DNA, 20 bp, Artificial Sequence
  Synthetic oligonucleotide; CAG chr11 5301370 5301389 5301386 +
gattaaacgtgatatcagca

SEQ ID NO: 17540 - DNA, 20 bp, Artificial Sequence
  Synthetic oligonucleotide; AGG chr11 5301371 5301390 5301387 +
attaaacgtgatatcagcac

SEQ ID NO: 17541 - DNA, 20 bp, Artificial Sequence
  Synthetic oligonucleotide; GAG chr11 5301375 5301394 5301391 +
aacgtgatatcagcacaggc

SEQ ID NO: 17542 - DNA, 20 bp, Artificial Sequence
  Synthetic oligonucleotide; TGG chr11 5301394 5301413 5301410 +
cgagttttatgacatcttga

SEQ ID NO: 17543 - DNA, 20 bp, Artificial Sequence
  Synthetic oligonucleotide; GAG chr11 5301396 5301415 5301412 +
agttttatgacatcttgatg

SEQ ID NO: 17544 - DNA, 20 bp, Artificial Sequence
  Synthetic oligonucleotide; AGG chr11 5301397 5301416 5301413 +
gttttatgacatcttgatgg

SEQ ID NO: 17545 - DNA, 20 bp, Artificial Sequence
  Synthetic oligonucleotide; AAG chr11 5301412 5301431 5301428 +
gatggaggcaaaatgtgtgc

SEQ ID NO: 17546 - DNA, 20 bp, Artificial Sequence
  Synthetic oligonucleotide; GAG chr11 5301414 5301433 5301430 +
tggaggcaaaatgtgtgcaa

SEQ ID NO: 17547 - DNA, 20 bp, Artificial Sequence
  Synthetic oligonucleotide; AGG chr11 5301415 5301434 5301431 +
ggaggcaaaatgtgtgcaag

SEQ ID NO: 17548 - DNA, 20 bp, Artificial Sequence
  Synthetic oligonucleotide; GGG chr11 5301416 5301435 5301432 +
gaggcaaaatgtgtgcaaga

SEQ ID NO: 17549 - DNA, 20 bp, Artificial Sequence
  Synthetic oligonucleotide; CGG chr11 5301421 5301440 5301437 +
aaaatgtgtgcaagagggca

SEQ ID NO: 17550 - DNA, 20 bp, Artificial Sequence
  Synthetic oligonucleotide; GGG chr11 5301422 5301441 5301438 +
aaatgtgtgcaagagggcac

SEQ ID NO: 17551 - DNA, 20 bp, Artificial Sequence
  Synthetic oligonucleotide; TGG chr11 5301435 5301454 5301451 +
agggcacgggaaccacaata

SEQ ID NO: 17552 - DNA, 20 bp, Artificial Sequence
  Synthetic oligonucleotide; GGG chr11 5301436 5301455 5301452 +
gggcacgggaaccacaatat

SEQ ID NO: 17553 - DNA, 20 bp, Artificial Sequence
  Synthetic oligonucleotide; TAG chr11 5301439 5301458 5301455 +
cacgggaaccacaatatggg

SEQ ID NO: 17554 - DNA, 20 bp, Artificial Sequence
  Synthetic oligonucleotide; CAG chr11 5301442 5301461 5301458 +
gggaaccacaatatgggtag

SEQ ID NO: 17555 - DNA, 20 bp, Artificial Sequence
  Synthetic oligonucleotide; TAG chr11 5301445 5301464 5301461 +
aaccacaatatgggtagcag

SEQ ID NO: 17556 - DNA, 20 bp, Artificial Sequence
  Synthetic oligonucleotide; GAG chr11 5301447 5301466 5301463 +
ccacaatatgggtagcagta

SEQ ID NO: 17557 - DNA, 20 bp, Artificial Sequence
  Synthetic oligonucleotide; AAG chr11 5301453 5301472 5301469 +
tatgggtagcagtagagtga

SEQ ID NO: 17558 - DNA, 20 bp, Artificial Sequence
  Synthetic oligonucleotide; TGG chr11 5301461 5301480 5301477 +
gcagtagagtgaaagaatta

SEQ ID NO: 17559 - DNA, 20 bp, Artificial Sequence
  Synthetic oligonucleotide; GGG chr11 5301462 5301481 5301478 +
cagtagagtgaaagaattat

SEQ ID NO: 17560 - DNA, 20 bp, Artificial Sequence
  Synthetic oligonucleotide; TGG chr11 5301470 5301489 5301486 +
tgaaagaattatgggcaaaa

SEQ ID NO: 17561 - DNA, 20 bp, Artificial Sequence
  Synthetic oligonucleotide; CAG chr11 5301489 5301508 5301505 +
atggacataaaacctctcat

SEQ ID NO: 17562 - DNA, 20 bp, Artificial Sequence
  Synthetic oligonucleotide; CAG chr11 5301498 5301517 5301514 +
aaacctctcatcagtacccc

SEQ ID NO: 17563 - DNA, 20 bp, Artificial Sequence
  Synthetic oligonucleotide; CGG chr11 5301517 5301536 5301533 +
ccagtcctatgttcatcact

SEQ ID NO: 17564 - DNA, 20 bp, Artificial Sequence
  Synthetic oligonucleotide; GGG chr11 5301518 5301537 5301534 +
cagtcctatgttcatcactc

SEQ ID NO: 17565 - DNA, 20 bp, Artificial Sequence
  Synthetic oligonucleotide; TGG chr11 5301524 5301543 5301540 +
tatgttcatcactcgggaat

SEQ ID NO: 17566 - DNA, 20 bp, Artificial Sequence
  Synthetic oligonucleotide; AAG chr11 5301528 5301547 5301544 +
ttcatcactcgggaattggt

SEQ ID NO: 17567 - DNA, 20 bp, Artificial Sequence
  Synthetic oligonucleotide; CAG chr11 5301535 5301554 5301551 +
ctcgggaattggtaagaatg

SEQ ID NO: 17568 - DNA, 20 bp, Artificial Sequence
  Synthetic oligonucleotide; CAG chr11 5301546 5301565 5301562 +
gtaagaatgcagttgtacct

SEQ ID NO: 17569 - DNA, 20 bp, Artificial Sequence
  Synthetic oligonucleotide; TGG chr11 5301549 5301568 5301565 +
agaatgcagttgtacctcag

SEQ ID NO: 17570 - DNA, 20 bp, Artificial Sequence
  Synthetic oligonucleotide; CGG chr11 5301556 5301575 5301572 +
agttgtacctcagtggtgtg

SEQ ID NO: 17571 - DNA, 20 bp, Artificial Sequence
  Synthetic oligonucleotide; TGG chr11 5301560 5301579 5301576 +
gtacctcagtggtgtgcgga

SEQ ID NO: 17572 - DNA, 20 bp, Artificial Sequence
  Synthetic oligonucleotide; CAG chr11 5301571 5301590 5301587 +
gtgtgcggatggcaatgaaa

SEQ ID NO: 17573 - DNA, 20 bp, Artificial Sequence
  Synthetic oligonucleotide; TAG chr11 5301577 5301596 5301593 +
ggatggcaatgaaacagtca

SEQ ID NO: 17574 - DNA, 20 bp, Artificial Sequence
  Synthetic oligonucleotide; AGG chr11 5301578 5301597 5301594 +
gatggcaatgaaacagtcat

SEQ ID NO: 17575 - DNA, 20 bp, Artificial Sequence
  Synthetic oligonucleotide; AAG chr11 5301588 5301607 5301604 +
aaacagtcataggccaaaac

SEQ ID NO: 17576 - DNA, 20 bp, Artificial Sequence
  Synthetic oligonucleotide; AAG chr11 5301592 5301611 5301608 +
agtcataggccaaaacaagc

SEQ ID NO: 17577 - DNA, 20 bp, Artificial Sequence
  Synthetic oligonucleotide; TGG chr11 5301611 5301630 5301627 +
caagatacctgattctacaa

SEQ ID NO: 17578 - DNA, 20 bp, Artificial Sequence
  Synthetic oligonucleotide; CAG chr11 5301615 5301634 5301631 +
atacctgattctacaatggc

SEQ ID NO: 17579 - DNA, 20 bp, Artificial Sequence
  Synthetic oligonucleotide; AAG chr11 5301628 5301647 5301644 +
caatggccagtgaatgaatg

SEQ ID NO: 17580 - DNA, 20 bp, Artificial Sequence
  Synthetic oligonucleotide; AGG chr11 5301629 5301648 5301645 +
aatggccagtgaatgaatga

SEQ ID NO: 17581 - DNA, 20 bp, Artificial Sequence
  Synthetic oligonucleotide; TGG chr11 5301634 5301653 5301650 +
ccagtgaatgaatgaaggat

SEQ ID NO: 17582 - DNA, 20 bp, Artificial Sequence
  Synthetic oligonucleotide; GGG chr11 5301635 5301654 5301651 +
cagtgaatgaatgaaggatt

SEQ ID NO: 17583 - DNA, 20 bp, Artificial Sequence
  Synthetic oligonucleotide; CAG chr11 5301643 5301662 5301659 +
gaatgaaggattgggtgaaa

SEQ ID NO: 17584 - DNA, 20 bp, Artificial Sequence
  Synthetic oligonucleotide; AGG chr11 5301644 5301663 5301660 +
aatgaaggattgggtgaaac

SEQ ID NO: 17585 - DNA, 20 bp, Artificial Sequence
  Synthetic oligonucleotide; CAG chr11 5301647 5301666 5301663 +
gaaggattgggtgaaacagg

SEQ ID NO: 17586 - DNA, 20 bp, Artificial Sequence
  Synthetic oligonucleotide; TGG chr11 5301652 5301671 5301668 +
attgggtgaaacaggcagca

SEQ ID NO: 17587 - DNA, 20 bp, Artificial Sequence
  Synthetic oligonucleotide; GGG chr11 5301653 5301672 5301669 +
ttgggtgaaacaggcagcat

SEQ ID NO: 17588 - DNA, 20 bp, Artificial Sequence
  Synthetic oligonucleotide; TGG chr11 5301667 5301686 5301683 +
cagcatgggcaatctccctc

SEQ ID NO: 17589 - DNA, 20 bp, Artificial Sequence
  Synthetic oligonucleotide; TAG chr11 5301672 5301691 5301688 +
tgggcaatctccctctggtc

SEQ ID NO: 17590 - DNA, 20 bp, Artificial Sequence
  Synthetic oligonucleotide; CAG chr11 5301675 5301694 5301691 +
gcaatctccctctggtctag

SEQ ID NO: 17591 - DNA, 20 bp, Artificial Sequence
  Synthetic oligonucleotide; CAG chr11 5301678 5301697 5301694 +
atctccctctggtctagcag

SEQ ID NO: 17592 - DNA, 20 bp, Artificial Sequence
  Synthetic oligonucleotide; AGG chr11 5301679 5301698 5301695 +
tctccctctggtctagcagc

SEQ ID NO: 17593 - DNA, 20 bp, Artificial Sequence
  Synthetic oligonucleotide; CAG chr11 5301687 5301706 5301703 +
tggtctagcagcaggacacc

SEQ ID NO: 17594 - DNA, 20 bp, Artificial Sequence
  Synthetic oligonucleotide; AGG chr11 5301688 5301707 5301704 +
ggtctagcagcaggacaccc

SEQ ID NO: 17595 - DNA, 20 bp, Artificial Sequence
  Synthetic oligonucleotide; TGG chr11 5301695 5301714 5301711 +
cagcaggacacccaggactg

SEQ ID NO: 17596 - DNA, 20 bp, Artificial Sequence
  Synthetic oligonucleotide; GGG chr11 5301696 5301715 5301712 +
agcaggacacccaggactgt

SEQ ID NO: 17597 - DNA, 20 bp, Artificial Sequence
  Synthetic oligonucleotide; TAG chr11 5301704 5301723 5301720 +
acccaggactgtgggcattg

SEQ ID NO: 17598 - DNA, 20 bp, Artificial Sequence
  Synthetic oligonucleotide; AAG chr11 5301720 5301739 5301736 +
attgtagtgaatgtcatccc

SEQ ID NO: 17599 - DNA, 20 bp, Artificial Sequence
  Synthetic oligonucleotide; AGG chr11 5301721 5301740 5301737 +
ttgtagtgaatgtcatccca

SEQ ID NO: 17600 - DNA, 20 bp, Artificial Sequence
  Synthetic oligonucleotide; CAG chr11 5301735 5301754 5301751 +
atcccaaggtccgtgtctgc

SEQ ID NO: 17601 - DNA, 20 bp, Artificial Sequence
  Synthetic oligonucleotide; TAG chr11 5301740 5301759 5301756 +
aaggtccgtgtctgccagca

SEQ ID NO: 17602 - DNA, 20 bp, Artificial Sequence
  Synthetic oligonucleotide; CAG chr11 5301744 5301763 5301760 +
tccgtgtctgccagcatagc

SEQ ID NO: 17603 - DNA, 20 bp, Artificial Sequence
  Synthetic oligonucleotide; AGG chr11 5301745 5301764 5301761 +
ccgtgtctgccagcatagcc

SEQ ID NO: 17604 - DNA, 20 bp, Artificial Sequence
  Synthetic oligonucleotide; AAG chr11 5301748 5301767 5301764 +
tgtctgccagcatagccagg

SEQ ID NO: 17605 - DNA, 20 bp, Artificial Sequence
  Synthetic oligonucleotide; TAG chr11 5301751 5301770 5301767 +
ctgccagcatagccaggaag

SEQ ID NO: 17606 - DNA, 20 bp, Artificial Sequence
  Synthetic oligonucleotide; TGG chr11 5301758 5301777 5301774 +
catagccaggaagtagtaca

SEQ ID NO: 17607 - DNA, 20 bp, Artificial Sequence
  Synthetic oligonucleotide; GGG chr11 5301759 5301778 5301775 +
atagccaggaagtagtacat

SEQ ID NO: 17608 - DNA, 20 bp, Artificial Sequence
  Synthetic oligonucleotide; TGG chr11 5301766 5301785 5301782 +
ggaagtagtacatgggctca

SEQ ID NO: 17609 - DNA, 20 bp, Artificial Sequence
  Synthetic oligonucleotide; GAG chr11 5301768 5301787 5301784 +
aagtagtacatgggctcatg

SEQ ID NO: 17610 - DNA, 20 bp, Artificial Sequence
  Synthetic oligonucleotide; AGG chr11 5301769 5301788 5301785 +
agtagtacatgggctcatgg

SEQ ID NO: 17611 - DNA, 20 bp, Artificial Sequence
  Synthetic oligonucleotide; GAG chr11 5301789 5301808 5301805 +
aggctgtgatcattccaaat

SEQ ID NO: 17612 - DNA, 20 bp, Artificial Sequence
  Synthetic oligonucleotide; AGG chr11 5301790 5301809 5301806 +
ggctgtgatcattccaaatg

SEQ ID NO: 17613 - DNA, 20 bp, Artificial Sequence
  Synthetic oligonucleotide; AAG chr11 5301795 5301814 5301811 +
tgatcattccaaatgaggac

SEQ ID NO: 17614 - DNA, 20 bp, Artificial Sequence
  Synthetic oligonucleotide; AAG chr11 5301798 5301817 5301814 +
tcattccaaatgaggacaag

SEQ ID NO: 17615 - DNA, 20 bp, Artificial Sequence
  Synthetic oligonucleotide; GAG chr11 5301800 5301819 5301816 +
attccaaatgaggacaagaa

SEQ ID NO: 17616 - DNA, 20 bp, Artificial Sequence
  Synthetic oligonucleotide; AAG chr11 5301816 5301835 5301832 +
agaagagtgccatttccaaa

SEQ ID NO: 17617 - DNA, 20 bp, Artificial Sequence
  Synthetic oligonucleotide; AGG chr11 5301817 5301836 5301833 +
gaagagtgccatttccaaaa

SEQ ID NO: 17618 - DNA, 20 bp, Artificial Sequence
  Synthetic oligonucleotide; CGG chr11 5301821 5301840 5301837 +
agtgccatttccaaaaagga

SEQ ID NO: 17619 - DNA, 20 bp, Artificial Sequence
  Synthetic oligonucleotide; GAG chr11 5301823 5301842 5301839 +
tgccatttccaaaaaggacg

SEQ ID NO: 17620 - DNA, 20 bp, Artificial Sequence
  Synthetic oligonucleotide; AAG chr11 5301826 5301845 5301842 +
catttccaaaaaggacggag

SEQ ID NO: 17621 - DNA, 20 bp, Artificial Sequence
  Synthetic oligonucleotide; TAG chr11 5301829 5301848 5301845 +
ttccaaaaaggacggagaag

SEQ ID NO: 17622 - DNA, 20 bp, Artificial Sequence
  Synthetic oligonucleotide; AAG chr11 5301838 5301857 5301854 +
ggacggagaagtagatgaca

SEQ ID NO: 17623 - DNA, 20 bp, Artificial Sequence
  Synthetic oligonucleotide; AAG chr11 5301841 5301860 5301857 +
cggagaagtagatgacaaag

SEQ ID NO: 17624 - DNA, 20 bp, Artificial Sequence
  Synthetic oligonucleotide; AGG chr11 5301842 5301861 5301858 +
ggagaagtagatgacaaaga

SEQ ID NO: 17625 - DNA, 20 bp, Artificial Sequence
  Synthetic oligonucleotide; TAG chr11 5301848 5301867 5301864 +
gtagatgacaaagaaggaca

SEQ ID NO: 17626 - DNA, 20 bp, Artificial Sequence
  Synthetic oligonucleotide; GAG chr11 5301850 5301869 5301866 +
agatgacaaagaaggacata

SEQ ID NO: 17627 - DNA, 20 bp, Artificial Sequence
  Synthetic oligonucleotide; CGG chr11 5301856 5301875 5301872 +
caaagaaggacatagagatc

SEQ ID NO: 17628 - DNA, 20 bp, Artificial Sequence
  Synthetic oligonucleotide; TAG chr11 5301859 5301878 5301875 +
agaaggacatagagatccgg

SEQ ID NO: 17629 - DNA, 20 bp, Artificial Sequence
  Synthetic oligonucleotide; GAG chr11 5301874 5301893 5301890 +
tccggtagtgaactgcctct

SEQ ID NO: 17630 - DNA, 20 bp, Artificial Sequence
  Synthetic oligonucleotide; AAG chr11 5301880 5301899 5301896 +
agtgaactgcctctgagccc

SEQ ID NO: 17631 - DNA, 20 bp, Artificial Sequence
  Synthetic oligonucleotide; AAG chr11 5301883 5301902 5301899 +
gaactgcctctgagcccaag

SEQ ID NO: 17632 - DNA, 20 bp, Artificial Sequence
  Synthetic oligonucleotide; CAG chr11 5301887 5301906 5301903 +
tgcctctgagcccaagaagc

SEQ ID NO: 17633 - DNA, 20 bp, Artificial Sequence
  Synthetic oligonucleotide; CAG chr11 5301891 5301910 5301907 +
tctgagcccaagaagccagt

SEQ ID NO: 17634 - DNA, 20 bp, Artificial Sequence
  Synthetic oligonucleotide; AAG chr11 5301895 5301914 5301911 +
agcccaagaagccagtcagc

SEQ ID NO: 17635 - DNA, 20 bp, Artificial Sequence
  Synthetic oligonucleotide; AAG chr11 5301898 5301917 5301914 +
ccaagaagccagtcagcaag

SEQ ID NO: 17636 - DNA, 20 bp, Artificial Sequence
  Synthetic oligonucleotide; AGG chr11 5301899 5301918 5301915 +
caagaagccagtcagcaaga

SEQ ID NO: 17637 - DNA, 20 bp, Artificial Sequence
  Synthetic oligonucleotide; GGG chr11 5301900 5301919 5301916 +
aagaagccagtcagcaagaa

SEQ ID NO: 17638 - DNA, 20 bp, Artificial Sequence
  Synthetic oligonucleotide; GGG chr11 5301901 5301920 5301917 +
agaagccagtcagcaagaag

SEQ ID NO: 17639 - DNA, 20 bp, Artificial Sequence
  Synthetic oligonucleotide; CAG chr11 5301905 5301924 5301921 +
gccagtcagcaagaaggggc

SEQ ID NO: 17640 - DNA, 20 bp, Artificial Sequence
  Synthetic oligonucleotide; TGG chr11 5301926 5301945 5301942 +
agcactgttgttataccaca

SEQ ID NO: 17641 - DNA, 20 bp, Artificial Sequence
  Synthetic oligonucleotide; TAG chr11 5301929 5301948 5301945 +
actgttgttataccacatgg

SEQ ID NO: 17642 - DNA, 20 bp, Artificial Sequence
  Synthetic oligonucleotide; AGG chr11 5301930 5301949 5301946 +
ctgttgttataccacatggt

SEQ ID NO: 17643 - DNA, 20 bp, Artificial Sequence
  Synthetic oligonucleotide; CAG chr11 5301938 5301957 5301954 +
ataccacatggtaggttttg

SEQ ID NO: 17644 - DNA, 20 bp, Artificial Sequence
  Synthetic oligonucleotide; AGG chr11 5301939 5301958 5301955 +
taccacatggtaggttttgc

SEQ ID NO: 17645 - DNA, 20 bp, Artificial Sequence
  Synthetic oligonucleotide; TGG chr11 5301942 5301961 5301958 +
cacatggtaggttttgcagg

SEQ ID NO: 17646 - DNA, 20 bp, Artificial Sequence
  Synthetic oligonucleotide; GAG chr11 5301944 5301963 5301960 +
catggtaggttttgcaggtg

SEQ ID NO: 17647 - DNA, 20 bp, Artificial Sequence
  Synthetic oligonucleotide; AAG chr11 5301947 5301966 5301963 +
ggtaggttttgcaggtggag

SEQ ID NO: 17648 - DNA, 20 bp, Artificial Sequence
  Synthetic oligonucleotide; TAG chr11 5301958 5301977 5301974 +
caggtggagaagatattttt

SEQ ID NO: 17649 - DNA, 20 bp, Artificial Sequence
  Synthetic oligonucleotide; AGG chr11 5301959 5301978 5301975 +
aggtggagaagatatttttt

SEQ ID NO: 17650 - DNA, 20 bp, Artificial Sequence
  Synthetic oligonucleotide; GGG chr11 5301960 5301979 5301976 +
ggtggagaagatatttttta

SEQ ID NO: 17651 - DNA, 20 bp, Artificial Sequence
  Synthetic oligonucleotide; GGG chr11 5301961 5301980 5301977 +
gtggagaagatattttttag

SEQ ID NO: 17652 - DNA, 20 bp, Artificial Sequence
  Synthetic oligonucleotide; AAG chr11 5301976 5301995 5301992 +
tttaggggtgatgacctcca

SEQ ID NO: 17653 - DNA, 20 bp, Artificial Sequence
  Synthetic oligonucleotide; CAG chr11 5301982 5302001 5301998 +
ggtgatgacctccaaagatg

SEQ ID NO: 17654 - DNA, 20 bp, Artificial Sequence
  Synthetic oligonucleotide; TAG chr11 5302013 5302032 5302029 +
tttctctcacaatcttcttg

SEQ ID NO: 17655 - DNA, 20 bp, Artificial Sequence
  Synthetic oligonucleotide; CAG chr11 5302024 5302043 5302040 +
atcttcttgtagcacatcat

SEQ ID NO: 17656 - DNA, 20 bp, Artificial Sequence
  Synthetic oligonucleotide; AGG chr11 5302025 5302044 5302041 +
tcttcttgtagcacatcatc

SEQ ID NO: 17657 - DNA, 20 bp, Artificial Sequence
  Synthetic oligonucleotide; TGG chr11 5302060 5302079 5302076 +
tcaaaacttaaatatttttc

SEQ ID NO: 17658 - DNA, 20 bp, Artificial Sequence
  Synthetic oligonucleotide; AAG chr11 5302087 5302106 5302103 +
tctcatacttaattaattgt

SEQ ID NO: 17659 - DNA, 20 bp, Artificial Sequence
  Synthetic oligonucleotide; AAG chr11 5302101 5302120 5302117 +
aattgtaagcctgtactcac

SEQ ID NO: 17660 - DNA, 20 bp, Artificial Sequence
  Synthetic oligonucleotide; AGG chr11 5302102 5302121 5302118 +
attgtaagcctgtactcaca

SEQ ID NO: 17661 - DNA, 20 bp, Artificial Sequence
  Synthetic oligonucleotide; TAG chr11 5302113 5302132 5302129 +
gtactcacaaggcctttccc

SEQ ID NO: 17662 - DNA, 20 bp, Artificial Sequence
  Synthetic oligonucleotide; TGG chr11 5302137 5302156 5302153 +
ataacaaataacaaaaatca

SEQ ID NO: 17663 - DNA, 20 bp, Artificial Sequence
  Synthetic oligonucleotide; CAG chr11 5302141 5302160 5302157 +
caaataacaaaaatcatggt

SEQ ID NO: 17664 - DNA, 20 bp, Artificial Sequence
  Synthetic oligonucleotide; AAG chr11 5302167 5302186 5302183 +
aataattccaattcactatg

SEQ ID NO: 17665 - DNA, 20 bp, Artificial Sequence
  Synthetic oligonucleotide; TAG chr11 5302215 5302234 5302231 +
tcatcttacgtctgtgctca

SEQ ID NO: 17666 - DNA, 20 bp, Artificial Sequence
  Synthetic oligonucleotide; TGG chr11 5302228 5302247 5302244 +
gtgctcatagccttgactct

SEQ ID NO: 17667 - DNA, 20 bp, Artificial Sequence
  Synthetic oligonucleotide; TAG chr11 5302238 5302257 5302254 +
ccttgactcttggtcccaaa

SEQ ID NO: 17668 - DNA, 20 bp, Artificial Sequence
  Synthetic oligonucleotide; AGG chr11 5302239 5302258 5302255 +
cttgactcttggtcccaaat

SEQ ID NO: 17669 - DNA, 20 bp, Artificial Sequence
  Synthetic oligonucleotide; TGG chr11 5302302 5302321 5302318 +
tcctcctattatttatcata

SEQ ID NO: 17670 - DNA, 20 bp, Artificial Sequence
  Synthetic oligonucleotide; GGG chr11 5302303 5302322 5302319 +
cctcctattatttatcatat

SEQ ID NO: 17671 - DNA, 20 bp, Artificial Sequence
  Synthetic oligonucleotide; AAG chr11 5302326 5302345 5302342 +
cccttactgtgttactatcc

SEQ ID NO: 17672 - DNA, 20 bp, Artificial Sequence
  Synthetic oligonucleotide; GAG chr11 5302331 5302350 5302347 +
actgtgttactatccaagtt

SEQ ID NO: 17673 - DNA, 20 bp, Artificial Sequence
  Synthetic oligonucleotide; CAG chr11 5302335 5302354 5302351 +
tgttactatccaagttgagt

SEQ ID NO: 17674 - DNA, 20 bp, Artificial Sequence
  Synthetic oligonucleotide; TGG chr11 5302363 5302382 5302379 +
attttttctcttgaaactaa

SEQ ID NO: 17675 - DNA, 20 bp, Artificial Sequence
  Synthetic oligonucleotide; GGG chr11 5302364 5302383 5302380 +
ttttttctcttgaaactaat

SEQ ID NO: 17676 - DNA, 20 bp, Artificial Sequence
  Synthetic oligonucleotide; CAG chr11 5302368 5302387 5302384 +
ttctcttgaaactaatggga

SEQ ID NO: 17677 - DNA, 20 bp, Artificial Sequence
  Synthetic oligonucleotide; TAG chr11 5302378 5302397 5302394 +
actaatgggacagctgtatt

SEQ ID NO: 17678 - DNA, 20 bp, Artificial Sequence
  Synthetic oligonucleotide; AGG chr11 5302379 5302398 5302395 +
ctaatgggacagctgtattt

SEQ ID NO: 17679 - DNA, 20 bp, Artificial Sequence
  Synthetic oligonucleotide; GAG chr11 5302392 5302411 5302408 +
tgtatttaggattaaccact

SEQ ID NO: 17680 - DNA, 20 bp, Artificial Sequence
  Synthetic oligonucleotide; AGG chr11 5302393 5302412 5302409 +
gtatttaggattaaccactg

SEQ ID NO: 17681 - DNA, 20 bp, Artificial Sequence
  Synthetic oligonucleotide; TAG chr11 5302411 5302430 5302427 +
tgaggaaaatgcttattcaa

SEQ ID NO: 17682 - DNA, 20 bp, Artificial Sequence
  Synthetic oligonucleotide; GAG chr11 5302422 5302441 5302438 +
cttattcaatagaaatgact

SEQ ID NO: 17683 - DNA, 20 bp, Artificial Sequence
  Synthetic oligonucleotide; AAG chr11 5302452 5302471 5302468 +
gtgatcaatgttgctatctc

SEQ ID NO: 17684 - DNA, 20 bp, Artificial Sequence
  Synthetic oligonucleotide; TGG chr11 5302455 5302474 5302471 +
atcaatgttgctatctcaag

SEQ ID NO: 17685 - DNA, 20 bp, Artificial Sequence
  Synthetic oligonucleotide; AAG chr11 5302467 5302486 5302483 +
atctcaagtggactgtgaat

SEQ ID NO: 17686 - DNA, 20 bp, Artificial Sequence
  Synthetic oligonucleotide; AAG chr11 5302470 5302489 5302486 +
tcaagtggactgtgaataag

SEQ ID NO: 17687 - DNA, 20 bp, Artificial Sequence
  Synthetic oligonucleotide; GAG chr11 5302472 5302491 5302488 +
aagtggactgtgaataagaa

SEQ ID NO: 17688 - DNA, 20 bp, Artificial Sequence
  Synthetic oligonucleotide; CAG chr11 5302479 5302498 5302495 +
ctgtgaataagaagagaacc

SEQ ID NO: 17689 - DNA, 20 bp, Artificial Sequence
  Synthetic oligonucleotide; TGG chr11 5302484 5302503 5302500 +
aataagaagagaacccagcc

SEQ ID NO: 17690 - DNA, 20 bp, Artificial Sequence
  Synthetic oligonucleotide; GGG chr11 5302485 5302504 5302501 +
ataagaagagaacccagcct

SEQ ID NO: 17691 - DNA, 20 bp, Artificial Sequence
  Synthetic oligonucleotide; TAG chr11 5302493 5302512 5302509 +
agaacccagcctgggcaaca

SEQ ID NO: 17692 - DNA, 20 bp, Artificial Sequence
  Synthetic oligonucleotide; TAG chr11 5302497 5302516 5302513 +
cccagcctgggcaacatagc

SEQ ID NO: 17693 - DNA, 20 bp, Artificial Sequence
  Synthetic oligonucleotide; AAG chr11 5302522 5302541 5302538 +
cctgcctccaccaaaaaaaa

SEQ ID NO: 17694 - DNA, 20 bp, Artificial Sequence
  Synthetic oligonucleotide; AAG chr11 5302527 5302546 5302543 +
ctccaccaaaaaaaaaagaa

SEQ ID NO: 17695 - DNA, 20 bp, Artificial Sequence
  Synthetic oligonucleotide; TAG chr11 5302538 5302557 5302554 +
aaaaaagaaaagataaaaat

SEQ ID NO: 17696 - DNA, 20 bp, Artificial Sequence
  Synthetic oligonucleotide; TGG chr11 5302542 5302561 5302558 +
aagaaaagataaaaattagc

SEQ ID NO: 17697 - DNA, 20 bp, Artificial Sequence
  Synthetic oligonucleotide; GGG chr11 5302543 5302562 5302559 +
agaaaagataaaaattagct

SEQ ID NO: 17698 - DNA, 20 bp, Artificial Sequence
  Synthetic oligonucleotide; CAG chr11 5302548 5302567 5302564 +
agataaaaattagctgggca

SEQ ID NO: 17699 - DNA, 20 bp, Artificial Sequence
  Synthetic oligonucleotide; AGG chr11 5302549 5302568 5302565 +
gataaaaattagctgggcac

SEQ ID NO: 17700 - DNA, 20 bp, Artificial Sequence
  Synthetic oligonucleotide; GGG chr11 5302550 5302569 5302566 +
ataaaaattagctgggcaca

SEQ ID NO: 17701 - DNA, 20 bp, Artificial Sequence
  Synthetic oligonucleotide; GGG chr11 5302551 5302570 5302567 +
taaaaattagctgggcacag

SEQ ID NO: 17702 - DNA, 20 bp, Artificial Sequence
  Synthetic oligonucleotide; GAG chr11 5302566 5302585 5302582 +
cacaggggcacacatcacct

SEQ ID NO: 17703 - DNA, 20 bp, Artificial Sequence
  Synthetic oligonucleotide; CAG chr11 5302571 5302590 5302587 +
gggcacacatcacctgagcc

SEQ ID NO: 17704 - DNA, 20 bp, Artificial Sequence
  Synthetic oligonucleotide; AGG chr11 5302572 5302591 5302588 +
ggcacacatcacctgagccc

SEQ ID NO: 17705 - DNA, 20 bp, Artificial Sequence
  Synthetic oligonucleotide; GAG chr11 5302580 5302599 5302596 +
tcacctgagcccaggactgt

SEQ ID NO: 17706 - DNA, 20 bp, Artificial Sequence
  Synthetic oligonucleotide; AGG chr11 5302581 5302600 5302597 +
cacctgagcccaggactgtg

SEQ ID NO: 17707 - DNA, 20 bp, Artificial Sequence
  Synthetic oligonucleotide; CAG chr11 5302587 5302606 5302603 +
agcccaggactgtgaggctg

SEQ ID NO: 17708 - DNA, 20 bp, Artificial Sequence
  Synthetic oligonucleotide; AGG chr11 5302588 5302607 5302604 +
gcccaggactgtgaggctgc

SEQ ID NO: 17709 - DNA, 20 bp, Artificial Sequence
  Synthetic oligonucleotide; GGG chr11 5302589 5302608 5302605 +
cccaggactgtgaggctgca

SEQ ID NO: 17710 - DNA, 20 bp, Artificial Sequence
  Synthetic oligonucleotide; GAG chr11 5302591 5302610 5302607 +
caggactgtgaggctgcagg

SEQ ID NO: 17711 - DNA, 20 bp, Artificial Sequence
  Synthetic oligonucleotide; CAG chr11 5302603 5302622 5302619 +
gctgcagggagctatgattg

SEQ ID NO: 17712 - DNA, 20 bp, Artificial Sequence
  Synthetic oligonucleotide; CAG chr11 5302616 5302635 5302632 +
atgattgcagcactgctctc

SEQ ID NO: 17713 - DNA, 20 bp, Artificial Sequence
  Synthetic oligonucleotide; TGG chr11 5302621 5302640 5302637 +
tgcagcactgctctccagcc

SEQ ID NO: 17714 - DNA, 20 bp, Artificial Sequence
  Synthetic oligonucleotide; GGG chr11 5302622 5302641 5302638 +
gcagcactgctctccagcct

SEQ ID NO: 17715 - DNA, 20 bp, Artificial Sequence
  Synthetic oligonucleotide; CGG chr11 5302628 5302647 5302644 +
ctgctctccagcctgggcaa

SEQ ID NO: 17716 - DNA, 20 bp, Artificial Sequence
  Synthetic oligonucleotide; GAG chr11 5302630 5302649 5302646 +
gctctccagcctgggcaacg

SEQ ID NO: 17717 - DNA, 20 bp, Artificial Sequence
  Synthetic oligonucleotide; CAG chr11 5302634 5302653 5302650 +
tccagcctgggcaacggagt

SEQ ID NO: 17718 - DNA, 20 bp, Artificial Sequence
  Synthetic oligonucleotide; AAG chr11 5302674 5302693 5302690 +
aataaaataaaataaaacga

SEQ ID NO: 17719 - DNA, 20 bp, Artificial Sequence
  Synthetic oligonucleotide; GAG chr11 5302696 5302715 5302712 +
gaaaataactcatctattgt

SEQ ID NO: 17720 - DNA, 20 bp, Artificial Sequence
  Synthetic oligonucleotide; CAG chr11 5302705 5302724 5302721 +
tcatctattgtgagtttcca

SEQ ID NO: 17721 - DNA, 20 bp, Artificial Sequence
  Synthetic oligonucleotide; AAG chr11 5302726 5302745 5302742 +
agaaatctgaacacctgaac

SEQ ID NO: 17722 - DNA, 20 bp, Artificial Sequence
  Synthetic oligonucleotide; TGG chr11 5302729 5302748 5302745 +
aatctgaacacctgaacaag

SEQ ID NO: 17723 - DNA, 20 bp, Artificial Sequence
  Synthetic oligonucleotide; GGG chr11 5302730 5302749 5302746 +
atctgaacacctgaacaagt

SEQ ID NO: 17724 - DNA, 20 bp, Artificial Sequence
  Synthetic oligonucleotide; AAG chr11 5302735 5302754 5302751 +
aacacctgaacaagtgggta

SEQ ID NO: 17725 - DNA, 20 bp, Artificial Sequence
  Synthetic oligonucleotide; TAG chr11 5302739 5302758 5302755 +
cctgaacaagtgggtaaagt

SEQ ID NO: 17726 - DNA, 20 bp, Artificial Sequence
  Synthetic oligonucleotide; TAG chr11 5302753 5302772 5302769 +
taaagttagtaaactcattt

SEQ ID NO: 17727 - DNA, 20 bp, Artificial Sequence
  Synthetic oligonucleotide; AAG chr11 5302757 5302776 5302773 +
gttagtaaactcattttaga

SEQ ID NO: 17728 - DNA, 20 bp, Artificial Sequence
  Synthetic oligonucleotide; AGG chr11 5302758 5302777 5302774 +
ttagtaaactcattttagaa

SEQ ID NO: 17729 - DNA, 20 bp, Artificial Sequence
  Synthetic oligonucleotide; CAG chr11 5302771 5302790 5302787 +
tttagaaaggtgtaattact

SEQ ID NO: 17730 - DNA, 20 bp, Artificial Sequence
  Synthetic oligonucleotide; TGG chr11 5302774 5302793 5302790 +
agaaaggtgtaattactcag

SEQ ID NO: 17731 - DNA, 20 bp, Artificial Sequence
  Synthetic oligonucleotide; TGG chr11 5302780 5302799 5302796 +
gtgtaattactcagtggact

SEQ ID NO: 17732 - DNA, 20 bp, Artificial Sequence
  Synthetic oligonucleotide; GGG chr11 5302781 5302800 5302797 +
tgtaattactcagtggactt

SEQ ID NO: 17733 - DNA, 20 bp, Artificial Sequence
  Synthetic oligonucleotide; CAG chr11 5302787 5302806 5302803 +
tactcagtggacttgggact

SEQ ID NO: 17734 - DNA, 20 bp, Artificial Sequence
  Synthetic oligonucleotide; AAG chr11 5302791 5302810 5302807 +
cagtggacttgggactcagc

SEQ ID NO: 17735 - DNA, 20 bp, Artificial Sequence
  Synthetic oligonucleotide; AAG chr11 5302810 5302829 5302826 +
caagttccctatgctgcaaa

SEQ ID NO: 17736 - DNA, 20 bp, Artificial Sequence
  Synthetic oligonucleotide; GAG chr11 5302816 5302835 5302832 +
ccctatgctgcaaaaagtct

SEQ ID NO: 17737 - DNA, 20 bp, Artificial Sequence
  Synthetic oligonucleotide; TGG chr11 5302822 5302841 5302838 +
gctgcaaaaagtctgagttt

SEQ ID NO: 17738 - DNA, 20 bp, Artificial Sequence
  Synthetic oligonucleotide; TAG chr11 5302830 5302849 5302846 +
aagtctgagttttggcacat

SEQ ID NO: 17739 - DNA, 20 bp, Artificial Sequence
  Synthetic oligonucleotide; AGG chr11 5302831 5302850 5302847 +
agtctgagttttggcacatt

SEQ ID NO: 17740 - DNA, 20 bp, Artificial Sequence
  Synthetic oligonucleotide; GGG chr11 5302832 5302851 5302848 +
gtctgagttttggcacatta

SEQ ID NO: 17741 - DNA, 20 bp, Artificial Sequence
  Synthetic oligonucleotide; TAG chr11 5302848 5302867 5302864 +
attagggacaaacatgaaaa

SEQ ID NO: 17742 - DNA, 20 bp, Artificial Sequence
  Synthetic oligonucleotide; AGG chr11 5302849 5302868 5302865 +
ttagggacaaacatgaaaat

SEQ ID NO: 17743 - DNA, 20 bp, Artificial Sequence
  Synthetic oligonucleotide; GAG chr11 5302851 5302870 5302867 +
agggacaaacatgaaaatag

SEQ ID NO: 17744 - DNA, 20 bp, Artificial Sequence
  Synthetic oligonucleotide; TGG chr11 5302862 5302881 5302878 +
tgaaaataggagactcatgt

SEQ ID NO: 17745 - DNA, 20 bp, Artificial Sequence
  Synthetic oligonucleotide; AAG chr11 5302865 5302884 5302881 +
aaataggagactcatgttgg

SEQ ID NO: 17746 - DNA, 20 bp, Artificial Sequence
  Synthetic oligonucleotide; CGG chr11 5302875 5302894 5302891 +
ctcatgttggaagctcataa

SEQ ID NO: 17747 - DNA, 20 bp, Artificial Sequence
  Synthetic oligonucleotide; AAG chr11 5302887 5302906 5302903 +
gctcataacggaaatatttt

SEQ ID NO: 17748 - DNA, 20 bp, Artificial Sequence
  Synthetic oligonucleotide; AGG chr11 5302888 5302907 5302904 +
ctcataacggaaatatttta

SEQ ID NO: 17749 - DNA, 20 bp, Artificial Sequence
  Synthetic oligonucleotide; GAG chr11 5302906 5302925 5302922 +
taaggacatacttctacaat

SEQ ID NO: 17750 - DNA, 20 bp, Artificial Sequence
  Synthetic oligonucleotide; AGG chr11 5302907 5302926 5302923 +
aaggacatacttctacaatg

SEQ ID NO: 17751 - DNA, 20 bp, Artificial Sequence
  Synthetic oligonucleotide; GGG chr11 5302908 5302927 5302924 +
aggacatacttctacaatga

SEQ ID NO: 17752 - DNA, 20 bp, Artificial Sequence
  Synthetic oligonucleotide; AAG chr11 5302920 5302939 5302936 +
tacaatgagggcctccacaa

SEQ ID NO: 17753 - DNA, 20 bp, Artificial Sequence
  Synthetic oligonucleotide; TAG chr11 5302935 5302954 5302951 +
cacaaaagcctaatacttgt

SEQ ID NO: 17754 - DNA, 20 bp, Artificial Sequence
  Synthetic oligonucleotide; GAG chr11 5302937 5302956 5302953 +
caaaagcctaatacttgtta

SEQ ID NO: 17755 - DNA, 20 bp, Artificial Sequence
  Synthetic oligonucleotide; TAG chr11 5302943 5302962 5302959 +
cctaatacttgttagagtca

SEQ ID NO: 17756 - DNA, 20 bp, Artificial Sequence
  Synthetic oligonucleotide; AAG chr11 5302952 5302971 5302968 +
tgttagagtcatagattcgt

SEQ ID NO: 17757 - DNA, 20 bp, Artificial Sequence
  Synthetic oligonucleotide; AAG chr11 5302967 5302986 5302983 +
ttcgtaagtatgttgatctg

SEQ ID NO: 17758 - DNA, 20 bp, Artificial Sequence
  Synthetic oligonucleotide; AGG chr11 5302968 5302987 5302984 +
tcgtaagtatgttgatctga

SEQ ID NO: 17759 - DNA, 20 bp, Artificial Sequence
  Synthetic oligonucleotide; GGG chr11 5302969 5302988 5302985 +
cgtaagtatgttgatctgaa

SEQ ID NO: 17760 - DNA, 20 bp, Artificial Sequence
  Synthetic oligonucleotide; TAG chr11 5302975 5302994 5302991 +
tatgttgatctgaagggcaa

SEQ ID NO: 17761 - DNA, 20 bp, Artificial Sequence
  Synthetic oligonucleotide; CGG chr11 5302984 5303003 5303000 +
ctgaagggcaatagtaatat

SEQ ID NO: 17762 - DNA, 20 bp, Artificial Sequence
  Synthetic oligonucleotide; AAG chr11 5302987 5303006 5303003 +
aagggcaatagtaatatcgg

SEQ ID NO: 17763 - DNA, 20 bp, Artificial Sequence
  Synthetic oligonucleotide; TGG chr11 5302991 5303010 5303007 +
gcaatagtaatatcggaagt

SEQ ID NO: 17764 - DNA, 20 bp, Artificial Sequence
  Synthetic oligonucleotide; GAG chr11 5302999 5303018 5303015 +
aatatcggaagttggtaatt

SEQ ID NO: 17765 - DNA, 20 bp, Artificial Sequence
  Synthetic oligonucleotide; CAG chr11 5303021 5303040 5303037 +
gttaataaacttcacacaac

SEQ ID NO: 17766 - DNA, 20 bp, Artificial Sequence
  Synthetic oligonucleotide; TAG chr11 5303027 5303046 5303043 +
aaacttcacacaaccagttc

SEQ ID NO: 17767 - DNA, 20 bp, Artificial Sequence
  Synthetic oligonucleotide; AGG chr11 5303028 5303047 5303044 +
aacttcacacaaccagttct

SEQ ID NO: 17768 - DNA, 20 bp, Artificial Sequence
  Synthetic oligonucleotide; GGG chr11 5303029 5303048 5303045 +
acttcacacaaccagttcta

SEQ ID NO: 17769 - DNA, 20 bp, Artificial Sequence
  Synthetic oligonucleotide; AAG chr11 5303034 5303053 5303050 +
acacaaccagttctagggaa

SEQ ID NO: 17770 - DNA, 20 bp, Artificial Sequence
  Synthetic oligonucleotide; AAG chr11 5303039 5303058 5303055 +
accagttctagggaaaagat

SEQ ID NO: 17771 - DNA, 20 bp, Artificial Sequence
  Synthetic oligonucleotide; CAG chr11 5303048 5303067 5303064 +
agggaaaagataagcactcc

SEQ ID NO: 17772 - DNA, 20 bp, Artificial Sequence
  Synthetic oligonucleotide; GAG chr11 5303050 5303069 5303066 +
ggaaaagataagcactccca

SEQ ID NO: 17773 - DNA, 20 bp, Artificial Sequence
  Synthetic oligonucleotide; GAG chr11 5303052 5303071 5303068 +
aaaagataagcactcccaga

SEQ ID NO: 17774 - DNA, 20 bp, Artificial Sequence
  Synthetic oligonucleotide; CGG chr11 5303061 5303080 5303077 +
gcactcccagagagaaaata

SEQ ID NO: 17775 - DNA, 20 bp, Artificial Sequence
  Synthetic oligonucleotide; TGG chr11 5303079 5303098 5303095 +
tacggcaactatgttgctga

SEQ ID NO: 17776 - DNA, 20 bp, Artificial Sequence
  Synthetic oligonucleotide; GAG chr11 5303081 5303100 5303097 +
cggcaactatgttgctgatg

SEQ ID NO: 17777 - DNA, 20 bp, Artificial Sequence
  Synthetic oligonucleotide; CAG chr11 5303093 5303112 5303109 +
tgctgatggagacaatctta

SEQ ID NO: 17778 - DNA, 20 bp, Artificial Sequence
  Synthetic oligonucleotide; AAG chr11 5303120 5303139 5303136 +
tctaatcattatgaatctgt

SEQ ID NO: 17779 - DNA, 20 bp, Artificial Sequence
  Synthetic oligonucleotide; GAG chr11 5303132 5303151 5303148 +
gaatctgtaagactcgtatt

SEQ ID NO: 17780 - DNA, 20 bp, Artificial Sequence
  Synthetic oligonucleotide; AAG chr11 5303145 5303164 5303161 +
tcgtattgagaaaaattcac

SEQ ID NO: 17781 - DNA, 20 bp, Artificial Sequence
  Synthetic oligonucleotide; AGG chr11 5303146 5303165 5303162 +
cgtattgagaaaaattcaca

SEQ ID NO: 17782 - DNA, 20 bp, Artificial Sequence
  Synthetic oligonucleotide; TAG chr11 5303156 5303175 5303172 +
aaaattcacaaggatcctca

SEQ ID NO: 17783 - DNA, 20 bp, Artificial Sequence
  Synthetic oligonucleotide; AGG chr11 5303157 5303176 5303173 +
aaattcacaaggatcctcat

SEQ ID NO: 17784 - DNA, 20 bp, Artificial Sequence
  Synthetic oligonucleotide; GGG chr11 5303158 5303177 5303174 +
aattcacaaggatcctcata

SEQ ID NO: 17785 - DNA, 20 bp, Artificial Sequence
  Synthetic oligonucleotide; AAG chr11 5303168 5303187 5303184 +
gatcctcatagggaactatg

SEQ ID NO: 17786 - DNA, 20 bp, Artificial Sequence
  Synthetic oligonucleotide; AAG chr11 5303218 5303237 5303234 +
tttataattacacttttaca

SEQ ID NO: 17787 - DNA, 20 bp, Artificial Sequence
  Synthetic oligonucleotide; AAG chr11 5303223 5303242 5303239 +
aattacacttttacaaagtc

SEQ ID NO: 17788 - DNA, 20 bp, Artificial Sequence
  Synthetic oligonucleotide; AAG chr11 5303246 5303265 5303262 +
atttttgttgttgtgatacc

SEQ ID NO: 17789 - DNA, 20 bp, Artificial Sequence
  Synthetic oligonucleotide; TAG chr11 5303257 5303276 5303273 +
tgtgataccaagaaattttg

SEQ ID NO: 17790 - DNA, 20 bp, Artificial Sequence
  Synthetic oligonucleotide; CAG chr11 5303260 5303279 5303276 +
gataccaagaaattttgtag

SEQ ID NO: 17791 - DNA, 20 bp, Artificial Sequence
  Synthetic oligonucleotide; AGG chr11 5303261 5303280 5303277 +
ataccaagaaattttgtagc

SEQ ID NO: 17792 - DNA, 20 bp, Artificial Sequence
  Synthetic oligonucleotide; TGG chr11 5303269 5303288 5303285 +
aaattttgtagcaggtttat

SEQ ID NO: 17793 - DNA, 20 bp, Artificial Sequence
  Synthetic oligonucleotide; GGG chr11 5303270 5303289 5303286 +
aattttgtagcaggtttatt

SEQ ID NO: 17794 - DNA, 20 bp, Artificial Sequence
  Synthetic oligonucleotide; AAG chr11 5303279 5303298 5303295 +
gcaggtttattgggaaaaca

SEQ ID NO: 17795 - DNA, 20 bp, Artificial Sequence
  Synthetic oligonucleotide; GAG chr11 5303281 5303300 5303297 +
aggtttattgggaaaacaaa

SEQ ID NO: 17796 - DNA, 20 bp, Artificial Sequence
  Synthetic oligonucleotide; AAG chr11 5303290 5303309 5303306 +
gggaaaacaaagagaactac

SEQ ID NO: 17797 - DNA, 20 bp, Artificial Sequence
  Synthetic oligonucleotide; AGG chr11 5303291 5303310 5303307 +
ggaaaacaaagagaactaca

SEQ ID NO: 17798 - DNA, 20 bp, Artificial Sequence
  Synthetic oligonucleotide; GGG chr11 5303292 5303311 5303308 +
gaaaacaaagagaactacaa

SEQ ID NO: 17799 - DNA, 20 bp, Artificial Sequence
  Synthetic oligonucleotide; CAG chr11 5303300 5303319 5303316 +
agagaactacaagggaaact

SEQ ID NO: 17800 - DNA, 20 bp, Artificial Sequence
  Synthetic oligonucleotide; CAG chr11 5303336 5303355 5303352 +
caattgattctgtatgtgtc

SEQ ID NO: 17801 - DNA, 20 bp, Artificial Sequence
  Synthetic oligonucleotide; GAG chr11 5303338 5303357 5303354 +
attgattctgtatgtgtcca

SEQ ID NO: 17802 - DNA, 20 bp, Artificial Sequence
  Synthetic oligonucleotide; AAG chr11 5303390 5303409 5303406 +
tattactaccgacacctttg

SEQ ID NO: 17803 - DNA, 20 bp, Artificial Sequence
  Synthetic oligonucleotide; CAG chr11 5303400 5303419 5303416 +
gacacctttgaagtgtaatt

SEQ ID NO: 17804 - DNA, 20 bp, Artificial Sequence
  Synthetic oligonucleotide; AAG chr11 5303411 5303430 5303427 +
agtgtaattcagtaaaaatg

SEQ ID NO: 17805 - DNA, 20 bp, Artificial Sequence
  Synthetic oligonucleotide; TAG chr11 5303455 5303474 5303471 +
ttttattttataaaaaccta

SEQ ID NO: 17806 - DNA, 20 bp, Artificial Sequence
  Synthetic oligonucleotide; CAG chr11 5303480 5303499 5303496 +
acaataataattatatgttt

SEQ ID NO: 17807 - DNA, 20 bp, Artificial Sequence
  Synthetic oligonucleotide; TGG chr11 5303488 5303507 5303504 +
aattatatgtttcagaattt

SEQ ID NO: 17808 - DNA, 20 bp, Artificial Sequence
  Synthetic oligonucleotide; TAG chr11 5303495 5303514 5303511 +
tgtttcagaattttggcaca

SEQ ID NO: 17809 - DNA, 20 bp, Artificial Sequence
  Synthetic oligonucleotide; AAG chr11 5303513 5303532 5303529 +
catagtaacatctctaatat

SEQ ID NO: 17810 - DNA, 20 bp, Artificial Sequence
  Synthetic oligonucleotide; TGG chr11 5303523 5303542 5303539 +
tctctaatataagcaattat

SEQ ID NO: 17811 - DNA, 20 bp, Artificial Sequence
  Synthetic oligonucleotide; TGG chr11 5303526 5303545 5303542 +
ctaatataagcaattattgg

SEQ ID NO: 17812 - DNA, 20 bp, Artificial Sequence
  Synthetic oligonucleotide; GAG chr11 5303528 5303547 5303544 +
aatataagcaattattggtg

SEQ ID NO: 17813 - DNA, 20 bp, Artificial Sequence
  Synthetic oligonucleotide; GAG chr11 5303530 5303549 5303546 +
tataagcaattattggtgga

SEQ ID NO: 17814 - DNA, 20 bp, Artificial Sequence
  Synthetic oligonucleotide; GAG chr11 5303532 5303551 5303548 +
taagcaattattggtggaga

SEQ ID NO: 17815 - DNA, 20 bp, Artificial Sequence
  Synthetic oligonucleotide; TGG chr11 5303536 5303555 5303552 +
caattattggtggagagaga

SEQ ID NO: 17816 - DNA, 20 bp, Artificial Sequence
  Synthetic oligonucleotide; CAG chr11 5303540 5303559 5303556 +
tattggtggagagagatgga

SEQ ID NO: 17817 - DNA, 20 bp, Artificial Sequence
  Synthetic oligonucleotide; GAG chr11 5303542 5303561 5303558 +
ttggtggagagagatggaca

SEQ ID NO: 17818 - DNA, 20 bp, Artificial Sequence
  Synthetic oligonucleotide; AGG chr11 5303543 5303562 5303559 +
tggtggagagagatggacag

SEQ ID NO: 17819 - DNA, 20 bp, Artificial Sequence
  Synthetic oligonucleotide; AAG chr11 5303547 5303566 5303563 +
ggagagagatggacagagga

SEQ ID NO: 17820 - DNA, 20 bp, Artificial Sequence
  Synthetic oligonucleotide; AGG chr11 5303548 5303567 5303564 +
gagagagatggacagaggaa

SEQ ID NO: 17821 - DNA, 20 bp, Artificial Sequence
  Synthetic oligonucleotide; AAG chr11 5303554 5303573 5303570 +
gatggacagaggaaaggtga

SEQ ID NO: 17822 - DNA, 20 bp, Artificial Sequence
  Synthetic oligonucleotide; AGG chr11 5303555 5303574 5303571 +
atggacagaggaaaggtgaa

SEQ ID NO: 17823 - DNA, 20 bp, Artificial Sequence
  Synthetic oligonucleotide; AAG chr11 5303566 5303585 5303582 +
aaaggtgaaaggacttttga

SEQ ID NO: 17824 - DNA, 20 bp, Artificial Sequence
  Synthetic oligonucleotide; AGG chr11 5303567 5303586 5303583 +
aaggtgaaaggacttttgaa

SEQ ID NO: 17825 - DNA, 20 bp, Artificial Sequence
  Synthetic oligonucleotide; GGG chr11 5303568 5303587 5303584 +
aggtgaaaggacttttgaaa

SEQ ID NO: 17826 - DNA, 20 bp, Artificial Sequence
  Synthetic oligonucleotide; CAG chr11 5303580 5303599 5303596 +
ttttgaaagggctgctactt

SEQ ID NO: 17827 - DNA, 20 bp, Artificial Sequence
  Synthetic oligonucleotide; AGG chr11 5303581 5303600 5303597 +
tttgaaagggctgctacttc

SEQ ID NO: 17828 - DNA, 20 bp, Artificial Sequence
  Synthetic oligonucleotide; GGG chr11 5303582 5303601 5303598 +
ttgaaagggctgctacttca

SEQ ID NO: 17829 - DNA, 20 bp, Artificial Sequence
  Synthetic oligonucleotide; GGG chr11 5303583 5303602 5303599 +
tgaaagggctgctacttcag

SEQ ID NO: 17830 - DNA, 20 bp, Artificial Sequence
  Synthetic oligonucleotide; CAG chr11 5303608 5303627 5303624 +
actgttgataacaaaaatgt

SEQ ID NO: 17831 - DNA, 20 bp, Artificial Sequence
  Synthetic oligonucleotide; TAG chr11 5303613 5303632 5303629 +
tgataacaaaaatgtcagtc

SEQ ID NO: 17832 - DNA, 20 bp, Artificial Sequence
  Synthetic oligonucleotide; AGG chr11 5303614 5303633 5303630 +
gataacaaaaatgtcagtct

SEQ ID NO: 17833 - DNA, 20 bp, Artificial Sequence
  Synthetic oligonucleotide; CAG chr11 5303622 5303641 5303638 +
aaatgtcagtctaggcactg

SEQ ID NO: 17834 - DNA, 20 bp, Artificial Sequence
  Synthetic oligonucleotide; TAG chr11 5303625 5303644 5303641 +
tgtcagtctaggcactgcag

SEQ ID NO: 17835 - DNA, 20 bp, Artificial Sequence
  Synthetic oligonucleotide; CAG chr11 5303628 5303647 5303644 +
cagtctaggcactgcagtag

SEQ ID NO: 17836 - DNA, 20 bp, Artificial Sequence
  Synthetic oligonucleotide; GAG chr11 5303630 5303649 5303646 +
gtctaggcactgcagtagca

SEQ ID NO: 17837 - DNA, 20 bp, Artificial Sequence
  Synthetic oligonucleotide; TGG chr11 5303645 5303664 5303661 +
tagcagagactatgttcata

SEQ ID NO: 17838 - DNA, 20 bp, Artificial Sequence
  Synthetic oligonucleotide; TAG chr11 5303697 5303716 5303713 +
ccactgaattatgacctgca

SEQ ID NO: 17839 - DNA, 20 bp, Artificial Sequence
  Synthetic oligonucleotide; TGG chr11 5303709 5303728 5303725 +
gacctgcatagtgcttaatg

SEQ ID NO: 17840 - DNA, 20 bp, Artificial Sequence
  Synthetic oligonucleotide; CAG chr11 5303712 5303731 5303728 +
ctgcatagtgcttaatgtgg

SEQ ID NO: 17841 - DNA, 20 bp, Artificial Sequence
  Synthetic oligonucleotide; CAG chr11 5303731 5303750 5303747 +
gcagaacttatctaccgcca

SEQ ID NO: 17842 - DNA, 20 bp, Artificial Sequence
  Synthetic oligonucleotide; AGG chr11 5303732 5303751 5303748 +
cagaacttatctaccgccac

SEQ ID NO: 17843 - DNA, 20 bp, Artificial Sequence
  Synthetic oligonucleotide; GAG chr11 5303734 5303753 5303750 +
gaacttatctaccgccacag

SEQ ID NO: 17844 - DNA, 20 bp, Artificial Sequence
  Synthetic oligonucleotide; AAG chr11 5303755 5303774 5303771 +
agtgatgtgtatatcattat

SEQ ID NO: 17845 - DNA, 20 bp, Artificial Sequence
  Synthetic oligonucleotide; AAG chr11 5303786 5303805 5303802 +
accttccaatgttgccttat

SEQ ID NO: 17846 - DNA, 20 bp, Artificial Sequence
  Synthetic oligonucleotide; GAG chr11 5303788 5303807 5303804 +
cttccaatgttgccttataa

SEQ ID NO: 17847 - DNA, 20 bp, Artificial Sequence
  Synthetic oligonucleotide; TGG chr11 5303793 5303812 5303809 +
aatgttgccttataagagaa

SEQ ID NO: 17848 - DNA, 20 bp, Artificial Sequence
  Synthetic oligonucleotide; CAG chr11 5303818 5303837 5303834 +
taatgccaaaatttgttgta

SEQ ID NO: 17849 - DNA, 20 bp, Artificial Sequence
  Synthetic oligonucleotide; AGG chr11 5303819 5303838 5303835 +
aatgccaaaatttgttgtac

SEQ ID NO: 17850 - DNA, 20 bp, Artificial Sequence
  Synthetic oligonucleotide; AAG chr11 5303824 5303843 5303840 +
caaaatttgttgtacaggat

SEQ ID NO: 17851 - DNA, 20 bp, Artificial Sequence
  Synthetic oligonucleotide; GAG chr11 5303826 5303845 5303842 +
aaatttgttgtacaggataa

SEQ ID NO: 17852 - DNA, 20 bp, Artificial Sequence
  Synthetic oligonucleotide; TGG chr11 5303842 5303861 5303858 +
ataagagctaaccacttatt

SEQ ID NO: 17853 - DNA, 20 bp, Artificial Sequence
  Synthetic oligonucleotide; CAG chr11 5303858 5303877 5303874 +
tatttggatctactgtcacc

SEQ ID NO: 17854 - DNA, 20 bp, Artificial Sequence
  Synthetic oligonucleotide; TGG chr11 5303865 5303884 5303881 +
atctactgtcacccagataa

SEQ ID NO: 17855 - DNA, 20 bp, Artificial Sequence
  Synthetic oligonucleotide; CAG chr11 5303870 5303889 5303886 +
ctgtcacccagataatggac

SEQ ID NO: 17856 - DNA, 20 bp, Artificial Sequence
  Synthetic oligonucleotide; TGG chr11 5303874 5303893 5303890 +
cacccagataatggaccaga

SEQ ID NO: 17857 - DNA, 20 bp, Artificial Sequence
  Synthetic oligonucleotide; GAG chr11 5303876 5303895 5303892 +
cccagataatggaccagatg

SEQ ID NO: 17858 - DNA, 20 bp, Artificial Sequence
  Synthetic oligonucleotide; AGG chr11 5303877 5303896 5303893 +
ccagataatggaccagatgg

SEQ ID NO: 17859 - DNA, 20 bp, Artificial Sequence
  Synthetic oligonucleotide; AAG chr11 5303880 5303899 5303896 +
gataatggaccagatggagg

SEQ ID NO: 17860 - DNA, 20 bp, Artificial Sequence
  Synthetic oligonucleotide; CGG chr11 5303884 5303903 5303900 +
atggaccagatggaggaagc

SEQ ID NO: 17861 - DNA, 20 bp, Artificial Sequence
  Synthetic oligonucleotide; GAG chr11 5303886 5303905 5303902 +
ggaccagatggaggaagccg

SEQ ID NO: 17862 - DNA, 20 bp, Artificial Sequence
  Synthetic oligonucleotide; AGG chr11 5303887 5303906 5303903 +
gaccagatggaggaagccgg

SEQ ID NO: 17863 - DNA, 20 bp, Artificial Sequence
  Synthetic oligonucleotide; GAG chr11 5303889 5303908 5303905 +
ccagatggaggaagccggag

SEQ ID NO: 17864 - DNA, 20 bp, Artificial Sequence
  Synthetic oligonucleotide; AGG chr11 5303890 5303909 5303906 +
cagatggaggaagccggagg

SEQ ID NO: 17865 - DNA, 20 bp, Artificial Sequence
  Synthetic oligonucleotide; TAG chr11 5303912 5303931 5303928 +
gcctgattattcttaaacta

SEQ ID NO: 17866 - DNA, 20 bp, Artificial Sequence
  Synthetic oligonucleotide; GAG chr11 5303932 5303951 5303948 +
tagtcgtgttttcaaaacct

SEQ ID NO: 17867 - DNA, 20 bp, Artificial Sequence
  Synthetic oligonucleotide; TGG chr11 5303942 5303961 5303958 +
ttcaaaacctgagctgcgtt

SEQ ID NO: 17868 - DNA, 20 bp, Artificial Sequence
  Synthetic oligonucleotide; GGG chr11 5303943 5303962 5303959 +
tcaaaacctgagctgcgttt

SEQ ID NO: 17869 - DNA, 20 bp, Artificial Sequence
  Synthetic oligonucleotide; CGG chr11 5303951 5303970 5303967 +
tgagctgcgtttgggacatg

SEQ ID NO: 17870 - DNA, 20 bp, Artificial Sequence
  Synthetic oligonucleotide; CAG chr11 5303959 5303978 5303975 +
gtttgggacatgcggatgca

SEQ ID NO: 17871 - DNA, 20 bp, Artificial Sequence
  Synthetic oligonucleotide; AGG chr11 5303960 5303979 5303976 +
tttgggacatgcggatgcac

SEQ ID NO: 17872 - DNA, 20 bp, Artificial Sequence
  Synthetic oligonucleotide; GGG chr11 5303961 5303980 5303977 +
ttgggacatgcggatgcaca

SEQ ID NO: 17873 - DNA, 20 bp, Artificial Sequence
  Synthetic oligonucleotide; TGG chr11 5303980 5303999 5303996 +
agggttttattaaaactgtg

SEQ ID NO: 17874 - DNA, 20 bp, Artificial Sequence
  Synthetic oligonucleotide; TGG chr11 5303990 5304009 5304006 +
taaaactgtgtggtaattac

SEQ ID NO: 17875 - DNA, 20 bp, Artificial Sequence
  Synthetic oligonucleotide; GGG chr11 5303991 5304010 5304007 +
aaaactgtgtggtaattact

SEQ ID NO: 17876 - DNA, 20 bp, Artificial Sequence
  Synthetic oligonucleotide; GGG chr11 5303992 5304011 5304008 +
aaactgtgtggtaattactg

SEQ ID NO: 17877 - DNA, 20 bp, Artificial Sequence
  Synthetic oligonucleotide; TAG chr11 5303998 5304017 5304014 +
tgtggtaattactggggaaa

SEQ ID NO: 17878 - DNA, 20 bp, Artificial Sequence
  Synthetic oligonucleotide; AAG chr11 5304015 5304034 5304031 +
aaatagttaatacaatttat

SEQ ID NO: 17879 - DNA, 20 bp, Artificial Sequence
  Synthetic oligonucleotide; AAG chr11 5304035 5304054 5304051 +
aagtatattttattgaccta

SEQ ID NO: 17880 - DNA, 20 bp, Artificial Sequence
  Synthetic oligonucleotide; TAG chr11 5304039 5304058 5304055 +
atattttattgacctaaaga

SEQ ID NO: 17881 - DNA, 20 bp, Artificial Sequence
  Synthetic oligonucleotide; CAG chr11 5304060 5304079 5304076 +
agccctctatttaacatctg

SEQ ID NO: 17882 - DNA, 20 bp, Artificial Sequence
  Synthetic oligonucleotide; TAG chr11 5304067 5304086 5304083 +
tatttaacatctgcagtctc

SEQ ID NO: 17883 - DNA, 20 bp, Artificial Sequence
  Synthetic oligonucleotide; CAG chr11 5304075 5304094 5304091 +
atctgcagtctctagcaaaa

SEQ ID NO: 17884 - DNA, 20 bp, Artificial Sequence
  Synthetic oligonucleotide; TGG chr11 5304084 5304103 5304100 +
ctctagcaaaacagctacgc

SEQ ID NO: 17885 - DNA, 20 bp, Artificial Sequence
  Synthetic oligonucleotide; TGG chr11 5304097 5304116 5304113 +
gctacgctggcatttaattg

SEQ ID NO: 17886 - DNA, 20 bp, Artificial Sequence
  Synthetic oligonucleotide; TGG chr11 5304106 5304125 5304122 +
gcatttaattgtggcaaatt

SEQ ID NO: 17887 - DNA, 20 bp, Artificial Sequence
  Synthetic oligonucleotide; TAG chr11 5304109 5304128 5304125 +
tttaattgtggcaaatttgg

SEQ ID NO: 17888 - DNA, 20 bp, Artificial Sequence
  Synthetic oligonucleotide; CAG chr11 5304115 5304134 5304131 +
tgtggcaaatttggtagtac

SEQ ID NO: 17889 - DNA, 20 bp, Artificial Sequence
  Synthetic oligonucleotide; CAG chr11 5304143 5304162 5304159 +
gtccacatacccaaatattc

SEQ ID NO: 17890 - DNA, 20 bp, Artificial Sequence
  Synthetic oligonucleotide; AGG chr11 5304144 5304163 5304160 +
tccacatacccaaatattcc

SEQ ID NO: 17891 - DNA, 20 bp, Artificial Sequence
  Synthetic oligonucleotide; GGG chr11 5304145 5304164 5304161 +
ccacatacccaaatattcca

SEQ ID NO: 17892 - DNA, 20 bp, Artificial Sequence
  Synthetic oligonucleotide; GAG chr11 5304147 5304166 5304163 +
acatacccaaatattccagg

SEQ ID NO: 17893 - DNA, 20 bp, Artificial Sequence
  Synthetic oligonucleotide; TAG chr11 5304152 5304171 5304168 +
cccaaatattccagggagaa

SEQ ID NO: 17894 - DNA, 20 bp, Artificial Sequence
  Synthetic oligonucleotide; TAG chr11 5304164 5304183 5304180 +
agggagaatagttgccctaa

SEQ ID NO: 17895 - DNA, 20 bp, Artificial Sequence
  Synthetic oligonucleotide; TAG chr11 5304169 5304188 5304185 +
gaatagttgccctaatagtt

SEQ ID NO: 17896 - DNA, 20 bp, Artificial Sequence
  Synthetic oligonucleotide; AGG chr11 5304170 5304189 5304186 +
aatagttgccctaatagttt

SEQ ID NO: 17897 - DNA, 20 bp, Artificial Sequence
  Synthetic oligonucleotide; GGG chr11 5304171 5304190 5304187 +
atagttgccctaatagttta

SEQ ID NO: 17898 - DNA, 20 bp, Artificial Sequence
  Synthetic oligonucleotide; GAG chr11 5304173 5304192 5304189 +
agttgccctaatagtttagg

SEQ ID NO: 17899 - DNA, 20 bp, Artificial Sequence
  Synthetic oligonucleotide; TAG chr11 5304181 5304200 5304197 +
taatagtttagggagtctcc

SEQ ID NO: 17900 - DNA, 20 bp, Artificial Sequence
  Synthetic oligonucleotide; AAG chr11 5304201 5304220 5304217 +
tagaatgtgatacatgacaa

SEQ ID NO: 17901 - DNA, 20 bp, Artificial Sequence
  Synthetic oligonucleotide; GAG chr11 5304205 5304224 5304221 +
atgtgatacatgacaaaagt

SEQ ID NO: 17902 - DNA, 20 bp, Artificial Sequence
  Synthetic oligonucleotide; GAG chr11 5304207 5304226 5304223 +
gtgatacatgacaaaagtga

SEQ ID NO: 17903 - DNA, 20 bp, Artificial Sequence
  Synthetic oligonucleotide; TAG chr11 5304219 5304238 5304235 +
aaaagtgagagtcataactt

SEQ ID NO: 17904 - DNA, 20 bp, Artificial Sequence
  Synthetic oligonucleotide; TGG chr11 5304222 5304241 5304238 +
agtgagagtcataactttag

SEQ ID NO: 17905 - DNA, 20 bp, Artificial Sequence
  Synthetic oligonucleotide; CAG chr11 5304238 5304257 5304254 +
ttagtggaatttatcactct

SEQ ID NO: 17906 - DNA, 20 bp, Artificial Sequence
  Synthetic oligonucleotide; AGG chr11 5304239 5304258 5304255 +
tagtggaatttatcactctc

SEQ ID NO: 17907 - DNA, 20 bp, Artificial Sequence
  Synthetic oligonucleotide; AAG chr11 5304243 5304262 5304259 +
ggaatttatcactctcaggc

SEQ ID NO: 17908 - DNA, 20 bp, Artificial Sequence
  Synthetic oligonucleotide; TAG chr11 5304248 5304267 5304264 +
ttatcactctcaggcaagca

SEQ ID NO: 17909 - DNA, 20 bp, Artificial Sequence
  Synthetic oligonucleotide; GAG chr11 5304250 5304269 5304266 +
atcactctcaggcaagcata

SEQ ID NO: 17910 - DNA, 20 bp, Artificial Sequence
  Synthetic oligonucleotide; AGG chr11 5304251 5304270 5304267 +
tcactctcaggcaagcatag

SEQ ID NO: 17911 - DNA, 20 bp, Artificial Sequence
  Synthetic oligonucleotide; GAG chr11 5304260 5304279 5304276 +
ggcaagcatagaggccccct

SEQ ID NO: 17912 - DNA, 20 bp, Artificial Sequence
  Synthetic oligonucleotide; AGG chr11 5304261 5304280 5304277 +
gcaagcatagaggccccctg

SEQ ID NO: 17913 - DNA, 20 bp, Artificial Sequence
  Synthetic oligonucleotide; GGG chr11 5304262 5304281 5304278 +
caagcatagaggccccctga

SEQ ID NO: 17914 - DNA, 20 bp, Artificial Sequence
  Synthetic oligonucleotide; TGG chr11 5304278 5304297 5304294 +
ctgagggatgcaaaaatgac

SEQ ID NO: 17915 - DNA, 20 bp, Artificial Sequence
  Synthetic oligonucleotide; GAG chr11 5304305 5304324 5304321 +
ctgttctcttgcccctttct

SEQ ID NO: 17916 - DNA, 20 bp, Artificial Sequence
  Synthetic oligonucleotide; TGG chr11 5304314 5304333 5304330 +
tgcccctttctgagtgcctt

SEQ ID NO: 17917 - DNA, 20 bp, Artificial Sequence
  Synthetic oligonucleotide; CAG chr11 5304330 5304349 5304346 +
cctttggactgattctttga

SEQ ID NO: 17918 - DNA, 20 bp, Artificial Sequence
  Synthetic oligonucleotide; CAG chr11 5304342 5304361 5304358 +
ttctttgacagcaactatcc

SEQ ID NO: 17919 - DNA, 20 bp, Artificial Sequence
  Synthetic oligonucleotide; GAG chr11 5304344 5304363 5304360 +
ctttgacagcaactatccca

SEQ ID NO: 17920 - DNA, 20 bp, Artificial Sequence
  Synthetic oligonucleotide; AAG chr11 5304352 5304371 5304368 +
gcaactatcccagagtcctc

SEQ ID NO: 17921 - DNA, 20 bp, Artificial Sequence
  Synthetic oligonucleotide; GAG chr11 5304354 5304373 5304370 +
aactatcccagagtcctcaa

SEQ ID NO: 17922 - DNA, 20 bp, Artificial Sequence
  Synthetic oligonucleotide; AAG chr11 5304363 5304382 5304379 +
agagtcctcaagagtttctg

SEQ ID NO: 17923 - DNA, 20 bp, Artificial Sequence
  Synthetic oligonucleotide; AGG chr11 5304364 5304383 5304380 +
gagtcctcaagagtttctga

SEQ ID NO: 17924 - DNA, 20 bp, Artificial Sequence
  Synthetic oligonucleotide; TAG chr11 5304372 5304391 5304388 +
aagagtttctgaaggtaaca

SEQ ID NO: 17925 - DNA, 20 bp, Artificial Sequence
  Synthetic oligonucleotide; CAG chr11 5304385 5304404 5304401 +
ggtaacatagatccatcatc

SEQ ID NO: 17926 - DNA, 20 bp, Artificial Sequence
  Synthetic oligonucleotide; GAG chr11 5304387 5304406 5304403 +
taacatagatccatcatcca

SEQ ID NO: 17927 - DNA, 20 bp, Artificial Sequence
  Synthetic oligonucleotide; AAG chr11 5304416 5304435 5304432 +
caacttgccatgctgacaaa

SEQ ID NO: 17928 - DNA, 20 bp, Artificial Sequence
  Synthetic oligonucleotide; TAG chr11 5304421 5304440 5304437 +
tgccatgctgacaaaaagct

SEQ ID NO: 17929 - DNA, 20 bp, Artificial Sequence
  Synthetic oligonucleotide; AGG chr11 5304422 5304441 5304438 +
gccatgctgacaaaaagctt

SEQ ID NO: 17930 - DNA, 20 bp, Artificial Sequence
  Synthetic oligonucleotide; CAG chr11 5304432 5304451 5304448 +
caaaaagcttaggaactgtt

SEQ ID NO: 17931 - DNA, 20 bp, Artificial Sequence
  Synthetic oligonucleotide; AGG chr11 5304433 5304452 5304449 +
aaaaagcttaggaactgttc

SEQ ID NO: 17932 - DNA, 20 bp, Artificial Sequence
  Synthetic oligonucleotide; AAG chr11 5304448 5304467 5304464 +
tgttcaggaaaccatttata

SEQ ID NO: 17933 - DNA, 20 bp, Artificial Sequence
  Synthetic oligonucleotide; GAG chr11 5304465 5304484 5304481 +
ataaagacataaactaaaat

SEQ ID NO: 17934 - DNA, 20 bp, Artificial Sequence
  Synthetic oligonucleotide; AAG chr11 5304468 5304487 5304484 +
aagacataaactaaaatgag

SEQ ID NO: 17935 - DNA, 20 bp, Artificial Sequence
  Synthetic oligonucleotide; AAG chr11 5304476 5304495 5304492 +
aactaaaatgagaagacaaa

SEQ ID NO: 17936 - DNA, 20 bp, Artificial Sequence
  Synthetic oligonucleotide; GAG chr11 5304478 5304497 5304494 +
ctaaaatgagaagacaaaaa

SEQ ID NO: 17937 - DNA, 20 bp, Artificial Sequence
  Synthetic oligonucleotide; AAG chr11 5304487 5304506 5304503 +
gaagacaaaaagagaatatt

SEQ ID NO: 17938 - DNA, 20 bp, Artificial Sequence
  Synthetic oligonucleotide; AAG chr11 5304502 5304521 5304518 +
atattaagatcgtgttaaaa

SEQ ID NO: 17939 - DNA, 20 bp, Artificial Sequence
  Synthetic oligonucleotide; CAG chr11 5304507 5304526 5304523 +
aagatcgtgttaaaaaagaa

SEQ ID NO: 17940 - DNA, 20 bp, Artificial Sequence
  Synthetic oligonucleotide; TAG chr11 5304519 5304538 5304535 +
aaaaagaacagtcttccgtt

SEQ ID NO: 17941 - DNA, 20 bp, Artificial Sequence
  Synthetic oligonucleotide; CAG chr11 5304525 5304544 5304541 +
aacagtcttccgtttagttc

SEQ ID NO: 17942 - DNA, 20 bp, Artificial Sequence
  Synthetic oligonucleotide; AAG chr11 5304537 5304556 5304553 +
tttagttccagataatctgc

SEQ ID NO: 17943 - DNA, 20 bp, Artificial Sequence
  Synthetic oligonucleotide; CAG chr11 5304553 5304572 5304569 +
ctgcaagtgccctgtacaat

SEQ ID NO: 17944 - DNA, 20 bp, Artificial Sequence
  Synthetic oligonucleotide; TAG chr11 5304611 5304630 5304627 +
gccccaaaattgtgttccta

SEQ ID NO: 17945 - DNA, 20 bp, Artificial Sequence
  Synthetic oligonucleotide; AAG chr11 5304614 5304633 5304630 +
ccaaaattgtgttcctatag

SEQ ID NO: 17946 - DNA, 20 bp, Artificial Sequence
  Synthetic oligonucleotide; AAG chr11 5304648 5304667 5304664 +
tataccaaaataaatattta

SEQ ID NO: 17947 - DNA, 20 bp, Artificial Sequence
  Synthetic oligonucleotide; TGG chr11 5304662 5304681 5304678 +
tatttaaagtcaactgacaa

SEQ ID NO: 17948 - DNA, 20 bp, Artificial Sequence
  Synthetic oligonucleotide; GGG chr11 5304663 5304682 5304679 +
atttaaagtcaactgacaat

SEQ ID NO: 17949 - DNA, 20 bp, Artificial Sequence
  Synthetic oligonucleotide; AAG chr11 5304666 5304685 5304682 +
taaagtcaactgacaatggg

SEQ ID NO: 17950 - DNA, 20 bp, Artificial Sequence
  Synthetic oligonucleotide; GAG chr11 5304673 5304692 5304689 +
aactgacaatgggaagccat

SEQ ID NO: 17951 - DNA, 20 bp, Artificial Sequence
  Synthetic oligonucleotide; AAG chr11 5304679 5304698 5304695 +
caatgggaagccatgagatg

SEQ ID NO: 17952 - DNA, 20 bp, Artificial Sequence
  Synthetic oligonucleotide; CAG chr11 5304702 5304721 5304718 +
acaaaatatctgaaaaatct

SEQ ID NO: 17953 - DNA, 20 bp, Artificial Sequence
  Synthetic oligonucleotide; AAG chr11 5304710 5304729 5304726 +
tctgaaaaatctcagctttt

SEQ ID NO: 17954 - DNA, 20 bp, Artificial Sequence
  Synthetic oligonucleotide; AAG chr11 5304735 5304754 5304751 +
acttttttatatcttacctt

SEQ ID NO: 17955 - DNA, 20 bp, Artificial Sequence
  Synthetic oligonucleotide; TGG chr11 5304750 5304769 5304766 +
accttaagtacaaattaaaa

SEQ ID NO: 17956 - DNA, 20 bp, Artificial Sequence
  Synthetic oligonucleotide; AAG chr11 5304753 5304772 5304769 +
ttaagtacaaattaaaatgg

SEQ ID NO: 17957 - DNA, 20 bp, Artificial Sequence
  Synthetic oligonucleotide; GAG chr11 5304755 5304774 5304771 +
aagtacaaattaaaatggaa

SEQ ID NO: 17958 - DNA, 20 bp, Artificial Sequence
  Synthetic oligonucleotide; AGG chr11 5304756 5304775 5304772 +
agtacaaattaaaatggaag

SEQ ID NO: 17959 - DNA, 20 bp, Artificial Sequence
  Synthetic oligonucleotide; TGG chr11 5304759 5304778 5304775 +
acaaattaaaatggaagagg

SEQ ID NO: 17960 - DNA, 20 bp, Artificial Sequence
  Synthetic oligonucleotide; CAG chr11 5304763 5304782 5304779 +
attaaaatggaagaggtggc

SEQ ID NO: 17961 - DNA, 20 bp, Artificial Sequence
  Synthetic oligonucleotide; AGG chr11 5304764 5304783 5304780 +
ttaaaatggaagaggtggcc

SEQ ID NO: 17962 - DNA, 20 bp, Artificial Sequence
  Synthetic oligonucleotide; CAG chr11 5304769 5304788 5304785 +
atggaagaggtggccaggca

SEQ ID NO: 17963 - DNA, 20 bp, Artificial Sequence
  Synthetic oligonucleotide; GAG chr11 5304771 5304790 5304787 +
ggaagaggtggccaggcaca

SEQ ID NO: 17964 - DNA, 20 bp, Artificial Sequence
  Synthetic oligonucleotide; AGG chr11 5304772 5304791 5304788 +
gaagaggtggccaggcacag

SEQ ID NO: 17965 - DNA, 20 bp, Artificial Sequence
  Synthetic oligonucleotide; TAG chr11 5304791 5304810 5304807 +
gaggctcatgcctgtaatcc

SEQ ID NO: 17966 - DNA, 20 bp, Artificial Sequence
  Synthetic oligonucleotide; TGG chr11 5304799 5304818 5304815 +
tgcctgtaatcctagcactt

SEQ ID NO: 17967 - DNA, 20 bp, Artificial Sequence
  Synthetic oligonucleotide; AAG chr11 5304802 5304821 5304818 +
ctgtaatcctagcactttgg

SEQ ID NO: 17968 - DNA, 20 bp, Artificial Sequence
  Synthetic oligonucleotide; AGG chr11 5304803 5304822 5304819 +
tgtaatcctagcactttgga

SEQ ID NO: 17969 - DNA, 20 bp, Artificial Sequence
  Synthetic oligonucleotide; GAG chr11 5304808 5304827 5304824 +
tcctagcactttggaaggct

SEQ ID NO: 17970 - DNA, 20 bp, Artificial Sequence
  Synthetic oligonucleotide; AGG chr11 5304809 5304828 5304825 +
cctagcactttggaaggctg

SEQ ID NO: 17971 - DNA, 20 bp, Artificial Sequence
  Synthetic oligonucleotide; TGG chr11 5304812 5304831 5304828 +
agcactttggaaggctgagg

SEQ ID NO: 17972 - DNA, 20 bp, Artificial Sequence
  Synthetic oligonucleotide; GAG chr11 5304820 5304839 5304836 +
ggaaggctgaggtggatcac

SEQ ID NO: 17973 - DNA, 20 bp, Artificial Sequence
  Synthetic oligonucleotide; AGG chr11 5304821 5304840 5304837 +
gaaggctgaggtggatcacg

SEQ ID NO: 17974 - DNA, 20 bp, Artificial Sequence
  Synthetic oligonucleotide; CAG chr11 5304825 5304844 5304841 +
gctgaggtggatcacgaggt

SEQ ID NO: 17975 - DNA, 20 bp, Artificial Sequence
  Synthetic oligonucleotide; CAG chr11 5304828 5304847 5304844 +
gaggtggatcacgaggtcag

SEQ ID NO: 17976 - DNA, 20 bp, Artificial Sequence
  Synthetic oligonucleotide; GAG chr11 5304834 5304853 5304850 +
gatcacgaggtcagcagttt

SEQ ID NO: 17977 - DNA, 20 bp, Artificial Sequence
  Synthetic oligonucleotide; TAG chr11 5304839 5304858 5304855 +
cgaggtcagcagtttgagac

SEQ ID NO: 17978 - DNA, 20 bp, Artificial Sequence
  Synthetic oligonucleotide; TGG chr11 5304844 5304863 5304860 +
tcagcagtttgagactagcc

SEQ ID NO: 17979 - DNA, 20 bp, Artificial Sequence
  Synthetic oligonucleotide; TGG chr11 5304853 5304872 5304869 +
tgagactagcctggccaaca

SEQ ID NO: 17980 - DNA, 20 bp, Artificial Sequence
  Synthetic oligonucleotide; TAG chr11 5304888 5304907 5304904 +
tctactaaaaatacaaaaat

SEQ ID NO: 17981 - DNA, 20 bp, Artificial Sequence
  Synthetic oligonucleotide; TGG chr11 5304892 5304911 5304908 +
ctaaaaatacaaaaattagc

SEQ ID NO: 17982 - DNA, 20 bp, Artificial Sequence
  Synthetic oligonucleotide; GGG chr11 5304893 5304912 5304909 +
taaaaatacaaaaattagct

SEQ ID NO: 17983 - DNA, 20 bp, Artificial Sequence
  Synthetic oligonucleotide; TGG chr11 5304898 5304917 5304914 +
atacaaaaattagctgggtg

SEQ ID NO: 17984 - DNA, 20 bp, Artificial Sequence
  Synthetic oligonucleotide; TGG chr11 5304901 5304920 5304917 +
caaaaattagctgggtgtgg

SEQ ID NO: 17985 - DNA, 20 bp, Artificial Sequence
  Synthetic oligonucleotide; GAG chr11 5304905 5304924 5304921 +
aattagctgggtgtggtggt

SEQ ID NO: 17986 - DNA, 20 bp, Artificial Sequence
  Synthetic oligonucleotide; CAG chr11 5304920 5304939 5304936 +
gtggtgagcgcctgtaatcc

SEQ ID NO: 17987 - DNA, 20 bp, Artificial Sequence
  Synthetic oligonucleotide; CGG chr11 5304928 5304947 5304944 +
cgcctgtaatcccagctact

SEQ ID NO: 17988 - DNA, 20 bp, Artificial Sequence
  Synthetic oligonucleotide; GGG chr11 5304929 5304948 5304945 +
gcctgtaatcccagctactc

SEQ ID NO: 17989 - DNA, 20 bp, Artificial Sequence
  Synthetic oligonucleotide; GAG chr11 5304931 5304950 5304947 +
ctgtaatcccagctactcgg

SEQ ID NO: 17990 - DNA, 20 bp, Artificial Sequence
  Synthetic oligonucleotide; AGG chr11 5304932 5304951 5304948 +
tgtaatcccagctactcggg

SEQ ID NO: 17991 - DNA, 20 bp, Artificial Sequence
  Synthetic oligonucleotide; GAG chr11 5304937 5304956 5304953 +
tcccagctactcgggaggct

SEQ ID NO: 17992 - DNA, 20 bp, Artificial Sequence
  Synthetic oligonucleotide; AGG chr11 5304938 5304957 5304954 +
cccagctactcgggaggctg

SEQ ID NO: 17993 - DNA, 20 bp, Artificial Sequence
  Synthetic oligonucleotide; CAG chr11 5304941 5304960 5304957 +
agctactcgggaggctgagg

SEQ ID NO: 17994 - DNA, 20 bp, Artificial Sequence
  Synthetic oligonucleotide; AGG chr11 5304942 5304961 5304958 +
gctactcgggaggctgaggc

SEQ ID NO: 17995 - DNA, 20 bp, Artificial Sequence
  Synthetic oligonucleotide; GAG chr11 5304944 5304963 5304960 +
tactcgggaggctgaggcag

SEQ ID NO: 17996 - DNA, 20 bp, Artificial Sequence
  Synthetic oligonucleotide; TGG chr11 5304964 5304983 5304980 +
gagaattgctttaaaaaaac

SEQ ID NO: 17997 - DNA, 20 bp, Artificial Sequence
  Synthetic oligonucleotide; GGG chr11 5304965 5304984 5304981 +
agaattgctttaaaaaaact

SEQ ID NO: 17998 - DNA, 20 bp, Artificial Sequence
  Synthetic oligonucleotide; GGG chr11 5304966 5304985 5304982 +
gaattgctttaaaaaaactg

SEQ ID NO: 17999 - DNA, 20 bp, Artificial Sequence
  Synthetic oligonucleotide; GAG chr11 5304968 5304987 5304984 +
attgctttaaaaaaactggg

SEQ ID NO: 18000 - DNA, 20 bp, Artificial Sequence
  Synthetic oligonucleotide; CAG chr11 5304971 5304990 5304987 +
gctttaaaaaaactggggag

SEQ ID NO: 18001 - DNA, 20 bp, Artificial Sequence
  Synthetic oligonucleotide; GAG chr11 5304973 5304992 5304989 +
tttaaaaaaactggggagca

SEQ ID NO: 18002 - DNA, 20 bp, Artificial Sequence
  Synthetic oligonucleotide; AGG chr11 5304974 5304993 5304990 +
ttaaaaaaactggggagcag

SEQ ID NO: 18003 - DNA, 20 bp, Artificial Sequence
  Synthetic oligonucleotide; CAG chr11 5304983 5305002 5304999 +
ctggggagcagaggtcgtcg

SEQ ID NO: 18004 - DNA, 20 bp, Artificial Sequence
  Synthetic oligonucleotide; GAG chr11 5304987 5305006 5305003 +
ggagcagaggtcgtcgcagt

SEQ ID NO: 18005 - DNA, 20 bp, Artificial Sequence
  Synthetic oligonucleotide; AAG chr11 5304992 5305011 5305008 +
agaggtcgtcgcagtgagcc

SEQ ID NO: 18006 - DNA, 20 bp, Artificial Sequence
  Synthetic oligonucleotide; CAG chr11 5305012 5305031 5305028 +
aagattgtgccactgcacta

SEQ ID NO: 18007 - DNA, 20 bp, Artificial Sequence
  Synthetic oligonucleotide; TGG chr11 5305017 5305036 5305033 +
tgtgccactgcactacagcc

SEQ ID NO: 18008 - DNA, 20 bp, Artificial Sequence
  Synthetic oligonucleotide; GGG chr11 5305018 5305037 5305034 +
gtgccactgcactacagcct

SEQ ID NO: 18009 - DNA, 20 bp, Artificial Sequence
  Synthetic oligonucleotide; AAG chr11 5305026 5305045 5305042 +
gcactacagcctgggcgaca

SEQ ID NO: 18010 - DNA, 20 bp, Artificial Sequence
  Synthetic oligonucleotide; AAG chr11 5305030 5305049 5305046 +
tacagcctgggcgacaaagc

SEQ ID NO: 18011 - DNA, 20 bp, Artificial Sequence
  Synthetic oligonucleotide; AGG chr11 5305031 5305050 5305047 +
acagcctgggcgacaaagca

SEQ ID NO: 18012 - DNA, 20 bp, Artificial Sequence
  Synthetic oligonucleotide; AAG chr11 5305059 5305078 5305075 +
tctcaaaaaaaaaaaaaaaa

SEQ ID NO: 18013 - DNA, 20 bp, Artificial Sequence
  Synthetic oligonucleotide; AGG chr11 5305060 5305079 5305076 +
ctcaaaaaaaaaaaaaaaaa

SEQ ID NO: 18014 - DNA, 20 bp, Artificial Sequence
  Synthetic oligonucleotide; TGG chr11 5305065 5305084 5305081 +
aaaaaaaaaaaaaaaaggtt

SEQ ID NO: 18015 - DNA, 20 bp, Artificial Sequence
  Synthetic oligonucleotide; GAG chr11 5305067 5305086 5305083 +
aaaaaaaaaaaaaaggtttg

SEQ ID NO: 18016 - DNA, 20 bp, Artificial Sequence
  Synthetic oligonucleotide; GAG chr11 5305069 5305088 5305085 +
aaaaaaaaaaaaggtttgga

SEQ ID NO: 18017 - DNA, 20 bp, Artificial Sequence
  Synthetic oligonucleotide; TGG chr11 5305078 5305097 5305094 +
aaaggtttggagagaaacat

SEQ ID NO: 18018 - DNA, 20 bp, Artificial Sequence
  Synthetic oligonucleotide; GGG chr11 5305079 5305098 5305095 +
aaggtttggagagaaacatt

SEQ ID NO: 18019 - DNA, 20 bp, Artificial Sequence
  Synthetic oligonucleotide; TAG chr11 5305086 5305105 5305102 +
ggagagaaacattgggaaac

SEQ ID NO: 18020 - DNA, 20 bp, Artificial Sequence
  Synthetic oligonucleotide; AGG chr11 5305087 5305106 5305103 +
gagagaaacattgggaaact

SEQ ID NO: 18021 - DNA, 20 bp, Artificial Sequence
  Synthetic oligonucleotide; CAG chr11 5305104 5305123 5305120 +
actaggacaaattttgctct

SEQ ID NO: 18022 - DNA, 20 bp, Artificial Sequence
  Synthetic oligonucleotide; AAG chr11 5305111 5305130 5305127 +
caaattttgctctcagtaaa

SEQ ID NO: 18023 - DNA, 20 bp, Artificial Sequence
  Synthetic oligonucleotide; AAG chr11 5305115 5305134 5305131 +
ttttgctctcagtaaaaaga

SEQ ID NO: 18024 - DNA, 20 bp, Artificial Sequence
  Synthetic oligonucleotide; AAG chr11 5305124 5305143 5305140 +
cagtaaaaagaaagatctca

SEQ ID NO: 18025 - DNA, 20 bp, Artificial Sequence
  Synthetic oligonucleotide; AGG chr11 5305125 5305144 5305141 +
agtaaaaagaaagatctcaa

SEQ ID NO: 18026 - DNA, 20 bp, Artificial Sequence
  Synthetic oligonucleotide; GAG chr11 5305127 5305146 5305143 +
taaaaagaaagatctcaaag

SEQ ID NO: 18027 - DNA, 20 bp, Artificial Sequence
  Synthetic oligonucleotide; TAG chr11 5305131 5305150 5305147 +
aagaaagatctcaaaggaga

SEQ ID NO: 18028 - DNA, 20 bp, Artificial Sequence
  Synthetic oligonucleotide; AAG chr11 5305137 5305156 5305153 +
gatctcaaaggagatagaca

SEQ ID NO: 18029 - DNA, 20 bp, Artificial Sequence
  Synthetic oligonucleotide; AAG chr11 5305140 5305159 5305156 +
ctcaaaggagatagacaaag

SEQ ID NO: 18030 - DNA, 20 bp, Artificial Sequence
  Synthetic oligonucleotide; CAG chr11 5305143 5305162 5305159 +
aaaggagatagacaaagaag

SEQ ID NO: 18031 - DNA, 20 bp, Artificial Sequence
  Synthetic oligonucleotide; AGG chr11 5305144 5305163 5305160 +
aaggagatagacaaagaagc

SEQ ID NO: 18032 - DNA, 20 bp, Artificial Sequence
  Synthetic oligonucleotide; CAG chr11 5305149 5305168 5305165 +
gatagacaaagaagcaggca

SEQ ID NO: 18033 - DNA, 20 bp, Artificial Sequence
  Synthetic oligonucleotide; AAG chr11 5305156 5305175 5305172 +
aaagaagcaggcacagatgt

SEQ ID NO: 18034 - DNA, 20 bp, Artificial Sequence
  Synthetic oligonucleotide; GAG chr11 5305158 5305177 5305174 +
agaagcaggcacagatgtaa

SEQ ID NO: 18035 - DNA, 20 bp, Artificial Sequence
  Synthetic oligonucleotide; AGG chr11 5305159 5305178 5305175 +
gaagcaggcacagatgtaag

SEQ ID NO: 18036 - DNA, 20 bp, Artificial Sequence
  Synthetic oligonucleotide; TAG chr11 5305163 5305182 5305179 +
caggcacagatgtaagagga

SEQ ID NO: 18037 - DNA, 20 bp, Artificial Sequence
  Synthetic oligonucleotide; AAG chr11 5305168 5305187 5305184 +
acagatgtaagaggatagca

SEQ ID NO: 18038 - DNA, 20 bp, Artificial Sequence
  Synthetic oligonucleotide; AAG chr11 5305200 5305219 5305216 +
atttacaaaaaaacaatgaa

SEQ ID NO: 18039 - DNA, 20 bp, Artificial Sequence
  Synthetic oligonucleotide; AGG chr11 5305201 5305220 5305217 +
tttacaaaaaaacaatgaaa

SEQ ID NO: 18040 - DNA, 20 bp, Artificial Sequence
  Synthetic oligonucleotide; GGG chr11 5305202 5305221 5305218 +
ttacaaaaaaacaatgaaaa

SEQ ID NO: 18041 - DNA, 20 bp, Artificial Sequence
  Synthetic oligonucleotide; AAG chr11 5305205 5305224 5305221 +
caaaaaaacaatgaaaaggg

SEQ ID NO: 18042 - DNA, 20 bp, Artificial Sequence
  Synthetic oligonucleotide; TAG chr11 5305212 5305231 5305228 +
acaatgaaaagggaagttta

SEQ ID NO: 18043 - DNA, 20 bp, Artificial Sequence
  Synthetic oligonucleotide; AGG chr11 5305213 5305232 5305229 +
caatgaaaagggaagtttat

SEQ ID NO: 18044 - DNA, 20 bp, Artificial Sequence
  Synthetic oligonucleotide; GAG chr11 5305215 5305234 5305231 +
atgaaaagggaagtttatag

SEQ ID NO: 18045 - DNA, 20 bp, Artificial Sequence
  Synthetic oligonucleotide; TGG chr11 5305218 5305237 5305234 +
aaaagggaagtttataggag

SEQ ID NO: 18046 - DNA, 20 bp, Artificial Sequence
  Synthetic oligonucleotide; TGG chr11 5305227 5305246 5305243 +
gtttataggagtggatacta

SEQ ID NO: 18047 - DNA, 20 bp, Artificial Sequence
  Synthetic oligonucleotide; TAG chr11 5305230 5305249 5305246 +
tataggagtggatactatgg

SEQ ID NO: 18048 - DNA, 20 bp, Artificial Sequence
  Synthetic oligonucleotide; AGG chr11 5305231 5305250 5305247 +
ataggagtggatactatggt

SEQ ID NO: 18049 - DNA, 20 bp, Artificial Sequence
  Synthetic oligonucleotide; TAG chr11 5305238 5305257 5305254 +
tggatactatggtaggttaa

SEQ ID NO: 18050 - DNA, 20 bp, Artificial Sequence
  Synthetic oligonucleotide; TAG chr11 5305250 5305269 5305266 +
taggttaatagtgaaaaata

SEQ ID NO: 18051 - DNA, 20 bp, Artificial Sequence
  Synthetic oligonucleotide; TAG chr11 5305274 5305293 5305290 +
attatcaattaatataaaca

SEQ ID NO: 18052 - DNA, 20 bp, Artificial Sequence
  Synthetic oligonucleotide; GAG chr11 5305276 5305295 5305292 +
tatcaattaatataaacata

SEQ ID NO: 18053 - DNA, 20 bp, Artificial Sequence
  Synthetic oligonucleotide; AGG chr11 5305277 5305296 5305293 +
atcaattaatataaacatag

SEQ ID NO: 18054 - DNA, 20 bp, Artificial Sequence
  Synthetic oligonucleotide; TGG chr11 5305291 5305310 5305307 +
acatagaggtgttgattgtt

SEQ ID NO: 18055 - DNA, 20 bp, Artificial Sequence
  Synthetic oligonucleotide; GGG chr11 5305292 5305311 5305308 +
catagaggtgttgattgttt

SEQ ID NO: 18056 - DNA, 20 bp, Artificial Sequence
  Synthetic oligonucleotide; GGG chr11 5305293 5305312 5305309 +
atagaggtgttgattgtttg

SEQ ID NO: 18057 - DNA, 20 bp, Artificial Sequence
  Synthetic oligonucleotide; TAG chr11 5305300 5305319 5305316 +
tgttgattgtttggggcaac

SEQ ID NO: 18058 - DNA, 20 bp, Artificial Sequence
  Synthetic oligonucleotide; AGG chr11 5305301 5305320 5305317 +
gttgattgtttggggcaact

SEQ ID NO: 18059 - DNA, 20 bp, Artificial Sequence
  Synthetic oligonucleotide; TGG chr11 5305308 5305327 5305324 +
gtttggggcaactaggtctt

SEQ ID NO: 18060 - DNA, 20 bp, Artificial Sequence
  Synthetic oligonucleotide; TGG chr11 5305334 5305353 5305350 +
tattgacaatttcaacataa

SEQ ID NO: 18061 - DNA, 20 bp, Artificial Sequence
  Synthetic oligonucleotide; CAG chr11 5305337 5305356 5305353 +
tgacaatttcaacataatgg

SEQ ID NO: 18062 - DNA, 20 bp, Artificial Sequence
  Synthetic oligonucleotide; GAG chr11 5305361 5305380 5305377 +
aatgaatgcctaatgactgt

SEQ ID NO: 18063 - DNA, 20 bp, Artificial Sequence
  Synthetic oligonucleotide; AAG chr11 5305369 5305388 5305385 +
cctaatgactgtgagacaaa

SEQ ID NO: 18064 - DNA, 20 bp, Artificial Sequence
  Synthetic oligonucleotide; GAG chr11 5305373 5305392 5305389 +
atgactgtgagacaaaaagt

SEQ ID NO: 18065 - DNA, 20 bp, Artificial Sequence
  Synthetic oligonucleotide; CAG chr11 5305383 5305402 5305399 +
gacaaaaagtgagtaaaaaa

SEQ ID NO: 18066 - DNA, 20 bp, Artificial Sequence
  Synthetic oligonucleotide; TGG chr11 5305387 5305406 5305403 +
aaaagtgagtaaaaaacagc

SEQ ID NO: 18067 - DNA, 20 bp, Artificial Sequence
  Synthetic oligonucleotide; GGG chr11 5305388 5305407 5305404 +
aaagtgagtaaaaaacagct

SEQ ID NO: 18068 - DNA, 20 bp, Artificial Sequence
  Synthetic oligonucleotide; CGG chr11 5305393 5305412 5305409 +
gagtaaaaaacagctgggca

SEQ ID NO: 18069 - DNA, 20 bp, Artificial Sequence
  Synthetic oligonucleotide; TGG chr11 5305396 5305415 5305412 +
taaaaaacagctgggcacgg

SEQ ID NO: 18070 - DNA, 20 bp, Artificial Sequence
  Synthetic oligonucleotide; CAG chr11 5305415 5305434 5305431 +
gtggctcatgcctataatcc

SEQ ID NO: 18071 - DNA, 20 bp, Artificial Sequence
  Synthetic oligonucleotide; TGG chr11 5305423 5305442 5305439 +
tgcctataatcccagcactt

SEQ ID NO: 18072 - DNA, 20 bp, Artificial Sequence
  Synthetic oligonucleotide; GGG chr11 5305424 5305443 5305440 +
gcctataatcccagcacttt

SEQ ID NO: 18073 - DNA, 20 bp, Artificial Sequence
  Synthetic oligonucleotide; GAG chr11 5305426 5305445 5305442 +
ctataatcccagcactttgg

SEQ ID NO: 18074 - DNA, 20 bp, Artificial Sequence
  Synthetic oligonucleotide; AGG chr11 5305427 5305446 5305443 +
tataatcccagcactttggg

SEQ ID NO: 18075 - DNA, 20 bp, Artificial Sequence
  Synthetic oligonucleotide; GAG chr11 5305432 5305451 5305448 +
tcccagcactttgggaggcc

SEQ ID NO: 18076 - DNA, 20 bp, Artificial Sequence
  Synthetic oligonucleotide; AGG chr11 5305433 5305452 5305449 +
cccagcactttgggaggccg

SEQ ID NO: 18077 - DNA, 20 bp, Artificial Sequence
  Synthetic oligonucleotide; GAG chr11 5305435 5305454 5305451 +
cagcactttgggaggccgag

SEQ ID NO: 18078 - DNA, 20 bp, Artificial Sequence
  Synthetic oligonucleotide; AGG chr11 5305436 5305455 5305452 +
agcactttgggaggccgagg

SEQ ID NO: 18079 - DNA, 20 bp, Artificial Sequence
  Synthetic oligonucleotide; GGG chr11 5305437 5305456 5305453 +
gcactttgggaggccgagga

SEQ ID NO: 18080 - DNA, 20 bp, Artificial Sequence
  Synthetic oligonucleotide; TGG chr11 5305440 5305459 5305456 +
ctttgggaggccgaggaggg

SEQ ID NO: 18081 - DNA, 20 bp, Artificial Sequence
  Synthetic oligonucleotide; GAG chr11 5305450 5305469 5305466 +
ccgaggagggtggatcactt

SEQ ID NO: 18082 - DNA, 20 bp, Artificial Sequence
  Synthetic oligonucleotide; CAG chr11 5305455 5305474 5305471 +
gagggtggatcacttgagtt

SEQ ID NO: 18083 - DNA, 20 bp, Artificial Sequence
  Synthetic oligonucleotide; AGG chr11 5305456 5305475 5305472 +
agggtggatcacttgagttc

SEQ ID NO: 18084 - DNA, 20 bp, Artificial Sequence
  Synthetic oligonucleotide; GAG chr11 5305458 5305477 5305474 +
ggtggatcacttgagttcag

SEQ ID NO: 18085 - DNA, 20 bp, Artificial Sequence
  Synthetic oligonucleotide; GAG chr11 5305464 5305483 5305480 +
tcacttgagttcaggagttc

SEQ ID NO: 18086 - DNA, 20 bp, Artificial Sequence
  Synthetic oligonucleotide; CAG chr11 5305469 5305488 5305485 +
tgagttcaggagttcgagac

SEQ ID NO: 18087 - DNA, 20 bp, Artificial Sequence
  Synthetic oligonucleotide; TGG chr11 5305473 5305492 5305489 +
ttcaggagttcgagaccagc

SEQ ID NO: 18088 - DNA, 20 bp, Artificial Sequence
  Synthetic oligonucleotide; GGG chr11 5305474 5305493 5305490 +
tcaggagttcgagaccagct

SEQ ID NO: 18089 - DNA, 20 bp, Artificial Sequence
  Synthetic oligonucleotide; TGG chr11 5305483 5305502 5305499 +
cgagaccagctgggccaaca

SEQ ID NO: 18090 - DNA, 20 bp, Artificial Sequence
  Synthetic oligonucleotide; AAG chr11 5305518 5305537 5305534 +
actactataattacaaaaat

SEQ ID NO: 18091 - DNA, 20 bp, Artificial Sequence
  Synthetic oligonucleotide; CAG chr11 5305522 5305541 5305538 +
ctataattacaaaaataagc

SEQ ID NO: 18092 - DNA, 20 bp, Artificial Sequence
  Synthetic oligonucleotide; AGG chr11 5305523 5305542 5305539 +
tataattacaaaaataagcc

SEQ ID NO: 18093 - DNA, 20 bp, Artificial Sequence
  Synthetic oligonucleotide; TGG chr11 5305528 5305547 5305544 +
ttacaaaaataagccaggtg

SEQ ID NO: 18094 - DNA, 20 bp, Artificial Sequence
  Synthetic oligonucleotide; TGG chr11 5305531 5305550 5305547 +
caaaaataagccaggtgtgg

SEQ ID NO: 18095 - DNA, 20 bp, Artificial Sequence
  Synthetic oligonucleotide; CAG chr11 5305550 5305569 5305566 +
gtggcacatgatcataatcc

SEQ ID NO: 18096 - DNA, 20 bp, Artificial Sequence
  Synthetic oligonucleotide; TGG chr11 5305559 5305578 5305575 +
gatcataatcccagctactc

SEQ ID NO: 18097 - DNA, 20 bp, Artificial Sequence
  Synthetic oligonucleotide; GAG chr11 5305561 5305580 5305577 +
tcataatcccagctactctg

SEQ ID NO: 18098 - DNA, 20 bp, Artificial Sequence
  Synthetic oligonucleotide; AGG chr11 5305562 5305581 5305578 +
cataatcccagctactctgg

SEQ ID NO: 18099 - DNA, 20 bp, Artificial Sequence
  Synthetic oligonucleotide; GAG chr11 5305567 5305586 5305583 +
tcccagctactctggaggct

SEQ ID NO: 18100 - DNA, 20 bp, Artificial Sequence
  Synthetic oligonucleotide; AGG chr11 5305568 5305587 5305584 +
cccagctactctggaggctg

SEQ ID NO: 18101 - DNA, 20 bp, Artificial Sequence
  Synthetic oligonucleotide; GAG chr11 5305574 5305593 5305590 +
tactctggaggctgaggcat

SEQ ID NO: 18102 - DNA, 20 bp, Artificial Sequence
  Synthetic oligonucleotide; TGG chr11 5305591 5305610 5305607 +
catgagaatcccctgaaccc

SEQ ID NO: 18103 - DNA, 20 bp, Artificial Sequence
  Synthetic oligonucleotide; TGG chr11 5305594 5305613 5305610 +
gagaatcccctgaaccctgg

SEQ ID NO: 18104 - DNA, 20 bp, Artificial Sequence
  Synthetic oligonucleotide; GAG chr11 5305596 5305615 5305612 +
gaatcccctgaaccctggtg

SEQ ID NO: 18105 - DNA, 20 bp, Artificial Sequence
  Synthetic oligonucleotide; AGG chr11 5305597 5305616 5305613 +
aatcccctgaaccctggtgg

SEQ ID NO: 18106 - DNA, 20 bp, Artificial Sequence
  Synthetic oligonucleotide; GAG chr11 5305599 5305618 5305615 +
tcccctgaaccctggtggag

SEQ ID NO: 18107 - DNA, 20 bp, Artificial Sequence
  Synthetic oligonucleotide; AGG chr11 5305600 5305619 5305616 +
cccctgaaccctggtggagg

SEQ ID NO: 18108 - DNA, 20 bp, Artificial Sequence
  Synthetic oligonucleotide; CAG chr11 5305606 5305625 5305622 +
aaccctggtggaggaggtcg

SEQ ID NO: 18109 - DNA, 20 bp, Artificial Sequence
  Synthetic oligonucleotide; GAG chr11 5305610 5305629 5305626 +
ctggtggaggaggtcgcagt

SEQ ID NO: 18110 - DNA, 20 bp, Artificial Sequence
  Synthetic oligonucleotide; GAG chr11 5305615 5305634 5305631 +
ggaggaggtcgcagtgagct

SEQ ID NO: 18111 - DNA, 20 bp, Artificial Sequence
  Synthetic oligonucleotide; TAG chr11 5305635 5305654 5305651 +
gagatcgcaccactgcactc

SEQ ID NO: 18112 - DNA, 20 bp, Artificial Sequence
  Synthetic oligonucleotide; TGG chr11 5305640 5305659 5305656 +
cgcaccactgcactctagcc

SEQ ID NO: 18113 - DNA, 20 bp, Artificial Sequence
  Synthetic oligonucleotide; GGG chr11 5305641 5305660 5305657 +
gcaccactgcactctagcct

SEQ ID NO: 18114 - DNA, 20 bp, Artificial Sequence
  Synthetic oligonucleotide; CAG chr11 5305647 5305666 5305663 +
ctgcactctagcctgggcaa

SEQ ID NO: 18115 - DNA, 20 bp, Artificial Sequence
  Synthetic oligonucleotide; GAG chr11 5305649 5305668 5305665 +
gcactctagcctgggcaaca

SEQ ID NO: 18116 - DNA, 20 bp, Artificial Sequence
  Synthetic oligonucleotide; AAG chr11 5305664 5305683 5305680 +
caacagagaaaaatctgtta

SEQ ID NO: 18117 - DNA, 20 bp, Artificial Sequence
  Synthetic oligonucleotide; GAG chr11 5305666 5305685 5305682 +
acagagaaaaatctgttaaa

SEQ ID NO: 18118 - DNA, 20 bp, Artificial Sequence
  Synthetic oligonucleotide; GAG chr11 5305668 5305687 5305684 +
agagaaaaatctgttaaaga

SEQ ID NO: 18119 - DNA, 20 bp, Artificial Sequence
  Synthetic oligonucleotide; GAG chr11 5305670 5305689 5305686 +
agaaaaatctgttaaagaga

SEQ ID NO: 18120 - DNA, 20 bp, Artificial Sequence
  Synthetic oligonucleotide; GAG chr11 5305672 5305691 5305688 +
aaaaatctgttaaagagaga

SEQ ID NO: 18121 - DNA, 20 bp, Artificial Sequence
  Synthetic oligonucleotide; GAG chr11 5305674 5305693 5305690 +
aaatctgttaaagagagaga

SEQ ID NO: 18122 - DNA, 20 bp, Artificial Sequence
  Synthetic oligonucleotide; AAG chr11 5305679 5305698 5305695 +
tgttaaagagagagagagaa

SEQ ID NO: 18123 - DNA, 20 bp, Artificial Sequence
  Synthetic oligonucleotide; AAG chr11 5305684 5305703 5305700 +
aagagagagagagaaaagaa

SEQ ID NO: 18124 - DNA, 20 bp, Artificial Sequence
  Synthetic oligonucleotide; GAG chr11 5305688 5305707 5305704 +
gagagagagaaaagaaaagt

SEQ ID NO: 18125 - DNA, 20 bp, Artificial Sequence
  Synthetic oligonucleotide; AAG chr11 5305699 5305718 5305715 +
aagaaaagtgagtaaaaaac

SEQ ID NO: 18126 - DNA, 20 bp, Artificial Sequence
  Synthetic oligonucleotide; AAG chr11 5305703 5305722 5305719 +
aaagtgagtaaaaaacaaga

SEQ ID NO: 18127 - DNA, 20 bp, Artificial Sequence
  Synthetic oligonucleotide; AAG chr11 5305708 5305727 5305724 +
gagtaaaaaacaagaaagta

SEQ ID NO: 18128 - DNA, 20 bp, Artificial Sequence
  Synthetic oligonucleotide; TGG chr11 5305739 5305758 5305755 +
ttattttatttatattgtta

SEQ ID NO: 18129 - DNA, 20 bp, Artificial Sequence
  Synthetic oligonucleotide; GAG chr11 5305743 5305762 5305759 +
tttatttatattgttatggt

SEQ ID NO: 18130 - DNA, 20 bp, Artificial Sequence
  Synthetic oligonucleotide; AGG chr11 5305744 5305763 5305760 +
ttatttatattgttatggtg

SEQ ID NO: 18131 - DNA, 20 bp, Artificial Sequence
  Synthetic oligonucleotide; GAG chr11 5305752 5305771 5305768 +
attgttatggtgaggaaatt

SEQ ID NO: 18132 - DNA, 20 bp, Artificial Sequence
  Synthetic oligonucleotide; TAG chr11 5305758 5305777 5305774 +
atggtgaggaaattgagcct

SEQ ID NO: 18133 - DNA, 20 bp, Artificial Sequence
  Synthetic oligonucleotide; AAG chr11 5305763 5305782 5305779 +
gaggaaattgagccttagac

SEQ ID NO: 18134 - DNA, 20 bp, Artificial Sequence
  Synthetic oligonucleotide; AAG chr11 5305768 5305787 5305784 +
aattgagccttagacaagtt

SEQ ID NO: 18135 - DNA, 20 bp, Artificial Sequence
  Synthetic oligonucleotide; TAG chr11 5305775 5305794 5305791 +
ccttagacaagttaagcaat

SEQ ID NO: 18136 - DNA, 20 bp, Artificial Sequence
  Synthetic oligonucleotide; AAG chr11 5305781 5305800 5305797 +
acaagttaagcaattagcct

SEQ ID NO: 18137 - DNA, 20 bp, Artificial Sequence
  Synthetic oligonucleotide; AAG chr11 5305808 5305827 5305824 +
cgcaactaatatgtgtcata

SEQ ID NO: 18138 - DNA, 20 bp, Artificial Sequence
  Synthetic oligonucleotide; AGG chr11 5305809 5305828 5305825 +
gcaactaatatgtgtcataa

SEQ ID NO: 18139 - DNA, 20 bp, Artificial Sequence
  Synthetic oligonucleotide; CAG chr11 5305822 5305841 5305838 +
gtcataaaggaattcaaaca

SEQ ID NO: 18140 - DNA, 20 bp, Artificial Sequence
  Synthetic oligonucleotide; AGG chr11 5305823 5305842 5305839 +
tcataaaggaattcaaacac

SEQ ID NO: 18141 - DNA, 20 bp, Artificial Sequence
  Synthetic oligonucleotide; AAG chr11 5305845 5305864 5305861 +
gtttatctaacccaaaaccc

SEQ ID NO: 18142 - DNA, 20 bp, Artificial Sequence
  Synthetic oligonucleotide; TGG chr11 5305876 5305895 5305892 +
ctcaaccaatgtccatcaaa

SEQ ID NO: 18143 - DNA, 20 bp, Artificial Sequence
  Synthetic oligonucleotide; TGG chr11 5305882 5305901 5305898 +
caatgtccatcaaatggaaa

SEQ ID NO: 18144 - DNA, 20 bp, Artificial Sequence
  Synthetic oligonucleotide; TGG chr11 5305913 5305932 5305929 +
gcttcccgtatttgaatcct

SEQ ID NO: 18145 - DNA, 20 bp, Artificial Sequence
  Synthetic oligonucleotide; GAG chr11 5305928 5305947 5305944 +
atccttggcttttcttacct

SEQ ID NO: 18146 - DNA, 20 bp, Artificial Sequence
  Synthetic oligonucleotide; CAG chr11 5305934 5305953 5305950 +
ggcttttcttacctgagcca

SEQ ID NO: 18147 - DNA, 20 bp, Artificial Sequence
  Synthetic oligonucleotide; CGG chr11 5305948 5305967 5305964 +
gagccacagttttctctttg

SEQ ID NO: 18148 - DNA, 20 bp, Artificial Sequence
  Synthetic oligonucleotide; GAG chr11 5305956 5305975 5305972 +
gttttctctttgcggtttct

SEQ ID NO: 18149 - DNA, 20 bp, Artificial Sequence
  Synthetic oligonucleotide; TGG chr11 5305973 5305992 5305989 +
tctgagcatgacctgaatat

SEQ ID NO: 18150 - DNA, 20 bp, Artificial Sequence
  Synthetic oligonucleotide; CAG chr11 5305992 5306011 5306008 +
ttggttgtttgctatatcct

SEQ ID NO: 18151 - DNA, 20 bp, Artificial Sequence
  Synthetic oligonucleotide; GAG chr11 5306015 5306034 5306031 +
tatttactcttaattctgat

SEQ ID NO: 18152 - DNA, 20 bp, Artificial Sequence
  Synthetic oligonucleotide; GAG chr11 5306017 5306036 5306033 +
tttactcttaattctgatga

SEQ ID NO: 18153 - DNA, 20 bp, Artificial Sequence
  Synthetic oligonucleotide; AAG chr11 5306046 5306065 5306062 +
ttgttacacaaacaactctc

SEQ ID NO: 18154 - DNA, 20 bp, Artificial Sequence
  Synthetic oligonucleotide; AGG chr11 5306047 5306066 5306063 +
tgttacacaaacaactctca

SEQ ID NO: 18155 - DNA, 20 bp, Artificial Sequence
  Synthetic oligonucleotide; GGG chr11 5306048 5306067 5306064 +
gttacacaaacaactctcaa

SEQ ID NO: 18156 - DNA, 20 bp, Artificial Sequence
  Synthetic oligonucleotide; GGG chr11 5306049 5306068 5306065 +
ttacacaaacaactctcaag

SEQ ID NO: 18157 - DNA, 20 bp, Artificial Sequence
  Synthetic oligonucleotide; TAG chr11 5306058 5306077 5306074 +
caactctcaaggggttattc

SEQ ID NO: 18158 - DNA, 20 bp, Artificial Sequence
  Synthetic oligonucleotide; TAG chr11 5306073 5306092 5306089 +
tattctagctcatttccaca

SEQ ID NO: 18159 - DNA, 20 bp, Artificial Sequence
  Synthetic oligonucleotide; AGG chr11 5306074 5306093 5306090 +
attctagctcatttccacat

SEQ ID NO: 18160 - DNA, 20 bp, Artificial Sequence
  Synthetic oligonucleotide; TGG chr11 5306082 5306101 5306098 +
tcatttccacataggatatt

SEQ ID NO: 18161 - DNA, 20 bp, Artificial Sequence
  Synthetic oligonucleotide; GGG chr11 5306083 5306102 5306099 +
catttccacataggatattt

SEQ ID NO: 18162 - DNA, 20 bp, Artificial Sequence
  Synthetic oligonucleotide; TAG chr11 5306088 5306107 5306104 +
ccacataggatatttgggaa

SEQ ID NO: 18163 - DNA, 20 bp, Artificial Sequence
  Synthetic oligonucleotide; TGG chr11 5306123 5306142 5306139 +
ttctcttttcctccccaacc

SEQ ID NO: 18164 - DNA, 20 bp, Artificial Sequence
  Synthetic oligonucleotide; GGG chr11 5306124 5306143 5306140 +
tctcttttcctccccaacct

SEQ ID NO: 18165 - DNA, 20 bp, Artificial Sequence
  Synthetic oligonucleotide; AAG chr11 5306128 5306147 5306144 +
ttttcctccccaacctggga

SEQ ID NO: 18166 - DNA, 20 bp, Artificial Sequence
  Synthetic oligonucleotide; TGG chr11 5306134 5306153 5306150 +
tccccaacctgggaaagatc

SEQ ID NO: 18167 - DNA, 20 bp, Artificial Sequence
  Synthetic oligonucleotide; GGG chr11 5306135 5306154 5306151 +
ccccaacctgggaaagatct

SEQ ID NO: 18168 - DNA, 20 bp, Artificial Sequence
  Synthetic oligonucleotide; TGG chr11 5306148 5306167 5306164 +
aagatctgggccattgaaac

SEQ ID NO: 18169 - DNA, 20 bp, Artificial Sequence
  Synthetic oligonucleotide; TGG chr11 5306157 5306176 5306173 +
gccattgaaactggtcccca

SEQ ID NO: 18170 - DNA, 20 bp, Artificial Sequence
  Synthetic oligonucleotide; TGG chr11 5306175 5306194 5306191 +
catggcctttattttttctt

SEQ ID NO: 18171 - DNA, 20 bp, Artificial Sequence
  Synthetic oligonucleotide; AAG chr11 5306178 5306197 5306194 +
ggcctttattttttctttgg

SEQ ID NO: 18172 - DNA, 20 bp, Artificial Sequence
  Synthetic oligonucleotide; AGG chr11 5306179 5306198 5306195 +
gcctttattttttctttgga

SEQ ID NO: 18173 - DNA, 20 bp, Artificial Sequence
  Synthetic oligonucleotide; GAG chr11 5306181 5306200 5306197 +
ctttattttttctttggaag

SEQ ID NO: 18174 - DNA, 20 bp, Artificial Sequence
  Synthetic oligonucleotide; GAG chr11 5306183 5306202 5306199 +
ttattttttctttggaagga

SEQ ID NO: 18175 - DNA, 20 bp, Artificial Sequence
  Synthetic oligonucleotide; AAG chr11 5306191 5306210 5306207 +
tctttggaaggagagtctct

SEQ ID NO: 18176 - DNA, 20 bp, Artificial Sequence
  Synthetic oligonucleotide; GAG chr11 5306193 5306212 5306209 +
tttggaaggagagtctctaa

SEQ ID NO: 18177 - DNA, 20 bp, Artificial Sequence
  Synthetic oligonucleotide; AAG chr11 5306196 5306215 5306212 +
ggaaggagagtctctaagag

SEQ ID NO: 18178 - DNA, 20 bp, Artificial Sequence
  Synthetic oligonucleotide; CAG chr11 5306214 5306233 5306230 +
agaagttgtgtctctaacat

SEQ ID NO: 18179 - DNA, 20 bp, Artificial Sequence
  Synthetic oligonucleotide; GAG chr11 5306219 5306238 5306235 +
ttgtgtctctaacatcagat

SEQ ID NO: 18180 - DNA, 20 bp, Artificial Sequence
  Synthetic oligonucleotide; AGG chr11 5306220 5306239 5306236 +
tgtgtctctaacatcagatg

SEQ ID NO: 18181 - DNA, 20 bp, Artificial Sequence
  Synthetic oligonucleotide; GAG chr11 5306235 5306254 5306251 +
agatgaggcatgaccgaaat

SEQ ID NO: 18182 - DNA, 20 bp, Artificial Sequence
  Synthetic oligonucleotide; AAG chr11 5306246 5306265 5306262 +
gaccgaaatgagtcactctc

SEQ ID NO: 18183 - DNA, 20 bp, Artificial Sequence
  Synthetic oligonucleotide; TGG chr11 5306257 5306276 5306273 +
gtcactctcaagtgttccat

SEQ ID NO: 18184 - DNA, 20 bp, Artificial Sequence
  Synthetic oligonucleotide; TAG chr11 5306263 5306282 5306279 +
ctcaagtgttccattggtct

SEQ ID NO: 18185 - DNA, 20 bp, Artificial Sequence
  Synthetic oligonucleotide; GAG chr11 5306265 5306284 5306281 +
caagtgttccattggtctta

SEQ ID NO: 18186 - DNA, 20 bp, Artificial Sequence
  Synthetic oligonucleotide; TGG chr11 5306268 5306287 5306284 +
gtgttccattggtcttagag

SEQ ID NO: 18187 - DNA, 20 bp, Artificial Sequence
  Synthetic oligonucleotide; GGG chr11 5306269 5306288 5306285 +
tgttccattggtcttagagt

SEQ ID NO: 18188 - DNA, 20 bp, Artificial Sequence
  Synthetic oligonucleotide; AAG chr11 5306272 5306291 5306288 +
tccattggtcttagagtggg

SEQ ID NO: 18189 - DNA, 20 bp, Artificial Sequence
  Synthetic oligonucleotide; CAG chr11 5306277 5306296 5306293 +
tggtcttagagtgggaagac

SEQ ID NO: 18190 - DNA, 20 bp, Artificial Sequence
  Synthetic oligonucleotide; AAG chr11 5306310 5306329 5306326 +
tttgtaaatgttaacatttg

SEQ ID NO: 18191 - DNA, 20 bp, Artificial Sequence
  Synthetic oligonucleotide; GAG chr11 5306372 5306391 5306388 +
caaccctttacaaaatcctt

SEQ ID NO: 18192 - DNA, 20 bp, Artificial Sequence
  Synthetic oligonucleotide; CAG chr11 5306411 5306430 5306427 +
tcgtcttgatgattattcat

SEQ ID NO: 18193 - DNA, 20 bp, Artificial Sequence
  Synthetic oligonucleotide; GAG chr11 5306461 5306480 5306477 +
aaaactcactaccctaccct

SEQ ID NO: 18194 - DNA, 20 bp, Artificial Sequence
  Synthetic oligonucleotide; TGG chr11 5306484 5306503 5306500 +
ctatctcattcatatatatg

SEQ ID NO: 18195 - DNA, 20 bp, Artificial Sequence
  Synthetic oligonucleotide; GGG chr11 5306485 5306504 5306501 +
tatctcattcatatatatgt

SEQ ID NO: 18196 - DNA, 20 bp, Artificial Sequence
  Synthetic oligonucleotide; TAG chr11 5306503 5306522 5306519 +
gtgggtttcatttaattatt

SEQ ID NO: 18197 - DNA, 20 bp, Artificial Sequence
  Synthetic oligonucleotide; TGG chr11 5306518 5306537 5306534 +
ttatttagtatatgtatata

SEQ ID NO: 18198 - DNA, 20 bp, Artificial Sequence
  Synthetic oligonucleotide; TAG chr11 5306546 5306565 5306562 +
actatcaatatatgtatgca

SEQ ID NO: 18199 - DNA, 20 bp, Artificial Sequence
  Synthetic oligonucleotide; AGG chr11 5306547 5306566 5306563 +
ctatcaatatatgtatgcat

SEQ ID NO: 18200 - DNA, 20 bp, Artificial Sequence
  Synthetic oligonucleotide; CAG chr11 5306580 5306599 5306596 +
tgtgtgtatatatatattca

SEQ ID NO: 18201 - DNA, 20 bp, Artificial Sequence
  Synthetic oligonucleotide; CAG chr11 5306584 5306603 5306600 +
tgtatatatatattcacaga

SEQ ID NO: 18202 - DNA, 20 bp, Artificial Sequence
  Synthetic oligonucleotide; GAG chr11 5306586 5306605 5306602 +
tatatatatattcacagaca

SEQ ID NO: 18203 - DNA, 20 bp, Artificial Sequence
  Synthetic oligonucleotide; CAG chr11 5306590 5306609 5306606 +
tatatattcacagacagaga

SEQ ID NO: 18204 - DNA, 20 bp, Artificial Sequence
  Synthetic oligonucleotide; GAG chr11 5306594 5306613 5306610 +
tattcacagacagagacagt

SEQ ID NO: 18205 - DNA, 20 bp, Artificial Sequence
  Synthetic oligonucleotide; GAG chr11 5306596 5306615 5306612 +
ttcacagacagagacagtga

SEQ ID NO: 18206 - DNA, 20 bp, Artificial Sequence
  Synthetic oligonucleotide; GAG chr11 5306598 5306617 5306614 +
cacagacagagacagtgaga

SEQ ID NO: 18207 - DNA, 20 bp, Artificial Sequence
  Synthetic oligonucleotide; GAG chr11 5306600 5306619 5306616 +
cagacagagacagtgagaga

SEQ ID NO: 18208 - DNA, 20 bp, Artificial Sequence
  Synthetic oligonucleotide; GAG chr11 5306602 5306621 5306618 +
gacagagacagtgagagaga

SEQ ID NO: 18209 - DNA, 20 bp, Artificial Sequence
  Synthetic oligonucleotide; GAG chr11 5306604 5306623 5306620 +
cagagacagtgagagagaga

SEQ ID NO: 18210 - DNA, 20 bp, Artificial Sequence
  Synthetic oligonucleotide; GAG chr11 5306606 5306625 5306622 +
gagacagtgagagagagaga

SEQ ID NO: 18211 - DNA, 20 bp, Artificial Sequence
  Synthetic oligonucleotide; TAG chr11 5306651 5306670 5306667 +
taatatctactccttatatt

SEQ ID NO: 18212 - DNA, 20 bp, Artificial Sequence
  Synthetic oligonucleotide; AGG chr11 5306652 5306671 5306668 +
aatatctactccttatattt

SEQ ID NO: 18213 - DNA, 20 bp, Artificial Sequence
  Synthetic oligonucleotide; CAG chr11 5306664 5306683 5306680 +
ttatatttaggtctgatctc

SEQ ID NO: 18214 - DNA, 20 bp, Artificial Sequence
  Synthetic oligonucleotide; TAG chr11 5306685 5306704 5306701 +
agaataaaataaccatatat

SEQ ID NO: 18215 - DNA, 20 bp, Artificial Sequence
  Synthetic oligonucleotide; TAG chr11 5306715 5306734 5306731 +
attcatacataatttttttc

SEQ ID NO: 18216 - DNA, 20 bp, Artificial Sequence
  Synthetic oligonucleotide; AAG chr11 5306725 5306744 5306741 +
aatttttttctagatgtata

SEQ ID NO: 18217 - DNA, 20 bp, Artificial Sequence
  Synthetic oligonucleotide; AAG chr11 5306748 5306767 5306764 +
atatctgcattaaaaaccct

SEQ ID NO: 18218 - DNA, 20 bp, Artificial Sequence
  Synthetic oligonucleotide; TGG chr11 5306764 5306783 5306780 +
ccctaagacttctttcctga

SEQ ID NO: 18219 - DNA, 20 bp, Artificial Sequence
  Synthetic oligonucleotide; GGG chr11 5306765 5306784 5306781 +
cctaagacttctttcctgat

SEQ ID NO: 18220 - DNA, 20 bp, Artificial Sequence
  Synthetic oligonucleotide; CAG chr11 5306782 5306801 5306798 +
gatgggtgaaccaatatcaa

SEQ ID NO: 18221 - DNA, 20 bp, Artificial Sequence
  Synthetic oligonucleotide; CAG chr11 5306865 5306884 5306881 +
ccttattgaacataataatc

SEQ ID NO: 18222 - DNA, 20 bp, Artificial Sequence
  Synthetic oligonucleotide; TAG chr11 5306880 5306899 5306896 +
taatccagatgttgtcatat

SEQ ID NO: 18223 - DNA, 20 bp, Artificial Sequence
  Synthetic oligonucleotide; TGG chr11 5306909 5306928 5306925 +
tctgaaatctcttttttcat

SEQ ID NO: 18224 - DNA, 20 bp, Artificial Sequence
  Synthetic oligonucleotide; GAG chr11 5306922 5306941 5306938 +
ttttcattggattatgtgct

SEQ ID NO: 18225 - DNA, 20 bp, Artificial Sequence
  Synthetic oligonucleotide; AAG chr11 5306934 5306953 5306950 +
tatgtgctgagtttctattt

SEQ ID NO: 18226 - DNA, 20 bp, Artificial Sequence
  Synthetic oligonucleotide; TAG chr11 5306937 5306956 5306953 +
gtgctgagtttctatttaag

SEQ ID NO: 18227 - DNA, 20 bp, Artificial Sequence
  Synthetic oligonucleotide; AAG chr11 5306943 5306962 5306959 +
agtttctatttaagtagtct

SEQ ID NO: 18228 - DNA, 20 bp, Artificial Sequence
  Synthetic oligonucleotide; CAG chr11 5306952 5306971 5306968 +
ttaagtagtctaagatcgtg

SEQ ID NO: 18229 - DNA, 20 bp, Artificial Sequence
  Synthetic oligonucleotide; CAG chr11 5307000 5307019 5307016 +
atctcaaaacatgtcaaatt

SEQ ID NO: 18230 - DNA, 20 bp, Artificial Sequence
  Synthetic oligonucleotide; CAG chr11 5307008 5307027 5307024 +
acatgtcaaattcagtcttt

SEQ ID NO: 18231 - DNA, 20 bp, Artificial Sequence
  Synthetic oligonucleotide; TAG chr11 5307019 5307038 5307035 +
tcagtctttcagatttaaaa

SEQ ID NO: 18232 - DNA, 20 bp, Artificial Sequence
  Synthetic oligonucleotide; CAG chr11 5307061 5307080 5307077 +
cataatatatgtgacactcg

SEQ ID NO: 18233 - DNA, 20 bp, Artificial Sequence
  Synthetic oligonucleotide; AAG chr11 5307065 5307084 5307081 +
atatatgtgacactcgcagc

SEQ ID NO: 18234 - DNA, 20 bp, Artificial Sequence
  Synthetic oligonucleotide; TAG chr11 5307098 5307117 5307114 +
tactatcacctgtttatact

SEQ ID NO: 18235 - DNA, 20 bp, Artificial Sequence
  Synthetic oligonucleotide; AGG chr11 5307099 5307118 5307115 +
actatcacctgtttatactt

SEQ ID NO: 18236 - DNA, 20 bp, Artificial Sequence
  Synthetic oligonucleotide; GGG chr11 5307100 5307119 5307116 +
ctatcacctgtttatactta

SEQ ID NO: 18237 - DNA, 20 bp, Artificial Sequence
  Synthetic oligonucleotide; GGG chr11 5307101 5307120 5307117 +
tatcacctgtttatacttag

SEQ ID NO: 18238 - DNA, 20 bp, Artificial Sequence
  Synthetic oligonucleotide; CAG chr11 5307133 5307152 5307149 +
taaatatcctctcatatatt

SEQ ID NO: 18239 - DNA, 20 bp, Artificial Sequence
  Synthetic oligonucleotide; AGG chr11 5307134 5307153 5307150 +
aaatatcctctcatatattc

SEQ ID NO: 18240 - DNA, 20 bp, Artificial Sequence
  Synthetic oligonucleotide; AAG chr11 5307138 5307157 5307154 +
atcctctcatatattcaggt

SEQ ID NO: 18241 - DNA, 20 bp, Artificial Sequence
  Synthetic oligonucleotide; TAG chr11 5307161 5307180 5307177 +
attttgccaaaacgtgattt

SEQ ID NO: 18242 - DNA, 20 bp, Artificial Sequence
  Synthetic oligonucleotide; AGG chr11 5307162 5307181 5307178 +
ttttgccaaaacgtgatttt

SEQ ID NO: 18243 - DNA, 20 bp, Artificial Sequence
  Synthetic oligonucleotide; CAG chr11 5307170 5307189 5307186 +
aaacgtgattttaggtcata

SEQ ID NO: 18244 - DNA, 20 bp, Artificial Sequence
  Synthetic oligonucleotide; CAG chr11 5307187 5307206 5307203 +
atacagcaataaatgcattc

SEQ ID NO: 18245 - DNA, 20 bp, Artificial Sequence
  Synthetic oligonucleotide; CAG chr11 5307201 5307220 5307217 +
gcattccagaattcattttg

SEQ ID NO: 18246 - DNA, 20 bp, Artificial Sequence
  Synthetic oligonucleotide; TAG chr11 5307217 5307236 5307233 +
tttgcagaacctgttgattc

SEQ ID NO: 18247 - DNA, 20 bp, Artificial Sequence
  Synthetic oligonucleotide; TAG chr11 5307225 5307244 5307241 +
acctgttgattctagacttg

SEQ ID NO: 18248 - DNA, 20 bp, Artificial Sequence
  Synthetic oligonucleotide; AAG chr11 5307230 5307249 5307246 +
ttgattctagacttgtagct

SEQ ID NO: 18249 - DNA, 20 bp, Artificial Sequence
  Synthetic oligonucleotide; AAG chr11 5307233 5307252 5307249 +
attctagacttgtagctaag

SEQ ID NO: 18250 - DNA, 20 bp, Artificial Sequence
  Synthetic oligonucleotide; CGG chr11 5307239 5307258 5307255 +
gacttgtagctaagaagtga

SEQ ID NO: 18251 - DNA, 20 bp, Artificial Sequence
  Synthetic oligonucleotide; TGG chr11 5307244 5307263 5307260 +
gtagctaagaagtgacggct

SEQ ID NO: 18252 - DNA, 20 bp, Artificial Sequence
  Synthetic oligonucleotide; AAG chr11 5307264 5307283 5307280 +
tggtaaataaccatatcata

SEQ ID NO: 18253 - DNA, 20 bp, Artificial Sequence
  Synthetic oligonucleotide; CAG chr11 5307268 5307287 5307284 +
aaataaccatatcataaagt

SEQ ID NO: 18254 - DNA, 20 bp, Artificial Sequence
  Synthetic oligonucleotide; CAG chr11 5307286 5307305 5307302 +
gtcagttctctttgtactca

SEQ ID NO: 18255 - DNA, 20 bp, Artificial Sequence
  Synthetic oligonucleotide; AAG chr11 5307306 5307325 5307322 +
cagtaaaacaaaacttctga

SEQ ID NO: 18256 - DNA, 20 bp, Artificial Sequence
  Synthetic oligonucleotide; AAG chr11 5307314 5307333 5307330 +
caaaacttctgaaagatttt

SEQ ID NO: 18257 - DNA, 20 bp, Artificial Sequence
  Synthetic oligonucleotide; GAG chr11 5307318 5307337 5307334 +
acttctgaaagattttaagt

SEQ ID NO: 18258 - DNA, 20 bp, Artificial Sequence
  Synthetic oligonucleotide; CAG chr11 5307330 5307349 5307346 +
ttttaagtgagtgacatttt

SEQ ID NO: 18259 - DNA, 20 bp, Artificial Sequence
  Synthetic oligonucleotide; TGG chr11 5307342 5307361 5307358 +
gacattttcagtgcttaaaa

SEQ ID NO: 18260 - DNA, 20 bp, Artificial Sequence
  Synthetic oligonucleotide; GAG chr11 5307344 5307363 5307360 +
cattttcagtgcttaaaatg

SEQ ID NO: 18261 - DNA, 20 bp, Artificial Sequence
  Synthetic oligonucleotide; TAG chr11 5307356 5307375 5307372 +
ttaaaatggagcttaacata

SEQ ID NO: 18262 - DNA, 20 bp, Artificial Sequence
  Synthetic oligonucleotide; TGG chr11 5307359 5307378 5307375 +
aaatggagcttaacatatag

SEQ ID NO: 18263 - DNA, 20 bp, Artificial Sequence
  Synthetic oligonucleotide; GGG chr11 5307360 5307379 5307376 +
aatggagcttaacatatagt

SEQ ID NO: 18264 - DNA, 20 bp, Artificial Sequence
  Synthetic oligonucleotide; CAG chr11 5307367 5307386 5307383 +
cttaacatatagtgggtgct

SEQ ID NO: 18265 - DNA, 20 bp, Artificial Sequence
  Synthetic oligonucleotide; AAG chr11 5307371 5307390 5307387 +
acatatagtgggtgctcagt

SEQ ID NO: 18266 - DNA, 20 bp, Artificial Sequence
  Synthetic oligonucleotide; TAG chr11 5307377 5307396 5307393 +
agtgggtgctcagtaagtac

SEQ ID NO: 18267 - DNA, 20 bp, Artificial Sequence
  Synthetic oligonucleotide; AAG chr11 5307382 5307401 5307398 +
gtgctcagtaagtactagtt

SEQ ID NO: 18268 - DNA, 20 bp, Artificial Sequence
  Synthetic oligonucleotide; AAG chr11 5307409 5307428 5307425 +
tgaatgctattcttgtgatc

SEQ ID NO: 18269 - DNA, 20 bp, Artificial Sequence
  Synthetic oligonucleotide; TGG chr11 5307416 5307435 5307432 +
tattcttgtgatcaagccat

SEQ ID NO: 18270 - DNA, 20 bp, Artificial Sequence
  Synthetic oligonucleotide; TAG chr11 5307424 5307443 5307440 +
tgatcaagccattggttttg

SEQ ID NO: 18271 - DNA, 20 bp, Artificial Sequence
  Synthetic oligonucleotide; TAG chr11 5307435 5307454 5307451 +
ttggttttgtagccaaattg

SEQ ID NO: 18272 - DNA, 20 bp, Artificial Sequence
  Synthetic oligonucleotide; AAG chr11 5307468 5307487 5307484 +
cctctacatctgtttgtaat

SEQ ID NO: 18273 - DNA, 20 bp, Artificial Sequence
  Synthetic oligonucleotide; TAG chr11 5307476 5307495 5307492 +
tctgtttgtaataagattac

SEQ ID NO: 18274 - DNA, 20 bp, Artificial Sequence
  Synthetic oligonucleotide; AAG chr11 5307482 5307501 5307498 +
tgtaataagattactagttc

SEQ ID NO: 18275 - DNA, 20 bp, Artificial Sequence
  Synthetic oligonucleotide; TAG chr11 5307521 5307540 5307537 +
atctccttttctttattgtt

SEQ ID NO: 18276 - DNA, 20 bp, Artificial Sequence
  Synthetic oligonucleotide; TGG chr11 5307556 5307575 5307572 +
tctaatttttacatcaatca

SEQ ID NO: 18277 - DNA, 20 bp, Artificial Sequence
  Synthetic oligonucleotide; CAG chr11 5307561 5307580 5307577 +
tttttacatcaatcatggtt

SEQ ID NO: 18278 - DNA, 20 bp, Artificial Sequence
  Synthetic oligonucleotide; GAG chr11 5307563 5307582 5307579 +
tttacatcaatcatggttca

SEQ ID NO: 18279 - DNA, 20 bp, Artificial Sequence
  Synthetic oligonucleotide; AAG chr11 5307585 5307604 5307601 +
gaaaaatccataacaacatc

SEQ ID NO: 18280 - DNA, 20 bp, Artificial Sequence
  Synthetic oligonucleotide; AAG chr11 5307588 5307607 5307604 +
aaatccataacaacatcaag

SEQ ID NO: 18281 - DNA, 20 bp, Artificial Sequence
  Synthetic oligonucleotide; AAG chr11 5307592 5307611 5307608 +
ccataacaacatcaagaaga

SEQ ID NO: 18282 - DNA, 20 bp, Artificial Sequence
  Synthetic oligonucleotide; AAG chr11 5307603 5307622 5307619 +
tcaagaagaaagattttttg

SEQ ID NO: 18283 - DNA, 20 bp, Artificial Sequence
  Synthetic oligonucleotide; GAG chr11 5307796 5307815 5307812 +
tcttttctttcctctctttt

SEQ ID NO: 18284 - DNA, 20 bp, Artificial Sequence
  Synthetic oligonucleotide; CAG chr11 5307800 5307819 5307816 +
ttctttcctctcttttgaga

SEQ ID NO: 18285 - DNA, 20 bp, Artificial Sequence
  Synthetic oligonucleotide; CAG chr11 5307820 5307839 5307836 +
cagtgtcttgctctgtcacc

SEQ ID NO: 18286 - DNA, 20 bp, Artificial Sequence
  Synthetic oligonucleotide; AGG chr11 5307821 5307840 5307837 +
agtgtcttgctctgtcaccc

SEQ ID NO: 18287 - DNA, 20 bp, Artificial Sequence
  Synthetic oligonucleotide; GAG chr11 5307823 5307842 5307839 +
tgtcttgctctgtcacccag

SEQ ID NO: 18288 - DNA, 20 bp, Artificial Sequence
  Synthetic oligonucleotide; AGG chr11 5307824 5307843 5307840 +
gtcttgctctgtcacccagg

SEQ ID NO: 18289 - DNA, 20 bp, Artificial Sequence
  Synthetic oligonucleotide; GGG chr11 5307825 5307844 5307841 +
tcttgctctgtcacccagga

SEQ ID NO: 18290 - DNA, 20 bp, Artificial Sequence
  Synthetic oligonucleotide; GAG chr11 5307827 5307846 5307843 +
ttgctctgtcacccaggagg

SEQ ID NO: 18291 - DNA, 20 bp, Artificial Sequence
  Synthetic oligonucleotide; CAG chr11 5307832 5307851 5307848 +
ctgtcacccaggagggagtg

SEQ ID NO: 18292 - DNA, 20 bp, Artificial Sequence
  Synthetic oligonucleotide; TGG chr11 5307835 5307854 5307851 +
tcacccaggagggagtgcag

SEQ ID NO: 18293 - DNA, 20 bp, Artificial Sequence
  Synthetic oligonucleotide; GAG chr11 5307839 5307858 5307855 +
ccaggagggagtgcagtggt

SEQ ID NO: 18294 - DNA, 20 bp, Artificial Sequence
  Synthetic oligonucleotide; TAG chr11 5307846 5307865 5307862 +
ggagtgcagtggtgagatca

SEQ ID NO: 18295 - DNA, 20 bp, Artificial Sequence
  Synthetic oligonucleotide; CAG chr11 5307856 5307875 5307872 +
ggtgagatcatagtttactg

SEQ ID NO: 18296 - DNA, 20 bp, Artificial Sequence
  Synthetic oligonucleotide; AAG chr11 5307863 5307882 5307879 +
tcatagtttactgcagcctc

SEQ ID NO: 18297 - DNA, 20 bp, Artificial Sequence
  Synthetic oligonucleotide; TAG chr11 5307870 5307889 5307886 +
ttactgcagcctcaagcttt

SEQ ID NO: 18298 - DNA, 20 bp, Artificial Sequence
  Synthetic oligonucleotide; AGG chr11 5307871 5307890 5307887 +
tactgcagcctcaagctttt

SEQ ID NO: 18299 - DNA, 20 bp, Artificial Sequence
  Synthetic oligonucleotide; AAG chr11 5307877 5307896 5307893 +
agcctcaagcttttaggctt

SEQ ID NO: 18300 - DNA, 20 bp, Artificial Sequence
  Synthetic oligonucleotide; CAG chr11 5307894 5307913 5307910 +
cttaagtgatttttacacct

SEQ ID NO: 18301 - DNA, 20 bp, Artificial Sequence
  Synthetic oligonucleotide; TAG chr11 5307906 5307925 5307922 +
ttacacctcagcctcccaaa

SEQ ID NO: 18302 - DNA, 20 bp, Artificial Sequence
  Synthetic oligonucleotide; GAG chr11 5307921 5307940 5307937 +
ccaaatagctgtgaccacat

SEQ ID NO: 18303 - DNA, 20 bp, Artificial Sequence
  Synthetic oligonucleotide; AAG chr11 5307924 5307943 5307940 +
aatagctgtgaccacatgag

SEQ ID NO: 18304 - DNA, 20 bp, Artificial Sequence
  Synthetic oligonucleotide; GAG chr11 5307926 5307945 5307942 +
tagctgtgaccacatgagaa

SEQ ID NO: 18305 - DNA, 20 bp, Artificial Sequence
  Synthetic oligonucleotide; TAG chr11 5307953 5307972 5307969 +
ttatgtgtttttttccttct

SEQ ID NO: 18306 - DNA, 20 bp, Artificial Sequence
  Synthetic oligonucleotide; TGG chr11 5307961 5307980 5307977 +
ttttttccttcttagtactt

SEQ ID NO: 18307 - DNA, 20 bp, Artificial Sequence
  Synthetic oligonucleotide; AAG chr11 5307968 5307987 5307984 +
cttcttagtactttggctgc

SEQ ID NO: 18308 - DNA, 20 bp, Artificial Sequence
  Synthetic oligonucleotide; GAG chr11 5307972 5307991 5307988 +
ttagtactttggctgcaagt

SEQ ID NO: 18309 - DNA, 20 bp, Artificial Sequence
  Synthetic oligonucleotide; AAG chr11 5307979 5307998 5307995 +
tttggctgcaagtgagtctc

SEQ ID NO: 18310 - DNA, 20 bp, Artificial Sequence
  Synthetic oligonucleotide; AGG chr11 5307980 5307999 5307996 +
ttggctgcaagtgagtctca

SEQ ID NO: 18311 - DNA, 20 bp, Artificial Sequence
  Synthetic oligonucleotide; AAG chr11 5307984 5308003 5308000 +
ctgcaagtgagtctcaaggt

SEQ ID NO: 18312 - DNA, 20 bp, Artificial Sequence
  Synthetic oligonucleotide; TGG chr11 5308003 5308022 5308019 +
taagatgttttaaccactta

SEQ ID NO: 18313 - DNA, 20 bp, Artificial Sequence
  Synthetic oligonucleotide; AAG chr11 5308032 5308051 5308048 +
tattctcccattccaatgaa

SEQ ID NO: 18314 - DNA, 20 bp, Artificial Sequence
  Synthetic oligonucleotide; AAG chr11 5308074 5308093 5308090 +
tgttgatgtctaaatacacc

SEQ ID NO: 18315 - DNA, 20 bp, Artificial Sequence
  Synthetic oligonucleotide; TAG chr11 5308112 5308131 5308128 +
gatctatctatactactaaa

SEQ ID NO: 18316 - DNA, 20 bp, Artificial Sequence
  Synthetic oligonucleotide; TAG chr11 5308116 5308135 5308132 +
tatctatactactaaatagc

SEQ ID NO: 18317 - DNA, 20 bp, Artificial Sequence
  Synthetic oligonucleotide; AAG chr11 5308132 5308151 5308148 +
tagctagaccaatacatgaa

SEQ ID NO: 18318 - DNA, 20 bp, Artificial Sequence
  Synthetic oligonucleotide; AAG chr11 5308153 5308172 5308169 +
agaaactcttattctcaata

SEQ ID NO: 18319 - DNA, 20 bp, Artificial Sequence
  Synthetic oligonucleotide; CAG chr11 5308180 5308199 5308196 +
gtaccccaacaataatatat

SEQ ID NO: 18320 - DNA, 20 bp, Artificial Sequence
  Synthetic oligonucleotide; CAG chr11 5308219 5308238 5308235 +
ttatcttctttgtgtcttat

SEQ ID NO: 18321 - DNA, 20 bp, Artificial Sequence
  Synthetic oligonucleotide; TAG chr11 5308235 5308254 5308251 +
ttatcagttatgttaccata

SEQ ID NO: 18322 - DNA, 20 bp, Artificial Sequence
  Synthetic oligonucleotide; AGG chr11 5308236 5308255 5308252 +
tatcagttatgttaccatat

SEQ ID NO: 18323 - DNA, 20 bp, Artificial Sequence
  Synthetic oligonucleotide; AAG chr11 5308239 5308258 5308255 +
cagttatgttaccatatagg

SEQ ID NO: 18324 - DNA, 20 bp, Artificial Sequence
  Synthetic oligonucleotide; GAG chr11 5308241 5308260 5308257 +
gttatgttaccatataggaa

SEQ ID NO: 18325 - DNA, 20 bp, Artificial Sequence
  Synthetic oligonucleotide; AAG chr11 5308245 5308264 5308261 +
tgttaccatataggaagaga

SEQ ID NO: 18326 - DNA, 20 bp, Artificial Sequence
  Synthetic oligonucleotide; AAG chr11 5308256 5308275 5308272 +
aggaagagaaagaaaattat

SEQ ID NO: 18327 - DNA, 20 bp, Artificial Sequence
  Synthetic oligonucleotide; AAG chr11 5308291 5308310 5308307 +
gtaccatctcacatctatgc

SEQ ID NO: 18328 - DNA, 20 bp, Artificial Sequence
  Synthetic oligonucleotide; AGG chr11 5308292 5308311 5308308 +
taccatctcacatctatgca

SEQ ID NO: 18329 - DNA, 20 bp, Artificial Sequence
  Synthetic oligonucleotide; TAG chr11 5308299 5308318 5308315 +
tcacatctatgcaaggcaaa

SEQ ID NO: 18330 - DNA, 20 bp, Artificial Sequence
  Synthetic oligonucleotide; AGG chr11 5308300 5308319 5308316 +
cacatctatgcaaggcaaat

SEQ ID NO: 18331 - DNA, 20 bp, Artificial Sequence
  Synthetic oligonucleotide; TAG chr11 5308308 5308327 5308324 +
tgcaaggcaaataggactaa

SEQ ID NO: 18332 - DNA, 20 bp, Artificial Sequence
  Synthetic oligonucleotide; CAG chr11 5308313 5308332 5308329 +
ggcaaataggactaatagta

SEQ ID NO: 18333 - DNA, 20 bp, Artificial Sequence
  Synthetic oligonucleotide; AGG chr11 5308314 5308333 5308330 +
gcaaataggactaatagtac

SEQ ID NO: 18334 - DNA, 20 bp, Artificial Sequence
  Synthetic oligonucleotide; GGG chr11 5308315 5308334 5308331 +
caaataggactaatagtaca

SEQ ID NO: 18335 - DNA, 20 bp, Artificial Sequence
  Synthetic oligonucleotide; AAG chr11 5308320 5308339 5308336 +
aggactaatagtacagggac

SEQ ID NO: 18336 - DNA, 20 bp, Artificial Sequence
  Synthetic oligonucleotide; AGG chr11 5308321 5308340 5308337 +
ggactaatagtacagggaca

SEQ ID NO: 18337 - DNA, 20 bp, Artificial Sequence
  Synthetic oligonucleotide; AAG chr11 5308328 5308347 5308344 +
tagtacagggacaaggctga

SEQ ID NO: 18338 - DNA, 20 bp, Artificial Sequence
  Synthetic oligonucleotide; AGG chr11 5308329 5308348 5308345 +
agtacagggacaaggctgaa

SEQ ID NO: 18339 - DNA, 20 bp, Artificial Sequence
  Synthetic oligonucleotide; GAG chr11 5308331 5308350 5308347 +
tacagggacaaggctgaaag

SEQ ID NO: 18340 - DNA, 20 bp, Artificial Sequence
  Synthetic oligonucleotide; AAG chr11 5308341 5308360 5308357 +
aggctgaaaggagacatttt

SEQ ID NO: 18341 - DNA, 20 bp, Artificial Sequence
  Synthetic oligonucleotide; AGG chr11 5308342 5308361 5308358 +
ggctgaaaggagacatttta

SEQ ID NO: 18342 - DNA, 20 bp, Artificial Sequence
  Synthetic oligonucleotide; AAG chr11 5308348 5308367 5308364 +
aaggagacattttaaggttg

SEQ ID NO: 18343 - DNA, 20 bp, Artificial Sequence
  Synthetic oligonucleotide; AGG chr11 5308349 5308368 5308365 +
aggagacattttaaggttga

SEQ ID NO: 18344 - DNA, 20 bp, Artificial Sequence
  Synthetic oligonucleotide; CAG chr11 5308356 5308375 5308372 +
attttaaggttgaaggtatg

SEQ ID NO: 18345 - DNA, 20 bp, Artificial Sequence
  Synthetic oligonucleotide; TGG chr11 5308373 5308392 5308389 +
atgcagtaaaacttgttttc

SEQ ID NO: 18346 - DNA, 20 bp, Artificial Sequence
  Synthetic oligonucleotide; GAG chr11 5308375 5308394 5308391 +
gcagtaaaacttgttttctg

SEQ ID NO: 18347 - DNA, 20 bp, Artificial Sequence
  Synthetic oligonucleotide; AAG chr11 5308388 5308407 5308404 +
ttttctggagattacgttga

SEQ ID NO: 18348 - DNA, 20 bp, Artificial Sequence
  Synthetic oligonucleotide; AAG chr11 5308391 5308410 5308407 +
tctggagattacgttgaaag

SEQ ID NO: 18349 - DNA, 20 bp, Artificial Sequence
  Synthetic oligonucleotide; CAG chr11 5308397 5308416 5308413 +
gattacgttgaaagaagtta

SEQ ID NO: 18350 - DNA, 20 bp, Artificial Sequence
  Synthetic oligonucleotide; CAG chr11 5308401 5308420 5308417 +
acgttgaaagaagttacagt

SEQ ID NO: 18351 - DNA, 20 bp, Artificial Sequence
  Synthetic oligonucleotide; GAG chr11 5308414 5308433 5308430 +
ttacagtcagtcaatctaat

SEQ ID NO: 18352 - DNA, 20 bp, Artificial Sequence
  Synthetic oligonucleotide; AGG chr11 5308415 5308434 5308431 +
tacagtcagtcaatctaatg

SEQ ID NO: 18353 - DNA, 20 bp, Artificial Sequence
  Synthetic oligonucleotide; TAG chr11 5308421 5308440 5308437 +
cagtcaatctaatgaggttg

SEQ ID NO: 18354 - DNA, 20 bp, Artificial Sequence
  Synthetic oligonucleotide; AAG chr11 5308424 5308443 5308440 +
tcaatctaatgaggttgtag

SEQ ID NO: 18355 - DNA, 20 bp, Artificial Sequence
  Synthetic oligonucleotide; AAG chr11 5308438 5308457 5308454 +
ttgtagaagatgaaacaact

SEQ ID NO: 18356 - DNA, 20 bp, Artificial Sequence
  Synthetic oligonucleotide; TGG chr11 5308442 5308461 5308458 +
agaagatgaaacaactaagc

SEQ ID NO: 18357 - DNA, 20 bp, Artificial Sequence
  Synthetic oligonucleotide; TGG chr11 5308451 5308470 5308467 +
aacaactaagctggtgctcc

SEQ ID NO: 18358 - DNA, 20 bp, Artificial Sequence
  Synthetic oligonucleotide; AAG chr11 5308473 5308492 5308489 +
gtaatgacttgatacctgcg

SEQ ID NO: 18359 - DNA, 20 bp, Artificial Sequence
  Synthetic oligonucleotide; TAG chr11 5308490 5308509 5308506 +
gcgaagtgtctaaatatgta

SEQ ID NO: 18360 - DNA, 20 bp, Artificial Sequence
  Synthetic oligonucleotide; GAG chr11 5308492 5308511 5308508 +
gaagtgtctaaatatgtata

SEQ ID NO: 18361 - DNA, 20 bp, Artificial Sequence
  Synthetic oligonucleotide; AGG chr11 5308493 5308512 5308509 +
aagtgtctaaatatgtatag

SEQ ID NO: 18362 - DNA, 20 bp, Artificial Sequence
  Synthetic oligonucleotide; GAG chr11 5308495 5308514 5308511 +
gtgtctaaatatgtatagag

SEQ ID NO: 18363 - DNA, 20 bp, Artificial Sequence
  Synthetic oligonucleotide; TAG chr11 5308507 5308526 5308523 +
gtatagaggagttgataata

SEQ ID NO: 18364 - DNA, 20 bp, Artificial Sequence
  Synthetic oligonucleotide; TGG chr11 5308523 5308542 5308539 +
aatatagaccaattgcactt

SEQ ID NO: 18365 - DNA, 20 bp, Artificial Sequence
  Synthetic oligonucleotide; GGG chr11 5308524 5308543 5308540 +
atatagaccaattgcacttt

SEQ ID NO: 18366 - DNA, 20 bp, Artificial Sequence
  Synthetic oligonucleotide; GAG chr11 5308535 5308554 5308551 +
ttgcactttgggcccctgct

SEQ ID NO: 18367 - DNA, 20 bp, Artificial Sequence
  Synthetic oligonucleotide; AAG chr11 5308539 5308558 5308555 +
actttgggcccctgctgagt

SEQ ID NO: 18368 - DNA, 20 bp, Artificial Sequence
  Synthetic oligonucleotide; TAG chr11 5308567 5308586 5308583 +
gtgtcaactaaacaaaacga

SEQ ID NO: 18369 - DNA, 20 bp, Artificial Sequence
  Synthetic oligonucleotide; AGG chr11 5308568 5308587 5308584 +
tgtcaactaaacaaaacgat

SEQ ID NO: 18370 - DNA, 20 bp, Artificial Sequence
  Synthetic oligonucleotide; AAG chr11 5308587 5308606 5308603 +
taggaaattgtatttcccca

SEQ ID NO: 18371 - DNA, 20 bp, Artificial Sequence
  Synthetic oligonucleotide; TGG chr11 5308596 5308615 5308612 +
gtatttccccaaagacattt

SEQ ID NO: 18372 - DNA, 20 bp, Artificial Sequence
  Synthetic oligonucleotide; CAG chr11 5308612 5308631 5308628 +
attttggaaacgttctcctt

SEQ ID NO: 18373 - DNA, 20 bp, Artificial Sequence
  Synthetic oligonucleotide; TGG chr11 5308621 5308640 5308637 +
acgttctccttcagcaccaa

SEQ ID NO: 18374 - DNA, 20 bp, Artificial Sequence
  Synthetic oligonucleotide; TAG chr11 5308624 5308643 5308640 +
ttctccttcagcaccaatgg

SEQ ID NO: 18375 - DNA, 20 bp, Artificial Sequence
  Synthetic oligonucleotide; TGG chr11 5308631 5308650 5308647 +
tcagcaccaatggtagcacc

SEQ ID NO: 18376 - DNA, 20 bp, Artificial Sequence
  Synthetic oligonucleotide; AAG chr11 5308653 5308672 5308669 +
gaactgaccatccaacttcc

SEQ ID NO: 18377 - DNA, 20 bp, Artificial Sequence
  Synthetic oligonucleotide; TGG chr11 5308708 5308727 5308724 +
ccaatctctttcctccatca

SEQ ID NO: 18378 - DNA, 20 bp, Artificial Sequence
  Synthetic oligonucleotide; CAG chr11 5308714 5308733 5308730 +
tctttcctccatcatggaaa

SEQ ID NO: 18379 - DNA, 20 bp, Artificial Sequence
  Synthetic oligonucleotide; AAG chr11 5308731 5308750 5308747 +
aaacagccctgcatattcaa

SEQ ID NO: 18380 - DNA, 20 bp, Artificial Sequence
  Synthetic oligonucleotide; GAG chr11 5308735 5308754 5308751 +
agccctgcatattcaaaagt

SEQ ID NO: 18381 - DNA, 20 bp, Artificial Sequence
  Synthetic oligonucleotide; CAG chr11 5308759 5308778 5308775 +
gtccctctcttatacctcgt

SEQ ID NO: 18382 - DNA, 20 bp, Artificial Sequence
  Synthetic oligonucleotide; GAG chr11 5308761 5308780 5308777 +
ccctctcttatacctcgtca

SEQ ID NO: 18383 - DNA, 20 bp, Artificial Sequence
  Synthetic oligonucleotide; GAG chr11 5308763 5308782 5308779 +
ctctcttatacctcgtcaga

SEQ ID NO: 18384 - DNA, 20 bp, Artificial Sequence
  Synthetic oligonucleotide; CAG chr11 5308797 5308816 5308813 +
gtcatattcacaatccacaa

SEQ ID NO: 18385 - DNA, 20 bp, Artificial Sequence
  Synthetic oligonucleotide; AGG chr11 5308798 5308817 5308814 +
tcatattcacaatccacaac

SEQ ID NO: 18386 - DNA, 20 bp, Artificial Sequence
  Synthetic oligonucleotide; CAG chr11 5308803 5308822 5308819 +
ttcacaatccacaacaggcc

SEQ ID NO: 18387 - DNA, 20 bp, Artificial Sequence
  Synthetic oligonucleotide; CAG chr11 5308815 5308834 5308831 +
aacaggcccagataaccgtt

SEQ ID NO: 18388 - DNA, 20 bp, Artificial Sequence
  Synthetic oligonucleotide; TGG chr11 5308824 5308843 5308840 +
agataaccgttcagtgatgc

SEQ ID NO: 18389 - DNA, 20 bp, Artificial Sequence
  Synthetic oligonucleotide; AAG chr11 5308836 5308855 5308852 +
agtgatgctggtcatcactg

SEQ ID NO: 18390 - DNA, 20 bp, Artificial Sequence
  Synthetic oligonucleotide; TAG chr11 5308840 5308859 5308856 +
atgctggtcatcactgaaga

SEQ ID NO: 18391 - DNA, 20 bp, Artificial Sequence
  Synthetic oligonucleotide; TGG chr11 5308863 5308882 5308879 +
attgaatcttcctttcttct

SEQ ID NO: 18392 - DNA, 20 bp, Artificial Sequence
  Synthetic oligonucleotide; CAG chr11 5308876 5308895 5308892 +
ttcttcttggacgtaaattg

SEQ ID NO: 18393 - DNA, 20 bp, Artificial Sequence
  Synthetic oligonucleotide; AGG chr11 5308877 5308896 5308893 +
tcttcttggacgtaaattgc

SEQ ID NO: 18394 - DNA, 20 bp, Artificial Sequence
  Synthetic oligonucleotide; AAG chr11 5308902 5308921 5308918 +
attgaaaaaactataacttg

SEQ ID NO: 18395 - DNA, 20 bp, Artificial Sequence
  Synthetic oligonucleotide; TAG chr11 5308910 5308929 5308926 +
aactataacttgaagtttca

SEQ ID NO: 18396 - DNA, 20 bp, Artificial Sequence
  Synthetic oligonucleotide; CAG chr11 5308913 5308932 5308929 +
tataacttgaagtttcatag

SEQ ID NO: 18397 - DNA, 20 bp, Artificial Sequence
  Synthetic oligonucleotide; AAG chr11 5308917 5308936 5308933 +
acttgaagtttcatagcaga

SEQ ID NO: 18398 - DNA, 20 bp, Artificial Sequence
  Synthetic oligonucleotide; TGG chr11 5308921 5308940 5308937 +
gaagtttcatagcagaaagt

SEQ ID NO: 18399 - DNA, 20 bp, Artificial Sequence
  Synthetic oligonucleotide; AAG chr11 5308937 5308956 5308953 +
aagttggcatctttctcact

SEQ ID NO: 18400 - DNA, 20 bp, Artificial Sequence
  Synthetic oligonucleotide; GAG chr11 5308943 5308962 5308959 +
gcatctttctcactaagcat

SEQ ID NO: 18401 - DNA, 20 bp, Artificial Sequence
  Synthetic oligonucleotide; CAG chr11 5308955 5308974 5308971 +
ctaagcatgagaaaaactaa

SEQ ID NO: 18402 - DNA, 20 bp, Artificial Sequence
  Synthetic oligonucleotide; GAG chr11 5308957 5308976 5308973 +
aagcatgagaaaaactaaca

SEQ ID NO: 18403 - DNA, 20 bp, Artificial Sequence
  Synthetic oligonucleotide; AAG chr11 5308970 5308989 5308986 +
actaacagagttttaatttg

SEQ ID NO: 18404 - DNA, 20 bp, Artificial Sequence
  Synthetic oligonucleotide; AGG chr11 5308971 5308990 5308987 +
ctaacagagttttaatttga

SEQ ID NO: 18405 - DNA, 20 bp, Artificial Sequence
  Synthetic oligonucleotide; GGG chr11 5308972 5308991 5308988 +
taacagagttttaatttgaa

SEQ ID NO: 18406 - DNA, 20 bp, Artificial Sequence
  Synthetic oligonucleotide; TAG chr11 5308978 5308997 5308994 +
agttttaatttgaagggcct

SEQ ID NO: 18407 - DNA, 20 bp, Artificial Sequence
  Synthetic oligonucleotide; TAG chr11 5308987 5309006 5309003 +
ttgaagggccttagccaact

SEQ ID NO: 18408 - DNA, 20 bp, Artificial Sequence
  Synthetic oligonucleotide; AAG chr11 5308993 5309012 5309009 +
ggccttagccaacttagctg

SEQ ID NO: 18409 - DNA, 20 bp, Artificial Sequence
  Synthetic oligonucleotide; AAG chr11 5309008 5309027 5309024 +
agctgaagtcccttccacct

SEQ ID NO: 18410 - DNA, 20 bp, Artificial Sequence
  Synthetic oligonucleotide; AAG chr11 5309014 5309033 5309030 +
agtcccttccacctaagata

SEQ ID NO: 18411 - DNA, 20 bp, Artificial Sequence
  Synthetic oligonucleotide; AAG chr11 5309023 5309042 5309039 +
cacctaagataaagctgtaa

SEQ ID NO: 18412 - DNA, 20 bp, Artificial Sequence
  Synthetic oligonucleotide; GAG chr11 5309025 5309044 5309041 +
cctaagataaagctgtaaaa

SEQ ID NO: 18413 - DNA, 20 bp, Artificial Sequence
  Synthetic oligonucleotide; AGG chr11 5309026 5309045 5309042 +
ctaagataaagctgtaaaag

SEQ ID NO: 18414 - DNA, 20 bp, Artificial Sequence
  Synthetic oligonucleotide; GAG chr11 5309028 5309047 5309044 +
aagataaagctgtaaaagag

SEQ ID NO: 18415 - DNA, 20 bp, Artificial Sequence
  Synthetic oligonucleotide; CAG chr11 5309031 5309050 5309047 +
ataaagctgtaaaagaggag

SEQ ID NO: 18416 - DNA, 20 bp, Artificial Sequence
  Synthetic oligonucleotide; TAG chr11 5309044 5309063 5309060 +
agaggagcagatgtataatt

SEQ ID NO: 18417 - DNA, 20 bp, Artificial Sequence
  Synthetic oligonucleotide; TGG chr11 5309051 5309070 5309067 +
cagatgtataatttagatat

SEQ ID NO: 18418 - DNA, 20 bp, Artificial Sequence
  Synthetic oligonucleotide; GAG chr11 5309053 5309072 5309069 +
gatgtataatttagatattg

SEQ ID NO: 18419 - DNA, 20 bp, Artificial Sequence
  Synthetic oligonucleotide; CAG chr11 5309056 5309075 5309072 +
gtataatttagatattggag

SEQ ID NO: 18420 - DNA, 20 bp, Artificial Sequence
  Synthetic oligonucleotide; CAG chr11 5309063 5309082 5309079 +
ttagatattggagcagcatg

SEQ ID NO: 18421 - DNA, 20 bp, Artificial Sequence
  Synthetic oligonucleotide; GAG chr11 5309082 5309101 5309098 +
gcagtatcaaaatacctcat

SEQ ID NO: 18422 - DNA, 20 bp, Artificial Sequence
  Synthetic oligonucleotide; AAG chr11 5309090 5309109 5309106 +
aaaatacctcatgagcacca

SEQ ID NO: 18423 - DNA, 20 bp, Artificial Sequence
  Synthetic oligonucleotide; AAG chr11 5309093 5309112 5309109 +
atacctcatgagcaccaaag

SEQ ID NO: 18424 - DNA, 20 bp, Artificial Sequence
  Synthetic oligonucleotide; CAG chr11 5309110 5309129 5309126 +
aagaagccatatatttttca

SEQ ID NO: 18425 - DNA, 20 bp, Artificial Sequence
  Synthetic oligonucleotide; AAG chr11 5309139 5309158 5309155 +
ttcttccaaaataacttaca

SEQ ID NO: 18426 - DNA, 20 bp, Artificial Sequence
  Synthetic oligonucleotide; CAG chr11 5309143 5309162 5309159 +
tccaaaataacttacaaaga

SEQ ID NO: 18427 - DNA, 20 bp, Artificial Sequence
  Synthetic oligonucleotide; AAG chr11 5309161 5309180 5309177 +
gacagtctttcctctgtcat

SEQ ID NO: 18428 - DNA, 20 bp, Artificial Sequence
  Synthetic oligonucleotide; CAG chr11 5309174 5309193 5309190 +
ctgtcataagaacctgcacc

SEQ ID NO: 18429 - DNA, 20 bp, Artificial Sequence
  Synthetic oligonucleotide; AGG chr11 5309175 5309194 5309191 +
tgtcataagaacctgcaccc

SEQ ID NO: 18430 - DNA, 20 bp, Artificial Sequence
  Synthetic oligonucleotide; CAG chr11 5309179 5309198 5309195 +
ataagaacctgcacccaggt

SEQ ID NO: 18431 - DNA, 20 bp, Artificial Sequence
  Synthetic oligonucleotide; AAG chr11 5309188 5309207 5309204 +
tgcacccaggtcagcaaatc

SEQ ID NO: 18432 - DNA, 20 bp, Artificial Sequence
  Synthetic oligonucleotide; TGG chr11 5309192 5309211 5309208 +
cccaggtcagcaaatcaaga

SEQ ID NO: 18433 - DNA, 20 bp, Artificial Sequence
  Synthetic oligonucleotide; CGG chr11 5309202 5309221 5309218 +
caaatcaagatggaaatgat

SEQ ID NO: 18434 - DNA, 20 bp, Artificial Sequence
  Synthetic oligonucleotide; GGG chr11 5309203 5309222 5309219 +
aaatcaagatggaaatgatc

SEQ ID NO: 18435 - DNA, 20 bp, Artificial Sequence
  Synthetic oligonucleotide; GGG chr11 5309204 5309223 5309220 +
aatcaagatggaaatgatcg

SEQ ID NO: 18436 - DNA, 20 bp, Artificial Sequence
  Synthetic oligonucleotide; TAG chr11 5309239 5309258 5309255 +
accaacacactaataaacat

SEQ ID NO: 18437 - DNA, 20 bp, Artificial Sequence
  Synthetic oligonucleotide; AGG chr11 5309240 5309259 5309256 +
ccaacacactaataaacatt

SEQ ID NO: 18438 - DNA, 20 bp, Artificial Sequence
  Synthetic oligonucleotide; TGG chr11 5309250 5309269 5309266 +
aataaacattaggaacttac

SEQ ID NO: 18439 - DNA, 20 bp, Artificial Sequence
  Synthetic oligonucleotide; GGG chr11 5309251 5309270 5309267 +
ataaacattaggaacttact

SEQ ID NO: 18440 - DNA, 20 bp, Artificial Sequence
  Synthetic oligonucleotide; GAG chr11 5309262 5309281 5309278 +
gaacttactgggcacattat

SEQ ID NO: 18441 - DNA, 20 bp, Artificial Sequence
  Synthetic oligonucleotide; CAG chr11 5309268 5309287 5309284 +
actgggcacattatgagaaa

SEQ ID NO: 18442 - DNA, 20 bp, Artificial Sequence
  Synthetic oligonucleotide; GAG chr11 5309270 5309289 5309286 +
tgggcacattatgagaaaca

SEQ ID NO: 18443 - DNA, 20 bp, Artificial Sequence
  Synthetic oligonucleotide; AGG chr11 5309271 5309290 5309287 +
gggcacattatgagaaacag

SEQ ID NO: 18444 - DNA, 20 bp, Artificial Sequence
  Synthetic oligonucleotide; GAG chr11 5309273 5309292 5309289 +
gcacattatgagaaacagag

SEQ ID NO: 18445 - DNA, 20 bp, Artificial Sequence
  Synthetic oligonucleotide; TGG chr11 5309280 5309299 5309296 +
atgagaaacagaggagtctt

SEQ ID NO: 18446 - DNA, 20 bp, Artificial Sequence
  Synthetic oligonucleotide; GGG chr11 5309281 5309300 5309297 +
tgagaaacagaggagtcttt

SEQ ID NO: 18447 - DNA, 20 bp, Artificial Sequence
  Synthetic oligonucleotide; GGG chr11 5309282 5309301 5309298 +
gagaaacagaggagtctttg

SEQ ID NO: 18448 - DNA, 20 bp, Artificial Sequence
  Synthetic oligonucleotide; GGG chr11 5309283 5309302 5309299 +
agaaacagaggagtctttgg

SEQ ID NO: 18449 - DNA, 20 bp, Artificial Sequence
  Synthetic oligonucleotide; CAG chr11 5309291 5309310 5309307 +
aggagtctttgggggataac

SEQ ID NO: 18450 - DNA, 20 bp, Artificial Sequence
  Synthetic oligonucleotide; AAG chr11 5309299 5309318 5309315 +
ttgggggataaccagatttt

SEQ ID NO: 18451 - DNA, 20 bp, Artificial Sequence
  Synthetic oligonucleotide; CAG chr11 5309317 5309336 5309333 +
ttaagatttgtgtttatact

SEQ ID NO: 18452 - DNA, 20 bp, Artificial Sequence
  Synthetic oligonucleotide; TAG chr11 5309326 5309345 5309342 +
gtgtttatactcagtatcaa

SEQ ID NO: 18453 - DNA, 20 bp, Artificial Sequence
  Synthetic oligonucleotide; TAG chr11 5309347 5309366 5309363 +
agcttaaacattgtactcaa

SEQ ID NO: 18454 - DNA, 20 bp, Artificial Sequence
  Synthetic oligonucleotide; CAG chr11 5309366 5309385 5309382 +
atagcatataattttgctta

SEQ ID NO: 18455 - DNA, 20 bp, Artificial Sequence
  Synthetic oligonucleotide; TGG chr11 5309376 5309395 5309392 +
attttgcttacagcatgcat

SEQ ID NO: 18456 - DNA, 20 bp, Artificial Sequence
  Synthetic oligonucleotide; GGG chr11 5309377 5309396 5309393 +
ttttgcttacagcatgcatt

SEQ ID NO: 18457 - DNA, 20 bp, Artificial Sequence
  Synthetic oligonucleotide; CGG chr11 5309388 5309407 5309404 +
gcatgcattgggtaaataat

SEQ ID NO: 18458 - DNA, 20 bp, Artificial Sequence
  Synthetic oligonucleotide; CAG chr11 5309405 5309424 5309421 +
aatcggttttacaattgatt

SEQ ID NO: 18459 - DNA, 20 bp, Artificial Sequence
  Synthetic oligonucleotide; AAG chr11 5309415 5309434 5309431 +
acaattgattcagtatgaaa

SEQ ID NO: 18460 - DNA, 20 bp, Artificial Sequence
  Synthetic oligonucleotide; AAG chr11 5309427 5309446 5309443 +
gtatgaaaaagttttaatac

SEQ ID NO: 18461 - DNA, 20 bp, Artificial Sequence
  Synthetic oligonucleotide; AGG chr11 5309428 5309447 5309444 +
tatgaaaaagttttaataca

SEQ ID NO: 18462 - DNA, 20 bp, Artificial Sequence
  Synthetic oligonucleotide; CAG chr11 5309436 5309455 5309452 +
agttttaatacaaggacata

SEQ ID NO: 18463 - DNA, 20 bp, Artificial Sequence
  Synthetic oligonucleotide; AAG chr11 5309466 5309485 5309482 +
gcgcctacacctattttttt

SEQ ID NO: 18464 - DNA, 20 bp, Artificial Sequence
  Synthetic oligonucleotide; TAG chr11 5309476 5309495 5309492 +
ctatttttttaagcattcca

SEQ ID NO: 18465 - DNA, 20 bp, Artificial Sequence
  Synthetic oligonucleotide; TGG chr11 5309481 5309500 5309497 +
tttttaagcattccatagat

SEQ ID NO: 18466 - DNA, 20 bp, Artificial Sequence
  Synthetic oligonucleotide; CAG chr11 5309533 5309552 5309549 +
tcccaatataaaactttact

SEQ ID NO: 18467 - DNA, 20 bp, Artificial Sequence
  Synthetic oligonucleotide; AGG chr11 5309534 5309553 5309550 +
cccaatataaaactttactc

SEQ ID NO: 18468 - DNA, 20 bp, Artificial Sequence
  Synthetic oligonucleotide; CGG chr11 5309538 5309557 5309554 +
atataaaactttactcaggc

SEQ ID NO: 18469 - DNA, 20 bp, Artificial Sequence
  Synthetic oligonucleotide; GGG chr11 5309539 5309558 5309555 +
tataaaactttactcaggcc

SEQ ID NO: 18470 - DNA, 20 bp, Artificial Sequence
  Synthetic oligonucleotide; CGG chr11 5309544 5309563 5309560 +
aactttactcaggccgggcg

SEQ ID NO: 18471 - DNA, 20 bp, Artificial Sequence
  Synthetic oligonucleotide; TGG chr11 5309547 5309566 5309563 +
tttactcaggccgggcgcgg

SEQ ID NO: 18472 - DNA, 20 bp, Artificial Sequence
  Synthetic oligonucleotide; CAG chr11 5309566 5309585 5309582 +
gtggctcacgcctgtaatcc

SEQ ID NO: 18473 - DNA, 20 bp, Artificial Sequence
  Synthetic oligonucleotide; TGG chr11 5309574 5309593 5309590 +
cgcctgtaatcccagcactt

SEQ ID NO: 18474 - DNA, 20 bp, Artificial Sequence
  Synthetic oligonucleotide; GGG chr11 5309575 5309594 5309591 +
gcctgtaatcccagcacttt

SEQ ID NO: 18475 - DNA, 20 bp, Artificial Sequence
  Synthetic oligonucleotide; GAG chr11 5309577 5309596 5309593 +
ctgtaatcccagcactttgg

SEQ ID NO: 18476 - DNA, 20 bp, Artificial Sequence
  Synthetic oligonucleotide; AGG chr11 5309578 5309597 5309594 +
tgtaatcccagcactttggg

SEQ ID NO: 18477 - DNA, 20 bp, Artificial Sequence
  Synthetic oligonucleotide; GAG chr11 5309583 5309602 5309599 +
tcccagcactttgggaggcc

SEQ ID NO: 18478 - DNA, 20 bp, Artificial Sequence
  Synthetic oligonucleotide; AGG chr11 5309584 5309603 5309600 +
cccagcactttgggaggccg

SEQ ID NO: 18479 - DNA, 20 bp, Artificial Sequence
  Synthetic oligonucleotide; CGG chr11 5309587 5309606 5309603 +
agcactttgggaggccgagg

SEQ ID NO: 18480 - DNA, 20 bp, Artificial Sequence
  Synthetic oligonucleotide; GGG chr11 5309588 5309607 5309604 +
gcactttgggaggccgaggc

SEQ ID NO: 18481 - DNA, 20 bp, Artificial Sequence
  Synthetic oligonucleotide; TGG chr11 5309591 5309610 5309607 +
ctttgggaggccgaggcggg

SEQ ID NO: 18482 - DNA, 20 bp, Artificial Sequence
  Synthetic oligonucleotide; GAG chr11 5309599 5309618 5309615 +
ggccgaggcgggtggatcac

SEQ ID NO: 18483 - DNA, 20 bp, Artificial Sequence
  Synthetic oligonucleotide; AGG chr11 5309600 5309619 5309616 +
gccgaggcgggtggatcacg

SEQ ID NO: 18484 - DNA, 20 bp, Artificial Sequence
  Synthetic oligonucleotide; CGG chr11 5309604 5309623 5309620 +
aggcgggtggatcacgaggt

SEQ ID NO: 18485 - DNA, 20 bp, Artificial Sequence
  Synthetic oligonucleotide; GGG chr11 5309605 5309624 5309621 +
ggcgggtggatcacgaggtc

SEQ ID NO: 18486 - DNA, 20 bp, Artificial Sequence
  Synthetic oligonucleotide; GAG chr11 5309607 5309626 5309623 +
cgggtggatcacgaggtcgg

SEQ ID NO: 18487 - DNA, 20 bp, Artificial Sequence
  Synthetic oligonucleotide; GAG chr11 5309613 5309632 5309629 +
gatcacgaggtcgggagatc

SEQ ID NO: 18488 - DNA, 20 bp, Artificial Sequence
  Synthetic oligonucleotide; TGG chr11 5309623 5309642 5309639 +
tcgggagatcgagaccatcc

SEQ ID NO: 18489 - DNA, 20 bp, Artificial Sequence
  Synthetic oligonucleotide; CAG chr11 5309632 5309651 5309648 +
cgagaccatcctggctaaca

SEQ ID NO: 18490 - DNA, 20 bp, Artificial Sequence
  Synthetic oligonucleotide; AAG chr11 5309656 5309675 5309672 +
gaaaccccgtctctactaaa

SEQ ID NO: 18491 - DNA, 20 bp, Artificial Sequence
  Synthetic oligonucleotide; TGG chr11 5309674 5309693 5309690 +
aaaagacaaaaaaatttgcc

SEQ ID NO: 18492 - DNA, 20 bp, Artificial Sequence
  Synthetic oligonucleotide; TGG chr11 5309679 5309698 5309695 +
acaaaaaaatttgcctggcg

SEQ ID NO: 18493 - DNA, 20 bp, Artificial Sequence
  Synthetic oligonucleotide; TGG chr11 5309682 5309701 5309698 +
aaaaaatttgcctggcgtgg

SEQ ID NO: 18494 - DNA, 20 bp, Artificial Sequence
  Synthetic oligonucleotide; CGG chr11 5309685 5309704 5309701 +
aaatttgcctggcgtggtgg

SEQ ID NO: 18495 - DNA, 20 bp, Artificial Sequence
  Synthetic oligonucleotide; GGG chr11 5309686 5309705 5309702 +
aatttgcctggcgtggtggc

SEQ ID NO: 18496 - DNA, 20 bp, Artificial Sequence
  Synthetic oligonucleotide; TAG chr11 5309695 5309714 5309711 +
ggcgtggtggcgggcgcctg

SEQ ID NO: 18497 - DNA, 20 bp, Artificial Sequence
  Synthetic oligonucleotide; CAG chr11 5309701 5309720 5309717 +
gtggcgggcgcctgtagtcc

SEQ ID NO: 18498 - DNA, 20 bp, Artificial Sequence
  Synthetic oligonucleotide; CGG chr11 5309709 5309728 5309725 +
cgcctgtagtcccagctact

SEQ ID NO: 18499 - DNA, 20 bp, Artificial Sequence
  Synthetic oligonucleotide; GGG chr11 5309710 5309729 5309726 +
gcctgtagtcccagctactc

SEQ ID NO: 18500 - DNA, 20 bp, Artificial Sequence
  Synthetic oligonucleotide; GAG chr11 5309712 5309731 5309728 +
ctgtagtcccagctactcgg

SEQ ID NO: 18501 - DNA, 20 bp, Artificial Sequence
  Synthetic oligonucleotide; AGG chr11 5309713 5309732 5309729 +
tgtagtcccagctactcggg

SEQ ID NO: 18502 - DNA, 20 bp, Artificial Sequence
  Synthetic oligonucleotide; GAG chr11 5309718 5309737 5309734 +
tcccagctactcgggaggct

SEQ ID NO: 18503 - DNA, 20 bp, Artificial Sequence
  Synthetic oligonucleotide; AGG chr11 5309719 5309738 5309735 +
cccagctactcgggaggctg

SEQ ID NO: 18504 - DNA, 20 bp, Artificial Sequence
  Synthetic oligonucleotide; CAG chr11 5309722 5309741 5309738 +
agctactcgggaggctgagg

SEQ ID NO: 18505 - DNA, 20 bp, Artificial Sequence
  Synthetic oligonucleotide; AGG chr11 5309723 5309742 5309739 +
gctactcgggaggctgaggc

SEQ ID NO: 18506 - DNA, 20 bp, Artificial Sequence
  Synthetic oligonucleotide; GAG chr11 5309725 5309744 5309741 +
tactcgggaggctgaggcag

SEQ ID NO: 18507 - DNA, 20 bp, Artificial Sequence
  Synthetic oligonucleotide; TGG chr11 5309730 5309749 5309746 +
gggaggctgaggcaggagaa

SEQ ID NO: 18508 - DNA, 20 bp, Artificial Sequence
  Synthetic oligonucleotide; CGG chr11 5309741 5309760 5309757 +
gcaggagaatggcgtgaacc

SEQ ID NO: 18509 - DNA, 20 bp, Artificial Sequence
  Synthetic oligonucleotide; GGG chr11 5309742 5309761 5309758 +
caggagaatggcgtgaaccc

SEQ ID NO: 18510 - DNA, 20 bp, Artificial Sequence
  Synthetic oligonucleotide; GAG chr11 5309744 5309763 5309760 +
ggagaatggcgtgaacccgg

SEQ ID NO: 18511 - DNA, 20 bp, Artificial Sequence
  Synthetic oligonucleotide; AGG chr11 5309745 5309764 5309761 +
gagaatggcgtgaacccggg

SEQ ID NO: 18512 - DNA, 20 bp, Artificial Sequence
  Synthetic oligonucleotide; CAG chr11 5309748 5309767 5309764 +
aatggcgtgaacccgggagg

SEQ ID NO: 18513 - DNA, 20 bp, Artificial Sequence
  Synthetic oligonucleotide; GAG chr11 5309750 5309769 5309766 +
tggcgtgaacccgggaggca

SEQ ID NO: 18514 - DNA, 20 bp, Artificial Sequence
  Synthetic oligonucleotide; CAG chr11 5309757 5309776 5309773 +
aacccgggaggcagagcttg

SEQ ID NO: 18515 - DNA, 20 bp, Artificial Sequence
  Synthetic oligonucleotide; GAG chr11 5309761 5309780 5309777 +
cgggaggcagagcttgcagt

SEQ ID NO: 18516 - DNA, 20 bp, Artificial Sequence
  Synthetic oligonucleotide; GAG chr11 5309766 5309785 5309782 +
ggcagagcttgcagtgagct

SEQ ID NO: 18517 - DNA, 20 bp, Artificial Sequence
  Synthetic oligonucleotide; CAG chr11 5309786 5309805 5309802 +
gagatcacgccactgcactc

SEQ ID NO: 18518 - DNA, 20 bp, Artificial Sequence
  Synthetic oligonucleotide; TGG chr11 5309791 5309810 5309807 +
cacgccactgcactccagcc

SEQ ID NO: 18519 - DNA, 20 bp, Artificial Sequence
  Synthetic oligonucleotide; GGG chr11 5309792 5309811 5309808 +
acgccactgcactccagcct

SEQ ID NO: 18520 - DNA, 20 bp, Artificial Sequence
  Synthetic oligonucleotide; CAG chr11 5309798 5309817 5309814 +
ctgcactccagcctgggcga

SEQ ID NO: 18521 - DNA, 20 bp, Artificial Sequence
  Synthetic oligonucleotide; GAG chr11 5309800 5309819 5309816 +
gcactccagcctgggcgaca

SEQ ID NO: 18522 - DNA, 20 bp, Artificial Sequence
  Synthetic oligonucleotide; GAG chr11 5309804 5309823 5309820 +
tccagcctgggcgacagagc

SEQ ID NO: 18523 - DNA, 20 bp, Artificial Sequence
  Synthetic oligonucleotide; AAG chr11 5309834 5309853 5309850 +
ctcaaaaacaaaacaaaaca

SEQ ID NO: 18524 - DNA, 20 bp, Artificial Sequence
  Synthetic oligonucleotide; CAG chr11 5309853 5309872 5309869 +
aaagcaaaaaaaactttact

SEQ ID NO: 18525 - DNA, 20 bp, Artificial Sequence
  Synthetic oligonucleotide; AAG chr11 5309858 5309877 5309874 +
aaaaaaaactttactcagtg

SEQ ID NO: 18526 - DNA, 20 bp, Artificial Sequence
  Synthetic oligonucleotide; CAG chr11 5309863 5309882 5309879 +
aaactttactcagtgaagtc

SEQ ID NO: 18527 - DNA, 20 bp, Artificial Sequence
  Synthetic oligonucleotide; GAG chr11 5309865 5309884 5309881 +
actttactcagtgaagtcca

SEQ ID NO: 18528 - DNA, 20 bp, Artificial Sequence
  Synthetic oligonucleotide; AAG chr11 5309870 5309889 5309886 +
actcagtgaagtccagagca

SEQ ID NO: 18529 - DNA, 20 bp, Artificial Sequence
  Synthetic oligonucleotide; CAG chr11 5309893 5309912 5309909 +
atttgttgcaaacaaatcac

SEQ ID NO: 18530 - DNA, 20 bp, Artificial Sequence
  Synthetic oligonucleotide; TGG chr11 5309933 5309952 5309949 +
gaaaatgtacctgtaaaatg

SEQ ID NO: 18531 - DNA, 20 bp, Artificial Sequence
  Synthetic oligonucleotide; TAG chr11 5309950 5309969 5309966 +
atgtggatgccacatatttt

SEQ ID NO: 18532 - DNA, 20 bp, Artificial Sequence
  Synthetic oligonucleotide; AGG chr11 5309951 5309970 5309967 +
tgtggatgccacatattttt

SEQ ID NO: 18533 - DNA, 20 bp, Artificial Sequence
  Synthetic oligonucleotide; TGG chr11 5309956 5309975 5309972 +
atgccacatatttttaggtc

SEQ ID NO: 18534 - DNA, 20 bp, Artificial Sequence
  Synthetic oligonucleotide; AAG chr11 5309959 5309978 5309975 +
ccacatatttttaggtctgg

SEQ ID NO: 18535 - DNA, 20 bp, Artificial Sequence
  Synthetic oligonucleotide; AGG chr11 5309960 5309979 5309976 +
cacatatttttaggtctgga

SEQ ID NO: 18536 - DNA, 20 bp, Artificial Sequence
  Synthetic oligonucleotide; TAG chr11 5310005 5310024 5310021 +
ttgcattatcataaaatctc

SEQ ID NO: 18537 - DNA, 20 bp, Artificial Sequence
  Synthetic oligonucleotide; GAG chr11 5310010 5310029 5310026 +
ttatcataaaatctctagtt

SEQ ID NO: 18538 - DNA, 20 bp, Artificial Sequence
  Synthetic oligonucleotide; CAG chr11 5310056 5310075 5310072 +
ctttaactgaaaactgaacc

SEQ ID NO: 18539 - DNA, 20 bp, Artificial Sequence
  Synthetic oligonucleotide; AGG chr11 5310057 5310076 5310073 +
tttaactgaaaactgaaccc

SEQ ID NO: 18540 - DNA, 20 bp, Artificial Sequence
  Synthetic oligonucleotide; GAG chr11 5310059 5310078 5310075 +
taactgaaaactgaacccag

SEQ ID NO: 18541 - DNA, 20 bp, Artificial Sequence
  Synthetic oligonucleotide; AGG chr11 5310060 5310079 5310076 +
aactgaaaactgaacccagg

SEQ ID NO: 18542 - DNA, 20 bp, Artificial Sequence
  Synthetic oligonucleotide; CAG chr11 5310063 5310082 5310079 +
tgaaaactgaacccaggagg

SEQ ID NO: 18543 - DNA, 20 bp, Artificial Sequence
  Synthetic oligonucleotide; GAG chr11 5310065 5310084 5310081 +
aaaactgaacccaggaggca

SEQ ID NO: 18544 - DNA, 20 bp, Artificial Sequence
  Synthetic oligonucleotide; AGG chr11 5310066 5310085 5310082 +
aaactgaacccaggaggcag

SEQ ID NO: 18545 - DNA, 20 bp, Artificial Sequence
  Synthetic oligonucleotide; CAG chr11 5310072 5310091 5310088 +
aacccaggaggcagaggttg

SEQ ID NO: 18546 - DNA, 20 bp, Artificial Sequence
  Synthetic oligonucleotide; CAG chr11 5310076 5310095 5310092 +
caggaggcagaggttgcagt

SEQ ID NO: 18547 - DNA, 20 bp, Artificial Sequence
  Synthetic oligonucleotide; GAG chr11 5310081 5310100 5310097 +
ggcagaggttgcagtcagcc

SEQ ID NO: 18548 - DNA, 20 bp, Artificial Sequence
  Synthetic oligonucleotide; AAG chr11 5310087 5310106 5310103 +
ggttgcagtcagccgagatc

SEQ ID NO: 18549 - DNA, 20 bp, Artificial Sequence
  Synthetic oligonucleotide; AGG chr11 5310088 5310107 5310104 +
gttgcagtcagccgagatca

SEQ ID NO: 18550 - DNA, 20 bp, Artificial Sequence
  Synthetic oligonucleotide; CAG chr11 5310111 5310130 5310127 +
cactgaaaacttcctttctc

SEQ ID NO: 18551 - DNA, 20 bp, Artificial Sequence
  Synthetic oligonucleotide; AAG chr11 5310115 5310134 5310131 +
gaaaacttcctttctccaga

SEQ ID NO: 18552 - DNA, 20 bp, Artificial Sequence
  Synthetic oligonucleotide; TGG chr11 5310140 5310159 5310156 +
tgtctcattttcttcttcca

SEQ ID NO: 18553 - DNA, 20 bp, Artificial Sequence
  Synthetic oligonucleotide; AAG chr11 5310151 5310170 5310167 +
cttcttccatggaatattcc

SEQ ID NO: 18554 - DNA, 20 bp, Artificial Sequence
  Synthetic oligonucleotide; AGG chr11 5310152 5310171 5310168 +
ttcttccatggaatattcca

SEQ ID NO: 18555 - DNA, 20 bp, Artificial Sequence
  Synthetic oligonucleotide; AAG chr11 5310168 5310187 5310184 +
tccaaggaatattctttgaa

SEQ ID NO: 18556 - DNA, 20 bp, Artificial Sequence
  Synthetic oligonucleotide; CAG chr11 5310171 5310190 5310187 +
aaggaatattctttgaaaag

SEQ ID NO: 18557 - DNA, 20 bp, Artificial Sequence
  Synthetic oligonucleotide; CAG chr11 5310180 5310199 5310196 +
tctttgaaaagcagaatatt

SEQ ID NO: 18558 - DNA, 20 bp, Artificial Sequence
  Synthetic oligonucleotide; GAG chr11 5310182 5310201 5310198 +
tttgaaaagcagaatattca

SEQ ID NO: 18559 - DNA, 20 bp, Artificial Sequence
  Synthetic oligonucleotide; GAG chr11 5310186 5310205 5310202 +
aaaagcagaatattcagagt

SEQ ID NO: 18560 - DNA, 20 bp, Artificial Sequence
  Synthetic oligonucleotide; GAG chr11 5310188 5310207 5310204 +
aagcagaatattcagagtga

SEQ ID NO: 18561 - DNA, 20 bp, Artificial Sequence
  Synthetic oligonucleotide; AGG chr11 5310189 5310208 5310205 +
agcagaatattcagagtgag

SEQ ID NO: 18562 - DNA, 20 bp, Artificial Sequence
  Synthetic oligonucleotide; AAG chr11 5310192 5310211 5310208 +
agaatattcagagtgagagg

SEQ ID NO: 18563 - DNA, 20 bp, Artificial Sequence
  Synthetic oligonucleotide; TAG chr11 5310195 5310214 5310211 +
atattcagagtgagaggaag

SEQ ID NO: 18564 - DNA, 20 bp, Artificial Sequence
  Synthetic oligonucleotide; GAG chr11 5310197 5310216 5310213 +
attcagagtgagaggaagta

SEQ ID NO: 18565 - DNA, 20 bp, Artificial Sequence
  Synthetic oligonucleotide; GAG chr11 5310199 5310218 5310215 +
tcagagtgagaggaagtaga

SEQ ID NO: 18566 - DNA, 20 bp, Artificial Sequence
  Synthetic oligonucleotide; TAG chr11 5310209 5310228 5310225 +
aggaagtagagagatatatt

SEQ ID NO: 18567 - DNA, 20 bp, Artificial Sequence
  Synthetic oligonucleotide; AGG chr11 5310210 5310229 5310226 +
ggaagtagagagatatattt

SEQ ID NO: 18568 - DNA, 20 bp, Artificial Sequence
  Synthetic oligonucleotide; TAG chr11 5310213 5310232 5310229 +
agtagagagatatatttagg

SEQ ID NO: 18569 - DNA, 20 bp, Artificial Sequence
  Synthetic oligonucleotide; TGG chr11 5310220 5310239 5310236 +
agatatatttaggtagaatc

SEQ ID NO: 18570 - DNA, 20 bp, Artificial Sequence
  Synthetic oligonucleotide; GGG chr11 5310221 5310240 5310237 +
gatatatttaggtagaatct

SEQ ID NO: 18571 - DNA, 20 bp, Artificial Sequence
  Synthetic oligonucleotide; AAG chr11 5310231 5310250 5310247 +
ggtagaatctgggcatattg

SEQ ID NO: 18572 - DNA, 20 bp, Artificial Sequence
  Synthetic oligonucleotide; AGG chr11 5310232 5310251 5310248 +
gtagaatctgggcatattga

SEQ ID NO: 18573 - DNA, 20 bp, Artificial Sequence
  Synthetic oligonucleotide; GGG chr11 5310233 5310252 5310249 +
tagaatctgggcatattgaa

SEQ ID NO: 18574 - DNA, 20 bp, Artificial Sequence
  Synthetic oligonucleotide; AAG chr11 5310236 5310255 5310252 +
aatctgggcatattgaaggg

SEQ ID NO: 18575 - DNA, 20 bp, Artificial Sequence
  Synthetic oligonucleotide; CAG chr11 5310253 5310272 5310269 +
gggaagacatcaataattca

SEQ ID NO: 18576 - DNA, 20 bp, Artificial Sequence
  Synthetic oligonucleotide; TAG chr11 5310256 5310275 5310272 +
aagacatcaataattcacag

SEQ ID NO: 18577 - DNA, 20 bp, Artificial Sequence
  Synthetic oligonucleotide; AAG chr11 5310261 5310280 5310277 +
atcaataattcacagtagcc

SEQ ID NO: 18578 - DNA, 20 bp, Artificial Sequence
  Synthetic oligonucleotide; AGG chr11 5310262 5310281 5310278 +
tcaataattcacagtagcca

SEQ ID NO: 18579 - DNA, 20 bp, Artificial Sequence
  Synthetic oligonucleotide; TAG chr11 5310267 5310286 5310283 +
aattcacagtagccaaggaa

SEQ ID NO: 18580 - DNA, 20 bp, Artificial Sequence
  Synthetic oligonucleotide; AAG chr11 5310279 5310298 5310295 +
ccaaggaatagaaacaatac

SEQ ID NO: 18581 - DNA, 20 bp, Artificial Sequence
  Synthetic oligonucleotide; CAG chr11 5310292 5310311 5310308 +
acaatacaagtatctatcaa

SEQ ID NO: 18582 - DNA, 20 bp, Artificial Sequence
  Synthetic oligonucleotide; TAG chr11 5310329 5310348 5310345 +
aaaatgtcttatatatgtga

SEQ ID NO: 18583 - DNA, 20 bp, Artificial Sequence
  Synthetic oligonucleotide; AAG chr11 5310351 5310370 5310367 +
gaatattatttatctataaa

SEQ ID NO: 18584 - DNA, 20 bp, Artificial Sequence
  Synthetic oligonucleotide; TAG chr11 5310354 5310373 5310370 +
tattatttatctataaaaag

SEQ ID NO: 18585 - DNA, 20 bp, Artificial Sequence
  Synthetic oligonucleotide; AGG chr11 5310355 5310374 5310371 +
attatttatctataaaaagt

SEQ ID NO: 18586 - DNA, 20 bp, Artificial Sequence
  Synthetic oligonucleotide; AAG chr11 5310402 5310421 5310418 +
aaaccttaaaaaactatcct

SEQ ID NO: 18587 - DNA, 20 bp, Artificial Sequence
  Synthetic oligonucleotide; AAG chr11 5310411 5310430 5310427 +
aaaactatcctaagtgcaat

SEQ ID NO: 18588 - DNA, 20 bp, Artificial Sequence
  Synthetic oligonucleotide; AAG chr11 5310424 5310443 5310440 +
gtgcaataagtcatacgcaa

SEQ ID NO: 18589 - DNA, 20 bp, Artificial Sequence
  Synthetic oligonucleotide; GAG chr11 5310451 5310470 5310467 +
ttgtctgatttcacttacat

SEQ ID NO: 18590 - DNA, 20 bp, Artificial Sequence
  Synthetic oligonucleotide; TAG chr11 5310459 5310478 5310475 +
tttcacttacatgagctatc

SEQ ID NO: 18591 - DNA, 20 bp, Artificial Sequence
  Synthetic oligonucleotide; TAG chr11 5310464 5310483 5310480 +
cttacatgagctatctagaa

SEQ ID NO: 18592 - DNA, 20 bp, Artificial Sequence
  Synthetic oligonucleotide; AGG chr11 5310465 5310484 5310481 +
ttacatgagctatctagaat

SEQ ID NO: 18593 - DNA, 20 bp, Artificial Sequence
  Synthetic oligonucleotide; TAG chr11 5310476 5310495 5310492 +
atctagaataggcaaattca

SEQ ID NO: 18594 - DNA, 20 bp, Artificial Sequence
  Synthetic oligonucleotide; GAG chr11 5310478 5310497 5310494 +
ctagaataggcaaattcata

SEQ ID NO: 18595 - DNA, 20 bp, Artificial Sequence
  Synthetic oligonucleotide; AAG chr11 5310486 5310505 5310502 +
ggcaaattcatagagacaaa

SEQ ID NO: 18596 - DNA, 20 bp, Artificial Sequence
  Synthetic oligonucleotide; TAG chr11 5310489 5310508 5310505 +
aaattcatagagacaaaaag

SEQ ID NO: 18597 - DNA, 20 bp, Artificial Sequence
  Synthetic oligonucleotide; TAG chr11 5310494 5310513 5310510 +
catagagacaaaaagtagat

SEQ ID NO: 18598 - DNA, 20 bp, Artificial Sequence
  Synthetic oligonucleotide; AAG chr11 5310497 5310516 5310513 +
agagacaaaaagtagattag

SEQ ID NO: 18599 - DNA, 20 bp, Artificial Sequence
  Synthetic oligonucleotide; CAG chr11 5310504 5310523 5310520 +
aaaagtagattagaagttac

SEQ ID NO: 18600 - DNA, 20 bp, Artificial Sequence
  Synthetic oligonucleotide; GAG chr11 5310506 5310525 5310522 +
aagtagattagaagttacca

SEQ ID NO: 18601 - DNA, 20 bp, Artificial Sequence
  Synthetic oligonucleotide; TAG chr11 5310511 5310530 5310527 +
gattagaagttaccagagtg

SEQ ID NO: 18602 - DNA, 20 bp, Artificial Sequence
  Synthetic oligonucleotide; AGG chr11 5310512 5310531 5310528 +
attagaagttaccagagtgt

SEQ ID NO: 18603 - DNA, 20 bp, Artificial Sequence
  Synthetic oligonucleotide; AAG chr11 5310515 5310534 5310531 +
agaagttaccagagtgtagg

SEQ ID NO: 18604 - DNA, 20 bp, Artificial Sequence
  Synthetic oligonucleotide; TGG chr11 5310522 5310541 5310538 +
accagagtgtaggaagaaca

SEQ ID NO: 18605 - DNA, 20 bp, Artificial Sequence
  Synthetic oligonucleotide; TGG chr11 5310527 5310546 5310543 +
agtgtaggaagaacatggat

SEQ ID NO: 18606 - DNA, 20 bp, Artificial Sequence
  Synthetic oligonucleotide; GGG chr11 5310528 5310547 5310544 +
gtgtaggaagaacatggatt

SEQ ID NO: 18607 - DNA, 20 bp, Artificial Sequence
  Synthetic oligonucleotide; GGG chr11 5310529 5310548 5310545 +
tgtaggaagaacatggattg

SEQ ID NO: 18608 - DNA, 20 bp, Artificial Sequence
  Synthetic oligonucleotide; GAG chr11 5310531 5310550 5310547 +
taggaagaacatggattggg

SEQ ID NO: 18609 - DNA, 20 bp, Artificial Sequence
  Synthetic oligonucleotide; TAG chr11 5310551 5310570 5310567 +
gagtaactgattaatcaata

SEQ ID NO: 18610 - DNA, 20 bp, Artificial Sequence
  Synthetic oligonucleotide; GAG chr11 5310553 5310572 5310569 +
gtaactgattaatcaatata

SEQ ID NO: 18611 - DNA, 20 bp, Artificial Sequence
  Synthetic oligonucleotide; TGG chr11 5310564 5310583 5310580 +
atcaatatagagtttttatt

SEQ ID NO: 18612 - DNA, 20 bp, Artificial Sequence
  Synthetic oligonucleotide; TAG chr11 5310582 5310601 5310598 +
tttggtgtaatacaaaattt

SEQ ID NO: 18613 - DNA, 20 bp, Artificial Sequence
  Synthetic oligonucleotide; TAG chr11 5310588 5310607 5310604 +
gtaatacaaaattttagaaa

SEQ ID NO: 18614 - DNA, 20 bp, Artificial Sequence
  Synthetic oligonucleotide; TGG chr11 5310591 5310610 5310607 +
atacaaaattttagaaatag

SEQ ID NO: 18615 - DNA, 20 bp, Artificial Sequence
  Synthetic oligonucleotide; TGG chr11 5310594 5310613 5310610 +
caaaattttagaaatagtgg

SEQ ID NO: 18616 - DNA, 20 bp, Artificial Sequence
  Synthetic oligonucleotide; TGG chr11 5310610 5310629 5310626 +
gtggtggtgattgcacaaca

SEQ ID NO: 18617 - DNA, 20 bp, Artificial Sequence
  Synthetic oligonucleotide; AAG chr11 5310623 5310642 5310639 +
cacaacatggcaaatgtaat

SEQ ID NO: 18618 - DNA, 20 bp, Artificial Sequence
  Synthetic oligonucleotide; AAG chr11 5310650 5310669 5310666 +
actgcattatacattataaa

SEQ ID NO: 18619 - DNA, 20 bp, Artificial Sequence
  Synthetic oligonucleotide; AGG chr11 5310651 5310670 5310667 +
ctgcattatacattataaaa

SEQ ID NO: 18620 - DNA, 20 bp, Artificial Sequence
  Synthetic oligonucleotide; AAG chr11 5310657 5310676 5310673 +
tatacattataaaaaggcta

SEQ ID NO: 18621 - DNA, 20 bp, Artificial Sequence
  Synthetic oligonucleotide; TGG chr11 5310660 5310679 5310676 +
acattataaaaaggctaaag

SEQ ID NO: 18622 - DNA, 20 bp, Artificial Sequence
  Synthetic oligonucleotide; AAG chr11 5310732 5310751 5310748 +
attcattaaatttattgtga

SEQ ID NO: 18623 - DNA, 20 bp, Artificial Sequence
  Synthetic oligonucleotide; AGG chr11 5310733 5310752 5310749 +
ttcattaaatttattgtgaa

SEQ ID NO: 18624 - DNA, 20 bp, Artificial Sequence
  Synthetic oligonucleotide; AAG chr11 5310745 5310764 5310761 +
attgtgaaaggtttaaaaac

SEQ ID NO: 18625 - DNA, 20 bp, Artificial Sequence
  Synthetic oligonucleotide; GAG chr11 5310747 5310766 5310763 +
tgtgaaaggtttaaaaacaa

SEQ ID NO: 18626 - DNA, 20 bp, Artificial Sequence
  Synthetic oligonucleotide; GAG chr11 5310753 5310772 5310769 +
aggtttaaaaacaagagttt

SEQ ID NO: 18627 - DNA, 20 bp, Artificial Sequence
  Synthetic oligonucleotide; AGG chr11 5310754 5310773 5310770 +
ggtttaaaaacaagagtttg

SEQ ID NO: 18628 - DNA, 20 bp, Artificial Sequence
  Synthetic oligonucleotide; AAG chr11 5310772 5310791 5310788 +
tgaggttaaaaattatgtct

SEQ ID NO: 18629 - DNA, 20 bp, Artificial Sequence
  Synthetic oligonucleotide; AAG chr11 5310787 5310806 5310803 +
tgtctaagataaaatattaa

SEQ ID NO: 18630 - DNA, 20 bp, Artificial Sequence
  Synthetic oligonucleotide; CAG chr11 5310806 5310825 5310822 +
aaagatttattccacatgtg

SEQ ID NO: 18631 - DNA, 20 bp, Artificial Sequence
  Synthetic oligonucleotide; AGG chr11 5310807 5310826 5310823 +
aagatttattccacatgtgc

SEQ ID NO: 18632 - DNA, 20 bp, Artificial Sequence
  Synthetic oligonucleotide; TAG chr11 5310851 5310870 5310867 +
acaactatatatatacatac

SEQ ID NO: 18633 - DNA, 20 bp, Artificial Sequence
  Synthetic oligonucleotide; AGG chr11 5310852 5310871 5310868 +
caactatatatatacatact

SEQ ID NO: 18634 - DNA, 20 bp, Artificial Sequence
  Synthetic oligonucleotide; AAG chr11 5310858 5310877 5310874 +
tatatatacatactaggata

SEQ ID NO: 18635 - DNA, 20 bp, Artificial Sequence
  Synthetic oligonucleotide; AAG chr11 5310875 5310894 5310891 +
ataaagtctcttatatctta

SEQ ID NO: 18636 - DNA, 20 bp, Artificial Sequence
  Synthetic oligonucleotide; TAG chr11 5310901 5310920 5310917 +
atttatttgattttaataaa

SEQ ID NO: 18637 - DNA, 20 bp, Artificial Sequence
  Synthetic oligonucleotide; TAG chr11 5310906 5310925 5310922 +
tttgattttaataaatagaa

SEQ ID NO: 18638 - DNA, 20 bp, Artificial Sequence
  Synthetic oligonucleotide; AGG chr11 5310907 5310926 5310923 +
ttgattttaataaatagaat

SEQ ID NO: 18639 - DNA, 20 bp, Artificial Sequence
  Synthetic oligonucleotide; TGG chr11 5310911 5310930 5310927 +
ttttaataaatagaatagga

SEQ ID NO: 18640 - DNA, 20 bp, Artificial Sequence
  Synthetic oligonucleotide; GAG chr11 5310934 5310953 5310950 +
ttgactcaacaatttcactt

SEQ ID NO: 18641 - DNA, 20 bp, Artificial Sequence
  Synthetic oligonucleotide; GAG chr11 5310936 5310955 5310952 +
gactcaacaatttcacttga

SEQ ID NO: 18642 - DNA, 20 bp, Artificial Sequence
  Synthetic oligonucleotide; AAG chr11 5310940 5310959 5310956 +
caacaatttcacttgagaga

SEQ ID NO: 18643 - DNA, 20 bp, Artificial Sequence
  Synthetic oligonucleotide; AAG chr11 5310947 5310966 5310963 +
ttcacttgagagaaagaatc

SEQ ID NO: 18644 - DNA, 20 bp, Artificial Sequence
  Synthetic oligonucleotide; TAG chr11 5310952 5310971 5310968 +
ttgagagaaagaatcaagca

SEQ ID NO: 18645 - DNA, 20 bp, Artificial Sequence
  Synthetic oligonucleotide; CAG chr11 5310963 5310982 5310979 +
aatcaagcatagattatttt

SEQ ID NO: 18646 - DNA, 20 bp, Artificial Sequence
  Synthetic oligonucleotide; TGG chr11 5310973 5310992 5310989 +
agattattttcagttccata

SEQ ID NO: 18647 - DNA, 20 bp, Artificial Sequence
  Synthetic oligonucleotide; TGG chr11 5310997 5311016 5311013 +
cctcctcaaatatctatgat

SEQ ID NO: 18648 - DNA, 20 bp, Artificial Sequence
  Synthetic oligonucleotide; AAG chr11 5311009 5311028 5311025 +
tctatgattggacatctgtg

SEQ ID NO: 18649 - DNA, 20 bp, Artificial Sequence
  Synthetic oligonucleotide; AGG chr11 5311010 5311029 5311026 +
ctatgattggacatctgtga

SEQ ID NO: 18650 - DNA, 20 bp, Artificial Sequence
  Synthetic oligonucleotide; TAG chr11 5311026 5311045 5311042 +
gtgaaggcatgccgcaaatc

SEQ ID NO: 18651 - DNA, 20 bp, Artificial Sequence
  Synthetic oligonucleotide; AGG chr11 5311027 5311046 5311043 +
tgaaggcatgccgcaaatct

SEQ ID NO: 18652 - DNA, 20 bp, Artificial Sequence
  Synthetic oligonucleotide; GGG chr11 5311028 5311047 5311044 +
gaaggcatgccgcaaatcta

SEQ ID NO: 18653 - DNA, 20 bp, Artificial Sequence
  Synthetic oligonucleotide; AAG chr11 5311041 5311060 5311057 +
aaatctagggtaactaacat

SEQ ID NO: 18654 - DNA, 20 bp, Artificial Sequence
  Synthetic oligonucleotide; TGG chr11 5311094 5311113 5311110 +
attcttgttatttactcatc

SEQ ID NO: 18655 - DNA, 20 bp, Artificial Sequence
  Synthetic oligonucleotide; CAG chr11 5311102 5311121 5311118 +
tatttactcatctggtaatt

SEQ ID NO: 18656 - DNA, 20 bp, Artificial Sequence
  Synthetic oligonucleotide; TAG chr11 5311109 5311128 5311125 +
tcatctggtaattcagaatt

SEQ ID NO: 18657 - DNA, 20 bp, Artificial Sequence
  Synthetic oligonucleotide; CAG chr11 5311141 5311160 5311157 +
cttcctatttatgtttgtat

SEQ ID NO: 18658 - DNA, 20 bp, Artificial Sequence
  Synthetic oligonucleotide; TGG chr11 5311150 5311169 5311166 +
tatgtttgtatcagattatc

SEQ ID NO: 18659 - DNA, 20 bp, Artificial Sequence
  Synthetic oligonucleotide; CAG chr11 5311160 5311179 5311176 +
tcagattatctggctctaac

SEQ ID NO: 18660 - DNA, 20 bp, Artificial Sequence
  Synthetic oligonucleotide; TGG chr11 5311196 5311215 5311212 +
ttgatatattatctcacgtt

SEQ ID NO: 18661 - DNA, 20 bp, Artificial Sequence
  Synthetic oligonucleotide; CAG chr11 5311199 5311218 5311215 +
atatattatctcacgtttgg

SEQ ID NO: 18662 - DNA, 20 bp, Artificial Sequence
  Synthetic oligonucleotide; TGG chr11 5311209 5311228 5311225 +
tcacgtttggcagtattttt

SEQ ID NO: 18663 - DNA, 20 bp, Artificial Sequence
  Synthetic oligonucleotide; TGG chr11 5311228 5311247 5311244 +
ttggactgctattttaaaac

SEQ ID NO: 18664 - DNA, 20 bp, Artificial Sequence
  Synthetic oligonucleotide; GGG chr11 5311229 5311248 5311245 +
tggactgctattttaaaact

SEQ ID NO: 18665 - DNA, 20 bp, Artificial Sequence
  Synthetic oligonucleotide; CAG chr11 5311239 5311258 5311255 +
ttttaaaactgggtctactt

SEQ ID NO: 18666 - DNA, 20 bp, Artificial Sequence
  Synthetic oligonucleotide; AAG chr11 5311254 5311273 5311270 +
tacttcagtgaatgacaccc

SEQ ID NO: 18667 - DNA, 20 bp, Artificial Sequence
  Synthetic oligonucleotide; CGG chr11 5311264 5311283 5311280 +
aatgacacccaagaaaaacc

SEQ ID NO: 18668 - DNA, 20 bp, Artificial Sequence
  Synthetic oligonucleotide; TAG chr11 5311285 5311304 5311301 +
ggatctatcctgctttctcc

SEQ ID NO: 18669 - DNA, 20 bp, Artificial Sequence
  Synthetic oligonucleotide; AGG chr11 5311286 5311305 5311302 +
gatctatcctgctttctcct

SEQ ID NO: 18670 - DNA, 20 bp, Artificial Sequence
  Synthetic oligonucleotide; TAG chr11 5311290 5311309 5311306 +
tatcctgctttctcctagga

SEQ ID NO: 18671 - DNA, 20 bp, Artificial Sequence
  Synthetic oligonucleotide; GAG chr11 5311294 5311313 5311310 +
ctgctttctcctaggatagt

SEQ ID NO: 18672 - DNA, 20 bp, Artificial Sequence
  Synthetic oligonucleotide; TGG chr11 5311327 5311346 5311343 +
acttattctctgaccttctt

SEQ ID NO: 18673 - DNA, 20 bp, Artificial Sequence
  Synthetic oligonucleotide; GGG chr11 5311328 5311347 5311344 +
cttattctctgaccttcttt

SEQ ID NO: 18674 - DNA, 20 bp, Artificial Sequence
  Synthetic oligonucleotide; CAG chr11 5311343 5311362 5311359 +
tctttgggtgtcatctgctt

SEQ ID NO: 18675 - DNA, 20 bp, Artificial Sequence
  Synthetic oligonucleotide; CAG chr11 5311425 5311444 5311441 +
ttactatgactcttcatgat

SEQ ID NO: 18676 - DNA, 20 bp, Artificial Sequence
  Synthetic oligonucleotide; AGG chr11 5311426 5311445 5311442 +
tactatgactcttcatgatc

SEQ ID NO: 18677 - DNA, 20 bp, Artificial Sequence
  Synthetic oligonucleotide; AAG chr11 5311433 5311452 5311449 +
actcttcatgatcaggcaaa

SEQ ID NO: 18678 - DNA, 20 bp, Artificial Sequence
  Synthetic oligonucleotide; AAG chr11 5311481 5311500 5311497 +
gaatgatttttttaattatt

SEQ ID NO: 18679 - DNA, 20 bp, Artificial Sequence
  Synthetic oligonucleotide; AAG chr11 5311502 5311521 5311518 +
agctaatattttgtttttaa

SEQ ID NO: 18680 - DNA, 20 bp, Artificial Sequence
  Synthetic oligonucleotide; TAG chr11 5311507 5311526 5311523 +
atattttgtttttaaaagtc

SEQ ID NO: 18681 - DNA, 20 bp, Artificial Sequence
  Synthetic oligonucleotide; CAG chr11 5311515 5311534 5311531 +
tttttaaaagtctagttcta

SEQ ID NO: 18682 - DNA, 20 bp, Artificial Sequence
  Synthetic oligonucleotide; CAG chr11 5311578 5311597 5311594 +
ttattattttgactcattct

SEQ ID NO: 18683 - DNA, 20 bp, Artificial Sequence
  Synthetic oligonucleotide; TAG chr11 5311622 5311641 5311638 +
ataatgattcttcttattta

SEQ ID NO: 18684 - DNA, 20 bp, Artificial Sequence
  Synthetic oligonucleotide; CAG chr11 5311637 5311656 5311653 +
atttatagacaatacataat

SEQ ID NO: 18685 - DNA, 20 bp, Artificial Sequence
  Synthetic oligonucleotide; TGG chr11 5311655 5311674 5311671 +
atcagtgactgcctttcttt

SEQ ID NO: 18686 - DNA, 20 bp, Artificial Sequence
  Synthetic oligonucleotide; AAG chr11 5311673 5311692 5311689 +
tttggcactgcctttcttcc

SEQ ID NO: 18687 - DNA, 20 bp, Artificial Sequence
  Synthetic oligonucleotide; CAG chr11 5311683 5311702 5311699 +
cctttcttccaagaacatgt

SEQ ID NO: 18688 - DNA, 20 bp, Artificial Sequence
  Synthetic oligonucleotide; TGG chr11 5311693 5311712 5311709 +
aagaacatgtcagaaattga

SEQ ID NO: 18689 - DNA, 20 bp, Artificial Sequence
  Synthetic oligonucleotide; TAG chr11 5311765 5311784 5311781 +
cctgtaaaccttattatatt

SEQ ID NO: 18690 - DNA, 20 bp, Artificial Sequence
  Synthetic oligonucleotide; GAG chr11 5311819 5311838 5311835 +
catttccactttcctaaatt

SEQ ID NO: 18691 - DNA, 20 bp, Artificial Sequence
  Synthetic oligonucleotide; AAG chr11 5311902 5311921 5311918 +
ccattttataaataatattg

SEQ ID NO: 18692 - DNA, 20 bp, Artificial Sequence
  Synthetic oligonucleotide; CAG chr11 5311931 5311950 5311947 +
taaaacatcaatgaattatg

SEQ ID NO: 18693 - DNA, 20 bp, Artificial Sequence
  Synthetic oligonucleotide; CAG chr11 5311941 5311960 5311957 +
atgaattatgcagcttcttt

SEQ ID NO: 18694 - DNA, 20 bp, Artificial Sequence
  Synthetic oligonucleotide; TAG chr11 5311944 5311963 5311960 +
aattatgcagcttctttcag

SEQ ID NO: 18695 - DNA, 20 bp, Artificial Sequence
  Synthetic oligonucleotide; GAG chr11 5311961 5311980 5311977 +
cagtagctttccatgactcc

SEQ ID NO: 18696 - DNA, 20 bp, Artificial Sequence
  Synthetic oligonucleotide; TAG chr11 5311964 5311983 5311980 +
tagctttccatgactccgag

SEQ ID NO: 18697 - DNA, 20 bp, Artificial Sequence
  Synthetic oligonucleotide; GAG chr11 5311966 5311985 5311982 +
gctttccatgactccgagta

SEQ ID NO: 18698 - DNA, 20 bp, Artificial Sequence
  Synthetic oligonucleotide; AAG chr11 5311993 5312012 5312009 +
aaactcttatgatgaccaat

SEQ ID NO: 18699 - DNA, 20 bp, Artificial Sequence
  Synthetic oligonucleotide; AGG chr11 5311994 5312013 5312010 +
aactcttatgatgaccaata

SEQ ID NO: 18700 - DNA, 20 bp, Artificial Sequence
  Synthetic oligonucleotide; CAG chr11 5312013 5312032 5312029 +
aaggccattccttccctctt

SEQ ID NO: 18701 - DNA, 20 bp, Artificial Sequence
  Synthetic oligonucleotide; AAG chr11 5312026 5312045 5312042 +
ccctcttcagcctcttctca

SEQ ID NO: 18702 - DNA, 20 bp, Artificial Sequence
  Synthetic oligonucleotide; CAG chr11 5312043 5312062 5312059 +
tcaaagcaaacaccctcttc

SEQ ID NO: 18703 - DNA, 20 bp, Artificial Sequence
  Synthetic oligonucleotide; TAG chr11 5312046 5312065 5312062 +
aagcaaacaccctcttccag

SEQ ID NO: 18704 - DNA, 20 bp, Artificial Sequence
  Synthetic oligonucleotide; TAG chr11 5312074 5312093 5312090 +
ttccctaatataaaccaacc

SEQ ID NO: 18705 - DNA, 20 bp, Artificial Sequence
  Synthetic oligonucleotide; GAG chr11 5312079 5312098 5312095 +
taatataaaccaacctagct

SEQ ID NO: 18706 - DNA, 20 bp, Artificial Sequence
  Synthetic oligonucleotide; AGG chr11 5312080 5312099 5312096 +
aatataaaccaacctagctg

SEQ ID NO: 18707 - DNA, 20 bp, Artificial Sequence
  Synthetic oligonucleotide; CAG chr11 5312101 5312120 5312117 +
ggtctccacacacactcctt

SEQ ID NO: 18708 - DNA, 20 bp, Artificial Sequence
  Synthetic oligonucleotide; TAG chr11 5312107 5312126 5312123 +
cacacacactccttcagtct

SEQ ID NO: 18709 - DNA, 20 bp, Artificial Sequence
  Synthetic oligonucleotide; CAG chr11 5312133 5312152 5312149 +
attcttgtctgtattttcac

SEQ ID NO: 18710 - DNA, 20 bp, Artificial Sequence
  Synthetic oligonucleotide; TAG chr11 5312137 5312156 5312153 +
ttgtctgtattttcaccagt

SEQ ID NO: 18711 - DNA, 20 bp, Artificial Sequence
  Synthetic oligonucleotide; CAG chr11 5312155 5312174 5312171 +
gttagtttctaatccatttt

SEQ ID NO: 18712 - DNA, 20 bp, Artificial Sequence
  Synthetic oligonucleotide; AGG chr11 5312156 5312175 5312172 +
ttagtttctaatccattttc

SEQ ID NO: 18713 - DNA, 20 bp, Artificial Sequence
  Synthetic oligonucleotide; CAG chr11 5312162 5312181 5312178 +
tctaatccattttcaggtct

SEQ ID NO: 18714 - DNA, 20 bp, Artificial Sequence
  Synthetic oligonucleotide; AAG chr11 5312168 5312187 5312184 +
ccattttcaggtctcagctg

SEQ ID NO: 18715 - DNA, 20 bp, Artificial Sequence
  Synthetic oligonucleotide; AGG chr11 5312169 5312188 5312185 +
cattttcaggtctcagctga

SEQ ID NO: 18716 - DNA, 20 bp, Artificial Sequence
  Synthetic oligonucleotide; GGG chr11 5312170 5312189 5312186 +
attttcaggtctcagctgaa

SEQ ID NO: 18717 - DNA, 20 bp, Artificial Sequence
  Synthetic oligonucleotide; CAG chr11 5312182 5312201 5312198 +
cagctgaagggacactttct

SEQ ID NO: 18718 - DNA, 20 bp, Artificial Sequence
  Synthetic oligonucleotide; AGG chr11 5312183 5312202 5312199 +
agctgaagggacactttctc

SEQ ID NO: 18719 - DNA, 20 bp, Artificial Sequence
  Synthetic oligonucleotide; GGG chr11 5312184 5312203 5312200 +
gctgaagggacactttctca

SEQ ID NO: 18720 - DNA, 20 bp, Artificial Sequence
  Synthetic oligonucleotide; AAG chr11 5312204 5312223 5312220 +
gggaatcttacccttatttc

SEQ ID NO: 18721 - DNA, 20 bp, Artificial Sequence
  Synthetic oligonucleotide; AAG chr11 5312217 5312236 5312233 +
ttatttcaagccataacctc

SEQ ID NO: 18722 - DNA, 20 bp, Artificial Sequence
  Synthetic oligonucleotide; GAG chr11 5312228 5312247 5312244 +
cataacctcaagcctttttt

SEQ ID NO: 18723 - DNA, 20 bp, Artificial Sequence
  Synthetic oligonucleotide; CAG chr11 5312247 5312266 5312263 +
tgagacccacactctccatt

SEQ ID NO: 18724 - DNA, 20 bp, Artificial Sequence
  Synthetic oligonucleotide; CAG chr11 5312278 5312297 5312294 +
ttctgctttatgattaatca

SEQ ID NO: 18725 - DNA, 20 bp, Artificial Sequence
  Synthetic oligonucleotide; TGG chr11 5312296 5312315 5312312 +
cacagcacttgttttaaatt

SEQ ID NO: 18726 - DNA, 20 bp, Artificial Sequence
  Synthetic oligonucleotide; GAG chr11 5312315 5312334 5312331 +
ttggatttcttttattcttt

SEQ ID NO: 18727 - DNA, 20 bp, Artificial Sequence
  Synthetic oligonucleotide; AAG chr11 5312332 5312351 5312348 +
tttgagtccccacttatttg

SEQ ID NO: 18728 - DNA, 20 bp, Artificial Sequence
  Synthetic oligonucleotide; AAG chr11 5312340 5312359 5312356 +
cccacttatttgaagacttt

SEQ ID NO: 18729 - DNA, 20 bp, Artificial Sequence
  Synthetic oligonucleotide; AAG chr11 5312343 5312362 5312359 +
acttatttgaagactttaag

SEQ ID NO: 18730 - DNA, 20 bp, Artificial Sequence
  Synthetic oligonucleotide; AAG chr11 5312348 5312367 5312364 +
tttgaagactttaagaagaa

SEQ ID NO: 18731 - DNA, 20 bp, Artificial Sequence
  Synthetic oligonucleotide; TAG chr11 5312384 5312403 5312400 +
tctcttatatcatttttgct

SEQ ID NO: 18732 - DNA, 20 bp, Artificial Sequence
  Synthetic oligonucleotide; AAG chr11 5312388 5312407 5312404 +
ttatatcatttttgcttagc

SEQ ID NO: 18733 - DNA, 20 bp, Artificial Sequence
  Synthetic oligonucleotide; AGG chr11 5312389 5312408 5312405 +
tatatcatttttgcttagca

SEQ ID NO: 18734 - DNA, 20 bp, Artificial Sequence
  Synthetic oligonucleotide; TAG chr11 5312402 5312421 5312418 +
cttagcaaggtgacccataa

SEQ ID NO: 18735 - DNA, 20 bp, Artificial Sequence
  Synthetic oligonucleotide; AAG chr11 5312425 5312444 5312441 +
tgcccttaaaaaattaacca

SEQ ID NO: 18736 - DNA, 20 bp, Artificial Sequence
  Synthetic oligonucleotide; AGG chr11 5312426 5312445 5312442 +
gcccttaaaaaattaaccaa

SEQ ID NO: 18737 - DNA, 20 bp, Artificial Sequence
  Synthetic oligonucleotide; TAG chr11 5312442 5312461 5312458 +
ccaaaggaatgattaaatat

SEQ ID NO: 18738 - DNA, 20 bp, Artificial Sequence
  Synthetic oligonucleotide; TGG chr11 5312445 5312464 5312461 +
aaggaatgattaaatattag

SEQ ID NO: 18739 - DNA, 20 bp, Artificial Sequence
  Synthetic oligonucleotide; TAG chr11 5312462 5312481 5312478 +
tagtggtgtttccacgaaaa

SEQ ID NO: 18740 - DNA, 20 bp, Artificial Sequence
  Synthetic oligonucleotide; AGG chr11 5312463 5312482 5312479 +
agtggtgtttccacgaaaat

SEQ ID NO: 18741 - DNA, 20 bp, Artificial Sequence
  Synthetic oligonucleotide; GAG chr11 5312471 5312490 5312487 +
ttccacgaaaataggcacat

SEQ ID NO: 18742 - DNA, 20 bp, Artificial Sequence
  Synthetic oligonucleotide; AGG chr11 5312472 5312491 5312488 +
tccacgaaaataggcacatg

SEQ ID NO: 18743 - DNA, 20 bp, Artificial Sequence
  Synthetic oligonucleotide; AAG chr11 5312484 5312503 5312500 +
ggcacatgaggaatgattta

SEQ ID NO: 18744 - DNA, 20 bp, Artificial Sequence
  Synthetic oligonucleotide; TAG chr11 5312522 5312541 5312538 +
aacacaaacccttttaaaca

SEQ ID NO: 18745 - DNA, 20 bp, Artificial Sequence
  Synthetic oligonucleotide; AGG chr11 5312523 5312542 5312539 +
acacaaacccttttaaacat

SEQ ID NO: 18746 - DNA, 20 bp, Artificial Sequence
  Synthetic oligonucleotide; TAG chr11 5312542 5312561 5312558 +
taggatatgtacaaataaat

SEQ ID NO: 18747 - DNA, 20 bp, Artificial Sequence
  Synthetic oligonucleotide; AGG chr11 5312543 5312562 5312559 +
aggatatgtacaaataaatt

SEQ ID NO: 18748 - DNA, 20 bp, Artificial Sequence
  Synthetic oligonucleotide; AAG chr11 5312549 5312568 5312565 +
tgtacaaataaattaggcaa

SEQ ID NO: 18749 - DNA, 20 bp, Artificial Sequence
  Synthetic oligonucleotide; AAG chr11 5312555 5312574 5312571 +
aataaattaggcaaaagtat

SEQ ID NO: 18750 - DNA, 20 bp, Artificial Sequence
  Synthetic oligonucleotide; AAG chr11 5312561 5312580 5312577 +
ttaggcaaaagtataagaaa

SEQ ID NO: 18751 - DNA, 20 bp, Artificial Sequence
  Synthetic oligonucleotide; AAG chr11 5312579 5312598 5312595 +
aaaagatataaataaacctg

SEQ ID NO: 18752 - DNA, 20 bp, Artificial Sequence
  Synthetic oligonucleotide; CAG chr11 5312583 5312602 5312599 +
gatataaataaacctgaagt

SEQ ID NO: 18753 - DNA, 20 bp, Artificial Sequence
  Synthetic oligonucleotide; AAG chr11 5312587 5312606 5312603 +
taaataaacctgaagtcagc

SEQ ID NO: 18754 - DNA, 20 bp, Artificial Sequence
  Synthetic oligonucleotide; AGG chr11 5312588 5312607 5312604 +
aaataaacctgaagtcagca

SEQ ID NO: 18755 - DNA, 20 bp, Artificial Sequence
  Synthetic oligonucleotide; GGG chr11 5312589 5312608 5312605 +
aataaacctgaagtcagcaa

SEQ ID NO: 18756 - DNA, 20 bp, Artificial Sequence
  Synthetic oligonucleotide; TAG chr11 5312598 5312617 5312614 +
gaagtcagcaagggctttga

SEQ ID NO: 18757 - DNA, 20 bp, Artificial Sequence
  Synthetic oligonucleotide; TGG chr11 5312603 5312622 5312619 +
cagcaagggctttgatagta

SEQ ID NO: 18758 - DNA, 20 bp, Artificial Sequence
  Synthetic oligonucleotide; CAG chr11 5312617 5312636 5312633 +
atagtatggctccaatactt

SEQ ID NO: 18759 - DNA, 20 bp, Artificial Sequence
  Synthetic oligonucleotide; TAG chr11 5312620 5312639 5312636 +
gtatggctccaatacttcag

SEQ ID NO: 18760 - DNA, 20 bp, Artificial Sequence
  Synthetic oligonucleotide; AAG chr11 5312626 5312645 5312642 +
ctccaatacttcagtagata

SEQ ID NO: 18761 - DNA, 20 bp, Artificial Sequence
  Synthetic oligonucleotide; AAG chr11 5312653 5312672 5312669 +
taataaaataatgtatatgt

SEQ ID NO: 18762 - DNA, 20 bp, Artificial Sequence
  Synthetic oligonucleotide; TAG chr11 5312673 5312692 5312689 +
aagcttttaaattgtgtata

SEQ ID NO: 18763 - DNA, 20 bp, Artificial Sequence
  Synthetic oligonucleotide; AAG chr11 5312677 5312696 5312693 +
ttttaaattgtgtatatagc

SEQ ID NO: 18764 - DNA, 20 bp, Artificial Sequence
  Synthetic oligonucleotide; CAG chr11 5312685 5312704 5312701 +
tgtgtatatagcaagacaaa

SEQ ID NO: 18765 - DNA, 20 bp, Artificial Sequence
  Synthetic oligonucleotide; TGG chr11 5312693 5312712 5312709 +
tagcaagacaaacagaaaac

SEQ ID NO: 18766 - DNA, 20 bp, Artificial Sequence
  Synthetic oligonucleotide; GGG chr11 5312694 5312713 5312710 +
agcaagacaaacagaaaact

SEQ ID NO: 18767 - DNA, 20 bp, Artificial Sequence
  Synthetic oligonucleotide; TAG chr11 5312724 5312743 5312740 +
gtacactaaaaataaaacac

SEQ ID NO: 18768 - DNA, 20 bp, Artificial Sequence
  Synthetic oligonucleotide; GAG chr11 5312726 5312745 5312742 +
acactaaaaataaaacacta

SEQ ID NO: 18769 - DNA, 20 bp, Artificial Sequence
  Synthetic oligonucleotide; AAG chr11 5312764 5312783 5312780 +
cttcttaaaatcaattataa

SEQ ID NO: 18770 - DNA, 20 bp, Artificial Sequence
  Synthetic oligonucleotide; AGG chr11 5312765 5312784 5312781 +
ttcttaaaatcaattataaa

SEQ ID NO: 18771 - DNA, 20 bp, Artificial Sequence
  Synthetic oligonucleotide; TAG chr11 5312776 5312795 5312792 +
aattataaaaggatgaaaat

SEQ ID NO: 18772 - DNA, 20 bp, Artificial Sequence
  Synthetic oligonucleotide; TAG chr11 5312803 5312822 5312819 +
atatatgatcaaataaatcc

SEQ ID NO: 18773 - DNA, 20 bp, Artificial Sequence
  Synthetic oligonucleotide; GAG chr11 5312807 5312826 5312823 +
atgatcaaataaatcctagt

SEQ ID NO: 18774 - DNA, 20 bp, Artificial Sequence
  Synthetic oligonucleotide; AAG chr11 5312816 5312835 5312832 +
taaatcctagtgagatttcc

SEQ ID NO: 18775 - DNA, 20 bp, Artificial Sequence
  Synthetic oligonucleotide; GAG chr11 5312834 5312853 5312850 +
ccaagttgctgcaacaaatt

SEQ ID NO: 18776 - DNA, 20 bp, Artificial Sequence
  Synthetic oligonucleotide; TAG chr11 5312853 5312872 5312869 +
tgagatcacttgtgatttat

SEQ ID NO: 18777 - DNA, 20 bp, Artificial Sequence
  Synthetic oligonucleotide; AAG chr11 5312882 5312901 5312898 +
aaataaattgaatatacaaa

SEQ ID NO: 18778 - DNA, 20 bp, Artificial Sequence
  Synthetic oligonucleotide; AGG chr11 5312883 5312902 5312899 +
aataaattgaatatacaaaa

SEQ ID NO: 18779 - DNA, 20 bp, Artificial Sequence
  Synthetic oligonucleotide; CAG chr11 5312893 5312912 5312909 +
atatacaaaaaggaaaatat

SEQ ID NO: 18780 - DNA, 20 bp, Artificial Sequence
  Synthetic oligonucleotide; TGG chr11 5312912 5312931 5312928 +
tcagattatatttcatctat

SEQ ID NO: 18781 - DNA, 20 bp, Artificial Sequence
  Synthetic oligonucleotide; CAG chr11 5312921 5312940 5312937 +
atttcatctattggacatat

SEQ ID NO: 18782 - DNA, 20 bp, Artificial Sequence
  Synthetic oligonucleotide; CAG chr11 5312937 5312956 5312953 +
atatcagaaatgtttctatc

SEQ ID NO: 18783 - DNA, 20 bp, Artificial Sequence
  Synthetic oligonucleotide; TAG chr11 5312944 5312963 5312960 +
aaatgtttctatccagcatt

SEQ ID NO: 18784 - DNA, 20 bp, Artificial Sequence
  Synthetic oligonucleotide; GAG chr11 5312946 5312965 5312962 +
atgtttctatccagcattta

SEQ ID NO: 18785 - DNA, 20 bp, Artificial Sequence
  Synthetic oligonucleotide; GAG chr11 5312948 5312967 5312964 +
gtttctatccagcatttaga

SEQ ID NO: 18786 - DNA, 20 bp, Artificial Sequence
  Synthetic oligonucleotide; AAG chr11 5312956 5312975 5312972 +
ccagcatttagagagaacac

SEQ ID NO: 18787 - DNA, 20 bp, Artificial Sequence
  Synthetic oligonucleotide; AAG chr11 5312964 5312983 5312980 +
tagagagaacacaagatcaa

SEQ ID NO: 18788 - DNA, 20 bp, Artificial Sequence
  Synthetic oligonucleotide; GAG chr11 5312988 5313007 5313004 +
aatacattaactcatgaaat

SEQ ID NO: 18789 - DNA, 20 bp, Artificial Sequence
  Synthetic oligonucleotide; TAG chr11 5312995 5313014 5313011 +
taactcatgaaatgagcaac

SEQ ID NO: 18790 - DNA, 20 bp, Artificial Sequence
  Synthetic oligonucleotide; AGG chr11 5312996 5313015 5313012 +
aactcatgaaatgagcaact

SEQ ID NO: 18791 - DNA, 20 bp, Artificial Sequence
  Synthetic oligonucleotide; TAG chr11 5313012 5313031 5313028 +
aactaggaaatttatgaatt

SEQ ID NO: 18792 - DNA, 20 bp, Artificial Sequence
  Synthetic oligonucleotide; GAG chr11 5313014 5313033 5313030 +
ctaggaaatttatgaattta

SEQ ID NO: 18793 - DNA, 20 bp, Artificial Sequence
  Synthetic oligonucleotide; GAG chr11 5313016 5313035 5313032 +
aggaaatttatgaatttaga

SEQ ID NO: 18794 - DNA, 20 bp, Artificial Sequence
  Synthetic oligonucleotide; TAG chr11 5313038 5313057 5313054 +
gtctctactgtaaaacttta

SEQ ID NO: 18795 - DNA, 20 bp, Artificial Sequence
  Synthetic oligonucleotide; AAG chr11 5313061 5313080 5313077 +
atgacattgtatcattttga

SEQ ID NO: 18796 - DNA, 20 bp, Artificial Sequence
  Synthetic oligonucleotide; AAG chr11 5313071 5313090 5313087 +
atcattttgaaagaaaactc

SEQ ID NO: 18797 - DNA, 20 bp, Artificial Sequence
  Synthetic oligonucleotide; AAG chr11 5313081 5313100 5313097 +
aagaaaactcaagacaccaa

SEQ ID NO: 18798 - DNA, 20 bp, Artificial Sequence
  Synthetic oligonucleotide; TGG chr11 5313108 5313127 5313124 +
tgcaaaaaaaaattgacaaa

SEQ ID NO: 18799 - DNA, 20 bp, Artificial Sequence
  Synthetic oligonucleotide; GGG chr11 5313109 5313128 5313125 +
gcaaaaaaaaattgacaaat

SEQ ID NO: 18800 - DNA, 20 bp, Artificial Sequence
  Synthetic oligonucleotide; AAG chr11 5313126 5313145 5313142 +
aatgggatctaattaaatta

SEQ ID NO: 18801 - DNA, 20 bp, Artificial Sequence
  Synthetic oligonucleotide; GAG chr11 5313128 5313147 5313144 +
tgggatctaattaaattaaa

SEQ ID NO: 18802 - DNA, 20 bp, Artificial Sequence
  Synthetic oligonucleotide; CAG chr11 5313139 5313158 5313155 +
taaattaaagagcttctgca

SEQ ID NO: 18803 - DNA, 20 bp, Artificial Sequence
  Synthetic oligonucleotide; AAG chr11 5313145 5313164 5313161 +
aaagagcttctgcacagcaa

SEQ ID NO: 18804 - DNA, 20 bp, Artificial Sequence
  Synthetic oligonucleotide; CAG chr11 5313158 5313177 5313174 +
acagcaaaagaaactatcat

SEQ ID NO: 18805 - DNA, 20 bp, Artificial Sequence
  Synthetic oligonucleotide; GAG chr11 5313160 5313179 5313176 +
agcaaaagaaactatcatca

SEQ ID NO: 18806 - DNA, 20 bp, Artificial Sequence
  Synthetic oligonucleotide; CAG chr11 5313167 5313186 5313183 +
gaaactatcatcagagataa

SEQ ID NO: 18807 - DNA, 20 bp, Artificial Sequence
  Synthetic oligonucleotide; CAG chr11 5313178 5313197 5313194 +
cagagataacagacaaccta

SEQ ID NO: 18808 - DNA, 20 bp, Artificial Sequence
  Synthetic oligonucleotide; TAG chr11 5313183 5313202 5313199 +
ataacagacaacctacagaa

SEQ ID NO: 18809 - DNA, 20 bp, Artificial Sequence
  Synthetic oligonucleotide; AAG chr11 5313186 5313205 5313202 +
acagacaacctacagaatag

SEQ ID NO: 18810 - DNA, 20 bp, Artificial Sequence
  Synthetic oligonucleotide; AAG chr11 5313218 5313237 5313234 +
gcaatttctccatctgacaa

SEQ ID NO: 18811 - DNA, 20 bp, Artificial Sequence
  Synthetic oligonucleotide; TGG chr11 5313230 5313249 5313246 +
tctgacaaaagtctaatatc

SEQ ID NO: 18812 - DNA, 20 bp, Artificial Sequence
  Synthetic oligonucleotide; GAG chr11 5313232 5313251 5313248 +
tgacaaaagtctaatatctg

SEQ ID NO: 18813 - DNA, 20 bp, Artificial Sequence
  Synthetic oligonucleotide; GAG chr11 5313240 5313259 5313256 +
gtctaatatctggagtctat

SEQ ID NO: 18814 - DNA, 20 bp, Artificial Sequence
  Synthetic oligonucleotide; AGG chr11 5313241 5313260 5313257 +
tctaatatctggagtctatg

SEQ ID NO: 18815 - DNA, 20 bp, Artificial Sequence
  Synthetic oligonucleotide; AAG chr11 5313261 5313280 5313277 +
aggaactaaaacaaatttac

SEQ ID NO: 18816 - DNA, 20 bp, Artificial Sequence
  Synthetic oligonucleotide; AAG chr11 5313284 5313303 5313300 +
aaaaaaacaaccccattaaa

SEQ ID NO: 18817 - DNA, 20 bp, Artificial Sequence
  Synthetic oligonucleotide; TGG chr11 5313287 5313306 5313303 +
aaaacaaccccattaaaaag

SEQ ID NO: 18818 - DNA, 20 bp, Artificial Sequence
  Synthetic oligonucleotide; GGG chr11 5313288 5313307 5313304 +
aaacaaccccattaaaaagt

SEQ ID NO: 18819 - DNA, 20 bp, Artificial Sequence
  Synthetic oligonucleotide; GGG chr11 5313289 5313308 5313305 +
aacaaccccattaaaaagtg

SEQ ID NO: 18820 - DNA, 20 bp, Artificial Sequence
  Synthetic oligonucleotide; TAG chr11 5313303 5313322 5313319 +
aaagtggggaatgacatgaa

SEQ ID NO: 18821 - DNA, 20 bp, Artificial Sequence
  Synthetic oligonucleotide; AAG chr11 5313317 5313336 5313333 +
catgaatagacacttctcta

SEQ ID NO: 18822 - DNA, 20 bp, Artificial Sequence
  Synthetic oligonucleotide; AAG chr11 5313320 5313339 5313336 +
gaatagacacttctctaaag

SEQ ID NO: 18823 - DNA, 20 bp, Artificial Sequence
  Synthetic oligonucleotide; AAG chr11 5313358 5313377 5313374 +
ataaacatatgaaaaaaaaa

SEQ ID NO: 18824 - DNA, 20 bp, Artificial Sequence
  Synthetic oligonucleotide; TGG chr11 5313372 5313391 5313388 +
aaaaaaaagctcaaccttac

SEQ ID NO: 18825 - DNA, 20 bp, Artificial Sequence
  Synthetic oligonucleotide; TAG chr11 5313379 5313398 5313395 +
agctcaaccttactggtcat

SEQ ID NO: 18826 - DNA, 20 bp, Artificial Sequence
  Synthetic oligonucleotide; TGG chr11 5313405 5313424 5313421 +
aatgcaaatcaaaaccacaa

SEQ ID NO: 18827 - DNA, 20 bp, Artificial Sequence
  Synthetic oligonucleotide; GGG chr11 5313406 5313425 5313422 +
atgcaaatcaaaaccacaat

SEQ ID NO: 18828 - DNA, 20 bp, Artificial Sequence
  Synthetic oligonucleotide; CAG chr11 5313423 5313442 5313439 +
aatgggataccatctcacac

SEQ ID NO: 18829 - DNA, 20 bp, Artificial Sequence
  Synthetic oligonucleotide; CAG chr11 5313427 5313446 5313443 +
ggataccatctcacaccagt

SEQ ID NO: 18830 - DNA, 20 bp, Artificial Sequence
  Synthetic oligonucleotide; TGG chr11 5313432 5313451 5313448 +
ccatctcacaccagtcagaa

SEQ ID NO: 18831 - DNA, 20 bp, Artificial Sequence
  Synthetic oligonucleotide; AAG chr11 5313446 5313465 5313462 +
tcagaatggcaattattaaa

SEQ ID NO: 18832 - DNA, 20 bp, Artificial Sequence
  Synthetic oligonucleotide; AAG chr11 5313451 5313470 5313467 +
atggcaattattaaaaagtc

SEQ ID NO: 18833 - DNA, 20 bp, Artificial Sequence
  Synthetic oligonucleotide; CAG chr11 5313460 5313479 5313476 +
attaaaaagtcaagaaacaa

SEQ ID NO: 18834 - DNA, 20 bp, Artificial Sequence
  Synthetic oligonucleotide; TGG chr11 5313467 5313486 5313483 +
agtcaagaaacaacagttgc

SEQ ID NO: 18835 - DNA, 20 bp, Artificial Sequence
  Synthetic oligonucleotide; AAG chr11 5313471 5313490 5313487 +
aagaaacaacagttgctggc

SEQ ID NO: 18836 - DNA, 20 bp, Artificial Sequence
  Synthetic oligonucleotide; AGG chr11 5313472 5313491 5313488 +
agaaacaacagttgctggca

SEQ ID NO: 18837 - DNA, 20 bp, Artificial Sequence
  Synthetic oligonucleotide; CAG chr11 5313478 5313497 5313494 +
aacagttgctggcaaggttg

SEQ ID NO: 18838 - DNA, 20 bp, Artificial Sequence
  Synthetic oligonucleotide; GAG chr11 5313480 5313499 5313496 +
cagttgctggcaaggttgca

SEQ ID NO: 18839 - DNA, 20 bp, Artificial Sequence
  Synthetic oligonucleotide; GAG chr11 5313482 5313501 5313498 +
gttgctggcaaggttgcaga

SEQ ID NO: 18840 - DNA, 20 bp, Artificial Sequence
  Synthetic oligonucleotide; AAG chr11 5313486 5313505 5313502 +
ctggcaaggttgcagagaga

SEQ ID NO: 18841 - DNA, 20 bp, Artificial Sequence
  Synthetic oligonucleotide; AGG chr11 5313487 5313506 5313503 +
tggcaaggttgcagagagaa

SEQ ID NO: 18842 - DNA, 20 bp, Artificial Sequence
  Synthetic oligonucleotide; TGG chr11 5313492 5313511 5313508 +
aggttgcagagagaaaggaa

SEQ ID NO: 18843 - DNA, 20 bp, Artificial Sequence
  Synthetic oligonucleotide; CGG chr11 5313514 5313533 5313530 +
gaatgcttttacactgttaa

SEQ ID NO: 18844 - DNA, 20 bp, Artificial Sequence
  Synthetic oligonucleotide; GGG chr11 5313515 5313534 5313531 +
aatgcttttacactgttaac

SEQ ID NO: 18845 - DNA, 20 bp, Artificial Sequence
  Synthetic oligonucleotide; GAG chr11 5313517 5313536 5313533 +
tgcttttacactgttaacgg

SEQ ID NO: 18846 - DNA, 20 bp, Artificial Sequence
  Synthetic oligonucleotide; GAG chr11 5313519 5313538 5313535 +
cttttacactgttaacggga

SEQ ID NO: 18847 - DNA, 20 bp, Artificial Sequence
  Synthetic oligonucleotide; TAG chr11 5313527 5313546 5313543 +
ctgttaacgggagagtaaat

SEQ ID NO: 18848 - DNA, 20 bp, Artificial Sequence
  Synthetic oligonucleotide; TGG chr11 5313541 5313560 5313557 +
gtaaattagttcaaacattg

SEQ ID NO: 18849 - DNA, 20 bp, Artificial Sequence
  Synthetic oligonucleotide; AAG chr11 5313544 5313563 5313560 +
aattagttcaaacattgtgg

SEQ ID NO: 18850 - DNA, 20 bp, Artificial Sequence
  Synthetic oligonucleotide; GAG chr11 5313546 5313565 5313562 +
ttagttcaaacattgtggaa

SEQ ID NO: 18851 - DNA, 20 bp, Artificial Sequence
  Synthetic oligonucleotide; GAG chr11 5313548 5313567 5313564 +
agttcaaacattgtggaaga

SEQ ID NO: 18852 - DNA, 20 bp, Artificial Sequence
  Synthetic oligonucleotide; TAG chr11 5313553 5313572 5313569 +
aaacattgtggaagagagtg

SEQ ID NO: 18853 - DNA, 20 bp, Artificial Sequence
  Synthetic oligonucleotide; AAG chr11 5313566 5313585 5313582 +
gagagtgtagcctttcctca

SEQ ID NO: 18854 - DNA, 20 bp, Artificial Sequence
  Synthetic oligonucleotide; TAG chr11 5313572 5313591 5313588 +
gtagcctttcctcaaagatg

SEQ ID NO: 18855 - DNA, 20 bp, Artificial Sequence
  Synthetic oligonucleotide; AAG chr11 5313575 5313594 5313591 +
gcctttcctcaaagatgtag

SEQ ID NO: 18856 - DNA, 20 bp, Artificial Sequence
  Synthetic oligonucleotide; CAG chr11 5313578 5313597 5313594 +
tttcctcaaagatgtagaag

SEQ ID NO: 18857 - DNA, 20 bp, Artificial Sequence
  Synthetic oligonucleotide; CAG chr11 5313596 5313615 5313612 +
agcagaaataccacttgact

SEQ ID NO: 18858 - DNA, 20 bp, Artificial Sequence
  Synthetic oligonucleotide; TGG chr11 5313611 5313630 5313627 +
tgactcagcaatctcattac

SEQ ID NO: 18859 - DNA, 20 bp, Artificial Sequence
  Synthetic oligonucleotide; GGG chr11 5313612 5313631 5313628 +
gactcagcaatctcattact

SEQ ID NO: 18860 - DNA, 20 bp, Artificial Sequence
  Synthetic oligonucleotide; AAG chr11 5313625 5313644 5313641 +
cattactgggtatataccca

SEQ ID NO: 18861 - DNA, 20 bp, Artificial Sequence
  Synthetic oligonucleotide; AGG chr11 5313626 5313645 5313642 +
attactgggtatatacccaa

SEQ ID NO: 18862 - DNA, 20 bp, Artificial Sequence
  Synthetic oligonucleotide; CAG chr11 5313656 5313675 5313672 +
atcaatctattataaaaata

SEQ ID NO: 18863 - DNA, 20 bp, Artificial Sequence
  Synthetic oligonucleotide; AGG chr11 5313657 5313676 5313673 +
tcaatctattataaaaatac

SEQ ID NO: 18864 - DNA, 20 bp, Artificial Sequence
  Synthetic oligonucleotide; CAG chr11 5313677 5313696 5313693 +
aggcatgcttatgttcattg

SEQ ID NO: 18865 - DNA, 20 bp, Artificial Sequence
  Synthetic oligonucleotide; TAG chr11 5313692 5313711 5313708 +
cattgcagcattattcataa

SEQ ID NO: 18866 - DNA, 20 bp, Artificial Sequence
  Synthetic oligonucleotide; AAG chr11 5313697 5313716 5313713 +
cagcattattcataatagcc

SEQ ID NO: 18867 - DNA, 20 bp, Artificial Sequence
  Synthetic oligonucleotide; TGG chr11 5313703 5313722 5313719 +
tattcataatagccaagatg

SEQ ID NO: 18868 - DNA, 20 bp, Artificial Sequence
  Synthetic oligonucleotide; TAG chr11 5313731 5313750 5313747 +
acccaaatgtccatcaatga

SEQ ID NO: 18869 - DNA, 20 bp, Artificial Sequence
  Synthetic oligonucleotide; GAG chr11 5313733 5313752 5313749 +
ccaaatgtccatcaatgata

SEQ ID NO: 18870 - DNA, 20 bp, Artificial Sequence
  Synthetic oligonucleotide; TGG chr11 5313736 5313755 5313752 +
aatgtccatcaatgatagag

SEQ ID NO: 18871 - DNA, 20 bp, Artificial Sequence
  Synthetic oligonucleotide; AAG chr11 5313742 5313761 5313758 +
catcaatgatagagtggata

SEQ ID NO: 18872 - DNA, 20 bp, Artificial Sequence
  Synthetic oligonucleotide; TGG chr11 5313751 5313770 5313767 +
tagagtggataaagaaaacg

SEQ ID NO: 18873 - DNA, 20 bp, Artificial Sequence
  Synthetic oligonucleotide; TGG chr11 5313767 5313786 5313783 +
aacgtggtacatatatacca

SEQ ID NO: 18874 - DNA, 20 bp, Artificial Sequence
  Synthetic oligonucleotide; CAG chr11 5313779 5313798 5313795 +
atataccatggaatactata

SEQ ID NO: 18875 - DNA, 20 bp, Artificial Sequence
  Synthetic oligonucleotide; AAG chr11 5313789 5313808 5313805 +
gaatactatacagccataaa

SEQ ID NO: 18876 - DNA, 20 bp, Artificial Sequence
  Synthetic oligonucleotide; AGG chr11 5313790 5313809 5313806 +
aatactatacagccataaaa

SEQ ID NO: 18877 - DNA, 20 bp, Artificial Sequence
  Synthetic oligonucleotide; AAG chr11 5313795 5313814 5313811 +
tatacagccataaaaaggaa

SEQ ID NO: 18878 - DNA, 20 bp, Artificial Sequence
  Synthetic oligonucleotide; AGG chr11 5313796 5313815 5313812 +
atacagccataaaaaggaaa

SEQ ID NO: 18879 - DNA, 20 bp, Artificial Sequence
  Synthetic oligonucleotide; CAG chr11 5313812 5313831 5313828 +
gaaaaggattgtgttccttg

SEQ ID NO: 18880 - DNA, 20 bp, Artificial Sequence
  Synthetic oligonucleotide; AGG chr11 5313813 5313832 5313829 +
aaaaggattgtgttccttgc

SEQ ID NO: 18881 - DNA, 20 bp, Artificial Sequence
  Synthetic oligonucleotide; GGG chr11 5313814 5313833 5313830 +
aaaggattgtgttccttgca

SEQ ID NO: 18882 - DNA, 20 bp, Artificial Sequence
  Synthetic oligonucleotide; TGG chr11 5313824 5313843 5313840 +
gttccttgcagggacatgaa

SEQ ID NO: 18883 - DNA, 20 bp, Artificial Sequence
  Synthetic oligonucleotide; GAG chr11 5313826 5313845 5313842 +
tccttgcagggacatgaatg

SEQ ID NO: 18884 - DNA, 20 bp, Artificial Sequence
  Synthetic oligonucleotide; TGG chr11 5313830 5313849 5313846 +
tgcagggacatgaatggagc

SEQ ID NO: 18885 - DNA, 20 bp, Artificial Sequence
  Synthetic oligonucleotide; AAG chr11 5313833 5313852 5313849 +
agggacatgaatggagctgg

SEQ ID NO: 18886 - DNA, 20 bp, Artificial Sequence
  Synthetic oligonucleotide; CAG chr11 5313859 5313878 5313875 +
ttatcctcatcaaactaaca

SEQ ID NO: 18887 - DNA, 20 bp, Artificial Sequence
  Synthetic oligonucleotide; AGG chr11 5313860 5313879 5313876 +
tatcctcatcaaactaacac

SEQ ID NO: 18888 - DNA, 20 bp, Artificial Sequence
  Synthetic oligonucleotide; CAG chr11 5313865 5313884 5313881 +
tcatcaaactaacacaggaa

SEQ ID NO: 18889 - DNA, 20 bp, Artificial Sequence
  Synthetic oligonucleotide; CAG chr11 5313893 5313912 5313909 +
caaacacacatgttctcaca

SEQ ID NO: 18890 - DNA, 20 bp, Artificial Sequence
  Synthetic oligonucleotide; TGG chr11 5313899 5313918 5313915 +
cacatgttctcacacagaaa

SEQ ID NO: 18891 - DNA, 20 bp, Artificial Sequence
  Synthetic oligonucleotide; GGG chr11 5313900 5313919 5313916 +
acatgttctcacacagaaat

SEQ ID NO: 18892 - DNA, 20 bp, Artificial Sequence
  Synthetic oligonucleotide; GAG chr11 5313902 5313921 5313918 +
atgttctcacacagaaatgg

SEQ ID NO: 18893 - DNA, 20 bp, Artificial Sequence
  Synthetic oligonucleotide; CAG chr11 5313910 5313929 5313926 +
acacagaaatgggagctgaa

SEQ ID NO: 18894 - DNA, 20 bp, Artificial Sequence
  Synthetic oligonucleotide; GAG chr11 5313914 5313933 5313930 +
agaaatgggagctgaacagt

SEQ ID NO: 18895 - DNA, 20 bp, Artificial Sequence
  Synthetic oligonucleotide; TGG chr11 5313923 5313942 5313939 +
agctgaacagtgagaacaca

SEQ ID NO: 18896 - DNA, 20 bp, Artificial Sequence
  Synthetic oligonucleotide; TGG chr11 5313933 5313952 5313949 +
tgagaacacatggacacttg

SEQ ID NO: 18897 - DNA, 20 bp, Artificial Sequence
  Synthetic oligonucleotide; GGG chr11 5313934 5313953 5313950 +
gagaacacatggacacttgt

SEQ ID NO: 18898 - DNA, 20 bp, Artificial Sequence
  Synthetic oligonucleotide; GGG chr11 5313935 5313954 5313951 +
agaacacatggacacttgtg

SEQ ID NO: 18899 - DNA, 20 bp, Artificial Sequence
  Synthetic oligonucleotide; CAG chr11 5313949 5313968 5313965 +
cttgtggggaacaacacaca

SEQ ID NO: 18900 - DNA, 20 bp, Artificial Sequence
  Synthetic oligonucleotide; AGG chr11 5313950 5313969 5313966 +
ttgtggggaacaacacacac

SEQ ID NO: 18901 - DNA, 20 bp, Artificial Sequence
  Synthetic oligonucleotide; GGG chr11 5313951 5313970 5313967 +
tgtggggaacaacacacaca

SEQ ID NO: 18902 - DNA, 20 bp, Artificial Sequence
  Synthetic oligonucleotide; GGG chr11 5313952 5313971 5313968 +
gtggggaacaacacacacag

SEQ ID NO: 18903 - DNA, 20 bp, Artificial Sequence
  Synthetic oligonucleotide; CGG chr11 5313961 5313980 5313977 +
aacacacacaggggcctgtc

SEQ ID NO: 18904 - DNA, 20 bp, Artificial Sequence
  Synthetic oligonucleotide; TAG chr11 5313964 5313983 5313980 +
acacacaggggcctgtccgg

SEQ ID NO: 18905 - DNA, 20 bp, Artificial Sequence
  Synthetic oligonucleotide; TGG chr11 5313967 5313986 5313983 +
cacaggggcctgtccggtag

SEQ ID NO: 18906 - DNA, 20 bp, Artificial Sequence
  Synthetic oligonucleotide; GGG chr11 5313968 5313987 5313984 +
acaggggcctgtccggtagt

SEQ ID NO: 18907 - DNA, 20 bp, Artificial Sequence
  Synthetic oligonucleotide; TGG chr11 5313971 5313990 5313987 +
ggggcctgtccggtagtggg

SEQ ID NO: 18908 - DNA, 20 bp, Artificial Sequence
  Synthetic oligonucleotide; GGG chr11 5313972 5313991 5313988 +
gggcctgtccggtagtgggt

SEQ ID NO: 18909 - DNA, 20 bp, Artificial Sequence
  Synthetic oligonucleotide; GGG chr11 5313973 5313992 5313989 +
ggcctgtccggtagtgggtg

SEQ ID NO: 18910 - DNA, 20 bp, Artificial Sequence
  Synthetic oligonucleotide; GAG chr11 5313975 5313994 5313991 +
cctgtccggtagtgggtggg

SEQ ID NO: 18911 - DNA, 20 bp, Artificial Sequence
  Synthetic oligonucleotide; AGG chr11 5313976 5313995 5313992 +
ctgtccggtagtgggtgggg

SEQ ID NO: 18912 - DNA, 20 bp, Artificial Sequence
  Synthetic oligonucleotide; GAG chr11 5313978 5313997 5313994 +
gtccggtagtgggtggggag

SEQ ID NO: 18913 - DNA, 20 bp, Artificial Sequence
  Synthetic oligonucleotide; GAG chr11 5313980 5313999 5313996 +
ccggtagtgggtggggagga

SEQ ID NO: 18914 - DNA, 20 bp, Artificial Sequence
  Synthetic oligonucleotide; AGG chr11 5313981 5314000 5313997 +
cggtagtgggtggggaggag

SEQ ID NO: 18915 - DNA, 20 bp, Artificial Sequence
  Synthetic oligonucleotide; GGG chr11 5313982 5314001 5313998 +
ggtagtgggtggggaggaga

SEQ ID NO: 18916 - DNA, 20 bp, Artificial Sequence
  Synthetic oligonucleotide; GAG chr11 5313984 5314003 5314000 +
tagtgggtggggaggagagg

SEQ ID NO: 18917 - DNA, 20 bp, Artificial Sequence
  Synthetic oligonucleotide; GAG chr11 5313986 5314005 5314002 +
gtgggtggggaggagaggga

SEQ ID NO: 18918 - DNA, 20 bp, Artificial Sequence
  Synthetic oligonucleotide; CAG chr11 5313992 5314011 5314008 +
ggggaggagagggagagcac

SEQ ID NO: 18919 - DNA, 20 bp, Artificial Sequence
  Synthetic oligonucleotide; AGG chr11 5313993 5314012 5314009 +
gggaggagagggagagcacc

SEQ ID NO: 18920 - DNA, 20 bp, Artificial Sequence
  Synthetic oligonucleotide; AAG chr11 5313996 5314015 5314012 +
aggagagggagagcaccagg

SEQ ID NO: 18921 - DNA, 20 bp, Artificial Sequence
  Synthetic oligonucleotide; TAG chr11 5314001 5314020 5314017 +
agggagagcaccaggaagaa

SEQ ID NO: 18922 - DNA, 20 bp, Artificial Sequence
  Synthetic oligonucleotide; CAG chr11 5314014 5314033 5314030 +
ggaagaatagctaacgaatg

SEQ ID NO: 18923 - DNA, 20 bp, Artificial Sequence
  Synthetic oligonucleotide; TGG chr11 5314027 5314046 5314043 +
acgaatgcagcaaacctgca

SEQ ID NO: 18924 - DNA, 20 bp, Artificial Sequence
  Synthetic oligonucleotide; TGG chr11 5314077 5314096 5314093 +
cacatcctgcacatgtgccc

SEQ ID NO: 18925 - DNA, 20 bp, Artificial Sequence
  Synthetic oligonucleotide; TGG chr11 5314099 5314118 5314115 +
gaacttaaaatatattatgt

SEQ ID NO: 18926 - DNA, 20 bp, Artificial Sequence
  Synthetic oligonucleotide; AAG chr11 5314107 5314126 5314123 +
aatatattatgttggtacaa

SEQ ID NO: 18927 - DNA, 20 bp, Artificial Sequence
  Synthetic oligonucleotide; AAG chr11 5314150 5314169 5314166 +
tacctttgcacctacctaat

SEQ ID NO: 18928 - DNA, 20 bp, Artificial Sequence
  Synthetic oligonucleotide; AAG chr11 5314156 5314175 5314172 +
tgcacctacctaataagttg

SEQ ID NO: 18929 - DNA, 20 bp, Artificial Sequence
  Synthetic oligonucleotide; AGG chr11 5314157 5314176 5314173 +
gcacctacctaataagttga

SEQ ID NO: 18930 - DNA, 20 bp, Artificial Sequence
  Synthetic oligonucleotide; AAG chr11 5314193 5314212 5314209 +
ttttaaaaaaaaaaaaaaaa

SEQ ID NO: 18931 - DNA, 20 bp, Artificial Sequence
  Synthetic oligonucleotide; AGG chr11 5314194 5314213 5314210 +
tttaaaaaaaaaaaaaaaaa

SEQ ID NO: 18932 - DNA, 20 bp, Artificial Sequence
  Synthetic oligonucleotide; TAG chr11 5314213 5314232 5314229 +
aaggaaaatctaccctgaaa

SEQ ID NO: 18933 - DNA, 20 bp, Artificial Sequence
  Synthetic oligonucleotide; GAG chr11 5314215 5314234 5314231 +
ggaaaatctaccctgaaata

SEQ ID NO: 18934 - DNA, 20 bp, Artificial Sequence
  Synthetic oligonucleotide; TAG chr11 5314218 5314237 5314234 +
aaatctaccctgaaatagag

SEQ ID NO: 18935 - DNA, 20 bp, Artificial Sequence
  Synthetic oligonucleotide; GAG chr11 5314225 5314244 5314241 +
ccctgaaatagagtagtttt

SEQ ID NO: 18936 - DNA, 20 bp, Artificial Sequence
  Synthetic oligonucleotide; TAG chr11 5314232 5314251 5314248 +
atagagtagttttgagatta

SEQ ID NO: 18937 - DNA, 20 bp, Artificial Sequence
  Synthetic oligonucleotide; TAG chr11 5314235 5314254 5314251 +
gagtagttttgagattatag

SEQ ID NO: 18938 - DNA, 20 bp, Artificial Sequence
  Synthetic oligonucleotide; GAG chr11 5314237 5314256 5314253 +
gtagttttgagattatagta

SEQ ID NO: 18939 - DNA, 20 bp, Artificial Sequence
  Synthetic oligonucleotide; TGG chr11 5314280 5314299 5314296 +
tgctataattcatctttata

SEQ ID NO: 18940 - DNA, 20 bp, Artificial Sequence
  Synthetic oligonucleotide; TAG chr11 5314290 5314309 5314306 +
catctttatatggccaaaac

SEQ ID NO: 18941 - DNA, 20 bp, Artificial Sequence
  Synthetic oligonucleotide; TAG chr11 5314320 5314339 5314336 +
attgcacatttttccttctg

SEQ ID NO: 18942 - DNA, 20 bp, Artificial Sequence
  Synthetic oligonucleotide; AGG chr11 5314321 5314340 5314337 +
ttgcacatttttccttctgt

SEQ ID NO: 18943 - DNA, 20 bp, Artificial Sequence
  Synthetic oligonucleotide; TGG chr11 5314327 5314346 5314343 +
atttttccttctgtaggctt

SEQ ID NO: 18944 - DNA, 20 bp, Artificial Sequence
  Synthetic oligonucleotide; TAG chr11 5314336 5314355 5314352 +
tctgtaggctttggttgaac

SEQ ID NO: 18945 - DNA, 20 bp, Artificial Sequence
  Synthetic oligonucleotide; TGG chr11 5314341 5314360 5314357 +
aggctttggttgaactagac

SEQ ID NO: 18946 - DNA, 20 bp, Artificial Sequence
  Synthetic oligonucleotide; TGG chr11 5314364 5314383 5314380 +
ccacttgactcttcctaaaa

SEQ ID NO: 18947 - DNA, 20 bp, Artificial Sequence
  Synthetic oligonucleotide; CAG chr11 5314373 5314392 5314389 +
tcttcctaaaatggtacttt

SEQ ID NO: 18948 - DNA, 20 bp, Artificial Sequence
  Synthetic oligonucleotide; CAG chr11 5314388 5314407 5314404 +
actttcagttcttatgaata

SEQ ID NO: 18949 - DNA, 20 bp, Artificial Sequence
  Synthetic oligonucleotide; AGG chr11 5314389 5314408 5314405 +
ctttcagttcttatgaatac

SEQ ID NO: 18950 - DNA, 20 bp, Artificial Sequence
  Synthetic oligonucleotide; TAG chr11 5314421 5314440 5314437 +
accatattttccctgattat

SEQ ID NO: 18951 - DNA, 20 bp, Artificial Sequence
  Synthetic oligonucleotide; AGG chr11 5314422 5314441 5314438 +
ccatattttccctgattatt

SEQ ID NO: 18952 - DNA, 20 bp, Artificial Sequence
  Synthetic oligonucleotide; GGG chr11 5314423 5314442 5314439 +
catattttccctgattatta

SEQ ID NO: 18953 - DNA, 20 bp, Artificial Sequence
  Synthetic oligonucleotide; TAG chr11 5314458 5314477 5314474 +
tgttttatctccatattcaa

SEQ ID NO: 18954 - DNA, 20 bp, Artificial Sequence
  Synthetic oligonucleotide; TAG chr11 5314474 5314493 5314490 +
tcaatagtattccactttcc

SEQ ID NO: 18955 - DNA, 20 bp, Artificial Sequence
  Synthetic oligonucleotide; TAG chr11 5314487 5314506 5314503 +
actttcctagtatctctcaa

SEQ ID NO: 18956 - DNA, 20 bp, Artificial Sequence
  Synthetic oligonucleotide; TAG chr11 5314491 5314510 5314507 +
tcctagtatctctcaataga

SEQ ID NO: 18957 - DNA, 20 bp, Artificial Sequence
  Synthetic oligonucleotide; AGG chr11 5314492 5314511 5314508 +
cctagtatctctcaatagat

SEQ ID NO: 18958 - DNA, 20 bp, Artificial Sequence
  Synthetic oligonucleotide; TAG chr11 5314502 5314521 5314518 +
ctcaatagataggtaaatta

SEQ ID NO: 18959 - DNA, 20 bp, Artificial Sequence
  Synthetic oligonucleotide; AAG chr11 5314522 5314541 5314538 +
tagatatatctccctcgata

SEQ ID NO: 18960 - DNA, 20 bp, Artificial Sequence
  Synthetic oligonucleotide; TGG chr11 5314588 5314607 5314604 +
tttatcaattgatcaattga

SEQ ID NO: 18961 - DNA, 20 bp, Artificial Sequence
  Synthetic oligonucleotide; TAG chr11 5314618 5314637 5314634 +
cattgtattattgttccatg

SEQ ID NO: 18962 - DNA, 20 bp, Artificial Sequence
  Synthetic oligonucleotide; TAG chr11 5314631 5314650 5314647 +
ttccatgtagcttttcactt

SEQ ID NO: 18963 - DNA, 20 bp, Artificial Sequence
  Synthetic oligonucleotide; TAG chr11 5314638 5314657 5314654 +
tagcttttcactttagataa

SEQ ID NO: 18964 - DNA, 20 bp, Artificial Sequence
  Synthetic oligonucleotide; AAG chr11 5314644 5314663 5314660 +
ttcactttagataatagtta

SEQ ID NO: 18965 - DNA, 20 bp, Artificial Sequence
  Synthetic oligonucleotide; AAG chr11 5314665 5314684 5314681 +
agcctatctaacactgatac

SEQ ID NO: 18966 - DNA, 20 bp, Artificial Sequence
  Synthetic oligonucleotide; GAG chr11 5314667 5314686 5314683 +
cctatctaacactgatacaa

SEQ ID NO: 18967 - DNA, 20 bp, Artificial Sequence
  Synthetic oligonucleotide; TGG chr11 5314674 5314693 5314690 +
aacactgatacaagagatat

SEQ ID NO: 18968 - DNA, 20 bp, Artificial Sequence
  Synthetic oligonucleotide; GGG chr11 5314675 5314694 5314691 +
acactgatacaagagatatt

SEQ ID NO: 18969 - DNA, 20 bp, Artificial Sequence
  Synthetic oligonucleotide; AAG chr11 5314686 5314705 5314702 +
agagatattgggtataaaat

SEQ ID NO: 18970 - DNA, 20 bp, Artificial Sequence
  Synthetic oligonucleotide; AAG chr11 5314708 5314727 5314724 +
gctcctttccaattactcaa

SEQ ID NO: 18971 - DNA, 20 bp, Artificial Sequence
  Synthetic oligonucleotide; AGG chr11 5314709 5314728 5314725 +
ctcctttccaattactcaaa

SEQ ID NO: 18972 - DNA, 20 bp, Artificial Sequence
  Synthetic oligonucleotide; CAG chr11 5314714 5314733 5314730 +
ttccaattactcaaaaggcc

SEQ ID NO: 18973 - DNA, 20 bp, Artificial Sequence
  Synthetic oligonucleotide; AAG chr11 5314725 5314744 5314741 +
caaaaggcccagaaatcatg

SEQ ID NO: 18974 - DNA, 20 bp, Artificial Sequence
  Synthetic oligonucleotide; AAG chr11 5314746 5314765 5314762 +
agatcacaaaattctgaaaa

SEQ ID NO: 18975 - DNA, 20 bp, Artificial Sequence
  Synthetic oligonucleotide; AGG chr11 5314747 5314766 5314763 +
gatcacaaaattctgaaaaa

SEQ ID NO: 18976 - DNA, 20 bp, Artificial Sequence
  Synthetic oligonucleotide; GGG chr11 5314748 5314767 5314764 +
atcacaaaattctgaaaaaa

SEQ ID NO: 18977 - DNA, 20 bp, Artificial Sequence
  Synthetic oligonucleotide; AAG chr11 5314754 5314773 5314770 +
aaattctgaaaaaagggctc

SEQ ID NO: 18978 - DNA, 20 bp, Artificial Sequence
  Synthetic oligonucleotide; CAG chr11 5314769 5314788 5314785 +
ggctcaagccattctgtgcc

SEQ ID NO: 18979 - DNA, 20 bp, Artificial Sequence
  Synthetic oligonucleotide; TAG chr11 5314776 5314795 5314792 +
gccattctgtgcccagaaaa

SEQ ID NO: 18980 - DNA, 20 bp, Artificial Sequence
  Synthetic oligonucleotide; AGG chr11 5314777 5314796 5314793 +
ccattctgtgcccagaaaat

SEQ ID NO: 18981 - DNA, 20 bp, Artificial Sequence
  Synthetic oligonucleotide; TGG chr11 5314795 5314814 5314811 +
ataggcgaacaatgcttctt

SEQ ID NO: 18982 - DNA, 20 bp, Artificial Sequence
  Synthetic oligonucleotide; TGG chr11 5314805 5314824 5314821 +
aatgcttctttggatctgct

SEQ ID NO: 18983 - DNA, 20 bp, Artificial Sequence
  Synthetic oligonucleotide; TAG chr11 5314825 5314844 5314841 +
tggtttgatgctgtatataa

SEQ ID NO: 18984 - DNA, 20 bp, Artificial Sequence
  Synthetic oligonucleotide; AGG chr11 5314826 5314845 5314842 +
ggtttgatgctgtatataat

SEQ ID NO: 18985 - DNA, 20 bp, Artificial Sequence
  Synthetic oligonucleotide; GGG chr11 5314827 5314846 5314843 +
gtttgatgctgtatataata

SEQ ID NO: 18986 - DNA, 20 bp, Artificial Sequence
  Synthetic oligonucleotide; TGG chr11 5314838 5314857 5314854 +
tatataatagggttcatgaa

SEQ ID NO: 18987 - DNA, 20 bp, Artificial Sequence
  Synthetic oligonucleotide; GAG chr11 5314840 5314859 5314856 +
tataatagggttcatgaatg

SEQ ID NO: 18988 - DNA, 20 bp, Artificial Sequence
  Synthetic oligonucleotide; AGG chr11 5314841 5314860 5314857 +
ataatagggttcatgaatgg

SEQ ID NO: 18989 - DNA, 20 bp, Artificial Sequence
  Synthetic oligonucleotide; AAG chr11 5314847 5314866 5314863 +
gggttcatgaatggaggaaa

SEQ ID NO: 18990 - DNA, 20 bp, Artificial Sequence
  Synthetic oligonucleotide; GAG chr11 5314854 5314873 5314870 +
tgaatggaggaaaaagaaat

SEQ ID NO: 18991 - DNA, 20 bp, Artificial Sequence
  Synthetic oligonucleotide; TAG chr11 5314861 5314880 5314877 +
aggaaaaagaaatgagtcat

SEQ ID NO: 18992 - DNA, 20 bp, Artificial Sequence
  Synthetic oligonucleotide; CGG chr11 5314868 5314887 5314884 +
agaaatgagtcattagctca

SEQ ID NO: 18993 - DNA, 20 bp, Artificial Sequence
  Synthetic oligonucleotide; TGG chr11 5314887 5314906 5314903 +
acggtaatgtgcaccacatg

SEQ ID NO: 18994 - DNA, 20 bp, Artificial Sequence
  Synthetic oligonucleotide; AAG chr11 5314916 5314935 5314932 +
tttcccaaacctgtgaatga

SEQ ID NO: 18995 - DNA, 20 bp, Artificial Sequence
  Synthetic oligonucleotide; CGG chr11 5314931 5314950 5314947 +
aatgaaagtctcactgatca

SEQ ID NO: 18996 - DNA, 20 bp, Artificial Sequence
  Synthetic oligonucleotide; AAG chr11 5314948 5314967 5314964 +
tcacggtgatgtgaaatacc

SEQ ID NO: 18997 - DNA, 20 bp, Artificial Sequence
  Synthetic oligonucleotide; CAG chr11 5314954 5314973 5314970 +
tgatgtgaaataccaagaca

SEQ ID NO: 18998 - DNA, 20 bp, Artificial Sequence
  Synthetic oligonucleotide; TGG chr11 5314963 5314982 5314979 +
ataccaagacacagctgata

SEQ ID NO: 18999 - DNA, 20 bp, Artificial Sequence
  Synthetic oligonucleotide; GGG chr11 5314964 5314983 5314980 +
taccaagacacagctgatat

SEQ ID NO: 19000 - DNA, 20 bp, Artificial Sequence
  Synthetic oligonucleotide; GAG chr11 5314966 5314985 5314982 +
ccaagacacagctgatatgg

SEQ ID NO: 19001 - DNA, 20 bp, Artificial Sequence
  Synthetic oligonucleotide; GAG chr11 5314980 5314999 5314996 +
atatgggagacacacatgtt

SEQ ID NO: 19002 - DNA, 20 bp, Artificial Sequence
  Synthetic oligonucleotide; GAG chr11 5314982 5315001 5314998 +
atgggagacacacatgttga

SEQ ID NO: 19003 - DNA, 20 bp, Artificial Sequence
  Synthetic oligonucleotide; TGG chr11 5314988 5315007 5315004 +
gacacacatgttgagagctt

SEQ ID NO: 19004 - DNA, 20 bp, Artificial Sequence
  Synthetic oligonucleotide; TGG chr11 5315003 5315022 5315019 +
agctttggcttgctcttttc

SEQ ID NO: 19005 - DNA, 20 bp, Artificial Sequence
  Synthetic oligonucleotide; GAG chr11 5315005 5315024 5315021 +
ctttggcttgctcttttctg

SEQ ID NO: 19006 - DNA, 20 bp, Artificial Sequence
  Synthetic oligonucleotide; AGG chr11 5315006 5315025 5315022 +
tttggcttgctcttttctgg

SEQ ID NO: 19007 - DNA, 20 bp, Artificial Sequence
  Synthetic oligonucleotide; AAG chr11 5315028 5315047 5315044 +
gcaatacctttaactgtttt

SEQ ID NO: 19008 - DNA, 20 bp, Artificial Sequence
  Synthetic oligonucleotide; AGG chr11 5315029 5315048 5315045 +
caatacctttaactgtttta

SEQ ID NO: 19009 - DNA, 20 bp, Artificial Sequence
  Synthetic oligonucleotide; CAG chr11 5315034 5315053 5315050 +
cctttaactgttttaaggat

SEQ ID NO: 19010 - DNA, 20 bp, Artificial Sequence
  Synthetic oligonucleotide; AGG chr11 5315035 5315054 5315051 +
ctttaactgttttaaggatc

SEQ ID NO: 19011 - DNA, 20 bp, Artificial Sequence
  Synthetic oligonucleotide; AAG chr11 5315042 5315061 5315058 +
tgttttaaggatcaggatat

SEQ ID NO: 19012 - DNA, 20 bp, Artificial Sequence
  Synthetic oligonucleotide; AAG chr11 5315047 5315066 5315063 +
taaggatcaggatataagaa

SEQ ID NO: 19013 - DNA, 20 bp, Artificial Sequence
  Synthetic oligonucleotide; CAG chr11 5315058 5315077 5315074 +
atataagaaaagacaatgat

SEQ ID NO: 19014 - DNA, 20 bp, Artificial Sequence
  Synthetic oligonucleotide; GAG chr11 5315060 5315079 5315076 +
ataagaaaagacaatgatca

SEQ ID NO: 19015 - DNA, 20 bp, Artificial Sequence
  Synthetic oligonucleotide; TAG chr11 5315067 5315086 5315083 +
aagacaatgatcagagcgtc

SEQ ID NO: 19016 - DNA, 20 bp, Artificial Sequence
  Synthetic oligonucleotide; AGG chr11 5315068 5315087 5315084 +
agacaatgatcagagcgtct

SEQ ID NO: 19017 - DNA, 20 bp, Artificial Sequence
  Synthetic oligonucleotide; AAG chr11 5315071 5315090 5315087 +
caatgatcagagcgtctagg

SEQ ID NO: 19018 - DNA, 20 bp, Artificial Sequence
  Synthetic oligonucleotide; AAG chr11 5315081 5315100 5315097 +
agcgtctaggaagaaaatca

SEQ ID NO: 19019 - DNA, 20 bp, Artificial Sequence
  Synthetic oligonucleotide; CAG chr11 5315088 5315107 5315104 +
aggaagaaaatcaaagcaac

SEQ ID NO: 19020 - DNA, 20 bp, Artificial Sequence
  Synthetic oligonucleotide; TAG chr11 5315093 5315112 5315109 +
gaaaatcaaagcaaccagaa

SEQ ID NO: 19021 - DNA, 20 bp, Artificial Sequence
  Synthetic oligonucleotide; TGG chr11 5315097 5315116 5315113 +
atcaaagcaaccagaatagc

SEQ ID NO: 19022 - DNA, 20 bp, Artificial Sequence
  Synthetic oligonucleotide; GGG chr11 5315098 5315117 5315114 +
tcaaagcaaccagaatagct

SEQ ID NO: 19023 - DNA, 20 bp, Artificial Sequence
  Synthetic oligonucleotide; AAG chr11 5315104 5315123 5315120 +
caaccagaatagctgggtat

SEQ ID NO: 19024 - DNA, 20 bp, Artificial Sequence
  Synthetic oligonucleotide; CAG chr11 5315123 5315142 5315139 +
taagtgattgaatgtaatat

SEQ ID NO: 19025 - DNA, 20 bp, Artificial Sequence
  Synthetic oligonucleotide; CAG chr11 5315128 5315147 5315144 +
gattgaatgtaatatcagca

SEQ ID NO: 19026 - DNA, 20 bp, Artificial Sequence
  Synthetic oligonucleotide; AGG chr11 5315129 5315148 5315145 +
attgaatgtaatatcagcac

SEQ ID NO: 19027 - DNA, 20 bp, Artificial Sequence
  Synthetic oligonucleotide; AAG chr11 5315133 5315152 5315149 +
aatgtaatatcagcacaggc

SEQ ID NO: 19028 - DNA, 20 bp, Artificial Sequence
  Synthetic oligonucleotide; CAG chr11 5315139 5315158 5315155 +
atatcagcacaggcaagttt

SEQ ID NO: 19029 - DNA, 20 bp, Artificial Sequence
  Synthetic oligonucleotide; AGG chr11 5315140 5315159 5315156 +
tatcagcacaggcaagtttc

SEQ ID NO: 19030 - DNA, 20 bp, Artificial Sequence
  Synthetic oligonucleotide; TGG chr11 5315152 5315171 5315168 +
caagtttcaggacatcttga

SEQ ID NO: 19031 - DNA, 20 bp, Artificial Sequence
  Synthetic oligonucleotide; GAG chr11 5315154 5315173 5315170 +
agtttcaggacatcttgatg

SEQ ID NO: 19032 - DNA, 20 bp, Artificial Sequence
  Synthetic oligonucleotide; AAG chr11 5315161 5315180 5315177 +
ggacatcttgatggagaaaa

SEQ ID NO: 19033 - DNA, 20 bp, Artificial Sequence
  Synthetic oligonucleotide; AGG chr11 5315162 5315181 5315178 +
gacatcttgatggagaaaaa

SEQ ID NO: 19034 - DNA, 20 bp, Artificial Sequence
  Synthetic oligonucleotide; TGG chr11 5315167 5315186 5315183 +
cttgatggagaaaaaaggtg

SEQ ID NO: 19035 - DNA, 20 bp, Artificial Sequence
  Synthetic oligonucleotide; AAG chr11 5315170 5315189 5315186 +
gatggagaaaaaaggtgtgg

SEQ ID NO: 19036 - DNA, 20 bp, Artificial Sequence
  Synthetic oligonucleotide; GAG chr11 5315172 5315191 5315188 +
tggagaaaaaaggtgtggaa

SEQ ID NO: 19037 - DNA, 20 bp, Artificial Sequence
  Synthetic oligonucleotide; TGG chr11 5315179 5315198 5315195 +
aaaaggtgtggaagagaaca

SEQ ID NO: 19038 - DNA, 20 bp, Artificial Sequence
  Synthetic oligonucleotide; GGG chr11 5315180 5315199 5315196 +
aaaggtgtggaagagaacat

SEQ ID NO: 19039 - DNA, 20 bp, Artificial Sequence
  Synthetic oligonucleotide; TGG chr11 5315193 5315212 5315209 +
agaacatgggaatgacaata

SEQ ID NO: 19040 - DNA, 20 bp, Artificial Sequence
  Synthetic oligonucleotide; GGG chr11 5315194 5315213 5315210 +
gaacatgggaatgacaatat

SEQ ID NO: 19041 - DNA, 20 bp, Artificial Sequence
  Synthetic oligonucleotide; AAG chr11 5315197 5315216 5315213 +
catgggaatgacaatatggg

SEQ ID NO: 19042 - DNA, 20 bp, Artificial Sequence
  Synthetic oligonucleotide; TGG chr11 5315203 5315222 5315219 +
aatgacaatatgggaagcaa

SEQ ID NO: 19043 - DNA, 20 bp, Artificial Sequence
  Synthetic oligonucleotide; GAG chr11 5315205 5315224 5315221 +
tgacaatatgggaagcaatg

SEQ ID NO: 19044 - DNA, 20 bp, Artificial Sequence
  Synthetic oligonucleotide; TGG chr11 5315208 5315227 5315224 +
caatatgggaagcaatggag

SEQ ID NO: 19045 - DNA, 20 bp, Artificial Sequence
  Synthetic oligonucleotide; CAG chr11 5315211 5315230 5315227 +
tatgggaagcaatggagtgg

SEQ ID NO: 19046 - DNA, 20 bp, Artificial Sequence
  Synthetic oligonucleotide; TGG chr11 5315217 5315236 5315233 +
aagcaatggagtggcagaat

SEQ ID NO: 19047 - DNA, 20 bp, Artificial Sequence
  Synthetic oligonucleotide; GAG chr11 5315219 5315238 5315235 +
gcaatggagtggcagaattg

SEQ ID NO: 19048 - DNA, 20 bp, Artificial Sequence
  Synthetic oligonucleotide; AGG chr11 5315220 5315239 5315236 +
caatggagtggcagaattgg

SEQ ID NO: 19049 - DNA, 20 bp, Artificial Sequence
  Synthetic oligonucleotide; GAG chr11 5315226 5315245 5315242 +
agtggcagaattggaggcac

SEQ ID NO: 19050 - DNA, 20 bp, Artificial Sequence
  Synthetic oligonucleotide; AGG chr11 5315227 5315246 5315243 +
gtggcagaattggaggcacg

SEQ ID NO: 19051 - DNA, 20 bp, Artificial Sequence
  Synthetic oligonucleotide; GGG chr11 5315228 5315247 5315244 +
tggcagaattggaggcacga

SEQ ID NO: 19052 - DNA, 20 bp, Artificial Sequence
  Synthetic oligonucleotide; AAG chr11 5315236 5315255 5315252 +
ttggaggcacgagggataaa

SEQ ID NO: 19053 - DNA, 20 bp, Artificial Sequence
  Synthetic oligonucleotide; TAG chr11 5315250 5315269 5315266 +
gataaaaagtccctcataaa

SEQ ID NO: 19054 - DNA, 20 bp, Artificial Sequence
  Synthetic oligonucleotide; CAG chr11 5315256 5315275 5315272 +
aagtccctcataaatagcca

SEQ ID NO: 19055 - DNA, 20 bp, Artificial Sequence
  Synthetic oligonucleotide; AAG chr11 5315273 5315292 5315289 +
ccacagttctatcttcaccc

SEQ ID NO: 19056 - DNA, 20 bp, Artificial Sequence
  Synthetic oligonucleotide; TAG chr11 5315279 5315298 5315295 +
ttctatcttcacccaagatt

SEQ ID NO: 19057 - DNA, 20 bp, Artificial Sequence
  Synthetic oligonucleotide; TAG chr11 5315282 5315301 5315298 +
tatcttcacccaagatttag

SEQ ID NO: 19058 - DNA, 20 bp, Artificial Sequence
  Synthetic oligonucleotide; TAG chr11 5315288 5315307 5315304 +
cacccaagatttagtagaaa

SEQ ID NO: 19059 - DNA, 20 bp, Artificial Sequence
  Synthetic oligonucleotide; GAG chr11 5315299 5315318 5315315 +
tagtagaaatagttatacct

SEQ ID NO: 19060 - DNA, 20 bp, Artificial Sequence
  Synthetic oligonucleotide; AAG chr11 5315302 5315321 5315318 +
tagaaatagttatacctgag

SEQ ID NO: 19061 - DNA, 20 bp, Artificial Sequence
  Synthetic oligonucleotide; TGG chr11 5315309 5315328 5315325 +
agttatacctgagaagcatg

SEQ ID NO: 19062 - DNA, 20 bp, Artificial Sequence
  Synthetic oligonucleotide; CGG chr11 5315324 5315343 5315340 +
gcatgtggatgataatgaaa

SEQ ID NO: 19063 - DNA, 20 bp, Artificial Sequence
  Synthetic oligonucleotide; TAG chr11 5315330 5315349 5315346 +
ggatgataatgaaacggtca

SEQ ID NO: 19064 - DNA, 20 bp, Artificial Sequence
  Synthetic oligonucleotide; AGG chr11 5315331 5315350 5315347 +
gatgataatgaaacggtcat

SEQ ID NO: 19065 - DNA, 20 bp, Artificial Sequence
  Synthetic oligonucleotide; CAG chr11 5315341 5315360 5315357 +
aaacggtcataggccattga

SEQ ID NO: 19066 - DNA, 20 bp, Artificial Sequence
  Synthetic oligonucleotide; AGG chr11 5315342 5315361 5315358 +
aacggtcataggccattgac

SEQ ID NO: 19067 - DNA, 20 bp, Artificial Sequence
  Synthetic oligonucleotide; GAG chr11 5315344 5315363 5315360 +
cggtcataggccattgacag

SEQ ID NO: 19068 - DNA, 20 bp, Artificial Sequence
  Synthetic oligonucleotide; AAG chr11 5315362 5315381 5315378 +
aggagaatacctgattctgc

SEQ ID NO: 19069 - DNA, 20 bp, Artificial Sequence
  Synthetic oligonucleotide; TGG chr11 5315365 5315384 5315381 +
agaatacctgattctgcaag

SEQ ID NO: 19070 - DNA, 20 bp, Artificial Sequence
  Synthetic oligonucleotide; TGG chr11 5315372 5315391 5315388 +
ctgattctgcaagtggataa

SEQ ID NO: 19071 - DNA, 20 bp, Artificial Sequence
  Synthetic oligonucleotide; GGG chr11 5315373 5315392 5315389 +
tgattctgcaagtggataat

SEQ ID NO: 19072 - DNA, 20 bp, Artificial Sequence
  Synthetic oligonucleotide; GAG chr11 5315375 5315394 5315391 +
attctgcaagtggataatgg

SEQ ID NO: 19073 - DNA, 20 bp, Artificial Sequence
  Synthetic oligonucleotide; TGG chr11 5315378 5315397 5315394 +
ctgcaagtggataatgggag

SEQ ID NO: 19074 - DNA, 20 bp, Artificial Sequence
  Synthetic oligonucleotide; AAG chr11 5315396 5315415 5315412 +
agtggataatgtaaacctgc

SEQ ID NO: 19075 - DNA, 20 bp, Artificial Sequence
  Synthetic oligonucleotide; AAG chr11 5315399 5315418 5315415 +
ggataatgtaaacctgcaag

SEQ ID NO: 19076 - DNA, 20 bp, Artificial Sequence
  Synthetic oligonucleotide; CAG chr11 5315402 5315421 5315418 +
taatgtaaacctgcaagaag

SEQ ID NO: 19077 - DNA, 20 bp, Artificial Sequence
  Synthetic oligonucleotide; AGG chr11 5315403 5315422 5315419 +
aatgtaaacctgcaagaagc

SEQ ID NO: 19078 - DNA, 20 bp, Artificial Sequence
  Synthetic oligonucleotide; TGG chr11 5315411 5315430 5315427 +
cctgcaagaagcaggcccca

SEQ ID NO: 19079 - DNA, 20 bp, Artificial Sequence
  Synthetic oligonucleotide; AAG chr11 5315438 5315457 5315454 +
cctctttgtgattcatccac

SEQ ID NO: 19080 - DNA, 20 bp, Artificial Sequence
  Synthetic oligonucleotide; CAG chr11 5315451 5315470 5315467 +
catccacaagacgcccatta

SEQ ID NO: 19081 - DNA, 20 bp, Artificial Sequence
  Synthetic oligonucleotide; TGG chr11 5315454 5315473 5315470 +
ccacaagacgcccattacag

SEQ ID NO: 19082 - DNA, 20 bp, Artificial Sequence
  Synthetic oligonucleotide; GGG chr11 5315455 5315474 5315471 +
cacaagacgcccattacagt

SEQ ID NO: 19083 - DNA, 20 bp, Artificial Sequence
  Synthetic oligonucleotide; TGG chr11 5315463 5315482 5315479 +
gcccattacagtgggcatca

SEQ ID NO: 19084 - DNA, 20 bp, Artificial Sequence
  Synthetic oligonucleotide; GAG chr11 5315479 5315498 5315495 +
atcatggtcaatttcaccat

SEQ ID NO: 19085 - DNA, 20 bp, Artificial Sequence
  Synthetic oligonucleotide; AGG chr11 5315480 5315499 5315496 +
tcatggtcaatttcaccatg

SEQ ID NO: 19086 - DNA, 20 bp, Artificial Sequence
  Synthetic oligonucleotide; CAG chr11 5315491 5315510 5315507 +
ttcaccatgaggtcttgcct

SEQ ID NO: 19087 - DNA, 20 bp, Artificial Sequence
  Synthetic oligonucleotide; TGG chr11 5315496 5315515 5315512 +
catgaggtcttgcctcagtg

SEQ ID NO: 19088 - DNA, 20 bp, Artificial Sequence
  Synthetic oligonucleotide; AAG chr11 5315500 5315519 5315516 +
aggtcttgcctcagtgtggc

SEQ ID NO: 19089 - DNA, 20 bp, Artificial Sequence
  Synthetic oligonucleotide; AGG chr11 5315501 5315520 5315517 +
ggtcttgcctcagtgtggca

SEQ ID NO: 19090 - DNA, 20 bp, Artificial Sequence
  Synthetic oligonucleotide; CAG chr11 5315507 5315526 5315523 +
gcctcagtgtggcaaggaaa

SEQ ID NO: 19091 - DNA, 20 bp, Artificial Sequence
  Synthetic oligonucleotide; TGG chr11 5315514 5315533 5315530 +
tgtggcaaggaaacagtaca

SEQ ID NO: 19092 - DNA, 20 bp, Artificial Sequence
  Synthetic oligonucleotide; GGG chr11 5315515 5315534 5315531 +
gtggcaaggaaacagtacat

SEQ ID NO: 19093 - DNA, 20 bp, Artificial Sequence
  Synthetic oligonucleotide; AAG chr11 5315524 5315543 5315540 +
aaacagtacatgggttcgtg

SEQ ID NO: 19094 - DNA, 20 bp, Artificial Sequence
  Synthetic oligonucleotide; TGG chr11 5315531 5315550 5315547 +
acatgggttcgtgaagactg

SEQ ID NO: 19095 - DNA, 20 bp, Artificial Sequence
  Synthetic oligonucleotide; GAG chr11 5315545 5315564 5315561 +
agactgtggtcatgcttgat

SEQ ID NO: 19096 - DNA, 20 bp, Artificial Sequence
  Synthetic oligonucleotide; AGG chr11 5315546 5315565 5315562 +
gactgtggtcatgcttgatg

SEQ ID NO: 19097 - DNA, 20 bp, Artificial Sequence
  Synthetic oligonucleotide; TAG chr11 5315549 5315568 5315565 +
tgtggtcatgcttgatgagg

SEQ ID NO: 19098 - DNA, 20 bp, Artificial Sequence
  Synthetic oligonucleotide; GAG chr11 5315551 5315570 5315567 +
tggtcatgcttgatgaggta

SEQ ID NO: 19099 - DNA, 20 bp, Artificial Sequence
  Synthetic oligonucleotide; AGG chr11 5315552 5315571 5315568 +
ggtcatgcttgatgaggtag

SEQ ID NO: 19100 - DNA, 20 bp, Artificial Sequence
  Synthetic oligonucleotide; GAG chr11 5315554 5315573 5315570 +
tcatgcttgatgaggtagag

SEQ ID NO: 19101 - DNA, 20 bp, Artificial Sequence
  Synthetic oligonucleotide; AAG chr11 5315569 5315588 5315585 +
tagaggagcttgccattgcc

SEQ ID NO: 19102 - DNA, 20 bp, Artificial Sequence
  Synthetic oligonucleotide; AAG chr11 5315572 5315591 5315588 +
aggagcttgccattgccaag

SEQ ID NO: 19103 - DNA, 20 bp, Artificial Sequence
  Synthetic oligonucleotide; AGG chr11 5315573 5315592 5315589 +
ggagcttgccattgccaaga

SEQ ID NO: 19104 - DNA, 20 bp, Artificial Sequence
  Synthetic oligonucleotide; CAG chr11 5315589 5315608 5315605 +
aagaaggacgcacacataaa

SEQ ID NO: 19105 - DNA, 20 bp, Artificial Sequence
  Synthetic oligonucleotide; AAG chr11 5315594 5315613 5315610 +
ggacgcacacataaacagca

SEQ ID NO: 19106 - DNA, 20 bp, Artificial Sequence
  Synthetic oligonucleotide; AAG chr11 5315597 5315616 5315613 +
cgcacacataaacagcaaag

SEQ ID NO: 19107 - DNA, 20 bp, Artificial Sequence
  Synthetic oligonucleotide; AGG chr11 5315598 5315617 5315614 +
gcacacataaacagcaaaga

SEQ ID NO: 19108 - DNA, 20 bp, Artificial Sequence
  Synthetic oligonucleotide; GGG chr11 5315599 5315618 5315615 +
cacacataaacagcaaagaa

SEQ ID NO: 19109 - DNA, 20 bp, Artificial Sequence
  Synthetic oligonucleotide; GGG chr11 5315600 5315619 5315616 +
acacataaacagcaaagaag

SEQ ID NO: 19110 - DNA, 20 bp, Artificial Sequence
  Synthetic oligonucleotide; TGG chr11 5315604 5315623 5315620 +
ataaacagcaaagaagggga

SEQ ID NO: 19111 - DNA, 20 bp, Artificial Sequence
  Synthetic oligonucleotide; GAG chr11 5315606 5315625 5315622 +
aaacagcaaagaaggggatg

SEQ ID NO: 19112 - DNA, 20 bp, Artificial Sequence
  Synthetic oligonucleotide; GAG chr11 5315612 5315631 5315628 +
caaagaaggggatggagatc

SEQ ID NO: 19113 - DNA, 20 bp, Artificial Sequence
  Synthetic oligonucleotide; AAG chr11 5315619 5315638 5315635 +
ggggatggagatcgagtgat

SEQ ID NO: 19114 - DNA, 20 bp, Artificial Sequence
  Synthetic oligonucleotide; CAG chr11 5315629 5315648 5315645 +
atcgagtgataagttgcctc

SEQ ID NO: 19115 - DNA, 20 bp, Artificial Sequence
  Synthetic oligonucleotide; AAG chr11 5315639 5315658 5315655 +
aagttgcctccagtactgaa

SEQ ID NO: 19116 - DNA, 20 bp, Artificial Sequence
  Synthetic oligonucleotide; CAG chr11 5315643 5315662 5315659 +
tgcctccagtactgaaaagc

SEQ ID NO: 19117 - DNA, 20 bp, Artificial Sequence
  Synthetic oligonucleotide; AGG chr11 5315644 5315663 5315660 +
gcctccagtactgaaaagcc

SEQ ID NO: 19118 - DNA, 20 bp, Artificial Sequence
  Synthetic oligonucleotide; CAG chr11 5315647 5315666 5315663 +
tccagtactgaaaagccagg

SEQ ID NO: 19119 - DNA, 20 bp, Artificial Sequence
  Synthetic oligonucleotide; AAG chr11 5315655 5315674 5315671 +
tgaaaagccaggcagcaaaa

SEQ ID NO: 19120 - DNA, 20 bp, Artificial Sequence
  Synthetic oligonucleotide; AGG chr11 5315656 5315675 5315672 +
gaaaagccaggcagcaaaaa

SEQ ID NO: 19121 - DNA, 20 bp, Artificial Sequence
  Synthetic oligonucleotide; GAG chr11 5315658 5315677 5315674 +
aaagccaggcagcaaaaaag

SEQ ID NO: 19122 - DNA, 20 bp, Artificial Sequence
  Synthetic oligonucleotide; AAG chr11 5315678 5315697 5315694 +
gagccgcattgtgtgttcac

SEQ ID NO: 19123 - DNA, 20 bp, Artificial Sequence
  Synthetic oligonucleotide; TGG chr11 5315681 5315700 5315697 +
ccgcattgtgtgttcacaag

SEQ ID NO: 19124 - DNA, 20 bp, Artificial Sequence
  Synthetic oligonucleotide; AAG chr11 5315685 5315704 5315701 +
attgtgtgttcacaagtggc

SEQ ID NO: 19125 - DNA, 20 bp, Artificial Sequence
  Synthetic oligonucleotide; TAG chr11 5315688 5315707 5315704 +
gtgtgttcacaagtggcaag

SEQ ID NO: 19126 - DNA, 20 bp, Artificial Sequence
  Synthetic oligonucleotide; TAG chr11 5315696 5315715 5315712 +
acaagtggcaagtagcttta

SEQ ID NO: 19127 - DNA, 20 bp, Artificial Sequence
  Synthetic oligonucleotide; CAG chr11 5315728 5315747 5315744 +
cactgaaatccctgccttat

SEQ ID NO: 19128 - DNA, 20 bp, Artificial Sequence
  Synthetic oligonucleotide; CAG chr11 5315764 5315783 5315780 +
cttgtgaaactgtatttctg

SEQ ID NO: 19129 - DNA, 20 bp, Artificial Sequence
  Synthetic oligonucleotide; TAG chr11 5315789 5315808 5315805 +
tcaatcctaatattcatatt

SEQ ID NO: 19130 - DNA, 20 bp, Artificial Sequence
  Synthetic oligonucleotide; TGG chr11 5315803 5315822 5315819 +
catatttagcaataatttat

SEQ ID NO: 19131 - DNA, 20 bp, Artificial Sequence
  Synthetic oligonucleotide; TAG chr11 5315836 5315855 5315852 +
aatgtgcaacaattttctta

SEQ ID NO: 19132 - DNA, 20 bp, Artificial Sequence
  Synthetic oligonucleotide; AAG chr11 5315839 5315858 5315855 +
gtgcaacaattttcttatag

SEQ ID NO: 19133 - DNA, 20 bp, Artificial Sequence
  Synthetic oligonucleotide; GAG chr11 5315841 5315860 5315857 +
gcaacaattttcttatagaa

SEQ ID NO: 19134 - DNA, 20 bp, Artificial Sequence
  Synthetic oligonucleotide; TAG chr11 5315855 5315874 5315871 +
atagaagagcaatacattta

SEQ ID NO: 19135 - DNA, 20 bp, Artificial Sequence
  Synthetic oligonucleotide; TAG chr11 5315865 5315884 5315881 +
aatacatttatagactgtgc

SEQ ID NO: 19136 - DNA, 20 bp, Artificial Sequence
  Synthetic oligonucleotide; GAG chr11 5315867 5315886 5315883 +
tacatttatagactgtgcta

SEQ ID NO: 19137 - DNA, 20 bp, Artificial Sequence
  Synthetic oligonucleotide; AAG chr11 5315872 5315891 5315888 +
ttatagactgtgctagagat

SEQ ID NO: 19138 - DNA, 20 bp, Artificial Sequence
  Synthetic oligonucleotide; AGG chr11 5315873 5315892 5315889 +
tatagactgtgctagagata

SEQ ID NO: 19139 - DNA, 20 bp, Artificial Sequence
  Synthetic oligonucleotide; CAG chr11 5315893 5315912 5315909 +
aggaatgatgatcatttctt

SEQ ID NO: 19140 - DNA, 20 bp, Artificial Sequence
  Synthetic oligonucleotide; AAG chr11 5315908 5315927 5315924 +
ttcttcagttatgaataatt

SEQ ID NO: 19141 - DNA, 20 bp, Artificial Sequence
  Synthetic oligonucleotide; TAG chr11 5315911 5315930 5315927 +
ttcagttatgaataattaag

SEQ ID NO: 19142 - DNA, 20 bp, Artificial Sequence
  Synthetic oligonucleotide; AAG chr11 5315916 5315935 5315932 +
ttatgaataattaagtagtt

SEQ ID NO: 19143 - DNA, 20 bp, Artificial Sequence
  Synthetic oligonucleotide; TGG chr11 5315968 5315987 5315984 +
aaatgcatcatgcccctctg

SEQ ID NO: 19144 - DNA, 20 bp, Artificial Sequence
  Synthetic oligonucleotide; TAG chr11 5315999 5316018 5316015 +
ctgcacaatgtttgaaccaa

SEQ ID NO: 19145 - DNA, 20 bp, Artificial Sequence
  Synthetic oligonucleotide; AAG chr11 5316010 5316029 5316026 +
ttgaaccaatagtaacaaaa

SEQ ID NO: 19146 - DNA, 20 bp, Artificial Sequence
  Synthetic oligonucleotide; AAG chr11 5316013 5316032 5316029 +
aaccaatagtaacaaaaaag

SEQ ID NO: 19147 - DNA, 20 bp, Artificial Sequence
  Synthetic oligonucleotide; AGG chr11 5316014 5316033 5316030 +
accaatagtaacaaaaaaga

SEQ ID NO: 19148 - DNA, 20 bp, Artificial Sequence
  Synthetic oligonucleotide; TAG chr11 5316031 5316050 5316047 +
agaaggcaaatatatgcaat

SEQ ID NO: 19149 - DNA, 20 bp, Artificial Sequence
  Synthetic oligonucleotide; TAG chr11 5316048 5316067 5316064 +
aattagataataattgtaca

SEQ ID NO: 19150 - DNA, 20 bp, Artificial Sequence
  Synthetic oligonucleotide; TAG chr11 5316064 5316083 5316080 +
tacatagttaacctgctgct

SEQ ID NO: 19151 - DNA, 20 bp, Artificial Sequence
  Synthetic oligonucleotide; TGG chr11 5316081 5316100 5316097 +
gcttagcttaattgcatatt

SEQ ID NO: 19152 - DNA, 20 bp, Artificial Sequence
  Synthetic oligonucleotide; TAG chr11 5316129 5316148 5316145 +
tatgtttcacaatcatgata

SEQ ID NO: 19153 - DNA, 20 bp, Artificial Sequence
  Synthetic oligonucleotide; TAG chr11 5316135 5316154 5316151 +
tcacaatcatgatatagaca

SEQ ID NO: 19154 - DNA, 20 bp, Artificial Sequence
  Synthetic oligonucleotide; TAG chr11 5316146 5316165 5316162 +
atatagacatagtgttttgt

SEQ ID NO: 19155 - DNA, 20 bp, Artificial Sequence
  Synthetic oligonucleotide; TAG chr11 5316165 5316184 5316181 +
ttagaaaacttttctttgtt

SEQ ID NO: 19156 - DNA, 20 bp, Artificial Sequence
  Synthetic oligonucleotide; TAG chr11 5316176 5316195 5316192 +
ttctttgtttagttttgaaa

SEQ ID NO: 19157 - DNA, 20 bp, Artificial Sequence
  Synthetic oligonucleotide; TGG chr11 5316194 5316213 5316210 +
aatagaatgttaatgtttta

SEQ ID NO: 19158 - DNA, 20 bp, Artificial Sequence
  Synthetic oligonucleotide; AAG chr11 5316208 5316227 5316224 +
gttttatggaattctaacaa

SEQ ID NO: 19159 - DNA, 20 bp, Artificial Sequence
  Synthetic oligonucleotide; GAG chr11 5316215 5316234 5316231 +
ggaattctaacaaaagccat

SEQ ID NO: 19160 - DNA, 20 bp, Artificial Sequence
  Synthetic oligonucleotide; TGG chr11 5316225 5316244 5316241 +
caaaagccatgagccctctg

SEQ ID NO: 19161 - DNA, 20 bp, Artificial Sequence
  Synthetic oligonucleotide; GAG chr11 5316227 5316246 5316243 +
aaagccatgagccctctgtg

SEQ ID NO: 19162 - DNA, 20 bp, Artificial Sequence
  Synthetic oligonucleotide; TGG chr11 5316235 5316254 5316251 +
gagccctctgtggagaaaaa

SEQ ID NO: 19163 - DNA, 20 bp, Artificial Sequence
  Synthetic oligonucleotide; AAG chr11 5316242 5316261 5316258 +
ctgtggagaaaaatggacaa

SEQ ID NO: 19164 - DNA, 20 bp, Artificial Sequence
  Synthetic oligonucleotide; CAG chr11 5316245 5316264 5316261 +
tggagaaaaatggacaaaag

SEQ ID NO: 19165 - DNA, 20 bp, Artificial Sequence
  Synthetic oligonucleotide; AGG chr11 5316246 5316265 5316262 +
ggagaaaaatggacaaaagc

SEQ ID NO: 19166 - DNA, 20 bp, Artificial Sequence
  Synthetic oligonucleotide; TAG chr11 5316261 5316280 5316277 +
aaagcaggtgacgtcacatt

SEQ ID NO: 19167 - DNA, 20 bp, Artificial Sequence
  Synthetic oligonucleotide; AAG chr11 5316290 5316309 5316306 +
aatattcacacgttttcctg

SEQ ID NO: 19168 - DNA, 20 bp, Artificial Sequence
  Synthetic oligonucleotide; GAG chr11 5316302 5316321 5316318 +
ttttcctgaagctaatccat

SEQ ID NO: 19169 - DNA, 20 bp, Artificial Sequence
  Synthetic oligonucleotide; AAG chr11 5316323 5316342 5316339 +
agcaccacatttgaaacttc

SEQ ID NO: 19170 - DNA, 20 bp, Artificial Sequence
  Synthetic oligonucleotide; GAG chr11 5316346 5316365 5316362 +
cctgccttgaaacatgtgtt

SEQ ID NO: 19171 - DNA, 20 bp, Artificial Sequence
  Synthetic oligonucleotide; AAG chr11 5316355 5316374 5316371 +
aaacatgtgttgagatgaaa

SEQ ID NO: 19172 - DNA, 20 bp, Artificial Sequence
  Synthetic oligonucleotide; TAG chr11 5316367 5316386 5316383 +
agatgaaaaagtctgtgctt

SEQ ID NO: 19173 - DNA, 20 bp, Artificial Sequence
  Synthetic oligonucleotide; AGG chr11 5316368 5316387 5316384 +
gatgaaaaagtctgtgcttt

SEQ ID NO: 19174 - DNA, 20 bp, Artificial Sequence
  Synthetic oligonucleotide; TGG chr11 5316374 5316393 5316390 +
aaagtctgtgctttaggtgt

SEQ ID NO: 19175 - DNA, 20 bp, Artificial Sequence
  Synthetic oligonucleotide; CAG chr11 5316383 5316402 5316399 +
gctttaggtgttggtcatcc

SEQ ID NO: 19176 - DNA, 20 bp, Artificial Sequence
  Synthetic oligonucleotide; TGG chr11 5316387 5316406 5316403 +
taggtgttggtcatcccaga

SEQ ID NO: 19177 - DNA, 20 bp, Artificial Sequence
  Synthetic oligonucleotide; GAG chr11 5316389 5316408 5316405 +
ggtgttggtcatcccagatg

SEQ ID NO: 19178 - DNA, 20 bp, Artificial Sequence
  Synthetic oligonucleotide; CAG chr11 5316406 5316425 5316422 +
atggagtatgttctcctatg

SEQ ID NO: 19179 - DNA, 20 bp, Artificial Sequence
  Synthetic oligonucleotide; AAG chr11 5316452 5316471 5316468 +
ctcttcgctgcatctaacat

SEQ ID NO: 19180 - DNA, 20 bp, Artificial Sequence
  Synthetic oligonucleotide; AAG chr11 5316455 5316474 5316471 +
ttcgctgcatctaacataag

SEQ ID NO: 19181 - DNA, 20 bp, Artificial Sequence
  Synthetic oligonucleotide; AGG chr11 5316456 5316475 5316472 +
tcgctgcatctaacataaga

SEQ ID NO: 19182 - DNA, 20 bp, Artificial Sequence
  Synthetic oligonucleotide; AAG chr11 5316459 5316478 5316475 +
ctgcatctaacataagaagg

SEQ ID NO: 19183 - DNA, 20 bp, Artificial Sequence
  Synthetic oligonucleotide; GAG chr11 5316461 5316480 5316477 +
gcatctaacataagaaggaa

SEQ ID NO: 19184 - DNA, 20 bp, Artificial Sequence
  Synthetic oligonucleotide; AGG chr11 5316462 5316481 5316478 +
catctaacataagaaggaag

SEQ ID NO: 19185 - DNA, 20 bp, Artificial Sequence
  Synthetic oligonucleotide; TGG chr11 5316487 5316506 5316503 +
tcattccttattcctgttcc

SEQ ID NO: 19186 - DNA, 20 bp, Artificial Sequence
  Synthetic oligonucleotide; TGG chr11 5316517 5316536 5316533 +
ctatgctgtcattttcttgc

SEQ ID NO: 19187 - DNA, 20 bp, Artificial Sequence
  Synthetic oligonucleotide; AAG chr11 5316523 5316542 5316539 +
tgtcattttcttgctggaat

SEQ ID NO: 19188 - DNA, 20 bp, Artificial Sequence
  Synthetic oligonucleotide; AGG chr11 5316524 5316543 5316540 +
gtcattttcttgctggaata

SEQ ID NO: 19189 - DNA, 20 bp, Artificial Sequence
  Synthetic oligonucleotide; AAG chr11 5316547 5316566 5316563 +
acccattcctgctctatttg

SEQ ID NO: 19190 - DNA, 20 bp, Artificial Sequence
  Synthetic oligonucleotide; CAG chr11 5316553 5316572 5316569 +
tcctgctctatttgaagact

SEQ ID NO: 19191 - DNA, 20 bp, Artificial Sequence
  Synthetic oligonucleotide; CAG chr11 5316558 5316577 5316574 +
ctctatttgaagactcagtt

SEQ ID NO: 19192 - DNA, 20 bp, Artificial Sequence
  Synthetic oligonucleotide; AAG chr11 5316575 5316594 5316591 +
gttcagacactcacttctca

SEQ ID NO: 19193 - DNA, 20 bp, Artificial Sequence
  Synthetic oligonucleotide; AAG chr11 5316585 5316604 5316601 +
tcacttctcaaagactattc

SEQ ID NO: 19194 - DNA, 20 bp, Artificial Sequence
  Synthetic oligonucleotide; GAG chr11 5316587 5316606 5316603 +
acttctcaaagactattcaa

SEQ ID NO: 19195 - DNA, 20 bp, Artificial Sequence
  Synthetic oligonucleotide; AGG chr11 5316588 5316607 5316604 +
cttctcaaagactattcaag

SEQ ID NO: 19196 - DNA, 20 bp, Artificial Sequence
  Synthetic oligonucleotide; TAG chr11 5316597 5316616 5316613 +
gactattcaagaggccaaat

SEQ ID NO: 19197 - DNA, 20 bp, Artificial Sequence
  Synthetic oligonucleotide; GAG chr11 5316599 5316618 5316615 +
ctattcaagaggccaaatta

SEQ ID NO: 19198 - DNA, 20 bp, Artificial Sequence
  Synthetic oligonucleotide; GAG chr11 5316601 5316620 5316617 +
attcaagaggccaaattaga

SEQ ID NO: 19199 - DNA, 20 bp, Artificial Sequence
  Synthetic oligonucleotide; TGG chr11 5316614 5316633 5316630 +
aattagagagtttatgtatg

SEQ ID NO: 19200 - DNA, 20 bp, Artificial Sequence
  Synthetic oligonucleotide; CAG chr11 5316629 5316648 5316645 +
gtatgtggaaatcacttccc

SEQ ID NO: 19201 - DNA, 20 bp, Artificial Sequence
  Synthetic oligonucleotide; GAG chr11 5316631 5316650 5316647 +
atgtggaaatcacttcccca

SEQ ID NO: 19202 - DNA, 20 bp, Artificial Sequence
  Synthetic oligonucleotide; CAG chr11 5316653 5316672 5316669 +
gtttcctctttccaaatact

SEQ ID NO: 19203 - DNA, 20 bp, Artificial Sequence
  Synthetic oligonucleotide; AAG chr11 5316656 5316675 5316672 +
tcctctttccaaatactcag

SEQ ID NO: 19204 - DNA, 20 bp, Artificial Sequence
  Synthetic oligonucleotide; TGG chr11 5316688 5316707 5316704 +
tctcccctccctcctctgtc

SEQ ID NO: 19205 - DNA, 20 bp, Artificial Sequence
  Synthetic oligonucleotide; GGG chr11 5316689 5316708 5316705 +
ctcccctccctcctctgtct

SEQ ID NO: 19206 - DNA, 20 bp, Artificial Sequence
  Synthetic oligonucleotide; GAG chr11 5316691 5316710 5316707 +
cccctccctcctctgtctgg

SEQ ID NO: 19207 - DNA, 20 bp, Artificial Sequence
  Synthetic oligonucleotide; AAG chr11 5316694 5316713 5316710 +
ctccctcctctgtctgggag

SEQ ID NO: 19208 - DNA, 20 bp, Artificial Sequence
  Synthetic oligonucleotide; CAG chr11 5316697 5316716 5316713 +
cctcctctgtctgggagaag

SEQ ID NO: 19209 - DNA, 20 bp, Artificial Sequence
  Synthetic oligonucleotide; AGG chr11 5316698 5316717 5316714 +
ctcctctgtctgggagaagc

SEQ ID NO: 19210 - DNA, 20 bp, Artificial Sequence
  Synthetic oligonucleotide; GGG chr11 5316699 5316718 5316715 +
tcctctgtctgggagaagca

SEQ ID NO: 19211 - DNA, 20 bp, Artificial Sequence
  Synthetic oligonucleotide; CGG chr11 5316720 5316739 5316736 +
ggacgctcaaccaatgtcct

SEQ ID NO: 19212 - DNA, 20 bp, Artificial Sequence
  Synthetic oligonucleotide; CAG chr11 5316729 5316748 5316745 +
accaatgtcctcggaacttt

SEQ ID NO: 19213 - DNA, 20 bp, Artificial Sequence
  Synthetic oligonucleotide; AGG chr11 5316730 5316749 5316746 +
ccaatgtcctcggaactttc

SEQ ID NO: 19214 - DNA, 20 bp, Artificial Sequence
  Synthetic oligonucleotide; AAG chr11 5316742 5316761 5316758 +
gaactttcaggtatttctcc

SEQ ID NO: 19215 - DNA, 20 bp, Artificial Sequence
  Synthetic oligonucleotide; AGG chr11 5316743 5316762 5316759 +
aactttcaggtatttctcca

SEQ ID NO: 19216 - DNA, 20 bp, Artificial Sequence
  Synthetic oligonucleotide; TGG chr11 5316747 5316766 5316763 +
ttcaggtatttctccaagga

SEQ ID NO: 19217 - DNA, 20 bp, Artificial Sequence
  Synthetic oligonucleotide; GAG chr11 5316752 5316771 5316768 +
gtatttctccaaggatggat

SEQ ID NO: 19218 - DNA, 20 bp, Artificial Sequence
  Synthetic oligonucleotide; AAG chr11 5316757 5316776 5316773 +
tctccaaggatggatgagaa

SEQ ID NO: 19219 - DNA, 20 bp, Artificial Sequence
  Synthetic oligonucleotide; TGG chr11 5316787 5316806 5316803 +
ctccaatgccacctctacat

SEQ ID NO: 19220 - DNA, 20 bp, Artificial Sequence
  Synthetic oligonucleotide; GGG chr11 5316788 5316807 5316804 +
tccaatgccacctctacatt

SEQ ID NO: 19221 - DNA, 20 bp, Artificial Sequence
  Synthetic oligonucleotide; CAG chr11 5316795 5316814 5316811 +
ccacctctacattgggatgc

SEQ ID NO: 19222 - DNA, 20 bp, Artificial Sequence
  Synthetic oligonucleotide; AGG chr11 5316796 5316815 5316812 +
cacctctacattgggatgcc

SEQ ID NO: 19223 - DNA, 20 bp, Artificial Sequence
  Synthetic oligonucleotide; CAG chr11 5316818 5316837 5316834 +
gacttaattatgtgaccctt

SEQ ID NO: 19224 - DNA, 20 bp, Artificial Sequence
  Synthetic oligonucleotide; AGG chr11 5316819 5316838 5316835 +
acttaattatgtgacccttc

SEQ ID NO: 19225 - DNA, 20 bp, Artificial Sequence
  Synthetic oligonucleotide; AAG chr11 5316827 5316846 5316843 +
atgtgacccttcaggaccct

SEQ ID NO: 19226 - DNA, 20 bp, Artificial Sequence
  Synthetic oligonucleotide; CAG chr11 5316833 5316852 5316849 +
cccttcaggaccctaagcat

SEQ ID NO: 19227 - DNA, 20 bp, Artificial Sequence
  Synthetic oligonucleotide; CAG chr11 5316840 5316859 5316856 +
ggaccctaagcatcagtaca

SEQ ID NO: 19228 - DNA, 20 bp, Artificial Sequence
  Synthetic oligonucleotide; AAG chr11 5316888 5316907 5316904 +
gtctgtctcaatacaatgca

SEQ ID NO: 19229 - DNA, 20 bp, Artificial Sequence
  Synthetic oligonucleotide; GAG chr11 5316895 5316914 5316911 +
tcaatacaatgcaaagtatt

SEQ ID NO: 19230 - DNA, 20 bp, Artificial Sequence
  Synthetic oligonucleotide; GAG chr11 5316897 5316916 5316913 +
aatacaatgcaaagtattga

SEQ ID NO: 19231 - DNA, 20 bp, Artificial Sequence
  Synthetic oligonucleotide; TAG chr11 5316904 5316923 5316920 +
tgcaaagtattgagagatac

SEQ ID NO: 19232 - DNA, 20 bp, Artificial Sequence
  Synthetic oligonucleotide; CAG chr11 5316914 5316933 5316930 +
tgagagatactagttgaatg

SEQ ID NO: 19233 - DNA, 20 bp, Artificial Sequence
  Synthetic oligonucleotide; AGG chr11 5316915 5316934 5316931 +
gagagatactagttgaatgc

SEQ ID NO: 19234 - DNA, 20 bp, Artificial Sequence
  Synthetic oligonucleotide; GGG chr11 5316916 5316935 5316932 +
agagatactagttgaatgca

SEQ ID NO: 19235 - DNA, 20 bp, Artificial Sequence
  Synthetic oligonucleotide; TGG chr11 5316937 5316956 5316953 +
ggtcacatgtgtctttgtcc

SEQ ID NO: 19236 - DNA, 20 bp, Artificial Sequence
  Synthetic oligonucleotide; GAG chr11 5316939 5316958 5316955 +
tcacatgtgtctttgtcctg

SEQ ID NO: 19237 - DNA, 20 bp, Artificial Sequence
  Synthetic oligonucleotide; TGG chr11 5316982 5317001 5316998 +
tgttgtcttttctgatactt

SEQ ID NO: 19238 - DNA, 20 bp, Artificial Sequence
  Synthetic oligonucleotide; GGG chr11 5316983 5317002 5316999 +
gttgtcttttctgatacttt

SEQ ID NO: 19239 - DNA, 20 bp, Artificial Sequence
  Synthetic oligonucleotide; CAG chr11 5316991 5317010 5317007 +
ttctgatactttgggaaaat

SEQ ID NO: 19240 - DNA, 20 bp, Artificial Sequence
  Synthetic oligonucleotide; CAG chr11 5317004 5317023 5317020 +
ggaaaatcagttctgatcca

SEQ ID NO: 19241 - DNA, 20 bp, Artificial Sequence
  Synthetic oligonucleotide; AGG chr11 5317005 5317024 5317021 +
gaaaatcagttctgatccac

SEQ ID NO: 19242 - DNA, 20 bp, Artificial Sequence
  Synthetic oligonucleotide; TGG chr11 5317016 5317035 5317032 +
ctgatccacaggaacctcaa

SEQ ID NO: 19243 - DNA, 20 bp, Artificial Sequence
  Synthetic oligonucleotide; TAG chr11 5317028 5317047 5317044 +
aacctcaatggatctattaa

SEQ ID NO: 19244 - DNA, 20 bp, Artificial Sequence
  Synthetic oligonucleotide; AAG chr11 5317033 5317052 5317049 +
caatggatctattaatagcc

SEQ ID NO: 19245 - DNA, 20 bp, Artificial Sequence
  Synthetic oligonucleotide; AAG chr11 5317042 5317061 5317058 +
tattaatagccaagtaaatg

SEQ ID NO: 19246 - DNA, 20 bp, Artificial Sequence
  Synthetic oligonucleotide; AGG chr11 5317043 5317062 5317059 +
attaatagccaagtaaatga

SEQ ID NO: 19247 - DNA, 20 bp, Artificial Sequence
  Synthetic oligonucleotide; GGG chr11 5317044 5317063 5317060 +
ttaatagccaagtaaatgaa

SEQ ID NO: 19248 - DNA, 20 bp, Artificial Sequence
  Synthetic oligonucleotide; CAG chr11 5317107 5317126 5317123 +
aatcactgcccatttcatac

SEQ ID NO: 19249 - DNA, 20 bp, Artificial Sequence
  Synthetic oligonucleotide; AGG chr11 5317108 5317127 5317124 +
atcactgcccatttcatacc

SEQ ID NO: 19250 - DNA, 20 bp, Artificial Sequence
  Synthetic oligonucleotide; CAG chr11 5317113 5317132 5317129 +
tgcccatttcataccaggtt

SEQ ID NO: 19251 - DNA, 20 bp, Artificial Sequence
  Synthetic oligonucleotide; AGG chr11 5317114 5317133 5317130 +
gcccatttcataccaggttc

SEQ ID NO: 19252 - DNA, 20 bp, Artificial Sequence
  Synthetic oligonucleotide; TAG chr11 5317118 5317137 5317134 +
atttcataccaggttcagga

SEQ ID NO: 19253 - DNA, 20 bp, Artificial Sequence
  Synthetic oligonucleotide; TAG chr11 5317170 5317189 5317186 +
taaattttcaacatttactt

SEQ ID NO: 19254 - DNA, 20 bp, Artificial Sequence
  Synthetic oligonucleotide; CAG chr11 5317176 5317195 5317192 +
ttcaacatttactttagata

SEQ ID NO: 19255 - DNA, 20 bp, Artificial Sequence
  Synthetic oligonucleotide; TGG chr11 5317179 5317198 5317195 +
aacatttactttagatacag

SEQ ID NO: 19256 - DNA, 20 bp, Artificial Sequence
  Synthetic oligonucleotide; GGG chr11 5317180 5317199 5317196 +
acatttactttagatacagt

SEQ ID NO: 19257 - DNA, 20 bp, Artificial Sequence
  Synthetic oligonucleotide; CAG chr11 5317191 5317210 5317207 +
agatacagtgggtacttgtg

SEQ ID NO: 19258 - DNA, 20 bp, Artificial Sequence
  Synthetic oligonucleotide; AGG chr11 5317192 5317211 5317208 +
gatacagtgggtacttgtgc

SEQ ID NO: 19259 - DNA, 20 bp, Artificial Sequence
  Synthetic oligonucleotide; TGG chr11 5317204 5317223 5317220 +
acttgtgcaggttttttaca

SEQ ID NO: 19260 - DNA, 20 bp, Artificial Sequence
  Synthetic oligonucleotide; CAG chr11 5317219 5317238 5317235 +
ttacatggatatattgcatg

SEQ ID NO: 19261 - DNA, 20 bp, Artificial Sequence
  Synthetic oligonucleotide; TGG chr11 5317222 5317241 5317238 +
catggatatattgcatgcag

SEQ ID NO: 19262 - DNA, 20 bp, Artificial Sequence
  Synthetic oligonucleotide; GAG chr11 5317226 5317245 5317242 +
gatatattgcatgcagtggt

SEQ ID NO: 19263 - DNA, 20 bp, Artificial Sequence
  Synthetic oligonucleotide; TAG chr11 5317241 5317260 5317257 +
gtggtgagcatactatccaa

SEQ ID NO: 19264 - DNA, 20 bp, Artificial Sequence
  Synthetic oligonucleotide; TAG chr11 5317282 5317301 5317298 +
gcatctctccctgccccttg

SEQ ID NO: 19265 - DNA, 20 bp, Artificial Sequence
  Synthetic oligonucleotide; TAG chr11 5317285 5317304 5317301 +
tctctccctgccccttgtag

SEQ ID NO: 19266 - DNA, 20 bp, Artificial Sequence
  Synthetic oligonucleotide; AAG chr11 5317292 5317311 5317308 +
ctgccccttgtagtagtttc

SEQ ID NO: 19267 - DNA, 20 bp, Artificial Sequence
  Synthetic oligonucleotide; TGG chr11 5317295 5317314 5317311 +
ccccttgtagtagtttcaag

SEQ ID NO: 19268 - DNA, 20 bp, Artificial Sequence
  Synthetic oligonucleotide; TAG chr11 5317337 5317356 5317353 +
atccacgtgtactcaatgtt

SEQ ID NO: 19269 - DNA, 20 bp, Artificial Sequence
  Synthetic oligonucleotide; GAG chr11 5317355 5317374 5317371 +
tttagcttccacttataaat

SEQ ID NO: 19270 - DNA, 20 bp, Artificial Sequence
  Synthetic oligonucleotide; TGG chr11 5317364 5317383 5317380 +
cacttataaatgagaatata

SEQ ID NO: 19271 - DNA, 20 bp, Artificial Sequence
  Synthetic oligonucleotide; TAG chr11 5317399 5317418 5317415 +
tgttcttgcgttaatttgct

SEQ ID NO: 19272 - DNA, 20 bp, Artificial Sequence
  Synthetic oligonucleotide; AGG chr11 5317400 5317419 5317416 +
gttcttgcgttaatttgctt

SEQ ID NO: 19273 - DNA, 20 bp, Artificial Sequence
  Synthetic oligonucleotide; TAG chr11 5317407 5317426 5317423 +
cgttaatttgcttaggatta

SEQ ID NO: 19274 - DNA, 20 bp, Artificial Sequence
  Synthetic oligonucleotide; CAG chr11 5317414 5317433 5317430 +
ttgcttaggattatagcctc

SEQ ID NO: 19275 - DNA, 20 bp, Artificial Sequence
  Synthetic oligonucleotide; AAG chr11 5317436 5317455 5317452 +
gctccacccatgttgctgaa

SEQ ID NO: 19276 - DNA, 20 bp, Artificial Sequence
  Synthetic oligonucleotide; AGG chr11 5317437 5317456 5317453 +
ctccacccatgttgctgaaa

SEQ ID NO: 19277 - DNA, 20 bp, Artificial Sequence
  Synthetic oligonucleotide; TAG chr11 5317469 5317488 5317485 +
catttgttcttattgccaca

SEQ ID NO: 19278 - DNA, 20 bp, Artificial Sequence
  Synthetic oligonucleotide; TGG chr11 5317472 5317491 5317488 +
ttgttcttattgccacatag

SEQ ID NO: 19279 - DNA, 20 bp, Artificial Sequence
  Synthetic oligonucleotide; TGG chr11 5317475 5317494 5317491 +
ttcttattgccacatagtgg

SEQ ID NO: 19280 - DNA, 20 bp, Artificial Sequence
  Synthetic oligonucleotide; CAG chr11 5317491 5317510 5317507 +
gtggtggtgtatatgtacca

SEQ ID NO: 19281 - DNA, 20 bp, Artificial Sequence
  Synthetic oligonucleotide; TAG chr11 5317518 5317537 5317534 +
tttatcccgtccgcctttga

SEQ ID NO: 19282 - DNA, 20 bp, Artificial Sequence
  Synthetic oligonucleotide; TAG chr11 5317526 5317545 5317542 +
gtccgcctttgatagacacc

SEQ ID NO: 19283 - DNA, 20 bp, Artificial Sequence
  Synthetic oligonucleotide; AGG chr11 5317527 5317546 5317543 +
tccgcctttgatagacacct

SEQ ID NO: 19284 - DNA, 20 bp, Artificial Sequence
  Synthetic oligonucleotide; CAG chr11 5317531 5317550 5317547 +
cctttgatagacacctaggc

SEQ ID NO: 19285 - DNA, 20 bp, Artificial Sequence
  Synthetic oligonucleotide; CAG chr11 5317557 5317576 5317573 +
tttgtatttgctattctaaa

SEQ ID NO: 19286 - DNA, 20 bp, Artificial Sequence
  Synthetic oligonucleotide; CAG chr11 5317565 5317584 5317581 +
tgctattctaaacagcatta

SEQ ID NO: 19287 - DNA, 20 bp, Artificial Sequence
  Synthetic oligonucleotide; AAG chr11 5317577 5317596 5317593 +
cagcattacagtgaacatgc

SEQ ID NO: 19288 - DNA, 20 bp, Artificial Sequence
  Synthetic oligonucleotide; TAG chr11 5317590 5317609 5317606 +
aacatgcaagtgcatgtgtc

SEQ ID NO: 19289 - DNA, 20 bp, Artificial Sequence
  Synthetic oligonucleotide; TGG chr11 5317594 5317613 5317610 +
tgcaagtgcatgtgtctagt

SEQ ID NO: 19290 - DNA, 20 bp, Artificial Sequence
  Synthetic oligonucleotide; TGG chr11 5317617 5317636 5317633 +
tctaatgctctgttttccta

SEQ ID NO: 19291 - DNA, 20 bp, Artificial Sequence
  Synthetic oligonucleotide; CAG chr11 5317629 5317648 5317645 +
ttttcctatggatatatacc

SEQ ID NO: 19292 - DNA, 20 bp, Artificial Sequence
  Synthetic oligonucleotide; TAG chr11 5317632 5317651 5317648 +
tcctatggatatatacccag

SEQ ID NO: 19293 - DNA, 20 bp, Artificial Sequence
  Synthetic oligonucleotide; CGG chr11 5317635 5317654 5317651 +
tatggatatatacccagtag

SEQ ID NO: 19294 - DNA, 20 bp, Artificial Sequence
  Synthetic oligonucleotide; GGG chr11 5317636 5317655 5317652 +
atggatatatacccagtagc

SEQ ID NO: 19295 - DNA, 20 bp, Artificial Sequence
  Synthetic oligonucleotide; TAG chr11 5317656 5317675 5317672 +
gggattgctgtgtcaaattg

SEQ ID NO: 19296 - DNA, 20 bp, Artificial Sequence
  Synthetic oligonucleotide; AAG chr11 5317668 5317687 5317684 +
tcaaattgtagctctgctta

SEQ ID NO: 19297 - DNA, 20 bp, Artificial Sequence
  Synthetic oligonucleotide; AAG chr11 5317678 5317697 5317694 +
gctctgcttaaagttctttg

SEQ ID NO: 19298 - DNA, 20 bp, Artificial Sequence
  Synthetic oligonucleotide; CAG chr11 5317701 5317720 5317717 +
actctccaaactgttttctg

SEQ ID NO: 19299 - DNA, 20 bp, Artificial Sequence
  Synthetic oligonucleotide; TGG chr11 5317704 5317723 5317720 +
ctccaaactgttttctgcag

SEQ ID NO: 19300 - DNA, 20 bp, Artificial Sequence
  Synthetic oligonucleotide; AAG chr11 5317740 5317759 5317756 +
catccccatcatcattgtat

SEQ ID NO: 19301 - DNA, 20 bp, Artificial Sequence
  Synthetic oligonucleotide; TAG chr11 5317759 5317778 5317775 +
taagtgttcccttttctcca

SEQ ID NO: 19302 - DNA, 20 bp, Artificial Sequence
  Synthetic oligonucleotide; GAG chr11 5317768 5317787 5317784 +
ccttttctccatagcctcat

SEQ ID NO: 19303 - DNA, 20 bp, Artificial Sequence
  Synthetic oligonucleotide; TGG chr11 5317782 5317801 5317798 +
cctcatgagaatctgttttt

SEQ ID NO: 19304 - DNA, 20 bp, Artificial Sequence
  Synthetic oligonucleotide; TAG chr11 5317796 5317815 5317812 +
gttttttggctttttaaaaa

SEQ ID NO: 19305 - DNA, 20 bp, Artificial Sequence
  Synthetic oligonucleotide; TGG chr11 5317809 5317828 5317825 +
ttaaaaatagctattctgac

SEQ ID NO: 19306 - DNA, 20 bp, Artificial Sequence
  Synthetic oligonucleotide; GAG chr11 5317815 5317834 5317831 +
atagctattctgactggtat

SEQ ID NO: 19307 - DNA, 20 bp, Artificial Sequence
  Synthetic oligonucleotide; TAG chr11 5317819 5317838 5317835 +
ctattctgactggtatgaga

SEQ ID NO: 19308 - DNA, 20 bp, Artificial Sequence
  Synthetic oligonucleotide; TGG chr11 5317831 5317850 5317847 +
gtatgagatagtatctcttg

SEQ ID NO: 19309 - DNA, 20 bp, Artificial Sequence
  Synthetic oligonucleotide; TAG chr11 5317856 5317875 5317872 +
ttgatttgcatttctctcat

SEQ ID NO: 19310 - DNA, 20 bp, Artificial Sequence
  Synthetic oligonucleotide; TGG chr11 5317888 5317907 5317904 +
tcatttttgtatatatttgt

SEQ ID NO: 19311 - DNA, 20 bp, Artificial Sequence
  Synthetic oligonucleotide; GAG chr11 5317911 5317930 5317927 +
ctgcctgtatgtcttctctt

SEQ ID NO: 19312 - DNA, 20 bp, Artificial Sequence
  Synthetic oligonucleotide; AAG chr11 5317914 5317933 5317930 +
cctgtatgtcttctcttgag

SEQ ID NO: 19313 - DNA, 20 bp, Artificial Sequence
  Synthetic oligonucleotide; GAG chr11 5317916 5317935 5317932 +
tgtatgtcttctcttgagaa

SEQ ID NO: 19314 - DNA, 20 bp, Artificial Sequence
  Synthetic oligonucleotide; TGG chr11 5317927 5317946 5317943 +
tcttgagaagagtctgttcg

SEQ ID NO: 19315 - DNA, 20 bp, Artificial Sequence
  Synthetic oligonucleotide; TGG chr11 5317948 5317967 5317964 +
ggattttgcccatttttaaa

SEQ ID NO: 19316 - DNA, 20 bp, Artificial Sequence
  Synthetic oligonucleotide; TAG chr11 5317992 5318011 5318008 +
tgatatgttcgaattcctta

SEQ ID NO: 19317 - DNA, 20 bp, Artificial Sequence
  Synthetic oligonucleotide; TAG chr11 5318006 5318025 5318022 +
tccttatagattctgaatat

SEQ ID NO: 19318 - DNA, 20 bp, Artificial Sequence
  Synthetic oligonucleotide; CAG chr11 5318017 5318036 5318033 +
tctgaatattagaccttttc

SEQ ID NO: 19319 - DNA, 20 bp, Artificial Sequence
  Synthetic oligonucleotide; CAG chr11 5318025 5318044 5318041 +
ttagaccttttccagatgca

SEQ ID NO: 19320 - DNA, 20 bp, Artificial Sequence
  Synthetic oligonucleotide; TAG chr11 5318036 5318055 5318052 +
ccagatgcacagtttgtgaa

SEQ ID NO: 19321 - DNA, 20 bp, Artificial Sequence
  Synthetic oligonucleotide; TAG chr11 5318053 5318072 5318069 +
gaatagtttctcctatcctg

SEQ ID NO: 19322 - DNA, 20 bp, Artificial Sequence
  Synthetic oligonucleotide; CAG chr11 5318061 5318080 5318077 +
tctcctatcctgtagattgt

SEQ ID NO: 19323 - DNA, 20 bp, Artificial Sequence
  Synthetic oligonucleotide; TAG chr11 5318077 5318096 5318093 +
ttgtcagtttactctgttga

SEQ ID NO: 19324 - DNA, 20 bp, Artificial Sequence
  Synthetic oligonucleotide; CAG chr11 5318094 5318113 5318110 +
tgatagtttcttctgctgca

SEQ ID NO: 19325 - DNA, 20 bp, Artificial Sequence
  Synthetic oligonucleotide; AAG chr11 5318097 5318116 5318113 +
tagtttcttctgctgcacag

SEQ ID NO: 19326 - DNA, 20 bp, Artificial Sequence
  Synthetic oligonucleotide; AAG chr11 5318127 5318146 5318143 +
tattattattattatacttt

SEQ ID NO: 19327 - DNA, 20 bp, Artificial Sequence
  Synthetic oligonucleotide; TAG chr11 5318133 5318152 5318149 +
tattattatactttaagttc

SEQ ID NO: 19328 - DNA, 20 bp, Artificial Sequence
  Synthetic oligonucleotide; AGG chr11 5318134 5318153 5318150 +
attattatactttaagttct

SEQ ID NO: 19329 - DNA, 20 bp, Artificial Sequence
  Synthetic oligonucleotide; GGG chr11 5318135 5318154 5318151 +
ttattatactttaagttcta

SEQ ID NO: 19330 - DNA, 20 bp, Artificial Sequence
  Synthetic oligonucleotide; CAG chr11 5318155 5318174 5318171 +
gggtacatgtgcgcaacgtg

SEQ ID NO: 19331 - DNA, 20 bp, Artificial Sequence
  Synthetic oligonucleotide; AGG chr11 5318156 5318175 5318172 +
ggtacatgtgcgcaacgtgc

SEQ ID NO: 19332 - DNA, 20 bp, Artificial Sequence
  Synthetic oligonucleotide; TGG chr11 5318188 5318207 5318204 +
tatgtatacatgtgccatgt

SEQ ID NO: 19333 - DNA, 20 bp, Artificial Sequence
  Synthetic oligonucleotide; TAG chr11 5318222 5318241 5318238 +
cattaactcatcatttacat

SEQ ID NO: 19334 - DNA, 20 bp, Artificial Sequence
  Synthetic oligonucleotide; AGG chr11 5318223 5318242 5318239 +
attaactcatcatttacatt

SEQ ID NO: 19335 - DNA, 20 bp, Artificial Sequence
  Synthetic oligonucleotide; CAG chr11 5318274 5318293 5318290 +
cccccacccccaccccacaa

SEQ ID NO: 19336 - DNA, 20 bp, Artificial Sequence
  Synthetic oligonucleotide; AGG chr11 5318275 5318294 5318291 +
ccccacccccaccccacaac

SEQ ID NO: 19337 - DNA, 20 bp, Artificial Sequence
  Synthetic oligonucleotide; TGG chr11 5318281 5318300 5318297 +
ccccaccccacaacaggccc

SEQ ID NO: 19338 - DNA, 20 bp, Artificial Sequence
  Synthetic oligonucleotide; AAG chr11 5318310 5318329 5318326 +
atgttccccttcctctgtcc

SEQ ID NO: 19339 - DNA, 20 bp, Artificial Sequence
  Synthetic oligonucleotide; AAG chr11 5318340 5318359 5318356 +
attgttcaattcccacctat

SEQ ID NO: 19340 - DNA, 20 bp, Artificial Sequence
  Synthetic oligonucleotide; GAG chr11 5318344 5318363 5318360 +
ttcaattcccacctataagt

SEQ ID NO: 19341 - DNA, 20 bp, Artificial Sequence
  Synthetic oligonucleotide; TGG chr11 5318353 5318372 5318369 +
cacctataagtgagaacatg

SEQ ID NO: 19342 - DNA, 20 bp, Artificial Sequence
  Synthetic oligonucleotide; TGG chr11 5318360 5318379 5318376 +
aagtgagaacatgtggtatt

SEQ ID NO: 19343 - DNA, 20 bp, Artificial Sequence
  Synthetic oligonucleotide; TAG chr11 5318379 5318398 5318395 +
ttggttttttgtccttgtga

SEQ ID NO: 19344 - DNA, 20 bp, Artificial Sequence
  Synthetic oligonucleotide; GAG chr11 5318388 5318407 5318404 +
tgtccttgtgatagtttgct

SEQ ID NO: 19345 - DNA, 20 bp, Artificial Sequence
  Synthetic oligonucleotide; TGG chr11 5318396 5318415 5318412 +
tgatagtttgctgagaatga

SEQ ID NO: 19346 - DNA, 20 bp, Artificial Sequence
  Synthetic oligonucleotide; CAG chr11 5318403 5318422 5318419 +
ttgctgagaatgatggtttc

SEQ ID NO: 19347 - DNA, 20 bp, Artificial Sequence
  Synthetic oligonucleotide; AAG chr11 5318425 5318444 5318441 +
gcttcatccatgtccctaca

SEQ ID NO: 19348 - DNA, 20 bp, Artificial Sequence
  Synthetic oligonucleotide; AGG chr11 5318426 5318445 5318442 +
cttcatccatgtccctacaa

SEQ ID NO: 19349 - DNA, 20 bp, Artificial Sequence
  Synthetic oligonucleotide; TGG chr11 5318450 5318469 5318466 +
catgaactcatcatttttta

SEQ ID NO: 19350 - DNA, 20 bp, Artificial Sequence
  Synthetic oligonucleotide; TAG chr11 5318458 5318477 5318474 +
catcattttttatggctgca

SEQ ID NO: 19351 - DNA, 20 bp, Artificial Sequence
  Synthetic oligonucleotide; TGG chr11 5318468 5318487 5318484 +
tatggctgcatagtattcca

SEQ ID NO: 19352 - DNA, 20 bp, Artificial Sequence
  Synthetic oligonucleotide; TGG chr11 5318511 5318530 5318527 +
ttaatccattctatcattgt

SEQ ID NO: 19353 - DNA, 20 bp, Artificial Sequence
  Synthetic oligonucleotide; TGG chr11 5318519 5318538 5318535 +
ttctatcattgttggacatt

SEQ ID NO: 19354 - DNA, 20 bp, Artificial Sequence
  Synthetic oligonucleotide; GGG chr11 5318520 5318539 5318536 +
tctatcattgttggacattt

SEQ ID NO: 19355 - DNA, 20 bp, Artificial Sequence
  Synthetic oligonucleotide; TGG chr11 5318524 5318543 5318540 +
tcattgttggacatttgggt

SEQ ID NO: 19356 - DNA, 20 bp, Artificial Sequence
  Synthetic oligonucleotide; AAG chr11 5318531 5318550 5318547 +
tggacatttgggttggttcc

SEQ ID NO: 19357 - DNA, 20 bp, Artificial Sequence
  Synthetic oligonucleotide; TAG chr11 5318550 5318569 5318566 +
caagtctttgttattgtgaa

SEQ ID NO: 19358 - DNA, 20 bp, Artificial Sequence
  Synthetic oligonucleotide; AAG chr11 5318555 5318574 5318571 +
ctttgttattgtgaatagtg

SEQ ID NO: 19359 - DNA, 20 bp, Artificial Sequence
  Synthetic oligonucleotide; TAG chr11 5318563 5318582 5318579 +
ttgtgaatagtgaagctctt

SEQ ID NO: 19360 - DNA, 20 bp, Artificial Sequence
  Synthetic oligonucleotide; TAG chr11 5318572 5318591 5318588 +
gtgaagctctttagtttaat

SEQ ID NO: 19361 - DNA, 20 bp, Artificial Sequence
  Synthetic oligonucleotide; AGG chr11 5318573 5318592 5318589 +
tgaagctctttagtttaatt

SEQ ID NO: 19362 - DNA, 20 bp, Artificial Sequence
  Synthetic oligonucleotide; TGG chr11 5318614 5318633 5318630 +
ctttgcattgcaattgcttt

SEQ ID NO: 19363 - DNA, 20 bp, Artificial Sequence
  Synthetic oligonucleotide; GGG chr11 5318615 5318634 5318631 +
tttgcattgcaattgctttt

SEQ ID NO: 19364 - DNA, 20 bp, Artificial Sequence
  Synthetic oligonucleotide; GGG chr11 5318616 5318635 5318632 +
ttgcattgcaattgcttttg

SEQ ID NO: 19365 - DNA, 20 bp, Artificial Sequence
  Synthetic oligonucleotide; GGG chr11 5318617 5318636 5318633 +
tgcattgcaattgcttttgg

SEQ ID NO: 19366 - DNA, 20 bp, Artificial Sequence
  Synthetic oligonucleotide; TAG chr11 5318622 5318641 5318638 +
tgcaattgcttttgggggct

SEQ ID NO: 19367 - DNA, 20 bp, Artificial Sequence
  Synthetic oligonucleotide; CAG chr11 5318640 5318659 5318656 +
cttagccaaaaatgcactgc

SEQ ID NO: 19368 - DNA, 20 bp, Artificial Sequence
  Synthetic oligonucleotide; CAG chr11 5318645 5318664 5318661 +
ccaaaaatgcactgccagtg

SEQ ID NO: 19369 - DNA, 20 bp, Artificial Sequence
  Synthetic oligonucleotide; AGG chr11 5318646 5318665 5318662 +
caaaaatgcactgccagtgc

SEQ ID NO: 19370 - DNA, 20 bp, Artificial Sequence
  Synthetic oligonucleotide; AAG chr11 5318650 5318669 5318666 +
aatgcactgccagtgcaggt

SEQ ID NO: 19371 - DNA, 20 bp, Artificial Sequence
  Synthetic oligonucleotide; GAG chr11 5318657 5318676 5318673 +
tgccagtgcaggtaagattt

SEQ ID NO: 19372 - DNA, 20 bp, Artificial Sequence
  Synthetic oligonucleotide; AAG chr11 5318671 5318690 5318687 +
agatttgagatcttacattt

SEQ ID NO: 19373 - DNA, 20 bp, Artificial Sequence
  Synthetic oligonucleotide; CAG chr11 5318689 5318708 5318705 +
ttaagttttgaattcatttt

SEQ ID NO: 19374 - DNA, 20 bp, Artificial Sequence
  Synthetic oligonucleotide; TGG chr11 5318706 5318725 5318722 +
tttcagttgatttctctaaa

SEQ ID NO: 19375 - DNA, 20 bp, Artificial Sequence
  Synthetic oligonucleotide; AAG chr11 5318712 5318731 5318728 +
ttgatttctctaaatggtgt

SEQ ID NO: 19376 - DNA, 20 bp, Artificial Sequence
  Synthetic oligonucleotide; AGG chr11 5318713 5318732 5318729 +
tgatttctctaaatggtgta

SEQ ID NO: 19377 - DNA, 20 bp, Artificial Sequence
  Synthetic oligonucleotide; AAG chr11 5318717 5318736 5318733 +
ttctctaaatggtgtaaggt

SEQ ID NO: 19378 - DNA, 20 bp, Artificial Sequence
  Synthetic oligonucleotide; AGG chr11 5318718 5318737 5318734 +
tctctaaatggtgtaaggta

SEQ ID NO: 19379 - DNA, 20 bp, Artificial Sequence
  Synthetic oligonucleotide; GGG chr11 5318719 5318738 5318735 +
ctctaaatggtgtaaggtaa

SEQ ID NO: 19380 - DNA, 20 bp, Artificial Sequence
  Synthetic oligonucleotide; TAG chr11 5318724 5318743 5318740 +
aatggtgtaaggtaagggtc

SEQ ID NO: 19381 - DNA, 20 bp, Artificial Sequence
  Synthetic oligonucleotide; TGG chr11 5318744 5318763 5318760 +
tagtttcattcttctgcata

SEQ ID NO: 19382 - DNA, 20 bp, Artificial Sequence
  Synthetic oligonucleotide; TAG chr11 5318748 5318767 5318764 +
ttcattcttctgcatatggc

SEQ ID NO: 19383 - DNA, 20 bp, Artificial Sequence
  Synthetic oligonucleotide; CAG chr11 5318761 5318780 5318777 +
atatggctagccacgtattc

SEQ ID NO: 19384 - DNA, 20 bp, Artificial Sequence
  Synthetic oligonucleotide; CAG chr11 5318766 5318785 5318782 +
gctagccacgtattccagca

SEQ ID NO: 19385 - DNA, 20 bp, Artificial Sequence
  Synthetic oligonucleotide; TGG chr11 5318774 5318793 5318790 +
cgtattccagcacagtttat

SEQ ID NO: 19386 - DNA, 20 bp, Artificial Sequence
  Synthetic oligonucleotide; TAG chr11 5318778 5318797 5318794 +
ttccagcacagtttattgga

SEQ ID NO: 19387 - DNA, 20 bp, Artificial Sequence
  Synthetic oligonucleotide; AGG chr11 5318779 5318798 5318795 +
tccagcacagtttattggat

SEQ ID NO: 19388 - DNA, 20 bp, Artificial Sequence
  Synthetic oligonucleotide; TAG chr11 5318782 5318801 5318798 +
agcacagtttattggatagg

SEQ ID NO: 19389 - DNA, 20 bp, Artificial Sequence
  Synthetic oligonucleotide; CAG chr11 5318810 5318829 5318826 +
ttcccgctgcttgtttttgt

SEQ ID NO: 19390 - DNA, 20 bp, Artificial Sequence
  Synthetic oligonucleotide; AAG chr11 5318821 5318840 5318837 +
tgtttttgtcagtgttgttg

SEQ ID NO: 19391 - DNA, 20 bp, Artificial Sequence
  Synthetic oligonucleotide; CAG chr11 5318826 5318845 5318842 +
ttgtcagtgttgttgaagat

SEQ ID NO: 19392 - DNA, 20 bp, Artificial Sequence
  Synthetic oligonucleotide; TGG chr11 5318830 5318849 5318846 +
cagtgttgttgaagatcaga

SEQ ID NO: 19393 - DNA, 20 bp, Artificial Sequence
  Synthetic oligonucleotide; TAG chr11 5318844 5318863 5318860 +
atcagatggttgtaactatg

SEQ ID NO: 19394 - DNA, 20 bp, Artificial Sequence
  Synthetic oligonucleotide; GAG chr11 5318857 5318876 5318873 +
aactatgtagctttattttt

SEQ ID NO: 19395 - DNA, 20 bp, Artificial Sequence
  Synthetic oligonucleotide; TAG chr11 5318878 5318897 5318894 +
agttttctattgtgtttcct

SEQ ID NO: 19396 - DNA, 20 bp, Artificial Sequence
  Synthetic oligonucleotide; TGG chr11 5318917 5318936 5318933 +
tgtaacaatatcatgctgtt

SEQ ID NO: 19397 - DNA, 20 bp, Artificial Sequence
  Synthetic oligonucleotide; GGG chr11 5318918 5318937 5318934 +
gtaacaatatcatgctgttt

SEQ ID NO: 19398 - DNA, 20 bp, Artificial Sequence
  Synthetic oligonucleotide; GGG chr11 5318919 5318938 5318935 +
taacaatatcatgctgtttg

SEQ ID NO: 19399 - DNA, 20 bp, Artificial Sequence
  Synthetic oligonucleotide; TGG chr11 5318927 5318946 5318943 +
tcatgctgtttggggtactg

SEQ ID NO: 19400 - DNA, 20 bp, Artificial Sequence
  Synthetic oligonucleotide; TAG chr11 5318940 5318959 5318956 +
ggtactgtggccttataatg

SEQ ID NO: 19401 - DNA, 20 bp, Artificial Sequence
  Synthetic oligonucleotide; CAG chr11 5318996 5319015 5319012 +
tctttctttttttatttttt

SEQ ID NO: 19402 - DNA, 20 bp, Artificial Sequence
  Synthetic oligonucleotide; GAG chr11 5318998 5319017 5319014 +
tttctttttttattttttca

SEQ ID NO: 19403 - DNA, 20 bp, Artificial Sequence
  Synthetic oligonucleotide; CAG chr11 5319016 5319035 5319032 +
cagagtttcactctgtcacc

SEQ ID NO: 19404 - DNA, 20 bp, Artificial Sequence
  Synthetic oligonucleotide; AGG chr11 5319017 5319036 5319033 +
agagtttcactctgtcaccc

SEQ ID NO: 19405 - DNA, 20 bp, Artificial Sequence
  Synthetic oligonucleotide; TGG chr11 5319021 5319040 5319037 +
tttcactctgtcacccaggc

SEQ ID NO: 19406 - DNA, 20 bp, Artificial Sequence
  Synthetic oligonucleotide; GAG chr11 5319023 5319042 5319039 +
tcactctgtcacccaggctg

SEQ ID NO: 19407 - DNA, 20 bp, Artificial Sequence
  Synthetic oligonucleotide; CAG chr11 5319028 5319047 5319044 +
ctgtcacccaggctggagtg

SEQ ID NO: 19408 - DNA, 20 bp, Artificial Sequence
  Synthetic oligonucleotide; TGG chr11 5319031 5319050 5319047 +
tcacccaggctggagtgcag

SEQ ID NO: 19409 - DNA, 20 bp, Artificial Sequence
  Synthetic oligonucleotide; TGG chr11 5319042 5319061 5319058 +
ggagtgcagtggtgcgatct

SEQ ID NO: 19410 - DNA, 20 bp, Artificial Sequence
  Synthetic oligonucleotide; CAG chr11 5319065 5319084 5319081 +
ctcactgcaccgtctgcctc

SEQ ID NO: 19411 - DNA, 20 bp, Artificial Sequence
  Synthetic oligonucleotide; GAG chr11 5319067 5319086 5319083 +
cactgcaccgtctgcctcca

SEQ ID NO: 19412 - DNA, 20 bp, Artificial Sequence
  Synthetic oligonucleotide; AAG chr11 5319073 5319092 5319089 +
accgtctgcctccagagttc

SEQ ID NO: 19413 - DNA, 20 bp, Artificial Sequence
  Synthetic oligonucleotide; CAG chr11 5319090 5319109 5319106 +
ttcaagcaattctcctgcct

SEQ ID NO: 19414 - DNA, 20 bp, Artificial Sequence
  Synthetic oligonucleotide; GAG chr11 5319099 5319118 5319115 +
ttctcctgcctcagccttcc

SEQ ID NO: 19415 - DNA, 20 bp, Artificial Sequence
  Synthetic oligonucleotide; TAG chr11 5319102 5319121 5319118 +
tcctgcctcagccttccgag

SEQ ID NO: 19416 - DNA, 20 bp, Artificial Sequence
  Synthetic oligonucleotide; TGG chr11 5319106 5319125 5319122 +
gcctcagccttccgagtagc

SEQ ID NO: 19417 - DNA, 20 bp, Artificial Sequence
  Synthetic oligonucleotide; GGG chr11 5319107 5319126 5319123 +
cctcagccttccgagtagct

SEQ ID NO: 19418 - DNA, 20 bp, Artificial Sequence
  Synthetic oligonucleotide; CAG chr11 5319114 5319133 5319130 +
cttccgagtagctgggatta

SEQ ID NO: 19419 - DNA, 20 bp, Artificial Sequence
  Synthetic oligonucleotide; CAG chr11 5319129 5319148 5319145 +
gattacagcccccaccacca

SEQ ID NO: 19420 - DNA, 20 bp, Artificial Sequence
  Synthetic oligonucleotide; CGG chr11 5319133 5319152 5319149 +
acagcccccaccaccacagc

SEQ ID NO: 19421 - DNA, 20 bp, Artificial Sequence
  Synthetic oligonucleotide; TAG chr11 5319151 5319170 5319167 +
gccggctaattttgtatttt

SEQ ID NO: 19422 - DNA, 20 bp, Artificial Sequence
  Synthetic oligonucleotide; TAG chr11 5319154 5319173 5319170 +
ggctaattttgtatttttag

SEQ ID NO: 19423 - DNA, 20 bp, Artificial Sequence
  Synthetic oligonucleotide; GAG chr11 5319156 5319175 5319172 +
ctaattttgtatttttagta

SEQ ID NO: 19424 - DNA, 20 bp, Artificial Sequence
  Synthetic oligonucleotide; CAG chr11 5319160 5319179 5319176 +
ttttgtatttttagtagaga

SEQ ID NO: 19425 - DNA, 20 bp, Artificial Sequence
  Synthetic oligonucleotide; CAG chr11 5319180 5319199 5319196 +
cagtgtttcaccatgttgac

SEQ ID NO: 19426 - DNA, 20 bp, Artificial Sequence
  Synthetic oligonucleotide; AGG chr11 5319181 5319200 5319197 +
agtgtttcaccatgttgacc

SEQ ID NO: 19427 - DNA, 20 bp, Artificial Sequence
  Synthetic oligonucleotide; TGG chr11 5319185 5319204 5319201 +
tttcaccatgttgaccaggc

SEQ ID NO: 19428 - DNA, 20 bp, Artificial Sequence
  Synthetic oligonucleotide; CAG chr11 5319205 5319224 5319221 +
tggtcttgaactcctgacct

SEQ ID NO: 19429 - DNA, 20 bp, Artificial Sequence
  Synthetic oligonucleotide; AGG chr11 5319206 5319225 5319222 +
ggtcttgaactcctgacctc

SEQ ID NO: 19430 - DNA, 20 bp, Artificial Sequence
  Synthetic oligonucleotide; CAG chr11 5319223 5319242 5319239 +
ctcaggtgatacacccacct

SEQ ID NO: 19431 - DNA, 20 bp, Artificial Sequence
  Synthetic oligonucleotide; AAG chr11 5319233 5319252 5319249 +
acacccacctcagcccccta

SEQ ID NO: 19432 - DNA, 20 bp, Artificial Sequence
  Synthetic oligonucleotide; TAG chr11 5319239 5319258 5319255 +
acctcagccccctaaagtgc

SEQ ID NO: 19433 - DNA, 20 bp, Artificial Sequence
  Synthetic oligonucleotide; GAG chr11 5319241 5319260 5319257 +
ctcagccccctaaagtgcta

SEQ ID NO: 19434 - DNA, 20 bp, Artificial Sequence
  Synthetic oligonucleotide; CAG chr11 5319247 5319266 5319263 +
cccctaaagtgctagagtta

SEQ ID NO: 19435 - DNA, 20 bp, Artificial Sequence
  Synthetic oligonucleotide; AGG chr11 5319248 5319267 5319264 +
ccctaaagtgctagagttac

SEQ ID NO: 19436 - DNA, 20 bp, Artificial Sequence
  Synthetic oligonucleotide; GAG chr11 5319254 5319273 5319270 +
agtgctagagttacaggcgt

SEQ ID NO: 19437 - DNA, 20 bp, Artificial Sequence
  Synthetic oligonucleotide; TGG chr11 5319267 5319286 5319283 +
caggcgtgagccaccgtgcc

SEQ ID NO: 19438 - DNA, 20 bp, Artificial Sequence
  Synthetic oligonucleotide; TAG chr11 5319274 5319293 5319290 +
gagccaccgtgcctggcctg

SEQ ID NO: 19439 - DNA, 20 bp, Artificial Sequence
  Synthetic oligonucleotide; AAG chr11 5319281 5319300 5319297 +
cgtgcctggcctgtagtttc

SEQ ID NO: 19440 - DNA, 20 bp, Artificial Sequence
  Synthetic oligonucleotide; CAG chr11 5319285 5319304 5319301 +
cctggcctgtagtttcaagt

SEQ ID NO: 19441 - DNA, 20 bp, Artificial Sequence
  Synthetic oligonucleotide; AGG chr11 5319286 5319305 5319302 +
ctggcctgtagtttcaagtc

SEQ ID NO: 19442 - DNA, 20 bp, Artificial Sequence
  Synthetic oligonucleotide; TGG chr11 5319289 5319308 5319305 +
gcctgtagtttcaagtcagg

SEQ ID NO: 19443 - DNA, 20 bp, Artificial Sequence
  Synthetic oligonucleotide; TGG chr11 5319294 5319313 5319310 +
tagtttcaagtcaggtggtg

SEQ ID NO: 19444 - DNA, 20 bp, Artificial Sequence
  Synthetic oligonucleotide; AAG chr11 5319323 5319342 5319339 +
caattttgttctttctgctt

SEQ ID NO: 19445 - DNA, 20 bp, Artificial Sequence
  Synthetic oligonucleotide; CAG chr11 5319341 5319360 5319357 +
ttaagattgctttgcctgtt

SEQ ID NO: 19446 - DNA, 20 bp, Artificial Sequence
  Synthetic oligonucleotide; AGG chr11 5319342 5319361 5319358 +
taagattgctttgcctgttc

SEQ ID NO: 19447 - DNA, 20 bp, Artificial Sequence
  Synthetic oligonucleotide; TGG chr11 5319352 5319371 5319368 +
ttgcctgttcaggctctttt

SEQ ID NO: 19448 - DNA, 20 bp, Artificial Sequence
  Synthetic oligonucleotide; TAG chr11 5319374 5319393 5319390 +
gttccatatgaattttaaac

SEQ ID NO: 19449 - DNA, 20 bp, Artificial Sequence
  Synthetic oligonucleotide; AAG chr11 5319393 5319412 5319409 +
ctagtttttctaatactgtg

SEQ ID NO: 19450 - DNA, 20 bp, Artificial Sequence
  Synthetic oligonucleotide; TGG chr11 5319404 5319423 5319420 +
aatactgtgaagaatgacat

SEQ ID NO: 19451 - DNA, 20 bp, Artificial Sequence
  Synthetic oligonucleotide; TGG chr11 5319411 5319430 5319427 +
tgaagaatgacattggtaat

SEQ ID NO: 19452 - DNA, 20 bp, Artificial Sequence
  Synthetic oligonucleotide; TAG chr11 5319415 5319434 5319431 +
gaatgacattggtaattgga

SEQ ID NO: 19453 - DNA, 20 bp, Artificial Sequence
  Synthetic oligonucleotide; GAG chr11 5319446 5319465 5319462 +
atgaatgtctaaattgcttt

SEQ ID NO: 19454 - DNA, 20 bp, Artificial Sequence
  Synthetic oligonucleotide; CAG chr11 5319449 5319468 5319465 +
aatgtctaaattgctttgag

SEQ ID NO: 19455 - DNA, 20 bp, Artificial Sequence
  Synthetic oligonucleotide; TGG chr11 5319454 5319473 5319470 +
ctaaattgctttgagcagta

SEQ ID NO: 19456 - DNA, 20 bp, Artificial Sequence
  Synthetic oligonucleotide; GAG chr11 5319490 5319509 5319506 +
tattgattcttccaatccat

SEQ ID NO: 19457 - DNA, 20 bp, Artificial Sequence
  Synthetic oligonucleotide; TGG chr11 5319495 5319514 5319511 +
attcttccaatccatgagcc

SEQ ID NO: 19458 - DNA, 20 bp, Artificial Sequence
  Synthetic oligonucleotide; AAG chr11 5319499 5319518 5319515 +
ttccaatccatgagcctgga

SEQ ID NO: 19459 - DNA, 20 bp, Artificial Sequence
  Synthetic oligonucleotide; CAG chr11 5319539 5319558 5319555 +
gtgttgtttctgatttcttt

SEQ ID NO: 19460 - DNA, 20 bp, Artificial Sequence
  Synthetic oligonucleotide; CAG chr11 5319542 5319561 5319558 +
ttgtttctgatttctttcag

SEQ ID NO: 19461 - DNA, 20 bp, Artificial Sequence
  Synthetic oligonucleotide; TAG chr11 5319552 5319571 5319568 +
tttctttcagcagtgttttg

SEQ ID NO: 19462 - DNA, 20 bp, Artificial Sequence
  Synthetic oligonucleotide; TAG chr11 5319564 5319583 5319580 +
gtgttttgtagttctccttg

SEQ ID NO: 19463 - DNA, 20 bp, Artificial Sequence
  Synthetic oligonucleotide; GAG chr11 5319566 5319585 5319582 +
gttttgtagttctccttgta

SEQ ID NO: 19464 - DNA, 20 bp, Artificial Sequence
  Synthetic oligonucleotide; TAG chr11 5319605 5319624 5319621 +
aaaccatatgatcatctcaa

SEQ ID NO: 19465 - DNA, 20 bp, Artificial Sequence
  Synthetic oligonucleotide; GAG chr11 5319611 5319630 5319627 +
tatgatcatctcaatagact

SEQ ID NO: 19466 - DNA, 20 bp, Artificial Sequence
  Synthetic oligonucleotide; CAG chr11 5319663 5319682 5319679 +
ttcatgataaaaacctccaa

SEQ ID NO: 19467 - DNA, 20 bp, Artificial Sequence
  Synthetic oligonucleotide; TAG chr11 5319668 5319687 5319684 +
gataaaaacctccaacagac

SEQ ID NO: 19468 - DNA, 20 bp, Artificial Sequence
  Synthetic oligonucleotide; AGG chr11 5319669 5319688 5319685 +
ataaaaacctccaacagact

SEQ ID NO: 19469 - DNA, 20 bp, Artificial Sequence
  Synthetic oligonucleotide; AAG chr11 5319677 5319696 5319693 +
ctccaacagactaggcatca

SEQ ID NO: 19470 - DNA, 20 bp, Artificial Sequence
  Synthetic oligonucleotide; AGG chr11 5319678 5319697 5319694 +
tccaacagactaggcatcaa

SEQ ID NO: 19471 - DNA, 20 bp, Artificial Sequence
  Synthetic oligonucleotide; AAG chr11 5319693 5319712 5319709 +
atcaaaggaacatacctcaa

SEQ ID NO: 19472 - DNA, 20 bp, Artificial Sequence
  Synthetic oligonucleotide; AAG chr11 5319701 5319720 5319717 +
aacatacctcaaaagaataa

SEQ ID NO: 19473 - DNA, 20 bp, Artificial Sequence
  Synthetic oligonucleotide; TGG chr11 5319741 5319760 5319757 +
ataaccaaaaccatactgaa

SEQ ID NO: 19474 - DNA, 20 bp, Artificial Sequence
  Synthetic oligonucleotide; GGG chr11 5319742 5319761 5319758 +
taaccaaaaccatactgaat

SEQ ID NO: 19475 - DNA, 20 bp, Artificial Sequence
  Synthetic oligonucleotide; AAG chr11 5319748 5319767 5319764 +
aaaccatactgaatgggcaa

SEQ ID NO: 19476 - DNA, 20 bp, Artificial Sequence
  Synthetic oligonucleotide; TGG chr11 5319752 5319771 5319768 +
catactgaatgggcaaaagc

SEQ ID NO: 19477 - DNA, 20 bp, Artificial Sequence
  Synthetic oligonucleotide; AAG chr11 5319780 5319799 5319796 +
ttctcctcgaaaactgcaac

SEQ ID NO: 19478 - DNA, 20 bp, Artificial Sequence
  Synthetic oligonucleotide; AAG chr11 5319785 5319804 5319801 +
ctcgaaaactgcaacaagac

SEQ ID NO: 19479 - DNA, 20 bp, Artificial Sequence
  Synthetic oligonucleotide; AGG chr11 5319786 5319805 5319802 +
tcgaaaactgcaacaagaca

SEQ ID NO: 19480 - DNA, 20 bp, Artificial Sequence
  Synthetic oligonucleotide; TAG chr11 5319809 5319828 5319825 +
attcccattctcaccactcc

SEQ ID NO: 19481 - DNA, 20 bp, Artificial Sequence
  Synthetic oligonucleotide; TGG chr11 5319824 5319843 5319840 +
actcctagtgaacataaaat

SEQ ID NO: 19482 - DNA, 20 bp, Artificial Sequence
  Synthetic oligonucleotide; AAG chr11 5319827 5319846 5319843 +
cctagtgaacataaaattgg

SEQ ID NO: 19483 - DNA, 20 bp, Artificial Sequence
  Synthetic oligonucleotide; CAG chr11 5319837 5319856 5319853 +
ataaaattggaagtcctaac

SEQ ID NO: 19484 - DNA, 20 bp, Artificial Sequence
  Synthetic oligonucleotide; AGG chr11 5319838 5319857 5319854 +
taaaattggaagtcctaacc

SEQ ID NO: 19485 - DNA, 20 bp, Artificial Sequence
  Synthetic oligonucleotide; GGG chr11 5319839 5319858 5319855 +
aaaattggaagtcctaacca

SEQ ID NO: 19486 - DNA, 20 bp, Artificial Sequence
  Synthetic oligonucleotide; CAG chr11 5319846 5319865 5319862 +
gaagtcctaaccagggcaat

SEQ ID NO: 19487 - DNA, 20 bp, Artificial Sequence
  Synthetic oligonucleotide; AGG chr11 5319847 5319866 5319863 +
aagtcctaaccagggcaatc

SEQ ID NO: 19488 - DNA, 20 bp, Artificial Sequence
  Synthetic oligonucleotide; GAG chr11 5319851 5319870 5319867 +
cctaaccagggcaatcaggc

SEQ ID NO: 19489 - DNA, 20 bp, Artificial Sequence
  Synthetic oligonucleotide; GAG chr11 5319853 5319872 5319869 +
taaccagggcaatcaggcga

SEQ ID NO: 19490 - DNA, 20 bp, Artificial Sequence
  Synthetic oligonucleotide; AAG chr11 5319857 5319876 5319873 +
cagggcaatcaggcgagaga

SEQ ID NO: 19491 - DNA, 20 bp, Artificial Sequence
  Synthetic oligonucleotide; AAG chr11 5319861 5319880 5319877 +
gcaatcaggcgagagaaaga

SEQ ID NO: 19492 - DNA, 20 bp, Artificial Sequence
  Synthetic oligonucleotide; TGG chr11 5319867 5319886 5319883 +
aggcgagagaaagaaagaaa

SEQ ID NO: 19493 - DNA, 20 bp, Artificial Sequence
  Synthetic oligonucleotide; TAG chr11 5319878 5319897 5319894 +
agaaagaaatggcatcaaaa

SEQ ID NO: 19494 - DNA, 20 bp, Artificial Sequence
  Synthetic oligonucleotide; AGG chr11 5319879 5319898 5319895 +
gaaagaaatggcatcaaaat

SEQ ID NO: 19495 - DNA, 20 bp, Artificial Sequence
  Synthetic oligonucleotide; AAG chr11 5319887 5319906 5319903 +
tggcatcaaaataggacaat

SEQ ID NO: 19496 - DNA, 20 bp, Artificial Sequence
  Synthetic oligonucleotide; TAG chr11 5319929 5319948 5319945 +
tgatgatatgactctatact

SEQ ID NO: 19497 - DNA, 20 bp, Artificial Sequence
  Synthetic oligonucleotide; CAG chr11 5319941 5319960 5319957 +
tctatacttagaaaatccta

SEQ ID NO: 19498 - DNA, 20 bp, Artificial Sequence
  Synthetic oligonucleotide; AAG chr11 5319954 5319973 5319970 +
aatcctacagattcttccaa

SEQ ID NO: 19499 - DNA, 20 bp, Artificial Sequence
  Synthetic oligonucleotide; AGG chr11 5319955 5319974 5319971 +
atcctacagattcttccaaa

SEQ ID NO: 19500 - DNA, 20 bp, Artificial Sequence
  Synthetic oligonucleotide; TAG chr11 5319962 5319981 5319978 +
agattcttccaaaaggctgc

SEQ ID NO: 19501 - DNA, 20 bp, Artificial Sequence
  Synthetic oligonucleotide; TAG chr11 5319981 5320000 5319997 +
ctagaactgataaacaattt

SEQ ID NO: 19502 - DNA, 20 bp, Artificial Sequence
  Synthetic oligonucleotide; AAG chr11 5319985 5320004 5320001 +
aactgataaacaattttagc

SEQ ID NO: 19503 - DNA, 20 bp, Artificial Sequence
  Synthetic oligonucleotide; AGG chr11 5319986 5320005 5320002 +
actgataaacaattttagca

SEQ ID NO: 19504 - DNA, 20 bp, Artificial Sequence
  Synthetic oligonucleotide; CAG chr11 5319992 5320011 5320008 +
aaacaattttagcaaggttt

SEQ ID NO: 19505 - DNA, 20 bp, Artificial Sequence
  Synthetic oligonucleotide; AGG chr11 5319993 5320012 5320009 +
aacaattttagcaaggtttc

SEQ ID NO: 19506 - DNA, 20 bp, Artificial Sequence
  Synthetic oligonucleotide; CAG chr11 5320018 5320037 5320034 +
acaaaatcacatacaaaaat

SEQ ID NO: 19507 - DNA, 20 bp, Artificial Sequence
  Synthetic oligonucleotide; TAG chr11 5320021 5320040 5320037 +
aaatcacatacaaaaatcag

SEQ ID NO: 19508 - DNA, 20 bp, Artificial Sequence
  Synthetic oligonucleotide; AAG chr11 5320041 5320060 5320057 +
tagcatttccatacaccaat

SEQ ID NO: 19509 - DNA, 20 bp, Artificial Sequence
  Synthetic oligonucleotide; AGG chr11 5320042 5320061 5320058 +
agcatttccatacaccaata

SEQ ID NO: 19510 - DNA, 20 bp, Artificial Sequence
  Synthetic oligonucleotide; CAG chr11 5320047 5320066 5320063 +
ttccatacaccaataaggcc

SEQ ID NO: 19511 - DNA, 20 bp, Artificial Sequence
  Synthetic oligonucleotide; AGG chr11 5320048 5320067 5320064 +
tccatacaccaataaggccc

SEQ ID NO: 19512 - DNA, 20 bp, Artificial Sequence
  Synthetic oligonucleotide; GAG chr11 5320053 5320072 5320069 +
acaccaataaggcccaggct

SEQ ID NO: 19513 - DNA, 20 bp, Artificial Sequence
  Synthetic oligonucleotide; GAG chr11 5320055 5320074 5320071 +
accaataaggcccaggctga

SEQ ID NO: 19514 - DNA, 20 bp, Artificial Sequence
  Synthetic oligonucleotide; GAG chr11 5320065 5320084 5320081 +
cccaggctgagagtcaaatc

SEQ ID NO: 19515 - DNA, 20 bp, Artificial Sequence
  Synthetic oligonucleotide; AAG chr11 5320082 5320101 5320098 +
atcgagaacacaatcccatt

SEQ ID NO: 19516 - DNA, 20 bp, Artificial Sequence
  Synthetic oligonucleotide; CAG chr11 5320087 5320106 5320103 +
gaacacaatcccattaagaa

SEQ ID NO: 19517 - DNA, 20 bp, Artificial Sequence
  Synthetic oligonucleotide; AAG chr11 5320095 5320114 5320111 +
tcccattaagaacagccaca

SEQ ID NO: 19518 - DNA, 20 bp, Artificial Sequence
  Synthetic oligonucleotide; TAG chr11 5320111 5320130 5320127 +
cacaaagaaaatgaaatacc

SEQ ID NO: 19519 - DNA, 20 bp, Artificial Sequence
  Synthetic oligonucleotide; AGG chr11 5320112 5320131 5320128 +
acaaagaaaatgaaatacct

SEQ ID NO: 19520 - DNA, 20 bp, Artificial Sequence
  Synthetic oligonucleotide; AAG chr11 5320145 5320164 5320161 +
tttattgaaatttaaaaccc

SEQ ID NO: 19521 - DNA, 20 bp, Artificial Sequence
  Synthetic oligonucleotide; CAG chr11 5320148 5320167 5320164 +
attgaaatttaaaacccaag

SEQ ID NO: 19522 - DNA, 20 bp, Artificial Sequence
  Synthetic oligonucleotide; AGG chr11 5320149 5320168 5320165 +
ttgaaatttaaaacccaagc

SEQ ID NO: 19523 - DNA, 20 bp, Artificial Sequence
  Synthetic oligonucleotide; TAG chr11 5320155 5320174 5320171 +
tttaaaacccaagcaggcac

SEQ ID NO: 19524 - DNA, 20 bp, Artificial Sequence
  Synthetic oligonucleotide; AAG chr11 5320159 5320178 5320175 +
aaacccaagcaggcactaga

SEQ ID NO: 19525 - DNA, 20 bp, Artificial Sequence
  Synthetic oligonucleotide; TAG chr11 5320211 5320230 5320227 +
tatcattactacgtgaatat

SEQ ID NO: 19526 - DNA, 20 bp, Artificial Sequence
  Synthetic oligonucleotide; GAG chr11 5320222 5320241 5320238 +
cgtgaatattagtgtgctat

SEQ ID NO: 19527 - DNA, 20 bp, Artificial Sequence
  Synthetic oligonucleotide; GAG chr11 5320224 5320243 5320240 +
tgaatattagtgtgctatga

SEQ ID NO: 19528 - DNA, 20 bp, Artificial Sequence
  Synthetic oligonucleotide; TGG chr11 5320245 5320264 5320261 +
agacacatcaaataaatttc

SEQ ID NO: 19529 - DNA, 20 bp, Artificial Sequence
  Synthetic oligonucleotide; GGG chr11 5320246 5320265 5320262 +
gacacatcaaataaatttct

SEQ ID NO: 19530 - DNA, 20 bp, Artificial Sequence
  Synthetic oligonucleotide; CAG chr11 5320251 5320270 5320267 +
atcaaataaatttctgggat

SEQ ID NO: 19531 - DNA, 20 bp, Artificial Sequence
  Synthetic oligonucleotide; AGG chr11 5320252 5320271 5320268 +
tcaaataaatttctgggatc

SEQ ID NO: 19532 - DNA, 20 bp, Artificial Sequence
  Synthetic oligonucleotide; GGG chr11 5320253 5320272 5320269 +
caaataaatttctgggatca

SEQ ID NO: 19533 - DNA, 20 bp, Artificial Sequence
  Synthetic oligonucleotide; CAG chr11 5320265 5320284 5320281 +
tgggatcagggaacattttc

SEQ ID NO: 19534 - DNA, 20 bp, Artificial Sequence
  Synthetic oligonucleotide; AAG chr11 5320268 5320287 5320284 +
gatcagggaacattttccag

SEQ ID NO: 19535 - DNA, 20 bp, Artificial Sequence
  Synthetic oligonucleotide; AAG chr11 5320282 5320301 5320298 +
ttccagaagaaatgctactt

SEQ ID NO: 19536 - DNA, 20 bp, Artificial Sequence
  Synthetic oligonucleotide; GAG chr11 5320287 5320306 5320303 +
gaagaaatgctacttaagct

SEQ ID NO: 19537 - DNA, 20 bp, Artificial Sequence
  Synthetic oligonucleotide; TAG chr11 5320308 5320327 5320324 +
agaattaaatgctactatat

SEQ ID NO: 19538 - DNA, 20 bp, Artificial Sequence
  Synthetic oligonucleotide; TAG chr11 5320311 5320330 5320327 +
attaaatgctactatattag

SEQ ID NO: 19539 - DNA, 20 bp, Artificial Sequence
  Synthetic oligonucleotide; TAG chr11 5320316 5320335 5320332 +
atgctactatattagtagtg

SEQ ID NO: 19540 - DNA, 20 bp, Artificial Sequence
  Synthetic oligonucleotide; TAG chr11 5320319 5320338 5320335 +
ctactatattagtagtgtag

SEQ ID NO: 19541 - DNA, 20 bp, Artificial Sequence
  Synthetic oligonucleotide; TGG chr11 5320326 5320345 5320342 +
attagtagtgtagtagtatt

SEQ ID NO: 19542 - DNA, 20 bp, Artificial Sequence
  Synthetic oligonucleotide; TGG chr11 5320329 5320348 5320345 +
agtagtgtagtagtatttgg

SEQ ID NO: 19543 - DNA, 20 bp, Artificial Sequence
  Synthetic oligonucleotide; GGG chr11 5320330 5320349 5320346 +
gtagtgtagtagtatttggt

SEQ ID NO: 19544 - DNA, 20 bp, Artificial Sequence
  Synthetic oligonucleotide; GGG chr11 5320331 5320350 5320347 +
tagtgtagtagtatttggtg

SEQ ID NO: 19545 - DNA, 20 bp, Artificial Sequence
  Synthetic oligonucleotide; TAG chr11 5320334 5320353 5320350 +
tgtagtagtatttggtgggg

SEQ ID NO: 19546 - DNA, 20 bp, Artificial Sequence
  Synthetic oligonucleotide; CAG chr11 5320352 5320371 5320368 +
ggtagtgcaatcattgcgta

SEQ ID NO: 19547 - DNA, 20 bp, Artificial Sequence
  Synthetic oligonucleotide; AGG chr11 5320353 5320372 5320369 +
gtagtgcaatcattgcgtac

SEQ ID NO: 19548 - DNA, 20 bp, Artificial Sequence
  Synthetic oligonucleotide; AAG chr11 5320360 5320379 5320376 +
aatcattgcgtacaggtgaa

SEQ ID NO: 19549 - DNA, 20 bp, Artificial Sequence
  Synthetic oligonucleotide; AAG chr11 5320382 5320401 5320398 +
gaacaaacacaaaacgaaac

SEQ ID NO: 19550 - DNA, 20 bp, Artificial Sequence
  Synthetic oligonucleotide; AAG chr11 5320396 5320415 5320412 +
cgaaacaagtaaacaaatta

SEQ ID NO: 19551 - DNA, 20 bp, Artificial Sequence
  Synthetic oligonucleotide; TGG chr11 5320415 5320434 5320431 +
aaagtttgtaaaatgtacat

SEQ ID NO: 19552 - DNA, 20 bp, Artificial Sequence
  Synthetic oligonucleotide; TGG chr11 5320421 5320440 5320437 +
tgtaaaatgtacattggtaa

SEQ ID NO: 19553 - DNA, 20 bp, Artificial Sequence
  Synthetic oligonucleotide; GGG chr11 5320422 5320441 5320438 +
gtaaaatgtacattggtaat

SEQ ID NO: 19554 - DNA, 20 bp, Artificial Sequence
  Synthetic oligonucleotide; GGG chr11 5320423 5320442 5320439 +
taaaatgtacattggtaatg

SEQ ID NO: 19555 - DNA, 20 bp, Artificial Sequence
  Synthetic oligonucleotide; AAG chr11 5320427 5320446 5320443 +
atgtacattggtaatggggc

SEQ ID NO: 19556 - DNA, 20 bp, Artificial Sequence
  Synthetic oligonucleotide; AAG chr11 5320480 5320499 5320496 +
ttttattcaaaatatacatt

SEQ ID NO: 19557 - DNA, 20 bp, Artificial Sequence
  Synthetic oligonucleotide; AGG chr11 5320481 5320500 5320497 +
tttattcaaaatatacatta

SEQ ID NO: 19558 - DNA, 20 bp, Artificial Sequence
  Synthetic oligonucleotide; AAG chr11 5320484 5320503 5320500 +
attcaaaatatacattaagg

SEQ ID NO: 19559 - DNA, 20 bp, Artificial Sequence
  Synthetic oligonucleotide; AAG chr11 5320520 5320539 5320536 +
gaacaacaatacatgaaaaa

SEQ ID NO: 19560 - DNA, 20 bp, Artificial Sequence
  Synthetic oligonucleotide; GAG chr11 5320526 5320545 5320542 +
caatacatgaaaaaaagctt

SEQ ID NO: 19561 - DNA, 20 bp, Artificial Sequence
  Synthetic oligonucleotide; GAG chr11 5320528 5320547 5320544 +
atacatgaaaaaaagcttga

SEQ ID NO: 19562 - DNA, 20 bp, Artificial Sequence
  Synthetic oligonucleotide; TAG chr11 5320543 5320562 5320559 +
cttgagagaaaatgaatctg

SEQ ID NO: 19563 - DNA, 20 bp, Artificial Sequence
  Synthetic oligonucleotide; TAG chr11 5320546 5320565 5320562 +
gagagaaaatgaatctgtag

SEQ ID NO: 19564 - DNA, 20 bp, Artificial Sequence
  Synthetic oligonucleotide; TAG chr11 5320549 5320568 5320565 +
agaaaatgaatctgtagtag

SEQ ID NO: 19565 - DNA, 20 bp, Artificial Sequence
  Synthetic oligonucleotide; CAG chr11 5320552 5320571 5320568 +
aaatgaatctgtagtagtag

SEQ ID NO: 19566 - DNA, 20 bp, Artificial Sequence
  Synthetic oligonucleotide; AGG chr11 5320553 5320572 5320569 +
aatgaatctgtagtagtagc

SEQ ID NO: 19567 - DNA, 20 bp, Artificial Sequence
  Synthetic oligonucleotide; AAG chr11 5320608 5320627 5320624 +
aaacattttgacattaccat

SEQ ID NO: 19568 - DNA, 20 bp, Artificial Sequence
  Synthetic oligonucleotide; AGG chr11 5320609 5320628 5320625 +
aacattttgacattaccata

SEQ ID NO: 19569 - DNA, 20 bp, Artificial Sequence
  Synthetic oligonucleotide; GGG chr11 5320610 5320629 5320626 +
acattttgacattaccataa

SEQ ID NO: 19570 - DNA, 20 bp, Artificial Sequence
  Synthetic oligonucleotide; AAG chr11 5320627 5320646 5320643 +
taagggaatgaatataaaac

SEQ ID NO: 19571 - DNA, 20 bp, Artificial Sequence
  Synthetic oligonucleotide; GAG chr11 5320629 5320648 5320645 +
agggaatgaatataaaacaa

SEQ ID NO: 19572 - DNA, 20 bp, Artificial Sequence
  Synthetic oligonucleotide; AGG chr11 5320630 5320649 5320646 +
gggaatgaatataaaacaag

SEQ ID NO: 19573 - DNA, 20 bp, Artificial Sequence
  Synthetic oligonucleotide; GAG chr11 5320639 5320658 5320655 +
tataaaacaagaggtatgat

SEQ ID NO: 19574 - DNA, 20 bp, Artificial Sequence
  Synthetic oligonucleotide; AAG chr11 5320653 5320672 5320669 +
tatgatgagtacttataatc

SEQ ID NO: 19575 - DNA, 20 bp, Artificial Sequence
  Synthetic oligonucleotide; TAG chr11 5320656 5320675 5320672 +
gatgagtacttataatcaag

SEQ ID NO: 19576 - DNA, 20 bp, Artificial Sequence
  Synthetic oligonucleotide; AAG chr11 5320669 5320688 5320685 +
aatcaagtagttattgttta

SEQ ID NO: 19577 - DNA, 20 bp, Artificial Sequence
  Synthetic oligonucleotide; TGG chr11 5320678 5320697 5320694 +
gttattgtttaaagttacta

SEQ ID NO: 19578 - DNA, 20 bp, Artificial Sequence
  Synthetic oligonucleotide; CAG chr11 5320684 5320703 5320700 +
gtttaaagttactatggcta

SEQ ID NO: 19579 - DNA, 20 bp, Artificial Sequence
  Synthetic oligonucleotide; GAG chr11 5320690 5320709 5320706 +
agttactatggctacagtat

SEQ ID NO: 19580 - DNA, 20 bp, Artificial Sequence
  Synthetic oligonucleotide; TGG chr11 5320701 5320720 5320717 +
ctacagtatgagaaacatgt

SEQ ID NO: 19581 - DNA, 20 bp, Artificial Sequence
  Synthetic oligonucleotide; AAG chr11 5320706 5320725 5320722 +
gtatgagaaacatgttggaa

SEQ ID NO: 19582 - DNA, 20 bp, Artificial Sequence
  Synthetic oligonucleotide; AGG chr11 5320707 5320726 5320723 +
tatgagaaacatgttggaaa

SEQ ID NO: 19583 - DNA, 20 bp, Artificial Sequence
  Synthetic oligonucleotide; GGG chr11 5320708 5320727 5320724 +
atgagaaacatgttggaaaa

SEQ ID NO: 19584 - DNA, 20 bp, Artificial Sequence
  Synthetic oligonucleotide; GGG chr11 5320709 5320728 5320725 +
tgagaaacatgttggaaaag

SEQ ID NO: 19585 - DNA, 20 bp, Artificial Sequence
  Synthetic oligonucleotide; GGG chr11 5320710 5320729 5320726 +
gagaaacatgttggaaaagg

SEQ ID NO: 19586 - DNA, 20 bp, Artificial Sequence
  Synthetic oligonucleotide; GAG chr11 5320712 5320731 5320728 +
gaaacatgttggaaaagggg

SEQ ID NO: 19587 - DNA, 20 bp, Artificial Sequence
  Synthetic oligonucleotide; CAG chr11 5320717 5320736 5320733 +
atgttggaaaagggggagaa

SEQ ID NO: 19588 - DNA, 20 bp, Artificial Sequence
  Synthetic oligonucleotide; AGG chr11 5320718 5320737 5320734 +
tgttggaaaagggggagaac

SEQ ID NO: 19589 - DNA, 20 bp, Artificial Sequence
  Synthetic oligonucleotide; AAG chr11 5320724 5320743 5320740 +
aaaagggggagaacaggtaa

SEQ ID NO: 19590 - DNA, 20 bp, Artificial Sequence
  Synthetic oligonucleotide; AAG chr11 5320727 5320746 5320743 +
agggggagaacaggtaaaag

SEQ ID NO: 19591 - DNA, 20 bp, Artificial Sequence
  Synthetic oligonucleotide; CAG chr11 5320733 5320752 5320749 +
agaacaggtaaaagaagtat

SEQ ID NO: 19592 - DNA, 20 bp, Artificial Sequence
  Synthetic oligonucleotide; AGG chr11 5320734 5320753 5320750 +
gaacaggtaaaagaagtatc

SEQ ID NO: 19593 - DNA, 20 bp, Artificial Sequence
  Synthetic oligonucleotide; TGG chr11 5320765 5320784 5320781 +
atacacgtgtcaaattgtgt

SEQ ID NO: 19594 - DNA, 20 bp, Artificial Sequence
  Synthetic oligonucleotide; TGG chr11 5320770 5320789 5320786 +
cgtgtcaaattgtgttggtg

SEQ ID NO: 19595 - DNA, 20 bp, Artificial Sequence
  Synthetic oligonucleotide; TAG chr11 5320780 5320799 5320796 +
tgtgttggtgtggttttgac

SEQ ID NO: 19596 - DNA, 20 bp, Artificial Sequence
  Synthetic oligonucleotide; CAG chr11 5320790 5320809 5320806 +
tggttttgactagttgttat

SEQ ID NO: 19597 - DNA, 20 bp, Artificial Sequence
  Synthetic oligonucleotide; TAG chr11 5320793 5320812 5320809 +
ttttgactagttgttatcag

SEQ ID NO: 19598 - DNA, 20 bp, Artificial Sequence
  Synthetic oligonucleotide; TAG chr11 5320799 5320818 5320815 +
ctagttgttatcagtagcat

SEQ ID NO: 19599 - DNA, 20 bp, Artificial Sequence
  Synthetic oligonucleotide; AAG chr11 5320803 5320822 5320819 +
ttgttatcagtagcattaga

SEQ ID NO: 19600 - DNA, 20 bp, Artificial Sequence
  Synthetic oligonucleotide; AGG chr11 5320804 5320823 5320820 +
tgttatcagtagcattagaa

SEQ ID NO: 19601 - DNA, 20 bp, Artificial Sequence
  Synthetic oligonucleotide; TAG chr11 5320813 5320832 5320829 +
tagcattagaaaggcttgaa

SEQ ID NO: 19602 - DNA, 20 bp, Artificial Sequence
  Synthetic oligonucleotide; AAG chr11 5320816 5320835 5320832 +
cattagaaaggcttgaatag

SEQ ID NO: 19603 - DNA, 20 bp, Artificial Sequence
  Synthetic oligonucleotide; GAG chr11 5320818 5320837 5320834 +
ttagaaaggcttgaatagaa

SEQ ID NO: 19604 - DNA, 20 bp, Artificial Sequence
  Synthetic oligonucleotide; GAG chr11 5320820 5320839 5320836 +
agaaaggcttgaatagaaga

SEQ ID NO: 19605 - DNA, 20 bp, Artificial Sequence
  Synthetic oligonucleotide; TAG chr11 5320834 5320853 5320850 +
agaagagagattctatgact

SEQ ID NO: 19606 - DNA, 20 bp, Artificial Sequence
  Synthetic oligonucleotide; TAG chr11 5320839 5320858 5320855 +
agagattctatgacttagaa

SEQ ID NO: 19607 - DNA, 20 bp, Artificial Sequence
  Synthetic oligonucleotide; GAG chr11 5320846 5320865 5320862 +
ctatgacttagaatagaact

SEQ ID NO: 19608 - DNA, 20 bp, Artificial Sequence
  Synthetic oligonucleotide; AAG chr11 5320855 5320874 5320871 +
agaatagaactgagtgattg

SEQ ID NO: 19609 - DNA, 20 bp, Artificial Sequence
  Synthetic oligonucleotide; AGG chr11 5320856 5320875 5320872 +
gaatagaactgagtgattga

SEQ ID NO: 19610 - DNA, 20 bp, Artificial Sequence
  Synthetic oligonucleotide; TAG chr11 5320859 5320878 5320875 +
tagaactgagtgattgaagg

SEQ ID NO: 19611 - DNA, 20 bp, Artificial Sequence
  Synthetic oligonucleotide; TAG chr11 5320862 5320881 5320878 +
aactgagtgattgaaggtag

SEQ ID NO: 19612 - DNA, 20 bp, Artificial Sequence
  Synthetic oligonucleotide; AAG chr11 5320869 5320888 5320885 +
tgattgaaggtagtagatta

SEQ ID NO: 19613 - DNA, 20 bp, Artificial Sequence
  Synthetic oligonucleotide; GAG chr11 5320871 5320890 5320887 +
attgaaggtagtagattaaa

SEQ ID NO: 19614 - DNA, 20 bp, Artificial Sequence
  Synthetic oligonucleotide; AAG chr11 5320875 5320894 5320891 +
aaggtagtagattaaagaga

SEQ ID NO: 19615 - DNA, 20 bp, Artificial Sequence
  Synthetic oligonucleotide; AAG chr11 5320878 5320897 5320894 +
gtagtagattaaagagaaag

SEQ ID NO: 19616 - DNA, 20 bp, Artificial Sequence
  Synthetic oligonucleotide; AAG chr11 5320884 5320903 5320900 +
gattaaagagaaagaagcgt

SEQ ID NO: 19617 - DNA, 20 bp, Artificial Sequence
  Synthetic oligonucleotide; GAG chr11 5320906 5320925 5320922 +
gtaatgccacctgaatttct

SEQ ID NO: 19618 - DNA, 20 bp, Artificial Sequence
  Synthetic oligonucleotide; TGG chr11 5320919 5320938 5320935 +
aatttctgagttttgctgaa

SEQ ID NO: 19619 - DNA, 20 bp, Artificial Sequence
  Synthetic oligonucleotide; GAG chr11 5320921 5320940 5320937 +
tttctgagttttgctgaatg

SEQ ID NO: 19620 - DNA, 20 bp, Artificial Sequence
  Synthetic oligonucleotide; GAG chr11 5320923 5320942 5320939 +
tctgagttttgctgaatgga

SEQ ID NO: 19621 - DNA, 20 bp, Artificial Sequence
  Synthetic oligonucleotide; TAG chr11 5320926 5320945 5320942 +
gagttttgctgaatggagag

SEQ ID NO: 19622 - DNA, 20 bp, Artificial Sequence
  Synthetic oligonucleotide; TAG chr11 5320944 5320963 5320960 +
agtagttccattgacttcca

SEQ ID NO: 19623 - DNA, 20 bp, Artificial Sequence
  Synthetic oligonucleotide; AAG chr11 5320954 5320973 5320970 +
ttgacttccatagttatcac

SEQ ID NO: 19624 - DNA, 20 bp, Artificial Sequence
  Synthetic oligonucleotide; AAG chr11 5320957 5320976 5320973 +
acttccatagttatcacaag

SEQ ID NO: 19625 - DNA, 20 bp, Artificial Sequence
  Synthetic oligonucleotide; CAG chr11 5320984 5321003 5321000 +
tgactttattcactaatcaa

SEQ ID NO: 19626 - DNA, 20 bp, Artificial Sequence
  Synthetic oligonucleotide; TGG chr11 5320999 5321018 5321015 +
atcaacagttatttattgat

SEQ ID NO: 19627 - DNA, 20 bp, Artificial Sequence
  Synthetic oligonucleotide; GAG chr11 5321017 5321036 5321033 +
attggtcattgtacattaat

SEQ ID NO: 19628 - DNA, 20 bp, Artificial Sequence
  Synthetic oligonucleotide; TAG chr11 5321040 5321059 5321056 +
tgttttacatgctgactttg

SEQ ID NO: 19629 - DNA, 20 bp, Artificial Sequence
  Synthetic oligonucleotide; AAG chr11 5321045 5321064 5321061 +
tacatgctgactttgtagaa

SEQ ID NO: 19630 - DNA, 20 bp, Artificial Sequence
  Synthetic oligonucleotide; AAG chr11 5321051 5321070 5321067 +
ctgactttgtagaaaagatg

SEQ ID NO: 19631 - DNA, 20 bp, Artificial Sequence
  Synthetic oligonucleotide; GAG chr11 5321053 5321072 5321069 +
gactttgtagaaaagatgaa

SEQ ID NO: 19632 - DNA, 20 bp, Artificial Sequence
  Synthetic oligonucleotide; CAG chr11 5321059 5321078 5321075 +
gtagaaaagatgaagagaat

SEQ ID NO: 19633 - DNA, 20 bp, Artificial Sequence
  Synthetic oligonucleotide; AAG chr11 5321070 5321089 5321086 +
gaagagaatcagtttcaatg

SEQ ID NO: 19634 - DNA, 20 bp, Artificial Sequence
  Synthetic oligonucleotide; AAG chr11 5321084 5321103 5321100 +
tcaatgaagtgctttgcaca

SEQ ID NO: 19635 - DNA, 20 bp, Artificial Sequence
  Synthetic oligonucleotide; AGG chr11 5321085 5321104 5321101 +
caatgaagtgctttgcacaa

SEQ ID NO: 19636 - DNA, 20 bp, Artificial Sequence
  Synthetic oligonucleotide; TGG chr11 5321094 5321113 5321110 +
gctttgcacaaaggataccc

SEQ ID NO: 19637 - DNA, 20 bp, Artificial Sequence
  Synthetic oligonucleotide; GAG chr11 5321096 5321115 5321112 +
tttgcacaaaggataccctg

SEQ ID NO: 19638 - DNA, 20 bp, Artificial Sequence
  Synthetic oligonucleotide; CAG chr11 5321128 5321147 5321144 +
catatcattttcttttctaa

SEQ ID NO: 19639 - DNA, 20 bp, Artificial Sequence
  Synthetic oligonucleotide; TAG chr11 5321144 5321163 5321160 +
ctaacagtttcattaacata

SEQ ID NO: 19640 - DNA, 20 bp, Artificial Sequence
  Synthetic oligonucleotide; AGG chr11 5321145 5321164 5321161 +
taacagtttcattaacatat

SEQ ID NO: 19641 - DNA, 20 bp, Artificial Sequence
  Synthetic oligonucleotide; AAG chr11 5321150 5321169 5321166 +
gtttcattaacatataggta

SEQ ID NO: 19642 - DNA, 20 bp, Artificial Sequence
  Synthetic oligonucleotide; CAG chr11 5321154 5321173 5321170 +
cattaacatataggtaaaga

SEQ ID NO: 19643 - DNA, 20 bp, Artificial Sequence
  Synthetic oligonucleotide; AGG chr11 5321155 5321174 5321171 +
attaacatataggtaaagac

SEQ ID NO: 19644 - DNA, 20 bp, Artificial Sequence
  Synthetic oligonucleotide; TAG chr11 5321173 5321192 5321189 +
acaggatatcataattgaca

SEQ ID NO: 19645 - DNA, 20 bp, Artificial Sequence
  Synthetic oligonucleotide; CAG chr11 5321178 5321197 5321194 +
atatcataattgacatagta

SEQ ID NO: 19646 - DNA, 20 bp, Artificial Sequence
  Synthetic oligonucleotide; TAG chr11 5321190 5321209 5321206 +
acatagtacagtgtcattaa

SEQ ID NO: 19647 - DNA, 20 bp, Artificial Sequence
  Synthetic oligonucleotide; AGG chr11 5321191 5321210 5321207 +
catagtacagtgtcattaat

SEQ ID NO: 19648 - DNA, 20 bp, Artificial Sequence
  Synthetic oligonucleotide; CAG chr11 5321199 5321218 5321215 +
agtgtcattaataggttaat

SEQ ID NO: 19649 - DNA, 20 bp, Artificial Sequence
  Synthetic oligonucleotide; AGG chr11 5321200 5321219 5321216 +
gtgtcattaataggttaatc

SEQ ID NO: 19650 - DNA, 20 bp, Artificial Sequence
  Synthetic oligonucleotide; TGG chr11 5321208 5321227 5321224 +
aataggttaatcaggtcatg

SEQ ID NO: 19651 - DNA, 20 bp, Artificial Sequence
  Synthetic oligonucleotide; AAG chr11 5321213 5321232 5321229 +
gttaatcaggtcatgtggta

SEQ ID NO: 19652 - DNA, 20 bp, Artificial Sequence
  Synthetic oligonucleotide; TGG chr11 5321216 5321235 5321232 +
aatcaggtcatgtggtaaag

SEQ ID NO: 19653 - DNA, 20 bp, Artificial Sequence
  Synthetic oligonucleotide; GGG chr11 5321217 5321236 5321233 +
atcaggtcatgtggtaaagt

SEQ ID NO: 19654 - DNA, 20 bp, Artificial Sequence
  Synthetic oligonucleotide; AAG chr11 5321220 5321239 5321236 +
aggtcatgtggtaaagtggg

SEQ ID NO: 19655 - DNA, 20 bp, Artificial Sequence
  Synthetic oligonucleotide; AGG chr11 5321221 5321240 5321237 +
ggtcatgtggtaaagtggga

SEQ ID NO: 19656 - DNA, 20 bp, Artificial Sequence
  Synthetic oligonucleotide; AAG chr11 5321230 5321249 5321246 +
gtaaagtgggaaggctgaat

SEQ ID NO: 19657 - DNA, 20 bp, Artificial Sequence
  Synthetic oligonucleotide; AGG chr11 5321231 5321250 5321247 +
taaagtgggaaggctgaata

SEQ ID NO: 19658 - DNA, 20 bp, Artificial Sequence
  Synthetic oligonucleotide; TAG chr11 5321249 5321268 5321265 +
taaggatattattttgtttt

SEQ ID NO: 19659 - DNA, 20 bp, Artificial Sequence
  Synthetic oligonucleotide; GAG chr11 5321251 5321270 5321267 +
aggatattattttgttttta

SEQ ID NO: 19660 - DNA, 20 bp, Artificial Sequence
  Synthetic oligonucleotide; AAG chr11 5321260 5321279 5321276 +
ttttgtttttagagaattta

SEQ ID NO: 19661 - DNA, 20 bp, Artificial Sequence
  Synthetic oligonucleotide; AGG chr11 5321261 5321280 5321277 +
tttgtttttagagaatttaa

SEQ ID NO: 19662 - DNA, 20 bp, Artificial Sequence
  Synthetic oligonucleotide; AAG chr11 5321264 5321283 5321280 +
gtttttagagaatttaaagg

SEQ ID NO: 19663 - DNA, 20 bp, Artificial Sequence
  Synthetic oligonucleotide; CAG chr11 5321291 5321310 5321307 +
cctccttattaaaaatatga

SEQ ID NO: 19664 - DNA, 20 bp, Artificial Sequence
  Synthetic oligonucleotide; AAG chr11 5321294 5321313 5321310 +
ccttattaaaaatatgacag

SEQ ID NO: 19665 - DNA, 20 bp, Artificial Sequence
  Synthetic oligonucleotide; GAG chr11 5321296 5321315 5321312 +
ttattaaaaatatgacagaa

SEQ ID NO: 19666 - DNA, 20 bp, Artificial Sequence
  Synthetic oligonucleotide; TAG chr11 5321302 5321321 5321318 +
aaaatatgacagaagagtga

SEQ ID NO: 19667 - DNA, 20 bp, Artificial Sequence
  Synthetic oligonucleotide; TGG chr11 5321306 5321325 5321322 +
tatgacagaagagtgatagc

SEQ ID NO: 19668 - DNA, 20 bp, Artificial Sequence
  Synthetic oligonucleotide; TGG chr11 5321311 5321330 5321327 +
cagaagagtgatagctggtt

SEQ ID NO: 19669 - DNA, 20 bp, Artificial Sequence
  Synthetic oligonucleotide; AAG chr11 5321321 5321340 5321337 +
atagctggtttggtttaatg

SEQ ID NO: 19670 - DNA, 20 bp, Artificial Sequence
  Synthetic oligonucleotide; TGG chr11 5321327 5321346 5321343 +
ggtttggtttaatgaagtat

SEQ ID NO: 19671 - DNA, 20 bp, Artificial Sequence
  Synthetic oligonucleotide; CAG chr11 5321340 5321359 5321356 +
gaagtattggcttgtgccct

SEQ ID NO: 19672 - DNA, 20 bp, Artificial Sequence
  Synthetic oligonucleotide; AAG chr11 5321343 5321362 5321359 +
gtattggcttgtgccctcag

SEQ ID NO: 19673 - DNA, 20 bp, Artificial Sequence
  Synthetic oligonucleotide; AGG chr11 5321344 5321363 5321360 +
tattggcttgtgccctcaga

SEQ ID NO: 19674 - DNA, 20 bp, Artificial Sequence
  Synthetic oligonucleotide; GGG chr11 5321345 5321364 5321361 +
attggcttgtgccctcagaa

SEQ ID NO: 19675 - DNA, 20 bp, Artificial Sequence
  Synthetic oligonucleotide; AAG chr11 5321369 5321388 5321385 +
ctgtgtatcttttatcatga

SEQ ID NO: 19676 - DNA, 20 bp, Artificial Sequence
  Synthetic oligonucleotide; CAG chr11 5321381 5321400 5321397 +
tatcatgaaagttgatattt

SEQ ID NO: 19677 - DNA, 20 bp, Artificial Sequence
  Synthetic oligonucleotide; GAG chr11 5321383 5321402 5321399 +
tcatgaaagttgatatttca

SEQ ID NO: 19678 - DNA, 20 bp, Artificial Sequence
  Synthetic oligonucleotide; TAG chr11 5321397 5321416 5321413 +
atttcagagcactaataact

SEQ ID NO: 19679 - DNA, 20 bp, Artificial Sequence
  Synthetic oligonucleotide; AAG chr11 5321415 5321434 5321431 +
cttagtttccttctatgtaa

SEQ ID NO: 19680 - DNA, 20 bp, Artificial Sequence
  Synthetic oligonucleotide; AAG chr11 5321423 5321442 5321439 +
ccttctatgtaaaagatgaa

SEQ ID NO: 19681 - DNA, 20 bp, Artificial Sequence
  Synthetic oligonucleotide; TAG chr11 5321445 5321464 5321461 +
gtctcaatgaaataaaatgc

SEQ ID NO: 19682 - DNA, 20 bp, Artificial Sequence
  Synthetic oligonucleotide; TGG chr11 5321448 5321467 5321464 +
tcaatgaaataaaatgctag

SEQ ID NO: 19683 - DNA, 20 bp, Artificial Sequence
  Synthetic oligonucleotide; CAG chr11 5321454 5321473 5321470 +
aaataaaatgctagtggatt

SEQ ID NO: 19684 - DNA, 20 bp, Artificial Sequence
  Synthetic oligonucleotide; TAG chr11 5321467 5321486 5321483 +
gtggattcagatcaccctct

SEQ ID NO: 19685 - DNA, 20 bp, Artificial Sequence
  Synthetic oligonucleotide; AAG chr11 5321506 5321525 5321522 +
attttctttaaacaaccatg

SEQ ID NO: 19686 - DNA, 20 bp, Artificial Sequence
  Synthetic oligonucleotide; AGG chr11 5321507 5321526 5321523 +
ttttctttaaacaaccatga

SEQ ID NO: 19687 - DNA, 20 bp, Artificial Sequence
  Synthetic oligonucleotide; AAG chr11 5321514 5321533 5321530 +
taaacaaccatgaaggcacc

SEQ ID NO: 19688 - DNA, 20 bp, Artificial Sequence
  Synthetic oligonucleotide; CAG chr11 5321519 5321538 5321535 +
aaccatgaaggcaccaagaa

SEQ ID NO: 19689 - DNA, 20 bp, Artificial Sequence
  Synthetic oligonucleotide; GAG chr11 5321521 5321540 5321537 +
ccatgaaggcaccaagaaca

SEQ ID NO: 19690 - DNA, 20 bp, Artificial Sequence
  Synthetic oligonucleotide; CAG chr11 5321540 5321559 5321556 +
agagaattcaacgtctaaac

SEQ ID NO: 19691 - DNA, 20 bp, Artificial Sequence
  Synthetic oligonucleotide; AAG chr11 5321546 5321565 5321562 +
ttcaacgtctaaaccagttt

SEQ ID NO: 19692 - DNA, 20 bp, Artificial Sequence
  Synthetic oligonucleotide; AGG chr11 5321547 5321566 5321563 +
tcaacgtctaaaccagttta

SEQ ID NO: 19693 - DNA, 20 bp, Artificial Sequence
  Synthetic oligonucleotide; TGG chr11 5321587 5321606 5321603 +
aaacatatttcccaataatt

SEQ ID NO: 19694 - DNA, 20 bp, Artificial Sequence
  Synthetic oligonucleotide; GGG chr11 5321588 5321607 5321604 +
aacatatttcccaataattt

SEQ ID NO: 19695 - DNA, 20 bp, Artificial Sequence
  Synthetic oligonucleotide; TGG chr11 5321603 5321622 5321619 +
aatttgggcttctttcatct

SEQ ID NO: 19696 - DNA, 20 bp, Artificial Sequence
  Synthetic oligonucleotide; AAG chr11 5321625 5321644 5321641 +
gaaacaacactgcttatcca

SEQ ID NO: 19697 - DNA, 20 bp, Artificial Sequence
  Synthetic oligonucleotide; AAG chr11 5321629 5321648 5321645 +
caacactgcttatccaaagt

SEQ ID NO: 19698 - DNA, 20 bp, Artificial Sequence
  Synthetic oligonucleotide; CAG chr11 5321650 5321669 5321666 +
agcacctccttatacctatt

SEQ ID NO: 19699 - DNA, 20 bp, Artificial Sequence
  Synthetic oligonucleotide; GAG chr11 5321654 5321673 5321670 +
cctccttatacctattcagt

SEQ ID NO: 19700 - DNA, 20 bp, Artificial Sequence
  Synthetic oligonucleotide; AGG chr11 5321655 5321674 5321671 +
ctccttatacctattcagtg

SEQ ID NO: 19701 - DNA, 20 bp, Artificial Sequence
  Synthetic oligonucleotide; AAG chr11 5321697 5321716 5321713 +
tcaacccaccatatacacaa

SEQ ID NO: 19702 - DNA, 20 bp, Artificial Sequence
  Synthetic oligonucleotide; AGG chr11 5321698 5321717 5321714 +
caacccaccatatacacaaa

SEQ ID NO: 19703 - DNA, 20 bp, Artificial Sequence
  Synthetic oligonucleotide; CAG chr11 5321706 5321725 5321722 +
catatacacaaaaggcatgc

SEQ ID NO: 19704 - DNA, 20 bp, Artificial Sequence
  Synthetic oligonucleotide; TGG chr11 5321725 5321744 5321741 +
ccagtgatgctgctccatca

SEQ ID NO: 19705 - DNA, 20 bp, Artificial Sequence
  Synthetic oligonucleotide; TGG chr11 5321756 5321775 5321772 +
ttccttatttctcacacatg

SEQ ID NO: 19706 - DNA, 20 bp, Artificial Sequence
  Synthetic oligonucleotide; CAG chr11 5321759 5321778 5321775 +
cttatttctcacacatgtgg

SEQ ID NO: 19707 - DNA, 20 bp, Artificial Sequence
  Synthetic oligonucleotide; AGG chr11 5321760 5321779 5321776 +
ttatttctcacacatgtggc

SEQ ID NO: 19708 - DNA, 20 bp, Artificial Sequence
  Synthetic oligonucleotide; TGG chr11 5321774 5321793 5321790 +
tgtggcaggtaattaaacta

SEQ ID NO: 19709 - DNA, 20 bp, Artificial Sequence
  Synthetic oligonucleotide; AAG chr11 5321781 5321800 5321797 +
ggtaattaaactatggcttg

SEQ ID NO: 19710 - DNA, 20 bp, Artificial Sequence
  Synthetic oligonucleotide; TGG chr11 5321787 5321806 5321803 +
taaactatggcttgaagtcc

SEQ ID NO: 19711 - DNA, 20 bp, Artificial Sequence
  Synthetic oligonucleotide; TGG chr11 5321793 5321812 5321809 +
atggcttgaagtcctggcct

SEQ ID NO: 19712 - DNA, 20 bp, Artificial Sequence
  Synthetic oligonucleotide; CAG chr11 5321797 5321816 5321813 +
cttgaagtcctggccttggc

SEQ ID NO: 19713 - DNA, 20 bp, Artificial Sequence
  Synthetic oligonucleotide; AAG chr11 5321807 5321826 5321823 +
tggccttggccagttaaact

SEQ ID NO: 19714 - DNA, 20 bp, Artificial Sequence
  Synthetic oligonucleotide; GAG chr11 5321809 5321828 5321825 +
gccttggccagttaaactaa

SEQ ID NO: 19715 - DNA, 20 bp, Artificial Sequence
  Synthetic oligonucleotide; CAG chr11 5321840 5321859 5321856 +
tcaaatgtatcactgtaaaa

SEQ ID NO: 19716 - DNA, 20 bp, Artificial Sequence
  Synthetic oligonucleotide; TAG chr11 5321844 5321863 5321860 +
atgtatcactgtaaaacaga

SEQ ID NO: 19717 - DNA, 20 bp, Artificial Sequence
  Synthetic oligonucleotide; TAG chr11 5321862 5321881 5321878 +
gatagcctatcctcaaaatt

SEQ ID NO: 19718 - DNA, 20 bp, Artificial Sequence
  Synthetic oligonucleotide; CAG chr11 5321869 5321888 5321885 +
tatcctcaaaatttagatat

SEQ ID NO: 19719 - DNA, 20 bp, Artificial Sequence
  Synthetic oligonucleotide; TGG chr11 5321873 5321892 5321889 +
ctcaaaatttagatatcaga

SEQ ID NO: 19720 - DNA, 20 bp, Artificial Sequence
  Synthetic oligonucleotide; GGG chr11 5321874 5321893 5321890 +
tcaaaatttagatatcagat

SEQ ID NO: 19721 - DNA, 20 bp, Artificial Sequence
  Synthetic oligonucleotide; GGG chr11 5321875 5321894 5321891 +
caaaatttagatatcagatg

SEQ ID NO: 19722 - DNA, 20 bp, Artificial Sequence
  Synthetic oligonucleotide; CAG chr11 5321889 5321908 5321905 +
cagatggggatataatatcg

SEQ ID NO: 19723 - DNA, 20 bp, Artificial Sequence
  Synthetic oligonucleotide; CAG chr11 5321908 5321927 5321924 +
gcagtaacttgtgattacca

SEQ ID NO: 19724 - DNA, 20 bp, Artificial Sequence
  Synthetic oligonucleotide; CAG chr11 5321928 5321947 5321944 +
cagcaacttgtgatgtccca

SEQ ID NO: 19725 - DNA, 20 bp, Artificial Sequence
  Synthetic oligonucleotide; AAG chr11 5321944 5321963 5321960 +
cccacagcttctgttctaca

SEQ ID NO: 19726 - DNA, 20 bp, Artificial Sequence
  Synthetic oligonucleotide; TGG chr11 5321948 5321967 5321964 +
cagcttctgttctacaaaga

SEQ ID NO: 19727 - DNA, 20 bp, Artificial Sequence
  Synthetic oligonucleotide; GGG chr11 5321949 5321968 5321965 +
agcttctgttctacaaagat

SEQ ID NO: 19728 - DNA, 20 bp, Artificial Sequence
  Synthetic oligonucleotide; AAG chr11 5321957 5321976 5321973 +
ttctacaaagatgggaaaca

SEQ ID NO: 19729 - DNA, 20 bp, Artificial Sequence
  Synthetic oligonucleotide; AGG chr11 5321958 5321977 5321974 +
tctacaaagatgggaaacaa

SEQ ID NO: 19730 - DNA, 20 bp, Artificial Sequence
  Synthetic oligonucleotide; CAG chr11 5321961 5321980 5321977 +
acaaagatgggaaacaaagg

SEQ ID NO: 19731 - DNA, 20 bp, Artificial Sequence
  Synthetic oligonucleotide; AGG chr11 5321962 5321981 5321978 +
caaagatgggaaacaaaggc

SEQ ID NO: 19732 - DNA, 20 bp, Artificial Sequence
  Synthetic oligonucleotide; CAG chr11 5321972 5321991 5321988 +
aaacaaaggcaggctttcct

SEQ ID NO: 19733 - DNA, 20 bp, Artificial Sequence
  Synthetic oligonucleotide; AAG chr11 5321979 5321998 5321995 +
ggcaggctttcctcagctac

SEQ ID NO: 19734 - DNA, 20 bp, Artificial Sequence
  Synthetic oligonucleotide; GAG chr11 5321981 5322000 5321997 +
caggctttcctcagctacaa

SEQ ID NO: 19735 - DNA, 20 bp, Artificial Sequence
  Synthetic oligonucleotide; AGG chr11 5321982 5322001 5321998 +
aggctttcctcagctacaag

SEQ ID NO: 19736 - DNA, 20 bp, Artificial Sequence
  Synthetic oligonucleotide; AAG chr11 5321994 5322013 5322010 +
gctacaagaggttctgcatc

SEQ ID NO: 19737 - DNA, 20 bp, Artificial Sequence
  Synthetic oligonucleotide; TAG chr11 5321998 5322017 5322014 +
caagaggttctgcatcaaga

SEQ ID NO: 19738 - DNA, 20 bp, Artificial Sequence
  Synthetic oligonucleotide; AAG chr11 5322007 5322026 5322023 +
ctgcatcaagatagcaaatc

SEQ ID NO: 19739 - DNA, 20 bp, Artificial Sequence
  Synthetic oligonucleotide; TGG chr11 5322011 5322030 5322027 +
atcaagatagcaaatcaaga

SEQ ID NO: 19740 - DNA, 20 bp, Artificial Sequence
  Synthetic oligonucleotide; GGG chr11 5322012 5322031 5322028 +
tcaagatagcaaatcaagat

SEQ ID NO: 19741 - DNA, 20 bp, Artificial Sequence
  Synthetic oligonucleotide; GAG chr11 5322028 5322047 5322044 +
agatgggaattatccgaaat

SEQ ID NO: 19742 - DNA, 20 bp, Artificial Sequence
  Synthetic oligonucleotide; AAG chr11 5322042 5322061 5322058 +
cgaaatgagatttttccatt

SEQ ID NO: 19743 - DNA, 20 bp, Artificial Sequence
  Synthetic oligonucleotide; TAG chr11 5322050 5322069 5322066 +
gatttttccattaagatgcc

SEQ ID NO: 19744 - DNA, 20 bp, Artificial Sequence
  Synthetic oligonucleotide; TAG chr11 5322061 5322080 5322077 +
taagatgcctagatgtatta

SEQ ID NO: 19745 - DNA, 20 bp, Artificial Sequence
  Synthetic oligonucleotide; TGG chr11 5322070 5322089 5322086 +
tagatgtattatagacctca

SEQ ID NO: 19746 - DNA, 20 bp, Artificial Sequence
  Synthetic oligonucleotide; AAG chr11 5322081 5322100 5322097 +
tagacctcatggtcacatat

SEQ ID NO: 19747 - DNA, 20 bp, Artificial Sequence
  Synthetic oligonucleotide; AGG chr11 5322082 5322101 5322098 +
agacctcatggtcacatata

SEQ ID NO: 19748 - DNA, 20 bp, Artificial Sequence
  Synthetic oligonucleotide; CAG chr11 5322087 5322106 5322103 +
tcatggtcacatataaggaa

SEQ ID NO: 19749 - DNA, 20 bp, Artificial Sequence
  Synthetic oligonucleotide; GAG chr11 5322089 5322108 5322105 +
atggtcacatataaggaaca

SEQ ID NO: 19750 - DNA, 20 bp, Artificial Sequence
  Synthetic oligonucleotide; AAG chr11 5322093 5322112 5322109 +
tcacatataaggaacagaga

SEQ ID NO: 19751 - DNA, 20 bp, Artificial Sequence
  Synthetic oligonucleotide; TGG chr11 5322100 5322119 5322116 +
taaggaacagagaaagtctt

SEQ ID NO: 19752 - DNA, 20 bp, Artificial Sequence
  Synthetic oligonucleotide; TAG chr11 5322103 5322122 5322119 +
ggaacagagaaagtctttgg

SEQ ID NO: 19753 - DNA, 20 bp, Artificial Sequence
  Synthetic oligonucleotide; TAG chr11 5322118 5322137 5322134 +
tttggtagataactgacttt

SEQ ID NO: 19754 - DNA, 20 bp, Artificial Sequence
  Synthetic oligonucleotide; AGG chr11 5322119 5322138 5322135 +
ttggtagataactgactttt

SEQ ID NO: 19755 - DNA, 20 bp, Artificial Sequence
  Synthetic oligonucleotide; GAG chr11 5322126 5322145 5322142 +
ataactgacttttaggattt

SEQ ID NO: 19756 - DNA, 20 bp, Artificial Sequence
  Synthetic oligonucleotide; CAG chr11 5322137 5322156 5322153 +
ttaggatttgagtttatatt

SEQ ID NO: 19757 - DNA, 20 bp, Artificial Sequence
  Synthetic oligonucleotide; GAG chr11 5322166 5322185 5322182 +
taacttgaacattatactct

SEQ ID NO: 19758 - DNA, 20 bp, Artificial Sequence
  Synthetic oligonucleotide; TAG chr11 5322170 5322189 5322186 +
ttgaacattatactctgaga

SEQ ID NO: 19759 - DNA, 20 bp, Artificial Sequence
  Synthetic oligonucleotide; AGG chr11 5322171 5322190 5322187 +
tgaacattatactctgagat

SEQ ID NO: 19760 - DNA, 20 bp, Artificial Sequence
  Synthetic oligonucleotide; TGG chr11 5322194 5322213 5322210 +
ttttccccttttgaaatttg

SEQ ID NO: 19761 - DNA, 20 bp, Artificial Sequence
  Synthetic oligonucleotide; CAG chr11 5322223 5322242 5322239 +
atcctgtttcacaattaaat

SEQ ID NO: 19762 - DNA, 20 bp, Artificial Sequence
  Synthetic oligonucleotide; AAG chr11 5322231 5322250 5322247 +
tcacaattaaatcagtctaa

SEQ ID NO: 19763 - DNA, 20 bp, Artificial Sequence
  Synthetic oligonucleotide; AAG chr11 5322234 5322253 5322250 +
caattaaatcagtctaaaag

SEQ ID NO: 19764 - DNA, 20 bp, Artificial Sequence
  Synthetic oligonucleotide; TAG chr11 5322241 5322260 5322257 +
atcagtctaaaagaagcttt

SEQ ID NO: 19765 - DNA, 20 bp, Artificial Sequence
  Synthetic oligonucleotide; CAG chr11 5322248 5322267 5322264 +
taaaagaagcttttagtaca

SEQ ID NO: 19766 - DNA, 20 bp, Artificial Sequence
  Synthetic oligonucleotide; TAG chr11 5322282 5322301 5322298 +
ctcctcccaccacaattttt

SEQ ID NO: 19767 - DNA, 20 bp, Artificial Sequence
  Synthetic oligonucleotide; TGG chr11 5322289 5322308 5322305 +
caccacaattttttagtcat

SEQ ID NO: 19768 - DNA, 20 bp, Artificial Sequence
  Synthetic oligonucleotide; TGG chr11 5322323 5322342 5322339 +
tccatttctctcaacattgt

SEQ ID NO: 19769 - DNA, 20 bp, Artificial Sequence
  Synthetic oligonucleotide; TAG chr11 5322337 5322356 5322353 +
cattgttggtcttcctaata

SEQ ID NO: 19770 - DNA, 20 bp, Artificial Sequence
  Synthetic oligonucleotide; GAG chr11 5322339 5322358 5322355 +
ttgttggtcttcctaatata

SEQ ID NO: 19771 - DNA, 20 bp, Artificial Sequence
  Synthetic oligonucleotide; GAG chr11 5322341 5322360 5322357 +
gttggtcttcctaatataga

SEQ ID NO: 19772 - DNA, 20 bp, Artificial Sequence
  Synthetic oligonucleotide; CAG chr11 5322348 5322367 5322364 +
ttcctaatatagagagttta

SEQ ID NO: 19773 - DNA, 20 bp, Artificial Sequence
  Synthetic oligonucleotide; TAG chr11 5322351 5322370 5322367 +
ctaatatagagagtttacag

SEQ ID NO: 19774 - DNA, 20 bp, Artificial Sequence
  Synthetic oligonucleotide; CAG chr11 5322358 5322377 5322374 +
agagagtttacagtagatgt

SEQ ID NO: 19775 - DNA, 20 bp, Artificial Sequence
  Synthetic oligonucleotide; GAG chr11 5322360 5322379 5322376 +
agagtttacagtagatgtca

SEQ ID NO: 19776 - DNA, 20 bp, Artificial Sequence
  Synthetic oligonucleotide; AAG chr11 5322364 5322383 5322380 +
tttacagtagatgtcagaga

SEQ ID NO: 19777 - DNA, 20 bp, Artificial Sequence
  Synthetic oligonucleotide; TGG chr11 5322373 5322392 5322389 +
gatgtcagagaaagtattta

SEQ ID NO: 19778 - DNA, 20 bp, Artificial Sequence
  Synthetic oligonucleotide; AAG chr11 5322379 5322398 5322395 +
agagaaagtatttatggcaa

SEQ ID NO: 19779 - DNA, 20 bp, Artificial Sequence
  Synthetic oligonucleotide; AAG chr11 5322419 5322438 5322435 +
tttccctctgaacatatata

SEQ ID NO: 19780 - DNA, 20 bp, Artificial Sequence
  Synthetic oligonucleotide; AAG chr11 5322437 5322456 5322453 +
taaagtatatataacttgtg

SEQ ID NO: 19781 - DNA, 20 bp, Artificial Sequence
  Synthetic oligonucleotide; TAG chr11 5322465 5322484 5322481 +
atgtctcatatttttcattc

SEQ ID NO: 19782 - DNA, 20 bp, Artificial Sequence
  Synthetic oligonucleotide; TGG chr11 5322470 5322489 5322486 +
tcatatttttcattctagaa

SEQ ID NO: 19783 - DNA, 20 bp, Artificial Sequence
  Synthetic oligonucleotide; TAG chr11 5322493 5322512 5322509 +
ctatattttctatttttgaa

SEQ ID NO: 19784 - DNA, 20 bp, Artificial Sequence
  Synthetic oligonucleotide; GAG chr11 5322495 5322514 5322511 +
atattttctatttttgaata

SEQ ID NO: 19785 - DNA, 20 bp, Artificial Sequence
  Synthetic oligonucleotide; TAG chr11 5322517 5322536 5322533 +
gccttgacccttcctattat

SEQ ID NO: 19786 - DNA, 20 bp, Artificial Sequence
  Synthetic oligonucleotide; AGG chr11 5322518 5322537 5322534 +
ccttgacccttcctattatt

SEQ ID NO: 19787 - DNA, 20 bp, Artificial Sequence
  Synthetic oligonucleotide; AAG chr11 5322523 5322542 5322539 +
acccttcctattattaggcc

SEQ ID NO: 19788 - DNA, 20 bp, Artificial Sequence
  Synthetic oligonucleotide; AGG chr11 5322524 5322543 5322540 +
cccttcctattattaggcca

SEQ ID NO: 19789 - DNA, 20 bp, Artificial Sequence
  Synthetic oligonucleotide; GGG chr11 5322525 5322544 5322541 +
ccttcctattattaggccaa

SEQ ID NO: 19790 - DNA, 20 bp, Artificial Sequence
  Synthetic oligonucleotide; AAG chr11 5322530 5322549 5322546 +
ctattattaggccaagggaa

SEQ ID NO: 19791 - DNA, 20 bp, Artificial Sequence
  Synthetic oligonucleotide; AAG chr11 5322550 5322569 5322566 +
aagtatgttaaaatcatctg

SEQ ID NO: 19792 - DNA, 20 bp, Artificial Sequence
  Synthetic oligonucleotide; GAG chr11 5322552 5322571 5322568 +
gtatgttaaaatcatctgaa

SEQ ID NO: 19793 - DNA, 20 bp, Artificial Sequence
  Synthetic oligonucleotide; GAG chr11 5322593 5322612 5322609 +
ctcactttttacttttttac

SEQ ID NO: 19794 - DNA, 20 bp, Artificial Sequence
  Synthetic oligonucleotide; AAG chr11 5322601 5322620 5322617 +
ttacttttttacgagctgac

SEQ ID NO: 19795 - DNA, 20 bp, Artificial Sequence
  Synthetic oligonucleotide; AAG chr11 5322604 5322623 5322620 +
cttttttacgagctgacaag

SEQ ID NO: 19796 - DNA, 20 bp, Artificial Sequence
  Synthetic oligonucleotide; TAG chr11 5322613 5322632 5322629 +
gagctgacaagaagcttgtc

SEQ ID NO: 19797 - DNA, 20 bp, Artificial Sequence
  Synthetic oligonucleotide; AGG chr11 5322614 5322633 5322630 +
agctgacaagaagcttgtct

SEQ ID NO: 19798 - DNA, 20 bp, Artificial Sequence
  Synthetic oligonucleotide; AAG chr11 5322628 5322647 5322644 +
ttgtctaggtttttccttct

SEQ ID NO: 19799 - DNA, 20 bp, Artificial Sequence
  Synthetic oligonucleotide; TGG chr11 5322638 5322657 5322654 +
ttttccttctaagatttttt

SEQ ID NO: 19800 - DNA, 20 bp, Artificial Sequence
  Synthetic oligonucleotide; GGG chr11 5322639 5322658 5322655 +
tttccttctaagattttttt

SEQ ID NO: 19801 - DNA, 20 bp, Artificial Sequence
  Synthetic oligonucleotide; AAG chr11 5322645 5322664 5322661 +
tctaagatttttttgggcaa

SEQ ID NO: 19802 - DNA, 20 bp, Artificial Sequence
  Synthetic oligonucleotide; TAG chr11 5322656 5322675 5322672 +
tttgggcaaaagaatattta

SEQ ID NO: 19803 - DNA, 20 bp, Artificial Sequence
  Synthetic oligonucleotide; AAG chr11 5322659 5322678 5322675 +
gggcaaaagaatatttatag

SEQ ID NO: 19804 - DNA, 20 bp, Artificial Sequence
  Synthetic oligonucleotide; GAG chr11 5322665 5322684 5322681 +
aagaatatttatagaagaat

SEQ ID NO: 19805 - DNA, 20 bp, Artificial Sequence
  Synthetic oligonucleotide; AGG chr11 5322666 5322685 5322682 +
agaatatttatagaagaatg

SEQ ID NO: 19806 - DNA, 20 bp, Artificial Sequence
  Synthetic oligonucleotide; AAG chr11 5322671 5322690 5322687 +
atttatagaagaatgaggta

SEQ ID NO: 19807 - DNA, 20 bp, Artificial Sequence
  Synthetic oligonucleotide; CAG chr11 5322694 5322713 5322710 +
aaatacacttttataaaatc

SEQ ID NO: 19808 - DNA, 20 bp, Artificial Sequence
  Synthetic oligonucleotide; AAG chr11 5322706 5322725 5322722 +
ataaaatccagacatcctgc

SEQ ID NO: 19809 - DNA, 20 bp, Artificial Sequence
  Synthetic oligonucleotide; AGG chr11 5322707 5322726 5322723 +
taaaatccagacatcctgca

SEQ ID NO: 19810 - DNA, 20 bp, Artificial Sequence
  Synthetic oligonucleotide; AAG chr11 5322728 5322747 5322744 +
ggaatgtattgaaaattaaa

SEQ ID NO: 19811 - DNA, 20 bp, Artificial Sequence
  Synthetic oligonucleotide; AAG chr11 5322751 5322770 5322767 +
ctcttattgaaatactctgt

SEQ ID NO: 19812 - DNA, 20 bp, Artificial Sequence
  Synthetic oligonucleotide; TAG chr11 5322771 5322790 5322787 +
aagtgacttacgactgtatt

SEQ ID NO: 19813 - DNA, 20 bp, Artificial Sequence
  Synthetic oligonucleotide; TGG chr11 5322794 5322813 5322810 +
aaaatattaaatgcaaatca

SEQ ID NO: 19814 - DNA, 20 bp, Artificial Sequence
  Synthetic oligonucleotide; TAG chr11 5322800 5322819 5322816 +
ttaaatgcaaatcatggccc

SEQ ID NO: 19815 - DNA, 20 bp, Artificial Sequence
  Synthetic oligonucleotide; GAG chr11 5322802 5322821 5322818 +
aaatgcaaatcatggcccta

SEQ ID NO: 19816 - DNA, 20 bp, Artificial Sequence
  Synthetic oligonucleotide; GAG chr11 5322804 5322823 5322820 +
atgcaaatcatggccctaga

SEQ ID NO: 19817 - DNA, 20 bp, Artificial Sequence
  Synthetic oligonucleotide; CAG chr11 5322817 5322836 5322833 +
ccctagagagtaccctaact

SEQ ID NO: 19818 - DNA, 20 bp, Artificial Sequence
  Synthetic oligonucleotide; AGG chr11 5322818 5322837 5322834 +
cctagagagtaccctaactc

SEQ ID NO: 19819 - DNA, 20 bp, Artificial Sequence
  Synthetic oligonucleotide; GGG chr11 5322819 5322838 5322835 +
ctagagagtaccctaactca

SEQ ID NO: 19820 - DNA, 20 bp, Artificial Sequence
  Synthetic oligonucleotide; TAG chr11 5322822 5322841 5322838 +
gagagtaccctaactcaggg

SEQ ID NO: 19821 - DNA, 20 bp, Artificial Sequence
  Synthetic oligonucleotide; GAG chr11 5322824 5322843 5322840 +
gagtaccctaactcagggta

SEQ ID NO: 19822 - DNA, 20 bp, Artificial Sequence
  Synthetic oligonucleotide; AGG chr11 5322825 5322844 5322841 +
agtaccctaactcagggtag

SEQ ID NO: 19823 - DNA, 20 bp, Artificial Sequence
  Synthetic oligonucleotide; CAG chr11 5322829 5322848 5322845 +
ccctaactcagggtagagga

SEQ ID NO: 19824 - DNA, 20 bp, Artificial Sequence
  Synthetic oligonucleotide; AAG chr11 5322836 5322855 5322852 +
tcagggtagaggacagttaa

SEQ ID NO: 19825 - DNA, 20 bp, Artificial Sequence
  Synthetic oligonucleotide; AAG chr11 5322862 5322881 5322878 +
accaacacttacttatttaa

SEQ ID NO: 19826 - DNA, 20 bp, Artificial Sequence
  Synthetic oligonucleotide; TAG chr11 5322879 5322898 5322895 +
taaaagtaaatttaaaatgt

SEQ ID NO: 19827 - DNA, 20 bp, Artificial Sequence
  Synthetic oligonucleotide; GAG chr11 5322905 5322924 5322921 +
cttatcactatatttgccat

SEQ ID NO: 19828 - DNA, 20 bp, Artificial Sequence
  Synthetic oligonucleotide; AAG chr11 5322927 5322946 5322943 +
gaataatgaaaattttaaat

SEQ ID NO: 19829 - DNA, 20 bp, Artificial Sequence
  Synthetic oligonucleotide; TAG chr11 5322940 5322959 5322956 +
tttaaataagaatttatttc

SEQ ID NO: 19830 - DNA, 20 bp, Artificial Sequence
  Synthetic oligonucleotide; GAG chr11 5322942 5322961 5322958 +
taaataagaatttatttcta

SEQ ID NO: 19831 - DNA, 20 bp, Artificial Sequence
  Synthetic oligonucleotide; TAG chr11 5322982 5323001 5322998 +
ttttttacacttgtgtgcat

SEQ ID NO: 19832 - DNA, 20 bp, Artificial Sequence
  Synthetic oligonucleotide; GAG chr11 5323027 5323046 5323043 +
tatgcacaaatgtgcacact

SEQ ID NO: 19833 - DNA, 20 bp, Artificial Sequence
  Synthetic oligonucleotide; AGG chr11 5323028 5323047 5323044 +
atgcacaaatgtgcacactg

SEQ ID NO: 19834 - DNA, 20 bp, Artificial Sequence
  Synthetic oligonucleotide; AAG chr11 5323034 5323053 5323050 +
aaatgtgcacactgaggcaa

SEQ ID NO: 19835 - DNA, 20 bp, Artificial Sequence
  Synthetic oligonucleotide; TAG chr11 5323044 5323063 5323060 +
actgaggcaaaagtttttca

SEQ ID NO: 19836 - DNA, 20 bp, Artificial Sequence
  Synthetic oligonucleotide; GAG chr11 5323046 5323065 5323062 +
tgaggcaaaagtttttcata

SEQ ID NO: 19837 - DNA, 20 bp, Artificial Sequence
  Synthetic oligonucleotide; GAG chr11 5323082 5323101 5323098 +
ccttttcctcaaatttcact

SEQ ID NO: 19838 - DNA, 20 bp, Artificial Sequence
  Synthetic oligonucleotide; AGG chr11 5323083 5323102 5323099 +
cttttcctcaaatttcactg

SEQ ID NO: 19839 - DNA, 20 bp, Artificial Sequence
  Synthetic oligonucleotide; TGG chr11 5323086 5323105 5323102 +
ttcctcaaatttcactgagg

SEQ ID NO: 19840 - DNA, 20 bp, Artificial Sequence
  Synthetic oligonucleotide; CAG chr11 5323096 5323115 5323112 +
ttcactgaggtggctaattt

SEQ ID NO: 19841 - DNA, 20 bp, Artificial Sequence
  Synthetic oligonucleotide; AGG chr11 5323097 5323116 5323113 +
tcactgaggtggctaatttc

SEQ ID NO: 19842 - DNA, 20 bp, Artificial Sequence
  Synthetic oligonucleotide; AAG chr11 5323109 5323128 5323125 +
ctaatttcaggtgcatttga

SEQ ID NO: 19843 - DNA, 20 bp, Artificial Sequence
  Synthetic oligonucleotide; AAG chr11 5323112 5323131 5323128 +
atttcaggtgcatttgaaag

SEQ ID NO: 19844 - DNA, 20 bp, Artificial Sequence
  Synthetic oligonucleotide; TAG chr11 5323125 5323144 5323141 +
ttgaaagaagaatttaaata

SEQ ID NO: 19845 - DNA, 20 bp, Artificial Sequence
  Synthetic oligonucleotide; CAG chr11 5323135 5323154 5323151 +
aatttaaatatagacttttt

SEQ ID NO: 19846 - DNA, 20 bp, Artificial Sequence
  Synthetic oligonucleotide; TGG chr11 5323145 5323164 5323161 +
tagactttttcagttccata

SEQ ID NO: 19847 - DNA, 20 bp, Artificial Sequence
  Synthetic oligonucleotide; CAG chr11 5323154 5323173 5323170 +
tcagttccatatggtctatt

SEQ ID NO: 19848 - DNA, 20 bp, Artificial Sequence
  Synthetic oligonucleotide; CAG chr11 5323168 5323187 5323184 +
tctattcagtgttctgtcac

SEQ ID NO: 19849 - DNA, 20 bp, Artificial Sequence
  Synthetic oligonucleotide; AAG chr11 5323180 5323199 5323196 +
tctgtcaccagacttctcct

SEQ ID NO: 19850 - DNA, 20 bp, Artificial Sequence
  Synthetic oligonucleotide; TGG chr11 5323200 5323219 5323216 +
aagatatgcccccaacccta

SEQ ID NO: 19851 - DNA, 20 bp, Artificial Sequence
  Synthetic oligonucleotide; AAG chr11 5323205 5323224 5323221 +
atgcccccaaccctatggta

SEQ ID NO: 19852 - DNA, 20 bp, Artificial Sequence
  Synthetic oligonucleotide; AAG chr11 5323213 5323232 5323229 +
aaccctatggtaaagtactt

SEQ ID NO: 19853 - DNA, 20 bp, Artificial Sequence
  Synthetic oligonucleotide; GAG chr11 5323223 5323242 5323239 +
taaagtacttaagtccttgt

SEQ ID NO: 19854 - DNA, 20 bp, Artificial Sequence
  Synthetic oligonucleotide; CAG chr11 5323242 5323261 5323258 +
tgagtgacaacattgtcttc

SEQ ID NO: 19855 - DNA, 20 bp, Artificial Sequence
  Synthetic oligonucleotide; AAG chr11 5323264 5323283 5323280 +
gtatacccttgctctttgct

SEQ ID NO: 19856 - DNA, 20 bp, Artificial Sequence
  Synthetic oligonucleotide; AAG chr11 5323268 5323287 5323284 +
acccttgctctttgctaaga

SEQ ID NO: 19857 - DNA, 20 bp, Artificial Sequence
  Synthetic oligonucleotide; CAG chr11 5323276 5323295 5323292 +
tctttgctaagaaagaactc

SEQ ID NO: 19858 - DNA, 20 bp, Artificial Sequence
  Synthetic oligonucleotide; AGG chr11 5323277 5323296 5323293 +
ctttgctaagaaagaactcc

SEQ ID NO: 19859 - DNA, 20 bp, Artificial Sequence
  Synthetic oligonucleotide; TGG chr11 5323296 5323315 5323312 +
caggctttcatttttcattc

SEQ ID NO: 19860 - DNA, 20 bp, Artificial Sequence
  Synthetic oligonucleotide; CAG chr11 5323328 5323347 5323344 +
tatgtctgtgtctgattctc

SEQ ID NO: 19861 - DNA, 20 bp, Artificial Sequence
  Synthetic oligonucleotide; GAG chr11 5323335 5323354 5323351 +
gtgtctgattctccagatcc

SEQ ID NO: 19862 - DNA, 20 bp, Artificial Sequence
  Synthetic oligonucleotide; TAG chr11 5323359 5323378 5323375 +
ttaactactaaacctatgtt

SEQ ID NO: 19863 - DNA, 20 bp, Artificial Sequence
  Synthetic oligonucleotide; AAG chr11 5323366 5323385 5323382 +
ctaaacctatgtttagataa

SEQ ID NO: 19864 - DNA, 20 bp, Artificial Sequence
  Synthetic oligonucleotide; AGG chr11 5323367 5323386 5323383 +
taaacctatgtttagataaa

SEQ ID NO: 19865 - DNA, 20 bp, Artificial Sequence
  Synthetic oligonucleotide; CGG chr11 5323370 5323389 5323386 +
acctatgtttagataaaagg

SEQ ID NO: 19866 - DNA, 20 bp, Artificial Sequence
  Synthetic oligonucleotide; TGG chr11 5323395 5323414 5323411 +
aatgccatattgtatttgct

SEQ ID NO: 19867 - DNA, 20 bp, Artificial Sequence
  Synthetic oligonucleotide; TAG chr11 5323409 5323428 5323425 +
tttgcttggttttgatgctg

SEQ ID NO: 19868 - DNA, 20 bp, Artificial Sequence
  Synthetic oligonucleotide; CAG chr11 5323416 5323435 5323432 +
ggttttgatgctgtagatga

SEQ ID NO: 19869 - DNA, 20 bp, Artificial Sequence
  Synthetic oligonucleotide; AGG chr11 5323417 5323436 5323433 +
gttttgatgctgtagatgac

SEQ ID NO: 19870 - DNA, 20 bp, Artificial Sequence
  Synthetic oligonucleotide; GGG chr11 5323418 5323437 5323434 +
ttttgatgctgtagatgaca

SEQ ID NO: 19871 - DNA, 20 bp, Artificial Sequence
  Synthetic oligonucleotide; AAG chr11 5323428 5323447 5323444 +
gtagatgacagggttcatta

SEQ ID NO: 19872 - DNA, 20 bp, Artificial Sequence
  Synthetic oligonucleotide; AGG chr11 5323429 5323448 5323445 +
tagatgacagggttcattaa

SEQ ID NO: 19873 - DNA, 20 bp, Artificial Sequence
  Synthetic oligonucleotide; GAG chr11 5323431 5323450 5323447 +
gatgacagggttcattaaag

SEQ ID NO: 19874 - DNA, 20 bp, Artificial Sequence
  Synthetic oligonucleotide; AGG chr11 5323432 5323451 5323448 +
atgacagggttcattaaagg

SEQ ID NO: 19875 - DNA, 20 bp, Artificial Sequence
  Synthetic oligonucleotide; AAG chr11 5323436 5323455 5323452 +
cagggttcattaaaggagga

SEQ ID NO: 19876 - DNA, 20 bp, Artificial Sequence
  Synthetic oligonucleotide; GAG chr11 5323438 5323457 5323454 +
gggttcattaaaggaggaaa

SEQ ID NO: 19877 - DNA, 20 bp, Artificial Sequence
  Synthetic oligonucleotide; AGG chr11 5323439 5323458 5323455 +
ggttcattaaaggaggaaag

SEQ ID NO: 19878 - DNA, 20 bp, Artificial Sequence
  Synthetic oligonucleotide; AAG chr11 5323442 5323461 5323458 +
tcattaaaggaggaaagagg

SEQ ID NO: 19879 - DNA, 20 bp, Artificial Sequence
  Synthetic oligonucleotide; TAG chr11 5323445 5323464 5323461 +
ttaaaggaggaaagaggaag

SEQ ID NO: 19880 - DNA, 20 bp, Artificial Sequence
  Synthetic oligonucleotide; TGG chr11 5323466 5323485 5323482 +
agatgtaactcatgataatg

SEQ ID NO: 19881 - DNA, 20 bp, Artificial Sequence
  Synthetic oligonucleotide; TGG chr11 5323477 5323496 5323493 +
atgataatgtggacaacctc

SEQ ID NO: 19882 - DNA, 20 bp, Artificial Sequence
  Synthetic oligonucleotide; TAG chr11 5323529 5323548 5323545 +
tcaaacccatcactgtaaca

SEQ ID NO: 19883 - DNA, 20 bp, Artificial Sequence
  Synthetic oligonucleotide; AAG chr11 5323532 5323551 5323548 +
aacccatcactgtaacatag

SEQ ID NO: 19884 - DNA, 20 bp, Artificial Sequence
  Synthetic oligonucleotide; AAG chr11 5323537 5323556 5323553 +
atcactgtaacatagaagat

SEQ ID NO: 19885 - DNA, 20 bp, Artificial Sequence
  Synthetic oligonucleotide; TGG chr11 5323553 5323572 5323569 +
agataagaacacaactaatg

SEQ ID NO: 19886 - DNA, 20 bp, Artificial Sequence
  Synthetic oligonucleotide; GGG chr11 5323554 5323573 5323570 +
gataagaacacaactaatgt

SEQ ID NO: 19887 - DNA, 20 bp, Artificial Sequence
  Synthetic oligonucleotide; GAG chr11 5323556 5323575 5323572 +
taagaacacaactaatgtgg

SEQ ID NO: 19888 - DNA, 20 bp, Artificial Sequence
  Synthetic oligonucleotide; CAG chr11 5323562 5323581 5323578 +
cacaactaatgtgggagata

SEQ ID NO: 19889 - DNA, 20 bp, Artificial Sequence
  Synthetic oligonucleotide; AGG chr11 5323563 5323582 5323579 +
acaactaatgtgggagatac

SEQ ID NO: 19890 - DNA, 20 bp, Artificial Sequence
  Synthetic oligonucleotide; GAG chr11 5323570 5323589 5323586 +
atgtgggagatacaggtatt

SEQ ID NO: 19891 - DNA, 20 bp, Artificial Sequence
  Synthetic oligonucleotide; AGG chr11 5323571 5323590 5323587 +
tgtgggagatacaggtattg

SEQ ID NO: 19892 - DNA, 20 bp, Artificial Sequence
  Synthetic oligonucleotide; GGG chr11 5323572 5323591 5323588 +
gtgggagatacaggtattga

SEQ ID NO: 19893 - DNA, 20 bp, Artificial Sequence
  Synthetic oligonucleotide; TGG chr11 5323578 5323597 5323594 +
gatacaggtattgagggctt

SEQ ID NO: 19894 - DNA, 20 bp, Artificial Sequence
  Synthetic oligonucleotide; CAG chr11 5323593 5323612 5323609 +
ggctttggctctctcttcac

SEQ ID NO: 19895 - DNA, 20 bp, Artificial Sequence
  Synthetic oligonucleotide; AAG chr11 5323596 5323615 5323612 +
tttggctctctcttcaccag

SEQ ID NO: 19896 - DNA, 20 bp, Artificial Sequence
  Synthetic oligonucleotide; CAG chr11 5323611 5323630 5323627 +
accagaagcaatgcctatga

SEQ ID NO: 19897 - DNA, 20 bp, Artificial Sequence
  Synthetic oligonucleotide; AAG chr11 5323618 5323637 5323634 +
gcaatgcctatgacagtatt

SEQ ID NO: 19898 - DNA, 20 bp, Artificial Sequence
  Synthetic oligonucleotide; TAG chr11 5323624 5323643 5323640 +
cctatgacagtattaagaat

SEQ ID NO: 19899 - DNA, 20 bp, Artificial Sequence
  Synthetic oligonucleotide; TAG chr11 5323631 5323650 5323647 +
cagtattaagaattagaata

SEQ ID NO: 19900 - DNA, 20 bp, Artificial Sequence
  Synthetic oligonucleotide; AGG chr11 5323632 5323651 5323648 +
agtattaagaattagaatat

SEQ ID NO: 19901 - DNA, 20 bp, Artificial Sequence
  Synthetic oligonucleotide; GAG chr11 5323634 5323653 5323650 +
tattaagaattagaatatag

SEQ ID NO: 19902 - DNA, 20 bp, Artificial Sequence
  Synthetic oligonucleotide; AAG chr11 5323637 5323656 5323653 +
taagaattagaatataggag

SEQ ID NO: 19903 - DNA, 20 bp, Artificial Sequence
  Synthetic oligonucleotide; GAG chr11 5323639 5323658 5323655 +
agaattagaatataggagaa

SEQ ID NO: 19904 - DNA, 20 bp, Artificial Sequence
  Synthetic oligonucleotide; AGG chr11 5323640 5323659 5323656 +
gaattagaatataggagaag

SEQ ID NO: 19905 - DNA, 20 bp, Artificial Sequence
  Synthetic oligonucleotide; CAG chr11 5323648 5323667 5323664 +
atataggagaagaggatgat

SEQ ID NO: 19906 - DNA, 20 bp, Artificial Sequence
  Synthetic oligonucleotide; CAG chr11 5323652 5323671 5323668 +
aggagaagaggatgatcaga

SEQ ID NO: 19907 - DNA, 20 bp, Artificial Sequence
  Synthetic oligonucleotide; TAG chr11 5323657 5323676 5323673 +
aagaggatgatcagacagtc

SEQ ID NO: 19908 - DNA, 20 bp, Artificial Sequence
  Synthetic oligonucleotide; AGG chr11 5323658 5323677 5323674 +
agaggatgatcagacagtct

SEQ ID NO: 19909 - DNA, 20 bp, Artificial Sequence
  Synthetic oligonucleotide; AAG chr11 5323661 5323680 5323677 +
ggatgatcagacagtctagg

SEQ ID NO: 19910 - DNA, 20 bp, Artificial Sequence
  Synthetic oligonucleotide; AAG chr11 5323671 5323690 5323687 +
acagtctaggaagattgtta

SEQ ID NO: 19911 - DNA, 20 bp, Artificial Sequence
  Synthetic oligonucleotide; GAG chr11 5323673 5323692 5323689 +
agtctaggaagattgttaaa

SEQ ID NO: 19912 - DNA, 20 bp, Artificial Sequence
  Synthetic oligonucleotide; CAG chr11 5323686 5323705 5323702 +
tgttaaagagatcaaaatta

SEQ ID NO: 19913 - DNA, 20 bp, Artificial Sequence
  Synthetic oligonucleotide; AGG chr11 5323687 5323706 5323703 +
gttaaagagatcaaaattac

SEQ ID NO: 19914 - DNA, 20 bp, Artificial Sequence
  Synthetic oligonucleotide; GGG chr11 5323688 5323707 5323704 +
ttaaagagatcaaaattaca

SEQ ID NO: 19915 - DNA, 20 bp, Artificial Sequence
  Synthetic oligonucleotide; AAG chr11 5323693 5323712 5323709 +
gagatcaaaattacagggta

SEQ ID NO: 19916 - DNA, 20 bp, Artificial Sequence
  Synthetic oligonucleotide; AAG chr11 5323704 5323723 5323720 +
tacagggtaaagtctattga

SEQ ID NO: 19917 - DNA, 20 bp, Artificial Sequence
  Synthetic oligonucleotide; CAG chr11 5323713 5323732 5323729 +
aagtctattgaaagttatgt

SEQ ID NO: 19918 - DNA, 20 bp, Artificial Sequence
  Synthetic oligonucleotide; AAG chr11 5323719 5323738 5323735 +
attgaaagttatgtcagcac

SEQ ID NO: 19919 - DNA, 20 bp, Artificial Sequence
  Synthetic oligonucleotide; CAG chr11 5323723 5323742 5323739 +
aaagttatgtcagcacaagc

SEQ ID NO: 19920 - DNA, 20 bp, Artificial Sequence
  Synthetic oligonucleotide; TGG chr11 5323739 5323758 5323755 +
aagccagtctcatgatttct

SEQ ID NO: 19921 - DNA, 20 bp, Artificial Sequence
  Synthetic oligonucleotide; TGG chr11 5323742 5323761 5323758 +
ccagtctcatgatttcttgg

SEQ ID NO: 19922 - DNA, 20 bp, Artificial Sequence
  Synthetic oligonucleotide; GAG chr11 5323744 5323763 5323760 +
agtctcatgatttcttggtg

SEQ ID NO: 19923 - DNA, 20 bp, Artificial Sequence
  Synthetic oligonucleotide; AGG chr11 5323745 5323764 5323761 +
gtctcatgatttcttggtgg

SEQ ID NO: 19924 - DNA, 20 bp, Artificial Sequence
  Synthetic oligonucleotide; CAG chr11 5323748 5323767 5323764 +
tcatgatttcttggtggagg

SEQ ID NO: 19925 - DNA, 20 bp, Artificial Sequence
  Synthetic oligonucleotide; AAG chr11 5323752 5323771 5323768 +
gatttcttggtggaggcaga

SEQ ID NO: 19926 - DNA, 20 bp, Artificial Sequence
  Synthetic oligonucleotide; GAG chr11 5323770 5323789 5323786 +
gaaagcacgtgtgataacat

SEQ ID NO: 19927 - DNA, 20 bp, Artificial Sequence
  Synthetic oligonucleotide; AAG chr11 5323795 5323814 5323811 +
ttgcaatatgaaaatgaaaa

SEQ ID NO: 19928 - DNA, 20 bp, Artificial Sequence
  Synthetic oligonucleotide; CAG chr11 5323809 5323828 5323825 +
tgaaaaaagacgcaaaatta

SEQ ID NO: 19929 - DNA, 20 bp, Artificial Sequence
  Synthetic oligonucleotide; AGG chr11 5323810 5323829 5323826 +
gaaaaaagacgcaaaattac

SEQ ID NO: 19930 - DNA, 20 bp, Artificial Sequence
  Synthetic oligonucleotide; CAG chr11 5323813 5323832 5323829 +
aaaagacgcaaaattacagg

SEQ ID NO: 19931 - DNA, 20 bp, Artificial Sequence
  Synthetic oligonucleotide; AGG chr11 5323814 5323833 5323830 +
aaagacgcaaaattacaggc

SEQ ID NO: 19932 - DNA, 20 bp, Artificial Sequence
  Synthetic oligonucleotide; TGG chr11 5323818 5323837 5323834 +
acgcaaaattacaggcagga

SEQ ID NO: 19933 - DNA, 20 bp, Artificial Sequence
  Synthetic oligonucleotide; TAG chr11 5323834 5323853 5323850 +
aggatggatacaaaacccct

SEQ ID NO: 19934 - DNA, 20 bp, Artificial Sequence
  Synthetic oligonucleotide; TAG chr11 5323866 5323885 5323882 +
cactcctaacgctatgactc

SEQ ID NO: 19935 - DNA, 20 bp, Artificial Sequence
  Synthetic oligonucleotide; TGG chr11 5323872 5323891 5323888 +
taacgctatgactctagtat

SEQ ID NO: 19936 - DNA, 20 bp, Artificial Sequence
  Synthetic oligonucleotide; GAG chr11 5323876 5323895 5323892 +
gctatgactctagtattggt

SEQ ID NO: 19937 - DNA, 20 bp, Artificial Sequence
  Synthetic oligonucleotide; TGG chr11 5323881 5323900 5323897 +
gactctagtattggtgagaa

SEQ ID NO: 19938 - DNA, 20 bp, Artificial Sequence
  Synthetic oligonucleotide; AAG chr11 5323884 5323903 5323900 +
tctagtattggtgagaatgg

SEQ ID NO: 19939 - DNA, 20 bp, Artificial Sequence
  Synthetic oligonucleotide; AAG chr11 5323896 5323915 5323912 +
gagaatggaagcatatctca

SEQ ID NO: 19940 - DNA, 20 bp, Artificial Sequence
  Synthetic oligonucleotide; AGG chr11 5323897 5323916 5323913 +
agaatggaagcatatctcaa

SEQ ID NO: 19941 - DNA, 20 bp, Artificial Sequence
  Synthetic oligonucleotide; CGG chr11 5323904 5323923 5323920 +
aagcatatctcaaaggattg

SEQ ID NO: 19942 - DNA, 20 bp, Artificial Sequence
  Synthetic oligonucleotide; TGG chr11 5323908 5323927 5323924 +
atatctcaaaggattgcgga

SEQ ID NO: 19943 - DNA, 20 bp, Artificial Sequence
  Synthetic oligonucleotide; CAG chr11 5323936 5323955 5323952 +
aaacaatcatatgccattgc

SEQ ID NO: 19944 - DNA, 20 bp, Artificial Sequence
  Synthetic oligonucleotide; AGG chr11 5323937 5323956 5323953 +
aacaatcatatgccattgcc

SEQ ID NO: 19945 - DNA, 20 bp, Artificial Sequence
  Synthetic oligonucleotide; GAG chr11 5323939 5323958 5323955 +
caatcatatgccattgccag

SEQ ID NO: 19946 - DNA, 20 bp, Artificial Sequence
  Synthetic oligonucleotide; AGG chr11 5323940 5323959 5323956 +
aatcatatgccattgccagg

SEQ ID NO: 19947 - DNA, 20 bp, Artificial Sequence
  Synthetic oligonucleotide; GGG chr11 5323941 5323960 5323957 +
atcatatgccattgccagga

SEQ ID NO: 19948 - DNA, 20 bp, Artificial Sequence
  Synthetic oligonucleotide; CAG chr11 5323959 5323978 5323975 +
gagggaacctgattccacaa

SEQ ID NO: 19949 - DNA, 20 bp, Artificial Sequence
  Synthetic oligonucleotide; AAG chr11 5323963 5323982 5323979 +
gaacctgattccacaacaga

SEQ ID NO: 19950 - DNA, 20 bp, Artificial Sequence
  Synthetic oligonucleotide; AGG chr11 5323964 5323983 5323980 +
aacctgattccacaacagaa

SEQ ID NO: 19951 - DNA, 20 bp, Artificial Sequence
  Synthetic oligonucleotide; GGG chr11 5323965 5323984 5323981 +
acctgattccacaacagaaa

SEQ ID NO: 19952 - DNA, 20 bp, Artificial Sequence
  Synthetic oligonucleotide; GAG chr11 5323967 5323986 5323983 +
ctgattccacaacagaaagg

SEQ ID NO: 19953 - DNA, 20 bp, Artificial Sequence
  Synthetic oligonucleotide; AAG chr11 5323976 5323995 5323992 +
caacagaaagggagtgaata

SEQ ID NO: 19954 - DNA, 20 bp, Artificial Sequence
  Synthetic oligonucleotide; AAG chr11 5323980 5323999 5323996 +
agaaagggagtgaataaagt

SEQ ID NO: 19955 - DNA, 20 bp, Artificial Sequence
  Synthetic oligonucleotide; TAG chr11 5323987 5324006 5324003 +
gagtgaataaagtaagcctg

SEQ ID NO: 19956 - DNA, 20 bp, Artificial Sequence
  Synthetic oligonucleotide; AGG chr11 5323988 5324007 5324004 +
agtgaataaagtaagcctgt

SEQ ID NO: 19957 - DNA, 20 bp, Artificial Sequence
  Synthetic oligonucleotide; AAG chr11 5323991 5324010 5324007 +
gaataaagtaagcctgtagg

SEQ ID NO: 19958 - DNA, 20 bp, Artificial Sequence
  Synthetic oligonucleotide; CAG chr11 5323994 5324013 5324010 +
taaagtaagcctgtaggaag

SEQ ID NO: 19959 - DNA, 20 bp, Artificial Sequence
  Synthetic oligonucleotide; TAG chr11 5324029 5324048 5324045 +
atctccctgtgattcaccca

SEQ ID NO: 19960 - DNA, 20 bp, Artificial Sequence
  Synthetic oligonucleotide; AGG chr11 5324030 5324049 5324046 +
tctccctgtgattcacccat

SEQ ID NO: 19961 - DNA, 20 bp, Artificial Sequence
  Synthetic oligonucleotide; CAG chr11 5324043 5324062 5324059 +
cacccataggatgcccatta

SEQ ID NO: 19962 - DNA, 20 bp, Artificial Sequence
  Synthetic oligonucleotide; TAG chr11 5324046 5324065 5324062 +
ccataggatgcccattacag

SEQ ID NO: 19963 - DNA, 20 bp, Artificial Sequence
  Synthetic oligonucleotide; AGG chr11 5324047 5324066 5324063 +
cataggatgcccattacagt

SEQ ID NO: 19964 - DNA, 20 bp, Artificial Sequence
  Synthetic oligonucleotide; TGG chr11 5324055 5324074 5324071 +
gcccattacagtaggcatcg

SEQ ID NO: 19965 - DNA, 20 bp, Artificial Sequence
  Synthetic oligonucleotide; GAG chr11 5324071 5324090 5324087 +
atcgtggtcaatgtcaccat

SEQ ID NO: 19966 - DNA, 20 bp, Artificial Sequence
  Synthetic oligonucleotide; AGG chr11 5324072 5324091 5324088 +
tcgtggtcaatgtcaccatg

SEQ ID NO: 19967 - DNA, 20 bp, Artificial Sequence
  Synthetic oligonucleotide; CAG chr11 5324086 5324105 5324102 +
accatgaggtctgtgcctgc

SEQ ID NO: 19968 - DNA, 20 bp, Artificial Sequence
  Synthetic oligonucleotide; TGG chr11 5324091 5324110 5324107 +
gaggtctgtgcctgccagca

SEQ ID NO: 19969 - DNA, 20 bp, Artificial Sequence
  Synthetic oligonucleotide; GAG chr11 5324095 5324114 5324111 +
tctgtgcctgccagcatggt

SEQ ID NO: 19970 - DNA, 20 bp, Artificial Sequence
  Synthetic oligonucleotide; AGG chr11 5324096 5324115 5324112 +
ctgtgcctgccagcatggtg

SEQ ID NO: 19971 - DNA, 20 bp, Artificial Sequence
  Synthetic oligonucleotide; AAG chr11 5324099 5324118 5324115 +
tgcctgccagcatggtgagg

SEQ ID NO: 19972 - DNA, 20 bp, Artificial Sequence
  Synthetic oligonucleotide; TAG chr11 5324102 5324121 5324118 +
ctgccagcatggtgaggaag

SEQ ID NO: 19973 - DNA, 20 bp, Artificial Sequence
  Synthetic oligonucleotide; TGG chr11 5324109 5324128 5324125 +
catggtgaggaagtagtaca

SEQ ID NO: 19974 - DNA, 20 bp, Artificial Sequence
  Synthetic oligonucleotide; GGG chr11 5324110 5324129 5324126 +
atggtgaggaagtagtacat

SEQ ID NO: 19975 - DNA, 20 bp, Artificial Sequence
  Synthetic oligonucleotide; AAG chr11 5324119 5324138 5324135 +
aagtagtacatgggctcatg

SEQ ID NO: 19976 - DNA, 20 bp, Artificial Sequence
  Synthetic oligonucleotide; TGG chr11 5324126 5324145 5324142 +
acatgggctcatgaagactg

SEQ ID NO: 19977 - DNA, 20 bp, Artificial Sequence
  Synthetic oligonucleotide; GAG chr11 5324140 5324159 5324156 +
agactgtggtcatgcttgat

SEQ ID NO: 19978 - DNA, 20 bp, Artificial Sequence
  Synthetic oligonucleotide; AGG chr11 5324141 5324160 5324157 +
gactgtggtcatgcttgatg

SEQ ID NO: 19979 - DNA, 20 bp, Artificial Sequence
  Synthetic oligonucleotide; TAG chr11 5324144 5324163 5324160 +
tgtggtcatgcttgatgagg

SEQ ID NO: 19980 - DNA, 20 bp, Artificial Sequence
  Synthetic oligonucleotide; GAG chr11 5324146 5324165 5324162 +
tggtcatgcttgatgaggta

SEQ ID NO: 19981 - DNA, 20 bp, Artificial Sequence
  Synthetic oligonucleotide; AGG chr11 5324147 5324166 5324163 +
ggtcatgcttgatgaggtag

SEQ ID NO: 19982 - DNA, 20 bp, Artificial Sequence
  Synthetic oligonucleotide; GAG chr11 5324149 5324168 5324165 +
tcatgcttgatgaggtagag

SEQ ID NO: 19983 - DNA, 20 bp, Artificial Sequence
  Synthetic oligonucleotide; CAG chr11 5324164 5324183 5324180 +
tagaggagcatgccattgcc

SEQ ID NO: 19984 - DNA, 20 bp, Artificial Sequence
  Synthetic oligonucleotide; AAG chr11 5324167 5324186 5324183 +
aggagcatgccattgcccag

SEQ ID NO: 19985 - DNA, 20 bp, Artificial Sequence
  Synthetic oligonucleotide; AGG chr11 5324168 5324187 5324184 +
ggagcatgccattgcccaga

SEQ ID NO: 19986 - DNA, 20 bp, Artificial Sequence
  Synthetic oligonucleotide; CAG chr11 5324184 5324203 5324200 +
cagaaggatgcacacataaa

SEQ ID NO: 19987 - DNA, 20 bp, Artificial Sequence
  Synthetic oligonucleotide; AAG chr11 5324189 5324208 5324205 +
ggatgcacacataaacagca

SEQ ID NO: 19988 - DNA, 20 bp, Artificial Sequence
  Synthetic oligonucleotide; AAG chr11 5324192 5324211 5324208 +
tgcacacataaacagcaaag

SEQ ID NO: 19989 - DNA, 20 bp, Artificial Sequence
  Synthetic oligonucleotide; AGG chr11 5324193 5324212 5324209 +
gcacacataaacagcaaaga

SEQ ID NO: 19990 - DNA, 20 bp, Artificial Sequence
  Synthetic oligonucleotide; GGG chr11 5324194 5324213 5324210 +
cacacataaacagcaaagaa

SEQ ID NO: 19991 - DNA, 20 bp, Artificial Sequence
  Synthetic oligonucleotide; GGG chr11 5324195 5324214 5324211 +
acacataaacagcaaagaag

SEQ ID NO: 19992 - DNA, 20 bp, Artificial Sequence
  Synthetic oligonucleotide; TGG chr11 5324199 5324218 5324215 +
ataaacagcaaagaagggga

SEQ ID NO: 19993 - DNA, 20 bp, Artificial Sequence
  Synthetic oligonucleotide; GAG chr11 5324201 5324220 5324217 +
aaacagcaaagaaggggatg

SEQ ID NO: 19994 - DNA, 20 bp, Artificial Sequence
  Synthetic oligonucleotide; CAG chr11 5324207 5324226 5324223 +
caaagaaggggatggagatc

SEQ ID NO: 19995 - DNA, 20 bp, Artificial Sequence
  Synthetic oligonucleotide; GAG chr11 5324214 5324233 5324230 +
ggggatggagatccagtgat

SEQ ID NO: 19996 - DNA, 20 bp, Artificial Sequence
  Synthetic oligonucleotide; CAG chr11 5324224 5324243 5324240 +
atccagtgatgagctgcctc

SEQ ID NO: 19997 - DNA, 20 bp, Artificial Sequence
  Synthetic oligonucleotide; TGG chr11 5324230 5324249 5324246 +
tgatgagctgcctccagccc

SEQ ID NO: 19998 - DNA, 20 bp, Artificial Sequence
  Synthetic oligonucleotide; AAG chr11 5324234 5324253 5324250 +
gagctgcctccagccctgga

SEQ ID NO: 19999 - DNA, 20 bp, Artificial Sequence
  Synthetic oligonucleotide; CAG chr11 5324238 5324257 5324254 +
tgcctccagccctggaaagc

SEQ ID NO: 20000 - DNA, 20 bp, Artificial Sequence
  Synthetic oligonucleotide; CAG chr11 5324242 5324261 5324258 +
tccagccctggaaagccagt

SEQ ID NO: 20001 - DNA, 20 bp, Artificial Sequence
  Synthetic oligonucleotide; AAG chr11 5324250 5324269 5324266 +
tggaaagccagtcagcaaaa

SEQ ID NO: 20002 - DNA, 20 bp, Artificial Sequence
  Synthetic oligonucleotide; AGG chr11 5324251 5324270 5324267 +
ggaaagccagtcagcaaaaa

SEQ ID NO: 20003 - DNA, 20 bp, Artificial Sequence
  Synthetic oligonucleotide; GGG chr11 5324252 5324271 5324268 +
gaaagccagtcagcaaaaaa

SEQ ID NO: 20004 - DNA, 20 bp, Artificial Sequence
  Synthetic oligonucleotide; GGG chr11 5324253 5324272 5324269 +
aaagccagtcagcaaaaaag

SEQ ID NO: 20005 - DNA, 20 bp, Artificial Sequence
  Synthetic oligonucleotide; CAG chr11 5324259 5324278 5324275 +
agtcagcaaaaaaggggctg

SEQ ID NO: 20006 - DNA, 20 bp, Artificial Sequence
  Synthetic oligonucleotide; TGG chr11 5324268 5324287 5324284 +
aaaaggggctgcagtaatat

SEQ ID NO: 20007 - DNA, 20 bp, Artificial Sequence
  Synthetic oligonucleotide; GGG chr11 5324269 5324288 5324285 +
aaaggggctgcagtaatatt

SEQ ID NO: 20008 - DNA, 20 bp, Artificial Sequence
  Synthetic oligonucleotide; TAG chr11 5324277 5324296 5324293 +
tgcagtaatattgggccaca

SEQ ID NO: 20009 - DNA, 20 bp, Artificial Sequence
  Synthetic oligonucleotide; CGG chr11 5324289 5324308 5324305 +
gggccacatagtgtatccac

SEQ ID NO: 20010 - DNA, 20 bp, Artificial Sequence
  Synthetic oligonucleotide; AAG chr11 5324294 5324313 5324310 +
acatagtgtatccaccggta

SEQ ID NO: 20011 - DNA, 20 bp, Artificial Sequence
  Synthetic oligonucleotide; CAG chr11 5324299 5324318 5324315 +
gtgtatccaccggtaaagat

SEQ ID NO: 20012 - DNA, 20 bp, Artificial Sequence
  Synthetic oligonucleotide; CAG chr11 5324322 5324341 5324338 +
atttcttgaaaccttgaaac

SEQ ID NO: 20013 - DNA, 20 bp, Artificial Sequence
  Synthetic oligonucleotide; AGG chr11 5324323 5324342 5324339 +
tttcttgaaaccttgaaacc

SEQ ID NO: 20014 - DNA, 20 bp, Artificial Sequence
  Synthetic oligonucleotide; GAG chr11 5324325 5324344 5324341 +
tcttgaaaccttgaaaccag

SEQ ID NO: 20015 - DNA, 20 bp, Artificial Sequence
  Synthetic oligonucleotide; TGG chr11 5324345 5324364 5324361 +
gagcctccaatcttcctgct

SEQ ID NO: 20016 - DNA, 20 bp, Artificial Sequence
  Synthetic oligonucleotide; GAG chr11 5324347 5324366 5324363 +
gcctccaatcttcctgcttg

SEQ ID NO: 20017 - DNA, 20 bp, Artificial Sequence
  Synthetic oligonucleotide; TGG chr11 5324359 5324378 5324375 +
cctgcttggagatgattaac

SEQ ID NO: 20018 - DNA, 20 bp, Artificial Sequence
  Synthetic oligonucleotide; AAG chr11 5324395 5324414 5324411 +
actctgcaactattttcctg

SEQ ID NO: 20019 - DNA, 20 bp, Artificial Sequence
  Synthetic oligonucleotide; AAG chr11 5324398 5324417 5324414 +
ctgcaactattttcctgaag

SEQ ID NO: 20020 - DNA, 20 bp, Artificial Sequence
  Synthetic oligonucleotide; TAG chr11 5324403 5324422 5324419 +
actattttcctgaagaagaa

SEQ ID NO: 20021 - DNA, 20 bp, Artificial Sequence
  Synthetic oligonucleotide; CAG chr11 5324412 5324431 5324428 +
ctgaagaagaatagcatgta

SEQ ID NO: 20022 - DNA, 20 bp, Artificial Sequence
  Synthetic oligonucleotide; TGG chr11 5324419 5324438 5324435 +
agaatagcatgtacagacta

SEQ ID NO: 20023 - DNA, 20 bp, Artificial Sequence
  Synthetic oligonucleotide; TAG chr11 5324435 5324454 5324451 +
actatggttttttccctaat

SEQ ID NO: 20024 - DNA, 20 bp, Artificial Sequence
  Synthetic oligonucleotide; GAG chr11 5324448 5324467 5324464 +
ccctaattagaaaaaatact

SEQ ID NO: 20025 - DNA, 20 bp, Artificial Sequence
  Synthetic oligonucleotide; TGG chr11 5324455 5324474 5324471 +
tagaaaaaatactgagttaa

SEQ ID NO: 20026 - DNA, 20 bp, Artificial Sequence
  Synthetic oligonucleotide; GAG chr11 5324521 5324540 5324537 +
atattatccgcaactatttt

SEQ ID NO: 20027 - DNA, 20 bp, Artificial Sequence
  Synthetic oligonucleotide; AGG chr11 5324522 5324541 5324538 +
tattatccgcaactattttg

SEQ ID NO: 20028 - DNA, 20 bp, Artificial Sequence
  Synthetic oligonucleotide; GGG chr11 5324523 5324542 5324539 +
attatccgcaactattttga

SEQ ID NO: 20029 - DNA, 20 bp, Artificial Sequence
  Synthetic oligonucleotide; CAG chr11 5324548 5324567 5324564 +
cttataaatatttgcaacaa

SEQ ID NO: 20030 - DNA, 20 bp, Artificial Sequence
  Synthetic oligonucleotide; TGG chr11 5324586 5324605 5324602 +
ataacataaatatacataaa

SEQ ID NO: 20031 - DNA, 20 bp, Artificial Sequence
  Synthetic oligonucleotide; TGG chr11 5324598 5324617 5324614 +
tacataaatggataataatc

SEQ ID NO: 20032 - DNA, 20 bp, Artificial Sequence
  Synthetic oligonucleotide; TAG chr11 5324603 5324622 5324619 +
aaatggataataatctggct

SEQ ID NO: 20033 - DNA, 20 bp, Artificial Sequence
  Synthetic oligonucleotide; TGG chr11 5324635 5324654 5324651 +
tgctgtgattactgaccatt

SEQ ID NO: 20034 - DNA, 20 bp, Artificial Sequence
  Synthetic oligonucleotide; AAG chr11 5324676 5324695 5324692 +
tacatttcacgattatgatg

SEQ ID NO: 20035 - DNA, 20 bp, Artificial Sequence
  Synthetic oligonucleotide; CAG chr11 5324680 5324699 5324696 +
tttcacgattatgatgaaga

SEQ ID NO: 20036 - DNA, 20 bp, Artificial Sequence
  Synthetic oligonucleotide; CAG chr11 5324689 5324708 5324705 +
tatgatgaagacagtttttt

SEQ ID NO: 20037 - DNA, 20 bp, Artificial Sequence
  Synthetic oligonucleotide; CAG chr11 5324698 5324717 5324714 +
gacagttttttcagttaatg

SEQ ID NO: 20038 - DNA, 20 bp, Artificial Sequence
  Synthetic oligonucleotide; TGG chr11 5324717 5324736 5324733 +
gcagtttttctcattttttt

SEQ ID NO: 20039 - DNA, 20 bp, Artificial Sequence
  Synthetic oligonucleotide; CAG chr11 5324731 5324750 5324747 +
tttttttggaaattgaatgt

SEQ ID NO: 20040 - DNA, 20 bp, Artificial Sequence
  Synthetic oligonucleotide; TAG chr11 5324748 5324767 5324764 +
tgtcagtgttttatgcacta

SEQ ID NO: 20041 - DNA, 20 bp, Artificial Sequence
  Synthetic oligonucleotide; CGG chr11 5324777 5324796 5324793 +
tcaccatcactaccaatgaa

SEQ ID NO: 20042 - DNA, 20 bp, Artificial Sequence
  Synthetic oligonucleotide; CAG chr11 5324794 5324813 5324810 +
gaacggctttgtcactctaa

SEQ ID NO: 20043 - DNA, 20 bp, Artificial Sequence
  Synthetic oligonucleotide; GAG chr11 5324803 5324822 5324819 +
tgtcactctaacagttactt

SEQ ID NO: 20044 - DNA, 20 bp, Artificial Sequence
  Synthetic oligonucleotide; TGG chr11 5324808 5324827 5324824 +
ctctaacagttacttgagct

SEQ ID NO: 20045 - DNA, 20 bp, Artificial Sequence
  Synthetic oligonucleotide; CAG chr11 5324815 5324834 5324831 +
agttacttgagcttggccac

SEQ ID NO: 20046 - DNA, 20 bp, Artificial Sequence
  Synthetic oligonucleotide; GAG chr11 5324817 5324836 5324833 +
ttacttgagcttggccacca

SEQ ID NO: 20047 - DNA, 20 bp, Artificial Sequence
  Synthetic oligonucleotide; TGG chr11 5324823 5324842 5324839 +
gagcttggccaccagagttg

SEQ ID NO: 20048 - DNA, 20 bp, Artificial Sequence
  Synthetic oligonucleotide; CAG chr11 5324830 5324849 5324846 +
gccaccagagttgtggatca

SEQ ID NO: 20049 - DNA, 20 bp, Artificial Sequence
  Synthetic oligonucleotide; TAG chr11 5324835 5324854 5324851 +
cagagttgtggatcacagac

SEQ ID NO: 20050 - DNA, 20 bp, Artificial Sequence
  Synthetic oligonucleotide; CAG chr11 5324841 5324860 5324857 +
tgtggatcacagactagacg

SEQ ID NO: 20051 - DNA, 20 bp, Artificial Sequence
  Synthetic oligonucleotide; AAG chr11 5324849 5324868 5324865 +
acagactagacgcagctaac

SEQ ID NO: 20052 - DNA, 20 bp, Artificial Sequence
  Synthetic oligonucleotide; CAG chr11 5324852 5324871 5324868 +
gactagacgcagctaacaag

SEQ ID NO: 20053 - DNA, 20 bp, Artificial Sequence
  Synthetic oligonucleotide; CGG chr11 5324855 5324874 5324871 +
tagacgcagctaacaagcag

SEQ ID NO: 20054 - DNA, 20 bp, Artificial Sequence
  Synthetic oligonucleotide; GGG chr11 5324856 5324875 5324872 +
agacgcagctaacaagcagc

SEQ ID NO: 20055 - DNA, 20 bp, Artificial Sequence
  Synthetic oligonucleotide; TAG chr11 5324864 5324883 5324880 +
ctaacaagcagcgggcttgt

SEQ ID NO: 20056 - DNA, 20 bp, Artificial Sequence
  Synthetic oligonucleotide; AGG chr11 5324865 5324884 5324881 +
taacaagcagcgggcttgtt

SEQ ID NO: 20057 - DNA, 20 bp, Artificial Sequence
  Synthetic oligonucleotide; CAG chr11 5324872 5324891 5324888 +
cagcgggcttgttaggcatg

SEQ ID NO: 20058 - DNA, 20 bp, Artificial Sequence
  Synthetic oligonucleotide; CAG chr11 5324878 5324897 5324894 +
gcttgttaggcatgcagcct

SEQ ID NO: 20059 - DNA, 20 bp, Artificial Sequence
  Synthetic oligonucleotide; CAG chr11 5324922 5324941 5324938 +
tgaatcaaattcgctttttt

SEQ ID NO: 20060 - DNA, 20 bp, Artificial Sequence
  Synthetic oligonucleotide; AGG chr11 5324923 5324942 5324939 +
gaatcaaattcgcttttttc

SEQ ID NO: 20061 - DNA, 20 bp, Artificial Sequence
  Synthetic oligonucleotide; CAG chr11 5324930 5324949 5324946 +
attcgcttttttcaggtcct

SEQ ID NO: 20062 - DNA, 20 bp, Artificial Sequence
  Synthetic oligonucleotide; AGG chr11 5324931 5324950 5324947 +
ttcgcttttttcaggtcctc

SEQ ID NO: 20063 - DNA, 20 bp, Artificial Sequence
  Synthetic oligonucleotide; CAG chr11 5324940 5324959 5324956 +
ttcaggtcctcaggtgattc

SEQ ID NO: 20064 - DNA, 20 bp, Artificial Sequence
  Synthetic oligonucleotide; TGG chr11 5324957 5324976 5324973 +
ttccagtgcaaaacaatgtc

SEQ ID NO: 20065 - DNA, 20 bp, Artificial Sequence
  Synthetic oligonucleotide; GGG chr11 5324958 5324977 5324974 +
tccagtgcaaaacaatgtct

SEQ ID NO: 20066 - DNA, 20 bp, Artificial Sequence
  Synthetic oligonucleotide; AAG chr11 5324973 5324992 5324989 +
tgtctgggcatcactgctat

SEQ ID NO: 20067 - DNA, 20 bp, Artificial Sequence
  Synthetic oligonucleotide; GAG chr11 5325000 5325019 5325016 +
tcatacctaatccatctttc

SEQ ID NO: 20068 - DNA, 20 bp, Artificial Sequence
  Synthetic oligonucleotide; TAG chr11 5325004 5325023 5325020 +
acctaatccatctttcgaga

SEQ ID NO: 20069 - DNA, 20 bp, Artificial Sequence
  Synthetic oligonucleotide; CAG chr11 5325028 5325047 5325044 +
aaccttttaatgcttccatc

SEQ ID NO: 20070 - DNA, 20 bp, Artificial Sequence
  Synthetic oligonucleotide; TGG chr11 5325098 5325117 5325114 +
atgtttctttcaccatttac

SEQ ID NO: 20071 - DNA, 20 bp, Artificial Sequence
  Synthetic oligonucleotide; TAG chr11 5325153 5325172 5325169 +
atttcccataattaaatact

SEQ ID NO: 20072 - DNA, 20 bp, Artificial Sequence
  Synthetic oligonucleotide; TGG chr11 5325157 5325176 5325173 +
cccataattaaatacttagc

SEQ ID NO: 20073 - DNA, 20 bp, Artificial Sequence
  Synthetic oligonucleotide; GAG chr11 5325210 5325229 5325226 +
tccatcaactccaaactcct

SEQ ID NO: 20074 - DNA, 20 bp, Artificial Sequence
  Synthetic oligonucleotide; AGG chr11 5325211 5325230 5325227 +
ccatcaactccaaactcctg

SEQ ID NO: 20075 - DNA, 20 bp, Artificial Sequence
  Synthetic oligonucleotide; CAG chr11 5325222 5325241 5325238 +
aaactcctgaggaactgttg

SEQ ID NO: 20076 - DNA, 20 bp, Artificial Sequence
  Synthetic oligonucleotide; CAG chr11 5325233 5325252 5325249 +
gaactgttgcagttctgtaa

SEQ ID NO: 20077 - DNA, 20 bp, Artificial Sequence
  Synthetic oligonucleotide; AGG chr11 5325234 5325253 5325250 +
aactgttgcagttctgtaac

SEQ ID NO: 20078 - DNA, 20 bp, Artificial Sequence
  Synthetic oligonucleotide; CAG chr11 5325256 5325275 5325272 +
gtaaaattataatgtttcca

SEQ ID NO: 20079 - DNA, 20 bp, Artificial Sequence
  Synthetic oligonucleotide; AAG chr11 5325262 5325281 5325278 +
ttataatgtttccacagcct

SEQ ID NO: 20080 - DNA, 20 bp, Artificial Sequence
  Synthetic oligonucleotide; AGG chr11 5325263 5325282 5325279 +
tataatgtttccacagccta

SEQ ID NO: 20081 - DNA, 20 bp, Artificial Sequence
  Synthetic oligonucleotide; CAG chr11 5325270 5325289 5325286 +
tttccacagcctaaggatgc

SEQ ID NO: 20082 - DNA, 20 bp, Artificial Sequence
  Synthetic oligonucleotide; TGG chr11 5325297 5325316 5325313 +
cactactgtttctgttttct

SEQ ID NO: 20083 - DNA, 20 bp, Artificial Sequence
  Synthetic oligonucleotide; AAG chr11 5325312 5325331 5325328 +
tttcttggttgccacgatcc

SEQ ID NO: 20084 - DNA, 20 bp, Artificial Sequence
  Synthetic oligonucleotide; GAG chr11 5325314 5325333 5325330 +
tcttggttgccacgatccaa

SEQ ID NO: 20085 - DNA, 20 bp, Artificial Sequence
  Synthetic oligonucleotide; AGG chr11 5325315 5325334 5325331 +
cttggttgccacgatccaag

SEQ ID NO: 20086 - DNA, 20 bp, Artificial Sequence
  Synthetic oligonucleotide; GGG chr11 5325316 5325335 5325332 +
ttggttgccacgatccaaga

SEQ ID NO: 20087 - DNA, 20 bp, Artificial Sequence
  Synthetic oligonucleotide; GGG chr11 5325317 5325336 5325333 +
tggttgccacgatccaagag

SEQ ID NO: 20088 - DNA, 20 bp, Artificial Sequence
  Synthetic oligonucleotide; TGG chr11 5325322 5325341 5325338 +
gccacgatccaagaggggta

SEQ ID NO: 20089 - DNA, 20 bp, Artificial Sequence
  Synthetic oligonucleotide; GGG chr11 5325323 5325342 5325339 +
ccacgatccaagaggggtat

SEQ ID NO: 20090 - DNA, 20 bp, Artificial Sequence
  Synthetic oligonucleotide; GAG chr11 5325325 5325344 5325341 +
acgatccaagaggggtatgg

SEQ ID NO: 20091 - DNA, 20 bp, Artificial Sequence
  Synthetic oligonucleotide; AAG chr11 5325329 5325348 5325345 +
tccaagaggggtatgggaga

SEQ ID NO: 20092 - DNA, 20 bp, Artificial Sequence
  Synthetic oligonucleotide; AAG chr11 5325332 5325351 5325348 +
aagaggggtatgggagaaag

SEQ ID NO: 20093 - DNA, 20 bp, Artificial Sequence
  Synthetic oligonucleotide; AAG chr11 5325335 5325354 5325351 +
aggggtatgggagaaagaag

SEQ ID NO: 20094 - DNA, 20 bp, Artificial Sequence
  Synthetic oligonucleotide; CAG chr11 5325346 5325365 5325362 +
agaaagaagaagcttattac

SEQ ID NO: 20095 - DNA, 20 bp, Artificial Sequence
  Synthetic oligonucleotide; CAG chr11 5325357 5325376 5325373 +
gcttattaccagctctgctg

SEQ ID NO: 20096 - DNA, 20 bp, Artificial Sequence
  Synthetic oligonucleotide; GAG chr11 5325371 5325390 5325387 +
ctgctgcagtcttatttaac

SEQ ID NO: 20097 - DNA, 20 bp, Artificial Sequence
  Synthetic oligonucleotide; CAG chr11 5325379 5325398 5325395 +
gtcttatttaacgagaaatt

SEQ ID NO: 20098 - DNA, 20 bp, Artificial Sequence
  Synthetic oligonucleotide; TGG chr11 5325387 5325406 5325403 +
taacgagaaattcagaatcc

SEQ ID NO: 20099 - DNA, 20 bp, Artificial Sequence
  Synthetic oligonucleotide; GAG chr11 5325389 5325408 5325405 +
acgagaaattcagaatcctg

SEQ ID NO: 20100 - DNA, 20 bp, Artificial Sequence
  Synthetic oligonucleotide; AGG chr11 5325390 5325409 5325406 +
cgagaaattcagaatcctgg

SEQ ID NO: 20101 - DNA, 20 bp, Artificial Sequence
  Synthetic oligonucleotide; AAG chr11 5325394 5325413 5325410 +
aaattcagaatcctggaggc

SEQ ID NO: 20102 - DNA, 20 bp, Artificial Sequence
  Synthetic oligonucleotide; TAG chr11 5325401 5325420 5325417 +
gaatcctggaggcaagtctt

SEQ ID NO: 20103 - DNA, 20 bp, Artificial Sequence
  Synthetic oligonucleotide; TAG chr11 5325408 5325427 5325424 +
ggaggcaagtctttagcacc

SEQ ID NO: 20104 - DNA, 20 bp, Artificial Sequence
  Synthetic oligonucleotide; CAG chr11 5325411 5325430 5325427 +
ggcaagtctttagcacctag

SEQ ID NO: 20105 - DNA, 20 bp, Artificial Sequence
  Synthetic oligonucleotide; TGG chr11 5325428 5325447 5325444 +
tagcagttttcttcataaaa

SEQ ID NO: 20106 - DNA, 20 bp, Artificial Sequence
  Synthetic oligonucleotide; CAG chr11 5325434 5325453 5325450 +
ttttcttcataaaatggcct

SEQ ID NO: 20107 - DNA, 20 bp, Artificial Sequence
  Synthetic oligonucleotide; CAG chr11 5325451 5325470 5325467 +
cctcagtatcaaaaataaat

SEQ ID NO: 20108 - DNA, 20 bp, Artificial Sequence
  Synthetic oligonucleotide; CAG chr11 5325457 5325476 5325473 +
tatcaaaaataaatcagaat

SEQ ID NO: 20109 - DNA, 20 bp, Artificial Sequence
  Synthetic oligonucleotide; AAG chr11 5325460 5325479 5325476 +
caaaaataaatcagaatcag

SEQ ID NO: 20110 - DNA, 20 bp, Artificial Sequence
  Synthetic oligonucleotide; AAG chr11 5325471 5325490 5325487 +
cagaatcagaagaaatcaca

SEQ ID NO: 20111 - DNA, 20 bp, Artificial Sequence
  Synthetic oligonucleotide; AAG chr11 5325489 5325508 5325505 +
caaagcatttcatattgtat

SEQ ID NO: 20112 - DNA, 20 bp, Artificial Sequence
  Synthetic oligonucleotide; AGG chr11 5325490 5325509 5325506 +
aaagcatttcatattgtata

SEQ ID NO: 20113 - DNA, 20 bp, Artificial Sequence
  Synthetic oligonucleotide; CAG chr11 5325518 5325537 5325534 +
ttctgatgctacctctgtat

SEQ ID NO: 20114 - DNA, 20 bp, Artificial Sequence
  Synthetic oligonucleotide; GAG chr11 5325528 5325547 5325544 +
acctctgtatcagctcctgt

SEQ ID NO: 20115 - DNA, 20 bp, Artificial Sequence
  Synthetic oligonucleotide; CAG chr11 5325532 5325551 5325548 +
ctgtatcagctcctgtgagt

SEQ ID NO: 20116 - DNA, 20 bp, Artificial Sequence
  Synthetic oligonucleotide; AGG chr11 5325533 5325552 5325549 +
tgtatcagctcctgtgagtc

SEQ ID NO: 20117 - DNA, 20 bp, Artificial Sequence
  Synthetic oligonucleotide; GAG chr11 5325550 5325569 5325566 +
gtcaggattactaacttact

SEQ ID NO: 20118 - DNA, 20 bp, Artificial Sequence
  Synthetic oligonucleotide; TAG chr11 5325570 5325589 5325586 +
gagattgaaatcaccaacac

SEQ ID NO: 20119 - DNA, 20 bp, Artificial Sequence
  Synthetic oligonucleotide; AGG chr11 5325571 5325590 5325587 +
agattgaaatcaccaacact

SEQ ID NO: 20120 - DNA, 20 bp, Artificial Sequence
  Synthetic oligonucleotide; GGG chr11 5325572 5325591 5325588 +
gattgaaatcaccaacacta

SEQ ID NO: 20121 - DNA, 20 bp, Artificial Sequence
  Synthetic oligonucleotide; TAG chr11 5325607 5325626 5325623 +
taaatcacattgaattcata

SEQ ID NO: 20122 - DNA, 20 bp, Artificial Sequence
  Synthetic oligonucleotide; AAG chr11 5325610 5325629 5325626 +
atcacattgaattcatatag

SEQ ID NO: 20123 - DNA, 20 bp, Artificial Sequence
  Synthetic oligonucleotide; AAG chr11 5325654 5325673 5325670 +
aaatgttgttctaccttcga

SEQ ID NO: 20124 - DNA, 20 bp, Artificial Sequence
  Synthetic oligonucleotide; CAG chr11 5325677 5325696 5325693 +
atccttcatgcttaaaaaca

SEQ ID NO: 20125 - DNA, 20 bp, Artificial Sequence
  Synthetic oligonucleotide; GAG chr11 5325683 5325702 5325699 +
catgcttaaaaacacagatt

SEQ ID NO: 20126 - DNA, 20 bp, Artificial Sequence
  Synthetic oligonucleotide; AGG chr11 5325684 5325703 5325700 +
atgcttaaaaacacagattg

SEQ ID NO: 20127 - DNA, 20 bp, Artificial Sequence
  Synthetic oligonucleotide; AAG chr11 5325690 5325709 5325706 +
aaaaacacagattgaggaat

SEQ ID NO: 20128 - DNA, 20 bp, Artificial Sequence
  Synthetic oligonucleotide; GAG chr11 5325692 5325711 5325708 +
aaacacagattgaggaataa

SEQ ID NO: 20129 - DNA, 20 bp, Artificial Sequence
  Synthetic oligonucleotide; AGG chr11 5325693 5325712 5325709 +
aacacagattgaggaataag

SEQ ID NO: 20130 - DNA, 20 bp, Artificial Sequence
  Synthetic oligonucleotide; CGG chr11 5325701 5325720 5325717 +
ttgaggaataagaggatgta

SEQ ID NO: 20131 - DNA, 20 bp, Artificial Sequence
  Synthetic oligonucleotide; GAG chr11 5325707 5325726 5325723 +
aataagaggatgtacggaat

SEQ ID NO: 20132 - DNA, 20 bp, Artificial Sequence
  Synthetic oligonucleotide; AGG chr11 5325708 5325727 5325724 +
ataagaggatgtacggaatg

SEQ ID NO: 20133 - DNA, 20 bp, Artificial Sequence
  Synthetic oligonucleotide; TAG chr11 5325713 5325732 5325729 +
aggatgtacggaatgaggta

SEQ ID NO: 20134 - DNA, 20 bp, Artificial Sequence
  Synthetic oligonucleotide; AGG chr11 5325714 5325733 5325730 +
ggatgtacggaatgaggtat

SEQ ID NO: 20135 - DNA, 20 bp, Artificial Sequence
  Synthetic oligonucleotide; GAG chr11 5325716 5325735 5325732 +
atgtacggaatgaggtatag

SEQ ID NO: 20136 - DNA, 20 bp, Artificial Sequence
  Synthetic oligonucleotide; AGG chr11 5325717 5325736 5325733 +
tgtacggaatgaggtatagg

SEQ ID NO: 20137 - DNA, 20 bp, Artificial Sequence
  Synthetic oligonucleotide; AAG chr11 5325720 5325739 5325736 +
acggaatgaggtataggagg

SEQ ID NO: 20138 - DNA, 20 bp, Artificial Sequence
  Synthetic oligonucleotide; GAG chr11 5325722 5325741 5325738 +
ggaatgaggtataggaggaa

SEQ ID NO: 20139 - DNA, 20 bp, Artificial Sequence
  Synthetic oligonucleotide; TGG chr11 5325727 5325746 5325743 +
gaggtataggaggaagagaa

SEQ ID NO: 20140 - DNA, 20 bp, Artificial Sequence
  Synthetic oligonucleotide; CAG chr11 5325730 5325749 5325746 +
gtataggaggaagagaatgg

SEQ ID NO: 20141 - DNA, 20 bp, Artificial Sequence
  Synthetic oligonucleotide; TAG chr11 5325735 5325754 5325751 +
ggaggaagagaatggcagat

SEQ ID NO: 20142 - DNA, 20 bp, Artificial Sequence
  Synthetic oligonucleotide; GAG chr11 5325737 5325756 5325753 +
aggaagagaatggcagatta

SEQ ID NO: 20143 - DNA, 20 bp, Artificial Sequence
  Synthetic oligonucleotide; AAG chr11 5325741 5325760 5325757 +
agagaatggcagattagaga

SEQ ID NO: 20144 - DNA, 20 bp, Artificial Sequence
  Synthetic oligonucleotide; AGG chr11 5325742 5325761 5325758 +
gagaatggcagattagagaa

SEQ ID NO: 20145 - DNA, 20 bp, Artificial Sequence
  Synthetic oligonucleotide; TGG chr11 5325751 5325770 5325767 +
agattagagaaaggacaaat

SEQ ID NO: 20146 - DNA, 20 bp, Artificial Sequence
  Synthetic oligonucleotide; AAG chr11 5325768 5325787 5325784 +
aattggtgacacatattctg

SEQ ID NO: 20147 - DNA, 20 bp, Artificial Sequence
  Synthetic oligonucleotide; AGG chr11 5325769 5325788 5325785 +
attggtgacacatattctga

SEQ ID NO: 20148 - DNA, 20 bp, Artificial Sequence
  Synthetic oligonucleotide; GGG chr11 5325770 5325789 5325786 +
ttggtgacacatattctgaa

SEQ ID NO: 20149 - DNA, 20 bp, Artificial Sequence
  Synthetic oligonucleotide; TAG chr11 5325779 5325798 5325795 +
catattctgaagggtaaaca

SEQ ID NO: 20150 - DNA, 20 bp, Artificial Sequence
  Synthetic oligonucleotide; AAG chr11 5325782 5325801 5325798 +
attctgaagggtaaacatag

SEQ ID NO: 20151 - DNA, 20 bp, Artificial Sequence
  Synthetic oligonucleotide; AAG chr11 5325786 5325805 5325802 +
tgaagggtaaacatagaaga

SEQ ID NO: 20152 - DNA, 20 bp, Artificial Sequence
  Synthetic oligonucleotide; AAG chr11 5325813 5325832 5325829 +
attaaaattttttttaatta

SEQ ID NO: 20153 - DNA, 20 bp, Artificial Sequence
  Synthetic oligonucleotide; AAG chr11 5325850 5325869 5325866 +
aaaaataaaaaatttttaaa

SEQ ID NO: 20154 - DNA, 20 bp, Artificial Sequence
  Synthetic oligonucleotide; AAG chr11 5325854 5325873 5325870 +
ataaaaaatttttaaaaaga

SEQ ID NO: 20155 - DNA, 20 bp, Artificial Sequence
  Synthetic oligonucleotide; TGG chr11 5325867 5325886 5325883 +
aaaaagaaagccataaaatc

SEQ ID NO: 20156 - DNA, 20 bp, Artificial Sequence
  Synthetic oligonucleotide; GGG chr11 5325868 5325887 5325884 +
aaaagaaagccataaaatct

SEQ ID NO: 20157 - DNA, 20 bp, Artificial Sequence
  Synthetic oligonucleotide; AAG chr11 5325893 5325912 5325909 +
tcctttaaaaaaaattgtgt

SEQ ID NO: 20158 - DNA, 20 bp, Artificial Sequence
  Synthetic oligonucleotide; AGG chr11 5325894 5325913 5325910 +
cctttaaaaaaaattgtgta

SEQ ID NO: 20159 - DNA, 20 bp, Artificial Sequence
  Synthetic oligonucleotide; TAG chr11 5325904 5325923 5325920 +
aaattgtgtaaggatcaaac

SEQ ID NO: 20160 - DNA, 20 bp, Artificial Sequence
  Synthetic oligonucleotide; CAG chr11 5325912 5325931 5325928 +
taaggatcaaactagatttc

SEQ ID NO: 20161 - DNA, 20 bp, Artificial Sequence
  Synthetic oligonucleotide; GAG chr11 5325914 5325933 5325930 +
aggatcaaactagatttcca

SEQ ID NO: 20162 - DNA, 20 bp, Artificial Sequence
  Synthetic oligonucleotide; AAG chr11 5325920 5325939 5325936 +
aaactagatttccagagcac

SEQ ID NO: 20163 - DNA, 20 bp, Artificial Sequence
  Synthetic oligonucleotide; GAG chr11 5325942 5325961 5325958 +
gtactttttaaaatgtttgt

SEQ ID NO: 20164 - DNA, 20 bp, Artificial Sequence
  Synthetic oligonucleotide; TAG chr11 5325972 5325991 5325988 +
ttaaaaaacaataacgtctt

SEQ ID NO: 20165 - DNA, 20 bp, Artificial Sequence
  Synthetic oligonucleotide; GAG chr11 5325974 5325993 5325990 +
aaaaaacaataacgtcttta

SEQ ID NO: 20166 - DNA, 20 bp, Artificial Sequence
  Synthetic oligonucleotide; TGG chr11 5325981 5326000 5325997 +
aataacgtctttagagaaat

SEQ ID NO: 20167 - DNA, 20 bp, Artificial Sequence
  Synthetic oligonucleotide; AAG chr11 5326007 5326026 5326023 +
taaaacacttgaaaccaaaa

SEQ ID NO: 20168 - DNA, 20 bp, Artificial Sequence
  Synthetic oligonucleotide; AAG chr11 5326011 5326030 5326027 +
acacttgaaaccaaaaaaga

SEQ ID NO: 20169 - DNA, 20 bp, Artificial Sequence
  Synthetic oligonucleotide; GAG chr11 5326031 5326050 5326047 +
aagttttttattatatttat

SEQ ID NO: 20170 - DNA, 20 bp, Artificial Sequence
  Synthetic oligonucleotide; CAG chr11 5326034 5326053 5326050 +
ttttttattatatttatgag

SEQ ID NO: 20171 - DNA, 20 bp, Artificial Sequence
  Synthetic oligonucleotide; CAG chr11 5326050 5326069 5326066 +
tgagcagaaaaaaatgttta

SEQ ID NO: 20172 - DNA, 20 bp, Artificial Sequence
  Synthetic oligonucleotide; AAG chr11 5326073 5326092 5326089 +
tcatatctccctccatctct

SEQ ID NO: 20173 - DNA, 20 bp, Artificial Sequence
  Synthetic oligonucleotide; TGG chr11 5326078 5326097 5326094 +
tctccctccatctctaagct

SEQ ID NO: 20174 - DNA, 20 bp, Artificial Sequence
  Synthetic oligonucleotide; GGG chr11 5326079 5326098 5326095 +
ctccctccatctctaagctt

SEQ ID NO: 20175 - DNA, 20 bp, Artificial Sequence
  Synthetic oligonucleotide; AAG chr11 5326089 5326108 5326105 +
ctctaagcttgggtcattaa

SEQ ID NO: 20176 - DNA, 20 bp, Artificial Sequence
  Synthetic oligonucleotide; AAG chr11 5326093 5326112 5326109 +
aagcttgggtcattaaaagt

SEQ ID NO: 20177 - DNA, 20 bp, Artificial Sequence
  Synthetic oligonucleotide; CAG chr11 5326097 5326116 5326113 +
ttgggtcattaaaagtaaga

SEQ ID NO: 20178 - DNA, 20 bp, Artificial Sequence
  Synthetic oligonucleotide; AGG chr11 5326098 5326117 5326114 +
tgggtcattaaaagtaagac

SEQ ID NO: 20179 - DNA, 20 bp, Artificial Sequence
  Synthetic oligonucleotide; GGG chr11 5326099 5326118 5326115 +
gggtcattaaaagtaagaca

SEQ ID NO: 20180 - DNA, 20 bp, Artificial Sequence
  Synthetic oligonucleotide; AAG chr11 5326102 5326121 5326118 +
tcattaaaagtaagacaggg

SEQ ID NO: 20181 - DNA, 20 bp, Artificial Sequence
  Synthetic oligonucleotide; AGG chr11 5326103 5326122 5326119 +
cattaaaagtaagacaggga

SEQ ID NO: 20182 - DNA, 20 bp, Artificial Sequence
  Synthetic oligonucleotide; TGG chr11 5326109 5326128 5326125 +
aagtaagacagggaaggtta

SEQ ID NO: 20183 - DNA, 20 bp, Artificial Sequence
  Synthetic oligonucleotide; AAG chr11 5326119 5326138 5326135 +
gggaaggttatggtacctca

SEQ ID NO: 20184 - DNA, 20 bp, Artificial Sequence
  Synthetic oligonucleotide; AAG chr11 5326129 5326148 5326145 +
tggtacctcaaagaaaatga

SEQ ID NO: 20185 - DNA, 20 bp, Artificial Sequence
  Synthetic oligonucleotide; AGG chr11 5326130 5326149 5326146 +
ggtacctcaaagaaaatgaa

SEQ ID NO: 20186 - DNA, 20 bp, Artificial Sequence
  Synthetic oligonucleotide; GAG chr11 5326145 5326164 5326161 +
atgaaaggtaaatcatgtct

SEQ ID NO: 20187 - DNA, 20 bp, Artificial Sequence
  Synthetic oligonucleotide; TGG chr11 5326152 5326171 5326168 +
gtaaatcatgtctgagattt

SEQ ID NO: 20188 - DNA, 20 bp, Artificial Sequence
  Synthetic oligonucleotide; GGG chr11 5326153 5326172 5326169 +
taaatcatgtctgagatttt

SEQ ID NO: 20189 - DNA, 20 bp, Artificial Sequence
  Synthetic oligonucleotide; AAG chr11 5326162 5326181 5326178 +
tctgagattttgggaataaa

SEQ ID NO: 20190 - DNA, 20 bp, Artificial Sequence
  Synthetic oligonucleotide; AAG chr11 5326173 5326192 5326189 +
gggaataaaaagaaacacaa

SEQ ID NO: 20191 - DNA, 20 bp, Artificial Sequence
  Synthetic oligonucleotide; AAG chr11 5326176 5326195 5326192 +
aataaaaagaaacacaaaag

SEQ ID NO: 20192 - DNA, 20 bp, Artificial Sequence
  Synthetic oligonucleotide; TGG chr11 5326191 5326210 5326207 +
aaaagaagcctgcccaacac

SEQ ID NO: 20193 - DNA, 20 bp, Artificial Sequence
  Synthetic oligonucleotide; GGG chr11 5326192 5326211 5326208 +
aaagaagcctgcccaacact

SEQ ID NO: 20194 - DNA, 20 bp, Artificial Sequence
  Synthetic oligonucleotide; AAG chr11 5326195 5326214 5326211 +
gaagcctgcccaacactggg

SEQ ID NO: 20195 - DNA, 20 bp, Artificial Sequence
  Synthetic oligonucleotide; CAG chr11 5326213 5326232 5326229 +
ggaagccgttgatatttacc

SEQ ID NO: 20196 - DNA, 20 bp, Artificial Sequence
  Synthetic oligonucleotide; GAG chr11 5326215 5326234 5326231 +
aagccgttgatatttaccca

SEQ ID NO: 20197 - DNA, 20 bp, Artificial Sequence
  Synthetic oligonucleotide; AGG chr11 5326216 5326235 5326232 +
agccgttgatatttacccag

SEQ ID NO: 20198 - DNA, 20 bp, Artificial Sequence
  Synthetic oligonucleotide; CAG chr11 5326219 5326238 5326235 +
cgttgatatttacccagagg

SEQ ID NO: 20199 - DNA, 20 bp, Artificial Sequence
  Synthetic oligonucleotide; AGG chr11 5326220 5326239 5326236 +
gttgatatttacccagaggc

SEQ ID NO: 20200 - DNA, 20 bp, Artificial Sequence
  Synthetic oligonucleotide; TGG chr11 5326227 5326246 5326243 +
tttacccagaggcaggcgtg

SEQ ID NO: 20201 - DNA, 20 bp, Artificial Sequence
  Synthetic oligonucleotide; GGG chr11 5326228 5326247 5326244 +
ttacccagaggcaggcgtgt

SEQ ID NO: 20202 - DNA, 20 bp, Artificial Sequence
  Synthetic oligonucleotide; GGG chr11 5326229 5326248 5326245 +
tacccagaggcaggcgtgtg

SEQ ID NO: 20203 - DNA, 20 bp, Artificial Sequence
  Synthetic oligonucleotide; TAG chr11 5326236 5326255 5326252 +
aggcaggcgtgtggggattc

SEQ ID NO: 20204 - DNA, 20 bp, Artificial Sequence
  Synthetic oligonucleotide; AGG chr11 5326237 5326256 5326253 +
ggcaggcgtgtggggattct

SEQ ID NO: 20205 - DNA, 20 bp, Artificial Sequence
  Synthetic oligonucleotide; GAG chr11 5326239 5326258 5326255 +
caggcgtgtggggattctag

SEQ ID NO: 20206 - DNA, 20 bp, Artificial Sequence
  Synthetic oligonucleotide; GAG chr11 5326241 5326260 5326257 +
ggcgtgtggggattctagga

SEQ ID NO: 20207 - DNA, 20 bp, Artificial Sequence
  Synthetic oligonucleotide; TAG chr11 5326245 5326264 5326261 +
tgtggggattctaggagagc

SEQ ID NO: 20208 - DNA, 20 bp, Artificial Sequence
  Synthetic oligonucleotide; GAG chr11 5326264 5326283 5326280 +
ctagatactgtcatcaaact

SEQ ID NO: 20209 - DNA, 20 bp, Artificial Sequence
  Synthetic oligonucleotide; AGG chr11 5326265 5326284 5326281 +
tagatactgtcatcaaactg

SEQ ID NO: 20210 - DNA, 20 bp, Artificial Sequence
  Synthetic oligonucleotide; AAG chr11 5326276 5326295 5326292 +
atcaaactgaggcccactat

SEQ ID NO: 20211 - DNA, 20 bp, Artificial Sequence
  Synthetic oligonucleotide; CAG chr11 5326279 5326298 5326295 +
aaactgaggcccactataag

SEQ ID NO: 20212 - DNA, 20 bp, Artificial Sequence
  Synthetic oligonucleotide; CAG chr11 5326288 5326307 5326304 +
cccactataagcagtgtcac

SEQ ID NO: 20213 - DNA, 20 bp, Artificial Sequence
  Synthetic oligonucleotide; GAG chr11 5326290 5326309 5326306 +
cactataagcagtgtcacca

SEQ ID NO: 20214 - DNA, 20 bp, Artificial Sequence
  Synthetic oligonucleotide; AAG chr11 5326296 5326315 5326312 +
aagcagtgtcaccagagatg

SEQ ID NO: 20215 - DNA, 20 bp, Artificial Sequence
  Synthetic oligonucleotide; AAG chr11 5326320 5326339 5326336 +
catactgtatgcatgctccc

SEQ ID NO: 20216 - DNA, 20 bp, Artificial Sequence
  Synthetic oligonucleotide; AGG chr11 5326321 5326340 5326337 +
atactgtatgcatgctccca

SEQ ID NO: 20217 - DNA, 20 bp, Artificial Sequence
  Synthetic oligonucleotide; TGG chr11 5326334 5326353 5326350 +
gctcccaaggctgcactatg

SEQ ID NO: 20218 - DNA, 20 bp, Artificial Sequence
  Synthetic oligonucleotide; CAG chr11 5326349 5326368 5326365 +
ctatgtggcaaaattccatt

SEQ ID NO: 20219 - DNA, 20 bp, Artificial Sequence
  Synthetic oligonucleotide; TGG chr11 5326353 5326372 5326369 +
gtggcaaaattccattcaga

SEQ ID NO: 20220 - DNA, 20 bp, Artificial Sequence
  Synthetic oligonucleotide; TAG chr11 5326358 5326377 5326374 +
aaaattccattcagatggct

SEQ ID NO: 20221 - DNA, 20 bp, Artificial Sequence
  Synthetic oligonucleotide; AAG chr11 5326369 5326388 5326385 +
cagatggcttagctattaac

SEQ ID NO: 20222 - DNA, 20 bp, Artificial Sequence
  Synthetic oligonucleotide; AAG chr11 5326376 5326395 5326392 +
cttagctattaacaagtgtt

SEQ ID NO: 20223 - DNA, 20 bp, Artificial Sequence
  Synthetic oligonucleotide; TAG chr11 5326389 5326408 5326405 +
aagtgttaagaaaattatac

SEQ ID NO: 20224 - DNA, 20 bp, Artificial Sequence
  Synthetic oligonucleotide; AAG chr11 5326392 5326411 5326408 +
tgttaagaaaattatactag

SEQ ID NO: 20225 - DNA, 20 bp, Artificial Sequence
  Synthetic oligonucleotide; AAG chr11 5326398 5326417 5326414 +
gaaaattatactagaagcac

SEQ ID NO: 20226 - DNA, 20 bp, Artificial Sequence
  Synthetic oligonucleotide; TAG chr11 5326404 5326423 5326420 +
tatactagaagcacaagaac

SEQ ID NO: 20227 - DNA, 20 bp, Artificial Sequence
  Synthetic oligonucleotide; TGG chr11 5326413 5326432 5326429 +
agcacaagaactagtttttc

SEQ ID NO: 20228 - DNA, 20 bp, Artificial Sequence
  Synthetic oligonucleotide; AAG chr11 5326419 5326438 5326435 +
agaactagtttttctggata

SEQ ID NO: 20229 - DNA, 20 bp, Artificial Sequence
  Synthetic oligonucleotide; AGG chr11 5326420 5326439 5326436 +
gaactagtttttctggataa

SEQ ID NO: 20230 - DNA, 20 bp, Artificial Sequence
  Synthetic oligonucleotide; TGG chr11 5326423 5326442 5326439 +
ctagtttttctggataaagg

SEQ ID NO: 20231 - DNA, 20 bp, Artificial Sequence
  Synthetic oligonucleotide; GAG chr11 5326425 5326444 5326441 +
agtttttctggataaaggtg

SEQ ID NO: 20232 - DNA, 20 bp, Artificial Sequence
  Synthetic oligonucleotide; CAG chr11 5326428 5326447 5326444 +
ttttctggataaaggtggag

SEQ ID NO: 20233 - DNA, 20 bp, Artificial Sequence
  Synthetic oligonucleotide; TGG chr11 5326434 5326453 5326450 +
ggataaaggtggagcagcta

SEQ ID NO: 20234 - DNA, 20 bp, Artificial Sequence
  Synthetic oligonucleotide; TAG chr11 5326449 5326468 5326465 +
agctatggctgtgaaattga

SEQ ID NO: 20235 - DNA, 20 bp, Artificial Sequence
  Synthetic oligonucleotide; AGG chr11 5326450 5326469 5326466 +
gctatggctgtgaaattgat

SEQ ID NO: 20236 - DNA, 20 bp, Artificial Sequence
  Synthetic oligonucleotide; CAG chr11 5326453 5326472 5326469 +
atggctgtgaaattgatagg

SEQ ID NO: 20237 - DNA, 20 bp, Artificial Sequence
  Synthetic oligonucleotide; CAG chr11 5326465 5326484 5326481 +
ttgataggcagctctcaact

SEQ ID NO: 20238 - DNA, 20 bp, Artificial Sequence
  Synthetic oligonucleotide; TAG chr11 5326480 5326499 5326496 +
caactcagaacataaatgtt

SEQ ID NO: 20239 - DNA, 20 bp, Artificial Sequence
  Synthetic oligonucleotide; AAG chr11 5326492 5326511 5326508 +
taaatgtttagtgatttcct

SEQ ID NO: 20240 - DNA, 20 bp, Artificial Sequence
  Synthetic oligonucleotide; AGG chr11 5326493 5326512 5326509 +
aaatgtttagtgatttccta

SEQ ID NO: 20241 - DNA, 20 bp, Artificial Sequence
  Synthetic oligonucleotide; TGG chr11 5326499 5326518 5326515 +
ttagtgatttcctaaggatc

SEQ ID NO: 20242 - DNA, 20 bp, Artificial Sequence
  Synthetic oligonucleotide; GGG chr11 5326500 5326519 5326516 +
tagtgatttcctaaggatct

SEQ ID NO: 20243 - DNA, 20 bp, Artificial Sequence
  Synthetic oligonucleotide; GGG chr11 5326501 5326520 5326517 +
agtgatttcctaaggatctg

SEQ ID NO: 20244 - DNA, 20 bp, Artificial Sequence
  Synthetic oligonucleotide; AAG chr11 5326554 5326573 5326570 +
gaactgatatatcatatatg

SEQ ID NO: 20245 - DNA, 20 bp, Artificial Sequence
  Synthetic oligonucleotide; AAG chr11 5326561 5326580 5326577 +
tatatcatatatgaagatat

SEQ ID NO: 20246 - DNA, 20 bp, Artificial Sequence
  Synthetic oligonucleotide; TAG chr11 5326571 5326590 5326587 +
atgaagatataagcaacctg

SEQ ID NO: 20247 - DNA, 20 bp, Artificial Sequence
  Synthetic oligonucleotide; AGG chr11 5326572 5326591 5326588 +
tgaagatataagcaacctgt

SEQ ID NO: 20248 - DNA, 20 bp, Artificial Sequence
  Synthetic oligonucleotide; GAG chr11 5326574 5326593 5326590 +
aagatataagcaacctgtag

SEQ ID NO: 20249 - DNA, 20 bp, Artificial Sequence
  Synthetic oligonucleotide; TGG chr11 5326597 5326616 5326613 +
ctccattcaccaataccatc

SEQ ID NO: 20250 - DNA, 20 bp, Artificial Sequence
  Synthetic oligonucleotide; GGG chr11 5326598 5326617 5326614 +
tccattcaccaataccatct

SEQ ID NO: 20251 - DNA, 20 bp, Artificial Sequence
  Synthetic oligonucleotide; AAG chr11 5326603 5326622 5326619 +
tcaccaataccatctgggac

SEQ ID NO: 20252 - DNA, 20 bp, Artificial Sequence
  Synthetic oligonucleotide; TGG chr11 5326607 5326626 5326623 +
caataccatctgggacaagt

SEQ ID NO: 20253 - DNA, 20 bp, Artificial Sequence
  Synthetic oligonucleotide; GAG chr11 5326624 5326643 5326640 +
agttggaaaatgactatttt

SEQ ID NO: 20254 - DNA, 20 bp, Artificial Sequence
  Synthetic oligonucleotide; CAG chr11 5326628 5326647 5326644 +
ggaaaatgactattttgagt

SEQ ID NO: 20255 - DNA, 20 bp, Artificial Sequence
  Synthetic oligonucleotide; CAG chr11 5326633 5326652 5326649 +
atgactattttgagtcagca

SEQ ID NO: 20256 - DNA, 20 bp, Artificial Sequence
  Synthetic oligonucleotide; TGG chr11 5326639 5326658 5326655 +
attttgagtcagcacagaat

SEQ ID NO: 20257 - DNA, 20 bp, Artificial Sequence
  Synthetic oligonucleotide; GAG chr11 5326643 5326662 5326659 +
tgagtcagcacagaattggt

SEQ ID NO: 20258 - DNA, 20 bp, Artificial Sequence
  Synthetic oligonucleotide; TAG chr11 5326672 5326691 5326688 +
ccacacaactgcactgtgtt

SEQ ID NO: 20259 - DNA, 20 bp, Artificial Sequence
  Synthetic oligonucleotide; AAG chr11 5326694 5326713 5326710 +
gttctaaataaccatgtaat

SEQ ID NO: 20260 - DNA, 20 bp, Artificial Sequence
  Synthetic oligonucleotide; CAG chr11 5326699 5326718 5326715 +
aaataaccatgtaataagca

SEQ ID NO: 20261 - DNA, 20 bp, Artificial Sequence
  Synthetic oligonucleotide; AAG chr11 5326711 5326730 5326727 +
aataagcacagtctgctctt

SEQ ID NO: 20262 - DNA, 20 bp, Artificial Sequence
  Synthetic oligonucleotide; AAG chr11 5326714 5326733 5326730 +
aagcacagtctgctcttaag

SEQ ID NO: 20263 - DNA, 20 bp, Artificial Sequence
  Synthetic oligonucleotide; TGG chr11 5326726 5326745 5326742 +
ctcttaagaagctctcaata

SEQ ID NO: 20264 - DNA, 20 bp, Artificial Sequence
  Synthetic oligonucleotide; GAG chr11 5326734 5326753 5326750 +
aagctctcaatatggcctat

SEQ ID NO: 20265 - DNA, 20 bp, Artificial Sequence
  Synthetic oligonucleotide; TAG chr11 5326744 5326763 5326760 +
tatggcctatgagtttataa

SEQ ID NO: 20266 - DNA, 20 bp, Artificial Sequence
  Synthetic oligonucleotide; CAG chr11 5326775 5326794 5326791 +
attctcccttcaattttatg

SEQ ID NO: 20267 - DNA, 20 bp, Artificial Sequence
  Synthetic oligonucleotide; CAG chr11 5326801 5326820 5326817 +
attgcccttgaatgtctcaa

SEQ ID NO: 20268 - DNA, 20 bp, Artificial Sequence
  Synthetic oligonucleotide; AGG chr11 5326802 5326821 5326818 +
ttgcccttgaatgtctcaac

SEQ ID NO: 20269 - DNA, 20 bp, Artificial Sequence
  Synthetic oligonucleotide; GAG chr11 5326825 5326844 5326841 +
atccataatgctgaaaactt

SEQ ID NO: 20270 - DNA, 20 bp, Artificial Sequence
  Synthetic oligonucleotide; TAG chr11 5326836 5326855 5326852 +
tgaaaacttgagaaaaatca

SEQ ID NO: 20271 - DNA, 20 bp, Artificial Sequence
  Synthetic oligonucleotide; AAG chr11 5326843 5326862 5326859 +
ttgagaaaaatcatagatct

SEQ ID NO: 20272 - DNA, 20 bp, Artificial Sequence
  Synthetic oligonucleotide; TAG chr11 5326859 5326878 5326875 +
atctaagccctgcttcattc

SEQ ID NO: 20273 - DNA, 20 bp, Artificial Sequence
  Synthetic oligonucleotide; TAG chr11 5326870 5326889 5326886 +
gcttcattctagcttcattc

SEQ ID NO: 20274 - DNA, 20 bp, Artificial Sequence
  Synthetic oligonucleotide; TAG chr11 5326912 5326931 5326928 +
ttcacatgatgatatatttc

SEQ ID NO: 20275 - DNA, 20 bp, Artificial Sequence
  Synthetic oligonucleotide; AAG chr11 5326921 5326940 5326937 +
tgatatatttctagatgaat

SEQ ID NO: 20276 - DNA, 20 bp, Artificial Sequence
  Synthetic oligonucleotide; TAG chr11 5326937 5326956 5326953 +
gaataagattcctatacttg

SEQ ID NO: 20277 - DNA, 20 bp, Artificial Sequence
  Synthetic oligonucleotide; AAG chr11 5326953 5326972 5326969 +
cttgtagcaacactctcacc

SEQ ID NO: 20278 - DNA, 20 bp, Artificial Sequence
  Synthetic oligonucleotide; CAG chr11 5326971 5326990 5326987 +
ccaagatgcataaatacata

SEQ ID NO: 20279 - DNA, 20 bp, Artificial Sequence
  Synthetic oligonucleotide; AGG chr11 5326972 5326991 5326988 +
caagatgcataaatacatac

SEQ ID NO: 20280 - DNA, 20 bp, Artificial Sequence
  Synthetic oligonucleotide; TGG chr11 5326979 5326998 5326995 +
cataaatacatacaggtcca

SEQ ID NO: 20281 - DNA, 20 bp, Artificial Sequence
  Synthetic oligonucleotide; AAG chr11 5326986 5327005 5327002 +
acatacaggtccatggaaaa

SEQ ID NO: 20282 - DNA, 20 bp, Artificial Sequence
  Synthetic oligonucleotide; GAG chr11 5327005 5327024 5327021 +
aaagttgtcatgctcacttt

SEQ ID NO: 20283 - DNA, 20 bp, Artificial Sequence
  Synthetic oligonucleotide; CAG chr11 5327027 5327046 5327043 +
gaacataatttgaatgttac

SEQ ID NO: 20284 - DNA, 20 bp, Artificial Sequence
  Synthetic oligonucleotide; AAG chr11 5327034 5327053 5327050 +
atttgaatgttaccagatac

SEQ ID NO: 20285 - DNA, 20 bp, Artificial Sequence
  Synthetic oligonucleotide; AGG chr11 5327035 5327054 5327051 +
tttgaatgttaccagataca

SEQ ID NO: 20286 - DNA, 20 bp, Artificial Sequence
  Synthetic oligonucleotide; GGG chr11 5327036 5327055 5327052 +
ttgaatgttaccagatacaa

SEQ ID NO: 20287 - DNA, 20 bp, Artificial Sequence
  Synthetic oligonucleotide; GAG chr11 5327038 5327057 5327054 +
gaatgttaccagatacaagg

SEQ ID NO: 20288 - DNA, 20 bp, Artificial Sequence
  Synthetic oligonucleotide; AAG chr11 5327043 5327062 5327059 +
ttaccagatacaagggagta

SEQ ID NO: 20289 - DNA, 20 bp, Artificial Sequence
  Synthetic oligonucleotide; AGG chr11 5327044 5327063 5327060 +
taccagatacaagggagtaa

SEQ ID NO: 20290 - DNA, 20 bp, Artificial Sequence
  Synthetic oligonucleotide; GAG chr11 5327046 5327065 5327062 +
ccagatacaagggagtaaag

SEQ ID NO: 20291 - DNA, 20 bp, Artificial Sequence
  Synthetic oligonucleotide; CAG chr11 5327050 5327069 5327066 +
atacaagggagtaaaggaga

SEQ ID NO: 20292 - DNA, 20 bp, Artificial Sequence
  Synthetic oligonucleotide; GAG chr11 5327052 5327071 5327068 +
acaagggagtaaaggagaca

SEQ ID NO: 20293 - DNA, 20 bp, Artificial Sequence
  Synthetic oligonucleotide; AGG chr11 5327053 5327072 5327069 +
caagggagtaaaggagacag

SEQ ID NO: 20294 - DNA, 20 bp, Artificial Sequence
  Synthetic oligonucleotide; GGG chr11 5327054 5327073 5327070 +
aagggagtaaaggagacaga

SEQ ID NO: 20295 - DNA, 20 bp, Artificial Sequence
  Synthetic oligonucleotide; TAG chr11 5327064 5327083 5327080 +
aggagacagagggaactttg

SEQ ID NO: 20296 - DNA, 20 bp, Artificial Sequence
  Synthetic oligonucleotide; AAG chr11 5327071 5327090 5327087 +
agagggaactttgtagtatg

SEQ ID NO: 20297 - DNA, 20 bp, Artificial Sequence
  Synthetic oligonucleotide; AAG chr11 5327074 5327093 5327090 +
gggaactttgtagtatgaag

SEQ ID NO: 20298 - DNA, 20 bp, Artificial Sequence
  Synthetic oligonucleotide; AGG chr11 5327075 5327094 5327091 +
ggaactttgtagtatgaaga

SEQ ID NO: 20299 - DNA, 20 bp, Artificial Sequence
  Synthetic oligonucleotide; CAG chr11 5327080 5327099 5327096 +
tttgtagtatgaagaaggaa

SEQ ID NO: 20300 - DNA, 20 bp, Artificial Sequence
  Synthetic oligonucleotide; CAG chr11 5327084 5327103 5327100 +
tagtatgaagaaggaacaga

SEQ ID NO: 20301 - DNA, 20 bp, Artificial Sequence
  Synthetic oligonucleotide; AGG chr11 5327085 5327104 5327101 +
agtatgaagaaggaacagac

SEQ ID NO: 20302 - DNA, 20 bp, Artificial Sequence
  Synthetic oligonucleotide; AAG chr11 5327089 5327108 5327105 +
tgaagaaggaacagacagga

SEQ ID NO: 20303 - DNA, 20 bp, Artificial Sequence
  Synthetic oligonucleotide; TAG chr11 5327098 5327117 5327114 +
aacagacaggaaagatctgt

SEQ ID NO: 20304 - DNA, 20 bp, Artificial Sequence
  Synthetic oligonucleotide; AAG chr11 5327105 5327124 5327121 +
aggaaagatctgttagcctc

SEQ ID NO: 20305 - DNA, 20 bp, Artificial Sequence
  Synthetic oligonucleotide; TAG chr11 5327114 5327133 5327130 +
ctgttagcctcaagaaaatg

SEQ ID NO: 20306 - DNA, 20 bp, Artificial Sequence
  Synthetic oligonucleotide; TAG chr11 5327121 5327140 5327137 +
cctcaagaaaatgtagtaaa

SEQ ID NO: 20307 - DNA, 20 bp, Artificial Sequence
  Synthetic oligonucleotide; CAG chr11 5327137 5327156 5327153 +
taaatagtgaatctattata

SEQ ID NO: 20308 - DNA, 20 bp, Artificial Sequence
  Synthetic oligonucleotide; AAG chr11 5327151 5327170 5327167 +
attatacagtctacataaac

SEQ ID NO: 20309 - DNA, 20 bp, Artificial Sequence
  Synthetic oligonucleotide; AAG chr11 5327157 5327176 5327173 +
cagtctacataaacaagtga

SEQ ID NO: 20310 - DNA, 20 bp, Artificial Sequence
  Synthetic oligonucleotide; GAG chr11 5327159 5327178 5327175 +
gtctacataaacaagtgaaa

SEQ ID NO: 20311 - DNA, 20 bp, Artificial Sequence
  Synthetic oligonucleotide; AGG chr11 5327160 5327179 5327176 +
tctacataaacaagtgaaag

SEQ ID NO: 20312 - DNA, 20 bp, Artificial Sequence
  Synthetic oligonucleotide; GAG chr11 5327220 5327239 5327236 +
tcctactctgccctccttct

SEQ ID NO: 20313 - DNA, 20 bp, Artificial Sequence
  Synthetic oligonucleotide; TGG chr11 5327224 5327243 5327240 +
actctgccctccttctgagt

SEQ ID NO: 20314 - DNA, 20 bp, Artificial Sequence
  Synthetic oligonucleotide; TGG chr11 5327228 5327247 5327244 +
tgccctccttctgagttgga

SEQ ID NO: 20315 - DNA, 20 bp, Artificial Sequence
  Synthetic oligonucleotide; AAG chr11 5327231 5327250 5327247 +
cctccttctgagttggatgg

SEQ ID NO: 20316 - DNA, 20 bp, Artificial Sequence
  Synthetic oligonucleotide; AAG chr11 5327254 5327273 5327270 +
atgtgtccccgcaccttcct

SEQ ID NO: 20317 - DNA, 20 bp, Artificial Sequence
  Synthetic oligonucleotide; AGG chr11 5327255 5327274 5327271 +
tgtgtccccgcaccttccta

SEQ ID NO: 20318 - DNA, 20 bp, Artificial Sequence
  Synthetic oligonucleotide; GAG chr11 5327257 5327276 5327273 +
tgtccccgcaccttcctaag

SEQ ID NO: 20319 - DNA, 20 bp, Artificial Sequence
  Synthetic oligonucleotide; TGG chr11 5327261 5327280 5327277 +
cccgcaccttcctaaggaga

SEQ ID NO: 20320 - DNA, 20 bp, Artificial Sequence
  Synthetic oligonucleotide; GGG chr11 5327262 5327281 5327278 +
ccgcaccttcctaaggagat

SEQ ID NO: 20321 - DNA, 20 bp, Artificial Sequence
  Synthetic oligonucleotide; TAG chr11 5327274 5327293 5327290 +
aaggagatgggccctgtctc

SEQ ID NO: 20322 - DNA, 20 bp, Artificial Sequence
  Synthetic oligonucleotide; TAG chr11 5327285 5327304 5327301 +
ccctgtctctagaatttttc

SEQ ID NO: 20323 - DNA, 20 bp, Artificial Sequence
  Synthetic oligonucleotide; GAG chr11 5327289 5327308 5327305 +
gtctctagaatttttctagt

SEQ ID NO: 20324 - DNA, 20 bp, Artificial Sequence
  Synthetic oligonucleotide; TAG chr11 5327318 5327337 5327334 +
tgactactcatgccatctct

SEQ ID NO: 20325 - DNA, 20 bp, Artificial Sequence
  Synthetic oligonucleotide; GAG chr11 5327320 5327339 5327336 +
actactcatgccatctctta

SEQ ID NO: 20326 - DNA, 20 bp, Artificial Sequence
  Synthetic oligonucleotide; CAG chr11 5327323 5327342 5327339 +
actcatgccatctcttagag

SEQ ID NO: 20327 - DNA, 20 bp, Artificial Sequence
  Synthetic oligonucleotide; CAG chr11 5327343 5327362 5327359 +
cagttcttcaaacaaacaca

SEQ ID NO: 20328 - DNA, 20 bp, Artificial Sequence
  Synthetic oligonucleotide; AAG chr11 5327369 5327388 5327385 +
cacatgcatgtgtgtgtttc

SEQ ID NO: 20329 - DNA, 20 bp, Artificial Sequence
  Synthetic oligonucleotide; AGG chr11 5327370 5327389 5327386 +
acatgcatgtgtgtgtttca

SEQ ID NO: 20330 - DNA, 20 bp, Artificial Sequence
  Synthetic oligonucleotide; GGG chr11 5327371 5327390 5327387 +
catgcatgtgtgtgtttcaa

SEQ ID NO: 20331 - DNA, 20 bp, Artificial Sequence
  Synthetic oligonucleotide; GGG chr11 5327372 5327391 5327388 +
atgcatgtgtgtgtttcaag

SEQ ID NO: 20332 - DNA, 20 bp, Artificial Sequence
  Synthetic oligonucleotide; TGG chr11 5327382 5327401 5327398 +
gtgtttcaaggggtgttgtt

SEQ ID NO: 20333 - DNA, 20 bp, Artificial Sequence
  Synthetic oligonucleotide; TGG chr11 5327416 5327435 5327432 +
taaattgttatatgttaaaa

SEQ ID NO: 20334 - DNA, 20 bp, Artificial Sequence
  Synthetic oligonucleotide; CAG chr11 5327441 5327460 5327457 +
acttttctttctataaattt

SEQ ID NO: 20335 - DNA, 20 bp, Artificial Sequence
  Synthetic oligonucleotide; AGG chr11 5327442 5327461 5327458 +
cttttctttctataaatttc

SEQ ID NO: 20336 - DNA, 20 bp, Artificial Sequence
  Synthetic oligonucleotide; TAG chr11 5327449 5327468 5327465 +
ttctataaatttcaggatct

SEQ ID NO: 20337 - DNA, 20 bp, Artificial Sequence
  Synthetic oligonucleotide; CAG chr11 5327452 5327471 5327468 +
tataaatttcaggatcttag

SEQ ID NO: 20338 - DNA, 20 bp, Artificial Sequence
  Synthetic oligonucleotide; GAG chr11 5327454 5327473 5327470 +
taaatttcaggatcttagca

SEQ ID NO: 20339 - DNA, 20 bp, Artificial Sequence
  Synthetic oligonucleotide; CAG chr11 5327459 5327478 5327475 +
ttcaggatcttagcagagtg

SEQ ID NO: 20340 - DNA, 20 bp, Artificial Sequence
  Synthetic oligonucleotide; AAG chr11 5327462 5327481 5327478 +
aggatcttagcagagtgcag

SEQ ID NO: 20341 - DNA, 20 bp, Artificial Sequence
  Synthetic oligonucleotide; CAG chr11 5327467 5327486 5327483 +
cttagcagagtgcagaagct

SEQ ID NO: 20342 - DNA, 20 bp, Artificial Sequence
  Synthetic oligonucleotide; TAG chr11 5327476 5327495 5327492 +
gtgcagaagctcagcctgtt

SEQ ID NO: 20343 - DNA, 20 bp, Artificial Sequence
  Synthetic oligonucleotide; AGG chr11 5327477 5327496 5327493 +
tgcagaagctcagcctgttt

SEQ ID NO: 20344 - DNA, 20 bp, Artificial Sequence
  Synthetic oligonucleotide; CAG chr11 5327482 5327501 5327498 +
aagctcagcctgtttaggtt

SEQ ID NO: 20345 - DNA, 20 bp, Artificial Sequence
  Synthetic oligonucleotide; AAG chr11 5327523 5327542 5327539 +
attgtctttaatcttcaaaa

SEQ ID NO: 20346 - DNA, 20 bp, Artificial Sequence
  Synthetic oligonucleotide; GAG chr11 5327527 5327546 5327543 +
tctttaatcttcaaaaaagt

SEQ ID NO: 20347 - DNA, 20 bp, Artificial Sequence
  Synthetic oligonucleotide; TGG chr11 5327539 5327558 5327555 +
aaaaaagtgagtcctccatt

SEQ ID NO: 20348 - DNA, 20 bp, Artificial Sequence
  Synthetic oligonucleotide; CAG chr11 5327545 5327564 5327561 +
gtgagtcctccatttggccc

SEQ ID NO: 20349 - DNA, 20 bp, Artificial Sequence
  Synthetic oligonucleotide; GAG chr11 5327552 5327571 5327568 +
ctccatttggccccagtcct

SEQ ID NO: 20350 - DNA, 20 bp, Artificial Sequence
  Synthetic oligonucleotide; AGG chr11 5327553 5327572 5327569 +
tccatttggccccagtcctg

SEQ ID NO: 20351 - DNA, 20 bp, Artificial Sequence
  Synthetic oligonucleotide; GGG chr11 5327554 5327573 5327570 +
ccatttggccccagtcctga

SEQ ID NO: 20352 - DNA, 20 bp, Artificial Sequence
  Synthetic oligonucleotide; CAG chr11 5327562 5327581 5327578 +
ccccagtcctgagggcctga

SEQ ID NO: 20353 - DNA, 20 bp, Artificial Sequence
  Synthetic oligonucleotide; TGG chr11 5327566 5327585 5327582 +
agtcctgagggcctgacagt

SEQ ID NO: 20354 - DNA, 20 bp, Artificial Sequence
  Synthetic oligonucleotide; GGG chr11 5327567 5327586 5327583 +
gtcctgagggcctgacagtt

SEQ ID NO: 20355 - DNA, 20 bp, Artificial Sequence
  Synthetic oligonucleotide; CAG chr11 5327583 5327602 5327599 +
agttgggactacccaactct

SEQ ID NO: 20356 - DNA, 20 bp, Artificial Sequence
  Synthetic oligonucleotide; AAG chr11 5327601 5327620 5327617 +
ctcagatttctattgtccac

SEQ ID NO: 20357 - DNA, 20 bp, Artificial Sequence
  Synthetic oligonucleotide; CAG chr11 5327630 5327649 5327646 +
tcctcctgccttctccaacc

SEQ ID NO: 20358 - DNA, 20 bp, Artificial Sequence
  Synthetic oligonucleotide; TAG chr11 5327691 5327710 5327707 +
ttcaatccaatttgctttct

SEQ ID NO: 20359 - DNA, 20 bp, Artificial Sequence
  Synthetic oligonucleotide; TGG chr11 5327703 5327722 5327719 +
tgctttcttagatcttaatt

SEQ ID NO: 20360 - DNA, 20 bp, Artificial Sequence
  Synthetic oligonucleotide; AAG chr11 5327718 5327737 5327734 +
taatttggctgcccttttct

SEQ ID NO: 20361 - DNA, 20 bp, Artificial Sequence
  Synthetic oligonucleotide; CAG chr11 5327736 5327755 5327752 +
ctaagcctttcaactcgatt

SEQ ID NO: 20362 - DNA, 20 bp, Artificial Sequence
  Synthetic oligonucleotide; CAG chr11 5327757 5327776 5327773 +
agaattttttgtctactctt

SEQ ID NO: 20363 - DNA, 20 bp, Artificial Sequence
  Synthetic oligonucleotide; GAG chr11 5327759 5327778 5327775 +
aattttttgtctactcttca

SEQ ID NO: 20364 - DNA, 20 bp, Artificial Sequence
  Synthetic oligonucleotide; CAG chr11 5327790 5327809 5327806 +
tcaacaaaaaatcctctgaa

SEQ ID NO: 20365 - DNA, 20 bp, Artificial Sequence
  Synthetic oligonucleotide; AGG chr11 5327791 5327810 5327807 +
caacaaaaaatcctctgaac

SEQ ID NO: 20366 - DNA, 20 bp, Artificial Sequence
  Synthetic oligonucleotide; AAG chr11 5327795 5327814 5327811 +
aaaaaatcctctgaacagga

SEQ ID NO: 20367 - DNA, 20 bp, Artificial Sequence
  Synthetic oligonucleotide; AAG chr11 5327824 5327843 5327840 +
ataaaaaataaacgtaaaat

SEQ ID NO: 20368 - DNA, 20 bp, Artificial Sequence
  Synthetic oligonucleotide; TGG chr11 5327834 5327853 5327850 +
aacgtaaaataagccctttc

SEQ ID NO: 20369 - DNA, 20 bp, Artificial Sequence
  Synthetic oligonucleotide; GAG chr11 5327850 5327869 5327866 +
tttctggataaacaaaaact

SEQ ID NO: 20370 - DNA, 20 bp, Artificial Sequence
  Synthetic oligonucleotide; AAG chr11 5327865 5327884 5327881 +
aaactgagttgatttcaact

SEQ ID NO: 20371 - DNA, 20 bp, Artificial Sequence
  Synthetic oligonucleotide; AAG chr11 5327885 5327904 5327901 +
aagttgaaaccaaatgacca

SEQ ID NO: 20372 - DNA, 20 bp, Artificial Sequence
  Synthetic oligonucleotide; AAG chr11 5327918 5327937 5327934 +
gaatctacataaaatgacaa

SEQ ID NO: 20373 - DNA, 20 bp, Artificial Sequence
  Synthetic oligonucleotide; CAG chr11 5327924 5327943 5327940 +
acataaaatgacaaaagcac

SEQ ID NO: 20374 - DNA, 20 bp, Artificial Sequence
  Synthetic oligonucleotide; AAG chr11 5327929 5327948 5327945 +
aaatgacaaaagcaccagta

SEQ ID NO: 20375 - DNA, 20 bp, Artificial Sequence
  Synthetic oligonucleotide; TAG chr11 5327933 5327952 5327949 +
gacaaaagcaccagtaaaga

SEQ ID NO: 20376 - DNA, 20 bp, Artificial Sequence
  Synthetic oligonucleotide; TAG chr11 5327947 5327966 5327963 +
taaagatagtcatgtcatta

SEQ ID NO: 20377 - DNA, 20 bp, Artificial Sequence
  Synthetic oligonucleotide; AAG chr11 5327950 5327969 5327966 +
agatagtcatgtcattatag

SEQ ID NO: 20378 - DNA, 20 bp, Artificial Sequence
  Synthetic oligonucleotide; TAG chr11 5328017 5328036 5328033 +
gaatgtattacaataaaaaa

SEQ ID NO: 20379 - DNA, 20 bp, Artificial Sequence
  Synthetic oligonucleotide; TGG chr11 5328031 5328050 5328047 +
aaaaaatagaattgcattgc

SEQ ID NO: 20380 - DNA, 20 bp, Artificial Sequence
  Synthetic oligonucleotide; AAG chr11 5328079 5328098 5328095 +
tatttaccaataactgaaca

SEQ ID NO: 20381 - DNA, 20 bp, Artificial Sequence
  Synthetic oligonucleotide; AGG chr11 5328080 5328099 5328096 +
atttaccaataactgaacaa

SEQ ID NO: 20382 - DNA, 20 bp, Artificial Sequence
  Synthetic oligonucleotide; GAG chr11 5328082 5328101 5328098 +
ttaccaataactgaacaaag

SEQ ID NO: 20383 - DNA, 20 bp, Artificial Sequence
  Synthetic oligonucleotide; AGG chr11 5328083 5328102 5328099 +
taccaataactgaacaaagg

SEQ ID NO: 20384 - DNA, 20 bp, Artificial Sequence
  Synthetic oligonucleotide; GAG chr11 5328087 5328106 5328103 +
aataactgaacaaaggaggt

SEQ ID NO: 20385 - DNA, 20 bp, Artificial Sequence
  Synthetic oligonucleotide; AAG chr11 5328098 5328117 5328114 +
aaaggaggtgagtgataaca

SEQ ID NO: 20386 - DNA, 20 bp, Artificial Sequence
  Synthetic oligonucleotide; TGG chr11 5328107 5328126 5328123 +
gagtgataacaaagctgttt

SEQ ID NO: 20387 - DNA, 20 bp, Artificial Sequence
  Synthetic oligonucleotide; AAG chr11 5328114 5328133 5328130 +
aacaaagctgttttggaatg

SEQ ID NO: 20388 - DNA, 20 bp, Artificial Sequence
  Synthetic oligonucleotide; AAG chr11 5328135 5328154 5328151 +
agaaatattctctgaaaaaa

SEQ ID NO: 20389 - DNA, 20 bp, Artificial Sequence
  Synthetic oligonucleotide; TAG chr11 5328153 5328172 5328169 +
aaaagctataaacatctaca

SEQ ID NO: 20390 - DNA, 20 bp, Artificial Sequence
  Synthetic oligonucleotide; GAG chr11 5328162 5328181 5328178 +
aaacatctacatagaaaaat

SEQ ID NO: 20391 - DNA, 20 bp, Artificial Sequence
  Synthetic oligonucleotide; AAG chr11 5328166 5328185 5328182 +
atctacatagaaaaatgagt

SEQ ID NO: 20392 - DNA, 20 bp, Artificial Sequence
  Synthetic oligonucleotide; CAG chr11 5328187 5328206 5328203 +
agaatgcacaatgacacatg

SEQ ID NO: 20393 - DNA, 20 bp, Artificial Sequence
  Synthetic oligonucleotide; GAG chr11 5328194 5328213 5328210 +
acaatgacacatgcagttct

SEQ ID NO: 20394 - DNA, 20 bp, Artificial Sequence
  Synthetic oligonucleotide; AAG chr11 5328224 5328243 5328240 +
aattatacttatgccaatcc

SEQ ID NO: 20395 - DNA, 20 bp, Artificial Sequence
  Synthetic oligonucleotide; AGG chr11 5328225 5328244 5328241 +
attatacttatgccaatcca

SEQ ID NO: 20396 - DNA, 20 bp, Artificial Sequence
  Synthetic oligonucleotide; GGG chr11 5328226 5328245 5328242 +
ttatacttatgccaatccaa

SEQ ID NO: 20397 - DNA, 20 bp, Artificial Sequence
  Synthetic oligonucleotide; CAG chr11 5328232 5328251 5328248 +
ttatgccaatccaagggtcc

SEQ ID NO: 20398 - DNA, 20 bp, Artificial Sequence
  Synthetic oligonucleotide; TAG chr11 5328237 5328256 5328253 +
ccaatccaagggtcccagat

SEQ ID NO: 20399 - DNA, 20 bp, Artificial Sequence
  Synthetic oligonucleotide; CAG chr11 5328257 5328276 5328273 +
tagaaaacctaaatctatca

SEQ ID NO: 20400 - DNA, 20 bp, Artificial Sequence
  Synthetic oligonucleotide; AAG chr11 5328282 5328301 5328298 +
ccttaaatactctttcaaaa

SEQ ID NO: 20401 - DNA, 20 bp, Artificial Sequence
  Synthetic oligonucleotide; TAG chr11 5328305 5328324 5328321 +
aaaaaaaaaaatctgtgctg

SEQ ID NO: 20402 - DNA, 20 bp, Artificial Sequence
  Synthetic oligonucleotide; AGG chr11 5328306 5328325 5328322 +
aaaaaaaaaatctgtgctgt

SEQ ID NO: 20403 - DNA, 20 bp, Artificial Sequence
  Synthetic oligonucleotide; CAG chr11 5328320 5328339 5328336 +
tgctgtaggatatcccacct

SEQ ID NO: 20404 - DNA, 20 bp, Artificial Sequence
  Synthetic oligonucleotide; TAG chr11 5328339 5328358 5328355 +
tcagctgtgatctttacctc

SEQ ID NO: 20405 - DNA, 20 bp, Artificial Sequence
  Synthetic oligonucleotide; AGG chr11 5328340 5328359 5328356 +
cagctgtgatctttacctct

SEQ ID NO: 20406 - DNA, 20 bp, Artificial Sequence
  Synthetic oligonucleotide; CAG chr11 5328343 5328362 5328359 +
ctgtgatctttacctctagg

SEQ ID NO: 20407 - DNA, 20 bp, Artificial Sequence
  Synthetic oligonucleotide; TGG chr11 5328351 5328370 5328367 +
tttacctctaggcagacctc

SEQ ID NO: 20408 - DNA, 20 bp, Artificial Sequence
  Synthetic oligonucleotide; GAG chr11 5328378 5328397 5328394 +
ccttcttatatgctttcctt

SEQ ID NO: 20409 - DNA, 20 bp, Artificial Sequence
  Synthetic oligonucleotide; CAG chr11 5328393 5328412 5328409 +
tccttgagtgcatctcacat

SEQ ID NO: 20410 - DNA, 20 bp, Artificial Sequence
  Synthetic oligonucleotide; AAG chr11 5328396 5328415 5328412 +
ttgagtgcatctcacatcag

SEQ ID NO: 20411 - DNA, 20 bp, Artificial Sequence
  Synthetic oligonucleotide; GAG chr11 5328398 5328417 5328414 +
gagtgcatctcacatcagaa

SEQ ID NO: 20412 - DNA, 20 bp, Artificial Sequence
  Synthetic oligonucleotide; GAG chr11 5328400 5328419 5328416 +
gtgcatctcacatcagaaga

SEQ ID NO: 20413 - DNA, 20 bp, Artificial Sequence
  Synthetic oligonucleotide; GAG chr11 5328402 5328421 5328418 +
gcatctcacatcagaagaga

SEQ ID NO: 20414 - DNA, 20 bp, Artificial Sequence
  Synthetic oligonucleotide; AGG chr11 5328403 5328422 5328419 +
catctcacatcagaagagag

SEQ ID NO: 20415 - DNA, 20 bp, Artificial Sequence
  Synthetic oligonucleotide; AAG chr11 5328421 5328440 5328437 +
agaggaatcattccatattc

SEQ ID NO: 20416 - DNA, 20 bp, Artificial Sequence
  Synthetic oligonucleotide; TGG chr11 5328428 5328447 5328444 +
tcattccatattcaagttcc

SEQ ID NO: 20417 - DNA, 20 bp, Artificial Sequence
  Synthetic oligonucleotide; CAG chr11 5328445 5328464 5328461 +
tcctggcactcacccactca

SEQ ID NO: 20418 - DNA, 20 bp, Artificial Sequence
  Synthetic oligonucleotide; TGG chr11 5328453 5328472 5328469 +
ctcacccactcacagtattg

SEQ ID NO: 20419 - DNA, 20 bp, Artificial Sequence
  Synthetic oligonucleotide; TAG chr11 5328462 5328481 5328478 +
tcacagtattgtggctaaaa

SEQ ID NO: 20420 - DNA, 20 bp, Artificial Sequence
  Synthetic oligonucleotide; AGG chr11 5328463 5328482 5328479 +
cacagtattgtggctaaaat

SEQ ID NO: 20421 - DNA, 20 bp, Artificial Sequence
  Synthetic oligonucleotide; GAG chr11 5328486 5328505 5328502 +
aacctattcctgtcctcttt

SEQ ID NO: 20422 - DNA, 20 bp, Artificial Sequence
  Synthetic oligonucleotide; AGG chr11 5328487 5328506 5328503 +
acctattcctgtcctctttg

SEQ ID NO: 20423 - DNA, 20 bp, Artificial Sequence
  Synthetic oligonucleotide; CAG chr11 5328493 5328512 5328509 +
tcctgtcctctttgaggact

SEQ ID NO: 20424 - DNA, 20 bp, Artificial Sequence
  Synthetic oligonucleotide; CAG chr11 5328498 5328517 5328514 +
tcctctttgaggactcagtt

SEQ ID NO: 20425 - DNA, 20 bp, Artificial Sequence
  Synthetic oligonucleotide; CAG chr11 5328513 5328532 5328529 +
cagttcagatcattcactca

SEQ ID NO: 20426 - DNA, 20 bp, Artificial Sequence
  Synthetic oligonucleotide; GAG chr11 5328525 5328544 5328541 +
ttcactcacagacctctcat

SEQ ID NO: 20427 - DNA, 20 bp, Artificial Sequence
  Synthetic oligonucleotide; AGG chr11 5328526 5328545 5328542 +
tcactcacagacctctcatg

SEQ ID NO: 20428 - DNA, 20 bp, Artificial Sequence
  Synthetic oligonucleotide; AAG chr11 5328539 5328558 5328555 +
tctcatgaggcctcatttta

SEQ ID NO: 20429 - DNA, 20 bp, Artificial Sequence
  Synthetic oligonucleotide; TGG chr11 5328552 5328571 5328568 +
cattttaaagcttatgcatg

SEQ ID NO: 20430 - DNA, 20 bp, Artificial Sequence
  Synthetic oligonucleotide; GAG chr11 5328569 5328588 5328585 +
atgtggaaatcacctcccct

SEQ ID NO: 20431 - DNA, 20 bp, Artificial Sequence
  Synthetic oligonucleotide; TAG chr11 5328583 5328602 5328599 +
tcccctgagtttcatctttc

SEQ ID NO: 20432 - DNA, 20 bp, Artificial Sequence
  Synthetic oligonucleotide; CAG chr11 5328591 5328610 5328607 +
gtttcatctttctagcatct

SEQ ID NO: 20433 - DNA, 20 bp, Artificial Sequence
  Synthetic oligonucleotide; AGG chr11 5328592 5328611 5328608 +
tttcatctttctagcatctc

SEQ ID NO: 20434 - DNA, 20 bp, Artificial Sequence
  Synthetic oligonucleotide; GAG chr11 5328594 5328613 5328610 +
tcatctttctagcatctcag

SEQ ID NO: 20435 - DNA, 20 bp, Artificial Sequence
  Synthetic oligonucleotide; CGG chr11 5328630 5328649 5328646 +
ccttccctctcttctctgtt

SEQ ID NO: 20436 - DNA, 20 bp, Artificial Sequence
  Synthetic oligonucleotide; GGG chr11 5328631 5328650 5328647 +
cttccctctcttctctgttc

SEQ ID NO: 20437 - DNA, 20 bp, Artificial Sequence
  Synthetic oligonucleotide; GAG chr11 5328633 5328652 5328649 +
tccctctcttctctgttcgg

SEQ ID NO: 20438 - DNA, 20 bp, Artificial Sequence
  Synthetic oligonucleotide; AGG chr11 5328634 5328653 5328650 +
ccctctcttctctgttcggg

SEQ ID NO: 20439 - DNA, 20 bp, Artificial Sequence
  Synthetic oligonucleotide; CAG chr11 5328639 5328658 5328655 +
tcttctctgttcgggaggaa

SEQ ID NO: 20440 - DNA, 20 bp, Artificial Sequence
  Synthetic oligonucleotide; AGG chr11 5328640 5328659 5328656 +
cttctctgttcgggaggaac

SEQ ID NO: 20441 - DNA, 20 bp, Artificial Sequence
  Synthetic oligonucleotide; GGG chr11 5328641 5328660 5328657 +
ttctctgttcgggaggaaca

SEQ ID NO: 20442 - DNA, 20 bp, Artificial Sequence
  Synthetic oligonucleotide; CGG chr11 5328662 5328681 5328678 +
ggccccacaactgatgtcct

SEQ ID NO: 20443 - DNA, 20 bp, Artificial Sequence
  Synthetic oligonucleotide; GGG chr11 5328663 5328682 5328679 +
gccccacaactgatgtcctc

SEQ ID NO: 20444 - DNA, 20 bp, Artificial Sequence
  Synthetic oligonucleotide; CAG chr11 5328671 5328690 5328687 +
actgatgtcctcgggatttt

SEQ ID NO: 20445 - DNA, 20 bp, Artificial Sequence
  Synthetic oligonucleotide; AGG chr11 5328672 5328691 5328688 +
ctgatgtcctcgggattttc

SEQ ID NO: 20446 - DNA, 20 bp, Artificial Sequence
  Synthetic oligonucleotide; AAG chr11 5328684 5328703 5328700 +
ggattttcaggtgtttcctg

SEQ ID NO: 20447 - DNA, 20 bp, Artificial Sequence
  Synthetic oligonucleotide; TGG chr11 5328689 5328708 5328705 +
ttcaggtgtttcctgaagaa

SEQ ID NO: 20448 - DNA, 20 bp, Artificial Sequence
  Synthetic oligonucleotide; GGG chr11 5328690 5328709 5328706 +
tcaggtgtttcctgaagaat

SEQ ID NO: 20449 - DNA, 20 bp, Artificial Sequence
  Synthetic oligonucleotide; GGG chr11 5328691 5328710 5328707 +
caggtgtttcctgaagaatg

SEQ ID NO: 20450 - DNA, 20 bp, Artificial Sequence
  Synthetic oligonucleotide; GAG chr11 5328695 5328714 5328711 +
tgtttcctgaagaatggggt

SEQ ID NO: 20451 - DNA, 20 bp, Artificial Sequence
  Synthetic oligonucleotide; AGG chr11 5328696 5328715 5328712 +
gtttcctgaagaatggggtg

SEQ ID NO: 20452 - DNA, 20 bp, Artificial Sequence
  Synthetic oligonucleotide; CAG chr11 5328719 5328738 5328735 +
aaaatttgaaattcaaaaac

SEQ ID NO: 20453 - DNA, 20 bp, Artificial Sequence
  Synthetic oligonucleotide; AAG chr11 5328729 5328748 5328745 +
attcaaaaaccagctgatgt

SEQ ID NO: 20454 - DNA, 20 bp, Artificial Sequence
  Synthetic oligonucleotide; TAG chr11 5328733 5328752 5328749 +
aaaaaccagctgatgtaaga

SEQ ID NO: 20455 - DNA, 20 bp, Artificial Sequence
  Synthetic oligonucleotide; AGG chr11 5328734 5328753 5328750 +
aaaaccagctgatgtaagat

SEQ ID NO: 20456 - DNA, 20 bp, Artificial Sequence
  Synthetic oligonucleotide; GGG chr11 5328735 5328754 5328751 +
aaaccagctgatgtaagata

SEQ ID NO: 20457 - DNA, 20 bp, Artificial Sequence
  Synthetic oligonucleotide; CAG chr11 5328742 5328761 5328758 +
ctgatgtaagatagggatac

SEQ ID NO: 20458 - DNA, 20 bp, Artificial Sequence
  Synthetic oligonucleotide; AGG chr11 5328743 5328762 5328759 +
tgatgtaagatagggatacc

SEQ ID NO: 20459 - DNA, 20 bp, Artificial Sequence
  Synthetic oligonucleotide; GGG chr11 5328744 5328763 5328760 +
gatgtaagatagggatacca

SEQ ID NO: 20460 - DNA, 20 bp, Artificial Sequence
  Synthetic oligonucleotide; TGG chr11 5328749 5328768 5328765 +
aagatagggataccagggct

SEQ ID NO: 20461 - DNA, 20 bp, Artificial Sequence
  Synthetic oligonucleotide; AAG chr11 5328763 5328782 5328779 +
agggcttggttatgtgaccc

SEQ ID NO: 20462 - DNA, 20 bp, Artificial Sequence
  Synthetic oligonucleotide; AGG chr11 5328764 5328783 5328780 +
gggcttggttatgtgaccca

SEQ ID NO: 20463 - DNA, 20 bp, Artificial Sequence
  Synthetic oligonucleotide; GAG chr11 5328766 5328785 5328782 +
gcttggttatgtgacccaag

SEQ ID NO: 20464 - DNA, 20 bp, Artificial Sequence
  Synthetic oligonucleotide; AGG chr11 5328767 5328786 5328783 +
cttggttatgtgacccaagg

SEQ ID NO: 20465 - DNA, 20 bp, Artificial Sequence
  Synthetic oligonucleotide; CAG chr11 5328772 5328791 5328788 +
ttatgtgacccaaggaggct

SEQ ID NO: 20466 - DNA, 20 bp, Artificial Sequence
  Synthetic oligonucleotide; TAG chr11 5328785 5328804 5328801 +
ggaggctcagcatcataact

SEQ ID NO: 20467 - DNA, 20 bp, Artificial Sequence
  Synthetic oligonucleotide; AAG chr11 5328797 5328816 5328813 +
tcataacttagtttatttga

SEQ ID NO: 20468 - DNA, 20 bp, Artificial Sequence
  Synthetic oligonucleotide; AGG chr11 5328798 5328817 5328814 +
cataacttagtttatttgaa

SEQ ID NO: 20469 - DNA, 20 bp, Artificial Sequence
  Synthetic oligonucleotide; GGG chr11 5328799 5328818 5328815 +
ataacttagtttatttgaaa

SEQ ID NO: 20470 - DNA, 20 bp, Artificial Sequence
  Synthetic oligonucleotide; TAG chr11 5328803 5328822 5328819 +
cttagtttatttgaaagggt

SEQ ID NO: 20471 - DNA, 20 bp, Artificial Sequence
  Synthetic oligonucleotide; AGG chr11 5328804 5328823 5328820 +
ttagtttatttgaaagggtt

SEQ ID NO: 20472 - DNA, 20 bp, Artificial Sequence
  Synthetic oligonucleotide; GGG chr11 5328805 5328824 5328821 +
tagtttatttgaaagggtta

SEQ ID NO: 20473 - DNA, 20 bp, Artificial Sequence
  Synthetic oligonucleotide; GGG chr11 5328806 5328825 5328822 +
agtttatttgaaagggttag

SEQ ID NO: 20474 - DNA, 20 bp, Artificial Sequence
  Synthetic oligonucleotide; CGG chr11 5328813 5328832 5328829 +
ttgaaagggttaggggatat

SEQ ID NO: 20475 - DNA, 20 bp, Artificial Sequence
  Synthetic oligonucleotide; CAG chr11 5328823 5328842 5328839 +
taggggatatcggttgtctt

SEQ ID NO: 20476 - DNA, 20 bp, Artificial Sequence
  Synthetic oligonucleotide; AGG chr11 5328824 5328843 5328840 +
aggggatatcggttgtcttc

SEQ ID NO: 20477 - DNA, 20 bp, Artificial Sequence
  Synthetic oligonucleotide; GGG chr11 5328825 5328844 5328841 +
ggggatatcggttgtcttca

SEQ ID NO: 20478 - DNA, 20 bp, Artificial Sequence
  Synthetic oligonucleotide; CGG chr11 5328844 5328863 5328860 +
agggatcatatgtacctcta

SEQ ID NO: 20479 - DNA, 20 bp, Artificial Sequence
  Synthetic oligonucleotide; GGG chr11 5328845 5328864 5328861 +
gggatcatatgtacctctac

SEQ ID NO: 20480 - DNA, 20 bp, Artificial Sequence
  Synthetic oligonucleotide; TAG chr11 5328851 5328870 5328867 +
atatgtacctctacgggtcc

SEQ ID NO: 20481 - DNA, 20 bp, Artificial Sequence
  Synthetic oligonucleotide; GAG chr11 5328853 5328872 5328869 +
atgtacctctacgggtccta

SEQ ID NO: 20482 - DNA, 20 bp, Artificial Sequence
  Synthetic oligonucleotide; TGG chr11 5328896 5328915 5328912 +
ttttgtctttcctgttactt

SEQ ID NO: 20483 - DNA, 20 bp, Artificial Sequence
  Synthetic oligonucleotide; TGG chr11 5328919 5328938 5328935 +
taaaatttgttcttatctac

SEQ ID NO: 20484 - DNA, 20 bp, Artificial Sequence
  Synthetic oligonucleotide; TGG chr11 5328930 5328949 5328946 +
cttatctactggaacttcaa

SEQ ID NO: 20485 - DNA, 20 bp, Artificial Sequence
  Synthetic oligonucleotide; TAG chr11 5328942 5328961 5328958 +
aacttcaatggatctgttaa

SEQ ID NO: 20486 - DNA, 20 bp, Artificial Sequence
  Synthetic oligonucleotide; CAG chr11 5328950 5328969 5328966 +
tggatctgttaatagtcatg

SEQ ID NO: 20487 - DNA, 20 bp, Artificial Sequence
  Synthetic oligonucleotide; CAG chr11 5328965 5328984 5328981 +
tcatgcagattcatgacatt

SEQ ID NO: 20488 - DNA, 20 bp, Artificial Sequence
  Synthetic oligonucleotide; TAG chr11 5328996 5329015 5329012 +
tttttttttttttttttttt

SEQ ID NO: 20489 - DNA, 20 bp, Artificial Sequence
  Synthetic oligonucleotide; TAG chr11 5329000 5329019 5329016 +
tttttttttttttttttaga

SEQ ID NO: 20490 - DNA, 20 bp, Artificial Sequence
  Synthetic oligonucleotide; GAG chr11 5329002 5329021 5329018 +
tttttttttttttttagata

SEQ ID NO: 20491 - DNA, 20 bp, Artificial Sequence
  Synthetic oligonucleotide; CAG chr11 5329019 5329038 5329035 +
atagagtctcactctgtcgc

SEQ ID NO: 20492 - DNA, 20 bp, Artificial Sequence
  Synthetic oligonucleotide; AGG chr11 5329020 5329039 5329036 +
tagagtctcactctgtcgcc

SEQ ID NO: 20493 - DNA, 20 bp, Artificial Sequence
  Synthetic oligonucleotide; TGG chr11 5329024 5329043 5329040 +
gtctcactctgtcgccaggc

SEQ ID NO: 20494 - DNA, 20 bp, Artificial Sequence
  Synthetic oligonucleotide; GAG chr11 5329026 5329045 5329042 +
ctcactctgtcgccaggctg

SEQ ID NO: 20495 - DNA, 20 bp, Artificial Sequence
  Synthetic oligonucleotide; CAG chr11 5329031 5329050 5329047 +
tctgtcgccaggctggagtg

SEQ ID NO: 20496 - DNA, 20 bp, Artificial Sequence
  Synthetic oligonucleotide; TAG chr11 5329034 5329053 5329050 +
gtcgccaggctggagtgcag

SEQ ID NO: 20497 - DNA, 20 bp, Artificial Sequence
  Synthetic oligonucleotide; CAG chr11 5329045 5329064 5329061 +
ggagtgcagtagcacaatct

SEQ ID NO: 20498 - DNA, 20 bp, Artificial Sequence
  Synthetic oligonucleotide; CAG chr11 5329069 5329088 5329085 +
tcactgcaaactccacctcc

SEQ ID NO: 20499 - DNA, 20 bp, Artificial Sequence
  Synthetic oligonucleotide; AGG chr11 5329070 5329089 5329086 +
cactgcaaactccacctccc

SEQ ID NO: 20500 - DNA, 20 bp, Artificial Sequence
  Synthetic oligonucleotide; AAG chr11 5329076 5329095 5329092 +
aaactccacctcccaggttc

SEQ ID NO: 20501 - DNA, 20 bp, Artificial Sequence
  Synthetic oligonucleotide; CAG chr11 5329093 5329112 5329109 +
ttcaagtgattctcctgcca

SEQ ID NO: 20502 - DNA, 20 bp, Artificial Sequence
  Synthetic oligonucleotide; GAG chr11 5329102 5329121 5329118 +
ttctcctgccacagcctcct

SEQ ID NO: 20503 - DNA, 20 bp, Artificial Sequence
  Synthetic oligonucleotide; AAG chr11 5329105 5329124 5329121 +
tcctgccacagcctcctgag

SEQ ID NO: 20504 - DNA, 20 bp, Artificial Sequence
  Synthetic oligonucleotide; TGG chr11 5329109 5329128 5329125 +
gccacagcctcctgagaagc

SEQ ID NO: 20505 - DNA, 20 bp, Artificial Sequence
  Synthetic oligonucleotide; GGG chr11 5329110 5329129 5329126 +
ccacagcctcctgagaagct

SEQ ID NO: 20506 - DNA, 20 bp, Artificial Sequence
  Synthetic oligonucleotide; CAG chr11 5329117 5329136 5329133 +
ctcctgagaagctgggacta

SEQ ID NO: 20507 - DNA, 20 bp, Artificial Sequence
  Synthetic oligonucleotide; TAG chr11 5329120 5329139 5329136 +
ctgagaagctgggactacag

SEQ ID NO: 20508 - DNA, 20 bp, Artificial Sequence
  Synthetic oligonucleotide; CAG chr11 5329137 5329156 5329153 +
cagtagcgcgtcaccacacc

SEQ ID NO: 20509 - DNA, 20 bp, Artificial Sequence
  Synthetic oligonucleotide; TAG chr11 5329156 5329175 5329172 +
ccagctaatttttgtatttt

SEQ ID NO: 20510 - DNA, 20 bp, Artificial Sequence
  Synthetic oligonucleotide; TAG chr11 5329159 5329178 5329175 +
gctaatttttgtatttttag

SEQ ID NO: 20511 - DNA, 20 bp, Artificial Sequence
  Synthetic oligonucleotide; CGG chr11 5329165 5329184 5329181 +
ttttgtatttttagtagaca

SEQ ID NO: 20512 - DNA, 20 bp, Artificial Sequence
  Synthetic oligonucleotide; GGG chr11 5329166 5329185 5329182 +
tttgtatttttagtagacac

SEQ ID NO: 20513 - DNA, 20 bp, Artificial Sequence
  Synthetic oligonucleotide; GGG chr11 5329167 5329186 5329183 +
ttgtatttttagtagacacg

SEQ ID NO: 20514 - DNA, 20 bp, Artificial Sequence
  Synthetic oligonucleotide; TGG chr11 5329181 5329200 5329197 +
gacacggggtttcaccatat

SEQ ID NO: 20515 - DNA, 20 bp, Artificial Sequence
  Synthetic oligonucleotide; CAG chr11 5329185 5329204 5329201 +
cggggtttcaccatattggc

SEQ ID NO: 20516 - DNA, 20 bp, Artificial Sequence
  Synthetic oligonucleotide; AGG chr11 5329186 5329205 5329202 +
ggggtttcaccatattggcc

SEQ ID NO: 20517 - DNA, 20 bp, Artificial Sequence
  Synthetic oligonucleotide; TGG chr11 5329190 5329209 5329206 +
tttcaccatattggccagga

SEQ ID NO: 20518 - DNA, 20 bp, Artificial Sequence
  Synthetic oligonucleotide; TGG chr11 5329226 5329245 5329242 +
acctcgtgatccaccctcct

SEQ ID NO: 20519 - DNA, 20 bp, Artificial Sequence
  Synthetic oligonucleotide; AAG chr11 5329236 5329255 5329252 +
ccaccctccttggcctccca

SEQ ID NO: 20520 - DNA, 20 bp, Artificial Sequence
  Synthetic oligonucleotide; TGG chr11 5329242 5329261 5329258 +
tccttggcctcccaaagtgc

SEQ ID NO: 20521 - DNA, 20 bp, Artificial Sequence
  Synthetic oligonucleotide; GGG chr11 5329243 5329262 5329259 +
ccttggcctcccaaagtgct

SEQ ID NO: 20522 - DNA, 20 bp, Artificial Sequence
  Synthetic oligonucleotide; CAG chr11 5329250 5329269 5329266 +
ctcccaaagtgctgggattg

SEQ ID NO: 20523 - DNA, 20 bp, Artificial Sequence
  Synthetic oligonucleotide; AGG chr11 5329251 5329270 5329267 +
tcccaaagtgctgggattgc

SEQ ID NO: 20524 - DNA, 20 bp, Artificial Sequence
  Synthetic oligonucleotide; GAG chr11 5329257 5329276 5329273 +
agtgctgggattgcaggtgt

SEQ ID NO: 20525 - DNA, 20 bp, Artificial Sequence
  Synthetic oligonucleotide; CGG chr11 5329270 5329289 5329286 +
caggtgtgagtcactgcgcc

SEQ ID NO: 20526 - DNA, 20 bp, Artificial Sequence
  Synthetic oligonucleotide; CAG chr11 5329281 5329300 5329297 +
cactgcgcccggctgacatt

SEQ ID NO: 20527 - DNA, 20 bp, Artificial Sequence
  Synthetic oligonucleotide; TAG chr11 5329311 5329330 5329327 +
tcttaaaattatattacttg

SEQ ID NO: 20528 - DNA, 20 bp, Artificial Sequence
  Synthetic oligonucleotide; CAG chr11 5329341 5329360 5329357 +
ccctttttttttttttttgc

SEQ ID NO: 20529 - DNA, 20 bp, Artificial Sequence
  Synthetic oligonucleotide; GAG chr11 5329353 5329372 5329369 +
ttttttgccagatacacaat

SEQ ID NO: 20530 - DNA, 20 bp, Artificial Sequence
  Synthetic oligonucleotide; AGG chr11 5329354 5329373 5329370 +
tttttgccagatacacaatg

SEQ ID NO: 20531 - DNA, 20 bp, Artificial Sequence
  Synthetic oligonucleotide; GAG chr11 5329356 5329375 5329372 +
tttgccagatacacaatgag

SEQ ID NO: 20532 - DNA, 20 bp, Artificial Sequence
  Synthetic oligonucleotide; TAG chr11 5329361 5329380 5329377 +
cagatacacaatgaggagca

SEQ ID NO: 20533 - DNA, 20 bp, Artificial Sequence
  Synthetic oligonucleotide; CAG chr11 5329374 5329393 5329390 +
aggagcatagtctttattca

SEQ ID NO: 20534 - DNA, 20 bp, Artificial Sequence
  Synthetic oligonucleotide; TAG chr11 5329385 5329404 5329401 +
ctttattcacagaatgtaaa

SEQ ID NO: 20535 - DNA, 20 bp, Artificial Sequence
  Synthetic oligonucleotide; AAG chr11 5329399 5329418 5329415 +
tgtaaatagtgtgtaatata

SEQ ID NO: 20536 - DNA, 20 bp, Artificial Sequence
  Synthetic oligonucleotide; TAG chr11 5329406 5329425 5329422 +
agtgtgtaatataaagaaaa

SEQ ID NO: 20537 - DNA, 20 bp, Artificial Sequence
  Synthetic oligonucleotide; TAG chr11 5329425 5329444 5329441 +
atagttaccacaaattttca

SEQ ID NO: 20538 - DNA, 20 bp, Artificial Sequence
  Synthetic oligonucleotide; TAG chr11 5329444 5329463 5329460 +
atagcactatcattactgca

SEQ ID NO: 20539 - DNA, 20 bp, Artificial Sequence
  Synthetic oligonucleotide; TGG chr11 5329448 5329467 5329464 +
cactatcattactgcataga

SEQ ID NO: 20540 - DNA, 20 bp, Artificial Sequence
  Synthetic oligonucleotide; TAG chr11 5329451 5329470 5329467 +
tatcattactgcatagatgg

SEQ ID NO: 20541 - DNA, 20 bp, Artificial Sequence
  Synthetic oligonucleotide; AAG chr11 5329461 5329480 5329477 +
gcatagatggtagcatgcta

SEQ ID NO: 20542 - DNA, 20 bp, Artificial Sequence
  Synthetic oligonucleotide; AGG chr11 5329462 5329481 5329478 +
catagatggtagcatgctaa

SEQ ID NO: 20543 - DNA, 20 bp, Artificial Sequence
  Synthetic oligonucleotide; GGG chr11 5329463 5329482 5329479 +
atagatggtagcatgctaaa

SEQ ID NO: 20544 - DNA, 20 bp, Artificial Sequence
  Synthetic oligonucleotide; GAG chr11 5329465 5329484 5329481 +
agatggtagcatgctaaagg

SEQ ID NO: 20545 - DNA, 20 bp, Artificial Sequence
  Synthetic oligonucleotide; CAG chr11 5329472 5329491 5329488 +
agcatgctaaagggagccca

SEQ ID NO: 20546 - DNA, 20 bp, Artificial Sequence
  Synthetic oligonucleotide; AAG chr11 5329476 5329495 5329492 +
tgctaaagggagcccacaga

SEQ ID NO: 20547 - DNA, 20 bp, Artificial Sequence
  Synthetic oligonucleotide; TGG chr11 5329485 5329504 5329501 +
gagcccacagaaagcatctt

SEQ ID NO: 20548 - DNA, 20 bp, Artificial Sequence
  Synthetic oligonucleotide; GGG chr11 5329486 5329505 5329502 +
agcccacagaaagcatcttt

SEQ ID NO: 20549 - DNA, 20 bp, Artificial Sequence
  Synthetic oligonucleotide; GGG chr11 5329487 5329506 5329503 +
gcccacagaaagcatctttg

SEQ ID NO: 20550 - DNA, 20 bp, Artificial Sequence
  Synthetic oligonucleotide; CAG chr11 5329490 5329509 5329506 +
cacagaaagcatctttgggg

SEQ ID NO: 20551 - DNA, 20 bp, Artificial Sequence
  Synthetic oligonucleotide; AGG chr11 5329491 5329510 5329507 +
acagaaagcatctttggggc

SEQ ID NO: 20552 - DNA, 20 bp, Artificial Sequence
  Synthetic oligonucleotide; GGG chr11 5329492 5329511 5329508 +
cagaaagcatctttggggca

SEQ ID NO: 20553 - DNA, 20 bp, Artificial Sequence
  Synthetic oligonucleotide; GGG chr11 5329493 5329512 5329509 +
agaaagcatctttggggcag

SEQ ID NO: 20554 - DNA, 20 bp, Artificial Sequence
  Synthetic oligonucleotide; AAG chr11 5329508 5329527 5329524 +
ggcaggggaaaatttctcaa

SEQ ID NO: 20555 - DNA, 20 bp, Artificial Sequence
  Synthetic oligonucleotide; AAG chr11 5329522 5329541 5329538 +
tctcaaaagaaatattattt

SEQ ID NO: 20556 - DNA, 20 bp, Artificial Sequence
  Synthetic oligonucleotide; AAG chr11 5329541 5329560 5329557 +
taagctaataattgaaaaac

SEQ ID NO: 20557 - DNA, 20 bp, Artificial Sequence
  Synthetic oligonucleotide; AGG chr11 5329542 5329561 5329558 +
aagctaataattgaaaaaca

SEQ ID NO: 20558 - DNA, 20 bp, Artificial Sequence
  Synthetic oligonucleotide; AAG chr11 5329545 5329564 5329561 +
ctaataattgaaaaacaagg

SEQ ID NO: 20559 - DNA, 20 bp, Artificial Sequence
  Synthetic oligonucleotide; AGG chr11 5329546 5329565 5329562 +
taataattgaaaaacaagga

SEQ ID NO: 20560 - DNA, 20 bp, Artificial Sequence
  Synthetic oligonucleotide; TAG chr11 5329558 5329577 5329574 +
aacaaggaaggtaacaaata

SEQ ID NO: 20561 - DNA, 20 bp, Artificial Sequence
  Synthetic oligonucleotide; AAG chr11 5329570 5329589 5329586 +
aacaaatatagtgtttgtat

SEQ ID NO: 20562 - DNA, 20 bp, Artificial Sequence
  Synthetic oligonucleotide; TGG chr11 5329573 5329592 5329589 +
aaatatagtgtttgtataag

SEQ ID NO: 20563 - DNA, 20 bp, Artificial Sequence
  Synthetic oligonucleotide; GGG chr11 5329574 5329593 5329590 +
aatatagtgtttgtataagt

SEQ ID NO: 20564 - DNA, 20 bp, Artificial Sequence
  Synthetic oligonucleotide; GGG chr11 5329575 5329594 5329591 +
atatagtgtttgtataagtg

SEQ ID NO: 20565 - DNA, 20 bp, Artificial Sequence
  Synthetic oligonucleotide; CAG chr11 5329580 5329599 5329596 +
gtgtttgtataagtggggta

SEQ ID NO: 20566 - DNA, 20 bp, Artificial Sequence
  Synthetic oligonucleotide; AAG chr11 5329589 5329608 5329605 +
taagtggggtacagtttata

SEQ ID NO: 20567 - DNA, 20 bp, Artificial Sequence
  Synthetic oligonucleotide; AGG chr11 5329590 5329609 5329606 +
aagtggggtacagtttataa

SEQ ID NO: 20568 - DNA, 20 bp, Artificial Sequence
  Synthetic oligonucleotide; AAG chr11 5329593 5329612 5329609 +
tggggtacagtttataaagg

SEQ ID NO: 20569 - DNA, 20 bp, Artificial Sequence
  Synthetic oligonucleotide; CAG chr11 5329606 5329625 5329622 +
ataaaggaagaaaaaataca

SEQ ID NO: 20570 - DNA, 20 bp, Artificial Sequence
  Synthetic oligonucleotide; AGG chr11 5329607 5329626 5329623 +
taaaggaagaaaaaatacac

SEQ ID NO: 20571 - DNA, 20 bp, Artificial Sequence
  Synthetic oligonucleotide; TGG chr11 5329613 5329632 5329629 +
aagaaaaaatacacaggcta

SEQ ID NO: 20572 - DNA, 20 bp, Artificial Sequence
  Synthetic oligonucleotide; GGG chr11 5329614 5329633 5329630 +
agaaaaaatacacaggctat

SEQ ID NO: 20573 - DNA, 20 bp, Artificial Sequence
  Synthetic oligonucleotide; GGG chr11 5329615 5329634 5329631 +
gaaaaaatacacaggctatg

SEQ ID NO: 20574 - DNA, 20 bp, Artificial Sequence
  Synthetic oligonucleotide; AAG chr11 5329619 5329638 5329635 +
aaatacacaggctatgggga

SEQ ID NO: 20575 - DNA, 20 bp, Artificial Sequence
  Synthetic oligonucleotide; GAG chr11 5329621 5329640 5329637 +
atacacaggctatggggaaa

SEQ ID NO: 20576 - DNA, 20 bp, Artificial Sequence
  Synthetic oligonucleotide; AAG chr11 5329645 5329664 5329661 +
aaatatgacaaactcaaatc

SEQ ID NO: 20577 - DNA, 20 bp, Artificial Sequence
  Synthetic oligonucleotide; GAG chr11 5329647 5329666 5329663 +
atatgacaaactcaaatcaa

SEQ ID NO: 20578 - DNA, 20 bp, Artificial Sequence
  Synthetic oligonucleotide; TAG chr11 5329655 5329674 5329671 +
aactcaaatcaagagaattc

SEQ ID NO: 20579 - DNA, 20 bp, Artificial Sequence
  Synthetic oligonucleotide; CAG chr11 5329658 5329677 5329674 +
tcaaatcaagagaattctag

SEQ ID NO: 20580 - DNA, 20 bp, Artificial Sequence
  Synthetic oligonucleotide; GAG chr11 5329660 5329679 5329676 +
aaatcaagagaattctagca

SEQ ID NO: 20581 - DNA, 20 bp, Artificial Sequence
  Synthetic oligonucleotide; CAG chr11 5329664 5329683 5329680 +
caagagaattctagcagagc

SEQ ID NO: 20582 - DNA, 20 bp, Artificial Sequence
  Synthetic oligonucleotide; GAG chr11 5329682 5329701 5329698 +
gccagaataacaaaacatgt

SEQ ID NO: 20583 - DNA, 20 bp, Artificial Sequence
  Synthetic oligonucleotide; AAG chr11 5329698 5329717 5329714 +
atgtgagaaaattgaacaca

SEQ ID NO: 20584 - DNA, 20 bp, Artificial Sequence
  Synthetic oligonucleotide; GAG chr11 5329700 5329719 5329716 +
gtgagaaaattgaacacaaa

SEQ ID NO: 20585 - DNA, 20 bp, Artificial Sequence
  Synthetic oligonucleotide; TGG chr11 5329709 5329728 5329725 +
ttgaacacaaagagaatctg

SEQ ID NO: 20586 - DNA, 20 bp, Artificial Sequence
  Synthetic oligonucleotide; TAG chr11 5329712 5329731 5329728 +
aacacaaagagaatctgtgg

SEQ ID NO: 20587 - DNA, 20 bp, Artificial Sequence
  Synthetic oligonucleotide; TGG chr11 5329720 5329739 5329736 +
gagaatctgtggtagcctgt

SEQ ID NO: 20588 - DNA, 20 bp, Artificial Sequence
  Synthetic oligonucleotide; AAG chr11 5329774 5329793 5329790 +
tattattattattatacttt

SEQ ID NO: 20589 - DNA, 20 bp, Artificial Sequence
  Synthetic oligonucleotide; TAG chr11 5329780 5329799 5329796 +
tattattatactttaagttt

SEQ ID NO: 20590 - DNA, 20 bp, Artificial Sequence
  Synthetic oligonucleotide; AGG chr11 5329781 5329800 5329797 +
attattatactttaagtttt

SEQ ID NO: 20591 - DNA, 20 bp, Artificial Sequence
  Synthetic oligonucleotide; GGG chr11 5329782 5329801 5329798 +
ttattatactttaagtttta

SEQ ID NO: 20592 - DNA, 20 bp, Artificial Sequence
  Synthetic oligonucleotide; CAG chr11 5329802 5329821 5329818 +
gggtacatgtgcacaatgtg

SEQ ID NO: 20593 - DNA, 20 bp, Artificial Sequence
  Synthetic oligonucleotide; AGG chr11 5329803 5329822 5329819 +
ggtacatgtgcacaatgtgc

SEQ ID NO: 20594 - DNA, 20 bp, Artificial Sequence
  Synthetic oligonucleotide; TGG chr11 5329835 5329854 5329851 +
tatgtatacatgtgccatgt

SEQ ID NO: 20595 - DNA, 20 bp, Artificial Sequence
  Synthetic oligonucleotide; TAG chr11 5329864 5329883 5329880 +
gcacccattaacttgtcact

SEQ ID NO: 20596 - DNA, 20 bp, Artificial Sequence
  Synthetic oligonucleotide; TAG chr11 5329870 5329889 5329886 +
attaacttgtcacttagcat

SEQ ID NO: 20597 - DNA, 20 bp, Artificial Sequence
  Synthetic oligonucleotide; AGG chr11 5329871 5329890 5329887 +
ttaacttgtcacttagcatt

SEQ ID NO: 20598 - DNA, 20 bp, Artificial Sequence
  Synthetic oligonucleotide; CAG chr11 5329918 5329937 5329934 +
cccttccccccacctcacaa

SEQ ID NO: 20599 - DNA, 20 bp, Artificial Sequence
  Synthetic oligonucleotide; CGG chr11 5329925 5329944 5329941 +
ccccacctcacaacagtccc

SEQ ID NO: 20600 - DNA, 20 bp, Artificial Sequence
  Synthetic oligonucleotide; GAG chr11 5329927 5329946 5329943 +
ccacctcacaacagtccccg

SEQ ID NO: 20601 - DNA, 20 bp, Artificial Sequence
  Synthetic oligonucleotide; GAG chr11 5329984 5330003 5330000 +
attgttcaattcccacctat

SEQ ID NO: 20602 - DNA, 20 bp, Artificial Sequence
  Synthetic oligonucleotide; GAG chr11 5329988 5330007 5330004 +
ttcaattcccacctatgagt

SEQ ID NO: 20603 - DNA, 20 bp, Artificial Sequence
  Synthetic oligonucleotide; CAG chr11 5329997 5330016 5330013 +
cacctatgagtgagaacatg

SEQ ID NO: 20604 - DNA, 20 bp, Artificial Sequence
  Synthetic oligonucleotide; TGG chr11 5330004 5330023 5330020 +
gagtgagaacatgcagtgct

SEQ ID NO: 20605 - DNA, 20 bp, Artificial Sequence
  Synthetic oligonucleotide; TAG chr11 5330023 5330042 5330039 +
ttggttttttgtccttgcga

SEQ ID NO: 20606 - DNA, 20 bp, Artificial Sequence
  Synthetic oligonucleotide; GAG chr11 5330032 5330051 5330048 +
tgtccttgcgatagtttgct

SEQ ID NO: 20607 - DNA, 20 bp, Artificial Sequence
  Synthetic oligonucleotide; TGG chr11 5330040 5330059 5330056 +
cgatagtttgctgagaatga

SEQ ID NO: 20608 - DNA, 20 bp, Artificial Sequence
  Synthetic oligonucleotide; CAG chr11 5330047 5330066 5330063 +
ttgctgagaatgatggtttc

SEQ ID NO: 20609 - DNA, 20 bp, Artificial Sequence
  Synthetic oligonucleotide; TGG chr11 5330094 5330113 5330110 +
catgaactcttcatttttta

SEQ ID NO: 20610 - DNA, 20 bp, Artificial Sequence
  Synthetic oligonucleotide; TAG chr11 5330102 5330121 5330118 +
cttcattttttatggctgca

SEQ ID NO: 20611 - DNA, 20 bp, Artificial Sequence
  Synthetic oligonucleotide; TGG chr11 5330112 5330131 5330128 +
tatggctgcatagtattcca

SEQ ID NO: 20612 - DNA, 20 bp, Artificial Sequence
  Synthetic oligonucleotide; CAG chr11 5330141 5330160 5330157 +
tgtgccacattttcttaatt

SEQ ID NO: 20613 - DNA, 20 bp, Artificial Sequence
  Synthetic oligonucleotide; TGG chr11 5330155 5330174 5330171 +
ttaattcagtctatcattgt

SEQ ID NO: 20614 - DNA, 20 bp, Artificial Sequence
  Synthetic oligonucleotide; TGG chr11 5330163 5330182 5330179 +
gtctatcattgttggacatt

SEQ ID NO: 20615 - DNA, 20 bp, Artificial Sequence
  Synthetic oligonucleotide; GGG chr11 5330164 5330183 5330180 +
tctatcattgttggacattt

SEQ ID NO: 20616 - DNA, 20 bp, Artificial Sequence
  Synthetic oligonucleotide; TGG chr11 5330168 5330187 5330184 +
tcattgttggacatttgggt

SEQ ID NO: 20617 - DNA, 20 bp, Artificial Sequence
  Synthetic oligonucleotide; AAG chr11 5330175 5330194 5330191 +
tggacatttgggttggttcc

SEQ ID NO: 20618 - DNA, 20 bp, Artificial Sequence
  Synthetic oligonucleotide; TAG chr11 5330194 5330213 5330210 +
caagtctttgctattgtgaa

SEQ ID NO: 20619 - DNA, 20 bp, Artificial Sequence
  Synthetic oligonucleotide; CAG chr11 5330202 5330221 5330218 +
tgctattgtgaatagtgcca

SEQ ID NO: 20620 - DNA, 20 bp, Artificial Sequence
  Synthetic oligonucleotide; TAG chr11 5330231 5330250 5330247 +
tacgtgtgcatgtgtcttta

SEQ ID NO: 20621 - DNA, 20 bp, Artificial Sequence
  Synthetic oligonucleotide; CAG chr11 5330234 5330253 5330250 +
gtgtgcatgtgtctttatag

SEQ ID NO: 20622 - DNA, 20 bp, Artificial Sequence
  Synthetic oligonucleotide; TGG chr11 5330254 5330273 5330270 +
cagcatgatttataatccgt

SEQ ID NO: 20623 - DNA, 20 bp, Artificial Sequence
  Synthetic oligonucleotide; GGG chr11 5330255 5330274 5330271 +
agcatgatttataatccgtt

SEQ ID NO: 20624 - DNA, 20 bp, Artificial Sequence
  Synthetic oligonucleotide; CAG chr11 5330266 5330285 5330282 +
taatccgttgggtatatacc

SEQ ID NO: 20625 - DNA, 20 bp, Artificial Sequence
  Synthetic oligonucleotide; TGG chr11 5330272 5330291 5330288 +
gttgggtatatacccagtaa

SEQ ID NO: 20626 - DNA, 20 bp, Artificial Sequence
  Synthetic oligonucleotide; GGG chr11 5330273 5330292 5330289 +
ttgggtatatacccagtaat

SEQ ID NO: 20627 - DNA, 20 bp, Artificial Sequence
  Synthetic oligonucleotide; TGG chr11 5330277 5330296 5330293 +
gtatatacccagtaatggga

SEQ ID NO: 20628 - DNA, 20 bp, Artificial Sequence
  Synthetic oligonucleotide; TGG chr11 5330281 5330300 5330297 +
atacccagtaatgggatggc

SEQ ID NO: 20629 - DNA, 20 bp, Artificial Sequence
  Synthetic oligonucleotide; GGG chr11 5330282 5330301 5330298 +
tacccagtaatgggatggct

SEQ ID NO: 20630 - DNA, 20 bp, Artificial Sequence
  Synthetic oligonucleotide; TGG chr11 5330290 5330309 5330306 +
aatgggatggctgggtcaaa

SEQ ID NO: 20631 - DNA, 20 bp, Artificial Sequence
  Synthetic oligonucleotide; TAG chr11 5330299 5330318 5330315 +
gctgggtcaaatggtatttc

SEQ ID NO: 20632 - DNA, 20 bp, Artificial Sequence
  Synthetic oligonucleotide; TAG chr11 5330305 5330324 5330321 +
tcaaatggtatttctagttc

SEQ ID NO: 20633 - DNA, 20 bp, Artificial Sequence
  Synthetic oligonucleotide; GAG chr11 5330314 5330333 5330330 +
atttctagttctagatccct

SEQ ID NO: 20634 - DNA, 20 bp, Artificial Sequence
  Synthetic oligonucleotide; AGG chr11 5330315 5330334 5330331 +
tttctagttctagatccctg

SEQ ID NO: 20635 - DNA, 20 bp, Artificial Sequence
  Synthetic oligonucleotide; TGG chr11 5330341 5330360 5330357 +
cgccacactgacttccacaa

SEQ ID NO: 20636 - DNA, 20 bp, Artificial Sequence
  Synthetic oligonucleotide; TAG chr11 5330350 5330369 5330366 +
gacttccacaatggttgaac

SEQ ID NO: 20637 - DNA, 20 bp, Artificial Sequence
  Synthetic oligonucleotide; CAG chr11 5330357 5330376 5330373 +
acaatggttgaactagttta

SEQ ID NO: 20638 - DNA, 20 bp, Artificial Sequence
  Synthetic oligonucleotide; AAG chr11 5330367 5330386 5330383 +
aactagtttacagtcccacc

SEQ ID NO: 20639 - DNA, 20 bp, Artificial Sequence
  Synthetic oligonucleotide; GAG chr11 5330369 5330388 5330385 +
ctagtttacagtcccaccaa

SEQ ID NO: 20640 - DNA, 20 bp, Artificial Sequence
  Synthetic oligonucleotide; AAG chr11 5330377 5330396 5330393 +
cagtcccaccaagagtgtaa

SEQ ID NO: 20641 - DNA, 20 bp, Artificial Sequence
  Synthetic oligonucleotide; CAG chr11 5330405 5330424 5330421 +
ctatttctccacatcctctc

SEQ ID NO: 20642 - DNA, 20 bp, Artificial Sequence
  Synthetic oligonucleotide; TGG chr11 5330449 5330468 5330465 +
ttaatgattgccattctaac

SEQ ID NO: 20643 - DNA, 20 bp, Artificial Sequence
  Synthetic oligonucleotide; GAG chr11 5330455 5330474 5330471 +
attgccattctaactggtgt

SEQ ID NO: 20644 - DNA, 20 bp, Artificial Sequence
  Synthetic oligonucleotide; TGG chr11 5330459 5330478 5330475 +
ccattctaactggtgtgaga

SEQ ID NO: 20645 - DNA, 20 bp, Artificial Sequence
  Synthetic oligonucleotide; TGG chr11 5330472 5330491 5330488 +
tgtgagatggtatctctttg

SEQ ID NO: 20646 - DNA, 20 bp, Artificial Sequence
  Synthetic oligonucleotide; TAG chr11 5330498 5330517 5330514 +
tgatttgcattgtgacgtgt

SEQ ID NO: 20647 - DNA, 20 bp, Artificial Sequence
  Synthetic oligonucleotide; AAG chr11 5330506 5330525 5330522 +
attgtgacgtgttagtttta

SEQ ID NO: 20648 - DNA, 20 bp, Artificial Sequence
  Synthetic oligonucleotide; AAG chr11 5330549 5330568 5330565 +
ttcttaacatttttttgatg

SEQ ID NO: 20649 - DNA, 20 bp, Artificial Sequence
  Synthetic oligonucleotide; CAG chr11 5330554 5330573 5330570 +
aacatttttttgatgaagca

SEQ ID NO: 20650 - DNA, 20 bp, Artificial Sequence
  Synthetic oligonucleotide; AAG chr11 5330564 5330583 5330580 +
tgatgaagcacagtgtctga

SEQ ID NO: 20651 - DNA, 20 bp, Artificial Sequence
  Synthetic oligonucleotide; AGG chr11 5330565 5330584 5330581 +
gatgaagcacagtgtctgaa

SEQ ID NO: 20652 - DNA, 20 bp, Artificial Sequence
  Synthetic oligonucleotide; GGG chr11 5330566 5330585 5330582 +
atgaagcacagtgtctgaaa

SEQ ID NO: 20653 - DNA, 20 bp, Artificial Sequence
  Synthetic oligonucleotide; TGG chr11 5330569 5330588 5330585 +
aagcacagtgtctgaaaggg

SEQ ID NO: 20654 - DNA, 20 bp, Artificial Sequence
  Synthetic oligonucleotide; TAG chr11 5330572 5330591 5330588 +
cacagtgtctgaaagggtgg

SEQ ID NO: 20655 - DNA, 20 bp, Artificial Sequence
  Synthetic oligonucleotide; AAG chr11 5330582 5330601 5330598 +
gaaagggtggtagcccaatc

SEQ ID NO: 20656 - DNA, 20 bp, Artificial Sequence
  Synthetic oligonucleotide; CAG chr11 5330598 5330617 5330614 +
aatcaagtgacattaaaaac

SEQ ID NO: 20657 - DNA, 20 bp, Artificial Sequence
  Synthetic oligonucleotide; CAG chr11 5330605 5330624 5330621 +
tgacattaaaaaccagaaca

SEQ ID NO: 20658 - DNA, 20 bp, Artificial Sequence
  Synthetic oligonucleotide; GAG chr11 5330615 5330634 5330631 +
aaccagaacacagctaatgt

SEQ ID NO: 20659 - DNA, 20 bp, Artificial Sequence
  Synthetic oligonucleotide; AAG chr11 5330624 5330643 5330640 +
acagctaatgtgagaaatac

SEQ ID NO: 20660 - DNA, 20 bp, Artificial Sequence
  Synthetic oligonucleotide; TAG chr11 5330631 5330650 5330647 +
atgtgagaaatacaagtatt

SEQ ID NO: 20661 - DNA, 20 bp, Artificial Sequence
  Synthetic oligonucleotide; AGG chr11 5330632 5330651 5330648 +
tgtgagaaatacaagtattt

SEQ ID NO: 20662 - DNA, 20 bp, Artificial Sequence
  Synthetic oligonucleotide; GGG chr11 5330633 5330652 5330649 +
gtgagaaatacaagtattta

SEQ ID NO: 20663 - DNA, 20 bp, Artificial Sequence
  Synthetic oligonucleotide; TAG chr11 5330639 5330658 5330655 +
aatacaagtatttagggcct

SEQ ID NO: 20664 - DNA, 20 bp, Artificial Sequence
  Synthetic oligonucleotide; GAG chr11 5330656 5330675 5330672 +
ccttagtctgctccttgtct

SEQ ID NO: 20665 - DNA, 20 bp, Artificial Sequence
  Synthetic oligonucleotide; AGG chr11 5330657 5330676 5330673 +
cttagtctgctccttgtctg

SEQ ID NO: 20666 - DNA, 20 bp, Artificial Sequence
  Synthetic oligonucleotide; AAG chr11 5330679 5330698 5330695 +
gcaattcccatgaccttctt

SEQ ID NO: 20667 - DNA, 20 bp, Artificial Sequence
  Synthetic oligonucleotide; AGG chr11 5330680 5330699 5330696 +
caattcccatgaccttctta

SEQ ID NO: 20668 - DNA, 20 bp, Artificial Sequence
  Synthetic oligonucleotide; CAG chr11 5330685 5330704 5330701 +
cccatgaccttcttaaggat

SEQ ID NO: 20669 - DNA, 20 bp, Artificial Sequence
  Synthetic oligonucleotide; AAG chr11 5330693 5330712 5330709 +
cttcttaaggatcagaatgt

SEQ ID NO: 20670 - DNA, 20 bp, Artificial Sequence
  Synthetic oligonucleotide; GAG chr11 5330695 5330714 5330711 +
tcttaaggatcagaatgtaa

SEQ ID NO: 20671 - DNA, 20 bp, Artificial Sequence
  Synthetic oligonucleotide; AAG chr11 5330700 5330719 5330716 +
aggatcagaatgtaagagat

SEQ ID NO: 20672 - DNA, 20 bp, Artificial Sequence
  Synthetic oligonucleotide; AGG chr11 5330701 5330720 5330717 +
ggatcagaatgtaagagata

SEQ ID NO: 20673 - DNA, 20 bp, Artificial Sequence
  Synthetic oligonucleotide; AAG chr11 5330706 5330725 5330722 +
agaatgtaagagataaggat

SEQ ID NO: 20674 - DNA, 20 bp, Artificial Sequence
  Synthetic oligonucleotide; AAG chr11 5330713 5330732 5330729 +
aagagataaggataagcaca

SEQ ID NO: 20675 - DNA, 20 bp, Artificial Sequence
  Synthetic oligonucleotide; AAG chr11 5330719 5330738 5330735 +
taaggataagcacaaagtcc

SEQ ID NO: 20676 - DNA, 20 bp, Artificial Sequence
  Synthetic oligonucleotide; CAG chr11 5330726 5330745 5330742 +
aagcacaaagtccaagaaac

SEQ ID NO: 20677 - DNA, 20 bp, Artificial Sequence
  Synthetic oligonucleotide; GAG chr11 5330734 5330753 5330750 +
agtccaagaaaccagttgat

SEQ ID NO: 20678 - DNA, 20 bp, Artificial Sequence
  Synthetic oligonucleotide; CAG chr11 5330739 5330758 5330755 +
aagaaaccagttgatgagac

SEQ ID NO: 20679 - DNA, 20 bp, Artificial Sequence
  Synthetic oligonucleotide; AGG chr11 5330740 5330759 5330756 +
agaaaccagttgatgagacc

SEQ ID NO: 20680 - DNA, 20 bp, Artificial Sequence
  Synthetic oligonucleotide; TAG chr11 5330747 5330766 5330763 +
agttgatgagaccaggacta

SEQ ID NO: 20681 - DNA, 20 bp, Artificial Sequence
  Synthetic oligonucleotide; AGG chr11 5330748 5330767 5330764 +
gttgatgagaccaggactat

SEQ ID NO: 20682 - DNA, 20 bp, Artificial Sequence
  Synthetic oligonucleotide; AAG chr11 5330754 5330773 5330770 +
gagaccaggactataggata

SEQ ID NO: 20683 - DNA, 20 bp, Artificial Sequence
  Synthetic oligonucleotide; AAG chr11 5330764 5330783 5330780 +
ctataggataaagtctatta

SEQ ID NO: 20684 - DNA, 20 bp, Artificial Sequence
  Synthetic oligonucleotide; AGG chr11 5330765 5330784 5330781 +
tataggataaagtctattaa

SEQ ID NO: 20685 - DNA, 20 bp, Artificial Sequence
  Synthetic oligonucleotide; CAG chr11 5330779 5330798 5330795 +
tattaaaggtgatgtctgca

SEQ ID NO: 20686 - DNA, 20 bp, Artificial Sequence
  Synthetic oligonucleotide; AGG chr11 5330780 5330799 5330796 +
attaaaggtgatgtctgcac

SEQ ID NO: 20687 - DNA, 20 bp, Artificial Sequence
  Synthetic oligonucleotide; CAG chr11 5330784 5330803 5330800 +
aaggtgatgtctgcacaggc

SEQ ID NO: 20688 - DNA, 20 bp, Artificial Sequence
  Synthetic oligonucleotide; TGG chr11 5330799 5330818 5330815 +
caggccagtttgatcacatc

SEQ ID NO: 20689 - DNA, 20 bp, Artificial Sequence
  Synthetic oligonucleotide; CAG chr11 5330804 5330823 5330820 +
cagtttgatcacatctggtg

SEQ ID NO: 20690 - DNA, 20 bp, Artificial Sequence
  Synthetic oligonucleotide; AGG chr11 5330805 5330824 5330821 +
agtttgatcacatctggtgc

SEQ ID NO: 20691 - DNA, 20 bp, Artificial Sequence
  Synthetic oligonucleotide; CAG chr11 5330808 5330827 5330824 +
ttgatcacatctggtgcagg

SEQ ID NO: 20692 - DNA, 20 bp, Artificial Sequence
  Synthetic oligonucleotide; AAG chr11 5330812 5330831 5330828 +
tcacatctggtgcaggcaga

SEQ ID NO: 20693 - DNA, 20 bp, Artificial Sequence
  Synthetic oligonucleotide; TGG chr11 5330817 5330836 5330833 +
tctggtgcaggcagaaagca

SEQ ID NO: 20694 - DNA, 20 bp, Artificial Sequence
  Synthetic oligonucleotide; GGG chr11 5330818 5330837 5330834 +
ctggtgcaggcagaaagcat

SEQ ID NO: 20695 - DNA, 20 bp, Artificial Sequence
  Synthetic oligonucleotide; GAG chr11 5330820 5330839 5330836 +
ggtgcaggcagaaagcatgg

SEQ ID NO: 20696 - DNA, 20 bp, Artificial Sequence
  Synthetic oligonucleotide; GAG chr11 5330822 5330841 5330838 +
tgcaggcagaaagcatggga

SEQ ID NO: 20697 - DNA, 20 bp, Artificial Sequence
  Synthetic oligonucleotide; AGG chr11 5330823 5330842 5330839 +
gcaggcagaaagcatgggag

SEQ ID NO: 20698 - DNA, 20 bp, Artificial Sequence
  Synthetic oligonucleotide; TGG chr11 5330829 5330848 5330845 +
agaaagcatgggagaggaca

SEQ ID NO: 20699 - DNA, 20 bp, Artificial Sequence
  Synthetic oligonucleotide; GGG chr11 5330830 5330849 5330846 +
gaaagcatgggagaggacat

SEQ ID NO: 20700 - DNA, 20 bp, Artificial Sequence
  Synthetic oligonucleotide; CAG chr11 5330838 5330857 5330854 +
gggagaggacatgggattga

SEQ ID NO: 20701 - DNA, 20 bp, Artificial Sequence
  Synthetic oligonucleotide; TAG chr11 5330841 5330860 5330857 +
agaggacatgggattgacag

SEQ ID NO: 20702 - DNA, 20 bp, Artificial Sequence
  Synthetic oligonucleotide; AGG chr11 5330842 5330861 5330858 +
gaggacatgggattgacagt

SEQ ID NO: 20703 - DNA, 20 bp, Artificial Sequence
  Synthetic oligonucleotide; GGG chr11 5330843 5330862 5330859 +
aggacatgggattgacagta

SEQ ID NO: 20704 - DNA, 20 bp, Artificial Sequence
  Synthetic oligonucleotide; GGG chr11 5330844 5330863 5330860 +
ggacatgggattgacagtag

SEQ ID NO: 20705 - DNA, 20 bp, Artificial Sequence
  Synthetic oligonucleotide; CAG chr11 5330851 5330870 5330867 +
ggattgacagtaggggaatc

SEQ ID NO: 20706 - DNA, 20 bp, Artificial Sequence
  Synthetic oligonucleotide; GAG chr11 5330853 5330872 5330869 +
attgacagtaggggaatcca

SEQ ID NO: 20707 - DNA, 20 bp, Artificial Sequence
  Synthetic oligonucleotide; GAG chr11 5330855 5330874 5330871 +
tgacagtaggggaatccaga

SEQ ID NO: 20708 - DNA, 20 bp, Artificial Sequence
  Synthetic oligonucleotide; AGG chr11 5330856 5330875 5330872 +
gacagtaggggaatccagag

SEQ ID NO: 20709 - DNA, 20 bp, Artificial Sequence
  Synthetic oligonucleotide; GGG chr11 5330857 5330876 5330873 +
acagtaggggaatccagaga

SEQ ID NO: 20710 - DNA, 20 bp, Artificial Sequence
  Synthetic oligonucleotide; TGG chr11 5330869 5330888 5330885 +
tccagagagggtgatgatta

SEQ ID NO: 20711 - DNA, 20 bp, Artificial Sequence
  Synthetic oligonucleotide; GGG chr11 5330870 5330889 5330886 +
ccagagagggtgatgattat

SEQ ID NO: 20712 - DNA, 20 bp, Artificial Sequence
  Synthetic oligonucleotide; TAG chr11 5330879 5330898 5330895 +
gtgatgattatgggcacaat

SEQ ID NO: 20713 - DNA, 20 bp, Artificial Sequence
  Synthetic oligonucleotide; CAG chr11 5330909 5330928 5330925 +
aatcccctcatttgaacccc

SEQ ID NO: 20714 - DNA, 20 bp, Artificial Sequence
  Synthetic oligonucleotide; TAG chr11 5330929 5330948 5330945 +
cagatctatcttcaccacct

SEQ ID NO: 20715 - DNA, 20 bp, Artificial Sequence
  Synthetic oligonucleotide; TGG chr11 5330935 5330954 5330951 +
tatcttcaccaccttagcat

SEQ ID NO: 20716 - DNA, 20 bp, Artificial Sequence
  Synthetic oligonucleotide; GAG chr11 5330939 5330958 5330955 +
ttcaccaccttagcattggt

SEQ ID NO: 20717 - DNA, 20 bp, Artificial Sequence
  Synthetic oligonucleotide; TGG chr11 5330944 5330963 5330960 +
caccttagcattggtgagaa

SEQ ID NO: 20718 - DNA, 20 bp, Artificial Sequence
  Synthetic oligonucleotide; GAG chr11 5330946 5330965 5330962 +
ccttagcattggtgagaatg

SEQ ID NO: 20719 - DNA, 20 bp, Artificial Sequence
  Synthetic oligonucleotide; AGG chr11 5330947 5330966 5330963 +
cttagcattggtgagaatgg

SEQ ID NO: 20720 - DNA, 20 bp, Artificial Sequence
  Synthetic oligonucleotide; CAG chr11 5330957 5330976 5330973 +
gtgagaatggaggtgtatct

SEQ ID NO: 20721 - DNA, 20 bp, Artificial Sequence
  Synthetic oligonucleotide; AGG chr11 5330958 5330977 5330974 +
tgagaatggaggtgtatctc

SEQ ID NO: 20722 - DNA, 20 bp, Artificial Sequence
  Synthetic oligonucleotide; GGG chr11 5330959 5330978 5330975 +
gagaatggaggtgtatctca

SEQ ID NO: 20723 - DNA, 20 bp, Artificial Sequence
  Synthetic oligonucleotide; GGG chr11 5330960 5330979 5330976 +
agaatggaggtgtatctcag

SEQ ID NO: 20724 - DNA, 20 bp, Artificial Sequence
  Synthetic oligonucleotide; TGG chr11 5330967 5330986 5330983 +
aggtgtatctcaggggatta

SEQ ID NO: 20725 - DNA, 20 bp, Artificial Sequence
  Synthetic oligonucleotide; CAG chr11 5330982 5331001 5330998 +
gattatggatgccaataaaa

SEQ ID NO: 20726 - DNA, 20 bp, Artificial Sequence
  Synthetic oligonucleotide; TGG chr11 5330988 5331007 5331004 +
ggatgccaataaaacagtca

SEQ ID NO: 20727 - DNA, 20 bp, Artificial Sequence
  Synthetic oligonucleotide; GGG chr11 5330989 5331008 5331005 +
gatgccaataaaacagtcat

SEQ ID NO: 20728 - DNA, 20 bp, Artificial Sequence
  Synthetic oligonucleotide; GAG chr11 5330999 5331018 5331015 +
aaacagtcatgggccatgat

SEQ ID NO: 20729 - DNA, 20 bp, Artificial Sequence
  Synthetic oligonucleotide; TGG chr11 5331010 5331029 5331026 +
ggccatgatgagcaacactc

SEQ ID NO: 20730 - DNA, 20 bp, Artificial Sequence
  Synthetic oligonucleotide; TAG chr11 5331022 5331041 5331038 +
caacactctggactccacga

SEQ ID NO: 20731 - DNA, 20 bp, Artificial Sequence
  Synthetic oligonucleotide; GAG chr11 5331024 5331043 5331040 +
acactctggactccacgata

SEQ ID NO: 20732 - DNA, 20 bp, Artificial Sequence
  Synthetic oligonucleotide; GAG chr11 5331026 5331045 5331042 +
actctggactccacgataga

SEQ ID NO: 20733 - DNA, 20 bp, Artificial Sequence
  Synthetic oligonucleotide; AGG chr11 5331027 5331046 5331043 +
ctctggactccacgatagag

SEQ ID NO: 20734 - DNA, 20 bp, Artificial Sequence
  Synthetic oligonucleotide; GGG chr11 5331028 5331047 5331044 +
tctggactccacgatagaga

SEQ ID NO: 20735 - DNA, 20 bp, Artificial Sequence
  Synthetic oligonucleotide; GAG chr11 5331030 5331049 5331046 +
tggactccacgatagagagg

SEQ ID NO: 20736 - DNA, 20 bp, Artificial Sequence
  Synthetic oligonucleotide; TGG chr11 5331033 5331052 5331049 +
actccacgatagagagggag

SEQ ID NO: 20737 - DNA, 20 bp, Artificial Sequence
  Synthetic oligonucleotide; TAG chr11 5331038 5331057 5331054 +
acgatagagagggagtggat

SEQ ID NO: 20738 - DNA, 20 bp, Artificial Sequence
  Synthetic oligonucleotide; TAG chr11 5331042 5331061 5331058 +
tagagagggagtggattaga

SEQ ID NO: 20739 - DNA, 20 bp, Artificial Sequence
  Synthetic oligonucleotide; AGG chr11 5331043 5331062 5331059 +
agagagggagtggattagat

SEQ ID NO: 20740 - DNA, 20 bp, Artificial Sequence
  Synthetic oligonucleotide; TGG chr11 5331048 5331067 5331064 +
gggagtggattagataggcc

SEQ ID NO: 20741 - DNA, 20 bp, Artificial Sequence
  Synthetic oligonucleotide; GAG chr11 5331050 5331069 5331066 +
gagtggattagataggcctg

SEQ ID NO: 20742 - DNA, 20 bp, Artificial Sequence
  Synthetic oligonucleotide; AGG chr11 5331051 5331070 5331067 +
agtggattagataggcctgg

SEQ ID NO: 20743 - DNA, 20 bp, Artificial Sequence
  Synthetic oligonucleotide; AAG chr11 5331054 5331073 5331070 +
ggattagataggcctggagg

SEQ ID NO: 20744 - DNA, 20 bp, Artificial Sequence
  Synthetic oligonucleotide; CAG chr11 5331057 5331076 5331073 +
ttagataggcctggaggaag

SEQ ID NO: 20745 - DNA, 20 bp, Artificial Sequence
  Synthetic oligonucleotide; AGG chr11 5331058 5331077 5331074 +
tagataggcctggaggaagc

SEQ ID NO: 20746 - DNA, 20 bp, Artificial Sequence
  Synthetic oligonucleotide; TGG chr11 5331066 5331085 5331082 +
cctggaggaagcaggctcca

SEQ ID NO: 20747 - DNA, 20 bp, Artificial Sequence
  Synthetic oligonucleotide; TAG chr11 5331086 5331105 5331102 +
tggctcattttcctgtgatc

SEQ ID NO: 20748 - DNA, 20 bp, Artificial Sequence
  Synthetic oligonucleotide; CAG chr11 5331090 5331109 5331106 +
tcattttcctgtgatctagc

SEQ ID NO: 20749 - DNA, 20 bp, Artificial Sequence
  Synthetic oligonucleotide; GAG chr11 5331092 5331111 5331108 +
attttcctgtgatctagcca

SEQ ID NO: 20750 - DNA, 20 bp, Artificial Sequence
  Synthetic oligonucleotide; AAG chr11 5331101 5331120 5331117 +
tgatctagccagagaacacc

SEQ ID NO: 20751 - DNA, 20 bp, Artificial Sequence
  Synthetic oligonucleotide; AGG chr11 5331102 5331121 5331118 +
gatctagccagagaacacca

SEQ ID NO: 20752 - DNA, 20 bp, Artificial Sequence
  Synthetic oligonucleotide; CAG chr11 5331106 5331125 5331122 +
tagccagagaacaccaagga

SEQ ID NO: 20753 - DNA, 20 bp, Artificial Sequence
  Synthetic oligonucleotide; TGG chr11 5331109 5331128 5331125 +
ccagagaacaccaaggacag

SEQ ID NO: 20754 - DNA, 20 bp, Artificial Sequence
  Synthetic oligonucleotide; AAG chr11 5331124 5331143 5331140 +
gacagtggacattgttgtca

SEQ ID NO: 20755 - DNA, 20 bp, Artificial Sequence
  Synthetic oligonucleotide; AAG chr11 5331134 5331153 5331150 +
attgttgtcaaagttacacc

SEQ ID NO: 20756 - DNA, 20 bp, Artificial Sequence
  Synthetic oligonucleotide; AGG chr11 5331135 5331154 5331151 +
ttgttgtcaaagttacacca

SEQ ID NO: 20757 - DNA, 20 bp, Artificial Sequence
  Synthetic oligonucleotide; TGG chr11 5331142 5331161 5331158 +
caaagttacaccaaggtcta

SEQ ID NO: 20758 - DNA, 20 bp, Artificial Sequence
  Synthetic oligonucleotide; CAG chr11 5331149 5331168 5331165 +
acaccaaggtctatggctgc

SEQ ID NO: 20759 - DNA, 20 bp, Artificial Sequence
  Synthetic oligonucleotide; TAG chr11 5331154 5331173 5331170 +
aaggtctatggctgccagta

SEQ ID NO: 20760 - DNA, 20 bp, Artificial Sequence
  Synthetic oligonucleotide; CAG chr11 5331158 5331177 5331174 +
tctatggctgccagtatagt

SEQ ID NO: 20761 - DNA, 20 bp, Artificial Sequence
  Synthetic oligonucleotide; GAG chr11 5331160 5331179 5331176 +
tatggctgccagtatagtca

SEQ ID NO: 20762 - DNA, 20 bp, Artificial Sequence
  Synthetic oligonucleotide; GAG chr11 5331162 5331181 5331178 +
tggctgccagtatagtcaga

SEQ ID NO: 20763 - DNA, 20 bp, Artificial Sequence
  Synthetic oligonucleotide; TAG chr11 5331165 5331184 5331181 +
ctgccagtatagtcagagag

SEQ ID NO: 20764 - DNA, 20 bp, Artificial Sequence
  Synthetic oligonucleotide; CGG chr11 5331172 5331191 5331188 +
tatagtcagagagtagtaca

SEQ ID NO: 20765 - DNA, 20 bp, Artificial Sequence
  Synthetic oligonucleotide; GGG chr11 5331173 5331192 5331189 +
atagtcagagagtagtacac

SEQ ID NO: 20766 - DNA, 20 bp, Artificial Sequence
  Synthetic oligonucleotide; AAG chr11 5331182 5331201 5331198 +
gagtagtacacgggctcatg

SEQ ID NO: 20767 - DNA, 20 bp, Artificial Sequence
  Synthetic oligonucleotide; GAG chr11 5331184 5331203 5331200 +
gtagtacacgggctcatgaa

SEQ ID NO: 20768 - DNA, 20 bp, Artificial Sequence
  Synthetic oligonucleotide; CAG chr11 5331189 5331208 5331205 +
acacgggctcatgaagagtg

SEQ ID NO: 20769 - DNA, 20 bp, Artificial Sequence
  Synthetic oligonucleotide; AAG chr11 5331204 5331223 5331220 +
gagtgcagtcttctctgata

SEQ ID NO: 20770 - DNA, 20 bp, Artificial Sequence
  Synthetic oligonucleotide; GAG chr11 5331206 5331225 5331222 +
gtgcagtcttctctgataaa

SEQ ID NO: 20771 - DNA, 20 bp, Artificial Sequence
  Synthetic oligonucleotide; AGG chr11 5331207 5331226 5331223 +
tgcagtcttctctgataaag

SEQ ID NO: 20772 - DNA, 20 bp, Artificial Sequence
  Synthetic oligonucleotide; GAG chr11 5331209 5331228 5331225 +
cagtcttctctgataaagag

SEQ ID NO: 20773 - DNA, 20 bp, Artificial Sequence
  Synthetic oligonucleotide; AGG chr11 5331210 5331229 5331226 +
agtcttctctgataaagagg

SEQ ID NO: 20774 - DNA, 20 bp, Artificial Sequence
  Synthetic oligonucleotide; GAG chr11 5331212 5331231 5331228 +
tcttctctgataaagaggag

SEQ ID NO: 20775 - DNA, 20 bp, Artificial Sequence
  Synthetic oligonucleotide; AGG chr11 5331213 5331232 5331229 +
cttctctgataaagaggagg

SEQ ID NO: 20776 - DNA, 20 bp, Artificial Sequence
  Synthetic oligonucleotide; AAG chr11 5331227 5331246 5331243 +
aggaggaggctgccattgcc

SEQ ID NO: 20777 - DNA, 20 bp, Artificial Sequence
  Synthetic oligonucleotide; AGG chr11 5331228 5331247 5331244 +
ggaggaggctgccattgcca

SEQ ID NO: 20778 - DNA, 20 bp, Artificial Sequence
  Synthetic oligonucleotide; TAG chr11 5331235 5331254 5331251 +
gctgccattgccaaggactg

SEQ ID NO: 20779 - DNA, 20 bp, Artificial Sequence
  Synthetic oligonucleotide; GAG chr11 5331237 5331256 5331253 +
tgccattgccaaggactgta

SEQ ID NO: 20780 - DNA, 20 bp, Artificial Sequence
  Synthetic oligonucleotide; TAG chr11 5331243 5331262 5331259 +
tgccaaggactgtagagaca

SEQ ID NO: 20781 - DNA, 20 bp, Artificial Sequence
  Synthetic oligonucleotide; AAG chr11 5331252 5331271 5331268 +
ctgtagagacatagatgata

SEQ ID NO: 20782 - DNA, 20 bp, Artificial Sequence
  Synthetic oligonucleotide; AAG chr11 5331255 5331274 5331271 +
tagagacatagatgataaag

SEQ ID NO: 20783 - DNA, 20 bp, Artificial Sequence
  Synthetic oligonucleotide; AGG chr11 5331256 5331275 5331272 +
agagacatagatgataaaga

SEQ ID NO: 20784 - DNA, 20 bp, Artificial Sequence
  Synthetic oligonucleotide; GAG chr11 5331258 5331277 5331274 +
agacatagatgataaagaag

SEQ ID NO: 20785 - DNA, 20 bp, Artificial Sequence
  Synthetic oligonucleotide; TAG chr11 5331262 5331281 5331278 +
atagatgataaagaaggaga

SEQ ID NO: 20786 - DNA, 20 bp, Artificial Sequence
  Synthetic oligonucleotide; AAG chr11 5331271 5331290 5331287 +
aaagaaggagatagaactcc

SEQ ID NO: 20787 - DNA, 20 bp, Artificial Sequence
  Synthetic oligonucleotide; AGG chr11 5331272 5331291 5331288 +
aagaaggagatagaactcca

SEQ ID NO: 20788 - DNA, 20 bp, Artificial Sequence
  Synthetic oligonucleotide; CAG chr11 5331287 5331306 5331303 +
ctccaaggatgaaatctctc

SEQ ID NO: 20789 - DNA, 20 bp, Artificial Sequence
  Synthetic oligonucleotide; TGG chr11 5331293 5331312 5331309 +
ggatgaaatctctccagacc

SEQ ID NO: 20790 - DNA, 20 bp, Artificial Sequence
  Synthetic oligonucleotide; AAG chr11 5331297 5331316 5331313 +
gaaatctctccagacctgga

SEQ ID NO: 20791 - DNA, 20 bp, Artificial Sequence
  Synthetic oligonucleotide; CAG chr11 5331301 5331320 5331317 +
tctctccagacctggaaagc

SEQ ID NO: 20792 - DNA, 20 bp, Artificial Sequence
  Synthetic oligonucleotide; GAG chr11 5331305 5331324 5331321 +
tccagacctggaaagccagt

SEQ ID NO: 20793 - DNA, 20 bp, Artificial Sequence
  Synthetic oligonucleotide; AGG chr11 5331306 5331325 5331322 +
ccagacctggaaagccagtg

SEQ ID NO: 20794 - DNA, 20 bp, Artificial Sequence
  Synthetic oligonucleotide; GAG chr11 5331308 5331327 5331324 +
agacctggaaagccagtgag

SEQ ID NO: 20795 - DNA, 20 bp, Artificial Sequence
  Synthetic oligonucleotide; AAG chr11 5331313 5331332 5331329 +
tggaaagccagtgaggagaa

SEQ ID NO: 20796 - DNA, 20 bp, Artificial Sequence
  Synthetic oligonucleotide; AGG chr11 5331314 5331333 5331330 +
ggaaagccagtgaggagaaa

SEQ ID NO: 20797 - DNA, 20 bp, Artificial Sequence
  Synthetic oligonucleotide; GGG chr11 5331315 5331334 5331331 +
gaaagccagtgaggagaaaa

SEQ ID NO: 20798 - DNA, 20 bp, Artificial Sequence
  Synthetic oligonucleotide; GGG chr11 5331316 5331335 5331332 +
aaagccagtgaggagaaaag

SEQ ID NO: 20799 - DNA, 20 bp, Artificial Sequence
  Synthetic oligonucleotide; CAG chr11 5331319 5331338 5331335 +
gccagtgaggagaaaagggg

SEQ ID NO: 20800 - DNA, 20 bp, Artificial Sequence
  Synthetic oligonucleotide; CAG chr11 5331322 5331341 5331338 +
agtgaggagaaaaggggcag

SEQ ID NO: 20801 - DNA, 20 bp, Artificial Sequence
  Synthetic oligonucleotide; TGG chr11 5331328 5331347 5331344 +
gagaaaaggggcagcagtaa

SEQ ID NO: 20802 - DNA, 20 bp, Artificial Sequence
  Synthetic oligonucleotide; TGG chr11 5331331 5331350 5331347 +
aaaaggggcagcagtaatgg

SEQ ID NO: 20803 - DNA, 20 bp, Artificial Sequence
  Synthetic oligonucleotide; GGG chr11 5331332 5331351 5331348 +
aaaggggcagcagtaatggt

SEQ ID NO: 20804 - DNA, 20 bp, Artificial Sequence
  Synthetic oligonucleotide; TGG chr11 5331340 5331359 5331356 +
agcagtaatggtgggtgaca

SEQ ID NO: 20805 - DNA, 20 bp, Artificial Sequence
  Synthetic oligonucleotide; TGG chr11 5331343 5331362 5331359 +
agtaatggtgggtgacatgg

SEQ ID NO: 20806 - DNA, 20 bp, Artificial Sequence
  Synthetic oligonucleotide; GAG chr11 5331352 5331371 5331368 +
gggtgacatggtggatacct

SEQ ID NO: 20807 - DNA, 20 bp, Artificial Sequence
  Synthetic oligonucleotide; AGG chr11 5331353 5331372 5331369 +
ggtgacatggtggatacctg

SEQ ID NO: 20808 - DNA, 20 bp, Artificial Sequence
  Synthetic oligonucleotide; GAG chr11 5331355 5331374 5331371 +
tgacatggtggatacctgag

SEQ ID NO: 20809 - DNA, 20 bp, Artificial Sequence
  Synthetic oligonucleotide; CAG chr11 5331374 5331393 5331390 +
ggagaaacaaacaaacaaaa

SEQ ID NO: 20810 - DNA, 20 bp, Artificial Sequence
  Synthetic oligonucleotide; TAG chr11 5331382 5331401 5331398 +
aaacaaacaaaacagctctc

SEQ ID NO: 20811 - DNA, 20 bp, Artificial Sequence
  Synthetic oligonucleotide; CAG chr11 5331387 5331406 5331403 +
aacaaaacagctctctagac

SEQ ID NO: 20812 - DNA, 20 bp, Artificial Sequence
  Synthetic oligonucleotide; TGG chr11 5331397 5331416 5331413 +
ctctctagaccagcactatg

SEQ ID NO: 20813 - DNA, 20 bp, Artificial Sequence
  Synthetic oligonucleotide; TGG chr11 5331400 5331419 5331416 +
tctagaccagcactatgtgg

SEQ ID NO: 20814 - DNA, 20 bp, Artificial Sequence
  Synthetic oligonucleotide; TAG chr11 5331412 5331431 5331428 +
ctatgtggtggaaatataat

SEQ ID NO: 20815 - DNA, 20 bp, Artificial Sequence
  Synthetic oligonucleotide; GAG chr11 5331414 5331433 5331430 +
atgtggtggaaatataatta

SEQ ID NO: 20816 - DNA, 20 bp, Artificial Sequence
  Synthetic oligonucleotide; TGG chr11 5331441 5331460 5331457 +
atatgtgatgttaaatgttc

SEQ ID NO: 20817 - DNA, 20 bp, Artificial Sequence
  Synthetic oligonucleotide; TAG chr11 5331444 5331463 5331460 +
tgtgatgttaaatgttctgg

SEQ ID NO: 20818 - DNA, 20 bp, Artificial Sequence
  Synthetic oligonucleotide; AAG chr11 5331456 5331475 5331472 +
tgttctggtagtcacattaa

SEQ ID NO: 20819 - DNA, 20 bp, Artificial Sequence
  Synthetic oligonucleotide; AGG chr11 5331457 5331476 5331473 +
gttctggtagtcacattaaa

SEQ ID NO: 20820 - DNA, 20 bp, Artificial Sequence
  Synthetic oligonucleotide; GAG chr11 5331459 5331478 5331475 +
tctggtagtcacattaaaag

SEQ ID NO: 20821 - DNA, 20 bp, Artificial Sequence
  Synthetic oligonucleotide; AAG chr11 5331466 5331485 5331482 +
gtcacattaaaaggagtaaa

SEQ ID NO: 20822 - DNA, 20 bp, Artificial Sequence
  Synthetic oligonucleotide; AAG chr11 5331471 5331490 5331487 +
attaaaaggagtaaaaagaa

SEQ ID NO: 20823 - DNA, 20 bp, Artificial Sequence
  Synthetic oligonucleotide; TGG chr11 5331474 5331493 5331490 +
aaaaggagtaaaaagaaaag

SEQ ID NO: 20824 - DNA, 20 bp, Artificial Sequence
  Synthetic oligonucleotide; TAG chr11 5331489 5331508 5331505 +
aaaagtggtaaaattaatat

SEQ ID NO: 20825 - DNA, 20 bp, Artificial Sequence
  Synthetic oligonucleotide; AAG chr11 5331504 5331523 5331520 +
aatattagtatgtcttattt

SEQ ID NO: 20826 - DNA, 20 bp, Artificial Sequence
  Synthetic oligonucleotide; TAG chr11 5331536 5331555 5331552 +
caaaaatattatcattttaa

SEQ ID NO: 20827 - DNA, 20 bp, Artificial Sequence
  Synthetic oligonucleotide; CAG chr11 5331544 5331563 5331560 +
ttatcattttaatagataat

SEQ ID NO: 20828 - DNA, 20 bp, Artificial Sequence
  Synthetic oligonucleotide; GAG chr11 5331563 5331582 5331579 +
tcagcataaaaatcatatat

SEQ ID NO: 20829 - DNA, 20 bp, Artificial Sequence
  Synthetic oligonucleotide; TAG chr11 5331567 5331586 5331583 +
cataaaaatcatatatgaga

SEQ ID NO: 20830 - DNA, 20 bp, Artificial Sequence
  Synthetic oligonucleotide; TGG chr11 5331587 5331606 5331603 +
tagttcccacgatttttttt

SEQ ID NO: 20831 - DNA, 20 bp, Artificial Sequence
  Synthetic oligonucleotide; GAG chr11 5331608 5331627 5331624 +
ggtacaaattcttcaaaatc

SEQ ID NO: 20832 - DNA, 20 bp, Artificial Sequence
  Synthetic oligonucleotide; CAG chr11 5331623 5331642 5331639 +
aaatcgagtgtttacactta

SEQ ID NO: 20833 - DNA, 20 bp, Artificial Sequence
  Synthetic oligonucleotide; AAG chr11 5331639 5331658 5331655 +
cttacagaaaattctgactc

SEQ ID NO: 20834 - DNA, 20 bp, Artificial Sequence
  Synthetic oligonucleotide; CAG chr11 5331647 5331666 5331663 +
aaattctgactcaagctaac

SEQ ID NO: 20835 - DNA, 20 bp, Artificial Sequence
  Synthetic oligonucleotide; TGG chr11 5331662 5331681 5331678 +
ctaaccagatgctactgttt

SEQ ID NO: 20836 - DNA, 20 bp, Artificial Sequence
  Synthetic oligonucleotide; CAG chr11 5331666 5331685 5331682 +
ccagatgctactgttttgga

SEQ ID NO: 20837 - DNA, 20 bp, Artificial Sequence
  Synthetic oligonucleotide; CAG chr11 5331671 5331690 5331687 +
tgctactgttttggacagca

SEQ ID NO: 20838 - DNA, 20 bp, Artificial Sequence
  Synthetic oligonucleotide; TAG chr11 5331677 5331696 5331693 +
tgttttggacagcacagctc

SEQ ID NO: 20839 - DNA, 20 bp, Artificial Sequence
  Synthetic oligonucleotide; CAG chr11 5331698 5331717 5331714 +
agactatacgacttcatcct

SEQ ID NO: 20840 - DNA, 20 bp, Artificial Sequence
  Synthetic oligonucleotide; CAG chr11 5331710 5331729 5331726 +
ttcatcctcagtttcgactc

SEQ ID NO: 20841 - DNA, 20 bp, Artificial Sequence
  Synthetic oligonucleotide; CAG chr11 5331732 5331751 5331748 +
gctgctttctaccacccttt

SEQ ID NO: 20842 - DNA, 20 bp, Artificial Sequence
  Synthetic oligonucleotide; AAG chr11 5331761 5331780 5331777 +
tgcttcatcaaaaaaatgtt

SEQ ID NO: 20843 - DNA, 20 bp, Artificial Sequence
  Synthetic oligonucleotide; TGG chr11 5331807 5331826 5331823 +
tttaaaactaacacatatat

SEQ ID NO: 20844 - DNA, 20 bp, Artificial Sequence
  Synthetic oligonucleotide; AAG chr11 5331812 5331831 5331828 +
aactaacacatatattggaa

SEQ ID NO: 20845 - DNA, 20 bp, Artificial Sequence
  Synthetic oligonucleotide; AAG chr11 5331816 5331835 5331832 +
aacacatatattggaaaaga

SEQ ID NO: 20846 - DNA, 20 bp, Artificial Sequence
  Synthetic oligonucleotide; TAG chr11 5331832 5331851 5331848 +
aagaaagtctcctctctcac

SEQ ID NO: 20847 - DNA, 20 bp, Artificial Sequence
  Synthetic oligonucleotide; TGG chr11 5331847 5331866 5331863 +
ctcactagctattttttaaa

SEQ ID NO: 20848 - DNA, 20 bp, Artificial Sequence
  Synthetic oligonucleotide; TAG chr11 5331855 5331874 5331871 +
ctattttttaaatggtgtga

SEQ ID NO: 20849 - DNA, 20 bp, Artificial Sequence
  Synthetic oligonucleotide; AGG chr11 5331856 5331875 5331872 +
tattttttaaatggtgtgat

SEQ ID NO: 20850 - DNA, 20 bp, Artificial Sequence
  Synthetic oligonucleotide; AAG chr11 5331885 5331904 5331901 +
tttaaaaacctttctaccac

SEQ ID NO: 20851 - DNA, 20 bp, Artificial Sequence
  Synthetic oligonucleotide; TAG chr11 5331906 5331925 5331922 +
agatttcctatcctaatttc

SEQ ID NO: 20852 - DNA, 20 bp, Artificial Sequence
  Synthetic oligonucleotide; AGG chr11 5331907 5331926 5331923 +
gatttcctatcctaatttct

SEQ ID NO: 20853 - DNA, 20 bp, Artificial Sequence
  Synthetic oligonucleotide; TGG chr11 5331937 5331956 5331953 +
atatgatacaatatcatgct

SEQ ID NO: 20854 - DNA, 20 bp, Artificial Sequence
  Synthetic oligonucleotide; GGG chr11 5331938 5331957 5331954 +
tatgatacaatatcatgctt

SEQ ID NO: 20855 - DNA, 20 bp, Artificial Sequence
  Synthetic oligonucleotide; GGG chr11 5331939 5331958 5331955 +
atgatacaatatcatgcttg

SEQ ID NO: 20856 - DNA, 20 bp, Artificial Sequence
  Synthetic oligonucleotide; CAG chr11 5331947 5331966 5331963 +
atatcatgcttggggttata

SEQ ID NO: 20857 - DNA, 20 bp, Artificial Sequence
  Synthetic oligonucleotide; AAG chr11 5331959 5331978 5331975 +
gggttatacagatgtaatta

SEQ ID NO: 20858 - DNA, 20 bp, Artificial Sequence
  Synthetic oligonucleotide; GAG chr11 5331981 5332000 5331997 +
gttgctgatctattgacttt

SEQ ID NO: 20859 - DNA, 20 bp, Artificial Sequence
  Synthetic oligonucleotide; AAG chr11 5331993 5332012 5332009 +
ttgactttgagttaattgaa

SEQ ID NO: 20860 - DNA, 20 bp, Artificial Sequence
  Synthetic oligonucleotide; AGG chr11 5331994 5332013 5332010 +
tgactttgagttaattgaaa

SEQ ID NO: 20861 - DNA, 20 bp, Artificial Sequence
  Synthetic oligonucleotide; CAG chr11 5332005 5332024 5332021 +
taattgaaaaggaaattact

SEQ ID NO: 20862 - DNA, 20 bp, Artificial Sequence
  Synthetic oligonucleotide; AGG chr11 5332006 5332025 5332022 +
aattgaaaaggaaattactc

SEQ ID NO: 20863 - DNA, 20 bp, Artificial Sequence
  Synthetic oligonucleotide; GGG chr11 5332007 5332026 5332023 +
attgaaaaggaaattactca

SEQ ID NO: 20864 - DNA, 20 bp, Artificial Sequence
  Synthetic oligonucleotide; GGG chr11 5332008 5332027 5332024 +
ttgaaaaggaaattactcag

SEQ ID NO: 20865 - DNA, 20 bp, Artificial Sequence
  Synthetic oligonucleotide; TAG chr11 5332015 5332034 5332031 +
ggaaattactcaggggaacc

SEQ ID NO: 20866 - DNA, 20 bp, Artificial Sequence
  Synthetic oligonucleotide; GAG chr11 5332029 5332048 5332045 +
ggaacctagtctaattccat

SEQ ID NO: 20867 - DNA, 20 bp, Artificial Sequence
  Synthetic oligonucleotide; AAG chr11 5332039 5332058 5332055 +
ctaattccatgagcccctaa

SEQ ID NO: 20868 - DNA, 20 bp, Artificial Sequence
  Synthetic oligonucleotide; CAG chr11 5332042 5332061 5332058 +
attccatgagcccctaaaag

SEQ ID NO: 20869 - DNA, 20 bp, Artificial Sequence
  Synthetic oligonucleotide; GAG chr11 5332044 5332063 5332060 +
tccatgagcccctaaaagca

SEQ ID NO: 20870 - DNA, 20 bp, Artificial Sequence
  Synthetic oligonucleotide; AAG chr11 5332055 5332074 5332071 +
ctaaaagcagagttttcacc

SEQ ID NO: 20871 - DNA, 20 bp, Artificial Sequence
  Synthetic oligonucleotide; TAG chr11 5332058 5332077 5332074 +
aaagcagagttttcaccaag

SEQ ID NO: 20872 - DNA, 20 bp, Artificial Sequence
  Synthetic oligonucleotide; TAG chr11 5332061 5332080 5332077 +
gcagagttttcaccaagtag

SEQ ID NO: 20873 - DNA, 20 bp, Artificial Sequence
  Synthetic oligonucleotide; AGG chr11 5332062 5332081 5332078 +
cagagttttcaccaagtagt

SEQ ID NO: 20874 - DNA, 20 bp, Artificial Sequence
  Synthetic oligonucleotide; GAG chr11 5332064 5332083 5332080 +
gagttttcaccaagtagtag

SEQ ID NO: 20875 - DNA, 20 bp, Artificial Sequence
  Synthetic oligonucleotide; TAG chr11 5332069 5332088 5332085 +
ttcaccaagtagtaggagaa

SEQ ID NO: 20876 - DNA, 20 bp, Artificial Sequence
  Synthetic oligonucleotide; AGG chr11 5332070 5332089 5332086 +
tcaccaagtagtaggagaat

SEQ ID NO: 20877 - DNA, 20 bp, Artificial Sequence
  Synthetic oligonucleotide; AAG chr11 5332073 5332092 5332089 +
ccaagtagtaggagaatagg

SEQ ID NO: 20878 - DNA, 20 bp, Artificial Sequence
  Synthetic oligonucleotide; CAG chr11 5332077 5332096 5332093 +
gtagtaggagaataggaagc

SEQ ID NO: 20879 - DNA, 20 bp, Artificial Sequence
  Synthetic oligonucleotide; GAG chr11 5332095 5332114 5332111 +
gccagacatattcaaaattt

SEQ ID NO: 20880 - DNA, 20 bp, Artificial Sequence
  Synthetic oligonucleotide; AAG chr11 5332099 5332118 5332115 +
gacatattcaaaatttgaga

SEQ ID NO: 20881 - DNA, 20 bp, Artificial Sequence
  Synthetic oligonucleotide; AGG chr11 5332100 5332119 5332116 +
acatattcaaaatttgagaa

SEQ ID NO: 20882 - DNA, 20 bp, Artificial Sequence
  Synthetic oligonucleotide; TGG chr11 5332107 5332126 5332123 +
caaaatttgagaaaggttca

SEQ ID NO: 20883 - DNA, 20 bp, Artificial Sequence
  Synthetic oligonucleotide; GGG chr11 5332108 5332127 5332124 +
aaaatttgagaaaggttcat

SEQ ID NO: 20884 - DNA, 20 bp, Artificial Sequence
  Synthetic oligonucleotide; CAG chr11 5332112 5332131 5332128 +
tttgagaaaggttcatgggt

SEQ ID NO: 20885 - DNA, 20 bp, Artificial Sequence
  Synthetic oligonucleotide; TGG chr11 5332119 5332138 5332135 +
aaggttcatgggtcagttgc

SEQ ID NO: 20886 - DNA, 20 bp, Artificial Sequence
  Synthetic oligonucleotide; AAG chr11 5332132 5332151 5332148 +
cagttgctggtttgaaatat

SEQ ID NO: 20887 - DNA, 20 bp, Artificial Sequence
  Synthetic oligonucleotide; AGG chr11 5332133 5332152 5332149 +
agttgctggtttgaaatata

SEQ ID NO: 20888 - DNA, 20 bp, Artificial Sequence
  Synthetic oligonucleotide; GAG chr11 5332135 5332154 5332151 +
ttgctggtttgaaatataag

SEQ ID NO: 20889 - DNA, 20 bp, Artificial Sequence
  Synthetic oligonucleotide; AGG chr11 5332136 5332155 5332152 +
tgctggtttgaaatataagg

SEQ ID NO: 20890 - DNA, 20 bp, Artificial Sequence
  Synthetic oligonucleotide; AAG chr11 5332145 5332164 5332161 +
gaaatataaggaggtcacaa

SEQ ID NO: 20891 - DNA, 20 bp, Artificial Sequence
  Synthetic oligonucleotide; AAG chr11 5332148 5332167 5332164 +
atataaggaggtcacaaaag

SEQ ID NO: 20892 - DNA, 20 bp, Artificial Sequence
  Synthetic oligonucleotide; AGG chr11 5332149 5332168 5332165 +
tataaggaggtcacaaaaga

SEQ ID NO: 20893 - DNA, 20 bp, Artificial Sequence
  Synthetic oligonucleotide; AAG chr11 5332157 5332176 5332173 +
ggtcacaaaagaaggaatgc

SEQ ID NO: 20894 - DNA, 20 bp, Artificial Sequence
  Synthetic oligonucleotide; AAG chr11 5332160 5332179 5332176 +
cacaaaagaaggaatgcaag

SEQ ID NO: 20895 - DNA, 20 bp, Artificial Sequence
  Synthetic oligonucleotide; TAG chr11 5332167 5332186 5332183 +
gaaggaatgcaagaagcccc

SEQ ID NO: 20896 - DNA, 20 bp, Artificial Sequence
  Synthetic oligonucleotide; AGG chr11 5332168 5332187 5332184 +
aaggaatgcaagaagcccct

SEQ ID NO: 20897 - DNA, 20 bp, Artificial Sequence
  Synthetic oligonucleotide; CAG chr11 5332173 5332192 5332189 +
atgcaagaagcccctaggta

SEQ ID NO: 20898 - DNA, 20 bp, Artificial Sequence
  Synthetic oligonucleotide; CGG chr11 5332178 5332197 5332194 +
agaagcccctaggtacagaa

SEQ ID NO: 20899 - DNA, 20 bp, Artificial Sequence
  Synthetic oligonucleotide; GGG chr11 5332179 5332198 5332195 +
gaagcccctaggtacagaac

SEQ ID NO: 20900 - DNA, 20 bp, Artificial Sequence
  Synthetic oligonucleotide; TAG chr11 5332187 5332206 5332203 +
taggtacagaacgggcatcc

SEQ ID NO: 20901 - DNA, 20 bp, Artificial Sequence
  Synthetic oligonucleotide; CAG chr11 5332194 5332213 5332210 +
agaacgggcatcctagctaa

SEQ ID NO: 20902 - DNA, 20 bp, Artificial Sequence
  Synthetic oligonucleotide; CAG chr11 5332236 5332255 5332252 +
aaaacaaaaacaaaaacaaa

SEQ ID NO: 20903 - DNA, 20 bp, Artificial Sequence
  Synthetic oligonucleotide; AGG chr11 5332237 5332256 5332253 +
aaacaaaaacaaaaacaaac

SEQ ID NO: 20904 - DNA, 20 bp, Artificial Sequence
  Synthetic oligonucleotide; GGG chr11 5332238 5332257 5332254 +
aacaaaaacaaaaacaaaca

SEQ ID NO: 20905 - DNA, 20 bp, Artificial Sequence
  Synthetic oligonucleotide; CAG chr11 5332245 5332264 5332261 +
acaaaaacaaacagggactt

SEQ ID NO: 20906 - DNA, 20 bp, Artificial Sequence
  Synthetic oligonucleotide; GAG chr11 5332247 5332266 5332263 +
aaaaacaaacagggacttca

SEQ ID NO: 20907 - DNA, 20 bp, Artificial Sequence
  Synthetic oligonucleotide; CAG chr11 5332252 5332271 5332268 +
caaacagggacttcagagtt

SEQ ID NO: 20908 - DNA, 20 bp, Artificial Sequence
  Synthetic oligonucleotide; CAG chr11 5332255 5332274 5332271 +
acagggacttcagagttcag

SEQ ID NO: 20909 - DNA, 20 bp, Artificial Sequence
  Synthetic oligonucleotide; TAG chr11 5332258 5332277 5332274 +
gggacttcagagttcagcag

SEQ ID NO: 20910 - DNA, 20 bp, Artificial Sequence
  Synthetic oligonucleotide; AGG chr11 5332259 5332278 5332275 +
ggacttcagagttcagcagt

SEQ ID NO: 20911 - DNA, 20 bp, Artificial Sequence
  Synthetic oligonucleotide; CAG chr11 5332276 5332295 5332292 +
agtaggaaactgaactctga

SEQ ID NO: 20912 - DNA, 20 bp, Artificial Sequence
  Synthetic oligonucleotide; CGG chr11 5332280 5332299 5332296 +
ggaaactgaactctgacagc

SEQ ID NO: 20913 - DNA, 20 bp, Artificial Sequence
  Synthetic oligonucleotide; GGG chr11 5332281 5332300 5332297 +
gaaactgaactctgacagcc

SEQ ID NO: 20914 - DNA, 20 bp, Artificial Sequence
  Synthetic oligonucleotide; TGG chr11 5332289 5332308 5332305 +
actctgacagccgggtgcaa

SEQ ID NO: 20915 - DNA, 20 bp, Artificial Sequence
  Synthetic oligonucleotide; AAG chr11 5332299 5332318 5332315 +
ccgggtgcaatggctcattc

SEQ ID NO: 20916 - DNA, 20 bp, Artificial Sequence
  Synthetic oligonucleotide; CAG chr11 5332312 5332331 5332328 +
ctcattcaagcctgtaatcc

SEQ ID NO: 20917 - DNA, 20 bp, Artificial Sequence
  Synthetic oligonucleotide; TGG chr11 5332320 5332339 5332336 +
agcctgtaatcccagcactt

SEQ ID NO: 20918 - DNA, 20 bp, Artificial Sequence
  Synthetic oligonucleotide; GGG chr11 5332321 5332340 5332337 +
gcctgtaatcccagcacttt

SEQ ID NO: 20919 - DNA, 20 bp, Artificial Sequence
  Synthetic oligonucleotide; GAG chr11 5332323 5332342 5332339 +
ctgtaatcccagcactttgg

SEQ ID NO: 20920 - DNA, 20 bp, Artificial Sequence
  Synthetic oligonucleotide; AGG chr11 5332324 5332343 5332340 +
tgtaatcccagcactttggg

SEQ ID NO: 20921 - DNA, 20 bp, Artificial Sequence
  Synthetic oligonucleotide; AAG chr11 5332329 5332348 5332345 +
tcccagcactttgggaggcc

SEQ ID NO: 20922 - DNA, 20 bp, Artificial Sequence
  Synthetic oligonucleotide; AGG chr11 5332330 5332349 5332346 +
cccagcactttgggaggcca

SEQ ID NO: 20923 - DNA, 20 bp, Artificial Sequence
  Synthetic oligonucleotide; CGG chr11 5332333 5332352 5332349 +
agcactttgggaggccaagg

SEQ ID NO: 20924 - DNA, 20 bp, Artificial Sequence
  Synthetic oligonucleotide; GGG chr11 5332334 5332353 5332350 +
gcactttgggaggccaaggc

SEQ ID NO: 20925 - DNA, 20 bp, Artificial Sequence
  Synthetic oligonucleotide; CGG chr11 5332337 5332356 5332353 +
ctttgggaggccaaggcggg

SEQ ID NO: 20926 - DNA, 20 bp, Artificial Sequence
  Synthetic oligonucleotide; GAG chr11 5332347 5332366 5332363 +
ccaaggcgggcggatcacct

SEQ ID NO: 20927 - DNA, 20 bp, Artificial Sequence
  Synthetic oligonucleotide; AGG chr11 5332348 5332367 5332364 +
caaggcgggcggatcacctg

SEQ ID NO: 20928 - DNA, 20 bp, Artificial Sequence
  Synthetic oligonucleotide; CAG chr11 5332352 5332371 5332368 +
gcgggcggatcacctgaggt

SEQ ID NO: 20929 - DNA, 20 bp, Artificial Sequence
  Synthetic oligonucleotide; AGG chr11 5332353 5332372 5332369 +
cgggcggatcacctgaggtc

SEQ ID NO: 20930 - DNA, 20 bp, Artificial Sequence
  Synthetic oligonucleotide; GAG chr11 5332355 5332374 5332371 +
ggcggatcacctgaggtcag

SEQ ID NO: 20931 - DNA, 20 bp, Artificial Sequence
  Synthetic oligonucleotide; CAG chr11 5332361 5332380 5332377 +
tcacctgaggtcaggagttc

SEQ ID NO: 20932 - DNA, 20 bp, Artificial Sequence
  Synthetic oligonucleotide; CAG chr11 5332366 5332385 5332382 +
tgaggtcaggagttccagac

SEQ ID NO: 20933 - DNA, 20 bp, Artificial Sequence
  Synthetic oligonucleotide; TGG chr11 5332371 5332390 5332387 +
tcaggagttccagaccagcc

SEQ ID NO: 20934 - DNA, 20 bp, Artificial Sequence
  Synthetic oligonucleotide; TGG chr11 5332380 5332399 5332396 +
ccagaccagcctggccaaca

SEQ ID NO: 20935 - DNA, 20 bp, Artificial Sequence
  Synthetic oligonucleotide; TAG chr11 5332416 5332435 5332432 +
ctaccaaaaaatataaaaat

SEQ ID NO: 20936 - DNA, 20 bp, Artificial Sequence
  Synthetic oligonucleotide; CAG chr11 5332420 5332439 5332436 +
caaaaaatataaaaattagc

SEQ ID NO: 20937 - DNA, 20 bp, Artificial Sequence
  Synthetic oligonucleotide; AGG chr11 5332421 5332440 5332437 +
aaaaaatataaaaattagcc

SEQ ID NO: 20938 - DNA, 20 bp, Artificial Sequence
  Synthetic oligonucleotide; TGG chr11 5332426 5332445 5332442 +
atataaaaattagccaggtg

SEQ ID NO: 20939 - DNA, 20 bp, Artificial Sequence
  Synthetic oligonucleotide; CAG chr11 5332432 5332451 5332448 +
aaattagccaggtgtggttg

SEQ ID NO: 20940 - DNA, 20 bp, Artificial Sequence
  Synthetic oligonucleotide; TAG chr11 5332442 5332461 5332458 +
ggtgtggttgcagttgcctg

SEQ ID NO: 20941 - DNA, 20 bp, Artificial Sequence
  Synthetic oligonucleotide; CAG chr11 5332448 5332467 5332464 +
gttgcagttgcctgtagttc

SEQ ID NO: 20942 - DNA, 20 bp, Artificial Sequence
  Synthetic oligonucleotide; TGG chr11 5332456 5332475 5332472 +
tgcctgtagttccagctact

SEQ ID NO: 20943 - DNA, 20 bp, Artificial Sequence
  Synthetic oligonucleotide; GGG chr11 5332457 5332476 5332473 +
gcctgtagttccagctactt

SEQ ID NO: 20944 - DNA, 20 bp, Artificial Sequence
  Synthetic oligonucleotide; GAG chr11 5332465 5332484 5332481 +
ttccagctacttgggaaact

SEQ ID NO: 20945 - DNA, 20 bp, Artificial Sequence
  Synthetic oligonucleotide; AGG chr11 5332466 5332485 5332482 +
tccagctacttgggaaactg

SEQ ID NO: 20946 - DNA, 20 bp, Artificial Sequence
  Synthetic oligonucleotide; CAG chr11 5332469 5332488 5332485 +
agctacttgggaaactgagg

SEQ ID NO: 20947 - DNA, 20 bp, Artificial Sequence
  Synthetic oligonucleotide; AGG chr11 5332470 5332489 5332486 +
gctacttgggaaactgaggc

SEQ ID NO: 20948 - DNA, 20 bp, Artificial Sequence
  Synthetic oligonucleotide; GAG chr11 5332472 5332491 5332488 +
tacttgggaaactgaggcag

SEQ ID NO: 20949 - DNA, 20 bp, Artificial Sequence
  Synthetic oligonucleotide; CGG chr11 5332488 5332507 5332504 +
gcaggagaattgcttgaacc

SEQ ID NO: 20950 - DNA, 20 bp, Artificial Sequence
  Synthetic oligonucleotide; GGG chr11 5332489 5332508 5332505 +
caggagaattgcttgaaccc

SEQ ID NO: 20951 - DNA, 20 bp, Artificial Sequence
  Synthetic oligonucleotide; GAG chr11 5332491 5332510 5332507 +
ggagaattgcttgaacccgg

SEQ ID NO: 20952 - DNA, 20 bp, Artificial Sequence
  Synthetic oligonucleotide; AGG chr11 5332492 5332511 5332508 +
gagaattgcttgaacccggg

SEQ ID NO: 20953 - DNA, 20 bp, Artificial Sequence
  Synthetic oligonucleotide; CAG chr11 5332497 5332516 5332513 +
ttgcttgaacccgggaggca

SEQ ID NO: 20954 - DNA, 20 bp, Artificial Sequence
  Synthetic oligonucleotide; AGG chr11 5332498 5332517 5332514 +
tgcttgaacccgggaggcac

SEQ ID NO: 20955 - DNA, 20 bp, Artificial Sequence
  Synthetic oligonucleotide; CAG chr11 5332504 5332523 5332520 +
aacccgggaggcacaggttg

SEQ ID NO: 20956 - DNA, 20 bp, Artificial Sequence
  Synthetic oligonucleotide; AGG chr11 5332505 5332524 5332521 +
acccgggaggcacaggttgc

SEQ ID NO: 20957 - DNA, 20 bp, Artificial Sequence
  Synthetic oligonucleotide; GGG chr11 5332506 5332525 5332522 +
cccgggaggcacaggttgca

SEQ ID NO: 20958 - DNA, 20 bp, Artificial Sequence
  Synthetic oligonucleotide; GAG chr11 5332508 5332527 5332524 +
cgggaggcacaggttgcagg

SEQ ID NO: 20959 - DNA, 20 bp, Artificial Sequence
  Synthetic oligonucleotide; AAG chr11 5332512 5332531 5332528 +
aggcacaggttgcagggagc

SEQ ID NO: 20960 - DNA, 20 bp, Artificial Sequence
  Synthetic oligonucleotide; GAG chr11 5332514 5332533 5332530 +
gcacaggttgcagggagcaa

SEQ ID NO: 20961 - DNA, 20 bp, Artificial Sequence
  Synthetic oligonucleotide; CAG chr11 5332534 5332553 5332550 +
gagattgtgccactgcactc

SEQ ID NO: 20962 - DNA, 20 bp, Artificial Sequence
  Synthetic oligonucleotide; AGG chr11 5332535 5332554 5332551 +
agattgtgccactgcactcc

SEQ ID NO: 20963 - DNA, 20 bp, Artificial Sequence
  Synthetic oligonucleotide; TGG chr11 5332539 5332558 5332555 +
tgtgccactgcactccaggc

SEQ ID NO: 20964 - DNA, 20 bp, Artificial Sequence
  Synthetic oligonucleotide; GGG chr11 5332540 5332559 5332556 +
gtgccactgcactccaggct

SEQ ID NO: 20965 - DNA, 20 bp, Artificial Sequence
  Synthetic oligonucleotide; CAG chr11 5332546 5332565 5332562 +
ctgcactccaggctgggtga

SEQ ID NO: 20966 - DNA, 20 bp, Artificial Sequence
  Synthetic oligonucleotide; GAG chr11 5332548 5332567 5332564 +
gcactccaggctgggtgaca

SEQ ID NO: 20967 - DNA, 20 bp, Artificial Sequence
  Synthetic oligonucleotide; GAG chr11 5332552 5332571 5332568 +
tccaggctgggtgacagagc

SEQ ID NO: 20968 - DNA, 20 bp, Artificial Sequence
  Synthetic oligonucleotide; AAG chr11 5332583 5332602 5332599 +
tcaaaaaaaaaaaaaaaaaa

SEQ ID NO: 20969 - DNA, 20 bp, Artificial Sequence
  Synthetic oligonucleotide; AAG chr11 5332593 5332612 5332609 +
aaaaaaaaaaaagaaaaaaa

SEQ ID NO: 20970 - DNA, 20 bp, Artificial Sequence
  Synthetic oligonucleotide; GAG chr11 5332601 5332620 5332617 +
aaaagaaaaaaaaagaaact

SEQ ID NO: 20971 - DNA, 20 bp, Artificial Sequence
  Synthetic oligonucleotide; TGG chr11 5332628 5332647 5332644 +
gactacaatctgaatgaacg

SEQ ID NO: 20972 - DNA, 20 bp, Artificial Sequence
  Synthetic oligonucleotide; AAG chr11 5332631 5332650 5332647 +
tacaatctgaatgaacgtgg

SEQ ID NO: 20973 - DNA, 20 bp, Artificial Sequence
  Synthetic oligonucleotide; CAG chr11 5332646 5332665 5332662 +
cgtggaagcgaattcttccc

SEQ ID NO: 20974 - DNA, 20 bp, Artificial Sequence
  Synthetic oligonucleotide; GAG chr11 5332648 5332667 5332664 +
tggaagcgaattcttcccca

SEQ ID NO: 20975 - DNA, 20 bp, Artificial Sequence
  Synthetic oligonucleotide; TGG chr11 5332655 5332674 5332671 +
gaattcttccccagagcctt

SEQ ID NO: 20976 - DNA, 20 bp, Artificial Sequence
  Synthetic oligonucleotide; AAG chr11 5332660 5332679 5332676 +
cttccccagagcctttggat

SEQ ID NO: 20977 - DNA, 20 bp, Artificial Sequence
  Synthetic oligonucleotide; GAG chr11 5332662 5332681 5332678 +
tccccagagcctttggataa

SEQ ID NO: 20978 - DNA, 20 bp, Artificial Sequence
  Synthetic oligonucleotide; CAG chr11 5332667 5332686 5332683 +
agagcctttggataagagcc

SEQ ID NO: 20979 - DNA, 20 bp, Artificial Sequence
  Synthetic oligonucleotide; AAG chr11 5332707 5332726 5332723 +
atttgaccttatgataccct

SEQ ID NO: 20980 - DNA, 20 bp, Artificial Sequence
  Synthetic oligonucleotide; CAG chr11 5332710 5332729 5332726 +
tgaccttatgataccctaag

SEQ ID NO: 20981 - DNA, 20 bp, Artificial Sequence
  Synthetic oligonucleotide; GAG chr11 5332712 5332731 5332728 +
accttatgataccctaagca

SEQ ID NO: 20982 - DNA, 20 bp, Artificial Sequence
  Synthetic oligonucleotide; CAG chr11 5332719 5332738 5332735 +
gataccctaagcagagaact

SEQ ID NO: 20983 - DNA, 20 bp, Artificial Sequence
  Synthetic oligonucleotide; AAG chr11 5332724 5332743 5332740 +
cctaagcagagaactcagtt

SEQ ID NO: 20984 - DNA, 20 bp, Artificial Sequence
  Synthetic oligonucleotide; GAG chr11 5332732 5332751 5332748 +
gagaactcagttaagcctat

SEQ ID NO: 20985 - DNA, 20 bp, Artificial Sequence
  Synthetic oligonucleotide; GAG chr11 5332734 5332753 5332750 +
gaactcagttaagcctatga

SEQ ID NO: 20986 - DNA, 20 bp, Artificial Sequence
  Synthetic oligonucleotide; CAG chr11 5332739 5332758 5332755 +
cagttaagcctatgagagtg

SEQ ID NO: 20987 - DNA, 20 bp, Artificial Sequence
  Synthetic oligonucleotide; TAG chr11 5332747 5332766 5332763 +
cctatgagagtgcagaccta

SEQ ID NO: 20988 - DNA, 20 bp, Artificial Sequence
  Synthetic oligonucleotide; AAG chr11 5332780 5332799 5332796 +
taataaactaataatgtttg

SEQ ID NO: 20989 - DNA, 20 bp, Artificial Sequence
  Synthetic oligonucleotide; CAG chr11 5332783 5332802 5332799 +
taaactaataatgtttgaag

SEQ ID NO: 20990 - DNA, 20 bp, Artificial Sequence
  Synthetic oligonucleotide; AAG chr11 5332789 5332808 5332805 +
aataatgtttgaagcagctc

SEQ ID NO: 20991 - DNA, 20 bp, Artificial Sequence
  Synthetic oligonucleotide; CAG chr11 5332795 5332814 5332811 +
gtttgaagcagctcaagttg

SEQ ID NO: 20992 - DNA, 20 bp, Artificial Sequence
  Synthetic oligonucleotide; TAG chr11 5332815 5332834 5332831 +
cagtaatttatgtataacaa

SEQ ID NO: 20993 - DNA, 20 bp, Artificial Sequence
  Synthetic oligonucleotide; AAG chr11 5332830 5332849 5332846 +
aacaatagaaaactaatgca

SEQ ID NO: 20994 - DNA, 20 bp, Artificial Sequence
  Synthetic oligonucleotide; AAG chr11 5332857 5332876 5332873 +
actattatccatattttatt

SEQ ID NO: 20995 - DNA, 20 bp, Artificial Sequence
  Synthetic oligonucleotide; GAG chr11 5332859 5332878 5332875 +
tattatccatattttattaa

SEQ ID NO: 20996 - DNA, 20 bp, Artificial Sequence
  Synthetic oligonucleotide; TAG chr11 5332866 5332885 5332882 +
catattttattaagagttta

SEQ ID NO: 20997 - DNA, 20 bp, Artificial Sequence
  Synthetic oligonucleotide; GAG chr11 5332868 5332887 5332884 +
tattttattaagagtttata

SEQ ID NO: 20998 - DNA, 20 bp, Artificial Sequence
  Synthetic oligonucleotide; CAG chr11 5332893 5332912 5332909 +
ctataataaactaatattta

SEQ ID NO: 20999 - DNA, 20 bp, Artificial Sequence
  Synthetic oligonucleotide; AGG chr11 5332894 5332913 5332910 +
tataataaactaatatttac

SEQ ID NO: 21000 - DNA, 20 bp, Artificial Sequence
  Synthetic oligonucleotide; GGG chr11 5332895 5332914 5332911 +
ataataaactaatatttaca

SEQ ID NO: 21001 - DNA, 20 bp, Artificial Sequence
  Synthetic oligonucleotide; CAG chr11 5332933 5332952 5332949 +
gtatcatttatctattatca

SEQ ID NO: 21002 - DNA, 20 bp, Artificial Sequence
  Synthetic oligonucleotide; AAG chr11 5332951 5332970 5332967 +
cacagaattgtcacatcaca

SEQ ID NO: 21003 - DNA, 20 bp, Artificial Sequence
  Synthetic oligonucleotide; TAG chr11 5332961 5332980 5332977 +
tcacatcacaaagccctgta

SEQ ID NO: 21004 - DNA, 20 bp, Artificial Sequence
  Synthetic oligonucleotide; CAG chr11 5332967 5332986 5332983 +
cacaaagccctgtatagcat

SEQ ID NO: 21005 - DNA, 20 bp, Artificial Sequence
  Synthetic oligonucleotide; TGG chr11 5332970 5332989 5332986 +
aaagccctgtatagcatcag

SEQ ID NO: 21006 - DNA, 20 bp, Artificial Sequence
  Synthetic oligonucleotide; TGG chr11 5333010 5333029 5333026 +
ttatttttcactctaatgca

SEQ ID NO: 21007 - DNA, 20 bp, Artificial Sequence
  Synthetic oligonucleotide; TAG chr11 5333024 5333043 5333040 +
aatgcatggttcaacttatt

SEQ ID NO: 21008 - DNA, 20 bp, Artificial Sequence
  Synthetic oligonucleotide; AGG chr11 5333025 5333044 5333041 +
atgcatggttcaacttattt

SEQ ID NO: 21009 - DNA, 20 bp, Artificial Sequence
  Synthetic oligonucleotide; TGG chr11 5333029 5333048 5333045 +
atggttcaacttatttaggc

SEQ ID NO: 21010 - DNA, 20 bp, Artificial Sequence
  Synthetic oligonucleotide; GGG chr11 5333030 5333049 5333046 +
tggttcaacttatttaggct

SEQ ID NO: 21011 - DNA, 20 bp, Artificial Sequence
  Synthetic oligonucleotide; TGG chr11 5333035 5333054 5333051 +
caacttatttaggctgggct

SEQ ID NO: 21012 - DNA, 20 bp, Artificial Sequence
  Synthetic oligonucleotide; TGG chr11 5333039 5333058 5333055 +
ttatttaggctgggcttggc

SEQ ID NO: 21013 - DNA, 20 bp, Artificial Sequence
  Synthetic oligonucleotide; GGG chr11 5333040 5333059 5333056 +
tatttaggctgggcttggct

SEQ ID NO: 21014 - DNA, 20 bp, Artificial Sequence
  Synthetic oligonucleotide; CAG chr11 5333043 5333062 5333059 +
ttaggctgggcttggctggg

SEQ ID NO: 21015 - DNA, 20 bp, Artificial Sequence
  Synthetic oligonucleotide; CAG chr11 5333072 5333091 5333088 +
tcatttctgcaccatctgct

SEQ ID NO: 21016 - DNA, 20 bp, Artificial Sequence
  Synthetic oligonucleotide; AGG chr11 5333073 5333092 5333089 +
catttctgcaccatctgctc

SEQ ID NO: 21017 - DNA, 20 bp, Artificial Sequence
  Synthetic oligonucleotide; TAG chr11 5333080 5333099 5333096 +
gcaccatctgctcaggtaca

SEQ ID NO: 21018 - DNA, 20 bp, Artificial Sequence
  Synthetic oligonucleotide; AGG chr11 5333081 5333100 5333097 +
caccatctgctcaggtacat

SEQ ID NO: 21019 - DNA, 20 bp, Artificial Sequence
  Synthetic oligonucleotide; GGG chr11 5333082 5333101 5333098 +
accatctgctcaggtacata

SEQ ID NO: 21020 - DNA, 20 bp, Artificial Sequence
  Synthetic oligonucleotide; CAG chr11 5333087 5333106 5333103 +
ctgctcaggtacatagggtg

SEQ ID NO: 21021 - DNA, 20 bp, Artificial Sequence
  Synthetic oligonucleotide; CAG chr11 5333203 5333222 5333219 +
tgccctctctaactaaaccc

SEQ ID NO: 21022 - DNA, 20 bp, Artificial Sequence
  Synthetic oligonucleotide; CAG chr11 5333225 5333244 5333241 +
gatgtctcttttgcatcacc

SEQ ID NO: 21023 - DNA, 20 bp, Artificial Sequence
  Synthetic oligonucleotide; TAG chr11 5333232 5333251 5333248 +
cttttgcatcacccagactt

SEQ ID NO: 21024 - DNA, 20 bp, Artificial Sequence
  Synthetic oligonucleotide; TAG chr11 5333244 5333263 5333260 +
ccagactttagcataaaact

SEQ ID NO: 21025 - DNA, 20 bp, Artificial Sequence
  Synthetic oligonucleotide; TAG chr11 5333278 5333297 5333294 +
tactgtttacattcttttac

SEQ ID NO: 21026 - DNA, 20 bp, Artificial Sequence
  Synthetic oligonucleotide; CAG chr11 5333286 5333305 5333302 +
acattcttttactagtctct

SEQ ID NO: 21027 - DNA, 20 bp, Artificial Sequence
  Synthetic oligonucleotide; TAG chr11 5333292 5333311 5333308 +
ttttactagtctctcagacc

SEQ ID NO: 21028 - DNA, 20 bp, Artificial Sequence
  Synthetic oligonucleotide; TGG chr11 5333295 5333314 5333311 +
tactagtctctcagacctag

SEQ ID NO: 21029 - DNA, 20 bp, Artificial Sequence
  Synthetic oligonucleotide; TAG chr11 5333311 5333330 5333327 +
ctagtggctctaactcattg

SEQ ID NO: 21030 - DNA, 20 bp, Artificial Sequence
  Synthetic oligonucleotide; CGG chr11 5333323 5333342 5333339 +
actcattgtagtaaaaaaca

SEQ ID NO: 21031 - DNA, 20 bp, Artificial Sequence
  Synthetic oligonucleotide; AAG chr11 5333365 5333384 5333381 +
ctaacattgcttactttact

SEQ ID NO: 21032 - DNA, 20 bp, Artificial Sequence
  Synthetic oligonucleotide; TGG chr11 5333387 5333406 5333403 +
gtgttgtattaacacaccaa

SEQ ID NO: 21033 - DNA, 20 bp, Artificial Sequence
  Synthetic oligonucleotide; TGG chr11 5333393 5333412 5333409 +
tattaacacaccaatggccc

SEQ ID NO: 21034 - DNA, 20 bp, Artificial Sequence
  Synthetic oligonucleotide; AAG chr11 5333396 5333415 5333412 +
taacacaccaatggccctgg

SEQ ID NO: 21035 - DNA, 20 bp, Artificial Sequence
  Synthetic oligonucleotide; CAG chr11 5333405 5333424 5333421 +
aatggccctggaagcaatga

SEQ ID NO: 21036 - DNA, 20 bp, Artificial Sequence
  Synthetic oligonucleotide; GAG chr11 5333407 5333426 5333423 +
tggccctggaagcaatgaca

SEQ ID NO: 21037 - DNA, 20 bp, Artificial Sequence
  Synthetic oligonucleotide; AAG chr11 5333427 5333446 5333443 +
gagtttgacatattgattgt

SEQ ID NO: 21038 - DNA, 20 bp, Artificial Sequence
  Synthetic oligonucleotide; AGG chr11 5333428 5333447 5333444 +
agtttgacatattgattgta

SEQ ID NO: 21039 - DNA, 20 bp, Artificial Sequence
  Synthetic oligonucleotide; TGG chr11 5333484 5333503 5333500 +
cacattgatcactaactgac

SEQ ID NO: 21040 - DNA, 20 bp, Artificial Sequence
  Synthetic oligonucleotide; TAG chr11 5333509 5333528 5333525 +
tgctgattgttaaactgact

SEQ ID NO: 21041 - DNA, 20 bp, Artificial Sequence
  Synthetic oligonucleotide; AGG chr11 5333510 5333529 5333526 +
gctgattgttaaactgactt

SEQ ID NO: 21042 - DNA, 20 bp, Artificial Sequence
  Synthetic oligonucleotide; AAG chr11 5333514 5333533 5333530 +
attgttaaactgacttaggt

SEQ ID NO: 21043 - DNA, 20 bp, Artificial Sequence
  Synthetic oligonucleotide; CAG chr11 5333519 5333538 5333535 +
taaactgacttaggtaagaa

SEQ ID NO: 21044 - DNA, 20 bp, Artificial Sequence
  Synthetic oligonucleotide; TGG chr11 5333551 5333570 5333567 +
aatattactaatatactaat

SEQ ID NO: 21045 - DNA, 20 bp, Artificial Sequence
  Synthetic oligonucleotide; AAG chr11 5333563 5333582 5333579 +
atactaattggctaatatat

SEQ ID NO: 21046 - DNA, 20 bp, Artificial Sequence
  Synthetic oligonucleotide; TGG chr11 5333575 5333594 5333591 +
taatatataagctgaaaatg

SEQ ID NO: 21047 - DNA, 20 bp, Artificial Sequence
  Synthetic oligonucleotide; GGG chr11 5333576 5333595 5333592 +
aatatataagctgaaaatgt

SEQ ID NO: 21048 - DNA, 20 bp, Artificial Sequence
  Synthetic oligonucleotide; GAG chr11 5333578 5333597 5333594 +
tatataagctgaaaatgtgg

SEQ ID NO: 21049 - DNA, 20 bp, Artificial Sequence
  Synthetic oligonucleotide; AAG chr11 5333586 5333605 5333602 +
ctgaaaatgtgggagctaca

SEQ ID NO: 21050 - DNA, 20 bp, Artificial Sequence
  Synthetic oligonucleotide; TAG chr11 5333589 5333608 5333605 +
aaaatgtgggagctacaaag

SEQ ID NO: 21051 - DNA, 20 bp, Artificial Sequence
  Synthetic oligonucleotide; GAG chr11 5333591 5333610 5333607 +
aatgtgggagctacaaagta

SEQ ID NO: 21052 - DNA, 20 bp, Artificial Sequence
  Synthetic oligonucleotide; AGG chr11 5333592 5333611 5333608 +
atgtgggagctacaaagtag

SEQ ID NO: 21053 - DNA, 20 bp, Artificial Sequence
  Synthetic oligonucleotide; GAG chr11 5333594 5333613 5333610 +
gtgggagctacaaagtagag

SEQ ID NO: 21054 - DNA, 20 bp, Artificial Sequence
  Synthetic oligonucleotide; AGG chr11 5333595 5333614 5333611 +
tgggagctacaaagtagagg

SEQ ID NO: 21055 - DNA, 20 bp, Artificial Sequence
  Synthetic oligonucleotide; AAG chr11 5333598 5333617 5333614 +
gagctacaaagtagaggagg

SEQ ID NO: 21056 - DNA, 20 bp, Artificial Sequence
  Synthetic oligonucleotide; AAG chr11 5333601 5333620 5333617 +
ctacaaagtagaggaggaag

SEQ ID NO: 21057 - DNA, 20 bp, Artificial Sequence
  Synthetic oligonucleotide; AGG chr11 5333602 5333621 5333618 +
tacaaagtagaggaggaaga

SEQ ID NO: 21058 - DNA, 20 bp, Artificial Sequence
  Synthetic oligonucleotide; CAG chr11 5333605 5333624 5333621 +
aaagtagaggaggaagaagg

SEQ ID NO: 21059 - DNA, 20 bp, Artificial Sequence
  Synthetic oligonucleotide; AAG chr11 5333609 5333628 5333625 +
tagaggaggaagaaggcaga

SEQ ID NO: 21060 - DNA, 20 bp, Artificial Sequence
  Synthetic oligonucleotide; AGG chr11 5333610 5333629 5333626 +
agaggaggaagaaggcagaa

SEQ ID NO: 21061 - DNA, 20 bp, Artificial Sequence
  Synthetic oligonucleotide; GGG chr11 5333611 5333630 5333627 +
gaggaggaagaaggcagaaa

SEQ ID NO: 21062 - DNA, 20 bp, Artificial Sequence
  Synthetic oligonucleotide; TAG chr11 5333618 5333637 5333634 +
aagaaggcagaaagggaaca

SEQ ID NO: 21063 - DNA, 20 bp, Artificial Sequence
  Synthetic oligonucleotide; AGG chr11 5333619 5333638 5333635 +
agaaggcagaaagggaacat

SEQ ID NO: 21064 - DNA, 20 bp, Artificial Sequence
  Synthetic oligonucleotide; TGG chr11 5333622 5333641 5333638 +
aggcagaaagggaacatagg

SEQ ID NO: 21065 - DNA, 20 bp, Artificial Sequence
  Synthetic oligonucleotide; AAG chr11 5333629 5333648 5333645 +
aagggaacataggtggatgt

SEQ ID NO: 21066 - DNA, 20 bp, Artificial Sequence
  Synthetic oligonucleotide; TAG chr11 5333633 5333652 5333649 +
gaacataggtggatgtaaga

SEQ ID NO: 21067 - DNA, 20 bp, Artificial Sequence
  Synthetic oligonucleotide; GAG chr11 5333635 5333654 5333651 +
acataggtggatgtaagata

SEQ ID NO: 21068 - DNA, 20 bp, Artificial Sequence
  Synthetic oligonucleotide; GAG chr11 5333644 5333663 5333660 +
gatgtaagatagagaaaact

SEQ ID NO: 21069 - DNA, 20 bp, Artificial Sequence
  Synthetic oligonucleotide; TAG chr11 5333649 5333668 5333665 +
aagatagagaaaactgagcc

SEQ ID NO: 21070 - DNA, 20 bp, Artificial Sequence
  Synthetic oligonucleotide; GAG chr11 5333651 5333670 5333667 +
gatagagaaaactgagccta

SEQ ID NO: 21071 - DNA, 20 bp, Artificial Sequence
  Synthetic oligonucleotide; AAG chr11 5333663 5333682 5333679 +
tgagcctagagaactgcatc

SEQ ID NO: 21072 - DNA, 20 bp, Artificial Sequence
  Synthetic oligonucleotide; GAG chr11 5333665 5333684 5333681 +
agcctagagaactgcatcaa

SEQ ID NO: 21073 - DNA, 20 bp, Artificial Sequence
  Synthetic oligonucleotide; AGG chr11 5333666 5333685 5333682 +
gcctagagaactgcatcaag

SEQ ID NO: 21074 - DNA, 20 bp, Artificial Sequence
  Synthetic oligonucleotide; GAG chr11 5333668 5333687 5333684 +
ctagagaactgcatcaagag

SEQ ID NO: 21075 - DNA, 20 bp, Artificial Sequence
  Synthetic oligonucleotide; AGG chr11 5333669 5333688 5333685 +
tagagaactgcatcaagagg

SEQ ID NO: 21076 - DNA, 20 bp, Artificial Sequence
  Synthetic oligonucleotide; GAG chr11 5333671 5333690 5333687 +
gagaactgcatcaagaggag

SEQ ID NO: 21077 - DNA, 20 bp, Artificial Sequence
  Synthetic oligonucleotide; AGG chr11 5333672 5333691 5333688 +
agaactgcatcaagaggagg

SEQ ID NO: 21078 - DNA, 20 bp, Artificial Sequence
  Synthetic oligonucleotide; GAG chr11 5333674 5333693 5333690 +
aactgcatcaagaggaggag

SEQ ID NO: 21079 - DNA, 20 bp, Artificial Sequence
  Synthetic oligonucleotide; GAG chr11 5333676 5333695 5333692 +
ctgcatcaagaggaggagga

SEQ ID NO: 21080 - DNA, 20 bp, Artificial Sequence
  Synthetic oligonucleotide; AGG chr11 5333677 5333696 5333693 +
tgcatcaagaggaggaggag

SEQ ID NO: 21081 - DNA, 20 bp, Artificial Sequence
  Synthetic oligonucleotide; TAG chr11 5333680 5333699 5333696 +
atcaagaggaggaggagagg

SEQ ID NO: 21082 - DNA, 20 bp, Artificial Sequence
  Synthetic oligonucleotide; TAG chr11 5333685 5333704 5333701 +
gaggaggaggagaggtagta

SEQ ID NO: 21083 - DNA, 20 bp, Artificial Sequence
  Synthetic oligonucleotide; GAG chr11 5333687 5333706 5333703 +
ggaggaggagaggtagtata

SEQ ID NO: 21084 - DNA, 20 bp, Artificial Sequence
  Synthetic oligonucleotide; CAG chr11 5333695 5333714 5333711 +
agaggtagtatagagaccta

SEQ ID NO: 21085 - DNA, 20 bp, Artificial Sequence
  Synthetic oligonucleotide; AGG chr11 5333696 5333715 5333712 +
gaggtagtatagagacctac

SEQ ID NO: 21086 - DNA, 20 bp, Artificial Sequence
  Synthetic oligonucleotide; TGG chr11 5333704 5333723 5333720 +
atagagacctacaggtgtca

SEQ ID NO: 21087 - DNA, 20 bp, Artificial Sequence
  Synthetic oligonucleotide; CAG chr11 5333732 5333751 5333748 +
ccaccctgcacattcactcc

SEQ ID NO: 21088 - DNA, 20 bp, Artificial Sequence
  Synthetic oligonucleotide; GAG chr11 5333734 5333753 5333750 +
accctgcacattcactccca

SEQ ID NO: 21089 - DNA, 20 bp, Artificial Sequence
  Synthetic oligonucleotide; CAG chr11 5333738 5333757 5333754 +
tgcacattcactcccagagt

SEQ ID NO: 21090 - DNA, 20 bp, Artificial Sequence
  Synthetic oligonucleotide; AAG chr11 5333766 5333785 5333782 +
ttcctctcctgcctcttcca

SEQ ID NO: 21091 - DNA, 20 bp, Artificial Sequence
  Synthetic oligonucleotide; TAG chr11 5333782 5333801 5333798 +
tccaaagaaaatttctattg

SEQ ID NO: 21092 - DNA, 20 bp, Artificial Sequence
  Synthetic oligonucleotide; AGG chr11 5333783 5333802 5333799 +
ccaaagaaaatttctattgt

SEQ ID NO: 21093 - DNA, 20 bp, Artificial Sequence
  Synthetic oligonucleotide; AAG chr11 5333788 5333807 5333804 +
gaaaatttctattgtaggaa

SEQ ID NO: 21094 - DNA, 20 bp, Artificial Sequence
  Synthetic oligonucleotide; TAG chr11 5333800 5333819 5333816 +
tgtaggaaaagtgttcttaa

SEQ ID NO: 21095 - DNA, 20 bp, Artificial Sequence
  Synthetic oligonucleotide; GAG chr11 5333807 5333826 5333823 +
aaagtgttcttaatagcgct

SEQ ID NO: 21096 - DNA, 20 bp, Artificial Sequence
  Synthetic oligonucleotide; AAG chr11 5333815 5333834 5333831 +
cttaatagcgctgagctaac

SEQ ID NO: 21097 - DNA, 20 bp, Artificial Sequence
  Synthetic oligonucleotide; TAG chr11 5333824 5333843 5333840 +
gctgagctaacaagaacttc

SEQ ID NO: 21098 - DNA, 20 bp, Artificial Sequence
  Synthetic oligonucleotide; CAG chr11 5333836 5333855 5333852 +
agaacttctagatatcaact

SEQ ID NO: 21099 - DNA, 20 bp, Artificial Sequence
  Synthetic oligonucleotide; AAG chr11 5333858 5333877 5333874 +
gaactcttaattattcatgt

SEQ ID NO: 21100 - DNA, 20 bp, Artificial Sequence
  Synthetic oligonucleotide; CAG chr11 5333892 5333911 5333908 +
taaaactactgtttttattt

SEQ ID NO: 21101 - DNA, 20 bp, Artificial Sequence
  Synthetic oligonucleotide; GAG chr11 5333894 5333913 5333910 +
aaactactgtttttatttca

SEQ ID NO: 21102 - DNA, 20 bp, Artificial Sequence
  Synthetic oligonucleotide; TAG chr11 5333908 5333927 5333924 +
atttcagagttaacatttgc

SEQ ID NO: 21103 - DNA, 20 bp, Artificial Sequence
  Synthetic oligonucleotide; AGG chr11 5333909 5333928 5333925 +
tttcagagttaacatttgct

SEQ ID NO: 21104 - DNA, 20 bp, Artificial Sequence
  Synthetic oligonucleotide; AAG chr11 5333912 5333931 5333928 +
cagagttaacatttgctagg

SEQ ID NO: 21105 - DNA, 20 bp, Artificial Sequence
  Synthetic oligonucleotide; TGG chr11 5333929 5333948 5333945 +
aggaagttgaacttttatgt

SEQ ID NO: 21106 - DNA, 20 bp, Artificial Sequence
  Synthetic oligonucleotide; GAG chr11 5333931 5333950 5333947 +
gaagttgaacttttatgttg

SEQ ID NO: 21107 - DNA, 20 bp, Artificial Sequence
  Synthetic oligonucleotide; AGG chr11 5333932 5333951 5333948 +
aagttgaacttttatgttgg

SEQ ID NO: 21108 - DNA, 20 bp, Artificial Sequence
  Synthetic oligonucleotide; CGG chr11 5333945 5333964 5333961 +
atgttggaggttgatacacc

SEQ ID NO: 21109 - DNA, 20 bp, Artificial Sequence
  Synthetic oligonucleotide; CAG chr11 5333948 5333967 5333964 +
ttggaggttgatacacccgg

SEQ ID NO: 21110 - DNA, 20 bp, Artificial Sequence
  Synthetic oligonucleotide; TAG chr11 5333957 5333976 5333973 +
gatacacccggcagaatctg

SEQ ID NO: 21111 - DNA, 20 bp, Artificial Sequence
  Synthetic oligonucleotide; CAG chr11 5333963 5333982 5333979 +
cccggcagaatctgtagata

SEQ ID NO: 21112 - DNA, 20 bp, Artificial Sequence
  Synthetic oligonucleotide; TGG chr11 5334010 5334029 5334026 +
accctcttgcaacaactatg

SEQ ID NO: 21113 - DNA, 20 bp, Artificial Sequence
  Synthetic oligonucleotide; TGG chr11 5334013 5334032 5334029 +
ctcttgcaacaactatgtgg

SEQ ID NO: 21114 - DNA, 20 bp, Artificial Sequence
  Synthetic oligonucleotide; AAG chr11 5334016 5334035 5334032 +
ttgcaacaactatgtggtgg

SEQ ID NO: 21115 - DNA, 20 bp, Artificial Sequence
  Synthetic oligonucleotide; GAG chr11 5334018 5334037 5334034 +
gcaacaactatgtggtggaa

SEQ ID NO: 21116 - DNA, 20 bp, Artificial Sequence
  Synthetic oligonucleotide; AAG chr11 5334026 5334045 5334042 +
tatgtggtggaagagaatcc

SEQ ID NO: 21117 - DNA, 20 bp, Artificial Sequence
  Synthetic oligonucleotide; AAG chr11 5334029 5334048 5334045 +
gtggtggaagagaatccaag

SEQ ID NO: 21118 - DNA, 20 bp, Artificial Sequence
  Synthetic oligonucleotide; TAG chr11 5334034 5334053 5334050 +
ggaagagaatccaagaagat

SEQ ID NO: 21119 - DNA, 20 bp, Artificial Sequence
  Synthetic oligonucleotide; TAG chr11 5334077 5334096 5334093 +
accttcattccattctccca

SEQ ID NO: 21120 - DNA, 20 bp, Artificial Sequence
  Synthetic oligonucleotide; TAG chr11 5334084 5334103 5334100 +
ttccattctcccatagtcac

SEQ ID NO: 21121 - DNA, 20 bp, Artificial Sequence
  Synthetic oligonucleotide; GAG chr11 5334086 5334105 5334102 +
ccattctcccatagtcacta

SEQ ID NO: 21122 - DNA, 20 bp, Artificial Sequence
  Synthetic oligonucleotide; TGG chr11 5334096 5334115 5334112 +
atagtcactagagcctgacc

SEQ ID NO: 21123 - DNA, 20 bp, Artificial Sequence
  Synthetic oligonucleotide; GGG chr11 5334097 5334116 5334113 +
tagtcactagagcctgacct

SEQ ID NO: 21124 - DNA, 20 bp, Artificial Sequence
  Synthetic oligonucleotide; GGG chr11 5334098 5334117 5334114 +
agtcactagagcctgacctg

SEQ ID NO: 21125 - DNA, 20 bp, Artificial Sequence
  Synthetic oligonucleotide; CAG chr11 5334104 5334123 5334120 +
tagagcctgacctggggtat

SEQ ID NO: 21126 - DNA, 20 bp, Artificial Sequence
  Synthetic oligonucleotide; AAG chr11 5334112 5334131 5334128 +
gacctggggtatcagaaatt

SEQ ID NO: 21127 - DNA, 20 bp, Artificial Sequence
  Synthetic oligonucleotide; AGG chr11 5334113 5334132 5334129 +
acctggggtatcagaaatta

SEQ ID NO: 21128 - DNA, 20 bp, Artificial Sequence
  Synthetic oligonucleotide; GGG chr11 5334114 5334133 5334130 +
cctggggtatcagaaattaa

SEQ ID NO: 21129 - DNA, 20 bp, Artificial Sequence
  Synthetic oligonucleotide; GGG chr11 5334115 5334134 5334131 +
ctggggtatcagaaattaag

SEQ ID NO: 21130 - DNA, 20 bp, Artificial Sequence
  Synthetic oligonucleotide; GAG chr11 5334117 5334136 5334133 +
ggggtatcagaaattaaggg

SEQ ID NO: 21131 - DNA, 20 bp, Artificial Sequence
  Synthetic oligonucleotide; GAG chr11 5334119 5334138 5334135 +
ggtatcagaaattaagggga

SEQ ID NO: 21132 - DNA, 20 bp, Artificial Sequence
  Synthetic oligonucleotide; AGG chr11 5334120 5334139 5334136 +
gtatcagaaattaaggggag

SEQ ID NO: 21133 - DNA, 20 bp, Artificial Sequence
  Synthetic oligonucleotide; GAG chr11 5334131 5334150 5334147 +
taaggggagaggtaattgct

SEQ ID NO: 21134 - DNA, 20 bp, Artificial Sequence
  Synthetic oligonucleotide; TGG chr11 5334137 5334156 5334153 +
gagaggtaattgctgagtcc

SEQ ID NO: 21135 - DNA, 20 bp, Artificial Sequence
  Synthetic oligonucleotide; TAG chr11 5334142 5334161 5334158 +
gtaattgctgagtcctggtg

SEQ ID NO: 21136 - DNA, 20 bp, Artificial Sequence
  Synthetic oligonucleotide; TGG chr11 5334149 5334168 5334165 +
ctgagtcctggtgtagaaat

SEQ ID NO: 21137 - DNA, 20 bp, Artificial Sequence
  Synthetic oligonucleotide; TGG chr11 5334158 5334177 5334174 +
ggtgtagaaattggtttaaa

SEQ ID NO: 21138 - DNA, 20 bp, Artificial Sequence
  Synthetic oligonucleotide; AAG chr11 5334169 5334188 5334185 +
tggtttaaatggtatctctg

SEQ ID NO: 21139 - DNA, 20 bp, Artificial Sequence
  Synthetic oligonucleotide; CAG chr11 5334180 5334199 5334196 +
gtatctctgaagactgctaa

SEQ ID NO: 21140 - DNA, 20 bp, Artificial Sequence
  Synthetic oligonucleotide; AGG chr11 5334181 5334200 5334197 +
tatctctgaagactgctaac

SEQ ID NO: 21141 - DNA, 20 bp, Artificial Sequence
  Synthetic oligonucleotide; GGG chr11 5334182 5334201 5334198 +
atctctgaagactgctaaca

SEQ ID NO: 21142 - DNA, 20 bp, Artificial Sequence
  Synthetic oligonucleotide; GAG chr11 5334194 5334213 5334210 +
tgctaacagggttaatttgt

SEQ ID NO: 21143 - DNA, 20 bp, Artificial Sequence
  Synthetic oligonucleotide; AGG chr11 5334195 5334214 5334211 +
gctaacagggttaatttgtg

SEQ ID NO: 21144 - DNA, 20 bp, Artificial Sequence
  Synthetic oligonucleotide; CAG chr11 5334222 5334241 5334238 +
ttgtattcaaaattgttccc

SEQ ID NO: 21145 - DNA, 20 bp, Artificial Sequence
  Synthetic oligonucleotide; TGG chr11 5334240 5334259 5334256 +
cccagtatctgtcttgatgc

SEQ ID NO: 21146 - DNA, 20 bp, Artificial Sequence
  Synthetic oligonucleotide; TAG chr11 5334248 5334267 5334264 +
ctgtcttgatgctggataat

SEQ ID NO: 21147 - DNA, 20 bp, Artificial Sequence
  Synthetic oligonucleotide; AGG chr11 5334249 5334268 5334265 +
tgtcttgatgctggataatt

SEQ ID NO: 21148 - DNA, 20 bp, Artificial Sequence
  Synthetic oligonucleotide; TGG chr11 5334256 5334275 5334272 +
atgctggataattaggctac

SEQ ID NO: 21149 - DNA, 20 bp, Artificial Sequence
  Synthetic oligonucleotide; GGG chr11 5334257 5334276 5334273 +
tgctggataattaggctact

SEQ ID NO: 21150 - DNA, 20 bp, Artificial Sequence
  Synthetic oligonucleotide; AAG chr11 5334272 5334291 5334288 +
ctactgggatattttttttc

SEQ ID NO: 21151 - DNA, 20 bp, Artificial Sequence
  Synthetic oligonucleotide; TGG chr11 5334282 5334301 5334298 +
attttttttcaagcctcctt

SEQ ID NO: 21152 - DNA, 20 bp, Artificial Sequence
  Synthetic oligonucleotide; GAG chr11 5334284 5334303 5334300 +
tttttttcaagcctcctttg

SEQ ID NO: 21153 - DNA, 20 bp, Artificial Sequence
  Synthetic oligonucleotide; AAG chr11 5334287 5334306 5334303 +
ttttcaagcctcctttggag

SEQ ID NO: 21154 - DNA, 20 bp, Artificial Sequence
  Synthetic oligonucleotide; AGG chr11 5334288 5334307 5334304 +
tttcaagcctcctttggaga

SEQ ID NO: 21155 - DNA, 20 bp, Artificial Sequence
  Synthetic oligonucleotide; AAG chr11 5334291 5334310 5334307 +
caagcctcctttggagaagg

SEQ ID NO: 21156 - DNA, 20 bp, Artificial Sequence
  Synthetic oligonucleotide; TGG chr11 5334294 5334313 5334310 +
gcctcctttggagaaggaag

SEQ ID NO: 21157 - DNA, 20 bp, Artificial Sequence
  Synthetic oligonucleotide; GGG chr11 5334295 5334314 5334311 +
cctcctttggagaaggaagt

SEQ ID NO: 21158 - DNA, 20 bp, Artificial Sequence
  Synthetic oligonucleotide; CAG chr11 5334301 5334320 5334317 +
ttggagaaggaagtgggctc

SEQ ID NO: 21159 - DNA, 20 bp, Artificial Sequence
  Synthetic oligonucleotide; AAG chr11 5334317 5334336 5334333 +
gctccagaactgtgttctta

SEQ ID NO: 21160 - DNA, 20 bp, Artificial Sequence
  Synthetic oligonucleotide; AAG chr11 5334340 5334359 5334356 +
ccccatattttctttgcaaa

SEQ ID NO: 21161 - DNA, 20 bp, Artificial Sequence
  Synthetic oligonucleotide; CAG chr11 5334347 5334366 5334363 +
ttttctttgcaaaaagaaaa

SEQ ID NO: 21162 - DNA, 20 bp, Artificial Sequence
  Synthetic oligonucleotide; TAG chr11 5334355 5334374 5334371 +
gcaaaaagaaaacagaattg

SEQ ID NO: 21163 - DNA, 20 bp, Artificial Sequence
  Synthetic oligonucleotide; CAG chr11 5334365 5334384 5334381 +
aacagaattgtagcttcatc

SEQ ID NO: 21164 - DNA, 20 bp, Artificial Sequence
  Synthetic oligonucleotide; TGG chr11 5334372 5334391 5334388 +
ttgtagcttcatccagcaca

SEQ ID NO: 21165 - DNA, 20 bp, Artificial Sequence
  Synthetic oligonucleotide; AAG chr11 5334375 5334394 5334391 +
tagcttcatccagcacatgg

SEQ ID NO: 21166 - DNA, 20 bp, Artificial Sequence
  Synthetic oligonucleotide; AAG chr11 5334424 5334443 5334440 +
gtatgattccccacctcaaa

SEQ ID NO: 21167 - DNA, 20 bp, Artificial Sequence
  Synthetic oligonucleotide; AAG chr11 5334427 5334446 5334443 +
tgattccccacctcaaaaag

SEQ ID NO: 21168 - DNA, 20 bp, Artificial Sequence
  Synthetic oligonucleotide; AAG chr11 5334438 5334457 5334454 +
ctcaaaaagaagataccgtg

SEQ ID NO: 21169 - DNA, 20 bp, Artificial Sequence
  Synthetic oligonucleotide; TAG chr11 5334467 5334486 5334483 +
tttgttattccttaaccctg

SEQ ID NO: 21170 - DNA, 20 bp, Artificial Sequence
  Synthetic oligonucleotide; AAG chr11 5334475 5334494 5334491 +
tccttaaccctgtagccaat

SEQ ID NO: 21171 - DNA, 20 bp, Artificial Sequence
  Synthetic oligonucleotide; TAG chr11 5334489 5334508 5334505 +
gccaataagctcactcaact

SEQ ID NO: 21172 - DNA, 20 bp, Artificial Sequence
  Synthetic oligonucleotide; AAG chr11 5334495 5334514 5334511 +
aagctcactcaacttagaca

SEQ ID NO: 21173 - DNA, 20 bp, Artificial Sequence
  Synthetic oligonucleotide; TGG chr11 5334528 5334547 5334544 +
cctcacacttaatcttttct

SEQ ID NO: 21174 - DNA, 20 bp, Artificial Sequence
  Synthetic oligonucleotide; AAG chr11 5334539 5334558 5334555 +
atcttttcttggtttcaaat

SEQ ID NO: 21175 - DNA, 20 bp, Artificial Sequence
  Synthetic oligonucleotide; GAG chr11 5334568 5334587 5334584 +
tgttatatatactcacaaat

SEQ ID NO: 21176 - DNA, 20 bp, Artificial Sequence
  Synthetic oligonucleotide; AAG chr11 5334581 5334600 5334597 +
cacaaatgagtgctgctgat

SEQ ID NO: 21177 - DNA, 20 bp, Artificial Sequence
  Synthetic oligonucleotide; CAG chr11 5334594 5334613 5334610 +
tgctgataagttctttcaaa

SEQ ID NO: 21178 - DNA, 20 bp, Artificial Sequence
  Synthetic oligonucleotide; AAG chr11 5334598 5334617 5334614 +
gataagttctttcaaacagt

SEQ ID NO: 21179 - DNA, 20 bp, Artificial Sequence
  Synthetic oligonucleotide; TGG chr11 5334617 5334636 5334633 +
taagcttgttttctgtctct

SEQ ID NO: 21180 - DNA, 20 bp, Artificial Sequence
  Synthetic oligonucleotide; AAG chr11 5334621 5334640 5334637 +
cttgttttctgtctcttggt

SEQ ID NO: 21181 - DNA, 20 bp, Artificial Sequence
  Synthetic oligonucleotide; AAG chr11 5334632 5334651 5334648 +
tctcttggtaagtcttgccc

SEQ ID NO: 21182 - DNA, 20 bp, Artificial Sequence
  Synthetic oligonucleotide; CAG chr11 5334638 5334657 5334654 +
ggtaagtcttgcccaagaat

SEQ ID NO: 21183 - DNA, 20 bp, Artificial Sequence
  Synthetic oligonucleotide; GAG chr11 5334640 5334659 5334656 +
taagtcttgcccaagaatca

SEQ ID NO: 21184 - DNA, 20 bp, Artificial Sequence
  Synthetic oligonucleotide; TGG chr11 5334653 5334672 5334669 +
agaatcagagttactgcttc

SEQ ID NO: 21185 - DNA, 20 bp, Artificial Sequence
  Synthetic oligonucleotide; GAG chr11 5334655 5334674 5334671 +
aatcagagttactgcttctg

SEQ ID NO: 21186 - DNA, 20 bp, Artificial Sequence
  Synthetic oligonucleotide; AAG chr11 5334669 5334688 5334685 +
cttctggagcaatataaatc

SEQ ID NO: 21187 - DNA, 20 bp, Artificial Sequence
  Synthetic oligonucleotide; AAG chr11 5334689 5334708 5334705 +
aagtttaaaaaattttattt

SEQ ID NO: 21188 - DNA, 20 bp, Artificial Sequence
  Synthetic oligonucleotide; TAG chr11 5334699 5334718 5334715 +
aattttatttaagtgtcctg

SEQ ID NO: 21189 - DNA, 20 bp, Artificial Sequence
  Synthetic oligonucleotide; AAG chr11 5334712 5334731 5334728 +
tgtcctgtagtaatgttaaa

SEQ ID NO: 21190 - DNA, 20 bp, Artificial Sequence
  Synthetic oligonucleotide; AGG chr11 5334713 5334732 5334729 +
gtcctgtagtaatgttaaaa

SEQ ID NO: 21191 - DNA, 20 bp, Artificial Sequence
  Synthetic oligonucleotide; GGG chr11 5334714 5334733 5334730 +
tcctgtagtaatgttaaaaa

SEQ ID NO: 21192 - DNA, 20 bp, Artificial Sequence
  Synthetic oligonucleotide; GGG chr11 5334715 5334734 5334731 +
cctgtagtaatgttaaaaag

SEQ ID NO: 21193 - DNA, 20 bp, Artificial Sequence
  Synthetic oligonucleotide; TGG chr11 5334721 5334740 5334737 +
gtaatgttaaaaaggggaca

SEQ ID NO: 21194 - DNA, 20 bp, Artificial Sequence
  Synthetic oligonucleotide; TGG chr11 5334724 5334743 5334740 +
atgttaaaaaggggacatgg

SEQ ID NO: 21195 - DNA, 20 bp, Artificial Sequence
  Synthetic oligonucleotide; GAG chr11 5334726 5334745 5334742 +
gttaaaaaggggacatggtg

SEQ ID NO: 21196 - DNA, 20 bp, Artificial Sequence
  Synthetic oligonucleotide; AGG chr11 5334727 5334746 5334743 +
ttaaaaaggggacatggtgg

SEQ ID NO: 21197 - DNA, 20 bp, Artificial Sequence
  Synthetic oligonucleotide; TGG chr11 5334744 5334763 5334760 +
tggaggtattctttaatccc

SEQ ID NO: 21198 - DNA, 20 bp, Artificial Sequence
  Synthetic oligonucleotide; TAG chr11 5334785 5334804 5334801 +
acttgaatacaatcatctca

SEQ ID NO: 21199 - DNA, 20 bp, Artificial Sequence
  Synthetic oligonucleotide; CAG chr11 5334793 5334812 5334809 +
acaatcatctcatagtctgt

SEQ ID NO: 21200 - DNA, 20 bp, Artificial Sequence
  Synthetic oligonucleotide; GAG chr11 5334795 5334814 5334811 +
aatcatctcatagtctgtca

SEQ ID NO: 21201 - DNA, 20 bp, Artificial Sequence
  Synthetic oligonucleotide; AAG chr11 5334802 5334821 5334818 +
tcatagtctgtcagagaaat

SEQ ID NO: 21202 - DNA, 20 bp, Artificial Sequence
  Synthetic oligonucleotide; AGG chr11 5334803 5334822 5334819 +
catagtctgtcagagaaata

SEQ ID NO: 21203 - DNA, 20 bp, Artificial Sequence
  Synthetic oligonucleotide; GAG chr11 5334810 5334829 5334826 +
tgtcagagaaataaggatct

SEQ ID NO: 21204 - DNA, 20 bp, Artificial Sequence
  Synthetic oligonucleotide; CAG chr11 5334830 5334849 5334846 +
gagaatttctattgtctcat

SEQ ID NO: 21205 - DNA, 20 bp, Artificial Sequence
  Synthetic oligonucleotide; TGG chr11 5334854 5334873 5334870 +
cttaaatcctaaatttatcc

SEQ ID NO: 21206 - DNA, 20 bp, Artificial Sequence
  Synthetic oligonucleotide; TAG chr11 5334861 5334880 5334877 +
cctaaatttatcctggaact

SEQ ID NO: 21207 - DNA, 20 bp, Artificial Sequence
  Synthetic oligonucleotide; GAG chr11 5334873 5334892 5334889 +
ctggaacttagcccaactat

SEQ ID NO: 21208 - DNA, 20 bp, Artificial Sequence
  Synthetic oligonucleotide; GAG chr11 5334886 5334905 5334902 +
caactatgagattttaaaat

SEQ ID NO: 21209 - DNA, 20 bp, Artificial Sequence
  Synthetic oligonucleotide; TGG chr11 5334891 5334910 5334907 +
atgagattttaaaatgagta

SEQ ID NO: 21210 - DNA, 20 bp, Artificial Sequence
  Synthetic oligonucleotide; GGG chr11 5334892 5334911 5334908 +
tgagattttaaaatgagtat

SEQ ID NO: 21211 - DNA, 20 bp, Artificial Sequence
  Synthetic oligonucleotide; TGG chr11 5334902 5334921 5334918 +
aaatgagtatgggtgcaatg

SEQ ID NO: 21212 - DNA, 20 bp, Artificial Sequence
  Synthetic oligonucleotide; GAG chr11 5334913 5334932 5334929 +
ggtgcaatgtggtgaaccat

SEQ ID NO: 21213 - DNA, 20 bp, Artificial Sequence
  Synthetic oligonucleotide; AGG chr11 5334914 5334933 5334930 +
gtgcaatgtggtgaaccatg

SEQ ID NO: 21214 - DNA, 20 bp, Artificial Sequence
  Synthetic oligonucleotide; GGG chr11 5334915 5334934 5334931 +
tgcaatgtggtgaaccatga

SEQ ID NO: 21215 - DNA, 20 bp, Artificial Sequence
  Synthetic oligonucleotide; TGG chr11 5334926 5334945 5334942 +
gaaccatgagggtcacattt

SEQ ID NO: 21216 - DNA, 20 bp, Artificial Sequence
  Synthetic oligonucleotide; CAG chr11 5334946 5334965 5334962 +
tggtgcctgacatttcacat

SEQ ID NO: 21217 - DNA, 20 bp, Artificial Sequence
  Synthetic oligonucleotide; AAG chr11 5334951 5334970 5334967 +
cctgacatttcacatcagtt

SEQ ID NO: 21218 - DNA, 20 bp, Artificial Sequence
  Synthetic oligonucleotide; TAG chr11 5334979 5334998 5334995 +
cctgaactgcattctgctca

SEQ ID NO: 21219 - DNA, 20 bp, Artificial Sequence
  Synthetic oligonucleotide; AGG chr11 5334980 5334999 5334996 +
ctgaactgcattctgctcat

SEQ ID NO: 21220 - DNA, 20 bp, Artificial Sequence
  Synthetic oligonucleotide; AAG chr11 5334996 5335015 5335012 +
tcataggtcttcctaaatgt

SEQ ID NO: 21221 - DNA, 20 bp, Artificial Sequence
  Synthetic oligonucleotide; CAG chr11 5334999 5335018 5335015 +
taggtcttcctaaatgtaag

SEQ ID NO: 21222 - DNA, 20 bp, Artificial Sequence
  Synthetic oligonucleotide; TAG chr11 5335004 5335023 5335020 +
cttcctaaatgtaagcagaa

SEQ ID NO: 21223 - DNA, 20 bp, Artificial Sequence
  Synthetic oligonucleotide; TAG chr11 5335007 5335026 5335023 +
cctaaatgtaagcagaatag

SEQ ID NO: 21224 - DNA, 20 bp, Artificial Sequence
  Synthetic oligonucleotide; TAG chr11 5335010 5335029 5335026 +
aaatgtaagcagaatagtag

SEQ ID NO: 21225 - DNA, 20 bp, Artificial Sequence
  Synthetic oligonucleotide; AGG chr11 5335011 5335030 5335027 +
aatgtaagcagaatagtagt

SEQ ID NO: 21226 - DNA, 20 bp, Artificial Sequence
  Synthetic oligonucleotide; AAG chr11 5335027 5335046 5335043 +
tagtaggaaatcatgattaa

SEQ ID NO: 21227 - DNA, 20 bp, Artificial Sequence
  Synthetic oligonucleotide; CAG chr11 5335031 5335050 5335047 +
aggaaatcatgattaaaagt

SEQ ID NO: 21228 - DNA, 20 bp, Artificial Sequence
  Synthetic oligonucleotide; TGG chr11 5335038 5335057 5335054 +
catgattaaaagtcagtctc

SEQ ID NO: 21229 - DNA, 20 bp, Artificial Sequence
  Synthetic oligonucleotide; TGG chr11 5335044 5335063 5335060 +
taaaagtcagtctctggaaa

SEQ ID NO: 21230 - DNA, 20 bp, Artificial Sequence
  Synthetic oligonucleotide; AAG chr11 5335050 5335069 5335066 +
tcagtctctggaaatggctt

SEQ ID NO: 21231 - DNA, 20 bp, Artificial Sequence
  Synthetic oligonucleotide; AAG chr11 5335082 5335101 5335098 +
ttgtgtgtcctctttgtact

SEQ ID NO: 21232 - DNA, 20 bp, Artificial Sequence
  Synthetic oligonucleotide; TAG chr11 5335093 5335112 5335109 +
ctttgtactaagttaaaatt

SEQ ID NO: 21233 - DNA, 20 bp, Artificial Sequence
  Synthetic oligonucleotide; AGG chr11 5335094 5335113 5335110 +
tttgtactaagttaaaattt

SEQ ID NO: 21234 - DNA, 20 bp, Artificial Sequence
  Synthetic oligonucleotide; TGG chr11 5335099 5335118 5335115 +
actaagttaaaatttaggtc

SEQ ID NO: 21235 - DNA, 20 bp, Artificial Sequence
  Synthetic oligonucleotide; TAG chr11 5335109 5335128 5335125 +
aatttaggtctggattgatt

SEQ ID NO: 21236 - DNA, 20 bp, Artificial Sequence
  Synthetic oligonucleotide; AGG chr11 5335110 5335129 5335126 +
atttaggtctggattgattt

SEQ ID NO: 21237 - DNA, 20 bp, Artificial Sequence
  Synthetic oligonucleotide; GGG chr11 5335111 5335130 5335127 +
tttaggtctggattgattta

SEQ ID NO: 21238 - DNA, 20 bp, Artificial Sequence
  Synthetic oligonucleotide; GGG chr11 5335112 5335131 5335128 +
ttaggtctggattgatttag

SEQ ID NO: 21239 - DNA, 20 bp, Artificial Sequence
  Synthetic oligonucleotide; GAG chr11 5335114 5335133 5335130 +
aggtctggattgatttaggg

SEQ ID NO: 21240 - DNA, 20 bp, Artificial Sequence
  Synthetic oligonucleotide; GAG chr11 5335137 5335156 5335153 +
ccatgctttgaacttaaaat

SEQ ID NO: 21241 - DNA, 20 bp, Artificial Sequence
  Synthetic oligonucleotide; AGG chr11 5335138 5335157 5335154 +
catgctttgaacttaaaatg

SEQ ID NO: 21242 - DNA, 20 bp, Artificial Sequence
  Synthetic oligonucleotide; GAG chr11 5335142 5335161 5335158 +
ctttgaacttaaaatgaggt

SEQ ID NO: 21243 - DNA, 20 bp, Artificial Sequence
  Synthetic oligonucleotide; AGG chr11 5335143 5335162 5335159 +
tttgaacttaaaatgaggtg

SEQ ID NO: 21244 - DNA, 20 bp, Artificial Sequence
  Synthetic oligonucleotide; TAG chr11 5335146 5335165 5335162 +
gaacttaaaatgaggtgagg

SEQ ID NO: 21245 - DNA, 20 bp, Artificial Sequence
  Synthetic oligonucleotide; AAG chr11 5335150 5335169 5335166 +
ttaaaatgaggtgaggtagt

SEQ ID NO: 21246 - DNA, 20 bp, Artificial Sequence
  Synthetic oligonucleotide; GAG chr11 5335158 5335177 5335174 +
aggtgaggtagtaagaccct

SEQ ID NO: 21247 - DNA, 20 bp, Artificial Sequence
  Synthetic oligonucleotide; CAG chr11 5335177 5335196 5335193 +
tgagataactgatttaattt

SEQ ID NO: 21248 - DNA, 20 bp, Artificial Sequence
  Synthetic oligonucleotide; AGG chr11 5335178 5335197 5335194 +
gagataactgatttaatttc

SEQ ID NO: 21249 - DNA, 20 bp, Artificial Sequence
  Synthetic oligonucleotide; TAG chr11 5335198 5335217 5335214 +
aggctgccctcccatttcat

SEQ ID NO: 21250 - DNA, 20 bp, Artificial Sequence
  Synthetic oligonucleotide; TAG chr11 5335201 5335220 5335217 +
ctgccctcccatttcattag

SEQ ID NO: 21251 - DNA, 20 bp, Artificial Sequence
  Synthetic oligonucleotide; AGG chr11 5335202 5335221 5335218 +
tgccctcccatttcattagt

SEQ ID NO: 21252 - DNA, 20 bp, Artificial Sequence
  Synthetic oligonucleotide; TGG chr11 5335222 5335241 5335238 +
aggtatattgaccctctcac

SEQ ID NO: 21253 - DNA, 20 bp, Artificial Sequence
  Synthetic oligonucleotide; CAG chr11 5335225 5335244 5335241 +
tatattgaccctctcactgg

SEQ ID NO: 21254 - DNA, 20 bp, Artificial Sequence
  Synthetic oligonucleotide; TGG chr11 5335266 5335285 5335282 +
cataaatatgactctattcc

SEQ ID NO: 21255 - DNA, 20 bp, Artificial Sequence
  Synthetic oligonucleotide; TAG chr11 5335284 5335303 5335300 +
cctggaaacatcacttatct

SEQ ID NO: 21256 - DNA, 20 bp, Artificial Sequence
  Synthetic oligonucleotide; CAG chr11 5335289 5335308 5335305 +
aaacatcacttatcttagaa

SEQ ID NO: 21257 - DNA, 20 bp, Artificial Sequence
  Synthetic oligonucleotide; AAG chr11 5335297 5335316 5335313 +
cttatcttagaacagatata

SEQ ID NO: 21258 - DNA, 20 bp, Artificial Sequence
  Synthetic oligonucleotide; CAG chr11 5335310 5335329 5335326 +
agatataaagtaatttcctg

SEQ ID NO: 21259 - DNA, 20 bp, Artificial Sequence
  Synthetic oligonucleotide; CAG chr11 5335320 5335339 5335336 +
taatttcctgcagactgccc

SEQ ID NO: 21260 - DNA, 20 bp, Artificial Sequence
  Synthetic oligonucleotide; GAG chr11 5335322 5335341 5335338 +
atttcctgcagactgcccca

SEQ ID NO: 21261 - DNA, 20 bp, Artificial Sequence
  Synthetic oligonucleotide; TGG chr11 5335326 5335345 5335342 +
cctgcagactgccccagagt

SEQ ID NO: 21262 - DNA, 20 bp, Artificial Sequence
  Synthetic oligonucleotide; GGG chr11 5335327 5335346 5335343 +
ctgcagactgccccagagtt

SEQ ID NO: 21263 - DNA, 20 bp, Artificial Sequence
  Synthetic oligonucleotide; AAG chr11 5335345 5335364 5335361 +
ttgggataaaatctcatgtg

SEQ ID NO: 21264 - DNA, 20 bp, Artificial Sequence
  Synthetic oligonucleotide; TGG chr11 5335357 5335376 5335373 +
ctcatgtgaagtgacactgt

SEQ ID NO: 21265 - DNA, 20 bp, Artificial Sequence
  Synthetic oligonucleotide; TGG chr11 5335360 5335379 5335376 +
atgtgaagtgacactgttgg

SEQ ID NO: 21266 - DNA, 20 bp, Artificial Sequence
  Synthetic oligonucleotide; GAG chr11 5335362 5335381 5335378 +
gtgaagtgacactgttggtg

SEQ ID NO: 21267 - DNA, 20 bp, Artificial Sequence
  Synthetic oligonucleotide; AGG chr11 5335363 5335382 5335379 +
tgaagtgacactgttggtgg

SEQ ID NO: 21268 - DNA, 20 bp, Artificial Sequence
  Synthetic oligonucleotide; AAG chr11 5335368 5335387 5335384 +
tgacactgttggtggaggat

SEQ ID NO: 21269 - DNA, 20 bp, Artificial Sequence
  Synthetic oligonucleotide; CAG chr11 5335375 5335394 5335391 +
gttggtggaggataagcctc

SEQ ID NO: 21270 - DNA, 20 bp, Artificial Sequence
  Synthetic oligonucleotide; GAG chr11 5335377 5335396 5335393 +
tggtggaggataagcctcca

SEQ ID NO: 21271 - DNA, 20 bp, Artificial Sequence
  Synthetic oligonucleotide; TGG chr11 5335382 5335401 5335398 +
gaggataagcctccagagaa

SEQ ID NO: 21272 - DNA, 20 bp, Artificial Sequence
  Synthetic oligonucleotide; GGG chr11 5335383 5335402 5335399 +
aggataagcctccagagaat

SEQ ID NO: 21273 - DNA, 20 bp, Artificial Sequence
  Synthetic oligonucleotide; CAG chr11 5335398 5335417 5335414 +
agaatgggaacaactattat

SEQ ID NO: 21274 - DNA, 20 bp, Artificial Sequence
  Synthetic oligonucleotide; AAG chr11 5335411 5335430 5335427 +
ctattatcagccaacactca

SEQ ID NO: 21275 - DNA, 20 bp, Artificial Sequence
  Synthetic oligonucleotide; AAG chr11 5335419 5335438 5335435 +
agccaacactcaaagtcacc

SEQ ID NO: 21276 - DNA, 20 bp, Artificial Sequence
  Synthetic oligonucleotide; TAG chr11 5335424 5335443 5335440 +
acactcaaagtcaccaagct

SEQ ID NO: 21277 - DNA, 20 bp, Artificial Sequence
  Synthetic oligonucleotide; AGG chr11 5335425 5335444 5335441 +
cactcaaagtcaccaagctt

SEQ ID NO: 21278 - DNA, 20 bp, Artificial Sequence
  Synthetic oligonucleotide; GGG chr11 5335426 5335445 5335442 +
actcaaagtcaccaagctta

SEQ ID NO: 21279 - DNA, 20 bp, Artificial Sequence
  Synthetic oligonucleotide; GGG chr11 5335427 5335446 5335443 +
ctcaaagtcaccaagcttag

SEQ ID NO: 21280 - DNA, 20 bp, Artificial Sequence
  Synthetic oligonucleotide; TGG chr11 5335433 5335452 5335449 +
gtcaccaagcttaggggcac

SEQ ID NO: 21281 - DNA, 20 bp, Artificial Sequence
  Synthetic oligonucleotide; GGG chr11 5335434 5335453 5335450 +
tcaccaagcttaggggcact

SEQ ID NO: 21282 - DNA, 20 bp, Artificial Sequence
  Synthetic oligonucleotide; GAG chr11 5335436 5335455 5335452 +
accaagcttaggggcactgg

SEQ ID NO: 21283 - DNA, 20 bp, Artificial Sequence
  Synthetic oligonucleotide; AGG chr11 5335437 5335456 5335453 +
ccaagcttaggggcactggg

SEQ ID NO: 21284 - DNA, 20 bp, Artificial Sequence
  Synthetic oligonucleotide; AAG chr11 5335440 5335459 5335456 +
agcttaggggcactgggagg

SEQ ID NO: 21285 - DNA, 20 bp, Artificial Sequence
  Synthetic oligonucleotide; TAG chr11 5335443 5335462 5335459 +
ttaggggcactgggaggaag

SEQ ID NO: 21286 - DNA, 20 bp, Artificial Sequence
  Synthetic oligonucleotide; AGG chr11 5335444 5335463 5335460 +
taggggcactgggaggaagt

SEQ ID NO: 21287 - DNA, 20 bp, Artificial Sequence
  Synthetic oligonucleotide; CAG chr11 5335447 5335466 5335463 +
gggcactgggaggaagtagg

SEQ ID NO: 21288 - DNA, 20 bp, Artificial Sequence
  Synthetic oligonucleotide; AGG chr11 5335448 5335467 5335464 +
ggcactgggaggaagtaggc

SEQ ID NO: 21289 - DNA, 20 bp, Artificial Sequence
  Synthetic oligonucleotide; GGG chr11 5335449 5335468 5335465 +
gcactgggaggaagtaggca

SEQ ID NO: 21290 - DNA, 20 bp, Artificial Sequence
  Synthetic oligonucleotide; TAG chr11 5335480 5335499 5335496 +
atatcttctatttccttaaa

SEQ ID NO: 21291 - DNA, 20 bp, Artificial Sequence
  Synthetic oligonucleotide; AAG chr11 5335515 5335534 5335531 +
ctctcattcatgtattttct

SEQ ID NO: 21292 - DNA, 20 bp, Artificial Sequence
  Synthetic oligonucleotide; AAG chr11 5335560 5335579 5335576 +
ttcctgctgtattgcctgtg

SEQ ID NO: 21293 - DNA, 20 bp, Artificial Sequence
  Synthetic oligonucleotide; AAG chr11 5335565 5335584 5335581 +
gctgtattgcctgtgaagta

SEQ ID NO: 21294 - DNA, 20 bp, Artificial Sequence
  Synthetic oligonucleotide; CAG chr11 5335578 5335597 5335594 +
tgaagtaaagtatcatgtca

SEQ ID NO: 21295 - DNA, 20 bp, Artificial Sequence
  Synthetic oligonucleotide; CAG chr11 5335581 5335600 5335597 +
agtaaagtatcatgtcacag

SEQ ID NO: 21296 - DNA, 20 bp, Artificial Sequence
  Synthetic oligonucleotide; CAG chr11 5335592 5335611 5335608 +
atgtcacagcagcataatct

SEQ ID NO: 21297 - DNA, 20 bp, Artificial Sequence
  Synthetic oligonucleotide; TGG chr11 5335597 5335616 5335613 +
acagcagcataatctcagat

SEQ ID NO: 21298 - DNA, 20 bp, Artificial Sequence
  Synthetic oligonucleotide; GGG chr11 5335598 5335617 5335614 +
cagcagcataatctcagatt

SEQ ID NO: 21299 - DNA, 20 bp, Artificial Sequence
  Synthetic oligonucleotide; AAG chr11 5335601 5335620 5335617 +
cagcataatctcagattggg

SEQ ID NO: 21300 - DNA, 20 bp, Artificial Sequence
  Synthetic oligonucleotide; AGG chr11 5335602 5335621 5335618 +
agcataatctcagattggga

SEQ ID NO: 21301 - DNA, 20 bp, Artificial Sequence
  Synthetic oligonucleotide; AAG chr11 5335625 5335644 5335641 +
acctccatctcctgtaataa

SEQ ID NO: 21302 - DNA, 20 bp, Artificial Sequence
  Synthetic oligonucleotide; CAG chr11 5335640 5335659 5335656 +
aataaaagccttctttgatg

SEQ ID NO: 21303 - DNA, 20 bp, Artificial Sequence
  Synthetic oligonucleotide; AAG chr11 5335654 5335673 5335670 +
ttgatgcagtgtttcctgac

SEQ ID NO: 21304 - DNA, 20 bp, Artificial Sequence
  Synthetic oligonucleotide; AGG chr11 5335655 5335674 5335671 +
tgatgcagtgtttcctgaca

SEQ ID NO: 21305 - DNA, 20 bp, Artificial Sequence
  Synthetic oligonucleotide; GGG chr11 5335656 5335675 5335672 +
gatgcagtgtttcctgacaa

SEQ ID NO: 21306 - DNA, 20 bp, Artificial Sequence
  Synthetic oligonucleotide; GAG chr11 5335668 5335687 5335684 +
cctgacaagggtcatccgct

SEQ ID NO: 21307 - DNA, 20 bp, Artificial Sequence
  Synthetic oligonucleotide; TAG chr11 5335709 5335728 5335725 +
tcacataacacaatatttat

SEQ ID NO: 21308 - DNA, 20 bp, Artificial Sequence
  Synthetic oligonucleotide; CAG chr11 5335733 5335752 5335749 +
atatctgtgctgaaaatact

SEQ ID NO: 21309 - DNA, 20 bp, Artificial Sequence
  Synthetic oligonucleotide; AGG chr11 5335734 5335753 5335750 +
tatctgtgctgaaaatactc

SEQ ID NO: 21310 - DNA, 20 bp, Artificial Sequence
  Synthetic oligonucleotide; CAG chr11 5335737 5335756 5335753 +
ctgtgctgaaaatactcagg

SEQ ID NO: 21311 - DNA, 20 bp, Artificial Sequence
  Synthetic oligonucleotide; TAG chr11 5335749 5335768 5335765 +
tactcaggcagccacattat

SEQ ID NO: 21312 - DNA, 20 bp, Artificial Sequence
  Synthetic oligonucleotide; TGG chr11 5335787 5335806 5335803 +
ttaaaatgaaaatatttttc

SEQ ID NO: 21313 - DNA, 20 bp, Artificial Sequence
  Synthetic oligonucleotide; TGG chr11 5335803 5335822 5335819 +
tttctggtcttcctattcct

SEQ ID NO: 21314 - DNA, 20 bp, Artificial Sequence
  Synthetic oligonucleotide; TGG chr11 5335810 5335829 5335826 +
tcttcctattccttggctct

SEQ ID NO: 21315 - DNA, 20 bp, Artificial Sequence
  Synthetic oligonucleotide; GAG chr11 5335816 5335835 5335832 +
tattccttggctcttggtct

SEQ ID NO: 21316 - DNA, 20 bp, Artificial Sequence
  Synthetic oligonucleotide; TGG chr11 5335822 5335841 5335838 +
ttggctcttggtctgagctc

SEQ ID NO: 21317 - DNA, 20 bp, Artificial Sequence
  Synthetic oligonucleotide; CAG chr11 5335830 5335849 5335846 +
tggtctgagctctggcatca

SEQ ID NO: 21318 - DNA, 20 bp, Artificial Sequence
  Synthetic oligonucleotide; TGG chr11 5335864 5335883 5335880 +
ctgctgccttatattacata

SEQ ID NO: 21319 - DNA, 20 bp, Artificial Sequence
  Synthetic oligonucleotide; TAG chr11 5335871 5335890 5335887 +
cttatattacatatggcata

SEQ ID NO: 21320 - DNA, 20 bp, Artificial Sequence
  Synthetic oligonucleotide; AGG chr11 5335872 5335891 5335888 +
ttatattacatatggcatat

SEQ ID NO: 21321 - DNA, 20 bp, Artificial Sequence
  Synthetic oligonucleotide; AAG chr11 5335875 5335894 5335891 +
tattacatatggcatatagg

SEQ ID NO: 21322 - DNA, 20 bp, Artificial Sequence
  Synthetic oligonucleotide; AGG chr11 5335876 5335895 5335892 +
attacatatggcatatagga

SEQ ID NO: 21323 - DNA, 20 bp, Artificial Sequence
  Synthetic oligonucleotide; AAG chr11 5335887 5335906 5335903 +
catataggaaggcaacattc

SEQ ID NO: 21324 - DNA, 20 bp, Artificial Sequence
  Synthetic oligonucleotide; AAG chr11 5335896 5335915 5335912 +
aggcaacattcaagtataat

SEQ ID NO: 21325 - DNA, 20 bp, Artificial Sequence
  Synthetic oligonucleotide; CAG chr11 5335917 5335936 5335933 +
agcttatatcgctaacgatt

SEQ ID NO: 21326 - DNA, 20 bp, Artificial Sequence
  Synthetic oligonucleotide; AGG chr11 5335918 5335937 5335934 +
gcttatatcgctaacgattc

SEQ ID NO: 21327 - DNA, 20 bp, Artificial Sequence
  Synthetic oligonucleotide; AAG chr11 5335921 5335940 5335937 +
tatatcgctaacgattcagg

SEQ ID NO: 21328 - DNA, 20 bp, Artificial Sequence
  Synthetic oligonucleotide; AGG chr11 5335922 5335941 5335938 +
atatcgctaacgattcagga

SEQ ID NO: 21329 - DNA, 20 bp, Artificial Sequence
  Synthetic oligonucleotide; TAG chr11 5335934 5335953 5335950 +
attcaggaaggtctctatcc

SEQ ID NO: 21330 - DNA, 20 bp, Artificial Sequence
  Synthetic oligonucleotide; AGG chr11 5335935 5335954 5335951 +
ttcaggaaggtctctatcct

SEQ ID NO: 21331 - DNA, 20 bp, Artificial Sequence
  Synthetic oligonucleotide; GAG chr11 5335954 5335973 5335970 +
taggatttttgctgtttgtt

SEQ ID NO: 21332 - DNA, 20 bp, Artificial Sequence
  Synthetic oligonucleotide; AAG chr11 5335958 5335977 5335974 +
atttttgctgtttgttgagt

SEQ ID NO: 21333 - DNA, 20 bp, Artificial Sequence
  Synthetic oligonucleotide; CAG chr11 5335977 5335996 5335993 +
taagtctgtgctgacaatac

SEQ ID NO: 21334 - DNA, 20 bp, Artificial Sequence
  Synthetic oligonucleotide; TAG chr11 5336003 5336022 5336019 +
cttttttttttttttctgtg

SEQ ID NO: 21335 - DNA, 20 bp, Artificial Sequence
  Synthetic oligonucleotide; CAG chr11 5336024 5336043 5336040 +
agtttgattctattatctgt

SEQ ID NO: 21336 - DNA, 20 bp, Artificial Sequence
  Synthetic oligonucleotide; TGG chr11 5336032 5336051 5336048 +
tctattatctgtcagccttc

SEQ ID NO: 21337 - DNA, 20 bp, Artificial Sequence
  Synthetic oligonucleotide; AAG chr11 5336053 5336072 5336069 +
ggattccacaattatctccg

SEQ ID NO: 21338 - DNA, 20 bp, Artificial Sequence
  Synthetic oligonucleotide; CAG chr11 5336081 5336100 5336097 +
atcctttaactcatcctcta

SEQ ID NO: 21339 - DNA, 20 bp, Artificial Sequence
  Synthetic oligonucleotide; AGG chr11 5336082 5336101 5336098 +
tcctttaactcatcctctac

SEQ ID NO: 21340 - DNA, 20 bp, Artificial Sequence
  Synthetic oligonucleotide; TGG chr11 5336091 5336110 5336107 +
tcatcctctacaggctctga

SEQ ID NO: 21341 - DNA, 20 bp, Artificial Sequence
  Synthetic oligonucleotide; TGG chr11 5336117 5336136 5336133 +
attttatatgccaatttgac

SEQ ID NO: 21342 - DNA, 20 bp, Artificial Sequence
  Synthetic oligonucleotide; GGG chr11 5336118 5336137 5336134 +
ttttatatgccaatttgact

SEQ ID NO: 21343 - DNA, 20 bp, Artificial Sequence
  Synthetic oligonucleotide; TGG chr11 5336124 5336143 5336140 +
atgccaatttgactgggcca

SEQ ID NO: 21344 - DNA, 20 bp, Artificial Sequence
  Synthetic oligonucleotide; GGG chr11 5336125 5336144 5336141 +
tgccaatttgactgggccat

SEQ ID NO: 21345 - DNA, 20 bp, Artificial Sequence
  Synthetic oligonucleotide; GGG chr11 5336126 5336145 5336142 +
gccaatttgactgggccatg

SEQ ID NO: 21346 - DNA, 20 bp, Artificial Sequence
  Synthetic oligonucleotide; TAG chr11 5336156 5336175 5336172 +
atatttgtcaaacattattc

SEQ ID NO: 21347 - DNA, 20 bp, Artificial Sequence
  Synthetic oligonucleotide; GAG chr11 5336169 5336188 5336185 +
attattctagatgtttttgt

SEQ ID NO: 21348 - DNA, 20 bp, Artificial Sequence
  Synthetic oligonucleotide; AGG chr11 5336170 5336189 5336186 +
ttattctagatgtttttgtg

SEQ ID NO: 21349 - DNA, 20 bp, Artificial Sequence
  Synthetic oligonucleotide; GGG chr11 5336171 5336190 5336187 +
tattctagatgtttttgtga

SEQ ID NO: 21350 - DNA, 20 bp, Artificial Sequence
  Synthetic oligonucleotide; TAG chr11 5336180 5336199 5336196 +
tgtttttgtgagggtgtttt

SEQ ID NO: 21351 - DNA, 20 bp, Artificial Sequence
  Synthetic oligonucleotide; AGG chr11 5336181 5336200 5336197 +
gtttttgtgagggtgttttt

SEQ ID NO: 21352 - DNA, 20 bp, Artificial Sequence
  Synthetic oligonucleotide; AAG chr11 5336185 5336204 5336201 +
ttgtgagggtgtttttaggc

SEQ ID NO: 21353 - DNA, 20 bp, Artificial Sequence
  Synthetic oligonucleotide; CGG chr11 5336202 5336221 5336218 +
ggcaagattaacatttaaat

SEQ ID NO: 21354 - DNA, 20 bp, Artificial Sequence
  Synthetic oligonucleotide; TAG chr11 5336205 5336224 5336221 +
aagattaacatttaaatcgg

SEQ ID NO: 21355 - DNA, 20 bp, Artificial Sequence
  Synthetic oligonucleotide; AAG chr11 5336211 5336230 5336227 +
aacatttaaatcggtagacc

SEQ ID NO: 21356 - DNA, 20 bp, Artificial Sequence
  Synthetic oligonucleotide; TAG chr11 5336214 5336233 5336230 +
atttaaatcggtagaccaag

SEQ ID NO: 21357 - DNA, 20 bp, Artificial Sequence
  Synthetic oligonucleotide; GAG chr11 5336216 5336235 5336232 +
ttaaatcggtagaccaagta

SEQ ID NO: 21358 - DNA, 20 bp, Artificial Sequence
  Synthetic oligonucleotide; CAG chr11 5336219 5336238 5336235 +
aatcggtagaccaagtagag

SEQ ID NO: 21359 - DNA, 20 bp, Artificial Sequence
  Synthetic oligonucleotide; TGG chr11 5336223 5336242 5336239 +
ggtagaccaagtagagcaga

SEQ ID NO: 21360 - DNA, 20 bp, Artificial Sequence
  Synthetic oligonucleotide; CAG chr11 5336238 5336257 5336254 +
gcagatggtccttcctattg

SEQ ID NO: 21361 - DNA, 20 bp, Artificial Sequence
  Synthetic oligonucleotide; AGG chr11 5336239 5336258 5336255 +
cagatggtccttcctattgc

SEQ ID NO: 21362 - DNA, 20 bp, Artificial Sequence
  Synthetic oligonucleotide; CGG chr11 5336242 5336261 5336258 +
atggtccttcctattgcagg

SEQ ID NO: 21363 - DNA, 20 bp, Artificial Sequence
  Synthetic oligonucleotide; CAG chr11 5336256 5336275 5336272 +
tgcaggcggcttcctccaat

SEQ ID NO: 21364 - DNA, 20 bp, Artificial Sequence
  Synthetic oligonucleotide; TAG chr11 5336272 5336291 5336288 +
caatcagttgaaaacctgaa

SEQ ID NO: 21365 - DNA, 20 bp, Artificial Sequence
  Synthetic oligonucleotide; AAG chr11 5336281 5336300 5336297 +
gaaaacctgaatagaacaaa

SEQ ID NO: 21366 - DNA, 20 bp, Artificial Sequence
  Synthetic oligonucleotide; CAG chr11 5336302 5336321 5336318 +
agtctgacccttccccaaat

(The sequence listing continues in the following parts.)
